United States Patent Application Publication US 2007/0134655 A1 - sequence listing, part 4

SEQ ID NO: 116739 - RNA, 32 nt, Human
ccuguaaucccagcuacaggggaggcugaggc

SEQ ID NO: 116740 - RNA, 32 nt, Human
ccuguaaucccagcuacaugggagccugaggc

SEQ ID NO: 116741 - RNA, 32 nt, Human
ccuguaaucccagcuacaugggaggcugaggu

SEQ ID NO: 116742 - RNA, 22 nt, Human
ccuguaaucccagcuacccagg

SEQ ID NO: 116743 - RNA, 23 nt, Human
ccuguaaucccagcuacccagga

SEQ ID NO: 116744 - RNA, 32 nt, Human
ccuguaaucccagcuacccaggaaggcugagg

SEQ ID NO: 116745 - RNA, 32 nt, Human
ccuguaaucccagcuacccaggaggcugagac

SEQ ID NO: 116746 - RNA, 32 nt, Human
ccuguaaucccagcuacccaggaggcugaggc

SEQ ID NO: 116747 - RNA, 22 nt, Human
ccuguaaucccagcuacccggg

SEQ ID NO: 116748 - RNA, 23 nt, Human
ccuguaaucccagcuacccggga

SEQ ID NO: 116749 - RNA, 32 nt, Human
ccuguaaucccagcuacccgggaggcugaggc

SEQ ID NO: 116750 - RNA, 32 nt, Human
ccuguaaucccagcuacccggggaggcugagg

SEQ ID NO: 116751 - RNA, 32 nt, Human
ccuguaaucccagcuacccugaaggcugaggc

SEQ ID NO: 116752 - RNA, 32 nt, Human
ccuguaaucccagcuaccggagaggcugaggc

SEQ ID NO: 116753 - RNA, 32 nt, Human
ccuguaaucccagcuaccggggaggcugaggc

SEQ ID NO: 116754 - RNA, 20 nt, Human
ccuguaaucccagcuaccug

SEQ ID NO: 116755 - RNA, 23 nt, Human
ccuguaaucccagcuaccugaga

SEQ ID NO: 116756 - RNA, 32 nt, Human
ccuguaaucccagcuaccugagaggcugaggc

SEQ ID NO: 116757 - RNA, 22 nt, Human
ccuguaaucccagcuaccuggg

SEQ ID NO: 116758 - RNA, 23 nt, Human
ccuguaaucccagcuaccuggga

SEQ ID NO: 116759 - RNA, 32 nt, Human
ccuguaaucccagcuaccugggaggcugaggc

SEQ ID NO: 116760 - RNA, 32 nt, Human
ccuguaaucccagcuaccugggaggcugaggu

SEQ ID NO: 116761 - RNA, 32 nt, Human
ccuguaaucccagcuacgcaggaggccaaggc

SEQ ID NO: 116762 - RNA, 32 nt, Human
ccuguaaucccagcuacgucaggaggcugagg

SEQ ID NO: 116763 - RNA, 32 nt, Human
ccuguaaucccagcuacgugggaggcugaggc

SEQ ID NO: 116764 - RNA, 32 nt, Human
ccuguaaucccagcuacgugggaggcugaggu

SEQ ID NO: 116765 - RNA, 18 nt, Human
ccuguaaucccagcuacu

SEQ ID NO: 116766 - RNA, 32 nt, Human
ccuguaaucccagcuacuaaggaggcugaggc

SEQ ID NO: 116767 - RNA, 32 nt, Human
ccuguaaucccagcuacuagagaggcugaggc

SEQ ID NO: 116768 - RNA, 21 nt, Human
ccuguaaucccagcuacuagg

SEQ ID NO: 116769 - RNA, 22 nt, Human
ccuguaaucccagcuacuaggg

SEQ ID NO: 116770 - RNA, 23 nt, Human
ccuguaaucccagcuacuaggga

SEQ ID NO: 116771 - RNA, 32 nt, Human
ccuguaaucccagcuacuagggagacugaggc

SEQ ID NO: 116772 - RNA, 32 nt, Human
ccuguaaucccagcuacuagggaggcggagga

SEQ ID NO: 116773 - RNA, 32 nt, Human
ccuguaaucccagcuacuagggaggcugagac

SEQ ID NO: 116774 - RNA, 32 nt, Human
ccuguaaucccagcuacuagggaggcugaggc

SEQ ID NO: 116775 - RNA, 32 nt, Human
ccuguaaucccagcuacuagggaggcugcggc

SEQ ID NO: 116776 - RNA, 32 nt, Human
ccuguaaucccagcuacucaagaggcugaggc

SEQ ID NO: 116777 - RNA, 32 nt, Human
ccuguaaucccagcuacucaagaggcugaggu

SEQ ID NO: 116778 - RNA, 32 nt, Human
ccuguaaucccagcuacucaagagguugcagu

SEQ ID NO: 116779 - RNA, 32 nt, Human
ccuguaaucccagcuacucaaggcugaggcag

SEQ ID NO: 116780 - RNA, 22 nt, Human
ccuguaaucccagcuacucaga

SEQ ID NO: 116781 - RNA, 32 nt, Human
ccuguaaucccagcuacucagaaggcugaggc

SEQ ID NO: 116782 - RNA, 32 nt, Human
ccuguaaucccagcuacucagaaggcugaggu

SEQ ID NO: 116783 - RNA, 23 nt, Human
ccuguaaucccagcuacucagag

SEQ ID NO: 116784 - RNA, 32 nt, Human
ccuguaaucccagcuacucagauggcugaggc

SEQ ID NO: 116785 - RNA, 32 nt, Human
ccuguaaucccagcuacucagcagggugaggu

SEQ ID NO: 116786 - RNA, 22 nt, Human
ccuguaaucccagcuacucagg

SEQ ID NO: 116787 - RNA, 23 nt, Human
ccuguaaucccagcuacucagga

SEQ ID NO: 116788 - RNA, 32 nt, Human
ccuguaaucccagcuacucaggaagcugaggc

SEQ ID NO: 116789 - RNA, 32 nt, Human
ccuguaaucccagcuacucaggaagcuggggu

SEQ ID NO: 116790 - RNA, 32 nt, Human
ccuguaaucccagcuacucaggaaggcugagg

SEQ ID NO: 116791 - RNA, 32 nt, Human
ccuguaaucccagcuacucaggagaaucgccc

SEQ ID NO: 116792 - RNA, 32 nt, Human
ccuguaaucccagcuacucaggagacugaggc

SEQ ID NO: 116793 - RNA, 32 nt, Human
ccuguaaucccagcuacucaggagacugaguu

SEQ ID NO: 116794 - RNA, 32 nt, Human
ccuguaaucccagcuacucaggaggaugaggc

SEQ ID NO: 116795 - RNA, 32 nt, Human
ccuguaaucccagcuacucaggaggcagagaa

SEQ ID NO: 116796 - RNA, 32 nt, Human
ccuguaaucccagcuacucaggaggccaaagc

SEQ ID NO: 116797 - RNA, 32 nt, Human
ccuguaaucccagcuacucaggaggccgaggc

SEQ ID NO: 116798 - RNA, 32 nt, Human
ccuguaaucccagcuacucaggaggcuaaggc

SEQ ID NO: 116799 - RNA, 32 nt, Human
ccuguaaucccagcuacucaggaggcuacagc

SEQ ID NO: 116800 - RNA, 32 nt, Human
ccuguaaucccagcuacucaggaggcucaggc

SEQ ID NO: 116801 - RNA, 32 nt, Human
ccuguaaucccagcuacucaggaggcugaaac

SEQ ID NO: 116802 - RNA, 32 nt, Human
ccuguaaucccagcuacucaggaggcugaagc

SEQ ID NO: 116803 - RNA, 32 nt, Human
ccuguaaucccagcuacucaggaggcugagac

SEQ ID NO: 116804 - RNA, 32 nt, Human
ccuguaaucccagcuacucaggaggcugagga

SEQ ID NO: 116805 - RNA, 32 nt, Human
ccuguaaucccagcuacucaggaggcugaggc

SEQ ID NO: 116806 - RNA, 32 nt, Human
ccuguaaucccagcuacucaggaggcugaggg

SEQ ID NO: 116807 - RNA, 32 nt, Human
ccuguaaucccagcuacucaggaggcugaggu

SEQ ID NO: 116808 - RNA, 32 nt, Human
ccuguaaucccagcuacucaggaggcugaguc

SEQ ID NO: 116809 - RNA, 32 nt, Human
ccuguaaucccagcuacucaggaggcugagug

SEQ ID NO: 116810 - RNA, 32 nt, Human
ccuguaaucccagcuacucaggaggcugggac

SEQ ID NO: 116811 - RNA, 32 nt, Human
ccuguaaucccagcuacucaggaggcuggggc

SEQ ID NO: 116812 - RNA, 32 nt, Human
ccuguaaucccagcuacucaggaggcuguggc

SEQ ID NO: 116813 - RNA, 32 nt, Human
ccuguaaucccagcuacucaggaggcuugaac

SEQ ID NO: 116814 - RNA, 32 nt, Human
ccuguaaucccagcuacucaggagggugaggc

SEQ ID NO: 116815 - RNA, 32 nt, Human
ccuguaaucccagcuacucaggagguugaggc

SEQ ID NO: 116816 - RNA, 32 nt, Human
ccuguaaucccagcuacucaggagucugagga

SEQ ID NO: 116817 - RNA, 32 nt, Human
ccuguaaucccagcuacucagggggcugaggc

SEQ ID NO: 116818 - RNA, 32 nt, Human
ccuguaaucccagcuacucagguggcuaaggc

SEQ ID NO: 116819 - RNA, 32 nt, Human
ccuguaaucccagcuacucaugaggcugaggc

SEQ ID NO: 116820 - RNA, 32 nt, Human
ccuguaaucccagcuacuccagaagcugaggc

SEQ ID NO: 116821 - RNA, 32 nt, Human
ccuguaaucccagcuacuccggaagcugaggc

SEQ ID NO: 116822 - RNA, 32 nt, Human
ccuguaaucccagcuacuccgggaggcugagg

SEQ ID NO: 116823 - RNA, 23 nt, Human
ccuguaaucccagcuacucgaga

SEQ ID NO: 116824 - RNA, 32 nt, Human
ccuguaaucccagcuacucgagaggccaaggc

SEQ ID NO: 116825 - RNA, 32 nt, Human
ccuguaaucccagcuacucgagaggcugaggc

SEQ ID NO: 116826 - RNA, 32 nt, Human
ccuguaaucccagcuacucgcaaggcugaggc

SEQ ID NO: 116827 - RNA, 21 nt, Human
ccuguaaucccagcuacucgg

SEQ ID NO: 116828 - RNA, 22 nt, Human
ccuguaaucccagcuacucgga

SEQ ID NO: 116829 - RNA, 32 nt, Human
ccuguaaucccagcuacucggaaguuugagac

SEQ ID NO: 116830 - RNA, 23 nt, Human
ccuguaaucccagcuacucggag

SEQ ID NO: 116831 - RNA, 32 nt, Human
ccuguaaucccagcuacucggaggcaggagaa

SEQ ID NO: 116832 - RNA, 32 nt, Human
ccuguaaucccagcuacucggaggcugaggca

SEQ ID NO: 116833 - RNA, 22 nt, Human
ccuguaaucccagcuacucggg

SEQ ID NO: 116834 - RNA, 23 nt, Human
ccuguaaucccagcuacucggga

SEQ ID NO: 116835 - RNA, 32 nt, Human
ccuguaaucccagcuacucgggaaccugaggc

SEQ ID NO: 116836 - RNA, 32 nt, Human
ccuguaaucccagcuacucgggaagcugaggc

SEQ ID NO: 116837 - RNA, 32 nt, Human
ccuguaaucccagcuacucgggagaccgaggc

SEQ ID NO: 116838 - RNA, 32 nt, Human
ccuguaaucccagcuacucgggagacugaggc

SEQ ID NO: 116839 - RNA, 32 nt, Human
ccuguaaucccagcuacucgggaggccaaggc

SEQ ID NO: 116840 - RNA, 32 nt, Human
ccuguaaucccagcuacucgggaggccgaggc

SEQ ID NO: 116841 - RNA, 32 nt, Human
ccuguaaucccagcuacucgggaggcggaggc

SEQ ID NO: 116842 - RNA, 32 nt, Human
ccuguaaucccagcuacucgggaggcuaaagc

SEQ ID NO: 116843 - RNA, 32 nt, Human
ccuguaaucccagcuacucgggaggcuaaggc

SEQ ID NO: 116844 - RNA, 32 nt, Human
ccuguaaucccagcuacucgggaggcugacgc

SEQ ID NO: 116845 - RNA, 32 nt, Human
ccuguaaucccagcuacucgggaggcugagac

SEQ ID NO: 116846 - RNA, 32 nt, Human
ccuguaaucccagcuacucgggaggcugagau

SEQ ID NO: 116847 - RNA, 32 nt, Human
ccuguaaucccagcuacucgggaggcugagga

SEQ ID NO: 116848 - RNA, 32 nt, Human
ccuguaaucccagcuacucgggaggcugaggc

SEQ ID NO: 116849 - RNA, 32 nt, Human
ccuguaaucccagcuacucgggaggcugaggg

SEQ ID NO: 116850 - RNA, 32 nt, Human
ccuguaaucccagcuacucgggaggcugaggu

SEQ ID NO: 116851 - RNA, 32 nt, Human
ccuguaaucccagcuacucgggaggcugaguc

SEQ ID NO: 116852 - RNA, 32 nt, Human
ccuguaaucccagcuacucgggaggcugcggc

SEQ ID NO: 116853 - RNA, 32 nt, Human
ccuguaaucccagcuacucgggaggcuguaau

SEQ ID NO: 116854 - RNA, 32 nt, Human
ccuguaaucccagcuacucgggaggcuguggc

SEQ ID NO: 116855 - RNA, 32 nt, Human
ccuguaaucccagcuacucgggaggcuuagac

SEQ ID NO: 116856 - RNA, 32 nt, Human
ccuguaaucccagcuacucgggagggugaggc

SEQ ID NO: 116857 - RNA, 32 nt, Human
ccuguaaucccagcuacucgggaggugaggca

SEQ ID NO: 116858 - RNA, 32 nt, Human
ccuguaaucccagcuacucgggagguugaggc

SEQ ID NO: 116859 - RNA, 32 nt, Human
ccuguaaucccagcuacucgggagguugaggg

SEQ ID NO: 116860 - RNA, 32 nt, Human
ccuguaaucccagcuacucgggagguuuaggc

SEQ ID NO: 116861 - RNA, 32 nt, Human
ccuguaaucccagcuacucgggagucucaggc

SEQ ID NO: 116862 - RNA, 32 nt, Human
ccuguaaucccagcuacucgggcagcugagac

SEQ ID NO: 116863 - RNA, 32 nt, Human
ccuguaaucccagcuacucgguaggcugaggc

SEQ ID NO: 116864 - RNA, 22 nt, Human
ccuguaaucccagcuacucuga

SEQ ID NO: 116865 - RNA, 32 nt, Human
ccuguaaucccagcuacucugaagccugaggc

SEQ ID NO: 116866 - RNA, 22 nt, Human
ccuguaaucccagcuacucugg

SEQ ID NO: 116867 - RNA, 23 nt, Human
ccuguaaucccagcuacucugga

SEQ ID NO: 116868 - RNA, 32 nt, Human
ccuguaaucccagcuacucuggaggcuaaggc

SEQ ID NO: 116869 - RNA, 32 nt, Human
ccuguaaucccagcuacucuggaggcugagac

SEQ ID NO: 116870 - RNA, 32 nt, Human
ccuguaaucccagcuacucuggaggcugagau

SEQ ID NO: 116871 - RNA, 32 nt, Human
ccuguaaucccagcuacucuggaggcugaggc

SEQ ID NO: 116872 - RNA, 32 nt, Human
ccuguaaucccagcuacucuggaggcuggggc

SEQ ID NO: 116873 - RNA, 32 nt, Human
ccuguaaucccagcuacucuggagggugaggc

SEQ ID NO: 116874 - RNA, 32 nt, Human
ccuguaaucccagcuacugagggggcugaggc

SEQ ID NO: 116875 - RNA, 21 nt, Human
ccuguaaucccagcuacuggg

SEQ ID NO: 116876 - RNA, 32 nt, Human
ccuguaaucccagcuacugggaaggcugaggu

SEQ ID NO: 116877 - RNA, 32 nt, Human
ccuguaaucccagcuacuggggaaagcugagg

SEQ ID NO: 116878 - RNA, 32 nt, Human
ccuguaaucccagcuacuggggaggcugaggc

SEQ ID NO: 116879 - RNA, 22 nt, Human
ccuguaaucccagcuacuuagg

SEQ ID NO: 116880 - RNA, 23 nt, Human
ccuguaaucccagcuacuuagga

SEQ ID NO: 116881 - RNA, 32 nt, Human
ccuguaaucccagcuacuuaggaggcugaggc

SEQ ID NO: 116882 - RNA, 32 nt, Human
ccuguaaucccagcuacuuaggaggcugaggu

SEQ ID NO: 116883 - RNA, 32 nt, Human
ccuguaaucccagcuacuuaggaggcugaugc

SEQ ID NO: 116884 - RNA, 32 nt, Human
ccuguaaucccagcuacuucggagguugaguc

SEQ ID NO: 116885 - RNA, 32 nt, Human
ccuguaaucccagcuacuugagaggcagaggc

SEQ ID NO: 116886 - RNA, 32 nt, Human
ccuguaaucccagcuacuugagagucugaagc

SEQ ID NO: 116887 - RNA, 21 nt, Human
ccuguaaucccagcuacuugg

SEQ ID NO: 116888 - RNA, 22 nt, Human
ccuguaaucccagcuacuugga

SEQ ID NO: 116889 - RNA, 32 nt, Human
ccuguaaucccagcuacuuggaaggcugaggc

SEQ ID NO: 116890 - RNA, 32 nt, Human
ccuguaaucccagcuacuuggaaggcugaggu

SEQ ID NO: 116891 - RNA, 24 nt, Human
ccuguaaucccagcuacuuggaga

SEQ ID NO: 116892 - RNA, 32 nt, Human
ccuguaaucccagcuacuuggcaggcugaggu

SEQ ID NO: 116893 - RNA, 22 nt, Human
ccuguaaucccagcuacuuggg

SEQ ID NO: 116894 - RNA, 23 nt, Human
ccuguaaucccagcuacuuggga

SEQ ID NO: 116895 - RNA, 32 nt, Human
ccuguaaucccagcuacuugggaagcugaagc

SEQ ID NO: 116896 - RNA, 32 nt, Human
ccuguaaucccagcuacuugggaagcugagac

SEQ ID NO: 116897 - RNA, 32 nt, Human
ccuguaaucccagcuacuugggaagcugaggc

SEQ ID NO: 116898 - RNA, 32 nt, Human
ccuguaaucccagcuacuugggagacugagac

SEQ ID NO: 116899 - RNA, 32 nt, Human
ccuguaaucccagcuacuugggagacugaggc

SEQ ID NO: 116900 - RNA, 32 nt, Human
ccuguaaucccagcuacuugggagccugaggc

SEQ ID NO: 116901 - RNA, 32 nt, Human
ccuguaaucccagcuacuugggaggcagagaa

SEQ ID NO: 116902 - RNA, 32 nt, Human
ccuguaaucccagcuacuugggaggccgaggc

SEQ ID NO: 116903 - RNA, 32 nt, Human
ccuguaaucccagcuacuugggaggcuaaggc

SEQ ID NO: 116904 - RNA, 32 nt, Human
ccuguaaucccagcuacuugggaggcugaaac

SEQ ID NO: 116905 - RNA, 32 nt, Human
ccuguaaucccagcuacuugggaggcugaagc

SEQ ID NO: 116906 - RNA, 32 nt, Human
ccuguaaucccagcuacuugggaggcugacgc

SEQ ID NO: 116907 - RNA, 32 nt, Human
ccuguaaucccagcuacuugggaggcugagac

SEQ ID NO: 116908 - RNA, 32 nt, Human
ccuguaaucccagcuacuugggaggcugagau

SEQ ID NO: 116909 - RNA, 32 nt, Human
ccuguaaucccagcuacuugggaggcugagcc

SEQ ID NO: 116910 - RNA, 32 nt, Human
ccuguaaucccagcuacuugggaggcugaggc

SEQ ID NO: 116911 - RNA, 32 nt, Human
ccuguaaucccagcuacuugggaggcugaggu

SEQ ID NO: 116912 - RNA, 32 nt, Human
ccuguaaucccagcuacuugggaggcugaguu

SEQ ID NO: 116913 - RNA, 32 nt, Human
ccuguaaucccagcuacuugggaggcuguggc

SEQ ID NO: 116914 - RNA, 32 nt, Human
ccuguaaucccagcuacuugggagucugaggc

SEQ ID NO: 116915 - RNA, 32 nt, Human
ccuguaaucccagcuacuuggguggcugaggc

SEQ ID NO: 116916 - RNA, 22 nt, Human
ccuguaaucccagcuacuuuga

SEQ ID NO: 116917 - RNA, 32 nt, Human
ccuguaaucccagcuacuuugguggcugaggc

SEQ ID NO: 116918 - RNA, 32 nt, Human
ccuguaaucccagcuaggaggcugagacagga

SEQ ID NO: 116919 - RNA, 32 nt, Human
ccuguaaucccagcuauauaggaggcugaggc

SEQ ID NO: 116920 - RNA, 32 nt, Human
ccuguaaucccagcuauuagggaggcugaggc

SEQ ID NO: 116921 - RNA, 23 nt, Human
ccuguaaucccagcuauucacga

SEQ ID NO: 116922 - RNA, 32 nt, Human
ccuguaaucccagcuauucacgaggcugaggc

SEQ ID NO: 116923 - RNA, 22 nt, Human
ccuguaaucccagcuauucagg

SEQ ID NO: 116924 - RNA, 23 nt, Human
ccuguaaucccagcuauucagga

SEQ ID NO: 116925 - RNA, 32 nt, Human
ccuguaaucccagcuauucaggaggcugaggc

SEQ ID NO: 116926 - RNA, 32 nt, Human
ccuguaaucccagcuauucaggagguugaggc

SEQ ID NO: 116927 - RNA, 32 nt, Human
ccuguaaucccagcuauucggaaggcugaggc

SEQ ID NO: 116928 - RNA, 27 nt, Human
ccuguaaucccagcuauucggcugagg

SEQ ID NO: 116929 - RNA, 32 nt, Human
ccuguaaucccagcuauucggcugaggcacga

SEQ ID NO: 116930 - RNA, 32 nt, Human
ccuguaaucccagcuauucgggagccugaggc

SEQ ID NO: 116931 - RNA, 32 nt, Human
ccuguaaucccagcuauucgggaggcugaggc

SEQ ID NO: 116932 - RNA, 32 nt, Human
ccuguaaucccagcuauuuggcaggcugaggc

SEQ ID NO: 116933 - RNA, 32 nt, Human
ccuguaaucccagcuauuugggaggccaaggc

SEQ ID NO: 116934 - RNA, 32 nt, Human
ccuguaaucccagcuauuugggaggcugaggc

SEQ ID NO: 116935 - RNA, 19 nt, Human
ccuguaaucccagcucuuu

SEQ ID NO: 116936 - RNA, 22 nt, Human
ccuguaaucccagcucuuugga

SEQ ID NO: 116937 - RNA, 22 nt, Human
ccuguaaucccagcucuuuggg

SEQ ID NO: 116938 - RNA, 23 nt, Human
ccuguaaucccagcucuuuggga

SEQ ID NO: 116939 - RNA, 23 nt, Human
ccuguaaucccagcugcccagga

SEQ ID NO: 116940 - RNA, 32 nt, Human
ccuguaaucccagcugcucaggagacugaggc

SEQ ID NO: 116941 - RNA, 32 nt, Human
ccuguaaucccagcugcucaggagccuggcaa

SEQ ID NO: 116942 - RNA, 32 nt, Human
ccuguaaucccagcugcucaggaggcugaggc

SEQ ID NO: 116943 - RNA, 22 nt, Human
ccuguaaucccagcugcucggg

SEQ ID NO: 116944 - RNA, 23 nt, Human
ccuguaaucccagcugcucggga

SEQ ID NO: 116945 - RNA, 22 nt, Human
ccuguaaucccagcugcucugg

SEQ ID NO: 116946 - RNA, 23 nt, Human
ccuguaaucccagcugcucugga

SEQ ID NO: 116947 - RNA, 22 nt, Human
ccuguaaucccagcuguuuggg

SEQ ID NO: 116948 - RNA, 23 nt, Human
ccuguaaucccagcuguuuggga

SEQ ID NO: 116949 - RNA, 32 nt, Human
ccuguaaucccagcuucucaggagucugaggc

SEQ ID NO: 116950 - RNA, 23 nt, Human
ccuguaaucccagcuucuuggga

SEQ ID NO: 116951 - RNA, 32 nt, Human
ccuguaaucccaggacuuuaggaggccaaggc

SEQ ID NO: 116952 - RNA, 32 nt, Human
ccuguaaucccagggacucaggaugcugaagu

SEQ ID NO: 116953 - RNA, 32 nt, Human
ccuguaaucccagguacucaggaggcugaggc

SEQ ID NO: 116954 - RNA, 19 nt, Human
ccuguaaucccaguacuuu

SEQ ID NO: 116955 - RNA, 32 nt, Human
ccuguaaucccagugauucaggagacugaggu

SEQ ID NO: 116956 - RNA, 23 nt, Human
ccuguaaucccaguuacucagga

SEQ ID NO: 116957 - RNA, 32 nt, Human
ccuguaaucccaguuacucaggaggcaaaggc

SEQ ID NO: 116958 - RNA, 32 nt, Human
ccuguaaucccaguuacucaggaggcugaagc

SEQ ID NO: 116959 - RNA, 32 nt, Human
ccuguaaucccaguuacucaggaggcugaggc

SEQ ID NO: 116960 - RNA, 22 nt, Human
ccuguaaucccaguuacuuggg

SEQ ID NO: 116961 - RNA, 23 nt, Human
ccuguaaucccaguuacuuggga

SEQ ID NO: 116962 - RNA, 23 nt, Human
ccuguaaucccaguuccuuggga

SEQ ID NO: 116963 - RNA, 32 nt, Human
ccuguaaucccggcuacucaggaggcugaggc

SEQ ID NO: 116964 - RNA, 22 nt, Human
ccuguaaucccggcuacucggg

SEQ ID NO: 116965 - RNA, 23 nt, Human
ccuguaaucccggcuacucggga

SEQ ID NO: 116966 - RNA, 32 nt, Human
ccuguaaucccugcuacucaggaggcugagga

SEQ ID NO: 116967 - RNA, 19 nt, Human
ccuguaauccuagcacuuu

SEQ ID NO: 116968 - RNA, 32 nt, Human
ccuguaauccuagcuacucaggagccugaggc

SEQ ID NO: 116969 - RNA, 32 nt, Human
ccuguaauccuagcuacucaggaggcugaggc

SEQ ID NO: 116970 - RNA, 22 nt, Human
ccuguaauccuagcuacucggg

SEQ ID NO: 116971 - RNA, 23 nt, Human
ccuguaauccuagcuacucggga

SEQ ID NO: 116972 - RNA, 32 nt, Human
ccuguaauccuagcuacucgggaggcugaggc

SEQ ID NO: 116973 - RNA, 32 nt, Human
ccuguaauccuagcuacucgggaggcuguggc

SEQ ID NO: 116974 - RNA, 22 nt, Human
ccuguaauccuagcuacuuggg

SEQ ID NO: 116975 - RNA, 23 nt, Human
ccuguaauccuagcuacuuggga

SEQ ID NO: 116976 - RNA, 32 nt, Human
ccuguaaucgcagcuacucaggaagcugaggc

SEQ ID NO: 116977 - RNA, 32 nt, Human
ccuguaaucgcagcuacucaggaggcugaggc

SEQ ID NO: 116978 - RNA, 32 nt, Human
ccuguaaucucagcaacucaggaggcugaggc

SEQ ID NO: 116979 - RNA, 32 nt, Human
ccuguaaucucagcuacuagagaggcugaggc

SEQ ID NO: 116980 - RNA, 32 nt, Human
ccuguaaucucagcuacuagggacgcugaggc

SEQ ID NO: 116981 - RNA, 32 nt, Human
ccuguaaucucagcuacucaagaggcugaggu

SEQ ID NO: 116982 - RNA, 23 nt, Human
ccuguaaucucagcuacucagga

SEQ ID NO: 116983 - RNA, 32 nt, Human
ccuguaaucucagcuacucaggagacugaggg

SEQ ID NO: 116984 - RNA, 32 nt, Human
ccuguaaucucagcuacucaggaggaugaggc

SEQ ID NO: 116985 - RNA, 32 nt, Human
ccuguaaucucagcuacucaggaggcugaggc

SEQ ID NO: 116986 - RNA, 32 nt, Human
ccuguaaucucagcuacucaggaggcugaggu

SEQ ID NO: 116987 - RNA, 32 nt, Human
ccuguaaucucagcuacucaggagguugaggc

SEQ ID NO: 116988 - RNA, 22 nt, Human
ccuguaaucucagcuacucggg

SEQ ID NO: 116989 - RNA, 23 nt, Human
ccuguaaucucagcuacucggga

SEQ ID NO: 116990 - RNA, 32 nt, Human
ccuguaaucucagcuacucgggaggcugaggc

SEQ ID NO: 116991 - RNA, 21 nt, Human
ccuguaaucucagcuacugga

SEQ ID NO: 116992 - RNA, 23 nt, Human
ccuguaaucucagcuacuggaga

SEQ ID NO: 116993 - RNA, 32 nt, Human
ccuguaaucucagcuacuggagaggcugaggc

SEQ ID NO: 116994 - RNA, 32 nt, Human
ccuguaaucucagcuacuugaaaggcugaggc

SEQ ID NO: 116995 - RNA, 32 nt, Human
ccuguaaucucagcuacuugagaggcugaggc

SEQ ID NO: 116996 - RNA, 32 nt, Human
ccuguaaucucagcuacuuggcuggcugagac

SEQ ID NO: 116997 - RNA, 32 nt, Human
ccuguaaucucagcuacuugggagccuggggc

SEQ ID NO: 116998 - RNA, 32 nt, Human
ccuguaaucucagcuacuugggaggcugaagc

SEQ ID NO: 116999 - RNA, 32 nt, Human
ccuguaaucucagcuacuugggaggcugacgc

SEQ ID NO: 117000 - RNA, 32 nt, Human
ccuguaaucucagcuacuugggaggcugagac

SEQ ID NO: 117001 - RNA, 32 nt, Human
ccuguaaucucagcuacuugggaggcugaggc

SEQ ID NO: 117002 - RNA, 32 nt, Human
ccuguaaucucagguacucaggaggcugaggc

SEQ ID NO: 117003 - RNA, 23 nt, Human
ccuguaaucucaguuacucagga

SEQ ID NO: 117004 - RNA, 32 nt, Human
ccuguaaucucaguuacucaggaggcugaagc

SEQ ID NO: 117005 - RNA, 32 nt, Human
ccuguaaucucaguuacucaggaggcugaguc

SEQ ID NO: 117006 - RNA, 32 nt, Human
ccuguaaugccagcuacucaggaggcugaggc

SEQ ID NO: 117007 - RNA, 32 nt, Human
ccuguaaugccagcuacucgggaggcugaggc

SEQ ID NO: 117008 - RNA, 22 nt, Human
ccuguaaugccagcuacuuggg

SEQ ID NO: 117009 - RNA, 23 nt, Human
ccuguaaugccagcuacuuggga

SEQ ID NO: 117010 - RNA, 32 nt, Human
ccuguaaugccagcuacuugggaaggcugagg

SEQ ID NO: 117011 - RNA, 32 nt, Human
ccuguaaugccagcuacuugggaggcugaggc

SEQ ID NO: 117012 - RNA, 22 nt, Human
ccuguaaugucagcuacuuggg

SEQ ID NO: 117013 - RNA, 23 nt, Human
ccuguaaugucagcuacuuggga

SEQ ID NO: 117014 - RNA, 32 nt, Human
ccuguaaugucagcuacuugggaggcugaggc

SEQ ID NO: 117015 - RNA, 19 nt, Human
ccuguaauuccagcacuuu

SEQ ID NO: 117016 - RNA, 22 nt, Human
ccuguaauuccagcuacucagg

SEQ ID NO: 117017 - RNA, 23 nt, Human
ccuguaauuccagcuacucagga

SEQ ID NO: 117018 - RNA, 32 nt, Human
ccuguaauuccagcuacucaggaggcugaggc

SEQ ID NO: 117019 - RNA, 32 nt, Human
ccuguaauuccagcuacucaggagucugaggc

SEQ ID NO: 117020 - RNA, 32 nt, Human
ccuguaauuccagcuacucaggggguugaggc

SEQ ID NO: 117021 - RNA, 22 nt, Human
ccuguaauuccagcuacucggg

SEQ ID NO: 117022 - RNA, 23 nt, Human
ccuguaauuccagcuacucggga

SEQ ID NO: 117023 - RNA, 32 nt, Human
ccuguaauuccagcuacucgggaggcuaaggc

SEQ ID NO: 117024 - RNA, 32 nt, Human
ccuguaauuccagcuacucgggaggcugaggc

SEQ ID NO: 117025 - RNA, 32 nt, Human
ccuguaauuccagcuacucuggaagcugaggc

SEQ ID NO: 117026 - RNA, 32 nt, Human
ccuguaauuccagcuacucuggcugcugaggc

SEQ ID NO: 117027 - RNA, 32 nt, Human
ccuguaauuccagcuacuuggaggcugaggcg

SEQ ID NO: 117028 - RNA, 32 nt, Human
ccuguaauuccagcuacuugggaggcugaggc

SEQ ID NO: 117029 - RNA, 32 nt, Human
ccuguaauucuagcacuuugggagacugaagc

SEQ ID NO: 117030 - RNA, 23 nt, Human
ccuguaauuucagcuacucggga

SEQ ID NO: 117031 - RNA, 32 nt, Human
ccuguacacccacccaagacuccugcaaugca

SEQ ID NO: 117032 - RNA, 32 nt, Human
ccuguacagacaguuaauaucacugcaggcuu

SEQ ID NO: 117033 - RNA, 32 nt, Human
ccuguacagggaugugaugcuggagaacuaug

SEQ ID NO: 117034 - RNA, 32 nt, Human
ccuguacagggaugugaugcuggagaauuaug

SEQ ID NO: 117035 - RNA, 32 nt, Human
ccuguacauagucuucgugucuuucuggaccc

SEQ ID NO: 117036 - RNA, 32 nt, Human
ccuguacauauguguguguggguauguguuua

SEQ ID NO: 117037 - RNA, 32 nt, Human
ccuguacaucacaacaaguagcuuuuccuccu

SEQ ID NO: 117038 - RNA, 19 nt, Human
ccuguaccacaaacacauu

SEQ ID NO: 117039 - RNA, 32 nt, Human
ccuguaccaccugaaaacagaucacacauaua

SEQ ID NO: 117040 - RNA, 32 nt, Human
ccuguaccagagugccugguggaggggccugg

SEQ ID NO: 117041 - RNA, 32 nt, Human
ccuguaccagguccccggccagcugggccccu

SEQ ID NO: 117042 - RNA, 32 nt, Human
ccuguaccaguaggagaucagaaaaauggagc

SEQ ID NO: 117043 - RNA, 32 nt, Human
ccuguacccaccugcugaccugcuguuuggua

SEQ ID NO: 117044 - RNA, 32 nt, Human
ccuguacccaguccccagccucagguggugcu

SEQ ID NO: 117045 - RNA, 32 nt, Human
ccuguaccccgccuuuuccgcauaggcaugug

SEQ ID NO: 117046 - RNA, 32 nt, Human
ccuguaccgagcucugucuguuccagccuaca

SEQ ID NO: 117047 - RNA, 32 nt, Human
ccuguaccuauuuuucccuccucucucucuga

SEQ ID NO: 117048 - RNA, 32 nt, Human
ccuguaccuguacaacgucagccaccccugcg

SEQ ID NO: 117049 - RNA, 32 nt, Human
ccuguaccuuucucccccaacaggaucagacc

SEQ ID NO: 117050 - RNA, 21 nt, Human
ccuguacuaaaccaccucaga

SEQ ID NO: 117051 - RNA, 32 nt, Human
ccuguacucccagcacuucaggaagcugaggu

SEQ ID NO: 117052 - RNA, 19 nt, Human
ccuguacucccagcacuuu

SEQ ID NO: 117053 - RNA, 32 nt, Human
ccuguacucccagcacuuuuggaggccgagac

SEQ ID NO: 117054 - RNA, 32 nt, Human
ccuguacucccagcuacucaggaggcugaggc

SEQ ID NO: 117055 - RNA, 22 nt, Human
ccuguacucccagcuacucggg

SEQ ID NO: 117056 - RNA, 32 nt, Human
ccuguacucuccagcauggcacgaggagaagc

SEQ ID NO: 117057 - RNA, 32 nt, Human
ccuguacugcagugucuggagguugcgggaag

SEQ ID NO: 117058 - RNA, 32 nt, Human
ccuguacugcugcugcugcugcucagggcuuc

SEQ ID NO: 117059 - RNA, 32 nt, Human
ccuguacuguacuccagccugggaaacaaugc

SEQ ID NO: 117060 - RNA, 32 nt, Human
ccuguacuuccucuuuccuuuccaaaugggaa

SEQ ID NO: 117061 - RNA, 32 nt, Human
ccuguacuugggugagggauguuggacagagc

SEQ ID NO: 117062 - RNA, 32 nt, Human
ccuguagaaagaggaguauggaacaaccuuac

SEQ ID NO: 117063 - RNA, 32 nt, Human
ccuguagaacagggguccuggggaaggugucc

SEQ ID NO: 117064 - RNA, 24 nt, Human
ccuguagaccugaggggucccucu

SEQ ID NO: 117065 - RNA, 32 nt, Human
ccuguagagaucaucuuuacaguuccucggga

SEQ ID NO: 117066 - RNA, 32 nt, Human
ccuguagagaucuguauguagcuguucacuug

SEQ ID NO: 117067 - RNA, 32 nt, Human
ccuguagagaugguuacaaugccuggcgugau

SEQ ID NO: 117068 - RNA, 32 nt, Human
ccuguagaggaaugugaugcuggagaacuaca

SEQ ID NO: 117069 - RNA, 24 nt, Human
ccuguagaggucaggagucaggag

SEQ ID NO: 117070 - RNA, 32 nt, Human
ccuguagauuagugaacagaaaauugcuuugg

SEQ ID NO: 117071 - RNA, 32 nt, Human
ccuguagcacacacagaggcuuugggaccccg

SEQ ID NO: 117072 - RNA, 32 nt, Human
ccuguagccccagcuacucgggaggcugaggc

SEQ ID NO: 117073 - RNA, 32 nt, Human
ccuguagccccagcuacuugggaggcugaagc

SEQ ID NO: 117074 - RNA, 32 nt, Human
ccuguagccccagcuacuugggaggcugaggc

SEQ ID NO: 117075 - RNA, 22 nt, Human
ccuguagccccauuuucugaca

SEQ ID NO: 117076 - RNA, 24 nt, Human
ccuguagcccccugcccuggcaca

SEQ ID NO: 117077 - RNA, 32 nt, Human
ccuguagcccuagcuacucuggaggcugaggc

SEQ ID NO: 117078 - RNA, 32 nt, Human
ccuguagcccuugagugacuuugguuaacuug

SEQ ID NO: 117079 - RNA, 32 nt, Human
ccuguagcuggaauacgcaucucuccagcauu

SEQ ID NO: 117080 - RNA, 32 nt, Human
ccuguagcuuuucuuuuucuccaggcugggcc

SEQ ID NO: 117081 - RNA, 22 nt, Human
ccuguaggaaaaaauauguuaa

SEQ ID NO: 117082 - RNA, 32 nt, Human
ccuguaggagacaagacacggggagauccaag

SEQ ID NO: 117083 - RNA, 32 nt, Human
ccuguaggauacuuaaaagauaguccacuucu

SEQ ID NO: 117084 - RNA, 21 nt, Human
ccuguaggcaggaggcuacag

SEQ ID NO: 117085 - RNA, 24 nt, Human
ccuguaggcuaugguacuucuucc

SEQ ID NO: 117086 - RNA, 23 nt, Human
ccuguagggagaccccuccuuuu

SEQ ID NO: 117087 - RNA, 32 nt, Human
ccuguagggagguguauggccggagugagggc

SEQ ID NO: 117088 - RNA, 32 nt, Human
ccuguaguaccagcuacucuggaggcugaggc

SEQ ID NO: 117089 - RNA, 21 nt, Human
ccuguagucaaaaucugguca

SEQ ID NO: 117090 - RNA, 23 nt, Human
ccuguagucacagcuacuccaga

SEQ ID NO: 117091 - RNA, 22 nt, Human
ccuguagucacagcuacucggg

SEQ ID NO: 117092 - RNA, 23 nt, Human
ccuguagucacagcuacucggga

SEQ ID NO: 117093 - RNA, 32 nt, Human
ccuguagucacagcuacuugggagacugaggu

SEQ ID NO: 117094 - RNA, 32 nt, Human
ccuguaguccaagcuacucaagaggcugaggu

SEQ ID NO: 117095 - RNA, 22 nt, Human
ccuguaguccaagcuacuuggg

SEQ ID NO: 117096 - RNA, 23 nt, Human
ccuguaguccaagcuacuuggga

SEQ ID NO: 117097 - RNA, 32 nt, Human
ccuguaguccagcugagggacacacaucccug

SEQ ID NO: 117098 - RNA, 32 nt, Human
ccuguagucccaacuacucaggaggcugaggc

SEQ ID NO: 117099 - RNA, 32 nt, Human
ccuguagucccaacuacucaggaggcuggggc

SEQ ID NO: 117100 - RNA, 22 nt, Human
ccuguagucccaacuacucggg

SEQ ID NO: 117101 - RNA, 23 nt, Human
ccuguagucccaacuacucggga

SEQ ID NO: 117102 - RNA, 21 nt, Human
ccuguagucccaacuauucgg

SEQ ID NO: 117103 - RNA, 32 nt, Human
ccuguagucccagauacucaggaggcugaggu

SEQ ID NO: 117104 - RNA, 22 nt, Human
ccuguagucccagauacuuggg

SEQ ID NO: 117105 - RNA, 23 nt, Human
ccuguagucccagauacuuggga

SEQ ID NO: 117106 - RNA, 32 nt, Human
ccuguagucccagcaacucaggaggcugaggc

SEQ ID NO: 117107 - RNA, 22 nt, Human
ccuguagucccagcaacucggg

SEQ ID NO: 117108 - RNA, 23 nt, Human
ccuguagucccagcaacucggga

SEQ ID NO: 117109 - RNA, 19 nt, Human
ccuguagucccagcacuuu

SEQ ID NO: 117110 - RNA, 22 nt, Human
ccuguagucccagcacuuuagg

SEQ ID NO: 117111 - RNA, 22 nt, Human
ccuguagucccagcacuuuggg

SEQ ID NO: 117112 - RNA, 23 nt, Human
ccuguagucccagcacuuuggga

SEQ ID NO: 117113 - RNA, 19 nt, Human
ccuguagucccagcagcuu

SEQ ID NO: 117114 - RNA, 23 nt, Human
ccuguagucccagccaccaggga

SEQ ID NO: 117115 - RNA, 22 nt, Human
ccuguagucccagccaccuggg

SEQ ID NO: 117116 - RNA, 23 nt, Human
ccuguagucccagccaccuggga

SEQ ID NO: 117117 - RNA, 32 nt, Human
ccuguagucccagcuaacugggaggcugaggc

SEQ ID NO: 117118 - RNA, 32 nt, Human
ccuguagucccagcuaaucaggaggcugaggc

SEQ ID NO: 117119 - RNA, 32 nt, Human
ccuguagucccagcuacacgggaggcuaaggu

SEQ ID NO: 117120 - RNA, 32 nt, Human
ccuguagucccagcuacacgggaggcugaggc

SEQ ID NO: 117121 - RNA, 32 nt, Human
ccuguagucccagcuacacgggaggcuuaggc

SEQ ID NO: 117122 - RNA, 21 nt, Human
ccuguagucccagcuacagga

SEQ ID NO: 117123 - RNA, 23 nt, Human
ccuguagucccagcuacauggga

SEQ ID NO: 117124 - RNA, 32 nt, Human
ccuguagucccagcuacaugggaggcugaggc

SEQ ID NO: 117125 - RNA, 32 nt, Human
ccuguagucccagcuacaugggaggcugaggu

SEQ ID NO: 117126 - RNA, 21 nt, Human
ccuguagucccagcuaccagg

SEQ ID NO: 117127 - RNA, 23 nt, Human
ccuguagucccagcuaccaggga

SEQ ID NO: 117128 - RNA, 32 nt, Human
ccuguagucccagcuacccaggaggcugaagc

SEQ ID NO: 117129 - RNA, 22 nt, Human
ccuguagucccagcuacccggg

SEQ ID NO: 117130 - RNA, 23 nt, Human
ccuguagucccagcuacccggga

SEQ ID NO: 117131 - RNA, 32 nt, Human
ccuguagucccagcuacccgggaggcugaggc

SEQ ID NO: 117132 - RNA, 32 nt, Human
ccuguagucccagcuaccuaggaggcugaggc

SEQ ID NO: 117133 - RNA, 32 nt, Human
ccuguagucccagcuaccugggaggcugaggu

SEQ ID NO: 117134 - RNA, 32 nt, Human
ccuguagucccagcuacgugagaggcugaggu

SEQ ID NO: 117135 - RNA, 32 nt, Human
ccuguagucccagcuacgugggaggcugaggc

SEQ ID NO: 117136 - RNA, 21 nt, Human
ccuguagucccagcuacuagg

SEQ ID NO: 117137 - RNA, 32 nt, Human
ccuguagucccagcuacuaggaaggcugaggc

SEQ ID NO: 117138 - RNA, 23 nt, Human
ccuguagucccagcuacuaggga

SEQ ID NO: 117139 - RNA, 32 nt, Human
ccuguagucccagcuacuagggaggcugagcc

SEQ ID NO: 117140 - RNA, 32 nt, Human
ccuguagucccagcuacuagggaggcugaggc

SEQ ID NO: 117141 - RNA, 32 nt, Human
ccuguagucccagcuacuauggagguugaggu

SEQ ID NO: 117142 - RNA, 22 nt, Human
ccuguagucccagcuacucaag

SEQ ID NO: 117143 - RNA, 32 nt, Human
ccuguagucccagcuacucaagaggcugaggc

SEQ ID NO: 117144 - RNA, 32 nt, Human
ccuguagucccagcuacucaaguggcuaaggu

SEQ ID NO: 117145 - RNA, 32 nt, Human
ccuguagucccagcuacucagaagggugaggc

SEQ ID NO: 117146 - RNA, 22 nt, Human
ccuguagucccagcuacucagg

SEQ ID NO: 117147 - RNA, 23 nt, Human
ccuguagucccagcuacucagga

SEQ ID NO: 117148 - RNA, 32 nt, Human
ccuguagucccagcuacucaggaagcugaggu

SEQ ID NO: 117149 - RNA, 32 nt, Human
ccuguagucccagcuacucaggagacugaggc

SEQ ID NO: 117150 - RNA, 32 nt, Human
ccuguagucccagcuacucaggaggccaaggu

SEQ ID NO: 117151 - RNA, 32 nt, Human
ccuguagucccagcuacucaggaggcuaaagc

SEQ ID NO: 117152 - RNA, 32 nt, Human
ccuguagucccagcuacucaggaggcuaaggc

SEQ ID NO: 117153 - RNA, 32 nt, Human
ccuguagucccagcuacucaggaggcuagagc

SEQ ID NO: 117154 - RNA, 32 nt, Human
ccuguagucccagcuacucaggaggcucagca

SEQ ID NO: 117155 - RNA, 32 nt, Human
ccuguagucccagcuacucaggaggcugaagc

SEQ ID NO: 117156 - RNA, 32 nt, Human
ccuguagucccagcuacucaggaggcugagac

SEQ ID NO: 117157 - RNA, 32 nt, Human
ccuguagucccagcuacucaggaggcugagga

SEQ ID NO: 117158 - RNA, 32 nt, Human
ccuguagucccagcuacucaggaggcugaggc

SEQ ID NO: 117159 - RNA, 32 nt, Human
ccuguagucccagcuacucaggaggcugaggu

SEQ ID NO: 117160 - RNA, 32 nt, Human
ccuguagucccagcuacucaggaggcugggga

SEQ ID NO: 117161 - RNA, 32 nt, Human
ccuguagucccagcuacucaggaggcuggggc

SEQ ID NO: 117162 - RNA, 32 nt, Human
ccuguagucccagcuacucaggaggcuugccu

SEQ ID NO: 117163 - RNA, 32 nt, Human
ccuguagucccagcuacucaggaggcuugggu

SEQ ID NO: 117164 - RNA, 32 nt, Human
ccuguagucccagcuacucaggagguugaagu

SEQ ID NO: 117165 - RNA, 32 nt, Human
ccuguagucccagcuacucaggagguugaggu

SEQ ID NO: 117166 - RNA, 32 nt, Human
ccuguagucccagcuacucaggagucugagcu

SEQ ID NO: 117167 - RNA, 32 nt, Human
ccuguagucccagcuacucaggaugcugaagc

SEQ ID NO: 117168 - RNA, 32 nt, Human
ccuguagucccagcuacucaggauucugaggc

SEQ ID NO: 117169 - RNA, 32 nt, Human
ccuguagucccagcuacucagggcugaggcag

SEQ ID NO: 117170 - RNA, 32 nt, Human
ccuguagucccagcuacucagggggcugaggc

SEQ ID NO: 117171 - RNA, 23 nt, Human
ccuguagucccagcuacuccaga

SEQ ID NO: 117172 - RNA, 32 nt, Human
ccuguagucccagcuacuccagagauugaggc

SEQ ID NO: 117173 - RNA, 32 nt, Human
ccuguagucccagcuacuccagaggcugagau

SEQ ID NO: 117174 - RNA, 32 nt, Human
ccuguagucccagcuacuccagaugcugaggc

SEQ ID NO: 117175 - RNA, 22 nt, Human
ccuguagucccagcuacuccgg

SEQ ID NO: 117176 - RNA, 23 nt, Human
ccuguagucccagcuacuccgga

SEQ ID NO: 117177 - RNA, 32 nt, Human
ccuguagucccagcuacuccggacacugaugu

SEQ ID NO: 117178 - RNA, 32 nt, Human
ccuguagucccagcuacuccggaggcugaggc

SEQ ID NO: 117179 - RNA, 21 nt, Human
ccuguagucccagcuacucga

SEQ ID NO: 117180 - RNA, 32 nt, Human
ccuguagucccagcuacucgaaaggcugaggc

SEQ ID NO: 117181 - RNA, 23 nt, Human
ccuguagucccagcuacucgaga

SEQ ID NO: 117182 - RNA, 32 nt, Human
ccuguagucccagcuacucgagagccugaggc

SEQ ID NO: 117183 - RNA, 32 nt, Human
ccuguagucccagcuacucgagaggcuaaggc

SEQ ID NO: 117184 - RNA, 32 nt, Human
ccuguagucccagcuacucgagaggcugaggc

SEQ ID NO: 117185 - RNA, 23 nt, Human
ccuguagucccagcuacucgcga

SEQ ID NO: 117186 - RNA, 32 nt, Human
ccuguagucccagcuacucggaaggcuaaggc

SEQ ID NO: 117187 - RNA, 32 nt, Human
ccuguagucccagcuacucggaggcugaggca

SEQ ID NO: 117188 - RNA, 32 nt, Human
ccuguagucccagcuacucggcaggcugaggu

SEQ ID NO: 117189 - RNA, 32 nt, Human
ccuguagucccagcuacucggcaggcugcagc

SEQ ID NO: 117190 - RNA, 22 nt, Human
ccuguagucccagcuacucggg

SEQ ID NO: 117191 - RNA, 23 nt, Human
ccuguagucccagcuacucggga

SEQ ID NO: 117192 - RNA, 32 nt, Human
ccuguagucccagcuacucgggaagcuaaggu

SEQ ID NO: 117193 - RNA, 32 nt, Human
ccuguagucccagcuacucgggaagcugaggc

SEQ ID NO: 117194 - RNA, 32 nt, Human
ccuguagucccagcuacucgggaagcugguag

SEQ ID NO: 117195 - RNA, 32 nt, Human
ccuguagucccagcuacucgggagacugaggc

SEQ ID NO: 117196 - RNA, 32 nt, Human
ccuguagucccagcuacucgggagccugaggc

SEQ ID NO: 117197 - RNA, 32 nt, Human
ccuguagucccagcuacucgggaggccgaggc

SEQ ID NO: 117198 - RNA, 32 nt, Human
ccuguagucccagcuacucgggaggcugaagc

SEQ ID NO: 117199 - RNA, 32 nt, Human
ccuguagucccagcuacucgggaggcugagac

SEQ ID NO: 117200 - RNA, 32 nt, Human
ccuguagucccagcuacucgggaggcugagcu

SEQ ID NO: 117201 - RNA, 32 nt, Human
ccuguagucccagcuacucgggaggcugagga

SEQ ID NO: 117202 - RNA, 32 nt, Human
ccuguagucccagcuacucgggaggcugaggc

SEQ ID NO: 117203 - RNA, 32 nt, Human
ccuguagucccagcuacucgggaggcugaggu

SEQ ID NO: 117204 - RNA, 32 nt, Human
ccuguagucccagcuacucgggaggcugaugc

SEQ ID NO: 117205 - RNA, 32 nt, Human
ccuguagucccagcuacucgggaggcuggggc

SEQ ID NO: 117206 - RNA, 32 nt, Human
ccuguagucccagcuacucggggcgcugaggc

SEQ ID NO: 117207 - RNA, 32 nt, Human
ccuguagucccagcuacucgggggcugagcca

SEQ ID NO: 117208 - RNA, 32 nt, Human
ccuguagucccagcuacucuagaggcugaggu

SEQ ID NO: 117209 - RNA, 32 nt, Human
ccuguagucccagcuacucugaagacugaggc

SEQ ID NO: 117210 - RNA, 22 nt, Human
ccuguagucccagcuacucugg

SEQ ID NO: 117211 - RNA, 23 nt, Human
ccuguagucccagcuacucugga

SEQ ID NO: 117212 - RNA, 32 nt, Human
ccuguagucccagcuacucuggaggcugaaau

SEQ ID NO: 117213 - RNA, 32 nt, Human
ccuguagucccagcuacucuggaggcugaagc

SEQ ID NO: 117214 - RNA, 32 nt, Human
ccuguagucccagcuacucuggaggcugaggc

SEQ ID NO: 117215 - RNA, 32 nt, Human
ccuguagucccagcuacucuggaggcugaggu

SEQ ID NO: 117216 - RNA, 32 nt, Human
ccuguagucccagcuacucuggagucugaggc

SEQ ID NO: 117217 - RNA, 32 nt, Human
ccuguagucccagcuacuggcgaggcugaggc

SEQ ID NO: 117218 - RNA, 21 nt, Human
ccuguagucccagcuacuggg

SEQ ID NO: 117219 - RNA, 22 nt, Human
ccuguagucccagcuacuggga

SEQ ID NO: 117220 - RNA, 32 nt, Human
ccuguagucccagcuacugggaaagcugaaga

SEQ ID NO: 117221 - RNA, 23 nt, Human
ccuguagucccagcuacugggga

SEQ ID NO: 117222 - RNA, 32 nt, Human
ccuguagucccagcuacuggggaggcugaggc

SEQ ID NO: 117223 - RNA, 32 nt, Human
ccuguagucccagcuacuuaggaggcugagau

SEQ ID NO: 117224 - RNA, 32 nt, Human
ccuguagucccagcuacuuaggaggcugaggc

SEQ ID NO: 117225 - RNA, 32 nt, Human
ccuguagucccagcuacuuaggaggcugaggu

SEQ ID NO: 117226 - RNA, 32 nt, Human
ccuguagucccagcuacuucggggacugaggu

SEQ ID NO: 117227 - RNA, 32 nt, Human
ccuguagucccagcuacuugagaggcugaggc

SEQ ID NO: 117228 - RNA, 21 nt, Human
ccuguagucccagcuacuugg

SEQ ID NO: 117229 - RNA, 22 nt, Human
ccuguagucccagcuacuugga

SEQ ID NO: 117230 - RNA, 32 nt, Human
ccuguagucccagcuacuuggaagcugaggug

SEQ ID NO: 117231 - RNA, 32 nt, Human
ccuguagucccagcuacuuggaaggcugagac

SEQ ID NO: 117232 - RNA, 32 nt, Human
ccuguagucccagcuacuuggaggcugaggcg

SEQ ID NO: 117233 - RNA, 32 nt, Human
ccuguagucccagcuacuuggcaggcugaggc

SEQ ID NO: 117234 - RNA, 22 nt, Human
ccuguagucccagcuacuuggg

SEQ ID NO: 117235 - RNA, 23 nt, Human
ccuguagucccagcuacuuggga

SEQ ID NO: 117236 - RNA, 32 nt, Human
ccuguagucccagcuacuugggaagcugagga

SEQ ID NO: 117237 - RNA, 32 nt, Human
ccuguagucccagcuacuugggaagcugaggc

SEQ ID NO: 117238 - RNA, 32 nt, Human
ccuguagucccagcuacuugggaagcugaggu

SEQ ID NO: 117239 - RNA, 32 nt, Human
ccuguagucccagcuacuugggagacugaggu

SEQ ID NO: 117240 - RNA, 32 nt, Human
ccuguagucccagcuacuugggaggcuaaggc

SEQ ID NO: 117241 - RNA, 32 nt, Human
ccuguagucccagcuacuugggaggcugaagc

SEQ ID NO: 117242 - RNA, 32 nt, Human
ccuguagucccagcuacuugggaggcugaagu

SEQ ID NO: 117243 - RNA, 32 nt, Human
ccuguagucccagcuacuugggaggcugagac

SEQ ID NO: 117244 - RNA, 32 nt, Human
ccuguagucccagcuacuugggaggcugagag

SEQ ID NO: 117245 - RNA, 32 nt, Human
ccuguagucccagcuacuugggaggcugagau

SEQ ID NO: 117246 - RNA, 32 nt, Human
ccuguagucccagcuacuugggaggcugagcc

SEQ ID NO: 117247 - RNA, 32 nt, Human
ccuguagucccagcuacuugggaggcugaggc

SEQ ID NO: 117248 - RNA, 32 nt, Human
ccuguagucccagcuacuugggaggcugaggg

SEQ ID NO: 117249 - RNA, 32 nt, Human
ccuguagucccagcuacuugggaggcugaggu

SEQ ID NO: 117250 - RNA, 32 nt, Human
ccuguagucccagcuacuugggaggcugaguc

SEQ ID NO: 117251 - RNA, 32 nt, Human
ccuguagucccagcuacuugggaggcugaugc

SEQ ID NO: 117252 - RNA, 32 nt, Human
ccuguagucccagcuacuugggaggcugggga

SEQ ID NO: 117253 - RNA, 32 nt, Human
ccuguagucccagcuacuugggaggcuggggc

SEQ ID NO: 117254 - RNA, 32 nt, Human
ccuguagucccagcuacuugggagggcugaag

SEQ ID NO: 117255 - RNA, 23 nt, Human
ccuguagucccagcuacuugggg

SEQ ID NO: 117256 - RNA, 32 nt, Human
ccuguagucccagcuacuugguaggcugaggc

SEQ ID NO: 117257 - RNA, 32 nt, Human
ccuguagucccagcuacuugugaggcugaggg

SEQ ID NO: 117258 - RNA, 32 nt, Human
ccuguagucccagcuacuugugaggcugaggu

SEQ ID NO: 117259 - RNA, 32 nt, Human
ccuguagucccagcuagucaagaggcugaggc

SEQ ID NO: 117260 - RNA, 32 nt, Human
ccuguagucccagcuagucgggaggcugaggc

SEQ ID NO: 117261 - RNA, 32 nt, Human
ccuguagucccagcuaucugggaggcugaggc

SEQ ID NO: 117262 - RNA, 22 nt, Human
ccuguagucccagcuauucagg

SEQ ID NO: 117263 - RNA, 23 nt, Human
ccuguagucccagcuauucagga

SEQ ID NO: 117264 - RNA, 32 nt, Human
ccuguagucccagcuauucaggaagcugaggu

SEQ ID NO: 117265 - RNA, 32 nt, Human
ccuguagucccagcuauucaggagcuguugua

SEQ ID NO: 117266 - RNA, 32 nt, Human
ccuguagucccagcuauucaggaggcugaggc

SEQ ID NO: 117267 - RNA, 32 nt, Human
ccuguagucccagcuauuccagggggcugagg

SEQ ID NO: 117268 - RNA, 22 nt, Human
ccuguagucccagcuauucggg

SEQ ID NO: 117269 - RNA, 23 nt, Human
ccuguagucccagcuauucggga

SEQ ID NO: 117270 - RNA, 32 nt, Human
ccuguagucccagcuauucgggaggcugaggc

SEQ ID NO: 117271 - RNA, 32 nt, Human
ccuguagucccagcuauucgggaggcugaggu

SEQ ID NO: 117272 - RNA, 32 nt, Human
ccuguagucccagcuauucuagaggcugaggc

SEQ ID NO: 117273 - RNA, 32 nt, Human
ccuguagucccagcuauucuggaggcugagau

SEQ ID NO: 117274 - RNA, 22 nt, Human
ccuguagucccagcuauuuggg

SEQ ID NO: 117275 - RNA, 23 nt, Human
ccuguagucccagcuauuuggga

SEQ ID NO: 117276 - RNA, 32 nt, Human
ccuguagucccagcuauuugggaggcuaaggc

SEQ ID NO: 117277 - RNA, 32 nt, Human
ccuguagucccagcuauuugggaggcugaggc

SEQ ID NO: 117278 - RNA, 32 nt, Human
ccuguagucccagcuauuugggaggcugaggu

SEQ ID NO: 117279 - RNA, 32 nt, Human
ccuguagucccagcuauuugggaggcugaugc

SEQ ID NO: 117280 - RNA, 32 nt, Human
ccuguagucccagcuccucaggaggcugaggc

SEQ ID NO: 117281 - RNA, 22 nt, Human
ccuguagucccagcugcucagg

SEQ ID NO: 117282 - RNA, 23 nt, Human
ccuguagucccagcugcucagga

SEQ ID NO: 117283 - RNA, 32 nt, Human
ccuguagucccagcugcucaggaggcuaagca

SEQ ID NO: 117284 - RNA, 32 nt, Human
ccuguagucccagcugcucaggaggcugaggc

SEQ ID NO: 117285 - RNA, 32 nt, Human
ccuguagucccagcugcucaggaggcugaggu

SEQ ID NO: 117286 - RNA, 22 nt, Human
ccuguagucccagcugcucggg

SEQ ID NO: 117287 - RNA, 23 nt, Human
ccuguagucccagcugcucggga

SEQ ID NO: 117288 - RNA, 22 nt, Human
ccuguagucccagcugcuuggg

SEQ ID NO: 117289 - RNA, 23 nt, Human
ccuguagucccagcugcuuggga

SEQ ID NO: 117290 - RNA, 32 nt, Human
ccuguagucccagcuucucaggaggcuggggu

SEQ ID NO: 117291 - RNA, 20 nt, Human
ccuguagucccaggcugagg

SEQ ID NO: 117292 - RNA, 32 nt, Human
ccuguagucccaggcugaggugggaggaucac

SEQ ID NO: 117293 - RNA, 23 nt, Human
ccuguagucccagguacucagga

SEQ ID NO: 117294 - RNA, 32 nt, Human
ccuguagucccagguacucaggaggcugaggc

SEQ ID NO: 117295 - RNA, 32 nt, Human
ccuguagucccagguacucaggaggcugaggu

SEQ ID NO: 117296 - RNA, 22 nt, Human
ccuguagucccagguacuuggg

SEQ ID NO: 117297 - RNA, 23 nt, Human
ccuguagucccagguacuuggga

SEQ ID NO: 117298 - RNA, 23 nt, Human
ccuguagucccaguuacucauga

SEQ ID NO: 117299 - RNA, 22 nt, Human
ccuguagucccaguuacucggg

SEQ ID NO: 117300 - RNA, 23 nt, Human
ccuguagucccaguuacucggga

SEQ ID NO: 117301 - RNA, 19 nt, Human
ccuguagucccaguuagga

SEQ ID NO: 117302 - RNA, 21 nt, Human
ccuguagucccaguuaggagg

SEQ ID NO: 117303 - RNA, 32 nt, Human
ccuguagucccaguuaggaggcugaggugagu

SEQ ID NO: 117304 - RNA, 22 nt, Human
ccuguagucccggcuacucagg

SEQ ID NO: 117305 - RNA, 23 nt, Human
ccuguagucccggcuacucagga

SEQ ID NO: 117306 - RNA, 32 nt, Human
ccuguagucccggcuacucaggaaacugaggu

SEQ ID NO: 117307 - RNA, 22 nt, Human
ccuguagucccugcuacuuggg

SEQ ID NO: 117308 - RNA, 23 nt, Human
ccuguagucccugcuacuuggga

SEQ ID NO: 117309 - RNA, 22 nt, Human
ccuguaguccgagccacuuggg

SEQ ID NO: 117310 - RNA, 23 nt, Human
ccuguaguccgagccacuuggga

SEQ ID NO: 117311 - RNA, 32 nt, Human
ccuguaguccuagccacucaggaggcugaggc

SEQ ID NO: 117312 - RNA, 22 nt, Human
ccuguaguccuagcuacucagg

SEQ ID NO: 117313 - RNA, 23 nt, Human
ccuguaguccuagcuacucagga

SEQ ID NO: 117314 - RNA, 32 nt, Human
ccuguaguccuagcuacucaggaggcugagau

SEQ ID NO: 117315 - RNA, 32 nt, Human
ccuguaguccuagcuacucaggaggcugaggc

SEQ ID NO: 117316 - RNA, 32 nt, Human
ccuguaguccuagcuacucaggaggcugaggu

SEQ ID NO: 117317 - RNA, 32 nt, Human
ccuguaguccuagcuacuccggaggcugagcc

SEQ ID NO: 117318 - RNA, 23 nt, Human
ccuguaguccuagcuacucgaga

SEQ ID NO: 117319 - RNA, 32 nt, Human
ccuguaguccuagcuacucgagaggcugaggc

SEQ ID NO: 117320 - RNA, 32 nt, Human
ccuguaguccuagcuacucgggaggcugaggc

SEQ ID NO: 117321 - RNA, 32 nt, Human
ccuguaguccuagcuacucggggaggcugagg

SEQ ID NO: 117322 - RNA, 22 nt, Human
ccuguaguccuagcuacuuggg

SEQ ID NO: 117323 - RNA, 23 nt, Human
ccuguaguccuagcuacuuggga

SEQ ID NO: 117324 - RNA, 32 nt, Human
ccuguaguccuagcugcucaggaggcugaggc

SEQ ID NO: 117325 - RNA, 32 nt, Human
ccuguagucgcagcuacucagaaggcugaggu

SEQ ID NO: 117326 - RNA, 22 nt, Human
ccuguagucucagauacuuggg

SEQ ID NO: 117327 - RNA, 23 nt, Human
ccuguagucucagauacuuggga

SEQ ID NO: 117328 - RNA, 22 nt, Human
ccuguagucucagcuacucagg

SEQ ID NO: 117329 - RNA, 32 nt, Human
ccuguagucucagcuacucaggaggcugagac

SEQ ID NO: 117330 - RNA, 32 nt, Human
ccuguagucucagcuacucaggaggcugagau

SEQ ID NO: 117331 - RNA, 32 nt, Human
ccuguagucucagcuacucaggaggcugaggc

SEQ ID NO: 117332 - RNA, 32 nt, Human
ccuguagucucagcuacucaggaggcuuaggc

SEQ ID NO: 117333 - RNA, 32 nt, Human
ccuguagucucagcuacucggaaggcugaggc

SEQ ID NO: 117334 - RNA, 22 nt, Human
ccuguagucucagcuacucggg

SEQ ID NO: 117335 - RNA, 23 nt, Human
ccuguagucucagcuacucggga

SEQ ID NO: 117336 - RNA, 32 nt, Human
ccuguagucucagcuacucgggaggcugaggc

SEQ ID NO: 117337 - RNA, 32 nt, Human
ccuguagucucagcuacuuaggaggcugaggu

SEQ ID NO: 117338 - RNA, 22 nt, Human
ccuguagucucagcuacuuggg

SEQ ID NO: 117339 - RNA, 23 nt, Human
ccuguagucucagcuacuuggga

SEQ ID NO: 117340 - RNA, 32 nt, Human
ccuguagucucagcuacuugggaggcugaggc

SEQ ID NO: 117341 - RNA, 32 nt, Human
ccuguagucucccacagaaccuaaaguaauaa

SEQ ID NO: 117342 - RNA, 23 nt, Human
ccuguagucuuagcuacucagga

SEQ ID NO: 117343 - RNA, 32 nt, Human
ccuguagucuuagcuacucaggaggcugaggc

SEQ ID NO: 117344 - RNA, 23 nt, Human
ccuguagucuuagcuacucgaga

SEQ ID NO: 117345 - RNA, 32 nt, Human
ccuguagugcaggaagccagugcagggugggu

SEQ ID NO: 117346 - RNA, 32 nt, Human
ccuguagugccagcuacucaggaggcugaggc

SEQ ID NO: 117347 - RNA, 23 nt, Human
ccuguagugccagcuacucgcga

SEQ ID NO: 117348 - RNA, 23 nt, Human
ccuguagugccagcuacucggga

SEQ ID NO: 117349 - RNA, 32 nt, Human
ccuguagugccggcuacucaggaggcugaggc

SEQ ID NO: 117350 - RNA, 21 nt, Human
ccuguaguuacagcuacuugg

SEQ ID NO: 117351 - RNA, 32 nt, Human
ccuguaguuccagcuacauaggaggcugaggu

SEQ ID NO: 117352 - RNA, 32 nt, Human
ccuguaguuccagcuaccugggaggcugaggc

SEQ ID NO: 117353 - RNA, 32 nt, Human
ccuguaguuccagcuacucaggacacugacgu

SEQ ID NO: 117354 - RNA, 32 nt, Human
ccuguaguuccagcuacucaggaggcagaggu

SEQ ID NO: 117355 - RNA, 32 nt, Human
ccuguaguuccagcuacucaggaggcuaaggc

SEQ ID NO: 117356 - RNA, 32 nt, Human
ccuguaguuccagcuacucaggaggcugaagu

SEQ ID NO: 117357 - RNA, 32 nt, Human
ccuguaguuccagcuacucaggaggcugaggc

SEQ ID NO: 117358 - RNA, 32 nt, Human
ccuguaguuccagcuacucaggaggcugaggu

SEQ ID NO: 117359 - RNA, 32 nt, Human
ccuguaguuccagcuacucaguaggcugaggc

SEQ ID NO: 117360 - RNA, 21 nt, Human
ccuguaguuccagcuacucgg

SEQ ID NO: 117361 - RNA, 22 nt, Human
ccuguaguuccagcuacucgga

SEQ ID NO: 117362 - RNA, 32 nt, Human
ccuguaguuccagcuacucggagacugaggca

SEQ ID NO: 117363 - RNA, 32 nt, Human
ccuguaguuccagcuacucgggaggcugaggc

SEQ ID NO: 117364 - RNA, 32 nt, Human
ccuguaguuccagcuacucgggaggcugaggu

SEQ ID NO: 117365 - RNA, 32 nt, Human
ccuguaguuccagcuacuugggaggcugagac

SEQ ID NO: 117366 - RNA, 32 nt, Human
ccuguaguuccagcuacuugggaggcugaggc

SEQ ID NO: 117367 - RNA, 32 nt, Human
ccuguaguuccagcuacuugggaggcugaggu

SEQ ID NO: 117368 - RNA, 32 nt, Human
ccuguaguuccagcuacuugugaggcugaggu

SEQ ID NO: 117369 - RNA, 32 nt, Human
ccuguaguuccucauggggcuggacucaucuc

SEQ ID NO: 117370 - RNA, 32 nt, Human
ccuguaguucuagcuacucuggaggcugaggc

SEQ ID NO: 117371 - RNA, 22 nt, Human
ccuguaguuuaagcuacuuggg

SEQ ID NO: 117372 - RNA, 23 nt, Human
ccuguaguuuaagcuacuuggga

SEQ ID NO: 117373 - RNA, 32 nt, Human
ccuguauacccagcuacucgggaggcugaggc

SEQ ID NO: 117374 - RNA, 32 nt, Human
ccuguauagcccacagaacuaugagucaauua

SEQ ID NO: 117375 - RNA, 23 nt, Human
ccuguauauguggcuuccucuga

SEQ ID NO: 117376 - RNA, 18 nt, Human
ccuguaucacacggggca

SEQ ID NO: 117377 - RNA, 32 nt, Human
ccuguaucccagaaaauaaagccacaugauau

SEQ ID NO: 117378 - RNA, 32 nt, Human
ccuguaucggcaaccccacugcuuuccccucu

SEQ ID NO: 117379 - RNA, 18 nt, Human
ccuguaucugcagcacuu

SEQ ID NO: 117380 - RNA, 32 nt, Human
ccuguaugccaccagucacugcagucugcgca

SEQ ID NO: 117381 - RNA, 32 nt, Human
ccuguauguguaagaagaaacucucucuucag

SEQ ID NO: 117382 - RNA, 32 nt, Human
ccuguauuaguccguucucacacugcuaauug

SEQ ID NO: 117383 - RNA, 32 nt, Human
ccuguauucacagcuacucgggagguugaggc

SEQ ID NO: 117384 - RNA, 32 nt, Human
ccuguauucagaaaucagcaugagaugaaaac

SEQ ID NO: 117385 - RNA, 32 nt, Human
ccuguauucagccucagacugagugguggccu

SEQ ID NO: 117386 - RNA, 32 nt, Human
ccuguauucauuguggaacuuccucuuucauu

SEQ ID NO: 117387 - RNA, 32 nt, Human
ccuguauucccagcuacucaggagguugaggu

SEQ ID NO: 117388 - RNA, 32 nt, Human
ccuguauucccagcuacucaugaggcugaggc

SEQ ID NO: 117389 - RNA, 32 nt, Human
ccuguauucccagcuacucgggaggcugaggc

SEQ ID NO: 117390 - RNA, 32 nt, Human
ccuguauucccagcuacuggggaggcugaggc

SEQ ID NO: 117391 - RNA, 32 nt, Human
ccuguauucccagcuacuuggaaggcugagac

SEQ ID NO: 117392 - RNA, 22 nt, Human
ccuguauucccagcuacuuggg

SEQ ID NO: 117393 - RNA, 23 nt, Human
ccuguauucccagcuacuuggga

SEQ ID NO: 117394 - RNA, 32 nt, Human
ccuguauucccagcuacuugggaggcugaggc

SEQ ID NO: 117395 - RNA, 32 nt, Human
ccuguauuccuggacaaggccuagagaacgag

SEQ ID NO: 117396 - RNA, 32 nt, Human
ccuguauucucagcuacucgggaggcugaggc

SEQ ID NO: 117397 - RNA, 32 nt, Human
ccuguauuuccaugucaaauguuuucaaauaa

SEQ ID NO: 117398 - RNA, 32 nt, Human
ccuguauuucuagcccagcacugccaggacca

SEQ ID NO: 117399 - RNA, 19 nt, Human
ccugucaagggggccacag

SEQ ID NO: 117400 - RNA, 32 nt, Human
ccugucaaguagcugggauuacaggcgugugc

SEQ ID NO: 117401 - RNA, 19 nt, Human
ccugucaauggggguguag

SEQ ID NO: 117402 - RNA, 22 nt, Human
ccugucacaagagccacuggua

SEQ ID NO: 117403 - RNA, 32 nt, Human
ccugucaccaaggacguuaaaggcauuuuauu

SEQ ID NO: 117404 - RNA, 32 nt, Human
ccugucaccacugccauauuccugccugcugg

SEQ ID NO: 117405 - RNA, 32 nt, Human
ccugucacccagccauggugugguccaggcag

SEQ ID NO: 117406 - RNA, 32 nt, Human
ccugucaccccaaacugugcgguggcucuugu

SEQ ID NO: 117407 - RNA, 32 nt, Human
ccugucaccccauccccacuccccugguggcc

SEQ ID NO: 117408 - RNA, 32 nt, Human
ccugucacccccuuagcugagccacccacccc

SEQ ID NO: 117409 - RNA, 32 nt, Human
ccugucaccgugagcgccccagaagagcgcgg

SEQ ID NO: 117410 - RNA, 32 nt, Human
ccugucaccuacccccugcuugcucaaucgau

SEQ ID NO: 117411 - RNA, 32 nt, Human
ccugucacucaccacuaugcaggagagggagg

SEQ ID NO: 117412 - RNA, 32 nt, Human
ccugucacucaccucaaaccugccaugucccu

SEQ ID NO: 117413 - RNA, 31 nt, Human
ccugucacugacugguuuaccaaagucgaug

SEQ ID NO: 117414 - RNA, 32 nt, Human
ccugucacugcaaaugcuuugucucugggcag

SEQ ID NO: 117415 - RNA, 32 nt, Human
ccugucacugcaaucugugacauuccagaugg

SEQ ID NO: 117416 - RNA, 32 nt, Human
ccugucacugcacccagcuuggcauuuaccau

SEQ ID NO: 117417 - RNA, 32 nt, Human
ccugucacugcccccuccccagccugugucca

SEQ ID NO: 117418 - RNA, 32 nt, Human
ccugucacuguuuucccaccucuaaggauuuc

SEQ ID NO: 117419 - RNA, 32 nt, Human
ccugucacuucuggaugugagggagaagugag

SEQ ID NO: 117420 - RNA, 19 nt, Human
ccugucacuugcagcauca

SEQ ID NO: 117421 - RNA, 20 nt, Human
ccugucagaaggcucuggua

SEQ ID NO: 117422 - RNA, 20 nt, Human
ccugucagaaugcaaccugg

SEQ ID NO: 117423 - RNA, 32 nt, Human
ccugucagagacugaggacccaggaagaaaca

SEQ ID NO: 117424 - RNA, 22 nt, Human
ccugucagagggaggcacuggu

SEQ ID NO: 117425 - RNA, 15 nt, Human
ccugucagagucugg

SEQ ID NO: 117426 - RNA, 32 nt, Human
ccugucagaguugacuuuccucccauuuuacc

SEQ ID NO: 117427 - RNA, 21 nt, Human
ccugucagaguuuucaacggu

SEQ ID NO: 117428 - RNA, 32 nt, Human
ccugucagaguuuucaacggugcuuauagcug

SEQ ID NO: 117429 - RNA, 32 nt, Human
ccugucagcaacuuauccaguuuaaagcugcu

SEQ ID NO: 117430 - RNA, 22 nt, Human
ccugucagccccggggaggaca

SEQ ID NO: 117431 - RNA, 32 nt, Human
ccugucagccucuuucccauagcuaauagaca

SEQ ID NO: 117432 - RNA, 20 nt, Human
ccugucagcggcgggugcgg

SEQ ID NO: 117433 - RNA, 32 nt, Human
ccugucagcuccagguccuggagccacgucca

SEQ ID NO: 117434 - RNA, 32 nt, Human
ccugucagcuggucugacagauuuaagaacuc

SEQ ID NO: 117435 - RNA, 32 nt, Human
ccugucaggaagggcaggggaggacugugggg

SEQ ID NO: 117436 - RNA, 32 nt, Human
ccugucaggaguuaggugucaagugaagucuc

SEQ ID NO: 117437 - RNA, 19 nt, Human
ccugucaggcggaccagug

SEQ ID NO: 117438 - RNA, 32 nt, Human
ccugucagggaaggcgccacaggcuggcagcu

SEQ ID NO: 117439 - RNA, 32 nt, Human
ccugucagggcuagguccucagaguaaggaaa

SEQ ID NO: 117440 - RNA, 32 nt, Human
ccugucagguucuagaaaccugccacuacaac

SEQ ID NO: 117441 - RNA, 21 nt, Human
ccugucaguagggggcagugg

SEQ ID NO: 117442 - RNA, 18 nt, Human
ccugucaguauauuggua

SEQ ID NO: 117443 - RNA, 32 nt, Human
ccugucaguaucagugcuuccaucguuccauc

SEQ ID NO: 117444 - RNA, 32 nt, Human
ccugucaguccuauacuggaguccuguuaaua

SEQ ID NO: 117445 - RNA, 32 nt, Human
ccugucagugaccaccacccauucacaggaga

SEQ ID NO: 117446 - RNA, 19 nt, Human
ccugucaguguccacugug

SEQ ID NO: 117447 - RNA, 32 nt, Human
ccugucauccaagcuacucaagagacugaggc

SEQ ID NO: 117448 - RNA, 23 nt, Human
ccugucaucccagcuacccaaga

SEQ ID NO: 117449 - RNA, 32 nt, Human
ccugucaucccagcuacccaagaagcugaggc

SEQ ID NO: 117450 - RNA, 32 nt, Human
ccugucaucccagcuacucagguaguugaggc

SEQ ID NO: 117451 - RNA, 32 nt, Human
ccugucaucccagcuacuccagaggcugagau

SEQ ID NO: 117452 - RNA, 23 nt, Human
ccugucaucccagcuacucggga

SEQ ID NO: 117453 - RNA, 32 nt, Human
ccugucaucccagcuacucgggaggcugaggc

SEQ ID NO: 117454 - RNA, 32 nt, Human
ccugucaucccagcuacucgggaggcugaggu

SEQ ID NO: 117455 - RNA, 32 nt, Human
ccugucaucccagcuacucgguaggcugaggc

SEQ ID NO: 117456 - RNA, 32 nt, Human
ccugucaucccagcuacuugagaggcugaagc

SEQ ID NO: 117457 - RNA, 23 nt, Human
ccugucaucccagcuacuuggga

SEQ ID NO: 117458 - RNA, 32 nt, Human
ccugucaucccagcuacuugggaggcugaggc

SEQ ID NO: 117459 - RNA, 32 nt, Human
ccugucauggcaucugcugauuugaaacucca

SEQ ID NO: 117460 - RNA, 32 nt, Human
ccugucauugacugugacucagaucugcccuc

SEQ ID NO: 117461 - RNA, 32 nt, Human
ccuguccacaccaugccucuccugcacuggag

SEQ ID NO: 117462 - RNA, 32 nt, Human
ccuguccaccaucuugugccucuucuccauuu

SEQ ID NO: 117463 - RNA, 32 nt, Human
ccuguccacccaugcuuggagaggcuuggccu

SEQ ID NO: 117464 - RNA, 21 nt, Human
ccuguccaccccaccccaaca

SEQ ID NO: 117465 - RNA, 32 nt, Human
ccuguccacugcacuccucccaccucauuuuu

SEQ ID NO: 117466 - RNA, 32 nt, Human
ccuguccagaagccuggccuaggcagcuucaa

SEQ ID NO: 117467 - RNA, 21 nt, Human
ccuguccagaaucccugcagg

SEQ ID NO: 117468 - RNA, 32 nt, Human
ccuguccagacacguccugcaguuccuccugc

SEQ ID NO: 117469 - RNA, 32 nt, Human
ccuguccagcaggggucucccaacaagugcuc

SEQ ID NO: 117470 - RNA, 32 nt, Human
ccuguccagcccagugccugggcucugggacc

SEQ ID NO: 117471 - RNA, 32 nt, Human
ccuguccaggagacucaugaggacugugugac

SEQ ID NO: 117472 - RNA, 20 nt, Human
ccuguccagggucuacagua

SEQ ID NO: 117473 - RNA, 32 nt, Human
ccuguccaguguccucuggccugcugcccugc

SEQ ID NO: 117474 - RNA, 32 nt, Human
ccuguccaucuucuccccaccaccgccccggu

SEQ ID NO: 117475 - RNA, 32 nt, Human
ccuguccaugaccuugggcacagggaaguucu

SEQ ID NO: 117476 - RNA, 32 nt, Human
ccuguccaugggaagcuuuucccccucugcag

SEQ ID NO: 117477 - RNA, 21 nt, Human
ccugucccaaagcccccuugg

SEQ ID NO: 117478 - RNA, 32 nt, Human
ccugucccaaguagcugggacuauaaacgugc

SEQ ID NO: 117479 - RNA, 32 nt, Human
ccugucccaagugcugugauucacacgccuga

SEQ ID NO: 117480 - RNA, 21 nt, Human
ccugucccacccugucccuga

SEQ ID NO: 117481 - RNA, 32 nt, Human
ccugucccagacaauaaagugcccucagcgga

SEQ ID NO: 117482 - RNA, 32 nt, Human
ccugucccagccacaggcuucuuguccaccuc

SEQ ID NO: 117483 - RNA, 32 nt, Human
ccugucccagccugugccuucugcuggggcag

SEQ ID NO: 117484 - RNA, 32 nt, Human
ccugucccagcuccccagccuggcguagagca

SEQ ID NO: 117485 - RNA, 32 nt, Human
ccugucccagggccaaaccccuaggaguccug

SEQ ID NO: 117486 - RNA, 21 nt, Human
ccugucccaugcccacccuga

SEQ ID NO: 117487 - RNA, 32 nt, Human
ccugucccauuuccucagucccugggccuccc

SEQ ID NO: 117488 - RNA, 24 nt, Human
ccuguccccaaauugaagauccuu

SEQ ID NO: 117489 - RNA, 21 nt, Human
ccuguccccacagcugcagga

SEQ ID NO: 117490 - RNA, 32 nt, Human
ccuguccccacuccaggcucaggcuggagccg

SEQ ID NO: 117491 - RNA, 32 nt, Human
ccuguccccagaggaagcccccucuccuucuc

SEQ ID NO: 117492 - RNA, 32 nt, Human
ccuguccccaggagcugggaugccaggucgau

SEQ ID NO: 117493 - RNA, 23 nt, Human
ccuguccccaucggccacucuga

SEQ ID NO: 117494 - RNA, 32 nt, Human
ccuguccccauuccuguuucccuucccagcgc

SEQ ID NO: 117495 - RNA, 24 nt, Human
ccugucccccaagcaccgccucug

SEQ ID NO: 117496 - RNA, 32 nt, Human
ccugucccccacugcuaucaguauggaacccc

SEQ ID NO: 117497 - RNA, 32 nt, Human
ccugucccccacugcuucuuacucccucccua

SEQ ID NO: 117498 - RNA, 24 nt, Human
ccugucccccagacccaaagcucu

SEQ ID NO: 117499 - RNA, 32 nt, Human
ccugucccccuccacauaucccuacaugaaau

SEQ ID NO: 117500 - RNA, 31 nt, Human
ccugucccccucucuggauugaagucaccug

SEQ ID NO: 117501 - RNA, 32 nt, Human
ccugucccccuuccccaaccauggccccaggu

SEQ ID NO: 117502 - RNA, 26 nt, Human
ccuguccccgagccucuggccucuga

SEQ ID NO: 117503 - RNA, 32 nt, Human
ccuguccccucaguucccaggugccaugagga

SEQ ID NO: 117504 - RNA, 20 nt, Human
ccuguccccucccccuuccc

SEQ ID NO: 117505 - RNA, 22 nt, Human
ccuguccccucgaggcuucuga

SEQ ID NO: 117506 - RNA, 20 nt, Human
ccuguccccucgcuucccuc

SEQ ID NO: 117507 - RNA, 32 nt, Human
ccuguccccucgggaggggagcugagcccgac

SEQ ID NO: 117508 - RNA, 20 nt, Human
ccuguccccucuccuacucu

SEQ ID NO: 117509 - RNA, 24 nt, Human
ccuguccccucuggcugccucuga

SEQ ID NO: 117510 - RNA, 24 nt, Human
ccuguccccucugucaacccccug

SEQ ID NO: 117511 - RNA, 19 nt, Human
ccuguccccucugucccuc

SEQ ID NO: 117512 - RNA, 22 nt, Human
ccuguccccucuucuggcucug

SEQ ID NO: 117513 - RNA, 32 nt, Human
ccuguccccuggcaaguuggccacggaaccca

SEQ ID NO: 117514 - RNA, 22 nt, Human
ccuguccccugggugucccuga

SEQ ID NO: 117515 - RNA, 24 nt, Human
ccuguccccuuuccuaaagcuccu

SEQ ID NO: 117516 - RNA, 32 nt, Human
ccugucccgccuggccccugaccuccuugcca

SEQ ID NO: 117517 - RNA, 32 nt, Human
ccugucccgggagcuugcgggcuagcuagacc

SEQ ID NO: 117518 - RNA, 32 nt, Human
ccugucccuaucucucacucuggacccagggc

SEQ ID NO: 117519 - RNA, 32 nt, Human
ccugucccucacauuugaucacugugaccuuc

SEQ ID NO: 117520 - RNA, 32 nt, Human
ccugucccuccccauccuguguccucuccagg

SEQ ID NO: 117521 - RNA, 32 nt, Human
ccugucccucgaggagcuaccaguucagucaa

SEQ ID NO: 117522 - RNA, 32 nt, Human
ccugucccucuccuucuccaucucacccuccc

SEQ ID NO: 117523 - RNA, 19 nt, Human
ccugucccugcccuccuca

SEQ ID NO: 117524 - RNA, 32 nt, Human
ccugucccugccuucgaccuccugccuggguc

SEQ ID NO: 117525 - RNA, 32 nt, Human
ccugucccugcgcugcgccuccaggcuggacc

SEQ ID NO: 117526 - RNA, 19 nt, Human
ccugucccugcucugccuc

SEQ ID NO: 117527 - RNA, 32 nt, Human
ccugucccugcucuuccuucucucuggggugc

SEQ ID NO: 117528 - RNA, 19 nt, Human
ccugucccuggccugccuu

SEQ ID NO: 117529 - RNA, 19 nt, Human
ccugucccuggcuucuggg

SEQ ID NO: 117530 - RNA, 32 nt, Human
ccugucccugguaacgccuccuggguccugag

SEQ ID NO: 117531 - RNA, 19 nt, Human
ccugucccuguaagcauca

SEQ ID NO: 117532 - RNA, 32 nt, Human
ccugucccuguccccauacuccuuccucaccu

SEQ ID NO: 117533 - RNA, 32 nt, Human
ccugucccugucccccuuccugccccugcucc

SEQ ID NO: 117534 - RNA, 20 nt, Human
ccugucccugucccuccuca

SEQ ID NO: 117535 - RNA, 32 nt, Human
ccugucccugucucccugcccauuuccuaugc

SEQ ID NO: 117536 - RNA, 32 nt, Human
ccugucccuuccccuucugcuuuuggucaguc

SEQ ID NO: 117537 - RNA, 32 nt, Human
ccugucccuucccuccccuuugcuggccuacu

SEQ ID NO: 117538 - RNA, 32 nt, Human
ccuguccggcccagcccugccucacagcugug

SEQ ID NO: 117539 - RNA, 32 nt, Human
ccuguccggggcaccaggcugggacagagacu

SEQ ID NO: 117540 - RNA, 21 nt, Human
ccuguccgucucaaccucccu

SEQ ID NO: 117541 - RNA, 32 nt, Human
ccuguccgugcccugcugugcccagcuaggga

SEQ ID NO: 117542 - RNA, 21 nt, Human
ccuguccuagaaccacuggua

SEQ ID NO: 117543 - RNA, 32 nt, Human
ccuguccucaaugugccugaauaaaugcuugu

SEQ ID NO: 117544 - RNA, 32 nt, Human
ccuguccucacaguggagggguguaaggggca

SEQ ID NO: 117545 - RNA, 21 nt, Human
ccuguccucacugcucccuga

SEQ ID NO: 117546 - RNA, 21 nt, Human
ccuguccucaggggucaggaa

SEQ ID NO: 117547 - RNA, 21 nt, Human
ccuguccuccccccgccacug

SEQ ID NO: 117548 - RNA, 32 nt, Human
ccuguccucggaucacagucucuucucacuac

SEQ ID NO: 117549 - RNA, 32 nt, Human
ccuguccugcagcggcucucucaggccguggg

SEQ ID NO: 117550 - RNA, 32 nt, Human
ccuguccugcccugcccugcccugcccugccc

SEQ ID NO: 117551 - RNA, 32 nt, Human
ccuguccugcccugcccugcccuguccugucc

SEQ ID NO: 117552 - RNA, 32 nt, Human
ccuguccugcccugcccugcccuguguccuca

SEQ ID NO: 117553 - RNA, 32 nt, Human
ccuguccugcccuuuaugugugugggugaaac

SEQ ID NO: 117554 - RNA, 32 nt, Human
ccuguccugccucuggccuguguccugggugu

SEQ ID NO: 117555 - RNA, 32 nt, Human
ccuguccugccugggccuuggcaagcggcccu

SEQ ID NO: 117556 - RNA, 32 nt, Human
ccuguccugccugguccuuuuccaugacucca

SEQ ID NO: 117557 - RNA, 32 nt, Human
ccuguccugccugugccagccuggccuucugc

SEQ ID NO: 117558 - RNA, 32 nt, Human
ccuguccugcucauuaugccacuuccuuuuaa

SEQ ID NO: 117559 - RNA, 32 nt, Human
ccuguccuggagggccaccaccaggagagagc

SEQ ID NO: 117560 - RNA, 16 nt, Human
ccuguccuggcacugg

SEQ ID NO: 117561 - RNA, 32 nt, Human
ccuguccugggagcuggagaggaugucagcga

SEQ ID NO: 117562 - RNA, 32 nt, Human
ccuguccugguucaccaccauugugccuuugg

SEQ ID NO: 117563 - RNA, 32 nt, Human
ccuguccuguccacccucauugccccaacucc

SEQ ID NO: 117564 - RNA, 32 nt, Human
ccuguccuguccugcccugcccugcccugucc

SEQ ID NO: 117565 - RNA, 32 nt, Human
ccuguccuguccugcccugcccugcccugugu

SEQ ID NO: 117566 - RNA, 32 nt, Human
ccuguccuguccugcccugcccuguccugucc

SEQ ID NO: 117567 - RNA, 32 nt, Human
ccuguccugucuccucagccugccucacagug

SEQ ID NO: 117568 - RNA, 32 nt, Human
ccuguccuguucuguuccauucuaauuacugg

SEQ ID NO: 117569 - RNA, 32 nt, Human
ccuguccuuaccccaggccucuuccaaaaccg

SEQ ID NO: 117570 - RNA, 32 nt, Human
ccuguccuucaguuggcuaaggagguagaucc

SEQ ID NO: 117571 - RNA, 32 nt, Human
ccuguccuuccccagugccugccuccuuccug

SEQ ID NO: 117572 - RNA, 16 nt, Human
ccuguccuucugugcc

SEQ ID NO: 117573 - RNA, 32 nt, Human
ccuguccuugaauuuaacagcaaccaacauau

SEQ ID NO: 117574 - RNA, 32 nt, Human
ccuguccuuuccagcugccuuuugucuagccu

SEQ ID NO: 117575 - RNA, 24 nt, Human
ccuguccuuuggcagaagcuccuu

SEQ ID NO: 117576 - RNA, 21 nt, Human
ccuguccuuuguggcugccuc

SEQ ID NO: 117577 - RNA, 32 nt, Human
ccuguccuuuucucaagaccuucaccauuacu

SEQ ID NO: 117578 - RNA, 32 nt, Human
ccugucgaauucaccaucccagccugccugcc

SEQ ID NO: 117579 - RNA, 32 nt, Human
ccugucgccaggcuggaguguaguggcaugau

SEQ ID NO: 117580 - RNA, 21 nt, Human
ccugucgccgggcugcugaga

SEQ ID NO: 117581 - RNA, 22 nt, Human
ccugucgccgggcugcugagaa

SEQ ID NO: 117582 - RNA, 32 nt, Human
ccugucgccuggcuggaguggaguggcacaau

SEQ ID NO: 117583 - RNA, 32 nt, Human
ccugucgcuagcaagcaucugguucagcggaa

SEQ ID NO: 117584 - RNA, 21 nt, Human
ccugucgcuggagugcagugg

SEQ ID NO: 117585 - RNA, 32 nt, Human
ccugucgcuggaucaguagcagagccagagcu

SEQ ID NO: 117586 - RNA, 32 nt, Human
ccugucggccacaccccagacuccaggccccc

SEQ ID NO: 117587 - RNA, 17 nt, Human
ccugucgggacacuggu

SEQ ID NO: 117588 - RNA, 19 nt, Human
ccugucggggagggggcca

SEQ ID NO: 117589 - RNA, 32 nt, Human
ccugucggucuuguccuggcucugccuguccc

SEQ ID NO: 117590 - RNA, 32 nt, Human
ccugucgguggaggcuguggccaggagagacu

SEQ ID NO: 117591 - RNA, 21 nt, Human
ccugucgguggcugccuuuga

SEQ ID NO: 117592 - RNA, 32 nt, Human
ccugucgucccagcuacuagggaggcugaggc

SEQ ID NO: 117593 - RNA, 32 nt, Human
ccugucgucccagcuacucaggaggcugaggc

SEQ ID NO: 117594 - RNA, 32 nt, Human
ccugucuaaaaugaggugauaauagcuucuug

SEQ ID NO: 117595 - RNA, 32 nt, Human
ccugucuacuaaaaauacaaaaacuaggucgg

SEQ ID NO: 117596 - RNA, 32 nt, Human
ccugucuacuaaaaauacaaaaauuagccggg

SEQ ID NO: 117597 - RNA, 32 nt, Human
ccugucuagaaggagccaguucucuccugcaa

SEQ ID NO: 117598 - RNA, 32 nt, Human
ccugucuagacuaaaaauauccuugaaagaau

SEQ ID NO: 117599 - RNA, 32 nt, Human
ccugucuagagagggaggcaagcccuguugac

SEQ ID NO: 117600 - RNA, 19 nt, Human
ccugucuaggcacaugugg

SEQ ID NO: 117601 - RNA, 32 nt, Human
ccugucuaugcaucugauuuuugcuacaguuu

SEQ ID NO: 117602 - RNA, 32 nt, Human
ccugucuaugcuguuagauguggcugugaguc

SEQ ID NO: 117603 - RNA, 32 nt, Human
ccugucucaaagaaagaaagaaagaaaagaaa

SEQ ID NO: 117604 - RNA, 32 nt, Human
ccugucucaacccaguccaccugggugcuggg

SEQ ID NO: 117605 - RNA, 32 nt, Human
ccugucucaacuuggagagaggugacagacgg

SEQ ID NO: 117606 - RNA, 21 nt, Human
ccugucucacugaaagccccu

SEQ ID NO: 117607 - RNA, 32 nt, Human
ccugucucagcuucucaaagugcugggauuac

SEQ ID NO: 117608 - RNA, 32 nt, Human
ccugucucagggacuucuucgcugauucacag

SEQ ID NO: 117609 - RNA, 32 nt, Human
ccugucucauuucccucccucccucugacacc

SEQ ID NO: 117610 - RNA, 32 nt, Human
ccugucuccaaacagccuugugccucaccuac

SEQ ID NO: 117611 - RNA, 22 nt, Human
ccugucuccaacaccgccuccu

SEQ ID NO: 117612 - RNA, 32 nt, Human
ccugucuccacaaaauuuaaaaauuagcggcc

SEQ ID NO: 117613 - RNA, 18 nt, Human
ccugucuccacaucugcu

SEQ ID NO: 117614 - RNA, 18 nt, Human
ccugucuccaccuugaua

SEQ ID NO: 117615 - RNA, 21 nt, Human
ccugucuccaucagguaugga

SEQ ID NO: 117616 - RNA, 32 nt, Human
ccugucuccaugacuucauuugcacuuugaca

SEQ ID NO: 117617 - RNA, 21 nt, Human
ccugucuccaugagguacugg

SEQ ID NO: 117618 - RNA, 32 nt, Human
ccugucucccaaagugcuaggauuacaggugu

SEQ ID NO: 117619 - RNA, 32 nt, Human
ccugucucccaaagugcugggaugccaggcgu

SEQ ID NO: 117620 - RNA, 32 nt, Human
ccugucucccauucugugacgaugguucaaug

SEQ ID NO: 117621 - RNA, 32 nt, Human
ccugucuccccuuguuucucugugccagaucu

SEQ ID NO: 117622 - RNA, 32 nt, Human
ccugucucccucugcccugccucuccuucagc

SEQ ID NO: 117623 - RNA, 18 nt, Human
ccugucucccuucuuggg

SEQ ID NO: 117624 - RNA, 32 nt, Human
ccugucuccuccacucuccuccucacccucuc

SEQ ID NO: 117625 - RNA, 20 nt, Human
ccugucuccuccugccuggg

SEQ ID NO: 117626 - RNA, 32 nt, Human
ccugucuccucuccuccuccagcccccagccu

SEQ ID NO: 117627 - RNA, 32 nt, Human
ccugucuccuuggaccucuuugauucuguggu

SEQ ID NO: 117628 - RNA, 32 nt, Human
ccugucuccuuuccuccuccuggguucauguu

SEQ ID NO: 117629 - RNA, 19 nt, Human
ccugucucggccucccggg

SEQ ID NO: 117630 - RNA, 32 nt, Human
ccugucucguugcugcuucugccugugcugug

SEQ ID NO: 117631 - RNA, 32 nt, Human
ccugucucuacaaaauacaagaagaaauuagc

SEQ ID NO: 117632 - RNA, 32 nt, Human
ccugucucuagcugauggagaggggcuacgca

SEQ ID NO: 117633 - RNA, 32 nt, Human
ccugucucugcacucuaguuucccuguguggg

SEQ ID NO: 117634 - RNA, 32 nt, Human
ccugucucuggccccaaaggcuugaccagaac

SEQ ID NO: 117635 - RNA, 32 nt, Human
ccugucucuguaaaggaugucugcucuguuca

SEQ ID NO: 117636 - RNA, 32 nt, Human
ccugucucuucagcuucucugaugcuugaacu

SEQ ID NO: 117637 - RNA, 17 nt, Human
ccugucucuucccuggg

SEQ ID NO: 117638 - RNA, 19 nt, Human
ccugucucuugcaagcucc

SEQ ID NO: 117639 - RNA, 26 nt, Human
ccugucucuugucguccuguccuucc

SEQ ID NO: 117640 - RNA, 32 nt, Human
ccugucucuugucguccuguccuuccuaucuc

SEQ ID NO: 117641 - RNA, 32 nt, Human
ccugucugaacucaccuggccugggaagcacc

SEQ ID NO: 117642 - RNA, 21 nt, Human
ccugucuggaggcggguguag

SEQ ID NO: 117643 - RNA, 32 nt, Human
ccugucuggcucagggucaaagacagaauggu

SEQ ID NO: 117644 - RNA, 32 nt, Human
ccugucuggcugccuugggucuuugguuugcu

SEQ ID NO: 117645 - RNA, 31 nt, Human
ccugucuggcuucucccuuaagaagagagag

SEQ ID NO: 117646 - RNA, 32 nt, Human
ccugucugggagguugaggccacaguguauag

SEQ ID NO: 117647 - RNA, 32 nt, Human
ccugucugggucccugaaaagauggaaagagg

SEQ ID NO: 117648 - RNA, 32 nt, Human
ccugucuguccccucacuucgcccuccccauu

SEQ ID NO: 117649 - RNA, 32 nt, Human
ccugucugucgcagccuuccucacucuguucc

SEQ ID NO: 117650 - RNA, 32 nt, Human
ccugucuguggcauauuugugcaugggacagg

SEQ ID NO: 117651 - RNA, 32 nt, Human
ccugucugugguuccagagggaagaagagggg

SEQ ID NO: 117652 - RNA, 22 nt, Human
ccugucuguucagccaggacaa

SEQ ID NO: 117653 - RNA, 32 nt, Human
ccugucuguuuuguacugcuugagugcagagg

SEQ ID NO: 117654 - RNA, 32 nt, Human
ccugucuucagccucagacugagugguggccu

SEQ ID NO: 117655 - RNA, 32 nt, Human
ccugucuucauccucaaguggaaauuaauagc

SEQ ID NO: 117656 - RNA, 24 nt, Human
ccugucuuccuugaccaaagcucu

SEQ ID NO: 117657 - RNA, 32 nt, Human
ccugucuucucaggcuugaugugaaagaaagg

SEQ ID NO: 117658 - RNA, 32 nt, Human
ccugucuucugugcacagcagcacuugccgcu

SEQ ID NO: 117659 - RNA, 32 nt, Human
ccugucuugcccacaucuccuuguucucauug

SEQ ID NO: 117660 - RNA, 32 nt, Human
ccugucuuguuuggggagaggggaacuguugg

SEQ ID NO: 117661 - RNA, 23 nt, Human
ccugucuuuaaagcugucccuga

SEQ ID NO: 117662 - RNA, 32 nt, Human
ccugucuuuccagcauccacucugucuugucc

SEQ ID NO: 117663 - RNA, 32 nt, Human
ccugucuuucccucuucugcucucaagagcaa

SEQ ID NO: 117664 - RNA, 31 nt, Human
ccugucuuucucucuggccugcugcucucuc

SEQ ID NO: 117665 - RNA, 32 nt, Human
ccugucuuugcuuaaagagccuugauuacaua

SEQ ID NO: 117666 - RNA, 32 nt, Human
ccugugaaauaacagugacuuuuuaaaauggu

SEQ ID NO: 117667 - RNA, 32 nt, Human
ccugugaacccccaguccuggcuucuuuguuu

SEQ ID NO: 117668 - RNA, 32 nt, Human
ccugugaaggacccugaaccagaggacucagc

SEQ ID NO: 117669 - RNA, 32 nt, Human
ccugugaaggccugaggcaggcuguggccagg

SEQ ID NO: 117670 - RNA, 22 nt, Human
ccugugaagggccugucuuucc

SEQ ID NO: 117671 - RNA, 32 nt, Human
ccugugaaguaaggaugugggggaagaccugg

SEQ ID NO: 117672 - RNA, 32 nt, Human
ccugugaauaacugcacuccagccugggcaac

SEQ ID NO: 117673 - RNA, 32 nt, Human
ccugugaauuucuuauuguacacaaguucuuu

SEQ ID NO: 117674 - RNA, 32 nt, Human
ccugugaccagcugaggaccucaggcugcagc

SEQ ID NO: 117675 - RNA, 32 nt, Human
ccugugacccguuccauaucccuuucucucuu

SEQ ID NO: 117676 - RNA, 32 nt, Human
ccugugaccucccuccugucuugcagcuccuc

SEQ ID NO: 117677 - RNA, 17 nt, Human
ccugugaccugugaccu

SEQ ID NO: 117678 - RNA, 32 nt, Human
ccugugacuaucuccuucuucacuuucauggc

SEQ ID NO: 117679 - RNA, 31 nt, Human
ccugugacucaggcguuuguuggagagcugc

SEQ ID NO: 117680 - RNA, 32 nt, Human
ccugugacugcacuguccgccugugggaugug

SEQ ID NO: 117681 - RNA, 17 nt, Human
ccugugacugcuggaga

SEQ ID NO: 117682 - RNA, 32 nt, Human
ccugugacuguggagcucuggaaggcuuggug

SEQ ID NO: 117683 - RNA, 32 nt, Human
ccugugacuuugcuccuaaguaccuacugccg

SEQ ID NO: 117684 - RNA, 32 nt, Human
ccugugagaccucccuuccuuguccuuguccu

SEQ ID NO: 117685 - RNA, 32 nt, Human
ccugugagaggccaguuugagguaugagaaca

SEQ ID NO: 117686 - RNA, 32 nt, Human
ccugugagcacccuccucucagccucuggcca

SEQ ID NO: 117687 - RNA, 23 nt, Human
ccugugagcacguccagcacaga

SEQ ID NO: 117688 - RNA, 32 nt, Human
ccugugagccugagacagagagggccaggcac

SEQ ID NO: 117689 - RNA, 32 nt, Human
ccugugagccuugacugggauucaugaugugg

SEQ ID NO: 117690 - RNA, 32 nt, Human
ccugugagcggcagugggcacugacacuaagc

SEQ ID NO: 117691 - RNA, 32 nt, Human
ccugugagcucaucucccaggauggugacuaa

SEQ ID NO: 117692 - RNA, 24 nt, Human
ccugugaggaagagguugcaguga

SEQ ID NO: 117693 - RNA, 32 nt, Human
ccugugaggaagagguugcagugagcugagau

SEQ ID NO: 117694 - RNA, 32 nt, Human
ccugugaggagguggcugggccacaguguggc

SEQ ID NO: 117695 - RNA, 32 nt, Human
ccugugaggcagagguugcagugagccaagau

SEQ ID NO: 117696 - RNA, 32 nt, Human
ccugugaggcggagcuugcagggagucgagau

SEQ ID NO: 117697 - RNA, 22 nt, Human
ccugugaggcggagguugcagu

SEQ ID NO: 117698 - RNA, 24 nt, Human
ccugugaggcggagguugcaguaa

SEQ ID NO: 117699 - RNA, 32 nt, Human
ccugugaggcuguacgugaggggcuuagaugg

SEQ ID NO: 117700 - RNA, 22 nt, Human
ccugugagggccucgccuucca

SEQ ID NO: 117701 - RNA, 32 nt, Human
ccugugagggccugaagcugggccagggcccg

SEQ ID NO: 117702 - RNA, 32 nt, Human
ccugugaggggagccaggcacacagggcccau

SEQ ID NO: 117703 - RNA, 32 nt, Human
ccugugagguccaguggccgcccaggcgcgac

SEQ ID NO: 117704 - RNA, 32 nt, Human
ccugugagguccuuucacucagcacauggaca

SEQ ID NO: 117705 - RNA, 32 nt, Human
ccugugaggucgaggcuacagugagcaaagau

SEQ ID NO: 117706 - RNA, 32 nt, Human
ccugugaggucgaggcugcagugagccgagau

SEQ ID NO: 117707 - RNA, 32 nt, Human
ccugugaggugaggcucuguugcagugucgua

SEQ ID NO: 117708 - RNA, 24 nt, Human
ccugugagguggagcuugcaguga

SEQ ID NO: 117709 - RNA, 32 nt, Human
ccugugagguggagcuugcagugagccaagau

SEQ ID NO: 117710 - RNA, 32 nt, Human
ccugugagucauggcagcucccaugaauggcc

SEQ ID NO: 117711 - RNA, 32 nt, Human
ccugugagucccaggcccagaggucccuggcu

SEQ ID NO: 117712 - RNA, 32 nt, Human
ccugugagucugggugagacaagaagggauuc

SEQ ID NO: 117713 - RNA, 23 nt, Human
ccugugaguggugccacaggggc

SEQ ID NO: 117714 - RNA, 32 nt, Human
ccugugaguuccauuauuucuaucucuuaugg

SEQ ID NO: 117715 - RNA, 32 nt, Human
ccugugaguucuuuuuguaaauuguuggaaca

SEQ ID NO: 117716 - RNA, 24 nt, Human
ccugugaguuugaggcugcaauga

SEQ ID NO: 117717 - RNA, 32 nt, Human
ccugugaucacagcuacucgggaggcugaggc

SEQ ID NO: 117718 - RNA, 32 nt, Human
ccugugaucauguuucaggaaggaaugaaaga

SEQ ID NO: 117719 - RNA, 32 nt, Human
ccugugaucccaauggcuuuccuuuccgaugc

SEQ ID NO: 117720 - RNA, 32 nt, Human
ccugugaucccagcuacacgggaggcagaggu

SEQ ID NO: 117721 - RNA, 32 nt, Human
ccugugaucccagcuacccgggaggcaguggc

SEQ ID NO: 117722 - RNA, 23 nt, Human
ccugugaucccagcuaccuggga

SEQ ID NO: 117723 - RNA, 32 nt, Human
ccugugaucccagcuaccugggaggcugagga

SEQ ID NO: 117724 - RNA, 32 nt, Human
ccugugaucccagcuacucaggaagcugaggc

SEQ ID NO: 117725 - RNA, 32 nt, Human
ccugugaucccagcuacucaggaggcugagac

SEQ ID NO: 117726 - RNA, 32 nt, Human
ccugugaucccagcuacucaggaggcugaggc

SEQ ID NO: 117727 - RNA, 32 nt, Human
ccugugaucccagcuacucgggaggcuaaggc

SEQ ID NO: 117728 - RNA, 32 nt, Human
ccugugaucccagcuacucgggaggcugaggc

SEQ ID NO: 117729 - RNA, 32 nt, Human
ccugugaucccagcuacugaggaggcugaggc

SEQ ID NO: 117730 - RNA, 32 nt, Human
ccugugaucccagcuacuggggagacugaggu

SEQ ID NO: 117731 - RNA, 23 nt, Human
ccugugaucccagcuacuuagga

SEQ ID NO: 117732 - RNA, 32 nt, Human
ccugugaucccagcuacuuaggagguugaggc

SEQ ID NO: 117733 - RNA, 32 nt, Human
ccugugaucccagcuacuugagaggcugaggu

SEQ ID NO: 117734 - RNA, 22 nt, Human
ccugugaucccagcuacuugga

SEQ ID NO: 117735 - RNA, 32 nt, Human
ccugugaucccagcuacuuggaaggcugaggu

SEQ ID NO: 117736 - RNA, 32 nt, Human
ccugugaucccagcuacuuggaggcugaggca

SEQ ID NO: 117737 - RNA, 23 nt, Human
ccugugaucccagcuacuuggga

SEQ ID NO: 117738 - RNA, 32 nt, Human
ccugugaucccagcuacuugggaggcugaggc

SEQ ID NO: 117739 - RNA, 32 nt, Human
ccugugaucccagcuacuugggaggcugaggu

SEQ ID NO: 117740 - RNA, 32 nt, Human
ccugugaucccagcugcucaggaggcugaggc

SEQ ID NO: 117741 - RNA, 22 nt, Human
ccugugaucccagcuuccuggg

SEQ ID NO: 117742 - RNA, 32 nt, Human
ccugugaugagccacccauuguggaccacgcc

SEQ ID NO: 117743 - RNA, 21 nt, Human
ccugugaugcugggcacuuca

SEQ ID NO: 117744 - RNA, 31 nt, Human
ccugugauggaggauacuggcauccagcgag

SEQ ID NO: 117745 - RNA, 32 nt, Human
ccugugauguucuggggaggccuuggaaggcu

SEQ ID NO: 117746 - RNA, 32 nt, Human
ccugugauguugcauucaucuuuuggaacaua

SEQ ID NO: 117747 - RNA, 32 nt, Human
ccugugauuccagcuacuugggagguugaggc

SEQ ID NO: 117748 - RNA, 32 nt, Human
ccugugcaaaccugcugcagagaacagugucu

SEQ ID NO: 117749 - RNA, 32 nt, Human
ccugugcaacacagcgagaccgcucuacaaaa

SEQ ID NO: 117750 - RNA, 32 nt, Human
ccugugcaacagagccagacccugacucaaua

SEQ ID NO: 117751 - RNA, 32 nt, Human
ccugugcaacauaucuagacccugucuuuaaa

SEQ ID NO: 117752 - RNA, 20 nt, Human
ccugugcaagccgaacagua

SEQ ID NO: 117753 - RNA, 32 nt, Human
ccugugcaauccaguaaccuugaacacuggaa

SEQ ID NO: 117754 - RNA, 20 nt, Human
ccugugcacacacccccuca

SEQ ID NO: 117755 - RNA, 32 nt, Human
ccugugcaccuaaccaacaccuccaggggcuc

SEQ ID NO: 117756 - RNA, 32 nt, Human
ccugugcacugcaagcugugucuacucaggcc

SEQ ID NO: 117757 - RNA, 32 nt, Human
ccugugcagaacuuagcauugggcaaagaaga

SEQ ID NO: 117758 - RNA, 21 nt, Human
ccugugcagccugggcugcug

SEQ ID NO: 117759 - RNA, 32 nt, Human
ccugugcaggcacuaguccuuuacagaugacc

SEQ ID NO: 117760 - RNA, 32 nt, Human
ccugugcagggugccgagagcccagggaugca

SEQ ID NO: 117761 - RNA, 32 nt, Human
ccugugcaguccagcccugccuugcugcagcc

SEQ ID NO: 117762 - RNA, 32 nt, Human
ccugugcaucugaugacugaugcauuauggca

SEQ ID NO: 117763 - RNA, 32 nt, Human
ccugugccaccccuuccucagccugggguuug

SEQ ID NO: 117764 - RNA, 32 nt, Human
ccugugccacccugggugccagucucuccuuc

SEQ ID NO: 117765 - RNA, 32 nt, Human
ccugugccacuggugccagccuggaugcaggc

SEQ ID NO: 117766 - RNA, 32 nt, Human
ccugugccagcagcugcgccccggcugcgcuc

SEQ ID NO: 117767 - RNA, 32 nt, Human
ccugugccagccuggccuucugcgagcacccc

SEQ ID NO: 117768 - RNA, 19 nt, Human
ccugugccagggacaggaa

SEQ ID NO: 117769 - RNA, 21 nt, Human
ccugugccaucccuggcccca

SEQ ID NO: 117770 - RNA, 32 nt, Human
ccugugcccacccucccaucacagagagcagc

SEQ ID NO: 117771 - RNA, 28 nt, Human
ccugugcccacugcugccucuccauccc

SEQ ID NO: 117772 - RNA, 32 nt, Human
ccugugcccagccugugcgugucaaccccacc

SEQ ID NO: 117773 - RNA, 32 nt, Human
ccugugccccaguuuuccagagcacuggggau

SEQ ID NO: 117774 - RNA, 19 nt, Human
ccugugccccuccuagggg

SEQ ID NO: 117775 - RNA, 32 nt, Human
ccugugccccugggcagauuggagagaagagg

SEQ ID NO: 117776 - RNA, 22 nt, Human
ccugugcccguguccuccuucu

SEQ ID NO: 117777 - RNA, 32 nt, Human
ccugugcccucuugcugccugccugucugcug

SEQ ID NO: 117778 - RNA, 32 nt, Human
ccugugcccugccuugcuuccuccaggacuug

SEQ ID NO: 117779 - RNA, 32 nt, Human
ccugugcccuggagggugggcggcucauggug

SEQ ID NO: 117780 - RNA, 32 nt, Human
ccugugcccuuccagggccagugagacagccu

SEQ ID NO: 117781 - RNA, 22 nt, Human
ccugugcccuuuccccaccuca

SEQ ID NO: 117782 - RNA, 32 nt, Human
ccugugccgauggacgcugccugccgccggcc

SEQ ID NO: 117783 - RNA, 32 nt, Human
ccugugccggacuccagccggggcgacgagag

SEQ ID NO: 117784 - RNA, 32 nt, Human
ccugugccucagcugcugucacaaauacccau

SEQ ID NO: 117785 - RNA, 32 nt, Human
ccugugccuccacauggggcccagggaccacc

SEQ ID NO: 117786 - RNA, 19 nt, Human
ccugugccuccuccucguc

SEQ ID NO: 117787 - RNA, 23 nt, Human
ccugugccuggaugggggugcag

SEQ ID NO: 117788 - RNA, 32 nt, Human
ccugugccugguucucuaucagaaaggggaug

SEQ ID NO: 117789 - RNA, 21 nt, Human
ccugugccugucaggcucugg

SEQ ID NO: 117790 - RNA, 21 nt, Human
ccugugccugucccucugcca

SEQ ID NO: 117791 - RNA, 32 nt, Human
ccugugccuuaggcucauuucaugcccucagc

SEQ ID NO: 117792 - RNA, 32 nt, Human
ccugugccuuuauuuugugucauucuauugga

SEQ ID NO: 117793 - RNA, 32 nt, Human
ccugugcgcaugcucaguagcugcgaaugcau

SEQ ID NO: 117794 - RNA, 32 nt, Human
ccugugcgggaaaggaacugcugccuucagcc

SEQ ID NO: 117795 - RNA, 32 nt, Human
ccugugcgggucucucccuuggcguauaucca

SEQ ID NO: 117796 - RNA, 32 nt, Human
ccugugcggugccaccaaggccccaccccugc

SEQ ID NO: 117797 - RNA, 32 nt, Human
ccugugcuaacacccauacccaccagcugggc

SEQ ID NO: 117798 - RNA, 32 nt, Human
ccugugcuacagccaugucacuccuggcgacc

SEQ ID NO: 117799 - RNA, 32 nt, Human
ccugugcuaccaguacuaagaggggaagacug

SEQ ID NO: 117800 - RNA, 32 nt, Human
ccugugcucacugcccccacgccuccugccaa

SEQ ID NO: 117801 - RNA, 32 nt, Human
ccugugcucagccauggccagcgagagcucac

SEQ ID NO: 117802 - RNA, 32 nt, Human
ccugugcucaggaugcagcccugggauccagc

SEQ ID NO: 117803 - RNA, 32 nt, Human
ccugugcuccacccaggaggugggaggugaau

SEQ ID NO: 117804 - RNA, 32 nt, Human
ccugugcucccagcuacuuggaagacugaggu

SEQ ID NO: 117805 - RNA, 32 nt, Human
ccugugcucccaggccuuuugaauguuccucc

SEQ ID NO: 117806 - RNA, 32 nt, Human
ccugugcuccccggagaggggcagcagugcgg

SEQ ID NO: 117807 - RNA, 32 nt, Human
ccugugcuccugcuggggaaggcugggggcug

SEQ ID NO: 117808 - RNA, 32 nt, Human
ccugugcuccuugacugucucuccccaccggg

SEQ ID NO: 117809 - RNA, 31 nt, Human
ccugugcucugauuaaaucuacaucaauugu

SEQ ID NO: 117810 - RNA, 32 nt, Human
ccugugcugagacuucucagccccagaacaca

SEQ ID NO: 117811 - RNA, 32 nt, Human
ccugugcugagcugacccgccugcugcuguac

SEQ ID NO: 117812 - RNA, 18 nt, Human
ccugugcugccccugccg

SEQ ID NO: 117813 - RNA, 32 nt, Human
ccugugcugcgacgcacauacauacguguugu

SEQ ID NO: 117814 - RNA, 32 nt, Human
ccugugcugcguguccaucaucagcugaccaa

SEQ ID NO: 117815 - RNA, 32 nt, Human
ccugugcuggggacccugugggagcagcaggc

SEQ ID NO: 117816 - RNA, 32 nt, Human
ccugugcuguccccugcaccccggcucagcug

SEQ ID NO: 117817 - RNA, 32 nt, Human
ccugugcugugacccgcacuggucgugggagu

SEQ ID NO: 117818 - RNA, 32 nt, Human
ccugugcugugggccagggaauccagcggcgu

SEQ ID NO: 117819 - RNA, 32 nt, Human
ccugugcuuacacacaugcacacacaaauaug

SEQ ID NO: 117820 - RNA, 32 nt, Human
ccugugcuuauuuuuccaggauacugcauugg

SEQ ID NO: 117821 - RNA, 32 nt, Human
ccugugcuugcagccaggucaggcccagcugc

SEQ ID NO: 117822 - RNA, 32 nt, Human
ccugugcuuugagaggaagaagauggucauca

SEQ ID NO: 117823 - RNA, 32 nt, Human
ccuguggaaaagaagagagacagagagacagu

SEQ ID NO: 117824 - RNA, 32 nt, Human
ccuguggaagaagaguccaggccaggucuuca

SEQ ID NO: 117825 - RNA, 32 nt, Human
ccuguggaaggcagaggcagugagggaggugg

SEQ ID NO: 117826 - RNA, 32 nt, Human
ccuguggaauguugggucucacucucugggga

SEQ ID NO: 117827 - RNA, 19 nt, Human
ccuguggacacccccucac

SEQ ID NO: 117828 - RNA, 21 nt, Human
ccuguggagaccagucuuucu

SEQ ID NO: 117829 - RNA, 32 nt, Human
ccuguggagagggugacugugggagagcagca

SEQ ID NO: 117830 - RNA, 32 nt, Human
ccuguggagcagaacgggaaccaccugcagag

SEQ ID NO: 117831 - RNA, 32 nt, Human
ccuguggagcggggauuggcucugagaaggag

SEQ ID NO: 117832 - RNA, 32 nt, Human
ccuguggaggaggugguggugguauggugagg

SEQ ID NO: 117833 - RNA, 32 nt, Human
ccuguggaggcagagacacagcugucauagac

SEQ ID NO: 117834 - RNA, 32 nt, Human
ccuguggaggcagccggugguugagccgcccc

SEQ ID NO: 117835 - RNA, 32 nt, Human
ccuguggaggcuccacucaaagcuggcauccu

SEQ ID NO: 117836 - RNA, 32 nt, Human
ccuguggagguggacgugugguugguguucug

SEQ ID NO: 117837 - RNA, 32 nt, Human
ccuguggauacuuggcuuuucucuugugggca

SEQ ID NO: 117838 - RNA, 32 nt, Human
ccuguggauucccucccucccuggaguguuga

SEQ ID NO: 117839 - RNA, 24 nt, Human
ccuguggauugaaauggcugcaga

SEQ ID NO: 117840 - RNA, 19 nt, Human
ccuguggcaaaaggauaaa

SEQ ID NO: 117841 - RNA, 32 nt, Human
ccuguggcacccucuguauacuuccuccuccu

SEQ ID NO: 117842 - RNA, 32 nt, Human
ccuguggcagaggugugcagaggcagagugug

SEQ ID NO: 117843 - RNA, 32 nt, Human
ccuguggcagugacggcugcucaagggccuua

SEQ ID NO: 117844 - RNA, 19 nt, Human
ccuguggccacagcagcuu

SEQ ID NO: 117845 - RNA, 32 nt, Human
ccuguggccacgcggggcaagugccuuuccga

SEQ ID NO: 117846 - RNA, 32 nt, Human
ccuguggccauccugccauacauccaggacau

SEQ ID NO: 117847 - RNA, 32 nt, Human
ccuguggccaugagcccuccccggugcuccug

SEQ ID NO: 117848 - RNA, 32 nt, Human
ccuguggccauggagcuccugggugagcagcu

SEQ ID NO: 117849 - RNA, 32 nt, Human
ccuguggcccagcagagccucugacaguaaag

SEQ ID NO: 117850 - RNA, 32 nt, Human
ccuguggcccagccuggcuggccugcaggugu

SEQ ID NO: 117851 - RNA, 32 nt, Human
ccuguggcccaggauggaggccaccgcugccc

SEQ ID NO: 117852 - RNA, 32 nt, Human
ccuguggccccagcuucucaguaggcugaggu

SEQ ID NO: 117853 - RNA, 32 nt, Human
ccuguggcccgggcggcugggagaagcggagu

SEQ ID NO: 117854 - RNA, 32 nt, Human
ccuguggcccuccgugcccucgcuccugugau

SEQ ID NO: 117855 - RNA, 32 nt, Human
ccuguggccguuuuccgagcuuuccggucaca

SEQ ID NO: 117856 - RNA, 22 nt, Human
ccuguggcucuugccaccuccu

SEQ ID NO: 117857 - RNA, 32 nt, Human
ccuguggcugcccucuccccagccuggcgugg

SEQ ID NO: 117858 - RNA, 32 nt, Human
ccuguggcuggagucccuggacccuguggagu

SEQ ID NO: 117859 - RNA, 32 nt, Human
ccuguggcuggcagagagccgggccaaggcag

SEQ ID NO: 117860 - RNA, 32 nt, Human
ccuguggcuggcuggccccugguguacuguaa

SEQ ID NO: 117861 - RNA, 32 nt, Human
ccuguggcugggcuggagugcaauggcgcgau

SEQ ID NO: 117862 - RNA, 32 nt, Human
ccuguggcugucacuccugggcccaggcaccu

SEQ ID NO: 117863 - RNA, 32 nt, Human
ccuguggcuuggcugcagcggccggcaagacc

SEQ ID NO: 117864 - RNA, 32 nt, Human
ccugugggaauagaaucguccacuccuagccc

SEQ ID NO: 117865 - RNA, 32 nt, Human
ccugugggacccagagggcuugaggacaucug

SEQ ID NO: 117866 - RNA, 32 nt, Human
ccugugggagagagcgccgggauccggacggg

SEQ ID NO: 117867 - RNA, 32 nt, Human
ccugugggagcagcaggcuuccgagcacgugc

SEQ ID NO: 117868 - RNA, 32 nt, Human
ccugugggagcagccuguguccaggcugggga

SEQ ID NO: 117869 - RNA, 32 nt, Human
ccugugggaggaugagagcuacugggccguug

SEQ ID NO: 117870 - RNA, 32 nt, Human
ccugugggaggcggacagcagugaccaccucc

SEQ ID NO: 117871 - RNA, 32 nt, Human
ccugugggauauaccaaggcagaggagcccau

SEQ ID NO: 117872 - RNA, 32 nt, Human
ccugugggcaaccacaccacugccuggcgccg

SEQ ID NO: 117873 - RNA, 25 nt, Human
ccugugggccaaaggauggcccuca

SEQ ID NO: 117874 - RNA, 18 nt, Human
ccugugggcggggugcag

SEQ ID NO: 117875 - RNA, 32 nt, Human
ccugugggcguuggccugaggguccuuggugc

SEQ ID NO: 117876 - RNA, 26 nt, Human
ccugugggcugagacgguggcccuca

SEQ ID NO: 117877 - RNA, 32 nt, Human
ccugugggcuuuccaccugucucucucuuuuu

SEQ ID NO: 117878 - RNA, 32 nt, Human
ccugugggcuuuucauacuugccuacugggcc

SEQ ID NO: 117879 - RNA, 32 nt, Human
ccuguggggagagugagguugcuggagccacg

SEQ ID NO: 117880 - RNA, 32 nt, Human
ccuguggggccuccacugcuuuucuaugggag

SEQ ID NO: 117881 - RNA, 32 nt, Human
ccuguggggcucaagaagccuggucagccagc

SEQ ID NO: 117882 - RNA, 32 nt, Human
ccuguggggcucauugugcccauugcucuuuc

SEQ ID NO: 117883 - RNA, 23 nt, Human
ccuguggggcugcuggcaccucu

SEQ ID NO: 117884 - RNA, 19 nt, Human
ccuguggggguccguguga

SEQ ID NO: 117885 - RNA, 32 nt, Human
ccuguggguagaggaaagagugaucugguguc

SEQ ID NO: 117886 - RNA, 32 nt, Human
ccuguggguccaagggccgcugggcaggcggc

SEQ ID NO: 117887 - RNA, 32 nt, Human
ccuguggguccccaucgcccaaguccugccca

SEQ ID NO: 117888 - RNA, 32 nt, Human
ccugugggugauggucacgguggguggguggg

SEQ ID NO: 117889 - RNA, 32 nt, Human
ccuguggguucacagcuguggggacccaggca

SEQ ID NO: 117890 - RNA, 32 nt, Human
ccuguggguucagagccaggagcgcugcccca

SEQ ID NO: 117891 - RNA, 32 nt, Human
ccugugguagccccagcaguucucagggugcu

SEQ ID NO: 117892 - RNA, 32 nt, Human
ccugugguagugcucccagucugaccucugua

SEQ ID NO: 117893 - RNA, 22 nt, Human
ccugugguaugcugccaccucu

SEQ ID NO: 117894 - RNA, 32 nt, Human
ccugugguauugacucugagaauaacacauag

SEQ ID NO: 117895 - RNA, 22 nt, Human
ccuguggucacagcuacucaga

SEQ ID NO: 117896 - RNA, 32 nt, Human
ccuguggucacagcuacucagaaggcugaggu

SEQ ID NO: 117897 - RNA, 32 nt, Human
ccuguggucagcuaagaggagcccaaggcucu

SEQ ID NO: 117898 - RNA, 32 nt, Human
ccugugguccagcaugccuggccugggcgggc

SEQ ID NO: 117899 - RNA, 32 nt, Human
ccuguggucccagcuacacaggaggcuaaggu

SEQ ID NO: 117900 - RNA, 32 nt, Human
ccuguggucccagcuacaugggaggcugaggc

SEQ ID NO: 117901 - RNA, 23 nt, Human
ccuguggucccagcuacccggga

SEQ ID NO: 117902 - RNA, 32 nt, Human
ccuguggucccagcuacccgggaggcugaguu

SEQ ID NO: 117903 - RNA, 32 nt, Human
ccuguggucccagcuacuagggaggcugagcc

SEQ ID NO: 117904 - RNA, 32 nt, Human
ccuguggucccagcuacucaagaggcugaggu

SEQ ID NO: 117905 - RNA, 32 nt, Human
ccuguggucccagcuacucagagggcugaggu

SEQ ID NO: 117906 - RNA, 23 nt, Human
ccuguggucccagcuacucagga

SEQ ID NO: 117907 - RNA, 32 nt, Human
ccuguggucccagcuacucaggagacugaggu

SEQ ID NO: 117908 - RNA, 32 nt, Human
ccuguggucccagcuacucaggaggcugaggc

SEQ ID NO: 117909 - RNA, 32 nt, Human
ccuguggucccagcuacucaggaggcugaggu

SEQ ID NO: 117910 - RNA, 23 nt, Human
ccuguggucccagcuacuccaga

SEQ ID NO: 117911 - RNA, 32 nt, Human
ccuguggucccagcuacuccagaggcugaggu

SEQ ID NO: 117912 - RNA, 32 nt, Human
ccuguggucccagcuacucgagaggcuaaggc

SEQ ID NO: 117913 - RNA, 23 nt, Human
ccuguggucccagcuacucggga

SEQ ID NO: 117914 - RNA, 32 nt, Human
ccuguggucccagcuacucgggacgcugaggu

SEQ ID NO: 117915 - RNA, 32 nt, Human
ccuguggucccagcuacucgggaggcugaggc

SEQ ID NO: 117916 - RNA, 32 nt, Human
ccuguggucccagcuacucgggaggcugaggu

SEQ ID NO: 117917 - RNA, 32 nt, Human
ccuguggucccagcuacucgggaggcuguggu

SEQ ID NO: 117918 - RNA, 32 nt, Human
ccuguggucccagcuacucgggaggcuuagac

SEQ ID NO: 117919 - RNA, 32 nt, Human
ccuguggucccagcuacucuggaggcuaaggu

SEQ ID NO: 117920 - RNA, 32 nt, Human
ccuguggucccagcuacucuggaggcugaggc

SEQ ID NO: 117921 - RNA, 32 nt, Human
ccuguggucccagcuacucuggaggcugaggu

SEQ ID NO: 117922 - RNA, 32 nt, Human
ccuguggucccagcuacugaggaggcugaggu

SEQ ID NO: 117923 - RNA, 32 nt, Human
ccuguggucccagcuacuggggaggcugaagc

SEQ ID NO: 117924 - RNA, 32 nt, Human
ccuguggucccagcuacuggggaggcugaggc

SEQ ID NO: 117925 - RNA, 32 nt, Human
ccuguggucccagcuacuggggaggcugaggu

SEQ ID NO: 117926 - RNA, 32 nt, Human
ccuguggucccagcuacuugagaggcugaggu

SEQ ID NO: 117927 - RNA, 32 nt, Human
ccuguggucccagcuacuuggaaggcuaaggu

SEQ ID NO: 117928 - RNA, 32 nt, Human
ccuguggucccagcuacuugggaggcuaaggu

SEQ ID NO: 117929 - RNA, 32 nt, Human
ccuguggucccagcuacuugggaggcugaagc

SEQ ID NO: 117930 - RNA, 32 nt, Human
ccuguggucccagcuacuugggaggcugaggu

SEQ ID NO: 117931 - RNA, 32 nt, Human
ccuguggucccagcuauucaggaggcugaggu

SEQ ID NO: 117932 - RNA, 32 nt, Human
ccuguggucccagcuauucgggaggcugaggc

SEQ ID NO: 117933 - RNA, 32 nt, Human
ccuguggucccagcuauuugggaggcugaggu

SEQ ID NO: 117934 - RNA, 32 nt, Human
ccuguggucccagcuccucaggaggcugaggu

SEQ ID NO: 117935 - RNA, 23 nt, Human
ccuguggucccagcuucuuggga

SEQ ID NO: 117936 - RNA, 32 nt, Human
ccuguggucccagguacucaggaugcugaggu

SEQ ID NO: 117937 - RNA, 23 nt, Human
ccuguggucccaguuucuuggga

SEQ ID NO: 117938 - RNA, 20 nt, Human
ccugugguccccccacugcc

SEQ ID NO: 117939 - RNA, 32 nt, Human
ccugugguccccgagacacaggcacggguccc

SEQ ID NO: 117940 - RNA, 32 nt, Human
ccuguggucccgguuacucaggaggcugaggc

SEQ ID NO: 117941 - RNA, 32 nt, Human
ccugugguccuagcuacucaggaggcugaggc

SEQ ID NO: 117942 - RNA, 32 nt, Human
ccugugguccuagcuacucgggaggcugaggc

SEQ ID NO: 117943 - RNA, 32 nt, Human
ccuguggucucaacuacucaggaggcugaggc

SEQ ID NO: 117944 - RNA, 32 nt, Human
ccuguggucucagcuacucaggaggcugaggu

SEQ ID NO: 117945 - RNA, 32 nt, Human
ccuguggucucagcuacucagggggcugaggc

SEQ ID NO: 117946 - RNA, 32 nt, Human
ccuguggucucagcuacucgggaggcugaggu

SEQ ID NO: 117947 - RNA, 32 nt, Human
ccuguggucucagcuacuugggaggcugaggc

SEQ ID NO: 117948 - RNA, 32 nt, Human
ccuguggucucagcuacuugggaggcugaggu

SEQ ID NO: 117949 - RNA, 32 nt, Human
ccuguggucucagcuacuugggaggcuggggu

SEQ ID NO: 117950 - RNA, 32 nt, Human
ccuguggugagcuggagguuggagccugaaga

SEQ ID NO: 117951 - RNA, 32 nt, Human
ccuguggugagcuggagguuggagccugaaua

SEQ ID NO: 117952 - RNA, 32 nt, Human
ccuguggugcggccucaaccacucccuggugc

SEQ ID NO: 117953 - RNA, 32 nt, Human
ccuguggugcugcugggcccucccacuccauc

SEQ ID NO: 117954 - RNA, 32 nt, Human
ccugugguggauuucacuuacaagaaaauuga

SEQ ID NO: 117955 - RNA, 32 nt, Human
ccugugguggccuugcauccugacuggauguu

SEQ ID NO: 117956 - RNA, 32 nt, Human
ccugugguggggcucccugcacucugguguuc

SEQ ID NO: 117957 - RNA, 32 nt, Human
ccuguggugucagcuacucgggaggcugaggc

SEQ ID NO: 117958 - RNA, 32 nt, Human
ccugugguguccaugagguaccacagcuccac

SEQ ID NO: 117959 - RNA, 23 nt, Human
ccugugguuccagcuacuuggga

SEQ ID NO: 117960 - RNA, 32 nt, Human
ccugugguuccagcuacuugggaggcucaggc

SEQ ID NO: 117961 - RNA, 32 nt, Human
ccugugguucugacucuucccaguguccugca

SEQ ID NO: 117962 - RNA, 32 nt, Human
ccugugguuuucugauuguaaguggaagcagg

SEQ ID NO: 117963 - RNA, 32 nt, Human
ccuguguaaacgccaggaaggcaggucccuuu

SEQ ID NO: 117964 - RNA, 32 nt, Human
ccuguguaacaucugccauuuauuuccucagc

SEQ ID NO: 117965 - RNA, 32 nt, Human
ccuguguaaccccuuuccuguaaaagggguuc

SEQ ID NO: 117966 - RNA, 32 nt, Human
ccuguguaauccagagauggcaucuuguuuuc

SEQ ID NO: 117967 - RNA, 32 nt, Human
ccuguguaccugcugggccaguaugggaaccg

SEQ ID NO: 117968 - RNA, 32 nt, Human
ccuguguagacagaagcuaaaccaccagucuc

SEQ ID NO: 117969 - RNA, 32 nt, Human
ccuguguagagccugcaucugucuguccuucc

SEQ ID NO: 117970 - RNA, 32 nt, Human
ccuguguaggagaggaaagggaaucaaaagcu

SEQ ID NO: 117971 - RNA, 32 nt, Human
ccugugucacucccaauuucugagguccagcc

SEQ ID NO: 117972 - RNA, 32 nt, Human
ccugugucacugggaccccaggcaugcaccac

SEQ ID NO: 117973 - RNA, 32 nt, Human
ccugugucagagcacugagcuccacccuuuuc

SEQ ID NO: 117974 - RNA, 32 nt, Human
ccugugucaguguggcagucuuuggcugccug

SEQ ID NO: 117975 - RNA, 32 nt, Human
ccugugucauguucuguugaauacugcagccg

SEQ ID NO: 117976 - RNA, 32 nt, Human
ccugugucauucuucuaauccaauguagaaau

SEQ ID NO: 117977 - RNA, 32 nt, Human
ccugugucccagguuucacagggcucaggguu

SEQ ID NO: 117978 - RNA, 21 nt, Human
ccuguguccugccucuugccu

SEQ ID NO: 117979 - RNA, 32 nt, Human
ccuguguccugccucuugccucuuguagaaug

SEQ ID NO: 117980 - RNA, 32 nt, Human
ccuguguccugggccugggccugcugugacug

SEQ ID NO: 117981 - RNA, 32 nt, Human
ccugugucgguuccccacuaggaacaaaaugu

SEQ ID NO: 117982 - RNA, 32 nt, Human
ccugugucuaagcugcuccacccauggcuaaa

SEQ ID NO: 117983 - RNA, 21 nt, Human
ccugugucucacccccucaca

SEQ ID NO: 117984 - RNA, 32 nt, Human
ccugugucucagaagagaacugaauguucaga

SEQ ID NO: 117985 - RNA, 32 nt, Human
ccugugucucagccugaccccuugccagcuuc

SEQ ID NO: 117986 - RNA, 32 nt, Human
ccugugucucauuccucccucucugccagauc

SEQ ID NO: 117987 - RNA, 32 nt, Human
ccugugucuccuccuucccacggggcuucuga

SEQ ID NO: 117988 - RNA, 32 nt, Human
ccugugucucugagaguagagucacuggaaca

SEQ ID NO: 117989 - RNA, 32 nt, Human
ccugugucugaggagaccucagcagggcccgc

SEQ ID NO: 117990 - RNA, 32 nt, Human
ccugugucuggcagagcuggugugagacgaga

SEQ ID NO: 117991 - RNA, 32 nt, Human
ccugugucugucagucagucucucccuggcuc

SEQ ID NO: 117992 - RNA, 32 nt, Human
ccugugucugugucuguccugagaacuuacca

SEQ ID NO: 117993 - RNA, 32 nt, Human
ccugugucuuccucugcugucgagacguuccu

SEQ ID NO: 117994 - RNA, 16 nt, Human
ccugugucuuccuggg

SEQ ID NO: 117995 - RNA, 32 nt, Human
ccugugucuugagccuggagggagacugcucc

SEQ ID NO: 117996 - RNA, 32 nt, Human
ccugugugaaguaucucaucauuuucgaaagg

SEQ ID NO: 117997 - RNA, 19 nt, Human
ccugugugacagagcaaga

SEQ ID NO: 117998 - RNA, 32 nt, Human
ccugugugagaaugggaauuucaagucccauc

SEQ ID NO: 117999 - RNA, 32 nt, Human
ccugugugagccaccacacccagccugggucu

SEQ ID NO: 118000 - RNA, 32 nt, Human
ccugugugaguucugucuucacagacuccuca

SEQ ID NO: 118001 - RNA, 32 nt, Human
ccugugugauucccggucugcaccacauggcg

SEQ ID NO: 118002 - RNA, 32 nt, Human
ccugugugcaagucccuuucuccuggauucca

SEQ ID NO: 118003 - RNA, 32 nt, Human
ccugugugcaguggauccacauagcuaauaug

SEQ ID NO: 118004 - RNA, 32 nt, Human
ccugugugccggcugcucacugcugugaccag

SEQ ID NO: 118005 - RNA, 23 nt, Human
ccugugugccuccugccaucccu

SEQ ID NO: 118006 - RNA, 32 nt, Human
ccuguguggcaaaacugccuccuacggcggcu

SEQ ID NO: 118007 - RNA, 18 nt, Human
ccuguguggcacaugugg

SEQ ID NO: 118008 - RNA, 32 nt, Human
ccuguguggcccugugugucggaaagauggag

SEQ ID NO: 118009 - RNA, 32 nt, Human
ccuguguggggaggggccuuguugggggagcc

SEQ ID NO: 118010 - RNA, 18 nt, Human
ccuguguggggggcucgg

SEQ ID NO: 118011 - RNA, 32 nt, Human
ccuguguggguguggagauggccaaugagaau

SEQ ID NO: 118012 - RNA, 32 nt, Human
ccuguguguaagcagaaccuccacucccuccg

SEQ ID NO: 118013 - RNA, 32 nt, Human
ccugugugugccaggcccugcagucucuccuc

SEQ ID NO: 118014 - RNA, 32 nt, Human
ccugugugugccuagagcaugcaccugcuccc

SEQ ID NO: 118015 - RNA, 24 nt, Human
ccugugugugcuggcugcgccuga

SEQ ID NO: 118016 - RNA, 32 nt, Human
ccuguguguggauggugaugcagaggaugucu

SEQ ID NO: 118017 - RNA, 22 nt, Human
ccugugugugggagggggccgg

SEQ ID NO: 118018 - RNA, 32 nt, Human
ccugugugugggcagccauggccuaggacccc

SEQ ID NO: 118019 - RNA, 32 nt, Human
ccugugugugggcccaguuuucaggcauguag

SEQ ID NO: 118020 - RNA, 32 nt, Human
ccugugugugggcucugaaggcucagcccugc

SEQ ID NO: 118021 - RNA, 18 nt, Human
ccuguguguggggugcag

SEQ ID NO: 118022 - RNA, 21 nt, Human
ccuguguguuuccuacugccg

SEQ ID NO: 118023 - RNA, 32 nt, Human
ccuguguuauauguguuucacgcacauauuug

SEQ ID NO: 118024 - RNA, 32 nt, Human
ccuguguucagccucaggccuauagcugcugu

SEQ ID NO: 118025 - RNA, 32 nt, Human
ccuguguucccagcuacucaggaggcuauggu

SEQ ID NO: 118026 - RNA, 32 nt, Human
ccuguguucccagcuacucaggaggcugaagc

SEQ ID NO: 118027 - RNA, 32 nt, Human
ccuguguucccagcuacuugggaggcuaaggu

SEQ ID NO: 118028 - RNA, 32 nt, Human
ccuguguucccagcuauucaggaggcugaggu

SEQ ID NO: 118029 - RNA, 20 nt, Human
ccuguguucucccccggggc

SEQ ID NO: 118030 - RNA, 32 nt, Human
ccuguguucucuguuuucugcagccauagugu

SEQ ID NO: 118031 - RNA, 32 nt, Human
ccuguguucugccugccaggccagcugucucc

SEQ ID NO: 118032 - RNA, 32 nt, Human
ccuguguugaaagcucuggggacugggccagg

SEQ ID NO: 118033 - RNA, 32 nt, Human
ccuguguugcucaggcuggagugcaguggugu

SEQ ID NO: 118034 - RNA, 32 nt, Human
ccuguguugcugcugcugaggccaaaucacuc

SEQ ID NO: 118035 - RNA, 32 nt, Human
ccuguguuuccacuucugcuuccaaagauuuu

SEQ ID NO: 118036 - RNA, 32 nt, Human
ccuguguuugacuucccgggauggguccuugc

SEQ ID NO: 118037 - RNA, 32 nt, Human
ccuguguuugaggucaaggggcagcaggagaa

SEQ ID NO: 118038 - RNA, 32 nt, Human
ccuguguuuguuugguucccacaauaguuuuc

SEQ ID NO: 118039 - RNA, 32 nt, Human
ccuguuaaaaagggcugccuuccuucaaauuu

SEQ ID NO: 118040 - RNA, 32 nt, Human
ccuguuaagguccuacccuggagccauagcug

SEQ ID NO: 118041 - RNA, 32 nt, Human
ccuguuaauuuucucaugaauuucaguuaaug

SEQ ID NO: 118042 - RNA, 32 nt, Human
ccuguuacccucacaucucucuuaccaauggu

SEQ ID NO: 118043 - RNA, 32 nt, Human
ccuguuacuauuccuuugggaucucugaggcc

SEQ ID NO: 118044 - RNA, 32 nt, Human
ccuguuacugguaauucugguaccaaaauuuc

SEQ ID NO: 118045 - RNA, 32 nt, Human
ccuguuagagcugaggcgcagguaaaaugacu

SEQ ID NO: 118046 - RNA, 28 nt, Human
ccuguuagauggcucugccuguccuucc

SEQ ID NO: 118047 - RNA, 32 nt, Human
ccuguuagcuccuucuggaaugccagggcucu

SEQ ID NO: 118048 - RNA, 20 nt, Human
ccuguuagggaaauugcuga

SEQ ID NO: 118049 - RNA, 32 nt, Human
ccuguuauaguagagaaugaaagcuaugugaa

SEQ ID NO: 118050 - RNA, 32 nt, Human
ccuguuaucccagcuacuugggaggcuaaggc

SEQ ID NO: 118051 - RNA, 32 nt, Human
ccuguuauccuagcuacucaggaggcugaggc

SEQ ID NO: 118052 - RNA, 29 nt, Human
ccuguuaucucagcuacuugggaagcuga

SEQ ID NO: 118053 - RNA, 32 nt, Human
ccuguuaucuguguuugcugaggagaguggaa

SEQ ID NO: 118054 - RNA, 32 nt, Human
ccuguuauugguucacacacagacagcaaagu

SEQ ID NO: 118055 - RNA, 23 nt, Human
ccuguucaaaggaagaaugggua

SEQ ID NO: 118056 - RNA, 20 nt, Human
ccuguucaaggccccugaca

SEQ ID NO: 118057 - RNA, 32 nt, Human
ccuguucacaccucaggcaacuucugaagugg

SEQ ID NO: 118058 - RNA, 32 nt, Human
ccuguucacccaggaggucaacaauggaagga

SEQ ID NO: 118059 - RNA, 32 nt, Human
ccuguucaccuaggugaggugugugcagcagu

SEQ ID NO: 118060 - RNA, 32 nt, Human
ccuguucagagcagcacugucacugcaagucc

SEQ ID NO: 118061 - RNA, 32 nt, Human
ccuguucagauggggauugggggugucuuccc

SEQ ID NO: 118062 - RNA, 32 nt, Human
ccuguucagcacucccagcugugugacuuuau

SEQ ID NO: 118063 - RNA, 32 nt, Human
ccuguucaguuuccucauaaacuucucucucc

SEQ ID NO: 118064 - RNA, 32 nt, Human
ccuguucaugcugaugacauuggauggccagu

SEQ ID NO: 118065 - RNA, 32 nt, Human
ccuguuccagaaggaggauucgagcaucaggc

SEQ ID NO: 118066 - RNA, 32 nt, Human
ccuguuccagccagugccugaaccugucccug

SEQ ID NO: 118067 - RNA, 32 nt, Human
ccuguuccagcuguaucagauacucguuccgc

SEQ ID NO: 118068 - RNA, 32 nt, Human
ccuguuccauuccccucuucuuccuucuaucu

SEQ ID NO: 118069 - RNA, 32 nt, Human
ccuguuccauuuuucuucuuuugcuucacuga

SEQ ID NO: 118070 - RNA, 32 nt, Human
ccuguucccagagguguccuuggacucaccuu

SEQ ID NO: 118071 - RNA, 32 nt, Human
ccuguucccagcuaggcucuuucccaaccaag

SEQ ID NO: 118072 - RNA, 32 nt, Human
ccuguuccccucacuggucucuccaguguccu

SEQ ID NO: 118073 - RNA, 32 nt, Human
ccuguuccccuccacuccuccccucacucccc

SEQ ID NO: 118074 - RNA, 21 nt, Human
ccuguuccccucucccuuccc

SEQ ID NO: 118075 - RNA, 22 nt, Human
ccuguucccuucccugaccuca

SEQ ID NO: 118076 - RNA, 32 nt, Human
ccuguuccgcagagaaauguugcucuccauua

SEQ ID NO: 118077 - RNA, 32 nt, Human
ccuguuccuccaccuucccaugcuacaacuuc

SEQ ID NO: 118078 - RNA, 32 nt, Human
ccuguuccuccacuaugggcucccuuucaaac

SEQ ID NO: 118079 - RNA, 32 nt, Human
ccuguuccuccggcugccuccauggaggcagu

SEQ ID NO: 118080 - RNA, 32 nt, Human
ccuguuccugcucucccuccagggcugcugag

SEQ ID NO: 118081 - RNA, 24 nt, Human
ccuguuccugggaggcgggcgcgg

SEQ ID NO: 118082 - RNA, 32 nt, Human
ccuguuccugggaggcgggcgcggcaggacug

SEQ ID NO: 118083 - RNA, 32 nt, Human
ccuguuccuuccuaccccuccuuccccacgua

SEQ ID NO: 118084 - RNA, 32 nt, Human
ccuguuccuuguaauucucccacuguucucag

SEQ ID NO: 118085 - RNA, 32 nt, Human
ccuguuccuuucucuaccacccuugccuuccc

SEQ ID NO: 118086 - RNA, 32 nt, Human
ccuguucgagggcugagaucuucggucccaca

SEQ ID NO: 118087 - RNA, 32 nt, Human
ccuguucguguguccacagugcucuuaccacu

SEQ ID NO: 118088 - RNA, 32 nt, Human
ccuguucuacagcuauggccgggccagcugca

SEQ ID NO: 118089 - RNA, 32 nt, Human
ccuguucuccaucuccauuucuucccaugcug

SEQ ID NO: 118090 - RNA, 32 nt, Human
ccuguucucgccaaucucuaugccuuugcacu

SEQ ID NO: 118091 - RNA, 32 nt, Human
ccuguucucugccucuuguaccccucugaccc

SEQ ID NO: 118092 - RNA, 32 nt, Human
ccuguucucuuauuucacagguuauacagcag

SEQ ID NO: 118093 - RNA, 32 nt, Human
ccuguucucuuauuuccccuucauccuauuuu

SEQ ID NO: 118094 - RNA, 20 nt, Human
ccuguucugaaaacuagaug

SEQ ID NO: 118095 - RNA, 32 nt, Human
ccuguucugagacuucugaggcugcccccagg

SEQ ID NO: 118096 - RNA, 32 nt, Human
ccuguucugaggcaccuccucaccucagaaac

SEQ ID NO: 118097 - RNA, 32 nt, Human
ccuguucugcagcugaggaacucaugcucaaa

SEQ ID NO: 118098 - RNA, 32 nt, Human
ccuguucuggacuguguucugggccugcugag

SEQ ID NO: 118099 - RNA, 20 nt, Human
ccuguucuguagcuuucugg

SEQ ID NO: 118100 - RNA, 21 nt, Human
ccuguucugucccacuggcca

SEQ ID NO: 118101 - RNA, 32 nt, Human
ccuguucuuagaguguagcuguaagggcagug

SEQ ID NO: 118102 - RNA, 32 nt, Human
ccuguucuucccucagccucgccugcugugcu

SEQ ID NO: 118103 - RNA, 32 nt, Human
ccuguucuugacuugaagagaauugacccgug

SEQ ID NO: 118104 - RNA, 32 nt, Human
ccuguucuuguccauggaggacuuccgagggu

SEQ ID NO: 118105 - RNA, 18 nt, Human
ccuguucuuucugggcuu

SEQ ID NO: 118106 - RNA, 21 nt, Human
ccuguucuuuggagggcccau

SEQ ID NO: 118107 - RNA, 32 nt, Human
ccuguucuuuucuccccugugcugccgccgcc

SEQ ID NO: 118108 - RNA, 32 nt, Human
ccuguugaagugauauucauuguugcuguaca

SEQ ID NO: 118109 - RNA, 32 nt, Human
ccuguugacgucgaguucuccuuucccaaguu

SEQ ID NO: 118110 - RNA, 32 nt, Human
ccuguugacuuuguaucucugccugugauuuu

SEQ ID NO: 118111 - RNA, 32 nt, Human
ccuguugagaagauccaggagaacaagaugcu

SEQ ID NO: 118112 - RNA, 32 nt, Human
ccuguugaugacuggugcugugcuccagccuu

SEQ ID NO: 118113 - RNA, 18 nt, Human
ccuguugauuaaguggga

SEQ ID NO: 118114 - RNA, 32 nt, Human
ccuguugauucuugggcaaggcccagaauuug

SEQ ID NO: 118115 - RNA, 32 nt, Human
ccuguugauuuuguuuuccuugcccaugacuu

SEQ ID NO: 118116 - RNA, 31 nt, Human
ccuguugcacuuuucuugguugucccagaga

SEQ ID NO: 118117 - RNA, 32 nt, Human
ccuguugcaggagggagagggagagcuucuuu

SEQ ID NO: 118118 - RNA, 32 nt, Human
ccuguugcagggaccggagcugaugggagcug

SEQ ID NO: 118119 - RNA, 32 nt, Human
ccuguugccagacuggagugcaguggcacgau

SEQ ID NO: 118120 - RNA, 32 nt, Human
ccuguugccaggcuggaaugcaguggcgcgau

SEQ ID NO: 118121 - RNA, 32 nt, Human
ccuguugccaggcuggaaugcaguggcgugau

SEQ ID NO: 118122 - RNA, 32 nt, Human
ccuguugccccaggcacaugaccuucugaagu

SEQ ID NO: 118123 - RNA, 21 nt, Human
ccuguugcccuucucccuccc

SEQ ID NO: 118124 - RNA, 23 nt, Human
ccuguugccuugagcucuucuga

SEQ ID NO: 118125 - RNA, 32 nt, Human
ccuguugccuuugucacuuccucuuuggaggc

SEQ ID NO: 118126 - RNA, 32 nt, Human
ccuguugcuagucugagucauuuggaauugug

SEQ ID NO: 118127 - RNA, 32 nt, Human
ccuguugcucauuaagcugagugcagacgucc

SEQ ID NO: 118128 - RNA, 23 nt, Human
ccuguuggaagcuuacucuggca

SEQ ID NO: 118129 - RNA, 32 nt, Human
ccuguuggaagugggauccaggccugguccag

SEQ ID NO: 118130 - RNA, 18 nt, Human
ccuguuggagggggucag

SEQ ID NO: 118131 - RNA, 32 nt, Human
ccuguugggaagaaaggaagaaaacagguccc

SEQ ID NO: 118132 - RNA, 20 nt, Human
ccuguugggagagggcgcag

SEQ ID NO: 118133 - RNA, 32 nt, Human
ccuguugggauuaacaguugagggccaucgcu

SEQ ID NO: 118134 - RNA, 32 nt, Human
ccuguugggugagcacagcccuagcucaggcc

SEQ ID NO: 118135 - RNA, 32 nt, Human
ccuguuggucccagcuccgccugccuuuccuc

SEQ ID NO: 118136 - RNA, 32 nt, Human
ccuguuggugcugguucacaugaugcucuuau

SEQ ID NO: 118137 - RNA, 32 nt, Human
ccuguugguggagcucugggggcagagaccag

SEQ ID NO: 118138 - RNA, 32 nt, Human
ccuguugguggcucaccucucugccucuccag

SEQ ID NO: 118139 - RNA, 32 nt, Human
ccuguugguuccaagcccuggagccaacugcu

SEQ ID NO: 118140 - RNA, 32 nt, Human
ccuguuguacacacaagggccaggcuccauuc

SEQ ID NO: 118141 - RNA, 17 nt, Human
ccuguuguaggcacugg

SEQ ID NO: 118142 - RNA, 32 nt, Human
ccuguuguaggcacuggcuagggaggggcagg

SEQ ID NO: 118143 - RNA, 32 nt, Human
ccuguugucccagcuacuaggaagucuugggg

SEQ ID NO: 118144 - RNA, 23 nt, Human
ccuguugucccagcuacucagga

SEQ ID NO: 118145 - RNA, 32 nt, Human
ccuguugucccagcuacucaggaggcugaggc

SEQ ID NO: 118146 - RNA, 23 nt, Human
ccuguugucccagcuacucggga

SEQ ID NO: 118147 - RNA, 32 nt, Human
ccuguugucccagcuacucgggaggcugaggc

SEQ ID NO: 118148 - RNA, 32 nt, Human
ccuguugucccagcuauucaggaggcugacgu

SEQ ID NO: 118149 - RNA, 32 nt, Human
ccuguugucuuagcuacucaggaggcugaggc

SEQ ID NO: 118150 - RNA, 32 nt, Human
ccuguugugagguuccuuccaggggcuggcac

SEQ ID NO: 118151 - RNA, 32 nt, Human
ccuguugugccccaacuuugcuucuagaucuc

SEQ ID NO: 118152 - RNA, 32 nt, Human
ccuguuguggccacacugacagagaugagaug

SEQ ID NO: 118153 - RNA, 32 nt, Human
ccuguugugguucugcaguguuuaugaaauug

SEQ ID NO: 118154 - RNA, 32 nt, Human
ccuguuguucucuccauccagcgugaccaggg

SEQ ID NO: 118155 - RNA, 32 nt, Human
ccuguuguugagcucaguaugucgugggaauc

SEQ ID NO: 118156 - RNA, 32 nt, Human
ccuguuuacuccugccuuguggcgggguccau

SEQ ID NO: 118157 - RNA, 32 nt, Human
ccuguuuagacacauggacaacaaucccagcg

SEQ ID NO: 118158 - RNA, 32 nt, Human
ccuguuuaugagccaccccugcccaggcccuc

SEQ ID NO: 118159 - RNA, 32 nt, Human
ccuguuuauggucugauuaugccuggaguauu

SEQ ID NO: 118160 - RNA, 31 nt, Human
ccuguuuauuaaccauaccuguccugaguuc

SEQ ID NO: 118161 - RNA, 32 nt, Human
ccuguuucaaagggauccuggggaaggagggg

SEQ ID NO: 118162 - RNA, 32 nt, Human
ccuguuucagucucaucuguacucacggcagc

SEQ ID NO: 118163 - RNA, 32 nt, Human
ccuguuucaugccucuccucuguggcuaggag

SEQ ID NO: 118164 - RNA, 32 nt, Human
ccuguuucauuuccacuugugccaucuucuuu

SEQ ID NO: 118165 - RNA, 32 nt, Human
ccuguuuccacuuuguuauacucuagccaaga

SEQ ID NO: 118166 - RNA, 32 nt, Human
ccuguuuccagccucaguccagggccccagaa

SEQ ID NO: 118167 - RNA, 32 nt, Human
ccuguuucccacucucuucugggguccucugg

SEQ ID NO: 118168 - RNA, 32 nt, Human
ccuguuuccuaaagaaauguuuacuccuggau

SEQ ID NO: 118169 - RNA, 32 nt, Human
ccuguuuccuacggaauguagaauguauaggg

SEQ ID NO: 118170 - RNA, 32 nt, Human
ccuguuuccuuugaggguugccccuacugccc

SEQ ID NO: 118171 - RNA, 32 nt, Human
ccuguuucucagaacaguuuuuaaaugccaau

SEQ ID NO: 118172 - RNA, 31 nt, Human
ccuguuucuccuccugcaccuguguccccau

SEQ ID NO: 118173 - RNA, 32 nt, Human
ccuguuucuccuggcccugggugggcuagggc

SEQ ID NO: 118174 - RNA, 32 nt, Human
ccuguuucugagccacggagacagggaggaag

SEQ ID NO: 118175 - RNA, 32 nt, Human
ccuguuucugcucuuuuccuccacggacucca

SEQ ID NO: 118176 - RNA, 32 nt, Human
ccuguuucuguaacaagauguuccuuuagagu

SEQ ID NO: 118177 - RNA, 32 nt, Human
ccuguuucuguaacuuucucccccucuacuga

SEQ ID NO: 118178 - RNA, 32 nt, Human
ccuguuugaacccaggagaguggaagagagau

SEQ ID NO: 118179 - RNA, 32 nt, Human
ccuguuugaccuucuuugccaccaucugaacc

SEQ ID NO: 118180 - RNA, 32 nt, Human
ccuguuugacuccacucuuacugccuucuuaa

SEQ ID NO: 118181 - RNA, 32 nt, Human
ccuguuugcagguagggagacccacaaacuau

SEQ ID NO: 118182 - RNA, 23 nt, Human
ccuguuugccugcugccgucucu

SEQ ID NO: 118183 - RNA, 32 nt, Human
ccuguuugcuaaggaaucuacuucuccccauc

SEQ ID NO: 118184 - RNA, 26 nt, Human
ccuguuuggagucuggcuggcucuga

SEQ ID NO: 118185 - RNA, 32 nt, Human
ccuguuuggauuuucuguuuguggaccagaaa

SEQ ID NO: 118186 - RNA, 32 nt, Human
ccuguuugucugauguggcaaaaggcccucug

SEQ ID NO: 118187 - RNA, 29 nt, Human
ccuguuugucuguggguccugggaugcgc

SEQ ID NO: 118188 - RNA, 32 nt, Human
ccuguuuuacuaugauguaaaaauuaggucac

SEQ ID NO: 118189 - RNA, 32 nt, Human
ccuguuuuacuaugauguaaaaauuaggucau

SEQ ID NO: 118190 - RNA, 32 nt, Human
ccuguuuuacuggaccccgccucccagcccca

SEQ ID NO: 118191 - RNA, 32 nt, Human
ccuguuuuauucauauugcuggacaacagaca

SEQ ID NO: 118192 - RNA, 23 nt, Human
ccuguuuucaguuaacacuggua

SEQ ID NO: 118193 - RNA, 32 nt, Human
ccuguuuucaguuuguggauucauccugcugg

SEQ ID NO: 118194 - RNA, 32 nt, Human
ccuguuuucccagcuacuccggaggcugcggu

SEQ ID NO: 118195 - RNA, 32 nt, Human
ccuguuuuccuugaugaugccuaaaacuacau

SEQ ID NO: 118196 - RNA, 32 nt, Human
ccuguuuuccuuguauauaaugacuuuugcug

SEQ ID NO: 118197 - RNA, 32 nt, Human
ccuguuuucgugcacuagacacacagagugga

SEQ ID NO: 118198 - RNA, 32 nt, Human
ccuguuuucugugcuuuccuuuuuacaggacu

SEQ ID NO: 118199 - RNA, 32 nt, Human
ccuguuuucuguuuaauugaugagccugggaa

SEQ ID NO: 118200 - RNA, 32 nt, Human
ccuguuuugaaaggcauuuucuuuuuagaguu

SEQ ID NO: 118201 - RNA, 32 nt, Human
ccuguuuugagaggaggagggaagagaaauaa

SEQ ID NO: 118202 - RNA, 32 nt, Human
ccuguuuuucccaucugugcaggauggcaaag

SEQ ID NO: 118203 - RNA, 32 nt, Human
ccuguuuuucuuucugcuuuccaagacuccag

SEQ ID NO: 118204 - RNA, 32 nt, Human
ccuuaaaaacagugcccaacagugaacugccc

SEQ ID NO: 118205 - RNA, 32 nt, Human
ccuuaaaaagagaccuugaacuggaaaggguc

SEQ ID NO: 118206 - RNA, 32 nt, Human
ccuuaaaagaaaaggaaaaggccaggccuggc

SEQ ID NO: 118207 - RNA, 32 nt, Human
ccuuaaaagucucuucuggucuuuggauuaga

SEQ ID NO: 118208 - RNA, 32 nt, Human
ccuuaaaauguucccagcaggcuggucucaaa

SEQ ID NO: 118209 - RNA, 32 nt, Human
ccuuaaaauuaaaaaccuacaaaaguuggugu

SEQ ID NO: 118210 - RNA, 32 nt, Human
ccuuaaacccagacaucuucugggaccugacc

SEQ ID NO: 118211 - RNA, 32 nt, Human
ccuuaaagaagcugacccagaggccuuggugc

SEQ ID NO: 118212 - RNA, 32 nt, Human
ccuuaaagagcagaaccagucacuugaagcag

SEQ ID NO: 118213 - RNA, 32 nt, Human
ccuuaaagauauugcauuuucauauucuuuau

SEQ ID NO: 118214 - RNA, 32 nt, Human
ccuuaaagccccucgccccaacuucuccacca

SEQ ID NO: 118215 - RNA, 32 nt, Human
ccuuaaagcugcagaaaaggugucacacggcu

SEQ ID NO: 118216 - RNA, 32 nt, Human
ccuuaaagggccugagucucaacauggcugcu

SEQ ID NO: 118217 - RNA, 32 nt, Human
ccuuaaaguucucaguaacaccagcuuccugu

SEQ ID NO: 118218 - RNA, 32 nt, Human
ccuuaaaguugccauauaaugugaacugcuca

SEQ ID NO: 118219 - RNA, 32 nt, Human
ccuuaaaucagugcaguggccagggagaugga

SEQ ID NO: 118220 - RNA, 32 nt, Human
ccuuaaaugaacugcaggcugagaaaagaagg

SEQ ID NO: 118221 - RNA, 32 nt, Human
ccuuaaaugauuugccugccucggcuucccaa

SEQ ID NO: 118222 - RNA, 32 nt, Human
ccuuaaauuggaagacuuuuaauugcagucuc

SEQ ID NO: 118223 - RNA, 32 nt, Human
ccuuaacacaucugugguccagaagagcgcau

SEQ ID NO: 118224 - RNA, 32 nt, Human
ccuuaacacccuauucuuccucugcagguggc

SEQ ID NO: 118225 - RNA, 32 nt, Human
ccuuaacacuuucugugaaauaccuuuuuauc

SEQ ID NO: 118226 - RNA, 21 nt, Human
ccuuaacagucaccacugugc

SEQ ID NO: 118227 - RNA, 32 nt, Human
ccuuaacagugccgcaucucagccuggaaguc

SEQ ID NO: 118228 - RNA, 32 nt, Human
ccuuaacaucaucuguuuacucugcucagugu

SEQ ID NO: 118229 - RNA, 32 nt, Human
ccuuaacaucccagcacccccucuccugcugc

SEQ ID NO: 118230 - RNA, 32 nt, Human
ccuuaacauuucaaaggcuuauaguaaaauag

SEQ ID NO: 118231 - RNA, 32 nt, Human
ccuuaacccugccaguuucuccauccagcuca

SEQ ID NO: 118232 - RNA, 32 nt, Human
ccuuaacccugccuacacuuucaagaauugaa

SEQ ID NO: 118233 - RNA, 32 nt, Human
ccuuaaccugaggaauguaugugggcaaccag

SEQ ID NO: 118234 - RNA, 32 nt, Human
ccuuaaccuuuaagucuuacaggaagccucuc

SEQ ID NO: 118235 - RNA, 32 nt, Human
ccuuaacucuacuuccucuucagucuguggua

SEQ ID NO: 118236 - RNA, 32 nt, Human
ccuuaacugcauccagccuggggcugaggcug

SEQ ID NO: 118237 - RNA, 32 nt, Human
ccuuaacugcggacuugcaagauccacauaua

SEQ ID NO: 118238 - RNA, 32 nt, Human
ccuuaacuggagaccagaaaccuuccagagaa

SEQ ID NO: 118239 - RNA, 32 nt, Human
ccuuaacuuuuccuuguauguucuuggguggu

SEQ ID NO: 118240 - RNA, 32 nt, Human
ccuuaagaaaauacaaaauuaggaacaggccu

SEQ ID NO: 118241 - RNA, 32 nt, Human
ccuuaagaaccaggcaaccucugccuucuucc

SEQ ID NO: 118242 - RNA, 32 nt, Human
ccuuaagaagguucuuuuuaauucuccccacc

SEQ ID NO: 118243 - RNA, 32 nt, Human
ccuuaagaggcauccaaguagcauucauagug

SEQ ID NO: 118244 - RNA, 32 nt, Human
ccuuaagauacuagugugaugucauuccacuu

SEQ ID NO: 118245 - RNA, 32 nt, Human
ccuuaagcagagucaggagaccccaaggcaug

SEQ ID NO: 118246 - RNA, 32 nt, Human
ccuuaagcccagacaucuguugggaccugacc

SEQ ID NO: 118247 - RNA, 32 nt, Human
ccuuaagcccuguggccacacagccaggagag

SEQ ID NO: 118248 - RNA, 32 nt, Human
ccuuaaggaaagagucucuccuuugccacuug

SEQ ID NO: 118249 - RNA, 32 nt, Human
ccuuaaggcacagugggagcugagcuggaagg

SEQ ID NO: 118250 - RNA, 32 nt, Human
ccuuaaggcaggcagggcugcggggaggcugg

SEQ ID NO: 118251 - RNA, 32 nt, Human
ccuuaaggcgacaagagaggggccccaggagu

SEQ ID NO: 118252 - RNA, 21 nt, Human
ccuuaaggcugggugcagugg

SEQ ID NO: 118253 - RNA, 32 nt, Human
ccuuaagggagccugcccugcccccaccgccc

SEQ ID NO: 118254 - RNA, 32 nt, Human
ccuuaauaagagaccucuaagagauccccaug

SEQ ID NO: 118255 - RNA, 32 nt, Human
ccuuaauacuucugaacucauuaucuuuuaga

SEQ ID NO: 118256 - RNA, 32 nt, Human
ccuuaauauaauauacauaagcaaugagagcu

SEQ ID NO: 118257 - RNA, 32 nt, Human
ccuuaauauacagguaucccagcuuugggcac

SEQ ID NO: 118258 - RNA, 32 nt, Human
ccuuaauauucugugucuuuugcaauuaaauu

SEQ ID NO: 118259 - RNA, 32 nt, Human
ccuuaauauugaggcugcagcaggugcugggc

SEQ ID NO: 118260 - RNA, 32 nt, Human
ccuuaaucaagcaaacuucccucuucagaaaa

SEQ ID NO: 118261 - RNA, 32 nt, Human
ccuuaauccaacaguacaguaauuagccgaaa

SEQ ID NO: 118262 - RNA, 32 nt, Human
ccuuaauccauucaacucugaguugacacagc

SEQ ID NO: 118263 - RNA, 32 nt, Human
ccuuaaucuauagaugagucagcuccacacuu

SEQ ID NO: 118264 - RNA, 32 nt, Human
ccuuaaucuccucuucuuucauccucagcuuc

SEQ ID NO: 118265 - RNA, 21 nt, Human
ccuuaaugaagagucacaggg

SEQ ID NO: 118266 - RNA, 32 nt, Human
ccuuaaugaguguauguuucccaacucucagu

SEQ ID NO: 118267 - RNA, 32 nt, Human
ccuuaaugggaccauaugagccaggcuuuuaa

SEQ ID NO: 118268 - RNA, 24 nt, Human
ccuuaauuuuaauauaccuuucaa

SEQ ID NO: 118269 - RNA, 21 nt, Human
ccuuaauuuuucccuuuucaa

SEQ ID NO: 118270 - RNA, 32 nt, Human
ccuuacaaacgcaggguccaagaaauaggauu

SEQ ID NO: 118271 - RNA, 32 nt, Human
ccuuacaaagugcugggaugacaggcaugagc

SEQ ID NO: 118272 - RNA, 32 nt, Human
ccuuacaagagguggagcaugcagaugagcag

SEQ ID NO: 118273 - RNA, 32 nt, Human
ccuuacaauuacaaacagccucuuucacauua

SEQ ID NO: 118274 - RNA, 32 nt, Human
ccuuacagagacuggaaaagaagcccaaacca

SEQ ID NO: 118275 - RNA, 32 nt, Human
ccuuacagcccccagacccuucuugaaacgag

SEQ ID NO: 118276 - RNA, 32 nt, Human
ccuuacagccccggaugcagauuuuagaggga

SEQ ID NO: 118277 - RNA, 32 nt, Human
ccuuacagcugaguuagaagaugaggagaggc

SEQ ID NO: 118278 - RNA, 32 nt, Human
ccuuacagggaaauggguuuauccaggaucau

SEQ ID NO: 118279 - RNA, 32 nt, Human
ccuuacagugaaacgcaaccacugcagaaaaa

SEQ ID NO: 118280 - RNA, 32 nt, Human
ccuuacaucucccacaguuucugcagagugac

SEQ ID NO: 118281 - RNA, 32 nt, Human
ccuuacauuuaaucggcuuucucugcgguggg

SEQ ID NO: 118282 - RNA, 32 nt, Human
ccuuaccaacaugaugaaaccaucucuucuaa

SEQ ID NO: 118283 - RNA, 32 nt, Human
ccuuaccaccuaagggcauuucagagccauca

SEQ ID NO: 118284 - RNA, 32 nt, Human
ccuuaccacucucugcuucaucuaagaaaacc

SEQ ID NO: 118285 - RNA, 32 nt, Human
ccuuaccagaccugcccugccaccccacucgc

SEQ ID NO: 118286 - RNA, 32 nt, Human
ccuuaccagugaccccagagacagagccagga

SEQ ID NO: 118287 - RNA, 32 nt, Human
ccuuacccagcccagccugggaccggagaucc

SEQ ID NO: 118288 - RNA, 32 nt, Human
ccuuacccaggaggagggugccuggccccagu

SEQ ID NO: 118289 - RNA, 32 nt, Human
ccuuacccauucucucuuccucccgacggaga

SEQ ID NO: 118290 - RNA, 32 nt, Human
ccuuacccccauccucucuagacgguaugucc

SEQ ID NO: 118291 - RNA, 32 nt, Human
ccuuaccccuggcaccuccagagaacugggac

SEQ ID NO: 118292 - RNA, 31 nt, Human
ccuuacccugcgauuuugccugugucugaag

SEQ ID NO: 118293 - RNA, 32 nt, Human
ccuuaccuauguucugacacugaggcucuugg

SEQ ID NO: 118294 - RNA, 32 nt, Human
ccuuaccucggugccuuccucuuuuuauuuag

SEQ ID NO: 118295 - RNA, 32 nt, Human
ccuuaccucuuauuucucuuucccaagaauug

SEQ ID NO: 118296 - RNA, 32 nt, Human
ccuuaccugaauauguuaaugugaauuaaugu

SEQ ID NO: 118297 - RNA, 32 nt, Human
ccuuaccugaugcuaaaauaugugccucggcc

SEQ ID NO: 118298 - RNA, 22 nt, Human
ccuuaccugcccugcugccugc

SEQ ID NO: 118299 - RNA, 32 nt, Human
ccuuaccuucuccacuuguucaacagacucug

SEQ ID NO: 118300 - RNA, 32 nt, Human
ccuuaccuucuggggacuccaggauuuucugc

SEQ ID NO: 118301 - RNA, 32 nt, Human
ccuuaccuuggucauguuaaugacuuuggagu

SEQ ID NO: 118302 - RNA, 32 nt, Human
ccuuaccuuguuucuucccagaaaacaagugu

SEQ ID NO: 118303 - RNA, 32 nt, Human
ccuuacgaggagacuuggucacugugaaggag

SEQ ID NO: 118304 - RNA, 32 nt, Human
ccuuacggcgagagucggagauaugcugacug

SEQ ID NO: 118305 - RNA, 32 nt, Human
ccuuacggcggcuggggagggaccaggcccaa

SEQ ID NO: 118306 - RNA, 32 nt, Human
ccuuacgugcuucuccccuggaccuaugugca

SEQ ID NO: 118307 - RNA, 32 nt, Human
ccuuacuaaaaauacaaaaauuagccaggugu

SEQ ID NO: 118308 - RNA, 32 nt, Human
ccuuacuacagaauccguccuuucauuucaac

SEQ ID NO: 118309 - RNA, 32 nt, Human
ccuuacuaucgcagagagagcaggcccucccc

SEQ ID NO: 118310 - RNA, 32 nt, Human
ccuuacucagcucaucacgcaggccaagcaca

SEQ ID NO: 118311 - RNA, 32 nt, Human
ccuuacuccaccuccccgccagccuggggcca

SEQ ID NO: 118312 - RNA, 19 nt, Human
ccuuacugaacaccagaga

SEQ ID NO: 118313 - RNA, 29 nt, Human
ccuuacugaaugugugugauuggggcuga

SEQ ID NO: 118314 - RNA, 32 nt, Human
ccuuacugaggcaccuuucuagagauuaaaag

SEQ ID NO: 118315 - RNA, 32 nt, Human
ccuuacugcaaccaccacuuccuggguucaag

SEQ ID NO: 118316 - RNA, 32 nt, Human
ccuuacugcagcgugucuccuggcacgcuggg

SEQ ID NO: 118317 - RNA, 32 nt, Human
ccuuacugcuacugcugcugccauuaaugcug

SEQ ID NO: 118318 - RNA, 32 nt, Human
ccuuacugcuuugguauaaggaugaaaaacau

SEQ ID NO: 118319 - RNA, 29 nt, Human
ccuuacuggcuccaggcaucccccucacc

SEQ ID NO: 118320 - RNA, 32 nt, Human
ccuuacugguauuguuccacagcacauagaug

SEQ ID NO: 118321 - RNA, 32 nt, Human
ccuuacugugaaccuggguuucugguccagcc

SEQ ID NO: 118322 - RNA, 32 nt, Human
ccuuacuucaaagugccugggcucagccuggu

SEQ ID NO: 118323 - RNA, 32 nt, Human
ccuuacuucauccucccccucaucuccugaaa

SEQ ID NO: 118324 - RNA, 32 nt, Human
ccuuacuucuccccuuccccucccccuccccu

SEQ ID NO: 118325 - RNA, 32 nt, Human
ccuuagaaaaguagguuucuuggcuugaugua

SEQ ID NO: 118326 - RNA, 32 nt, Human
ccuuagaaaguuaaaagaauguagaaaagaua

SEQ ID NO: 118327 - RNA, 32 nt, Human
ccuuagaagaaagauugugaaaagcuggggag

SEQ ID NO: 118328 - RNA, 32 nt, Human
ccuuagaagcgaauuccucucuggaggccuug

SEQ ID NO: 118329 - RNA, 32 nt, Human
ccuuagacugagcugucagagcaagcaauuag

SEQ ID NO: 118330 - RNA, 32 nt, Human
ccuuagacuucaggagcucagaguuugucccg

SEQ ID NO: 118331 - RNA, 32 nt, Human
ccuuagagaacaguaggagcagcagguguugg

SEQ ID NO: 118332 - RNA, 32 nt, Human
ccuuagagacaggguuucacuauguugcccag

SEQ ID NO: 118333 - RNA, 32 nt, Human
ccuuagagaggacacucacuccccucccacca

SEQ ID NO: 118334 - RNA, 32 nt, Human
ccuuagagaggaggaggaaagggggagaggaa

SEQ ID NO: 118335 - RNA, 32 nt, Human
ccuuagagauaggaagaagaaugauggauucc

SEQ ID NO: 118336 - RNA, 32 nt, Human
ccuuagaggggguggccuugaggcagagccgu

SEQ ID NO: 118337 - RNA, 32 nt, Human
ccuuagagucuaggugcagcagcuccaagcau

SEQ ID NO: 118338 - RNA, 31 nt, Human
ccuuagaugggggaagucaacagugaagugu

SEQ ID NO: 118339 - RNA, 26 nt, Human
ccuuagcaaggggcucagaacacccc

SEQ ID NO: 118340 - RNA, 32 nt, Human
ccuuagcaaucagccauugccugcaagccucc

SEQ ID NO: 118341 - RNA, 21 nt, Human
ccuuagcagcagcagcagcag

SEQ ID NO: 118342 - RNA, 21 nt, Human
ccuuagcagcccagcauuucc

SEQ ID NO: 118343 - RNA, 22 nt, Human
ccuuagcagcucacaacauccc

SEQ ID NO: 118344 - RNA, 32 nt, Human
ccuuagccaauauccucugccccuggguggcu

SEQ ID NO: 118345 - RNA, 32 nt, Human
ccuuagccaucuccugucagguaggaaugaac

SEQ ID NO: 118346 - RNA, 32 nt, Human
ccuuagcccaugucaugccaagagucagugcc

SEQ ID NO: 118347 - RNA, 32 nt, Human
ccuuagccccuggaaugcgugagggagaugcu

SEQ ID NO: 118348 - RNA, 32 nt, Human
ccuuagcccugccuuguguuccaaaagcugca

SEQ ID NO: 118349 - RNA, 32 nt, Human
ccuuagcccugguucucaauagaaucagggac

SEQ ID NO: 118350 - RNA, 32 nt, Human
ccuuagcccuucugugguugucauggcuuaau

SEQ ID NO: 118351 - RNA, 32 nt, Human
ccuuagccugacaaccgguuguccucaaagca

SEQ ID NO: 118352 - RNA, 32 nt, Human
ccuuagccugcacuccaaccuggcaauuuugc

SEQ ID NO: 118353 - RNA, 32 nt, Human
ccuuagccuuaaacauuacuaauaguuucaca

SEQ ID NO: 118354 - RNA, 32 nt, Human
ccuuagcguccaccuaggggacauucuaagcu

SEQ ID NO: 118355 - RNA, 32 nt, Human
ccuuagcuacugaggcauagggagaggaaguu

SEQ ID NO: 118356 - RNA, 32 nt, Human
ccuuagcucugaaagcccccagugggggugcc

SEQ ID NO: 118357 - RNA, 32 nt, Human
ccuuagcuuagaccucagccugugcugcccgu

SEQ ID NO: 118358 - RNA, 21 nt, Human
ccuuagcuuccuccuacuacc

SEQ ID NO: 118359 - RNA, 32 nt, Human
ccuuagcuuccuccuacuaccucuuauacuca

SEQ ID NO: 118360 - RNA, 32 nt, Human
ccuuagcuugacggcagggcccugccaauugc

SEQ ID NO: 118361 - RNA, 21 nt, Human
ccuuaggaacagcucuucacu

SEQ ID NO: 118362 - RNA, 32 nt, Human
ccuuaggaauacuguuuuaucuccauacuuug

SEQ ID NO: 118363 - RNA, 32 nt, Human
ccuuaggaauccuggcugccaccaccacaagg

SEQ ID NO: 118364 - RNA, 31 nt, Human
ccuuaggacaacuguugcaugccaaguuuuu

SEQ ID NO: 118365 - RNA, 32 nt, Human
ccuuaggacuucucauacucuagcccugaccu

SEQ ID NO: 118366 - RNA, 32 nt, Human
ccuuaggaggcugaggugggaggaucucuuga

SEQ ID NO: 118367 - RNA, 32 nt, Human
ccuuaggaguccaggcugcacccuggagaucc

SEQ ID NO: 118368 - RNA, 32 nt, Human
ccuuaggcaagacuuugccucucuccuagucc

SEQ ID NO: 118369 - RNA, 32 nt, Human
ccuuaggcccaggacuugggccuccagcucau

SEQ ID NO: 118370 - RNA, 32 nt, Human
ccuuaggcccuaggaaagaauacuuccuagcc

SEQ ID NO: 118371 - RNA, 21 nt, Human
ccuuaggcucccuugcuccuu

SEQ ID NO: 118372 - RNA, 32 nt, Human
ccuuagggaacccagaaaguaguggggaggag

SEQ ID NO: 118373 - RNA, 32 nt, Human
ccuuagggacagggcuugagggccagugaggc

SEQ ID NO: 118374 - RNA, 32 nt, Human
ccuuagggacuugcccagggucccagggccac

SEQ ID NO: 118375 - RNA, 32 nt, Human
ccuuagggagacaggugacccugggugccacc

SEQ ID NO: 118376 - RNA, 32 nt, Human
ccuuagggauucaccauccaguagaggagaaa

SEQ ID NO: 118377 - RNA, 32 nt, Human
ccuuagggccuacccuggagugcugcagugug

SEQ ID NO: 118378 - RNA, 32 nt, Human
ccuuagggcugcaggcgggaagcaugaagggg

SEQ ID NO: 118379 - RNA, 32 nt, Human
ccuuagggcuuccuggccuacugcauccuugu

SEQ ID NO: 118380 - RNA, 32 nt, Human
ccuuaggggcugugagagggaggcuggggugc

SEQ ID NO: 118381 - RNA, 32 nt, Human
ccuuagggggcgcaauggaagccccggcaugc

SEQ ID NO: 118382 - RNA, 32 nt, Human
ccuuaggucuuuccucaccccucucccaccgc

SEQ ID NO: 118383 - RNA, 32 nt, Human
ccuuagguuuggaaagaagugaagggccuugc

SEQ ID NO: 118384 - RNA, 32 nt, Human
ccuuagguuuugacaaugguacuugcuucuug

SEQ ID NO: 118385 - RNA, 32 nt, Human
ccuuaguaccaucauggacugauuuggauuaa

SEQ ID NO: 118386 - RNA, 32 nt, Human
ccuuaguacucugcccccaccucucuuuacug

SEQ ID NO: 118387 - RNA, 32 nt, Human
ccuuaguagcugggacuaccagugcauaccac

SEQ ID NO: 118388 - RNA, 23 nt, Human
ccuuaguagcugggauuacaggc

SEQ ID NO: 118389 - RNA, 32 nt, Human
ccuuaguaggagaggaacgcgagacgcggcag

SEQ ID NO: 118390 - RNA, 32 nt, Human
ccuuagucacacaacugagucaucucaaguac

SEQ ID NO: 118391 - RNA, 32 nt, Human
ccuuagucccaaugccuccguaagcggaguug

SEQ ID NO: 118392 - RNA, 32 nt, Human
ccuuaguccccaagccccucccccuaaggcag

SEQ ID NO: 118393 - RNA, 32 nt, Human
ccuuagucguuggaggcuggagcgcaauggcc

SEQ ID NO: 118394 - RNA, 32 nt, Human
ccuuagucuacucccuuccccucucugguccu

SEQ ID NO: 118395 - RNA, 32 nt, Human
ccuuagucuucauuuuauaaaaguuguugccu

SEQ ID NO: 118396 - RNA, 32 nt, Human
ccuuagucuuuccccaccgaguccagucaguu

SEQ ID NO: 118397 - RNA, 32 nt, Human
ccuuagugaccuuuuaguccagccucucgcuc

SEQ ID NO: 118398 - RNA, 32 nt, Human
ccuuagugagccuggacagagcaaggagaggg

SEQ ID NO: 118399 - RNA, 32 nt, Human
ccuuagugggcuucagcugugauugcuguucu

SEQ ID NO: 118400 - RNA, 32 nt, Human
ccuuaguguaccaccccugccuugagcuugug

SEQ ID NO: 118401 - RNA, 32 nt, Human
ccuuagugugucugcuccuccucucucuccuc

SEQ ID NO: 118402 - RNA, 32 nt, Human
ccuuaguuuccacuuuccagccuggauccccu

SEQ ID NO: 118403 - RNA, 32 nt, Human
ccuuauaaaagagaccccagaguucucccaag

SEQ ID NO: 118404 - RNA, 32 nt, Human
ccuuauacagcuuauugcuuuuucuucccuuu

SEQ ID NO: 118405 - RNA, 22 nt, Human
ccuuauaccuccaccacagggg

SEQ ID NO: 118406 - RNA, 32 nt, Human
ccuuauaccuugagcgaagccucuuugggucc

SEQ ID NO: 118407 - RNA, 32 nt, Human
ccuuauacuacaaaaugauaaucagccauugu

SEQ ID NO: 118408 - RNA, 24 nt, Human
ccuuauacuuggagucacaggggc

SEQ ID NO: 118409 - RNA, 32 nt, Human
ccuuauagaagcaguaagaggcuugaccacgc

SEQ ID NO: 118410 - RNA, 30 nt, Human
ccuuauaggugccacagggcacagcuccau

SEQ ID NO: 118411 - RNA, 21 nt, Human
ccuuauauccucccacacuaa

SEQ ID NO: 118412 - RNA, 32 nt, Human
ccuuauauuugcagggaagaaagagugacgca

SEQ ID NO: 118413 - RNA, 32 nt, Human
ccuuaucaaugccagcauuagcgacuggacug

SEQ ID NO: 118414 - RNA, 32 nt, Human
ccuuaucacugcauuauucucuuuuaucuguu

SEQ ID NO: 118415 - RNA, 32 nt, Human
ccuuaucagcaacugcucugauacucccucau

SEQ ID NO: 118416 - RNA, 32 nt, Human
ccuuauccaucauuucugacauucaugcagga

SEQ ID NO: 118417 - RNA, 23 nt, Human
ccuuauccccaacaacaauguga

SEQ ID NO: 118418 - RNA, 32 nt, Human
ccuuauccccuucccuucccuucacccccauc

SEQ ID NO: 118419 - RNA, 20 nt, Human
ccuuaucccucacccuuccc

SEQ ID NO: 118420 - RNA, 32 nt, Human
ccuuaucccugaugcuuccucuuaguaauuuu

SEQ ID NO: 118421 - RNA, 32 nt, Human
ccuuauccucaagcuccagggcagccuggccg

SEQ ID NO: 118422 - RNA, 17 nt, Human
ccuuauccucggcugcc

SEQ ID NO: 118423 - RNA, 23 nt, Human
ccuuaucgcucugagcccugcca

SEQ ID NO: 118424 - RNA, 32 nt, Human
ccuuaucgcugucugccugucuugcccacauc

SEQ ID NO: 118425 - RNA, 32 nt, Human
ccuuaucucuccccaucuagccaggaaucuau

SEQ ID NO: 118426 - RNA, 32 nt, Human
ccuuaucucugccugcacgcccuguucccucc

SEQ ID NO: 118427 - RNA, 32 nt, Human
ccuuaucugaguuaucacaguucaugaaucua

SEQ ID NO: 118428 - RNA, 32 nt, Human
ccuuaucugcaaaguucccaucugccaagggg

SEQ ID NO: 118429 - RNA, 32 nt, Human
ccuuaucuucaggcaagaaaccacagugauaa

SEQ ID NO: 118430 - RNA, 32 nt, Human
ccuuaucuucauaugaagaaagcuaugagaau

SEQ ID NO: 118431 - RNA, 32 nt, Human
ccuuaugauguccccuuuuugagacacuaauu

SEQ ID NO: 118432 - RNA, 32 nt, Human
ccuuaugcuucucaguuuagcauaaccucuua

SEQ ID NO: 118433 - RNA, 32 nt, Human
ccuuaugucaaccugcacuucuuguucaaaaa

SEQ ID NO: 118434 - RNA, 32 nt, Human
ccuuaugucauuguaauauaaauacagauuuu

SEQ ID NO: 118435 - RNA, 26 nt, Human
ccuuaugugagcagcacaucccacca

SEQ ID NO: 118436 - RNA, 32 nt, Human
ccuuauguggagcagagguugucucugaacca

SEQ ID NO: 118437 - RNA, 32 nt, Human
ccuuaugugugcauguuagcagcauuuggugu

SEQ ID NO: 118438 - RNA, 32 nt, Human
ccuuauuaaguaggcaucugcccacaccuguc

SEQ ID NO: 118439 - RNA, 32 nt, Human
ccuuauucauucucuguacuuaccacaguauu

SEQ ID NO: 118440 - RNA, 32 nt, Human
ccuuauuccagcugcccugcccaaccugcuca

SEQ ID NO: 118441 - RNA, 21 nt, Human
ccuuauucccaggcuggagug

SEQ ID NO: 118442 - RNA, 32 nt, Human
ccuuauuccccugccuuccuggcuugauugaa

SEQ ID NO: 118443 - RNA, 32 nt, Human
ccuuauuccucacuccauccagccucuugaca

SEQ ID NO: 118444 - RNA, 32 nt, Human
ccuuauucucugaggaaagauggaggguucau

SEQ ID NO: 118445 - RNA, 32 nt, Human
ccuuauugaaagacauuuccagccuuugcaag

SEQ ID NO: 118446 - RNA, 32 nt, Human
ccuuauugagucaccaccagcccccggcagag

SEQ ID NO: 118447 - RNA, 32 nt, Human
ccuuauugccucuucagaacccuuuagaaagu

SEQ ID NO: 118448 - RNA, 32 nt, Human
ccuuauuuaaugaugguacaauuuaaaaucuu

SEQ ID NO: 118449 - RNA, 32 nt, Human
ccuuauuucacucugccugugggaguccugug

SEQ ID NO: 118450 - RNA, 32 nt, Human
ccuuauuucccuagcuaucaucuccugacuua

SEQ ID NO: 118451 - RNA, 32 nt, Human
ccuuauuucccucccucccucugguuguucug

SEQ ID NO: 118452 - RNA, 32 nt, Human
ccuuauuuuagguuguguuuuguuuuuguaua

SEQ ID NO: 118453 - RNA, 32 nt, Human
ccuuauuuuccuccuccuccuuggccuacuca

SEQ ID NO: 118454 - RNA, 32 nt, Human
ccuucaaaagaaccacacuagggucuccaccu

SEQ ID NO: 118455 - RNA, 19 nt, Human
ccuucaaaagguccugaca

SEQ ID NO: 118456 - RNA, 32 nt, Human
ccuucaaaagugggaauuagaaagcuggagug

SEQ ID NO: 118457 - RNA, 32 nt, Human
ccuucaaaaugcuacacccacauucucuccaa

SEQ ID NO: 118458 - RNA, 32 nt, Human
ccuucaaacauguugcuuugcuuucuugugga

SEQ ID NO: 118459 - RNA, 32 nt, Human
ccuucaaauccuagcucucacugugggauucu

SEQ ID NO: 118460 - RNA, 32 nt, Human
ccuucaacacggacacgcucugcugccaccca

SEQ ID NO: 118461 - RNA, 23 nt, Human
ccuucaaccccaccuuggacuug

SEQ ID NO: 118462 - RNA, 32 nt, Human
ccuucaacccugaucuuuugucuuccagucuu

SEQ ID NO: 118463 - RNA, 32 nt, Human
ccuucaaccuagaacauaccacuguccccaug

SEQ ID NO: 118464 - RNA, 32 nt, Human
ccuucaaccugcagcaccuggccacgcuggcc

SEQ ID NO: 118465 - RNA, 32 nt, Human
ccuucaacgugcugcaggaugucuucacgcug

SEQ ID NO: 118466 - RNA, 32 nt, Human
ccuucaacguuucuucacuuuugcaagguucc

SEQ ID NO: 118467 - RNA, 32 nt, Human
ccuucaagguacacgcagccugggugggugag

SEQ ID NO: 118468 - RNA, 32 nt, Human
ccuucaaguauuaagagacagacugugagccu

SEQ ID NO: 118469 - RNA, 21 nt, Human
ccuucaaguucgcucaggcuu

SEQ ID NO: 118470 - RNA, 32 nt, Human
ccuucaauaaacaucacaggaccugggacugc

SEQ ID NO: 118471 - RNA, 32 nt, Human
ccuucaauacuuaaaaauagucuuccacaaaa

SEQ ID NO: 118472 - RNA, 32 nt, Human
ccuucaauauuugagugguaacagaaacggag

SEQ ID NO: 118473 - RNA, 32 nt, Human
ccuucaauccagaguuacacaaaaaggagaua

SEQ ID NO: 118474 - RNA, 21 nt, Human
ccuucaaugcccccucccuuu

SEQ ID NO: 118475 - RNA, 32 nt, Human
ccuucacaaauccagagaaccuuggggugguu

SEQ ID NO: 118476 - RNA, 32 nt, Human
ccuucacaagcagggaucagagcaacuccccg

SEQ ID NO: 118477 - RNA, 32 nt, Human
ccuucacaagcccucucucucccucucuuugc

SEQ ID NO: 118478 - RNA, 32 nt, Human
ccuucacaagggucaagcaauugugcuugggu

SEQ ID NO: 118479 - RNA, 18 nt, Human
ccuucacacacaguucua

SEQ ID NO: 118480 - RNA, 17 nt, Human
ccuucacacaccacuua

SEQ ID NO: 118481 - RNA, 32 nt, Human
ccuucacacuguuaucaccuauccugaagaug

SEQ ID NO: 118482 - RNA, 32 nt, Human
ccuucacagacaccucuccugucuucagcaca

SEQ ID NO: 118483 - RNA, 32 nt, Human
ccuucacagaugacaccacuccccugucaauc

SEQ ID NO: 118484 - RNA, 32 nt, Human
ccuucacagccaccccagaggacuucccuaaa

SEQ ID NO: 118485 - RNA, 32 nt, Human
ccuucacaggugagccauguaguccacaagug

SEQ ID NO: 118486 - RNA, 32 nt, Human
ccuucacaggugcuuuggaaacccacuuuauu

SEQ ID NO: 118487 - RNA, 32 nt, Human
ccuucacaucuucaacgccaucagugggacuc

SEQ ID NO: 118488 - RNA, 32 nt, Human
ccuucacaugaugggcaccugugggaaaccug

SEQ ID NO: 118489 - RNA, 32 nt, Human
ccuucacauuuguacacaaaugugacuauguc

SEQ ID NO: 118490 - RNA, 24 nt, Human
ccuucaccaagcuuauguuuuucu

SEQ ID NO: 118491 - RNA, 32 nt, Human
ccuucaccacuuccuguuggcccuggcuggcc

SEQ ID NO: 118492 - RNA, 32 nt, Human
ccuucaccagaguccaaacaaaaagcuaagcu

SEQ ID NO: 118493 - RNA, 32 nt, Human
ccuucaccagcguccugugaggucuuucacac

SEQ ID NO: 118494 - RNA, 32 nt, Human
ccuucaccagugagcacaaagccacauuucaa

SEQ ID NO: 118495 - RNA, 32 nt, Human
ccuucaccccagccacaugccccagccaauac

SEQ ID NO: 118496 - RNA, 32 nt, Human
ccuucaccccgcgugucgccagccucuggguc

SEQ ID NO: 118497 - RNA, 20 nt, Human
ccuucacccucuuccuuccc

SEQ ID NO: 118498 - RNA, 32 nt, Human
ccuucacccugcgugucgccagccucugggca

SEQ ID NO: 118499 - RNA, 32 nt, Human
ccuucaccgaacccuucugauucuuucaaacu

SEQ ID NO: 118500 - RNA, 32 nt, Human
ccuucaccggaguccaaacaaaaagcuaagcu

SEQ ID NO: 118501 - RNA, 22 nt, Human
ccuucaccgugacauuccagca

SEQ ID NO: 118502 - RNA, 32 nt, Human
ccuucaccucucaguaugucucuuucaacucu

SEQ ID NO: 118503 - RNA, 32 nt, Human
ccuucaccugacuggaucaagcccacuaacau

SEQ ID NO: 118504 - RNA, 26 nt, Human
ccuucaccugggucucgacuccuguu

SEQ ID NO: 118505 - RNA, 32 nt, Human
ccuucaccuugcuugccuccugccucggaagc

SEQ ID NO: 118506 - RNA, 32 nt, Human
ccuucaccuugugaacucauuaggcagggcaa

SEQ ID NO: 118507 - RNA, 32 nt, Human
ccuucaccuuucucaucuccagagcccugccc

SEQ ID NO: 118508 - RNA, 32 nt, Human
ccuucacgccaaggcuguucucaccagcugcc

SEQ ID NO: 118509 - RNA, 32 nt, Human
ccuucacgucagaacccaacccuauaccuuuu

SEQ ID NO: 118510 - RNA, 32 nt, Human
ccuucacguuggugcaccugcuccauagcucc

SEQ ID NO: 118511 - RNA, 32 nt, Human
ccuucacuaaagcaaggagaugggcaggcguu

SEQ ID NO: 118512 - RNA, 32 nt, Human
ccuucacucaacuccauugacccucuccuuuc

SEQ ID NO: 118513 - RNA, 32 nt, Human
ccuucacucccaggaccuaccuucugcuagua

SEQ ID NO: 118514 - RNA, 32 nt, Human
ccuucacuccuccucaagcucacaccaauugg

SEQ ID NO: 118515 - RNA, 17 nt, Human
ccuucacuccugagaaa

SEQ ID NO: 118516 - RNA, 32 nt, Human
ccuucacucugggccuggccucaggccccugg

SEQ ID NO: 118517 - RNA, 32 nt, Human
ccuucacucuucaugauaaaucuugcugcugc

SEQ ID NO: 118518 - RNA, 32 nt, Human
ccuucacugaucuggacucaccucuggagccu

SEQ ID NO: 118519 - RNA, 21 nt, Human
ccuucacugcagcacugagcc

SEQ ID NO: 118520 - RNA, 32 nt, Human
ccuucacuggcacugccuucucugccgaugac

SEQ ID NO: 118521 - RNA, 32 nt, Human
ccuucacugggcaggcuuugaggugcuugucg

SEQ ID NO: 118522 - RNA, 32 nt, Human
ccuucacuguccccucagaccugggcggggag

SEQ ID NO: 118523 - RNA, 32 nt, Human
ccuucacuuaccucagcuaucuuguuauccua

SEQ ID NO: 118524 - RNA, 32 nt, Human
ccuucacuugauucuauuguguguuuucuaug

SEQ ID NO: 118525 - RNA, 23 nt, Human
ccuucagaaaagucuaccuggga

SEQ ID NO: 118526 - RNA, 32 nt, Human
ccuucagaaccugaaugaacuggcuucauaca

SEQ ID NO: 118527 - RNA, 32 nt, Human
ccuucagaaggaggaagaacagguuuaaaagg

SEQ ID NO: 118528 - RNA, 32 nt, Human
ccuucagaauacugucauuguccuuggggcgg

SEQ ID NO: 118529 - RNA, 32 nt, Human
ccuucagaaugaagacagucugccuuagagcc

SEQ ID NO: 118530 - RNA, 32 nt, Human
ccuucagaccaccaccgcauauucugagccuc

SEQ ID NO: 118531 - RNA, 32 nt, Human
ccuucagaccugaagacgcaggaaaagaaucu

SEQ ID NO: 118532 - RNA, 32 nt, Human
ccuucagacucuggcggggcuugcuguggccu

SEQ ID NO: 118533 - RNA, 32 nt, Human
ccuucagagacaucccuggugccuggagaugg

SEQ ID NO: 118534 - RNA, 32 nt, Human
ccuucagagagcaguccuuucucugugcagcu

SEQ ID NO: 118535 - RNA, 32 nt, Human
ccuucagagagccccggggaggcugcaaacau

SEQ ID NO: 118536 - RNA, 19 nt, Human
ccuucagagaggcccuaca

SEQ ID NO: 118537 - RNA, 32 nt, Human
ccuucagagugugcaggaauguuuucaaaucc

SEQ ID NO: 118538 - RNA, 22 nt, Human
ccuucagaucccaauucggccg

SEQ ID NO: 118539 - RNA, 31 nt, Human
ccuucagaugagagagaaauagcuggcuugu

SEQ ID NO: 118540 - RNA, 32 nt, Human
ccuucagcaauguugugugaauauacuaaaca

SEQ ID NO: 118541 - RNA, 32 nt, Human
ccuucagcagagaauucaccgaauccuagaac

SEQ ID NO: 118542 - RNA, 32 nt, Human
ccuucagcauccucuucauacaguacugggga

SEQ ID NO: 118543 - RNA, 32 nt, Human
ccuucagcauucccuuucaugaccugaggcac

SEQ ID NO: 118544 - RNA, 31 nt, Human
ccuucagccaauaaauaccaucuguuggugc

SEQ ID NO: 118545 - RNA, 32 nt, Human
ccuucagccacagcacaaaguuuuaugucuuu

SEQ ID NO: 118546 - RNA, 32 nt, Human
ccuucagccacagccuuauaaaagggaaggua

SEQ ID NO: 118547 - RNA, 21 nt, Human
ccuucagccucaccuuucuca

SEQ ID NO: 118548 - RNA, 32 nt, Human
ccuucagccuccaugcauccaguuuugaguca

SEQ ID NO: 118549 - RNA, 32 nt, Human
ccuucagccucuuccuguccuuuagaccugac

SEQ ID NO: 118550 - RNA, 32 nt, Human
ccuucagccugagcugucuucuuucugcugca

SEQ ID NO: 118551 - RNA, 32 nt, Human
ccuucagccugggaccaggcuuuccuagaucc

SEQ ID NO: 118552 - RNA, 32 nt, Human
ccuucagcguugcccauggcccugccacaucc

SEQ ID NO: 118553 - RNA, 23 nt, Human
ccuucagcucccccaguggcgcc

SEQ ID NO: 118554 - RNA, 25 nt, Human
ccuucagcuccugaguagcugggcc

SEQ ID NO: 118555 - RNA, 32 nt, Human
ccuucagcugagacugcagcccugccaauacc

SEQ ID NO: 118556 - RNA, 32 nt, Human
ccuucagcuuugacaagaacucacggcuuccc

SEQ ID NO: 118557 - RNA, 24 nt, Human
ccuucagcuuuucucagcuaggcc

SEQ ID NO: 118558 - RNA, 32 nt, Human
cgaaguguacggcagugccaucugguggcaag

SEQ ID NO: 118559 - RNA, 32 nt, Human
cgaagugugcaaagucacagaccuuuugcaaa

SEQ ID NO: 118560 - RNA, 32 nt, Human
cgaaguguggugaaggaaagacaggccggaaa

SEQ ID NO: 118561 - RNA, 20 nt, Human
cgaaguguugggauuacagg

SEQ ID NO: 118562 - RNA, 32 nt, Human
cgaaguuauugauucuugguugcccagcuguc

SEQ ID NO: 118563 - RNA, 32 nt, Human
cgaaguuccucuucucugccccgguuccgggc

SEQ ID NO: 118564 - RNA, 32 nt, Human
cgaaguugaacccagaacuaggaguggggcuu

SEQ ID NO: 118565 - RNA, 32 nt, Human
cgaaguugaguaaguucccacacugcuggacc

SEQ ID NO: 118566 - RNA, 32 nt, Human
cgaaguugcaccauugcacuccacccugggcg

SEQ ID NO: 118567 - RNA, 32 nt, Human
cgaaguuuguucaucagacuccugugcaacuu

SEQ ID NO: 118568 - RNA, 32 nt, Human
cgaauacacuggcaaaggcaacacuuugcuug

SEQ ID NO: 118569 - RNA, 32 nt, Human
cgaauaccaaccuuuauuugcacuuggguucc

SEQ ID NO: 118570 - RNA, 32 nt, Human
cgaauagccacugcacuccagccugggcaaua

SEQ ID NO: 118571 - RNA, 32 nt, Human
cgaauagccacugcauaccaaccugggcaaua

SEQ ID NO: 118572 - RNA, 32 nt, Human
cgaauaucuuccugugaucugccaucaguggc

SEQ ID NO: 118573 - RNA, 32 nt, Human
cgaauauguccagauucauuuggauucauauu

SEQ ID NO: 118574 - RNA, 32 nt, Human
cgaauauuggggacuugaggccaucuugucuu

SEQ ID NO: 118575 - RNA, 32 nt, Human
cgaaucaacaaucguuggugacuuugauccag

SEQ ID NO: 118576 - RNA, 32 nt, Human
cgaaucaccaucucccucacauguuauccggc

SEQ ID NO: 118577 - RNA, 32 nt, Human
cgaaucaccugggggcacaaugccuaggcucc

SEQ ID NO: 118578 - RNA, 32 nt, Human
cgaaucacugcacccagccuauggaacaucua

SEQ ID NO: 118579 - RNA, 25 nt, Human
cgaaucaugccguuugcaaaacuaa

SEQ ID NO: 118580 - RNA, 32 nt, Human
cgaauccacagaggaggaagccgagguuggga

SEQ ID NO: 118581 - RNA, 32 nt, Human
cgaauccacccuggcccugaggcugcaccuga

SEQ ID NO: 118582 - RNA, 32 nt, Human
cgaaucccagcacugccgucuacucacuguag

SEQ ID NO: 118583 - RNA, 32 nt, Human
cgaaucgccugaggccaggaauucaagaccaa

SEQ ID NO: 118584 - RNA, 32 nt, Human
cgaaucuagaggagggggcaggcugagggucg

SEQ ID NO: 118585 - RNA, 32 nt, Human
cgaaucuaguucucaucugucauccgggucuu

SEQ ID NO: 118586 - RNA, 32 nt, Human
cgaaucuccugccucagccuccgaaguagcug

SEQ ID NO: 118587 - RNA, 32 nt, Human
cgaaucucucauuuucuccuguggaccaguua

SEQ ID NO: 118588 - RNA, 32 nt, Human
cgaaucugagggaaggugagggagugggaagg

SEQ ID NO: 118589 - RNA, 32 nt, Human
cgaaucuggaacuuccacaccugaggcaccug

SEQ ID NO: 118590 - RNA, 32 nt, Human
cgaaucuuccugaaaaugccagacagugacag

SEQ ID NO: 118591 - RNA, 32 nt, Human
cgaaugaaucaucuguucaugcaugcucuacu

SEQ ID NO: 118592 - RNA, 32 nt, Human
cgaaugacauuugagcccuggaccuaaacucc

SEQ ID NO: 118593 - RNA, 31 nt, Human
cgaaugagagguugaggaaaagacugugggu

SEQ ID NO: 118594 - RNA, 32 nt, Human
cgaaugaggaaccaccuccuccuacuguucaa

SEQ ID NO: 118595 - RNA, 32 nt, Human
cgaaugaggguuucuuuagagagauaucuggg

SEQ ID NO: 118596 - RNA, 32 nt, Human
cgaaugcuagacuuacuaaguaccaaaguuug

SEQ ID NO: 118597 - RNA, 32 nt, Human
cgaaugcuugcuaauaggggacucauuaaacu

SEQ ID NO: 118598 - RNA, 32 nt, Human
cgaauggagcaggggcgcgcagauaauuaaag

SEQ ID NO: 118599 - RNA, 32 nt, Human
cgaauggggagguggggcaggaggagggauuc

SEQ ID NO: 118600 - RNA, 32 nt, Human
cgaauguacaacacaaacuguaugaagccaug

SEQ ID NO: 118601 - RNA, 32 nt, Human
cgaauguacugaguguucgcaucccccuucag

SEQ ID NO: 118602 - RNA, 32 nt, Human
cgaauguccugaggcagagauggucuuuauug

SEQ ID NO: 118603 - RNA, 32 nt, Human
cgaaugugcacauugaccccugacaccugcaa

SEQ ID NO: 118604 - RNA, 32 nt, Human
cgaaugugggaaagccuuuaguuugaagucuc

SEQ ID NO: 118605 - RNA, 32 nt, Human
cgaauguucucacucacuaucuugucucucau

SEQ ID NO: 118606 - RNA, 32 nt, Human
cgaauuacacccuuggaaucagcccugaugau

SEQ ID NO: 118607 - RNA, 32 nt, Human
cgaauuacugcauuucagccuuacugagaagc

SEQ ID NO: 118608 - RNA, 32 nt, Human
cgaauucagcaaccucguaccucagcaugcca

SEQ ID NO: 118609 - RNA, 20 nt, Human
cgaauuccagaccucaggug

SEQ ID NO: 118610 - RNA, 20 nt, Human
cgaauuccugaccucaggug

SEQ ID NO: 118611 - RNA, 20 nt, Human
cgaauuccuggauucaagug

SEQ ID NO: 118612 - RNA, 31 nt, Human
cgaauugcacuuugauguucagaaacccacu

SEQ ID NO: 118613 - RNA, 32 nt, Human
cgaauugcucaaugcaugaucuguacccuucg

SEQ ID NO: 118614 - RNA, 32 nt, Human
cgaauuggaaaugcugagcuuccauaagucag

SEQ ID NO: 118615 - RNA, 32 nt, Human
cgaauugucuguaauccuacaggacuauggca

SEQ ID NO: 118616 - RNA, 32 nt, Human
cgaauuugugugauguggcccuggagauaccu

SEQ ID NO: 118617 - RNA, 32 nt, Human
cgacaaacagggcagccagagccagacagcag

SEQ ID NO: 118618 - RNA, 32 nt, Human
cgacaacagugaccuggugaugcugaaauccc

SEQ ID NO: 118619 - RNA, 32 nt, Human
cgacaaccacugcccagcagccucugggaccu

SEQ ID NO: 118620 - RNA, 32 nt, Human
cgacaagaagcagaaauggggaagaaacugga

SEQ ID NO: 118621 - RNA, 32 nt, Human
cgacaagaaguuaaaagaucgugaggagagcc

SEQ ID NO: 118622 - RNA, 32 nt, Human
cgacaagacacauuuuacacagucuccucaua

SEQ ID NO: 118623 - RNA, 32 nt, Human
cgacaagcagagguugaaagacuugaagccaa

SEQ ID NO: 118624 - RNA, 32 nt, Human
cgacaagccucccagggccccggcaccccggu

SEQ ID NO: 118625 - RNA, 32 nt, Human
cgacaagcuggacccccugcucccgggggcga

SEQ ID NO: 118626 - RNA, 32 nt, Human
cgacaauacaucuugacuguuucuucaacuug

SEQ ID NO: 118627 - RNA, 32 nt, Human
cgacaaugaguaggccacccaucacuacuaac

SEQ ID NO: 118628 - RNA, 32 nt, Human
cgacaaugcucacacccuauugcacaggaaag

SEQ ID NO: 118629 - RNA, 32 nt, Human
cgacaauugcaggaugcacagauucugauggg

SEQ ID NO: 118630 - RNA, 32 nt, Human
cgacacaaaggugagggacacccuggaguccu

SEQ ID NO: 118631 - RNA, 30 nt, Human
cgacacauuuagaugcacuaccauugcugu

SEQ ID NO: 118632 - RNA, 32 nt, Human
cgacaccaacugugccgcuggcucccugccac

SEQ ID NO: 118633 - RNA, 32 nt, Human
cgacaccacugcacuccagccugggugacaga

SEQ ID NO: 118634 - RNA, 32 nt, Human
cgacaccagcagaaaaguggaccuugggggcu

SEQ ID NO: 118635 - RNA, 32 nt, Human
cgacaccagcauggacugcugcaccgagaacg

SEQ ID NO: 118636 - RNA, 32 nt, Human
cgacaccauuuggaggagauucagagaagccc

SEQ ID NO: 118637 - RNA, 32 nt, Human
cgacacccaggcaggagagggggaagaacucu

SEQ ID NO: 118638 - RNA, 32 nt, Human
cgacaccccauugcucccacagucuccccagu

SEQ ID NO: 118639 - RNA, 32 nt, Human
cgacaccuuuuguugccuucuuuggccagaug

SEQ ID NO: 118640 - RNA, 32 nt, Human
cgacacgacaccaggcaggagugagccucagg

SEQ ID NO: 118641 - RNA, 32 nt, Human
cgacacgggaguuuaguacaagggcacaaaga

SEQ ID NO: 118642 - RNA, 32 nt, Human
cgacacgugcagcccgggcugccuccaggguc

SEQ ID NO: 118643 - RNA, 22 nt, Human
cgacacuccugcuguccacugg

SEQ ID NO: 118644 - RNA, 32 nt, Human
cgacacuccugggucagacuccuggguucaug

SEQ ID NO: 118645 - RNA, 32 nt, Human
cgacacugcacuccagccugggcaacagagug

SEQ ID NO: 118646 - RNA, 32 nt, Human
cgacacugcacuccagccugggcaacggagac

SEQ ID NO: 118647 - RNA, 32 nt, Human
cgacacugcacuccagccugggugacggugag

SEQ ID NO: 118648 - RNA, 32 nt, Human
cgacacugcgcuccagccugggcaacaagagc

SEQ ID NO: 118649 - RNA, 23 nt, Human
cgacacuggggaagcucggagcg

SEQ ID NO: 118650 - RNA, 25 nt, Human
cgacacuguucuauuuaagugguua

SEQ ID NO: 118651 - RNA, 32 nt, Human
cgacagaacugcacuuguagccggagacaacu

SEQ ID NO: 118652 - RNA, 32 nt, Human
cgacagaccggcggggcugggccucgcaaagc

SEQ ID NO: 118653 - RNA, 32 nt, Human
cgacagacggugcugaaaguguguaaguuccu

SEQ ID NO: 118654 - RNA, 32 nt, Human
cgacagaggagcaggccaugaggcaggcagga

SEQ ID NO: 118655 - RNA, 32 nt, Human
cgacagauaccaggcaauccagagccacaaaa

SEQ ID NO: 118656 - RNA, 32 nt, Human
cgacagcaaagauguccaguguguauccugca

SEQ ID NO: 118657 - RNA, 32 nt, Human
cgacagcagaggaggaagaggaggaagaagga

SEQ ID NO: 118658 - RNA, 32 nt, Human
cgacagccaccuggugccaacucacugagccg

SEQ ID NO: 118659 - RNA, 21 nt, Human
cgacagccacgugggccgaga

SEQ ID NO: 118660 - RNA, 32 nt, Human
cgacagccauuuuucucaucugaguaagaaag

SEQ ID NO: 118661 - RNA, 32 nt, Human
cgacagccucuccuggugagucgggacucagc

SEQ ID NO: 118662 - RNA, 32 nt, Human
cgacagccuguauuaccagcguuuccagaaga

SEQ ID NO: 118663 - RNA, 32 nt, Human
cgacagccuucuucaagccccuccaguauuau

SEQ ID NO: 118664 - RNA, 32 nt, Human
cgacagcgacuucuccugaccccucugccacc

SEQ ID NO: 118665 - RNA, 32 nt, Human
cgacagcuauuucuaaauuccucguggaaaau

SEQ ID NO: 118666 - RNA, 32 nt, Human
cgacagcuccccaucugugcuccugccugccg

SEQ ID NO: 118667 - RNA, 32 nt, Human
cgacagcucgucuccccucucuuaagcacccg

SEQ ID NO: 118668 - RNA, 32 nt, Human
cgacagcugccuggacucguccgugcuggaca

SEQ ID NO: 118669 - RNA, 32 nt, Human
cgacaggaagcauagggcacugcagaugggga

SEQ ID NO: 118670 - RNA, 32 nt, Human
cgacaggaagcuguccccgcuccugagccccu

SEQ ID NO: 118671 - RNA, 32 nt, Human
cgacaggacauggccucagcuggguggcacca

SEQ ID NO: 118672 - RNA, 32 nt, Human
cgacaggagaccguugcuccagugcaugucug

SEQ ID NO: 118673 - RNA, 32 nt, Human
cgacaggagggaaauggcggcucugcaaaagu

SEQ ID NO: 118674 - RNA, 32 nt, Human
cgacaggcuaagugugguggcucaugccugua

SEQ ID NO: 118675 - RNA, 32 nt, Human
cgacagggagagguguagaugccaccaucuga

SEQ ID NO: 118676 - RNA, 32 nt, Human
cgacagggagccugggcuccguccugcuuuag

SEQ ID NO: 118677 - RNA, 32 nt, Human
cgacagguaggugggugaauggauggaugaau

SEQ ID NO: 118678 - RNA, 32 nt, Human
cgacagguccacccucaccauccgggucuuua

SEQ ID NO: 118679 - RNA, 22 nt, Human
cgacaggucccacgccugccua

SEQ ID NO: 118680 - RNA, 32 nt, Human
cgacaguauugaggccccgagcccccagcacu

SEQ ID NO: 118681 - RNA, 32 nt, Human
cgacauaagcugguaucacugguucgggggaa

SEQ ID NO: 118682 - RNA, 32 nt, Human
cgacauagggcuggaggcuggggcaggaacau

SEQ ID NO: 118683 - RNA, 32 nt, Human
cgacaucaugccacugcacuccagccuggggc

SEQ ID NO: 118684 - RNA, 32 nt, Human
cgacaucccgccuugaggaggcugaggcggaa

SEQ ID NO: 118685 - RNA, 32 nt, Human
cgacaucccucccagcaccacacaccccgccc

SEQ ID NO: 118686 - RNA, 32 nt, Human
cgacaucgcgccauugcacuccagccugggug

SEQ ID NO: 118687 - RNA, 32 nt, Human
cgacaucuuggcugggugugguggcucacgcc

SEQ ID NO: 118688 - RNA, 32 nt, Human
cgacaugcugggacccuugagaaacgaaaggc

SEQ ID NO: 118689 - RNA, 19 nt, Human
cgacauggcgaaacccugu

SEQ ID NO: 118690 - RNA, 32 nt, Human
cgacauguguaccucagcuuuuucccucacuu

SEQ ID NO: 118691 - RNA, 32 nt, Human
cgacauuacguucugcuggccuagaggucuua

SEQ ID NO: 118692 - RNA, 32 nt, Human
cgacauucagaagauuugggcagcaguuucuu

SEQ ID NO: 118693 - RNA, 32 nt, Human
cgacauucuucugggaaacuuugaggcacuga

SEQ ID NO: 118694 - RNA, 32 nt, Human
cgacauuggucucuuguguugauagggaagga

SEQ ID NO: 118695 - RNA, 32 nt, Human
cgacauuuuaaugccugagaguuggugaaagu

SEQ ID NO: 118696 - RNA, 32 nt, Human
cgacauuuugccucucucacuggucauguauu

SEQ ID NO: 118697 - RNA, 32 nt, Human
cgaccaaaauaggcaauggaggguaaaagccc

SEQ ID NO: 118698 - RNA, 32 nt, Human
cgaccaagaggguguucgacugcuagagccga

SEQ ID NO: 118699 - RNA, 32 nt, Human
cgaccaagccccggaaggcgagugccggaggg

SEQ ID NO: 118700 - RNA, 32 nt, Human
cgaccaaggcccugaucccaaaagaagaaccc

SEQ ID NO: 118701 - RNA, 29 nt, Human
cgaccaauggcugcuucauccccgacguu

SEQ ID NO: 118702 - RNA, 32 nt, Human
cgaccacaucaaccccaucaccaagaggaggu

SEQ ID NO: 118703 - RNA, 32 nt, Human
cgaccacauccagcugaacagcaaggacaucg

SEQ ID NO: 118704 - RNA, 32 nt, Human
cgaccacauccccagcccuggggacuuauuga

SEQ ID NO: 118705 - RNA, 22 nt, Human
cgaccaccaaugccuaccuggg

SEQ ID NO: 118706 - RNA, 32 nt, Human
cgaccaccaucccggucaccacgaggugagag

SEQ ID NO: 118707 - RNA, 32 nt, Human
cgaccaccuguccugggaccaggcugggaggg

SEQ ID NO: 118708 - RNA, 32 nt, Human
cgaccacugcuucugucucugugaauuuugac

SEQ ID NO: 118709 - RNA, 32 nt, Human
cgaccacuggaguccacuccucugccaggcag

SEQ ID NO: 118710 - RNA, 32 nt, Human
cgaccacuucucugugucaucacacauaccca

SEQ ID NO: 118711 - RNA, 32 nt, Human
cgaccagacggcgggucuccaucuucuuugac

SEQ ID NO: 118712 - RNA, 32 nt, Human
cgaccagauaagagguugggaugagcaugcca

SEQ ID NO: 118713 - RNA, 32 nt, Human
cgaccagcaggcuccucagcccucucuugcca

SEQ ID NO: 118714 - RNA, 32 nt, Human
cgaccagccugaccaacauggaaaaaccccgu

SEQ ID NO: 118715 - RNA, 32 nt, Human
cgaccagggccgaggaggugccuggagugccc

SEQ ID NO: 118716 - RNA, 32 nt, Human
cgaccagugcaggccagcagcagagggcggcg

SEQ ID NO: 118717 - RNA, 32 nt, Human
cgaccauccucuucucccuucuaaccugggcu

SEQ ID NO: 118718 - RNA, 25 nt, Human
cgaccaugagagauaaggacugagg

SEQ ID NO: 118719 - RNA, 32 nt, Human
cgaccaugccuggcuaauuuuguauuuuuagu

SEQ ID NO: 118720 - RNA, 32 nt, Human
cgaccauggaucugaauaaacauguccuugcu

SEQ ID NO: 118721 - RNA, 32 nt, Human
cgaccauuggcagcuccgccucugggccuuuc

SEQ ID NO: 118722 - RNA, 32 nt, Human
cgacccaaagugcugggauuacaggugugagc

SEQ ID NO: 118723 - RNA, 32 nt, Human
cgacccaacccaggccugggacgcacgugucc

SEQ ID NO: 118724 - RNA, 32 nt, Human
cgacccacccacccucccucucagaccaaggu

SEQ ID NO: 118725 - RNA, 32 nt, Human
cgacccagcucacccauucuccucacagggcg

SEQ ID NO: 118726 - RNA, 32 nt, Human
cgacccaggccugaggggccaggaacuugcug

SEQ ID NO: 118727 - RNA, 32 nt, Human
cgacccaucugugguuccugguugguggcuaa

SEQ ID NO: 118728 - RNA, 32 nt, Human
cgaccccaaagccagagaaagccagauggcac

SEQ ID NO: 118729 - RNA, 32 nt, Human
cgaccccaccacugccacauuugccaggaaac

SEQ ID NO: 118730 - RNA, 21 nt, Human
cgaccccacccccugccugga

SEQ ID NO: 118731 - RNA, 32 nt, Human
cgaccccaccugaggcaggagggcaugugcag

SEQ ID NO: 118732 - RNA, 32 nt, Human
cgaccccagccuggccgccuggcauggggacu

SEQ ID NO: 118733 - RNA, 32 nt, Human
cgaccccaguagcgcugggccuaggagcacuc

SEQ ID NO: 118734 - RNA, 32 nt, Human
cgaccccaucugccuccuuaagccacaguccu

SEQ ID NO: 118735 - RNA, 24 nt, Human
cgacccccacgacgccccgcgccc

SEQ ID NO: 118736 - RNA, 32 nt, Human
cgacccccagaccacacaggagcugcugacca

SEQ ID NO: 118737 - RNA, 21 nt, Human
cgacccccgcaucccacgccc

SEQ ID NO: 118738 - RNA, 32 nt, Human
cgacccccgccccuccucaucgggguccucca

SEQ ID NO: 118739 - RNA, 21 nt, Human
cgacccccggcuauccagccc

SEQ ID NO: 118740 - RNA, 32 nt, Human
cgacccccucccccaaccccucucccuuuuca

SEQ ID NO: 118741 - RNA, 23 nt, Human
cgaccccgcgccacuccgcgccc

SEQ ID NO: 118742 - RNA, 19 nt, Human
cgaccccgcuguccucacc

SEQ ID NO: 118743 - RNA, 32 nt, Human
cgaccccggucugugccgcccccugguggcca

SEQ ID NO: 118744 - RNA, 32 nt, Human
cgaccccguccaccucgcaggagcgccaggac

SEQ ID NO: 118745 - RNA, 32 nt, Human
cgaccccucacaccuccugcugccgucgcugc

SEQ ID NO: 118746 - RNA, 32 nt, Human
cgaccccucacuuugugccuuuaguaaacacu

SEQ ID NO: 118747 - RNA, 32 nt, Human
cgaccccucccugucccugccucccugcucug

SEQ ID NO: 118748 - RNA, 32 nt, Human
cgaccccugcagccagagguuugcagugggua

SEQ ID NO: 118749 - RNA, 32 nt, Human
cgaccccugccuggccguggcuagcauggccc

SEQ ID NO: 118750 - RNA, 32 nt, Human
cgacccgcacacacacccacacugcugcccug

SEQ ID NO: 118751 - RNA, 32 nt, Human
cgacccgcagcgucccuggucucuccagcccu

SEQ ID NO: 118752 - RNA, 32 nt, Human
cgacccgccaccugccaccucugacggagugg

SEQ ID NO: 118753 - RNA, 32 nt, Human
cgacccgccucgggggcggagugcggggcaga

SEQ ID NO: 118754 - RNA, 23 nt, Human
cgacccgcgcccgggccugcggg

SEQ ID NO: 118755 - RNA, 19 nt, Human
cgacccgcugaagaagcag

SEQ ID NO: 118756 - RNA, 32 nt, Human
cgacccggaggcggaaccggcagugcagcccg

SEQ ID NO: 118757 - RNA, 32 nt, Human
cgacccgggacaggacaacgacaggaacaccg

SEQ ID NO: 118758 - RNA, 32 nt, Human
cgacccgggaggcuguggguuggaagcugagc

SEQ ID NO: 118759 - RNA, 32 nt, Human
cgacccguggggcaggccaggccagguccucc

SEQ ID NO: 118760 - RNA, 32 nt, Human
cgacccucagcauccuccucagaaaggcuggu

SEQ ID NO: 118761 - RNA, 32 nt, Human
cgacccucagcccucuggugccgcucugcccg

SEQ ID NO: 118762 - RNA, 32 nt, Human
cgacccucagcugugugggaccagcccugcca

SEQ ID NO: 118763 - RNA, 32 nt, Human
cgacccucccagacagcuuggcucuugccccu

SEQ ID NO: 118764 - RNA, 32 nt, Human
cgacccuccgcugccacugaugagccaggagu

SEQ ID NO: 118765 - RNA, 32 nt, Human
cgacccucugggagaaaauccagcaagaugca

SEQ ID NO: 118766 - RNA, 32 nt, Human
cgacccugaaugugaacuugaacuggagugcc

SEQ ID NO: 118767 - RNA, 32 nt, Human
cgacccugcaggggcccaggagcaggcagagu

SEQ ID NO: 118768 - RNA, 21 nt, Human
cgacccuggcugcccccaggc

SEQ ID NO: 118769 - RNA, 32 nt, Human
cgacccuuccucccccuuccucccccucccac

SEQ ID NO: 118770 - RNA, 32 nt, Human
cgacccuucucagaccgaggcgccaccacccc

SEQ ID NO: 118771 - RNA, 32 nt, Human
cgacccuugggcgcuggaguacgcuugggacu

SEQ ID NO: 118772 - RNA, 32 nt, Human
cgacccuuguucucgccgugaaugucaauggg

SEQ ID NO: 118773 - RNA, 32 nt, Human
cgaccgaggagguggcuggacagcuggaggau

SEQ ID NO: 118774 - RNA, 32 nt, Human
cgaccgauuuguaucugcucaaucucuguugc

SEQ ID NO: 118775 - RNA, 32 nt, Human
cgaccgcaaugcaaggaggggaagaaagucac

SEQ ID NO: 118776 - RNA, 32 nt, Human
cgaccgcacugagggacccggcuucgggaagu

SEQ ID NO: 118777 - RNA, 24 nt, Human
cgaccgccgcccccagccaggcgc

SEQ ID NO: 118778 - RNA, 22 nt, Human
cgaccgccuguaggcuccugga

SEQ ID NO: 118779 - RNA, 18 nt, Human
cgaccgcggcggcggcgg

SEQ ID NO: 118780 - RNA, 32 nt, Human
cgaccgcguccaccucacaggugcgccaggac

SEQ ID NO: 118781 - RNA, 32 nt, Human
cgaccggcccugcuguugcuucugagguuuga

SEQ ID NO: 118782 - RNA, 32 nt, Human
cgaccggggccgcggccaaagagcuggcugua

SEQ ID NO: 118783 - RNA, 32 nt, Human
cgaccuaacuucucuuuucccucccaacuugg

SEQ ID NO: 118784 - RNA, 32 nt, Human
cgaccuacuagcacuguucuguccucaaguac

SEQ ID NO: 118785 - RNA, 32 nt, Human
cgaccucacgguugcacuuccauuccaccaga

SEQ ID NO: 118786 - RNA, 32 nt, Human
cgaccucagccaaacccauuccuucuguccuu

SEQ ID NO: 118787 - RNA, 32 nt, Human
cgaccucagugccuuuuuguuuucagagagaa

SEQ ID NO: 118788 - RNA, 21 nt, Human
cgaccuccgcgccucccgccc

SEQ ID NO: 118789 - RNA, 32 nt, Human
cgaccucgcagugagcagggagggcaggcugg

SEQ ID NO: 118790 - RNA, 25 nt, Human
cgaccucggaccuuggagccugcgg

SEQ ID NO: 118791 - RNA, 32 nt, Human
cgaccucggcccggcccugcacuggccgcccg

SEQ ID NO: 118792 - RNA, 23 nt, Human
cgaccucgugauccgcccaccuc

SEQ ID NO: 118793 - RNA, 32 nt, Human
cgaccucucuccccagcuguauuuccaaaaug

SEQ ID NO: 118794 - RNA, 32 nt, Human
cgaccucuucugcggccggccugggcaggugu

SEQ ID NO: 118795 - RNA, 32 nt, Human
cgaccugcagagcaaagccuggccucgugucc

SEQ ID NO: 118796 - RNA, 32 nt, Human
cgaccugccaaguuuggcuagcagguucagac

SEQ ID NO: 118797 - RNA, 32 nt, Human
cgaccugccccgcggcaagcgcggccgcggag

SEQ ID NO: 118798 - RNA, 32 nt, Human
cgaccugcuaucuccucugaaagcuggcugac

SEQ ID NO: 118799 - RNA, 32 nt, Human
cgaccugcucuagugggcauugcggccuccgc

SEQ ID NO: 118800 - RNA, 32 nt, Human
cgaccugcucuggcccuggauuccccauccau

SEQ ID NO: 118801 - RNA, 32 nt, Human
cgaccugggaggcacagggaggggagagaugg

SEQ ID NO: 118802 - RNA, 32 nt, Human
cgaccugggccagacgcgccaccuuccccggu

SEQ ID NO: 118803 - RNA, 32 nt, Human
cgaccuggucaggaaguauuuuggggagaaga

SEQ ID NO: 118804 - RNA, 32 nt, Human
cgaccuguugccucauauuggccaaagagggg

SEQ ID NO: 118805 - RNA, 32 nt, Human
cgaccuucaucacuauucuuaggauaaugcug

SEQ ID NO: 118806 - RNA, 32 nt, Human
cgaccuugcuuugguucuuguugaagugaacc

SEQ ID NO: 118807 - RNA, 32 nt, Human
cgaccuuucuaaaagagcugcagggaagggac

SEQ ID NO: 118808 - RNA, 32 nt, Human
cgacgaacuauacccccaccucuguuuucccc

SEQ ID NO: 118809 - RNA, 32 nt, Human
cgacgagaacaagcuaucagggcugcuaagga

SEQ ID NO: 118810 - RNA, 32 nt, Human
cgacgagcagucucgcgccggagcucauggcc

SEQ ID NO: 118811 - RNA, 32 nt, Human
cgacgagggcaggaugugcaucaacacagagu

SEQ ID NO: 118812 - RNA, 32 nt, Human
cgacgaguuguacucccuccuccuggaagcca

SEQ ID NO: 118813 - RNA, 32 nt, Human
cgacgaucacagcgcaacugccuggaugccua

SEQ ID NO: 118814 - RNA, 24 nt, Human
cgacgcaugccgcucugccguccg

SEQ ID NO: 118815 - RNA, 32 nt, Human
cgacgccgguguuuugcaguccugggcagcuc

SEQ ID NO: 118816 - RNA, 32 nt, Human
cgacgccgucuggucagagccugcugcagugc

SEQ ID NO: 118817 - RNA, 21 nt, Human
cgacgccugcucccccagggg

SEQ ID NO: 118818 - RNA, 32 nt, Human
cgacgccugggugcgccugccugccggccucc

SEQ ID NO: 118819 - RNA, 32 nt, Human
cgacgcggcccaccagcagccccguuuacuag

SEQ ID NO: 118820 - RNA, 32 nt, Human
cgacgcggcccucggcccuggagcugaaggug

SEQ ID NO: 118821 - RNA, 32 nt, Human
cgacgcggcggcggaggaggcugugaggagug

SEQ ID NO: 118822 - RNA, 32 nt, Human
cgacgcuacuggaagccccagagcagaaaaga

SEQ ID NO: 118823 - RNA, 32 nt, Human
cgacgcugacucugcccggucccagaaccaaa

SEQ ID NO: 118824 - RNA, 32 nt, Human
cgacgcugucggaggcagggagagcaaauuac

SEQ ID NO: 118825 - RNA, 32 nt, Human
cgacggaaugugcugccggcugagagggggag

SEQ ID NO: 118826 - RNA, 32 nt, Human
cgacggagagaaacagugagcccgaggggcgc

SEQ ID NO: 118827 - RNA, 32 nt, Human
cgacggagagcugacaguagcccagggcuuuc

SEQ ID NO: 118828 - RNA, 32 nt, Human
cgacggagcggcgaaugccgggccagugcucc

SEQ ID NO: 118829 - RNA, 32 nt, Human
cgacggagcggcgcccccggacugccugacug

SEQ ID NO: 118830 - RNA, 32 nt, Human
cgacggaggaggaggauggaggcggugguguu

SEQ ID NO: 118831 - RNA, 32 nt, Human
cgacggcaaaucucgugaaccuugggggacga

SEQ ID NO: 118832 - RNA, 32 nt, Human
cgacggccaugcuggggcaggugagugcucug

SEQ ID NO: 118833 - RNA, 22 nt, Human
cgacggccauuaccaaucgcga

SEQ ID NO: 118834 - RNA, 24 nt, Human
cgacggccgccgcggagcuccgag

SEQ ID NO: 118835 - RNA, 20 nt, Human
cgacggccuccacaguccgg

SEQ ID NO: 118836 - RNA, 32 nt, Human
cgacggcgcagccggagccagcagagccggaa

SEQ ID NO: 118837 - RNA, 32 nt, Human
cgacggcgccgccauguaccugggcgaggugu

SEQ ID NO: 118838 - RNA, 21 nt, Human
cgacggcgcgcucccccguca

SEQ ID NO: 118839 - RNA, 32 nt, Human
cgacggcggcagcagcugcgguggcggcgcuc

SEQ ID NO: 118840 - RNA, 20 nt, Human
cgacggcggcggcaagggac

SEQ ID NO: 118841 - RNA, 23 nt, Human
cgacggcggcggcggcgaaagcg

SEQ ID NO: 118842 - RNA, 23 nt, Human
cgacggcggcgggggcgguaaug

SEQ ID NO: 118843 - RNA, 21 nt, Human
cgacggcggucgcgucggcgu

SEQ ID NO: 118844 - RNA, 24 nt, Human
cgacggcgucgggaggagugucca

SEQ ID NO: 118845 - RNA, 32 nt, Human
cgacggcuucaagaucagcacauugcugaagc

SEQ ID NO: 118846 - RNA, 32 nt, Human
cgacgggauggaccagccccuggagggggucc

SEQ ID NO: 118847 - RNA, 32 nt, Human
cgacgggccgcuccaagccucgacaugucgua

SEQ ID NO: 118848 - RNA, 32 nt, Human
cgacggggucaccccaauguucuggaggcugc

SEQ ID NO: 118849 - RNA, 32 nt, Human
cgacgggucaccucgcccacacggccagcacc

SEQ ID NO: 118850 - RNA, 32 nt, Human
cgacgggugaggcacagcugagcgccaaagcc

SEQ ID NO: 118851 - RNA, 32 nt, Human
cgacggugacuucaccugggaaccugauggug

SEQ ID NO: 118852 - RNA, 32 nt, Human
cgacggugaggggcgguggcccaacggcggga

SEQ ID NO: 118853 - RNA, 32 nt, Human
cgacgguggcgucugcgacgggagacagcgcg

SEQ ID NO: 118854 - RNA, 32 nt, Human
cgacguaaaaaccuaaguucugagcacaaugc

SEQ ID NO: 118855 - RNA, 32 nt, Human
cgacguccagugcuccagccggugugaggaca

SEQ ID NO: 118856 - RNA, 32 nt, Human
cgacguccuuaugcccaaagcuuuucaggguc

SEQ ID NO: 118857 - RNA, 32 nt, Human
cgacgucuccaucggccaucucgacucagaac

SEQ ID NO: 118858 - RNA, 32 nt, Human
cgacgugcagccuggcagugcagugagcuguc

SEQ ID NO: 118859 - RNA, 32 nt, Human
cgacgugccaucaucuucgucuccuggggguu

SEQ ID NO: 118860 - RNA, 32 nt, Human
cgacguggccagacauggcauucugcaggugg

SEQ ID NO: 118861 - RNA, 32 nt, Human
cgacgugggagaaucacuugagcccaggaguu

SEQ ID NO: 118862 - RNA, 32 nt, Human
cgacguggggaugucaacauggcucagacuug

SEQ ID NO: 118863 - RNA, 32 nt, Human
cgacguguccccagguuucuggcaggggagau

SEQ ID NO: 118864 - RNA, 32 nt, Human
cgacguguguaacuguggucagcagaccuugu

SEQ ID NO: 118865 - RNA, 32 nt, Human
cgacguucagcugucugugucuccagugcucc

SEQ ID NO: 118866 - RNA, 32 nt, Human
cgacuaaacucaucugauccuuucaucagccc

SEQ ID NO: 118867 - RNA, 32 nt, Human
cgacuacaccauggauaccagcuccagcugca

SEQ ID NO: 118868 - RNA, 32 nt, Human
cgacuacacugaggcacccucagagaaggcag

SEQ ID NO: 118869 - RNA, 32 nt, Human
cgacuacaggcgcgcaccaccacgcccggcua

SEQ ID NO: 118870 - RNA, 32 nt, Human
cgacuacaggugcccaccaccacaccuggcua

SEQ ID NO: 118871 - RNA, 32 nt, Human
cgacuaccgaagacccaagucagcauuccggu

SEQ ID NO: 118872 - RNA, 32 nt, Human
cgacuaccucccuucugacccugcugcuggcg

SEQ ID NO: 118873 - RNA, 32 nt, Human
cgacuagaagaaaaagagagggagaugcagca

SEQ ID NO: 118874 - RNA, 32 nt, Human
cgacuagauguacagcuugcaaguagaagucu

SEQ ID NO: 118875 - RNA, 32 nt, Human
cgacuauugccacccugcuucuccaagagcag

SEQ ID NO: 118876 - RNA, 32 nt, Human
cgacucacacaccacaccugauuccuguugcu

SEQ ID NO: 118877 - RNA, 26 nt, Human
cgacucacccggaaggagaagccgug

SEQ ID NO: 118878 - RNA, 32 nt, Human
cgacucacugcaaaaucugccucccggguuca

SEQ ID NO: 118879 - RNA, 32 nt, Human
cgacucacugcaaccuccaccucccagguuca

SEQ ID NO: 118880 - RNA, 32 nt, Human
cgacucacugcaaccuccgccucccgaguuca

SEQ ID NO: 118881 - RNA, 32 nt, Human
cgacucacugcaaccucugccucccagguuca

SEQ ID NO: 118882 - RNA, 32 nt, Human
cgacucacugcaaccuucgccucccaggagaa

SEQ ID NO: 118883 - RNA, 32 nt, Human
cgacucacugcaaccuucgccucccagguuca

SEQ ID NO: 118884 - RNA, 32 nt, Human
cgacucacugcaacuuccaccuccuggaguca

SEQ ID NO: 118885 - RNA, 32 nt, Human
cgacucacugcaagcuccgccucccggguuca

SEQ ID NO: 118886 - RNA, 32 nt, Human
cgacucacugcagccucaaccuccuggggcca

SEQ ID NO: 118887 - RNA, 32 nt, Human
cgacucacugcagcuaucucucgccucagccc

SEQ ID NO: 118888 - RNA, 32 nt, Human
cgacucagaaauggcggccuccauguucuacg

SEQ ID NO: 118889 - RNA, 32 nt, Human
cgacucagaacacauaaugguguuuguagacu

SEQ ID NO: 118890 - RNA, 32 nt, Human
cgacucaugccuggaaucccaacacuuuggga

SEQ ID NO: 118891 - RNA, 32 nt, Human
cgacucaugccuguaaacccagcauuuuguga

SEQ ID NO: 118892 - RNA, 21 nt, Human
cgacucauuggcucacugcag

SEQ ID NO: 118893 - RNA, 32 nt, Human
cgacuccaacaacacacuucccugccagcucc

SEQ ID NO: 118894 - RNA, 28 nt, Human
cgacuccaagacgcugccucuuccugcg

SEQ ID NO: 118895 - RNA, 32 nt, Human
cgacuccacauccucugcacaugcuaccuaca

SEQ ID NO: 118896 - RNA, 32 nt, Human
cgacuccacccuggcuggaggaacugggugcu

SEQ ID NO: 118897 - RNA, 32 nt, Human
cgacuccacuuucauaguuauuguuucugguc

SEQ ID NO: 118898 - RNA, 32 nt, Human
cgacuccauggggaaacugaagcccuagagga

SEQ ID NO: 118899 - RNA, 32 nt, Human
cgacucccagaggcccuuaaacagcaucuuca

SEQ ID NO: 118900 - RNA, 32 nt, Human
cgacucccagagguggagcuccccaagguguc

SEQ ID NO: 118901 - RNA, 32 nt, Human
cgacuccccuccacaccaccucccaagguauu

SEQ ID NO: 118902 - RNA, 32 nt, Human
cgacuccccuccccaucucccucucaaccuca

SEQ ID NO: 118903 - RNA, 32 nt, Human
cgacuccgccaaagcuggacgaggcagccgga

SEQ ID NO: 118904 - RNA, 19 nt, Human
cgacuccgggucaaggccc

SEQ ID NO: 118905 - RNA, 24 nt, Human
cgacuccugaccucaggugaucca

SEQ ID NO: 118906 - RNA, 23 nt, Human
cgacuccugaccuuucccagccu

SEQ ID NO: 118907 - RNA, 32 nt, Human
cgacuccugccugaguuuccagccugcuaguc

SEQ ID NO: 118908 - RNA, 32 nt, Human
cgacuccugccugccgccucucuguacaguaa

SEQ ID NO: 118909 - RNA, 32 nt, Human
cgacuccuguaaucccagcacuuugggaggcc

SEQ ID NO: 118910 - RNA, 32 nt, Human
cgacuccugugcucucuuuucagugucaugga

SEQ ID NO: 118911 - RNA, 32 nt, Human
cgacucgagcuccuggaacuugcucaggcucc

SEQ ID NO: 118912 - RNA, 32 nt, Human
cgacucgcagggugaacaaaaugugauaucag

SEQ ID NO: 118913 - RNA, 32 nt, Human
cgacucgcgcucucggcuucugcuccggggcu

SEQ ID NO: 118914 - RNA, 32 nt, Human
cgacucuacuaaaaauacaaaaauuagccugg

SEQ ID NO: 118915 - RNA, 32 nt, Human
cgacucuaggaguugggcugaggauuuccacc

SEQ ID NO: 118916 - RNA, 32 nt, Human
cgacucuagucguaauggaggcgggcggcuuu

SEQ ID NO: 118917 - RNA, 32 nt, Human
cgacucuauucccagccagcuccuaggacaag

SEQ ID NO: 118918 - RNA, 32 nt, Human
cgacucucaagccucagcucccaggcuaggcu

SEQ ID NO: 118919 - RNA, 32 nt, Human
cgacucucauugccgacacugcagcagaaucu

SEQ ID NO: 118920 - RNA, 32 nt, Human
cgacucuccugccucagccucccgaguagcug

SEQ ID NO: 118921 - RNA, 32 nt, Human
cgacucuccugccucagccuccugaguagcug

SEQ ID NO: 118922 - RNA, 32 nt, Human
cgacucucuccuccuccucccggcacgaccug

SEQ ID NO: 118923 - RNA, 32 nt, Human
cgacucugcacucuccacccuggcugggauca

SEQ ID NO: 118924 - RNA, 32 nt, Human
cgacucugggugcggacugugggagcugacuc

SEQ ID NO: 118925 - RNA, 32 nt, Human
cgacucugugugaccuuggaugcccccuccag

SEQ ID NO: 118926 - RNA, 32 nt, Human
cgacugagaagacugcuccacccaugaugcau

SEQ ID NO: 118927 - RNA, 32 nt, Human
cgacugagaagaggugcaaggaagcgggcucc

SEQ ID NO: 118928 - RNA, 32 nt, Human
cgacugagaggggccugacuucugcugggaca

SEQ ID NO: 118929 - RNA, 32 nt, Human
cgacugagcuuuagacagcagagcagaugccg

SEQ ID NO: 118930 - RNA, 32 nt, Human
cgacugaggaggcggcaacggcgggcgccggg

SEQ ID NO: 118931 - RNA, 32 nt, Human
cgacugaggggaggggcggggccaggcgccug

SEQ ID NO: 118932 - RNA, 20 nt, Human
cgacugcacugacugggucc

SEQ ID NO: 118933 - RNA, 32 nt, Human
cgacugccaccugaacccaacucaagccagac

SEQ ID NO: 118934 - RNA, 32 nt, Human
cgacugccauccagagaaaaggcaccuugugc

SEQ ID NO: 118935 - RNA, 32 nt, Human
cgacugcgcugacagaacgugauucucgugcc

SEQ ID NO: 118936 - RNA, 32 nt, Human
cgacugcgggagaagggggcgagccugcgggc

SEQ ID NO: 118937 - RNA, 32 nt, Human
cgacugcggguguucaccacaggccaggcccu

SEQ ID NO: 118938 - RNA, 32 nt, Human
cgacugcuggaacccagccagugggagggccu

SEQ ID NO: 118939 - RNA, 32 nt, Human
cgacugcuggagccaggucuccaccucugcac

SEQ ID NO: 118940 - RNA, 32 nt, Human
cgacuggagcaagguuugcuggcagaugaggc

SEQ ID NO: 118941 - RNA, 32 nt, Human
cgacuggagccuggagguucacaguggauuuc

SEQ ID NO: 118942 - RNA, 32 nt, Human
cgacuggagcgacucaagaucugugcugccuc

SEQ ID NO: 118943 - RNA, 32 nt, Human
cgacuggaggggaggaggaggagcaggccgag

SEQ ID NO: 118944 - RNA, 32 nt, Human
cgacuggccgggcucccugccuucuccuucuc

SEQ ID NO: 118945 - RNA, 19 nt, Human
cgacuggccuggccagagg

SEQ ID NO: 118946 - RNA, 32 nt, Human
cgacuggccuuccugccuccagccuggcuucu

SEQ ID NO: 118947 - RNA, 32 nt, Human
cgacuggcuggagcugcccccuccaggccagu

SEQ ID NO: 118948 - RNA, 32 nt, Human
cgacugggcugcuggggcagggcccagggagg

SEQ ID NO: 118949 - RNA, 32 nt, Human
cgacuggguggagggggcggaggggaaggaag

SEQ ID NO: 118950 - RNA, 32 nt, Human
cgacugugaacaaaccaacauccgacaauaac

SEQ ID NO: 118951 - RNA, 32 nt, Human
cgacugugccugagugcugcugugccacuggg

SEQ ID NO: 118952 - RNA, 32 nt, Human
cgacugugcucgcugcucagcgccgcacccgg

SEQ ID NO: 118953 - RNA, 32 nt, Human
cgacugugugccccugggcaugugugagccuc

SEQ ID NO: 118954 - RNA, 32 nt, Human
cgacuuacagcuuuagcugaagacagaccguu

SEQ ID NO: 118955 - RNA, 32 nt, Human
cgacuucacugcucuguguccucugcuccagg

SEQ ID NO: 118956 - RNA, 32 nt, Human
cgacuucccacuuuucuuucucauucucuguc

SEQ ID NO: 118957 - RNA, 32 nt, Human
cgacuucccuccugccugcagccugggccagg

SEQ ID NO: 118958 - RNA, 32 nt, Human
cgacuuccgagccauggaaggguggauugaug

SEQ ID NO: 118959 - RNA, 32 nt, Human
cgacuuccgugugaccucugcaguacuccuca

SEQ ID NO: 118960 - RNA, 32 nt, Human
cgacuuccucuccagccuucucucucugguca

SEQ ID NO: 118961 - RNA, 32 nt, Human
cgacuucuccaucuccuguguaaucaaggcca

SEQ ID NO: 118962 - RNA, 32 nt, Human
cgacuugggaggcugaggugggaggauuguuu

SEQ ID NO: 118963 - RNA, 32 nt, Human
cgacuuuacuaccugcagaccugcacuauaag

SEQ ID NO: 118964 - RNA, 32 nt, Human
cgacuuugggaucuagaggagcuuuggcuccg

SEQ ID NO: 118965 - RNA, 32 nt, Human
cgacuuuguggugagguuggcagagaauauac

SEQ ID NO: 118966 - RNA, 32 nt, Human
cgacuuuuaacuuucauugucuuuuccgcccg

SEQ ID NO: 118967 - RNA, 30 nt, Human
cgagaaaaacaaaccaaauggaugauguua

SEQ ID NO: 118968 - RNA, 32 nt, Human
cgagaaaagacaggcuguggauucagugcagu

SEQ ID NO: 118969 - RNA, 32 nt, Human
cgagaaagacaagaacugagaauuuuaguggg

SEQ ID NO: 118970 - RNA, 32 nt, Human
cgagaaagcgccauugcacuccagucugggug

SEQ ID NO: 118971 - RNA, 32 nt, Human
cgagaaaggaagcgccugaagggucgugaggc

SEQ ID NO: 118972 - RNA, 32 nt, Human
cgagaaaggaccuaggguggggaagggagggu

SEQ ID NO: 118973 - RNA, 32 nt, Human
cgagaaaugcagcugcucaaaggccuucugag

SEQ ID NO: 118974 - RNA, 24 nt, Human
cgagaacaaagacacaacauacca

SEQ ID NO: 118975 - RNA, 23 nt, Human
cgagaacaccuaaacaacaacca

SEQ ID NO: 118976 - RNA, 32 nt, Human
cgagaacagagaugacacaucuucucaccuuc

SEQ ID NO: 118977 - RNA, 32 nt, Human
cgagaacagauggggccaggcaccauggccca

SEQ ID NO: 118978 - RNA, 32 nt, Human
cgagaacagauucuccccuccaguaugggccc

SEQ ID NO: 118979 - RNA, 32 nt, Human
cgagaaccagcggagaaaagaaaaagcaacgu

SEQ ID NO: 118980 - RNA, 32 nt, Human
cgagaacccaucuuccaaccccggcuauuugg

SEQ ID NO: 118981 - RNA, 32 nt, Human
cgagaacccgggagguggagcuugcggugagc

SEQ ID NO: 118982 - RNA, 32 nt, Human
cgagaacgccgaggaggagcugcugcggggag

SEQ ID NO: 118983 - RNA, 32 nt, Human
cgagaacggcccuugcugccaccaacauggag

SEQ ID NO: 118984 - RNA, 32 nt, Human
cgagaacuaccugaguucugugcagguagagu

SEQ ID NO: 118985 - RNA, 32 nt, Human
cgagaacucauccuguagucaccagauggagu

SEQ ID NO: 118986 - RNA, 32 nt, Human
cgagaacugcccucccccuccucucggugcag

SEQ ID NO: 118987 - RNA, 32 nt, Human
cgagaacugcguggcaucuaaguggcuggcaa

SEQ ID NO: 118988 - RNA, 18 nt, Human
cgagaagaagaggagcgu

SEQ ID NO: 118989 - RNA, 32 nt, Human
cgagaagaaugccaccaugccagucaccaugu

SEQ ID NO: 118990 - RNA, 32 nt, Human
cgagaagacaggaggaagaaagggagagaggg

SEQ ID NO: 118991 - RNA, 20 nt, Human
cgagaagauggcggcggcgg

SEQ ID NO: 118992 - RNA, 32 nt, Human
cgagaagcaaucugcccauucaucuucaugua

SEQ ID NO: 118993 - RNA, 32 nt, Human
cgagaagcagcgcucgggcgagcgaggaccga

SEQ ID NO: 118994 - RNA, 32 nt, Human
cgagaagcugagauagggucaccugagccugg

SEQ ID NO: 118995 - RNA, 32 nt, Human
cgagaagcugcagcagcucuucaaccacacca

SEQ ID NO: 118996 - RNA, 32 nt, Human
cgagaaggaagggagagacagagggggcgcgc

SEQ ID NO: 118997 - RNA, 32 nt, Human
cgagaaggcagaggaggagggagggagggaag

SEQ ID NO: 118998 - RNA, 32 nt, Human
cgagaaggcugaggcaggagaauggcgugaac

SEQ ID NO: 118999 - RNA, 32 nt, Human
cgagaagggaaagugaauguggucuggagugu

SEQ ID NO: 119000 - RNA, 32 nt, Human
cgagaagggagaagaggccgaagaggaaacau

SEQ ID NO: 119001 - RNA, 32 nt, Human
cgagaagggaggaucacuugagcccaggaguu

SEQ ID NO: 119002 - RNA, 32 nt, Human
cgagaagggcgcaggaaccgaggacuccaggg

SEQ ID NO: 119003 - RNA, 32 nt, Human
cgagaaggggaggcuugggucagguucaggga

SEQ ID NO: 119004 - RNA, 32 nt, Human
cgagaaggucucccuacagucuuuggagacaa

SEQ ID NO: 119005 - RNA, 32 nt, Human
cgagaagugagccggggugagguggggaggag

SEQ ID NO: 119006 - RNA, 32 nt, Human
cgagaaucagcccucuuaagucagcccucucu

SEQ ID NO: 119007 - RNA, 32 nt, Human
cgagaaucuuucggagcucaguguucugauag

SEQ ID NO: 119008 - RNA, 30 nt, Human
cgagaaugaaccccagcacccccagcuacc

SEQ ID NO: 119009 - RNA, 32 nt, Human
cgagaaugccacugcacuacagccugggcgac

SEQ ID NO: 119010 - RNA, 32 nt, Human
cgagaauugggacagaaccguguccucaggag

SEQ ID NO: 119011 - RNA, 32 nt, Human
cgagacaagucaacauggugaaaccucaucuc

SEQ ID NO: 119012 - RNA, 32 nt, Human
cgagacacaaauucaggcuaucaugaccaguc

SEQ ID NO: 119013 - RNA, 32 nt, Human
cgagacaccgucucaaaaaggauaauaauuua

SEQ ID NO: 119014 - RNA, 32 nt, Human
cgagacacgaccucagagucucugugucuccu

SEQ ID NO: 119015 - RNA, 32 nt, Human
cgagacagagucucgcucugucacccagguug

SEQ ID NO: 119016 - RNA, 32 nt, Human
cgagacagcugaugaggcuggcucagugugug

SEQ ID NO: 119017 - RNA, 32 nt, Human
cgagacaggaaggcagggcgcagugguugaaa

SEQ ID NO: 119018 - RNA, 32 nt, Human
cgagacaggcagcccaggccggcugugagagu

SEQ ID NO: 119019 - RNA, 32 nt, Human
cgagacaggcuggcccacagugcuggcugggc

SEQ ID NO: 119020 - RNA, 32 nt, Human
cgagacagggucucacucugucacccaagcug

SEQ ID NO: 119021 - RNA, 32 nt, Human
cgagacagggucuugcucuggcgcccaggcug

SEQ ID NO: 119022 - RNA, 23 nt, Human
cgagacaggguuucaccauguug

SEQ ID NO: 119023 - RNA, 32 nt, Human
cgagacaggugcuaaaguugaauggcugaugg

SEQ ID NO: 119024 - RNA, 32 nt, Human
cgagacagugccaccguacucuagccugggcg

SEQ ID NO: 119025 - RNA, 32 nt, Human
cgagacauggugcauguuguugcuggauugaa

SEQ ID NO: 119026 - RNA, 32 nt, Human
cgagaccaaguuucacucuguugcccaaggua

SEQ ID NO: 119027 - RNA, 32 nt, Human
cgagaccacaccauugcacuccagccugggca

SEQ ID NO: 119028 - RNA, 32 nt, Human
cgagaccacacuggccuccccuaggagcacgu

SEQ ID NO: 119029 - RNA, 32 nt, Human
cgagaccacgccacugcacuccagcccgggug

SEQ ID NO: 119030 - RNA, 32 nt, Human
cgagaccacgccauugcacuccagccugggug

SEQ ID NO: 119031 - RNA, 32 nt, Human
cgagaccacgccauugcacuccagcuugggca

SEQ ID NO: 119032 - RNA, 32 nt, Human
cgagaccagccugagcaacacugugagacccc

SEQ ID NO: 119033 - RNA, 32 nt, Human
cgagaccagccuggacaacauggugaacccgu

SEQ ID NO: 119034 - RNA, 32 nt, Human
cgagaccagccuggccaacaaggugaaccuca

SEQ ID NO: 119035 - RNA, 32 nt, Human
cgagaccagccuggccaacacuggucucugug

SEQ ID NO: 119036 - RNA, 32 nt, Human
cgagaccagccuggccaacauggugaacccca

SEQ ID NO: 119037 - RNA, 32 nt, Human
cgagaccagccuggccaagauggcgaaacgcu

SEQ ID NO: 119038 - RNA, 32 nt, Human
cgagaccagccuggccagcaaggugaaacccc

SEQ ID NO: 119039 - RNA, 32 nt, Human
cgagaccagccuggccagcauggugaaacccc

SEQ ID NO: 119040 - RNA, 32 nt, Human
cgagaccagccuggccagcauggugaaacccu

SEQ ID NO: 119041 - RNA, 32 nt, Human
cgagaccagccuggccagcauggugaaacucu

SEQ ID NO: 119042 - RNA, 32 nt, Human
cgagaccagccuggccagcauggugagacccc

SEQ ID NO: 119043 - RNA, 32 nt, Human
cgagaccagccuuggccaacauggcgaaaccc

SEQ ID NO: 119044 - RNA, 32 nt, Human
cgagaccaggaguucaagaccagccugaccaa

SEQ ID NO: 119045 - RNA, 32 nt, Human
cgagaccagguuggccaacauggugagacccc

SEQ ID NO: 119046 - RNA, 32 nt, Human
cgagaccauaccacugcauuccagccugggug

SEQ ID NO: 119047 - RNA, 32 nt, Human
cgagaccauccuggcuaacauggugaaccccg

SEQ ID NO: 119048 - RNA, 32 nt, Human
cgagaccaugccacugcacuccagccugggca

SEQ ID NO: 119049 - RNA, 32 nt, Human
cgagaccaugccacugcacuccggccugggug

SEQ ID NO: 119050 - RNA, 32 nt, Human
cgagaccaugccauugcacuccagccugggcg

SEQ ID NO: 119051 - RNA, 32 nt, Human
cgagaccauggugaaaccccgucucuacuaaa

SEQ ID NO: 119052 - RNA, 32 nt, Human
cgagaccaugucggaccugggcucggaggagu

SEQ ID NO: 119053 - RNA, 32 nt, Human
cgagacccauuuccuccccaaucccagagacu

SEQ ID NO: 119054 - RNA, 32 nt, Human
cgagaccccucgggggcugcacacccagcagc

SEQ ID NO: 119055 - RNA, 32 nt, Human
cgagaccccugccaccacuacugcauucacgg

SEQ ID NO: 119056 - RNA, 32 nt, Human
cgagacccgcuccaccaggcgccuuggagagc

SEQ ID NO: 119057 - RNA, 32 nt, Human
cgagacccuucugaauuuccuggaccuacgca

SEQ ID NO: 119058 - RNA, 32 nt, Human
cgagaccgcaccacugcacuccagccugggcg

SEQ ID NO: 119059 - RNA, 32 nt, Human
cgagaccgcgccacugcacuccagccugggca

SEQ ID NO: 119060 - RNA, 32 nt, Human
cgagaccgugccacugcacuccagccuggcaa

SEQ ID NO: 119061 - RNA, 32 nt, Human
cgagaccgugccacugcacuccagccugggca

SEQ ID NO: 119062 - RNA, 32 nt, Human
cgagaccuccugggucccuccguagcuggaag

SEQ ID NO: 119063 - RNA, 32 nt, Human
cgagaccucucaaggcccugaccucaggggcc

SEQ ID NO: 119064 - RNA, 32 nt, Human
cgagaccuuccagggaggggagaaauacuuuu

SEQ ID NO: 119065 - RNA, 32 nt, Human
cgagaccuugaaggagcuuugcaaguagagaa

SEQ ID NO: 119066 - RNA, 32 nt, Human
cgagacgacaaggacaagauggcagcaaacac

SEQ ID NO: 119067 - RNA, 32 nt, Human
cgagacgacaccacugcacuccagccugggug

SEQ ID NO: 119068 - RNA, 26 nt, Human
cgagacgccgaagagcccgccgcccg

SEQ ID NO: 119069 - RNA, 32 nt, Human
cgagacgccgccgagaguugugaagggcgcgg

SEQ ID NO: 119070 - RNA, 32 nt, Human
cgagacgcggacgcagguccacccucgggccc

SEQ ID NO: 119071 - RNA, 18 nt, Human
cgagacgcggguggcggc

SEQ ID NO: 119072 - RNA, 32 nt, Human
cgagacggagucucgcucugucgcccaggcug

SEQ ID NO: 119073 - RNA, 32 nt, Human
cgagacggagucuugcucugucaccaggcugg

SEQ ID NO: 119074 - RNA, 32 nt, Human
cgagacgggaggaucacgaggucaagagaucg

SEQ ID NO: 119075 - RNA, 32 nt, Human
cgagacgggaggaucaguugaggucaggaguu

SEQ ID NO: 119076 - RNA, 32 nt, Human
cgagacgggcagaucacuugaggucaggagau

SEQ ID NO: 119077 - RNA, 32 nt, Human
cgagacgggguuucaccauguuggucgggcug

SEQ ID NO: 119078 - RNA, 32 nt, Human
cgagacgggguuucauuauguuggccaggcug

SEQ ID NO: 119079 - RNA, 32 nt, Human
cgagacgggguuuccccauguuggucaggcug

SEQ ID NO: 119080 - RNA, 32 nt, Human
cgagacuaugccacugcacuccagccuaggug

SEQ ID NO: 119081 - RNA, 32 nt, Human
cgagacuccaucucaaaaacaaaacaaauaaa

SEQ ID NO: 119082 - RNA, 32 nt, Human
cgagacuccaucucaaaacaaaacaaaacaaa

SEQ ID NO: 119083 - RNA, 32 nt, Human
cgagacuccaucucaaacaaaaacaagaacaa

SEQ ID NO: 119084 - RNA, 32 nt, Human
cgagacuccaucucaacaacaacaacaacaaa

SEQ ID NO: 119085 - RNA, 32 nt, Human
cgagacuccgucucaaaaacaaacaaacaaaa

SEQ ID NO: 119086 - RNA, 32 nt, Human
cgagacucggucucaaaaacaaaacaaaacaa

SEQ ID NO: 119087 - RNA, 32 nt, Human
cgagacucuaucucaaaacaaucaaaacaaaa

SEQ ID NO: 119088 - RNA, 32 nt, Human
cgagacucucuccuccuccucaccucauuguc

SEQ ID NO: 119089 - RNA, 32 nt, Human
cgagacucugucucaaaacaaacaaacaaaca

SEQ ID NO: 119090 - RNA, 32 nt, Human
cgagacugagccacugcacuccagccugggca

SEQ ID NO: 119091 - RNA, 32 nt, Human
cgagacugaggcaggagaauggcgugaauccg

SEQ ID NO: 119092 - RNA, 32 nt, Human
cgagacugagucuacaggagcuuugggccuga

SEQ ID NO: 119093 - RNA, 32 nt, Human
cgagacugggccacugcacuccagccuggaug

SEQ ID NO: 119094 - RNA, 32 nt, Human
cgagacuguagcccccucccacucccacacuc

SEQ ID NO: 119095 - RNA, 32 nt, Human
cgagacugugcuacugcacuccagccugggca

SEQ ID NO: 119096 - RNA, 32 nt, Human
cgagacugugcuccagccugggcgacagagcg

SEQ ID NO: 119097 - RNA, 32 nt, Human
cgagacugugucauugcacuccagccugggcg

SEQ ID NO: 119098 - RNA, 16 nt, Human
cgagacuguguuucaa

SEQ ID NO: 119099 - RNA, 32 nt, Human
cgagacuugccugggcggcauagugagaccuu

SEQ ID NO: 119100 - RNA, 32 nt, Human
cgagagaacaucuuccuucucuaccaucacuc

SEQ ID NO: 119101 - RNA, 32 nt, Human
cgagagaaggccauggaggugccgccaccgga

SEQ ID NO: 119102 - RNA, 32 nt, Human
cgagagaaucaggauggaggccguggcgacgg

SEQ ID NO: 119103 - RNA, 32 nt, Human
cgagagacacgguggguaaaggaugugggcag

SEQ ID NO: 119104 - RNA, 32 nt, Human
cgagagacgagugggagagcgagugcagcgag

SEQ ID NO: 119105 - RNA, 32 nt, Human
cgagagagcacagcagagcgcgccgcggagcc

SEQ ID NO: 119106 - RNA, 32 nt, Human
cgagagaggaagaggagaaagucuucaugggg

SEQ ID NO: 119107 - RNA, 32 nt, Human
cgagagaggagaagaagaaagcggaaaagagg

SEQ ID NO: 119108 - RNA, 32 nt, Human
cgagagaggagaagggaaagguggagggcuaa

SEQ ID NO: 119109 - RNA, 31 nt, Human
cgagagaugcucccucuccccucaugcuccc

SEQ ID NO: 119110 - RNA, 32 nt, Human
cgagagcacaccacugcacuccagccugggca

SEQ ID NO: 119111 - RNA, 32 nt, Human
cgagagcacagcccugaggaggcgcgggagcu

SEQ ID NO: 119112 - RNA, 32 nt, Human
cgagagcacgccacugcacuccagccugggug

SEQ ID NO: 119113 - RNA, 32 nt, Human
cgagagcagaaccuugcgcgggcacagggccc

SEQ ID NO: 119114 - RNA, 32 nt, Human
cgagagcagaggaggaggaggcaugagcgagg

SEQ ID NO: 119115 - RNA, 32 nt, Human
cgagagcagaggaggaggaggcaugagugagg

SEQ ID NO: 119116 - RNA, 32 nt, Human
cgagagcagccagaugggcugaaaguggaacu

SEQ ID NO: 119117 - RNA, 32 nt, Human
cgagagcagccccaguagcagcgccauggccg

SEQ ID NO: 119118 - RNA, 32 nt, Human
cgagagcagugugguccacucuggccuggguu

SEQ ID NO: 119119 - RNA, 32 nt, Human
cgagagcaugccgcugcacuccagccugggag

SEQ ID NO: 119120 - RNA, 32 nt, Human
cgagagccaaauccacugcagagcaggguuga

SEQ ID NO: 119121 - RNA, 18 nt, Human
cgagagcgccggcggcgg

SEQ ID NO: 119122 - RNA, 32 nt, Human
cgagagcggacugccugcccacccugaggucc

SEQ ID NO: 119123 - RNA, 17 nt, Human
cgagagcggcagcagca

SEQ ID NO: 119124 - RNA, 18 nt, Human
cgagagcggcggcggcgg

SEQ ID NO: 119125 - RNA, 19 nt, Human
cgagagcggcggcggcugg

SEQ ID NO: 119126 - RNA, 32 nt, Human
cgagagcuccacaaaugugagcuauaauccua

SEQ ID NO: 119127 - RNA, 22 nt, Human
cgagagcuggcaccgcgagcug

SEQ ID NO: 119128 - RNA, 32 nt, Human
cgagagcuggcugaggaggggcagcagcccca

SEQ ID NO: 119129 - RNA, 32 nt, Human
cgagaggaacccaggagggcagcagaccccag

SEQ ID NO: 119130 - RNA, 32 nt, Human
cgagaggagaggagguaacgaggagggcggac

SEQ ID NO: 119131 - RNA, 32 nt, Human
cgagaggaggcagagggggcgucaggccgcgg

SEQ ID NO: 119132 - RNA, 32 nt, Human
cgagaggaggcugccucgaggaugaagugcaa

SEQ ID NO: 119133 - RNA, 32 nt, Human
cgagaggcagaaaagucucacagcagaggaaa

SEQ ID NO: 119134 - RNA, 32 nt, Human
cgagaggccgcggcucucccaccugucacccu

SEQ ID NO: 119135 - RNA, 20 nt, Human
cgagaggcgcugacaggagc

SEQ ID NO: 119136 - RNA, 32 nt, Human
cgagaggcucucuuccuguucugcaccccucu

SEQ ID NO: 119137 - RNA, 32 nt, Human
cgagagggaagugggcgggagccgcgaucuga

SEQ ID NO: 119138 - RNA, 32 nt, Human
cgagagggaguccucgcggacgucagccaaga

SEQ ID NO: 119139 - RNA, 22 nt, Human
cgagagggcuggagugcagugg

SEQ ID NO: 119140 - RNA, 18 nt, Human
cgagagggcuggcuggga

SEQ ID NO: 119141 - RNA, 32 nt, Human
cgagaggguggaggccgagaagggugggcggc

SEQ ID NO: 119142 - RNA, 32 nt, Human
cgagaggucuuugaaaccucucagggaaaggu

SEQ ID NO: 119143 - RNA, 32 nt, Human
cgagaggugagcccucccuccuggagagguga

SEQ ID NO: 119144 - RNA, 32 nt, Human
cgagagguguauauacagggaggccaggcagc

SEQ ID NO: 119145 - RNA, 32 nt, Human
cgagaguaaucaucuuuccaauccagaggaac

SEQ ID NO: 119146 - RNA, 22 nt, Human
cgagaguagcugggacuacagg

SEQ ID NO: 119147 - RNA, 32 nt, Human
cgagagucagaaccugggggagagggaugguc

SEQ ID NO: 119148 - RNA, 32 nt, Human
cgagagucucuugagcccuucuucccgguugu

SEQ ID NO: 119149 - RNA, 32 nt, Human
cgagagucuggcccuagacucggggugcuucc

SEQ ID NO: 119150 - RNA, 32 nt, Human
cgagagugacugagucacugagcguggcacau

SEQ ID NO: 119151 - RNA, 32 nt, Human
cgagagugcaccauugcacuccagccugggca

SEQ ID NO: 119152 - RNA, 32 nt, Human
cgagagugccgucuauuugccacacacuuccc

SEQ ID NO: 119153 - RNA, 32 nt, Human
cgagagugcgccacuucacuccagccugggca

SEQ ID NO: 119154 - RNA, 32 nt, Human
cgagaguggaagccuccagagcuuggggcuuu

SEQ ID NO: 119155 - RNA, 32 nt, Human
cgagaguggaggcucuucuucugccccgucuc

SEQ ID NO: 119156 - RNA, 32 nt, Human
cgagagugggaggcgaagggggcaggccaggg

SEQ ID NO: 119157 - RNA, 32 nt, Human
cgagauaaugccacugcacuccagccugccug

SEQ ID NO: 119158 - RNA, 32 nt, Human
cgagauacaggcgugcaccccggagaggacag

SEQ ID NO: 119159 - RNA, 32 nt, Human
cgagauagcaccacugcacuucuaguugacag

SEQ ID NO: 119160 - RNA, 32 nt, Human
cgagauagcaccauugcacuccagccugggcg

SEQ ID NO: 119161 - RNA, 32 nt, Human
cgagauagcgccauugcacuccagccugggcg

SEQ ID NO: 119162 - RNA, 32 nt, Human
cgagauagcggcacugcacuccagccugggug

SEQ ID NO: 119163 - RNA, 32 nt, Human
cgagauagcggcauugcacuccagccugggca

SEQ ID NO: 119164 - RNA, 23 nt, Human
cgagauaggucaucagcccaggg

SEQ ID NO: 119165 - RNA, 32 nt, Human
cgagauaguaccacugcacuccagccugggcg

SEQ ID NO: 119166 - RNA, 32 nt, Human
cgagauagugccauugcacuccggccugggca

SEQ ID NO: 119167 - RNA, 32 nt, Human
cgagauaucgccacugcacuccagccugggug

SEQ ID NO: 119168 - RNA, 32 nt, Human
cgagauauuuacggagcauccccagcugcugg

SEQ ID NO: 119169 - RNA, 32 nt, Human
cgagaucaagccauugcacuccagccugggca

SEQ ID NO: 119170 - RNA, 32 nt, Human
cgagaucacaccaccacuccagccugggcgag

SEQ ID NO: 119171 - RNA, 32 nt, Human
cgagaucacaccaccgcacuccacccugggaa

SEQ ID NO: 119172 - RNA, 32 nt, Human
cgagaucacaccaccguacuccggucugagcg

SEQ ID NO: 119173 - RNA, 32 nt, Human
cgagaucacaccacuacacuccagccuaggca

SEQ ID NO: 119174 - RNA, 32 nt, Human
cgagaucacaccacugcacucagccuggguga

SEQ ID NO: 119175 - RNA, 32 nt, Human
cgagaucacaccacugcacuccaaccugggaa

SEQ ID NO: 119176 - RNA, 32 nt, Human
cgagaucacaccacugcacuccagcccaggug

SEQ ID NO: 119177 - RNA, 32 nt, Human
cgagaucacaccacugcacuccagccugggca

SEQ ID NO: 119178 - RNA, 32 nt, Human
cgagaucacaccacugcacuccagccugggcg

SEQ ID NO: 119179 - RNA, 32 nt, Human
cgagaucacaccacugcacuccagccuggggg

SEQ ID NO: 119180 - RNA, 32 nt, Human
cgagaucacaccacugcacuccagccugggua

SEQ ID NO: 119181 - RNA, 32 nt, Human
cgagaucacaccacugcacuccagccugggug

SEQ ID NO: 119182 - RNA, 32 nt, Human
cgagaucacaccacugcacuccagucugggca

SEQ ID NO: 119183 - RNA, 32 nt, Human
cgagaucacaccacugcacuccauccagccug

SEQ ID NO: 119184 - RNA, 32 nt, Human
cgagaucacaccacugcauuccagccugggca

SEQ ID NO: 119185 - RNA, 32 nt, Human
cgagaucacaccacugcauuccagccugggug

SEQ ID NO: 119186 - RNA, 32 nt, Human
cgagaucacaccacugcauucccgccugggca

SEQ ID NO: 119187 - RNA, 32 nt, Human
cgagaucacaccacugcgcucuagccuggaca

SEQ ID NO: 119188 - RNA, 32 nt, Human
cgagaucacaccacuguacuccagcccggcac

SEQ ID NO: 119189 - RNA, 32 nt, Human
cgagaucacaccacugugcucuagccuggaca

SEQ ID NO: 119190 - RNA, 32 nt, Human
cgagaucacaccauugcacuccaaccugggca

SEQ ID NO: 119191 - RNA, 32 nt, Human
cgagaucacaccauugcacuccagccugggca

SEQ ID NO: 119192 - RNA, 32 nt, Human
cgagaucacaccauugcacuccagccugggcg

SEQ ID NO: 119193 - RNA, 32 nt, Human
cgagaucacaccauugcacugcagccugggug

SEQ ID NO: 119194 - RNA, 32 nt, Human
cgagaucacacuacugcacuccagccugggcg

SEQ ID NO: 119195 - RNA, 32 nt, Human
cgagaucaccuccagccuggacacucugucuc

SEQ ID NO: 119196 - RNA, 32 nt, Human
cgagaucacgccacugcacuauagccuaggug

SEQ ID NO: 119197 - RNA, 32 nt, Human
cgagaucacgccacugcacucaagccugggcg

SEQ ID NO: 119198 - RNA, 32 nt, Human
cgagaucacgccacugcacuccaacuugggca

SEQ ID NO: 119199 - RNA, 32 nt, Human
cgagaucacgccacugcacuccagcccgggga

SEQ ID NO: 119200 - RNA, 32 nt, Human
cgagaucacgccacugcacuccagccuggcga

SEQ ID NO: 119201 - RNA, 32 nt, Human
cgagaucacgccacugcacuccagccugggag

SEQ ID NO: 119202 - RNA, 32 nt, Human
cgagaucacgccacugcacuccagccugggca

SEQ ID NO: 119203 - RNA, 32 nt, Human
cgagaucacgccacugcacuccagccugggcg

SEQ ID NO: 119204 - RNA, 32 nt, Human
cgagaucacgccacugcacuccagccugggua

SEQ ID NO: 119205 - RNA, 32 nt, Human
cgagaucacgccacugcacuccagccugggug

SEQ ID NO: 119206 - RNA, 32 nt, Human
cgagaucacgccacugcacuccagccugguca

SEQ ID NO: 119207 - RNA, 32 nt, Human
cgagaucacgccacugcacuccagccugguga

SEQ ID NO: 119208 - RNA, 32 nt, Human
cgagaucacgccacugcacuccagccuguuga

SEQ ID NO: 119209 - RNA, 32 nt, Human
cgagaucacgccacugcacuccauccagccug

SEQ ID NO: 119210 - RNA, 32 nt, Human
cgagaucacgccacugcacuugagccugggcg

SEQ ID NO: 119211 - RNA, 32 nt, Human
cgagaucacgccaucacacugcagccuaggug

SEQ ID NO: 119212 - RNA, 32 nt, Human
cgagaucacgccauugcacuccagccugggca

SEQ ID NO: 119213 - RNA, 32 nt, Human
cgagaucacgccauugcacuccagccugggug

SEQ ID NO: 119214 - RNA, 32 nt, Human
cgagaucacgccauugcacuccagccugugcg

SEQ ID NO: 119215 - RNA, 32 nt, Human
cgagaucacgccgcugcacuccagccugagca

SEQ ID NO: 119216 - RNA, 32 nt, Human
cgagaucacgccucugcacuccagccugggca

SEQ ID NO: 119217 - RNA, 32 nt, Human
cgagaucacgucacugcacuccagcuugggca

SEQ ID NO: 119218 - RNA, 32 nt, Human
cgagaucacgucacugcacuccggccugggug

SEQ ID NO: 119219 - RNA, 32 nt, Human
cgagaucacucaggagccagacaggaaacuua

SEQ ID NO: 119220 - RNA, 32 nt, Human
cgagaucacuccacugcacuccagccugggca

SEQ ID NO: 119221 - RNA, 19 nt, Human
cgagaucagcggcggcggu

SEQ ID NO: 119222 - RNA, 32 nt, Human
cgagaucaggaguucaagaccagccuggccaa

SEQ ID NO: 119223 - RNA, 32 nt, Human
cgagaucaggccauugcacuccagccugggca

SEQ ID NO: 119224 - RNA, 32 nt, Human
cgagaucaggccauugcacuucagccugggug

SEQ ID NO: 119225 - RNA, 32 nt, Human
cgagaucauaccacugcacuccagccuggcga

SEQ ID NO: 119226 - RNA, 32 nt, Human
cgagaucauaccauugcacuccagccuaggca

SEQ ID NO: 119227 - RNA, 32 nt, Human
cgagaucauaccauugcacuccagccugggca

SEQ ID NO: 119228 - RNA, 32 nt, Human
cgagaucaugacacugcacuccagccugggca

SEQ ID NO: 119229 - RNA, 32 nt, Human
cgagaucaugccacaccguacuccagccuggg

SEQ ID NO: 119230 - RNA, 32 nt, Human
cgagaucaugccaccgcacuucagccugggug

SEQ ID NO: 119231 - RNA, 32 nt, Human
cgagaucaugccacugcacuccaaccugggcg

SEQ ID NO: 119232 - RNA, 32 nt, Human
cgagaucaugccacugcacuccaaccugggug

SEQ ID NO: 119233 - RNA, 32 nt, Human
cgagaucaugccacugcacuccagccuggaca

SEQ ID NO: 119234 - RNA, 32 nt, Human
cgagaucaugccacugcacuccagccuggaug

SEQ ID NO: 119235 - RNA, 32 nt, Human
cgagaucaugccacugcacuccagccugggca

SEQ ID NO: 119236 - RNA, 32 nt, Human
cgagaucaugccacugcacuccagccugggcg

SEQ ID NO: 119237 - RNA, 32 nt, Human
cgagaucaugccacugcacuccagccugggug

SEQ ID NO: 119238 - RNA, 32 nt, Human
cgagaucaugccacugcacuccauccugggca

SEQ ID NO: 119239 - RNA, 32 nt, Human
cgagaucaugccacugcacugcacuccagccu

SEQ ID NO: 119240 - RNA, 32 nt, Human
cgagaucaugccacugcacugggcaacagagc

SEQ ID NO: 119241 - RNA, 32 nt, Human
cgagaucaugccauggcacuccauccugggug

SEQ ID NO: 119242 - RNA, 32 nt, Human
cgagaucaugccauggcacuccguccugggug

SEQ ID NO: 119243 - RNA, 32 nt, Human
cgagaucaugccauuacuccagccugggugac

SEQ ID NO: 119244 - RNA, 32 nt, Human
cgagaucaugccauugcacuccagccuaggca

SEQ ID NO: 119245 - RNA, 32 nt, Human
cgagaucaugccauugcacuccagccugagug

SEQ ID NO: 119246 - RNA, 32 nt, Human
cgagaucaugccauugcacuccagccugggca

SEQ ID NO: 119247 - RNA, 32 nt, Human
cgagaucaugccauugcacuccagccugggcg

SEQ ID NO: 119248 - RNA, 32 nt, Human
cgagaucaugccauugcacuccagccugggug

SEQ ID NO: 119249 - RNA, 32 nt, Human
cgagaucaugccauugcacucuagccugggug

SEQ ID NO: 119250 - RNA, 32 nt, Human
cgagaucaugccauugcacugcaccugggcaa

SEQ ID NO: 119251 - RNA, 32 nt, Human
cgagaucaugccauugcauuccagccuaggca

SEQ ID NO: 119252 - RNA, 32 nt, Human
cgagaucaugccauugcauuccagccuuggcg

SEQ ID NO: 119253 - RNA, 32 nt, Human
cgagaucaugccauuguacuucaccugggcaa

SEQ ID NO: 119254 - RNA, 32 nt, Human
cgagaucaugcuacugcacuccagccugggcg

SEQ ID NO: 119255 - RNA, 32 nt, Human
cgagaucaugcuacugcacucuagccugagcg

SEQ ID NO: 119256 - RNA, 32 nt, Human
cgagaucaugggacugcacuccagccugggug

SEQ ID NO: 119257 - RNA, 32 nt, Human
cgagaucaugucacugcacuccagccugggug

SEQ ID NO: 119258 - RNA, 32 nt, Human
cgagaucaugucacugcacucuagcuugggag

SEQ ID NO: 119259 - RNA, 32 nt, Human
cgagaucauugcacuccagccugggcaauaag

SEQ ID NO: 119260 - RNA, 32 nt, Human
cgagaucauugcauugcacuccagcuugagca

SEQ ID NO: 119261 - RNA, 32 nt, Human
cgagauccagaagcagggaaagaaaacggcgg

SEQ ID NO: 119262 - RNA, 32 nt, Human
cgagaucccgccacucacuccagccuggauaa

SEQ ID NO: 119263 - RNA, 32 nt, Human
cgagaucccgccacugcacuccagccugggcg

SEQ ID NO: 119264 - RNA, 32 nt, Human
cgagauccgccacugcacuccagccuggguga

SEQ ID NO: 119265 - RNA, 32 nt, Human
cgagauccugccacugcacuccagccugugcc

SEQ ID NO: 119266 - RNA, 32 nt, Human
cgagaucgagaucacaccacugcacucagccu

SEQ ID NO: 119267 - RNA, 32 nt, Human
cgagaucgagccacugcacuccagccugggug

SEQ ID NO: 119268 - RNA, 32 nt, Human
cgagaucgagccacugcacuccugggcaacag

SEQ ID NO: 119269 - RNA, 32 nt, Human
cgagaucgagccauugcacucaaaccuggggg

SEQ ID NO: 119270 - RNA, 32 nt, Human
cgagaucgagccauugcacuccagccuggaca

SEQ ID NO: 119271 - RNA, 32 nt, Human
cgagaucgcaccacagcacuccagcccaggcg

SEQ ID NO: 119272 - RNA, 32 nt, Human
cgagaucgcaccacggcacuccagccuggcga

SEQ ID NO: 119273 - RNA, 32 nt, Human
cgagaucgcaccacugcacuccaaucugggca

SEQ ID NO: 119274 - RNA, 32 nt, Human
cgagaucgcaccacugcacuccagcaugagug

SEQ ID NO: 119275 - RNA, 32 nt, Human
cgagaucgcaccacugcacuccagccuggaca

SEQ ID NO: 119276 - RNA, 32 nt, Human
cgagaucgcaccacugcacuccagccugggca

SEQ ID NO: 119277 - RNA, 32 nt, Human
cgagaucgcaccacugcacuccagccugggcg

SEQ ID NO: 119278 - RNA, 32 nt, Human
cgagaucgcaccacugcacuccagccugggug

SEQ ID NO: 119279 - RNA, 32 nt, Human
cgagaucgcaccacugcacuccagccugguga

SEQ ID NO: 119280 - RNA, 32 nt, Human
cgagaucgcaccacugcacucccgcuuggcaa

SEQ ID NO: 119281 - RNA, 32 nt, Human
cgagaucgcaccacugcacucuagccugggug

SEQ ID NO: 119282 - RNA, 32 nt, Human
cgagaucgcaccacugcacugcagccuggcaa

SEQ ID NO: 119283 - RNA, 32 nt, Human
cgagaucgcaccacugcacuucagccugggug

SEQ ID NO: 119284 - RNA, 32 nt, Human
cgagaucgcaccacugcauuccagccugggca

SEQ ID NO: 119285 - RNA, 32 nt, Human
cgagaucgcaccacugcauuccagccugggug

SEQ ID NO: 119286 - RNA, 32 nt, Human
cgagaucgcaccacuguacuccagccugggcg

SEQ ID NO: 119287 - RNA, 32 nt, Human
cgagaucgcaccagugcacuccagccuuggug

SEQ ID NO: 119288 - RNA, 32 nt, Human
cgagaucgcaccauugcacuccagcccgggca

SEQ ID NO: 119289 - RNA, 32 nt, Human
cgagaucgcaccauugcacuccagccugggca

SEQ ID NO: 119290 - RNA, 32 nt, Human
cgagaucgcaccauugcacuccugccugggca

SEQ ID NO: 119291 - RNA, 32 nt, Human
cgagaucgcaccauugcauuccagccugggca

SEQ ID NO: 119292 - RNA, 32 nt, Human
cgagaucgcaccccugcacuccagccugggca

SEQ ID NO: 119293 - RNA, 32 nt, Human
cgagaucgcacugcuguacccagccugggcca

SEQ ID NO: 119294 - RNA, 32 nt, Human
cgagaucgcauuacugcacuccagccugggua

SEQ ID NO: 119295 - RNA, 32 nt, Human
cgagaucgccccacugcacuccagccugguga

SEQ ID NO: 119296 - RNA, 32 nt, Human
cgagaucgcccugcugcacuccagccugggug

SEQ ID NO: 119297 - RNA, 32 nt, Human
cgagaucgcgcagcugcacuccagccugggca

SEQ ID NO: 119298 - RNA, 32 nt, Human
cgagaucgcgccaaugcacuccagccugggcg

SEQ ID NO: 119299 - RNA, 32 nt, Human
cgagaucgcgccaccacacuccagccugagcg

SEQ ID NO: 119300 - RNA, 32 nt, Human
cgagaucgcgccacccacuccagcccggguga

SEQ ID NO: 119301 - RNA, 32 nt, Human
cgagaucgcgccacggcacuccagccugggag

SEQ ID NO: 119302 - RNA, 32 nt, Human
cgagaucgcgccacuacuccagccugggugac

SEQ ID NO: 119303 - RNA, 32 nt, Human
cgagaucgcgccacugcacuccaaccugggug

SEQ ID NO: 119304 - RNA, 32 nt, Human
cgagaucgcgccacugcacuccagccuagacg

SEQ ID NO: 119305 - RNA, 32 nt, Human
cgagaucgcgccacugcacuccagccuagggg

SEQ ID NO: 119306 - RNA, 32 nt, Human
cgagaucgcgccacugcacuccagccuaggug

SEQ ID NO: 119307 - RNA, 32 nt, Human
cgagaucgcgccacugcacuccagccucggug

SEQ ID NO: 119308 - RNA, 32 nt, Human
cgagaucgcgccacugcacuccagccuggacg

SEQ ID NO: 119309 - RNA, 32 nt, Human
cgagaucgcgccacugcacuccagccuggcaa

SEQ ID NO: 119310 - RNA, 32 nt, Human
cgagaucgcgccacugcacuccagccuggcga

SEQ ID NO: 119311 - RNA, 32 nt, Human
cgagaucgcgccacugcacuccagccugggca

SEQ ID NO: 119312 - RNA, 32 nt, Human
cgagaucgcgccacugcacuccagccugggcg

SEQ ID NO: 119313 - RNA, 32 nt, Human
cgagaucgcgccacugcacuccagccugggug

SEQ ID NO: 119314 - RNA, 32 nt, Human
cgagaucgcgccacugcacuccagcuugggca

SEQ ID NO: 119315 - RNA, 32 nt, Human
cgagaucgcgccacugcacuccaggccugggu

SEQ ID NO: 119316 - RNA, 32 nt, Human
cgagaucgcgccacugcacuccaggcugggcg

SEQ ID NO: 119317 - RNA, 32 nt, Human
cgagaucgcgccacugcacuccaguuugggca

SEQ ID NO: 119318 - RNA, 32 nt, Human
cgagaucgcgccacugcacuccugccugggac

SEQ ID NO: 119319 - RNA, 32 nt, Human
cgagaucgcgccacugcacucuagccugagug

SEQ ID NO: 119320 - RNA, 32 nt, Human
cgagaucgcgccacugcacucuagccugggcc

SEQ ID NO: 119321 - RNA, 32 nt, Human
cgagaucgcgccacugcacucuagccugggug

SEQ ID NO: 119322 - RNA, 32 nt, Human
cgagaucgcgccagugcacuccagccugggca

SEQ ID NO: 119323 - RNA, 32 nt, Human
cgagaucgcgccauagcacuccagccuuagcc

SEQ ID NO: 119324 - RNA, 32 nt, Human
cgagaucgcgccaucgcacuccagccugggug

SEQ ID NO: 119325 - RNA, 32 nt, Human
cgagaucgcgccauugcacuccaaccuaggug

SEQ ID NO: 119326 - RNA, 32 nt, Human
cgagaucgcgccauugcacuccagccugggca

SEQ ID NO: 119327 - RNA, 32 nt, Human
cgagaucgcgccauugcacuccagccugggcg

SEQ ID NO: 119328 - RNA, 32 nt, Human
cgagaucgcgccauugcacuccauccuggaca

SEQ ID NO: 119329 - RNA, 32 nt, Human
cgagaucgcgccauugcacuccggccugggga

SEQ ID NO: 119330 - RNA, 32 nt, Human
cgagaucgcgccauugcacucuagccugggca

SEQ ID NO: 119331 - RNA, 32 nt, Human
cgagaucgcgccgcugcacuccagccugggcc

SEQ ID NO: 119332 - RNA, 32 nt, Human
cgagaucgcgccgcugcacuccagccugggcg

SEQ ID NO: 119333 - RNA, 32 nt, Human
cgagaucgcgccguugcacuccagccugggca

SEQ ID NO: 119334 - RNA, 32 nt, Human
cgagaucgcgccuuugcacuccagccuggaag

SEQ ID NO: 119335 - RNA, 32 nt, Human
cgagaucgcgcuacugcacuccagccugggug

SEQ ID NO: 119336 - RNA, 32 nt, Human
cgagaucgcgucacugcacuccagccuggaca

SEQ ID NO: 119337 - RNA, 32 nt, Human
cgagaucgcgucacugcacuccagucuagcaa

SEQ ID NO: 119338 - RNA, 32 nt, Human
cgagaucgcuccacugcacuccagccugggug

SEQ ID NO: 119339 - RNA, 32 nt, Human
cgagaucguaccauugcacuccagccugggca

SEQ ID NO: 119340 - RNA, 32 nt, Human
cgagaucgucccacugcacuccagccugggca

SEQ ID NO: 119341 - RNA, 32 nt, Human
cgagaucgugccacugcacuccagccugaaga

SEQ ID NO: 119342 - RNA, 32 nt, Human
cgagaucgugccacugcacuccagccugagca

SEQ ID NO: 119343 - RNA, 32 nt, Human
cgagaucgugccacugcacuccagccuggauu

SEQ ID NO: 119344 - RNA, 32 nt, Human
cgagaucgugccacugcacuccagccugggca

SEQ ID NO: 119345 - RNA, 32 nt, Human
cgagaucgugccacugcacuccagccugggcc

SEQ ID NO: 119346 - RNA, 32 nt, Human
cgagaucgugccacugcacuccagccugggcg

SEQ ID NO: 119347 - RNA, 32 nt, Human
cgagaucgugccacugcacuccagccugggug

SEQ ID NO: 119348 - RNA, 32 nt, Human
cgagaucgugccacugcacuccagccugguca

SEQ ID NO: 119349 - RNA, 32 nt, Human
cgagaucgugccacugcacuccaggcugggcg

SEQ ID NO: 119350 - RNA, 32 nt, Human
cgagaucgugccacugcacuccagucugggca

SEQ ID NO: 119351 - RNA, 32 nt, Human
cgagaucgugccacugcacucuagccugggcg

SEQ ID NO: 119352 - RNA, 32 nt, Human
cgagaucgugccacugcgcuccagccugggug

SEQ ID NO: 119353 - RNA, 32 nt, Human
cgagaucgugccauugcacuacagccugggca

SEQ ID NO: 119354 - RNA, 32 nt, Human
cgagaucgugccauugcacuccagccuaggca

SEQ ID NO: 119355 - RNA, 32 nt, Human
cgagaucgugccauugcacuccagccuggaug

SEQ ID NO: 119356 - RNA, 32 nt, Human
cgagaucgugccauugcacuccagccugggug

SEQ ID NO: 119357 - RNA, 32 nt, Human
cgagaucgugccauugcacucuagccugggca

SEQ ID NO: 119358 - RNA, 32 nt, Human
cgagaucgugccauugcauuccagccugggag

SEQ ID NO: 119359 - RNA, 32 nt, Human
cgagaucgugcuacugcacuccagucugggug

SEQ ID NO: 119360 - RNA, 32 nt, Human
cgagaucgugggcaggcaaggcugcaagauua

SEQ ID NO: 119361 - RNA, 32 nt, Human
cgagaucgugucacugcacuccagccuggcga

SEQ ID NO: 119362 - RNA, 32 nt, Human
cgagaucgugucacugcacuccagccugggcg

SEQ ID NO: 119363 - RNA, 32 nt, Human
cgagaucgugucacugcacuccagccugggug

SEQ ID NO: 119364 - RNA, 32 nt, Human
cgagaucuagccugcccugccugccugcccug

SEQ ID NO: 119365 - RNA, 32 nt, Human
cgagaucuauuguuggaagucuuugguauaug

SEQ ID NO: 119366 - RNA, 32 nt, Human
cgagaucugccacugcacuccagccuggcgac

SEQ ID NO: 119367 - RNA, 32 nt, Human
cgagaugagaugggggaccacucuuccucugu

SEQ ID NO: 119368 - RNA, 18 nt, Human
cgagaugccgagcggugg

SEQ ID NO: 119369 - RNA, 32 nt, Human
cgagaugcgguuucacucuguugcccaggcua

SEQ ID NO: 119370 - RNA, 32 nt, Human
cgagaugcgucucugcugaucugagucugccu

SEQ ID NO: 119371 - RNA, 20 nt, Human
cgagaugcuucccgcagccg

SEQ ID NO: 119372 - RNA, 32 nt, Human
cgagaugcuucucugcugaucugagucugccu

SEQ ID NO: 119373 - RNA, 32 nt, Human
cgagauggaaggaucacuugugcccaggaauu

SEQ ID NO: 119374 - RNA, 32 nt, Human
cgagauggacccugggcucggcguccuccgga

SEQ ID NO: 119375 - RNA, 32 nt, Human
cgagauggagaaaggaagagcugggaggguga

SEQ ID NO: 119376 - RNA, 32 nt, Human
cgagauggagccacugcacuccagccugggcg

SEQ ID NO: 119377 - RNA, 32 nt, Human
cgagauggagccacugcacuccagccuggggg

SEQ ID NO: 119378 - RNA, 32 nt, Human
cgagauggagucuugcucugucgcccaggcug

SEQ ID NO: 119379 - RNA, 29 nt, Human
cgagauggcaccacugcacuccagccugg

SEQ ID NO: 119380 - RNA, 32 nt, Human
cgagauggcaccacugcacuccagccuggacg

SEQ ID NO: 119381 - RNA, 32 nt, Human
cgagauggcaccacugcacuccagccugggca

SEQ ID NO: 119382 - RNA, 32 nt, Human
cgagauggcaccacugcauuccagccugggug

SEQ ID NO: 119383 - RNA, 32 nt, Human
cgagauggcaccauugcacuccagccugggug

SEQ ID NO: 119384 - RNA, 32 nt, Human
cgagauggcgccacugcacuccagcccgggcg

SEQ ID NO: 119385 - RNA, 32 nt, Human
cgagauggcgccacugcacuccagccugggcg

SEQ ID NO: 119386 - RNA, 32 nt, Human
cgagauggcgccacugcacuccagccugggug

SEQ ID NO: 119387 - RNA, 32 nt, Human
cgagauggcgccacugcgcuccagccugggca

SEQ ID NO: 119388 - RNA, 32 nt, Human
cgagauggcgccauugcacuccagccugggca

SEQ ID NO: 119389 - RNA, 32 nt, Human
cgagauggcgcgacugcacuccagccugggcg

SEQ ID NO: 119390 - RNA, 32 nt, Human
cgagauggcgcuauugcacuccagucugggua

SEQ ID NO: 119391 - RNA, 32 nt, Human
cgagaugggaggaggagaaaaagcgguacgau

SEQ ID NO: 119392 - RNA, 32 nt, Human
cgagaugggaggaucgcuugagcccaggaguu

SEQ ID NO: 119393 - RNA, 32 nt, Human
cgagaugggaguuucacucuuauugcccaggc

SEQ ID NO: 119394 - RNA, 32 nt, Human
cgagaugggcagagcacuugaggccaguaguu

SEQ ID NO: 119395 - RNA, 32 nt, Human
cgagauggggugucccuguguugcccagacug

SEQ ID NO: 119396 - RNA, 32 nt, Human
cgagaugguaccucugcacugcagccugggca

SEQ ID NO: 119397 - RNA, 32 nt, Human
cgagauggugccacugcacuccagccuaggug

SEQ ID NO: 119398 - RNA, 32 nt, Human
cgagauggugccacugcacuccagccugggug

SEQ ID NO: 119399 - RNA, 32 nt, Human
cgagauggugccacugcauuccagccugggca

SEQ ID NO: 119400 - RNA, 32 nt, Human
cgagauggugccaucgcacucuagccugggga

SEQ ID NO: 119401 - RNA, 32 nt, Human
cgagaugucaccacugcccuccagccugggug

SEQ ID NO: 119402 - RNA, 32 nt, Human
cgagauuacaccauugcauuccagccuaggca

SEQ ID NO: 119403 - RNA, 32 nt, Human
cgagauuaggccauugcacuccagccucagca

SEQ ID NO: 119404 - RNA, 32 nt, Human
cgagauuagugcagcuacauucugaguugaag

SEQ ID NO: 119405 - RNA, 32 nt, Human
cgagauuaugccacugcacuccagccugguga

SEQ ID NO: 119406 - RNA, 32 nt, Human
cgagauuaugucacuccagccugggcaacaga

SEQ ID NO: 119407 - RNA, 32 nt, Human
cgagauugcacaauugcacuccagccuggcga

SEQ ID NO: 119408 - RNA, 32 nt, Human
cgagauugcaccacagcacucaagccugggug

SEQ ID NO: 119409 - RNA, 32 nt, Human
cgagauugcaccacagcacuccaaccugggug

SEQ ID NO: 119410 - RNA, 32 nt, Human
cgagauugcaccaccgcacuccagccugggug

SEQ ID NO: 119411 - RNA, 32 nt, Human
cgagauugcaccacuacacuccagccugggca

SEQ ID NO: 119412 - RNA, 32 nt, Human
cgagauugcaccacugcacgccagccugggug

SEQ ID NO: 119413 - RNA, 20 nt, Human
cgagauugcaccacugcacu

SEQ ID NO: 119414 - RNA, 32 nt, Human
cgagauugcaccacugcacuccagccuaggcg

SEQ ID NO: 119415 - RNA, 32 nt, Human
cgagauugcaccacugcacuccagccugagug

SEQ ID NO: 119416 - RNA, 32 nt, Human
cgagauugcaccacugcacuccagccuggcga

SEQ ID NO: 119417 - RNA, 32 nt, Human
cgagauugcaccacugcacuccagccugggca

SEQ ID NO: 119418 - RNA, 32 nt, Human
cgagauugcaccacugcacuccagccugggcg

SEQ ID NO: 119419 - RNA, 32 nt, Human
cgagauugcaccacugcacuccagccugggua

SEQ ID NO: 119420 - RNA, 32 nt, Human
cgagauugcaccacugcacuccagccugggug

SEQ ID NO: 119421 - RNA, 32 nt, Human
cgagauugcaccacugcacuccagccugguga

SEQ ID NO: 119422 - RNA, 32 nt, Human
cgagauugcaccacugcacuccagcgagacuc

SEQ ID NO: 119423 - RNA, 32 nt, Human
cgagauugcaccacugcacucccuuccaggug

SEQ ID NO: 119424 - RNA, 32 nt, Human
cgagauugcaccacugcacuucagccugguga

SEQ ID NO: 119425 - RNA, 32 nt, Human
cgagauugcaccacugcaguucagccuggaug

SEQ ID NO: 119426 - RNA, 32 nt, Human
cgagauugcaccacugcauuccagccuggcga

SEQ ID NO: 119427 - RNA, 32 nt, Human
cgagauugcaccacuuacuccagccugggcaa

SEQ ID NO: 119428 - RNA, 32 nt, Human
cgagauugcaccacuucacuccagccugggug

SEQ ID NO: 119429 - RNA, 32 nt, Human
cgagauugcaccauugcacuccagccugggca

SEQ ID NO: 119430 - RNA, 32 nt, Human
cgagauugcaccauugcacuccagcuugggug

SEQ ID NO: 119431 - RNA, 32 nt, Human
cgagauugcaccauugcgcucuagccugggca

SEQ ID NO: 119432 - RNA, 32 nt, Human
cgagauugcaccauuguacuccagccugggca

SEQ ID NO: 119433 - RNA, 32 nt, Human
cgagauugcaccccugcacuccaggcugggca

SEQ ID NO: 119434 - RNA, 32 nt, Human
cgagauugcaccgcugcacuccagccuggcga

SEQ ID NO: 119435 - RNA, 32 nt, Human
cgagauugcacuacugcacuccagacugguga

SEQ ID NO: 119436 - RNA, 32 nt, Human
cgagauugcaucacugcacuccagccugggcg

SEQ ID NO: 119437 - RNA, 32 nt, Human
cgagauugcauggcugcacucuagccugggug

SEQ ID NO: 119438 - RNA, 32 nt, Human
cgagauugccacugcacuccagccugggcaac

SEQ ID NO: 119439 - RNA, 32 nt, Human
cgagauugccccacugcacuccagccuaggca

SEQ ID NO: 119440 - RNA, 32 nt, Human
cgagauugcgccacuacacucuagccugggca

SEQ ID NO: 119441 - RNA, 32 nt, Human
cgagauugcgccacugcacaccagucuggaga

SEQ ID NO: 119442 - RNA, 32 nt, Human
cgagauugcgccacugcacacuagcuugggug

SEQ ID NO: 119443 - RNA, 32 nt, Human
cgagauugcgccacugcaccccagccuggaca

SEQ ID NO: 119444 - RNA, 32 nt, Human
cgagauugcgccacugcaccccagccugggcg

SEQ ID NO: 119445 - RNA, 32 nt, Human
cgagauugcgccacugcacuccaaccugggca

SEQ ID NO: 119446 - RNA, 32 nt, Human
cgagauugcgccacugcacuccagccuaggug

SEQ ID NO: 119447 - RNA, 32 nt, Human
cgagauugcgccacugcacuccagccugggag

SEQ ID NO: 119448 - RNA, 32 nt, Human
cgagauugcgccacugcacuccagccugggca

SEQ ID NO: 119449 - RNA, 32 nt, Human
cgagauugcgccacugcacuccagccugggcg

SEQ ID NO: 119450 - RNA, 32 nt, Human
cgagauugcgccacugcacuccagccuggggg

SEQ ID NO: 119451 - RNA, 32 nt, Human
cgagauugcgccacugcacuccagccugggua

SEQ ID NO: 119452 - RNA, 32 nt, Human
cgagauugcgccacugcacuccagccugggug

SEQ ID NO: 119453 - RNA, 32 nt, Human
cgagauugcgccacugcacuccagccugguug

SEQ ID NO: 119454 - RNA, 32 nt, Human
cgagauugcgccacugcacuccagcgugggcu

SEQ ID NO: 119455 - RNA, 32 nt, Human
cgagauugcgccacugcacuccagucugggcg

SEQ ID NO: 119456 - RNA, 32 nt, Human
cgagauugcgccacugcacucuagccuaagca

SEQ ID NO: 119457 - RNA, 32 nt, Human
cgagauugcgccacugcacuucagccuggaug

SEQ ID NO: 119458 - RNA, 32 nt, Human
cgagauugcgccacugcacuucagccugggca

SEQ ID NO: 119459 - RNA, 32 nt, Human
cgagauugcgccacugcaguccgcagcccagc

SEQ ID NO: 119460 - RNA, 32 nt, Human
cgagauugcgccacugcaguccgcaguccagc

SEQ ID NO: 119461 - RNA, 32 nt, Human
cgagauugcgccacugcaguccgcaguccggc

SEQ ID NO: 119462 - RNA, 32 nt, Human
cgagauugcgccacugcaguccgcagucuggc

SEQ ID NO: 119463 - RNA, 32 nt, Human
cgagauugcgccacugcauuccagccugggug

SEQ ID NO: 119464 - RNA, 32 nt, Human
cgagauugcgccacugcauucuagccuggaug

SEQ ID NO: 119465 - RNA, 32 nt, Human
cgagauugcgccacugcccucuagccuagacg

SEQ ID NO: 119466 - RNA, 32 nt, Human
cgagauugcgccacugcgcuccagccugggca

SEQ ID NO: 119467 - RNA, 32 nt, Human
cgagauugcgccacuucacuccagccugggug

SEQ ID NO: 119468 - RNA, 32 nt, Human
cgagauugcgccauugcacuccagccuaggua

SEQ ID NO: 119469 - RNA, 32 nt, Human
cgagauugcgccauugcacuccagccugggca

SEQ ID NO: 119470 - RNA, 32 nt, Human
cgagauugcgccauugcacucuagccugugug

SEQ ID NO: 119471 - RNA, 32 nt, Human
cgagauugcgccauugcacuuaagccuagaga

SEQ ID NO: 119472 - RNA, 32 nt, Human
cgagauugcgccccugcacuccaaccuggaca

SEQ ID NO: 119473 - RNA, 32 nt, Human
cgagauugcgcuacugcacuccagccugggcg

SEQ ID NO: 119474 - RNA, 32 nt, Human
cgagauugcgucacugcacuccagccugagca

SEQ ID NO: 119475 - RNA, 32 nt, Human
cgagauugcgucacugcacuccagccugggcg

SEQ ID NO: 119476 - RNA, 32 nt, Human
cgagauugcuccauugcacuccagccugggca

SEQ ID NO: 119477 - RNA, 32 nt, Human
cgagauugcuccauugcacuccagccugggcg

SEQ ID NO: 119478 - RNA, 32 nt, Human
cgagauuggccauugcacuccagccuggguga

SEQ ID NO: 119479 - RNA, 32 nt, Human
cgagauuguaaaccauggcuguguggauacaa

SEQ ID NO: 119480 - RNA, 32 nt, Human
cgagauugugcacuccagccuggguaacagag

SEQ ID NO: 119481 - RNA, 32 nt, Human
cgagauugugcauugcacuccagccugagcaa

SEQ ID NO: 119482 - RNA, 32 nt, Human
cgagauugugccacuacacuccagccuggcca

SEQ ID NO: 119483 - RNA, 32 nt, Human
cgagauugugccacuacacuccagccugggug

SEQ ID NO: 119484 - RNA, 32 nt, Human
cgagauugugccacugcaccccagccuuggca

SEQ ID NO: 119485 - RNA, 32 nt, Human
cgagauugugccacugcacuccaaccugggug

SEQ ID NO: 119486 - RNA, 32 nt, Human
cgagauugugccacugcacuccagccuaggca

SEQ ID NO: 119487 - RNA, 32 nt, Human
cgagauugugccacugcacuccagccuaggcg

SEQ ID NO: 119488 - RNA, 32 nt, Human
cgagauugugccacugcacuccagccuggacg

SEQ ID NO: 119489 - RNA, 32 nt, Human
cgagauugugccacugcacuccagccuggcaa

SEQ ID NO: 119490 - RNA, 32 nt, Human
cgagauugugccacugcacuccagccugggca

SEQ ID NO: 119491 - RNA, 32 nt, Human
cgagauugugccacugcacuccagccugggcg

SEQ ID NO: 119492 - RNA, 32 nt, Human
cgagauugugccacugcacuccagccugggug

SEQ ID NO: 119493 - RNA, 32 nt, Human
cgagauugugccacugcacuccagccuuggca

SEQ ID NO: 119494 - RNA, 32 nt, Human
cgagauugugccacugcacuccagcugggugg

SEQ ID NO: 119495 - RNA, 32 nt, Human
cgagauugugccacugcacucccgccugggcg

SEQ ID NO: 119496 - RNA, 32 nt, Human
cgagauugugccacugcacucgagccugggug

SEQ ID NO: 119497 - RNA, 32 nt, Human
cgagauugugccacugcacucuagccuggaca

SEQ ID NO: 119498 - RNA, 32 nt, Human
cgagauugugccacugcacucuagccugggug

SEQ ID NO: 119499 - RNA, 32 nt, Human
cgagauugugccacugcgcuccagccugggcg

SEQ ID NO: 119500 - RNA, 32 nt, Human
cgagauugugccauugcacuccaaccugggca

SEQ ID NO: 119501 - RNA, 32 nt, Human
cgagauugugccauugcacuccagccugggca

SEQ ID NO: 119502 - RNA, 32 nt, Human
cgagauugugccauugcacuccagccugggcg

SEQ ID NO: 119503 - RNA, 32 nt, Human
cgagauugugccauugcacugcagccuggaug

SEQ ID NO: 119504 - RNA, 32 nt, Human
cgagauugugccccugcacuccagccugagcg

SEQ ID NO: 119505 - RNA, 32 nt, Human
cgagauugugcugcugcacuccagccugggug

SEQ ID NO: 119506 - RNA, 32 nt, Human
cgagauuucaccagugcacuccagccugggug

SEQ ID NO: 119507 - RNA, 32 nt, Human
cgagauuucacugucuucaccauucguggaga

SEQ ID NO: 119508 - RNA, 32 nt, Human
cgagauuuucugagcucuccccaaucaccagc

SEQ ID NO: 119509 - RNA, 32 nt, Human
cgagcaaacuggacuuggugaaggacaagauc

SEQ ID NO: 119510 - RNA, 32 nt, Human
cgagcaaagcaaaguauacaacuugcauacug

SEQ ID NO: 119511 - RNA, 32 nt, Human
cgagcaacauaaaauccgccggcccgacagcu

SEQ ID NO: 119512 - RNA, 32 nt, Human
cgagcaacugucagcauuuuucugccugccug

SEQ ID NO: 119513 - RNA, 21 nt, Human
cgagcaagauggcgccgcggg

SEQ ID NO: 119514 - RNA, 32 nt, Human
cgagcaagccuggguguuccuuccuccucaug

SEQ ID NO: 119515 - RNA, 32 nt, Human
cgagcaaggccagcuucugcccuacagaauug

SEQ ID NO: 119516 - RNA, 32 nt, Human
cgagcaaggggcuuggaagugccugaagccag

SEQ ID NO: 119517 - RNA, 32 nt, Human
cgagcacacagccaggccuggcagagcuaaga

SEQ ID NO: 119518 - RNA, 32 nt, Human
cgagcacagcaaccccagguguccagagcacu

SEQ ID NO: 119519 - RNA, 32 nt, Human
cgagcacaggagcuggcuucggcgguggacca

SEQ ID NO: 119520 - RNA, 32 nt, Human
cgagcacaggagggagguugagguggggcuaa

SEQ ID NO: 119521 - RNA, 32 nt, Human
cgagcacaggcaggugccaggagccaggaugc

SEQ ID NO: 119522 - RNA, 32 nt, Human
cgagcaccaggaucaugaagcccaagagcgag

SEQ ID NO: 119523 - RNA, 32 nt, Human
cgagcacccgcugaacaucagccugggagacg

SEQ ID NO: 119524 - RNA, 32 nt, Human
cgagcaccuguaaucucagcacuuugggaggc

SEQ ID NO: 119525 - RNA, 21 nt, Human
cgagcacucauucugcucccu

SEQ ID NO: 119526 - RNA, 20 nt, Human
cgagcacuccccagaacgua

SEQ ID NO: 119527 - RNA, 19 nt, Human
cgagcacuucagaucagua

SEQ ID NO: 119528 - RNA, 32 nt, Human
cgagcagacugcugggacugcggggcggccgg

SEQ ID NO: 119529 - RNA, 32 nt, Human
cgagcagagagggaguagagugaagccagcug

SEQ ID NO: 119530 - RNA, 32 nt, Human
cgagcagaggcgugggcggcugaggggcugag

SEQ ID NO: 119531 - RNA, 32 nt, Human
cgagcagaucaaccagguggcauuggaggcgu

SEQ ID NO: 119532 - RNA, 32 nt, Human
cgagcagaucaggaguugaggaguucaggagu

SEQ ID NO: 119533 - RNA, 32 nt, Human
cgagcagaucugcugggguggcagcagcuccg

SEQ ID NO: 119534 - RNA, 32 nt, Human
cgagcagcauuuguuucuccccacaucuagaa

SEQ ID NO: 119535 - RNA, 32 nt, Human
cgagcagcuccuggcugggcugggcagacuca

SEQ ID NO: 119536 - RNA, 32 nt, Human
cgagcagcucgagaagaagugccaugggcugg

SEQ ID NO: 119537 - RNA, 32 nt, Human
cgagcagcuggcagagagcccagugccggcca

SEQ ID NO: 119538 - RNA, 32 nt, Human
cgagcaggaggaggaggaagccggagcugcca

SEQ ID NO: 119539 - RNA, 32 nt, Human
cgagcaggccacagccuggccucgggaaggug

SEQ ID NO: 119540 - RNA, 32 nt, Human
cgagcagggaaacuguguccuggcagagaucg

SEQ ID NO: 119541 - RNA, 32 nt, Human
cgagcagggagcaggagcaggaaaagaaaguc

SEQ ID NO: 119542 - RNA, 32 nt, Human
cgagcaggggccucggccgccacccacacgcc

SEQ ID NO: 119543 - RNA, 32 nt, Human
cgagcaggugugaaugagcccagggaaggaca

SEQ ID NO: 119544 - RNA, 32 nt, Human
cgagcauccagccuggacaccucugcaggauu

SEQ ID NO: 119545 - RNA, 20 nt, Human
cgagcaucucccacgcaccu

SEQ ID NO: 119546 - RNA, 20 nt, Human
cgagcaugaaggugaccaac

SEQ ID NO: 119547 - RNA, 32 nt, Human
cgagcaugccacuguacuccagccugagcuac

SEQ ID NO: 119548 - RNA, 32 nt, Human
cgagcauggagacggagcgccugggagggcac

SEQ ID NO: 119549 - RNA, 32 nt, Human
cgagcauuucuucuacucuugagagcucaggc

SEQ ID NO: 119550 - RNA, 32 nt, Human
cgagcauuuguuccagucagcucucuugccag

SEQ ID NO: 119551 - RNA, 32 nt, Human
cgagccaagaggaccccaggagcccagagcag

SEQ ID NO: 119552 - RNA, 31 nt, Human
cgagccaagaucacgccauagcaauugcacu

SEQ ID NO: 119553 - RNA, 32 nt, Human
cgagccaagaugucugacauggaggaugauuu

SEQ ID NO: 119554 - RNA, 22 nt, Human
cgagccaccaucaggccugucu

SEQ ID NO: 119555 - RNA, 32 nt, Human
cgagccaccaugccaagccuguuguucaucuc

SEQ ID NO: 119556 - RNA, 19 nt, Human
cgagccaccaugccuggcc

SEQ ID NO: 119557 - RNA, 19 nt, Human
cgagccaccgccgccugcc

SEQ ID NO: 119558 - RNA, 32 nt, Human
cgagccacguuccuccgucucagaccucguca

SEQ ID NO: 119559 - RNA, 32 nt, Human
cgagccacugcacuccagccugggcaacagau

SEQ ID NO: 119560 - RNA, 32 nt, Human
cgagccacugcacuccagccugggcagcugaa

SEQ ID NO: 119561 - RNA, 32 nt, Human
cgagccacugcacuccagccugggcgacagag

SEQ ID NO: 119562 - RNA, 32 nt, Human
cgagccacugcacuccagccugggugacagag

SEQ ID NO: 119563 - RNA, 32 nt, Human
cgagccacugcacuccagccugggugaugaag

SEQ ID NO: 119564 - RNA, 32 nt, Human
cgagccacugcacuccugggcaacagagcaag

SEQ ID NO: 119565 - RNA, 32 nt, Human
cgagccacugcauuccagccugggcgaaagag

SEQ ID NO: 119566 - RNA, 32 nt, Human
cgagccacuguacuccagccuaggugacaaag

SEQ ID NO: 119567 - RNA, 32 nt, Human
cgagccagaggcagaggagcugcgcggacgcc

SEQ ID NO: 119568 - RNA, 32 nt, Human
cgagccagccuccuugcuggccauggcuuugc

SEQ ID NO: 119569 - RNA, 18 nt, Human
cgagccagccugggucaa

SEQ ID NO: 119570 - RNA, 32 nt, Human
cgagccagccugggucaaagaagucaaagggg

SEQ ID NO: 119571 - RNA, 32 nt, Human
cgagccaggcucuggagggcccucucuguugc

SEQ ID NO: 119572 - RNA, 20 nt, Human
cgagccaggggccaucgaug

SEQ ID NO: 119573 - RNA, 20 nt, Human
cgagccaggggcggugcaag

SEQ ID NO: 119574 - RNA, 32 nt, Human
cgagccaguggcugcuugcaguucacugcugu

SEQ ID NO: 119575 - RNA, 32 nt, Human
cgagccauugcacucaaaccugggggauaaga

SEQ ID NO: 119576 - RNA, 32 nt, Human
cgagccauugcacuccagccuggacagcagga

SEQ ID NO: 119577 - RNA, 32 nt, Human
cgagccauugcacuccagccugggcaacaaga

SEQ ID NO: 119578 - RNA, 32 nt, Human
cgagcccaagaguucaagacaauccuggccaa

SEQ ID NO: 119579 - RNA, 32 nt, Human
cgagcccacaacuuugcagccucgggcagggc

SEQ ID NO: 119580 - RNA, 32 nt, Human
cgagcccaccccugcugacccaggacuucccc

SEQ ID NO: 119581 - RNA, 32 nt, Human
cgagcccacgggcgacugcagcucugcaggag

SEQ ID NO: 119582 - RNA, 32 nt, Human
cgagcccacugucacgcugccugguguucccc

SEQ ID NO: 119583 - RNA, 32 nt, Human
cgagcccagaaguucaagaccagccugagcaa

SEQ ID NO: 119584 - RNA, 32 nt, Human
cgagcccaggaaccccagacccagggggagga

SEQ ID NO: 119585 - RNA, 32 nt, Human
cgagcccaggcgucugagaccuacugacuggc

SEQ ID NO: 119586 - RNA, 32 nt, Human
cgagccccaaguuugccugaagcacccugcuc

SEQ ID NO: 119587 - RNA, 32 nt, Human
cgagccccacuccauguaauaggauuccuggg

SEQ ID NO: 119588 - RNA, 32 nt, Human
cgagccccagcaagggcuccuccaggauugca

SEQ ID NO: 119589 - RNA, 21 nt, Human
cgagccccagcgcccggcccg

SEQ ID NO: 119590 - RNA, 32 nt, Human
cgagcccccugcuuccuggccuaggcgagggu

SEQ ID NO: 119591 - RNA, 32 nt, Human
cgagccccgagccaugggcgaaaggcggggcc

SEQ ID NO: 119592 - RNA, 18 nt, Human
cgagccccgguuuuccca

SEQ ID NO: 119593 - RNA, 23 nt, Human
cgagccccucguuccagagcuga

SEQ ID NO: 119594 - RNA, 32 nt, Human
cgagccccucugcggacggcucaggcgggagg

SEQ ID NO: 119595 - RNA, 31 nt, Human
cgagccccugacucugggccugcguccugcc

SEQ ID NO: 119596 - RNA, 32 nt, Human
cgagccccugcacuccauccugcugaccaugu

SEQ ID NO: 119597 - RNA, 32 nt, Human
cgagccccugguggcagugggagcugccuguu

SEQ ID NO: 119598 - RNA, 32 nt, Human
cgagcccgacagccacugccccggcuccagcu

SEQ ID NO: 119599 - RNA, 17 nt, Human
cgagcccgagccgcagc

SEQ ID NO: 119600 - RNA, 32 nt, Human
cgagcccgagugcccaucaucauucuccucug

SEQ ID NO: 119601 - RNA, 32 nt, Human
cgagcccgggcaagguuggaggcgcugggcuc

SEQ ID NO: 119602 - RNA, 32 nt, Human
cgagcccgggguggaggagggagccaggcuuc

SEQ ID NO: 119603 - RNA, 32 nt, Human
cgagcccuaugccaccaccucacagcugaggc

SEQ ID NO: 119604 - RNA, 18 nt, Human
cgagcccucggguggaag

SEQ ID NO: 119605 - RNA, 32 nt, Human
cgagcccugagcugcaauggcccgggccugca

SEQ ID NO: 119606 - RNA, 32 nt, Human
cgagcccugcauccuccacagcccccgccuug

SEQ ID NO: 119607 - RNA, 32 nt, Human
cgagcccugcgucuugagaacucugaacgguu

SEQ ID NO: 119608 - RNA, 32 nt, Human
cgagccgaauucagcaaccucguaccucagca

SEQ ID NO: 119609 - RNA, 32 nt, Human
cgagccgacugcccuucugcccccaagaugug

SEQ ID NO: 119610 - RNA, 32 nt, Human
cgagccgcggcccagaccccggcagaggacac

SEQ ID NO: 119611 - RNA, 19 nt, Human
cgagccgcggcggcagcgg

SEQ ID NO: 119612 - RNA, 19 nt, Human
cgagccgcgguagcggcgg

SEQ ID NO: 119613 - RNA, 32 nt, Human
cgagccgcugguuaggagcuugcagugucuga

SEQ ID NO: 119614 - RNA, 32 nt, Human
cgagccggaagugggguuagccagguuauccc

SEQ ID NO: 119615 - RNA, 24 nt, Human
cgagccggagccccagcccuaggc

SEQ ID NO: 119616 - RNA, 32 nt, Human
cgagccggagcccgagcacuagcagcagccgg

SEQ ID NO: 119617 - RNA, 32 nt, Human
cgagccggagccgagcgcgccgaggccggggc

SEQ ID NO: 119618 - RNA, 32 nt, Human
cgagccggaggcagcugggaaacaugaagagc

SEQ ID NO: 119619 - RNA, 32 nt, Human
cgagccggccauggcguugucgaugccgcuga

SEQ ID NO: 119620 - RNA, 19 nt, Human
cgagccggccccggggcaa

SEQ ID NO: 119621 - RNA, 32 nt, Human
cgagccgggcagggggcgcccgccacggcacc

SEQ ID NO: 119622 - RNA, 32 nt, Human
cgagccggggcguaucaccugaggucaggagu

SEQ ID NO: 119623 - RNA, 32 nt, Human
cgagccucagccccaagcugauuucuuaucug

SEQ ID NO: 119624 - RNA, 32 nt, Human
cgagccuccagcccucuccuacuuugaucacc

SEQ ID NO: 119625 - RNA, 17 nt, Human
cgagccucccgcagccg

SEQ ID NO: 119626 - RNA, 19 nt, Human
cgagccucccguccaggug

SEQ ID NO: 119627 - RNA, 32 nt, Human
cgagccucuccucucugguugccuccugccac

SEQ ID NO: 119628 - RNA, 32 nt, Human
cgagccugacucuguugaucuacccgugccug

SEQ ID NO: 119629 - RNA, 32 nt, Human
cgagccugcgaggagcgcgccgcccgccagcu

SEQ ID NO: 119630 - RNA, 32 nt, Human
cgagccugcucuaugcggaucuggaccaucua

SEQ ID NO: 119631 - RNA, 21 nt, Human
cgagccugcugccugcucccc

SEQ ID NO: 119632 - RNA, 32 nt, Human
cgagccugcugcgcgcccccucccagagcuca

SEQ ID NO: 119633 - RNA, 32 nt, Human
cgagccugcuuugagcggaacccguacccggg

SEQ ID NO: 119634 - RNA, 32 nt, Human
cgagccuggaagcacuacagagcaucccacag

SEQ ID NO: 119635 - RNA, 23 nt, Human
cgagccuggccaacauggugaaa

SEQ ID NO: 119636 - RNA, 32 nt, Human
cgagccuggccgcgggcugggccccgccgcag

SEQ ID NO: 119637 - RNA, 32 nt, Human
cgagccugggcaacaagaguaaaacuccauuu

SEQ ID NO: 119638 - RNA, 32 nt, Human
cgagccugugcucgcccugcccaacgcagaca

SEQ ID NO: 119639 - RNA, 32 nt, Human
cgagccuucucccuguccuucugucucugacg

SEQ ID NO: 119640 - RNA, 32 nt, Human
cgagcgagauaaccagcccgagucaugcaguc

SEQ ID NO: 119641 - RNA, 32 nt, Human
cgagcgagcugcugcacgcagccccggcuccu

SEQ ID NO: 119642 - RNA, 32 nt, Human
cgagcgagggucaguuugaaaaggaggaucga

SEQ ID NO: 119643 - RNA, 18 nt, Human
cgagcgauucuccugccu

SEQ ID NO: 119644 - RNA, 32 nt, Human
cgagcgcagccaugccccaggccgccuccggg

SEQ ID NO: 119645 - RNA, 22 nt, Human
cgagcgccagcgcccgcgcccg

SEQ ID NO: 119646 - RNA, 18 nt, Human
cgagcgccaggcggcggc

SEQ ID NO: 119647 - RNA, 32 nt, Human
cgagcgcccagccugggagcaugauuguggac

SEQ ID NO: 119648 - RNA, 31 nt, Human
cgagcgccgcucucugggcaggugcagucac

SEQ ID NO: 119649 - RNA, 32 nt, Human
cgagcgccuguaauccagcuacuccagcgccu

SEQ ID NO: 119650 - RNA, 32 nt, Human
cgagcgcgcugagcagacagagcgggagaacg

SEQ ID NO: 119651 - RNA, 18 nt, Human
cgagcgcggcggcggcgg

SEQ ID NO: 119652 - RNA, 32 nt, Human
cgagcgcgggagacgagcaggagccgcgcggg

SEQ ID NO: 119653 - RNA, 32 nt, Human
cgagcggaaguaccgacaggagggcgaggccc

SEQ ID NO: 119654 - RNA, 32 nt, Human
cgagcggagaggguagagacgggguuucaccg

SEQ ID NO: 119655 - RNA, 32 nt, Human
cgagcggaggaggaggaggaggcgaggaggag

SEQ ID NO: 119656 - RNA, 32 nt, Human
cgagcggcacgaggauuuccagcucagcgaug

SEQ ID NO: 119657 - RNA, 32 nt, Human
cgagcggcugagcgcgcucagcagggccccca

SEQ ID NO: 119658 - RNA, 32 nt, Human
cgagcggcugcugagaugagugcagugucgca

SEQ ID NO: 119659 - RNA, 32 nt, Human
cgagcggcuucaggaacccacggccucugcgc

SEQ ID NO: 119660 - RNA, 32 nt, Human
cgagcgggcagggagagccaguccugucggcu

SEQ ID NO: 119661 - RNA, 32 nt, Human
cgagcgggcccagggcugagcccagcggcguc

SEQ ID NO: 119662 - RNA, 32 nt, Human
cgagcggggagguggaggaagcugugcggugc

SEQ ID NO: 119663 - RNA, 32 nt, Human
cgagcggggucaaucuggcaaaaggagugaug

SEQ ID NO: 119664 - RNA, 32 nt, Human
cgagcgguucaugucuucaguacauuguguau

SEQ ID NO: 119665 - RNA, 32 nt, Human
cgagcguccucggggagugccagccagaguug

SEQ ID NO: 119666 - RNA, 32 nt, Human
cgagcuacagggcugggaccaggucaugcagc

SEQ ID NO: 119667 - RNA, 32 nt, Human
cgagcuagccacacccugacaccauguucaag

SEQ ID NO: 119668 - RNA, 32 nt, Human
cgagcuagcccgacgauggcccaggggacauu

SEQ ID NO: 119669 - RNA, 32 nt, Human
cgagcucagcagagcagccgcuggggauuacc

SEQ ID NO: 119670 - RNA, 32 nt, Human
cgagcucagugcaaauguauuaaaccugaccc

SEQ ID NO: 119671 - RNA, 32 nt, Human
cgagcuccaccugcccucuccugcugcuuccu

SEQ ID NO: 119672 - RNA, 32 nt, Human
cgagcucccagcuccagcuucgucucaccuug

SEQ ID NO: 119673 - RNA, 32 nt, Human
cgagcuccugcuugcuugccucuuucuuuguc

SEQ ID NO: 119674 - RNA, 32 nt, Human
cgagcuccuggaacuugcucaggcuccggagg

SEQ ID NO: 119675 - RNA, 32 nt, Human
cgagcuccuggguagcugugaucagggacaug

SEQ ID NO: 119676 - RNA, 32 nt, Human
cgagcucgcaugcugucacccauuccagccua

SEQ ID NO: 119677 - RNA, 32 nt, Human
cgagcucgcgccauugcacuccagccuuggaa

SEQ ID NO: 119678 - RNA, 18 nt, Human
cgagcucggggcgggcgg

SEQ ID NO: 119679 - RNA, 32 nt, Human
cgagcucuacagccaguaccuggagcgccugc

SEQ ID NO: 119680 - RNA, 32 nt, Human
cgagcucuacuggaugggcgcagagaaccuca

SEQ ID NO: 119681 - RNA, 20 nt, Human
cgagcugaggguggcggcgg

SEQ ID NO: 119682 - RNA, 32 nt, Human
cgagcugcaggagggccaggagggcagaugcu

SEQ ID NO: 119683 - RNA, 32 nt, Human
cgagcugcagucaaccaggaggccagagcugu

SEQ ID NO: 119684 - RNA, 32 nt, Human
cgagcugcccagccaggcuguucccacagacg

SEQ ID NO: 119685 - RNA, 32 nt, Human
cgagcugccugaggcccugccaccccggggac

SEQ ID NO: 119686 - RNA, 32 nt, Human
cgagcugcgggaguacugccucccaggcccug

SEQ ID NO: 119687 - RNA, 32 nt, Human
cgagcuggaccaacacaauucucuccagagac

SEQ ID NO: 119688 - RNA, 32 nt, Human
cgagcuggagagaggacuguccugagggcagc

SEQ ID NO: 119689 - RNA, 32 nt, Human
cgagcuggaggaggagaaguaagcgguggggg

SEQ ID NO: 119690 - RNA, 20 nt, Human
cgagcuggcacagcagcugc

SEQ ID NO: 119691 - RNA, 18 nt, Human
cgagcuggcggcgggcgg

SEQ ID NO: 119692 - RNA, 19 nt, Human
cgagcugggagggcggcgg

SEQ ID NO: 119693 - RNA, 32 nt, Human
cgagcugggaugagaggaagggaaaccuuaca

SEQ ID NO: 119694 - RNA, 32 nt, Human
cgagcugggcaccugggagcaccagcugcggc

SEQ ID NO: 119695 - RNA, 32 nt, Human
cgagcugggcaggcacagcguggggaccacgu

SEQ ID NO: 119696 - RNA, 32 nt, Human
cgagcugggcuugcgugggggccaggugggaa

SEQ ID NO: 119697 - RNA, 32 nt, Human
cgagcuguaaacauguuaguaaugaggacaac

SEQ ID NO: 119698 - RNA, 32 nt, Human
cgagcugugaccacagcacccucaagcauacg

SEQ ID NO: 119699 - RNA, 32 nt, Human
cgagcuucccacccuuccuaacgcuuucacac

SEQ ID NO: 119700 - RNA, 32 nt, Human
cgagcuugcacuacugcacuccagccugggug

SEQ ID NO: 119701 - RNA, 29 nt, Human
cgagcuuggccauguucucugaaaagguc

SEQ ID NO: 119702 - RNA, 32 nt, Human
cgagcuugggaaagauuuuguguaggaaaugu

SEQ ID NO: 119703 - RNA, 32 nt, Human
cgagcuuguaucuccuucccugugccacgaga

SEQ ID NO: 119704 - RNA, 32 nt, Human
cgagcuuguguguggugucguggucacaucuc

SEQ ID NO: 119705 - RNA, 32 nt, Human
cgagcuuuuccucugcagagcccaguggagcc

SEQ ID NO: 119706 - RNA, 32 nt, Human
cgaggaaaaauguaagucauuuagaccaaagc

SEQ ID NO: 119707 - RNA, 32 nt, Human
cgaggaaagcuuccagcccuccucccuucacc

SEQ ID NO: 119708 - RNA, 32 nt, Human
cgaggaaaugugcuuccugagggagugggugg

SEQ ID NO: 119709 - RNA, 19 nt, Human
cgaggaaccccacaugcca

SEQ ID NO: 119710 - RNA, 32 nt, Human
cgaggaacccugugguccucaggcagguguac

SEQ ID NO: 119711 - RNA, 18 nt, Human
cgaggaaccggcggcggc

SEQ ID NO: 119712 - RNA, 32 nt, Human
cgaggaacugggcgcuugcagugcguugcaca

SEQ ID NO: 119713 - RNA, 32 nt, Human
cgaggaacugggugaagggaauuugggggauu

SEQ ID NO: 119714 - RNA, 32 nt, Human
cgaggaagagaagaauggcagugaagagcuug

SEQ ID NO: 119715 - RNA, 32 nt, Human
cgaggaagcacagcuugggucagguucuugcc

SEQ ID NO: 119716 - RNA, 32 nt, Human
cgaggaagcagcacuaaagcacucugaaucaa

SEQ ID NO: 119717 - RNA, 32 nt, Human
cgaggaagcuuuuacacagucugccaugguuu

SEQ ID NO: 119718 - RNA, 32 nt, Human
cgaggaaggaggauuaccugagcccaggaguu

SEQ ID NO: 119719 - RNA, 18 nt, Human
cgaggaaggaggcggcgg

SEQ ID NO: 119720 - RNA, 32 nt, Human
cgaggaaugcaauuccugggcccgcugcugug

SEQ ID NO: 119721 - RNA, 32 nt, Human
cgaggaaugucaggugaagcaauugaacacug

SEQ ID NO: 119722 - RNA, 32 nt, Human
cgaggacaacccagcuaugcccacaugcucaa

SEQ ID NO: 119723 - RNA, 32 nt, Human
cgaggacacagcagugagcagcugcccaggcc

SEQ ID NO: 119724 - RNA, 32 nt, Human
cgaggacacccuacaagccgucgcuaacaagu

SEQ ID NO: 119725 - RNA, 32 nt, Human
cgaggacauccugugcaugaugccuagagagu

SEQ ID NO: 119726 - RNA, 32 nt, Human
cgaggaccaccagcaggcagguggacugacug

SEQ ID NO: 119727 - RNA, 32 nt, Human
cgaggacccggucaugagaggggugaggucuc

SEQ ID NO: 119728 - RNA, 20 nt, Human
cgaggaccgaaaggggccgc

SEQ ID NO: 119729 - RNA, 32 nt, Human
cgaggaccuccuucaggagggucuucuuccuc

SEQ ID NO: 119730 - RNA, 23 nt, Human
cgaggaccuggagauaaacgcug

SEQ ID NO: 119731 - RNA, 23 nt, Human
cgaggaccuggaggggugcucug

SEQ ID NO: 119732 - RNA, 32 nt, Human
cgaggacgaggaguggcccacccuggagaagg

SEQ ID NO: 119733 - RNA, 17 nt, Human
cgaggacgccaacagca

SEQ ID NO: 119734 - RNA, 32 nt, Human
cgaggacgccgaggccuggagugggugguagc

SEQ ID NO: 119735 - RNA, 32 nt, Human
cgaggacgcgagcggcaggugugcacagaggu

SEQ ID NO: 119736 - RNA, 20 nt, Human
cgaggacuaggcggcggcgg

SEQ ID NO: 119737 - RNA, 32 nt, Human
cgaggacucgagcaccagcuggcuccaccagc

SEQ ID NO: 119738 - RNA, 32 nt, Human
cgaggacucuguggaggugacagaugaauaga

SEQ ID NO: 119739 - RNA, 22 nt, Human
cgaggacucuuugggggcccug

SEQ ID NO: 119740 - RNA, 32 nt, Human
cgaggacugaaaaagggaggaggcagaccacu

SEQ ID NO: 119741 - RNA, 32 nt, Human
cgaggacugcagcugcugccguccacagcgcc

SEQ ID NO: 119742 - RNA, 32 nt, Human
cgaggacugggccagguuagaggcagauggca

SEQ ID NO: 119743 - RNA, 22 nt, Human
cgaggacuuccccguggcgcug

SEQ ID NO: 119744 - RNA, 21 nt, Human
cgaggagaaaaaagaaccucu

SEQ ID NO: 119745 - RNA, 32 nt, Human
cgaggagaaagccccagcccuggcagccccac

SEQ ID NO: 119746 - RNA, 32 nt, Human
cgaggagagaggaucacuuaagcccaggaguc

SEQ ID NO: 119747 - RNA, 32 nt, Human
cgaggagaggagaaggccaggggaaugaauuc

SEQ ID NO: 119748 - RNA, 32 nt, Human
cgaggagagggcgcuccucucugcacaccuac

SEQ ID NO: 119749 - RNA, 32 nt, Human
cgaggagagguagcaacagcgagccuagccag

SEQ ID NO: 119750 - RNA, 20 nt, Human
cgaggagauggaggcggcgg

SEQ ID NO: 119751 - RNA, 32 nt, Human
cgaggagcagacccuucagcuguggcuggcac

SEQ ID NO: 119752 - RNA, 19 nt, Human
cgaggagcagcggcuggca

SEQ ID NO: 119753 - RNA, 32 nt, Human
cgaggagccacugucuggcaugcaggccaacu

SEQ ID NO: 119754 - RNA, 32 nt, Human
cgaggagccgggagggaggguugcggggccac

SEQ ID NO: 119755 - RNA, 20 nt, Human
cgaggagccggggcgggcgg

SEQ ID NO: 119756 - RNA, 22 nt, Human
cgaggagccucgcgcggcgcug

SEQ ID NO: 119757 - RNA, 32 nt, Human
cgaggagccugagagacccacggaggcuucgc

SEQ ID NO: 119758 - RNA, 32 nt, Human
cgaggagcgaggaagcccgggcgggaggagag

SEQ ID NO: 119759 - RNA, 32 nt, Human
cgaggagcucaaggaccugccugucaggacca

SEQ ID NO: 119760 - RNA, 32 nt, Human
cgaggagcugccguugugcugugacucccuga

SEQ ID NO: 119761 - RNA, 22 nt, Human
cgaggagcugggauuacaggca

SEQ ID NO: 119762 - RNA, 32 nt, Human
cgaggagcuggggcgggcuaggaggagggggu

SEQ ID NO: 119763 - RNA, 19 nt, Human
cgaggagcuggggcggggg

SEQ ID NO: 119764 - RNA, 32 nt, Human
cgaggagcugugguccagccugcgcggcggga

SEQ ID NO: 119765 - RNA, 32 nt, Human
cgaggaggaagaggaggaggacagcggcccuc

SEQ ID NO: 119766 - RNA, 32 nt, Human
cgaggaggaaggaaggagagaccccaggugua

SEQ ID NO: 119767 - RNA, 32 nt, Human
cgaggaggagaagagcaaagaaaagcaguccg

SEQ ID NO: 119768 - RNA, 32 nt, Human
cgaggaggagcagaggagcacacagaugaagc

SEQ ID NO: 119769 - RNA, 32 nt, Human
cgaggaggagcuauggucgagaguauuaaggc

SEQ ID NO: 119770 - RNA, 32 nt, Human
cgaggaggaggaagaggaggcggaggcggcgg

SEQ ID NO: 119771 - RNA, 32 nt, Human
cgaggaggaggaggaggaagaggggauggagc

SEQ ID NO: 119772 - RNA, 32 nt, Human
cgaggaggaggaggaggaggaggaagagggca

SEQ ID NO: 119773 - RNA, 32 nt, Human
cgaggaggaggaggaggaggaggacgcgggcc

SEQ ID NO: 119774 - RNA, 32 nt, Human
cgaggaggaggaggaggaggaggaggaggcgg

SEQ ID NO: 119775 - RNA, 32 nt, Human
cgaggaggaggaggaggagggaggaggggaga

SEQ ID NO: 119776 - RNA, 32 nt, Human
cgaggaggaggcggagguggagcuggcggaga

SEQ ID NO: 119777 - RNA, 32 nt, Human
cgaggaggagggcugcgccuccaucccccugu

SEQ ID NO: 119778 - RNA, 32 nt, Human
cgaggaggagggcugugccuccaucccccugu

SEQ ID NO: 119779 - RNA, 32 nt, Human
cgaggaggagguggaggaggagagguggcagg

SEQ ID NO: 119780 - RNA, 32 nt, Human
cgaggaggagguggauguggcagcugagaucu

SEQ ID NO: 119781 - RNA, 23 nt, Human
cgaggaggccaggagggcugcug

SEQ ID NO: 119782 - RNA, 32 nt, Human
cgaggaggccaggccaaguucuccgugcgccc

SEQ ID NO: 119783 - RNA, 32 nt, Human
cgaggagggaggaucaccugaggucaggaguu

SEQ ID NO: 119784 - RNA, 32 nt, Human
cgaggagggaggaucccuugagcccagagguu

SEQ ID NO: 119785 - RNA, 32 nt, Human
cgaggagggcagaucacuugagaucaggaguu

SEQ ID NO: 119786 - RNA, 32 nt, Human
cgaggagggcagaucacuugaggucaggaguu

SEQ ID NO: 119787 - RNA, 32 nt, Human
cgaggagggcagaucacuuggugccaggaguu

SEQ ID NO: 119788 - RNA, 32 nt, Human
cgaggagggccuggcccaggagcaggggcuug

SEQ ID NO: 119789 - RNA, 32 nt, Human
cgaggagggcucugaguccucucccggccagg

SEQ ID NO: 119790 - RNA, 17 nt, Human
cgaggaggggccgagcc

SEQ ID NO: 119791 - RNA, 32 nt, Human
cgaggaggucccugcuagucucagccaggagc

SEQ ID NO: 119792 - RNA, 32 nt, Human
cgaggagguggaggaggaggaggaggaggagg

SEQ ID NO: 119793 - RNA, 32 nt, Human
cgaggaguaccucagccagauccacaguugcc

SEQ ID NO: 119794 - RNA, 32 nt, Human
cgaggaguaccuuagcaacuuggcccacaugg

SEQ ID NO: 119795 - RNA, 32 nt, Human
cgaggagugguguuugauggccucgacacucu

SEQ ID NO: 119796 - RNA, 32 nt, Human
cgaggagugucugaggugcgccccacucugua

SEQ ID NO: 119797 - RNA, 32 nt, Human
cgaggaguuaacuccaugagcccagggauccu

SEQ ID NO: 119798 - RNA, 19 nt, Human
cgaggaucaagaagcacau

SEQ ID NO: 119799 - RNA, 32 nt, Human
cgaggaugacagggaaagggaggcagggacuu

SEQ ID NO: 119800 - RNA, 21 nt, Human
cgaggaugaggaagggcccug

SEQ ID NO: 119801 - RNA, 32 nt, Human
cgaggaugaggaggaggaaggugaagaggagg

SEQ ID NO: 119802 - RNA, 18 nt, Human
cgaggaugccggcggcgg

SEQ ID NO: 119803 - RNA, 32 nt, Human
cgaggaugccuccguccuccccaaccccauga

SEQ ID NO: 119804 - RNA, 23 nt, Human
cgaggauggcgcugguacugcug

SEQ ID NO: 119805 - RNA, 30 nt, Human
cgaggauggcuacgggaagcugggcagaca

SEQ ID NO: 119806 - RNA, 32 nt, Human
cgaggaugggccugggcucagcauucgagauc

SEQ ID NO: 119807 - RNA, 32 nt, Human
cgaggauguacagagccgugcccacacauuuc

SEQ ID NO: 119808 - RNA, 32 nt, Human
cgaggauguagagagaacugccugacugagga

SEQ ID NO: 119809 - RNA, 32 nt, Human
cgaggaugucacuggccuucucagccucacac

SEQ ID NO: 119810 - RNA, 32 nt, Human
cgaggauucugccuuuuaccaaugcaggugaa

SEQ ID NO: 119811 - RNA, 32 nt, Human
cgaggcaacauggcaagauccccucucuacca

SEQ ID NO: 119812 - RNA, 32 nt, Human
cgaggcaaccuuugccuucuucagaagcuugg

SEQ ID NO: 119813 - RNA, 32 nt, Human
cgaggcaagaaggagcuuauggucuagugagg

SEQ ID NO: 119814 - RNA, 32 nt, Human
cgaggcaagccucuggaacacagccagugugc

SEQ ID NO: 119815 - RNA, 32 nt, Human
cgaggcacacaggaguugggacuggcugccac

SEQ ID NO: 119816 - RNA, 32 nt, Human
cgaggcacacugcuuacugccuugggguugug

SEQ ID NO: 119817 - RNA, 32 nt, Human
cgaggcacagccagugcauuccugccugcgaa

SEQ ID NO: 119818 - RNA, 32 nt, Human
cgaggcaccagccugcagccggcccccagcac

SEQ ID NO: 119819 - RNA, 32 nt, Human
cgaggcagacaaguggaauuaggccuugcugc

SEQ ID NO: 119820 - RNA, 32 nt, Human
cgaggcagacggaucacuugaggucaggaguu

SEQ ID NO: 119821 - RNA, 22 nt, Human
cgaggcagagacggaaccagag

SEQ ID NO: 119822 - RNA, 19 nt, Human
cgaggcagcaguggggcgg

SEQ ID NO: 119823 - RNA, 32 nt, Human
cgaggcagccgggggaguuacugugaacacua

SEQ ID NO: 119824 - RNA, 32 nt, Human
cgaggcagcucuguucauggcguucucgaagc

SEQ ID NO: 119825 - RNA, 32 nt, Human
cgaggcaggaggaucaccugaggucaggaguu

SEQ ID NO: 119826 - RNA, 32 nt, Human
cgaggcaggaggaucacgaggucagaagaucg

SEQ ID NO: 119827 - RNA, 32 nt, Human
cgaggcaggaggaucacuugaggccaggaguu

SEQ ID NO: 119828 - RNA, 32 nt, Human
cgaggcaggaggaucacuugaggcuaggaguu

SEQ ID NO: 119829 - RNA, 32 nt, Human
cgaggcaggaggaucacuugaggucaagaguu

SEQ ID NO: 119830 - RNA, 32 nt, Human
cgaggcaggaggaucacuugaggucaggaguu

SEQ ID NO: 119831 - RNA, 32 nt, Human
cgaggcaggaggaucacuugaguccagaaguu

SEQ ID NO: 119832 - RNA, 32 nt, Human
cgaggcaggaggaucacuugaguccaggaguu

SEQ ID NO: 119833 - RNA, 32 nt, Human
cgaggcaggaggaucccuuuagcccaggaguu

SEQ ID NO: 119834 - RNA, 32 nt, Human
cgaggcaggaggggccucuuguuucucagccc

SEQ ID NO: 119835 - RNA, 31 nt, Human
cgaggcaggcacuuuuacuucuuuuaccauu

SEQ ID NO: 119836 - RNA, 32 nt, Human
cgaggcaggcagaucacuugaacucaggaguu

SEQ ID NO: 119837 - RNA, 32 nt, Human
cgaggcaggcagaucacuugaggucaggaguu

SEQ ID NO: 119838 - RNA, 32 nt, Human
cgaggcaggcagauuauuugagcucaggaguu

SEQ ID NO: 119839 - RNA, 32 nt, Human
cgaggcaggcaggucacuugaggucaggaguu

SEQ ID NO: 119840 - RNA, 32 nt, Human
cgaggcaggcggaucacuuaagaucaggaguu

SEQ ID NO: 119841 - RNA, 32 nt, Human
cgaggcaggcggaucacuugaggccagcaguu

SEQ ID NO: 119842 - RNA, 32 nt, Human
cgaggcaggcggaucacuugaggucagcaguu

SEQ ID NO: 119843 - RNA, 32 nt, Human
cgaggcaggcggaucacuugaggucaggaguu

SEQ ID NO: 119844 - RNA, 32 nt, Human
cgaggcaggcggauugccugagcucaggaguu

SEQ ID NO: 119845 - RNA, 32 nt, Human
cgaggcagggggacugcuugagcucaggaguu

SEQ ID NO: 119846 - RNA, 32 nt, Human
cgaggcagggggauugcuugagcucaggaguu

SEQ ID NO: 119847 - RNA, 19 nt, Human
cgaggcaggguggcugcgg

SEQ ID NO: 119848 - RNA, 32 nt, Human
cgaggcagguggaacacuugagaucaggaguu

SEQ ID NO: 119849 - RNA, 32 nt, Human
cgaggcagguggaucacucaagcucaggaguu

SEQ ID NO: 119850 - RNA, 32 nt, Human
cgaggcagguggaucacucugaggucaggagu

SEQ ID NO: 119851 - RNA, 32 nt, Human
cgaggcagguggaucacugaggucagggguuc

SEQ ID NO: 119852 - RNA, 32 nt, Human
cgaggcagguggaucacuugagaucaggaguu

SEQ ID NO: 119853 - RNA, 32 nt, Human
cgaggcagguggaucacuugagcccaggaguu

SEQ ID NO: 119854 - RNA, 32 nt, Human
cgaggcagguggaucacuugagcucaggaguu

SEQ ID NO: 119855 - RNA, 32 nt, Human
cgaggcagguggaucacuugaggccaggaguu

SEQ ID NO: 119856 - RNA, 32 nt, Human
cgaggcagguggaucacuugaggucaggaguu

SEQ ID NO: 119857 - RNA, 32 nt, Human
cgaggcagguggaucgcuugagcccaggacuu

SEQ ID NO: 119858 - RNA, 32 nt, Human
cgaggcagguggaucgcuugagcucaggaguu

SEQ ID NO: 119859 - RNA, 32 nt, Human
cgaggcagucaugaggacuuuccucuuucucu

SEQ ID NO: 119860 - RNA, 32 nt, Human
cgaggcauacccuugcugcccaucccacccag

SEQ ID NO: 119861 - RNA, 21 nt, Human
cgaggcauccucccccgcccg

SEQ ID NO: 119862 - RNA, 32 nt, Human
cgaggccaaggugggaggauugcuugagccua

SEQ ID NO: 119863 - RNA, 32 nt, Human
cgaggccacggccgcccccacccuggaggaca

SEQ ID NO: 119864 - RNA, 24 nt, Human
cgaggccagcaggaggcaacggca

SEQ ID NO: 119865 - RNA, 16 nt, Human
cgaggccagcugagcc

SEQ ID NO: 119866 - RNA, 32 nt, Human
cgaggccaggagaucaagaccauccugacuaa

SEQ ID NO: 119867 - RNA, 32 nt, Human
cgaggccaggagaucaagaccauccuggcuaa

SEQ ID NO: 119868 - RNA, 32 nt, Human
cgaggccaggagccccgccacccuccacggga

SEQ ID NO: 119869 - RNA, 32 nt, Human
cgaggccaggaguuugaaacuagccuagacaa

SEQ ID NO: 119870 - RNA, 32 nt, Human
cgaggccaggcaggcagggaucccgcagcgag

SEQ ID NO: 119871 - RNA, 32 nt, Human
cgaggccaggucuucggccgcauccgguacgg

SEQ ID NO: 119872 - RNA, 19 nt, Human
cgaggccaggugggcggug

SEQ ID NO: 119873 - RNA, 30 nt, Human
cgaggccagucggcuacccaccgcugggga

SEQ ID NO: 119874 - RNA, 32 nt, Human
cgaggcccagcucccugaaacaacaguaaccu

SEQ ID NO: 119875 - RNA, 20 nt, Human
cgaggcccaggcgguggcgg

SEQ ID NO: 119876 - RNA, 32 nt, Human
cgaggccccagccagcugucccgagucuggac

SEQ ID NO: 119877 - RNA, 22 nt, Human
cgaggccccagcucugcugcug

SEQ ID NO: 119878 - RNA, 19 nt, Human
cgaggcccccagguucaag

SEQ ID NO: 119879 - RNA, 21 nt, Human
cgaggcccccaugugcugcug

SEQ ID NO: 119880 - RNA, 32 nt, Human
cgaggcccgagggagagggaagagcgccgggc

SEQ ID NO: 119881 - RNA, 32 nt, Human
cgaggcccgccuggaaauccugaagggugaga

SEQ ID NO: 119882 - RNA, 19 nt, Human
cgaggcccggaggcggcgg

SEQ ID NO: 119883 - RNA, 32 nt, Human
cgaggcccggcagcucaggaggcaggugaaau

SEQ ID NO: 119884 - RNA, 18 nt, Human
cgaggcccggccucccca

SEQ ID NO: 119885 - RNA, 17 nt, Human
cgaggcccggggcguuc

SEQ ID NO: 119886 - RNA, 32 nt, Human
cgaggcccgggggcaggagugcagggcucuga

SEQ ID NO: 119887 - RNA, 19 nt, Human
cgaggcccggggggcuucu

SEQ ID NO: 119888 - RNA, 20 nt, Human
cgaggcccgugacggggcgg

SEQ ID NO: 119889 - RNA, 32 nt, Human
cgaggcccucaauccaccuucaggccccgccc

SEQ ID NO: 119890 - RNA, 32 nt, Human
cgaggcccugacgccaguucacuggacugugc

SEQ ID NO: 119891 - RNA, 32 nt, Human
cgaggcccugcaguggccuuggcaaugucugu

SEQ ID NO: 119892 - RNA, 32 nt, Human
cgaggcccuucgccggcucugccuccuccccc

SEQ ID NO: 119893 - RNA, 32 nt, Human
cgaggccgcaccacugcacuccagccugggug

SEQ ID NO: 119894 - RNA, 32 nt, Human
cgaggccgcggccguggcgcugggcggcugcg

SEQ ID NO: 119895 - RNA, 20 nt, Human
cgaggccgcucgggcggcgg

SEQ ID NO: 119896 - RNA, 18 nt, Human
cgaggccggaggcgcggu

SEQ ID NO: 119897 - RNA, 21 nt, Human
cgaggccggccggagcccggg

SEQ ID NO: 119898 - RNA, 18 nt, Human
cgaggccggcggcggcgg

SEQ ID NO: 119899 - RNA, 19 nt, Human
cgaggccgggagcagagcg

SEQ ID NO: 119900 - RNA, 20 nt, Human
cgaggccgggugaggcggcg

SEQ ID NO: 119901 - RNA, 32 nt, Human
cgaggccgguggaucacuugaggucagaaguu

SEQ ID NO: 119902 - RNA, 18 nt, Human
cgaggccggugucggcgg

SEQ ID NO: 119903 - RNA, 32 nt, Human
cgaggccuacagccgccggcaccggccgcggg

SEQ ID NO: 119904 - RNA, 32 nt, Human
cgaggccuaccucuguccucucagccuguggc

SEQ ID NO: 119905 - RNA, 32 nt, Human
cgaggccuacggacccaggccaggugggaguc

SEQ ID NO: 119906 - RNA, 32 nt, Human
cgaggccuccccagccaugcaggacugugagu

SEQ ID NO: 119907 - RNA, 32 nt, Human
cgaggccucgggaagcugaauuuuccuugacg

SEQ ID NO: 119908 - RNA, 20 nt, Human
cgaggccucgugccgcgucc

SEQ ID NO: 119909 - RNA, 32 nt, Human
cgaggccugagcucgcccugcccagcuacuga

SEQ ID NO: 119910 - RNA, 32 nt, Human
cgaggccugaguauugcaauacaugcaguagu

SEQ ID NO: 119911 - RNA, 32 nt, Human
cgaggccugcagcugcacagccagacccgccc

SEQ ID NO: 119912 - RNA, 18 nt, Human
cgaggccuggagcuagcc

SEQ ID NO: 119913 - RNA, 18 nt, Human
cgaggccuuccugagucc

SEQ ID NO: 119914 - RNA, 32 nt, Human
cgaggccuuccugggcaaggaggacuccaaga

SEQ ID NO: 119915 - RNA, 32 nt, Human
cgaggccuucggcgugggagagcgagaccccu

SEQ ID NO: 119916 - RNA, 32 nt, Human
cgaggcgaacggaucacuugaggccaggaguu

SEQ ID NO: 119917 - RNA, 32 nt, Human
cgaggcgagaugggcguccugggccggguccu

SEQ ID NO: 119918 - RNA, 32 nt, Human
cgaggcgaguggaucacuuaagcucaggaguu

SEQ ID NO: 119919 - RNA, 32 nt, Human
cgaggcgcagcagggcaccagguggagcacca

SEQ ID NO: 119920 - RNA, 32 nt, Human
cgaggcgcggcucggacuccagcauggcgacc

SEQ ID NO: 119921 - RNA, 19 nt, Human
cgaggcgcgggagaggcgg

SEQ ID NO: 119922 - RNA, 22 nt, Human
cgaggcgcggggccggcgcccg

SEQ ID NO: 119923 - RNA, 19 nt, Human
cgaggcgcugcgccggcgg

SEQ ID NO: 119924 - RNA, 32 nt, Human
cgaggcgcugcggcuccaccugaccagugggu

SEQ ID NO: 119925 - RNA, 32 nt, Human
cgaggcgcugcggcuccaccugccaguggguc

SEQ ID NO: 119926 - RNA, 32 nt, Human
cgaggcgcugcuggcccucgggcugcgggagc

SEQ ID NO: 119927 - RNA, 18 nt, Human
cgaggcggacgagggcgg

SEQ ID NO: 119928 - RNA, 18 nt, Human
cgaggcggacgggcggcg

SEQ ID NO: 119929 - RNA, 20 nt, Human
cgaggcggaggcagcggcgg

SEQ ID NO: 119930 - RNA, 32 nt, Human
cgaggcggaggcggaggaggaggaggccgagg

SEQ ID NO: 119931 - RNA, 31 nt, Human
cgaggcggcgacugcgguaggagggaagagg

SEQ ID NO: 119932 - RNA, 18 nt, Human
cgaggcggcggcggcgcg

SEQ ID NO: 119933 - RNA, 18 nt, Human
cgaggcggcggcgggcgg

SEQ ID NO: 119934 - RNA, 32 nt, Human
cgaggcgggaagaucacuugaggucaggaguu

SEQ ID NO: 119935 - RNA, 32 nt, Human
cgaggcgggaaggugggcucuggccgccggga

SEQ ID NO: 119936 - RNA, 32 nt, Human
cgaggcgggagaaguagggagcuguucguuua

SEQ ID NO: 119937 - RNA, 32 nt, Human
cgaggcgggaggaucaccugagguuaggaguu

SEQ ID NO: 119938 - RNA, 32 nt, Human
cgaggcgggaggaucacuugagcccaggaguu

SEQ ID NO: 119939 - RNA, 32 nt, Human
cgaggcgggaggaucgcuggagcccaggaguu

SEQ ID NO: 119940 - RNA, 32 nt, Human
cgaggcgggaguaucacuugaaccuaggaguu

SEQ ID NO: 119941 - RNA, 32 nt, Human
cgaggcgggcagaucacuugaagucaggaguu

SEQ ID NO: 119942 - RNA, 32 nt, Human
cgaggcgggcagaucacuugagaucaggaguu

SEQ ID NO: 119943 - RNA, 32 nt, Human
cgaggcgggcagaucacuugaggccaggaguu

SEQ ID NO: 119944 - RNA, 32 nt, Human
cgaggcgggcagaucacuugaggucaggaguu

SEQ ID NO: 119945 - RNA, 32 nt, Human
cgaggcgggcagaucuccugagcucaggaguu

SEQ ID NO: 119946 - RNA, 32 nt, Human
cgaggcgggcagauugccugagcucaggaauu

SEQ ID NO: 119947 - RNA, 21 nt, Human
cgaggcgggccugggaggcgg

SEQ ID NO: 119948 - RNA, 20 nt, Human
cgaggcgggcgcugaggcgg

SEQ ID NO: 119949 - RNA, 32 nt, Human
cgaggcgggcggaucacuaggucaggaaaugg

SEQ ID NO: 119950 - RNA, 32 nt, Human
cgaggcgggcggaucacucgaggucaggaguu

SEQ ID NO: 119951 - RNA, 32 nt, Human
cgaggcgggcggaucacuugagaccaggaguu

SEQ ID NO: 119952 - RNA, 32 nt, Human
cgaggcgggcggaucacuugaggucaggaguu

SEQ ID NO: 119953 - RNA, 32 nt, Human
cgaggcgggcggaucacuugaggucggaguug

SEQ ID NO: 119954 - RNA, 19 nt, Human
cgaggcgggcggcgcgcgg

SEQ ID NO: 119955 - RNA, 19 nt, Human
cgaggcggggccgagcgcc

SEQ ID NO: 119956 - RNA, 18 nt, Human
cgaggcggggggcggcgg

SEQ ID NO: 119957 - RNA, 32 nt, Human
cgaggcggguagaucacuuuaggucagaaguu

SEQ ID NO: 119958 - RNA, 32 nt, Human
cgaggcggguggaacacuugaggucagggguu

SEQ ID NO: 119959 - RNA, 32 nt, Human
cgaggcggguggaucacucaaggucaggcauu

SEQ ID NO: 119960 - RNA, 32 nt, Human
cgaggcggguggaucacucgaugucaggaguu

SEQ ID NO: 119961 - RNA, 32 nt, Human
cgaggcggguggaucacuugaagucaggaguu

SEQ ID NO: 119962 - RNA, 32 nt, Human
cgaggcggguggaucacuugagaucagaaguu

SEQ ID NO: 119963 - RNA, 32 nt, Human
cgaggcggguggaucacuugagaucaggaguu

SEQ ID NO: 119964 - RNA, 32 nt, Human
cgaggcggguggaucacuugaggucaggagcu

SEQ ID NO: 119965 - RNA, 32 nt, Human
cgaggcggguggaucacuugaggucaggaguu

SEQ ID NO: 119966 - RNA, 32 nt, Human
cgaggcggucaccggagcuuaagccccgccgc

SEQ ID NO: 119967 - RNA, 32 nt, Human
cgaggcggugaugcggcgccacugcaggacgc

SEQ ID NO: 119968 - RNA, 22 nt, Human
cgaggcgguggcggcgcugcug

SEQ ID NO: 119969 - RNA, 18 nt, Human
cgaggcgguggcgggcgg

SEQ ID NO: 119970 - RNA, 32 nt, Human
cgaggcuagaggcauuuggaacaacaaaucua

SEQ ID NO: 119971 - RNA, 32 nt, Human
cgaggcuagcgaggggacaggagacggcccug

SEQ ID NO: 119972 - RNA, 18 nt, Human
cgaggcuaggcggggcgg

SEQ ID NO: 119973 - RNA, 32 nt, Human
cgaggcucaagcgauccucccgccuuagccuc

SEQ ID NO: 119974 - RNA, 32 nt, Human
cgaggcucaaguuugaauuucagcuucacugu

SEQ ID NO: 119975 - RNA, 32 nt, Human
cgaggcucagaaacuccuggcuuagauugaag

SEQ ID NO: 119976 - RNA, 32 nt, Human
cgaggcucaggugauccucccaucucagccuc

SEQ ID NO: 119977 - RNA, 32 nt, Human
cgaggcuccccuggagucuccaccuuuuccua

SEQ ID NO: 119978 - RNA, 21 nt, Human
cgaggcucccggcgcucgcug

SEQ ID NO: 119979 - RNA, 23 nt, Human
cgaggcucgcgcgcccgcccccg

SEQ ID NO: 119980 - RNA, 32 nt, Human
cgaggcucuggccagcacugggugagaguggg

SEQ ID NO: 119981 - RNA, 21 nt, Human
cgaggcucuguacauugcugc

SEQ ID NO: 119982 - RNA, 32 nt, Human
cgaggcucuuaucccacuccauuuuucccugc

SEQ ID NO: 119983 - RNA, 18 nt, Human
cgaggcugagcggcggcg

SEQ ID NO: 119984 - RNA, 32 nt, Human
cgaggcugaggaagaagagaaggggaauuggg

SEQ ID NO: 119985 - RNA, 32 nt, Human
cgaggcugcaaugagcuagcuaugauggcacc

SEQ ID NO: 119986 - RNA, 32 nt, Human
cgaggcugcagugagccaagaucacggcacug

SEQ ID NO: 119987 - RNA, 32 nt, Human
cgaggcugcaucuggcuccagggaagcguguu

SEQ ID NO: 119988 - RNA, 32 nt, Human
cgaggcugcgccggaagucccuagccaggccu

SEQ ID NO: 119989 - RNA, 32 nt, Human
cgaggcugcuaccugggcuccuccauuacacu

SEQ ID NO: 119990 - RNA, 19 nt, Human
cgaggcugcuccgcggcgg

SEQ ID NO: 119991 - RNA, 32 nt, Human
cgaggcugcuguggcacccugcccguccuggc

SEQ ID NO: 119992 - RNA, 32 nt, Human
cgaggcugcuuaaaccucugucucugacgguc

SEQ ID NO: 119993 - RNA, 32 nt, Human
cgaggcuggagcuggcgucugucuucaagggc

SEQ ID NO: 119994 - RNA, 21 nt, Human
cgaggcuggccugaguauucu

SEQ ID NO: 119995 - RNA, 32 nt, Human
cgaggcugggccugagcugggugccccguugc

SEQ ID NO: 119996 - RNA, 16 nt, Human
cgaggcugggcugcag

SEQ ID NO: 119997 - RNA, 19 nt, Human
cgaggcugggggagggcgg

SEQ ID NO: 119998 - RNA, 32 nt, Human
cgaggcugguggaucacuugagcccaggaguc

SEQ ID NO: 119999 - RNA, 32 nt, Human
cgaggcugugccaggcuggcucuggguagaac

SEQ ID NO: 120000 - RNA, 18 nt, Human
cgaggcuguggguggcgg

SEQ ID NO: 120001 - RNA, 23 nt, Human
cgaggcuuccgcgcucgcugcug

SEQ ID NO: 120002 - RNA, 32 nt, Human
cgaggcuucugcacucgccugggaagaggccc

SEQ ID NO: 120003 - RNA, 32 nt, Human
cgaggcuuugcucucccgacccgaacuaaagc

SEQ ID NO: 120004 - RNA, 32 nt, Human
cgaggcuuuggaaccaagagcuggaggaaccu

SEQ ID NO: 120005 - RNA, 32 nt, Human
cgagggaaaacggaggugggagacugaaccau

SEQ ID NO: 120006 - RNA, 32 nt, Human
cgagggaagaacacccucuccggcccuguagu

SEQ ID NO: 120007 - RNA, 20 nt, Human
cgagggacgcgagcgggcgg

SEQ ID NO: 120008 - RNA, 32 nt, Human
cgagggagcagaggaggggcugccuggagcuu

SEQ ID NO: 120009 - RNA, 32 nt, Human
cgagggagccucagucccuggaggcagcuucu

SEQ ID NO: 120010 - RNA, 32 nt, Human
cgagggaggaggcgccggccagcuggacagag

SEQ ID NO: 120011 - RNA, 32 nt, Human
cgagggaggagggagagaaggagggaggcgcu

SEQ ID NO: 120012 - RNA, 32 nt, Human
cgagggaggagggccagagaggcaguuggaag

SEQ ID NO: 120013 - RNA, 32 nt, Human
cgagggaggcucugucucaaaagcaaagcaaa

SEQ ID NO: 120014 - RNA, 32 nt, Human
cgagggaggcugcuggacccaccccgcugucc

SEQ ID NO: 120015 - RNA, 32 nt, Human
cgagggaucacugugguggagcugaucaagaa

SEQ ID NO: 120016 - RNA, 32 nt, Human
cgagggaugccaccauccccgucuccuaggcc

SEQ ID NO: 120017 - RNA, 32 nt, Human
cgagggauuuuaugcccugggcuuagauuaug

SEQ ID NO: 120018 - RNA, 18 nt, Human
cgagggcaagagcuucac

SEQ ID NO: 120019 - RNA, 32 nt, Human
cgagggcaccucgcugcuccagccucuggggc

SEQ ID NO: 120020 - RNA, 32 nt, Human
cgagggcacggugcccgcucuaccccgccgca

SEQ ID NO: 120021 - RNA, 32 nt, Human
cgagggcacgucggcccugccucccggaccac

SEQ ID NO: 120022 - RNA, 32 nt, Human
cgagggcacucgccuucugccuucugguuccu

SEQ ID NO: 120023 - RNA, 32 nt, Human
cgagggcacugagcucugccgccuggcucuag

SEQ ID NO: 120024 - RNA, 19 nt, Human
cgagggcacuggcggcggc

SEQ ID NO: 120025 - RNA, 21 nt, Human
cgagggcagacggcgcuggug

SEQ ID NO: 120026 - RNA, 32 nt, Human
cgagggcagcggccgaaggccauucggucccu

SEQ ID NO: 120027 - RNA, 18 nt, Human
cgagggcagcggcggcgg

SEQ ID NO: 120028 - RNA, 24 nt, Human
cgagggcaggccccggacacgcug

SEQ ID NO: 120029 - RNA, 18 nt, Human
cgagggcagggcuggcuc

SEQ ID NO: 120030 - RNA, 21 nt, Human
cgagggcagguuccacccggg

SEQ ID NO: 120031 - RNA, 21 nt, Human
cgagggcagugcgugccgcug

SEQ ID NO: 120032 - RNA, 32 nt, Human
cgagggcauggagcgguuaggagagaaagcca

SEQ ID NO: 120033 - RNA, 32 nt, Human
cgagggccaaccaccgagcaggcacagcacag

SEQ ID NO: 120034 - RNA, 32 nt, Human
cgagggccacuacacuccagccugggugacag

SEQ ID NO: 120035 - RNA, 32 nt, Human
cgagggccauccgcccuccacacgauucagcc

SEQ ID NO: 120036 - RNA, 32 nt, Human
cgagggccaugggccgggucucagggcuugug

SEQ ID NO: 120037 - RNA, 32 nt, Human
cgagggcccagaggaggccgacgugcccgagc

SEQ ID NO: 120038 - RNA, 21 nt, Human
cgagggccccgcccggcgcug

SEQ ID NO: 120039 - RNA, 32 nt, Human
cgagggcccgggaggcggcgggcugcagccgc

SEQ ID NO: 120040 - RNA, 32 nt, Human
cgagggcccuggaagggugaguguagggcccg

SEQ ID NO: 120041 - RNA, 22 nt, Human
cgagggccggaaggcggcgucc

SEQ ID NO: 120042 - RNA, 18 nt, Human
cgagggccgggcgugcgg

SEQ ID NO: 120043 - RNA, 19 nt, Human
cgagggccgggggcggcgg

SEQ ID NO: 120044 - RNA, 32 nt, Human
cgagggccuaguucagugucugccucauggga

SEQ ID NO: 120045 - RNA, 32 nt, Human
cgagggccucuaugcugaccccuacgggcugc

SEQ ID NO: 120046 - RNA, 32 nt, Human
cgagggccugcuggcugagauauggggcugug

SEQ ID NO: 120047 - RNA, 32 nt, Human
cgagggccuggcggagcuuccagcugggacca

SEQ ID NO: 120048 - RNA, 18 nt, Human
cgagggcgaccgcucccc

SEQ ID NO: 120049 - RNA, 23 nt, Human
cgagggcgccccaagccaguuca

SEQ ID NO: 120050 - RNA, 18 nt, Human
cgagggcgcgggcggcgg

SEQ ID NO: 120051 - RNA, 32 nt, Human
cgagggcggcggcgacuggagcuucauugacu

SEQ ID NO: 120052 - RNA, 18 nt, Human
cgagggcggcggcggcgg

SEQ ID NO: 120053 - RNA, 18 nt, Human
cgagggcggcggggacgg

SEQ ID NO: 120054 - RNA, 17 nt, Human
cgagggcggcucuggcu

SEQ ID NO: 120055 - RNA, 32 nt, Human
cgagggcugccuggcgcugcgggcggcgggcc

SEQ ID NO: 120056 - RNA, 18 nt, Human
cgagggcugcggcgccgg

SEQ ID NO: 120057 - RNA, 32 nt, Human
cgagggcuggccugagacgggacucccgguuc

SEQ ID NO: 120058 - RNA, 22 nt, Human
cgagggcugggcagggaggcgc

SEQ ID NO: 120059 - RNA, 22 nt, Human
cgagggcugggcgcggggccgg

SEQ ID NO: 120060 - RNA, 22 nt, Human
cgagggcugugaaagcgguuua

SEQ ID NO: 120061 - RNA, 21 nt, Human
cgagggcuucgccggggccgg

SEQ ID NO: 120062 - RNA, 20 nt, Human
cgaggggaaaauggcggcgg

SEQ ID NO: 120063 - RNA, 20 nt, Human
cgaggggaagauggcggcgg

SEQ ID NO: 120064 - RNA, 32 nt, Human
cgaggggagcgcuccauugcuguggcuccugc

SEQ ID NO: 120065 - RNA, 21 nt, Human
cgaggggagcucccacccagg

SEQ ID NO: 120066 - RNA, 32 nt, Human
cgaggggagcugggaccuccucugccacuccc

SEQ ID NO: 120067 - RNA, 32 nt, Human
cgaggggaggaggaggaggaggagaggagcag

SEQ ID NO: 120068 - RNA, 23 nt, Human
cgaggggaggcggagacggagga

SEQ ID NO: 120069 - RNA, 32 nt, Human
cgaggggaguggaucacuugaggucaggaguu

SEQ ID NO: 120070 - RNA, 32 nt, Human
cgaggggauguugcugucaggucugagucggu

SEQ ID NO: 120071 - RNA, 32 nt, Human
cgaggggcacccuuccucugugccccaguggg

SEQ ID NO: 120072 - RNA, 32 nt, Human
cgaggggcagcacaggguggugcaguggguga

SEQ ID NO: 120073 - RNA, 22 nt, Human
cgaggggcaguuggcagcuuca

SEQ ID NO: 120074 - RNA, 32 nt, Human
cgaggggcccguucaugagaagaggaccuccu

SEQ ID NO: 120075 - RNA, 32 nt, Human
cgaggggcugcaggagggcucugugcugcgug

SEQ ID NO: 120076 - RNA, 18 nt, Human
cgaggggcuggguggcgg

SEQ ID NO: 120077 - RNA, 32 nt, Human
cgaggggcuucauaccagcugaagagcgacaa

SEQ ID NO: 120078 - RNA, 32 nt, Human
cgagggggaagcgaaggaaggggaagaggaag

SEQ ID NO: 120079 - RNA, 32 nt, Human
cgagggggagaaagggagagagggagggggag

SEQ ID NO: 120080 - RNA, 32 nt, Human
cgagggggaggccagugucuguugucugcgag

SEQ ID NO: 120081 - RNA, 32 nt, Human
cgagggggcccucaggcccacccuggcugucc

SEQ ID NO: 120082 - RNA, 18 nt, Human
cgagggggcgagcggugg

SEQ ID NO: 120083 - RNA, 32 nt, Human
cgagggggcugggccuaucaggaggacacagg

SEQ ID NO: 120084 - RNA, 21 nt, Human
cgaggggggccaguagcggcc

SEQ ID NO: 120085 - RNA, 20 nt, Human
cgagggggugaguggcuuca

SEQ ID NO: 120086 - RNA, 32 nt, Human
cgaggggguguccgguccugcccauccgauac

SEQ ID NO: 120087 - RNA, 32 nt, Human
cgaggggugcuggccuccccaggguuugccuu

SEQ ID NO: 120088 - RNA, 32 nt, Human
cgagggguucgaggcaggugagagcauccugc

SEQ ID NO: 120089 - RNA, 32 nt, Human
cgagggguuggaggaauuaaaagaauggaggu

SEQ ID NO: 120090 - RNA, 32 nt, Human
cgaggguaggcagugggcugggccaccguggg

SEQ ID NO: 120091 - RNA, 32 nt, Human
cgagggucccugcaggcucccugggcagggag

SEQ ID NO: 120092 - RNA, 32 nt, Human
cgagggucuguauaucacagagccaaagacaa

SEQ ID NO: 120093 - RNA, 32 nt, Human
cgagggugaugcuggcugcucuucugaacaaa

SEQ ID NO: 120094 - RNA, 32 nt, Human
cgaggguggagugcaguggcacaaucucagcu

SEQ ID NO: 120095 - RNA, 32 nt, Human
cgaggguggcacagccuggcuugagugguggc

SEQ ID NO: 120096 - RNA, 32 nt, Human
cgaggguggggcagagguugggaagauggcgu

SEQ ID NO: 120097 - RNA, 32 nt, Human
cgaggguuaccugagacaaaccugggagccuc

SEQ ID NO: 120098 - RNA, 32 nt, Human
cgaggguugcuuuuauacucagaauggaaaua

SEQ ID NO: 120099 - RNA, 32 nt, Human
cgagguacugccggggcugagcucucauggag

SEQ ID NO: 120100 - RNA, 32 nt, Human
cgagguagacagauggcuugagcucaggaguu

SEQ ID NO: 120101 - RNA, 32 nt, Human
cgagguagagggguggggguuggugggcuguc

SEQ ID NO: 120102 - RNA, 32 nt, Human
cgagguagaggguuggggguuggugggcuguc

SEQ ID NO: 120103 - RNA, 32 nt, Human
cgagguagggagaucaagaccauccuggcuaa

SEQ ID NO: 120104 - RNA, 32 nt, Human
cgaggucaagagaucaagaccagccugaccaa

SEQ ID NO: 120105 - RNA, 32 nt, Human
cgaggucaagagaucaagaccauccuggccaa

SEQ ID NO: 120106 - RNA, 32 nt, Human
cgaggucaagaguucaagagcagccuggccaa

SEQ ID NO: 120107 - RNA, 32 nt, Human
cgaggucagaagaucaagaccauccuggccaa

SEQ ID NO: 120108 - RNA, 32 nt, Human
cgaggucagaaguccaagaccagccuggccaa

SEQ ID NO: 120109 - RNA, 32 nt, Human
cgaggucagaaguucaagaccagccuagccaa

SEQ ID NO: 120110 - RNA, 32 nt, Human
cgaggucagaggggaggaggacucuggagcug

SEQ ID NO: 120111 - RNA, 32 nt, Human
cgaggucagcaaacuaucauguucuuauguaa

SEQ ID NO: 120112 - RNA, 32 nt, Human
cgaggucaggaauucaagaccagccuggccaa

SEQ ID NO: 120113 - RNA, 32 nt, Human
cgaggucaggagaucaagaccauccuggcuaa

SEQ ID NO: 120114 - RNA, 32 nt, Human
cgaggucaggagaucaagaccauccuggcuau

SEQ ID NO: 120115 - RNA, 32 nt, Human
cgaggucaggagaucaagaccauucuggccaa

SEQ ID NO: 120116 - RNA, 32 nt, Human
cgaggucaggagaucgagaccaaccuggcuaa

SEQ ID NO: 120117 - RNA, 32 nt, Human
cgaggucaggaguucaaaaccagccugaccaa

SEQ ID NO: 120118 - RNA, 32 nt, Human
cgaggucaggaguucaaaaccagccuguccaa

SEQ ID NO: 120119 - RNA, 32 nt, Human
cgaggucaggaguucaagaccacccuggccaa

SEQ ID NO: 120120 - RNA, 32 nt, Human
cgaggucaggaguucaagaccagccuggccaa

SEQ ID NO: 120121 - RNA, 32 nt, Human
cgaggucaggaguucaagaccagccuugccaa

SEQ ID NO: 120122 - RNA, 26 nt, Human
cgaggucaggaguucaagaccaggcu

SEQ ID NO: 120123 - RNA, 23 nt, Human
cgaggucaggaguucgagaccag

SEQ ID NO: 120124 - RNA, 26 nt, Human
cgaggucaggaguucgagaccagacu

SEQ ID NO: 120125 - RNA, 26 nt, Human
cgaggucaggaguucgagaccaggcu

SEQ ID NO: 120126 - RNA, 26 nt, Human
cgaggucaggaguuugagaccagacu

SEQ ID NO: 120127 - RNA, 32 nt, Human
cgaggucagggguucaagaccagccugaccaa

SEQ ID NO: 120128 - RNA, 32 nt, Human
cgaggucaugccacugcacuccagccuggccu

SEQ ID NO: 120129 - RNA, 32 nt, Human
cgaggucaugccacugcacugcagccugggcg

SEQ ID NO: 120130 - RNA, 32 nt, Human
cgagguccaagcucaggucgcccugcccccua

SEQ ID NO: 120131 - RNA, 32 nt, Human
cgaggucccgccacugcacuccagccugggug

SEQ ID NO: 120132 - RNA, 23 nt, Human
cgagguccgacagcgcccggccc

SEQ ID NO: 120133 - RNA, 32 nt, Human
cgagguccucaaggacaacugagagaaggucc

SEQ ID NO: 120134 - RNA, 32 nt, Human
cgaggucgcaccacugcacuccagccugggug

SEQ ID NO: 120135 - RNA, 32 nt, Human
cgaggucgcaccacugcacuccagucugggua

SEQ ID NO: 120136 - RNA, 32 nt, Human
cgaggucgcaccacugcacugcagccugggug

SEQ ID NO: 120137 - RNA, 32 nt, Human
cgaggucgcgccacugcacuccagccugggag

SEQ ID NO: 120138 - RNA, 32 nt, Human
cgaggucgcgccacugcacuucagccugggug

SEQ ID NO: 120139 - RNA, 32 nt, Human
cgaggucgcuccauugcacuccagccugggca

SEQ ID NO: 120140 - RNA, 32 nt, Human
cgaggucgggacggcaccaccaaacucaccuc

SEQ ID NO: 120141 - RNA, 32 nt, Human
cgaggucgugccacugcacuccagccugggcg

SEQ ID NO: 120142 - RNA, 32 nt, Human
cgaggucgugccauugcacuccagccugggug

SEQ ID NO: 120143 - RNA, 32 nt, Human
cgaggucugggaacacccugggugaggccugg

SEQ ID NO: 120144 - RNA, 32 nt, Human
cgaggugaaaggaucacuugagcccaggaauu

SEQ ID NO: 120145 - RNA, 32 nt, Human
cgaggugaggaguucgagaccaaccugguaaa

SEQ ID NO: 120146 - RNA, 32 nt, Human
cgaggugaggaucagccuuuuccagcauccug

SEQ ID NO: 120147 - RNA, 20 nt, Human
cgaggugauagaggcggcgg

SEQ ID NO: 120148 - RNA, 32 nt, Human
cgaggugcaaauucauuucauggugacugacc

SEQ ID NO: 120149 - RNA, 32 nt, Human
cgaggugcauggaucacuugaggucaggaguu

SEQ ID NO: 120150 - RNA, 22 nt, Human
cgaggugccccagaggugggcc

SEQ ID NO: 120151 - RNA, 22 nt, Human
cgaggugccuccugcagugacc

SEQ ID NO: 120152 - RNA, 32 nt, Human
cgaggugccugggaugcuucuccccuuccgcg

SEQ ID NO: 120153 - RNA, 21 nt, Human
cgaggugccuucuucagggcc

SEQ ID NO: 120154 - RNA, 32 nt, Human
cgaggugcuaugucucaggccuguaaucccag

SEQ ID NO: 120155 - RNA, 22 nt, Human
cgaggugcuccaguuggaggcu

SEQ ID NO: 120156 - RNA, 32 nt, Human
cgagguggaaguggagcccagugagguggaag

SEQ ID NO: 120157 - RNA, 23 nt, Human
cgagguggaccgcacggcugcag

SEQ ID NO: 120158 - RNA, 32 nt, Human
cgagguggagagcaucuucccugacuucuuug

SEQ ID NO: 120159 - RNA, 32 nt, Human
cgagguggaguguggcugggcccugagugucc

SEQ ID NO: 120160 - RNA, 32 nt, Human
cgagguggauagaucacuugaggucaggaguu

SEQ ID NO: 120161 - RNA, 32 nt, Human
cgagguggaucugaggcccagagugggcaaag

SEQ ID NO: 120162 - RNA, 32 nt, Human
cgagguggcaggcaccuguaaucccagccacc

SEQ ID NO: 120163 - RNA, 32 nt, Human
cgagguggcccggaccgcagugccccaagaga

SEQ ID NO: 120164 - RNA, 32 nt, Human
cgagguggcucaagucuguaaucccagcgcuu

SEQ ID NO: 120165 - RNA, 32 nt, Human
cgagguggcucacaccuauaaucccagcacuu

SEQ ID NO: 120166 - RNA, 32 nt, Human
cgagguggcucacaccuguaaucccagcacuu

SEQ ID NO: 120167 - RNA, 32 nt, Human
cgagguggcucacgccuguaaucccagcacuu

SEQ ID NO: 120168 - RNA, 32 nt, Human
cgagguggcucacgccuguaaucccaguaguu

SEQ ID NO: 120169 - RNA, 32 nt, Human
cgagguggcucacgccuguaaucucagcacuu

SEQ ID NO: 120170 - RNA, 32 nt, Human
cgagguggcucaucccuguaaucccagugcuu

SEQ ID NO: 120171 - RNA, 32 nt, Human
cgagguggcucaugccuguaaucccagcacuu

SEQ ID NO: 120172 - RNA, 32 nt, Human
cgagguggcucaugccuguaaucucagcacuu

SEQ ID NO: 120173 - RNA, 32 nt, Human
cgaggugggaagaucacuugaggucaggaguu

SEQ ID NO: 120174 - RNA, 32 nt, Human
cgaggugggaagaucccuugagcccaggaguu

SEQ ID NO: 120175 - RNA, 32 nt, Human
cgaggugggagaaucacuugaaucccaggaga

SEQ ID NO: 120176 - RNA, 32 nt, Human
cgaggugggagaaucacuugacgccaagaguu

SEQ ID NO: 120177 - RNA, 32 nt, Human
cgaggugggaggagcgcuugagccgaggaguu

SEQ ID NO: 120178 - RNA, 32 nt, Human
cgaggugggaggaucaccugaggucaggaguu

SEQ ID NO: 120179 - RNA, 32 nt, Human
cgaggugggaggaucacuggagcucgggaguu

SEQ ID NO: 120180 - RNA, 32 nt, Human
cgaggugggaggaucacuugagcacaggaguu

SEQ ID NO: 120181 - RNA, 32 nt, Human
cgaggugggaggaucacuugagcccaggaguu

SEQ ID NO: 120182 - RNA, 32 nt, Human
cgaggugggaggaucauuggaucucaggaguu

SEQ ID NO: 120183 - RNA, 32 nt, Human
cgaggugggaggaucgcuugagcccaggaguc

SEQ ID NO: 120184 - RNA, 32 nt, Human
cgaggugggaggaucgcuugagcccaggaguu

SEQ ID NO: 120185 - RNA, 32 nt, Human
cgaggugggaggaucucuugggcccaggagau

SEQ ID NO: 120186 - RNA, 32 nt, Human
cgaggugggaggauugcuugagaccaggaguu

SEQ ID NO: 120187 - RNA, 32 nt, Human
cgaggugggaggauugcuugagcucaugaguu

SEQ ID NO: 120188 - RNA, 32 nt, Human
cgaggugggaggauugcuugaggccaggaguu

SEQ ID NO: 120189 - RNA, 32 nt, Human
cgaggugggaggauugcuugaguccaggaauu

SEQ ID NO: 120190 - RNA, 32 nt, Human
cgaggugggaggcaugggaaacagugcaguga

SEQ ID NO: 120191 - RNA, 32 nt, Human
cgaggugggagggucuucugagcccagggagg

SEQ ID NO: 120192 - RNA, 32 nt, Human
cgaggugggcagaucacuugagaucaggacca

SEQ ID NO: 120193 - RNA, 32 nt, Human
cgaggugggcagaucacuugagcccagcaguu

SEQ ID NO: 120194 - RNA, 32 nt, Human
cgaggugggcagaucacuugagcucaggagcu

SEQ ID NO: 120195 - RNA, 32 nt, Human
cgaggugggcagaucacuugaggucaggaguu

SEQ ID NO: 120196 - RNA, 32 nt, Human
cgaggugggcagaucacuugaggucggggguu

SEQ ID NO: 120197 - RNA, 32 nt, Human
cgaggugggcagaucacuugaguucaagacca

SEQ ID NO: 120198 - RNA, 32 nt, Human
cgaggugggcagguaacuugagcccagcaguu

SEQ ID NO: 120199 - RNA, 32 nt, Human
cgaggugggcagguaggugggcggacggccgc

SEQ ID NO: 120200 - RNA, 32 nt, Human
cgaggugggcaggucacuugagcccagcaguu

SEQ ID NO: 120201 - RNA, 32 nt, Human
cgaggugggcggaucacuugaggucaggaguu

SEQ ID NO: 120202 - RNA, 32 nt, Human
cgaggugggcggaucacuugaggucgggaguu

SEQ ID NO: 120203 - RNA, 32 nt, Human
cgagguggguagaucgcuugagcucaggaguu

SEQ ID NO: 120204 - RNA, 32 nt, Human
cgagguggguggaucacuugaggucaggaguu

SEQ ID NO: 120205 - RNA, 32 nt, Human
cgagguggguggaucacuuggggucaggguuu

SEQ ID NO: 120206 - RNA, 25 nt, Human
cgagguggucaugccuguaauccca

SEQ ID NO: 120207 - RNA, 32 nt, Human
cgaggugguggagaaggucuagccaggcucca

SEQ ID NO: 120208 - RNA, 32 nt, Human
cgagguguccgcggcagaccacacagaccguc

SEQ ID NO: 120209 - RNA, 32 nt, Human
cgaggugugaagggaaggcaugcacugugcau

SEQ ID NO: 120210 - RNA, 32 nt, Human
cgaggugugaggaucacccgaggucaggaguu

SEQ ID NO: 120211 - RNA, 32 nt, Human
cgagguuauggcagugacuuucagcugagacc

SEQ ID NO: 120212 - RNA, 32 nt, Human
cgagguucuccaggaccuuagguuugaugcgg

SEQ ID NO: 120213 - RNA, 32 nt, Human
cgagguugaggcaggagaauugcuugaaccca

SEQ ID NO: 120214 - RNA, 20 nt, Human
cgagguugaggcgggcagcg

SEQ ID NO: 120215 - RNA, 32 nt, Human
cgagguugcaccauuguacuccagccugggca

SEQ ID NO: 120216 - RNA, 32 nt, Human
cgagguugcgccacugcacucuagccugggcu

SEQ ID NO: 120217 - RNA, 32 nt, Human
cgagguugcgcuacugcacuccagccuggaca

SEQ ID NO: 120218 - RNA, 32 nt, Human
cgagguuggaggaucacuugaguccaggaguc

SEQ ID NO: 120219 - RNA, 32 nt, Human
cgagguuggagugcagugguaugaucauagcu

SEQ ID NO: 120220 - RNA, 16 nt, Human
cgagguugggcugcag

SEQ ID NO: 120221 - RNA, 32 nt, Human
cgagguuggucagggcuguccuggagaagugc

SEQ ID NO: 120222 - RNA, 32 nt, Human
cgagguugugccacugcacugcagccugggcu

SEQ ID NO: 120223 - RNA, 32 nt, Human
cgagguugugucauugcacuccagccugggga

SEQ ID NO: 120224 - RNA, 32 nt, Human
cgagguuugcuggggugaggcagcggcgcggc

SEQ ID NO: 120225 - RNA, 32 nt, Human
cgaguaaaaggaggaggaagggcuggggagaa

SEQ ID NO: 120226 - RNA, 22 nt, Human
cgaguaccccagugaccagagu

SEQ ID NO: 120227 - RNA, 32 nt, Human
cgaguaccuggaaaugggagcagguuucugcc

SEQ ID NO: 120228 - RNA, 32 nt, Human
cgaguagcccaagguuuccacccaucugccag

SEQ ID NO: 120229 - RNA, 32 nt, Human
cgaguagccggcaggucagcuugagcuggaaa

SEQ ID NO: 120230 - RNA, 32 nt, Human
cgaguagcugggacuacaggugugggccagug

SEQ ID NO: 120231 - RNA, 32 nt, Human
cgaguagcugggauuacaggaugacgcggcau

SEQ ID NO: 120232 - RNA, 32 nt, Human
cgaguagcugggauuacagggugaagagggaa

SEQ ID NO: 120233 - RNA, 32 nt, Human
cgaguagcuuucuaauuggucuccuuguacuc

SEQ ID NO: 120234 - RNA, 32 nt, Human
cgaguauaaaaauuagggucaaccagaaaucu

SEQ ID NO: 120235 - RNA, 32 nt, Human
cgaguauacugcccaggccugccuguucccau

SEQ ID NO: 120236 - RNA, 32 nt, Human
cgaguauggcugaccuuccugcagagagagga

SEQ ID NO: 120237 - RNA, 32 nt, Human
cgagucaacaaccagccuguucugcuacuggu

SEQ ID NO: 120238 - RNA, 32 nt, Human
cgagucaccaugggcagcgucaguagccucau

SEQ ID NO: 120239 - RNA, 32 nt, Human
cgagucacccaccgcccuccuccuacucaggg

SEQ ID NO: 120240 - RNA, 32 nt, Human
cgagucaccguguaucuggagaccaugugugu

SEQ ID NO: 120241 - RNA, 32 nt, Human
cgagucacgccacugcacuccagccuggguga

SEQ ID NO: 120242 - RNA, 32 nt, Human
cgagucacuacugccugccugccugccugcua

SEQ ID NO: 120243 - RNA, 21 nt, Human
cgagucacuccauuuaucuua

SEQ ID NO: 120244 - RNA, 32 nt, Human
cgagucaguggcccguucaaccugcucugcag

SEQ ID NO: 120245 - RNA, 32 nt, Human
cgagucaguuaauccauguuugcccauuccua

SEQ ID NO: 120246 - RNA, 32 nt, Human
cgaguccacaguucugaaacauguggcuaccu

SEQ ID NO: 120247 - RNA, 32 nt, Human
cgaguccacgccugccugggccugugcuguca

SEQ ID NO: 120248 - RNA, 32 nt, Human
cgaguccagcagcugcgcaccauccgcgaaug

SEQ ID NO: 120249 - RNA, 32 nt, Human
cgaguccaggaauuagagguugcagugaggua

SEQ ID NO: 120250 - RNA, 32 nt, Human
cgaguccauguucccaagggcagcccuucucu

SEQ ID NO: 120251 - RNA, 32 nt, Human
cgaguccccaggagaggggacuccuaagaagc

SEQ ID NO: 120252 - RNA, 32 nt, Human
cgaguccccuccaccucagcucccaguccuug

SEQ ID NO: 120253 - RNA, 32 nt, Human
cgagucccuccuccucuucucccaugccuucu

SEQ ID NO: 120254 - RNA, 32 nt, Human
cgaguccgggcagagggguccgcgggcucugg

SEQ ID NO: 120255 - RNA, 23 nt, Human
cgaguccguggugcagcugcagc

SEQ ID NO: 120256 - RNA, 32 nt, Human
cgaguccuccuccuccgagcugacuucacugg

SEQ ID NO: 120257 - RNA, 32 nt, Human
cgaguccugaacacagguucugauguggagga

SEQ ID NO: 120258 - RNA, 32 nt, Human
cgaguccugcaagcuccuagugucuccucugg

SEQ ID NO: 120259 - RNA, 18 nt, Human
cgaguccuggggcggcgg

SEQ ID NO: 120260 - RNA, 32 nt, Human
cgaguccuucagugacaaaggccuuugcuguu

SEQ ID NO: 120261 - RNA, 32 nt, Human
cgagucgccccuggaagcagauucccauugag

SEQ ID NO: 120262 - RNA, 32 nt, Human
cgagucgcugggauugcagauaaggaaauuga

SEQ ID NO: 120263 - RNA, 32 nt, Human
cgagucuacacuuauugaaugccugcaaaauc

SEQ ID NO: 120264 - RNA, 32 nt, Human
cgagucuccagcccaaaccugccuuccuagcc

SEQ ID NO: 120265 - RNA, 32 nt, Human
cgagucuccagcccaaaccugccuuccuagcu

SEQ ID NO: 120266 - RNA, 32 nt, Human
cgagucuccagcuccucucccuuccaccuguu

SEQ ID NO: 120267 - RNA, 21 nt, Human
cgagucucucauuuucucuug

SEQ ID NO: 120268 - RNA, 32 nt, Human
cgagucucucauuuucucuuguggaccaguua

SEQ ID NO: 120269 - RNA, 32 nt, Human
cgagucuuuggaugggaggaggacgaggacuu

SEQ ID NO: 120270 - RNA, 32 nt, Human
cgagugaagaauucagcagcuaaguggaaguu

SEQ ID NO: 120271 - RNA, 19 nt, Human
cgagugacagcggcggugg

SEQ ID NO: 120272 - RNA, 32 nt, Human
cgagugacccuccgguggacauggguggggcc

SEQ ID NO: 120273 - RNA, 32 nt, Human
cgagugagcgggugugggaugaauggcaggcc

SEQ ID NO: 120274 - RNA, 17 nt, Human
cgagugaggccucugug

SEQ ID NO: 120275 - RNA, 32 nt, Human
cgagugauuggugagcugggagaggacgggug

SEQ ID NO: 120276 - RNA, 32 nt, Human
cgagugcaccacugcacuccagccugggcaac

SEQ ID NO: 120277 - RNA, 23 nt, Human
cgagugcaccuacacccgcgccc

SEQ ID NO: 120278 - RNA, 22 nt, Human
cgagugcagaggaaaaccagaa

SEQ ID NO: 120279 - RNA, 32 nt, Human
cgagugcauccagcagcaguagcagggccgcg

SEQ ID NO: 120280 - RNA, 32 nt, Human
cgagugcauuuuuggggagauaguaaauguuu

SEQ ID NO: 120281 - RNA, 32 nt, Human
cgagugcccaucaucauucuccucugcugaca

SEQ ID NO: 120282 - RNA, 32 nt, Human
cgagugccgcaguggaccuguccccuaccugc

SEQ ID NO: 120283 - RNA, 32 nt, Human
cgagugccuccccucccucccucuguggggga

SEQ ID NO: 120284 - RNA, 32 nt, Human
cgagugccugcucucggcaccuggggcuccau

SEQ ID NO: 120285 - RNA, 32 nt, Human
cgagugcucaccugccccagccuggcucuacc

SEQ ID NO: 120286 - RNA, 31 nt, Human
cgagugcuccuuccucaucuaccucagugag

SEQ ID NO: 120287 - RNA, 32 nt, Human
cgagugcugacgggaaaggcagcccuuugaca

SEQ ID NO: 120288 - RNA, 22 nt, Human
cgagugcugggcccgccucccc

SEQ ID NO: 120289 - RNA, 32 nt, Human
cgagugcugugguuucaugggccucugcuuua

SEQ ID NO: 120290 - RNA, 32 nt, Human
cgaguggagaagaucagaaagcuaccaaacac

SEQ ID NO: 120291 - RNA, 26 nt, Human
cgaguggaugcuagcgccagcgcccg

SEQ ID NO: 120292 - RNA, 32 nt, Human
cgaguggcccuuguaagggucauggaauaauu

SEQ ID NO: 120293 - RNA, 32 nt, Human
cgaguggccugugauggauggcuggccugugg

SEQ ID NO: 120294 - RNA, 32 nt, Human
cgaguggccugugauggaugggugcucugugg

SEQ ID NO: 120295 - RNA, 32 nt, Human
cgagugggaggaacugccuaacaacaguugaa

SEQ ID NO: 120296 - RNA, 32 nt, Human
cgagugggaguuaaagcuuccagugagggcag

SEQ ID NO: 120297 - RNA, 32 nt, Human
cgagugggcauccugucaucaucuccacuguc

SEQ ID NO: 120298 - RNA, 32 nt, Human
cgaguggggagggagaggccaguuccugccug

SEQ ID NO: 120299 - RNA, 32 nt, Human
cgagugggggcuggccacccagccccacagcc

SEQ ID NO: 120300 - RNA, 32 nt, Human
cgaguggggucugggaacuugaaggaaggagu

SEQ ID NO: 120301 - RNA, 31 nt, Human
cgaguggguguagcagaaaaaggcugugcug

SEQ ID NO: 120302 - RNA, 32 nt, Human
cgaguggucaccaaacaggguggcuccccagg

SEQ ID NO: 120303 - RNA, 24 nt, Human
cgaguggugggcgcagcaguuccu

SEQ ID NO: 120304 - RNA, 31 nt, Human
cgaguguaaguagcgcccaugccgggagccg

SEQ ID NO: 120305 - RNA, 32 nt, Human
cgagugucagagcuggagagugaugugaagca

SEQ ID NO: 120306 - RNA, 18 nt, Human
cgagugucaggggggcgg

SEQ ID NO: 120307 - RNA, 32 nt, Human
cgaguguccaggcugaagucagggcccggcca

SEQ ID NO: 120308 - RNA, 32 nt, Human
cgaguguccaucucuuaguuagcuaccuuaac

SEQ ID NO: 120309 - RNA, 32 nt, Human
cgaguguguaugugcgggcgagaagauggcgg

SEQ ID NO: 120310 - RNA, 32 nt, Human
cgagugugucaggguguuugugccucauaaca

SEQ ID NO: 120311 - RNA, 32 nt, Human
cgaguguugguagcaacaggacaaguugggaa

SEQ ID NO: 120312 - RNA, 32 nt, Human
cgaguuacugcacuccagccugggugacaaga

SEQ ID NO: 120313 - RNA, 24 nt, Human
cgaguucaaacaauucuccugccu

SEQ ID NO: 120314 - RNA, 24 nt, Human
cgaguucaagcaauucuccugccu

SEQ ID NO: 120315 - RNA, 24 nt, Human
cgaguucaagcgauucuccugccu

SEQ ID NO: 120316 - RNA, 24 nt, Human
cgaguucaagcgauucuugugcuu

SEQ ID NO: 120317 - RNA, 24 nt, Human
cgaguucaagugaugcuccugcuu

SEQ ID NO: 120318 - RNA, 24 nt, Human
cgaguucaagugauucuccugccu

SEQ ID NO: 120319 - RNA, 24 nt, Human
cgaguucaagugauucuccuggcu

SEQ ID NO: 120320 - RNA, 24 nt, Human
cgaguucaagugauuuuccugccu

SEQ ID NO: 120321 - RNA, 32 nt, Human
cgaguucaggaguucaagaccagccuggccaa

SEQ ID NO: 120322 - RNA, 32 nt, Human
cgaguucaugcaauugcacuccagccugggca

SEQ ID NO: 120323 - RNA, 32 nt, Human
cgaguuccaucuacaccggagagggguaggca

SEQ ID NO: 120324 - RNA, 32 nt, Human
cgaguucccagaguuucccucuguggugcccu

SEQ ID NO: 120325 - RNA, 32 nt, Human
cgaguuccuauguuauguuaggugccuuaugu

SEQ ID NO: 120326 - RNA, 32 nt, Human
cgaguucuccugcuggugaggcuccggaucuc

SEQ ID NO: 120327 - RNA, 32 nt, Human
cgaguucugaugggagagguacagguuggguu

SEQ ID NO: 120328 - RNA, 32 nt, Human
cgaguucuggugagggcccucuucugggaugc

SEQ ID NO: 120329 - RNA, 32 nt, Human
cgaguugcagccagggccagugggaggggguc

SEQ ID NO: 120330 - RNA, 32 nt, Human
cgaguugcagccagggccagugggaggggguu

SEQ ID NO: 120331 - RNA, 32 nt, Human
cgaguugcugacugacccuccaccucagaggu

SEQ ID NO: 120332 - RNA, 32 nt, Human
cgaguuggaggcggugguggcagcaguaggag

SEQ ID NO: 120333 - RNA, 32 nt, Human
cgaguuggccgaggauggaugauuguggcagc

SEQ ID NO: 120334 - RNA, 32 nt, Human
cgaguugggacuagggcuucaauuucacuucu

SEQ ID NO: 120335 - RNA, 32 nt, Human
cgaguugggggcgaucaccugaggucagaauu

SEQ ID NO: 120336 - RNA, 32 nt, Human
cgaguugucacucaccucacacgccccagcaa

SEQ ID NO: 120337 - RNA, 32 nt, Human
cgaguuguuccgggggacugaggucucuugca

SEQ ID NO: 120338 - RNA, 32 nt, Human
cgaguuuauaccaaggaguugaauugcugcgu

SEQ ID NO: 120339 - RNA, 32 nt, Human
cgaguuucccaggaguuagagggaugcgaggc

SEQ ID NO: 120340 - RNA, 32 nt, Human
cgaguuuccggaaagggugacgggggaagggc

SEQ ID NO: 120341 - RNA, 32 nt, Human
cgaguuucugcgcuuccuucucccucucucca

SEQ ID NO: 120342 - RNA, 32 nt, Human
cgaguuugggccacugcacucuagccuggcaa

SEQ ID NO: 120343 - RNA, 32 nt, Human
cgauaaauaugcagagcggaggcuucgcgcag

SEQ ID NO: 120344 - RNA, 32 nt, Human
cgauaaaucagacagaacaguuaauccucaau

SEQ ID NO: 120345 - RNA, 32 nt, Human
cgauaacugaggacuugccuuggaaauggaau

SEQ ID NO: 120346 - RNA, 32 nt, Human
cgauaagaaaugcucgggugucuugggcaccu

SEQ ID NO: 120347 - RNA, 32 nt, Human
cgauaaggagcugaaggcaggagccgccgcca

SEQ ID NO: 120348 - RNA, 32 nt, Human
cgauaaggagucaggccagggcgggaugacac

SEQ ID NO: 120349 - RNA, 32 nt, Human
cgauaagggaggcggagugugcggagaggagg

SEQ ID NO: 120350 - RNA, 32 nt, Human
cgauaaggucuucaccuuugaccccagcagug

SEQ ID NO: 120351 - RNA, 32 nt, Human
cgauaaguauuccacuccucccuuuuugccag

SEQ ID NO: 120352 - RNA, 32 nt, Human
cgauacacaaauggucaauauguaaagcaggg

SEQ ID NO: 120353 - RNA, 20 nt, Human
cgauacauauacagccuaca

SEQ ID NO: 120354 - RNA, 32 nt, Human
cgauacucagcccucugcgaccauggcugugc

SEQ ID NO: 120355 - RNA, 32 nt, Human
cgauacuguuugucuuucuacuguuucauccc

SEQ ID NO: 120356 - RNA, 32 nt, Human
cgauagaaucuugggcaucuuggcuuucggau

SEQ ID NO: 120357 - RNA, 32 nt, Human
cgauagacuaugaaugcuauuucuagaaaaag

SEQ ID NO: 120358 - RNA, 32 nt, Human
cgauagagaugggaucucacuagguugcccag

SEQ ID NO: 120359 - RNA, 32 nt, Human
cgauagauggugcugggauaagcagcucaguc

SEQ ID NO: 120360 - RNA, 32 nt, Human
cgauagauucaagauggagagauaagguuaag

SEQ ID NO: 120361 - RNA, 32 nt, Human
cgauagccgagaacaggagcaagaacgaggaa

SEQ ID NO: 120362 - RNA, 31 nt, Human
cgauaggaagcugggccucagaggggccugg

SEQ ID NO: 120363 - RNA, 32 nt, Human
cgauagugaaauccuucucuauaccuauguuu

SEQ ID NO: 120364 - RNA, 32 nt, Human
cgauaguguuucuaauauuuuguauuuuuauu

SEQ ID NO: 120365 - RNA, 32 nt, Human
cgauaguuaggcguuggagggaagagagacca

SEQ ID NO: 120366 - RNA, 32 nt, Human
cgauauaccccugguauuuugucaacgucuuu

SEQ ID NO: 120367 - RNA, 32 nt, Human
cgauaucgugccacugcacuccagccuggagg

SEQ ID NO: 120368 - RNA, 32 nt, Human
cgauaucugaucccauuccucaucucccaccc

SEQ ID NO: 120369 - RNA, 29 nt, Human
cgauauggaagaggagggcaagaagggca

SEQ ID NO: 120370 - RNA, 29 nt, Human
cgauauggagccaggggccggcggccgaa

SEQ ID NO: 120371 - RNA, 32 nt, Human
cgauaugugaaggacuacagaaucaccuccuc

SEQ ID NO: 120372 - RNA, 32 nt, Human
cgaucaaaaguuacacaguacacagaugacaa

SEQ ID NO: 120373 - RNA, 31 nt, Human
cgaucaaagagacaccuggcucaaggaccaa

SEQ ID NO: 120374 - RNA, 32 nt, Human
cgaucaaagagacagauccacacugcugccga

SEQ ID NO: 120375 - RNA, 32 nt, Human
cgaucaagccacugcacuccagccugggcgac

SEQ ID NO: 120376 - RNA, 32 nt, Human
cgaucaaggucaagagaaagaaaacgaaaguc

SEQ ID NO: 120377 - RNA, 32 nt, Human
cgaucacaccacaguacuccagccuaggugac

SEQ ID NO: 120378 - RNA, 32 nt, Human
cgaucacaccacugcacucuggccugcaugca

SEQ ID NO: 120379 - RNA, 32 nt, Human
cgaucacggggagccccucgacugccucccag

SEQ ID NO: 120380 - RNA, 32 nt, Human
cgaucacuacugugggcugaaggaugaccauc

SEQ ID NO: 120381 - RNA, 32 nt, Human
cgaucaggccugacugugccagggagcccaac

SEQ ID NO: 120382 - RNA, 32 nt, Human
cgaucagguggucccucacucccugacccagg

SEQ ID NO: 120383 - RNA, 32 nt, Human
cgaucaguuuucuucuucugguucaggugaga

SEQ ID NO: 120384 - RNA, 32 nt, Human
cgaucaugccacugcacuccacucugggcaac

SEQ ID NO: 120385 - RNA, 19 nt, Human
cgaucauggcucacugcag

SEQ ID NO: 120386 - RNA, 30 nt, Human
cgaucauggggcuuuguaagugccccaaga

SEQ ID NO: 120387 - RNA, 32 nt, Human
cgauccaggaguagggagcggaagaaaucgag

SEQ ID NO: 120388 - RNA, 32 nt, Human
cgauccaggguuucucuuuccugagucugaaa

SEQ ID NO: 120389 - RNA, 32 nt, Human
cgauccccgagcaggagguggagcagcuggac

SEQ ID NO: 120390 - RNA, 32 nt, Human
cgaucccuaggugaggagaagcggcuugaagc

SEQ ID NO: 120391 - RNA, 32 nt, Human
cgaucccuccacccucuaccgagaucugccug

SEQ ID NO: 120392 - RNA, 32 nt, Human
cgaucccuccccucagccuccugaguagcuga

SEQ ID NO: 120393 - RNA, 32 nt, Human
cgauccggccggugaggcccaggcugggaggc

SEQ ID NO: 120394 - RNA, 32 nt, Human
cgauccggcgcgggucuuccaccacaaugccu

SEQ ID NO: 120395 - RNA, 32 nt, Human
cgauccuagcuacucaggaggcugaaguggga

SEQ ID NO: 120396 - RNA, 32 nt, Human
cgauccuccagccucggccucucaaagugcug

SEQ ID NO: 120397 - RNA, 32 nt, Human
cgauccucccaaaacgcugggauuacagucau

SEQ ID NO: 120398 - RNA, 32 nt, Human
cgauccucccacaauaaaggcuucucaauccg

SEQ ID NO: 120399 - RNA, 32 nt, Human
cgauccuccccuuccccuguccuuccuucgug

SEQ ID NO: 120400 - RNA, 32 nt, Human
cgauccuccugccucagccucccaagcaacug

SEQ ID NO: 120401 - RNA, 32 nt, Human
cgauccuccugccucagccuccugaguagcug

SEQ ID NO: 120402 - RNA, 32 nt, Human
cgauccuccugccucagucuccugacuagcug

SEQ ID NO: 120403 - RNA, 32 nt, Human
cgauccuccugccuccgccucccaaagcgcug

SEQ ID NO: 120404 - RNA, 32 nt, Human
cgauccugagguaacggauaaguuuauaccau

SEQ ID NO: 120405 - RNA, 32 nt, Human
cgauccugcacuccagccugggcaacagagag

SEQ ID NO: 120406 - RNA, 31 nt, Human
cgauccugggcucucccuuccaagcuagagg

SEQ ID NO: 120407 - RNA, 32 nt, Human
cgauccuguaguuaaccccacacaagaucugc

SEQ ID NO: 120408 - RNA, 32 nt, Human
cgaucgcaccacugcauucuagccuuagugau

SEQ ID NO: 120409 - RNA, 32 nt, Human
cgaucgcaucacagccaguuuucuuuuggaga

SEQ ID NO: 120410 - RNA, 18 nt, Human
cgaucgcggaggcggcgg

SEQ ID NO: 120411 - RNA, 32 nt, Human
cgaucggcuuuguagcaagauccacaggugau

SEQ ID NO: 120412 - RNA, 32 nt, Human
cgaucgggcaggugguuuugugcagugugugc

SEQ ID NO: 120413 - RNA, 32 nt, Human
cgaucguaccacuacacuccagccugggcaac

SEQ ID NO: 120414 - RNA, 32 nt, Human
cgaucgugccaccauagcuccugcugcugccu

SEQ ID NO: 120415 - RNA, 32 nt, Human
cgaucucacugcaaccucugccucccgggcuu

SEQ ID NO: 120416 - RNA, 32 nt, Human
cgaucucccugccugggcuggcugugaggcca

SEQ ID NO: 120417 - RNA, 32 nt, Human
cgaucuccucuccccuccaauccuauccguga

SEQ ID NO: 120418 - RNA, 32 nt, Human
cgaucuccugaccuugaaucacaagagucuua

SEQ ID NO: 120419 - RNA, 32 nt, Human
cgaucuccuugaaaugccacccccucucucaa

SEQ ID NO: 120420 - RNA, 32 nt, Human
cgaucucggcucacugaaccuccgccucccag

SEQ ID NO: 120421 - RNA, 19 nt, Human
cgaucucggcucacugcag

SEQ ID NO: 120422 - RNA, 32 nt, Human
cgaucucucacugugauuccucuccuuccucc

SEQ ID NO: 120423 - RNA, 32 nt, Human
cgaucugagcagccacaauccagccaaaagag

SEQ ID NO: 120424 - RNA, 32 nt, Human
cgaucugauuccagaagauucuugugagaaau

SEQ ID NO: 120425 - RNA, 32 nt, Human
cgaucugcaaacuccgccuccuggguucaagu

SEQ ID NO: 120426 - RNA, 32 nt, Human
cgaucugcagacacccagaaggugggugcaca

SEQ ID NO: 120427 - RNA, 32 nt, Human
cgaucugucacccaggcuggagugcaguggca

SEQ ID NO: 120428 - RNA, 32 nt, Human
cgaucugugcucuccuagcccaagagaccccu

SEQ ID NO: 120429 - RNA, 32 nt, Human
cgaucuguuacccaggcuggagugcagugaca

SEQ ID NO: 120430 - RNA, 32 nt, Human
cgaucuguugcccaggcuggagugcaguggag

SEQ ID NO: 120431 - RNA, 32 nt, Human
cgaucuucccacguguuaggguuuauuuuuau

SEQ ID NO: 120432 - RNA, 32 nt, Human
cgaucuuccuuucaggaagggagggagcaggu

SEQ ID NO: 120433 - RNA, 32 nt, Human
cgaucuuggauguguccccaggauccgucaca

SEQ ID NO: 120434 - RNA, 32 nt, Human
cgaucuuggcaucaagaaagacagcauugagg

SEQ ID NO: 120435 - RNA, 32 nt, Human
cgaucuuggcuaacugcaaccuccagcuccug

SEQ ID NO: 120436 - RNA, 32 nt, Human
cgaucuuggcucugcaaccuccacuucccagg

SEQ ID NO: 120437 - RNA, 32 nt, Human
cgaucuuggcucugcaaccuccgccucccggu

SEQ ID NO: 120438 - RNA, 32 nt, Human
cgaugaaauccaaaggugaaucuuuugguugg

SEQ ID NO: 120439 - RNA, 32 nt, Human
cgaugaacuauacauauuuguauuucuacuuu

SEQ ID NO: 120440 - RNA, 32 nt, Human
cgaugaagauuguauuuuugcaccuuaacucc

SEQ ID NO: 120441 - RNA, 32 nt, Human
cgaugaaggagaggaaauaggauaggauggaa

SEQ ID NO: 120442 - RNA, 32 nt, Human
cgaugacaaacacacauuacacacacaacauc

SEQ ID NO: 120443 - RNA, 32 nt, Human
cgaugacaaacacacauuacacacacaucaca

SEQ ID NO: 120444 - RNA, 32 nt, Human
cgaugacauucugaguucuuccucuccauacc

SEQ ID NO: 120445 - RNA, 32 nt, Human
cgaugaccacagacucaaugugcucuguaaca

SEQ ID NO: 120446 - RNA, 32 nt, Human
cgaugaccagcuucuuuugcucgacucuagag

SEQ ID NO: 120447 - RNA, 32 nt, Human
cgaugacucacugcagcacccccucccacuuc

SEQ ID NO: 120448 - RNA, 32 nt, Human
cgaugacucugacuacgaugaggucccagagg

SEQ ID NO: 120449 - RNA, 32 nt, Human
cgaugacucugccucuugucagcccagccaag

SEQ ID NO: 120450 - RNA, 32 nt, Human
cgaugacugacacucagaugcccaguaucaua

SEQ ID NO: 120451 - RNA, 32 nt, Human
cgaugacugcucccucgaccucucucuucuca

SEQ ID NO: 120452 - RNA, 32 nt, Human
cgaugacugcugggggcugccugcugcggggc

SEQ ID NO: 120453 - RNA, 32 nt, Human
cgaugagacccuccccaacacagugagacccc

SEQ ID NO: 120454 - RNA, 32 nt, Human
cgaugagauccaggggaaggcccccagcuccu

SEQ ID NO: 120455 - RNA, 21 nt, Human
cgaugagguccggguauucca

SEQ ID NO: 120456 - RNA, 27 nt, Human
cgaugagugccuccuucgugccgaacg

SEQ ID NO: 120457 - RNA, 32 nt, Human
cgaugauccuggggcucuuggcuuccauacgu

SEQ ID NO: 120458 - RNA, 32 nt, Human
cgaugaucuaacuccaaaguuucauuccacag

SEQ ID NO: 120459 - RNA, 32 nt, Human
cgaugauggcagugaacucauccagccccaca

SEQ ID NO: 120460 - RNA, 29 nt, Human
cgaugauggcugcugucauucaagcccau

SEQ ID NO: 120461 - RNA, 32 nt, Human
cgaugauuuuucuacauuuacuuggccaauuu

SEQ ID NO: 120462 - RNA, 31 nt, Human
cgaugcacuuugagggguguuggagagggga

SEQ ID NO: 120463 - RNA, 32 nt, Human
cgaugcagcuggcgcuaggauccuccucagug

SEQ ID NO: 120464 - RNA, 32 nt, Human
cgaugcagggccaggcacugaaugcagggccc

SEQ ID NO: 120465 - RNA, 32 nt, Human
cgaugcaguaucagcagcucuuuuccagauca

SEQ ID NO: 120466 - RNA, 32 nt, Human
cgaugccacuaaggccaaggacauauagacgg

SEQ ID NO: 120467 - RNA, 32 nt, Human
cgaugccacucaucugcagcagaagagaaaga

SEQ ID NO: 120468 - RNA, 32 nt, Human
cgaugcccaggacuaggcccacggucacugug

SEQ ID NO: 120469 - RNA, 32 nt, Human
cgaugcccuggugucuuucuccugggcuucua

SEQ ID NO: 120470 - RNA, 32 nt, Human
cgaugcccugugucugugggcucauguucccu

SEQ ID NO: 120471 - RNA, 32 nt, Human
cgaugcccuucccaauucucucaauccuuuua

SEQ ID NO: 120472 - RNA, 32 nt, Human
cgaugcccuugcucccccucuucccaccccac

SEQ ID NO: 120473 - RNA, 21 nt, Human
cgaugccgguccggcuucuca

SEQ ID NO: 120474 - RNA, 32 nt, Human
cgaugccuucuucgacgcgcuggaccacguca

SEQ ID NO: 120475 - RNA, 32 nt, Human
cgaugccuugcaggauggacaggaugacagac

SEQ ID NO: 120476 - RNA, 32 nt, Human
cgaugcgcaacagccuggcugaguaagguccc

SEQ ID NO: 120477 - RNA, 32 nt, Human
cgaugcucacugcuucugcuuuuucuuucuuu

SEQ ID NO: 120478 - RNA, 32 nt, Human
cgaugcuccugccucagccucccgaguagcug

SEQ ID NO: 120479 - RNA, 32 nt, Human
cgaugcucuuugaccucccagaagagucacgu

SEQ ID NO: 120480 - RNA, 32 nt, Human
cgaugcugcaccucccaugauguccuggcuuu

SEQ ID NO: 120481 - RNA, 32 nt, Human
cgaugcugcuccaguaacuacaguggcauuag

SEQ ID NO: 120482 - RNA, 32 nt, Human
cgaugcugcucucugcgggugacagggagagg

SEQ ID NO: 120483 - RNA, 32 nt, Human
cgaugcuguccagaacugggaaggccacaggg

SEQ ID NO: 120484 - RNA, 32 nt, Human
cgaugcuuaucuguaauucuaccacuuuaaua

SEQ ID NO: 120485 - RNA, 32 nt, Human
cgauggaaaagcuugccuggaagacuaugugc

SEQ ID NO: 120486 - RNA, 32 nt, Human
cgauggaaaagcuugccugggagacucugugc

SEQ ID NO: 120487 - RNA, 27 nt, Human
cgauggacagccagggcaggaaggugg

SEQ ID NO: 120488 - RNA, 32 nt, Human
cgauggacaugucauuucucucagcucguuuc

SEQ ID NO: 120489 - RNA, 27 nt, Human
cgauggacccaucugugacgcuguggc

SEQ ID NO: 120490 - RNA, 32 nt, Human
cgauggagcccgggaagagaagaaccaaagau

SEQ ID NO: 120491 - RNA, 32 nt, Human
cgauggcaacagaacccagggccugugccagg

SEQ ID NO: 120492 - RNA, 32 nt, Human
cgauggccccacccucaccagccugggcagca

SEQ ID NO: 120493 - RNA, 32 nt, Human
cgauggccgcuccguguuccucggugggccag

SEQ ID NO: 120494 - RNA, 18 nt, Human
cgauggcggcggcugcgg

SEQ ID NO: 120495 - RNA, 32 nt, Human
cgauggcggcgucuggggaaccccagaggcag

SEQ ID NO: 120496 - RNA, 32 nt, Human
cgauggcucaagauucccugaggucuucagug

SEQ ID NO: 120497 - RNA, 32 nt, Human
cgauggcucacugugaccuccgccucucgggu

SEQ ID NO: 120498 - RNA, 32 nt, Human
cgauggcucauaccuguaaucccagcacuuug

SEQ ID NO: 120499 - RNA, 32 nt, Human
cgauggcugcaacgguggaggggccagagcug

SEQ ID NO: 120500 - RNA, 24 nt, Human
cgaugggacggcgggcucggaacg

SEQ ID NO: 120501 - RNA, 32 nt, Human
cgaugggccccuggccccgccugccugccacc

SEQ ID NO: 120502 - RNA, 32 nt, Human
cgaugggcccuacuccaaaggaggcaaggacg

SEQ ID NO: 120503 - RNA, 32 nt, Human
cgauggggaggcagcccccgcaguggacagcc

SEQ ID NO: 120504 - RNA, 32 nt, Human
cgaugguaguuugaaagaauucugagcaugua

SEQ ID NO: 120505 - RNA, 32 nt, Human
cgauggucaccugcgcccaccugggccggcgc

SEQ ID NO: 120506 - RNA, 27 nt, Human
cgauggucucccacucagagcugagga

SEQ ID NO: 120507 - RNA, 24 nt, Human
cgauggugaauuaugaacgugcca

SEQ ID NO: 120508 - RNA, 31 nt, Human
cgauggugacuucuaccuggcagaggcccug

SEQ ID NO: 120509 - RNA, 32 nt, Human
cgauggugcgccuguuccacacccagcaggcg

SEQ ID NO: 120510 - RNA, 18 nt, Human
cgaugguggcggcagugg

SEQ ID NO: 120511 - RNA, 32 nt, Human
cgauggugggaggcugccuaggaggcaguaaa

SEQ ID NO: 120512 - RNA, 32 nt, Human
cgaugguggggagacucggugggugaaugggg

SEQ ID NO: 120513 - RNA, 32 nt, Human
cgauguacacacacagaugcacacacagaugc

SEQ ID NO: 120514 - RNA, 32 nt, Human
cgauguacaggcaacagagcuacgcacuccuu

SEQ ID NO: 120515 - RNA, 32 nt, Human
cgauguagagacucuauuuucucccaaagaca

SEQ ID NO: 120516 - RNA, 32 nt, Human
cgauguagaucagaaagagagcgacggcggag

SEQ ID NO: 120517 - RNA, 27 nt, Human
cgaugucaacagaucaagaccauccug

SEQ ID NO: 120518 - RNA, 32 nt, Human
cgaugucaagugaagaaaaaugcacgggggca

SEQ ID NO: 120519 - RNA, 32 nt, Human
cgaugucacuccucaacugacuuaggaggaca

SEQ ID NO: 120520 - RNA, 32 nt, Human
cgaugucaugucuuuuaaauaagccauacuuu

SEQ ID NO: 120521 - RNA, 32 nt, Human
cgaugucccccugcagguggagcugcugggcu

SEQ ID NO: 120522 - RNA, 32 nt, Human
cgauguccucaaaauggaggcagcgggggcgg

SEQ ID NO: 120523 - RNA, 32 nt, Human
cgauguccuggaccggagcugcucccggaacu

SEQ ID NO: 120524 - RNA, 27 nt, Human
cgaugucucacaccauuuugcugguac

SEQ ID NO: 120525 - RNA, 32 nt, Human
cgaugucuggagcuccugccuccugcaaggug

SEQ ID NO: 120526 - RNA, 32 nt, Human
cgaugugacugcacaagagcacugcaguguuu

SEQ ID NO: 120527 - RNA, 32 nt, Human
cgaugugccccacgcuggacagcuugaagagg

SEQ ID NO: 120528 - RNA, 32 nt, Human
cgaugugccccgucaccucccugcccucccgu

SEQ ID NO: 120529 - RNA, 32 nt, Human
cgauguggauuccaucgagcugguugucuucu

SEQ ID NO: 120530 - RNA, 32 nt, Human
cgaugugggauggggacggugggcaggacagg

SEQ ID NO: 120531 - RNA, 32 nt, Human
cgaugugggguguggaggaggagaacaggccc

SEQ ID NO: 120532 - RNA, 32 nt, Human
cgauguggguggaucacuugaggucaggaguu

SEQ ID NO: 120533 - RNA, 32 nt, Human
cgauguuacgcaaccacuauuguauuuccaaa

SEQ ID NO: 120534 - RNA, 32 nt, Human
cgauguuaggaagaaggaucaagugaaggaga

SEQ ID NO: 120535 - RNA, 32 nt, Human
cgauguuucaugcucauguacuucaaauaaug

SEQ ID NO: 120536 - RNA, 32 nt, Human
cgauguuucuuagcagagauggucacagaggg

SEQ ID NO: 120537 - RNA, 32 nt, Human
cgauuacaggaaugcaccaccacgcccagcua

SEQ ID NO: 120538 - RNA, 28 nt, Human
cgauuacauguuucaaccuuuuagggug

SEQ ID NO: 120539 - RNA, 32 nt, Human
cgauuaccugcucugcccugacucauuuucca

SEQ ID NO: 120540 - RNA, 32 nt, Human
cgauuagggagagagaccaggaaugaguggaa

SEQ ID NO: 120541 - RNA, 32 nt, Human
cgauuauacuuucuacauaagacaugguuggg

SEQ ID NO: 120542 - RNA, 32 nt, Human
cgauuauccccaacuucucuccuuaggcacua

SEQ ID NO: 120543 - RNA, 32 nt, Human
cgauuaucucuacuucuccaccucucaucccu

SEQ ID NO: 120544 - RNA, 32 nt, Human
cgauuaugauugucucuguccuugccacaguu

SEQ ID NO: 120545 - RNA, 32 nt, Human
cgauuauuucccucucaagcuucugaagacuc

SEQ ID NO: 120546 - RNA, 32 nt, Human
cgauucaccccaaagugcugggauuacaggcg

SEQ ID NO: 120547 - RNA, 32 nt, Human
cgauucacgacuuggaaaagcaaauguggaua

SEQ ID NO: 120548 - RNA, 32 nt, Human
cgauucagcucacugcaaucuccgccucccgg

SEQ ID NO: 120549 - RNA, 32 nt, Human
cgauucccacuccccuccucucagccucccug

SEQ ID NO: 120550 - RNA, 32 nt, Human
cgauuccccugccucagccucccaaguagcug

SEQ ID NO: 120551 - RNA, 32 nt, Human
cgauuccccugccucagccuccugaguagcug

SEQ ID NO: 120552 - RNA, 32 nt, Human
cgauuccccugccucagccugccaaguagcug

SEQ ID NO: 120553 - RNA, 32 nt, Human
cgauuccccugccucagcuucccgaguagcug

SEQ ID NO: 120554 - RNA, 32 nt, Human
cgauuccccugccucagucucccaagcagcug

SEQ ID NO: 120555 - RNA, 32 nt, Human
cgauuccucgccagcugggagugcagaagucu

SEQ ID NO: 120556 - RNA, 32 nt, Human
cgauuccuggacaaccagaggagauacagcug

SEQ ID NO: 120557 - RNA, 32 nt, Human
cgauucucauaaggagcggacaaccuugcaug

SEQ ID NO: 120558 - RNA, 32 nt, Human
cgauucuccagccucagccuccugaguagcua

SEQ ID NO: 120559 - RNA, 32 nt, Human
cgauucuccagccucagccuccugaguagcug

SEQ ID NO: 120560 - RNA, 32 nt, Human
cgauucuccagccucagcuuccugaguagaug

SEQ ID NO: 120561 - RNA, 32 nt, Human
cgauucuccccaugggaucuugagggaccaag

SEQ ID NO: 120562 - RNA, 32 nt, Human
cgauucuccugccucaaccuccugaguagcug

SEQ ID NO: 120563 - RNA, 32 nt, Human
cgauucuccugccucagacuccuaaguagcug

SEQ ID NO: 120564 - RNA, 32 nt, Human
cgauucuccugccucagcccccugaguagcug

SEQ ID NO: 120565 - RNA, 32 nt, Human
cgauucuccugccucagccuccaaguagcugg

SEQ ID NO: 120566 - RNA, 32 nt, Human
cgauucuccugccucagccuccagaguagcua

SEQ ID NO: 120567 - RNA, 32 nt, Human
cgauucuccugccucagccucccaaauagcug

SEQ ID NO: 120568 - RNA, 32 nt, Human
cgauucuccugccucagccucccagguugcug

SEQ ID NO: 120569 - RNA, 32 nt, Human
cgauucuccugccucagccuccccaguagcug

SEQ ID NO: 120570 - RNA, 32 nt, Human
cgauucuccugccucagccucccgaauagcug

SEQ ID NO: 120571 - RNA, 32 nt, Human
cgauucuccugccucagccucccgagcagcug

SEQ ID NO: 120572 - RNA, 32 nt, Human
cgauucuccugccucagccucccgaguagcug

SEQ ID NO: 120573 - RNA, 32 nt, Human
cgauucuccugccucagccucccgaguggcug

SEQ ID NO: 120574 - RNA, 32 nt, Human
cgauucuccugccucagccucccgaguugcug

SEQ ID NO: 120575 - RNA, 32 nt, Human
cgauucuccugccucagccucccuaguagcug

SEQ ID NO: 120576 - RNA, 32 nt, Human
cgauucuccugccucagccuccuaaguagcug

SEQ ID NO: 120577 - RNA, 32 nt, Human
cgauucuccugccucagccuccuaaguaucug

SEQ ID NO: 120578 - RNA, 32 nt, Human
cgauucuccugccucagccuccucaggagcug

SEQ ID NO: 120579 - RNA, 32 nt, Human
cgauucuccugccucagccuccugagaagcua

SEQ ID NO: 120580 - RNA, 32 nt, Human
cgauucuccugccucagccuccugagcagcug

SEQ ID NO: 120581 - RNA, 32 nt, Human
cgauucuccugccucagccuccugaguagcug

SEQ ID NO: 120582 - RNA, 32 nt, Human
cgauucuccugccucagccuccugaguggcug

SEQ ID NO: 120583 - RNA, 32 nt, Human
cgauucuccugccucagccucucuaguagcug

SEQ ID NO: 120584 - RNA, 32 nt, Human
cgauucuccugccucagccugccuaguagcug

SEQ ID NO: 120585 - RNA, 32 nt, Human
cgauucuccugccucagcucccaaguagcuga

SEQ ID NO: 120586 - RNA, 32 nt, Human
cgauucuccugccucagcucccaaguagcugg

SEQ ID NO: 120587 - RNA, 32 nt, Human
cgauucuccugccucaggccccugaguagcug

SEQ ID NO: 120588 - RNA, 32 nt, Human
cgauucuccugccucaggcucccaaguagcua

SEQ ID NO: 120589 - RNA, 32 nt, Human
cgauucuccugccucaggcucccaaguagcug

SEQ ID NO: 120590 - RNA, 32 nt, Human
cgauucuccugccucagucucccgaguagcug

SEQ ID NO: 120591 - RNA, 32 nt, Human
cgauucuccugccucagucuccugaguagcug

SEQ ID NO: 120592 - RNA, 32 nt, Human
cgauucuccugccucagucucucuaguagcug

SEQ ID NO: 120593 - RNA, 32 nt, Human
cgauucuccugccucauucuccccaguagcug

SEQ ID NO: 120594 - RNA, 32 nt, Human
cgauucuccugccucccaauccuaguagcugg

SEQ ID NO: 120595 - RNA, 32 nt, Human
cgauucuccugccucccugccucagccuggga

SEQ ID NO: 120596 - RNA, 32 nt, Human
cgauucuccugccuccgccucccgaguagcug

SEQ ID NO: 120597 - RNA, 32 nt, Human
cgauucuccugccucggccuccugauuagcug

SEQ ID NO: 120598 - RNA, 32 nt, Human
cgauucuccugccucugccucccaaguagcug

SEQ ID NO: 120599 - RNA, 32 nt, Human
cgauucuccugucccagcuuggaaggcauuga

SEQ ID NO: 120600 - RNA, 32 nt, Human
cgauucuccugucucagccuccuggguagcug

SEQ ID NO: 120601 - RNA, 32 nt, Human
cgauucuguccagagugagcacuggauggugg

SEQ ID NO: 120602 - RNA, 32 nt, Human
cgauucugucuuauaaccuccugggucccauc

SEQ ID NO: 120603 - RNA, 32 nt, Human
cgauucuuacaaggagcuugcugcaagaaaca

SEQ ID NO: 120604 - RNA, 32 nt, Human
cgauucuucccaggggcucuuuuuggacgguc

SEQ ID NO: 120605 - RNA, 32 nt, Human
cgauucuucugccucagccucccuaguggcug

SEQ ID NO: 120606 - RNA, 32 nt, Human
cgauucuugaaguugaagaaaaggagguucca

SEQ ID NO: 120607 - RNA, 32 nt, Human
cgauugaccaguaacugugagaucagaauuca

SEQ ID NO: 120608 - RNA, 32 nt, Human
cgauugacuggggaauggggacccuggggagg

SEQ ID NO: 120609 - RNA, 32 nt, Human
cgauugcaaagccuccucucccagagaccccu

SEQ ID NO: 120610 - RNA, 32 nt, Human
cgauugcaauuugcaaccuccgcugccgucgc

SEQ ID NO: 120611 - RNA, 32 nt, Human
cgauugcaccaccacacuccagccugcgcgac

SEQ ID NO: 120612 - RNA, 32 nt, Human
cgauugcaccacugcacuccagccugggcaau

SEQ ID NO: 120613 - RNA, 32 nt, Human
cgauugcaccacuucaucccagccugggagac

SEQ ID NO: 120614 - RNA, 32 nt, Human
cgauugcagcgcaguggcagcagcgaggacuc

SEQ ID NO: 120615 - RNA, 32 nt, Human
cgauugcuacucgguucacuugcccagauguc

SEQ ID NO: 120616 - RNA, 32 nt, Human
cgauugcuauaaaaauaaacaaaaguuuagaa

SEQ ID NO: 120617 - RNA, 32 nt, Human
cgauugcuccugcccccaccuuacaggucugg

SEQ ID NO: 120618 - RNA, 32 nt, Human
cgauuggaaauuuccagccacuuuaagccagu

SEQ ID NO: 120619 - RNA, 32 nt, Human
cgauuggacgaagucccugccgcucggccagc

SEQ ID NO: 120620 - RNA, 32 nt, Human
cgauuggaucgagaagaagcuuucuaucaauu

SEQ ID NO: 120621 - RNA, 32 nt, Human
cgauugguucuacugugggucuggacugaucu

SEQ ID NO: 120622 - RNA, 32 nt, Human
cgauuguaccacugcacuccagccugggcgac

SEQ ID NO: 120623 - RNA, 32 nt, Human
cgauuguauuuccuccuuuguggauugucagu

SEQ ID NO: 120624 - RNA, 32 nt, Human
cgauuguccugccucagccucgaguagcuggg

SEQ ID NO: 120625 - RNA, 32 nt, Human
cgauuguugaucauccagagccucaguucugu

SEQ ID NO: 120626 - RNA, 32 nt, Human
cgauuuaaagacaccaaaauuugcauuuucca

SEQ ID NO: 120627 - RNA, 32 nt, Human
cgauuuaggccagaccagagguuucuagagga

SEQ ID NO: 120628 - RNA, 32 nt, Human
cgauuuagggaaacgguggcagaugaguggga

SEQ ID NO: 120629 - RNA, 32 nt, Human
cgauuuagugaagacauacuuacaaccuuauu

SEQ ID NO: 120630 - RNA, 32 nt, Human
cgauuucacgcaaccaaccuuacccucguccc

SEQ ID NO: 120631 - RNA, 32 nt, Human
cgauuucuccuccugccccagccuccugucua

SEQ ID NO: 120632 - RNA, 32 nt, Human
cgauuucugcucugcugacuggggaagucauc

SEQ ID NO: 120633 - RNA, 32 nt, Human
cgauuugaugcugcaauuacuugcuguuuuua

SEQ ID NO: 120634 - RNA, 32 nt, Human
cgauuugcaggauucccuucugggcuucauuc

SEQ ID NO: 120635 - RNA, 32 nt, Human
cgauuuggccgugaaggagaaacaccagcucc

SEQ ID NO: 120636 - RNA, 32 nt, Human
cgauuugggugccagcauccugcaacacccac

SEQ ID NO: 120637 - RNA, 32 nt, Human
cgauuugguguuuuuagcuccugagagaauaa

SEQ ID NO: 120638 - RNA, 32 nt, Human
cgauuugugcugcucucagcagccaccgggga

SEQ ID NO: 120639 - RNA, 32 nt, Human
cgauuuucuuucacagucuuucucagaacucu

SEQ ID NO: 120640 - RNA, 32 nt, Human
cgauuuuuagcacauccauaucuuuucuacgu

SEQ ID NO: 120641 - RNA, 32 nt, Human
cgcaaaaacuuccuuuacagagguucggacua

SEQ ID NO: 120642 - RNA, 32 nt, Human
cgcaaaaggaagagucugggaggcaggcgacu

SEQ ID NO: 120643 - RNA, 32 nt, Human
cgcaaacaaaauucuggugaaauaacugggcu

SEQ ID NO: 120644 - RNA, 22 nt, Human
cgcaaaccucuccuuccucaga

SEQ ID NO: 120645 - RNA, 32 nt, Human
cgcaaagaacauccugguguaccagaccucuc

SEQ ID NO: 120646 - RNA, 32 nt, Human
cgcaaagcaguguggguugauucugaggugca

SEQ ID NO: 120647 - RNA, 32 nt, Human
cgcaaagccugcaggccagggagggugggaaa

SEQ ID NO: 120648 - RNA, 31 nt, Human
cgcaaagcgguuuucugacccucagggccuc

SEQ ID NO: 120649 - RNA, 32 nt, Human
cgcaaaggccugauaauagcuuaauaccauga

SEQ ID NO: 120650 - RNA, 27 nt, Human
cgcaaaguuaagcagacuugaccaaug

SEQ ID NO: 120651 - RNA, 32 nt, Human
cgcaacacaacaaucagauggcaccagggacu

SEQ ID NO: 120652 - RNA, 32 nt, Human
cgcaacacagggaagucgguuugacuuuuguc

SEQ ID NO: 120653 - RNA, 32 nt, Human
cgcaacaccuagagcccaaaaauaagcagcac

SEQ ID NO: 120654 - RNA, 32 nt, Human
cgcaacacuacacuccagccugggcgacagag

SEQ ID NO: 120655 - RNA, 32 nt, Human
cgcaacacugcacuccagccugggcgacagag

SEQ ID NO: 120656 - RNA, 32 nt, Human
cgcaacacugcacuccagccugggugacagag

SEQ ID NO: 120657 - RNA, 32 nt, Human
cgcaacacugcccuccagccugggcaacagag

SEQ ID NO: 120658 - RNA, 32 nt, Human
cgcaacagaguggacuucuuuccuucaagaag

SEQ ID NO: 120659 - RNA, 20 nt, Human
cgcaacagauaaugugggaa

SEQ ID NO: 120660 - RNA, 32 nt, Human
cgcaacagccuggguucuugagcagagauugg

SEQ ID NO: 120661 - RNA, 32 nt, Human
cgcaacagcugcagugagguucuuucccaagg

SEQ ID NO: 120662 - RNA, 32 nt, Human
cgcaacauugcacuccaggcugggcagcaaga

SEQ ID NO: 120663 - RNA, 32 nt, Human
cgcaaccagggugguggcggagugcgcaugcg

SEQ ID NO: 120664 - RNA, 32 nt, Human
cgcaaccccugccucccccggccccagcccgu

SEQ ID NO: 120665 - RNA, 32 nt, Human
cgcaacccugcugacuguuucaguuaauaugc

SEQ ID NO: 120666 - RNA, 32 nt, Human
cgcaaccgcugcgccaucaugugcgccugcgc

SEQ ID NO: 120667 - RNA, 32 nt, Human
cgcaaccuccaggcaucaucucagcugacagu

SEQ ID NO: 120668 - RNA, 32 nt, Human
cgcaaccugccugucccgggagcuugcgggcu

SEQ ID NO: 120669 - RNA, 32 nt, Human
cgcaacguucaccccaaaggcucuuuuaagag

SEQ ID NO: 120670 - RNA, 32 nt, Human
cgcaacucaguggccauucuucugccuuccca

SEQ ID NO: 120671 - RNA, 32 nt, Human
cgcaacuccuacaggauucugagaccccgucc

SEQ ID NO: 120672 - RNA, 32 nt, Human
cgcaacucugucucaaaaacaaacaaacaaac

SEQ ID NO: 120673 - RNA, 32 nt, Human
cgcaacugagaucuccaugacuguguguugug

SEQ ID NO: 120674 - RNA, 32 nt, Human
cgcaacuguagucccagcuacucgggaggcug

SEQ ID NO: 120675 - RNA, 17 nt, Human
cgcaacuguccugggug

SEQ ID NO: 120676 - RNA, 32 nt, Human
cgcaacuuacuuuuccaccaaagaacugucag

SEQ ID NO: 120677 - RNA, 32 nt, Human
cgcaacuuggugcuggcgcgggagagggagga

SEQ ID NO: 120678 - RNA, 32 nt, Human
cgcaagaacagcuuuggaaauggcuguugagc

SEQ ID NO: 120679 - RNA, 32 nt, Human
cgcaagaagcccugccugcccucugccaccgg

SEQ ID NO: 120680 - RNA, 32 nt, Human
cgcaagagacugagaaccaagccucaagcccu

SEQ ID NO: 120681 - RNA, 32 nt, Human
cgcaagagaggagggccgacuggagggugucg

SEQ ID NO: 120682 - RNA, 32 nt, Human
cgcaagauggcggcgcccagaggcugcugagg

SEQ ID NO: 120683 - RNA, 31 nt, Human
cgcaagauggcugacccggcugcggggccgc

SEQ ID NO: 120684 - RNA, 32 nt, Human
cgcaagcaaagucuuggcaacaaaagagcuaa

SEQ ID NO: 120685 - RNA, 32 nt, Human
cgcaagcacugaggcagggccugagacuggac

SEQ ID NO: 120686 - RNA, 32 nt, Human
cgcaagcauuugacaaagacuugcuugucuug

SEQ ID NO: 120687 - RNA, 32 nt, Human
cgcaagcccagggacauccaagagcaccccuc

SEQ ID NO: 120688 - RNA, 32 nt, Human
cgcaagccucaaauuuuugugcucagaugauc

SEQ ID NO: 120689 - RNA, 32 nt, Human
cgcaagccuguaaucccagcuauuugggaggc

SEQ ID NO: 120690 - RNA, 32 nt, Human
cgcaagcgaccccgagcggagccccggagcca

SEQ ID NO: 120691 - RNA, 32 nt, Human
cgcaagcugggcagcgacauggggaacgcgga

SEQ ID NO: 120692 - RNA, 32 nt, Human
cgcaagcuucgccucuuggguucaugccauuc

SEQ ID NO: 120693 - RNA, 24 nt, Human
cgcaaggacaaaaaccaaacacca

SEQ ID NO: 120694 - RNA, 31 nt, Human
cgcaaggaccuucuugggccuguguccgccg

SEQ ID NO: 120695 - RNA, 32 nt, Human
cgcaaggagagggagggcccacaggucagaaa

SEQ ID NO: 120696 - RNA, 32 nt, Human
cgcaaggcacacugauggacagucacggaacc

SEQ ID NO: 120697 - RNA, 32 nt, Human
cgcaaggccacugguggcugagcaacgagguc

SEQ ID NO: 120698 - RNA, 21 nt, Human
cgcaaggccugccgguugcuc

SEQ ID NO: 120699 - RNA, 32 nt, Human
cgcaaggcuagagaaggacuuucacaaauaaa

SEQ ID NO: 120700 - RNA, 31 nt, Human
cgcaagggccucucuugggucuguguccuuu

SEQ ID NO: 120701 - RNA, 32 nt, Human
cgcaaggggcccuguuuccggggagacugauu

SEQ ID NO: 120702 - RNA, 18 nt, Human
cgcaaggucauuacagcu

SEQ ID NO: 120703 - RNA, 32 nt, Human
cgcaaguaagccugcugucaauggaggaggac

SEQ ID NO: 120704 - RNA, 32 nt, Human
cgcaagugaacagaugucagaugccugguaac

SEQ ID NO: 120705 - RNA, 32 nt, Human
cgcaagugacuggucccugccugacagcaccu

SEQ ID NO: 120706 - RNA, 32 nt, Human
cgcaaguuucaggaaguauucacaaaagaaaa

SEQ ID NO: 120707 - RNA, 32 nt, Human
cgcaauagcagcugccuguggggaagaagggc

SEQ ID NO: 120708 - RNA, 32 nt, Human
cgcaaucccaggcugggagggugaggcgccgc

SEQ ID NO: 120709 - RNA, 19 nt, Human
cgcaaucccggcccgggug

SEQ ID NO: 120710 - RNA, 32 nt, Human
cgcaaucucacugcaagcuccacuuccugggu

SEQ ID NO: 120711 - RNA, 32 nt, Human
cgcaaucucacugcauccuccgccucccgggu

SEQ ID NO: 120712 - RNA, 32 nt, Human
cgcaaucugaaacuucucuucuguuuucuuug

SEQ ID NO: 120713 - RNA, 22 nt, Human
cgcaaugaacaacuccaggcgc

SEQ ID NO: 120714 - RNA, 32 nt, Human
cgcaaugacgaccgcguccaccucgcaggugc

SEQ ID NO: 120715 - RNA, 32 nt, Human
cgcaaugcccagcuaauuuuuguguuuuuagu

SEQ ID NO: 120716 - RNA, 29 nt, Human
cgcaaugcugagccauggagccggguugg

SEQ ID NO: 120717 - RNA, 32 nt, Human
cgcaauggcucacgccuguaauccuagcauuu

SEQ ID NO: 120718 - RNA, 32 nt, Human
cgcaauggcucaugccuauaaucccagcacuu

SEQ ID NO: 120719 - RNA, 32 nt, Human
cgcaauggcucaugccuguaaucccagcacuu

SEQ ID NO: 120720 - RNA, 29 nt, Human
cgcaaugggcugcuccagcagcgcccuca

SEQ ID NO: 120721 - RNA, 32 nt, Human
cgcaaugggugagacucgcuccaacugcccgc

SEQ ID NO: 120722 - RNA, 29 nt, Human
cgcaaugguggaugaguuggugcugcugc

SEQ ID NO: 120723 - RNA, 29 nt, Human
cgcaaugucucaggcugugcagacaaacg

SEQ ID NO: 120724 - RNA, 32 nt, Human
cgcaauucgauggagucuuguucuguggucca

SEQ ID NO: 120725 - RNA, 32 nt, Human
cgcaauugagcuaucugaaaacuguuauuccu

SEQ ID NO: 120726 - RNA, 32 nt, Human
cgcaauugcgcuccagccugggcgacaagagc

SEQ ID NO: 120727 - RNA, 32 nt, Human
cgcaauugugaucccacaagacaugcaucucc

SEQ ID NO: 120728 - RNA, 32 nt, Human
cgcaauuuuggaaggcaagaugugagagagac

SEQ ID NO: 120729 - RNA, 32 nt, Human
cgcacaaacaaacgcugccacccuccacuucc

SEQ ID NO: 120730 - RNA, 23 nt, Human
cgcacaaccaugacgcacugcuc

SEQ ID NO: 120731 - RNA, 23 nt, Human
cgcacaacgaugacgcacugcuc

SEQ ID NO: 120732 - RNA, 32 nt, Human
cgcacaaggcagcaggauugcccaugaaugaa

SEQ ID NO: 120733 - RNA, 32 nt, Human
cgcacacaagcacacacauacacaucuuugua

SEQ ID NO: 120734 - RNA, 32 nt, Human
cgcacacacacaugcacacauacacgugcaca

SEQ ID NO: 120735 - RNA, 32 nt, Human
cgcacacacagcaggaggggccugcccaggcc

SEQ ID NO: 120736 - RNA, 32 nt, Human
cgcacacacaugcacacacgcacacgcaugca

SEQ ID NO: 120737 - RNA, 32 nt, Human
cgcacacaccacacacauacacacacgcauua

SEQ ID NO: 120738 - RNA, 32 nt, Human
cgcacacacgugcacacauguacacacggaua

SEQ ID NO: 120739 - RNA, 32 nt, Human
cgcacacaggcagaaggcucggggcucgucca

SEQ ID NO: 120740 - RNA, 32 nt, Human
cgcacacaucacacaccuugcuggucacacag

SEQ ID NO: 120741 - RNA, 32 nt, Human
cgcacacaugcucugcaggauguggccauccu

SEQ ID NO: 120742 - RNA, 24 nt, Human
cgcacacccacccagagcacgcca

SEQ ID NO: 120743 - RNA, 24 nt, Human
cgcacacccccaggagcacagcca

SEQ ID NO: 120744 - RNA, 32 nt, Human
cgcacaccuggaccaggcuugcaggcugccag

SEQ ID NO: 120745 - RNA, 32 nt, Human
cgcacaccuguaauccuagcuacucgggaggc

SEQ ID NO: 120746 - RNA, 32 nt, Human
cgcacacgcaugcacacacgugcgcacgcaca

SEQ ID NO: 120747 - RNA, 32 nt, Human
cgcacacgcuuccccgcacucgcuuagagcca

SEQ ID NO: 120748 - RNA, 32 nt, Human
cgcacacgggagagaaacccuaugcaugcacu

SEQ ID NO: 120749 - RNA, 32 nt, Human
cgcacacucccccuggguccucaggcccaccc

SEQ ID NO: 120750 - RNA, 32 nt, Human
cgcacacugaugcacacggaccuggacacaga

SEQ ID NO: 120751 - RNA, 32 nt, Human
cgcacacuggagacccuggugccagaagaggc

SEQ ID NO: 120752 - RNA, 32 nt, Human
cgcacacuguggucccagcuacucgggaggcu

SEQ ID NO: 120753 - RNA, 32 nt, Human
cgcacagacguaacacacaggugccaggccgu

SEQ ID NO: 120754 - RNA, 20 nt, Human
cgcacagcagcagccgaggc

SEQ ID NO: 120755 - RNA, 32 nt, Human
cgcacagcccucuggcuguccugcuuucccau

SEQ ID NO: 120756 - RNA, 25 nt, Human
cgcacagcuaauuuuuuguauuuuu

SEQ ID NO: 120757 - RNA, 30 nt, Human
cgcacaggaagccgaaggggcaacaaacca

SEQ ID NO: 120758 - RNA, 32 nt, Human
cgcacaggaugggggcgccaggagaggggccc

SEQ ID NO: 120759 - RNA, 32 nt, Human
cgcacaggccacacccucucauuugucacuag

SEQ ID NO: 120760 - RNA, 32 nt, Human
cgcacaggccacugagagcuccggacacgcac

SEQ ID NO: 120761 - RNA, 32 nt, Human
cgcacaggcugaugcuccccgcccccaacugu

SEQ ID NO: 120762 - RNA, 32 nt, Human
cgcacaggcuguuaucauggguccugagucau

SEQ ID NO: 120763 - RNA, 32 nt, Human
cgcacaggcuuggagugcaguggugcgaucau

SEQ ID NO: 120764 - RNA, 32 nt, Human
cgcacauacacauauacauacauacacacaua

SEQ ID NO: 120765 - RNA, 32 nt, Human
cgcacauacuccugcacauguucccaugcaug

SEQ ID NO: 120766 - RNA, 32 nt, Human
cgcacauauguggggcagagcagccacccugc

SEQ ID NO: 120767 - RNA, 32 nt, Human
cgcacaucuucacaugugcacacauguaaaac

SEQ ID NO: 120768 - RNA, 32 nt, Human
cgcacaugcgagguggaggguggcuggugugg

SEQ ID NO: 120769 - RNA, 32 nt, Human
cgcacauggaaagaacauaguguggcagaagg

SEQ ID NO: 120770 - RNA, 32 nt, Human
cgcacaugggcgcgcacgaacuaccauucagg

SEQ ID NO: 120771 - RNA, 32 nt, Human
cgcacauguucacacaugcacacucacgcuca

SEQ ID NO: 120772 - RNA, 32 nt, Human
cgcacauguuggggcuucugggccaagaguac

SEQ ID NO: 120773 - RNA, 32 nt, Human
cgcaccaacauggagaaaccccgucucuacua

SEQ ID NO: 120774 - RNA, 32 nt, Human
cgcaccaaucaccaugcagcuugcccucggac

SEQ ID NO: 120775 - RNA, 32 nt, Human
cgcaccacagcacuccagcccaggcggcagug

SEQ ID NO: 120776 - RNA, 32 nt, Human
cgcaccacagcgcuccagccuggucgacagag

SEQ ID NO: 120777 - RNA, 32 nt, Human
cgcaccaccacacuccagccugggugacagag

SEQ ID NO: 120778 - RNA, 20 nt, Human
cgcaccaccuccugcugccu

SEQ ID NO: 120779 - RNA, 32 nt, Human
cgcaccaccucuccggucgcguggcugccucu

SEQ ID NO: 120780 - RNA, 32 nt, Human
cgcaccaccugcugugugccagccugagacgg

SEQ ID NO: 120781 - RNA, 32 nt, Human
cgcaccacgccacugcacuccagcgugggcaa

SEQ ID NO: 120782 - RNA, 32 nt, Human
cgcaccacggcacuccagccuggcgacagagc

SEQ ID NO: 120783 - RNA, 32 nt, Human
cgcaccacuacugccuggcuaauuuuuauguu

SEQ ID NO: 120784 - RNA, 32 nt, Human
cgcaccacucagugaagcccagccuggcgccu

SEQ ID NO: 120785 - RNA, 32 nt, Human
cgcaccacugaacuccagccugggcgacaaga

SEQ ID NO: 120786 - RNA, 32 nt, Human
cgcaccacugcacccaaaccuggggagagagc

SEQ ID NO: 120787 - RNA, 32 nt, Human
cgcaccacugcaccccagccugggcaacaaga

SEQ ID NO: 120788 - RNA, 32 nt, Human
cgcaccacugcaccccagcgugggcaacagag

SEQ ID NO: 120789 - RNA, 32 nt, Human
cgcaccacugcacgcacuccagccugggugac

SEQ ID NO: 120790 - RNA, 32 nt, Human
cgcaccacugcacuacagccugggcgacagaa

SEQ ID NO: 120791 - RNA, 32 nt, Human
cgcaccacugcacucaagccugggcgacagag

SEQ ID NO: 120792 - RNA, 32 nt, Human
cgcaccacugcacuccaaccugggcaacagag

SEQ ID NO: 120793 - RNA, 32 nt, Human
cgcaccacugcacuccaaccugggugacgagu

SEQ ID NO: 120794 - RNA, 32 nt, Human
cgcaccacugcacuccaaucugggcaagagaa

SEQ ID NO: 120795 - RNA, 32 nt, Human
cgcaccacugcacuccagcacuccagccuggg

SEQ ID NO: 120796 - RNA, 32 nt, Human
cgcaccacugcacuccagcaugagugacagag

SEQ ID NO: 120797 - RNA, 32 nt, Human
cgcaccacugcacuccagccuaggcgacgggg

SEQ ID NO: 120798 - RNA, 32 nt, Human
cgcaccacugcacuccagccuggaagaccaaa

SEQ ID NO: 120799 - RNA, 32 nt, Human
cgcaccacugcacuccagccuggacaacagag

SEQ ID NO: 120800 - RNA, 32 nt, Human
cgcaccacugcacuccagccugggagacagag

SEQ ID NO: 120801 - RNA, 32 nt, Human
cgcaccacugcacuccagccugggagauacag

SEQ ID NO: 120802 - RNA, 32 nt, Human
cgcaccacugcacuccagccugggcaacaaga

SEQ ID NO: 120803 - RNA, 32 nt, Human
cgcaccacugcacuccagccugggcaacacag

SEQ ID NO: 120804 - RNA, 32 nt, Human
cgcaccacugcacuccagccugggcaacagag

SEQ ID NO: 120805 - RNA, 32 nt, Human
cgcaccacugcacuccagccugggcaacauag

SEQ ID NO: 120806 - RNA, 32 nt, Human
cgcaccacugcacuccagccugggcgaaaggg

SEQ ID NO: 120807 - RNA, 32 nt, Human
cgcaccacugcacuccagccugggcgacaaag

SEQ ID NO: 120808 - RNA, 32 nt, Human
cgcaccacugcacuccagccugggcgacagac

SEQ ID NO: 120809 - RNA, 32 nt, Human
cgcaccacugcacuccagccugggcgacagag

SEQ ID NO: 120810 - RNA, 32 nt, Human
cgcaccacugcacuccagccugggcggcagag

SEQ ID NO: 120811 - RNA, 32 nt, Human
cgcaccacugcacuccagccugggcuacagau

SEQ ID NO: 120812 - RNA, 32 nt, Human
cgcaccacugcacuccagccugggugacaaga

SEQ ID NO: 120813 - RNA, 32 nt, Human
cgcaccacugcacuccagccugggugacagag

SEQ ID NO: 120814 - RNA, 32 nt, Human
cgcaccacugcacuccagccugggugauagag

SEQ ID NO: 120815 - RNA, 32 nt, Human
cgcaccacugcacuccagccugggugauggag

SEQ ID NO: 120816 - RNA, 32 nt, Human
cgcaccacugcacuccagccuggguuacagau

SEQ ID NO: 120817 - RNA, 32 nt, Human
cgcaccacugcacuccagccuggucgacagcg

SEQ ID NO: 120818 - RNA, 32 nt, Human
cgcaccacugcacuccagccuggugacagagc

SEQ ID NO: 120819 - RNA, 32 nt, Human
cgcaccacugcacuccagccugguuacagagc

SEQ ID NO: 120820 - RNA, 32 nt, Human
cgcaccacugcacuccagcucgggugacaaga

SEQ ID NO: 120821 - RNA, 32 nt, Human
cgcaccacugcacuccagcuuggaggaaagag

SEQ ID NO: 120822 - RNA, 32 nt, Human
cgcaccacugcacuccagcuugguucauggag

SEQ ID NO: 120823 - RNA, 32 nt, Human
cgcaccacugcacuccagucuggcaacagagc

SEQ ID NO: 120824 - RNA, 32 nt, Human
cgcaccacugcacuccagucuggguaacagag

SEQ ID NO: 120825 - RNA, 32 nt, Human
cgcaccacugcacucccgcuuggcaauagagu

SEQ ID NO: 120826 - RNA, 32 nt, Human
cgcaccacugcacucuagccugggugaaagag

SEQ ID NO: 120827 - RNA, 32 nt, Human
cgcaccacugcacucuagccugggugaccgag

SEQ ID NO: 120828 - RNA, 32 nt, Human
cgcaccacugcacucuagccuuggcaacagug

SEQ ID NO: 120829 - RNA, 32 nt, Human
cgcaccacugcacucuagcuugggcaacagag

SEQ ID NO: 120830 - RNA, 32 nt, Human
cgcaccacugcacugcagccuggcaacaagag

SEQ ID NO: 120831 - RNA, 32 nt, Human
cgcaccacugcacugcagccugggugacagag

SEQ ID NO: 120832 - RNA, 32 nt, Human
cgcaccacugcacuucagccugggugacagag

SEQ ID NO: 120833 - RNA, 32 nt, Human
cgcaccacugcauuccagccuaagcaauagag

SEQ ID NO: 120834 - RNA, 32 nt, Human
cgcaccacugcauuccagccugggcaacagag

SEQ ID NO: 120835 - RNA, 32 nt, Human
cgcaccacugcauuccagccugggugacagag

SEQ ID NO: 120836 - RNA, 32 nt, Human
cgcaccacugcauucuagccuuagugauacag

SEQ ID NO: 120837 - RNA, 32 nt, Human
cgcaccacugcauugcagccuggugacagagu

SEQ ID NO: 120838 - RNA, 32 nt, Human
cgcaccacugcccuccagccuaggugacagaa

SEQ ID NO: 120839 - RNA, 32 nt, Human
cgcaccacugcucuccagccuggcgacagagg

SEQ ID NO: 120840 - RNA, 32 nt, Human
cgcaccacuguacuccagccugggcaacagaa

SEQ ID NO: 120841 - RNA, 32 nt, Human
cgcaccacuguacuccagccugggcgacggag

SEQ ID NO: 120842 - RNA, 32 nt, Human
cgcaccacuguacuccagccugggugacagag

SEQ ID NO: 120843 - RNA, 32 nt, Human
cgcaccacuguacuccagccugggugacugag

SEQ ID NO: 120844 - RNA, 32 nt, Human
cgcaccacuguauuccagccuggaugacaaag

SEQ ID NO: 120845 - RNA, 32 nt, Human
cgcaccaggaccgcggagaagugcaaagucgc

SEQ ID NO: 120846 - RNA, 32 nt, Human
cgcaccaggccauccagcgugcagccuugccu

SEQ ID NO: 120847 - RNA, 32 nt, Human
cgcaccagggcagccgagagaccucccucccg

SEQ ID NO: 120848 - RNA, 32 nt, Human
cgcaccagugcacuccagccuuggugacaaug

SEQ ID NO: 120849 - RNA, 32 nt, Human
cgcaccaguguaaaauguuccuguagucacug

SEQ ID NO: 120850 - RNA, 32 nt, Human
cgcaccaguuucucuuuagaacaaggacuggg

SEQ ID NO: 120851 - RNA, 32 nt, Human
cgcaccaugcauuccuuucccugccaaaacgc

SEQ ID NO: 120852 - RNA, 32 nt, Human
cgcaccauggcauccagcauccucaagugggu

SEQ ID NO: 120853 - RNA, 32 nt, Human
cgcaccauuacacuccagccugggcaacagag

SEQ ID NO: 120854 - RNA, 32 nt, Human
cgcaccauugcaaccccaccugggcaacaaga

SEQ ID NO: 120855 - RNA, 32 nt, Human
cgcaccauugcacaccaaccugggugacagag

SEQ ID NO: 120856 - RNA, 32 nt, Human
cgcaccauugcacccgagccuaggcaacaaga

SEQ ID NO: 120857 - RNA, 32 nt, Human
cgcaccauugcacuccagcccgggcaacaaca

SEQ ID NO: 120858 - RNA, 32 nt, Human
cgcaccauugcacuccagccuaggcaaaaaga

SEQ ID NO: 120859 - RNA, 32 nt, Human
cgcaccauugcacuccagccugagugacagag

SEQ ID NO: 120860 - RNA, 32 nt, Human
cgcaccauugcacuccagccuggaugauagag

SEQ ID NO: 120861 - RNA, 32 nt, Human
cgcaccauugcacuccagccuggcgaccgagc

SEQ ID NO: 120862 - RNA, 32 nt, Human
cgcaccauugcacuccagccugggcaacaaga

SEQ ID NO: 120863 - RNA, 32 nt, Human
cgcaccauugcacuccagccugggcaacaagu

SEQ ID NO: 120864 - RNA, 32 nt, Human
cgcaccauugcacuccagccugggcaacagag

SEQ ID NO: 120865 - RNA, 32 nt, Human
cgcaccauugcacuccagccugggcaacagca

SEQ ID NO: 120866 - RNA, 32 nt, Human
cgcaccauugcacuccagccugggcaacgagu

SEQ ID NO: 120867 - RNA, 32 nt, Human
cgcaccauugcacuccagccugugcaacaagc

SEQ ID NO: 120868 - RNA, 32 nt, Human
cgcaccauugcacuccagccuugggcgacaaa

SEQ ID NO: 120869 - RNA, 32 nt, Human
cgcaccauugcacuccagcugggagacacagc

SEQ ID NO: 120870 - RNA, 32 nt, Human
cgcaccauugcacuccugccugggcaacaaga

SEQ ID NO: 120871 - RNA, 32 nt, Human
cgcaccauugcacucuagccugggcaacgaga

SEQ ID NO: 120872 - RNA, 32 nt, Human
cgcaccauugcacuucagccugggcaacaaga

SEQ ID NO: 120873 - RNA, 32 nt, Human
cgcaccauugcauuccagccugggcaacaaga

SEQ ID NO: 120874 - RNA, 32 nt, Human
cgcaccauugcccuccagccugggcaacaaga

SEQ ID NO: 120875 - RNA, 32 nt, Human
cgcaccauuguacuccagccugggcaacaaga

SEQ ID NO: 120876 - RNA, 32 nt, Human
cgcaccauuguacuccagccugugugacagag

SEQ ID NO: 120877 - RNA, 32 nt, Human
cgcacccacauccuucccauguuuccucuucc

SEQ ID NO: 120878 - RNA, 32 nt, Human
cgcaccccagccgcccggcccgcgaccaggca

SEQ ID NO: 120879 - RNA, 32 nt, Human
cgcaccccgaggcagaguugggaaagcagugg

SEQ ID NO: 120880 - RNA, 32 nt, Human
cgcaccccgggagccuccucaggcucccucua

SEQ ID NO: 120881 - RNA, 32 nt, Human
cgcaccccggugaccaagccccugcuucccaa

SEQ ID NO: 120882 - RNA, 32 nt, Human
cgcaccccugcacuccagccugggcaacagag

SEQ ID NO: 120883 - RNA, 21 nt, Human
cgcacccgcagccucgcgccc

SEQ ID NO: 120884 - RNA, 20 nt, Human
cgcacccgcgcaccccgggc

SEQ ID NO: 120885 - RNA, 21 nt, Human
cgcacccggaccccgacgcuc

SEQ ID NO: 120886 - RNA, 32 nt, Human
cgcacccggcugccaccauggcccgccuagcc

SEQ ID NO: 120887 - RNA, 20 nt, Human
cgcacccgguugcccggagc

SEQ ID NO: 120888 - RNA, 23 nt, Human
cgcacccgugccucuccuccaga

SEQ ID NO: 120889 - RNA, 32 nt, Human
cgcacccugccacccucugcacaccuuuaacu

SEQ ID NO: 120890 - RNA, 32 nt, Human
cgcacccuguagucccagcuacucaggaggcu

SEQ ID NO: 120891 - RNA, 32 nt, Human
cgcaccgcaggugggaggggcccagcugauuu

SEQ ID NO: 120892 - RNA, 31 nt, Human
cgcaccgcgcugucucccuccagggauccgc

SEQ ID NO: 120893 - RNA, 32 nt, Human
cgcaccgcuacacuccagccugggugacagag

SEQ ID NO: 120894 - RNA, 32 nt, Human
cgcaccgcugcacuccagccuggcaacagagc

SEQ ID NO: 120895 - RNA, 32 nt, Human
cgcaccgcugcacuccagccugggcaacagag

SEQ ID NO: 120896 - RNA, 32 nt, Human
cgcaccgcugcacuccagccugggcaagagaa

SEQ ID NO: 120897 - RNA, 32 nt, Human
cgcaccgcugcacuccagccugggugacagaa

SEQ ID NO: 120898 - RNA, 32 nt, Human
cgcaccgcugcacuccagccugggugacagag

SEQ ID NO: 120899 - RNA, 32 nt, Human
cgcaccgcugcccuccagccugggcaacaaga

SEQ ID NO: 120900 - RNA, 32 nt, Human
cgcaccgcugggagucugaggccugagugagu

SEQ ID NO: 120901 - RNA, 32 nt, Human
cgcaccggcccuuccugucacccagguccacc

SEQ ID NO: 120902 - RNA, 32 nt, Human
cgcaccggccuggcugcagcugggcagcaggg

SEQ ID NO: 120903 - RNA, 32 nt, Human
cgcaccguuguacuccagccuggugauagaac

SEQ ID NO: 120904 - RNA, 32 nt, Human
cgcaccucggaccuucaccacccgcccgggcc

SEQ ID NO: 120905 - RNA, 32 nt, Human
cgcaccucucccauccauggcagcgggcccaa

SEQ ID NO: 120906 - RNA, 32 nt, Human
cgcaccugagcacggccccugcccgagccugg

SEQ ID NO: 120907 - RNA, 32 nt, Human
cgcaccugcagucccagcuacucgggaggcug

SEQ ID NO: 120908 - RNA, 32 nt, Human
cgcaccugcagucccagcuacuugggaggcug

SEQ ID NO: 120909 - RNA, 32 nt, Human
cgcaccugcauucccagcuacuugggaggcug

SEQ ID NO: 120910 - RNA, 26 nt, Human
cgcaccugccugucuccucucccaga

SEQ ID NO: 120911 - RNA, 32 nt, Human
cgcaccuguaaucccagcuacucgggaggcug

SEQ ID NO: 120912 - RNA, 32 nt, Human
cgcaccuguaaucccagcuacuuggaaggcug

SEQ ID NO: 120913 - RNA, 32 nt, Human
cgcaccuguaaucccagcuacuugggaggcug

SEQ ID NO: 120914 - RNA, 32 nt, Human
cgcaccuguagucccagcuacucgggaggcug

SEQ ID NO: 120915 - RNA, 32 nt, Human
cgcaccuguagucccagcuacuugggaggcua

SEQ ID NO: 120916 - RNA, 32 nt, Human
cgcaccuguagucccaguuacucgggaggcug

SEQ ID NO: 120917 - RNA, 32 nt, Human
cgcaccuguggacuccaggggccaggaagagg

SEQ ID NO: 120918 - RNA, 32 nt, Human
cgcaccuguggucccagcuacccgggaggcug

SEQ ID NO: 120919 - RNA, 32 nt, Human
cgcaccuguggucccagcuacucgggaggcug

SEQ ID NO: 120920 - RNA, 32 nt, Human
cgcaccuguggucccagcuacuugggaggcug

SEQ ID NO: 120921 - RNA, 32 nt, Human
cgcaccuucuccugcugcuacccggccguggc

SEQ ID NO: 120922 - RNA, 32 nt, Human
cgcaccuuuugcucuugcugcuaauugcccau

SEQ ID NO: 120923 - RNA, 32 nt, Human
cgcacgagagcaccucccagggcacgguggga

SEQ ID NO: 120924 - RNA, 32 nt, Human
cgcacgcaaacagcagugaggaagagaaaagc

SEQ ID NO: 120925 - RNA, 22 nt, Human
cgcacgcacagcucugcugccu

SEQ ID NO: 120926 - RNA, 32 nt, Human
cgcacgccaugagggcccugugggugcugggc

SEQ ID NO: 120927 - RNA, 32 nt, Human
cgcacgcccuccccagcuucugcugcucgccg

SEQ ID NO: 120928 - RNA, 32 nt, Human
cgcacgccgcgcucucucccugggcgaccugc

SEQ ID NO: 120929 - RNA, 32 nt, Human
cgcacgccuguaaucccagcacuuggggaggc

SEQ ID NO: 120930 - RNA, 32 nt, Human
cgcacgccuuagucccagcuacuugggaggcu

SEQ ID NO: 120931 - RNA, 32 nt, Human
cgcacgcgcacacacucacgcacacacaagca

SEQ ID NO: 120932 - RNA, 32 nt, Human
cgcacgcgcacacugacacgcguacacgcacg

SEQ ID NO: 120933 - RNA, 32 nt, Human
cgcacgcggcccgcgguagacggagggccugg

SEQ ID NO: 120934 - RNA, 32 nt, Human
cgcacgcuccaucccuuucccucgcucgauuc

SEQ ID NO: 120935 - RNA, 32 nt, Human
cgcacggaccgggccuccggaggcagguucgg

SEQ ID NO: 120936 - RNA, 32 nt, Human
cgcacggccacagacagcccugggcauccacc

SEQ ID NO: 120937 - RNA, 32 nt, Human
cgcacgggcacgcuggaguucauggcuccgga

SEQ ID NO: 120938 - RNA, 25 nt, Human
cgcacguaguguaguguuccugcua

SEQ ID NO: 120939 - RNA, 32 nt, Human
cgcacguccagccuguguccaggccuacuccc

SEQ ID NO: 120940 - RNA, 32 nt, Human
cgcacgucggggcgcggcucucuggcuagcgc

SEQ ID NO: 120941 - RNA, 32 nt, Human
cgcacguguaguuccagcuacucaggaagcug

SEQ ID NO: 120942 - RNA, 32 nt, Human
cgcacuacucaagaacuacgggcugcucuacu

SEQ ID NO: 120943 - RNA, 32 nt, Human
cgcacuacugcacuccagccugggugacagag

SEQ ID NO: 120944 - RNA, 32 nt, Human
cgcacuauugcacucaagccugggcgacaaaa

SEQ ID NO: 120945 - RNA, 32 nt, Human
cgcacucagccaacauuccuguuuuugaaaau

SEQ ID NO: 120946 - RNA, 32 nt, Human
cgcacuccagccugagcaacagagugagaucc

SEQ ID NO: 120947 - RNA, 22 nt, Human
cgcacuccagccuggacaacag

SEQ ID NO: 120948 - RNA, 32 nt, Human
cgcacuccagccuggaugauagagcaagaccc

SEQ ID NO: 120949 - RNA, 21 nt, Human
cgcacuccagccugggcaaca

SEQ ID NO: 120950 - RNA, 24 nt, Human
cgcacuccagccugggcaacagag

SEQ ID NO: 120951 - RNA, 32 nt, Human
cgcacuccagccugggcaacagagugagacuc

SEQ ID NO: 120952 - RNA, 24 nt, Human
cgcacuccagccugggcaauaggg

SEQ ID NO: 120953 - RNA, 29 nt, Human
cgcacuccagccugggcaauauagcaaga

SEQ ID NO: 120954 - RNA, 29 nt, Human
cgcacuccagccugggcaccacagcaaga

SEQ ID NO: 120955 - RNA, 24 nt, Human
cgcacuccagccugggugacagag

SEQ ID NO: 120956 - RNA, 32 nt, Human
cgcacuccagccugggugacagagugagauuc

SEQ ID NO: 120957 - RNA, 32 nt, Human
cgcacucccucgagacagagaaacggaaccca

SEQ ID NO: 120958 - RNA, 32 nt, Human
cgcacuccgccucaccagccuucuugcgccgg

SEQ ID NO: 120959 - RNA, 32 nt, Human
cgcacuccuaaaugcauuucuccacaaguuag

SEQ ID NO: 120960 - RNA, 32 nt, Human
cgcacucgcauggccccaccucgcagguccac

SEQ ID NO: 120961 - RNA, 32 nt, Human
cgcacucgccagcgacucaucucuccagcggg

SEQ ID NO: 120962 - RNA, 32 nt, Human
cgcacucugucgcccaggcuggagugcaauac

SEQ ID NO: 120963 - RNA, 32 nt, Human
cgcacucuuccauguccguagggagacgcgca

SEQ ID NO: 120964 - RNA, 32 nt, Human
cgcacucuuuaagcagcuguuuaccgaaggca

SEQ ID NO: 120965 - RNA, 32 nt, Human
cgcacugcccuagggaaggaggcugucccagc

SEQ ID NO: 120966 - RNA, 32 nt, Human
cgcacugcgcgcauccccaaccucuguccgca

SEQ ID NO: 120967 - RNA, 32 nt, Human
cgcacugcucaagaacuacgggcugcuccacu

SEQ ID NO: 120968 - RNA, 32 nt, Human
cgcacugcucaagaacuacgggcugcucuacu

SEQ ID NO: 120969 - RNA, 32 nt, Human
cgcacugcugcagcuucccugagccuuuccag

SEQ ID NO: 120970 - RNA, 32 nt, Human
cgcacuggagacagcauaaaagagugaacaaa

SEQ ID NO: 120971 - RNA, 32 nt, Human
cgcacuggcacaugcuuauaaucccagaaauu

SEQ ID NO: 120972 - RNA, 32 nt, Human
cgcacuggcucacgccuguaaucucagcacuu

SEQ ID NO: 120973 - RNA, 32 nt, Human
cgcacuggcuuacgccuguaaucccagcacuu

SEQ ID NO: 120974 - RNA, 32 nt, Human
cgcacugucacccaggcuggagugcaguggca

SEQ ID NO: 120975 - RNA, 32 nt, Human
cgcacugucacccgggcuggagugcaauggcu

SEQ ID NO: 120976 - RNA, 32 nt, Human
cgcacugucccccaggcuggagugcaguggca

SEQ ID NO: 120977 - RNA, 32 nt, Human
cgcacugucgccuaggcuggagugcaacagug

SEQ ID NO: 120978 - RNA, 32 nt, Human
cgcacugucucccaggcuggacugcagcagcg

SEQ ID NO: 120979 - RNA, 32 nt, Human
cgcacugucuuucccaucucuaucucuccucu

SEQ ID NO: 120980 - RNA, 32 nt, Human
cgcacuguugcccaggcuggacugcaguggcg

SEQ ID NO: 120981 - RNA, 32 nt, Human
cgcacuguugcccaggcuggagagcaguggcg

SEQ ID NO: 120982 - RNA, 32 nt, Human
cgcacuguugcccaggcuggagugcaguggcg

SEQ ID NO: 120983 - RNA, 32 nt, Human
cgcacuuauggucccagcuaauugggagccua

SEQ ID NO: 120984 - RNA, 32 nt, Human
cgcacuuccagccugggugacagagugagacc

SEQ ID NO: 120985 - RNA, 32 nt, Human
cgcacuucccgggacccccacacacaucccag

SEQ ID NO: 120986 - RNA, 32 nt, Human
cgcacuuccgacagcacacuccacauuacuua

SEQ ID NO: 120987 - RNA, 32 nt, Human
cgcacuuccguagagguggacauggcgugcgg

SEQ ID NO: 120988 - RNA, 32 nt, Human
cgcacuucuccucuacugaacccacuggcauc

SEQ ID NO: 120989 - RNA, 32 nt, Human
cgcacuuugcaccuccuauccccaggguccgc

SEQ ID NO: 120990 - RNA, 32 nt, Human
cgcacuuuugcaggaugaccucagggcuaugu

SEQ ID NO: 120991 - RNA, 32 nt, Human
cgcagaaagugccauauagacgagauaaaggc

SEQ ID NO: 120992 - RNA, 32 nt, Human
cgcagaaccagcugucugagcugcccgggcag

SEQ ID NO: 120993 - RNA, 32 nt, Human
cgcagaagagagaugcugcucuggcccuggga

SEQ ID NO: 120994 - RNA, 32 nt, Human
cgcagaagcgcagccauucacggccucacgca

SEQ ID NO: 120995 - RNA, 31 nt, Human
cgcagaauccgaagcauacucacuugcgccu

SEQ ID NO: 120996 - RNA, 32 nt, Human
cgcagaauccugugagggugacucugggggac

SEQ ID NO: 120997 - RNA, 32 nt, Human
cgcagaauuauuaccugcuguuugcuuucuga

SEQ ID NO: 120998 - RNA, 32 nt, Human
cgcagacaagcaggcccccagauggagaacca

SEQ ID NO: 120999 - RNA, 32 nt, Human
cgcagacagcgccgggaagaugagcacggaag

SEQ ID NO: 121000 - RNA, 32 nt, Human
cgcagacagucaggcuucaggcugucugacac

SEQ ID NO: 121001 - RNA, 24 nt, Human
cgcagaccaguacuggaguucgug

SEQ ID NO: 121002 - RNA, 32 nt, Human
cgcagacccucagaagcaguggcagaagcagu

SEQ ID NO: 121003 - RNA, 32 nt, Human
cgcagacccucgggcucgaucgcccgggagcc

SEQ ID NO: 121004 - RNA, 32 nt, Human
cgcagacccugacuaccugccccgcaccaugg

SEQ ID NO: 121005 - RNA, 21 nt, Human
cgcagaccgagccccgggcgc

SEQ ID NO: 121006 - RNA, 32 nt, Human
cgcagacucaccggagcgcagcgccugggcca

SEQ ID NO: 121007 - RNA, 32 nt, Human
cgcagacugacgugcuuuugggagggugugcc

SEQ ID NO: 121008 - RNA, 20 nt, Human
cgcagacuggagugcagugg

SEQ ID NO: 121009 - RNA, 32 nt, Human
cgcagagaaaugcaggcaagggagcaaggcgg

SEQ ID NO: 121010 - RNA, 20 nt, Human
cgcagagaguggacgagcag

SEQ ID NO: 121011 - RNA, 32 nt, Human
cgcagagcacaucuggugugagagagcucgcu

SEQ ID NO: 121012 - RNA, 32 nt, Human
cgcagagcagagccuggagaagccggagcugu

SEQ ID NO: 121013 - RNA, 32 nt, Human
cgcagagcagggcagguggcaccaacaguggg

SEQ ID NO: 121014 - RNA, 32 nt, Human
cgcagagccagaagagcacggagcagcaacuc

SEQ ID NO: 121015 - RNA, 32 nt, Human
cgcagagccaggcagggacagcgcggaucuca

SEQ ID NO: 121016 - RNA, 32 nt, Human
cgcagagcccaaucauuccaaccaaagcaggg

SEQ ID NO: 121017 - RNA, 32 nt, Human
cgcagagccgggaggcaggccgcagaacaggg

SEQ ID NO: 121018 - RNA, 32 nt, Human
cgcagagcuccuggagucuccuucccacacac

SEQ ID NO: 121019 - RNA, 32 nt, Human
cgcagagcuguccaggcacagcuccgucccca

SEQ ID NO: 121020 - RNA, 32 nt, Human
cgcagaggaaacaugucgagaucaggcuuccu

SEQ ID NO: 121021 - RNA, 32 nt, Human
cgcagaggagagcacacgaggguggggucccu

SEQ ID NO: 121022 - RNA, 32 nt, Human
cgcagaggcaaaaacugaggcgcagaaugaug

SEQ ID NO: 121023 - RNA, 32 nt, Human
cgcagaggcaaaagcguggcagugggacccaa

SEQ ID NO: 121024 - RNA, 32 nt, Human
cgcagaggcccugaggccucacuuuucggauc

SEQ ID NO: 121025 - RNA, 32 nt, Human
cgcagaggcuacucgggcuggggcuggggccg

SEQ ID NO: 121026 - RNA, 32 nt, Human
cgcagaggcugcagucccugggggccgggagg

SEQ ID NO: 121027 - RNA, 32 nt, Human
cgcagagggaagggaggggcugagcugugagg

SEQ ID NO: 121028 - RNA, 32 nt, Human
cgcagagggagcaggaagaguugcugauaguu

SEQ ID NO: 121029 - RNA, 32 nt, Human
cgcagaggugaugcucacagguuaagggaugc

SEQ ID NO: 121030 - RNA, 32 nt, Human
cgcagaguagcugucuguuugacugcuucauc

SEQ ID NO: 121031 - RNA, 32 nt, Human
cgcagagugcagagacaggaagcuggagaugu

SEQ ID NO: 121032 - RNA, 32 nt, Human
cgcagaguugugauucucaguaccaagcuaua

SEQ ID NO: 121033 - RNA, 32 nt, Human
cgcagaguuuggagaaagcggcagcagauugu

SEQ ID NO: 121034 - RNA, 32 nt, Human
cgcagauaaccagcccgagucaugcagucuuu

SEQ ID NO: 121035 - RNA, 32 nt, Human
cgcagauacacgcccccgccuccgugggcaca

SEQ ID NO: 121036 - RNA, 32 nt, Human
cgcagaucuccgaggcccugaggauccugcau

SEQ ID NO: 121037 - RNA, 32 nt, Human
cgcagcaacacaguccucaucuguaaagaacc

SEQ ID NO: 121038 - RNA, 32 nt, Human
cgcagcaaucuccacagccuccugggucucac

SEQ ID NO: 121039 - RNA, 22 nt, Human
cgcagcacaccggcccaggugc

SEQ ID NO: 121040 - RNA, 32 nt, Human
cgcagcacagaaggcucucacugaugaaagug

SEQ ID NO: 121041 - RNA, 32 nt, Human
cgcagcacagccgcugggagcgccucagaccc

SEQ ID NO: 121042 - RNA, 32 nt, Human
cgcagcaccagccugagccacaguggggccca

SEQ ID NO: 121043 - RNA, 32 nt, Human
cgcagcaccagcugcccugagcugcuuguaca

SEQ ID NO: 121044 - RNA, 32 nt, Human
cgcagcaccgccguggugagucuggccaacac

SEQ ID NO: 121045 - RNA, 32 nt, Human
cgcggggagaaaagcagccugauucggaggaa

SEQ ID NO: 121046 - RNA, 32 nt, Human
cgcggggagagggcgcgggagcggcucgugcg

SEQ ID NO: 121047 - RNA, 32 nt, Human
cgcggggagaggggcgggcgcagcauggcagc

SEQ ID NO: 121048 - RNA, 19 nt, Human
cgcggggaggcggcggagg

SEQ ID NO: 121049 - RNA, 32 nt, Human
cgcggggaggcugcagaggaggagcagggugg

SEQ ID NO: 121050 - RNA, 32 nt, Human
cgcggggcagccagggcggcggcgggggcggc

SEQ ID NO: 121051 - RNA, 32 nt, Human
cgcggggcagccgccgcuccuccgggggaaug

SEQ ID NO: 121052 - RNA, 32 nt, Human
cgcggggcagggaggggcaggguguucuagag

SEQ ID NO: 121053 - RNA, 32 nt, Human
cgcggggccagggcggcggcccccagggaguu

SEQ ID NO: 121054 - RNA, 32 nt, Human
cgcggggcccugcucuguagggcugaaggccg

SEQ ID NO: 121055 - RNA, 32 nt, Human
cgcggggccggccuuccugcagccucuuccgc

SEQ ID NO: 121056 - RNA, 17 nt, Human
cgcggggccgggcggcu

SEQ ID NO: 121057 - RNA, 32 nt, Human
cgcggggcgccuggcucaguggcuucugcggg

SEQ ID NO: 121058 - RNA, 32 nt, Human
cgcggggcggggaauggaggaggcaggcgggg

SEQ ID NO: 121059 - RNA, 32 nt, Human
cgcggggcugggauuagggccggggcgaaugg

SEQ ID NO: 121060 - RNA, 32 nt, Human
cgcgggggacucggacccacagagccggcccc

SEQ ID NO: 121061 - RNA, 32 nt, Human
cgcgggggccgcccccuccccuucccuccacc

SEQ ID NO: 121062 - RNA, 32 nt, Human
cgcgggggcucacgccuguaaucccagcacuu

SEQ ID NO: 121063 - RNA, 32 nt, Human
cgcgggggcucauaccuguaaucccggcacuu

SEQ ID NO: 121064 - RNA, 21 nt, Human
cgcggggggaggcggcggagg

SEQ ID NO: 121065 - RNA, 32 nt, Human
cgcgggguccuggccaagcaagcccgccccuc

SEQ ID NO: 121066 - RNA, 32 nt, Human
cgcggggugagcuggcgggggccgggcccuaa

SEQ ID NO: 121067 - RNA, 32 nt, Human
cgcggggugggccuucggggaggcggagggcg

SEQ ID NO: 121068 - RNA, 32 nt, Human
cgcgggucagcuccgagaaagugccuucugug

SEQ ID NO: 121069 - RNA, 32 nt, Human
cgcgggucccaaggagccugcggaaggagucg

SEQ ID NO: 121070 - RNA, 32 nt, Human
cgcggguggcuggagacacacagccacaauua

SEQ ID NO: 121071 - RNA, 32 nt, Human
cgcgggugggaggcggggaggagcagcgggaa

SEQ ID NO: 121072 - RNA, 32 nt, Human
cgcgguaagagguggcggcgggcagagggugu

SEQ ID NO: 121073 - RNA, 32 nt, Human
cgcgguagcucacgccuauaaucccaacacuu

SEQ ID NO: 121074 - RNA, 32 nt, Human
cgcgguagcucacgccuggaaucccagcacug

SEQ ID NO: 121075 - RNA, 32 nt, Human
cgcgguagcucacgccuguaaucccagcacuu

SEQ ID NO: 121076 - RNA, 32 nt, Human
cgcggucagagggagcgccuggcagcagcagg

SEQ ID NO: 121077 - RNA, 32 nt, Human
cgcgguccccaucagcacugugcagugguacc

SEQ ID NO: 121078 - RNA, 32 nt, Human
cgcggucccccagcaccuccccaagccacacc

SEQ ID NO: 121079 - RNA, 32 nt, Human
cgcgguccgcagcugcaccgccucuccccgcc

SEQ ID NO: 121080 - RNA, 20 nt, Human
cgcgguccugcagccccgcc

SEQ ID NO: 121081 - RNA, 32 nt, Human
cgcggucgcucacgccuguaaucccagcacuu

SEQ ID NO: 121082 - RNA, 26 nt, Human
cgcggucgcugagcgagugcggcggg

SEQ ID NO: 121083 - RNA, 32 nt, Human
cgcggucuccggccucuccacccucagccccc

SEQ ID NO: 121084 - RNA, 21 nt, Human
cgcggucucguagcgcauggg

SEQ ID NO: 121085 - RNA, 32 nt, Human
cgcggucugcggccaguggcccgggggaaagc

SEQ ID NO: 121086 - RNA, 23 nt, Human
cgcggugacucacaccuguaauc

SEQ ID NO: 121087 - RNA, 32 nt, Human
cgcggugacucacaccuguaaucccagcacuu

SEQ ID NO: 121088 - RNA, 32 nt, Human
cgcggugacucacaccuguaauccgaguacuu

SEQ ID NO: 121089 - RNA, 32 nt, Human
cgcggugacucacgccuauaaucccagcacuu

SEQ ID NO: 121090 - RNA, 32 nt, Human
cgcggugacucaugccuguaaucccagcacuu

SEQ ID NO: 121091 - RNA, 32 nt, Human
cgcggugauucacgccuguaaucccagaacuc

SEQ ID NO: 121092 - RNA, 32 nt, Human
cgcggugauucacgccuguaaucccagcacuu

SEQ ID NO: 121093 - RNA, 17 nt, Human
cgcggugccccacggug

SEQ ID NO: 121094 - RNA, 32 nt, Human
cgcggugccucaugccuguaaucccagcacuu

SEQ ID NO: 121095 - RNA, 32 nt, Human
cgcggugccugacaguuccuuccucagcgccu

SEQ ID NO: 121096 - RNA, 22 nt, Human
cgcggugcggcacggcacggug

SEQ ID NO: 121097 - RNA, 32 nt, Human
cgcgguggcaaaugccuguaaucccagcacuu

SEQ ID NO: 121098 - RNA, 32 nt, Human
cgcgguggcacaugccuguaaucccagcacuu

SEQ ID NO: 121099 - RNA, 32 nt, Human
cgcgguggcccacaccuguaaucccagcacuu

SEQ ID NO: 121100 - RNA, 32 nt, Human
cgcgguggccuccuggcaucauuuguuauugc

SEQ ID NO: 121101 - RNA, 30 nt, Human
cgcgguggccucuccaggcucagcuccugg

SEQ ID NO: 121102 - RNA, 32 nt, Human
cgcgguggcgcaugccuguaaucccagcacuu

SEQ ID NO: 121103 - RNA, 32 nt, Human
cgcgguggcuaaaaauacaaaaaguuagccgg

SEQ ID NO: 121104 - RNA, 32 nt, Human
cgcgguggcuaacgccuguaaucccagaacuu

SEQ ID NO: 121105 - RNA, 32 nt, Human
cgcgguggcuaacgcuuguaaucccagcgcuu

SEQ ID NO: 121106 - RNA, 32 nt, Human
cgcgguggcucaaaccuguaaucccagcacuu

SEQ ID NO: 121107 - RNA, 32 nt, Human
cgcgguggcucaagcccauaaucccagcacuu

SEQ ID NO: 121108 - RNA, 32 nt, Human
cgcgguggcucaagccuguaaucccagcacgu

SEQ ID NO: 121109 - RNA, 23 nt, Human
cgcgguggcucacacccguaauc

SEQ ID NO: 121110 - RNA, 32 nt, Human
cgcgguggcucacacccguaaucccagcacuu

SEQ ID NO: 121111 - RNA, 23 nt, Human
cgcgguggcucacaccuauaauc

SEQ ID NO: 121112 - RNA, 32 nt, Human
cgcgguggcucacaccuauaaucccagcacuu

SEQ ID NO: 121113 - RNA, 32 nt, Human
cgcgguggcucacaccuguaauaaucccagca

SEQ ID NO: 121114 - RNA, 23 nt, Human
cgcgguggcucacaccuguaauc

SEQ ID NO: 121115 - RNA, 32 nt, Human
cgcgguggcucacaccuguaaucccaacaguu

SEQ ID NO: 121116 - RNA, 32 nt, Human
cgcgguggcucacaccuguaaucccagcacuu

SEQ ID NO: 121117 - RNA, 32 nt, Human
cgcgguggcucacaccuguaauccuagcacuu

SEQ ID NO: 121118 - RNA, 32 nt, Human
cgcgguggcucacaccuguaaucucaacgcuu

SEQ ID NO: 121119 - RNA, 32 nt, Human
cgcgguggcucacaccuguaaugccagcacuu

SEQ ID NO: 121120 - RNA, 32 nt, Human
cgcgguggcucacaccuguaucccagcacuuu

SEQ ID NO: 121121 - RNA, 32 nt, Human
cgcgguggcucacaccugucaucccagcaguu

SEQ ID NO: 121122 - RNA, 32 nt, Human
cgcgguggcucacaccugugaucccagcacuu

SEQ ID NO: 121123 - RNA, 32 nt, Human
cgcgguggcucacaccuuaaucccagcacuuu

SEQ ID NO: 121124 - RNA, 23 nt, Human
cgcgguggcucacaucuguaauc

SEQ ID NO: 121125 - RNA, 32 nt, Human
cgcgguggcucacaucuguaaucccagcacuu

SEQ ID NO: 121126 - RNA, 32 nt, Human
cgcgguggcucaccccuguaauccuagcacuu

SEQ ID NO: 121127 - RNA, 32 nt, Human
cgcgguggcucacgcauguaaucccagcacuu

SEQ ID NO: 121128 - RNA, 32 nt, Human
cgcgguggcucacgccaggaaucccagcacuu

SEQ ID NO: 121129 - RNA, 32 nt, Human
cgcgguggcucacgcccauaaucccagcacuu

SEQ ID NO: 121130 - RNA, 32 nt, Human
cgcgguggcucacgccuauaaucccagcacuu

SEQ ID NO: 121131 - RNA, 32 nt, Human
cgcgguggcucacgccugcaaucccagcacuu

SEQ ID NO: 121132 - RNA, 32 nt, Human
cgcgguggcucacgccuggaaucccagcacuu

SEQ ID NO: 121133 - RNA, 32 nt, Human
cgcgguggcucacgccuguaaucacagcacuu

SEQ ID NO: 121134 - RNA, 32 nt, Human
cgcgguggcucacgccuguaaucccaaagugc

SEQ ID NO: 121135 - RNA, 32 nt, Human
cgcgguggcucacgccuguaaucccaacacuu

SEQ ID NO: 121136 - RNA, 32 nt, Human
cgcgguggcucacgccuguaaucccagcaauu

SEQ ID NO: 121137 - RNA, 32 nt, Human
cgcgguggcucacgccuguaaucccagcaccu

SEQ ID NO: 121138 - RNA, 32 nt, Human
cgcgguggcucacgccuguaaucccagcacug

SEQ ID NO: 121139 - RNA, 32 nt, Human
cgcgguggcucacgccuguaaucccagcacuu

SEQ ID NO: 121140 - RNA, 32 nt, Human
cgcgguggcucacgccuguaaucccagcaguu

SEQ ID NO: 121141 - RNA, 32 nt, Human
cgcgguggcucacgccuguaaucccagcauuu

SEQ ID NO: 121142 - RNA, 32 nt, Human
cgcgguggcucacgccuguaaucccagcgcuu

SEQ ID NO: 121143 - RNA, 32 nt, Human
cgcgguggcucacgccuguaaucccaggacuu

SEQ ID NO: 121144 - RNA, 32 nt, Human
cgcgguggcucacgccuguaaucccggcacuu

SEQ ID NO: 121145 - RNA, 32 nt, Human
cgcgguggcucacgccuguaauccuagcacuu

SEQ ID NO: 121146 - RNA, 32 nt, Human
cgcgguggcucacgccuguaauccuagcauuu

SEQ ID NO: 121147 - RNA, 32 nt, Human
cgcgguggcucacgccuguaauccuauccuuu

SEQ ID NO: 121148 - RNA, 32 nt, Human
cgcgguggcucacgccuguaaucgcagcacuu

SEQ ID NO: 121149 - RNA, 32 nt, Human
cgcgguggcucacgccuguaauuccagcacuu

SEQ ID NO: 121150 - RNA, 32 nt, Human
cgcgguggcucacgccuguaauuccaucauuu

SEQ ID NO: 121151 - RNA, 32 nt, Human
cgcgguggcucacgccuguaauucuagcacuu

SEQ ID NO: 121152 - RNA, 32 nt, Human
cgcgguggcucacgcuuguaaucccagcacuu

SEQ ID NO: 121153 - RNA, 32 nt, Human
cgcgguggcucacgcuuguaaucccggcacuu

SEQ ID NO: 121154 - RNA, 32 nt, Human
cgcgguggcucacgucuauaaucccagcacug

SEQ ID NO: 121155 - RNA, 32 nt, Human
cgcgguggcucacgucuguaaucccagcacuu

SEQ ID NO: 121156 - RNA, 32 nt, Human
cgcgguggcucacguuuguaaucccagcacuu

SEQ ID NO: 121157 - RNA, 32 nt, Human
cgcgguggcucacuccuguaaucccagcacuc

SEQ ID NO: 121158 - RNA, 32 nt, Human
cgcgguggcucacuccuguaaucccagcacuu

SEQ ID NO: 121159 - RNA, 32 nt, Human
cgcgguggcucacuccuguaaucccagcauuu

SEQ ID NO: 121160 - RNA, 32 nt, Human
cgcgguggcucaggccuguaaucccagcacuc

SEQ ID NO: 121161 - RNA, 32 nt, Human
cgcgguggcucaggccuguaaucccagcacug

SEQ ID NO: 121162 - RNA, 32 nt, Human
cgcgguggcucaggccuguaaucccagcucug

SEQ ID NO: 121163 - RNA, 32 nt, Human
cgcgguggcucaucccuguaaucccagcacuu

SEQ ID NO: 121164 - RNA, 32 nt, Human
cgcgguggcucaugccuguaaucaaucccagc

SEQ ID NO: 121165 - RNA, 32 nt, Human
cgcgguggcucaugccuguaaucauagcauua

SEQ ID NO: 121166 - RNA, 32 nt, Human
cgcgguggcucaugccuguaaucccagcacuc

SEQ ID NO: 121167 - RNA, 32 nt, Human
cgcgguggcucaugccuguaaucccagcacuu

SEQ ID NO: 121168 - RNA, 32 nt, Human
cgcgguggcucaugccuguaaucccagcauuu

SEQ ID NO: 121169 - RNA, 32 nt, Human
cgcgguggcucaugccuguaaucccagcgcuu

SEQ ID NO: 121170 - RNA, 32 nt, Human
cgcgguggcucaugccuguaauccgagcacuu

SEQ ID NO: 121171 - RNA, 32 nt, Human
cgcgguggcucaugccuguaauccuagcacuu

SEQ ID NO: 121172 - RNA, 32 nt, Human
cgcgguggcucaugccuguaauuccagcacuu

SEQ ID NO: 121173 - RNA, 32 nt, Human
cgcgguggcucaugccuuuaaucccagcacuu

SEQ ID NO: 121174 - RNA, 32 nt, Human
cgcgguggcucaugcguguaaucccagcacuu

SEQ ID NO: 121175 - RNA, 32 nt, Human
cgcgguggcucaugcuuguaaucccagcacuu

SEQ ID NO: 121176 - RNA, 32 nt, Human
cgcgguggcucccgccuguaaucccagcacuu

SEQ ID NO: 121177 - RNA, 32 nt, Human
cgcgguggcucgcaccuguaaucccagcacuc

SEQ ID NO: 121178 - RNA, 32 nt, Human
cgcgguggcucgggccuguaaucccagcacuu

SEQ ID NO: 121179 - RNA, 32 nt, Human
cgcgguggcucgugccuguaaucccagcacuu

SEQ ID NO: 121180 - RNA, 32 nt, Human
cgcgguggcucuugccuguaaucccagcacuu

SEQ ID NO: 121181 - RNA, 32 nt, Human
cgcgguggcugaugccuguaaucccagcacuu

SEQ ID NO: 121182 - RNA, 23 nt, Human
cgcgguggcuuacaccuguaauc

SEQ ID NO: 121183 - RNA, 32 nt, Human
cgcgguggcuuacaccuguaauuccagcacuu

SEQ ID NO: 121184 - RNA, 32 nt, Human
cgcgguggcuuacgccuauaaucccagcacuu

SEQ ID NO: 121185 - RNA, 32 nt, Human
cgcgguggcuuacgccuguaaucccagcacuu

SEQ ID NO: 121186 - RNA, 32 nt, Human
cgcgguggcuuacgccuguaaucccagcgcuu

SEQ ID NO: 121187 - RNA, 32 nt, Human
cgcgguggcuuacgccuguaauuccagcacuu

SEQ ID NO: 121188 - RNA, 32 nt, Human
cgcgguggcuuaugccuguaaucccagcacuu

SEQ ID NO: 121189 - RNA, 32 nt, Human
cgcggugggcccaggcucagaggucccggcgc

SEQ ID NO: 121190 - RNA, 32 nt, Human
cgcgguggucucgggggcaaaauaacauggca

SEQ ID NO: 121191 - RNA, 32 nt, Human
cgcgguggugcaugccuguaaucccagcuacu

SEQ ID NO: 121192 - RNA, 32 nt, Human
cgcgguggugggcaccuguagucccagcuacu

SEQ ID NO: 121193 - RNA, 32 nt, Human
cgcggugguucacgccuggaaucccagcauuu

SEQ ID NO: 121194 - RNA, 32 nt, Human
cgcggugguucacgccuguaaucccagcacuu

SEQ ID NO: 121195 - RNA, 32 nt, Human
cgcggugguucaugccuguaaucccagcacua

SEQ ID NO: 121196 - RNA, 32 nt, Human
cgcggugucucacaccuguaaucccagcacuu

SEQ ID NO: 121197 - RNA, 32 nt, Human
cgcgguuagucccugcuggccaccccacugcg

SEQ ID NO: 121198 - RNA, 18 nt, Human
cgcgguuccuccccgagc

SEQ ID NO: 121199 - RNA, 32 nt, Human
cgcgguuccucuucccuucccugcugagacua

SEQ ID NO: 121200 - RNA, 32 nt, Human
cgcgguugccgguagauuguugccaguugcca

SEQ ID NO: 121201 - RNA, 32 nt, Human
cgcgguugcucacgccuguaaucccagcacuu

SEQ ID NO: 121202 - RNA, 32 nt, Human
cgcgguugggcuggccacggaggcagggccgc

SEQ ID NO: 121203 - RNA, 32 nt, Human
cgcgguugucauuccauugucauagcccuucc

SEQ ID NO: 121204 - RNA, 32 nt, Human
cgcguacacuucaguucagcaggaugggcugg

SEQ ID NO: 121205 - RNA, 32 nt, Human
cgcguaccgccgacuugagcgaauguguccac

SEQ ID NO: 121206 - RNA, 23 nt, Human
cgcguagagcagcagcacgagca

SEQ ID NO: 121207 - RNA, 32 nt, Human
cgcguagcagcacacacuucacaaagccaagc

SEQ ID NO: 121208 - RNA, 32 nt, Human
cgcguagcuagugccucccgugcgcccgcggg

SEQ ID NO: 121209 - RNA, 32 nt, Human
cgcguauacagaugcaugccaugccauaggua

SEQ ID NO: 121210 - RNA, 32 nt, Human
cgcgucacugcacuccagccugagugacagag

SEQ ID NO: 121211 - RNA, 32 nt, Human
cgcgucacugcacuccagccuggacaacagag

SEQ ID NO: 121212 - RNA, 32 nt, Human
cgcgucacugcacuccagccugggagacagag

SEQ ID NO: 121213 - RNA, 32 nt, Human
cgcgucacugcacuccagccugggcgacagag

SEQ ID NO: 121214 - RNA, 32 nt, Human
cgcgucacugcacuccagcgugggcgacagag

SEQ ID NO: 121215 - RNA, 32 nt, Human
cgcgucacugcacuccagucuagcaacagagc

SEQ ID NO: 121216 - RNA, 32 nt, Human
cgcgucacuguaggaagagguggaccugugcu

SEQ ID NO: 121217 - RNA, 32 nt, Human
cgcgucagaacugaagagaggaaggggaggag

SEQ ID NO: 121218 - RNA, 32 nt, Human
cgcgucagcggauuauggauuacuaugagacc

SEQ ID NO: 121219 - RNA, 32 nt, Human
cgcgucaggagaagggagcacuggcuuugcuu

SEQ ID NO: 121220 - RNA, 32 nt, Human
cgcgucaggccugccuagacggugcugggagc

SEQ ID NO: 121221 - RNA, 32 nt, Human
cgcgucaguacacuccagccugggcaacaaug

SEQ ID NO: 121222 - RNA, 32 nt, Human
cgcgucaucacugucuaagcaguggcaucuga

SEQ ID NO: 121223 - RNA, 32 nt, Human
cgcgucauugcacuccagccugggcaacaaga

SEQ ID NO: 121224 - RNA, 32 nt, Human
cgcguccagccccaggcccuggagcuugucgu

SEQ ID NO: 121225 - RNA, 32 nt, Human
cgcguccccagcuuccuagccugggugggagg

SEQ ID NO: 121226 - RNA, 32 nt, Human
cgcguccccugccccucugcggcaacgacaug

SEQ ID NO: 121227 - RNA, 32 nt, Human
cgcgucccucucuccacgaggcugccggcuua

SEQ ID NO: 121228 - RNA, 22 nt, Human
cgcguccggaugguccugguca

SEQ ID NO: 121229 - RNA, 32 nt, Human
cgcguccuccccucggcggggaggccggcuag

SEQ ID NO: 121230 - RNA, 32 nt, Human
cgcguccugcagcuguccgaggugcuccaguu

SEQ ID NO: 121231 - RNA, 32 nt, Human
cgcguccugccugcucuuccuguuucuuuccc

SEQ ID NO: 121232 - RNA, 32 nt, Human
cgcguccuggagcugcuccugcccauccgcua

SEQ ID NO: 121233 - RNA, 32 nt, Human
cgcguccuggcagagaaaaggcugaaauggag

SEQ ID NO: 121234 - RNA, 32 nt, Human
cgcgucgaccuggacuucucuggaccacaguc

SEQ ID NO: 121235 - RNA, 32 nt, Human
cgcgucgccccagcugccccggucgcuggacu

SEQ ID NO: 121236 - RNA, 32 nt, Human
cgcgucgcccucccaggcucucaacaggggag

SEQ ID NO: 121237 - RNA, 32 nt, Human
cgcgucgcggaggcacguguggagccccggca

SEQ ID NO: 121238 - RNA, 32 nt, Human
cgcgucgcuggacuccagcccgggcgacagag

SEQ ID NO: 121239 - RNA, 32 nt, Human
cgcgucggagcacggccagccuuccgccacga

SEQ ID NO: 121240 - RNA, 32 nt, Human
cgcgucggggcugagggcugcugcggcgcagg

SEQ ID NO: 121241 - RNA, 32 nt, Human
cgcgucguccuccucgcccuccaggccgcccg

SEQ ID NO: 121242 - RNA, 32 nt, Human
cgcgucuacccugggauucaggaaaaggccug

SEQ ID NO: 121243 - RNA, 32 nt, Human
cgcgucuaguccaccucgucccucucugcagc

SEQ ID NO: 121244 - RNA, 32 nt, Human
cgcgucucacccuguugcccaggcuggagugc

SEQ ID NO: 121245 - RNA, 32 nt, Human
cgcgucucagccucgccaccuuccugcugggc

SEQ ID NO: 121246 - RNA, 32 nt, Human
cgcgucuccagccucugcacacacauuggcgg

SEQ ID NO: 121247 - RNA, 32 nt, Human
cgcgucuccgccuugccguccagccuguccuu

SEQ ID NO: 121248 - RNA, 32 nt, Human
cgcgucuccuucccucuccccaaagccuggau

SEQ ID NO: 121249 - RNA, 32 nt, Human
cgcgucuccuuuccuuuccuuccgacccaucc

SEQ ID NO: 121250 - RNA, 32 nt, Human
cgcgucucgccacgggcucugccagcagacag

SEQ ID NO: 121251 - RNA, 32 nt, Human
cgcgucucggugcccccgcccccugggcugga

SEQ ID NO: 121252 - RNA, 32 nt, Human
cgcgucucuucucugcacuccugccgaccuuc

SEQ ID NO: 121253 - RNA, 17 nt, Human
cgcgucugccccgcgug

SEQ ID NO: 121254 - RNA, 32 nt, Human
cgcgucugggacgaggaugacgacaucaaauc

SEQ ID NO: 121255 - RNA, 32 nt, Human
cgcgucugggcccuccugcagcguccaugaug

SEQ ID NO: 121256 - RNA, 32 nt, Human
cgcgucuggggccgcgcucuccacacuuagcc

SEQ ID NO: 121257 - RNA, 32 nt, Human
cgcgucuguagucccaguuacucuggaggcug

SEQ ID NO: 121258 - RNA, 32 nt, Human
cgcgugcacaucucaucccaggagggagagag

SEQ ID NO: 121259 - RNA, 32 nt, Human
cgcgugcaggguguguguccacgagcgacgau

SEQ ID NO: 121260 - RNA, 32 nt, Human
cgcgugccauuucacuccagccuggacaacaa

SEQ ID NO: 121261 - RNA, 32 nt, Human
cgcgugccugcccaugccagcacuuccuuaag

SEQ ID NO: 121262 - RNA, 32 nt, Human
cgcgugccuguaaucccagcuacuugggaggc

SEQ ID NO: 121263 - RNA, 32 nt, Human
cgcgugccuguaaucccagcuacuugggaguc

SEQ ID NO: 121264 - RNA, 32 nt, Human
cgcgugccuguaauccuagcuacucaggaggc

SEQ ID NO: 121265 - RNA, 32 nt, Human
cgcgugcgcgagccgggguugcagcccagccg

SEQ ID NO: 121266 - RNA, 32 nt, Human
cgcgugcggguccccuccuggccggcagaggg

SEQ ID NO: 121267 - RNA, 32 nt, Human
cgcgugcgugagcgcgccugcgccgccagggc

SEQ ID NO: 121268 - RNA, 32 nt, Human
cgcgugcugagggagacgcaggagguggagcc

SEQ ID NO: 121269 - RNA, 32 nt, Human
cgcgugcuggggugguuuggggagagggcuga

SEQ ID NO: 121270 - RNA, 32 nt, Human
cgcgugcuuguaaucccagcuacucaggaggc

SEQ ID NO: 121271 - RNA, 32 nt, Human
cgcguggacuccugagccugcggguccagggu

SEQ ID NO: 121272 - RNA, 32 nt, Human
cgcguggagcaggcuugcccagcugggaagcc

SEQ ID NO: 121273 - RNA, 32 nt, Human
cgcguggagcuacugcccccugcuccagcgac

SEQ ID NO: 121274 - RNA, 17 nt, Human
cgcguggcagccgugcg

SEQ ID NO: 121275 - RNA, 21 nt, Human
cgcguggccagggccggguug

SEQ ID NO: 121276 - RNA, 19 nt, Human
cgcguggcgaaggccugcg

SEQ ID NO: 121277 - RNA, 24 nt, Human
cgcguggcgcuggagcgggcguug

SEQ ID NO: 121278 - RNA, 32 nt, Human
cgcguggcggcgccggcucccuagccaccgcg

SEQ ID NO: 121279 - RNA, 32 nt, Human
cgcgugggaacccuuauuuccaaaggaaaaac

SEQ ID NO: 121280 - RNA, 32 nt, Human
cgcgugggcgugccugucugcuccggcagcac

SEQ ID NO: 121281 - RNA, 32 nt, Human
cgcguggugccacccuuccuguccgcagcggc

SEQ ID NO: 121282 - RNA, 32 nt, Human
cgcgugguuggcagaggcagagacauaagacg

SEQ ID NO: 121283 - RNA, 32 nt, Human
cgcgugucguccaaacagcagugccugcgucc

SEQ ID NO: 121284 - RNA, 32 nt, Human
cgcgugugaaaggcagaacuaacgugcggaaa

SEQ ID NO: 121285 - RNA, 18 nt, Human
cgcgugugaugucccggg

SEQ ID NO: 121286 - RNA, 32 nt, Human
cgcguguguaaucccagcuacuugggaggcug

SEQ ID NO: 121287 - RNA, 32 nt, Human
cgcguguguuucaggcugcauguaccaaguag

SEQ ID NO: 121288 - RNA, 32 nt, Human
cgcguucucuucacugguuuaucugcagaaau

SEQ ID NO: 121289 - RNA, 32 nt, Human
cgcguucugcuccccaccugccgcacuugaca

SEQ ID NO: 121290 - RNA, 32 nt, Human
cgcguugcuacgugcggggaugacauggaucc

SEQ ID NO: 121291 - RNA, 32 nt, Human
cgcguuuaaagagaaccucucuggcgaagcau

SEQ ID NO: 121292 - RNA, 32 nt, Human
cgcguuucaucccgggccacguggaguucuuu

SEQ ID NO: 121293 - RNA, 32 nt, Human
cgcuaaagccugugcuccagagccuccaggca

SEQ ID NO: 121294 - RNA, 32 nt, Human
cgcuaacaucagcagcagcccaaaagguucuc

SEQ ID NO: 121295 - RNA, 23 nt, Human
cgcuaaccaugcuaccagguggc

SEQ ID NO: 121296 - RNA, 32 nt, Human
cgcuaaccuguggcugauccuugacuccucuu

SEQ ID NO: 121297 - RNA, 32 nt, Human
cgcuaagcgucccagccgcaucccucccgcag

SEQ ID NO: 121298 - RNA, 32 nt, Human
cgcuaauccggugaaaccucgucucuacuaaa

SEQ ID NO: 121299 - RNA, 32 nt, Human
cgcuaauuagcuugauuguggugacccuucca

SEQ ID NO: 121300 - RNA, 32 nt, Human
cgcuacacucgccauccucugcguccaccucg

SEQ ID NO: 121301 - RNA, 32 nt, Human
cgcuacagaucacagagaugugaacagacaau

SEQ ID NO: 121302 - RNA, 32 nt, Human
cgcuacagccugggcgacacaguaagacccug

SEQ ID NO: 121303 - RNA, 32 nt, Human
cgcuaccaccaccaccaccgccaccacuacca

SEQ ID NO: 121304 - RNA, 32 nt, Human
cgcuaccaccacucuccugccugguguagaca

SEQ ID NO: 121305 - RNA, 32 nt, Human
cgcuaccacugccggauguauucuccaauacc

SEQ ID NO: 121306 - RNA, 32 nt, Human
cgcuacccaauucugucaucuccaagcugagu

SEQ ID NO: 121307 - RNA, 32 nt, Human
cgcuacccccugcaccugaggcccagcgagga

SEQ ID NO: 121308 - RNA, 32 nt, Human
cgcuacccccugcaccugaggcccagggagga

SEQ ID NO: 121309 - RNA, 32 nt, Human
cgcuaccucccucuccccguugauguccauuc

SEQ ID NO: 121310 - RNA, 32 nt, Human
cgcuaccucgcuccuccucccacccaaucccg

SEQ ID NO: 121311 - RNA, 32 nt, Human
cgcuaccugcccagacaccaccaaguucucug

SEQ ID NO: 121312 - RNA, 23 nt, Human
cgcuaccugcgccgaagcugccu

SEQ ID NO: 121313 - RNA, 32 nt, Human
cgcuaccugcuggccuuccuggcagaugaccu

SEQ ID NO: 121314 - RNA, 32 nt, Human
cgcuacgccuggcuaauuuuuguauuuuuagu

SEQ ID NO: 121315 - RNA, 32 nt, Human
cgcuacggaguaggaggccacuaugaggagaa

SEQ ID NO: 121316 - RNA, 32 nt, Human
cgcuacgggaaggcaugccagccugggcgaug

SEQ ID NO: 121317 - RNA, 32 nt, Human
cgcuacuaaaaauacaaaaaugagucggacau

SEQ ID NO: 121318 - RNA, 32 nt, Human
cgcuacuaaaaaugcaaaaauuagcugggugu

SEQ ID NO: 121319 - RNA, 32 nt, Human
cgcuacucauguccaaguugaucucucuagga

SEQ ID NO: 121320 - RNA, 32 nt, Human
cgcuacugagucuguguaguaaauuuuugacu

SEQ ID NO: 121321 - RNA, 32 nt, Human
cgcuacugcacuccagccuggacaacagaggg

SEQ ID NO: 121322 - RNA, 32 nt, Human
cgcuacugcacuccagccugggcgacagagug

SEQ ID NO: 121323 - RNA, 32 nt, Human
cgcuacugcacuccagccugggcgacaguacc

SEQ ID NO: 121324 - RNA, 32 nt, Human
cgcuacugcacuccagccugggugacagagug

SEQ ID NO: 121325 - RNA, 32 nt, Human
cgcuacugcacuccagccugggugacagugug

SEQ ID NO: 121326 - RNA, 32 nt, Human
cgcuacugcauuccagccugggcgccgagaua

SEQ ID NO: 121327 - RNA, 32 nt, Human
cgcuacugcgcuccagccugagugauagagug

SEQ ID NO: 121328 - RNA, 32 nt, Human
cgcuacugcuacugcugguggccaccacaggc

SEQ ID NO: 121329 - RNA, 32 nt, Human
cgcuacuugguugagccuggugaagaauguau

SEQ ID NO: 121330 - RNA, 32 nt, Human
cgcuagaaaccaguuauauccauugccacagc

SEQ ID NO: 121331 - RNA, 23 nt, Human
cgcuagaacccaggagacggagg

SEQ ID NO: 121332 - RNA, 32 nt, Human
cgcuagagaguaccuguuacccuaccuugugc

SEQ ID NO: 121333 - RNA, 32 nt, Human
cgcuagagcccgggcgacagagcaagacuugg

SEQ ID NO: 121334 - RNA, 32 nt, Human
cgcuagagcuggaaggcaggaugaggagaggu

SEQ ID NO: 121335 - RNA, 32 nt, Human
cgcuagagcugugaaaaauucucuccagacau

SEQ ID NO: 121336 - RNA, 32 nt, Human
cgcuagaucaaggucacagcacugccuacacc

SEQ ID NO: 121337 - RNA, 32 nt, Human
cgcuagcggggcagggcagggggagggaguca

SEQ ID NO: 121338 - RNA, 32 nt, Human
cgcuagcucucaggauggggauguuggggagg

SEQ ID NO: 121339 - RNA, 32 nt, Human
cgcuagcuguagagcacagggugaauugggau

SEQ ID NO: 121340 - RNA, 32 nt, Human
cgcuaggaagcccucgcuucucucaacaguuc

SEQ ID NO: 121341 - RNA, 32 nt, Human
cgcuaggcgggagagcgcggccauggcggggc

SEQ ID NO: 121342 - RNA, 32 nt, Human
cgcuaggcugccgggccagggucagcaggcuc

SEQ ID NO: 121343 - RNA, 32 nt, Human
cgcuaggggccugggagcccuguggcuggauc

SEQ ID NO: 121344 - RNA, 32 nt, Human
cgcuagguagaacacugcuaauaauaauagcu

SEQ ID NO: 121345 - RNA, 32 nt, Human
cgcuagucccuuuugccacccuucccaguccc

SEQ ID NO: 121346 - RNA, 32 nt, Human
cgcuaguccucaucugagucucagccuggguc

SEQ ID NO: 121347 - RNA, 32 nt, Human
cgcuaguugcugccucguaucucagguuuuuc

SEQ ID NO: 121348 - RNA, 32 nt, Human
cgcuauacuuaacagggcaucauagaauacuc

SEQ ID NO: 121349 - RNA, 32 nt, Human
cgcuauagccagacuaccucucuagauuucuc

SEQ ID NO: 121350 - RNA, 28 nt, Human
cgcuauagggggaggggagcucagggua

SEQ ID NO: 121351 - RNA, 32 nt, Human
cgcuauggacccagauaggagggguuaggcau

SEQ ID NO: 121352 - RNA, 32 nt, Human
cgcuauggcgcacacacacagugcacguccac

SEQ ID NO: 121353 - RNA, 32 nt, Human
cgcuaugggcccaaccucccacucccaccucc

SEQ ID NO: 121354 - RNA, 29 nt, Human
cgcuauggggcugagccgcgugcgggcgg

SEQ ID NO: 121355 - RNA, 18 nt, Human
cgcuauguguuccuucaa

SEQ ID NO: 121356 - RNA, 32 nt, Human
cgcuauguugcccaggcuggucucaaacuccu

SEQ ID NO: 121357 - RNA, 32 nt, Human
cgcuauguugcccaggcuggucucgaacuccu

SEQ ID NO: 121358 - RNA, 32 nt, Human
cgcuauguuggccaggcuggucuugacuccug

SEQ ID NO: 121359 - RNA, 32 nt, Human
cgcuauugcacuccagccugggugacagagca

SEQ ID NO: 121360 - RNA, 32 nt, Human
cgcuauugucucuacuccaucuucccauaaau

SEQ ID NO: 121361 - RNA, 32 nt, Human
cgcucaagccccggaguuggagaccagccaga

SEQ ID NO: 121362 - RNA, 32 nt, Human
cgcucacacaaacauuacgaaguuuccuaaaa

SEQ ID NO: 121363 - RNA, 32 nt, Human
cgcucacacaugcugucacgcauacacacacg

SEQ ID NO: 121364 - RNA, 32 nt, Human
cgcucacaccuguaaucucagcacuuugggag

SEQ ID NO: 121365 - RNA, 32 nt, Human
cgcucacacucuuuccccuauuggagucccca

SEQ ID NO: 121366 - RNA, 32 nt, Human
cgcucacagccucgcgaagguggagaagggca

SEQ ID NO: 121367 - RNA, 32 nt, Human
cgcucacauugcagucaucacagacuuacgca

SEQ ID NO: 121368 - RNA, 32 nt, Human
cgcucaccccugggcaagaggcuggaaguuca

SEQ ID NO: 121369 - RNA, 32 nt, Human
cgcucacccugggccucuagguuagacucagc

SEQ ID NO: 121370 - RNA, 32 nt, Human
cgcucacccuguucccugaucugcuccagaug

SEQ ID NO: 121371 - RNA, 32 nt, Human
cgcucaccuguaaucccaccauuuugggaggc

SEQ ID NO: 121372 - RNA, 32 nt, Human
cgcucacgccuguaaucccagcacuuugggag

SEQ ID NO: 121373 - RNA, 32 nt, Human
cgcucacggggccgugccaccgucucuacgug

SEQ ID NO: 121374 - RNA, 22 nt, Human
cgcucacuccucgccggccgcc

SEQ ID NO: 121375 - RNA, 32 nt, Human
cgcucacugacacucuguaaaggccaaucaau

SEQ ID NO: 121376 - RNA, 32 nt, Human
cgcucacugcaacauccgccucccggacucaa

SEQ ID NO: 121377 - RNA, 32 nt, Human
cgcucacugcaaccuccaccucccagguucaa

SEQ ID NO: 121378 - RNA, 32 nt, Human
cgcucacugcaaccuccaccuccuggcuucaa

SEQ ID NO: 121379 - RNA, 32 nt, Human
cgcucacugcaaccuccgccucccagguucaa

SEQ ID NO: 121380 - RNA, 32 nt, Human
cgcucacugcaaccuccgccucccggguucac

SEQ ID NO: 121381 - RNA, 32 nt, Human
cgcucacugcaaccucugccucccgguucaag

SEQ ID NO: 121382 - RNA, 32 nt, Human
cgcucacugcaaccucugcuucccggguucaa

SEQ ID NO: 121383 - RNA, 32 nt, Human
cgcucacugcaagcacugccucccuccggggu

SEQ ID NO: 121384 - RNA, 32 nt, Human
cgcucacugcaagcuccgccucccggguucac

SEQ ID NO: 121385 - RNA, 32 nt, Human
cgcucacugcaagcucugccuccugggcucac

SEQ ID NO: 121386 - RNA, 32 nt, Human
cgcucacugcagccuccgccuccuggguucaa

SEQ ID NO: 121387 - RNA, 32 nt, Human
cgcucacugcaggcuccgccuccuggguucac

SEQ ID NO: 121388 - RNA, 32 nt, Human
cgcucacugccaccuccgccucucuaguucaa

SEQ ID NO: 121389 - RNA, 32 nt, Human
cgcucacuucaaccucugccuucuggguucga

SEQ ID NO: 121390 - RNA, 32 nt, Human
cgcucagaacaguaucuuugcacuccaaucau

SEQ ID NO: 121391 - RNA, 32 nt, Human
cgcucagacagucaugcaccacccucaauccc

SEQ ID NO: 121392 - RNA, 32 nt, Human
cgcucagagugggacaguagugaacagagcug

SEQ ID NO: 121393 - RNA, 19 nt, Human
cgcucagcaccgcgucugu

SEQ ID NO: 121394 - RNA, 32 nt, Human
cgcucagccagccugcuggacuggcacccgug

SEQ ID NO: 121395 - RNA, 32 nt, Human
cgcucagccaggagaagaaugaccucaccauc

SEQ ID NO: 121396 - RNA, 32 nt, Human
cgcucagccgagcucaucagacgggcgguugu

SEQ ID NO: 121397 - RNA, 21 nt, Human
cgcucagccuggagugcagug

SEQ ID NO: 121398 - RNA, 23 nt, Human
cgcucagcugagccccggucugc

SEQ ID NO: 121399 - RNA, 32 nt, Human
cgcucagcugcccaggcuggagugugguggcg

SEQ ID NO: 121400 - RNA, 32 nt, Human
cgcucagcugcugcccagccucggcugugagg

SEQ ID NO: 121401 - RNA, 20 nt, Human
cgcucagcuuccgggccugc

SEQ ID NO: 121402 - RNA, 32 nt, Human
cgcucaggaugaaagaggagcugagagaagug

SEQ ID NO: 121403 - RNA, 32 nt, Human
cgcucaggcagcuggacggcagcugcgcccca

SEQ ID NO: 121404 - RNA, 21 nt, Human
cgcucaggcuggagugcaaug

SEQ ID NO: 121405 - RNA, 21 nt, Human
cgcucaggcuggagugcagug

SEQ ID NO: 121406 - RNA, 20 nt, Human
cgcucaggcugggugcagug

SEQ ID NO: 121407 - RNA, 16 nt, Human
cgcucagggugcagug

SEQ ID NO: 121408 - RNA, 20 nt, Human
cgcucagugagacuggucau

SEQ ID NO: 121409 - RNA, 32 nt, Human
cgcucaucacggucagucauuccuucuccuuu

SEQ ID NO: 121410 - RNA, 32 nt, Human
cgcucaucacuacucuguacacaaugucuuga

SEQ ID NO: 121411 - RNA, 32 nt, Human
cgcucaugcccguaaucccagcacuuugguag

SEQ ID NO: 121412 - RNA, 32 nt, Human
cgcucaugccuguggucccagcacuuugggag

SEQ ID NO: 121413 - RNA, 30 nt, Human
cgcucauggcguucagcccguggcagaucc

SEQ ID NO: 121414 - RNA, 32 nt, Human
cgcucauucuucuuccuauuguucccugacau

SEQ ID NO: 121415 - RNA, 32 nt, Human
cgcucauuucauccucuggcuuccucacugcc

SEQ ID NO: 121416 - RNA, 32 nt, Human
cgcuccaaaagauggcugugauagaucuugug

SEQ ID NO: 121417 - RNA, 32 nt, Human
cgcuccaaacugggugacauggugagaccuug

SEQ ID NO: 121418 - RNA, 32 nt, Human
cgcuccaacuauuccaaccaucccgggaaggg

SEQ ID NO: 121419 - RNA, 32 nt, Human
cgcuccaauggcaugugggcacauuccaugac

SEQ ID NO: 121420 - RNA, 32 nt, Human
cgcuccaccaacaccucugugagucucaucau

SEQ ID NO: 121421 - RNA, 32 nt, Human
cgcuccacgggaacagagagggugagaagggc

SEQ ID NO: 121422 - RNA, 32 nt, Human
cgcuccacugcacuccagcccaggugacagug

SEQ ID NO: 121423 - RNA, 32 nt, Human
cgcuccacugcacuccagccugggugacagau

SEQ ID NO: 121424 - RNA, 32 nt, Human
cgcuccacugugguccagaaaaggaggccuuu

SEQ ID NO: 121425 - RNA, 32 nt, Human
cgcuccagacacagcucugcguccucgagcgg

SEQ ID NO: 121426 - RNA, 32 nt, Human
cgcuccagaugcgaaagccauggaguugagcu

SEQ ID NO: 121427 - RNA, 32 nt, Human
cgcuccagaugucugcauggguccucggcacu

SEQ ID NO: 121428 - RNA, 17 nt, Human
cgcuccagccccgggug

SEQ ID NO: 121429 - RNA, 32 nt, Human
cgcuccagccuaggugacagagcaagacucca

SEQ ID NO: 121430 - RNA, 32 nt, Human
cgcuccagccuggacaacacagugagacucug

SEQ ID NO: 121431 - RNA, 32 nt, Human
cgcuccagccuggcagacagagggaagauaug

SEQ ID NO: 121432 - RNA, 32 nt, Human
cgcuccagccugggcaacaagagcaagacucu

SEQ ID NO: 121433 - RNA, 22 nt, Human
cgcuccagccugggcaacagag

SEQ ID NO: 121434 - RNA, 32 nt, Human
cgcuccagccugggcaacagagcgagacucca

SEQ ID NO: 121435 - RNA, 32 nt, Human
cgcuccagccugggcaacagagcgagacuccg

SEQ ID NO: 121436 - RNA, 32 nt, Human
cgcuccagccugggcaacagagcgagacuuca

SEQ ID NO: 121437 - RNA, 32 nt, Human
cgcuccagccugggcaacagagugagacucca

SEQ ID NO: 121438 - RNA, 32 nt, Human
cgcuccagccugggcgaaagagugagacucca

SEQ ID NO: 121439 - RNA, 32 nt, Human
cgcuccagccugggcgacagagugguauucug

SEQ ID NO: 121440 - RNA, 32 nt, Human
cgcuccagccugggggagggggacauagcgag

SEQ ID NO: 121441 - RNA, 32 nt, Human
cgcuccagccugggugacagagcgagacccca

SEQ ID NO: 121442 - RNA, 32 nt, Human
cgcuccagccugggugacagagugagacuccg

SEQ ID NO: 121443 - RNA, 32 nt, Human
cgcuccagccugggugacagagugagacucug

SEQ ID NO: 121444 - RNA, 32 nt, Human
cgcuccagccuggguggcagagagagacucug

SEQ ID NO: 121445 - RNA, 32 nt, Human
cgcuccagccuggucgacagagugagacucca

SEQ ID NO: 121446 - RNA, 32 nt, Human
cgcuccagcuacucaggaggcugaggcaggag

SEQ ID NO: 121447 - RNA, 32 nt, Human
cgcuccaggaaggcgaggucggaucugagaua

SEQ ID NO: 121448 - RNA, 29 nt, Human
cgcuccaggcugggugugccuggaauuca

SEQ ID NO: 121449 - RNA, 32 nt, Human
cgcuccaucaccaggcuggagugcaguggugc

SEQ ID NO: 121450 - RNA, 32 nt, Human
cgcuccaugauuuagccugaggcucuucaaac

SEQ ID NO: 121451 - RNA, 32 nt, Human
cgcuccauggugcuggcgaggaggcugguggg

SEQ ID NO: 121452 - RNA, 32 nt, Human
cgcuccauugcacuccagccugggcaacaaga

SEQ ID NO: 121453 - RNA, 32 nt, Human
cgcuccauugcacuccagccugggugacagug

SEQ ID NO: 121454 - RNA, 32 nt, Human
cgcuccauugcccaggcuggacugcagcagcg

SEQ ID NO: 121455 - RNA, 32 nt, Human
cgcucccacugcacuccagccugggcgacaga

SEQ ID NO: 121456 - RNA, 32 nt, Human
cgcucccagaugagggccggacugccuccccu

SEQ ID NO: 121457 - RNA, 22 nt, Human
cgcucccagccccaccccggga

SEQ ID NO: 121458 - RNA, 32 nt, Human
cgcucccaggagaguggaggcugcaggaagag

SEQ ID NO: 121459 - RNA, 32 nt, Human
cgcucccagugcagcugccaccccagcccaaa

SEQ ID NO: 121460 - RNA, 32 nt, Human
cgcucccagugucuuccugugggggaagagca

SEQ ID NO: 121461 - RNA, 32 nt, Human
cgcuccccacucugcucugaugcaucagaaag

SEQ ID NO: 121462 - RNA, 32 nt, Human
cgcuccccagcagcucagaggauuccuuguua

SEQ ID NO: 121463 - RNA, 32 nt, Human
cgcuccccagccggccaccaaucccgcccucc

SEQ ID NO: 121464 - RNA, 32 nt, Human
cgcucccccagccuccgacccgaggcagaaua

SEQ ID NO: 121465 - RNA, 32 nt, Human
cgcucccccaggagcgcucccucagcucucuc

SEQ ID NO: 121466 - RNA, 20 nt, Human
cgcuccccccacucggaggc

SEQ ID NO: 121467 - RNA, 32 nt, Human
cgcucccccgcggagauuggugugugagcaga

SEQ ID NO: 121468 - RNA, 22 nt, Human
cgcucccccucacaucaguggc

SEQ ID NO: 121469 - RNA, 32 nt, Human
cgcuccccgccugggagcucagcuuuccucag

SEQ ID NO: 121470 - RNA, 32 nt, Human
cgcucccgaucuccuccugccugggccacuua

SEQ ID NO: 121471 - RNA, 32 nt, Human
cgcucccgcaccgccaucaugaucugccuggu

SEQ ID NO: 121472 - RNA, 32 nt, Human
cgcucccgcagccaugggcaccgggggccggc

SEQ ID NO: 121473 - RNA, 21 nt, Human
cgcucccggccccggccccgg

SEQ ID NO: 121474 - RNA, 32 nt, Human
cgcucccugcagcugcgacucagguccugcgu

SEQ ID NO: 121475 - RNA, 32 nt, Human
cgcucccugcucucuuuccuuuucaguuuuuc

SEQ ID NO: 121476 - RNA, 16 nt, Human
cgcucccuggcccggc

SEQ ID NO: 121477 - RNA, 32 nt, Human
cgcucccuggugcuugcccagcuuuuugaucu

SEQ ID NO: 121478 - RNA, 24 nt, Human
cgcuccgccgcccccuccagguga

SEQ ID NO: 121479 - RNA, 19 nt, Human
cgcuccgccgccgccgccg

SEQ ID NO: 121480 - RNA, 32 nt, Human
cgcuccgccgcuccgacccggcacgcaguccc

SEQ ID NO: 121481 - RNA, 32 nt, Human
cgcuccgcuaaagauuucaaauccaggggauu

SEQ ID NO: 121482 - RNA, 32 nt, Human
cgcuccgcucccugcccugcccugcccugccc

SEQ ID NO: 121483 - RNA, 32 nt, Human
cgcuccgggagcuagagccugaggucggcggc

SEQ ID NO: 121484 - RNA, 32 nt, Human
cgcuccgggaggcccgggagcggcaguggaac

SEQ ID NO: 121485 - RNA, 32 nt, Human
cgcuccgggcacggccagagggcaagugagca

SEQ ID NO: 121486 - RNA, 32 nt, Human
cgcuccgggcccacacacccagccucacucca

SEQ ID NO: 121487 - RNA, 32 nt, Human
cgcuccgucacccaggcuggagugcaguggca

SEQ ID NO: 121488 - RNA, 32 nt, Human
cgcuccgucacccaggcuggagugcaguggcg

SEQ ID NO: 121489 - RNA, 32 nt, Human
cgcuccgugccccucucugcagccucuccugc

SEQ ID NO: 121490 - RNA, 32 nt, Human
cgcuccuagggaggcucugaggggaugcaaca

SEQ ID NO: 121491 - RNA, 32 nt, Human
cgcuccucacgauggaguuucaugcuucauuu

SEQ ID NO: 121492 - RNA, 32 nt, Human
cgcuccucagcccugcguccuggggucgcugc

SEQ ID NO: 121493 - RNA, 32 nt, Human
cgcuccucccggagaguagugagaccccuggu

SEQ ID NO: 121494 - RNA, 32 nt, Human
cgcuccucccuugcccucaggccaggucccug

SEQ ID NO: 121495 - RNA, 32 nt, Human
cgcuccuccuaccugcuggccaucagcacgga

SEQ ID NO: 121496 - RNA, 32 nt, Human
cgcuccuccucacccucuaccucccugugcuc

SEQ ID NO: 121497 - RNA, 32 nt, Human
cgcuccuccuggucucuguccucuucccuaag

SEQ ID NO: 121498 - RNA, 32 nt, Human
cgcuccucucugagacagacagggaucaggag

SEQ ID NO: 121499 - RNA, 32 nt, Human
cgcuccucugcuuacuuuuccuccuggcugga

SEQ ID NO: 121500 - RNA, 32 nt, Human
cgcuccucugugugcucucacuuuccacugua

SEQ ID NO: 121501 - RNA, 32 nt, Human
cgcuccugcacggccgcacccaccucaacuuc

SEQ ID NO: 121502 - RNA, 32 nt, Human
cgcuccugcagcuacugcucagaaacgcuggg

SEQ ID NO: 121503 - RNA, 32 nt, Human
cgcuccugcucccuccuggggaggcugacggg

SEQ ID NO: 121504 - RNA, 18 nt, Human
cgcuccuggggccagcuc

SEQ ID NO: 121505 - RNA, 32 nt, Human
cgcuccugguagcugggacuacaggcacaggc

SEQ ID NO: 121506 - RNA, 32 nt, Human
cgcuccugguaucagagcugcuuuccagaggg

SEQ ID NO: 121507 - RNA, 32 nt, Human
cgcuccugguggggaauggcuggggcugggca

SEQ ID NO: 121508 - RNA, 32 nt, Human
cgcuccuguuccaccuucacaagaccaugaug

SEQ ID NO: 121509 - RNA, 32 nt, Human
cgcuccuguuugugcucagccauugaaaggau

SEQ ID NO: 121510 - RNA, 32 nt, Human
cgcuccuguuuugguggcccaggcucuccccu

SEQ ID NO: 121511 - RNA, 32 nt, Human
cgcuccuuccacacaagucuuucacaaccuca

SEQ ID NO: 121512 - RNA, 32 nt, Human
cgcuccuugcugagaccaucuccuggggcagg

SEQ ID NO: 121513 - RNA, 32 nt, Human
cgcuccuugggugcugcugcuacucagacuag

SEQ ID NO: 121514 - RNA, 32 nt, Human
cgcuccuugguugcagccgcugagguuagucc

SEQ ID NO: 121515 - RNA, 32 nt, Human
cgcucgauuuuuccucuucuguuccagcccuc

SEQ ID NO: 121516 - RNA, 32 nt, Human
cgcucgcaagcucacugggaaaacauggcgga

SEQ ID NO: 121517 - RNA, 32 nt, Human
cgcucgcagcaaccucugccucccagguucaa

SEQ ID NO: 121518 - RNA, 32 nt, Human
cgcucgccccgcgggcgaggcugcgguggaca

SEQ ID NO: 121519 - RNA, 32 nt, Human
cgcucgccggccgccgccacccucucucgcug

SEQ ID NO: 121520 - RNA, 32 nt, Human
cgcucgcgccucucccuccacaccucucugca

SEQ ID NO: 121521 - RNA, 32 nt, Human
cgcucgcuacaaccuccaccucccagcugccu

SEQ ID NO: 121522 - RNA, 32 nt, Human
cgcucgcucccagcucugucaguggcccgcgg

SEQ ID NO: 121523 - RNA, 24 nt, Human
cgcucgcuccucucccucgcagcc

SEQ ID NO: 121524 - RNA, 32 nt, Human
cgcucgcucgcucugcuucccugcugccggcu

SEQ ID NO: 121525 - RNA, 32 nt, Human
cgcucgcucgggaccuuccaccucuccaacau

SEQ ID NO: 121526 - RNA, 32 nt, Human
cgcucgcugcaaccaccaucuccuggguucag

SEQ ID NO: 121527 - RNA, 32 nt, Human
cgcucgcugcccggcccuccccggcuaugacg

SEQ ID NO: 121528 - RNA, 23 nt, Human
cgcucgcugucucucccggccgc

SEQ ID NO: 121529 - RNA, 32 nt, Human
cgcucggaccuggugcugcaggaugacuggag

SEQ ID NO: 121530 - RNA, 32 nt, Human
cgcucggagugacgggcccaccccgggcgagc

SEQ ID NO: 121531 - RNA, 32 nt, Human
cgcucggcccugcuuuuugcgaccugccguca

SEQ ID NO: 121532 - RNA, 21 nt, Human
cgcucggccgguggccgaggc

SEQ ID NO: 121533 - RNA, 32 nt, Human
cgcucggcgcugggacgcgacugcgcucaguu

SEQ ID NO: 121534 - RNA, 21 nt, Human
cgcucggcucaaggaugaagc

SEQ ID NO: 121535 - RNA, 32 nt, Human
cgcucggcuccuagcacccucugugguagggg

SEQ ID NO: 121536 - RNA, 32 nt, Human
cgcucgggaaaugcaggaaggccggguuguga

SEQ ID NO: 121537 - RNA, 32 nt, Human
cgcucgggaggcugaggcaggagaauugcuug

SEQ ID NO: 121538 - RNA, 22 nt, Human
cgcucgggaugucgugaagcug

SEQ ID NO: 121539 - RNA, 32 nt, Human
cgcucgggccgcccgggggaaaacauggcguc

SEQ ID NO: 121540 - RNA, 32 nt, Human
cgcucgggccuuuccccuugcgcccuggcucg

SEQ ID NO: 121541 - RNA, 32 nt, Human
cgcucgggcggcgggacccagggaaggcagcg

SEQ ID NO: 121542 - RNA, 32 nt, Human
cgcucggggaccccgacggcgcccagcccggc

SEQ ID NO: 121543 - RNA, 32 nt, Human
cgcucggggaccccggccacccgcagcccggc

SEQ ID NO: 121544 - RNA, 32 nt, Human
cgcucggggacugagguugcugcaguuuuucc

SEQ ID NO: 121545 - RNA, 32 nt, Human
cgcucgugccgugcucucuacccuccacaguc

SEQ ID NO: 121546 - RNA, 32 nt, Human
cgcucguuacccaggguggagugcagugguag

SEQ ID NO: 121547 - RNA, 32 nt, Human
cgcucuaucacccaggcugaagugcaguagug

SEQ ID NO: 121548 - RNA, 32 nt, Human
cgcucuaucgccaggcuggaguguaguggcau

SEQ ID NO: 121549 - RNA, 32 nt, Human
cgcucuauugcccagucuggagugcaguggca

SEQ ID NO: 121550 - RNA, 32 nt, Human
cgcucucaccuacacccugaggucuauucacu

SEQ ID NO: 121551 - RNA, 32 nt, Human
cgcucucaggccuccuccuccaucacagaugu

SEQ ID NO: 121552 - RNA, 32 nt, Human
cgcucucccacaccacuggcaccaggccccgc

SEQ ID NO: 121553 - RNA, 32 nt, Human
cgcucuccccuccuguggaucccuccgcacua

SEQ ID NO: 121554 - RNA, 32 nt, Human
cgcucucccguccagcccuaagccugcucugc

SEQ ID NO: 121555 - RNA, 32 nt, Human
cgcucucccuccucccuguguuuggccuuagu

SEQ ID NO: 121556 - RNA, 32 nt, Human
cgcucucccuccuccuccuccuccgagcugcu

SEQ ID NO: 121557 - RNA, 32 nt, Human
cgcucucccugccuccccugccgggcugcaag

SEQ ID NO: 121558 - RNA, 32 nt, Human
cgcucuccuaaguuuaauuacaacagcacgug

SEQ ID NO: 121559 - RNA, 32 nt, Human
cgcucuccucugacggguccugccucaguugg

SEQ ID NO: 121560 - RNA, 32 nt, Human
cgcucucggaauuggccgcggaaaccgaucug

SEQ ID NO: 121561 - RNA, 32 nt, Human
cgcucucucaaaaggaacuugggaaacuugug

SEQ ID NO: 121562 - RNA, 32 nt, Human
cgcucucucaugcacacgcacgcaugcgcacg

SEQ ID NO: 121563 - RNA, 32 nt, Human
cgcucucuccccucagcuuaacgaugaagagg

SEQ ID NO: 121564 - RNA, 32 nt, Human
cgcucucucgcccaggcuggagugcaguggug

SEQ ID NO: 121565 - RNA, 32 nt, Human
cgcucucugaccuucugacuccugugggcucc

SEQ ID NO: 121566 - RNA, 32 nt, Human
cgcucucugcagccaugauugccagacagcag

SEQ ID NO: 121567 - RNA, 32 nt, Human
cgcucucuugcccaggcuggagugcaauggca

SEQ ID NO: 121568 - RNA, 32 nt, Human
cgcucucuuguccaggcuggagugcaauagcg

SEQ ID NO: 121569 - RNA, 32 nt, Human
cgcucugaagacagaauuagcuaacuuucaaa

SEQ ID NO: 121570 - RNA, 32 nt, Human
cgcucugcaacaaaucuccagccuggguugcc

SEQ ID NO: 121571 - RNA, 32 nt, Human
cgcucugcacuccagccuaggugacagaguga

SEQ ID NO: 121572 - RNA, 20 nt, Human
cgcucugcagccaccuggca

SEQ ID NO: 121573 - RNA, 32 nt, Human
cgcucugcagccccaagcaucuuuccaguggg

SEQ ID NO: 121574 - RNA, 24 nt, Human
cgcucugcagccuggaccugugga

SEQ ID NO: 121575 - RNA, 32 nt, Human
cgcucugcaggaugggcacagugcugucucuu

SEQ ID NO: 121576 - RNA, 32 nt, Human
cgcucugcaggugggagggaggagucugcgua

SEQ ID NO: 121577 - RNA, 32 nt, Human
cgcucugccacugugcccaagccuggguauca

SEQ ID NO: 121578 - RNA, 17 nt, Human
cgcucugccccugggug

SEQ ID NO: 121579 - RNA, 32 nt, Human
cgcucugccgcccaggcuggagugcaguggcg

SEQ ID NO: 121580 - RNA, 32 nt, Human
cgcucugccgugcgcuaggcuuggugggaagg

SEQ ID NO: 121581 - RNA, 32 nt, Human
cgcucugcgcucggcccugccagggcggcacg

SEQ ID NO: 121582 - RNA, 32 nt, Human
cgcucugcucaaugaaaccuuccucuugaggg

SEQ ID NO: 121583 - RNA, 32 nt, Human
cgcucugcucucccaacccccuucccucccca

SEQ ID NO: 121584 - RNA, 32 nt, Human
cgcucugcugcccaggcuagagugcaguggcg

SEQ ID NO: 121585 - RNA, 32 nt, Human
cgcucugcugcccaggcuggaguacagugaug

SEQ ID NO: 121586 - RNA, 32 nt, Human
cgcucugcugcucugcagugugacgaguccga

SEQ ID NO: 121587 - RNA, 32 nt, Human
cgcucugcugggugggagggugggccauggag

SEQ ID NO: 121588 - RNA, 32 nt, Human
cgcucuggccaggggagaaggagcugccgugc

SEQ ID NO: 121589 - RNA, 32 nt, Human
cgcucuggcccaagggccuggcacaaauguug

SEQ ID NO: 121590 - RNA, 32 nt, Human
cgcucugggaggcugaggcaggaggaucacuu

SEQ ID NO: 121591 - RNA, 32 nt, Human
cgcucugggcaccaccugccuuccagccccuc

SEQ ID NO: 121592 - RNA, 31 nt, Human
cgcucuggggaaggaacuguucucagaggcu

SEQ ID NO: 121593 - RNA, 32 nt, Human
cgcucuguaacucaggcuggagugcaguggcg

SEQ ID NO: 121594 - RNA, 32 nt, Human
cgcucuguagaccaggcuggagcgcaguggca

SEQ ID NO: 121595 - RNA, 32 nt, Human
cgcucuguagagccauguagauagccacucac

SEQ ID NO: 121596 - RNA, 26 nt, Human
cgcucuguagcccaggcuggagugca

SEQ ID NO: 121597 - RNA, 32 nt, Human
cgcucuguagcccaggcuggagugcagugugg

SEQ ID NO: 121598 - RNA, 32 nt, Human
cgcucugucacacaggcuggagugcaguggug

SEQ ID NO: 121599 - RNA, 32 nt, Human
cgcucugucaccaggcuggagggcaguggugc

SEQ ID NO: 121600 - RNA, 32 nt, Human
cgcucugucaccaggcuggaguacagugauga

SEQ ID NO: 121601 - RNA, 32 nt, Human
cgcucugucaccaggcuggagugcagugacac

SEQ ID NO: 121602 - RNA, 32 nt, Human
cgcucugucaccaggcuggagugcaguggcgc

SEQ ID NO: 121603 - RNA, 32 nt, Human
cgcucugucaccaggcuggagugcaguggugu

SEQ ID NO: 121604 - RNA, 32 nt, Human
cgcucugucaccaggcuugagugcaguggugu

SEQ ID NO: 121605 - RNA, 32 nt, Human
cgcucugucacccaagcuggagugcaguggug

SEQ ID NO: 121606 - RNA, 32 nt, Human
cgcucugucacccagacuggagugcaauggcu

SEQ ID NO: 121607 - RNA, 32 nt, Human
cgcucugucacccagacuggagugcaguggca

SEQ ID NO: 121608 - RNA, 32 nt, Human
cgcucugucacccagacuggagugcaguggug

SEQ ID NO: 121609 - RNA, 32 nt, Human
cgcucugucacccaggcaggagugcaguggca

SEQ ID NO: 121610 - RNA, 32 nt, Human
cgcucugucacccaggccggagugcaguggug

SEQ ID NO: 121611 - RNA, 32 nt, Human
cgcucugucacccaggcuggaaugcaguggca

SEQ ID NO: 121612 - RNA, 32 nt, Human
cgcucugucacccaggcuggaguacaauagcg

SEQ ID NO: 121613 - RNA, 32 nt, Human
cgcucugucacccaggcuggaguacaguggca

SEQ ID NO: 121614 - RNA, 32 nt, Human
cgcucugucacccaggcuggagucuagugucg

SEQ ID NO: 121615 - RNA, 32 nt, Human
cgcucugucacccaggcuggagugcaauggca

SEQ ID NO: 121616 - RNA, 32 nt, Human
cgcucugucacccaggcuggagugcaauggcg

SEQ ID NO: 121617 - RNA, 32 nt, Human
cgcucugucacccaggcuggagugcaauggug

SEQ ID NO: 121618 - RNA, 32 nt, Human
cgcucugucacccaggcuggagugcacuggcu

SEQ ID NO: 121619 - RNA, 32 nt, Human
cgcucugucacccaggcuggagugcaguagca

SEQ ID NO: 121620 - RNA, 29 nt, Human
cgcucugucacccaggcuggagugcagug

SEQ ID NO: 121621 - RNA, 32 nt, Human
cgcucugucacccaggcuggagugcaguggca

SEQ ID NO: 121622 - RNA, 32 nt, Human
cgcucugucacccaggcuggagugcaguggcc

SEQ ID NO: 121623 - RNA, 32 nt, Human
cgcucugucacccaggcuggagugcaguggcg

SEQ ID NO: 121624 - RNA, 32 nt, Human
cgcucugucacccaggcuggagugcaguggcu

SEQ ID NO: 121625 - RNA, 32 nt, Human
cgcucugucacccaggcuggagugcaguggua

SEQ ID NO: 121626 - RNA, 32 nt, Human
cgcucugucacccaggcuggagugcaguggug

SEQ ID NO: 121627 - RNA, 32 nt, Human
cgcucugucacccaggcuggaguguaguggug

SEQ ID NO: 121628 - RNA, 32 nt, Human
cgcucugucacccaggcuggagugugcagugg

SEQ ID NO: 121629 - RNA, 32 nt, Human
cgcucugucacccaggcuggaguucaguggug

SEQ ID NO: 121630 - RNA, 32 nt, Human
cgcucugucacccaggcuggggugcaguggcg

SEQ ID NO: 121631 - RNA, 32 nt, Human
cgcucugucacccaggcuguaguacaguggug

SEQ ID NO: 121632 - RNA, 32 nt, Human
cgcucugucacccaggcuguaguggaguggug

SEQ ID NO: 121633 - RNA, 32 nt, Human
cgcucugucacccagucuggagugcaguggug

SEQ ID NO: 121634 - RNA, 32 nt, Human
cgcucugucacccaugcuugagugcaaccucu

SEQ ID NO: 121635 - RNA, 32 nt, Human
cgcucugucacccgggcuggaguguaacgugg

SEQ ID NO: 121636 - RNA, 32 nt, Human
cgcucugucaccgaggcuggagugcaguggcg

SEQ ID NO: 121637 - RNA, 32 nt, Human
cgcucugucaccuaggcuggagugcaguggcg

SEQ ID NO: 121638 - RNA, 32 nt, Human
cgcucugucacgaggcuggagugcaguggccc

SEQ ID NO: 121639 - RNA, 32 nt, Human
cgcucugucacucaggcuggagugcaguggua

SEQ ID NO: 121640 - RNA, 32 nt, Human
cgcucugucauccaggcuggagugcaguggca

SEQ ID NO: 121641 - RNA, 32 nt, Human
cgcucugucaucuaggcuggagugcaguggug

SEQ ID NO: 121642 - RNA, 32 nt, Human
cgcucugucauucaggcuggagugcaguggug

SEQ ID NO: 121643 - RNA, 32 nt, Human
cgcucugucccccaggcuggagugcaguggcu

SEQ ID NO: 121644 - RNA, 32 nt, Human
cgcucugucccucuucucaggcuuucccacug

SEQ ID NO: 121645 - RNA, 32 nt, Human
cgcucugucgccaaggcuggagugcaguggug

SEQ ID NO: 121646 - RNA, 32 nt, Human
cgcucugucgccaggacuggagugcagugaca

SEQ ID NO: 121647 - RNA, 32 nt, Human
cgcucugucgccaggcuagagugcgguggcgc

SEQ ID NO: 121648 - RNA, 32 nt, Human
cgcucugucgccaggcugaagugcaguggcgc

SEQ ID NO: 121649 - RNA, 32 nt, Human
cgcucugucgccaggcuggaguacaguggugu

SEQ ID NO: 121650 - RNA, 32 nt, Human
cgcucugucgccaggcuggagugcaauggcgc

SEQ ID NO: 121651 - RNA, 32 nt, Human
cgcucugucgccaggcuggagugcaguggcgc

SEQ ID NO: 121652 - RNA, 32 nt, Human
cgcucugucgccaggcuggagugcaguggcgu

SEQ ID NO: 121653 - RNA, 32 nt, Human
cgcucugucgccaggcuggagugcaguggugc

SEQ ID NO: 121654 - RNA, 32 nt, Human
cgcucugucgccagguuggagugcaguggcgu

SEQ ID NO: 121655 - RNA, 32 nt, Human
cgcucugucgcccaagcuggaguacaguggug

SEQ ID NO: 121656 - RNA, 32 nt, Human
cgcucugucgcccagccuggagugcaguggca

SEQ ID NO: 121657 - RNA, 32 nt, Human
cgcucugucgcccaggcugaaguguagagugc

SEQ ID NO: 121658 - RNA, 32 nt, Human
cgcucugucgcccaggcuggaaugcaguugug

SEQ ID NO: 121659 - RNA, 32 nt, Human
cgcucugucgcccaggcuggagggcaguggca

SEQ ID NO: 121660 - RNA, 32 nt, Human
cgcucugucgcccaggcuggagugcaauggca

SEQ ID NO: 121661 - RNA, 32 nt, Human
cgcucugucgcccaggcuggagugcacuggcg

SEQ ID NO: 121662 - RNA, 32 nt, Human
cgcucugucgcccaggcuggagugcagugaca

SEQ ID NO: 121663 - RNA, 32 nt, Human
cgcucugucgcccaggcuggagugcaguggag

SEQ ID NO: 121664 - RNA, 32 nt, Human
cgcucugucgcccaggcuggagugcaguggca

SEQ ID NO: 121665 - RNA, 32 nt, Human
cgcucugucgcccaggcuggagugcaguggcg

SEQ ID NO: 121666 - RNA, 32 nt, Human
cgcucugucgcccaggcuggagugcaguggug

SEQ ID NO: 121667 - RNA, 32 nt, Human
cgcucugucgcccaggcuggagugcgguggcg

SEQ ID NO: 121668 - RNA, 19 nt, Human
cgcucugucgcccagggug

SEQ ID NO: 121669 - RNA, 32 nt, Human
cgcucugucgcccaggguggagugcaguggcg

SEQ ID NO: 121670 - RNA, 32 nt, Human
cgcucugucgcccagguuggagugcaguggcg

SEQ ID NO: 121671 - RNA, 32 nt, Human
cgcucugucgcccagguuggagugcaguggug

SEQ ID NO: 121672 - RNA, 32 nt, Human
cgcucugucgcccagguuugagugcaauggca

SEQ ID NO: 121673 - RNA, 32 nt, Human
cgcucugucgccuggcuggagugcaguggugu

SEQ ID NO: 121674 - RNA, 32 nt, Human
cgcucugucgcucaggcuggagugcaguggcg

SEQ ID NO: 121675 - RNA, 32 nt, Human
cgcucugucguccaggcuggagugcagugcug

SEQ ID NO: 121676 - RNA, 32 nt, Human
cgcucugucguccaggcuggagugcaguggcg

SEQ ID NO: 121677 - RNA, 32 nt, Human
cgcucugucuccaggcuggagugcaguggcgu

SEQ ID NO: 121678 - RNA, 32 nt, Human
cgcucugucucccaggccggagugcaguggca

SEQ ID NO: 121679 - RNA, 32 nt, Human
cgcucugucucccaggcugaagugcaguggca

SEQ ID NO: 121680 - RNA, 32 nt, Human
cgcucugucucccaggcuggagugcgguggca

SEQ ID NO: 121681 - RNA, 32 nt, Human
cgcucugucucccagguuggagugcaguggca

SEQ ID NO: 121682 - RNA, 32 nt, Human
cgcucugucuccuggccgucugcuccaggcgc

SEQ ID NO: 121683 - RNA, 18 nt, Human
cgcucuguggcccagccc

SEQ ID NO: 121684 - RNA, 32 nt, Human
cgcucuguuacccagacuggaguacagggaug

SEQ ID NO: 121685 - RNA, 32 nt, Human
cgcucuguuacccagauuggagugcaguggcg

SEQ ID NO: 121686 - RNA, 32 nt, Human
cgcucuguuccuugcuuuugccuucaagggaa

SEQ ID NO: 121687 - RNA, 32 nt, Human
cgcucuguugcaggcucaacguggggcuaugu

SEQ ID NO: 121688 - RNA, 32 nt, Human
cgcucuguugccaaggcuggagugcaguggaa

SEQ ID NO: 121689 - RNA, 32 nt, Human
cgcucuguugccaggcuggagggcaguggcac

SEQ ID NO: 121690 - RNA, 32 nt, Human
cgcucuguugccaggcuggagugcacuggggc

SEQ ID NO: 121691 - RNA, 32 nt, Human
cgcucuguugccaggcuggagugcaguggugc

SEQ ID NO: 121692 - RNA, 32 nt, Human
cgcucuguugcccagacuggagugcaguggug

SEQ ID NO: 121693 - RNA, 32 nt, Human
cgcucuguugcccagccuggagugcaauggca

SEQ ID NO: 121694 - RNA, 32 nt, Human
cgcucuguugcccaggcugaagugcagugggg

SEQ ID NO: 121695 - RNA, 32 nt, Human
cgcucuguugcccaggcugaaguguaguggca

SEQ ID NO: 121696 - RNA, 32 nt, Human
cgcucuguugcccaggcuggaaugcaguggcg

SEQ ID NO: 121697 - RNA, 32 nt, Human
cgcucuguugcccaggcuggagugcaaugaca

SEQ ID NO: 121698 - RNA, 32 nt, Human
cgcucuguugcccaggcuggagugcaguggca

SEQ ID NO: 121699 - RNA, 32 nt, Human
cgcucuguugcccaggcuggagugcaguggcg

SEQ ID NO: 121700 - RNA, 32 nt, Human
cgcucuguugcccaggcuggagugcaguggug

SEQ ID NO: 121701 - RNA, 32 nt, Human
cgcucuguugcccaggcuggagugcgguggca

SEQ ID NO: 121702 - RNA, 32 nt, Human
cgcucuguugcccaggcuggagugcgguggug

SEQ ID NO: 121703 - RNA, 32 nt, Human
cgcucuguugcccaggcuggaguguaauggug

SEQ ID NO: 121704 - RNA, 32 nt, Human
cgcucuguugcccaggguggagugcagcggug

SEQ ID NO: 121705 - RNA, 32 nt, Human
cgcucuguugcccagguuggagugcaguggca

SEQ ID NO: 121706 - RNA, 32 nt, Human
cgcucuguugcccauucuggagugcaguggug

SEQ ID NO: 121707 - RNA, 32 nt, Human
cgcucuguugcccuggcuggaguacaguggca

SEQ ID NO: 121708 - RNA, 32 nt, Human
cgcucuguugcccuggcuggaguucagugaca

SEQ ID NO: 121709 - RNA, 32 nt, Human
cgcucuguugccuaggcuggaguacaguggcc

SEQ ID NO: 121710 - RNA, 32 nt, Human
cgcucuguugccuaggcuggaguacaguggug

SEQ ID NO: 121711 - RNA, 32 nt, Human
cgcucuguugccuaggcuggagugcagugagg

SEQ ID NO: 121712 - RNA, 32 nt, Human
cgcucuguugcucaggcuggauugcaguggcg

SEQ ID NO: 121713 - RNA, 32 nt, Human
cgcucuguuggccaggcuggagugcaguguuc

SEQ ID NO: 121714 - RNA, 32 nt, Human
cgcucuguuguccaggcuggagugcaauggca

SEQ ID NO: 121715 - RNA, 32 nt, Human
cgcucuguuucccaggcuggagugcaguggcg

SEQ ID NO: 121716 - RNA, 32 nt, Human
cgcucuucagcaggucccaggccacuugagug

SEQ ID NO: 121717 - RNA, 32 nt, Human
cgcucuucccccaugugccugucacgcucugg

SEQ ID NO: 121718 - RNA, 32 nt, Human
cgcucuucgcugggugcggcugcuggguuuug

SEQ ID NO: 121719 - RNA, 32 nt, Human
cgcucuugacccugcauauccaggaaggaacu

SEQ ID NO: 121720 - RNA, 32 nt, Human
cgcucuuggcuaggccucgcugcuccagugcg

SEQ ID NO: 121721 - RNA, 32 nt, Human
cgcucuuguccaggcuggaguauaauggugcg

SEQ ID NO: 121722 - RNA, 32 nt, Human
cgcucuuucacccaggcuggagugcaguggca

SEQ ID NO: 121723 - RNA, 32 nt, Human
cgcucuuuccacccuguuauggcuucugugag

SEQ ID NO: 121724 - RNA, 32 nt, Human
cgcucuuucgcccaggcuggagugcaauggug

SEQ ID NO: 121725 - RNA, 32 nt, Human
cgcucuuucgcccaggcuggagugcaguggcg

SEQ ID NO: 121726 - RNA, 32 nt, Human
cgcucuuucuacugcuuacucuucggguccac

SEQ ID NO: 121727 - RNA, 32 nt, Human
cgcucuuucucuuccugccuuuccucuaucag

SEQ ID NO: 121728 - RNA, 32 nt, Human
cgcucuuuucucuccucucuucugccucuuuu

SEQ ID NO: 121729 - RNA, 32 nt, Human
cgcucuuuugcccaggcuggauggagugcagu

SEQ ID NO: 121730 - RNA, 32 nt, Human
cgcucuuuuucuucugacuugagagcuccccc

SEQ ID NO: 121731 - RNA, 32 nt, Human
cgcucuuuuugcacaggcugagugcaaugccg

SEQ ID NO: 121732 - RNA, 32 nt, Human
cgcugaagccugccccgcugagcccaggagcc

SEQ ID NO: 121733 - RNA, 32 nt, Human
cgcugaagcggaccugaacagaccaugugucc

SEQ ID NO: 121734 - RNA, 32 nt, Human
cgcugaaggagagagaaaagaugugugucuga

SEQ ID NO: 121735 - RNA, 32 nt, Human
cgcugaagugccugugaaacacagcccagagg

SEQ ID NO: 121736 - RNA, 32 nt, Human
cgcugaauccaauuaagagagaaaaauaauaa

SEQ ID NO: 121737 - RNA, 32 nt, Human
cgcugaauccgccugccccagcagcggccuga

SEQ ID NO: 121738 - RNA, 28 nt, Human
cgcugaauccuugagaggacucagggca

SEQ ID NO: 121739 - RNA, 32 nt, Human
cgcugaaucuuccuucccucucucuggccgca

SEQ ID NO: 121740 - RNA, 28 nt, Human
cgcugaaugcacaagaggaucugugaca

SEQ ID NO: 121741 - RNA, 32 nt, Human
cgcugacaaauacauaacauaguccaggacga

SEQ ID NO: 121742 - RNA, 32 nt, Human
cgcugacaaggcgcuccagccccagagccagc

SEQ ID NO: 121743 - RNA, 32 nt, Human
cgcugacaaucaguuaaacacaccggagaaga

SEQ ID NO: 121744 - RNA, 32 nt, Human
cgcugacagcuuccccugcccuucccgucggu

SEQ ID NO: 121745 - RNA, 25 nt, Human
cgcugacagugcggagggcaggggg

SEQ ID NO: 121746 - RNA, 32 nt, Human
cgcugacccccagugagcucacugccuagcac

SEQ ID NO: 121747 - RNA, 32 nt, Human
cgcugaccccgggcagccgcugcucugaagag

SEQ ID NO: 121748 - RNA, 32 nt, Human
cgcugaccuuggcccugaccucaggagccacg

SEQ ID NO: 121749 - RNA, 32 nt, Human
cgcugacgcucuggcccugggggcugccuggc

SEQ ID NO: 121750 - RNA, 32 nt, Human
cgcugacuccaccgcgcacuucccgggacccc

SEQ ID NO: 121751 - RNA, 32 nt, Human
cgcugacuguaacccaguucuaggcuuccagg

SEQ ID NO: 121752 - RNA, 20 nt, Human
cgcugacuuccuccugauca

SEQ ID NO: 121753 - RNA, 32 nt, Human
cgcugacuucuccacugguuccugggcaccga

SEQ ID NO: 121754 - RNA, 32 nt, Human
cgcugagaaagggagaagacagcagagggguu

SEQ ID NO: 121755 - RNA, 32 nt, Human
cgcugagaaaucaaggugaccuuguggcucag

SEQ ID NO: 121756 - RNA, 32 nt, Human
cgcugagcaaaggccuucaccauggccgaguc

SEQ ID NO: 121757 - RNA, 32 nt, Human
cgcugagcagaacuugccgccagaaugcuccu

SEQ ID NO: 121758 - RNA, 32 nt, Human
cgcugagcagagcccucacucccaggcagagu

SEQ ID NO: 121759 - RNA, 32 nt, Human
cgcugagcccaggagccgggaggccugcgggc

SEQ ID NO: 121760 - RNA, 32 nt, Human
cgcugagcccaggagccugccaggcugacgug

SEQ ID NO: 121761 - RNA, 32 nt, Human
cgcugagccugagacgggaggcaggaaagggg

SEQ ID NO: 121762 - RNA, 32 nt, Human
cgcugagcuaucuccuaacuuuggaccuauua

SEQ ID NO: 121763 - RNA, 32 nt, Human
cgcugagcugucuccgccuccaccuaucuucc

SEQ ID NO: 121764 - RNA, 32 nt, Human
cgcugagcugugguggccuagaugcccgauac

SEQ ID NO: 121765 - RNA, 32 nt, Human
cgcugaggagccauccugucuucugcuugagu

SEQ ID NO: 121766 - RNA, 32 nt, Human
cgcugaggaggaggaggaggcggaggaggcgg

SEQ ID NO: 121767 - RNA, 32 nt, Human
cgcugaggagugaaagaacccugcacccagag

SEQ ID NO: 121768 - RNA, 32 nt, Human
cgcugaggccacgagcuccuggguagcuguga

SEQ ID NO: 121769 - RNA, 27 nt, Human
cgcugaggcccgcagcagcagcagugg

SEQ ID NO: 121770 - RNA, 32 nt, Human
cgcugaggcccugagggcuccuuggggccuuu

SEQ ID NO: 121771 - RNA, 32 nt, Human
cgcugaggcgguuaguuuagccucccacccac

SEQ ID NO: 121772 - RNA, 32 nt, Human
cgcugaggcugcagcuaucauggugaacuuac

SEQ ID NO: 121773 - RNA, 32 nt, Human
cgcugagggaggcgccccaccaugccgcgggc

SEQ ID NO: 121774 - RNA, 21 nt, Human
cgcugagggcagccugcagcc

SEQ ID NO: 121775 - RNA, 32 nt, Human
cgcugagugccaagucagagcuguggcggggg

SEQ ID NO: 121776 - RNA, 32 nt, Human
cgcugagugcuaaugugaguccugggccuuuc

SEQ ID NO: 121777 - RNA, 32 nt, Human
cgcugaguggggugaagggaaaugcuggugaa

SEQ ID NO: 121778 - RNA, 32 nt, Human
cgcugaguuccucugcuggaguucauccugcu

SEQ ID NO: 121779 - RNA, 32 nt, Human
cgcugauagcucaccugggaacugaauccacc

SEQ ID NO: 121780 - RNA, 32 nt, Human
cgcugaugguggccaggaugcucagcuggcca

SEQ ID NO: 121781 - RNA, 32 nt, Human
cgcugauucuccuccugccucucccgugaguc

SEQ ID NO: 121782 - RNA, 32 nt, Human
cgcugauucucggggguaaggcucggauggca

SEQ ID NO: 121783 - RNA, 32 nt, Human
cgcugcaaaggcugcugcacaucaggcugaug

SEQ ID NO: 121784 - RNA, 32 nt, Human
cgcugcaaccuccaccuccugggcucacacaa

SEQ ID NO: 121785 - RNA, 26 nt, Human
cgcugcacagccuucccccaccagca

SEQ ID NO: 121786 - RNA, 23 nt, Human
cgcugcacccugccccaguacaa

SEQ ID NO: 121787 - RNA, 32 nt, Human
cgcugcacuccaccuccgcccccucggacucc

SEQ ID NO: 121788 - RNA, 32 nt, Human
cgcugcagacucagccuuucucugcagccauc

SEQ ID NO: 121789 - RNA, 32 nt, Human
cgcugcagagcugggcucuagcaggacaguuc

SEQ ID NO: 121790 - RNA, 32 nt, Human
cgcugcagaggcacuccacccugggcacggag

SEQ ID NO: 121791 - RNA, 32 nt, Human
cgcugcagcacuuccgaaaggcauuuuugauc

SEQ ID NO: 121792 - RNA, 32 nt, Human
cgcugcagccgccuccuccuccaggcaaacau

SEQ ID NO: 121793 - RNA, 32 nt, Human
cgcugcagccggggaggaaggaggaggccgag

SEQ ID NO: 121794 - RNA, 32 nt, Human
cgcugcagccugggcaacacagugagacccug

SEQ ID NO: 121795 - RNA, 32 nt, Human
cgcugcagcugccacaucccugggcuuacagu

SEQ ID NO: 121796 - RNA, 32 nt, Human
cgcugcagcugccacaucccugggcuuacugu

SEQ ID NO: 121797 - RNA, 32 nt, Human
cgcugcagcugccacaucccugggcuuauggu

SEQ ID NO: 121798 - RNA, 32 nt, Human
cgcugcagcugccggacucuucugcuugucac

SEQ ID NO: 121799 - RNA, 32 nt, Human
cgcugcaggaacagguggcugugcucaccaga

SEQ ID NO: 121800 - RNA, 32 nt, Human
cgcugcaggaaggccgcggcagagggggcgcc

SEQ ID NO: 121801 - RNA, 32 nt, Human
cgcugcaggcagcggcggcugcgcggugaacg

SEQ ID NO: 121802 - RNA, 32 nt, Human
cgcugcaggcgggguucgaaccguggggucug

SEQ ID NO: 121803 - RNA, 32 nt, Human
cgcugcagggaaaacccagcugaggccugggc

SEQ ID NO: 121804 - RNA, 32 nt, Human
cgcugcagguggacuuuccccaggcaacagga

SEQ ID NO: 121805 - RNA, 32 nt, Human
cgcugcaguccagcaaggccaggaugaaaaag

SEQ ID NO: 121806 - RNA, 32 nt, Human
cgcugcauccagaucagcucaccccgcgcccu

SEQ ID NO: 121807 - RNA, 32 nt, Human
cgcugcauuuucuccccucucccucccuccuu

SEQ ID NO: 121808 - RNA, 32 nt, Human
cgcugccaagguggagagcagugagcaagggg

SEQ ID NO: 121809 - RNA, 32 nt, Human
cgcugccaccaccaccgccaccaccgcugcca

SEQ ID NO: 121810 - RNA, 21 nt, Human
cgcugccaccgccgcccuccc

SEQ ID NO: 121811 - RNA, 32 nt, Human
cgcugccagcaaggagcuugcagucuuguagc

SEQ ID NO: 121812 - RNA, 32 nt, Human
cgcugccagcacagcagucugauguccaccug

SEQ ID NO: 121813 - RNA, 32 nt, Human
cgcugccauccagcuggguagccgggggagcg

SEQ ID NO: 121814 - RNA, 32 nt, Human
cgcugcccaccugaggugacaccuguccauuu

SEQ ID NO: 121815 - RNA, 32 nt, Human
cgcugcccagaugaggccuaguuaauuacuga

SEQ ID NO: 121816 - RNA, 32 nt, Human
cgcugcccagcuccggucccagaucucugacc

SEQ ID NO: 121817 - RNA, 32 nt, Human
cgcugcccaggagucucuuggggccgcugcaa

SEQ ID NO: 121818 - RNA, 23 nt, Human
cgcugccccagccaggcccacca

SEQ ID NO: 121819 - RNA, 32 nt, Human
cgcugccccaucuccccucagcucggcucagc

SEQ ID NO: 121820 - RNA, 32 nt, Human
cgcugcccccaugcucgcgcugggcagggacc

SEQ ID NO: 121821 - RNA, 32 nt, Human
cgcugccccugccagccacccccacaccucuc

SEQ ID NO: 121822 - RNA, 32 nt, Human
cgcugccccugcccugccucuguccuggcucu

SEQ ID NO: 121823 - RNA, 32 nt, Human
cgcugcccucgaggcucccucuuccucuccau

SEQ ID NO: 121824 - RNA, 32 nt, Human
cgcugcccugcaccgcccuccuggaggccacu

SEQ ID NO: 121825 - RNA, 32 nt, Human
cgcugcccugcuucccccaaccuguugcaagg

SEQ ID NO: 121826 - RNA, 32 nt, Human
cgcugcccuugggcuccuaccugcugaagcca

SEQ ID NO: 121827 - RNA, 32 nt, Human
cgcugccgagggaugugagugggagcugagcc

SEQ ID NO: 121828 - RNA, 32 nt, Human
cgcugccgccauggcuagucagucucagggga

SEQ ID NO: 121829 - RNA, 18 nt, Human
cgcugccgccgccgccac

SEQ ID NO: 121830 - RNA, 32 nt, Human
cgcugccgcggaggauccugggugcagccgcu

SEQ ID NO: 121831 - RNA, 32 nt, Human
cgcugccggggcgagguugcgaggggcggugu

SEQ ID NO: 121832 - RNA, 20 nt, Human
cgcugccgucccugcugccu

SEQ ID NO: 121833 - RNA, 32 nt, Human
cgcugccucaaugcuccugauucagcucuucu

SEQ ID NO: 121834 - RNA, 22 nt, Human
cgcugccucagccucugccucc

SEQ ID NO: 121835 - RNA, 32 nt, Human
cgcugccucauuccuuuccuuccuagccuugg

SEQ ID NO: 121836 - RNA, 18 nt, Human
cgcugccucggccccggg

SEQ ID NO: 121837 - RNA, 32 nt, Human
cgcugccucugagucggggcugggccugcaga

SEQ ID NO: 121838 - RNA, 32 nt, Human
cgcugccucuguggaagucucuccucgcgggg

SEQ ID NO: 121839 - RNA, 32 nt, Human
cgcugccugccugcggccugcccugcaugcag

SEQ ID NO: 121840 - RNA, 32 nt, Human
cgcugccugcucccgccacccuaggaggcgcg

SEQ ID NO: 121841 - RNA, 32 nt, Human
cgcugccuggacaggccugccugcgugcuggg

SEQ ID NO: 121842 - RNA, 32 nt, Human
cgcugccuggaggcaggaaggagaggcagggc

SEQ ID NO: 121843 - RNA, 32 nt, Human
cgcugcgagaugcagaaacagaggcccagaga

SEQ ID NO: 121844 - RNA, 32 nt, Human
cgcugcgcagagccauggaauucuccuggcug

SEQ ID NO: 121845 - RNA, 32 nt, Human
cgcugcgccuccacuaugcucucccuccgugu

SEQ ID NO: 121846 - RNA, 32 nt, Human
cgcugcgccuccaggcuggaccagcaguucca

SEQ ID NO: 121847 - RNA, 32 nt, Human
cgcugcgcgcauggcccugcucucgcgccccg

SEQ ID NO: 121848 - RNA, 32 nt, Human
cgcugcgcuagcacaaacacaaaguaggaucc

SEQ ID NO: 121849 - RNA, 32 nt, Human
cgcugcgcucccucgcuccuucccugagcucc

SEQ ID NO: 121850 - RNA, 32 nt, Human
cgcugcgcuccgccaucuccaggccuuugcua

SEQ ID NO: 121851 - RNA, 32 nt, Human
cgcugcgcucuuacggcguuccaggcugcugg

SEQ ID NO: 121852 - RNA, 32 nt, Human
cgcugcgcuucgccuccgccuccucggacucg

SEQ ID NO: 121853 - RNA, 32 nt, Human
cgcugcgcuuugcugcggucacacacacgguc

SEQ ID NO: 121854 - RNA, 32 nt, Human
cgcugcggaaccaggcuucuucacuuugaguu

SEQ ID NO: 121855 - RNA, 32 nt, Human
cgcugcggagaccguugguucauuugcauguc

SEQ ID NO: 121856 - RNA, 18 nt, Human
cgcugcggccuggcccug

SEQ ID NO: 121857 - RNA, 32 nt, Human
cgcugcgggagccacaggaagugaagagcuuc

SEQ ID NO: 121858 - RNA, 32 nt, Human
cgcugcgggcaggguucucccagcaccucacu

SEQ ID NO: 121859 - RNA, 32 nt, Human
cgcugcggggccgcgggggucgaauguucgug

SEQ ID NO: 121860 - RNA, 20 nt, Human
cgcugcggggguccuacagc

SEQ ID NO: 121861 - RNA, 20 nt, Human
cgcugcgguacagggacaug

SEQ ID NO: 121862 - RNA, 32 nt, Human
cgcugcgguccugguggggccgugcggugagg

SEQ ID NO: 121863 - RNA, 32 nt, Human
cgcugcguucccaauuaauuuauuucguuaua

SEQ ID NO: 121864 - RNA, 32 nt, Human
cgcugcguuuggguuccggucuccgcuucucc

SEQ ID NO: 121865 - RNA, 31 nt, Human
cgcugcuaaacacacugcaggagggacucug

SEQ ID NO: 121866 - RNA, 32 nt, Human
cgcugcuaguuagcuacccuugcccaccgccg

SEQ ID NO: 121867 - RNA, 22 nt, Human
cgcugcucacgcgcucacuccu

SEQ ID NO: 121868 - RNA, 32 nt, Human
cgcugcucagcugggaacaucgucucaccagg

SEQ ID NO: 121869 - RNA, 32 nt, Human
cgcugcucaguugguggagacuggggcuggga

SEQ ID NO: 121870 - RNA, 32 nt, Human
cgcugcucauggagaagaccugggcuuagcaa

SEQ ID NO: 121871 - RNA, 32 nt, Human
cgcugcuccaggagaucugcagcugggccaug

SEQ ID NO: 121872 - RNA, 32 nt, Human
cgcugcuccucagcaggcgccucaccagccuc

SEQ ID NO: 121873 - RNA, 23 nt, Human
cgcugcuccuccgccuggccugg

SEQ ID NO: 121874 - RNA, 32 nt, Human
cgcugcuccugcccucuccuugcccugccuca

SEQ ID NO: 121875 - RNA, 20 nt, Human
cgcugcucgcgccugccgcc

SEQ ID NO: 121876 - RNA, 32 nt, Human
cgcugcucucacccucugcagacgccccaccc

SEQ ID NO: 121877 - RNA, 32 nt, Human
cgcugcucuccucauucauguuaguguugcuu

SEQ ID NO: 121878 - RNA, 32 nt, Human
cgcugcucuccuccugcugcccccucgcuagg

SEQ ID NO: 121879 - RNA, 32 nt, Human
cgcugcucuccuguuuuucauucuccacauuu

SEQ ID NO: 121880 - RNA, 19 nt, Human
cgcugcucugcugccugcc

SEQ ID NO: 121881 - RNA, 32 nt, Human
cgcugcucuucagacaccuuguggcugcccca

SEQ ID NO: 121882 - RNA, 32 nt, Human
cgcugcugcacucaagcuuggaugacagagca

SEQ ID NO: 121883 - RNA, 32 nt, Human
cgcugcugcacuccaaccugggcgacagagca

SEQ ID NO: 121884 - RNA, 32 nt, Human
cgcugcugcacuccagccugggugacagagug

SEQ ID NO: 121885 - RNA, 32 nt, Human
cgcugcugcaggaacccagcuagcuggccagg

SEQ ID NO: 121886 - RNA, 32 nt, Human
cgcugcugcaggugccccuggccggcagcgcc

SEQ ID NO: 121887 - RNA, 32 nt, Human
cgcugcugccgcugcuguugcuccugaggcug

SEQ ID NO: 121888 - RNA, 31 nt, Human
cgcugcugccucuccuugugguggccgcgug

SEQ ID NO: 121889 - RNA, 32 nt, Human
cgcugcugcuguggccugcgcagccacgggag

SEQ ID NO: 121890 - RNA, 32 nt, Human
cgcugcuggagcuucuguugcugugaauacuu

SEQ ID NO: 121891 - RNA, 32 nt, Human
cgcugcuggcacuucaggcucugccucuccca

SEQ ID NO: 121892 - RNA, 32 nt, Human
cgcugcuggccagguguucuccuggggcgggg

SEQ ID NO: 121893 - RNA, 32 nt, Human
cgcugcuggccgcucucuucucugccucucac

SEQ ID NO: 121894 - RNA, 32 nt, Human
cgcugcugggagcagaacagucccucacaccu

SEQ ID NO: 121895 - RNA, 28 nt, Human
cgcugcugggauggugggcuucagggca

SEQ ID NO: 121896 - RNA, 32 nt, Human
cgcugcugggcuggcgggcgggcagagcacgg

SEQ ID NO: 121897 - RNA, 32 nt, Human
cgcugcugggcugugaaaggcugaaggaggug

SEQ ID NO: 121898 - RNA, 32 nt, Human
cgcugcuuccacugcuucuaccuccccuccca

SEQ ID NO: 121899 - RNA, 32 nt, Human
cgcugcuugugagaccuuccucaagcucaaug

SEQ ID NO: 121900 - RNA, 32 nt, Human
cgcugcuuuccucugcugucucugcaagauug

SEQ ID NO: 121901 - RNA, 32 nt, Human
cgcugcuuugugcuaaaagcaugggaaaugua

SEQ ID NO: 121902 - RNA, 32 nt, Human
cgcuggaaaaugucucaggagaggcccacguu

SEQ ID NO: 121903 - RNA, 23 nt, Human
cgcuggaacccaggaggcaaagg

SEQ ID NO: 121904 - RNA, 23 nt, Human
cgcuggaacccaggaggcagagg

SEQ ID NO: 121905 - RNA, 32 nt, Human
cgcuggaagcaggggaggugaaauguguccaa

SEQ ID NO: 121906 - RNA, 32 nt, Human
cgcuggacauuggcaguucugcucugaaugaa

SEQ ID NO: 121907 - RNA, 32 nt, Human
cgcuggaccagccugcugcggguccuggccag

SEQ ID NO: 121908 - RNA, 32 nt, Human
cgcuggacccaggccuucugggcucugucccc

SEQ ID NO: 121909 - RNA, 21 nt, Human
cgcuggacuccgcugccuccc

SEQ ID NO: 121910 - RNA, 32 nt, Human
cgcuggagacccagggagccgggguuaggaac

SEQ ID NO: 121911 - RNA, 32 nt, Human
cgcuggagagagggagagagaggcccgcccgc

SEQ ID NO: 121912 - RNA, 32 nt, Human
cgcuggagagcuugugcacagccucuggaagg

SEQ ID NO: 121913 - RNA, 32 nt, Human
cgcuggagaggaacuucuccguuggcugauuu

SEQ ID NO: 121914 - RNA, 18 nt, Human
cgcuggagaggugcccug

SEQ ID NO: 121915 - RNA, 32 nt, Human
cgcuggagccgugggagcccggccagggcagg

SEQ ID NO: 121916 - RNA, 32 nt, Human
cgcuggagcgaggcgggggcgggugaggaggg

SEQ ID NO: 121917 - RNA, 32 nt, Human
cgcuggaggaagaaauuucuaccacuuauuuu

SEQ ID NO: 121918 - RNA, 32 nt, Human
cgcuggaggagugagaggagccaaggagggug

SEQ ID NO: 121919 - RNA, 32 nt, Human
cgcuggaggcagcagcggcuggagcggagcuu

SEQ ID NO: 121920 - RNA, 32 nt, Human
cgcuggaggcuggagggccaggaggcgggaag

SEQ ID NO: 121921 - RNA, 29 nt, Human
cgcuggaguaugugugugccggggcgggg

SEQ ID NO: 121922 - RNA, 32 nt, Human
cgcuggauccagggcaaaaaugaagacauaag

SEQ ID NO: 121923 - RNA, 32 nt, Human
cgcuggaucucugggagcuccuugauggcucc

SEQ ID NO: 121924 - RNA, 32 nt, Human
cgcuggaucuguggucgcggcuggggacgugc

SEQ ID NO: 121925 - RNA, 32 nt, Human
cgcuggaugccauaggggcaagaaggugguuu

SEQ ID NO: 121926 - RNA, 32 nt, Human
cgcuggauugagcuucuagagccucagagaug

SEQ ID NO: 121927 - RNA, 32 nt, Human
cgcuggauuuuccuccuucccuuuggcucucu

SEQ ID NO: 121928 - RNA, 32 nt, Human
cgcuggcaacugcugcuguccagucccugugu

SEQ ID NO: 121929 - RNA, 32 nt, Human
cgcuggcaagggcguccuggcccagcccugag

SEQ ID NO: 121930 - RNA, 32 nt, Human
cgcuggcagagcacacaggcugcucuggggga

SEQ ID NO: 121931 - RNA, 32 nt, Human
cgcuggcagcacacccucugcucuuucaccug

SEQ ID NO: 121932 - RNA, 32 nt, Human
cgcuggcagccccgaagccgcaccauguuccg

SEQ ID NO: 121933 - RNA, 32 nt, Human
cgcuggcaggcuuucuuccagcggcaggcugu

SEQ ID NO: 121934 - RNA, 32 nt, Human
cgcuggcagggugggcgccucuggggagccag

SEQ ID NO: 121935 - RNA, 32 nt, Human
cgcuggcagggugugggaagcaggaccgcguc

SEQ ID NO: 121936 - RNA, 32 nt, Human
cgcuggccaccccgccuccuuggcagccucug

SEQ ID NO: 121937 - RNA, 32 nt, Human
cgcuggccaucagggagggagggagaccacau

SEQ ID NO: 121938 - RNA, 32 nt, Human
cgcuggcccugcacuccgccuuaguccugggg

SEQ ID NO: 121939 - RNA, 32 nt, Human
cgcuggcccugccacuccagccuggccucacu

SEQ ID NO: 121940 - RNA, 32 nt, Human
cgcuggcccugccuccgccugccccgccgccg

SEQ ID NO: 121941 - RNA, 32 nt, Human
cgcuggcccuuagagaccccgagguaggggug

SEQ ID NO: 121942 - RNA, 18 nt, Human
cgcuggccuccgcugcuu

SEQ ID NO: 121943 - RNA, 32 nt, Human
cgcuggccugcgcgucccugcccagcccgccu

SEQ ID NO: 121944 - RNA, 32 nt, Human
cgcuggccugggaggcgggggccggcgggagc

SEQ ID NO: 121945 - RNA, 32 nt, Human
cgcuggcgcaggcaggaggagcaggaggauua

SEQ ID NO: 121946 - RNA, 32 nt, Human
cgcuggcggaugcucaccccgucauaagcaga

SEQ ID NO: 121947 - RNA, 32 nt, Human
cgcuggcgggcuucccuuggagcugacgaagg

SEQ ID NO: 121948 - RNA, 32 nt, Human
cgcuggcgucauggcaccgaaaaagaaaggga

SEQ ID NO: 121949 - RNA, 32 nt, Human
cgcuggcucacacugucuccccagaccaaugg

SEQ ID NO: 121950 - RNA, 32 nt, Human
cgcuggcucuggaggcuggaguucccgugcug

SEQ ID NO: 121951 - RNA, 32 nt, Human
cgcuggcugcuuggagcaaagggugcauuuca

SEQ ID NO: 121952 - RNA, 32 nt, Human
cgcuggcuucaggguuccacaggcgcaugggc

SEQ ID NO: 121953 - RNA, 32 nt, Human
cgcuggcuuccacuccaagaagguggaccagg

SEQ ID NO: 121954 - RNA, 32 nt, Human
cgcuggcuuggggauuugaauuugaacaucuu

SEQ ID NO: 121955 - RNA, 32 nt, Human
cgcugggaagagaagagggcccagcccagagc

SEQ ID NO: 121956 - RNA, 21 nt, Human
cgcugggaagugccugcaacc

SEQ ID NO: 121957 - RNA, 21 nt, Human
cgcugggacaggaccccgucc

SEQ ID NO: 121958 - RNA, 32 nt, Human
cgcugggacccuuccuccugaggcccaggucu

SEQ ID NO: 121959 - RNA, 32 nt, Human
cgcugggacuggccgccccuccccagcguccc

SEQ ID NO: 121960 - RNA, 32 nt, Human
cgcugggagaggcucccaucugccuuucucug

SEQ ID NO: 121961 - RNA, 32 nt, Human
cgcugggagagggcggagggggaggcggcgcg

SEQ ID NO: 121962 - RNA, 32 nt, Human
cgcugggagcccagagcaggaggcagagcccg

SEQ ID NO: 121963 - RNA, 32 nt, Human
cgcugggaggcuggucugggguggucacuccc

SEQ ID NO: 121964 - RNA, 32 nt, Human
cgcugggagggcaguuacaggagagaguaggu

SEQ ID NO: 121965 - RNA, 32 nt, Human
cgcugggaggguacauggaugggcaggugggu

SEQ ID NO: 121966 - RNA, 32 nt, Human
cgcugggagguggaugcugcagugagcaguga

SEQ ID NO: 121967 - RNA, 32 nt, Human
cgcugggauuacaggcaugagccaccaugccc

SEQ ID NO: 121968 - RNA, 32 nt, Human
cgcugggauuacaggcaugagccaccgugcca

SEQ ID NO: 121969 - RNA, 32 nt, Human
cgcugggauuacaggcgugagccaccucgccc

SEQ ID NO: 121970 - RNA, 32 nt, Human
cgcugggauuccggggaaguggaggcagaggg

SEQ ID NO: 121971 - RNA, 32 nt, Human
cgcugggccagccugcccggccccagcaugcg

SEQ ID NO: 121972 - RNA, 32 nt, Human
cgcugggcccagccuggggacagggaaccugc

SEQ ID NO: 121973 - RNA, 32 nt, Human
cgcugggcccucaugugggagagaggugaaaa

SEQ ID NO: 121974 - RNA, 32 nt, Human
cgcugggccuggaccucugccacucaguggac

SEQ ID NO: 121975 - RNA, 32 nt, Human
cgcugggcgagccggggcugagcuucacgacc

SEQ ID NO: 121976 - RNA, 19 nt, Human
cgcugggcgccccugcagc

SEQ ID NO: 121977 - RNA, 32 nt, Human
cgcugggcgcgggcagcagggaagagggagca

SEQ ID NO: 121978 - RNA, 32 nt, Human
cgcugggcucaaggaacagcucagcuaaagcc

SEQ ID NO: 121979 - RNA, 32 nt, Human
cgcugggcugggccaggcugagcuccgacucc

SEQ ID NO: 121980 - RNA, 20 nt, Human
cgcuggggccugcugcagcc

SEQ ID NO: 121981 - RNA, 32 nt, Human
cgcuggggcucccagggcuuccaaaccacgaa

SEQ ID NO: 121982 - RNA, 32 nt, Human
cgcugggggaggcugagggugagggaacagcc

SEQ ID NO: 121983 - RNA, 32 nt, Human
cgcugggggcccugugcccuugccggcggcag

SEQ ID NO: 121984 - RNA, 24 nt, Human
cgcugggggugccgucccgcgccg

SEQ ID NO: 121985 - RNA, 32 nt, Human
cgcugggucgggaugccgaaccucuccugauc

SEQ ID NO: 121986 - RNA, 32 nt, Human
cgcugggucugcggccuaagggaccucccucg

SEQ ID NO: 121987 - RNA, 26 nt, Human
cgcugggugcccaggcccuggcccug

SEQ ID NO: 121988 - RNA, 32 nt, Human
cgcugggugcccggccuggaacacagguucug

SEQ ID NO: 121989 - RNA, 32 nt, Human
cgcuggucaagaagccaacagucauguggcuc

SEQ ID NO: 121990 - RNA, 32 nt, Human
cgcuggucccaccauagccucugcccaggcca

SEQ ID NO: 121991 - RNA, 32 nt, Human
cgcugguccccagggacccuggcauccgucgu

SEQ ID NO: 121992 - RNA, 32 nt, Human
cgcuggucucaaacuccuggacucaugggauc

SEQ ID NO: 121993 - RNA, 32 nt, Human
cgcuggucugggauaguugggcagggagacgg

SEQ ID NO: 121994 - RNA, 32 nt, Human
cgcuggugcauucuguuuccucuugaucucaa

SEQ ID NO: 121995 - RNA, 32 nt, Human
cgcuggugcccaccgagggcccagggagugag

SEQ ID NO: 121996 - RNA, 32 nt, Human
cgcuggugcuguggaagccgggagacagccgg

SEQ ID NO: 121997 - RNA, 32 nt, Human
cgcugguggccaaguccuccauccugcuggac

SEQ ID NO: 121998 - RNA, 31 nt, Human
cgcuggugggugggaucguggcggagcgcca

SEQ ID NO: 121999 - RNA, 32 nt, Human
cgcuggugugacuguggacuguuuacacgugg

SEQ ID NO: 122000 - RNA, 32 nt, Human
cgcuggugugggcugcagagaguauggcccgc

SEQ ID NO: 122001 - RNA, 19 nt, Human
cgcuguaccucugcucccu

SEQ ID NO: 122002 - RNA, 32 nt, Human
cgcuguauugccagacuggagugcaguggcgu

SEQ ID NO: 122003 - RNA, 32 nt, Human
cgcuguauugcccaggcuggagugcaguggcg

SEQ ID NO: 122004 - RNA, 32 nt, Human
cgcuguauuucccaggcuggagugcagaggca

SEQ ID NO: 122005 - RNA, 32 nt, Human
cgcugucacccaggcuggagugcagugcugcg

SEQ ID NO: 122006 - RNA, 32 nt, Human
cgcuguccccuuugcacuauccuuccucucug

SEQ ID NO: 122007 - RNA, 32 nt, Human
cgcugucccucugcacucccugccuuggugcg

SEQ ID NO: 122008 - RNA, 32 nt, Human
cgcuguccgcucucccucuccugcugcccacc

SEQ ID NO: 122009 - RNA, 32 nt, Human
cgcuguccggcccccaccccagccucgccuuc

SEQ ID NO: 122010 - RNA, 32 nt, Human
cgcuguccuccggcagcuggagauguccgagc

SEQ ID NO: 122011 - RNA, 32 nt, Human
cgcuguccuccuuuaccuuccucucuccucag

SEQ ID NO: 122012 - RNA, 32 nt, Human
cgcuguccucucucccccucgcccucucuucg

SEQ ID NO: 122013 - RNA, 32 nt, Human
cgcuguccugcauugcagcccaucacugucug

SEQ ID NO: 122014 - RNA, 32 nt, Human
cgcugucgauaagcuucacgcacuggcuugcc

SEQ ID NO: 122015 - RNA, 32 nt, Human
cgcugucgcccaggcuggagcgcaauggcgcg

SEQ ID NO: 122016 - RNA, 18 nt, Human
cgcugucggaggagcggg

SEQ ID NO: 122017 - RNA, 32 nt, Human
cgcugucuuaagaaucauccucacaucucagg

SEQ ID NO: 122018 - RNA, 32 nt, Human
cgcugucuuccucccuuccccuggggguccug

SEQ ID NO: 122019 - RNA, 32 nt, Human
cgcugucuuuuccauuuaaccugggcacugcc

SEQ ID NO: 122020 - RNA, 32 nt, Human
cgcugucuuuuuaaaaucauguauuuaaugug

SEQ ID NO: 122021 - RNA, 32 nt, Human
cgcugugaacuccugcauccaccccugccuga

SEQ ID NO: 122022 - RNA, 32 nt, Human
cgcugugaauacaggcacagcagccacugggg

SEQ ID NO: 122023 - RNA, 32 nt, Human
cgcugugagauggggagauuuugucuuuugau

SEQ ID NO: 122024 - RNA, 32 nt, Human
cgcugugagucacuggccaggagcccagggug

SEQ ID NO: 122025 - RNA, 32 nt, Human
cgcugugccccaccccuagcugacccccaccu

SEQ ID NO: 122026 - RNA, 32 nt, Human
cgcugugcgagcaucauagugugaacuuacuc

SEQ ID NO: 122027 - RNA, 32 nt, Human
cgcugugcgccggaagagcacgcccaguccgg

SEQ ID NO: 122028 - RNA, 32 nt, Human
cgcugugcucacugauccgccuccagggccac

SEQ ID NO: 122029 - RNA, 32 nt, Human
cgcugugcuggugggguacacugcagaggagu

SEQ ID NO: 122030 - RNA, 32 nt, Human
cgcugugcuggugugcuuuagaaucauccgga

SEQ ID NO: 122031 - RNA, 32 nt, Human
cgcuguggaaacaaacgcaaaugaaaagccgc

SEQ ID NO: 122032 - RNA, 32 nt, Human
cgcuguggaagcagccaaggcacuuccucacc

SEQ ID NO: 122033 - RNA, 32 nt, Human
cgcuguggccacuccaauaggugcugagugua

SEQ ID NO: 122034 - RNA, 18 nt, Human
cgcuguggcccccgggug

SEQ ID NO: 122035 - RNA, 19 nt, Human
cgcuguggccucugcugcu

SEQ ID NO: 122036 - RNA, 32 nt, Human
cgcuguggcucaagccuguaaucccagcacuu

SEQ ID NO: 122037 - RNA, 32 nt, Human
cgcuguggcucacaccuauaaucccagcacuu

SEQ ID NO: 122038 - RNA, 32 nt, Human
cgcuguggcucacaccuguaaucccaacacuu

SEQ ID NO: 122039 - RNA, 32 nt, Human
cgcuguggcucacaccuguaaucccagcucuu

SEQ ID NO: 122040 - RNA, 32 nt, Human
cgcuguggcucacgccaguaaucccagcacuu

SEQ ID NO: 122041 - RNA, 32 nt, Human
cgcuguggcucacgccucuaaucccaggacuu

SEQ ID NO: 122042 - RNA, 32 nt, Human
cgcuguggcucacgccuguaaucccagcacuu

SEQ ID NO: 122043 - RNA, 32 nt, Human
cgcuguggcucacgccuguaauuccagcacuu

SEQ ID NO: 122044 - RNA, 32 nt, Human
cgcuguggcucaugacuauaaucccagcuguu

SEQ ID NO: 122045 - RNA, 32 nt, Human
cgcuguggcucaugccuguaauccuagcacuu

SEQ ID NO: 122046 - RNA, 32 nt, Human
cgcuguggcugacacugagugaagguguuuga

SEQ ID NO: 122047 - RNA, 32 nt, Human
cgcuguggcugcagcuuggaccgcaagggcaa

SEQ ID NO: 122048 - RNA, 32 nt, Human
cgcugugggacugccuucuguccuucauccgc

SEQ ID NO: 122049 - RNA, 24 nt, Human
cgcugugggcacugccucagccgc

SEQ ID NO: 122050 - RNA, 32 nt, Human
cgcuguggguguggugauucagccuggcauuu

SEQ ID NO: 122051 - RNA, 32 nt, Human
cgcugugguucacgccuguaaucccagcacuu

SEQ ID NO: 122052 - RNA, 32 nt, Human
cgcugugucacacaggcuggagugcaguggcg

SEQ ID NO: 122053 - RNA, 32 nt, Human
cgcugugucacccaggcuggagugcaguggcg

SEQ ID NO: 122054 - RNA, 32 nt, Human
cgcugugucgccaaggcuggagugcaguggug

SEQ ID NO: 122055 - RNA, 32 nt, Human
cgcugugucgcccagacuggagugcaguggug

SEQ ID NO: 122056 - RNA, 32 nt, Human
cgcugugucgcccaggcuggagugcagugagc

SEQ ID NO: 122057 - RNA, 32 nt, Human
cgcuguguggccuagguuggagugcaauggcg

SEQ ID NO: 122058 - RNA, 32 nt, Human
cgcugugugucuggcccuuggugacuguccgu

SEQ ID NO: 122059 - RNA, 32 nt, Human
cgcugugugugugcucuuauuuccacuggccu

SEQ ID NO: 122060 - RNA, 32 nt, Human
cgcuguguugccaaggcuggagugcaggccgc

SEQ ID NO: 122061 - RNA, 32 nt, Human
cgcuguguugcccaggcuggagugcaauggcg

SEQ ID NO: 122062 - RNA, 32 nt, Human
cgcuguguugcccaggcugguuucaaccuccu

SEQ ID NO: 122063 - RNA, 32 nt, Human
cgcuguguuguccaggcuggagugcaguggug

SEQ ID NO: 122064 - RNA, 32 nt, Human
cgcuguuacccaggcuggagugcaauggcgca

SEQ ID NO: 122065 - RNA, 32 nt, Human
cgcuguucaucggcuucagccaguucucggac

SEQ ID NO: 122066 - RNA, 32 nt, Human
cgcuguuccacagugacugggcccuguccagg

SEQ ID NO: 122067 - RNA, 32 nt, Human
cgcuguucccaggauggugauccguguauaua

SEQ ID NO: 122068 - RNA, 32 nt, Human
cgcuguuccccaagccucgcuccaagcccacg

SEQ ID NO: 122069 - RNA, 32 nt, Human
cgcuguucugggcauggcagggccaggccucu

SEQ ID NO: 122070 - RNA, 32 nt, Human
cgcuguugcccaggcuagagcgcaggggcaca

SEQ ID NO: 122071 - RNA, 32 nt, Human
cgcuguugcccaggcucuagugcaauggcacg

SEQ ID NO: 122072 - RNA, 32 nt, Human
cgcuguugcccaggcuggagugcaguggcgug

SEQ ID NO: 122073 - RNA, 32 nt, Human
cgcuguugcccaggcuguagugcaguggugcg

SEQ ID NO: 122074 - RNA, 32 nt, Human
cgcuguuugugggagcacugggcucaugccug

SEQ ID NO: 122075 - RNA, 32 nt, Human
cgcuuaaccaacucaccucccuucucuuagcc

SEQ ID NO: 122076 - RNA, 32 nt, Human
cgcuuaagcccaggagcuuaagaccagccugg

SEQ ID NO: 122077 - RNA, 31 nt, Human
cgcuuacccugcuuugggccugcguugcugc

SEQ ID NO: 122078 - RNA, 32 nt, Human
cgcuuacuggaagggcguuuuucagagcugca

SEQ ID NO: 122079 - RNA, 32 nt, Human
cgcuuacuuugagugauccuccaacuucauuu

SEQ ID NO: 122080 - RNA, 20 nt, Human
cgcuuagcuggagugcggug

SEQ ID NO: 122081 - RNA, 32 nt, Human
cgcuuaggaaugcuugccucuggcaggcaggc

SEQ ID NO: 122082 - RNA, 32 nt, Human
cgcuuaggggcugaggcgcgauggcagguguc

SEQ ID NO: 122083 - RNA, 32 nt, Human
cgcuuaguucugccuugaguccugccagugua

SEQ ID NO: 122084 - RNA, 32 nt, Human
cgcuuauggucuguuuggggcccucgucuaag

SEQ ID NO: 122085 - RNA, 32 nt, Human
cgcuuauugcccaggcuggagugcaauggcac

SEQ ID NO: 122086 - RNA, 32 nt, Human
cgcuuauuucccaggcagccgcugcagucgcc

SEQ ID NO: 122087 - RNA, 32 nt, Human
cgcuucacacagugccuuuugugaaaguguca

SEQ ID NO: 122088 - RNA, 32 nt, Human
cgcuucacagaaccuccucuucauuggaaaug

SEQ ID NO: 122089 - RNA, 32 nt, Human
cgcuucaccucuuguuuccugcccucacugca

SEQ ID NO: 122090 - RNA, 32 nt, Human
cgcuucacuucaccugugccucccugguccgc

SEQ ID NO: 122091 - RNA, 32 nt, Human
cgcuucacuuucucccuccugccgccgccgcc

SEQ ID NO: 122092 - RNA, 32 nt, Human
cgcuucagcaauuuacagcccaaaugaguuga

SEQ ID NO: 122093 - RNA, 32 nt, Human
cgcuucagcgaugacuccagucuggguguccc

SEQ ID NO: 122094 - RNA, 32 nt, Human
cgcuucauauuuccuuuucuuucccucucugu

SEQ ID NO: 122095 - RNA, 32 nt, Human
cgcuucaugucagugacuccugccccuugguc

SEQ ID NO: 122096 - RNA, 32 nt, Human
cgcuuccagaacuaagccacccagacaccauc

SEQ ID NO: 122097 - RNA, 32 nt, Human
cgcuuccagagcagggcugucggugcucugca

SEQ ID NO: 122098 - RNA, 32 nt, Human
cgcuuccagcccacuccagccaggggagcagg

SEQ ID NO: 122099 - RNA, 32 nt, Human
cgcuucccaaagugcuggaauuacaggcguga

SEQ ID NO: 122100 - RNA, 32 nt, Human
cgcuucccaccgucccucuccccuuacuggca

SEQ ID NO: 122101 - RNA, 31 nt, Human
cgcuucccacuuuucuggaugaggugucccc

SEQ ID NO: 122102 - RNA, 32 nt, Human
cgcuuccccaaagccuauggagcacuuaucag

SEQ ID NO: 122103 - RNA, 32 nt, Human
cgcuuccccagccuucugaaagaaggagguuu

SEQ ID NO: 122104 - RNA, 28 nt, Human
cgcuucccccaagcugccucauggcccg

SEQ ID NO: 122105 - RNA, 32 nt, Human
cgcuucccccaagcugccucauggcccgcacg

SEQ ID NO: 122106 - RNA, 32 nt, Human
cgcuuccgccuucuggaagccugcacuccagc

SEQ ID NO: 122107 - RNA, 24 nt, Human
cgcuuccgguucagacccugcgga

SEQ ID NO: 122108 - RNA, 32 nt, Human
cgcuuccuccaggccgucagccugaugcauag

SEQ ID NO: 122109 - RNA, 32 nt, Human
cgcuuccuguuuucccuuuuccuuuuaagccu

SEQ ID NO: 122110 - RNA, 32 nt, Human
cgcuucgagggaauaugcgaagcugccgcgug

SEQ ID NO: 122111 - RNA, 21 nt, Human
cgcuucgccuggacucuggga

SEQ ID NO: 122112 - RNA, 32 nt, Human
cgcuucuagaagccaggcacagguugccaaga

SEQ ID NO: 122113 - RNA, 32 nt, Human
cgcuucuauguccgucacacugaaaaggucca

SEQ ID NO: 122114 - RNA, 32 nt, Human
cgcuucuccagccucagccuccugaguagcug

SEQ ID NO: 122115 - RNA, 23 nt, Human
cgcuucuccucuccuccuccuga

SEQ ID NO: 122116 - RNA, 32 nt, Human
cgcuucuccugccucagccuccugaguagcug

SEQ ID NO: 122117 - RNA, 32 nt, Human
cgcuucucugagccugucuguacagugcuuug

SEQ ID NO: 122118 - RNA, 32 nt, Human
cgcuucugaccuuccaggccuacgagcagauu

SEQ ID NO: 122119 - RNA, 18 nt, Human
cgcuucugcccccagggu

SEQ ID NO: 122120 - RNA, 32 nt, Human
cgcuucugggagggcucuugcggugccggcac

SEQ ID NO: 122121 - RNA, 32 nt, Human
cgcuucuguggaccaugugcugcaggagcauc

SEQ ID NO: 122122 - RNA, 32 nt, Human
cgcuucuuccucuugcugcucuucucguuccc

SEQ ID NO: 122123 - RNA, 32 nt, Human
cgcuucuucucccacccccacccccuucaaac

SEQ ID NO: 122124 - RNA, 32 nt, Human
cgcuucuucucccccgccaucaugucgcccaa

SEQ ID NO: 122125 - RNA, 32 nt, Human
cgcuucuugccucugugcugugugugacguga

SEQ ID NO: 122126 - RNA, 31 nt, Human
cgcuucuuucccucugggcuuggucauuucc

SEQ ID NO: 122127 - RNA, 32 nt, Human
cgcuugacccaggaggcggagguugcggugac

SEQ ID NO: 122128 - RNA, 32 nt, Human
cgcuugagcccgggaagcagagguugcaguga

SEQ ID NO: 122129 - RNA, 32 nt, Human
cgcuugagccugggaggcagagguugcuguga

SEQ ID NO: 122130 - RNA, 32 nt, Human
cgcuugaguuaucuaggugcagcuguguucug

SEQ ID NO: 122131 - RNA, 32 nt, Human
cgcuugaucucaggagguugaggcugcaguga

SEQ ID NO: 122132 - RNA, 32 nt, Human
cgcuugauucuacuucaggaggcacauggggc

SEQ ID NO: 122133 - RNA, 32 nt, Human
cgcuugcaucagcagcgugcgugagcagaugc

SEQ ID NO: 122134 - RNA, 32 nt, Human
cgcuugcccaggagagggaccaggggugcgcc

SEQ ID NO: 122135 - RNA, 28 nt, Human
cgcuugccccuuguucucccaagcacca

SEQ ID NO: 122136 - RNA, 25 nt, Human
cgcuugcccucucccggccccggga

SEQ ID NO: 122137 - RNA, 32 nt, Human
cgcuugccgggaaccugcucugugcugggaac

SEQ ID NO: 122138 - RNA, 32 nt, Human
cgcuugccugcacuccauccugucugcaacgc

SEQ ID NO: 122139 - RNA, 32 nt, Human
cgcuugccugccccagggucaggcugggcaag

SEQ ID NO: 122140 - RNA, 32 nt, Human
cgcuugccuguaucccagcuacucaggaagcu

SEQ ID NO: 122141 - RNA, 32 nt, Human
cgcuugcguggcuaggaagggguuggggccca

SEQ ID NO: 122142 - RNA, 32 nt, Human
cgcuugcuaggcuggccucucuugccuccccu

SEQ ID NO: 122143 - RNA, 32 nt, Human
cgcuugcugccugucugcuuuccuugguggcu

SEQ ID NO: 122144 - RNA, 32 nt, Human
cgcuugcugcugucucugggaacugggugcca

SEQ ID NO: 122145 - RNA, 32 nt, Human
cgcuuggacucugguggcucccaacucgccgu

SEQ ID NO: 122146 - RNA, 32 nt, Human
cgcuuggccucuccuucucuuccuucacuuug

SEQ ID NO: 122147 - RNA, 32 nt, Human
cgcuuggcgaaacugaggucucauggagaagc

SEQ ID NO: 122148 - RNA, 32 nt, Human
cgcuugggagccaggcauccagcuggggccag

SEQ ID NO: 122149 - RNA, 32 nt, Human
cgcuugggcgaacaucuucccaaggcagagau

SEQ ID NO: 122150 - RNA, 32 nt, Human
cgcuugggggaaaacuucaaagagccggaucg

SEQ ID NO: 122151 - RNA, 21 nt, Human
cgcuuguaaucccagcuacuc

SEQ ID NO: 122152 - RNA, 32 nt, Human
cgcuugugaguccuccacacucguuccccauu

SEQ ID NO: 122153 - RNA, 32 nt, Human
cgcuuguggccaaacuggcuccagucacuccc

SEQ ID NO: 122154 - RNA, 32 nt, Human
cgcuuguucaggccagccaacauacgacaguu

SEQ ID NO: 122155 - RNA, 32 nt, Human
cgcuuguugcccaggcuggaaugcaauggcgu

SEQ ID NO: 122156 - RNA, 32 nt, Human
cgcuuguugcccaggcuggagugcaauggcgc

SEQ ID NO: 122157 - RNA, 32 nt, Human
cgcuuguuuccaccuccugggccggggcucug

SEQ ID NO: 122158 - RNA, 32 nt, Human
cgcuuuaauugugggagaagagaggagaggag

SEQ ID NO: 122159 - RNA, 32 nt, Human
cgcuuuaccauguuagcuguguauuguuuuaa

SEQ ID NO: 122160 - RNA, 32 nt, Human
cgcuuuagcucccuguccuuuggucgcauuug

SEQ ID NO: 122161 - RNA, 32 nt, Human
cgcuuuaggaaaugugcuuaggcaggguacuu

SEQ ID NO: 122162 - RNA, 32 nt, Human
cgcuuuauuuuuguaaguaucaccugccacca

SEQ ID NO: 122163 - RNA, 32 nt, Human
cgcuuucacaccaauccguacaugcugcuucc

SEQ ID NO: 122164 - RNA, 32 nt, Human
cgcuuucagggagggggcagagggcagcuugc

SEQ ID NO: 122165 - RNA, 32 nt, Human
cgcuuucaugagauaggcacugagaugaucau

SEQ ID NO: 122166 - RNA, 32 nt, Human
cgcuuucaugccacugggccugcuagucuguc

SEQ ID NO: 122167 - RNA, 32 nt, Human
cgcuuuccagccugugggagcggcaggggcaa

SEQ ID NO: 122168 - RNA, 32 nt, Human
cgcuuuccagugauguagacagaacgggccuu

SEQ ID NO: 122169 - RNA, 32 nt, Human
cgcuuuccucaccacauacagcucuucuccac

SEQ ID NO: 122170 - RNA, 32 nt, Human
cgcuuuccuccccugccggcccccuccgcccc

SEQ ID NO: 122171 - RNA, 32 nt, Human
cgcuuuccuccuccaucucuuuuccuccgccu

SEQ ID NO: 122172 - RNA, 32 nt, Human
cgcuuucgauccacccuccucccuucucaugg

SEQ ID NO: 122173 - RNA, 32 nt, Human
cgcuuucucccagcaugcagcgggaggaggga

SEQ ID NO: 122174 - RNA, 32 nt, Human
cgcuuucuccggcuuccucuggcccaggcgcc

SEQ ID NO: 122175 - RNA, 32 nt, Human
cgcuuucucuuccggcugaaucuggucuguac

SEQ ID NO: 122176 - RNA, 32 nt, Human
cgcuuucucuuuuccucuaccuuccucauccc

SEQ ID NO: 122177 - RNA, 32 nt, Human
cgcuuucugcagccgccacugcagccgcgcgg

SEQ ID NO: 122178 - RNA, 32 nt, Human
cgcuuucuggggagugaggugagacauagcgg

SEQ ID NO: 122179 - RNA, 32 nt, Human
cgcuuucuuguccuggacuccugcaaugacuc

SEQ ID NO: 122180 - RNA, 26 nt, Human
cgcuuucuuugcggauggugaagcug

SEQ ID NO: 122181 - RNA, 32 nt, Human
cgcuuugacacccaggcuggagugcaguagca

SEQ ID NO: 122182 - RNA, 32 nt, Human
cgcuuugagaacugagcgcauguggaguucgg

SEQ ID NO: 122183 - RNA, 32 nt, Human
cgcuuugagaucugggcgccugcuggaaccug

SEQ ID NO: 122184 - RNA, 32 nt, Human
cgcuuugcaggcugccccuggcuucuuccucc

SEQ ID NO: 122185 - RNA, 32 nt, Human
cgcuuugccauccugaaagacagccccagguc

SEQ ID NO: 122186 - RNA, 32 nt, Human
cgcuuugccauguaaauuucccagaaguuguu

SEQ ID NO: 122187 - RNA, 32 nt, Human
cgcuuugcuacaagaagacagaauguagaaac

SEQ ID NO: 122188 - RNA, 21 nt, Human
cgcuuugcuguucgugauaug

SEQ ID NO: 122189 - RNA, 32 nt, Human
cgcuuuggacagaaaaucacugugcugaucgg

SEQ ID NO: 122190 - RNA, 32 nt, Human
cgcuuuggauucccccggccuggguggggaga

SEQ ID NO: 122191 - RNA, 32 nt, Human
cgcuuuggcaggccaaggcgggcagaucgcuu

SEQ ID NO: 122192 - RNA, 32 nt, Human
cgcuuuggcucuggagauagccccagagcagg

SEQ ID NO: 122193 - RNA, 32 nt, Human
cgcuuugggagagcgaggcgggcagaucacaa

SEQ ID NO: 122194 - RNA, 32 nt, Human
cgcuuugggagcccgaggcggguggauuaccu

SEQ ID NO: 122195 - RNA, 32 nt, Human
cgcuuugggaggcagaggcagguggaucaccu

SEQ ID NO: 122196 - RNA, 32 nt, Human
cgcuuugggaggccgaggcgggcggaucgcag

SEQ ID NO: 122197 - RNA, 32 nt, Human
cgcuuugggaggccgaggcgggcggaucgccu

SEQ ID NO: 122198 - RNA, 32 nt, Human
cgcuuugggaggccgaggcggguggaucacga

SEQ ID NO: 122199 - RNA, 32 nt, Human
cgcuuugggaggccgaggugggcagaucacaa

SEQ ID NO: 122200 - RNA, 32 nt, Human
cgcuuugggaggccgaggugggcagaucaccu

SEQ ID NO: 122201 - RNA, 32 nt, Human
cgcuuugggaggcugaggcaggaggaucgcuu

SEQ ID NO: 122202 - RNA, 32 nt, Human
cgcuuugggaggcugaggcagguggaucacuu

SEQ ID NO: 122203 - RNA, 32 nt, Human
cgcuuugggcggauuggguaggaggauuacuu

SEQ ID NO: 122204 - RNA, 32 nt, Human
cgcuuugggguuuugccuguuugcaccuuaga

SEQ ID NO: 122205 - RNA, 32 nt, Human
cgcuuugucaccaggcuggagugcaguggugc

SEQ ID NO: 122206 - RNA, 32 nt, Human
cgcuuugucacccaggcuggagugcaauggca

SEQ ID NO: 122207 - RNA, 32 nt, Human
cgcuuugucaccuaagcuggagugcagugcgc

SEQ ID NO: 122208 - RNA, 32 nt, Human
cgcuuugucaugcuucuucaguaccauggauu

SEQ ID NO: 122209 - RNA, 32 nt, Human
cgcuuuguccuucagugccugccuccuuuuuc

SEQ ID NO: 122210 - RNA, 32 nt, Human
cgcuuugucgcccaggcuggagugcaaugcac

SEQ ID NO: 122211 - RNA, 32 nt, Human
cgcuuugucgcccaggcuggagugcaguggca

SEQ ID NO: 122212 - RNA, 32 nt, Human
cgcuuugucgcccuggcuggagugcaguugcg

SEQ ID NO: 122213 - RNA, 32 nt, Human
cgcuuugugccucugagugcgcugcugugugu

SEQ ID NO: 122214 - RNA, 32 nt, Human
cgcuuuguguucucaucggagcugcaugggaa

SEQ ID NO: 122215 - RNA, 32 nt, Human
cgcuuuguucuuucauuuccuccagcacuuuc

SEQ ID NO: 122216 - RNA, 32 nt, Human
cgcuuuguugcccaggcuggagugccuuggcg

SEQ ID NO: 122217 - RNA, 32 nt, Human
cgcuuuguugcccaggcuggagugcgguggug

SEQ ID NO: 122218 - RNA, 32 nt, Human
cgcuuuguugcccaggcuggaguggaguggcg

SEQ ID NO: 122219 - RNA, 32 nt, Human
cgcuuuguugcccaggcuggggugcaguggca

SEQ ID NO: 122220 - RNA, 32 nt, Human
cgcuuuguuucccaggcuggagugcaguggca

SEQ ID NO: 122221 - RNA, 32 nt, Human
cgcuuuguuuuccaagcaguaaguacuacaua

SEQ ID NO: 122222 - RNA, 32 nt, Human
cgcuuuguuuucugauaggggagaagccugga

SEQ ID NO: 122223 - RNA, 32 nt, Human
cgcuuuucagggaccaguccaccaccaucucc

SEQ ID NO: 122224 - RNA, 32 nt, Human
cgcuuuuccccuucucccuccugcuccaggcc

SEQ ID NO: 122225 - RNA, 32 nt, Human
cgcuuuuccugccucccaaggcugggagaggg

SEQ ID NO: 122226 - RNA, 32 nt, Human
cgcuuuugccggagacagagacugacauggaa

SEQ ID NO: 122227 - RNA, 32 nt, Human
cgcuuuuggaaaccaccuuaccugguuugcuc

SEQ ID NO: 122228 - RNA, 31 nt, Human
cgcuuuugugggagagaaaaucauugcaaaa

SEQ ID NO: 122229 - RNA, 32 nt, Human
cgcuuuuucacucccauaccuuuaauggcccc

SEQ ID NO: 122230 - RNA, 32 nt, Human
cgcuuuuuccuccuccuccucucccggccccg

SEQ ID NO: 122231 - RNA, 32 nt, Human
cggaaaacaugcuacacacugcauguuuguga

SEQ ID NO: 122232 - RNA, 32 nt, Human
cggaaaacugcacugugaggcggggcgauggg

SEQ ID NO: 122233 - RNA, 32 nt, Human
cggaaaagagggcugaugacugggcccggggg

SEQ ID NO: 122234 - RNA, 21 nt, Human
cggaaaagccuccgccugcuc

SEQ ID NO: 122235 - RNA, 32 nt, Human
cggaaaaggaagcuagcagaggggcucagagg

SEQ ID NO: 122236 - RNA, 32 nt, Human
cggaaaagucaccacuuuagucccuggccacc

SEQ ID NO: 122237 - RNA, 20 nt, Human
cggaaacacaaccccaggga

SEQ ID NO: 122238 - RNA, 20 nt, Human
cggaaacacagaggggucca

SEQ ID NO: 122239 - RNA, 32 nt, Human
cggaaacagcgggaaguaacuggaaagagcuu

SEQ ID NO: 122240 - RNA, 32 nt, Human
cggaaacauagaaacauacacaaggccagaaa

SEQ ID NO: 122241 - RNA, 32 nt, Human
cggaaacccacugucugaagaccacagagggg

SEQ ID NO: 122242 - RNA, 24 nt, Human
cggaaacccagacucacccagggg

SEQ ID NO: 122243 - RNA, 32 nt, Human
cggaaacccggaguuggaauuggaucuugcac

SEQ ID NO: 122244 - RNA, 21 nt, Human
cggaaacccuugguuuagggg

SEQ ID NO: 122245 - RNA, 25 nt, Human
cggaaaccgcgggagagggucgcug

SEQ ID NO: 122246 - RNA, 22 nt, Human
cggaaaccugcggaggccggga

SEQ ID NO: 122247 - RNA, 32 nt, Human
cggaaacucaaguugaaugaaaaugccaucuc

SEQ ID NO: 122248 - RNA, 23 nt, Human
cggaaacuccacauccuguggga

SEQ ID NO: 122249 - RNA, 22 nt, Human
cggaaacuccgagccucagaga

SEQ ID NO: 122250 - RNA, 21 nt, Human
cggaaacuccuguccugggga

SEQ ID NO: 122251 - RNA, 32 nt, Human
cggaaacugcagcugcuugaaugccuucccag

SEQ ID NO: 122252 - RNA, 30 nt, Human
cggaaagaaggcaccagggcacaguggaca

SEQ ID NO: 122253 - RNA, 32 nt, Human
cggaaagcagcaguguaccagugucacucugg

SEQ ID NO: 122254 - RNA, 20 nt, Human
cggaaagcaugguccggggg

SEQ ID NO: 122255 - RNA, 32 nt, Human
cggaaagccugaucuuuaaguccagucuuggu

SEQ ID NO: 122256 - RNA, 32 nt, Human
cggaaagggcgcuggggauaaccagaacauuu

SEQ ID NO: 122257 - RNA, 32 nt, Human
cggaaaggggagaggaaggcaggcccucccga

SEQ ID NO: 122258 - RNA, 32 nt, Human
cggaaaggguacugcauuucccguuucuaccu

SEQ ID NO: 122259 - RNA, 32 nt, Human
cggaaagguacgcaggugacgccuuagcagcc

SEQ ID NO: 122260 - RNA, 19 nt, Human
cggaaaguccucuuugcca

SEQ ID NO: 122261 - RNA, 32 nt, Human
cggaaagucucauccacccccacaucgccucu

SEQ ID NO: 122262 - RNA, 32 nt, Human
cggaaaguucagcaugcaggaaguuuggggag

SEQ ID NO: 122263 - RNA, 32 nt, Human
cggaaauaggcucucauuugauccuuuuuaca

SEQ ID NO: 122264 - RNA, 32 nt, Human
cggaaaugguuggcuuugggcaguucaggagg

SEQ ID NO: 122265 - RNA, 22 nt, Human
cggaaauuguguuuccuugcca

SEQ ID NO: 122266 - RNA, 32 nt, Human
cggaacaagccgacgcuuccagacaaggcgga

SEQ ID NO: 122267 - RNA, 21 nt, Human
cggaacaccgccagucuucac

SEQ ID NO: 122268 - RNA, 32 nt, Human
cggaacagccuccgucugcuggcucuucgugg

SEQ ID NO: 122269 - RNA, 19 nt, Human
cggaacauguucuucacca

SEQ ID NO: 122270 - RNA, 32 nt, Human
cggaaccagaggguggagguugguguggaaga

SEQ ID NO: 122271 - RNA, 26 nt, Human
cggaaccaucccgcaggaguucagcu

SEQ ID NO: 122272 - RNA, 32 nt, Human
cggaaccccuggcugucugcauauaucucaga

SEQ ID NO: 122273 - RNA, 32 nt, Human
cggaacccugaagaggagggggagggugagcc

SEQ ID NO: 122274 - RNA, 32 nt, Human
cggaacccugcucuccacugcggccugcaggg

SEQ ID NO: 122275 - RNA, 32 nt, Human
cggaaccggcgccgucgguggggagcagccgg

SEQ ID NO: 122276 - RNA, 32 nt, Human
cggaaccgugggcuucugccuccggguaaaau

SEQ ID NO: 122277 - RNA, 25 nt, Human
cggaaccucgcgcuucgcccgggga

SEQ ID NO: 122278 - RNA, 32 nt, Human
cggaaccucucggcugugcucucccaugaguc

SEQ ID NO: 122279 - RNA, 32 nt, Human
cggaaccugccugaguacgcucuccugugcca

SEQ ID NO: 122280 - RNA, 32 nt, Human
cggaaccugccuucaaggcucagcuccgcaca

SEQ ID NO: 122281 - RNA, 32 nt, Human
cggaacgaaagcggagaagggggccagccuca

SEQ ID NO: 122282 - RNA, 32 nt, Human
cggaacggagaaagguggacuggaaggggccc

SEQ ID NO: 122283 - RNA, 32 nt, Human
cggaacucaaauacgugggcauucaaauguau

SEQ ID NO: 122284 - RNA, 21 nt, Human
cggaacucuaacuccuugcca

SEQ ID NO: 122285 - RNA, 32 nt, Human
cggaacugcggaguugcuggguccaccgaccc

SEQ ID NO: 122286 - RNA, 32 nt, Human
cggaacugggguccagagaggccaggucacag

SEQ ID NO: 122287 - RNA, 32 nt, Human
cggaagaacaccuucacugccuggucugauga

SEQ ID NO: 122288 - RNA, 32 nt, Human
cggaagaagagguagggcgccgccgugacaga

SEQ ID NO: 122289 - RNA, 32 nt, Human
cggaagaagcuccaccaugaggcgagguggau

SEQ ID NO: 122290 - RNA, 32 nt, Human
cggaagaaggugagucugggagaggggcgucc

SEQ ID NO: 122291 - RNA, 32 nt, Human
cggaagaauagagaggaggcuugaaggaacca

SEQ ID NO: 122292 - RNA, 32 nt, Human
cggaagaaucaucuaccucccagcuuugugag

SEQ ID NO: 122293 - RNA, 32 nt, Human
cggaagaccccuggcucuauaagcugaauuau

SEQ ID NO: 122294 - RNA, 32 nt, Human
cggaagacccuggcuccgucauggccucugcc

SEQ ID NO: 122295 - RNA, 32 nt, Human
cggaagagagaagggagagggaggaggccggg

SEQ ID NO: 122296 - RNA, 32 nt, Human
cggaagagagccaccggccagacagugugagc

SEQ ID NO: 122297 - RNA, 32 nt, Human
cggaagagcagcugcccuccgaccccucacuu

SEQ ID NO: 122298 - RNA, 22 nt, Human
cggaagagcaggucuccagggg

SEQ ID NO: 122299 - RNA, 32 nt, Human
cggaagagcaugugguguuggccacacacuga

SEQ ID NO: 122300 - RNA, 32 nt, Human
cggaagagcgccagguucaguguuacccugag

SEQ ID NO: 122301 - RNA, 32 nt, Human
cggaagaggaggaggacgaggaggaagaggag

SEQ ID NO: 122302 - RNA, 32 nt, Human
cggaagaggaggaggaggaggaggaaggggcu

SEQ ID NO: 122303 - RNA, 32 nt, Human
cggaagaggugggcugguggaggcggggucga

SEQ ID NO: 122304 - RNA, 32 nt, Human
cggaagaugccuuucaaaggccgaggccagcg

SEQ ID NO: 122305 - RNA, 32 nt, Human
cggaagaugcuccccaucccacugacugcuug

SEQ ID NO: 122306 - RNA, 31 nt, Human
cggaagauggccugggugcucaagauggacg

SEQ ID NO: 122307 - RNA, 32 nt, Human
cggaagcagaggcguuggcggcgugaggcuca

SEQ ID NO: 122308 - RNA, 32 nt, Human
cggaagcagcuuuggcuggugguggcuggcau

SEQ ID NO: 122309 - RNA, 22 nt, Human
cggaagcaggaagcagacucca

SEQ ID NO: 122310 - RNA, 32 nt, Human
cggaagcaggaguucaagccgcagcugguagg

SEQ ID NO: 122311 - RNA, 32 nt, Human
cggaagccagaacauuccuccuggaaauucaa

SEQ ID NO: 122312 - RNA, 32 nt, Human
cggaagccagaugggaagagugaggcugccac

SEQ ID NO: 122313 - RNA, 24 nt, Human
cggaagcccacgggacuguccagg

SEQ ID NO: 122314 - RNA, 25 nt, Human
cggaagccccagcaauccucaggga

SEQ ID NO: 122315 - RNA, 19 nt, Human
cggaagccccucccgggga

SEQ ID NO: 122316 - RNA, 19 nt, Human
cggaagcccgcucccgggg

SEQ ID NO: 122317 - RNA, 19 nt, Human
cggaagccuaggagagccg

SEQ ID NO: 122318 - RNA, 32 nt, Human
cggaagccucggggagguggagcugcuccuuc

SEQ ID NO: 122319 - RNA, 32 nt, Human
cggaagccucugcuggugaaaauauggaaguc

SEQ ID NO: 122320 - RNA, 32 nt, Human
cggaagccugcgagggagggugguguccacug

SEQ ID NO: 122321 - RNA, 22 nt, Human
cggaagcgacuguccccaggga

SEQ ID NO: 122322 - RNA, 32 nt, Human
cggaagcgcgcguggaccuggcgcaccgagcc

SEQ ID NO: 122323 - RNA, 21 nt, Human
cggaagcucugaggcccgggg

SEQ ID NO: 122324 - RNA, 32 nt, Human
cggaagcucugaggcccggggcuuccggaggu

SEQ ID NO: 122325 - RNA, 28 nt, Human
cggaagcugagaaggcuaaccuugggaa

SEQ ID NO: 122326 - RNA, 32 nt, Human
cggaagcugggcaguagccagggacuacugca

SEQ ID NO: 122327 - RNA, 32 nt, Human
cggaagcuucugcaacaggaggacauugaaaa

SEQ ID NO: 122328 - RNA, 32 nt, Human
cggaaggaacugacacauucucucagagcuca

SEQ ID NO: 122329 - RNA, 32 nt, Human
cggaaggaagaaacuccagacacaucuaaaca

SEQ ID NO: 122330 - RNA, 32 nt, Human
cggaaggaaggaaggaaggaaggaaggaagga

SEQ ID NO: 122331 - RNA, 32 nt, Human
cggaaggagccgcggcugcugcgggaaguggc

SEQ ID NO: 122332 - RNA, 19 nt, Human
cggaaggagcuucagguga

SEQ ID NO: 122333 - RNA, 24 nt, Human
cggaaggaggacgcgaggcgggaa

SEQ ID NO: 122334 - RNA, 32 nt, Human
cggaaggagguggagagucgggggucaccagg

SEQ ID NO: 122335 - RNA, 32 nt, Human
cggaaggcacuggggaugccaagugaauguac

SEQ ID NO: 122336 - RNA, 32 nt, Human
cggaaggcagccaggcggcgggcgcggggcgg

SEQ ID NO: 122337 - RNA, 32 nt, Human
cggaaggccaaagaaccuggagugugaugucc

SEQ ID NO: 122338 - RNA, 32 nt, Human
cggaaggccagccuguuguguccguuuugaag

SEQ ID NO: 122339 - RNA, 32 nt, Human
cggaaggccagcucuucuuggaggacaagaca

SEQ ID NO: 122340 - RNA, 32 nt, Human
cggaaggcugggcaguggagcaaaaugcuugg

SEQ ID NO: 122341 - RNA, 32 nt, Human
cggaagggacucugggcugugccugaggcugg

SEQ ID NO: 122342 - RNA, 32 nt, Human
cggaagggacuguugagccaggacaaccucac

SEQ ID NO: 122343 - RNA, 32 nt, Human
cggaagguagaacuuagaauucagaacuuggg

SEQ ID NO: 122344 - RNA, 32 nt, Human
cggaagguggccugggacuaugggcggcuggc

SEQ ID NO: 122345 - RNA, 32 nt, Human
cggaaggugugagccgcaaacccagcggaggg

SEQ ID NO: 122346 - RNA, 32 nt, Human
cggaaguaacacugaauacuauguacaagaau

SEQ ID NO: 122347 - RNA, 32 nt, Human
cggaaguagcacaguuuccacaguuuuaugug

SEQ ID NO: 122348 - RNA, 32 nt, Human
cggaaguaugugggaagaauacuggcuguuau

SEQ ID NO: 122349 - RNA, 32 nt, Human
cggaagucacgaccucuccagccagggagucu

SEQ ID NO: 122350 - RNA, 22 nt, Human
cggaagucccacggccuugggg

SEQ ID NO: 122351 - RNA, 19 nt, Human
cggaagucgcagaacagua

SEQ ID NO: 122352 - RNA, 32 nt, Human
cggaagugaccucuagagcgguggugaaacug

SEQ ID NO: 122353 - RNA, 21 nt, Human
cggaagugagcggcggggucg

SEQ ID NO: 122354 - RNA, 22 nt, Human
cggaagugcgggcgcucaggga

SEQ ID NO: 122355 - RNA, 32 nt, Human
cggaaguggaacgcggccugaccugcgacgga

SEQ ID NO: 122356 - RNA, 32 nt, Human
cggaaguggaggaggaggaggagaaggaggag

SEQ ID NO: 122357 - RNA, 32 nt, Human
cggaaguggaggcggagggagacgguggcguc

SEQ ID NO: 122358 - RNA, 32 nt, Human
cggaaguggaugaacugaaugcauuccuugcu

SEQ ID NO: 122359 - RNA, 32 nt, Human
cggaaguggcaaaacugccgcaagucugcagc

SEQ ID NO: 122360 - RNA, 31 nt, Human
cggaauaagagaccuguuuuaaaaaggaacu

SEQ ID NO: 122361 - RNA, 32 nt, Human
cggaauagaaagccuccgaccccacauccgaa

SEQ ID NO: 122362 - RNA, 17 nt, Human
cggaauagcugcaggug

SEQ ID NO: 122363 - RNA, 32 nt, Human
cggaaucaaucagcuguguuaugccaaagaau

SEQ ID NO: 122364 - RNA, 32 nt, Human
cggaauccagaagaaagaggagugacagauaa

SEQ ID NO: 122365 - RNA, 32 nt, Human
cggaaucccaggaggcaggggccgggcucucc

SEQ ID NO: 122366 - RNA, 32 nt, Human
cggaauccuggguuucuaggaggcagaaaggu

SEQ ID NO: 122367 - RNA, 20 nt, Human
cggaauccuggucccggcgu

SEQ ID NO: 122368 - RNA, 32 nt, Human
cggaaucggcaaugcccccacccagggggcca

SEQ ID NO: 122369 - RNA, 32 nt, Human
cggaaucuuccuggcccuagagccugcaggcu

SEQ ID NO: 122370 - RNA, 29 nt, Human
cggaaugaucaccaagacacacaaaguag

SEQ ID NO: 122371 - RNA, 32 nt, Human
cggaaugcaguuucagcgugaccugcagucau

SEQ ID NO: 122372 - RNA, 32 nt, Human
cggaauggaaugccaagaaucugcauugagaa

SEQ ID NO: 122373 - RNA, 32 nt, Human
cggaauggagaaagugggacugccggguaccu

SEQ ID NO: 122374 - RNA, 32 nt, Human
cggaauggagggcagaggugaaaaucccagug

SEQ ID NO: 122375 - RNA, 22 nt, Human
cggaauggcagcugauggcuga

SEQ ID NO: 122376 - RNA, 20 nt, Human
cggaauuggcuggccaggga

SEQ ID NO: 122377 - RNA, 32 nt, Human
cggacaaaccuacugcccaggcacagcuuccu

SEQ ID NO: 122378 - RNA, 32 nt, Human
cggacaacauggcgaaaccucaucucuauuaa

SEQ ID NO: 122379 - RNA, 32 nt, Human
cggacaaggaggcggggccugcagcuggcuug

SEQ ID NO: 122380 - RNA, 32 nt, Human
cggacaaucuguuggcagagcugggagggucu

SEQ ID NO: 122381 - RNA, 32 nt, Human
cggacacacagcaguaauuucccagucauagu

SEQ ID NO: 122382 - RNA, 31 nt, Human
cggacacacagcuacagccaagccucuuugc

SEQ ID NO: 122383 - RNA, 32 nt, Human
cggacacacaugcacacacaggugcagauaug

SEQ ID NO: 122384 - RNA, 32 nt, Human
cggacaccccgaaagacccaggagcggcaaug

SEQ ID NO: 122385 - RNA, 32 nt, Human
cggacaccucagccuagaucccuuggugcucu

SEQ ID NO: 122386 - RNA, 32 nt, Human
cggacaccucauuccccucccacuacagggau

SEQ ID NO: 122387 - RNA, 20 nt, Human
cggacaccucccccaagaca

SEQ ID NO: 122388 - RNA, 26 nt, Human
cggacaccugccgcggcgccuagggg

SEQ ID NO: 122389 - RNA, 32 nt, Human
cggacacgaucaccggcuucacagaccaggcg

SEQ ID NO: 122390 - RNA, 32 nt, Human
cggacacuggacgaucacccuggguagggguc

SEQ ID NO: 122391 - RNA, 32 nt, Human
cggacacuugcucccaucuacuuucuucucua

SEQ ID NO: 122392 - RNA, 32 nt, Human
cggacagaaggcauggaucgcguggugccugu

SEQ ID NO: 122393 - RNA, 32 nt, Human
cggacagacagggaagaagggaaaguaugagg

SEQ ID NO: 122394 - RNA, 32 nt, Human
cggacagcacccuccucaucuggcaggugccc

SEQ ID NO: 122395 - RNA, 32 nt, Human
cggacagccggcggcgucuccacagcaugaau

SEQ ID NO: 122396 - RNA, 32 nt, Human
cggacaggagugaacccgagcugugccgacca

SEQ ID NO: 122397 - RNA, 32 nt, Human
cggacagggaagggcagagaaggccaccaugg

SEQ ID NO: 122398 - RNA, 32 nt, Human
cggacagggacccccuuccccggcuccccugc

SEQ ID NO: 122399 - RNA, 32 nt, Human
cggacagggacguucauugugauugauauucu

SEQ ID NO: 122400 - RNA, 31 nt, Human
cggacagggcccucugucccugugucguccc

SEQ ID NO: 122401 - RNA, 32 nt, Human
cggacagggguugaggggaccuccucagaggc

SEQ ID NO: 122402 - RNA, 32 nt, Human
cggacagggucugggcccugcucccuguccca

SEQ ID NO: 122403 - RNA, 32 nt, Human
cggacagugaagccaaccaggacaagaguugu

SEQ ID NO: 122404 - RNA, 32 nt, Human
cggacaucagccggagccggagcgagagccgg

SEQ ID NO: 122405 - RNA, 30 nt, Human
cggacaugggcaagaagcacaagaagcaca

SEQ ID NO: 122406 - RNA, 32 nt, Human
cggaccaaaauuuaacagugccaucugaggaa

SEQ ID NO: 122407 - RNA, 32 nt, Human
cggaccaaauucuggcucuaagugccuuuagc

SEQ ID NO: 122408 - RNA, 32 nt, Human
cggaccacacccggucccggaggucccacagc

SEQ ID NO: 122409 - RNA, 32 nt, Human
cggaccacagaaggagaguuggcggucacaga

SEQ ID NO: 122410 - RNA, 21 nt, Human
cggaccacagccagccacugc

SEQ ID NO: 122411 - RNA, 23 nt, Human
cggaccacccugacaucccgaga

SEQ ID NO: 122412 - RNA, 32 nt, Human
cggaccacgccccuugcugggcucuguggccc

SEQ ID NO: 122413 - RNA, 21 nt, Human
cggaccagacccgccugccag

SEQ ID NO: 122414 - RNA, 32 nt, Human
cggaccagagguggaaggcgcggcgggcguag

SEQ ID NO: 122415 - RNA, 32 nt, Human
cggaccagccagagggacuggagccaggugug

SEQ ID NO: 122416 - RNA, 23 nt, Human
cggaccagccugccucugugaug

SEQ ID NO: 122417 - RNA, 32 nt, Human
cggaccagccuugggcaacagcgugcgacguu

SEQ ID NO: 122418 - RNA, 32 nt, Human
cggaccagcucagccucugauaagcuggacuc

SEQ ID NO: 122419 - RNA, 32 nt, Human
cggaccagucgaggacucuggacaguagaggc

SEQ ID NO: 122420 - RNA, 21 nt, Human
cggaccaguucgcccgcgagg

SEQ ID NO: 122421 - RNA, 32 nt, Human
cggaccauggugcggggcagccaccgcugaag

SEQ ID NO: 122422 - RNA, 32 nt, Human
cggaccauucacugcuagcacaggcuccucac

SEQ ID NO: 122423 - RNA, 32 nt, Human
cggacccaagccagccuuccagggagcagcca

SEQ ID NO: 122424 - RNA, 32 nt, Human
cggacccacagagccggccccugcugcugcuc

SEQ ID NO: 122425 - RNA, 32 nt, Human
cggacccacccuuggaaagcucagggguaggc

SEQ ID NO: 122426 - RNA, 22 nt, Human
cggacccagacccagacgcaag

SEQ ID NO: 122427 - RNA, 32 nt, Human
cggacccagcgagggaguugcugguagaagga

SEQ ID NO: 122428 - RNA, 32 nt, Human
cggacccaggggagauguggauuuucagcagg

SEQ ID NO: 122429 - RNA, 32 nt, Human
cggaccccaguuuccaucacuaucuccagaga

SEQ ID NO: 122430 - RNA, 27 nt, Human
cggacccccuacuugcccuuucuccca

SEQ ID NO: 122431 - RNA, 32 nt, Human
cggaccccgcccaggcagggagcugcugugag

SEQ ID NO: 122432 - RNA, 32 nt, Human
cggaccccucaccucugcggccuagcuuugug

SEQ ID NO: 122433 - RNA, 32 nt, Human
cggaccccuccaccgacuccuucuaguucccu

SEQ ID NO: 122434 - RNA, 32 nt, Human
cggaccccucccaccccugccuuugcggcccc

SEQ ID NO: 122435 - RNA, 32 nt, Human
cggaccccuggcgguccuccuggcuggggucc

SEQ ID NO: 122436 - RNA, 32 nt, Human
cggacccgagaggcggcggcggcgcagcggaa

SEQ ID NO: 122437 - RNA, 32 nt, Human
cggacccgaggagcaggaagcggcggcuccuu

SEQ ID NO: 122438 - RNA, 32 nt, Human
cggacccgcagccauggccgacaucaagacgg

SEQ ID NO: 122439 - RNA, 32 nt, Human
cggacccgcuauuaucagaucaugcccaagua

SEQ ID NO: 122440 - RNA, 20 nt, Human
cggacccggccgggcgcagg

SEQ ID NO: 122441 - RNA, 32 nt, Human
cggacccgggaggcggagguugcagugagcca

SEQ ID NO: 122442 - RNA, 32 nt, Human
cggacccguguucuggcuuggagggaguuuga

SEQ ID NO: 122443 - RNA, 21 nt, Human
cggacccucaccaacuuuccc

SEQ ID NO: 122444 - RNA, 32 nt, Human
cggacccucauggcacccggugccccaaagca

SEQ ID NO: 122445 - RNA, 22 nt, Human
cggacccucgccagugcucugc

SEQ ID NO: 122446 - RNA, 18 nt, Human
cggacccugagagccuga

SEQ ID NO: 122447 - RNA, 32 nt, Human
cggacccugaguggcugggauccuucuuccug

SEQ ID NO: 122448 - RNA, 32 nt, Human
cggacccugaugaccgcgcgugcuucuagaaa

SEQ ID NO: 122449 - RNA, 32 nt, Human
cggacccugcagcccucgccugggacagcggc

SEQ ID NO: 122450 - RNA, 32 nt, Human
cggaccgcagccgccgcccucccaggaccccg

SEQ ID NO: 122451 - RNA, 32 nt, Human
cggaccgcggaacccgaggccaugucccauga

SEQ ID NO: 122452 - RNA, 32 nt, Human
cggaccgcuugaaagugggggaaagugccggc

SEQ ID NO: 122453 - RNA, 32 nt, Human
cggaccgucaucccagcaacagccucagucau

SEQ ID NO: 122454 - RNA, 32 nt, Human
cggaccuagaagccgggacgagccggggcaga

SEQ ID NO: 122455 - RNA, 32 nt, Human
cggaccucggcuuucaaagcggccuggguggg

SEQ ID NO: 122456 - RNA, 32 nt, Human
cggaccucucccuggacugccaccucauugcu

SEQ ID NO: 122457 - RNA, 32 nt, Human
cggaccucuguggggagcuugcagggacuggc

SEQ ID NO: 122458 - RNA, 32 nt, Human
cggaccugaaccucucugggcauauguccagu

SEQ ID NO: 122459 - RNA, 32 nt, Human
cggaccugcacuccgccgccugcacacauccu

SEQ ID NO: 122460 - RNA, 32 nt, Human
cggaccugcgccuucugggucucugaaagaag

SEQ ID NO: 122461 - RNA, 23 nt, Human
cggaccugcggcgaugccacggg

SEQ ID NO: 122462 - RNA, 32 nt, Human
cggaccugcugcacucgccggcccuggagcca

SEQ ID NO: 122463 - RNA, 32 nt, Human
cggaccugggcugcggaagguaacuggggacg

SEQ ID NO: 122464 - RNA, 32 nt, Human
cggaccugggcugucgggagagcuggagaugu

SEQ ID NO: 122465 - RNA, 32 nt, Human
cggaccugugguggcacacugggcaggacccu

SEQ ID NO: 122466 - RNA, 31 nt, Human
cggaccuuaccaaaguagguuggagaauuag

SEQ ID NO: 122467 - RNA, 20 nt, Human
cggaccuuccucaccccaua

SEQ ID NO: 122468 - RNA, 32 nt, Human
cggaccuucuuauuccucuccccuaacaccau

SEQ ID NO: 122469 - RNA, 32 nt, Human
cggaccuugccuggcgcuauuuuugcagggag

SEQ ID NO: 122470 - RNA, 32 nt, Human
cggaccuuucagcugugaacauggacucuucc

SEQ ID NO: 122471 - RNA, 32 nt, Human
cggacgaugggaugggggcuggagaggagcaa

SEQ ID NO: 122472 - RNA, 32 nt, Human
cggacgcagccaugucagagcuggugccugag

SEQ ID NO: 122473 - RNA, 32 nt, Human
cggacgcaggcagaccauguggacccugguga

SEQ ID NO: 122474 - RNA, 32 nt, Human
cggacgcaggcggcagauuugcagcccgggau

SEQ ID NO: 122475 - RNA, 32 nt, Human
cggacgcccaggagaaccccugccuccgucgc

SEQ ID NO: 122476 - RNA, 32 nt, Human
cggacgccgccggcaccaugggcugcugcacc

SEQ ID NO: 122477 - RNA, 32 nt, Human
cggacgccuaggcuggaggcagggggcccgug

SEQ ID NO: 122478 - RNA, 32 nt, Human
cggacgccucauucccccucugggcccugggc

SEQ ID NO: 122479 - RNA, 16 nt, Human
cggacgccuggccagg

SEQ ID NO: 122480 - RNA, 32 nt, Human
cggacgccuguaaucccagcuacuuggaaggc

SEQ ID NO: 122481 - RNA, 32 nt, Human
cggacggacggagacggcgccgccacauuccu

SEQ ID NO: 122482 - RNA, 20 nt, Human
cggacggcccggagcccgca

SEQ ID NO: 122483 - RNA, 32 nt, Human
cggacggcgccucacugcaggaaagggacccu

SEQ ID NO: 122484 - RNA, 32 nt, Human
cggacgggcggaggggacgggaggcccagcgg

SEQ ID NO: 122485 - RNA, 32 nt, Human
cggacgggggacuggaggaggagccagagcuc

SEQ ID NO: 122486 - RNA, 32 nt, Human
cggacgucucagggcugcugugccccuugggu

SEQ ID NO: 122487 - RNA, 32 nt, Human
cggacgucucaggggugacaggaccagggcag

SEQ ID NO: 122488 - RNA, 21 nt, Human
cggacgugaccagcgcccgca

SEQ ID NO: 122489 - RNA, 32 nt, Human
cggacgugagccaccacgccuggcccaggcua

SEQ ID NO: 122490 - RNA, 32 nt, Human
cggacgugcggcuccccucggccuccucgcca

SEQ ID NO: 122491 - RNA, 32 nt, Human
cggacgugcuggccuugguaugugccaggcuu

SEQ ID NO: 122492 - RNA, 32 nt, Human
cggacguggagaucaacuacucucucaucgag

SEQ ID NO: 122493 - RNA, 32 nt, Human
cggacguggccaggcaggaggggccggguuca

SEQ ID NO: 122494 - RNA, 32 nt, Human
cggacgugugggcccuggggccagggccggag

SEQ ID NO: 122495 - RNA, 23 nt, Human
cggacguuuccaucagguuccau

SEQ ID NO: 122496 - RNA, 20 nt, Human
cggacuaugcuccccuuccu

SEQ ID NO: 122497 - RNA, 32 nt, Human
cggacuaugcuccccuuccucugcuccuuaag

SEQ ID NO: 122498 - RNA, 32 nt, Human
cggacucacacgaagucacacgcacacaugca

SEQ ID NO: 122499 - RNA, 32 nt, Human
cggacucacauacuuucaccauauacauauuu

SEQ ID NO: 122500 - RNA, 32 nt, Human
cggacucagacuccuggcuucauguggcauuc

SEQ ID NO: 122501 - RNA, 32 nt, Human
cggacucccacacaguuccugagcuggugcca

SEQ ID NO: 122502 - RNA, 18 nt, Human
cggacuccgcugcucuga

SEQ ID NO: 122503 - RNA, 32 nt, Human
cggacuccucuuucucccggaagcggagcacc

SEQ ID NO: 122504 - RNA, 19 nt, Human
cggacuccuggacugcauu

SEQ ID NO: 122505 - RNA, 32 nt, Human
cggacucgacguccuccaccaucuuggggcag

SEQ ID NO: 122506 - RNA, 32 nt, Human
cggacucgcagacucgcgcuggcuccagucuc

SEQ ID NO: 122507 - RNA, 32 nt, Human
cggacucgcuggggcucccagggcuuccaaac

SEQ ID NO: 122508 - RNA, 32 nt, Human
cggacugaauuccccauacuguuuccacgccg

SEQ ID NO: 122509 - RNA, 32 nt, Human
cggacugacuggacucuggccuccaggugucu

SEQ ID NO: 122510 - RNA, 32 nt, Human
cggacugagugcugggauccaaggcauucuac

SEQ ID NO: 122511 - RNA, 32 nt, Human
cggacugccugcccacccugagguccccgacu

SEQ ID NO: 122512 - RNA, 32 nt, Human
cggacugcgcucccagccugggcucugggagu

SEQ ID NO: 122513 - RNA, 32 nt, Human
cggacugcuccugcugggcggagaggacagau

SEQ ID NO: 122514 - RNA, 32 nt, Human
cggacuggcgucuccccucccggcgauccgcc

SEQ ID NO: 122515 - RNA, 32 nt, Human
cggacuggcucccuccuggggcgcggccgggu

SEQ ID NO: 122516 - RNA, 32 nt, Human
cggacugggacuuggcuuucuccggauaagcg

SEQ ID NO: 122517 - RNA, 32 nt, Human
cggacugggcaggccgggcccgggcacuggug

SEQ ID NO: 122518 - RNA, 32 nt, Human
cggacugggcggggcuccgagcggggacuggg

SEQ ID NO: 122519 - RNA, 32 nt, Human
cggacuguuuugcucucucaauucaggcaagu

SEQ ID NO: 122520 - RNA, 32 nt, Human
cggacuuagggaaacaucaacauaugcaugac

SEQ ID NO: 122521 - RNA, 32 nt, Human
cggacuuccuuuaggaucucaggcuucugcag

SEQ ID NO: 122522 - RNA, 32 nt, Human
cggacuuucaccccagcuucucucuccuggcc

SEQ ID NO: 122523 - RNA, 32 nt, Human
cggagaaaaagcugaccuaaugaaacuguggc

SEQ ID NO: 122524 - RNA, 25 nt, Human
cggagaaacaccuugguuucuagga

SEQ ID NO: 122525 - RNA, 32 nt, Human
cggagaaagaugaauugcagcuugaccgccca

SEQ ID NO: 122526 - RNA, 32 nt, Human
cggagaacacccuugguggcuuaugggucccc

SEQ ID NO: 122527 - RNA, 32 nt, Human
cggagaacucacugcugacgugugcuucuuuu

SEQ ID NO: 122528 - RNA, 20 nt, Human
cggagaacugggauuacagg

SEQ ID NO: 122529 - RNA, 23 nt, Human
cggagaacugggauuacaggcau

SEQ ID NO: 122530 - RNA, 32 nt, Human
cggagaagaccugaaaccucaccuugcacagc

SEQ ID NO: 122531 - RNA, 32 nt, Human
cggagaagcaccuucacucccagccugcgccc

SEQ ID NO: 122532 - RNA, 32 nt, Human
cggagaagcaggcagcgcagugacagcucacc

SEQ ID NO: 122533 - RNA, 32 nt, Human
cggagaagccaugaaaauuaaugggaaaaaca

SEQ ID NO: 122534 - RNA, 32 nt, Human
cggagaagccugggaugagaaaaugaggagga

SEQ ID NO: 122535 - RNA, 32 nt, Human
cggagaaggaggcggagggagcgauuguggcc

SEQ ID NO: 122536 - RNA, 32 nt, Human
cggagaaggccugggcccucccacuggucccu

SEQ ID NO: 122537 - RNA, 32 nt, Human
cggagaagggccucuggagcaggucuggaggg

SEQ ID NO: 122538 - RNA, 32 nt, Human
cggagaaucuguaccaccucuuugccaggggg

SEQ ID NO: 122539 - RNA, 32 nt, Human
cggagacagcagggugacagaauuggaaaaua

SEQ ID NO: 122540 - RNA, 23 nt, Human
cggagaccacgcgggcccagcga

SEQ ID NO: 122541 - RNA, 32 nt, Human
cggagaccagccccagcgugccaggaccguuu

SEQ ID NO: 122542 - RNA, 32 nt, Human
cggagaccagccuggccaacauggugaaaccc

SEQ ID NO: 122543 - RNA, 32 nt, Human
cggagaccagccugggcaacauggcgagaucc

SEQ ID NO: 122544 - RNA, 32 nt, Human
cggagacccacacagcugcuggcucuaaaggc

SEQ ID NO: 122545 - RNA, 32 nt, Human
cggagacccaggcggggcugggcccagggcgg

SEQ ID NO: 122546 - RNA, 21 nt, Human
cggagacccccgcgcugggga

SEQ ID NO: 122547 - RNA, 20 nt, Human
cggagacccgcucccggaga

SEQ ID NO: 122548 - RNA, 23 nt, Human
cggagacccgggaacccaggcgg

SEQ ID NO: 122549 - RNA, 32 nt, Human
cggagacccggggaagaaggaccagaaggagu

SEQ ID NO: 122550 - RNA, 21 nt, Human
cggagacccugcccccaggga

SEQ ID NO: 122551 - RNA, 32 nt, Human
cggagaccucaaacuccgggcgggagcgcuuu

SEQ ID NO: 122552 - RNA, 25 nt, Human
cggagaccuggaggccacggcgcug

SEQ ID NO: 122553 - RNA, 32 nt, Human
cggagacgguccuagacccaguggggagugcu

SEQ ID NO: 122554 - RNA, 22 nt, Human
cggagacugcaagcagccacgg

SEQ ID NO: 122555 - RNA, 32 nt, Human
cggagagaaaggagguuccauaggcaguucuu

SEQ ID NO: 122556 - RNA, 32 nt, Human
cggagagaagagagagcccggccagacccacu

SEQ ID NO: 122557 - RNA, 32 nt, Human
cggagagcacggcggcgggagcgcggccuuag

SEQ ID NO: 122558 - RNA, 32 nt, Human
cggagagcagaggcggcccggccgcggcgcgc

SEQ ID NO: 122559 - RNA, 32 nt, Human
cggagagcaucauucucugccuaggcaaggcc

SEQ ID NO: 122560 - RNA, 32 nt, Human
cggagagcccuaggagacaggccugcaggaau

SEQ ID NO: 122561 - RNA, 32 nt, Human
cggagagcucacucuggucgacucuuccucuc

SEQ ID NO: 122562 - RNA, 32 nt, Human
cggagaggaagggaaggaaggagagggagggg

SEQ ID NO: 122563 - RNA, 32 nt, Human
cggagaggagccaagaucccuccagacagcac

SEQ ID NO: 122564 - RNA, 32 nt, Human
cggagaggcaggcagccagguuacgaagacua

SEQ ID NO: 122565 - RNA, 32 nt, Human
cggagaggcggagggaagggaggcgaggcugc

SEQ ID NO: 122566 - RNA, 32 nt, Human
cggagaggcugaggcaggagaaucgcuugaac

SEQ ID NO: 122567 - RNA, 32 nt, Human
cggagaggcuguagauccguguucuaaaccug

SEQ ID NO: 122568 - RNA, 32 nt, Human
cggagaggcugucacugcaguggucacugucc

SEQ ID NO: 122569 - RNA, 32 nt, Human
cggagagggaaggaggaggaggaggagcaaag

SEQ ID NO: 122570 - RNA, 32 nt, Human
cggagaggggacguggccuggggaagagcaca

SEQ ID NO: 122571 - RNA, 20 nt, Human
cggagaggggcuccggcccg

SEQ ID NO: 122572 - RNA, 32 nt, Human
cggagagggugaagcaggcaggaagcugcagg

SEQ ID NO: 122573 - RNA, 32 nt, Human
cggagagguauuaagaaauggagagaaaaaua

SEQ ID NO: 122574 - RNA, 32 nt, Human
cggagaguccguggaucucacagugaaaaaug

SEQ ID NO: 122575 - RNA, 29 nt, Human
cggagauaagagugggggaaagccugcag

SEQ ID NO: 122576 - RNA, 32 nt, Human
cggagauccaaggggcugcaggagacuccagg

SEQ ID NO: 122577 - RNA, 22 nt, Human
cggagaucggccgcccacgggg

SEQ ID NO: 122578 - RNA, 32 nt, Human
cggagaucucucuuucugugcaugcacaaaga

SEQ ID NO: 122579 - RNA, 24 nt, Human
cggagaugaggaaacugaggcuca

SEQ ID NO: 122580 - RNA, 32 nt, Human
cggagauguccucagaugggcaagagaacaac

SEQ ID NO: 122581 - RNA, 22 nt, Human
cggagauuugucucccaggaga

SEQ ID NO: 122582 - RNA, 32 nt, Human
cggagcaagcccagaggcagaggaggcgacag

SEQ ID NO: 122583 - RNA, 32 nt, Human
cggagcaagggaagaccccuccccagcccucc

SEQ ID NO: 122584 - RNA, 32 nt, Human
cggagcacaaucacauguuagcauuugguaac

SEQ ID NO: 122585 - RNA, 32 nt, Human
cggagcacucacugaagcuucgauuucccacu

SEQ ID NO: 122586 - RNA, 32 nt, Human
cggagcagagaagcaccaaaagaggcaaacug

SEQ ID NO: 122587 - RNA, 32 nt, Human
cggagcagcaacucgcagcccaauuggugacg

SEQ ID NO: 122588 - RNA, 32 nt, Human
cggagcagcacuagcuccugcccacacuccua

SEQ ID NO: 122589 - RNA, 32 nt, Human
cggagcagcgcucgcucccucgcucacucgcu

SEQ ID NO: 122590 - RNA, 32 nt, Human
cggagcagcucccuucgcuguggaagcggcgg

SEQ ID NO: 122591 - RNA, 32 nt, Human
cggagcaggacugccuuugaaggggccuuggg

SEQ ID NO: 122592 - RNA, 32 nt, Human
cggagcaggagaggcaggcuauggcugccacc

SEQ ID NO: 122593 - RNA, 32 nt, Human
cggagcaggaggcagaggagcagauggagcag

SEQ ID NO: 122594 - RNA, 21 nt, Human
cggagcagggaccggcgcccg

SEQ ID NO: 122595 - RNA, 32 nt, Human
cggagcagggcagaagauggacugggggaggg

SEQ ID NO: 122596 - RNA, 32 nt, Human
cggagcaggucggccucggcccaggggcgagu

SEQ ID NO: 122597 - RNA, 22 nt, Human
cggagcauccccagcgcccgca

SEQ ID NO: 122598 - RNA, 32 nt, Human
cggagcauccccaucggcuccccaccuuuccu

SEQ ID NO: 122599 - RNA, 32 nt, Human
cggagccaacucuuaaguucuggacgccaggc

SEQ ID NO: 122600 - RNA, 32 nt, Human
cggagccaagacagagucuagcaaagaagggg

SEQ ID NO: 122601 - RNA, 32 nt, Human
cggagccaagcagcaacugagcggggaagcgc

SEQ ID NO: 122602 - RNA, 32 nt, Human
cggagccaagccccacgcuggccggacagggc

SEQ ID NO: 122603 - RNA, 32 nt, Human
cggagccacucuccacuuucucucacaggcug

SEQ ID NO: 122604 - RNA, 32 nt, Human
cggagccacugcacugcuggcugcagacacag

SEQ ID NO: 122605 - RNA, 32 nt, Human
cggagccagccccucaccuuccugguucccug

SEQ ID NO: 122606 - RNA, 22 nt, Human
cggagccagcgccccgcacccg

SEQ ID NO: 122607 - RNA, 32 nt, Human
cggagccaggaggcagcgucgcgugggagugc

SEQ ID NO: 122608 - RNA, 32 nt, Human
cggagccagggagggaggugaggccccgugua

SEQ ID NO: 122609 - RNA, 32 nt, Human
cggagccaugaagaagaccucgggcuucagga

SEQ ID NO: 122610 - RNA, 32 nt, Human
cggagcccaacugcgcagacccugccacucuc

SEQ ID NO: 122611 - RNA, 32 nt, Human
cggagcccagaagaaggggcgggguaugggag

SEQ ID NO: 122612 - RNA, 32 nt, Human
cggagcccagcacuccugggucucggggucgg

SEQ ID NO: 122613 - RNA, 32 nt, Human
cggagcccagcacugugaagccuacaaaaaca

SEQ ID NO: 122614 - RNA, 19 nt, Human
cggagcccagcccccugcc

SEQ ID NO: 122615 - RNA, 32 nt, Human
cggagcccagggcagaggcagcucagagugga

SEQ ID NO: 122616 - RNA, 32 nt, Human
cggagccccagccgcuagugcugguggccgcc

SEQ ID NO: 122617 - RNA, 32 nt, Human
cggagcccccacauagagucccuacugcagca

SEQ ID NO: 122618 - RNA, 32 nt, Human
cggagcccccuucacacgcccccuaccggccc

SEQ ID NO: 122619 - RNA, 32 nt, Human
cggagcccccuucacagacacccgcggggcuc

SEQ ID NO: 122620 - RNA, 32 nt, Human
cggagccccgcaggaagcuggagcugaucgug

SEQ ID NO: 122621 - RNA, 32 nt, Human
cggagccccucggcggcgccaccauguacucg

SEQ ID NO: 122622 - RNA, 32 nt, Human
cggagccccugagccggccccuggugacggca

SEQ ID NO: 122623 - RNA, 32 nt, Human
cggagcccgaacugaggcggcggcgggagccc

SEQ ID NO: 122624 - RNA, 17 nt, Human
cggagcccggcuaggga

SEQ ID NO: 122625 - RNA, 32 nt, Human
cggagcccuaccaccccacccugggcaucuac

SEQ ID NO: 122626 - RNA, 32 nt, Human
cggagcccugggccaggcaggugucugcugcu

SEQ ID NO: 122627 - RNA, 32 nt, Human
cggagcccuugagacauccuugagaagagcca

SEQ ID NO: 122628 - RNA, 32 nt, Human
cggagcccuugcagagcccucucuccagucgc

SEQ ID NO: 122629 - RNA, 28 nt, Human
cggagccgcaggaagggguguccaggac

SEQ ID NO: 122630 - RNA, 19 nt, Human
cggagccgcaggccaggga

SEQ ID NO: 122631 - RNA, 22 nt, Human
cggagccgcucgccccgaccca

SEQ ID NO: 122632 - RNA, 21 nt, Human
cggagccggaagccaggagga

SEQ ID NO: 122633 - RNA, 32 nt, Human
cggagccggagccggagccggagccagagcca

SEQ ID NO: 122634 - RNA, 32 nt, Human
cggagccggcagcuccacuggagagcagugca

SEQ ID NO: 122635 - RNA, 32 nt, Human
cggagccggcgccgcgggccgaguguccuggu

SEQ ID NO: 122636 - RNA, 23 nt, Human
cggagccggcuagagcgcagggg

SEQ ID NO: 122637 - RNA, 20 nt, Human
cggagccgggagcggagggg

SEQ ID NO: 122638 - RNA, 32 nt, Human
cggagccguaaccuugaggcggcggcggcggg

SEQ ID NO: 122639 - RNA, 21 nt, Human
cggagccucauagaucauccc

SEQ ID NO: 122640 - RNA, 32 nt, Human
cggagccucccaggcuggggcagugggcaugg

SEQ ID NO: 122641 - RNA, 32 nt, Human
cggagccucgccuuccuuucucccucugcaga

SEQ ID NO: 122642 - RNA, 21 nt, Human
cggagccucggagcgcccgca

SEQ ID NO: 122643 - RNA, 22 nt, Human
cggagccucuggggaggcgguc

SEQ ID NO: 122644 - RNA, 32 nt, Human
cggagccugcauuuccucgcagccucucagug

SEQ ID NO: 122645 - RNA, 21 nt, Human
cggagccuugccaccauccca

SEQ ID NO: 122646 - RNA, 32 nt, Human
cggagcgagcaaggagacauggcuucaucauu

SEQ ID NO: 122647 - RNA, 32 nt, Human
cggagcgcaacauuucuccacugcacugugcu

SEQ ID NO: 122648 - RNA, 32 nt, Human
cggagcgcaccgcuguccgucucuccaucagu

SEQ ID NO: 122649 - RNA, 32 nt, Human
cggagcgcccgagaugauggugcuggacaagg

SEQ ID NO: 122650 - RNA, 32 nt, Human
cggagcgccggccgcaccaccgcccucuggcc

SEQ ID NO: 122651 - RNA, 32 nt, Human
cggagcggaaaacugcucaaaccacaaacaac

SEQ ID NO: 122652 - RNA, 32 nt, Human
cggagcggaagggagagcaggggagagaaggc

SEQ ID NO: 122653 - RNA, 32 nt, Human
cggagcggagaaccgccaggaggcuggagccc

SEQ ID NO: 122654 - RNA, 32 nt, Human
cggagcggcggaggauagagacccuggccccc

SEQ ID NO: 122655 - RNA, 18 nt, Human
cggagcggcggcgggcgg

SEQ ID NO: 122656 - RNA, 32 nt, Human
cggagcggcggggcaggagcuguucugggcag

SEQ ID NO: 122657 - RNA, 32 nt, Human
cggagcgggacuaggauccuccccgcggcgcg

SEQ ID NO: 122658 - RNA, 32 nt, Human
cggagcgggaggcggugguagagagagauaaa

SEQ ID NO: 122659 - RNA, 32 nt, Human
cggagcgggcggcagacccggagcagcaugug

SEQ ID NO: 122660 - RNA, 32 nt, Human
cggagcgggcggcagagcagggcggcggcgac

SEQ ID NO: 122661 - RNA, 32 nt, Human
cggagcuaaaguuggggugacaaggauggggu

SEQ ID NO: 122662 - RNA, 32 nt, Human
cggagcucaagcagucuucccaccuuggccuc

SEQ ID NO: 122663 - RNA, 32 nt, Human
cggagcucacugcagacucgccauccccgucc

SEQ ID NO: 122664 - RNA, 32 nt, Human
cggagcucagcaggcgcuugcugcuugaaccg

SEQ ID NO: 122665 - RNA, 32 nt, Human
cggagcucagggacugagccccgggcggccuc

SEQ ID NO: 122666 - RNA, 32 nt, Human
cggagcucaguguggcagcugcuggccucugg

SEQ ID NO: 122667 - RNA, 32 nt, Human
cggagcuccggccuauuucucugcagcguucc

SEQ ID NO: 122668 - RNA, 32 nt, Human
cggagcugagacugcacuagggucuggggaca

SEQ ID NO: 122669 - RNA, 32 nt, Human
cggagcugcucugcccugacccugccucaccc

SEQ ID NO: 122670 - RNA, 32 nt, Human
cggagcugcuucugcacccgguacauugaucg

SEQ ID NO: 122671 - RNA, 32 nt, Human
cggagcugcuucugcucccuggggcauaugga

SEQ ID NO: 122672 - RNA, 32 nt, Human
cggagcuggagacguguggagcuguucgagga

SEQ ID NO: 122673 - RNA, 32 nt, Human
cggagcuggagcgggagcgugugugcagcgug

SEQ ID NO: 122674 - RNA, 32 nt, Human
cggagcuggaggcggaggcagcuggggagguc

SEQ ID NO: 122675 - RNA, 20 nt, Human
cggagcuggcaggucuacaa

SEQ ID NO: 122676 - RNA, 32 nt, Human
cggagcugggaggaggagucugcguaaugugc

SEQ ID NO: 122677 - RNA, 16 nt, Human
cggagcugggcugcag

SEQ ID NO: 122678 - RNA, 32 nt, Human
cggagcugggcugcagcuggggcuggcaugga

SEQ ID NO: 122679 - RNA, 32 nt, Human
cggagcugugggguguggggaggcggaggcac

SEQ ID NO: 122680 - RNA, 32 nt, Human
cggagcuuaagccgggcaggcgagcgaaugac

SEQ ID NO: 122681 - RNA, 32 nt, Human
cggagcuuccagaacaaaggagaauggggagc

SEQ ID NO: 122682 - RNA, 24 nt, Human
cggagcuucugcugagcgccggca

SEQ ID NO: 122683 - RNA, 32 nt, Human
cggagcuugagaccagccugagcaacauggcg

SEQ ID NO: 122684 - RNA, 32 nt, Human
cggagcuuguagugagccgagauugcgccacu

SEQ ID NO: 122685 - RNA, 32 nt, Human
cggagcuugugcugugcucgagaucaggaguu

SEQ ID NO: 122686 - RNA, 32 nt, Human
cggaggaagaaagaggaggggcuggcugguca

SEQ ID NO: 122687 - RNA, 32 nt, Human
cggaggaaggagcaggaggagggaagagaaug

SEQ ID NO: 122688 - RNA, 32 nt, Human
cggaggaaggagucgccgaggagcagccugag

SEQ ID NO: 122689 - RNA, 32 nt, Human
cggaggaccccagggacccgacaggaagucuc

SEQ ID NO: 122690 - RNA, 19 nt, Human
cggaggaccuggacaagga

SEQ ID NO: 122691 - RNA, 32 nt, Human
cggaggagaccggaccgaagacggaccgugcc

SEQ ID NO: 122692 - RNA, 32 nt, Human
cggaggagauggggucucagagcgagagcugc

SEQ ID NO: 122693 - RNA, 32 nt, Human
cggaggagccaggugaggaggagccaggaagg

SEQ ID NO: 122694 - RNA, 25 nt, Human
cggaggagcucugucuuccccuuca

SEQ ID NO: 122695 - RNA, 32 nt, Human
cggaggaggagaaaaaggaauaagaaggagaa

SEQ ID NO: 122696 - RNA, 32 nt, Human
cggaggaggagaaagagauggaccucccggac

SEQ ID NO: 122697 - RNA, 32 nt, Human
cggaggaggagaaaggaaagaggaagggggag

SEQ ID NO: 122698 - RNA, 32 nt, Human
cggaggaggaggaggagcgggaggagcgcggg

SEQ ID NO: 122699 - RNA, 32 nt, Human
cggaggaggaggaggaggaggaggaggagggg

SEQ ID NO: 122700 - RNA, 32 nt, Human
cggaggaggaggaggaggaggaggcaaaguua

SEQ ID NO: 122701 - RNA, 32 nt, Human
cggaggaggaggaggaggcgaggaggagagac

SEQ ID NO: 122702 - RNA, 25 nt, Human
cggaggaggaggcggaggccgagga

SEQ ID NO: 122703 - RNA, 32 nt, Human
cggaggaggagguggugaaacaggaagcaaca

SEQ ID NO: 122704 - RNA, 32 nt, Human
cggaggagggcuaggucuuucucugugcacug

SEQ ID NO: 122705 - RNA, 20 nt, Human
cggaggaggggcagagccag

SEQ ID NO: 122706 - RNA, 32 nt, Human
cggaggaguggggcggggcgggggaggggcac

SEQ ID NO: 122707 - RNA, 32 nt, Human
cggaggaugugguucuggaugacgagaaucca

SEQ ID NO: 122708 - RNA, 31 nt, Human
cggaggauguucccugcucaggaggaggccg

SEQ ID NO: 122709 - RNA, 21 nt, Human
cggaggauuuaccaggaggcu

SEQ ID NO: 122710 - RNA, 32 nt, Human
cggaggcaacucggcuacgcugggcaggacga

SEQ ID NO: 122711 - RNA, 32 nt, Human
cggaggcacagagggcaggagcacagaccccu

SEQ ID NO: 122712 - RNA, 32 nt, Human
cggaggcacaggaagcaacaccugccaaaaca

SEQ ID NO: 122713 - RNA, 23 nt, Human
cggaggcagauggagaccaaggg

SEQ ID NO: 122714 - RNA, 32 nt, Human
cggaggcagcugggaaacaugaagagcgucuu

SEQ ID NO: 122715 - RNA, 32 nt, Human
cggaggcaggccgggggagggaagggauccua

SEQ ID NO: 122716 - RNA, 32 nt, Human
cggaggcaggcggaucgccugaggugaggagu

SEQ ID NO: 122717 - RNA, 32 nt, Human
cggaggcaggcugggugcaguggcucaugccu

SEQ ID NO: 122718 - RNA, 32 nt, Human
cggaggcaggguggggcccagguaaagugaac

SEQ ID NO: 122719 - RNA, 32 nt, Human
cggaggccacaagcucagccucaggcccaggc

SEQ ID NO: 122720 - RNA, 19 nt, Human
cggaggcccaagcccaggg

SEQ ID NO: 122721 - RNA, 22 nt, Human
cggaggcccagaguacuaggga

SEQ ID NO: 122722 - RNA, 21 nt, Human
cggaggcccagcacuaggaga

SEQ ID NO: 122723 - RNA, 32 nt, Human
cggaggcccauggauggggguggaguaugugu

SEQ ID NO: 122724 - RNA, 32 nt, Human
cggaggccccacugaugcuguucucuucuuca

SEQ ID NO: 122725 - RNA, 32 nt, Human
cggaggccccggcggagaaugagccggagccg

SEQ ID NO: 122726 - RNA, 17 nt, Human
cggaggcccgcgccgcc

SEQ ID NO: 122727 - RNA, 32 nt, Human
cggaggcccuggacgaggagagcuggccgcgg

SEQ ID NO: 122728 - RNA, 23 nt, Human
cggaggcccugguggcccuggga

SEQ ID NO: 122729 - RNA, 24 nt, Human
cggaggccgaggcggcgagggcgg

SEQ ID NO: 122730 - RNA, 25 nt, Human
cggaggccggaccaagccaccagcc

SEQ ID NO: 122731 - RNA, 26 nt, Human
cggaggccgggaggccgggaggccgg

SEQ ID NO: 122732 - RNA, 20 nt, Human
cggaggccgggcgaggccgg

SEQ ID NO: 122733 - RNA, 20 nt, Human
cggaggccgguacccaggga

SEQ ID NO: 122734 - RNA, 21 nt, Human
cggaggccugccguucaggga

SEQ ID NO: 122735 - RNA, 32 nt, Human
cggaggccugcgacccugggggcacaggaggc

SEQ ID NO: 122736 - RNA, 32 nt, Human
cggaggccuugcugaugaaccugacugagggc

SEQ ID NO: 122737 - RNA, 32 nt, Human
cggaggccuuucucucccaugggcccugcaag

SEQ ID NO: 122738 - RNA, 23 nt, Human
cggaggcgaaagcggcccgggga

SEQ ID NO: 122739 - RNA, 32 nt, Human
cggaggcgcaggcagcaacugaggcagcggca

SEQ ID NO: 122740 - RNA, 32 nt, Human
cggaggcgccggcggaggaggagguggugacu

SEQ ID NO: 122741 - RNA, 32 nt, Human
cggaggcgccucaggcagccucucccccuccu

SEQ ID NO: 122742 - RNA, 25 nt, Human
cggaggcgcugggggccggggccgg

SEQ ID NO: 122743 - RNA, 32 nt, Human
cggaggcggacucggagccagggaaccagggg

SEQ ID NO: 122744 - RNA, 32 nt, Human
cggaggcggaggcagagguggaggcgcuuuga

SEQ ID NO: 122745 - RNA, 32 nt, Human
cggaggcggaggcggagguugcagugagccaa

SEQ ID NO: 122746 - RNA, 21 nt, Human
cggaggcggaggcggggcugg

SEQ ID NO: 122747 - RNA, 21 nt, Human
cggaggcggcggcggaggcgg

SEQ ID NO: 122748 - RNA, 32 nt, Human
cggaggcggcggcggaggcggcggcggcucgg

SEQ ID NO: 122749 - RNA, 21 nt, Human
cggaggcggcggcgggaacgg

SEQ ID NO: 122750 - RNA, 22 nt, Human
cggaggcggcgggcggaggcgg

SEQ ID NO: 122751 - RNA, 32 nt, Human
cggaggcggguggauccauugaggucaggagc

SEQ ID NO: 122752 - RNA, 32 nt, Human
cggaggcgguggaucacuugagcccaggaguu

SEQ ID NO: 122753 - RNA, 21 nt, Human
cggaggcucacgccuguaauc

SEQ ID NO: 122754 - RNA, 24 nt, Human
cggaggcucacgccuguaauccca

SEQ ID NO: 122755 - RNA, 21 nt, Human
cggaggcucaugccuguaauc

SEQ ID NO: 122756 - RNA, 24 nt, Human
cggaggcucaugccuguaauccca

SEQ ID NO: 122757 - RNA, 32 nt, Human
cggaggcugccgaggccagggccuguggaggu

SEQ ID NO: 122758 - RNA, 32 nt, Human
cggaggcugcgccgaugaaccugacugagggu

SEQ ID NO: 122759 - RNA, 32 nt, Human
cggagggagcgcugggagcgagcaagcgagcg

SEQ ID NO: 122760 - RNA, 21 nt, Human
cggagggaggcggcgguggcc

SEQ ID NO: 122761 - RNA, 32 nt, Human
cggagggauaauauggucuccggcgauggacg

SEQ ID NO: 122762 - RNA, 32 nt, Human
cggagggcaagccgggggcggggccggggcca

SEQ ID NO: 122763 - RNA, 19 nt, Human
cggagggcacugguugcag

SEQ ID NO: 122764 - RNA, 32 nt, Human
cggagggcagaggugguggaaggggccagggg

SEQ ID NO: 122765 - RNA, 32 nt, Human
cggagggcaugaccccagcccagggaggagca

SEQ ID NO: 122766 - RNA, 32 nt, Human
cggagggcccaggacuuggagaagggagcgcg

SEQ ID NO: 122767 - RNA, 32 nt, Human
cggagggcccuucccgcaaagcagaagccgcc

SEQ ID NO: 122768 - RNA, 32 nt, Human
cggagggcgaggaggagcagaggagcacacag

SEQ ID NO: 122769 - RNA, 32 nt, Human
cggagggcucagacacugagggggacagaaca

SEQ ID NO: 122770 - RNA, 32 nt, Human
cggaggggaaggcauccaggaugcggugcggg

SEQ ID NO: 122771 - RNA, 32 nt, Human
cggaggggccuggagugcggcggcggcgggac

SEQ ID NO: 122772 - RNA, 32 nt, Human
cggagggggaaaggcgagcagcuggcagagag

SEQ ID NO: 122773 - RNA, 32 nt, Human
cggagggggagagagaggaggacaggcugcga

SEQ ID NO: 122774 - RNA, 32 nt, Human
cggagggggccggcgcgcagagccagacgccg

SEQ ID NO: 122775 - RNA, 32 nt, Human
cggagggugacgggggugaacuugguucccau

SEQ ID NO: 122776 - RNA, 32 nt, Human
cggagggugagcugaagcaggguggggcguaa

SEQ ID NO: 122777 - RNA, 32 nt, Human
cggagggugagcuguuguuggagcugcagaaa

SEQ ID NO: 122778 - RNA, 32 nt, Human
cggaggguggcaagcagcuugagugggaugaa

SEQ ID NO: 122779 - RNA, 32 nt, Human
cggaggguguuacugggcaccaguggacucgc

SEQ ID NO: 122780 - RNA, 32 nt, Human
cggagguagagggaggacacagagccgcgccg

SEQ ID NO: 122781 - RNA, 32 nt, Human
cggaggucaggaguucgagaccagccuugcca

SEQ ID NO: 122782 - RNA, 32 nt, Human
cggaggucaguaguucaagaccagccuggcca

SEQ ID NO: 122783 - RNA, 25 nt, Human
cggaggucggcgguggcgggagcgg

SEQ ID NO: 122784 - RNA, 32 nt, Human
cggaggucgggaguuugagaccagccugacca

SEQ ID NO: 122785 - RNA, 23 nt, Human
cggaggucuucuccggccaggga

SEQ ID NO: 122786 - RNA, 32 nt, Human
cggaggucuuuuugccauuccuccaggacauc

SEQ ID NO: 122787 - RNA, 23 nt, Human
cggaggugacaacagaggcugca

SEQ ID NO: 122788 - RNA, 32 nt, Human
cggaggugacacucuccugccuggaaagagga

SEQ ID NO: 122789 - RNA, 32 nt, Human
cggaggugagcagaucaccugaggucaggagu

SEQ ID NO: 122790 - RNA, 32 nt, Human
cggaggugcgaggagagcagccggccugugug

SEQ ID NO: 122791 - RNA, 32 nt, Human
cggaggugcucuugugcacacagcaggucaaa

SEQ ID NO: 122792 - RNA, 32 nt, Human
cggagguggcggggguguuggggacgggugcu

SEQ ID NO: 122793 - RNA, 32 nt, Human
cggaggugggcagaucgcuugaggucaggagu

SEQ ID NO: 122794 - RNA, 23 nt, Human
cggagguguggaggagaggccgg

SEQ ID NO: 122795 - RNA, 32 nt, Human
cggagguugcagugaguugcagucacaccccu

SEQ ID NO: 122796 - RNA, 32 nt, Human
cggagguuguagugagccaaggucgcgccacu

SEQ ID NO: 122797 - RNA, 32 nt, Human
cggagguuguggugagccaagguugcgccacu

SEQ ID NO: 122798 - RNA, 32 nt, Human
cggagguuucuaugcggcaaugcugaauuauc

SEQ ID NO: 122799 - RNA, 21 nt, Human
cggaguaacuggcauuacagg

SEQ ID NO: 122800 - RNA, 32 nt, Human
cggaguaccuggggucuaggcagcaguggaug

SEQ ID NO: 122801 - RNA, 32 nt, Human
cggaguacgguggggauugcagcugcugagca

SEQ ID NO: 122802 - RNA, 22 nt, Human
cggaguagcugggaccacaggu

SEQ ID NO: 122803 - RNA, 32 nt, Human
cggaguagcugggacuacaggcgcccgccacc

SEQ ID NO: 122804 - RNA, 21 nt, Human
cggaguagcugggauuacagg

SEQ ID NO: 122805 - RNA, 21 nt, Human
cggaguagcugggauugcagg

SEQ ID NO: 122806 - RNA, 21 nt, Human
cggaguagcugggguuacagg

SEQ ID NO: 122807 - RNA, 32 nt, Human
cggagucacugccuggaguuggaaaagaaaca

SEQ ID NO: 122808 - RNA, 32 nt, Human
cggagucagcugguucaaggccaucgggagcu

SEQ ID NO: 122809 - RNA, 32 nt, Human
cggaguccagccugggcaacagaguaacucuc

SEQ ID NO: 122810 - RNA, 32 nt, Human
cggagucccagccauggcggagucuguggagc

SEQ ID NO: 122811 - RNA, 32 nt, Human
cggaguccuagcauccccuugggagcagcagc

SEQ ID NO: 122812 - RNA, 32 nt, Human
cggaguccuagugccguaccgucaguccccgg

SEQ ID NO: 122813 - RNA, 32 nt, Human
cggagucgaaugaucagccaggaagaguuugc

SEQ ID NO: 122814 - RNA, 32 nt, Human
cggagucucaacucuugucgcccaggcuggag

SEQ ID NO: 122815 - RNA, 32 nt, Human
cggagucucccuccacugcucagaccucugga

SEQ ID NO: 122816 - RNA, 32 nt, Human
cggagucugccucuggccgcggccugugggau

SEQ ID NO: 122817 - RNA, 21 nt, Human
cggagucuuccagaacaccuc

SEQ ID NO: 122818 - RNA, 32 nt, Human
cggagugaagucagccgcggcccugccuggga

SEQ ID NO: 122819 - RNA, 32 nt, Human
cggagugaccaccagccccacaccuccucucc

SEQ ID NO: 122820 - RNA, 32 nt, Human
cggagugaccaggaggaggcugaggggccccg

SEQ ID NO: 122821 - RNA, 20 nt, Human
cggagugagacccugucuca

SEQ ID NO: 122822 - RNA, 32 nt, Human
cggagugaggcugaagggaguggaucagagca

SEQ ID NO: 122823 - RNA, 32 nt, Human
cggagugcacagcuccaccugggagccuggcg

SEQ ID NO: 122824 - RNA, 32 nt, Human
cggagugcacugugucuugcugccugggugcc

SEQ ID NO: 122825 - RNA, 32 nt, Human
cggagugcaguggcacgaucauagcucacugu

SEQ ID NO: 122826 - RNA, 32 nt, Human
cggagugcaguggcaugaucaugguucacuuc

SEQ ID NO: 122827 - RNA, 32 nt, Human
cggagugcaguggcgugaucucggcucacugc

SEQ ID NO: 122828 - RNA, 32 nt, Human
cggagugcagugguacgaucacagcucacugc

SEQ ID NO: 122829 - RNA, 22 nt, Human
cggagugccaggauuacaggug

SEQ ID NO: 122830 - RNA, 32 nt, Human
cggaguggaagaggucggcgucuucggggcug

SEQ ID NO: 122831 - RNA, 32 nt, Human
cggaguggagaaaggagccagcggugggcagc

SEQ ID NO: 122832 - RNA, 32 nt, Human
cggaguggaguuuccuagcuggugccuguccu

SEQ ID NO: 122833 - RNA, 32 nt, Human
cggaguggcccaaacccuccuggcauggagag

SEQ ID NO: 122834 - RNA, 32 nt, Human
cggaguggcucaugccuguaaucccagcacuu

SEQ ID NO: 122835 - RNA, 32 nt, Human
cggagugggagggagacgcaguagacagagac

SEQ ID NO: 122836 - RNA, 32 nt, Human
cggagugggagggguggagcaggacccggacc

SEQ ID NO: 122837 - RNA, 23 nt, Human
cggaguggggggacagagacuca

SEQ ID NO: 122838 - RNA, 32 nt, Human
cggagugugagggauuuuggaagcacuugccc

SEQ ID NO: 122839 - RNA, 32 nt, Human
cggagugugcagggucccuagaggccgguucc

SEQ ID NO: 122840 - RNA, 32 nt, Human
cggagugugcagugccugaggcuuggacgcug

SEQ ID NO: 122841 - RNA, 32 nt, Human
cggagugugggugguugggcgugaggggccga

SEQ ID NO: 122842 - RNA, 32 nt, Human
cggaguucaguuaugggugugagagguuugca

SEQ ID NO: 122843 - RNA, 32 nt, Human
cggaguucaugaccagccugggcaacauagcg

SEQ ID NO: 122844 - RNA, 32 nt, Human
cggaguuccagggaaaaggaacuugugaaaug

SEQ ID NO: 122845 - RNA, 32 nt, Human
cggaguucgagaccagccuggccaauguggug

SEQ ID NO: 122846 - RNA, 32 nt, Human
cggaguucgaggccagccugaccaacauggug

SEQ ID NO: 122847 - RNA, 32 nt, Human
cggaguucgaggccagccugguuaacacgcug

SEQ ID NO: 122848 - RNA, 32 nt, Human
cggaguugagcaaacaacgccacgccgcgugc

SEQ ID NO: 122849 - RNA, 32 nt, Human
cggaguugcaccauguuggccaggcuggucuu

SEQ ID NO: 122850 - RNA, 32 nt, Human
cggaguugcccaggcuggagugcagcgcaugg

SEQ ID NO: 122851 - RNA, 32 nt, Human
cggaguugguuaacuccucucaccggccccug

SEQ ID NO: 122852 - RNA, 32 nt, Human
cggaguuugagaccagccuggccaacauggug

SEQ ID NO: 122853 - RNA, 32 nt, Human
cggaguuuggaacggcugaaguucaccuucca

SEQ ID NO: 122854 - RNA, 32 nt, Human
cggauaccaguggaccuggaguggcugguugg

SEQ ID NO: 122855 - RNA, 32 nt, Human
cggauacuccugccucagccuccuggguagcu

SEQ ID NO: 122856 - RNA, 32 nt, Human
cggauagcaagacucuguggaguuuguucagu

SEQ ID NO: 122857 - RNA, 32 nt, Human
cggauagccccagggcugaagcugccagaagu

SEQ ID NO: 122858 - RNA, 20 nt, Human
cggauagccucagucaggga

SEQ ID NO: 122859 - RNA, 20 nt, Human
cggauagcgccagccccgcc

SEQ ID NO: 122860 - RNA, 20 nt, Human
cggauagcugggauuacagg

SEQ ID NO: 122861 - RNA, 21 nt, Human
cggauaucuaaaagcuaggga

SEQ ID NO: 122862 - RNA, 32 nt, Human
cggaucacaaggucaagagauagagaccaucc

SEQ ID NO: 122863 - RNA, 32 nt, Human
cggaucacaaggucaagaguucgagaccagcc

SEQ ID NO: 122864 - RNA, 19 nt, Human
cggaucaccugaggucagg

SEQ ID NO: 122865 - RNA, 32 nt, Human
cggaucacuccugaggccaggaguuugagacc

SEQ ID NO: 122866 - RNA, 32 nt, Human
cggaucacugcaaccuccaccuccuagguuca

SEQ ID NO: 122867 - RNA, 32 nt, Human
cggaucaguguuguuucuuuuuaaugcugaaa

SEQ ID NO: 122868 - RNA, 32 nt, Human
cggauccaagagaggguggcagaaggaaugcg

SEQ ID NO: 122869 - RNA, 32 nt, Human
cggauccaggauucugggaggcuucaguuacc

SEQ ID NO: 122870 - RNA, 32 nt, Human
cggauccggagagggggcuccgggagcggcgg

SEQ ID NO: 122871 - RNA, 32 nt, Human
cggauccuggaaaaucgcuguguuggggagca

SEQ ID NO: 122872 - RNA, 32 nt, Human
cggaucgcaccacguguggcagccugcggcgg

SEQ ID NO: 122873 - RNA, 32 nt, Human
cggaucgccaccccgcacagccuggguagcgu

SEQ ID NO: 122874 - RNA, 32 nt, Human
cggaucgugccgcggcggccgagcgcagcuac

SEQ ID NO: 122875 - RNA, 32 nt, Human
cggaucuaagaugcccuuagaagaccagccca

SEQ ID NO: 122876 - RNA, 32 nt, Human
cggaucucagcuggaucccugccccuccugcc

SEQ ID NO: 122877 - RNA, 32 nt, Human
cggaucuccugguuacccagcacauaguagua

SEQ ID NO: 122878 - RNA, 32 nt, Human
cggaucucuguggggcucuucaccaauuuuuc

SEQ ID NO: 122879 - RNA, 32 nt, Human
cggaucugaaaaggggagaggcauucagccgc

SEQ ID NO: 122880 - RNA, 32 nt, Human
cggaucuucucuucucugggaggcuuuggaau

SEQ ID NO: 122881 - RNA, 32 nt, Human
cggaugaagccccuguggccgccaucuugauc

SEQ ID NO: 122882 - RNA, 32 nt, Human
cggaugaggaaggagcucuuugcagugcacca

SEQ ID NO: 122883 - RNA, 32 nt, Human
cggaugcaggggcagagagagcagcaggugaa

SEQ ID NO: 122884 - RNA, 32 nt, Human
cggaugcagugucccacacaaggacacuuccu

SEQ ID NO: 122885 - RNA, 32 nt, Human
cggaugcaucucuuucagcauuggaguaucau

SEQ ID NO: 122886 - RNA, 23 nt, Human
cggaugccacugccgaaaccucc

SEQ ID NO: 122887 - RNA, 32 nt, Human
cggaugccuguaaucccagcuacuugggaggc

SEQ ID NO: 122888 - RNA, 32 nt, Human
cggaugccugucucccugacccacgccuccag

SEQ ID NO: 122889 - RNA, 32 nt, Human
cggaugcugcagaaguguggaccauggcggga

SEQ ID NO: 122890 - RNA, 32 nt, Human
cggaugcugcauccucugccucccuggucgcu

SEQ ID NO: 122891 - RNA, 32 nt, Human
cggaugcugcuguggcugggccaagugauagc

SEQ ID NO: 122892 - RNA, 32 nt, Human
cggaugcuggcaggagggcggggugaggaggg

SEQ ID NO: 122893 - RNA, 28 nt, Human
cggaugcuggugcugccaucccccugcc

SEQ ID NO: 122894 - RNA, 28 nt, Human
cggauggaaauccuaaugacagucucca

SEQ ID NO: 122895 - RNA, 32 nt, Human
cggauggaaggagagagguugaggaugcacug

SEQ ID NO: 122896 - RNA, 18 nt, Human
cggauggaggcacagggg

SEQ ID NO: 122897 - RNA, 32 nt, Human
cggauggagggagagguugugcugaccaccac

SEQ ID NO: 122898 - RNA, 23 nt, Human
cggauggagguggagagcaggga

SEQ ID NO: 122899 - RNA, 32 nt, Human
cggauggcaaggacgcguucugccugggcaug

SEQ ID NO: 122900 - RNA, 32 nt, Human
cggauggccaacauucaguuguucagguucau

SEQ ID NO: 122901 - RNA, 19 nt, Human
cggauggcggcggccaggg

SEQ ID NO: 122902 - RNA, 32 nt, Human
cggauggcggcgggagguugauggcgaguggu

SEQ ID NO: 122903 - RNA, 28 nt, Human
cggauggcugccgcacgccucugccucu

SEQ ID NO: 122904 - RNA, 32 nt, Human
cggaugggaccacggcccuguuuauauuuggg

SEQ ID NO: 122905 - RNA, 32 nt, Human
cggaugggauccugggacagaaaauaaacaug

SEQ ID NO: 122906 - RNA, 18 nt, Human
cggaugggaugagccagg

SEQ ID NO: 122907 - RNA, 17 nt, Human
cggaugggcaccggaga

SEQ ID NO: 122908 - RNA, 20 nt, Human
cggaugggcauggccaguga

SEQ ID NO: 122909 - RNA, 32 nt, Human
cggaugggcuguagaauggggucuggccaccu

SEQ ID NO: 122910 - RNA, 32 nt, Human
cggauggggaagggagagcuggccuuggucag

SEQ ID NO: 122911 - RNA, 32 nt, Human
cggauggguacccgggcacaccagcccucaga

SEQ ID NO: 122912 - RNA, 32 nt, Human
cggauggugacggggcccugccgccgcagccc

SEQ ID NO: 122913 - RNA, 32 nt, Human
cggauggugcugcuguccccagccucucuggg

SEQ ID NO: 122914 - RNA, 32 nt, Human
cggaugguggugagagggacagaccaggcagg

SEQ ID NO: 122915 - RNA, 20 nt, Human
cggaugucugcaccuucgcu

SEQ ID NO: 122916 - RNA, 32 nt, Human
cggauguggagaggagaauggaaaucgcagaa

SEQ ID NO: 122917 - RNA, 32 nt, Human
cggaugugucauuuucccccagaaagggugca

SEQ ID NO: 122918 - RNA, 32 nt, Human
cggauguugcuugcacuccagccugggugaca

SEQ ID NO: 122919 - RNA, 32 nt, Human
cggauguuuggcuaccuccaccccuccaucuc

SEQ ID NO: 122920 - RNA, 32 nt, Human
cggauuaauugagcccagcggagcucagguuu

SEQ ID NO: 122921 - RNA, 32 nt, Human
cggauuaggcugagugaagauuaagggagggu

SEQ ID NO: 122922 - RNA, 23 nt, Human
cggauucaagcaauucuccugcc

SEQ ID NO: 122923 - RNA, 24 nt, Human
cggauucaagcaauucuucugccu

SEQ ID NO: 122924 - RNA, 24 nt, Human
cggauucaagcgauucuccugccu

SEQ ID NO: 122925 - RNA, 24 nt, Human
cggauucaagugauuccccugucu

SEQ ID NO: 122926 - RNA, 24 nt, Human
cggauucaagugauucuccagccu

SEQ ID NO: 122927 - RNA, 24 nt, Human
cggauucaagugauucuccugccu

SEQ ID NO: 122928 - RNA, 32 nt, Human
cggauucacuggcugcugcuccgcccaggacu

SEQ ID NO: 122929 - RNA, 32 nt, Human
cggauucagaauccauaaggcuuuaucaccuu

SEQ ID NO: 122930 - RNA, 32 nt, Human
cggauucagcacuuaagcccuaguguguaaau

SEQ ID NO: 122931 - RNA, 24 nt, Human
cggauucaggcgauucucaugccu

SEQ ID NO: 122932 - RNA, 32 nt, Human
cggauucccucacuguuguaucuugaauaaac

SEQ ID NO: 122933 - RNA, 32 nt, Human
cggauucccuccugccugcacgccuucaguaa

SEQ ID NO: 122934 - RNA, 19 nt, Human
cggauucccuggccaagga

SEQ ID NO: 122935 - RNA, 32 nt, Human
cggauuccucaccaagcucaacggcuccauca

SEQ ID NO: 122936 - RNA, 24 nt, Human
cggauucgagugauucuccugccu

SEQ ID NO: 122937 - RNA, 32 nt, Human
cggauucguugccugagcaauggcugccaucc

SEQ ID NO: 122938 - RNA, 32 nt, Human
cggauucucgugccucagccuccugaguagcu

SEQ ID NO: 122939 - RNA, 32 nt, Human
cggauuggcaagaaacaugaugucucggaggc

SEQ ID NO: 122940 - RNA, 24 nt, Human
cggauuuaagcgauucuccugcuu

SEQ ID NO: 122941 - RNA, 24 nt, Human
cggauuuaagcgauucuucugccu

SEQ ID NO: 122942 - RNA, 32 nt, Human
cggauuuacaucagugguuuaccaggugcucu

SEQ ID NO: 122943 - RNA, 24 nt, Human
cggauuuaggugauucuccugccu

SEQ ID NO: 122944 - RNA, 32 nt, Human
cggauuucaagaccagcaugaccaacauggag

SEQ ID NO: 122945 - RNA, 32 nt, Human
cggauuucauuucccuccucucucccagggua

SEQ ID NO: 122946 - RNA, 20 nt, Human
cggauuuccgccuccgggug

SEQ ID NO: 122947 - RNA, 32 nt, Human
cggauuuccucuuccuagcuuaaaaucugauu

SEQ ID NO: 122948 - RNA, 32 nt, Human
cggauuugaaucucuuucucucccuucagaau

SEQ ID NO: 122949 - RNA, 32 nt, Human
cggauuugcaggaauuccugaaggaaugcagu

SEQ ID NO: 122950 - RNA, 32 nt, Human
cggauuugcuguggcccugcccuugcuguuag

SEQ ID NO: 122951 - RNA, 32 nt, Human
cggauuuuauggcaucuggaacaugggcacag

SEQ ID NO: 122952 - RNA, 32 nt, Human
cggauuuucucuucccuucuuuucccuuuucc

SEQ ID NO: 122953 - RNA, 32 nt, Human
cggcaaaacacagacagaaaccucucaucagg

SEQ ID NO: 122954 - RNA, 32 nt, Human
cggcaaaacucagguaugucucuguauggcag

SEQ ID NO: 122955 - RNA, 32 nt, Human
cggcaaacaggcuaccccugaggucccaugug

SEQ ID NO: 122956 - RNA, 32 nt, Human
cggcaaacauaguuuuccuauuucaggcagag

SEQ ID NO: 122957 - RNA, 32 nt, Human
cggcaaagguguccaagucacacagagccacg

SEQ ID NO: 122958 - RNA, 32 nt, Human
cggcaacaagaacuccacaguucccaggcugg

SEQ ID NO: 122959 - RNA, 32 nt, Human
cggcaacauguaccccagcaacaagaagaaaa

SEQ ID NO: 122960 - RNA, 31 nt, Human
cggcaacauuccucagaaaccaaagcuuuau

SEQ ID NO: 122961 - RNA, 32 nt, Human
cggcaacccccgcuucccggguucaagcaauu

SEQ ID NO: 122962 - RNA, 25 nt, Human
cggcaagaaaucuggaaauucuaua

SEQ ID NO: 122963 - RNA, 20 nt, Human
cggcaaggacucucccagug

SEQ ID NO: 122964 - RNA, 32 nt, Human
cggcaagguguuccgcaaggaggaggacucca

SEQ ID NO: 122965 - RNA, 32 nt, Human
cggcaaguucaggcauucucucaguguuuagg

SEQ ID NO: 122966 - RNA, 32 nt, Human
cggcaaucgaguggcuuccuggccauggagag

SEQ ID NO: 122967 - RNA, 32 nt, Human
cggcaaucugauucuccugaauuucccagcca

SEQ ID NO: 122968 - RNA, 32 nt, Human
cggcaaugugggcacagcuaaccacagugcgu

SEQ ID NO: 122969 - RNA, 32 nt, Human
cggcaaugugggcacagcuaaccacagugugu

SEQ ID NO: 122970 - RNA, 32 nt, Human
cggcacaacagcuuugccccucgguggaagcc

SEQ ID NO: 122971 - RNA, 19 nt, Human
cggcacacaaggcgcuuuc

SEQ ID NO: 122972 - RNA, 32 nt, Human
cggcacacagaccugcucggucacauuggagc

SEQ ID NO: 122973 - RNA, 22 nt, Human
cggcacacaggcauaucagcuu

SEQ ID NO: 122974 - RNA, 32 nt, Human
cggcacacuacagucccgacuaggugagcugc

SEQ ID NO: 122975 - RNA, 32 nt, Human
cggcacacugcaaccuucgccucccagauuca

SEQ ID NO: 122976 - RNA, 32 nt, Human
cggcacacugcuguuccuccaguuccauggac

SEQ ID NO: 122977 - RNA, 31 nt, Human
cggcacacuuuaacccagucucuguugcugu

SEQ ID NO: 122978 - RNA, 32 nt, Human
cggcacagccuccugggaggaucccgaaguag

SEQ ID NO: 122979 - RNA, 32 nt, Human
cggcacaggcugggcuccagcaggugggcagg

SEQ ID NO: 122980 - RNA, 32 nt, Human
cggcacagggaaaugcaucuuccaggcagaug

SEQ ID NO: 122981 - RNA, 32 nt, Human
cggcacaugccuguaaucccagcuacauggga

SEQ ID NO: 122982 - RNA, 32 nt, Human
cggcaccaacagcagcgccgcugccaccgccc

SEQ ID NO: 122983 - RNA, 32 nt, Human
cggcaccaaguugggggugcuggaugaaagag

SEQ ID NO: 122984 - RNA, 32 nt, Human
cggcaccagcagagggaaguggagaggguagg

SEQ ID NO: 122985 - RNA, 32 nt, Human
cggcaccaugacccugggcagcugcugcugcg

SEQ ID NO: 122986 - RNA, 32 nt, Human
cggcaccauggacugagcaccucccagguucc

SEQ ID NO: 122987 - RNA, 32 nt, Human
cggcaccauucucccuucucucuuuucuucuc

SEQ ID NO: 122988 - RNA, 32 nt, Human
cggcacccagaagaaguggggagcgggcaaag

SEQ ID NO: 122989 - RNA, 32 nt, Human
cggcacccagcgcuuggcugggccagcagccc

SEQ ID NO: 122990 - RNA, 32 nt, Human
cggcacccauggugugcuggaucaugugcaug

SEQ ID NO: 122991 - RNA, 32 nt, Human
cggcaccccuugcccuguuggaagagaaagag

SEQ ID NO: 122992 - RNA, 32 nt, Human
cggcacccucgagggccggcuagggcgugcgg

SEQ ID NO: 122993 - RNA, 32 nt, Human
cggcacccugcagcuuuaguuuacuaaacuag

SEQ ID NO: 122994 - RNA, 32 nt, Human
cggcacccuggugugacucuagugaucuacgu

SEQ ID NO: 122995 - RNA, 32 nt, Human
cggcaccgcagcguaggugcuaccaccgcugc

SEQ ID NO: 122996 - RNA, 32 nt, Human
cggcaccuacauccccaggucucuccacugcu

SEQ ID NO: 122997 - RNA, 32 nt, Human
cggcaccucaugggaagguuaagacuggagca

SEQ ID NO: 122998 - RNA, 32 nt, Human
cggcaccugagaguguggcgcgggcccggggc

SEQ ID NO: 122999 - RNA, 32 nt, Human
cggcaccugauggugaucuuggcacucuccau

SEQ ID NO: 123000 - RNA, 32 nt, Human
cggcaccugcagccugaaacgcaccgcuccug

SEQ ID NO: 123001 - RNA, 32 nt, Human
cggcaccugcagcuuccgcaccuccugguccg

SEQ ID NO: 123002 - RNA, 32 nt, Human
cggcaccugccuggaacugccuggagcgccau

SEQ ID NO: 123003 - RNA, 32 nt, Human
cggcaccugccuggcacaagugcagcaggccg

SEQ ID NO: 123004 - RNA, 32 nt, Human
cggcaccugggggcacacacaugcaggcggcg

SEQ ID NO: 123005 - RNA, 32 nt, Human
cggcaccuuacgcuucagcuguugauccgcug

SEQ ID NO: 123006 - RNA, 32 nt, Human
cggcaccuucccuaaucaucucgaucugguug

SEQ ID NO: 123007 - RNA, 32 nt, Human
cggcaccuuugagggaaaaggcaguaggucag

SEQ ID NO: 123008 - RNA, 32 nt, Human
cggcacggaagagcggcgagaugcucaaccgc

SEQ ID NO: 123009 - RNA, 32 nt, Human
cggcacggccaggccagcaugguggaccacuu

SEQ ID NO: 123010 - RNA, 32 nt, Human
cggcacggccucaggugcucuaccccgcggga

SEQ ID NO: 123011 - RNA, 32 nt, Human
cggcacgggugcugcgggacacacagacacgc

SEQ ID NO: 123012 - RNA, 32 nt, Human
cggcacuaagccauucaugagggauccaaccc

SEQ ID NO: 123013 - RNA, 32 nt, Human
cggcacuacugcgcuucugccucggcucuuug

SEQ ID NO: 123014 - RNA, 30 nt, Human
cggcacucacagaccuggagccccugggug

SEQ ID NO: 123015 - RNA, 21 nt, Human
cggcacucagccugcacgccc

SEQ ID NO: 123016 - RNA, 32 nt, Human
cggcacuccagccuggcgacaagagugagacu

SEQ ID NO: 123017 - RNA, 32 nt, Human
cggcacuccagccugggcagcagagugagacu

SEQ ID NO: 123018 - RNA, 32 nt, Human
cggcacuccagccugggugacagagugagacu

SEQ ID NO: 123019 - RNA, 32 nt, Human
cggcacuccagccugggugacagugagacugu

SEQ ID NO: 123020 - RNA, 32 nt, Human
cggcacugcacuccagccugggugacaaagug

SEQ ID NO: 123021 - RNA, 32 nt, Human
cggcacugcagccugggcaacauagcgagacu

SEQ ID NO: 123022 - RNA, 32 nt, Human
cggcacugcgcugcagccugggcaacacagug

SEQ ID NO: 123023 - RNA, 25 nt, Human
cggcacugcgugcucaacgagcugg

SEQ ID NO: 123024 - RNA, 32 nt, Human
cggcacugcuuugcccagggcacauugacaga

SEQ ID NO: 123025 - RNA, 32 nt, Human
cggcacugggccaccugccccugcuggagggg

SEQ ID NO: 123026 - RNA, 32 nt, Human
cggcacugugcacucuacucugcgacgauccc

SEQ ID NO: 123027 - RNA, 32 nt, Human
cggcacuuauggagaggaucuaaagcagccgg

SEQ ID NO: 123028 - RNA, 32 nt, Human
cggcacuugggugggaccaaggagaugccacc

SEQ ID NO: 123029 - RNA, 32 nt, Human
cggcacuuuccacuucuguacgguggcaaaac

SEQ ID NO: 123030 - RNA, 32 nt, Human
cggcacuuugccgccucaggcccuggacaccu

SEQ ID NO: 123031 - RNA, 32 nt, Human
cggcacuuugggaggccgagacgggcagauca

SEQ ID NO: 123032 - RNA, 32 nt, Human
cggcacuuugggaggccgaggcaggcagauca

SEQ ID NO: 123033 - RNA, 32 nt, Human
cggcacuuugggaggccgaggcaggcggauca

SEQ ID NO: 123034 - RNA, 32 nt, Human
cggcacuuugggaggccgaggcgggcagauca

SEQ ID NO: 123035 - RNA, 32 nt, Human
cggcacuuugggaggccgaggcgggcggauca

SEQ ID NO: 123036 - RNA, 32 nt, Human
cggcacuuugggaggcugaggcgggcggauca

SEQ ID NO: 123037 - RNA, 32 nt, Human
cggcacuuugggaggcugaggucaggaguuug

SEQ ID NO: 123038 - RNA, 32 nt, Human
cggcacuuugggaggcugaggugggcggauca

SEQ ID NO: 123039 - RNA, 32 nt, Human
cggcagaaaggaaaaccugaagacugaggaca

SEQ ID NO: 123040 - RNA, 32 nt, Human
cggcagaaauucucccccuacugggccagcug

SEQ ID NO: 123041 - RNA, 32 nt, Human
cggcagaaggggcugaaaacuaauccauacag

SEQ ID NO: 123042 - RNA, 32 nt, Human
cggcagacagaugcaagaccauuuuucuccaa

SEQ ID NO: 123043 - RNA, 29 nt, Human
cggcagagaaggcccaguguguccauccc

SEQ ID NO: 123044 - RNA, 32 nt, Human
cggcagagaugggguuuauguauguucagcca

SEQ ID NO: 123045 - RNA, 32 nt, Human
cggcagagcccaggcuggggaagugaacuacc

SEQ ID NO: 123046 - RNA, 32 nt, Human
cggcagagcucuacaggccugcagccccuaag

SEQ ID NO: 123047 - RNA, 32 nt, Human
cggcagagcugacuugccuguacuggaaccca

SEQ ID NO: 123048 - RNA, 29 nt, Human
cggcagagcugggguugaagaggcagcuu

SEQ ID NO: 123049 - RNA, 32 nt, Human
cggcagaggacaaugggagcugauggaggcua

SEQ ID NO: 123050 - RNA, 19 nt, Human
cggcagaggagguuccccc

SEQ ID NO: 123051 - RNA, 32 nt, Human
cggcagaggcggacuugggguuggaguguuug

SEQ ID NO: 123052 - RNA, 32 nt, Human
cggcagaggcggagccgcuguggcacugcugc

SEQ ID NO: 123053 - RNA, 32 nt, Human
cggcagagggagugagcaggggagaaauagca

SEQ ID NO: 123054 - RNA, 18 nt, Human
cggcagagguugcaguga

SEQ ID NO: 123055 - RNA, 32 nt, Human
cggcagauguggcuggaggucagggcucuucu

SEQ ID NO: 123056 - RNA, 32 nt, Human
cggcagcaagacgacuucuccggagccgccga

SEQ ID NO: 123057 - RNA, 32 nt, Human
cggcagcaaucgaggcgaccgcgacaguggug

SEQ ID NO: 123058 - RNA, 32 nt, Human
cggcagcagcagcagagagcagagagcagaaa

SEQ ID NO: 123059 - RNA, 32 nt, Human
cggcagcagcagcagaggcagcagcgggcggc

SEQ ID NO: 123060 - RNA, 32 nt, Human
cggcagcagcagcagcaggcgaggaggaagau

SEQ ID NO: 123061 - RNA, 19 nt, Human
cggcagcagcagcggcagc

SEQ ID NO: 123062 - RNA, 32 nt, Human
cggcagcaggcagaggagggagggggccuagg

SEQ ID NO: 123063 - RNA, 31 nt, Human
cggcagcaguuucagcgugcaguucccaaac

SEQ ID NO: 123064 - RNA, 32 nt, Human
cggcagcaugguaguauugagauagcuaugug

SEQ ID NO: 123065 - RNA, 26 nt, Human
cggcagccaccauccacuuccuggcc

SEQ ID NO: 123066 - RNA, 32 nt, Human
cggcagccaccauggcgcuccugcugcgcuuc

SEQ ID NO: 123067 - RNA, 32 nt, Human
cggcagccauggcgcucgcucuugccggggag

SEQ ID NO: 123068 - RNA, 32 nt, Human
cggcagcccaagcagauucccauccaucauga

SEQ ID NO: 123069 - RNA, 32 nt, Human
cggcagcccccaagccugccccgcuacccaag

SEQ ID NO: 123070 - RNA, 25 nt, Human
cggcagccccucccagccuaccccu

SEQ ID NO: 123071 - RNA, 32 nt, Human
cggcagcccgggccuuucucguucacaccggu

SEQ ID NO: 123072 - RNA, 32 nt, Human
cggcagcccuggcugcugcucgccccacccuc

SEQ ID NO: 123073 - RNA, 32 nt, Human
cggcagccgagcgcacguucuuucggaugcac

SEQ ID NO: 123074 - RNA, 32 nt, Human
cggcagccgcccgcagcugcagagagucccgc

SEQ ID NO: 123075 - RNA, 32 nt, Human
cggcagccguggccuacugccugccgcgcgag

SEQ ID NO: 123076 - RNA, 32 nt, Human
cggcagccuccccucgcucgcucuccucuucc

SEQ ID NO: 123077 - RNA, 32 nt, Human
cggcagccucuacaggcccagcuccugccuca

SEQ ID NO: 123078 - RNA, 32 nt, Human
cggcagccucuacaggcccagcuccugccucg

SEQ ID NO: 123079 - RNA, 32 nt, Human
cggcagccucuacggggccagcuccugccuug

SEQ ID NO: 123080 - RNA, 17 nt, Human
cggcagcgacggauccu

SEQ ID NO: 123081 - RNA, 18 nt, Human
cggcagcgccggguccua

SEQ ID NO: 123082 - RNA, 30 nt, Human
cggcagcgccucuccuccaugguccugucu

SEQ ID NO: 123083 - RNA, 26 nt, Human
cggcagcggagagcgcggucccgggu

SEQ ID NO: 123084 - RNA, 32 nt, Human
cggcagcggaggaggaagcugagcagggcggc

SEQ ID NO: 123085 - RNA, 26 nt, Human
cggcagcggccacggucuccuggcgu

SEQ ID NO: 123086 - RNA, 32 nt, Human
cggcagcuacauccagcuucuggggucagcca

SEQ ID NO: 123087 - RNA, 24 nt, Human
cggcagcucacaccuguaauccca

SEQ ID NO: 123088 - RNA, 32 nt, Human
cggcagcucagcagcauggccagcaagcucau

SEQ ID NO: 123089 - RNA, 24 nt, Human
cggcagcucaugccuguaauccca

SEQ ID NO: 123090 - RNA, 32 nt, Human
cggcagcucugaggauggagaggagggcgcgg

SEQ ID NO: 123091 - RNA, 32 nt, Human
cggcagcucugccucccuaagucugugaagcc

SEQ ID NO: 123092 - RNA, 32 nt, Human
cggcagcucugugcccuuggccagcaugugga

SEQ ID NO: 123093 - RNA, 32 nt, Human
cggcagcugcagcagcagcagccccggcggcg

SEQ ID NO: 123094 - RNA, 32 nt, Human
cggcagcugcuggcugugacaaugguuucacc

SEQ ID NO: 123095 - RNA, 32 nt, Human
cggcagcugggaaaggaggaauguggauccag

SEQ ID NO: 123096 - RNA, 32 nt, Human
cggcagcugggaagggucagggcaguuccagg

SEQ ID NO: 123097 - RNA, 32 nt, Human
cggcagcugucauuuccaugugcacugggacg

SEQ ID NO: 123098 - RNA, 32 nt, Human
cggcagcugugccaauaggaaaaagcuaccua

SEQ ID NO: 123099 - RNA, 32 nt, Human
cggcaggaacuaucaguagacagcugcugcuu

SEQ ID NO: 123100 - RNA, 32 nt, Human
cggcaggaacugcguccccacccugaugcauu

SEQ ID NO: 123101 - RNA, 32 nt, Human
cggcaggaagcaggugcccuccccagcgucac

SEQ ID NO: 123102 - RNA, 32 nt, Human
cggcaggaagggcugaaauccaggccccuguc

SEQ ID NO: 123103 - RNA, 32 nt, Human
cggcaggaagggggccgacuccacgcuguccu

SEQ ID NO: 123104 - RNA, 32 nt, Human
cggcaggagaagcaggcagggggccggaggac

SEQ ID NO: 123105 - RNA, 32 nt, Human
cggcaggaugaaaaugacugccagcaguggaa

SEQ ID NO: 123106 - RNA, 32 nt, Human
cggcaggcagaggcaccccguacacugcagag

SEQ ID NO: 123107 - RNA, 32 nt, Human
cggcaggccucaucugccccacccugggccac

SEQ ID NO: 123108 - RNA, 32 nt, Human
cggcaggcggcaggcagcaggcuguggaggag

SEQ ID NO: 123109 - RNA, 32 nt, Human
cggcaggcggcggacguggcccggaagcugcg

SEQ ID NO: 123110 - RNA, 32 nt, Human
cggcaggcucacugccaggccagccuccgaga

SEQ ID NO: 123111 - RNA, 32 nt, Human
cggcaggcuuugaguguagcacuugguaguuc

SEQ ID NO: 123112 - RNA, 32 nt, Human
cggcagggagcugggcagggguccccgggugu

SEQ ID NO: 123113 - RNA, 32 nt, Human
cggcagggaucagggagccaggagcgcgccuc

SEQ ID NO: 123114 - RNA, 32 nt, Human
cggcaggggacuccagccugcuggacacuuca

SEQ ID NO: 123115 - RNA, 20 nt, Human
cggcaggggaggccaauccc

SEQ ID NO: 123116 - RNA, 32 nt, Human
cggcaggguguggacccagcuggccgcuggac

SEQ ID NO: 123117 - RNA, 32 nt, Human
cggcaggucugcagcucagcuccuggaaggag

SEQ ID NO: 123118 - RNA, 32 nt, Human
cggcaggugaagccuagcagaggacgcggcca

SEQ ID NO: 123119 - RNA, 32 nt, Human
cggcaguauggaauuccagugccaggccagug

SEQ ID NO: 123120 - RNA, 32 nt, Human
cggcagucagcuuucugggagugggagaugau

SEQ ID NO: 123121 - RNA, 32 nt, Human
cggcagucucgcgggauuucccccucucgcgg

SEQ ID NO: 123122 - RNA, 32 nt, Human
cggcagucucgcugagccagcugugcagaggg

SEQ ID NO: 123123 - RNA, 28 nt, Human
cggcagugaacaccacagcuucucccca

SEQ ID NO: 123124 - RNA, 31 nt, Human
cggcagugacuucgccgcugcuguaguuccc

SEQ ID NO: 123125 - RNA, 32 nt, Human
cggcagugcagcaauaaugacacuuugugcuu

SEQ ID NO: 123126 - RNA, 32 nt, Human
cggcagugcggggagagaugacuggggagcga

SEQ ID NO: 123127 - RNA, 32 nt, Human
cggcaguggccgcggcagcggcggugguagcg

SEQ ID NO: 123128 - RNA, 18 nt, Human
cggcaguucuacucuaga

SEQ ID NO: 123129 - RNA, 32 nt, Human
cggcaguucucaaacuuuagcaugugaagagu

SEQ ID NO: 123130 - RNA, 32 nt, Human
cggcauaauuuucuuuccucuggcugauccca

SEQ ID NO: 123131 - RNA, 32 nt, Human
cggcauaugccaccuccaugccacugccagag

SEQ ID NO: 123132 - RNA, 32 nt, Human
cggcaucacacaccagccaagguuuacggagc

SEQ ID NO: 123133 - RNA, 32 nt, Human
cggcaucaggagagacagagaugugaaggagg

SEQ ID NO: 123134 - RNA, 31 nt, Human
cggcaucucaauaaaacuguuucgaaaagaa

SEQ ID NO: 123135 - RNA, 32 nt, Human
cggcaucuccccuagcucaccaggccuggccu

SEQ ID NO: 123136 - RNA, 32 nt, Human
cggcaucugaucgucugaucaugugggugccu

SEQ ID NO: 123137 - RNA, 32 nt, Human
cggcaucugcuccccgccgucugcucccucuc

SEQ ID NO: 123138 - RNA, 32 nt, Human
cggcaugagagagguguaauucucaaguucau

SEQ ID NO: 123139 - RNA, 32 nt, Human
cggcaugaucacaccucacugcagccucaauc

SEQ ID NO: 123140 - RNA, 32 nt, Human
cggcaugaucucgacucacugcagccuccgcc

SEQ ID NO: 123141 - RNA, 32 nt, Human
cggcaugauuuuggcucacugcagccucugcc

SEQ ID NO: 123142 - RNA, 32 nt, Human
cggcaugccucccugcacuguccguuccucug

SEQ ID NO: 123143 - RNA, 32 nt, Human
cggcaugccuguacuggcacuuugguuuuugu

SEQ ID NO: 123144 - RNA, 29 nt, Human
cggcauggagcaggacacugccgcagugg

SEQ ID NO: 123145 - RNA, 29 nt, Human
cggcauggcgguccccgcugcagccaugg

SEQ ID NO: 123146 - RNA, 32 nt, Human
cggcauggggccugggcugccagggaccucac

SEQ ID NO: 123147 - RNA, 32 nt, Human
cggcauguggguggacagugguggagagucac

SEQ ID NO: 123148 - RNA, 32 nt, Human
cggcauuauggggacagagagcagggggcaga

SEQ ID NO: 123149 - RNA, 32 nt, Human
cggcauugcacuccagccugggcaacaagagc

SEQ ID NO: 123150 - RNA, 32 nt, Human
cggcauugcacuucagccugggcgauagagca

SEQ ID NO: 123151 - RNA, 32 nt, Human
cggcauugccuucuaccaccugggcgacuacg

SEQ ID NO: 123152 - RNA, 32 nt, Human
cggcauuuaaaauauaucuauaucacuuuguu

SEQ ID NO: 123153 - RNA, 32 nt, Human
cggcauuucugcaaggaggacuugaagcaaga

SEQ ID NO: 123154 - RNA, 32 nt, Human
cggcauuugaagccuuucagccaguugcuucu

SEQ ID NO: 123155 - RNA, 32 nt, Human
cggccaaaagagaugacccugccccuugccca

SEQ ID NO: 123156 - RNA, 32 nt, Human
cggccaacauggugaaaccccaucucuacuaa

SEQ ID NO: 123157 - RNA, 32 nt, Human
cggccaagaauguacguccagccugccccgga

SEQ ID NO: 123158 - RNA, 32 nt, Human
cggccaagagccuggagaaagggagcaagcug

SEQ ID NO: 123159 - RNA, 31 nt, Human
cggccaagagucugucucaugccaagggagg

SEQ ID NO: 123160 - RNA, 32 nt, Human
cggccaagcauaaugacagagagaggcagauu

SEQ ID NO: 123161 - RNA, 32 nt, Human
cggccaagcucccuccuaauuccccguuguug

SEQ ID NO: 123162 - RNA, 32 nt, Human
cggccaaggccuucccugccaugcgaccuguc

SEQ ID NO: 123163 - RNA, 32 nt, Human
cggccaaggcgagcauuuccacaaugccgugg

SEQ ID NO: 123164 - RNA, 32 nt, Human
cggccaaucucgaagguggagaggcucagggu

SEQ ID NO: 123165 - RNA, 32 nt, Human
cggccacacauacuucugcagauacugugccu

SEQ ID NO: 123166 - RNA, 16 nt, Human
cggccacaccgccgga

SEQ ID NO: 123167 - RNA, 32 nt, Human
cggccacacgggcugcuagucauacugcccgc

SEQ ID NO: 123168 - RNA, 32 nt, Human
cggccacacuggcucgcagccucccccggcug

SEQ ID NO: 123169 - RNA, 32 nt, Human
cggccacacuuaacaggaagcuccuaggccuc

SEQ ID NO: 123170 - RNA, 31 nt, Human
cggccacagcaauaggaaagccagggccaga

SEQ ID NO: 123171 - RNA, 32 nt, Human
cggccacaggcaaggggguugcaguggccgcc

SEQ ID NO: 123172 - RNA, 32 nt, Human
cggccaccagcgccccagccccgaggcucaga

SEQ ID NO: 123173 - RNA, 32 nt, Human
cggccaccaugccuggcuaaucuuuuaaauuu

SEQ ID NO: 123174 - RNA, 32 nt, Human
cggccacccaggaggcagggagcagccgcccc

SEQ ID NO: 123175 - RNA, 32 nt, Human
cggccaccccucugccaacuuggcuaucuuga

SEQ ID NO: 123176 - RNA, 24 nt, Human
cggccacccgcuccggaggccccg

SEQ ID NO: 123177 - RNA, 32 nt, Human
cggccaccuccaggcuggcuucagucucccau

SEQ ID NO: 123178 - RNA, 32 nt, Human
cggccaccucccaccaaccuggcaucguuccu

SEQ ID NO: 123179 - RNA, 21 nt, Human
cggccaccuggagccuccaca

SEQ ID NO: 123180 - RNA, 32 nt, Human
cggccacgaagagaggaggcagugagcaacag

SEQ ID NO: 123181 - RNA, 32 nt, Human
cggccacgcccaucgccuccagcccggcucgc

SEQ ID NO: 123182 - RNA, 32 nt, Human
cggccacggacggacgccagcacacgaaguca

SEQ ID NO: 123183 - RNA, 32 nt, Human
cggccacggacuucugcccuucaucugcucuc

SEQ ID NO: 123184 - RNA, 32 nt, Human
cggccacgucaugucucuaaacugcggucaga

SEQ ID NO: 123185 - RNA, 32 nt, Human
cggccacugaaggagggcaggagcaguccucc

SEQ ID NO: 123186 - RNA, 32 nt, Human
cggccacugcacuccgggcugggcgacagagc

SEQ ID NO: 123187 - RNA, 21 nt, Human
cggccacugcggccgccggcc

SEQ ID NO: 123188 - RNA, 32 nt, Human
cggccacuggguuucggccucuucccagcagc

SEQ ID NO: 123189 - RNA, 32 nt, Human
cggccagaaguuaauuaaccucagagccagga

SEQ ID NO: 123190 - RNA, 32 nt, Human
cggccagagacuguuucucuacuccucucuaa

SEQ ID NO: 123191 - RNA, 32 nt, Human
cggccagagcuggggaaaugggcccgcgagcc

SEQ ID NO: 123192 - RNA, 32 nt, Human
cggccagaucaguguuacauugauucuaaaau

SEQ ID NO: 123193 - RNA, 32 nt, Human
cggccagcaccgcugcucacucggacgacgcc

SEQ ID NO: 123194 - RNA, 32 nt, Human
cggccagcagcaccccucccccaacccaaggg

SEQ ID NO: 123195 - RNA, 32 nt, Human
cggccagcagcccucugugaugugugugcaga

SEQ ID NO: 123196 - RNA, 32 nt, Human
cggccagcaggguggccccagguccauguugg

SEQ ID NO: 123197 - RNA, 32 nt, Human
cggccagccagccacucuaccagugcaggcug

SEQ ID NO: 123198 - RNA, 32 nt, Human
cggccagcccuucuccuccaccaguuccccag

SEQ ID NO: 123199 - RNA, 32 nt, Human
cggccagccucacaucagucucuccgccccgg

SEQ ID NO: 123200 - RNA, 32 nt, Human
cggccagccucgggggugcagccugggcuggg

SEQ ID NO: 123201 - RNA, 32 nt, Human
cggccagccugaggcugccugaggaaggaagg

SEQ ID NO: 123202 - RNA, 32 nt, Human
cggccagccugggacagcucaucccagccgac

SEQ ID NO: 123203 - RNA, 32 nt, Human
cggccagcggucaggggccagggcuggaggcg

SEQ ID NO: 123204 - RNA, 32 nt, Human
cggccagcuucucauguucucacagugggugg

SEQ ID NO: 123205 - RNA, 32 nt, Human
cggccaggagcgggaacucuuccaggagacgc

SEQ ID NO: 123206 - RNA, 32 nt, Human
cggccaggcaggugggagacugaauuugccuu

SEQ ID NO: 123207 - RNA, 32 nt, Human
cggccaggcccagcuguggccggacagggacu

SEQ ID NO: 123208 - RNA, 32 nt, Human
cggccaggccccggaagcagcagccagggaug

SEQ ID NO: 123209 - RNA, 32 nt, Human
cggccaggccuguuuaucuacacugcugccca

SEQ ID NO: 123210 - RNA, 32 nt, Human
cggccaggcgccccgcggaccaugcucuccag

SEQ ID NO: 123211 - RNA, 32 nt, Human
cggccaggcugaccaccucugccugacucaga

SEQ ID NO: 123212 - RNA, 32 nt, Human
cggccagggaagcacgguccaggcggcuacau

SEQ ID NO: 123213 - RNA, 32 nt, Human
cggccagggaccccucuccaucacugccaugg

SEQ ID NO: 123214 - RNA, 32 nt, Human
cggccagggacugugauauacccacauccccg

SEQ ID NO: 123215 - RNA, 32 nt, Human
cggccagggcagaaagcggcggcaggagaagc

SEQ ID NO: 123216 - RNA, 32 nt, Human
cggccagggccgcggcggccgccgcccgacuc

SEQ ID NO: 123217 - RNA, 32 nt, Human
cggccagggcuggggcagugccagacucugau

SEQ ID NO: 123218 - RNA, 32 nt, Human
cggccagggcugucuuucaaagugccauguuc

SEQ ID NO: 123219 - RNA, 32 nt, Human
cggccaggguggagugggugaggcagacauag

SEQ ID NO: 123220 - RNA, 32 nt, Human
cggccagugacuuccccaggaguguggagggg

SEQ ID NO: 123221 - RNA, 32 nt, Human
cggccagugcaggaauccagguaguggaggau

SEQ ID NO: 123222 - RNA, 32 nt, Human
cggccaucguaccugagcaggagccagcgccu

SEQ ID NO: 123223 - RNA, 32 nt, Human
cggccaucuugcagcaggagggauucugguca

SEQ ID NO: 123224 - RNA, 30 nt, Human
cggccauggcagcaucuucccugacgguca

SEQ ID NO: 123225 - RNA, 32 nt, Human
cggccauggcagcaucuucccugacggucacc

SEQ ID NO: 123226 - RNA, 32 nt, Human
cggcccaacauccagucuuuccccaggacaga

SEQ ID NO: 123227 - RNA, 32 nt, Human
cggcccaaucuuuggucccagcauuuucccac

SEQ ID NO: 123228 - RNA, 17 nt, Human
cggcccacaagccccug

SEQ ID NO: 123229 - RNA, 32 nt, Human
cggcccacauuggccagcauucagcugcacgu

SEQ ID NO: 123230 - RNA, 19 nt, Human
cggcccaccaccccagccc

SEQ ID NO: 123231 - RNA, 32 nt, Human
cggcccacccuccauccccacccuccaucccc

SEQ ID NO: 123232 - RNA, 32 nt, Human
cggcccacgguggcagccggcaguggccugag

SEQ ID NO: 123233 - RNA, 32 nt, Human
cggcccacucacgccuucacuccugggcccgg

SEQ ID NO: 123234 - RNA, 23 nt, Human
cggcccacucugaacccccuggc

SEQ ID NO: 123235 - RNA, 32 nt, Human
cggcccacugaaaccuccaccucccggguuca

SEQ ID NO: 123236 - RNA, 32 nt, Human
cggcccacugcaaccucugccuccuggguuca

SEQ ID NO: 123237 - RNA, 32 nt, Human
cggcccagacugaagugcaguggcacaaucau

SEQ ID NO: 123238 - RNA, 32 nt, Human
cggcccagagagagcaaagccagcuggccaag

SEQ ID NO: 123239 - RNA, 22 nt, Human
cggcccagcaaaagcgaugcug

SEQ ID NO: 123240 - RNA, 32 nt, Human
cggcccagccucccucucccuccuccauuccu

SEQ ID NO: 123241 - RNA, 32 nt, Human
cggcccagcgcggacuagugaggaccuccaca

SEQ ID NO: 123242 - RNA, 32 nt, Human
cggcccagcuggauuuuggacuucuggccucc

SEQ ID NO: 123243 - RNA, 32 nt, Human
cggcccagcugugugcacaggugcaggaggac

SEQ ID NO: 123244 - RNA, 32 nt, Human
cggcccaggaggccacugcugucuggaacguu

SEQ ID NO: 123245 - RNA, 32 nt, Human
cggcccaggccaggugcccaggaaaggacggc

SEQ ID NO: 123246 - RNA, 32 nt, Human
cggcccaggccugaaggggagcucugagacag

SEQ ID NO: 123247 - RNA, 32 nt, Human
cggcccaggcgggggacagugccguucuagag

SEQ ID NO: 123248 - RNA, 32 nt, Human
cggcccagguggcaggauguccuggucuggcc

SEQ ID NO: 123249 - RNA, 32 nt, Human
cggcccaguggggauggggaaaugcugcccgg

SEQ ID NO: 123250 - RNA, 32 nt, Human
cggcccaguggguggagguccaaagaggacug

SEQ ID NO: 123251 - RNA, 32 nt, Human
cggcccauggaagaggaggaggaggagccgug

SEQ ID NO: 123252 - RNA, 32 nt, Human
cggccccaauuccucagcccuaccugcaacca

SEQ ID NO: 123253 - RNA, 32 nt, Human
cggccccaccccgcccguaccugcacuuauuu

SEQ ID NO: 123254 - RNA, 32 nt, Human
cggccccacuagagccuuccagccuucuggug

SEQ ID NO: 123255 - RNA, 32 nt, Human
cggccccacugaggaggaggcucggggacagc

SEQ ID NO: 123256 - RNA, 32 nt, Human
cggccccagcccgugccucagcagagccgggu

SEQ ID NO: 123257 - RNA, 32 nt, Human
cggccccagugccauggccaccccagagaacc

SEQ ID NO: 123258 - RNA, 32 nt, Human
cggccccaucccucacccccacccucacuuuc

SEQ ID NO: 123259 - RNA, 32 nt, Human
cggcccccaaagugcugggauuacaggcauga

SEQ ID NO: 123260 - RNA, 19 nt, Human
cggcccccacuaggcugca

SEQ ID NO: 123261 - RNA, 32 nt, Human
cggcccccagcccacccagccaaaaauacagc

SEQ ID NO: 123262 - RNA, 18 nt, Human
cggcccccagcccagccc

SEQ ID NO: 123263 - RNA, 17 nt, Human
cggcccccagccucccc

SEQ ID NO: 123264 - RNA, 32 nt, Human
cggcccccaggccucagaguucuggaugcuuc

SEQ ID NO: 123265 - RNA, 32 nt, Human
cggcccccgcagccuagaccucccaggccugu

SEQ ID NO: 123266 - RNA, 21 nt, Human
cggcccccgccuuccgcgccc

SEQ ID NO: 123267 - RNA, 23 nt, Human
cggcccccggccggcccgcgccc

SEQ ID NO: 123268 - RNA, 19 nt, Human
cggcccccgucccccgcca

SEQ ID NO: 123269 - RNA, 32 nt, Human
cggcccccuccccgccucucuccaccgccucc

SEQ ID NO: 123270 - RNA, 32 nt, Human
cggcccccuccccucaccucucccccuccccc

SEQ ID NO: 123271 - RNA, 19 nt, Human
cggcccccuccuccggguu

SEQ ID NO: 123272 - RNA, 32 nt, Human
cggcccccucgccuccccucccugucgcccuu

SEQ ID NO: 123273 - RNA, 32 nt, Human
cggcccccugcucguuggcuguggcagggccg

SEQ ID NO: 123274 - RNA, 32 nt, Human
cggccccgcagauccucguuccuagcugccug

SEQ ID NO: 123275 - RNA, 32 nt, Human
cggccccgcuccaucggcacuaaugccccacu

SEQ ID NO: 123276 - RNA, 32 nt, Human
cggccccgcugcacuccaccuccgcccccucg

SEQ ID NO: 123277 - RNA, 32 nt, Human
cggccccggacacggcccguccccacagacga

SEQ ID NO: 123278 - RNA, 32 nt, Human
cggccccggacagggucugggcccugcucccu

SEQ ID NO: 123279 - RNA, 21 nt, Human
cggccccggccccgccaacgc

SEQ ID NO: 123280 - RNA, 19 nt, Human
cggccccgguccagacuua

SEQ ID NO: 123281 - RNA, 32 nt, Human
cggccccgguccagguggaggccgcagagggc

SEQ ID NO: 123282 - RNA, 32 nt, Human
cggccccucacugccacugccaccccacaacg

SEQ ID NO: 123283 - RNA, 32 nt, Human
cggccccuccaaagucgcgcagcugguucggg

SEQ ID NO: 123284 - RNA, 18 nt, Human
cggccccucccagcacca

SEQ ID NO: 123285 - RNA, 18 nt, Human
cggccccucccgagcuca

SEQ ID NO: 123286 - RNA, 32 nt, Human
cggccccucgaguguagcccaggauccagcac

SEQ ID NO: 123287 - RNA, 21 nt, Human
cggccccucuaucccuccgca

SEQ ID NO: 123288 - RNA, 32 nt, Human
cggccccucuccucagcuugcagagcuggcca

SEQ ID NO: 123289 - RNA, 19 nt, Human
cggccccucucuucauuca

SEQ ID NO: 123290 - RNA, 32 nt, Human
cggccccugagcacuccucucucuccacucuc

SEQ ID NO: 123291 - RNA, 32 nt, Human
cggccccugagugagugcgccuggaggggcgg

SEQ ID NO: 123292 - RNA, 31 nt, Human
cggccccugcaggacgggccugugucgcuau

SEQ ID NO: 123293 - RNA, 32 nt, Human
cggccccugccucuugcugcuguccugucccc

SEQ ID NO: 123294 - RNA, 32 nt, Human
cggccccugccuggccaccuggccucucugca

SEQ ID NO: 123295 - RNA, 32 nt, Human
cggccccugcugcugcucgggcagcugcacca

SEQ ID NO: 123296 - RNA, 32 nt, Human
cggccccugcuucaccaaccgcucggcgcagu

SEQ ID NO: 123297 - RNA, 32 nt, Human
cggccccuggcuugggcgaccauguccgcauc

SEQ ID NO: 123298 - RNA, 20 nt, Human
cggccccuguacagguguca

SEQ ID NO: 123299 - RNA, 32 nt, Human
cggcccgaacuccagaccugagcaugcagaau

SEQ ID NO: 123300 - RNA, 21 nt, Human
cggcccgacgcacccacgccc

SEQ ID NO: 123301 - RNA, 32 nt, Human
cggcccgagccaggaacccagguccggagccu

SEQ ID NO: 123302 - RNA, 32 nt, Human
cggcccgagccgcgguagcggcggcggcggga

SEQ ID NO: 123303 - RNA, 32 nt, Human
cggcccgagccgcggugagcgucguguugcau

SEQ ID NO: 123304 - RNA, 22 nt, Human
cggcccgcagccccccagacgc

SEQ ID NO: 123305 - RNA, 22 nt, Human
cggcccgcaggcacccggcacg

SEQ ID NO: 123306 - RNA, 32 nt, Human
cggcccgcccccuaugggccccggcuagaggc

SEQ ID NO: 123307 - RNA, 32 nt, Human
cggcccgccugcgcuugaggccugucugcguu

SEQ ID NO: 123308 - RNA, 32 nt, Human
cggcccgcgcaggcggcgaguccuccgagccc

SEQ ID NO: 123309 - RNA, 22 nt, Human
cggcccgcucucccgccagcgc

SEQ ID NO: 123310 - RNA, 32 nt, Human
cggcccgcugcagccucugccucuuggguuca

SEQ ID NO: 123311 - RNA, 32 nt, Human
cggcccggagcagcgcggcccgcgccuccgcc

SEQ ID NO: 123312 - RNA, 32 nt, Human
cggcccggagcggagcgcgcccugcccuggcg

SEQ ID NO: 123313 - RNA, 32 nt, Human
cggcccggagcuauggagcggcgcuggccccu

SEQ ID NO: 123314 - RNA, 19 nt, Human
cggcccggagggcgggagg

SEQ ID NO: 123315 - RNA, 32 nt, Human
cggcccggcacaacagcagacugaggccccca

SEQ ID NO: 123316 - RNA, 19 nt, Human
cggcccgggagcgagcgcc

SEQ ID NO: 123317 - RNA, 32 nt, Human
cggcccgggaggcggaggcgcgggggaggagg

SEQ ID NO: 123318 - RNA, 22 nt, Human
cggcccgggcagccccacgccc

SEQ ID NO: 123319 - RNA, 32 nt, Human
cggcccgggccaagccaucgccuacaguucgg

SEQ ID NO: 123320 - RNA, 32 nt, Human
cggcccgggcccgcgguucuccacccguacug

SEQ ID NO: 123321 - RNA, 32 nt, Human
cggcccgggcucuggaggcccccacaccuccc

SEQ ID NO: 123322 - RNA, 32 nt, Human
cggcccggggagaggcaccaugagcggaucac

SEQ ID NO: 123323 - RNA, 32 nt, Human
cggcccggggaggcggggacggugacgggggc

SEQ ID NO: 123324 - RNA, 32 nt, Human
cggcccgggguacuggcauuucccuggggccc

SEQ ID NO: 123325 - RNA, 20 nt, Human
cggcccggugaccgcgcgga

SEQ ID NO: 123326 - RNA, 32 nt, Human
cggcccgucugcaccacccucuccccacaguc

SEQ ID NO: 123327 - RNA, 32 nt, Human
cggcccgugcucaacaccgccugggccacagc

SEQ ID NO: 123328 - RNA, 32 nt, Human
cggcccgugggagaggcugccaucccaccugg

SEQ ID NO: 123329 - RNA, 32 nt, Human
cggcccuaaaggacagcaaggugguggagauc

SEQ ID NO: 123330 - RNA, 32 nt, Human
cggcccucaaacccucucccucucugccugaa

SEQ ID NO: 123331 - RNA, 32 nt, Human
cggcccucaagugcccgggccggccuucgugc

SEQ ID NO: 123332 - RNA, 32 nt, Human
cggcccucaccagguccugggcucggacccaa

SEQ ID NO: 123333 - RNA, 20 nt, Human
cggcccucacccccacgucc

SEQ ID NO: 123334 - RNA, 32 nt, Human
cggcccuccagcuccccuccaguuaccaggag

SEQ ID NO: 123335 - RNA, 26 nt, Human
cggcccuccccccaccccucugcugc

SEQ ID NO: 123336 - RNA, 32 nt, Human
cggcccuccuacucauguucugacccucugug

SEQ ID NO: 123337 - RNA, 32 nt, Human
cggcccuccuuaggaagcccagaaggaccuuu

SEQ ID NO: 123338 - RNA, 19 nt, Human
cggcccucggcgcgggcuc

SEQ ID NO: 123339 - RNA, 32 nt, Human
cggcccugaccacacuguucucugcugguucc

SEQ ID NO: 123340 - RNA, 32 nt, Human
cggcccugagcggcugcagccugcuuugggac

SEQ ID NO: 123341 - RNA, 32 nt, Human
cggcccugaggacaguccugcccauccacgcg

SEQ ID NO: 123342 - RNA, 21 nt, Human
cggcccugauccaggacugca

SEQ ID NO: 123343 - RNA, 32 nt, Human
cggcccugcagggggccagccugggggaaccu

SEQ ID NO: 123344 - RNA, 20 nt, Human
cggcccugcauucuuccgca

SEQ ID NO: 123345 - RNA, 27 nt, Human
cggcccugcccgccccucccuccagca

SEQ ID NO: 123346 - RNA, 32 nt, Human
cggcccugcccuuuuuagaggguccccucggg

SEQ ID NO: 123347 - RNA, 21 nt, Human
cggcccugccgugcgggcuca

SEQ ID NO: 123348 - RNA, 21 nt, Human
cggcccugcgcugcgcgcccg

SEQ ID NO: 123349 - RNA, 32 nt, Human
cggcccugcugucugccuccccggcugauugg

SEQ ID NO: 123350 - RNA, 32 nt, Human
cggcccuggaaccagguggaggggaggcagcc

SEQ ID NO: 123351 - RNA, 32 nt, Human
cggcccugggagcagagguggagcgaccccau

SEQ ID NO: 123352 - RNA, 31 nt, Human
cggcccuggguggaauugauguugggaagau

SEQ ID NO: 123353 - RNA, 24 nt, Human
cggcccugugacggccuccagccc

SEQ ID NO: 123354 - RNA, 32 nt, Human
cggcccuguguugccagauugucugcuuuguc

SEQ ID NO: 123355 - RNA, 21 nt, Human
cggcccuuggcacucuggggu

SEQ ID NO: 123356 - RNA, 21 nt, Human
cggcccuugggguccuccaca

SEQ ID NO: 123357 - RNA, 32 nt, Human
cggcccuugugacuccaaccagccucacaaga

SEQ ID NO: 123358 - RNA, 20 nt, Human
cggcccuuugccuggcuuca

SEQ ID NO: 123359 - RNA, 32 nt, Human
cggccgaaggagaaggaggaagaggagaaggc

SEQ ID NO: 123360 - RNA, 22 nt, Human
cggccgagccccagcucuccga

SEQ ID NO: 123361 - RNA, 32 nt, Human
cggccgagccgcugaagaggagcugggcgccg

SEQ ID NO: 123362 - RNA, 19 nt, Human
cggccgagcuggcccgccc

SEQ ID NO: 123363 - RNA, 32 nt, Human
cggccgaggaggaggaggaugaggaguaugcc

SEQ ID NO: 123364 - RNA, 32 nt, Human
cggccgaggaggaggagggggaagcggcggcg

SEQ ID NO: 123365 - RNA, 32 nt, Human
cggccgaggcggaggcgcaggaagggggcggc

SEQ ID NO: 123366 - RNA, 32 nt, Human
cggccgagggcgcagcgcacacggccagcucc

SEQ ID NO: 123367 - RNA, 32 nt, Human
cggccgaggggagcgcgacagugagcgccggc

SEQ ID NO: 123368 - RNA, 24 nt, Human
cggccgagguguuuucuucacuca

SEQ ID NO: 123369 - RNA, 32 nt, Human
cggccgaugcgaguguguaugugcgggcgaga

SEQ ID NO: 123370 - RNA, 32 nt, Human
cggccgcaaccagcaccaugcgcccgguagcc

SEQ ID NO: 123371 - RNA, 15 nt, Human
cggccgcacaacgga

SEQ ID NO: 123372 - RNA, 31 nt, Human
cggccgcacagcuaaacagcaacccccuacc

SEQ ID NO: 123373 - RNA, 32 nt, Human
cggccgcaccuuguucucggccuucccgccuc

SEQ ID NO: 123374 - RNA, 32 nt, Human
cggccgcagcagauuuuaucaugugggcaacc

SEQ ID NO: 123375 - RNA, 24 nt, Human
cggccgcagcgcagggaagccugg

SEQ ID NO: 123376 - RNA, 32 nt, Human
cggccgcagcggcgcagcugauagcaggaaca

SEQ ID NO: 123377 - RNA, 32 nt, Human
cggccgcaggccgccuccagcgccgcgggaug

SEQ ID NO: 123378 - RNA, 32 nt, Human
cggccgcaguggaggcuggagcuggacuggcg

SEQ ID NO: 123379 - RNA, 32 nt, Human
cggccgccaagcuccgccucccgccccgggcu

SEQ ID NO: 123380 - RNA, 20 nt, Human
cggccgcccacugucagggu

SEQ ID NO: 123381 - RNA, 19 nt, Human
cggccgcccgagccgggag

SEQ ID NO: 123382 - RNA, 32 nt, Human
cggccgcccgccagagugccagugguccuugg

SEQ ID NO: 123383 - RNA, 32 nt, Human
cggccgcccugccucugcccgcuccccgggcg

SEQ ID NO: 123384 - RNA, 32 nt, Human
cggccgcccugccuguggccuccgacagcagc

SEQ ID NO: 123385 - RNA, 32 nt, Human
cggccgccgagccgccgucggggaagauuaau

SEQ ID NO: 123386 - RNA, 27 nt, Human
cggccgccgaguauccucuccggggug

SEQ ID NO: 123387 - RNA, 21 nt, Human
cggccgccgccgaucacagca

SEQ ID NO: 123388 - RNA, 32 nt, Human
cggccgccgggacucuuccuggagacaccgcc

SEQ ID NO: 123389 - RNA, 32 nt, Human
cggccgccucaccucgguuuuugccgccaccu

SEQ ID NO: 123390 - RNA, 32 nt, Human
cggccgccuccaccacauuccccauaucugag

SEQ ID NO: 123391 - RNA, 32 nt, Human
cggccgccuccccucgcccuccuacucucccc

SEQ ID NO: 123392 - RNA, 25 nt, Human
cggccgccugagcccgagccaggag

SEQ ID NO: 123393 - RNA, 32 nt, Human
cggccgccuuccucugcgacagcggcgcagcc

SEQ ID NO: 123394 - RNA, 32 nt, Human
cggccgcgcagcccuggcuccucgcgggcucg

SEQ ID NO: 123395 - RNA, 23 nt, Human
cggccgcgccacccgggcaaggg

SEQ ID NO: 123396 - RNA, 21 nt, Human
cggccgcgcccagcccggcgu

SEQ ID NO: 123397 - RNA, 21 nt, Human
cggccgcgccgggcgccgggg

SEQ ID NO: 123398 - RNA, 32 nt, Human
cggccgcgccucgccccaugcacucgccgcgc

SEQ ID NO: 123399 - RNA, 32 nt, Human
cggccgcgcugcgcaccugcugggugacuugg

SEQ ID NO: 123400 - RNA, 32 nt, Human
cggccgcggaggaggaggaaggggaggagggc

SEQ ID NO: 123401 - RNA, 32 nt, Human
cggccgcggaggcggaagcauccauggcggag

SEQ ID NO: 123402 - RNA, 25 nt, Human
cggccgcggcaggaggcgcuguagc

SEQ ID NO: 123403 - RNA, 32 nt, Human
cggccgcggcgacagcuccagcuccggcuccg

SEQ ID NO: 123404 - RNA, 32 nt, Human
cggccgcgggcccugguucuggaucccucuuc

SEQ ID NO: 123405 - RNA, 32 nt, Human
cggccgcggggaggaggaugggggcuaaccag

SEQ ID NO: 123406 - RNA, 32 nt, Human
cggccgcggggagggggcaugagccggcgccc

SEQ ID NO: 123407 - RNA, 23 nt, Human
cggccgcggggcggaggcacucg

SEQ ID NO: 123408 - RNA, 32 nt, Human
cggccgcggguggggaaaucuggagcucagcc

SEQ ID NO: 123409 - RNA, 32 nt, Human
cggccgcguccuggcagagaaaaggcugaaau

SEQ ID NO: 123410 - RNA, 32 nt, Human
cggccgcucagguucugcuuuuaccugcggcc

SEQ ID NO: 123411 - RNA, 32 nt, Human
cggccgcucccuccccuccucccuugcucacc

SEQ ID NO: 123412 - RNA, 32 nt, Human
cggccgcuccuccccucuccccacccuccucc

SEQ ID NO: 123413 - RNA, 32 nt, Human
cggccgcucugcagccuccuguagacaggcug

SEQ ID NO: 123414 - RNA, 20 nt, Human
cggccgcugcuucuuucaca

SEQ ID NO: 123415 - RNA, 32 nt, Human
cggccgcuggagugcacuggcaugaucucggc

SEQ ID NO: 123416 - RNA, 22 nt, Human
cggccgcugugcggaggccgcg

SEQ ID NO: 123417 - RNA, 32 nt, Human
cggccggacaugcggggcaggcucugguccug

SEQ ID NO: 123418 - RNA, 32 nt, Human
cggccggagguuccauggcagccagacagcac

SEQ ID NO: 123419 - RNA, 32 nt, Human
cggccggaucacaaggccaggagaucgagacc

SEQ ID NO: 123420 - RNA, 32 nt, Human
cggccggcaggcgggggcuggggcccgaggcc

SEQ ID NO: 123421 - RNA, 32 nt, Human
cggccggccaagcaggagggcucuaacuccgu

SEQ ID NO: 123422 - RNA, 32 nt, Human
cggccggcuggcucugccccgcguccgguccc

SEQ ID NO: 123423 - RNA, 32 nt, Human
cggccggcuguaaaccugccacuaggacccgg

SEQ ID NO: 123424 - RNA, 31 nt, Human
cggccgggaagggucaguuggaggcaggcgc

SEQ ID NO: 123425 - RNA, 32 nt, Human
cggccgggagcgcagcccuccgggaggcgggu

SEQ ID NO: 123426 - RNA, 32 nt, Human
cggccgggcagcgccgccaccauguuccuggg

SEQ ID NO: 123427 - RNA, 32 nt, Human
cggccgggcggcgcuccagccucggggcaggu

SEQ ID NO: 123428 - RNA, 32 nt, Human
cggccgggcuagugggagggggcggcggccau

SEQ ID NO: 123429 - RNA, 32 nt, Human
cggccgggcucaguucaggccugggcaccgag

SEQ ID NO: 123430 - RNA, 26 nt, Human
cggccgggcuccgaggggcccuggcu

SEQ ID NO: 123431 - RNA, 32 nt, Human
cggccgggcuugaggccgggccccagacgucc

SEQ ID NO: 123432 - RNA, 32 nt, Human
cggccggggcgaggcagguggccagguccgag

SEQ ID NO: 123433 - RNA, 32 nt, Human
cggccggggcucuguccucagccugguggaca

SEQ ID NO: 123434 - RNA, 32 nt, Human
cggccggguucugccacagcuucccacgugcu

SEQ ID NO: 123435 - RNA, 32 nt, Human
cggccggucccaggcucuggucaucagaagga

SEQ ID NO: 123436 - RNA, 32 nt, Human
cggccgguccucucucagucaggaaaauugca

SEQ ID NO: 123437 - RNA, 32 nt, Human
cggccggugcaauggacuccacugccugcuug

SEQ ID NO: 123438 - RNA, 32 nt, Human
cggccggugucugaggagucggagagccgagg

SEQ ID NO: 123439 - RNA, 32 nt, Human
cggccguaugucuuagagugaggggaaacuga

SEQ ID NO: 123440 - RNA, 32 nt, Human
cggccguccagcuggaaucaaccgauggaggc

SEQ ID NO: 123441 - RNA, 19 nt, Human
cggccguccaguccgugcg

SEQ ID NO: 123442 - RNA, 18 nt, Human
cggccgucguccucuaca

SEQ ID NO: 123443 - RNA, 32 nt, Human
cggccgucuccaucgcugccuucugcaccuuc

SEQ ID NO: 123444 - RNA, 32 nt, Human
cggccgucugcccugcacuaccaaggccgacc

SEQ ID NO: 123445 - RNA, 32 nt, Human
cggccgucuuucucccgacccgcuccgccucc

SEQ ID NO: 123446 - RNA, 32 nt, Human
cggccgugaggaggaggagggaugcaagcuuc

SEQ ID NO: 123447 - RNA, 32 nt, Human
cggccgugcgccgccccaccugggcgagacug

SEQ ID NO: 123448 - RNA, 22 nt, Human
cggccguggcggcggagcccuc

SEQ ID NO: 123449 - RNA, 19 nt, Human
cggccguggcggcgguggc

SEQ ID NO: 123450 - RNA, 22 nt, Human
cggccguggcggugaagcgugg

SEQ ID NO: 123451 - RNA, 32 nt, Human
cggccgugggacuccggcgccgggcggacgaa

SEQ ID NO: 123452 - RNA, 22 nt, Human
cggccgugggcgcagcuucagc

SEQ ID NO: 123453 - RNA, 22 nt, Human
cggccgugguaacuguugauag

SEQ ID NO: 123454 - RNA, 32 nt, Human
cggccgugugugcuggggaagccccaggaaac

SEQ ID NO: 123455 - RNA, 32 nt, Human
cggccguuagcccagccaagcccagccaagcc

SEQ ID NO: 123456 - RNA, 32 nt, Human
cggccuaaaggauggcgcagguccugggcagg

SEQ ID NO: 123457 - RNA, 32 nt, Human
cggccuaaccaggcuggagugcagugguggga

SEQ ID NO: 123458 - RNA, 32 nt, Human
cggccuaaguagcugguuuuauaaggcggcca

SEQ ID NO: 123459 - RNA, 32 nt, Human
cggccuacauggugaaaccccgucucuacuaa

SEQ ID NO: 123460 - RNA, 32 nt, Human
cggccuacccuuggguagucuuucaugugaaa

SEQ ID NO: 123461 - RNA, 32 nt, Human
cggccuacugggcuuccucccuagccagagag

SEQ ID NO: 123462 - RNA, 32 nt, Human
cggccuagaugccucuuggucuggcugaauau

SEQ ID NO: 123463 - RNA, 32 nt, Human
cggccuagcguccuggaauuacuucaaucaac

SEQ ID NO: 123464 - RNA, 32 nt, Human
cggccuaggugccucuuggccuggcugaauau

SEQ ID NO: 123465 - RNA, 32 nt, Human
cggccuaugggggccucacaagccccagccuc

SEQ ID NO: 123466 - RNA, 32 nt, Human
cggccucaagaucagacauggcccagaacuug

SEQ ID NO: 123467 - RNA, 32 nt, Human
cggccucacucucuauggccacccuaagagga

SEQ ID NO: 123468 - RNA, 32 nt, Human
cggccucagaaagccgagugaggaguuggccg

SEQ ID NO: 123469 - RNA, 32 nt, Human
cggccucagagauggcucugaguaaaucaaug

SEQ ID NO: 123470 - RNA, 32 nt, Human
cggccucagccugcaagccaaguguucacagu

SEQ ID NO: 123471 - RNA, 32 nt, Human
cggccuccaaaaugcugggauuacaggcguaa

SEQ ID NO: 123472 - RNA, 22 nt, Human
cggccuccaaagccucccaccc

SEQ ID NO: 123473 - RNA, 32 nt, Human
cggccuccaaagugcugggauugcaggcauga

SEQ ID NO: 123474 - RNA, 32 nt, Human
cggccuccaaagugcugugauuacagguguga

SEQ ID NO: 123475 - RNA, 23 nt, Human
cggccuccacaauagccacaccc

SEQ ID NO: 123476 - RNA, 23 nt, Human
cggccuccacagcaccccacccc

SEQ ID NO: 123477 - RNA, 20 nt, Human
cggccuccaggaccccaccc

SEQ ID NO: 123478 - RNA, 32 nt, Human
cggccuccaggagucucauggaagggacggua

SEQ ID NO: 123479 - RNA, 32 nt, Human
cggccuccaggagugggaguuggaguugaugc

SEQ ID NO: 123480 - RNA, 17 nt, Human
cggccuccaggugcuca

SEQ ID NO: 123481 - RNA, 20 nt, Human
cggccuccagguucccgccc

SEQ ID NO: 123482 - RNA, 32 nt, Human
cggccucccaaaauugcugggauuacaggugu

SEQ ID NO: 123483 - RNA, 32 nt, Human
cggccucccaaagaacugggauuacaggcaug

SEQ ID NO: 123484 - RNA, 32 nt, Human
cggccucccaaagugcuggauuacaggcguga

SEQ ID NO: 123485 - RNA, 32 nt, Human
cggccucccaaagugcuggauuacagguguga

SEQ ID NO: 123486 - RNA, 32 nt, Human
cggccucccaagugcugggauuacaggcguga

SEQ ID NO: 123487 - RNA, 23 nt, Human
cggccucccaccuggggcauuua

SEQ ID NO: 123488 - RNA, 32 nt, Human
cggccucccaggaagugcugggauuacaggca

SEQ ID NO: 123489 - RNA, 32 nt, Human
cggccuccccaaagugcugggauuacagguac

SEQ ID NO: 123490 - RNA, 32 nt, Human
cggccuccccacuggguccuggaccuggcgca

SEQ ID NO: 123491 - RNA, 32 nt, Human
cggccucccccgacuccugggugugggagcag

SEQ ID NO: 123492 - RNA, 22 nt, Human
cggccucccccggcucccgccc

SEQ ID NO: 123493 - RNA, 32 nt, Human
cggccuccccucacuuccuccugguggucccg

SEQ ID NO: 123494 - RNA, 32 nt, Human
cggccucccgcaaagacuuuuccccagaccuc

SEQ ID NO: 123495 - RNA, 21 nt, Human
cggccucccgcacccgcaccc

SEQ ID NO: 123496 - RNA, 21 nt, Human
cggccucccgcagccuggcca

SEQ ID NO: 123497 - RNA, 32 nt, Human
cggccucccucggcgcugacaggcugggccgg

SEQ ID NO: 123498 - RNA, 32 nt, Human
cggccucccucgggcccgagcgcagaccaggc

SEQ ID NO: 123499 - RNA, 23 nt, Human
cggccuccgccacagccacagcc

SEQ ID NO: 123500 - RNA, 23 nt, Human
cggccuccgcccuggucccgccc

SEQ ID NO: 123501 - RNA, 23 nt, Human
cggccuccgccgaccgcgcgcuc

SEQ ID NO: 123502 - RNA, 20 nt, Human
cggccuccgccugcacgccc

SEQ ID NO: 123503 - RNA, 18 nt, Human
cggccuccgcggcccagc

SEQ ID NO: 123504 - RNA, 21 nt, Human
cggccuccgcggcgccgccuc

SEQ ID NO: 123505 - RNA, 32 nt, Human
cggccuccuccaccggcuccagguccgacacg

SEQ ID NO: 123506 - RNA, 32 nt, Human
cggccuccuccuccuccccguucccuucaccc

SEQ ID NO: 123507 - RNA, 32 nt, Human
cggccuccuccuguagccccugccugcaccca

SEQ ID NO: 123508 - RNA, 32 nt, Human
cggccuccucuccgggcccagcucuuugcucg

SEQ ID NO: 123509 - RNA, 32 nt, Human
cggccuccuggaggaggguuggauaccugugg

SEQ ID NO: 123510 - RNA, 32 nt, Human
cggccucgacccccguucccagccuggagccc

SEQ ID NO: 123511 - RNA, 32 nt, Human
cggccucgcuugaaggagggcgucgccggaaa

SEQ ID NO: 123512 - RNA, 27 nt, Human
cggccucgggcccaaaggaaccaaagg

SEQ ID NO: 123513 - RNA, 32 nt, Human
cggccucggucaccauacgcuacaggcauccu

SEQ ID NO: 123514 - RNA, 32 nt, Human
cggccucgguguuaaaggcagggccaccuacc

SEQ ID NO: 123515 - RNA, 32 nt, Human
cggccucuccacccucagcccccugcuucagu

SEQ ID NO: 123516 - RNA, 32 nt, Human
cggccucuccaccucucacccacucucuccua

SEQ ID NO: 123517 - RNA, 32 nt, Human
cggccucuccccaaccagcccagcuucuccuu

SEQ ID NO: 123518 - RNA, 20 nt, Human
cggccucucccgccgccuca

SEQ ID NO: 123519 - RNA, 32 nt, Human
cggccucuccgccucuuggccuaggaggcucg

SEQ ID NO: 123520 - RNA, 32 nt, Human
cggccucuccgcugucuggagggaaggggauu

SEQ ID NO: 123521 - RNA, 20 nt, Human
cggccucucgacucccgccc

SEQ ID NO: 123522 - RNA, 32 nt, Human
cggccucucucuuccucgguggggccuagacg

SEQ ID NO: 123523 - RNA, 22 nt, Human
cggccucucuggccucccaccc

SEQ ID NO: 123524 - RNA, 25 nt, Human
cggccucugagcccaagccaagcca

SEQ ID NO: 123525 - RNA, 32 nt, Human
cggccucugcaggaucugcagcuguggaaggc

SEQ ID NO: 123526 - RNA, 32 nt, Human
cggccucugccucugucccccagugaucggau

SEQ ID NO: 123527 - RNA, 20 nt, Human
cggccucugcugccaggcca

SEQ ID NO: 123528 - RNA, 32 nt, Human
cggccucugcugcccccuuccccagcccuuag

SEQ ID NO: 123529 - RNA, 32 nt, Human
cggccucuggacugccaggcuggguuggggac

SEQ ID NO: 123530 - RNA, 32 nt, Human
cggccucuggagcugggauuugggaggacaca

SEQ ID NO: 123531 - RNA, 32 nt, Human
cggccucugggaggcucugaggcaacaguggg

SEQ ID NO: 123532 - RNA, 32 nt, Human
cggccugaaagccaccaggggcuggcagcagu

SEQ ID NO: 123533 - RNA, 32 nt, Human
cggccugaagcaugggggccaggcugucaacu

SEQ ID NO: 123534 - RNA, 19 nt, Human
cggccugaaugaucuccau

SEQ ID NO: 123535 - RNA, 22 nt, Human
cggccugagauauuuuucuaca

SEQ ID NO: 123536 - RNA, 32 nt, Human
cggccugaguggagacgccugcccccagcccc

SEQ ID NO: 123537 - RNA, 21 nt, Human
cggccugaugacagagcgaga

SEQ ID NO: 123538 - RNA, 32 nt, Human
cggccugcagagcccaugagagggagaagcgg

SEQ ID NO: 123539 - RNA, 32 nt, Human
cggccugccaugaccugcagccaagcccagcc

SEQ ID NO: 123540 - RNA, 19 nt, Human
cggccugccguccuuccac

SEQ ID NO: 123541 - RNA, 32 nt, Human
cggccugccuaguggaccagagccuucgucug

SEQ ID NO: 123542 - RNA, 32 nt, Human
cggccugccucccaccuggaagucugggaaug

SEQ ID NO: 123543 - RNA, 32 nt, Human
cggccugccugccugccugccugccucuccac

SEQ ID NO: 123544 - RNA, 32 nt, Human
cggccugcgagagccucagugggagccggcuc

SEQ ID NO: 123545 - RNA, 18 nt, Human
cggccugcgagcccugcc

SEQ ID NO: 123546 - RNA, 22 nt, Human
cggccugcucccagaucggcga

SEQ ID NO: 123547 - RNA, 32 nt, Human
cggccuggagaggacaagggaauaagaccacu

SEQ ID NO: 123548 - RNA, 23 nt, Human
cgguggcucacaccuguaauccc

SEQ ID NO: 123549 - RNA, 24 nt, Human
cgguggcucacaccuguaauccca

SEQ ID NO: 123550 - RNA, 32 nt, Human
cgguggcucacaccuguaaucccagcccuuug

SEQ ID NO: 123551 - RNA, 24 nt, Human
cgguggcucacaccuguaaucuca

SEQ ID NO: 123552 - RNA, 24 nt, Human
cgguggcucacaccugucauccca

SEQ ID NO: 123553 - RNA, 24 nt, Human
cgguggcucacaccugugauccca

SEQ ID NO: 123554 - RNA, 23 nt, Human
cgguggcucacaccuuaauccca

SEQ ID NO: 123555 - RNA, 32 nt, Human
cgguggcucacacgccuguaaucccagcacuu

SEQ ID NO: 123556 - RNA, 24 nt, Human
cgguggcucacacuuguaauccca

SEQ ID NO: 123557 - RNA, 24 nt, Human
cgguggcucaccccuguaauccca

SEQ ID NO: 123558 - RNA, 24 nt, Human
cgguggcucacgcauguaauccca

SEQ ID NO: 123559 - RNA, 21 nt, Human
cgguggcucacgccaguaauc

SEQ ID NO: 123560 - RNA, 21 nt, Human
cgguggcucacgccgguaauc

SEQ ID NO: 123561 - RNA, 21 nt, Human
cgguggcucacgccuauaauc

SEQ ID NO: 123562 - RNA, 24 nt, Human
cgguggcucacgccuauaauccca

SEQ ID NO: 123563 - RNA, 24 nt, Human
cgguggcucacgccuauaauccua

SEQ ID NO: 123564 - RNA, 24 nt, Human
cgguggcucacgccuauaaucuca

SEQ ID NO: 123565 - RNA, 24 nt, Human
cgguggcucacgccugcaaucuca

SEQ ID NO: 123566 - RNA, 24 nt, Human
cgguggcucacgccuguaacccca

SEQ ID NO: 123567 - RNA, 24 nt, Human
cgguggcucacgccuguaaccuca

SEQ ID NO: 123568 - RNA, 21 nt, Human
cgguggcucacgccuguaauc

SEQ ID NO: 123569 - RNA, 23 nt, Human
cgguggcucacgccuguaauccc

SEQ ID NO: 123570 - RNA, 24 nt, Human
cgguggcucacgccuguaauccca

SEQ ID NO: 123571 - RNA, 24 nt, Human
cgguggcucacgccuguaaucgca

SEQ ID NO: 123572 - RNA, 24 nt, Human
cgguggcucacgccuguaaucuca

SEQ ID NO: 123573 - RNA, 21 nt, Human
cgguggcucacgccuguaauu

SEQ ID NO: 123574 - RNA, 24 nt, Human
cgguggcucacgccugucauccca

SEQ ID NO: 123575 - RNA, 24 nt, Human
cgguggcucacgccugugauccca

SEQ ID NO: 123576 - RNA, 24 nt, Human
cgguggcucacgccuguuauccca

SEQ ID NO: 123577 - RNA, 24 nt, Human
cgguggcucacgcuugcaauccca

SEQ ID NO: 123578 - RNA, 24 nt, Human
cgguggcucacgcuuguaauccca

SEQ ID NO: 123579 - RNA, 24 nt, Human
cgguggcucacgucuauaauccca

SEQ ID NO: 123580 - RNA, 21 nt, Human
cgguggcucacgucuguaauc

SEQ ID NO: 123581 - RNA, 24 nt, Human
cgguggcucacuccuguaauccca

SEQ ID NO: 123582 - RNA, 24 nt, Human
cgguggcucaggccuauaacccca

SEQ ID NO: 123583 - RNA, 21 nt, Human
cgguggcucaggccuguaauc

SEQ ID NO: 123584 - RNA, 24 nt, Human
cgguggcucauaccuauaauccua

SEQ ID NO: 123585 - RNA, 21 nt, Human
cgguggcucauaccuguaauc

SEQ ID NO: 123586 - RNA, 24 nt, Human
cgguggcucauaccuguaauccca

SEQ ID NO: 123587 - RNA, 32 nt, Human
cgguggcucauaccuguaaucccagcacuuug

SEQ ID NO: 123588 - RNA, 32 nt, Human
cgguggcucauaccuguaaucccagcauuugg

SEQ ID NO: 123589 - RNA, 24 nt, Human
cgguggcucaucccuguaauccca

SEQ ID NO: 123590 - RNA, 24 nt, Human
cgguggcucaugcacguaauccca

SEQ ID NO: 123591 - RNA, 21 nt, Human
cgguggcucaugccuauaauc

SEQ ID NO: 123592 - RNA, 24 nt, Human
cgguggcucaugccuauaauccca

SEQ ID NO: 123593 - RNA, 24 nt, Human
cgguggcucaugccuauaauccua

SEQ ID NO: 123594 - RNA, 21 nt, Human
cgguggcucaugccuauaauu

SEQ ID NO: 123595 - RNA, 24 nt, Human
cgguggcucaugccuauaauucca

SEQ ID NO: 123596 - RNA, 24 nt, Human
cgguggcucaugccucuaauccca

SEQ ID NO: 123597 - RNA, 32 nt, Human
cgguggcucaugccugaaauucuagcaguuug

SEQ ID NO: 123598 - RNA, 24 nt, Human
cgguggcucaugccuguaacccca

SEQ ID NO: 123599 - RNA, 21 nt, Human
cgguggcucaugccuguaauc

SEQ ID NO: 123600 - RNA, 23 nt, Human
cgguggcucaugccuguaauccc

SEQ ID NO: 123601 - RNA, 24 nt, Human
cgguggcucaugccuguaauccca

SEQ ID NO: 123602 - RNA, 24 nt, Human
cgguggcucaugccuguaaucuca

SEQ ID NO: 123603 - RNA, 21 nt, Human
cgguggcucaugccuguaguc

SEQ ID NO: 123604 - RNA, 24 nt, Human
cgguggcucaugccugugauccca

SEQ ID NO: 123605 - RNA, 24 nt, Human
cgguggcucaugcuuguaauccca

SEQ ID NO: 123606 - RNA, 32 nt, Human
cgguggcuccuccgggcuucugaggacccgca

SEQ ID NO: 123607 - RNA, 24 nt, Human
cgguggcucgugccuguaauccca

SEQ ID NO: 123608 - RNA, 24 nt, Human
cgguggcucucgccuguaauccca

SEQ ID NO: 123609 - RNA, 24 nt, Human
cgguggcucuugccuguaauccca

SEQ ID NO: 123610 - RNA, 32 nt, Human
cgguggcuggcagcacgccugccuugcucugc

SEQ ID NO: 123611 - RNA, 32 nt, Human
cgguggcugggaggguagugacuggggacaca

SEQ ID NO: 123612 - RNA, 21 nt, Human
cgguggcuuacaccuguaauc

SEQ ID NO: 123613 - RNA, 21 nt, Human
cgguggcuuacgccuguaauc

SEQ ID NO: 123614 - RNA, 32 nt, Human
cgguggcuucuguaaucccaggacuuugggag

SEQ ID NO: 123615 - RNA, 32 nt, Human
cggugggaggcugcggaccauggggacucagc

SEQ ID NO: 123616 - RNA, 32 nt, Human
cggugggaggcuggugaaggggagcggggagg

SEQ ID NO: 123617 - RNA, 32 nt, Human
cggugggaggggcaggagagaaaaccacuuag

SEQ ID NO: 123618 - RNA, 32 nt, Human
cggugggaucucugcugccagcucucccagcc

SEQ ID NO: 123619 - RNA, 24 nt, Human
cggugggaugacagaacaaacaua

SEQ ID NO: 123620 - RNA, 32 nt, Human
cggugggcauuacuauuuccaccauccucaug

SEQ ID NO: 123621 - RNA, 32 nt, Human
cggugggccuagcccuacuagucucaaucucc

SEQ ID NO: 123622 - RNA, 16 nt, Human
cggugggcggggccag

SEQ ID NO: 123623 - RNA, 32 nt, Human
cgguggggacacagcacagaccccaaagccag

SEQ ID NO: 123624 - RNA, 32 nt, Human
cgguggggagagauggacaguucacacccugc

SEQ ID NO: 123625 - RNA, 32 nt, Human
cgguggggaggcaagagggcggcgaggaggug

SEQ ID NO: 123626 - RNA, 32 nt, Human
cgguggggcaguggagguugaggagaauguau

SEQ ID NO: 123627 - RNA, 32 nt, Human
cggugggggaggcaggcgguggugacaggaca

SEQ ID NO: 123628 - RNA, 24 nt, Human
cggugggggcaucuggccuggcca

SEQ ID NO: 123629 - RNA, 32 nt, Human
cgguggguaaaggaugugggcagcagcaggga

SEQ ID NO: 123630 - RNA, 32 nt, Human
cggugggugcagcuggcucgcgccuccucucc

SEQ ID NO: 123631 - RNA, 32 nt, Human
cggugggugcugccaugacagaggcugcaccc

SEQ ID NO: 123632 - RNA, 32 nt, Human
cggugguauguuaguguuuccaggcaguuguc

SEQ ID NO: 123633 - RNA, 32 nt, Human
cggugguccaacucaggaucucagccucauua

SEQ ID NO: 123634 - RNA, 32 nt, Human
cggugguccuagggaccccauggccaugguug

SEQ ID NO: 123635 - RNA, 18 nt, Human
cgguggucgagccaggga

SEQ ID NO: 123636 - RNA, 32 nt, Human
cgguggugagccuucuccauggcaggacagua

SEQ ID NO: 123637 - RNA, 32 nt, Human
cgguggugcaccuccuuccagcagugacccag

SEQ ID NO: 123638 - RNA, 24 nt, Human
cgguggugcaugccuguaauccca

SEQ ID NO: 123639 - RNA, 32 nt, Human
cgguggugcuccugaauguggcugaccugggc

SEQ ID NO: 123640 - RNA, 32 nt, Human
cgguggugucugcuucaccucccucuccacug

SEQ ID NO: 123641 - RNA, 21 nt, Human
cggugguucacaccuguaauc

SEQ ID NO: 123642 - RNA, 21 nt, Human
cggugguucacgccuguaauc

SEQ ID NO: 123643 - RNA, 24 nt, Human
cggugguucacgccuguaauccca

SEQ ID NO: 123644 - RNA, 24 nt, Human
cggugguucaugccuauaauccca

SEQ ID NO: 123645 - RNA, 24 nt, Human
cggugguucaugccuguaauccca

SEQ ID NO: 123646 - RNA, 32 nt, Human
cgguguaauuuauuuuucuuccuuaauugccc

SEQ ID NO: 123647 - RNA, 32 nt, Human
cgguguacacagaggcgggucuauaacaggca

SEQ ID NO: 123648 - RNA, 32 nt, Human
cgguguaugugcugggaugggagcccccugag

SEQ ID NO: 123649 - RNA, 32 nt, Human
cggugucacccaggguggaauacaguggugug

SEQ ID NO: 123650 - RNA, 32 nt, Human
cggugucacugcacuccagccugggugacagu

SEQ ID NO: 123651 - RNA, 32 nt, Human
cgguguccagggacucaagaccuguaccuggg

SEQ ID NO: 123652 - RNA, 32 nt, Human
cggugucccaggcagaaaggugcagagaccca

SEQ ID NO: 123653 - RNA, 32 nt, Human
cgguguccuguggagcugccgccauggccccg

SEQ ID NO: 123654 - RNA, 32 nt, Human
cggugucgccgccaccaccaccaucggaguca

SEQ ID NO: 123655 - RNA, 32 nt, Human
cggugucgcgccgccuccacgcucgacauccu

SEQ ID NO: 123656 - RNA, 32 nt, Human
cggugucgcggguggggagaccccgaggugcu

SEQ ID NO: 123657 - RNA, 24 nt, Human
cggugucucacaccuguaauccca

SEQ ID NO: 123658 - RNA, 23 nt, Human
cggugucuccacggugcucucgc

SEQ ID NO: 123659 - RNA, 18 nt, Human
cggugucuccuugcaucc

SEQ ID NO: 123660 - RNA, 32 nt, Human
cggugucugaggguugagguugcaguccugga

SEQ ID NO: 123661 - RNA, 29 nt, Human
cggugucugcugcuauucuccgagcuucg

SEQ ID NO: 123662 - RNA, 32 nt, Human
cggugucugcugcugcuguccgagcuucacaa

SEQ ID NO: 123663 - RNA, 32 nt, Human
cggugugaaccuugguuggaccccaaguucac

SEQ ID NO: 123664 - RNA, 32 nt, Human
cggugugacaacaugcaccaccaguggcuucu

SEQ ID NO: 123665 - RNA, 32 nt, Human
cggugugaccccgacaagaagcagaaaugggg

SEQ ID NO: 123666 - RNA, 32 nt, Human
cggugugcaagccccucgucucccgggagcag

SEQ ID NO: 123667 - RNA, 32 nt, Human
cggugugcucugauugguccaggcucuuugac

SEQ ID NO: 123668 - RNA, 32 nt, Human
cggugugcuguagcuccagccgggaugaggac

SEQ ID NO: 123669 - RNA, 32 nt, Human
cggugugcuguuggccaggacugugcuggcac

SEQ ID NO: 123670 - RNA, 32 nt, Human
cgguguggccagagccucagcuggaugagagg

SEQ ID NO: 123671 - RNA, 32 nt, Human
cgguguggcuggcggcccugccugggcgcgga

SEQ ID NO: 123672 - RNA, 32 nt, Human
cgguguggggcugagcugaguccagggagugc

SEQ ID NO: 123673 - RNA, 32 nt, Human
cgguguguaggcagugagggggagguuccagg

SEQ ID NO: 123674 - RNA, 32 nt, Human
cgguguguccgcugccccguugccuaucacag

SEQ ID NO: 123675 - RNA, 32 nt, Human
cgguguugcaguguccauuguggagaagcuuu

SEQ ID NO: 123676 - RNA, 32 nt, Human
cgguguugccaccaugcaccauggcaugccag

SEQ ID NO: 123677 - RNA, 31 nt, Human
cgguguugcuuaucugcaugccaaaggacca

SEQ ID NO: 123678 - RNA, 21 nt, Human
cgguguugggcagcaacagca

SEQ ID NO: 123679 - RNA, 32 nt, Human
cgguguuuauggaguuugggccgcccaaccag

SEQ ID NO: 123680 - RNA, 32 nt, Human
cgguguuucccaagaauucugggcuggcggcc

SEQ ID NO: 123681 - RNA, 32 nt, Human
cgguguuucuuauguguucccuaaaacaauac

SEQ ID NO: 123682 - RNA, 32 nt, Human
cgguuaagcaagaaaauauucuuaugugccac

SEQ ID NO: 123683 - RNA, 31 nt, Human
cgguuacaguuucguuuuuccucccaugguu

SEQ ID NO: 123684 - RNA, 32 nt, Human
cgguuacauuguggcugguuucuugaacacau

SEQ ID NO: 123685 - RNA, 32 nt, Human
cgguuacuaagcucugccuucuugacugugga

SEQ ID NO: 123686 - RNA, 32 nt, Human
cgguuacucgggaggcugagacaggagaaucg

SEQ ID NO: 123687 - RNA, 32 nt, Human
cgguuacugagcacuuacuaagugccaagcau

SEQ ID NO: 123688 - RNA, 32 nt, Human
cgguuagguccgcacuccucagccucucccgg

SEQ ID NO: 123689 - RNA, 32 nt, Human
cgguuaguuuaauaacucugggaugaaaaugu

SEQ ID NO: 123690 - RNA, 32 nt, Human
cgguuaugaaggcaggggcucaguggccgggu

SEQ ID NO: 123691 - RNA, 32 nt, Human
cgguucaaauuccaaaccuaccaucuucaguu

SEQ ID NO: 123692 - RNA, 32 nt, Human
cgguucaacccuaccagcuugugguaacuuac

SEQ ID NO: 123693 - RNA, 32 nt, Human
cgguucaagagauggggugaagggugguucac

SEQ ID NO: 123694 - RNA, 32 nt, Human
cgguucacagaccgcacauccccaggcugagc

SEQ ID NO: 123695 - RNA, 32 nt, Human
cgguucaccgcaaccuccacaucccagguuca

SEQ ID NO: 123696 - RNA, 32 nt, Human
cgguucacuacaaccuccgccuccugggucca

SEQ ID NO: 123697 - RNA, 32 nt, Human
cgguucacugcaacauucaccucccagguuca

SEQ ID NO: 123698 - RNA, 32 nt, Human
cgguucacugcaaccuccaccucccgaguuca

SEQ ID NO: 123699 - RNA, 32 nt, Human
cgguucacugcaaccuccaccucucagauuca

SEQ ID NO: 123700 - RNA, 32 nt, Human
cgguucacugcaaccuccgccuccagguucaa

SEQ ID NO: 123701 - RNA, 32 nt, Human
cgguucacugcaaccuccgccucccgguucag

SEQ ID NO: 123702 - RNA, 32 nt, Human
cgguucacugcaaccucugccacccauguuca

SEQ ID NO: 123703 - RNA, 32 nt, Human
cgguucacugcaaccucugccucccaggauca

SEQ ID NO: 123704 - RNA, 32 nt, Human
cgguucacugcaaccucugccucccagguuca

SEQ ID NO: 123705 - RNA, 32 nt, Human
cgguucacugcaaccucugccuccuggguuca

SEQ ID NO: 123706 - RNA, 32 nt, Human
cgguucacugcaaccucugccucucagguuca

SEQ ID NO: 123707 - RNA, 32 nt, Human
cgguucacugcaaccuuggccuccuagguuca

SEQ ID NO: 123708 - RNA, 32 nt, Human
cgguucacugcagccuccaccucccgagcaca

SEQ ID NO: 123709 - RNA, 32 nt, Human
cgguucacuucaaccucaaccucccaggcuca

SEQ ID NO: 123710 - RNA, 32 nt, Human
cgguucaugccuguaaucccaguacuuuggaa

SEQ ID NO: 123711 - RNA, 32 nt, Human
cgguucaugccuguaaucccaguacuuuggga

SEQ ID NO: 123712 - RNA, 32 nt, Human
cgguucauugcaaccuccgccucccgaguuca

SEQ ID NO: 123713 - RNA, 32 nt, Human
cgguucauugcaaccuccgccuccugcguucg

SEQ ID NO: 123714 - RNA, 32 nt, Human
cgguuccagaccccucgguggcccaggugcug

SEQ ID NO: 123715 - RNA, 32 nt, Human
cgguuccagcuacucaagaggcugaggcagga

SEQ ID NO: 123716 - RNA, 32 nt, Human
cgguuccaggagaacuguuugugccccuugcc

SEQ ID NO: 123717 - RNA, 21 nt, Human
cgguuccagggugucccgcac

SEQ ID NO: 123718 - RNA, 32 nt, Human
cgguuccagucuucccuuuaaaagccuguggc

SEQ ID NO: 123719 - RNA, 32 nt, Human
cgguuccauguuuucccaccagccuguugggc

SEQ ID NO: 123720 - RNA, 22 nt, Human
cgguuccccggccacgacucug

SEQ ID NO: 123721 - RNA, 32 nt, Human
cgguuccccuggaagaauuaaguagcuggcca

SEQ ID NO: 123722 - RNA, 32 nt, Human
cgguucccgcccgugccucucccuccacaccu

SEQ ID NO: 123723 - RNA, 32 nt, Human
cgguucccuccccgauggucuaccucgaaggg

SEQ ID NO: 123724 - RNA, 32 nt, Human
cgguuccgccuguaaucccagcacuuugggag

SEQ ID NO: 123725 - RNA, 32 nt, Human
cgguuccgggcucucccuucgcuccaagccuc

SEQ ID NO: 123726 - RNA, 32 nt, Human
cgguuccugcagcggugcccggcagccuuggu

SEQ ID NO: 123727 - RNA, 32 nt, Human
cgguuccuucagagcaaacagcagggagaugc

SEQ ID NO: 123728 - RNA, 32 nt, Human
cgguucgcuaugccgggaccacugugaacccu

SEQ ID NO: 123729 - RNA, 31 nt, Human
cgguucggcggcucugggcgcuguuguuugg

SEQ ID NO: 123730 - RNA, 31 nt, Human
cgguucucaagauguaacacagcagaaaagu

SEQ ID NO: 123731 - RNA, 32 nt, Human
cgguucuccagcccggacugcugccagaggcu

SEQ ID NO: 123732 - RNA, 32 nt, Human
cgguucuccagcucacccccagccugccgaug

SEQ ID NO: 123733 - RNA, 32 nt, Human
cgguucuccuccaccuggacaggaugagccag

SEQ ID NO: 123734 - RNA, 32 nt, Human
cgguucucuggggucuccucuccucugagcag

SEQ ID NO: 123735 - RNA, 32 nt, Human
cgguucuguuucuccccuuggcugccuguacg

SEQ ID NO: 123736 - RNA, 19 nt, Human
cgguucuuucuucuucaca

SEQ ID NO: 123737 - RNA, 32 nt, Human
cgguugaacgcugggagaaugcugggagccug

SEQ ID NO: 123738 - RNA, 32 nt, Human
cgguugacccugacacacaagcagaaagugag

SEQ ID NO: 123739 - RNA, 32 nt, Human
cgguugacugagaccggucuguggcugugggc

SEQ ID NO: 123740 - RNA, 32 nt, Human
cgguugagggucuccaggguucuuuggggccc

SEQ ID NO: 123741 - RNA, 32 nt, Human
cgguugauuugacucagucauggcagucaguu

SEQ ID NO: 123742 - RNA, 32 nt, Human
cgguugcaggcguuggugccucugucagcguc

SEQ ID NO: 123743 - RNA, 32 nt, Human
cgguugcaguaagccaagacuaugccacugca

SEQ ID NO: 123744 - RNA, 32 nt, Human
cgguugccaggaaggggugagcacagagugcc

SEQ ID NO: 123745 - RNA, 18 nt, Human
cgguugcccggccgggga

SEQ ID NO: 123746 - RNA, 32 nt, Human
cgguugccuacucugcugucugggugaccccc

SEQ ID NO: 123747 - RNA, 21 nt, Human
cgguugcucacgccuguaauc

SEQ ID NO: 123748 - RNA, 24 nt, Human
cgguugcucacgccuguaauccca

SEQ ID NO: 123749 - RNA, 32 nt, Human
cgguugcucucaaacuccugaccucaggugau

SEQ ID NO: 123750 - RNA, 32 nt, Human
cgguugcugcuugcugugagugucucuagggu

SEQ ID NO: 123751 - RNA, 32 nt, Human
cgguugcugguucugacggguuguagucugcc

SEQ ID NO: 123752 - RNA, 19 nt, Human
cgguuggccccgggccagg

SEQ ID NO: 123753 - RNA, 32 nt, Human
cgguuggcugguaaacagcuuauucugauaca

SEQ ID NO: 123754 - RNA, 32 nt, Human
cgguugggggaggcagagguggcacuggaggc

SEQ ID NO: 123755 - RNA, 32 nt, Human
cgguuggugcugaccucaaaugcagcccuaga

SEQ ID NO: 123756 - RNA, 32 nt, Human
cgguugucacagcucagcaggguggcugauga

SEQ ID NO: 123757 - RNA, 32 nt, Human
cgguuguggcauccuugaucucagggaucuuc

SEQ ID NO: 123758 - RNA, 32 nt, Human
cgguuguucccuaccaugccucugcaggcauu

SEQ ID NO: 123759 - RNA, 18 nt, Human
cgguuguuucuuucuuuc

SEQ ID NO: 123760 - RNA, 21 nt, Human
cgguuguuuuucuuuuauuua

SEQ ID NO: 123761 - RNA, 32 nt, Human
cgguuucacccuccaacuucugaccgcugagc

SEQ ID NO: 123762 - RNA, 22 nt, Human
cgguuucccauuugucuggcca

SEQ ID NO: 123763 - RNA, 32 nt, Human
cgguuuccuggugugggucccucugccccacc

SEQ ID NO: 123764 - RNA, 32 nt, Human
cgguuucucuacugcuggacuuuucagagucu

SEQ ID NO: 123765 - RNA, 32 nt, Human
cgguuucugcauucaacuaccuuguaaauggu

SEQ ID NO: 123766 - RNA, 32 nt, Human
cgguuucuguccuugguucuguccuccuuagc

SEQ ID NO: 123767 - RNA, 32 nt, Human
cgguuucuuggcugucagucagucccagagug

SEQ ID NO: 123768 - RNA, 32 nt, Human
cgguuugcagagcuaggagguggcaggcugug

SEQ ID NO: 123769 - RNA, 32 nt, Human
cgguuugccacaucggccgagggcaggagugg

SEQ ID NO: 123770 - RNA, 32 nt, Human
cgguuuggaaucugcuuugcucucacaggacc

SEQ ID NO: 123771 - RNA, 32 nt, Human
cgguuuggagcuuucgagagcuucuggucuug

SEQ ID NO: 123772 - RNA, 32 nt, Human
cgguuuuaguuuuaauggacaugggaggagcc

SEQ ID NO: 123773 - RNA, 32 nt, Human
cgguuuucauuucuuuucuaaacuauuuccag

SEQ ID NO: 123774 - RNA, 32 nt, Human
cgguuuucauuugcuucagcuuacuaagaagc

SEQ ID NO: 123775 - RNA, 19 nt, Human
cgguuuugagcuuucuaua

SEQ ID NO: 123776 - RNA, 20 nt, Human
cgguuuugccaacgcaugcc

SEQ ID NO: 123777 - RNA, 22 nt, Human
cgguuuugggcagcccuggcca

SEQ ID NO: 123778 - RNA, 32 nt, Human
cgguuuuguguauguguguaugugugugcgug

SEQ ID NO: 123779 - RNA, 32 nt, Human
cgguuuuguugugugaacaucacagaguguua

SEQ ID NO: 123780 - RNA, 32 nt, Human
cguaaaaacuuccagcacauugggguggaggg

SEQ ID NO: 123781 - RNA, 32 nt, Human
cguaaaacacauacacaugcaugugcacacac

SEQ ID NO: 123782 - RNA, 32 nt, Human
cguaaaaccccugacccauucuggauuuuuac

SEQ ID NO: 123783 - RNA, 32 nt, Human
cguaaaauagaagagcagucacuguggaacua

SEQ ID NO: 123784 - RNA, 32 nt, Human
cguaaacccaggagguggauugcgccacugca

SEQ ID NO: 123785 - RNA, 32 nt, Human
cguaaacccgggaggcggagcuugcagugagc

SEQ ID NO: 123786 - RNA, 32 nt, Human
cguaaaccugggaggcggagcuugcagugagc

SEQ ID NO: 123787 - RNA, 32 nt, Human
cguaaacuuccuaaugauuagcacuuaauaau

SEQ ID NO: 123788 - RNA, 32 nt, Human
cguaaagcagcccugcagccucugccucucuc

SEQ ID NO: 123789 - RNA, 32 nt, Human
cguaaagcaugcuggcgucucaaggaguucuc

SEQ ID NO: 123790 - RNA, 32 nt, Human
cguaaaggagccgggugacuucagaggcgccg

SEQ ID NO: 123791 - RNA, 32 nt, Human
cguaaaguuuuauacagaagagagaagagcau

SEQ ID NO: 123792 - RNA, 30 nt, Human
cguaaaugagcagacuggugccuccagagc

SEQ ID NO: 123793 - RNA, 32 nt, Human
cguaaauuuaaacuuugagcacccacaguggg

SEQ ID NO: 123794 - RNA, 32 nt, Human
cguaacauggaggccucagcugcucugaggag

SEQ ID NO: 123795 - RNA, 32 nt, Human
cguaaccaaauuuucaggcuuguugcaguuaa

SEQ ID NO: 123796 - RNA, 32 nt, Human
cguaaccacugcacaucaccuccaucucugca

SEQ ID NO: 123797 - RNA, 32 nt, Human
cguaaccagagacgcugggauuaguggguggg

SEQ ID NO: 123798 - RNA, 32 nt, Human
cguaaccaggagacaaggcggccauggauuug

SEQ ID NO: 123799 - RNA, 32 nt, Human
cguaacccuuagucccaaugccuccguaagcg

SEQ ID NO: 123800 - RNA, 32 nt, Human
cguaagagaaccucagcauugugcacgauaag

SEQ ID NO: 123801 - RNA, 32 nt, Human
cguaagagaugggguugcugcaguguuggagu

SEQ ID NO: 123802 - RNA, 32 nt, Human
cguaagauagcuuacauuuccucuuuuugccu

SEQ ID NO: 123803 - RNA, 32 nt, Human
cguaagcaauagaggcaccugcagcccuccuu

SEQ ID NO: 123804 - RNA, 32 nt, Human
cguaagcauucgcuuccugccuagagucuggc

SEQ ID NO: 123805 - RNA, 32 nt, Human
cguaagccacugcaccuggcggggucuugcuu

SEQ ID NO: 123806 - RNA, 32 nt, Human
cguaagcuauuaaugcuaacucuugcauguca

SEQ ID NO: 123807 - RNA, 32 nt, Human
cguaagcugaguucaagaccagccugggcaac

SEQ ID NO: 123808 - RNA, 32 nt, Human
cguaagggugugaaaggagccaaaggcuuggc

SEQ ID NO: 123809 - RNA, 21 nt, Human
cguaaggucuuccacuaguua

SEQ ID NO: 123810 - RNA, 32 nt, Human
cguaaguccacggguggccaggagcacguguu

SEQ ID NO: 123811 - RNA, 32 nt, Human
cguaaguguugcauuuacauggcuguuuagaa

SEQ ID NO: 123812 - RNA, 32 nt, Human
cguaaguucccauagguuucuuuuguucugag

SEQ ID NO: 123813 - RNA, 32 nt, Human
cguaauagaaacuuauccaguuugaaaaucau

SEQ ID NO: 123814 - RNA, 32 nt, Human
cguaauagacuucccacucuagggcaguggag

SEQ ID NO: 123815 - RNA, 32 nt, Human
cguaaucaagccucuggucacauggcugucga

SEQ ID NO: 123816 - RNA, 32 nt, Human
cguaauccgggcugcccccacccuccagaaug

SEQ ID NO: 123817 - RNA, 32 nt, Human
cguaaugauucuguuauuacuuuccuauucuu

SEQ ID NO: 123818 - RNA, 32 nt, Human
cguaaugccuccugccugccucuuucaagaug

SEQ ID NO: 123819 - RNA, 31 nt, Human
cguaaugcgccaauaaaccaaugaacgaagc

SEQ ID NO: 123820 - RNA, 32 nt, Human
cguaauggcaggcgccuauaaucccagcuacu

SEQ ID NO: 123821 - RNA, 32 nt, Human
cguaauugcuacccuuuauuuauggagcuauu

SEQ ID NO: 123822 - RNA, 32 nt, Human
cguacaaacuccugcaauucuuccugcaagcc

SEQ ID NO: 123823 - RNA, 32 nt, Human
cguacaagucaguaggacuccuuauuuggcgu

SEQ ID NO: 123824 - RNA, 32 nt, Human
cguacacagaaacaggacugcucaaaugaucc

SEQ ID NO: 123825 - RNA, 32 nt, Human
cguacacauggaggacucuuccagcauccagc

SEQ ID NO: 123826 - RNA, 32 nt, Human
cguacacccagacaucuucgggcugcuauugg

SEQ ID NO: 123827 - RNA, 32 nt, Human
cguacacugacuuuggggccuggguguugggg

SEQ ID NO: 123828 - RNA, 32 nt, Human
cguacagaagaacacacaccgcucggugcuga

SEQ ID NO: 123829 - RNA, 32 nt, Human
cguacagaugaaugugugugguaagaucuuua

SEQ ID NO: 123830 - RNA, 32 nt, Human
cguacagcugaaguugugggugcauuggccua

SEQ ID NO: 123831 - RNA, 32 nt, Human
cguacaguuuaccuccaaaaggauagcugcca

SEQ ID NO: 123832 - RNA, 32 nt, Human
cguacauacacacauacauacauacauacaaa

SEQ ID NO: 123833 - RNA, 32 nt, Human
cguacaucuauugcucuaccucagggguccag

SEQ ID NO: 123834 - RNA, 32 nt, Human
cguacaugacccuuucuccuucaugccaggcu

SEQ ID NO: 123835 - RNA, 32 nt, Human
cguacauucacuacaaacgugcagccuccugc

SEQ ID NO: 123836 - RNA, 32 nt, Human
cguacauuuguucaacucugagcuaggagaaa

SEQ ID NO: 123837 - RNA, 32 nt, Human
cguaccaaggggcgaaaagcaagagcaggaag

SEQ ID NO: 123838 - RNA, 32 nt, Human
cguaccacacuccagccugggugacagagcga

SEQ ID NO: 123839 - RNA, 32 nt, Human
cguaccacagcacugcauccugggcgacagag

SEQ ID NO: 123840 - RNA, 32 nt, Human
cguaccacuacacuccagccugggcaacggag

SEQ ID NO: 123841 - RNA, 32 nt, Human
cguaccacugcacuccagccuaggugacaggg

SEQ ID NO: 123842 - RNA, 32 nt, Human
cguaccacugcacuccagccuggaugacagag

SEQ ID NO: 123843 - RNA, 32 nt, Human
cguaccacugcacuccagccugggcgacagag

SEQ ID NO: 123844 - RNA, 32 nt, Human
cguaccacugcacuccagccugggcuacagau

SEQ ID NO: 123845 - RNA, 32 nt, Human
cguaccacugcacuccagccugggugacagag

SEQ ID NO: 123846 - RNA, 32 nt, Human
cguaccacugcacuccagucugggcgacagag

SEQ ID NO: 123847 - RNA, 32 nt, Human
cguaccacugcacucuggccugggcaacaaga

SEQ ID NO: 123848 - RNA, 32 nt, Human
cguaccagguucuacagggaggcugcacccac

SEQ ID NO: 123849 - RNA, 32 nt, Human
cguaccaguucugaagagcguuuucugccaca

SEQ ID NO: 123850 - RNA, 32 nt, Human
cguaccaucucccagccccuaugguuucacau

SEQ ID NO: 123851 - RNA, 32 nt, Human
cguaccauugcacuccagccugggcaacaaga

SEQ ID NO: 123852 - RNA, 32 nt, Human
cguacccaaauuuccaagacacaaacaugacc

SEQ ID NO: 123853 - RNA, 32 nt, Human
cguaccccucccccaugauccccugcacagac

SEQ ID NO: 123854 - RNA, 32 nt, Human
cguacccugcuguagugccucuuaucccuucc

SEQ ID NO: 123855 - RNA, 32 nt, Human
cguacccuuccccacacauaccaccuuggcuu

SEQ ID NO: 123856 - RNA, 32 nt, Human
cguaccgcugcacuccagccugggugauagag

SEQ ID NO: 123857 - RNA, 32 nt, Human
cguaccuauugcacuccauccuggaugaaaga

SEQ ID NO: 123858 - RNA, 32 nt, Human
cguaccucauacaggcuccuugcccacacuau

SEQ ID NO: 123859 - RNA, 32 nt, Human
cguaccucauuuccuucuuucuucuggcuuug

SEQ ID NO: 123860 - RNA, 32 nt, Human
cguaccugcuggcuuuauuacuucuccaaauu

SEQ ID NO: 123861 - RNA, 32 nt, Human
cguaccuggagugggggcagaagugguacaua

SEQ ID NO: 123862 - RNA, 32 nt, Human
cguaccuguagucccagccacuugagaggcug

SEQ ID NO: 123863 - RNA, 32 nt, Human
cguaccuguagucccagcuacuugggaggcug

SEQ ID NO: 123864 - RNA, 32 nt, Human
cguaccuugaaacucucuaucucuggacacuc

SEQ ID NO: 123865 - RNA, 32 nt, Human
cguacgugucacccucuguacugacaucuccu

SEQ ID NO: 123866 - RNA, 32 nt, Human
cguacuacugcacuccagcauggaagacagcg

SEQ ID NO: 123867 - RNA, 32 nt, Human
cguacuaugaacaccagaacagaagagauuuu

SEQ ID NO: 123868 - RNA, 32 nt, Human
cguacucagcaacuauucggacacaccaucag

SEQ ID NO: 123869 - RNA, 32 nt, Human
cguacucagcacagcaguggagaguguuccug

SEQ ID NO: 123870 - RNA, 32 nt, Human
cguacucaggaggcagaauucaguguguuauc

SEQ ID NO: 123871 - RNA, 32 nt, Human
cguacugcagccucaaccuccugggcucaagu

SEQ ID NO: 123872 - RNA, 32 nt, Human
cguacuggcaugcaccuguagucccagcugcu

SEQ ID NO: 123873 - RNA, 32 nt, Human
cguacugggauuacaggcgugagccaccgcgc

SEQ ID NO: 123874 - RNA, 32 nt, Human
cguacuucuaacucauuguuucccucauggcc

SEQ ID NO: 123875 - RNA, 32 nt, Human
cguacuucuccuccauuggucccaggcuaacu

SEQ ID NO: 123876 - RNA, 32 nt, Human
cguacuugauguggaaaaucucugagucagau

SEQ ID NO: 123877 - RNA, 32 nt, Human
cguacuuucaaaggaaaggcaucuuuaaucac

SEQ ID NO: 123878 - RNA, 32 nt, Human
cguagaaacaagagccuuuguaauacugaacc

SEQ ID NO: 123879 - RNA, 32 nt, Human
cguagaaauuugcauacagcuuccacuuccug

SEQ ID NO: 123880 - RNA, 32 nt, Human
cguagaacccuguacgugcuuccuucggccug

SEQ ID NO: 123881 - RNA, 32 nt, Human
cguagaccguuugcuucuuuaacuccagccgc

SEQ ID NO: 123882 - RNA, 32 nt, Human
cguagagaaaaauuaaaugucagcuugaugaa

SEQ ID NO: 123883 - RNA, 32 nt, Human
cguagagcugugggagcuggagcuggcauuuc

SEQ ID NO: 123884 - RNA, 32 nt, Human
cguagaggcgagcagggaccagcuggucgccg

SEQ ID NO: 123885 - RNA, 32 nt, Human
cguagagggaaaggaaagaaguuguaguugac

SEQ ID NO: 123886 - RNA, 32 nt, Human
cguagagggccaggagcagcaggucaugugca

SEQ ID NO: 123887 - RNA, 32 nt, Human
cguagagguggccugcacuccucagcuugugc

SEQ ID NO: 123888 - RNA, 32 nt, Human
cguagaguaacaaucacaaccccacauuccgg

SEQ ID NO: 123889 - RNA, 32 nt, Human
cguagagucugaacaggugcucugcugcuaga

SEQ ID NO: 123890 - RNA, 32 nt, Human
cguagauaaagaaagagcauuuaguauaagca

SEQ ID NO: 123891 - RNA, 32 nt, Human
cguagaucugggaggccaggcuggcaugauuc

SEQ ID NO: 123892 - RNA, 32 nt, Human
cguagaugcaggaagacauuggaugaggucag

SEQ ID NO: 123893 - RNA, 32 nt, Human
cguagcaaucuugguugcuggaauggcuguau

SEQ ID NO: 123894 - RNA, 32 nt, Human
cguagcaccaggguuuggaggcugcgaccgcc

SEQ ID NO: 123895 - RNA, 32 nt, Human
cguagcacccagcuugaacaauuaacaacuug

SEQ ID NO: 123896 - RNA, 32 nt, Human
cguagcacugcaguccagccugggcgacagag

SEQ ID NO: 123897 - RNA, 32 nt, Human
cguagcagagaaaggauugauuugaacuuaac

SEQ ID NO: 123898 - RNA, 32 nt, Human
cguagcagccaucuuuuccuggcuuuggugau

SEQ ID NO: 123899 - RNA, 32 nt, Human
cguagcauccguuggucuuucucuccaucucu

SEQ ID NO: 123900 - RNA, 32 nt, Human
cguagccagugaagguuggggagcaagcuuau

SEQ ID NO: 123901 - RNA, 32 nt, Human
cguagccaucucucuacuccuaccucagccua

SEQ ID NO: 123902 - RNA, 32 nt, Human
cguagccaugacagcagcucucugcugcccgc

SEQ ID NO: 123903 - RNA, 32 nt, Human
cguagccggacaggaggagagcagugaugcgg

SEQ ID NO: 123904 - RNA, 32 nt, Human
cguagccggccugucugggccgccucgugggg

SEQ ID NO: 123905 - RNA, 32 nt, Human
cguagccugggugauaagagugagacucuguc

SEQ ID NO: 123906 - RNA, 32 nt, Human
cguagcgccgggccuucucuccucgucaucau

SEQ ID NO: 123907 - RNA, 32 nt, Human
cguagcuaagugaaaaggucauagcugagauu

SEQ ID NO: 123908 - RNA, 32 nt, Human
cguagcuaucagaacccuccugaauuuucccc

SEQ ID NO: 123909 - RNA, 32 nt, Human
cguagcucuggcaccaccacacuggccucuga

SEQ ID NO: 123910 - RNA, 32 nt, Human
cguagcugaggacccagacucgccaggaaagg

SEQ ID NO: 123911 - RNA, 32 nt, Human
cguagcugaggcaggagaaucgccugaaccca

SEQ ID NO: 123912 - RNA, 32 nt, Human
cguagcugcucacaccagccuccgggugccuc

SEQ ID NO: 123913 - RNA, 32 nt, Human
cguagcugggauuacaggcaugagccacugag

SEQ ID NO: 123914 - RNA, 32 nt, Human
cguagcugggauuacaggugcccacgaccaca

SEQ ID NO: 123915 - RNA, 32 nt, Human
cguagcuggguucagcucugcguccacgccag

SEQ ID NO: 123916 - RNA, 32 nt, Human
cguagcuguggccuccccugccccugcuccag

SEQ ID NO: 123917 - RNA, 32 nt, Human
cguagcuucaaaaaggcguaacagugaccugg

SEQ ID NO: 123918 - RNA, 32 nt, Human
cguaggaaucuggagcaugcuguguuagaauu

SEQ ID NO: 123919 - RNA, 32 nt, Human
cguaggacccuccgagccaggugcgggauaua

SEQ ID NO: 123920 - RNA, 32 nt, Human
cguaggagaggccucggggagggucaucauug

SEQ ID NO: 123921 - RNA, 32 nt, Human
cguaggaucccuugagcccaggaguucgaggc

SEQ ID NO: 123922 - RNA, 32 nt, Human
cguaggauugagaacuuagggaagcacauuag

SEQ ID NO: 123923 - RNA, 32 nt, Human
cguaggauugcacagggcugugccaguggcgu

SEQ ID NO: 123924 - RNA, 29 nt, Human
cguaggcacacagaggggagucaccagcc

SEQ ID NO: 123925 - RNA, 32 nt, Human
cguaggcccucgggacucccagcacugcagag

SEQ ID NO: 123926 - RNA, 32 nt, Human
cguaggcccugaggggcgcggccccugcccca

SEQ ID NO: 123927 - RNA, 32 nt, Human
cguaggccuggggacugggagggcagagggug

SEQ ID NO: 123928 - RNA, 32 nt, Human
cguaggcucccaggggccccagggagguccag

SEQ ID NO: 123929 - RNA, 32 nt, Human
cguaggcugugggaagaugaagaugguuugga

SEQ ID NO: 123930 - RNA, 32 nt, Human
cguagggaggggcugggggucacuccagcccg

SEQ ID NO: 123931 - RNA, 32 nt, Human
cguagggccaggugagcugcugugaaggacuc

SEQ ID NO: 123932 - RNA, 32 nt, Human
cguagggcccuuaguacaugaucaggguuggc

SEQ ID NO: 123933 - RNA, 32 nt, Human
cguagguagggacacguguccaugcaccacag

SEQ ID NO: 123934 - RNA, 32 nt, Human
cguaggugaggguucagggccuccucaagcug

SEQ ID NO: 123935 - RNA, 32 nt, Human
cguagguguuaggcaugucccacccacccgcc

SEQ ID NO: 123936 - RNA, 32 nt, Human
cguaguccaacucuugguauuacccuccuaau

SEQ ID NO: 123937 - RNA, 32 nt, Human
cguaguccaagucagacuauuucacaaaguca

SEQ ID NO: 123938 - RNA, 32 nt, Human
cguagucucuacucuuccccugccugcaucaa

SEQ ID NO: 123939 - RNA, 32 nt, Human
cguagugacacacgccuguaaucccagcugcu

SEQ ID NO: 123940 - RNA, 32 nt, Human
cguagugccguugguuucacaugauugcacuu

SEQ ID NO: 123941 - RNA, 32 nt, Human
cguagugcuaucuacauccagacgguggaagg

SEQ ID NO: 123942 - RNA, 32 nt, Human
cguaguggcacaugccuguaaucccagcuacc

SEQ ID NO: 123943 - RNA, 32 nt, Human
cguaguggcaggcaccuguaaucccagcuacu

SEQ ID NO: 123944 - RNA, 32 nt, Human
cguaguggcaugcaccuguagucccagcuacu

SEQ ID NO: 123945 - RNA, 32 nt, Human
cguaguggcgcacaccugcaaucccaacacuu

SEQ ID NO: 123946 - RNA, 32 nt, Human
cguaguggcgggcgccuguaaucccagcuacu

SEQ ID NO: 123947 - RNA, 23 nt, Human
cguaguggcucacaccuguaauc

SEQ ID NO: 123948 - RNA, 32 nt, Human
cguaguggcucacaccuguaaucccagcacuu

SEQ ID NO: 123949 - RNA, 32 nt, Human
cguaguggcucacgccuguaaucccggcacuu

SEQ ID NO: 123950 - RNA, 32 nt, Human
cguaguggcucuugccuguaaucccagcauuc

SEQ ID NO: 123951 - RNA, 32 nt, Human
cguaguggcugcagucagucuucccgagugag

SEQ ID NO: 123952 - RNA, 32 nt, Human
cguaguggcuuacaccuguaaucccagcacuu

SEQ ID NO: 123953 - RNA, 32 nt, Human
cguagugggguggaggcugcuggaggugggag

SEQ ID NO: 123954 - RNA, 32 nt, Human
cguaguggugcaugccuguaaucccagcuacu

SEQ ID NO: 123955 - RNA, 32 nt, Human
cguaguggugcaugccuguaaucccaguuacu

SEQ ID NO: 123956 - RNA, 32 nt, Human
cguaguggugcgcaccuguagucucagauacu

SEQ ID NO: 123957 - RNA, 32 nt, Human
cguaguguuuuuaaugagugcaccuauuacua

SEQ ID NO: 123958 - RNA, 32 nt, Human
cguaguucacacuucaggagagaacuucauag

SEQ ID NO: 123959 - RNA, 32 nt, Human
cguaguuggcaggagcuccuggaagcacagcg

SEQ ID NO: 123960 - RNA, 32 nt, Human
cguauaacagucauugcuuccuccuaugguag

SEQ ID NO: 123961 - RNA, 32 nt, Human
cguauaaucccagcuacuugagagaugacgag

SEQ ID NO: 123962 - RNA, 31 nt, Human
cguauacccauggaguguuguaggggccccu

SEQ ID NO: 123963 - RNA, 32 nt, Human
cguauagauuccgugguugggcccagagccug

SEQ ID NO: 123964 - RNA, 32 nt, Human
cguaucaaggguuguauuuucuuuauuuccca

SEQ ID NO: 123965 - RNA, 32 nt, Human
cguaucauaagaaucuagcucagaauguuuua

SEQ ID NO: 123966 - RNA, 32 nt, Human
cguauccaggcaggauccuccgcugauugggg

SEQ ID NO: 123967 - RNA, 32 nt, Human
cguauccauccuggauguuaugaauuuccaga

SEQ ID NO: 123968 - RNA, 32 nt, Human
cguauccuccacuggggaagugcucccaguuc

SEQ ID NO: 123969 - RNA, 32 nt, Human
cguauccugccugggcucuggccucugcucug

SEQ ID NO: 123970 - RNA, 32 nt, Human
cguauccugugugaucccacuccugggaaguc

SEQ ID NO: 123971 - RNA, 32 nt, Human
cguaucuacuaaaaauacaaaaauuagccggg

SEQ ID NO: 123972 - RNA, 32 nt, Human
cguaucuacuaaaaauacaaaaauuagucaac

SEQ ID NO: 123973 - RNA, 32 nt, Human
cguaucuccggaaagaguccuggugacccagc

SEQ ID NO: 123974 - RNA, 32 nt, Human
cguaucugcagaaugggccacuguagggguug

SEQ ID NO: 123975 - RNA, 32 nt, Human
cguaucuuacucacgauaccacugguccagau

SEQ ID NO: 123976 - RNA, 22 nt, Human
cguaucuucaccaguguucuau

SEQ ID NO: 123977 - RNA, 32 nt, Human
cguaucuucugccuccauguucccucccaaca

SEQ ID NO: 123978 - RNA, 32 nt, Human
cguaucuugcuggacacuggccucgggauagc

SEQ ID NO: 123979 - RNA, 32 nt, Human
cguaugcccugcgcuccuccacagccugggcc

SEQ ID NO: 123980 - RNA, 32 nt, Human
cguaugccgaucuuggcaaaucugccagggau

SEQ ID NO: 123981 - RNA, 32 nt, Human
cguaugccuaucucagucaugccccggacugc

SEQ ID NO: 123982 - RNA, 32 nt, Human
cguaugccuguaaucccagcuacuuaggaggc

SEQ ID NO: 123983 - RNA, 32 nt, Human
cguaugcuuacauuauugcucuuuuaguuuga

SEQ ID NO: 123984 - RNA, 19 nt, Human
cguauggaccuagccugga

SEQ ID NO: 123985 - RNA, 17 nt, Human
cguauggccuggcccag

SEQ ID NO: 123986 - RNA, 32 nt, Human
cguaugggcauccuucacacuucugaucugca

SEQ ID NO: 123987 - RNA, 32 nt, Human
cguauggugaagaugaggccaacagugagcug

SEQ ID NO: 123988 - RNA, 32 nt, Human
cguauguaugucccuggcuucagcuuugguca

SEQ ID NO: 123989 - RNA, 32 nt, Human
cguaugugacccacagauggcgucaaugugaa

SEQ ID NO: 123990 - RNA, 32 nt, Human
cguaugugggugucuugaggcaguuuuucagu

SEQ ID NO: 123991 - RNA, 32 nt, Human
cguaugugucugcagacaucaauaggaugaag

SEQ ID NO: 123992 - RNA, 24 nt, Human
cguauucaagcgauucuccugucu

SEQ ID NO: 123993 - RNA, 32 nt, Human
cguauucauuaguuuuuagcugggugaccuug

SEQ ID NO: 123994 - RNA, 32 nt, Human
cguauuccccugggugugcacacagggcgggu

SEQ ID NO: 123995 - RNA, 32 nt, Human
cguauucucggcuauuuauccccagcugcggg

SEQ ID NO: 123996 - RNA, 32 nt, Human
cguauucucucuuuucuacuuuacagagcgag

SEQ ID NO: 123997 - RNA, 32 nt, Human
cguauucuuccagugaaaacaagacugaaaua

SEQ ID NO: 123998 - RNA, 32 nt, Human
cguauugaggggcgaguagcagcucugcagac

SEQ ID NO: 123999 - RNA, 32 nt, Human
cguauuggcgugcgccuguaaucccagcuacu

SEQ ID NO: 124000 - RNA, 32 nt, Human
cguauuucauuucugcacccagggggcggcuc

SEQ ID NO: 124001 - RNA, 32 nt, Human
cguauuuggacaucaagguugcagagaugaac

SEQ ID NO: 124002 - RNA, 32 nt, Human
cguauuuguacugcuuucugcuuuucucccac

SEQ ID NO: 124003 - RNA, 32 nt, Human
cguauuuuagaguccuacagaauauuucuggc

SEQ ID NO: 124004 - RNA, 32 nt, Human
cguauuuuucacuuaucugucuugucagcugg

SEQ ID NO: 124005 - RNA, 32 nt, Human
cgucaaaaugcgccccauaucacugcaacacc

SEQ ID NO: 124006 - RNA, 32 nt, Human
cgucaaacccugccuuuccuuuacuuuuacuu

SEQ ID NO: 124007 - RNA, 32 nt, Human
cgucaaacgccaaccgccgcuccuggggagga

SEQ ID NO: 124008 - RNA, 32 nt, Human
cgucaaacucacagcagcacuguccucucagu

SEQ ID NO: 124009 - RNA, 31 nt, Human
cgucaaagcuucuagguucuguugaaaagga

SEQ ID NO: 124010 - RNA, 32 nt, Human
cgucaacaucagccacagcccagccccauuag

SEQ ID NO: 124011 - RNA, 32 nt, Human
cgucaaccaaguagcuguaggagauuacaugu

SEQ ID NO: 124012 - RNA, 21 nt, Human
cgucaacccaagcucugggga

SEQ ID NO: 124013 - RNA, 32 nt, Human
cgucaacccacccugaguccaccugcacccca

SEQ ID NO: 124014 - RNA, 32 nt, Human
cgucaacccacugccucccaccccgaccccag

SEQ ID NO: 124015 - RNA, 32 nt, Human
cgucaacugcuggucucucccaccugguugga

SEQ ID NO: 124016 - RNA, 32 nt, Human
cgucaagcagagggaggcacuuucacccggcc

SEQ ID NO: 124017 - RNA, 32 nt, Human
cgucaagcagugggagagggcagugcccggug

SEQ ID NO: 124018 - RNA, 32 nt, Human
cgucaagccuguaaucccaacacuuugggaga

SEQ ID NO: 124019 - RNA, 32 nt, Human
cgucaagggaggugaacauuguugcugaguua

SEQ ID NO: 124020 - RNA, 32 nt, Human
cgucaagucccccagagcccggcauucuaugu

SEQ ID NO: 124021 - RNA, 31 nt, Human
cgucaagugcugccccugccugugucugggu

SEQ ID NO: 124022 - RNA, 32 nt, Human
cgucaagugcugccccugccugugucuggguu

SEQ ID NO: 124023 - RNA, 32 nt, Human
cgucaauggucaccaagguccugaagccuucc

SEQ ID NO: 124024 - RNA, 32 nt, Human
cgucacaaaaugugaaggcaaacacauaauua

SEQ ID NO: 124025 - RNA, 32 nt, Human
cgucacaacaacaacaacaaaaagcuucccca

SEQ ID NO: 124026 - RNA, 32 nt, Human
cgucacaccuauaaucccagcacuuugggagg

SEQ ID NO: 124027 - RNA, 32 nt, Human
cgucacacucccucucugcucuccugucccuu

SEQ ID NO: 124028 - RNA, 32 nt, Human
cgucacagaauuuugcuaacauggacaacucu

SEQ ID NO: 124029 - RNA, 32 nt, Human
cgucacagaggagccugcugagcuccagacug

SEQ ID NO: 124030 - RNA, 32 nt, Human
cgucacauuucauucgcugaaggaaaggcaag

SEQ ID NO: 124031 - RNA, 18 nt, Human
cgucaccaagcagccccc

SEQ ID NO: 124032 - RNA, 32 nt, Human
cgucaccacagcaagggacccgagcagcuucc

SEQ ID NO: 124033 - RNA, 31 nt, Human
cgucaccagagagacagcuguugagaccgcu

SEQ ID NO: 124034 - RNA, 32 nt, Human
cgucaccagcagaaugaagggaugggauuaau

SEQ ID NO: 124035 - RNA, 25 nt, Human
cgucacccaggcuggagugcaaugg

SEQ ID NO: 124036 - RNA, 25 nt, Human
cgucacccaggcuggagugcaguag

SEQ ID NO: 124037 - RNA, 25 nt, Human
cgucacccaggcuggagugcagugg

SEQ ID NO: 124038 - RNA, 32 nt, Human
cgucaccccacacaggcugcggcaucacccuc

SEQ ID NO: 124039 - RNA, 32 nt, Human
cgucaccccaggaggaaaagcccagggucugg

SEQ ID NO: 124040 - RNA, 32 nt, Human
cgucacccccucucugcuugcagacagugcca

SEQ ID NO: 124041 - RNA, 32 nt, Human
cgucaccccugccucccgcccccuuggcuggg

SEQ ID NO: 124042 - RNA, 25 nt, Human
cgucacccgagcuggagugcagugg

SEQ ID NO: 124043 - RNA, 32 nt, Human
cgucacccgccugccggcaccaugaagugcuc

SEQ ID NO: 124044 - RNA, 25 nt, Human
cgucacccgggcuggagugcagugg

SEQ ID NO: 124045 - RNA, 32 nt, Human
cgucaccucccagggcucuguagaccagcagc

SEQ ID NO: 124046 - RNA, 32 nt, Human
cgucaccugcuuggcccuggcccagcucccug

SEQ ID NO: 124047 - RNA, 32 nt, Human
cgucaccugggcggccagaggcugggaucugc

SEQ ID NO: 124048 - RNA, 32 nt, Human
cgucaccugugcagggcccucuggggcucagc

SEQ ID NO: 124049 - RNA, 32 nt, Human
cgucaccuuuugcaguguuuugcagugauggg

SEQ ID NO: 124050 - RNA, 32 nt, Human
cgucacgccuguaaucccagcacuuuagauca

SEQ ID NO: 124051 - RNA, 32 nt, Human
cgucacgccuguaaucccagcacuuuggcagg

SEQ ID NO: 124052 - RNA, 32 nt, Human
cgucacgccuguaaucccagcacuuugggagg

SEQ ID NO: 124053 - RNA, 32 nt, Human
cgucacgugcuggucuggauuuuucucgaugc

SEQ ID NO: 124054 - RNA, 32 nt, Human
cgucacuaauacacaguuuuguacauguaaca

SEQ ID NO: 124055 - RNA, 32 nt, Human
cgucacuacuaaaaauacaaaaauuagauggg

SEQ ID NO: 124056 - RNA, 32 nt, Human
cgucacuacuaaacauacaaaaauuagcuggg

SEQ ID NO: 124057 - RNA, 32 nt, Human
cgucacuauccagcacgugcaccaaggagugg

SEQ ID NO: 124058 - RNA, 32 nt, Human
cgucacuaucuggccccuacagccugguguga

SEQ ID NO: 124059 - RNA, 21 nt, Human
cgucacucccugcauccaaca

SEQ ID NO: 124060 - RNA, 23 nt, Human
cgucacuccucuuucccuuggua

SEQ ID NO: 124061 - RNA, 32 nt, Human
cgucacugaacuccggccugggugacagaagg

SEQ ID NO: 124062 - RNA, 32 nt, Human
cgucacugcacuccaaccugggugacagagcg

SEQ ID NO: 124063 - RNA, 32 nt, Human
cgucacugcacuccagccugagcaacagagug

SEQ ID NO: 124064 - RNA, 32 nt, Human
cgucacugcacuccagccugagugacagagcg

SEQ ID NO: 124065 - RNA, 24 nt, Human
cgucacugcacuccagccuggaca

SEQ ID NO: 124066 - RNA, 32 nt, Human
cgucacugcacuccagccugggagacagagug

SEQ ID NO: 124067 - RNA, 32 nt, Human
cgucacugcacuccagccugggcgacagagug

SEQ ID NO: 124068 - RNA, 32 nt, Human
cgucacugcacuccagcgugggcgacagagcg

SEQ ID NO: 124069 - RNA, 32 nt, Human
cgucacugcacuccagucuagcaacagagcga

SEQ ID NO: 124070 - RNA, 32 nt, Human
cgucacugcacuccggccugggugacagagcc

SEQ ID NO: 124071 - RNA, 32 nt, Human
cgucacugcacucuagccugggcaacagagua

SEQ ID NO: 124072 - RNA, 32 nt, Human
cgucacugcacugcagccugggugacagaaug

SEQ ID NO: 124073 - RNA, 32 nt, Human
cgucacugcagccuccaccucccgggcuccag

SEQ ID NO: 124074 - RNA, 32 nt, Human
cgucacugcauuccagccugggugacagagcg

SEQ ID NO: 124075 - RNA, 32 nt, Human
cgucacuggcgggcucgcguguguacauagag

SEQ ID NO: 124076 - RNA, 31 nt, Human
cgucacugggaacugcaccagaugcucagac

SEQ ID NO: 124077 - RNA, 32 nt, Human
cgucacuggggugggagaagaggggcugguag

SEQ ID NO: 124078 - RNA, 32 nt, Human
cgucacuguacuccagccugggugacagagug

SEQ ID NO: 124079 - RNA, 27 nt, Human
cgucagaaagcccaauuaaaccucuga

SEQ ID NO: 124080 - RNA, 20 nt, Human
cgucagaccuuccugaccuc

SEQ ID NO: 124081 - RNA, 32 nt, Human
cgucagagggaagggaacacaucccagccaca

SEQ ID NO: 124082 - RNA, 32 nt, Human
cgucagcagccuguaugggcgcugccagaugc

SEQ ID NO: 124083 - RNA, 32 nt, Human
cgucagcagggacuucguggccagcggggcgg

SEQ ID NO: 124084 - RNA, 32 nt, Human
cgucagcccggaggaggaggaggaggaggagg

SEQ ID NO: 124085 - RNA, 21 nt, Human
cgucagccucagacucgugga

SEQ ID NO: 124086 - RNA, 32 nt, Human
cgucagccuccaggagccacgcagccgauggc

SEQ ID NO: 124087 - RNA, 32 nt, Human
cgucagcucacuccccuuccacccucagcucc

SEQ ID NO: 124088 - RNA, 32 nt, Human
cgucagcucugccuccgccccuccugcggcuu

SEQ ID NO: 124089 - RNA, 32 nt, Human
cgucagcugcuccccuugaugccuuuucacag

SEQ ID NO: 124090 - RNA, 20 nt, Human
cgucagcuuuguccagcuug

SEQ ID NO: 124091 - RNA, 32 nt, Human
cgucaggagguggagguugcagugagccaaga

SEQ ID NO: 124092 - RNA, 32 nt, Human
cgucaggccagauugcagcccgcgaccuuccc

SEQ ID NO: 124093 - RNA, 32 nt, Human
cgucaggcuuguuuucaugcugugccacucca

SEQ ID NO: 124094 - RNA, 32 nt, Human
cgucaggggccaaacuuacuaccuugacuuca

SEQ ID NO: 124095 - RNA, 32 nt, Human
cgucagggugagugggagcccaggaaggagcg

SEQ ID NO: 124096 - RNA, 32 nt, Human
cgucaguacacuccagccugggcaacaaugcg

SEQ ID NO: 124097 - RNA, 32 nt, Human
cgucagucuguggagcuggggcugcagcuggu

SEQ ID NO: 124098 - RNA, 32 nt, Human
cgucagugacacucuccucguauugggaggau

SEQ ID NO: 124099 - RNA, 32 nt, Human
cgucagugagccuucuaucaccuucuggaaca

SEQ ID NO: 124100 - RNA, 32 nt, Human
cgucagugaggguuuucauagcuuuuggaaau

SEQ ID NO: 124101 - RNA, 32 nt, Human
cgucagugaguuggugcucucucuccagaaga

SEQ ID NO: 124102 - RNA, 32 nt, Human
cgucaguguucuccagccugggcaacagagug

SEQ ID NO: 124103 - RNA, 32 nt, Human
cgucaguucaugaggcaacgucgcguggucuc

SEQ ID NO: 124104 - RNA, 32 nt, Human
cgucaguucggccuccaucuccugggacccgc

SEQ ID NO: 124105 - RNA, 32 nt, Human
cgucauagcuggaaacagucagagccaccagc

SEQ ID NO: 124106 - RNA, 32 nt, Human
cgucaucaacaucacagaaggcugaucgauau

SEQ ID NO: 124107 - RNA, 32 nt, Human
cgucaucacaccaguacacuccaggcuagguc

SEQ ID NO: 124108 - RNA, 32 nt, Human
cgucaucagcaaaggcugcagcuugaacugcg

SEQ ID NO: 124109 - RNA, 32 nt, Human
cgucaucauccagagcagccaguguccgggag

SEQ ID NO: 124110 - RNA, 19 nt, Human
cgucauccaaaggcggcca

SEQ ID NO: 124111 - RNA, 32 nt, Human
cgucauccaggcuggacaguucagugauuugc

SEQ ID NO: 124112 - RNA, 32 nt, Human
cgucaucccucaggaccccauggacccgccug

SEQ ID NO: 124113 - RNA, 32 nt, Human
cgucaucgcugggcccacacgccgccgacagc

SEQ ID NO: 124114 - RNA, 32 nt, Human
cgucaucuccccucugccuccugcuuugcugu

SEQ ID NO: 124115 - RNA, 32 nt, Human
cgucaugaagcaccauggaaucaaagagaaag

SEQ ID NO: 124116 - RNA, 24 nt, Human
cgucaugcccaggccuccaugcug

SEQ ID NO: 124117 - RNA, 32 nt, Human
cgucaugccuggcuaauuuuuguauuuuugua

SEQ ID NO: 124118 - RNA, 32 nt, Human
cgucauggaagaggcggccaugcuguggccag

SEQ ID NO: 124119 - RNA, 32 nt, Human
cgucauggcgcuccuccgcagccugggguacg

SEQ ID NO: 124120 - RNA, 32 nt, Human
cgucauggcucacaccuguaaucccagcacuu

SEQ ID NO: 124121 - RNA, 32 nt, Human
cgucaugggacugguaccucagaucugagcau

SEQ ID NO: 124122 - RNA, 23 nt, Human
cgucaugggcgggccccgcccua

SEQ ID NO: 124123 - RNA, 21 nt, Human
cgucaugugcagccacguccu

SEQ ID NO: 124124 - RNA, 32 nt, Human
cgucauguugcccaggcuggucucaggaguca

SEQ ID NO: 124125 - RNA, 32 nt, Human
cgucauguugcccaggcuggucuccaacuccu

SEQ ID NO: 124126 - RNA, 32 nt, Human
cgucauguuggccaggcuggucuccaacuccu

SEQ ID NO: 124127 - RNA, 32 nt, Human
cgucauguuggccaggcuggucucgaacuccu

SEQ ID NO: 124128 - RNA, 32 nt, Human
cgucauuaagucauucacaaaaagccaggaga

SEQ ID NO: 124129 - RNA, 32 nt, Human
cgucauucagggguaacucaucacucuucaca

SEQ ID NO: 124130 - RNA, 32 nt, Human
cgucauugcacuccagccugggcaacaagagu

SEQ ID NO: 124131 - RNA, 32 nt, Human
cgucauugcacuccagccuggucaacaagagu

SEQ ID NO: 124132 - RNA, 32 nt, Human
cgucauugcucuccagccugggcaacagagca

SEQ ID NO: 124133 - RNA, 32 nt, Human
cgucauugcugaagcucaaggaagaaauauga

SEQ ID NO: 124134 - RNA, 32 nt, Human
cgucauugugcaaaugucauagaguauacuua

SEQ ID NO: 124135 - RNA, 32 nt, Human
cgucauuuauuccacagagucaagaccaauau

SEQ ID NO: 124136 - RNA, 32 nt, Human
cgucauuucaccuucuggccacugggaggcgc

SEQ ID NO: 124137 - RNA, 32 nt, Human
cgucauuucaucuucacccccaccuccaaaug

SEQ ID NO: 124138 - RNA, 32 nt, Human
cgucauuucuaacccaaaggcucuuuucagag

SEQ ID NO: 124139 - RNA, 21 nt, Human
cguccaaaugaaaccaucaaa

SEQ ID NO: 124140 - RNA, 32 nt, Human
cguccaacaccccucacucccugucucacucc

SEQ ID NO: 124141 - RNA, 32 nt, Human
cguccaaggccccuccuagauaggcaaggacu

SEQ ID NO: 124142 - RNA, 32 nt, Human
cguccacaaugugaauccuacaguuuccaggu

SEQ ID NO: 124143 - RNA, 32 nt, Human
cguccacagcugaucccugggcccugcugcuc

SEQ ID NO: 124144 - RNA, 32 nt, Human
cguccacauauguauuuguguauguuaauguc

SEQ ID NO: 124145 - RNA, 32 nt, Human
cguccacauguagucgccuccaccucccugcc

SEQ ID NO: 124146 - RNA, 21 nt, Human
cguccaccacagcacagcccg

SEQ ID NO: 124147 - RNA, 32 nt, Human
cguccacccagccuuagucccugagcugucag

SEQ ID NO: 124148 - RNA, 32 nt, Human
cguccacccgccccucugggccugccuguggc

SEQ ID NO: 124149 - RNA, 28 nt, Human
cguccaccgucugcugccuacauccgcc

SEQ ID NO: 124150 - RNA, 32 nt, Human
cguccacgccgcucacuccagccgaggccccc

SEQ ID NO: 124151 - RNA, 32 nt, Human
cguccacuccacugcugaccagcccauucgcc

SEQ ID NO: 124152 - RNA, 32 nt, Human
cguccacuccgauggggaaugagggggagaag

SEQ ID NO: 124153 - RNA, 32 nt, Human
cguccacuuacugcgugaccucagccugucau

SEQ ID NO: 124154 - RNA, 32 nt, Human
cguccagaaauggugcucaccaugcuuccagc

SEQ ID NO: 124155 - RNA, 32 nt, Human
cguccagaaggccaggcauuugccgccucuga

SEQ ID NO: 124156 - RNA, 32 nt, Human
cguccagaccuuguucacacucucacauguuu

SEQ ID NO: 124157 - RNA, 32 nt, Human
cguccagauacuuggagacaucuccuccucac

SEQ ID NO: 124158 - RNA, 32 nt, Human
cguccagauccccaggauaagagaccacuuag

SEQ ID NO: 124159 - RNA, 32 nt, Human
cguccagccauggcuuccuauuccaaguagug

SEQ ID NO: 124160 - RNA, 23 nt, Human
cguccagcgagcgucacagcaca

SEQ ID NO: 124161 - RNA, 32 nt, Human
cguccagcuucucccccaaaccacagcacgcc

SEQ ID NO: 124162 - RNA, 32 nt, Human
cguccagcuucugcuugaauacuuucagugcc

SEQ ID NO: 124163 - RNA, 32 nt, Human
cguccagcuugaguguucuguucucuuccugc

SEQ ID NO: 124164 - RNA, 32 nt, Human
cguccagcuuugacagucaguuuugaugucag

SEQ ID NO: 124165 - RNA, 26 nt, Human
cguccaggaccgguuugaaguuaaug

SEQ ID NO: 124166 - RNA, 32 nt, Human
cguccaggcggcgcggcggcuccucacucauc

SEQ ID NO: 124167 - RNA, 32 nt, Human
cguccaggcugccccgcagcuccucacguucc

SEQ ID NO: 124168 - RNA, 21 nt, Human
cguccaggcuggagugcagug

SEQ ID NO: 124169 - RNA, 32 nt, Human
cguccagggucaccaagcagcagagcucuggg

SEQ ID NO: 124170 - RNA, 32 nt, Human
cguccagguaagguacucaacuguguggggua

SEQ ID NO: 124171 - RNA, 31 nt, Human
cguccaggugagucucccaucugcagagacg

SEQ ID NO: 124172 - RNA, 32 nt, Human
cguccaguuacaaacccaauaaacucuguaga

SEQ ID NO: 124173 - RNA, 32 nt, Human
cguccauccguccgucccuccuggggccggcg

SEQ ID NO: 124174 - RNA, 22 nt, Human
cguccaugcacccaccaccaaa

SEQ ID NO: 124175 - RNA, 32 nt, Human
cguccaugcuggcugccuucaggaagcuaaag

SEQ ID NO: 124176 - RNA, 32 nt, Human
cguccaugucuggaggacaagucgacaucacc

SEQ ID NO: 124177 - RNA, 32 nt, Human
cguccauuccucuggagucucuccuuguuugg

SEQ ID NO: 124178 - RNA, 32 nt, Human
cgucccaaagugcuaggauuacaggcaugagc

SEQ ID NO: 124179 - RNA, 32 nt, Human
cgucccaaagugcugggauuauaggcgugagc

SEQ ID NO: 124180 - RNA, 32 nt, Human
cgucccaagauggggugggggcauggagggag

SEQ ID NO: 124181 - RNA, 32 nt, Human
cgucccacagcagccuccaccagggcccuggu

SEQ ID NO: 124182 - RNA, 32 nt, Human
cgucccacgagacacuauuuucgguucucugg

SEQ ID NO: 124183 - RNA, 32 nt, Human
cgucccacuccacuccaggcugccggcaccug

SEQ ID NO: 124184 - RNA, 32 nt, Human
cgucccacugcaccgccuggcugagggcguua

SEQ ID NO: 124185 - RNA, 32 nt, Human
cgucccacugcacuccagcccgggcaacagag

SEQ ID NO: 124186 - RNA, 32 nt, Human
cgucccacugcacuccagccugggcaacagag

SEQ ID NO: 124187 - RNA, 32 nt, Human
cgucccagagugcugggauuacaguugugagc

SEQ ID NO: 124188 - RNA, 32 nt, Human
cgucccagccagacaagauggcaaacagugug

SEQ ID NO: 124189 - RNA, 32 nt, Human
cgucccagcgcugcucccuggaguuucuggaa

SEQ ID NO: 124190 - RNA, 32 nt, Human
cgucccagcuacuagggaggcugaggcaggag

SEQ ID NO: 124191 - RNA, 32 nt, Human
cgucccagcuacucaggaggccgaggcaggag

SEQ ID NO: 124192 - RNA, 32 nt, Human
cgucccagcuacucaggaggcugaggcaggag

SEQ ID NO: 124193 - RNA, 32 nt, Human
cgucccagcuacuugugaggcugaagcaggaa

SEQ ID NO: 124194 - RNA, 32 nt, Human
cgucccaggaagcagacaacacaggccugcgu

SEQ ID NO: 124195 - RNA, 32 nt, Human
cgucccaggaggcaggcaguggcuaugacagu

SEQ ID NO: 124196 - RNA, 32 nt, Human
cgucccauccagcuaccaccacggccaccacu

SEQ ID NO: 124197 - RNA, 32 nt, Human
cgucccaucccccgcccugaacuccgaucucu

SEQ ID NO: 124198 - RNA, 32 nt, Human
cgucccaugggagggccccaugucuccucaga

SEQ ID NO: 124199 - RNA, 32 nt, Human
cgucccauuuagcuuacccucccaguuggcca

SEQ ID NO: 124200 - RNA, 32 nt, Human
cgucccauuuucuccccuggccucuuacuugc

SEQ ID NO: 124201 - RNA, 32 nt, Human
cguccccaagccccgccuucuccagagaggcu

SEQ ID NO: 124202 - RNA, 32 nt, Human
cguccccacccccgcgccccagcccuggcagc

SEQ ID NO: 124203 - RNA, 32 nt, Human
cguccccagcugguucgggcugugcggggugg

SEQ ID NO: 124204 - RNA, 32 nt, Human
cguccccaugcugguguccgacgccgcuuacu

SEQ ID NO: 124205 - RNA, 32 nt, Human
cguccccauggcgacuguggcccggccccucc

SEQ ID NO: 124206 - RNA, 32 nt, Human
cgucccccagcccucaggccagugccaggaca

SEQ ID NO: 124207 - RNA, 32 nt, Human
cgucccccgaggcagggcacugaagggguuaa

SEQ ID NO: 124208 - RNA, 32 nt, Human
cgucccccggcccucaggccagugccaggaca

SEQ ID NO: 124209 - RNA, 21 nt, Human
cgucccccgggggcugcuucc

SEQ ID NO: 124210 - RNA, 32 nt, Human
cgucccccucccccucuccacucuuuacccac

SEQ ID NO: 124211 - RNA, 32 nt, Human
cgucccccugcucccccgcccagggccaggga

SEQ ID NO: 124212 - RNA, 32 nt, Human
cguccccggcgggcagccccaggcuggucccc

SEQ ID NO: 124213 - RNA, 27 nt, Human
cguccccggugcccagcauucugcggg

SEQ ID NO: 124214 - RNA, 32 nt, Human
cguccccuccccuuggauauuagggguaacga

SEQ ID NO: 124215 - RNA, 32 nt, Human
cguccccugccucaagaaauugccuccuuauu

SEQ ID NO: 124216 - RNA, 32 nt, Human
cguccccuguaagaugcgggaagugucagcuc

SEQ ID NO: 124217 - RNA, 32 nt, Human
cguccccugugagcugccugagccauugguug

SEQ ID NO: 124218 - RNA, 32 nt, Human
cguccccuuccccacccucuggcccccaccuu

SEQ ID NO: 124219 - RNA, 32 nt, Human
cguccccuucccgccgccgccaugaaguggau

SEQ ID NO: 124220 - RNA, 32 nt, Human
cguccccuucccuccgcccugcccuaagccac

SEQ ID NO: 124221 - RNA, 32 nt, Human
cgucccgaagugcugggauuacaggugugagc

SEQ ID NO: 124222 - RNA, 32 nt, Human
cgucccgaggagcugggauuacaggcacccac

SEQ ID NO: 124223 - RNA, 32 nt, Human
cgucccgaguaacugggauuacaggcacccgc

SEQ ID NO: 124224 - RNA, 32 nt, Human
cgucccgcacacacaacaugacaggccacaga

SEQ ID NO: 124225 - RNA, 32 nt, Human
cgucccgcaggcggagguaggccgcgggaggc

SEQ ID NO: 124226 - RNA, 32 nt, Human
cgucccgcggccagggccagagccaaggccag

SEQ ID NO: 124227 - RNA, 32 nt, Human
cgucccggaggcggcggcgcagggaggagccc

SEQ ID NO: 124228 - RNA, 32 nt, Human
cgucccggaggcgguggcgcagggaggggccc

SEQ ID NO: 124229 - RNA, 21 nt, Human
cgucccggcugaagugcagug

SEQ ID NO: 124230 - RNA, 32 nt, Human
cgucccgggagcugggagcagcgcgggcagcc

SEQ ID NO: 124231 - RNA, 32 nt, Human
cgucccgggcccggcggcugaagaggagccgc

SEQ ID NO: 124232 - RNA, 18 nt, Human
cgucccgggccucagccc

SEQ ID NO: 124233 - RNA, 32 nt, Human
cgucccggucccauccucgccgcgcuccagca

SEQ ID NO: 124234 - RNA, 32 nt, Human
cgucccuaauaaaaauacaaaaauuagcuggg

SEQ ID NO: 124235 - RNA, 32 nt, Human
cgucccuacuaaaaauaacaaaauuagccggg

SEQ ID NO: 124236 - RNA, 32 nt, Human
cgucccuacuaaaaauacaaaauuagccaggu

SEQ ID NO: 124237 - RNA, 19 nt, Human
cgucccuccccuccuggcu

SEQ ID NO: 124238 - RNA, 32 nt, Human
cgucccucuccucugcaccccugcugcuucug

SEQ ID NO: 124239 - RNA, 32 nt, Human
cgucccucuuucuccaccccgccgagccuaaa

SEQ ID NO: 124240 - RNA, 32 nt, Human
cgucccugcccaggaacccagacuggacuuca

SEQ ID NO: 124241 - RNA, 32 nt, Human
cgucccugcguggggcccaugggugagacacu

SEQ ID NO: 124242 - RNA, 32 nt, Human
cgucccugggcaauggaaugucucgguuuaaa

SEQ ID NO: 124243 - RNA, 32 nt, Human
cgucccuguguacaucgcagcaggugugguca

SEQ ID NO: 124244 - RNA, 32 nt, Human
cgucccugugugaugcuauuucuggcuccguc

SEQ ID NO: 124245 - RNA, 28 nt, Human
cgucccuucuccucuucccugacccuca

SEQ ID NO: 124246 - RNA, 24 nt, Human
cgucccuucucuuuggggcuccuu

SEQ ID NO: 124247 - RNA, 32 nt, Human
cgucccuugccugccuucccaggagagacgug

SEQ ID NO: 124248 - RNA, 32 nt, Human
cgucccuuuacaccccaccauccaguuuugcc

SEQ ID NO: 124249 - RNA, 32 nt, Human
cguccgagaggcagagcugacaaggaagguuu

SEQ ID NO: 124250 - RNA, 32 nt, Human
cguccgagcccaagccccuccccuccacuccc

SEQ ID NO: 124251 - RNA, 32 nt, Human
cguccgaggcugcuucccagaggagcagcucu

SEQ ID NO: 124252 - RNA, 32 nt, Human
cguccgcagccaggaaaagcacaaagaagaaa

SEQ ID NO: 124253 - RNA, 32 nt, Human
cguccgccgcuguucuaaggagagaagugggg

SEQ ID NO: 124254 - RNA, 32 nt, Human
cguccgccucaguucacagguguugcuguaac

SEQ ID NO: 124255 - RNA, 32 nt, Human
cguccgccugcucucuacugugcagaccuccu

SEQ ID NO: 124256 - RNA, 32 nt, Human
cguccgcggccagugcccuuccuccuccuccu

SEQ ID NO: 124257 - RNA, 32 nt, Human
cguccgcgggacuccggccgguugccggcccc

SEQ ID NO: 124258 - RNA, 32 nt, Human
cguccgcugcucccuggugccccacuccggag

SEQ ID NO: 124259 - RNA, 26 nt, Human
cguccggccauagaaggaggaggcaa

SEQ ID NO: 124260 - RNA, 32 nt, Human
cguccggcucucaggcccuggagcucggccuc

SEQ ID NO: 124261 - RNA, 32 nt, Human
cguccgggacgaggguuucaucaccuuaaaug

SEQ ID NO: 124262 - RNA, 32 nt, Human
cguccgggcuuccuguggauuggcggaauguu

SEQ ID NO: 124263 - RNA, 32 nt, Human
cguccggguggaggggccggagggcgggcccc

SEQ ID NO: 124264 - RNA, 32 nt, Human
cguccguggauccagaggugguuaugacucgu

SEQ ID NO: 124265 - RNA, 32 nt, Human
cguccguggggagcgggguccuggaggcugcg

SEQ ID NO: 124266 - RNA, 32 nt, Human
cguccguuccaggagcaggcaggcuggggcuc

SEQ ID NO: 124267 - RNA, 32 nt, Human
cguccuagcaggcauugccucggcuggcuccc

SEQ ID NO: 124268 - RNA, 32 nt, Human
cguccucacucccaccuguuacugcugggagu

SEQ ID NO: 124269 - RNA, 32 nt, Human
cguccucaucucugucccucccuccuuuucuu

SEQ ID NO: 124270 - RNA, 32 nt, Human
cguccucccaagugcuggaauuacagguguga

SEQ ID NO: 124271 - RNA, 32 nt, Human
cguccucccugccuccuuccgggacaagccug

SEQ ID NO: 124272 - RNA, 32 nt, Human
cguccucccuuccugggcacacggccaccccg

SEQ ID NO: 124273 - RNA, 32 nt, Human
cguccuccucuuacucauccaucccagucaac

SEQ ID NO: 124274 - RNA, 32 nt, Human
cguccuccugcucccuaguggcccagggcccc

SEQ ID NO: 124275 - RNA, 32 nt, Human
cguccuccuguacccaggcaagagagaagcaa

SEQ ID NO: 124276 - RNA, 32 nt, Human
cguccucgccagccucccagcagcaggcgcgc

SEQ ID NO: 124277 - RNA, 32 nt, Human
cguccucuagcuccaucuccucgccugcuccc

SEQ ID NO: 124278 - RNA, 32 nt, Human
cguccucuccugucccuuccagccuggggccc

SEQ ID NO: 124279 - RNA, 32 nt, Human
cguccucugcggccucugccacuggugucagc

SEQ ID NO: 124280 - RNA, 23 nt, Human
cguccucuucccucugccuccca

SEQ ID NO: 124281 - RNA, 23 nt, Human
cguccucuugccucugccuccca

SEQ ID NO: 124282 - RNA, 32 nt, Human
cguccugaguagcugggaccacaggugcccgc

SEQ ID NO: 124283 - RNA, 32 nt, Human
cguccugaguagcugggacuacaggcgcgcac

SEQ ID NO: 124284 - RNA, 32 nt, Human
cguccugaguagcuggggauuacaggcgcccg

SEQ ID NO: 124285 - RNA, 32 nt, Human
cguccugauccacgaaggcguggaguggaagu

SEQ ID NO: 124286 - RNA, 32 nt, Human
cguccugcagaacgagcccugccuuggcugug

SEQ ID NO: 124287 - RNA, 32 nt, Human
cguccugcagaggcauggccuuccugccacug

SEQ ID NO: 124288 - RNA, 32 nt, Human
cguccugccccuuccuccuucaugccugggcc

SEQ ID NO: 124289 - RNA, 32 nt, Human
cguccugcccuaaaccuuuguuugucuuuaaa

SEQ ID NO: 124290 - RNA, 21 nt, Human
cguccugcccucuggggcucc

SEQ ID NO: 124291 - RNA, 32 nt, Human
cguccugcgagccugcacucacuucauccuca

SEQ ID NO: 124292 - RNA, 32 nt, Human
cguccuggagagagccugcccucguuuccagg

SEQ ID NO: 124293 - RNA, 22 nt, Human
cguccuggagcccugccuccca

SEQ ID NO: 124294 - RNA, 32 nt, Human
cguccuggcagggcaggcagagcucagcacag

SEQ ID NO: 124295 - RNA, 22 nt, Human
cguccuggccgacauggugaaa

SEQ ID NO: 124296 - RNA, 32 nt, Human
cguccuggccgacauggugaaaccccaucucu

SEQ ID NO: 124297 - RNA, 32 nt, Human
cguccuggcuaacaccgugaaaccccaucucu

SEQ ID NO: 124298 - RNA, 22 nt, Human
cguccuggcuaacacggugaaa

SEQ ID NO: 124299 - RNA, 22 nt, Human
cguccuggcuaacauggugaaa

SEQ ID NO: 124300 - RNA, 32 nt, Human
cguccuggcuaacauggugaaaccccgucucu

SEQ ID NO: 124301 - RNA, 32 nt, Human
cguccugggaagugggcccuucccugggucuc

SEQ ID NO: 124302 - RNA, 32 nt, Human
cguccugggaaugucauuucugcuccacuccu

SEQ ID NO: 124303 - RNA, 32 nt, Human
cguccugggcaggugaccuggagcauccggca

SEQ ID NO: 124304 - RNA, 32 nt, Human
cguccugggggagggguagccgacggggcagg

SEQ ID NO: 124305 - RNA, 32 nt, Human
cguccugggugacaucccggaccugcugcacu

SEQ ID NO: 124306 - RNA, 32 nt, Human
cguccugguggagcccuaugugcgggugucuu

SEQ ID NO: 124307 - RNA, 32 nt, Human
cguccuguaccugacuccaccuccaggagaag

SEQ ID NO: 124308 - RNA, 32 nt, Human
cguccugugccccucugcuccggcacggcccu

SEQ ID NO: 124309 - RNA, 32 nt, Human
cguccuguggugaggccagaugcagcccuccc

SEQ ID NO: 124310 - RNA, 32 nt, Human
cguccuguuccccucacuggucucuccagugu

SEQ ID NO: 124311 - RNA, 32 nt, Human
cguccuuagucacugcaggcccaggcgggcag

SEQ ID NO: 124312 - RNA, 21 nt, Human
cguccuucccguccagcccca

SEQ ID NO: 124313 - RNA, 32 nt, Human
cguccuuccgcacgugcccacacacacgcagu

SEQ ID NO: 124314 - RNA, 32 nt, Human
cguccuuccuuagacagaggccagcagggacu

SEQ ID NO: 124315 - RNA, 23 nt, Human
cguccuugcucccugcacccuca

SEQ ID NO: 124316 - RNA, 32 nt, Human
cguccuugcuuccucugagcggaggccuccau

SEQ ID NO: 124317 - RNA, 32 nt, Human
cguccuuggagaagauggaagcggagaggcgg

SEQ ID NO: 124318 - RNA, 32 nt, Human
cguccuuggccgccccuccacccccuccaacu

SEQ ID NO: 124319 - RNA, 32 nt, Human
cguccuuggcuuucuggguccugggcugcccc

SEQ ID NO: 124320 - RNA, 32 nt, Human
cguccuugggggugacugcucccuaacuccag

SEQ ID NO: 124321 - RNA, 32 nt, Human
cguccuuuggugcugggaacucuacaucuagc

SEQ ID NO: 124322 - RNA, 32 nt, Human
cgucgagccaaggcuuccgaagaccagcugag

SEQ ID NO: 124323 - RNA, 32 nt, Human
cgucgaggauagggcccaccacacaacacggc

SEQ ID NO: 124324 - RNA, 32 nt, Human
cgucgagggcagcagagcgugcugcacugcuc

SEQ ID NO: 124325 - RNA, 32 nt, Human
cgucgagggcugcagaacacagcgggguccug

SEQ ID NO: 124326 - RNA, 32 nt, Human
cgucgauugcaucucugggcuccagggauaaa

SEQ ID NO: 124327 - RNA, 32 nt, Human
cgucgcacacagacauggggaacuuggcauga

SEQ ID NO: 124328 - RNA, 32 nt, Human
cgucgcaccacacugcaaggcuuugcaaacuu

SEQ ID NO: 124329 - RNA, 32 nt, Human
cgucgcaguuacuaaggcguggggaagauagc

SEQ ID NO: 124330 - RNA, 32 nt, Human
cgucgccacugccccuccuacucuccaggggu

SEQ ID NO: 124331 - RNA, 32 nt, Human
cgucgccagcaaaagaagagauacacugcauu

SEQ ID NO: 124332 - RNA, 32 nt, Human
cgucgccauguccucgguguuuggaaaacccc

SEQ ID NO: 124333 - RNA, 25 nt, Human
cgucgcccaagcuggagcgcaaugg

SEQ ID NO: 124334 - RNA, 25 nt, Human
cgucgcccaagcuggaguacagugg

SEQ ID NO: 124335 - RNA, 25 nt, Human
cgucgcccaggcuagagugcagugg

SEQ ID NO: 124336 - RNA, 25 nt, Human
cgucgcccaggcuggaaugcagugg

SEQ ID NO: 124337 - RNA, 25 nt, Human
cgucgcccaggcuggagcgcagugg

SEQ ID NO: 124338 - RNA, 25 nt, Human
cgucgcccaggcuggaguacagugg

SEQ ID NO: 124339 - RNA, 22 nt, Human
cgucgcccaggcuggagugcag

SEQ ID NO: 124340 - RNA, 25 nt, Human
cgucgcccaggcuggagugcagugg

SEQ ID NO: 124341 - RNA, 32 nt, Human
cgucgcccuccgucccguugggccccacauuc

SEQ ID NO: 124342 - RNA, 32 nt, Human
cgucgcccugcacacgcacacgcacacagccu

SEQ ID NO: 124343 - RNA, 18 nt, Human
cgucgccgccgccgccac

SEQ ID NO: 124344 - RNA, 32 nt, Human
cgucgccggaguagcuugggaggucggggagg

SEQ ID NO: 124345 - RNA, 32 nt, Human
cgucgccugcucccucugcugcauuucaagcu

SEQ ID NO: 124346 - RNA, 32 nt, Human
cgucgccuucgccuuuuccgcugcggacucug

SEQ ID NO: 124347 - RNA, 32 nt, Human
cgucgccuuugcagaaccaccugggccccuuu

SEQ ID NO: 124348 - RNA, 32 nt, Human
cgucgcuacuaaaaauacaaaaaugagucgga

SEQ ID NO: 124349 - RNA, 32 nt, Human
cgucgcucccccucgccuucucggccgcccuc

SEQ ID NO: 124350 - RNA, 32 nt, Human
cgucgcugccgcgucgcuuucucgcuccuugg

SEQ ID NO: 124351 - RNA, 32 nt, Human
cgucgcuggacuccagcccgggcgacagagug

SEQ ID NO: 124352 - RNA, 32 nt, Human
cgucgcugggaggagcgagggagcgagcggga

SEQ ID NO: 124353 - RNA, 24 nt, Human
cgucggaccacgcagcggacacug

SEQ ID NO: 124354 - RNA, 32 nt, Human
cgucggaccagccggcgcaagcgggcgaaggu

SEQ ID NO: 124355 - RNA, 32 nt, Human
cgucggagaagagagcgggagccgcggacaga

SEQ ID NO: 124356 - RNA, 32 nt, Human
cgucggaggagcugcagggcgagcccggacgg

SEQ ID NO: 124357 - RNA, 32 nt, Human
cgucggcagagcaaccccaccuccaggcauua

SEQ ID NO: 124358 - RNA, 18 nt, Human
cgucggcagcggcgcgag

SEQ ID NO: 124359 - RNA, 32 nt, Human
cgucggcccugccucccggaccacccugcggg

SEQ ID NO: 124360 - RNA, 32 nt, Human
cgucggcccuugcauucgcauccuuugcaggu

SEQ ID NO: 124361 - RNA, 32 nt, Human
cgucgggacgggcgaguuagggacuuggguuu

SEQ ID NO: 124362 - RNA, 32 nt, Human
cgucgggagugaggaccaggcugagaacucgg

SEQ ID NO: 124363 - RNA, 32 nt, Human
cgucgggcaccagcuacucggccccgcacccu

SEQ ID NO: 124364 - RNA, 32 nt, Human
cgucgggcggcggccucacagcugggggcccu

SEQ ID NO: 124365 - RNA, 32 nt, Human
cgucggggagagagagcagucagaccgagcuu

SEQ ID NO: 124366 - RNA, 32 nt, Human
cgucggggugugugucuacaagcacggggcuu

SEQ ID NO: 124367 - RNA, 32 nt, Human
cgucgguccugagcgcugccuuccgcguuccg

SEQ ID NO: 124368 - RNA, 32 nt, Human
cgucguaacaucugggcaguguuaacagaauc

SEQ ID NO: 124369 - RNA, 32 nt, Human
cgucguaacugcagcugaucugggcacagugg

SEQ ID NO: 124370 - RNA, 32 nt, Human
cgucgucaucaucuugcugagucaucaucauc

SEQ ID NO: 124371 - RNA, 32 nt, Human
cgucgucaucaucuugcugagugucucuugaa

SEQ ID NO: 124372 - RNA, 32 nt, Human
cgucguccaagcucuugauauucuucuguucc

SEQ ID NO: 124373 - RNA, 32 nt, Human
cgucguccccucuccuccucugacccugaccc

SEQ ID NO: 124374 - RNA, 32 nt, Human
cgucguccuacaaaugaggaaaccgagccuau

SEQ ID NO: 124375 - RNA, 32 nt, Human
cgucgugccuagccaaggagaaguuucaguca

SEQ ID NO: 124376 - RNA, 21 nt, Human
cgucguggccuggauccucug

SEQ ID NO: 124377 - RNA, 32 nt, Human
cgucguggcucaagcccggccacgccgcccca

SEQ ID NO: 124378 - RNA, 32 nt, Human
cgucguggcucaugccuguaaucccagcacuu

SEQ ID NO: 124379 - RNA, 32 nt, Human
cgucguguguuuugguauuguugggauugguc

SEQ ID NO: 124380 - RNA, 32 nt, Human
cgucguuagggagggcaggaguggcgucucug

SEQ ID NO: 124381 - RNA, 32 nt, Human
cgucguucuuucuccccugccucucaccucua

SEQ ID NO: 124382 - RNA, 32 nt, Human
cgucguuguucagaguccagauggcagugaug

SEQ ID NO: 124383 - RNA, 32 nt, Human
cgucuaaaaauacaaaaauuagccgggcgugg

SEQ ID NO: 124384 - RNA, 32 nt, Human
cgucuaagccuccugaguagcugggacauacc

SEQ ID NO: 124385 - RNA, 32 nt, Human
cgucuaagucaugagcugagcagggagauccu

SEQ ID NO: 124386 - RNA, 32 nt, Human
cgucuacaccacuuguuccaagcaggcggccc

SEQ ID NO: 124387 - RNA, 22 nt, Human
cgucuaccccgaacucugcugg

SEQ ID NO: 124388 - RNA, 32 nt, Human
cgucuaccccuccagucagcccagcgcccauc

SEQ ID NO: 124389 - RNA, 32 nt, Human
cgucuaccucauucuuccuggacacaggacaa

SEQ ID NO: 124390 - RNA, 32 nt, Human
cgucuaccuuuugcccuuauucaauaguggga

SEQ ID NO: 124391 - RNA, 32 nt, Human
cgucuagccuccagauccgugagagaauacau

SEQ ID NO: 124392 - RNA, 32 nt, Human
cgucuaggagcagaaaacccaagggcaggugg

SEQ ID NO: 124393 - RNA, 32 nt, Human
cgucuaguuggacacccccuacccacagcaag

SEQ ID NO: 124394 - RNA, 32 nt, Human
cgucuauacuaaaaauacaaaaauuggcuggg

SEQ ID NO: 124395 - RNA, 32 nt, Human
cgucuauucaggucaacacugcacuccagccu

SEQ ID NO: 124396 - RNA, 32 nt, Human
cgucucaaaacaaaacaaaaguggguggcuca

SEQ ID NO: 124397 - RNA, 32 nt, Human
cgucucacagccugacaguccccacaucagcc

SEQ ID NO: 124398 - RNA, 32 nt, Human
cgucucaccauccugggcuuccaacggagacu

SEQ ID NO: 124399 - RNA, 32 nt, Human
cgucucacccacucccagccuggggaagaagg

SEQ ID NO: 124400 - RNA, 32 nt, Human
cgucucacugcaaccuccgccucccagauuca

SEQ ID NO: 124401 - RNA, 32 nt, Human
cgucucacugcaaccucugccuccuggguuca

SEQ ID NO: 124402 - RNA, 32 nt, Human
cgucucacugcagccucaaccuccuggguuca

SEQ ID NO: 124403 - RNA, 32 nt, Human
cgucucagaaaaaggaaaagaaaaacaaucua

SEQ ID NO: 124404 - RNA, 32 nt, Human
cgucucagagagagccuggacagccgcuggag

SEQ ID NO: 124405 - RNA, 32 nt, Human
cgucucagcuguugggagacaguaggcaggcu

SEQ ID NO: 124406 - RNA, 32 nt, Human
cgucucauaggcugggcacaucuguggacccu

SEQ ID NO: 124407 - RNA, 32 nt, Human
cgucucaucaaaaugaugacagguaaacuaua

SEQ ID NO: 124408 - RNA, 32 nt, Human
cgucucauggggcagaaaaagaucugggcuuc

SEQ ID NO: 124409 - RNA, 32 nt, Human
cgucuccaaacagcuaacccagacgucacccc

SEQ ID NO: 124410 - RNA, 32 nt, Human
cgucuccaaagggcaggaaggagccggguguc

SEQ ID NO: 124411 - RNA, 32 nt, Human
cgucuccaagcccaacaccaguaaagggucug

SEQ ID NO: 124412 - RNA, 32 nt, Human
cgucuccacagggagaggggcaacaggaggcu

SEQ ID NO: 124413 - RNA, 32 nt, Human
cgucuccacuaaaaauacaaaaauuagccagg

SEQ ID NO: 124414 - RNA, 32 nt, Human
cgucuccacuaaaaauacaaaaauuagccggg

SEQ ID NO: 124415 - RNA, 32 nt, Human
cgucuccacuaaaaauacaaaaauuagcuggg

SEQ ID NO: 124416 - RNA, 32 nt, Human
cgucuccacuaaaaauacaaaauuagccgggc

SEQ ID NO: 124417 - RNA, 32 nt, Human
cgucuccacuaaaaauacaaaauuagcugggc

SEQ ID NO: 124418 - RNA, 27 nt, Human
cgucuccacuaaaauacaaaauuagcu

SEQ ID NO: 124419 - RNA, 32 nt, Human
cgucuccacugaaaauagaaaaauuagcuggg

SEQ ID NO: 124420 - RNA, 32 nt, Human
cgucuccaggaaaaggagagggguuaagaugc

SEQ ID NO: 124421 - RNA, 32 nt, Human
cgucuccauuaaaaauauaaaaauuagcaggg

SEQ ID NO: 124422 - RNA, 24 nt, Human
cgucuccauugaauagcaauagcu

SEQ ID NO: 124423 - RNA, 32 nt, Human
cgucucccagaggggccggaaguggcagugga

SEQ ID NO: 124424 - RNA, 32 nt, Human
cgucuccccacggcgaaccucacuguguuguc

SEQ ID NO: 124425 - RNA, 32 nt, Human
cgucucccccuucuucccuccucccuucuucc

SEQ ID NO: 124426 - RNA, 32 nt, Human
cgucucccuacccuggcucugccaucagccuu

SEQ ID NO: 124427 - RNA, 32 nt, Human
cgucucccucacaggagcuggaagggauauuu

SEQ ID NO: 124428 - RNA, 32 nt, Human
cgucucccuccacccacgucccucacccgccg

SEQ ID NO: 124429 - RNA, 32 nt, Human
cgucucccuucccugccuccuuuccuuucccu

SEQ ID NO: 124430 - RNA, 32 nt, Human
cgucuccucaucccucacccugaccuuucucc

SEQ ID NO: 124431 - RNA, 20 nt, Human
cgucuccucccucuccuucc

SEQ ID NO: 124432 - RNA, 23 nt, Human
cgucuccuccuccugcgccccca

SEQ ID NO: 124433 - RNA, 32 nt, Human
cgucuccucuaaaaauaccaaaauuagcuggg

SEQ ID NO: 124434 - RNA, 32 nt, Human
cgucuccucugccuagggagcaggacuugggc

SEQ ID NO: 124435 - RNA, 19 nt, Human
cgucuccucuucccuuccc

SEQ ID NO: 124436 - RNA, 32 nt, Human
cgucuccugcagcucccaccaugcuggacuca

SEQ ID NO: 124437 - RNA, 32 nt, Human
cgucuccugcgugaggaguugguuggaggucc

SEQ ID NO: 124438 - RNA, 24 nt, Human
cgucuccuuccuccgcugcuucca

SEQ ID NO: 124439 - RNA, 32 nt, Human
cgucucgacuaaaaauacaaaaauuagcgggu

SEQ ID NO: 124440 - RNA, 32 nt, Human
cgucucgccaagcaggacagugcuugauacag

SEQ ID NO: 124441 - RNA, 32 nt, Human
cgucucggcuuuccuucuccuuccucuagucc

SEQ ID NO: 124442 - RNA, 32 nt, Human
cgucucgggugaggaggucgcgccggaagugg

SEQ ID NO: 124443 - RNA, 32 nt, Human
cgucucuaauaaaaauacaaaaauuagccagg

SEQ ID NO: 124444 - RNA, 32 nt, Human
cgucucuaauaaaaauacaaaaauuagcugga

SEQ ID NO: 124445 - RNA, 32 nt, Human
cgucucuaauaaaaauacgaaaaauuagccag

SEQ ID NO: 124446 - RNA, 32 nt, Human
cgucucuaauaaaaauauaaaaauuagccugg

SEQ ID NO: 124447 - RNA, 32 nt, Human
cgucucuacaaaaacuacaaaaauuagccggg

SEQ ID NO: 124448 - RNA, 32 nt, Human
cgucucuacaaaauaucuaaaaauuagcuggg

SEQ ID NO: 124449 - RNA, 32 nt, Human
cgucucuaccaaaaauaaaaauaaaaauuauc

SEQ ID NO: 124450 - RNA, 32 nt, Human
cgucucuaccaaaaauacaaaaauuagccagg

SEQ ID NO: 124451 - RNA, 32 nt, Human
cgucucuaccaaaaauacaaaaauuagccggg

SEQ ID NO: 124452 - RNA, 32 nt, Human
cgucucuaccaaaaauacaaaaauuagcuggg

SEQ ID NO: 124453 - RNA, 32 nt, Human
cgucucuaccaaacagacaaaaagcagccagg

SEQ ID NO: 124454 - RNA, 32 nt, Human
cgucucuacuaaaaacacaaaaauuagccagg

SEQ ID NO: 124455 - RNA, 32 nt, Human
cgucucuacuaaaaacacaaaaauuagccgga

SEQ ID NO: 124456 - RNA, 32 nt, Human
cgucucuacuaaaaacacaaaaauuagccggg

SEQ ID NO: 124457 - RNA, 32 nt, Human
cgucucuacuaaaaacacaaaaauuagcuggg

SEQ ID NO: 124458 - RNA, 32 nt, Human
cgucucuacuaaaaacacaaaaguuagcugag

SEQ ID NO: 124459 - RNA, 32 nt, Human
cgucucuacuaaaaauaaagaaagauuagcug

SEQ ID NO: 124460 - RNA, 32 nt, Human
cgucucuacuaaaaauaacaaaaauuagccag

SEQ ID NO: 124461 - RNA, 32 nt, Human
cgucucuacuaaaaauaacaaaaauuagcugg

SEQ ID NO: 124462 - RNA, 32 nt, Human
cgucucuacuaaaaauaagaaaaauuagcugg

SEQ ID NO: 124463 - RNA, 32 nt, Human
cgucucuacuaaaaauacaaaaacuagcuggg

SEQ ID NO: 124464 - RNA, 32 nt, Human
cgucucuacuaaaaauacaaaaacuuagccgg

SEQ ID NO: 124465 - RNA, 32 nt, Human
cgucucuacuaaaaauacaaaaacuuagcugg

SEQ ID NO: 124466 - RNA, 32 nt, Human
cgucucuacuaaaaauacaaaaagccgggcgu

SEQ ID NO: 124467 - RNA, 32 nt, Human
cgucucuacuaaaaauacaaaaaguagcugaa

SEQ ID NO: 124468 - RNA, 32 nt, Human
cgucucuacuaaaaauacaaaaaucagcgggg

SEQ ID NO: 124469 - RNA, 32 nt, Human
cgucucuacuaaaaauacaaaaaucagcuggg

SEQ ID NO: 124470 - RNA, 32 nt, Human
cgucucuacuaaaaauacaaaaaugagcaagg

SEQ ID NO: 124471 - RNA, 32 nt, Human
cgucucuacuaaaaauacaaaaauuaaccagu

SEQ ID NO: 124472 - RNA, 32 nt, Human
cgucucuacuaaaaauacaaaaauuaacuggg

SEQ ID NO: 124473 - RNA, 32 nt, Human
cgucucuacuaaaaauacaaaaauuacccagg

SEQ ID NO: 124474 - RNA, 32 nt, Human
cgucucuacuaaaaauacaaaaauuagacgag

SEQ ID NO: 124475 - RNA, 32 nt, Human
cgucucuacuaaaaauacaaaaauuagccagg

SEQ ID NO: 124476 - RNA, 32 nt, Human
cgucucuacuaaaaauacaaaaauuagccagu

SEQ ID NO: 124477 - RNA, 32 nt, Human
cgucucuacuaaaaauacaaaaauuagccaug

SEQ ID NO: 124478 - RNA, 32 nt, Human
cgucucuacuaaaaauacaaaaauuagcccgg

SEQ ID NO: 124479 - RNA, 32 nt, Human
cgucucuacuaaaaauacaaaaauuagccgac

SEQ ID NO: 124480 - RNA, 32 nt, Human
cgucucuacuaaaaauacaaaaauuagccgag

SEQ ID NO: 124481 - RNA, 32 nt, Human
cgucucuacuaaaaauacaaaaauuagccggg

SEQ ID NO: 124482 - RNA, 32 nt, Human
cgucucuacuaaaaauacaaaaauuagccugg

SEQ ID NO: 124483 - RNA, 32 nt, Human
cgucucuacuaaaaauacaaaaauuagcggcc

SEQ ID NO: 124484 - RNA, 32 nt, Human
cgucucuacuaaaaauacaaaaauuagcgggc

SEQ ID NO: 124485 - RNA, 32 nt, Human
cgucucuacuaaaaauacaaaaauuagcuagg

SEQ ID NO: 124486 - RNA, 32 nt, Human
cgucucuacuaaaaauacaaaaauuagcugga

SEQ ID NO: 124487 - RNA, 32 nt, Human
cgucucuacuaaaaauacaaaaauuagcuggg

SEQ ID NO: 124488 - RNA, 32 nt, Human
cgucucuacuaaaaauacaaaaauuagguggg

SEQ ID NO: 124489 - RNA, 32 nt, Human
cgucucuacuaaaaauacaaaaauuagucagg

SEQ ID NO: 124490 - RNA, 32 nt, Human
cgucucuacuaaaaauacaaaaauuagucggg

SEQ ID NO: 124491 - RNA, 32 nt, Human
cgucucuacuaaaaauacaaaaauuaguucgg

SEQ ID NO: 124492 - RNA, 32 nt, Human
cgucucuacuaaaaauacaaaaauuauccagg

SEQ ID NO: 124493 - RNA, 32 nt, Human
cgucucuacuaaaaauacaaaaauuauccggg

SEQ ID NO: 124494 - RNA, 32 nt, Human
cgucucuacuaaaaauacaaaaauuguccggg

SEQ ID NO: 124495 - RNA, 32 nt, Human
cgucucuacuaaaaauacaaaaauuugcuggg

SEQ ID NO: 124496 - RNA, 32 nt, Human
cgucucuacuaaaaauacaaaacaauuagccg

SEQ ID NO: 124497 - RNA, 32 nt, Human
cgucucuacuaaaaauacaaaagaaaauuagc

SEQ ID NO: 124498 - RNA, 32 nt, Human
cgucucuacuaaaaauacaaaaguuagcaggg

SEQ ID NO: 124499 - RNA, 32 nt, Human
cgucucuacuaaaaauacaaaaguuagccggg

SEQ ID NO: 124500 - RNA, 32 nt, Human
cgucucuacuaaaaauacaaaauauuagcugg

SEQ ID NO: 124501 - RNA, 32 nt, Human
cgucucuacuaaaaauacaaaauuaacugggc

SEQ ID NO: 124502 - RNA, 32 nt, Human
cgucucuacuaaaaauacaaaauuagccagac

SEQ ID NO: 124503 - RNA, 32 nt, Human
cgucucuacuaaaaauacaaaauuagccagau

SEQ ID NO: 124504 - RNA, 32 nt, Human
cgucucuacuaaaaauacaaaauuagccaggc

SEQ ID NO: 124505 - RNA, 32 nt, Human
cgucucuacuaaaaauacaaaauuagccgagc

SEQ ID NO: 124506 - RNA, 32 nt, Human
cgucucuacuaaaaauacaaaauuagccggac

SEQ ID NO: 124507 - RNA, 32 nt, Human
cgucucuacuaaaaauacaaaauuagccgggc

SEQ ID NO: 124508 - RNA, 32 nt, Human
cgucucuacuaaaaauacaaaauuagccgggu

SEQ ID NO: 124509 - RNA, 32 nt, Human
cgucucuacuaaaaauacaaaauuagccgguc

SEQ ID NO: 124510 - RNA, 32 nt, Human
cgucucuacuaaaaauacaaaauuagcugggc

SEQ ID NO: 124511 - RNA, 32 nt, Human
cgucucuacuaaaaauacaaaauuagcugggu

SEQ ID NO: 124512 - RNA, 32 nt, Human
cgucucuacuaaaaauacaaaauuagucgggc

SEQ ID NO: 124513 - RNA, 32 nt, Human
cgucucuacuaaaaauacaaaauuagucgggu

SEQ ID NO: 124514 - RNA, 32 nt, Human
cgucucuacuaaaaauacaaaauuauccgguc

SEQ ID NO: 124515 - RNA, 32 nt, Human
cgucucuacuaaaaauacaaaauucagccagg

SEQ ID NO: 124516 - RNA, 32 nt, Human
cgucucuacuaaaaauacaaaauuggcagggu

SEQ ID NO: 124517 - RNA, 32 nt, Human
cgucucuacuaaaaauacaaaauuuagccagg

SEQ ID NO: 124518 - RNA, 32 nt, Human
cgucucuacuaaaaauacaaaauuuaucuggg

SEQ ID NO: 124519 - RNA, 32 nt, Human
cgucucuacuaaaaauacaaacaaaauuagcu

SEQ ID NO: 124520 - RNA, 32 nt, Human
cgucucuacuaaaaauacaaacaaauuagccg

SEQ ID NO: 124521 - RNA, 32 nt, Human
cgucucuacuaaaaauacaaacguuagccggg

SEQ ID NO: 124522 - RNA, 32 nt, Human
cgucucuacuaaaaauacaaauauauuagccg

SEQ ID NO: 124523 - RNA, 32 nt, Human
cgucucuacuaaaaauacaaauauuagccggc

SEQ ID NO: 124524 - RNA, 32 nt, Human
cgucucuacuaaaaauacaaauauuagccggg

SEQ ID NO: 124525 - RNA, 32 nt, Human
cgucucuacuaaaaauacaaauuuagccgggc

SEQ ID NO: 124526 - RNA, 32 nt, Human
cgucucuacuaaaaauacaagaauuagccagg

SEQ ID NO: 124527 - RNA, 32 nt, Human
cgucucuacuaaaaauacacaacuuagccagu

SEQ ID NO: 124528 - RNA, 32 nt, Human
cgucucuacuaaaaauacacaauuagccggcg

SEQ ID NO: 124529 - RNA, 32 nt, Human
cgucucuacuaaaaauacagaaaauuagcugg

SEQ ID NO: 124530 - RNA, 32 nt, Human
cgucucuacuaaaaauacagaauuagcugagu

SEQ ID NO: 124531 - RNA, 32 nt, Human
cgucucuacuaaaaauacagaauuagucaggc

SEQ ID NO: 124532 - RNA, 32 nt, Human
cgucucuacuaaaaauaccaaaaauuagccgg

SEQ ID NO: 124533 - RNA, 32 nt, Human
cgucucuacuaaaaauaccaaaauuagccagg

SEQ ID NO: 124534 - RNA, 32 nt, Human
cgucucuacuaaaaauacgaaacuuagcuggg

SEQ ID NO: 124535 - RNA, 32 nt, Human
cgucucuacuaaaaauagaaaaaugagcuggg

SEQ ID NO: 124536 - RNA, 32 nt, Human
cgucucuacuaaaaauagaaaaauuaagcugg

SEQ ID NO: 124537 - RNA, 32 nt, Human
cgucucuacuaaaaauagaaaaauuagcuggc

SEQ ID NO: 124538 - RNA, 32 nt, Human
cgucucuacuaaaaauagaagcauuagccgag

SEQ ID NO: 124539 - RNA, 32 nt, Human
cgucucuacuaaaaauagagaaaauuagccag

SEQ ID NO: 124540 - RNA, 32 nt, Human
cgucucuacuaaaaauauaaaaauuagcaggg

SEQ ID NO: 124541 - RNA, 32 nt, Human
cgucucuacuaaaaauauaaaaauuagccggg

SEQ ID NO: 124542 - RNA, 32 nt, Human
cgucucuacuaaaaauauaaaaauuagcuggg

SEQ ID NO: 124543 - RNA, 32 nt, Human
cgucucuacuaaaaauaugaaaauuagcuggg

SEQ ID NO: 124544 - RNA, 32 nt, Human
cgucucuacuaaaaaugcaaaaauuaacaggg

SEQ ID NO: 124545 - RNA, 32 nt, Human
cgucucuacuaaaaaugcaaaaauuaccggga

SEQ ID NO: 124546 - RNA, 32 nt, Human
cgucucuacuaaaaaugcaaaaauuagccagg

SEQ ID NO: 124547 - RNA, 32 nt, Human
cgucucuacuaaaaaugcaaaauuagccgggc

SEQ ID NO: 124548 - RNA, 32 nt, Human
cgucucuacuaaaaauuugaaauuagccaggc

SEQ ID NO: 124549 - RNA, 32 nt, Human
cgucucuacuaaaacuacaaaaauuagccggg

SEQ ID NO: 124550 - RNA, 32 nt, Human
cgucucuacuaaaacuacaaaaauuggccagg

SEQ ID NO: 124551 - RNA, 32 nt, Human
cgucucuacuaaaaguacaaaaauuagccagg

SEQ ID NO: 124552 - RNA, 32 nt, Human
cgucucuacuaaaagugcagaaauuggcuggg

SEQ ID NO: 124553 - RNA, 32 nt, Human
cgucucuacuaaaauacaaaaauuagccagac

SEQ ID NO: 124554 - RNA, 32 nt, Human
cgucucuacuaaaauacaaaaauuagcugggc

SEQ ID NO: 124555 - RNA, 32 nt, Human
cgucucuacuaaaauacaaaaauuaggugugg

SEQ ID NO: 124556 - RNA, 32 nt, Human
cgucucuacuaaaauacaaaaauuuagccggg

SEQ ID NO: 124557 - RNA, 32 nt, Human
cgucucuacuaaaauacauaaauuagccgggu

SEQ ID NO: 124558 - RNA, 32 nt, Human
cgucucuacuaaaauaguacaaaaauuagccg

SEQ ID NO: 124559 - RNA, 32 nt, Human
cgucucuacuaaaauauaaaaauuagccagau

SEQ ID NO: 124560 - RNA, 32 nt, Human
cgucucuacuaaaauauaagauuagccgggca

SEQ ID NO: 124561 - RNA, 32 nt, Human
cgucucuacuaaaauauacaaaaauuagccug

SEQ ID NO: 124562 - RNA, 32 nt, Human
cgucucuacuaaaauuauaaaaauuagccggg

SEQ ID NO: 124563 - RNA, 32 nt, Human
cgucucuacuaaacaugcaaaaauuagcuggg

SEQ ID NO: 124564 - RNA, 32 nt, Human
cgucucuacuaaagauacaaaaauuagccggg

SEQ ID NO: 124565 - RNA, 32 nt, Human
cgucucuacuaaagauacaaaaauuagcuggg

SEQ ID NO: 124566 - RNA, 32 nt, Human
cgucucuacuaaagauauaaaaauuagucgug

SEQ ID NO: 124567 - RNA, 32 nt, Human
cgucucuacuaaauauacaaaauuagccgggc

SEQ ID NO: 124568 - RNA, 32 nt, Human
cgucucuacuacaaauacaaaaauuagccggg

SEQ ID NO: 124569 - RNA, 32 nt, Human
cgucucuacuacaaauacaaaaauuagcuggg

SEQ ID NO: 124570 - RNA, 32 nt, Human
cgucucuacuagaaauacaaaaauuagcugga

SEQ ID NO: 124571 - RNA, 32 nt, Human
cgucucuacugaaaauacaaaaauuagccagg

SEQ ID NO: 124572 - RNA, 32 nt, Human
cgucucuacugaaaauacaaaaauuagccggg

SEQ ID NO: 124573 - RNA, 32 nt, Human
cgucucuacugaaaauacaaaaauuagcugga

SEQ ID NO: 124574 - RNA, 32 nt, Human
cgucucuacugaaaauacaaaaauuagucagg

SEQ ID NO: 124575 - RNA, 32 nt, Human
cgucucuacugaaaauacaaaauuagccgggc

SEQ ID NO: 124576 - RNA, 32 nt, Human
cgucucuacugaaaauacaagaaauuagcugg

SEQ ID NO: 124577 - RNA, 32 nt, Human
cgucucuacugaaaauauaaaaauuagccagg

SEQ ID NO: 124578 - RNA, 32 nt, Human
cgucucuacuuaaaauacaaauauuagcuggg

SEQ ID NO: 124579 - RNA, 32 nt, Human
cgucucuagcaaaaauacaaaaauuagucagg

SEQ ID NO: 124580 - RNA, 32 nt, Human
cgucucuaguaaaaauacaaaaauuagccagg

SEQ ID NO: 124581 - RNA, 32 nt, Human
cgucucuaguaaaaauacaaaauuuagucaga

SEQ ID NO: 124582 - RNA, 32 nt, Human
cgucucuaucagaaauacaaaauuuagccgag

SEQ ID NO: 124583 - RNA, 32 nt, Human
cgucucuauuaaaaauacaaaaacuuagccag

SEQ ID NO: 124584 - RNA, 32 nt, Human
cgucucuauuaaaaauacaaaaauuagacugg

SEQ ID NO: 124585 - RNA, 32 nt, Human
cgucucuauuaaaaauacaaaaauuagccgag

SEQ ID NO: 124586 - RNA, 32 nt, Human
cgucucuauuaaaaauacaaaaauuagcuggg

SEQ ID NO: 124587 - RNA, 32 nt, Human
cgucucuauuaaaaauacaaaauuagccgggc

SEQ ID NO: 124588 - RNA, 32 nt, Human
cgucucuauuaaaaauagaaaaauuagccagg

SEQ ID NO: 124589 - RNA, 32 nt, Human
cgucucuauuacaaauacaaaaagccgggugu

SEQ ID NO: 124590 - RNA, 32 nt, Human
cgucucuccuaaaaauacaaaaauuagccaga

SEQ ID NO: 124591 - RNA, 32 nt, Human
cgucucucggagcggugaccagcuguggucag

SEQ ID NO: 124592 - RNA, 32 nt, Human
cgucucucuccucccccucagccugagccggg

SEQ ID NO: 124593 - RNA, 32 nt, Human
cgucucucuguggagaagcagcuccaccucug

SEQ ID NO: 124594 - RNA, 32 nt, Human
cgucucucuucugcugucucuccuaccugucu

SEQ ID NO: 124595 - RNA, 32 nt, Human
cgucucugacauuuugagaucuuuggaaagga

SEQ ID NO: 124596 - RNA, 32 nt, Human
cgucucugcaccuuguaggauguccucauguc

SEQ ID NO: 124597 - RNA, 32 nt, Human
cgucucugcauccauuccuucaugucuuuauu

SEQ ID NO: 124598 - RNA, 32 nt, Human
cgucucugcuaaaaauacaaaaauuagccggg

SEQ ID NO: 124599 - RNA, 32 nt, Human
cgucucugcuaaaaauacaaaaauuagcuggg

SEQ ID NO: 124600 - RNA, 32 nt, Human
cgucucugcuaaaaauacaaaauuagcugggc

SEQ ID NO: 124601 - RNA, 32 nt, Human
cgucucugcuagaaauacaaaaauuggcuggg

SEQ ID NO: 124602 - RNA, 32 nt, Human
cgucucuggagacagauuaagugguggcaaga

SEQ ID NO: 124603 - RNA, 32 nt, Human
cgucucuggccugggccccugccccuuccacc

SEQ ID NO: 124604 - RNA, 32 nt, Human
cgucucuucuaaaaauacaaaaauuagcuggg

SEQ ID NO: 124605 - RNA, 32 nt, Human
cgucucuucugccugagugggccucucagguc

SEQ ID NO: 124606 - RNA, 32 nt, Human
cgucucuuucuaccuccucuuccagagaacca

SEQ ID NO: 124607 - RNA, 32 nt, Human
cgucugacaggcaaugcuggcuguuggcuggg

SEQ ID NO: 124608 - RNA, 32 nt, Human
cgucugacugugggcugggaggagggaggcag

SEQ ID NO: 124609 - RNA, 32 nt, Human
cgucugagccucaucuccucccucucugcagu

SEQ ID NO: 124610 - RNA, 32 nt, Human
cgucugaggccugcccccugggcuggggccuc

SEQ ID NO: 124611 - RNA, 32 nt, Human
cgucugaugggaggagucgugggagcccagcu

SEQ ID NO: 124612 - RNA, 32 nt, Human
cgucugauucauauccuaauguggaccaccaa

SEQ ID NO: 124613 - RNA, 32 nt, Human
cgucugauucauauccuaauguggaccaccca

SEQ ID NO: 124614 - RNA, 32 nt, Human
cgucugauuccuguuucugauuuccuuccuca

SEQ ID NO: 124615 - RNA, 32 nt, Human
cgucugcacagcugugaggcgaugcuguucca

SEQ ID NO: 124616 - RNA, 32 nt, Human
cgucugcagacccucuggaccuggucacgauu

SEQ ID NO: 124617 - RNA, 32 nt, Human
cgucugcagggugacgccugagacagcaccac

SEQ ID NO: 124618 - RNA, 32 nt, Human
cgucugcaucuucuucucagcugccuuuccgc

SEQ ID NO: 124619 - RNA, 32 nt, Human
cgucugcccuggccaccauccugggccugggg

SEQ ID NO: 124620 - RNA, 32 nt, Human
cgucugccgucugggcuggagcgcagucccca

SEQ ID NO: 124621 - RNA, 32 nt, Human
cgucugccgugugguucucuuuucuuccgaaa

SEQ ID NO: 124622 - RNA, 32 nt, Human
cgucugccucagccacugccuccgagaagcaa

SEQ ID NO: 124623 - RNA, 32 nt, Human
cgucugcguugcugccccgccugggccaggcc

SEQ ID NO: 124624 - RNA, 32 nt, Human
cgucugcugcagcugacccccucacacugagu

SEQ ID NO: 124625 - RNA, 32 nt, Human
cgucugcugcugcugcaggaggcuccacuucg

SEQ ID NO: 124626 - RNA, 32 nt, Human
cgucugcuuuuuccuuuauuccuaaccuucuu

SEQ ID NO: 124627 - RNA, 32 nt, Human
cgucuggagccccagcagccccuggggcacug

SEQ ID NO: 124628 - RNA, 32 nt, Human
cgucuggaggggcaggaguuuugcauuaagca

SEQ ID NO: 124629 - RNA, 32 nt, Human
cgucuggagucuggggagaggagcagggucuu

SEQ ID NO: 124630 - RNA, 32 nt, Human
cgucuggaguugaagagaggaugcuccucugc

SEQ ID NO: 124631 - RNA, 32 nt, Human
cgucuggcaaucuuccaacaaauguggcaccu

SEQ ID NO: 124632 - RNA, 32 nt, Human
cgucuggcacccaggaggugaggcagacacca

SEQ ID NO: 124633 - RNA, 32 nt, Human
cgucuggcagcagaaagccaaaaugacaggca

SEQ ID NO: 124634 - RNA, 32 nt, Human
cgucuggccccuccuuuuccaaagugaccaga

SEQ ID NO: 124635 - RNA, 32 nt, Human
cgucugggaaaagauuaaggaaauuggagacc

SEQ ID NO: 124636 - RNA, 32 nt, Human
cgucugggacagugccaagaguggggugugug

SEQ ID NO: 124637 - RNA, 18 nt, Human
cgucugggacccugugcc

SEQ ID NO: 124638 - RNA, 32 nt, Human
cgucuggggagcacagaggcugccugugucag

SEQ ID NO: 124639 - RNA, 32 nt, Human
cgucugguggaggugcacagaggcuuuugagu

SEQ ID NO: 124640 - RNA, 32 nt, Human
cgucuggugugucccuuucuccuuccugaccu

SEQ ID NO: 124641 - RNA, 32 nt, Human
cgucugguugggggagcaugggagggggcacu

SEQ ID NO: 124642 - RNA, 32 nt, Human
cgucuguaaucuuugggagcacuuugggaggc

SEQ ID NO: 124643 - RNA, 32 nt, Human
cgucuguacuaaaaauacaaaaauuagccagg

SEQ ID NO: 124644 - RNA, 32 nt, Human
cgucuguacuaaaaauacaaaaauuagccgag

SEQ ID NO: 124645 - RNA, 32 nt, Human
cgucuguacuaaaaauacaaaaauuagccgga

SEQ ID NO: 124646 - RNA, 32 nt, Human
cgucuguacuaaaaauacaaaauuuagcugag

SEQ ID NO: 124647 - RNA, 32 nt, Human
cgucuguacuaaaaauacaaaauuuagcuugg

SEQ ID NO: 124648 - RNA, 32 nt, Human
cgucuguacuaaaaguaggaaaauuagcuggg

SEQ ID NO: 124649 - RNA, 32 nt, Human
cgucuguacuaauaauacaaaaauuagcuggg

SEQ ID NO: 124650 - RNA, 32 nt, Human
cgucuguacucaaaaugcaaaaauuagccagg

SEQ ID NO: 124651 - RNA, 22 nt, Human
cgucuguagucccagcuacuca

SEQ ID NO: 124652 - RNA, 32 nt, Human
cgucuguccacuguccuggcuuguuccaagcg

SEQ ID NO: 124653 - RNA, 32 nt, Human
cgucuguccagccuggacucccgagcccacga

SEQ ID NO: 124654 - RNA, 32 nt, Human
cgucugucucucucgcucauguaauauacucu

SEQ ID NO: 124655 - RNA, 32 nt, Human
cgucugucugggaggggcuccagguaccccuc

SEQ ID NO: 124656 - RNA, 32 nt, Human
cgucuguggcuguucaguaccucucuuccuuu

SEQ ID NO: 124657 - RNA, 32 nt, Human
cgucugugugaguggcaucauccaggugagua

SEQ ID NO: 124658 - RNA, 32 nt, Human
cgucugugugcccuugguccucuccuugccuu

SEQ ID NO: 124659 - RNA, 31 nt, Human
cgucuguguuucgcaaaaguuggagacguuc

SEQ ID NO: 124660 - RNA, 32 nt, Human
cgucuuaagacauauuuauguaauaccauggg

SEQ ID NO: 124661 - RNA, 32 nt, Human
cgucuuaauguucaccguccacagcuuuggaa

SEQ ID NO: 124662 - RNA, 32 nt, Human
cgucuucaacucgucaguccagcaagaucauc

SEQ ID NO: 124663 - RNA, 32 nt, Human
cgucuucacaccaacaugcagaaaaguuucua

SEQ ID NO: 124664 - RNA, 32 nt, Human
cgucuucacggcccucucccguucugcuggaa

SEQ ID NO: 124665 - RNA, 32 nt, Human
cgucuucacugcauccuggagugcaaaaauaa

SEQ ID NO: 124666 - RNA, 32 nt, Human
cgucuucacugcucuauguccucugcuccuag

SEQ ID NO: 124667 - RNA, 32 nt, Human
cgucuucacugcucuguguccucugcuccuag

SEQ ID NO: 124668 - RNA, 32 nt, Human
cgucuucagaagcagaauccggagaaggauca

SEQ ID NO: 124669 - RNA, 32 nt, Human
cgucuucagccuagccgaccucagccuucccc

SEQ ID NO: 124670 - RNA, 31 nt, Human
cgucuucaguuucaacacucugaucagcaug

SEQ ID NO: 124671 - RNA, 32 nt, Human
cgucuuccaaggccugaugcauucauaaguug

SEQ ID NO: 124672 - RNA, 32 nt, Human
cgucuuccaucuuugcauguuucugucuuaau

SEQ ID NO: 124673 - RNA, 32 nt, Human
cgucuuccccacccuucucuccuuuccucauc

SEQ ID NO: 124674 - RNA, 32 nt, Human
cgucuuccccuccgcgaugccucaugcccacu

SEQ ID NO: 124675 - RNA, 32 nt, Human
cgucuuccuccaagagaagguggaccuggcag

SEQ ID NO: 124676 - RNA, 32 nt, Human
cgucuucuaucuucuuuucuugccucccugac

SEQ ID NO: 124677 - RNA, 31 nt, Human
cgucuucuccacuggaugccugugucguauu

SEQ ID NO: 124678 - RNA, 32 nt, Human
cgucuucuccauguuugaucagucccagaucc

SEQ ID NO: 124679 - RNA, 32 nt, Human
cgucuucucucaauuccagucaucucagucgu

SEQ ID NO: 124680 - RNA, 32 nt, Human
cgucuucucugaaccucagccucgugcauugc

SEQ ID NO: 124681 - RNA, 32 nt, Human
cgucuugagaaaaugucuugaggucccugaag

SEQ ID NO: 124682 - RNA, 32 nt, Human
cgucuugagcccaggaguucaagaccagccug

SEQ ID NO: 124683 - RNA, 32 nt, Human
cgucuugcuuugugccccaucugugccuggau

SEQ ID NO: 124684 - RNA, 32 nt, Human
cgucuuggauuagccuuugacauugauguguu

SEQ ID NO: 124685 - RNA, 32 nt, Human
cgucuugggaggauugaagcagggagguggca

SEQ ID NO: 124686 - RNA, 32 nt, Human
cgucuuguccucucuucugcacagcacagguu

SEQ ID NO: 124687 - RNA, 32 nt, Human
cgucuuguucagauucagucagcugguagaug

SEQ ID NO: 124688 - RNA, 32 nt, Human
cgucuuuacuaaaaauacaaaauuagccaggc

SEQ ID NO: 124689 - RNA, 32 nt, Human
cgucuuuacuaaaaauacaaaauuagccaggu

SEQ ID NO: 124690 - RNA, 32 nt, Human
cgucuuuacuaaaaauacaaaauuagccggau

SEQ ID NO: 124691 - RNA, 32 nt, Human
cgucuuuacuaaaaauacagaaauuaggccag

SEQ ID NO: 124692 - RNA, 32 nt, Human
cgucuuucagaaugucuccuggcauccuaacc

SEQ ID NO: 124693 - RNA, 32 nt, Human
cgucuuucuccuucuccuuccuccuucugcug

SEQ ID NO: 124694 - RNA, 32 nt, Human
cgucuuugcccuuuaaugaccauuguuuucuu

SEQ ID NO: 124695 - RNA, 32 nt, Human
cgucuuuguuccagacacuugccaugucucau

SEQ ID NO: 124696 - RNA, 32 nt, Human
cgucuuuucugccucuuucccugugggauguu

SEQ ID NO: 124697 - RNA, 32 nt, Human
cgugaaaccagccucagaucagggcccugcca

SEQ ID NO: 124698 - RNA, 32 nt, Human
cgugaaacugggaggcggagcuugcagugagc

SEQ ID NO: 124699 - RNA, 32 nt, Human
cgugaaagcuuucugcccagagcuccuggacc

SEQ ID NO: 124700 - RNA, 32 nt, Human
cgugaaaggccacugcacuccagccugaguga

SEQ ID NO: 124701 - RNA, 32 nt, Human
cgugaaagugcacacacuucauggagggacuc

SEQ ID NO: 124702 - RNA, 32 nt, Human
cgugaacaaggguugacaugauacacuauggc

SEQ ID NO: 124703 - RNA, 22 nt, Human
cgugaacaccugcuuccucccu

SEQ ID NO: 124704 - RNA, 32 nt, Human
cgugaaccaccgcgccuggccuauaguacuuu

SEQ ID NO: 124705 - RNA, 32 nt, Human
cgugaaccacugcacccagccaauggguguaa

SEQ ID NO: 124706 - RNA, 32 nt, Human
cgugaaccacugcacccagccugcugauccuu

SEQ ID NO: 124707 - RNA, 32 nt, Human
cgugaacccagaagguggagguagcagugagc

SEQ ID NO: 124708 - RNA, 32 nt, Human
cgugaacccagcgggaagagguugcagugagc

SEQ ID NO: 124709 - RNA, 32 nt, Human
cgugaacccaggagacggagcuugcagugagc

SEQ ID NO: 124710 - RNA, 32 nt, Human
cgugaacccaggaggaggagcuugcagugagc

SEQ ID NO: 124711 - RNA, 32 nt, Human
cgugaacccaggaggcagagcuugcagugagc

SEQ ID NO: 124712 - RNA, 32 nt, Human
cgugaacccaggaggcagagguugcagugagc

SEQ ID NO: 124713 - RNA, 32 nt, Human
cgugaacccaggaggcggaccuuguagugagc

SEQ ID NO: 124714 - RNA, 32 nt, Human
cgugaacccaggaggcggagcuggcagugagc

SEQ ID NO: 124715 - RNA, 32 nt, Human
cgugaacccaggaggcggagcuugcagugagc

SEQ ID NO: 124716 - RNA, 32 nt, Human
cgugaacccaggaggcggaggcugcagugagc

SEQ ID NO: 124717 - RNA, 32 nt, Human
cgugaacccaggaggcggagguugcagugagc

SEQ ID NO: 124718 - RNA, 32 nt, Human
cgugaacccaggaggcggcgguugcagugagc

SEQ ID NO: 124719 - RNA, 32 nt, Human
cgugaacccaggagguggagcuugcaaugagc

SEQ ID NO: 124720 - RNA, 32 nt, Human
cgugaacccaggagguggagcuugcagugagc

SEQ ID NO: 124721 - RNA, 32 nt, Human
cgugaacccgagaggcggagcuugcagugagc

SEQ ID NO: 124722 - RNA, 32 nt, Human
cgugaacccggaaggcagagcuugcagugagc

SEQ ID NO: 124723 - RNA, 32 nt, Human
cgugaacccggcgggaagagguugcagugagc

SEQ ID NO: 124724 - RNA, 32 nt, Human
cgugaacccgggagacggagcuugcaguaagc

SEQ ID NO: 124725 - RNA, 32 nt, Human
cgugaacccgggaggcagaccuugcagugagc

SEQ ID NO: 124726 - RNA, 32 nt, Human
cgugaacccgggaggcagagcuugcagugagc

SEQ ID NO: 124727 - RNA, 32 nt, Human
cgugaacccgggaggcagagcuugcagugagu

SEQ ID NO: 124728 - RNA, 32 nt, Human
cgugaacccgggaggcagagcuugcggugagc

SEQ ID NO: 124729 - RNA, 32 nt, Human
cgugaacccgggaggcagagguugcagugagc

SEQ ID NO: 124730 - RNA, 32 nt, Human
cgugaacccgggaggcgagcuugcagugagcc

SEQ ID NO: 124731 - RNA, 32 nt, Human
cgugaacccgggaggcggaacuugcagugagc

SEQ ID NO: 124732 - RNA, 32 nt, Human
cgugaacccgggaggcggagcuugcagugagc

SEQ ID NO: 124733 - RNA, 32 nt, Human
cgugaacccgggaggcggagcuuguagugagc

SEQ ID NO: 124734 - RNA, 32 nt, Human
cgugaacccgggaggcggagguugcagugagc

SEQ ID NO: 124735 - RNA, 32 nt, Human
cgugaacccgggaggcggaucuugcagugagc

SEQ ID NO: 124736 - RNA, 32 nt, Human
cgugaacccgggagguggagcuugcagugagc

SEQ ID NO: 124737 - RNA, 32 nt, Human
cgugaacccgggagguggagcuuguagugagg

SEQ ID NO: 124738 - RNA, 32 nt, Human
cgugaacccgggaguggagcuugcaaugagcc

SEQ ID NO: 124739 - RNA, 32 nt, Human
cgugaaccgcgcugcugcuccagccugacuuc

SEQ ID NO: 124740 - RNA, 32 nt, Human
cgugaaccuggaaggaagagguugcagugagc

SEQ ID NO: 124741 - RNA, 32 nt, Human
cgugaaccugggaagcggagcucgcagugagc

SEQ ID NO: 124742 - RNA, 32 nt, Human
cgugaaccugggagacggagcuugcagugagc

SEQ ID NO: 124743 - RNA, 32 nt, Human
cgugaaccugggaggcagagcuugcaguaagc

SEQ ID NO: 124744 - RNA, 32 nt, Human
cgugaaccugggaggcagagcuugcagugagc

SEQ ID NO: 124745 - RNA, 32 nt, Human
cgugaaccugggaggcggagcuugcagugagc

SEQ ID NO: 124746 - RNA, 32 nt, Human
cgugaaccugggaggcggagguugcagugagc

SEQ ID NO: 124747 - RNA, 32 nt, Human
cgugaaccugggagguggagcuugcagugagc

SEQ ID NO: 124748 - RNA, 32 nt, Human
cgugaacugcacgguggagcugccucagggcu

SEQ ID NO: 124749 - RNA, 32 nt, Human
cgugaacuugggaggcggagcuugcggugagc

SEQ ID NO: 124750 - RNA, 32 nt, Human
cgugaacuugggagguggagcuuacagugagc

SEQ ID NO: 124751 - RNA, 32 nt, Human
cgugaagagcaagggaaaggaacuuccuccac

SEQ ID NO: 124752 - RNA, 32 nt, Human
cgugaagagucuuccuauaaaguaauugucau

SEQ ID NO: 124753 - RNA, 31 nt, Human
cgugaagcucaagauaccuguagaaagaaau

SEQ ID NO: 124754 - RNA, 32 nt, Human
cgugaagggcuggggccuucacuccucugugg

SEQ ID NO: 124755 - RNA, 32 nt, Human
cgugaauaucucuccguaucauggcccacgug

SEQ ID NO: 124756 - RNA, 32 nt, Human
cgugaauccaggagguggagccugcagugagc

SEQ ID NO: 124757 - RNA, 32 nt, Human
cgugaauccgggaggcggagcuugcagcgagc

SEQ ID NO: 124758 - RNA, 32 nt, Human
cgugaauccgggaggcgggucuugcagugagc

SEQ ID NO: 124759 - RNA, 32 nt, Human
cgugaaucggggaggcagagcuugcagucagc

SEQ ID NO: 124760 - RNA, 32 nt, Human
cgugaaucucugucucuucacacugugguguu

SEQ ID NO: 124761 - RNA, 32 nt, Human
cgugaaugaaguauuucaccaggcauuuuugu

SEQ ID NO: 124762 - RNA, 32 nt, Human
cgugacaaaucuucccuccucaccagcuaguc

SEQ ID NO: 124763 - RNA, 32 nt, Human
cgugacacagguucuggccaaugauuugcaag

SEQ ID NO: 124764 - RNA, 32 nt, Human
cgugacacugcacuccagccugggcgacagag

SEQ ID NO: 124765 - RNA, 32 nt, Human
cgugacacugcacuucagccuggcugacagag

SEQ ID NO: 124766 - RNA, 32 nt, Human
cgugacagacuccugaggacagcuguccucuu

SEQ ID NO: 124767 - RNA, 32 nt, Human
cgugacagccuccagacuugaaucuguagaca

SEQ ID NO: 124768 - RNA, 32 nt, Human
cgugacagccuccuacugcuucucuaucaugu

SEQ ID NO: 124769 - RNA, 32 nt, Human
cgugacaggcucagccugguggucuggagggg

SEQ ID NO: 124770 - RNA, 32 nt, Human
cgugacauauaagccauuaaaauaucauccug

SEQ ID NO: 124771 - RNA, 32 nt, Human
cgugaccaaggccacagagcuaugggugucag

SEQ ID NO: 124772 - RNA, 32 nt, Human
cgugaccagcagaaaagaaagcucagggcugu

SEQ ID NO: 124773 - RNA, 32 nt, Human
cgugaccagccaaugugccuucuuauaguguc

SEQ ID NO: 124774 - RNA, 32 nt, Human
cgugaccaucuccagccuucuuccugccacug

SEQ ID NO: 124775 - RNA, 32 nt, Human
cgugacccacaccccaaaggcucuuuucagag

SEQ ID NO: 124776 - RNA, 32 nt, Human
cgugaccccacacccacccacucauccaucua

SEQ ID NO: 124777 - RNA, 19 nt, Human
cgugacccccaggccgagg

SEQ ID NO: 124778 - RNA, 32 nt, Human
cgugaccccugcccugggccuuaacacacauc

SEQ ID NO: 124779 - RNA, 32 nt, Human
cgugacccgagacaguucuuccgguauggucc

SEQ ID NO: 124780 - RNA, 32 nt, Human
cgugacccggccuaguuucuccaggcccgucc

SEQ ID NO: 124781 - RNA, 32 nt, Human
cgugacccgguaccccagcucuaagggaggug

SEQ ID NO: 124782 - RNA, 32 nt, Human
cgugacccugcaggggaacaucacgcuacuca

SEQ ID NO: 124783 - RNA, 32 nt, Human
cgugaccggauucccucacuguuguaucuuga

SEQ ID NO: 124784 - RNA, 32 nt, Human
cgugaccuccaggcagccacagccuggaaaag

SEQ ID NO: 124785 - RNA, 32 nt, Human
cgugaccuccccaucccgaggggccggacgcu

SEQ ID NO: 124786 - RNA, 32 nt, Human
cgugaccucccucucuccuuccagucacagau

SEQ ID NO: 124787 - RNA, 32 nt, Human
cgugaccuccgccguccuccccaacccucguc

SEQ ID NO: 124788 - RNA, 32 nt, Human
cgugaccuugggcaaaugacuuaaccuuucua

SEQ ID NO: 124789 - RNA, 32 nt, Human
cgugacgccugaugcaagaugggcaucggcag

SEQ ID NO: 124790 - RNA, 32 nt, Human
cgugacgcuggaggaggagugggagcucccag

SEQ ID NO: 124791 - RNA, 32 nt, Human
cgugacgucaucuccagcuccagccugcuggg

SEQ ID NO: 124792 - RNA, 32 nt, Human
cgugacuacugaugccaucguuguucuuguua

SEQ ID NO: 124793 - RNA, 32 nt, Human
cgugacucagcccuggacacugguccgagaag

SEQ ID NO: 124794 - RNA, 32 nt, Human
cgugacucauuucucagucucaccauccuuug

SEQ ID NO: 124795 - RNA, 32 nt, Human
cgugacugacucuguugcuaccugucaacaug

SEQ ID NO: 124796 - RNA, 32 nt, Human
cgugacugcaccacugcacuccacccugggca

SEQ ID NO: 124797 - RNA, 32 nt, Human
cgugacuggcacguguaccucgaauuguuugg

SEQ ID NO: 124798 - RNA, 32 nt, Human
cgugacuuaggcagaggagugcagaggagggu

SEQ ID NO: 124799 - RNA, 32 nt, Human
cgugagaagccaaagguaguuuaugugaaagg

SEQ ID NO: 124800 - RNA, 32 nt, Human
cgugagaauugugggaguuacaauucaagaug

SEQ ID NO: 124801 - RNA, 32 nt, Human
cgugagacgccaccauuccuggaaaccacagu

SEQ ID NO: 124802 - RNA, 32 nt, Human
cgugagagaauacauuuuuguuuucuucagcc

SEQ ID NO: 124803 - RNA, 32 nt, Human
cgugagagccaguggcaucugcgcggcuugcc

SEQ ID NO: 124804 - RNA, 32 nt, Human
cgugagagcccaaucacugccuauaccccuca

SEQ ID NO: 124805 - RNA, 32 nt, Human
cgugagcaacagcuggcccaggaaaggcugcc

SEQ ID NO: 124806 - RNA, 32 nt, Human
cgugagcaacugcacccagccuaguugaguau

SEQ ID NO: 124807 - RNA, 32 nt, Human
cgugagcaaggagccugcauucccagggggcg

SEQ ID NO: 124808 - RNA, 32 nt, Human
cgugagcacaguuauggcagagaaguucucgc

SEQ ID NO: 124809 - RNA, 32 nt, Human
cgugagcagagcagccccgaccuccguccuga

SEQ ID NO: 124810 - RNA, 32 nt, Human
cgugagcaggaaaaucagaggagccacugauc

SEQ ID NO: 124811 - RNA, 32 nt, Human
cgugagcaggcaggcaggagguccuguuagcc

SEQ ID NO: 124812 - RNA, 32 nt, Human
cgugagcaugggagggaggcugagggggcacu

SEQ ID NO: 124813 - RNA, 32 nt, Human
cgugagccaacaagaagcaggggccucugagu

SEQ ID NO: 124814 - RNA, 32 nt, Human
cgugagccacagcucccagccuaggcccuuaa

SEQ ID NO: 124815 - RNA, 32 nt, Human
cgugagccaccacacccagcucagggaggcgu

SEQ ID NO: 124816 - RNA, 32 nt, Human
cgugagccaccgcaccgugagccacugcaccc

SEQ ID NO: 124817 - RNA, 32 nt, Human
cgugagccaccgcaccuggccuaccugggcuu

SEQ ID NO: 124818 - RNA, 32 nt, Human
cgugagccaccgcaccuggccuaugagugguc

SEQ ID NO: 124819 - RNA, 32 nt, Human
cgugagccaccgcgcccggccuagaggauucu

SEQ ID NO: 124820 - RNA, 32 nt, Human
cgugagccaccgcuccuggccugacagagaaa

SEQ ID NO: 124821 - RNA, 32 nt, Human
cgugagccaccgugccuggccuaaaggaaguc

SEQ ID NO: 124822 - RNA, 32 nt, Human
cgugagccaccgugccuggccuggaauuaucu

SEQ ID NO: 124823 - RNA, 32 nt, Human
cgugagccacugcacccagccgagugagaauu

SEQ ID NO: 124824 - RNA, 32 nt, Human
cgugagccacugcacccagccuagaaucuugu

SEQ ID NO: 124825 - RNA, 32 nt, Human
cgugagccacugcacccagccugggagagggg

SEQ ID NO: 124826 - RNA, 32 nt, Human
cgugagccacugcaccgggccacagagaaagu

SEQ ID NO: 124827 - RNA, 32 nt, Human
cgugagccacugcaccugaccuaagaggaagc

SEQ ID NO: 124828 - RNA, 23 nt, Human
cgugagccacugcaccuggccug

SEQ ID NO: 124829 - RNA, 32 nt, Human
cgugagccacugcaccuggucccccagaagcu

SEQ ID NO: 124830 - RNA, 32 nt, Human
cgugagccacugcgcccggcccaagagaauag

SEQ ID NO: 124831 - RNA, 32 nt, Human
cgugagccacugcgcccugccuguuuguagua

SEQ ID NO: 124832 - RNA, 32 nt, Human
cgugagccacugcgccuggccaagaauggaca

SEQ ID NO: 124833 - RNA, 32 nt, Human
cgugagccacugcgccuggccagaccauuuua

SEQ ID NO: 124834 - RNA, 32 nt, Human
cgugagccacugcgccuggccuaguuugguuu

SEQ ID NO: 124835 - RNA, 32 nt, Human
cgugagccacugugccuggccuaucugaucca

SEQ ID NO: 124836 - RNA, 32 nt, Human
cgugagccagagaguauuaugagggaggccga

SEQ ID NO: 124837 - RNA, 32 nt, Human
cgugagcccaggaauucaaggcugcagugaac

SEQ ID NO: 124838 - RNA, 32 nt, Human
cgugagcccaggaguuccagaccaggcugggu

SEQ ID NO: 124839 - RNA, 32 nt, Human
cgugagcccaggaguuugagaccagcuaaggc

SEQ ID NO: 124840 - RNA, 32 nt, Human
cgugagccccuagccucacaccggcucagcuc

SEQ ID NO: 124841 - RNA, 32 nt, Human
cgugagcccgggaggcggagcuuacagugagc

SEQ ID NO: 124842 - RNA, 32 nt, Human
cgugagcccgggaggcggagcuugcagugagc

SEQ ID NO: 124843 - RNA, 32 nt, Human
cgugagcccgggaggcggagcuugcggugggc

SEQ ID NO: 124844 - RNA, 32 nt, Human
cgugagcccucgggggaauggacccccagaac

SEQ ID NO: 124845 - RNA, 32 nt, Human
cgugagccucugcaccuggcuagggccagugu

SEQ ID NO: 124846 - RNA, 32 nt, Human
cgugagccugcacucacugcggccuuuguaac

SEQ ID NO: 124847 - RNA, 32 nt, Human
cgugagccugcgccuggcuguaauuacuauac

SEQ ID NO: 124848 - RNA, 32 nt, Human
cgugagccugggagguggaguuugcagugagc

SEQ ID NO: 124849 - RNA, 32 nt, Human
cgugagcggugugcagccaccauguucagcug

SEQ ID NO: 124850 - RNA, 32 nt, Human
cgugagcgucccggaaggggcggcaaagacgc

SEQ ID NO: 124851 - RNA, 32 nt, Human
cgugagcuaccgcacuggaccuagccuccccu

SEQ ID NO: 124852 - RNA, 32 nt, Human
cgugagcuaugauuaugccacugcuuuccagc

SEQ ID NO: 124853 - RNA, 32 nt, Human
cgugagcugcuugaugacugaugcuaggguga

SEQ ID NO: 124854 - RNA, 32 nt, Human
cgugagcuggagcugggccaccugccacgacu

SEQ ID NO: 124855 - RNA, 32 nt, Human
cgugagcuuccacugcggcugcagagacgcga

SEQ ID NO: 124856 - RNA, 32 nt, Human
cgugagcuugcuugugggcacuggcuuggacu

SEQ ID NO: 124857 - RNA, 32 nt, Human
cgugaggaacggcuccagcaggagaaccauga

SEQ ID NO: 124858 - RNA, 32 nt, Human
cgugaggaaggcgcagcucuguggaaagguca

SEQ ID NO: 124859 - RNA, 32 nt, Human
cgugaggagagaggacacagggaucccgggga

SEQ ID NO: 124860 - RNA, 32 nt, Human
cgugaggagaggcaauggccacggcccauuuu

SEQ ID NO: 124861 - RNA, 32 nt, Human
cgugaggagucccacugcuucuaaaggaaguc

SEQ ID NO: 124862 - RNA, 32 nt, Human
cgugaggcucggaggcggcagcgcgguccccg

SEQ ID NO: 124863 - RNA, 32 nt, Human
cgugagggccagagacaggaauguaaggauug

SEQ ID NO: 124864 - RNA, 32 nt, Human
cgugagggccccaggauuuggccgaaguggcg

SEQ ID NO: 124865 - RNA, 32 nt, Human
cgugaggugccuguaaaguaguauuuuugauc

SEQ ID NO: 124866 - RNA, 32 nt, Human
cgugagucaccacaccuggcccaugguggggg

SEQ ID NO: 124867 - RNA, 32 nt, Human
cgugagucaccgugcccagccuggaugagggu

SEQ ID NO: 124868 - RNA, 32 nt, Human
cgugaguccaggaguuugagaccagccugggc

SEQ ID NO: 124869 - RNA, 32 nt, Human
cgugaguccaguguggaggaggauguggaaug

SEQ ID NO: 124870 - RNA, 32 nt, Human
cgugaguggcugucccaccauccuggugccuu

SEQ ID NO: 124871 - RNA, 32 nt, Human
cgugagugugagccaccuuggcaagugccugu

SEQ ID NO: 124872 - RNA, 32 nt, Human
cgugauacuguacauagcuguuugaaaugcca

SEQ ID NO: 124873 - RNA, 32 nt, Human
cgugaucaagguagcuuagagagauggucagg

SEQ ID NO: 124874 - RNA, 32 nt, Human
cgugaucacacaacugcacuccagccugggca

SEQ ID NO: 124875 - RNA, 32 nt, Human
cgugaucaggagacagagaccgugaccgagag

SEQ ID NO: 124876 - RNA, 32 nt, Human
cgugaucaugccacugcacuccagcaugcaug

SEQ ID NO: 124877 - RNA, 32 nt, Human
cgugaucaugccacugcacuccagccugggug

SEQ ID NO: 124878 - RNA, 32 nt, Human
cgugaucaugccacugcacuuuagccugggca

SEQ ID NO: 124879 - RNA, 32 nt, Human
cgugaucaugccacugcauuccagccugugug

SEQ ID NO: 124880 - RNA, 32 nt, Human
cgugaucaugccauugcacucgagccugggca

SEQ ID NO: 124881 - RNA, 32 nt, Human
cgugaucauggagcuucggaagcgggaauggu

SEQ ID NO: 124882 - RNA, 32 nt, Human
cgugauccgcccaauccgcccaccucggccuc

SEQ ID NO: 124883 - RNA, 32 nt, Human
cgugauccgcccgccucggccucccagaaugc

SEQ ID NO: 124884 - RNA, 32 nt, Human
cgugauccgcccgccucggccucccagagugc

SEQ ID NO: 124885 - RNA, 32 nt, Human
cgugauccgccgaccucggccucccaaagugc

SEQ ID NO: 124886 - RNA, 32 nt, Human
cgugauccgccugccucggccucccagagugc

SEQ ID NO: 124887 - RNA, 32 nt, Human
cgugauccuccugccucagccucccagacugc

SEQ ID NO: 124888 - RNA, 32 nt, Human
cgugaucgugcuacugcacuccagccugggca

SEQ ID NO: 124889 - RNA, 32 nt, Human
cgugaucuacccaccucggucucccaaaaugc

SEQ ID NO: 124890 - RNA, 32 nt, Human
cgugaucucaccccugcacuccagccugggca

SEQ ID NO: 124891 - RNA, 32 nt, Human
cgugaucucuaugcccgagucucaacccucaa

SEQ ID NO: 124892 - RNA, 32 nt, Human
cgugaucucuccuucuccaucaucucaucucu

SEQ ID NO: 124893 - RNA, 32 nt, Human
cgugaucugcccuccucagccucccaggugcu

SEQ ID NO: 124894 - RNA, 32 nt, Human
cgugaucugcuggcccucaggcugcugcucug

SEQ ID NO: 124895 - RNA, 32 nt, Human
cgugaucuguccacuucagccguccaaagugc

SEQ ID NO: 124896 - RNA, 32 nt, Human
cgugaucuuggcugucugucauguguugaagu

SEQ ID NO: 124897 - RNA, 32 nt, Human
cgugaugaaagccaugggacaaaggcaauuga

SEQ ID NO: 124898 - RNA, 32 nt, Human
cgugaugacgcguuguuuucugccauuuaucc

SEQ ID NO: 124899 - RNA, 32 nt, Human
cgugauggcacaugucuguaaucccagcuacu

SEQ ID NO: 124900 - RNA, 32 nt, Human
cgugauggcaccgcugcacuccaaccugggca

SEQ ID NO: 124901 - RNA, 32 nt, Human
cgugauggcacgugucuguaaucccagcuacu

SEQ ID NO: 124902 - RNA, 32 nt, Human
cgugauggcaggugccuguaauccuagcuacu

SEQ ID NO: 124903 - RNA, 32 nt, Human
cgugauggcgccacugcacuucagccuuggag

SEQ ID NO: 124904 - RNA, 32 nt, Human
cgugauggcgccacuucacugcagccugggug

SEQ ID NO: 124905 - RNA, 24 nt, Human
cgugauggcucacaccuguaauuc

SEQ ID NO: 124906 - RNA, 32 nt, Human
cgugauggcucacaccuguaauuccagcacuu

SEQ ID NO: 124907 - RNA, 32 nt, Human
cgugauggcucaccccuguaaucccagcacuu

SEQ ID NO: 124908 - RNA, 32 nt, Human
cgugauggcucacgccuguaaucccagcacuu

SEQ ID NO: 124909 - RNA, 32 nt, Human
cgugauggcucaugccuguaaucucagcacug

SEQ ID NO: 124910 - RNA, 32 nt, Human
cgugaugggaccugccuucuccacuaguagcu

SEQ ID NO: 124911 - RNA, 32 nt, Human
cgugaugggcagaucacuugagcccagaaguu

SEQ ID NO: 124912 - RNA, 32 nt, Human
cgugaugggcagcuccagaggaugaacuaugg

SEQ ID NO: 124913 - RNA, 32 nt, Human
cgugaugguaugcaccuguaaucccagcuacu

SEQ ID NO: 124914 - RNA, 32 nt, Human
cgugauggugccacugcacuccagccugggug

SEQ ID NO: 124915 - RNA, 32 nt, Human
cgugaugguggaugccuguaauccuagcuccu

SEQ ID NO: 124916 - RNA, 32 nt, Human
cgugauggugggcaccucuaaucccagcuacu

SEQ ID NO: 124917 - RNA, 32 nt, Human
cgugauggugggcgccuguaaucccagccacu

SEQ ID NO: 124918 - RNA, 32 nt, Human
cgugauggugggcgccuguaaucucagcuacu

SEQ ID NO: 124919 - RNA, 32 nt, Human
cgugaugguguuaggagguggggccuuuggga

SEQ ID NO: 124920 - RNA, 32 nt, Human
cgugaugguucaugccuggaaucccagcacuu

SEQ ID NO: 124921 - RNA, 32 nt, Human
cgugauuaccaacaugacgaccccacuucucu

SEQ ID NO: 124922 - RNA, 32 nt, Human
cgugauuaccaacgccagcucccuucacuguc

SEQ ID NO: 124923 - RNA, 32 nt, Human
cgugauuagcucaugggggcgguucccccaug

SEQ ID NO: 124924 - RNA, 32 nt, Human
cgugauugagccacugcacuccagccucggcc

SEQ ID NO: 124925 - RNA, 32 nt, Human
cgugauugcaccacugcacuccagccugagug

SEQ ID NO: 124926 - RNA, 32 nt, Human
cgugauugucaguuuccugaggccuccccagc

SEQ ID NO: 124927 - RNA, 32 nt, Human
cgugauugugccacugcauaccagccuaggug

SEQ ID NO: 124928 - RNA, 32 nt, Human
cgugauuucaccaccacuccagccugggugag

SEQ ID NO: 124929 - RNA, 32 nt, Human
cgugauuuugccacugcacuccugccugggug

SEQ ID NO: 124930 - RNA, 25 nt, Human
cgugcaaacauguaccguggccugg

SEQ ID NO: 124931 - RNA, 32 nt, Human
cgugcaacccaaugaguagugaagggacugug

SEQ ID NO: 124932 - RNA, 32 nt, Human
cgugcaacugcacuccaaccugggcaacagag

SEQ ID NO: 124933 - RNA, 32 nt, Human
cgugcaacugcacuccagccugggcaaaagag

SEQ ID NO: 124934 - RNA, 32 nt, Human
cgugcaagaggagagacaggagagggccuuuc

SEQ ID NO: 124935 - RNA, 31 nt, Human
cgugcaagcaggagagaaaggcuguaucuua

SEQ ID NO: 124936 - RNA, 32 nt, Human
cgugcaaggcagcagaguuacaugguucuuca

SEQ ID NO: 124937 - RNA, 32 nt, Human
cgugcacagacauacacacaugugcacacacc

SEQ ID NO: 124938 - RNA, 32 nt, Human
cgugcacaggcagccgagguugagcugcggac

SEQ ID NO: 124939 - RNA, 32 nt, Human
cgugcaccaccuggcccggcacugugugcuca

SEQ ID NO: 124940 - RNA, 32 nt, Human
cgugcaccagagagugcacuugggcgagcgcu

SEQ ID NO: 124941 - RNA, 19 nt, Human
cgugcacccuuccccaugc

SEQ ID NO: 124942 - RNA, 32 nt, Human
cgugcaccugauucuccuuggggcccagagga

SEQ ID NO: 124943 - RNA, 22 nt, Human
cgugcaccuguaaucccagcua

SEQ ID NO: 124944 - RNA, 32 nt, Human
cgugcaccuguaaucccagcuacuugggaggc

SEQ ID NO: 124945 - RNA, 32 nt, Human
cgugcaccuuuaggcaggcccagcacaguuca

SEQ ID NO: 124946 - RNA, 32 nt, Human
cgugcacgcgcuuucaagaaaauguucucggg

SEQ ID NO: 124947 - RNA, 32 nt, Human
cgugcacuagacacacagaguggaacagccgu

SEQ ID NO: 124948 - RNA, 32 nt, Human
cgugcacugcugcaaugggcucugagcuggag

SEQ ID NO: 124949 - RNA, 32 nt, Human
cgugcacuugcaggccacgucaggagagccag

SEQ ID NO: 124950 - RNA, 32 nt, Human
cgugcagaccguccgcgagauccagaggcucu

SEQ ID NO: 124951 - RNA, 21 nt, Human
cgugcagagccaggguccugg

SEQ ID NO: 124952 - RNA, 23 nt, Human
cgugcagagcccacugggcacgg

SEQ ID NO: 124953 - RNA, 22 nt, Human
cgugcagagccccugugucuca

SEQ ID NO: 124954 - RNA, 24 nt, Human
cgugcagagcugcacuuggccuca

SEQ ID NO: 124955 - RNA, 32 nt, Human
cgugcagaggaaaugguuggagagcgaagucc

SEQ ID NO: 124956 - RNA, 32 nt, Human
cgugcagaggcggcgggcuggggagggagcgg

SEQ ID NO: 124957 - RNA, 32 nt, Human
cgugcagauacaaugcuccugagaagacagca

SEQ ID NO: 124958 - RNA, 32 nt, Human
cgugcagcaagacugcacaucuugccuuguuc

SEQ ID NO: 124959 - RNA, 32 nt, Human
cgugcagcccucucuuggcuugcaagauaacg

SEQ ID NO: 124960 - RNA, 32 nt, Human
cgugcagcugugcucaccccaggucaucagac

SEQ ID NO: 124961 - RNA, 32 nt, Human
cgugcagcuucuccucucagcacacuuugggc

SEQ ID NO: 124962 - RNA, 32 nt, Human
cgugcaggaagaccagaaggaaaguaaucugc

SEQ ID NO: 124963 - RNA, 32 nt, Human
cgugcaggacucggguggcucugaggucgccu

SEQ ID NO: 124964 - RNA, 32 nt, Human
cgugcaggagacugcauuucucuuucccacag

SEQ ID NO: 124965 - RNA, 32 nt, Human
cgugcagggugagggcaagcguuagcacagcg

SEQ ID NO: 124966 - RNA, 32 nt, Human
cgugcagggugaggucucccgggcuggcgcgc

SEQ ID NO: 124967 - RNA, 32 nt, Human
cgugcauacacacacauccauacacucugaca

SEQ ID NO: 124968 - RNA, 32 nt, Human
cgugcaucacucucccuucugccuccuucaac

SEQ ID NO: 124969 - RNA, 32 nt, Human
cgugcaucccuuaaaacucccgcaggacugcu

SEQ ID NO: 124970 - RNA, 32 nt, Human
cgugcaucuagucccaacuauuugggaggcug

SEQ ID NO: 124971 - RNA, 32 nt, Human
cgugcaucugcaccugagaggacggacugccg

SEQ ID NO: 124972 - RNA, 32 nt, Human
cgugcaugcuuguaaucccagcuacuugggag

SEQ ID NO: 124973 - RNA, 32 nt, Human
cgugcauggaggaucaaacacugucagaauug

SEQ ID NO: 124974 - RNA, 32 nt, Human
cgugcauggcagcuaguugcucaagcgcauug

SEQ ID NO: 124975 - RNA, 32 nt, Human
cgugcauucauccauucucacacugcuauaaa

SEQ ID NO: 124976 - RNA, 32 nt, Human
cgugcauucuguaguuucuuccuuucagugaa

SEQ ID NO: 124977 - RNA, 32 nt, Human
cgugcauuucuauauaaucagaaaaauauuag

SEQ ID NO: 124978 - RNA, 32 nt, Human
cgugccaaugcacuccauccugggcaaaaaga

SEQ ID NO: 124979 - RNA, 32 nt, Human
cgugccacagcauccuagucugggcgacagag

SEQ ID NO: 124980 - RNA, 32 nt, Human
cgugccaccauguugcccaggcuggucuugaa

SEQ ID NO: 124981 - RNA, 32 nt, Human
cgugccaccuacacuccagccugggugacaga

SEQ ID NO: 124982 - RNA, 32 nt, Human
cgugccacuacacuccagccugggcaaaagag

SEQ ID NO: 124983 - RNA, 32 nt, Human
cgugccacuacacuccagccugggggacagag

SEQ ID NO: 124984 - RNA, 32 nt, Human
cgugccacuacacuccagccugggugacagag

SEQ ID NO: 124985 - RNA, 32 nt, Human
cgugccacuccacuccagccugggcaacagug

SEQ ID NO: 124986 - RNA, 32 nt, Human
cgugccacugaccuccagccugggggacagag

SEQ ID NO: 124987 - RNA, 32 nt, Human
cgugccacugcacaccauccuggaugacagag

SEQ ID NO: 124988 - RNA, 32 nt, Human
cgugccacugcaccacuccagccugggcaaca

SEQ ID NO: 124989 - RNA, 32 nt, Human
cgugccacugcaccccagccugggcaacagag

SEQ ID NO: 124990 - RNA, 32 nt, Human
cgugccacugcaccguagccugggugauaaga

SEQ ID NO: 124991 - RNA, 32 nt, Human
cgugccacugcacgccagccugggcaacagag

SEQ ID NO: 124992 - RNA, 32 nt, Human
cgugccacugcacuacaaccugggugauagag

SEQ ID NO: 124993 - RNA, 32 nt, Human
cgugccacugcacucaagccugggugacagag

SEQ ID NO: 124994 - RNA, 32 nt, Human
cgugccacugcacucaagccuggugacagagc

SEQ ID NO: 124995 - RNA, 32 nt, Human
cgugccacugcacuccaaccugagugacagca

SEQ ID NO: 124996 - RNA, 32 nt, Human
cgugccacugcacuccaaccugggugagagag

SEQ ID NO: 124997 - RNA, 32 nt, Human
cgugccacugcacuccagacugggggagagag

SEQ ID NO: 124998 - RNA, 32 nt, Human
cgugccacugcacuccagacuuggugacagag

SEQ ID NO: 124999 - RNA, 32 nt, Human
cgugccacugcacuccagagccugggcgacag

SEQ ID NO: 125000 - RNA, 32 nt, Human
cgugccacugcacuccagcccaggcaacagag

SEQ ID NO: 125001 - RNA, 32 nt, Human
cgugccacugcacuccagccugaagacagagc

SEQ ID NO: 125002 - RNA, 32 nt, Human
cgugccacugcacuccagccugagcaacagag

SEQ ID NO: 125003 - RNA, 32 nt, Human
cgugccacugcacuccagccugcgggacagag

SEQ ID NO: 125004 - RNA, 32 nt, Human
cgugccacugcacuccagccuggacaacggag

SEQ ID NO: 125005 - RNA, 32 nt, Human
cgugccacugcacuccagccuggaggacagag

SEQ ID NO: 125006 - RNA, 32 nt, Human
cgugccacugcacuccagccuggauuacagag

SEQ ID NO: 125007 - RNA, 32 nt, Human
cgugccacugcacuccagccuggcaacagagc

SEQ ID NO: 125008 - RNA, 32 nt, Human
cgugccacugcacuccagccuggcgacacagu

SEQ ID NO: 125009 - RNA, 32 nt, Human
cgugccacugcacuccagccugggagacagag

SEQ ID NO: 125010 - RNA, 32 nt, Human
cgugccacugcacuccagccugggcaacaagc

SEQ ID NO: 125011 - RNA, 32 nt, Human
cgugccacugcacuccagccugggcaacacag

SEQ ID NO: 125012 - RNA, 32 nt, Human
cgugccacugcacuccagccugggcaacagag

SEQ ID NO: 125013 - RNA, 32 nt, Human
cgugccacugcacuccagccugggcaccacag

SEQ ID NO: 125014 - RNA, 32 nt, Human
cgugccacugcacuccagccugggcaccagag

SEQ ID NO: 125015 - RNA, 32 nt, Human
cgugccacugcacuccagccugggcagcagag

SEQ ID NO: 125016 - RNA, 32 nt, Human
cgugccacugcacuccagccugggccacagag

SEQ ID NO: 125017 - RNA, 32 nt, Human
cgugccacugcacuccagccugggcgacaaga

SEQ ID NO: 125018 - RNA, 32 nt, Human
cgugccacugcacuccagccugggcgacagag

SEQ ID NO: 125019 - RNA, 32 nt, Human
cgugccacugcacuccagccugggcgacgagu

SEQ ID NO: 125020 - RNA, 32 nt, Human
cgugccacugcacuccagccugggcuacaaga

SEQ ID NO: 125021 - RNA, 32 nt, Human
cgugccacugcacuccagccuggggaacagag

SEQ ID NO: 125022 - RNA, 32 nt, Human
cgugccacugcacuccagccugggggacagag

SEQ ID NO: 125023 - RNA, 32 nt, Human
cgugccacugcacuccagccugggugacaaaa

SEQ ID NO: 125024 - RNA, 32 nt, Human
cgugccacugcacuccagccugggugacacag

SEQ ID NO: 125025 - RNA, 32 nt, Human
cgugccacugcacuccagccugggugacagag

SEQ ID NO: 125026 - RNA, 32 nt, Human
cgugccacugcacuccagccugggugauagag

SEQ ID NO: 125027 - RNA, 32 nt, Human
cgugccacugcacuccagccuggguggacaga

SEQ ID NO: 125028 - RNA, 32 nt, Human
cgugccacugcacuccagccuggucaacagag

SEQ ID NO: 125029 - RNA, 32 nt, Human
cgugccacugcacuccagccuggugacagagu

SEQ ID NO: 125030 - RNA, 32 nt, Human
cgugccacugcacuccagccuggugagagcaa

SEQ ID NO: 125031 - RNA, 32 nt, Human
cgugccacugcacuccagccugguugacagag

SEQ ID NO: 125032 - RNA, 32 nt, Human
cgugccacugcacuccagccuugagacagagc

SEQ ID NO: 125033 - RNA, 32 nt, Human
cgugccacugcacuccagccuuggugacagag

SEQ ID NO: 125034 - RNA, 32 nt, Human
cgugccacugcacuccagcuugggcaacaaag

SEQ ID NO: 125035 - RNA, 32 nt, Human
cgugccacugcacuccaggcugggcgacagag

SEQ ID NO: 125036 - RNA, 32 nt, Human
cgugccacugcacuccaggcugggugacagag

SEQ ID NO: 125037 - RNA, 32 nt, Human
cgugccacugcacuccagucugggcaacagag

SEQ ID NO: 125038 - RNA, 32 nt, Human
cgugccacugcacuccagucugggugacagag

SEQ ID NO: 125039 - RNA, 32 nt, Human
cgugccacugcacuccauccuggacgacagag

SEQ ID NO: 125040 - RNA, 32 nt, Human
cgugccacugcacucccagccugggcaacgga

SEQ ID NO: 125041 - RNA, 32 nt, Human
cgugccacugcacuccggccugggugauggag

SEQ ID NO: 125042 - RNA, 32 nt, Human
cgugccacugcacucuagccggggcgacagag

SEQ ID NO: 125043 - RNA, 32 nt, Human
cgugccacugcacucuagccugggcgacagag

SEQ ID NO: 125044 - RNA, 32 nt, Human
cgugccacugcacucuagccugggugacagag

SEQ ID NO: 125045 - RNA, 32 nt, Human
cgugccacugcacucuauccuggguaacagcg

SEQ ID NO: 125046 - RNA, 32 nt, Human
cgugccacugcacuucagccugggugacagaa

SEQ ID NO: 125047 - RNA, 32 nt, Human
cgugccacugcacuucagccugggugacagag

SEQ ID NO: 125048 - RNA, 32 nt, Human
cgugccacugcaguccagccuaggcaacagag

SEQ ID NO: 125049 - RNA, 32 nt, Human
cgugccacugcaugccagccugggcaacaaga

SEQ ID NO: 125050 - RNA, 32 nt, Human
cgugccacugcauuccagccugagcgacagag

SEQ ID NO: 125051 - RNA, 32 nt, Human
cgugccacugcauuccagccugggagagagag

SEQ ID NO: 125052 - RNA, 32 nt, Human
cgugccacugcauuccagccugggcgacagag

SEQ ID NO: 125053 - RNA, 32 nt, Human
cgugccacugcauuccagccugggugacagaa

SEQ ID NO: 125054 - RNA, 32 nt, Human
cgugccacugcauuccagccugguugacagag

SEQ ID NO: 125055 - RNA, 32 nt, Human
cgugccacugcgcuccagccugggugacagag

SEQ ID NO: 125056 - RNA, 32 nt, Human
cgugccacugcgcuccagccuggguggcagag

SEQ ID NO: 125057 - RNA, 32 nt, Human
cgugccacugcucuccagccugggugacagag

SEQ ID NO: 125058 - RNA, 32 nt, Human
cgugccacuguacaucaccagccugggcgaca

SEQ ID NO: 125059 - RNA, 32 nt, Human
cgugccacuguacuccagccugggcagcagag

SEQ ID NO: 125060 - RNA, 32 nt, Human
cgugccacuucacuccagccugggcaaaagag

SEQ ID NO: 125061 - RNA, 32 nt, Human
cgugccagacuuuuucuuaauuacaaacugau

SEQ ID NO: 125062 - RNA, 30 nt, Human
cgugccagagcuggaguuuucuagcuugua

SEQ ID NO: 125063 - RNA, 32 nt, Human
cgugccagccggcggaccucaggcgguggacg

SEQ ID NO: 125064 - RNA, 32 nt, Human
cgugccaggccagacaccccacgaugaguccg

SEQ ID NO: 125065 - RNA, 32 nt, Human
cgugccagugcacuccagccugggugacagcg

SEQ ID NO: 125066 - RNA, 32 nt, Human
cgugccauccagagucaucucagcccugccuu

SEQ ID NO: 125067 - RNA, 32 nt, Human
cgugccauccugccccuccacucccgacuaug

SEQ ID NO: 125068 - RNA, 32 nt, Human
cgugccaucggacuccagccugggugaaggag

SEQ ID NO: 125069 - RNA, 22 nt, Human
cgugccauggggaaguucuuca

SEQ ID NO: 125070 - RNA, 32 nt, Human
cgugccauuacacuccagccugggcgaaaggg

SEQ ID NO: 125071 - RNA, 32 nt, Human
cgugccauuacacuccagccugggugacagag

SEQ ID NO: 125072 - RNA, 32 nt, Human
cgugccauuccacuccagccugagcaacacag

SEQ ID NO: 125073 - RNA, 32 nt, Human
cgugccauuccacuccagccugggcaacgaga

SEQ ID NO: 125074 - RNA, 32 nt, Human
cgugccauugcacuacagccugggcaacaaga

SEQ ID NO: 125075 - RNA, 32 nt, Human
cgugccauugcacuccagcccaggcgacagaa

SEQ ID NO: 125076 - RNA, 32 nt, Human
cgugccauugcacuccagcccggaugacagag

SEQ ID NO: 125077 - RNA, 32 nt, Human
cgugccauugcacuccagccuaggcaacaaga

SEQ ID NO: 125078 - RNA, 32 nt, Human
cgugccauugcacuccagccuaggcaagaaga

SEQ ID NO: 125079 - RNA, 32 nt, Human
cgugccauugcacuccagccuaggcaauaaga

SEQ ID NO: 125080 - RNA, 32 nt, Human
cgugccauugcacuccagccuggaugacaaga

SEQ ID NO: 125081 - RNA, 32 nt, Human
cgugccauugcacuccagccuggccacagagc

SEQ ID NO: 125082 - RNA, 32 nt, Human
cgugccauugcacuccagccuggcgacaagag

SEQ ID NO: 125083 - RNA, 32 nt, Human
cgugccauugcacuccagccuggcgacagagu

SEQ ID NO: 125084 - RNA, 32 nt, Human
cgugccauugcacuccagccugggcaacaaga

SEQ ID NO: 125085 - RNA, 32 nt, Human
cgugccauugcacuccagccugggcaacaggg

SEQ ID NO: 125086 - RNA, 32 nt, Human
cgugccauugcacuccagccugggcaauagag

SEQ ID NO: 125087 - RNA, 32 nt, Human
cgugccauugcacuccagccugggcgacaaga

SEQ ID NO: 125088 - RNA, 32 nt, Human
cgugccauugcacuccagccugggugacagag

SEQ ID NO: 125089 - RNA, 32 nt, Human
cgugccauugcacuccagccugggugacagug

SEQ ID NO: 125090 - RNA, 32 nt, Human
cgugccauugcacuccagucugggagacaaga

SEQ ID NO: 125091 - RNA, 32 nt, Human
cgugccauugcacuccagucuggguaagaaga

SEQ ID NO: 125092 - RNA, 32 nt, Human
cgugccauugcacuccggccugggcaacaaca

SEQ ID NO: 125093 - RNA, 32 nt, Human
cgugccauugcacucuagccugggcaacaaga

SEQ ID NO: 125094 - RNA, 32 nt, Human
cgugccauugcauuccagccugggagacggag

SEQ ID NO: 125095 - RNA, 32 nt, Human
cgugccauugcgcuccagccuaggugacagag

SEQ ID NO: 125096 - RNA, 32 nt, Human
cgugccauugcgcuccagccugggcaacaaga

SEQ ID NO: 125097 - RNA, 32 nt, Human
cgugccauuguacuccugccuaggugacagag

SEQ ID NO: 125098 - RNA, 32 nt, Human
cgugccauuguauuccagccucggcaacacag

SEQ ID NO: 125099 - RNA, 32 nt, Human
cgugccauugugcuccagccugggcaacaaga

SEQ ID NO: 125100 - RNA, 32 nt, Human
cgugccauugugcuccagccugggcaacagag

SEQ ID NO: 125101 - RNA, 32 nt, Human
cgugccauuucacuccagccuggacaacaaga

SEQ ID NO: 125102 - RNA, 32 nt, Human
cgugcccagaagccaggaaggcugugcaggac

SEQ ID NO: 125103 - RNA, 32 nt, Human
cgugcccagagggagggauggcaggcuucagc

SEQ ID NO: 125104 - RNA, 32 nt, Human
cgugcccaguggcugcuccuuccuucaccucu

SEQ ID NO: 125105 - RNA, 32 nt, Human
cgugcccaugaccaucacugacuguggagucu

SEQ ID NO: 125106 - RNA, 32 nt, Human
cgugccccaagacaggugguuggggucuagga

SEQ ID NO: 125107 - RNA, 32 nt, Human
cgugcccccagcugcucuugucacugucucug

SEQ ID NO: 125108 - RNA, 32 nt, Human
cgugccccuccccgcuguccucuuggccccag

SEQ ID NO: 125109 - RNA, 32 nt, Human
cgugccccuucccagguccugccuccacaggu

SEQ ID NO: 125110 - RNA, 32 nt, Human
cgugccccuucuuucugcccuuccucaccgaa

SEQ ID NO: 125111 - RNA, 32 nt, Human
cgugcccgaggccacccaagcccagccugcgg

SEQ ID NO: 125112 - RNA, 32 nt, Human
cgugcccggagcagugucugucugcggcagga

SEQ ID NO: 125113 - RNA, 32 nt, Human
cgugcccggccugugcuuaaauauucuaggag

SEQ ID NO: 125114 - RNA, 32 nt, Human
cgugcccggcgcccggcgagaggucuucgaga

SEQ ID NO: 125115 - RNA, 25 nt, Human
cgugcccuaccccugcccugcgcag

SEQ ID NO: 125116 - RNA, 32 nt, Human
cgugcccucggucucuugccucggcaccuggg

SEQ ID NO: 125117 - RNA, 32 nt, Human
cgugcccuggggacccccggaaaagcagccca

SEQ ID NO: 125118 - RNA, 32 nt, Human
cgugcccugucccccaggcucuggguccgguu

SEQ ID NO: 125119 - RNA, 32 nt, Human
cgugccgagcaggcuugguggggaagggacuu

SEQ ID NO: 125120 - RNA, 32 nt, Human
cgugccgauagucccagcuacuugagaggcug

SEQ ID NO: 125121 - RNA, 32 nt, Human
cgugccgccgacgaccucagaaaacccagaug

SEQ ID NO: 125122 - RNA, 32 nt, Human
cgugccgccugcacuccucagggcagccuccc

SEQ ID NO: 125123 - RNA, 32 nt, Human
cgugccgcuaaauucuagccugggcaacagag

SEQ ID NO: 125124 - RNA, 32 nt, Human
cgugccgcuacacuccagccugaugacagacc

SEQ ID NO: 125125 - RNA, 32 nt, Human
cgugccgcugcauccagccugagcaacagagu

SEQ ID NO: 125126 - RNA, 32 nt, Human
cgugccggcgguggaggugugaaggcacgcga

SEQ ID NO: 125127 - RNA, 32 nt, Human
cgugccggcuggccaggugggcugagggugac

SEQ ID NO: 125128 - RNA, 21 nt, Human
cgugccgggaaagcucuuuua

SEQ ID NO: 125129 - RNA, 32 nt, Human
cgugccgugcgugcuuguggccaagggaagga

SEQ ID NO: 125130 - RNA, 32 nt, Human
cgugccguugcacuccagccugggcaacaaga

SEQ ID NO: 125131 - RNA, 32 nt, Human
cgugccguugcacuccagccugggcgacaaga

SEQ ID NO: 125132 - RNA, 31 nt, Human
cgugccuacccaccugugaggcagccuucug

SEQ ID NO: 125133 - RNA, 32 nt, Human
cgugccuauagucccagcuacaugggaggcua

SEQ ID NO: 125134 - RNA, 32 nt, Human
cgugccuauggugaagcaugcacuuuaauaug

SEQ ID NO: 125135 - RNA, 32 nt, Human
cgugccucacccuccagcauccaacccaagga

SEQ ID NO: 125136 - RNA, 32 nt, Human
cgugccucacuggguccugcuuaccucauuuc

SEQ ID NO: 125137 - RNA, 21 nt, Human
cgugccuccagcacaugcggc

SEQ ID NO: 125138 - RNA, 32 nt, Human
cgugccuccugccucuaucuucaugcuugugu

SEQ ID NO: 125139 - RNA, 32 nt, Human
cgugccucuagucccagcuacuugggaggcug

SEQ ID NO: 125140 - RNA, 32 nt, Human
cgugccucugcacuccaaccugggugauggag

SEQ ID NO: 125141 - RNA, 32 nt, Human
cgugccugagccaccaauccacccagacaaua

SEQ ID NO: 125142 - RNA, 32 nt, Human
cgugccugagggugagcgcaucugggccggug

SEQ ID NO: 125143 - RNA, 32 nt, Human
cgugccugcagccuggcaucuuccuguucuac

SEQ ID NO: 125144 - RNA, 32 nt, Human
cgugccugcuccaacucuccgugaggccccuc

SEQ ID NO: 125145 - RNA, 32 nt, Human
cgugccuggaaaugucucccgaaaaggaugaa

SEQ ID NO: 125146 - RNA, 32 nt, Human
cgugccuguaaucccagcuaccugggaggcug

SEQ ID NO: 125147 - RNA, 32 nt, Human
cgugccuguaaucccagcuacucgggaagcug

SEQ ID NO: 125148 - RNA, 32 nt, Human
cgugccuguaaucccagcuacucgggaggcug

SEQ ID NO: 125149 - RNA, 32 nt, Human
cgugccuguaaucccagcuacuugggaggcug

SEQ ID NO: 125150 - RNA, 32 nt, Human
cgugccuguaaucccagcuacuugggagucug

SEQ ID NO: 125151 - RNA, 32 nt, Human
cgugccuguaaucccagcuauucaggaggcug

SEQ ID NO: 125152 - RNA, 32 nt, Human
cgugccuguaaucccagcucuuugggaggcca

SEQ ID NO: 125153 - RNA, 32 nt, Human
cgugccuguacuguacuccagccugggaaaca

SEQ ID NO: 125154 - RNA, 32 nt, Human
cgugccuguagccccagcuacuugggaggcug

SEQ ID NO: 125155 - RNA, 32 nt, Human
cgugccuguagccucagcuacucggguggcag

SEQ ID NO: 125156 - RNA, 32 nt, Human
cgugccuguagucccaacuacucggaaggcug

SEQ ID NO: 125157 - RNA, 32 nt, Human
cgugccuguagucccaccuacuguggaggcug

SEQ ID NO: 125158 - RNA, 32 nt, Human
cgugccuguagucccagcacuuugggaggccg

SEQ ID NO: 125159 - RNA, 32 nt, Human
cgugccuguagucccagcuacaugggaggcug

SEQ ID NO: 125160 - RNA, 32 nt, Human
cgugccuguagucccagcuacucaggaggcug

SEQ ID NO: 125161 - RNA, 32 nt, Human
cgugccuguagucccagcuacuccggaggcug

SEQ ID NO: 125162 - RNA, 32 nt, Human
cgugccuguagucccagcuacucgagaggcua

SEQ ID NO: 125163 - RNA, 32 nt, Human
cgugccuguagucccagcuacucgggaagcug

SEQ ID NO: 125164 - RNA, 32 nt, Human
cgugccuguagucccagcuacucgggaggcug

SEQ ID NO: 125165 - RNA, 32 nt, Human
cgugccuguagucccagcuacucuggaggcug

SEQ ID NO: 125166 - RNA, 32 nt, Human
cgugccuguagucccagcuacuuaggaggcug

SEQ ID NO: 125167 - RNA, 32 nt, Human
cgugccuguagucccagcuacuucggggacug

SEQ ID NO: 125168 - RNA, 32 nt, Human
cgugccuguagucccagcuacuugggaggcug

SEQ ID NO: 125169 - RNA, 32 nt, Human
cgugccuguagucccagcuccuugggaggcug

SEQ ID NO: 125170 - RNA, 32 nt, Human
cgugccuguagucccagcuguccuggaggcug

SEQ ID NO: 125171 - RNA, 32 nt, Human
cgugccuguagucccauguacuugggaggcug

SEQ ID NO: 125172 - RNA, 19 nt, Human
cgugccuguaguuccagcu

SEQ ID NO: 125173 - RNA, 32 nt, Human
cgugccugugaucccagcuacuugggaggcug

SEQ ID NO: 125174 - RNA, 32 nt, Human
cgugccuguggucccagcuacuggggaggcug

SEQ ID NO: 125175 - RNA, 32 nt, Human
cgugccuguggucccagcuacuuggaaggcua

SEQ ID NO: 125176 - RNA, 32 nt, Human
cgugccuguggucccagcuacuugggaggcug

SEQ ID NO: 125177 - RNA, 32 nt, Human
cgugccuguugucccagcuacuaggaagucuu

SEQ ID NO: 125178 - RNA, 32 nt, Human
cgugccuugggugcuggaguuggaggaggcug

SEQ ID NO: 125179 - RNA, 32 nt, Human
cgugccuuugcucagaggcgcuucacuuucuc

SEQ ID NO: 125180 - RNA, 32 nt, Human
cgugcgaagcacaggcugaagagggguuucua

SEQ ID NO: 125181 - RNA, 32 nt, Human
cgugcgaccugagacgccgcccucgccgaggg

SEQ ID NO: 125182 - RNA, 32 nt, Human
cgugcgagugucucccucucccucucgcucuc

SEQ ID NO: 125183 - RNA, 32 nt, Human
cgugcgccuguaaucccagcuacuugggaggc

SEQ ID NO: 125184 - RNA, 32 nt, Human
cgugcgccuguaaucucagcuacuugggagcc

SEQ ID NO: 125185 - RNA, 32 nt, Human
cgugcgcgcccaggccagugcugugagcaggc

SEQ ID NO: 125186 - RNA, 32 nt, Human
cgugcgcgcgugcgugaggcccugccacgauu

SEQ ID NO: 125187 - RNA, 32 nt, Human
cgugcgcuaugggagcugcuguggcaggugcc

SEQ ID NO: 125188 - RNA, 32 nt, Human
cgugcgcuggcguagccaggagcucugcuccc

SEQ ID NO: 125189 - RNA, 32 nt, Human
cgugcgcuuccuauuucuagggcugggaaaca

SEQ ID NO: 125190 - RNA, 32 nt, Human
cgugcggacaccacuccucucugcagcacugc

SEQ ID NO: 125191 - RNA, 32 nt, Human
cgugcggcagaggcugcuucccucggcgacgc

SEQ ID NO: 125192 - RNA, 32 nt, Human
cgugcggccacugguccuagccuggauccuug

SEQ ID NO: 125193 - RNA, 32 nt, Human
cgugcgggaaauucagucuugauuuaaccuua

SEQ ID NO: 125194 - RNA, 32 nt, Human
cgugcgggcugcgcuccuccugggugcuauuu

SEQ ID NO: 125195 - RNA, 20 nt, Human
cgugcgggggcggcgcagag

SEQ ID NO: 125196 - RNA, 32 nt, Human
cgugcgucccucugggcgccucaggccccagg

SEQ ID NO: 125197 - RNA, 32 nt, Human
cgugcgucucacccuucggcgcucgcagcaga

SEQ ID NO: 125198 - RNA, 32 nt, Human
cgugcguggcugugaugaucugugaucgugcc

SEQ ID NO: 125199 - RNA, 32 nt, Human
cgugcuacugcacuccagccccagcuggguga

SEQ ID NO: 125200 - RNA, 32 nt, Human
cgugcuacugcacuccagccugggcaacacag

SEQ ID NO: 125201 - RNA, 32 nt, Human
cgugcuacugcacuccagccugggggacagaa

SEQ ID NO: 125202 - RNA, 32 nt, Human
cgugcuacugcacuccagucugggugacagag

SEQ ID NO: 125203 - RNA, 32 nt, Human
cgugcuacugcacucccgccugggugacagag

SEQ ID NO: 125204 - RNA, 32 nt, Human
cgugcuacugcaguccagccugggcuacagag

SEQ ID NO: 125205 - RNA, 22 nt, Human
cgugcuagaucuguuucuaacg

SEQ ID NO: 125206 - RNA, 32 nt, Human
cgugcuauguucucuuuaccccuucccccucu

SEQ ID NO: 125207 - RNA, 32 nt, Human
cgugcuauugcacuccagccugggcgacagag

SEQ ID NO: 125208 - RNA, 32 nt, Human
cgugcucaaccagguggaccacuucaggugua

SEQ ID NO: 125209 - RNA, 32 nt, Human
cgugcucacaccacugcugcucgagucuccug

SEQ ID NO: 125210 - RNA, 21 nt, Human
cgugcucagccagccgcgcag

SEQ ID NO: 125211 - RNA, 32 nt, Human
cgugcucagccuguuucucucugcccucuaga

SEQ ID NO: 125212 - RNA, 32 nt, Human
cgugcucagcucagggagagaccccgcccuug

SEQ ID NO: 125213 - RNA, 32 nt, Human
cgugcuccccuccaggacccccgacgccgccu

SEQ ID NO: 125214 - RNA, 32 nt, Human
cgugcucccugccugggcuccaugcugucgcg

SEQ ID NO: 125215 - RNA, 32 nt, Human
cgugcucuccaggaguccggagcaugguccug

SEQ ID NO: 125216 - RNA, 32 nt, Human
cgugcucugcuccugucgccuucgccuccuga

SEQ ID NO: 125217 - RNA, 32 nt, Human
cgugcucugcuggcccgccgggcucugcuggc

SEQ ID NO: 125218 - RNA, 32 nt, Human
cgugcugaauagauucuucucaguuugaaaga

SEQ ID NO: 125219 - RNA, 32 nt, Human
cgugcugcaucugcagcucaacuauacgcugc

SEQ ID NO: 125220 - RNA, 32 nt, Human
cgugcugccagaacuaugaggguccucucugg

SEQ ID NO: 125221 - RNA, 32 nt, Human
cgugcugcgcgcacaccuucagcuccaugucg

SEQ ID NO: 125222 - RNA, 32 nt, Human
cgugcugcgggcgcugagccuccuggcggcac

SEQ ID NO: 125223 - RNA, 32 nt, Human
cgugcugcguggagcauccaugcgaagauguc

SEQ ID NO: 125224 - RNA, 32 nt, Human
cgugcugcugaacucuguugggugaacuggua

SEQ ID NO: 125225 - RNA, 32 nt, Human
cgugcugcugagacuccaggggugggguucac

SEQ ID NO: 125226 - RNA, 32 nt, Human
cgugcugcugcaccccagccuagcgacagagc

SEQ ID NO: 125227 - RNA, 32 nt, Human
cgugcugcugcacuccagccugggcaauagag

SEQ ID NO: 125228 - RNA, 32 nt, Human
cgugcugcugccagagagauggcugcccaccu

SEQ ID NO: 125229 - RNA, 32 nt, Human
cgugcugcugcccaggcuggagugcaguggca

SEQ ID NO: 125230 - RNA, 32 nt, Human
cgugcuggaauuacaggcaugagccaccaugc

SEQ ID NO: 125231 - RNA, 32 nt, Human
cgugcuggcaggcaagacgcgagugcugguga

SEQ ID NO: 125232 - RNA, 32 nt, Human
cgugcuggccccgauaacugcaucaccuccug

SEQ ID NO: 125233 - RNA, 32 nt, Human
cgugcugggaggagacuggagcccgguuagga

SEQ ID NO: 125234 - RNA, 32 nt, Human
cgugcugggauuacaggcaugagccaccacgc

SEQ ID NO: 125235 - RNA, 32 nt, Human
cgugcugggauuacaggcaugagccacuacgc

SEQ ID NO: 125236 - RNA, 32 nt, Human
cgugcugggauuacaggugugagccacuacgc

SEQ ID NO: 125237 - RNA, 32 nt, Human
cgugcugggauuauaggcgugagccaccacgc

SEQ ID NO: 125238 - RNA, 32 nt, Human
cgugcugggauuauaggcgugagccaccgcuc

SEQ ID NO: 125239 - RNA, 32 nt, Human
cgugcuggggcugcccuuucuguuuccagucc

SEQ ID NO: 125240 - RNA, 32 nt, Human
cgugcuggugcacaccuguagucccagcuacu

SEQ ID NO: 125241 - RNA, 32 nt, Human
cgugcuggugcaugccuguaauccuagcugcu

SEQ ID NO: 125242 - RNA, 32 nt, Human
cgugcugguggagaacgagcugggcaaggacc

SEQ ID NO: 125243 - RNA, 32 nt, Human
cgugcugguggaguuugggggccagggggaca

SEQ ID NO: 125244 - RNA, 32 nt, Human
cgugcuggugugcaccuguaguuucagcuauu

SEQ ID NO: 125245 - RNA, 32 nt, Human
cgugcuguguuuuaguccugguaggaauauuu

SEQ ID NO: 125246 - RNA, 32 nt, Human
cgugcuguucucucccgcugugcgccugcccg

SEQ ID NO: 125247 - RNA, 32 nt, Human
cgugcuuccauggcuugcuacggagagagacc

SEQ ID NO: 125248 - RNA, 32 nt, Human
cgugcuucuaguccuagcuacucagaagacug

SEQ ID NO: 125249 - RNA, 32 nt, Human
cgugcuucuccacauccucauccuucaaggag

SEQ ID NO: 125250 - RNA, 32 nt, Human
cgugcuucucucuccggacucucauuauccaa

SEQ ID NO: 125251 - RNA, 32 nt, Human
cgugcuuggaagccaccagccagcaagcauua

SEQ ID NO: 125252 - RNA, 32 nt, Human
cgugcuuguagucccagcuacuugggaggcug

SEQ ID NO: 125253 - RNA, 32 nt, Human
cgugcuugucuggaugcggcucugagucuccg

SEQ ID NO: 125254 - RNA, 30 nt, Human
cguggaaaguuuuucaagaacugguuuuag

SEQ ID NO: 125255 - RNA, 32 nt, Human
cguggaaauuccagguuuugugagaccuguag

SEQ ID NO: 125256 - RNA, 32 nt, Human
cguggaacaagccaggaugcacggggagcugg

SEQ ID NO: 125257 - RNA, 25 nt, Human
cguggaacugaggcagcuguaugga

SEQ ID NO: 125258 - RNA, 32 nt, Human
cguggaacuuaauguuguguguguucugaccg

SEQ ID NO: 125259 - RNA, 32 nt, Human
cguggaagacgaccagcugcugcagaagcuca

SEQ ID NO: 125260 - RNA, 32 nt, Human
cguggaagacugcggagaggaggacgugggga

SEQ ID NO: 125261 - RNA, 32 nt, Human
cguggaagagaaaaugugagguuguuuagaua

SEQ ID NO: 125262 - RNA, 32 nt, Human
cguggaagaggugggggaaagaggaguuucug

SEQ ID NO: 125263 - RNA, 23 nt, Human
cguggaagauaaggcggcgcggg

SEQ ID NO: 125264 - RNA, 32 nt, Human
cguggaauccccaacuucauuagcuucuguga

SEQ ID NO: 125265 - RNA, 32 nt, Human
cguggaaugacagauugugccuguaugauauc

SEQ ID NO: 125266 - RNA, 20 nt, Human
cguggaaugguagcaauggg

SEQ ID NO: 125267 - RNA, 31 nt, Human
cguggacagcaagccgugaggagggagcccg

SEQ ID NO: 125268 - RNA, 32 nt, Human
cguggacagcagcuucccaucuggccuguccc

SEQ ID NO: 125269 - RNA, 32 nt, Human
cguggacaggcugaggcucaaggaaggugguc

SEQ ID NO: 125270 - RNA, 32 nt, Human
cguggacaugccacugcgcaccuaagacacac

SEQ ID NO: 125271 - RNA, 32 nt, Human
cguggaccugcaccaccaugccuugcuggccg

SEQ ID NO: 125272 - RNA, 32 nt, Human
cguggaccugugggaggggaggcacguggcgc

SEQ ID NO: 125273 - RNA, 32 nt, Human
cguggacuaucuaccuccagacuguuuuacaa

SEQ ID NO: 125274 - RNA, 32 nt, Human
cguggacucccggccuguuucuaccuucuauu

SEQ ID NO: 125275 - RNA, 32 nt, Human
cguggacucugcucuccagagccugggacccu

SEQ ID NO: 125276 - RNA, 32 nt, Human
cguggacugcggccacagcuucugccucaggu

SEQ ID NO: 125277 - RNA, 32 nt, Human
cguggacuggagcagagagaacucuacuuccu

SEQ ID NO: 125278 - RNA, 32 nt, Human
cguggagacugggagagcccagcaggcaccug

SEQ ID NO: 125279 - RNA, 32 nt, Human
cguggagagacacugcccccaggaugacacag

SEQ ID NO: 125280 - RNA, 32 nt, Human
cguggagagggugggugcaggaggcagacccu

SEQ ID NO: 125281 - RNA, 32 nt, Human
cguggagauggaaauuuuuaccuuuaucuuuc

SEQ ID NO: 125282 - RNA, 22 nt, Human
cguggagccgccuuggagccac

SEQ ID NO: 125283 - RNA, 32 nt, Human
cguggagccgggcuggggguggggaagggagg

SEQ ID NO: 125284 - RNA, 32 nt, Human
cguggagccuccuggccugccugcccgcccac

SEQ ID NO: 125285 - RNA, 32 nt, Human
cguggagccuucccgaccacagagccaacuug

SEQ ID NO: 125286 - RNA, 32 nt, Human
cguggagcgggaggcgcaggaggcucaggcug

SEQ ID NO: 125287 - RNA, 32 nt, Human
cguggagcugcggugcccuggccggcgauggg

SEQ ID NO: 125288 - RNA, 32 nt, Human
cguggagcuggguucuggaaaggaguugccgu

SEQ ID NO: 125289 - RNA, 32 nt, Human
cguggaggaagccaggaggaggguggcuugcu

SEQ ID NO: 125290 - RNA, 32 nt, Human
cguggaggaugcaggccagccguggggcacau

SEQ ID NO: 125291 - RNA, 23 nt, Human
cguggaggcagagguugcaguga

SEQ ID NO: 125292 - RNA, 24 nt, Human
cguggaggcagagguugcagugag

SEQ ID NO: 125293 - RNA, 22 nt, Human
cguggaggcagcuagcgcgagg

SEQ ID NO: 125294 - RNA, 32 nt, Human
cguggaggcucacaccuauaaucccaacacuu

SEQ ID NO: 125295 - RNA, 32 nt, Human
cguggaggcucaugccuguaaucccagcacuu

SEQ ID NO: 125296 - RNA, 32 nt, Human
cguggagggccaggccgccucugacgaggagg

SEQ ID NO: 125297 - RNA, 32 nt, Human
cguggagggcgugggagcgugggaggcgggag

SEQ ID NO: 125298 - RNA, 32 nt, Human
cguggagggugaggcggaggagggcuaggucu

SEQ ID NO: 125299 - RNA, 32 nt, Human
cguggagguggccugcacuccucagcuugugc

SEQ ID NO: 125300 - RNA, 32 nt, Human
cguggagguggugguugaaaggugagaauugg

SEQ ID NO: 125301 - RNA, 32 nt, Human
cguggagucugcagagaggccuuggccaggag

SEQ ID NO: 125302 - RNA, 32 nt, Human
cguggagucuuuuuccuccucagcuauaaaua

SEQ ID NO: 125303 - RNA, 23 nt, Human
cguggagugaaaaaggcagggug

SEQ ID NO: 125304 - RNA, 19 nt, Human
cguggagugagaccagugg

SEQ ID NO: 125305 - RNA, 32 nt, Human
cguggagugcaggagcgaaggggcuggccuag

SEQ ID NO: 125306 - RNA, 19 nt, Human
cguggaguggaagccuggg

SEQ ID NO: 125307 - RNA, 22 nt, Human
cguggaguggaagccugggggc

SEQ ID NO: 125308 - RNA, 32 nt, Human
cguggaguggggacggaagaugagcgcgggaa

SEQ ID NO: 125309 - RNA, 32 nt, Human
cguggaguuguggagguagcaagcagaguugg

SEQ ID NO: 125310 - RNA, 32 nt, Human
cguggauauuuggagccuccaccugccaaacc

SEQ ID NO: 125311 - RNA, 32 nt, Human
cguggaucucugaaacgagcaacagguucucu

SEQ ID NO: 125312 - RNA, 30 nt, Human
cguggaugagccacagaaccucuuccaccu

SEQ ID NO: 125313 - RNA, 16 nt, Human
cguggaugcccgggug

SEQ ID NO: 125314 - RNA, 31 nt, Human
cguggaugccucucccucgccucugucaguu

SEQ ID NO: 125315 - RNA, 32 nt, Human
cguggaugccuguguaccucuugccuuuucug

SEQ ID NO: 125316 - RNA, 32 nt, Human
cguggaugcugcacucgggcucgggauccgcc

SEQ ID NO: 125317 - RNA, 32 nt, Human
cguggauggauggcugcuggaaaccccuugcc

SEQ ID NO: 125318 - RNA, 32 nt, Human
cguggauggggaggggugggcagaguaguuuc

SEQ ID NO: 125319 - RNA, 32 nt, Human
cguggauguuuucagaaguggccaucgagagg

SEQ ID NO: 125320 - RNA, 32 nt, Human
cguggauugggcuugucucaggagguagcagg

SEQ ID NO: 125321 - RNA, 32 nt, Human
cguggauuuucuuccuccucugucacccgaga

SEQ ID NO: 125322 - RNA, 32 nt, Human
cguggcacgggguggagcggguugcagauacc

SEQ ID NO: 125323 - RNA, 32 nt, Human
cguggcagccacacucacccagccucuuuauu

SEQ ID NO: 125324 - RNA, 17 nt, Human
cguggcagccccgggug

SEQ ID NO: 125325 - RNA, 31 nt, Human
cguggcagcugcgugaauaccaggagcugau

SEQ ID NO: 125326 - RNA, 32 nt, Human
cguggcagugggcgccuguaaucccagcuacu

SEQ ID NO: 125327 - RNA, 32 nt, Human
cguggcauacagaacacacugcagcuucugca

SEQ ID NO: 125328 - RNA, 32 nt, Human
cguggcauccugccuguggucugggugagauu

SEQ ID NO: 125329 - RNA, 32 nt, Human
cguggcauugcacucuagccugggcaaccaag

SEQ ID NO: 125330 - RNA, 32 nt, Human
cguggccaaauuugaaggugcugugauuugaa

SEQ ID NO: 125331 - RNA, 26 nt, Human
cguggccaacucuccaccuuccagca

SEQ ID NO: 125332 - RNA, 32 nt, Human
cguggccaagcagagagaguggccuugaggaa

SEQ ID NO: 125333 - RNA, 32 nt, Human
cguggccaagcaggaacuccaggugcagggcg

SEQ ID NO: 125334 - RNA, 32 nt, Human
cguggccacugcaauccagccugggcgauaga

SEQ ID NO: 125335 - RNA, 32 nt, Human
cguggccacugcaguucaucgagucuucaggg

SEQ ID NO: 125336 - RNA, 32 nt, Human
cguggccagcagcccuagaggaauggccaucc

SEQ ID NO: 125337 - RNA, 32 nt, Human
cguggccaugugucucacccuaccguucgucu

SEQ ID NO: 125338 - RNA, 32 nt, Human
cguggcccacaaggaggaaggaagggcaaccu

SEQ ID NO: 125339 - RNA, 21 nt, Human
cguggccccagcgcgcacggg

SEQ ID NO: 125340 - RNA, 22 nt, Human
cguggccccaggcagugcuggg

SEQ ID NO: 125341 - RNA, 20 nt, Human
cguggccccaggccaagggg

SEQ ID NO: 125342 - RNA, 19 nt, Human
cguggccccaggccugggg

SEQ ID NO: 125343 - RNA, 19 nt, Human
cguggcccccgucgggagg

SEQ ID NO: 125344 - RNA, 32 nt, Human
cguggccccucggagccacuuccggcggcagc

SEQ ID NO: 125345 - RNA, 18 nt, Human
cguggccccugcagcgga

SEQ ID NO: 125346 - RNA, 32 nt, Human
cguggcccgccccacaccaccgccgccugcag

SEQ ID NO: 125347 - RNA, 32 nt, Human
cguggcccgcgggucauggccaaaggagaagg

SEQ ID NO: 125348 - RNA, 21 nt, Human
cguggcccggacgcggcgaga

SEQ ID NO: 125349 - RNA, 17 nt, Human
cguggcccggcgugcgc

SEQ ID NO: 125350 - RNA, 20 nt, Human
cguggcccugcugacgagag

SEQ ID NO: 125351 - RNA, 32 nt, Human
cguggcccugcugccucucucccuccacucag

SEQ ID NO: 125352 - RNA, 32 nt, Human
cguggcccuguauugcuuagugggccaugugu

SEQ ID NO: 125353 - RNA, 23 nt, Human
cguggccgcagccuggugaugga

SEQ ID NO: 125354 - RNA, 21 nt, Human
cguggccgccgucgccacggg

SEQ ID NO: 125355 - RNA, 21 nt, Human
cguggccgcgcucgucgcgga

SEQ ID NO: 125356 - RNA, 32 nt, Human
cguggccgcuccccucuccccgcgggccgggg

SEQ ID NO: 125357 - RNA, 22 nt, Human
cguggccggaggugcgcauggg

SEQ ID NO: 125358 - RNA, 32 nt, Human
cguggccggcgcagcucuccacaugccgggcg

SEQ ID NO: 125359 - RNA, 32 nt, Human
cguggccgggccuguacagcagccugggccau

SEQ ID NO: 125360 - RNA, 32 nt, Human
cguggccgggggcugcuacccccuccccugcc

SEQ ID NO: 125361 - RNA, 19 nt, Human
cguggccuacgggcagagg

SEQ ID NO: 125362 - RNA, 32 nt, Human
cguggccucaaggaagcuuguggcuuuggagg

SEQ ID NO: 125363 - RNA, 32 nt, Human
cguggccuccacucuaguuauaugcugccgca

SEQ ID NO: 125364 - RNA, 32 nt, Human
cguggccuccuucacagccuccuccucagaga

SEQ ID NO: 125365 - RNA, 32 nt, Human
cguggccugccuggcgccgagggcagguggcu

SEQ ID NO: 125366 - RNA, 32 nt, Human
cguggccugggaacucagggggaaagagcaau

SEQ ID NO: 125367 - RNA, 19 nt, Human
cguggccuuggcacagagg

SEQ ID NO: 125368 - RNA, 32 nt, Human
cguggcgaggcugaagucugggucuuccgcgc

SEQ ID NO: 125369 - RNA, 32 nt, Human
cguggcgaggggagaggagcugaaggggccgu

SEQ ID NO: 125370 - RNA, 32 nt, Human
cguggcgaugugcaccuguagucccagcuacu

SEQ ID NO: 125371 - RNA, 32 nt, Human
cguggcgcaagcgggccagggcgcgggcgcgg

SEQ ID NO: 125372 - RNA, 32 nt, Human
cguggcgcuaguccagcacgcccaggguuaaa

SEQ ID NO: 125373 - RNA, 32 nt, Human
cguggcggagcccaucuugcucccucucccag

SEQ ID NO: 125374 - RNA, 32 nt, Human
cguggcggcacaugccuguaaucccagcuaca

SEQ ID NO: 125375 - RNA, 32 nt, Human
cguggcggcgagcgccuguaaucccagguauu

SEQ ID NO: 125376 - RNA, 32 nt, Human
cguggcggcguggagcgcgcuuguuacggcca

SEQ ID NO: 125377 - RNA, 32 nt, Human
cguggcggcucacgccuguaaucccagcacuu

SEQ ID NO: 125378 - RNA, 32 nt, Human
cguggcggcucacgccuguaaucccagcccua

SEQ ID NO: 125379 - RNA, 32 nt, Human
cguggcggcucaugccuguaaucccagcacuu

SEQ ID NO: 125380 - RNA, 32 nt, Human
cguggcggcucuugccuguaaucuuagcacuu

SEQ ID NO: 125381 - RNA, 32 nt, Human
cguggcggggaggaggaggaggacaaggacuc

SEQ ID NO: 125382 - RNA, 32 nt, Human
cguggcgggggaggggacgcugagggcccaug

SEQ ID NO: 125383 - RNA, 32 nt, Human
cguggcggucaguggugucucucaccucaaau

SEQ ID NO: 125384 - RNA, 32 nt, Human
cguggcgucucuucugcccugcccuaaaucuc

SEQ ID NO: 125385 - RNA, 32 nt, Human
cguggcgucuggccacauggagcugcuuucug

SEQ ID NO: 125386 - RNA, 27 nt, Human
cguggcguuggcggcgcugcgcgcggg

SEQ ID NO: 125387 - RNA, 32 nt, Human
cguggcuaacauccugcuuugauucccucuga

SEQ ID NO: 125388 - RNA, 32 nt, Human
cguggcuacaauucaaagguauccaaugucgc

SEQ ID NO: 125389 - RNA, 32 nt, Human
cguggcucacugcagccuccaccuccugggcu

SEQ ID NO: 125390 - RNA, 32 nt, Human
cguggcuccagaacuccugugccaggcgggag

SEQ ID NO: 125391 - RNA, 17 nt, Human
cguggcucccccagagc

SEQ ID NO: 125392 - RNA, 32 nt, Human
cguggcuccucaggacccucugggucacacau

SEQ ID NO: 125393 - RNA, 32 nt, Human
cguggcuccuggcaagguggcauccacuuuug

SEQ ID NO: 125394 - RNA, 21 nt, Human
cguggcucgggcgacgcgggg

SEQ ID NO: 125395 - RNA, 20 nt, Human
cguggcucugggcggcgcgg

SEQ ID NO: 125396 - RNA, 32 nt, Human
cguggcugacagccaggcucuuacuccagccg

SEQ ID NO: 125397 - RNA, 32 nt, Human
cguggcugagucucccacugcccugcacacca

SEQ ID NO: 125398 - RNA, 32 nt, Human
cguggcugcaaccuuagcgacaucaggaagaa

SEQ ID NO: 125399 - RNA, 22 nt, Human
cguggcugcagcgcaccagggg

SEQ ID NO: 125400 - RNA, 32 nt, Human
cguggcugcccucuccugccucaugcuuguug

SEQ ID NO: 125401 - RNA, 32 nt, Human
cguggcuggagagagaagugggagggaggggg

SEQ ID NO: 125402 - RNA, 32 nt, Human
cguggcuggggcagucaguaggaacuguaacu

SEQ ID NO: 125403 - RNA, 32 nt, Human
cguggcugucggugacagccacaguuccuucc

SEQ ID NO: 125404 - RNA, 32 nt, Human
cguggcuguugaguccugucuccugggucuga

SEQ ID NO: 125405 - RNA, 32 nt, Human
cguggcuuaggcccuggcucugcauggggaau

SEQ ID NO: 125406 - RNA, 32 nt, Human
cguggcuuccacccuuguuaaugaugcuccug

SEQ ID NO: 125407 - RNA, 32 nt, Human
cguggcuuccagauuugcaucugugcugcagu

SEQ ID NO: 125408 - RNA, 32 nt, Human
cguggcuuuucauucugcacagucccaggucc

SEQ ID NO: 125409 - RNA, 32 nt, Human
cgugggaacagcgcggagcagagaagcaccaa

SEQ ID NO: 125410 - RNA, 32 nt, Human
cgugggaauuacgggagcuacaauucaagaug

SEQ ID NO: 125411 - RNA, 32 nt, Human
cgugggaauucugggagauacaauucaaguug

SEQ ID NO: 125412 - RNA, 32 nt, Human
cgugggacagggagaaaacaacauaaaucaua

SEQ ID NO: 125413 - RNA, 32 nt, Human
cgugggacccucccaccauggcagcugagcac

SEQ ID NO: 125414 - RNA, 32 nt, Human
cgugggacuugccucagaucagccugcgacug

SEQ ID NO: 125415 - RNA, 32 nt, Human
cgugggagaagaugacccguggaacacuugcc

SEQ ID NO: 125416 - RNA, 32 nt, Human
cgugggagaauggcugggcagagcagaggggc

SEQ ID NO: 125417 - RNA, 32 nt, Human
cgugggaggaaggggacaguugcagucucacu

SEQ ID NO: 125418 - RNA, 32 nt, Human
cgugggaggagaaagaccugaccguccacgag

SEQ ID NO: 125419 - RNA, 32 nt, Human
cgugggaggagaaagaccugaccgucuccaag

SEQ ID NO: 125420 - RNA, 32 nt, Human
cgugggaggcagaaguugcagugagccaagau

SEQ ID NO: 125421 - RNA, 32 nt, Human
cgugggaggcagagguugcagugagccgagau

SEQ ID NO: 125422 - RNA, 32 nt, Human
cgugggaggcagagguugcagugaguggagau

SEQ ID NO: 125423 - RNA, 32 nt, Human
cgugggaggcggagguugcagcgagcugagau

SEQ ID NO: 125424 - RNA, 32 nt, Human
cgugggaggcggagguugcagugagcugagau

SEQ ID NO: 125425 - RNA, 32 nt, Human
cgugggaggcggagguuguagugagccaggau

SEQ ID NO: 125426 - RNA, 32 nt, Human
cgugggagggagcaugcaggugagaggaugca

SEQ ID NO: 125427 - RNA, 32 nt, Human
cgugggauccacacagcucagaacaguuggau

SEQ ID NO: 125428 - RNA, 32 nt, Human
cgugggaugccauaaaagccgcccagugggac

SEQ ID NO: 125429 - RNA, 32 nt, Human
cgugggauggggaccgugggaaagaggacagc

SEQ ID NO: 125430 - RNA, 32 nt, Human
cgugggauucugcuuuucauccucuguggugu

SEQ ID NO: 125431 - RNA, 32 nt, Human
cgugggauuggagaaaggggaccugagggagg

SEQ ID NO: 125432 - RNA, 32 nt, Human
cgugggcaaaauuacuuaacuuuuggccaugu

SEQ ID NO: 125433 - RNA, 28 nt, Human
cgugggcaacagagcaagacgcugucuc

SEQ ID NO: 125434 - RNA, 32 nt, Human
cgugggcaccucaguagcggagcaucuccacg

SEQ ID NO: 125435 - RNA, 32 nt, Human
cgugggcagccugcuuggccuggcagccucuu

SEQ ID NO: 125436 - RNA, 32 nt, Human
cgugggcagggacuucggauuugcauuucugg

SEQ ID NO: 125437 - RNA, 32 nt, Human
cgugggcagugcagugcuggaggccgggggca

SEQ ID NO: 125438 - RNA, 32 nt, Human
cgugggcagugccuuccuccagccucacaacc

SEQ ID NO: 125439 - RNA, 32 nt, Human
cgugggcaugcacugaaggguugccugcaggg

SEQ ID NO: 125440 - RNA, 32 nt, Human
cgugggcaugggcgcacuggcccgggcgcugc

SEQ ID NO: 125441 - RNA, 32 nt, Human
cgugggccagaggcagcucgugugccuggccc

SEQ ID NO: 125442 - RNA, 32 nt, Human
cgugggccccuugggccucuugcccacugugu

SEQ ID NO: 125443 - RNA, 32 nt, Human
cgugggcccuccugccuugcauccacccgugg

SEQ ID NO: 125444 - RNA, 32 nt, Human
cgugggcccuggcaagugcacuccucagccaa

SEQ ID NO: 125445 - RNA, 32 nt, Human
cgugggccgccagaucugcaccaccuucgagc

SEQ ID NO: 125446 - RNA, 17 nt, Human
cgugggccguugcgcug

SEQ ID NO: 125447 - RNA, 32 nt, Human
cgugggccucauuucuugcugcagagaaucuu

SEQ ID NO: 125448 - RNA, 32 nt, Human
cgugggcgagguggcaauuggggaagggguuc

SEQ ID NO: 125449 - RNA, 32 nt, Human
cgugggcgcucaauaaacacacaugagaacaa

SEQ ID NO: 125450 - RNA, 25 nt, Human
cgugggcggauuacuugagcccagg

SEQ ID NO: 125451 - RNA, 32 nt, Human
cgugggcguaguggggagcacccuggagugga

SEQ ID NO: 125452 - RNA, 32 nt, Human
cgugggcguuucgcagacuccuaaguggucug

SEQ ID NO: 125453 - RNA, 32 nt, Human
cgugggcuaucugaacacuacccugacucuca

SEQ ID NO: 125454 - RNA, 32 nt, Human
cgugggcuccagggacuggaguguaaugcucg

SEQ ID NO: 125455 - RNA, 32 nt, Human
cgugggcuccccucggcuguggugccuccucu

SEQ ID NO: 125456 - RNA, 19 nt, Human
cgugggcuccggccggcua

SEQ ID NO: 125457 - RNA, 32 nt, Human
cgugggcuccucuuuucuccugacugcugguu

SEQ ID NO: 125458 - RNA, 32 nt, Human
cgugggcucuauucgaaggagggaugggugag

SEQ ID NO: 125459 - RNA, 32 nt, Human
cgugggcugggaaugggggagagaagggaaaa

SEQ ID NO: 125460 - RNA, 32 nt, Human
cgugggcugggcaggcucuggaagcccaaguc

SEQ ID NO: 125461 - RNA, 32 nt, Human
cgugggcugguacccaggccuggagcagcggu

SEQ ID NO: 125462 - RNA, 22 nt, Human
cgugggcuuggcccagccccac

SEQ ID NO: 125463 - RNA, 32 nt, Human
cguggggaaaugcaggacugagaggcaacgug

SEQ ID NO: 125464 - RNA, 21 nt, Human
cguggggaaggcggcgggagg

SEQ ID NO: 125465 - RNA, 32 nt, Human
cguggggacaggauuugccaguucacccacag

SEQ ID NO: 125466 - RNA, 32 nt, Human
cguggggaccucaagagccaucuucgaucuuu

SEQ ID NO: 125467 - RNA, 32 nt, Human
cguggggagcguggugacaggaggugggacga

SEQ ID NO: 125468 - RNA, 32 nt, Human
cguggggagcuucagauaccgcgccgcugcac

SEQ ID NO: 125469 - RNA, 32 nt, Human
cguggggaggagcgugcccgacugccucgcgg

SEQ ID NO: 125470 - RNA, 32 nt, Human
cguggggaggcugaggcaggcagaucacuuag

SEQ ID NO: 125471 - RNA, 32 nt, Human
cguggggaggggcugaggauaccccaaagucc

SEQ ID NO: 125472 - RNA, 32 nt, Human
cguggggaggguggaggggugacaguggagga

SEQ ID NO: 125473 - RNA, 32 nt, Human
cguggggcagagccagcagaggccagagcugu

SEQ ID NO: 125474 - RNA, 32 nt, Human
cguggggcagucggugggggaggcaggcggug

SEQ ID NO: 125475 - RNA, 32 nt, Human
cguggggccggaggggacacgcaggaccggag

SEQ ID NO: 125476 - RNA, 22 nt, Human
cguggggcucacaccuguaauc

SEQ ID NO: 125477 - RNA, 32 nt, Human
cguggggcucccugccuucuggacuccugaag

SEQ ID NO: 125478 - RNA, 32 nt, Human
cguggggcugugguggccgcggcucucaggug

SEQ ID NO: 125479 - RNA, 32 nt, Human
cgugggggaucagugccugcugugugcugaua

SEQ ID NO: 125480 - RNA, 32 nt, Human
cgugggggcauacaccuguaauuccagcuacu

SEQ ID NO: 125481 - RNA, 32 nt, Human
cgugggggccgagccaagaccagucugcaaac

SEQ ID NO: 125482 - RNA, 32 nt, Human
cgugggggcggcuugcuguccagccugugugg

SEQ ID NO: 125483 - RNA, 32 nt, Human
cgugggggcucaugccuguaaucccagcacuu

SEQ ID NO: 125484 - RNA, 32 nt, Human
cgugggggcugccuccccggcucccggugcag

SEQ ID NO: 125485 - RNA, 32 nt, Human
cguggggucccgggggcagccgauggcgcuca

SEQ ID NO: 125486 - RNA, 32 nt, Human
cguggggugaagccuagcagcuaugaggaucc

SEQ ID NO: 125487 - RNA, 32 nt, Human
cgugggguggggcggugugacaggguagagga

SEQ ID NO: 125488 - RNA, 32 nt, Human
cgugggguucacuguaguagcugcacuaggug

SEQ ID NO: 125489 - RNA, 32 nt, Human
cgugggguuccucccuucucuucacagucaca

SEQ ID NO: 125490 - RNA, 32 nt, Human
cgugggguuuuggccagcacagagccggggcg

SEQ ID NO: 125491 - RNA, 32 nt, Human
cguggguagggaggacagagaggcggcguucg

SEQ ID NO: 125492 - RNA, 23 nt, Human
cgugggucacgccuguaauccca

SEQ ID NO: 125493 - RNA, 32 nt, Human
cgugggucagagaguuuuuaugggggucuguu

SEQ ID NO: 125494 - RNA, 19 nt, Human
cgugggucagcugccccac

SEQ ID NO: 125495 - RNA, 32 nt, Human
cgugggucccggcccuacccacccuagcucag

SEQ ID NO: 125496 - RNA, 21 nt, Human
cguggguccgcgcugcuucca

SEQ ID NO: 125497 - RNA, 32 nt, Human
cgugggugcaguugcgggacugugaggggucu

SEQ ID NO: 125498 - RNA, 32 nt, Human
cguggguggcagcuccuccacacacaagcccu

SEQ ID NO: 125499 - RNA, 32 nt, Human
cgugggugggccuggcccugcuuucuacgcca

SEQ ID NO: 125500 - RNA, 32 nt, Human
cguggguggggcggggguggucccacagcugg

SEQ ID NO: 125501 - RNA, 32 nt, Human
cguggguucugcucuuccucccuauguugauc

SEQ ID NO: 125502 - RNA, 32 nt, Human
cguggguucuucuucguccucuguccucugcc

SEQ ID NO: 125503 - RNA, 32 nt, Human
cgugguaagcucccauggaugacaggguucug

SEQ ID NO: 125504 - RNA, 32 nt, Human
cgugguagcacacgccuguaaucccagcuacu

SEQ ID NO: 125505 - RNA, 32 nt, Human
cgugguagcaggcaccuguaaucccagcuacu

SEQ ID NO: 125506 - RNA, 32 nt, Human
cgugguagcgcauggcuguaauccuggcuacu

SEQ ID NO: 125507 - RNA, 32 nt, Human
cgugguagcguccaccuguaauccuagcuacc

SEQ ID NO: 125508 - RNA, 32 nt, Human
cgugguagcgucuaccuguaauccuagcuacc

SEQ ID NO: 125509 - RNA, 32 nt, Human
cgugguagcgugcaccuguaauccuagcuacc

SEQ ID NO: 125510 - RNA, 23 nt, Human
cgugguagcucacaccuguaauc

SEQ ID NO: 125511 - RNA, 32 nt, Human
cgugguagcucacaccuguaaucccagaacuu

SEQ ID NO: 125512 - RNA, 23 nt, Human
cgugguagcucacgccuguaauc

SEQ ID NO: 125513 - RNA, 32 nt, Human
cgugguagcucacgccuguaaucccagcacuu

SEQ ID NO: 125514 - RNA, 32 nt, Human
cgugguagcucacgccuguaauuccagcacuu

SEQ ID NO: 125515 - RNA, 32 nt, Human
cgugguagcucaugccuguaaucccagcacuu

SEQ ID NO: 125516 - RNA, 32 nt, Human
cgugguagucaccuucaugucaucuauaauag

SEQ ID NO: 125517 - RNA, 32 nt, Human
cgugguagugcacaccuguaguccuagcuacu

SEQ ID NO: 125518 - RNA, 32 nt, Human
cgugguagugcaugccuguaaucccagcuacu

SEQ ID NO: 125519 - RNA, 32 nt, Human
cgugguagugugcaccuguaauccuagcuacc

SEQ ID NO: 125520 - RNA, 32 nt, Human
cguggucacugcacuccagccuggcuacagag

SEQ ID NO: 125521 - RNA, 32 nt, Human
cguggucagguagagagugagccccacgccgc

SEQ ID NO: 125522 - RNA, 32 nt, Human
cguggucaucuagcccuacuccgccaccggau

SEQ ID NO: 125523 - RNA, 32 nt, Human
cgugguccagggccuucuccagaucuguucca

SEQ ID NO: 125524 - RNA, 32 nt, Human
cgugguccucaaguccaaggaggaggccuucu

SEQ ID NO: 125525 - RNA, 32 nt, Human
cgugguccuuucucuugccugugagcuggugc

SEQ ID NO: 125526 - RNA, 32 nt, Human
cguggucucaaggagucagagcagggcuggcc

SEQ ID NO: 125527 - RNA, 32 nt, Human
cguggucuccagcuucuucauccugccagagu

SEQ ID NO: 125528 - RNA, 32 nt, Human
cguggucucgccuucccuucuuccugcagguu

SEQ ID NO: 125529 - RNA, 32 nt, Human
cguggucugguggagaccugugcuccccggag

SEQ ID NO: 125530 - RNA, 32 nt, Human
cguggucuucgcagaggggaaggccugucuaa

SEQ ID NO: 125531 - RNA, 24 nt, Human
cguggugaaaccccaucuucacua

SEQ ID NO: 125532 - RNA, 32 nt, Human
cguggugaaaucuggcaguggggaaagagcaa

SEQ ID NO: 125533 - RNA, 32 nt, Human
cguggugacagacgccuguaaucccagcuacu

SEQ ID NO: 125534 - RNA, 32 nt, Human
cguggugacgcacaucuguaaucccagcuacu

SEQ ID NO: 125535 - RNA, 32 nt, Human
cguggugacgggcgccuguaaucccagauacu

SEQ ID NO: 125536 - RNA, 23 nt, Human
cguggugacucacaccuguaauc

SEQ ID NO: 125537 - RNA, 32 nt, Human
cguggugacucacaccuguaaucccagcacuu

SEQ ID NO: 125538 - RNA, 32 nt, Human
cguggugacucacaccuguaauuccagcacuu

SEQ ID NO: 125539 - RNA, 23 nt, Human
cguggugacucacgucuguaauc

SEQ ID NO: 125540 - RNA, 32 nt, Human
cguggugacucacgucuguaaucccagcacuu

SEQ ID NO: 125541 - RNA, 32 nt, Human
cguggugacucaugccuguaaucccagcacug

SEQ ID NO: 125542 - RNA, 32 nt, Human
cguggugacuugcaccuauaaucccagcacuu

SEQ ID NO: 125543 - RNA, 32 nt, Human
cguggugaggcccggggaaagccaggccgggc

SEQ ID NO: 125544 - RNA, 32 nt, Human
cguggugaggcuugggaugguggugggaaugg

SEQ ID NO: 125545 - RNA, 32 nt, Human
cguggugaucaggagucacagacaagaucggg

SEQ ID NO: 125546 - RNA, 32 nt, Human
cguggugaugcgugccuguaaucccagcuacc

SEQ ID NO: 125547 - RNA, 32 nt, Human
cguggugaugggcaccuguaaucucagcuacu

SEQ ID NO: 125548 - RNA, 32 nt, Human
cguggugaugggugccuguaaucccagcuacg

SEQ ID NO: 125549 - RNA, 32 nt, Human
cguggugauucacgccuguaaucccagcacuu

SEQ ID NO: 125550 - RNA, 32 nt, Human
cguggugcacaggaagucugagugugaggggc

SEQ ID NO: 125551 - RNA, 32 nt, Human
cguggugccucacaccuguaauuccagcacuu

SEQ ID NO: 125552 - RNA, 22 nt, Human
cguggugcucacgccuguaauc

SEQ ID NO: 125553 - RNA, 32 nt, Human
cgugguggagcaugucuguaaucccagcuacu

SEQ ID NO: 125554 - RNA, 32 nt, Human
cgugguggagugaagucagucagggaagguuu

SEQ ID NO: 125555 - RNA, 32 nt, Human
cgugguggaucaugccuguaaucccaguacuu

SEQ ID NO: 125556 - RNA, 32 nt, Human
cgugguggauggcaccuguagucuuagcuacu

SEQ ID NO: 125557 - RNA, 32 nt, Human
cgugguggcaaacaacuguaauccgagcuacu

SEQ ID NO: 125558 - RNA, 32 nt, Human
cgugguggcaaaugccuauaaucccagcuacu

SEQ ID NO: 125559 - RNA, 32 nt, Human
cgugguggcaaaugccuguaauaccagcuacu

SEQ ID NO: 125560 - RNA, 23 nt, Human
cgugguggcacacacccguaauc

SEQ ID NO: 125561 - RNA, 32 nt, Human
cgugguggcacacacccguaaucccagcuacu

SEQ ID NO: 125562 - RNA, 23 nt, Human
cgugguggcacacaccuguaauc

SEQ ID NO: 125563 - RNA, 32 nt, Human
cgugguggcacacaccuguaaucccaguuacu

SEQ ID NO: 125564 - RNA, 32 nt, Human
cgugguggcacacaccuguagucccagcuacu

SEQ ID NO: 125565 - RNA, 32 nt, Human
cgugguggcacacaccuguagucccggcuacu

SEQ ID NO: 125566 - RNA, 32 nt, Human
cgugguggcacacgccuguaaucacagcuacu

SEQ ID NO: 125567 - RNA, 32 nt, Human
cgugguggcacacgccuguaaucccagcuaac

SEQ ID NO: 125568 - RNA, 32 nt, Human
cgugguggcacacgccuguaaucccagcuacu

SEQ ID NO: 125569 - RNA, 32 nt, Human
cgugguggcacacuccuguaaucccagcuacu

SEQ ID NO: 125570 - RNA, 32 nt, Human
cgugguggcacauaccuguaaugccagcuacu

SEQ ID NO: 125571 - RNA, 32 nt, Human
cgugguggcacaugacuguaaucccagcuacu

SEQ ID NO: 125572 - RNA, 32 nt, Human
cgugguggcacaugcccguaaucccagcuagu

SEQ ID NO: 125573 - RNA, 32 nt, Human
cgugguggcacaugccuauaaucccagcuacu

SEQ ID NO: 125574 - RNA, 32 nt, Human
cgugguggcacaugccuguaaucccaacuacu

SEQ ID NO: 125575 - RNA, 32 nt, Human
cgugguggcacaugccuguaaucccagcuacu

SEQ ID NO: 125576 - RNA, 32 nt, Human
cgugguggcacaugccuguaaucccagcugcu

SEQ ID NO: 125577 - RNA, 32 nt, Human
cgugguggcacaugccuguaaucucagcuacu

SEQ ID NO: 125578 - RNA, 32 nt, Human
cgugguggcacaugccuguaaugccagcuacu

SEQ ID NO: 125579 - RNA, 32 nt, Human
cgugguggcacaugcuuguaaucccagcuacu

SEQ ID NO: 125580 - RNA, 32 nt, Human
cgugguggcacauuccuguaaucccagcuacu

SEQ ID NO: 125581 - RNA, 32 nt, Human
cgugguggcaccugccuguaaucccagcuacu

SEQ ID NO: 125582 - RNA, 32 nt, Human
cgugguggcacgcaccuguaaucccagcuacu

SEQ ID NO: 125583 - RNA, 32 nt, Human
cgugguggcacgcgccuguaaucccagcuacc

SEQ ID NO: 125584 - RNA, 32 nt, Human
cgugguggcacgcgccuguaaucccagcuacu

SEQ ID NO: 125585 - RNA, 32 nt, Human
cgugguggcacgcgccuguaaucccagcuauu

SEQ ID NO: 125586 - RNA, 32 nt, Human
cgugguggcacguaccuguaaucucagcuacu

SEQ ID NO: 125587 - RNA, 32 nt, Human
cgugguggcacgugccuguaaucccaguuacu

SEQ ID NO: 125588 - RNA, 32 nt, Human
cgugguggcacguuccugcaaucccagcuacu

SEQ ID NO: 125589 - RNA, 32 nt, Human
cgugguggcagaccccuguaaucccagcuacu

SEQ ID NO: 125590 - RNA, 32 nt, Human
cgugguggcagauuuauaccauggacacagag

SEQ ID NO: 125591 - RNA, 32 nt, Human
cgugguggcaggcaccuguaaucccaccuacu

SEQ ID NO: 125592 - RNA, 32 nt, Human
cgugguggcaggcaccuguaaucccagcuacu

SEQ ID NO: 125593 - RNA, 32 nt, Human
cgugguggcaggcaccuguagucccagauacu

SEQ ID NO: 125594 - RNA, 32 nt, Human
cgugguggcaggcaccuguagucccagcuacu

SEQ ID NO: 125595 - RNA, 32 nt, Human
cgugguggcaggcaccuguaguccuagcuacu

SEQ ID NO: 125596 - RNA, 32 nt, Human
cgugguggcaggcgccuguaaucccagcuacu

SEQ ID NO: 125597 - RNA, 32 nt, Human
cgugguggcaggcgucuguaaucccagcugcu

SEQ ID NO: 125598 - RNA, 32 nt, Human
cgugguggcagguaccuguaaucccagcuacu

SEQ ID NO: 125599 - RNA, 32 nt, Human
cgugguggcaggugccuguaaucccagcuacu

SEQ ID NO: 125600 - RNA, 32 nt, Human
cgugguggcaggugccuguaaucccggcuauu

SEQ ID NO: 125601 - RNA, 32 nt, Human
cgugguggcagucugcuguuacgagcauaaua

SEQ ID NO: 125602 - RNA, 32 nt, Human
cgugguggcaugcaccuguaaucccaacuacu

SEQ ID NO: 125603 - RNA, 32 nt, Human
cgugguggcaugcaccuguagucccagcuacu

SEQ ID NO: 125604 - RNA, 32 nt, Human
cgugguggcaugcgccuguaaucccagcuacc

SEQ ID NO: 125605 - RNA, 32 nt, Human
cgugguggcaugcgccuguaaucccagcuacu

SEQ ID NO: 125606 - RNA, 32 nt, Human
cgugguggcaugcgccuguaauccuagcuauu

SEQ ID NO: 125607 - RNA, 23 nt, Human
cgugguggcccacgccuguaauc

SEQ ID NO: 125608 - RNA, 32 nt, Human
cgugguggcccacgccuguaaucccagcuacu

SEQ ID NO: 125609 - RNA, 32 nt, Human
cgugguggccugcgccuguaaucccagcuacc

SEQ ID NO: 125610 - RNA, 32 nt, Human
cgugguggccugcuucuguaauccuagcuagu

SEQ ID NO: 125611 - RNA, 32 nt, Human
cgugguggcgagcaccuguaaucucagcacuu

SEQ ID NO: 125612 - RNA, 23 nt, Human
cgugguggcgcacaccuguaauc

SEQ ID NO: 125613 - RNA, 32 nt, Human
cgugguggcgcacaccuguaaucccagcuacu

SEQ ID NO: 125614 - RNA, 32 nt, Human
cgugguggcgcacaucuguaaucccagcuacu

SEQ ID NO: 125615 - RNA, 32 nt, Human
cgugguggcgcauacuuguaaucccagcuacu

SEQ ID NO: 125616 - RNA, 32 nt, Human
cgugguggcgcaugacuguaaucccagcuacu

SEQ ID NO: 125617 - RNA, 32 nt, Human
cgugguggcgcaugcccauaaucccagcuacu

SEQ ID NO: 125618 - RNA, 32 nt, Human
cgugguggcgcaugccuauaaucccagcuacu

SEQ ID NO: 125619 - RNA, 32 nt, Human
cgugguggcgcaugccuguaaucccagcuacu

SEQ ID NO: 125620 - RNA, 32 nt, Human
cgugguggcgcaugccuguaauccuagcuacu

SEQ ID NO: 125621 - RNA, 32 nt, Human
cgugguggcgccugccuguaaucccagcuacu

SEQ ID NO: 125622 - RNA, 32 nt, Human
cgugguggcgcgcaccuguaaucccagcuacu

SEQ ID NO: 125623 - RNA, 32 nt, Human
cgugguggcggacgccuguaaucccagcuacu

SEQ ID NO: 125624 - RNA, 32 nt, Human
cgugguggcgggcaccugcaaucccagcuacu

SEQ ID NO: 125625 - RNA, 32 nt, Human
cgugguggcgggcaccuguaaucccagcuacu

SEQ ID NO: 125626 - RNA, 32 nt, Human
cgugguggcgggcaccuguagucccagcuaca

SEQ ID NO: 125627 - RNA, 32 nt, Human
cgugguggcgggcaccuguagucccagcuacu

SEQ ID NO: 125628 - RNA, 32 nt, Human
cgugguggcgggcacuuguaaucccagcuacu

SEQ ID NO: 125629 - RNA, 32 nt, Human
cgugguggcgggccccuguaaucccagcuacu

SEQ ID NO: 125630 - RNA, 32 nt, Human
cgugguggcgggcgccuauaaucccagcuacu

SEQ ID NO: 125631 - RNA, 32 nt, Human
cgugguggcgggcgccuguaaucacagcuacu

SEQ ID NO: 125632 - RNA, 32 nt, Human
cgugguggcgggcgccuguaaucccagcuacu

SEQ ID NO: 125633 - RNA, 32 nt, Human
cgugguggcgggcgccuguaaucccagcugcu

SEQ ID NO: 125634 - RNA, 32 nt, Human
cgugguggcgggcgccuguaaucccagguacu

SEQ ID NO: 125635 - RNA, 32 nt, Human
cgugguggcgggcgccuguaauccuagcugcu

SEQ ID NO: 125636 - RNA, 32 nt, Human
cgugguggcgggugccugggaggcugaggcag

SEQ ID NO: 125637 - RNA, 32 nt, Human
cgugguggcgggugccuguaaucccagcuacu

SEQ ID NO: 125638 - RNA, 32 nt, Human
cgugguggcgggugccuguaaucccggcuacu

SEQ ID NO: 125639 - RNA, 32 nt, Human
cgugguggcggucaccuguagucccagcuacu

SEQ ID NO: 125640 - RNA, 32 nt, Human
cgugguggcgugcaccuguaaucccagcuacu

SEQ ID NO: 125641 - RNA, 32 nt, Human
cgugguggcgugcaccuguaaucucagcuacu

SEQ ID NO: 125642 - RNA, 32 nt, Human
cgugguggcgugcauuuguaaucccagcuaca

SEQ ID NO: 125643 - RNA, 32 nt, Human
cgugguggcgugcgccuguaaucccagcuacu

SEQ ID NO: 125644 - RNA, 32 nt, Human
cgugguggcgugcgccuguaaucucagcuacu

SEQ ID NO: 125645 - RNA, 32 nt, Human
cgugguggcgugugccuguaaucccagcuauu

SEQ ID NO: 125646 - RNA, 32 nt, Human
cgugguggcgugugccuguaaucucagcuacu

SEQ ID NO: 125647 - RNA, 23 nt, Human
cgugguggcucacaccuauaauc

SEQ ID NO: 125648 - RNA, 32 nt, Human
cgugguggcucacaccuauaaucccagcgcuu

SEQ ID NO: 125649 - RNA, 32 nt, Human
cgugguggcucacaccugcaaucccaguacuu

SEQ ID NO: 125650 - RNA, 21 nt, Human
cgugguggcucacaccuguaa

SEQ ID NO: 125651 - RNA, 23 nt, Human
cgugguggcucacaccuguaauc

SEQ ID NO: 125652 - RNA, 32 nt, Human
cgugguggcucacaccuguaaucccaacacuu

SEQ ID NO: 125653 - RNA, 32 nt, Human
cgugguggcucacaccuguaaucccagcacac

SEQ ID NO: 125654 - RNA, 32 nt, Human
cgugguggcucacaccuguaaucccagcaccu

SEQ ID NO: 125655 - RNA, 32 nt, Human
cgugguggcucacaccuguaaucccagcacuu

SEQ ID NO: 125656 - RNA, 32 nt, Human
cgugguggcucacaccuguaaucccagcauuu

SEQ ID NO: 125657 - RNA, 32 nt, Human
cgugguggcucacaccuguaaucccagcuacu

SEQ ID NO: 125658 - RNA, 32 nt, Human
cgugguggcucacaccuguaaucccagcuauu

SEQ ID NO: 125659 - RNA, 32 nt, Human
cgugguggcucacaccuguaauuucagcacuc

SEQ ID NO: 125660 - RNA, 32 nt, Human
cgugguggcucacaccugucauuccggccuca

SEQ ID NO: 125661 - RNA, 32 nt, Human
cgugguggcucacaccugugaguggcucccag

SEQ ID NO: 125662 - RNA, 23 nt, Human
cgugguggcucacaccugugauc

SEQ ID NO: 125663 - RNA, 32 nt, Human
cgugguggcucacaccugugaucucagcacau

SEQ ID NO: 125664 - RNA, 32 nt, Human
cgugguggcucacaccugugaucucagcaccu

SEQ ID NO: 125665 - RNA, 32 nt, Human
cgugguggcucacaccuguguucucagcaccu

SEQ ID NO: 125666 - RNA, 23 nt, Human
cgugguggcucacacuuguaauc

SEQ ID NO: 125667 - RNA, 32 nt, Human
cgugguggcucacacuuguaaucccagcacuu

SEQ ID NO: 125668 - RNA, 23 nt, Human
cgugguggcucacaucuguaauc

SEQ ID NO: 125669 - RNA, 32 nt, Human
cgugguggcucacaucuguaaucccagccaag

SEQ ID NO: 125670 - RNA, 32 nt, Human
cgugguggcucaccccuguaaucgcagcacuu

SEQ ID NO: 125671 - RNA, 23 nt, Human
cgugguggcucacgcccauaauc

SEQ ID NO: 125672 - RNA, 32 nt, Human
cgugguggcucacgccuauaaucccagcacuu

SEQ ID NO: 125673 - RNA, 32 nt, Human
cgugguggcucacgccuauaaucccagcaguu

SEQ ID NO: 125674 - RNA, 32 nt, Human
cgugguggcucacgccuggaaucccagcacuu

SEQ ID NO: 125675 - RNA, 23 nt, Human
cgugguggcucacgccuguaauc

SEQ ID NO: 125676 - RNA, 32 nt, Human
cgugguggcucacgccuguaaucccaacacuc

SEQ ID NO: 125677 - RNA, 32 nt, Human
cgugguggcucacgccuguaaucccaacacuu

SEQ ID NO: 125678 - RNA, 32 nt, Human
cgugguggcucacgccuguaaucccagcacuc

SEQ ID NO: 125679 - RNA, 32 nt, Human
cgugguggcucacgccuguaaucccagcacuu

SEQ ID NO: 125680 - RNA, 32 nt, Human
cgugguggcucacgccuguaaucccagcauuu

SEQ ID NO: 125681 - RNA, 32 nt, Human
cgugguggcucacgccuguaaucccggcaguu

SEQ ID NO: 125682 - RNA, 32 nt, Human
cgugguggcucacgccuguaauccuagcacuu

SEQ ID NO: 125683 - RNA, 32 nt, Human
cgugguggcucacgccuguaaucucagcacuu

SEQ ID NO: 125684 - RNA, 32 nt, Human
cgugguggcucacgccuguaaugccagcacuu

SEQ ID NO: 125685 - RNA, 32 nt, Human
cgugguggcucacgccuguaauuccagcacuu

SEQ ID NO: 125686 - RNA, 32 nt, Human
cgugguggcucacgcuuguaaucccagcacuu

SEQ ID NO: 125687 - RNA, 32 nt, Human
cgugguggcucacgucuguaaucccagcacuu

SEQ ID NO: 125688 - RNA, 32 nt, Human
cgugguggcucacguuuuuaaucccagcacuu

SEQ ID NO: 125689 - RNA, 32 nt, Human
cgugguggcucacuccuauaaucccagcacuu

SEQ ID NO: 125690 - RNA, 23 nt, Human
cgugguggcucacuccuguaauc

SEQ ID NO: 125691 - RNA, 32 nt, Human
cgugguggcucacuccuguaaucccaccacuu

SEQ ID NO: 125692 - RNA, 32 nt, Human
cgugguggcucacuccuguaaucccagcacuu

SEQ ID NO: 125693 - RNA, 32 nt, Human
cgugguggcucacuccuguaaucccagcauuu

SEQ ID NO: 125694 - RNA, 32 nt, Human
cgugguggcucaggccuguaaucccagcacuu

SEQ ID NO: 125695 - RNA, 32 nt, Human
cgugguggcucauaccuguaaucucagcacug

SEQ ID NO: 125696 - RNA, 32 nt, Human
cgugguggcucaugacuguaaucccagcacuu

SEQ ID NO: 125697 - RNA, 32 nt, Human
cgugguggcucaugccuauaaucccagcacgu

SEQ ID NO: 125698 - RNA, 32 nt, Human
cgugguggcucaugccuauaaucccagcacuu

SEQ ID NO: 125699 - RNA, 32 nt, Human
cgugguggcucaugccuguaaucccaacacuu

SEQ ID NO: 125700 - RNA, 32 nt, Human
cgugguggcucaugccuguaaucccaccacug

SEQ ID NO: 125701 - RNA, 32 nt, Human
cgugguggcucaugccuguaaucccagcaccc

SEQ ID NO: 125702 - RNA, 32 nt, Human
cgugguggcucaugccuguaaucccagcacuu

SEQ ID NO: 125703 - RNA, 32 nt, Human
cgugguggcucaugccuguaaucccagcuacu

SEQ ID NO: 125704 - RNA, 32 nt, Human
cgugguggcucaugccuguaaucccggcacuu

SEQ ID NO: 125705 - RNA, 32 nt, Human
cgugguggcucaugccuguaaucgcagcacuu

SEQ ID NO: 125706 - RNA, 32 nt, Human
cgugguggcucaugccuguaaucucagcacuu

SEQ ID NO: 125707 - RNA, 32 nt, Human
cgugguggcucaugccuguaaucucaguacau

SEQ ID NO: 125708 - RNA, 32 nt, Human
cgugguggcucaugccuguaaucugagcacuu

SEQ ID NO: 125709 - RNA, 32 nt, Human
cgugguggcucaugccuguaauuccagcacuu

SEQ ID NO: 125710 - RNA, 32 nt, Human
cgugguggcucaugccuuuaaucccagcacuu

SEQ ID NO: 125711 - RNA, 32 nt, Human
cgugguggcucaugcuuguaaucccagcacuu

SEQ ID NO: 125712 - RNA, 32 nt, Human
cgugguggcucauguauguaauccuagcacuu

SEQ ID NO: 125713 - RNA, 32 nt, Human
cgugguggcuccugccuguaaucccagcacuu

SEQ ID NO: 125714 - RNA, 32 nt, Human
cgugguggcucucgccuguaaucccagcacuu

SEQ ID NO: 125715 - RNA, 32 nt, Human
cgugguggcucucgccuguaaucucagcacuu

SEQ ID NO: 125716 - RNA, 32 nt, Human
cgugguggcuggcaccuguaaucccagcauua

SEQ ID NO: 125717 - RNA, 32 nt, Human
cgugguggcuggcaccuguagucccagcuacu

SEQ ID NO: 125718 - RNA, 32 nt, Human
cgugguggcuggcgccuguaaucccagcuacu

SEQ ID NO: 125719 - RNA, 32 nt, Human
cgugguggcugggaccuguaaucccagcuacu

SEQ ID NO: 125720 - RNA, 32 nt, Human
cgugguggcuuacaccuguaaucccagcuacu

SEQ ID NO: 125721 - RNA, 32 nt, Human
cgugguggcuuaugccuguaaucccagcacuu

SEQ ID NO: 125722 - RNA, 32 nt, Human
cguggugggaccugggcuacgagguccggcca

SEQ ID NO: 125723 - RNA, 32 nt, Human
  misc_feature (29)..(29): n is a, c, g, or u
cgugguggggcaugccuguaaucccagcnacu

SEQ ID NO: 125724 - RNA, 32 nt, Human
cgugguggggugcgccuguaaucccagcuacc

SEQ ID NO: 125725 - RNA, 32 nt, Human
cgugguggggugcgcuuguaaucccagcuacu

SEQ ID NO: 125726 - RNA, 32 nt, Human
cguggugggucacgccuguaaucccagcacuu

SEQ ID NO: 125727 - RNA, 32 nt, Human
cguggugguacacaccuguggucccagcuacu

SEQ ID NO: 125728 - RNA, 32 nt, Human
cguggugguacaugccuguaaucccagcuaca

SEQ ID NO: 125729 - RNA, 32 nt, Human
cguggugguacaugccuguaaucccagcuacu

SEQ ID NO: 125730 - RNA, 32 nt, Human
cguggugguaggcgccuguaaucucagcuacu

SEQ ID NO: 125731 - RNA, 32 nt, Human
cgugguggugagugccuguaaucacagcuacu

SEQ ID NO: 125732 - RNA, 32 nt, Human
cgugguggugagugccuguaaucccagcuauu

SEQ ID NO: 125733 - RNA, 32 nt, Human
cgugguggugcacaccugaaaucccagcuacu

SEQ ID NO: 125734 - RNA, 32 nt, Human
cgugguggugcacaccuguaaucccagcuacu

SEQ ID NO: 125735 - RNA, 32 nt, Human
cgugguggugcacaccuguaaucucagguacu

SEQ ID NO: 125736 - RNA, 32 nt, Human
cgugguggugcacaccuguagucccagcuacu

SEQ ID NO: 125737 - RNA, 32 nt, Human
cgugguggugcacaccuguaguccuagcuacu

SEQ ID NO: 125738 - RNA, 32 nt, Human
cgugguggugcacaucuguaaucccaguuacu

SEQ ID NO: 125739 - RNA, 32 nt, Human
cgugguggugcaccccuaaaaucccagcuacu

SEQ ID NO: 125740 - RNA, 32 nt, Human
cgugguggugcacgccuuuaaucccagcuacu

SEQ ID NO: 125741 - RNA, 32 nt, Human
cgugguggugcacgucuguaaucccagcugcu

SEQ ID NO: 125742 - RNA, 32 nt, Human
cgugguggugcaggccuguaaucccagcuacu

SEQ ID NO: 125743 - RNA, 32 nt, Human
cgugguggugcaggggacaagaggcugugggu

SEQ ID NO: 125744 - RNA, 32 nt, Human
cgugguggugcaugcccguaaucccagcuacu

SEQ ID NO: 125745 - RNA, 32 nt, Human
cgugguggugcaugccuauaaucccagguacu

SEQ ID NO: 125746 - RNA, 32 nt, Human
cgugguggugcaugccugaaaucccagcuacu

SEQ ID NO: 125747 - RNA, 32 nt, Human
cgugguggugcaugccuguaauccaagauacu

SEQ ID NO: 125748 - RNA, 32 nt, Human
cgugguggugcaugccuguaaucccacuacug

SEQ ID NO: 125749 - RNA, 32 nt, Human
cgugguggugcaugccuguaaucccagcuacu

SEQ ID NO: 125750 - RNA, 32 nt, Human
cgugguggugcaugccuguaaucccaguuacu

SEQ ID NO: 125751 - RNA, 32 nt, Human
cgugguggugcaugccuguaaucccaucaucu

SEQ ID NO: 125752 - RNA, 32 nt, Human
cgugguggugcaugccuguaauccuagcuacu

SEQ ID NO: 125753 - RNA, 32 nt, Human
cgugguggugcaugccuguaaucucggaaggc

SEQ ID NO: 125754 - RNA, 32 nt, Human
cgugguggugcaugcuuguaauccuagcuacu

SEQ ID NO: 125755 - RNA, 32 nt, Human
cgugguggugcgcaccuguaaucucagcuacu

SEQ ID NO: 125756 - RNA, 32 nt, Human
cgugguggugcgcgcauguaaucccagcuacu

SEQ ID NO: 125757 - RNA, 32 nt, Human
cgugguggugcgcgccuguaaucccagcuacu

SEQ ID NO: 125758 - RNA, 32 nt, Human
cgugguggugcucaccuguaaucccagcuacc

SEQ ID NO: 125759 - RNA, 32 nt, Human
cguggugguggacaccuguagucccagcugcu

SEQ ID NO: 125760 - RNA, 32 nt, Human
cguggugguggacaccuuuaaucccaguuacu

SEQ ID NO: 125761 - RNA, 32 nt, Human
cguggugguggauaccuguaaucccagcuacg

SEQ ID NO: 125762 - RNA, 32 nt, Human
cguggugguggcucugccccuugcugcaguga

SEQ ID NO: 125763 - RNA, 32 nt, Human
cgugguggugggcaccuguaaucccagcuacu

SEQ ID NO: 125764 - RNA, 32 nt, Human
cgugguggugggcaccuguaaucccagguacu

SEQ ID NO: 125765 - RNA, 32 nt, Human
cgugguggugggcaccuguagucccagcaacu

SEQ ID NO: 125766 - RNA, 32 nt, Human
cgugguggugggcaccuguagucccagcuacu

SEQ ID NO: 125767 - RNA, 32 nt, Human
cgugguggugggcacugguaaucccagguacu

SEQ ID NO: 125768 - RNA, 32 nt, Human
cgugguggugggcaucuguaauccuagcugcu

SEQ ID NO: 125769 - RNA, 32 nt, Human
cgugguggugggcgccuguaaucccagcuaau

SEQ ID NO: 125770 - RNA, 32 nt, Human
cgugguggugggcgccuguaaucccagcuacu

SEQ ID NO: 125771 - RNA, 32 nt, Human
cguggugguggguaccuguaaucccagcuacu

SEQ ID NO: 125772 - RNA, 32 nt, Human
cgugguggugggugccuguaaucccagcuacu

SEQ ID NO: 125773 - RNA, 32 nt, Human
cgugguggugggugccuguaauccuagcuacu

SEQ ID NO: 125774 - RNA, 32 nt, Human
cgugguggugggugccuguaauuccagccacu

SEQ ID NO: 125775 - RNA, 32 nt, Human
cguggugguguaccccuguaaucccagcuacu

SEQ ID NO: 125776 - RNA, 32 nt, Human
cguggugguguaugccuguaaucccagcuacu

SEQ ID NO: 125777 - RNA, 32 nt, Human
cgugguggugugagccuguaaucccagcuacu

SEQ ID NO: 125778 - RNA, 32 nt, Human
cgugguggugugcaccuguaaucccagcuacu

SEQ ID NO: 125779 - RNA, 32 nt, Human
cgugguggugugcaccuguagaccuagcuacc

SEQ ID NO: 125780 - RNA, 32 nt, Human
cgugguggugugcaccuguagucccagcuacu

SEQ ID NO: 125781 - RNA, 32 nt, Human
cgugguggugugcaccuguagucccagcuaua

SEQ ID NO: 125782 - RNA, 32 nt, Human
cgugguggugugcaccuguagucccagcuauu

SEQ ID NO: 125783 - RNA, 32 nt, Human
cgugguggugugcaucuguaaucccggcuacu

SEQ ID NO: 125784 - RNA, 32 nt, Human
cgugguggugugccccuguaaucccagcuacu

SEQ ID NO: 125785 - RNA, 32 nt, Human
cgugguggugugugacuguaaucccagcuacu

SEQ ID NO: 125786 - RNA, 32 nt, Human
cgugguggugugugccuguaaucccagcuacu

SEQ ID NO: 125787 - RNA, 32 nt, Human
cgugguggugugugccuguaauccuagcuacu

SEQ ID NO: 125788 - RNA, 32 nt, Human
cgugguggugugugucuguaaucccagcuacu

SEQ ID NO: 125789 - RNA, 32 nt, Human
cguggugguucacaccuguaaucccaacacuu

SEQ ID NO: 125790 - RNA, 32 nt, Human
cguggugguucacaccuuugggaggccgaggu

SEQ ID NO: 125791 - RNA, 32 nt, Human
cguggugguucacgccuggaaucccagcacuu

SEQ ID NO: 125792 - RNA, 32 nt, Human
cguggugguucacgccuguaaucccagcacuu

SEQ ID NO: 125793 - RNA, 32 nt, Human
cguggugguucaggccuguaauuccagcacuu

SEQ ID NO: 125794 - RNA, 32 nt, Human
cguggugguucauaucuguaauccuaacacuu

SEQ ID NO: 125795 - RNA, 32 nt, Human
cguggugguucaugccuguaauaccagcguuu

SEQ ID NO: 125796 - RNA, 32 nt, Human
cguggugguucaugccuguaaucccaaugcuu

SEQ ID NO: 125797 - RNA, 32 nt, Human
cguggugguucaugccuguaaucccagcacuu

SEQ ID NO: 125798 - RNA, 32 nt, Human
cguggugguuggcgccuguaaucccagcuacu

SEQ ID NO: 125799 - RNA, 32 nt, Human
cguggugguuugcgccuguaaucccagccacu

SEQ ID NO: 125800 - RNA, 32 nt, Human
cguggugucucacaccuguaaucccagcacuu

SEQ ID NO: 125801 - RNA, 32 nt, Human
cguggugugcuaguagcuuuggcugaugcuaa

SEQ ID NO: 125802 - RNA, 32 nt, Human
cgugguguugggcgccuguaaucccagcuacu

SEQ ID NO: 125803 - RNA, 32 nt, Human
cgugguuacucacaccuguaaucccagcacuu

SEQ ID NO: 125804 - RNA, 32 nt, Human
cgugguucccuccagccuccccaaaaucaacc

SEQ ID NO: 125805 - RNA, 32 nt, Human
cgugguucccuugcaugauuugcccauuugac

SEQ ID NO: 125806 - RNA, 32 nt, Human
cgugguuccuggggccuggaagugccgcucaa

SEQ ID NO: 125807 - RNA, 32 nt, Human
cgugguucugcaucucccuugugcccaggugg

SEQ ID NO: 125808 - RNA, 32 nt, Human
cgugguucugcauuaaccccugccucaugucu

SEQ ID NO: 125809 - RNA, 32 nt, Human
cgugguucuggcaaaguggccucuuuuccagu

SEQ ID NO: 125810 - RNA, 32 nt, Human
cgugguugcacacgccuguaaucccagcugcu

SEQ ID NO: 125811 - RNA, 23 nt, Human
cgugguugccacagcccaugcug

SEQ ID NO: 125812 - RNA, 32 nt, Human
cgugguugcgggcaccuguagucccagcuacu

SEQ ID NO: 125813 - RNA, 32 nt, Human
cgugguugcucacgccuguaaucccagcacuu

SEQ ID NO: 125814 - RNA, 31 nt, Human
cgugguugcucauaggagguugugagucagc

SEQ ID NO: 125815 - RNA, 32 nt, Human
cgugguuuccucauucucuuccaccaaccucu

SEQ ID NO: 125816 - RNA, 32 nt, Human
cgugguuucucaugagcuguguucacagaccu

SEQ ID NO: 125817 - RNA, 32 nt, Human
cguguaagggaacagguguggggaagaggugg

SEQ ID NO: 125818 - RNA, 32 nt, Human
cguguaaucccagcuacucaggaggcugaggc

SEQ ID NO: 125819 - RNA, 32 nt, Human
cguguacacagcaaugcuagacaacagcuucg

SEQ ID NO: 125820 - RNA, 32 nt, Human
cguguaccucaguucccucuugcucagugggg

SEQ ID NO: 125821 - RNA, 32 nt, Human
cguguacugcuugugugugugcgugagugugu

SEQ ID NO: 125822 - RNA, 32 nt, Human
cguguacuugcagacagggaagcugagcugaa

SEQ ID NO: 125823 - RNA, 32 nt, Human
cguguagacacaaacauauacgccuagacgug

SEQ ID NO: 125824 - RNA, 32 nt, Human
cguguagagguggucuauggagcccaggaccg

SEQ ID NO: 125825 - RNA, 32 nt, Human
cguguagccccagcugucugcaggcaccaggc

SEQ ID NO: 125826 - RNA, 20 nt, Human
cguguagcugggacuacagg

SEQ ID NO: 125827 - RNA, 32 nt, Human
cguguagcuguggguaaggaagucgucccauu

SEQ ID NO: 125828 - RNA, 32 nt, Human
cguguaggagugagaagaaggaagaucuugag

SEQ ID NO: 125829 - RNA, 32 nt, Human
cguguagucccagcuacuuaggaggcugaggg

SEQ ID NO: 125830 - RNA, 32 nt, Human
cguguagucccugcuacucaggaggcugaggc

SEQ ID NO: 125831 - RNA, 32 nt, Human
cguguaguuccagcuacucaggaagcugaggc

SEQ ID NO: 125832 - RNA, 32 nt, Human
cguguauauuuucucccccaaugaaucaauug

SEQ ID NO: 125833 - RNA, 32 nt, Human
cguguauauuuucucccccaaugacucaauug

SEQ ID NO: 125834 - RNA, 32 nt, Human
cguguaucuuuucacauaguuuucccucugcg

SEQ ID NO: 125835 - RNA, 32 nt, Human
cguguaugcaugugcacuuccacccacagagg

SEQ ID NO: 125836 - RNA, 32 nt, Human
cguguaugucggcauauucacugggucaugca

SEQ ID NO: 125837 - RNA, 32 nt, Human
cguguauguguguguaucuauacaaguuuguc

SEQ ID NO: 125838 - RNA, 32 nt, Human
cguguauguuugguuccaugucacagcccccu

SEQ ID NO: 125839 - RNA, 32 nt, Human
cguguauugccucaugccccagagagguaaac

SEQ ID NO: 125840 - RNA, 32 nt, Human
cguguauuuaaccuugaaggguucaccagguc

SEQ ID NO: 125841 - RNA, 32 nt, Human
cgugucaaccuugcacugcacaaccuuccuuc

SEQ ID NO: 125842 - RNA, 32 nt, Human
cgugucacagccagauuucagcuuugaguuau

SEQ ID NO: 125843 - RNA, 32 nt, Human
cgugucacuacacuccaggcugggugacagau

SEQ ID NO: 125844 - RNA, 32 nt, Human
cgugucacugcacuccagccggggcaacagag

SEQ ID NO: 125845 - RNA, 32 nt, Human
cgugucacugcacuccagccuggcgacagagu

SEQ ID NO: 125846 - RNA, 32 nt, Human
cgugucacugcacuccagccugggcgacagag

SEQ ID NO: 125847 - RNA, 32 nt, Human
cgugucacugcacuccagccugggugacaaga

SEQ ID NO: 125848 - RNA, 32 nt, Human
cgugucacugcacuccagccuggugacagagu

SEQ ID NO: 125849 - RNA, 32 nt, Human
cgugucacuggcagaauccugaagaaaugaga

SEQ ID NO: 125850 - RNA, 32 nt, Human
cgugucagggcaccuggccgggccuggggccg

SEQ ID NO: 125851 - RNA, 32 nt, Human
cgugucaggguuauggggcacccugggggccc

SEQ ID NO: 125852 - RNA, 32 nt, Human
cgugucagugcacggcuagccugggcaacaga

SEQ ID NO: 125853 - RNA, 32 nt, Human
cgugucauccaggcuggagugcggugguggaa

SEQ ID NO: 125854 - RNA, 32 nt, Human
cgugucaucccuugugccgcaggcugggcggg

SEQ ID NO: 125855 - RNA, 32 nt, Human
cguguccaagaaggaagcugcauuuuaacggu

SEQ ID NO: 125856 - RNA, 32 nt, Human
cguguccacaaagacugucaagugaagaaugg

SEQ ID NO: 125857 - RNA, 32 nt, Human
cguguccagaaacaggggcaggagugugggaa

SEQ ID NO: 125858 - RNA, 32 nt, Human
cguguccaggagaccuuccacaaaggguagcc

SEQ ID NO: 125859 - RNA, 32 nt, Human
cgugucccaauuccaaaacacaaugcacaagc

SEQ ID NO: 125860 - RNA, 20 nt, Human
cgugucccagacuggucuca

SEQ ID NO: 125861 - RNA, 32 nt, Human
cgugucccagccacagaggccccugugcgucc

SEQ ID NO: 125862 - RNA, 32 nt, Human
cguguccccaaggcccagacagcggggcgggg

SEQ ID NO: 125863 - RNA, 32 nt, Human
cgugucccuagugccucgagcagugcccgaca

SEQ ID NO: 125864 - RNA, 32 nt, Human
cguguccuacucaucugcucccacggaugacc

SEQ ID NO: 125865 - RNA, 32 nt, Human
cguguccucugucucuugccucggugccuggg

SEQ ID NO: 125866 - RNA, 32 nt, Human
cguguccugcagcccucucuucuucagaggcc

SEQ ID NO: 125867 - RNA, 32 nt, Human
cguguccugcuagcugucucucuuguugauuu

SEQ ID NO: 125868 - RNA, 21 nt, Human
cguguccuuccgcugccccca

SEQ ID NO: 125869 - RNA, 32 nt, Human
cgugucgaguacagaguggcccucaccgagga

SEQ ID NO: 125870 - RNA, 32 nt, Human
cgugucgauguguggcuuauccugcaggagug

SEQ ID NO: 125871 - RNA, 32 nt, Human
cgugucgcgcugggcugggccuggguggccuc

SEQ ID NO: 125872 - RNA, 32 nt, Human
cgugucggaggcgaggcgaggaagggagcugg

SEQ ID NO: 125873 - RNA, 32 nt, Human
cgugucgggccgaucacuugagcccaggaguc

SEQ ID NO: 125874 - RNA, 32 nt, Human
cgugucgguuccauuccauuuccauuucugca

SEQ ID NO: 125875 - RNA, 32 nt, Human
cgugucgucuccacccagaggaaguucuccag

SEQ ID NO: 125876 - RNA, 32 nt, Human
cgugucuacuaaaaauacaaaaauuagccagg

SEQ ID NO: 125877 - RNA, 32 nt, Human
cgugucuacuaaaaauacaagaaacuagccag

SEQ ID NO: 125878 - RNA, 32 nt, Human
cgugucuacuaaaaauacagaauuagccaggc

SEQ ID NO: 125879 - RNA, 32 nt, Human
cgugucuacuaaagauacaaauauuagccggg

SEQ ID NO: 125880 - RNA, 32 nt, Human
cgugucuauagagagcagacagaagcagaaca

SEQ ID NO: 125881 - RNA, 32 nt, Human
cgugucuauuaaaaauacaaaaauuagcuggc

SEQ ID NO: 125882 - RNA, 32 nt, Human
cgugucucaccacauccuggcuccagugugga

SEQ ID NO: 125883 - RNA, 32 nt, Human
cgugucucacccuuuucuccccauaucuguuu

SEQ ID NO: 125884 - RNA, 32 nt, Human
cgugucucagccagggaagcuuccucggucuc

SEQ ID NO: 125885 - RNA, 32 nt, Human
cgugucuccaaccacacuaucuacccaucaca

SEQ ID NO: 125886 - RNA, 32 nt, Human
cgugucuccagaauguagagcccaucaauauu

SEQ ID NO: 125887 - RNA, 32 nt, Human
cgugucuccugccuccacucagcugcuucuca

SEQ ID NO: 125888 - RNA, 32 nt, Human
cgugucucucacaccacauuuccucaaagcua

SEQ ID NO: 125889 - RNA, 32 nt, Human
cgugucucuuuaaagcugcuaugugaacagcu

SEQ ID NO: 125890 - RNA, 32 nt, Human
cgugucugcauggucuccucuguuucaggcau

SEQ ID NO: 125891 - RNA, 32 nt, Human
cgugucugcuccaggacauggcugguuacaau

SEQ ID NO: 125892 - RNA, 32 nt, Human
cgugucugcucccaggccucccacuagucagg

SEQ ID NO: 125893 - RNA, 32 nt, Human
cgugucuggagcugcugguuccuucugguggg

SEQ ID NO: 125894 - RNA, 31 nt, Human
cgugucuggccaaucucaggcuuucacuucu

SEQ ID NO: 125895 - RNA, 32 nt, Human
cgugucuggguuugggggcgggagacaggcug

SEQ ID NO: 125896 - RNA, 32 nt, Human
cgugucuguaaucccagcuacucuggagacug

SEQ ID NO: 125897 - RNA, 32 nt, Human
cgugucuguccgucccuccuucggcccccucu

SEQ ID NO: 125898 - RNA, 32 nt, Human
cgugucuucacucuccagccugagguggugaa

SEQ ID NO: 125899 - RNA, 32 nt, Human
cgugucuuuccagacaauguuuuguuuccuuu

SEQ ID NO: 125900 - RNA, 32 nt, Human
cgugucuuuugccaggcuagagacagggagag

SEQ ID NO: 125901 - RNA, 32 nt, Human
cgugugacagaaguccacgggcacccucugua

SEQ ID NO: 125902 - RNA, 32 nt, Human
cgugugaggcacacgucuucuauauuggcuac

SEQ ID NO: 125903 - RNA, 32 nt, Human
cgugugagugugacagggccaguggggccugu

SEQ ID NO: 125904 - RNA, 32 nt, Human
cgugugaugaugcagacagagacuggagugau

SEQ ID NO: 125905 - RNA, 32 nt, Human
cgugugaugccaccccgucaccccuccccucc

SEQ ID NO: 125906 - RNA, 32 nt, Human
cgugugcaaaugggaaaggagggguuuuuaca

SEQ ID NO: 125907 - RNA, 32 nt, Human
cgugugcaacacacaguacuacugguaugacg

SEQ ID NO: 125908 - RNA, 32 nt, Human
cgugugcacgugcacacaugugcacguuugua

SEQ ID NO: 125909 - RNA, 32 nt, Human
cgugugcacuguggaacagagcugagaccccg

SEQ ID NO: 125910 - RNA, 32 nt, Human
cgugugcagucggcagguuggggaaggggccc

SEQ ID NO: 125911 - RNA, 32 nt, Human
cgugugcaugaguguggaugggugccuguggg

SEQ ID NO: 125912 - RNA, 32 nt, Human
cgugugcaugcuccuacacaauacauaugcac

SEQ ID NO: 125913 - RNA, 21 nt, Human
cgugugcccacucugcccuca

SEQ ID NO: 125914 - RNA, 32 nt, Human
cgugugcccaggacagccgccagccuccuguc

SEQ ID NO: 125915 - RNA, 32 nt, Human
cgugugccccugcccagccucuuggcaccucc

SEQ ID NO: 125916 - RNA, 32 nt, Human
cgugugcccugaaggugcaggggugagagcag

SEQ ID NO: 125917 - RNA, 32 nt, Human
cgugugccuccacccaccccacgacccgugac

SEQ ID NO: 125918 - RNA, 32 nt, Human
cgugugccuguaaucccagcuacuugggaggc

SEQ ID NO: 125919 - RNA, 32 nt, Human
cgugugccuguaaucccagcuauuugggaggc

SEQ ID NO: 125920 - RNA, 32 nt, Human
cgugugccuuggucacuacugagagcugccuc

SEQ ID NO: 125921 - RNA, 32 nt, Human
cgugugcgccugcugggagcacaugggaagac

SEQ ID NO: 125922 - RNA, 32 nt, Human
cgugugcuccccagagggcacccccuauuuau

SEQ ID NO: 125923 - RNA, 32 nt, Human
cgugugcucuucauuauuuucagcuggaggac

SEQ ID NO: 125924 - RNA, 32 nt, Human
cgugugcugcagcugcccacugagggcucuuu

SEQ ID NO: 125925 - RNA, 32 nt, Human
cgugugcugggugggagaaggcgaggcggcag

SEQ ID NO: 125926 - RNA, 32 nt, Human
cguguggagggugaacuuggaugcccugaccc

SEQ ID NO: 125927 - RNA, 32 nt, Human
cguguggcaagccggggaagggguggagugaa

SEQ ID NO: 125928 - RNA, 32 nt, Human
cguguggcagggaucguugcacuggacucuug

SEQ ID NO: 125929 - RNA, 32 nt, Human
cguguggcccuccacggugucugggacugagu

SEQ ID NO: 125930 - RNA, 18 nt, Human
cguguggccgcccgggug

SEQ ID NO: 125931 - RNA, 32 nt, Human
cgugugggaccuguucuggcugcuccagcccc

SEQ ID NO: 125932 - RNA, 32 nt, Human
cguguggggagcugggugugugaucuggccag

SEQ ID NO: 125933 - RNA, 32 nt, Human
cgugugggucugaccucaucauguggagugca

SEQ ID NO: 125934 - RNA, 32 nt, Human
cgugugggugugugucugcacccacauccuca

SEQ ID NO: 125935 - RNA, 32 nt, Human
cguguggucccagcuacucaagagguggaggc

SEQ ID NO: 125936 - RNA, 32 nt, Human
cguguguacuucugaagucugggaagugccaa

SEQ ID NO: 125937 - RNA, 32 nt, Human
cguguguagcaaggacucgagcaggggugucu

SEQ ID NO: 125938 - RNA, 32 nt, Human
cguguguauauguauguauguguguuucugua

SEQ ID NO: 125939 - RNA, 32 nt, Human
cgugugucugcuugagaggcugugaagauaug

SEQ ID NO: 125940 - RNA, 29 nt, Human
cgugugugaaugugugugcgaggaacugu

SEQ ID NO: 125941 - RNA, 32 nt, Human
cgugugugaugggguuucgcacuuguugccca

SEQ ID NO: 125942 - RNA, 32 nt, Human
cgugugugcaucuccccucuccuaccaggggg

SEQ ID NO: 125943 - RNA, 31 nt, Human
cgugugugccucucucuuccuuucgcagcug

SEQ ID NO: 125944 - RNA, 29 nt, Human
cgugugugcguguguguggauuuuuaaag

SEQ ID NO: 125945 - RNA, 31 nt, Human
cguguguggguggccucgggaugggggaaua

SEQ ID NO: 125946 - RNA, 32 nt, Human
cgugugugugcggaguccacggaagccucggg

SEQ ID NO: 125947 - RNA, 32 nt, Human
cguguguguggggcuugcgcugugcugagaag

SEQ ID NO: 125948 - RNA, 32 nt, Human
cguguguguuagcauuugugugugucuguggg

SEQ ID NO: 125949 - RNA, 32 nt, Human
cguguguucagagcuugucuccaccucacggc

SEQ ID NO: 125950 - RNA, 32 nt, Human
cguguguuucaagaaaagugggagagagcgua

SEQ ID NO: 125951 - RNA, 32 nt, Human
cguguguuuccuuccaggcacagugaucauuc

SEQ ID NO: 125952 - RNA, 32 nt, Human
cguguguuuugguauuguugggauuggucagu

SEQ ID NO: 125953 - RNA, 32 nt, Human
cguguuaaaaugguucauaaaaaucacaucau

SEQ ID NO: 125954 - RNA, 32 nt, Human
cguguuaacucauguucauucccaacagacuc

SEQ ID NO: 125955 - RNA, 32 nt, Human
cguguuaagaagggguucuuuggccgaagacg

SEQ ID NO: 125956 - RNA, 32 nt, Human
cguguuacaguaugaacacacagcagaggcac

SEQ ID NO: 125957 - RNA, 32 nt, Human
cguguuaugcugguuuccugggugacaaaauu

SEQ ID NO: 125958 - RNA, 24 nt, Human
cguguucaaccaauucuccugccu

SEQ ID NO: 125959 - RNA, 24 nt, Human
cguguucaagcaauucuccugccu

SEQ ID NO: 125960 - RNA, 24 nt, Human
cguguucaagcgauucuccugccu

SEQ ID NO: 125961 - RNA, 32 nt, Human
cguguucacaccauucuccugccucagccucc

SEQ ID NO: 125962 - RNA, 32 nt, Human
cguguucagacuccugguuucuuccaggcuua

SEQ ID NO: 125963 - RNA, 32 nt, Human
cguguucaucccuuguaaggugaguucagucu

SEQ ID NO: 125964 - RNA, 32 nt, Human
cguguucccagcugccucuugccuugauagug

SEQ ID NO: 125965 - RNA, 32 nt, Human
cguguucccaggagcacugacugcaguugaga

SEQ ID NO: 125966 - RNA, 32 nt, Human
cguguucccuucuauuuauuauaaagaaauuu

SEQ ID NO: 125967 - RNA, 19 nt, Human
cguguuccucggugggcca

SEQ ID NO: 125968 - RNA, 32 nt, Human
cguguucuagagaggcccucccgcgcuggguc

SEQ ID NO: 125969 - RNA, 32 nt, Human
cguguucucagggacugggacacgggccaaau

SEQ ID NO: 125970 - RNA, 32 nt, Human
cguguucuccuccaaaugcugucgggcaagau

SEQ ID NO: 125971 - RNA, 32 nt, Human
cguguucucuuucaaugcagucuguggcuuua

SEQ ID NO: 125972 - RNA, 17 nt, Human
cguguucugcugggcuc

SEQ ID NO: 125973 - RNA, 32 nt, Human
cguguucuucucucauccuugccuuaaaccag

SEQ ID NO: 125974 - RNA, 32 nt, Human
cguguucuuugccaccagccugucacuccagu

SEQ ID NO: 125975 - RNA, 32 nt, Human
cguguugcccuccugaaucacuggaaagauuc

SEQ ID NO: 125976 - RNA, 32 nt, Human
cguguugcucacaacuaccugccuggaugaau

SEQ ID NO: 125977 - RNA, 32 nt, Human
cguguuggagagaaggggcccucccagcacaa

SEQ ID NO: 125978 - RNA, 32 nt, Human
cguguuggaggagaucaagcucauuagcaaga

SEQ ID NO: 125979 - RNA, 23 nt, Human
cguguuggcacacaccuguaauc

SEQ ID NO: 125980 - RNA, 32 nt, Human
cguguuggcacacaccuguaaucccagcuacu

SEQ ID NO: 125981 - RNA, 32 nt, Human
cguguuggcacgcgccuguaaucccagccacu

SEQ ID NO: 125982 - RNA, 32 nt, Human
cguguuggcgggcaccuguagucccagcuacu

SEQ ID NO: 125983 - RNA, 23 nt, Human
cguguuggcucacaccuaugauc

SEQ ID NO: 125984 - RNA, 32 nt, Human
cguguuggcucacaccuaugaucucagcaccu

SEQ ID NO: 125985 - RNA, 32 nt, Human
cguguugggcuucucucugaacgccccgaacc

SEQ ID NO: 125986 - RNA, 32 nt, Human
cguguuggucucgaggggcucacagcuuggca

SEQ ID NO: 125987 - RNA, 32 nt, Human
cguguuggugugcaccuguaaucccagcuacu

SEQ ID NO: 125988 - RNA, 32 nt, Human
cguguuggugugcgccuguaaucccagcuacu

SEQ ID NO: 125989 - RNA, 32 nt, Human
cguguuguuccugugccguguggaccccagag

SEQ ID NO: 125990 - RNA, 32 nt, Human
cguguuguuccugugcgguguggaccccaaag

SEQ ID NO: 125991 - RNA, 32 nt, Human
cguguuuaagccuucaacuugauuuccaauua

SEQ ID NO: 125992 - RNA, 32 nt, Human
cguguuuacugugugucuaugacugugauggg

SEQ ID NO: 125993 - RNA, 32 nt, Human
cguguuuccagccugggaccaagggcagcaua

SEQ ID NO: 125994 - RNA, 32 nt, Human
cguguuuccuaaaaguagagggagguaagaga

SEQ ID NO: 125995 - RNA, 32 nt, Human
cguguuucgaugaagaccuggccacauggggc

SEQ ID NO: 125996 - RNA, 32 nt, Human
cguguuucuaacuguaaguaccuuggacauuu

SEQ ID NO: 125997 - RNA, 32 nt, Human
cguguuucuaccuuuaguaccuugccacucuu

SEQ ID NO: 125998 - RNA, 32 nt, Human
cguguuucugacguuucucuuccuugccugga

SEQ ID NO: 125999 - RNA, 32 nt, Human
cguguuucuuucccccaggagaauuuuuaguc

SEQ ID NO: 126000 - RNA, 32 nt, Human
cguguuugcuguggccgcagggagaggagcag

SEQ ID NO: 126001 - RNA, 32 nt, Human
cguguuugggaccugggcucgggcuucuugcg

SEQ ID NO: 126002 - RNA, 32 nt, Human
cguguuugguuccucuuucuacuccacugcag

SEQ ID NO: 126003 - RNA, 32 nt, Human
cguguuugugugugugcaugcaugugugugca

SEQ ID NO: 126004 - RNA, 32 nt, Human
cguguuuuagacacauacucauguguaugggc

SEQ ID NO: 126005 - RNA, 32 nt, Human
cguguuuugucaucagcaucuuuucuauuaag

SEQ ID NO: 126006 - RNA, 32 nt, Human
cguguuuuuaaaggagggaacuuuggggauug

SEQ ID NO: 126007 - RNA, 19 nt, Human
cguguuuuuccggggcuca

SEQ ID NO: 126008 - RNA, 32 nt, Human
cguuaaaacaucaaagugauuuuacgguuuuu

SEQ ID NO: 126009 - RNA, 32 nt, Human
cguuaaacuguacaagugcguacaaugugacc

SEQ ID NO: 126010 - RNA, 32 nt, Human
cguuaaagggcacuugggcugaaggaucgcuu

SEQ ID NO: 126011 - RNA, 32 nt, Human
cguuaaagucucucuucucccugccgucaugu

SEQ ID NO: 126012 - RNA, 32 nt, Human
cguuaaaucacuccgcagcugugucgcaucag

SEQ ID NO: 126013 - RNA, 32 nt, Human
cguuaacaaucagcuuuuaguaaccugcugug

SEQ ID NO: 126014 - RNA, 32 nt, Human
cguuaauuaauagcacagcagaugugugcugc

SEQ ID NO: 126015 - RNA, 32 nt, Human
cguuacaaaaucaguucuuuccuugguuuugu

SEQ ID NO: 126016 - RNA, 32 nt, Human
cguuacaucaaauucaguuuuauauaggccau

SEQ ID NO: 126017 - RNA, 32 nt, Human
cguuacccugugacacuguuuugagguccacu

SEQ ID NO: 126018 - RNA, 32 nt, Human
cguuacucagauacagauacaaagauggguuu

SEQ ID NO: 126019 - RNA, 32 nt, Human
cuacucaggaggcugaggcaggagaaucacuc

SEQ ID NO: 126020 - RNA, 32 nt, Human
cuacucaggaggcugaggcaggagaaucacuu

SEQ ID NO: 126021 - RNA, 32 nt, Human
cuacucaggaggcugaggcaggagaaucagag

SEQ ID NO: 126022 - RNA, 32 nt, Human
cuacucaggaggcugaggcaggagaaucauuu

SEQ ID NO: 126023 - RNA, 32 nt, Human
cuacucaggaggcugaggcaggagaaucccuu

SEQ ID NO: 126024 - RNA, 32 nt, Human
cuacucaggaggcugaggcaggagaaucgccu

SEQ ID NO: 126025 - RNA, 32 nt, Human
cuacucaggaggcugaggcaggagaaucgcgu

SEQ ID NO: 126026 - RNA, 32 nt, Human
cuacucaggaggcugaggcaggagaaucgcua

SEQ ID NO: 126027 - RNA, 32 nt, Human
cuacucaggaggcugaggcaggagaaucgcug

SEQ ID NO: 126028 - RNA, 32 nt, Human
cuacucaggaggcugaggcaggagaaucgcuu

SEQ ID NO: 126029 - RNA, 32 nt, Human
cuacucaggaggcugaggcaggagaaucguuu

SEQ ID NO: 126030 - RNA, 32 nt, Human
cuacucaggaggcugaggcaggagaaucucgg

SEQ ID NO: 126031 - RNA, 32 nt, Human
cuacucaggaggcugaggcaggagaaucucuu

SEQ ID NO: 126032 - RNA, 32 nt, Human
cuacucaggaggcugaggcaggagaauggcau

SEQ ID NO: 126033 - RNA, 32 nt, Human
cuacucaggaggcugaggcaggagaauggcga

SEQ ID NO: 126034 - RNA, 32 nt, Human
cuacucaggaggcugaggcaggagaauggcgu

SEQ ID NO: 126035 - RNA, 32 nt, Human
cuacucaggaggcugaggcaggagaauggcuu

SEQ ID NO: 126036 - RNA, 32 nt, Human
cuacucaggaggcugaggcaggagaauggugu

SEQ ID NO: 126037 - RNA, 32 nt, Human
cuacucaggaggcugaggcaggagaauuacuu

SEQ ID NO: 126038 - RNA, 32 nt, Human
cuacucaggaggcugaggcaggagaauucuuu

SEQ ID NO: 126039 - RNA, 32 nt, Human
cuacucaggaggcugaggcaggagaauugcuu

SEQ ID NO: 126040 - RNA, 32 nt, Human
cuacucaggaggcugaggcaggagaauuugcu

SEQ ID NO: 126041 - RNA, 32 nt, Human
cuacucaggaggcugaggcgggaggaucgcuu

SEQ ID NO: 126042 - RNA, 32 nt, Human
cuacucaggaggcugagguaggaggaucgcuu

SEQ ID NO: 126043 - RNA, 32 nt, Human
cuacucaggaggcugggacaggagaaucgcuu

SEQ ID NO: 126044 - RNA, 32 nt, Human
cuacucaggaggcuggggcaggagaaucgcuu

SEQ ID NO: 126045 - RNA, 32 nt, Human
cuacucaggaggcuggggcaggagaauggcau

SEQ ID NO: 126046 - RNA, 32 nt, Human
cuacucaggaggcuggggcaggagaauugguu

SEQ ID NO: 126047 - RNA, 32 nt, Human
cuacucaggaggcuuaggcaggagaauugcuu

SEQ ID NO: 126048 - RNA, 32 nt, Human
cuacucaggagguugagacaggagaaucgcuu

SEQ ID NO: 126049 - RNA, 32 nt, Human
cuacucaggagguugaggcaggagaaucacuu

SEQ ID NO: 126050 - RNA, 32 nt, Human
cuacucaggagguugaggcaggagaaucgcuu

SEQ ID NO: 126051 - RNA, 32 nt, Human
cuacucaggagguugaggugggaagauugcuu

SEQ ID NO: 126052 - RNA, 32 nt, Human
cuacucaggagguugaggugggaggaucacuu

SEQ ID NO: 126053 - RNA, 32 nt, Human
cuacucaggagguuggggcagaauugcuugaa

SEQ ID NO: 126054 - RNA, 32 nt, Human
cuacucaggagucugaggcaggagaaucgcuu

SEQ ID NO: 126055 - RNA, 32 nt, Human
cuacucaggagucugaggcaggagaauggcau

SEQ ID NO: 126056 - RNA, 32 nt, Human
cuacucaggauacugaaauacacacaugcgua

SEQ ID NO: 126057 - RNA, 32 nt, Human
cuacucaggauucugaggcaggagaauggcau

SEQ ID NO: 126058 - RNA, 32 nt, Human
cuacucaggcccagcccagagcuguguucccu

SEQ ID NO: 126059 - RNA, 32 nt, Human
cuacucagggggcugaggcaggagaauugcuu

SEQ ID NO: 126060 - RNA, 32 nt, Human
cuacucagggggcugaggcgggaggauugcuu

SEQ ID NO: 126061 - RNA, 32 nt, Human
cuacucaggggguugaggcaggagaaucgcuu

SEQ ID NO: 126062 - RNA, 32 nt, Human
cuacucagugaguuuucuauccuauggauauc

SEQ ID NO: 126063 - RNA, 32 nt, Human
cuacucauauuccucucaguccuucuuggggg

SEQ ID NO: 126064 - RNA, 18 nt, Human
cuacucauccccaucuua

SEQ ID NO: 126065 - RNA, 32 nt, Human
cuacucaucgcacuaauuuacacucacaacac

SEQ ID NO: 126066 - RNA, 32 nt, Human
cuacucaucucucccuuccauguguuucuugu

SEQ ID NO: 126067 - RNA, 32 nt, Human
cuacucaugccagauuuugggauuacaaauag

SEQ ID NO: 126068 - RNA, 32 nt, Human
cuacucaugcuuauuccucccauuccucuacu

SEQ ID NO: 126069 - RNA, 32 nt, Human
cuacuccaccuuggauuuuucucuccaucaca

SEQ ID NO: 126070 - RNA, 32 nt, Human
cuacuccagaggcugaggcaggagaaucacuu

SEQ ID NO: 126071 - RNA, 32 nt, Human
cuacuccagaggcugaggcaggagaauggcuu

SEQ ID NO: 126072 - RNA, 32 nt, Human
cuacuccagccccuacccugcacccacauccc

SEQ ID NO: 126073 - RNA, 32 nt, Human
cuacuccagccccugaaauaaaccacuccaga

SEQ ID NO: 126074 - RNA, 32 nt, Human
cuacuccagguucuagcccagccuucuacuag

SEQ ID NO: 126075 - RNA, 32 nt, Human
cuacuccaugaucauuaaacacccaauggauu

SEQ ID NO: 126076 - RNA, 32 nt, Human
cuacucccacagaauuuucaagcccuuaagag

SEQ ID NO: 126077 - RNA, 32 nt, Human
cuacucccagaagaggagggaagcacaggugg

SEQ ID NO: 126078 - RNA, 28 nt, Human
cuacucccagguccagccucaucaugcc

SEQ ID NO: 126079 - RNA, 32 nt, Human
cuacucccagucuuggucucaguggcuuaauu

SEQ ID NO: 126080 - RNA, 32 nt, Human
cuacuccccagaggggcccuagugccucuguu

SEQ ID NO: 126081 - RNA, 32 nt, Human
cuacucccccuccucugcugacacuuuggaau

SEQ ID NO: 126082 - RNA, 32 nt, Human
cuacucccuccacccucccucccugaucccgu

SEQ ID NO: 126083 - RNA, 32 nt, Human
cuacucccucgaguucccuguccagagaccca

SEQ ID NO: 126084 - RNA, 32 nt, Human
cuacucccucucggcuccuuguggcccaaagg

SEQ ID NO: 126085 - RNA, 32 nt, Human
cuacucccugcagccccucgcacuacccagcu

SEQ ID NO: 126086 - RNA, 32 nt, Human
cuacucccuuccccucucugguccucagcuuc

SEQ ID NO: 126087 - RNA, 32 nt, Human
cuacuccggaggcugagccaggagaaucgcuu

SEQ ID NO: 126088 - RNA, 32 nt, Human
cuacuccggaggcugaggcaggagaaucacuu

SEQ ID NO: 126089 - RNA, 32 nt, Human
cuacuccggaggcugaggcaggagaaucgcuu

SEQ ID NO: 126090 - RNA, 32 nt, Human
cuacuccggaggcugaggcaggagaaucucuu

SEQ ID NO: 126091 - RNA, 32 nt, Human
cuacuccggaggcugaggcaggagaauggcgu

SEQ ID NO: 126092 - RNA, 32 nt, Human
cuacuccuacuuccggucccugcggguaauag

SEQ ID NO: 126093 - RNA, 20 nt, Human
cuacuccucccuccucguca

SEQ ID NO: 126094 - RNA, 32 nt, Human
cuacuccugaagaccggaaacauggcuuguac

SEQ ID NO: 126095 - RNA, 32 nt, Human
cuacuccugcccacuccaccuucuuagccugg

SEQ ID NO: 126096 - RNA, 32 nt, Human
cuacuccugucccagccgugccccuggugaca

SEQ ID NO: 126097 - RNA, 32 nt, Human
cuacucgagcaucuccgggaccugccugucag

SEQ ID NO: 126098 - RNA, 32 nt, Human
cuacucgcaaggcugaggcaggagaaucgcuu

SEQ ID NO: 126099 - RNA, 32 nt, Human
cuacucgcgagguugaggcaggagaauugcuu

SEQ ID NO: 126100 - RNA, 32 nt, Human
cuacucggaaggccaaggcaggaggaccgcuu

SEQ ID NO: 126101 - RNA, 32 nt, Human
cuacucggaaggcuaaggcaggagaauggcgu

SEQ ID NO: 126102 - RNA, 32 nt, Human
cuacucggaaggcugaagcaggagaaugguau

SEQ ID NO: 126103 - RNA, 32 nt, Human
cuacucggaaggcugaggcaggagaauggcgu

SEQ ID NO: 126104 - RNA, 32 nt, Human
cuacucggaaggcugaggcaggagaauugcuu

SEQ ID NO: 126105 - RNA, 32 nt, Human
cuacucggaaggcugaggcaggaggaucacuu

SEQ ID NO: 126106 - RNA, 32 nt, Human
cuacucggaaggcuguggugggaagaucguuu

SEQ ID NO: 126107 - RNA, 32 nt, Human
cuacucggaggcaggagaauugcuugaaccca

SEQ ID NO: 126108 - RNA, 32 nt, Human
cuacucgggaggccgaggcaggaaaauuuauu

SEQ ID NO: 126109 - RNA, 32 nt, Human
cuacucgggaggccgaggcaggagaauugcgu

SEQ ID NO: 126110 - RNA, 32 nt, Human
cuacucgggaggccgaggcaggagaauugcuu

SEQ ID NO: 126111 - RNA, 32 nt, Human
cuacucgggaggcggaggcaggagaaucacuu

SEQ ID NO: 126112 - RNA, 32 nt, Human
cuacucgggaggcggagucaggagacucucuu

SEQ ID NO: 126113 - RNA, 32 nt, Human
cuacucgggaggcuaaggcaggagaaucacuu

SEQ ID NO: 126114 - RNA, 32 nt, Human
cuacucgggaggcuaaggcaggagaaucgcuu

SEQ ID NO: 126115 - RNA, 32 nt, Human
cuacucgggaggcuaaggcaggggaaucgcuu

SEQ ID NO: 126116 - RNA, 32 nt, Human
cuacucgggaggcucaggcaggagaaucacuu

SEQ ID NO: 126117 - RNA, 32 nt, Human
cuacucgggaggcugaagcaggagaaucacuu

SEQ ID NO: 126118 - RNA, 32 nt, Human
cuacucgggaggcugaagcaggagaauggcgu

SEQ ID NO: 126119 - RNA, 32 nt, Human
cuacucgggaggcugaagcaggagauuugcuu

SEQ ID NO: 126120 - RNA, 32 nt, Human
cuacucgggaggcugacgcaggagaaucacuu

SEQ ID NO: 126121 - RNA, 32 nt, Human
cuacucgggaggcugagacaggagaaucacuu

SEQ ID NO: 126122 - RNA, 32 nt, Human
cuacucgggaggcugagacaggagaaucgcuu

SEQ ID NO: 126123 - RNA, 32 nt, Human
cuacucgggaggcugagacaggagaaucucuu

SEQ ID NO: 126124 - RNA, 32 nt, Human
cuacucgggaggcugagacaggagaauugcuu

SEQ ID NO: 126125 - RNA, 32 nt, Human
cuacucgggaggcugagacaggagauuugcuu

SEQ ID NO: 126126 - RNA, 32 nt, Human
cuacucgggaggcugaggaaggagaaucgcuu

SEQ ID NO: 126127 - RNA, 32 nt, Human
cuacucgggaggcugaggaaggagaauggugu

SEQ ID NO: 126128 - RNA, 32 nt, Human
cuacucgggaggcugaggcaagagaaucacuu

SEQ ID NO: 126129 - RNA, 32 nt, Human
cuacucgggaggcugaggcaagagaaucgcuu

SEQ ID NO: 126130 - RNA, 32 nt, Human
cuacucgggaggcugaggcaagagaauggcau

SEQ ID NO: 126131 - RNA, 32 nt, Human
cuacucgggaggcugaggcagagaauugcuug

SEQ ID NO: 126132 - RNA, 32 nt, Human
cuacucgggaggcugaggcaggaaaaucacuu

SEQ ID NO: 126133 - RNA, 32 nt, Human
cuacucgggaggcugaggcaggaaaaucgcuu

SEQ ID NO: 126134 - RNA, 32 nt, Human
cuacucgggaggcugaggcaggaaaauugcuu

SEQ ID NO: 126135 - RNA, 32 nt, Human
cuacucgggaggcugaggcaggaagaaucgcu

SEQ ID NO: 126136 - RNA, 32 nt, Human
cuacucgggaggcugaggcaggacgauuacuu

SEQ ID NO: 126137 - RNA, 32 nt, Human
cuacucgggaggcugaggcaggagaaaggcau

SEQ ID NO: 126138 - RNA, 32 nt, Human
cuacucgggaggcugaggcaggagaaccgcuu

SEQ ID NO: 126139 - RNA, 32 nt, Human
cuacucgggaggcugaggcaggagaauagccu

SEQ ID NO: 126140 - RNA, 32 nt, Human
cuacucgggaggcugaggcaggagaauagcgu

SEQ ID NO: 126141 - RNA, 32 nt, Human
cuacucgggaggcugaggcaggagaauagugu

SEQ ID NO: 126142 - RNA, 32 nt, Human
cuacucgggaggcugaggcaggagaaucaauc

SEQ ID NO: 126143 - RNA, 32 nt, Human
cuacucgggaggcugaggcaggagaaucacau

SEQ ID NO: 126144 - RNA, 32 nt, Human
cuacucgggaggcugaggcaggagaaucaccu

SEQ ID NO: 126145 - RNA, 32 nt, Human
cuacucgggaggcugaggcaggagaaucacua

SEQ ID NO: 126146 - RNA, 32 nt, Human
cuacucgggaggcugaggcaggagaaucacuu

SEQ ID NO: 126147 - RNA, 32 nt, Human
cuacucgggaggcugaggcaggagaaucauuu

SEQ ID NO: 126148 - RNA, 32 nt, Human
cuacucgggaggcugaggcaggagaaucgccu

SEQ ID NO: 126149 - RNA, 32 nt, Human
cuacucgggaggcugaggcaggagaaucgcuu

SEQ ID NO: 126150 - RNA, 32 nt, Human
cuacucgggaggcugaggcaggagaaucgucu

SEQ ID NO: 126151 - RNA, 32 nt, Human
cuacucgggaggcugaggcaggagaaucguuu

SEQ ID NO: 126152 - RNA, 32 nt, Human
cuacucgggaggcugaggcaggagaaucucuu

SEQ ID NO: 126153 - RNA, 32 nt, Human
cuacucgggaggcugaggcaggagaaugaagu

SEQ ID NO: 126154 - RNA, 32 nt, Human
cuacucgggaggcugaggcaggagaauggagu

SEQ ID NO: 126155 - RNA, 32 nt, Human
cuacucgggaggcugaggcaggagaauggcau

SEQ ID NO: 126156 - RNA, 32 nt, Human
cuacucgggaggcugaggcaggagaauggccu

SEQ ID NO: 126157 - RNA, 32 nt, Human
cuacucgggaggcugaggcaggagaauggcgu

SEQ ID NO: 126158 - RNA, 32 nt, Human
cuacucgggaggcugaggcaggagaauggcuu

SEQ ID NO: 126159 - RNA, 32 nt, Human
cuacucgggaggcugaggcaggagaauggugc

SEQ ID NO: 126160 - RNA, 32 nt, Human
cuacucgggaggcugaggcaggagaauggugu

SEQ ID NO: 126161 - RNA, 32 nt, Human
cuacucgggaggcugaggcaggagaaugucgu

SEQ ID NO: 126162 - RNA, 32 nt, Human
cuacucgggaggcugaggcaggagaauugcuu

SEQ ID NO: 126163 - RNA, 32 nt, Human
cuacucgggaggcugaggcaggagaauuguuu

SEQ ID NO: 126164 - RNA, 32 nt, Human
cuacucgggaggcugaggcaggagagaaucgc

SEQ ID NO: 126165 - RNA, 32 nt, Human
cuacucgggaggcugaggcaggagagugacgu

SEQ ID NO: 126166 - RNA, 32 nt, Human
cuacucgggaggcugaggcaggagaucgcugg

SEQ ID NO: 126167 - RNA, 32 nt, Human
cuacucgggaggcugaggcaggagauucgccu

SEQ ID NO: 126168 - RNA, 32 nt, Human
cuacucgggaggcugaggcaggaggaucacuu

SEQ ID NO: 126169 - RNA, 32 nt, Human
cuacucgggaggcugaggcaggaggaucgcuu

SEQ ID NO: 126170 - RNA, 32 nt, Human
cuacucgggaggcugaggcaggauaaucacuu

SEQ ID NO: 126171 - RNA, 32 nt, Human
cuacucgggaggcugaggcaggauaauugcuu

SEQ ID NO: 126172 - RNA, 32 nt, Human
cuacucgggaggcugaggcagggagaaucgcu

SEQ ID NO: 126173 - RNA, 32 nt, Human
cuacucgggaggcugaggcaggggaaucacuu

SEQ ID NO: 126174 - RNA, 32 nt, Human
cuacucgggaggcugaggcaggggaauggcgu

SEQ ID NO: 126175 - RNA, 32 nt, Human
cuacucgggaggcugaggcaggggaauugcuu

SEQ ID NO: 126176 - RNA, 32 nt, Human
cuacucgggaggcugaggccguaggaucccuu

SEQ ID NO: 126177 - RNA, 32 nt, Human
cuacucgggaggcugaggcgggagaaucacuu

SEQ ID NO: 126178 - RNA, 32 nt, Human
cuacucgggaggcugaggcgggagaauugcuu

SEQ ID NO: 126179 - RNA, 32 nt, Human
cuacucgggaggcugaggcgggagcauggcau

SEQ ID NO: 126180 - RNA, 32 nt, Human
cuacucgggaggcugaggcgggaggaucaguu

SEQ ID NO: 126181 - RNA, 32 nt, Human
cuacucgggaggcugagguaggaggaucgcuu

SEQ ID NO: 126182 - RNA, 32 nt, Human
cuacucgggaggcugaggugaaaggaucacuu

SEQ ID NO: 126183 - RNA, 32 nt, Human
cuacucgggaggcugagguggaaagauggccc

SEQ ID NO: 126184 - RNA, 32 nt, Human
cuacucgggaggcugaggugggaggaucacuu

SEQ ID NO: 126185 - RNA, 32 nt, Human
cuacucgggaggcugaggugggaggaucgcug

SEQ ID NO: 126186 - RNA, 32 nt, Human
cuacucgggaggcugaggugggaggaucgcuu

SEQ ID NO: 126187 - RNA, 32 nt, Human
cuacucgggaggcugagucaggagaaucacuu

SEQ ID NO: 126188 - RNA, 32 nt, Human
cuacucgggaggcuggggcaggagaaucacuu

SEQ ID NO: 126189 - RNA, 32 nt, Human
cuacucgggaggcuguggcaggagaaucgcuu

SEQ ID NO: 126190 - RNA, 32 nt, Human
cuacucgggaggcuguggcaggagaauugcuu

SEQ ID NO: 126191 - RNA, 32 nt, Human
cuacucgggagggugaggcaggagaaucacuu

SEQ ID NO: 126192 - RNA, 32 nt, Human
cuacucgggagguggagguugcagugagccaa

SEQ ID NO: 126193 - RNA, 32 nt, Human
cuacucgggagguugagcaggaggauugcuug

SEQ ID NO: 126194 - RNA, 32 nt, Human
cuacucgggagguugaggcaggagaaucacuu

SEQ ID NO: 126195 - RNA, 32 nt, Human
cuacucgggagguugaggcaggagaaucgcuu

SEQ ID NO: 126196 - RNA, 32 nt, Human
cuacucgggagguugaggcaggagaauggggu

SEQ ID NO: 126197 - RNA, 32 nt, Human
cuacucgggagguugaggcaggagaauugcuu

SEQ ID NO: 126198 - RNA, 32 nt, Human
cuacucgggagguugagggaggagaaucacuu

SEQ ID NO: 126199 - RNA, 32 nt, Human
cuacucgggagguuuaggcaggagaaucgcuu

SEQ ID NO: 126200 - RNA, 32 nt, Human
cuacucggggcgcugaggcaggagaaucgcuc

SEQ ID NO: 126201 - RNA, 32 nt, Human
cuacucgguaggcugaggcaggagaaucacuu

SEQ ID NO: 126202 - RNA, 32 nt, Human
cuacucgugccauccaggucuccgagcccguc

SEQ ID NO: 126203 - RNA, 32 nt, Human
cuacucuagaggcugaggugggaggaucacuu

SEQ ID NO: 126204 - RNA, 32 nt, Human
cuacucuauauacuuuugcuugguucauuuuu

SEQ ID NO: 126205 - RNA, 32 nt, Human
cuacucuauuuauaucuacauuuccuuccagc

SEQ ID NO: 126206 - RNA, 32 nt, Human
cuacucucaaacuccugaccucaggugaucug

SEQ ID NO: 126207 - RNA, 32 nt, Human
cuacucucagcugccuaucuucugccuuucac

SEQ ID NO: 126208 - RNA, 32 nt, Human
cuacucucaucugcuccagcccccugaccuua

SEQ ID NO: 126209 - RNA, 32 nt, Human
cuacucuccccaagccuguguugcagguagag

SEQ ID NO: 126210 - RNA, 32 nt, Human
cuacucucuaccucuggcugggcccagccugu

SEQ ID NO: 126211 - RNA, 32 nt, Human
cuacucucuccucccucuggcucugccucccc

SEQ ID NO: 126212 - RNA, 32 nt, Human
cuacucucuccuuccucccccuuuuauccuac

SEQ ID NO: 126213 - RNA, 32 nt, Human
cuacucucucucagaucccaggauuggcaugu

SEQ ID NO: 126214 - RNA, 20 nt, Human
cuacucucugagacugcaga

SEQ ID NO: 126215 - RNA, 32 nt, Human
cuacucucugcuucugugagucuggcuauuuu

SEQ ID NO: 126216 - RNA, 32 nt, Human
cuacucucuggcaucuccagguguuuuguagc

SEQ ID NO: 126217 - RNA, 32 nt, Human
cuacucucugggccacugcugcagaggccgug

SEQ ID NO: 126218 - RNA, 32 nt, Human
cuacucucuuuuccucauuagccuuccugauu

SEQ ID NO: 126219 - RNA, 32 nt, Human
cuacucugacauccucuccagcuuucaucugu

SEQ ID NO: 126220 - RNA, 32 nt, Human
cuacucugcaacucggcuucugagccaggcca

SEQ ID NO: 126221 - RNA, 20 nt, Human
cuacucugcccccuuccugc

SEQ ID NO: 126222 - RNA, 32 nt, Human
cuacucugcucuggccaguggugccaggugcc

SEQ ID NO: 126223 - RNA, 32 nt, Human
cuacucugcuguaugaaucuccaggcaggaaa

SEQ ID NO: 126224 - RNA, 32 nt, Human
cuacucugcuuugggauagugugagcuucauu

SEQ ID NO: 126225 - RNA, 32 nt, Human
cuacucuggagcuggagagaacagucugccaa

SEQ ID NO: 126226 - RNA, 32 nt, Human
cuacucuggaggcuaaggugggaggaucacuu

SEQ ID NO: 126227 - RNA, 32 nt, Human
cuacucuggaggcugagauaggaggaucacuu

SEQ ID NO: 126228 - RNA, 32 nt, Human
cuacucuggaggcugggcuggagaaucacuug

SEQ ID NO: 126229 - RNA, 32 nt, Human
cuacucuggaggcuggggcaggagaauugcuu

SEQ ID NO: 126230 - RNA, 32 nt, Human
cuacucuggagggugaggcaggagaaucacuu

SEQ ID NO: 126231 - RNA, 32 nt, Human
cuacucuguaaauaguacuggccggcgggggc

SEQ ID NO: 126232 - RNA, 32 nt, Human
cuacucugugcaccaugcuaggaagcuuccuu

SEQ ID NO: 126233 - RNA, 32 nt, Human
cuacucuguuauuuccaccuguuuggguaggg

SEQ ID NO: 126234 - RNA, 32 nt, Human
cuacucuucccagccccuaaucccaggccuug

SEQ ID NO: 126235 - RNA, 32 nt, Human
cuacucuucggcuucagggagccccagaccuc

SEQ ID NO: 126236 - RNA, 32 nt, Human
cuacucuuugguagucucugcagcagccacag

SEQ ID NO: 126237 - RNA, 32 nt, Human
cuacucuuuguuuucuuuccuccccacccauu

SEQ ID NO: 126238 - RNA, 32 nt, Human
cuacugaaaauacaaaaaguuagccgggugug

SEQ ID NO: 126239 - RNA, 32 nt, Human
cuacugaaaauacaaaaauuagccagacguga

SEQ ID NO: 126240 - RNA, 32 nt, Human
cuacugaaaauacaaaaauuagccaggcgugg

SEQ ID NO: 126241 - RNA, 32 nt, Human
cuacugaaaauacaaaaauuagccaggcuugg

SEQ ID NO: 126242 - RNA, 32 nt, Human
cuacugaaaauacaaaaauuagccagguaugg

SEQ ID NO: 126243 - RNA, 32 nt, Human
cuacugaaaauacaaaaauuagccaggugugg

SEQ ID NO: 126244 - RNA, 32 nt, Human
cuacugaaaauacaaaaauuagccgggcaugg

SEQ ID NO: 126245 - RNA, 32 nt, Human
cuacugaaaauacaaaaauuagccgggcgugg

SEQ ID NO: 126246 - RNA, 32 nt, Human
cuacugaaaauacaaaaauuagcugggcgugg

SEQ ID NO: 126247 - RNA, 32 nt, Human
cuacugaaaauacaaaaauuagcugggugugg

SEQ ID NO: 126248 - RNA, 32 nt, Human
cuacugaaaauacaaaaauuagucaggugcag

SEQ ID NO: 126249 - RNA, 32 nt, Human
cuacugaaaauacaaaauuagccgggcauugu

SEQ ID NO: 126250 - RNA, 32 nt, Human
cuacugaaaauacaagaaauuagcugggacua

SEQ ID NO: 126251 - RNA, 32 nt, Human
cuacugaaaauacaauaauuagcugggcgugg

SEQ ID NO: 126252 - RNA, 32 nt, Human
cuacugaaaauauaaaaauuagccaggcaugg

SEQ ID NO: 126253 - RNA, 32 nt, Human
cuacugaaaauauaaaaauuagccaggcgugg

SEQ ID NO: 126254 - RNA, 32 nt, Human
cuacugaaaauauagaaauuagccaggcuugg

SEQ ID NO: 126255 - RNA, 32 nt, Human
cuacugaaaaugcaaaaauuagccagguauag

SEQ ID NO: 126256 - RNA, 32 nt, Human
cuacugaaaaugcaaaaauuagccaggugugg

SEQ ID NO: 126257 - RNA, 32 nt, Human
cuacugaaaguacaaaaauuagcugggugugu

SEQ ID NO: 126258 - RNA, 32 nt, Human
cuacugaaagugcagaaggauuggccgggcgu

SEQ ID NO: 126259 - RNA, 32 nt, Human
cuacugaaaucccuguagcagagauguuuuaa

SEQ ID NO: 126260 - RNA, 32 nt, Human
cuacugaacucugauuagggaaccuguauaag

SEQ ID NO: 126261 - RNA, 32 nt, Human
cuacugaaggccugaggcacucaggccucuuc

SEQ ID NO: 126262 - RNA, 32 nt, Human
cuacugaaggccugccccagcugaucucgcuc

SEQ ID NO: 126263 - RNA, 32 nt, Human
cuacugaaucucuaaucaauguucaucaugua

SEQ ID NO: 126264 - RNA, 32 nt, Human
cuacugacaugcaugguuuaacuuccucauca

SEQ ID NO: 126265 - RNA, 32 nt, Human
cuacugaccaagcaggagagccagcagcacuu

SEQ ID NO: 126266 - RNA, 32 nt, Human
cuacugacucuccuaaacuugcacucugcucc

SEQ ID NO: 126267 - RNA, 31 nt, Human
cuacugagcacuuucugacagcaguggccca

SEQ ID NO: 126268 - RNA, 32 nt, Human
cuacugagcagcaucuggaggcgggggccagg

SEQ ID NO: 126269 - RNA, 32 nt, Human
cuacugaggccaggcugauaggagcucaggag

SEQ ID NO: 126270 - RNA, 32 nt, Human
cuacugaguguucuggaaauacauacuuucug

SEQ ID NO: 126271 - RNA, 32 nt, Human
cuacugauauuccuauuuucuuuggauuccag

SEQ ID NO: 126272 - RNA, 32 nt, Human
cuacugaugaacuugccucccuuucucccuuc

SEQ ID NO: 126273 - RNA, 32 nt, Human
cuacugauuuuuccuguugauucaaauagacu

SEQ ID NO: 126274 - RNA, 32 nt, Human
cuacugcaaaauacaaaaauuagccgggcuug

SEQ ID NO: 126275 - RNA, 32 nt, Human
cuacugcagaaggaagaaagaauauaauauga

SEQ ID NO: 126276 - RNA, 30 nt, Human
cuacugcagaagugcagggcacaguaaaca

SEQ ID NO: 126277 - RNA, 32 nt, Human
cuacugcagacugucuggcauuaugagccaua

SEQ ID NO: 126278 - RNA, 32 nt, Human
cuacugcagcaaggcuucuguguacuugccug

SEQ ID NO: 126279 - RNA, 32 nt, Human
cuacugcaguuggcaagaauggagucuaaucc

SEQ ID NO: 126280 - RNA, 32 nt, Human
cuacugcaugcagccauccgggagguggauau

SEQ ID NO: 126281 - RNA, 32 nt, Human
cuacugcauggagaaagugcugagggagagcg

SEQ ID NO: 126282 - RNA, 32 nt, Human
cuacugcauucuggugaaugcagaggaacuuu

SEQ ID NO: 126283 - RNA, 32 nt, Human
cuacugcauuuccuucuugcucugucuacagc

SEQ ID NO: 126284 - RNA, 32 nt, Human
cuacugccaccauccagguuuaggcccccauu

SEQ ID NO: 126285 - RNA, 32 nt, Human
cuacugccacucccagugugcugaccauucaa

SEQ ID NO: 126286 - RNA, 32 nt, Human
cuacugccagaggcuggcguaguggggcagcu

SEQ ID NO: 126287 - RNA, 32 nt, Human
cuacugccaucuuucugucugcacuguuuaau

SEQ ID NO: 126288 - RNA, 32 nt, Human
cuacugcccagggccuggcccugcugcacaug

SEQ ID NO: 126289 - RNA, 32 nt, Human
cuacugcccugccuugggccuugcugcugcug

SEQ ID NO: 126290 - RNA, 32 nt, Human
cuacugcccuggcugcagucagugcccagggc

SEQ ID NO: 126291 - RNA, 32 nt, Human
cuacugccugcucuucauuuugggccaacugu

SEQ ID NO: 126292 - RNA, 32 nt, Human
cuacugcgcuuugggaaggccaugaccuccuc

SEQ ID NO: 126293 - RNA, 32 nt, Human
cuacugcguuuaaaucaauacuggguggcaaa

SEQ ID NO: 126294 - RNA, 32 nt, Human
cuacugcucccagcaaccucuacauccaggaa

SEQ ID NO: 126295 - RNA, 32 nt, Human
cuacugcugcacaaccucacugugucaggcag

SEQ ID NO: 126296 - RNA, 32 nt, Human
cuacugcugcuuccuguggccuccauggcuga

SEQ ID NO: 126297 - RNA, 32 nt, Human
cuacugcuggggcugccaccuccuccuccaga

SEQ ID NO: 126298 - RNA, 32 nt, Human
cuacugcuguaugucagguuugcucacaauga

SEQ ID NO: 126299 - RNA, 15 nt, Human
cuacugcugugaacc

SEQ ID NO: 126300 - RNA, 32 nt, Human
cuacuggaaaaauuucuauucucuccacagcc

SEQ ID NO: 126301 - RNA, 32 nt, Human
cuacuggaaauacggaaauuagccgggggugg

SEQ ID NO: 126302 - RNA, 32 nt, Human
cuacuggaacacagcagagucugugccaugaa

SEQ ID NO: 126303 - RNA, 32 nt, Human
cuacuggaccuuauuuuggaacuaugguagcc

SEQ ID NO: 126304 - RNA, 32 nt, Human
cuacuggaggguguuuucacgaauguuguuac

SEQ ID NO: 126305 - RNA, 32 nt, Human
cuacuggcgccucaaccagcagcuucgaguag

SEQ ID NO: 126306 - RNA, 32 nt, Human
cuacugggagagaagaagauaagcuggaagag

SEQ ID NO: 126307 - RNA, 32 nt, Human
cuacuggggaagcagaacacuggugggauaaa

SEQ ID NO: 126308 - RNA, 32 nt, Human
cuacuggggaggcuaagccaggaggacuguuu

SEQ ID NO: 126309 - RNA, 32 nt, Human
cuacuggggaggcugaggcaggagaauagcuu

SEQ ID NO: 126310 - RNA, 28 nt, Human
cuacuggggaggcugaggcaggagaauc

SEQ ID NO: 126311 - RNA, 32 nt, Human
cuacuggggaggcugaggcaggagaaucacuu

SEQ ID NO: 126312 - RNA, 32 nt, Human
cuacuggggaggcugaggcaggagaaucgcuu

SEQ ID NO: 126313 - RNA, 32 nt, Human
cuacuggggaggcugaggcaggagaaucguuu

SEQ ID NO: 126314 - RNA, 32 nt, Human
cuacuggggaggcugaggcaggagaauggcau

SEQ ID NO: 126315 - RNA, 32 nt, Human
cuacuggggaggcugaggcaggagaauggcgu

SEQ ID NO: 126316 - RNA, 32 nt, Human
cuacuggggaggcugaggcaggagaauggcuu

SEQ ID NO: 126317 - RNA, 32 nt, Human
cuacuggggaggcugaggcaggagaauggugu

SEQ ID NO: 126318 - RNA, 32 nt, Human
cuacuggggaggcugaggcaggagaauugcuu

SEQ ID NO: 126319 - RNA, 32 nt, Human
cuacuggggaggcugaggcgggagaaucgcuu

SEQ ID NO: 126320 - RNA, 32 nt, Human
cuacuggggaggcugagucaggagaaucgcuu

SEQ ID NO: 126321 - RNA, 32 nt, Human
cuacuggguugacgccauuuccugccucggcc

SEQ ID NO: 126322 - RNA, 32 nt, Human
cuacuggguuuggccuggacagcacugauuug

SEQ ID NO: 126323 - RNA, 32 nt, Human
cuacugguacccuggaacugugcugaacuuua

SEQ ID NO: 126324 - RNA, 32 nt, Human
cuacugguaggccgaggcaggagaaucacuug

SEQ ID NO: 126325 - RNA, 32 nt, Human
cuacuggucccuuuaccacaucaugcugacau

SEQ ID NO: 126326 - RNA, 32 nt, Human
cuacuggugccaccccgccuccgacccgcccu

SEQ ID NO: 126327 - RNA, 32 nt, Human
cuacugguguuuuucugccuugagaaaacaaa

SEQ ID NO: 126328 - RNA, 32 nt, Human
cuacuguaaagcaguugaaagaauuuauucag

SEQ ID NO: 126329 - RNA, 32 nt, Human
cuacuguaacuuaagacuuucauagaauaauu

SEQ ID NO: 126330 - RNA, 19 nt, Human
cuacuguacauguugguca

SEQ ID NO: 126331 - RNA, 32 nt, Human
cuacuguacuacuguacuccagccugggggaa

SEQ ID NO: 126332 - RNA, 32 nt, Human
cuacugucauacaggcuggcgugcaguagugg

SEQ ID NO: 126333 - RNA, 32 nt, Human
cuacugucccaaauccuguguguccuuuugac

SEQ ID NO: 126334 - RNA, 32 nt, Human
cuacuguccuaagcugcuuuucuugaaaucau

SEQ ID NO: 126335 - RNA, 32 nt, Human
cuacuguccuuugggagccuggaccggaagcc

SEQ ID NO: 126336 - RNA, 32 nt, Human
cuacugucggacucuacaggucagccucugcc

SEQ ID NO: 126337 - RNA, 32 nt, Human
cuacugugacgggucuaacagcccccggcuac

SEQ ID NO: 126338 - RNA, 31 nt, Human
cuacugugacuucuccgauugugugagcuuu

SEQ ID NO: 126339 - RNA, 32 nt, Human
cuacugugagcuaugauuggaccacuauacuc

SEQ ID NO: 126340 - RNA, 32 nt, Human
cuacugugagcuguucccgccuagccagggcc

SEQ ID NO: 126341 - RNA, 32 nt, Human
cuacugugauggaaaacaaaaugaguauaacu

SEQ ID NO: 126342 - RNA, 32 nt, Human
cuacugugccagcguggagaccccaggcuacc

SEQ ID NO: 126343 - RNA, 32 nt, Human
cuacugugcccagccugcaauuauucuuuaua

SEQ ID NO: 126344 - RNA, 32 nt, Human
cuacugugugccaggcccugugcuuugucagg

SEQ ID NO: 126345 - RNA, 32 nt, Human
cuacuguguguugggugccauuccaggcucug

SEQ ID NO: 126346 - RNA, 32 nt, Human
cuacuguucagcuuuuauuccuucccugguug

SEQ ID NO: 126347 - RNA, 32 nt, Human
cuacuguugguugagcuucuuggcaggacauc

SEQ ID NO: 126348 - RNA, 32 nt, Human
cuacuguuugccucaaacgcuguguuuaaaca

SEQ ID NO: 126349 - RNA, 32 nt, Human
cuacuuaaaauacaaaaauuagccaggcgugg

SEQ ID NO: 126350 - RNA, 32 nt, Human
cuacuuaaaauacaaauauuagcugggcauga

SEQ ID NO: 126351 - RNA, 32 nt, Human
cuacuuaaauuuaagaaagaaaaacagaaacg

SEQ ID NO: 126352 - RNA, 32 nt, Human
cuacuuaagaugcgaaaauuagccuggugugg

SEQ ID NO: 126353 - RNA, 32 nt, Human
cuacuuacacucauuuuuaucuuggcugacag

SEQ ID NO: 126354 - RNA, 32 nt, Human
cuacuuacccuuuaaacugucacugcauaugc

SEQ ID NO: 126355 - RNA, 32 nt, Human
cuacuuacugguuuucuaccuucuuucauaac

SEQ ID NO: 126356 - RNA, 32 nt, Human
cuacuuacuuuucucacccuuguucccucucc

SEQ ID NO: 126357 - RNA, 32 nt, Human
cuacuuagaaaaucaccuuuucagauaaaaca

SEQ ID NO: 126358 - RNA, 32 nt, Human
cuacuuaggaggcugaggcaggagaaucgcuu

SEQ ID NO: 126359 - RNA, 32 nt, Human
cuacuuaggaggcugaggcaggagaaucucuu

SEQ ID NO: 126360 - RNA, 32 nt, Human
cuacuuaggaguagcuaggacuacaggccacg

SEQ ID NO: 126361 - RNA, 32 nt, Human
cuacuuaucagucuuuuaauucuauuagacaa

SEQ ID NO: 126362 - RNA, 32 nt, Human
cuacuucaagagcuuuuguaauuaccaaaccg

SEQ ID NO: 126363 - RNA, 32 nt, Human
cuacuucaaugaucauuucacaagaaaaagac

SEQ ID NO: 126364 - RNA, 32 nt, Human
cuacuucacaugcacugaauaugcauuuuauu

SEQ ID NO: 126365 - RNA, 32 nt, Human
cuacuucaggguggcaguguuuggggcacugg

SEQ ID NO: 126366 - RNA, 32 nt, Human
cuacuuccccgauccugggcucccucuugauu

SEQ ID NO: 126367 - RNA, 32 nt, Human
cuacuuccccuguuugccuugugggucucugu

SEQ ID NO: 126368 - RNA, 32 nt, Human
cuacuuccucaagguucuuucuguccaguugc

SEQ ID NO: 126369 - RNA, 32 nt, Human
cuacuuccucguuugacaccuuccuggaaucu

SEQ ID NO: 126370 - RNA, 32 nt, Human
cuacuuccuggaccaugacaagcugcuacucu

SEQ ID NO: 126371 - RNA, 32 nt, Human
cuacuucuaugugccagaccugggccaggugc

SEQ ID NO: 126372 - RNA, 32 nt, Human
cuacuucuccaccaucccuagcaugccagccc

SEQ ID NO: 126373 - RNA, 32 nt, Human
cuacuucuggggugccugucuccuggaaugga

SEQ ID NO: 126374 - RNA, 32 nt, Human
cuacuucuggugcaguccugggacaaggacaa

SEQ ID NO: 126375 - RNA, 32 nt, Human
cuacuucuguagcugcucucacuuugucuuuu

SEQ ID NO: 126376 - RNA, 32 nt, Human
cuacuucugugacuucuguguuagccaucuua

SEQ ID NO: 126377 - RNA, 32 nt, Human
cuacuucuuaaauuccguuuguggacccucag

SEQ ID NO: 126378 - RNA, 32 nt, Human
cuacuucuucaagggcaaagucuacuggcgcc

SEQ ID NO: 126379 - RNA, 32 nt, Human
cuacuucuucccccaucuaucuccagcaucca

SEQ ID NO: 126380 - RNA, 32 nt, Human
cuacuucuuuucuuccuuccucuuccucucuu

SEQ ID NO: 126381 - RNA, 32 nt, Human
cuacuugagaggcagaggcaggagaaucgcuu

SEQ ID NO: 126382 - RNA, 32 nt, Human
cuacuugagaggcugagccaggaggaucgcuu

SEQ ID NO: 126383 - RNA, 32 nt, Human
cuacuugagaggcuggggcaggagaaucacua

SEQ ID NO: 126384 - RNA, 32 nt, Human
cuacuugaggcugagaugggaggaugagggag

SEQ ID NO: 126385 - RNA, 31 nt, Human
cuacuugagugagaaaacugggugaaggaau

SEQ ID NO: 126386 - RNA, 32 nt, Human
cuacuugccaacaucugccuugcuggacuugu

SEQ ID NO: 126387 - RNA, 32 nt, Human
cuacuugccaugacuucacugaggcugucauu

SEQ ID NO: 126388 - RNA, 32 nt, Human
cuacuugcccacccuuccuugcugguucagag

SEQ ID NO: 126389 - RNA, 32 nt, Human
cuacuugccugccucccugccucuggccaugg

SEQ ID NO: 126390 - RNA, 32 nt, Human
cuacuuggaaggcugagguaggaggacugcuu

SEQ ID NO: 126391 - RNA, 32 nt, Human
cuacuuggagggcagaggugggaggauggcuu

SEQ ID NO: 126392 - RNA, 32 nt, Human
cuacuuggcaggcugaagcaggagaauggcgu

SEQ ID NO: 126393 - RNA, 32 nt, Human
cuacuuggcaggcugaggcaggagaauugcuu

SEQ ID NO: 126394 - RNA, 32 nt, Human
cuacuugggaagcagaggcuggaggaucauuu

SEQ ID NO: 126395 - RNA, 32 nt, Human
cuacuugggaagcugagguaggaggauugcuu

SEQ ID NO: 126396 - RNA, 32 nt, Human
cuacuugggaggaugaggcaggagaaucgcuu

SEQ ID NO: 126397 - RNA, 32 nt, Human
cuacuugggaggcagaggcaggagaaucauuu

SEQ ID NO: 126398 - RNA, 32 nt, Human
cuacuugggaggcagaggcaggagaaucgcuu

SEQ ID NO: 126399 - RNA, 32 nt, Human
cuacuugggaggcagaggcaggagaaucguuu

SEQ ID NO: 126400 - RNA, 32 nt, Human
cuacuugggaggcagaggcaggagaauggcau

SEQ ID NO: 126401 - RNA, 32 nt, Human
cuacuugggaggcagaggcaggagaauugcuu

SEQ ID NO: 126402 - RNA, 32 nt, Human
cuacuugggaggcagaggugggaagaugguuu

SEQ ID NO: 126403 - RNA, 32 nt, Human
cuacuugggaggccgaggcaggagaaucgcuu

SEQ ID NO: 126404 - RNA, 32 nt, Human
cuacuugggaggccgaggcaggagaaucucuu

SEQ ID NO: 126405 - RNA, 32 nt, Human
cuacuugggaggccgaggcaggagaauugcuu

SEQ ID NO: 126406 - RNA, 32 nt, Human
cuacuugggaggcggaagcaggaguaucccuu

SEQ ID NO: 126407 - RNA, 32 nt, Human
cuacuugggaggcuaaggugggaagaucaauu

SEQ ID NO: 126408 - RNA, 32 nt, Human
cuacuugggaggcucaggugggaggaucacuu

SEQ ID NO: 126409 - RNA, 32 nt, Human
cuacuugggaggcugagccaggagaaucgcuu

SEQ ID NO: 126410 - RNA, 32 nt, Human
cuacuugggaggcugaggcaagugaaucacuu

SEQ ID NO: 126411 - RNA, 32 nt, Human
cuacuugggaggcugaggcagaauggcgugaa

SEQ ID NO: 126412 - RNA, 32 nt, Human
cuacuugggaggcugaggcagaauugcuugaa

SEQ ID NO: 126413 - RNA, 32 nt, Human
cuacuugggaggcugaggcagagaauugcuug

SEQ ID NO: 126414 - RNA, 32 nt, Human
cuacuugggaggcugaggcagagcugcuugaa

SEQ ID NO: 126415 - RNA, 32 nt, Human
cuacuugggaggcugaggcaggacagucacuu

SEQ ID NO: 126416 - RNA, 32 nt, Human
cuacuugggaggcugaggcaggagaaccgcuu

SEQ ID NO: 126417 - RNA, 32 nt, Human
cuacuugggaggcugaggcaggagaauagcuu

SEQ ID NO: 126418 - RNA, 28 nt, Human
cuacuugggaggcugaggcaggagaauc

SEQ ID NO: 126419 - RNA, 32 nt, Human
cuacuugggaggcugaggcaggagaaucaccu

SEQ ID NO: 126420 - RNA, 32 nt, Human
cuacuugggaggcugaggcaggagaaucacuu

SEQ ID NO: 126421 - RNA, 32 nt, Human
cuacuugggaggcugaggcaggagaaucauuu

SEQ ID NO: 126422 - RNA, 32 nt, Human
cuacuugggaggcugaggcaggagaaucgccu

SEQ ID NO: 126423 - RNA, 32 nt, Human
cuacuugggaggcugaggcaggagaaucgcuu

SEQ ID NO: 126424 - RNA, 32 nt, Human
cuacuugggaggcugaggcaggagaaucucuu

SEQ ID NO: 126425 - RNA, 32 nt, Human
cuacuugggaggcugaggcaggagaauggcau

SEQ ID NO: 126426 - RNA, 32 nt, Human
cuacuugggaggcugaggcaggagaauggccu

SEQ ID NO: 126427 - RNA, 32 nt, Human
cuacuugggaggcugaggcaggagaauggcgg

SEQ ID NO: 126428 - RNA, 32 nt, Human
cuacuugggaggcugaggcaggagaauggcgu

SEQ ID NO: 126429 - RNA, 32 nt, Human
cuacuugggaggcugaggcaggagaauggcuu

SEQ ID NO: 126430 - RNA, 32 nt, Human
cuacuugggaggcugaggcaggagaauggugu

SEQ ID NO: 126431 - RNA, 32 nt, Human
cuacuugggaggcugaggcaggagaauguggu

SEQ ID NO: 126432 - RNA, 32 nt, Human
cuacuugggaggcugaggcaggagaauuacuu

SEQ ID NO: 126433 - RNA, 32 nt, Human
cuacuugggaggcugaggcaggagaauucuuu

SEQ ID NO: 126434 - RNA, 32 nt, Human
cuacuugggaggcugaggcaggagaauugauu

SEQ ID NO: 126435 - RNA, 32 nt, Human
cuacuugggaggcugaggcaggagaauugcuu

SEQ ID NO: 126436 - RNA, 32 nt, Human
cuacuugggaggcugaggcaggagaauuguuu

SEQ ID NO: 126437 - RNA, 29 nt, Human
cuacuugggaggcugaggcaggagagucg

SEQ ID NO: 126438 - RNA, 32 nt, Human
cuacuugggaggcugaggcaggaggaucacuu

SEQ ID NO: 126439 - RNA, 32 nt, Human
cuacuugggaggcugaggcaggaggaucgcuu

SEQ ID NO: 126440 - RNA, 32 nt, Human
cuacuugggaggcugaggcaggggaaucacuu

SEQ ID NO: 126441 - RNA, 32 nt, Human
cuacuugggaggcugaggcaggugaaucgcuu

SEQ ID NO: 126442 - RNA, 32 nt, Human
cuacuugggaggcugaggcggcaggaucacua

SEQ ID NO: 126443 - RNA, 32 nt, Human
cuacuugggaggcugaggcgggagaauggcaa

SEQ ID NO: 126444 - RNA, 32 nt, Human
cuacuugggaggcugaggcgggagaguggcgu

SEQ ID NO: 126445 - RNA, 32 nt, Human
cuacuugggaggcugagggcaggagaauggca

SEQ ID NO: 126446 - RNA, 32 nt, Human
cuacuugggaggcugagggcaggagaauugcu

SEQ ID NO: 126447 - RNA, 32 nt, Human
cuacuugggaggcugagguaggaggaucaccu

SEQ ID NO: 126448 - RNA, 32 nt, Human
cuacuugggaggcugagguggaaggaucauuu

SEQ ID NO: 126449 - RNA, 32 nt, Human
cuacuugggaggcugagguggagggaucgcuu

SEQ ID NO: 126450 - RNA, 32 nt, Human
cuacuugggaggcugaggugggaaaaugacuu

SEQ ID NO: 126451 - RNA, 32 nt, Human
cuacuugggaggcugaggugggaggauaacuu

SEQ ID NO: 126452 - RNA, 32 nt, Human
cuacuugggaggcugaggugggaggaucacuu

SEQ ID NO: 126453 - RNA, 32 nt, Human
cuacuugggaggcugaggugggaggaucgcuu

SEQ ID NO: 126454 - RNA, 32 nt, Human
cuacuugggaggcugaggugggaggauggcuu

SEQ ID NO: 126455 - RNA, 32 nt, Human
cuacuugggaggcugaggugggaggauugcuu

SEQ ID NO: 126456 - RNA, 32 nt, Human
cuacuugggaggcugaggugggagggauugcu

SEQ ID NO: 126457 - RNA, 32 nt, Human
cuacuugggaggcugaggugggggaaucacuu

SEQ ID NO: 126458 - RNA, 32 nt, Human
cuacuugggaggcugaggugugaggaucauuu

SEQ ID NO: 126459 - RNA, 32 nt, Human
cuacuugggaggcugaguccggagccuugagg

SEQ ID NO: 126460 - RNA, 32 nt, Human
cuacuugggaggcuggggugggaggaucgcuu

SEQ ID NO: 126461 - RNA, 32 nt, Human
cuacuugggaggguggccugagcccagggguu

SEQ ID NO: 126462 - RNA, 32 nt, Human
cuacuugggagguggaggugggaggauuauaa

SEQ ID NO: 126463 - RNA, 32 nt, Human
cuacuugggagguugaggcaagagaaucacuu

SEQ ID NO: 126464 - RNA, 32 nt, Human
cuacuugggagguugagguaggaggaucgcuu

SEQ ID NO: 126465 - RNA, 32 nt, Human
cuacuugggagucugaggcaggagaauugcuu

SEQ ID NO: 126466 - RNA, 32 nt, Human
cuacuugggaucucaggaggcugcaaucaaag

SEQ ID NO: 126467 - RNA, 32 nt, Human
cuacuugggccauagcuccugcuccacagcca

SEQ ID NO: 126468 - RNA, 32 nt, Human
cuacuuggggugcugaggcaggagaaucaacu

SEQ ID NO: 126469 - RNA, 32 nt, Human
cuacuuggggugcugaggcgggaggauuacuu

SEQ ID NO: 126470 - RNA, 32 nt, Human
cuacuuggguggccgaggcaggagaaucacuu

SEQ ID NO: 126471 - RNA, 32 nt, Human
cuacuuggguggcugaggcaggagaauuguuu

SEQ ID NO: 126472 - RNA, 32 nt, Human
cuacuugguaggcugaggcaggagaaucgcuu

SEQ ID NO: 126473 - RNA, 32 nt, Human
cuacuugguaggcugaggcaggagaauggcgg

SEQ ID NO: 126474 - RNA, 32 nt, Human
cuacuuggucauuagagagggagacaccagcu

SEQ ID NO: 126475 - RNA, 32 nt, Human
cuacuuuaauccagcuacucuaccucuaacac

SEQ ID NO: 126476 - RNA, 32 nt, Human
cuacuuuacucuccuuccagcuacucaggagg

SEQ ID NO: 126477 - RNA, 32 nt, Human
cuacuuuauguaacauuacagaacagcuagag

SEQ ID NO: 126478 - RNA, 32 nt, Human
cuacuuuauuuugaaacauuugccaaacuaaa

SEQ ID NO: 126479 - RNA, 32 nt, Human
cuacuuucaaaaccagcuugccuccaggacca

SEQ ID NO: 126480 - RNA, 32 nt, Human
cuacuuucaggccacauggcuaaagaagguuu

SEQ ID NO: 126481 - RNA, 32 nt, Human
cuacuuucauucaggcuggagugcaguggcau

SEQ ID NO: 126482 - RNA, 32 nt, Human
cuacuuuccauucacuguuaacauggaauaaa

SEQ ID NO: 126483 - RNA, 32 nt, Human
cuacuuuccuucauucucucuuccuucccucc

SEQ ID NO: 126484 - RNA, 32 nt, Human
cuacuuucuaucucugaauucgacucuucuau

SEQ ID NO: 126485 - RNA, 32 nt, Human
cuacuuucuguuaugucagacuauaagagaaa

SEQ ID NO: 126486 - RNA, 32 nt, Human
cuacuuugaagacacauauauuggacacuuaa

SEQ ID NO: 126487 - RNA, 32 nt, Human
cuacuuugccaccuuuccccagaauaggccug

SEQ ID NO: 126488 - RNA, 32 nt, Human
cuacuuuggccccuuugaccucagggccauga

SEQ ID NO: 126489 - RNA, 29 nt, Human
cuacuuuggcugcuaucgccgccgccgcg

SEQ ID NO: 126490 - RNA, 32 nt, Human
cuacuuugugcaauugaggauuguuuuggucu

SEQ ID NO: 126491 - RNA, 32 nt, Human
cuacuuugugucccuggcagggccuggagaag

SEQ ID NO: 126492 - RNA, 32 nt, Human
cuacuuuucuagucacagauguuuucaaauuu

SEQ ID NO: 126493 - RNA, 32 nt, Human
cuacuuuucucugcuuucuucuugccauuauu

SEQ ID NO: 126494 - RNA, 32 nt, Human
cuacuuuugggaaucuguagcugugcuuugag

SEQ ID NO: 126495 - RNA, 32 nt, Human
cuagaaaaggccaaccuugcuguuacccucug

SEQ ID NO: 126496 - RNA, 32 nt, Human
cuagaaaauacugaucuaaaugcaagaagcca

SEQ ID NO: 126497 - RNA, 32 nt, Human
cuagaaacaaguguccaucacuaggacacuag

SEQ ID NO: 126498 - RNA, 32 nt, Human
cuagaaacagaaaaucacuguauuaaauauuu

SEQ ID NO: 126499 - RNA, 32 nt, Human
cuagaaacaggaaucaaugacagcagaacucc

SEQ ID NO: 126500 - RNA, 22 nt, Human
cuagaaacccacaggccuggga

SEQ ID NO: 126501 - RNA, 32 nt, Human
cuagaaacguuuucauucgucauuccaagaga

SEQ ID NO: 126502 - RNA, 32 nt, Human
cuagaaacuacugcuacuacuauuuauguuuc

SEQ ID NO: 126503 - RNA, 32 nt, Human
cuagaaagaacugcccuuccucagauauacuc

SEQ ID NO: 126504 - RNA, 32 nt, Human
cuagaaagaugcaaucuuuuucccaggcccca

SEQ ID NO: 126505 - RNA, 32 nt, Human
cuagaaagcaguaacuggaggcuucuacagac

SEQ ID NO: 126506 - RNA, 32 nt, Human
cuagaaagcucacucaugcccauugcccuugc

SEQ ID NO: 126507 - RNA, 32 nt, Human
cuagaaagcugcacuggugcuaaugccccuug

SEQ ID NO: 126508 - RNA, 32 nt, Human
cuagaaaggaaacccuguuucaguccccucuc

SEQ ID NO: 126509 - RNA, 32 nt, Human
cuagaaaggagagaacgggcgucaggggugca

SEQ ID NO: 126510 - RNA, 32 nt, Human
cuagaaauacaaaaauuagcuggauauggugg

SEQ ID NO: 126511 - RNA, 32 nt, Human
cuagaaauacaaaaauuggcugggcgcggugg

SEQ ID NO: 126512 - RNA, 32 nt, Human
cuagaacaaugcugggcuuggagcaggugcuu

SEQ ID NO: 126513 - RNA, 32 nt, Human
cuagaacacucagcugcuucuuuggucauccu

SEQ ID NO: 126514 - RNA, 32 nt, Human
cuagaacacuccaaggcccuucgguacccauc

SEQ ID NO: 126515 - RNA, 32 nt, Human
cuagaacagaucuuugacaucucuaaugagcc

SEQ ID NO: 126516 - RNA, 32 nt, Human
cuagaacagccuccuuacuccagccuggcagg

SEQ ID NO: 126517 - RNA, 20 nt, Human
cuagaacauuuuauuuuccu

SEQ ID NO: 126518 - RNA, 32 nt, Human
cuagaaccagguuuggauaaagauugaagagc

SEQ ID NO: 126519 - RNA, 32 nt, Human
cuagaaccauuuaaaagccugagcaaggacca

SEQ ID NO: 126520 - RNA, 32 nt, Human
cuagaacccaggagacggagguugcagugagc

SEQ ID NO: 126521 - RNA, 32 nt, Human
cuagaaccccaauucagccuccugggcacccc

SEQ ID NO: 126522 - RNA, 32 nt, Human
cuagaacccgggaggcggagguugcagugagc

SEQ ID NO: 126523 - RNA, 32 nt, Human
cuagaacccugccugugguccugagcacugau

SEQ ID NO: 126524 - RNA, 32 nt, Human
cuagaaccugggaggcggagguugcagucagc

SEQ ID NO: 126525 - RNA, 32 nt, Human
cuagaaccuuuucaaagaagaauggaagaaac

SEQ ID NO: 126526 - RNA, 32 nt, Human
cuagaacuaugaccaccucauggucagagaug

SEQ ID NO: 126527 - RNA, 32 nt, Human
cuagaacuggcguuagaggaggagcuggcgcu

SEQ ID NO: 126528 - RNA, 32 nt, Human
cuagaacuugggaggcugaggugggcggauua

SEQ ID NO: 126529 - RNA, 32 nt, Human
cuagaagagaaaagcaucuaucuggagauaua

SEQ ID NO: 126530 - RNA, 32 nt, Human
cuagaagagagggaggaggagcuggagcuauc

SEQ ID NO: 126531 - RNA, 32 nt, Human
cuagaagagcccacccuuucugaucuccaaaa

SEQ ID NO: 126532 - RNA, 32 nt, Human
cuagaagaggacaggaguuaucagggccuccg

SEQ ID NO: 126533 - RNA, 32 nt, Human
cuagaagagggaagaggaaggaaggugggugg

SEQ ID NO: 126534 - RNA, 32 nt, Human
cuagaagauccagggacagaagcccucgaggu

SEQ ID NO: 126535 - RNA, 32 nt, Human
cuagaagauuagaaacuaccaaucccaacuac

SEQ ID NO: 126536 - RNA, 32 nt, Human
cuagaagauuuagaggaggaggaggaaguguc

SEQ ID NO: 126537 - RNA, 18 nt, Human
cuagaagcaaccaucaga

SEQ ID NO: 126538 - RNA, 32 nt, Human
cuagaagcaauauuuucacuuauuuaacauuc

SEQ ID NO: 126539 - RNA, 24 nt, Human
cuagaagcaccguggccugggauu

SEQ ID NO: 126540 - RNA, 32 nt, Human
cuagaagcagagccacuccagccagaacccau

SEQ ID NO: 126541 - RNA, 32 nt, Human
cuagaagcagaggcacuuaaaacauguaccag

SEQ ID NO: 126542 - RNA, 32 nt, Human
cuagaagcagccaagaaccacaugggcauugc

SEQ ID NO: 126543 - RNA, 32 nt, Human
cuagaagccaagcaaacugucaccaaugucag

SEQ ID NO: 126544 - RNA, 32 nt, Human
cuagaagccaggaggcagagguugcagugagc

SEQ ID NO: 126545 - RNA, 32 nt, Human
cuagaagccaggaguucgagaccagccugggu

SEQ ID NO: 126546 - RNA, 32 nt, Human
cuagaagccuagaagcagggcagcuuccuucg

SEQ ID NO: 126547 - RNA, 32 nt, Human
cuagaagcucuguccccucugcugcccagugg

SEQ ID NO: 126548 - RNA, 31 nt, Human
cuagaaggcacuucugggccugggucugagg

SEQ ID NO: 126549 - RNA, 32 nt, Human
cuagaaggcauaagccaauaggauaauauauu

SEQ ID NO: 126550 - RNA, 32 nt, Human
cuagaaggcccugcagcuacagcugcuucauu

SEQ ID NO: 126551 - RNA, 32 nt, Human
cuagaaggccgaggcgggcggaucaccugagg

SEQ ID NO: 126552 - RNA, 32 nt, Human
cuagaaggcgcugguguuuugcucugaguuuu

SEQ ID NO: 126553 - RNA, 32 nt, Human
cuagaagggaaggggagagggaaacgugcccu

SEQ ID NO: 126554 - RNA, 32 nt, Human
cuagaagggagcaacucacucauccuccucuu

SEQ ID NO: 126555 - RNA, 32 nt, Human
cuagaagggcccaaaugagagaaugguacuua

SEQ ID NO: 126556 - RNA, 32 nt, Human
cuagaaguacucugccaugucuugcccguuca

SEQ ID NO: 126557 - RNA, 32 nt, Human
cuagaagucagaacaggauggcugggucuccc

SEQ ID NO: 126558 - RNA, 32 nt, Human
cuagaaguguguggugggucucuuccaaauac

SEQ ID NO: 126559 - RNA, 32 nt, Human
cuagaauaccuugccauauuucuuuucaacug

SEQ ID NO: 126560 - RNA, 32 nt, Human
cuagaauaucccggagcccauccaccaaggcu

SEQ ID NO: 126561 - RNA, 32 nt, Human
cuagaauaucucucagcaagagcagcauaccu

SEQ ID NO: 126562 - RNA, 32 nt, Human
cuagaauauucaccaaggguuugcauuuggga

SEQ ID NO: 126563 - RNA, 32 nt, Human
cuagaaugacccugaaagaauagcccugaaga

SEQ ID NO: 126564 - RNA, 32 nt, Human
cuagaaugaggaucguagccugccuuuagccc

SEQ ID NO: 126565 - RNA, 29 nt, Human
cuagaauggauguguguggcuggaaagaa

SEQ ID NO: 126566 - RNA, 32 nt, Human
cuagaaugggcugugugauaggaaacaaaugc

SEQ ID NO: 126567 - RNA, 32 nt, Human
cuagaaugucauggaagaggaacgugcaacua

SEQ ID NO: 126568 - RNA, 32 nt, Human
cuagaauuggauguuccaacuccuggggauuu

SEQ ID NO: 126569 - RNA, 32 nt, Human
cuagaauugguauggaaaagcaaaauacugua

SEQ ID NO: 126570 - RNA, 32 nt, Human
cuagaauugucuucagguguuuucucucuuaa

SEQ ID NO: 126571 - RNA, 32 nt, Human
cuagaauuugauucuuccagaaugaccuucuu

SEQ ID NO: 126572 - RNA, 32 nt, Human
cuagacaaaauuagggaaaaggugaaagagga

SEQ ID NO: 126573 - RNA, 32 nt, Human
cuagacaacauggugaaaccuugucucuauga

SEQ ID NO: 126574 - RNA, 32 nt, Human
cuagacaaccacccuuucugaaagcaaacagu

SEQ ID NO: 126575 - RNA, 32 nt, Human
cuagacaaccuuucuguagccuaaaacgaaug

SEQ ID NO: 126576 - RNA, 32 nt, Human
cuagacaagcuucagaugucuguagcuaccag

SEQ ID NO: 126577 - RNA, 32 nt, Human
cuagacaauagaagucaucgauagcagcuuuu

SEQ ID NO: 126578 - RNA, 19 nt, Human
cuagacaaugaucauuaaa

SEQ ID NO: 126579 - RNA, 21 nt, Human
cuagacacagcagacaucuga

SEQ ID NO: 126580 - RNA, 18 nt, Human
cuagacacagccaucaga

SEQ ID NO: 126581 - RNA, 18 nt, Human
cuagacaccaccucucaa

SEQ ID NO: 126582 - RNA, 17 nt, Human
cuagacacucauucaga

SEQ ID NO: 126583 - RNA, 32 nt, Human
cuagacacuccccucaccccacuggcuccucu

SEQ ID NO: 126584 - RNA, 17 nt, Human
cuagacacugaaucaag

SEQ ID NO: 126585 - RNA, 32 nt, Human
cuagacacugcaaccucuugcucguaucccag

SEQ ID NO: 126586 - RNA, 32 nt, Human
cuagacagauacaguggagauagcuuucaaac

SEQ ID NO: 126587 - RNA, 32 nt, Human
cuagacagcccccauucucaauccacccuuuu

SEQ ID NO: 126588 - RNA, 32 nt, Human
cuagacagcugcugggguaggaagcacaggca

SEQ ID NO: 126589 - RNA, 32 nt, Human
cuagacaggcugucccaccccaggguggcuag

SEQ ID NO: 126590 - RNA, 32 nt, Human
cuagacaggguuucaccauguuggcuaggaua

SEQ ID NO: 126591 - RNA, 32 nt, Human
cuagacaggucggcaggagaccagcugcucua

SEQ ID NO: 126592 - RNA, 22 nt, Human
cuagacauacacauucaacuga

SEQ ID NO: 126593 - RNA, 18 nt, Human
cuagacauacggugcaaa

SEQ ID NO: 126594 - RNA, 18 nt, Human
cuagacauucuuauuaaa

SEQ ID NO: 126595 - RNA, 17 nt, Human
cuagacauuuacccaaa

SEQ ID NO: 126596 - RNA, 26 nt, Human
cuagaccaaaaaucaggaaacauggc

SEQ ID NO: 126597 - RNA, 24 nt, Human
cuagaccagccgagcugcaagggc

SEQ ID NO: 126598 - RNA, 23 nt, Human
cuagaccagccugaccaacaugg

SEQ ID NO: 126599 - RNA, 24 nt, Human
cuagaccagccugaccaacauggu

SEQ ID NO: 126600 - RNA, 22 nt, Human
cuagaccagccuggccaacaug

SEQ ID NO: 126601 - RNA, 24 nt, Human
cuagaccagccuggccaacauggu

SEQ ID NO: 126602 - RNA, 32 nt, Human
cuagaccagccuggccagcauggugaaaaccu

SEQ ID NO: 126603 - RNA, 32 nt, Human
cuagaccagccuggccagcauggugaaacccc

SEQ ID NO: 126604 - RNA, 24 nt, Human
cuagaccagccugggcaacauagc

SEQ ID NO: 126605 - RNA, 24 nt, Human
cuagaccagccugggcaacauagu

SEQ ID NO: 126606 - RNA, 24 nt, Human
cuagaccagccuggucaacauggc

SEQ ID NO: 126607 - RNA, 32 nt, Human
cuagaccagcugcugaaagcuggugaggcuga

SEQ ID NO: 126608 - RNA, 24 nt, Human
cuagaccagcuuaggcaacauagc

SEQ ID NO: 126609 - RNA, 32 nt, Human
cuagaccaggcuuccccacaugguggucucag

SEQ ID NO: 126610 - RNA, 32 nt, Human
cuagaccauucaaagcuacccgaacuauguug

SEQ ID NO: 126611 - RNA, 32 nt, Human
cuagacccucuucucucccuucggcuucucuc

SEQ ID NO: 126612 - RNA, 32 nt, Human
cuagacccucuuuaaagccaguggaguuugag

SEQ ID NO: 126613 - RNA, 32 nt, Human
cuagacccugccuauuucaucaugucccaagc

SEQ ID NO: 126614 - RNA, 32 nt, Human
cuagaccggagggaggaggaggaggaagaaga

SEQ ID NO: 126615 - RNA, 32 nt, Human
cuagaccucccucuccccaggagccccagccc

SEQ ID NO: 126616 - RNA, 32 nt, Human
cuagaccucccuggagccuguggagaagccaa

SEQ ID NO: 126617 - RNA, 17 nt, Human
cuagaccugcccuucgc

SEQ ID NO: 126618 - RNA, 32 nt, Human
cuagaccuuacaguaaauuagcauuaaaugca

SEQ ID NO: 126619 - RNA, 32 nt, Human
cuagaccuuuggaaggugagagcagggcccug

SEQ ID NO: 126620 - RNA, 32 nt, Human
cuagacgaauggagaugcaggagcugcgggag

SEQ ID NO: 126621 - RNA, 32 nt, Human
cuagacgaguuaccagaagauguggauucuag

SEQ ID NO: 126622 - RNA, 32 nt, Human
cuagacggugcugggagcgcgucuccuugaac

SEQ ID NO: 126623 - RNA, 32 nt, Human
cuagacguuaaagaccagccugggcaacacag

SEQ ID NO: 126624 - RNA, 32 nt, Human
cuagacucacugcaaccuccaccuccuguguu

SEQ ID NO: 126625 - RNA, 32 nt, Human
cuagacucccuccuccuccaaaucugggcugg

SEQ ID NO: 126626 - RNA, 32 nt, Human
cuagacuccucuuccuccuggaccccauccuc

SEQ ID NO: 126627 - RNA, 32 nt, Human
cuagacucucucagcugauagagcaagggaau

SEQ ID NO: 126628 - RNA, 32 nt, Human
cuagacucuuacagaggugagaaugaagucca

SEQ ID NO: 126629 - RNA, 32 nt, Human
cuagacuggaggccuccgccucccggguucca

SEQ ID NO: 126630 - RNA, 32 nt, Human
cuagacuggcacuggagagcugagagagccuc

SEQ ID NO: 126631 - RNA, 32 nt, Human
cuagacugggcaacauagcaagaccccgucuc

SEQ ID NO: 126632 - RNA, 32 nt, Human
cuagacugugcuacagccugggcgacacagug

SEQ ID NO: 126633 - RNA, 32 nt, Human
cuagacugugggcugcaugggggcaggguggg

SEQ ID NO: 126634 - RNA, 32 nt, Human
cuagacuugcugauauuuaccucucucuuguc

SEQ ID NO: 126635 - RNA, 32 nt, Human
cuagagaauggcuguagguggcggcugagaag

SEQ ID NO: 126636 - RNA, 32 nt, Human
cuagagacagcccagccugggccauggaagaa

SEQ ID NO: 126637 - RNA, 32 nt, Human
cuagagacaggagaagcagaaauaaguugacc

SEQ ID NO: 126638 - RNA, 32 nt, Human
cuagagaccaaucauauaucugaaaagaaaua

SEQ ID NO: 126639 - RNA, 32 nt, Human
cuagagaccacuguuguuguuuugagugaaug

SEQ ID NO: 126640 - RNA, 32 nt, Human
cuagagaccagccuggucaacauggugaaacc

SEQ ID NO: 126641 - RNA, 32 nt, Human
cuagagacccuccagcccccaaggggaggauu

SEQ ID NO: 126642 - RNA, 32 nt, Human
cuagagacccugacaucuccuccagcagcauc

SEQ ID NO: 126643 - RNA, 32 nt, Human
cuagagacucgggggugucugaagggggcccc

SEQ ID NO: 126644 - RNA, 32 nt, Human
cuagagagagcaucugagcugaaggaguggga

SEQ ID NO: 126645 - RNA, 32 nt, Human
cuagagagcaggagugccuggccaggucgguc

SEQ ID NO: 126646 - RNA, 32 nt, Human
cuagagaggagaagaagaaagcggaaaagagg

SEQ ID NO: 126647 - RNA, 32 nt, Human
cuagagaguuuucuuuagaagugacucccauu

SEQ ID NO: 126648 - RNA, 32 nt, Human
cuagagauaaggugagaucaccuugguuuugu

SEQ ID NO: 126649 - RNA, 32 nt, Human
cuagagauacccugagguucaugucaucccaa

SEQ ID NO: 126650 - RNA, 32 nt, Human
cuagagaugcccaucuggagugagugcaggac

SEQ ID NO: 126651 - RNA, 32 nt, Human
cuagagaugcugcugccgcgguugcaguuguc

SEQ ID NO: 126652 - RNA, 32 nt, Human
cuagagauggacauauugaauuucucaggacu

SEQ ID NO: 126653 - RNA, 32 nt, Human
cuagagauucagcaucuccaggauccucaugu

SEQ ID NO: 126654 - RNA, 32 nt, Human
cuagagauuuauauaggauggaaguaauuuau

SEQ ID NO: 126655 - RNA, 17 nt, Human
cuagagcacccaccucu

SEQ ID NO: 126656 - RNA, 32 nt, Human
cuagagcaccugcuauccccaacuucuagacc

SEQ ID NO: 126657 - RNA, 32 nt, Human
cuagagcacugcaaauuuucaccuacuuuguc

SEQ ID NO: 126658 - RNA, 32 nt, Human
cuagagcagagcagagcagcugugggcuggug

SEQ ID NO: 126659 - RNA, 32 nt, Human
cuagagcagagcagcccuucucccacaagccc

SEQ ID NO: 126660 - RNA, 32 nt, Human
cuagagcagcagagaagagagacucagaagcc

SEQ ID NO: 126661 - RNA, 32 nt, Human
cuagagcagugucacaagcuucaguaaggcca

SEQ ID NO: 126662 - RNA, 32 nt, Human
cuagagccagagugccuggguuugagccucgu

SEQ ID NO: 126663 - RNA, 32 nt, Human
cuagagccagcccuagcaaaugugugaguugg

SEQ ID NO: 126664 - RNA, 32 nt, Human
cuagagccaugaaacccacagacuuggugccu

SEQ ID NO: 126665 - RNA, 32 nt, Human
cuagagccauucucuuuaaccgucugcagguc

SEQ ID NO: 126666 - RNA, 32 nt, Human
cuagagccauuguggaacugcagccaugaggu

SEQ ID NO: 126667 - RNA, 32 nt, Human
cuagagcccagugcuggcuggguucgggcacg

SEQ ID NO: 126668 - RNA, 32 nt, Human
cuagagcccauuccucuuucuccaccgucacc

SEQ ID NO: 126669 - RNA, 32 nt, Human
cuagagcccccaaagucaggcagcagcuggag

SEQ ID NO: 126670 - RNA, 18 nt, Human
cuagagcccggcuuccag

SEQ ID NO: 126671 - RNA, 31 nt, Human
cuagagccgggauacuuucagaugcucgccu

SEQ ID NO: 126672 - RNA, 22 nt, Human
cuagagccucaaagcuuccagg

SEQ ID NO: 126673 - RNA, 32 nt, Human
cuagagccucaaagcuuccaggccaagacaag

SEQ ID NO: 126674 - RNA, 32 nt, Human
cuagagccucaaggucucccaguccagaaaca

SEQ ID NO: 126675 - RNA, 32 nt, Human
cuagagccugggaaggaagugggggccccggg

SEQ ID NO: 126676 - RNA, 32 nt, Human
cuagagccugggaccuggccauccucugccag

SEQ ID NO: 126677 - RNA, 32 nt, Human
cuagagccuucagccuuaauggaagguuggau

SEQ ID NO: 126678 - RNA, 32 nt, Human
cuagagcgcccuccgccccaacuucugacuuu

SEQ ID NO: 126679 - RNA, 32 nt, Human
cuagagcucacuuugacccucaauauguucau

SEQ ID NO: 126680 - RNA, 22 nt, Human
cuagagcugcaaguccugccag

SEQ ID NO: 126681 - RNA, 32 nt, Human
cuagagcuggaaggcaggaugaggagagguau

SEQ ID NO: 126682 - RNA, 32 nt, Human
cuagagcuucaauucauccaccucucaggaca

SEQ ID NO: 126683 - RNA, 22 nt, Human
cuagagcuuuccuccuccagga

SEQ ID NO: 126684 - RNA, 32 nt, Human
cuagaggaaaaaugauuggaugaguuuauucu

SEQ ID NO: 126685 - RNA, 32 nt, Human
cuagaggaccagggcuacaucuuccuuggaca

SEQ ID NO: 126686 - RNA, 32 nt, Human
cuagaggaccugccaagccaugagcaguguuu

SEQ ID NO: 126687 - RNA, 32 nt, Human
cuagaggagcagcaucccagguaguuuggcuu

SEQ ID NO: 126688 - RNA, 32 nt, Human
cuagaggaucggggagaaggagcauucgccgg

SEQ ID NO: 126689 - RNA, 32 nt, Human
cuagaggauuuuuggaauaaauaaucuauuuu

SEQ ID NO: 126690 - RNA, 32 nt, Human
cuagaggcaagccaggccagggagcugggagc

SEQ ID NO: 126691 - RNA, 19 nt, Human
cuagaggcaucaccuggga

SEQ ID NO: 126692 - RNA, 32 nt, Human
cuagaggccaggcagaagcagcauggguuucc

SEQ ID NO: 126693 - RNA, 32 nt, Human
cuagaggccgguuccuggucugugcugcucuc

SEQ ID NO: 126694 - RNA, 32 nt, Human
cuagaggcuauuccuaggccucaggccuccca

SEQ ID NO: 126695 - RNA, 32 nt, Human
cuagaggcugcggcggaggggagaagccuggu

SEQ ID NO: 126696 - RNA, 22 nt, Human
cuagaggcugguuuugguccug

SEQ ID NO: 126697 - RNA, 32 nt, Human
cuagagggagaacggaaagcugaggugacugc

SEQ ID NO: 126698 - RNA, 32 nt, Human
cuagagggagccaagaggauggggugggggcc

SEQ ID NO: 126699 - RNA, 32 nt, Human
cuagagggagggagggagggcaggguggaggg

SEQ ID NO: 126700 - RNA, 32 nt, Human
cuagagggauccaccgccacacuggccggccc

SEQ ID NO: 126701 - RNA, 32 nt, Human
cuagagggcaacauuuagauacaggaaaauuu

SEQ ID NO: 126702 - RNA, 32 nt, Human
cuagagggggaagaggagagacccccaacaag

SEQ ID NO: 126703 - RNA, 32 nt, Human
cuagagggugcauggcccugccaguaccuuga

SEQ ID NO: 126704 - RNA, 32 nt, Human
cuagagguccuugagccccuccuuccucagga

SEQ ID NO: 126705 - RNA, 32 nt, Human
cuagaggucucgagcucuggcagaggaggacc

SEQ ID NO: 126706 - RNA, 32 nt, Human
cuagaggugggagggggcaagaggccuccuug

SEQ ID NO: 126707 - RNA, 32 nt, Human
cuagaguaaugccacaaugcugcucccuuuua

SEQ ID NO: 126708 - RNA, 32 nt, Human
cuagaguagcugguggccagggaugaaccuug

SEQ ID NO: 126709 - RNA, 32 nt, Human
cuagaguaggugcagaagugguaggucagcua

SEQ ID NO: 126710 - RNA, 32 nt, Human
cuagaguauugccuaguacagaguaggaauuc

SEQ ID NO: 126711 - RNA, 32 nt, Human
cuagagucaacaguccagaaccccuauccgua

SEQ ID NO: 126712 - RNA, 32 nt, Human
cuagagucacacaccccuucccucaucaggca

SEQ ID NO: 126713 - RNA, 32 nt, Human
cuagaguccaagagaauccugaugaucagaga

SEQ ID NO: 126714 - RNA, 32 nt, Human
cuagaguccaagguuuaaagagucuagauuca

SEQ ID NO: 126715 - RNA, 32 nt, Human
cuagagucucucccccuccccuuucucuuucu

SEQ ID NO: 126716 - RNA, 32 nt, Human
cuagagucugcucuccacacuugauccuugcu

SEQ ID NO: 126717 - RNA, 32 nt, Human
cuagagugacauagcaagacuccgaugcuaca

SEQ ID NO: 126718 - RNA, 32 nt, Human
cuagagugaguaaggaauagagccaaaugagg

SEQ ID NO: 126719 - RNA, 32 nt, Human
cuagagugguuuccaucucacagagaaucaga

SEQ ID NO: 126720 - RNA, 32 nt, Human
cuagaguuccucaugagcuuguccucaagcga

SEQ ID NO: 126721 - RNA, 32 nt, Human
cuagaguuuacucccaggccagggggcugcca

SEQ ID NO: 126722 - RNA, 32 nt, Human
cuagaguuucuauucaucauuuuaaccgcauu

SEQ ID NO: 126723 - RNA, 32 nt, Human
cuagauaacaucuaaccagcaguuucuuuuag

SEQ ID NO: 126724 - RNA, 32 nt, Human
cuagauaauucuccagauaccaaggaugccag

SEQ ID NO: 126725 - RNA, 32 nt, Human
cuagauacaucacauuaaagcuuuucagaauc

SEQ ID NO: 126726 - RNA, 32 nt, Human
cuagauaccauacuguaucauaauccuauuau

SEQ ID NO: 126727 - RNA, 32 nt, Human
cuagauagauaaccucaccccaaucacaggcu

SEQ ID NO: 126728 - RNA, 32 nt, Human
cuagauagcauuuaucccucuggugggggaau

SEQ ID NO: 126729 - RNA, 32 nt, Human
cuagauaggauuauaaagcaagacugauuucu

SEQ ID NO: 126730 - RNA, 32 nt, Human
cuagauaggauuucaccauguugcccaggcug

SEQ ID NO: 126731 - RNA, 25 nt, Human
cuagauaugccuauuuugugagccu

SEQ ID NO: 126732 - RNA, 32 nt, Human
cuagauaugggacccuggcaagugaccaaauc

SEQ ID NO: 126733 - RNA, 32 nt, Human
cuagaucaagagucuugagguucagucauuuc

SEQ ID NO: 126734 - RNA, 32 nt, Human
cuagaucauaaauuaaucaaaaugcacuuuuu

SEQ ID NO: 126735 - RNA, 32 nt, Human
cuagaucccucacaugugccguucacaacagg

SEQ ID NO: 126736 - RNA, 32 nt, Human
cuagauccuaggaauucagugagacccuggga

SEQ ID NO: 126737 - RNA, 32 nt, Human
cuagauccucaacuugaccucccaggcccagg

SEQ ID NO: 126738 - RNA, 32 nt, Human
cuagauccuugaggaaucuuugucuuccacaa

SEQ ID NO: 126739 - RNA, 32 nt, Human
cuagaucgcgccacugcacuccagccugggcg

SEQ ID NO: 126740 - RNA, 32 nt, Human
cuagaucgcgucacugcacuccagccugggag

SEQ ID NO: 126741 - RNA, 32 nt, Human
cuagaucgcgucacugcacuccagccugggcg

SEQ ID NO: 126742 - RNA, 32 nt, Human
cuagaucgugccacugcauuccagccugagcg

SEQ ID NO: 126743 - RNA, 32 nt, Human
cuagaucgugccauugcacuccagucugggag

SEQ ID NO: 126744 - RNA, 32 nt, Human
cuagaucgugccauuguacuccugccuaggug

SEQ ID NO: 126745 - RNA, 32 nt, Human
cuagaucuccuucacauacuucacuaucagca

SEQ ID NO: 126746 - RNA, 32 nt, Human
cuagaucugcagcuugccacaucagcuuaaaa

SEQ ID NO: 126747 - RNA, 32 nt, Human
cuagaucuucaguaucauaaaaaggcagagcu

SEQ ID NO: 126748 - RNA, 32 nt, Human
cuagaucuucauucuuuuccccucucuuuucu

SEQ ID NO: 126749 - RNA, 32 nt, Human
cuagaugaucaacauaauggaccacuccugaa

SEQ ID NO: 126750 - RNA, 19 nt, Human
cuagaugccaguagcaucc

SEQ ID NO: 126751 - RNA, 32 nt, Human
cuagaugcugaaaagacugaaaggaggcaagg

SEQ ID NO: 126752 - RNA, 32 nt, Human
cuagaugcugggaaguccaagaucagggugcc

SEQ ID NO: 126753 - RNA, 32 nt, Human
cuagaugcugugacagguaugccaccaacacu

SEQ ID NO: 126754 - RNA, 32 nt, Human
cuagauggagucuugcucugucaccaggcugg

SEQ ID NO: 126755 - RNA, 32 nt, Human
cuagauggcugccugcuuuccugggcacucau

SEQ ID NO: 126756 - RNA, 32 nt, Human
cuagaugggaaagaaagcucagcaggaacugg

SEQ ID NO: 126757 - RNA, 32 nt, Human
cuagaugggaccccaaggacaccgaacaguua

SEQ ID NO: 126758 - RNA, 32 nt, Human
cuagauggguggaucacuugagcucaggaguu

SEQ ID NO: 126759 - RNA, 32 nt, Human
cuagauguagccucuguuccuccuggacauag

SEQ ID NO: 126760 - RNA, 32 nt, Human
cuagaugucauuguuuccagagaaggagaaaa

SEQ ID NO: 126761 - RNA, 32 nt, Human
cuagaugucucacaggacaggagggagugagg

SEQ ID NO: 126762 - RNA, 32 nt, Human
cuagaugugccuucccgcuuggcuuccagcgg

SEQ ID NO: 126763 - RNA, 32 nt, Human
cuagauguggaaugacaauaccagcccuggac

SEQ ID NO: 126764 - RNA, 32 nt, Human
cuagaugugucccuucauguaagugagaggga

SEQ ID NO: 126765 - RNA, 32 nt, Human
cuagaugugugugugcacacacacagaaacca

SEQ ID NO: 126766 - RNA, 32 nt, Human
cuagauuaucuauuuuucucccaugauaacua

SEQ ID NO: 126767 - RNA, 32 nt, Human
cuagauucaguuaugaauguaggcauuaguua

SEQ ID NO: 126768 - RNA, 32 nt, Human
cuagauucuuaaccuccagaccuucacugucc

SEQ ID NO: 126769 - RNA, 32 nt, Human
cuagauugcaccauugcacucuagccuggcaa

SEQ ID NO: 126770 - RNA, 32 nt, Human
cuagauugcccaggucugggcugaauaaaaca

SEQ ID NO: 126771 - RNA, 32 nt, Human
cuagauugcgcuacugcacuccagccuaggca

SEQ ID NO: 126772 - RNA, 32 nt, Human
cuagauuuaaggccacugugaggagagggguu

SEQ ID NO: 126773 - RNA, 32 nt, Human
cuagauuuacaauuugaugaacacuaaauauu

SEQ ID NO: 126774 - RNA, 32 nt, Human
cuagauuuuaacauuuucagaaacuuagugau

SEQ ID NO: 126775 - RNA, 32 nt, Human
cuagcaaaaauacaaaaauuagucaggagugg

SEQ ID NO: 126776 - RNA, 32 nt, Human
cuagcaaaagagaccucacucuucucuugcuu

SEQ ID NO: 126777 - RNA, 32 nt, Human
cuagcaaagaagugugaccauucuuucggaau

SEQ ID NO: 126778 - RNA, 32 nt, Human
cuagcaaauacacaacuugauauuucuagaga

SEQ ID NO: 126779 - RNA, 32 nt, Human
cuagcaaauucuaccuuauuuuacagaaguga

SEQ ID NO: 126780 - RNA, 32 nt, Human
cuagcaacaugaucacuguccuugccuuccug

SEQ ID NO: 126781 - RNA, 32 nt, Human
cuagcaacucuugaggaaacaagugcaaagga

SEQ ID NO: 126782 - RNA, 32 nt, Human
cuagcaacuguaaacuguugcucagugagaau

SEQ ID NO: 126783 - RNA, 32 nt, Human
cuagcaacuucuagguccuaaaaaccucaauu

SEQ ID NO: 126784 - RNA, 32 nt, Human
cuagcaagccacuucaggaaauucuuuuggag

SEQ ID NO: 126785 - RNA, 32 nt, Human
cuagcaauaaaaauuauucuguuucuuuaaaa

SEQ ID NO: 126786 - RNA, 32 nt, Human
cuagcaauaacugagagccaguuaauuuuaag

SEQ ID NO: 126787 - RNA, 32 nt, Human
cuagcaauaaggugacuuacaguuguauaaac

SEQ ID NO: 126788 - RNA, 32 nt, Human
cuagcaaucacuuuuacuuuuuguaauucugu

SEQ ID NO: 126789 - RNA, 32 nt, Human
cuagcacacaugcacaagacauaguucaaaua

SEQ ID NO: 126790 - RNA, 32 nt, Human
cuagcacaccacugcaugucucuagaaugcug

SEQ ID NO: 126791 - RNA, 32 nt, Human
cuagcacacugccaccaucucaaagccauccc

SEQ ID NO: 126792 - RNA, 32 nt, Human
cuagcacaggaggaagagaugggcagggagag

SEQ ID NO: 126793 - RNA, 32 nt, Human
cuagcaccucuuggcucccugccaucagccag

SEQ ID NO: 126794 - RNA, 32 nt, Human
cuagcaccugcucuuggccuggugagccccuc

SEQ ID NO: 126795 - RNA, 32 nt, Human
cuagcacgaaucacugcacccagccuauggaa

SEQ ID NO: 126796 - RNA, 32 nt, Human
cuagcacguccuugccuucuugggagcuccaa

SEQ ID NO: 126797 - RNA, 32 nt, Human
cuagcacuucaccaccuccuucaucuucuccu

SEQ ID NO: 126798 - RNA, 32 nt, Human
cuagcacuugggaggcaguggcaggcggauca

SEQ ID NO: 126799 - RNA, 32 nt, Human
cuagcagaaagccaggcauggaguaggugauc

SEQ ID NO: 126800 - RNA, 32 nt, Human
cuagcagaaauguaaauuauuucaaguacuuc

SEQ ID NO: 126801 - RNA, 32 nt, Human
cuagcagaaauguugaaccucucagaggaugc

SEQ ID NO: 126802 - RNA, 32 nt, Human
cuagcagacccccgagagggugcaguggagcc

SEQ ID NO: 126803 - RNA, 32 nt, Human
cuagcagaggcugaguuuaggacagcagcuuc

SEQ ID NO: 126804 - RNA, 32 nt, Human
cuagcagaggucaccugaagugugugaggagg

SEQ ID NO: 126805 - RNA, 32 nt, Human
cuagcagcaaagcuugugaugcacugacuugg

SEQ ID NO: 126806 - RNA, 32 nt, Human
cuagcagcagaggcuucaccgcaucaccaccc

SEQ ID NO: 126807 - RNA, 32 nt, Human
cuagcagcagggacggugcagggaaaggagcc

SEQ ID NO: 126808 - RNA, 32 nt, Human
cuagcagcaucccugcagcaggcacagagcca

SEQ ID NO: 126809 - RNA, 32 nt, Human
cuagcagccaagcaagcacuggcugugagaga

SEQ ID NO: 126810 - RNA, 19 nt, Human
cuagcagccaggccuccca

SEQ ID NO: 126811 - RNA, 32 nt, Human
cuagcagccaguccuccuccauccuggggucg

SEQ ID NO: 126812 - RNA, 32 nt, Human
cuagcagcccucucucucagcuuagcaguucg

SEQ ID NO: 126813 - RNA, 32 nt, Human
cuagcagccugaagaacucuaagccagauggg

SEQ ID NO: 126814 - RNA, 32 nt, Human
cuagcagcuagcaagggugcuuguagucacac

SEQ ID NO: 126815 - RNA, 31 nt, Human
cuagcagcuucucccaugcuaagugaaucug

SEQ ID NO: 126816 - RNA, 32 nt, Human
cuagcagcuuugcccgccuagcaacaugucgc

SEQ ID NO: 126817 - RNA, 32 nt, Human
cuagcaggaagaggacaaagagacagagccca

SEQ ID NO: 126818 - RNA, 32 nt, Human
cuagcaggugugguaggagcacgccccagaag

SEQ ID NO: 126819 - RNA, 32 nt, Human
cuagcagugcacuggcgggucucuccaugcag

SEQ ID NO: 126820 - RNA, 32 nt, Human
cuagcaguucgagaccagccugggcaacacag

SEQ ID NO: 126821 - RNA, 32 nt, Human
cuagcaguuugagcccagccuaggcaacauag

SEQ ID NO: 126822 - RNA, 32 nt, Human
cuagcauacugaugccacugugcugcaucuua

SEQ ID NO: 126823 - RNA, 32 nt, Human
cuagcauaggagcaaggaaucagagguggggu

SEQ ID NO: 126824 - RNA, 32 nt, Human
cuagcaucaacuuauaaguccaaagucucacc

SEQ ID NO: 126825 - RNA, 32 nt, Human
cuagcauccucuuaaugugcagcaaaagcagg

SEQ ID NO: 126826 - RNA, 32 nt, Human
cuagcaucucaacacuucaugauugucuccca

SEQ ID NO: 126827 - RNA, 32 nt, Human
cuagcaucucucauaggugcaaccugagagug

SEQ ID NO: 126828 - RNA, 32 nt, Human
cuagcaugagccaccaugccuggccuauaauu

SEQ ID NO: 126829 - RNA, 32 nt, Human
cuagcaugccuguguucccagcuacuugggag

SEQ ID NO: 126830 - RNA, 20 nt, Human
cuagcauggugaaaccccgu

SEQ ID NO: 126831 - RNA, 21 nt, Human
cuagcauuugugucgggcuca

SEQ ID NO: 126832 - RNA, 32 nt, Human
cuagccaacaucgugaaaccccaucucuacua

SEQ ID NO: 126833 - RNA, 32 nt, Human
cuagccaacauggugaaaacccaucuguacua

SEQ ID NO: 126834 - RNA, 32 nt, Human
cuagccaacauggugaaaccccaucuguacua

SEQ ID NO: 126835 - RNA, 32 nt, Human
cuagccaacauggugaaacccccgucucgacu

SEQ ID NO: 126836 - RNA, 32 nt, Human
cuagccaacauggugaaaccccgucucuauua

SEQ ID NO: 126837 - RNA, 32 nt, Human
cuagccaacauggugaaaccccgucucuucua

SEQ ID NO: 126838 - RNA, 32 nt, Human
cuagccaacauggugaaaccucgccucuacua

SEQ ID NO: 126839 - RNA, 30 nt, Human
cuagccaacauggugaaaucccaucucuac

SEQ ID NO: 126840 - RNA, 32 nt, Human
cuagccaacauggugaacuaccaucucuacua

SEQ ID NO: 126841 - RNA, 32 nt, Human
cuagccaacaugguguaaacacugucucuacu

SEQ ID NO: 126842 - RNA, 32 nt, Human
cuagccaagauggugaaaccccaucucuacua

SEQ ID NO: 126843 - RNA, 32 nt, Human
cuagccaagauggugaaaccccgucucuagua

SEQ ID NO: 126844 - RNA, 32 nt, Human
cuagccaagauugacuguauuagaugaaaugu

SEQ ID NO: 126845 - RNA, 32 nt, Human
cuagccacagagucugagauucugaguucagc

SEQ ID NO: 126846 - RNA, 32 nt, Human
cuagccacccaccacacugauccagcccugag

SEQ ID NO: 126847 - RNA, 31 nt, Human
cuagccacucacuucugacagacagaagcca

SEQ ID NO: 126848 - RNA, 32 nt, Human
cuagccacugcuuucuccucugugccauccac

SEQ ID NO: 126849 - RNA, 32 nt, Human
cuagccacugugcuccagccugggcaacacca

SEQ ID NO: 126850 - RNA, 32 nt, Human
cuagccagaacugggguacagccugggcucag

SEQ ID NO: 126851 - RNA, 32 nt, Human
cuagccagcaugcuagugaaaggcuagcagcg

SEQ ID NO: 126852 - RNA, 32 nt, Human
cuagccagccaaggauaccggacacaccucug

SEQ ID NO: 126853 - RNA, 32 nt, Human
cuagccagccuggacuuuggagcguggggugg

SEQ ID NO: 126854 - RNA, 32 nt, Human
cuagccagcggcacggagacccugccagcagc

SEQ ID NO: 126855 - RNA, 32 nt, Human
cuagccagcuuccucgcaucuucaccagcauu

SEQ ID NO: 126856 - RNA, 32 nt, Human
cuagccaggcugggcugccagugccaugcaag

SEQ ID NO: 126857 - RNA, 32 nt, Human
cuagccauaauuccucccuuguuucgauugcc

SEQ ID NO: 126858 - RNA, 32 nt, Human
cuagccaucuccaggagacaggaucaguuuua

SEQ ID NO: 126859 - RNA, 32 nt, Human
cuagccauuuuagggcaccaaaacuugggauu

SEQ ID NO: 126860 - RNA, 32 nt, Human
cuagcccaaagcaggccucuuugguugcuuuu

SEQ ID NO: 126861 - RNA, 23 nt, Human
cuagcccaagccugucuuuccca

SEQ ID NO: 126862 - RNA, 32 nt, Human
cuagcccagccgccauggcgcaggguuucgca

SEQ ID NO: 126863 - RNA, 28 nt, Human
cuagcccagcgcucugccucaccgcuuc

SEQ ID NO: 126864 - RNA, 32 nt, Human
cuagcccagcugguauaaucucugugccucag

SEQ ID NO: 126865 - RNA, 32 nt, Human
cuagcccaggaaugacuccucacacuuucacc

SEQ ID NO: 126866 - RNA, 32 nt, Human
cuagcccaggagagagaaagccaggcagguag

SEQ ID NO: 126867 - RNA, 32 nt, Human
cuagcccagggacuggagcaggaaaaggaccu

SEQ ID NO: 126868 - RNA, 32 nt, Human
cuagcccaggggaauguauuuuucaaaacaua

SEQ ID NO: 126869 - RNA, 32 nt, Human
cuagcccaucugcagagcaaugacugugcuca

SEQ ID NO: 126870 - RNA, 32 nt, Human
cuagcccauuuuccugauucucuggcuuguca

SEQ ID NO: 126871 - RNA, 32 nt, Human
cuagccccagcaaaggggagucucagcuuucc

SEQ ID NO: 126872 - RNA, 32 nt, Human
cuagccccagcauuucacccagaugcacgucc

SEQ ID NO: 126873 - RNA, 32 nt, Human
cuagccccaucccuccccaugaggggccaaga

SEQ ID NO: 126874 - RNA, 32 nt, Human
cuagcccccuagugggacaaggaccugacccu

SEQ ID NO: 126875 - RNA, 21 nt, Human
cuagcccccucauccggguuc

SEQ ID NO: 126876 - RNA, 32 nt, Human
cuagcccccucuggaauccuucugccuacuga

SEQ ID NO: 126877 - RNA, 32 nt, Human
cuagcccccugcacuccgccgccucagagcca

SEQ ID NO: 126878 - RNA, 23 nt, Human
cuagccccucccagagcaucuca

SEQ ID NO: 126879 - RNA, 32 nt, Human
cuagccccuccccugccuagagcucccucuuu

SEQ ID NO: 126880 - RNA, 22 nt, Human
cuagccccucucucacacauca

SEQ ID NO: 126881 - RNA, 32 nt, Human
cuagccccucucucacacaucacauucccaug

SEQ ID NO: 126882 - RNA, 28 nt, Human
cuagccccucucucauucucuagguuca

SEQ ID NO: 126883 - RNA, 18 nt, Human
cuagccccuguccucuua

SEQ ID NO: 126884 - RNA, 32 nt, Human
cuagccccuucccgucugcccuguguccucac

SEQ ID NO: 126885 - RNA, 23 nt, Human
cuagccccuucccucccagcuca

SEQ ID NO: 126886 - RNA, 32 nt, Human
cuagcccgcccugguccccggcucgcucgcug

SEQ ID NO: 126887 - RNA, 32 nt, Human
cuagcccuaggaaggccaggagcccaguagcc

SEQ ID NO: 126888 - RNA, 32 nt, Human
cuagcccuaucuccuacauggcaggagcauag

SEQ ID NO: 126889 - RNA, 32 nt, Human
cuagcccucacucaguuucugccucacaaagc

SEQ ID NO: 126890 - RNA, 32 nt, Human
cuagcccuccauccucuacagcucagcaucag

SEQ ID NO: 126891 - RNA, 32 nt, Human
cuagcccuccccugugaugguggugguggaua

SEQ ID NO: 126892 - RNA, 22 nt, Human
cuagcccucucccucuaggcuc

SEQ ID NO: 126893 - RNA, 32 nt, Human
cuagcccucucccucuaggcucugccuucgag

SEQ ID NO: 126894 - RNA, 32 nt, Human
cuagcccugaaccuuucacuuuccauuucugc

SEQ ID NO: 126895 - RNA, 32 nt, Human
cuagcccuggggaccuugugaaauacgcagga

SEQ ID NO: 126896 - RNA, 32 nt, Human
cuagcccuuucacccauacacauuuggcucag

SEQ ID NO: 126897 - RNA, 32 nt, Human
cuagccgccucuccugcccugccuuccucuuc

SEQ ID NO: 126898 - RNA, 32 nt, Human
cuagccggagccgcgggugagcgcggcgagcg

SEQ ID NO: 126899 - RNA, 32 nt, Human
cuagccgggagguuggaggagcugaaaacgcc

SEQ ID NO: 126900 - RNA, 32 nt, Human
cuagccguuugcuuggaaaacagucuccgauc

SEQ ID NO: 126901 - RNA, 32 nt, Human
cuagccuacauggugaaaccccuucucuacua

SEQ ID NO: 126902 - RNA, 32 nt, Human
cuagccuacugagauccaugugacauuggagg

SEQ ID NO: 126903 - RNA, 32 nt, Human
cuagccuagugaaaaagaaaagugcucuugag

SEQ ID NO: 126904 - RNA, 32 nt, Human
cuagccuaucagggugcuggcuuugugcauaa

SEQ ID NO: 126905 - RNA, 32 nt, Human
cuagccucaagcaauccacccaccucagccuu

SEQ ID NO: 126906 - RNA, 32 nt, Human
cuagccucaagggauccgcccaccucagucuc

SEQ ID NO: 126907 - RNA, 32 nt, Human
cuagccucaaguguucugcccaccucagccuu

SEQ ID NO: 126908 - RNA, 32 nt, Human
cuagccuccaauucucccacucccucccaaaa

SEQ ID NO: 126909 - RNA, 32 nt, Human
cuagccuccagccucaacuuacuugaugcuug

SEQ ID NO: 126910 - RNA, 32 nt, Human
cuagccucccaaagugcugggauuacagguau

SEQ ID NO: 126911 - RNA, 32 nt, Human
cuagccucccucucccugaucccccaccacug

SEQ ID NO: 126912 - RNA, 32 nt, Human
cuagccuccucaccaccaucugaucuaucuug

SEQ ID NO: 126913 - RNA, 18 nt, Human
cuagccuccuggcuccca

SEQ ID NO: 126914 - RNA, 32 nt, Human
cuagccucuaaagauagagaucaaagacgcug

SEQ ID NO: 126915 - RNA, 32 nt, Human
cuagccucuccaggaaugccuccucccugggc

SEQ ID NO: 126916 - RNA, 32 nt, Human
cuagccucuggcccuccucuucacugccucca

SEQ ID NO: 126917 - RNA, 32 nt, Human
cuagccugaaagagacagcggaaggaguuucc

SEQ ID NO: 126918 - RNA, 31 nt, Human
cuagccugccucucuagguuuuucaauacau

SEQ ID NO: 126919 - RNA, 32 nt, Human
cuagccuggacaacaucgugaaaccuugucuc

SEQ ID NO: 126920 - RNA, 32 nt, Human
cuagccuggaggcugagcaggaagcccuggag

SEQ ID NO: 126921 - RNA, 32 nt, Human
cuagccuggccaacaaguugaaaccuugucuc

SEQ ID NO: 126922 - RNA, 32 nt, Human
cuagccuggccaacaucaugaaaccccgucuc

SEQ ID NO: 126923 - RNA, 32 nt, Human
cuagccuggccaacaugaugaaacccugucuc

SEQ ID NO: 126924 - RNA, 32 nt, Human
cuagccuggccagcauggugaaaccucauccc

SEQ ID NO: 126925 - RNA, 32 nt, Human
cuagccuggcccacucaggaccugcccagccu

SEQ ID NO: 126926 - RNA, 20 nt, Human
cuagccugggcaacaagagc

SEQ ID NO: 126927 - RNA, 32 nt, Human
cuagccugggcaacaagagcgacacuucgucu

SEQ ID NO: 126928 - RNA, 32 nt, Human
cuagccugggcaacaagagugaaacuccguuu

SEQ ID NO: 126929 - RNA, 32 nt, Human
cuagccugggcaacaagagugaaacucugucu

SEQ ID NO: 126930 - RNA, 32 nt, Human
cuagccugggcaacaagagugaaacuuugucu

SEQ ID NO: 126931 - RNA, 32 nt, Human
cuagccugggcaacacagucagacuccauccc

SEQ ID NO: 126932 - RNA, 23 nt, Human
cuagccugggcaacagagcaaga

SEQ ID NO: 126933 - RNA, 32 nt, Human
cuagccugggcaacagagcaagacaccgucuu

SEQ ID NO: 126934 - RNA, 30 nt, Human
cuagccugggcaacagagcaaggcucuguc

SEQ ID NO: 126935 - RNA, 21 nt, Human
cuagccugggcaacagagcga

SEQ ID NO: 126936 - RNA, 19 nt, Human
cuagccugggcaacagagu

SEQ ID NO: 126937 - RNA, 32 nt, Human
cuagccugggcaacagaguaagacuccgucuu

SEQ ID NO: 126938 - RNA, 32 nt, Human
cuagccugggcaacagagugagaccccguuuc

SEQ ID NO: 126939 - RNA, 32 nt, Human
cuagccugggcaacagagugagaucccguuuc

SEQ ID NO: 126940 - RNA, 32 nt, Human
cuagccugggcaacagagugagauccugacuc

SEQ ID NO: 126941 - RNA, 32 nt, Human
cuagccugggcaacagauugagacuugucuca

SEQ ID NO: 126942 - RNA, 32 nt, Human
cuagccugggcaacauaaugagaccccaucua

SEQ ID NO: 126943 - RNA, 32 nt, Human
cuagccugggcaacauaccgagaccccauccc

SEQ ID NO: 126944 - RNA, 32 nt, Human
cuagccugggcaacauagagagacccuaucuc

SEQ ID NO: 126945 - RNA, 32 nt, Human
cuagccugggcaacauagcaagaucccaucua

SEQ ID NO: 126946 - RNA, 32 nt, Human
cuagccugggcaacauagcgagaccucgucuc

SEQ ID NO: 126947 - RNA, 32 nt, Human
cuagccugggcaacauagcgagacugcaucuc

SEQ ID NO: 126948 - RNA, 32 nt, Human
cuagccugggcaacauagugagacucggucuc

SEQ ID NO: 126949 - RNA, 32 nt, Human
cuagccugggcaacaugaugaaaccccaucuc

SEQ ID NO: 126950 - RNA, 32 nt, Human
cuagccugggcaacauggugaaaccccaucuc

SEQ ID NO: 126951 - RNA, 32 nt, Human
cuagccugggcaacauggugagaccccaucuc

SEQ ID NO: 126952 - RNA, 32 nt, Human
cuagccugggcaacccagugagaccccguauc

SEQ ID NO: 126953 - RNA, 24 nt, Human
cuagccugggcaacgagagcgaaa

SEQ ID NO: 126954 - RNA, 32 nt, Human
cuagccugggcaacgagagcgaaacuccgucu

SEQ ID NO: 126955 - RNA, 32 nt, Human
cuagccugggcaacgugaugagacuccgucuc

SEQ ID NO: 126956 - RNA, 32 nt, Human
cuagccugggcaacuugguaaaaccccaucuc

SEQ ID NO: 126957 - RNA, 31 nt, Human
cuagccugggcaauaagagcaagacugucuc

SEQ ID NO: 126958 - RNA, 32 nt, Human
cuagccugggcaauaugaugagacccugucuc

SEQ ID NO: 126959 - RNA, 19 nt, Human
cuagccugggcagcagagu

SEQ ID NO: 126960 - RNA, 23 nt, Human
cuagccugggugacagagcaaga

SEQ ID NO: 126961 - RNA, 32 nt, Human
cuagccuuaacuucagcuggugcaaaacaucu

SEQ ID NO: 126962 - RNA, 32 nt, Human
cuagccuucaggagguggagcucgucgucagc

SEQ ID NO: 126963 - RNA, 32 nt, Human
cuagccuuccucucuuccaaacacagguuccg

SEQ ID NO: 126964 - RNA, 32 nt, Human
cuagccuucucccacagcugccuacaacagag

SEQ ID NO: 126965 - RNA, 32 nt, Human
cuagccuugacaccgccuacugcuccaccacc

SEQ ID NO: 126966 - RNA, 24 nt, Human
cuagccuuugauuuuacaggcuca

SEQ ID NO: 126967 - RNA, 32 nt, Human
cuagcgacccccaggagcacugagugaacaug

SEQ ID NO: 126968 - RNA, 32 nt, Human
cuagcgcaauugaaggaucaucugaaggggca

SEQ ID NO: 126969 - RNA, 18 nt, Human
cuagcgccgccgccgccg

SEQ ID NO: 126970 - RNA, 32 nt, Human
cuagcggcaauggcugcagaggcuggaagacg

SEQ ID NO: 126971 - RNA, 32 nt, Human
cuagcggcagcccaggcgcggagggagcgagu

SEQ ID NO: 126972 - RNA, 32 nt, Human
cuagcggccucccuccuuuggguucgguaucc

SEQ ID NO: 126973 - RNA, 32 nt, Human
cuagcggcgccacccugccccagccugaggag

SEQ ID NO: 126974 - RNA, 32 nt, Human
cuagcggguaucugcccaccauggcccuggug

SEQ ID NO: 126975 - RNA, 32 nt, Human
cuagcggugccugaggcaucacucuggcccau

SEQ ID NO: 126976 - RNA, 32 nt, Human
cuagcguagcuugggugcaacaagcacagaug

SEQ ID NO: 126977 - RNA, 32 nt, Human
cuagcgugggcaaagacuugggcuuggcaggu

SEQ ID NO: 126978 - RNA, 32 nt, Human
cuagcuaaaccugaauguaccuacuagggcac

SEQ ID NO: 126979 - RNA, 32 nt, Human
cuagcuaacaugguaaaacucugucucuacua

SEQ ID NO: 126980 - RNA, 32 nt, Human
cuagcuaaggaagggaaagggaagugauauca

SEQ ID NO: 126981 - RNA, 32 nt, Human
cuagcuaagggaggaggaggccaggagggagg

SEQ ID NO: 126982 - RNA, 32 nt, Human
cuagcuaaucugguggggacuuggggaaccuu

SEQ ID NO: 126983 - RNA, 32 nt, Human
cuagcuacaguuuuucaaccaccugacaccaa

SEQ ID NO: 126984 - RNA, 32 nt, Human
cuagcuaccaugcacauguacauauccacaga

SEQ ID NO: 126985 - RNA, 20 nt, Human
cuagcuacucagaaggcuga

SEQ ID NO: 126986 - RNA, 32 nt, Human
cuagcuacugaggaggcugacggaggaggauc

SEQ ID NO: 126987 - RNA, 32 nt, Human
cuagcuacugcacuccaaccugggcaacauag

SEQ ID NO: 126988 - RNA, 32 nt, Human
cuagcuaucaagaggcugagacaggagaaaca

SEQ ID NO: 126989 - RNA, 32 nt, Human
cuagcucaaguagucaggagaauaauucugcc

SEQ ID NO: 126990 - RNA, 32 nt, Human
cuagcucacugcaaccuccaacugcugggcuu

SEQ ID NO: 126991 - RNA, 32 nt, Human
cuagcucacugcacucacucuggucaugauaa

SEQ ID NO: 126992 - RNA, 32 nt, Human
cuagcuccauguuccuccuccucucuccccac

SEQ ID NO: 126993 - RNA, 32 nt, Human
cuagcuccauugcagacuuccaaagggucagc

SEQ ID NO: 126994 - RNA, 20 nt, Human
cuagcuccccuccccucucc

SEQ ID NO: 126995 - RNA, 25 nt, Human
cuagcucccugauggucuggguuca

SEQ ID NO: 126996 - RNA, 20 nt, Human
cuagcuccugcacuaggcuc

SEQ ID NO: 126997 - RNA, 32 nt, Human
cuagcuccugcacuaggcucucagccagggau

SEQ ID NO: 126998 - RNA, 23 nt, Human
cuagcuccuuccugcuguaauca

SEQ ID NO: 126999 - RNA, 32 nt, Human
cuagcucgucucaaacuccuggccucaaguga

SEQ ID NO: 127000 - RNA, 32 nt, Human
cuagcucuaucacccaggcugaagugcagugg

SEQ ID NO: 127001 - RNA, 32 nt, Human
cuagcucucacagacauauagaauaaggguuu

SEQ ID NO: 127002 - RNA, 32 nt, Human
cuagcucuccccuaagcuucuugagucuccuu

SEQ ID NO: 127003 - RNA, 32 nt, Human
cuagcucuggaaaggccuuccuggguggggaa

SEQ ID NO: 127004 - RNA, 22 nt, Human
cuagcucuggggguggcggggg

SEQ ID NO: 127005 - RNA, 32 nt, Human
cuagcucugucacccaggcuggagugcagugg

SEQ ID NO: 127006 - RNA, 32 nt, Human
cuagcucugucacccaggcuggagugccauag

SEQ ID NO: 127007 - RNA, 32 nt, Human
cuagcucuguggcccaggcuggcgugcagugg

SEQ ID NO: 127008 - RNA, 32 nt, Human
cuagcucuguugcccaggcuggagugcagugg

SEQ ID NO: 127009 - RNA, 22 nt, Human
cuagcucuucaagccagguuca

SEQ ID NO: 127010 - RNA, 32 nt, Human
cuagcucuucaugguccugaacauugauuuca

SEQ ID NO: 127011 - RNA, 21 nt, Human
cuagcucuugauuccaggcca

SEQ ID NO: 127012 - RNA, 32 nt, Human
cuagcucuugucccuagcugcauuucagugga

SEQ ID NO: 127013 - RNA, 32 nt, Human
cuagcucuuuacugguccaucuuccaaaagac

SEQ ID NO: 127014 - RNA, 32 nt, Human
cuagcugagagcccaggccacagggaguccug

SEQ ID NO: 127015 - RNA, 32 nt, Human
cuagcugaggcaggcggcaggcgcggugcaca

SEQ ID NO: 127016 - RNA, 25 nt, Human
cuagcugagggagagaggugggagg

SEQ ID NO: 127017 - RNA, 32 nt, Human
cuagcugagugguucacaggccagcuggccgg

SEQ ID NO: 127018 - RNA, 32 nt, Human
cuagcugcacaguucucucuucuccuuguccu

SEQ ID NO: 127019 - RNA, 32 nt, Human
cuagcugcacucauuccacuccagcugaaaac

SEQ ID NO: 127020 - RNA, 32 nt, Human
cuagcugcuccagucucagccugggcagcuuc

SEQ ID NO: 127021 - RNA, 23 nt, Human
cuagcugcugccuccuuacuccu

SEQ ID NO: 127022 - RNA, 21 nt, Human
cuagcugcugucuccugcccu

SEQ ID NO: 127023 - RNA, 32 nt, Human
cuagcuggcuagccacuguccaagccuggguc

SEQ ID NO: 127024 - RNA, 32 nt, Human
cuagcugggauuacagcugccugccaccgugc

SEQ ID NO: 127025 - RNA, 32 nt, Human
cuagcugggauuacaggcacaagccaccaugc

SEQ ID NO: 127026 - RNA, 32 nt, Human
cuagcugggauuacaggcgugcgccaccaugu

SEQ ID NO: 127027 - RNA, 32 nt, Human
cuagcugggcuggggccacacgacuauuaugu

SEQ ID NO: 127028 - RNA, 32 nt, Human
cuagcuggucucaaacuccugaccuuaguuga

SEQ ID NO: 127029 - RNA, 32 nt, Human
cuagcugugagugccuuuuggucuggaaaguu

SEQ ID NO: 127030 - RNA, 32 nt, Human
cuagcugugugagcucuucugcccaggugggg

SEQ ID NO: 127031 - RNA, 24 nt, Human
cuagcuguguggaggccacggugg

SEQ ID NO: 127032 - RNA, 23 nt, Human
cuagcuguguggcccugggcagg

SEQ ID NO: 127033 - RNA, 21 nt, Human
cuagcugugugggcugggagg

SEQ ID NO: 127034 - RNA, 32 nt, Human
cuagcuguguuaucagugaggcuccuucuggu

SEQ ID NO: 127035 - RNA, 32 nt, Human
cuagcuuauuucaucuaguccugggcuuuuaa

SEQ ID NO: 127036 - RNA, 32 nt, Human
cuagcuucaugaauaccugaccccuccacucu

SEQ ID NO: 127037 - RNA, 32 nt, Human
cuagcuucccgccucugccccugugaacaccc

SEQ ID NO: 127038 - RNA, 32 nt, Human
cuagcuucuggauccaggucuaggcccuucau

SEQ ID NO: 127039 - RNA, 32 nt, Human
cuagcuugcugcaggucuggguaguuggauca

SEQ ID NO: 127040 - RNA, 32 nt, Human
cuagcuuggccaacauggugaaaccucaucuc

SEQ ID NO: 127041 - RNA, 32 nt, Human
cuagcuugggaggcuuccccucacuauccuac

SEQ ID NO: 127042 - RNA, 32 nt, Human
cuagcuuugcacagacaccucuaccuucagca

SEQ ID NO: 127043 - RNA, 32 nt, Human
cuagcuuugggagccuguuccaccuacucagc

SEQ ID NO: 127044 - RNA, 32 nt, Human
cuagcuuuguggagaaaagaagagucuuugcc

SEQ ID NO: 127045 - RNA, 32 nt, Human
cuagcuuuugcuggaucuggauuugaauucca

SEQ ID NO: 127046 - RNA, 32 nt, Human
cuagcuuuuugcuucucuuuuagaaauacuug

SEQ ID NO: 127047 - RNA, 32 nt, Human
cuaggaaaaaggagagcuuucuuacaugcuua

SEQ ID NO: 127048 - RNA, 32 nt, Human
cuaggaaaagugguccugguuauggguuaugg

SEQ ID NO: 127049 - RNA, 32 nt, Human
cuaggaaagaggaggcagaaagauuuggaaaa

SEQ ID NO: 127050 - RNA, 32 nt, Human
cuaggaaaguuaaggaauuuugaagucauauu

SEQ ID NO: 127051 - RNA, 32 nt, Human
cuaggaacaacaaaauuccauuccccuuccaa

SEQ ID NO: 127052 - RNA, 21 nt, Human
cuaggaacaucccugugcaaa

SEQ ID NO: 127053 - RNA, 32 nt, Human
cuaggaacaugcacuagaugacagauugcggg

SEQ ID NO: 127054 - RNA, 32 nt, Human
cuaggaaccagcugccugagaccagggugccu

SEQ ID NO: 127055 - RNA, 32 nt, Human
cuaggaaccauauggaggugacuuugaggcca

SEQ ID NO: 127056 - RNA, 32 nt, Human
cuaggaacccccagguccuggugcugcaggga

SEQ ID NO: 127057 - RNA, 32 nt, Human
cuaggaaccugaccgggcuggaccccacugug

SEQ ID NO: 127058 - RNA, 32 nt, Human
cuaggaaccuguauacauguguuucauaaccu

SEQ ID NO: 127059 - RNA, 32 nt, Human
cuaggaacuaaaaugccagggccaggcugugu

SEQ ID NO: 127060 - RNA, 32 nt, Human
cuaggaacucaaggagucagccuagaccccac

SEQ ID NO: 127061 - RNA, 32 nt, Human
cuaggaacucuuuccuguaucauaaaggauua

SEQ ID NO: 127062 - RNA, 32 nt, Human
cuaggaacugccucagugucuuugccagaaaa

SEQ ID NO: 127063 - RNA, 32 nt, Human
cuaggaagaccugggccgccagaagcuaaacg

SEQ ID NO: 127064 - RNA, 32 nt, Human
cuaggaagaggaaggggagggauguggacugg

SEQ ID NO: 127065 - RNA, 32 nt, Human
cuaggaagagggggaugcugggaaggaauggg

SEQ ID NO: 127066 - RNA, 32 nt, Human
cuaggaagcaaaacagaccacacuuacuaagc

SEQ ID NO: 127067 - RNA, 32 nt, Human
cuaggaagcugggaccagcugugcaaaacugg

SEQ ID NO: 127068 - RNA, 32 nt, Human
cuaggaagggucaagcggggagagggagugga

SEQ ID NO: 127069 - RNA, 20 nt, Human
cuaggaaguggcagagccag

SEQ ID NO: 127070 - RNA, 32 nt, Human
cuaggaauguaagacucaaucuguagcuagua

SEQ ID NO: 127071 - RNA, 32 nt, Human
cuaggaauguguguucagccuccugagagagg

SEQ ID NO: 127072 - RNA, 32 nt, Human
cuaggaauucaagaccagccuagguaacauag

SEQ ID NO: 127073 - RNA, 32 nt, Human
cuaggaauuggagacuagccugggcaacauac

SEQ ID NO: 127074 - RNA, 32 nt, Human
cuaggaauuguugguguucaagagggagcuga

SEQ ID NO: 127075 - RNA, 32 nt, Human
cuaggacacagcaugcagcagccacacucaca

SEQ ID NO: 127076 - RNA, 32 nt, Human
cuaggacaccaccacccaugccccucuguccc

SEQ ID NO: 127077 - RNA, 32 nt, Human
cuaggacacuggcuggggccacccccuccugc

SEQ ID NO: 127078 - RNA, 32 nt, Human
cuaggacagccauggaugcagugucuggaguu

SEQ ID NO: 127079 - RNA, 32 nt, Human
cuaggaccagccuggacaacauggugagaccu

SEQ ID NO: 127080 - RNA, 32 nt, Human
cuaggacccagagccacacugcagccuccgcc

SEQ ID NO: 127081 - RNA, 32 nt, Human
cuaggacccagugccgcaggccuggaucagac

SEQ ID NO: 127082 - RNA, 32 nt, Human
cuaggacccccuccacggccuggaccucggcu

SEQ ID NO: 127083 - RNA, 32 nt, Human
cuaggacccgaaguucucuccccagcagagac

SEQ ID NO: 127084 - RNA, 32 nt, Human
cuaggacccgaguggaccucaggucuggccag

SEQ ID NO: 127085 - RNA, 32 nt, Human
cuaggaccugcaacuucagugcuucugggaua

SEQ ID NO: 127086 - RNA, 32 nt, Human
cuaggaccuucagaucaacagacuucagaccc

SEQ ID NO: 127087 - RNA, 32 nt, Human
cuaggacgcucuuccagcugaagcagagaaga

SEQ ID NO: 127088 - RNA, 32 nt, Human
cuaggacguucuucugugugcauugcuucugu

SEQ ID NO: 127089 - RNA, 32 nt, Human
cuaggacucacagccaagagcaggugaccuca

SEQ ID NO: 127090 - RNA, 32 nt, Human
cuaggacucaggcuggaggcaauuccuuggug

SEQ ID NO: 127091 - RNA, 32 nt, Human
cuaggacucggccacagagaaccccucuccac

SEQ ID NO: 127092 - RNA, 32 nt, Human
cuaggacugcaacaccuacuccaauguguggg

SEQ ID NO: 127093 - RNA, 32 nt, Human
cuaggacuggggguggggccaauccagggcag

SEQ ID NO: 127094 - RNA, 32 nt, Human
cuaggacuuaaccuugaaauggaaagucuugc

SEQ ID NO: 127095 - RNA, 32 nt, Human
cuaggagaagggcugaacccucagccuugacu

SEQ ID NO: 127096 - RNA, 32 nt, Human
cuaggagagaauguuucagaacucccugauga

SEQ ID NO: 127097 - RNA, 32 nt, Human
cuaggagagagaaaggauuccccugugcuugg

SEQ ID NO: 127098 - RNA, 32 nt, Human
cuaggagagcuagacuaacugcuccagagaag

SEQ ID NO: 127099 - RNA, 32 nt, Human
cuaggagaguaaaccuagcaugugagugagcu

SEQ ID NO: 127100 - RNA, 32 nt, Human
cuaggagaguaggaagagcuguggaggacaca

SEQ ID NO: 127101 - RNA, 32 nt, Human
cuaggagcaccaggaacccagggccuggccuu

SEQ ID NO: 127102 - RNA, 32 nt, Human
cuaggagcaguugccagcaagcauccucaguc

SEQ ID NO: 127103 - RNA, 32 nt, Human
cuaggagcccaggaugggacggcgcaucagcc

SEQ ID NO: 127104 - RNA, 32 nt, Human
cuaggagccgccgccucccucccgcccagcga

SEQ ID NO: 127105 - RNA, 32 nt, Human
cuaggagccugagagcgccgcgccacacccgg

SEQ ID NO: 127106 - RNA, 20 nt, Human
cuaggagcgcaggcccggga

SEQ ID NO: 127107 - RNA, 32 nt, Human
cuaggagcuacaccgaacugugccagaugccc

SEQ ID NO: 127108 - RNA, 32 nt, Human
cuaggagcucagggguggagggcgaugggucg

SEQ ID NO: 127109 - RNA, 32 nt, Human
cuaggagcuccccacuccccucccucuaacag

SEQ ID NO: 127110 - RNA, 32 nt, Human
cuaggagcugggaggaaaagaaaagaggggaa

SEQ ID NO: 127111 - RNA, 32 nt, Human
cuaggaggaggaagagcagcugcuaggggcug

SEQ ID NO: 127112 - RNA, 32 nt, Human
cuaggaggauuuccucaaccacucuccuacuc

SEQ ID NO: 127113 - RNA, 23 nt, Human
cuaggaggcagagguugcaguga

SEQ ID NO: 127114 - RNA, 24 nt, Human
cuaggaggcagagguugcagugag

SEQ ID NO: 127115 - RNA, 32 nt, Human
cuaggaggcaggaagccaagguacagagagca

SEQ ID NO: 127116 - RNA, 32 nt, Human
cuaggaggcccaggcgcaggcaaagagaagau

SEQ ID NO: 127117 - RNA, 32 nt, Human
cuaggaggcccaggcuggagugagguggcacg

SEQ ID NO: 127118 - RNA, 24 nt, Human
cuaggaggcggacguugcagugag

SEQ ID NO: 127119 - RNA, 24 nt, Human
cuaggaggcggagcuugcagugag

SEQ ID NO: 127120 - RNA, 24 nt, Human
cuaggaggcggagguugcagugag

SEQ ID NO: 127121 - RNA, 32 nt, Human
cuaggaggcugaggcaggagaauagcuggaac

SEQ ID NO: 127122 - RNA, 32 nt, Human
cuaggaggcugaggcaggagaaucacuggaac

SEQ ID NO: 127123 - RNA, 32 nt, Human
cuaggagggaaacagggagaccugggguccug

SEQ ID NO: 127124 - RNA, 32 nt, Human
cuaggagggaaaggaagauugagcaacauagg

SEQ ID NO: 127125 - RNA, 32 nt, Human
cuaggagggaggugggaggugggagaggaagg

SEQ ID NO: 127126 - RNA, 32 nt, Human
cuaggaggucuacaaauagcgacuggguagcu

SEQ ID NO: 127127 - RNA, 32 nt, Human
cuaggaggugagaauuccuccucaaauuaacc

SEQ ID NO: 127128 - RNA, 32 nt, Human
cuaggagugggguccacugaugaaaagaggug

SEQ ID NO: 127129 - RNA, 32 nt, Human
cuaggagugguggcucgcaccuguaaucccag

SEQ ID NO: 127130 - RNA, 32 nt, Human
cuaggaguuugagaccagccugggcaacaggg

SEQ ID NO: 127131 - RNA, 32 nt, Human
cuaggaguuugagaccagccugggcaauauag

SEQ ID NO: 127132 - RNA, 32 nt, Human
cuaggaguuugagaccagccugggcgauauag

SEQ ID NO: 127133 - RNA, 32 nt, Human
cuaggaguuugagacuagccugggcaacauaa

SEQ ID NO: 127134 - RNA, 23 nt, Human
cuaggaguuugaggcugcaguga

SEQ ID NO: 127135 - RNA, 32 nt, Human
cuaggauagcaccuggcacacauggugagcac

SEQ ID NO: 127136 - RNA, 32 nt, Human
cuaggaucugggaaugggguggagaggacauc

SEQ ID NO: 127137 - RNA, 32 nt, Human
cuaggaugagagacagagggugugaugguggg

SEQ ID NO: 127138 - RNA, 32 nt, Human
cuaggaugcccagggcugggugcagccagcug

SEQ ID NO: 127139 - RNA, 32 nt, Human
cuaggaugcugaggcccuggcccggacucugg

SEQ ID NO: 127140 - RNA, 32 nt, Human
cuaggaugcuucugccccaggccugccuucca

SEQ ID NO: 127141 - RNA, 30 nt, Human
cuaggauggucaccagcccaagccaccacc

SEQ ID NO: 127142 - RNA, 32 nt, Human
cuaggauggugaaauuccaaaggugccuaacu

SEQ ID NO: 127143 - RNA, 22 nt, Human
cuaggauuacaagcaugagcca

SEQ ID NO: 127144 - RNA, 22 nt, Human
cuaggauuacagacaugagcca

SEQ ID NO: 127145 - RNA, 22 nt, Human
cuaggauuacaggcauaagcca

SEQ ID NO: 127146 - RNA, 22 nt, Human
cuaggauuacaggcaugaacca

SEQ ID NO: 127147 - RNA, 20 nt, Human
cuaggauuacaggcaugagc

SEQ ID NO: 127148 - RNA, 22 nt, Human
cuaggauuacaggcaugagcca

SEQ ID NO: 127149 - RNA, 32 nt, Human
cuaggauuacaggcaugagccacagcacccgg

SEQ ID NO: 127150 - RNA, 22 nt, Human
cuaggauuacaggcgugagcca

SEQ ID NO: 127151 - RNA, 32 nt, Human
cuaggauuacagguguguggccucccacccca

SEQ ID NO: 127152 - RNA, 24 nt, Human
cuaggcaacacagugaaacccugu

SEQ ID NO: 127153 - RNA, 32 nt, Human
cuaggcaacacagugaaacccugucucuacaa

SEQ ID NO: 127154 - RNA, 24 nt, Human
cuaggcaacauagugagacccugu

SEQ ID NO: 127155 - RNA, 32 nt, Human
cuaggcaacauggagaaaccccgucucuauca

SEQ ID NO: 127156 - RNA, 32 nt, Human
cuaggcaacauggcaaaaccccaucucgacaa

SEQ ID NO: 127157 - RNA, 32 nt, Human
cuaggcaacauggcaaaaccccgucucuacaa

SEQ ID NO: 127158 - RNA, 24 nt, Human
cuaggcaacauggcgaaacccugu

SEQ ID NO: 127159 - RNA, 30 nt, Human
cuaggcaacauggcgaaacccugucucuac

SEQ ID NO: 127160 - RNA, 32 nt, Human
cuaggcaacauggugaaacccuaucuuuucua

SEQ ID NO: 127161 - RNA, 24 nt, Human
cuaggcaacauggugaaacccugu

SEQ ID NO: 127162 - RNA, 24 nt, Human
cuaggcaacauggugaaaccuugu

SEQ ID NO: 127163 - RNA, 32 nt, Human
cuaggcaacauggugaaaccuugucucuacca

SEQ ID NO: 127164 - RNA, 24 nt, Human
cuaggcaacauggugaaauccugu

SEQ ID NO: 127165 - RNA, 32 nt, Human
cuaggcaacauggugaaauccugucuuuacca

SEQ ID NO: 127166 - RNA, 32 nt, Human
cuaggcaaccccuuccucccaccucucaucag

SEQ ID NO: 127167 - RNA, 32 nt, Human
cuaggcaagaugaccuguucaucaggaauguu

SEQ ID NO: 127168 - RNA, 32 nt, Human
cuaggcaaggaagaaggaaggagagggcagcg

SEQ ID NO: 127169 - RNA, 32 nt, Human
cuaggcaauagaugcagauuacacuuuccauu

SEQ ID NO: 127170 - RNA, 32 nt, Human
cuaggcacaaaauuaccucauucuuccuaaca

SEQ ID NO: 127171 - RNA, 32 nt, Human
cuaggcacaguggcucaugccuguaauccuag

SEQ ID NO: 127172 - RNA, 32 nt, Human
cuaggcacaucagaucaccuggggaccacucc

SEQ ID NO: 127173 - RNA, 32 nt, Human
cuaggcaccagagagacaagauacgagugaca

SEQ ID NO: 127174 - RNA, 32 nt, Human
cuaggcacuuccuccagccucaggcagccacg

SEQ ID NO: 127175 - RNA, 32 nt, Human
cuaggcagaacagcccccgaucugcauagccu

SEQ ID NO: 127176 - RNA, 32 nt, Human
cuaggcagaucugcaaggcuggcuuuaaaagc

SEQ ID NO: 127177 - RNA, 32 nt, Human
cuaggcagcaucuguccccucugugauucaga

SEQ ID NO: 127178 - RNA, 32 nt, Human
cuaggcagccuccuuggggcccaagcucugcu

SEQ ID NO: 127179 - RNA, 32 nt, Human
cuaggcaggaagcuggcuucugggagaggagu

SEQ ID NO: 127180 - RNA, 32 nt, Human
cuaggcaggcacugcucucugcagaggggguc

SEQ ID NO: 127181 - RNA, 32 nt, Human
cuaggcaggcagcagguccugguuugugagca

SEQ ID NO: 127182 - RNA, 32 nt, Human
cuaggcauccacugcauuuccuuucauuugac

SEQ ID NO: 127183 - RNA, 32 nt, Human
cuaggcaucugaaacuugcuucaucucugacg

SEQ ID NO: 127184 - RNA, 32 nt, Human
cuaggcaucugaaacuuuugcuucaucucuga

SEQ ID NO: 127185 - RNA, 32 nt, Human
cuaggcaucuuccucuuugcagcuggggugcc

SEQ ID NO: 127186 - RNA, 32 nt, Human
cuaggcaugguggcacacgccuguaaucccag

SEQ ID NO: 127187 - RNA, 32 nt, Human
cuaggcaugguggcacaugccuguaaucccag

SEQ ID NO: 127188 - RNA, 32 nt, Human
cuaggcaugguggcucacaccuguaaucccag

SEQ ID NO: 127189 - RNA, 32 nt, Human
cuaggcauuuaaugcauuucacacaucugguu

SEQ ID NO: 127190 - RNA, 32 nt, Human
cuaggcauuucuucccuuccuuccuuccuuca

SEQ ID NO: 127191 - RNA, 32 nt, Human
cuaggccaaaccacaguuuguaccaaaaaccu

SEQ ID NO: 127192 - RNA, 32 nt, Human
cuaggccacugcacaccucuaugccuugcagu

SEQ ID NO: 127193 - RNA, 20 nt, Human
cuaggccagagugcaguggc

SEQ ID NO: 127194 - RNA, 32 nt, Human
cuaggccagauggugaaaccccaucucuacaa

SEQ ID NO: 127195 - RNA, 32 nt, Human
cuaggccagguaggcaacacagagccaaggcg

SEQ ID NO: 127196 - RNA, 32 nt, Human
cuaggcccacgcugccccuggccuguguuagg

SEQ ID NO: 127197 - RNA, 22 nt, Human
cuaggcccccacccugcugcug

SEQ ID NO: 127198 - RNA, 32 nt, Human
cuaggccccucaggagcuuugcagagaggagg

SEQ ID NO: 127199 - RNA, 32 nt, Human
cuaggcccuaaaagguuuuaauucuuuuucua

SEQ ID NO: 127200 - RNA, 32 nt, Human
cuaggcccucaccucaaaccuugccauugguu

SEQ ID NO: 127201 - RNA, 32 nt, Human
cuaggcccuguauucagccucagacugagugg

SEQ ID NO: 127202 - RNA, 32 nt, Human
cuaggcccugucuucagccucagacugagugg

SEQ ID NO: 127203 - RNA, 32 nt, Human
cuaggcccuucuugcacugccaccucacuuuc

SEQ ID NO: 127204 - RNA, 27 nt, Human
cuaggccgggcccugcccuagugccca

SEQ ID NO: 127205 - RNA, 32 nt, Human
cuaggccuaugaaccacaaagcagggaagugg

SEQ ID NO: 127206 - RNA, 32 nt, Human
cuaggccuccacuuguccaucugugaaaugaa

SEQ ID NO: 127207 - RNA, 32 nt, Human
cuaggccucccaaaguccugggauuacaggcg

SEQ ID NO: 127208 - RNA, 32 nt, Human
cuaggccucuccccaucccccucuucuccgca

SEQ ID NO: 127209 - RNA, 32 nt, Human
cuaggccucuccccuuuaccccuccagagaag

SEQ ID NO: 127210 - RNA, 32 nt, Human
cuaggccucuccucagcuccuuaacccuccuc

SEQ ID NO: 127211 - RNA, 28 nt, Human
cuaggccugaccugugccucaucccgug

SEQ ID NO: 127212 - RNA, 17 nt, Human
cuaggccugcuggcucu

SEQ ID NO: 127213 - RNA, 32 nt, Human
cuaggccuggcuucugaggcgguugcggugcu

SEQ ID NO: 127214 - RNA, 32 nt, Human
cuaggccugugccacccgcugccugcaggaag

SEQ ID NO: 127215 - RNA, 32 nt, Human
cuaggccuuagcuugcccuccugccacccuuc

SEQ ID NO: 127216 - RNA, 32 nt, Human
cuaggccuuauccucccucuagguccugccac

SEQ ID NO: 127217 - RNA, 32 nt, Human
cuaggccuugcggcuccucagggacucaggug

SEQ ID NO: 127218 - RNA, 32 nt, Human
cuaggcgcaguggcucaugccuauaaucccgg

SEQ ID NO: 127219 - RNA, 32 nt, Human
cuaggcgcguccuccucugauccccguguaag

SEQ ID NO: 127220 - RNA, 18 nt, Human
cuaggcgcuggggcucag

SEQ ID NO: 127221 - RNA, 32 nt, Human
cuaggcgcuggggcucagcuucccucuuaagc

SEQ ID NO: 127222 - RNA, 32 nt, Human
cuaggcggacacacccugggcccugagcaucc

SEQ ID NO: 127223 - RNA, 32 nt, Human
cuaggcggcuacuugauguaaccacgggcucc

SEQ ID NO: 127224 - RNA, 32 nt, Human
cuaggcggcuucuuccugucagucggaggugg

SEQ ID NO: 127225 - RNA, 32 nt, Human
cuaggcgugguggcacacgccuguaaucacag

SEQ ID NO: 127226 - RNA, 32 nt, Human
cuaggcgugguggcaggugccuguaaucccag

SEQ ID NO: 127227 - RNA, 32 nt, Human
cuaggcgugguggcucacgccuguaaucccag

SEQ ID NO: 127228 - RNA, 32 nt, Human
cuaggcgugguggcugggaccuguaaucccag

SEQ ID NO: 127229 - RNA, 32 nt, Human
cuaggcgugguggugcaugccuguaaucucgg

SEQ ID NO: 127230 - RNA, 32 nt, Human
cuaggcuacaaagaauuacacugugaauucau

SEQ ID NO: 127231 - RNA, 18 nt, Human
cuaggcuaggugcagugg

SEQ ID NO: 127232 - RNA, 32 nt, Human
cuaggcuauacugcucagcuguguggucaaac

SEQ ID NO: 127233 - RNA, 32 nt, Human
cuaggcucaagcaauccucccaucuuagccuc

SEQ ID NO: 127234 - RNA, 32 nt, Human
cuaggcucaagcaauccuuccaccucagucuc

SEQ ID NO: 127235 - RNA, 32 nt, Human
cuaggcucaagcaauucucgugccucagccuc

SEQ ID NO: 127236 - RNA, 32 nt, Human
cuaggcucaagccauccucccaccucagccuc

SEQ ID NO: 127237 - RNA, 32 nt, Human
cuaggcucaagccauuuucccaccucagccuc

SEQ ID NO: 127238 - RNA, 32 nt, Human
cuaggcucaagcgauccucccaccucaaccuc

SEQ ID NO: 127239 - RNA, 32 nt, Human
cuaggcucaagugauccucccaccucagccuc

SEQ ID NO: 127240 - RNA, 32 nt, Human
cuaggcucaagugaucugcccaccucagucuc

SEQ ID NO: 127241 - RNA, 32 nt, Human
cuaggcucacugcaaccucagccuccugggcu

SEQ ID NO: 127242 - RNA, 32 nt, Human
cuaggcucacugcaaccuccaccucccagguu

SEQ ID NO: 127243 - RNA, 32 nt, Human
cuaggcucacugcaaccucugucuccaggguu

SEQ ID NO: 127244 - RNA, 32 nt, Human
cuaggcucacugcaacuuccgccucccggguu

SEQ ID NO: 127245 - RNA, 32 nt, Human
cuaggcucacugcaacuucugccucccaugcu

SEQ ID NO: 127246 - RNA, 32 nt, Human
cuaggcucagccaccugucuccuguccagaaa

SEQ ID NO: 127247 - RNA, 32 nt, Human
cuaggcucagccggaaccagcaccuccaagga

SEQ ID NO: 127248 - RNA, 32 nt, Human
cuaggcucauuccucuccuccaccuuccccua

SEQ ID NO: 127249 - RNA, 32 nt, Human
cuaggcuccaagcucaggaccucaggauggga

SEQ ID NO: 127250 - RNA, 32 nt, Human
cuaggcuccagccaucccacaccagcuccuag

SEQ ID NO: 127251 - RNA, 32 nt, Human
cuaggcucuccaccaagcucuaaacccggguu

SEQ ID NO: 127252 - RNA, 32 nt, Human
cuaggcucucccaggugcaaugugggugcagg

SEQ ID NO: 127253 - RNA, 32 nt, Human
cuaggcucucuaauguccuuggcauugcccag

SEQ ID NO: 127254 - RNA, 32 nt, Human
cuaggcugaaaagacagaaaugacagauauag

SEQ ID NO: 127255 - RNA, 32 nt, Human
cuaggcugacagcaggaagagcagggcccaug

SEQ ID NO: 127256 - RNA, 18 nt, Human
cuaggcugagugcagugg

SEQ ID NO: 127257 - RNA, 32 nt, Human
cuaggcugcccaggcccugccugcuuggcugg

SEQ ID NO: 127258 - RNA, 31 nt, Human
cuaggcugccucucguugccuccaucucgcu

SEQ ID NO: 127259 - RNA, 32 nt, Human
cuaggcugcuccugaauccuguucucugacau

SEQ ID NO: 127260 - RNA, 32 nt, Human
cuaggcugcuucugagcuucagccugggagca

SEQ ID NO: 127261 - RNA, 18 nt, Human
cuaggcuggagugcaaug

SEQ ID NO: 127262 - RNA, 32 nt, Human
cuaggcuggagugcagcggcaugacugcagcc

SEQ ID NO: 127263 - RNA, 18 nt, Human
cuaggcuggagugcagug

SEQ ID NO: 127264 - RNA, 19 nt, Human
cuaggcuggagugcagugg

SEQ ID NO: 127265 - RNA, 32 nt, Human
cuaggcuggagugcaguggcacaaucauggcu

SEQ ID NO: 127266 - RNA, 32 nt, Human
cuaggcuggagugcaguggcacaaucucggcu

SEQ ID NO: 127267 - RNA, 32 nt, Human
cuaggcuggagugcaguggcacaaucuuggcu

SEQ ID NO: 127268 - RNA, 32 nt, Human
cuaggcuggagugcaguggcacagucucuacu

SEQ ID NO: 127269 - RNA, 32 nt, Human
cuaggcuggagugcaguggcgcaaucucaccu

SEQ ID NO: 127270 - RNA, 32 nt, Human
cuaggcuggagugcagugguaaaucucggcuc

SEQ ID NO: 127271 - RNA, 32 nt, Human
cuaggcuggagugcagugguacaaucucggcu

SEQ ID NO: 127272 - RNA, 21 nt, Human
cuaggcuggagugcaguggug

SEQ ID NO: 127273 - RNA, 32 nt, Human
cuaggcuggagugcaguggugugaucauggcu

SEQ ID NO: 127274 - RNA, 20 nt, Human
cuaggcuggaguugcagugg

SEQ ID NO: 127275 - RNA, 32 nt, Human
cuaggcugggcaacaaagcaagacccggucuc

SEQ ID NO: 127276 - RNA, 32 nt, Human
cuaggcuggggucccagguggggcccagccag

SEQ ID NO: 127277 - RNA, 32 nt, Human
cuaggcuguggaccugaauuugcaggagaagc

SEQ ID NO: 127278 - RNA, 32 nt, Human
cuaggcuuaaacacuggcauauauggagagaa

SEQ ID NO: 127279 - RNA, 32 nt, Human
cuaggcuuaagugauccucccgccuuagccuc

SEQ ID NO: 127280 - RNA, 32 nt, Human
cuaggcuuguugaaucucagcuuaguacuuuu

SEQ ID NO: 127281 - RNA, 32 nt, Human
cuaggcuuucuaggggcacugaugucugggcc

SEQ ID NO: 127282 - RNA, 32 nt, Human
cuagggaaugccagaggagcaaggaugcaggg

SEQ ID NO: 127283 - RNA, 32 nt, Human
cuagggacaagauacucacuaggaccaggaag

SEQ ID NO: 127284 - RNA, 32 nt, Human
cuagggacaccguaaguauggaggaggagagc

SEQ ID NO: 127285 - RNA, 32 nt, Human
cuagggacagcagcaccacuccagccucagag

SEQ ID NO: 127286 - RNA, 32 nt, Human
cuagggacauuuuguuuugagacauggucuug

SEQ ID NO: 127287 - RNA, 32 nt, Human
cuagggacgaucgcccaccacacuucugauaa

SEQ ID NO: 127288 - RNA, 32 nt, Human
cuagggacuaacuguugcucuuggugggcuug

SEQ ID NO: 127289 - RNA, 32 nt, Human
cuagggacuagcacugcuaucaauggaaagua

SEQ ID NO: 127290 - RNA, 32 nt, Human
cuagggagagaaaguagggaaggguucauaua

SEQ ID NO: 127291 - RNA, 32 nt, Human
cuagggagcagggagaguggcucgggcucagu

SEQ ID NO: 127292 - RNA, 32 nt, Human
cuagggaggagaaagagaaagauccucagaag

SEQ ID NO: 127293 - RNA, 32 nt, Human
cuagggaguagcagaguggcccuagggaaagu

SEQ ID NO: 127294 - RNA, 32 nt, Human
cuagggagucaggugggggcugugcuggggau

SEQ ID NO: 127295 - RNA, 32 nt, Human
cuagggaugcagggcuggaggccagagguguc

SEQ ID NO: 127296 - RNA, 32 nt, Human
cuagggcacacgcugggcacucagggaccugg

SEQ ID NO: 127297 - RNA, 32 nt, Human
cuagggcacaugcaucagcacauaugugggca

SEQ ID NO: 127298 - RNA, 32 nt, Human
cuagggcacggccuccgaagcugcguguggcc

SEQ ID NO: 127299 - RNA, 32 nt, Human
cuagggcagaaaguguaccuugaguuugcugg

SEQ ID NO: 127300 - RNA, 32 nt, Human
cuagggcaucggcaggagagugugugggcagg

SEQ ID NO: 127301 - RNA, 23 nt, Human
cuagggccacccacccccagccc

SEQ ID NO: 127302 - RNA, 32 nt, Human
cuagggccaggccagccuggggaagaacaacg

SEQ ID NO: 127303 - RNA, 32 nt, Human
cuagggcccaggaggcuaaggcugggagagaa

SEQ ID NO: 127304 - RNA, 23 nt, Human
cuagggccccaccccaccagccc

SEQ ID NO: 127305 - RNA, 32 nt, Human
cuagggccccaggcugggaggcucagaggacu

SEQ ID NO: 127306 - RNA, 24 nt, Human
cuagggccccccaccaaccagccc

SEQ ID NO: 127307 - RNA, 24 nt, Human
cuagggccccgcccccaccagccc

SEQ ID NO: 127308 - RNA, 19 nt, Human
cuagggccccuccaaaaga

SEQ ID NO: 127309 - RNA, 32 nt, Human
cuagggcccugauccagccccugggccuccuc

SEQ ID NO: 127310 - RNA, 32 nt, Human
cuagggccuccccuucucauccuccccacccc

SEQ ID NO: 127311 - RNA, 32 nt, Human
cuagggccuggaaugggagccucaagucuccg

SEQ ID NO: 127312 - RNA, 32 nt, Human
cuagggccuuugcucccacacucucauggaau

SEQ ID NO: 127313 - RNA, 32 nt, Human
cuagggcgccucgggccagggagcgcggagga

SEQ ID NO: 127314 - RNA, 32 nt, Human
cuagggcggggcacagauuggagagggcucug

SEQ ID NO: 127315 - RNA, 32 nt, Human
cuagggcucacaggcuuugcucaccagggcac

SEQ ID NO: 127316 - RNA, 32 nt, Human
cuagggcucaccucgccuccugacuguauucu

SEQ ID NO: 127317 - RNA, 28 nt, Human
cuagggcucagaggggccucaucuuccc

SEQ ID NO: 127318 - RNA, 32 nt, Human
cuagggcucauaguucaagcagucuucaggcu

SEQ ID NO: 127319 - RNA, 32 nt, Human
cuagggcucggugccagcacuucccggguaau

SEQ ID NO: 127320 - RNA, 32 nt, Human
cuagggcuggaaagaagggggagccaggcauu

SEQ ID NO: 127321 - RNA, 32 nt, Human
cuagggcuggaaggcggcugcggcucaggaag

SEQ ID NO: 127322 - RNA, 32 nt, Human
cuagggcuggagggacagggagcagggcagaa

SEQ ID NO: 127323 - RNA, 32 nt, Human
cuagggcuggcagaaagggaacagaaagguuu

SEQ ID NO: 127324 - RNA, 32 nt, Human
cuagggcuucccccuucuccccaucccggucu

SEQ ID NO: 127325 - RNA, 32 nt, Human
cuagggcuuggcuguaggugugcacugucuau

SEQ ID NO: 127326 - RNA, 32 nt, Human
cuaggggaaaagcaaccaaaaagggaaaaagg

SEQ ID NO: 127327 - RNA, 32 nt, Human
cuaggggaauccugccugccccauggaguugc

SEQ ID NO: 127328 - RNA, 32 nt, Human
cuaggggacagauggccuucuuugucaucuuc

SEQ ID NO: 127329 - RNA, 32 nt, Human
cuaggggaggagucgugguggggaagacccug

SEQ ID NO: 127330 - RNA, 32 nt, Human
cuaggggaggggcauggguaaggguguuuccu

SEQ ID NO: 127331 - RNA, 32 nt, Human
cuaggggcaaaaagcaugacugcuuuuuccug

SEQ ID NO: 127332 - RNA, 16 nt, Human
cuaggggcuccugccu

SEQ ID NO: 127333 - RNA, 32 nt, Human
cuaggggcugccggcccugccagugcaacggg

SEQ ID NO: 127334 - RNA, 32 nt, Human
cuaggggcuggaagaagugaaagggaagcauc

SEQ ID NO: 127335 - RNA, 32 nt, Human
cuaggggcugggcaaggccccggcucugcuuu

SEQ ID NO: 127336 - RNA, 32 nt, Human
cuagggggacaucagggcagugccccacaacc

SEQ ID NO: 127337 - RNA, 32 nt, Human
cuaggggguucuccucuucugguccugcccgg

SEQ ID NO: 127338 - RNA, 32 nt, Human
cuaggggugcugcauuuugcuuccggggaagg

SEQ ID NO: 127339 - RNA, 32 nt, Human
cuaggggugguaugacccaaagguuccucugu

SEQ ID NO: 127340 - RNA, 32 nt, Human
cuagggguucugccccucccccucucuggggc

SEQ ID NO: 127341 - RNA, 32 nt, Human
cuaggguaaugaaggcucuacuuuucacuuuu

SEQ ID NO: 127342 - RNA, 32 nt, Human
cuaggguagggaggacuuagggauguuuccug

SEQ ID NO: 127343 - RNA, 32 nt, Human
cuaggguccaucuccagucccaggacacagca

SEQ ID NO: 127344 - RNA, 24 nt, Human
cuagggucccucgcgcccaaaaga

SEQ ID NO: 127345 - RNA, 32 nt, Human
cuagggucgguggaccugggcgucugucuaga

SEQ ID NO: 127346 - RNA, 32 nt, Human
cuagggucguuuguuucuuucugcugugaguu

SEQ ID NO: 127347 - RNA, 32 nt, Human
cuagggucuugcuauguugcccaggcugguug

SEQ ID NO: 127348 - RNA, 32 nt, Human
cuagggugaagccgggaggaaaaugaagaguu

SEQ ID NO: 127349 - RNA, 32 nt, Human
cuagggugaggagcugccuggagcucaccccg

SEQ ID NO: 127350 - RNA, 32 nt, Human
cuagggugcaguguccguaccugcuggagccu

SEQ ID NO: 127351 - RNA, 32 nt, Human
cuagggugccugggagcagcagucuagggcug

SEQ ID NO: 127352 - RNA, 32 nt, Human
cuaggguggagugcaguggcacaaucacagcu

SEQ ID NO: 127353 - RNA, 22 nt, Human
cuagggugggauagggaggaag

SEQ ID NO: 127354 - RNA, 32 nt, Human
cuaggguguguauccaucuggcugucugucca

SEQ ID NO: 127355 - RNA, 32 nt, Human
cuaggguuggacugcacagucuaagcuaauuc

SEQ ID NO: 127356 - RNA, 32 nt, Human
cuaggguuucuucccaacaccaaaggacuuac

SEQ ID NO: 127357 - RNA, 32 nt, Human
cuagguaaaagaauuccagaaggaggccaggg

SEQ ID NO: 127358 - RNA, 32 nt, Human
cuagguaacaguuaaggccccauccaucugag

SEQ ID NO: 127359 - RNA, 32 nt, Human
cuagguaccagaaggaaagcugagggggcagc

SEQ ID NO: 127360 - RNA, 18 nt, Human
cuagguacccuaugcuga

SEQ ID NO: 127361 - RNA, 32 nt, Human
cuagguaggagaggaaggauuugagaaauagg

SEQ ID NO: 127362 - RNA, 32 nt, Human
cuagguauggugucucacaccuguaaucccag

SEQ ID NO: 127363 - RNA, 32 nt, Human
cuagguaugugagcacacagagaaaagaccau

SEQ ID NO: 127364 - RNA, 32 nt, Human
cuaggucagcuuuggcgacacugugucuucuc

SEQ ID NO: 127365 - RNA, 32 nt, Human
cuaggucaggaguucaagaccagccuggccaa

SEQ ID NO: 127366 - RNA, 32 nt, Human
cuaggucagucuggccagaacacccacaagcu

SEQ ID NO: 127367 - RNA, 32 nt, Human
cuaggucagugccgggcucacacugcagucua

SEQ ID NO: 127368 - RNA, 32 nt, Human
cuagguccggggaaguuuccugacuuucugag

SEQ ID NO: 127369 - RNA, 32 nt, Human
cuaggucgugccacugcacuccagccugggca

SEQ ID NO: 127370 - RNA, 32 nt, Human
cuaggucuacuccauuccuccuggcccaccug

SEQ ID NO: 127371 - RNA, 32 nt, Human
cuaggucuacugauggcagucacugcauugua

SEQ ID NO: 127372 - RNA, 32 nt, Human
cuaggucuccaaaaguacaggcuuuuucuuca

SEQ ID NO: 127373 - RNA, 32 nt, Human
cuaggucuccccuuauccuucugguccagcgc

SEQ ID NO: 127374 - RNA, 32 nt, Human
cuaggucuccuuggacugagcauggacaugag

SEQ ID NO: 127375 - RNA, 32 nt, Human
cuaggucuccuugggcuuugaaugcaggagca

SEQ ID NO: 127376 - RNA, 32 nt, Human
cuaggucuuaagagccaaaggaaggaaguggu

SEQ ID NO: 127377 - RNA, 32 nt, Human
cuaggucuucuuuaauuucucuugguaauguu

SEQ ID NO: 127378 - RNA, 32 nt, Human
cuaggucuuuccaggaugcagaaagaaacagg

SEQ ID NO: 127379 - RNA, 32 nt, Human
cuaggugaccaacgggagggcuucucaaggcu

SEQ ID NO: 127380 - RNA, 32 nt, Human
cuaggugagcaggugaugccccagggaccuuu

SEQ ID NO: 127381 - RNA, 32 nt, Human
cuaggugagcugccucugccccugggcaagga

SEQ ID NO: 127382 - RNA, 32 nt, Human
cuaggugaucagcuugaaauucagcuaaccga

SEQ ID NO: 127383 - RNA, 32 nt, Human
cuaggugcagugguucaugccuguaauccagc

SEQ ID NO: 127384 - RNA, 32 nt, Human
cuaggugcccagagaugcagccccucaugccc

SEQ ID NO: 127385 - RNA, 24 nt, Human
cuaggugcccgcguggcauccugu

SEQ ID NO: 127386 - RNA, 32 nt, Human
cuaggugccgaaacccggucugugcugccauc

SEQ ID NO: 127387 - RNA, 32 nt, Human
cuaggugcgguggcucacaccuguaaucucag

SEQ ID NO: 127388 - RNA, 32 nt, Human
cuaggugcgguggcucaugccuguaauccuag

SEQ ID NO: 127389 - RNA, 32 nt, Human
cuagguggagcggauggaaugugcugggccac

SEQ ID NO: 127390 - RNA, 32 nt, Human
cuagguggagggaaggaaggagggagccgggg

SEQ ID NO: 127391 - RNA, 32 nt, Human
cuagguggaguaugcuugauagagacuuugau

SEQ ID NO: 127392 - RNA, 32 nt, Human
cuagguggccuccuuugguuucugagcaauaa

SEQ ID NO: 127393 - RNA, 32 nt, Human
cuaggugggaggauugcuugaguccgggaguu

SEQ ID NO: 127394 - RNA, 24 nt, Human
cuaggugggcagaucacgagguca

SEQ ID NO: 127395 - RNA, 32 nt, Human
cuaggugggcggaucacuugaggucaggaguu

SEQ ID NO: 127396 - RNA, 32 nt, Human
cuagguggguggaucacuugagcccagagguu

SEQ ID NO: 127397 - RNA, 32 nt, Human
cuagguggguguauucuggucugcaccacacc

SEQ ID NO: 127398 - RNA, 32 nt, Human
cuagguggguguauucuggucugcaccgcacc

SEQ ID NO: 127399 - RNA, 32 nt, Human
cuagguggguguauucuggucugcaccguacc

SEQ ID NO: 127400 - RNA, 32 nt, Human
cuagguggugaucugcccuccucucucucuuu

SEQ ID NO: 127401 - RNA, 32 nt, Human
cuagguggugcuggaugcuuguucuuuggcca

SEQ ID NO: 127402 - RNA, 18 nt, Human
cuagguguccccaacguc

SEQ ID NO: 127403 - RNA, 32 nt, Human
cuaggugucccucugcuguacaucccuaaauu

SEQ ID NO: 127404 - RNA, 32 nt, Human
cuagguguccuggcgcacaccuguaaucccag

SEQ ID NO: 127405 - RNA, 32 nt, Human
cuaggugugcccaccaguaugaguugccauua

SEQ ID NO: 127406 - RNA, 32 nt, Human
cuagguguggcugggggccaggagagcaggaa

SEQ ID NO: 127407 - RNA, 32 nt, Human
cuaggugugguggcacgcaucuguaguuccag

SEQ ID NO: 127408 - RNA, 32 nt, Human
cuaggugugguggcucaggccuguaauccugg

SEQ ID NO: 127409 - RNA, 32 nt, Human
cuaggugugguggcucaugccuguaauccuag

SEQ ID NO: 127410 - RNA, 32 nt, Human
cuagguguucccaauaccuuuuuccccucaug

SEQ ID NO: 127411 - RNA, 32 nt, Human
cuagguguugaacuuaguuaauggaagacuga

SEQ ID NO: 127412 - RNA, 32 nt, Human
cuagguucaagcaauucuccugccccagccuc

SEQ ID NO: 127413 - RNA, 32 nt, Human
cuagguucaagcaauucuccugccucagccuc

SEQ ID NO: 127414 - RNA, 32 nt, Human
cuagguucaagcaauucuccugccucagcuac

SEQ ID NO: 127415 - RNA, 32 nt, Human
cuagguucaagcaguucuccugccucagccuc

SEQ ID NO: 127416 - RNA, 19 nt, Human
cuagguuggagugcagugg

SEQ ID NO: 127417 - RNA, 32 nt, Human
cuagguuggcacugcggcccucaccagguccu

SEQ ID NO: 127418 - RNA, 32 nt, Human
cuagguugugccccugccccuccugaaaauua

SEQ ID NO: 127419 - RNA, 22 nt, Human
cuagguuuacaggcaugagcca

SEQ ID NO: 127420 - RNA, 32 nt, Human
cuagguuucauagaguccucuccucugcaaug

SEQ ID NO: 127421 - RNA, 32 nt, Human
cuagguuucugccuccucguuuuuguucaagu

SEQ ID NO: 127422 - RNA, 32 nt, Human
cuagguuugaaucucacuucugcccagcugug

SEQ ID NO: 127423 - RNA, 32 nt, Human
cuagguuugggggcgggggcuuguuuggguuc

SEQ ID NO: 127424 - RNA, 32 nt, Human
cuagguuugguuagagggcggcuguagagcac

SEQ ID NO: 127425 - RNA, 32 nt, Human
cuaguaaaaauacaaaaauuagccaggcaugg

SEQ ID NO: 127426 - RNA, 32 nt, Human
cuaguaaaaauacaaaaauuagcucagcaugg

SEQ ID NO: 127427 - RNA, 32 nt, Human
cuaguaaaaauacaaaaauuagcugggcgugg

SEQ ID NO: 127428 - RNA, 32 nt, Human
cuaguaaaaaugcaaaaauuagcugggugugg

SEQ ID NO: 127429 - RNA, 32 nt, Human
cuaguaaagugcaauaaaggcauugauaaguu

SEQ ID NO: 127430 - RNA, 32 nt, Human
cuaguaacagugaaagcacaagauuuccaaau

SEQ ID NO: 127431 - RNA, 32 nt, Human
cuaguaacugagacuccuccagccuccucccu

SEQ ID NO: 127432 - RNA, 32 nt, Human
cuaguaagcaagaaaggaucugcaugauaacu

SEQ ID NO: 127433 - RNA, 32 nt, Human
cuaguaaugucuuuuccugaaaagggcaaaac

SEQ ID NO: 127434 - RNA, 32 nt, Human
cuaguacaaugccaucaccggauuccaugacc

SEQ ID NO: 127435 - RNA, 32 nt, Human
cuaguacagugauuaucagaaaacccagaagc

SEQ ID NO: 127436 - RNA, 32 nt, Human
cuaguaccaagaaacaacaacaaacgagauac

SEQ ID NO: 127437 - RNA, 32 nt, Human
cuaguaccaugagucccugcacugguuaaagc

SEQ ID NO: 127438 - RNA, 32 nt, Human
cuaguacuagauuaucuuacagucuucuaccu

SEQ ID NO: 127439 - RNA, 32 nt, Human
cuaguagagacaggguuucaccauguugaccu

SEQ ID NO: 127440 - RNA, 20 nt, Human
cuaguagcugggacuacagg

SEQ ID NO: 127441 - RNA, 20 nt, Human
cuaguagcugggauuacagg

SEQ ID NO: 127442 - RNA, 20 nt, Human
cuaguagcugggauugcagg

SEQ ID NO: 127443 - RNA, 32 nt, Human
cuaguagcuguucccccgaacagguuuauuuu

SEQ ID NO: 127444 - RNA, 32 nt, Human
cuaguagcuguugcucucuguauuguuauugu

SEQ ID NO: 127445 - RNA, 32 nt, Human
cuaguagcuuuucuuacuguuagugaacuugu

SEQ ID NO: 127446 - RNA, 32 nt, Human
cuaguagggcagggggacagaaauugggcucc

SEQ ID NO: 127447 - RNA, 32 nt, Human
cuaguaggggcgggcuacgugauugacacuuc

SEQ ID NO: 127448 - RNA, 32 nt, Human
cuaguaguuguucugaaaugucaguucugaua

SEQ ID NO: 127449 - RNA, 32 nt, Human
cuaguauaaauggguaccuguaauaauacuga

SEQ ID NO: 127450 - RNA, 32 nt, Human
cuaguauaguacauuuucccuuccauuuaaaa

SEQ ID NO: 127451 - RNA, 32 nt, Human
cuaguaucuccugucuagaguuuuagauggua

SEQ ID NO: 127452 - RNA, 32 nt, Human
cuaguaugauuaguauagcuuucuccagcaug

SEQ ID NO: 127453 - RNA, 32 nt, Human
cuaguaugguaugcaguggccaagaggacccc

SEQ ID NO: 127454 - RNA, 32 nt, Human
cuaguauguaacuggaauuauguuauacauug

SEQ ID NO: 127455 - RNA, 32 nt, Human
cuaguaugugauagagcaagaccugagacuuu

SEQ ID NO: 127456 - RNA, 32 nt, Human
cuaguauuaaugauggaagaguuuauuuucuc

SEQ ID NO: 127457 - RNA, 32 nt, Human
cuaguauugccauaaaggaaacuaagugccca

SEQ ID NO: 127458 - RNA, 24 nt, Human
cuagucaacauggugaaaccccgu

SEQ ID NO: 127459 - RNA, 32 nt, Human
cuagucaacauggugaaaccccgucuccauua

SEQ ID NO: 127460 - RNA, 32 nt, Human
cuagucaagagggugaggcaggagaaucgcuu

SEQ ID NO: 127461 - RNA, 32 nt, Human
cuagucacaaaccaaacaaaacuuuugaaaau

SEQ ID NO: 127462 - RNA, 32 nt, Human
cuagucacugagagacagaggcagcaucugcc

SEQ ID NO: 127463 - RNA, 20 nt, Human
cuagucagacaacgcuccuc

SEQ ID NO: 127464 - RNA, 32 nt, Human
cuagucagacacaaauccuacucacucaaagg

SEQ ID NO: 127465 - RNA, 32 nt, Human
cuagucaggaggcugaggcaggagaauugcuu

SEQ ID NO: 127466 - RNA, 32 nt, Human
cuagucaggugcucccuccacccaauaccauu

SEQ ID NO: 127467 - RNA, 21 nt, Human
cuagucagucauccaggcuua

SEQ ID NO: 127468 - RNA, 32 nt, Human
cuagucaguucugcguccgcugggcucgguca

SEQ ID NO: 127469 - RNA, 32 nt, Human
cuagucaguuugcuugaaacuaguucaccuaa

SEQ ID NO: 127470 - RNA, 32 nt, Human
cuagucaucacgugccccagcugaccuuccac

SEQ ID NO: 127471 - RNA, 32 nt, Human
cuagucauccucggcaggucucagucccggcu

SEQ ID NO: 127472 - RNA, 32 nt, Human
cuagucaugauagcuaaugaauuggaccauga

SEQ ID NO: 127473 - RNA, 32 nt, Human
cuagucauggaucuuucucucccuggcaugug

SEQ ID NO: 127474 - RNA, 32 nt, Human
cuaguccacuuuaucuuuguucccaaggcacu

SEQ ID NO: 127475 - RNA, 32 nt, Human
cuaguccagaccuggggaccacuguggguucc

SEQ ID NO: 127476 - RNA, 32 nt, Human
cuaguccaggaguaggcugugggagccgggag

SEQ ID NO: 127477 - RNA, 32 nt, Human
cuaguccaguagcaaugucuuccucuuaugac

SEQ ID NO: 127478 - RNA, 32 nt, Human
cuaguccauggggagagggaagagugaccuga

SEQ ID NO: 127479 - RNA, 32 nt, Human
cuagucccacggccucagaauguggccuuauu

SEQ ID NO: 127480 - RNA, 32 nt, Human
cuaguccccaagaggagcugagagccauguac

SEQ ID NO: 127481 - RNA, 32 nt, Human
cuaguccccugcccucuggcacagcugcuucc

SEQ ID NO: 127482 - RNA, 32 nt, Human
cuagucccgggcuggcgggagugcaguucuga

SEQ ID NO: 127483 - RNA, 32 nt, Human
cuagucccuccugacccagggauggaggcuuu

SEQ ID NO: 127484 - RNA, 32 nt, Human
cuagucccugcucugcccccaacuggcuguau

SEQ ID NO: 127485 - RNA, 20 nt, Human
cuaguccucacuucaggcuc

SEQ ID NO: 127486 - RNA, 32 nt, Human
cuaguccugccugucucccggugcagcugugu

SEQ ID NO: 127487 - RNA, 32 nt, Human
cuaguccuugcagccucaggaaguccucggcc

SEQ ID NO: 127488 - RNA, 32 nt, Human
cuagucgggaggcugaggcaggagaauggcgu

SEQ ID NO: 127489 - RNA, 32 nt, Human
cuagucggucuaucuggacuugcccuugucug

SEQ ID NO: 127490 - RNA, 32 nt, Human
cuagucgugacuucauuucuaaaacagagccu

SEQ ID NO: 127491 - RNA, 32 nt, Human
cuagucgugcacauuccugggccucagggcuc

SEQ ID NO: 127492 - RNA, 32 nt, Human
cuagucgugugggaugaucaccaaaacaagac

SEQ ID NO: 127493 - RNA, 32 nt, Human
cuagucguuuccuggugaauggcucugcugaa

SEQ ID NO: 127494 - RNA, 32 nt, Human
cuagucuacaaagcaucugauuuuggaaguac

SEQ ID NO: 127495 - RNA, 32 nt, Human
cuagucuacugggcauaaugacauuuucuuua

SEQ ID NO: 127496 - RNA, 32 nt, Human
cuagucucugggcuugcccugaaauuacucgc

SEQ ID NO: 127497 - RNA, 32 nt, Human
cuagucucuucucuucugugaucucaguaggc

SEQ ID NO: 127498 - RNA, 31 nt, Human
cuagucugauucuucaccugccaaagauggg

SEQ ID NO: 127499 - RNA, 32 nt, Human
cuagucugcaaggcaggaaggaagugacccag

SEQ ID NO: 127500 - RNA, 23 nt, Human
cuagucugcccacucccuacccc

SEQ ID NO: 127501 - RNA, 32 nt, Human
cuagucugcugcugaagucugaacuugggccu

SEQ ID NO: 127502 - RNA, 32 nt, Human
cuagucugggcaacauagugaggccccaucuc

SEQ ID NO: 127503 - RNA, 22 nt, Human
cuagucugugaguccaggcuca

SEQ ID NO: 127504 - RNA, 32 nt, Human
cuagucuucauaauuucuucacucaaucucug

SEQ ID NO: 127505 - RNA, 23 nt, Human
cuagucuuccuacccacacuccu

SEQ ID NO: 127506 - RNA, 32 nt, Human
cuagucuugaccucuccagcaucccagccuca

SEQ ID NO: 127507 - RNA, 32 nt, Human
cuagucuugaucuguucugggccaggucccag

SEQ ID NO: 127508 - RNA, 32 nt, Human
cuagucuuuccagauguuaaagaacuucuauc

SEQ ID NO: 127509 - RNA, 32 nt, Human
cuagugaaaauacaaaaauuagccaggugugg

SEQ ID NO: 127510 - RNA, 32 nt, Human
cuagugacagguggaaaagaaggaugaggaag

SEQ ID NO: 127511 - RNA, 32 nt, Human
cuagugagaaaccacgugaauguaaugaaugu

SEQ ID NO: 127512 - RNA, 32 nt, Human
cuagugagaggaggaggaggugggcagaggaa

SEQ ID NO: 127513 - RNA, 32 nt, Human
cuagugagccacagacccauuugaggccaagc

SEQ ID NO: 127514 - RNA, 32 nt, Human
cuagugagggcugcaagaccauccugcccgga

SEQ ID NO: 127515 - RNA, 32 nt, Human
cuagugaggucucaagcggcuuccgcucgugg

SEQ ID NO: 127516 - RNA, 32 nt, Human
cuagugauagccacuauucacagcuucucauu

SEQ ID NO: 127517 - RNA, 32 nt, Human
cuagugauggagagcagagggagagggccagg

SEQ ID NO: 127518 - RNA, 32 nt, Human
cuagugauugcaaaacuggaccaaugggagga

SEQ ID NO: 127519 - RNA, 32 nt, Human
cuagugcaaccguccccuacccagggacuguc

SEQ ID NO: 127520 - RNA, 32 nt, Human
cuagugcacaauggccuuucugugcuguuuuu

SEQ ID NO: 127521 - RNA, 32 nt, Human
cuagugcacggcgucccugagggcccuuccca

SEQ ID NO: 127522 - RNA, 32 nt, Human
cuagugcagccuuugguagcuaacagucacug

SEQ ID NO: 127523 - RNA, 29 nt, Human
cuagugcaucugugugugucugucagugu

SEQ ID NO: 127524 - RNA, 32 nt, Human
cuagugcaugagcagcuuuaacuuucucuggc

SEQ ID NO: 127525 - RNA, 32 nt, Human
cuagugcaugccacaguucgcaguagagggug

SEQ ID NO: 127526 - RNA, 32 nt, Human
cuagugccaguucuuaugcuaagcagguuacg

SEQ ID NO: 127527 - RNA, 32 nt, Human
cuagugcccauggagggagcauuuagaccagc

SEQ ID NO: 127528 - RNA, 22 nt, Human
cuagugcccguggccggggauu

SEQ ID NO: 127529 - RNA, 32 nt, Human
cuagugccugacccugaccuguccucauucga

SEQ ID NO: 127530 - RNA, 32 nt, Human
cuagugcucugaggaaagcuugcugauuaucu

SEQ ID NO: 127531 - RNA, 19 nt, Human
cuagugcugaaugauccca

SEQ ID NO: 127532 - RNA, 32 nt, Human
cuagugcugaggacacagacacaaaaucccug

SEQ ID NO: 127533 - RNA, 32 nt, Human
cuagugcuugccaccuggucaccagaccucca

SEQ ID NO: 127534 - RNA, 32 nt, Human
cuaguggaaagccauggagagcgcucuccccg

SEQ ID NO: 127535 - RNA, 32 nt, Human
cuaguggagagggagcaagggaggccgcagag

SEQ ID NO: 127536 - RNA, 32 nt, Human
cuaguggagcugugagaagagggucaucacua

SEQ ID NO: 127537 - RNA, 32 nt, Human
cuaguggauguaugguagauggguugaagcuu

SEQ ID NO: 127538 - RNA, 32 nt, Human
cuaguggauguggcccgucugguuaugagagg

SEQ ID NO: 127539 - RNA, 32 nt, Human
cuaguggauuuugucuacugugcagaaauaua

SEQ ID NO: 127540 - RNA, 32 nt, Human
cuaguggcacuggcuucguccucccagggccc

SEQ ID NO: 127541 - RNA, 32 nt, Human
cuaguggcagccaaaauuggaaaagagagaag

SEQ ID NO: 127542 - RNA, 32 nt, Human
cuaguggcaggguggugguguccugguguccu

SEQ ID NO: 127543 - RNA, 32 nt, Human
cuaguggcaguugccaauguuaaugauuauuc

SEQ ID NO: 127544 - RNA, 32 nt, Human
cuaguggccauggugaaggugucaguggcggc

SEQ ID NO: 127545 - RNA, 30 nt, Human
cuaguggccuccuuggggcuccuguuggcu

SEQ ID NO: 127546 - RNA, 32 nt, Human
cuaguggccuggggaggguguggugugaguga

SEQ ID NO: 127547 - RNA, 32 nt, Human
cuaguggcucaugccuguaauccagcacuuug

SEQ ID NO: 127548 - RNA, 32 nt, Human
cuaguggcuggguuacugauggauuacugaug

SEQ ID NO: 127549 - RNA, 32 nt, Human
cuagugggagagagugggggagaggaagagag

SEQ ID NO: 127550 - RNA, 32 nt, Human
cuagugggcagaggaaugccugugcuggggcc

SEQ ID NO: 127551 - RNA, 32 nt, Human
cuagugggcggggccugucagugagcggcccc

SEQ ID NO: 127552 - RNA, 21 nt, Human
cuaguggggucucccucuccu

SEQ ID NO: 127553 - RNA, 32 nt, Human
cuagugggugugaaaggcagcgguggccacag

SEQ ID NO: 127554 - RNA, 32 nt, Human
cuaguggucacccaccaccaugguuacuugcc

SEQ ID NO: 127555 - RNA, 32 nt, Human
cuaguggugguggccagcgugcagugagcugg

SEQ ID NO: 127556 - RNA, 32 nt, Human
cuagugguucucaaagugugggcccuggacca

SEQ ID NO: 127557 - RNA, 31 nt, Human
cuagugguucuuuucugaucagacccugauu

SEQ ID NO: 127558 - RNA, 32 nt, Human
cuagugguuggcaaacuacagcccauagaaca

SEQ ID NO: 127559 - RNA, 24 nt, Human
cuaguguaacacugacuaugagua

SEQ ID NO: 127560 - RNA, 32 nt, Human
cuaguguacaagcugugggggaagaaguggga

SEQ ID NO: 127561 - RNA, 32 nt, Human
cuagugucacccaggcuggagugcagugaucc

SEQ ID NO: 127562 - RNA, 22 nt, Human
cuagugucacccucccucuccu

SEQ ID NO: 127563 - RNA, 32 nt, Human
cuagugucagcuuugcucaaugugguggaaac

SEQ ID NO: 127564 - RNA, 32 nt, Human
cuaguguccucccaggagucagaucauaaggc

SEQ ID NO: 127565 - RNA, 32 nt, Human
cuagugugagcagcuauucugcaugggugcag

SEQ ID NO: 127566 - RNA, 31 nt, Human
cuagugugagggcugccucauaagcucccaa

SEQ ID NO: 127567 - RNA, 32 nt, Human
cuagugugcugagaccuugagaauaaagugug

SEQ ID NO: 127568 - RNA, 32 nt, Human
cuagugugggguggaaaggaagagugagcgag

SEQ ID NO: 127569 - RNA, 32 nt, Human
cuaguguguggacaaggaggugggggcagcug

SEQ ID NO: 127570 - RNA, 32 nt, Human
cuaguguuccagcaccugauucugaggugaug

SEQ ID NO: 127571 - RNA, 32 nt, Human
cuaguguuccagcaccugauucuggggugacg

SEQ ID NO: 127572 - RNA, 32 nt, Human
cuaguguucucccuguuuugcugaugagacac

SEQ ID NO: 127573 - RNA, 32 nt, Human
cuaguguucuuucaguaaaguacaaaguguuu

SEQ ID NO: 127574 - RNA, 30 nt, Human
cuaguguugcccaggcuggagugcaguggc

SEQ ID NO: 127575 - RNA, 32 nt, Human
cuaguguugcugucuuggauucauguuaagaa

SEQ ID NO: 127576 - RNA, 32 nt, Human
cuaguguuuucugaugaacacagagucugcau

SEQ ID NO: 127577 - RNA, 32 nt, Human
cuaguuaaauaaaugaacauuguauggcuuag

SEQ ID NO: 127578 - RNA, 32 nt, Human
cuaguuaacuauuucagcauaccauuuuuacu

SEQ ID NO: 127579 - RNA, 32 nt, Human
cuaguuaacugcagcaggagcauguccuuaag

SEQ ID NO: 127580 - RNA, 32 nt, Human
cuaguuacccacccuaauuugcccuucaggac

SEQ ID NO: 127581 - RNA, 32 nt, Human
cuaguuacccuuugcuucccuucaccucuugu

SEQ ID NO: 127582 - RNA, 32 nt, Human
cuaguuauggauuaaaaauagagcaagaaggc

SEQ ID NO: 127583 - RNA, 32 nt, Human
cuaguuaugggucuauuucuuccaugauuaga

SEQ ID NO: 127584 - RNA, 32 nt, Human
cuaguuauuauucuagccaguaauggacuuca

SEQ ID NO: 127585 - RNA, 32 nt, Human
cuaguuauuucucacccaggaguggauuugug

SEQ ID NO: 127586 - RNA, 32 nt, Human
cuaguucaagagcuguaccuccuuugaauccc

SEQ ID NO: 127587 - RNA, 31 nt, Human
cuaguucaagcgauuuuccuaccucagccuc

SEQ ID NO: 127588 - RNA, 31 nt, Human
cuaguucacagcuguaccccaaggcuggaga

SEQ ID NO: 127589 - RNA, 32 nt, Human
cuaguucacagcuguaccccaaggcuggagag

SEQ ID NO: 127590 - RNA, 32 nt, Human
cuaguucacccacucuggggcuggccucauga

SEQ ID NO: 127591 - RNA, 32 nt, Human
cuaguucacuggcuccccuacuccuccuccuc

SEQ ID NO: 127592 - RNA, 32 nt, Human
cuaguuccacccccuccuaccugggugagcuu

SEQ ID NO: 127593 - RNA, 32 nt, Human
cuaguuccuccaauuccaucuucucccaugga

SEQ ID NO: 127594 - RNA, 32 nt, Human
cuaguuccugguugcuggccaaagggaucaug

SEQ ID NO: 127595 - RNA, 32 nt, Human
cuaguuccuucaggccuggcggcggcuuccaa

SEQ ID NO: 127596 - RNA, 32 nt, Human
cuaguucucugaaccucagcugcgugucucau

SEQ ID NO: 127597 - RNA, 32 nt, Human
cuaguucuguggucaggcggcaccaaugagaa

SEQ ID NO: 127598 - RNA, 32 nt, Human
cuaguucuuuccucccccugcaacuuccgcug

SEQ ID NO: 127599 - RNA, 32 nt, Human
cuaguugaaucucagcccugaguguccagauc

SEQ ID NO: 127600 - RNA, 32 nt, Human
cuaguugcagaacuggaccaggaugaaaggac

SEQ ID NO: 127601 - RNA, 20 nt, Human
cuaguugcaucugacgggag

SEQ ID NO: 127602 - RNA, 32 nt, Human
cuaguugcauuuucauauugcuaccaaaaacu

SEQ ID NO: 127603 - RNA, 32 nt, Human
cuaguugccuggggaaacccuggaaugggcau

SEQ ID NO: 127604 - RNA, 32 nt, Human
cuaguugcuacuugggaauaaagggcuuuuug

SEQ ID NO: 127605 - RNA, 32 nt, Human
cuaguugcuuuacauguauuaucuuauauucu

SEQ ID NO: 127606 - RNA, 32 nt, Human
cuaguugggucagacuaacagggacucucagu

SEQ ID NO: 127607 - RNA, 32 nt, Human
cuaguugugaaggugcaaaagaugcaguuauc

SEQ ID NO: 127608 - RNA, 32 nt, Human
cuaguuuaaguuguucccccucccucugaaaa

SEQ ID NO: 127609 - RNA, 32 nt, Human
cuaguuuacaagacaggaggaaagagagaaag

SEQ ID NO: 127610 - RNA, 32 nt, Human
cuaguuuacuugcucgggagaagaaacugacu

SEQ ID NO: 127611 - RNA, 32 nt, Human
cuaguuuacuuuuuagagccaguauuaauccu

SEQ ID NO: 127612 - RNA, 32 nt, Human
cuaguuucaggcaguagcuaggagagcuagac

SEQ ID NO: 127613 - RNA, 32 nt, Human
cuaguuuccauggcuccgaagaggugacaucu

SEQ ID NO: 127614 - RNA, 32 nt, Human
cuaguuucccaaagugcugggaauacaggugu

SEQ ID NO: 127615 - RNA, 32 nt, Human
cuaguuugauauuugauuuacucuccaaugag

SEQ ID NO: 127616 - RNA, 24 nt, Human
cuaguuuggaauaaaaauugcaga

SEQ ID NO: 127617 - RNA, 32 nt, Human
cuaguuuucagccaugguugagaauguugcua

SEQ ID NO: 127618 - RNA, 32 nt, Human
cuaguuuucaucagucuguucaagcaaaguug

SEQ ID NO: 127619 - RNA, 32 nt, Human
cuaguuuuguuguguguuggaggacagucuaa

SEQ ID NO: 127620 - RNA, 32 nt, Human
cuaguuuuuacaccugagauaaauaauaagcu

SEQ ID NO: 127621 - RNA, 25 nt, Human
cuaguuuuugucugcaccagucuua

SEQ ID NO: 127622 - RNA, 32 nt, Human
cuauaaaaacaguggaaccacagcccuaaagu

SEQ ID NO: 127623 - RNA, 32 nt, Human
cuauaaaaauuuuuaaaauuagccagguauga

SEQ ID NO: 127624 - RNA, 32 nt, Human
cuauaaaaccgcugaccuguguguggaggaca

SEQ ID NO: 127625 - RNA, 32 nt, Human
cuauaaaacuaggugcugcagccugggaccag

SEQ ID NO: 127626 - RNA, 32 nt, Human
cuauaaaagaauugcacguaugagaaaccuau

SEQ ID NO: 127627 - RNA, 32 nt, Human
cuauaaaagggagggagaugagaaguuucuga

SEQ ID NO: 127628 - RNA, 22 nt, Human
cuauaaaauaagguggcuagua

SEQ ID NO: 127629 - RNA, 32 nt, Human
cuauaaaaucuccuuacauggaaaugugacug

SEQ ID NO: 127630 - RNA, 32 nt, Human
cuauaaaaugcaguaacauucuacuugcuuau

SEQ ID NO: 127631 - RNA, 32 nt, Human
cuauaaaaugggcauaaugacagcaccugccu

SEQ ID NO: 127632 - RNA, 32 nt, Human
cuauaaaccauccugugccaggaagagcccag

SEQ ID NO: 127633 - RNA, 32 nt, Human
cuauaaacugaagcuuuaaaugagcugugaag

SEQ ID NO: 127634 - RNA, 32 nt, Human
cuauaaacugacacagaauagguugaaaucuu

SEQ ID NO: 127635 - RNA, 32 nt, Human
cuauaaagaacauuuggaucacuuguaguagc

SEQ ID NO: 127636 - RNA, 32 nt, Human
cuauaaagcuguucacauuucugcauuaacau

SEQ ID NO: 127637 - RNA, 32 nt, Human
cuauaaauucacagacugggaauuuuuaaugu

SEQ ID NO: 127638 - RNA, 32 nt, Human
cuauaaauucccggaccccaguguugccccgu

SEQ ID NO: 127639 - RNA, 32 nt, Human
cuauaaauugaauuaugugcugaaggaaggac

SEQ ID NO: 127640 - RNA, 32 nt, Human
cuauaacacaugcauaugcuucauuccacauu

SEQ ID NO: 127641 - RNA, 32 nt, Human
cuauaaccauuuuuguaaagaguaagaguugu

SEQ ID NO: 127642 - RNA, 32 nt, Human
cuauaaccucgaacuccuggcucaagugaucu

SEQ ID NO: 127643 - RNA, 32 nt, Human
cuauaaccuugaacuccugggcucaagugauc

SEQ ID NO: 127644 - RNA, 32 nt, Human
cuauaacuaacacagggaucacugccucuauu

SEQ ID NO: 127645 - RNA, 32 nt, Human
cuauaacucaggaggaaagccacccagauacu

SEQ ID NO: 127646 - RNA, 32 nt, Human
cuauaacuccacccuucacugugcugcgguug

SEQ ID NO: 127647 - RNA, 32 nt, Human
cuauaacuuauucaaaggccaaugauacuucg

SEQ ID NO: 127648 - RNA, 32 nt, Human
cuauaacuuuguguuagcaccauggagaauac

SEQ ID NO: 127649 - RNA, 32 nt, Human
cuauaagaaacuucagugccauggacaugauu

SEQ ID NO: 127650 - RNA, 22 nt, Human
cuauaagaccaagaaaacugua

SEQ ID NO: 127651 - RNA, 32 nt, Human
cuauaagcacacaccaccacacccagcuaauu

SEQ ID NO: 127652 - RNA, 32 nt, Human
cuauaagcaccgccccagcucugacaaaaccc

SEQ ID NO: 127653 - RNA, 32 nt, Human
cuauaagccucuugccuucaagcucuccugca

SEQ ID NO: 127654 - RNA, 32 nt, Human
cuauaagcucuccucaaagcucaggaaaccug

SEQ ID NO: 127655 - RNA, 32 nt, Human
cuauaaggaguacaucaggugaaauguuaggg

SEQ ID NO: 127656 - RNA, 32 nt, Human
cuauaagggaaacagaguggccuggcugauuu

SEQ ID NO: 127657 - RNA, 32 nt, Human
cuauaagggaauucuggccacccugggugggg

SEQ ID NO: 127658 - RNA, 32 nt, Human
cuauaagucacucugcuuuaucuugcuaaaga

SEQ ID NO: 127659 - RNA, 32 nt, Human
cuauaauagcagggucagacuguggguuccuc

SEQ ID NO: 127660 - RNA, 32 nt, Human
cuauaauaguaauccucacugagugauaaaaa

SEQ ID NO: 127661 - RNA, 32 nt, Human
cuauaauauacuguauguuuacauuuuauuua

SEQ ID NO: 127662 - RNA, 21 nt, Human
cuauaaucccagcuacuuggg

SEQ ID NO: 127663 - RNA, 22 nt, Human
cuauaaucccagcuacuuggga

SEQ ID NO: 127664 - RNA, 32 nt, Human
cuauaauccuccaaaucaaagcucuuucugcu

SEQ ID NO: 127665 - RNA, 32 nt, Human
cuauaaugaaugucugucuuguuuggaaguca

SEQ ID NO: 127666 - RNA, 22 nt, Human
cuauaaugcauauuucuucuca

SEQ ID NO: 127667 - RNA, 32 nt, Human
cuauaaugccccauuucaucugauugaugacc

SEQ ID NO: 127668 - RNA, 32 nt, Human
cuauaauggaauaugugacacugugggugaaa

SEQ ID NO: 127669 - RNA, 32 nt, Human
cuauaaugugccaggcucuggagcucgccuua

SEQ ID NO: 127670 - RNA, 32 nt, Human
cuauaauuagagacuuuuuacuauaagcauca

SEQ ID NO: 127671 - RNA, 32 nt, Human
cuauaauuuugcaaaucuguuaccucugacau

SEQ ID NO: 127672 - RNA, 32 nt, Human
cuauacaagcuagauaagaugcaguuccgaca

SEQ ID NO: 127673 - RNA, 32 nt, Human
cuauacacacaucuccuucaucaucauauaug

SEQ ID NO: 127674 - RNA, 32 nt, Human
cuauacaccucucccacucucccuucucucug

SEQ ID NO: 127675 - RNA, 32 nt, Human
cuauacaccuguuuguaaaggguccuccuaga

SEQ ID NO: 127676 - RNA, 32 nt, Human
cuauacaggcaauuaaaaaccugcuggguggg

SEQ ID NO: 127677 - RNA, 32 nt, Human
cuauacaggccagugaaugacaggcuuugagg

SEQ ID NO: 127678 - RNA, 32 nt, Human
cuauacagugucacucauuuguaguaaaacuu

SEQ ID NO: 127679 - RNA, 23 nt, Human
cuauacaguugucaaugcacaca

SEQ ID NO: 127680 - RNA, 32 nt, Human
cuauacauaaggacaggcucacaugggaggcu

SEQ ID NO: 127681 - RNA, 32 nt, Human
cuauacauacgugcacacacacauacauauuc

SEQ ID NO: 127682 - RNA, 32 nt, Human
cuauacauauacaaagugauuuuagcuguaua

SEQ ID NO: 127683 - RNA, 32 nt, Human
cuauacaucauggguaaacuuaacccagaacu

SEQ ID NO: 127684 - RNA, 32 nt, Human
cuauacaugggugggaguggaggccgccaccc

SEQ ID NO: 127685 - RNA, 32 nt, Human
cuauaccaccaccaccaccaccauuacagcgc

SEQ ID NO: 127686 - RNA, 32 nt, Human
cuauaccaugggaaaauuuaggggugcuggga

SEQ ID NO: 127687 - RNA, 32 nt, Human
cuauaccauucaaacaacagcgcuccccauuu

SEQ ID NO: 127688 - RNA, 32 nt, Human
cuauaccauuuuaaguucugaccucaggccuc

SEQ ID NO: 127689 - RNA, 32 nt, Human
cuauacccaaguagauuuacauguauaugaag

SEQ ID NO: 127690 - RNA, 32 nt, Human
cuauacccagauggcuccucugggccacugaa

SEQ ID NO: 127691 - RNA, 32 nt, Human
cuauaccccuuucccuucugcccaccuugccc

SEQ ID NO: 127692 - RNA, 32 nt, Human
cuauacccuacagucagacaggaaaagaacug

SEQ ID NO: 127693 - RNA, 32 nt, Human
cuauaccugguacauuuccugugugcaaucag

SEQ ID NO: 127694 - RNA, 32 nt, Human
cuauacuaaaaauacaaaaauuggcugggugu

SEQ ID NO: 127695 - RNA, 32 nt, Human
cuauacuaaauggaaaagguggcaugcuaaac

SEQ ID NO: 127696 - RNA, 32 nt, Human
cuauacuaugccuaacuuucuaucccagagug

SEQ ID NO: 127697 - RNA, 32 nt, Human
cuauacuccagccugggcaacaaagcgagacc

SEQ ID NO: 127698 - RNA, 32 nt, Human
cuauacuccaucuaaaauaagacaugccugaa

SEQ ID NO: 127699 - RNA, 32 nt, Human
cuauacucggggaggcaggguagcagugcuuc

SEQ ID NO: 127700 - RNA, 32 nt, Human
cuauacugggagucacaaaccugcucugccac

SEQ ID NO: 127701 - RNA, 32 nt, Human
cuauacuggggguacacauguccucugcccua

SEQ ID NO: 127702 - RNA, 32 nt, Human
cuauacugugcuuucccuugacugaccaacug

SEQ ID NO: 127703 - RNA, 32 nt, Human
cuauacuuacuuauuuuccuccacagaguuag

SEQ ID NO: 127704 - RNA, 32 nt, Human
cuauacuuaguugccucucuguaaguauaaua

SEQ ID NO: 127705 - RNA, 32 nt, Human
cuauacuuccaccuauagagguggcaauugag

SEQ ID NO: 127706 - RNA, 32 nt, Human
cuauacuuggcauccaacucaugaguggauuu

SEQ ID NO: 127707 - RNA, 32 nt, Human
cuauagaaaagcuucuugcuaaaccuucuuua

SEQ ID NO: 127708 - RNA, 32 nt, Human
cuauagaauagcaacagugaauauaccucaaa

SEQ ID NO: 127709 - RNA, 32 nt, Human
cuauagaaugcauaccuuccucccucuagaca

SEQ ID NO: 127710 - RNA, 32 nt, Human
cuauagaauuaaugaucagagcaaguuuaauu

SEQ ID NO: 127711 - RNA, 32 nt, Human
cuauagaauucucucuggaggaauggcaaugc

SEQ ID NO: 127712 - RNA, 32 nt, Human
cuauagacgcccauugcccugcugcuguacac

SEQ ID NO: 127713 - RNA, 32 nt, Human
cuauagagaucuacuuuucuccuaugucuccu

SEQ ID NO: 127714 - RNA, 32 nt, Human
cuauagagcagaagaauugagaaagagaauga

SEQ ID NO: 127715 - RNA, 32 nt, Human
cuauagaggaccuuguguuggagcucauuuuu

SEQ ID NO: 127716 - RNA, 32 nt, Human
cuauagauucaguaucuacuacccauauuuac

SEQ ID NO: 127717 - RNA, 32 nt, Human
cuauagauuccaccccugcccaccuugcagcc

SEQ ID NO: 127718 - RNA, 32 nt, Human
cuauagauuuuucuuuaacaagcuauuuuaaa

SEQ ID NO: 127719 - RNA, 32 nt, Human
cuauagcaaacaguuggagcauuauucaaacu

SEQ ID NO: 127720 - RNA, 32 nt, Human
cuauagcagaugggaguggggcacuccgagag

SEQ ID NO: 127721 - RNA, 32 nt, Human
cuauagcaucuucucauucccauguggaacag

SEQ ID NO: 127722 - RNA, 32 nt, Human
cuauagccacauaauuuucacccggccagcca

SEQ ID NO: 127723 - RNA, 32 nt, Human
cuauagccccuucacaauauaguaucccucua

SEQ ID NO: 127724 - RNA, 32 nt, Human
cuauagccuagacuagaucccuuacccucucu

SEQ ID NO: 127725 - RNA, 32 nt, Human
cuauagccucaaacuucugggcuuaagcaauc

SEQ ID NO: 127726 - RNA, 32 nt, Human
cuauagcguguguguuugcuuuguaucuaaca

SEQ ID NO: 127727 - RNA, 32 nt, Human
cuauagcuuggaacagggaggcuuugauuacu

SEQ ID NO: 127728 - RNA, 32 nt, Human
cuauaggcgcccgccaccacacccagcuaaau

SEQ ID NO: 127729 - RNA, 32 nt, Human
cuauaggcugggcuuccccuuggggcggaacu

SEQ ID NO: 127730 - RNA, 32 nt, Human
cuauaggucagcccccuggcucugccucuccu

SEQ ID NO: 127731 - RNA, 32 nt, Human
cuauagguggagcaucagcagugagugaggcc

SEQ ID NO: 127732 - RNA, 32 nt, Human
cuauagguuuuuaaauggaauuuucuaauaua

SEQ ID NO: 127733 - RNA, 32 nt, Human
cuauaguagaaggaauuggacacuucuccaga

SEQ ID NO: 127734 - RNA, 18 nt, Human
cuauaguccaagguuucu

SEQ ID NO: 127735 - RNA, 32 nt, Human
cuauaguccauguaacaaaagaucuggaaguc

SEQ ID NO: 127736 - RNA, 32 nt, Human
cuauagucccagcugcccaggaggcugaggca

SEQ ID NO: 127737 - RNA, 32 nt, Human
cuauaguccugagacccccugccagcaaagag

SEQ ID NO: 127738 - RNA, 32 nt, Human
cuauagugacaucaucccagacugccuucugu

SEQ ID NO: 127739 - RNA, 32 nt, Human
cuauaguggagugaaugagucagaggguggua

SEQ ID NO: 127740 - RNA, 32 nt, Human
cuauaguuacuaugaaguuaacacagcccaaa

SEQ ID NO: 127741 - RNA, 32 nt, Human
cuauaguuaguauuuuguauguauguacaggc

SEQ ID NO: 127742 - RNA, 32 nt, Human
cuauaguuggcuuuguccucacucucucacuu

SEQ ID NO: 127743 - RNA, 32 nt, Human
cuauauaaggaggucagagauggacuguggcc

SEQ ID NO: 127744 - RNA, 32 nt, Human
cuauauaauccuuagauuuaggaaagcaauca

SEQ ID NO: 127745 - RNA, 32 nt, Human
cuauauacuuccugugaguaguaauuuuaguu

SEQ ID NO: 127746 - RNA, 32 nt, Human
cuauauagcagccuuugcuauuuucugcuacc

SEQ ID NO: 127747 - RNA, 32 nt, Human
cuauauagcuuggcuaaauuauacaagacuua

SEQ ID NO: 127748 - RNA, 32 nt, Human
cuauauaggaggcugaggcaggagaaucacuu

SEQ ID NO: 127749 - RNA, 32 nt, Human
cuauaucaagaggcagacugaagcuuggaaau

SEQ ID NO: 127750 - RNA, 32 nt, Human
cuauaucaauugaggggaaagugcaguaccgu

SEQ ID NO: 127751 - RNA, 28 nt, Human
cuauauccaagugcuuccuccaagucac

SEQ ID NO: 127752 - RNA, 32 nt, Human
cuauaucuacaucuucacggucucugagaucc

SEQ ID NO: 127753 - RNA, 32 nt, Human
cuauaucucauaagcuuugguugccugcauga

SEQ ID NO: 127754 - RNA, 32 nt, Human
cuauaucucuauaacauaucuugguuuagaag

SEQ ID NO: 127755 - RNA, 32 nt, Human
cuauaucuuaaagaagaaagaaaacaauuaag

SEQ ID NO: 127756 - RNA, 32 nt, Human
cuauaugaagagaaugaucucuucucaaagac

SEQ ID NO: 127757 - RNA, 32 nt, Human
cuauaugaaggaauggauggcuuuugugggcc

SEQ ID NO: 127758 - RNA, 32 nt, Human
cuauaugaagguaaauuagaaauaaguaugaa

SEQ ID NO: 127759 - RNA, 29 nt, Human
cuauaugaaggugauucuggggagaucag

SEQ ID NO: 127760 - RNA, 32 nt, Human
cuauaugaccugugccuuuccuucauuaaaga

SEQ ID NO: 127761 - RNA, 32 nt, Human
cuauaugaggagagaggagcagcaggcaggca

SEQ ID NO: 127762 - RNA, 32 nt, Human
cuauaugcagauuuuaaaaucuagucaguacu

SEQ ID NO: 127763 - RNA, 32 nt, Human
cuauaugcaugaagcuucuguuuauuguuuuc

SEQ ID NO: 127764 - RNA, 32 nt, Human
cuauaugcucugggugacagcgggaaggugcu

SEQ ID NO: 127765 - RNA, 32 nt, Human
cuauauggaacauggcagaaagacugaaaaau

SEQ ID NO: 127766 - RNA, 32 nt, Human
cuauauggagugagaaaauucuucucaucuug

SEQ ID NO: 127767 - RNA, 21 nt, Human
cuauauguaucuuaauguagu

SEQ ID NO: 127768 - RNA, 21 nt, Human
cuauauguauuuuaacuuagu

SEQ ID NO: 127769 - RNA, 30 nt, Human
cuauauguuucccaggcuggucuugcacuc

SEQ ID NO: 127770 - RNA, 32 nt, Human
cuauauuaauuucauuacuguguuuaauugca

SEQ ID NO: 127771 - RNA, 32 nt, Human
cuauauuaccuacaaaugaaacuuaccuacac

SEQ ID NO: 127772 - RNA, 32 nt, Human
cuauauucauucuuuugagaauugcucauuca

SEQ ID NO: 127773 - RNA, 32 nt, Human
cuauauucucagaaauaucuagcaugguauau

SEQ ID NO: 127774 - RNA, 32 nt, Human
cuauauucucauugcugagcacacaguugcag

SEQ ID NO: 127775 - RNA, 32 nt, Human
cuauauugauggugauguucucuuuuccaauu

SEQ ID NO: 127776 - RNA, 32 nt, Human
cuauauugcccaagcuacagugcaaugauuaa

SEQ ID NO: 127777 - RNA, 32 nt, Human
cuauauugcccaggcuggucuugaaguccugg

SEQ ID NO: 127778 - RNA, 32 nt, Human
cuauauuggcucauaaaacuaaccugaaaaac

SEQ ID NO: 127779 - RNA, 32 nt, Human
cuauauuguccaggcuagagugcaguggcuau

SEQ ID NO: 127780 - RNA, 32 nt, Human
cuauauuuaaagccagccuguuuucagaguau

SEQ ID NO: 127781 - RNA, 32 nt, Human
cuauauuuauucaagugucuauugcuuaauug

SEQ ID NO: 127782 - RNA, 32 nt, Human
cuauauuugaagccuuagaucucuccagcaca

SEQ ID NO: 127783 - RNA, 32 nt, Human
cuauauuugcagcuguaucucacacuaugauu

SEQ ID NO: 127784 - RNA, 32 nt, Human
cuauauuugucuguacuccccuaggagaagua

SEQ ID NO: 127785 - RNA, 32 nt, Human
cuauauuugugagccuaggguaggggcacugc

SEQ ID NO: 127786 - RNA, 32 nt, Human
cuauauuuucuaaggagugaauaauauugucc

SEQ ID NO: 127787 - RNA, 32 nt, Human
cuaucaaaaagcuaacaugcaaggaccugagg

SEQ ID NO: 127788 - RNA, 32 nt, Human
cuaucaaaagccccacuauccccuaaagaccc

SEQ ID NO: 127789 - RNA, 32 nt, Human
cuaucaaaagccucuggaaauaaauguuccgg

SEQ ID NO: 127790 - RNA, 32 nt, Human
cuaucaaaagguugucuccacaccuggauuua

SEQ ID NO: 127791 - RNA, 32 nt, Human
cuaucaaaccaccaaugacauucuucacagaa

SEQ ID NO: 127792 - RNA, 32 nt, Human
cuaucaaaguguugggauuacaggcuugagcc

SEQ ID NO: 127793 - RNA, 32 nt, Human
cuaucaaaucagccugggaagcaucuuuucgc

SEQ ID NO: 127794 - RNA, 32 nt, Human
cuaucaacaguaguuuugaaacuagaagucaa

SEQ ID NO: 127795 - RNA, 32 nt, Human
cuaucaacuuucugccccuccuucaaggccca

SEQ ID NO: 127796 - RNA, 32 nt, Human
cuaucaagauguuuagaacccuugccacaaga

SEQ ID NO: 127797 - RNA, 32 nt, Human
cuaucaaggccuucucuucuucucuguguccc

SEQ ID NO: 127798 - RNA, 32 nt, Human
cuaucaaucuggguuuuaaguguggauucauu

SEQ ID NO: 127799 - RNA, 32 nt, Human
cuaucaaugccacugcccacaucccugcccgu

SEQ ID NO: 127800 - RNA, 32 nt, Human
cuaucacaauugcuuuuuaguuauuucucaag

SEQ ID NO: 127801 - RNA, 32 nt, Human
cuaucacacaggcuggagggcaguggcaggau

SEQ ID NO: 127802 - RNA, 32 nt, Human
cuaucacaccacugugcucuagccugggugac

SEQ ID NO: 127803 - RNA, 18 nt, Human
cuaucacacguggccuug

SEQ ID NO: 127804 - RNA, 32 nt, Human
cuaucacagcacucggugcagccggucaucug

SEQ ID NO: 127805 - RNA, 32 nt, Human
cuaucaccaaggcuggaauucagcggcacaau

SEQ ID NO: 127806 - RNA, 32 nt, Human
cuaucaccaggugggagugcaguggcacaauc

SEQ ID NO: 127807 - RNA, 32 nt, Human
cuaucaccaucaccaccagcagcaccugcuga

SEQ ID NO: 127808 - RNA, 32 nt, Human
cuaucacccaagcuggaguacaguggcacaaa

SEQ ID NO: 127809 - RNA, 32 nt, Human
cuaucacccaagcuggagugcaguggcaccau

SEQ ID NO: 127810 - RNA, 32 nt, Human
cuaucacccaggcuagagggcaguggcacaau

SEQ ID NO: 127811 - RNA, 32 nt, Human
cuaucacccaggcugaagugcaguagugcaau

SEQ ID NO: 127812 - RNA, 32 nt, Human
cuaucacccaggcugaagugcagugguacgau

SEQ ID NO: 127813 - RNA, 32 nt, Human
cuaucacccaggcuggagugcaguggcauaau

SEQ ID NO: 127814 - RNA, 32 nt, Human
cuaucacccaggcuggagugcaguggugcaau

SEQ ID NO: 127815 - RNA, 32 nt, Human
cuaucacccaggcuggagugcaguguggcugg

SEQ ID NO: 127816 - RNA, 23 nt, Human
cuaucacccaggcuggaguggag

SEQ ID NO: 127817 - RNA, 32 nt, Human
cuaucacccaggcuggaguggaguggcacgau

SEQ ID NO: 127818 - RNA, 32 nt, Human
cuaucacccaggcuggaguggagugguaugau

SEQ ID NO: 127819 - RNA, 32 nt, Human
cuaucaccuaaaggcacguugucucuggacaa

SEQ ID NO: 127820 - RNA, 32 nt, Human
cuaucaccuaggcuggagugcagcggcaugac

SEQ ID NO: 127821 - RNA, 32 nt, Human
cuaucaccuauacccuguuucuagugagugcu

SEQ ID NO: 127822 - RNA, 32 nt, Human
cuaucaccugggcuggagugcgauggcaugau

SEQ ID NO: 127823 - RNA, 32 nt, Human
cuaucaccuguagcucccucccuaccuguaau

SEQ ID NO: 127824 - RNA, 32 nt, Human
cuaucacugcaaccuccgccuccuggguucaa

SEQ ID NO: 127825 - RNA, 32 nt, Human
cuaucacuguaacuuuuauucacuucaguggg

SEQ ID NO: 127826 - RNA, 32 nt, Human
cuaucacuuccuggccucuccaccaacuguac

SEQ ID NO: 127827 - RNA, 32 nt, Human
cuaucagauuccauggccguauaaagacaauc

SEQ ID NO: 127828 - RNA, 32 nt, Human
cuaucagcacuuucagcaucggcucuucagca

SEQ ID NO: 127829 - RNA, 32 nt, Human
cuaucagccauggucaacuccgucaucuuuuu

SEQ ID NO: 127830 - RNA, 32 nt, Human
cuaucagccauggucaacuccgucgucuuuuu

SEQ ID NO: 127831 - RNA, 32 nt, Human
cuaucagcuguagacuuguaugugccagguau

SEQ ID NO: 127832 - RNA, 32 nt, Human
cuaucaggaaaucuacaugugugcacagagag

SEQ ID NO: 127833 - RNA, 32 nt, Human
cuaucaguauccagcugaaggcugcuggguuc

SEQ ID NO: 127834 - RNA, 32 nt, Human
cuaucaguguggaauuugauagagucuagacu

SEQ ID NO: 127835 - RNA, 32 nt, Human
cuaucauagauauauuucaaauauuguacuac

SEQ ID NO: 127836 - RNA, 32 nt, Human
cuaucauaggcaccuucuuuacaucugauuac

SEQ ID NO: 127837 - RNA, 32 nt, Human
cuaucauauaaacaucuuuaacuauagccuag

SEQ ID NO: 127838 - RNA, 32 nt, Human
cuaucaucaccaucaccacuacuucugccaca

SEQ ID NO: 127839 - RNA, 20 nt, Human
cuaucaucagacaaaacuca

SEQ ID NO: 127840 - RNA, 23 nt, Human
cuaucaucagcaaauagagcuca

SEQ ID NO: 127841 - RNA, 32 nt, Human
cuaucaucaggucacgggcagcuccuguggag

SEQ ID NO: 127842 - RNA, 32 nt, Human
cuaucauccuucaguuuuagcacuggcauuug

SEQ ID NO: 127843 - RNA, 32 nt, Human
cuaucaucggccaugccacugccuugcucugg

SEQ ID NO: 127844 - RNA, 32 nt, Human
cuaucaucuuucuccuccucugcuaaaugccu

SEQ ID NO: 127845 - RNA, 32 nt, Human
cuaucaugagucugguagaaaaguaaaaguaa

SEQ ID NO: 127846 - RNA, 32 nt, Human
cuaucauggcagcugcucagucgcaggcucca

SEQ ID NO: 127847 - RNA, 19 nt, Human
cuaucauguaucuucugua

SEQ ID NO: 127848 - RNA, 32 nt, Human
cuaucauucgucuucuuuuccaaacuacacau

SEQ ID NO: 127849 - RNA, 32 nt, Human
cuaucauuucaucagagacaugaucagaaaag

SEQ ID NO: 127850 - RNA, 32 nt, Human
cuaucauuucuugggagaaaugguguugcugc

SEQ ID NO: 127851 - RNA, 32 nt, Human
cuauccaagguucauguuccaaagucaagccu

SEQ ID NO: 127852 - RNA, 32 nt, Human
cuauccaauacaguaaccacaugcggcuguuu

SEQ ID NO: 127853 - RNA, 32 nt, Human
cuauccaauagggaaaagacacaacaguaggg

SEQ ID NO: 127854 - RNA, 32 nt, Human
cuauccacagagagucccacugccucagguuc

SEQ ID NO: 127855 - RNA, 32 nt, Human
cuauccacgccuaugaaucuuuggacggugag

SEQ ID NO: 127856 - RNA, 32 nt, Human
cuauccagaaugcaucucuucugcuucccauc

SEQ ID NO: 127857 - RNA, 32 nt, Human
cuauccagauaugccacacuucugccugcugu

SEQ ID NO: 127858 - RNA, 32 nt, Human
cuauccaggcugggacauuuuauuuuuguucu

SEQ ID NO: 127859 - RNA, 32 nt, Human
cuauccagugacuuguucugaguaaguguguu

SEQ ID NO: 127860 - RNA, 32 nt, Human
cuauccauaccaaggaggccagccuggcccug

SEQ ID NO: 127861 - RNA, 32 nt, Human
cuauccauaccaccauccuaaacccacacguc

SEQ ID NO: 127862 - RNA, 32 nt, Human
cuauccauccaucauaaccaccccagccuggg

SEQ ID NO: 127863 - RNA, 32 nt, Human
cuauccaucucucuaaucuuugcccaucaccu

SEQ ID NO: 127864 - RNA, 32 nt, Human
cuauccauuucuuagcuaucaugcuccucauc

SEQ ID NO: 127865 - RNA, 32 nt, Human
cuaucccagaggucgaggcugcagugagcugu

SEQ ID NO: 127866 - RNA, 32 nt, Human
cuaucccagcucacagugcccaaccaucucac

SEQ ID NO: 127867 - RNA, 32 nt, Human
cuauccccaccuacuccugggucaggaggaaa

SEQ ID NO: 127868 - RNA, 32 nt, Human
cuaucccggcacgcucccucugcagauggucg

SEQ ID NO: 127869 - RNA, 32 nt, Human
cuaucccguggaugcagagcaagagcaaccca

SEQ ID NO: 127870 - RNA, 32 nt, Human
cuaucccucaucccagacacaggugugccuca

SEQ ID NO: 127871 - RNA, 32 nt, Human
cuaucccuccccacugcccccaccccacaaca

SEQ ID NO: 127872 - RNA, 32 nt, Human
cuaucccucgucccaugccuccugccucuccc

SEQ ID NO: 127873 - RNA, 32 nt, Human
cuaucccugcagccacucccagcacacccgca

SEQ ID NO: 127874 - RNA, 32 nt, Human
cuaucccugcagcugcagggcacuaaugaccc

SEQ ID NO: 127875 - RNA, 32 nt, Human
cuaucccugccucuucuucgcccuguucugug

SEQ ID NO: 127876 - RNA, 32 nt, Human
cuaucccuuucgauuuggcuuuaccuucaucu

SEQ ID NO: 127877 - RNA, 32 nt, Human
cuauccgcaagcucaagagaucccagagauuc

SEQ ID NO: 127878 - RNA, 32 nt, Human
cuauccuaacaagccuuggaccaaauggaaau

SEQ ID NO: 127879 - RNA, 32 nt, Human
cuauccuaagggaaugaucagagauggaaaca

SEQ ID NO: 127880 - RNA, 32 nt, Human
cuauccucaucucuccccagaugugacuacug

SEQ ID NO: 127881 - RNA, 32 nt, Human
cuauccuccaaaacagagggagccauuuuaua

SEQ ID NO: 127882 - RNA, 32 nt, Human
cuauccuccugccucagccuccgagguagcug

SEQ ID NO: 127883 - RNA, 32 nt, Human
cuauccucgucagccccacccugcugccucag

SEQ ID NO: 127884 - RNA, 32 nt, Human
cuauccucucagagugacauuuuaaccacuca

SEQ ID NO: 127885 - RNA, 18 nt, Human
cuauccucucuucaggga

SEQ ID NO: 127886 - RNA, 32 nt, Human
cuauccucuuccucucuccaugcuccugacuc

SEQ ID NO: 127887 - RNA, 32 nt, Human
cuauccugaauaacuagcauggaaaagugaau

SEQ ID NO: 127888 - RNA, 32 nt, Human
cuauccugcucuucuguugaaacacacgugcu

SEQ ID NO: 127889 - RNA, 32 nt, Human
cuauccuggaaaccuguacaaaagguugagau

SEQ ID NO: 127890 - RNA, 32 nt, Human
cuauccuggagaaugcugcaugugagacccaa

SEQ ID NO: 127891 - RNA, 32 nt, Human
cuauccuggcucuuuggagaucaaggagagga

SEQ ID NO: 127892 - RNA, 32 nt, Human
cuauccugggaugggaaaaugagggagggaua

SEQ ID NO: 127893 - RNA, 32 nt, Human
cuauccugggcaacagauggagaccuugucuc

SEQ ID NO: 127894 - RNA, 32 nt, Human
cuauccuggucaacaugaugaaacccugucua

SEQ ID NO: 127895 - RNA, 32 nt, Human
cuauccuguguauguauaaguguguacaagca

SEQ ID NO: 127896 - RNA, 32 nt, Human
cuauccuguuucucagaacaguuuuuaaaugc

SEQ ID NO: 127897 - RNA, 32 nt, Human
cuauccuucuucuccagcuccuccugcucccu

SEQ ID NO: 127898 - RNA, 32 nt, Human
cuauccuugauacaacagcugaccucauuucc

SEQ ID NO: 127899 - RNA, 32 nt, Human
cuauccuugaugauguguuuaaacugaguagc

SEQ ID NO: 127900 - RNA, 32 nt, Human
cuaucgaaggggauguggaaucccagagcuac

SEQ ID NO: 127901 - RNA, 32 nt, Human
cuaucgagguauuugguaacuugcugugaaau

SEQ ID NO: 127902 - RNA, 32 nt, Human
cuaucgcccaggauggagugcaguggcucaau

SEQ ID NO: 127903 - RNA, 32 nt, Human
cuaucgcccaggcuggagugcaauggcacaau

SEQ ID NO: 127904 - RNA, 32 nt, Human
cuaucgcccaggcuggagugcaguggcgcauu

SEQ ID NO: 127905 - RNA, 32 nt, Human
cuaucgcuccccucggcuacgcugccacucca

SEQ ID NO: 127906 - RNA, 32 nt, Human
cuaucggagcaguucaauaacaaagguuacug

SEQ ID NO: 127907 - RNA, 32 nt, Human
cuaucggcauguuguagaguuuuauuacuaag

SEQ ID NO: 127908 - RNA, 32 nt, Human
cuaucggccaggcuggagugcaguggugcaau

SEQ ID NO: 127909 - RNA, 32 nt, Human
cuaucggugcugcuucugcccgcuuuaaggag

SEQ ID NO: 127910 - RNA, 32 nt, Human
cuaucguuaguguuaguguacuuuaugugugg

SEQ ID NO: 127911 - RNA, 32 nt, Human
cuaucguugcugguagagccugggcuugcugu

SEQ ID NO: 127912 - RNA, 32 nt, Human
cuaucuaagggagggcugaagacaaggggccg

SEQ ID NO: 127913 - RNA, 32 nt, Human
cuaucuacauccagacgguggaagggagagaa

SEQ ID NO: 127914 - RNA, 32 nt, Human
cuaucuagugagcagaggugagggaugcugcu

SEQ ID NO: 127915 - RNA, 32 nt, Human
cuaucuauccaaaaaucaauaaaauagaauua

SEQ ID NO: 127916 - RNA, 32 nt, Human
cuaucuaucgcugcucucuucuugucauccuu

SEQ ID NO: 127917 - RNA, 32 nt, Human
cuaucucacuggcugcauucccuacacaggga

SEQ ID NO: 127918 - RNA, 26 nt, Human
cuaucucagacagugaaagugaaaug

SEQ ID NO: 127919 - RNA, 32 nt, Human
cuaucucagaugggugcugaaauauuuuaaua

SEQ ID NO: 127920 - RNA, 32 nt, Human
cuaucucagccacauuguuggcaauuuaauuu

SEQ ID NO: 127921 - RNA, 32 nt, Human
cuaucucauuauauuaccuaugguuucaguau

SEQ ID NO: 127922 - RNA, 32 nt, Human
cuaucuccacuaaaaauacaaaauuagcuggg

SEQ ID NO: 127923 - RNA, 32 nt, Human
cuaucuccaguuuguauuauuucuugaaaguc

SEQ ID NO: 127924 - RNA, 32 nt, Human
cuaucucccacacccacggcugcauaccugca

SEQ ID NO: 127925 - RNA, 32 nt, Human
cuaucucccugccuccugccggcuccuugguu

SEQ ID NO: 127926 - RNA, 32 nt, Human
cuaucuccugccgcccccacucuggcuggcuu

SEQ ID NO: 127927 - RNA, 32 nt, Human
cuaucucgcauucuucucagguugccaggaaa

SEQ ID NO: 127928 - RNA, 32 nt, Human
cuaucucggacugagagaaagagcagagacug

SEQ ID NO: 127929 - RNA, 32 nt, Human
cuaucucuacuaaaaauacaaaauuagccagg

SEQ ID NO: 127930 - RNA, 32 nt, Human
cuaucucuacuaaaauacaaaaauuagcuggg

SEQ ID NO: 127931 - RNA, 32 nt, Human
cuaucucucacaccucucccagacuaugucau

SEQ ID NO: 127932 - RNA, 32 nt, Human
cuaucucuccaucccucugucccuugcucuuc

SEQ ID NO: 127933 - RNA, 32 nt, Human
cuaucucugaagggcacaaaucagaaggcacc

SEQ ID NO: 127934 - RNA, 32 nt, Human
cuaucucuuagcaaaggugaauaccagaugua

SEQ ID NO: 127935 - RNA, 32 nt, Human
cuaucucuucacccuucauucuuucaacaaac

SEQ ID NO: 127936 - RNA, 32 nt, Human
cuaucucuugggaagaacuggcuucauuccua

SEQ ID NO: 127937 - RNA, 32 nt, Human
cuaucugcacacacaaaaugcccaaggcacuc

SEQ ID NO: 127938 - RNA, 32 nt, Human
cuaucugcaccaggaggcucuccaccuggcag

SEQ ID NO: 127939 - RNA, 32 nt, Human
cuaucugcagcuccuaggugcuuuccucaggc

SEQ ID NO: 127940 - RNA, 32 nt, Human
cuaucugcagguccccagccuggguaaagaug

SEQ ID NO: 127941 - RNA, 32 nt, Human
cuaucugccgccgcuguucgugcaauaugcug

SEQ ID NO: 127942 - RNA, 32 nt, Human
cuaucugcugcagagauccucucaucuguggc

SEQ ID NO: 127943 - RNA, 32 nt, Human
cuaucugggaggcugaggcaggagaauggcgu

SEQ ID NO: 127944 - RNA, 32 nt, Human
cuaucuggucggagcagagcauggacauggga

SEQ ID NO: 127945 - RNA, 32 nt, Human
cuaucuggugcuggugugccagccccuccccc

SEQ ID NO: 127946 - RNA, 32 nt, Human
cuaucuguaaagccuuugacccaggccuacug

SEQ ID NO: 127947 - RNA, 32 nt, Human
cuaucuguacuaaaaacacaaaauuagcuggg

SEQ ID NO: 127948 - RNA, 32 nt, Human
cuaucugucuuaauuucuuugucaguaaaaua

SEQ ID NO: 127949 - RNA, 32 nt, Human
cuaucugugaccaugcucuucucccaauuuaa

SEQ ID NO: 127950 - RNA, 32 nt, Human
cuaucugugagaggcaucgcuuuugcuuuguu

SEQ ID NO: 127951 - RNA, 32 nt, Human
cuaucugugccucguugucugccuccuggggc

SEQ ID NO: 127952 - RNA, 32 nt, Human
cuaucugugcuacccaccagcguaccugagca

SEQ ID NO: 127953 - RNA, 32 nt, Human
cuaucugugugcagugcucugaggggacagac

SEQ ID NO: 127954 - RNA, 32 nt, Human
cuaucugugugugcucugccauuuauugacuu

SEQ ID NO: 127955 - RNA, 32 nt, Human
cuaucuuaauuagccacccacagcugcuaccg

SEQ ID NO: 127956 - RNA, 32 nt, Human
cuaucuuacucccuuuccccaguucuuuguac

SEQ ID NO: 127957 - RNA, 32 nt, Human
cuaucuuauauacuuacuauuuuacuucuaga

SEQ ID NO: 127958 - RNA, 32 nt, Human
cuaucuucaaugaccaguccagaagggguuaa

SEQ ID NO: 127959 - RNA, 32 nt, Human
cuaucuucauuucccacuuccccucucugauu

SEQ ID NO: 127960 - RNA, 32 nt, Human
cuaucuuccuguagccucaucaauccugguug

SEQ ID NO: 127961 - RNA, 32 nt, Human
cuaucuuccuuuccuuuuucuuuucuucccua

SEQ ID NO: 127962 - RNA, 32 nt, Human
cuaucuucuucuccucuucuucucucucuugc

SEQ ID NO: 127963 - RNA, 32 nt, Human
cuaucuugcccaggcuugcaauuuauagagcu

SEQ ID NO: 127964 - RNA, 32 nt, Human
cuaucuugccgcccgcccccuccagggggcuc

SEQ ID NO: 127965 - RNA, 29 nt, Human
cuaucuuggcugccaucaucccucccagc

SEQ ID NO: 127966 - RNA, 32 nt, Human
cuaucuuggugaugggugggggccaagaauug

SEQ ID NO: 127967 - RNA, 32 nt, Human
cuaucuuuagccagacuguugcaguuauugcu

SEQ ID NO: 127968 - RNA, 32 nt, Human
cuaucuuucccaaggcaaccugucuggacuga

SEQ ID NO: 127969 - RNA, 32 nt, Human
cuaucuuucucagugggguggcacggagcggg

SEQ ID NO: 127970 - RNA, 32 nt, Human
cuaucuuugccucacuuagucaugugcaauuc

SEQ ID NO: 127971 - RNA, 32 nt, Human
cuaucuuuuaaaauugcuggugaaaacuugcc

SEQ ID NO: 127972 - RNA, 32 nt, Human
cuaucuuuuauuauuucuggcuuuucaaccaa

SEQ ID NO: 127973 - RNA, 32 nt, Human
cuaucuuuugguauacuugugugaaaguggcu

SEQ ID NO: 127974 - RNA, 23 nt, Human
cuaucuuuuuuguaauguuggca

SEQ ID NO: 127975 - RNA, 32 nt, Human
cuaugaaaaauauuuaaaaauuagcugggcau

SEQ ID NO: 127976 - RNA, 22 nt, Human
cuaugaaaacuuagcugaaagg

SEQ ID NO: 127977 - RNA, 32 nt, Human
cuaugaaaagugggcuuggagauggcaggaga

SEQ ID NO: 127978 - RNA, 32 nt, Human
cuaugaaacucaucauauaacacagacauuaa

SEQ ID NO: 127979 - RNA, 32 nt, Human
cuaugaaaggaauugguugagguggaauauaa

SEQ ID NO: 127980 - RNA, 32 nt, Human
cuaugaacaagugcgcagugcugcagucuagc

SEQ ID NO: 127981 - RNA, 32 nt, Human
cuaugaacaccacugcacuccaccuguccacu

SEQ ID NO: 127982 - RNA, 32 nt, Human
cuaugaacagaagauaacugacuuagcagcag

SEQ ID NO: 127983 - RNA, 32 nt, Human
cuaugaaccugaaaagggucagaaggaugccc

SEQ ID NO: 127984 - RNA, 32 nt, Human
cuaugaagaacugucucccaacaaaggauaca

SEQ ID NO: 127985 - RNA, 32 nt, Human
cuaugaagagaagauuugggaggaguaugaga

SEQ ID NO: 127986 - RNA, 32 nt, Human
cuaugaaggcagagcuucuauucuuuauggga

SEQ ID NO: 127987 - RNA, 32 nt, Human
cuaugaagucuccacccuggcccagggucuug

SEQ ID NO: 127988 - RNA, 32 nt, Human
cuaugaagucucgacccuagcccagggucugg

SEQ ID NO: 127989 - RNA, 32 nt, Human
cuaugaaugaaucucaaaauuaggcaguuuuu

SEQ ID NO: 127990 - RNA, 27 nt, Human
cuaugaauucuuuucucucuguauuua

SEQ ID NO: 127991 - RNA, 32 nt, Human
cuaugacccaagucucuccccacuacuuguaa

SEQ ID NO: 127992 - RNA, 32 nt, Human
cuaugaccgcagcaucuucaccuccacaaucg

SEQ ID NO: 127993 - RNA, 32 nt, Human
cuaugacguaaccacccugcaggaugaggagg

SEQ ID NO: 127994 - RNA, 32 nt, Human
cuaugacucccaggaccucaaguauggugagg

SEQ ID NO: 127995 - RNA, 32 nt, Human
cuaugacugcgccgucuuccacaacaccgaca

SEQ ID NO: 127996 - RNA, 32 nt, Human
cuaugacuuacccagaaggcaacgcuucucuu

SEQ ID NO: 127997 - RNA, 32 nt, Human
cuaugagacuggcuaauuuuucguauuuuugg

SEQ ID NO: 127998 - RNA, 32 nt, Human
cuaugagauacgcacaauacuugcuguucacg

SEQ ID NO: 127999 - RNA, 32 nt, Human
cuaugagauggacuauaacuugcccaaauuuu

SEQ ID NO: 128000 - RNA, 32 nt, Human
cuaugagccuacugcuggcucagguuccaguc

SEQ ID NO: 128001 - RNA, 32 nt, Human
cuaugagcugcugaagcagcgccaagccuugc

SEQ ID NO: 128002 - RNA, 32 nt, Human
cuaugaggaaaucaaccacagugaaaaggcuu

SEQ ID NO: 128003 - RNA, 32 nt, Human
cuaugaggaugcagcuggccccagggaugucc

SEQ ID NO: 128004 - RNA, 32 nt, Human
cuaugaggcaucuggccccugguagccagcuc

SEQ ID NO: 128005 - RNA, 32 nt, Human
cuaugaggcuggaaccuccuccuucuuccagu

SEQ ID NO: 128006 - RNA, 32 nt, Human
cuaugagggcagaacccagcaaucugugcuuu

SEQ ID NO: 128007 - RNA, 32 nt, Human
cuaugaggguggcaucuggccacuugaauggc

SEQ ID NO: 128008 - RNA, 32 nt, Human
cuaugaguagccacugcacuccagccugggca

SEQ ID NO: 128009 - RNA, 32 nt, Human
cuaugagucuguuuccccaucauuugguaucu

SEQ ID NO: 128010 - RNA, 32 nt, Human
cuaugaguuuuuaaagcuuguuuuccuaagca

SEQ ID NO: 128011 - RNA, 32 nt, Human
cuaugauaauuuaaaauacauagguagggcua

SEQ ID NO: 128012 - RNA, 32 nt, Human
cuaugaucacacugccgcacugaagccuggau

SEQ ID NO: 128013 - RNA, 32 nt, Human
cuaugaucacgccugugaauugccacugcacu

SEQ ID NO: 128014 - RNA, 32 nt, Human
cuaugaucaugccugugaauagccacugcacu

SEQ ID NO: 128015 - RNA, 32 nt, Human
cuaugaucucaggagcuugcaagaagcaggaa

SEQ ID NO: 128016 - RNA, 32 nt, Human
cuaugaugaugucuuccuagggaguagagaaa

SEQ ID NO: 128017 - RNA, 32 nt, Human
cuaugaugucccccuucucugaggccuggacc

SEQ ID NO: 128018 - RNA, 32 nt, Human
cuaugauugugccacacacuccagccugggug

SEQ ID NO: 128019 - RNA, 32 nt, Human
cuaugcaaaaagaagguggggaagaaaguguu

SEQ ID NO: 128020 - RNA, 32 nt, Human
cuaugcaaaacaaucuaucccagguucuguuc

SEQ ID NO: 128021 - RNA, 32 nt, Human
cuaugcaaagagauguacugcauuuuaccccc

SEQ ID NO: 128022 - RNA, 32 nt, Human
cuaugcaaauuggauuccauagaaguuuuagc

SEQ ID NO: 128023 - RNA, 32 nt, Human
cuaugcacaagaaaauacuaaaccaaauauau

SEQ ID NO: 128024 - RNA, 32 nt, Human
cuaugcacaccaggauagacaaggcaggggau

SEQ ID NO: 128025 - RNA, 32 nt, Human
cuaugcacuacugcucugaagcuucuggaauc

SEQ ID NO: 128026 - RNA, 32 nt, Human
cuaugcagagggugguccaucuuggcacugaa

SEQ ID NO: 128027 - RNA, 32 nt, Human
cuaugcagcaaccccaacuuauguggguugcc

SEQ ID NO: 128028 - RNA, 32 nt, Human
cuaugcagccaaggcuggaagccacucuggau

SEQ ID NO: 128029 - RNA, 32 nt, Human
cuaugcaguucugccaugcguccuguuggucu

SEQ ID NO: 128030 - RNA, 32 nt, Human
cuaugcaucugcagaacgcacacucuugggcu

SEQ ID NO: 128031 - RNA, 32 nt, Human
cuaugcaugaugaaugaaugcauuucaaucau

SEQ ID NO: 128032 - RNA, 32 nt, Human
cuaugccacagaacaaacacuacucuagcaga

SEQ ID NO: 128033 - RNA, 32 nt, Human
cuaugccacugcacuccagccuaggugacaaa

SEQ ID NO: 128034 - RNA, 32 nt, Human
cuaugccacugcacucccgccugggugacaaa

SEQ ID NO: 128035 - RNA, 32 nt, Human
cuaugccacuguacuccagccuggguaacagg

SEQ ID NO: 128036 - RNA, 32 nt, Human
cuaugccagccuggcccugcagggucugcgga

SEQ ID NO: 128037 - RNA, 32 nt, Human
cuaugccccagaggacgcugugaucuccaccu

SEQ ID NO: 128038 - RNA, 32 nt, Human
cuaugcccggagccuggaggagcugcugcugg

SEQ ID NO: 128039 - RNA, 32 nt, Human
cuaugcccgggucagcgucuccacccaggccg

SEQ ID NO: 128040 - RNA, 27 nt, Human
cuaugcccuacaacuucugccugccca

SEQ ID NO: 128041 - RNA, 32 nt, Human
cuaugcccucacccuucugcccucacuugauu

SEQ ID NO: 128042 - RNA, 32 nt, Human
cuaugcccuccccaccaugccuccuucccagg

SEQ ID NO: 128043 - RNA, 32 nt, Human
cuaugccguagggccaggugagcugcugugaa

SEQ ID NO: 128044 - RNA, 32 nt, Human
cuaugccuaggcaaacuacuaacaugcauugu

SEQ ID NO: 128045 - RNA, 32 nt, Human
cuaugccucaucaugucccaaaccagacaccu

SEQ ID NO: 128046 - RNA, 32 nt, Human
cuaugccucccagggagccacguaugucugcg

SEQ ID NO: 128047 - RNA, 32 nt, Human
cuaugccugcuggauuuguuuguauuuguucc

SEQ ID NO: 128048 - RNA, 32 nt, Human
cuaugccugcuugugugggcacgaggagcugg

SEQ ID NO: 128049 - RNA, 32 nt, Human
cuaugccuggcuuaggggcaaccucguacuga

SEQ ID NO: 128050 - RNA, 32 nt, Human
cuaugccugucuuuaccgcaaucucuaaacac

SEQ ID NO: 128051 - RNA, 32 nt, Human
cuaugccuuuacccaucucaucuccauccaga

SEQ ID NO: 128052 - RNA, 32 nt, Human
cuaugcgagaggcugaggcaggagaauggcgu

SEQ ID NO: 128053 - RNA, 27 nt, Human
cuaugcggcuccugccucuagccccag

SEQ ID NO: 128054 - RNA, 32 nt, Human
cuaugcuagcaggggccuggccccaaguguga

SEQ ID NO: 128055 - RNA, 32 nt, Human
cuaugcucagaauaugcucacugcuaagcuac

SEQ ID NO: 128056 - RNA, 32 nt, Human
cuaugcucccucucccccgacuggcgucacag

SEQ ID NO: 128057 - RNA, 32 nt, Human
cuaugcucuaaaacaugaaugcuuuguuacag

SEQ ID NO: 128058 - RNA, 27 nt, Human
cuaugcucuccccagcggaaagugacc

SEQ ID NO: 128059 - RNA, 32 nt, Human
cuaugcucuguaguucuuuccacaaagagcug

SEQ ID NO: 128060 - RNA, 32 nt, Human
cuaugcugaugggccagcaggagccagccaag

SEQ ID NO: 128061 - RNA, 32 nt, Human
cuaugcugcccuuuugacaucaaagaccugcu

SEQ ID NO: 128062 - RNA, 32 nt, Human
cuaugcuggcgauuuuucacucauguagaagu

SEQ ID NO: 128063 - RNA, 32 nt, Human
cuaugcugggucucccuccacugagccacauu

SEQ ID NO: 128064 - RNA, 32 nt, Human
cuaugcuucaugaggcuuacaagaaguaacuu

SEQ ID NO: 128065 - RNA, 32 nt, Human
cuaugcuucuuccuccucagaccuggcaugcc

SEQ ID NO: 128066 - RNA, 32 nt, Human
cuaugcuuguagucacagcuacucgggaggcc

SEQ ID NO: 128067 - RNA, 32 nt, Human
cuauggaaagaacacagaagccaaggucaugu

SEQ ID NO: 128068 - RNA, 32 nt, Human
cuauggaaggggcaaaaugcugccagucucuu

SEQ ID NO: 128069 - RNA, 32 nt, Human
cuauggacaggcugggacagaggcagaugggu

SEQ ID NO: 128070 - RNA, 32 nt, Human
cuauggagaaaaaugaguuaccuggaggguca

SEQ ID NO: 128071 - RNA, 32 nt, Human
cuauggagaaagauucugaacuuucagaaaaa

SEQ ID NO: 128072 - RNA, 32 nt, Human
cuauggagacgcaugcuccugacagccuggcg

SEQ ID NO: 128073 - RNA, 32 nt, Human
cuauggagagaauucagggggucugggagcuu

SEQ ID NO: 128074 - RNA, 32 nt, Human
cuauggagaggcugcugaauccagggccagga

SEQ ID NO: 128075 - RNA, 32 nt, Human
cuauggaggaaaaagaaaaagaaauaagaaau

SEQ ID NO: 128076 - RNA, 32 nt, Human
cuauggaggagagagugauggagggcugagga

SEQ ID NO: 128077 - RNA, 32 nt, Human
cuauggaggccuggcgggcuagcuuggguguc

SEQ ID NO: 128078 - RNA, 32 nt, Human
cuauggagggaucagacagggcugggaacagc

SEQ ID NO: 128079 - RNA, 32 nt, Human
cuauggauguauaugaaacaaaauaaauggag

SEQ ID NO: 128080 - RNA, 32 nt, Human
cuauggcaaugcuucuuucacaagcacggacu

SEQ ID NO: 128081 - RNA, 32 nt, Human
cuauggcacugacuacaggccauguccaggcc

SEQ ID NO: 128082 - RNA, 32 nt, Human
cuauggcauaggaaccaacugccuugccuuca

SEQ ID NO: 128083 - RNA, 32 nt, Human
cuauggccaccugggcacacaccugccccuug

SEQ ID NO: 128084 - RNA, 32 nt, Human
cuauggccauuuacagcugaaccacgucuuca

SEQ ID NO: 128085 - RNA, 27 nt, Human
cuauggcccaggcuggagcgcagcggu

SEQ ID NO: 128086 - RNA, 32 nt, Human
cuauggcccaggcuggaguacagugacacgau

SEQ ID NO: 128087 - RNA, 27 nt, Human
cuauggccucaaccaccagcaccaaga

SEQ ID NO: 128088 - RNA, 32 nt, Human
cuauggccugcuggcccaccucccuggacccc

SEQ ID NO: 128089 - RNA, 32 nt, Human
cuauggccuucgucugugccggcuuauccgag

SEQ ID NO: 128090 - RNA, 32 nt, Human
cuauggccuuggcugagucccuuaaccuuucu

SEQ ID NO: 128091 - RNA, 24 nt, Human
cuauggcucagggaucuguguuga

SEQ ID NO: 128092 - RNA, 32 nt, Human
cuauggcuguucuggguuuuugucauucacag

SEQ ID NO: 128093 - RNA, 30 nt, Human
cuauggcuucuccaccugcuccugccugga

SEQ ID NO: 128094 - RNA, 23 nt, Human
cuaugggaaggcuucacaagaca

SEQ ID NO: 128095 - RNA, 32 nt, Human
cuaugggaaugaggcggauacaggaaacaccc

SEQ ID NO: 128096 - RNA, 32 nt, Human
cuaugggacuccuaccggccucucugugcagc

SEQ ID NO: 128097 - RNA, 32 nt, Human
cuaugggagaggaggagugauggggaccgcca

SEQ ID NO: 128098 - RNA, 32 nt, Human
cuaugggaggcagagcggcaaggacagggcuu

SEQ ID NO: 128099 - RNA, 32 nt, Human
cuaugggaggcccaggugagcagaucaccuga

SEQ ID NO: 128100 - RNA, 32 nt, Human
cuaugggaggcugaggugagaggaucacuuga

SEQ ID NO: 128101 - RNA, 32 nt, Human
cuaugggagggaggggcaggcagucaguggcu

SEQ ID NO: 128102 - RNA, 32 nt, Human
cuaugggauucaacaaaagcaguacuaagagg

SEQ ID NO: 128103 - RNA, 23 nt, Human
cuaugggcucgacucugugcuaa

SEQ ID NO: 128104 - RNA, 32 nt, Human
cuauggggaggcccugccuccgggaggucauu

SEQ ID NO: 128105 - RNA, 32 nt, Human
cuauggggagucugcaguggucucagccacau

SEQ ID NO: 128106 - RNA, 32 nt, Human
cuauggggcagcuggggcuggggagggauggc

SEQ ID NO: 128107 - RNA, 32 nt, Human
cuauggggccuggaagugcccgcugagaaagg

SEQ ID NO: 128108 - RNA, 32 nt, Human
cuaugggggacccccaacucaaggccaaggac

SEQ ID NO: 128109 - RNA, 32 nt, Human
cuaugggguucugacuucacuuuccucagcgg

SEQ ID NO: 128110 - RNA, 32 nt, Human
cuauggguagggaaguuucuauuucuucuuuc

SEQ ID NO: 128111 - RNA, 32 nt, Human
cuaugggugggugguggggaagcuuucaaaua

SEQ ID NO: 128112 - RNA, 32 nt, Human
cuauggguugacuggguccagcugucaguucu

SEQ ID NO: 128113 - RNA, 32 nt, Human
cuaugguaacaucucugacuucucuaccuccu

SEQ ID NO: 128114 - RNA, 32 nt, Human
cuaugguacaacuguuacuagauucuagucuc

SEQ ID NO: 128115 - RNA, 32 nt, Human
cuaugguacuucuuccucauuguuuucuaggu

SEQ ID NO: 128116 - RNA, 32 nt, Human
cuaugguaguuaaaauacagaauuagauuuuu

SEQ ID NO: 128117 - RNA, 32 nt, Human
cuauggucauuugaguuugcaaacaguggucu

SEQ ID NO: 128118 - RNA, 32 nt, Human
cuaugguccacaggcuggagggugcauggaac

SEQ ID NO: 128119 - RNA, 32 nt, Human
cuauggucuucugucauacugagacaggcugu

SEQ ID NO: 128120 - RNA, 32 nt, Human
cuauggugauuaaagguagaguaguacguacc

SEQ ID NO: 128121 - RNA, 32 nt, Human
cuauguaaagcaguuuaaaauggaauucaaug

SEQ ID NO: 128122 - RNA, 32 nt, Human
cuauguaacaaaccugcauauccugcacaugu

SEQ ID NO: 128123 - RNA, 32 nt, Human
cuauguaagggccccgacccacuaccccaucc

SEQ ID NO: 128124 - RNA, 30 nt, Human
cuauguaaguuucauuuagaaagacaugca

SEQ ID NO: 128125 - RNA, 32 nt, Human
cuauguacaaguccuuugucagucgugugauu

SEQ ID NO: 128126 - RNA, 31 nt, Human
cuauguaccagaaucaguuguuggagaaaaa

SEQ ID NO: 128127 - RNA, 32 nt, Human
cuauguacuacucuacccccugccuuagagca

SEQ ID NO: 128128 - RNA, 32 nt, Human
cuauguacuacugcuggacaguuucuccgugg

SEQ ID NO: 128129 - RNA, 32 nt, Human
cuauguagccucccugaucuucuuucagcucc

SEQ ID NO: 128130 - RNA, 32 nt, Human
cuauguagcgcuggcccuagccucuggcagag

SEQ ID NO: 128131 - RNA, 32 nt, Human
cuauguauagagagcuuucaguucauugauuu

SEQ ID NO: 128132 - RNA, 32 nt, Human
cuauguauauagaaugucuguauguauuuuac

SEQ ID NO: 128133 - RNA, 32 nt, Human
cuauguauuuggaaaacauuguaaaugaaaca

SEQ ID NO: 128134 - RNA, 32 nt, Human
cuaugucacccaggcuguggugcaguaagcca

SEQ ID NO: 128135 - RNA, 32 nt, Human
cuaugucacccuggcuggagugcaguagugcg

SEQ ID NO: 128136 - RNA, 32 nt, Human
cuaugucaccgaggcuacagugcagugguuca

SEQ ID NO: 128137 - RNA, 32 nt, Human
cuaugucacucaggcuggagugcaguggcaca

SEQ ID NO: 128138 - RNA, 32 nt, Human
cuaugucagccaauccgauugccuuaggugaa

SEQ ID NO: 128139 - RNA, 32 nt, Human
cuaugucagccuucccuuugauccucaggccc

SEQ ID NO: 128140 - RNA, 31 nt, Human
cuaugucauuuuucuuuaccuugaagaacau

SEQ ID NO: 128141 - RNA, 32 nt, Human
cuauguccacuugccuuccucuccgaggcaac

SEQ ID NO: 128142 - RNA, 32 nt, Human
cuaugucccacugucucucuccuucucuccag

SEQ ID NO: 128143 - RNA, 32 nt, Human
cuauguccccauuccucccuccugccacaaau

SEQ ID NO: 128144 - RNA, 32 nt, Human
cuauguccuagagaugggggaauguguuauug

SEQ ID NO: 128145 - RNA, 23 nt, Human
cuaugucgcccagacuggucuca

SEQ ID NO: 128146 - RNA, 32 nt, Human
cuaugucucccaggcuggagugcaguggcaca

SEQ ID NO: 128147 - RNA, 32 nt, Human
cuaugucucuagcagugaguacucauaaagga

SEQ ID NO: 128148 - RNA, 32 nt, Human
cuaugucugccaacucuaacagccugcccgug

SEQ ID NO: 128149 - RNA, 32 nt, Human
cuaugucuuccguuggucgcaugccauuugag

SEQ ID NO: 128150 - RNA, 32 nt, Human
cuaugucuuuccaagggacuguucacggcuug

SEQ ID NO: 128151 - RNA, 32 nt, Human
cuaugugaggcugaggcagguggaucacuuga

SEQ ID NO: 128152 - RNA, 32 nt, Human
cuaugugcaugugcacacacacucaaacaugu

SEQ ID NO: 128153 - RNA, 32 nt, Human
cuaugugccaucaugccuggcugauguuuaua

SEQ ID NO: 128154 - RNA, 32 nt, Human
cuaugugcuaucacaugugaaaagcuuaauaa

SEQ ID NO: 128155 - RNA, 32 nt, Human
cuauguggaaguacaugagaagcacaaacgca

SEQ ID NO: 128156 - RNA, 32 nt, Human
cuauguggagucgggugaggaaaaugacccug

SEQ ID NO: 128157 - RNA, 32 nt, Human
cuauguggaucagcccacacccuucccagagc

SEQ ID NO: 128158 - RNA, 32 nt, Human
cuauguggauugcggcagcagaggcugcagcc

SEQ ID NO: 128159 - RNA, 32 nt, Human
cuauguggcgggcaccuguaaucccaccuacu

SEQ ID NO: 128160 - RNA, 32 nt, Human
cuaugugggaagaucacuugaggccaggaguu

SEQ ID NO: 128161 - RNA, 32 nt, Human
cuaugugggaggcuaaggugggaggaucguuu

SEQ ID NO: 128162 - RNA, 32 nt, Human
cuaugugguauaugauguggucagccccuggu

SEQ ID NO: 128163 - RNA, 32 nt, Human
cuauguggucaccagcaggagaaagcuuugau

SEQ ID NO: 128164 - RNA, 32 nt, Human
cuauguguaaauauauuaaggaaaguauagcu

SEQ ID NO: 128165 - RNA, 32 nt, Human
cuaugugucuucuguuuaaaauaaucuguuua

SEQ ID NO: 128166 - RNA, 32 nt, Human
cuaugugugcugccucauuccuggugaagcaa

SEQ ID NO: 128167 - RNA, 32 nt, Human
cuauguguggcgguggaguccaugccuuugaa

SEQ ID NO: 128168 - RNA, 32 nt, Human
cuauguguggugugugccguaugcaugggcag

SEQ ID NO: 128169 - RNA, 32 nt, Human
cuaugugugguuucugggucaacugaaaaccu

SEQ ID NO: 128170 - RNA, 32 nt, Human
cuauguuccaauaaaaacuuauuuacaauaac

SEQ ID NO: 128171 - RNA, 32 nt, Human
cuauguucggacccaagcaaguuagcuaaacc

SEQ ID NO: 128172 - RNA, 32 nt, Human
cuauguugccaaggcucaucuugagaagcagg

SEQ ID NO: 128173 - RNA, 23 nt, Human
cuauguugcccaagcuggucuca

SEQ ID NO: 128174 - RNA, 22 nt, Human
cuauguugcccagcuggucuca

SEQ ID NO: 128175 - RNA, 32 nt, Human
cuauguugcccaggcuagagugcaguggcuau

SEQ ID NO: 128176 - RNA, 32 nt, Human
cuauguugcccaggcuggagugcaguggugcg

SEQ ID NO: 128177 - RNA, 23 nt, Human
cuauguugcccaggcuggccuca

SEQ ID NO: 128178 - RNA, 32 nt, Human
cuauguugcccaggcuggccucaagcaauccu

SEQ ID NO: 128179 - RNA, 23 nt, Human
cuauguugcccaggcuggucuca

SEQ ID NO: 128180 - RNA, 32 nt, Human
cuauguugcccaggcuggucucaggcuccugg

SEQ ID NO: 128181 - RNA, 32 nt, Human
cuauguugcccaggcugguugcaaacuucugg

SEQ ID NO: 128182 - RNA, 32 nt, Human
cuauguugccuaggcuggccucaagugauccu

SEQ ID NO: 128183 - RNA, 32 nt, Human
cuauguuggccaggcuggucuccaacuccugg

SEQ ID NO: 128184 - RNA, 32 nt, Human
cuauguuggucggcugcagcaaaaagaccacu

SEQ ID NO: 128185 - RNA, 32 nt, Human
cuauguuguguguggugugcauaugugugaac

SEQ ID NO: 128186 - RNA, 32 nt, Human
cuauguuguucaggcuaggaguauauugguuc

SEQ ID NO: 128187 - RNA, 27 nt, Human
cuauguuguucuccgcccuccugcugg

SEQ ID NO: 128188 - RNA, 32 nt, Human
cuauguuucaauucaaaacaaagacaguuuuc

SEQ ID NO: 128189 - RNA, 32 nt, Human
cuauguuucagggcaucuauuaaagagugagc

SEQ ID NO: 128190 - RNA, 32 nt, Human
cuauguuuuacuucugacuuugcucucucgcu

SEQ ID NO: 128191 - RNA, 32 nt, Human
cuauguuuugcaccuggucacagacauggcuu

SEQ ID NO: 128192 - RNA, 32 nt, Human
cuauuaaaaacuauauguacuacuuuuacaca

SEQ ID NO: 128193 - RNA, 32 nt, Human
cuauuaaaaauacaaaaacuuagccagucaug

SEQ ID NO: 128194 - RNA, 32 nt, Human
cuauuaaaaauacaaaaauuagccaggcauag

SEQ ID NO: 128195 - RNA, 32 nt, Human
cuauuaaaaauacaaaaauuagccaggcaugg

SEQ ID NO: 128196 - RNA, 32 nt, Human
cuauuaaaaauacaaaaauuagccgagagugg

SEQ ID NO: 128197 - RNA, 32 nt, Human
cuauuaaaaauacaaaaauuagccggaugugg

SEQ ID NO: 128198 - RNA, 32 nt, Human
cuauuaaaaauacaaaaauuagccgggagugg

SEQ ID NO: 128199 - RNA, 32 nt, Human
cuauuaaaaauacaaaaauuagccgggugugg

SEQ ID NO: 128200 - RNA, 32 nt, Human
cuauuaaaaauacaaaaauuagcugggcauga

SEQ ID NO: 128201 - RNA, 32 nt, Human
cuauuaaaaauacaaaaauuagcugggcaugg

SEQ ID NO: 128202 - RNA, 32 nt, Human
cuauuaaaaauacaaaaauuagcugggcgugg

SEQ ID NO: 128203 - RNA, 32 nt, Human
cuauuaaaaauacaaaaauuagcugggguugg

SEQ ID NO: 128204 - RNA, 32 nt, Human
cuauuaaaaauacaaaaauuagcugggugugg

SEQ ID NO: 128205 - RNA, 32 nt, Human
cuauuaaaaauacaaaaauuaggcaugguggc

SEQ ID NO: 128206 - RNA, 32 nt, Human
cuauuaaaaauacaaaauuagccgggcauggu

SEQ ID NO: 128207 - RNA, 32 nt, Human
cuauuaaaaauaccaaaauuagcugggcaugg

SEQ ID NO: 128208 - RNA, 32 nt, Human
cuauuaaaaauagaaaaauuagccaggcgugg

SEQ ID NO: 128209 - RNA, 32 nt, Human
cuauuaaagauacaaaauuagccaggcauggu

SEQ ID NO: 128210 - RNA, 32 nt, Human
cuauuaaagcagaggaaauaccugccaaagga

SEQ ID NO: 128211 - RNA, 32 nt, Human
cuauuaaauccacauuaaaaguacaugugauc

SEQ ID NO: 128212 - RNA, 32 nt, Human
cuauuaagccaucuugcucugccuucuugcaa

SEQ ID NO: 128213 - RNA, 32 nt, Human
cuauuaaggaggaaagcaacagaggaaacagu

SEQ ID NO: 128214 - RNA, 32 nt, Human
cuauuaaguaccauuagcuacagugaucuuag

SEQ ID NO: 128215 - RNA, 32 nt, Human
cuauuaauguaggaacuuaaauuuguaaguaa

SEQ ID NO: 128216 - RNA, 32 nt, Human
cuauuacaaagaaagcaagagugaagacccuu

SEQ ID NO: 128217 - RNA, 32 nt, Human
cuauuacaaauacaaaaagccggguguggugg

SEQ ID NO: 128218 - RNA, 22 nt, Human
cuauuacacuccagccugggca

SEQ ID NO: 128219 - RNA, 32 nt, Human
cuauuacauccagcaagacacuaagaacgacu

SEQ ID NO: 128220 - RNA, 32 nt, Human
cuauuaccaagaaaaguaggcagacaguguug

SEQ ID NO: 128221 - RNA, 16 nt, Human
cuauuaccacccagaa

SEQ ID NO: 128222 - RNA, 32 nt, Human
cuauuacguagacagaccccacccucacccag

SEQ ID NO: 128223 - RNA, 32 nt, Human
cuauuacuacagccaguagcuccacugacaca

SEQ ID NO: 128224 - RNA, 32 nt, Human
cuauuacucaggcuggaguaaaauggugccau

SEQ ID NO: 128225 - RNA, 32 nt, Human
cuauuacucccaggauucagcagaagauugcg

SEQ ID NO: 128226 - RNA, 32 nt, Human
cuauuacuggaucucuuaagacagcauguguu

SEQ ID NO: 128227 - RNA, 32 nt, Human
cuauuagaccaugagcuccugugguagaaauu

SEQ ID NO: 128228 - RNA, 32 nt, Human
cuauuagaguauggaggaagggguuuucauug

SEQ ID NO: 128229 - RNA, 32 nt, Human
cuauuagccucugcucuuguaagaaguuagcu

SEQ ID NO: 128230 - RNA, 32 nt, Human
cuauuaggagcagcaggaccccggaaaccacu

SEQ ID NO: 128231 - RNA, 32 nt, Human
cuauuagggacagaagaagccuccaaaucugg

SEQ ID NO: 128232 - RNA, 32 nt, Human
cuauuagggaggcugaggcaggagaaucgcuu

SEQ ID NO: 128233 - RNA, 32 nt, Human
cuauuagucucuucucaggcugcuaauaaaca

SEQ ID NO: 128234 - RNA, 32 nt, Human
cuauuaguuuuuaaagaguuuuuguaaaauga

SEQ ID NO: 128235 - RNA, 32 nt, Human
cuauuauacuugggacucuaccucucacucac

SEQ ID NO: 128236 - RNA, 32 nt, Human
cuauuauagcuuuuaagaaacaguauuaaaug

SEQ ID NO: 128237 - RNA, 32 nt, Human
cuauuaucagcuuugaaaacuuauccugguuu

SEQ ID NO: 128238 - RNA, 32 nt, Human
cuauuaucugcucuccgcgccugaccccuccc

SEQ ID NO: 128239 - RNA, 32 nt, Human
cuauuauggacucgugggcacuaagcugguua

SEQ ID NO: 128240 - RNA, 32 nt, Human
cuauuaugggaggcuggagugcaauggugcca

SEQ ID NO: 128241 - RNA, 32 nt, Human
cuauuauguuguguaaguuauguauguacaua

SEQ ID NO: 128242 - RNA, 32 nt, Human
cuauuauucaguugccucucuggaccauggca

SEQ ID NO: 128243 - RNA, 32 nt, Human
cuauuauugguacaguuuaaagccauuaauau

SEQ ID NO: 128244 - RNA, 32 nt, Human
cuauucacacaagcucagccuagcugagucca

SEQ ID NO: 128245 - RNA, 32 nt, Human
cuauucacaggcaugauugcuugaaacucaug

SEQ ID NO: 128246 - RNA, 32 nt, Human
cuauucaccacacacucaccacucccagcuuc

SEQ ID NO: 128247 - RNA, 32 nt, Human
cuauucaccccaccaucauccugaucuaacca

SEQ ID NO: 128248 - RNA, 32 nt, Human
cuauucagaccugauaggauugccugcuuaga

SEQ ID NO: 128249 - RNA, 32 nt, Human
cuauucagcgugcuucaagugaagagugcaga

SEQ ID NO: 128250 - RNA, 32 nt, Human
cuauucaggagacugaggcaggagaaucgcuu

SEQ ID NO: 128251 - RNA, 32 nt, Human
cuauucaggaggcugaggcaggagaaucacuu

SEQ ID NO: 128252 - RNA, 32 nt, Human
cuauucaugccuagacaucacauagcuagaaa

SEQ ID NO: 128253 - RNA, 32 nt, Human
cuauucauuucgauggacgcaaucuuaagcca

SEQ ID NO: 128254 - RNA, 32 nt, Human
cuauuccaaaacugaccacauaguuggaagua

SEQ ID NO: 128255 - RNA, 32 nt, Human
cuauuccacccucugccugccugccugccugc

SEQ ID NO: 128256 - RNA, 32 nt, Human
cuauuccagaacagcaaacuuccugggugagg

SEQ ID NO: 128257 - RNA, 32 nt, Human
cuauuccaggauucagucuagaaacuuuuccu

SEQ ID NO: 128258 - RNA, 32 nt, Human
cuauuccaucaucugcccuuuuauucacuuuu

SEQ ID NO: 128259 - RNA, 32 nt, Human
cuauuccaugcuguuaugggugaaacucuggg

SEQ ID NO: 128260 - RNA, 32 nt, Human
cuauucccaaguggucuucaagcaccagugua

SEQ ID NO: 128261 - RNA, 32 nt, Human
cuauucccagguuuauuucucucucauaugau

SEQ ID NO: 128262 - RNA, 32 nt, Human
cuauuccccacuuacuggacagccuguauaac

SEQ ID NO: 128263 - RNA, 32 nt, Human
cuauucccccucugccucuccccaccuucuuu

SEQ ID NO: 128264 - RNA, 32 nt, Human
cuauucccugccccuucuccuuuccuucauua

SEQ ID NO: 128265 - RNA, 32 nt, Human
cuauucccuuccuucugcccugccugccuccc

SEQ ID NO: 128266 - RNA, 32 nt, Human
cuauuccucaucccagaaucauggccccuucc

SEQ ID NO: 128267 - RNA, 32 nt, Human
cuauuccuccacugcauugccauccuccccaa

SEQ ID NO: 128268 - RNA, 32 nt, Human
cuauuccugaaccuucuuugagacagaauccc

SEQ ID NO: 128269 - RNA, 32 nt, Human
cuauuccugcuuccuccaccucaccuugcaaa

SEQ ID NO: 128270 - RNA, 32 nt, Human
cuauuccugggcaguaguaugugauguccagc

SEQ ID NO: 128271 - RNA, 32 nt, Human
cuauuccuguuuucucuuucugcccaccacau

SEQ ID NO: 128272 - RNA, 19 nt, Human
cuauuccuucuccaagcca

SEQ ID NO: 128273 - RNA, 32 nt, Human
cuauucgcucuuccuccagccucuggcaacca

SEQ ID NO: 128274 - RNA, 32 nt, Human
cuauucggaaggcugaggcaggagaaucacuu

SEQ ID NO: 128275 - RNA, 32 nt, Human
cuauucggcaggcugaggcaguagaaucgcuu

SEQ ID NO: 128276 - RNA, 32 nt, Human
cuauucggcugaggcacgagaaucauuugaac

SEQ ID NO: 128277 - RNA, 32 nt, Human
cuauucgggaggcugagacaggagaaucacuu

SEQ ID NO: 128278 - RNA, 32 nt, Human
cuauucgggaggcugaggcaggagaaucgcgu

SEQ ID NO: 128279 - RNA, 32 nt, Human
  misc_feature (31)..(31): n is a, c, g, or u
cuauucgggaggcugaggcaggagaauggcnu

SEQ ID NO: 128280 - RNA, 32 nt, Human
cuauucgggaggcugaggcaggagaauugcuu

SEQ ID NO: 128281 - RNA, 32 nt, Human
cuauucgggaggcugaggcaggaggauggcgu

SEQ ID NO: 128282 - RNA, 32 nt, Human
cuauucuaccgcaauucgauggagucuuguuc

SEQ ID NO: 128283 - RNA, 32 nt, Human
cuauucuacuuccugaauccuugaaaugcauc

SEQ ID NO: 128284 - RNA, 32 nt, Human
cuauucuagaggcugaggcgggaggauugcuu

SEQ ID NO: 128285 - RNA, 32 nt, Human
cuauucuagcuugccauugaauuugucuccca

SEQ ID NO: 128286 - RNA, 32 nt, Human
cuauucucacuggcgugagauguuaucucauu

SEQ ID NO: 128287 - RNA, 32 nt, Human
cuauucuccauuaagguggaaguguccacugu

SEQ ID NO: 128288 - RNA, 32 nt, Human
cuauucuccauuccuguuuucucccccacccc

SEQ ID NO: 128289 - RNA, 32 nt, Human
cuauucuccucucucccccaggggauuuucau

SEQ ID NO: 128290 - RNA, 32 nt, Human
cuauucuccugccucagccucccgaguagcug

SEQ ID NO: 128291 - RNA, 32 nt, Human
cuauucuccugccucagccuccugaguagcug

SEQ ID NO: 128292 - RNA, 32 nt, Human
cuauucuccugccucaguugcccgaguagcug

SEQ ID NO: 128293 - RNA, 32 nt, Human
cuauucucuccucucgauuguagcauagccug

SEQ ID NO: 128294 - RNA, 31 nt, Human
cuauucucuuaaguuuauguuggagaauuaa

SEQ ID NO: 128295 - RNA, 32 nt, Human
cuauucucuuccauuuccccugcccaaagugc

SEQ ID NO: 128296 - RNA, 32 nt, Human
cuauucucuuucuuagauacccuuuacaagag

SEQ ID NO: 128297 - RNA, 32 nt, Human
cuauucugagguacuaagguuaagaccucaac

SEQ ID NO: 128298 - RNA, 32 nt, Human
cuauucugcagguuuauaacaaagcucagaaa

SEQ ID NO: 128299 - RNA, 32 nt, Human
cuauucugccaugucuuucccucucucugcau

SEQ ID NO: 128300 - RNA, 32 nt, Human
cuauucuguaggaaucacaaggccgaguggac

SEQ ID NO: 128301 - RNA, 32 nt, Human
cuauucuguuuccuucaacuucauacauagau

SEQ ID NO: 128302 - RNA, 32 nt, Human
cuauucuuccauucuuuccuccauccaccuau

SEQ ID NO: 128303 - RNA, 32 nt, Human
cuauucuucucccuccucugcagcauacucua

SEQ ID NO: 128304 - RNA, 32 nt, Human
cuauucuugauuuucuuugaaaggcuuuaugg

SEQ ID NO: 128305 - RNA, 32 nt, Human
cuauucuuuauuucaguguagcacuuuuagag

SEQ ID NO: 128306 - RNA, 32 nt, Human
cuauucuuuguucaauugcauggaacuuggua

SEQ ID NO: 128307 - RNA, 32 nt, Human
cuauucuuuugcuaucaggaaguuucgaggag

SEQ ID NO: 128308 - RNA, 32 nt, Human
cuauugaaaauauauuuucucucuccagaacc

SEQ ID NO: 128309 - RNA, 32 nt, Human
cuauugaaacucaaacccagacugccuugggu

SEQ ID NO: 128310 - RNA, 32 nt, Human
cuauugaacucucuccugaugagaagauguuu

SEQ ID NO: 128311 - RNA, 32 nt, Human
cuauugaaggaaaaggacucaagaaaaauaau

SEQ ID NO: 128312 - RNA, 32 nt, Human
cuauugacagauaaacauguaucuguaagauc

SEQ ID NO: 128313 - RNA, 32 nt, Human
cuauugagaaagaccuguugcuagaaguuggg

SEQ ID NO: 128314 - RNA, 32 nt, Human
cuauugagcuguagacgaacuguuucucuaau

SEQ ID NO: 128315 - RNA, 32 nt, Human
cuauugaguacucauuaugggccagguacaga

SEQ ID NO: 128316 - RNA, 32 nt, Human
cuauugaguucaaauuaacuugcuuaaguguc

SEQ ID NO: 128317 - RNA, 29 nt, Human
cuauugauggcuugaucaucccucagcau

SEQ ID NO: 128318 - RNA, 32 nt, Human
cuauugauugaccauuuguaugguauuuuuau

SEQ ID NO: 128319 - RNA, 32 nt, Human
cuauugauuugggaguucuuuacauauuaaaa

SEQ ID NO: 128320 - RNA, 32 nt, Human
cuauugcaccacugcucuccaagcugggcaau

SEQ ID NO: 128321 - RNA, 32 nt, Human
cuauugcacuguguucuccuacugcaaauauu

SEQ ID NO: 128322 - RNA, 32 nt, Human
cuauugcagcuauggugggagccacauaggaa

SEQ ID NO: 128323 - RNA, 32 nt, Human
cuauugcauuuccuacuccuuugcuacgugua

SEQ ID NO: 128324 - RNA, 32 nt, Human
cuauugcccaggcuggagugcaauggcgugau

SEQ ID NO: 128325 - RNA, 32 nt, Human
cuauugcccaggcuggagugcacuggcgugau

SEQ ID NO: 128326 - RNA, 32 nt, Human
cuauugcccaggcuggagugcaguggcucagu

SEQ ID NO: 128327 - RNA, 32 nt, Human
cuauugcccaggcuggagugcagugguacagu

SEQ ID NO: 128328 - RNA, 32 nt, Human
cuauugcccaggcuggagugcaguggugcgac

SEQ ID NO: 128329 - RNA, 32 nt, Human
cuauugcccaggcuggagugcagugguguaaa

SEQ ID NO: 128330 - RNA, 32 nt, Human
cuauugcccagucuggagugcaguggcaugau

SEQ ID NO: 128331 - RNA, 32 nt, Human
cuauugcucaggcuggagugugguggcaggau

SEQ ID NO: 128332 - RNA, 32 nt, Human
cuauugcuguaguaagagaagcucuuuguauc

SEQ ID NO: 128333 - RNA, 32 nt, Human
cuauugcuucagaauuauguggagucuguuac

SEQ ID NO: 128334 - RNA, 32 nt, Human
cuauugcuucuuuccauguauuuccugguuug

SEQ ID NO: 128335 - RNA, 32 nt, Human
cuauugcuugcuucagcugcagccugccugug

SEQ ID NO: 128336 - RNA, 32 nt, Human
cuauuggacagaaaccuggacaugagucacuu

SEQ ID NO: 128337 - RNA, 32 nt, Human
cuauuggaggcagcacuuuucccucaugcugu

SEQ ID NO: 128338 - RNA, 32 nt, Human
cuauuggaguuucaggaaauauaauuugagaa

SEQ ID NO: 128339 - RNA, 32 nt, Human
cuauuggauacaacaggucuagagaaaugaua

SEQ ID NO: 128340 - RNA, 32 nt, Human
cuauuggauacuuaggugguuucuucacugac

SEQ ID NO: 128341 - RNA, 32 nt, Human
cuauuggaucuugggaguuuucuuuguuugcu

SEQ ID NO: 128342 - RNA, 32 nt, Human
cuauuggcacagcgugggcaguggggccuaca

SEQ ID NO: 128343 - RNA, 32 nt, Human
cuauuggcauccauuugcaaggccaauggccu

SEQ ID NO: 128344 - RNA, 32 nt, Human
cuauuggccaggcuggaguguaguggcaccau

SEQ ID NO: 128345 - RNA, 32 nt, Human
cuauuggccuucucccugaaggcucuaagccu

SEQ ID NO: 128346 - RNA, 32 nt, Human
cuauuggcuagcaaggguggugggcggggcgu

SEQ ID NO: 128347 - RNA, 32 nt, Human
cuauugggauggaauggauguauuuugcaugu

SEQ ID NO: 128348 - RNA, 32 nt, Human
cuauugggcagaaacagauauagaucaauacc

SEQ ID NO: 128349 - RNA, 32 nt, Human
cuauugggcaggcagggaggcuggaagaccug

SEQ ID NO: 128350 - RNA, 32 nt, Human
cuauuggggaacucauuguucuccagucucug

SEQ ID NO: 128351 - RNA, 32 nt, Human
cuauuggggugaggauaaggggugggggagaa

SEQ ID NO: 128352 - RNA, 32 nt, Human
cuauuggucaucugcuccuguucacaccagag

SEQ ID NO: 128353 - RNA, 32 nt, Human
cuauuggucaugcaauaggagaacagagaccc

SEQ ID NO: 128354 - RNA, 32 nt, Human
cuauugguuggcuuuccguuaugaaggcuguc

SEQ ID NO: 128355 - RNA, 32 nt, Human
cuauuguaaacaugguucaaaauauuaauaug

SEQ ID NO: 128356 - RNA, 32 nt, Human
cuauuguaauuugccaguucauuuuucaugcu

SEQ ID NO: 128357 - RNA, 32 nt, Human
cuauuguauauuuuguguccuaccucaaauua

SEQ ID NO: 128358 - RNA, 32 nt, Human
cuauugucacugcagugcauuauaccaaagag

SEQ ID NO: 128359 - RNA, 32 nt, Human
cuauugucagagccauaauagugacauuacaa

SEQ ID NO: 128360 - RNA, 32 nt, Human
cuauugucgccgugggcugagcucgccgggcc

SEQ ID NO: 128361 - RNA, 32 nt, Human
cuauugugaccacaggcugguguguagguggu

SEQ ID NO: 128362 - RNA, 32 nt, Human
cuauugugacuaauuuucucucggucuacugc

SEQ ID NO: 128363 - RNA, 32 nt, Human
cuauuguucagacuggagugcaguggcaugau

SEQ ID NO: 128364 - RNA, 32 nt, Human
cuauuguuccuuuugucacagguaaaaucagu

SEQ ID NO: 128365 - RNA, 32 nt, Human
cuauuguucuuucuaugugccagguacuguuc

SEQ ID NO: 128366 - RNA, 32 nt, Human
cuauuguuuuguacaucuaauuuugggaaacc

SEQ ID NO: 128367 - RNA, 32 nt, Human
cuauuuaacaucagcuggaaagaagggaacau

SEQ ID NO: 128368 - RNA, 32 nt, Human
cuauuuacagcagcaacauuaaaccagcccug

SEQ ID NO: 128369 - RNA, 32 nt, Human
cuauuuauauuauuuuucaguccugugaaugc

SEQ ID NO: 128370 - RNA, 30 nt, Human
cuauuuauccucuccaugugucuucguuag

SEQ ID NO: 128371 - RNA, 32 nt, Human
cuauuuauuagugacuacaguacaugagacaa

SEQ ID NO: 128372 - RNA, 32 nt, Human
cuauuuauugaaugauuacuauaugcaaaacu

SEQ ID NO: 128373 - RNA, 32 nt, Human
cuauuuauuucuggaugucccauacaugaaaa

SEQ ID NO: 128374 - RNA, 32 nt, Human
cuauuuauuuucuacaucuggccaguggcucu

SEQ ID NO: 128375 - RNA, 32 nt, Human
cuauuucaauaacagauggugcugcuaauucc

SEQ ID NO: 128376 - RNA, 32 nt, Human
cuauuucacacccuuuuuauacuccauaucug

SEQ ID NO: 128377 - RNA, 32 nt, Human
cuauuucacagagcugagcuucugccaaauuu

SEQ ID NO: 128378 - RNA, 32 nt, Human
cuauuucagcacaaucuuagacucauauuugc

SEQ ID NO: 128379 - RNA, 32 nt, Human
cuauuucaucacaagaacacacacauauacac

SEQ ID NO: 128380 - RNA, 32 nt, Human
cuauuucaucauuuuuguuucuagggcucuuu

SEQ ID NO: 128381 - RNA, 32 nt, Human
cuauuucaucuuccagcucagcuccacacaaa

SEQ ID NO: 128382 - RNA, 25 nt, Human
cuauuuccacucccuccucuuggca

SEQ ID NO: 128383 - RNA, 32 nt, Human
cuauuuccagugcuuuccagccggguuucuga

SEQ ID NO: 128384 - RNA, 32 nt, Human
cuauuuccauucuuucagcugugucugacaug

SEQ ID NO: 128385 - RNA, 32 nt, Human
cuauuuccauuuuuccuuuugacaucuucgau

SEQ ID NO: 128386 - RNA, 32 nt, Human
cuauuucccaagcuggagugcaguggugcgau

SEQ ID NO: 128387 - RNA, 32 nt, Human
cuauuucccacauguucucugccuucaguggg

SEQ ID NO: 128388 - RNA, 32 nt, Human
cuauuuccuggagaccagccugguggccgaug

SEQ ID NO: 128389 - RNA, 32 nt, Human
cuauuucuaccccggccagaacauggacagag

SEQ ID NO: 128390 - RNA, 32 nt, Human
cuauuucuagggcugggaaacacuccuugcau

SEQ ID NO: 128391 - RNA, 32 nt, Human
cuauuucuaggugaugccauaccauuuuaaaa

SEQ ID NO: 128392 - RNA, 32 nt, Human
cuauuucuaugagaaaagaggcgucuguauau

SEQ ID NO: 128393 - RNA, 32 nt, Human
cuauuucucaguuagaaaacuuuugccgauac

SEQ ID NO: 128394 - RNA, 32 nt, Human
cuauuucuccuaagaaacuuuccacuuuagac

SEQ ID NO: 128395 - RNA, 32 nt, Human
cuauuucugcuccucucuucucucuuggaccu

SEQ ID NO: 128396 - RNA, 32 nt, Human
cuauuucugggaagcugggaguaugugacauu

SEQ ID NO: 128397 - RNA, 32 nt, Human
cuauuucugggcugaugaauuuguuuucaucu

SEQ ID NO: 128398 - RNA, 32 nt, Human
cuauuucuuacccuguccuccaccugccuucc

SEQ ID NO: 128399 - RNA, 32 nt, Human
cuauuucuuccucugcuuggugaauugugccu

SEQ ID NO: 128400 - RNA, 32 nt, Human
cuauuucuuccucuugcccucuuaggccuagg

SEQ ID NO: 128401 - RNA, 32 nt, Human
cuauuucuucgcugugugaucagugugucauu

SEQ ID NO: 128402 - RNA, 32 nt, Human
cuauuucuucuuucucugguucuucuaacauu

SEQ ID NO: 128403 - RNA, 32 nt, Human
cuauuucuuucugguuccugcagccauugaaa

SEQ ID NO: 128404 - RNA, 32 nt, Human
cuauuugaagaaaaaguagagacaaaaguaau

SEQ ID NO: 128405 - RNA, 32 nt, Human
cuauuugaagucagagccgagugccugcucuc

SEQ ID NO: 128406 - RNA, 32 nt, Human
cuauuugacagagcauuagaacuccaguaacc

SEQ ID NO: 128407 - RNA, 32 nt, Human
cuauuugcacucuagccugggugacagagcga

SEQ ID NO: 128408 - RNA, 32 nt, Human
cuauuugcaguugcuacgcaaggggcccgacu

SEQ ID NO: 128409 - RNA, 32 nt, Human
cuauuugcauuuucaacauuuucuuaggaaga

SEQ ID NO: 128410 - RNA, 32 nt, Human
cuauuugccacugggcuguugguuagaagcau

SEQ ID NO: 128411 - RNA, 32 nt, Human
cuauuugccuuuaggaacaugccuguaggcuc

SEQ ID NO: 128412 - RNA, 32 nt, Human
cuauuugcuuccugguauuggagcaguucagu

SEQ ID NO: 128413 - RNA, 32 nt, Human
cuauuuggaauguuacuaaaccuacugggacu

SEQ ID NO: 128414 - RNA, 32 nt, Human
cuauuuggaguuaaauaaaaacagaacaagga

SEQ ID NO: 128415 - RNA, 32 nt, Human
cuauuuggcaguugcagguggggcaggaaugg

SEQ ID NO: 128416 - RNA, 32 nt, Human
cuauuugggaccagacaaaaucagcuuucauc

SEQ ID NO: 128417 - RNA, 32 nt, Human
cuauuugggaggcugaggcaggagaaucacuu

SEQ ID NO: 128418 - RNA, 32 nt, Human
cuauuugggaggcugaggcaggagaaucgcuu

SEQ ID NO: 128419 - RNA, 32 nt, Human
cuauuugggaggcugaggcaggagaaucgguu

SEQ ID NO: 128420 - RNA, 32 nt, Human
cuauuugggaggcugaggcaggagaauggcaa

SEQ ID NO: 128421 - RNA, 32 nt, Human
cuauuugggaggcugaggcaggagaauggccu

SEQ ID NO: 128422 - RNA, 32 nt, Human
cuauuugggaggcugaggcaggaggaucgcuu

SEQ ID NO: 128423 - RNA, 32 nt, Human
cuauuugggaggcugaggcuggaggauugcuu

SEQ ID NO: 128424 - RNA, 32 nt, Human
cuauuugggugauacccagugcagugaacugc

SEQ ID NO: 128425 - RNA, 32 nt, Human
cuauuuguacaaauaaaccugaggcaggaaaa

SEQ ID NO: 128426 - RNA, 32 nt, Human
cuauuugucauuuguguuauauuugaaauuau

SEQ ID NO: 128427 - RNA, 32 nt, Human
cuauuugucugucaguuucauccgugacauuu

SEQ ID NO: 128428 - RNA, 32 nt, Human
cuauuugugagugauuuugccuccaggaacau

SEQ ID NO: 128429 - RNA, 32 nt, Human
cuauuuguggaggauugauaugacagaaagga

SEQ ID NO: 128430 - RNA, 32 nt, Human
cuauuuguguuuaccagaguugggagauaaga

SEQ ID NO: 128431 - RNA, 32 nt, Human
cuauuuguucuccaagagaugaagggguuucc

SEQ ID NO: 128432 - RNA, 32 nt, Human
cuauuuuaaaaacaccaugaaucagauaggga

SEQ ID NO: 128433 - RNA, 32 nt, Human
cuauuuuacagagaggcaaaccaagccuccuu

SEQ ID NO: 128434 - RNA, 32 nt, Human
cuauuuuacugaagcuaugcugggcaauucug

SEQ ID NO: 128435 - RNA, 32 nt, Human
cuauuuuagacaccuucaucagcuccaagaac

SEQ ID NO: 128436 - RNA, 32 nt, Human
cuauuuuagagucugcagagaagagaaagcau

SEQ ID NO: 128437 - RNA, 31 nt, Human
cuauuuuauauucaauguuguugaaagaaua

SEQ ID NO: 128438 - RNA, 32 nt, Human
cuauuuuauggaaacuuuggucucacauccgu

SEQ ID NO: 128439 - RNA, 32 nt, Human
cuauuuucagccugugccaccugucuaggcaa

SEQ ID NO: 128440 - RNA, 32 nt, Human
cuauuuuccaguuguuuugucuguaaaacugu

SEQ ID NO: 128441 - RNA, 32 nt, Human
cuauuuucuacagccuugcucuucuuguuuua

SEQ ID NO: 128442 - RNA, 32 nt, Human
cuauuuucugaccuuucuuaaugcaaacucuu

SEQ ID NO: 128443 - RNA, 32 nt, Human
cuauuuucugcacccucugcuuguucccucau

SEQ ID NO: 128444 - RNA, 32 nt, Human
cuauuuugcccaggcuggagugcgauggugcg

SEQ ID NO: 128445 - RNA, 32 nt, Human
cuauuuugcuugggaaguaaagauggugccac

SEQ ID NO: 128446 - RNA, 32 nt, Human
cuauuuugcuuuguuuaacgaugcuuuuaguc

SEQ ID NO: 128447 - RNA, 32 nt, Human
cuauuuuggggguagaaggcagugagagcgug

SEQ ID NO: 128448 - RNA, 32 nt, Human
cuauuuuuaccucccgccucccuugcuggucc

SEQ ID NO: 128449 - RNA, 32 nt, Human
cuauuuuucccuuucucuuacauuucucauga

SEQ ID NO: 128450 - RNA, 32 nt, Human
cuauuuuuccuucugaagcacuccucacaggu

SEQ ID NO: 128451 - RNA, 32 nt, Human
cuauuuuucuaagccaaacgcuuuucagacug

SEQ ID NO: 128452 - RNA, 32 nt, Human
cuauuuuugacuuggagagacuugcuuuuguu

SEQ ID NO: 128453 - RNA, 32 nt, Human
cuauuuuugagcagagcacuccacauucgccc

SEQ ID NO: 128454 - RNA, 32 nt, Human
cuauuuuugcagaagguacuguuacauuaagu

SEQ ID NO: 128455 - RNA, 32 nt, Human
cuauuuuuguaaaaauggaaugcugaaauaag

SEQ ID NO: 128456 - RNA, 32 nt, Human
cuauuuuuguacaaauguaauuuuaucccuca

SEQ ID NO: 128457 - RNA, 32 nt, Human
cuauuuuugugugaaaucaaaauaucauuggg

SEQ ID NO: 128458 - RNA, 23 nt, Human
cucaaaaaaggcuggaguacagu

SEQ ID NO: 128459 - RNA, 32 nt, Human
cucaaaaaccuacaaauguagccauuuaaaaa

SEQ ID NO: 128460 - RNA, 32 nt, Human
cucaaaaagaaaaagaaagaaaaaggaaugag

SEQ ID NO: 128461 - RNA, 32 nt, Human
cucaaaaagggaggggacagauggggagcuuu

SEQ ID NO: 128462 - RNA, 25 nt, Human
cucaaaaauaccacuucucaguaug

SEQ ID NO: 128463 - RNA, 32 nt, Human
cucaaaaauggaaaacccccugugcuucacau

SEQ ID NO: 128464 - RNA, 32 nt, Human
cucaaaaaugucccucauguccauuuccuguc

SEQ ID NO: 128465 - RNA, 32 nt, Human
cucaaaacaaaaauccuaaccaaaaaguuguc

SEQ ID NO: 128466 - RNA, 32 nt, Human
cucaaaacaacagcaacaacaaaaagaugacc

SEQ ID NO: 128467 - RNA, 22 nt, Human
cucaaaacacaauuugcacugu

SEQ ID NO: 128468 - RNA, 32 nt, Human
cucaaaacauaaacacauuggaggcacuuaau

SEQ ID NO: 128469 - RNA, 32 nt, Human
cucaaaaccagcaacagcagcaguaccuacag

SEQ ID NO: 128470 - RNA, 32 nt, Human
cucaaaacuaaaagagaugucagcauuguugg

SEQ ID NO: 128471 - RNA, 32 nt, Human
cucaaaacugcccugaggagaaggcugaagac

SEQ ID NO: 128472 - RNA, 32 nt, Human
cucaaaagagggcacaggaggagcagcugcag

SEQ ID NO: 128473 - RNA, 32 nt, Human
cucaaaagaugguaauuuaggaugcauauaua

SEQ ID NO: 128474 - RNA, 32 nt, Human
cucaaaagccaaguccagaaggaggugcuuuu

SEQ ID NO: 128475 - RNA, 18 nt, Human
cucaaaagcuacagggaa

SEQ ID NO: 128476 - RNA, 32 nt, Human
cucaaaagcugcaccacagccuggagaauaaa

SEQ ID NO: 128477 - RNA, 32 nt, Human
cucaaaaggaagcacuuuuagaaaucuucucu

SEQ ID NO: 128478 - RNA, 32 nt, Human
cucagcuuuaguccgucuucacacacaaauaa

SEQ ID NO: 128479 - RNA, 27 nt, Human
cucagcuuugaucuacaccucuugcca

SEQ ID NO: 128480 - RNA, 21 nt, Human
cucaggaaacgaacuguucca

SEQ ID NO: 128481 - RNA, 32 nt, Human
cucaggaaagguuagugaugaccuggaaagaa

SEQ ID NO: 128482 - RNA, 32 nt, Human
cucaggaaagugaccagugaccacuggcguua

SEQ ID NO: 128483 - RNA, 32 nt, Human
cucaggaacauacacagcucuccccucgggua

SEQ ID NO: 128484 - RNA, 32 nt, Human
cucaggaacccccuuucccgggugagccccuc

SEQ ID NO: 128485 - RNA, 32 nt, Human
cucaggaacugccagggagggaagaugaggug

SEQ ID NO: 128486 - RNA, 32 nt, Human
cucaggaagaagucauugucauggacauggac

SEQ ID NO: 128487 - RNA, 32 nt, Human
cucaggaagcagcugggcccucugggaaggcu

SEQ ID NO: 128488 - RNA, 32 nt, Human
cucaggaagccucucuuucuucacuuaccauu

SEQ ID NO: 128489 - RNA, 32 nt, Human
cucaggaagggcccagcgaacacacucucuug

SEQ ID NO: 128490 - RNA, 32 nt, Human
cucaggaagguuuggucaucuugguucugcca

SEQ ID NO: 128491 - RNA, 24 nt, Human
cucaggaagugcugggauuacagg

SEQ ID NO: 128492 - RNA, 32 nt, Human
cucaggaagugcugggauuacaggcgugugag

SEQ ID NO: 128493 - RNA, 32 nt, Human
cucaggaaucuucuccccagagacuccuaagu

SEQ ID NO: 128494 - RNA, 20 nt, Human
cucaggaauucuuccuggua

SEQ ID NO: 128495 - RNA, 32 nt, Human
cucaggacacacaccccugccucaaggugcug

SEQ ID NO: 128496 - RNA, 16 nt, Human
cucaggacagagccag

SEQ ID NO: 128497 - RNA, 22 nt, Human
cucaggacagcaucccuuccca

SEQ ID NO: 128498 - RNA, 32 nt, Human
cucaggacaugagacauuuccuggaagugauu

SEQ ID NO: 128499 - RNA, 32 nt, Human
cucaggacaugagcuuaaccccugcaaagccu

SEQ ID NO: 128500 - RNA, 32 nt, Human
cucaggaccaaagaacacucgaaaagagcacu

SEQ ID NO: 128501 - RNA, 32 nt, Human
cucaggaccagccaucuuggcccucacagcgc

SEQ ID NO: 128502 - RNA, 24 nt, Human
cucaggaccagucuucucuccagg

SEQ ID NO: 128503 - RNA, 20 nt, Human
cucaggacccagggcugcag

SEQ ID NO: 128504 - RNA, 19 nt, Human
cucaggacccaggguccca

SEQ ID NO: 128505 - RNA, 32 nt, Human
cucaggaccccaaacuccaccucuuggauugg

SEQ ID NO: 128506 - RNA, 23 nt, Human
cucaggacggaacuugggugcag

SEQ ID NO: 128507 - RNA, 32 nt, Human
cucaggacuagaggagaaggucagagcaaagc

SEQ ID NO: 128508 - RNA, 32 nt, Human
cucaggacucacaucuucacuccugggccuuu

SEQ ID NO: 128509 - RNA, 32 nt, Human
cucaggacucagaguaguccagguguucuccu

SEQ ID NO: 128510 - RNA, 32 nt, Human
cucaggacucgacucucucucccugccaucaa

SEQ ID NO: 128511 - RNA, 32 nt, Human
cucaggacucggagcaggagagugcugggaug

SEQ ID NO: 128512 - RNA, 32 nt, Human
cucaggacucugccuccaccacccccgugggc

SEQ ID NO: 128513 - RNA, 32 nt, Human
cucaggacuucuaagaaaggccuggugcaggc

SEQ ID NO: 128514 - RNA, 32 nt, Human
cucaggagacugagacaggagaaucgcuugag

SEQ ID NO: 128515 - RNA, 20 nt, Human
cucaggagagggcaaggcca

SEQ ID NO: 128516 - RNA, 28 nt, Human
cucaggagcaaugcugccuucucccugu

SEQ ID NO: 128517 - RNA, 23 nt, Human
cucaggagcagggcuugcccagg

SEQ ID NO: 128518 - RNA, 23 nt, Human
cucaggagccugaggcaggagaa

SEQ ID NO: 128519 - RNA, 32 nt, Human
cucaggagccuucugcuggggguggggcuuca

SEQ ID NO: 128520 - RNA, 32 nt, Human
cucaggagcugaggcaggagaauugcuugaac

SEQ ID NO: 128521 - RNA, 30 nt, Human
cucaggagcuugcaagaagcaggaagggga

SEQ ID NO: 128522 - RNA, 32 nt, Human
cucaggaggaaagccacccagauacugcagaa

SEQ ID NO: 128523 - RNA, 32 nt, Human
cucaggaggaagaggaguccugcagcgcaccc

SEQ ID NO: 128524 - RNA, 32 nt, Human
cucaggaggagaagcgugcugaauagauucuu

SEQ ID NO: 128525 - RNA, 32 nt, Human
cucaggaggagaaggagcaagaaaaggagaaa

SEQ ID NO: 128526 - RNA, 32 nt, Human
cucaggaggaggggugagagaccugcucaggc

SEQ ID NO: 128527 - RNA, 24 nt, Human
cucaggaggcagagguugcaguga

SEQ ID NO: 128528 - RNA, 32 nt, Human
cucaggaggcagagguugcagugagccaaaau

SEQ ID NO: 128529 - RNA, 32 nt, Human
cucaggaggcagagguugcagugagccaagau

SEQ ID NO: 128530 - RNA, 32 nt, Human
cucaggaggcagagguugcagugagcugagau

SEQ ID NO: 128531 - RNA, 32 nt, Human
cucaggaggcggaaguugcggugagccaagau

SEQ ID NO: 128532 - RNA, 32 nt, Human
cucaggaggcggagcuugcagugagccgagau

SEQ ID NO: 128533 - RNA, 32 nt, Human
cucaggaggcggagguugcagugagccgagau

SEQ ID NO: 128534 - RNA, 32 nt, Human
cucaggaggcggagguugcggugagccgagau

SEQ ID NO: 128535 - RNA, 32 nt, Human
cucaggaggcggagguugcggugagcugagau

SEQ ID NO: 128536 - RNA, 32 nt, Human
cucaggaggcggaguuugcagugagcugaggu

SEQ ID NO: 128537 - RNA, 32 nt, Human
cucaggaggcuaagcaggaggauggcuugggc

SEQ ID NO: 128538 - RNA, 32 nt, Human
cucaggaggcugagacaggagagucgcuugaa

SEQ ID NO: 128539 - RNA, 32 nt, Human
cucaggaggcugggcaggagaaucccuugaac

SEQ ID NO: 128540 - RNA, 32 nt, Human
cucaggaggcugggcaggagaauggcgugagc

SEQ ID NO: 128541 - RNA, 32 nt, Human
cucaggaggcuugaggcgggaggaucacuuga

SEQ ID NO: 128542 - RNA, 22 nt, Human
cucaggaggggaggccugguag

SEQ ID NO: 128543 - RNA, 32 nt, Human
cucaggagggggcggggcaggagcuggugcca

SEQ ID NO: 128544 - RNA, 32 nt, Human
cucaggagguggagguugcagugagcugagau

SEQ ID NO: 128545 - RNA, 20 nt, Human
cucaggagguucugcuccag

SEQ ID NO: 128546 - RNA, 32 nt, Human
cucaggagguugaggcugcagugagcugugac

SEQ ID NO: 128547 - RNA, 32 nt, Human
cucaggagucugacuccuggguucuaggguau

SEQ ID NO: 128548 - RNA, 32 nt, Human
cucaggagucugaggaggagaaucacuugaac

SEQ ID NO: 128549 - RNA, 32 nt, Human
cucaggagugacuucucauccacccuggcagc

SEQ ID NO: 128550 - RNA, 32 nt, Human
cucaggaguuuggaccagccugggcaacaugg

SEQ ID NO: 128551 - RNA, 32 nt, Human
cucaggauagggaagagcagggggaugcagga

SEQ ID NO: 128552 - RNA, 32 nt, Human
cucaggaucaccaggugcaggcccccacccuc

SEQ ID NO: 128553 - RNA, 32 nt, Human
cucaggauccagacgcucccugccugucugcg

SEQ ID NO: 128554 - RNA, 32 nt, Human
cucaggaucccuggcauguuccaauguaaccu

SEQ ID NO: 128555 - RNA, 32 nt, Human
cucaggaucugaagaucucaguucucaaaaau

SEQ ID NO: 128556 - RNA, 31 nt, Human
cucaggaugacaaacaacagcggcuccaaag

SEQ ID NO: 128557 - RNA, 32 nt, Human
cucaggaugaggcagaaggaaggguaagggaa

SEQ ID NO: 128558 - RNA, 31 nt, Human
cucaggaugccugagccggggaagaagccag

SEQ ID NO: 128559 - RNA, 32 nt, Human
cucaggcaaaaacaccaccaaucacguggaag

SEQ ID NO: 128560 - RNA, 22 nt, Human
cucaggcaauccgcccaccuca

SEQ ID NO: 128561 - RNA, 32 nt, Human
cucaggcacagcaacuugcccaggacugacac

SEQ ID NO: 128562 - RNA, 32 nt, Human
cucaggcacaggaagugggcggugggggaggg

SEQ ID NO: 128563 - RNA, 32 nt, Human
cucaggcaccagccucccugugcucgacagca

SEQ ID NO: 128564 - RNA, 32 nt, Human
cucaggcaccugcuuaccguaaaugaucaugu

SEQ ID NO: 128565 - RNA, 19 nt, Human
cucaggcaccuuuccuccc

SEQ ID NO: 128566 - RNA, 32 nt, Human
cucaggcagaagcaagguggcuguacugugag

SEQ ID NO: 128567 - RNA, 32 nt, Human
cucaggcagacagcaggcuggagcccagcauu

SEQ ID NO: 128568 - RNA, 32 nt, Human
cucaggcagagcccuggaaaauaugucauuug

SEQ ID NO: 128569 - RNA, 32 nt, Human
cucaggcagcagcaacgcggaggaaacgggag

SEQ ID NO: 128570 - RNA, 19 nt, Human
cucaggcagccacggcgga

SEQ ID NO: 128571 - RNA, 32 nt, Human
cucaggcagccccggugggaggcugcggacca

SEQ ID NO: 128572 - RNA, 32 nt, Human
cucaggcaggaggugggcagugaaggggaaua

SEQ ID NO: 128573 - RNA, 32 nt, Human
cucaggcaggcaggcaaggagcuaggccggug

SEQ ID NO: 128574 - RNA, 32 nt, Human
cucaggcaggccucgcuggggagcucaccagg

SEQ ID NO: 128575 - RNA, 32 nt, Human
cucaggcagggccacggcugggcuccagcugc

SEQ ID NO: 128576 - RNA, 32 nt, Human
cucaggcaguccugggauccucuccuuuagac

SEQ ID NO: 128577 - RNA, 32 nt, Human
cucaggcaucccauugcccaccaggaauuacc

SEQ ID NO: 128578 - RNA, 32 nt, Human
cucaggcauuguggccagcucugccucucuaa

SEQ ID NO: 128579 - RNA, 31 nt, Human
cucaggcauuugacuccuacagcagaaguuc

SEQ ID NO: 128580 - RNA, 19 nt, Human
cucaggccaaacugccuca

SEQ ID NO: 128581 - RNA, 17 nt, Human
cucaggccaacccucca

SEQ ID NO: 128582 - RNA, 16 nt, Human
cucaggccaaccuucc

SEQ ID NO: 128583 - RNA, 32 nt, Human
cucaggccacaccauggaaucacugcauccaa

SEQ ID NO: 128584 - RNA, 32 nt, Human
cucaggccaccuccaaaccccaccuagguuuu

SEQ ID NO: 128585 - RNA, 32 nt, Human
cucaggccaccugcccccuucucccacacugc

SEQ ID NO: 128586 - RNA, 32 nt, Human
cucaggccacugcauuuagccugggcgacaga

SEQ ID NO: 128587 - RNA, 32 nt, Human
cucaggccacugcccacccuggccuggacagc

SEQ ID NO: 128588 - RNA, 23 nt, Human
cucaggccagguagcccuggcag

SEQ ID NO: 128589 - RNA, 19 nt, Human
cucaggccaggugcagugg

SEQ ID NO: 128590 - RNA, 32 nt, Human
cucaggccagugccaggacagcuggcugcuga

SEQ ID NO: 128591 - RNA, 32 nt, Human
cucaggccaguugugagccagggagaauguuc

SEQ ID NO: 128592 - RNA, 32 nt, Human
cucaggccauuauguuuuucauggcccauuuc

SEQ ID NO: 128593 - RNA, 32 nt, Human
cucaggccauuugauucugccugguggguuca

SEQ ID NO: 128594 - RNA, 32 nt, Human
cucaggcccagagcccagagcaaccagcacaa

SEQ ID NO: 128595 - RNA, 32 nt, Human
cucaggcccaggacccaggaggccuccccacc

SEQ ID NO: 128596 - RNA, 32 nt, Human
cucaggcccaggaguccaggcccccagccccu

SEQ ID NO: 128597 - RNA, 16 nt, Human
cucaggccccaccuca

SEQ ID NO: 128598 - RNA, 32 nt, Human
cucaggccccagggcaggcaggcugcagggag

SEQ ID NO: 128599 - RNA, 32 nt, Human
cucaggcccccgccuccuucaggaugacgcug

SEQ ID NO: 128600 - RNA, 17 nt, Human
cucaggccccucucugg

SEQ ID NO: 128601 - RNA, 20 nt, Human
cucaggccccucucuggcag

SEQ ID NO: 128602 - RNA, 32 nt, Human
cucaggccccugauucccagcccacagcucuu

SEQ ID NO: 128603 - RNA, 32 nt, Human
cucaggcccgggggaguuaggaaagguagacc

SEQ ID NO: 128604 - RNA, 19 nt, Human
cucaggcccugccagggga

SEQ ID NO: 128605 - RNA, 32 nt, Human
cucaggcccugccaggggaggguggguggaga

SEQ ID NO: 128606 - RNA, 32 nt, Human
cucaggcccugccuuucugcuacacaauuggg

SEQ ID NO: 128607 - RNA, 32 nt, Human
cucaggccggacgcugugucaccccucauucu

SEQ ID NO: 128608 - RNA, 32 nt, Human
cucaggccuaaccccugccucggguggcagcg

SEQ ID NO: 128609 - RNA, 32 nt, Human
cucaggccuauaauuccaacacuuugggaggc

SEQ ID NO: 128610 - RNA, 32 nt, Human
cucaggccucacgguggccucuccaggcucag

SEQ ID NO: 128611 - RNA, 32 nt, Human
cucaggccucagcguggacagcagggauaagg

SEQ ID NO: 128612 - RNA, 32 nt, Human
cucaggccuccacgcugagguugauggacgga

SEQ ID NO: 128613 - RNA, 32 nt, Human
cucaggccuccagcuccugggauccgggaguc

SEQ ID NO: 128614 - RNA, 32 nt, Human
cucaggccuccagggauccaugggggagugaa

SEQ ID NO: 128615 - RNA, 32 nt, Human
cucaggccuccauggagggagcugcuaugucc

SEQ ID NO: 128616 - RNA, 32 nt, Human
cucaggccucgcgguggccucuccaggcucag

SEQ ID NO: 128617 - RNA, 32 nt, Human
cucaggccugacacuucccugccuugugucuu

SEQ ID NO: 128618 - RNA, 24 nt, Human
cucaggccugcuuaccuccucaca

SEQ ID NO: 128619 - RNA, 32 nt, Human
cucaggccugggagacaagggagcaauggcca

SEQ ID NO: 128620 - RNA, 32 nt, Human
cucaggccugggagucaguaguuuccuaagag

SEQ ID NO: 128621 - RNA, 32 nt, Human
cucaggccugggggcugggcagaggaaagcaa

SEQ ID NO: 128622 - RNA, 32 nt, Human
cucaggccuguaaccucagcacuuuggugagg

SEQ ID NO: 128623 - RNA, 24 nt, Human
cucaggccuguaaucccaacacuu

SEQ ID NO: 128624 - RNA, 32 nt, Human
cucaggccuguaaucccaacacuuugggaggc

SEQ ID NO: 128625 - RNA, 32 nt, Human
cucaggccuguaaucccaacccuuuggaaggu

SEQ ID NO: 128626 - RNA, 32 nt, Human
cucaggccuguaaucccagcacucugggaggc

SEQ ID NO: 128627 - RNA, 32 nt, Human
cucaggccuguaaucccagcacugugggaggc

SEQ ID NO: 128628 - RNA, 32 nt, Human
cucaggccuguaaucccagcacuucaggaagc

SEQ ID NO: 128629 - RNA, 32 nt, Human
cucaggccuguaaucccagcacuuuccaaggc

SEQ ID NO: 128630 - RNA, 32 nt, Human
cucaggccuguaaucccagcacuuugggaagc

SEQ ID NO: 128631 - RNA, 32 nt, Human
cucaggccuguaaucccagcacuuugggaggc

SEQ ID NO: 128632 - RNA, 32 nt, Human
cucaggccuguaaucccagcauuuucagaggc

SEQ ID NO: 128633 - RNA, 32 nt, Human
cucaggccuguaaucccagcauuuugggaggc

SEQ ID NO: 128634 - RNA, 32 nt, Human
cucaggccuguaaucccagcuacuagggaggc

SEQ ID NO: 128635 - RNA, 32 nt, Human
cucaggccuguaaucccagcucuggaagcuga

SEQ ID NO: 128636 - RNA, 32 nt, Human
cucaggccuguaaucccagcuuugggagacca

SEQ ID NO: 128637 - RNA, 32 nt, Human
cucaggccuguaauccuaacacuuugggaggc

SEQ ID NO: 128638 - RNA, 32 nt, Human
cucaggccuguaauccuggcacuuugggaggc

SEQ ID NO: 128639 - RNA, 32 nt, Human
cucaggccuguaaucucagcacuuugggaggc

SEQ ID NO: 128640 - RNA, 32 nt, Human
cucaggccugugaucccagcacuuugggaggc

SEQ ID NO: 128641 - RNA, 32 nt, Human
cucaggccuuucucuccugguccugacauccg

SEQ ID NO: 128642 - RNA, 32 nt, Human
cucaggcgcccccauuccggaccagcccucgg

SEQ ID NO: 128643 - RNA, 32 nt, Human
cucaggcggcagcauucccucccagccacuga

SEQ ID NO: 128644 - RNA, 32 nt, Human
cucaggcguucuguuccgggcgaggcuugugc

SEQ ID NO: 128645 - RNA, 17 nt, Human
cucaggcuacugucaca

SEQ ID NO: 128646 - RNA, 20 nt, Human
cucaggcuagagugcagugg

SEQ ID NO: 128647 - RNA, 32 nt, Human
cucaggcucaacuagaugaaacuuuuaaaaau

SEQ ID NO: 128648 - RNA, 32 nt, Human
cucaggcucacugagugcaaugucugccugca

SEQ ID NO: 128649 - RNA, 32 nt, Human
cucaggcucaucucaaaauccugggcucaagu

SEQ ID NO: 128650 - RNA, 32 nt, Human
cucaggcuccacugcaggucuccuaaaucaga

SEQ ID NO: 128651 - RNA, 32 nt, Human
cucaggcucccagaacugaagaugguggcugg

SEQ ID NO: 128652 - RNA, 32 nt, Human
cucaggcucccaggagcuuccacucucagacc

SEQ ID NO: 128653 - RNA, 32 nt, Human
cucaggcucccggaagcggaaggggagagcgg

SEQ ID NO: 128654 - RNA, 32 nt, Human
cucaggcuccucaaacuuggccucacugcuaa

SEQ ID NO: 128655 - RNA, 32 nt, Human
cucaggcucuggccuccauccuccagggccac

SEQ ID NO: 128656 - RNA, 32 nt, Human
cucaggcugaaaucuggcaucaucucagguuc

SEQ ID NO: 128657 - RNA, 32 nt, Human
cucaggcugaaccauacucuuucuauucuuau

SEQ ID NO: 128658 - RNA, 32 nt, Human
cucaggcugacagcucuagacacucacagucc

SEQ ID NO: 128659 - RNA, 32 nt, Human
cucaggcugaucaguaggggccagcuuuggag

SEQ ID NO: 128660 - RNA, 32 nt, Human
cucaggcugaucucaaacuccugggcuccaac

SEQ ID NO: 128661 - RNA, 32 nt, Human
cucaggcugaucucgagcuccugggcucaagu

SEQ ID NO: 128662 - RNA, 32 nt, Human
cucaggcugauguucuucucaucaagcucccg

SEQ ID NO: 128663 - RNA, 32 nt, Human
cucaggcugcaccaggaggccaugcuagguuu

SEQ ID NO: 128664 - RNA, 20 nt, Human
cucaggcugcagugcagugg

SEQ ID NO: 128665 - RNA, 20 nt, Human
cucaggcuggaaugcagugg

SEQ ID NO: 128666 - RNA, 20 nt, Human
cucaggcuggaauguagugg

SEQ ID NO: 128667 - RNA, 19 nt, Human
cucaggcuggaguacagug

SEQ ID NO: 128668 - RNA, 20 nt, Human
cucaggcuggaguacagugg

SEQ ID NO: 128669 - RNA, 22 nt, Human
cucaggcuggaguacaguggug

SEQ ID NO: 128670 - RNA, 18 nt, Human
cucaggcuggagugcaau

SEQ ID NO: 128671 - RNA, 19 nt, Human
cucaggcuggagugcaaug

SEQ ID NO: 128672 - RNA, 20 nt, Human
cucaggcuggagugcaauga

SEQ ID NO: 128673 - RNA, 20 nt, Human
cucaggcuggagugcaaugg

SEQ ID NO: 128674 - RNA, 18 nt, Human
cucaggcuggagugcagu

SEQ ID NO: 128675 - RNA, 19 nt, Human
cucaggcuggagugcagug

SEQ ID NO: 128676 - RNA, 20 nt, Human
cucaggcuggagugcaguga

SEQ ID NO: 128677 - RNA, 20 nt, Human
cucaggcuggagugcagugg

SEQ ID NO: 128678 - RNA, 21 nt, Human
cucaggcuggagugcaguggu

SEQ ID NO: 128679 - RNA, 19 nt, Human
cucaggcuggagugcggug

SEQ ID NO: 128680 - RNA, 20 nt, Human
cucaggcuggagugcggugg

SEQ ID NO: 128681 - RNA, 21 nt, Human
cucaggcuggagugcgguggu

SEQ ID NO: 128682 - RNA, 23 nt, Human
cucaggcuggagugcgguggugu

SEQ ID NO: 128683 - RNA, 20 nt, Human
cucaggcuggauugcagugg

SEQ ID NO: 128684 - RNA, 32 nt, Human
cucaggcuggccuugaacuccugggcucaagc

SEQ ID NO: 128685 - RNA, 32 nt, Human
cucaggcugggcucugaacgaggaccuggacu

SEQ ID NO: 128686 - RNA, 32 nt, Human
cucaggcuggggcucccugaggauggggcugu

SEQ ID NO: 128687 - RNA, 19 nt, Human
cucaggcugggugcagugg

SEQ ID NO: 128688 - RNA, 32 nt, Human
cucaggcuggucuugaacuccugggcucaagc

SEQ ID NO: 128689 - RNA, 32 nt, Human
cucaggcuggucuugaacuccugggcucaagu

SEQ ID NO: 128690 - RNA, 32 nt, Human
cucaggcugguugcaaacuccuugcuucaagg

SEQ ID NO: 128691 - RNA, 32 nt, Human
cucaggcuguagaaaucuuauuuuguggaaag

SEQ ID NO: 128692 - RNA, 22 nt, Human
cucaggcugucugcccaccuca

SEQ ID NO: 128693 - RNA, 32 nt, Human
cucaggcuguggggcaggcugggcagggggcu

SEQ ID NO: 128694 - RNA, 32 nt, Human
cucaggcuguucugacucugagccaacagcug

SEQ ID NO: 128695 - RNA, 32 nt, Human
cucaggcuuacuacagccuccaccuucagguu

SEQ ID NO: 128696 - RNA, 32 nt, Human
cucaggcuucugaguagcugggauuauaggug

SEQ ID NO: 128697 - RNA, 32 nt, Human
cucaggcuugcuccugcugugugucugugguu

SEQ ID NO: 128698 - RNA, 32 nt, Human
cucaggcuugucccccugucagcugccuccag

SEQ ID NO: 128699 - RNA, 32 nt, Human
cucaggcuuucccagcuuccuccccuugcuac

SEQ ID NO: 128700 - RNA, 32 nt, Human
cucagggaaaaauuuuaaucacuguguauaau

SEQ ID NO: 128701 - RNA, 32 nt, Human
cucagggaagcccagggaagagagggacuccu

SEQ ID NO: 128702 - RNA, 32 nt, Human
cucagggaaggcagacuucugugcuuucuuuc

SEQ ID NO: 128703 - RNA, 32 nt, Human
cucagggacaccaagcaggaggugccggguaa

SEQ ID NO: 128704 - RNA, 32 nt, Human
cucagggacagaggccagcagaggagccagcu

SEQ ID NO: 128705 - RNA, 32 nt, Human
cucagggacauggagaccguggagaggaggca

SEQ ID NO: 128706 - RNA, 21 nt, Human
cucagggacccagcacugggc

SEQ ID NO: 128707 - RNA, 21 nt, Human
cucagggacccaggaacucag

SEQ ID NO: 128708 - RNA, 32 nt, Human
cucagggacccucuugccccuucaccauggac

SEQ ID NO: 128709 - RNA, 32 nt, Human
cucagggacucagaucagggcuggcaguagau

SEQ ID NO: 128710 - RNA, 32 nt, Human
cucagggacucaggccagucacccugugaccg

SEQ ID NO: 128711 - RNA, 20 nt, Human
cucagggacuucauugacuu

SEQ ID NO: 128712 - RNA, 32 nt, Human
cucagggagaaggauagggagauggaaauuuu

SEQ ID NO: 128713 - RNA, 32 nt, Human
cucagggagagggagacaaugaccuggagggu

SEQ ID NO: 128714 - RNA, 32 nt, Human
cucagggagcccggggaaggcggagcucagug

SEQ ID NO: 128715 - RNA, 32 nt, Human
cucagggagcuuauagaagugaagauuccuga

SEQ ID NO: 128716 - RNA, 32 nt, Human
cucagggaggguggggcuuagggacagggccc

SEQ ID NO: 128717 - RNA, 32 nt, Human
cucagggagguaaccuguucaaggucaugaac

SEQ ID NO: 128718 - RNA, 32 nt, Human
cucagggauccucugcugggugccuccuugcc

SEQ ID NO: 128719 - RNA, 32 nt, Human
cucagggaugugggaaucucccagacuuguuu

SEQ ID NO: 128720 - RNA, 32 nt, Human
cucagggcaccagcaaccaagccagcccccgg

SEQ ID NO: 128721 - RNA, 32 nt, Human
cucagggcacgggcaaacacauaggcuugcgu

SEQ ID NO: 128722 - RNA, 32 nt, Human
cucagggcagagccuggcugcugggcagaagg

SEQ ID NO: 128723 - RNA, 32 nt, Human
cucagggcagaggccacaggaggcugaagcgg

SEQ ID NO: 128724 - RNA, 32 nt, Human
cucagggcagagggaggaaggacagcagacca

SEQ ID NO: 128725 - RNA, 32 nt, Human
cucagggcagggugccuggcggagaaggccug

SEQ ID NO: 128726 - RNA, 32 nt, Human
cucagggccagccaggacacagcagcuggcag

SEQ ID NO: 128727 - RNA, 32 nt, Human
cucagggcccaagaggagaggcuggugugaaa

SEQ ID NO: 128728 - RNA, 32 nt, Human
cucagggcccugcucaccugcucuggcuguga

SEQ ID NO: 128729 - RNA, 32 nt, Human
cucagggccugccaguucucaccagcugggag

SEQ ID NO: 128730 - RNA, 21 nt, Human
cucagggccuggacugcucca

SEQ ID NO: 128731 - RNA, 32 nt, Human
cucagggccuuugcuuggucaggggccccacu

SEQ ID NO: 128732 - RNA, 32 nt, Human
cucagggcucagcucaguccccuugucugucc

SEQ ID NO: 128733 - RNA, 32 nt, Human
cucagggcuccaccucuccaucuggaagccgg

SEQ ID NO: 128734 - RNA, 32 nt, Human
cucagggcucugcaacaaugauagcagaagcu

SEQ ID NO: 128735 - RNA, 22 nt, Human
cucagggcugccccucucccca

SEQ ID NO: 128736 - RNA, 32 nt, Human
cucagggcugcugccuuccuguccucuggaga

SEQ ID NO: 128737 - RNA, 32 nt, Human
cucagggcuggcacagaacagcugggcuuugc

SEQ ID NO: 128738 - RNA, 32 nt, Human
cucaggggaaacugaggcaggaagcccuggcc

SEQ ID NO: 128739 - RNA, 32 nt, Human
cucaggggcaggggguggagguuggggucacc

SEQ ID NO: 128740 - RNA, 32 nt, Human
cucaggggcagugggagccguggagaguggaa

SEQ ID NO: 128741 - RNA, 32 nt, Human
cucaggggcgggaccccaggaggagggagagg

SEQ ID NO: 128742 - RNA, 20 nt, Human
cucaggggcugcgucagcca

SEQ ID NO: 128743 - RNA, 32 nt, Human
cucaggggguggagguugcagugaguugagau

SEQ ID NO: 128744 - RNA, 32 nt, Human
cucagggguacaacagggcagguaugggaagg

SEQ ID NO: 128745 - RNA, 32 nt, Human
cucaggggucagaagcagggacuggggcaggc

SEQ ID NO: 128746 - RNA, 32 nt, Human
cucaggggugagguggagagggagacaugaca

SEQ ID NO: 128747 - RNA, 32 nt, Human
cucagggguggagggcgaugggucgggaagcu

SEQ ID NO: 128748 - RNA, 32 nt, Human
cucagggguuguuaaaaaugcacagaaacaau

SEQ ID NO: 128749 - RNA, 32 nt, Human
cucaggguacuuucugggauugcucacauuuc

SEQ ID NO: 128750 - RNA, 32 nt, Human
cucaggguccagugucauuugaggauguggcu

SEQ ID NO: 128751 - RNA, 32 nt, Human
cucagggucccaggcugugggccaucacgacc

SEQ ID NO: 128752 - RNA, 32 nt, Human
cucagggucggacuucauuuuguacugugggc

SEQ ID NO: 128753 - RNA, 32 nt, Human
cucagggucuggacuuggucaguggccuuuca

SEQ ID NO: 128754 - RNA, 32 nt, Human
cucagggugcuacauucacucuugccuuaggu

SEQ ID NO: 128755 - RNA, 32 nt, Human
cucaggguggccaggcccugcucaacaucugg

SEQ ID NO: 128756 - RNA, 32 nt, Human
cucagggugggaagugggagggcagggcaaag

SEQ ID NO: 128757 - RNA, 32 nt, Human
cucagggugggaagugggaggguggggcgaag

SEQ ID NO: 128758 - RNA, 32 nt, Human
cucagggugggcaguggggguggggcugggac

SEQ ID NO: 128759 - RNA, 32 nt, Human
cucagggugggcggaggaagcgguuagacgcc

SEQ ID NO: 128760 - RNA, 32 nt, Human
cucagggugggcucagaggccacugagaugcc

SEQ ID NO: 128761 - RNA, 32 nt, Human
cucaggguguuucugccgcuuaguaucuuuuu

SEQ ID NO: 128762 - RNA, 32 nt, Human
cucaggguuaggugucagaaagaaaaggaagu

SEQ ID NO: 128763 - RNA, 32 nt, Human
cucaggguuggagacuucggggccaagauggc

SEQ ID NO: 128764 - RNA, 32 nt, Human
cucaggguuggccagcuugcagaggagcaagc

SEQ ID NO: 128765 - RNA, 32 nt, Human
cucagguaccucacucuccugccuugugcgua

SEQ ID NO: 128766 - RNA, 32 nt, Human
cucaggucaaaccaagccaagagcacccuguc

SEQ ID NO: 128767 - RNA, 32 nt, Human
cucaggucacugcaaccucugccucccagguu

SEQ ID NO: 128768 - RNA, 32 nt, Human
cucaggucacugcaaccucugccuccuggguu

SEQ ID NO: 128769 - RNA, 32 nt, Human
cucaggucagaggcacggacagccucuggagc

SEQ ID NO: 128770 - RNA, 18 nt, Human
cucaggucagcucacuga

SEQ ID NO: 128771 - RNA, 32 nt, Human
cucaggucaggaguuugagaccagccuggcca

SEQ ID NO: 128772 - RNA, 32 nt, Human
cucaggucccagcugucucacguuguuuauuc

SEQ ID NO: 128773 - RNA, 32 nt, Human
cucagguccucugcuucuccccacccagcaug

SEQ ID NO: 128774 - RNA, 32 nt, Human
cucaggucgggaguucaagaccagccuggcca

SEQ ID NO: 128775 - RNA, 19 nt, Human
cucaggucucccuacuccu

SEQ ID NO: 128776 - RNA, 32 nt, Human
cucaggucugcagcuggguccugccuccuucc

SEQ ID NO: 128777 - RNA, 20 nt, Human
cucaggucuguaacugccca

SEQ ID NO: 128778 - RNA, 32 nt, Human
cucaggucuguaacugcccagccccuuuucuc

SEQ ID NO: 128779 - RNA, 32 nt, Human
cucaggugaaauccaugcccuucugcuuauag

SEQ ID NO: 128780 - RNA, 32 nt, Human
cucaggugagcugguagaggggagacauuaga

SEQ ID NO: 128781 - RNA, 32 nt, Human
cucaggugauccacccaccucugccuccaaag

SEQ ID NO: 128782 - RNA, 32 nt, Human
cucaggugauccacccaccucugccucccaaa

SEQ ID NO: 128783 - RNA, 22 nt, Human
cucaggugauccacccgccuca

SEQ ID NO: 128784 - RNA, 32 nt, Human
cucaggugauccacccuccucugccucccaaa

SEQ ID NO: 128785 - RNA, 32 nt, Human
cucaggugauccacucgccucugccucccaaa

SEQ ID NO: 128786 - RNA, 32 nt, Human
cucaggugauccgcccgccucugccucccaag

SEQ ID NO: 128787 - RNA, 32 nt, Human
cucaggugauccggcugccucagccucccaaa

SEQ ID NO: 128788 - RNA, 22 nt, Human
cucaggugauccucccaccuca

SEQ ID NO: 128789 - RNA, 32 nt, Human
cucaggugauccucccaucucagccucucgag

SEQ ID NO: 128790 - RNA, 32 nt, Human
cucaggugauccucccaucucagccugccucc

SEQ ID NO: 128791 - RNA, 32 nt, Human
cucaggugauucucccaucucagccucccuag

SEQ ID NO: 128792 - RNA, 32 nt, Human
cucaggugcggaggggacagaggacccuggca

SEQ ID NO: 128793 - RNA, 32 nt, Human
cucaggugcggagucugcgggagcagcauuuc

SEQ ID NO: 128794 - RNA, 32 nt, Human
cucaggugcugcagcuccaccucagagggcac

SEQ ID NO: 128795 - RNA, 32 nt, Human
cucaggugcuguauugggggagaagggagaaa

SEQ ID NO: 128796 - RNA, 32 nt, Human
cucaggugcuugcgaggugaucagaaggcaaa

SEQ ID NO: 128797 - RNA, 32 nt, Human
cucaggugggacccaaaaauuugcauuucuaa

SEQ ID NO: 128798 - RNA, 32 nt, Human
cucaggugggcugggaccuaggaagcuccauc

SEQ ID NO: 128799 - RNA, 32 nt, Human
cucaggugggcuuuuucucauggagauccuca

SEQ ID NO: 128800 - RNA, 31 nt, Human
cucagguggguggagcaguggugggagaaga

SEQ ID NO: 128801 - RNA, 32 nt, Human
cucagguggucccugcagagugcccugggaag

SEQ ID NO: 128802 - RNA, 31 nt, Human
cucagguggugacuauccuguugagaagcaa

SEQ ID NO: 128803 - RNA, 32 nt, Human
cucagguguagcugagcugugacauugcuggu

SEQ ID NO: 128804 - RNA, 32 nt, Human
cucaggugugaucauagcacacugcagccugg

SEQ ID NO: 128805 - RNA, 32 nt, Human
cucagguucgcccucugggccagguccuucac

SEQ ID NO: 128806 - RNA, 32 nt, Human
cucagguugucagguucugccuucaaggguug

SEQ ID NO: 128807 - RNA, 18 nt, Human
cucaguaaacgcucacug

SEQ ID NO: 128808 - RNA, 23 nt, Human
cucaguaaucaagccaauggccu

SEQ ID NO: 128809 - RNA, 32 nt, Human
cucaguacaauguauguagcccaggaaaugac

SEQ ID NO: 128810 - RNA, 32 nt, Human
cucaguacaauugcugaauuugcccuuaagga

SEQ ID NO: 128811 - RNA, 32 nt, Human
cucaguacauauucaccuugaagaggaagacg

SEQ ID NO: 128812 - RNA, 32 nt, Human
cucaguagcugaggcaggagaaucgcuugaac

SEQ ID NO: 128813 - RNA, 32 nt, Human
cucaguaggaacuugagggaagguugagggaa

SEQ ID NO: 128814 - RNA, 32 nt, Human
cucaguaggaaggggugaggcagcuguccuga

SEQ ID NO: 128815 - RNA, 18 nt, Human
cucaguauaauuguucca

SEQ ID NO: 128816 - RNA, 32 nt, Human
cucaguaugccagcugucucaauggcucacca

SEQ ID NO: 128817 - RNA, 19 nt, Human
cucaguauucuuccuggca

SEQ ID NO: 128818 - RNA, 32 nt, Human
cucaguauugauuugucccagaauuuucuggc

SEQ ID NO: 128819 - RNA, 19 nt, Human
cucagucaacauucacuga

SEQ ID NO: 128820 - RNA, 32 nt, Human
cucagucacauccugucuuccuuacaucuuug

SEQ ID NO: 128821 - RNA, 32 nt, Human
cucagucaccauggcucaugccccagaaccgg

SEQ ID NO: 128822 - RNA, 26 nt, Human
cucagucacccaggcuggagugcagu

SEQ ID NO: 128823 - RNA, 23 nt, Human
cucagucacuccacccccuucca

SEQ ID NO: 128824 - RNA, 32 nt, Human
cucagucacugggagaagaaccucucauaccc

SEQ ID NO: 128825 - RNA, 32 nt, Human
cucagucaggaaaauugcacagaccgacaguc

SEQ ID NO: 128826 - RNA, 32 nt, Human
cucagucaggaagagaaccugcagccugccuc

SEQ ID NO: 128827 - RNA, 32 nt, Human
cucaguccaacauccuuuucuccaucagcaac

SEQ ID NO: 128828 - RNA, 32 nt, Human
cucaguccaagcucuccugucccauugugcau

SEQ ID NO: 128829 - RNA, 32 nt, Human
cucaguccacugcaaccucugcccucccgggu

SEQ ID NO: 128830 - RNA, 32 nt, Human
cucaguccauccacccuucauggggccagagc

SEQ ID NO: 128831 - RNA, 32 nt, Human
cucagucccacugucuucagccagcugaagcu

SEQ ID NO: 128832 - RNA, 32 nt, Human
cucagucccagaucccucccagccccauugcc

SEQ ID NO: 128833 - RNA, 21 nt, Human
cucaguccccgccuccauccc

SEQ ID NO: 128834 - RNA, 32 nt, Human
cucaguccccucccaucccccacgcagcucca

SEQ ID NO: 128835 - RNA, 32 nt, Human
cucaguccccuucauauuacccucuccuuuuu

SEQ ID NO: 128836 - RNA, 20 nt, Human
cucagucccgccgccgcccg

SEQ ID NO: 128837 - RNA, 32 nt, Human
cucagucccucccagcugcaguaccagugcca

SEQ ID NO: 128838 - RNA, 32 nt, Human
cucagucccucucucaccucccucucuuccug

SEQ ID NO: 128839 - RNA, 32 nt, Human
cucagucccucugaagggagcagcccucuuuu

SEQ ID NO: 128840 - RNA, 32 nt, Human
cucagucccugccagcccccaggagcgccucc

SEQ ID NO: 128841 - RNA, 32 nt, Human
cucaguccucacccggagccuuugccugcucc

SEQ ID NO: 128842 - RNA, 19 nt, Human
cucaguccuccaucccccu

SEQ ID NO: 128843 - RNA, 32 nt, Human
cucaguccucccucccuguccuccccugucuc

SEQ ID NO: 128844 - RNA, 32 nt, Human
cucaguccuccucaucccaucucacucuccgu

SEQ ID NO: 128845 - RNA, 32 nt, Human
cucaguccugcaggcuguacaggaagcacagu

SEQ ID NO: 128846 - RNA, 32 nt, Human
cucaguccugcaucuuuucuucugcuuucuuc

SEQ ID NO: 128847 - RNA, 17 nt, Human
cucaguccugccugcca

SEQ ID NO: 128848 - RNA, 32 nt, Human
cucaguccuugcaacccuguuccucagugaca

SEQ ID NO: 128849 - RNA, 32 nt, Human
cucagucgccauagagcugggccuggccuugc

SEQ ID NO: 128850 - RNA, 32 nt, Human
cucagucgcccaggcuggagugcagcagcaca

SEQ ID NO: 128851 - RNA, 32 nt, Human
cucagucgcccaggcuggagugcaguggcaug

SEQ ID NO: 128852 - RNA, 32 nt, Human
cucagucgccucgcgccagcaguuuuuggcuu

SEQ ID NO: 128853 - RNA, 32 nt, Human
cucagucgcucaggcuggagugcaaugguggg

SEQ ID NO: 128854 - RNA, 32 nt, Human
cucagucgcucaggcuggagugcaguggcgcg

SEQ ID NO: 128855 - RNA, 32 nt, Human
cucagucggcauucuacaacuucccacagcag

SEQ ID NO: 128856 - RNA, 32 nt, Human
cucagucuacaucugcucaucuuguuugcuua

SEQ ID NO: 128857 - RNA, 32 nt, Human
cucagucucaaaggcagaugcaucagagccaa

SEQ ID NO: 128858 - RNA, 32 nt, Human
cucagucucagcuuccucaucuguaaaauggg

SEQ ID NO: 128859 - RNA, 32 nt, Human
cucagucuccaggacauuccuuucccagcucc

SEQ ID NO: 128860 - RNA, 32 nt, Human
cucagucucccaaagugcugggauuauaggcg

SEQ ID NO: 128861 - RNA, 32 nt, Human
cucagucucccaagcagcugggauuguaggua

SEQ ID NO: 128862 - RNA, 32 nt, Human
cucagucucccaaguagcugggauuauaggca

SEQ ID NO: 128863 - RNA, 32 nt, Human
cucagucucccgaguagcugggauuauaggcg

SEQ ID NO: 128864 - RNA, 32 nt, Human
cucagucucccuccuccucauucccuuccauc

SEQ ID NO: 128865 - RNA, 32 nt, Human
cucagucucucacugugcuguguccuugcagc

SEQ ID NO: 128866 - RNA, 32 nt, Human
cucagucucucccauuccucgcagcacggguu

SEQ ID NO: 128867 - RNA, 32 nt, Human
cucagucucuuacccaggcuagggugcagugg

SEQ ID NO: 128868 - RNA, 23 nt, Human
cucagucugaacaagaaaacucc

SEQ ID NO: 128869 - RNA, 32 nt, Human
cucagucuggagugggauaggagcagugagug

SEQ ID NO: 128870 - RNA, 32 nt, Human
cucagucugggcuguaauguggcacugguggg

SEQ ID NO: 128871 - RNA, 32 nt, Human
cucagucugucacccaggcuggagugaucuca

SEQ ID NO: 128872 - RNA, 32 nt, Human
cucagucugucacccaggcuggagugcagugg

SEQ ID NO: 128873 - RNA, 32 nt, Human
cucagucuguugcccaggcuggagugcagugg

SEQ ID NO: 128874 - RNA, 32 nt, Human
cucagucuuuuagguuagucucuccucuuuca

SEQ ID NO: 128875 - RNA, 32 nt, Human
cucagugaaaucucauuauacaaagagaaccu

SEQ ID NO: 128876 - RNA, 32 nt, Human
cucagugaacuuccaccacaucccuaaaaucu

SEQ ID NO: 128877 - RNA, 32 nt, Human
cucagugacagcaagagcaggaagagcagcag

SEQ ID NO: 128878 - RNA, 32 nt, Human
cucagugaccauccuuggacuucaccucucac

SEQ ID NO: 128879 - RNA, 32 nt, Human
cucagugacgugggggugaggguggguggcga

SEQ ID NO: 128880 - RNA, 32 nt, Human
cucagugacucuggcaaggcugcuucucuauc

SEQ ID NO: 128881 - RNA, 19 nt, Human
cucagugagcuggggccau

SEQ ID NO: 128882 - RNA, 32 nt, Human
cucagugagcugguguauaauccaagacagaa

SEQ ID NO: 128883 - RNA, 32 nt, Human
cucagugagggaggggccuccgaagcccgcga

SEQ ID NO: 128884 - RNA, 32 nt, Human
cucagugaggggaauucuuccagaacucugca

SEQ ID NO: 128885 - RNA, 32 nt, Human
cucagugaguuauuuuaugauuacaaaucccu

SEQ ID NO: 128886 - RNA, 32 nt, Human
cucagugaguuauuuuaugauuacaaauccuu

SEQ ID NO: 128887 - RNA, 19 nt, Human
cucagugauaacuguuuca

SEQ ID NO: 128888 - RNA, 32 nt, Human
cucagugauccucugcaucucugccuacaagg

SEQ ID NO: 128889 - RNA, 32 nt, Human
cucagugaugucagcacuguugcucaggagug

SEQ ID NO: 128890 - RNA, 32 nt, Human
cucagugcaaccuccccaccccgggcuccaac

SEQ ID NO: 128891 - RNA, 21 nt, Human
cucagugcaaccuccgccucc

SEQ ID NO: 128892 - RNA, 32 nt, Human
cucagugcaaccuccgccuccuggguucaagc

SEQ ID NO: 128893 - RNA, 31 nt, Human
cucagugcacuucucccuuccaacugcauca

SEQ ID NO: 128894 - RNA, 32 nt, Human
cucagugcagccuccaacuccugggcucaaua

SEQ ID NO: 128895 - RNA, 32 nt, Human
cucagugcaguguacauuuccacaaaucuaag

SEQ ID NO: 128896 - RNA, 32 nt, Human
cucagugccauccugggugcccagggcagagc

SEQ ID NO: 128897 - RNA, 21 nt, Human
cucagugcccacaugcagcuu

SEQ ID NO: 128898 - RNA, 32 nt, Human
cucagugcccaugucucccccaccucagggug

SEQ ID NO: 128899 - RNA, 19 nt, Human
cucagugccgccgcugccg

SEQ ID NO: 128900 - RNA, 32 nt, Human
cucagugccuggacaaaugaugccauggcaga

SEQ ID NO: 128901 - RNA, 18 nt, Human
cucagugccuggguccag

SEQ ID NO: 128902 - RNA, 32 nt, Human
cucagugcuccgggcgcuucaggcuggcuugg

SEQ ID NO: 128903 - RNA, 32 nt, Human
cucagugcucguuacuucauggucccaagaug

SEQ ID NO: 128904 - RNA, 32 nt, Human
cucagugcucucuccacuaccccacaccagcc

SEQ ID NO: 128905 - RNA, 32 nt, Human
cucagugcuguugcuccaucuacugcccuaau

SEQ ID NO: 128906 - RNA, 32 nt, Human
cucagugcuuuccaauucgaacuuuuuccaau

SEQ ID NO: 128907 - RNA, 32 nt, Human
cucagugcuuugcauguauuagcucacugaau

SEQ ID NO: 128908 - RNA, 32 nt, Human
cucagugcuuuugucuuuuucaugacauggca

SEQ ID NO: 128909 - RNA, 32 nt, Human
cucaguggaagcccucuuuccccaaauccuac

SEQ ID NO: 128910 - RNA, 32 nt, Human
cucaguggaaggcauuguccugugaaauauuc

SEQ ID NO: 128911 - RNA, 32 nt, Human
cucaguggacucucugcucucugacagauaug

SEQ ID NO: 128912 - RNA, 32 nt, Human
cucaguggagccaggagcuaacucagacccca

SEQ ID NO: 128913 - RNA, 32 nt, Human
cucaguggaucucagagagagccccagacuga

SEQ ID NO: 128914 - RNA, 32 nt, Human
cucaguggccacugagcaucugggcagcucug

SEQ ID NO: 128915 - RNA, 32 nt, Human
cucaguggccuucgaccucgacaugcacgacg

SEQ ID NO: 128916 - RNA, 32 nt, Human
cucaguggcucacaccuguaaucccagcacuu

SEQ ID NO: 128917 - RNA, 32 nt, Human
cucaguggcucaccccuguaaucccagcacuu

SEQ ID NO: 128918 - RNA, 32 nt, Human
cucaguggcucacgccuguaaucccagcgcuu

SEQ ID NO: 128919 - RNA, 32 nt, Human
cucaguggcucaugccuguaaucccagcauuu

SEQ ID NO: 128920 - RNA, 32 nt, Human
cucaguggcucauuccuguaaucccagcacuu

SEQ ID NO: 128921 - RNA, 32 nt, Human
cucagugggaucugggcaacauggaguucauu

SEQ ID NO: 128922 - RNA, 32 nt, Human
cucaguggggacuugcaugcacauccaccauu

SEQ ID NO: 128923 - RNA, 32 nt, Human
cucaguggggaggaagaggaggccaggagucu

SEQ ID NO: 128924 - RNA, 32 nt, Human
cucaguggggccaagacaggccugccagagca

SEQ ID NO: 128925 - RNA, 32 nt, Human
cucaguggggcuggagccaauggugggggugg

SEQ ID NO: 128926 - RNA, 32 nt, Human
cucagugggggaagccaagaucagaguucugg

SEQ ID NO: 128927 - RNA, 32 nt, Human
cucaguggggucuugcucugucacccaggugg

SEQ ID NO: 128928 - RNA, 32 nt, Human
cucagugggucggaagagaaggcgguggccug

SEQ ID NO: 128929 - RNA, 32 nt, Human
cucaguggugccugcaaccccugguucaccuc

SEQ ID NO: 128930 - RNA, 32 nt, Human
cucaguggugggauggcugaacugggggccca

SEQ ID NO: 128931 - RNA, 32 nt, Human
cucaguguacacagaucccauccucuggcugc

SEQ ID NO: 128932 - RNA, 32 nt, Human
cucagugucacagaccuuuguggaagcaacaa

SEQ ID NO: 128933 - RNA, 20 nt, Human
cucaguguccaagacccagg

SEQ ID NO: 128934 - RNA, 32 nt, Human
cucaguguccacccugucccuguaucucccau

SEQ ID NO: 128935 - RNA, 32 nt, Human
cucaguguccacccuuccugccucaugucuca

SEQ ID NO: 128936 - RNA, 18 nt, Human
cucagugugcacaaggaa

SEQ ID NO: 128937 - RNA, 32 nt, Human
cucaguguggugaccugcucaugucagcuucu

SEQ ID NO: 128938 - RNA, 32 nt, Human
cucaguguucagagaagccaaaaagaauguau

SEQ ID NO: 128939 - RNA, 32 nt, Human
cucaguuaaacaucauugguuuauuugacuua

SEQ ID NO: 128940 - RNA, 32 nt, Human
cucaguuaaguguuuccuuccuuugugccccc

SEQ ID NO: 128941 - RNA, 32 nt, Human
cucaguuacagagccucacaguuacaguucca

SEQ ID NO: 128942 - RNA, 32 nt, Human
cucaguuacuccugaauauucugauuucauac

SEQ ID NO: 128943 - RNA, 32 nt, Human
cucaguuagaaaacaauucaccuggcuuaguc

SEQ ID NO: 128944 - RNA, 21 nt, Human
cucaguucacugcaaccucca

SEQ ID NO: 128945 - RNA, 23 nt, Human
cucaguucacugcaaccuccacu

SEQ ID NO: 128946 - RNA, 32 nt, Human
cucaguucacugcaaccuccacuuccuagguu

SEQ ID NO: 128947 - RNA, 32 nt, Human
cucaguucacugcaaccucugccucccacguu

SEQ ID NO: 128948 - RNA, 32 nt, Human
cucaguucacugcaaccucugccucccggguu

SEQ ID NO: 128949 - RNA, 32 nt, Human
cucaguucacugcaaccucugccuccuaaguu

SEQ ID NO: 128950 - RNA, 32 nt, Human
cucaguucacugcaaccucugccuccuggguu

SEQ ID NO: 128951 - RNA, 32 nt, Human
cucaguucacugcaacuucugccucccgaguu

SEQ ID NO: 128952 - RNA, 32 nt, Human
cucaguucacugcaagcuccgccuccucguuu

SEQ ID NO: 128953 - RNA, 32 nt, Human
cucaguucacugcagucucugccuccuugguu

SEQ ID NO: 128954 - RNA, 32 nt, Human
cucaguucagggauuggggcuggcuuugaguu

SEQ ID NO: 128955 - RNA, 32 nt, Human
cucaguucagugcaaucuccgccuccuggguu

SEQ ID NO: 128956 - RNA, 32 nt, Human
cucaguucaucuuuaccaaagacacucuaugu

SEQ ID NO: 128957 - RNA, 32 nt, Human
cucaguuccucaaacacagacccagggugcau

SEQ ID NO: 128958 - RNA, 32 nt, Human
cucaguucugcugcugauguaccaugaucuug

SEQ ID NO: 128959 - RNA, 32 nt, Human
cucaguucugcuugugggcgggccugucuuuc

SEQ ID NO: 128960 - RNA, 31 nt, Human
cucaguucuuauuugcaccuacuucagugga

SEQ ID NO: 128961 - RNA, 32 nt, Human
cucaguucuuccuccaccuccacccagugauc

SEQ ID NO: 128962 - RNA, 32 nt, Human
cucaguugaagaggacgagaggacgaccuucu

SEQ ID NO: 128963 - RNA, 32 nt, Human
cucaguugagccacugugcccagccuuaggag

SEQ ID NO: 128964 - RNA, 32 nt, Human
cucaguugcacagcaggccccauccagacaga

SEQ ID NO: 128965 - RNA, 32 nt, Human
cucaguugcccagacuggagagcaguggccaa

SEQ ID NO: 128966 - RNA, 26 nt, Human
cucaguugcccaggcuggagugcagu

SEQ ID NO: 128967 - RNA, 32 nt, Human
cucaguugcccaggcuggauugcgguggcgcu

SEQ ID NO: 128968 - RNA, 32 nt, Human
cucaguuggguuucacgaguguuccugugcuu

SEQ ID NO: 128969 - RNA, 32 nt, Human
cucaguuguucuguuuacauccugguggcacc

SEQ ID NO: 128970 - RNA, 32 nt, Human
cucaguuguuguucuuguucuucuuguucuuu

SEQ ID NO: 128971 - RNA, 22 nt, Human
cucaguuguuugcuucuugcca

SEQ ID NO: 128972 - RNA, 32 nt, Human
cucaguuuagcuuauaaccacaugcauacccc

SEQ ID NO: 128973 - RNA, 32 nt, Human
cucaguuucaccaccucccucuuccagacugc

SEQ ID NO: 128974 - RNA, 24 nt, Human
cucaguuucaguucacuccugcca

SEQ ID NO: 128975 - RNA, 32 nt, Human
cucaguuucccauccauaaaaugggggaagug

SEQ ID NO: 128976 - RNA, 32 nt, Human
cucaguuuccccucaugaucuggccucugccc

SEQ ID NO: 128977 - RNA, 21 nt, Human
cucaguuucccuccucugcca

SEQ ID NO: 128978 - RNA, 32 nt, Human
cucaguuucuaaccucacacagugagguguau

SEQ ID NO: 128979 - RNA, 32 nt, Human
cucaguuucuccugccagccccggcucaucuc

SEQ ID NO: 128980 - RNA, 32 nt, Human
cucaguuucuggaugaaaaugaugcaguuaua

SEQ ID NO: 128981 - RNA, 32 nt, Human
cucaguuucuguaaguagugccauuaucacag

SEQ ID NO: 128982 - RNA, 32 nt, Human
cucaguuucuuucucugcaaacaaguugccau

SEQ ID NO: 128983 - RNA, 32 nt, Human
cucaguuugucacccaggcuggagugcagugg

SEQ ID NO: 128984 - RNA, 22 nt, Human
cucaguuuuaguuuccuuccca

SEQ ID NO: 128985 - RNA, 32 nt, Human
cucaguuuuauuuagaacucuggauuuuuaga

SEQ ID NO: 128986 - RNA, 32 nt, Human
cucaguuuuauuuuuaccuaacacuaacauga

SEQ ID NO: 128987 - RNA, 32 nt, Human
cucaguuuucuuucuuucuuuuuguuuuugac

SEQ ID NO: 128988 - RNA, 20 nt, Human
cucaguuuugguucccugcc

SEQ ID NO: 128989 - RNA, 23 nt, Human
cucaguuuuucagcuccucucca

SEQ ID NO: 128990 - RNA, 32 nt, Human
cucaguuuuugagacgugagucuugccaaugc

SEQ ID NO: 128991 - RNA, 19 nt, Human
cucauaaaacuacagggaa

SEQ ID NO: 128992 - RNA, 32 nt, Human
cucauaaaggagaaggaggaggaggaagagag

SEQ ID NO: 128993 - RNA, 32 nt, Human
cucauaaaggcuaacacagaaagcuuuuccaa

SEQ ID NO: 128994 - RNA, 22 nt, Human
cucauaaauugcuuuccuaaca

SEQ ID NO: 128995 - RNA, 32 nt, Human
cucauaacccccagacucagagcccgagagcc

SEQ ID NO: 128996 - RNA, 32 nt, Human
cucauaaccgugccugcuccuccugggcauug

SEQ ID NO: 128997 - RNA, 32 nt, Human
cucauaacggaucagaaauacagauuuugaua

SEQ ID NO: 128998 - RNA, 32 nt, Human
cucauaagaaucuccacugcaggaucgauauu

SEQ ID NO: 128999 - RNA, 32 nt, Human
cucauaagcaucuucaccgucucuccaaaucu

SEQ ID NO: 129000 - RNA, 32 nt, Human
cucauaaggagcuguguggucuuggaggugga

SEQ ID NO: 129001 - RNA, 24 nt, Human
cucauaagggcuggagugcugugg

SEQ ID NO: 129002 - RNA, 32 nt, Human
cucauaauaaaucugcuccuauaauugaggca

SEQ ID NO: 129003 - RNA, 32 nt, Human
cucauaauaagaaagcuugcucccuugggaca

SEQ ID NO: 129004 - RNA, 32 nt, Human
cucauaaugugaucccagcuuuccugaagaga

SEQ ID NO: 129005 - RNA, 32 nt, Human
cucauaauuccugacguggcuuuuucuucucu

SEQ ID NO: 129006 - RNA, 32 nt, Human
cucauacaggagagagggaaggcugccaggca

SEQ ID NO: 129007 - RNA, 32 nt, Human
cucauacaguggaauguggcagaugagacggg

SEQ ID NO: 129008 - RNA, 32 nt, Human
cucauaccaaacacuauucacaacccuuucua

SEQ ID NO: 129009 - RNA, 32 nt, Human
cucauaccauucccauuuucucagccucuucu

SEQ ID NO: 129010 - RNA, 32 nt, Human
cucauacccaugcacaguacaauaauguacuc

SEQ ID NO: 129011 - RNA, 32 nt, Human
cucauaccuguaaaucccagcacuuugggagg

SEQ ID NO: 129012 - RNA, 21 nt, Human
cucauaccuguaaucccaaca

SEQ ID NO: 129013 - RNA, 32 nt, Human
cucauaccuguaaucccagcaauuugggaggc

SEQ ID NO: 129014 - RNA, 32 nt, Human
cucauaccuguaaucccagcacuuugggaagc

SEQ ID NO: 129015 - RNA, 32 nt, Human
cucauaccuguaaucccagcacuuugggaggc

SEQ ID NO: 129016 - RNA, 32 nt, Human
cucauaccuguaaucccagcaguuugggaggc

SEQ ID NO: 129017 - RNA, 32 nt, Human
cucauaccuguaaucccagcauuuggggaggc

SEQ ID NO: 129018 - RNA, 32 nt, Human
cucauaccuguaaucccaggacuuugggaggc

SEQ ID NO: 129019 - RNA, 32 nt, Human
cucauaccuguaaucccggcacuuugggaggc

SEQ ID NO: 129020 - RNA, 32 nt, Human
cucauaccuguaauccuagcacucugggaggc

SEQ ID NO: 129021 - RNA, 32 nt, Human
cucauaccuguaaucucagcacugugggaggc

SEQ ID NO: 129022 - RNA, 32 nt, Human
cucauaccuguaaugccagcacuuugggaggc

SEQ ID NO: 129023 - RNA, 32 nt, Human
cucauaccuguuaauuccagcacuuugggagg

SEQ ID NO: 129024 - RNA, 32 nt, Human
cucauaccuguuauaccagcacuuugggaggc

SEQ ID NO: 129025 - RNA, 32 nt, Human
cucauacguguaaucccaguacuuuggaaggu

SEQ ID NO: 129026 - RNA, 32 nt, Human
cucauacuguccacccuuguauucucagaugc

SEQ ID NO: 129027 - RNA, 32 nt, Human
cucauagaaagucacuuuaauagauagggaca

SEQ ID NO: 129028 - RNA, 32 nt, Human
cucauagacacauggagaacuaaacaaggggu

SEQ ID NO: 129029 - RNA, 32 nt, Human
cucauagacugcugaguguucaaacuauguuc

SEQ ID NO: 129030 - RNA, 32 nt, Human
cucauagcaaccagaggaagaaaaugagccau

SEQ ID NO: 129031 - RNA, 32 nt, Human
cucauagcaagcuccgccuccuggguucaugc

SEQ ID NO: 129032 - RNA, 32 nt, Human
cucauagcaaggaagagugguggcucaagacu

SEQ ID NO: 129033 - RNA, 32 nt, Human
cucauagccucaaacuccuggucucaagugau

SEQ ID NO: 129034 - RNA, 32 nt, Human
cucauagcgucaacccaccucuugccuuguug

SEQ ID NO: 129035 - RNA, 32 nt, Human
cucauagcucacugcagccucaaacuccuggg

SEQ ID NO: 129036 - RNA, 32 nt, Human
cucauaggagguugugagucagcucuguccau

SEQ ID NO: 129037 - RNA, 32 nt, Human
cucauaggcccggaacaccacagcccgcccag

SEQ ID NO: 129038 - RNA, 32 nt, Human
cucauagggcugggccucggaccccacuccgg

SEQ ID NO: 129039 - RNA, 20 nt, Human
cucauagugagcacaaggaa

SEQ ID NO: 129040 - RNA, 32 nt, Human
cucauauaccauuggccucuacccugcgugcc

SEQ ID NO: 129041 - RNA, 32 nt, Human
cucauaucccuuaaacugaguguagggaaugg

SEQ ID NO: 129042 - RNA, 32 nt, Human
cucauauccuccccuugguuucaaccagaguc

SEQ ID NO: 129043 - RNA, 32 nt, Human
cucauauccuggcucuucucugggcaagauga

SEQ ID NO: 129044 - RNA, 20 nt, Human
cucauaugaauacuguucca

SEQ ID NO: 129045 - RNA, 32 nt, Human
cucauaugagauacccaguuuaucuuucacaa

SEQ ID NO: 129046 - RNA, 32 nt, Human
cucauaugauucaccugccucugccucccaaa

SEQ ID NO: 129047 - RNA, 32 nt, Human
cucauaugcaugcccuuccuuucuauauccuu

SEQ ID NO: 129048 - RNA, 32 nt, Human
cucauauguacuucuuucaagauccuaucacg

SEQ ID NO: 129049 - RNA, 31 nt, Human
cucauauugaauuuucaaugccaaagaugua

SEQ ID NO: 129050 - RNA, 32 nt, Human
cucauauuguuagccaaacgcugauuaaaaug

SEQ ID NO: 129051 - RNA, 32 nt, Human
cucauauuucuuuccauucuuaccugugucau

SEQ ID NO: 129052 - RNA, 32 nt, Human
cucaucaaccacauuucaagugcucaaagcca

SEQ ID NO: 129053 - RNA, 32 nt, Human
cucaucaacuucuaucgggccauugagagcac

SEQ ID NO: 129054 - RNA, 32 nt, Human
cucaucaagggucaauuugauugucauaguga

SEQ ID NO: 129055 - RNA, 32 nt, Human
cucaucacacacagagaagaaaagccagaaaa

SEQ ID NO: 129056 - RNA, 32 nt, Human
cucaucacacccuuaccucccacccccucagc

SEQ ID NO: 129057 - RNA, 32 nt, Human
cucaucacagccagugcugagaggcuccuucu

SEQ ID NO: 129058 - RNA, 32 nt, Human
cucaucacaugugauagauugcaguggaaaug

SEQ ID NO: 129059 - RNA, 32 nt, Human
cucaucacccaauugccagugccugcaggcug

SEQ ID NO: 129060 - RNA, 32 nt, Human
cucaucaccuccuacucccaaaaaggacaaag

SEQ ID NO: 129061 - RNA, 32 nt, Human
cucaucacucugacucugccuucuuggaaagg

SEQ ID NO: 129062 - RNA, 32 nt, Human
cucaucacuuccuaauuauuuugcuacauuuc

SEQ ID NO: 129063 - RNA, 32 nt, Human
cucaucagaaaugccuaaugguuucucuaaua

SEQ ID NO: 129064 - RNA, 32 nt, Human
cucaucagaacaaagcacgagauggaaugacc

SEQ ID NO: 129065 - RNA, 22 nt, Human
cucaucagcacgugucuacagu

SEQ ID NO: 129066 - RNA, 32 nt, Human
cucaucagccaaaagaaaaucaucucaugaau

SEQ ID NO: 129067 - RNA, 32 nt, Human
cucaucagccugugccugacccuucucagcgu

SEQ ID NO: 129068 - RNA, 32 nt, Human
cucaucagccuuccugaccuccuccugcccuc

SEQ ID NO: 129069 - RNA, 32 nt, Human
cucaucagccuuucauccuuaguuugagaauu

SEQ ID NO: 129070 - RNA, 32 nt, Human
cucaucagcgucugcagaaaagaaggaaagag

SEQ ID NO: 129071 - RNA, 32 nt, Human
cucaucaggcagcccccagcccccugaggccc

SEQ ID NO: 129072 - RNA, 32 nt, Human
cucaucaggcagcggguagggcacagggaaga

SEQ ID NO: 129073 - RNA, 32 nt, Human
cucaucaggcagguaccaccuccagggaucuc

SEQ ID NO: 129074 - RNA, 32 nt, Human
cucaucaggcuucugcaaaagcucuucuuccu

SEQ ID NO: 129075 - RNA, 32 nt, Human
cucaucagggcagagguuuuagucaguauggu

SEQ ID NO: 129076 - RNA, 32 nt, Human
cucaucaggggcagaggcaugaaagagucggg

SEQ ID NO: 129077 - RNA, 21 nt, Human
cucaucagguuacccagaagu

SEQ ID NO: 129078 - RNA, 32 nt, Human
cucaucaguaaaaacugucuacagagaaguaa

SEQ ID NO: 129079 - RNA, 21 nt, Human
cucaucaguuguuacaaggaa

SEQ ID NO: 129080 - RNA, 32 nt, Human
cucaucaucacugcucuccacccuccagaggg

SEQ ID NO: 129081 - RNA, 24 nt, Human
cucaucaucacuggccaucagaga

SEQ ID NO: 129082 - RNA, 32 nt, Human
cucaucaucaguaguccuccagccugggcagc

SEQ ID NO: 129083 - RNA, 32 nt, Human
cucaucaucucacgaaucugcuguaauauaag

SEQ ID NO: 129084 - RNA, 32 nt, Human
cucaucaucucaggaugagcucuuuguggcca

SEQ ID NO: 129085 - RNA, 32 nt, Human
cucaucauguccaaagugaaacuuuuucucuu

SEQ ID NO: 129086 - RNA, 32 nt, Human
cucaucauuucagccucugaguagagguaaaa

SEQ ID NO: 129087 - RNA, 32 nt, Human
cucauccaaacagucugccaguggccgggcuc

SEQ ID NO: 129088 - RNA, 32 nt, Human
cucauccacagcuucucacugccgaaguuucu

SEQ ID NO: 129089 - RNA, 32 nt, Human
cucauccacaggcaccagaagaaggggacuuu

SEQ ID NO: 129090 - RNA, 21 nt, Human
cucauccacauagugccagca

SEQ ID NO: 129091 - RNA, 15 nt, Human
cucauccacaugcua

SEQ ID NO: 129092 - RNA, 32 nt, Human
cucauccaccccuccccaucuggaccauaaua

SEQ ID NO: 129093 - RNA, 32 nt, Human
cucauccagcuggugcucaaugauggucagca

SEQ ID NO: 129094 - RNA, 32 nt, Human
cucauccaggcagcaaguacagcugcuaaugc

SEQ ID NO: 129095 - RNA, 32 nt, Human
cucauccaggccucugaccaguagccugagag

SEQ ID NO: 129096 - RNA, 32 nt, Human
cucauccauccacagagcagugcagugggagg

SEQ ID NO: 129097 - RNA, 32 nt, Human
cucauccauguucagcuuuucucccccacgcc

SEQ ID NO: 129098 - RNA, 32 nt, Human
cucaucccaagccaggaggguuucuggggagg

SEQ ID NO: 129099 - RNA, 32 nt, Human
cucaucccacuuccuuuccuacuguccuggaa

SEQ ID NO: 129100 - RNA, 32 nt, Human
cucaucccagaagaggcaucuccauaucccag

SEQ ID NO: 129101 - RNA, 32 nt, Human
cucauccccacccccauacacacucacaagua

SEQ ID NO: 129102 - RNA, 32 nt, Human
cucauccccagccuccaccuccugugugauac

SEQ ID NO: 129103 - RNA, 32 nt, Human
cucauccccaggcuugaaggcacauggcuuuc

SEQ ID NO: 129104 - RNA, 32 nt, Human
cucaucccccuuccuccucuccucccuguccu

SEQ ID NO: 129105 - RNA, 32 nt, Human
cucauccccucagcacuaaccacauccacucu

SEQ ID NO: 129106 - RNA, 32 nt, Human
cucaucccgaagcucagagagcguggggcugc

SEQ ID NO: 129107 - RNA, 32 nt, Human
cucaucccuccccaccucccacugcuuccugc

SEQ ID NO: 129108 - RNA, 32 nt, Human
cucaucccugcuccccgugugucccucggucc

SEQ ID NO: 129109 - RNA, 32 nt, Human
cucaucccuguaaucccagcacuuaaggagua

SEQ ID NO: 129110 - RNA, 32 nt, Human
cucaucccuguaaucccagugcuuugggaggc

SEQ ID NO: 129111 - RNA, 32 nt, Human
cucaucccuguaauuccagcacuuuggaaggc

SEQ ID NO: 129112 - RNA, 32 nt, Human
cucaucccuugccaggagcucagggcugagcu

SEQ ID NO: 129113 - RNA, 32 nt, Human
cucaucccuuuucaaagaauuguggguggaag

SEQ ID NO: 129114 - RNA, 32 nt, Human
cucauccgccccuccugcuccaucacugcuga

SEQ ID NO: 129115 - RNA, 32 nt, Human
cucauccgccuguggcuggaguaaaauauacg

SEQ ID NO: 129116 - RNA, 32 nt, Human
cucauccggcuggaggaggagccgcagaggag

SEQ ID NO: 129117 - RNA, 32 nt, Human
cucauccuacagccucagcucgggcccagccu

SEQ ID NO: 129118 - RNA, 32 nt, Human
cucauccuauuuucuccucuccaagucucaga

SEQ ID NO: 129119 - RNA, 32 nt, Human
cucauccucacacccagcuauaccacacccca

SEQ ID NO: 129120 - RNA, 32 nt, Human
cucauccucauacccacccccacccaagggcc

SEQ ID NO: 129121 - RNA, 32 nt, Human
cucauccuccacccacuucaaucaccaguguu

SEQ ID NO: 129122 - RNA, 32 nt, Human
cucauccuccaccccucugccugcuucuccgc

SEQ ID NO: 129123 - RNA, 32 nt, Human
cucauccucccaaagugcugggauuauaggcc

SEQ ID NO: 129124 - RNA, 32 nt, Human
cucauccucggucucuggaaagucaggcugag

SEQ ID NO: 129125 - RNA, 32 nt, Human
cucauccucuucgucuuccucaucuuccuccu

SEQ ID NO: 129126 - RNA, 32 nt, Human
cucauccucuugguuuccccaaagaccgggag

SEQ ID NO: 129127 - RNA, 32 nt, Human
cucauccugcagcuggacagacgugaucuuca

SEQ ID NO: 129128 - RNA, 32 nt, Human
cucauccuggcggacugugcagucccacccug

SEQ ID NO: 129129 - RNA, 32 nt, Human
cucauccuggggaggauacguaggcacacaga

SEQ ID NO: 129130 - RNA, 32 nt, Human
cucauccuguucucucacuacuacauuucugu

SEQ ID NO: 129131 - RNA, 32 nt, Human
cucauccuuagccugcacuccaaccuggcaau

SEQ ID NO: 129132 - RNA, 20 nt, Human
cucauccuuauauccuggca

SEQ ID NO: 129133 - RNA, 32 nt, Human
cucauccuucaaggagcauauuuugcucuuag

SEQ ID NO: 129134 - RNA, 32 nt, Human
cucaucgauuuucuuuaguagauuaccggugu

SEQ ID NO: 129135 - RNA, 32 nt, Human
cucaucgcuaacaccaccaccuccaucggcac

SEQ ID NO: 129136 - RNA, 32 nt, Human
cucaucuaaggguucuuguccuugucuauggg

SEQ ID NO: 129137 - RNA, 32 nt, Human
cucaucuacuucgggccagcuuucugccucug

SEQ ID NO: 129138 - RNA, 32 nt, Human
cucaucuauaugcgccgguccccagcucccug

SEQ ID NO: 129139 - RNA, 32 nt, Human
cucaucucacugcaaccuccaccucccagguu

SEQ ID NO: 129140 - RNA, 32 nt, Human
cucaucucauuucuauuaaacgccuuugccag

SEQ ID NO: 129141 - RNA, 32 nt, Human
cucaucuccaaagaaaaguucaucggauuuuu

SEQ ID NO: 129142 - RNA, 32 nt, Human
cucaucuccagccucaguaguuggggguagaa

SEQ ID NO: 129143 - RNA, 32 nt, Human
cucaucucccuuuauucguuuguacucauacu

SEQ ID NO: 129144 - RNA, 32 nt, Human
cucaucuccuguggcccaacauggcccuuccu

SEQ ID NO: 129145 - RNA, 32 nt, Human
cucaucuccuugccccuucacaagagacugcc

SEQ ID NO: 129146 - RNA, 32 nt, Human
cucaucucucccacccugucuccugccucugu

SEQ ID NO: 129147 - RNA, 32 nt, Human
cucaucucuccccacaccaugaugguuuaagg

SEQ ID NO: 129148 - RNA, 32 nt, Human
cucaucucucuucuccaggacuccugcacuga

SEQ ID NO: 129149 - RNA, 32 nt, Human
cucaucucugucccucccuccuuuucuucucg

SEQ ID NO: 129150 - RNA, 32 nt, Human
cucaucugaacugaucccaggugaacgguuua

SEQ ID NO: 129151 - RNA, 32 nt, Human
cucaucugagacaagucccuucuggcuaugag

SEQ ID NO: 129152 - RNA, 32 nt, Human
cucaucugagacugaaauguggggauccagga

SEQ ID NO: 129153 - RNA, 32 nt, Human
cucaucugagucugugauguucuacuuuguug

SEQ ID NO: 129154 - RNA, 32 nt, Human
cucaucugcaaagcauggagaguggcaucuuc

SEQ ID NO: 129155 - RNA, 32 nt, Human
cucaucugcacaggaagcaggucuaaguguaa

SEQ ID NO: 129156 - RNA, 32 nt, Human
cucaucugcauggcuguagccaucucucuguu

SEQ ID NO: 129157 - RNA, 20 nt, Human
cucaucugccgccgccgccg

SEQ ID NO: 129158 - RNA, 32 nt, Human
cucaucugcucacugcccgcauucuccuggca

SEQ ID NO: 129159 - RNA, 32 nt, Human
cucaucugguauaacugguucugauggcuggg

SEQ ID NO: 129160 - RNA, 32 nt, Human
cucaucuguaaagugagugaauaaaaggaccu

SEQ ID NO: 129161 - RNA, 32 nt, Human
cucaucugugugagucacugucuuccaugugg

SEQ ID NO: 129162 - RNA, 32 nt, Human
cucaucuguuugggagaugauuuuagagcacu

SEQ ID NO: 129163 - RNA, 15 nt, Human
cucaucuucgugucc

SEQ ID NO: 129164 - RNA, 21 nt, Human
cucaucuucuaacgagccaag

SEQ ID NO: 129165 - RNA, 32 nt, Human
cucaucuugauauuucaaaagacuggaauuug

SEQ ID NO: 129166 - RNA, 32 nt, Human
cucaucuugcuacugagugugggguucaggga

SEQ ID NO: 129167 - RNA, 32 nt, Human
cucaucuugcuguuaucucuagcucuuucccu

SEQ ID NO: 129168 - RNA, 32 nt, Human
cucaucuugcuucuuugacauucuuuuccuuu

SEQ ID NO: 129169 - RNA, 32 nt, Human
cucaucuuggagcugcuccaccuuagagggcc

SEQ ID NO: 129170 - RNA, 32 nt, Human
cucaucuugucccuccccauucuugucuuacc

SEQ ID NO: 129171 - RNA, 32 nt, Human
cucaucuuuccauuauucuuuccucuuuuuca

SEQ ID NO: 129172 - RNA, 21 nt, Human
cucaucuuuccuuucuuggua

SEQ ID NO: 129173 - RNA, 32 nt, Human
cucaucuuucuucaaguggcuuuugcucaucu

SEQ ID NO: 129174 - RNA, 32 nt, Human
cucaucuuugggguaaagaguuaaguguccaa

SEQ ID NO: 129175 - RNA, 32 nt, Human
cucaucuuuuuggaauccugaccuuagguucg

SEQ ID NO: 129176 - RNA, 32 nt, Human
cucaugaacccaugaucucuccccuuacccuc

SEQ ID NO: 129177 - RNA, 20 nt, Human
cucaugaacuagaccuuuau

SEQ ID NO: 129178 - RNA, 32 nt, Human
cucaugaaggaagccauugcacugugaacacu

SEQ ID NO: 129179 - RNA, 32 nt, Human
cucaugaaggaucacagaguucagggggaaaa

SEQ ID NO: 129180 - RNA, 32 nt, Human
cucaugaaggucagagguggacuauuuguaca

SEQ ID NO: 129181 - RNA, 24 nt, Human
cucaugaauagcugggauuacagg

SEQ ID NO: 129182 - RNA, 32 nt, Human
cucaugaauagcugggauuacaggugcccacc

SEQ ID NO: 129183 - RNA, 32 nt, Human
cucaugacauugucuuuaucauccuuuccccu

SEQ ID NO: 129184 - RNA, 32 nt, Human
cucaugacccuccuguccagcagguagugggu

SEQ ID NO: 129185 - RNA, 32 nt, Human
cucaugacucaaaguccacugcagccuaggag

SEQ ID NO: 129186 - RNA, 32 nt, Human
cucaugacuccuacuuuucauccuagucuagc

SEQ ID NO: 129187 - RNA, 32 nt, Human
cucaugacugggucuaugaauagagguggaca

SEQ ID NO: 129188 - RNA, 32 nt, Human
cucaugacuguaaucccaacacuuuggaggag

SEQ ID NO: 129189 - RNA, 24 nt, Human
cucaugacuguaaucccagcacuu

SEQ ID NO: 129190 - RNA, 32 nt, Human
cucaugacuguaaucccagcacuuugggaggc

SEQ ID NO: 129191 - RNA, 32 nt, Human
cucaugacuguaaucccaguacuuugggaagc

SEQ ID NO: 129192 - RNA, 32 nt, Human
cucaugacuguaauccuaguacuuuggaaggc

SEQ ID NO: 129193 - RNA, 32 nt, Human
cucaugacuuuugccccucccuucagagccug

SEQ ID NO: 129194 - RNA, 32 nt, Human
cucaugagcucugcugcggcagcuucagcugg

SEQ ID NO: 129195 - RNA, 32 nt, Human
cucaugagcuggaaucgcugcacuuuacacac

SEQ ID NO: 129196 - RNA, 32 nt, Human
cucaugaggcuguggccaaccccugccccuug

SEQ ID NO: 129197 - RNA, 32 nt, Human
cucaugaguagcugggacuacaggcaccacug

SEQ ID NO: 129198 - RNA, 32 nt, Human
cucaugaguagcugggauuacagguauguacc

SEQ ID NO: 129199 - RNA, 32 nt, Human
cucaugauaaggcuucaucacuggauuucugu

SEQ ID NO: 129200 - RNA, 32 nt, Human
cucaugaugaagaggaggaagcucuaaacauu

SEQ ID NO: 129201 - RNA, 32 nt, Human
cucaugaugguuuggagauacugucuguggau

SEQ ID NO: 129202 - RNA, 32 nt, Human
cucaugauguucuuucuggagguucaacacua

SEQ ID NO: 129203 - RNA, 32 nt, Human
cucaugcaccuuggccuguugcuccuaggggu

SEQ ID NO: 129204 - RNA, 21 nt, Human
cucaugcacguaaucccaaca

SEQ ID NO: 129205 - RNA, 32 nt, Human
cucaugcaggguaucagcauugcugaguggcc

SEQ ID NO: 129206 - RNA, 22 nt, Human
cucaugcaguccagugaggggg

SEQ ID NO: 129207 - RNA, 31 nt, Human
cucaugcaguuucauuuuacccaagaugggg

SEQ ID NO: 129208 - RNA, 32 nt, Human
cucaugcaucaccacaccucaugccuuuuggg

SEQ ID NO: 129209 - RNA, 32 nt, Human
cucaugcaucuccuuuccugagcaccaguaau

SEQ ID NO: 129210 - RNA, 32 nt, Human
cucaugcauguaaucccagcacuuugggaggc

SEQ ID NO: 129211 - RNA, 32 nt, Human
cucaugcaugugggcucauucucuccaagcug

SEQ ID NO: 129212 - RNA, 32 nt, Human
cucaugcauuuguaucuuuuccaucuuccuga

SEQ ID NO: 129213 - RNA, 32 nt, Human
cucaugccaaccccacacaggucccggccuuu

SEQ ID NO: 129214 - RNA, 32 nt, Human
cucaugccacaggaucccagcacuuugggagg

SEQ ID NO: 129215 - RNA, 22 nt, Human
cucaugccacugccucucccca

SEQ ID NO: 129216 - RNA, 32 nt, Human
cucaugccagcccuacagaagugccuuuuacg

SEQ ID NO: 129217 - RNA, 32 nt, Human
cucaugccaggucuaccccagugccuuggaug

SEQ ID NO: 129218 - RNA, 32 nt, Human
cucaugccaguuaucccagcacuuugggaggc

SEQ ID NO: 129219 - RNA, 22 nt, Human
cucaugccaugucucucuccca

SEQ ID NO: 129220 - RNA, 17 nt, Human
cucaugccauuccagcu

SEQ ID NO: 129221 - RNA, 32 nt, Human
cucaugcccagaacucacaagcagguuuugga

SEQ ID NO: 129222 - RNA, 24 nt, Human
cucaugcccauaaucccagcacuu

SEQ ID NO: 129223 - RNA, 32 nt, Human
cucaugcccauaaucccagcacuuugggagau

SEQ ID NO: 129224 - RNA, 32 nt, Human
cucaugcccauagcucaugcucccugccgaga

SEQ ID NO: 129225 - RNA, 32 nt, Human
cucaugcccguaaucccagcacuuugggagac

SEQ ID NO: 129226 - RNA, 32 nt, Human
cucaugcccguaaucccagcacuuugguaggc

SEQ ID NO: 129227 - RNA, 32 nt, Human
cucaugcccguaaucucagcacuuugggaggc

SEQ ID NO: 129228 - RNA, 32 nt, Human
cucaugcccguaauuucugcacuuugggagac

SEQ ID NO: 129229 - RNA, 32 nt, Human
cucaugcccuggauggaugaucaaagaccaag

SEQ ID NO: 129230 - RNA, 32 nt, Human
cucaugccgguaaucucagcacuuugggaggc

SEQ ID NO: 129231 - RNA, 32 nt, Human
cucaugccguucuggaaaaugcucuugcugua

SEQ ID NO: 129232 - RNA, 32 nt, Human
cucaugccuauaaaauuccagcacuuugggag

SEQ ID NO: 129233 - RNA, 18 nt, Human
cucaugccuauaauccca

SEQ ID NO: 129234 - RNA, 22 nt, Human
cucaugccuauaaucccaacac

SEQ ID NO: 129235 - RNA, 24 nt, Human
cucaugccuauaaucccaacacuu

SEQ ID NO: 129236 - RNA, 32 nt, Human
cucaugccuauaaucccaacacuuuggaaggc

SEQ ID NO: 129237 - RNA, 32 nt, Human
cucaugccuauaaucccagcacuuuaggagcc

SEQ ID NO: 129238 - RNA, 32 nt, Human
cucaugccuauaaucccagcacuuuaggaggc

SEQ ID NO: 129239 - RNA, 32 nt, Human
cucaugccuauaaucccagcacuuuggaaggc

SEQ ID NO: 129240 - RNA, 32 nt, Human
cucaugccuauaaucccagcacuuuggcaggc

SEQ ID NO: 129241 - RNA, 32 nt, Human
cucaugccuauaaucccagcacuuugggaagc

SEQ ID NO: 129242 - RNA, 32 nt, Human
cucaugccuauaaucccagcacuuugggaagu

SEQ ID NO: 129243 - RNA, 32 nt, Human
cucaugccuauaaucccagcacuuugggaggc

SEQ ID NO: 129244 - RNA, 32 nt, Human
cucaugccuauaaucccagcacuuuuggaggc

SEQ ID NO: 129245 - RNA, 32 nt, Human
cucaugccuauaaucccggcacuuugggaggc

SEQ ID NO: 129246 - RNA, 32 nt, Human
cucaugccuauaaucccggcacuuugggaguc

SEQ ID NO: 129247 - RNA, 32 nt, Human
cucaugccuauaauccuaacacuuuaggaggc

SEQ ID NO: 129248 - RNA, 32 nt, Human
cucaugccuauaauccuagcacuuugagaggc

SEQ ID NO: 129249 - RNA, 32 nt, Human
cucaugccuauaauccuagcacuuugggaggc

SEQ ID NO: 129250 - RNA, 32 nt, Human
cucaugccuauaauccuagcuacuugggaggc

SEQ ID NO: 129251 - RNA, 32 nt, Human
cucaugccuauaaucucagcacuuuugggagg

SEQ ID NO: 129252 - RNA, 32 nt, Human
cucaugccuauaaucuuagcacuuugggaggc

SEQ ID NO: 129253 - RNA, 32 nt, Human
cucaugccuauaauuccagcacuuuggagggc

SEQ ID NO: 129254 - RNA, 32 nt, Human
cucaugccuauaauuccagcacuuugggaggc

SEQ ID NO: 129255 - RNA, 18 nt, Human
cucaugccuauaguccca

SEQ ID NO: 129256 - RNA, 32 nt, Human
cucaugccuauagucccagcacuuugggaggc

SEQ ID NO: 129257 - RNA, 32 nt, Human
cucaugccuauuaucccagcacuuugggaggc

SEQ ID NO: 129258 - RNA, 32 nt, Human
cucaugccucagccucccaaauagcugggacu

SEQ ID NO: 129259 - RNA, 32 nt, Human
cucaugccucuaaucccagcacuuuggaagac

SEQ ID NO: 129260 - RNA, 32 nt, Human
cucaugccucuaaucccagcacuuugggaggc

SEQ ID NO: 129261 - RNA, 32 nt, Human
cucaugccugaaauccuagcacuuugggaaga

SEQ ID NO: 129262 - RNA, 32 nt, Human
cucaugccugcaaucccagcacuuugggaggc

SEQ ID NO: 129263 - RNA, 32 nt, Human
cucaugccugcaauccuagcacuuugggaggc

SEQ ID NO: 129264 - RNA, 32 nt, Human
cucaugccugcaauuccagcacuuugggaggc

SEQ ID NO: 129265 - RNA, 32 nt, Human
cucaugccuggaaucccagcacuuugggaggu

SEQ ID NO: 129266 - RNA, 32 nt, Human
cucaugccuggaccccugagagcuucugaucc

SEQ ID NO: 129267 - RNA, 17 nt, Human
cucaugccugggcccag

SEQ ID NO: 129268 - RNA, 32 nt, Human
cucaugccuguaaacccagcacuuugggaggc

SEQ ID NO: 129269 - RNA, 32 nt, Human
cucaugccuguaaaucccagcacuuugguagc

SEQ ID NO: 129270 - RNA, 32 nt, Human
cucaugccuguaaccccagcacuuugggaggc

SEQ ID NO: 129271 - RNA, 32 nt, Human
cucaugccuguaaccucagcacuuugggaggc

SEQ ID NO: 129272 - RNA, 24 nt, Human
cucaugccuguaagcccaacacuu

SEQ ID NO: 129273 - RNA, 32 nt, Human
cucaugccuguaagcccaacacuuugggaggc

SEQ ID NO: 129274 - RNA, 32 nt, Human
cucaugccuguaagcccagcacuuugggaggc

SEQ ID NO: 129275 - RNA, 32 nt, Human
cucaugccuguaaucaaucccagcacuuuggg

SEQ ID NO: 129276 - RNA, 32 nt, Human
cucaugccuguaaucauagcauuaugggaggc

SEQ ID NO: 129277 - RNA, 32 nt, Human
cucaugccuguaauccagcacuuugggaggcc

SEQ ID NO: 129278 - RNA, 32 nt, Human
cucaugccuguaauccaguacuuuaggaggcc

SEQ ID NO: 129279 - RNA, 18 nt, Human
cucaugccuguaauccca

SEQ ID NO: 129280 - RNA, 24 nt, Human
cucaugccuguaaucccaaaacuu

SEQ ID NO: 129281 - RNA, 32 nt, Human
cucaugccuguaaucccaaaacuuugggaguc

SEQ ID NO: 129282 - RNA, 23 nt, Human
cucaugccuguaaucccaacacu

SEQ ID NO: 129283 - RNA, 24 nt, Human
cucaugccuguaaucccaacacuu

SEQ ID NO: 129284 - RNA, 32 nt, Human
cucaugccuguaaucccaacacuuugggagac

SEQ ID NO: 129285 - RNA, 32 nt, Human
cucaugccuguaaucccaacacuuugggagga

SEQ ID NO: 129286 - RNA, 32 nt, Human
cucaugccuguaaucccaacacuuugggaggc

SEQ ID NO: 129287 - RNA, 32 nt, Human
cucaugccuguaaucccaacacuuugggaguc

SEQ ID NO: 129288 - RNA, 32 nt, Human
cucaugccuguaaucccaacacuuuugggagg

SEQ ID NO: 129289 - RNA, 23 nt, Human
cucaugccuguaaucccaacauu

SEQ ID NO: 129290 - RNA, 32 nt, Human
cucaugccuguaaucccaacucuuggggaggc

SEQ ID NO: 129291 - RNA, 24 nt, Human
cucaugccuguaaucccaauacuu

SEQ ID NO: 129292 - RNA, 32 nt, Human
cucaugccuguaaucccaauacuuugggaggc

SEQ ID NO: 129293 - RNA, 32 nt, Human
cucaugccuguaaucccaccacuuugggaggc

SEQ ID NO: 129294 - RNA, 32 nt, Human
cucaugccuguaaucccaccacuuuggguggc

SEQ ID NO: 129295 - RNA, 32 nt, Human
cucaugccuguaaucccagaacuuugggaggc

SEQ ID NO: 129296 - RNA, 32 nt, Human
cucaugccuguaaucccagaauuuugggaggc

SEQ ID NO: 129297 - RNA, 32 nt, Human
cucaugccuguaaucccagcaauuuaggaggc

SEQ ID NO: 129298 - RNA, 32 nt, Human
cucaugccuguaaucccagcacauugggaaga

SEQ ID NO: 129299 - RNA, 32 nt, Human
cucaugccuguaaucccagcacccugggaggc

SEQ ID NO: 129300 - RNA, 32 nt, Human
cucaugccuguaaucccagcaccuugggaggc

SEQ ID NO: 129301 - RNA, 32 nt, Human
cucaugccuguaaucccagcacguugggaggc

SEQ ID NO: 129302 - RNA, 32 nt, Human
cucaugccuguaaucccagcacuaugggaggc

SEQ ID NO: 129303 - RNA, 32 nt, Human
cucaugccuguaaucccagcacucuggaaggc

SEQ ID NO: 129304 - RNA, 32 nt, Human
cucaugccuguaaucccagcacucugggaggc

SEQ ID NO: 129305 - RNA, 32 nt, Human
cucaugccuguaaucccagcacuguaggcggc

SEQ ID NO: 129306 - RNA, 32 nt, Human
cucaugccuguaaucccagcacugugggaagc

SEQ ID NO: 129307 - RNA, 32 nt, Human
cucaugccuguaaucccagcacugugggagac

SEQ ID NO: 129308 - RNA, 32 nt, Human
cucaugccuguaaucccagcacugugggaggc

SEQ ID NO: 129309 - RNA, 32 nt, Human
cucaugccuguaaucccagcacuucaggaggc

SEQ ID NO: 129310 - RNA, 32 nt, Human
cucaugccuguaaucccagcacuucgggaggc

SEQ ID NO: 129311 - RNA, 32 nt, Human
cucaugccuguaaucccagcacuuggagaggc

SEQ ID NO: 129312 - RNA, 32 nt, Human
cucaugccuguaaucccagcacuugggaggcc

SEQ ID NO: 129313 - RNA, 32 nt, Human
cucaugccuguaaucccagcacuuggggaggc

SEQ ID NO: 129314 - RNA, 32 nt, Human
cucaugccuguaaucccagcacuuucaaaggc

SEQ ID NO: 129315 - RNA, 32 nt, Human
cucaugccuguaaucccagcacuuucagaggc

SEQ ID NO: 129316 - RNA, 32 nt, Human
cucaugccuguaaucccagcacuuucggaggc

SEQ ID NO: 129317 - RNA, 32 nt, Human
cucaugccuguaaucccagcacuuugagagac

SEQ ID NO: 129318 - RNA, 32 nt, Human
cucaugccuguaaucccagcacuuugagaggc

SEQ ID NO: 129319 - RNA, 32 nt, Human
cucaugccuguaaucccagcacuuugauaggc

SEQ ID NO: 129320 - RNA, 32 nt, Human
cucaugccuguaaucccagcacuuugcgaggc

SEQ ID NO: 129321 - RNA, 32 nt, Human
cucaugccuguaaucccagcacuuuggaaggc

SEQ ID NO: 129322 - RNA, 32 nt, Human
cucaugccuguaaucccagcacuuuggcagga

SEQ ID NO: 129323 - RNA, 32 nt, Human
cucaugccuguaaucccagcacuuugggaagc

SEQ ID NO: 129324 - RNA, 32 nt, Human
cucaugccuguaaucccagcacuuugggagac

SEQ ID NO: 129325 - RNA, 32 nt, Human
cucaugccuguaaucccagcacuuugggagga

SEQ ID NO: 129326 - RNA, 32 nt, Human
cucaugccuguaaucccagcacuuugggaggc

SEQ ID NO: 129327 - RNA, 32 nt, Human
cucaugccuguaaucccagcacuuugggaggu

SEQ ID NO: 129328 - RNA, 32 nt, Human
cucaugccuguaaucccagcacuuugggaguc

SEQ ID NO: 129329 - RNA, 32 nt, Human
cucaugccuguaaucccagcacuuugggaugc

SEQ ID NO: 129330 - RNA, 32 nt, Human
cucaugccuguaaucccagcacuuugggauuc

SEQ ID NO: 129331 - RNA, 32 nt, Human
cucaugccuguaaucccagcacuuuggggagc

SEQ ID NO: 129332 - RNA, 32 nt, Human
cucaugccuguaaucccagcacuuuggggagg

SEQ ID NO: 129333 - RNA, 32 nt, Human
cucaugccuguaaucccagcacuuugggggcc

SEQ ID NO: 129334 - RNA, 32 nt, Human
cucaugccuguaaucccagcacuuugguaggc

SEQ ID NO: 129335 - RNA, 32 nt, Human
cucaugccuguaaucccagcacuuuucggagg

SEQ ID NO: 129336 - RNA, 32 nt, Human
cucaugccuguaaucccagcacuuuugaggcu

SEQ ID NO: 129337 - RNA, 32 nt, Human
cucaugccuguaaucccagcacuuuuggaggc

SEQ ID NO: 129338 - RNA, 32 nt, Human
cucaugccuguaaucccagcauuuuggaaggc

SEQ ID NO: 129339 - RNA, 32 nt, Human
cucaugccuguaaucccagcauuuugggagac

SEQ ID NO: 129340 - RNA, 32 nt, Human
cucaugccuguaaucccagcauuuugggaggc

SEQ ID NO: 129341 - RNA, 32 nt, Human
cucaugccuguaaucccagcauuuugguaggc

SEQ ID NO: 129342 - RNA, 32 nt, Human
cucaugccuguaaucccagcccuuugggaggc

SEQ ID NO: 129343 - RNA, 32 nt, Human
cucaugccuguaaucccagcgcuuugggaggc

SEQ ID NO: 129344 - RNA, 32 nt, Human
cucaugccuguaaucccaggacuuugggaggc

SEQ ID NO: 129345 - RNA, 32 nt, Human
cucaugccuguaaucccaggacuuugguaggc

SEQ ID NO: 129346 - RNA, 32 nt, Human
cucaugccuguaaucccaguacucugggaagc

SEQ ID NO: 129347 - RNA, 32 nt, Human
cucaugccuguaaucccaguacuuugggaggc

SEQ ID NO: 129348 - RNA, 32 nt, Human
cucaugccuguaaucccagugcuuugggaggc

SEQ ID NO: 129349 - RNA, 32 nt, Human
cucaugccuguaaucccgacacuuugggaggc

SEQ ID NO: 129350 - RNA, 32 nt, Human
cucaugccuguaaucccggcacuuugggaggc

SEQ ID NO: 129351 - RNA, 32 nt, Human
cucaugccuguaaucccugcaauuugggagac

SEQ ID NO: 129352 - RNA, 32 nt, Human
cucaugccuguaaucccugcacuuugggaggc

SEQ ID NO: 129353 - RNA, 32 nt, Human
cucaugccuguaaucccugcacuuugggaugc

SEQ ID NO: 129354 - RNA, 32 nt, Human
cucaugccuguaauccgagcacuucgggaagc

SEQ ID NO: 129355 - RNA, 32 nt, Human
cucaugccuguaauccgagcacuuugggaggc

SEQ ID NO: 129356 - RNA, 18 nt, Human
cucaugccuguaauccua

SEQ ID NO: 129357 - RNA, 32 nt, Human
cucaugccuguaauccuaacacuuugggaggc

SEQ ID NO: 129358 - RNA, 32 nt, Human
cucaugccuguaauccuagcaccuugggaggc

SEQ ID NO: 129359 - RNA, 32 nt, Human
cucaugccuguaauccuagcacuuugagaggc

SEQ ID NO: 129360 - RNA, 32 nt, Human
cucaugccuguaauccuagcacuuuggaaggc

SEQ ID NO: 129361 - RNA, 32 nt, Human
cucaugccuguaauccuagcacuuuggaaggu

SEQ ID NO: 129362 - RNA, 32 nt, Human
cucaugccuguaauccuagcacuuugggaagc

SEQ ID NO: 129363 - RNA, 32 nt, Human
cucaugccuguaauccuagcacuuugggaggc

SEQ ID NO: 129364 - RNA, 32 nt, Human
cucaugccuguaauccuagcacuuugggggac

SEQ ID NO: 129365 - RNA, 32 nt, Human
cucaugccuguaauccuagcacuuuggguggc

SEQ ID NO: 129366 - RNA, 32 nt, Human
cucaugccuguaauccuagcagcuugggaggc

SEQ ID NO: 129367 - RNA, 32 nt, Human
cucaugccuguaauccuagcagguugggaggc

SEQ ID NO: 129368 - RNA, 32 nt, Human
cucaugccuguaauccuagcauuuugggagga

SEQ ID NO: 129369 - RNA, 32 nt, Human
cucaugccuguaauccuaguacuuugggaggc

SEQ ID NO: 129370 - RNA, 32 nt, Human
cucaugccuguaauccuggcacuuugggaggc

SEQ ID NO: 129371 - RNA, 32 nt, Human
cucaugccuguaaucgcagcacuuugggaggc

SEQ ID NO: 129372 - RNA, 32 nt, Human
cucaugccuguaaucguagcacuuugagaggc

SEQ ID NO: 129373 - RNA, 32 nt, Human
cucaugccuguaaucucaacacuuugggaagc

SEQ ID NO: 129374 - RNA, 32 nt, Human
cucaugccuguaaucucagaacuuugggaggc

SEQ ID NO: 129375 - RNA, 32 nt, Human
cucaugccuguaaucucagcaauuugggaggc

SEQ ID NO: 129376 - RNA, 32 nt, Human
cucaugccuguaaucucagcacuuugggagac

SEQ ID NO: 129377 - RNA, 32 nt, Human
cucaugccuguaaucucagcacuuugggaggc

SEQ ID NO: 129378 - RNA, 32 nt, Human
cucaugccuguaaucucagcuacuuggcuggc

SEQ ID NO: 129379 - RNA, 32 nt, Human
cucaugccuguaaucucaguacauugggaggc

SEQ ID NO: 129380 - RNA, 32 nt, Human
cucaugccuguaaucucaguacuuugggaggu

SEQ ID NO: 129381 - RNA, 32 nt, Human
cucaugccuguaaucuccagcacuuugggagg

SEQ ID NO: 129382 - RNA, 32 nt, Human
cucaugccuguaaucugagcacuuugggagac

SEQ ID NO: 129383 - RNA, 32 nt, Human
cucaugccuguaaucuuaucacuuugggaggc

SEQ ID NO: 129384 - RNA, 18 nt, Human
cucaugccuguaauucca

SEQ ID NO: 129385 - RNA, 32 nt, Human
cucaugccuguaauuccagcacuuuaggaggc

SEQ ID NO: 129386 - RNA, 32 nt, Human
cucaugccuguaauuccagcacuuugggagga

SEQ ID NO: 129387 - RNA, 32 nt, Human
cucaugccuguaauuccagcacuuugggaggc

SEQ ID NO: 129388 - RNA, 32 nt, Human
cucaugccuguaauuccggcacuuugggaggc

SEQ ID NO: 129389 - RNA, 32 nt, Human
cucaugccuguaguaaucccagcacuuuugga

SEQ ID NO: 129390 - RNA, 18 nt, Human
cucaugccuguaguccca

SEQ ID NO: 129391 - RNA, 32 nt, Human
cucaugccuguagucccagcacuuugggagac

SEQ ID NO: 129392 - RNA, 32 nt, Human
cucaugccuguagucccagcacuuugggaggc

SEQ ID NO: 129393 - RNA, 32 nt, Human
cucaugccuguaguccuagcacuuugggaggc

SEQ ID NO: 129394 - RNA, 32 nt, Human
cucaugccuguauaaucccagcacuuugggag

SEQ ID NO: 129395 - RNA, 32 nt, Human
cucaugccuguaucccagcacuuugggaggcc

SEQ ID NO: 129396 - RNA, 32 nt, Human
cucaugccuguaucccagcacuuugggaggcu

SEQ ID NO: 129397 - RNA, 32 nt, Human
cucaugccuguaucccagcccuuugggaggcc

SEQ ID NO: 129398 - RNA, 32 nt, Human
cucaugccugucaucccagcacuuugggaagc

SEQ ID NO: 129399 - RNA, 32 nt, Human
cucaugccugucaucccagcacuuugggaggc

SEQ ID NO: 129400 - RNA, 32 nt, Human
cucaugccugugaucccaacacuuugggaggc

SEQ ID NO: 129401 - RNA, 32 nt, Human
cucaugccugugaucccagcacuuugggaggc

SEQ ID NO: 129402 - RNA, 32 nt, Human
cucaugccugugaucccagcacuuuggguggc

SEQ ID NO: 129403 - RNA, 32 nt, Human
cucaugccugugauccuagcacuuugcgaggc

SEQ ID NO: 129404 - RNA, 32 nt, Human
cucaugccugugauccuagcacuuugggaguu

SEQ ID NO: 129405 - RNA, 32 nt, Human
cucaugccugugaucgcagcacuuugggaggc

SEQ ID NO: 129406 - RNA, 32 nt, Human
cucaugccuguggucccagcacuuugggaggc

SEQ ID NO: 129407 - RNA, 32 nt, Human
cucaugccuuaaucccagcacuuugggagguc

SEQ ID NO: 129408 - RNA, 32 nt, Human
cucaugccuuaaucccagcacuuuuggaggcc

SEQ ID NO: 129409 - RNA, 32 nt, Human
cucaugccuuuaaucccaacacuuuggaaggc

SEQ ID NO: 129410 - RNA, 32 nt, Human
cucaugccuuuaaucccagcacuuugggaggc

SEQ ID NO: 129411 - RNA, 32 nt, Human
cucaugcgacugcacuccagccugggugacug

SEQ ID NO: 129412 - RNA, 32 nt, Human
cucaugcgagccaagauggacaauggggaggc

SEQ ID NO: 129413 - RNA, 32 nt, Human
cucaugcguguaaucccagcacuuugggaggc

SEQ ID NO: 129414 - RNA, 32 nt, Human
cucaugcuaccuuuugugggccuguccggccc

SEQ ID NO: 129415 - RNA, 32 nt, Human
cucaugcucagaccucucccaccccaaacccu

SEQ ID NO: 129416 - RNA, 32 nt, Human
cucaugcuccacccgcuucggccucccaaagu

SEQ ID NO: 129417 - RNA, 32 nt, Human
cucaugcucccaggagcccccagaggccagga

SEQ ID NO: 129418 - RNA, 28 nt, Human
cucaugcuccgcaccgaugcaggagaag

SEQ ID NO: 129419 - RNA, 31 nt, Human
cucaugcugccacuugggccugguuuuagau

SEQ ID NO: 129420 - RNA, 32 nt, Human
cucaugcugccuccucugcccauggguccugg

SEQ ID NO: 129421 - RNA, 32 nt, Human
cucaugcuggucucaaacuccugggcucaagc

SEQ ID NO: 129422 - RNA, 22 nt, Human
cucaugcuguuccaccuccccu

SEQ ID NO: 129423 - RNA, 32 nt, Human
cucaugcuguugcccaggcuggagugcagugg

SEQ ID NO: 129424 - RNA, 32 nt, Human
cucaugcuguugcccaggcuggagugcagugu

SEQ ID NO: 129425 - RNA, 32 nt, Human
cucaugcuguuucucuguuugcucugaaucaa

SEQ ID NO: 129426 - RNA, 32 nt, Human
cucaugcuuccagacugauagcagcugaugcc

SEQ ID NO: 129427 - RNA, 24 nt, Human
cucaugcuuguaaucccaacacuu

SEQ ID NO: 129428 - RNA, 32 nt, Human
cucaugcuuguaaucccaacacuuugggaagc

SEQ ID NO: 129429 - RNA, 24 nt, Human
cucaugcuuguaaucccagcacuu

SEQ ID NO: 129430 - RNA, 32 nt, Human
cucaugcuuguaaucccagcacuuggggaggc

SEQ ID NO: 129431 - RNA, 32 nt, Human
cucaugcuuguaaucccagcacuuugggaagc

SEQ ID NO: 129432 - RNA, 32 nt, Human
cucaugcuuguaaucccagcacuuugggaggc

SEQ ID NO: 129433 - RNA, 32 nt, Human
cucaugcuuguaaucccagcacuuugguaggc

SEQ ID NO: 129434 - RNA, 32 nt, Human
cucaugcuuguaaucccaguacuuuaggaggc

SEQ ID NO: 129435 - RNA, 32 nt, Human
cucaugcuuguaauccuagcacuuuuugaggc

SEQ ID NO: 129436 - RNA, 32 nt, Human
cucaugcuuguaaucucaccacuuugggaggc

SEQ ID NO: 129437 - RNA, 32 nt, Human
cucaugcuuguaaucucagcacuuugggaguc

SEQ ID NO: 129438 - RNA, 32 nt, Human
cucaugcuugugaucccaacacuuugggaagc

SEQ ID NO: 129439 - RNA, 32 nt, Human
cucaugcuuucacauacauacacucacugaca

SEQ ID NO: 129440 - RNA, 32 nt, Human
cucauggaaacuccuccagagaccccaaaagc

SEQ ID NO: 129441 - RNA, 22 nt, Human
cucauggaaagacagcuggaug

SEQ ID NO: 129442 - RNA, 20 nt, Human
cucauggaagggccaccuca

SEQ ID NO: 129443 - RNA, 32 nt, Human
cucauggaauguugaucgccuaaaaaugaaca

SEQ ID NO: 129444 - RNA, 32 nt, Human
cucauggacuagaagagagggggccaagggga

SEQ ID NO: 129445 - RNA, 32 nt, Human
cucauggagagggucuguggcagcuuucugga

SEQ ID NO: 129446 - RNA, 32 nt, Human
cucauggaggaaaugcugagagaagcauucag

SEQ ID NO: 129447 - RNA, 32 nt, Human
cucauggaggagacagcagcuuccauggaagg

SEQ ID NO: 129448 - RNA, 32 nt, Human
cucauggcacccaggcaguccacccacaguuc

SEQ ID NO: 129449 - RNA, 22 nt, Human
cucauggcaccucccuagaagg

SEQ ID NO: 129450 - RNA, 32 nt, Human
cucauggcacuuccuucuugcucccaccccug

SEQ ID NO: 129451 - RNA, 32 nt, Human
cucauggcagcuuuaauagccauggguucuuu

SEQ ID NO: 129452 - RNA, 32 nt, Human
cucauggcaguuggcuccaucuggaccuccca

SEQ ID NO: 129453 - RNA, 32 nt, Human
cucauggcaucuccuuuguaguaaaaggagac

SEQ ID NO: 129454 - RNA, 32 nt, Human
cucauggcauuaucugcccccaugcaggccag

SEQ ID NO: 129455 - RNA, 28 nt, Human
cucauggcgggcggaggagccggggacc

SEQ ID NO: 129456 - RNA, 23 nt, Human
cucauggcugacagcccaggugg

SEQ ID NO: 129457 - RNA, 31 nt, Human
cucauggcuuacauccccaugccaggcagag

SEQ ID NO: 129458 - RNA, 32 nt, Human
cucauggcuucugcuucugaccuucuccucuu

SEQ ID NO: 129459 - RNA, 32 nt, Human
cucaugggacacaccucuuaaggccucgggug

SEQ ID NO: 129460 - RNA, 32 nt, Human
cucaugggacccuguccuccucacugggggca

SEQ ID NO: 129461 - RNA, 32 nt, Human
cucaugggauuucuugagcuaggaaagguggu

SEQ ID NO: 129462 - RNA, 32 nt, Human
cucaugggcaggauucuuccugcuccauaucu

SEQ ID NO: 129463 - RNA, 32 nt, Human
cucauggggaaaaucuugaugaugcaagaaag

SEQ ID NO: 129464 - RNA, 32 nt, Human
cucauggggugcggugcuugggagacagccag

SEQ ID NO: 129465 - RNA, 32 nt, Human
cucauggggugguggaggcagccuucagugag

SEQ ID NO: 129466 - RNA, 32 nt, Human
cucaugggguugggacacugccagcgucuuaa

SEQ ID NO: 129467 - RNA, 32 nt, Human
cucauggguucuuuaaguucccccucuuaacg

SEQ ID NO: 129468 - RNA, 32 nt, Human
cucauggguugcacugaccauacugcuuacgu

SEQ ID NO: 129469 - RNA, 32 nt, Human
cucauggucaugcaugagagagaaguggcugg

SEQ ID NO: 129470 - RNA, 32 nt, Human
cucaugguccuuggaggacccguugcagggcg

SEQ ID NO: 129471 - RNA, 32 nt, Human
cucaugguggcuuggcuuugacucuccaaaga

SEQ ID NO: 129472 - RNA, 32 nt, Human
cucaugguggucuccugggcuuggucacuguc

SEQ ID NO: 129473 - RNA, 32 nt, Human
cucaugguggucucucuuacaccagcuccugc

SEQ ID NO: 129474 - RNA, 32 nt, Human
cucaugguugagaagugguggaggauggcaug

SEQ ID NO: 129475 - RNA, 32 nt, Human
cucauguaaagacccacccagcuugguuuaaa

SEQ ID NO: 129476 - RNA, 32 nt, Human
cucauguacaugcucacacaugcagacacacc

SEQ ID NO: 129477 - RNA, 32 nt, Human
cucauguacuucaaauaaugcauguuuuauag

SEQ ID NO: 129478 - RNA, 32 nt, Human
cucaugucagacugaaaggagggccugggcca

SEQ ID NO: 129479 - RNA, 21 nt, Human
cucauguccaccugccugcca

SEQ ID NO: 129480 - RNA, 32 nt, Human
cucauguccccauaagcagagcugucacagug

SEQ ID NO: 129481 - RNA, 21 nt, Human
cucauguccuccccuccaccc

SEQ ID NO: 129482 - RNA, 18 nt, Human
cucaugucuauaauccca

SEQ ID NO: 129483 - RNA, 24 nt, Human
cucaugucuauaaucccagcacuu

SEQ ID NO: 129484 - RNA, 32 nt, Human
cucaugucuauaaucccagcacuuugggaggu

SEQ ID NO: 129485 - RNA, 32 nt, Human
cucaugucucagccuccugaauagcugggauu

SEQ ID NO: 129486 - RNA, 28 nt, Human
cucaugucuccccucaccaugucccucc

SEQ ID NO: 129487 - RNA, 32 nt, Human
cucaugucucuaaucccagcacuuugggagac

SEQ ID NO: 129488 - RNA, 32 nt, Human
cucaugucucugugguucccaagcugcaugau

SEQ ID NO: 129489 - RNA, 18 nt, Human
cucaugucuguaauccca

SEQ ID NO: 129490 - RNA, 23 nt, Human
cucaugucuguaaucccagcacu

SEQ ID NO: 129491 - RNA, 24 nt, Human
cucaugucuguaaucccagcacuu

SEQ ID NO: 129492 - RNA, 28 nt, Human
cucaugucuguaaucccagcacuuuggg

SEQ ID NO: 129493 - RNA, 32 nt, Human
cucaugucuguaaucccagcacuuugggaggc

SEQ ID NO: 129494 - RNA, 32 nt, Human
cucaugucuguaaucccagcacuuugggaggu

SEQ ID NO: 129495 - RNA, 32 nt, Human
cucaugucuguuaucccuccagugguaccugu

SEQ ID NO: 129496 - RNA, 32 nt, Human
cucaugucuuaaguucagcuggugcuaugcug

SEQ ID NO: 129497 - RNA, 32 nt, Human
cucaugugaaggaggcagggguugggacaagu

SEQ ID NO: 129498 - RNA, 32 nt, Human
cucaugugagacuucccucuggaugaccagag

SEQ ID NO: 129499 - RNA, 32 nt, Human
cucaugugaggcucgcggcacagcguucucug

SEQ ID NO: 129500 - RNA, 32 nt, Human
cucaugugauccucccaucucagccucccaca

SEQ ID NO: 129501 - RNA, 31 nt, Human
cucaugugauuucucccuuguccaaaguccc

SEQ ID NO: 129502 - RNA, 32 nt, Human
cucaugugccugaugugguggagggagacacc

SEQ ID NO: 129503 - RNA, 32 nt, Human
cucauguggacucagaaaaacacacaccaccu

SEQ ID NO: 129504 - RNA, 32 nt, Human
cucauguggaggaagccagcuugcagagagag

SEQ ID NO: 129505 - RNA, 32 nt, Human
cucaugugggagaaggucugugagcccucucc

SEQ ID NO: 129506 - RNA, 32 nt, Human
cucaugugggcaccaccccucguuuacgggcu

SEQ ID NO: 129507 - RNA, 32 nt, Human
cucaugugugcucacaauguucuggcacuauu

SEQ ID NO: 129508 - RNA, 23 nt, Human
cucauguguguaaucccagcacu

SEQ ID NO: 129509 - RNA, 32 nt, Human
cucauguguguaaucccagcacucugggaggc

SEQ ID NO: 129510 - RNA, 19 nt, Human
cucauguguuguucuaccu

SEQ ID NO: 129511 - RNA, 32 nt, Human
cucauguguuuucaccaaaaccaccccagugc

SEQ ID NO: 129512 - RNA, 32 nt, Human
cucauguucuuucuuguugaugaguucugcgg

SEQ ID NO: 129513 - RNA, 32 nt, Human
cucauguucuuuguuugcauuagugaguaaug

SEQ ID NO: 129514 - RNA, 19 nt, Human
cucauguugacuccuggca

SEQ ID NO: 129515 - RNA, 32 nt, Human
cucauguuuaauacauaggugauuuguaccuc

SEQ ID NO: 129516 - RNA, 32 nt, Human
cucauguuucucaaucacaguaucugccaacc

SEQ ID NO: 129517 - RNA, 32 nt, Human
cucauguuugaauauaacaaaauaucaauacu

SEQ ID NO: 129518 - RNA, 32 nt, Human
cucauguuuguaaaucccagcacuuugggaag

SEQ ID NO: 129519 - RNA, 32 nt, Human
cucauguuuguaaucccagcacuuugggggau

SEQ ID NO: 129520 - RNA, 32 nt, Human
cucauguuuguaauccuagcacuuugggaggc

SEQ ID NO: 129521 - RNA, 32 nt, Human
cucauguuuucuucccuccaccuccaccccuu

SEQ ID NO: 129522 - RNA, 32 nt, Human
cucauuaaagaugaaauagaccagcucucuuc

SEQ ID NO: 129523 - RNA, 32 nt, Human
cucauuaaagcagagucguggcaucucaaaaa

SEQ ID NO: 129524 - RNA, 32 nt, Human
cucauuaagaacagaggaggcugccuguuacu

SEQ ID NO: 129525 - RNA, 32 nt, Human
cucauuaagcucugucccccugacuggauuuu

SEQ ID NO: 129526 - RNA, 32 nt, Human
cucauuaauuuccagguggaggaaauggagga

SEQ ID NO: 129527 - RNA, 32 nt, Human
cucauuacccacccgaccuggcugccccucac

SEQ ID NO: 129528 - RNA, 32 nt, Human
cucauuacccauguaaaccacauguuagauaa

SEQ ID NO: 129529 - RNA, 32 nt, Human
cucauuacugugcucucgccauggcccagucu

SEQ ID NO: 129530 - RNA, 32 nt, Human
cucauuagcucccucguccugggaugcuuccc

SEQ ID NO: 129531 - RNA, 32 nt, Human
cucauuaggaagucuuuguuucccucucuaua

SEQ ID NO: 129532 - RNA, 32 nt, Human
cucauuaguaagugggagguccacuggggcaa

SEQ ID NO: 129533 - RNA, 32 nt, Human
cucauuagucaccccucauuuuccucugggga

SEQ ID NO: 129534 - RNA, 32 nt, Human
cucauuagugaugccuccucucagaccaccca

SEQ ID NO: 129535 - RNA, 32 nt, Human
cucauuauguaccucaggguauguagauccag

SEQ ID NO: 129536 - RNA, 32 nt, Human
cucauuauuuauaguugaauuuuugcacaaaa

SEQ ID NO: 129537 - RNA, 32 nt, Human
cucauucaacaaaggaaaugugggcuggggca

SEQ ID NO: 129538 - RNA, 23 nt, Human
cucauucacacaauuaucauaga

SEQ ID NO: 129539 - RNA, 31 nt, Human
cucauucacagcuaaauaauaggccauagga

SEQ ID NO: 129540 - RNA, 32 nt, Human
cucauucagucucagaccaaguuuauauguca

SEQ ID NO: 129541 - RNA, 32 nt, Human
cucauucagugugugaccucaggcaggucacc

SEQ ID NO: 129542 - RNA, 22 nt, Human
cucauucauccccuacuaugug

SEQ ID NO: 129543 - RNA, 23 nt, Human
cucauucauuacgauuuaucaga

SEQ ID NO: 129544 - RNA, 32 nt, Human
cucauuccaaggcugagggagggccuucucgc

SEQ ID NO: 129545 - RNA, 32 nt, Human
cucauuccacagacuucgccaguguacuccua

SEQ ID NO: 129546 - RNA, 32 nt, Human
cucauuccagccaucccucugccugcaaugag

SEQ ID NO: 129547 - RNA, 32 nt, Human
cucauuccaucaucaccaucucuuucucacua

SEQ ID NO: 129548 - RNA, 32 nt, Human
cucauuccauggggcucccugcugacugcauu

SEQ ID NO: 129549 - RNA, 32 nt, Human
cucauuccauuucuaucuucugaccuugccuc

SEQ ID NO: 129550 - RNA, 32 nt, Human
cucauucccagcugccucuuccuacugcuucc

SEQ ID NO: 129551 - RNA, 32 nt, Human
cucauuccccgacacccucuggcuugaaccau

SEQ ID NO: 129552 - RNA, 32 nt, Human
cucauuccccucucagcucugccugcaguuga

SEQ ID NO: 129553 - RNA, 32 nt, Human
cucauuccgguaaacccacacccuuccagcgu

SEQ ID NO: 129554 - RNA, 32 nt, Human
cucauuccuauaauccuaacacuuugggaggc

SEQ ID NO: 129555 - RNA, 32 nt, Human
cucauuccucacaauggucuucccaggccccg

SEQ ID NO: 129556 - RNA, 32 nt, Human
cucauuccuccaacuuccuccccuccuucaau

SEQ ID NO: 129557 - RNA, 32 nt, Human
cucauuccuccccuccuucgcucgcucaaucu

SEQ ID NO: 129558 - RNA, 32 nt, Human
cucauuccuguaaucccagcacuuugggaggc

SEQ ID NO: 129559 - RNA, 32 nt, Human
cucauuccuguaaucccagcucuuugggaggc

SEQ ID NO: 129560 - RNA, 32 nt, Human
cucauuccuguucuuucuuacacaagagcugg

SEQ ID NO: 129561 - RNA, 32 nt, Human
cucauuccuuaaaugaugcuuccaaacaucuc

SEQ ID NO: 129562 - RNA, 32 nt, Human
cucauuccuuagacguccuccccuuuugaccc

SEQ ID NO: 129563 - RNA, 32 nt, Human
cucauuccuuuccucuggcccagugauuuggu

SEQ ID NO: 129564 - RNA, 32 nt, Human
cucauuccuuucucucuccuucuggccucuca

SEQ ID NO: 129565 - RNA, 21 nt, Human
cucauucgcuccugccugcca

SEQ ID NO: 129566 - RNA, 32 nt, Human
cucauucgggcagagggaaauacgggacccgg

SEQ ID NO: 129567 - RNA, 32 nt, Human
cucauucucacccauuuggcuaauccaggaau

SEQ ID NO: 129568 - RNA, 32 nt, Human
cucauucuccccucacugcugaagucugugac

SEQ ID NO: 129569 - RNA, 32 nt, Human
cucauucucuccccaccacucucuucucgugg

SEQ ID NO: 129570 - RNA, 32 nt, Human
cucauucugauccucagccccuccagucguua

SEQ ID NO: 129571 - RNA, 32 nt, Human
cucauucugucacccaggccggagugcagugg

SEQ ID NO: 129572 - RNA, 32 nt, Human
cucauucugucacccaggcuagagcgcagugg

SEQ ID NO: 129573 - RNA, 32 nt, Human
cucauucugucacccaggcuagaguacagugg

SEQ ID NO: 129574 - RNA, 32 nt, Human
cucauucugucacccaggcuggaguccaaugg

SEQ ID NO: 129575 - RNA, 32 nt, Human
cucauucugucacccaggcuggagugcagugg

SEQ ID NO: 129576 - RNA, 32 nt, Human
cucauucugucgcccaggcuggaguguaguga

SEQ ID NO: 129577 - RNA, 32 nt, Human
cucauucugucucuguucccugcuuuggccag

SEQ ID NO: 129578 - RNA, 32 nt, Human
cucauucuguugcccaggcuggagugcaaugg

SEQ ID NO: 129579 - RNA, 32 nt, Human
cucauucuguugcccaggcuggagugcagugg

SEQ ID NO: 129580 - RNA, 32 nt, Human
cucauucuuaguuucauuaucagcucacuaau

SEQ ID NO: 129581 - RNA, 22 nt, Human
cucauucuugauggaugaggag

SEQ ID NO: 129582 - RNA, 21 nt, Human
cucauucuuggccucgcagaa

SEQ ID NO: 129583 - RNA, 32 nt, Human
cucauucuuucucagaccucaggcugcauggu

SEQ ID NO: 129584 - RNA, 32 nt, Human
cucauucuuugccucuauccuuagcugaagac

SEQ ID NO: 129585 - RNA, 32 nt, Human
cucauucuuugucugagaaacagcccccaguc

SEQ ID NO: 129586 - RNA, 32 nt, Human
cucauucuuuugcccaggcuggagugcagugg

SEQ ID NO: 129587 - RNA, 32 nt, Human
cucauugagaacacuaaugggcgacugauggc

SEQ ID NO: 129588 - RNA, 32 nt, Human
cucauugcaaccuccgccuccuggguucaagc

SEQ ID NO: 129589 - RNA, 32 nt, Human
cucauugcaaccucugcuuccugggcucaagc

SEQ ID NO: 129590 - RNA, 32 nt, Human
cucauugcaacuuccaccuccuggguugaagc

SEQ ID NO: 129591 - RNA, 32 nt, Human
cucauugcacaucuucucuucaguuuagagaa

SEQ ID NO: 129592 - RNA, 32 nt, Human
cucauugcagaacuuuaucccuggaagccuuc

SEQ ID NO: 129593 - RNA, 32 nt, Human
cucauugcagccucaaacaccugugcucaagc

SEQ ID NO: 129594 - RNA, 32 nt, Human
cucauugcagccucaaccucccaggcucaauc

SEQ ID NO: 129595 - RNA, 32 nt, Human
cucauugcagccuccacuuccugggcucaagc

SEQ ID NO: 129596 - RNA, 32 nt, Human
cucauugcaggcaauguuggaaaagaacugca

SEQ ID NO: 129597 - RNA, 32 nt, Human
cucauugcccaggcuggagugcagugagcuau

SEQ ID NO: 129598 - RNA, 32 nt, Human
cucauugccuguaaucccagcacuuugggagg

SEQ ID NO: 129599 - RNA, 32 nt, Human
cucauugccuucucccuuccuguucccucauc

SEQ ID NO: 129600 - RNA, 32 nt, Human
cucauugcugcuguugaguucagcuuuuacca

SEQ ID NO: 129601 - RNA, 32 nt, Human
cucauugcuggucccagcacaccuggaaaguu

SEQ ID NO: 129602 - RNA, 32 nt, Human
cucauugcuguaccacaucugcucuagggaau

SEQ ID NO: 129603 - RNA, 31 nt, Human
cucauugcuuaauuucuagccaacauagccc

SEQ ID NO: 129604 - RNA, 32 nt, Human
cucauuggaugggacagaagaagaggaugagg

SEQ ID NO: 129605 - RNA, 32 nt, Human
cucauuggccccaucacaagagaucagugacu

SEQ ID NO: 129606 - RNA, 32 nt, Human
cucauuggcccccagcaaucagacucaacaga

SEQ ID NO: 129607 - RNA, 32 nt, Human
cucauuggcucacugcagccuagaccucccag

SEQ ID NO: 129608 - RNA, 32 nt, Human
cucauuggcugcagcacaucacaguggaccuu

SEQ ID NO: 129609 - RNA, 32 nt, Human
cucauugggccacugcagucgagccugggcga

SEQ ID NO: 129610 - RNA, 32 nt, Human
cucauuggggugagaggaggcccaggaggaga

SEQ ID NO: 129611 - RNA, 32 nt, Human
cucauuguagcuucaaccuccugagcucaagc

SEQ ID NO: 129612 - RNA, 32 nt, Human
cucauuguaguuucaggacuuugucaguacaa

SEQ ID NO: 129613 - RNA, 32 nt, Human
cucauuguccaccuggccucugaggccaggca

SEQ ID NO: 129614 - RNA, 32 nt, Human
cucauugucuugcugcccagagcugcuggcuc

SEQ ID NO: 129615 - RNA, 32 nt, Human
cucauuguguuccccaggcugaagugcagugg

SEQ ID NO: 129616 - RNA, 32 nt, Human
cucauuguuaucuaaacaggucagcauggcag

SEQ ID NO: 129617 - RNA, 32 nt, Human
cucauuguucugagacauagcagugccuggcc

SEQ ID NO: 129618 - RNA, 32 nt, Human
cucauuguuucccccacgucucccucuauacc

SEQ ID NO: 129619 - RNA, 32 nt, Human
cucauuuaaauagagauucacuagaauguuga

SEQ ID NO: 129620 - RNA, 32 nt, Human
cucauuuaagccccacaacaccccacaggagg

SEQ ID NO: 129621 - RNA, 32 nt, Human
cucauuuaauccucucaaccaccuuucagaua

SEQ ID NO: 129622 - RNA, 21 nt, Human
cucauuuacaguuaucaggga

SEQ ID NO: 129623 - RNA, 32 nt, Human
cucauuuaccacucugaaaacccucuggcucu

SEQ ID NO: 129624 - RNA, 32 nt, Human
cucauuuaccuucuuggguuauuugaaauuau

SEQ ID NO: 129625 - RNA, 32 nt, Human
cucauuucaagcacugaggaggccccacuccc

SEQ ID NO: 129626 - RNA, 19 nt, Human
cucauuucaguuucuggca

SEQ ID NO: 129627 - RNA, 32 nt, Human
cucauuucauccuugcaacagcucugcagggc

SEQ ID NO: 129628 - RNA, 32 nt, Human
cucauuucaugccacaccuccagcagagggcc

SEQ ID NO: 129629 - RNA, 32 nt, Human
cucauuuccuggcaagcucuuucacaacccua

SEQ ID NO: 129630 - RNA, 32 nt, Human
cucauuuccugguaugacaaugaauuuggcua

SEQ ID NO: 129631 - RNA, 18 nt, Human
cucauuucuagcaaggaa

SEQ ID NO: 129632 - RNA, 32 nt, Human
cucauuucucauagauagccaggauuuuucag

SEQ ID NO: 129633 - RNA, 32 nt, Human
cucauuucuccccucccauuuucuccucaguu

SEQ ID NO: 129634 - RNA, 32 nt, Human
cucauuucuuuccuguucaucuccuuggucau

SEQ ID NO: 129635 - RNA, 21 nt, Human
cucauuugagauaaagucaaa

SEQ ID NO: 129636 - RNA, 32 nt, Human
cucauuugccaucuuuaguuuucuuauggagg

SEQ ID NO: 129637 - RNA, 32 nt, Human
cucauuugccccuggcuaucaucauccuacau

SEQ ID NO: 129638 - RNA, 32 nt, Human
cucauuugcucaauaaaucucuauugcuggac

SEQ ID NO: 129639 - RNA, 32 nt, Human
cucauuugcuucucccagcccaccucaagcag

SEQ ID NO: 129640 - RNA, 32 nt, Human
cucauuuggcugcucagucuaacucuagaaug

SEQ ID NO: 129641 - RNA, 32 nt, Human
cucauuuggucuuaacuagguagauguaauau

SEQ ID NO: 129642 - RNA, 32 nt, Human
cucauuuguauucacugucacuuuuucucaug

SEQ ID NO: 129643 - RNA, 20 nt, Human
cucauuuuaccaucaaggaa

SEQ ID NO: 129644 - RNA, 32 nt, Human
cucauuuuauaucagagaacccuuucaguaua

SEQ ID NO: 129645 - RNA, 32 nt, Human
cucauuuuauuauaugauuagcuccugcauuu

SEQ ID NO: 129646 - RNA, 32 nt, Human
cucauuuuauucacuaagcucgauaaaucuaa

SEQ ID NO: 129647 - RNA, 32 nt, Human
cucauuuucagccugauccagcaucuucugga

SEQ ID NO: 129648 - RNA, 32 nt, Human
cucauuuuccuugcuuuuacauagaaguuuuu

SEQ ID NO: 129649 - RNA, 32 nt, Human
cucauuuugccucucuaucccccaucccugcu

SEQ ID NO: 129650 - RNA, 32 nt, Human
cucauuuugcugcugauucuagccccaaacaa

SEQ ID NO: 129651 - RNA, 32 nt, Human
cucauuuuugagacagaguuuugcucuuguca

SEQ ID NO: 129652 - RNA, 23 nt, Human
cuccaaaaacaacaguguccuua

SEQ ID NO: 129653 - RNA, 32 nt, Human
cuccaaaaaugauugugaucaagaaucugaau

SEQ ID NO: 129654 - RNA, 32 nt, Human
cuccaaaaccaaaaagcuggguccucuggagg

SEQ ID NO: 129655 - RNA, 32 nt, Human
cuccaaaagaaaccagcccugcccacgccuug

SEQ ID NO: 129656 - RNA, 32 nt, Human
cuccaaaagacacugaugcaugcugaaguuag

SEQ ID NO: 129657 - RNA, 32 nt, Human
cuccaaaagaugaaccacauucuuuccucuug

SEQ ID NO: 129658 - RNA, 24 nt, Human
cuccaaaagugcuggaauuacagg

SEQ ID NO: 129659 - RNA, 32 nt, Human
cuccaaaagugcuggaauuacaggcgugagcc

SEQ ID NO: 129660 - RNA, 24 nt, Human
cuccaaaagugcugggauuacagg

SEQ ID NO: 129661 - RNA, 32 nt, Human
cuccaaaagugcugggauuacaggcaugagcc

SEQ ID NO: 129662 - RNA, 32 nt, Human
cuccaaaagugcugggauuacaggcaugagcu

SEQ ID NO: 129663 - RNA, 32 nt, Human
cuccaaaagugcugggauuacaggcaugaguc

SEQ ID NO: 129664 - RNA, 32 nt, Human
cuccaaaagugcugggauuacaggugucagcc

SEQ ID NO: 129665 - RNA, 32 nt, Human
cuccaaaagugcugggauuacuagcacgaauc

SEQ ID NO: 129666 - RNA, 24 nt, Human
cuccaaaagugcugggauuauagg

SEQ ID NO: 129667 - RNA, 32 nt, Human
cuccaaaagugcugggauuauaggugugagcc

SEQ ID NO: 129668 - RNA, 24 nt, Human
cuccaaaagugcuggguuuacagg

SEQ ID NO: 129669 - RNA, 32 nt, Human
cuccaaaagugcuggguuuacaggcaugagcc

SEQ ID NO: 129670 - RNA, 24 nt, Human
cuccaaaaguguugggauuacagg

SEQ ID NO: 129671 - RNA, 23 nt, Human
cuccaaaaugcugggauuacagg

SEQ ID NO: 129672 - RNA, 32 nt, Human
cuccaaaauggcccucuccucucuccugcuuc

SEQ ID NO: 129673 - RNA, 21 nt, Human
cuccaaacauccucuuccaua

SEQ ID NO: 129674 - RNA, 32 nt, Human
cuccaaacauccucuuccauauggauccacug

SEQ ID NO: 129675 - RNA, 32 nt, Human
cuccaaacauguaggaggaaaugaggaaaucg

SEQ ID NO: 129676 - RNA, 32 nt, Human
cuccaaacauuuacugaacaccuacugugugc

SEQ ID NO: 129677 - RNA, 32 nt, Human
cuccaaaccagcugagugccugcuuuuuacuc

SEQ ID NO: 129678 - RNA, 32 nt, Human
cuccaaacccaccuugcucuguguucucaggc

SEQ ID NO: 129679 - RNA, 32 nt, Human
cuccaaacccccaaagcagagagagggcugau

SEQ ID NO: 129680 - RNA, 32 nt, Human
cuccaaaccucuguccacaccuccagagcacc

SEQ ID NO: 129681 - RNA, 32 nt, Human
cuccaaacgccugccugacgacugccuuggag

SEQ ID NO: 129682 - RNA, 32 nt, Human
cuccaaacgugcugggauuacaggcaugagcc

SEQ ID NO: 129683 - RNA, 32 nt, Human
cuccaaacuccaccaccuauccccaaaccugu

SEQ ID NO: 129684 - RNA, 32 nt, Human
cuccaaagaagaggugggauaguuggagagca

SEQ ID NO: 129685 - RNA, 32 nt, Human
cuccaaagaagaggugggauaguuggagggca

SEQ ID NO: 129686 - RNA, 32 nt, Human
cuccaaagacagucuccagacccuaaaaccca

SEQ ID NO: 129687 - RNA, 32 nt, Human
cuccaaagaccagcuuuuccccagccagggcc

SEQ ID NO: 129688 - RNA, 32 nt, Human
cuccaaagagccuucagaaugcuccugagugg

SEQ ID NO: 129689 - RNA, 32 nt, Human
cuccaaagcagccuagaagcugaggggcugug

SEQ ID NO: 129690 - RNA, 23 nt, Human
cuccaaagcauugggauuacagg

SEQ ID NO: 129691 - RNA, 32 nt, Human
cuccaaagcauuugcaucaugaccuuauacau

SEQ ID NO: 129692 - RNA, 32 nt, Human
cuccaaagcuagaacuuucuucccaggauaac

SEQ ID NO: 129693 - RNA, 32 nt, Human
cuccaaagcuauuaaugucacuccuuuugcga

SEQ ID NO: 129694 - RNA, 32 nt, Human
cuccaaagcuguuccauuacaccacagcauug

SEQ ID NO: 129695 - RNA, 32 nt, Human
cuccaaagcuugccacuuuccagccuguuucc

SEQ ID NO: 129696 - RNA, 32 nt, Human
cuccaaaggagccagccucuccccaguuccug

SEQ ID NO: 129697 - RNA, 32 nt, Human
cuccaaaggugcaaaaaggaaaaagaaagcag

SEQ ID NO: 129698 - RNA, 24 nt, Human
cuccaaaggugcugggguuacagg

SEQ ID NO: 129699 - RNA, 24 nt, Human
cuccaaaguagcugggauuacagg

SEQ ID NO: 129700 - RNA, 32 nt, Human
cuccaaaguagcugggauuacaggcacccacc

SEQ ID NO: 129701 - RNA, 32 nt, Human
cuccaaaguagcugggauuacaggcaugcgcc

SEQ ID NO: 129702 - RNA, 32 nt, Human
cuccaaaguagcugggauuacagguuugcacc

SEQ ID NO: 129703 - RNA, 32 nt, Human
cuccaaaguagcugggauugcaggugccugcc

SEQ ID NO: 129704 - RNA, 18 nt, Human
cuccaaagucucagcagg

SEQ ID NO: 129705 - RNA, 23 nt, Human
cuccaaagugcuggaauuacagg

SEQ ID NO: 129706 - RNA, 23 nt, Human
cuccaaagugcuggaauuauagg

SEQ ID NO: 129707 - RNA, 22 nt, Human
cuccaaagugcuggauuacagg

SEQ ID NO: 129708 - RNA, 23 nt, Human
cuccaaagugcugggauuacagg

SEQ ID NO: 129709 - RNA, 23 nt, Human
cuccaaagugcugugauuacagg

SEQ ID NO: 129710 - RNA, 32 nt, Human
cuccaaagugugaguuccucugaucucuugau

SEQ ID NO: 129711 - RNA, 19 nt, Human
cuccaaauaaggcauuuua

SEQ ID NO: 129712 - RNA, 32 nt, Human
cuccaaauagccugcucuuucuguuaugucau

SEQ ID NO: 129713 - RNA, 32 nt, Human
cuccaaauccagccagagaugcacauuccucg

SEQ ID NO: 129714 - RNA, 32 nt, Human
cuccaaauccucccauggcaaagggcucugaa

SEQ ID NO: 129715 - RNA, 19 nt, Human
cuccaaaugcagggccuuu

SEQ ID NO: 129716 - RNA, 32 nt, Human
cuccaaaugccaccucuuccugcucccuccuc

SEQ ID NO: 129717 - RNA, 32 nt, Human
cuccaaaugcugcuguugggagcgggcuucca

SEQ ID NO: 129718 - RNA, 32 nt, Human
cuccaaaugcugucucugccugccggauaaug

SEQ ID NO: 129719 - RNA, 22 nt, Human
cuccaaaugucugacuaucuug

SEQ ID NO: 129720 - RNA, 32 nt, Human
cuccaaaugucuuccaaaguauccugccccac

SEQ ID NO: 129721 - RNA, 32 nt, Human
cuccaaauuucucuggcucaguacagaaaaag

SEQ ID NO: 129722 - RNA, 32 nt, Human
cuccaacaaauaagggcaccaacacuccccag

SEQ ID NO: 129723 - RNA, 32 nt, Human
cuccaacaacccaggacacccacgccucaccc

SEQ ID NO: 129724 - RNA, 32 nt, Human
cuccaacaaccgagcgagacccugucucaaaa

SEQ ID NO: 129725 - RNA, 32 nt, Human
cuccaacaagcuccugcuggggagagggcugu

SEQ ID NO: 129726 - RNA, 32 nt, Human
cuccaacacagcccucugugggagccuagaug

SEQ ID NO: 129727 - RNA, 32 nt, Human
cuccaacaccaagcacagcagccuggggcugg

SEQ ID NO: 129728 - RNA, 32 nt, Human
cuccaacagggguccagccugcaucuuguuaa

SEQ ID NO: 129729 - RNA, 32 nt, Human
cuccaacaguuuuucuugaauguggcuaccua

SEQ ID NO: 129730 - RNA, 32 nt, Human
cuccaacauccugucuuuccaucaggaacugg

SEQ ID NO: 129731 - RNA, 32 nt, Human
cuccaacauggugaaaccccgucccuaauaaa

SEQ ID NO: 129732 - RNA, 32 nt, Human
cuccaacauuaugguugcucaguuucuucaga

SEQ ID NO: 129733 - RNA, 32 nt, Human
cuccaaccaccagcacugacuccugggcucug

SEQ ID NO: 129734 - RNA, 28 nt, Human
cuccaaccacugcccucagcccccgacc

SEQ ID NO: 129735 - RNA, 32 nt, Human
cuccaaccauguccgacgaggccucggccauc

SEQ ID NO: 129736 - RNA, 32 nt, Human
cuccaaccauguucccuucuucuuagcaccac

SEQ ID NO: 129737 - RNA, 32 nt, Human
cuccaacccaggaggggaaguggagauaaagc

SEQ ID NO: 129738 - RNA, 32 nt, Human
cuccaaccccuucacacccaccccucugaccc

SEQ ID NO: 129739 - RNA, 32 nt, Human
cuccaacccuaauggcccaacagggaaauucu

SEQ ID NO: 129740 - RNA, 32 nt, Human
cuccaacccucuuguccccuguugcuuuccga

SEQ ID NO: 129741 - RNA, 32 nt, Human
cuccaacccugccucuguccccuuccccaccc

SEQ ID NO: 129742 - RNA, 32 nt, Human
cuccaacccugggcugcccugggacucuuucc

SEQ ID NO: 129743 - RNA, 32 nt, Human
cuccaaccuccccuucaccuucuccuccaccu

SEQ ID NO: 129744 - RNA, 32 nt, Human
cuccaaccuccucuguguugauuccuaugccc

SEQ ID NO: 129745 - RNA, 22 nt, Human
cuccaaccucugugacuacuuu

SEQ ID NO: 129746 - RNA, 32 nt, Human
cuccaaccugcaccccucccuucuccaucucg

SEQ ID NO: 129747 - RNA, 32 nt, Human
cuccaaccugcacuccagccugggcaacagag

SEQ ID NO: 129748 - RNA, 21 nt, Human
cuccaaccuggacaacaagag

SEQ ID NO: 129749 - RNA, 24 nt, Human
cuccaaccuggacaacaagagcga

SEQ ID NO: 129750 - RNA, 19 nt, Human
cuccaaccugggcaacaga

SEQ ID NO: 129751 - RNA, 23 nt, Human
cuccaaccugggcaacagaauga

SEQ ID NO: 129752 - RNA, 20 nt, Human
cuccaaccugggcaacagag

SEQ ID NO: 129753 - RNA, 21 nt, Human
cuccaaccugggcaacagagc

SEQ ID NO: 129754 - RNA, 23 nt, Human
cuccaaccugggcaacagaggga

SEQ ID NO: 129755 - RNA, 21 nt, Human
cuccaaccugggcaacagagu

SEQ ID NO: 129756 - RNA, 23 nt, Human
cuccaaccugggcaacauagugg

SEQ ID NO: 129757 - RNA, 22 nt, Human
cuccaaccugggcaauaagagc

SEQ ID NO: 129758 - RNA, 20 nt, Human
cuccaaccugggcagcagag

SEQ ID NO: 129759 - RNA, 21 nt, Human
cuccaaccugggcagcagagc

SEQ ID NO: 129760 - RNA, 23 nt, Human
cuccaaccugggcgacagggcga

SEQ ID NO: 129761 - RNA, 23 nt, Human
cuccaaccuggguaacagaguga

SEQ ID NO: 129762 - RNA, 24 nt, Human
cuccaaccugggugacaagaguga

SEQ ID NO: 129763 - RNA, 23 nt, Human
cuccaaccugggugacagagcga

SEQ ID NO: 129764 - RNA, 23 nt, Human
cuccaaccugggugacagaguga

SEQ ID NO: 129765 - RNA, 23 nt, Human
cuccaaccugggugagagagcga

SEQ ID NO: 129766 - RNA, 32 nt, Human
cuccaacgcagcgcuucggccuguccuccgca

SEQ ID NO: 129767 - RNA, 32 nt, Human
cuccaacgcagucagcugggucucagccacgu

SEQ ID NO: 129768 - RNA, 32 nt, Human
cuccaacgucuucuccauguuugaucaguccc

SEQ ID NO: 129769 - RNA, 32 nt, Human
cuccaacucaacaacauucuauaacugauaac

SEQ ID NO: 129770 - RNA, 32 nt, Human
cuccaacucaacaacauucuauaauugauaac

SEQ ID NO: 129771 - RNA, 32 nt, Human
cuccaacucccagggacucauuacagcccucc

SEQ ID NO: 129772 - RNA, 32 nt, Human
cuccaacuccuggccucaaaugaucagcccgc

SEQ ID NO: 129773 - RNA, 32 nt, Human
cuccaacuggugugucucacacaaugccuccc

SEQ ID NO: 129774 - RNA, 32 nt, Human
cuccaacuuaccugccccagacuucuuggaug

SEQ ID NO: 129775 - RNA, 32 nt, Human
cuccaacuuccugcucucacacacaccagagg

SEQ ID NO: 129776 - RNA, 24 nt, Human
cuccaacuugggcaacagacagag

SEQ ID NO: 129777 - RNA, 32 nt, Human
cuccaagaacaucagugugaggcuggaauugu

SEQ ID NO: 129778 - RNA, 32 nt, Human
cuccaagaacuaagccaacuugaugugaaaag

SEQ ID NO: 129779 - RNA, 32 nt, Human
cuccaagaaggaggaggaggagagaaaggcgg

SEQ ID NO: 129780 - RNA, 32 nt, Human
cuccaagaccuauccuaugauaguguccaauc

SEQ ID NO: 129781 - RNA, 32 nt, Human
cuccaagaccugccaagcugagagucucccua

SEQ ID NO: 129782 - RNA, 32 nt, Human
cuccaagagacuaucaguuccuuggggacagg

SEQ ID NO: 129783 - RNA, 32 nt, Human
cuccaagagcaugucacuaguuuucuagaagu

SEQ ID NO: 129784 - RNA, 32 nt, Human
cuccaagaggaaagguagaaguuguucauugc

SEQ ID NO: 129785 - RNA, 32 nt, Human
cuccaagaguucuggacaggaggcagacacug

SEQ ID NO: 129786 - RNA, 32 nt, Human
cuccaagauaaaagaugaggucagggaugggc

SEQ ID NO: 129787 - RNA, 32 nt, Human
cuccaagaucuucccuugggcuuuucagcagu

SEQ ID NO: 129788 - RNA, 32 nt, Human
cuccaagaugggaggcaagcucagcaagaaga

SEQ ID NO: 129789 - RNA, 24 nt, Human
cuccaagauucgccgccgccgccg

SEQ ID NO: 129790 - RNA, 32 nt, Human
cuccaagcaaguagcuuuccacauuugucaca

SEQ ID NO: 129791 - RNA, 32 nt, Human
cuccaagcacagagccuggccccaggccccag

SEQ ID NO: 129792 - RNA, 23 nt, Human
cuccaagcaccacgacucccugg

SEQ ID NO: 129793 - RNA, 23 nt, Human
cuccaagcagagcaacucccugg

SEQ ID NO: 129794 - RNA, 32 nt, Human
cuccaagcaguuugaagcccaaucugcaagga

SEQ ID NO: 129795 - RNA, 32 nt, Human
cuccaagcccaagaccugcuucaccucacccc

SEQ ID NO: 129796 - RNA, 22 nt, Human
cuccaagcccuccuaccuacca

SEQ ID NO: 129797 - RNA, 32 nt, Human
cuccaagccugccucccaagguccucucaguu

SEQ ID NO: 129798 - RNA, 22 nt, Human
cuccaagcggccgcugccgccg

SEQ ID NO: 129799 - RNA, 32 nt, Human
cuccaagcuacucacuguauuggacgggagua

SEQ ID NO: 129800 - RNA, 32 nt, Human
cuccaagcuccccuccugcucucccucccugc

SEQ ID NO: 129801 - RNA, 22 nt, Human
cuccaagcugagguuugccuaa

SEQ ID NO: 129802 - RNA, 32 nt, Human
cuccaagcugcacuccuacucucugggaccca

SEQ ID NO: 129803 - RNA, 32 nt, Human
cuccaagcugggcugagccagagcagaaggcg

SEQ ID NO: 129804 - RNA, 32 nt, Human
cuccaaggaaaggaaggaaggaaggaaaagga

SEQ ID NO: 129805 - RNA, 32 nt, Human
cuccaaggacagcuccggcagcagguccucgc

SEQ ID NO: 129806 - RNA, 32 nt, Human
cuccaaggaggccuggggguuggguggggugg

SEQ ID NO: 129807 - RNA, 32 nt, Human
cuccaaggcauguagaacuguaauaagugaau

SEQ ID NO: 129808 - RNA, 21 nt, Human
cuccaagggcuucugcacccu

SEQ ID NO: 129809 - RNA, 26 nt, Human
cuccaaggggugggaauuccaggcca

SEQ ID NO: 129810 - RNA, 32 nt, Human
cuccaagggugaggcuggaugaagccaggggc

SEQ ID NO: 129811 - RNA, 32 nt, Human
cuccaagguccaacaugggugcagagagucuu

SEQ ID NO: 129812 - RNA, 32 nt, Human
cuccaagguccucuaggagcucagggguggag

SEQ ID NO: 129813 - RNA, 32 nt, Human
cuccaagguugcaccugucuaacuaugacagg

SEQ ID NO: 129814 - RNA, 32 nt, Human
cuccaaguaaucugggcugggccugagauucu

SEQ ID NO: 129815 - RNA, 19 nt, Human
cuccaaguagcccuugacc

SEQ ID NO: 129816 - RNA, 32 nt, Human
cuccaagucauugcuuacuacacccacaaaca

SEQ ID NO: 129817 - RNA, 32 nt, Human
cuccaaguccaagcucaaggucaagaggcaac

SEQ ID NO: 129818 - RNA, 32 nt, Human
cuccaagucuugaucaucagccaggauuuugc

SEQ ID NO: 129819 - RNA, 32 nt, Human
cuccaagugcaucuagccuggccuggagggca

SEQ ID NO: 129820 - RNA, 32 nt, Human
cuccaaguucucucuuccugucccacacucug

SEQ ID NO: 129821 - RNA, 32 nt, Human
cuccaaguucuuuagcuuuuggacucuuggac

SEQ ID NO: 129822 - RNA, 32 nt, Human
cuccaauauacugccagcaugcugaguauacu

SEQ ID NO: 129823 - RNA, 32 nt, Human
cuccaaucacaauggaauaaaaccagaaaucc

SEQ ID NO: 129824 - RNA, 32 nt, Human
cuccaaucauugcagucugaacuccaguuuaa

SEQ ID NO: 129825 - RNA, 32 nt, Human
cuccaauccauucuuugcuccaaugucaccuc

SEQ ID NO: 129826 - RNA, 32 nt, Human
cuccaaucccccaccuccacccccucuccuuu

SEQ ID NO: 129827 - RNA, 32 nt, Human
cuccaauccugcuggcuucagccuggagaagg

SEQ ID NO: 129828 - RNA, 32 nt, Human
cuccaaucucucuccacugaguggcuggaaug

SEQ ID NO: 129829 - RNA, 22 nt, Human
cuccaaucuggcaacagagcga

SEQ ID NO: 129830 - RNA, 32 nt, Human
cuccaaucuggggucgggggacccugggaggu

SEQ ID NO: 129831 - RNA, 32 nt, Human
cuccaaugaggcagagguugcagugagcugag

SEQ ID NO: 129832 - RNA, 32 nt, Human
cuccaaugcagauguggcauuuaggggagaau

SEQ ID NO: 129833 - RNA, 23 nt, Human
cuccaaugccagcgacucccagg

SEQ ID NO: 129834 - RNA, 31 nt, Human
cuccaauuauauuuuuaacauuuaaaaacca

SEQ ID NO: 129835 - RNA, 32 nt, Human
cuccaauucaggaagugggaaaaggagccagg

SEQ ID NO: 129836 - RNA, 32 nt, Human
cuccaauuccacagucucugggagacuuuccc

SEQ ID NO: 129837 - RNA, 32 nt, Human
cuccaauuccacauccuucauccuggccaugc

SEQ ID NO: 129838 - RNA, 32 nt, Human
cuccaauuccgccaaucucuugcccccaucau

SEQ ID NO: 129839 - RNA, 32 nt, Human
cuccaauuuccccuggggcucucccuccgcgc

SEQ ID NO: 129840 - RNA, 32 nt, Human
cuccacaaaaugccuggcgaagccacagaaac

SEQ ID NO: 129841 - RNA, 32 nt, Human
cuccacaaaauuuaaaaauuagcggccgggcg

SEQ ID NO: 129842 - RNA, 32 nt, Human
cuccacaaccaccuccagccugggagauaggc

SEQ ID NO: 129843 - RNA, 32 nt, Human
cuccacaacccccaccccuuguuuuucaagau

SEQ ID NO: 129844 - RNA, 32 nt, Human
cuccacaagaagcagcauuggagagcugugga

SEQ ID NO: 129845 - RNA, 32 nt, Human
cuccacaagacaccugugacauccuccagggc

SEQ ID NO: 129846 - RNA, 32 nt, Human
cuccacaagugcugggauuacaggugugagcc

SEQ ID NO: 129847 - RNA, 32 nt, Human
cuccacacacccagagaaggaguggggugggg

SEQ ID NO: 129848 - RNA, 32 nt, Human
cuccacacagccgaagcacccggcaucuuggu

SEQ ID NO: 129849 - RNA, 21 nt, Human
cuccacacaucauccuuagca

SEQ ID NO: 129850 - RNA, 24 nt, Human
cuccacaccaguaauaaaaagcca

SEQ ID NO: 129851 - RNA, 20 nt, Human
cuccacaccuggaggucaga

SEQ ID NO: 129852 - RNA, 32 nt, Human
cuccacacgccuccucuucuccugguccuuca

SEQ ID NO: 129853 - RNA, 32 nt, Human
cuccacacuaggguggcugagagggguccugg

SEQ ID NO: 129854 - RNA, 32 nt, Human
cuccacacucucaggccaucacagaacacccc

SEQ ID NO: 129855 - RNA, 32 nt, Human
cuccacacugccugggacaguguccugcaucc

SEQ ID NO: 129856 - RNA, 20 nt, Human
cuccacagacuucucuucag

SEQ ID NO: 129857 - RNA, 32 nt, Human
cuccacagagugagccagugagggcaguccug

SEQ ID NO: 129858 - RNA, 32 nt, Human
cuccacagaucgaaucaaagucagaguauggg

SEQ ID NO: 129859 - RNA, 32 nt, Human
cuccacagaugccucuucugugccuuaagcag

SEQ ID NO: 129860 - RNA, 26 nt, Human
cuccacagcauccccuccacuccaga

SEQ ID NO: 129861 - RNA, 32 nt, Human
cuccacagcaugcuuuugccucccuggucaug

SEQ ID NO: 129862 - RNA, 25 nt, Human
cuccacagccaucccagccuuggca

SEQ ID NO: 129863 - RNA, 32 nt, Human
cuccacagcccagaucccauucuuaagagcaa

SEQ ID NO: 129864 - RNA, 32 nt, Human
cuccacagccuucuccagccugugugauacaa

SEQ ID NO: 129865 - RNA, 32 nt, Human
cuccacagccuucugccaaacuccuacugcuu

SEQ ID NO: 129866 - RNA, 32 nt, Human
cuccacaggccugcacucggagucuggggccu

SEQ ID NO: 129867 - RNA, 32 nt, Human
cuccacaggcgcccccaccacagcagaacagc

SEQ ID NO: 129868 - RNA, 32 nt, Human
cuccacaggcuuccagacuugaaggaaaaggu

SEQ ID NO: 129869 - RNA, 20 nt, Human
cuccacaggcuugagcccag

SEQ ID NO: 129870 - RNA, 32 nt, Human
cuccacagggaaaaggcaaggcuuccaggcca

SEQ ID NO: 129871 - RNA, 32 nt, Human
cuccacagggcugcaagugcccugccaggcuc

SEQ ID NO: 129872 - RNA, 32 nt, Human
cuccacaggugaagacagggccagcaggagac

SEQ ID NO: 129873 - RNA, 32 nt, Human
cuccacagugcguggcugggcucugugugugg

SEQ ID NO: 129874 - RNA, 32 nt, Human
cuccacauagcccuguaauauucagauggaac

SEQ ID NO: 129875 - RNA, 32 nt, Human
cuccacaucacugaggucaaugucauccucca

SEQ ID NO: 129876 - RNA, 22 nt, Human
cuccacauccuccaaggcacug

SEQ ID NO: 129877 - RNA, 32 nt, Human
cuccacauccuccuccuauucuccccucuccc

SEQ ID NO: 129878 - RNA, 32 nt, Human
cuccacaucggcaacuucagccuggauuggga

SEQ ID NO: 129879 - RNA, 32 nt, Human
cuccacaucuacugcgugcccuugccaaacag

SEQ ID NO: 129880 - RNA, 21 nt, Human
cuccacaucuccaugccuucg

SEQ ID NO: 129881 - RNA, 20 nt, Human
cuccacaucuccuggcuccu

SEQ ID NO: 129882 - RNA, 32 nt, Human
cuccacaucuuccuucucugaaguccagguac

SEQ ID NO: 129883 - RNA, 32 nt, Human
cuccacaugcugcaaggacagacugaagggcu

SEQ ID NO: 129884 - RNA, 32 nt, Human
cuccacauuuguguccucuuuuacugacuucc

SEQ ID NO: 129885 - RNA, 25 nt, Human
cuccaccaaaacccucuacuucaga

SEQ ID NO: 129886 - RNA, 32 nt, Human
cuccaccaaacgcucaccuggccuggcagcga

SEQ ID NO: 129887 - RNA, 32 nt, Human
cuccaccaagacuucacccaaccacgguccuu

SEQ ID NO: 129888 - RNA, 32 nt, Human
cuccaccacagaacguggcuauguuccaagug

SEQ ID NO: 129889 - RNA, 32 nt, Human
cuccaccaccaaagucauggcucugcuguugc

SEQ ID NO: 129890 - RNA, 32 nt, Human
cuccaccaccaccaccaccaccaccaccacca

SEQ ID NO: 129891 - RNA, 20 nt, Human
cuccaccaccaccacccucu

SEQ ID NO: 129892 - RNA, 32 nt, Human
cuccaccaccaccaccgccgccgccuccaucu

SEQ ID NO: 129893 - RNA, 32 nt, Human
cuccaccaccaccaccuuccuuccuucccccu

SEQ ID NO: 129894 - RNA, 32 nt, Human
cuccaccaccacuggccaccaggcuggcgcag

SEQ ID NO: 129895 - RNA, 32 nt, Human
cuccaccaccauuucccucccgggccgggggu

SEQ ID NO: 129896 - RNA, 18 nt, Human
cuccaccaccccaaccuc

SEQ ID NO: 129897 - RNA, 32 nt, Human
cuccaccaccgcccgucugugugugaccccuc

SEQ ID NO: 129898 - RNA, 32 nt, Human
cuccaccaccuccaccaccaccaccaccacca

SEQ ID NO: 129899 - RNA, 32 nt, Human
cuccaccacuccucccauuccagcuuaacacu

SEQ ID NO: 129900 - RNA, 32 nt, Human
cuccaccacugaggcccaggcucccaggaccc

SEQ ID NO: 129901 - RNA, 32 nt, Human
cuccaccacugcacccaggacccgcugaaccc

SEQ ID NO: 129902 - RNA, 32 nt, Human
cuccaccagaucugcagaauucugaugcccau

SEQ ID NO: 129903 - RNA, 32 nt, Human
cuccaccagauguccacaacaauaugaaguac

SEQ ID NO: 129904 - RNA, 20 nt, Human
cuccaccagcacuaagcuca

SEQ ID NO: 129905 - RNA, 32 nt, Human
cuccaccagcauuucuccucuggucacaucua

SEQ ID NO: 129906 - RNA, 20 nt, Human
cuccaccagcccagcuucua

SEQ ID NO: 129907 - RNA, 32 nt, Human
cuccaccagcgaccuccacacucccgggacgc

SEQ ID NO: 129908 - RNA, 32 nt, Human
cuccaccagcuggucccucugaugggcaggac

SEQ ID NO: 129909 - RNA, 32 nt, Human
cuccaccaggauggcagccaggagcggccggu

SEQ ID NO: 129910 - RNA, 32 nt, Human
cuccaccaggcagaagaugacagacugugaau

SEQ ID NO: 129911 - RNA, 32 nt, Human
cuccaccaggguggggccgggcuugcucauga

SEQ ID NO: 129912 - RNA, 32 nt, Human
cuccaccagucugaccucaguccucccucccu

SEQ ID NO: 129913 - RNA, 32 nt, Human
cuccaccauccagagccacaaaagcaaaccuu

SEQ ID NO: 129914 - RNA, 32 nt, Human
cuccaccaucccacauccucccccucccuuuc

SEQ ID NO: 129915 - RNA, 18 nt, Human
cuccaccaugcggacccu

SEQ ID NO: 129916 - RNA, 21 nt, Human
cuccacccacuacagcacagg

SEQ ID NO: 129917 - RNA, 32 nt, Human
cuccacccagaaccccuucagucccugcuggg

SEQ ID NO: 129918 - RNA, 28 nt, Human
cuccacccagcugcugccuauucccugc

SEQ ID NO: 129919 - RNA, 32 nt, Human
cuccaccccacucucagggcugggaauuguug

SEQ ID NO: 129920 - RNA, 32 nt, Human
cuccaccccagccagcugggcagggccggugu

SEQ ID NO: 129921 - RNA, 32 nt, Human
cuccaccccaggaagcuaugacagaggccggg

SEQ ID NO: 129922 - RNA, 32 nt, Human
cuccacccccacauaccugccacccaccuggc

SEQ ID NO: 129923 - RNA, 23 nt, Human
cuccaccccccggcgcacucgca

SEQ ID NO: 129924 - RNA, 32 nt, Human
cuccacccccgcaggcugcagagcaaggauga

SEQ ID NO: 129925 - RNA, 32 nt, Human
cuccaccccgcccgacucuacccggcccgguc

SEQ ID NO: 129926 - RNA, 32 nt, Human
cuccaccccugccaggccccagguuaggaaua

SEQ ID NO: 129927 - RNA, 32 nt, Human
cuccaccccugccucuccuccacccgcccagg

SEQ ID NO: 129928 - RNA, 32 nt, Human
cuccacccggacccaucucucccuucuagacc

SEQ ID NO: 129929 - RNA, 32 nt, Human
cuccacccucacuucuuuaccaaaugcauuuc

SEQ ID NO: 129930 - RNA, 18 nt, Human
cuccacccucagaacucu

SEQ ID NO: 129931 - RNA, 32 nt, Human
cuccacccuccaggagaccccagugucugugg

SEQ ID NO: 129932 - RNA, 32 nt, Human
cuccacccuccccacacucugcgcuucucgca

SEQ ID NO: 129933 - RNA, 32 nt, Human
cuccacccuccccaccuggcucauuuccccga

SEQ ID NO: 129934 - RNA, 32 nt, Human
cuccacccuccccgugcugcuguguucugcuc

SEQ ID NO: 129935 - RNA, 32 nt, Human
cuccacccuccuccucuucaccaggugcaugc

SEQ ID NO: 129936 - RNA, 17 nt, Human
cuccacccugagggccc

SEQ ID NO: 129937 - RNA, 32 nt, Human
cuccacccugcaacccccaucccccaccgggc

SEQ ID NO: 129938 - RNA, 32 nt, Human
cuccacccugcacuugcuccucagaaccaggg

SEQ ID NO: 129939 - RNA, 32 nt, Human
cuccacccugcagguucaagcgagucuccugc

SEQ ID NO: 129940 - RNA, 24 nt, Human
cuccacccugccucccacuuaaga

SEQ ID NO: 129941 - RNA, 32 nt, Human
cuccacccugcuuccacuacaucaggagguga

SEQ ID NO: 129942 - RNA, 32 nt, Human
cuccacccuucuugcuuaaauccauaggcauu

SEQ ID NO: 129943 - RNA, 32 nt, Human
cuccaccgagcaugagcugaccgucagcacca

SEQ ID NO: 129944 - RNA, 32 nt, Human
cuccaccgccagccccagaguuagauuuuaug

SEQ ID NO: 129945 - RNA, 20 nt, Human
cuccaccgccgccgccgccg

SEQ ID NO: 129946 - RNA, 19 nt, Human
cuccaccgccgccgcugcu

SEQ ID NO: 129947 - RNA, 20 nt, Human
cuccaccgccuccgccgccg

SEQ ID NO: 129948 - RNA, 32 nt, Human
cuccaccgucgcucgacuuccaccucuaagac

SEQ ID NO: 129949 - RNA, 32 nt, Human
cuccaccucaagggugcagccugaucuuccuc

SEQ ID NO: 129950 - RNA, 32 nt, Human
cuccaccucacacccaccccugggcaucuuag

SEQ ID NO: 129951 - RNA, 23 nt, Human
cuccaccucaccgccugggaaca

SEQ ID NO: 129952 - RNA, 32 nt, Human
cuccaccucaccuccagcucaggggccgcacc

SEQ ID NO: 129953 - RNA, 18 nt, Human
cuccaccucacucuccug

SEQ ID NO: 129954 - RNA, 23 nt, Human
cuccaccucagcuccugcucccu

SEQ ID NO: 129955 - RNA, 32 nt, Human
cuccaccucauugagccugacuguucugcucc

SEQ ID NO: 129956 - RNA, 23 nt, Human
cuccaccuccacccacuguccgc

SEQ ID NO: 129957 - RNA, 32 nt, Human
cuccaccuccaccccgccuggccuggcgucca

SEQ ID NO: 129958 - RNA, 22 nt, Human
cuccaccuccacuaccacucca

SEQ ID NO: 129959 - RNA, 22 nt, Human
cuccaccuccagccaccccagg

SEQ ID NO: 129960 - RNA, 32 nt, Human
cuccaccucccagccaagaucugucuuccuuc

SEQ ID NO: 129961 - RNA, 32 nt, Human
cuccaccucccaggcucaagggauccucucac

SEQ ID NO: 129962 - RNA, 32 nt, Human
cuccaccuccuccuccuccuccucuccuccug

SEQ ID NO: 129963 - RNA, 32 nt, Human
cuccaccucucccauuccauccccaguccagc

SEQ ID NO: 129964 - RNA, 20 nt, Human
cuccaccucugguggcuccu

SEQ ID NO: 129965 - RNA, 20 nt, Human
cuccaccucuugucagcuca

SEQ ID NO: 129966 - RNA, 32 nt, Human
cuccaccucuuuuugagugaacagaggacaaa

SEQ ID NO: 129967 - RNA, 32 nt, Human
cuccaccugaaccauggcuuuucaugcuucca

SEQ ID NO: 129968 - RNA, 32 nt, Human
cuccaccugaagauuaucggcuauagagaaua

SEQ ID NO: 129969 - RNA, 32 nt, Human
cuccaccugaaugccugcuguggucugaucuu

SEQ ID NO: 129970 - RNA, 32 nt, Human
cuccaccugacuccuagccacugcuuucuccu

SEQ ID NO: 129971 - RNA, 25 nt, Human
cuccaccugccaucucacccucaga

SEQ ID NO: 129972 - RNA, 32 nt, Human
cuccaccugccccucuugccucuggccccucu

SEQ ID NO: 129973 - RNA, 32 nt, Human
cuccaccugcucugugcccacccuccacucuc

SEQ ID NO: 129974 - RNA, 30 nt, Human
cuccaccugcugcaaucaugaaggacagcg

SEQ ID NO: 129975 - RNA, 21 nt, Human
cuccaccuggcuucacuccag

SEQ ID NO: 129976 - RNA, 24 nt, Human
cuccaccuuagaaaccacgucaga

SEQ ID NO: 129977 - RNA, 32 nt, Human
cuccaccuucccuagucaccagcugguuuccc

SEQ ID NO: 129978 - RNA, 32 nt, Human
cuccaccuucuccaucucucuacuuuaaagau

SEQ ID NO: 129979 - RNA, 32 nt, Human
cuccaccuucucuggucuucaguccagcacug

SEQ ID NO: 129980 - RNA, 32 nt, Human
cuccaccuuggauuuuucucuccaucacauca

SEQ ID NO: 129981 - RNA, 32 nt, Human
cuccaccuugucacuccagguucuggugaccc

SEQ ID NO: 129982 - RNA, 32 nt, Human
cuccacgagcccucuggccacugugggaggga

SEQ ID NO: 129983 - RNA, 21 nt, Human
cuccacgagcucgcucugaca

SEQ ID NO: 129984 - RNA, 32 nt, Human
cuccacgaugguggaaacaguggggaacuacu

SEQ ID NO: 129985 - RNA, 32 nt, Human
cuccacgcccaccaccaugagcuggagugggg

SEQ ID NO: 129986 - RNA, 32 nt, Human
cuccacgcccagcuaauuuuuguauuuuuaau

SEQ ID NO: 129987 - RNA, 32 nt, Human
cuccacgccggcucuuccccacccucagcccc

SEQ ID NO: 129988 - RNA, 32 nt, Human
cuccacgccggggacauuuccaccgaauguag

SEQ ID NO: 129989 - RNA, 32 nt, Human
cuccacgcggugugcgcugacacugccggggg

SEQ ID NO: 129990 - RNA, 32 nt, Human
cuccacgcuaucccucugcagccugggcccuc

SEQ ID NO: 129991 - RNA, 23 nt, Human
cuccacggagcccucgggaccug

SEQ ID NO: 129992 - RNA, 32 nt, Human
cuccacggagguuccgagggaggcaggggacg

SEQ ID NO: 129993 - RNA, 19 nt, Human
cuccacgucaggcacugug

SEQ ID NO: 129994 - RNA, 32 nt, Human
cuccacguccggcuaauuuuguauuuuuagug

SEQ ID NO: 129995 - RNA, 32 nt, Human
cuccacguccuugugaugauucugagccuggc

SEQ ID NO: 129996 - RNA, 32 nt, Human
cuccacgugcaggccaagagcacugagacacc

SEQ ID NO: 129997 - RNA, 22 nt, Human
cuccacgugggccacugcugcc

SEQ ID NO: 129998 - RNA, 32 nt, Human
cuccacgugucccagggauucuccacacgagu

SEQ ID NO: 129999 - RNA, 32 nt, Human
cuccacguuggccaggcuggucucaaacuccu

SEQ ID NO: 130000 - RNA, 32 nt, Human
cuccacuaaaaauacaaaaauuagccaggcau

SEQ ID NO: 130001 - RNA, 32 nt, Human
cuccacuaaaaauacaaaaauuagccaggcgu

SEQ ID NO: 130002 - RNA, 32 nt, Human
cuccacuaaaaauacaaaaauuagccaggugu

SEQ ID NO: 130003 - RNA, 32 nt, Human
cuccacuaaaaauacaaaaauuagccgggcgu

SEQ ID NO: 130004 - RNA, 32 nt, Human
cuccacuaaaaauacaaaaauuagccgggugu

SEQ ID NO: 130005 - RNA, 32 nt, Human
cuccacuaaaaauacaaaaauuagcugggcgu

SEQ ID NO: 130006 - RNA, 32 nt, Human
cuccacuaaaaauacaaaaauuaguugggcau

SEQ ID NO: 130007 - RNA, 32 nt, Human
cuccacuaaaaauacaaaaguuagucgggcau

SEQ ID NO: 130008 - RNA, 32 nt, Human
cuccacuaaaaauacaaaauuagcugggcgug

SEQ ID NO: 130009 - RNA, 32 nt, Human
cuccacuaaaaauacaaaauuagcugggugug

SEQ ID NO: 130010 - RNA, 32 nt, Human
cuccacuaaaaauacaacaguuagucgggcau

SEQ ID NO: 130011 - RNA, 32 nt, Human
cuccacuaaaaauagaaaaauuaacugggugu

SEQ ID NO: 130012 - RNA, 32 nt, Human
cuccacuaaaaauauaaaaauuagccaggcau

SEQ ID NO: 130013 - RNA, 32 nt, Human
cuccacuaaaaguacaaaaauuagcugggcgu

SEQ ID NO: 130014 - RNA, 32 nt, Human
cuccacuaaaauacaaaauuagcugggugugg

SEQ ID NO: 130015 - RNA, 18 nt, Human
cuccacuacagaaugacu

SEQ ID NO: 130016 - RNA, 32 nt, Human
cuccacuagcucuagcccagccuggauuccag

SEQ ID NO: 130017 - RNA, 32 nt, Human
cuccacuaggacuuugaccuucccaggggucc

SEQ ID NO: 130018 - RNA, 32 nt, Human
cuccacuagggaggcgccgggagguugccugc

SEQ ID NO: 130019 - RNA, 32 nt, Human
cuccacuaguggcugcucugugugccccuuau

SEQ ID NO: 130020 - RNA, 32 nt, Human
cuccacuauaauguugagcagaacagugaggc

SEQ ID NO: 130021 - RNA, 32 nt, Human
cuccacuaugcucucccuccgugucccgcucg

SEQ ID NO: 130022 - RNA, 32 nt, Human
cuccacucacugcaacuuccgccuccuggggu

SEQ ID NO: 130023 - RNA, 32 nt, Human
cuccacucacugcagccuccgccucugggguu

SEQ ID NO: 130024 - RNA, 32 nt, Human
cuccacucacugcaggcuccgccucccggguu

SEQ ID NO: 130025 - RNA, 32 nt, Human
cuccacucagcccuggugggugcgggaaccaa

SEQ ID NO: 130026 - RNA, 32 nt, Human
cuccacucauccaauucaucuuccucagaugc

SEQ ID NO: 130027 - RNA, 23 nt, Human
cuccacucaugccugggggccug

SEQ ID NO: 130028 - RNA, 32 nt, Human
cuccacuccagccuggcguccagggccacagc

SEQ ID NO: 130029 - RNA, 32 nt, Human
cuccacuccagccugggcaacagugugagacc

SEQ ID NO: 130030 - RNA, 18 nt, Human
cuccacuccagguuccag

SEQ ID NO: 130031 - RNA, 32 nt, Human
cuccacucccucccucccuuccuuccugcugu

SEQ ID NO: 130032 - RNA, 32 nt, Human
cuccacucccuugugauuucugagggucacca

SEQ ID NO: 130033 - RNA, 32 nt, Human
cuccacuccgacaucaggaccugagaugaccg

SEQ ID NO: 130034 - RNA, 32 nt, Human
cuccacuccugacauucuuucccuucagggau

SEQ ID NO: 130035 - RNA, 32 nt, Human
cuccacuccuugcaaccugugugacugggggc

SEQ ID NO: 130036 - RNA, 32 nt, Human
cuccacucuaauucccauccauuaggaggaga

SEQ ID NO: 130037 - RNA, 32 nt, Human
cuccacucucagguuugcaccucgucauuguc

SEQ ID NO: 130038 - RNA, 32 nt, Human
cuccacucuccuccccuagaugccaugcuucc

SEQ ID NO: 130039 - RNA, 32 nt, Human
cuccacucuccuccucacccucucgcuccuuc

SEQ ID NO: 130040 - RNA, 32 nt, Human
cuccacucuccucuccccugugagcuccaccu

SEQ ID NO: 130041 - RNA, 32 nt, Human
cuccacucuccucugggcuccuccuugccuaa

SEQ ID NO: 130042 - RNA, 32 nt, Human
cuccacucugcagccucaaacuccugggcucc

SEQ ID NO: 130043 - RNA, 20 nt, Human
cuccacucugcuucucugac

SEQ ID NO: 130044 - RNA, 32 nt, Human
cuccacucugggaacagcucacacccccaaag

SEQ ID NO: 130045 - RNA, 32 nt, Human
cuccacugaaaauagaaaaauuagcugggcau

SEQ ID NO: 130046 - RNA, 32 nt, Human
cuccacugacugccugucagcuagucucucca

SEQ ID NO: 130047 - RNA, 22 nt, Human
cuccacugacuguacccuggcc

SEQ ID NO: 130048 - RNA, 32 nt, Human
cuccacugcacuccagcccaggugacagugug

SEQ ID NO: 130049 - RNA, 32 nt, Human
cuccacugcacuccagccugggcgacagaaug

SEQ ID NO: 130050 - RNA, 32 nt, Human
cuccacugcacuccagccugggugacagaccg

SEQ ID NO: 130051 - RNA, 32 nt, Human
cuccacugcacuccagccugggugacagaucc

SEQ ID NO: 130052 - RNA, 32 nt, Human
cuccacugcacugcaacccugcuuucaaaccg

SEQ ID NO: 130053 - RNA, 32 nt, Human
cuccacugcacuggcucauuccugccucaguu

SEQ ID NO: 130054 - RNA, 32 nt, Human
cuccacugcagccguaaggacugucugugaca

SEQ ID NO: 130055 - RNA, 21 nt, Human
cuccacugcauugccauccuc

SEQ ID NO: 130056 - RNA, 32 nt, Human
cuccacugcccuagccccagacugcucaccuc

SEQ ID NO: 130057 - RNA, 31 nt, Human
cuccacugccucucgcccuguaucugucaac

SEQ ID NO: 130058 - RNA, 25 nt, Human
cuccacugcucucagccucccaacc

SEQ ID NO: 130059 - RNA, 32 nt, Human
cuccacugcugcucugcugccugcccgcacag

SEQ ID NO: 130060 - RNA, 32 nt, Human
cuccacugcuucucuccccauccacaauggag

SEQ ID NO: 130061 - RNA, 32 nt, Human
cuccacuggagcggaagggcugugugucaaaa

SEQ ID NO: 130062 - RNA, 21 nt, Human
cuccacuggauaagcauuuua

SEQ ID NO: 130063 - RNA, 32 nt, Human
cuccacuggccucugcuguuccugucuuugcu

SEQ ID NO: 130064 - RNA, 32 nt, Human
cuccacugggcccugugcugcaaagguaaagg

SEQ ID NO: 130065 - RNA, 32 nt, Human
cuccacuguaauccgaauacuuugccagugca

SEQ ID NO: 130066 - RNA, 32 nt, Human
cuccacuguacccagucucaaaggccagguug

SEQ ID NO: 130067 - RNA, 32 nt, Human
cuccacuguaccgggggcugaggcccagggag

SEQ ID NO: 130068 - RNA, 32 nt, Human
cuccacugugcuauuuuucagaagaauaugag

SEQ ID NO: 130069 - RNA, 32 nt, Human
cuccacuuaccacaacuugugccuccuggguu

SEQ ID NO: 130070 - RNA, 32 nt, Human
cuccacuucagaaagaaagcaagaggcacgug

SEQ ID NO: 130071 - RNA, 32 nt, Human
cuccacuucauaaugucauaaaagccaccugg

SEQ ID NO: 130072 - RNA, 32 nt, Human
cuccacuucauguuauuuucuucccuucccau

SEQ ID NO: 130073 - RNA, 32 nt, Human
cuccacuuccaaguggccagugauuuguuaaa

SEQ ID NO: 130074 - RNA, 20 nt, Human
cuccacuuccagaagccagg

SEQ ID NO: 130075 - RNA, 32 nt, Human
cuccacuucccagcccuuccuugccccugaca

SEQ ID NO: 130076 - RNA, 32 nt, Human
cuccacuuccccagaggaggugaauaugaacc

SEQ ID NO: 130077 - RNA, 32 nt, Human
cuccacuuccccuucuguccugggugaguuac

SEQ ID NO: 130078 - RNA, 32 nt, Human
cuccacuuccuucacauccuccuccgccuccu

SEQ ID NO: 130079 - RNA, 32 nt, Human
cuccacuucguuuucacagcagucccgggaca

SEQ ID NO: 130080 - RNA, 32 nt, Human
cuccacuucugccucccucuuccacuguuuuu

SEQ ID NO: 130081 - RNA, 23 nt, Human
cuccacuuuaccguuagcacgga

SEQ ID NO: 130082 - RNA, 23 nt, Human
cuccacuuucugagccucagaca

SEQ ID NO: 130083 - RNA, 21 nt, Human
cuccacuuugaccuggcugca

SEQ ID NO: 130084 - RNA, 22 nt, Human
cuccacuuugagaaauccugac

SEQ ID NO: 130085 - RNA, 32 nt, Human
cuccacuuugccacaguaccacugccaccaug

SEQ ID NO: 130086 - RNA, 21 nt, Human
cuccacuuugcugccccggca

SEQ ID NO: 130087 - RNA, 32 nt, Human
cuccacuuuuagcucaucgcaccaauauugca

SEQ ID NO: 130088 - RNA, 32 nt, Human
cuccacuuuuucucaguauuacuuugccuuag

SEQ ID NO: 130089 - RNA, 32 nt, Human
cuccagaaagcaccaaggaaaaagcagagaau

SEQ ID NO: 130090 - RNA, 17 nt, Human
cuccagaaccaagcaga

SEQ ID NO: 130091 - RNA, 28 nt, Human
cuccagaacccaacugccucaucccgca

SEQ ID NO: 130092 - RNA, 32 nt, Human
cuccagaagaacugagacacagcagcacauuc

SEQ ID NO: 130093 - RNA, 32 nt, Human
cuccagaagagacugugcuggguguggcuugg

SEQ ID NO: 130094 - RNA, 32 nt, Human
cuccagaagauagcuucaccccaaucccagcu

SEQ ID NO: 130095 - RNA, 32 nt, Human
cuccagaagcucacccugaccucuccuuuuca

SEQ ID NO: 130096 - RNA, 32 nt, Human
cuccagaagcugcccagggcuccgggacccca

SEQ ID NO: 130097 - RNA, 32 nt, Human
cuccagaagggccagcugggcauauucugaga

SEQ ID NO: 130098 - RNA, 32 nt, Human
cuccagaaggucauuccagauccagagauccc

SEQ ID NO: 130099 - RNA, 22 nt, Human
cuccagaaguccagacaccucc

SEQ ID NO: 130100 - RNA, 32 nt, Human
cuccagaauaagagugggacagcucagaaaga

SEQ ID NO: 130101 - RNA, 24 nt, Human
cuccagaauagcugggauuacagg

SEQ ID NO: 130102 - RNA, 32 nt, Human
cuccagaauagcugggauuacaggcguacacc

SEQ ID NO: 130103 - RNA, 32 nt, Human
cuccagaauuaacaagaaagccaucucuuccu

SEQ ID NO: 130104 - RNA, 32 nt, Human
cuccagacacugcgcccuccacccucacucug

SEQ ID NO: 130105 - RNA, 32 nt, Human
cuccagacagcaccagcucacagacgcucuug

SEQ ID NO: 130106 - RNA, 32 nt, Human
cuccagacagccgccuuugcugcccagaggug

SEQ ID NO: 130107 - RNA, 19 nt, Human
cuccagacauuguauuuua

SEQ ID NO: 130108 - RNA, 32 nt, Human
cuccagacauuuuguucuugaaucugugagac

SEQ ID NO: 130109 - RNA, 32 nt, Human
cuccagaccacaggacugcagccuggggcuuc

SEQ ID NO: 130110 - RNA, 32 nt, Human
cuccagaccagccuggccaacauggcgaaacc

SEQ ID NO: 130111 - RNA, 21 nt, Human
cuccagacccacuugcacccu

SEQ ID NO: 130112 - RNA, 32 nt, Human
cuccagaccccuacccuuucccaaacccuucg

SEQ ID NO: 130113 - RNA, 19 nt, Human
cuccagacccgccgcugcc

SEQ ID NO: 130114 - RNA, 32 nt, Human
cuccagacccuugcuucucucuccugcagagg

SEQ ID NO: 130115 - RNA, 32 nt, Human
cuccagacucccguucagauccgauuuuggac

SEQ ID NO: 130116 - RNA, 17 nt, Human
cuccagacuugcauuuu

SEQ ID NO: 130117 - RNA, 32 nt, Human
cuccagagaagugccacgggaggcagaagucc

SEQ ID NO: 130118 - RNA, 32 nt, Human
cuccagagacacaccguuccacuuacaguauc

SEQ ID NO: 130119 - RNA, 28 nt, Human
cuccagagaccuguugccucaucucuuu

SEQ ID NO: 130120 - RNA, 32 nt, Human
cuccagagagucaggucaaccccgaggacccc

SEQ ID NO: 130121 - RNA, 32 nt, Human
cuccagagagugaacagucuuccagaucuggg

SEQ ID NO: 130122 - RNA, 32 nt, Human
cuccagagagugaggagggggccugagacugg

SEQ ID NO: 130123 - RNA, 32 nt, Human
cuccagagcaucacgccuccuccagcacagga

SEQ ID NO: 130124 - RNA, 32 nt, Human
cuccagagccugggcgacagagcgagacucca

SEQ ID NO: 130125 - RNA, 32 nt, Human
cuccagaggaccucgcccuggagcugagccug

SEQ ID NO: 130126 - RNA, 32 nt, Human
cuccagaggccagaagcucguccaccaccaaa

SEQ ID NO: 130127 - RNA, 32 nt, Human
cuccagagggcucaaugagcagccagguagug

SEQ ID NO: 130128 - RNA, 32 nt, Human
cuccagagguggaccugggcucugcuugcuuu

SEQ ID NO: 130129 - RNA, 32 nt, Human
cuccagaguagcuggaauuacaggcacaugac

SEQ ID NO: 130130 - RNA, 32 nt, Human
cuccagaguagcugggacuacaggcacacacc

SEQ ID NO: 130131 - RNA, 32 nt, Human
cuccagaguagcugggacuacaggcacccgcc

SEQ ID NO: 130132 - RNA, 32 nt, Human
cuccagaguagcugggacuacaggcaugugau

SEQ ID NO: 130133 - RNA, 24 nt, Human
cuccagaguagcugggauuacagg

SEQ ID NO: 130134 - RNA, 32 nt, Human
cuccagaguagcugggauuacaggcaccuaca

SEQ ID NO: 130135 - RNA, 32 nt, Human
cuccagaguagcugggauuacaggcaccugac

SEQ ID NO: 130136 - RNA, 32 nt, Human
cuccagaguagcugggauuacaggcacgcaca

SEQ ID NO: 130137 - RNA, 32 nt, Human
cuccagaguagcugggauuacaggcacgugcc

SEQ ID NO: 130138 - RNA, 32 nt, Human
cuccagaguagcugggauuacaggcaugcgcc

SEQ ID NO: 130139 - RNA, 32 nt, Human
cuccagaguagcugggauuacaggcgcccgcc

SEQ ID NO: 130140 - RNA, 32 nt, Human
cuccagaguagcugggauuuuaggugugcacc

SEQ ID NO: 130141 - RNA, 32 nt, Human
cuccagauaaggcgccaugagcagagaaggga

SEQ ID NO: 130142 - RNA, 32 nt, Human
cuccagauagccacugccuuuuccucaaggga

SEQ ID NO: 130143 - RNA, 18 nt, Human
cuccagauauuauuuuua

SEQ ID NO: 130144 - RNA, 32 nt, Human
cuccagauauucuaguuggaacuuuuucugau

SEQ ID NO: 130145 - RNA, 32 nt, Human
cuccagaucacacacaugcacacacacauaug

SEQ ID NO: 130146 - RNA, 32 nt, Human
cuccagaucacuuauuauggugugaaacucuu

SEQ ID NO: 130147 - RNA, 32 nt, Human
cuccagaucguacugagaagcacuccacaaug

SEQ ID NO: 130148 - RNA, 32 nt, Human
cuccagaucucaguguggcucucucuggagac

SEQ ID NO: 130149 - RNA, 32 nt, Human
cuccagaugacauuggcuccagcuuuuauccu

SEQ ID NO: 130150 - RNA, 32 nt, Human
cuccagaugagcacccugagguuuagagagau

SEQ ID NO: 130151 - RNA, 32 nt, Human
cuccagaugaggugcuccguggaacacgagga

SEQ ID NO: 130152 - RNA, 20 nt, Human
cuccagaugcagccccaucu

SEQ ID NO: 130153 - RNA, 32 nt, Human
cuccagaugcagccccaucuccucagcacccc

SEQ ID NO: 130154 - RNA, 19 nt, Human
cuccagaugccaaauuuua

SEQ ID NO: 130155 - RNA, 22 nt, Human
cuccagauggagaaacaggcuc

SEQ ID NO: 130156 - RNA, 21 nt, Human
cuccagauguuucucauuuua

SEQ ID NO: 130157 - RNA, 32 nt, Human
cuccagauucaagugauccucccaucucagcc

SEQ ID NO: 130158 - RNA, 32 nt, Human
cuccagauugccuggugaucuauuuuguuucc

SEQ ID NO: 130159 - RNA, 21 nt, Human
cuccagauuuaugaacauuuu

SEQ ID NO: 130160 - RNA, 32 nt, Human
cuccagcaaacuccaacagauuaauucauuga

SEQ ID NO: 130161 - RNA, 32 nt, Human
cuccagcaacagcagcagcagcuccagcaguu

SEQ ID NO: 130162 - RNA, 32 nt, Human
cuccagcaagaggcugguuggcgugcugucug

SEQ ID NO: 130163 - RNA, 32 nt, Human
cuccagcaaggggguggucucaaggggucaag

SEQ ID NO: 130164 - RNA, 32 nt, Human
cuccagcaagugaaccgcucuguccuuuuuaa

SEQ ID NO: 130165 - RNA, 23 nt, Human
cuccagcaauugcugacauugua

SEQ ID NO: 130166 - RNA, 32 nt, Human
cuccagcacaccugucuccuccugccuggggu

SEQ ID NO: 130167 - RNA, 32 nt, Human
cuccagcacagcguuggugcugccuggguauc

SEQ ID NO: 130168 - RNA, 32 nt, Human
cuccagcacaugcacacagcaugcacacacac

SEQ ID NO: 130169 - RNA, 32 nt, Human
cuccagcacccagggauggagagucaugggga

SEQ ID NO: 130170 - RNA, 32 nt, Human
cuccagcacccugagaugcugugugauauguc

SEQ ID NO: 130171 - RNA, 32 nt, Human
cuccagcaccucagucuaaucaguaaaaguca

SEQ ID NO: 130172 - RNA, 32 nt, Human
cuccagcacgaccaugagcuucuccuccucau

SEQ ID NO: 130173 - RNA, 32 nt, Human
cuccagcacucggcucccuccugcgcccccgc

SEQ ID NO: 130174 - RNA, 22 nt, Human
cuccagcacugcccccguggca

SEQ ID NO: 130175 - RNA, 23 nt, Human
cuccagcacuggaggaccauugc

SEQ ID NO: 130176 - RNA, 22 nt, Human
cuccagcacuggccgccggcgu

SEQ ID NO: 130177 - RNA, 32 nt, Human
cuccagcacuggcgcagacucugacuggugca

SEQ ID NO: 130178 - RNA, 22 nt, Human
cuccagcacuuugggaggccga

SEQ ID NO: 130179 - RNA, 32 nt, Human
cuccagcagaaacacaggcccaagucugcgga

SEQ ID NO: 130180 - RNA, 32 nt, Human
cuccagcagacuccugcucucuauccaaaaua

SEQ ID NO: 130181 - RNA, 32 nt, Human
cuccagcagcagugggagaggcacugcucugg

SEQ ID NO: 130182 - RNA, 32 nt, Human
cuccagcagcaucuuccagccuuggcacagaa

SEQ ID NO: 130183 - RNA, 32 nt, Human
cuccagcagccugacccucgugcccugucuca

SEQ ID NO: 130184 - RNA, 32 nt, Human
cuccagcagcucccuucuuccuucccucugug

SEQ ID NO: 130185 - RNA, 32 nt, Human
cuccagcagcuccgcgcccucccaggcacccg

SEQ ID NO: 130186 - RNA, 32 nt, Human
cuccagcagcuggcuggagcccgcgaugacgu

SEQ ID NO: 130187 - RNA, 32 nt, Human
cuccagcaggcagaggagaucaugaccaggaa

SEQ ID NO: 130188 - RNA, 31 nt, Human
cuccagcaguuucgccuccugacucucacca

SEQ ID NO: 130189 - RNA, 26 nt, Human
cuccagcaucccagcuccugcacucu

SEQ ID NO: 130190 - RNA, 32 nt, Human
cuccagcauccucugcuucccccaccacguuc

SEQ ID NO: 130191 - RNA, 22 nt, Human
cuccagcaucugucucaggcca

SEQ ID NO: 130192 - RNA, 21 nt, Human
cuccagcaucugugccccuug

SEQ ID NO: 130193 - RNA, 32 nt, Human
cuccagcaucuucuuccccuucccuggcccug

SEQ ID NO: 130194 - RNA, 32 nt, Human
cuccagcauggugagggguugggcagggaggu

SEQ ID NO: 130195 - RNA, 23 nt, Human
cuccagcauguguggccacugua

SEQ ID NO: 130196 - RNA, 22 nt, Human
cuccagccaaagcaacaagagc

SEQ ID NO: 130197 - RNA, 32 nt, Human
cuccagccaagcucugagggcccaccuccugc

SEQ ID NO: 130198 - RNA, 32 nt, Human
cuccagccaaggacaaaaugcucacaggaggu

SEQ ID NO: 130199 - RNA, 32 nt, Human
cuccagccacagacuucaguuuucuuaccugu

SEQ ID NO: 130200 - RNA, 31 nt, Human
cuccagccacagcaguccacagcagcagggu

SEQ ID NO: 130201 - RNA, 19 nt, Human
cuccagccaccagcccacc

SEQ ID NO: 130202 - RNA, 16 nt, Human
cuccagccaccgggug

SEQ ID NO: 130203 - RNA, 32 nt, Human
cuccagccacugcccuggccucagcauaucag

SEQ ID NO: 130204 - RNA, 32 nt, Human
cuccagccacugcgacccggcgaagagaaaaa

SEQ ID NO: 130205 - RNA, 32 nt, Human
cuccagccagcucugccccacagggaaggagc

SEQ ID NO: 130206 - RNA, 32 nt, Human
cuccagccagcuggaggaaggaagggcgggcu

SEQ ID NO: 130207 - RNA, 32 nt, Human
cuccagccaggacugcccugagccgcaaaaug

SEQ ID NO: 130208 - RNA, 21 nt, Human
cuccagccagggcaacagagu

SEQ ID NO: 130209 - RNA, 32 nt, Human
cuccagccaucccacaccagcuccuaggcacu

SEQ ID NO: 130210 - RNA, 32 nt, Human
cuccagcccacacagucuccccaguccacuuu

SEQ ID NO: 130211 - RNA, 32 nt, Human
cuccagcccaggacuucgaggcugcaaugagc

SEQ ID NO: 130212 - RNA, 22 nt, Human
cuccagcccaggcaacagagcg

SEQ ID NO: 130213 - RNA, 32 nt, Human
cuccagcccaggcaacagagcgugacuccguc

SEQ ID NO: 130214 - RNA, 21 nt, Human
cuccagcccaggcaacagagu

SEQ ID NO: 130215 - RNA, 23 nt, Human
cuccagcccaggcaacagaguga

SEQ ID NO: 130216 - RNA, 24 nt, Human
cuccagcccaggcuggagugcagu

SEQ ID NO: 130217 - RNA, 26 nt, Human
cuccagcccaggcuggagugcagugg

SEQ ID NO: 130218 - RNA, 32 nt, Human
cuccagcccaggcuggagugcaguggcaugau

SEQ ID NO: 130219 - RNA, 23 nt, Human
cuccagcccagguaacacagcga

SEQ ID NO: 130220 - RNA, 21 nt, Human
cuccagcccagguaacagagu

SEQ ID NO: 130221 - RNA, 23 nt, Human
cuccagcccagguaacagaguga

SEQ ID NO: 130222 - RNA, 23 nt, Human
cuccagcccaggugacagagcga

SEQ ID NO: 130223 - RNA, 23 nt, Human
cuccagcccaggugacagaggga

SEQ ID NO: 130224 - RNA, 23 nt, Human
cuccagcccaggugacagaguga

SEQ ID NO: 130225 - RNA, 32 nt, Human
cuccagcccaucaggggcaggcccugggaccg

SEQ ID NO: 130226 - RNA, 21 nt, Human
cuccagccccagcccaggugg

SEQ ID NO: 130227 - RNA, 18 nt, Human
cuccagcccccagccccc

SEQ ID NO: 130228 - RNA, 32 nt, Human
cuccagccccuccuccccacaaccccuagugg

SEQ ID NO: 130229 - RNA, 32 nt, Human
cuccagccccugcccguuucucuccaugagug

SEQ ID NO: 130230 - RNA, 32 nt, Human
cuccagccccuuucugggauccuggccacguc

SEQ ID NO: 130231 - RNA, 32 nt, Human
cuccagcccggcacuccagccuggcgacaaga

SEQ ID NO: 130232 - RNA, 32 nt, Human
cuccagcccggccuggccgccagggagcgcca

SEQ ID NO: 130233 - RNA, 21 nt, Human
cuccagcccgggcgacagagc

SEQ ID NO: 130234 - RNA, 23 nt, Human
cuccagcccgggcgacagagcga

SEQ ID NO: 130235 - RNA, 23 nt, Human
cuccagcccgggcgacagaguga

SEQ ID NO: 130236 - RNA, 32 nt, Human
cuccagcccggggacagagcaagacacugucu

SEQ ID NO: 130237 - RNA, 21 nt, Human
cuccagcccgggugacagagc

SEQ ID NO: 130238 - RNA, 23 nt, Human
cuccagcccgggugacagagcga

SEQ ID NO: 130239 - RNA, 23 nt, Human
cuccagcccgggugacagaguga

SEQ ID NO: 130240 - RNA, 32 nt, Human
cuccagcccucgcuaugugccucugccaucuu

SEQ ID NO: 130241 - RNA, 32 nt, Human
cuccagcccugcguuuccauucugccuucuca

SEQ ID NO: 130242 - RNA, 24 nt, Human
cuccagcccuuucucugugccuuc

SEQ ID NO: 130243 - RNA, 24 nt, Human
cuccagccgagagaagccaggcca

SEQ ID NO: 130244 - RNA, 21 nt, Human
cuccagccgccgccgccgccg

SEQ ID NO: 130245 - RNA, 17 nt, Human
cuccagccgccgcgcuc

SEQ ID NO: 130246 - RNA, 32 nt, Human
cuccagccggagcugggacuguucagucacug

SEQ ID NO: 130247 - RNA, 20 nt, Human
cuccagccuaagcaacagag

SEQ ID NO: 130248 - RNA, 32 nt, Human
cuccagccuagagguacuuuccacuugauuuu

SEQ ID NO: 130249 - RNA, 22 nt, Human
cuccagccuaggcaacaagagc

SEQ ID NO: 130250 - RNA, 24 nt, Human
cuccagccuaggcaacaagagcga

SEQ ID NO: 130251 - RNA, 24 nt, Human
cuccagccuaggcaacaagaguga

SEQ ID NO: 130252 - RNA, 20 nt, Human
cuccagccuaggcaacagag

SEQ ID NO: 130253 - RNA, 21 nt, Human
cuccagccuaggcaacagagc

SEQ ID NO: 130254 - RNA, 23 nt, Human
cuccagccuaggcaacagaggga

SEQ ID NO: 130255 - RNA, 21 nt, Human
cuccagccuaggcaacagagu

SEQ ID NO: 130256 - RNA, 23 nt, Human
cuccagccuaggcaacagaguga

SEQ ID NO: 130257 - RNA, 22 nt, Human
cuccagccuaggcaauaagagc

SEQ ID NO: 130258 - RNA, 23 nt, Human
cuccagccuaggcgacagagcga

SEQ ID NO: 130259 - RNA, 23 nt, Human
cuccagccuaggcgacagaguga

SEQ ID NO: 130260 - RNA, 23 nt, Human
cuccagccuaggugacagagcga

SEQ ID NO: 130261 - RNA, 23 nt, Human
cuccagccuaggugacagaguga

SEQ ID NO: 130262 - RNA, 32 nt, Human
cuccagccucaccugcacaccccagcccugca

SEQ ID NO: 130263 - RNA, 24 nt, Human
cuccagccucagcaacaagaguga

SEQ ID NO: 130264 - RNA, 32 nt, Human
cuccagccucagccucccgaauagcugggauu

SEQ ID NO: 130265 - RNA, 19 nt, Human
cuccagccucauucucucu

SEQ ID NO: 130266 - RNA, 32 nt, Human
cuccagccuccaacuccugggcucaagcaauc

SEQ ID NO: 130267 - RNA, 32 nt, Human
cuccagccuccacccucgcauccccagcuguc

SEQ ID NO: 130268 - RNA, 32 nt, Human
cuccagccuccacggggaccccagcgucuucc

SEQ ID NO: 130269 - RNA, 32 nt, Human
cuccagccuccaggaacccgaggggacaccag

SEQ ID NO: 130270 - RNA, 32 nt, Human
cuccagccuccgccggcggagcccacuaugcc

SEQ ID NO: 130271 - RNA, 20 nt, Human
cuccagccucugccgcugcc

SEQ ID NO: 130272 - RNA, 32 nt, Human
cuccagccugaacagaagcucuuacucuuucc

SEQ ID NO: 130273 - RNA, 32 nt, Human
cuccagccugaagacagagcaaggcuccaucu

SEQ ID NO: 130274 - RNA, 32 nt, Human
cuccagccugacucccugucugcccuuucacc

SEQ ID NO: 130275 - RNA, 23 nt, Human
cuccagccugagcaacacaguga

SEQ ID NO: 130276 - RNA, 20 nt, Human
cuccagccugagcaacagag

SEQ ID NO: 130277 - RNA, 21 nt, Human
cuccagccugagcaacagagu

SEQ ID NO: 130278 - RNA, 32 nt, Human
cuccagccugagcacagagcaagacucuuaaa

SEQ ID NO: 130279 - RNA, 20 nt, Human
cuccagccugagcagcagag

SEQ ID NO: 130280 - RNA, 32 nt, Human
cuccagccugaugacagagcaagacucagucu

SEQ ID NO: 130281 - RNA, 24 nt, Human
cuccagccugcacaacaagaguga

SEQ ID NO: 130282 - RNA, 20 nt, Human
cuccagccugcgcaacagag

SEQ ID NO: 130283 - RNA, 32 nt, Human
cuccagccugcggacagaccaagacuucaucc

SEQ ID NO: 130284 - RNA, 22 nt, Human
cuccagccuggacaacaagagc

SEQ ID NO: 130285 - RNA, 24 nt, Human
cuccagccuggacaacaagagcga

SEQ ID NO: 130286 - RNA, 23 nt, Human
cuccagccuggacaacacaguga

SEQ ID NO: 130287 - RNA, 19 nt, Human
cuccagccuggacaacaga

SEQ ID NO: 130288 - RNA, 20 nt, Human
cuccagccuggacaacagag

SEQ ID NO: 130289 - RNA, 21 nt, Human
cuccagccuggacaacagagu

SEQ ID NO: 130290 - RNA, 21 nt, Human
cuccagccuggacaacauagu

SEQ ID NO: 130291 - RNA, 23 nt, Human
cuccagccuggacaacauaguga

SEQ ID NO: 130292 - RNA, 21 nt, Human
cuccagccuggacaacggagu

SEQ ID NO: 130293 - RNA, 24 nt, Human
cuccagccuggacagcaggagcga

SEQ ID NO: 130294 - RNA, 20 nt, Human
cuccagccuggauaacagag

SEQ ID NO: 130295 - RNA, 24 nt, Human
cuccagccuggaugacaagaguga

SEQ ID NO: 130296 - RNA, 21 nt, Human
cuccagccuggaugacagcga

SEQ ID NO: 130297 - RNA, 20 nt, Human
cuccagccuggcaacagagc

SEQ ID NO: 130298 - RNA, 32 nt, Human
cuccagccuggcaacagagcaagacccugucu

SEQ ID NO: 130299 - RNA, 32 nt, Human
cuccagccuggcaacagagcaagacuccgucu

SEQ ID NO: 130300 - RNA, 32 nt, Human
cuccagccuggcaacagagcaaggcuccgucu

SEQ ID NO: 130301 - RNA, 22 nt, Human
cuccagccuggcaacagagcga

SEQ ID NO: 130302 - RNA, 32 nt, Human
cuccagccuggcaacagagcgagacuccaucu

SEQ ID NO: 130303 - RNA, 32 nt, Human
cuccagccuggcaacagagcgagacuccgucu

SEQ ID NO: 130304 - RNA, 22 nt, Human
cuccagccuggcaacagaguga

SEQ ID NO: 130305 - RNA, 22 nt, Human
cuccagccuggcaauagaccga

SEQ ID NO: 130306 - RNA, 32 nt, Human
cuccagccuggcagacagagggaagauauguu

SEQ ID NO: 130307 - RNA, 22 nt, Human
cuccagccuggccucacugucc

SEQ ID NO: 130308 - RNA, 26 nt, Human
cuccagccuggccugggcaacagagc

SEQ ID NO: 130309 - RNA, 22 nt, Human
cuccagccuggcgacaaagcga

SEQ ID NO: 130310 - RNA, 23 nt, Human
cuccagccuggcgacaagagcga

SEQ ID NO: 130311 - RNA, 23 nt, Human
cuccagccuggcgacaagaguga

SEQ ID NO: 130312 - RNA, 22 nt, Human
cuccagccuggcgacagagaga

SEQ ID NO: 130313 - RNA, 20 nt, Human
cuccagccuggcgacagagc

SEQ ID NO: 130314 - RNA, 32 nt, Human
cuccagccuggcgacagagcaagacuccaucc

SEQ ID NO: 130315 - RNA, 32 nt, Human
cuccagccuggcgacagagcaagacuccaucu

SEQ ID NO: 130316 - RNA, 32 nt, Human
cuccagccuggcgacagagcaagacucugucu

SEQ ID NO: 130317 - RNA, 32 nt, Human
cuccagccuggcgacagagcaagacuucgucu

SEQ ID NO: 130318 - RNA, 32 nt, Human
cuccagccuggcgacagagcaagucuccgucu

SEQ ID NO: 130319 - RNA, 22 nt, Human
cuccagccuggcgacagagcga

SEQ ID NO: 130320 - RNA, 32 nt, Human
cuccagccuggcgacagagcgagacucccucu

SEQ ID NO: 130321 - RNA, 32 nt, Human
cuccagccuggcgacagagcgagacuccgucu

SEQ ID NO: 130322 - RNA, 32 nt, Human
cuccagccuggcgacagagcgagacucgucuc

SEQ ID NO: 130323 - RNA, 32 nt, Human
cuccagccuggcgacagagcgagacucugucu

SEQ ID NO: 130324 - RNA, 32 nt, Human
cuccagccuggcgacagagcgagacuugguuu

SEQ ID NO: 130325 - RNA, 22 nt, Human
cuccagccuggcgacagaggga

SEQ ID NO: 130326 - RNA, 22 nt, Human
cuccagccuggcgacagaguga

SEQ ID NO: 130327 - RNA, 32 nt, Human
cuccagccugggaaaaguucuccuuauuuguu

SEQ ID NO: 130328 - RNA, 20 nt, Human
cuccagccugggaaacagag

SEQ ID NO: 130329 - RNA, 23 nt, Human
cuccagccugggagacacagcga

SEQ ID NO: 130330 - RNA, 23 nt, Human
cuccagccugggagauacagcga

SEQ ID NO: 130331 - RNA, 32 nt, Human
cuccagccugggcaaaaagagccagacuccgu

SEQ ID NO: 130332 - RNA, 23 nt, Human
cuccagccugggcaacaaaacga

SEQ ID NO: 130333 - RNA, 20 nt, Human
cuccagccugggcaacaaag

SEQ ID NO: 130334 - RNA, 21 nt, Human
cuccagccugggcaacaaagc

SEQ ID NO: 130335 - RNA, 21 nt, Human
cuccagccugggcaacaaagu

SEQ ID NO: 130336 - RNA, 23 nt, Human
cuccagccugggcaacaaaguga

SEQ ID NO: 130337 - RNA, 24 nt, Human
cuccagccugggcaacaacaguga

SEQ ID NO: 130338 - RNA, 19 nt, Human
cuccagccugggcaacaag

SEQ ID NO: 130339 - RNA, 20 nt, Human
cuccagccugggcaacaaga

SEQ ID NO: 130340 - RNA, 24 nt, Human
cuccagccugggcaacaagaauga

SEQ ID NO: 130341 - RNA, 21 nt, Human
cuccagccugggcaacaagag

SEQ ID NO: 130342 - RNA, 24 nt, Human
cuccagccugggcaacaagagaga

SEQ ID NO: 130343 - RNA, 22 nt, Human
cuccagccugggcaacaagagc

SEQ ID NO: 130344 - RNA, 24 nt, Human
cuccagccugggcaacaagagcga

SEQ ID NO: 130345 - RNA, 23 nt, Human
cuccagccugggcaacaagagga

SEQ ID NO: 130346 - RNA, 24 nt, Human
cuccagccugggcaacaagaggga

SEQ ID NO: 130347 - RNA, 22 nt, Human
cuccagccugggcaacaagagu

SEQ ID NO: 130348 - RNA, 24 nt, Human
cuccagccugggcaacaagaguga

SEQ ID NO: 130349 - RNA, 24 nt, Human
cuccagccugggcaacaagagugg

SEQ ID NO: 130350 - RNA, 22 nt, Human
cuccagccugggcaacaagcga

SEQ ID NO: 130351 - RNA, 22 nt, Human
cuccagccugggcaacaagggc

SEQ ID NO: 130352 - RNA, 20 nt, Human
cuccagccugggcaacaagu

SEQ ID NO: 130353 - RNA, 24 nt, Human
cuccagccugggcaacaagugcga

SEQ ID NO: 130354 - RNA, 22 nt, Human
cuccagccugggcaacacagag

SEQ ID NO: 130355 - RNA, 21 nt, Human
cuccagccugggcaacacagc

SEQ ID NO: 130356 - RNA, 23 nt, Human
cuccagccugggcaacacagcga

SEQ ID NO: 130357 - RNA, 23 nt, Human
cuccagccugggcaacacaguga

SEQ ID NO: 130358 - RNA, 19 nt, Human
cuccagccugggcaacaga

SEQ ID NO: 130359 - RNA, 23 nt, Human
cuccagccugggcaacagaacga

SEQ ID NO: 130360 - RNA, 21 nt, Human
cuccagccugggcaacagaag

SEQ ID NO: 130361 - RNA, 23 nt, Human
cuccagccugggcaacagaauga

SEQ ID NO: 130362 - RNA, 24 nt, Human
cuccagccugggcaacagacagag

SEQ ID NO: 130363 - RNA, 20 nt, Human
cuccagccugggcaacagag

SEQ ID NO: 130364 - RNA, 23 nt, Human
cuccagccugggcaacagagaga

SEQ ID NO: 130365 - RNA, 21 nt, Human
cuccagccugggcaacagagc

SEQ ID NO: 130366 - RNA, 23 nt, Human
cuccagccugggcaacagagcga

SEQ ID NO: 130367 - RNA, 23 nt, Human
cuccagccugggcaacagaggga

SEQ ID NO: 130368 - RNA, 21 nt, Human
cuccagccugggcaacagagu

SEQ ID NO: 130369 - RNA, 23 nt, Human
cuccagccugggcaacagaguga

SEQ ID NO: 130370 - RNA, 23 nt, Human
cuccagccugggcaacagagugg

SEQ ID NO: 130371 - RNA, 22 nt, Human
cuccagccugggcaacagauga

SEQ ID NO: 130372 - RNA, 21 nt, Human
cuccagccugggcaacagcga

SEQ ID NO: 130373 - RNA, 22 nt, Human
cuccagccugggcaacaggagu

SEQ ID NO: 130374 - RNA, 20 nt, Human
cuccagccugggcaacaggg

SEQ ID NO: 130375 - RNA, 21 nt, Human
cuccagccugggcaacagggc

SEQ ID NO: 130376 - RNA, 24 nt, Human
cuccagccugggcaacagguaaga

SEQ ID NO: 130377 - RNA, 22 nt, Human
cuccagccugggcaacagguga

SEQ ID NO: 130378 - RNA, 22 nt, Human
cuccagccugggcaacagugag

SEQ ID NO: 130379 - RNA, 21 nt, Human
cuccagccugggcaacagugu

SEQ ID NO: 130380 - RNA, 23 nt, Human
cuccagccugggcaacaguguga

SEQ ID NO: 130381 - RNA, 21 nt, Human
cuccagccugggcaacauagc

SEQ ID NO: 130382 - RNA, 21 nt, Human
cuccagccugggcaacauagu

SEQ ID NO: 130383 - RNA, 23 nt, Human
cuccagccugggcaacauaguga

SEQ ID NO: 130384 - RNA, 19 nt, Human
cuccagccugggcaacgag

SEQ ID NO: 130385 - RNA, 21 nt, Human
cuccagccugggcaacgagag

SEQ ID NO: 130386 - RNA, 24 nt, Human
cuccagccugggcaacgagaggga

SEQ ID NO: 130387 - RNA, 24 nt, Human
cuccagccugggcaacgagaguga

SEQ ID NO: 130388 - RNA, 20 nt, Human
cuccagccugggcaacgagc

SEQ ID NO: 130389 - RNA, 22 nt, Human
cuccagccugggcaacgagcga

SEQ ID NO: 130390 - RNA, 20 nt, Human
cuccagccugggcaacgagu

SEQ ID NO: 130391 - RNA, 22 nt, Human
cuccagccugggcaacgaguga

SEQ ID NO: 130392 - RNA, 20 nt, Human
cuccagccugggcaacggag

SEQ ID NO: 130393 - RNA, 21 nt, Human
cuccagccugggcaacggagc

SEQ ID NO: 130394 - RNA, 23 nt, Human
cuccagccugggcaacggaguga

SEQ ID NO: 130395 - RNA, 22 nt, Human
cuccagccugggcaacgggcga

SEQ ID NO: 130396 - RNA, 21 nt, Human
cuccagccugggcaacguagu

SEQ ID NO: 130397 - RNA, 20 nt, Human
cuccagccugggcaacugag

SEQ ID NO: 130398 - RNA, 21 nt, Human
cuccagccugggcaacugagc

SEQ ID NO: 130399 - RNA, 22 nt, Human
cuccagccugggcaauaagagc

SEQ ID NO: 130400 - RNA, 24 nt, Human
cuccagccugggcaauaagagcga

SEQ ID NO: 130401 - RNA, 24 nt, Human
cuccagccugggcaauaagaguga

SEQ ID NO: 130402 - RNA, 21 nt, Human
cuccagccugggcaauagagc

SEQ ID NO: 130403 - RNA, 21 nt, Human
cuccagccugggcaauagagu

SEQ ID NO: 130404 - RNA, 23 nt, Human
cuccagccugggcaauagaguga

SEQ ID NO: 130405 - RNA, 21 nt, Human
cuccagccugggcaauagggc

SEQ ID NO: 130406 - RNA, 21 nt, Human
cuccagccugggcaauagggu

SEQ ID NO: 130407 - RNA, 21 nt, Human
cuccagccugggcaauauagc

SEQ ID NO: 130408 - RNA, 23 nt, Human
cuccagccugggcaauggaguga

SEQ ID NO: 130409 - RNA, 20 nt, Human
cuccagccugggcaccagag

SEQ ID NO: 130410 - RNA, 22 nt, Human
cuccagccugggcagcaagagc

SEQ ID NO: 130411 - RNA, 20 nt, Human
cuccagccugggcagcagag

SEQ ID NO: 130412 - RNA, 21 nt, Human
cuccagccugggcagcagagc

SEQ ID NO: 130413 - RNA, 22 nt, Human
cuccagccugggcagcagagga

SEQ ID NO: 130414 - RNA, 21 nt, Human
cuccagccugggcagcagagu

SEQ ID NO: 130415 - RNA, 23 nt, Human
cuccagccugggcagcagaguga

SEQ ID NO: 130416 - RNA, 19 nt, Human
cuccagccugggccacaag

SEQ ID NO: 130417 - RNA, 23 nt, Human
cuccagccugggcgaaagagcga

SEQ ID NO: 130418 - RNA, 21 nt, Human
cuccagccugggcgacaaagc

SEQ ID NO: 130419 - RNA, 23 nt, Human
cuccagccugggcgacaaagcga

SEQ ID NO: 130420 - RNA, 23 nt, Human
cuccagccugggcgacaaaguga

SEQ ID NO: 130421 - RNA, 22 nt, Human
cuccagccugggcgacaagagc

SEQ ID NO: 130422 - RNA, 24 nt, Human
cuccagccugggcgacaagagcga

SEQ ID NO: 130423 - RNA, 24 nt, Human
cuccagccugggcgacaagaggga

SEQ ID NO: 130424 - RNA, 24 nt, Human
cuccagccugggcgacaagaguga

SEQ ID NO: 130425 - RNA, 21 nt, Human
cuccagccugggcgacacagc

SEQ ID NO: 130426 - RNA, 23 nt, Human
cuccagccugggcgacacagcga

SEQ ID NO: 130427 - RNA, 23 nt, Human
cuccagccugggcgacagaacga

SEQ ID NO: 130428 - RNA, 23 nt, Human
cuccagccugggcgacagaauga

SEQ ID NO: 130429 - RNA, 23 nt, Human
cuccagccugggcgacagaccga

SEQ ID NO: 130430 - RNA, 20 nt, Human
cuccagccugggcgacagag

SEQ ID NO: 130431 - RNA, 23 nt, Human
cuccagccugggcgacagagaga

SEQ ID NO: 130432 - RNA, 21 nt, Human
cuccagccugggcgacagagc

SEQ ID NO: 130433 - RNA, 23 nt, Human
cuccagccugggcgacagagcga

SEQ ID NO: 130434 - RNA, 23 nt, Human
cuccagccugggcgacagaggga

SEQ ID NO: 130435 - RNA, 21 nt, Human
cuccagccugggcgacagagu

SEQ ID NO: 130436 - RNA, 23 nt, Human
cuccagccugggcgacagaguga

SEQ ID NO: 130437 - RNA, 21 nt, Human
cuccagccugggcgacagggc

SEQ ID NO: 130438 - RNA, 21 nt, Human
cuccagccugggcgacaguga

SEQ ID NO: 130439 - RNA, 21 nt, Human
cuccagccugggcgacagugc

SEQ ID NO: 130440 - RNA, 20 nt, Human
cuccagccugggcgacgagc

SEQ ID NO: 130441 - RNA, 22 nt, Human
cuccagccugggcgacgaguga

SEQ ID NO: 130442 - RNA, 23 nt, Human
cuccagccugggcgacggagcga

SEQ ID NO: 130443 - RNA, 23 nt, Human
cuccagccugggcgacggaguga

SEQ ID NO: 130444 - RNA, 21 nt, Human
cuccagccugggcgauagagc

SEQ ID NO: 130445 - RNA, 23 nt, Human
cuccagccugggcgauagaggga

SEQ ID NO: 130446 - RNA, 23 nt, Human
cuccagccugggcgauagaguga

SEQ ID NO: 130447 - RNA, 20 nt, Human
cuccagccugggcgaugagc

SEQ ID NO: 130448 - RNA, 23 nt, Human
cuccagccugggcgauggagcga

SEQ ID NO: 130449 - RNA, 23 nt, Human
cuccagccugggcgauggaguga

SEQ ID NO: 130450 - RNA, 21 nt, Human
cuccagccugggcggcagagc

SEQ ID NO: 130451 - RNA, 23 nt, Human
cuccagccugggcggcagaguga

SEQ ID NO: 130452 - RNA, 18 nt, Human
cuccagccugggcuacaa

SEQ ID NO: 130453 - RNA, 19 nt, Human
cuccagccugggcuacaag

SEQ ID NO: 130454 - RNA, 22 nt, Human
cuccagccugggcuacaagagc

SEQ ID NO: 130455 - RNA, 22 nt, Human
cuccagccugggcuauaagagc

SEQ ID NO: 130456 - RNA, 20 nt, Human
cuccagccuggggaacagag

SEQ ID NO: 130457 - RNA, 32 nt, Human
cuccagccuggggacaaagcaagacucaaucu

SEQ ID NO: 130458 - RNA, 32 nt, Human
cuccagccuggggacagagcaagacucuuguc

SEQ ID NO: 130459 - RNA, 32 nt, Human
cuccagccuggggcugacagagcaagacacug

SEQ ID NO: 130460 - RNA, 23 nt, Human
cuccagccugggggaaagaguga

SEQ ID NO: 130461 - RNA, 24 nt, Human
cuccagccugggggacaagaguga

SEQ ID NO: 130462 - RNA, 23 nt, Human
cuccagccuggguaaaagaguga

SEQ ID NO: 130463 - RNA, 22 nt, Human
cuccagccuggguaacaagagc

SEQ ID NO: 130464 - RNA, 20 nt, Human
cuccagccuggguaacagag

SEQ ID NO: 130465 - RNA, 21 nt, Human
cuccagccuggguaacagagc

SEQ ID NO: 130466 - RNA, 23 nt, Human
cuccagccuggguaacagagcga

SEQ ID NO: 130467 - RNA, 21 nt, Human
cuccagccuggguaacagagu

SEQ ID NO: 130468 - RNA, 23 nt, Human
cuccagccuggguaacagaguga

SEQ ID NO: 130469 - RNA, 21 nt, Human
cuccagccugggugacaaagc

SEQ ID NO: 130470 - RNA, 21 nt, Human
cuccagccugggugacaaagu

SEQ ID NO: 130471 - RNA, 23 nt, Human
cuccagccugggugacaaaguga

SEQ ID NO: 130472 - RNA, 22 nt, Human
cuccagccugggugacaagagc

SEQ ID NO: 130473 - RNA, 24 nt, Human
cuccagccugggugacaagagcga

SEQ ID NO: 130474 - RNA, 24 nt, Human
cuccagccugggugacaagaguga

SEQ ID NO: 130475 - RNA, 23 nt, Human
cuccagccugggugacacagcga

SEQ ID NO: 130476 - RNA, 23 nt, Human
cuccagccugggugacagaacga

SEQ ID NO: 130477 - RNA, 23 nt, Human
cuccagccugggugacagaauga

SEQ ID NO: 130478 - RNA, 23 nt, Human
cuccagccugggugacagaccga

SEQ ID NO: 130479 - RNA, 32 nt, Human
cuccagccugggugacagagacagugagacuc

SEQ ID NO: 130480 - RNA, 23 nt, Human
cuccagccugggugacagagaga

SEQ ID NO: 130481 - RNA, 21 nt, Human
cuccagccugggugacagagc

SEQ ID NO: 130482 - RNA, 32 nt, Human
cuccagccugggugacagagcaagugagaccc

SEQ ID NO: 130483 - RNA, 22 nt, Human
cuccagccugggugacagagcg

SEQ ID NO: 130484 - RNA, 23 nt, Human
cuccagccugggugacagagcga

SEQ ID NO: 130485 - RNA, 25 nt, Human
cuccagccugggugacagagcgaga

SEQ ID NO: 130486 - RNA, 23 nt, Human
cuccagccugggugacagaggga

SEQ ID NO: 130487 - RNA, 21 nt, Human
cuccagccugggugacagagu

SEQ ID NO: 130488 - RNA, 23 nt, Human
cuccagccugggugacagaguga

SEQ ID NO: 130489 - RNA, 25 nt, Human
cuccagccugggugacagagugaga

SEQ ID NO: 130490 - RNA, 25 nt, Human
cuccagccugggugacagagugagg

SEQ ID NO: 130491 - RNA, 23 nt, Human
cuccagccugggugacagcacga

SEQ ID NO: 130492 - RNA, 21 nt, Human
cuccagccugggugacagcga

SEQ ID NO: 130493 - RNA, 23 nt, Human
cuccagccugggugacagcgcga

SEQ ID NO: 130494 - RNA, 21 nt, Human
cuccagccugggugacagggc

SEQ ID NO: 130495 - RNA, 23 nt, Human
cuccagccugggugaccgaguga

SEQ ID NO: 130496 - RNA, 22 nt, Human
cuccagccugggugacgaguga

SEQ ID NO: 130497 - RNA, 23 nt, Human
cuccagccugggugacggaacgg

SEQ ID NO: 130498 - RNA, 23 nt, Human
cuccagccugggugacggaguga

SEQ ID NO: 130499 - RNA, 25 nt, Human
cuccagccugggugacggagugaga

SEQ ID NO: 130500 - RNA, 23 nt, Human
cuccagccugggugacugagcga

SEQ ID NO: 130501 - RNA, 23 nt, Human
cuccagccugggugacugaggga

SEQ ID NO: 130502 - RNA, 24 nt, Human
cuccagccugggugagaagagcga

SEQ ID NO: 130503 - RNA, 23 nt, Human
cuccagccugggugagagaguga

SEQ ID NO: 130504 - RNA, 32 nt, Human
cuccagccugggugagagagugagacacuguc

SEQ ID NO: 130505 - RNA, 22 nt, Human
cuccagccugggugauaagagc

SEQ ID NO: 130506 - RNA, 21 nt, Human
cuccagccugggugauagagc

SEQ ID NO: 130507 - RNA, 25 nt, Human
cuccagccugggugauagagcugga

SEQ ID NO: 130508 - RNA, 23 nt, Human
cuccagccugggugauagaguga

SEQ ID NO: 130509 - RNA, 25 nt, Human
cuccagccugggugauagagugaga

SEQ ID NO: 130510 - RNA, 23 nt, Human
cuccagccuggguggcagagaga

SEQ ID NO: 130511 - RNA, 21 nt, Human
cuccagccuggguggcagagc

SEQ ID NO: 130512 - RNA, 23 nt, Human
cuccagccuggguggcagagcga

SEQ ID NO: 130513 - RNA, 23 nt, Human
cuccagccuggguggcagaguga

SEQ ID NO: 130514 - RNA, 25 nt, Human
cuccagccuggguggcagagugaga

SEQ ID NO: 130515 - RNA, 24 nt, Human
cuccagccuggucgacaagagaga

SEQ ID NO: 130516 - RNA, 32 nt, Human
cuccagccuggugacagagcaagacuccaucu

SEQ ID NO: 130517 - RNA, 32 nt, Human
cuccagccuggugacagagcaagacuccggcu

SEQ ID NO: 130518 - RNA, 32 nt, Human
cuccagccuggugacagagcaagacucugucu

SEQ ID NO: 130519 - RNA, 32 nt, Human
cuccagccuggugacagagccagacuguuuua

SEQ ID NO: 130520 - RNA, 22 nt, Human
cuccagccuggugacagagcga

SEQ ID NO: 130521 - RNA, 32 nt, Human
cuccagccuggugacagagcgagacuccaucu

SEQ ID NO: 130522 - RNA, 32 nt, Human
cuccagccuggugacagagcgagacucccucu

SEQ ID NO: 130523 - RNA, 32 nt, Human
cuccagccuggugacagagcgagacuccgucu

SEQ ID NO: 130524 - RNA, 32 nt, Human
cuccagccuggugacagagcuagauuccaucu

SEQ ID NO: 130525 - RNA, 22 nt, Human
cuccagccuggugacagaguga

SEQ ID NO: 130526 - RNA, 32 nt, Human
cuccagccuggugacagagugagacuccaucu

SEQ ID NO: 130527 - RNA, 32 nt, Human
cuccagccuggugacagagugagacuccgucu

SEQ ID NO: 130528 - RNA, 32 nt, Human
cuccagccuggugacagagugagacucugucu

SEQ ID NO: 130529 - RNA, 32 nt, Human
cuccagccuggugacagagugagacucuguuu

SEQ ID NO: 130530 - RNA, 32 nt, Human
cuccagccuggugacagggcgagacuccgucu

SEQ ID NO: 130531 - RNA, 32 nt, Human
cuccagccugguuacagagcaagacucugucu

SEQ ID NO: 130532 - RNA, 22 nt, Human
cuccagccugugcaacaagcga

SEQ ID NO: 130533 - RNA, 20 nt, Human
cuccagccugugcaacagag

SEQ ID NO: 130534 - RNA, 24 nt, Human
cuccagccugugcgacaagagcga

SEQ ID NO: 130535 - RNA, 32 nt, Human
cuccagccuuccauucccuugugugacucaua

SEQ ID NO: 130536 - RNA, 21 nt, Human
cuccagccuuggcaacaaagc

SEQ ID NO: 130537 - RNA, 25 nt, Human
cuccagccuugggcgacaaaaacga

SEQ ID NO: 130538 - RNA, 20 nt, Human
cuccagccuugguggcuccu

SEQ ID NO: 130539 - RNA, 32 nt, Human
cuccagccuuucuccuuucuccgcucuuaggu

SEQ ID NO: 130540 - RNA, 19 nt, Human
cuccagcgccgccgccgcc

SEQ ID NO: 130541 - RNA, 21 nt, Human
cuccagcgcuccuugcucgca

SEQ ID NO: 130542 - RNA, 21 nt, Human
cuccagcggcccugucaucca

SEQ ID NO: 130543 - RNA, 32 nt, Human
cuccagcgggacuugggacugaaggaagagaa

SEQ ID NO: 130544 - RNA, 32 nt, Human
cuccagcgggcaggccgggaguguacugugug

SEQ ID NO: 130545 - RNA, 32 nt, Human
cuccagcgggcggaucucacugugcugaugcc

SEQ ID NO: 130546 - RNA, 32 nt, Human
cuccagcggucauguccggcagaggaaagggc

SEQ ID NO: 130547 - RNA, 32 nt, Human
cuccagcgugccaaaugcugcuaauggacagc

SEQ ID NO: 130548 - RNA, 32 nt, Human
cuccagcuacacacuccaucucccgggagcaa

SEQ ID NO: 130549 - RNA, 32 nt, Human
cuccagcuacauacucugccucagggccuucg

SEQ ID NO: 130550 - RNA, 23 nt, Human
cuccagcuacccuugugaccuaa

SEQ ID NO: 130551 - RNA, 32 nt, Human
cuccagcuacuuccugccugccaugccccagg

SEQ ID NO: 130552 - RNA, 22 nt, Human
cuccagcuacuugggaggcuga

SEQ ID NO: 130553 - RNA, 32 nt, Human
cuccagcuaggaugaucgagguuguuugcaac

SEQ ID NO: 130554 - RNA, 32 nt, Human
cuccagcucacugaaaacagccuccccugaug

SEQ ID NO: 130555 - RNA, 32 nt, Human
cuccagcucacuguagucuccaccacucccuu

SEQ ID NO: 130556 - RNA, 32 nt, Human
cuccagcucagaggaggaggaaggugaagaug

SEQ ID NO: 130557 - RNA, 22 nt, Human
cuccagcucaggcaacaagagc

SEQ ID NO: 130558 - RNA, 32 nt, Human
cuccagcucauaugcugacagcucuucacagu

SEQ ID NO: 130559 - RNA, 32 nt, Human
cuccagcuccaagaagucagcacaccugcauu

SEQ ID NO: 130560 - RNA, 20 nt, Human
cuccagcucccagcaggagg

SEQ ID NO: 130561 - RNA, 32 nt, Human
cuccagcucccauccagcccugggucaaagcc

SEQ ID NO: 130562 - RNA, 21 nt, Human
cuccagcuccccuguccucuu

SEQ ID NO: 130563 - RNA, 20 nt, Human
cuccagcuccccuuucugcc

SEQ ID NO: 130564 - RNA, 22 nt, Human
cuccagcucccuccccgccucu

SEQ ID NO: 130565 - RNA, 32 nt, Human
cuccagcucccuccccgccucuuuuuacacuc

SEQ ID NO: 130566 - RNA, 23 nt, Human
cuccagcuccuccugcucccucu

SEQ ID NO: 130567 - RNA, 18 nt, Human
cuccagcuccugcggcuc

SEQ ID NO: 130568 - RNA, 32 nt, Human
cuccagcuccuggguuaggggcuuugcuguaa

SEQ ID NO: 130569 - RNA, 21 nt, Human
cuccagcuccuuucgcccgcg

SEQ ID NO: 130570 - RNA, 20 nt, Human
cuccagcuccuuugggcuuc

SEQ ID NO: 130571 - RNA, 32 nt, Human
cuccagcucgccggcgggaccaugaagaaguu

SEQ ID NO: 130572 - RNA, 23 nt, Human
cuccagcucggggaacagagcga

SEQ ID NO: 130573 - RNA, 24 nt, Human
cuccagcucgggugacaagaguga

SEQ ID NO: 130574 - RNA, 32 nt, Human
cuccagcucuccuucuggcuucauccugucuu

SEQ ID NO: 130575 - RNA, 32 nt, Human
cuccagcucugacuucugcucuggaccagugu

SEQ ID NO: 130576 - RNA, 32 nt, Human
cuccagcucugccuuagaaacccaagcccugc

SEQ ID NO: 130577 - RNA, 32 nt, Human
cuccagcucugcugcuucaacaacagugacuu

SEQ ID NO: 130578 - RNA, 32 nt, Human
cuccagcugagagugugacccugucucuaaag

SEQ ID NO: 130579 - RNA, 32 nt, Human
cuccagcugaugcccucagcucccagagaggg

SEQ ID NO: 130580 - RNA, 32 nt, Human
cuccagcugcagcauguuggugccauuuucag

SEQ ID NO: 130581 - RNA, 32 nt, Human
cuccagcugcagccuccgccuacgugagaaga

SEQ ID NO: 130582 - RNA, 20 nt, Human
cuccagcugcaggugaggcc

SEQ ID NO: 130583 - RNA, 32 nt, Human
cuccagcugcaucacagugauggccaagcugc

SEQ ID NO: 130584 - RNA, 32 nt, Human
cuccagcugcauccauguugugcaauggacau

SEQ ID NO: 130585 - RNA, 32 nt, Human
cuccagcugccuggcagugcucccaguuugua

SEQ ID NO: 130586 - RNA, 32 nt, Human
cuccagcugccuggcucagcaggcgugggugc

SEQ ID NO: 130587 - RNA, 32 nt, Human
cuccagcugccugggcugggugucuggugccu

SEQ ID NO: 130588 - RNA, 32 nt, Human
cuccagcuggaaaggccaggccuggagcuugc

SEQ ID NO: 130589 - RNA, 32 nt, Human
cuccagcuggagcugggacuguucagucacug

SEQ ID NO: 130590 - RNA, 20 nt, Human
cuccagcuggccaaggcugg

SEQ ID NO: 130591 - RNA, 32 nt, Human
cuccagcuggccccgggcugggcagagccucc

SEQ ID NO: 130592 - RNA, 32 nt, Human
cuccagcugggagacacagcaagacuccgucu

SEQ ID NO: 130593 - RNA, 32 nt, Human
cuccagcugggcgacagagcgagacuccaucu

SEQ ID NO: 130594 - RNA, 32 nt, Human
cuccagcugggcgacagagcgagauuccaucu

SEQ ID NO: 130595 - RNA, 20 nt, Human
cuccagcugugagcccaggc

SEQ ID NO: 130596 - RNA, 32 nt, Human
cuccagcugugcuaugcacaccucagguugaa

SEQ ID NO: 130597 - RNA, 32 nt, Human
cuccagcuguggaaggguugcagccauuaccu

SEQ ID NO: 130598 - RNA, 22 nt, Human
cuccagcuguggauguuaaacc

SEQ ID NO: 130599 - RNA, 20 nt, Human
cuccagcuguggggcacaag

SEQ ID NO: 130600 - RNA, 21 nt, Human
cuccagcuuaaacaggaguga

SEQ ID NO: 130601 - RNA, 21 nt, Human
cuccagcuuaccccgccgccg

SEQ ID NO: 130602 - RNA, 23 nt, Human
cuccagcuuaggugacagaguga

SEQ ID NO: 130603 - RNA, 23 nt, Human
cuccagcuuagguggcaaaguga

SEQ ID NO: 130604 - RNA, 19 nt, Human
cuccagcuuccuuucuuca

SEQ ID NO: 130605 - RNA, 24 nt, Human
cuccagcuucggcuccggcucggg

SEQ ID NO: 130606 - RNA, 32 nt, Human
cuccagcuucugguacucuccuagagacagaa

SEQ ID NO: 130607 - RNA, 22 nt, Human
cuccagcuucuucauccugcca

SEQ ID NO: 130608 - RNA, 23 nt, Human
cuccagcuugagcaacagaggga

SEQ ID NO: 130609 - RNA, 22 nt, Human
cuccagcuuggcaacagagcga

SEQ ID NO: 130610 - RNA, 20 nt, Human
cuccagcuuggcgagagagc

SEQ ID NO: 130611 - RNA, 24 nt, Human
cuccagcuugggagacaagagcga

SEQ ID NO: 130612 - RNA, 23 nt, Human
cuccagcuugggcaacaaaguga

SEQ ID NO: 130613 - RNA, 24 nt, Human
cuccagcuugggcaacaauagcga

SEQ ID NO: 130614 - RNA, 21 nt, Human
cuccagcuugggcaacagagc

SEQ ID NO: 130615 - RNA, 21 nt, Human
cuccagcuugggcaacagagu

SEQ ID NO: 130616 - RNA, 23 nt, Human
cuccagcuugggcaacagaguga

SEQ ID NO: 130617 - RNA, 23 nt, Human
cuccagcuugggcaacagggcga

SEQ ID NO: 130618 - RNA, 21 nt, Human
cuccagcuugggcaccagagc

SEQ ID NO: 130619 - RNA, 23 nt, Human
cuccagcuugggcgacggaguga

SEQ ID NO: 130620 - RNA, 21 nt, Human
cuccagcuugggugacaaagu

SEQ ID NO: 130621 - RNA, 21 nt, Human
cuccagcuugggugacagagc

SEQ ID NO: 130622 - RNA, 23 nt, Human
cuccagcuugggugacagagcga

SEQ ID NO: 130623 - RNA, 25 nt, Human
cuccagcuugggugacagagcgaga

SEQ ID NO: 130624 - RNA, 23 nt, Human
cuccagcuugggugacagaguga

SEQ ID NO: 130625 - RNA, 32 nt, Human
cuccagcuuggugacagagugagauccugucu

SEQ ID NO: 130626 - RNA, 24 nt, Human
cuccagcuuucugccaucuagcca

SEQ ID NO: 130627 - RNA, 24 nt, Human
cuccagcuuuggcucuggcacagg

SEQ ID NO: 130628 - RNA, 32 nt, Human
cuccagcuuugugcucugccucugaggagacc

SEQ ID NO: 130629 - RNA, 32 nt, Human
cuccaggaaaaagagucccaagaggcuggagc

SEQ ID NO: 130630 - RNA, 24 nt, Human
cuccaggaacauuccggagcugaa

SEQ ID NO: 130631 - RNA, 32 nt, Human
cuccaggaacccgaggggacaccagcucugca

SEQ ID NO: 130632 - RNA, 32 nt, Human
cuccaggaagagccaccaucccugcccccguu

SEQ ID NO: 130633 - RNA, 17 nt, Human
cuccaggaagcccagug

SEQ ID NO: 130634 - RNA, 32 nt, Human
cuccaggaaguuuugaguuucucuccaccgug

SEQ ID NO: 130635 - RNA, 32 nt, Human
cuccaggaaugaggagaaucuucaagaacuuc

SEQ ID NO: 130636 - RNA, 32 nt, Human
cuccaggaaugccuccucccugggcagaaagu

SEQ ID NO: 130637 - RNA, 16 nt, Human
cuccaggaccaaagug

SEQ ID NO: 130638 - RNA, 32 nt, Human
cuccaggacccuucucucuccaguggaacgug

SEQ ID NO: 130639 - RNA, 19 nt, Human
cuccaggaccucccucuga

SEQ ID NO: 130640 - RNA, 32 nt, Human
cuccaggacgaccagugcauccucaagcucug

SEQ ID NO: 130641 - RNA, 21 nt, Human
cuccaggacgagaacccuuga

SEQ ID NO: 130642 - RNA, 32 nt, Human
cuccaggacuaagaagcaagauuucccaggug

SEQ ID NO: 130643 - RNA, 32 nt, Human
cuccaggacuccugcacugacuccugaggacu

SEQ ID NO: 130644 - RNA, 32 nt, Human
cuccaggacuccuggccccgcgcuccaaaugc

SEQ ID NO: 130645 - RNA, 32 nt, Human
cuccaggacuccuuccuucuuccuucucccgc

SEQ ID NO: 130646 - RNA, 32 nt, Human
cuccaggagagggccgagcgcacagcagcucu

SEQ ID NO: 130647 - RNA, 32 nt, Human
cuccaggagccauccuggaauuucugaccuug

SEQ ID NO: 130648 - RNA, 20 nt, Human
cuccaggagcuccugcaccc

SEQ ID NO: 130649 - RNA, 32 nt, Human
cuccaggaggcaggaguggagagggcgaggga

SEQ ID NO: 130650 - RNA, 32 nt, Human
cuccaggaggcgcaggcugcagugagcucuga

SEQ ID NO: 130651 - RNA, 23 nt, Human
cuccaggagggacuugggugcag

SEQ ID NO: 130652 - RNA, 32 nt, Human
cuccaggagggcaucagcuuucccuggcucag

SEQ ID NO: 130653 - RNA, 32 nt, Human
cuccaggaggggcagguggcugaggcucuucg

SEQ ID NO: 130654 - RNA, 32 nt, Human
cuccaggaggggcuggagugguagccgggaga

SEQ ID NO: 130655 - RNA, 32 nt, Human
cuccaggaguaggaagaagggugggcuuccaa

SEQ ID NO: 130656 - RNA, 32 nt, Human
cuccaggagugcaaggaugaugcugaaaggaa

SEQ ID NO: 130657 - RNA, 24 nt, Human
cuccaggaguugcugaaauuuagg

SEQ ID NO: 130658 - RNA, 19 nt, Human
cuccaggauccaaacaguu

SEQ ID NO: 130659 - RNA, 32 nt, Human
cuccaggaucucugcugucucuuggaucccau

SEQ ID NO: 130660 - RNA, 21 nt, Human
cuccaggaugaggcagaggca

SEQ ID NO: 130661 - RNA, 32 nt, Human
cuccaggaugcagauucugagauauacuuuaa

SEQ ID NO: 130662 - RNA, 32 nt, Human
cuccaggauggaauucuuccuccucugcuggg

SEQ ID NO: 130663 - RNA, 32 nt, Human
cuccaggaugggcgagaggauccucuuugagc

SEQ ID NO: 130664 - RNA, 32 nt, Human
cuccaggaugggcugcagguugcagucagggc

SEQ ID NO: 130665 - RNA, 32 nt, Human
cuccaggauuccaggaguaagccuguagaaga

SEQ ID NO: 130666 - RNA, 32 nt, Human
cuccaggcaacuuggggcaagcgucucaguuc

SEQ ID NO: 130667 - RNA, 32 nt, Human
cuccaggcacuucugcucucuggcaggcaggc

SEQ ID NO: 130668 - RNA, 32 nt, Human
cuccaggcagccucaccagcagcuccccugag

SEQ ID NO: 130669 - RNA, 32 nt, Human
cuccaggcagggggcaaacacaugugaaggcc

SEQ ID NO: 130670 - RNA, 32 nt, Human
cuccaggccauggggagucccugaagacucga

SEQ ID NO: 130671 - RNA, 16 nt, Human
cuccaggcccacucua

SEQ ID NO: 130672 - RNA, 32 nt, Human
cuccaggcccagcuccagccucccgguggccu

SEQ ID NO: 130673 - RNA, 32 nt, Human
cuccaggcccaguucuuccucccagcuggguc

SEQ ID NO: 130674 - RNA, 32 nt, Human
cuccaggccccgccaccucuguucagccagcu

SEQ ID NO: 130675 - RNA, 21 nt, Human
cuccaggccggcugcuguugc

SEQ ID NO: 130676 - RNA, 32 nt, Human
cuccaggccuauagacguuucucuccaaggcc

SEQ ID NO: 130677 - RNA, 32 nt, Human
cuccaggccucagacccuucucuguguuccgu

SEQ ID NO: 130678 - RNA, 18 nt, Human
cuccaggccucagcaggu

SEQ ID NO: 130679 - RNA, 32 nt, Human
cuccaggccucccaucgugugcccuaaggccu

SEQ ID NO: 130680 - RNA, 32 nt, Human
cuccaggccucuccagcucuaaaacauuaaga

SEQ ID NO: 130681 - RNA, 32 nt, Human
cuccaggccuggcugcguucucugccuguggu

SEQ ID NO: 130682 - RNA, 32 nt, Human
cuccaggcggagggaggaagcgggagcuuuaa

SEQ ID NO: 130683 - RNA, 32 nt, Human
cuccaggcgggugacagagcaagacugcgucu

SEQ ID NO: 130684 - RNA, 32 nt, Human
cuccaggcguuuccuuucauucccucagugcu

SEQ ID NO: 130685 - RNA, 32 nt, Human
cuccaggcuauagaucaacauuucucaaaccu

SEQ ID NO: 130686 - RNA, 32 nt, Human
cuccaggcucaaaucaaaagacuggaaaugaa

SEQ ID NO: 130687 - RNA, 32 nt, Human
cuccaggcucucucuucuccagggcaccaaga

SEQ ID NO: 130688 - RNA, 32 nt, Human
cuccaggcucugggccguguagacacuaaacc

SEQ ID NO: 130689 - RNA, 32 nt, Human
cuccaggcugacugggggccucugccuccagg

SEQ ID NO: 130690 - RNA, 32 nt, Human
cuccaggcugccccugggacaugguggugaug

SEQ ID NO: 130691 - RNA, 32 nt, Human
cuccaggcugcugaugaagugagggaaagugg

SEQ ID NO: 130692 - RNA, 21 nt, Human
cuccaggcuggagugcagugg

SEQ ID NO: 130693 - RNA, 23 nt, Human
cuccaggcugggagacagaguca

SEQ ID NO: 130694 - RNA, 22 nt, Human
cuccaggcugggcagcaagagc

SEQ ID NO: 130695 - RNA, 32 nt, Human
cuccaggcuggggagagaagggugaccaggcg

SEQ ID NO: 130696 - RNA, 32 nt, Human
cuccaggcuuagcuccagccucccggcggccu

SEQ ID NO: 130697 - RNA, 32 nt, Human
cuccaggcuucacucaggguagagaaacaagc

SEQ ID NO: 130698 - RNA, 32 nt, Human
cuccagggaacacuguucacauggacagaguc

SEQ ID NO: 130699 - RNA, 21 nt, Human
cuccagggaacccugcacccu

SEQ ID NO: 130700 - RNA, 32 nt, Human
cuccagggaagaacccagagggagagcgggaa

SEQ ID NO: 130701 - RNA, 32 nt, Human
cuccagggaagccugcaucccgcuccccuggg

SEQ ID NO: 130702 - RNA, 32 nt, Human
cuccagggacaggcagccaccaugagccucag

SEQ ID NO: 130703 - RNA, 32 nt, Human
cuccagggacagugcugcuggaaaggcuagug

SEQ ID NO: 130704 - RNA, 32 nt, Human
cuccagggacuggaguguaaugcucgguggga

SEQ ID NO: 130705 - RNA, 32 nt, Human
cuccagggagaagcccuuucuggagaagcaag

SEQ ID NO: 130706 - RNA, 32 nt, Human
cuccagggagcacccugcccaccaagaagcac

SEQ ID NO: 130707 - RNA, 24 nt, Human
cuccagggaggcgacgccaggcca

SEQ ID NO: 130708 - RNA, 32 nt, Human
cuccagggagugaugggaauccugucauucuu

SEQ ID NO: 130709 - RNA, 19 nt, Human
cuccagggcagggugccuu

SEQ ID NO: 130710 - RNA, 32 nt, Human
cuccagggccagcccuucccugacugagugac

SEQ ID NO: 130711 - RNA, 32 nt, Human
cuccagggccaguguuacaguguuacccugua

SEQ ID NO: 130712 - RNA, 32 nt, Human
cuccagggccugacacggggugugugcuacag

SEQ ID NO: 130713 - RNA, 32 nt, Human
cuccagggcugcagccacguuagagggccccu

SEQ ID NO: 130714 - RNA, 32 nt, Human
cuccagggcugugaaagccacaggugggggcu

SEQ ID NO: 130715 - RNA, 21 nt, Human
cuccagggcuuccagcacggg

SEQ ID NO: 130716 - RNA, 32 nt, Human
cuccaggggaccccuccuugcccagcagccga

SEQ ID NO: 130717 - RNA, 32 nt, Human
cuccaggggcaccuccagccaggcuccagggg

SEQ ID NO: 130718 - RNA, 32 nt, Human
cuccaggggcagcaggggaggcgcgugacaga

SEQ ID NO: 130719 - RNA, 22 nt, Human
cuccaggggccuccugcgcccu

SEQ ID NO: 130720 - RNA, 15 nt, Human
cuccagggggccaug

SEQ ID NO: 130721 - RNA, 19 nt, Human
cuccaggggggacggcagg

SEQ ID NO: 130722 - RNA, 32 nt, Human
cuccagggguggugucucggccgccccuacca

SEQ ID NO: 130723 - RNA, 17 nt, Human
cuccagggucaacugca

SEQ ID NO: 130724 - RNA, 32 nt, Human
cuccaggguccugaggccucccaggagggccu

SEQ ID NO: 130725 - RNA, 18 nt, Human
cuccagggucggaugcca

SEQ ID NO: 130726 - RNA, 32 nt, Human
cuccagggugcuaugacugcucuggcacccuu

SEQ ID NO: 130727 - RNA, 20 nt, Human
cuccaggguggggagggagc

SEQ ID NO: 130728 - RNA, 32 nt, Human
cuccaggguugggggagcaggaagcccagaua

SEQ ID NO: 130729 - RNA, 32 nt, Human
cuccaggucaccagccaggcuugggggugaug

SEQ ID NO: 130730 - RNA, 32 nt, Human
cuccaggucccaggcugggcggccucggugcc

SEQ ID NO: 130731 - RNA, 20 nt, Human
cuccaggucgcuggcuucug

SEQ ID NO: 130732 - RNA, 24 nt, Human
cuccaggucuccaggacaagagca

SEQ ID NO: 130733 - RNA, 32 nt, Human
cuccaggucucccagccccuccuucucugucu

SEQ ID NO: 130734 - RNA, 24 nt, Human
cuccaggucuugaggagagagaca

SEQ ID NO: 130735 - RNA, 32 nt, Human
cuccaggugagcuggcuggggaggaggaugaa

SEQ ID NO: 130736 - RNA, 32 nt, Human
cuccaggugcagagaugcacaggcucaagaga

SEQ ID NO: 130737 - RNA, 32 nt, Human
cuccagguggccuggugacuccaugauggacg

SEQ ID NO: 130738 - RNA, 32 nt, Human
cuccagguggugauccacaucccugggagccc

SEQ ID NO: 130739 - RNA, 32 nt, Human
cuccagguguccuugccuuucuucccaaaguc

SEQ ID NO: 130740 - RNA, 32 nt, Human
cuccagguguguggcuuuuuccuucuccaucc

SEQ ID NO: 130741 - RNA, 32 nt, Human
cuccagguucaagcgauucuccugccucagcc

SEQ ID NO: 130742 - RNA, 32 nt, Human
cuccagguucaagugauccuccugccucagcc

SEQ ID NO: 130743 - RNA, 32 nt, Human
cuccagguucaagugauucucaugccucagcg

SEQ ID NO: 130744 - RNA, 32 nt, Human
cuccagguucaagugauucuccugccucagcc

SEQ ID NO: 130745 - RNA, 32 nt, Human
cuccagguucaagugauucucguaccucagcc

SEQ ID NO: 130746 - RNA, 32 nt, Human
cuccagguucuagcccagccuucuacuagucg

SEQ ID NO: 130747 - RNA, 22 nt, Human
cuccagguucugccacuugcug

SEQ ID NO: 130748 - RNA, 21 nt, Human
cuccagguucuggugacugcu

SEQ ID NO: 130749 - RNA, 21 nt, Human
cuccagguugggcaacagagc

SEQ ID NO: 130750 - RNA, 22 nt, Human
cuccagguugggcaacagagca

SEQ ID NO: 130751 - RNA, 22 nt, Human
cuccagguuuccuuaagggaca

SEQ ID NO: 130752 - RNA, 32 nt, Human
cuccagguuuuagugaaguaaacaguauuugg

SEQ ID NO: 130753 - RNA, 32 nt, Human
cuccaguaagcagggcacugcccagggagacu

SEQ ID NO: 130754 - RNA, 32 nt, Human
cuccaguaccacugccuucacccugacaaggg

SEQ ID NO: 130755 - RNA, 22 nt, Human
cuccaguauuccgucuguagca

SEQ ID NO: 130756 - RNA, 32 nt, Human
cuccagucaauuccugauuauccacaggucaa

SEQ ID NO: 130757 - RNA, 32 nt, Human
cuccaguccuucccaccuccucccuacccuuc

SEQ ID NO: 130758 - RNA, 32 nt, Human
cuccagucgacugagcccugaggugcaauccg

SEQ ID NO: 130759 - RNA, 32 nt, Human
cuccagucuauuauagucacauagauaauggu

SEQ ID NO: 130760 - RNA, 32 nt, Human
cuccagucucaaagcuguggccgccuucagac

SEQ ID NO: 130761 - RNA, 32 nt, Human
cuccagucucacugcacaccacugccucaugc

SEQ ID NO: 130762 - RNA, 32 nt, Human
cuccagucuccaggacguuccgggaggcuccg

SEQ ID NO: 130763 - RNA, 32 nt, Human
cuccagucucccagccugccucuuggugacca

SEQ ID NO: 130764 - RNA, 32 nt, Human
cuccagucugcucucagcuugugccuuguaaa

SEQ ID NO: 130765 - RNA, 32 nt, Human
cuccagucuggauccaggucugcaaggccagc

SEQ ID NO: 130766 - RNA, 20 nt, Human
cuccagucuggcaacagagc

SEQ ID NO: 130767 - RNA, 32 nt, Human
cuccagucuggcaacagagcaagacuccaucu

SEQ ID NO: 130768 - RNA, 20 nt, Human
cuccagucugggcaacagag

SEQ ID NO: 130769 - RNA, 21 nt, Human
cuccagucugggcaacagagc

SEQ ID NO: 130770 - RNA, 23 nt, Human
cuccagucugggcaacagagcga

SEQ ID NO: 130771 - RNA, 21 nt, Human
cuccagucugggcaacagagu

SEQ ID NO: 130772 - RNA, 32 nt, Human
cuccagucuggggaggagagagacuggaaacg

SEQ ID NO: 130773 - RNA, 25 nt, Human
cuccagucugggugacagagugaga

SEQ ID NO: 130774 - RNA, 21 nt, Human
cuccagucugucugugcucuc

SEQ ID NO: 130775 - RNA, 18 nt, Human
cuccagucuguggcuccu

SEQ ID NO: 130776 - RNA, 32 nt, Human
cuccagucuuccuguggccucucacaguaacc

SEQ ID NO: 130777 - RNA, 32 nt, Human
cuccagucuuuuccuuuuacucuggucuuuua

SEQ ID NO: 130778 - RNA, 32 nt, Human
cuccagugaaaggaaaauggccuggaggugcc

SEQ ID NO: 130779 - RNA, 32 nt, Human
cuccagugaacuagcaaagaaaagcaaagaag

SEQ ID NO: 130780 - RNA, 21 nt, Human
cuccagugacaguguccugug

SEQ ID NO: 130781 - RNA, 32 nt, Human
cuccagugaccccagagacuuugcuguaauua

SEQ ID NO: 130782 - RNA, 21 nt, Human
cuccagugacccgcagccagg

SEQ ID NO: 130783 - RNA, 32 nt, Human
cuccagugagccacgaucaccccacugugcug

SEQ ID NO: 130784 - RNA, 32 nt, Human
cuccagugcacucgagccugggugacagggca

SEQ ID NO: 130785 - RNA, 32 nt, Human
cuccagugcauuuggagacagggccuuuagga

SEQ ID NO: 130786 - RNA, 32 nt, Human
cuccagugccugacacaggacaggagcugcac

SEQ ID NO: 130787 - RNA, 32 nt, Human
cuccagugcucaggcuggcuugggcugcauga

SEQ ID NO: 130788 - RNA, 32 nt, Human
cuccagugcucugggggagggugcaccaggcc

SEQ ID NO: 130789 - RNA, 32 nt, Human
cuccagugcuuccuugggcagccaguaauucc

SEQ ID NO: 130790 - RNA, 32 nt, Human
cuccagugcuuuguuauguuuuauuaacuggc

SEQ ID NO: 130791 - RNA, 32 nt, Human
cuccaguggagaacugggcuugcucagacgca

SEQ ID NO: 130792 - RNA, 32 nt, Human
cuccaguggagacagagggcagacauucucuu

SEQ ID NO: 130793 - RNA, 21 nt, Human
cuccaguggcauugccauugc

SEQ ID NO: 130794 - RNA, 32 nt, Human
cuccaguggcccacagaagccacagauagaag

SEQ ID NO: 130795 - RNA, 32 nt, Human
cuccagugucaucugcucugcaugauaucucc

SEQ ID NO: 130796 - RNA, 32 nt, Human
cuccaguguccuccaugacaccagcuuucucc

SEQ ID NO: 130797 - RNA, 32 nt, Human
cuccagugugugacccuuggcaagucaguuaa

SEQ ID NO: 130798 - RNA, 32 nt, Human
cuccaguguucccuccuugagagcugagcugc

SEQ ID NO: 130799 - RNA, 32 nt, Human
cuccaguguugcggagaggcaagagcagcgac

SEQ ID NO: 130800 - RNA, 32 nt, Human
cuccaguuacugaacagaugaaaaggagccug

SEQ ID NO: 130801 - RNA, 20 nt, Human
cuccaguuaucuguauuuua

SEQ ID NO: 130802 - RNA, 32 nt, Human
cuccaguuccagggguccuucagccucugugg

SEQ ID NO: 130803 - RNA, 32 nt, Human
cuccaguucccagggggaaggaagcauggagg

SEQ ID NO: 130804 - RNA, 32 nt, Human
cuccaguuccuaccguacucccugcaccgucu

SEQ ID NO: 130805 - RNA, 32 nt, Human
cuccaguucuaucaauggauugugcagacacu

SEQ ID NO: 130806 - RNA, 32 nt, Human
cuccaguucucuagcauggccugagguauggg

SEQ ID NO: 130807 - RNA, 32 nt, Human
cuccaguugggguaugugugguguccccaaag

SEQ ID NO: 130808 - RNA, 32 nt, Human
cuccaguuuacccuucagguugguuuaaucaa

SEQ ID NO: 130809 - RNA, 32 nt, Human
cuccaguuucaaguggcuauuauguaauauaa

SEQ ID NO: 130810 - RNA, 22 nt, Human
cuccaguuugccuccugcuaua

SEQ ID NO: 130811 - RNA, 22 nt, Human
cuccaguuugggcaacaagagc

SEQ ID NO: 130812 - RNA, 32 nt, Human
cuccaguuuuuauagaccugagguuccagugu

SEQ ID NO: 130813 - RNA, 32 nt, Human
cuccauaaaagcuucuguagcaccagcuuggu

SEQ ID NO: 130814 - RNA, 32 nt, Human
cuccauaaagcacauuuuaaggaacaagaauu

SEQ ID NO: 130815 - RNA, 32 nt, Human
cuccauaaggcuuuuccucccuucucugguuu

SEQ ID NO: 130816 - RNA, 32 nt, Human
cuccauacaaugcacacaugguacaaugauag

SEQ ID NO: 130817 - RNA, 18 nt, Human
cuccauaccaggaccucc

SEQ ID NO: 130818 - RNA, 21 nt, Human
cuccauacccccugguuucua

SEQ ID NO: 130819 - RNA, 32 nt, Human
cuccauaccgauuagcugucacggccacucug

SEQ ID NO: 130820 - RNA, 32 nt, Human
cuccauacucagcucuuuaacuuuucuuuucc

SEQ ID NO: 130821 - RNA, 19 nt, Human
cuccauacuccuuuccuuu

SEQ ID NO: 130822 - RNA, 32 nt, Human
cuccauagaagaugucccaggccaggugccca

SEQ ID NO: 130823 - RNA, 32 nt, Human
cuccauagccuucugaggcuucaccugcuagc

SEQ ID NO: 130824 - RNA, 32 nt, Human
cuccauauguucccuuuggguccuccagcuuc

SEQ ID NO: 130825 - RNA, 32 nt, Human
cuccauauuagcuuccagagggugagugaggg

SEQ ID NO: 130826 - RNA, 32 nt, Human
cuccauauugagcugcaggagcuggagccaug

SEQ ID NO: 130827 - RNA, 32 nt, Human
cuccaucaaacuuuuuauuguggccaucuuag

SEQ ID NO: 130828 - RNA, 19 nt, Human
cuccaucaaagucccuggc

SEQ ID NO: 130829 - RNA, 20 nt, Human
cuccaucacaccucccugca

SEQ ID NO: 130830 - RNA, 32 nt, Human
cuccaucacagcugcaucccugagagugggag

SEQ ID NO: 130831 - RNA, 23 nt, Human
cuccaucaccaaucuccacggca

SEQ ID NO: 130832 - RNA, 32 nt, Human
cuccaucaccaggcuggagugcaguggugcga

SEQ ID NO: 130833 - RNA, 19 nt, Human
cuccaucaccaugccuggc

SEQ ID NO: 130834 - RNA, 26 nt, Human
cuccaucacccaagccagagugcagu

SEQ ID NO: 130835 - RNA, 32 nt, Human
cuccaucacccaagccagagugcaguggugaa

SEQ ID NO: 130836 - RNA, 26 nt, Human
cuccaucacccaggcuggaguccagu

SEQ ID NO: 130837 - RNA, 32 nt, Human
cuccaucacccaggcuggaguccaguggugug

SEQ ID NO: 130838 - RNA, 26 nt, Human
cuccaucaccccaccuggucucugca

SEQ ID NO: 130839 - RNA, 32 nt, Human
cuccaucacucaggcuggaguacagugcugag

SEQ ID NO: 130840 - RNA, 23 nt, Human
cuccaucacuggguaucccuggc

SEQ ID NO: 130841 - RNA, 22 nt, Human
cuccaucacuggugacugauga

SEQ ID NO: 130842 - RNA, 32 nt, Human
cuccaucagagccagcgggauggcuacaacac

SEQ ID NO: 130843 - RNA, 32 nt, Human
cuccaucagccaggcuggagugcaguggugca

SEQ ID NO: 130844 - RNA, 32 nt, Human
cuccaucauacauauucaccacuugagauuca

SEQ ID NO: 130845 - RNA, 32 nt, Human
cuccaucauagcaucucuaaaacggaggacau

SEQ ID NO: 130846 - RNA, 32 nt, Human
cuccaucaucacagacacagagagcugcaggg

SEQ ID NO: 130847 - RNA, 20 nt, Human
cuccaucauccugauuagca

SEQ ID NO: 130848 - RNA, 20 nt, Human
cuccaucaucgaucuaggca

SEQ ID NO: 130849 - RNA, 32 nt, Human
cuccaucaucuucuuccgagaugaccgcuacu

SEQ ID NO: 130850 - RNA, 22 nt, Human
cuccaucauugccaccuuggua

SEQ ID NO: 130851 - RNA, 32 nt, Human
cuccauccacaaagcuacggacuugcagccca

SEQ ID NO: 130852 - RNA, 32 nt, Human
cuccauccagccugggugacagggcgagacuc

SEQ ID NO: 130853 - RNA, 32 nt, Human
cuccauccagccugggugacagggugagacuc

SEQ ID NO: 130854 - RNA, 32 nt, Human
cuccaucccagccaccuuucaccaggagcuca

SEQ ID NO: 130855 - RNA, 22 nt, Human
cuccauccccacccuccauccc

SEQ ID NO: 130856 - RNA, 32 nt, Human
cuccauccccacccuccauccccacccuagau

SEQ ID NO: 130857 - RNA, 19 nt, Human
cuccauccccaucugcauu

SEQ ID NO: 130858 - RNA, 23 nt, Human
cuccauccccaugcucuguccac

SEQ ID NO: 130859 - RNA, 32 nt, Human
cuccaucccccacccacccaaggaauggugcu

SEQ ID NO: 130860 - RNA, 32 nt, Human
cuccauccccucccuaaccucccccgccuccc

SEQ ID NO: 130861 - RNA, 32 nt, Human
cuccauccccuccuccuccuuaggaugcauaa

SEQ ID NO: 130862 - RNA, 21 nt, Human
cuccaucccggccccagccca

SEQ ID NO: 130863 - RNA, 32 nt, Human
cuccaucccugagaccguucuccguuggagga

SEQ ID NO: 130864 - RNA, 15 nt, Human
cuccaucccuggccu

SEQ ID NO: 130865 - RNA, 28 nt, Human
cuccaucccuuugaugccucauccaucu

SEQ ID NO: 130866 - RNA, 32 nt, Human
cuccauccggagccggcaggagaggagaacga

SEQ ID NO: 130867 - RNA, 32 nt, Human
cuccauccuaaaggaagguaacagggacacaa

SEQ ID NO: 130868 - RNA, 24 nt, Human
cuccauccucagcccucugcccac

SEQ ID NO: 130869 - RNA, 32 nt, Human
cuccauccucauuccugccugaagccaugacc

SEQ ID NO: 130870 - RNA, 32 nt, Human
cuccauccuccaccuccucccccacuuccgcc

SEQ ID NO: 130871 - RNA, 32 nt, Human
cuccauccuccacuuauucugccuguuucccc

SEQ ID NO: 130872 - RNA, 32 nt, Human
cuccauccuccccugcuccagccagggaggac

SEQ ID NO: 130873 - RNA, 18 nt, Human
cuccauccucggcuccug

SEQ ID NO: 130874 - RNA, 32 nt, Human
cuccauccugcucccaucuccaccucuaaugc

SEQ ID NO: 130875 - RNA, 32 nt, Human
cuccauccugcugaccaugugugaagaccagc

SEQ ID NO: 130876 - RNA, 32 nt, Human
cuccauccugcuuaccaccucccuggguacuu

SEQ ID NO: 130877 - RNA, 24 nt, Human
cuccauccugggcaacaagaacga

SEQ ID NO: 130878 - RNA, 21 nt, Human
cuccauccugggcaacagagu

SEQ ID NO: 130879 - RNA, 23 nt, Human
cuccauccugucuacuaauccac

SEQ ID NO: 130880 - RNA, 32 nt, Human
cuccauccuuauuucccugccacuccagggcu

SEQ ID NO: 130881 - RNA, 32 nt, Human
cuccauccuuucuccuuucugccagccgaugu

SEQ ID NO: 130882 - RNA, 32 nt, Human
cuccaucgcaguguucaaggccauccuucccu

SEQ ID NO: 130883 - RNA, 32 nt, Human
cuccaucgcccaggccugggaugcagugaugu

SEQ ID NO: 130884 - RNA, 32 nt, Human
cuccaucgcccaggcugcagugcagugacacg

SEQ ID NO: 130885 - RNA, 22 nt, Human
cuccaucggccgaaacuuuccc

SEQ ID NO: 130886 - RNA, 32 nt, Human
cuccaucggcugaacccaacuggaagucggag

SEQ ID NO: 130887 - RNA, 32 nt, Human
cuccaucguccaggcuggagugcaguggcgcg

SEQ ID NO: 130888 - RNA, 32 nt, Human
cuccaucuaaaauaagacaugccugaauuugg

SEQ ID NO: 130889 - RNA, 32 nt, Human
cuccaucucaaaacaaaacaaaacaaaacaaa

SEQ ID NO: 130890 - RNA, 32 nt, Human
cuccaucucaaaacaaaacaaaacaaaauuag

SEQ ID NO: 130891 - RNA, 32 nt, Human
cuccaucucaaaacaaaacaaaacaacaacag

SEQ ID NO: 130892 - RNA, 32 nt, Human
cuccaucucacaucugccucagugagggauca

SEQ ID NO: 130893 - RNA, 32 nt, Human
cuccaucuccacccugcugagccacccggguu

SEQ ID NO: 130894 - RNA, 32 nt, Human
cuccaucuccacccugcugguccugcucccau

SEQ ID NO: 130895 - RNA, 32 nt, Human
cuccaucuccagaucggaucacggugagggaa

SEQ ID NO: 130896 - RNA, 21 nt, Human
cuccaucuccugaccucguga

SEQ ID NO: 130897 - RNA, 32 nt, Human
cuccaucucugaccacccccacccuaaccccc

SEQ ID NO: 130898 - RNA, 32 nt, Human
cuccaucucugccccucugucucccaucucug

SEQ ID NO: 130899 - RNA, 32 nt, Human
cuccaucucuuuuccucccucuccuuccccuu

SEQ ID NO: 130900 - RNA, 32 nt, Human
cuccaucugcaaaaccaggcucccaggggaug

SEQ ID NO: 130901 - RNA, 32 nt, Human
cuccaucugucacccaggcuggugugcagggg

SEQ ID NO: 130902 - RNA, 32 nt, Human
cuccaucuucucaugcccucuuaccaguauuu

SEQ ID NO: 130903 - RNA, 17 nt, Human
cuccaucuucugcugcc

SEQ ID NO: 130904 - RNA, 32 nt, Human
cuccaucuugagccaugucccccagccuggca

SEQ ID NO: 130905 - RNA, 32 nt, Human
cuccaucuuguaagacuaugcccagccccauu

SEQ ID NO: 130906 - RNA, 21 nt, Human
cuccaucuuucgucugcacua

SEQ ID NO: 130907 - RNA, 25 nt, Human
cuccaugaaaccaucguagcaugga

SEQ ID NO: 130908 - RNA, 32 nt, Human
cuccaugaagacagaguaccuggccuuuuggc

SEQ ID NO: 130909 - RNA, 32 nt, Human
cuccaugaccaggccaccaucuguacccugcu

SEQ ID NO: 130910 - RNA, 32 nt, Human
cuccaugagaaaagccguggguggaaccagga

SEQ ID NO: 130911 - RNA, 32 nt, Human
cuccaugagcuggcuucguccuucccucucua

SEQ ID NO: 130912 - RNA, 32 nt, Human
cuccaugaggggcagggccagcuuccaucccu

SEQ ID NO: 130913 - RNA, 32 nt, Human
cuccaugaguuccagguucugcuguuugcucu

SEQ ID NO: 130914 - RNA, 32 nt, Human
cuccaugaucugcuuagccauugaugaugaca

SEQ ID NO: 130915 - RNA, 32 nt, Human
cuccaugaucugcuuagccauugaugaugaug

SEQ ID NO: 130916 - RNA, 32 nt, Human
cuccaugcaaauucugacuccauagugcuggu

SEQ ID NO: 130917 - RNA, 32 nt, Human
cuccaugcaaccucugccuccuggguucaagc

SEQ ID NO: 130918 - RNA, 31 nt, Human
cuccaugcacuuuauguggagacuacuggcc

SEQ ID NO: 130919 - RNA, 32 nt, Human
cuccaugcagaccucaaggaggcucccuagca

SEQ ID NO: 130920 - RNA, 32 nt, Human
cuccaugcaguuacacaaaaggagggcuacgg

SEQ ID NO: 130921 - RNA, 32 nt, Human
cuccaugcauccccuguuccuccuggaaccua

SEQ ID NO: 130922 - RNA, 32 nt, Human
cuccaugccacuccagacugcaccggcauggc

SEQ ID NO: 130923 - RNA, 32 nt, Human
cuccaugccccaggggccagggcagacccucc

SEQ ID NO: 130924 - RNA, 19 nt, Human
cuccaugccgccgccgcug

SEQ ID NO: 130925 - RNA, 32 nt, Human
cuccaugccuggcuaauuuuguauuuuuagua

SEQ ID NO: 130926 - RNA, 18 nt, Human
cuccaugccuggcuccug

SEQ ID NO: 130927 - RNA, 32 nt, Human
cuccaugccugucagcugccuggggagugagc

SEQ ID NO: 130928 - RNA, 32 nt, Human
cuccaugccuuucuaccuaaguguuuguauuu

SEQ ID NO: 130929 - RNA, 32 nt, Human
cuccaugcuauuuugaugaaugccaaaguugg

SEQ ID NO: 130930 - RNA, 32 nt, Human
cuccaugcugaagaaaagugacagucuccagg

SEQ ID NO: 130931 - RNA, 29 nt, Human
cuccaugcugcugugcccugagguuccca

SEQ ID NO: 130932 - RNA, 32 nt, Human
cuccaugcugggccccagcccaggucugcacu

SEQ ID NO: 130933 - RNA, 32 nt, Human
cuccaugcuuagggaugggcaggcuggacccu

SEQ ID NO: 130934 - RNA, 32 nt, Human
cuccauggaaacaguggguaaggugugaagau

SEQ ID NO: 130935 - RNA, 20 nt, Human
cuccauggacuucugcaccc

SEQ ID NO: 130936 - RNA, 32 nt, Human
cuccauggagccagagguaguaugaagaguua

SEQ ID NO: 130937 - RNA, 32 nt, Human
cuccauggagccuucagucuccugggaagcug

SEQ ID NO: 130938 - RNA, 32 nt, Human
cuccauggaguguuggcuucucaauagagugu

SEQ ID NO: 130939 - RNA, 32 nt, Human
cuccauggauuuucuucccuguaagugccggg

SEQ ID NO: 130940 - RNA, 31 nt, Human
cuccauggcaugucuccaucuuucaagguga

SEQ ID NO: 130941 - RNA, 32 nt, Human
cuccauggcccugaauccuccucugcuccagg

SEQ ID NO: 130942 - RNA, 32 nt, Human
cuccauggcuaccuuuaggagacagagaagau

SEQ ID NO: 130943 - RNA, 32 nt, Human
cuccauggcucaaucauucacaugaggugagc

SEQ ID NO: 130944 - RNA, 32 nt, Human
cuccauggcuucccagcuugacaugucuuccg

SEQ ID NO: 130945 - RNA, 32 nt, Human
cuccaugggaccccucucacacuuugucacug

SEQ ID NO: 130946 - RNA, 32 nt, Human
cuccaugggacugacaccauguucaagcagac

SEQ ID NO: 130947 - RNA, 32 nt, Human
cuccaugggaggcugaggcaggagaaucaguu

SEQ ID NO: 130948 - RNA, 29 nt, Human
cuccaugggccagacagcucuggcagggg

SEQ ID NO: 130949 - RNA, 32 nt, Human
cuccaugguccugucugucagcgcuguuuugg

SEQ ID NO: 130950 - RNA, 32 nt, Human
cuccauggugcuaggccaggguggccagcccc

SEQ ID NO: 130951 - RNA, 32 nt, Human
cuccauggugcuucaauagcauguuauuauca

SEQ ID NO: 130952 - RNA, 30 nt, Human
cuccaugguuucuccaugaaacucuguggu

SEQ ID NO: 130953 - RNA, 32 nt, Human
cuccauguaguuacuuccuuuaaaccaucagc

SEQ ID NO: 130954 - RNA, 32 nt, Human
cuccaugucaccaaaucaaaacacccucuguc

SEQ ID NO: 130955 - RNA, 32 nt, Human
cuccaugucacccaccaacuugcugagacauu

SEQ ID NO: 130956 - RNA, 32 nt, Human
cuccaugucacccacuaacuugcugagacauu

SEQ ID NO: 130957 - RNA, 22 nt, Human
cuccaugucagccccugcaccu

SEQ ID NO: 130958 - RNA, 32 nt, Human
cuccaugucuagcccaucauccugcuuggagc

SEQ ID NO: 130959 - RNA, 32 nt, Human
cuccaugucugaggacaagaggucccgggggu

SEQ ID NO: 130960 - RNA, 32 nt, Human
cuccaugucugauuacaaacagucuccacauu

SEQ ID NO: 130961 - RNA, 32 nt, Human
cuccaugucugcacuguuuggguuuguacccg

SEQ ID NO: 130962 - RNA, 32 nt, Human
cuccaugucuggauggggccggcagguccugu

SEQ ID NO: 130963 - RNA, 19 nt, Human
cuccaugugcccagccccg

SEQ ID NO: 130964 - RNA, 32 nt, Human
cuccaugugccucccuguccccaaaucucugc

SEQ ID NO: 130965 - RNA, 32 nt, Human
cuccauguguuuuguugcauuuaggauuaaca

SEQ ID NO: 130966 - RNA, 32 nt, Human
cuccauguuggaugccuccacaagcauggaac

SEQ ID NO: 130967 - RNA, 32 nt, Human
cuccauguuggccaggcuggucucaaaauccu

SEQ ID NO: 130968 - RNA, 32 nt, Human
cuccauguuggucaggcuggucuggaacuccu

SEQ ID NO: 130969 - RNA, 32 nt, Human
cuccauguuucccaggcuggucucaaacuccu

SEQ ID NO: 130970 - RNA, 32 nt, Human
cuccauuaagagaagacuuuaagagaugaggg

SEQ ID NO: 130971 - RNA, 20 nt, Human
cuccauuacugaggcuguga

SEQ ID NO: 130972 - RNA, 19 nt, Human
cuccauuagcucacuuuua

SEQ ID NO: 130973 - RNA, 32 nt, Human
cuccauuagugucugcuaccuucugcaaccca

SEQ ID NO: 130974 - RNA, 21 nt, Human
cuccauuagugugccaccgua

SEQ ID NO: 130975 - RNA, 32 nt, Human
cuccauuauuuuauuuuauagucucaaaucaa

SEQ ID NO: 130976 - RNA, 32 nt, Human
cuccauucacacaguucaucaguucauuccca

SEQ ID NO: 130977 - RNA, 32 nt, Human
cuccauucacccagcgggaggugggaugugag

SEQ ID NO: 130978 - RNA, 31 nt, Human
cuccauucacuucuccugccagggccagccu

SEQ ID NO: 130979 - RNA, 31 nt, Human
cuccauucagcuagaaggaccaaagcaugug

SEQ ID NO: 130980 - RNA, 32 nt, Human
cuccauucaggcaaguguguuucagcaaaucu

SEQ ID NO: 130981 - RNA, 32 nt, Human
cuccauuccaaacuguugucugcuuucuuucu

SEQ ID NO: 130982 - RNA, 32 nt, Human
cuccauucccuaaugguuugcccuccaaaccc

SEQ ID NO: 130983 - RNA, 32 nt, Human
cuccauuccucuucaggcaucuggaggcccuc

SEQ ID NO: 130984 - RNA, 32 nt, Human
cuccauuccugugaagugacagguguggaccc

SEQ ID NO: 130985 - RNA, 32 nt, Human
cuccauucuaguugucuugaaccacgugggca

SEQ ID NO: 130986 - RNA, 32 nt, Human
cuccauucucaccucuauuuugagcuucagug

SEQ ID NO: 130987 - RNA, 32 nt, Human
cuccauucucugcuuugcugcaucuaccuucc

SEQ ID NO: 130988 - RNA, 32 nt, Human
cuccauucugggguuucaucaucaggcgggaa

SEQ ID NO: 130989 - RNA, 32 nt, Human
cuccauucuuguccagaaaacuccuuagcucu

SEQ ID NO: 130990 - RNA, 32 nt, Human
cuccauugcacuccagccugggcaacaagagu

SEQ ID NO: 130991 - RNA, 32 nt, Human
cuccauugcacuccagccugggcaacgagcga

SEQ ID NO: 130992 - RNA, 32 nt, Human
cuccauugcacuccagccugggcgauagagug

SEQ ID NO: 130993 - RNA, 32 nt, Human
cuccauugcacuccagccugggugacagugaa

SEQ ID NO: 130994 - RNA, 32 nt, Human
cuccauugcagacaguucccaaaggaggcugg

SEQ ID NO: 130995 - RNA, 25 nt, Human
cuccauugcccaggcuggacugcag

SEQ ID NO: 130996 - RNA, 32 nt, Human
cuccauugcccaggcuggacugcagcagcgug

SEQ ID NO: 130997 - RNA, 24 nt, Human
cuccauugcccaggcuggaguaca

SEQ ID NO: 130998 - RNA, 32 nt, Human
cuccauugcccaggcuggaguacaauggugcg

SEQ ID NO: 130999 - RNA, 26 nt, Human
cuccauugcccaggcuggauuacagu

SEQ ID NO: 131000 - RNA, 32 nt, Human
cuccauugcccaggcuggauuacaguggcgca

SEQ ID NO: 131001 - RNA, 32 nt, Human
cuccauugcguuucucuuucuccuucucuuuc

SEQ ID NO: 131002 - RNA, 32 nt, Human
cuccauugcuaccugacagaccugcgguuuga

SEQ ID NO: 131003 - RNA, 32 nt, Human
cuccauugcucugggggcugggauuccuggcu

SEQ ID NO: 131004 - RNA, 20 nt, Human
cuccauugcuguggcuccug

SEQ ID NO: 131005 - RNA, 32 nt, Human
cuccauuggcugucucaccaaugcuaccccua

SEQ ID NO: 131006 - RNA, 32 nt, Human
cuccauuguaucuucauacaaaggacaguaca

SEQ ID NO: 131007 - RNA, 32 nt, Human
cuccauuuccccuccuccucucuaccagacaa

SEQ ID NO: 131008 - RNA, 32 nt, Human
cuccauuucucaucucugucuacaaaacuagc

SEQ ID NO: 131009 - RNA, 32 nt, Human
cuccauuucuccauguaacuugcucacaugcc

SEQ ID NO: 131010 - RNA, 32 nt, Human
cuccauuucucccacagcucuguccacagcca

SEQ ID NO: 131011 - RNA, 32 nt, Human
cuccauuuucacugcugauaaagccucagguc

SEQ ID NO: 131012 - RNA, 32 nt, Human
cuccauuuucauuccuccugcaacuauuuucc

SEQ ID NO: 131013 - RNA, 32 nt, Human
cuccauuuuccucugcugcauggccccaggag

SEQ ID NO: 131014 - RNA, 32 nt, Human
cuccauuuugguuuguuuccucuuguuuguca

SEQ ID NO: 131015 - RNA, 32 nt, Human
cuccauuuuucaugauaaaauggcagugguga

SEQ ID NO: 131016 - RNA, 32 nt, Human
cucccaaaagaagaagaaagaacaaaucauaa

SEQ ID NO: 131017 - RNA, 23 nt, Human
cucccaaaagcugggauuacagg

SEQ ID NO: 131018 - RNA, 24 nt, Human
cucccaaaagugcuggauuacagg

SEQ ID NO: 131019 - RNA, 32 nt, Human
cucccaaaagugcuggauuacagggaugagcc

SEQ ID NO: 131020 - RNA, 32 nt, Human
cucccaaaauacugggauuacaggcuugagcc

SEQ ID NO: 131021 - RNA, 32 nt, Human
cucccaaaauacugggauuacaggggugaguc

SEQ ID NO: 131022 - RNA, 32 nt, Human
cucccaaaauauuggaaauacaggcaugagcc

SEQ ID NO: 131023 - RNA, 32 nt, Human
cucccaaaauauugggauuacagacaugagcc

SEQ ID NO: 131024 - RNA, 24 nt, Human
cucccaaaauccugggauuacagg

SEQ ID NO: 131025 - RNA, 32 nt, Human
cucccaaaaugcugagauuacaggugugagcc

SEQ ID NO: 131026 - RNA, 32 nt, Human
cucccaaaaugcugagauuacaggugugagug

SEQ ID NO: 131027 - RNA, 32 nt, Human
cucccaaaaugcuggaauuacaggcgugagcc

SEQ ID NO: 131028 - RNA, 32 nt, Human
cucccaaaaugcugggacuauaggugugagcc

SEQ ID NO: 131029 - RNA, 24 nt, Human
cucccaaaaugcugggacuauggg

SEQ ID NO: 131030 - RNA, 32 nt, Human
cucccaaaaugcugggacuaugggcaugagcc

SEQ ID NO: 131031 - RNA, 32 nt, Human
cucccaaaaugcugggaggcauaagccaccau

SEQ ID NO: 131032 - RNA, 22 nt, Human
cucccaaaaugcugggauuaca

SEQ ID NO: 131033 - RNA, 23 nt, Human
cucccaaaaugcugggauuacag

SEQ ID NO: 131034 - RNA, 24 nt, Human
cucccaaaaugcugggauuacagg

SEQ ID NO: 131035 - RNA, 32 nt, Human
cucccaaaaugcugggauuacaggagugagcc

SEQ ID NO: 131036 - RNA, 32 nt, Human
cucccaaaaugcugggauuacaggcauaagcc

SEQ ID NO: 131037 - RNA, 32 nt, Human
cucccaaaaugcugggauuacaggcaugagcc

SEQ ID NO: 131038 - RNA, 32 nt, Human
cucccaaaaugcugggauuacaggccugagcc

SEQ ID NO: 131039 - RNA, 32 nt, Human
cucccaaaaugcugggauuacaggcguaagcc

SEQ ID NO: 131040 - RNA, 32 nt, Human
cucccaaaaugcugggauuacaggcgugaagc

SEQ ID NO: 131041 - RNA, 32 nt, Human
cucccaaaaugcugggauuacaggcgugagcc

SEQ ID NO: 131042 - RNA, 32 nt, Human
cucccaaaaugcugggauuacaggcuugagcc

SEQ ID NO: 131043 - RNA, 32 nt, Human
cucccaaaaugcugggauuacagguaugagca

SEQ ID NO: 131044 - RNA, 32 nt, Human
cuccgucauccaagcuggagugcaguggugca

SEQ ID NO: 131045 - RNA, 32 nt, Human
cuccgucccacuccacuccaggcugccggcac

SEQ ID NO: 131046 - RNA, 32 nt, Human
cuccgucccagccuccuggcucaccacaugug

SEQ ID NO: 131047 - RNA, 23 nt, Human
cuccguccccgggcgcgcacggc

SEQ ID NO: 131048 - RNA, 32 nt, Human
cuccgucccugaguguccuuggcgcugccuug

SEQ ID NO: 131049 - RNA, 18 nt, Human
cuccguccucggccccug

SEQ ID NO: 131050 - RNA, 32 nt, Human
cuccguccugagcagccaccuccagggcccug

SEQ ID NO: 131051 - RNA, 32 nt, Human
cuccgucgcccaggcuggcaugcaguugcgcg

SEQ ID NO: 131052 - RNA, 32 nt, Human
cuccgucggaagggagcccaagcuuugcagag

SEQ ID NO: 131053 - RNA, 32 nt, Human
cuccgucggugcuguggucacccuggacagca

SEQ ID NO: 131054 - RNA, 32 nt, Human
cuccgucucaaaacaaaacaaaacaaaacacu

SEQ ID NO: 131055 - RNA, 32 nt, Human
cuccgucucaaaacaaaacaaaaguggguggc

SEQ ID NO: 131056 - RNA, 32 nt, Human
cuccgucucccaggccagagugcaguggcgca

SEQ ID NO: 131057 - RNA, 32 nt, Human
cuccgucugcccaccagccgccccucuccucc

SEQ ID NO: 131058 - RNA, 32 nt, Human
cuccgucugcccaccggccuccccucuccuuc

SEQ ID NO: 131059 - RNA, 20 nt, Human
cuccgucugccugugugcug

SEQ ID NO: 131060 - RNA, 32 nt, Human
cuccgucuguagugccaggggcucccucugca

SEQ ID NO: 131061 - RNA, 32 nt, Human
cuccgucuucuccccuccuucuuccccacugc

SEQ ID NO: 131062 - RNA, 32 nt, Human
cuccgucuucuggaaaaccccaaaaagaccag

SEQ ID NO: 131063 - RNA, 21 nt, Human
cuccgucuuuguaucccagcc

SEQ ID NO: 131064 - RNA, 20 nt, Human
cuccgugaaagacugccggg

SEQ ID NO: 131065 - RNA, 32 nt, Human
cuccgugaagaaugucuuccagaagaaaguag

SEQ ID NO: 131066 - RNA, 32 nt, Human
cuccgugacccaggcuggaaugcaauggcuca

SEQ ID NO: 131067 - RNA, 32 nt, Human
cuccgugagaccagauauuuugcugguuuugu

SEQ ID NO: 131068 - RNA, 32 nt, Human
cuccgugagaugggguccagcccaucccaaca

SEQ ID NO: 131069 - RNA, 32 nt, Human
cuccgugagcaagauggcgacugugaagagug

SEQ ID NO: 131070 - RNA, 32 nt, Human
cuccgugccaucauguccguccugacgccgcu

SEQ ID NO: 131071 - RNA, 32 nt, Human
cuccgugccucugcaaccgccgcuuccgcccg

SEQ ID NO: 131072 - RNA, 32 nt, Human
cuccgugccuggaacccugccucaucuguucc

SEQ ID NO: 131073 - RNA, 32 nt, Human
cuccgugcuaggcccgaaggaggguaggaguc

SEQ ID NO: 131074 - RNA, 32 nt, Human
cuccgugcucccaucacucggaaccauuugca

SEQ ID NO: 131075 - RNA, 32 nt, Human
cuccgugcuggugggacugaggagaacgccgu

SEQ ID NO: 131076 - RNA, 32 nt, Human
cuccgugcuuccucuccuccccuguacgugcc

SEQ ID NO: 131077 - RNA, 32 nt, Human
cuccguggagccaauccaaggagagacacuau

SEQ ID NO: 131078 - RNA, 32 nt, Human
cuccguggaggaagacugugagacuguggcug

SEQ ID NO: 131079 - RNA, 32 nt, Human
cuccguggagugaaaaaggcagggugugcucg

SEQ ID NO: 131080 - RNA, 32 nt, Human
cuccguggccauuuggggauucaugccugcaa

SEQ ID NO: 131081 - RNA, 32 nt, Human
cuccguggcucccagccccagcuuagucuuuc

SEQ ID NO: 131082 - RNA, 32 nt, Human
cuccguggcugcccucuccugccucaugcuug

SEQ ID NO: 131083 - RNA, 32 nt, Human
cuccguggcugcgucccaggaggcaggcagug

SEQ ID NO: 131084 - RNA, 32 nt, Human
cuccguggcuggaggaccaaccccuauagugg

SEQ ID NO: 131085 - RNA, 32 nt, Human
cuccgugggcaggccagcggggaggccaugcu

SEQ ID NO: 131086 - RNA, 32 nt, Human
cuccgugggcgcucaauaaacacacaugagaa

SEQ ID NO: 131087 - RNA, 32 nt, Human
cuccgugggcuuccguggugcagcccuggggc

SEQ ID NO: 131088 - RNA, 32 nt, Human
cuccguggucccaggaugccuaugcuggaaag

SEQ ID NO: 131089 - RNA, 32 nt, Human
cuccguggugugugucuuggugcauuggaaaa

SEQ ID NO: 131090 - RNA, 32 nt, Human
cuccgugguuaucccgcugucuccucuccaag

SEQ ID NO: 131091 - RNA, 22 nt, Human
cuccguguagccugaagccugg

SEQ ID NO: 131092 - RNA, 32 nt, Human
cuccgugucaaugcagucuuacccagggcaca

SEQ ID NO: 131093 - RNA, 32 nt, Human
cuccguguccaacuggcugccugcuccuucuc

SEQ ID NO: 131094 - RNA, 21 nt, Human
cuccgugucgccgccgccgcc

SEQ ID NO: 131095 - RNA, 32 nt, Human
cuccguguguccuucuguggccgcaccgugug

SEQ ID NO: 131096 - RNA, 32 nt, Human
cuccguguuuggggugggggagcugcuuagag

SEQ ID NO: 131097 - RNA, 32 nt, Human
cuccguguuuuuaucacaccugcuccccagau

SEQ ID NO: 131098 - RNA, 32 nt, Human
cuccguucacugcaaucucugccuccuggguu

SEQ ID NO: 131099 - RNA, 32 nt, Human
cuccguucucucucauuauucccucgaguucu

SEQ ID NO: 131100 - RNA, 32 nt, Human
cuccguucucugcaucccuccaccccaguauc

SEQ ID NO: 131101 - RNA, 32 nt, Human
cuccguugacucccccgacucuugccugggga

SEQ ID NO: 131102 - RNA, 25 nt, Human
cuccguugccaggcuggagugcugu

SEQ ID NO: 131103 - RNA, 32 nt, Human
cuccguugcccaggcuggaguacaauggugcg

SEQ ID NO: 131104 - RNA, 32 nt, Human
cuccguugcccagguuggagugcaguggccca

SEQ ID NO: 131105 - RNA, 32 nt, Human
cuccguugccuagcuggagugcacgaucucag

SEQ ID NO: 131106 - RNA, 32 nt, Human
cuccguugggcaaaugaagcucuucgccuuag

SEQ ID NO: 131107 - RNA, 21 nt, Human
cuccguuuucugaauugcaua

SEQ ID NO: 131108 - RNA, 32 nt, Human
cuccuaaaaauacaaaaauuagccagaugugg

SEQ ID NO: 131109 - RNA, 32 nt, Human
cuccuaaaaauacaaaaauuagccgggcaugg

SEQ ID NO: 131110 - RNA, 32 nt, Human
cuccuaaaaauacaaaaauuggccgggcaugg

SEQ ID NO: 131111 - RNA, 32 nt, Human
cuccuaaaaauacaaaauuagccgggcguggu

SEQ ID NO: 131112 - RNA, 32 nt, Human
cuccuaaaauauacaaaaauuagccgggcaug

SEQ ID NO: 131113 - RNA, 24 nt, Human
cuccuaaaaugcugggauuacagg

SEQ ID NO: 131114 - RNA, 32 nt, Human
cuccuaaacccucacucuucagccucuguuug

SEQ ID NO: 131115 - RNA, 24 nt, Human
cuccuaaagacacagcaguauggg

SEQ ID NO: 131116 - RNA, 24 nt, Human
cuccuaaagcacugggauuacagg

SEQ ID NO: 131117 - RNA, 24 nt, Human
cuccuaaaguacugggauuacagg

SEQ ID NO: 131118 - RNA, 32 nt, Human
cuccuaaaguacugggauuacaggcgugagcc

SEQ ID NO: 131119 - RNA, 32 nt, Human
cuccuaaaguacugggauuuauaggcauaagc

SEQ ID NO: 131120 - RNA, 24 nt, Human
cuccuaaaguccuaggauuauagg

SEQ ID NO: 131121 - RNA, 23 nt, Human
cuccuaaagugccggauuacagg

SEQ ID NO: 131122 - RNA, 24 nt, Human
cuccuaaagugcuaggauuacagg

SEQ ID NO: 131123 - RNA, 24 nt, Human
cuccuaaagugcugagauuacagg

SEQ ID NO: 131124 - RNA, 32 nt, Human
cuccuaaagugcugagauuacaggugugagcc

SEQ ID NO: 131125 - RNA, 24 nt, Human
cuccuaaagugcugcgauuacagg

SEQ ID NO: 131126 - RNA, 32 nt, Human
cuccuaaagugcugcgauuacaggcaugagcc

SEQ ID NO: 131127 - RNA, 32 nt, Human
cuccuaaagugcuggagauuacaggcaugagc

SEQ ID NO: 131128 - RNA, 25 nt, Human
cuccuaaagugcuggcauuacaggc

SEQ ID NO: 131129 - RNA, 32 nt, Human
cuccuaaagugcugggauaacaggcgugagcc

SEQ ID NO: 131130 - RNA, 24 nt, Human
cuccuaaagugcugggaucacagg

SEQ ID NO: 131131 - RNA, 32 nt, Human
cuccuaaagugcugggaucacaggcgugagcc

SEQ ID NO: 131132 - RNA, 19 nt, Human
cuccuaaagugcugggauu

SEQ ID NO: 131133 - RNA, 22 nt, Human
cuccuaaagugcugggauuaca

SEQ ID NO: 131134 - RNA, 24 nt, Human
cuccuaaagugcugggauuacagg

SEQ ID NO: 131135 - RNA, 32 nt, Human
cuccuaaagugcugggauuacaggcacgcucu

SEQ ID NO: 131136 - RNA, 32 nt, Human
cuccuaaagugcugggauuacaggcaucugcc

SEQ ID NO: 131137 - RNA, 32 nt, Human
cuccuaaagugcugggauuacaggcaugagcc

SEQ ID NO: 131138 - RNA, 32 nt, Human
cuccuaaagugcugggauuacaggccugagcc

SEQ ID NO: 131139 - RNA, 32 nt, Human
cuccuaaagugcugggauuacaggcgugaacc

SEQ ID NO: 131140 - RNA, 32 nt, Human
cuccuaaagugcugggauuacaggcgugagcc

SEQ ID NO: 131141 - RNA, 32 nt, Human
cuccuaaagugcugggauuacaggugugagcc

SEQ ID NO: 131142 - RNA, 32 nt, Human
cuccuaaagugcugggauuacaugagccacca

SEQ ID NO: 131143 - RNA, 32 nt, Human
cuccuaaagugcugggauuacaugugugagcc

SEQ ID NO: 131144 - RNA, 23 nt, Human
cuccuaaagugcugggauuauag

SEQ ID NO: 131145 - RNA, 32 nt, Human
cuccuaaagugcugggauuauagcugugagcc

SEQ ID NO: 131146 - RNA, 24 nt, Human
cuccuaaagugcugggauuauagg

SEQ ID NO: 131147 - RNA, 32 nt, Human
cuccuaaagugcugggauuauaggcaugaguc

SEQ ID NO: 131148 - RNA, 24 nt, Human
cuccuaaagugcugggauuccagg

SEQ ID NO: 131149 - RNA, 32 nt, Human
cuccuaaagugcugggauuccaggugugagcc

SEQ ID NO: 131150 - RNA, 24 nt, Human
cuccuaaaguucugggauuacagg

SEQ ID NO: 131151 - RNA, 24 nt, Human
cuccuaaauugcugggauuacagg

SEQ ID NO: 131152 - RNA, 24 nt, Human
cuccuaaauuguugggauuacagg

SEQ ID NO: 131153 - RNA, 32 nt, Human
cuccuaaauuguugggauuacaggugugagac

SEQ ID NO: 131154 - RNA, 32 nt, Human
cuccuaacauaguucuacuaugcuagaagugg

SEQ ID NO: 131155 - RNA, 32 nt, Human
cuccuaacccaaggcggagaaugaagguggug

SEQ ID NO: 131156 - RNA, 20 nt, Human
cuccuaaccugcuccaguca

SEQ ID NO: 131157 - RNA, 32 nt, Human
cuccuaacuaaauauuugauuuuaggagagug

SEQ ID NO: 131158 - RNA, 32 nt, Human
cuccuaacucagcuccugccucaugucggccu

SEQ ID NO: 131159 - RNA, 32 nt, Human
cuccuaacucucaggaaacacuugucggcuga

SEQ ID NO: 131160 - RNA, 32 nt, Human
cuccuaacugucaggguggggagcugguuccc

SEQ ID NO: 131161 - RNA, 32 nt, Human
cuccuaacuucagggaauaaagugcuaaagug

SEQ ID NO: 131162 - RNA, 32 nt, Human
cuccuaagaccugaaaacucuucucaagaaaa

SEQ ID NO: 131163 - RNA, 32 nt, Human
cuccuaagagucaguugaaagaaagacaagag

SEQ ID NO: 131164 - RNA, 32 nt, Human
cuccuaagccugccuuucuuuccuacagucug

SEQ ID NO: 131165 - RNA, 22 nt, Human
cuccuaagcuggagugcagugg

SEQ ID NO: 131166 - RNA, 32 nt, Human
cuccuaaggacagguuuuauugacugauacca

SEQ ID NO: 131167 - RNA, 24 nt, Human
cuccuaaguagcagggauuacagg

SEQ ID NO: 131168 - RNA, 32 nt, Human
cuccuaaguagcagggauuacaggcaugcacc

SEQ ID NO: 131169 - RNA, 24 nt, Human
cuccuaaguagcuggcauuacagg

SEQ ID NO: 131170 - RNA, 24 nt, Human
cuccuaaguagcugggacuacagg

SEQ ID NO: 131171 - RNA, 24 nt, Human
cuccuaaguagcugggaguacagg

SEQ ID NO: 131172 - RNA, 24 nt, Human
cuccuaaguagcugggauuacagg

SEQ ID NO: 131173 - RNA, 32 nt, Human
cuccuaaguagcugggauuacaggcacccacc

SEQ ID NO: 131174 - RNA, 32 nt, Human
cuccuaaguagcugggauuacaggcacccacg

SEQ ID NO: 131175 - RNA, 32 nt, Human
cuccuaaguagcugggauuacaggcaccugcc

SEQ ID NO: 131176 - RNA, 32 nt, Human
cuccuaaguagcugggauuacaggcaugcgcc

SEQ ID NO: 131177 - RNA, 32 nt, Human
cuccuaaguagcugggauuacaggcgcgugcc

SEQ ID NO: 131178 - RNA, 24 nt, Human
cuccuaaguaucugggauuacagg

SEQ ID NO: 131179 - RNA, 32 nt, Human
cuccuaauggacaccucuccucugcugccaua

SEQ ID NO: 131180 - RNA, 32 nt, Human
cuccuacaacagccacaaccucccugcugguc

SEQ ID NO: 131181 - RNA, 32 nt, Human
cuccuacaagggcacagcuguccguaucuccu

SEQ ID NO: 131182 - RNA, 32 nt, Human
cuccuacacaaaauugaaauauacaagucucu

SEQ ID NO: 131183 - RNA, 32 nt, Human
cuccuacacagcaucagagaauuucauucuug

SEQ ID NO: 131184 - RNA, 32 nt, Human
cuccuacaccugcuuuggaaagacaugcacuu

SEQ ID NO: 131185 - RNA, 32 nt, Human
cuccuacaccugcuuugucagauacagcuggg

SEQ ID NO: 131186 - RNA, 28 nt, Human
cuccuacagcacuccaccuugggaccug

SEQ ID NO: 131187 - RNA, 32 nt, Human
cuccuacaggagaaaaguuguaugaaugugga

SEQ ID NO: 131188 - RNA, 32 nt, Human
cuccuacaggcgcuccaggccacucucagaga

SEQ ID NO: 131189 - RNA, 32 nt, Human
cuccuacaguuccucccagcagucccucaacg

SEQ ID NO: 131190 - RNA, 32 nt, Human
cuccuaccacccuuauuggagcacuuuguacu

SEQ ID NO: 131191 - RNA, 22 nt, Human
cuccuaccagaaagcccugcag

SEQ ID NO: 131192 - RNA, 30 nt, Human
cuccuaccccagcccccauccugggcugcu

SEQ ID NO: 131193 - RNA, 32 nt, Human
cuccuacccuauggcccugaauggugcacugg

SEQ ID NO: 131194 - RNA, 32 nt, Human
cuccuacccugcuccguguccucccucucccc

SEQ ID NO: 131195 - RNA, 32 nt, Human
cuccuaccucagccucccaaauagcugggacu

SEQ ID NO: 131196 - RNA, 32 nt, Human
cuccuaccucagcuucccaaagugcagggauu

SEQ ID NO: 131197 - RNA, 32 nt, Human
cuccuaccuccaccuucucagaugagccccau

SEQ ID NO: 131198 - RNA, 20 nt, Human
cuccuacggcggcucugaag

SEQ ID NO: 131199 - RNA, 32 nt, Human
cuccuacgucagccuccugaauagcugggauu

SEQ ID NO: 131200 - RNA, 32 nt, Human
cuccuacuaccugucucacuguguuuccuacu

SEQ ID NO: 131201 - RNA, 32 nt, Human
cuccuacucuuuagauguucucagucaaguac

SEQ ID NO: 131202 - RNA, 32 nt, Human
cuccuacucuuucucacauccucuucaugauu

SEQ ID NO: 131203 - RNA, 32 nt, Human
cuccuacugcucuuccucucucccucucuuag

SEQ ID NO: 131204 - RNA, 32 nt, Human
cuccuacuguguaggagccuccgcuucccaau

SEQ ID NO: 131205 - RNA, 16 nt, Human
cuccuagagugcaggg

SEQ ID NO: 131206 - RNA, 24 nt, Human
cuccuagagugcagggauuacagg

SEQ ID NO: 131207 - RNA, 32 nt, Human
cuccuagagugcagggauuacaggcgugagcc

SEQ ID NO: 131208 - RNA, 23 nt, Human
cuccuagagugcugggauuacag

SEQ ID NO: 131209 - RNA, 32 nt, Human
cuccuagagugcugggauuacagacaugagcc

SEQ ID NO: 131210 - RNA, 24 nt, Human
cuccuagagugcugggauuacagg

SEQ ID NO: 131211 - RNA, 32 nt, Human
cuccuagagugcugggauuacaggugugagcc

SEQ ID NO: 131212 - RNA, 32 nt, Human
cuccuagauggaagcugcccugcccuuggaag

SEQ ID NO: 131213 - RNA, 32 nt, Human
cuccuagcaaaugugucuuccucccaggguuc

SEQ ID NO: 131214 - RNA, 32 nt, Human
cuccuagcagagaagagccagccagaccccaa

SEQ ID NO: 131215 - RNA, 32 nt, Human
cuccuagccacugcuuucuccucugugccauc

SEQ ID NO: 131216 - RNA, 32 nt, Human
cuccuagccagccuggacuuuggagcgugggg

SEQ ID NO: 131217 - RNA, 32 nt, Human
cuccuagccauaacccucccugcugaccucac

SEQ ID NO: 131218 - RNA, 32 nt, Human
cuccuagcccuucuguucuuccuuggccaagc

SEQ ID NO: 131219 - RNA, 32 nt, Human
cuccuagcugagugguucacaggccagcuggc

SEQ ID NO: 131220 - RNA, 32 nt, Human
cuccuagcugcuccagucucagccugggcagc

SEQ ID NO: 131221 - RNA, 21 nt, Human
cuccuagcuggagugccaugg

SEQ ID NO: 131222 - RNA, 32 nt, Human
cuccuaggaccaggcugaggcccagggacagu

SEQ ID NO: 131223 - RNA, 32 nt, Human
cuccuaggaggccccuuccaggcaaagcugcu

SEQ ID NO: 131224 - RNA, 32 nt, Human
cuccuaggaggucccccuggggugggcgggcg

SEQ ID NO: 131225 - RNA, 32 nt, Human
cuccuaggaggugcuucccaugcucuuuguaa

SEQ ID NO: 131226 - RNA, 32 nt, Human
cuccuaggaugaccucacccuccagcucucca

SEQ ID NO: 131227 - RNA, 32 nt, Human
cuccuaggcagaccuaucaacuccaggugcug

SEQ ID NO: 131228 - RNA, 32 nt, Human
cuccuaggcaggccucucaacuccaggugcug

SEQ ID NO: 131229 - RNA, 22 nt, Human
cuccuaggcuggagugcagugg

SEQ ID NO: 131230 - RNA, 32 nt, Human
cuccuagggagggcggggguuguggugagagg

SEQ ID NO: 131231 - RNA, 23 nt, Human
cuccuagggucacugugccucuc

SEQ ID NO: 131232 - RNA, 24 nt, Human
cuccuagggugcugggauugcagg

SEQ ID NO: 131233 - RNA, 32 nt, Human
cuccuagggugcugggauugcaggccugagcc

SEQ ID NO: 131234 - RNA, 32 nt, Human
cuccuagguaggccuaucaacuccagguguug

SEQ ID NO: 131235 - RNA, 32 nt, Human
cuccuaguaguacuuuuucucucuccauuuaa

SEQ ID NO: 131236 - RNA, 19 nt, Human
cuccuaguagugguuccag

SEQ ID NO: 131237 - RNA, 32 nt, Human
cuccuaguggaggaggcucuucagucuccuga

SEQ ID NO: 131238 - RNA, 32 nt, Human
cuccuauaaucccuauaauaagccccuuauuu

SEQ ID NO: 131239 - RNA, 32 nt, Human
cuccuauaccaccaccaccaccaccauuacag

SEQ ID NO: 131240 - RNA, 32 nt, Human
cuccuaucuccuccucuuggcucucaaugcug

SEQ ID NO: 131241 - RNA, 32 nt, Human
cuccuaugccaccccagguggggagggaggga

SEQ ID NO: 131242 - RNA, 32 nt, Human
cuccuaugccucaucaugucccaaaccagaca

SEQ ID NO: 131243 - RNA, 21 nt, Human
cuccuaugugcccucaccauc

SEQ ID NO: 131244 - RNA, 32 nt, Human
cuccuauucccacgccuuaacacagcucuaua

SEQ ID NO: 131245 - RNA, 23 nt, Human
cuccuauucccccugaagucagg

SEQ ID NO: 131246 - RNA, 32 nt, Human
cuccuauucccccugaagucaggaccagugcc

SEQ ID NO: 131247 - RNA, 32 nt, Human
cuccuauugaagacaagagcaauaguaaaaca

SEQ ID NO: 131248 - RNA, 32 nt, Human
cuccuauugccuccauucuccucucucuaucc

SEQ ID NO: 131249 - RNA, 32 nt, Human
cuccuauuuaagagaaauauaugcccuagagc

SEQ ID NO: 131250 - RNA, 23 nt, Human
cuccucaaauacaccacucaggu

SEQ ID NO: 131251 - RNA, 32 nt, Human
cuccucaaccucuaccuggcggagguuauaug

SEQ ID NO: 131252 - RNA, 23 nt, Human
cuccucaagaaaagcgaaaggac

SEQ ID NO: 131253 - RNA, 23 nt, Human
cuccucaagaaacaucaagggac

SEQ ID NO: 131254 - RNA, 32 nt, Human
cuccucaagcugccugugcaccccaguagcac

SEQ ID NO: 131255 - RNA, 20 nt, Human
cuccucaaggaaaucaugga

SEQ ID NO: 131256 - RNA, 22 nt, Human
cuccucaaggagagauaaagag

SEQ ID NO: 131257 - RNA, 19 nt, Human
cuccucaagguugucuuca

SEQ ID NO: 131258 - RNA, 32 nt, Human
cuccucaauaucuagccuauucaugcacucua

SEQ ID NO: 131259 - RNA, 24 nt, Human
cuccucacacacccggcccagugg

SEQ ID NO: 131260 - RNA, 32 nt, Human
cuccucacagaaguaccugaaacuaggucugg

SEQ ID NO: 131261 - RNA, 21 nt, Human
cuccucacagagcaagauguu

SEQ ID NO: 131262 - RNA, 32 nt, Human
cuccucacagaggccugguuugcucagucuuc

SEQ ID NO: 131263 - RNA, 32 nt, Human
cuccucacagcaucucuaugaagagaaggagg

SEQ ID NO: 131264 - RNA, 32 nt, Human
cuccucacaggcaaccauuauuguuuugaaga

SEQ ID NO: 131265 - RNA, 32 nt, Human
cuccucaccagacuuccagacgacuacaucau

SEQ ID NO: 131266 - RNA, 32 nt, Human
cuccucaccagcucuccagccaggacgaucac

SEQ ID NO: 131267 - RNA, 32 nt, Human
cuccucaccaugguggcugaguucuggaggcu

SEQ ID NO: 131268 - RNA, 19 nt, Human
cuccucacccaccacccca

SEQ ID NO: 131269 - RNA, 32 nt, Human
cuccucaccccagccacauguuuucuuuaaga

SEQ ID NO: 131270 - RNA, 32 nt, Human
cuccucaccccagcccuccaccucucggggac

SEQ ID NO: 131271 - RNA, 24 nt, Human
cuccucacccccuugcuccccugg

SEQ ID NO: 131272 - RNA, 24 nt, Human
cuccucaccccgccgccgccgccg

SEQ ID NO: 131273 - RNA, 32 nt, Human
cuccucaccccuaucuucaucuccuguggacg

SEQ ID NO: 131274 - RNA, 32 nt, Human
cuccucaccgcagcacccccacugcaggcucg

SEQ ID NO: 131275 - RNA, 23 nt, Human
cuccucaccgccgccgcuguccg

SEQ ID NO: 131276 - RNA, 20 nt, Human
cuccucaccucgcgcgcggc

SEQ ID NO: 131277 - RNA, 17 nt, Human
cuccucaccuguugccg

SEQ ID NO: 131278 - RNA, 21 nt, Human
cuccucacgcugcggcugucg

SEQ ID NO: 131279 - RNA, 32 nt, Human
cuccucacucacccuccagccaugcuggcuuc

SEQ ID NO: 131280 - RNA, 24 nt, Human
cuccucacucaccucaacccccag

SEQ ID NO: 131281 - RNA, 32 nt, Human
cuccucacucagcuccugccucccucuccccu

SEQ ID NO: 131282 - RNA, 18 nt, Human
cuccucacucccuuccca

SEQ ID NO: 131283 - RNA, 22 nt, Human
cuccucacuggugaaacccagg

SEQ ID NO: 131284 - RNA, 19 nt, Human
cuccucacugucgcugccg

SEQ ID NO: 131285 - RNA, 32 nt, Human
cuccucacuuccugguuccucuaccuuucccg

SEQ ID NO: 131286 - RNA, 21 nt, Human
cuccucagacagcgguuccag

SEQ ID NO: 131287 - RNA, 32 nt, Human
cuccucagacaguaaccauggggaagaaaucu

SEQ ID NO: 131288 - RNA, 32 nt, Human
cuccucagaccccaggacaaggcuggccucuc

SEQ ID NO: 131289 - RNA, 19 nt, Human
cuccucagacuugcagggu

SEQ ID NO: 131290 - RNA, 32 nt, Human
cuccucagagaaggguggggugccugggaccc

SEQ ID NO: 131291 - RNA, 23 nt, Human
cuccucagagcagccggcugccg

SEQ ID NO: 131292 - RNA, 32 nt, Human
cuccucagaggugggagcugcggccgagggaa

SEQ ID NO: 131293 - RNA, 32 nt, Human
cuccucagauauacuugguucucuccaccagg

SEQ ID NO: 131294 - RNA, 32 nt, Human
cuccucagaucacccuugcaaaucuggccuca

SEQ ID NO: 131295 - RNA, 32 nt, Human
cuccucagaugggccugcaucccgccugugga

SEQ ID NO: 131296 - RNA, 18 nt, Human
cuccucagcagcgcugcc

SEQ ID NO: 131297 - RNA, 32 nt, Human
cuccucagcauggccucagugggcgcacccau

SEQ ID NO: 131298 - RNA, 19 nt, Human
cuccucagccaaucagcgu

SEQ ID NO: 131299 - RNA, 19 nt, Human
cuccucagcccacucgcug

SEQ ID NO: 131300 - RNA, 23 nt, Human
cuccucagcccucggcgccgccg

SEQ ID NO: 131301 - RNA, 32 nt, Human
cuccucagccgcccgcccaccugggccugggc

SEQ ID NO: 131302 - RNA, 32 nt, Human
cuccucagccuccaccaucccccaggugaugu

SEQ ID NO: 131303 - RNA, 32 nt, Human
cuccucagccucccuuugccagccaccccucc

SEQ ID NO: 131304 - RNA, 32 nt, Human
cuccucagccuccugaguaccugagacuacag

SEQ ID NO: 131305 - RNA, 32 nt, Human
cuccucagccugccucacaguggccauggggu

SEQ ID NO: 131306 - RNA, 32 nt, Human
cuccucagccugggcugugcucucucuagaau

SEQ ID NO: 131307 - RNA, 32 nt, Human
cuccucagcucaccuucucucuucaccaugag

SEQ ID NO: 131308 - RNA, 32 nt, Human
cuccucagcuuccuccccaucugggugcccca

SEQ ID NO: 131309 - RNA, 32 nt, Human
cuccucagcuuugagcuguggcugccacccau

SEQ ID NO: 131310 - RNA, 32 nt, Human
cuccucaggaaggcgggugagguuggugugag

SEQ ID NO: 131311 - RNA, 32 nt, Human
cuccucaggacaccugcccgcucuuucccugg

SEQ ID NO: 131312 - RNA, 24 nt, Human
cuccucaggagcugggauuacagg

SEQ ID NO: 131313 - RNA, 32 nt, Human
cuccucaggaggcugaggcaggagaaucacuu

SEQ ID NO: 131314 - RNA, 32 nt, Human
cuccucaggccuggcccucgggccuccgugau

SEQ ID NO: 131315 - RNA, 17 nt, Human
cuccucaggcugcugcc

SEQ ID NO: 131316 - RNA, 32 nt, Human
cuccucaggcuucuguuccauuccuuaauugu

SEQ ID NO: 131317 - RNA, 32 nt, Human
cuccucagguugcuuguccuccccuggccucc

SEQ ID NO: 131318 - RNA, 32 nt, Human
cuccucaguagcugggauuacaggcaugugcc

SEQ ID NO: 131319 - RNA, 19 nt, Human
cuccucagucgccgccgcc

SEQ ID NO: 131320 - RNA, 32 nt, Human
cuccucaguucacuccaaccaggauuugcugc

SEQ ID NO: 131321 - RNA, 32 nt, Human
cuccucaguuucccaucugcugugccucuggg

SEQ ID NO: 131322 - RNA, 32 nt, Human
cuccucauccauuucuuuuauaccuuuccuuu

SEQ ID NO: 131323 - RNA, 32 nt, Human
cuccucauccccugccuuaaguccaguucuuu

SEQ ID NO: 131324 - RNA, 32 nt, Human
cuccucaucccucacccucgguaucuuaucac

SEQ ID NO: 131325 - RNA, 32 nt, Human
cuccucaucccucacccugaccuuucuccugu

SEQ ID NO: 131326 - RNA, 32 nt, Human
cuccucauccucuucgucuuccucaucuuccu

SEQ ID NO: 131327 - RNA, 32 nt, Human
cuccucauccugucuagggcucacugaucaac

SEQ ID NO: 131328 - RNA, 32 nt, Human
cuccucaugcccaagagaucugugccauagaa

SEQ ID NO: 131329 - RNA, 32 nt, Human
cuccucaugcuggccuauccugcagugcggug

SEQ ID NO: 131330 - RNA, 32 nt, Human
cuccucauggauuugaaugaaaugccaauaac

SEQ ID NO: 131331 - RNA, 21 nt, Human
cuccucauggccgacuucaaa

SEQ ID NO: 131332 - RNA, 20 nt, Human
cuccucauggcgcugcugcc

SEQ ID NO: 131333 - RNA, 32 nt, Human
cuccucauguuugucaucuucuaccucugcca

SEQ ID NO: 131334 - RNA, 32 nt, Human
cuccucauuauucaguacauuucccaauaauc

SEQ ID NO: 131335 - RNA, 32 nt, Human
cuccuccaaaccccaaaccccaaacggaaauc

SEQ ID NO: 131336 - RNA, 32 nt, Human
cuccuccaaaucugggcugggucuaggucccu

SEQ ID NO: 131337 - RNA, 32 nt, Human
cuccuccaacagcugccuucucccggguucca

SEQ ID NO: 131338 - RNA, 32 nt, Human
cuccuccaaccccauucccuauccucucccua

SEQ ID NO: 131339 - RNA, 32 nt, Human
cuccuccaaccuccccuuucauagaagagguu

SEQ ID NO: 131340 - RNA, 19 nt, Human
cuccuccaaccucuccaac

SEQ ID NO: 131341 - RNA, 32 nt, Human
cuccuccaagacaccuuccugggacgcuggcc

SEQ ID NO: 131342 - RNA, 24 nt, Human
cuccuccaagccuucacccugugg

SEQ ID NO: 131343 - RNA, 28 nt, Human
cuccuccacagugcugcuucucuuggga

SEQ ID NO: 131344 - RNA, 25 nt, Human
cuccuccaccgggccuggugugcug

SEQ ID NO: 131345 - RNA, 32 nt, Human
cuccuccaccuccaaacacccccaccuuggaa

SEQ ID NO: 131346 - RNA, 32 nt, Human
cuccuccaccuccuccuccuccuccucuccuc

SEQ ID NO: 131347 - RNA, 32 nt, Human
cuccuccaccuucccugugcucggucuccacc

SEQ ID NO: 131348 - RNA, 32 nt, Human
cuccuccacgcuuacagccacacacacaguca

SEQ ID NO: 131349 - RNA, 18 nt, Human
cuccuccacgugcuuccu

SEQ ID NO: 131350 - RNA, 31 nt, Human
cuccuccagagagcucaguuggaaaggcccu

SEQ ID NO: 131351 - RNA, 32 nt, Human
cuccuccagagggagggagcuaagggcgccua

SEQ ID NO: 131352 - RNA, 27 nt, Human
cuccuccagcaccaccacacccagugg

SEQ ID NO: 131353 - RNA, 32 nt, Human
cuccuccagccccugcaccugucauuuauucu

SEQ ID NO: 131354 - RNA, 32 nt, Human
cuccuccagccgccgccgaaucaugucgauga

SEQ ID NO: 131355 - RNA, 32 nt, Human
cuccuccagcuccuucuuucugcaacaugggg

SEQ ID NO: 131356 - RNA, 32 nt, Human
cuccuccagcucugccuuagaaacccaagccc

SEQ ID NO: 131357 - RNA, 20 nt, Human
cuccuccagcugcccuagug

SEQ ID NO: 131358 - RNA, 21 nt, Human
cuccuccagcugcgcccaggg

SEQ ID NO: 131359 - RNA, 32 nt, Human
cuccuccagcuggagacguggagggaguggag

SEQ ID NO: 131360 - RNA, 21 nt, Human
cuccuccaggaauucccagca

SEQ ID NO: 131361 - RNA, 32 nt, Human
cuccuccaggagauuauuuaaguguauuguau

SEQ ID NO: 131362 - RNA, 32 nt, Human
cuccuccaggccugccucccacuucacugcga

SEQ ID NO: 131363 - RNA, 32 nt, Human
cuccuccaucucgacggcgcugccucagguca

SEQ ID NO: 131364 - RNA, 32 nt, Human
cuccuccaugcccauggcugggccguggggag

SEQ ID NO: 131365 - RNA, 32 nt, Human
cuccuccaugcuguaugccauggucagugguu

SEQ ID NO: 131366 - RNA, 32 nt, Human
cuccuccaugggagaaaauagauaagaguaga

SEQ ID NO: 131367 - RNA, 21 nt, Human
cuccuccaugggcccugcagg

SEQ ID NO: 131368 - RNA, 24 nt, Human
cuccuccauuacacuguagccaga

SEQ ID NO: 131369 - RNA, 32 nt, Human
cuccuccauucccugcucacucagccaccucc

SEQ ID NO: 131370 - RNA, 32 nt, Human
cuccucccaaaaugccuccacuccagguucca

SEQ ID NO: 131371 - RNA, 32 nt, Human
cuccucccaaaaugcugggauuacagguguga

SEQ ID NO: 131372 - RNA, 32 nt, Human
cuccucccaaagucccccuccucagccagccu

SEQ ID NO: 131373 - RNA, 32 nt, Human
cuccucccaaagugcugggauuacaggcguga

SEQ ID NO: 131374 - RNA, 19 nt, Human
cuccucccacagccuggcu

SEQ ID NO: 131375 - RNA, 18 nt, Human
cuccucccacgccgugcu

SEQ ID NO: 131376 - RNA, 17 nt, Human
cuccucccacugugugu

SEQ ID NO: 131377 - RNA, 32 nt, Human
cuccucccaggccugacugucaccaaccuccu

SEQ ID NO: 131378 - RNA, 20 nt, Human
cuccucccagucaccugcug

SEQ ID NO: 131379 - RNA, 32 nt, Human
cuccucccaguggagugggguucugccaguac

SEQ ID NO: 131380 - RNA, 32 nt, Human
cuccucccaucugccuugagauucccuugucu

SEQ ID NO: 131381 - RNA, 32 nt, Human
cuccucccaucuguccccaucuuccuccccac

SEQ ID NO: 131382 - RNA, 32 nt, Human
cuccucccauuuucaccugcccccauuuugaa

SEQ ID NO: 131383 - RNA, 20 nt, Human
cuccuccccacauggugcug

SEQ ID NO: 131384 - RNA, 32 nt, Human
cuccuccccacccgcccuccccacggggccuc

SEQ ID NO: 131385 - RNA, 32 nt, Human
cuccuccccacgcuucccugcuauaguuccca

SEQ ID NO: 131386 - RNA, 21 nt, Human
cuccuccccacuuguccgcug

SEQ ID NO: 131387 - RNA, 32 nt, Human
cuccuccccauccucucccucugucccucugu

SEQ ID NO: 131388 - RNA, 32 nt, Human
cuccuccccaugccccuccucacuucaucuag

SEQ ID NO: 131389 - RNA, 22 nt, Human
cuccucccccaauucccagguc

SEQ ID NO: 131390 - RNA, 32 nt, Human
cuccucccccagacuucagagauguuuuucug

SEQ ID NO: 131391 - RNA, 18 nt, Human
cuccucccccgcccgccg

SEQ ID NO: 131392 - RNA, 32 nt, Human
cuccucccccucaugccaaccccacacagguc

SEQ ID NO: 131393 - RNA, 32 nt, Human
cuccucccccucccccuuagucucucugcucc

SEQ ID NO: 131394 - RNA, 32 nt, Human
cuccucccccuccuccucaccuggagagacua

SEQ ID NO: 131395 - RNA, 32 nt, Human
cuccucccccuuacuacuccccaaccuugacu

SEQ ID NO: 131396 - RNA, 32 nt, Human
cuccucccccuuccccugguccccugucccug

SEQ ID NO: 131397 - RNA, 20 nt, Human
cuccuccccgcacagugcug

SEQ ID NO: 131398 - RNA, 32 nt, Human
cuccuccccgccaacccugccugccgcugcac

SEQ ID NO: 131399 - RNA, 32 nt, Human
cuccuccccuagcguugcccagccuggacugc

SEQ ID NO: 131400 - RNA, 32 nt, Human
cuccuccccucccccuccgcccuccuccgcuc

SEQ ID NO: 131401 - RNA, 32 nt, Human
cuccuccccuccugcagaggcaccaaaaccaa

SEQ ID NO: 131402 - RNA, 32 nt, Human
cuccuccccuccuuucuguccucucucucauc

SEQ ID NO: 131403 - RNA, 32 nt, Human
cuccuccccugcccccucccgccuguuuuucc

SEQ ID NO: 131404 - RNA, 32 nt, Human
cuccuccccugcccucuacaucugcccucagc

SEQ ID NO: 131405 - RNA, 32 nt, Human
cuccuccccugccgccgcugcucacgguguaa

SEQ ID NO: 131406 - RNA, 32 nt, Human
cuccucccgcaggcucugcccccgggcuccgg

SEQ ID NO: 131407 - RNA, 20 nt, Human
cuccucccggcccgcugccg

SEQ ID NO: 131408 - RNA, 17 nt, Human
cuccucccggccgcugc

SEQ ID NO: 131409 - RNA, 32 nt, Human
cuccucccgggccuccgccucagucugcagaa

SEQ ID NO: 131410 - RNA, 19 nt, Human
cuccucccgggcgcugccg

SEQ ID NO: 131411 - RNA, 24 nt, Human
cuccucccuagccccgcgcgcggc

SEQ ID NO: 131412 - RNA, 32 nt, Human
cuccucccuaucuccuggcuaguuaccacuag

SEQ ID NO: 131413 - RNA, 32 nt, Human
cuccucccucaaaccaaggguacagaucccca

SEQ ID NO: 131414 - RNA, 32 nt, Human
cuccucccuccacaaucuccccaggucugcag

SEQ ID NO: 131415 - RNA, 32 nt, Human
cuccucccucccaccacuccccaacuuccccu

SEQ ID NO: 131416 - RNA, 32 nt, Human
cuccucccucccccgcccuccugguccaaucu

SEQ ID NO: 131417 - RNA, 32 nt, Human
cuccucccuccccucugcccucucccuucccc

SEQ ID NO: 131418 - RNA, 32 nt, Human
cuccucccuccccugccaccucuguccucacc

SEQ ID NO: 131419 - RNA, 32 nt, Human
cuccucccuccccuuagccaucacuucuggga

SEQ ID NO: 131420 - RNA, 32 nt, Human
cuccucccucuccugaaccucuacccucaccc

SEQ ID NO: 131421 - RNA, 32 nt, Human
cuccucccucugcccccuccagccggcuuuuc

SEQ ID NO: 131422 - RNA, 32 nt, Human
cuccucccucuucuccucuguggccugggaga

SEQ ID NO: 131423 - RNA, 32 nt, Human
cuccucccugacuccucucugcccaugcaaau

SEQ ID NO: 131424 - RNA, 32 nt, Human
cuccucccugcaagagccucucccagggccca

SEQ ID NO: 131425 - RNA, 32 nt, Human
cuccucccugccaaccuccuccucuccugcca

SEQ ID NO: 131426 - RNA, 32 nt, Human
cuccucccugccucaguggcucuggguaccug

SEQ ID NO: 131427 - RNA, 32 nt, Human
cuccucccugcucgcugacaucuggggcuuug

SEQ ID NO: 131428 - RNA, 32 nt, Human
cuccucccuggagguggcuggcugcaagugug

SEQ ID NO: 131429 - RNA, 32 nt, Human
cuccucccuucccucgcuguguacuuccuugu

SEQ ID NO: 131430 - RNA, 18 nt, Human
cuccucccuucggccucu

SEQ ID NO: 131431 - RNA, 32 nt, Human
cuccucccuucucuccccaguucugguccugg

SEQ ID NO: 131432 - RNA, 32 nt, Human
cuccucccuuggcuuucccuuggcccacuucc

SEQ ID NO: 131433 - RNA, 32 nt, Human
cuccucccuuugaagugcauuaguugugauuu

SEQ ID NO: 131434 - RNA, 32 nt, Human
cuccucccuuuuccuuugaccaccuauucugu

SEQ ID NO: 131435 - RNA, 32 nt, Human
cuccuccgagacccaggcugagcccagucccc

SEQ ID NO: 131436 - RNA, 32 nt, Human
cuccuccgauaacuggggugaccuugguuaau

SEQ ID NO: 131437 - RNA, 32 nt, Human
cuccuccgcagaagagagaugcugcucuggcc

SEQ ID NO: 131438 - RNA, 22 nt, Human
cuccuccgccaccgcccugccg

SEQ ID NO: 131439 - RNA, 32 nt, Human
cuccuccgcccccucacuaaccgccuucccca

SEQ ID NO: 131440 - RNA, 20 nt, Human
cuccuccgcccgccgccggc

SEQ ID NO: 131441 - RNA, 20 nt, Human
cuccuccgccgccgccgccg

SEQ ID NO: 131442 - RNA, 21 nt, Human
cuccuccgccugucgccgccg

SEQ ID NO: 131443 - RNA, 21 nt, Human
cuccuccgcgcagccgccgcc

SEQ ID NO: 131444 - RNA, 22 nt, Human
cuccuccgcgccgccgccgccg

SEQ ID NO: 131445 - RNA, 24 nt, Human
cuccuccgcugccugccgccgccg

SEQ ID NO: 131446 - RNA, 32 nt, Human
cuccuccggacccugagcacagccugguaugc

SEQ ID NO: 131447 - RNA, 32 nt, Human
cuccuccggggagacgccgggggccuggcccg

SEQ ID NO: 131448 - RNA, 21 nt, Human
cuccuccggguccccgcccag

SEQ ID NO: 131449 - RNA, 32 nt, Human
cuccuccgucugggaccgaggagcugccguug

SEQ ID NO: 131450 - RNA, 24 nt, Human
cuccuccgugcagcccugugugcu

SEQ ID NO: 131451 - RNA, 32 nt, Human
cuccuccuaaguagcugggacuacaggugcuc

SEQ ID NO: 131452 - RNA, 32 nt, Human
cuccuccuaccacucuauccacugacuauuaa

SEQ ID NO: 131453 - RNA, 32 nt, Human
cuccuccuacccacuggggucuuucccagcag

SEQ ID NO: 131454 - RNA, 32 nt, Human
cuccuccuacuggugccuucuuuucuuccaga

SEQ ID NO: 131455 - RNA, 32 nt, Human
cuccuccucaaccuucucuccccagaaagaug

SEQ ID NO: 131456 - RNA, 32 nt, Human
cuccuccucacagauaggggcugaggcucaga

SEQ ID NO: 131457 - RNA, 32 nt, Human
cuccuccucacuaaaaaggaaacuucaguuga

SEQ ID NO: 131458 - RNA, 32 nt, Human
cuccuccuccacucugacugccacgccccgga

SEQ ID NO: 131459 - RNA, 32 nt, Human
cuccuccuccaggaagccuucccaguccuggg

SEQ ID NO: 131460 - RNA, 32 nt, Human
cuccuccucccacuucccagccgcagcagaaa

SEQ ID NO: 131461 - RNA, 21 nt, Human
cuccuccucccagagguacuu

SEQ ID NO: 131462 - RNA, 32 nt, Human
cuccuccucccccuccuccucaccuggagaga

SEQ ID NO: 131463 - RNA, 32 nt, Human
cuccuccuccccucagccuuguggccaguucc

SEQ ID NO: 131464 - RNA, 19 nt, Human
cuccuccuccggagcgucg

SEQ ID NO: 131465 - RNA, 32 nt, Human
cuccuccuccuccccucuucucuuuuuggcag

SEQ ID NO: 131466 - RNA, 32 nt, Human
cuccuccuccuccuccuccucuccugcugcuc

SEQ ID NO: 131467 - RNA, 32 nt, Human
cuccuccuccuccuccucuccugcugcuccug

SEQ ID NO: 131468 - RNA, 32 nt, Human
cuccuccuccuccuccucugguagagcacucu

SEQ ID NO: 131469 - RNA, 32 nt, Human
cuccuccuccuccucuaccuccagucaggcug

SEQ ID NO: 131470 - RNA, 32 nt, Human
cuccuccuccucucccggccccggcugccagc

SEQ ID NO: 131471 - RNA, 15 nt, Human
cuccuccuccugccc

SEQ ID NO: 131472 - RNA, 20 nt, Human
cuccuccuccugggccgccg

SEQ ID NO: 131473 - RNA, 32 nt, Human
cuccuccuccuuggaguuccgccccugcaagg

SEQ ID NO: 131474 - RNA, 32 nt, Human
cuccuccucuaccuccagucaggcuggacggg

SEQ ID NO: 131475 - RNA, 32 nt, Human
cuccuccucuacugcugcccuaugguucuggc

SEQ ID NO: 131476 - RNA, 32 nt, Human
cuccuccucuccccucuccucuuucagagcac

SEQ ID NO: 131477 - RNA, 32 nt, Human
cuccuccucucccuccuccuccucuuccucug

SEQ ID NO: 131478 - RNA, 32 nt, Human
cuccuccucucuacacccccaggauuugugcg

SEQ ID NO: 131479 - RNA, 26 nt, Human
cuccuccucucuuggaagcucacaga

SEQ ID NO: 131480 - RNA, 32 nt, Human
cuccuccucugccucaaagacucuuguccucu

SEQ ID NO: 131481 - RNA, 32 nt, Human
cuccuccucugcuuggcagaaggugaaagagg

SEQ ID NO: 131482 - RNA, 32 nt, Human
cuccuccucuuccuccuccuccuccucucuag

SEQ ID NO: 131483 - RNA, 32 nt, Human
cuccuccucuuccuccuccuccugggccgggc

SEQ ID NO: 131484 - RNA, 32 nt, Human
cuccuccucuuccuccucuuccuucuccuccu

SEQ ID NO: 131485 - RNA, 32 nt, Human
cuccuccucuuccuccuuaucuucuccaaccu

SEQ ID NO: 131486 - RNA, 32 nt, Human
cuccuccucuucucuccaccccuagacccugg

SEQ ID NO: 131487 - RNA, 23 nt, Human
cuccuccucuucugaugaggcag

SEQ ID NO: 131488 - RNA, 32 nt, Human
cuccuccucuugcuccuccagcuccugcuccu

SEQ ID NO: 131489 - RNA, 32 nt, Human
cuccuccugaagaagaugaggacccagguguu

SEQ ID NO: 131490 - RNA, 32 nt, Human
cuccuccugcagccccuccucaccugggcucg

SEQ ID NO: 131491 - RNA, 18 nt, Human
cuccuccugcaggggcag

SEQ ID NO: 131492 - RNA, 32 nt, Human
cuccuccugcccuccucuccccuagagcccuc

SEQ ID NO: 131493 - RNA, 20 nt, Human
cuccuccugccgccgccgcu

SEQ ID NO: 131494 - RNA, 32 nt, Human
cuccuccugccuccacuugaccuuagcuuugc

SEQ ID NO: 131495 - RNA, 32 nt, Human
cuccuccugccugucugcacuauuccuuugcc

SEQ ID NO: 131496 - RNA, 32 nt, Human
cuccuccugccuguucuggcuccucugcuccc

SEQ ID NO: 131497 - RNA, 32 nt, Human
cuccuccugccuguuguggccucugugauuuu

SEQ ID NO: 131498 - RNA, 32 nt, Human
cuccuccugcucaugcucagcugcuucuggac

SEQ ID NO: 131499 - RNA, 22 nt, Human
cuccuccugcuccaagggccuc

SEQ ID NO: 131500 - RNA, 32 nt, Human
cuccuccugcuccccgccgcuuccguuucucg

SEQ ID NO: 131501 - RNA, 32 nt, Human
cuccuccugcucccucugaaaccuuuucuagg

SEQ ID NO: 131502 - RNA, 32 nt, Human
cuccuccugcuggccaccaccugcugccagcc

SEQ ID NO: 131503 - RNA, 32 nt, Human
cuccuccugcuucuucccuugugccucaugua

SEQ ID NO: 131504 - RNA, 32 nt, Human
cuccuccuggacagcgcgauggggcccuucug

SEQ ID NO: 131505 - RNA, 21 nt, Human
cuccuccuggccucccagguu

SEQ ID NO: 131506 - RNA, 32 nt, Human
cuccuccuggggcuggggcccagauccugggg

SEQ ID NO: 131507 - RNA, 32 nt, Human
cuccuccuggugagguggaaauuccagcaaga

SEQ ID NO: 131508 - RNA, 32 nt, Human
cuccuccuggugucauugcugcagccuccagu

SEQ ID NO: 131509 - RNA, 32 nt, Human
cuccuccuguauuccugaccuccgccauccac

SEQ ID NO: 131510 - RNA, 32 nt, Human
cuccuccuucagcuuugcaaaguacuggccag

SEQ ID NO: 131511 - RNA, 23 nt, Human
cuccuccuucccugacucacaga

SEQ ID NO: 131512 - RNA, 19 nt, Human
cuccuccuucccuucccag

SEQ ID NO: 131513 - RNA, 32 nt, Human
cuccuccuuccucacuucguuagguuauggua

SEQ ID NO: 131514 - RNA, 18 nt, Human
cuccuccuuccucuccca

SEQ ID NO: 131515 - RNA, 20 nt, Human
cuccuccuucuguuucccag

SEQ ID NO: 131516 - RNA, 32 nt, Human
cuccuccuugagcacacaccuucucucaacaa

SEQ ID NO: 131517 - RNA, 17 nt, Human
cuccuccuugcccugcc

SEQ ID NO: 131518 - RNA, 21 nt, Human
cuccuccuugugaagggccag

SEQ ID NO: 131519 - RNA, 32 nt, Human
cuccuccuuuuccccucucccuccuacucucc

SEQ ID NO: 131520 - RNA, 32 nt, Human
cuccuccuuuucccuccccucaucuucagugg

SEQ ID NO: 131521 - RNA, 22 nt, Human
cuccucgacuuccccgucgccg

SEQ ID NO: 131522 - RNA, 17 nt, Human
cuccucgagccgcugcc

SEQ ID NO: 131523 - RNA, 21 nt, Human
cuccucgaggccccuaagcca

SEQ ID NO: 131524 - RNA, 22 nt, Human
cuccucgaguaaauccauguga

SEQ ID NO: 131525 - RNA, 32 nt, Human
cuccucgaguagcugggaccacacagacaggg

SEQ ID NO: 131526 - RNA, 19 nt, Human
cuccucgcacagccgcucg

SEQ ID NO: 131527 - RNA, 18 nt, Human
cuccucgcacgcgcuguc

SEQ ID NO: 131528 - RNA, 24 nt, Human
cuccucgcacucagcaccgcugcc

SEQ ID NO: 131529 - RNA, 32 nt, Human
cuccucgcagcagucccugccgcuccgaggcg

SEQ ID NO: 131530 - RNA, 32 nt, Human
cuccucgcagccgccucucccgcuccggaucc

SEQ ID NO: 131531 - RNA, 32 nt, Human
cuccucgcagggccaaaggcuggcuuggccug

SEQ ID NO: 131532 - RNA, 32 nt, Human
cuccucgcagucagguggguucugggggugcc

SEQ ID NO: 131533 - RNA, 32 nt, Human
cuccucgcaucuccucacauggaaagaaauaa

SEQ ID NO: 131534 - RNA, 32 nt, Human
cuccucgccaagcaugucuuccccguugcaaa

SEQ ID NO: 131535 - RNA, 20 nt, Human
cuccucgcccgcucccgccg

SEQ ID NO: 131536 - RNA, 19 nt, Human
cuccucgcccuccgccccg

SEQ ID NO: 131537 - RNA, 18 nt, Human
cuccucgccgcccgccgc

SEQ ID NO: 131538 - RNA, 22 nt, Human
cuccucgccgccgccgcugcug

SEQ ID NO: 131539 - RNA, 23 nt, Human
cuccucgccgccgcggcggcagg

SEQ ID NO: 131540 - RNA, 18 nt, Human
cuccucgccucagcuccg

SEQ ID NO: 131541 - RNA, 20 nt, Human
cuccucgccuccucgccccg

SEQ ID NO: 131542 - RNA, 19 nt, Human
cuccucgccucgggcugcc

SEQ ID NO: 131543 - RNA, 19 nt, Human
cuccucgcgccccaccacc

SEQ ID NO: 131544 - RNA, 17 nt, Human
cuccucgcgcccgagcc

SEQ ID NO: 131545 - RNA, 18 nt, Human
cuccucgcgccugcaccg

SEQ ID NO: 131546 - RNA, 19 nt, Human
cuccucgcgcggccccagc

SEQ ID NO: 131547 - RNA, 20 nt, Human
cuccucgcgcucgcgcugcu

SEQ ID NO: 131548 - RNA, 20 nt, Human
cuccucgcgggcgggcgccg

SEQ ID NO: 131549 - RNA, 18 nt, Human
cuccucgcggugcugcgc

SEQ ID NO: 131550 - RNA, 18 nt, Human
cuccucgcguuucugccg

SEQ ID NO: 131551 - RNA, 19 nt, Human
cuccucgcuaccccugccg

SEQ ID NO: 131552 - RNA, 19 nt, Human
cuccucgcucccgccaccg

SEQ ID NO: 131553 - RNA, 18 nt, Human
cuccucgcugcagcuggc

SEQ ID NO: 131554 - RNA, 22 nt, Human
cuccucgcuguccucgcugucg

SEQ ID NO: 131555 - RNA, 32 nt, Human
cuccucggagaugagcgugacccccuggcucg

SEQ ID NO: 131556 - RNA, 19 nt, Human
cuccucggcccccgucccc

SEQ ID NO: 131557 - RNA, 32 nt, Human
cuccucggcccguccccacuucccggggccuc

SEQ ID NO: 131558 - RNA, 19 nt, Human
cuccucggccgccgccgcc

SEQ ID NO: 131559 - RNA, 32 nt, Human
cuccucggccuccccuucgggcgcucucgcgc

SEQ ID NO: 131560 - RNA, 32 nt, Human
cuccucgggaaagaaaugccugggaggaaggg

SEQ ID NO: 131561 - RNA, 32 nt, Human
cuccucgggaggcaggagaaucgcuugaaccc

SEQ ID NO: 131562 - RNA, 32 nt, Human
cuccucgggaggcugaggcaggagaaucgcuu

SEQ ID NO: 131563 - RNA, 32 nt, Human
cuccucgggcccuguggugcugggagaugcuc

SEQ ID NO: 131564 - RNA, 32 nt, Human
cuccucgggcuucauuuucucuauuuagagau

SEQ ID NO: 131565 - RNA, 32 nt, Human
cuccucgggggcuggggaaggaagacagggac

SEQ ID NO: 131566 - RNA, 32 nt, Human
cuccucgguccuucagcaccccucggcccgac

SEQ ID NO: 131567 - RNA, 32 nt, Human
cuccucggugccgccucugcccagcguuugcu

SEQ ID NO: 131568 - RNA, 19 nt, Human
cuccucgucucccgcuccg

SEQ ID NO: 131569 - RNA, 32 nt, Human
cuccucguggagcagaacuucccggccaucgc

SEQ ID NO: 131570 - RNA, 20 nt, Human
cuccucgugucccacucccg

SEQ ID NO: 131571 - RNA, 22 nt, Human
cuccucguucgccgccgccgcu

SEQ ID NO: 131572 - RNA, 32 nt, Human
cuccucuaaaaauaccaaaauuagcugggacu

SEQ ID NO: 131573 - RNA, 32 nt, Human
cuccucuaaaccacuuugaugaggaccaaaca

SEQ ID NO: 131574 - RNA, 32 nt, Human
cuccucuaggcuggccccuuguccaccccucu

SEQ ID NO: 131575 - RNA, 22 nt, Human
cuccucuagggccgccgccacc

SEQ ID NO: 131576 - RNA, 32 nt, Human
cuccucuaggugcccauucugcauuuauucca

SEQ ID NO: 131577 - RNA, 32 nt, Human
cuccucuaucucuuccucuccucucucucuuc

SEQ ID NO: 131578 - RNA, 32 nt, Human
cuccucuauggccccugccuucccaggaguac

SEQ ID NO: 131579 - RNA, 32 nt, Human
cuccucuauucuucccuucauccucauuugaa

SEQ ID NO: 131580 - RNA, 32 nt, Human
cuccucucaaaccucucaguggaacaauugcu

SEQ ID NO: 131581 - RNA, 19 nt, Human
cuccucucaaagagccucu

SEQ ID NO: 131582 - RNA, 18 nt, Human
cuccucucaaaggaucuc

SEQ ID NO: 131583 - RNA, 24 nt, Human
cuccucucaagccaagaagggcug

SEQ ID NO: 131584 - RNA, 27 nt, Human
cuccucucaaggccccuagaaagguug

SEQ ID NO: 131585 - RNA, 32 nt, Human
cuccucucaagugccagggagcagccacacgu

SEQ ID NO: 131586 - RNA, 32 nt, Human
cuccucucaaugcucaucacacacagggcuau

SEQ ID NO: 131587 - RNA, 20 nt, Human
cuccucucaccugcaggcug

SEQ ID NO: 131588 - RNA, 32 nt, Human
cuccucucacuccccuaagccuggugaaagag

SEQ ID NO: 131589 - RNA, 32 nt, Human
cuccucucagcaggcggaggcucacagcucug

SEQ ID NO: 131590 - RNA, 32 nt, Human
cuccucucagcccuucugcacccugggccuuc

SEQ ID NO: 131591 - RNA, 32 nt, Human
cuccucucagccgccagacauggccaggaacc

SEQ ID NO: 131592 - RNA, 32 nt, Human
cuccucucaguggaaagagcacgaggauguuc

SEQ ID NO: 131593 - RNA, 32 nt, Human
cuccucuccaagacaaaacaaacaaaacuagc

SEQ ID NO: 131594 - RNA, 32 nt, Human
cuccucuccacacuggggauggagucuggcug

SEQ ID NO: 131595 - RNA, 32 nt, Human
cuccucuccacgcuggggauggagucuggcug

SEQ ID NO: 131596 - RNA, 32 nt, Human
cuccucuccagacuccaccuccccagugggua

SEQ ID NO: 131597 - RNA, 32 nt, Human
cuccucuccagcccaaucuucuggguccagac

SEQ ID NO: 131598 - RNA, 32 nt, Human
cuccucuccagcccuucuccugugugccugcc

SEQ ID NO: 131599 - RNA, 32 nt, Human
cuccucuccagccucaggaccuuugugagugc

SEQ ID NO: 131600 - RNA, 32 nt, Human
cuccucucccacaucaggcuggcacucugcac

SEQ ID NO: 131601 - RNA, 18 nt, Human
cuccucucccagggccuc

SEQ ID NO: 131602 - RNA, 19 nt, Human
cuccucuccccaggccucu

SEQ ID NO: 131603 - RNA, 32 nt, Human
cuccucucccccuccuucaucucuccucccuc

SEQ ID NO: 131604 - RNA, 32 nt, Human
cuccucuccccugugagcuccaccugccccag

SEQ ID NO: 131605 - RNA, 32 nt, Human
cuccucucccuccaccuccuggcuucaacugg

SEQ ID NO: 131606 - RNA, 23 nt, Human
cuccucucccuccagaagccagg

SEQ ID NO: 131607 - RNA, 32 nt, Human
cuccucuccuagccccugucaugguguccaga

SEQ ID NO: 131608 - RNA, 32 nt, Human
cuccucuccucagccuuacagcuggagggcag

SEQ ID NO: 131609 - RNA, 32 nt, Human
cuccucuccucccaccaaggauucuuccaccu

SEQ ID NO: 131610 - RNA, 32 nt, Human
cuccucuccuccucagcugcauggagccugga

SEQ ID NO: 131611 - RNA, 30 nt, Human
cuccucuccuccucugugcuccugucccuc

SEQ ID NO: 131612 - RNA, 32 nt, Human
cuccucuccucucuuuccuuccuuccuuccuu

SEQ ID NO: 131613 - RNA, 19 nt, Human
cuccucuccucugaccccu

SEQ ID NO: 131614 - RNA, 32 nt, Human
cuccucuccugccugugaaagcagagagagcu

SEQ ID NO: 131615 - RNA, 32 nt, Human
cuccucuccuuccuuuuccuuccuaggcacuc

SEQ ID NO: 131616 - RNA, 32 nt, Human
cuccucuccuuggaaacuagaccucugguccu

SEQ ID NO: 131617 - RNA, 32 nt, Human
cuccucucgcccaggcuggagugcaguggugu

SEQ ID NO: 131618 - RNA, 20 nt, Human
cuccucucgccgccgccucc

SEQ ID NO: 131619 - RNA, 21 nt, Human
cuccucucgccgcuaccgccg

SEQ ID NO: 131620 - RNA, 32 nt, Human
cuccucucgcuuuccuccugaggcuacaccca

SEQ ID NO: 131621 - RNA, 32 nt, Human
cuccucucgggucuccuccuccucguuugcug

SEQ ID NO: 131622 - RNA, 32 nt, Human
cuccucucguaccuuggacaaaggauacaccu

SEQ ID NO: 131623 - RNA, 32 nt, Human
cuccucucguccucuucucuuuuccucauucu

SEQ ID NO: 131624 - RNA, 19 nt, Human
cuccucucucaccuccucu

SEQ ID NO: 131625 - RNA, 32 nt, Human
cuccucucucaccuccucucucccucuccugc

SEQ ID NO: 131626 - RNA, 32 nt, Human
cuccucucuccaggcuuuagaucucugagauu

SEQ ID NO: 131627 - RNA, 32 nt, Human
cuccucucucccaggcaggcagcugcaggcgc

SEQ ID NO: 131628 - RNA, 17 nt, Human
cuccucucuccgcugcc

SEQ ID NO: 131629 - RNA, 19 nt, Human
cuccucucucuaggugcug

SEQ ID NO: 131630 - RNA, 32 nt, Human
cuccucucucucuuccucuccucucucuuccc

SEQ ID NO: 131631 - RNA, 32 nt, Human
cuccucucucucuuccucuccucucucuuccu

SEQ ID NO: 131632 - RNA, 32 nt, Human
cuccucucucuuuccaaucccuaaagggaauu

SEQ ID NO: 131633 - RNA, 32 nt, Human
cuccucucugcagcacugccucccagcgccag

SEQ ID NO: 131634 - RNA, 32 nt, Human
cuccucucugccucaucucccaaagccccuuc

SEQ ID NO: 131635 - RNA, 32 nt, Human
cuccucucugcucuccccaggauggggucaga

SEQ ID NO: 131636 - RNA, 32 nt, Human
cuccucucuuccugccaagguuuauagaaacc

SEQ ID NO: 131637 - RNA, 32 nt, Human
cuccucucuuccuucacaccuuccucugaauc

SEQ ID NO: 131638 - RNA, 32 nt, Human
cuccucugaccagcccacacugcaaaggaaac

SEQ ID NO: 131639 - RNA, 32 nt, Human
cuccucugacucccaaagccccggcuggggcc

SEQ ID NO: 131640 - RNA, 32 nt, Human
cuccucugagaaacucagcuacuugagcacaa

SEQ ID NO: 131641 - RNA, 32 nt, Human
cuccucugagagcccuugcccuccaguuuaaa

SEQ ID NO: 131642 - RNA, 20 nt, Human
cuccucugagggccgugccg

SEQ ID NO: 131643 - RNA, 32 nt, Human
cuccucugaucaucugccccaugagugggaua

SEQ ID NO: 131644 - RNA, 23 nt, Human
cuccucugcaccuaacccagugg

SEQ ID NO: 131645 - RNA, 32 nt, Human
cuccucugcaccuggacaacucaacuccugcc

SEQ ID NO: 131646 - RNA, 19 nt, Human
cuccucugcaggaaaggug

SEQ ID NO: 131647 - RNA, 32 nt, Human
cuccucugcaggcuggagcugccuggggcagg

SEQ ID NO: 131648 - RNA, 21 nt, Human
cuccucugcccagaggggcag

SEQ ID NO: 131649 - RNA, 32 nt, Human
cuccucugcccaucaccuccccuuggccccuc

SEQ ID NO: 131650 - RNA, 19 nt, Human
cuccucugcccccaucccc

SEQ ID NO: 131651 - RNA, 32 nt, Human
cuccucugcccucccucgcaucuacuccuuac

SEQ ID NO: 131652 - RNA, 32 nt, Human
cuccucugcccuuuugucaauuuuaccuuaua

SEQ ID NO: 131653 - RNA, 20 nt, Human
cuccucugccgccgcugccg

SEQ ID NO: 131654 - RNA, 32 nt, Human
cuccucugccuccccuuccccuccucuccccu

SEQ ID NO: 131655 - RNA, 32 nt, Human
cuccucugccucccucuccaggaaaucccaua

SEQ ID NO: 131656 - RNA, 32 nt, Human
cuccucugccugggaguggcucuguguggacc

SEQ ID NO: 131657 - RNA, 32 nt, Human
cuccucugcucaccccucccucacuccauggg

SEQ ID NO: 131658 - RNA, 24 nt, Human
cuccucugcugacaaaaggggcag

SEQ ID NO: 131659 - RNA, 32 nt, Human
cuccucugcuuuccucagaggaugguccuuua

SEQ ID NO: 131660 - RNA, 32 nt, Human
cuccucuggcagcagagccugggcaggugacg

SEQ ID NO: 131661 - RNA, 18 nt, Human
cuccucuggccgccgcgc

SEQ ID NO: 131662 - RNA, 32 nt, Human
cuccucuggcuccccugucccuucucacaacu

SEQ ID NO: 131663 - RNA, 29 nt, Human
cuccucuggcugcuacaacuuccccuuuc

SEQ ID NO: 131664 - RNA, 32 nt, Human
cuccucuggggagaaggaggagcugcucaccc

SEQ ID NO: 131665 - RNA, 32 nt, Human
cuccucuguauaccuaaucugccucugccucu

SEQ ID NO: 131666 - RNA, 32 nt, Human
cuccucugucacaccccauucuugccccucac

SEQ ID NO: 131667 - RNA, 19 nt, Human
cuccucugucccacugcug

SEQ ID NO: 131668 - RNA, 32 nt, Human
cuccucuguccucuguccccaggcuggcuucu

SEQ ID NO: 131669 - RNA, 32 nt, Human
cuccucuguccuuggaggugauuucccccuga

SEQ ID NO: 131670 - RNA, 32 nt, Human
cuccucugucucuccucggucucagcucuggg

SEQ ID NO: 131671 - RNA, 32 nt, Human
cuccucugucuucacaucacuuccccucugua

SEQ ID NO: 131672 - RNA, 32 nt, Human
cuccucugugccaacuccuuguggaccgcaag

SEQ ID NO: 131673 - RNA, 32 nt, Human
cuccucuguggcuaggaggcucaaaggacugu

SEQ ID NO: 131674 - RNA, 32 nt, Human
cuccucuguggguuuuaccggaaagguggccc

SEQ ID NO: 131675 - RNA, 32 nt, Human
cuccucuguuuggaaguccacuaggucuggga

SEQ ID NO: 131676 - RNA, 32 nt, Human
cuccucuuaccucccaagcucauggacaagug

SEQ ID NO: 131677 - RNA, 32 nt, Human
cuccucuucaguuuggcagcugugagucugaa

SEQ ID NO: 131678 - RNA, 32 nt, Human
cuccucuuccacugucguccuuccucagaggg

SEQ ID NO: 131679 - RNA, 32 nt, Human
cuccucuuccaguuacggugcaugugaagcaa

SEQ ID NO: 131680 - RNA, 26 nt, Human
cuccucuucccaacuuccuccagguc

SEQ ID NO: 131681 - RNA, 32 nt, Human
cuccucuucccaagccuuuuuccuacuaccuu

SEQ ID NO: 131682 - RNA, 32 nt, Human
cuccucuucccaaggucccaauaccagcaccu

SEQ ID NO: 131683 - RNA, 32 nt, Human
cuccucuuccccaacccccagaccaugaccag

SEQ ID NO: 131684 - RNA, 18 nt, Human
cuccucuucccugcacuu

SEQ ID NO: 131685 - RNA, 23 nt, Human
cuccucuucccugcacuucccag

SEQ ID NO: 131686 - RNA, 19 nt, Human
cuccucuucccuucccugg

SEQ ID NO: 131687 - RNA, 32 nt, Human
cuccucuuccuccccucucucuuccucucccu

SEQ ID NO: 131688 - RNA, 21 nt, Human
cuccucuuccuccuccagcuc

SEQ ID NO: 131689 - RNA, 32 nt, Human
cuccucuuccuccuccuccuccucucuaggca

SEQ ID NO: 131690 - RNA, 32 nt, Human
cuccucuuccuccuccuccucuuccucauccu

SEQ ID NO: 131691 - RNA, 32 nt, Human
cuccucuuccuccuccuccugggccgggcuga

SEQ ID NO: 131692 - RNA, 32 nt, Human
cuccucuuccuuccucuuuauagggagacacu

SEQ ID NO: 131693 - RNA, 32 nt, Human
cuccucuuccuuguccccuccuccuccuuguc

SEQ ID NO: 131694 - RNA, 23 nt, Human
cuccucuuccuuuuacccuaguc

SEQ ID NO: 131695 - RNA, 20 nt, Human
cuccucuucucagagaccuc

SEQ ID NO: 131696 - RNA, 32 nt, Human
cuccucuucucccagcccaucccuccggcccc

SEQ ID NO: 131697 - RNA, 32 nt, Human
cuccucuucucccaugccuucuucccugccau

SEQ ID NO: 131698 - RNA, 32 nt, Human
cuccucuucucccuucuccucccuuagcccuu

SEQ ID NO: 131699 - RNA, 19 nt, Human
cuccucuucugccgcuucc

SEQ ID NO: 131700 - RNA, 32 nt, Human
cuccucuucuucaauaaccccaaagaggagaa

SEQ ID NO: 131701 - RNA, 29 nt, Human
cuccucuugcugcuaugucuccuugugau

SEQ ID NO: 131702 - RNA, 23 nt, Human
cuccucuuggcccuucccauauc

SEQ ID NO: 131703 - RNA, 21 nt, Human
cuccucuugguccacuugcua

SEQ ID NO: 131704 - RNA, 32 nt, Human
cuccucuugguggguguggccagcacaccaag

SEQ ID NO: 131705 - RNA, 32 nt, Human
cuccucuuuaaaacaaaacaaaacaaaacaaa

SEQ ID NO: 131706 - RNA, 32 nt, Human
cuccucuuuaaaacaaaacaaaacaaaacuau

SEQ ID NO: 131707 - RNA, 32 nt, Human
cuccucuuucccucaaggcugcaggaggucgg

SEQ ID NO: 131708 - RNA, 32 nt, Human
cuccucuuucucuggccacagcauccuggcuc

SEQ ID NO: 131709 - RNA, 19 nt, Human
cuccucuuucugccacuug

SEQ ID NO: 131710 - RNA, 32 nt, Human
cuccucuuugcgcccuuucucucccucuuggu

SEQ ID NO: 131711 - RNA, 29 nt, Human
cuccucuuuguugccaauguaaggaacug

SEQ ID NO: 131712 - RNA, 24 nt, Human
cuccugaaaagcugggauuacagg

SEQ ID NO: 131713 - RNA, 18 nt, Human
cuccugaaaaugcugcag

SEQ ID NO: 131714 - RNA, 20 nt, Human
cuccugaaaauguuggcaua

SEQ ID NO: 131715 - RNA, 32 nt, Human
cuccugaaacuaguauggaauuugggaguggu

SEQ ID NO: 131716 - RNA, 32 nt, Human
cuccugaaagagauggauucauuaaggaaauu

SEQ ID NO: 131717 - RNA, 23 nt, Human
cuccugaaagcugggaugacagg

SEQ ID NO: 131718 - RNA, 32 nt, Human
cuccugaaaucuagcaggcaggugcuuacuag

SEQ ID NO: 131719 - RNA, 32 nt, Human
cuccugaaaugagagauuuuccugagaugacu

SEQ ID NO: 131720 - RNA, 24 nt, Human
cuccugaacagcugggaccacagg

SEQ ID NO: 131721 - RNA, 32 nt, Human
cuccugaacagcugggaccacaggugcacgcc

SEQ ID NO: 131722 - RNA, 24 nt, Human
cuccugaacagcugggacuacagg

SEQ ID NO: 131723 - RNA, 32 nt, Human
cuccugaacccugacuuuuuguguacauacuu

SEQ ID NO: 131724 - RNA, 32 nt, Human
cuccugaacugcacuacaagacacuuuguaga

SEQ ID NO: 131725 - RNA, 32 nt, Human
cuccugaacuuuucuuucuuccaucaugcucu

SEQ ID NO: 131726 - RNA, 32 nt, Human
cuccugaagcagcugcagccgagcgggaagag

SEQ ID NO: 131727 - RNA, 24 nt, Human
cuccugaaggcacucuggcauagg

SEQ ID NO: 131728 - RNA, 32 nt, Human
cuccugaaguagcuggaacuacagacaugcac

SEQ ID NO: 131729 - RNA, 24 nt, Human
cuccugaagugcugggauuacagg

SEQ ID NO: 131730 - RNA, 32 nt, Human
cuccugaagugcugggauuacaggcaugagcc

SEQ ID NO: 131731 - RNA, 32 nt, Human
cuccugaagugcugggauuacaggcguggcca

SEQ ID NO: 131732 - RNA, 24 nt, Human
cuccugaagugcugggguuacagg

SEQ ID NO: 131733 - RNA, 24 nt, Human
cuccugaaguguuaggauuacagg

SEQ ID NO: 131734 - RNA, 32 nt, Human
cuccugaaguguuaggauuacaggcgugagcc

SEQ ID NO: 131735 - RNA, 32 nt, Human
cuccugaaguguugggauuacaggcgugagcc

SEQ ID NO: 131736 - RNA, 32 nt, Human
cuccugaauagccgggauuacagucguccagc

SEQ ID NO: 131737 - RNA, 24 nt, Human
cuccugaauagcuaggauuacagg

SEQ ID NO: 131738 - RNA, 24 nt, Human
cuccugaauagcugggacuacagg

SEQ ID NO: 131739 - RNA, 24 nt, Human
cuccugaauagcugggauuacagg

SEQ ID NO: 131740 - RNA, 32 nt, Human
cuccugaauagcugggauuacaggcacccacc

SEQ ID NO: 131741 - RNA, 32 nt, Human
cuccugaauagcugggauuacaggcaccuguc

SEQ ID NO: 131742 - RNA, 32 nt, Human
cuccugaauagcugggauuacaggugcacgcc

SEQ ID NO: 131743 - RNA, 32 nt, Human
cuccugaauuucuuccuuucccagggccugau

SEQ ID NO: 131744 - RNA, 32 nt, Human
cuccugacaccagcagaggaauuuuguaccca

SEQ ID NO: 131745 - RNA, 32 nt, Human
cuccugacagccuggcgacguggcgaagaugc

SEQ ID NO: 131746 - RNA, 32 nt, Human
cuccugacaguuaacaagucaagccugucuga

SEQ ID NO: 131747 - RNA, 32 nt, Human
cuccugacccagggauggaggcuuugaguccc

SEQ ID NO: 131748 - RNA, 32 nt, Human
cuccugaccucgugauccugaccucggccucc

SEQ ID NO: 131749 - RNA, 32 nt, Human
cuccugaccucguguccacccaccucgaccuc

SEQ ID NO: 131750 - RNA, 20 nt, Human
cuccugaccuugugauccac

SEQ ID NO: 131751 - RNA, 32 nt, Human
cuccugacuacuguccaguaaggaggcccauu

SEQ ID NO: 131752 - RNA, 32 nt, Human
cuccugacuagcugggacuacaggugcaugcc

SEQ ID NO: 131753 - RNA, 21 nt, Human
cuccugacucaccgcuguucg

SEQ ID NO: 131754 - RNA, 32 nt, Human
cuccugacucacugacuccucacuggcuuugu

SEQ ID NO: 131755 - RNA, 32 nt, Human
cuccugacuccaggaugggcugcagguugcag

SEQ ID NO: 131756 - RNA, 23 nt, Human
cuccugacucccugccugggacc

SEQ ID NO: 131757 - RNA, 32 nt, Human
cuccugacucggccuacagauccuccaguucc

SEQ ID NO: 131758 - RNA, 32 nt, Human
cuccugacucuuccucuucccagcggacggcu

SEQ ID NO: 131759 - RNA, 32 nt, Human
cuccugacuggcuguuccuaaauucuuaggau

SEQ ID NO: 131760 - RNA, 25 nt, Human
cuccugacuggugcugcagcaccga

SEQ ID NO: 131761 - RNA, 19 nt, Human
cuccugacuucaggugacc

SEQ ID NO: 131762 - RNA, 21 nt, Human
cuccugacuucaggugaucug

SEQ ID NO: 131763 - RNA, 32 nt, Human
cuccugagaagcuaggacuacaggcaugcacu

SEQ ID NO: 131764 - RNA, 32 nt, Human
cuccugagaagcugagauuacaggcaugugcc

SEQ ID NO: 131765 - RNA, 32 nt, Human
cuccugagaaugccccucccaaccacagcagc

SEQ ID NO: 131766 - RNA, 32 nt, Human
cuccugagaccuggcccugccacacgcuccaa

SEQ ID NO: 131767 - RNA, 32 nt, Human
cuccugagagcagcagaucucagccagaugcu

SEQ ID NO: 131768 - RNA, 32 nt, Human
cuccugagcaccccaugggauuacgcugugug

SEQ ID NO: 131769 - RNA, 32 nt, Human
cuccugagcagagagauccugauggcugacuc

SEQ ID NO: 131770 - RNA, 32 nt, Human
cuccugagcagcugggaccgcgggagugugcc

SEQ ID NO: 131771 - RNA, 32 nt, Human
cuccugagcagcugggacuacaggcacacacc

SEQ ID NO: 131772 - RNA, 32 nt, Human
cuccugagcagcugggacuacaggcgcaugcc

SEQ ID NO: 131773 - RNA, 32 nt, Human
cuccugagcagcugggacuacaggcgcaugcu

SEQ ID NO: 131774 - RNA, 32 nt, Human
cuccugagcagcugggacuacaggcgccugcc

SEQ ID NO: 131775 - RNA, 24 nt, Human
cuccugagcagcugggauuacagg

SEQ ID NO: 131776 - RNA, 32 nt, Human
cuccugagcucauggagcccucagccacccca

SEQ ID NO: 131777 - RNA, 32 nt, Human
cuccugagcucuguaacugucacacugcaccu

SEQ ID NO: 131778 - RNA, 32 nt, Human
cuccugagcugcugcaacucacagagaaagga

SEQ ID NO: 131779 - RNA, 18 nt, Human
cuccugagcugguuccug

SEQ ID NO: 131780 - RNA, 32 nt, Human
cuccugagcuugaucuuuuucugccaugaagu

SEQ ID NO: 131781 - RNA, 32 nt, Human
cuccugaggaccgcugcucucugccucuccag

SEQ ID NO: 131782 - RNA, 32 nt, Human
cuccugaggagaaagaaagagagggagggaga

SEQ ID NO: 131783 - RNA, 24 nt, Human
cuccugaguaacuggaauugcagg

SEQ ID NO: 131784 - RNA, 24 nt, Human
cuccugaguaacugggacuauagg

SEQ ID NO: 131785 - RNA, 24 nt, Human
cuccugaguaacugggauuacagg

SEQ ID NO: 131786 - RNA, 24 nt, Human
cuccugaguaccugggauuacagg

SEQ ID NO: 131787 - RNA, 24 nt, Human
cuccugaguaccugggauuauagg

SEQ ID NO: 131788 - RNA, 24 nt, Human
cuccugaguagaugggacuguagg

SEQ ID NO: 131789 - RNA, 32 nt, Human
cuccugaguagccgggacuacaggcaugcacc

SEQ ID NO: 131790 - RNA, 32 nt, Human
cuccugaguagcuaggacuacaggcaugugcc

SEQ ID NO: 131791 - RNA, 24 nt, Human
cuccugaguagcuaggacugcagg

SEQ ID NO: 131792 - RNA, 24 nt, Human
cuccugaguagcuaggacuguagg

SEQ ID NO: 131793 - RNA, 24 nt, Human
cuccugaguagcuaggauuacagg

SEQ ID NO: 131794 - RNA, 32 nt, Human
cuccugaguagcuaggauuacaggcacaugcc

SEQ ID NO: 131795 - RNA, 32 nt, Human
cuccugaguagcuaggauuacaggcaugugcc

SEQ ID NO: 131796 - RNA, 32 nt, Human
cuccugaguagcuaggauuacaggugugugcc

SEQ ID NO: 131797 - RNA, 32 nt, Human
cuccugaguagcugagauuacaggcacacacc

SEQ ID NO: 131798 - RNA, 32 nt, Human
cuccugaguagcugagauuacaggugugugcc

SEQ ID NO: 131799 - RNA, 32 nt, Human
cuccugaguagcuggaaccacaggcaugugcc

SEQ ID NO: 131800 - RNA, 24 nt, Human
cuccugaguagcuggaauuacagg

SEQ ID NO: 131801 - RNA, 32 nt, Human
cuccugaguagcuggaauuacaggcacccacc

SEQ ID NO: 131802 - RNA, 32 nt, Human
cuccugaguagcuggaauuacaggcaugugcc

SEQ ID NO: 131803 - RNA, 24 nt, Human
cuccugaguagcuggaauuauagg

SEQ ID NO: 131804 - RNA, 23 nt, Human
cuccugaguagcuggauuacagg

SEQ ID NO: 131805 - RNA, 24 nt, Human
cuccugaguagcugggaccacagg

SEQ ID NO: 131806 - RNA, 24 nt, Human
cuccugaguagcugggaccauagg

SEQ ID NO: 131807 - RNA, 24 nt, Human
cuccugaguagcugggacgacagg

SEQ ID NO: 131808 - RNA, 24 nt, Human
cuccugaguagcugggacuacagg

SEQ ID NO: 131809 - RNA, 32 nt, Human
cuccugaguagcugggacuacaggcacacacc

SEQ ID NO: 131810 - RNA, 32 nt, Human
cuccugaguagcugggacuacaggcacaugcc

SEQ ID NO: 131811 - RNA, 32 nt, Human
cuccugaguagcugggacuacaggcacccaca

SEQ ID NO: 131812 - RNA, 32 nt, Human
cuccugaguagcugggacuacaggcacccacc

SEQ ID NO: 131813 - RNA, 32 nt, Human
cuccugaguagcugggacuacaggcacccgcc

SEQ ID NO: 131814 - RNA, 32 nt, Human
cuccugaguagcugggacuacaggcaccugcc

SEQ ID NO: 131815 - RNA, 32 nt, Human
cuccugaguagcugggacuacaggcacgcacc

SEQ ID NO: 131816 - RNA, 32 nt, Human
cuccugaguagcugggacuacaggcacgugcc

SEQ ID NO: 131817 - RNA, 32 nt, Human
cuccugaguagcugggacuacaggcaugagcc

SEQ ID NO: 131818 - RNA, 32 nt, Human
cuccugaguagcugggacuacaggcaugcaac

SEQ ID NO: 131819 - RNA, 32 nt, Human
cuccugaguagcugggacuacaggcaugcacc

SEQ ID NO: 131820 - RNA, 32 nt, Human
cuccugaguagcugggacuacaggcauguacc

SEQ ID NO: 131821 - RNA, 32 nt, Human
cuccugaguagcugggacuacaggcaugugcc

SEQ ID NO: 131822 - RNA, 24 nt, Human
cuccugaguagcugggacuagagg

SEQ ID NO: 131823 - RNA, 24 nt, Human
cuccugaguagcugggacuauagg

SEQ ID NO: 131824 - RNA, 23 nt, Human
cuccugaguagcugggacugcag

SEQ ID NO: 131825 - RNA, 24 nt, Human
cuccugaguagcugggacugcagg

SEQ ID NO: 131826 - RNA, 32 nt, Human
cuccugaguagcugggaggacaggcauaugcc

SEQ ID NO: 131827 - RNA, 32 nt, Human
cuccugaguagcugggauaacagacaugcauc

SEQ ID NO: 131828 - RNA, 24 nt, Human
cuccugaguagcugggauaacagg

SEQ ID NO: 131829 - RNA, 32 nt, Human
cuccugaguagcugggauaacagguguggugg

SEQ ID NO: 131830 - RNA, 24 nt, Human
cuccugaguagcugggaucacagg

SEQ ID NO: 131831 - RNA, 32 nt, Human
cuccugaguagcugggaucacaggcacacacc

SEQ ID NO: 131832 - RNA, 32 nt, Human
cuccugaguagcugggaucacaggcaugcacc

SEQ ID NO: 131833 - RNA, 32 nt, Human
cuccugaguagcugggaucacagguguguacc

SEQ ID NO: 131834 - RNA, 32 nt, Human
cuccugaguagcugggaucacaggugugugcu

SEQ ID NO: 131835 - RNA, 23 nt, Human
cuccugaguagcugggaucauag

SEQ ID NO: 131836 - RNA, 24 nt, Human
cuccugaguagcugggaucauagg

SEQ ID NO: 131837 - RNA, 24 nt, Human
cuccugaguagcugggaugacagg

SEQ ID NO: 131838 - RNA, 32 nt, Human
cuccugaguagcugggaugacaggcacgcccc

SEQ ID NO: 131839 - RNA, 32 nt, Human
cuccugaguagcugggaugacaggcgugcacc

SEQ ID NO: 131840 - RNA, 32 nt, Human
cuccugaguagcugggauuacaaccgugugcc

SEQ ID NO: 131841 - RNA, 32 nt, Human
cuccugaguagcugggauuacaagggcacacc

SEQ ID NO: 131842 - RNA, 32 nt, Human
cuccugaguagcugggauuacagacacccacc

SEQ ID NO: 131843 - RNA, 32 nt, Human
cuccugaguagcugggauuacagacacccgcc

SEQ ID NO: 131844 - RNA, 32 nt, Human
cuccugaguagcugggauuacagacaugcacc

SEQ ID NO: 131845 - RNA, 32 nt, Human
cuccugaguagcugggauuacagacgcacgcc

SEQ ID NO: 131846 - RNA, 32 nt, Human
cuccugaguagcugggauuacagauguaugcu

SEQ ID NO: 131847 - RNA, 32 nt, Human
cuccugaguagcugggauuacagaugugcacc

SEQ ID NO: 131848 - RNA, 32 nt, Human
cuccugaguagcugggauuacagcacccgcca

SEQ ID NO: 131849 - RNA, 24 nt, Human
cuccugaguagcugggauuacagg

SEQ ID NO: 131850 - RNA, 32 nt, Human
cuccugaguagcugggauuacaggcaacugcc

SEQ ID NO: 131851 - RNA, 32 nt, Human
cuccugaguagcugggauuacaggcacacaca

SEQ ID NO: 131852 - RNA, 32 nt, Human
cuccugaguagcugggauuacaggcacacacc

SEQ ID NO: 131853 - RNA, 32 nt, Human
cuccugaguagcugggauuacaggcacacgcc

SEQ ID NO: 131854 - RNA, 32 nt, Human
cuccugaguagcugggauuacaggcacaugcc

SEQ ID NO: 131855 - RNA, 32 nt, Human
cuccugaguagcugggauuacaggcacccacc

SEQ ID NO: 131856 - RNA, 32 nt, Human
cuccugaguagcugggauuacaggcacccgcc

SEQ ID NO: 131857 - RNA, 32 nt, Human
cuccugaguagcugggauuacaggcacccgcu

SEQ ID NO: 131858 - RNA, 32 nt, Human
cuccugaguagcugggauuacaggcaccugcc

SEQ ID NO: 131859 - RNA, 32 nt, Human
cuccugaguagcugggauuacaggcacgcgcc

SEQ ID NO: 131860 - RNA, 32 nt, Human
cuccugaguagcugggauuacaggcacgugac

SEQ ID NO: 131861 - RNA, 32 nt, Human
cuccugaguagcugggauuacaggcagacacc

SEQ ID NO: 131862 - RNA, 32 nt, Human
cuccugaguagcugggauuacaggcauacacc

SEQ ID NO: 131863 - RNA, 32 nt, Human
cuccugaguagcugggauuacaggcauccgcc

SEQ ID NO: 131864 - RNA, 32 nt, Human
cuccugaguagcugggauuacaggcaugaauc

SEQ ID NO: 131865 - RNA, 32 nt, Human
cuccugaguagcugggauuacaggcaugcacc

SEQ ID NO: 131866 - RNA, 32 nt, Human
cuccugaguagcugggauuacaggcaugcgcc

SEQ ID NO: 131867 - RNA, 32 nt, Human
cuccugaguagcugggauuacaggcauguacc

SEQ ID NO: 131868 - RNA, 32 nt, Human
cuccugaguagcugggauuacaggcaugugag

SEQ ID NO: 131869 - RNA, 32 nt, Human
cuccugaguagcugggauuacaggcaugugcc

SEQ ID NO: 131870 - RNA, 32 nt, Human
cuccugaguagcugggauuacaggcgcacgcc

SEQ ID NO: 131871 - RNA, 32 nt, Human
cuccugaguagcugggauuacaggcgcccgcc

SEQ ID NO: 131872 - RNA, 32 nt, Human
cuccugaguagcugggauuacaggcgcccguc

SEQ ID NO: 131873 - RNA, 32 nt, Human
cuccugaguagcugggauuacaggcgccugcc

SEQ ID NO: 131874 - RNA, 32 nt, Human
cuccugaguagcugggauuacaggcgccugcu

SEQ ID NO: 131875 - RNA, 32 nt, Human
cuccugaguagcugggauuacaggcgcguauc

SEQ ID NO: 131876 - RNA, 32 nt, Human
cuccugaguagcugggauuacaggcgcgugcc

SEQ ID NO: 131877 - RNA, 32 nt, Human
cuccugaguagcugggauuacaggcguccgcu

SEQ ID NO: 131878 - RNA, 32 nt, Human
cuccugaguagcugggauuacaggcgugcacc

SEQ ID NO: 131879 - RNA, 32 nt, Human
cuccugaguagcugggauuacaggcgugcgcc

SEQ ID NO: 131880 - RNA, 32 nt, Human
cuccugaguagcugggauuacaggcgugugcc

SEQ ID NO: 131881 - RNA, 32 nt, Human
cuccugaguagcugggauuacaggcguguguc

SEQ ID NO: 131882 - RNA, 32 nt, Human
cuccugaguagcugggauuacaggcuccugcc

SEQ ID NO: 131883 - RNA, 32 nt, Human
cuccugaguagcugggauuacagguaugugcc

SEQ ID NO: 131884 - RNA, 32 nt, Human
cuccugaguagcugggauuacaggugcaugcc

SEQ ID NO: 131885 - RNA, 32 nt, Human
cuccugaguagcugggauuacaggugcccacc

SEQ ID NO: 131886 - RNA, 32 nt, Human
cuccugaguagcugggauuacaggugcccgcc

SEQ ID NO: 131887 - RNA, 32 nt, Human
cuccugaguagcugggauuacaggugccugcc

SEQ ID NO: 131888 - RNA, 32 nt, Human
cuccugaguagcugggauuacaggugcgcacc

SEQ ID NO: 131889 - RNA, 32 nt, Human
cuccugaguagcugggauuacaggugcgugcc

SEQ ID NO: 131890 - RNA, 32 nt, Human
cuccugaguagcugggauuacagguguaugcc

SEQ ID NO: 131891 - RNA, 32 nt, Human
cuccugaguagcugggauuacaggugucggcc

SEQ ID NO: 131892 - RNA, 32 nt, Human
cuccugaguagcugggauuacaggugugcacc

SEQ ID NO: 131893 - RNA, 32 nt, Human
cuccugaguagcugggauuacaggugugcccc

SEQ ID NO: 131894 - RNA, 32 nt, Human
cuccugaguagcugggauuacaggugugcgcc

SEQ ID NO: 131895 - RNA, 32 nt, Human
cuccugaguagcugggauuacaggugugugcc

SEQ ID NO: 131896 - RNA, 32 nt, Human
cuccugaguagcugggauuacagguuccugcu

SEQ ID NO: 131897 - RNA, 32 nt, Human
cuccugaguagcugggauuaccagugcacgcc

SEQ ID NO: 131898 - RNA, 24 nt, Human
cuccugaguagcugggauuacggg

SEQ ID NO: 131899 - RNA, 32 nt, Human
cuccugaguagcugggauuacgggcaugugcc

SEQ ID NO: 131900 - RNA, 32 nt, Human
cuccugaguagcugggauuacuggcacacacc

SEQ ID NO: 131901 - RNA, 24 nt, Human
cuccugaguagcugggauuauagg

SEQ ID NO: 131902 - RNA, 32 nt, Human
cuccugaguagcugggauuauaggcacacacc

SEQ ID NO: 131903 - RNA, 32 nt, Human
cuccugaguagcugggauuauaggcacaugcc

SEQ ID NO: 131904 - RNA, 32 nt, Human
cuccugaguagcugggauuauaggcacgugcc

SEQ ID NO: 131905 - RNA, 32 nt, Human
cuccugaguagcugggauuauaggcaugcacc

SEQ ID NO: 131906 - RNA, 32 nt, Human
cuccugaguagcugggauuauaggcgagagcc

SEQ ID NO: 131907 - RNA, 32 nt, Human
cuccugaguagcugggauuauaggcgucugcc

SEQ ID NO: 131908 - RNA, 32 nt, Human
cuccugaguagcugggauuauaggcgugcacc

SEQ ID NO: 131909 - RNA, 32 nt, Human
cuccugaguagcugggauuauaggcguguacc

SEQ ID NO: 131910 - RNA, 32 nt, Human
cuccugaguagcugggauuauagguacaugcc

SEQ ID NO: 131911 - RNA, 23 nt, Human
cuccugaguagcugggauuaugg

SEQ ID NO: 131912 - RNA, 24 nt, Human
cuccugaguagcugggauuauggg

SEQ ID NO: 131913 - RNA, 32 nt, Human
cuccugaguagcugggauuaugggcgcccacc

SEQ ID NO: 131914 - RNA, 24 nt, Human
cuccugaguagcugggauugcagg

SEQ ID NO: 131915 - RNA, 32 nt, Human
cuccugaguagcugggauugcaggcacccgcc

SEQ ID NO: 131916 - RNA, 32 nt, Human
cuccugaguagcugggauugcagguaugcacc

SEQ ID NO: 131917 - RNA, 24 nt, Human
cuccugaguagcugggauuucagg

SEQ ID NO: 131918 - RNA, 24 nt, Human
cuccugaguagcugggccuauagg

SEQ ID NO: 131919 - RNA, 32 nt, Human
cuccugaguagcugggcuuacaggcacccacc

SEQ ID NO: 131920 - RNA, 32 nt, Human
cuccugaguagcuggggauuacaggugccuac

SEQ ID NO: 131921 - RNA, 24 nt, Human
cuccugaguagcugggguuacagg

SEQ ID NO: 131922 - RNA, 24 nt, Human
cuccugaguagcugggguugcagg

SEQ ID NO: 131923 - RNA, 24 nt, Human
cuccugaguagcugguauuacagg

SEQ ID NO: 131924 - RNA, 24 nt, Human
cuccugaguagcugugauuacagg

SEQ ID NO: 131925 - RNA, 32 nt, Human
cuccugaguagcugugauuacaggcaugcgcc

SEQ ID NO: 131926 - RNA, 24 nt, Human
cuccugaguagcuuggauuacagg

SEQ ID NO: 131927 - RNA, 32 nt, Human
cuccugaguagcuuggauuacaggcacaagcc

SEQ ID NO: 131928 - RNA, 32 nt, Human
cuccugaguaguagcugcgaccacaggcgugu

SEQ ID NO: 131929 - RNA, 32 nt, Human
cuccugaguaguugggacuacaggcauauacc

SEQ ID NO: 131930 - RNA, 24 nt, Human
cuccugaguaguugggauuacagg

SEQ ID NO: 131931 - RNA, 24 nt, Human
cuccugaguaucugggauuacagg

SEQ ID NO: 131932 - RNA, 32 nt, Human
cuccugaguaucugggauuacaggcgugcacc

SEQ ID NO: 131933 - RNA, 32 nt, Human
cuccugagucaagugauccucccaccuuggcc

SEQ ID NO: 131934 - RNA, 24 nt, Human
cuccugaguggcugggacugcagg

SEQ ID NO: 131935 - RNA, 24 nt, Human
cuccugaguggcugggauuacagg

SEQ ID NO: 131936 - RNA, 32 nt, Human
cuccugaguggcugggauuacaggcaugcacc

SEQ ID NO: 131937 - RNA, 32 nt, Human
cuccugaguggcugggauuacaggcgcccgcc

SEQ ID NO: 131938 - RNA, 24 nt, Human
cuccugaguggcugggauuauagg

SEQ ID NO: 131939 - RNA, 32 nt, Human
cuccugaguggcugggauuauaggugugugcc

SEQ ID NO: 131940 - RNA, 24 nt, Human
cuccugaguggcugggauugcagg

SEQ ID NO: 131941 - RNA, 32 nt, Human
cuccugaguggcugggauugcaggugugcgcc

SEQ ID NO: 131942 - RNA, 32 nt, Human
cuccugauauuccucuucucacuuuugcaauc

SEQ ID NO: 131943 - RNA, 32 nt, Human
cuccugauggugccaugaaaagguuauguaau

SEQ ID NO: 131944 - RNA, 24 nt, Human
cuccugauguuuuaauguggcaua

SEQ ID NO: 131945 - RNA, 24 nt, Human
cuccugauuaccugggauuacagg

SEQ ID NO: 131946 - RNA, 24 nt, Human
cuccugauuagcugggauuacagg

SEQ ID NO: 131947 - RNA, 32 nt, Human
cuccugauuagcugggauuacaggcaugcgcc

SEQ ID NO: 131948 - RNA, 32 nt, Human
cuccugauuagcugggauuacaggcaugugcc

SEQ ID NO: 131949 - RNA, 32 nt, Human
cuccugauuagcugggauuacaggcgugugcc

SEQ ID NO: 131950 - RNA, 32 nt, Human
cuccugauucuaaaaugucucaagugcaaugc

SEQ ID NO: 131951 - RNA, 32 nt, Human
cuccugauuugacaaaggagcuugccuccuuu

SEQ ID NO: 131952 - RNA, 32 nt, Human
cuccugcaaacagugcugcacaucauccaggu

SEQ ID NO: 131953 - RNA, 32 nt, Human
cuccugcaaccugcugggcaugugggccuggc

SEQ ID NO: 131954 - RNA, 32 nt, Human
cuccugcaaggaccugggccucccagcccagc

SEQ ID NO: 131955 - RNA, 32 nt, Human
cuccugcacacaugcaugcacacaaacgugua

SEQ ID NO: 131956 - RNA, 32 nt, Human
cuccugcacacgcuccuuccucugaggcugaa

SEQ ID NO: 131957 - RNA, 32 nt, Human
cuccugcacagcccuggggugcaggagucccu

SEQ ID NO: 131958 - RNA, 20 nt, Human
cuccugcacagcggcugccg

SEQ ID NO: 131959 - RNA, 32 nt, Human
cuccugcacccguggauccugaggacagcggu

SEQ ID NO: 131960 - RNA, 32 nt, Human
cuccugcaccucauccuccacccaccagagag

SEQ ID NO: 131961 - RNA, 32 nt, Human
cuccugcacgggguuccuagcugcagaagggu

SEQ ID NO: 131962 - RNA, 18 nt, Human
cuccugcacucucugcca

SEQ ID NO: 131963 - RNA, 32 nt, Human
cuccugcacugcacuucugccguccacauccc

SEQ ID NO: 131964 - RNA, 32 nt, Human
cuccugcagaagcagaaagccugcuggggaug

SEQ ID NO: 131965 - RNA, 32 nt, Human
cuccugcagcacagcacuggcaucuuuuuagc

SEQ ID NO: 131966 - RNA, 20 nt, Human
cuccugcagcacccccggga

SEQ ID NO: 131967 - RNA, 32 nt, Human
cuccugcagccccuacuuccacgccauguuca

SEQ ID NO: 131968 - RNA, 21 nt, Human
cuccugcagccgccgccgcug

SEQ ID NO: 131969 - RNA, 32 nt, Human
cuccugcagccuguccuucugagcugccggug

SEQ ID NO: 131970 - RNA, 32 nt, Human
cuccugcagcggcccccgccggucgugagaug

SEQ ID NO: 131971 - RNA, 32 nt, Human
cuccugcagcgucugggguuuccguugcaguc

SEQ ID NO: 131972 - RNA, 32 nt, Human
cuccugcaggagaaaguaaagaaugggaaaau

SEQ ID NO: 131973 - RNA, 32 nt, Human
cuccugcaggagucagagcagccacauugcuu

SEQ ID NO: 131974 - RNA, 28 nt, Human
cuccugcaggcggcgcuugcgguacggg

SEQ ID NO: 131975 - RNA, 25 nt, Human
cuccugcagggacgcugcaugcaga

SEQ ID NO: 131976 - RNA, 32 nt, Human
cuccugcagugcaguugcugaggaacugagca

SEQ ID NO: 131977 - RNA, 32 nt, Human
cuccugcauccagcccccaacauggugccaaa

SEQ ID NO: 131978 - RNA, 32 nt, Human
cuccugcauccucagaaggggaaaagggacug

SEQ ID NO: 131979 - RNA, 32 nt, Human
cuccugcaucuugccaggcuccucugccaacu

SEQ ID NO: 131980 - RNA, 32 nt, Human
cuccugcaugcauguccuuugaugcaagggug

SEQ ID NO: 131981 - RNA, 32 nt, Human
cuccugcauggcccggugggucuccccacuca

SEQ ID NO: 131982 - RNA, 23 nt, Human
cuccugcauggccucguacugga

SEQ ID NO: 131983 - RNA, 32 nt, Human
cuccugcauuccaaccagccugggugacagag

SEQ ID NO: 131984 - RNA, 32 nt, Human
cuccugcauuccuccuccccuccugagggaag

SEQ ID NO: 131985 - RNA, 32 nt, Human
cuccugccaaccacaauucaaugaauccccga

SEQ ID NO: 131986 - RNA, 21 nt, Human
cuccugccaacccagcacagg

SEQ ID NO: 131987 - RNA, 32 nt, Human
cuccugccacacacaugcacacauaucuagca

SEQ ID NO: 131988 - RNA, 22 nt, Human
cuccugccacagcuccucaccc

SEQ ID NO: 131989 - RNA, 32 nt, Human
cuccugccaccagcauccacacugccggcagg

SEQ ID NO: 131990 - RNA, 24 nt, Human
cuccugccaccccuuccuccccau

SEQ ID NO: 131991 - RNA, 23 nt, Human
cuccugccacugcccucccauua

SEQ ID NO: 131992 - RNA, 32 nt, Human
cuccugccagccccucuccuccugcccugauc

SEQ ID NO: 131993 - RNA, 32 nt, Human
cuccugccaucccugcacacagccuggggaga

SEQ ID NO: 131994 - RNA, 21 nt, Human
cuccugccauccuagcacagg

SEQ ID NO: 131995 - RNA, 32 nt, Human
cuccugccauucuucuggugcuacuccaugca

SEQ ID NO: 131996 - RNA, 20 nt, Human
cuccugcccaccucucccca

SEQ ID NO: 131997 - RNA, 23 nt, Human
cuccugcccagcucccgcacccu

SEQ ID NO: 131998 - RNA, 20 nt, Human
cuccugcccaggccacagag

SEQ ID NO: 131999 - RNA, 21 nt, Human
cuccugcccaggcggcgugca

SEQ ID NO: 132000 - RNA, 32 nt, Human
cuccugcccaggggcuagagagcagucuccag

SEQ ID NO: 132001 - RNA, 32 nt, Human
cuccugcccaugcucucccagaugaagggcuu

SEQ ID NO: 132002 - RNA, 32 nt, Human
cuccugccccagccuccugaaguagcuggaac

SEQ ID NO: 132003 - RNA, 32 nt, Human
cuccugccccagcuguucuccagggcuugggg

SEQ ID NO: 132004 - RNA, 32 nt, Human
cuccugcccccuugcccugccaguuccuagag

SEQ ID NO: 132005 - RNA, 32 nt, Human
cuccugccccucuccuuaaaacugaauggugc

SEQ ID NO: 132006 - RNA, 32 nt, Human
cuccugccccuggucugaggaggagggacucu

SEQ ID NO: 132007 - RNA, 32 nt, Human
cuccugccccugguuugaggaggagggacucu

SEQ ID NO: 132008 - RNA, 32 nt, Human
cuccugcccgugacgccuugcccagcagcaag

SEQ ID NO: 132009 - RNA, 32 nt, Human
cuccugcccuccacugacuccagagagggaga

SEQ ID NO: 132010 - RNA, 32 nt, Human
cuccugcccuccugccccgugcuggaucuucc

SEQ ID NO: 132011 - RNA, 32 nt, Human
cuccugcccucuccuugcccugccucagcugc

SEQ ID NO: 132012 - RNA, 32 nt, Human
cuccugcccugcaggcuggcucccgggggucu

SEQ ID NO: 132013 - RNA, 25 nt, Human
cuccugcccuggaucuggaguggag

SEQ ID NO: 132014 - RNA, 32 nt, Human
cuccugcccuggaucuggaguggagcugcucu

SEQ ID NO: 132015 - RNA, 32 nt, Human
cuccugcccuucaguugcucaggcuccagcug

SEQ ID NO: 132016 - RNA, 32 nt, Human
cuccugcccuugugauccacccaccucagccu

SEQ ID NO: 132017 - RNA, 20 nt, Human
cuccugccgcaccccuggcc

SEQ ID NO: 132018 - RNA, 21 nt, Human
cuccugccgccgccgccgccg

SEQ ID NO: 132019 - RNA, 15 nt, Human
cuccugccgcugccg

SEQ ID NO: 132020 - RNA, 19 nt, Human
cuccugccgcugccugcca

SEQ ID NO: 132021 - RNA, 32 nt, Human
cuccugccuacuugccccuccuuccaggccgg

SEQ ID NO: 132022 - RNA, 32 nt, Human
cuccugccuagacugaccuuggacucccagcc

SEQ ID NO: 132023 - RNA, 32 nt, Human
cuccugccuauaaucccagcacuuugggaggc

SEQ ID NO: 132024 - RNA, 32 nt, Human
cuccugccuaucucuuuugcauuccaaaguuc

SEQ ID NO: 132025 - RNA, 32 nt, Human
cuccugccucaaccuuccgaauagcugggacu

SEQ ID NO: 132026 - RNA, 32 nt, Human
cuccugccucacaacaaccuccuuggacucag

SEQ ID NO: 132027 - RNA, 32 nt, Human
cuccugccucacaaccuccuuuggcccaacuc

SEQ ID NO: 132028 - RNA, 32 nt, Human
cuccugccucacccucccaaauagcugagacu

SEQ ID NO: 132029 - RNA, 31 nt, Human
cuccugccucagaugcggccugugccagaga

SEQ ID NO: 132030 - RNA, 32 nt, Human
cuccugccucagaugcggccugugccagagag

SEQ ID NO: 132031 - RNA, 32 nt, Human
cuccugccucagccuccagaauagcugggauu

SEQ ID NO: 132032 - RNA, 32 nt, Human
cuccugccucagccucccaaauagcugggauu

SEQ ID NO: 132033 - RNA, 32 nt, Human
cuccugccucagccucccaaauagcugugauu

SEQ ID NO: 132034 - RNA, 32 nt, Human
cuccugccucagccucccgaauagcugggauu

SEQ ID NO: 132035 - RNA, 32 nt, Human
cuccugccucagccucccuaauagcugggacu

SEQ ID NO: 132036 - RNA, 32 nt, Human
cuccugccucagccuccucaggagcugggauu

SEQ ID NO: 132037 - RNA, 32 nt, Human
cuccugccucagccuccugaacagcugggacc

SEQ ID NO: 132038 - RNA, 32 nt, Human
cuccugccucagccuccugaauagcugggauu

SEQ ID NO: 132039 - RNA, 32 nt, Human
cuccugccucagccuccugaauaucugggauu

SEQ ID NO: 132040 - RNA, 32 nt, Human
cuccugccucagccuccuggguagcugggauu

SEQ ID NO: 132041 - RNA, 32 nt, Human
cuccugccucagccucuugaauagcugggauu

SEQ ID NO: 132042 - RNA, 32 nt, Human
cuccugccucaggccccugaguagcugggauu

SEQ ID NO: 132043 - RNA, 32 nt, Human
cuccugccucaggccuucccaguagcugggau

SEQ ID NO: 132044 - RNA, 32 nt, Human
cuccugccucaggcuccugaguagcuaggauu

SEQ ID NO: 132045 - RNA, 32 nt, Human
cuccugccucaggcuccugaguagcugggauu

SEQ ID NO: 132046 - RNA, 32 nt, Human
cuccugccucaggcuccuggguggcugggacu

SEQ ID NO: 132047 - RNA, 32 nt, Human
cuccugccucagucucucaaagugcugugauu

SEQ ID NO: 132048 - RNA, 32 nt, Human
cuccugccucauuccuuguuggcagcuccagu

SEQ ID NO: 132049 - RNA, 32 nt, Human
cuccugccuccaccauguccaucagggugacc

SEQ ID NO: 132050 - RNA, 32 nt, Human
cuccugccuccaccauguccaucagggugauc

SEQ ID NO: 132051 - RNA, 32 nt, Human
cuccugccuccaccucccaaaguguucggauu

SEQ ID NO: 132052 - RNA, 32 nt, Human
cuccugccuccagagaaagcucugcuucaccc

SEQ ID NO: 132053 - RNA, 32 nt, Human
cuccugccuccagcacucccucccagagaaca

SEQ ID NO: 132054 - RNA, 32 nt, Human
cuccugccuccaggcauuggcucagggugaau

SEQ ID NO: 132055 - RNA, 28 nt, Human
cuccugccucccagcagccucuucaggc

SEQ ID NO: 132056 - RNA, 32 nt, Human
cuccugccuccccucuuugauccuuuucugug

SEQ ID NO: 132057 - RNA, 32 nt, Human
cuccugccuccugcaagguggaggguggggcu

SEQ ID NO: 132058 - RNA, 21 nt, Human
cuccugccucuagggugcagu

SEQ ID NO: 132059 - RNA, 32 nt, Human
cuccugccugagguccucagaaucccacugca

SEQ ID NO: 132060 - RNA, 32 nt, Human
cuccugccugccaguggccucuuuagcccagc

SEQ ID NO: 132061 - RNA, 21 nt, Human
cuccugccugccuggugcccu

SEQ ID NO: 132062 - RNA, 32 nt, Human
cuccugccugcucucccugcguugccuagggu

SEQ ID NO: 132063 - RNA, 32 nt, Human
cuccugccuggccucugcucaacauaucccua

SEQ ID NO: 132064 - RNA, 22 nt, Human
cuccugccugggcaacaagagc

SEQ ID NO: 132065 - RNA, 24 nt, Human
cuccugccugggcaacaagaguga

SEQ ID NO: 132066 - RNA, 21 nt, Human
cuccugccugggugacacagc

SEQ ID NO: 132067 - RNA, 32 nt, Human
cuccugccuguaaucccagcacuuugggaggc

SEQ ID NO: 132068 - RNA, 32 nt, Human
cuccugccuguaaucccaucacuuugggaggc

SEQ ID NO: 132069 - RNA, 32 nt, Human
cuccugccuguaaucgcagcacuuugggaggc

SEQ ID NO: 132070 - RNA, 32 nt, Human
cuccugccugugauccuagcacuuugggaggc

SEQ ID NO: 132071 - RNA, 32 nt, Human
cuccugccuguggagguggacgugugguuggu

SEQ ID NO: 132072 - RNA, 32 nt, Human
cuccugccuuagccuccugaaaagcugggauu

SEQ ID NO: 132073 - RNA, 32 nt, Human
cuccugccuucaccauguccaucagggugacc

SEQ ID NO: 132074 - RNA, 23 nt, Human
cuccugccuuccacagccucucg

SEQ ID NO: 132075 - RNA, 32 nt, Human
cuccugccuuccuccugggcccucucugcucu

SEQ ID NO: 132076 - RNA, 32 nt, Human
cuccugccuuucugcucacuuuccugccuguu

SEQ ID NO: 132077 - RNA, 32 nt, Human
cuccugcgcccgccucccccauggccccaugc

SEQ ID NO: 132078 - RNA, 32 nt, Human
cuccugcggcgaagcaagaccuacuggcugcc

SEQ ID NO: 132079 - RNA, 32 nt, Human
cuccugcguagcugggaccacagggguaugcc

SEQ ID NO: 132080 - RNA, 32 nt, Human
cuccugcgugagcugccagccuuuugccuucu

SEQ ID NO: 132081 - RNA, 32 nt, Human
cuccugcgugugcacaagcacacacaugcaag

SEQ ID NO: 132082 - RNA, 32 nt, Human
cuccugcuaccaugaagauugcagugauugga

SEQ ID NO: 132083 - RNA, 32 nt, Human
cuccugcuaccuaggcaggcgugaggguguga

SEQ ID NO: 132084 - RNA, 24 nt, Human
cuccugcucacagccuggcacaga

SEQ ID NO: 132085 - RNA, 19 nt, Human
cuccugcucaccaccugcc

SEQ ID NO: 132086 - RNA, 32 nt, Human
cuccugcucaccaccugccucuaaucugagcu

SEQ ID NO: 132087 - RNA, 32 nt, Human
cuccugcucacugcccucagaaagcccaaccc

SEQ ID NO: 132088 - RNA, 18 nt, Human
cuccugcuccaccugcca

SEQ ID NO: 132089 - RNA, 20 nt, Human
cuccugcucccaaggccagg

SEQ ID NO: 132090 - RNA, 32 nt, Human
cuccugcucccagcagcccucucuuagaauau

SEQ ID NO: 132091 - RNA, 32 nt, Human
cuccugcuccgucagcccaccugcugcugcgc

SEQ ID NO: 132092 - RNA, 24 nt, Human
cuccugcucucacuaugugauaua

SEQ ID NO: 132093 - RNA, 32 nt, Human
cuccugcucucagagguggaagagcaaggcug

SEQ ID NO: 132094 - RNA, 22 nt, Human
cuccugcucuccugugccuccg

SEQ ID NO: 132095 - RNA, 32 nt, Human
cuccugcucucgcugcucauguacggcugccu

SEQ ID NO: 132096 - RNA, 21 nt, Human
cuccugcucucucacccucuc

SEQ ID NO: 132097 - RNA, 32 nt, Human
cuccugcucugccaccucauuugucuuuauuu

SEQ ID NO: 132098 - RNA, 32 nt, Human
cuccugcucugccucaagcaccccuucuuugc

SEQ ID NO: 132099 - RNA, 32 nt, Human
cuccugcucugcugggugcugccugugaggcu

SEQ ID NO: 132100 - RNA, 32 nt, Human
cuccugcucuguccucauccccggcuuagcug

SEQ ID NO: 132101 - RNA, 32 nt, Human
cuccugcugagcugccccugcugcuuaagugc

SEQ ID NO: 132102 - RNA, 32 nt, Human
cuccugcugaggcggagacugcagugagcuga

SEQ ID NO: 132103 - RNA, 32 nt, Human
cuccugcugagguggagacugcagugagcuga

SEQ ID NO: 132104 - RNA, 32 nt, Human
cuccugcugagguggagauugcagugaacuaa

SEQ ID NO: 132105 - RNA, 32 nt, Human
cuccugcugcaaaggcugcugggauuuucugc

SEQ ID NO: 132106 - RNA, 32 nt, Human
cuccugcugcaauccaucccuuccucccauug

SEQ ID NO: 132107 - RNA, 32 nt, Human
cuccugcugcaccguguguccugcugcccgag

SEQ ID NO: 132108 - RNA, 32 nt, Human
cuccugcugcagcuggauucucugauguggcg

SEQ ID NO: 132109 - RNA, 32 nt, Human
cuccugcugcaugucccuucccuuccccagcc

SEQ ID NO: 132110 - RNA, 20 nt, Human
cuccugcugccgucgcugcc

SEQ ID NO: 132111 - RNA, 30 nt, Human
cuccugcugcgcuucgugcuccugugcaga

SEQ ID NO: 132112 - RNA, 32 nt, Human
cuccugcugcggaggaagagggggaagaggcc

SEQ ID NO: 132113 - RNA, 32 nt, Human
cuccugcugcgggccuucccccggcucugucc

SEQ ID NO: 132114 - RNA, 32 nt, Human
cuccugcugcugcugccgccacagcugcaccu

SEQ ID NO: 132115 - RNA, 32 nt, Human
cuccugcugcuggccucgcuguaucagcugau

SEQ ID NO: 132116 - RNA, 32 nt, Human
cuccugcugcugggccucaucguucuugucaa

SEQ ID NO: 132117 - RNA, 32 nt, Human
cuccugcuggaccugggcacagauuccaccca

SEQ ID NO: 132118 - RNA, 18 nt, Human
cuccugcuggccgcugcc

SEQ ID NO: 132119 - RNA, 32 nt, Human
cuccugcugggcuccagccagaguagucacac

SEQ ID NO: 132120 - RNA, 32 nt, Human
cuccugcugugugucugugguugcccacuuuc

SEQ ID NO: 132121 - RNA, 32 nt, Human
cuccugcuucagucucacaaauagcugggguu

SEQ ID NO: 132122 - RNA, 32 nt, Human
cuccugcuuucugcuugggcccugcaccuggc

SEQ ID NO: 132123 - RNA, 32 nt, Human
cuccugcuuugacaugaugcaggauggacuca

SEQ ID NO: 132124 - RNA, 32 nt, Human
cuccuggaaagccacugcagaggggcaguggc

SEQ ID NO: 132125 - RNA, 28 nt, Human
cuccuggaagcacagcgcugagcauggg

SEQ ID NO: 132126 - RNA, 22 nt, Human
cuccuggaagccaugguacagg

SEQ ID NO: 132127 - RNA, 32 nt, Human
cuccuggaagcugaggcugagaaggguggagc

SEQ ID NO: 132128 - RNA, 22 nt, Human
cuccuggacacuggagcccagg

SEQ ID NO: 132129 - RNA, 32 nt, Human
cuccuggaccgccugcacgugccagccuccca

SEQ ID NO: 132130 - RNA, 22 nt, Human
cuccuggaccggggggcgcgga

SEQ ID NO: 132131 - RNA, 32 nt, Human
cuccuggacgcagaggugacagugggagcugg

SEQ ID NO: 132132 - RNA, 23 nt, Human
cuccuggacgugccacagacaga

SEQ ID NO: 132133 - RNA, 32 nt, Human
cuccuggacucaaacuccugcuacauccuucu

SEQ ID NO: 132134 - RNA, 32 nt, Human
cuccuggacuccccucccugccgaacacacau

SEQ ID NO: 132135 - RNA, 32 nt, Human
cuccuggagacuagcuggggcuuauggguggc

SEQ ID NO: 132136 - RNA, 32 nt, Human
cuccuggagagagugaggagagugugugauag

SEQ ID NO: 132137 - RNA, 32 nt, Human
cuccuggagagggcagaguaggggaaagcugu

SEQ ID NO: 132138 - RNA, 32 nt, Human
cuccuggagauaccuuccccuccuggguacau

SEQ ID NO: 132139 - RNA, 32 nt, Human
cuccuggagauggggucaaggcagcaggacug

SEQ ID NO: 132140 - RNA, 32 nt, Human
cuccuggagcaagcucugcccuggcugugggu

SEQ ID NO: 132141 - RNA, 21 nt, Human
cuccuggagcagcggcaucau

SEQ ID NO: 132142 - RNA, 32 nt, Human
cuccuggagcaucugccccauuccuccaaguc

SEQ ID NO: 132143 - RNA, 32 nt, Human
cuccuggagccaagcucacccggucccaaauc

SEQ ID NO: 132144 - RNA, 32 nt, Human
cuccuggagcgggcggagaggaaaggccgcuc

SEQ ID NO: 132145 - RNA, 32 nt, Human
cuccuggagcuauucacagugcuggggaacaa

SEQ ID NO: 132146 - RNA, 32 nt, Human
cuccuggaggaguggacccaggagaccagaag

SEQ ID NO: 132147 - RNA, 32 nt, Human
cuccuggaggcagacgcuggagggcugggcuc

SEQ ID NO: 132148 - RNA, 32 nt, Human
cuccuggaggcaggugaugcugugggcacgcu

SEQ ID NO: 132149 - RNA, 32 nt, Human
cuccuggaggcaguggcuguagcagcccuugc

SEQ ID NO: 132150 - RNA, 21 nt, Human
cuccuggaggcggcggcggga

SEQ ID NO: 132151 - RNA, 32 nt, Human
cuccuggagugagugaggauucaaugagauau

SEQ ID NO: 132152 - RNA, 32 nt, Human
cuccuggagugcauuucugaggguaaaaaggc

SEQ ID NO: 132153 - RNA, 19 nt, Human
cuccuggaguucagcaggu

SEQ ID NO: 132154 - RNA, 25 nt, Human
cuccuggaguugacaguagcauaga

SEQ ID NO: 132155 - RNA, 32 nt, Human
cuccuggaucccuaggcucuguuccaugagcc

SEQ ID NO: 132156 - RNA, 24 nt, Human
cuccuggaucuauguguaugcaga

SEQ ID NO: 132157 - RNA, 26 nt, Human
cuccuggaucugaggccucuggggug

SEQ ID NO: 132158 - RNA, 26 nt, Human
cuccuggauucagugcuucugggaua

SEQ ID NO: 132159 - RNA, 32 nt, Human
cuccuggauucugcccugaccuccauccugga

SEQ ID NO: 132160 - RNA, 26 nt, Human
cuccuggauuugaggccuuugggaug

SEQ ID NO: 132161 - RNA, 32 nt, Human
cuccuggcaacuggucaagcaggcagcgucca

SEQ ID NO: 132162 - RNA, 32 nt, Human
cuccuggcacugaucccagcugaguuucuccu

SEQ ID NO: 132163 - RNA, 32 nt, Human
cuccuggcacuggccuggguagagccagggcg

SEQ ID NO: 132164 - RNA, 32 nt, Human
cuccuggcacuuccagcugggugucccacaug

SEQ ID NO: 132165 - RNA, 32 nt, Human
cuccuggcagaagcugucgugccugagacccc

SEQ ID NO: 132166 - RNA, 32 nt, Human
cuccuggcagccuccccucagucuuccuccac

SEQ ID NO: 132167 - RNA, 32 nt, Human
cuccuggcaggagaaaggagggugguuuccgu

SEQ ID NO: 132168 - RNA, 23 nt, Human
cuccuggcaggggucucuuccca

SEQ ID NO: 132169 - RNA, 32 nt, Human
cuccuggccagcugcccaccccagugccaggu

SEQ ID NO: 132170 - RNA, 32 nt, Human
cuccuggcccaucccuucccuucuucccuccc

SEQ ID NO: 132171 - RNA, 19 nt, Human
cuccuggccccggcuucuu

SEQ ID NO: 132172 - RNA, 32 nt, Human
cuccuggcccugccucccagcaaguaagcaag

SEQ ID NO: 132173 - RNA, 22 nt, Human
cuccuggccgccgccgccgccg

SEQ ID NO: 132174 - RNA, 32 nt, Human
cuccuggccgugguuaagcuguguacagauga

SEQ ID NO: 132175 - RNA, 32 nt, Human
cuccuggccucagccagugccuccccggccca

SEQ ID NO: 132176 - RNA, 32 nt, Human
cuccuggccuccagaauugcaggagaauaaau

SEQ ID NO: 132177 - RNA, 27 nt, Human
cuccuggccugcucccugcaguacgga

SEQ ID NO: 132178 - RNA, 32 nt, Human
cuccuggccugggacaaagaucugaggguguc

SEQ ID NO: 132179 - RNA, 32 nt, Human
cuccuggccuucacucucagcagagcuuugga

SEQ ID NO: 132180 - RNA, 32 nt, Human
cuccuggcucaagugauccucccaccucagcc

SEQ ID NO: 132181 - RNA, 32 nt, Human
cuccuggcucaagugaucucccacuucagccu

SEQ ID NO: 132182 - RNA, 32 nt, Human
cuccuggcucacuggcuucccccuaccaaguu

SEQ ID NO: 132183 - RNA, 21 nt, Human
cuccuggcuccccagggccug

SEQ ID NO: 132184 - RNA, 22 nt, Human
cuccuggcuccgcucuagaccu

SEQ ID NO: 132185 - RNA, 22 nt, Human
cuccuggcuccggugggaacug

SEQ ID NO: 132186 - RNA, 23 nt, Human
cuccuggcuccuccuguggccug

SEQ ID NO: 132187 - RNA, 31 nt, Human
cuccuggcugagagaggaagagcugcaacgg

SEQ ID NO: 132188 - RNA, 22 nt, Human
cuccuggcuggacgccaggcca

SEQ ID NO: 132189 - RNA, 20 nt, Human
cuccuggcuucauguggcau

SEQ ID NO: 132190 - RNA, 32 nt, Human
cuccuggcuucguggagacacagccauuugug

SEQ ID NO: 132191 - RNA, 32 nt, Human
cuccuggcuuuuuccuuucccuucccuucucc

SEQ ID NO: 132192 - RNA, 32 nt, Human
cuccugggaacacaucuggcugcacaggcuga

SEQ ID NO: 132193 - RNA, 21 nt, Human
cuccugggacggcagcaagga

SEQ ID NO: 132194 - RNA, 32 nt, Human
cuccugggagagaggggugagggauguccccu

SEQ ID NO: 132195 - RNA, 22 nt, Human
cuccugggagcuccugcucccu

SEQ ID NO: 132196 - RNA, 21 nt, Human
cuccugggaggcagcaccaga

SEQ ID NO: 132197 - RNA, 21 nt, Human
cuccugggcaacagagcaaga

SEQ ID NO: 132198 - RNA, 32 nt, Human
cuccugggcaauucacuuaacuucuccauggc

SEQ ID NO: 132199 - RNA, 23 nt, Human
cuccugggcacagguuauacaga

SEQ ID NO: 132200 - RNA, 23 nt, Human
cuccugggcagccacaccacaga

SEQ ID NO: 132201 - RNA, 32 nt, Human
cuccugggcagcugggcccuccuggguggggu

SEQ ID NO: 132202 - RNA, 22 nt, Human
cuccugggcagugccacacaga

SEQ ID NO: 132203 - RNA, 22 nt, Human
cuccugggcaucuggggacagg

SEQ ID NO: 132204 - RNA, 24 nt, Human
cuccugggcauggcggaagcagga

SEQ ID NO: 132205 - RNA, 23 nt, Human
cuccugggcccagcagcaugagg

SEQ ID NO: 132206 - RNA, 32 nt, Human
cuccugggcccagguguggcugagcaccaggg

SEQ ID NO: 132207 - RNA, 32 nt, Human
cuccugggccucaccaucccagaagaggagug

SEQ ID NO: 132208 - RNA, 32 nt, Human
cuccugggccuucagaagggaggacuuugaga

SEQ ID NO: 132209 - RNA, 23 nt, Human
cuccugggcgcacugggcgaagg

SEQ ID NO: 132210 - RNA, 18 nt, Human
cuccugggcgccgcugcc

SEQ ID NO: 132211 - RNA, 24 nt, Human
cuccugggcgcgccccgccgcggg

SEQ ID NO: 132212 - RNA, 21 nt, Human
cuccugggcggccugcgcaga

SEQ ID NO: 132213 - RNA, 32 nt, Human
cuccugggcuaagugauccucccaccucagcc

SEQ ID NO: 132214 - RNA, 32 nt, Human
cuccugggcucaagcaauccuccugagugauc

SEQ ID NO: 132215 - RNA, 32 nt, Human
cuccugggcucaagcgauccuccuggcucagc

SEQ ID NO: 132216 - RNA, 19 nt, Human
cuccugggcucaagcgauu

SEQ ID NO: 132217 - RNA, 32 nt, Human
cuccugggcucaaguaauccuccugccugagc

SEQ ID NO: 132218 - RNA, 32 nt, Human
cuccugggcucaaugauccucccgccucggcc

SEQ ID NO: 132219 - RNA, 32 nt, Human
cuccugggcucccaguccagccacuccagggu

SEQ ID NO: 132220 - RNA, 32 nt, Human
cuccugggcugagccuuuggggguugauucac

SEQ ID NO: 132221 - RNA, 32 nt, Human
cuccugggcugcagagccauggcccggggcua

SEQ ID NO: 132222 - RNA, 18 nt, Human
cuccugggcugguuccug

SEQ ID NO: 132223 - RNA, 32 nt, Human
cuccugggcuugagcaagucuuccccucagcc

SEQ ID NO: 132224 - RNA, 32 nt, Human
cuccuggggaaagauggguauaggggcuucau

SEQ ID NO: 132225 - RNA, 24 nt, Human
cuccuggggaccuucgcagcaaga

SEQ ID NO: 132226 - RNA, 32 nt, Human
cuccuggggcccuguucccuguggggacugga

SEQ ID NO: 132227 - RNA, 32 nt, Human
cuccuggggccuuccugccuuugaacugcggu

SEQ ID NO: 132228 - RNA, 21 nt, Human
cuccuggggcugggaccguag

SEQ ID NO: 132229 - RNA, 32 nt, Human
cuccuggggcuggggcccagauccuggggacc

SEQ ID NO: 132230 - RNA, 32 nt, Human
cuccuggggcuggugucucaggagcagggguc

SEQ ID NO: 132231 - RNA, 32 nt, Human
cuccugggggcuguggggaagacacccccugc

SEQ ID NO: 132232 - RNA, 32 nt, Human
cuccuggggguucugagaguccugggcagugu

SEQ ID NO: 132233 - RNA, 24 nt, Human
cuccuggguacgcuggagcaagga

SEQ ID NO: 132234 - RNA, 24 nt, Human
cuccuggguagcugggauuacagg

SEQ ID NO: 132235 - RNA, 32 nt, Human
cuccuggguauugaagaaccuggacuugaagc

SEQ ID NO: 132236 - RNA, 32 nt, Human
cuccugggucagacuccuggguucaugacuua

SEQ ID NO: 132237 - RNA, 32 nt, Human
cuccugggucuacagcccugagccccuccggc

SEQ ID NO: 132238 - RNA, 32 nt, Human
cuccugggugcugagggcauccagcaagcccc

SEQ ID NO: 132239 - RNA, 24 nt, Human
cuccuggguggcacagcagcagga

SEQ ID NO: 132240 - RNA, 32 nt, Human
cuccuggguguguuuggcuuggccuuggcaug

SEQ ID NO: 132241 - RNA, 32 nt, Human
cuccuggguucaagcaauucuaccucagucuc

SEQ ID NO: 132242 - RNA, 32 nt, Human
cuccuggguuccacggcggagucagauguuuc

SEQ ID NO: 132243 - RNA, 21 nt, Human
cuccugguaaauaguauacau

SEQ ID NO: 132244 - RNA, 32 nt, Human
cuccugguaccaauugauucagccuggagaug

SEQ ID NO: 132245 - RNA, 32 nt, Human
cuccuggucaccuucaccccugcccuugucuc

SEQ ID NO: 132246 - RNA, 32 nt, Human
cuccuggucagccuucuguucugagaucaaag

SEQ ID NO: 132247 - RNA, 32 nt, Human
cuccugguccccucagcucugccucugcagcc

SEQ ID NO: 132248 - RNA, 32 nt, Human
cuccugguccugacauccgcugugcugggucc

SEQ ID NO: 132249 - RNA, 25 nt, Human
cuccuggucgggugccgcggccaga

SEQ ID NO: 132250 - RNA, 32 nt, Human
cuccuggucugugucaguauuaccaccagacu

SEQ ID NO: 132251 - RNA, 32 nt, Human
cuccuggucuguuccaaaaacucugaaucauc

SEQ ID NO: 132252 - RNA, 32 nt, Human
cuccuggucuugaacuccuggccacaagugau

SEQ ID NO: 132253 - RNA, 18 nt, Human
cuccuggugccgcugcug

SEQ ID NO: 132254 - RNA, 32 nt, Human
cuccuggugggugauggcuccgggaggccuug

SEQ ID NO: 132255 - RNA, 32 nt, Human
cuccugguggugagccagucugcauucccacg

SEQ ID NO: 132256 - RNA, 32 nt, Human
cuccuggugucacccaggcuggagugcagugg

SEQ ID NO: 132257 - RNA, 32 nt, Human
cuccugguucaagugauccucuugucucaguc

SEQ ID NO: 132258 - RNA, 32 nt, Human
cuccugguucugccagcuccccugagagccug

SEQ ID NO: 132259 - RNA, 32 nt, Human
cuccuguaauuacugccuugccauucugcccc

SEQ ID NO: 132260 - RNA, 32 nt, Human
cuccuguaccuuguccuccauuuccuuuucuc

SEQ ID NO: 132261 - RNA, 20 nt, Human
cuccuguagccacuggcaua

SEQ ID NO: 132262 - RNA, 21 nt, Human
cuccuguagccgccgccgccg

SEQ ID NO: 132263 - RNA, 32 nt, Human
cuccuguagggcagugccaggccuugauugcc

SEQ ID NO: 132264 - RNA, 32 nt, Human
cuccugucaauccguccuggccucagcagcug

SEQ ID NO: 132265 - RNA, 32 nt, Human
cuccugucacccauuuugaagaguggcagaac

SEQ ID NO: 132266 - RNA, 22 nt, Human
cuccugucaccccugcccacca

SEQ ID NO: 132267 - RNA, 32 nt, Human
cuccugucagguaggaaugaacuugccagccu

SEQ ID NO: 132268 - RNA, 22 nt, Human
cuccugucaguaguggccugua

SEQ ID NO: 132269 - RNA, 24 nt, Human
cuccugucagugugcaaagcugua

SEQ ID NO: 132270 - RNA, 32 nt, Human
cuccuguccagccuucgcccgccugggcaggg

SEQ ID NO: 132271 - RNA, 32 nt, Human
cuccuguccccuuauccuuucucccucuguaa

SEQ ID NO: 132272 - RNA, 32 nt, Human
cuccugucccuucacuuuuccucuuggaguag

SEQ ID NO: 132273 - RNA, 22 nt, Human
cuccugucccuuccccuucugc

SEQ ID NO: 132274 - RNA, 32 nt, Human
cuccuguccgccgugucuagcagcggggccca

SEQ ID NO: 132275 - RNA, 19 nt, Human
cuccuguccucaucccucu

SEQ ID NO: 132276 - RNA, 32 nt, Human
cuccuguccuccugcugcuccucucucacuuc

SEQ ID NO: 132277 - RNA, 32 nt, Human
cuccuguccucggggaccccagcaccucauca

SEQ ID NO: 132278 - RNA, 32 nt, Human
cuccuguccugaagccccuuccucccuccacu

SEQ ID NO: 132279 - RNA, 32 nt, Human
cuccuguccuggacgugacuucauccugagga

SEQ ID NO: 132280 - RNA, 32 nt, Human
cuccugucgaccgacaaccccgaugcccugcc

SEQ ID NO: 132281 - RNA, 32 nt, Human
cuccugucgcccaggcuggagugcaauggcac

SEQ ID NO: 132282 - RNA, 32 nt, Human
cuccugucgccgccaugagcacuggcaccuuc

SEQ ID NO: 132283 - RNA, 21 nt, Human
cuccugucgccgccgccgccg

SEQ ID NO: 132284 - RNA, 32 nt, Human
cuccugucuauaaucgcagcacuuugggaggc

SEQ ID NO: 132285 - RNA, 32 nt, Human
cuccugucucagccuccuggguagcugggauu

SEQ ID NO: 132286 - RNA, 20 nt, Human
cuccugucucccuccucugc

SEQ ID NO: 132287 - RNA, 32 nt, Human
cuccugucucuccuccccuccucucucucuuc

SEQ ID NO: 132288 - RNA, 32 nt, Human
cuccugucucuccuccccuccucucucuuccu

SEQ ID NO: 132289 - RNA, 32 nt, Human
cuccugucucucuggcaggagugccuguaccc

SEQ ID NO: 132290 - RNA, 32 nt, Human
cuccugucucugccuccugggccuucagaagg

SEQ ID NO: 132291 - RNA, 32 nt, Human
cuccugucucuuccacugcucucuauguuuua

SEQ ID NO: 132292 - RNA, 32 nt, Human
cuccugucugaccugguucucaacagacccag

SEQ ID NO: 132293 - RNA, 32 nt, Human
cuccugucugccuucuuccuccacuuguguca

SEQ ID NO: 132294 - RNA, 32 nt, Human
cuccugucuguccaccuccuccucuuccucuc

SEQ ID NO: 132295 - RNA, 32 nt, Human
cuccugucugugucguucucugugccacagcu

SEQ ID NO: 132296 - RNA, 32 nt, Human
cuccugucuuccuccuugucccaugaaggcca

SEQ ID NO: 132297 - RNA, 32 nt, Human
cuccugucuucucuuggaaaccacagcagccc

SEQ ID NO: 132298 - RNA, 32 nt, Human
cuccugucuucuuuaccugauccacaggaccc

SEQ ID NO: 132299 - RNA, 32 nt, Human
cuccugucuugcagcuccuccuggcaccaguc

SEQ ID NO: 132300 - RNA, 19 nt, Human
cuccugugaaacugcugcc

SEQ ID NO: 132301 - RNA, 20 nt, Human
cuccugugagcugcacgcca

SEQ ID NO: 132302 - RNA, 32 nt, Human
cuccugugaggaggggacgccagaagcaggaa

SEQ ID NO: 132303 - RNA, 32 nt, Human
cuccugugaggcagacaggacagugagguugu

SEQ ID NO: 132304 - RNA, 32 nt, Human
cuccugugccccucccuccuuguuguccagug

SEQ ID NO: 132305 - RNA, 24 nt, Human
cuccugugccgccggcagcaugga

SEQ ID NO: 132306 - RNA, 32 nt, Human
cuccugugccugauguccccagcuggggucag

SEQ ID NO: 132307 - RNA, 20 nt, Human
cuccugugcucacccucucu

SEQ ID NO: 132308 - RNA, 32 nt, Human
cuccugugcuggcagcuuugcccacacauacc

SEQ ID NO: 132309 - RNA, 32 nt, Human
cuccugugcuugaagguggcugaggccgggcc

SEQ ID NO: 132310 - RNA, 24 nt, Human
cuccuguggaagaggccacaaaga

SEQ ID NO: 132311 - RNA, 32 nt, Human
cuccuguggaauguuugguugcucugaagugg

SEQ ID NO: 132312 - RNA, 32 nt, Human
cuccuguggacaaaccaccaauaggccaggac

SEQ ID NO: 132313 - RNA, 32 nt, Human
cuccuguggcuacccaacuuuucacacaucuu

SEQ ID NO: 132314 - RNA, 31 nt, Human
cuccugugguuuuucugagcgugcgggcucc

SEQ ID NO: 132315 - RNA, 32 nt, Human
cuccuguguagcugccaccuccccgcugggcc

SEQ ID NO: 132316 - RNA, 23 nt, Human
cuccuguguagcugggauuauag

SEQ ID NO: 132317 - RNA, 32 nt, Human
cuccugugucucaaacaugcuucuuuauuacu

SEQ ID NO: 132318 - RNA, 32 nt, Human
cuccugugugccugagcuccucccuuuucaau

SEQ ID NO: 132319 - RNA, 21 nt, Human
cuccugugugucgccacugcc

SEQ ID NO: 132320 - RNA, 32 nt, Human
cuccuguguuuggaaguccacuaggucuggga

SEQ ID NO: 132321 - RNA, 32 nt, Human
cuccuguuacccaggcuggaggacagugaugu

SEQ ID NO: 132322 - RNA, 32 nt, Human
cuccuguuaucccagugcuuuaggaggcugag

SEQ ID NO: 132323 - RNA, 32 nt, Human
cuccuguucaugcccauaccccuggccaagga

SEQ ID NO: 132324 - RNA, 32 nt, Human
cuccuguuccauucaucugcccaaacccuuuc

SEQ ID NO: 132325 - RNA, 32 nt, Human
cuccuguuccuccuucuccaucccccauggag

SEQ ID NO: 132326 - RNA, 32 nt, Human
cuccuguuccugccuucucuucuauccugcaa

SEQ ID NO: 132327 - RNA, 18 nt, Human
cuccuguuccuugugcac

SEQ ID NO: 132328 - RNA, 32 nt, Human
cuccuguucucggcagcuucugucgcuggccc

SEQ ID NO: 132329 - RNA, 32 nt, Human
cuccuguucugucacuugucauggucuuucuu

SEQ ID NO: 132330 - RNA, 21 nt, Human
cuccuguugcugccgccgccg

SEQ ID NO: 132331 - RNA, 32 nt, Human
cuccuguugugcaggcuggagugcaguggcac

SEQ ID NO: 132332 - RNA, 32 nt, Human
cuccuguugugcaggcuguagugcaguggcac

SEQ ID NO: 132333 - RNA, 32 nt, Human
cuccuguuguuucugccacagggacuuccuug

SEQ ID NO: 132334 - RNA, 21 nt, Human
cuccuguuucccuccuucugc

SEQ ID NO: 132335 - RNA, 32 nt, Human
cuccuguuuuaggucacaggcgcgagauggag

SEQ ID NO: 132336 - RNA, 21 nt, Human
cuccuguuuuccuuccucugc

SEQ ID NO: 132337 - RNA, 32 nt, Human
cuccuuaacaccgaacaccaugccuucaauua

SEQ ID NO: 132338 - RNA, 32 nt, Human
cuccuuaaccaccagcaucccuccucucccca

SEQ ID NO: 132339 - RNA, 32 nt, Human
cuccuuaaccccgagcuuguaagaaagcacag

SEQ ID NO: 132340 - RNA, 32 nt, Human
cuccuuaacuguucugaauuucuuucagagaa

SEQ ID NO: 132341 - RNA, 18 nt, Human
cuccuuaacuguuuucca

SEQ ID NO: 132342 - RNA, 32 nt, Human
cuccuuacaacaaacaaauaucaaaaagaguu

SEQ ID NO: 132343 - RNA, 32 nt, Human
cuccuuacagaagggagugaaaaccucuuucg

SEQ ID NO: 132344 - RNA, 32 nt, Human
cuccuuacauuuuacauucaugccacauucaa

SEQ ID NO: 132345 - RNA, 32 nt, Human
cuccuuacccagcaucuggaguacaggacaua

SEQ ID NO: 132346 - RNA, 32 nt, Human
cuccuuaccuuaaaagaugcuggagucauaug

SEQ ID NO: 132347 - RNA, 32 nt, Human
cuccuuacuccagccuggcagggaaggaagga

SEQ ID NO: 132348 - RNA, 32 nt, Human
cuccuuacuuuaaauguucugccaucauuuca

SEQ ID NO: 132349 - RNA, 22 nt, Human
cuccuuagagccgugacuuagg

SEQ ID NO: 132350 - RNA, 32 nt, Human
cuccuuagaggcucaggccagggaccuuucuc

SEQ ID NO: 132351 - RNA, 32 nt, Human
cuccuuagcagcuguauucuggagucuggaug

SEQ ID NO: 132352 - RNA, 32 nt, Human
cuccuuagccaagcuucucucugucuucccuc

SEQ ID NO: 132353 - RNA, 32 nt, Human
cuccuuagccaucagguacaguuuacacuaca

SEQ ID NO: 132354 - RNA, 19 nt, Human
cuccuuagcuccccucacu

SEQ ID NO: 132355 - RNA, 32 nt, Human
cuccuuaggccccagccugggcccagacccau

SEQ ID NO: 132356 - RNA, 32 nt, Human
cuccuuaggcuuugugcucugcucugcccugc

SEQ ID NO: 132357 - RNA, 23 nt, Human
cuccuuaguagcugggaccacag

SEQ ID NO: 132358 - RNA, 24 nt, Human
cuccuuaguagcugggauuacagg

SEQ ID NO: 132359 - RNA, 32 nt, Human
cuccuuaguagcugggauuacaggcaugugcc

SEQ ID NO: 132360 - RNA, 23 nt, Human
cuccuuaguagugggauuacagg

SEQ ID NO: 132361 - RNA, 32 nt, Human
cuccuuaucaggcagcugggugaccuugcugc

SEQ ID NO: 132362 - RNA, 32 nt, Human
cuccuuaucccuugguuuagaggaacccaaga

SEQ ID NO: 132363 - RNA, 32 nt, Human
cuccuuauuucagaauaaggugucacaauucu

SEQ ID NO: 132364 - RNA, 31 nt, Human
cuccuucacagcuaagaugccaugugcaggu

SEQ ID NO: 132365 - RNA, 32 nt, Human
cuccuucacaugcuugguguggagauuaaaua

SEQ ID NO: 132366 - RNA, 32 nt, Human
cuccuucaccagcaaaguggaaaaagaagcgu

SEQ ID NO: 132367 - RNA, 32 nt, Human
cuccuucacgcccugcuucucucccucgcucg

SEQ ID NO: 132368 - RNA, 32 nt, Human
cuccuucagaagacuuauuuuuguggcaguuu

SEQ ID NO: 132369 - RNA, 32 nt, Human
cuccuucagccuuuucccugugcccgauccuc

SEQ ID NO: 132370 - RNA, 32 nt, Human
cuccuucagcuucucuggcuccugggccaggu

SEQ ID NO: 132371 - RNA, 32 nt, Human
cuccuucaggcgaagggugguuugcagaugug

SEQ ID NO: 132372 - RNA, 32 nt, Human
cuccuucaggcucucucacugucuaaaucagu

SEQ ID NO: 132373 - RNA, 22 nt, Human
cuccuucaggcuggagugcagu

SEQ ID NO: 132374 - RNA, 24 nt, Human
cuccuucaggcuggagugcagugg

SEQ ID NO: 132375 - RNA, 32 nt, Human
cuccuucauccagggaugggccccagggaccc

SEQ ID NO: 132376 - RNA, 32 nt, Human
cuccuucaugacagccuccaccccacaaccca

SEQ ID NO: 132377 - RNA, 32 nt, Human
cuccuucauuuccaauauggcagggccaugag

SEQ ID NO: 132378 - RNA, 21 nt, Human
cuccuuccacccgccgcugcc

SEQ ID NO: 132379 - RNA, 32 nt, Human
cuccuuccaccugagcuugcuugaagggaccc

SEQ ID NO: 132380 - RNA, 32 nt, Human
cuccuuccagcuagugacccacaugccauuug

SEQ ID NO: 132381 - RNA, 32 nt, Human
cuccuuccagggaugucucuccagcucuacuu

SEQ ID NO: 132382 - RNA, 32 nt, Human
cuccuucccaaaucugucuccccagaagacac

SEQ ID NO: 132383 - RNA, 32 nt, Human
cuccuucccaagaauuuauagcacuuaauguu

SEQ ID NO: 132384 - RNA, 19 nt, Human
cuccuucccaagcucccgg

SEQ ID NO: 132385 - RNA, 32 nt, Human
cuccuucccagaaguuuuugcacagaacuuca

SEQ ID NO: 132386 - RNA, 32 nt, Human
cuccuucccagagugggacugugucuugcuuc

SEQ ID NO: 132387 - RNA, 32 nt, Human
cuccuucccaggaguggaggaggccugggggc

SEQ ID NO: 132388 - RNA, 22 nt, Human
cuccuucccaugcuucucccgg

SEQ ID NO: 132389 - RNA, 32 nt, Human
cuccuucccauguuaagcuuuaaccucuguaa

SEQ ID NO: 132390 - RNA, 32 nt, Human
cuccuucccauuggcuuucucuccuuggccuu

SEQ ID NO: 132391 - RNA, 24 nt, Human
cuccuuccccaaaucuuuugggga

SEQ ID NO: 132392 - RNA, 21 nt, Human
cuccuucccccauucucccgg

SEQ ID NO: 132393 - RNA, 32 nt, Human
cuccuuccccuccccaaccccaggcccaccau

SEQ ID NO: 132394 - RNA, 32 nt, Human
cuccuuccccucccgauugagccuuacgacac

SEQ ID NO: 132395 - RNA, 32 nt, Human
cuccuuccccucccugaaccccacaguccgcc

SEQ ID NO: 132396 - RNA, 32 nt, Human
cuccuuccccuggacaucuccuagagaggaau

SEQ ID NO: 132397 - RNA, 32 nt, Human
cuccuuccccuggagccugccugcagcccgag

SEQ ID NO: 132398 - RNA, 32 nt, Human
cuccuuccccugggccuggucacugcagugua

SEQ ID NO: 132399 - RNA, 32 nt, Human
cuccuuccccugucagcuuucucccccagggu

SEQ ID NO: 132400 - RNA, 21 nt, Human
cuccuuccccuucucccagug

SEQ ID NO: 132401 - RNA, 20 nt, Human
cuccuucccgcccgccgccg

SEQ ID NO: 132402 - RNA, 32 nt, Human
cuccuucccuacugcuggcugccacaucuaca

SEQ ID NO: 132403 - RNA, 32 nt, Human
cuccuucccucccaagccccucccucuggccu

SEQ ID NO: 132404 - RNA, 32 nt, Human
cuccuucccuccccucuccucuucuauuagaa

SEQ ID NO: 132405 - RNA, 32 nt, Human
cuccuucccucccugucaccucccucucacca

SEQ ID NO: 132406 - RNA, 32 nt, Human
cuccuucccuccuuuccaucugggggucucgg

SEQ ID NO: 132407 - RNA, 19 nt, Human
cuccuucccucucuucugc

SEQ ID NO: 132408 - RNA, 23 nt, Human
cuccuucccugccccggcgcggg

SEQ ID NO: 132409 - RNA, 32 nt, Human
cuccuucccugucucugccucucccucccuuc

SEQ ID NO: 132410 - RNA, 32 nt, Human
cuccuucccuucccccuggccugagagguugc

SEQ ID NO: 132411 - RNA, 32 nt, Human
cuccuucccuucucccuuuccuucuuuaccuc

SEQ ID NO: 132412 - RNA, 32 nt, Human
cuccuucccuuuccuaggauuuuauggggagg

SEQ ID NO: 132413 - RNA, 24 nt, Human
cuccuuccguccuuggguccagca

SEQ ID NO: 132414 - RNA, 20 nt, Human
cuccuuccgucuguaacuca

SEQ ID NO: 132415 - RNA, 32 nt, Human
cuccuuccuaccagcaccucaugcagcaagug

SEQ ID NO: 132416 - RNA, 32 nt, Human
cuccuuccuccccucucaaauacccuuauuuu

SEQ ID NO: 132417 - RNA, 32 nt, Human
cuccuuccuccccucucaaccuuuacuucuga

SEQ ID NO: 132418 - RNA, 19 nt, Human
cuccuuccucccuggcgag

SEQ ID NO: 132419 - RNA, 32 nt, Human
cuccuuccuccuccuccuccuccucugguaga

SEQ ID NO: 132420 - RNA, 32 nt, Human
cuccuuccucuacacagaccugggugaggcuc

SEQ ID NO: 132421 - RNA, 32 nt, Human
cuccuuccucuccucucucuucuugcuuagcu

SEQ ID NO: 132422 - RNA, 32 nt, Human
cuccuuccucucugguuccagcauuaaggugg

SEQ ID NO: 132423 - RNA, 32 nt, Human
cuccuuccucuguaaucccagcuacucaggag

SEQ ID NO: 132424 - RNA, 32 nt, Human
cuccuuccucuucucaaaaugguagauucaaa

SEQ ID NO: 132425 - RNA, 23 nt, Human
cuccuuccugaggccagaaggag

SEQ ID NO: 132426 - RNA, 18 nt, Human
cuccuuccugcccaggua

SEQ ID NO: 132427 - RNA, 32 nt, Human
cuccuuccugccccaacuccuuccagcuagug

SEQ ID NO: 132428 - RNA, 32 nt, Human
cuccuuccugcucaagaaaauuagugcucagc

SEQ ID NO: 132429 - RNA, 32 nt, Human
cuccuuccuggaccaaggaggugcugccaagu

SEQ ID NO: 132430 - RNA, 32 nt, Human
cuccuuccuggacgcucacucccuugcucgcu

SEQ ID NO: 132431 - RNA, 32 nt, Human
cuccuuccugugguuugccauccgcuguggcu

SEQ ID NO: 132432 - RNA, 32 nt, Human
cuccuuccuucccaauuucuccuuuguagcag

SEQ ID NO: 132433 - RNA, 32 nt, Human
cuccuuccuugccaccagccagcaucacaacc

SEQ ID NO: 132434 - RNA, 32 nt, Human
cuccuuccuuuaagaccaucugaagaucaccu

SEQ ID NO: 132435 - RNA, 32 nt, Human
cuccuuccuuucucucccugcuuugcugugaa

SEQ ID NO: 132436 - RNA, 18 nt, Human
cuccuucgcagccgccgc

SEQ ID NO: 132437 - RNA, 19 nt, Human
cuccuucgccaccgccgcc

SEQ ID NO: 132438 - RNA, 22 nt, Human
cuccuucgccacgccgccgcgc

SEQ ID NO: 132439 - RNA, 32 nt, Human
cuccuucgccacuccaccagccuggaccucca

SEQ ID NO: 132440 - RNA, 22 nt, Human
cuccuucgcucgcucaaccucu

SEQ ID NO: 132441 - RNA, 32 nt, Human
cuccuucgcucgcucaaccucuuuuguucagu

SEQ ID NO: 132442 - RNA, 32 nt, Human
cuccuucggagccacagagagccuggagucug

SEQ ID NO: 132443 - RNA, 32 nt, Human
cuccuucggccccaucuccauccucagcagau

SEQ ID NO: 132444 - RNA, 20 nt, Human
cuccuucggccgccgccgcc

SEQ ID NO: 132445 - RNA, 32 nt, Human
cuccuucguuucuuccuuuccuccuccaccug

SEQ ID NO: 132446 - RNA, 32 nt, Human
cuccuucuaccaggaccucagaagcccagacc

SEQ ID NO: 132447 - RNA, 18 nt, Human
cuccuucuacuucugcau

SEQ ID NO: 132448 - RNA, 32 nt, Human
cuccuucucaacccaucucccuaaccccacau

SEQ ID NO: 132449 - RNA, 32 nt, Human
cuccuucuccaagaaagguugcaagcugagaa

SEQ ID NO: 132450 - RNA, 32 nt, Human
cuccuucuccaaucucauggucuucuugagcu

SEQ ID NO: 132451 - RNA, 32 nt, Human
cuccuucuccaccuucuagugcccguggccgg

SEQ ID NO: 132452 - RNA, 19 nt, Human
cuccuucuccagucugugu

SEQ ID NO: 132453 - RNA, 32 nt, Human
cuccuucuccaucucacccucccucucucaca

SEQ ID NO: 132454 - RNA, 32 nt, Human
cuccuucuccaucuuuucuuuauccuucacaa

SEQ ID NO: 132455 - RNA, 32 nt, Human
cuccuucucccagguuuggucucagggggacc

SEQ ID NO: 132456 - RNA, 21 nt, Human
cuccuucuccccuugcacagg

SEQ ID NO: 132457 - RNA, 22 nt, Human
cuccuucucccgccgcccaggc

SEQ ID NO: 132458 - RNA, 32 nt, Human
cuccuucuccuccuccuccuccucuucccuug

SEQ ID NO: 132459 - RNA, 31 nt, Human
cuccuucuccucucugccugccuccucccuc

SEQ ID NO: 132460 - RNA, 32 nt, Human
cuccuucuccucuuccugacccucccuccccu

SEQ ID NO: 132461 - RNA, 21 nt, Human
cuccuucuccugccccagggc

SEQ ID NO: 132462 - RNA, 21 nt, Human
cuccuucuccuggcagcaggc

SEQ ID NO: 132463 - RNA, 22 nt, Human
cuccuucuccuggguccaagca

SEQ ID NO: 132464 - RNA, 32 nt, Human
cuccuucuccuugaccucucugccucagucuu

SEQ ID NO: 132465 - RNA, 22 nt, Human
cuccuucuccuugugacauggc

SEQ ID NO: 132466 - RNA, 32 nt, Human
cuccuucucgcugcucccccugcccagcugcu

SEQ ID NO: 132467 - RNA, 21 nt, Human
cuccuucucguucucucccgg

SEQ ID NO: 132468 - RNA, 22 nt, Human
cuccuucucugcacccuuggca

SEQ ID NO: 132469 - RNA, 32 nt, Human
cuccuucucugugagcugucagucuagguuau

SEQ ID NO: 132470 - RNA, 32 nt, Human
cuccuucucuuauuccauuuaguuuuucaauu

SEQ ID NO: 132471 - RNA, 32 nt, Human
cuccuucugaaaagcuggauccagcuuguuug

SEQ ID NO: 132472 - RNA, 32 nt, Human
cuccuucugaaaucugaggacauggacaccca

SEQ ID NO: 132473 - RNA, 32 nt, Human
cuccuucugagaucugaggacauggacaccaa

SEQ ID NO: 132474 - RNA, 32 nt, Human
cuccuucugagaucugaggacauggacaccca

SEQ ID NO: 132475 - RNA, 32 nt, Human
cuccuucugauagaagaagaaaauguuaauuu

SEQ ID NO: 132476 - RNA, 32 nt, Human
cuccuucugcagcugcugcuccucauagucgc

SEQ ID NO: 132477 - RNA, 32 nt, Human
cuccuucugcaggagcucugcugugauucauu

SEQ ID NO: 132478 - RNA, 32 nt, Human
cuccuucugcauuuccuaucuuccugugucuu

SEQ ID NO: 132479 - RNA, 32 nt, Human
cuccuucugccagcagcucacacugcuugaag

SEQ ID NO: 132480 - RNA, 32 nt, Human
cuccuucugcugcagcuuccugagucggcgga

SEQ ID NO: 132481 - RNA, 32 nt, Human
cuccuucugggccucauggcuuuucugauucu

SEQ ID NO: 132482 - RNA, 32 nt, Human
cuccuucugucgcccaggcuggagugcagugg

SEQ ID NO: 132483 - RNA, 32 nt, Human
cuccuucuguguaccugcucccacuucugagc

SEQ ID NO: 132484 - RNA, 32 nt, Human
cuccuucuuaucacccugcucuccuacuacau

SEQ ID NO: 132485 - RNA, 23 nt, Human
cuccuucuucagccucccgagua

SEQ ID NO: 132486 - RNA, 32 nt, Human
cuccuucuucuccaaccauugacagcuaaccc

SEQ ID NO: 132487 - RNA, 32 nt, Human
cuccuucuuucagccccaccuccccagggccc

SEQ ID NO: 132488 - RNA, 32 nt, Human
cuccuugaagacaaguguuuuucaauuaacca

SEQ ID NO: 132489 - RNA, 32 nt, Human
cuccuugaagauccugauaaaugaagaaaaga

SEQ ID NO: 132490 - RNA, 31 nt, Human
cuccuugaccucucugccucagucuuuguua

SEQ ID NO: 132491 - RNA, 32 nt, Human
cuccuugaccugcgagggagagagaggacacc

SEQ ID NO: 132492 - RNA, 32 nt, Human
cuccuugacucugccguuuccuaauaagaccu

SEQ ID NO: 132493 - RNA, 21 nt, Human
cuccuugagaccuacaaggac

SEQ ID NO: 132494 - RNA, 32 nt, Human
cuccuugagccccagaucccuucaagcuggaa

SEQ ID NO: 132495 - RNA, 32 nt, Human
cuccuugagccccaguucaaggcccaggaaca

SEQ ID NO: 132496 - RNA, 32 nt, Human
cuccuugagccugucgggagcugcugccugcc

SEQ ID NO: 132497 - RNA, 32 nt, Human
cuccuugauggugagcuccuucgggaugagac

SEQ ID NO: 132498 - RNA, 32 nt, Human
cuccuugauuaagagaaagaacagaaauuugc

SEQ ID NO: 132499 - RNA, 32 nt, Human
cuccuugauucagguguuuguaaugaaugugg

SEQ ID NO: 132500 - RNA, 32 nt, Human
cuccuugcaaauuccuuucuucugccucuguu

SEQ ID NO: 132501 - RNA, 32 nt, Human
cuccuugcagagggccagaguaagugcaaguc

SEQ ID NO: 132502 - RNA, 19 nt, Human
cuccuugcccgccgccgcc

SEQ ID NO: 132503 - RNA, 32 nt, Human
cuccuugccgacaaacacaagcagaaacuucu

SEQ ID NO: 132504 - RNA, 32 nt, Human
cuccuugccgacuccaccuuauagguacauuu

SEQ ID NO: 132505 - RNA, 32 nt, Human
cuccuugccuggcuucuuccuccagcuauccu

SEQ ID NO: 132506 - RNA, 32 nt, Human
cuccuugccuuccaccaugauugugaggccuc

SEQ ID NO: 132507 - RNA, 32 nt, Human
cuccuugccuuccaccaugcuugugagaucuu

SEQ ID NO: 132508 - RNA, 32 nt, Human
cuccuugcuacagagcagaguuuucugggguu

SEQ ID NO: 132509 - RNA, 32 nt, Human
cuccuugcuaucugggcugaguggccagggcc

SEQ ID NO: 132510 - RNA, 32 nt, Human
cuccuugcuccaccagcccccagccaugcaca

SEQ ID NO: 132511 - RNA, 32 nt, Human
cuccuugcuccccucccuuacuccucccucug

SEQ ID NO: 132512 - RNA, 32 nt, Human
cuccuugcuccucucccuccugccucaacugg

SEQ ID NO: 132513 - RNA, 20 nt, Human
cuccuugcucgccgcagccg

SEQ ID NO: 132514 - RNA, 32 nt, Human
cuccuugcugggcacauauacacagcccacuu

SEQ ID NO: 132515 - RNA, 32 nt, Human
cuccuugcugugguggcugggaugcuccuucc

SEQ ID NO: 132516 - RNA, 19 nt, Human
cuccuugcuuccccggggc

SEQ ID NO: 132517 - RNA, 32 nt, Human
cuccuuggagacacccucuuuggcccucacua

SEQ ID NO: 132518 - RNA, 22 nt, Human
cuccuuggagagucccagguaa

SEQ ID NO: 132519 - RNA, 32 nt, Human
cuccuuggagccagagcaagagggaucaggag

SEQ ID NO: 132520 - RNA, 21 nt, Human
cuccuuggaggcaacacuggg

SEQ ID NO: 132521 - RNA, 32 nt, Human
cuccuuggaguggcagauuccacccacccagc

SEQ ID NO: 132522 - RNA, 19 nt, Human
cuccuuggcaccugcugcc

SEQ ID NO: 132523 - RNA, 32 nt, Human
cuccuuggcagcuguauucuggagucuggaug

SEQ ID NO: 132524 - RNA, 32 nt, Human
cuccuuggcccaggccaagauugagaagauca

SEQ ID NO: 132525 - RNA, 32 nt, Human
cuccuuggcccaugggugcugggggaggugga

SEQ ID NO: 132526 - RNA, 32 nt, Human
cuccuuggccguggcuucugucugugaggagg

SEQ ID NO: 132527 - RNA, 32 nt, Human
cuccuuggccuuuccuggaagccaguuaguaa

SEQ ID NO: 132528 - RNA, 17 nt, Human
cuccuuggcggggcggc

SEQ ID NO: 132529 - RNA, 20 nt, Human
cuccuuggcucuccagcacu

SEQ ID NO: 132530 - RNA, 18 nt, Human
cuccuuggcugguuccug

SEQ ID NO: 132531 - RNA, 32 nt, Human
cuccuuggcuuccccugcgugguggugccaau

SEQ ID NO: 132532 - RNA, 32 nt, Human
cuccuugggaagcacgacucccagcagccaca

SEQ ID NO: 132533 - RNA, 32 nt, Human
cuccuugggaagcagaguaagcaagugaggag

SEQ ID NO: 132534 - RNA, 32 nt, Human
cuccuugggaggcugaggcaggagaauugcuu

SEQ ID NO: 132535 - RNA, 32 nt, Human
cuccuugggauuauggguguaacaaaaauccc

SEQ ID NO: 132536 - RNA, 32 nt, Human
cuccuugggcugacuccaaggcucagaacaug

SEQ ID NO: 132537 - RNA, 32 nt, Human
cuccuuggggcugaggccagcacagcgcaaag

SEQ ID NO: 132538 - RNA, 32 nt, Human
cuccuugguaucaugaaacuggagcagaggaa

SEQ ID NO: 132539 - RNA, 32 nt, Human
cuccuuggucaccaggcaaugggagcuguaga

SEQ ID NO: 132540 - RNA, 32 nt, Human
cuccuugguccuccaaacccccaaacucugca

SEQ ID NO: 132541 - RNA, 32 nt, Human
cuccuuggucucauguugaccuuagaguuugg

SEQ ID NO: 132542 - RNA, 32 nt, Human
cuccuugguggggacccaugccuccaaggcug

SEQ ID NO: 132543 - RNA, 32 nt, Human
cuccuugguuuagaagcaguacuggcugaaac

SEQ ID NO: 132544 - RNA, 32 nt, Human
cuccuuguccagugcucuccccaggcuggccc

SEQ ID NO: 132545 - RNA, 20 nt, Human
cuccuugugcacaaaucaga

SEQ ID NO: 132546 - RNA, 32 nt, Human
cuccuugugccuucuggcuaggaacagacgug

SEQ ID NO: 132547 - RNA, 32 nt, Human
cuccuugugcugccagucagccuggauuucug

SEQ ID NO: 132548 - RNA, 32 nt, Human
cuccuugugguuuugccagugacucuuguuca

SEQ ID NO: 132549 - RNA, 22 nt, Human
cuccuuguucuguucugggcca

SEQ ID NO: 132550 - RNA, 31 nt, Human
cuccuuguuucagcugggccugcuguccagc

SEQ ID NO: 132551 - RNA, 20 nt, Human
cuccuuguuugccgcugcug

SEQ ID NO: 132552 - RNA, 32 nt, Human
cuccuuguuuugcuuucgaucuggacuguucu

SEQ ID NO: 132553 - RNA, 19 nt, Human
cuccuuuaaagccgcugcc

SEQ ID NO: 132554 - RNA, 23 nt, Human
cuccuuuaacauggaaccccuga

SEQ ID NO: 132555 - RNA, 32 nt, Human
cuccuuuaaccaggagcuucccucccagagug

SEQ ID NO: 132556 - RNA, 32 nt, Human
cuccuuuaaugucuacauaaagauggauuauc

SEQ ID NO: 132557 - RNA, 32 nt, Human
cuccuuuacccuugguucccacaugcacagau

SEQ ID NO: 132558 - RNA, 32 nt, Human
cuccuuucaaaaccagcaauggccaaucaguc

SEQ ID NO: 132559 - RNA, 31 nt, Human
cuccuuucaauaaauuaaaugguugagaaca

SEQ ID NO: 132560 - RNA, 32 nt, Human
cuccuuucaccaucucuccucucccccuccuu

SEQ ID NO: 132561 - RNA, 32 nt, Human
cuccuuucagcccauuaggaaaggcuguugau

SEQ ID NO: 132562 - RNA, 32 nt, Human
cuccuuucagcccccuuuauggggaccaggca

SEQ ID NO: 132563 - RNA, 32 nt, Human
cuccuuucagcccucuccaggugucuuuggga

SEQ ID NO: 132564 - RNA, 32 nt, Human
cuccuuucagcccuucugggggcuuccuuagu

SEQ ID NO: 132565 - RNA, 32 nt, Human
cuccuuucauucuuucaaacagauaacauaaa

SEQ ID NO: 132566 - RNA, 32 nt, Human
cuccuuuccaaucaugucauugaaagugccuu

SEQ ID NO: 132567 - RNA, 32 nt, Human
cuccuuuccaccacauuccccaaccaaggaca

SEQ ID NO: 132568 - RNA, 32 nt, Human
cuccuuuccuccucccccucggagccggcuuc

SEQ ID NO: 132569 - RNA, 32 nt, Human
cuccuuuccucuuccaucucucugucaccucc

SEQ ID NO: 132570 - RNA, 32 nt, Human
cuccuuuccucuucuccuuugguuccucaauu

SEQ ID NO: 132571 - RNA, 32 nt, Human
cuccuuuccuguccucccuuucugucccauua

SEQ ID NO: 132572 - RNA, 32 nt, Human
cuccuuuccuucaccuccugcccuucucuuac

SEQ ID NO: 132573 - RNA, 32 nt, Human
cuccuuuccuuuccugacuuaugccuguaguu

SEQ ID NO: 132574 - RNA, 32 nt, Human
cuccuuuccuuuggcagguuggggaagggcuu

SEQ ID NO: 132575 - RNA, 32 nt, Human
cuccuuuccuuuuccuccuauugaaacuguuc

SEQ ID NO: 132576 - RNA, 32 nt, Human
cuccuuucgccccagcccagguggccaagccc

SEQ ID NO: 132577 - RNA, 32 nt, Human
cuccuuucuacccaccccuuucuauccuaaac

SEQ ID NO: 132578 - RNA, 32 nt, Human
cuccuuucugucuuaucuccuaguuucuucaa

SEQ ID NO: 132579 - RNA, 32 nt, Human
cuccuuucuucagagaagccaguacuugaauc

SEQ ID NO: 132580 - RNA, 32 nt, Human
cuccuuucuuucucccacuuucuaggaucauu

SEQ ID NO: 132581 - RNA, 32 nt, Human
cuccuuugaagaggaaggagagcauuugggca

SEQ ID NO: 132582 - RNA, 32 nt, Human
cuccuuugaaucccagcccuacucgaaauaag

SEQ ID NO: 132583 - RNA, 22 nt, Human
cuccuuugagaggcgcuccuug

SEQ ID NO: 132584 - RNA, 32 nt, Human
cuccuuugaggcagagguuuaaguguaggccu

SEQ ID NO: 132585 - RNA, 32 nt, Human
cuccuuugcacuugaucagcauaguacuuauu

SEQ ID NO: 132586 - RNA, 32 nt, Human
cuccuuugcagaauaccugucuccacauuccu

SEQ ID NO: 132587 - RNA, 32 nt, Human
cuccuuugcucaccuuugcuucccagccuucc

SEQ ID NO: 132588 - RNA, 32 nt, Human
cuccuuugcucaguugccccaggaaggcuucc

SEQ ID NO: 132589 - RNA, 32 nt, Human
cuccuuugcuccugcugcuucucccaacagcc

SEQ ID NO: 132590 - RNA, 32 nt, Human
cuccuuugcucuugggaagaccagcuuugcag

SEQ ID NO: 132591 - RNA, 32 nt, Human
cuccuuugcugaggccuccagcuucaggcagg

SEQ ID NO: 132592 - RNA, 32 nt, Human
cuccuuugcuugaagccagaggucaguggccg

SEQ ID NO: 132593 - RNA, 32 nt, Human
cuccuuuggugugugggugcucugaccucacu

SEQ ID NO: 132594 - RNA, 32 nt, Human
cuccuuuguaacucaucuuuacauuuucagca

SEQ ID NO: 132595 - RNA, 32 nt, Human
cuccuuugugccaggccccaucuggaugucca

SEQ ID NO: 132596 - RNA, 32 nt, Human
cuccuuuguuccucccccuccagccuuugccu

SEQ ID NO: 132597 - RNA, 32 nt, Human
cuccuuuuagaagaucauggugucacaguuug

SEQ ID NO: 132598 - RNA, 21 nt, Human
cuccuuuuagaccugcaguau

SEQ ID NO: 132599 - RNA, 32 nt, Human
cuccuuuucacucaggcuuggggccuccagcg

SEQ ID NO: 132600 - RNA, 32 nt, Human
cuccuuuuccaaguuagccuuauagucuaggg

SEQ ID NO: 132601 - RNA, 32 nt, Human
cuccuuuucccaucccgccaucaucucaggag

SEQ ID NO: 132602 - RNA, 32 nt, Human
cuccuuuuccgcaugccuccugccuccugggc

SEQ ID NO: 132603 - RNA, 19 nt, Human
cuccuuuucucucccggua

SEQ ID NO: 132604 - RNA, 32 nt, Human
cuccuuuucuggguuugggucuugcccuuccc

SEQ ID NO: 132605 - RNA, 32 nt, Human
cuccuuuugugaguuugguggggaagggaagg

SEQ ID NO: 132606 - RNA, 32 nt, Human
cuccuuuuucucucccuccagagcucccacga

SEQ ID NO: 132607 - RNA, 32 nt, Human
cucgaaaagugcugggauuacaggcgugagcc

SEQ ID NO: 132608 - RNA, 32 nt, Human
cucgaaaccagaagguggagguggcagugagc

SEQ ID NO: 132609 - RNA, 32 nt, Human
cucgaaaguagaagaaaguguugccagggacg

SEQ ID NO: 132610 - RNA, 32 nt, Human
cucgaacacaaacccugcggucuccagggggu

SEQ ID NO: 132611 - RNA, 32 nt, Human
cucgaacccaagaaguggagguugcagugagc

SEQ ID NO: 132612 - RNA, 32 nt, Human
cucgaacccaggaggcagagguugcagugagc

SEQ ID NO: 132613 - RNA, 32 nt, Human
cucgaacccaggagguggagguugcagugagc

SEQ ID NO: 132614 - RNA, 32 nt, Human
cucgaacccgggaggcagagguugcagugagc

SEQ ID NO: 132615 - RNA, 32 nt, Human
cucgaaccugggaggcagagguugcaguaagc

SEQ ID NO: 132616 - RNA, 32 nt, Human
cucgaaccugggagguggagguugcgagauca

SEQ ID NO: 132617 - RNA, 32 nt, Human
cucgaaccuuggagguggagguuguggugagc

SEQ ID NO: 132618 - RNA, 32 nt, Human
cucgaacucaggggguggagguugcagugagu

SEQ ID NO: 132619 - RNA, 22 nt, Human
cucgaacuccagaccucaggug

SEQ ID NO: 132620 - RNA, 32 nt, Human
cucgaacuucugaccucaagugguccaccugc

SEQ ID NO: 132621 - RNA, 21 nt, Human
cucgaacuuuccugggcucaa

SEQ ID NO: 132622 - RNA, 32 nt, Human
cucgaagaaagccagaaaggaguaggagauga

SEQ ID NO: 132623 - RNA, 24 nt, Human
cucgaagacaacucagcacugggc

SEQ ID NO: 132624 - RNA, 32 nt, Human
cucgaagacaaggcuuuugaauuaacugaauc

SEQ ID NO: 132625 - RNA, 32 nt, Human
cucgaagccaggaguucgaaaccagccugugc

SEQ ID NO: 132626 - RNA, 32 nt, Human
cucgaaggccugacagggcaaaaacugccaaa

SEQ ID NO: 132627 - RNA, 22 nt, Human
cucgaauuccagaccucaggug

SEQ ID NO: 132628 - RNA, 32 nt, Human
cucgaauuuccugggugauggcagcagauucu

SEQ ID NO: 132629 - RNA, 32 nt, Human
cucgacaaaaaggaauugaaagcccuaaauag

SEQ ID NO: 132630 - RNA, 32 nt, Human
cucgacaccccugccagccucccuggacacca

SEQ ID NO: 132631 - RNA, 32 nt, Human
cucgacaguucucuuguauuugcuuccuaggu

SEQ ID NO: 132632 - RNA, 32 nt, Human
cucgacaucacuguucaugcuggcgagugaau

SEQ ID NO: 132633 - RNA, 32 nt, Human
cucgacaucuuccuccucuacugguaaccaag

SEQ ID NO: 132634 - RNA, 32 nt, Human
cucgacccacccacccucccucucagaccaag

SEQ ID NO: 132635 - RNA, 32 nt, Human
cucgaccccgcccucaccacacugaccacccu

SEQ ID NO: 132636 - RNA, 32 nt, Human
cucgacccgggccaggaggcccggggcgcuga

SEQ ID NO: 132637 - RNA, 32 nt, Human
cucgacccucccccuccuugucccucugcuca

SEQ ID NO: 132638 - RNA, 32 nt, Human
cucgacccuguggguuucuguccccagggagc

SEQ ID NO: 132639 - RNA, 32 nt, Human
cucgaccucaggccaaaagauccaucuguuag

SEQ ID NO: 132640 - RNA, 32 nt, Human
cucgaccuuccaggcucaaaagaugcucccac

SEQ ID NO: 132641 - RNA, 32 nt, Human
cucgacgcggacucaugcagaagaggacauuc

SEQ ID NO: 132642 - RNA, 32 nt, Human
cucgacggcacugggccaguucccccucugcu

SEQ ID NO: 132643 - RNA, 22 nt, Human
cucgacggcagccaaggacacc

SEQ ID NO: 132644 - RNA, 31 nt, Human
cucgacggcugacuggagcagcgguaaaggc

SEQ ID NO: 132645 - RNA, 32 nt, Human
cucgacguccuccaccaucuuggggcaggaca

SEQ ID NO: 132646 - RNA, 20 nt, Human
cucgacgugagggugaaaug

SEQ ID NO: 132647 - RNA, 32 nt, Human
cucgacuaaaaauacaaaaauuagcgggugug

SEQ ID NO: 132648 - RNA, 32 nt, Human
cucgacuagucccuagcacucgacgacugagu

SEQ ID NO: 132649 - RNA, 32 nt, Human
cucgacucacugcaaaaucugccucccggguu

SEQ ID NO: 132650 - RNA, 24 nt, Human
cucgacucacugcaaccuccaccu

SEQ ID NO: 132651 - RNA, 32 nt, Human
cucgacucacugcaaccuccaccucccagguu

SEQ ID NO: 132652 - RNA, 24 nt, Human
cucgacucacugcaaccuccgccu

SEQ ID NO: 132653 - RNA, 32 nt, Human
cucgacucacugcaaccuccgccucccgaguu

SEQ ID NO: 132654 - RNA, 24 nt, Human
cucgacucacugcaaccuucgccu

SEQ ID NO: 132655 - RNA, 32 nt, Human
cucgacucacugcaaccuucgccucccaggag

SEQ ID NO: 132656 - RNA, 32 nt, Human
cucgacucacugcaaccuucgccucccagguu

SEQ ID NO: 132657 - RNA, 24 nt, Human
cucgacucacugcaacuuccaccu

SEQ ID NO: 132658 - RNA, 32 nt, Human
cucgacucacugcaacuuccaccuccuggagu

SEQ ID NO: 132659 - RNA, 32 nt, Human
cucgacucacugcaagcuccgccucccggguu

SEQ ID NO: 132660 - RNA, 32 nt, Human
cucgacucacugcagccuccgccuccuggguu

SEQ ID NO: 132661 - RNA, 32 nt, Human
cucgacucacugcagcuaucucucgccucagc

SEQ ID NO: 132662 - RNA, 32 nt, Human
cucgacucccacugcugccggccucccgagug

SEQ ID NO: 132663 - RNA, 32 nt, Human
cucgacugugugugcccacaugugccgagaga

SEQ ID NO: 132664 - RNA, 32 nt, Human
cucgacuugagugcccgccuccuucgccgccg

SEQ ID NO: 132665 - RNA, 32 nt, Human
cucgacuuuuccacccuuuuucccucccuccu

SEQ ID NO: 132666 - RNA, 32 nt, Human
cucgagaaauaccacaugccagucuucccagg

SEQ ID NO: 132667 - RNA, 32 nt, Human
cucgagaccacccuggccaacauggugaaacc

SEQ ID NO: 132668 - RNA, 32 nt, Human
cucgagaccagccugaccaacauggcgaaacc

SEQ ID NO: 132669 - RNA, 32 nt, Human
cucgagaccagccuggaaaauguggugaaauc

SEQ ID NO: 132670 - RNA, 32 nt, Human
cucgagaccagccuggccaacauggugaaacc

SEQ ID NO: 132671 - RNA, 32 nt, Human
cucgagaccagccuggccgacauggcgaaacc

SEQ ID NO: 132672 - RNA, 32 nt, Human
cucgagaccagcuuggccaacauggugagccc

SEQ ID NO: 132673 - RNA, 32 nt, Human
cucgagagaugaugcaggacguguccagcucg

SEQ ID NO: 132674 - RNA, 32 nt, Human
cucgagaggcugacugcucacaccugggcagc

SEQ ID NO: 132675 - RNA, 32 nt, Human
cucgagagguccgugggggaggccgugggaaa

SEQ ID NO: 132676 - RNA, 32 nt, Human
cucgagcaaaacacaggauguuccagcauaag

SEQ ID NO: 132677 - RNA, 32 nt, Human
cucgagcacaggaagcucaucugcguuuuggc

SEQ ID NO: 132678 - RNA, 32 nt, Human
cucgagcacuuugccagcagcuucuagccuua

SEQ ID NO: 132679 - RNA, 21 nt, Human
cucgagcagccgccgccgccg

SEQ ID NO: 132680 - RNA, 19 nt, Human
cucgagcagcggcucggug

SEQ ID NO: 132681 - RNA, 32 nt, Human
cucgagccagccuggccaacauggcaaaaccc

SEQ ID NO: 132682 - RNA, 32 nt, Human
cucgagcccaggaguuugagaccagccugggc

SEQ ID NO: 132683 - RNA, 32 nt, Human
cucgagcccgggaggcggagguugccgagccg

SEQ ID NO: 132684 - RNA, 22 nt, Human
cucgagcgauccucccgccuca

SEQ ID NO: 132685 - RNA, 32 nt, Human
cucgagcuccauccuccuccgauuucuaaggu

SEQ ID NO: 132686 - RNA, 21 nt, Human
cucgagcucgcgaacucggug

SEQ ID NO: 132687 - RNA, 32 nt, Human
cucgagcugugcuuuggaauuccacuguucag

SEQ ID NO: 132688 - RNA, 32 nt, Human
cucgaggaacaagguugcacaccagcuuucag

SEQ ID NO: 132689 - RNA, 32 nt, Human
cucgaggaccgaggccugcuguggaggacacc

SEQ ID NO: 132690 - RNA, 32 nt, Human
cucgaggagcagggguccagagaggcaggcug

SEQ ID NO: 132691 - RNA, 32 nt, Human
cucgaggaggcaguaguggaaaggagcaguuu

SEQ ID NO: 132692 - RNA, 32 nt, Human
cucgaggaguuaacuccaugagcccagggauc

SEQ ID NO: 132693 - RNA, 32 nt, Human
cucgaggcaagccgccaguugggagaggagca

SEQ ID NO: 132694 - RNA, 32 nt, Human
cucgaggccaggaguuugaaacuagccuagac

SEQ ID NO: 132695 - RNA, 32 nt, Human
cucgaggccccggcaucucccuuggcccuggg

SEQ ID NO: 132696 - RNA, 32 nt, Human
cucgaggcccuuucccugaccuaggcuuuggc

SEQ ID NO: 132697 - RNA, 32 nt, Human
cucgaggcgguggugggaagggagacauacuu

SEQ ID NO: 132698 - RNA, 32 nt, Human
cucgagggaaggagacuggaagcugguuccgg

SEQ ID NO: 132699 - RNA, 32 nt, Human
cucgaggugacacccaccacucagccgagcgg

SEQ ID NO: 132700 - RNA, 32 nt, Human
cucgaggugcaggacugucggggcgagguggc

SEQ ID NO: 132701 - RNA, 32 nt, Human
cucgaggugcaggaugcagagcaaggugcugc

SEQ ID NO: 132702 - RNA, 32 nt, Human
cucgaguagauccugaaauccuacauuucuau

SEQ ID NO: 132703 - RNA, 32 nt, Human
cucgaguagcugggacuacagaugcgugcuac

SEQ ID NO: 132704 - RNA, 32 nt, Human
cucgagucacugauaguggugccuccuccuua

SEQ ID NO: 132705 - RNA, 32 nt, Human
cucgagucacugcagccugugucuccuggguu

SEQ ID NO: 132706 - RNA, 32 nt, Human
cucgaguccuaggaagagagaggcaccagagg

SEQ ID NO: 132707 - RNA, 32 nt, Human
cucgagucucccauguuguaguacauucucca

SEQ ID NO: 132708 - RNA, 19 nt, Human
cucgagugagguccuuugg

SEQ ID NO: 132709 - RNA, 32 nt, Human
cucgagugccccugucccaccuggcugcuggu

SEQ ID NO: 132710 - RNA, 32 nt, Human
cucgagugccugcaguggcugaagagccagcc

SEQ ID NO: 132711 - RNA, 32 nt, Human
cucgauccccgguaccuccuaccacgccuggg

SEQ ID NO: 132712 - RNA, 32 nt, Human
cucgauccugcaccuuccucucccaggucgcu

SEQ ID NO: 132713 - RNA, 32 nt, Human
cucgaucugucacccaggcuggagugcagugg

SEQ ID NO: 132714 - RNA, 32 nt, Human
cucgaucuguuacccaggcuggagugcaguga

SEQ ID NO: 132715 - RNA, 32 nt, Human
cucgaucuguugcccaggcuggagugcagugg

SEQ ID NO: 132716 - RNA, 32 nt, Human
cucgaugucugcuucuucccagccugggaucc

SEQ ID NO: 132717 - RNA, 32 nt, Human
cucgaugugaggccacauggcaagugggccgu

SEQ ID NO: 132718 - RNA, 32 nt, Human
cucgauguggccuccccucgcugccuguucau

SEQ ID NO: 132719 - RNA, 32 nt, Human
cucgaugugggauuuggacaagucauuuaacu

SEQ ID NO: 132720 - RNA, 32 nt, Human
cucgauguuggccaggcuggucucaaacuucu

SEQ ID NO: 132721 - RNA, 32 nt, Human
cucgauugacuucuugagugcaauuugaacug

SEQ ID NO: 132722 - RNA, 32 nt, Human
cucgauuggagaaaggaauggcuuccucuccc

SEQ ID NO: 132723 - RNA, 32 nt, Human
cucgauuguaccacugcacuccagccugggcg

SEQ ID NO: 132724 - RNA, 32 nt, Human
cucgauuguucugccacacaaggagcugagcc

SEQ ID NO: 132725 - RNA, 32 nt, Human
cucgauuucuccaggauuuccugcuuugggaa

SEQ ID NO: 132726 - RNA, 32 nt, Human
cucgauuucuucuuguucugccuucucgguuu

SEQ ID NO: 132727 - RNA, 32 nt, Human
cucgauuuuuccucuucuguuccagcccucuc

SEQ ID NO: 132728 - RNA, 32 nt, Human
cucgcaagagguggcagaggcacaggaggcca

SEQ ID NO: 132729 - RNA, 24 nt, Human
cucgcaaguagcugggauuacagg

SEQ ID NO: 132730 - RNA, 32 nt, Human
cucgcaaguagcugggauuacaggcgccugcc

SEQ ID NO: 132731 - RNA, 31 nt, Human
cucgcacaaguguccagagaucguagccaga

SEQ ID NO: 132732 - RNA, 32 nt, Human
cucgcacacacacgcacgcacgcacacacaca

SEQ ID NO: 132733 - RNA, 32 nt, Human
cucgcacacagcaaugaagguagucauccaua

SEQ ID NO: 132734 - RNA, 31 nt, Human
cucgcacacagcuaaggucaaaguucaaacg

SEQ ID NO: 132735 - RNA, 32 nt, Human
cucgcacagaaggugauaaguuacuaucaaau

SEQ ID NO: 132736 - RNA, 23 nt, Human
cucgcacaggcuuggagugcagu

SEQ ID NO: 132737 - RNA, 32 nt, Human
cucgcacccagccucugccccagcagcaccgc

SEQ ID NO: 132738 - RNA, 32 nt, Human
cucgcacccggaacaacaaagcaaggaagacg

SEQ ID NO: 132739 - RNA, 32 nt, Human
cucgcaccuaacuggagaguucugagcuccug

SEQ ID NO: 132740 - RNA, 32 nt, Human
cucgcaccuguaaucccagcacucuaggaggc

SEQ ID NO: 132741 - RNA, 32 nt, Human
cucgcaccuguaaucccagcacuuugggaggc

SEQ ID NO: 132742 - RNA, 32 nt, Human
cucgcaccuguaaucccagcacuuugggauua

SEQ ID NO: 132743 - RNA, 32 nt, Human
cucgcaccuguaaucccagcauuuugggaggc

SEQ ID NO: 132744 - RNA, 32 nt, Human
cucgcacucucgcucacgcucagacgcuacac

SEQ ID NO: 132745 - RNA, 32 nt, Human
cucgcacucuggcacugcucccucugaagugc

SEQ ID NO: 132746 - RNA, 32 nt, Human
cucgcacugagauuuugaggcaguugcagccc

SEQ ID NO: 132747 - RNA, 32 nt, Human
cucgcacugucacccaggcuggagugcagugg

SEQ ID NO: 132748 - RNA, 32 nt, Human
cucgcacugucccccaggcuggagugcagugg

SEQ ID NO: 132749 - RNA, 32 nt, Human
cucgcacugucucccaggcuggacugcagcag

SEQ ID NO: 132750 - RNA, 32 nt, Human
cucgcacuguugcccaggcuggacugcagugg

SEQ ID NO: 132751 - RNA, 32 nt, Human
cucgcacuguugcccaggcuggagagcagugg

SEQ ID NO: 132752 - RNA, 32 nt, Human
cucgcacuguugcccaggcuggagugcagugg

SEQ ID NO: 132753 - RNA, 32 nt, Human
cucgcagaacccgaguggaggaggugacagcu

SEQ ID NO: 132754 - RNA, 23 nt, Human
cucgcagaagccagcccccaacc

SEQ ID NO: 132755 - RNA, 18 nt, Human
cucgcagacgagccgccc

SEQ ID NO: 132756 - RNA, 32 nt, Human
cucgcagcaaccuccgccuccuggguucaagc

SEQ ID NO: 132757 - RNA, 32 nt, Human
cucgcagcagauguucccugucacucaguagc

SEQ ID NO: 132758 - RNA, 32 nt, Human
cucgcagcagauguucccugucacucaguagg

SEQ ID NO: 132759 - RNA, 32 nt, Human
cucgcagccccuguggucagagcuggauacaa

SEQ ID NO: 132760 - RNA, 19 nt, Human
cucgcagccgccgccuccg

SEQ ID NO: 132761 - RNA, 20 nt, Human
cucgcagccgccgcuguccg

SEQ ID NO: 132762 - RNA, 32 nt, Human
cucgcagcugcagccccaccugccagugcgug

SEQ ID NO: 132763 - RNA, 19 nt, Human
cucgcagcuucccugagcu

SEQ ID NO: 132764 - RNA, 22 nt, Human
cucgcaggccagagugcagugg

SEQ ID NO: 132765 - RNA, 32 nt, Human
cucgcaggcccagcucucaggucagcagcaga

SEQ ID NO: 132766 - RNA, 32 nt, Human
cucgcaggcuuacaccuguaccagggagcuua

SEQ ID NO: 132767 - RNA, 32 nt, Human
cucgcagggcagucgggagcugcugcuggcuc

SEQ ID NO: 132768 - RNA, 19 nt, Human
cucgcaggggaagcgccca

SEQ ID NO: 132769 - RNA, 32 nt, Human
cucgcagggugcguuucucaauccagacgcug

SEQ ID NO: 132770 - RNA, 32 nt, Human
cucgcaguauccuagaaucuuugugcucucgc

SEQ ID NO: 132771 - RNA, 32 nt, Human
cucgcagugcagcccgcgcuucccagcguccg

SEQ ID NO: 132772 - RNA, 32 nt, Human
cucgcaguguguguagagagccgggcuccugc

SEQ ID NO: 132773 - RNA, 32 nt, Human
cucgcauccagacagucgcucagucuguuccc

SEQ ID NO: 132774 - RNA, 32 nt, Human
cucgcaucucccacuggacggcgacgaaggcg

SEQ ID NO: 132775 - RNA, 32 nt, Human
cucgcaugcauugcggauucagcacuuaagcc

SEQ ID NO: 132776 - RNA, 32 nt, Human
cucgcauuaccgcaugagcucugccuccuguc

SEQ ID NO: 132777 - RNA, 32 nt, Human
cucgccaacagggugaaaccccaccucuauua

SEQ ID NO: 132778 - RNA, 32 nt, Human
cucgccaacauggcgaaaccccaucucuacua

SEQ ID NO: 132779 - RNA, 32 nt, Human
cucgccaacauggugaaaccccaucucuacua

SEQ ID NO: 132780 - RNA, 32 nt, Human
cucgccaacauggugaaaccguaucucuaaua

SEQ ID NO: 132781 - RNA, 32 nt, Human
cucgccaacauggugagacccugucucuacua

SEQ ID NO: 132782 - RNA, 32 nt, Human
cucgccacacugauugcuggugugcgcgcaca

SEQ ID NO: 132783 - RNA, 32 nt, Human
cucgccacauggcugcuaaaaucaucuuuccc

SEQ ID NO: 132784 - RNA, 32 nt, Human
cucgccaccugcuuuuucccuccagugucaca

SEQ ID NO: 132785 - RNA, 32 nt, Human
cucgccaccuucuggaggccacugugaugaug

SEQ ID NO: 132786 - RNA, 32 nt, Human
cucgccacugcacuccaggcugggcgacagag

SEQ ID NO: 132787 - RNA, 32 nt, Human
cucgccacugcgcuccagccugggcaacagag

SEQ ID NO: 132788 - RNA, 32 nt, Human
cucgccacugugcuccagccugggcaacagag

SEQ ID NO: 132789 - RNA, 32 nt, Human
cucgccagacccuggccagcaugguuguccug

SEQ ID NO: 132790 - RNA, 32 nt, Human
cucgccagagacugagagcagagaccacuuau

SEQ ID NO: 132791 - RNA, 32 nt, Human
cucgccagagcuguggugucagaaaaauaaaa

SEQ ID NO: 132792 - RNA, 32 nt, Human
cucgccagcccaaaugccgcucuucacucugg

SEQ ID NO: 132793 - RNA, 32 nt, Human
cucgccagcucaguuggcuuugugaaguguga

SEQ ID NO: 132794 - RNA, 32 nt, Human
cucgccaggcuggaguguaguggcacaaucuc

SEQ ID NO: 132795 - RNA, 32 nt, Human
cucgccagggaagggcccuacccagaggacag

SEQ ID NO: 132796 - RNA, 32 nt, Human
cucgccaucuucuguugaguacuggucggaac

SEQ ID NO: 132797 - RNA, 31 nt, Human
cucgccaugcugcuccugggccugcugcugc

SEQ ID NO: 132798 - RNA, 32 nt, Human
cucgccauguugccuaggauguucucgaacuc

SEQ ID NO: 132799 - RNA, 32 nt, Human
cucgccauucauuacccggcuugguuaaugca

SEQ ID NO: 132800 - RNA, 32 nt, Human
cucgccauugcacuccauucugggcaacaaga

SEQ ID NO: 132801 - RNA, 32 nt, Human
cucgcccaacuaaacccagaacucaaacuuaa

SEQ ID NO: 132802 - RNA, 32 nt, Human
cucgcccagaagcugauguuugugaauguacu

SEQ ID NO: 132803 - RNA, 32 nt, Human
cucgcccagccuucguccuccuggcccgcucc

SEQ ID NO: 132804 - RNA, 18 nt, Human
cucgcccaggcucugagc

SEQ ID NO: 132805 - RNA, 24 nt, Human
cucgcccaggcuggagugcaacgg

SEQ ID NO: 132806 - RNA, 24 nt, Human
cucgcccaggcuggagugcagugg

SEQ ID NO: 132807 - RNA, 32 nt, Human
cucgcccagggcccuggcgccacccccacccc

SEQ ID NO: 132808 - RNA, 32 nt, Human
cucgccccaugcucacccacacugccugugcc

SEQ ID NO: 132809 - RNA, 32 nt, Human
cucgccccgaaggauggccucggaugggcauu

SEQ ID NO: 132810 - RNA, 32 nt, Human
cucgccccuaucgcuccagccaaggcgaagaa

SEQ ID NO: 132811 - RNA, 32 nt, Human
cucgccccuccccucagccugcccgccucucc

SEQ ID NO: 132812 - RNA, 32 nt, Human
cucgccccuccccucccuaacccuuaccuuca

SEQ ID NO: 132813 - RNA, 32 nt, Human
cucgccccuucccucucucccugccucacucc

SEQ ID NO: 132814 - RNA, 16 nt, Human
cucgcccgccgcgccg

SEQ ID NO: 132815 - RNA, 32 nt, Human
cucgcccgggcccagccgaggccgcugcgccc

SEQ ID NO: 132816 - RNA, 32 nt, Human
cucgcccgggcccucugaccccucucuucuac

SEQ ID NO: 132817 - RNA, 32 nt, Human
cucgcccucacugcugacuccucuuccagauc

SEQ ID NO: 132818 - RNA, 32 nt, Human
cucgcccuccaggauagcaucugcauucuggg

SEQ ID NO: 132819 - RNA, 32 nt, Human
cucgcccuccuccacccccucucccaucaccc

SEQ ID NO: 132820 - RNA, 32 nt, Human
cucgcccuccuuggauugcagcaaggaaagag

SEQ ID NO: 132821 - RNA, 32 nt, Human
cucgcccugcagagaagagaaccaugccaggg

SEQ ID NO: 132822 - RNA, 32 nt, Human
cucgcccugccgcccaggcuagagugcagugg

SEQ ID NO: 132823 - RNA, 32 nt, Human
cucgcccugcuguaaccucugucuuggcaggg

SEQ ID NO: 132824 - RNA, 32 nt, Human
cucgcccuggccagggccucugugcagacagu

SEQ ID NO: 132825 - RNA, 32 nt, Human
cucgcccugucacccaggcuggagugcagugg

SEQ ID NO: 132826 - RNA, 32 nt, Human
cucgcccuguugcccaggcugaagugcagugg

SEQ ID NO: 132827 - RNA, 32 nt, Human
cucgccgagccgcggccgcgggaaguucggca

SEQ ID NO: 132828 - RNA, 23 nt, Human
cucgccgccgcccccgcgcugcu

SEQ ID NO: 132829 - RNA, 20 nt, Human
cucgccgccgcccucgcugc

SEQ ID NO: 132830 - RNA, 17 nt, Human
cucgccgccgccgcccg

SEQ ID NO: 132831 - RNA, 32 nt, Human
cucgccgccgccuccacagccugggccucgcc

SEQ ID NO: 132832 - RNA, 15 nt, Human
cucgccgccgcgccg

SEQ ID NO: 132833 - RNA, 16 nt, Human
cucgccgccgcggccg

SEQ ID NO: 132834 - RNA, 23 nt, Human
cucgccgccgcggccgcgcugcu

SEQ ID NO: 132835 - RNA, 17 nt, Human
cucgccgcgcccgcucg

SEQ ID NO: 132836 - RNA, 16 nt, Human
cucgccgcugcugccg

SEQ ID NO: 132837 - RNA, 32 nt, Human
cucgccggcaggacacugccuggaacgccugg

SEQ ID NO: 132838 - RNA, 32 nt, Human
cucgccggccucagggcaggcaggcgggcgcg

SEQ ID NO: 132839 - RNA, 32 nt, Human
cucgccggccuuuggucuccaggacuuguccc

SEQ ID NO: 132840 - RNA, 32 nt, Human
cucgccggugagagaagagaacgcgagaaggg

SEQ ID NO: 132841 - RNA, 32 nt, Human
cucgccguugcccaggcuggagugcgguggca

SEQ ID NO: 132842 - RNA, 32 nt, Human
cucgccuaaagugcagcagcagcuccucucaa

SEQ ID NO: 132843 - RNA, 32 nt, Human
cucgccuaaauaucugugccuuugccuguccu

SEQ ID NO: 132844 - RNA, 32 nt, Human
cucgccuauagucccagcuacuugggaggcug

SEQ ID NO: 132845 - RNA, 32 nt, Human
cucgccucaccgcgugacagagccucugcccg

SEQ ID NO: 132846 - RNA, 32 nt, Human
cucgccucacugcaaccuccgccucccagguu

SEQ ID NO: 132847 - RNA, 32 nt, Human
cucgccucacugcaacuugcgccucccggguu

SEQ ID NO: 132848 - RNA, 32 nt, Human
cucgccucacugcggucuccccaguccaaagc

SEQ ID NO: 132849 - RNA, 32 nt, Human
cucgccuccacaaaggagaagagacugcccug

SEQ ID NO: 132850 - RNA, 32 nt, Human
cucgccuccacggaugcaccaugccgguguga

SEQ ID NO: 132851 - RNA, 32 nt, Human
cucgccuccagccucccaccuccgcccgggcc

SEQ ID NO: 132852 - RNA, 32 nt, Human
cucgccuccagccuccugcgcuccgguaccug

SEQ ID NO: 132853 - RNA, 32 nt, Human
cucgccucccuaagugcugggauuacaggcau

SEQ ID NO: 132854 - RNA, 32 nt, Human
cucgccuccucuucgucuuuucuaaccgugca

SEQ ID NO: 132855 - RNA, 32 nt, Human
cucgccuccuucagccuccuccucccucaucu

SEQ ID NO: 132856 - RNA, 32 nt, Human
cucgccucgacucgcccugcccugugaaaaug

SEQ ID NO: 132857 - RNA, 32 nt, Human
cucgccucgcugcaguguagguucuacccaug

SEQ ID NO: 132858 - RNA, 32 nt, Human
cucgccucugcagugugcugccuacaccucca

SEQ ID NO: 132859 - RNA, 32 nt, Human
cucgccucuggucuccccuccuuagccaaguc

SEQ ID NO: 132860 - RNA, 32 nt, Human
cucgccucuuccacccacuugcaccugccacc

SEQ ID NO: 132861 - RNA, 32 nt, Human
cucgccugaagccuuccucuggcuucacagaa

SEQ ID NO: 132862 - RNA, 32 nt, Human
cucgccugacccagaugguauuggacacagug

SEQ ID NO: 132863 - RNA, 32 nt, Human
cucgccugagccugugagguugccagggguuc

SEQ ID NO: 132864 - RNA, 32 nt, Human
cucgccugauccuucugucucucccaaccccg

SEQ ID NO: 132865 - RNA, 32 nt, Human
cucgccugcaggcagcugcugugagcuggccu

SEQ ID NO: 132866 - RNA, 23 nt, Human
cucgccugccccacuccugccca

SEQ ID NO: 132867 - RNA, 24 nt, Human
cucgccugccuccaccugccccca

SEQ ID NO: 132868 - RNA, 24 nt, Human
cucgccugccugugucucucccca

SEQ ID NO: 132869 - RNA, 32 nt, Human
cucgccugcuauuucaaaagggguugcagcag

SEQ ID NO: 132870 - RNA, 21 nt, Human
cucgccugcugccucugccca

SEQ ID NO: 132871 - RNA, 32 nt, Human
cucgccuggagacauuccuagucgguauuccu

SEQ ID NO: 132872 - RNA, 32 nt, Human
cucgccugggagaagccgccgggacgcgccgg

SEQ ID NO: 132873 - RNA, 22 nt, Human
cucgccugggcaacaagaguga

SEQ ID NO: 132874 - RNA, 32 nt, Human
cucgccugggcaacaagagugaaacugcaucu

SEQ ID NO: 132875 - RNA, 32 nt, Human
cucgccuguaaucccagcuacuugggaggcug

SEQ ID NO: 132876 - RNA, 16 nt, Human
cucgccuguaguccca

SEQ ID NO: 132877 - RNA, 32 nt, Human
cucgccuguagucccagcuacucaggaggcug

SEQ ID NO: 132878 - RNA, 32 nt, Human
cucgccuuaggacggggccaggaggccaggcg

SEQ ID NO: 132879 - RNA, 32 nt, Human
cucgccuucacgaacuccagaccuggucugaa

SEQ ID NO: 132880 - RNA, 21 nt, Human
cucgccuucagccucucuccc

SEQ ID NO: 132881 - RNA, 32 nt, Human
cucgccuucagcucuugcucccuuccucguuc

SEQ ID NO: 132882 - RNA, 32 nt, Human
cucgccuuccuugcagccgcgccucggcccca

SEQ ID NO: 132883 - RNA, 21 nt, Human
cucgccuucucggcacggccg

SEQ ID NO: 132884 - RNA, 32 nt, Human
cucgccuugucacccaggcuggaguccagugg

SEQ ID NO: 132885 - RNA, 32 nt, Human
cucgccuuucacaguccccuccugccugcucc

SEQ ID NO: 132886 - RNA, 32 nt, Human
cucgcgagcaaaagcuggacgagagcagaugc

SEQ ID NO: 132887 - RNA, 32 nt, Human
cucgcgagcagcugggacuacaggugcccgcc

SEQ ID NO: 132888 - RNA, 32 nt, Human
cucgcgagcugcuuucucuccucuucccuuuc

SEQ ID NO: 132889 - RNA, 32 nt, Human
cucgcgauuugcaaaugugcugaggaucugga

SEQ ID NO: 132890 - RNA, 20 nt, Human
cucgcgcacccgcacgcuca

SEQ ID NO: 132891 - RNA, 32 nt, Human
cucgcgcagccccuuggcgaaccacacgacgc

SEQ ID NO: 132892 - RNA, 32 nt, Human
cucgcgccaggagaacgcgccgcccgcgccgg

SEQ ID NO: 132893 - RNA, 32 nt, Human
cucgcgccauugcacuccagccuuggaacaag

SEQ ID NO: 132894 - RNA, 32 nt, Human
cucgcgcccggaucccucagggguuagcagga

SEQ ID NO: 132895 - RNA, 18 nt, Human
cucgcgccgccgucgccg

SEQ ID NO: 132896 - RNA, 32 nt, Human
cucgcgccggcucaccaugcacugccacgccg

SEQ ID NO: 132897 - RNA, 32 nt, Human
cucgcgccuguaaucccagcacuuugggaggc

SEQ ID NO: 132898 - RNA, 32 nt, Human
cucgcgccuuucuuggccuccgggcgcccgac

SEQ ID NO: 132899 - RNA, 32 nt, Human
cucgcgcggaggccaggagcugagcggcggcg

SEQ ID NO: 132900 - RNA, 24 nt, Human
cucgcgcggccgcggcgcgagccg

SEQ ID NO: 132901 - RNA, 32 nt, Human
cucgcgcucacacacgcucugccuccucucuc

SEQ ID NO: 132902 - RNA, 32 nt, Human
cucgcgcuggaagaagcggaagaagauggcgc

SEQ ID NO: 132903 - RNA, 32 nt, Human
cucgcgcugucgcccaggcuggagcgcaaugg

SEQ ID NO: 132904 - RNA, 32 nt, Human
cucgcgcugugaccccggcuugagguaacagc

SEQ ID NO: 132905 - RNA, 32 nt, Human
cucgcgcuguugcccaggcuggagugcagugg

SEQ ID NO: 132906 - RNA, 32 nt, Human
cucgcgcuugugaucccagcacuuugggagac

SEQ ID NO: 132907 - RNA, 32 nt, Human
cucgcggacaggaagcaggagaguuugccaau

SEQ ID NO: 132908 - RNA, 32 nt, Human
cucgcggagccaggucuccaccucugggcagg

SEQ ID NO: 132909 - RNA, 32 nt, Human
cucgcggcagccccuggcugggcgaggggugu

SEQ ID NO: 132910 - RNA, 32 nt, Human
cucgcggccacuuuggagacacucccuggcuc

SEQ ID NO: 132911 - RNA, 32 nt, Human
cucgcggccucgaugcugucucuggcgcggcc

SEQ ID NO: 132912 - RNA, 21 nt, Human
cucgcggcgcuccggcuccug

SEQ ID NO: 132913 - RNA, 32 nt, Human
cucgcggcgggcgcccccagggccaggagaga

SEQ ID NO: 132914 - RNA, 32 nt, Human
cucgcgggcagaaugcugggcagcagcgucaa

SEQ ID NO: 132915 - RNA, 21 nt, Human
cucgcgggcgacugccugcca

SEQ ID NO: 132916 - RNA, 32 nt, Human
cucgcggucacuggucccuggcucgguucccc

SEQ ID NO: 132917 - RNA, 32 nt, Human
cucgcguaaggaacugcuggaacccacugagc

SEQ ID NO: 132918 - RNA, 32 nt, Human
cucgcguaggacaagaagacacuccugcagga

SEQ ID NO: 132919 - RNA, 32 nt, Human
cucgcguccuccccagcaacaguuacucaaag

SEQ ID NO: 132920 - RNA, 18 nt, Human
cucgcgucgucgccgccg

SEQ ID NO: 132921 - RNA, 32 nt, Human
cucgcucacucccaggcgaucccagccgccac

SEQ ID NO: 132922 - RNA, 32 nt, Human
cucgcucacugcaaccuccaccucccagguuc

SEQ ID NO: 132923 - RNA, 32 nt, Human
cucgcucacugcaaccuccgccucccggguuc

SEQ ID NO: 132924 - RNA, 32 nt, Human
cucgcucagaaccugcagcccggccgggcuga

SEQ ID NO: 132925 - RNA, 32 nt, Human
cucgcucagauggggcaaccgagacacaggca

SEQ ID NO: 132926 - RNA, 20 nt, Human
cucgcucagcugcgugcugc

SEQ ID NO: 132927 - RNA, 32 nt, Human
cucgcucaggacaguccucuggcuacggucaa

SEQ ID NO: 132928 - RNA, 32 nt, Human
cucgcuccaauguuuuguuuacauccagauau

SEQ ID NO: 132929 - RNA, 32 nt, Human
cucgcuccgucacccaggcuggagugcagugg

SEQ ID NO: 132930 - RNA, 32 nt, Human
cucgcuccucaggccugcgagaggcccgccgg

SEQ ID NO: 132931 - RNA, 32 nt, Human
cucgcuccucuccuggcuacuagcucuggccc

SEQ ID NO: 132932 - RNA, 32 nt, Human
cucgcuccuguaaucccagcacuuugggaggc

SEQ ID NO: 132933 - RNA, 32 nt, Human
cucgcucgccgagcuccagccgaaggagaagg

SEQ ID NO: 132934 - RNA, 22 nt, Human
cucgcucgcuagcuugcuguuu

SEQ ID NO: 132935 - RNA, 32 nt, Human
cucgcucgcucgccuccuagaccaugcuggcc

SEQ ID NO: 132936 - RNA, 32 nt, Human
cucgcucgcucuccucuuccucuagggcccca

SEQ ID NO: 132937 - RNA, 21 nt, Human
cucgcucgcugcaggcucgcu

SEQ ID NO: 132938 - RNA, 18 nt, Human
cucgcucgcugcgcuccu

SEQ ID NO: 132939 - RNA, 18 nt, Human
cucgcucgguccggcugc

SEQ ID NO: 132940 - RNA, 32 nt, Human
cucgcucuaucacccaggcugaagugcaguag

SEQ ID NO: 132941 - RNA, 32 nt, Human
cucgcucuauggcccaggcuggagcgcagcgg

SEQ ID NO: 132942 - RNA, 32 nt, Human
cucgcucuauggcccaggcuggaguacaguga

SEQ ID NO: 132943 - RNA, 32 nt, Human
cucgcucucacugcuacugcuuccugggaggu

SEQ ID NO: 132944 - RNA, 32 nt, Human
cucgcucuccccucccugcuuggcccccgcgc

SEQ ID NO: 132945 - RNA, 32 nt, Human
cucgcucuccccucucagccaugugaggaccc

SEQ ID NO: 132946 - RNA, 32 nt, Human
cucgcucucccuccucccuguguuuggccuua

SEQ ID NO: 132947 - RNA, 32 nt, Human
cucgcucuccuccccuuccuuccgcucaaugc

SEQ ID NO: 132948 - RNA, 32 nt, Human
cucgcucucucgcccaggcuggagugcagugg

SEQ ID NO: 132949 - RNA, 32 nt, Human
cucgcucucuugcccaggcuggagugcaaugg

SEQ ID NO: 132950 - RNA, 32 nt, Human
cucgcucugcacuccagccuaggugacagagu

SEQ ID NO: 132951 - RNA, 32 nt, Human
cucgcucugcacuccagccuggcgacugagug

SEQ ID NO: 132952 - RNA, 32 nt, Human
cucgcucugcagcugcuccuccacgcgggccc

SEQ ID NO: 132953 - RNA, 32 nt, Human
cucgcucugccgcccaggcuggagugcagugg

SEQ ID NO: 132954 - RNA, 32 nt, Human
cucgcucugccuguagccaggaugcagcuccc

SEQ ID NO: 132955 - RNA, 32 nt, Human
cucgcucugcugcccaggcuagagugcagugg

SEQ ID NO: 132956 - RNA, 32 nt, Human
cucgcucuguaacucaggcuggagugcagugg

SEQ ID NO: 132957 - RNA, 28 nt, Human
cucgcucuguagcccaggcuggagugca

SEQ ID NO: 132958 - RNA, 32 nt, Human
cucgcucuguagcccaggcuggagugcagugu

SEQ ID NO: 132959 - RNA, 32 nt, Human
cucgcucugucacccaggcaggagugcagugg

SEQ ID NO: 132960 - RNA, 32 nt, Human
cucgcucugucacccaggccggagugcagugg

SEQ ID NO: 132961 - RNA, 32 nt, Human
cucgcucugucacccaggcuggaaugcagugg

SEQ ID NO: 132962 - RNA, 32 nt, Human
cucgcucugucacccaggcuggaguacaauag

SEQ ID NO: 132963 - RNA, 32 nt, Human
cucgcucugucacccaggcuggaguacagugg

SEQ ID NO: 132964 - RNA, 32 nt, Human
cucgcucugucacccaggcuggagucuagugu

SEQ ID NO: 132965 - RNA, 32 nt, Human
cucgcucugucacccaggcuggagugcaaugg

SEQ ID NO: 132966 - RNA, 32 nt, Human
cucgcucugucacccaggcuggagugcacugg

SEQ ID NO: 132967 - RNA, 32 nt, Human
cucgcucugucacccaggcuggagugcaguag

SEQ ID NO: 132968 - RNA, 31 nt, Human
cucgcucugucacccaggcuggagugcagug

SEQ ID NO: 132969 - RNA, 32 nt, Human
cucgcucugucacccaggcuggagugcagugg

SEQ ID NO: 132970 - RNA, 32 nt, Human
cucgcucugucacccaggcuggaguguagugg

SEQ ID NO: 132971 - RNA, 32 nt, Human
cucgcucugucacccaggcuggagugugcagu

SEQ ID NO: 132972 - RNA, 32 nt, Human
cucgcucugucacccaggcuggaguucagugg

SEQ ID NO: 132973 - RNA, 32 nt, Human
cucgcucugucacccaggcuggggugcagugg

SEQ ID NO: 132974 - RNA, 32 nt, Human
cucgcucugucacccaggcuguaguggagugg

SEQ ID NO: 132975 - RNA, 32 nt, Human
cucgcucugucacccaugcuugagugcaaccu

SEQ ID NO: 132976 - RNA, 32 nt, Human
cucgcucugucccccaggcuggagugcagugg

SEQ ID NO: 132977 - RNA, 32 nt, Human
cucgcucugucgcccaggcugaaguguagagu

SEQ ID NO: 132978 - RNA, 32 nt, Human
cucgcucugucgcccaggcuggaaugcaguug

SEQ ID NO: 132979 - RNA, 32 nt, Human
cucgcucugucgcccaggcuggaaugcuguag

SEQ ID NO: 132980 - RNA, 32 nt, Human
cucgcucugucgcccaggcuggagggcagugg

SEQ ID NO: 132981 - RNA, 32 nt, Human
cucgcucugucgcccaggcuggagugagugca

SEQ ID NO: 132982 - RNA, 32 nt, Human
cucgcucugucgcccaggcuggagugcaaugg

SEQ ID NO: 132983 - RNA, 32 nt, Human
cucgcucugucgcccaggcuggagugcacugg

SEQ ID NO: 132984 - RNA, 32 nt, Human
cucgcucugucgcccaggcuggagugcaguga

SEQ ID NO: 132985 - RNA, 32 nt, Human
cucgcucugucgcccaggcuggagugcagugg

SEQ ID NO: 132986 - RNA, 32 nt, Human
cucgcucugucgcccaggcuggagugcggugg

SEQ ID NO: 132987 - RNA, 32 nt, Human
cucgcucugucucccaggcugaagugcagugg

SEQ ID NO: 132988 - RNA, 32 nt, Human
cucgcucugucucccaggcuggagugcggugg

SEQ ID NO: 132989 - RNA, 32 nt, Human
cucgcucuguugcccaggcugaagugcagugg

SEQ ID NO: 132990 - RNA, 32 nt, Human
cucgcucuguugcccaggcugaaguguagugg

SEQ ID NO: 132991 - RNA, 32 nt, Human
cucgcucuguugcccaggcuggaaugcagugg

SEQ ID NO: 132992 - RNA, 32 nt, Human
cucgcucuguugcccaggcuggagugcaauga

SEQ ID NO: 132993 - RNA, 32 nt, Human
cucgcucuguugcccaggcuggagugcagugg

SEQ ID NO: 132994 - RNA, 32 nt, Human
cucgcucuguugcccaggcuggagugcggugg

SEQ ID NO: 132995 - RNA, 32 nt, Human
cucgcucuguuucccaggcuggagugcagugg

SEQ ID NO: 132996 - RNA, 32 nt, Human
cucgcucuuucacccaggcuggagugcagugg

SEQ ID NO: 132997 - RNA, 32 nt, Human
cucgcucuuucgcccaggcuggagugcaaugg

SEQ ID NO: 132998 - RNA, 32 nt, Human
cucgcucuuucgcccaggcuggagugcagugg

SEQ ID NO: 132999 - RNA, 32 nt, Human
cucgcucuuucuggcccuucugucuuuugccu

SEQ ID NO: 133000 - RNA, 32 nt, Human
cucgcucuuuugcccaggcuggauggagugca

SEQ ID NO: 133001 - RNA, 32 nt, Human
cucgcugaaaagucacuuggaacucuucugug

SEQ ID NO: 133002 - RNA, 32 nt, Human
cucgcugaaaccauguuucucagacaggccaa

SEQ ID NO: 133003 - RNA, 32 nt, Human
cucgcugagacacacauacacucacacauaca

SEQ ID NO: 133004 - RNA, 32 nt, Human
cucgcugauccugggccgcagccuggggugug

SEQ ID NO: 133005 - RNA, 32 nt, Human
cucgcugauuagcuuccugccugcugucagug

SEQ ID NO: 133006 - RNA, 32 nt, Human
cucgcugcaaaaggggguguucaagccuggag

SEQ ID NO: 133007 - RNA, 32 nt, Human
cucgcugcaaccuccaccuccugggcucacac

SEQ ID NO: 133008 - RNA, 32 nt, Human
cucgcugcaaccuccaccuccuggguucaagc

SEQ ID NO: 133009 - RNA, 32 nt, Human
cucgcugcaaccuccuccuccuggguucaagc

SEQ ID NO: 133010 - RNA, 32 nt, Human
cucgcugcaagggugaaggcuccgcccuauca

SEQ ID NO: 133011 - RNA, 32 nt, Human
cucgcugcacaaauacuccgcaagagaggcca

SEQ ID NO: 133012 - RNA, 32 nt, Human
cucgcugcacuaaaggaugaugaauccuaauc

SEQ ID NO: 133013 - RNA, 32 nt, Human
cucgcugcagacucccuccucacugucgcugc

SEQ ID NO: 133014 - RNA, 19 nt, Human
cucgcugccaccgcugcug

SEQ ID NO: 133015 - RNA, 32 nt, Human
cucgcugccagcucuguaucaggacccagagg

SEQ ID NO: 133016 - RNA, 32 nt, Human
cucgcugcccgagcucuggccuagggaccuug

SEQ ID NO: 133017 - RNA, 32 nt, Human
cucgcugcccugagccucccgugccggccggc

SEQ ID NO: 133018 - RNA, 19 nt, Human
cucgcugccgcugccgccg

SEQ ID NO: 133019 - RNA, 32 nt, Human
cucgcugccggcugcccagccuggcuggcacc

SEQ ID NO: 133020 - RNA, 32 nt, Human
cucgcugccucaacuccugcggugggacuccg

SEQ ID NO: 133021 - RNA, 32 nt, Human
cucgcugccugccucucuggcugucugcuuuu

SEQ ID NO: 133022 - RNA, 20 nt, Human
cucgcugccuucuccucccu

SEQ ID NO: 133023 - RNA, 32 nt, Human
cucgcugcgguuuggaaucacuugcuaggagu

SEQ ID NO: 133024 - RNA, 32 nt, Human
cucgcuggaagugccucccacccaugagaugg

SEQ ID NO: 133025 - RNA, 23 nt, Human
cucgcuggcccugcacuccgccu

SEQ ID NO: 133026 - RNA, 32 nt, Human
cucgcuggcccugcacuccgccuuaguccugg

SEQ ID NO: 133027 - RNA, 32 nt, Human
cucgcuggcuuccggacugaagcugcagacuu

SEQ ID NO: 133028 - RNA, 32 nt, Human
cucgcugggccuuagcugccuucccucagggc

SEQ ID NO: 133029 - RNA, 32 nt, Human
cucgcugggcugugagaaugagcuguacacau

SEQ ID NO: 133030 - RNA, 32 nt, Human
cucgcuguauugcccaggcuggagugcagugg

SEQ ID NO: 133031 - RNA, 32 nt, Human
cucgcuguauuucccaggcuggagugcagagg

SEQ ID NO: 133032 - RNA, 32 nt, Human
cucgcuguccugcugugugaauucccagguug

SEQ ID NO: 133033 - RNA, 32 nt, Human
cucgcuguccuuucccuguucucccccugccc

SEQ ID NO: 133034 - RNA, 32 nt, Human
cucgcugugucacccaggcuggagugcagugg

SEQ ID NO: 133035 - RNA, 32 nt, Human
cucgcugugucccagguucaagcaguucuccu

SEQ ID NO: 133036 - RNA, 32 nt, Human
cucgcugugucgcccaggcuggagugcaguga

SEQ ID NO: 133037 - RNA, 32 nt, Human
cucgcuguguugcccaggcuggagugcaaugg

SEQ ID NO: 133038 - RNA, 32 nt, Human
cucgcuguuacccaggcuggagugcaauggcg

SEQ ID NO: 133039 - RNA, 32 nt, Human
cucgcuguugcccaggcuagagcgcaggggca

SEQ ID NO: 133040 - RNA, 32 nt, Human
cucgcuguugcccaggcuguagugcaguggug

SEQ ID NO: 133041 - RNA, 32 nt, Human
cucgcuuacaccgcaggccccgcuucugugug

SEQ ID NO: 133042 - RNA, 32 nt, Human
cucgcuuaggagagagcaucauggauggcaaa

SEQ ID NO: 133043 - RNA, 32 nt, Human
cucgcuucagccacaguuuccucaucugucca

SEQ ID NO: 133044 - RNA, 32 nt, Human
cucgcuuccuucuuccucugggauggcauacu

SEQ ID NO: 133045 - RNA, 32 nt, Human
cucgcuucuccucuccuccuccugaccuggau

SEQ ID NO: 133046 - RNA, 32 nt, Human
cucgcuucugagcuugguggccuguucccucc

SEQ ID NO: 133047 - RNA, 32 nt, Human
cucgcuuucucacuggcgugcucucuuucucu

SEQ ID NO: 133048 - RNA, 32 nt, Human
cucgcuuugacacccaggcuggagugcaguag

SEQ ID NO: 133049 - RNA, 32 nt, Human
cucgcuuugucacccaggcuggagugcaaugg

SEQ ID NO: 133050 - RNA, 32 nt, Human
cucgcuuugucgcccaggcuggagugcagugg

SEQ ID NO: 133051 - RNA, 32 nt, Human
cucgcuuuguggccagaggagggagacagugg

SEQ ID NO: 133052 - RNA, 32 nt, Human
cucgcuuuguugcccaggcuggagugccuugg

SEQ ID NO: 133053 - RNA, 32 nt, Human
cucgcuuuguugcccaggcuggagugcggugg

SEQ ID NO: 133054 - RNA, 32 nt, Human
cucgcuuuguugcccaggcuggggugcagugg

SEQ ID NO: 133055 - RNA, 32 nt, Human
cucgcuuuguuucccaggcuggagugcagugg

SEQ ID NO: 133056 - RNA, 32 nt, Human
cucggaaacagaacccucccacagcacauccu

SEQ ID NO: 133057 - RNA, 32 nt, Human
cucggaaaccauggguuauugcaguggcaggu

SEQ ID NO: 133058 - RNA, 32 nt, Human
cucggaaccaggcucugcuccgagcagccuuc

SEQ ID NO: 133059 - RNA, 32 nt, Human
cucggaaccugcagggucccaccagcaagaag

SEQ ID NO: 133060 - RNA, 32 nt, Human
cucggaacuguugcccacaugcagccccggac

SEQ ID NO: 133061 - RNA, 32 nt, Human
cucggaagaggaaagaaaggaagucaggaaug

SEQ ID NO: 133062 - RNA, 32 nt, Human
cucggaagcuugugggcucugaggagggggua

SEQ ID NO: 133063 - RNA, 32 nt, Human
cucggaaucagcggugaauugcagugaucuuu

SEQ ID NO: 133064 - RNA, 32 nt, Human
cucggaauggugcugaaaaauccucuccaaca

SEQ ID NO: 133065 - RNA, 32 nt, Human
cucggacagagccugggaagcugccagugaga

SEQ ID NO: 133066 - RNA, 32 nt, Human
cucggaccagccuucuuccucccaccauggca

SEQ ID NO: 133067 - RNA, 21 nt, Human
cucggaccccggccgcugccg

SEQ ID NO: 133068 - RNA, 32 nt, Human
cucggacccgggaggcggagguugcagugagc

SEQ ID NO: 133069 - RNA, 32 nt, Human
cucggaccuccaggcggcucagugcugccugc

SEQ ID NO: 133070 - RNA, 32 nt, Human
cucggacggccgggcgcggagccccagcugcg

SEQ ID NO: 133071 - RNA, 32 nt, Human
cucggacuauacugcugaguucuggucuguug

SEQ ID NO: 133072 - RNA, 32 nt, Human
cucggagaagcccacugccccuguuggcuguu

SEQ ID NO: 133073 - RNA, 32 nt, Human
cucggagaaugagagacaauuauugaggagga

SEQ ID NO: 133074 - RNA, 32 nt, Human
cucggagaccucccuuuccaagccugccugga

SEQ ID NO: 133075 - RNA, 23 nt, Human
cucggagacgcagguugcagugg

SEQ ID NO: 133076 - RNA, 19 nt, Human
cucggagacgccgcugccg

SEQ ID NO: 133077 - RNA, 32 nt, Human
cucggagacugaggcaggagaaucgcuugaac

SEQ ID NO: 133078 - RNA, 32 nt, Human
cucggagagcaguuagggaccgcaggcugccg

SEQ ID NO: 133079 - RNA, 32 nt, Human
cucggagagcaucauucucugccuaggcaagg

SEQ ID NO: 133080 - RNA, 32 nt, Human
cucggagaggagcugggaagcagugcagagag

SEQ ID NO: 133081 - RNA, 32 nt, Human
cucggagaucaagauccacagauggaaacugc

SEQ ID NO: 133082 - RNA, 32 nt, Human
cucggagcacacagcacugacuugcuauggua

SEQ ID NO: 133083 - RNA, 32 nt, Human
cucggagccagaaccugcugcgugcucccucc

SEQ ID NO: 133084 - RNA, 32 nt, Human
cucggagcuggcugugccugcuucuguguacc

SEQ ID NO: 133085 - RNA, 32 nt, Human
cucggagcuuuuucuccaguuaacugucggag

SEQ ID NO: 133086 - RNA, 32 nt, Human
cucggaggagccugagauggaaagucucuucc

SEQ ID NO: 133087 - RNA, 32 nt, Human
cucggaggaggaggugaaccagcugcaccagc

SEQ ID NO: 133088 - RNA, 32 nt, Human
cucggaggcugcccccggcccccuggucucug

SEQ ID NO: 133089 - RNA, 32 nt, Human
cucggagggcagacacagggaggaaggaccca

SEQ ID NO: 133090 - RNA, 32 nt, Human
cucggagggcaugaccccagcccagggaggag

SEQ ID NO: 133091 - RNA, 32 nt, Human
cucggagggcuucucauuuccccaauaccaca

SEQ ID NO: 133092 - RNA, 32 nt, Human
cucggagggugccauuuugucggcuccuuacu

SEQ ID NO: 133093 - RNA, 32 nt, Human
cucggagguagaagauguuguuagcccaaaua

SEQ ID NO: 133094 - RNA, 32 nt, Human
cucggagucugugcacaucugcucacaguuga

SEQ ID NO: 133095 - RNA, 32 nt, Human
cucggaucacugcaaccuccaccuccuagguu

SEQ ID NO: 133096 - RNA, 32 nt, Human
cucggauccccaggccccuccgugcucauccc

SEQ ID NO: 133097 - RNA, 32 nt, Human
cucggaucccucagagcacagaaaccuucagc

SEQ ID NO: 133098 - RNA, 32 nt, Human
cucggauccuccaauccucacguccuucaccu

SEQ ID NO: 133099 - RNA, 30 nt, Human
cucggaugaacccucgagauaagcaaguga

SEQ ID NO: 133100 - RNA, 32 nt, Human
cucggaugcuagcacuugacacugugagcgca

SEQ ID NO: 133101 - RNA, 30 nt, Human
cucggaugcucgcccgcgcccugcugcugu

SEQ ID NO: 133102 - RNA, 32 nt, Human
cucggauggaagucuccggcuccagucgucug

SEQ ID NO: 133103 - RNA, 32 nt, Human
cucggauuggaugaagugcaaagcuuuaaucc

SEQ ID NO: 133104 - RNA, 32 nt, Human
cucggcaacauggcaaaaucuugucucuuuuu

SEQ ID NO: 133105 - RNA, 32 nt, Human
cucggcaagcaggccuggccucccggggccug

SEQ ID NO: 133106 - RNA, 32 nt, Human
cucggcacaacaaucuagaccuggugaucauu

SEQ ID NO: 133107 - RNA, 32 nt, Human
cucggcacagccguagccuccccggcuugcag

SEQ ID NO: 133108 - RNA, 32 nt, Human
cucggcagcuuuggggaagaagaaaaaugccu

SEQ ID NO: 133109 - RNA, 32 nt, Human
cucggcauaugccaccuccaugccacugccag

SEQ ID NO: 133110 - RNA, 32 nt, Human
cucggccaagggcgcauuugcugagcgucugg

SEQ ID NO: 133111 - RNA, 21 nt, Human
cucggccacccaaagugcugg

SEQ ID NO: 133112 - RNA, 32 nt, Human
cucggccacggguggcgaggcugcggugaggc

SEQ ID NO: 133113 - RNA, 23 nt, Human
cucggccacuagugggguccuga

SEQ ID NO: 133114 - RNA, 32 nt, Human
cucggccacuagugggguccugaggccaagaa

SEQ ID NO: 133115 - RNA, 32 nt, Human
cucggccagcagcgguuccaggagaguggcgg

SEQ ID NO: 133116 - RNA, 32 nt, Human
cucggccaggaggcugaggccugcacugcaga

SEQ ID NO: 133117 - RNA, 32 nt, Human
cucggccaguggcugcuuguucucuuggggau

SEQ ID NO: 133118 - RNA, 28 nt, Human
cucggcccaagugaguccugguccaagg

SEQ ID NO: 133119 - RNA, 32 nt, Human
cucggcccacaccccaaaggcucuuuucagag

SEQ ID NO: 133120 - RNA, 24 nt, Human
cucggcccacugaaaccuccaccu

SEQ ID NO: 133121 - RNA, 32 nt, Human
cucggcccacugcaaccucugccuccuggguu

SEQ ID NO: 133122 - RNA, 32 nt, Human
cucggcccagccucuguauucuccacccuuga

SEQ ID NO: 133123 - RNA, 32 nt, Human
cucggcccccaaagugcugggauuacaggcau

SEQ ID NO: 133124 - RNA, 32 nt, Human
cucggcccccacuucuggaaugagccugcccg

SEQ ID NO: 133125 - RNA, 32 nt, Human
cucggcccccagcccacccagccaaaaauaca

SEQ ID NO: 133126 - RNA, 16 nt, Human
cucggccccgccgccg

SEQ ID NO: 133127 - RNA, 15 nt, Human
cucggccccgcgccg

SEQ ID NO: 133128 - RNA, 32 nt, Human
cucggccccucaccaccucuuucuacagccua

SEQ ID NO: 133129 - RNA, 32 nt, Human
cucggccccucgggggcagugcacugcugcgc

SEQ ID NO: 133130 - RNA, 32 nt, Human
cucggccccugccagcuucccccgcuugagca

SEQ ID NO: 133131 - RNA, 32 nt, Human
cucggccccugccucuugcugcuguccugucc

SEQ ID NO: 133132 - RNA, 32 nt, Human
cucggccccuuggaucaggcugggcacucgcu

SEQ ID NO: 133133 - RNA, 32 nt, Human
cucggcccgcugcagccucugccucuuggguu

SEQ ID NO: 133134 - RNA, 32 nt, Human
cucggcccugccagggcggcacgggagggcgg

SEQ ID NO: 133135 - RNA, 32 nt, Human
cucggcccugggcccagucucucaggccuccc

SEQ ID NO: 133136 - RNA, 32 nt, Human
cucggccgccaagcuccgccucccgccccggg

SEQ ID NO: 133137 - RNA, 24 nt, Human
cucggccgcccgagcaggggcugg

SEQ ID NO: 133138 - RNA, 17 nt, Human
cucggccgccgccgccg

SEQ ID NO: 133139 - RNA, 21 nt, Human
cucggccgggcccggggcuga

SEQ ID NO: 133140 - RNA, 32 nt, Human
cucggccgguccaggcccucaggcucccggaa

SEQ ID NO: 133141 - RNA, 32 nt, Human
cucggccucccaagugcugggauuacaggcgu

SEQ ID NO: 133142 - RNA, 32 nt, Human
cucggccucccuaacagcugggauuuacaggc

SEQ ID NO: 133143 - RNA, 32 nt, Human
cucggccucggcggcuccucacccucacaauu

SEQ ID NO: 133144 - RNA, 32 nt, Human
cucggccucuacuuuguccccucaccuccacc

SEQ ID NO: 133145 - RNA, 28 nt, Human
cucggccucugugcagccucaucuccug

SEQ ID NO: 133146 - RNA, 32 nt, Human
cucggccugacaucccucccaucccauauuug

SEQ ID NO: 133147 - RNA, 32 nt, Human
cucggccugacugcuccaacuuccugcucuca

SEQ ID NO: 133148 - RNA, 32 nt, Human
cucggccugccaaacugcugggauuauaggcg

SEQ ID NO: 133149 - RNA, 32 nt, Human
cucggccugcgacggccccaccaggagagcgc

SEQ ID NO: 133150 - RNA, 32 nt, Human
cucggccugcuccucugaccucccggucuccc

SEQ ID NO: 133151 - RNA, 32 nt, Human
cucggccugcugcugcucugcacccccagggc

SEQ ID NO: 133152 - RNA, 21 nt, Human
cucggccuggucaggcccugg

SEQ ID NO: 133153 - RNA, 32 nt, Human
cucggccuuaaagaaucucaacuuuuugaccc

SEQ ID NO: 133154 - RNA, 32 nt, Human
cucggccuuaaggagcugaagagucuggguag

SEQ ID NO: 133155 - RNA, 17 nt, Human
cucggccuuucuuguca

SEQ ID NO: 133156 - RNA, 32 nt, Human
cucggcgacucggccccgucuccugagggucc

SEQ ID NO: 133157 - RNA, 31 nt, Human
cucggcgagauauaugggguuggagaggaca

SEQ ID NO: 133158 - RNA, 32 nt, Human
cucggcgagccugguggugcucugacauccac

SEQ ID NO: 133159 - RNA, 32 nt, Human
cucggcgaggcuggagcuugggccaagguagu

SEQ ID NO: 133160 - RNA, 32 nt, Human
cucggcgcaccgcaagcccugccuccuggguu

SEQ ID NO: 133161 - RNA, 20 nt, Human
cucggcgccgcccgccgccg

SEQ ID NO: 133162 - RNA, 32 nt, Human
cucggcgccuccugccgugcuccggggcggca

SEQ ID NO: 133163 - RNA, 32 nt, Human
cucggcgcgacacucaaccaccauggccgcuc

SEQ ID NO: 133164 - RNA, 32 nt, Human
cucggcgcggggagcggagggaagggacgaag

SEQ ID NO: 133165 - RNA, 32 nt, Human
cucggcgcgguggcucacgccuguaaucacag

SEQ ID NO: 133166 - RNA, 19 nt, Human
cucggcggccaccgcugcc

SEQ ID NO: 133167 - RNA, 22 nt, Human
cucggcggcgaugaggcgcuga

SEQ ID NO: 133168 - RNA, 32 nt, Human
cucggcggcggcgggcaguugcaguggugcag

SEQ ID NO: 133169 - RNA, 32 nt, Human
cucggcggcucacaccuguaaccccagcacuu

SEQ ID NO: 133170 - RNA, 32 nt, Human
cucggcguacgguccuccccugaccccuccuu

SEQ ID NO: 133171 - RNA, 20 nt, Human
cucggcguccgccgccgccg

SEQ ID NO: 133172 - RNA, 32 nt, Human
cucggcgucuuccuuccuccucccggucagcg

SEQ ID NO: 133173 - RNA, 32 nt, Human
cucggcguucaggaagaggagcaccagcggag

SEQ ID NO: 133174 - RNA, 21 nt, Human
cucggcuaacccuggcgcugg

SEQ ID NO: 133175 - RNA, 32 nt, Human
cucggcuaccuguucuggaggucaggcuuugg

SEQ ID NO: 133176 - RNA, 32 nt, Human
cucggcuagaaaccucuuuccaagucuucagg

SEQ ID NO: 133177 - RNA, 24 nt, Human
cucggcuagcuacaaccuccaccu

SEQ ID NO: 133178 - RNA, 32 nt, Human
cucggcuaucacucaccccuguccucagagug

SEQ ID NO: 133179 - RNA, 32 nt, Human
cucggcucaagcaauccuuccuacucagccuc

SEQ ID NO: 133180 - RNA, 32 nt, Human
cucggcucacagcaaccucucugccuccagaa

SEQ ID NO: 133181 - RNA, 32 nt, Human
cucggcucacagcaaccucugccucccggauu

SEQ ID NO: 133182 - RNA, 32 nt, Human
cucggcucacagucgcaggagaguucuggggu

SEQ ID NO: 133183 - RNA, 32 nt, Human
cucggcucacagugcaaccucugcuucccagg

SEQ ID NO: 133184 - RNA, 24 nt, Human
cucggcucaccacaacccccaccu

SEQ ID NO: 133185 - RNA, 24 nt, Human
cucggcucaccacaaccuccaccu

SEQ ID NO: 133186 - RNA, 24 nt, Human
cucggcucaccacaaccuccgccu

SEQ ID NO: 133187 - RNA, 24 nt, Human
cucggcucaccacaaccuccuccu

SEQ ID NO: 133188 - RNA, 24 nt, Human
cucggcucaccacaaccucugccu

SEQ ID NO: 133189 - RNA, 32 nt, Human
cucggcucaccacaaccucugccuacuggguu

SEQ ID NO: 133190 - RNA, 32 nt, Human
cucggcucaccacaaucgcugccuccuggguu

SEQ ID NO: 133191 - RNA, 20 nt, Human
cucggcucaccgcaaccucc

SEQ ID NO: 133192 - RNA, 24 nt, Human
cucggcucaccgcaaccuccaccu

SEQ ID NO: 133193 - RNA, 24 nt, Human
cucggcucaccgcaaccuccgccu

SEQ ID NO: 133194 - RNA, 24 nt, Human
cucggcucaccgcaaccucugccu

SEQ ID NO: 133195 - RNA, 32 nt, Human
cucggcucaccgcaaccucugccucccaggug

SEQ ID NO: 133196 - RNA, 32 nt, Human
cucggcucaccgcaaccucugccucccggguu

SEQ ID NO: 133197 - RNA, 32 nt, Human
cucggcucaccgcaaccucugccuccuggguu

SEQ ID NO: 133198 - RNA, 22 nt, Human
cucggcucaccucuuccuccaa

SEQ ID NO: 133199 - RNA, 24 nt, Human
cucggcucacggcaaccuccaccu

SEQ ID NO: 133200 - RNA, 32 nt, Human
cucggcucacgguaaccucugccucccagguu

SEQ ID NO: 133201 - RNA, 24 nt, Human
cucggcucacuacaaccuccaccu

SEQ ID NO: 133202 - RNA, 24 nt, Human
cucggcucacuacaaccucugccu

SEQ ID NO: 133203 - RNA, 32 nt, Human
cucggcucacuacaaccucugccucccagguu

SEQ ID NO: 133204 - RNA, 20 nt, Human
cucggcucacuacaacuucc

SEQ ID NO: 133205 - RNA, 32 nt, Human
cucggcucacuacaagcucugccucccggguu

SEQ ID NO: 133206 - RNA, 32 nt, Human
cucggcucacuccaccuccaccucccagguuc

SEQ ID NO: 133207 - RNA, 23 nt, Human
cucggcucacucccuucucccac

SEQ ID NO: 133208 - RNA, 32 nt, Human
cucggcucacucccuucucccacccuugagaa

SEQ ID NO: 133209 - RNA, 32 nt, Human
cucggcucacugaaaccucugccucccggguu

SEQ ID NO: 133210 - RNA, 32 nt, Human
cucggcucacugaaacuucugccucccgggua

SEQ ID NO: 133211 - RNA, 32 nt, Human
cucggcucacugcaaacuccgccucccagguu

SEQ ID NO: 133212 - RNA, 32 nt, Human
cucggcucacugcaaacuccgccucccggguu

SEQ ID NO: 133213 - RNA, 32 nt, Human
cucggcucacugcaaacuccgccuuccagguu

SEQ ID NO: 133214 - RNA, 32 nt, Human
cucggcucacugcaaacucugccucccagguu

SEQ ID NO: 133215 - RNA, 32 nt, Human
cucggcucacugcaaacucugccucccggguu

SEQ ID NO: 133216 - RNA, 32 nt, Human
cucggcucacugcaaacucugccuccuggauu

SEQ ID NO: 133217 - RNA, 32 nt, Human
cucggcucacugcaaaucuccgccucccaggu

SEQ ID NO: 133218 - RNA, 32 nt, Human
cucggcucacugcaacauccaccuccuggguu

SEQ ID NO: 133219 - RNA, 32 nt, Human
cucggcucacugcaacauccagcuccuggguu

SEQ ID NO: 133220 - RNA, 24 nt, Human
cucggcucacugcaaccaccaucu

SEQ ID NO: 133221 - RNA, 32 nt, Human
cucggcucacugcaaccacugccucccagguu

SEQ ID NO: 133222 - RNA, 22 nt, Human
cucggcucacugcaacccccac

SEQ ID NO: 133223 - RNA, 24 nt, Human
cucggcucacugcaacccccaucu

SEQ ID NO: 133224 - RNA, 19 nt, Human
cucggcucacugcaaccuc

SEQ ID NO: 133225 - RNA, 32 nt, Human
cucggcucacugcaaccucaccucccggguuc

SEQ ID NO: 133226 - RNA, 20 nt, Human
cucggcucacugcaaccucc

SEQ ID NO: 133227 - RNA, 21 nt, Human
cucggcucacugcaaccucca

SEQ ID NO: 133228 - RNA, 24 nt, Human
cucggcucacugcaaccuccaacu

SEQ ID NO: 133229 - RNA, 22 nt, Human
cucggcucacugcaaccuccac

SEQ ID NO: 133230 - RNA, 24 nt, Human
cucggcucacugcaaccuccaccu

SEQ ID NO: 133231 - RNA, 32 nt, Human
cucggcucacugcaaccuccaccucccagaag

SEQ ID NO: 133232 - RNA, 32 nt, Human
cucggcucacugcaaccuccaccucccagauu

SEQ ID NO: 133233 - RNA, 32 nt, Human
cucggcucacugcaaccuccaccucccagguc

SEQ ID NO: 133234 - RNA, 32 nt, Human
cucggcucacugcaaccuccaccucccagguu

SEQ ID NO: 133235 - RNA, 32 nt, Human
cucggcucacugcaaccuccaccuccccaguu

SEQ ID NO: 133236 - RNA, 32 nt, Human
cucggcucacugcaaccuccaccuccccgggu

SEQ ID NO: 133237 - RNA, 32 nt, Human
cucggcucacugcaaccuccaccucccgaguu

SEQ ID NO: 133238 - RNA, 32 nt, Human
cucggcucacugcaaccuccaccucccggauu

SEQ ID NO: 133239 - RNA, 32 nt, Human
cucggcucacugcaaccuccaccucccggguu

SEQ ID NO: 133240 - RNA, 32 nt, Human
cucggcucacugcaaccuccaccuccuagguu

SEQ ID NO: 133241 - RNA, 32 nt, Human
cucggcucacugcaaccuccaccuccuggauu

SEQ ID NO: 133242 - RNA, 32 nt, Human
cucggcucacugcaaccuccaccuccuggcuu

SEQ ID NO: 133243 - RNA, 32 nt, Human
cucggcucacugcaaccuccaccuccugggcu

SEQ ID NO: 133244 - RNA, 32 nt, Human
cucggcucacugcaaccuccaccuccuggguu

SEQ ID NO: 133245 - RNA, 32 nt, Human
cucggcucacugcaaccuccaccuccugguuc

SEQ ID NO: 133246 - RNA, 32 nt, Human
cucggcucacugcaaccuccacuucuuggguu

SEQ ID NO: 133247 - RNA, 22 nt, Human
cucggcucacugcaaccuccag

SEQ ID NO: 133248 - RNA, 24 nt, Human
cucggcucacugcaaccucccucu

SEQ ID NO: 133249 - RNA, 24 nt, Human
cucggcucacugcaaccuccgacu

SEQ ID NO: 133250 - RNA, 32 nt, Human
cucggcucacugcaaccuccgacuccuggguu

SEQ ID NO: 133251 - RNA, 22 nt, Human
cucggcucacugcaaccuccgc

SEQ ID NO: 133252 - RNA, 32 nt, Human
cucggcucacugcaaccuccgcccccuggguu

SEQ ID NO: 133253 - RNA, 24 nt, Human
cucggcucacugcaaccuccgccu

SEQ ID NO: 133254 - RNA, 32 nt, Human
cucggcucacugcaaccuccgccuaccggguu

SEQ ID NO: 133255 - RNA, 32 nt, Human
cucggcucacugcaaccuccgccucccaaguu

SEQ ID NO: 133256 - RNA, 32 nt, Human
cucggcucacugcaaccuccgccucccagguu

SEQ ID NO: 133257 - RNA, 32 nt, Human
cucggcucacugcaaccuccgccucccaguuu

SEQ ID NO: 133258 - RNA, 32 nt, Human
cucggcucacugcaaccuccgccucccggcuu

SEQ ID NO: 133259 - RNA, 32 nt, Human
cucggcucacugcaaccuccgccucccgggcu

SEQ ID NO: 133260 - RNA, 32 nt, Human
cucggcucacugcaaccuccgccucccggguu

SEQ ID NO: 133261 - RNA, 32 nt, Human
cucggcucacugcaaccuccgccucccgguuc

SEQ ID NO: 133262 - RNA, 32 nt, Human
cucggcucacugcaaccuccgccuccugaguu

SEQ ID NO: 133263 - RNA, 32 nt, Human
cucggcucacugcaaccuccgccuccugggcu

SEQ ID NO: 133264 - RNA, 32 nt, Human
cucggcucacugcaaccuccgccuccuggguu

SEQ ID NO: 133265 - RNA, 32 nt, Human
cucggcucacugcaaccuccgccuccuugguu

SEQ ID NO: 133266 - RNA, 32 nt, Human
cucggcucacugcaaccuccgccuuccugagu

SEQ ID NO: 133267 - RNA, 32 nt, Human
cucggcucacugcaaccuccgccuuuccaccu

SEQ ID NO: 133268 - RNA, 32 nt, Human
cucggcucacugcaaccuccgcucccuggguu

SEQ ID NO: 133269 - RNA, 24 nt, Human
cucggcucacugcaaccuccgucu

SEQ ID NO: 133270 - RNA, 32 nt, Human
cucggcucacugcaaccuccgucucccagguu

SEQ ID NO: 133271 - RNA, 24 nt, Human
cucggcucacugcaaccuccuccu

SEQ ID NO: 133272 - RNA, 32 nt, Human
cucggcucacugcaaccuccuccucccggguu

SEQ ID NO: 133273 - RNA, 32 nt, Human
cucggcucacugcaaccucgccucccugguuc

SEQ ID NO: 133274 - RNA, 20 nt, Human
cucggcucacugcaaccucu

SEQ ID NO: 133275 - RNA, 24 nt, Human
cucggcucacugcaaccucuaccu

SEQ ID NO: 133276 - RNA, 32 nt, Human
cucggcucacugcaaccucuaccucccagguu

SEQ ID NO: 133277 - RNA, 32 nt, Human
cucggcucacugcaaccucuaccuccuggauu

SEQ ID NO: 133278 - RNA, 32 nt, Human
cucggcucacugcaaccucuaccuccuggguu

SEQ ID NO: 133279 - RNA, 32 nt, Human
cucggcucacugcaaccucugccaucaggauu

SEQ ID NO: 133280 - RNA, 24 nt, Human
cucggcucacugcaaccucugccu

SEQ ID NO: 133281 - RNA, 32 nt, Human
cucggcucacugcaaccucugccucacggguu

SEQ ID NO: 133282 - RNA, 32 nt, Human
cucggcucacugcaaccucugccucccagguu

SEQ ID NO: 133283 - RNA, 32 nt, Human
cucggcucacugcaaccucugccucccgaguu

SEQ ID NO: 133284 - RNA, 32 nt, Human
cucggcucacugcaaccucugccucccgcauu

SEQ ID NO: 133285 - RNA, 32 nt, Human
cucggcucacugcaaccucugccucccggauu

SEQ ID NO: 133286 - RNA, 32 nt, Human
cucggcucacugcaaccucugccucccggguu

SEQ ID NO: 133287 - RNA, 32 nt, Human
cucggcucacugcaaccucugccucccguguu

SEQ ID NO: 133288 - RNA, 32 nt, Human
cucggcucacugcaaccucugccuccuagguu

SEQ ID NO: 133289 - RNA, 32 nt, Human
cucggcucacugcaaccucugccuccugagcu

SEQ ID NO: 133290 - RNA, 32 nt, Human
cucggcucacugcaaccucugccuccugaguu

SEQ ID NO: 133291 - RNA, 32 nt, Human
cucggcucacugcaaccucugccuccuggauu

SEQ ID NO: 133292 - RNA, 32 nt, Human
cucggcucacugcaaccucugccuccugggcu

SEQ ID NO: 133293 - RNA, 32 nt, Human
cucggcucacugcaaccucugccuccuggggu

SEQ ID NO: 133294 - RNA, 32 nt, Human
cucggcucacugcaaccucugccuccugggug

SEQ ID NO: 133295 - RNA, 32 nt, Human
cucggcucacugcaaccucugccuccuggguu

SEQ ID NO: 133296 - RNA, 32 nt, Human
cucggcucacugcaaccucugccucuuggguu

SEQ ID NO: 133297 - RNA, 32 nt, Human
cucggcucacugcaaccucugcuucccggguu

SEQ ID NO: 133298 - RNA, 24 nt, Human
cucggcucacugcaaccucugucu

SEQ ID NO: 133299 - RNA, 32 nt, Human
cucggcucacugcaaccucugucuccugaguu

SEQ ID NO: 133300 - RNA, 32 nt, Human
cucggcucacugcaaccucugucuccuggguu

SEQ ID NO: 133301 - RNA, 23 nt, Human
cucggcucacugcaaccucuugc

SEQ ID NO: 133302 - RNA, 32 nt, Human
cucggcucacugcaaccucuugccucccaggu

SEQ ID NO: 133303 - RNA, 24 nt, Human
cucggcucacugcaaccuucgccu

SEQ ID NO: 133304 - RNA, 32 nt, Human
cucggcucacugcaaccuucgccucuggguuc

SEQ ID NO: 133305 - RNA, 22 nt, Human
cucggcucacugcaaccuuugc

SEQ ID NO: 133306 - RNA, 24 nt, Human
cucggcucacugcaaccuuugccu

SEQ ID NO: 133307 - RNA, 32 nt, Human
cucggcucacugcaaccuuugccuccuagguu

SEQ ID NO: 133308 - RNA, 20 nt, Human
cucggcucacugcaacgucc

SEQ ID NO: 133309 - RNA, 32 nt, Human
cucggcucacugcaacguccgccucccggguu

SEQ ID NO: 133310 - RNA, 24 nt, Human
cucggcucacugcaacuaccaccu

SEQ ID NO: 133311 - RNA, 32 nt, Human
cucggcucacugcaacuaccaccuccuggguu

SEQ ID NO: 133312 - RNA, 23 nt, Human
cucggcucacugcaacuccaccu

SEQ ID NO: 133313 - RNA, 32 nt, Human
cucggcucacugcaacuccaccucccggguuc

SEQ ID NO: 133314 - RNA, 32 nt, Human
cucggcucacugcaacucugccucccggguuc

SEQ ID NO: 133315 - RNA, 20 nt, Human
cucggcucacugcaacuucc

SEQ ID NO: 133316 - RNA, 24 nt, Human
cucggcucacugcaacuuccaccu

SEQ ID NO: 133317 - RNA, 32 nt, Human
cucggcucacugcaacuuccgccucccgguuu

SEQ ID NO: 133318 - RNA, 32 nt, Human
cucggcucacugcaacuuccgccuccugggau

SEQ ID NO: 133319 - RNA, 20 nt, Human
cucggcucacugcaacuucu

SEQ ID NO: 133320 - RNA, 21 nt, Human
cucggcucacugcaacuucua

SEQ ID NO: 133321 - RNA, 32 nt, Human
cucggcucacugcaacuucuaccaccuagguu

SEQ ID NO: 133322 - RNA, 32 nt, Human
cucggcucacugcaacuucugccucccggguu

SEQ ID NO: 133323 - RNA, 32 nt, Human
cucggcucacugcaacuucugccuccuagguu

SEQ ID NO: 133324 - RNA, 32 nt, Human
cucggcucacugcaagauccgccucccggguu

SEQ ID NO: 133325 - RNA, 24 nt, Human
cucggcucacugcaagccccaccu

SEQ ID NO: 133326 - RNA, 32 nt, Human
cucggcucacugcaagccccaccuucugaguu

SEQ ID NO: 133327 - RNA, 32 nt, Human
cucggcucacugcaagcccugccuccuggguu

SEQ ID NO: 133328 - RNA, 32 nt, Human
cucggcucacugcaagcucagccuccccgauu

SEQ ID NO: 133329 - RNA, 24 nt, Human
cucggcucacugcaagcuccaccu

SEQ ID NO: 133330 - RNA, 32 nt, Human
cucggcucacugcaagcuccaccucccagguu

SEQ ID NO: 133331 - RNA, 32 nt, Human
cucggcucacugcaagcuccaccucccggguu

SEQ ID NO: 133332 - RNA, 32 nt, Human
cucggcucacugcaagcuccaccuccuggguu

SEQ ID NO: 133333 - RNA, 24 nt, Human
cucggcucacugcaagcuccaucu

SEQ ID NO: 133334 - RNA, 22 nt, Human
cucggcucacugcaagcuccgc

SEQ ID NO: 133335 - RNA, 32 nt, Human
cucggcucacugcaagcuccgccucccagauu

SEQ ID NO: 133336 - RNA, 32 nt, Human
cucggcucacugcaagcuccgccucccaggau

SEQ ID NO: 133337 - RNA, 32 nt, Human
cucggcucacugcaagcuccgccucccagguu

SEQ ID NO: 133338 - RNA, 32 nt, Human
cucggcucacugcaagcuccgccucccggauu

SEQ ID NO: 133339 - RNA, 32 nt, Human
cucggcucacugcaagcuccgccucccggguu

SEQ ID NO: 133340 - RNA, 32 nt, Human
cucggcucacugcaagcuccgccuccuggguu

SEQ ID NO: 133341 - RNA, 32 nt, Human
cucggcucacugcaagcuccgccucucggguu

SEQ ID NO: 133342 - RNA, 32 nt, Human
cucggcucacugcaagcucggccuccuggguu

SEQ ID NO: 133343 - RNA, 32 nt, Human
cucggcucacugcaagcucugccucccagguu

SEQ ID NO: 133344 - RNA, 32 nt, Human
cucggcucacugcaagcucugccucccgggcu

SEQ ID NO: 133345 - RNA, 32 nt, Human
cucggcucacugcaagcucugccucccggguu

SEQ ID NO: 133346 - RNA, 32 nt, Human
cucggcucacugcaagcucugccucccgguug

SEQ ID NO: 133347 - RNA, 32 nt, Human
cucggcucacugcaagcucugccucccguguu

SEQ ID NO: 133348 - RNA, 32 nt, Human
cucggcucacugcaagcucugccuccuggguu

SEQ ID NO: 133349 - RNA, 32 nt, Human
cucggcucacugcaagcucugccucucggguu

SEQ ID NO: 133350 - RNA, 32 nt, Human
cucggcucacugcaagcucugcguccuggguu

SEQ ID NO: 133351 - RNA, 32 nt, Human
cucggcucacugcaagcucugcuucccagguu

SEQ ID NO: 133352 - RNA, 32 nt, Human
cucggcucacugcaagcuucgccucccggguu

SEQ ID NO: 133353 - RNA, 32 nt, Human
cucggcucacugcaaguuccgccucccggguu

SEQ ID NO: 133354 - RNA, 32 nt, Human
cucggcucacugcaaucuccgccucccagguu

SEQ ID NO: 133355 - RNA, 32 nt, Human
cucggcucacugcaaucucugccucccaagca

SEQ ID NO: 133356 - RNA, 32 nt, Human
cucggcucacugcaaucucugccucccagguu

SEQ ID NO: 133357 - RNA, 32 nt, Human
cucggcucacugcaaucucugccucccggauu

SEQ ID NO: 133358 - RNA, 32 nt, Human
cucggcucacugcaaucucugccucccggguu

SEQ ID NO: 133359 - RNA, 32 nt, Human
cucggcucacugcaaucucugccuccuggguu

SEQ ID NO: 133360 - RNA, 32 nt, Human
cucggcucacugcaauuugcgucucccaaguu

SEQ ID NO: 133361 - RNA, 32 nt, Human
cucggcucacugcacccucugccucuuggguu

SEQ ID NO: 133362 - RNA, 32 nt, Human
cucggcucacugcaccuccgccucccagguuc

SEQ ID NO: 133363 - RNA, 32 nt, Human
cucggcucacugcaccucugccuccuggauuc

SEQ ID NO: 133364 - RNA, 32 nt, Human
cucggcucacugcaccuucugccuaccgaguu

SEQ ID NO: 133365 - RNA, 32 nt, Human
cucggcucacugcagccccugccucccaggcu

SEQ ID NO: 133366 - RNA, 32 nt, Human
cucggcucacugcagccucaaccuccugggcu

SEQ ID NO: 133367 - RNA, 20 nt, Human
cucggcucacugcagccucc

SEQ ID NO: 133368 - RNA, 24 nt, Human
cucggcucacugcagccuccaucu

SEQ ID NO: 133369 - RNA, 32 nt, Human
cucggcucacugcagccuccgccucccagguu

SEQ ID NO: 133370 - RNA, 32 nt, Human
cucggcucacugcagccuccgccucccguauu

SEQ ID NO: 133371 - RNA, 32 nt, Human
cucggcucacugcagccuccgccucccugguu

SEQ ID NO: 133372 - RNA, 32 nt, Human
cucggcucacugcagccuccgccugccggguc

SEQ ID NO: 133373 - RNA, 32 nt, Human
cucggcucacugcagccuccuucuccuggguc

SEQ ID NO: 133374 - RNA, 32 nt, Human
cucggcucacugcagccucugccucccggguu

SEQ ID NO: 133375 - RNA, 32 nt, Human
cucggcucacugcagccuugacuuccugggcu

SEQ ID NO: 133376 - RNA, 32 nt, Human
cucggcucacugcagccuuugccucccggguu

SEQ ID NO: 133377 - RNA, 32 nt, Human
cucggcucacugcaggcucugccuccuggguu

SEQ ID NO: 133378 - RNA, 32 nt, Human
cucggcucacugcagucaccuccucucagguu

SEQ ID NO: 133379 - RNA, 24 nt, Human
cucggcucacugcagucuucaccu

SEQ ID NO: 133380 - RNA, 24 nt, Human
cucggcucacugcauccuccaccu

SEQ ID NO: 133381 - RNA, 32 nt, Human
cucggcucacugcauccuccaccuccuggguu

SEQ ID NO: 133382 - RNA, 32 nt, Human
cucggcucacugcauccuccgccucccggguu

SEQ ID NO: 133383 - RNA, 22 nt, Human
cucggcucacugcauccucugc

SEQ ID NO: 133384 - RNA, 32 nt, Human
cucggcucacugcauccucugccucccggguu

SEQ ID NO: 133385 - RNA, 32 nt, Human
cucggcucacugcauccucugccuccuggguu

SEQ ID NO: 133386 - RNA, 32 nt, Human
cucggcucacugcaucuuccgccucccggguu

SEQ ID NO: 133387 - RNA, 24 nt, Human
cucggcucacugccaccuccaccu

SEQ ID NO: 133388 - RNA, 32 nt, Human
cucggcucacugccaccucucccucaugguuu

SEQ ID NO: 133389 - RNA, 32 nt, Human
cucggcucacugccaccucugccucccagguu

SEQ ID NO: 133390 - RNA, 32 nt, Human
cucggcucacugcgaccuccgucucccgggcu

SEQ ID NO: 133391 - RNA, 32 nt, Human
cucggcucacugcgaccucggccuccuggauu

SEQ ID NO: 133392 - RNA, 32 nt, Human
cucggcucacugcgaccucugccucccagguu

SEQ ID NO: 133393 - RNA, 32 nt, Human
cucggcucacugcgaccucugcuuccuggguu

SEQ ID NO: 133394 - RNA, 32 nt, Human
cucggcucacugcgagcucugccuccuggguu

SEQ ID NO: 133395 - RNA, 24 nt, Human
cucggcucacuguaaccuccgccu

SEQ ID NO: 133396 - RNA, 32 nt, Human
cucggcucacuguaaccucugccuccugccuc

SEQ ID NO: 133397 - RNA, 24 nt, Human
cucggcucacuguagccuccaccu

SEQ ID NO: 133398 - RNA, 32 nt, Human
cucggcucacugugaccucugccuccuggguu

SEQ ID NO: 133399 - RNA, 32 nt, Human
cucggcucagugcaaccucugccucccagguu

SEQ ID NO: 133400 - RNA, 24 nt, Human
cucggcucauugcaaccuccaccu

SEQ ID NO: 133401 - RNA, 32 nt, Human
cucggcuccagcccccggcgccugccgccucg

SEQ ID NO: 133402 - RNA, 24 nt, Human
cucggcucccugcaaccuccaccu

SEQ ID NO: 133403 - RNA, 32 nt, Human
cucggcucccugcaaucuccaccucccagguu

SEQ ID NO: 133404 - RNA, 24 nt, Human
cucggcucgcuacaaccuccaccu

SEQ ID NO: 133405 - RNA, 32 nt, Human
cucggcucgcugcaaacucugccucccagguu

SEQ ID NO: 133406 - RNA, 32 nt, Human
cucggcucgcugcagccacugccuccuggguu

SEQ ID NO: 133407 - RNA, 32 nt, Human
cucggcucgcugcagccucugccuccuggguu

SEQ ID NO: 133408 - RNA, 32 nt, Human
cucggcucuagggagcucggccaguccacagg

SEQ ID NO: 133409 - RNA, 24 nt, Human
cucggcucuaugcaaccuccaccu

SEQ ID NO: 133410 - RNA, 32 nt, Human
cucggcucucaccgcaaccuccgucuccuggg

SEQ ID NO: 133411 - RNA, 18 nt, Human
cucggcucucccaacuga

SEQ ID NO: 133412 - RNA, 32 nt, Human
cucggcucucugcaaccucugccucccggguu

SEQ ID NO: 133413 - RNA, 22 nt, Human
cucggcucugcaaccuccaucu

SEQ ID NO: 133414 - RNA, 32 nt, Human
cucggcucugcccucugugaccuugcagccug

SEQ ID NO: 133415 - RNA, 32 nt, Human
cucggcucugucccagcacuugucugggagaa

SEQ ID NO: 133416 - RNA, 32 nt, Human
cucggcucuucccaguccucuggacuaaaaug

SEQ ID NO: 133417 - RNA, 32 nt, Human
cucggcugacugcaaacucugccucccagguu

SEQ ID NO: 133418 - RNA, 24 nt, Human
cucggcugacugcaaccuccaccu

SEQ ID NO: 133419 - RNA, 32 nt, Human
cucggcugcagcagauggcaaguggccgcgug

SEQ ID NO: 133420 - RNA, 32 nt, Human
cucggcugccaccuccaccggacaccucagac

SEQ ID NO: 133421 - RNA, 32 nt, Human
cucggcugccagcuucccagccacagaggaug

SEQ ID NO: 133422 - RNA, 32 nt, Human
cucggcugccagggcucccuuuugacuuauug

SEQ ID NO: 133423 - RNA, 32 nt, Human
cucggcugcccagaggagggcgcacugcgcgu

SEQ ID NO: 133424 - RNA, 21 nt, Human
cucggcugcucgccgccgccg

SEQ ID NO: 133425 - RNA, 32 nt, Human
cucggcugcuucuguccaccucuuacacuucu

SEQ ID NO: 133426 - RNA, 19 nt, Human
cucggcuggagugcagugg

SEQ ID NO: 133427 - RNA, 32 nt, Human
cucggcugucaccugcucacagggaugcuggu

SEQ ID NO: 133428 - RNA, 32 nt, Human
cucggcuuacuacgaccucugccuccuggguu

SEQ ID NO: 133429 - RNA, 32 nt, Human
cucggcuuacugaaaccucugccucccagguu

SEQ ID NO: 133430 - RNA, 20 nt, Human
cucggcuuacugcaaccucc

SEQ ID NO: 133431 - RNA, 24 nt, Human
cucggcuuacugcaaccuccaccu

SEQ ID NO: 133432 - RNA, 22 nt, Human
cucggcuuacugcaaccuccgc

SEQ ID NO: 133433 - RNA, 32 nt, Human
cucggcuuccacugcagccaugucacuccucu

SEQ ID NO: 133434 - RNA, 32 nt, Human
cucggcuuccaggacaccccgcucagguucug

SEQ ID NO: 133435 - RNA, 32 nt, Human
cucggcuucccgaagugcugggauuauaggcg

SEQ ID NO: 133436 - RNA, 23 nt, Human
cucggcuuccugcaaccuccacu

SEQ ID NO: 133437 - RNA, 32 nt, Human
cucgggaaagggcagaggucacuggggguggg

SEQ ID NO: 133438 - RNA, 32 nt, Human
cucgggaaccuacagaaaauaccgaguccggu

SEQ ID NO: 133439 - RNA, 32 nt, Human
cucgggaacucacagaaaauuccgaguccggu

SEQ ID NO: 133440 - RNA, 32 nt, Human
cucgggaaggcaucuccacagccccggguccu

SEQ ID NO: 133441 - RNA, 32 nt, Human
cucgggaccgaugccugcugugccuuccugcu

SEQ ID NO: 133442 - RNA, 32 nt, Human
cucgggagauagauugucucccuugccucugg

SEQ ID NO: 133443 - RNA, 32 nt, Human
cucgggagcacggcgguggaggggacauagga

SEQ ID NO: 133444 - RNA, 20 nt, Human
cucgggagccgccgccgccg

SEQ ID NO: 133445 - RNA, 32 nt, Human
cucgggagccguggggcagaggcugcagagcc

SEQ ID NO: 133446 - RNA, 23 nt, Human
cucgggagccugaggcaggagaa

SEQ ID NO: 133447 - RNA, 32 nt, Human
cucgggagcugaggcaggagaaucgguugaau

SEQ ID NO: 133448 - RNA, 32 nt, Human
cucgggagcugcugccgucagacuccugccuc

SEQ ID NO: 133449 - RNA, 24 nt, Human
cucgggaggaagagguugcaguga

SEQ ID NO: 133450 - RNA, 32 nt, Human
cucgggaggaagagguugcagugagcugagau

SEQ ID NO: 133451 - RNA, 32 nt, Human
cucgggaggagaaacgaaaagccgccuccggg

SEQ ID NO: 133452 - RNA, 24 nt, Human
cucgggaggcagagguugcaguga

SEQ ID NO: 133453 - RNA, 32 nt, Human
cucgggaggcagagguugcagugagccgagau

SEQ ID NO: 133454 - RNA, 32 nt, Human
cucgggaggcagagguugcagugagcugagau

SEQ ID NO: 133455 - RNA, 32 nt, Human
cucgggaggcagcagacagggagccaccagca

SEQ ID NO: 133456 - RNA, 32 nt, Human
cucgggaggcccgggcccugcccagcuacagu

SEQ ID NO: 133457 - RNA, 24 nt, Human
cucgggaggcgaagguugcaguga

SEQ ID NO: 133458 - RNA, 32 nt, Human
cucgggaggcgaagguugcagugagccgagau

SEQ ID NO: 133459 - RNA, 32 nt, Human
cucgggaggcggagguugcagugagccgagau

SEQ ID NO: 133460 - RNA, 20 nt, Human
cucgggaggcggagucagga

SEQ ID NO: 133461 - RNA, 32 nt, Human
cucgggaggcggauguugcagugagccaauau

SEQ ID NO: 133462 - RNA, 32 nt, Human
cucgggaggcugagacaggagaaucgcuugaa

SEQ ID NO: 133463 - RNA, 32 nt, Human
cucgggaggcugagacaggagaauugcuugaa

SEQ ID NO: 133464 - RNA, 32 nt, Human
cucgggaggcugagacaggagauuugcuugaa

SEQ ID NO: 133465 - RNA, 32 nt, Human
cucgggaggcugagcaggaggauggcuugggc

SEQ ID NO: 133466 - RNA, 32 nt, Human
cucgggaggcugaggaaggagaauggugugaa

SEQ ID NO: 133467 - RNA, 24 nt, Human
cucgggagguagagguugcaguga

SEQ ID NO: 133468 - RNA, 32 nt, Human
cucgggagguagagguugcagugagccaaggu

SEQ ID NO: 133469 - RNA, 32 nt, Human
cucgggaggugaaaguugcagugagccgagau

SEQ ID NO: 133470 - RNA, 32 nt, Human
cucgggaggugaggcaggagaauggcuugagc

SEQ ID NO: 133471 - RNA, 32 nt, Human
cucgggagguggagguggcagugagccgagau

SEQ ID NO: 133472 - RNA, 22 nt, Human
cucgggagguggagguugcagu

SEQ ID NO: 133473 - RNA, 32 nt, Human
cucgggagguggagguugcagugagccaagau

SEQ ID NO: 133474 - RNA, 32 nt, Human
cucgggagguggagguugcagugagcugagau

SEQ ID NO: 133475 - RNA, 23 nt, Human
cucgggagguggcuggggaguga

SEQ ID NO: 133476 - RNA, 32 nt, Human
cucgggagguugagcaggaggauugcuugagc

SEQ ID NO: 133477 - RNA, 32 nt, Human
cucgggagguuucugcucugucugucauggca

SEQ ID NO: 133478 - RNA, 32 nt, Human
cucgggaugcugcucuuccuuccuucacaacc

SEQ ID NO: 133479 - RNA, 32 nt, Human
cucgggauucaagugauucuacugccucagcc

SEQ ID NO: 133480 - RNA, 32 nt, Human
cucgggcaagugaacccuagggcugcaggagc

SEQ ID NO: 133481 - RNA, 19 nt, Human
cucgggcacccggcacaga

SEQ ID NO: 133482 - RNA, 32 nt, Human
cucgggcacucccaagucugccucuuggcucc

SEQ ID NO: 133483 - RNA, 17 nt, Human
cucgggcagccgcuccu

SEQ ID NO: 133484 - RNA, 23 nt, Human
cucgggcagcucugcagcagcuu

SEQ ID NO: 133485 - RNA, 32 nt, Human
cucgggcaggccgaacccacaucucuacccau

SEQ ID NO: 133486 - RNA, 32 nt, Human
cucgggcaggcgugggugagagccaagaccgc

SEQ ID NO: 133487 - RNA, 32 nt, Human
cucgggcaucaguguccaggaguagcuguauu

SEQ ID NO: 133488 - RNA, 21 nt, Human
cucgggccacccucacccaga

SEQ ID NO: 133489 - RNA, 32 nt, Human
cucgggccagccugucuguugugcagacgccu

SEQ ID NO: 133490 - RNA, 32 nt, Human
cucgggccagggagguugaggcugcagugagc

SEQ ID NO: 133491 - RNA, 32 nt, Human
cucgggcccacuggguuaguucuguccacuca

SEQ ID NO: 133492 - RNA, 19 nt, Human
cucgggccccccgcugccg

SEQ ID NO: 133493 - RNA, 32 nt, Human
cucgggccccuccguucugucucccucgacuc

SEQ ID NO: 133494 - RNA, 32 nt, Human
cucgggcccugacccugacccuugccaccaac

SEQ ID NO: 133495 - RNA, 32 nt, Human
cucgggccgcccaggucacagagccugagcuu

SEQ ID NO: 133496 - RNA, 18 nt, Human
cucgggccgccgccgccg

SEQ ID NO: 133497 - RNA, 32 nt, Human
cucgggccgggaaacgcccucggcgcgcaccc

SEQ ID NO: 133498 - RNA, 22 nt, Human
cucgggccucuggcagcagcuu

SEQ ID NO: 133499 - RNA, 32 nt, Human
cucgggccugcaggcuguacaagcaugacacc

SEQ ID NO: 133500 - RNA, 32 nt, Human
cucgggccuggcccgccaugcccucagccugc

SEQ ID NO: 133501 - RNA, 32 nt, Human
cucgggccugggagcagcccauuaguggcaua

SEQ ID NO: 133502 - RNA, 32 nt, Human
cucgggccuguaaucccagcacuuucggaggc

SEQ ID NO: 133503 - RNA, 32 nt, Human
cucgggccuguucacauuggggucaaaggcac

SEQ ID NO: 133504 - RNA, 32 nt, Human
cucgggcggcgggcuccgggcccagccucgca

SEQ ID NO: 133505 - RNA, 23 nt, Human
cucgggcggggguguugcggugg

SEQ ID NO: 133506 - RNA, 32 nt, Human
cucgggcucccgcuccgucuccaccuccgccu

SEQ ID NO: 133507 - RNA, 32 nt, Human
cucgggcugcaagcacugcugcugggaugcag

SEQ ID NO: 133508 - RNA, 20 nt, Human
cucgggcugccgccgcugcc

SEQ ID NO: 133509 - RNA, 32 nt, Human
cucgggcugcggacucugccuccugggucuga

SEQ ID NO: 133510 - RNA, 32 nt, Human
cucgggcuggcacccauaugugcucaccaugu

SEQ ID NO: 133511 - RNA, 32 nt, Human
cucggggaacaucaccccagagcccagccuua

SEQ ID NO: 133512 - RNA, 32 nt, Human
cucggggaaguacaccugugugcccagcaaca

SEQ ID NO: 133513 - RNA, 32 nt, Human
cucggggacccuuugaaaagugccuggggacc

SEQ ID NO: 133514 - RNA, 32 nt, Human
cucggggagagaagaaaggagggggcaaggga

SEQ ID NO: 133515 - RNA, 32 nt, Human
cucggggagagggcgcgggggcgcuggggguu

SEQ ID NO: 133516 - RNA, 32 nt, Human
cucggggagcaacauggcagauaaucucagug

SEQ ID NO: 133517 - RNA, 32 nt, Human
cucggggagcccaggguaaaggcagcaguaau

SEQ ID NO: 133518 - RNA, 32 nt, Human
cucggggauaugacacaugcccaugugagaag

SEQ ID NO: 133519 - RNA, 32 nt, Human
cucggggaugcaugagaaggugagcugucacu

SEQ ID NO: 133520 - RNA, 32 nt, Human
cucggggaugcggauccaagacccugggaagg

SEQ ID NO: 133521 - RNA, 32 nt, Human
cucggggcaggggagaagaccacccaccugcu

SEQ ID NO: 133522 - RNA, 21 nt, Human
cucggggcgccgccgccgccg

SEQ ID NO: 133523 - RNA, 32 nt, Human
cucggggcuccuggcccugaaugugguguucc

SEQ ID NO: 133524 - RNA, 32 nt, Human
cucggggcuccugguggcagcaccaggggaca

SEQ ID NO: 133525 - RNA, 32 nt, Human
cucggggcugcaggcuggagugcagugggaca

SEQ ID NO: 133526 - RNA, 32 nt, Human
cucgggggagggugggucacuucgcggcgcuc

SEQ ID NO: 133527 - RNA, 32 nt, Human
cucgggggcaccgggccgcccacccacuccca

SEQ ID NO: 133528 - RNA, 32 nt, Human
cucgggggcaggagggcgaugcagcccccaag

SEQ ID NO: 133529 - RNA, 32 nt, Human
cucgggggccacagcggcucucacaccagcau

SEQ ID NO: 133530 - RNA, 24 nt, Human
cucggggggcagagguugcaguga

SEQ ID NO: 133531 - RNA, 32 nt, Human
cucggggguauuuucuggacauugaggugcua

SEQ ID NO: 133532 - RNA, 32 nt, Human
cucggggguggaggaggaagaaggggcacagc

SEQ ID NO: 133533 - RNA, 32 nt, Human
cucggggucccuggagggcaagcccugcccac

SEQ ID NO: 133534 - RNA, 32 nt, Human
cucggggucugaagacugucuuccuaucugcu

SEQ ID NO: 133535 - RNA, 32 nt, Human
cucggggugacggaauguucuggaccuugaua

SEQ ID NO: 133536 - RNA, 29 nt, Human
cucggggugcuuugggugccuggaauugg

SEQ ID NO: 133537 - RNA, 32 nt, Human
cucgggguggcacugguguugcuggcucagcu

SEQ ID NO: 133538 - RNA, 32 nt, Human
cucggggugucuuccccaaggcauguggcuca

SEQ ID NO: 133539 - RNA, 32 nt, Human
cucgggucacugcaaccuccgccucccggguu

SEQ ID NO: 133540 - RNA, 32 nt, Human
cucgggucacugcaaccucuaccuccaggguu

SEQ ID NO: 133541 - RNA, 32 nt, Human
cucgggucacugcaagcucugccucccaaguu

SEQ ID NO: 133542 - RNA, 32 nt, Human
cucgggucacugcagccucugucccuggguuc

SEQ ID NO: 133543 - RNA, 32 nt, Human
cucggguccuggugcaacuguccccucaguuc

SEQ ID NO: 133544 - RNA, 32 nt, Human
cucgggucucagagccaccagacgugcaggug

SEQ ID NO: 133545 - RNA, 32 nt, Human
cucgggucuccuccuccucguuugcugccucc

SEQ ID NO: 133546 - RNA, 32 nt, Human
cucgggucuguccuccccgucuggacccuccc

SEQ ID NO: 133547 - RNA, 32 nt, Human
cucgggugagauggugagaaggcguggcugag

SEQ ID NO: 133548 - RNA, 32 nt, Human
cucgggugccucuguuggcaaugaucaggcag

SEQ ID NO: 133549 - RNA, 32 nt, Human
cucggguggcugcuuaaguaacuuucaacucc

SEQ ID NO: 133550 - RNA, 24 nt, Human
cucgggugggggagguugcaauga

SEQ ID NO: 133551 - RNA, 19 nt, Human
cucggguuccgcgcugccg

SEQ ID NO: 133552 - RNA, 31 nt, Human
cucgguaaagagagagagggcugggaggaaa

SEQ ID NO: 133553 - RNA, 32 nt, Human
cucgguaauuuucuuuaugcaggagaguuuaa

SEQ ID NO: 133554 - RNA, 32 nt, Human
cucgguagugccugggcauccuggaacuuaug

SEQ ID NO: 133555 - RNA, 32 nt, Human
cucggucaccuaggcuggaguguaguggcgca

SEQ ID NO: 133556 - RNA, 25 nt, Human
cucggucacgugucccgggcgcuga

SEQ ID NO: 133557 - RNA, 24 nt, Human
cucggucacucaggaggcaguugg

SEQ ID NO: 133558 - RNA, 32 nt, Human
cucggucaucacccucuacaccauguuuguca

SEQ ID NO: 133559 - RNA, 32 nt, Human
cucggucccccacccauccacacacaccuaca

SEQ ID NO: 133560 - RNA, 32 nt, Human
cucgguccccgagggcccuggcccccgcugcg

SEQ ID NO: 133561 - RNA, 32 nt, Human
cucgguccccuaguccggccccggcuccgggc

SEQ ID NO: 133562 - RNA, 17 nt, Human
cucggucgccgcugccg

SEQ ID NO: 133563 - RNA, 32 nt, Human
cucggucgcucacaccuguaaacccaacacuu

SEQ ID NO: 133564 - RNA, 22 nt, Human
cucggucgcucccuggcgccgg

SEQ ID NO: 133565 - RNA, 25 nt, Human
cucggucguuaccgcgaggcgcugg

SEQ ID NO: 133566 - RNA, 32 nt, Human
cucggucuacagccacaaagcaaaccacaggg

SEQ ID NO: 133567 - RNA, 32 nt, Human
cucggucugagaggucggaggcugcgaguguc

SEQ ID NO: 133568 - RNA, 32 nt, Human
cucggucugucacccaggcuggagugcagugg

SEQ ID NO: 133569 - RNA, 32 nt, Human
cucggucuuucacccaggcuggagugcugugg

SEQ ID NO: 133570 - RNA, 32 nt, Human
cucggucuuugaguuaugggugcaacugaccu

SEQ ID NO: 133571 - RNA, 32 nt, Human
cucggugacacacauuuaugccaucugcucug

SEQ ID NO: 133572 - RNA, 32 nt, Human
cucggugacucacgucuguaaucccagcacuu

SEQ ID NO: 133573 - RNA, 32 nt, Human
cucggugcacuaggaagugaaucccgcaggac

SEQ ID NO: 133574 - RNA, 20 nt, Human
cucggugccacuggcucuca

SEQ ID NO: 133575 - RNA, 32 nt, Human
cucggugccgcuccgcacugcccggccggucu

SEQ ID NO: 133576 - RNA, 32 nt, Human
cucggugccugggcccagccccgugccccucc

SEQ ID NO: 133577 - RNA, 26 nt, Human
cucggugcucgcuccaucgggucugg

SEQ ID NO: 133578 - RNA, 32 nt, Human
cucggugcugcugcugcugcuccuggggcugc

SEQ ID NO: 133579 - RNA, 32 nt, Human
cucggugcuguggugcagagcuaguuccucuc

SEQ ID NO: 133580 - RNA, 32 nt, Human
cucgguggaguaguggaccagagcaggggagu

SEQ ID NO: 133581 - RNA, 32 nt, Human
cucgguggcacaugccuguaauccuagcacuu

SEQ ID NO: 133582 - RNA, 32 nt, Human
cucgguggccucggcucguucugccaucuccg

SEQ ID NO: 133583 - RNA, 32 nt, Human
cucgguggccugcaacagucagcacugaucua

SEQ ID NO: 133584 - RNA, 32 nt, Human
cucgguggcucaccccuggaaucccagcacuu

SEQ ID NO: 133585 - RNA, 32 nt, Human
cucgguggcucacgccuguaaucccagcacuu

SEQ ID NO: 133586 - RNA, 32 nt, Human
cucgguggcucaggccuguaaucccagcacuu

SEQ ID NO: 133587 - RNA, 32 nt, Human
cucgguggcucaugccuguaaucccaacacuu

SEQ ID NO: 133588 - RNA, 32 nt, Human
cucgguggcucaugccuguaauccuagcacuu

SEQ ID NO: 133589 - RNA, 32 nt, Human
cucgguggcucucgccuguaaucccagcacuu

SEQ ID NO: 133590 - RNA, 32 nt, Human
cucuggagcggguggagucagggaagagcuga

SEQ ID NO: 133591 - RNA, 32 nt, Human
cucuggagcuccaggaaauucgggcacaucau

SEQ ID NO: 133592 - RNA, 32 nt, Human
cucuggaggaacaggccugcugaggggagggg

SEQ ID NO: 133593 - RNA, 32 nt, Human
cucuggaggaggagaggcgcucugauuuuuag

SEQ ID NO: 133594 - RNA, 32 nt, Human
cucuggaggagguggcuccacgaugccuugau

SEQ ID NO: 133595 - RNA, 32 nt, Human
cucuggaggaugagagagaacauggccagggg

SEQ ID NO: 133596 - RNA, 32 nt, Human
cucuggaggcagcaggggaugccagagugaac

SEQ ID NO: 133597 - RNA, 32 nt, Human
cucuggaggcuaaggugggaggaucacuugau

SEQ ID NO: 133598 - RNA, 32 nt, Human
cucuggaggcugaggcgggagaauggugugaa

SEQ ID NO: 133599 - RNA, 32 nt, Human
cucuggaggcugaggugggaggauugcuuaag

SEQ ID NO: 133600 - RNA, 32 nt, Human
cucuggaggcugcagaccagccagauccacua

SEQ ID NO: 133601 - RNA, 32 nt, Human
cucuggaggcugggcuggagaaucacuugaac

SEQ ID NO: 133602 - RNA, 21 nt, Human
cucuggagggacagacaggcc

SEQ ID NO: 133603 - RNA, 21 nt, Human
cucuggagggcucuucugccu

SEQ ID NO: 133604 - RNA, 32 nt, Human
cucuggagguuuagcaggaggaucacuugagc

SEQ ID NO: 133605 - RNA, 32 nt, Human
cucuggaguagcugggauuacaggcacgcgcc

SEQ ID NO: 133606 - RNA, 18 nt, Human
cucuggagugcucacuaa

SEQ ID NO: 133607 - RNA, 32 nt, Human
cucuggagugcuggcugggacaggcaucucua

SEQ ID NO: 133608 - RNA, 32 nt, Human
cucuggaguggguggagggagggagcuacggg

SEQ ID NO: 133609 - RNA, 21 nt, Human
cucuggaguucagcagcaaca

SEQ ID NO: 133610 - RNA, 32 nt, Human
cucuggauccagugacagcaggugucaugggu

SEQ ID NO: 133611 - RNA, 22 nt, Human
cucuggauccccagaacaagaa

SEQ ID NO: 133612 - RNA, 32 nt, Human
cucuggaucccuaaaugaggcagaagccuuga

SEQ ID NO: 133613 - RNA, 32 nt, Human
cucuggaucucaguugucucaucuguaaaaag

SEQ ID NO: 133614 - RNA, 32 nt, Human
cucuggaugaagggaaagugugaagcucugug

SEQ ID NO: 133615 - RNA, 32 nt, Human
cucuggaugaccuugccaccucccucuccucc

SEQ ID NO: 133616 - RNA, 32 nt, Human
cucuggaugagggagaguggucgugagcuggu

SEQ ID NO: 133617 - RNA, 32 nt, Human
cucuggaugugucacuuggaccacugucagua

SEQ ID NO: 133618 - RNA, 32 nt, Human
cucuggauucacccucucacaccacagcugag

SEQ ID NO: 133619 - RNA, 24 nt, Human
cucuggauuccagcaccacagaca

SEQ ID NO: 133620 - RNA, 32 nt, Human
cucuggauucuucugcaaccagucccagauau

SEQ ID NO: 133621 - RNA, 32 nt, Human
cucuggauugaccacccacaaugcuuugagcu

SEQ ID NO: 133622 - RNA, 32 nt, Human
cucuggauuucucagagacuguucugcgauga

SEQ ID NO: 133623 - RNA, 32 nt, Human
cucuggauuugugaucugucuccuggaugauu

SEQ ID NO: 133624 - RNA, 32 nt, Human
cucuggcaagcacagccugagccauuccugcg

SEQ ID NO: 133625 - RNA, 32 nt, Human
cucuggcaagcuccccugacugugcaucccuc

SEQ ID NO: 133626 - RNA, 32 nt, Human
cucuggcacaaaaccuccuccucccaggcacu

SEQ ID NO: 133627 - RNA, 32 nt, Human
cucuggcacagcguucuugcucuaggaagaac

SEQ ID NO: 133628 - RNA, 32 nt, Human
cucuggcacccagccucugagggaaggaggga

SEQ ID NO: 133629 - RNA, 32 nt, Human
cucuggcacccagggaacagugugcgugucga

SEQ ID NO: 133630 - RNA, 31 nt, Human
cucuggcagagaguaauuuuguaggcaguuu

SEQ ID NO: 133631 - RNA, 32 nt, Human
cucuggcagcagcggggagaaugggagugcgg

SEQ ID NO: 133632 - RNA, 32 nt, Human
cucuggcagccauacggcaccaugaaguagcg

SEQ ID NO: 133633 - RNA, 21 nt, Human
cucuggcagccucuccugccu

SEQ ID NO: 133634 - RNA, 32 nt, Human
cucuggcagcuggccuucugcuucugaguugc

SEQ ID NO: 133635 - RNA, 32 nt, Human
cucuggcaguaggagcuaaggguggcacuaga

SEQ ID NO: 133636 - RNA, 32 nt, Human
cucuggcauucccuggccucucuggcugccac

SEQ ID NO: 133637 - RNA, 32 nt, Human
cucuggcauucugagaauuagacugaaaguuu

SEQ ID NO: 133638 - RNA, 32 nt, Human
cucuggcauuuggacacacaucacaugucgau

SEQ ID NO: 133639 - RNA, 32 nt, Human
cucuggccaagaggacgaggaucugggggugg

SEQ ID NO: 133640 - RNA, 24 nt, Human
cucuggccacaauccuccccacca

SEQ ID NO: 133641 - RNA, 18 nt, Human
cucuggccagcuggcuuc

SEQ ID NO: 133642 - RNA, 22 nt, Human
cucuggccauccuuuccugccu

SEQ ID NO: 133643 - RNA, 32 nt, Human
cucuggcccaagcuggagugcaguggcacgau

SEQ ID NO: 133644 - RNA, 28 nt, Human
cucuggcccacauaucuaucucuugccu

SEQ ID NO: 133645 - RNA, 32 nt, Human
cucuggcccaggaaauuccucccaggggccag

SEQ ID NO: 133646 - RNA, 24 nt, Human
cucuggcccaggcuagagugcagu

SEQ ID NO: 133647 - RNA, 32 nt, Human
cucuggcccaggcuagagugcaguggugcgau

SEQ ID NO: 133648 - RNA, 32 nt, Human
cucuggccccaguucguuuccucugcccacua

SEQ ID NO: 133649 - RNA, 26 nt, Human
cucuggccccugccgcgcuccugccu

SEQ ID NO: 133650 - RNA, 32 nt, Human
cucuggccccugcucuguccucccucuuacuc

SEQ ID NO: 133651 - RNA, 32 nt, Human
cucuggccccugguccuguccucuucuccagc

SEQ ID NO: 133652 - RNA, 32 nt, Human
cucuggcccgguauccugccuguccgcugcca

SEQ ID NO: 133653 - RNA, 32 nt, Human
cucuggcccuaagagguuuuuccucuuugcuc

SEQ ID NO: 133654 - RNA, 21 nt, Human
cucuggcccuaccagcaucca

SEQ ID NO: 133655 - RNA, 32 nt, Human
cucuggcccucccuuuuccuccacgaggauua

SEQ ID NO: 133656 - RNA, 32 nt, Human
cucuggcccucuaccauaccacuuccccagcc

SEQ ID NO: 133657 - RNA, 32 nt, Human
cucuggcccugccacaccaacacacuuucuau

SEQ ID NO: 133658 - RNA, 32 nt, Human
cucuggcccuggaacuugccugggcagaggca

SEQ ID NO: 133659 - RNA, 32 nt, Human
cucuggcccugggaacaggaggugcccugugu

SEQ ID NO: 133660 - RNA, 32 nt, Human
cucuggccgcaauuccagucugugcaucauga

SEQ ID NO: 133661 - RNA, 32 nt, Human
cucuggccgccacccccaucuuccaccugugc

SEQ ID NO: 133662 - RNA, 32 nt, Human
cucuggccgccccucccuccgacgaucgggga

SEQ ID NO: 133663 - RNA, 21 nt, Human
cucuggccgccgccuccucuu

SEQ ID NO: 133664 - RNA, 20 nt, Human
cucuggccuaggcuggcucc

SEQ ID NO: 133665 - RNA, 32 nt, Human
cucuggccucaagggagcauuggcagaaccau

SEQ ID NO: 133666 - RNA, 32 nt, Human
cucuggccucaguuucuuugcccauaaaaggg

SEQ ID NO: 133667 - RNA, 32 nt, Human
cucuggccuccacccucccccaacagcaggga

SEQ ID NO: 133668 - RNA, 32 nt, Human
cucuggccucccagauccccagcugccucacu

SEQ ID NO: 133669 - RNA, 32 nt, Human
cucuggccucccucuugcucccucucuggcca

SEQ ID NO: 133670 - RNA, 32 nt, Human
cucuggccuccgccuccgccagggagcggaag

SEQ ID NO: 133671 - RNA, 32 nt, Human
cucuggccuccucuuggcaucgccgagcaucc

SEQ ID NO: 133672 - RNA, 32 nt, Human
cucuggccuccuucugugccccuuuccccaag

SEQ ID NO: 133673 - RNA, 32 nt, Human
cucuggccucgccucugcuccuccaagcacag

SEQ ID NO: 133674 - RNA, 32 nt, Human
cucuggccucuacucucuccucccucuggcuc

SEQ ID NO: 133675 - RNA, 32 nt, Human
cucuggccucugcucuguccucccucuuccac

SEQ ID NO: 133676 - RNA, 32 nt, Human
cucuggccucugcucuguccucccucuugcuc

SEQ ID NO: 133677 - RNA, 19 nt, Human
cucuggccugccuagcaca

SEQ ID NO: 133678 - RNA, 18 nt, Human
cucuggccugcugguucc

SEQ ID NO: 133679 - RNA, 18 nt, Human
cucuggccuggcugccug

SEQ ID NO: 133680 - RNA, 32 nt, Human
cucuggccuugcugcuucucuccagcuccuga

SEQ ID NO: 133681 - RNA, 25 nt, Human
cucuggcgacgccucccacccacca

SEQ ID NO: 133682 - RNA, 26 nt, Human
cucuggcgcccaggcuggaguacagu

SEQ ID NO: 133683 - RNA, 32 nt, Human
cucuggcgcccaggcuggaguacaguggcaug

SEQ ID NO: 133684 - RNA, 32 nt, Human
cucuggcggcaccuggcccucagcugcaggga

SEQ ID NO: 133685 - RNA, 32 nt, Human
cucuggcggccgcccugcuccugcugcgucgu

SEQ ID NO: 133686 - RNA, 32 nt, Human
cucuggcuagugggaaggagggggugaacuaa

SEQ ID NO: 133687 - RNA, 32 nt, Human
cucuggcucaagacgggguggggaaggggcug

SEQ ID NO: 133688 - RNA, 32 nt, Human
cucuggcucaccgcaaccuccgccucccaggu

SEQ ID NO: 133689 - RNA, 32 nt, Human
cucuggcucacugcaaccucccugccugauuc

SEQ ID NO: 133690 - RNA, 32 nt, Human
cucuggcucagagcacccucccucccggcccc

SEQ ID NO: 133691 - RNA, 32 nt, Human
cucuggcucaguuuucucaucuguaaaaugag

SEQ ID NO: 133692 - RNA, 32 nt, Human
cucuggcucugccaccugcugcuccugugacc

SEQ ID NO: 133693 - RNA, 32 nt, Human
cucuggcucugccuacucauuuguagaggcac

SEQ ID NO: 133694 - RNA, 32 nt, Human
cucuggcucugccuccccuguuucucaggggc

SEQ ID NO: 133695 - RNA, 32 nt, Human
cucuggcucuggaaggagggaugaugaguggg

SEQ ID NO: 133696 - RNA, 21 nt, Human
cucuggcucuggcuguggcuc

SEQ ID NO: 133697 - RNA, 32 nt, Human
cucuggcugcaacccgcuggcucggaaaagau

SEQ ID NO: 133698 - RNA, 18 nt, Human
cucuggcugccuggcucc

SEQ ID NO: 133699 - RNA, 32 nt, Human
cucuggcugcugcuccaacucuggcagacacg

SEQ ID NO: 133700 - RNA, 32 nt, Human
cucuggcugggaagggggaagguaggagguga

SEQ ID NO: 133701 - RNA, 32 nt, Human
cucuggcugggagcagaaggcagccucggucu

SEQ ID NO: 133702 - RNA, 32 nt, Human
cucuggcuggugcugggccggagguggcuaug

SEQ ID NO: 133703 - RNA, 23 nt, Human
cucuggcugucuucuuccugucu

SEQ ID NO: 133704 - RNA, 32 nt, Human
cucuggcuguguggggagguggguggagaggu

SEQ ID NO: 133705 - RNA, 32 nt, Human
cucuggcuguuuagcuugagggcagcacagag

SEQ ID NO: 133706 - RNA, 19 nt, Human
cucuggcuuaugacuccug

SEQ ID NO: 133707 - RNA, 32 nt, Human
cucuggcuuccaacccaaucagccugcaucac

SEQ ID NO: 133708 - RNA, 32 nt, Human
cucuggcuuccuuucauugucuuaggccuuca

SEQ ID NO: 133709 - RNA, 32 nt, Human
cucuggcuugggguggugggaggcggggagcu

SEQ ID NO: 133710 - RNA, 32 nt, Human
cucuggcuuuuaauaaauacucauugguugaa

SEQ ID NO: 133711 - RNA, 23 nt, Human
cucugggaaauuccaucucuugc

SEQ ID NO: 133712 - RNA, 32 nt, Human
cucugggaaccagcaccugagucacagcuguc

SEQ ID NO: 133713 - RNA, 32 nt, Human
cucugggaagccaaggcaggcagaucacuuga

SEQ ID NO: 133714 - RNA, 22 nt, Human
cucugggaaggugaccuggcca

SEQ ID NO: 133715 - RNA, 25 nt, Human
cucugggaauggucgcuuccuguuu

SEQ ID NO: 133716 - RNA, 32 nt, Human
cucugggacagaggaaaaauuggcaagguuga

SEQ ID NO: 133717 - RNA, 21 nt, Human
cucugggacgcgugccgcgca

SEQ ID NO: 133718 - RNA, 32 nt, Human
cucugggacggguggccagcugccaucaggcc

SEQ ID NO: 133719 - RNA, 32 nt, Human
cucugggagaggaaggaagagggagggagcaa

SEQ ID NO: 133720 - RNA, 32 nt, Human
cucugggagagggagauagcacuggagaaggu

SEQ ID NO: 133721 - RNA, 32 nt, Human
cucugggagcaagaagaaaaccuaugcaugua

SEQ ID NO: 133722 - RNA, 32 nt, Human
cucugggagccuuggcccugcucacagagaga

SEQ ID NO: 133723 - RNA, 32 nt, Human
cucugggaggccaaggugggcagaucacgagg

SEQ ID NO: 133724 - RNA, 32 nt, Human
cucugggaggcugagacagguagaucauuuga

SEQ ID NO: 133725 - RNA, 32 nt, Human
cucugggaggcugaggcaggaggaucacuuga

SEQ ID NO: 133726 - RNA, 32 nt, Human
cucugggaggcugaggcgggcagaucaccuga

SEQ ID NO: 133727 - RNA, 32 nt, Human
cucugggaggcugaggcggguggaucacgagg

SEQ ID NO: 133728 - RNA, 32 nt, Human
cucugggaggcugaggcggguggaucacuuga

SEQ ID NO: 133729 - RNA, 32 nt, Human
cucugggagggcccugaggacucccacccuca

SEQ ID NO: 133730 - RNA, 32 nt, Human
cucugggagguaauaugggggucugggaaacu

SEQ ID NO: 133731 - RNA, 32 nt, Human
cucugggaucagcaggucauaucuggugccca

SEQ ID NO: 133732 - RNA, 23 nt, Human
cucugggaugagaaacaagaaug

SEQ ID NO: 133733 - RNA, 32 nt, Human
cucugggaugugccccuccaccaccucuccau

SEQ ID NO: 133734 - RNA, 32 nt, Human
cucugggauugcagaggguguugcugucaugg

SEQ ID NO: 133735 - RNA, 32 nt, Human
cucugggcaaagccccucacacugcaagggau

SEQ ID NO: 133736 - RNA, 32 nt, Human
cucugggcaaagcggagccaaaauaaccaaca

SEQ ID NO: 133737 - RNA, 32 nt, Human
cucugggcacagauucugguggcucccugcug

SEQ ID NO: 133738 - RNA, 32 nt, Human
cucugggcaccuccagcuccugcucgccggac

SEQ ID NO: 133739 - RNA, 32 nt, Human
cucugggcacgugcugcagcuguggcugaggc

SEQ ID NO: 133740 - RNA, 32 nt, Human
cucugggcagagaaacaaagcucuauaugcac

SEQ ID NO: 133741 - RNA, 32 nt, Human
cucugggcagaggcccaucugcucuguuuaca

SEQ ID NO: 133742 - RNA, 32 nt, Human
cucugggcagcuacagaggagggucaucccug

SEQ ID NO: 133743 - RNA, 32 nt, Human
cucugggccacucgcccucucccuucgugugu

SEQ ID NO: 133744 - RNA, 20 nt, Human
cucugggccaugccaggcca

SEQ ID NO: 133745 - RNA, 32 nt, Human
cucugggccaugccaggccagagcaguggccc

SEQ ID NO: 133746 - RNA, 32 nt, Human
cucugggccauggacaggccuaaauuuagcua

SEQ ID NO: 133747 - RNA, 23 nt, Human
cucugggcccaaaacuccugccu

SEQ ID NO: 133748 - RNA, 22 nt, Human
cucugggcccagcuccuggcca

SEQ ID NO: 133749 - RNA, 23 nt, Human
cucugggcccaggggcuguggcc

SEQ ID NO: 133750 - RNA, 32 nt, Human
cucugggccccuucuucccccuucccucaaac

SEQ ID NO: 133751 - RNA, 21 nt, Human
cucugggccggccuucugccu

SEQ ID NO: 133752 - RNA, 22 nt, Human
cucugggccucuccuccugcuu

SEQ ID NO: 133753 - RNA, 32 nt, Human
cucugggccucugaccagcugugcggcauggg

SEQ ID NO: 133754 - RNA, 20 nt, Human
cucugggccugcuggcuccu

SEQ ID NO: 133755 - RNA, 32 nt, Human
cucugggccuguggcaccaucugugccucagc

SEQ ID NO: 133756 - RNA, 32 nt, Human
cucugggccuucagaaccuuugcccccuccuu

SEQ ID NO: 133757 - RNA, 32 nt, Human
cucugggcgggccgugggaggcuuccugaggu

SEQ ID NO: 133758 - RNA, 32 nt, Human
cucugggcucaagcaauccucucaccucagcc

SEQ ID NO: 133759 - RNA, 32 nt, Human
cucugggcucaagcaauucacucgccucggcc

SEQ ID NO: 133760 - RNA, 32 nt, Human
cucugggcucacugcaaccuucaccuccaggu

SEQ ID NO: 133761 - RNA, 22 nt, Human
cucugggcucacuugccugccu

SEQ ID NO: 133762 - RNA, 21 nt, Human
cucugggcucagagagaggcc

SEQ ID NO: 133763 - RNA, 32 nt, Human
cucugggcucagccacucccuccagucucaag

SEQ ID NO: 133764 - RNA, 32 nt, Human
cucugggcuccagggauaaagcaggucuuggg

SEQ ID NO: 133765 - RNA, 32 nt, Human
cucugggcucucgcuccacuugcccuucccag

SEQ ID NO: 133766 - RNA, 32 nt, Human
cucugggcucuggccucaggcccacuaaugau

SEQ ID NO: 133767 - RNA, 32 nt, Human
cucugggcugagaaggaugcacuuuggacaag

SEQ ID NO: 133768 - RNA, 32 nt, Human
cucugggcugaggagcucagugggugggagga

SEQ ID NO: 133769 - RNA, 32 nt, Human
cucugggcugcagagucugccccacauguggc

SEQ ID NO: 133770 - RNA, 25 nt, Human
cucugggcugcuccaggccaggcca

SEQ ID NO: 133771 - RNA, 32 nt, Human
cucugggcugggucuccgccuccaggguucug

SEQ ID NO: 133772 - RNA, 32 nt, Human
cucugggcuguaauccuagacccaggacaugg

SEQ ID NO: 133773 - RNA, 32 nt, Human
cucugggcuguguuuaugagcaucacccagau

SEQ ID NO: 133774 - RNA, 32 nt, Human
cucugggcuuccucggagaccccuggggaugg

SEQ ID NO: 133775 - RNA, 22 nt, Human
cucugggcuuugugccagacca

SEQ ID NO: 133776 - RNA, 23 nt, Human
cucuggggaaggaacagcaagaa

SEQ ID NO: 133777 - RNA, 32 nt, Human
cucuggggaccccuggccaaugcuguggcucg

SEQ ID NO: 133778 - RNA, 25 nt, Human
cucuggggacuccuaauuucugcuu

SEQ ID NO: 133779 - RNA, 32 nt, Human
cucuggggaggaagacagagaauaaggggaca

SEQ ID NO: 133780 - RNA, 32 nt, Human
cucuggggaggcagcgcuggcggcggggcugg

SEQ ID NO: 133781 - RNA, 32 nt, Human
cucuggggaguaccuggaagaggucagcuucu

SEQ ID NO: 133782 - RNA, 32 nt, Human
cucuggggaugaagaacccuccccagcuggaa

SEQ ID NO: 133783 - RNA, 32 nt, Human
cucuggggcaacucucacaucuugcugcaugu

SEQ ID NO: 133784 - RNA, 16 nt, Human
cucuggggcaggaagc

SEQ ID NO: 133785 - RNA, 32 nt, Human
cucuggggccacugugcuuucugcugugugca

SEQ ID NO: 133786 - RNA, 32 nt, Human
cucuggggccagucgagagccacugagggacc

SEQ ID NO: 133787 - RNA, 32 nt, Human
cucuggggccaucaccagugaggucaagcgga

SEQ ID NO: 133788 - RNA, 25 nt, Human
cucuggggcccacucucuucugucu

SEQ ID NO: 133789 - RNA, 32 nt, Human
cucuggggcccaggggaugcaagucagaacug

SEQ ID NO: 133790 - RNA, 24 nt, Human
cucuggggccgggccucgcugcuu

SEQ ID NO: 133791 - RNA, 23 nt, Human
cucuggggccucggucaacacgc

SEQ ID NO: 133792 - RNA, 26 nt, Human
cucuggggccugaacugccucugcuu

SEQ ID NO: 133793 - RNA, 32 nt, Human
cucuggggccugauuaaauaaggcuguuuuga

SEQ ID NO: 133794 - RNA, 21 nt, Human
cucuggggccugccccugccu

SEQ ID NO: 133795 - RNA, 21 nt, Human
cucuggggcuaccuggcuccu

SEQ ID NO: 133796 - RNA, 32 nt, Human
cucuggggcucuacagaaacaggcuggguucc

SEQ ID NO: 133797 - RNA, 19 nt, Human
cucuggggcugccucuugc

SEQ ID NO: 133798 - RNA, 21 nt, Human
cucugggggaacuuugugucu

SEQ ID NO: 133799 - RNA, 32 nt, Human
cucugggggagggagacggcagcggcauggcg

SEQ ID NO: 133800 - RNA, 32 nt, Human
cucugggggaucccccagcugaaggaggcugg

SEQ ID NO: 133801 - RNA, 32 nt, Human
cucugggggauuugaaccggucugucuucacu

SEQ ID NO: 133802 - RNA, 32 nt, Human
cucugggggauuugaggguagaggcaggggaa

SEQ ID NO: 133803 - RNA, 21 nt, Human
cucugggggcagcucuugucu

SEQ ID NO: 133804 - RNA, 32 nt, Human
cucugggggcagggagccuggccaggccugag

SEQ ID NO: 133805 - RNA, 23 nt, Human
cucugggggcaguaccccugccu

SEQ ID NO: 133806 - RNA, 32 nt, Human
cucugggggcccagccugccuuuggccgcucc

SEQ ID NO: 133807 - RNA, 26 nt, Human
cucugggguacugugacuucuugccu

SEQ ID NO: 133808 - RNA, 25 nt, Human
cucuggggucucuugcugcuugccu

SEQ ID NO: 133809 - RNA, 21 nt, Human
cucuggggugaccuuucugcu

SEQ ID NO: 133810 - RNA, 26 nt, Human
cucuggggugcagaaaccucuugccu

SEQ ID NO: 133811 - RNA, 22 nt, Human
cucugggguggagaagagcagc

SEQ ID NO: 133812 - RNA, 22 nt, Human
cucugggguggaugccaggaca

SEQ ID NO: 133813 - RNA, 28 nt, Human
cucugggguggugcucgccuaccugccu

SEQ ID NO: 133814 - RNA, 24 nt, Human
cucugggguuaccccugucugcuu

SEQ ID NO: 133815 - RNA, 22 nt, Human
cucugggguucagcuucugucu

SEQ ID NO: 133816 - RNA, 22 nt, Human
cucugggguucuaauucuggcu

SEQ ID NO: 133817 - RNA, 32 nt, Human
cucugggguucucuuuucuauucacaagaggg

SEQ ID NO: 133818 - RNA, 32 nt, Human
cucugggguuggcagagaugaguggccauauc

SEQ ID NO: 133819 - RNA, 24 nt, Human
cucugggguuucccucuucucucu

SEQ ID NO: 133820 - RNA, 23 nt, Human
cucugggguuuuuaaggcuggcu

SEQ ID NO: 133821 - RNA, 23 nt, Human
cucugggguuuuuacuguuaccu

SEQ ID NO: 133822 - RNA, 24 nt, Human
cucugggguuuuuuguuuuuguuu

SEQ ID NO: 133823 - RNA, 32 nt, Human
cucuggguaaggacgagaagagccaagguccg

SEQ ID NO: 133824 - RNA, 31 nt, Human
cucugggucagaccugagguuggggaaggcg

SEQ ID NO: 133825 - RNA, 32 nt, Human
cucugggucaucucucacacauuccaggacca

SEQ ID NO: 133826 - RNA, 32 nt, Human
cucuggguccccuccagccagcucuuuggcgg

SEQ ID NO: 133827 - RNA, 22 nt, Human
cucugggucuccgcuuucuccu

SEQ ID NO: 133828 - RNA, 32 nt, Human
cucugggugaugucugucugcugccaggaugg

SEQ ID NO: 133829 - RNA, 25 nt, Human
cucugggugcacccccugccuacca

SEQ ID NO: 133830 - RNA, 32 nt, Human
cucugggugcaguagugagcaggacggguacc

SEQ ID NO: 133831 - RNA, 32 nt, Human
cucugggugcucauggaaucagcugcugcccu

SEQ ID NO: 133832 - RNA, 32 nt, Human
cucuggguggcacuaccaggugccccacggua

SEQ ID NO: 133833 - RNA, 32 nt, Human
cucuggguggcagaggguacaggguccugagg

SEQ ID NO: 133834 - RNA, 32 nt, Human
cucuggguggugaggcgagcgucugcccuccg

SEQ ID NO: 133835 - RNA, 17 nt, Human
cucuggguguacgugua

SEQ ID NO: 133836 - RNA, 32 nt, Human
cucuggguucaagcaauucuucugccucagcc

SEQ ID NO: 133837 - RNA, 32 nt, Human
cucuggguucaagugauucuccugccucagcc

SEQ ID NO: 133838 - RNA, 32 nt, Human
cucuggguugacugcauuucuagacucucgcc

SEQ ID NO: 133839 - RNA, 32 nt, Human
cucugguacccagggagcuggcuggucugugg

SEQ ID NO: 133840 - RNA, 32 nt, Human
cucugguacucaggcuggagugcgguggugug

SEQ ID NO: 133841 - RNA, 32 nt, Human
cucugguacucagggagcuggcuggucugugg

SEQ ID NO: 133842 - RNA, 32 nt, Human
cucugguagcuccaggaggccugugauccagc

SEQ ID NO: 133843 - RNA, 22 nt, Human
cucugguagcugggauuacagg

SEQ ID NO: 133844 - RNA, 19 nt, Human
cucuggucagcugguccag

SEQ ID NO: 133845 - RNA, 32 nt, Human
cucuggucaggaacccucagggacccaggaac

SEQ ID NO: 133846 - RNA, 32 nt, Human
cucuggucauaaggaacccccacggugcgugg

SEQ ID NO: 133847 - RNA, 32 nt, Human
cucuggucaucccuccccacccucucuccaag

SEQ ID NO: 133848 - RNA, 32 nt, Human
cucuggucauuguguccaaccacacaccccac

SEQ ID NO: 133849 - RNA, 20 nt, Human
cucugguccaggagaaacca

SEQ ID NO: 133850 - RNA, 20 nt, Human
cucugguccaucuugggcau

SEQ ID NO: 133851 - RNA, 32 nt, Human
cucuggucccuccaaaagccgacgaauccaca

SEQ ID NO: 133852 - RNA, 19 nt, Human
cucugguccuugcagcaca

SEQ ID NO: 133853 - RNA, 32 nt, Human
cucuggucgcugaccccagucugccuccacau

SEQ ID NO: 133854 - RNA, 32 nt, Human
cucuggucguccucauugcuacacucccacca

SEQ ID NO: 133855 - RNA, 32 nt, Human
cucuggucucaaacuccugggcucaaccaauc

SEQ ID NO: 133856 - RNA, 32 nt, Human
cucuggucucaauuuaaaaugauccauggcca

SEQ ID NO: 133857 - RNA, 32 nt, Human
cucuggucucagggacuacaacagcugcaccg

SEQ ID NO: 133858 - RNA, 21 nt, Human
cucuggucucaucacuugccu

SEQ ID NO: 133859 - RNA, 32 nt, Human
cucuggucucccagcaccuggcccagguaaca

SEQ ID NO: 133860 - RNA, 32 nt, Human
cucuggucuccccuccuuagccaaguccuuug

SEQ ID NO: 133861 - RNA, 32 nt, Human
cucuggucucucucaccccugccccuuagagu

SEQ ID NO: 133862 - RNA, 32 nt, Human
cucuggucugucaaucucagccaccuguuuga

SEQ ID NO: 133863 - RNA, 32 nt, Human
cucuggugagccaucuccagccacagccagaa

SEQ ID NO: 133864 - RNA, 32 nt, Human
cucuggugagcgaggacauucucugaccuacu

SEQ ID NO: 133865 - RNA, 32 nt, Human
cucuggugaggguggugcagaucaucauggug

SEQ ID NO: 133866 - RNA, 32 nt, Human
cucuggugcauuuugcaagaugagcacaaacu

SEQ ID NO: 133867 - RNA, 32 nt, Human
cucuggugcgggcagaucccugccauuuaggu

SEQ ID NO: 133868 - RNA, 32 nt, Human
cucuggugcugccagagagaagguugucagcu

SEQ ID NO: 133869 - RNA, 32 nt, Human
cucuggugcugugaugccccaggagaguccua

SEQ ID NO: 133870 - RNA, 32 nt, Human
cucugguggcggcgguggaggcugaggcggcg

SEQ ID NO: 133871 - RNA, 32 nt, Human
cucugguggcuagccuguccugacaggggaga

SEQ ID NO: 133872 - RNA, 32 nt, Human
cucuggugggagagggagacagauggaggcag

SEQ ID NO: 133873 - RNA, 26 nt, Human
cucugguguccaggcuggagugcagu

SEQ ID NO: 133874 - RNA, 32 nt, Human
cucuggugucugagacagaaccaaagcaauaa

SEQ ID NO: 133875 - RNA, 21 nt, Human
cucuggugucugcuggcuccu

SEQ ID NO: 133876 - RNA, 29 nt, Human
cucuggugucuguuguggcugugggaucc

SEQ ID NO: 133877 - RNA, 32 nt, Human
cucugguguguggagacuggagagaucaagag

SEQ ID NO: 133878 - RNA, 31 nt, Human
cucugguguguggauggauggguggauggag

SEQ ID NO: 133879 - RNA, 32 nt, Human
cucugguguucagugaggaggacaugugaguc

SEQ ID NO: 133880 - RNA, 32 nt, Human
cucugguguuggcuggaaucuucugaggggau

SEQ ID NO: 133881 - RNA, 32 nt, Human
cucugguuaucuaauauguaacaagccacccc

SEQ ID NO: 133882 - RNA, 32 nt, Human
cucugguucaacaaaaggggccugaaaacauc

SEQ ID NO: 133883 - RNA, 32 nt, Human
cucugguucacuauuucaaugauaugaaggag

SEQ ID NO: 133884 - RNA, 32 nt, Human
cucugguucccagcaccugccugagaccugcc

SEQ ID NO: 133885 - RNA, 32 nt, Human
cucugguucccugcagacaggaaagguugucc

SEQ ID NO: 133886 - RNA, 32 nt, Human
cucugguuccucacuccuccugccuccacccc

SEQ ID NO: 133887 - RNA, 32 nt, Human
cucugguuccuccuucuccucagaagaugaac

SEQ ID NO: 133888 - RNA, 32 nt, Human
cucugguucucccacacucccacccacugaca

SEQ ID NO: 133889 - RNA, 32 nt, Human
cucugguugcccaggcuggagugcaguggugc

SEQ ID NO: 133890 - RNA, 32 nt, Human
cucugguugcccaggcugggguacaguggugg

SEQ ID NO: 133891 - RNA, 32 nt, Human
cucugguuuaaucaugaugcauggagcuacaa

SEQ ID NO: 133892 - RNA, 32 nt, Human
cucuguaaaauaggcagaaaugguuuuagugu

SEQ ID NO: 133893 - RNA, 22 nt, Human
cucuguaaccaccucucugucu

SEQ ID NO: 133894 - RNA, 32 nt, Human
cucuguaaccaccucucugucuuuuuccuucc

SEQ ID NO: 133895 - RNA, 32 nt, Human
cucuguaacccaggcuggagugcaguggccug

SEQ ID NO: 133896 - RNA, 32 nt, Human
cucuguaacucaggcuggagugcaguggcgcg

SEQ ID NO: 133897 - RNA, 32 nt, Human
cucuguaacuucuuucugggggauuggggugg

SEQ ID NO: 133898 - RNA, 32 nt, Human
cucuguaagccacuacagauuccucuuuuugg

SEQ ID NO: 133899 - RNA, 21 nt, Human
cucuguaaggaccuggggcag

SEQ ID NO: 133900 - RNA, 32 nt, Human
cucuguaaugauguugcuauccauucgaucaa

SEQ ID NO: 133901 - RNA, 32 nt, Human
cucuguacacagauucuccuugugcuaugugg

SEQ ID NO: 133902 - RNA, 32 nt, Human
cucuguacauuugcuagcuuguaguuuucuaa

SEQ ID NO: 133903 - RNA, 32 nt, Human
cucuguaccaacaauauacagacuuuacagua

SEQ ID NO: 133904 - RNA, 32 nt, Human
cucuguaccagagaagugcuaggcuucauaaa

SEQ ID NO: 133905 - RNA, 24 nt, Human
cucuguaccuaccaucuccugccu

SEQ ID NO: 133906 - RNA, 32 nt, Human
cucuguacuaauggaggaagggcagagagauu

SEQ ID NO: 133907 - RNA, 32 nt, Human
cucuguacucagcccucugucuguccuucuga

SEQ ID NO: 133908 - RNA, 32 nt, Human
cucuguacucaguugguucucaguuagcuggu

SEQ ID NO: 133909 - RNA, 23 nt, Human
cucuguacucuagucuccugccu

SEQ ID NO: 133910 - RNA, 32 nt, Human
cucuguacugcacugcaucaggagucaggaga

SEQ ID NO: 133911 - RNA, 32 nt, Human
cucuguacuggaggcucuguucugccucuuau

SEQ ID NO: 133912 - RNA, 32 nt, Human
cucuguacuucccauggugauuuugaggagca

SEQ ID NO: 133913 - RNA, 32 nt, Human
cucuguacuuccucuuggcccaucucacuucc

SEQ ID NO: 133914 - RNA, 32 nt, Human
cucuguagaccaggcuggagcgcaguggcagg

SEQ ID NO: 133915 - RNA, 32 nt, Human
cucuguagauuugcuuauucuggucauuucau

SEQ ID NO: 133916 - RNA, 26 nt, Human
cucuguagcacaggcuggauugcagu

SEQ ID NO: 133917 - RNA, 32 nt, Human
cucuguagccagacugccucucuagauuccuc

SEQ ID NO: 133918 - RNA, 32 nt, Human
cucuguagcccaggccagagugcaguggcgcg

SEQ ID NO: 133919 - RNA, 32 nt, Human
cucuguagcccaggcuggagugcaguguggca

SEQ ID NO: 133920 - RNA, 32 nt, Human
cucuguagcccagucuggagugcagugguaca

SEQ ID NO: 133921 - RNA, 32 nt, Human
cucuguagcccagucuggagugcaguggugug

SEQ ID NO: 133922 - RNA, 32 nt, Human
cucuguagggcaccucccucucuuucaggggc

SEQ ID NO: 133923 - RNA, 32 nt, Human
cucuguagggcugaaggccgcccgagguucgc

SEQ ID NO: 133924 - RNA, 22 nt, Human
cucuguaguuccccagacucuu

SEQ ID NO: 133925 - RNA, 32 nt, Human
cucuguaguucugcuuucuauugaaccaagau

SEQ ID NO: 133926 - RNA, 23 nt, Human
cucuguaucccccagacuaucug

SEQ ID NO: 133927 - RNA, 20 nt, Human
cucuguauccccggcuccug

SEQ ID NO: 133928 - RNA, 32 nt, Human
cucuguaucuagcucaagguuuguaacacacc

SEQ ID NO: 133929 - RNA, 32 nt, Human
cucuguaugaaaaccuccagaaacccagacuc

SEQ ID NO: 133930 - RNA, 32 nt, Human
cucuguaugugccccgcgcauuuccuuggccu

SEQ ID NO: 133931 - RNA, 32 nt, Human
cucugucaaccaggcuggagugcacuggcgca

SEQ ID NO: 133932 - RNA, 32 nt, Human
cucugucaaccaggcuggagugcagugacucu

SEQ ID NO: 133933 - RNA, 32 nt, Human
cucugucaacgcagacuggagugcaguggcac

SEQ ID NO: 133934 - RNA, 32 nt, Human
cucugucacacaggagcagacaaggaucauuc

SEQ ID NO: 133935 - RNA, 26 nt, Human
cucugucacacaggcuggagggcagu

SEQ ID NO: 133936 - RNA, 26 nt, Human
cucugucacacaggcuggagugcagu

SEQ ID NO: 133937 - RNA, 32 nt, Human
cucugucacacaggcuggagugcaguacaauu

SEQ ID NO: 133938 - RNA, 32 nt, Human
cucugucacacaggcuggagugcaguggcacg

SEQ ID NO: 133939 - RNA, 32 nt, Human
cucugucacacaggcuggagugcaguggugug

SEQ ID NO: 133940 - RNA, 31 nt, Human
cucugucacagcuaaaagauuucaguagccu

SEQ ID NO: 133941 - RNA, 31 nt, Human
cucugucacagcuagucaacccugccauuuu

SEQ ID NO: 133942 - RNA, 32 nt, Human
cucugucaccaaggcuggagugcagcggugug

SEQ ID NO: 133943 - RNA, 32 nt, Human
cucugucaccaaggcuggagugcaggggcaca

SEQ ID NO: 133944 - RNA, 32 nt, Human
cucugucaccaaggcuggagugcauuggugca

SEQ ID NO: 133945 - RNA, 25 nt, Human
cucugucaccagacuggagugcagu

SEQ ID NO: 133946 - RNA, 25 nt, Human
cucugucaccaggccggagugcagu

SEQ ID NO: 133947 - RNA, 25 nt, Human
cucugucaccaggcuagagugcagu

SEQ ID NO: 133948 - RNA, 25 nt, Human
cucugucaccaggcuggaaugcagu

SEQ ID NO: 133949 - RNA, 25 nt, Human
cucugucaccaggcuggagggcagu

SEQ ID NO: 133950 - RNA, 25 nt, Human
cucugucaccaggcuggaguacagu

SEQ ID NO: 133951 - RNA, 24 nt, Human
cucugucaccaggcuggagugcag

SEQ ID NO: 133952 - RNA, 25 nt, Human
cucugucaccaggcuggagugcagu

SEQ ID NO: 133953 - RNA, 32 nt, Human
cucugucaccaggcuggagugcagugacacga

SEQ ID NO: 133954 - RNA, 32 nt, Human
cucugucacccaagauggagugcaauggcacg

SEQ ID NO: 133955 - RNA, 32 nt, Human
cucugucacccaagcuauggugcaguggcaca

SEQ ID NO: 133956 - RNA, 32 nt, Human
cucugucacccaagcuggagugcacuggcaug

SEQ ID NO: 133957 - RNA, 26 nt, Human
cucugucacccaagcuggagugcagu

SEQ ID NO: 133958 - RNA, 32 nt, Human
cucugucacccaagcuggagugcaguggcacg

SEQ ID NO: 133959 - RNA, 32 nt, Human
cucugucacccaagcuggagugcaguggugca

SEQ ID NO: 133960 - RNA, 32 nt, Human
cucugucacccaagcuggugugcaguggugug

SEQ ID NO: 133961 - RNA, 32 nt, Human
cucugucacccaaggcggagugcagugacgac

SEQ ID NO: 133962 - RNA, 26 nt, Human
cucugucacccaaguuggagugcagu

SEQ ID NO: 133963 - RNA, 32 nt, Human
cucugucacccaaguuggagugcaguggcccc

SEQ ID NO: 133964 - RNA, 32 nt, Human
cucugucacccacgcuggagugcugugaugcg

SEQ ID NO: 133965 - RNA, 26 nt, Human
cucugucacccagacuagagugcagu

SEQ ID NO: 133966 - RNA, 32 nt, Human
cucugucacccagacuagagugcaguggcacg

SEQ ID NO: 133967 - RNA, 32 nt, Human
cucugucacccagacuggaacacaguggcacg

SEQ ID NO: 133968 - RNA, 32 nt, Human
cucugucacccagacuggaguacaaugacaca

SEQ ID NO: 133969 - RNA, 32 nt, Human
cucugucacccagacuggagugcaauggcuug

SEQ ID NO: 133970 - RNA, 26 nt, Human
cucugucacccagacuggagugcagu

SEQ ID NO: 133971 - RNA, 32 nt, Human
cucugucacccagacuggagugcagugccaca

SEQ ID NO: 133972 - RNA, 32 nt, Human
cucugucacccagacuggagugcaguggcaca

SEQ ID NO: 133973 - RNA, 32 nt, Human
cucugucacccagacuggagugcaguggcacg

SEQ ID NO: 133974 - RNA, 32 nt, Human
cucugucacccagacuggagugcaguggcaug

SEQ ID NO: 133975 - RNA, 32 nt, Human
cucugucacccagacuggagugcaguggcgcg

SEQ ID NO: 133976 - RNA, 32 nt, Human
cucugucacccagacuggagugcaguggugcg

SEQ ID NO: 133977 - RNA, 32 nt, Human
cucugucacccagacuggagugcaguggugug

SEQ ID NO: 133978 - RNA, 32 nt, Human
cucugucacccagccuggaauguaguggcauc

SEQ ID NO: 133979 - RNA, 32 nt, Human
cucugucacccaggauggagagcacuggcaca

SEQ ID NO: 133980 - RNA, 32 nt, Human
cucugucacccaggauggagugcaguguugug

SEQ ID NO: 133981 - RNA, 26 nt, Human
cucugucacccaggcaggagugcagu

SEQ ID NO: 133982 - RNA, 32 nt, Human
cucugucacccaggcaggagugcaguggcaca

SEQ ID NO: 133983 - RNA, 32 nt, Human
cucugucacccaggccaaguucaauggugcaa

SEQ ID NO: 133984 - RNA, 32 nt, Human
cucugucacccaggccggagugcaguggugcg

SEQ ID NO: 133985 - RNA, 32 nt, Human
cucugucacccaggcgggaguggugcaauggc

SEQ ID NO: 133986 - RNA, 32 nt, Human
cucugucacccaggcgggaguuagguggcaug

SEQ ID NO: 133987 - RNA, 26 nt, Human
cucugucacccaggcuagaaugcagu

SEQ ID NO: 133988 - RNA, 32 nt, Human
cucugucacccaggcuagaggguggugauaua

SEQ ID NO: 133989 - RNA, 24 nt, Human
cucugucacccaggcuagagugca

SEQ ID NO: 133990 - RNA, 32 nt, Human
cucugucacccaggcuagagugcaauggcacc

SEQ ID NO: 133991 - RNA, 32 nt, Human
cucugucacccaggcuagagugcaauggcacg

SEQ ID NO: 133992 - RNA, 32 nt, Human
cucugucacccaggcuagagugcaauggcaug

SEQ ID NO: 133993 - RNA, 26 nt, Human
cucugucacccaggcuagagugcagu

SEQ ID NO: 133994 - RNA, 32 nt, Human
cucugucacccaggcuagagugcaguagcacg

SEQ ID NO: 133995 - RNA, 32 nt, Human
cucugucacccaggcuagagugcaguggagcg

SEQ ID NO: 133996 - RNA, 32 nt, Human
cucugucacccaggcuagagugcaguggcgcg

SEQ ID NO: 133997 - RNA, 26 nt, Human
cucugucacccaggcugaagugcagu

SEQ ID NO: 133998 - RNA, 32 nt, Human
cucugucacccaggcugaagugcaguggagca

SEQ ID NO: 133999 - RNA, 32 nt, Human
cucugucacccaggcugaagugcagugguaca

SEQ ID NO: 134000 - RNA, 24 nt, Human
cucugucacccaggcugcagugca

SEQ ID NO: 134001 - RNA, 32 nt, Human
cucugucacccaggcugcagugcaauggcgcg

SEQ ID NO: 134002 - RNA, 32 nt, Human
cucugucacccaggcugcaguguaguggugca

SEQ ID NO: 134003 - RNA, 32 nt, Human
cucugucacccaggcugcaguucacuggugug

SEQ ID NO: 134004 - RNA, 26 nt, Human
cucugucacccaggcuggaauccagu

SEQ ID NO: 134005 - RNA, 32 nt, Human
cucugucacccaggcuggaauccaguggcacu

SEQ ID NO: 134006 - RNA, 32 nt, Human
cucugucacccaggcuggaaugacgaagugaa

SEQ ID NO: 134007 - RNA, 26 nt, Human
cucugucacccaggcuggaaugcagu

SEQ ID NO: 134008 - RNA, 32 nt, Human
cucugucacccaggcuggaaugcagugcagug

SEQ ID NO: 134009 - RNA, 32 nt, Human
cucugucacccaggcuggaaugcaguggcacg

SEQ ID NO: 134010 - RNA, 32 nt, Human
cucugucacccaggcuggaaugcaguggcaug

SEQ ID NO: 134011 - RNA, 32 nt, Human
cucugucacccaggcuggaaugcaguggcgug

SEQ ID NO: 134012 - RNA, 32 nt, Human
cucugucacccaggcuggaaugcaguggugug

SEQ ID NO: 134013 - RNA, 24 nt, Human
cucugucacccaggcuggacugca

SEQ ID NO: 134014 - RNA, 32 nt, Human
cucugucacccaggcuggacugcaaugacgcg

SEQ ID NO: 134015 - RNA, 32 nt, Human
cucugucacccaggcuggagagcaauugcaca

SEQ ID NO: 134016 - RNA, 26 nt, Human
cucugucacccaggcuggagcgcagu

SEQ ID NO: 134017 - RNA, 32 nt, Human
cucugucacccaggcuggagcguaauggcaca

SEQ ID NO: 134018 - RNA, 24 nt, Human
cucugucacccaggcuggaguaca

SEQ ID NO: 134019 - RNA, 32 nt, Human
cucugucacccaggcuggaguacaauagcgug

SEQ ID NO: 134020 - RNA, 32 nt, Human
cucugucacccaggcuggaguacaauggcgug

SEQ ID NO: 134021 - RNA, 32 nt, Human
cucugucacccaggcuggaguacacuggcacu

SEQ ID NO: 134022 - RNA, 26 nt, Human
cucugucacccaggcuggaguacagu

SEQ ID NO: 134023 - RNA, 32 nt, Human
cucugucacccaggcuggaguacagugacacg

SEQ ID NO: 134024 - RNA, 32 nt, Human
cucugucacccaggcuggaguacaguggcacg

SEQ ID NO: 134025 - RNA, 32 nt, Human
cucugucacccaggcuggaguacaguggcaua

SEQ ID NO: 134026 - RNA, 32 nt, Human
cucugucacccaggcuggaguacaguggcaug

SEQ ID NO: 134027 - RNA, 32 nt, Human
cucugucacccaggcuggaguacaguggcgug

SEQ ID NO: 134028 - RNA, 32 nt, Human
cucugucacccaggcuggaguaccgguggugg

SEQ ID NO: 134029 - RNA, 32 nt, Human
cucugucacccaggcuggaguauaguggugug

SEQ ID NO: 134030 - RNA, 32 nt, Human
cucugucacccaggcuggagucuagugucgug

SEQ ID NO: 134031 - RNA, 32 nt, Human
cucugucacccaggcuggagugaggugguaca

SEQ ID NO: 134032 - RNA, 23 nt, Human
cucugucacccaggcuggagugc

SEQ ID NO: 134033 - RNA, 24 nt, Human
cucugucacccaggcuggagugca

SEQ ID NO: 134034 - RNA, 32 nt, Human
cucugucacccaggcuggagugcaaugacgca

SEQ ID NO: 134035 - RNA, 32 nt, Human
cucugucacccaggcuggagugcaaugcugcg

SEQ ID NO: 134036 - RNA, 32 nt, Human
cucugucacccaggcuggagugcaauggcaag

SEQ ID NO: 134037 - RNA, 32 nt, Human
cucugucacccaggcuggagugcaauggcacg

SEQ ID NO: 134038 - RNA, 32 nt, Human
cucugucacccaggcuggagugcaauggcaug

SEQ ID NO: 134039 - RNA, 32 nt, Human
cucugucacccaggcuggagugcaauggcgcg

SEQ ID NO: 134040 - RNA, 32 nt, Human
cucugucacccaggcuggagugcaauggcgug

SEQ ID NO: 134041 - RNA, 32 nt, Human
cucugucacccaggcuggagugcaaugggcac

SEQ ID NO: 134042 - RNA, 32 nt, Human
cucugucacccaggcuggagugcaauggugag

SEQ ID NO: 134043 - RNA, 32 nt, Human
cucugucacccaggcuggagugcaauggugca

SEQ ID NO: 134044 - RNA, 32 nt, Human
cucugucacccaggcuggagugcaauggugcc

SEQ ID NO: 134045 - RNA, 32 nt, Human
cucugucacccaggcuggagugcacuggcuug

SEQ ID NO: 134046 - RNA, 25 nt, Human
cucugucacccaggcuggagugcag

SEQ ID NO: 134047 - RNA, 32 nt, Human
cucugucacccaggcuggagugcagcaguuga

SEQ ID NO: 134048 - RNA, 32 nt, Human
cucugucacccaggcuggagugcagcaguugc

SEQ ID NO: 134049 - RNA, 26 nt, Human
cucugucacccaggcuggagugcagu

SEQ ID NO: 134050 - RNA, 32 nt, Human
cucugucacccaggcuggagugcaguagcacg

SEQ ID NO: 134051 - RNA, 32 nt, Human
cucugucacccaggcuggagugcaguagcaug

SEQ ID NO: 134052 - RNA, 32 nt, Human
cucugucacccaggcuggagugcaguagcgcg

SEQ ID NO: 134053 - RNA, 27 nt, Human
cucugucacccaggcuggagugcagug

SEQ ID NO: 134054 - RNA, 32 nt, Human
cucugucacccaggcuggagugcagugacaug

SEQ ID NO: 134055 - RNA, 32 nt, Human
cucugucacccaggcuggagugcagugcacaa

SEQ ID NO: 134056 - RNA, 32 nt, Human
cucugucacccaggcuggagugcagugcugug

SEQ ID NO: 134057 - RNA, 32 nt, Human
cucugucacccaggcuggagugcaguggagca

SEQ ID NO: 134058 - RNA, 32 nt, Human
cucugucacccaggcuggagugcaguggcaca

SEQ ID NO: 134059 - RNA, 32 nt, Human
cucugucacccaggcuggagugcaguggcacc

SEQ ID NO: 134060 - RNA, 32 nt, Human
cucugucacccaggcuggagugcaguggcacg

SEQ ID NO: 134061 - RNA, 32 nt, Human
cucugucacccaggcuggagugcaguggcaug

SEQ ID NO: 134062 - RNA, 32 nt, Human
cucugucacccaggcuggagugcaguggccca

SEQ ID NO: 134063 - RNA, 32 nt, Human
cucugucacccaggcuggagugcaguggcgaa

SEQ ID NO: 134064 - RNA, 32 nt, Human
cucugucacccaggcuggagugcaguggcgca

SEQ ID NO: 134065 - RNA, 32 nt, Human
cucugucacccaggcuggagugcaguggcgcc

SEQ ID NO: 134066 - RNA, 32 nt, Human
cucugucacccaggcuggagugcaguggcgcg

SEQ ID NO: 134067 - RNA, 32 nt, Human
cucugucacccaggcuggagugcaguggcgug

SEQ ID NO: 134068 - RNA, 32 nt, Human
cucugucacccaggcuggagugcaguggcuug

SEQ ID NO: 134069 - RNA, 32 nt, Human
cucugucacccaggcuggagugcagugguaca

SEQ ID NO: 134070 - RNA, 32 nt, Human
cucugucacccaggcuggagugcagugguaug

SEQ ID NO: 134071 - RNA, 32 nt, Human
cucugucacccaggcuggagugcaguggugac

SEQ ID NO: 134072 - RNA, 32 nt, Human
cucugucacccaggcuggagugcaguggugca

SEQ ID NO: 134073 - RNA, 32 nt, Human
cucugucacccaggcuggagugcaguggugcg

SEQ ID NO: 134074 - RNA, 32 nt, Human
cucugucacccaggcuggagugcaguggugug

SEQ ID NO: 134075 - RNA, 32 nt, Human
cucugucacccaggcuggagugcagugucaca

SEQ ID NO: 134076 - RNA, 32 nt, Human
cucugucacccaggcuggagugccauagugug

SEQ ID NO: 134077 - RNA, 32 nt, Human
cucugucacccaggcuggagugccauggcauc

SEQ ID NO: 134078 - RNA, 26 nt, Human
cucugucacccaggcuggagugccgu

SEQ ID NO: 134079 - RNA, 32 nt, Human
cucugucacccaggcuggagugccguggcacg

SEQ ID NO: 134080 - RNA, 24 nt, Human
cucugucacccaggcuggagugcg

SEQ ID NO: 134081 - RNA, 32 nt, Human
cucugucacccaggcuggagugcgauggcgcg

SEQ ID NO: 134082 - RNA, 26 nt, Human
cucugucacccaggcuggagugcggu

SEQ ID NO: 134083 - RNA, 32 nt, Human
cucugucacccaggcuggagugcgguggcgca

SEQ ID NO: 134084 - RNA, 32 nt, Human
cucugucacccaggcuggagugcgguggugca

SEQ ID NO: 134085 - RNA, 32 nt, Human
cucugucacccaggcuggagugcuauggcucg

SEQ ID NO: 134086 - RNA, 26 nt, Human
cucugucacccaggcuggagugcugu

SEQ ID NO: 134087 - RNA, 32 nt, Human
cucugucacccaggcuggagugcuguggugca

SEQ ID NO: 134088 - RNA, 32 nt, Human
cucugucacccaggcuggaguguaguggcaug

SEQ ID NO: 134089 - RNA, 32 nt, Human
cucugucacccaggcuggaguguaguggugca

SEQ ID NO: 134090 - RNA, 32 nt, Human
cucugucacccaggcuggaguguaguggugua

SEQ ID NO: 134091 - RNA, 32 nt, Human
cucugucacccaggcuggagugugcaguggcg

SEQ ID NO: 134092 - RNA, 32 nt, Human
cucugucacccaggcuggaguuauagugacgu

SEQ ID NO: 134093 - RNA, 26 nt, Human
cucugucacccaggcuggaguucagu

SEQ ID NO: 134094 - RNA, 32 nt, Human
cucugucacccaggcuggaguucaguggugcg

SEQ ID NO: 134095 - RNA, 32 nt, Human
cucugucacccaggcuggcgugcaauggcgca

SEQ ID NO: 134096 - RNA, 32 nt, Human
cucugucacccaggcugggaauugcaguggca

SEQ ID NO: 134097 - RNA, 32 nt, Human
cucugucacccaggcugggaugcaguggcuuc

SEQ ID NO: 134098 - RNA, 32 nt, Human
cucugucacccaggcuggggcgcaauggcacg

SEQ ID NO: 134099 - RNA, 32 nt, Human
cucugucacccaggcuggggugcaguggcgcg

SEQ ID NO: 134100 - RNA, 32 nt, Human
cucugucacccaggcuguaguacaguggugcc

SEQ ID NO: 134101 - RNA, 26 nt, Human
cucugucacccaggcuguagugcagu

SEQ ID NO: 134102 - RNA, 32 nt, Human
cucugucacccaggcuguagugcaguggcaua

SEQ ID NO: 134103 - RNA, 32 nt, Human
cucugucacccaggcuguaguggaguggugug

SEQ ID NO: 134104 - RNA, 32 nt, Human
cucugucacccaggcugucguaaguggcaauc

SEQ ID NO: 134105 - RNA, 32 nt, Human
cucugucacccaggcuugagugcaguggugcg

SEQ ID NO: 134106 - RNA, 32 nt, Human
cucugucacccagguggcuggaguacaguggc

SEQ ID NO: 134107 - RNA, 32 nt, Human
cucugucacccagguucgaguucaguggugcc

SEQ ID NO: 134108 - RNA, 32 nt, Human
cucugucacccagguuggagcacaguggugca

SEQ ID NO: 134109 - RNA, 32 nt, Human
cucugucacccagguuggagugcagcaggggc

SEQ ID NO: 134110 - RNA, 32 nt, Human
cucugucacccagguuggagugcaguggugug

SEQ ID NO: 134111 - RNA, 32 nt, Human
cucugucacccagguuggagugcauuggugug

SEQ ID NO: 134112 - RNA, 32 nt, Human
cucugucacccagguuggagugccauggcaug

SEQ ID NO: 134113 - RNA, 26 nt, Human
cucugucacccagucuggagugcagu

SEQ ID NO: 134114 - RNA, 32 nt, Human
cucugucacccagucuggagugcaguggcaaa

SEQ ID NO: 134115 - RNA, 32 nt, Human
cucugucacccagucuggagugcaguggugug

SEQ ID NO: 134116 - RNA, 32 nt, Human
cucugucacccaguuuggagugcaguggugca

SEQ ID NO: 134117 - RNA, 32 nt, Human
cucugucacccauccuggagugcaguagugug

SEQ ID NO: 134118 - RNA, 32 nt, Human
cucugucacccaugcuggugugcaguggcgug

SEQ ID NO: 134119 - RNA, 32 nt, Human
cucugucaccccggcuggagugcaguggugug

SEQ ID NO: 134120 - RNA, 32 nt, Human
cucugucacccgagcuggagugcaguggugca

SEQ ID NO: 134121 - RNA, 26 nt, Human
cucugucacccgggcuggagugcagu

SEQ ID NO: 134122 - RNA, 32 nt, Human
cucugucacccgggcuggagugcaguggcgcc

SEQ ID NO: 134123 - RNA, 32 nt, Human
cucugucacccgggcuggagugcaguggcgcg

SEQ ID NO: 134124 - RNA, 32 nt, Human
cucugucacccgggcuggagugcaguggugcg

SEQ ID NO: 134125 - RNA, 32 nt, Human
cucugucacccgggcuggagugcuguggcuug

SEQ ID NO: 134126 - RNA, 32 nt, Human
cucugucacccgggcuggaguguaacguggca

SEQ ID NO: 134127 - RNA, 32 nt, Human
cucugucacccuggcuggagugcgguggcgau

SEQ ID NO: 134128 - RNA, 26 nt, Human
cucugucaccgaggcuggagugcagu

SEQ ID NO: 134129 - RNA, 32 nt, Human
cucugucaccgaggcuggagugcaguggcgcg

SEQ ID NO: 134130 - RNA, 32 nt, Human
cucugucaccgagguuggagugcagugguaug

SEQ ID NO: 134131 - RNA, 32 nt, Human
cucugucaccuaggcuacagugcaguggugug

SEQ ID NO: 134132 - RNA, 32 nt, Human
cucugucaccuaggcuagagggcagugaugca

SEQ ID NO: 134133 - RNA, 32 nt, Human
cucugucaccuaggcuagagugcaguggugcg

SEQ ID NO: 134134 - RNA, 32 nt, Human
cucugucaccuaggcuagagugcaguggugug

SEQ ID NO: 134135 - RNA, 32 nt, Human
cucugucaccuaggcuagaguggaguggcaug

SEQ ID NO: 134136 - RNA, 32 nt, Human
cucugucaccuaggcugcagugcaguggcaca

SEQ ID NO: 134137 - RNA, 32 nt, Human
cucugucaccuaggcuggagggcaggguugag

SEQ ID NO: 134138 - RNA, 26 nt, Human
cucugucaccuaggcuggagugcagu

SEQ ID NO: 134139 - RNA, 32 nt, Human
cucugucaccuaggcuggagugcaguggcaca

SEQ ID NO: 134140 - RNA, 32 nt, Human
cucugucaccuaggcuggagugcaguggcacg

SEQ ID NO: 134141 - RNA, 32 nt, Human
cucugucaccuaggcuggagugcaguggcaug

SEQ ID NO: 134142 - RNA, 32 nt, Human
cucugucaccuaggcuggagugcaguggcgca

SEQ ID NO: 134143 - RNA, 32 nt, Human
cucugucaccuaggcuggagugcaguggggca

SEQ ID NO: 134144 - RNA, 32 nt, Human
cucugucaccuaggcuggagugcaguggugca

SEQ ID NO: 134145 - RNA, 32 nt, Human
cucugucaccuaggcuggaguugcagugguuu

SEQ ID NO: 134146 - RNA, 32 nt, Human
cucugucaccuaggcuggauugcaauggugca

SEQ ID NO: 134147 - RNA, 20 nt, Human
cucugucaccugugccucuc

SEQ ID NO: 134148 - RNA, 32 nt, Human
cucugucacgaggcuggagugcaguggcccca

SEQ ID NO: 134149 - RNA, 32 nt, Human
cucugucacucaggcugcagugcaguggcaug

SEQ ID NO: 134150 - RNA, 32 nt, Human
cucugucacucaggcuggaaugcaguggcgcg

SEQ ID NO: 134151 - RNA, 32 nt, Human
cucugucacucaggcuggaguacaguggcaca

SEQ ID NO: 134152 - RNA, 32 nt, Human
cucugucacucaggcuggagugcaaugacgug

SEQ ID NO: 134153 - RNA, 32 nt, Human
cucugucacucaggcuggagugcaguggcgcg

SEQ ID NO: 134154 - RNA, 32 nt, Human
cucugucacucaggcuggagugcagugguaua

SEQ ID NO: 134155 - RNA, 32 nt, Human
cucugucacucaggcuggagugcggugguaua

SEQ ID NO: 134156 - RNA, 32 nt, Human
cucugucacucaugcuggagugcaguggcgug

SEQ ID NO: 134157 - RNA, 32 nt, Human
cucugucacuccucaugccugucuagcucaua

SEQ ID NO: 134158 - RNA, 32 nt, Human
cucugucacugaggcuggagugcaguggcgca

SEQ ID NO: 134159 - RNA, 32 nt, Human
cucugucacuuaggcuggagugcaguggcgug

SEQ ID NO: 134160 - RNA, 32 nt, Human
cucugucacuuccuuuuucucuaaggcaggaa

SEQ ID NO: 134161 - RNA, 32 nt, Human
cucugucacuuggguuggagugcaguugcagg

SEQ ID NO: 134162 - RNA, 32 nt, Human
cucugucagacaccuguccuuccuucuacaga

SEQ ID NO: 134163 - RNA, 32 nt, Human
cucugucagaugggaagacaugaaugcacacu

SEQ ID NO: 134164 - RNA, 32 nt, Human
cucugucagccaggcuggagugcaauggcaug

SEQ ID NO: 134165 - RNA, 32 nt, Human
cucugucagccaggcuggagugugguggcaca

SEQ ID NO: 134166 - RNA, 32 nt, Human
cucugucaggccuucaggguucagcaguacag

SEQ ID NO: 134167 - RNA, 32 nt, Human
cucugucauaaucugcaucuucccagcagccu

SEQ ID NO: 134168 - RNA, 20 nt, Human
cucugucauacagacaggua

SEQ ID NO: 134169 - RNA, 25 nt, Human
cucugucaucaggcuggagugcagu

SEQ ID NO: 134170 - RNA, 26 nt, Human
cucugucauccaaacuggagugcagu

SEQ ID NO: 134171 - RNA, 32 nt, Human
cucugucauccaaacuggagugcaguggcaca

SEQ ID NO: 134172 - RNA, 26 nt, Human
cucugucauccaggcuagagugcagu

SEQ ID NO: 134173 - RNA, 32 nt, Human
cucugucauccaggcuagagugcaguggcacg

SEQ ID NO: 134174 - RNA, 32 nt, Human
cucugucauccaggcuggaggguaguggcgug

SEQ ID NO: 134175 - RNA, 26 nt, Human
cucugucauccaggcuggagugcagu

SEQ ID NO: 134176 - RNA, 32 nt, Human
cucugucauccaggcuggagugcagugaugcg

SEQ ID NO: 134177 - RNA, 32 nt, Human
cucugucauccaggcuggagugcaguggcaaa

SEQ ID NO: 134178 - RNA, 32 nt, Human
cucugucauccaggcuggagugcaguggcacg

SEQ ID NO: 134179 - RNA, 32 nt, Human
cucugucauccaggcuggagugcaguggcaug

SEQ ID NO: 134180 - RNA, 32 nt, Human
cucugucauccaggcuggagugcaguggcgca

SEQ ID NO: 134181 - RNA, 32 nt, Human
cucugucauccaggcuggagugcaguggugca

SEQ ID NO: 134182 - RNA, 32 nt, Human
cucugucauccaggcuggagugcaguggugug

SEQ ID NO: 134183 - RNA, 32 nt, Human
cucugucauccagguuggagugcaguggcaug

SEQ ID NO: 134184 - RNA, 32 nt, Human
cucugucauccccugacugcagucuccuuagu

SEQ ID NO: 134185 - RNA, 26 nt, Human
cucugucaucuaggcuggagugcagu

SEQ ID NO: 134186 - RNA, 32 nt, Human
cucugucaucuaggcuggagugcaguggugug

SEQ ID NO: 134187 - RNA, 32 nt, Human
cucugucaucugggcugcagugcaguggugua

SEQ ID NO: 134188 - RNA, 26 nt, Human
cucugucaugcaggcuggagugcggu

SEQ ID NO: 134189 - RNA, 32 nt, Human
cucugucaugcaggcuggagugcgguggugcg

SEQ ID NO: 134190 - RNA, 26 nt, Human
cucugucauucaggcaagagugcagu

SEQ ID NO: 134191 - RNA, 32 nt, Human
cucugucauucaggcaagagugcaguagugug

SEQ ID NO: 134192 - RNA, 26 nt, Human
cucugucauucaggcuggagugcagu

SEQ ID NO: 134193 - RNA, 32 nt, Human
cucugucauucaggcuggagugcaguggugca

SEQ ID NO: 134194 - RNA, 32 nt, Human
cucugucauucaggcuggagugcaguggugcg

SEQ ID NO: 134195 - RNA, 32 nt, Human
cucuguccacagccacaauguccauaggagcc

SEQ ID NO: 134196 - RNA, 32 nt, Human
cucuguccaccugaucccaauaccagcuuccc

SEQ ID NO: 134197 - RNA, 32 nt, Human
cucuguccagcgagccucucccccagcaucau

SEQ ID NO: 134198 - RNA, 32 nt, Human
cucuguccaucucccuuccccagcaucgugca

SEQ ID NO: 134199 - RNA, 32 nt, Human
cucugucccagaggcguucguaugugacccac

SEQ ID NO: 134200 - RNA, 32 nt, Human
cucugucccaucauccgccucggggacuuccu

SEQ ID NO: 134201 - RNA, 32 nt, Human
cucuguccccaaggcuggagugcaguggugca

SEQ ID NO: 134202 - RNA, 32 nt, Human
cucuguccccacugcuggaauaacucgggcac

SEQ ID NO: 134203 - RNA, 32 nt, Human
cucugucccccaggaugucuuguggugcgggu

SEQ ID NO: 134204 - RNA, 32 nt, Human
cucugucccccaggcugaagugcagcggcaug

SEQ ID NO: 134205 - RNA, 32 nt, Human
cucugucccccaggcuggagugcaguggcaug

SEQ ID NO: 134206 - RNA, 32 nt, Human
cucugucccccaggcuggagugcaguggcgcg

SEQ ID NO: 134207 - RNA, 32 nt, Human
cucugucccccaggcuggagugcaguggcucg

SEQ ID NO: 134208 - RNA, 32 nt, Human
cucugucccccaggcuggagugcaguggugcg

SEQ ID NO: 134209 - RNA, 32 nt, Human
cucugucccccaggcuggcgugcaguagcaug

SEQ ID NO: 134210 - RNA, 32 nt, Human
cucugucccccagucuggcgugcaaugguuug

SEQ ID NO: 134211 - RNA, 32 nt, Human
cucugucccccaugcuggagugcaguggcaug

SEQ ID NO: 134212 - RNA, 32 nt, Human
cucuguccccuaggcugcagugcaguggcgcg

SEQ ID NO: 134213 - RNA, 32 nt, Human
cucuguccccuccugaagaggauuuucuuacu

SEQ ID NO: 134214 - RNA, 32 nt, Human
cucuguccccugggcuggagugcaauggugcg

SEQ ID NO: 134215 - RNA, 32 nt, Human
cucugucccucaggcuggagugcaguagcgug

SEQ ID NO: 134216 - RNA, 32 nt, Human
cucuguccgaagacuucggauggcucccucuc

SEQ ID NO: 134217 - RNA, 32 nt, Human
cucuguccgccaggcuggagugcaguggcgcg

SEQ ID NO: 134218 - RNA, 32 nt, Human
cucuguccgcccaggcugggugcagucacggc

SEQ ID NO: 134219 - RNA, 32 nt, Human
cucuguccgcugcccacagccuagcagucggg

SEQ ID NO: 134220 - RNA, 32 nt, Human
cucuguccucauucuucucucccacacaagca

SEQ ID NO: 134221 - RNA, 32 nt, Human
cucuguccuccccucccaccugccccucaauu

SEQ ID NO: 134222 - RNA, 32 nt, Human
cucuguccucuccaugccuggccggcccggcc

SEQ ID NO: 134223 - RNA, 18 nt, Human
cucuguccucucuuccuc

SEQ ID NO: 134224 - RNA, 32 nt, Human
cucuguccucugcuuugcuguuauccuuaagg

SEQ ID NO: 134225 - RNA, 32 nt, Human
cucuguccugacuucauaggugccaccuugug

SEQ ID NO: 134226 - RNA, 32 nt, Human
cucuguccuguacccucuaccuccuucccugu

SEQ ID NO: 134227 - RNA, 22 nt, Human
cucuguccuucuccuugggcau

SEQ ID NO: 134228 - RNA, 32 nt, Human
cucugucgaccaggcuggagugcaggggcaca

SEQ ID NO: 134229 - RNA, 32 nt, Human
cucugucgccaaaguuggagugcaguggcgcg

SEQ ID NO: 134230 - RNA, 25 nt, Human
cucugucgccaagccagagugcagu

SEQ ID NO: 134231 - RNA, 32 nt, Human
cucugucgccaaggcuggagggcaauggcaug

SEQ ID NO: 134232 - RNA, 26 nt, Human
cucugucgccaaggcuggagugcagu

SEQ ID NO: 134233 - RNA, 32 nt, Human
cucugucgccaaggcuggagugcaguggugug

SEQ ID NO: 134234 - RNA, 25 nt, Human
cucugucgccagacuggagugcagu

SEQ ID NO: 134235 - RNA, 32 nt, Human
cucugucgccaggacuggagugcagugacacg

SEQ ID NO: 134236 - RNA, 25 nt, Human
cucugucgccaggcuagagugcggu

SEQ ID NO: 134237 - RNA, 25 nt, Human
cucugucgccaggcugaagugcagu

SEQ ID NO: 134238 - RNA, 25 nt, Human
cucugucgccaggcuggaaugcagu

SEQ ID NO: 134239 - RNA, 22 nt, Human
cucugucgccaggcuggagugc

SEQ ID NO: 134240 - RNA, 23 nt, Human
cucugucgccaggcuggagugca

SEQ ID NO: 134241 - RNA, 25 nt, Human
cucugucgccaggcuggagugcagu

SEQ ID NO: 134242 - RNA, 25 nt, Human
cucugucgccagguuggagugcagu

SEQ ID NO: 134243 - RNA, 32 nt, Human
cucugucgcccaagcugaagugcaguggugcg

SEQ ID NO: 134244 - RNA, 26 nt, Human
cucugucgcccaagcuggaguacagu

SEQ ID NO: 134245 - RNA, 32 nt, Human
cucugucgcccaagcuggaguacaguggugca

SEQ ID NO: 134246 - RNA, 26 nt, Human
cucugucgcccaagcuggagugcagu

SEQ ID NO: 134247 - RNA, 32 nt, Human
cucugucgcccaagcuggagugcaguggcaca

SEQ ID NO: 134248 - RNA, 32 nt, Human
cucugucgcccacccaggcuggaguacagugg

SEQ ID NO: 134249 - RNA, 32 nt, Human
cucugucgcccacguuggagugcagugaugug

SEQ ID NO: 134250 - RNA, 32 nt, Human
cucugucgcccagacuggaaugugguggcaug

SEQ ID NO: 134251 - RNA, 32 nt, Human
cucugucgcccagacuggagugcaauggugcg

SEQ ID NO: 134252 - RNA, 26 nt, Human
cucugucgcccagacuggagugcagu

SEQ ID NO: 134253 - RNA, 32 nt, Human
cucugucgcccagacuggagugcaguagcgcc

SEQ ID NO: 134254 - RNA, 26 nt, Human
cucugucgcccagacuggagugcugu

SEQ ID NO: 134255 - RNA, 26 nt, Human
cucugucgcccagccuggagugcagu

SEQ ID NO: 134256 - RNA, 32 nt, Human
cucugucgcccagccuggagugcaguggcacc

SEQ ID NO: 134257 - RNA, 32 nt, Human
cucugucgcccaggauggagugcaguggcgcg

SEQ ID NO: 134258 - RNA, 32 nt, Human
cucugucgcccaggcgggaaugcaguggcgca

SEQ ID NO: 134259 - RNA, 32 nt, Human
cucugucgcccaggcuagaguauaguggugug

SEQ ID NO: 134260 - RNA, 32 nt, Human
cucugucgcccaggcuagagugcaauggcgug

SEQ ID NO: 134261 - RNA, 26 nt, Human
cucugucgcccaggcuagagugcagu

SEQ ID NO: 134262 - RNA, 32 nt, Human
cucugucgcccaggcuagagugcaguggcaca

SEQ ID NO: 134263 - RNA, 32 nt, Human
cucugucgcccaggcuagagugcaguggcgcg

SEQ ID NO: 134264 - RNA, 32 nt, Human
cucugucgcccaggcuagagugcagugguaug

SEQ ID NO: 134265 - RNA, 32 nt, Human
cucugucgcccaggcuagaguggauuggcgug

SEQ ID NO: 134266 - RNA, 32 nt, Human
cucugucgcccaggcucgagugcaguggcaug

SEQ ID NO: 134267 - RNA, 32 nt, Human
cucugucgcccaggcugaaguguagagugcag

SEQ ID NO: 134268 - RNA, 32 nt, Human
cucugucgcccaggcugcagugcgguggugcg

SEQ ID NO: 134269 - RNA, 26 nt, Human
cucugucgcccaggcuggaaugcagu

SEQ ID NO: 134270 - RNA, 32 nt, Human
cucugucgcccaggcuggaaugcaguggcaug

SEQ ID NO: 134271 - RNA, 32 nt, Human
cucugucgcccaggcuggaaugcaguggcgcg

SEQ ID NO: 134272 - RNA, 32 nt, Human
cucugucgcccaggcuggaaugcaguggcgug

SEQ ID NO: 134273 - RNA, 32 nt, Human
cucugucgcccaggcuggaaugcaguggugca

SEQ ID NO: 134274 - RNA, 32 nt, Human
cucugucgcccaggcuggaaugcaguggugcg

SEQ ID NO: 134275 - RNA, 32 nt, Human
cucugucgcccaggcuggaaugcaguugugag

SEQ ID NO: 134276 - RNA, 26 nt, Human
cucugucgcccaggcuggaaugcugu

SEQ ID NO: 134277 - RNA, 32 nt, Human
cucugucgcccaggcuggaaugcuguagcaag

SEQ ID NO: 134278 - RNA, 32 nt, Human
cucugucgcccaggcuggacuacaauggcacg

SEQ ID NO: 134279 - RNA, 26 nt, Human
cucugucgcccaggcuggacugcagu

SEQ ID NO: 134280 - RNA, 32 nt, Human
cucugucgcccaggcuggacugcaguggugcg

SEQ ID NO: 134281 - RNA, 32 nt, Human
cucugucgcccaggcuggagcccaguggcgag

SEQ ID NO: 134282 - RNA, 24 nt, Human
cucugucgcccaggcuggagcgca

SEQ ID NO: 134283 - RNA, 32 nt, Human
cucugucgcccaggcuggagcgcaauggcaug

SEQ ID NO: 134284 - RNA, 26 nt, Human
cucugucgcccaggcuggagcgcagu

SEQ ID NO: 134285 - RNA, 32 nt, Human
cucugucgcccaggcuggagggcaguggcacg

SEQ ID NO: 134286 - RNA, 32 nt, Human
cucugucgcccaggcuggagggcaguggcgug

SEQ ID NO: 134287 - RNA, 24 nt, Human
cucugucgcccaggcuggaguaca

SEQ ID NO: 134288 - RNA, 32 nt, Human
cucugucgcccaggcuggaguacaauggugcg

SEQ ID NO: 134289 - RNA, 26 nt, Human
cucugucgcccaggcuggaguacagu

SEQ ID NO: 134290 - RNA, 32 nt, Human
cucugucgcccaggcuggaguacaguggugcg

SEQ ID NO: 134291 - RNA, 32 nt, Human
cucugucgcccaggcuggaguacaguggugug

SEQ ID NO: 134292 - RNA, 32 nt, Human
cucugucgcccaggcuggagugagugcagugg

SEQ ID NO: 134293 - RNA, 32 nt, Human
cucugucgcccaggcuggagugaugaggcgcg

SEQ ID NO: 134294 - RNA, 24 nt, Human
cucugucgcccaggcuggagugca

SEQ ID NO: 134295 - RNA, 32 nt, Human
cucugucgcccaggcuggagugcaauacugca

SEQ ID NO: 134296 - RNA, 32 nt, Human
cucugucgcccaggcuggagugcaauggcaca

SEQ ID NO: 134297 - RNA, 32 nt, Human
cucugucgcccaggcuggagugcaauggcgcg

SEQ ID NO: 134298 - RNA, 32 nt, Human
cucugucgcccaggcuggagugcacuggcgca

SEQ ID NO: 134299 - RNA, 32 nt, Human
cucugucgcccaggcuggagugcacuggcgcg

SEQ ID NO: 134300 - RNA, 25 nt, Human
cucugucgcccaggcuggagugcag

SEQ ID NO: 134301 - RNA, 32 nt, Human
cucugucgcccaggcuggagugcagaggugcg

SEQ ID NO: 134302 - RNA, 32 nt, Human
cucugucgcccaggcuggagugcaggggcgca

SEQ ID NO: 134303 - RNA, 26 nt, Human
cucugucgcccaggcuggagugcagu

SEQ ID NO: 134304 - RNA, 32 nt, Human
cucugucgcccaggcuggagugcaguagcgcg

SEQ ID NO: 134305 - RNA, 32 nt, Human
cucugucgcccaggcuggagugcagucgugcc

SEQ ID NO: 134306 - RNA, 27 nt, Human
cucugucgcccaggcuggagugcagug

SEQ ID NO: 134307 - RNA, 32 nt, Human
cucugucgcccaggcuggagugcagugacaug

SEQ ID NO: 134308 - RNA, 32 nt, Human
cucugucgcccaggcuggagugcagugaugca

SEQ ID NO: 134309 - RNA, 32 nt, Human
cucugucgcccaggcuggagugcagugccgcg

SEQ ID NO: 134310 - RNA, 32 nt, Human
cucugucgcccaggcuggagugcaguggagcg

SEQ ID NO: 134311 - RNA, 32 nt, Human
cucugucgcccaggcuggagugcaguggcaca

SEQ ID NO: 134312 - RNA, 32 nt, Human
cucugucgcccaggcuggagugcaguggcacc

SEQ ID NO: 134313 - RNA, 32 nt, Human
cucugucgcccaggcuggagugcaguggcacg

SEQ ID NO: 134314 - RNA, 32 nt, Human
cucugucgcccaggcuggagugcaguggcacu

SEQ ID NO: 134315 - RNA, 32 nt, Human
cucugucgcccaggcuggagugcaguggcagg

SEQ ID NO: 134316 - RNA, 32 nt, Human
cucugucgcccaggcuggagugcaguggcaug

SEQ ID NO: 134317 - RNA, 32 nt, Human
cucugucgcccaggcuggagugcaguggccug

SEQ ID NO: 134318 - RNA, 32 nt, Human
cucugucgcccaggcuggagugcaguggcgag

SEQ ID NO: 134319 - RNA, 32 nt, Human
cucugucgcccaggcuggagugcaguggcgca

SEQ ID NO: 134320 - RNA, 32 nt, Human
cucugucgcccaggcuggagugcaguggcgcc

SEQ ID NO: 134321 - RNA, 32 nt, Human
cucugucgcccaggcuggagugcaguggcgcg

SEQ ID NO: 134322 - RNA, 32 nt, Human
cucugucgcccaggcuggagugcaguggcggg

SEQ ID NO: 134323 - RNA, 32 nt, Human
cucugucgcccaggcuggagugcaguggcgug

SEQ ID NO: 134324 - RNA, 32 nt, Human
cucugucgcccaggcuggagugcaguggcucg

SEQ ID NO: 134325 - RNA, 32 nt, Human
cucugucgcccaggcuggagugcagugguacg

SEQ ID NO: 134326 - RNA, 32 nt, Human
cucugucgcccaggcuggagugcaguggugag

SEQ ID NO: 134327 - RNA, 32 nt, Human
cucugucgcccaggcuggagugcaguggugca

SEQ ID NO: 134328 - RNA, 32 nt, Human
cucugucgcccaggcuggagugcaguggugcc

SEQ ID NO: 134329 - RNA, 32 nt, Human
cucugucgcccaggcuggagugcaguggugcg

SEQ ID NO: 134330 - RNA, 32 nt, Human
cucugucgcccaggcuggagugcagugguggc

SEQ ID NO: 134331 - RNA, 32 nt, Human
cucugucgcccaggcuggagugcaguggugug

SEQ ID NO: 134332 - RNA, 32 nt, Human
cucugucgcccaggcuggagugcagugucaag

SEQ ID NO: 134333 - RNA, 26 nt, Human
cucugucgcccaggcuggagugcggu

SEQ ID NO: 134334 - RNA, 32 nt, Human
cucugucgcccaggcuggagugcgguggcgca

SEQ ID NO: 134335 - RNA, 32 nt, Human
cucugucgcccaggcuggagugcgguggcgcg

SEQ ID NO: 134336 - RNA, 32 nt, Human
cucugucgcccaggcuggaguguaguggcaug

SEQ ID NO: 134337 - RNA, 32 nt, Human
cucugucgcccaggcuggaguucaguggcgcg

SEQ ID NO: 134338 - RNA, 32 nt, Human
cucugucgcccaggcuggcgugaaguggcgca

SEQ ID NO: 134339 - RNA, 32 nt, Human
cucugucgcccaggcuggggugcaguggcgcc

SEQ ID NO: 134340 - RNA, 32 nt, Human
cucugucgcccaggcuggggugcaguggcgcg

SEQ ID NO: 134341 - RNA, 24 nt, Human
cucugucgcccaggcuguagugca

SEQ ID NO: 134342 - RNA, 32 nt, Human
cucugucgcccaggcuguagugcaauggcgca

SEQ ID NO: 134343 - RNA, 32 nt, Human
cucugucgcccagggcuggagugcaguggcgc

SEQ ID NO: 134344 - RNA, 32 nt, Human
cucugucgcccaggguggagugcaguggcgug

SEQ ID NO: 134345 - RNA, 32 nt, Human
cucugucgcccaggguggagugcgguggcacg

SEQ ID NO: 134346 - RNA, 32 nt, Human
cucugucgcccagguuggagugcaguggcacg

SEQ ID NO: 134347 - RNA, 32 nt, Human
cucugucgcccagguuggagugcaguggcgca

SEQ ID NO: 134348 - RNA, 32 nt, Human
cucugucgcccagguuggagugcaguggcgcg

SEQ ID NO: 134349 - RNA, 32 nt, Human
cucugucgcccagguuggagugcaguggcgug

SEQ ID NO: 134350 - RNA, 32 nt, Human
cucugucgcccagguuggagugcaguggugca

SEQ ID NO: 134351 - RNA, 32 nt, Human
cucugucgcccagguuggagugccauggcacc

SEQ ID NO: 134352 - RNA, 32 nt, Human
cucugucgcccagguuguaaugcaguggcgca

SEQ ID NO: 134353 - RNA, 32 nt, Human
cucugucgcccagguuugagugcaauggcaca

SEQ ID NO: 134354 - RNA, 32 nt, Human
cucugucgcccaugcuggagugcaguggcgcg

SEQ ID NO: 134355 - RNA, 32 nt, Human
cucugucgcccgggcuggagugcugugagcug

SEQ ID NO: 134356 - RNA, 32 nt, Human
cucugucgccgaguuuggaguguauuggcgcg

SEQ ID NO: 134357 - RNA, 32 nt, Human
cucugucgccuaagcuggagugugguggcacg

SEQ ID NO: 134358 - RNA, 32 nt, Human
cucugucgccuaggcugcagugcaguggcggg

SEQ ID NO: 134359 - RNA, 26 nt, Human
cucugucgccuaggcuggagugcagu

SEQ ID NO: 134360 - RNA, 32 nt, Human
cucugucgccuaggcuggagugcaguggugca

SEQ ID NO: 134361 - RNA, 25 nt, Human
cucugucgccuggcuggagugcagu

SEQ ID NO: 134362 - RNA, 32 nt, Human
cucugucgccugggcuggaguacaguggugcg

SEQ ID NO: 134363 - RNA, 32 nt, Human
cucugucgcgcaggguggagugcgguggcacg

SEQ ID NO: 134364 - RNA, 32 nt, Human
cucugucgcgccagcuggagugcagugccaug

SEQ ID NO: 134365 - RNA, 32 nt, Human
cucugucgcucaggcuggagagcgguggugca

SEQ ID NO: 134366 - RNA, 32 nt, Human
cucugucgcucaggcuggagugcagugaugca

SEQ ID NO: 134367 - RNA, 32 nt, Human
cucugucgcucaggcuggagugcaguggcgcg

SEQ ID NO: 134368 - RNA, 32 nt, Human
cucugucgcucaggcuggagugcaguggcgug

SEQ ID NO: 134369 - RNA, 32 nt, Human
cucugucgcucgcgcuggagugcaguggcaug

SEQ ID NO: 134370 - RNA, 24 nt, Human
cucugucggccaggcuggaaugca

SEQ ID NO: 134371 - RNA, 32 nt, Human
cucugucggccaggcuggaaugcaauggugcc

SEQ ID NO: 134372 - RNA, 26 nt, Human
cucugucggccaggcuggagugcagu

SEQ ID NO: 134373 - RNA, 32 nt, Human
cucugucggccaggcuggagugcaguggcaug

SEQ ID NO: 134374 - RNA, 32 nt, Human
cucugucggccagguuggagugcaguggugca

SEQ ID NO: 134375 - RNA, 26 nt, Human
cucugucguccaggcuggagugcagu

SEQ ID NO: 134376 - RNA, 32 nt, Human
cucugucguccaggcuggagugcagugacuca

SEQ ID NO: 134377 - RNA, 32 nt, Human
cucugucguccaggcuggagugcagugcugca

SEQ ID NO: 134378 - RNA, 32 nt, Human
cucugucguccaggcuggagugcaguggcacg

SEQ ID NO: 134379 - RNA, 32 nt, Human
cucugucguccaggcuggagugcaguggcgca

SEQ ID NO: 134380 - RNA, 32 nt, Human
cucugucguccaggcuggagugcaguggcgcc

SEQ ID NO: 134381 - RNA, 32 nt, Human
cucugucguccaggcuggagugccguggcgua

SEQ ID NO: 134382 - RNA, 24 nt, Human
cucugucguccagguuagagugca

SEQ ID NO: 134383 - RNA, 32 nt, Human
cucugucguccagguuagagugcaauggcuug

SEQ ID NO: 134384 - RNA, 32 nt, Human
cucugucgucgaggcuggaguguaguggugcg

SEQ ID NO: 134385 - RNA, 32 nt, Human
cucugucuagcuuccagggcagggagcaggcc

SEQ ID NO: 134386 - RNA, 32 nt, Human
cucugucuaggacugcaguguggaguucaccu

SEQ ID NO: 134387 - RNA, 32 nt, Human
cucugucuauugcccaggcuggagugcagugg

SEQ ID NO: 134388 - RNA, 32 nt, Human
cucugucucaaaacaaaacaaaacaaaacaaa

SEQ ID NO: 134389 - RNA, 32 nt, Human
cucugucucaacuucauggugcgcugagcugc

SEQ ID NO: 134390 - RNA, 16 nt, Human
cucugucucagccucc

SEQ ID NO: 134391 - RNA, 32 nt, Human
cucugucuccacugcuuuccuuuuccugcugu

SEQ ID NO: 134392 - RNA, 32 nt, Human
cucugucuccaggcauucgggggccugagguc

SEQ ID NO: 134393 - RNA, 32 nt, Human
cucugucucccagacuggagugagugguguga

SEQ ID NO: 134394 - RNA, 32 nt, Human
cucugucucccaggccggagugcaguggcacg

SEQ ID NO: 134395 - RNA, 32 nt, Human
cucugucucccaggcuagaguaccguggcaca

SEQ ID NO: 134396 - RNA, 32 nt, Human
cucugucucccaggcuagagugcaauggcaca

SEQ ID NO: 134397 - RNA, 32 nt, Human
cucugucucccaggcuagagugcaguggugca

SEQ ID NO: 134398 - RNA, 32 nt, Human
cucugucucccaggcugaagugcaguggcacg

SEQ ID NO: 134399 - RNA, 32 nt, Human
cucugucucccaggcugcuggagugcaguggc

SEQ ID NO: 134400 - RNA, 32 nt, Human
cucugucucccaggcuggacugcaguggugcg

SEQ ID NO: 134401 - RNA, 32 nt, Human
cucugucucccaggcuggagcguaguaaugca

SEQ ID NO: 134402 - RNA, 32 nt, Human
cucugucucccaggcuggaggucaguggcaca

SEQ ID NO: 134403 - RNA, 32 nt, Human
cucugucucccaggcuggagugcaauggugca

SEQ ID NO: 134404 - RNA, 32 nt, Human
cucugucucccaggcuggagugcaggcuugga

SEQ ID NO: 134405 - RNA, 32 nt, Human
cucugucucccaggcuggagugcagugacaca

SEQ ID NO: 134406 - RNA, 32 nt, Human
cucugucucccaggcuggagugcaguggagug

SEQ ID NO: 134407 - RNA, 32 nt, Human
cucugucucccaggcuggagugcaguggcaca

SEQ ID NO: 134408 - RNA, 32 nt, Human
cucugucucccaggcuggagugcaguggcacg

SEQ ID NO: 134409 - RNA, 32 nt, Human
cucugucucccaggcuggagugcaguggcaug

SEQ ID NO: 134410 - RNA, 32 nt, Human
cucugucucccaggcuggagugcaguggcgua

SEQ ID NO: 134411 - RNA, 32 nt, Human
cucugucucccaggcuggagugcaguggugca

SEQ ID NO: 134412 - RNA, 32 nt, Human
cucugucucccaggcuggagugcgguggcaca

SEQ ID NO: 134413 - RNA, 32 nt, Human
cucugucucccaggcuggagugcuauggugca

SEQ ID NO: 134414 - RNA, 32 nt, Human
cucugucucccaggcuggagugugauggcgug

SEQ ID NO: 134415 - RNA, 32 nt, Human
cucugucucccaggcuggaguugcaguggugc

SEQ ID NO: 134416 - RNA, 32 nt, Human
cucugucucccagguuggagugcaguggcacg

SEQ ID NO: 134417 - RNA, 32 nt, Human
cucugucucccauucaguuccuccuugaauac

SEQ ID NO: 134418 - RNA, 32 nt, Human
cucugucuccccauguccucuggaacagcugg

SEQ ID NO: 134419 - RNA, 32 nt, Human
cucugucuccccuguuucugagcggccuaggu

SEQ ID NO: 134420 - RNA, 32 nt, Human
cucugucuccccuguuucugaggggccuugau

SEQ ID NO: 134421 - RNA, 32 nt, Human
cucugucucccgggcuggagugcaguggcgcg

SEQ ID NO: 134422 - RNA, 32 nt, Human
cucugucuccgaggcuggagugcaauguugca

SEQ ID NO: 134423 - RNA, 32 nt, Human
cucugucuccuaagcuggagugcaguggcauc

SEQ ID NO: 134424 - RNA, 32 nt, Human
cucugucuccuaggcuggagcgcaguggugca

SEQ ID NO: 134425 - RNA, 32 nt, Human
cucugucuccugccacaauccugcugggaacu

SEQ ID NO: 134426 - RNA, 19 nt, Human
cucugucuccugggcccug

SEQ ID NO: 134427 - RNA, 32 nt, Human
cucugucuccugggcccugcucugggaccugc

SEQ ID NO: 134428 - RNA, 22 nt, Human
cucugucucuaccucucugccu

SEQ ID NO: 134429 - RNA, 32 nt, Human
cucugucucucaggcuagagcagugugcgauc

SEQ ID NO: 134430 - RNA, 18 nt, Human
cucugucucucuuccucu

SEQ ID NO: 134431 - RNA, 32 nt, Human
cucugucucuggcagcucugcacccagggacc

SEQ ID NO: 134432 - RNA, 32 nt, Human
cucugucucuggcugcccucggccuccaagga

SEQ ID NO: 134433 - RNA, 32 nt, Human
cucugucucuguagcuggagaagguaguuucc

SEQ ID NO: 134434 - RNA, 32 nt, Human
cucugucucuuacucuuucccucucucugucg

SEQ ID NO: 134435 - RNA, 32 nt, Human
cucugucugaggauggggaggggccagugagc

SEQ ID NO: 134436 - RNA, 32 nt, Human
cucugucugcagcugcugcugccuggaccuau

SEQ ID NO: 134437 - RNA, 32 nt, Human
cucugucugccucgcuggaaugugggccccug

SEQ ID NO: 134438 - RNA, 32 nt, Human
cucugucugccuggcaaaggugcuguggaaua

SEQ ID NO: 134439 - RNA, 32 nt, Human
cucugucugccuggcugagaugcaugugggca

SEQ ID NO: 134440 - RNA, 32 nt, Human
cucugucugcggccaaaguccauacacaaucc

SEQ ID NO: 134441 - RNA, 32 nt, Human
cucugucugcuccugcuuccucuuguuggcuu

SEQ ID NO: 134442 - RNA, 32 nt, Human
cucugucuggccagggaggagccccaguggug

SEQ ID NO: 134443 - RNA, 32 nt, Human
cucugucugucacccaggcuggaguacagugg

SEQ ID NO: 134444 - RNA, 18 nt, Human
cucugucugucgggcucc

SEQ ID NO: 134445 - RNA, 32 nt, Human
cucugucugucugggugcucacgggagggugu

SEQ ID NO: 134446 - RNA, 32 nt, Human
cucugucuucauguggaagguuuagagcaguu

SEQ ID NO: 134447 - RNA, 32 nt, Human
cucugucuuccaggaaugccacaggcuggugg

SEQ ID NO: 134448 - RNA, 32 nt, Human
cucugucuuuaaauuuuauaugggcuuuguua

SEQ ID NO: 134449 - RNA, 32 nt, Human
cucugucuuuguuuaaugcucagcuuuuugga

SEQ ID NO: 134450 - RNA, 32 nt, Human
cucugucuuuugaggauggcuuuguccuguug

SEQ ID NO: 134451 - RNA, 32 nt, Human
cucugugaaagccaggagcacgggggugacgc

SEQ ID NO: 134452 - RNA, 32 nt, Human
cucugugaacauccuccuuugccucugaauga

SEQ ID NO: 134453 - RNA, 32 nt, Human
cucugugaaccuucuggaaggcugcuggcagu

SEQ ID NO: 134454 - RNA, 32 nt, Human
cucugugaagccuccuuguuucucccagugaa

SEQ ID NO: 134455 - RNA, 21 nt, Human
cucugugaagugucuagaagu

SEQ ID NO: 134456 - RNA, 32 nt, Human
cucugugacaucaccaagggccuggcaccagg

SEQ ID NO: 134457 - RNA, 32 nt, Human
cucugugacauuccuucugucaucuccagcau

SEQ ID NO: 134458 - RNA, 32 nt, Human
cucugugacccagaagagaugccccugggcuc

SEQ ID NO: 134459 - RNA, 32 nt, Human
cucugugaccccaggcaagcugccucaccucu

SEQ ID NO: 134460 - RNA, 32 nt, Human
cucugugacucaggagcagggaucucaggcag

SEQ ID NO: 134461 - RNA, 32 nt, Human
cucugugacuccccuuucucuucucgucccuc

SEQ ID NO: 134462 - RNA, 18 nt, Human
cucugugacuggcucuug

SEQ ID NO: 134463 - RNA, 21 nt, Human
cucugugagcagccgaaauca

SEQ ID NO: 134464 - RNA, 32 nt, Human
cucugugagccccacagcccugcucauuccuc

SEQ ID NO: 134465 - RNA, 32 nt, Human
cucugugagcccccaccccagagccuggaguu

SEQ ID NO: 134466 - RNA, 32 nt, Human
cucugugaggaggcaagggaggugagaaccuu

SEQ ID NO: 134467 - RNA, 32 nt, Human
cucugugagucauccccucugucugccuguca

SEQ ID NO: 134468 - RNA, 32 nt, Human
cucugugagugagggcugacugggaaacaaca

SEQ ID NO: 134469 - RNA, 32 nt, Human
cucugugaucaucauggagagaaacuccuacu

SEQ ID NO: 134470 - RNA, 32 nt, Human
cucugugauccucagucucugccauucagaua

SEQ ID NO: 134471 - RNA, 32 nt, Human
cucugugaugucagagcaucuacugggacuac

SEQ ID NO: 134472 - RNA, 32 nt, Human
cucugugaugugugugcagagugaacagagga

SEQ ID NO: 134473 - RNA, 32 nt, Human
cucugugauuucuuucuuugcaccaaagacau

SEQ ID NO: 134474 - RNA, 32 nt, Human
cucugugcaaugaagucugcaggccugaggac

SEQ ID NO: 134475 - RNA, 23 nt, Human
cucugugcagcccggaaggcuga

SEQ ID NO: 134476 - RNA, 32 nt, Human
cucugugcagcuggagacgcuggugaggagag

SEQ ID NO: 134477 - RNA, 32 nt, Human
cucugugcaguggaagcaaaacugagugcaga

SEQ ID NO: 134478 - RNA, 32 nt, Human
cucugugcaugccccagccuccugggccugcc

SEQ ID NO: 134479 - RNA, 32 nt, Human
cucugugccacuuugagagacuguucccagga

SEQ ID NO: 134480 - RNA, 24 nt, Human
cucugugccaggccagagugcagu

SEQ ID NO: 134481 - RNA, 32 nt, Human
cucugugccaugaagauaagucuuccauggcc

SEQ ID NO: 134482 - RNA, 32 nt, Human
cucugugcccacccuccacucuccucuuccag

SEQ ID NO: 134483 - RNA, 32 nt, Human
cucugugccccucacccugcucccucucgccc

SEQ ID NO: 134484 - RNA, 32 nt, Human
cucugugccccuccuuuccacucaaguguuau

SEQ ID NO: 134485 - RNA, 32 nt, Human
cucugugccugggaucaguggggccccaaagc

SEQ ID NO: 134486 - RNA, 32 nt, Human
cucugugccuguaacuuagacaacauuuuaau

SEQ ID NO: 134487 - RNA, 32 nt, Human
cucugugcuaucaaucaucuuaucaucaauua

SEQ ID NO: 134488 - RNA, 32 nt, Human
cucugugcucucaggacucccuucccucuggg

SEQ ID NO: 134489 - RNA, 32 nt, Human
cucugugcuucaacauuuuauaucuuuccucc

SEQ ID NO: 134490 - RNA, 32 nt, Human
cucuguggaaggacaggcccugagcccgggcu

SEQ ID NO: 134491 - RNA, 32 nt, Human
cucuguggacccaagguggugugugacaagca

SEQ ID NO: 134492 - RNA, 22 nt, Human
cucuguggagucuggcucucug

SEQ ID NO: 134493 - RNA, 32 nt, Human
cucuguggaucagauuucucuccuguguggga

SEQ ID NO: 134494 - RNA, 31 nt, Human
cucuguggcaaagcagcaacuauucacaaaa

SEQ ID NO: 134495 - RNA, 32 nt, Human
cucuguggcacagggcccugcccgucacaugc

SEQ ID NO: 134496 - RNA, 32 nt, Human
cucuguggccaagcuccagccaaaaaggaggg

SEQ ID NO: 134497 - RNA, 32 nt, Human
cucuguggccacuuccugagccagaggccagg

SEQ ID NO: 134498 - RNA, 32 nt, Human
cucuguggcccaggccggcaguggcugccucu

SEQ ID NO: 134499 - RNA, 32 nt, Human
cucuguggcccaggcugaagagcaguagugug

SEQ ID NO: 134500 - RNA, 32 nt, Human
cucuguggcccaggcugaagugcaguggugug

SEQ ID NO: 134501 - RNA, 32 nt, Human
cucuguggcccaggcuggagugcaguggcaca

SEQ ID NO: 134502 - RNA, 32 nt, Human
cucuguggcccaggcuggagugcaguggcacg

SEQ ID NO: 134503 - RNA, 32 nt, Human
cucuguggcccaggcuggagugcaguggcaug

SEQ ID NO: 134504 - RNA, 32 nt, Human
cucuguggcccaggcuggagugcaguggcgca

SEQ ID NO: 134505 - RNA, 32 nt, Human
cucuguggcccaggcuggagugcaguggcgcg

SEQ ID NO: 134506 - RNA, 32 nt, Human
cucuguggcccaggcuggagugcaguggugcg

SEQ ID NO: 134507 - RNA, 32 nt, Human
cucuguggcccaggcuggaguguaguggcgug

SEQ ID NO: 134508 - RNA, 32 nt, Human
cucuguggcccaggcuggcgugcagugggccg

SEQ ID NO: 134509 - RNA, 19 nt, Human
cucuguggcccggcuccug

SEQ ID NO: 134510 - RNA, 20 nt, Human
cucuguggccgccgcuaccg

SEQ ID NO: 134511 - RNA, 32 nt, Human
cucuguggcugcagagggcccaacccugaccc

SEQ ID NO: 134512 - RNA, 32 nt, Human
cucuguggcuucccacccaaaccuucucaguc

SEQ ID NO: 134513 - RNA, 31 nt, Human
cucugugggaaaaucucagcugacaucauga

SEQ ID NO: 134514 - RNA, 19 nt, Human
cucugugggcgacuaagug

SEQ ID NO: 134515 - RNA, 32 nt, Human
cucugugggcuucuggguaugggugaguggca

SEQ ID NO: 134516 - RNA, 32 nt, Human
cucuguggggacaagagcugggcaguuuugaa

SEQ ID NO: 134517 - RNA, 32 nt, Human
cucuguggggaggaacagggguuugaggggaa

SEQ ID NO: 134518 - RNA, 32 nt, Human
cucugugguagacuaggcaugucuggggaugg

SEQ ID NO: 134519 - RNA, 22 nt, Human
cucugugguccacguccugccu

SEQ ID NO: 134520 - RNA, 32 nt, Human
cucuguggugucugccuguugcgugacacucu

SEQ ID NO: 134521 - RNA, 32 nt, Human
cucuguggugugugucgcgcacacagcuuaga

SEQ ID NO: 134522 - RNA, 21 nt, Human
cucugugguuccagcuccuca

SEQ ID NO: 134523 - RNA, 21 nt, Human
cucugugguuguggcgcccug

SEQ ID NO: 134524 - RNA, 32 nt, Human
cucugugguuuuaucguguccuuugccccuuu

SEQ ID NO: 134525 - RNA, 32 nt, Human
cucuguguaacugccauugucuuuccaauccc

SEQ ID NO: 134526 - RNA, 32 nt, Human
cucuguguaaucucugauuaaauuuaauauac

SEQ ID NO: 134527 - RNA, 32 nt, Human
cucuguguacagccagcagggcccaggcagcc

SEQ ID NO: 134528 - RNA, 32 nt, Human
cucuguguacauuuaugugcuccuaucguggg

SEQ ID NO: 134529 - RNA, 32 nt, Human
cucuguguaguuccagcaaaucaagcugagcu

SEQ ID NO: 134530 - RNA, 32 nt, Human
cucuguguauauggcauauaccuaguaaguau

SEQ ID NO: 134531 - RNA, 32 nt, Human
cucugugucccaggcuggagugcaguggcaca

SEQ ID NO: 134532 - RNA, 32 nt, Human
cucugugucccccacaccacaggccucgaagc

SEQ ID NO: 134533 - RNA, 32 nt, Human
cucuguguccucuccccucugcccuguauaua

SEQ ID NO: 134534 - RNA, 32 nt, Human
cucugugucucaggcuggaguacaguggugca

SEQ ID NO: 134535 - RNA, 32 nt, Human
cucugugucugcucucauccauuccucuuacu

SEQ ID NO: 134536 - RNA, 18 nt, Human
cucugugucugucuccug

SEQ ID NO: 134537 - RNA, 32 nt, Human
cucugugucuucaaagcaaagcucuuuacuuu

SEQ ID NO: 134538 - RNA, 32 nt, Human
cucugugucuucuucuuacuaacuaugugauc

SEQ ID NO: 134539 - RNA, 32 nt, Human
cucugugugcaauguaccuucuugccuccugg

SEQ ID NO: 134540 - RNA, 32 nt, Human
cucugugugccucaacuuccuccucuguaaaa

SEQ ID NO: 134541 - RNA, 29 nt, Human
cucugugugcugugugugccccaggcucu

SEQ ID NO: 134542 - RNA, 32 nt, Human
cucuguguggaaugccuuggugagagagaugc

SEQ ID NO: 134543 - RNA, 32 nt, Human
cucuguguguaaaugcuaugcacugggauaca

SEQ ID NO: 134544 - RNA, 32 nt, Human
cucuguguguuuuguaaacaucacuggagggu

SEQ ID NO: 134545 - RNA, 32 nt, Human
cucuguguuguuuuguaaauacuucagucaca

SEQ ID NO: 134546 - RNA, 32 nt, Human
cucuguguuucauuaggcauucauccugccaa

SEQ ID NO: 134547 - RNA, 32 nt, Human
cucuguuacccagauuggagugcaguggcgcg

SEQ ID NO: 134548 - RNA, 26 nt, Human
cucuguuacccaggccggagugcagu

SEQ ID NO: 134549 - RNA, 32 nt, Human
cucuguuacccaggccggagugcaguggcgca

SEQ ID NO: 134550 - RNA, 32 nt, Human
cucuguuacccaggcuagagugcaauggcgug

SEQ ID NO: 134551 - RNA, 32 nt, Human
cucuguuacccaggcuagagugcaguggcgcg

SEQ ID NO: 134552 - RNA, 32 nt, Human
cucuguuacccaggcuagaguguaguggcaug

SEQ ID NO: 134553 - RNA, 26 nt, Human
cucuguuacccaggcuggaauacagu

SEQ ID NO: 134554 - RNA, 26 nt, Human
cucuguuacccaggcuggaaugcagu

SEQ ID NO: 134555 - RNA, 32 nt, Human
cucuguuacccaggcuggaaugcaguggcgca

SEQ ID NO: 134556 - RNA, 24 nt, Human
cucuguuacccaggcuggagugca

SEQ ID NO: 134557 - RNA, 32 nt, Human
cucuguuacccaggcuggagugcaauggagug

SEQ ID NO: 134558 - RNA, 26 nt, Human
cucuguuacccaggcuggagugcagu

SEQ ID NO: 134559 - RNA, 32 nt, Human
cucuguuacccaggcuggagugcaguggguga

SEQ ID NO: 134560 - RNA, 32 nt, Human
cucuguuacccaggcuggagugcaguggugcg

SEQ ID NO: 134561 - RNA, 32 nt, Human
cucuguuacccaggcuggagugcaguggugug

SEQ ID NO: 134562 - RNA, 32 nt, Human
cucuguuacccaggcuggaguguaguggugcc

SEQ ID NO: 134563 - RNA, 32 nt, Human
cucuguuacccaugcuggaguacgguggcgag

SEQ ID NO: 134564 - RNA, 21 nt, Human
cucuguuagcucugucuccug

SEQ ID NO: 134565 - RNA, 26 nt, Human
cucuguuauccaggcuggaaugcggu

SEQ ID NO: 134566 - RNA, 26 nt, Human
cucuguuauccaggcuggugugcagu

SEQ ID NO: 134567 - RNA, 32 nt, Human
cucuguuauccaggcuggugugcagugauaca

SEQ ID NO: 134568 - RNA, 32 nt, Human
cucuguucacugcaaccgccucccgugcucaa

SEQ ID NO: 134569 - RNA, 32 nt, Human
cucuguucagggaagcugcccaggaagaagac

SEQ ID NO: 134570 - RNA, 32 nt, Human
cucuguucauuuccucaaaaagauuuccccau

SEQ ID NO: 134571 - RNA, 32 nt, Human
cucuguuccagccuauggcuuuaggcuagcug

SEQ ID NO: 134572 - RNA, 32 nt, Human
cucuguuccccaccccuucccuugcuggccau

SEQ ID NO: 134573 - RNA, 32 nt, Human
cucuguuccccaggccggagugcagugguacg

SEQ ID NO: 134574 - RNA, 32 nt, Human
cucuguucccgccguccucugggagcuccaag

SEQ ID NO: 134575 - RNA, 32 nt, Human
cucuguucccuccccucuuuuguuccucccua

SEQ ID NO: 134576 - RNA, 32 nt, Human
cucuguucccucucuucgcggagcggcgccgc

SEQ ID NO: 134577 - RNA, 32 nt, Human
cucuguucccuucuccuuucaucccagagggg

SEQ ID NO: 134578 - RNA, 32 nt, Human
cucuguuccugagcagagaagcagaaaaggag

SEQ ID NO: 134579 - RNA, 32 nt, Human
cucuguuccugccacauugggaagggggcugg

SEQ ID NO: 134580 - RNA, 32 nt, Human
cucuguuccuucacauccuguguuucuaggga

SEQ ID NO: 134581 - RNA, 32 nt, Human
cucuguuccuucacguccucccuucucagccu

SEQ ID NO: 134582 - RNA, 32 nt, Human
cucuguucuccccuccuaucuuuccaugaccc

SEQ ID NO: 134583 - RNA, 32 nt, Human
cucuguucuccucaacuuacuggcaugaagag

SEQ ID NO: 134584 - RNA, 32 nt, Human
cucuguucucucuucagcuccacccgccacug

SEQ ID NO: 134585 - RNA, 32 nt, Human
cucuguucugagauggacaaauucaguguugg

SEQ ID NO: 134586 - RNA, 32 nt, Human
cucuguucugaguaaggaaacagccuccaagc

SEQ ID NO: 134587 - RNA, 32 nt, Human
cucuguucugugcagaagacaaaaaggcaauc

SEQ ID NO: 134588 - RNA, 32 nt, Human
cucuguucuucagcagaaggcaggguguaggg

SEQ ID NO: 134589 - RNA, 32 nt, Human
cucuguucuucuccucuccacucucucuccaa

SEQ ID NO: 134590 - RNA, 32 nt, Human
cucuguugaccaggcuggagugaaguggugug

SEQ ID NO: 134591 - RNA, 32 nt, Human
cucuguugaccaggcuggagugcaguggugag

SEQ ID NO: 134592 - RNA, 32 nt, Human
cucuguugccaaggcuggaaugcaguggcgag

SEQ ID NO: 134593 - RNA, 32 nt, Human
cucuguugccaaggcuggagugcaguggaacg

SEQ ID NO: 134594 - RNA, 32 nt, Human
cucuguugccacugcacucuggccugggcaac

SEQ ID NO: 134595 - RNA, 32 nt, Human
cucuguugcccaagcuggaguacaguagugca

SEQ ID NO: 134596 - RNA, 32 nt, Human
cucuguugcccaagcuggagugaagugguaca

SEQ ID NO: 134597 - RNA, 32 nt, Human
cucuguugcccaagcuggggugcaguggcacg

SEQ ID NO: 134598 - RNA, 32 nt, Human
cucuguugcccaagguagagugcaguggcgug

SEQ ID NO: 134599 - RNA, 32 nt, Human
cucuguugcccacauuggagugcaguggcacg

SEQ ID NO: 134600 - RNA, 32 nt, Human
cucuguugcccacgcaggagugcaguggcaug

SEQ ID NO: 134601 - RNA, 32 nt, Human
cucuguugcccagacuggagugcaguggcacg

SEQ ID NO: 134602 - RNA, 32 nt, Human
cucuguugcccagacuggagugcaguggcgug

SEQ ID NO: 134603 - RNA, 32 nt, Human
cucuguugcccagacuggagugcaguggugua

SEQ ID NO: 134604 - RNA, 32 nt, Human
cucuguugcccagacuggagugcaguggugug

SEQ ID NO: 134605 - RNA, 32 nt, Human
cucuguugcccagccuggagugcaauggcaca

SEQ ID NO: 134606 - RNA, 32 nt, Human
cucuguugcccagccuggagugcaguggcauu

SEQ ID NO: 134607 - RNA, 32 nt, Human
cucuguugcccagccuggagugcaguguguca

SEQ ID NO: 134608 - RNA, 32 nt, Human
cucuguugcccagcuggagugcaguggcguga

SEQ ID NO: 134609 - RNA, 32 nt, Human
cucuguugcccagcuggagugcagugguguga

SEQ ID NO: 134610 - RNA, 32 nt, Human
cucuguugcccaggauggaaugcaguggcaca

SEQ ID NO: 134611 - RNA, 32 nt, Human
cucuguugcccaggauggagugcaguggugag

SEQ ID NO: 134612 - RNA, 32 nt, Human
cucuguugcccaggcaggaguacaguggcauu

SEQ ID NO: 134613 - RNA, 32 nt, Human
cucuguugcccaggcaguagugcaguggcgcg

SEQ ID NO: 134614 - RNA, 32 nt, Human
cucuguugcccaggcuagagugcaauggcaca

SEQ ID NO: 134615 - RNA, 32 nt, Human
cucuguugcccaggcuagagugcacuaauaca

SEQ ID NO: 134616 - RNA, 32 nt, Human
cucuguugcccaggcuagagugcacugguggu

SEQ ID NO: 134617 - RNA, 32 nt, Human
cucuguugcccaggcuagagugcaguggcaug

SEQ ID NO: 134618 - RNA, 32 nt, Human
cucuguugcccaggcuagagugcaguggugca

SEQ ID NO: 134619 - RNA, 32 nt, Human
cucuguugcccaggcuccagugcaguggugug

SEQ ID NO: 134620 - RNA, 32 nt, Human
cucuguugcccaggcugaagugcaguggggcg

SEQ ID NO: 134621 - RNA, 32 nt, Human
cucuguugcccaggcugaagugcaguggugug

SEQ ID NO: 134622 - RNA, 32 nt, Human
cucuguugcccaggcugaaguguaguggcaca

SEQ ID NO: 134623 - RNA, 32 nt, Human
cucuguugcccaggcugagguacaguggcgug

SEQ ID NO: 134624 - RNA, 32 nt, Human
cucuguugcccaggcugcagugcaguggugcc

SEQ ID NO: 134625 - RNA, 32 nt, Human
cucuguugcccaggcugcagugcaguggugug

SEQ ID NO: 134626 - RNA, 32 nt, Human
cucuguugcccaggcuggaaugcagugauacg

SEQ ID NO: 134627 - RNA, 32 nt, Human
cucuguugcccaggcuggaaugcaguggcaca

SEQ ID NO: 134628 - RNA, 32 nt, Human
cucuguugcccaggcuggaaugcaguggcgug

SEQ ID NO: 134629 - RNA, 32 nt, Human
cucuguugcccaggcuggaaugcagugguacg

SEQ ID NO: 134630 - RNA, 32 nt, Human
cucuguugcccaggcuggacuacaguggcaca

SEQ ID NO: 134631 - RNA, 32 nt, Human
cucuguugcccaggcuggaguaaagggcagug

SEQ ID NO: 134632 - RNA, 32 nt, Human
cucuguugcccaggcuggaguacaauggcgug

SEQ ID NO: 134633 - RNA, 32 nt, Human
cucuguugcccaggcuggaguacaguggcaca

SEQ ID NO: 134634 - RNA, 32 nt, Human
cucuguugcccaggcuggaguacaguggcacg

SEQ ID NO: 134635 - RNA, 32 nt, Human
cucuguugcccaggcuggaguacaguggcgug

SEQ ID NO: 134636 - RNA, 32 nt, Human
cucuguugcccaggcuggaguacaguggucac

SEQ ID NO: 134637 - RNA, 32 nt, Human
cucuguugcccaggcuggaguacauuggugug

SEQ ID NO: 134638 - RNA, 32 nt, Human
cucuguugcccaggcuggaguccaguggcaug

SEQ ID NO: 134639 - RNA, 32 nt, Human
cucuguugcccaggcuggagugcaaugacaca

SEQ ID NO: 134640 - RNA, 32 nt, Human
cucuguugcccaggcuggagugcaauggcaca

SEQ ID NO: 134641 - RNA, 32 nt, Human
cucuguugcccaggcuggagugcaauggcacg

SEQ ID NO: 134642 - RNA, 32 nt, Human
cucuguugcccaggcuggagugcaauggcaug

SEQ ID NO: 134643 - RNA, 32 nt, Human
cucuguugcccaggcuggagugcacuggcuug

SEQ ID NO: 134644 - RNA, 32 nt, Human
cucuguugcccaggcuggagugcagaggugcg

SEQ ID NO: 134645 - RNA, 32 nt, Human
cucuguugcccaggcuggagugcagcggcaug

SEQ ID NO: 134646 - RNA, 32 nt, Human
cucuguugcccaggcuggagugcagggacacc

SEQ ID NO: 134647 - RNA, 32 nt, Human
cucuguugcccaggcuggagugcaggggcacg

SEQ ID NO: 134648 - RNA, 32 nt, Human
cucuguugcccaggcuggagugcaggggcgua

SEQ ID NO: 134649 - RNA, 32 nt, Human
cucuguugcccaggcuggagugcaguagcacg

SEQ ID NO: 134650 - RNA, 32 nt, Human
cucuguugcccaggcuggagugcagucgcaca

SEQ ID NO: 134651 - RNA, 32 nt, Human
cucuguugcccaggcuggagugcagugacgug

SEQ ID NO: 134652 - RNA, 32 nt, Human
cucuguugcccaggcuggagugcagugaugug

SEQ ID NO: 134653 - RNA, 28 nt, Human
cucuguugcccaggcuggagugcagugg

SEQ ID NO: 134654 - RNA, 32 nt, Human
cucuguugcccaggcuggagugcaguggcaca

SEQ ID NO: 134655 - RNA, 32 nt, Human
cucuguugcccaggcuggagugcaguggcacc

SEQ ID NO: 134656 - RNA, 32 nt, Human
cucuguugcccaggcuggagugcaguggcacg

SEQ ID NO: 134657 - RNA, 32 nt, Human
cucuguugcccaggcuggagugcaguggcaug

SEQ ID NO: 134658 - RNA, 32 nt, Human
cucuguugcccaggcuggagugcaguggcauu

SEQ ID NO: 134659 - RNA, 32 nt, Human
cucuguugcccaggcuggagugcaguggcgaa

SEQ ID NO: 134660 - RNA, 32 nt, Human
cucuguugcccaggcuggagugcaguggcgca

SEQ ID NO: 134661 - RNA, 32 nt, Human
cucuguugcccaggcuggagugcaguggcgcc

SEQ ID NO: 134662 - RNA, 32 nt, Human
cucuguugcccaggcuggagugcaguggcgcg

SEQ ID NO: 134663 - RNA, 32 nt, Human
cucuguugcccaggcuggagugcaguggcgcu

SEQ ID NO: 134664 - RNA, 32 nt, Human
cucuguugcccaggcuggagugcaguggcgug

SEQ ID NO: 134665 - RNA, 32 nt, Human
cucuguugcccaggcuggagugcagugguaug

SEQ ID NO: 134666 - RNA, 32 nt, Human
cucuguugcccaggcuggagugcaguggugag

SEQ ID NO: 134667 - RNA, 32 nt, Human
cucuguugcccaggcuggagugcaguggugca

SEQ ID NO: 134668 - RNA, 32 nt, Human
cucuguugcccaggcuggagugcaguggugcc

SEQ ID NO: 134669 - RNA, 32 nt, Human
cucuguugcccaggcuggagugcaguggugcg

SEQ ID NO: 134670 - RNA, 32 nt, Human
cucuguugcccaggcuggagugcagugguggg

SEQ ID NO: 134671 - RNA, 32 nt, Human
cucuguugcccaggcuggagugcaguggugua

SEQ ID NO: 134672 - RNA, 32 nt, Human
cucuguugcccaggcuggagugcaguggugug

SEQ ID NO: 134673 - RNA, 32 nt, Human
cucuguugcccaggcuggagugcagugucaca

SEQ ID NO: 134674 - RNA, 32 nt, Human
cucuguugcccaggcuggagugcgauggcaug

SEQ ID NO: 134675 - RNA, 32 nt, Human
cucuguugcccaggcuggagugcgguggacuc

SEQ ID NO: 134676 - RNA, 32 nt, Human
cucuguugcccaggcuggagugcgguggcaug

SEQ ID NO: 134677 - RNA, 32 nt, Human
cucuguugcccaggcuggagugcgguggugcg

SEQ ID NO: 134678 - RNA, 32 nt, Human
cucuguugcccaggcuggaguguaauggugca

SEQ ID NO: 134679 - RNA, 32 nt, Human
cucuguugcccaggcuggaguguagagacaca

SEQ ID NO: 134680 - RNA, 32 nt, Human
cucuguugcccaggcuggaguguagugguaug

SEQ ID NO: 134681 - RNA, 32 nt, Human
cucuguugcccaggcuggaguguaguggugcg

SEQ ID NO: 134682 - RNA, 32 nt, Human
cucuguugcccaggcuggaguguaguggugug

SEQ ID NO: 134683 - RNA, 32 nt, Human
cucuguugcccaggcuggaguucagcggugca

SEQ ID NO: 134684 - RNA, 32 nt, Human
cucuguugcccaggcugggugcagcggugcga

SEQ ID NO: 134685 - RNA, 32 nt, Human
cucuguugcccaggcugguguguagugaucuc

SEQ ID NO: 134686 - RNA, 32 nt, Human
cucuguugcccaggguggagugcagcggugcg

SEQ ID NO: 134687 - RNA, 32 nt, Human
cucuguugcccaggguggagugcaguggcaug

SEQ ID NO: 134688 - RNA, 32 nt, Human
cucuguugcccagguuagagugcaguggcuug

SEQ ID NO: 134689 - RNA, 32 nt, Human
cucuguugcccagguuggaguacagcaaugcc

SEQ ID NO: 134690 - RNA, 32 nt, Human
cucuguugcccagguuggaguacagcagugcc

SEQ ID NO: 134691 - RNA, 32 nt, Human
cucuguugcccagguuggagugcaguggcacg

SEQ ID NO: 134692 - RNA, 32 nt, Human
cucuguugcccagguuggagugcaguggcacu

SEQ ID NO: 134693 - RNA, 32 nt, Human
cucuguugcccagucuggagugcaguggcgca

SEQ ID NO: 134694 - RNA, 32 nt, Human
cucuguugcccagucuggaguucaguggcgcg

SEQ ID NO: 134695 - RNA, 32 nt, Human
cucuguugcccaugcuggagugcauuggcaca

SEQ ID NO: 134696 - RNA, 32 nt, Human
cucuguugcccauucuggagugcaguggugug

SEQ ID NO: 134697 - RNA, 32 nt, Human
cucuguugccccagcuugagugcaguggcgug

SEQ ID NO: 134698 - RNA, 32 nt, Human
cucuguugccccaggcuggagugcaguggcgu

SEQ ID NO: 134699 - RNA, 32 nt, Human
cucuguugccccaggcuggagugcaguggugu

SEQ ID NO: 134700 - RNA, 32 nt, Human
cucuguugcccgggcuggaguacaauggcaug

SEQ ID NO: 134701 - RNA, 32 nt, Human
cucuguugcccgggcuggagugcagcggcgug

SEQ ID NO: 134702 - RNA, 32 nt, Human
cucuguugcccgggcuggagugcaguggugug

SEQ ID NO: 134703 - RNA, 32 nt, Human
cucuguugcccuggcuggaguacaguggcaug

SEQ ID NO: 134704 - RNA, 32 nt, Human
cucuguugcccuggcuggagugcaguagagug

SEQ ID NO: 134705 - RNA, 32 nt, Human
cucuguugcccuggcuggaguucagugacaug

SEQ ID NO: 134706 - RNA, 32 nt, Human
cucuguugccuagacuggagugcaauggcgug

SEQ ID NO: 134707 - RNA, 32 nt, Human
cucuguugccuaggcuagagggcaguggcacc

SEQ ID NO: 134708 - RNA, 32 nt, Human
cucuguugccuaggcuagggugcaguggcaca

SEQ ID NO: 134709 - RNA, 32 nt, Human
cucuguugccuaggcuggaggacaguggcaca

SEQ ID NO: 134710 - RNA, 32 nt, Human
cucuguugccuaggcuggaguacaguggcaag

SEQ ID NO: 134711 - RNA, 32 nt, Human
cucuguugccuaggcuggaguacaguggccug

SEQ ID NO: 134712 - RNA, 32 nt, Human
cucuguugccuaggcuggaguacaguggugca

SEQ ID NO: 134713 - RNA, 32 nt, Human
cucuguugccuaggcuggagugaaaguggcgc

SEQ ID NO: 134714 - RNA, 32 nt, Human
cucuguugccuaggcuggagugcagugaggca

SEQ ID NO: 134715 - RNA, 32 nt, Human
cucuguugccuaggcuggagugcaguggcgcg

SEQ ID NO: 134716 - RNA, 32 nt, Human
cucuguugccugggcuggagaacaguggcacc

SEQ ID NO: 134717 - RNA, 32 nt, Human
cucuguugccugggcuggagugcagugccacg

SEQ ID NO: 134718 - RNA, 32 nt, Human
cucuguugccugggcuggagugcaguggccca

SEQ ID NO: 134719 - RNA, 32 nt, Human
cucuguugcuaccugucaacaugaauguuucu

SEQ ID NO: 134720 - RNA, 32 nt, Human
cucuguugcuaggcuggagugcaguggcacaa

SEQ ID NO: 134721 - RNA, 32 nt, Human
cucuguugcuaggcuggagugcaguggugcga

SEQ ID NO: 134722 - RNA, 32 nt, Human
cucuguugcucaagcuggaguggaguggcacg

SEQ ID NO: 134723 - RNA, 32 nt, Human
cucuguugcucaggcuggagugcaguggcacc

SEQ ID NO: 134724 - RNA, 32 nt, Human
cucuguugcucaggcuggauugcaguggcgug

SEQ ID NO: 134725 - RNA, 32 nt, Human
cucuguugcucagucuagggugcagugacgug

SEQ ID NO: 134726 - RNA, 32 nt, Human
cucuguugcucccccucucuagcucccucacc

SEQ ID NO: 134727 - RNA, 32 nt, Human
cucuguugcugaggcuggagugcagugaugug

SEQ ID NO: 134728 - RNA, 32 nt, Human
cucuguugcuucuguuucugacgcagucugug

SEQ ID NO: 134729 - RNA, 32 nt, Human
cucuguuggauacgagaacacuguagaagugg

SEQ ID NO: 134730 - RNA, 32 nt, Human
cucuguuggcacuuuccacuguuccaucugug

SEQ ID NO: 134731 - RNA, 32 nt, Human
cucuguuggccaggcuggaaugcaguggcaca

SEQ ID NO: 134732 - RNA, 32 nt, Human
cucuguuggccaggcuggagugcaguguucga

SEQ ID NO: 134733 - RNA, 32 nt, Human
cucuguuguaacccucucagcauggcgguuac

SEQ ID NO: 134734 - RNA, 32 nt, Human
cucuguuguccaagcuagagugcagugauacc

SEQ ID NO: 134735 - RNA, 32 nt, Human
cucuguuguccaaggcuggaguguaguagugc

SEQ ID NO: 134736 - RNA, 32 nt, Human
cucuguuguccaggcuagagugcaguggugug

SEQ ID NO: 134737 - RNA, 32 nt, Human
cucuguuguccaggcuggagggcagugacaua

SEQ ID NO: 134738 - RNA, 32 nt, Human
cucuguuguccaggcuggagugcaauggcagu

SEQ ID NO: 134739 - RNA, 32 nt, Human
cucuguuguccaggcuggagugcagcgauaug

SEQ ID NO: 134740 - RNA, 32 nt, Human
cucuguuguccaggcuggagugcaguggcacc

SEQ ID NO: 134741 - RNA, 32 nt, Human
cucuguuguccaggcuggagugcaguggcacg

SEQ ID NO: 134742 - RNA, 32 nt, Human
cucuguuguccagguguucucuucaagauucc

SEQ ID NO: 134743 - RNA, 32 nt, Human
cucuguugucucuucauauucuucuuccuuuu

SEQ ID NO: 134744 - RNA, 32 nt, Human
cucuguuuauuccuccucucccucccauugca

SEQ ID NO: 134745 - RNA, 32 nt, Human
cucuguuuauuuuugcacaucuguuauaauuu

SEQ ID NO: 134746 - RNA, 32 nt, Human
cucuguuucacucccuccccgcggggcgcgca

SEQ ID NO: 134747 - RNA, 32 nt, Human
cucuguuucauagauuuucaaauaucagguuc

SEQ ID NO: 134748 - RNA, 32 nt, Human
cucuguuuccagaguuguucuggccucagagg

SEQ ID NO: 134749 - RNA, 32 nt, Human
cucuguuucccaggcuggagugcaguggcgcu

SEQ ID NO: 134750 - RNA, 32 nt, Human
cucuguuucccugccagacaccaccuuucccg

SEQ ID NO: 134751 - RNA, 32 nt, Human
cucuguuuccucuacuccuggcucagaaacag

SEQ ID NO: 134752 - RNA, 32 nt, Human
cucuguuucuaggggugugaauuuguacaaaa

SEQ ID NO: 134753 - RNA, 32 nt, Human
cucuguuucucaucuuuccaauuugcaggaua

SEQ ID NO: 134754 - RNA, 18 nt, Human
cucuguuugcaggcccug

SEQ ID NO: 134755 - RNA, 32 nt, Human
cucuguuugccuggagaagcaaggagguuaga

SEQ ID NO: 134756 - RNA, 32 nt, Human
cucuguuugcucugaaucaacagccaugaugu

SEQ ID NO: 134757 - RNA, 24 nt, Human
cucuguuuuauacuagugacaaua

SEQ ID NO: 134758 - RNA, 32 nt, Human
cucuguuuuccucuucaaauuccagagagagg

SEQ ID NO: 134759 - RNA, 22 nt, Human
cucuguuuuccucuuccugucu

SEQ ID NO: 134760 - RNA, 32 nt, Human
cucuguuuucucucacuguagaccaaagagcc

SEQ ID NO: 134761 - RNA, 32 nt, Human
cucuguuuugaugucgaaccccaaagcacugu

SEQ ID NO: 134762 - RNA, 21 nt, Human
cucuguuuugcaagaugccaa

SEQ ID NO: 134763 - RNA, 32 nt, Human
cucuguuuuguuuucccugccuguugcgugca

SEQ ID NO: 134764 - RNA, 16 nt, Human
cucuuaaaagcauuga

SEQ ID NO: 134765 - RNA, 32 nt, Human
cucuuaaaaggccaguacucuugggggugggg

SEQ ID NO: 134766 - RNA, 32 nt, Human
cucuuaaagugcugggauuacaggcgugagcc

SEQ ID NO: 134767 - RNA, 32 nt, Human
cucuuaaaguguugggauuauagguaugaacc

SEQ ID NO: 134768 - RNA, 32 nt, Human
cucuuaaauuggugccuugaaagagaaggaac

SEQ ID NO: 134769 - RNA, 32 nt, Human
cucuuaacaaguaacugucacugggaccgagu

SEQ ID NO: 134770 - RNA, 32 nt, Human
cucuuaaccuucaacaugaaagucucugcagu

SEQ ID NO: 134771 - RNA, 22 nt, Human
cucuuaacuagugcucuuccua

SEQ ID NO: 134772 - RNA, 26 nt, Human
cucuuaagacauggcuggagcucagu

SEQ ID NO: 134773 - RNA, 32 nt, Human
cucuuaagccuccccuuccagucuuucuggac

SEQ ID NO: 134774 - RNA, 32 nt, Human
cucuuaaggaacacggugucuuccuucgucuc

SEQ ID NO: 134775 - RNA, 32 nt, Human
cucuuaaggcuucaucuucucccuguaacuga

SEQ ID NO: 134776 - RNA, 32 nt, Human
cucuuaaguucuggacgccaggccugaggcag

SEQ ID NO: 134777 - RNA, 32 nt, Human
cucuuaauaaccuuucuuugcaguuaagacug

SEQ ID NO: 134778 - RNA, 32 nt, Human
cucuuaaucgcucacuucaacucauuucuucu

SEQ ID NO: 134779 - RNA, 32 nt, Human
cucuuaaugccacggcagccacccugccaugg

SEQ ID NO: 134780 - RNA, 32 nt, Human
cucuuaauuccaauugaggagaaacaagaaaa

SEQ ID NO: 134781 - RNA, 32 nt, Human
cucuuaauugcgauaauucacagaacauaaaa

SEQ ID NO: 134782 - RNA, 32 nt, Human
cucuuacaaauacauuugguuauucaccauga

SEQ ID NO: 134783 - RNA, 32 nt, Human
cucuuacagcauggccgccgguacugcagcug

SEQ ID NO: 134784 - RNA, 32 nt, Human
cucuuacagcugugccuaauaauaauuaauua

SEQ ID NO: 134785 - RNA, 32 nt, Human
cucuuacauaaauauucaaaucagcuuaucau

SEQ ID NO: 134786 - RNA, 32 nt, Human
cucuuacauacucucaucuucucccccgcucc

SEQ ID NO: 134787 - RNA, 24 nt, Human
cucuuacccaagcuggagugcagu

SEQ ID NO: 134788 - RNA, 32 nt, Human
cucuuacccaagcuggagugcagugacaugau

SEQ ID NO: 134789 - RNA, 32 nt, Human
cucuuacccaggcuagggugcaguggugugau

SEQ ID NO: 134790 - RNA, 23 nt, Human
cucuuacccaggcugagugcagu

SEQ ID NO: 134791 - RNA, 32 nt, Human
cucuuacccaggcugagugcaguggcagaauc

SEQ ID NO: 134792 - RNA, 32 nt, Human
cucuuaccccacccucccugcccaucaacugu

SEQ ID NO: 134793 - RNA, 32 nt, Human
cucuuaccugaagccuuguccccaccacacag

SEQ ID NO: 134794 - RNA, 32 nt, Human
cucuuaccugcucuucuuucccgacucgucuu

SEQ ID NO: 134795 - RNA, 32 nt, Human
cucuuaccugggaguagaaggugggaagaaau

SEQ ID NO: 134796 - RNA, 32 nt, Human
cucuuacgccaugguuaugagcagguugauga

SEQ ID NO: 134797 - RNA, 32 nt, Human
cucuuacgcccaggcuggaaugaaguggcaug

SEQ ID NO: 134798 - RNA, 32 nt, Human
cucuuacguagcugggauuacaggcaugagcc

SEQ ID NO: 134799 - RNA, 32 nt, Human
cucuuacugcuucauguaauuuuguaucaccu

SEQ ID NO: 134800 - RNA, 32 nt, Human
cucuuacugugggagcaacugcugguucuauc

SEQ ID NO: 134801 - RNA, 32 nt, Human
cucuuacuucauggagaugucaguauccgggu

SEQ ID NO: 134802 - RNA, 32 nt, Human
cucuuacuugcuguacuaucagccugcucguu

SEQ ID NO: 134803 - RNA, 32 nt, Human
cucuuagaagacagggguggccuuucaugucu

SEQ ID NO: 134804 - RNA, 32 nt, Human
cucuuagaagcaccauauuaucccagacaugu

SEQ ID NO: 134805 - RNA, 32 nt, Human
cucuuagagaagcagucaaacugugaagcacu

SEQ ID NO: 134806 - RNA, 32 nt, Human
cucuuagcagagccaaaagccagcagagagaa

SEQ ID NO: 134807 - RNA, 32 nt, Human
cucuuagcaguugggugugcuauaugcaaaag

SEQ ID NO: 134808 - RNA, 32 nt, Human
cucuuagcccucuacuguugaccaaucaccaa

SEQ ID NO: 134809 - RNA, 32 nt, Human
cucuuagcugggagcugagcagaugcugggau

SEQ ID NO: 134810 - RNA, 22 nt, Human
cucuuaggaaauuaucaacuaa

SEQ ID NO: 134811 - RNA, 32 nt, Human
cucuuaggacugcugacuugguuaugcaguca

SEQ ID NO: 134812 - RNA, 32 nt, Human
cucuuaggaguccucagagagccuucugugcc

SEQ ID NO: 134813 - RNA, 32 nt, Human
cucuuagggaggcagaggcaggaggauagcuu

SEQ ID NO: 134814 - RNA, 32 nt, Human
cucuuagggcuggaagccaccacgcuggcccu

SEQ ID NO: 134815 - RNA, 32 nt, Human
cucuuaggggucaggcaccagcauggagaccu

SEQ ID NO: 134816 - RNA, 32 nt, Human
cucuuaguucucuccgccucccccucaacuac

SEQ ID NO: 134817 - RNA, 32 nt, Human
cucuuaguugggcuguaugcugugugguacag

SEQ ID NO: 134818 - RNA, 19 nt, Human
cucuuaucaccucucccca

SEQ ID NO: 134819 - RNA, 32 nt, Human
cucuuaucagccugggcaacacagugagacuc

SEQ ID NO: 134820 - RNA, 32 nt, Human
cucuuaucauuucccucuccuaugcaccagua

SEQ ID NO: 134821 - RNA, 32 nt, Human
cucuuauccucucuguccuccugcuuuuccac

SEQ ID NO: 134822 - RNA, 32 nt, Human
cucuuaucgcccaggcuggggugcaauggcgc

SEQ ID NO: 134823 - RNA, 32 nt, Human
cucuuaucuccccagccccgcccuucucccca

SEQ ID NO: 134824 - RNA, 22 nt, Human
cucuuaucugagaagugaccuu

SEQ ID NO: 134825 - RNA, 26 nt, Human
cucuuaugcccacgcuggagugcagu

SEQ ID NO: 134826 - RNA, 32 nt, Human
cucuuaugcccacgcuggagugcagugagccg

SEQ ID NO: 134827 - RNA, 32 nt, Human
cucuuauucccaagcuuauauccuuaaucacc

SEQ ID NO: 134828 - RNA, 32 nt, Human
cucuuauucucaaaucguucuggaaagccuca

SEQ ID NO: 134829 - RNA, 32 nt, Human
cucuuauugcccaggcuagagugcaauggugc

SEQ ID NO: 134830 - RNA, 32 nt, Human
cucuuauugcccaggcuggagugcaauggcac

SEQ ID NO: 134831 - RNA, 32 nt, Human
cucuuauugcccaggcuggagugcaauggugc

SEQ ID NO: 134832 - RNA, 32 nt, Human
cucuuauugcccaggcuggagugcagugacga

SEQ ID NO: 134833 - RNA, 32 nt, Human
cucuuauugcccaggcuggagugcaguggcac

SEQ ID NO: 134834 - RNA, 32 nt, Human
cucuuauugcccaggcuggagugcaguggcgu

SEQ ID NO: 134835 - RNA, 32 nt, Human
cucuuauuucucauugagccucaggcuauacu

SEQ ID NO: 134836 - RNA, 20 nt, Human
cucuucaaaaaggucacaag

SEQ ID NO: 134837 - RNA, 32 nt, Human
cucuucaaaccagcagcgcuugacccagagcc

SEQ ID NO: 134838 - RNA, 20 nt, Human
cucuucaaaugagaaaaaag

SEQ ID NO: 134839 - RNA, 32 nt, Human
cucuucaacuacugggucuucguccaagccau

SEQ ID NO: 134840 - RNA, 23 nt, Human
cucuucaagacuuuugacuuaga

SEQ ID NO: 134841 - RNA, 18 nt, Human
cucuucaagccccgguca

SEQ ID NO: 134842 - RNA, 32 nt, Human
cucuucaagccgcagcugguacggcugcuagg

SEQ ID NO: 134843 - RNA, 32 nt, Human
cucuucaauauauuaggcauugugcuaauaaa

SEQ ID NO: 134844 - RNA, 32 nt, Human
cucuucaauccagcagccccucccagaggugu

SEQ ID NO: 134845 - RNA, 32 nt, Human
cucuucaaugccugagggaagauaaauguuau

SEQ ID NO: 134846 - RNA, 32 nt, Human
cucuucaaugccuuugacaccaaccaugaugg

SEQ ID NO: 134847 - RNA, 21 nt, Human
cucuucacaacaguaucaaca

SEQ ID NO: 134848 - RNA, 32 nt, Human
cucuucacaacaguaucaacacuggcuucucc

SEQ ID NO: 134849 - RNA, 32 nt, Human
cucuucacagcuuucggcaucucugcucgccg

SEQ ID NO: 134850 - RNA, 32 nt, Human
cucuucaccacccagcagcugugagaccuuga

SEQ ID NO: 134851 - RNA, 32 nt, Human
cucuucaccguguuuccagccugggaccaagg

SEQ ID NO: 134852 - RNA, 32 nt, Human
cucuucacgugcaggcugggaccagcggagac

SEQ ID NO: 134853 - RNA, 32 nt, Human
cucuucacugccccucucccucaagccuaaga

SEQ ID NO: 134854 - RNA, 17 nt, Human
cucuucacugccugcca

SEQ ID NO: 134855 - RNA, 32 nt, Human
cucuucacugccugccagguuguguuggggug

SEQ ID NO: 134856 - RNA, 16 nt, Human
cucuucacugcugcca

SEQ ID NO: 134857 - RNA, 32 nt, Human
cucuucacuggcacaguugagauuggaagugu

SEQ ID NO: 134858 - RNA, 17 nt, Human
cucuucacugucugcca

SEQ ID NO: 134859 - RNA, 32 nt, Human
cucuucagaccugugguugcucugcucaucca

SEQ ID NO: 134860 - RNA, 32 nt, Human
cucuucagagcuaauccucuaaguucucugua

SEQ ID NO: 134861 - RNA, 32 nt, Human
cucuucagauuccuucacccuauuuaccuucc

SEQ ID NO: 134862 - RNA, 32 nt, Human
cucuucagcaccuaaagcuggaaagggaugaa

SEQ ID NO: 134863 - RNA, 23 nt, Human
cucuucagcagcccccucccccc

SEQ ID NO: 134864 - RNA, 23 nt, Human
cucuucagccaccagcccuuccc

SEQ ID NO: 134865 - RNA, 20 nt, Human
cucuucagcccccuccccca

SEQ ID NO: 134866 - RNA, 22 nt, Human
cucuucagcccucgcucucccc

SEQ ID NO: 134867 - RNA, 32 nt, Human
cucuucagccucaaauccccaguuuuugauga

SEQ ID NO: 134868 - RNA, 32 nt, Human
cucuucagcuauuuagacuacugugaaauguu

SEQ ID NO: 134869 - RNA, 32 nt, Human
cucuucagcuucuuuuguaggugggaauccag

SEQ ID NO: 134870 - RNA, 32 nt, Human
cucuucaggaagcauaaagcaauugugaaaua

SEQ ID NO: 134871 - RNA, 32 nt, Human
cucuucaggagguuuggcuuggcaugaaaaua

SEQ ID NO: 134872 - RNA, 32 nt, Human
cucuucaggccugcuagucacuggaaauugag

SEQ ID NO: 134873 - RNA, 32 nt, Human
cucuucaggcugccucuccucgaaaagucauc

SEQ ID NO: 134874 - RNA, 32 nt, Human
cucuucagguucucaugauaccaccuuuacug

SEQ ID NO: 134875 - RNA, 32 nt, Human
cucuucaguauuagcaaacccucuuaugauga

SEQ ID NO: 134876 - RNA, 32 nt, Human
cucuucagugcaaauuguaucuuguuauaaaa

SEQ ID NO: 134877 - RNA, 32 nt, Human
cucuucaguggaggagaacaagaaauaaacaa

SEQ ID NO: 134878 - RNA, 23 nt, Human
cucuucaguucaagaagagaugu

SEQ ID NO: 134879 - RNA, 32 nt, Human
cucuucaguuucccuccucucuugccccagca

SEQ ID NO: 134880 - RNA, 32 nt, Human
cucuucauacuuccuggucucagccuugcuga

SEQ ID NO: 134881 - RNA, 20 nt, Human
cucuucaucaggacacuucc

SEQ ID NO: 134882 - RNA, 21 nt, Human
cucuucauccagcuaauccuc

SEQ ID NO: 134883 - RNA, 32 nt, Human
cucuucaucccccuguuguuuaccaguaacag

SEQ ID NO: 134884 - RNA, 24 nt, Human
cucuucauccucauccuccuccuc

SEQ ID NO: 134885 - RNA, 32 nt, Human
cucuucauccuggaagugggaacuggaguccc

SEQ ID NO: 134886 - RNA, 23 nt, Human
cucuucauccugucucucuccuc

SEQ ID NO: 134887 - RNA, 32 nt, Human
cucuucaucuuucucuucugcccuucuuuuug

SEQ ID NO: 134888 - RNA, 32 nt, Human
cucuucauggugcugcuccugcuaugguucca

SEQ ID NO: 134889 - RNA, 32 nt, Human
cucuucauguggccugagcuuccuccuaucac

SEQ ID NO: 134890 - RNA, 32 nt, Human
cucuucauguggcuuuucuuucuccaagaagg

SEQ ID NO: 134891 - RNA, 32 nt, Human
cucuucauuccucuucucuguguucauuccuc

SEQ ID NO: 134892 - RNA, 32 nt, Human
cucuucauucugucaugagaagaggaccaugc

SEQ ID NO: 134893 - RNA, 20 nt, Human
cucuuccaaauuuguggaga

SEQ ID NO: 134894 - RNA, 21 nt, Human
cucuuccaagaugcucuuccc

SEQ ID NO: 134895 - RNA, 32 nt, Human
cucuuccaagcaguggaggccugagggcuuga

SEQ ID NO: 134896 - RNA, 32 nt, Human
cucuuccaagcccugcguccagcgagcgucac

SEQ ID NO: 134897 - RNA, 32 nt, Human
cucuuccacaugggugcauuuguagcucugga

SEQ ID NO: 134898 - RNA, 32 nt, Human
cucuuccaccaccaccaccggcugcccaggug

SEQ ID NO: 134899 - RNA, 22 nt, Human
cucuuccaccccaaacaaaagg

SEQ ID NO: 134900 - RNA, 20 nt, Human
cucuuccaccucagccuccc

SEQ ID NO: 134901 - RNA, 20 nt, Human
cucuuccaccugcagccccc

SEQ ID NO: 134902 - RNA, 32 nt, Human
cucuuccacucgauuguucccagauccucccu

SEQ ID NO: 134903 - RNA, 32 nt, Human
cucuuccacugcauucccccggcgcguguggg

SEQ ID NO: 134904 - RNA, 32 nt, Human
cucuuccagaagcuguuggagagacauucagg

SEQ ID NO: 134905 - RNA, 32 nt, Human
cucuuccagcucccacaauuuucccaugauga

SEQ ID NO: 134906 - RNA, 32 nt, Human
cucuuccaggagguaggaguugguaugggccc

SEQ ID NO: 134907 - RNA, 32 nt, Human
cucuuccaggcacuggcaaugcagugaugaac

SEQ ID NO: 134908 - RNA, 32 nt, Human
cucuuccaggcaggccagcaaguggcgcuggg

SEQ ID NO: 134909 - RNA, 21 nt, Human
cucuuccaggccccaccuccc

SEQ ID NO: 134910 - RNA, 32 nt, Human
cucuuccaggugaaccugagguugaggcaucc

SEQ ID NO: 134911 - RNA, 32 nt, Human
cucuuccauccauugggccuuugaaaggacua

SEQ ID NO: 134912 - RNA, 32 nt, Human
cucuuccaugaggaaauaaauguggguugugc

SEQ ID NO: 134913 - RNA, 32 nt, Human
cucuuccaugcuggcugcagucugggaggcgu

SEQ ID NO: 134914 - RNA, 32 nt, Human
cucuuccauggaguaagaaggaagggagcaug

SEQ ID NO: 134915 - RNA, 32 nt, Human
cucuuccauuuucaaaggaucuucggcucuac

SEQ ID NO: 134916 - RNA, 32 nt, Human
cucuucccaaugugcuuucuucaugcaugcca

SEQ ID NO: 134917 - RNA, 20 nt, Human
cucuucccacaagaaauuca

SEQ ID NO: 134918 - RNA, 32 nt, Human
cucuucccacagacuuuuggccucaguguucc

SEQ ID NO: 134919 - RNA, 32 nt, Human
cucuucccacccugccccaggccaccugcugu

SEQ ID NO: 134920 - RNA, 32 nt, Human
cucuucccacuuccauucuugcacaccuuuug

SEQ ID NO: 134921 - RNA, 32 nt, Human
cucuucccagaccaccuccuucuuucccgccc

SEQ ID NO: 134922 - RNA, 32 nt, Human
cucuucccagagacccuccccacaucaugcuc

SEQ ID NO: 134923 - RNA, 32 nt, Human
cucuucccagcaccuggagccuuggaucauuu

SEQ ID NO: 134924 - RNA, 32 nt, Human
cucuucccagccuggauggagcuccagggcug

SEQ ID NO: 134925 - RNA, 32 nt, Human
cucuucccaguuacauuuuaugcaucuguaag

SEQ ID NO: 134926 - RNA, 32 nt, Human
cucuucccaguucucuuuauagaagcucuagg

SEQ ID NO: 134927 - RNA, 32 nt, Human
cucuucccaucuuuuccaacaguguucuccug

SEQ ID NO: 134928 - RNA, 32 nt, Human
cucuucccauuuuccaauccauccccagccau

SEQ ID NO: 134929 - RNA, 32 nt, Human
cucuuccccaaaauccagcaccaccuugguua

SEQ ID NO: 134930 - RNA, 32 nt, Human
cucuucccccacccggaguggccggcaguccc

SEQ ID NO: 134931 - RNA, 32 nt, Human
cucuucccccuucacucacucgccugcuuccc

SEQ ID NO: 134932 - RNA, 32 nt, Human
cucuucccccuuccccugcgcccucccucccu

SEQ ID NO: 134933 - RNA, 32 nt, Human
cucuuccccuaaaauuucugcagggaagcccc

SEQ ID NO: 134934 - RNA, 20 nt, Human
cucuuccccucuaaugcuca

SEQ ID NO: 134935 - RNA, 32 nt, Human
cucuuccccucuccccuucucuuccccgaggc

SEQ ID NO: 134936 - RNA, 22 nt, Human
cucuuccccugaauuuuugaga

SEQ ID NO: 134937 - RNA, 32 nt, Human
cucuuccccuugccccucccccagagggacuu

SEQ ID NO: 134938 - RNA, 32 nt, Human
cucuucccggcugccaucuccccaacaagcgu

SEQ ID NO: 134939 - RNA, 32 nt, Human
cucuucccuaaaggaaucuggccgagggcuug

SEQ ID NO: 134940 - RNA, 32 nt, Human
cucuucccuaucuccccuccuccccuuuucuu

SEQ ID NO: 134941 - RNA, 32 nt, Human
cucuucccucaccucagccuccgcuccccgcc

SEQ ID NO: 134942 - RNA, 32 nt, Human
cucuucccuccaccuccuccccuccuuagcag

SEQ ID NO: 134943 - RNA, 32 nt, Human
cucuucccuccaggcugacuuggggacagugg

SEQ ID NO: 134944 - RNA, 32 nt, Human
cucuucccuccaguguaugcucugccuuuuua

SEQ ID NO: 134945 - RNA, 32 nt, Human
cucuucccuccccaucacccaccucagugaua

SEQ ID NO: 134946 - RNA, 32 nt, Human
cucuucccucccccagucucucuucucaaucc

SEQ ID NO: 134947 - RNA, 32 nt, Human
cucuucccucccccucauccuccauucccuug

SEQ ID NO: 134948 - RNA, 32 nt, Human
cucuucccuccccuccucuccccuccccucuc

SEQ ID NO: 134949 - RNA, 32 nt, Human
cucuucccuccccucuccagcuacauacucug

SEQ ID NO: 134950 - RNA, 32 nt, Human
cucuucccuccuggcguccccggcugcccucg

SEQ ID NO: 134951 - RNA, 32 nt, Human
cucuucccuccuucccuucucuccuucccucu

SEQ ID NO: 134952 - RNA, 32 nt, Human
cucuucccucuucacaucacuuggcuuccuuu

SEQ ID NO: 134953 - RNA, 32 nt, Human
cucuucccugcaaaccauguuugccaaaggca

SEQ ID NO: 134954 - RNA, 32 nt, Human
cucuucccugcccuggcuucucuggcugugac

SEQ ID NO: 134955 - RNA, 32 nt, Human
cucuucccuguaggaagcccucucuguggcgc

SEQ ID NO: 134956 - RNA, 32 nt, Human
cucuucccuguauucauggcaacaucagcuga

SEQ ID NO: 134957 - RNA, 32 nt, Human
cucuucccugucuacugcucaggcucucccac

SEQ ID NO: 134958 - RNA, 32 nt, Human
cucuucccuuggagagucacuguucaccucag

SEQ ID NO: 134959 - RNA, 32 nt, Human
cucuucccuuucuacccaguacucgagcccag

SEQ ID NO: 134960 - RNA, 32 nt, Human
cucuucccuuucuccccuuccaccugcugcgg

SEQ ID NO: 134961 - RNA, 26 nt, Human
cucuuccgcccaggcugcagugcagu

SEQ ID NO: 134962 - RNA, 32 nt, Human
cucuuccgcccaggcugcagugcaguggcaug

SEQ ID NO: 134963 - RNA, 32 nt, Human
cucuuccgugugcucucgccacucccugcggg

SEQ ID NO: 134964 - RNA, 32 nt, Human
cucuuccucaaaggagccccuggucuucccug

SEQ ID NO: 134965 - RNA, 32 nt, Human
cucuuccucacuucccuguacucucaucgcuc

SEQ ID NO: 134966 - RNA, 32 nt, Human
cucuuccuccaaggcuggagugcagugacgcg

SEQ ID NO: 134967 - RNA, 32 nt, Human
cucuuccuccacccggcacuggggaagucaag

SEQ ID NO: 134968 - RNA, 32 nt, Human
cucuuccuccacugcugaacuggucccuaacu

SEQ ID NO: 134969 - RNA, 32 nt, Human
cucuuccuccacuucauuuuuccuuuguccuu

SEQ ID NO: 134970 - RNA, 32 nt, Human
cucuuccuccagcuggcucccuugucuccagg

SEQ ID NO: 134971 - RNA, 32 nt, Human
cucuuccucccucauuccaccuucccaugccc

SEQ ID NO: 134972 - RNA, 32 nt, Human
cucuuccucccuuccuccucuccccacuccuu

SEQ ID NO: 134973 - RNA, 32 nt, Human
cucuuccuccuccuagcuccccaagcucccug

SEQ ID NO: 134974 - RNA, 32 nt, Human
cucuuccuccuccuccuccucucccuccuccu

SEQ ID NO: 134975 - RNA, 32 nt, Human
cucuuccuccuccuccuccucucuaggcaccc

SEQ ID NO: 134976 - RNA, 32 nt, Human
cucuuccuccuccuccucuuccucauccucau

SEQ ID NO: 134977 - RNA, 32 nt, Human
cucuuccuccuccuccucuucucuccaccccu

SEQ ID NO: 134978 - RNA, 32 nt, Human
cucuuccucuacugcuggccaagacccgucac

SEQ ID NO: 134979 - RNA, 32 nt, Human
cucuuccucuccucuguggcuuuuccuguuau

SEQ ID NO: 134980 - RNA, 32 nt, Human
cucuuccucuguauaugcuuuugacuuuccug

SEQ ID NO: 134981 - RNA, 32 nt, Human
cucuuccugaguagcugcaacuacagacacau

SEQ ID NO: 134982 - RNA, 32 nt, Human
cucuuccugaucuggagccacagucugucugu

SEQ ID NO: 134983 - RNA, 32 nt, Human
cucuuccugcagcgccgguacauagccaaggc

SEQ ID NO: 134984 - RNA, 32 nt, Human
cucuuccugcauguggaugcugcaugucuggu

SEQ ID NO: 134985 - RNA, 32 nt, Human
cucuuccugcccaggccucucccaccaccacc

SEQ ID NO: 134986 - RNA, 32 nt, Human
cucuuccugccuccucaucucccuuaagcauc

SEQ ID NO: 134987 - RNA, 16 nt, Human
cucuuccugccugcca

SEQ ID NO: 134988 - RNA, 32 nt, Human
cucuuccugcuguuugccggccuccugcagag

SEQ ID NO: 134989 - RNA, 32 nt, Human
cucuuccuggaaggcggcugguacugcuucaa

SEQ ID NO: 134990 - RNA, 32 nt, Human
cucuuccugggaacuaaggggguauuuauuag

SEQ ID NO: 134991 - RNA, 32 nt, Human
cucuuccugugugagccaccacacccagccug

SEQ ID NO: 134992 - RNA, 32 nt, Human
cucuuccuucaucaaccaccuuccccaagcuu

SEQ ID NO: 134993 - RNA, 32 nt, Human
cucuuccuuccaagucugagcugugcuggggu

SEQ ID NO: 134994 - RNA, 20 nt, Human
cucuuccuuccccccauccc

SEQ ID NO: 134995 - RNA, 32 nt, Human
cucuuccuuccccucucauucucccucuaaug

SEQ ID NO: 134996 - RNA, 32 nt, Human
cucuuccuuccucuuuauagggagacacucug

SEQ ID NO: 134997 - RNA, 32 nt, Human
cucuuccuucuuuccaccgacaggggcgaggg

SEQ ID NO: 134998 - RNA, 32 nt, Human
cucuuccuuggacuucuuguguguucugugag

SEQ ID NO: 134999 - RNA, 32 nt, Human
cucuuccuuggcugcacugcccuguggguggu

SEQ ID NO: 135000 - RNA, 32 nt, Human
cucuuccuuguccuccuccucuccucucuauu

SEQ ID NO: 135001 - RNA, 32 nt, Human
cucuuccuuuguccuuagcauaauuucuaggc

SEQ ID NO: 135002 - RNA, 25 nt, Human
cucuucgcccaggcuggagugcagu

SEQ ID NO: 135003 - RNA, 32 nt, Human
cucuucggcagcugcaccuucugccucaacau

SEQ ID NO: 135004 - RNA, 32 nt, Human
cucuucgggaggcagcccugguucuaggaugc

SEQ ID NO: 135005 - RNA, 32 nt, Human
cucuucgucuccucccccucccccgucugacg

SEQ ID NO: 135006 - RNA, 32 nt, Human
cucuucgucuuccucaucuuccuccucuuccu

SEQ ID NO: 135007 - RNA, 32 nt, Human
cucuucgugcccuuugggguugcccagccugg

SEQ ID NO: 135008 - RNA, 32 nt, Human
cucuucuaaaaauacaaaaauuagcugggugu

SEQ ID NO: 135009 - RNA, 32 nt, Human
cucuucuaaaaauacaaaaauuagcuggucuu

SEQ ID NO: 135010 - RNA, 32 nt, Human
cucuucuaaaaauacaaauauuagcugggcgu

SEQ ID NO: 135011 - RNA, 32 nt, Human
cucuucuacccuuagaagucugaggccagacu

SEQ ID NO: 135012 - RNA, 32 nt, Human
cucuucuauggacugguuguugccaaacagcc

SEQ ID NO: 135013 - RNA, 32 nt, Human
cucuucuauugcccaguuuccccagccagaac

SEQ ID NO: 135014 - RNA, 32 nt, Human
cucuucuauuugcauuucugcacuuugguggu

SEQ ID NO: 135015 - RNA, 18 nt, Human
cucuucucacagcuccac

SEQ ID NO: 135016 - RNA, 32 nt, Human
cucuucucacccaggcuggaaugcaguggcac

SEQ ID NO: 135017 - RNA, 32 nt, Human
cucuucucaccuuuggcauuggcacacugggg

SEQ ID NO: 135018 - RNA, 24 nt, Human
cucuucucacugcaaccuccaccu

SEQ ID NO: 135019 - RNA, 32 nt, Human
cucuucucacugguugauacucuguuccuaag

SEQ ID NO: 135020 - RNA, 32 nt, Human
cucuucucaggggagucucagagcaggagccu

SEQ ID NO: 135021 - RNA, 32 nt, Human
cucuucucagucacgggggauggaauuguuuc

SEQ ID NO: 135022 - RNA, 32 nt, Human
cucuucucaguguggcuggauuaagagcagcc

SEQ ID NO: 135023 - RNA, 32 nt, Human
cucuucuccacagaggaggacagagcagacag

SEQ ID NO: 135024 - RNA, 32 nt, Human
cucuucuccagagauuacaaaaauguagcuuc

SEQ ID NO: 135025 - RNA, 32 nt, Human
cucuucuccaucuccaagcagacaaccuuugu

SEQ ID NO: 135026 - RNA, 32 nt, Human
cucuucuccauuugccucuuccuuccuauuuc

SEQ ID NO: 135027 - RNA, 32 nt, Human
cucuucucccauuuucuugguauguacucagg

SEQ ID NO: 135028 - RNA, 32 nt, Human
cucuucuccuacucugccuuggccucacugag

SEQ ID NO: 135029 - RNA, 32 nt, Human
cucuucuccuacucugggucuucuauccuggu

SEQ ID NO: 135030 - RNA, 32 nt, Human
cucuucuccuugccuugcuucucccauuuccu

SEQ ID NO: 135031 - RNA, 32 nt, Human
cucuucucgguagcuuugaaucuuaagcuucu

SEQ ID NO: 135032 - RNA, 32 nt, Human
cucuucucuacaaagcacaacacuaauguucg

SEQ ID NO: 135033 - RNA, 23 nt, Human
cucuucucucaaccuuuugggga

SEQ ID NO: 135034 - RNA, 32 nt, Human
cucuucucucaaggagcacaguccugggaaag

SEQ ID NO: 135035 - RNA, 32 nt, Human
cucuucucuccccaccccuccuuggcucucca

SEQ ID NO: 135036 - RNA, 32 nt, Human
cucuucucuccccucugucccucuucaggaag

SEQ ID NO: 135037 - RNA, 32 nt, Human
cucuucucuccccuuuuccuucagagugaauc

SEQ ID NO: 135038 - RNA, 32 nt, Human
cucuucucucccucccccuucaggggcucccu

SEQ ID NO: 135039 - RNA, 32 nt, Human
cucuucucucggaaccugcacacaaacugggg

SEQ ID NO: 135040 - RNA, 32 nt, Human
cucuucucucuccccuuccucugcacuuccuu

SEQ ID NO: 135041 - RNA, 32 nt, Human
cucuucucucucuuccccuccugucucuccuc

SEQ ID NO: 135042 - RNA, 32 nt, Human
cucuucucuggcagaguggccccagguucuuc

SEQ ID NO: 135043 - RNA, 32 nt, Human
cucuucucuguccucaaacuugccuuugcucu

SEQ ID NO: 135044 - RNA, 32 nt, Human
cucuucucuuccccuucuccccaucgccacug

SEQ ID NO: 135045 - RNA, 22 nt, Human
cucuucucuuccuccccagguu

SEQ ID NO: 135046 - RNA, 32 nt, Human
cucuucucuucucuaaagaaucaugucccagc

SEQ ID NO: 135047 - RNA, 32 nt, Human
cucuucucuuucuccccucuucgccacccuag

SEQ ID NO: 135048 - RNA, 32 nt, Human
cucuucucuuuuccucauucuuuucuucuucu

SEQ ID NO: 135049 - RNA, 32 nt, Human
cucuucugaaacucugccaccucucucucuuu

SEQ ID NO: 135050 - RNA, 32 nt, Human
cucuucugaacaaauaaaggagcaugccgauu

SEQ ID NO: 135051 - RNA, 32 nt, Human
cucuucugagugaacugaggaaggugcuuaga

SEQ ID NO: 135052 - RNA, 20 nt, Human
cucuucugaucucuaacaca

SEQ ID NO: 135053 - RNA, 32 nt, Human
cucuucugauucugcugcucacugucauagcc

SEQ ID NO: 135054 - RNA, 32 nt, Human
cucuucugcacucugagcuggccagccccucg

SEQ ID NO: 135055 - RNA, 32 nt, Human
cucuucugcaguauccucccuggcagaacacg

SEQ ID NO: 135056 - RNA, 32 nt, Human
cucuucugcucagccugugaccagcucuuucu

SEQ ID NO: 135057 - RNA, 32 nt, Human
cucuucugcucccugaaccucuuaacuuaaua

SEQ ID NO: 135058 - RNA, 32 nt, Human
cucuucugcuguucugcuccucccagacagag

SEQ ID NO: 135059 - RNA, 32 nt, Human
cucuucugcuuugacaaagaaaaugacauugg

SEQ ID NO: 135060 - RNA, 32 nt, Human
cucuucuggaagugagaucugccuguccgggg

SEQ ID NO: 135061 - RNA, 32 nt, Human
cucuucuggcugcacuucaccugcugcuugag

SEQ ID NO: 135062 - RNA, 32 nt, Human
cucuucugggagaccccucuccccacguaggg

SEQ ID NO: 135063 - RNA, 32 nt, Human
cucuucuggucaccaggcuguucaguggacuc

SEQ ID NO: 135064 - RNA, 32 nt, Human
cucuucugugaaaggguucagagcagauuuug

SEQ ID NO: 135065 - RNA, 32 nt, Human
cucuucugugugguuuccauccuggguaauaa

SEQ ID NO: 135066 - RNA, 32 nt, Human
cucuucuguuagcucuggacucuuaacacuua

SEQ ID NO: 135067 - RNA, 32 nt, Human
cucuucuuaagagguccuuuuguguuucaguu

SEQ ID NO: 135068 - RNA, 32 nt, Human
cucuucuucaaaggaccagguccuguuccucu

SEQ ID NO: 135069 - RNA, 32 nt, Human
cucuucuucacuggaaaccuggcaaggaucca

SEQ ID NO: 135070 - RNA, 32 nt, Human
cucuucuucccaugcuggagugcaauggcgca

SEQ ID NO: 135071 - RNA, 32 nt, Human
cucuucuuccucuugcgucuucccggccccuc

SEQ ID NO: 135072 - RNA, 32 nt, Human
cucuucuuccuuuugcugaaucagcuggagaa

SEQ ID NO: 135073 - RNA, 32 nt, Human
cucuucuugcagcuguugagcgcaccuaacca

SEQ ID NO: 135074 - RNA, 32 nt, Human
cucuucuugcugguggguggggcaguuugguu

SEQ ID NO: 135075 - RNA, 32 nt, Human
cucuucuuggccugauguuuguccucacaggc

SEQ ID NO: 135076 - RNA, 32 nt, Human
cucuucuuuaacugggaacacaggcucucaca

SEQ ID NO: 135077 - RNA, 32 nt, Human
cucuucuuuccucugcugcauuguucugccau

SEQ ID NO: 135078 - RNA, 32 nt, Human
cucuucuuuccuggcccacgccgcuccgaggc

SEQ ID NO: 135079 - RNA, 21 nt, Human
cucuucuuuggugcuucccca

SEQ ID NO: 135080 - RNA, 32 nt, Human
cucuucuuugucucucccaguuucuggugguu

SEQ ID NO: 135081 - RNA, 32 nt, Human
cucuugaaggcugagcugggaggaucacuuga

SEQ ID NO: 135082 - RNA, 32 nt, Human
cucuugaauagcugggauuacaggcgcccgcc

SEQ ID NO: 135083 - RNA, 32 nt, Human
cucuugacaauccaguguguuugaucuuaggu

SEQ ID NO: 135084 - RNA, 23 nt, Human
cucuugacacuccuugggauuug

SEQ ID NO: 135085 - RNA, 32 nt, Human
cucuugacagcacaccuccucucuuuccaugu

SEQ ID NO: 135086 - RNA, 32 nt, Human
cucuugaccugcuccgcccccuucccuggagg

SEQ ID NO: 135087 - RNA, 32 nt, Human
cucuugacgacuccacagauaccccgaagcca

SEQ ID NO: 135088 - RNA, 32 nt, Human
cucuugacugccucucucuuaccuguucaguu

SEQ ID NO: 135089 - RNA, 32 nt, Human
cucuugacuuccccacugcucucuguggugag

SEQ ID NO: 135090 - RNA, 32 nt, Human
cucuugagauuccauauacuuuagggguugcu

SEQ ID NO: 135091 - RNA, 23 nt, Human
cucuugagcccaggaguuugaga

SEQ ID NO: 135092 - RNA, 24 nt, Human
cucuugagcccuccuuggggccug

SEQ ID NO: 135093 - RNA, 19 nt, Human
cucuugagcucaggaguuc

SEQ ID NO: 135094 - RNA, 21 nt, Human
cucuugagggccuggacgcag

SEQ ID NO: 135095 - RNA, 32 nt, Human
cucuugagguucaggagauucuaaauugaaua

SEQ ID NO: 135096 - RNA, 32 nt, Human
cucuugaguagcugggauuacaggcaugcgcc

SEQ ID NO: 135097 - RNA, 32 nt, Human
cucuugaguagcugggauuacaggcgcccacc

SEQ ID NO: 135098 - RNA, 32 nt, Human
cucuugaguccuucugagaugauggcucuggg

SEQ ID NO: 135099 - RNA, 32 nt, Human
cucuugagugauuugugugcuuuccggcaaau

SEQ ID NO: 135100 - RNA, 32 nt, Human
cucuugaguggcugggauugcaggcgcccgcg

SEQ ID NO: 135101 - RNA, 32 nt, Human
cucuugaguggcugggauugcgggcacaugca

SEQ ID NO: 135102 - RNA, 19 nt, Human
cucuugaguucugcagcuu

SEQ ID NO: 135103 - RNA, 32 nt, Human
cucuugaguugcugggacuauaggcauguacc

SEQ ID NO: 135104 - RNA, 32 nt, Human
cucuugauaaaagcuguugcaggccuuugcua

SEQ ID NO: 135105 - RNA, 32 nt, Human
cucuugaucccaggcccugccuaagccucagc

SEQ ID NO: 135106 - RNA, 21 nt, Human
cucuugauggcauuucccuuc

SEQ ID NO: 135107 - RNA, 32 nt, Human
cucuugaugucacccuccgcuccugggacacg

SEQ ID NO: 135108 - RNA, 32 nt, Human
cucuugauucugggauuucucccucucagugg

SEQ ID NO: 135109 - RNA, 32 nt, Human
cucuugauugauuucauacagaagaugacugu

SEQ ID NO: 135110 - RNA, 32 nt, Human
cucuugcaauguggguaaccuccaaccugggu

SEQ ID NO: 135111 - RNA, 32 nt, Human
cucuugcacauguacacaggcacuaacauggc

SEQ ID NO: 135112 - RNA, 32 nt, Human
cucuugcaccagguagaaguuggcagccugag

SEQ ID NO: 135113 - RNA, 32 nt, Human
cucuugcacugguacccuggggccacauucuc

SEQ ID NO: 135114 - RNA, 32 nt, Human
cucuugcagcaucagagaguucacacuagaga

SEQ ID NO: 135115 - RNA, 32 nt, Human
cucuugcaucagcgugacccagauaugagaca

SEQ ID NO: 135116 - RNA, 32 nt, Human
cucuugcaucccuccugcaggccagccauggc

SEQ ID NO: 135117 - RNA, 32 nt, Human
cucuugcaucuucuuccacugggcucuggauu

SEQ ID NO: 135118 - RNA, 32 nt, Human
cucuugcauucugguggguacugggggcagaa

SEQ ID NO: 135119 - RNA, 32 nt, Human
cucuugccaaagggccuggaguagaaggacaa

SEQ ID NO: 135120 - RNA, 32 nt, Human
cucuugccacagaacccaggugcucccugcug

SEQ ID NO: 135121 - RNA, 21 nt, Human
cucuugccaccccccaucccu

SEQ ID NO: 135122 - RNA, 32 nt, Human
cucuugccacugccucuuccucccucauucca

SEQ ID NO: 135123 - RNA, 32 nt, Human
cucuugccaguacaauccccaggcguuuucug

SEQ ID NO: 135124 - RNA, 32 nt, Human
cucuugccaucuuuggaauggauuccucagua

SEQ ID NO: 135125 - RNA, 21 nt, Human
cucuugcccaaggugagccag

SEQ ID NO: 135126 - RNA, 24 nt, Human
cucuugcccagacuggaauacagu

SEQ ID NO: 135127 - RNA, 27 nt, Human
cucuugcccagagcugugcagugcagu

SEQ ID NO: 135128 - RNA, 32 nt, Human
cucuugcccagagcugugcagugcaguggcug

SEQ ID NO: 135129 - RNA, 24 nt, Human
cucuugcccaggcaggaguacagu

SEQ ID NO: 135130 - RNA, 32 nt, Human
cucuugcccaggcuggagcgcaaguggcgcga

SEQ ID NO: 135131 - RNA, 22 nt, Human
cucuugcccaggcuggagugca

SEQ ID NO: 135132 - RNA, 32 nt, Human
cucuugcccaggcuggagugcaauggcacguu

SEQ ID NO: 135133 - RNA, 32 nt, Human
cucuugcccaggcuggagugcaguggcacggu

SEQ ID NO: 135134 - RNA, 32 nt, Human
cucuugcccaggcuggagugcagugguaugau

SEQ ID NO: 135135 - RNA, 32 nt, Human
cucuugcccaggcuggagugcaguggugcgau

SEQ ID NO: 135136 - RNA, 24 nt, Human
cucuugcccaggcuggagugucgu

SEQ ID NO: 135137 - RNA, 32 nt, Human
cucuugcccaggcuggggugucguggcgugau

SEQ ID NO: 135138 - RNA, 32 nt, Human
cucuugcccaggcuguagugcuguggcacgau

SEQ ID NO: 135139 - RNA, 22 nt, Human
cucuugccccacgcggagccag

SEQ ID NO: 135140 - RNA, 32 nt, Human
cucuugccccuccaggaagcugcagcgggccu

SEQ ID NO: 135141 - RNA, 32 nt, Human
cucuugcccuccccaucccaccaccuuggagc

SEQ ID NO: 135142 - RNA, 32 nt, Human
cucuugccguccaggcuggagugcaauggcgu

SEQ ID NO: 135143 - RNA, 32 nt, Human
cucuugccuauaaggccagcuacuuuauaauc

SEQ ID NO: 135144 - RNA, 20 nt, Human
cucuugccucaaucucccca

SEQ ID NO: 135145 - RNA, 32 nt, Human
cucuugccucaccuauuccuuagauucuuggu

SEQ ID NO: 135146 - RNA, 32 nt, Human
cucuugccucagccuccugaauagcugggacu

SEQ ID NO: 135147 - RNA, 32 nt, Human
cucuugccucagccuccugaauaucugggauu

SEQ ID NO: 135148 - RNA, 32 nt, Human
cucuugccucagccuccuggguagcugggauu

SEQ ID NO: 135149 - RNA, 32 nt, Human
cucuugccuccaccccucugcggacucugcag

SEQ ID NO: 135150 - RNA, 32 nt, Human
cucuugccucccuccugccccugcugccucug

SEQ ID NO: 135151 - RNA, 32 nt, Human
cucuugccuccuggcagccucugcaggcccaa

SEQ ID NO: 135152 - RNA, 32 nt, Human
cucuugccuccuguuagccucugcaggcccaa

SEQ ID NO: 135153 - RNA, 21 nt, Human
cucuugccucuccuccauccc

SEQ ID NO: 135154 - RNA, 32 nt, Human
cucuugccugaggggaaagagagaugggccag

SEQ ID NO: 135155 - RNA, 32 nt, Human
cucuugccugggagaggggaagcagaucugag

SEQ ID NO: 135156 - RNA, 32 nt, Human
cucuugccuguaaucccagcacuuugauaggc

SEQ ID NO: 135157 - RNA, 32 nt, Human
cucuugccuguaaucccagcacuuugggaggc

SEQ ID NO: 135158 - RNA, 32 nt, Human
cucuugccuguaaucccagcacuuuggggagg

SEQ ID NO: 135159 - RNA, 32 nt, Human
cucuugccuguaaucccagcauucugggaggc

SEQ ID NO: 135160 - RNA, 32 nt, Human
cucuugccuguaaucuuagcacuuugggaggc

SEQ ID NO: 135161 - RNA, 32 nt, Human
cucuugccuguagucccggcacuuugggaggc

SEQ ID NO: 135162 - RNA, 26 nt, Human
cucuugcgcgugcgccggggcacagg

SEQ ID NO: 135163 - RNA, 32 nt, Human
cucuugcuauuauuucugccccuagagauugu

SEQ ID NO: 135164 - RNA, 32 nt, Human
cucuugcuccuaugguucccauaggcacaccu

SEQ ID NO: 135165 - RNA, 32 nt, Human
cucuugcuccucauuccuccccugcccuuuuc

SEQ ID NO: 135166 - RNA, 32 nt, Human
cucuugcuccugucucugccucugggucauga

SEQ ID NO: 135167 - RNA, 32 nt, Human
cucuugcuccuugccaggugcuucaucagucc

SEQ ID NO: 135168 - RNA, 32 nt, Human
cucuugcucugaguuaugugacaugccucagc

SEQ ID NO: 135169 - RNA, 21 nt, Human
cucuugcugcacgggcuccug

SEQ ID NO: 135170 - RNA, 25 nt, Human
cucuugcugcccaggcuagagugca

SEQ ID NO: 135171 - RNA, 32 nt, Human
cucuugcugcccaggcuagagugcaauggugc

SEQ ID NO: 135172 - RNA, 25 nt, Human
cucuugcugcccaggcuggagugca

SEQ ID NO: 135173 - RNA, 32 nt, Human
cucuugcugcccaggcuggagugcaauggugc

SEQ ID NO: 135174 - RNA, 27 nt, Human
cucuugcugcccaggcuggagugcagu

SEQ ID NO: 135175 - RNA, 32 nt, Human
cucuugcugcccaggcuggagugcaguggcuc

SEQ ID NO: 135176 - RNA, 32 nt, Human
cucuugcugcuggcccacugcccuggcucacg

SEQ ID NO: 135177 - RNA, 32 nt, Human
cucuugcugcuggcccacugcccuggcucauc

SEQ ID NO: 135178 - RNA, 32 nt, Human
cucuugcuucauuccuggggccagcaucccuc

SEQ ID NO: 135179 - RNA, 32 nt, Human
cucuugcuuccuuucacaaaugagcugaggcc

SEQ ID NO: 135180 - RNA, 32 nt, Human
cucuugcuucucuguuaccaucuguuaagaug

SEQ ID NO: 135181 - RNA, 32 nt, Human
cucuugcuucuucaaagagcuuugggaaauua

SEQ ID NO: 135182 - RNA, 32 nt, Human
cucuugcuugugucagcaccuuguucuucacu

SEQ ID NO: 135183 - RNA, 32 nt, Human
cucuuggaagcuucugcucucaagaggcagcu

SEQ ID NO: 135184 - RNA, 32 nt, Human
cucuuggaauauuguugaggcagauugcauga

SEQ ID NO: 135185 - RNA, 32 nt, Human
cucuuggagaacugaggcugaggguagaggga

SEQ ID NO: 135186 - RNA, 32 nt, Human
cucuuggagaagaguccucaaugagccuggcc

SEQ ID NO: 135187 - RNA, 32 nt, Human
cucuuggagagggacaagugagagccagccaa

SEQ ID NO: 135188 - RNA, 32 nt, Human
cucuuggagccaaagggauguggugugaguug

SEQ ID NO: 135189 - RNA, 19 nt, Human
cucuuggaguucagcaggu

SEQ ID NO: 135190 - RNA, 32 nt, Human
cucuuggccagccugugucuccugucuaugac

SEQ ID NO: 135191 - RNA, 32 nt, Human
cucuuggcccuccccucuuucucccccaaccc

SEQ ID NO: 135192 - RNA, 32 nt, Human
cucuuggccugagaucucugugcaggaaccaa

SEQ ID NO: 135193 - RNA, 32 nt, Human
cucuuggcgaggguggagggaggagugucauu

SEQ ID NO: 135194 - RNA, 32 nt, Human
cucuuggcuacaccacucucccagccugugac

SEQ ID NO: 135195 - RNA, 32 nt, Human
cucuuggcucacugcaaccuccgccucccugg

SEQ ID NO: 135196 - RNA, 32 nt, Human
cucuuggcucccacccucaaagcccauguucu

SEQ ID NO: 135197 - RNA, 19 nt, Human
cucuuggcucucccggggc

SEQ ID NO: 135198 - RNA, 32 nt, Human
cucuuggcucugcccgaggauguggccaagac

SEQ ID NO: 135199 - RNA, 32 nt, Human
cucuuggcucugcccgaggauguggccguucc

SEQ ID NO: 135200 - RNA, 32 nt, Human
cucuuggcugcugggccagggccugguuuuuc

SEQ ID NO: 135201 - RNA, 32 nt, Human
cucuuggcuggggcugacccugggcagggacu

SEQ ID NO: 135202 - RNA, 32 nt, Human
cucuugggaagaccagcuuugcagugacagcu

SEQ ID NO: 135203 - RNA, 32 nt, Human
cucuugggagccaagaguaggcaggagccccg

SEQ ID NO: 135204 - RNA, 32 nt, Human
cucuugggagccaagaguaggcaggagcccug

SEQ ID NO: 135205 - RNA, 23 nt, Human
cucuugggcaacuacagcagaga

SEQ ID NO: 135206 - RNA, 25 nt, Human
cucuugggcaggcagagaguacaga

SEQ ID NO: 135207 - RNA, 32 nt, Human
cucuugggcaucccccucaccagcugacuggc

SEQ ID NO: 135208 - RNA, 19 nt, Human
cucuugggccucugcacuu

SEQ ID NO: 135209 - RNA, 32 nt, Human
cucuugggccucugcacuuucuugccuccaug

SEQ ID NO: 135210 - RNA, 19 nt, Human
cucuugggcugaccuuuau

SEQ ID NO: 135211 - RNA, 32 nt, Human
cucuuggggaccugaguuugggugggguggca

SEQ ID NO: 135212 - RNA, 32 nt, Human
cucuuggggaggcagaggcaggaggaucgcuu

SEQ ID NO: 135213 - RNA, 32 nt, Human
cucuuggggccccagcggugggagugcaaaag

SEQ ID NO: 135214 - RNA, 32 nt, Human
cucuuggggcugggacuuucucacccugcggc

SEQ ID NO: 135215 - RNA, 32 nt, Human
cucuuggggcuuuuuaguuucugccguccugg

SEQ ID NO: 135216 - RNA, 32 nt, Human
cucuugggggccuugcagccuccaccccuaca

SEQ ID NO: 135217 - RNA, 32 nt, Human
cucuuggguggaggagacaaggggagggcacg

SEQ ID NO: 135218 - RNA, 32 nt, Human
cucuugggugggugccauuugguccagugauu

SEQ ID NO: 135219 - RNA, 32 nt, Human
cucuugggugucucuugucucuggcaugguuu

SEQ ID NO: 135220 - RNA, 32 nt, Human
cucuuggguuggagcaggagacccucauuugc

SEQ ID NO: 135221 - RNA, 17 nt, Human
cucuugguaacaaucau

SEQ ID NO: 135222 - RNA, 32 nt, Human
cucuugguaaucuaccaccaagcuuguggacu

SEQ ID NO: 135223 - RNA, 26 nt, Human
cucuugguaucagggcucucucccca

SEQ ID NO: 135224 - RNA, 23 nt, Human
cucuuggucauacuggagugcgg

SEQ ID NO: 135225 - RNA, 24 nt, Human
cucuugguccaagaccugggucag

SEQ ID NO: 135226 - RNA, 23 nt, Human
cucuuggucugaguaggcaucau

SEQ ID NO: 135227 - RNA, 19 nt, Human
cucuuggucuuggcuucau

SEQ ID NO: 135228 - RNA, 20 nt, Human
cucuuggugaaacacaucau

SEQ ID NO: 135229 - RNA, 32 nt, Human
cucuuggugcccaggcuagagugcaauggcgc

SEQ ID NO: 135230 - RNA, 32 nt, Human
cucuuggugucugguuucuguccccggggcau

SEQ ID NO: 135231 - RNA, 32 nt, Human
cucuuggugugcgaaguauuucagaaggccau

SEQ ID NO: 135232 - RNA, 32 nt, Human
cucuugguuacaaacuccuucccuucuggugc

SEQ ID NO: 135233 - RNA, 32 nt, Human
cucuugguucacgccauucuccugccccagcc

SEQ ID NO: 135234 - RNA, 32 nt, Human
cucuugguugucuuccuaaggguguuuguuga

SEQ ID NO: 135235 - RNA, 32 nt, Human
cucuugguuucugucaguauguaaaccagaaa

SEQ ID NO: 135236 - RNA, 32 nt, Human
cucuuguacagccaguucuuuuaugcaaaaau

SEQ ID NO: 135237 - RNA, 32 nt, Human
cucuuguaccccaggcuggagugcaauggcgu

SEQ ID NO: 135238 - RNA, 32 nt, Human
cucuuguagcccaggcuggagugcaauggcag

SEQ ID NO: 135239 - RNA, 32 nt, Human
cucuuguagcccaggcugggaugcaauggcau

SEQ ID NO: 135240 - RNA, 32 nt, Human
cucuuguauugagcccucagagaguccacagu

SEQ ID NO: 135241 - RNA, 32 nt, Human
cucuugucaaccagauuggagugcaguggugc

SEQ ID NO: 135242 - RNA, 27 nt, Human
cucuugucaaccgggcuggagugcagu

SEQ ID NO: 135243 - RNA, 32 nt, Human
cucuugucaaccgggcuggagugcaguggugc

SEQ ID NO: 135244 - RNA, 32 nt, Human
cucuugucacaaacugccccagcaagaauuug

SEQ ID NO: 135245 - RNA, 32 nt, Human
cucuugucacccacgcuggagugcaauggugu

SEQ ID NO: 135246 - RNA, 32 nt, Human
cucuugucacccaggcaggagugcaguggcgu

SEQ ID NO: 135247 - RNA, 32 nt, Human
cucuugucacccaggcuggaguacaaugaugc

SEQ ID NO: 135248 - RNA, 32 nt, Human
cucuugucacccaggcuggaguacaguggcac

SEQ ID NO: 135249 - RNA, 32 nt, Human
cucuugucacccaggcuggagugcaauggcac

SEQ ID NO: 135250 - RNA, 32 nt, Human
cucuugucacccaggcuggagugcaauggcgc

SEQ ID NO: 135251 - RNA, 32 nt, Human
cucuugucacccaggcuggagugcaguagugc

SEQ ID NO: 135252 - RNA, 32 nt, Human
cucuugucacccaggcuggagugcaguggcac

SEQ ID NO: 135253 - RNA, 32 nt, Human
cucuugucacccaggcuggagugcaguggcgc

SEQ ID NO: 135254 - RNA, 32 nt, Human
cucuugucacccaggcuggagugcaguggugc

SEQ ID NO: 135255 - RNA, 32 nt, Human
cucuugucacccaggcuggaguguaguggugu

SEQ ID NO: 135256 - RNA, 32 nt, Human
cucuugucaccccagcuggagugcaguagcac

SEQ ID NO: 135257 - RNA, 25 nt, Human
cucuugucaccgaggcuggagugca

SEQ ID NO: 135258 - RNA, 32 nt, Human
cucuugucaccgaggcuggagugcaaugacau

SEQ ID NO: 135259 - RNA, 25 nt, Human
cucuugucaccuagacuggagugca

SEQ ID NO: 135260 - RNA, 32 nt, Human
cucuugucaccuagacuggagugcaauggcgu

SEQ ID NO: 135261 - RNA, 32 nt, Human
cucuugucaccuaggcaagagugcaauggcac

SEQ ID NO: 135262 - RNA, 32 nt, Human
cucuugucaccuaggccagagugcagugucau

SEQ ID NO: 135263 - RNA, 27 nt, Human
cucuugucaccuaggcuggagugcagu

SEQ ID NO: 135264 - RNA, 32 nt, Human
cucuugucacucaggcuggagugcaguggugu

SEQ ID NO: 135265 - RNA, 32 nt, Human
cucuugucagcccagccaagagcccagacgac

SEQ ID NO: 135266 - RNA, 32 nt, Human
cucuugucauccuggcuggagugugauggugc

SEQ ID NO: 135267 - RNA, 32 nt, Human
cucuugucauucucucuugccgcugccaugua

SEQ ID NO: 135268 - RNA, 32 nt, Human
cucuuguccaggcuggaggagugcagucguac

SEQ ID NO: 135269 - RNA, 19 nt, Human
cucuuguccaggcuggagu

SEQ ID NO: 135270 - RNA, 32 nt, Human
cucuuguccaggcuggaguauaauggugcgau

SEQ ID NO: 135271 - RNA, 22 nt, Human
cucuuguccaggcuggagugca

SEQ ID NO: 135272 - RNA, 32 nt, Human
cucuuguccaggcuggagugcaauagcgcgau

SEQ ID NO: 135273 - RNA, 32 nt, Human
cucuugucccacccuucuucucuuccccauuc

SEQ ID NO: 135274 - RNA, 32 nt, Human
cucuugucccccagacuggagugcaauggcac

SEQ ID NO: 135275 - RNA, 32 nt, Human
cucuugucccccaggcuggaguggugcagugg

SEQ ID NO: 135276 - RNA, 32 nt, Human
cucuuguccuugucucccccagaagcagccgc

SEQ ID NO: 135277 - RNA, 32 nt, Human
cucuugucgcccaacuagaguguaguggcaca

SEQ ID NO: 135278 - RNA, 32 nt, Human
cucuugucgcccaggcuggagguuaauggcau

SEQ ID NO: 135279 - RNA, 32 nt, Human
cucuugucgcccaggcuggagugcaacgguau

SEQ ID NO: 135280 - RNA, 32 nt, Human
cucuugucgcccaggcuggagugcaauggcgc

SEQ ID NO: 135281 - RNA, 32 nt, Human
cucuugucgcccaggcuggagugcaauggcgu

SEQ ID NO: 135282 - RNA, 32 nt, Human
cucuugucgcccaggcuggagugcaguggcac

SEQ ID NO: 135283 - RNA, 32 nt, Human
cucuugucgcccaggcuggagugcaguggcgc

SEQ ID NO: 135284 - RNA, 32 nt, Human
cucuugucgcccaggcuggagugcaguggcgu

SEQ ID NO: 135285 - RNA, 32 nt, Human
cucuugucgcccaggcuguagugcagugguac

SEQ ID NO: 135286 - RNA, 27 nt, Human
cucuugucgcucagccuggagugcagu

SEQ ID NO: 135287 - RNA, 32 nt, Human
cucuugucgcucagccuggagugcagugagcu

SEQ ID NO: 135288 - RNA, 32 nt, Human
cucuugucgcucaggcuggagugccauggcgc

SEQ ID NO: 135289 - RNA, 27 nt, Human
cucuugucggccaggcuagagugcagu

SEQ ID NO: 135290 - RNA, 32 nt, Human
cucuugucggccaggcuagagugcaguggcgc

SEQ ID NO: 135291 - RNA, 32 nt, Human
cucuugucucccacccugagauugggcauggg

SEQ ID NO: 135292 - RNA, 32 nt, Human
cucuugucucccagacuggacugcaguggcac

SEQ ID NO: 135293 - RNA, 32 nt, Human
cucuugucucccagacuggagugcaauggcau

SEQ ID NO: 135294 - RNA, 32 nt, Human
cucuugucucccaggcuggagugcaaucgcgc

SEQ ID NO: 135295 - RNA, 32 nt, Human
cucuugucucccaggcuggagugcagugacac

SEQ ID NO: 135296 - RNA, 32 nt, Human
cucuugucuccccggcuggagugcaguggcau

SEQ ID NO: 135297 - RNA, 32 nt, Human
cucuugucucugcugacuucagccuggucaug

SEQ ID NO: 135298 - RNA, 32 nt, Human
cucuugucucugcugcucacaggccugcccau

SEQ ID NO: 135299 - RNA, 32 nt, Human
cucuugucuguaaucccagcgcucugggaggc

SEQ ID NO: 135300 - RNA, 32 nt, Human
cucuugugacccucaugugagcacuuuugaga

SEQ ID NO: 135301 - RNA, 32 nt, Human
cucuugugaucuuccaaaauuagcucugauua

SEQ ID NO: 135302 - RNA, 24 nt, Human
cucuugugcccaggcuggagugca

SEQ ID NO: 135303 - RNA, 32 nt, Human
cucuugugcccaggcuggagugcaauagcucg

SEQ ID NO: 135304 - RNA, 32 nt, Human
cucuuguggaauugcauucaaaccagaacagu

SEQ ID NO: 135305 - RNA, 32 nt, Human
cucuugugggcaacacuaaccugaaacucuuu

SEQ ID NO: 135306 - RNA, 32 nt, Human
cucuugugggcugugguugcugugacaguuuc

SEQ ID NO: 135307 - RNA, 32 nt, Human
cucuuguggucagcaaagccccugccaugcag

SEQ ID NO: 135308 - RNA, 26 nt, Human
cucuuguguccaggcuggagugcagu

SEQ ID NO: 135309 - RNA, 32 nt, Human
cucuuguguccaggcuggagugcaguggcacu

SEQ ID NO: 135310 - RNA, 32 nt, Human
cucuuguguugaggggacaccaggaugagguc

SEQ ID NO: 135311 - RNA, 32 nt, Human
cucuuguuacccaggcaggagugcaguggcgu

SEQ ID NO: 135312 - RNA, 32 nt, Human
cucuuguuacccaggcuggagugcaauggcac

SEQ ID NO: 135313 - RNA, 32 nt, Human
cucuuguuacccaggcuggagugcaguggcgc

SEQ ID NO: 135314 - RNA, 32 nt, Human
cucuuguuacccaggcuggagugcaguggcgu

SEQ ID NO: 135315 - RNA, 32 nt, Human
cucuuguuauccaggcuggggugcaauggugc

SEQ ID NO: 135316 - RNA, 32 nt, Human
cucuuguuccccaggcuggagugcaauggcac

SEQ ID NO: 135317 - RNA, 32 nt, Human
cucuuguuccuuccuuucuuuccguuucucua

SEQ ID NO: 135318 - RNA, 32 nt, Human
cucuuguucgcacaaucuacacugccuuaccu

SEQ ID NO: 135319 - RNA, 27 nt, Human
cucuuguugaugaggcuggagugcagu

SEQ ID NO: 135320 - RNA, 32 nt, Human
cucuuguugaugaggcuggagugcaguggcgc

SEQ ID NO: 135321 - RNA, 32 nt, Human
cucuuguugcccaagcuggagugcaauggcac

SEQ ID NO: 135322 - RNA, 32 nt, Human
cucuuguugcccaagcuggagugcaauggcgc

SEQ ID NO: 135323 - RNA, 32 nt, Human
cucuuguugcccaagcuggagugcaguggcgc

SEQ ID NO: 135324 - RNA, 32 nt, Human
cucuuguugcccaagcuggagugcaguggugc

SEQ ID NO: 135325 - RNA, 25 nt, Human
cucuuguugcccacgcuggagugca

SEQ ID NO: 135326 - RNA, 32 nt, Human
cucuuguugcccacgcuggagugcaauggugc

SEQ ID NO: 135327 - RNA, 32 nt, Human
cucuuguugcccagacuggagugcaauggcac

SEQ ID NO: 135328 - RNA, 25 nt, Human
cucuuguugcccagccuggagugca

SEQ ID NO: 135329 - RNA, 32 nt, Human
cucuuguugcccagccuggagugcaauagcgu

SEQ ID NO: 135330 - RNA, 32 nt, Human
cucuuguugcccaggcaggaguacaauggcag

SEQ ID NO: 135331 - RNA, 32 nt, Human
cucuuguugcccaggccagagugcaauggcgu

SEQ ID NO: 135332 - RNA, 32 nt, Human
cucuuguugcccaggcccgagugcaguggugc

SEQ ID NO: 135333 - RNA, 32 nt, Human
cucuuguugcccaggcggaguacaaugguggg

SEQ ID NO: 135334 - RNA, 32 nt, Human
cucuuguugcccaggcggagugcaguggaaca

SEQ ID NO: 135335 - RNA, 32 nt, Human
cucuuguugcccaggcuagagggcaauggugc

SEQ ID NO: 135336 - RNA, 32 nt, Human
cucuuguugcccaggcuagagugcaauggcac

SEQ ID NO: 135337 - RNA, 32 nt, Human
cucuuguugcccaggcuagagugcaauggcau

SEQ ID NO: 135338 - RNA, 32 nt, Human
cucuuguugcccaggcuagagugcaauggcgc

SEQ ID NO: 135339 - RNA, 32 nt, Human
cucuuguugcccaggcuagcaugcaauggugu

SEQ ID NO: 135340 - RNA, 32 nt, Human
cucuuguugcccaggcugaagugcaauguugu

SEQ ID NO: 135341 - RNA, 32 nt, Human
cucuuguugcccaggcugaagugcaguguugu

SEQ ID NO: 135342 - RNA, 32 nt, Human
cucuuguugcccaggcuggaaauggcgcgauc

SEQ ID NO: 135343 - RNA, 32 nt, Human
cucuuguugcccaggcuggaaugcaguggcac

SEQ ID NO: 135344 - RNA, 32 nt, Human
cucuuguugcccaggcuggagggcaauggugc

SEQ ID NO: 135345 - RNA, 32 nt, Human
cucuuguugcccaggcuggaguacaauggcau

SEQ ID NO: 135346 - RNA, 32 nt, Human
cucuuguugcccaggcuggaguacaauggcgc

SEQ ID NO: 135347 - RNA, 32 nt, Human
cucuuguugcccaggcuggaguacaauggcgu

SEQ ID NO: 135348 - RNA, 32 nt, Human
cucuuguugcccaggcuggaguacaauggugc

SEQ ID NO: 135349 - RNA, 32 nt, Human
cucuuguugcccaggcuggaguacagugguau

SEQ ID NO: 135350 - RNA, 32 nt, Human
cucuuguugcccaggcuggagugaaauggugc

SEQ ID NO: 135351 - RNA, 32 nt, Human
cucuuguugcccaggcuggagugaaguggcgu

SEQ ID NO: 135352 - RNA, 32 nt, Human
cucuuguugcccaggcuggagugcaacggcac

SEQ ID NO: 135353 - RNA, 32 nt, Human
cucuuguugcccaggcuggagugcaacggcau

SEQ ID NO: 135354 - RNA, 32 nt, Human
cucuuguugcccaggcuggagugcaacggugc

SEQ ID NO: 135355 - RNA, 32 nt, Human
cucuuguugcccaggcuggagugcaauagcau

SEQ ID NO: 135356 - RNA, 32 nt, Human
cucuuguugcccaggcuggagugcaauagcgc

SEQ ID NO: 135357 - RNA, 32 nt, Human
cucuuguugcccaggcuggagugcaaugacac

SEQ ID NO: 135358 - RNA, 32 nt, Human
cucuuguugcccaggcuggagugcaaugcgcg

SEQ ID NO: 135359 - RNA, 32 nt, Human
cucuuguugcccaggcuggagugcaauggagc

SEQ ID NO: 135360 - RNA, 32 nt, Human
cucuuguugcccaggcuggagugcaauggcac

SEQ ID NO: 135361 - RNA, 32 nt, Human
cucuuguugcccaggcuggagugcaauggcau

SEQ ID NO: 135362 - RNA, 32 nt, Human
cucuuguugcccaggcuggagugcaauggcgc

SEQ ID NO: 135363 - RNA, 32 nt, Human
cucuuguugcccaggcuggagugcaauggcgu

SEQ ID NO: 135364 - RNA, 32 nt, Human
cucuuguugcccaggcuggagugcaaugguau

SEQ ID NO: 135365 - RNA, 32 nt, Human
cucuuguugcccaggcuggagugcaauggugc

SEQ ID NO: 135366 - RNA, 32 nt, Human
cucuuguugcccaggcuggagugcaguagcac

SEQ ID NO: 135367 - RNA, 32 nt, Human
cucuuguugcccaggcuggagugcagugacac

SEQ ID NO: 135368 - RNA, 32 nt, Human
cucuuguugcccaggcuggagugcaguggugc

SEQ ID NO: 135369 - RNA, 32 nt, Human
cucuuguugcccaggcuggagugcaguggugu

SEQ ID NO: 135370 - RNA, 32 nt, Human
cucuuguugcccaggcuggagugcauuggcgc

SEQ ID NO: 135371 - RNA, 32 nt, Human
cucuuguugcccaggcuggagugcggugguac

SEQ ID NO: 135372 - RNA, 32 nt, Human
cucuuguugcccaggcuggagugcguuggcgu

SEQ ID NO: 135373 - RNA, 32 nt, Human
cucuuguugcccaggcuggagugugaugggcu

SEQ ID NO: 135374 - RNA, 32 nt, Human
cucuuguugcccaggcugggagggcaauggca

SEQ ID NO: 135375 - RNA, 32 nt, Human
cucuuguugcccaggcuggugugcaauggcgu

SEQ ID NO: 135376 - RNA, 32 nt, Human
cucuuguugcccaggcuugagugcagugaugc

SEQ ID NO: 135377 - RNA, 32 nt, Human
cucuuguugcccagguuagagugcaguggcac

SEQ ID NO: 135378 - RNA, 32 nt, Human
cucuuguugcccagguuggaguguaauagcac

SEQ ID NO: 135379 - RNA, 25 nt, Human
cucuuguugcccgggcuggagugca

SEQ ID NO: 135380 - RNA, 32 nt, Human
cucuuguugcccgggcuggagugcaauggcgc

SEQ ID NO: 135381 - RNA, 32 nt, Human
cucuuguugcccgggcuggagugcaaugguga

SEQ ID NO: 135382 - RNA, 32 nt, Human
cucuuguugccuagcuggagugcaauggcgca

SEQ ID NO: 135383 - RNA, 25 nt, Human
cucuuguugccuaggcuggagugca

SEQ ID NO: 135384 - RNA, 32 nt, Human
cucuuguugccuaggcuggagugcaauggugc

SEQ ID NO: 135385 - RNA, 27 nt, Human
cucuuguugccuaggcuggagugcagu

SEQ ID NO: 135386 - RNA, 32 nt, Human
cucuuguugccuaggcuggagugcaguggcgc

SEQ ID NO: 135387 - RNA, 27 nt, Human
cucuuguugccugggcuggagugcagu

SEQ ID NO: 135388 - RNA, 27 nt, Human
cucuuguugcugaggcuggagugcagu

SEQ ID NO: 135389 - RNA, 32 nt, Human
cucuuguugcugaggcuggagugcaguggcac

SEQ ID NO: 135390 - RNA, 32 nt, Human
cucuuguuggcuaggcuggaguaaaauggugc

SEQ ID NO: 135391 - RNA, 32 nt, Human
cucuuguuguccaggcuagagugcaauggcau

SEQ ID NO: 135392 - RNA, 25 nt, Human
cucuuguuguccaggcuggagugca

SEQ ID NO: 135393 - RNA, 32 nt, Human
cucuuguuguccaggcuggagugcaauggcac

SEQ ID NO: 135394 - RNA, 32 nt, Human
cucuuguuguccaggcuggagugcaauggcgc

SEQ ID NO: 135395 - RNA, 27 nt, Human
cucuuguuguccaggcuggagugcagu

SEQ ID NO: 135396 - RNA, 32 nt, Human
cucuuguuguccaggcuggagugcaguggcgc

SEQ ID NO: 135397 - RNA, 25 nt, Human
cucuuguuguccagucuggagugca

SEQ ID NO: 135398 - RNA, 32 nt, Human
cucuuguuguccagucuggagugcaauggcac

SEQ ID NO: 135399 - RNA, 27 nt, Human
cucuuguugucuaggcuggagugccgu

SEQ ID NO: 135400 - RNA, 32 nt, Human
cucuuguugucuaggcuggagugccguggugc

SEQ ID NO: 135401 - RNA, 32 nt, Human
cucuuguuucccaggcuggagugcaaugggug

SEQ ID NO: 135402 - RNA, 32 nt, Human
cucuuguuucucaggcugccugcagaagaagu

SEQ ID NO: 135403 - RNA, 32 nt, Human
cucuuuaaaccagccaccuagccaaucaaggg

SEQ ID NO: 135404 - RNA, 32 nt, Human
cucuuuaagacagggucuugcucuguugccca

SEQ ID NO: 135405 - RNA, 32 nt, Human
cucuuuacacagauugcucugauucucacaac

SEQ ID NO: 135406 - RNA, 32 nt, Human
cucuuuaccauagcuuaagaaguaucccugau

SEQ ID NO: 135407 - RNA, 32 nt, Human
cucuuuaccuccuaauuccacacccucacugc

SEQ ID NO: 135408 - RNA, 32 nt, Human
cucuuuaccuggggccuggcuuuucugagauu

SEQ ID NO: 135409 - RNA, 32 nt, Human
cucuuuacuccuccagcaggcuuuucaaaaug

SEQ ID NO: 135410 - RNA, 21 nt, Human
cucuuuagaaaggaaaaugac

SEQ ID NO: 135411 - RNA, 32 nt, Human
cucuuuagaauggaacacagaaaacaaaccuu

SEQ ID NO: 135412 - RNA, 20 nt, Human
cucuuuagccaccgccgccg

SEQ ID NO: 135413 - RNA, 32 nt, Human
cucuuuagcugguaugcaagauuugcuaagca

SEQ ID NO: 135414 - RNA, 32 nt, Human
cucuuuaggaaggggagcagcggcugggagug

SEQ ID NO: 135415 - RNA, 32 nt, Human
cucuuuaggacacaaaacaaugcugaaguuaa

SEQ ID NO: 135416 - RNA, 20 nt, Human
cucuuuaggaggcagacuug

SEQ ID NO: 135417 - RNA, 32 nt, Human
cucuuuaggcauggacucuccuuucccuuugu

SEQ ID NO: 135418 - RNA, 19 nt, Human
cucuuuauaauguauuuua

SEQ ID NO: 135419 - RNA, 32 nt, Human
cucuuuaucugugaaugggaaaagccauuuuu

SEQ ID NO: 135420 - RNA, 32 nt, Human
cucuuuaugagaaucuuacaugauuauucgug

SEQ ID NO: 135421 - RNA, 32 nt, Human
cucuuuauggcuuauuggaauaggagcucauu

SEQ ID NO: 135422 - RNA, 32 nt, Human
cucuuuauuggcuccugcuccaaccaugacaa

SEQ ID NO: 135423 - RNA, 32 nt, Human
cucuuucaauaugagagacagaaagcagaaac

SEQ ID NO: 135424 - RNA, 31 nt, Human
cucuuucacagcuggcagagcgagagaauau

SEQ ID NO: 135425 - RNA, 32 nt, Human
cucuuucacauucaagaagaguugaucaagau

SEQ ID NO: 135426 - RNA, 32 nt, Human
cucuuucaccacgugugaacugugggugaggu

SEQ ID NO: 135427 - RNA, 32 nt, Human
cucuuucacccagacuggagggcagcggcgag

SEQ ID NO: 135428 - RNA, 32 nt, Human
cucuuucacccaggccggacugcagcggcgcu

SEQ ID NO: 135429 - RNA, 26 nt, Human
cucuuucacccaggcuggagugcagu

SEQ ID NO: 135430 - RNA, 32 nt, Human
cucuuucacccaggcuggagugcaguggcacg

SEQ ID NO: 135431 - RNA, 32 nt, Human
cucuuucacgugggcucugccaugaccucuga

SEQ ID NO: 135432 - RNA, 32 nt, Human
cucuuucacucaggcuggaauguaguggagag

SEQ ID NO: 135433 - RNA, 32 nt, Human
cucuuucagccucugcuggcauccugcuuccc

SEQ ID NO: 135434 - RNA, 32 nt, Human
cucuuucauacagcacagcaaaugauaauagc

SEQ ID NO: 135435 - RNA, 32 nt, Human
cucuuucauacccugucucaguaacuauuugg

SEQ ID NO: 135436 - RNA, 32 nt, Human
cucuuucaucacaagcucaucuauauuccagg

SEQ ID NO: 135437 - RNA, 32 nt, Human
cucuuucaugugcaaucuuugcuucuuguagg

SEQ ID NO: 135438 - RNA, 32 nt, Human
cucuuucauucugcaguugucuggaagccugg

SEQ ID NO: 135439 - RNA, 32 nt, Human
cucuuucauuguccucccuccucucaaacucu

SEQ ID NO: 135440 - RNA, 32 nt, Human
cucuuucauuuuucucuuccugggauucauuu

SEQ ID NO: 135441 - RNA, 32 nt, Human
cucuuuccacaauacugagcugccucagaauc

SEQ ID NO: 135442 - RNA, 32 nt, Human
cucuuuccaguguucccucucucccuccaggg

SEQ ID NO: 135443 - RNA, 24 nt, Human
cucuuucccaggcugcaguacagu

SEQ ID NO: 135444 - RNA, 32 nt, Human
cucuuuccccugaaaauggcuuuuguucucaa

SEQ ID NO: 135445 - RNA, 32 nt, Human
cucuuucccuccccauccucuggcagaaauca

SEQ ID NO: 135446 - RNA, 32 nt, Human
cucuuucccuuucucuuuccuuucuuuccuuc

SEQ ID NO: 135447 - RNA, 32 nt, Human
cucuuuccgucucaggucgccgcugcgaaggg

SEQ ID NO: 135448 - RNA, 32 nt, Human
cucuuuccuaggccuuccacuaccuccuuucu

SEQ ID NO: 135449 - RNA, 32 nt, Human
cucuuuccucaaaucaaugucagggagucaaa

SEQ ID NO: 135450 - RNA, 32 nt, Human
cucuuuccuccuccuccucaccaagggcccaa

SEQ ID NO: 135451 - RNA, 19 nt, Human
cucuuuccuccuucaugcc

SEQ ID NO: 135452 - RNA, 20 nt, Human
cucuuuccucuuuuuggaga

SEQ ID NO: 135453 - RNA, 21 nt, Human
cucuuuccugccccuccccau

SEQ ID NO: 135454 - RNA, 32 nt, Human
cucuuuccuggaaugcagcccagacaccugug

SEQ ID NO: 135455 - RNA, 32 nt, Human
cucuuuccuggaaugcagcccaggcaccugug

SEQ ID NO: 135456 - RNA, 32 nt, Human
cucuuuccugguuugaaaguagcauggauguu

SEQ ID NO: 135457 - RNA, 32 nt, Human
cucuuuccuuauccaucucugaaacaaucugc

SEQ ID NO: 135458 - RNA, 32 nt, Human
cucuuuccuucccuccccucccccucugccuu

SEQ ID NO: 135459 - RNA, 26 nt, Human
cucuuucgccaaggcuggagugcagu

SEQ ID NO: 135460 - RNA, 32 nt, Human
cucuuucgccaaggcuggagugcaguggcacg

SEQ ID NO: 135461 - RNA, 32 nt, Human
cucuuucgcccaggauggagugcaguggugcg

SEQ ID NO: 135462 - RNA, 32 nt, Human
cucuuucgcccaggccggacugcaguggcagg

SEQ ID NO: 135463 - RNA, 32 nt, Human
cucuuucgcccaggccggacugcaguggcgca

SEQ ID NO: 135464 - RNA, 24 nt, Human
cucuuucgcccaggcuggagugca

SEQ ID NO: 135465 - RNA, 32 nt, Human
cucuuucgcccaggcuggagugcaauggugug

SEQ ID NO: 135466 - RNA, 26 nt, Human
cucuuucgcccaggcuggagugcagu

SEQ ID NO: 135467 - RNA, 32 nt, Human
cucuuucgcccaggcuggagugcaguggcgca

SEQ ID NO: 135468 - RNA, 32 nt, Human
cucuuucgcccaggcuggagugcagugguaug

SEQ ID NO: 135469 - RNA, 32 nt, Human
cucuuucgcccaggcuggagugcauuggcaug

SEQ ID NO: 135470 - RNA, 32 nt, Human
cucuuucgcccaggcuggcgugcaguggcaca

SEQ ID NO: 135471 - RNA, 32 nt, Human
cucuuucgcccaggcuggucucaaauuugugg

SEQ ID NO: 135472 - RNA, 20 nt, Human
cucuuucggccggcgccgcc

SEQ ID NO: 135473 - RNA, 32 nt, Human
cucuuucgggggcagaggcuuucucugggugc

SEQ ID NO: 135474 - RNA, 32 nt, Human
cucuuucgucuuucuucucacucccagcccug

SEQ ID NO: 135475 - RNA, 32 nt, Human
cucuuucuaaccucuucucuguccucaaacuu

SEQ ID NO: 135476 - RNA, 32 nt, Human
cucuuucuaaguuacccacagccucagauaug

SEQ ID NO: 135477 - RNA, 32 nt, Human
cucuuucuacagacuucugugaucacagcccc

SEQ ID NO: 135478 - RNA, 32 nt, Human
cucuuucuacagcaccccagucucagcacucu

SEQ ID NO: 135479 - RNA, 32 nt, Human
cucuuucuagccccagggaugcucaggaaagc

SEQ ID NO: 135480 - RNA, 32 nt, Human
cucuuucucaccuuucccaccucucuccccaa

SEQ ID NO: 135481 - RNA, 32 nt, Human
cucuuucucauuuugcaaacuacccagagcuc

SEQ ID NO: 135482 - RNA, 32 nt, Human
cucuuucuccaccccgccgagccuaaacuagu

SEQ ID NO: 135483 - RNA, 32 nt, Human
cucuuucucccaggcagggcucugcaggucca

SEQ ID NO: 135484 - RNA, 19 nt, Human
cucuuucuccccuuugaga

SEQ ID NO: 135485 - RNA, 32 nt, Human
cucuuucuccucccucuccuccucucaccuuc

SEQ ID NO: 135486 - RNA, 32 nt, Human
cucuuucucucccuccucccuguuuuaaauua

SEQ ID NO: 135487 - RNA, 32 nt, Human
cucuuucucucccucuccuaucggagcacaau

SEQ ID NO: 135488 - RNA, 32 nt, Human
cucuuucucucuccaucagcuuccucacugaa

SEQ ID NO: 135489 - RNA, 32 nt, Human
cucuuucucuggccacagcauccuggcucagc

SEQ ID NO: 135490 - RNA, 21 nt, Human
cucuuucucuggcuaauucag

SEQ ID NO: 135491 - RNA, 32 nt, Human
cucuuucucuguagaaaugaaaacuaaauaua

SEQ ID NO: 135492 - RNA, 32 nt, Human
cucuuucucugugccugcuccuuaugagugca

SEQ ID NO: 135493 - RNA, 32 nt, Human
cucuuucugccaccuccgccuucgcgguccuc

SEQ ID NO: 135494 - RNA, 32 nt, Human
cucuuucuggcccauccucugcuucacaccag

SEQ ID NO: 135495 - RNA, 32 nt, Human
cucuuucugggcccucagugaaugaccgccca

SEQ ID NO: 135496 - RNA, 32 nt, Human
cucuuucuguuuauuuugggaguugaaaauag

SEQ ID NO: 135497 - RNA, 32 nt, Human
cucuuucuucacucaggagguccaugaacuag

SEQ ID NO: 135498 - RNA, 32 nt, Human
cucuuucuuccaagccuagagccaccagccca

SEQ ID NO: 135499 - RNA, 32 nt, Human
cucuuucuuccagcguuucuccaucucacgcg

SEQ ID NO: 135500 - RNA, 32 nt, Human
cucuuucuuccuacuuuuaccauggaagcuac

SEQ ID NO: 135501 - RNA, 32 nt, Human
cucuuucuuguccucccagcugagcuuucuua

SEQ ID NO: 135502 - RNA, 32 nt, Human
cucuuugaaaaauacaaaaauuagcuggaugu

SEQ ID NO: 135503 - RNA, 32 nt, Human
cucuuugaaacuguaucaccuuugccaaguaa

SEQ ID NO: 135504 - RNA, 32 nt, Human
cucuuugaaagccagaacaagagagcgcuccu

SEQ ID NO: 135505 - RNA, 32 nt, Human
cucuuugaaaucaaacuuuucuauuucacugg

SEQ ID NO: 135506 - RNA, 32 nt, Human
cucuuugaacgaaccaacauuagccaguggag

SEQ ID NO: 135507 - RNA, 32 nt, Human
cucuuugaaguuaauauuuuucugccuucuaa

SEQ ID NO: 135508 - RNA, 32 nt, Human
cucuuugacaagguaggagcugugcuuggagg

SEQ ID NO: 135509 - RNA, 32 nt, Human
cucuuugacauuuucacccagcucuuucuuaa

SEQ ID NO: 135510 - RNA, 32 nt, Human
cucuuugacuccaucucuugguucccucuuuc

SEQ ID NO: 135511 - RNA, 32 nt, Human
cucuuugagcaacauggaauagagcuucaagc

SEQ ID NO: 135512 - RNA, 32 nt, Human
cucuuugagcaucucucuucauuccuggaaug

SEQ ID NO: 135513 - RNA, 32 nt, Human
cucuuugagcuucaguucccaaauuugcuaca

SEQ ID NO: 135514 - RNA, 22 nt, Human
cucuuugaggcuggaaugcagu

SEQ ID NO: 135515 - RNA, 32 nt, Human
cucuuugaguuugauggcagaaucacugaugg

SEQ ID NO: 135516 - RNA, 32 nt, Human
cucuuugaugccuaugauuuggaaaagcuccc

SEQ ID NO: 135517 - RNA, 32 nt, Human
cucuuugauucugugguuuggaggcucccaga

SEQ ID NO: 135518 - RNA, 32 nt, Human
cucuuugcaaccucugccuccugggcucaagc

SEQ ID NO: 135519 - RNA, 32 nt, Human
cucuuugcaacugucucucuucucagaguggu

SEQ ID NO: 135520 - RNA, 32 nt, Human
cucuuugcagagcugugcaugcgcagucugcu

SEQ ID NO: 135521 - RNA, 32 nt, Human
cucuuugcauaauccuguggcuucgcugucuu

SEQ ID NO: 135522 - RNA, 19 nt, Human
cucuuugccaccuaggcca

SEQ ID NO: 135523 - RNA, 32 nt, Human
cucuuugcccaggauacugaggagggcuggag

SEQ ID NO: 135524 - RNA, 32 nt, Human
cucuuugccccaggugagguggcauauucaga

SEQ ID NO: 135525 - RNA, 32 nt, Human
cucuuugccuccugcugaccccugacagcguc

SEQ ID NO: 135526 - RNA, 32 nt, Human
cucuuugccugauguugcugauugggcuggug

SEQ ID NO: 135527 - RNA, 32 nt, Human
cucuuugccuuaaaccucuuuauuucauugca

SEQ ID NO: 135528 - RNA, 32 nt, Human
cucuuugccuuuugaacucacuucaaagaugu

SEQ ID NO: 135529 - RNA, 32 nt, Human
cucuuugcguggaaucagaccucuuuugcagu

SEQ ID NO: 135530 - RNA, 32 nt, Human
cucuuugcuagugauguugcagccagggggcu

SEQ ID NO: 135531 - RNA, 32 nt, Human
cucuuugcuauucuauuggaguagccucccua

SEQ ID NO: 135532 - RNA, 32 nt, Human
cucuuugcucaauccaugccucuugcccucag

SEQ ID NO: 135533 - RNA, 32 nt, Human
cucuuugcucacuggcucuccuauaaucaguc

SEQ ID NO: 135534 - RNA, 32 nt, Human
cucuuugcucaugaggugagagcuggugugag

SEQ ID NO: 135535 - RNA, 32 nt, Human
cucuuugcucuccucguguccucucccagacc

SEQ ID NO: 135536 - RNA, 32 nt, Human
cucuuugcugauuucaggagcuacucuccucc

SEQ ID NO: 135537 - RNA, 32 nt, Human
cucuuugcuguugccugaggaccaagucuguc

SEQ ID NO: 135538 - RNA, 32 nt, Human
cucuuugcuuuccaccaugauugugaggccuc

SEQ ID NO: 135539 - RNA, 32 nt, Human
cucuuuggaaacaauaugcaaugugaagcggu

SEQ ID NO: 135540 - RNA, 32 nt, Human
cucuuuggaaggcagaggcaggaggaucacuu

SEQ ID NO: 135541 - RNA, 32 nt, Human
cucuuuggaauagcauuuuaaaaguugcaaca

SEQ ID NO: 135542 - RNA, 19 nt, Human
cucuuuggaccugaucuug

SEQ ID NO: 135543 - RNA, 32 nt, Human
cucuuuggagaaggaucaaaauucagauggaa

SEQ ID NO: 135544 - RNA, 32 nt, Human
cucuuuggaucauuuaggucucuugcauccuu

SEQ ID NO: 135545 - RNA, 32 nt, Human
cucuuuggcaccaggcaggagaugcugcaggc

SEQ ID NO: 135546 - RNA, 32 nt, Human
cucuuuggcacugugggggugccugagcacac

SEQ ID NO: 135547 - RNA, 32 nt, Human
cucuuuggccaucuuuuucugaaaauaaagug

SEQ ID NO: 135548 - RNA, 32 nt, Human
cucuuuggccucuuacugcucuccaugugaag

SEQ ID NO: 135549 - RNA, 32 nt, Human
cucuuuggcugcaguugcaccuccggccagag

SEQ ID NO: 135550 - RNA, 32 nt, Human
cucuuugggacugaaauggcuguuuaugaauc

SEQ ID NO: 135551 - RNA, 32 nt, Human
cucuuugggagcgaagccagaggaucccuaca

SEQ ID NO: 135552 - RNA, 32 nt, Human
cucuuugggaggccgaggcaggaggaucacuu

SEQ ID NO: 135553 - RNA, 32 nt, Human
cucuuugggaggccgaggcggguggaucacuc

SEQ ID NO: 135554 - RNA, 32 nt, Human
cucuuugggaggccgaggugggcagaucacga

SEQ ID NO: 135555 - RNA, 31 nt, Human
cucuuugggaggcugaagugggugaaucacu

SEQ ID NO: 135556 - RNA, 32 nt, Human
cucuuugggaggcugaagugggugaaucacuu

SEQ ID NO: 135557 - RNA, 32 nt, Human
cucuuugggaggcugaggcagguggaucacug

SEQ ID NO: 135558 - RNA, 32 nt, Human
cucuuugguagucucugcagcagccacagccu

SEQ ID NO: 135559 - RNA, 32 nt, Human
cucuuuggucaaaugcacauuuacagagagac

SEQ ID NO: 135560 - RNA, 32 nt, Human
cucuuuggucucauguccuacaaucugcauuc

SEQ ID NO: 135561 - RNA, 32 nt, Human
cucuuugguuucuguacaacuaccucccaacc

SEQ ID NO: 135562 - RNA, 32 nt, Human
cucuuugguuuuguaaaggugggugaagguug

SEQ ID NO: 135563 - RNA, 32 nt, Human
cucuuuguacccuuccuacucucagagagaag

SEQ ID NO: 135564 - RNA, 32 nt, Human
cucuuuguagaaguuuuguuuuugaaaugugu

SEQ ID NO: 135565 - RNA, 32 nt, Human
cucuuuguagugcuuggcuacucugugauggc

SEQ ID NO: 135566 - RNA, 32 nt, Human
cucuuugucacauaaucauacauguauuuuca

SEQ ID NO: 135567 - RNA, 32 nt, Human
cucuuuguccucagcuccuccugcuuucuugg

SEQ ID NO: 135568 - RNA, 32 nt, Human
cucuuugucuccaaucagucccacucccuccu

SEQ ID NO: 135569 - RNA, 32 nt, Human
cucuuugugcaaacaccaggaagcccugguua

SEQ ID NO: 135570 - RNA, 19 nt, Human
cucuuugugccgccagccg

SEQ ID NO: 135571 - RNA, 32 nt, Human
cucuuugugggaggggacggggagugagguug

SEQ ID NO: 135572 - RNA, 32 nt, Human
cucuuugugugugacuguuucucauguuugaa

SEQ ID NO: 135573 - RNA, 32 nt, Human
cucuuuguugcccaggcuggagugcaauggcg

SEQ ID NO: 135574 - RNA, 32 nt, Human
cucuuuguugcccaggcuggagugcaguggca

SEQ ID NO: 135575 - RNA, 32 nt, Human
cucuuuguuucugcaaggucugguuguuaaaa

SEQ ID NO: 135576 - RNA, 32 nt, Human
cucuuuguuuuuaaacuuguucuuauugaaaa

SEQ ID NO: 135577 - RNA, 32 nt, Human
cucuuuuaaauggugcccaacuuuucuaagug

SEQ ID NO: 135578 - RNA, 32 nt, Human
cucuuuuaaccuggcuuuaauagugauucaug

SEQ ID NO: 135579 - RNA, 32 nt, Human
cucuuuuacaucuugcucuucccagcauuccu

SEQ ID NO: 135580 - RNA, 32 nt, Human
cucuuuuacugacuuccauuguccucauuggu

SEQ ID NO: 135581 - RNA, 32 nt, Human
cucuuuuaugcccccucuauucuccucucucc

SEQ ID NO: 135582 - RNA, 32 nt, Human
cucuuuucaaacccaacugugcugcuaaccca

SEQ ID NO: 135583 - RNA, 32 nt, Human
cucuuuucacauaggagggaacagaccaugga

SEQ ID NO: 135584 - RNA, 32 nt, Human
cucuuuucacuccuagagaggaauugcaauug

SEQ ID NO: 135585 - RNA, 21 nt, Human
cucuuuucccuaucugccuaa

SEQ ID NO: 135586 - RNA, 32 nt, Human
cucuuuucccucccucuccuccccuucccucu

SEQ ID NO: 135587 - RNA, 32 nt, Human
cucuuuucccugcuuugguuuguuugaaaucu

SEQ ID NO: 135588 - RNA, 32 nt, Human
cucuuuucccuuccuuccuuccuuccuuccuu

SEQ ID NO: 135589 - RNA, 32 nt, Human
cucuuuucccuucuuuccuccugguuccgguc

SEQ ID NO: 135590 - RNA, 32 nt, Human
cucuuuuccugaagaaauccaauccuagcccu

SEQ ID NO: 135591 - RNA, 32 nt, Human
cucuuuuccuucaaucacccucugucucuccu

SEQ ID NO: 135592 - RNA, 32 nt, Human
cucuuuuccuuccuccucuuuggaauuuuccu

SEQ ID NO: 135593 - RNA, 32 nt, Human
cucuuuucuagcaaucauguccugcccaggcu

SEQ ID NO: 135594 - RNA, 22 nt, Human
cucuuuucuauuccccaucacu

SEQ ID NO: 135595 - RNA, 21 nt, Human
cucuuuucucauuccuccaac

SEQ ID NO: 135596 - RNA, 32 nt, Human
cucuuuucuccucuugauccuuucaagcgagu

SEQ ID NO: 135597 - RNA, 23 nt, Human
cucuuuucucuccucucuucugc

SEQ ID NO: 135598 - RNA, 32 nt, Human
cucuuuucuucccuuccuuuguuuucauaagc

SEQ ID NO: 135599 - RNA, 32 nt, Human
cucuuuucuugcuguaugccuagaaagugguu

SEQ ID NO: 135600 - RNA, 22 nt, Human
cucuuuucuuggguucuggaga

SEQ ID NO: 135601 - RNA, 32 nt, Human
cucuuuucuuucacuacuucccccucuuuauu

SEQ ID NO: 135602 - RNA, 22 nt, Human
cucuuuucuuuucuuuuugaga

SEQ ID NO: 135603 - RNA, 32 nt, Human
cucuuuugaauccauuccuuagcuuucccuag

SEQ ID NO: 135604 - RNA, 32 nt, Human
cucuuuugaucugccaaggauuuccucucaga

SEQ ID NO: 135605 - RNA, 32 nt, Human
cucuuuugcagguagggcuggccacaugaccc

SEQ ID NO: 135606 - RNA, 32 nt, Human
cucuuuugcaucccaucucucacucagaaccc

SEQ ID NO: 135607 - RNA, 32 nt, Human
cucuuuugcccagacuggagugaaguagcaug

SEQ ID NO: 135608 - RNA, 32 nt, Human
cucuuuugcccaggcuggagcgaagugacgag

SEQ ID NO: 135609 - RNA, 32 nt, Human
cucuuuugcccaggcuggauggagugcagugg

SEQ ID NO: 135610 - RNA, 32 nt, Human
cucuuuuguccaccagcccagccugacuccug

SEQ ID NO: 135611 - RNA, 32 nt, Human
cucuuuuguucaguuuuccaggagcuagauga

SEQ ID NO: 135612 - RNA, 20 nt, Human
cucuuuuuaaaaaccugccc

SEQ ID NO: 135613 - RNA, 22 nt, Human
cucuuuuuaagcccuggcagca

SEQ ID NO: 135614 - RNA, 32 nt, Human
cucuuuuuaaugaugucacuguuugcaagagu

SEQ ID NO: 135615 - RNA, 32 nt, Human
cucuuuuuacccacugacuccccagaacaacc

SEQ ID NO: 135616 - RNA, 32 nt, Human
cucuuuuuacccaggcuggagugcaaugaugc

SEQ ID NO: 135617 - RNA, 32 nt, Human
cucuuuuuacucugcucaaaaagcaucucucc

SEQ ID NO: 135618 - RNA, 32 nt, Human
cucuuuuuagagcuggaaguguaguggcuuuc

SEQ ID NO: 135619 - RNA, 32 nt, Human
cucuuuuuaggcacuuuggcaaaggaguguga

SEQ ID NO: 135620 - RNA, 32 nt, Human
cucuuuuuaugugguuuaauugccaagugucu

SEQ ID NO: 135621 - RNA, 32 nt, Human
cucuuuuucccuuauguuucuuucuuguuucg

SEQ ID NO: 135622 - RNA, 32 nt, Human
cucuuuuucuccucucugagccuuugucuauu

SEQ ID NO: 135623 - RNA, 32 nt, Human
cucuuuuucuuccuccuuugggaucauugugu

SEQ ID NO: 135624 - RNA, 32 nt, Human
cucuuuuucuuccucucggcuggaagaacauc

SEQ ID NO: 135625 - RNA, 32 nt, Human
cucuuuuugcacaggcugagugcaaugccgug

SEQ ID NO: 135626 - RNA, 22 nt, Human
cucuuuuugccauuuuuggagg

SEQ ID NO: 135627 - RNA, 32 nt, Human
cucuuuuugcccaggccggagugcaauggcac

SEQ ID NO: 135628 - RNA, 32 nt, Human
cucuuuuugcucuauuuccagaaaguucagag

SEQ ID NO: 135629 - RNA, 32 nt, Human
cugaaaaagauaacugauucaaugaagacccu

SEQ ID NO: 135630 - RNA, 19 nt, Human
cugaaaacaccuggccuca

SEQ ID NO: 135631 - RNA, 32 nt, Human
cugaaaacauguagagaagaugaguugaggac

SEQ ID NO: 135632 - RNA, 21 nt, Human
cugaaaaccagucuucucccu

SEQ ID NO: 135633 - RNA, 31 nt, Human
cugaaaacccucugaugccuguugaggagcc

SEQ ID NO: 135634 - RNA, 32 nt, Human
cugaaaaccugugaaaccucuuuuuauaaaaa

SEQ ID NO: 135635 - RNA, 32 nt, Human
cugaaaacucaggcuuugaguuacugaucuuc

SEQ ID NO: 135636 - RNA, 32 nt, Human
cugaaaagaaaugcugcuucucugugagcugg

SEQ ID NO: 135637 - RNA, 32 nt, Human
cugaaaagaacaguauugcuuuguaauagagu

SEQ ID NO: 135638 - RNA, 32 nt, Human
cugaaaagaacugauugcuguguuuacaugaa

SEQ ID NO: 135639 - RNA, 32 nt, Human
cugaaaagaagaggaggaggagagcgacggga

SEQ ID NO: 135640 - RNA, 32 nt, Human
cugaaaagcaacaggcuucucacuaccucuau

SEQ ID NO: 135641 - RNA, 32 nt, Human
cugaaaagccaaagaaauucacucuggcuagc

SEQ ID NO: 135642 - RNA, 32 nt, Human
cugaaaagccacucuggaccuagccuguccca

SEQ ID NO: 135643 - RNA, 32 nt, Human
cugaaaaggguguugcuaagcuguaaccgaua

SEQ ID NO: 135644 - RNA, 32 nt, Human
cugaaaagugagagguaguuuugauaguaaaa

SEQ ID NO: 135645 - RNA, 32 nt, Human
cugaaaaguuguuccugaccaggcucuaauga

SEQ ID NO: 135646 - RNA, 31 nt, Human
cugaaaauaaggugggcuucacuggagaaau

SEQ ID NO: 135647 - RNA, 32 nt, Human
cugaaaauaaucaacucaucucagucuuccug

SEQ ID NO: 135648 - RNA, 32 nt, Human
cugaaaauacaaaaauuagccaggcuuggugg

SEQ ID NO: 135649 - RNA, 32 nt, Human
cugaaaauacaaaaauuagcuggauguggugg

SEQ ID NO: 135650 - RNA, 32 nt, Human
cugaaaauacaaaaauuagcugggcgugguag

SEQ ID NO: 135651 - RNA, 32 nt, Human
cugaaaauacaaaaauuagcugggcguggugg

SEQ ID NO: 135652 - RNA, 32 nt, Human
cugaaaauacaaaaauuagcuggguguggugg

SEQ ID NO: 135653 - RNA, 32 nt, Human
cugaaaauauagaaauuagccaggcuuggagc

SEQ ID NO: 135654 - RNA, 32 nt, Human
cugaaaaugaaagugaagaagaaugagacagc

SEQ ID NO: 135655 - RNA, 32 nt, Human
cugaaaauugaggacuuuucugcuucauccag

SEQ ID NO: 135656 - RNA, 32 nt, Human
cugaaaauuuuccaagaauuuuaaccaccacc

SEQ ID NO: 135657 - RNA, 32 nt, Human
cugaaacaaaaauauaagaauuauuagcuacu

SEQ ID NO: 135658 - RNA, 32 nt, Human
cugaaacaagcaggccagaugugguggcucac

SEQ ID NO: 135659 - RNA, 31 nt, Human
cugaaacacagcuagcauacauagcaauaac

SEQ ID NO: 135660 - RNA, 32 nt, Human
cugaaacacauacuccuaauaacuaugggaau

SEQ ID NO: 135661 - RNA, 32 nt, Human
cugaaacaccguuguuuaaagacuucacacag

SEQ ID NO: 135662 - RNA, 32 nt, Human
cugaaacagauucugucauggaacucaacaga

SEQ ID NO: 135663 - RNA, 32 nt, Human
cugaaacagcauauaucacugugaaacuaaag

SEQ ID NO: 135664 - RNA, 24 nt, Human
cugaaacaggagaauagcuugaac

SEQ ID NO: 135665 - RNA, 24 nt, Human
cugaaacaggagaauugcuugaac

SEQ ID NO: 135666 - RNA, 32 nt, Human
cugaaacagucuguugagugcagccauggggg

SEQ ID NO: 135667 - RNA, 32 nt, Human
cugaaacaucuguccuaacuugagugccccaa

SEQ ID NO: 135668 - RNA, 32 nt, Human
cugaaacauucacacagggcucuuggauggac

SEQ ID NO: 135669 - RNA, 32 nt, Human
cugaaacauuuuuauaucaaaaaucagauugc

SEQ ID NO: 135670 - RNA, 32 nt, Human
cugaaaccaaaaauagggguaugaggauauga

SEQ ID NO: 135671 - RNA, 32 nt, Human
cugaaaccaaccagaaacacaaaaccaggaac

SEQ ID NO: 135672 - RNA, 32 nt, Human
cugaaaccaagaaaccugagaaccaagagaac

SEQ ID NO: 135673 - RNA, 32 nt, Human
cugaaaccaaggucuuuucaaauguggcuaaa

SEQ ID NO: 135674 - RNA, 32 nt, Human
cugaaaccacaguuucauuauucucauaaucc

SEQ ID NO: 135675 - RNA, 32 nt, Human
cugaaaccaccaccuccaccaccuugggacaa

SEQ ID NO: 135676 - RNA, 24 nt, Human
cugaaaccagauaagaacauuucu

SEQ ID NO: 135677 - RNA, 32 nt, Human
cugaaaccauaggaaagagcagaagcacaaga

SEQ ID NO: 135678 - RNA, 32 nt, Human
cugaaaccauaugaagagugggagaaaugucu

SEQ ID NO: 135679 - RNA, 32 nt, Human
cugaaaccauuuuagaagggagaagucaucga

SEQ ID NO: 135680 - RNA, 32 nt, Human
cugaaacccacugcccuguaacccccacucgu

SEQ ID NO: 135681 - RNA, 32 nt, Human
cugaaaccccacccuccaucaagguccugccu

SEQ ID NO: 135682 - RNA, 32 nt, Human
cugaaacccgggagucagaggcugcagagagc

SEQ ID NO: 135683 - RNA, 16 nt, Human
cugaaacccugggaug

SEQ ID NO: 135684 - RNA, 32 nt, Human
cugaaaccguuuccucuucucuuucccuggcc

SEQ ID NO: 135685 - RNA, 32 nt, Human
cugaaaccugggacacgagucugugaauaguc

SEQ ID NO: 135686 - RNA, 18 nt, Human
cugaaaccuucauccaca

SEQ ID NO: 135687 - RNA, 32 nt, Human
cugaaacgucaccagagagacagcuguugaga

SEQ ID NO: 135688 - RNA, 32 nt, Human
cugaaacucacgcugcuccagccugaggcuuc

SEQ ID NO: 135689 - RNA, 32 nt, Human
cugaaacucacucugugcugggcuuugguaug

SEQ ID NO: 135690 - RNA, 32 nt, Human
cugaaacucaggcuggaauacacuggcauggu

SEQ ID NO: 135691 - RNA, 32 nt, Human
cugaaacucaguucagggauuggggcuggcuu

SEQ ID NO: 135692 - RNA, 32 nt, Human
cugaaacugcauaagugaaaaucuuacaacag

SEQ ID NO: 135693 - RNA, 32 nt, Human
cugaaacugcuggguuucugccauggacuugg

SEQ ID NO: 135694 - RNA, 32 nt, Human
cugaaacuggaucccuuccuuacaccuuauac

SEQ ID NO: 135695 - RNA, 32 nt, Human
cugaaacuggaucccuuccuuacaccuuaugc

SEQ ID NO: 135696 - RNA, 32 nt, Human
cugaaacugggaacuuggaaaucaagugagac

SEQ ID NO: 135697 - RNA, 32 nt, Human
cugaaacuuccugcuauugccuaaagcuacgu

SEQ ID NO: 135698 - RNA, 32 nt, Human
cugaaacuugggaaggugagggauucagggga

SEQ ID NO: 135699 - RNA, 32 nt, Human
cugaaagaaagagagaaagaaagaaagaaaga

SEQ ID NO: 135700 - RNA, 32 nt, Human
cugaaagacagaagcuucguccagccacucuu

SEQ ID NO: 135701 - RNA, 31 nt, Human
cugaaagagacaaacucagccaaaaacacuu

SEQ ID NO: 135702 - RNA, 32 nt, Human
cugaaagagacacagucacauggccagaugag

SEQ ID NO: 135703 - RNA, 32 nt, Human
cugaaagagacacuucuauagacugcauccug

SEQ ID NO: 135704 - RNA, 32 nt, Human
cugaaagagacagggcugauguuaccuuuuuc

SEQ ID NO: 135705 - RNA, 32 nt, Human
cugaaagagccaguagagacagcuguagauaa

SEQ ID NO: 135706 - RNA, 32 nt, Human
cugaaagaggauccaccauuuucagcauggag

SEQ ID NO: 135707 - RNA, 32 nt, Human
cugaaagaucucuuccuuucuggagcuccuuu

SEQ ID NO: 135708 - RNA, 32 nt, Human
cugaaagauggcacccucccacccgcaggagu

SEQ ID NO: 135709 - RNA, 32 nt, Human
cugaaagcacccuucauagcuuagcccaggaa

SEQ ID NO: 135710 - RNA, 32 nt, Human
cugaaagcagagguacaacaccagccccaaag

SEQ ID NO: 135711 - RNA, 32 nt, Human
cugaaagcagcuuggaaauucggugucgaagg

SEQ ID NO: 135712 - RNA, 32 nt, Human
cugaaagcaggaugaggaaggccaaggagagu

SEQ ID NO: 135713 - RNA, 24 nt, Human
cugaaagcaggccccuuucuccca

SEQ ID NO: 135714 - RNA, 27 nt, Human
cugaaagccaaaggagucaggagaagg

SEQ ID NO: 135715 - RNA, 32 nt, Human
cugaaagccagcugccgaccagagccccacac

SEQ ID NO: 135716 - RNA, 32 nt, Human
cugaaagcuagcagcaucccugcagcaggcac

SEQ ID NO: 135717 - RNA, 32 nt, Human
cugaaagcugguguugagccugggcggcguga

SEQ ID NO: 135718 - RNA, 32 nt, Human
cugaaagcuugucacugauucuuugcuucagg

SEQ ID NO: 135719 - RNA, 32 nt, Human
cugaaaggaauaccucagaagagaugcuucau

SEQ ID NO: 135720 - RNA, 32 nt, Human
cugaaaggccaucaggacaacuguuagagaaa

SEQ ID NO: 135721 - RNA, 18 nt, Human
cugaaaggcucuucugaa

SEQ ID NO: 135722 - RNA, 32 nt, Human
cugaaaggcuuuucaaccacaaaacucaucug

SEQ ID NO: 135723 - RNA, 32 nt, Human
cugaaagggaaaggaaauggaaggaaggggaa

SEQ ID NO: 135724 - RNA, 32 nt, Human
cugaaagggaacaugugggcuaacaggccaca

SEQ ID NO: 135725 - RNA, 32 nt, Human
cugaaaggguaggucaaggcagcgguggaagg

SEQ ID NO: 135726 - RNA, 32 nt, Human
cugaaagggucugcgacacucucgggcaggcc

SEQ ID NO: 135727 - RNA, 32 nt, Human
cugaaaggucugccucacacaggccuucccug

SEQ ID NO: 135728 - RNA, 32 nt, Human
cugaaaggugacugucuaggaugcugaaugag

SEQ ID NO: 135729 - RNA, 32 nt, Human
cugaaaggugugguuuuauugaaugucuauuu

SEQ ID NO: 135730 - RNA, 18 nt, Human
cugaaagguugcacucua

SEQ ID NO: 135731 - RNA, 24 nt, Human
cugaaaguacugggauuacaagca

SEQ ID NO: 135732 - RNA, 32 nt, Human
cugaaaguacugggauuacaagcauaagccac

SEQ ID NO: 135733 - RNA, 32 nt, Human
cugaaagucaggccugcugcaggacaggaucc

SEQ ID NO: 135734 - RNA, 32 nt, Human
cugaaagucgcuacucgagccuugccaacugg

SEQ ID NO: 135735 - RNA, 32 nt, Human
cugaaagucucacccuuggagcccaccuugga

SEQ ID NO: 135736 - RNA, 32 nt, Human
cugaaagucuguguccaauuaugcacuggcca

SEQ ID NO: 135737 - RNA, 32 nt, Human
cugaaagucuuggccaggcaugguggcucaug

SEQ ID NO: 135738 - RNA, 32 nt, Human
cugaaagugaagccagcagccaagagccaccc

SEQ ID NO: 135739 - RNA, 32 nt, Human
cugaaagugaaguuguaaaaagaaaaggaaug

SEQ ID NO: 135740 - RNA, 32 nt, Human
cugaaagugacuuaucacucccaacuccaucc

SEQ ID NO: 135741 - RNA, 32 nt, Human
cugaaagugcccuugggcaccuccucagcugc

SEQ ID NO: 135742 - RNA, 22 nt, Human
cugaaagugcugggauuacagg

SEQ ID NO: 135743 - RNA, 32 nt, Human
cugaaaguggacugggugauucugucuggcag

SEQ ID NO: 135744 - RNA, 32 nt, Human
cugaaaguugggacucuggagagcggaggaga

SEQ ID NO: 135745 - RNA, 32 nt, Human
cugaaauaaaacacugugcugcugaguucauc

SEQ ID NO: 135746 - RNA, 32 nt, Human
cugaaauaacaugaagcagcagcuguggagau

SEQ ID NO: 135747 - RNA, 32 nt, Human
cugaaauaucagauuugucaucaggaauacuc

SEQ ID NO: 135748 - RNA, 32 nt, Human
cugaaauaugguagccuggcccagcuucuaaa

SEQ ID NO: 135749 - RNA, 32 nt, Human
cugaaaucaagaaaaacagaagggaugugcag

SEQ ID NO: 135750 - RNA, 32 nt, Human
cugaaaucaagaaaaagaacaguaugcauuua

SEQ ID NO: 135751 - RNA, 32 nt, Human
cugaaaucaagagcauggcuugagugugugaa

SEQ ID NO: 135752 - RNA, 32 nt, Human
cugaaaucacacuggcgggagugaagauugug

SEQ ID NO: 135753 - RNA, 32 nt, Human
cugaaaucaucuccuauuaagggauagaaauu

SEQ ID NO: 135754 - RNA, 32 nt, Human
cugaaaucaucucuccucuuuuuaaaccuuua

SEQ ID NO: 135755 - RNA, 32 nt, Human
cugaaauccaccugucuccaucuuccuugccu

SEQ ID NO: 135756 - RNA, 32 nt, Human
cugaaauccccaugguuccugccacuugcuaa

SEQ ID NO: 135757 - RNA, 32 nt, Human
cugaaaucggcuagcagcacugugagagaggu

SEQ ID NO: 135758 - RNA, 32 nt, Human
cugaaaucuagguccauugucaccucuucugg

SEQ ID NO: 135759 - RNA, 32 nt, Human
cugaaaucuagguggaagccaccaagaguucu

SEQ ID NO: 135760 - RNA, 32 nt, Human
cugaaaucuauucucauucuuguuugucaaga

SEQ ID NO: 135761 - RNA, 32 nt, Human
cugaaaucuuccugccaucaaauauuuuuagu

SEQ ID NO: 135762 - RNA, 32 nt, Human
cugaaaugacauugguuuuuacacuaagccuc

SEQ ID NO: 135763 - RNA, 32 nt, Human
cugaaaugaccagacacacugauuggaacugu

SEQ ID NO: 135764 - RNA, 32 nt, Human
cugaaaugauacaaacuuccaucuggucugac

SEQ ID NO: 135765 - RNA, 32 nt, Human
cugaaaugauuucacacucccacacgccacgg

SEQ ID NO: 135766 - RNA, 32 nt, Human
cugaaauggaaauucuuuguggcagauaacug

SEQ ID NO: 135767 - RNA, 32 nt, Human
cugaaauggacaagggcuccucacgggggugg

SEQ ID NO: 135768 - RNA, 32 nt, Human
cugaaauggaggcagaggugugggaggcagaa

SEQ ID NO: 135769 - RNA, 31 nt, Human
cugaaauguacaucuuuacauauaaaaaccu

SEQ ID NO: 135770 - RNA, 32 nt, Human
cugaaauguguaucuauguaacaucacuuaag

SEQ ID NO: 135771 - RNA, 32 nt, Human
cugaaauuccuaauaccuuuccuuuaucgugg

SEQ ID NO: 135772 - RNA, 32 nt, Human
cugaaauugagucugaccucaggaguguaguu

SEQ ID NO: 135773 - RNA, 32 nt, Human
cugaaauugcagaaucaggacuuuauagagac

SEQ ID NO: 135774 - RNA, 32 nt, Human
cugaaauugcagcagacucauugggcuacauu

SEQ ID NO: 135775 - RNA, 32 nt, Human
cugaaauugcugcugcccaucgcaugagccca

SEQ ID NO: 135776 - RNA, 21 nt, Human
cugaaauuucuaaauguggaa

SEQ ID NO: 135777 - RNA, 32 nt, Human
cugaacaaaagagggcgucuucuuauccucuc

SEQ ID NO: 135778 - RNA, 32 nt, Human
cugaacaaaaucaugccuuaccuuucuuuggu

SEQ ID NO: 135779 - RNA, 24 nt, Human
cugaacaaauaaccauggcuucca

SEQ ID NO: 135780 - RNA, 32 nt, Human
cugaacaacacggugaaacccugucacuacua

SEQ ID NO: 135781 - RNA, 24 nt, Human
cugaacaacauaacaagacccugu

SEQ ID NO: 135782 - RNA, 32 nt, Human
cugaacaacauggcaaaacccugucucugcaa

SEQ ID NO: 135783 - RNA, 24 nt, Human
cugaacaacauggugaaacccugu

SEQ ID NO: 135784 - RNA, 32 nt, Human
cugaacaacauggugaaacccugucuguacua

SEQ ID NO: 135785 - RNA, 32 nt, Human
cugaacaaccuguuucaaauugguuuuaaggc

SEQ ID NO: 135786 - RNA, 32 nt, Human
cugaacaacgagccuuuucacccuucuacucu

SEQ ID NO: 135787 - RNA, 32 nt, Human
cugaacaacuguaaucacaacacuuugggagg

SEQ ID NO: 135788 - RNA, 32 nt, Human
cugaacaacuuucugaaacacaaauuaaauuc

SEQ ID NO: 135789 - RNA, 32 nt, Human
cugaacaaggcuaguuccugcaccacccagga

SEQ ID NO: 135790 - RNA, 32 nt, Human
cugaacaaugacccaucaucucuugcuugcuu

SEQ ID NO: 135791 - RNA, 32 nt, Human
cugaacaauguggauaaugacacguaccuggg

SEQ ID NO: 135792 - RNA, 32 nt, Human
cugaacaauuguggucucucuuaacuugaggu

SEQ ID NO: 135793 - RNA, 32 nt, Human
cugaacacacagacucuuugagaaugaccaug

SEQ ID NO: 135794 - RNA, 32 nt, Human
cugaacacagaaggugugaacugaccucuaaa

SEQ ID NO: 135795 - RNA, 32 nt, Human
cugaacacggagauugucuuucugccacagaa

SEQ ID NO: 135796 - RNA, 32 nt, Human
cugaacacucugcuccagccaagguggugagg

SEQ ID NO: 135797 - RNA, 32 nt, Human
cugaacacugacugcacuuaccagucugauuu

SEQ ID NO: 135798 - RNA, 32 nt, Human
cugaacacugaggcuugagggagucucucugg

SEQ ID NO: 135799 - RNA, 21 nt, Human
cugaacacugucaucugccag

SEQ ID NO: 135800 - RNA, 32 nt, Human
cugaacagagagagccuaaaguccuagcuacu

SEQ ID NO: 135801 - RNA, 32 nt, Human
cugaacagagaugcacucuccagugcucccca

SEQ ID NO: 135802 - RNA, 27 nt, Human
cugaacagcgacagaaaacaccagaga

SEQ ID NO: 135803 - RNA, 18 nt, Human
cugaacaggaacagaaga

SEQ ID NO: 135804 - RNA, 32 nt, Human
cugaacaggaggcugaaauauuuauccgcugg

SEQ ID NO: 135805 - RNA, 32 nt, Human
cugaacaggagugaugccuccaggcagguggc

SEQ ID NO: 135806 - RNA, 32 nt, Human
cugaacagggcaccuuugggguccaggugugu

SEQ ID NO: 135807 - RNA, 22 nt, Human
cugaacaguggagcagcaaaga

SEQ ID NO: 135808 - RNA, 32 nt, Human
cugaacaguggcagcagagagcagucagggcu

SEQ ID NO: 135809 - RNA, 32 nt, Human
cugaacauaauaccaucugcaguauuauaaaa

SEQ ID NO: 135810 - RNA, 32 nt, Human
cugaacauaggguggcuggcagaggggacccc

SEQ ID NO: 135811 - RNA, 32 nt, Human
cugaacaucagccugggagacgcggugcugua

SEQ ID NO: 135812 - RNA, 32 nt, Human
cugaacaucagcuucaauccuccaucauuaau

SEQ ID NO: 135813 - RNA, 32 nt, Human
cugaacauccaccugucuggacguugcaugga

SEQ ID NO: 135814 - RNA, 32 nt, Human
cugaacaucuaggcuggaaccugcacaccucc

SEQ ID NO: 135815 - RNA, 32 nt, Human
cugaacaugaacacaggcaaagcugaugaugg

SEQ ID NO: 135816 - RNA, 32 nt, Human
cugaacaugccccucggccccagcacauggaa

SEQ ID NO: 135817 - RNA, 32 nt, Human
cugaacaugguggcgcguaccuguagucccag

SEQ ID NO: 135818 - RNA, 32 nt, Human
cugaacauuaccgacaacugugugauucacug

SEQ ID NO: 135819 - RNA, 32 nt, Human
cugaacauucuccaugaacaggugguuggauu

SEQ ID NO: 135820 - RNA, 32 nt, Human
cugaacauucuggaauccuccccacauucuag

SEQ ID NO: 135821 - RNA, 22 nt, Human
cugaacauuuucuuugguuaaa

SEQ ID NO: 135822 - RNA, 32 nt, Human
cugaaccaaaccuaauuguccuggucuuaagu

SEQ ID NO: 135823 - RNA, 32 nt, Human
cugaaccaacaguucccuucucugacaggggg

SEQ ID NO: 135824 - RNA, 32 nt, Human
cugaaccaacaucaggggcaccugccaugaug

SEQ ID NO: 135825 - RNA, 21 nt, Human
cugaaccaagauuucugccag

SEQ ID NO: 135826 - RNA, 32 nt, Human
cugaaccaagccccacucccuugcuaggggug

SEQ ID NO: 135827 - RNA, 32 nt, Human
cugaaccagagcuggagugaggaucaaacagg

SEQ ID NO: 135828 - RNA, 32 nt, Human
cugaaccagcuguguccagacugaggccccau

SEQ ID NO: 135829 - RNA, 32 nt, Human
cugaaccagugaaauuuuauuguugcauauua

SEQ ID NO: 135830 - RNA, 32 nt, Human
cugaaccaucucuuggacuccagccuguaugc

SEQ ID NO: 135831 - RNA, 32 nt, Human
cugaaccaugaucugagccucccuggagaagg

SEQ ID NO: 135832 - RNA, 32 nt, Human
cugaaccaugcccccaccuaagucacaaaaug

SEQ ID NO: 135833 - RNA, 21 nt, Human
cugaaccaugcucacuucugg

SEQ ID NO: 135834 - RNA, 32 nt, Human
cugaaccauuagauauccugccuggauggggu

SEQ ID NO: 135835 - RNA, 32 nt, Human
cugaaccauuucaaucuucugccuccuggaua

SEQ ID NO: 135836 - RNA, 32 nt, Human
cugaacccaaguguuuauuuaaaugucaacag

SEQ ID NO: 135837 - RNA, 32 nt, Human
cugaacccagaagcggagguugcagugagcug

SEQ ID NO: 135838 - RNA, 32 nt, Human
cugaacccagaggcggagguuguagugagccg

SEQ ID NO: 135839 - RNA, 32 nt, Human
cugaacccagcaccaucaguaccaaagucuua

SEQ ID NO: 135840 - RNA, 32 nt, Human
cugaacccagcccagcccgggaugagaaacug

SEQ ID NO: 135841 - RNA, 32 nt, Human
cugaacccaggaagaggagguugcagugagcc

SEQ ID NO: 135842 - RNA, 32 nt, Human
cugaacccaggagacagguugcagugagccga

SEQ ID NO: 135843 - RNA, 32 nt, Human
cugaacccaggaggcagagguugcaguaagcc

SEQ ID NO: 135844 - RNA, 32 nt, Human
cugaacccaggaggcagagguugcagugagcu

SEQ ID NO: 135845 - RNA, 32 nt, Human
cugaacccaggaggcagagguugcggugaguc

SEQ ID NO: 135846 - RNA, 32 nt, Human
cugaacccaggaggcggagcuugcagugagcc

SEQ ID NO: 135847 - RNA, 32 nt, Human
cugaacccaggaggcggagguugcagggaggg

SEQ ID NO: 135848 - RNA, 32 nt, Human
cugaacccaggaggcggagguugcagugagcu

SEQ ID NO: 135849 - RNA, 32 nt, Human
cugaacccaggagguggagguugcagugagcu

SEQ ID NO: 135850 - RNA, 32 nt, Human
cugaaccccacacacucucugccaugcacaca

SEQ ID NO: 135851 - RNA, 32 nt, Human
cugaaccccagagguggagguugcagugagcc

SEQ ID NO: 135852 - RNA, 32 nt, Human
cugaaccccauagugcagcccaaaaccacuuu

SEQ ID NO: 135853 - RNA, 32 nt, Human
cugaaccccaugccucugggggcacagggagg

SEQ ID NO: 135854 - RNA, 21 nt, Human
cugaacccccagccugggcuu

SEQ ID NO: 135855 - RNA, 21 nt, Human
cugaaccccccuaggugggcu

SEQ ID NO: 135856 - RNA, 32 nt, Human
cugaacccccuucauggacagaucccccacag

SEQ ID NO: 135857 - RNA, 18 nt, Human
cugaaccccucccuccau

SEQ ID NO: 135858 - RNA, 32 nt, Human
cugaaccccugcccuuucauucuugggccugc

SEQ ID NO: 135859 - RNA, 32 nt, Human
cugaacccgggaggcagaggcugcagugagcu

SEQ ID NO: 135860 - RNA, 32 nt, Human
cugaacccgggaggcagagguugcagugagcc

SEQ ID NO: 135861 - RNA, 32 nt, Human
cugaacccgggaggcggaggcugcagugggcc

SEQ ID NO: 135862 - RNA, 32 nt, Human
cugaacccgggaggcggagguugcagugagcu

SEQ ID NO: 135863 - RNA, 32 nt, Human
cugaacccgggaggcuaagguugcagugagcc

SEQ ID NO: 135864 - RNA, 32 nt, Human
cugaacccgggagguggagguugcagugagcc

SEQ ID NO: 135865 - RNA, 32 nt, Human
cugaacccuaguaauucuccuaucucagccuc

SEQ ID NO: 135866 - RNA, 18 nt, Human
cugaacccucuggcuuca

SEQ ID NO: 135867 - RNA, 32 nt, Human
cugaacccugcucccucgugggccagugaaaa

SEQ ID NO: 135868 - RNA, 23 nt, Human
cugaacccuggauagaaagccug

SEQ ID NO: 135869 - RNA, 32 nt, Human
cugaacccuuaucaagcagcugccugggacuc

SEQ ID NO: 135870 - RNA, 32 nt, Human
cugaaccuaaaaucaucaaagcagcaguggcc

SEQ ID NO: 135871 - RNA, 32 nt, Human
cugaaccuaaaauggugagcgagagucaccau

SEQ ID NO: 135872 - RNA, 32 nt, Human
cugaaccuaggagguggaggcugcagcgagcu

SEQ ID NO: 135873 - RNA, 32 nt, Human
cugaaccucauucugguucccugcugcgcugc

SEQ ID NO: 135874 - RNA, 32 nt, Human
cugaaccugaugcccaagcugaagacguagcu

SEQ ID NO: 135875 - RNA, 32 nt, Human
cugaaccugcagcagccagcacagcugaccuu

SEQ ID NO: 135876 - RNA, 32 nt, Human
cugaaccugcaggaauaccagagcaagaaacu

SEQ ID NO: 135877 - RNA, 32 nt, Human
cugaaccugcccuucagggagaaggggucauu

SEQ ID NO: 135878 - RNA, 32 nt, Human
cugaaccugggaggcggagguugcagugagcc

SEQ ID NO: 135879 - RNA, 32 nt, Human
cugaaccuguuuuccuugaugaugccuaaaac

SEQ ID NO: 135880 - RNA, 32 nt, Human
cugaaccuuccucuucuugggaugaauuggug

SEQ ID NO: 135881 - RNA, 32 nt, Human
cugaacgagacggucuucacuguccauuccaa

SEQ ID NO: 135882 - RNA, 32 nt, Human
cugaacgcugcugccagccgaugccccagccc

SEQ ID NO: 135883 - RNA, 32 nt, Human
cugaacggacuccauuuggcuccuucauuugc

SEQ ID NO: 135884 - RNA, 32 nt, Human
cugaacgggagaaguuauauuguuaaaagugu

SEQ ID NO: 135885 - RNA, 32 nt, Human
cugaacgguguggcaucugaaugaaaauaacu

SEQ ID NO: 135886 - RNA, 32 nt, Human
cugaacguaggaggaggaaaaggcgaagcuga

SEQ ID NO: 135887 - RNA, 32 nt, Human
cugaacuacaccauuggcuuuccugggcucca

SEQ ID NO: 135888 - RNA, 32 nt, Human
cugaacuagcagacguguggaaaaagaaucag

SEQ ID NO: 135889 - RNA, 32 nt, Human
cugaacuaggaguuggaagacaaggauguggu

SEQ ID NO: 135890 - RNA, 32 nt, Human
cugaacucaagcaauccuccugccucagccuc

SEQ ID NO: 135891 - RNA, 32 nt, Human
cugaacucaagcaauucuccugccuuggccuc

SEQ ID NO: 135892 - RNA, 32 nt, Human
cugaacucaagugauccgcccaccucagccuc

SEQ ID NO: 135893 - RNA, 32 nt, Human
cugaacucaagugauccucccgccucagccuc

SEQ ID NO: 135894 - RNA, 31 nt, Human
cugaacucaauaacuguuugaaaauuagugu

SEQ ID NO: 135895 - RNA, 32 nt, Human
cugaacucacaccacacccagcuuauagaaug

SEQ ID NO: 135896 - RNA, 32 nt, Human
cugaacucaggcugucugcccaccucagccuc

SEQ ID NO: 135897 - RNA, 32 nt, Human
cugaacucaucuuuaccccuucccacuuugca

SEQ ID NO: 135898 - RNA, 32 nt, Human
cugaacuccaaccugcacuccagccugggcaa

SEQ ID NO: 135899 - RNA, 32 nt, Human
cugaacuccagaggaaccaggagucuuggggu

SEQ ID NO: 135900 - RNA, 32 nt, Human
cugaacuccagccugggcaacagagugagauu

SEQ ID NO: 135901 - RNA, 32 nt, Human
cugaacuccagccugggcaacaggugagauuc

SEQ ID NO: 135902 - RNA, 32 nt, Human
cugaacuccagccugggccacauagcaagacc

SEQ ID NO: 135903 - RNA, 32 nt, Human
cugaacuccagccugggcgacagagggagacu

SEQ ID NO: 135904 - RNA, 32 nt, Human
cugaacuccagccugggugacagagugagacu

SEQ ID NO: 135905 - RNA, 32 nt, Human
cugaacuccagccuggguuacagagcgagacc

SEQ ID NO: 135906 - RNA, 32 nt, Human
cugaacucccucagcacuguuuugccauaaau

SEQ ID NO: 135907 - RNA, 32 nt, Human
cugaacuccuucaguccugcccucccuccuuc

SEQ ID NO: 135908 - RNA, 32 nt, Human
cugaacucgggaguucgagaccagccuggcca

SEQ ID NO: 135909 - RNA, 17 nt, Human
cugaacucuggggccuu

SEQ ID NO: 135910 - RNA, 32 nt, Human
cugaacugaacuaauccuucuggcagauucaa

SEQ ID NO: 135911 - RNA, 32 nt, Human
cugaacugagaaggcaggccuccgucuuccca

SEQ ID NO: 135912 - RNA, 32 nt, Human
cugaacugauucacauuuugacaaaagagaga

SEQ ID NO: 135913 - RNA, 32 nt, Human
cugaacugcauacauguggcccccagguuccu

SEQ ID NO: 135914 - RNA, 32 nt, Human
cugaacugcgucaugggguugcaggaaggagu

SEQ ID NO: 135915 - RNA, 32 nt, Human
cugaacugcuccaugaagccugaagagaaagc

SEQ ID NO: 135916 - RNA, 32 nt, Human
cugaacuguaccaccauuucugugagguggca

SEQ ID NO: 135917 - RNA, 32 nt, Human
cugaacuguggcugcacugccugggugccgug

SEQ ID NO: 135918 - RNA, 32 nt, Human
cugaacugugguuccccugccucccagcccgg

SEQ ID NO: 135919 - RNA, 32 nt, Human
cugaacuuaagcugaguaacuuguacaagaca

SEQ ID NO: 135920 - RNA, 32 nt, Human
cugaacuuaccaccagcccuggcuggaaugua

SEQ ID NO: 135921 - RNA, 32 nt, Human
cugaacuucucccauuaauugcuauucacaau

SEQ ID NO: 135922 - RNA, 32 nt, Human
cugaacuugaaacuagauuuguuccugcuuuu

SEQ ID NO: 135923 - RNA, 32 nt, Human
cugaacuuggccccagcccugcugggcccaga

SEQ ID NO: 135924 - RNA, 32 nt, Human
cugaacuugggagcccacuugcaccagcccag

SEQ ID NO: 135925 - RNA, 32 nt, Human
cugaacuuugaacaccagcagacaggcugaga

SEQ ID NO: 135926 - RNA, 32 nt, Human
cugaacuuuucuuucuuccaucaugcucugag

SEQ ID NO: 135927 - RNA, 32 nt, Human
cugaagaaaccagcaaaauugaaaccuacauu

SEQ ID NO: 135928 - RNA, 32 nt, Human
cugaagaacagccccaucucuuucgccugcac

SEQ ID NO: 135929 - RNA, 32 nt, Human
cugaagaacaugccacuuacuauuucacuacc

SEQ ID NO: 135930 - RNA, 32 nt, Human
cugaagaagcucccccuccaggccaacuucua

SEQ ID NO: 135931 - RNA, 21 nt, Human
cugaagaagggucuucaguau

SEQ ID NO: 135932 - RNA, 25 nt, Human
cugaagaaggugggaggggagggcg

SEQ ID NO: 135933 - RNA, 32 nt, Human
cugaagaagguguggcugggggcucuggccug

SEQ ID NO: 135934 - RNA, 32 nt, Human
cugaagaagugccuuuugagugcaaugaaugu

SEQ ID NO: 135935 - RNA, 32 nt, Human
cugaagaauggaccagacgggcugaagaagcu

SEQ ID NO: 135936 - RNA, 32 nt, Human
cugaagacaauguugaaaauguucucaaagau

SEQ ID NO: 135937 - RNA, 32 nt, Human
cugaagacagaauuagcuaacuuucaaaaaca

SEQ ID NO: 135938 - RNA, 32 nt, Human
cugaagacgagugucagguguggagagucuca

SEQ ID NO: 135939 - RNA, 24 nt, Human
cugaagacgcagccuuucuccagg

SEQ ID NO: 135940 - RNA, 32 nt, Human
cugaagacuggcuuucggcucacaguuuaaaa

SEQ ID NO: 135941 - RNA, 22 nt, Human
cugaagagacacguggcuaggg

SEQ ID NO: 135942 - RNA, 19 nt, Human
cugaagagaccaccuuguc

SEQ ID NO: 135943 - RNA, 32 nt, Human
cugaagagaccagugagcucacugugacccac

SEQ ID NO: 135944 - RNA, 24 nt, Human
cugaagagacgccugccagugcgg

SEQ ID NO: 135945 - RNA, 32 nt, Human
cugaagagagacacacagagcuguacucccug

SEQ ID NO: 135946 - RNA, 32 nt, Human
cugaagagagcagcagaucucccagcacagug

SEQ ID NO: 135947 - RNA, 32 nt, Human
cugaagagcagcguucaggugcauccccagcc

SEQ ID NO: 135948 - RNA, 32 nt, Human
cugaagagcauuccuguuuaaccaggggcuca

SEQ ID NO: 135949 - RNA, 32 nt, Human
cugaagagccaggggcaaggagagggaaagag

SEQ ID NO: 135950 - RNA, 32 nt, Human
cugaagagcccuuauuugaauucacugugugg

SEQ ID NO: 135951 - RNA, 24 nt, Human
cugaagagcugguagagcucagcg

SEQ ID NO: 135952 - RNA, 32 nt, Human
cugaagaggaggaggagggucuagaggccuga

SEQ ID NO: 135953 - RNA, 32 nt, Human
cugaagaggcuggagugcaguggcgcaaucuu

SEQ ID NO: 135954 - RNA, 32 nt, Human
cugaagagggccugacacuucacagagugggg

SEQ ID NO: 135955 - RNA, 32 nt, Human
cugaagaggguggaucaugaggugaggucaag

SEQ ID NO: 135956 - RNA, 32 nt, Human
cugaagagguuaaugugcaucugccuccgaau

SEQ ID NO: 135957 - RNA, 32 nt, Human
cugaagagugccuggcucaugcuccaggcugc

SEQ ID NO: 135958 - RNA, 32 nt, Human
cugaagaguuuagaaugaggcagcggugagaa

SEQ ID NO: 135959 - RNA, 25 nt, Human
cugaagaguuugagaucuuccccca

SEQ ID NO: 135960 - RNA, 32 nt, Human
cugaagaucaaaacaaacaauccagauguaua

SEQ ID NO: 135961 - RNA, 32 nt, Human
cugaagaucaaggaagagagugaggcauuuuc

SEQ ID NO: 135962 - RNA, 32 nt, Human
cugaagaucccccagccaggauguggccccag

SEQ ID NO: 135963 - RNA, 32 nt, Human
cugaagaucuucauuuacauuuugcuaaggau

SEQ ID NO: 135964 - RNA, 32 nt, Human
cugaagaugacacugagcuuuaauggcugaag

SEQ ID NO: 135965 - RNA, 32 nt, Human
cugaagaugcaccuaaucuugaggcagcuucu

SEQ ID NO: 135966 - RNA, 32 nt, Human
cugaagaugcuucuucuaucagccugcagaaa

SEQ ID NO: 135967 - RNA, 32 nt, Human
cugaagaugguuguuuccacuuuggaagaaac

SEQ ID NO: 135968 - RNA, 32 nt, Human
cugaagaugucgucccugucugagccccuccu

SEQ ID NO: 135969 - RNA, 17 nt, Human
cugaagaugugcccuua

SEQ ID NO: 135970 - RNA, 32 nt, Human
cugaagcaaagacaucuuccuggccacguguu

SEQ ID NO: 135971 - RNA, 32 nt, Human
cugaagcaacaagguucugcuccaucaccuca

SEQ ID NO: 135972 - RNA, 32 nt, Human
cugaagcaacagcaucccaaggugcucagccg

SEQ ID NO: 135973 - RNA, 32 nt, Human
cugaagcaagcagaucacuugaggucaggagu

SEQ ID NO: 135974 - RNA, 32 nt, Human
cugaagcaauccagagacagcugcuuuuucau

SEQ ID NO: 135975 - RNA, 32 nt, Human
cugaagcacaguuaacugguucugggguagga

SEQ ID NO: 135976 - RNA, 32 nt, Human
cugaagcacuacauuuuagcucuggcugcuuu

SEQ ID NO: 135977 - RNA, 32 nt, Human
cugaagcacuacugcuggccagcaggcucacg

SEQ ID NO: 135978 - RNA, 32 nt, Human
cugaagcacuggcuccagccuuagggaagguu

SEQ ID NO: 135979 - RNA, 22 nt, Human
cugaagcagaaaggagucuggg

SEQ ID NO: 135980 - RNA, 32 nt, Human
cugaagcagaguuuuacucuuguugcccaggc

SEQ ID NO: 135981 - RNA, 32 nt, Human
cugaagcagauucgccccagagccuccaggcg

SEQ ID NO: 135982 - RNA, 32 nt, Human
cugaagcagcuggugugggcuggaacuggccc

SEQ ID NO: 135983 - RNA, 24 nt, Human
cugaagcaggagaacugccugaac

SEQ ID NO: 135984 - RNA, 24 nt, Human
cugaagcaggagaaucacuugaac

SEQ ID NO: 135985 - RNA, 24 nt, Human
cugaagcaggagaaucccuugaac

SEQ ID NO: 135986 - RNA, 24 nt, Human
cugaagcaggagaaucgcuggaac

SEQ ID NO: 135987 - RNA, 24 nt, Human
cugaagcaggagaaucgcuugaac

SEQ ID NO: 135988 - RNA, 24 nt, Human
cugaagcaggagaaucgcuugagc

SEQ ID NO: 135989 - RNA, 24 nt, Human
cugaagcaggagaauggcaugaac

SEQ ID NO: 135990 - RNA, 24 nt, Human
cugaagcaggagaauggcgugaac

SEQ ID NO: 135991 - RNA, 24 nt, Human
cugaagcaggagaauggcgugaau

SEQ ID NO: 135992 - RNA, 24 nt, Human
cugaagcaggagaaugguaugaau

SEQ ID NO: 135993 - RNA, 24 nt, Human
cugaagcaggagaauugccugaac

SEQ ID NO: 135994 - RNA, 24 nt, Human
cugaagcaggagaauugcucgaac

SEQ ID NO: 135995 - RNA, 22 nt, Human
cugaagcaggagaauugcuuga

SEQ ID NO: 135996 - RNA, 24 nt, Human
cugaagcaggagaauugcuugaac

SEQ ID NO: 135997 - RNA, 23 nt, Human
cugaagcaggagagaaggcuggg

SEQ ID NO: 135998 - RNA, 24 nt, Human
cugaagcaggagauuugcuugaac

SEQ ID NO: 135999 - RNA, 24 nt, Human
cugaagcaggagcauggcgugaac

SEQ ID NO: 136000 - RNA, 32 nt, Human
cugaagcaggagguggcauuugaaaugaaaua

SEQ ID NO: 136001 - RNA, 32 nt, Human
cugaagcaggaguuuucaccugcucugaggga

SEQ ID NO: 136002 - RNA, 32 nt, Human
cugaagcaggcagaucaccugagguuaagagu

SEQ ID NO: 136003 - RNA, 32 nt, Human
cugaagcaggcgggucaccugaggucaagagu

SEQ ID NO: 136004 - RNA, 22 nt, Human
cugaagcaggguggggcguaac

SEQ ID NO: 136005 - RNA, 32 nt, Human
cugaagcaguucagaaggaauaagcauuccuu

SEQ ID NO: 136006 - RNA, 32 nt, Human
cugaagccagcacugguuaacauggugauuag

SEQ ID NO: 136007 - RNA, 32 nt, Human
cugaagccagcucugagucacaggguugccuu

SEQ ID NO: 136008 - RNA, 32 nt, Human
cugaagccaucgcuggcccccaccuccugugg

SEQ ID NO: 136009 - RNA, 32 nt, Human
cugaagcccacuugcccuaagcauuuuucacc

SEQ ID NO: 136010 - RNA, 18 nt, Human
cugaagcccccuggccuc

SEQ ID NO: 136011 - RNA, 32 nt, Human
cugaagcccgagaggacugcggcuggaaagcg

SEQ ID NO: 136012 - RNA, 32 nt, Human
cugaagcccucagaccgagaugggccaccacu

SEQ ID NO: 136013 - RNA, 32 nt, Human
cugaagcccuggggcuuacguucucucuugcc

SEQ ID NO: 136014 - RNA, 32 nt, Human
cugaagccucaaccucccuggguuugagcaau

SEQ ID NO: 136015 - RNA, 32 nt, Human
cugaagccucaguccuucaccuugccaggugc

SEQ ID NO: 136016 - RNA, 32 nt, Human
cugaagccuccgcuuccuggguucaagcaauu

SEQ ID NO: 136017 - RNA, 22 nt, Human
cugaagccucgaggucaccagg

SEQ ID NO: 136018 - RNA, 23 nt, Human
cugaagccugcagcagggcagga

SEQ ID NO: 136019 - RNA, 21 nt, Human
cugaagccuuccucuggcuuc

SEQ ID NO: 136020 - RNA, 22 nt, Human
cugaagccuuccucuggcuuca

SEQ ID NO: 136021 - RNA, 32 nt, Human
cugaagccuuccugaauuucuuccugcauuuc

SEQ ID NO: 136022 - RNA, 32 nt, Human
cugaagccuuucuccuuuucugucacuugcaa

SEQ ID NO: 136023 - RNA, 32 nt, Human
cugaagccuuucuuugguaaagagcgcagaaa

SEQ ID NO: 136024 - RNA, 32 nt, Human
cugaagcgaucaaacaguuuuaggguggaagc

SEQ ID NO: 136025 - RNA, 21 nt, Human
cugaagcgcaagaucaccaag

SEQ ID NO: 136026 - RNA, 32 nt, Human
cugaagcgccacuucucagaaacacacagagc

SEQ ID NO: 136027 - RNA, 32 nt, Human
cugaagcggagcagcuggauugcucuggagca

SEQ ID NO: 136028 - RNA, 32 nt, Human
cugaagcgggcagaucacuugaggucaggagu

SEQ ID NO: 136029 - RNA, 32 nt, Human
cugaagcggguggaucaccugaggucagaagu

SEQ ID NO: 136030 - RNA, 32 nt, Human
cugaagcuaaccuggagagcucugccuuacag

SEQ ID NO: 136031 - RNA, 32 nt, Human
cugaagcucagccugccuacuccuucuccauc

SEQ ID NO: 136032 - RNA, 32 nt, Human
cugaagcuccuaauggaaaaagcuuucuucug

SEQ ID NO: 136033 - RNA, 32 nt, Human
cugaagcuccugugcagccucagcccuacacc

SEQ ID NO: 136034 - RNA, 32 nt, Human
cugaagcucguagcuuggcagugcaguuuaag

SEQ ID NO: 136035 - RNA, 32 nt, Human
cugaagcucuuccuccucuuccuuuucucuuc

SEQ ID NO: 136036 - RNA, 22 nt, Human
cugaagcugaagauucuuccca

SEQ ID NO: 136037 - RNA, 32 nt, Human
cugaagcugagacugacuacugugcauuagga

SEQ ID NO: 136038 - RNA, 32 nt, Human
cugaagcugagggugcgcauccuaaucgaugg

SEQ ID NO: 136039 - RNA, 32 nt, Human
cugaagcugaugccugccccacaggagcgcac

SEQ ID NO: 136040 - RNA, 32 nt, Human
cugaagcugcaaggcuggagagagaacaggag

SEQ ID NO: 136041 - RNA, 21 nt, Human
cugaagcugcacucccaccca

SEQ ID NO: 136042 - RNA, 20 nt, Human
cugaagcugccaccacaaua

SEQ ID NO: 136043 - RNA, 21 nt, Human
cugaagcugcuguuccuccua

SEQ ID NO: 136044 - RNA, 32 nt, Human
cugaagcugugccucccuccccugucaagcca

SEQ ID NO: 136045 - RNA, 21 nt, Human
cugaagcuguucccacuccca

SEQ ID NO: 136046 - RNA, 32 nt, Human
cugaagcuucucuggguccuggacuccguucu

SEQ ID NO: 136047 - RNA, 18 nt, Human
cugaagcuucugggacuu

SEQ ID NO: 136048 - RNA, 17 nt, Human
cugaagcuugcauucca

SEQ ID NO: 136049 - RNA, 32 nt, Human
cugaagcuuuccuaauauugcugugcucccca

SEQ ID NO: 136050 - RNA, 32 nt, Human
cugaaggaacugcuacccgaaauuacagaaaa

SEQ ID NO: 136051 - RNA, 32 nt, Human
cugaaggaagaggcugugagggcaguucaggg

SEQ ID NO: 136052 - RNA, 32 nt, Human
cugaaggaaguccucugggccaggaagacccu

SEQ ID NO: 136053 - RNA, 32 nt, Human
cugaaggacaagccaaccacagcagccaagcc

SEQ ID NO: 136054 - RNA, 17 nt, Human
cugaaggacacuacaac

SEQ ID NO: 136055 - RNA, 32 nt, Human
cugaaggacucuccuaggaggccagguugccc

SEQ ID NO: 136056 - RNA, 32 nt, Human
cugaaggaggcagaggacguggagcgggaggc

SEQ ID NO: 136057 - RNA, 32 nt, Human
cugaaggaggugcagcacacuccaccugggug

SEQ ID NO: 136058 - RNA, 32 nt, Human
cugaaggauaugaggggauggaagagagggcu

SEQ ID NO: 136059 - RNA, 32 nt, Human
cugaaggaucuggagguaggaggcucugggcg

SEQ ID NO: 136060 - RNA, 22 nt, Human
cugaaggaugguaaagccccgu

SEQ ID NO: 136061 - RNA, 32 nt, Human
cugaaggauucggucuaccacggagggcugug

SEQ ID NO: 136062 - RNA, 32 nt, Human
cugaaggcaagggagagcaggcugcacagcug

SEQ ID NO: 136063 - RNA, 17 nt, Human
cugaaggcacucuggca

SEQ ID NO: 136064 - RNA, 32 nt, Human
cugaaggcagaaugaacccacaccuggaguga

SEQ ID NO: 136065 - RNA, 32 nt, Human
cugaaggcagacuucauucugaggcuuuggac

SEQ ID NO: 136066 - RNA, 32 nt, Human
cugaaggcagaggcagccuccccaccagcgcu

SEQ ID NO: 136067 - RNA, 32 nt, Human
cugaaggcagucagauuuccuacaugacagcu

SEQ ID NO: 136068 - RNA, 32 nt, Human
cugaaggccaguggcagcaggugguggugggu

SEQ ID NO: 136069 - RNA, 20 nt, Human
cugaaggcccuuucuucuca

SEQ ID NO: 136070 - RNA, 32 nt, Human
cugaaggccgugcaccuccaccuccagccucc

SEQ ID NO: 136071 - RNA, 32 nt, Human
cugaaggccuggccagccuccuggccugcccc

SEQ ID NO: 136072 - RNA, 32 nt, Human
cugaaggcucagauugaggagcucaagaacga

SEQ ID NO: 136073 - RNA, 32 nt, Human
cugaaggcugaaagacaggaagauggugccau

SEQ ID NO: 136074 - RNA, 32 nt, Human
cugaaggcuguggaagagguuggagugggcgc

SEQ ID NO: 136075 - RNA, 22 nt, Human
cugaagggaaaacuucauucca

SEQ ID NO: 136076 - RNA, 32 nt, Human
cugaagggaagagagguugcagcugagcaaga

SEQ ID NO: 136077 - RNA, 32 nt, Human
cugaagggacagcuccagcaguggcugauuug

SEQ ID NO: 136078 - RNA, 32 nt, Human
cugaagggagaugucauggugaaaugcuacca

SEQ ID NO: 136079 - RNA, 18 nt, Human
cugaagggccucagggca

SEQ ID NO: 136080 - RNA, 32 nt, Human
cugaaggggagggagaagggaggaagcuccca

SEQ ID NO: 136081 - RNA, 20 nt, Human
cugaaggggaggugcuccgg

SEQ ID NO: 136082 - RNA, 32 nt, Human
cugaagggggcagauuagcugaggucaggaau

SEQ ID NO: 136083 - RNA, 32 nt, Human
cugaagggucaccaagggucagcucagggcua

SEQ ID NO: 136084 - RNA, 32 nt, Human
cugaagggugagugaaugagaaacaggugagg

SEQ ID NO: 136085 - RNA, 32 nt, Human
cugaaggguuacuuguaggucguggcuucuga

SEQ ID NO: 136086 - RNA, 32 nt, Human
cugaagguacauacuccauguggacuucccuu

SEQ ID NO: 136087 - RNA, 32 nt, Human
cugaagguagaugguguuauaguuaauaauaa

SEQ ID NO: 136088 - RNA, 32 nt, Human
cugauaagagaagguguaagguuuuuaucuua

SEQ ID NO: 136089 - RNA, 32 nt, Human
cugauaagcuguucugguggcaguaacaugca

SEQ ID NO: 136090 - RNA, 23 nt, Human
cugauaagggaagccacaaggag

SEQ ID NO: 136091 - RNA, 32 nt, Human
cugauaaucauuuugaguuugccucaguagau

SEQ ID NO: 136092 - RNA, 32 nt, Human
cugauaauggguauauaacaggaagcugaagg

SEQ ID NO: 136093 - RNA, 32 nt, Human
cugauacagaagcauccaggcugcaggaguac

SEQ ID NO: 136094 - RNA, 24 nt, Human
cugauacaugcaacaaccuguaug

SEQ ID NO: 136095 - RNA, 32 nt, Human
cugauacccacguuucagaagaguccugggau

SEQ ID NO: 136096 - RNA, 32 nt, Human
cugauacccaggagucuccagcuuccaagaga

SEQ ID NO: 136097 - RNA, 32 nt, Human
cugauacccauucugcuuuguacuucgaaucu

SEQ ID NO: 136098 - RNA, 32 nt, Human
cugauaccuacagcuacagaaagcaggacuag

SEQ ID NO: 136099 - RNA, 32 nt, Human
cugauaccugcaccuucuccccaagccagcgu

SEQ ID NO: 136100 - RNA, 32 nt, Human
cugauaccugcagguuguccgucugaugacau

SEQ ID NO: 136101 - RNA, 21 nt, Human
cugauacuaaauccaccucca

SEQ ID NO: 136102 - RNA, 32 nt, Human
cugauacuauuaaucaugcaguguacaauuca

SEQ ID NO: 136103 - RNA, 32 nt, Human
cugauacuucaguuaaagucuccugggaaacg

SEQ ID NO: 136104 - RNA, 32 nt, Human
cugauagaacaugcuagaaauggucuuuucca

SEQ ID NO: 136105 - RNA, 32 nt, Human
cugauagaacuguugcuuaucugucuuccuua

SEQ ID NO: 136106 - RNA, 32 nt, Human
cugauagacugaaaauugagcaaauggaagaa

SEQ ID NO: 136107 - RNA, 32 nt, Human
cugauagagcgcaagaggagcucuggucgggu

SEQ ID NO: 136108 - RNA, 23 nt, Human
cugauagccccucuccccgcagu

SEQ ID NO: 136109 - RNA, 21 nt, Human
cugauagggugcauccuucca

SEQ ID NO: 136110 - RNA, 32 nt, Human
cugauagguauucaucuucuucaucaagcucu

SEQ ID NO: 136111 - RNA, 32 nt, Human
cugauagugccgcugcacuccauucugggcaa

SEQ ID NO: 136112 - RNA, 32 nt, Human
cugauaguguagcauuuucccugggggaguuu

SEQ ID NO: 136113 - RNA, 32 nt, Human
cugauaguuaguucuuucucuccuuugagugg

SEQ ID NO: 136114 - RNA, 32 nt, Human
cugauauauacacauuagaaauauuccaguuc

SEQ ID NO: 136115 - RNA, 32 nt, Human
cugauaucacccaggcuggagugcaguggcgc

SEQ ID NO: 136116 - RNA, 32 nt, Human
cugauauccucucagguucugccugugaagca

SEQ ID NO: 136117 - RNA, 32 nt, Human
cugauaugaaaugugcuguguauaccuggaga

SEQ ID NO: 136118 - RNA, 32 nt, Human
cugauaugaggagccaguguugcaugaugaaa

SEQ ID NO: 136119 - RNA, 16 nt, Human
cugauaugcagcauga

SEQ ID NO: 136120 - RNA, 32 nt, Human
cugauauuguauugugcaaaucuacugaugug

SEQ ID NO: 136121 - RNA, 32 nt, Human
cugauauuucucacuuugucagaaagaagagg

SEQ ID NO: 136122 - RNA, 32 nt, Human
cugaucaacaacuucaggguggagggaaaaua

SEQ ID NO: 136123 - RNA, 24 nt, Human
cugaucaacauggugaaaccccgu

SEQ ID NO: 136124 - RNA, 32 nt, Human
cugaucaacauggugaaaccccgucucuacua

SEQ ID NO: 136125 - RNA, 32 nt, Human
cugaucaacauggugaaaccccgucuuuacua

SEQ ID NO: 136126 - RNA, 32 nt, Human
cugaucaacguggugaaaccucuacuaaaaau

SEQ ID NO: 136127 - RNA, 32 nt, Human
cugaucaagagcagugcuucuccauuuguuuu

SEQ ID NO: 136128 - RNA, 32 nt, Human
cugaucaagcuacaguguacuuuaaguagaaa

SEQ ID NO: 136129 - RNA, 32 nt, Human
cugaucaauaugaugaaaccccugucucuacu

SEQ ID NO: 136130 - RNA, 32 nt, Human
cugaucaaugacaccuuccugguaacauuuca

SEQ ID NO: 136131 - RNA, 32 nt, Human
cugaucacaaaacccauacuacuaccucauug

SEQ ID NO: 136132 - RNA, 32 nt, Human
cugaucacccuguguucacagcaggcagaagc

SEQ ID NO: 136133 - RNA, 32 nt, Human
cugaucaccgcuuuccaauuugcccuucagag

SEQ ID NO: 136134 - RNA, 32 nt, Human
cugaucacuccacugcacuccagccuggguga

SEQ ID NO: 136135 - RNA, 32 nt, Human
cugaucaggaaaugcaucuucgcagaugguau

SEQ ID NO: 136136 - RNA, 32 nt, Human
cugaucagggugucuaggcugaaggaguugga

SEQ ID NO: 136137 - RNA, 32 nt, Human
cugaucagugcuuuguaaaauggaccaaucag

SEQ ID NO: 136138 - RNA, 32 nt, Human
cugaucaguucuucaguucuaaaacaauggcc

SEQ ID NO: 136139 - RNA, 32 nt, Human
cugaucaguuuauggaagaaaaggaaaccaaa

SEQ ID NO: 136140 - RNA, 32 nt, Human
cugaucauaccacugcacuccagucugggcaa

SEQ ID NO: 136141 - RNA, 32 nt, Human
cugaucaucugaaucuuaaucauguccaacug

SEQ ID NO: 136142 - RNA, 32 nt, Human
cugaucaucuuccucuucuucuucgugguaga

SEQ ID NO: 136143 - RNA, 32 nt, Human
cugaucaucuucuucaauuccugcuaggaugc

SEQ ID NO: 136144 - RNA, 32 nt, Human
cugaucaugaagaaauaaacacaaguuaaaua

SEQ ID NO: 136145 - RNA, 31 nt, Human
cugaucauggcuaucucagccacauuguugg

SEQ ID NO: 136146 - RNA, 32 nt, Human
cugaucauuagagugacuguugucccaagugg

SEQ ID NO: 136147 - RNA, 32 nt, Human
cugaucauucaaggagaagauacccuuucucu

SEQ ID NO: 136148 - RNA, 32 nt, Human
cugauccaacagcagaaaacuuucagaugaga

SEQ ID NO: 136149 - RNA, 32 nt, Human
cugauccaagagccauauuuugagacccccuc

SEQ ID NO: 136150 - RNA, 32 nt, Human
cugauccacagagaggaugagaaugcagcauc

SEQ ID NO: 136151 - RNA, 32 nt, Human
cugauccagagcacagaucuguuucgugcauu

SEQ ID NO: 136152 - RNA, 32 nt, Human
cugauccagcagcugcuccaggagaggccguc

SEQ ID NO: 136153 - RNA, 32 nt, Human
cugauccagccccagcucggagaacucucagg

SEQ ID NO: 136154 - RNA, 32 nt, Human
cugauccaggaaacugcagugagacccaggug

SEQ ID NO: 136155 - RNA, 32 nt, Human
cugauccagggacuuagagcuuguuacccagu

SEQ ID NO: 136156 - RNA, 32 nt, Human
cugauccauagaguacaggggcugcaaaauau

SEQ ID NO: 136157 - RNA, 32 nt, Human
cugauccaucccucaagccacaguuaaugauu

SEQ ID NO: 136158 - RNA, 19 nt, Human
cugauccaucuuuaacaca

SEQ ID NO: 136159 - RNA, 32 nt, Human
cugaucccaaagauggggugaccccaggguca

SEQ ID NO: 136160 - RNA, 19 nt, Human
cugaucccaauaccagcuu

SEQ ID NO: 136161 - RNA, 27 nt, Human
cugaucccacgggcaggcucucccugc

SEQ ID NO: 136162 - RNA, 32 nt, Human
cugaucccauuaauuaugagggagaaaauguu

SEQ ID NO: 136163 - RNA, 32 nt, Human
cugaucccauuucuccccacccuggggcucuu

SEQ ID NO: 136164 - RNA, 18 nt, Human
cugaucccauuuuucuua

SEQ ID NO: 136165 - RNA, 32 nt, Human
cugauccccaggaggagcuacucuggguuacc

SEQ ID NO: 136166 - RNA, 32 nt, Human
cugauccccaggcuuggggcaauugguaaagg

SEQ ID NO: 136167 - RNA, 32 nt, Human
cugauccccucagagcaggcucaggccuggag

SEQ ID NO: 136168 - RNA, 32 nt, Human
cugauccccucggaggaccuguagggggccug

SEQ ID NO: 136169 - RNA, 32 nt, Human
cugaucccuccccacucucgccccuucucuau

SEQ ID NO: 136170 - RNA, 32 nt, Human
cugaucccuguaaaaugucuguagcauuaaag

SEQ ID NO: 136171 - RNA, 19 nt, Human
cugaucccugugggaccuu

SEQ ID NO: 136172 - RNA, 32 nt, Human
cugauccgaacaccuccagauuccggcuucua

SEQ ID NO: 136173 - RNA, 32 nt, Human
cugauccgggcccguuggcggcgucacugacg

SEQ ID NO: 136174 - RNA, 32 nt, Human
cugauccggggguccagggaauggagcucagg

SEQ ID NO: 136175 - RNA, 32 nt, Human
cugauccucccaggcuuccgugugggucagug

SEQ ID NO: 136176 - RNA, 32 nt, Human
cugauccucgcaucucagccuccugaguagcu

SEQ ID NO: 136177 - RNA, 32 nt, Human
cugauccucuacucugaguggggcuaaauaag

SEQ ID NO: 136178 - RNA, 32 nt, Human
cugauccucuggccugcucuccaccuccuccg

SEQ ID NO: 136179 - RNA, 32 nt, Human
cugauccucuuucuagaagcaccuggagggac

SEQ ID NO: 136180 - RNA, 32 nt, Human
cugauccuggagguuugaaaucaccuuuuagu

SEQ ID NO: 136181 - RNA, 32 nt, Human
cugauccuguccacucagaguucugagggggc

SEQ ID NO: 136182 - RNA, 32 nt, Human
cugauccuuggaggaggaggaagaggaggcca

SEQ ID NO: 136183 - RNA, 32 nt, Human
cugaucgaguucugcauuucuucaaugaggaa

SEQ ID NO: 136184 - RNA, 32 nt, Human
cugaucgcaccacuguauccagcucgggcaac

SEQ ID NO: 136185 - RNA, 32 nt, Human
cugaucggcauggugaaaccccguuucuacua

SEQ ID NO: 136186 - RNA, 32 nt, Human
cugaucggccuggccaaggucgccagcugccu

SEQ ID NO: 136187 - RNA, 32 nt, Human
cugaucgggauuucagggagaagaagcugcuu

SEQ ID NO: 136188 - RNA, 32 nt, Human
cugaucggggguugugagcagcgcggccugga

SEQ ID NO: 136189 - RNA, 18 nt, Human
cugaucguccugcugcug

SEQ ID NO: 136190 - RNA, 32 nt, Human
cugaucgugugcgaggccaggagaucaagacc

SEQ ID NO: 136191 - RNA, 32 nt, Human
cugaucuacuccuucuccuucucauacaugag

SEQ ID NO: 136192 - RNA, 32 nt, Human
cugaucuaugugcacacacccccaucacaugg

SEQ ID NO: 136193 - RNA, 32 nt, Human
cugaucuauuucaccaaccaccccaugugucu

SEQ ID NO: 136194 - RNA, 23 nt, Human
cugaucucaaacuccuggccuca

SEQ ID NO: 136195 - RNA, 32 nt, Human
cugaucucaagugaucugcccaccucagccuc

SEQ ID NO: 136196 - RNA, 32 nt, Human
cugaucucacagggcagggggcuuccaucaug

SEQ ID NO: 136197 - RNA, 32 nt, Human
cugaucucacugcacacagccuagggccccac

SEQ ID NO: 136198 - RNA, 32 nt, Human
cugaucucaggugaccugcccaccucggccuc

SEQ ID NO: 136199 - RNA, 32 nt, Human
cugaucucaggugauccacccaccucagccuc

SEQ ID NO: 136200 - RNA, 32 nt, Human
cugaucucaucugcuaaaaucauuucaaucuc

SEQ ID NO: 136201 - RNA, 32 nt, Human
cugaucucaugggagauucuuucucaucuuuc

SEQ ID NO: 136202 - RNA, 32 nt, Human
cugaucuccccgcacacugcugguacucucuu

SEQ ID NO: 136203 - RNA, 32 nt, Human
cugaucuccgcagaggcugccugcugcgcucg

SEQ ID NO: 136204 - RNA, 32 nt, Human
cugaucucuaggguauauacacccacaggcau

SEQ ID NO: 136205 - RNA, 16 nt, Human
cugaucucuccugcaa

SEQ ID NO: 136206 - RNA, 32 nt, Human
cugaucucucuggagcucaguguccucaccua

SEQ ID NO: 136207 - RNA, 32 nt, Human
cugaucucucuuucuuuucccuacagauggac

SEQ ID NO: 136208 - RNA, 32 nt, Human
cugaucucuggccuagcagccauuccacucca

SEQ ID NO: 136209 - RNA, 32 nt, Human
cugaucucuuauuaccucaauuuuggaaacug

SEQ ID NO: 136210 - RNA, 20 nt, Human
cugaucucuugccucugcug

SEQ ID NO: 136211 - RNA, 32 nt, Human
cugaucugcagacuccaaggaggucccaggaa

SEQ ID NO: 136212 - RNA, 32 nt, Human
cugaucugcauuucacuuccagcugcugguag

SEQ ID NO: 136213 - RNA, 32 nt, Human
cugaucugccugccccucacacacuugcuccc

SEQ ID NO: 136214 - RNA, 32 nt, Human
cugaucugcgcuguggcugucccuggacgugc

SEQ ID NO: 136215 - RNA, 32 nt, Human
cugaucugcucagggagaagcuugccuuugaa

SEQ ID NO: 136216 - RNA, 32 nt, Human
cugaucugcuggucagugaugaugcuguggcc

SEQ ID NO: 136217 - RNA, 32 nt, Human
cugaucuggaccaucuuugucuugccuuuuca

SEQ ID NO: 136218 - RNA, 32 nt, Human
cugaucuggcucuggaggacagcuccaggggu

SEQ ID NO: 136219 - RNA, 32 nt, Human
cugaucugucggaaccaggacacaaaagcagc

SEQ ID NO: 136220 - RNA, 32 nt, Human
cugaucugugugccccugccuccagggcuagg

SEQ ID NO: 136221 - RNA, 32 nt, Human
cugaucuucaagcagggauucucaaccugugg

SEQ ID NO: 136222 - RNA, 32 nt, Human
cugaucuucuaguuucacuaauggguauuaaa

SEQ ID NO: 136223 - RNA, 32 nt, Human
cugaucuucucccuccucccaaccuacacccu

SEQ ID NO: 136224 - RNA, 32 nt, Human
cugaucuugaacuccugaccucgggauccacc

SEQ ID NO: 136225 - RNA, 32 nt, Human
cugaucuugcacucccagccucaggugaucca

SEQ ID NO: 136226 - RNA, 32 nt, Human
cugaucuuuggaaggagcugggugagcaauua

SEQ ID NO: 136227 - RNA, 32 nt, Human
cugaucuuugggcauggccaggggaagcagaa

SEQ ID NO: 136228 - RNA, 32 nt, Human
cugaucuuuugucuaaggauuuuuaccugaaa

SEQ ID NO: 136229 - RNA, 32 nt, Human
cugaugaaagugccaggaaggccgggugcggu

SEQ ID NO: 136230 - RNA, 32 nt, Human
cugaugaaaucucagagaagagcccagaaaau

SEQ ID NO: 136231 - RNA, 32 nt, Human
cugaugaagaauccaucaggaaucuguuugac

SEQ ID NO: 136232 - RNA, 32 nt, Human
cugaugaagaauucugauggcaacuguaugau

SEQ ID NO: 136233 - RNA, 32 nt, Human
cugaugaagaggaggaacauggaggucauaaa

SEQ ID NO: 136234 - RNA, 32 nt, Human
cugaugaagcuggaggagucucucuucugcuc

SEQ ID NO: 136235 - RNA, 32 nt, Human
cugaugaaggggaguugguucaacaguggcca

SEQ ID NO: 136236 - RNA, 32 nt, Human
cugaugacaaauaccugaaugucaucacaucc

SEQ ID NO: 136237 - RNA, 32 nt, Human
cugaugaccacuaguggggagccguggcacuc

SEQ ID NO: 136238 - RNA, 22 nt, Human
cugaugacccugucccugcagu

SEQ ID NO: 136239 - RNA, 32 nt, Human
cugaugaccgguuucauuuauucauguaauaa

SEQ ID NO: 136240 - RNA, 32 nt, Human
cugaugacuguggcugugaugaauucgugccu

SEQ ID NO: 136241 - RNA, 32 nt, Human
cugaugagcccacuccaggggccccagccccc

SEQ ID NO: 136242 - RNA, 32 nt, Human
cugaugagcccacucuaggagccccaguagcc

SEQ ID NO: 136243 - RNA, 32 nt, Human
cugaugagcugggccgccuccuccaggaagcc

SEQ ID NO: 136244 - RNA, 32 nt, Human
cugaugaggcaagaacaugucucuccaacaac

SEQ ID NO: 136245 - RNA, 32 nt, Human
cugaugaggcuggccaccugccacuuugcccu

SEQ ID NO: 136246 - RNA, 32 nt, Human
cugaugagggacaguuguauguuugcaucaua

SEQ ID NO: 136247 - RNA, 32 nt, Human
cugaugagucuguggcuggagacagugggguc

SEQ ID NO: 136248 - RNA, 28 nt, Human
cugaugauaaccacuuacuaugugcuag

SEQ ID NO: 136249 - RNA, 32 nt, Human
cugaugauaggccuucucuguaagaauccuuc

SEQ ID NO: 136250 - RNA, 31 nt, Human
cugaugauaucuaucucggccaacacaaaag

SEQ ID NO: 136251 - RNA, 32 nt, Human
cugaugauuccaccauuucccauaaucccuca

SEQ ID NO: 136252 - RNA, 32 nt, Human
cugaugauugaauggguccaccucugucaaag

SEQ ID NO: 136253 - RNA, 32 nt, Human
cugaugcaacucuucgccuuugcugauugccu

SEQ ID NO: 136254 - RNA, 32 nt, Human
cugaugcacagaauccaaugcugugugcugau

SEQ ID NO: 136255 - RNA, 32 nt, Human
cugaugcacugaauuauguaaagugcauuccc

SEQ ID NO: 136256 - RNA, 24 nt, Human
cugaugcagaagaauggcgugaac

SEQ ID NO: 136257 - RNA, 32 nt, Human
cugaugcaggugucuagggauacguccauccc

SEQ ID NO: 136258 - RNA, 24 nt, Human
cugaugcauucagccugcugugca

SEQ ID NO: 136259 - RNA, 32 nt, Human
cugaugcauuuuucacauuugucaacucuggu

SEQ ID NO: 136260 - RNA, 32 nt, Human
cugaugccaacuuuacuguccaggacaaccga

SEQ ID NO: 136261 - RNA, 32 nt, Human
cugaugccagaacaaaggacagagaauuuaag

SEQ ID NO: 136262 - RNA, 32 nt, Human
cugaugccaguauggacuggagaugaugggag

SEQ ID NO: 136263 - RNA, 32 nt, Human
cugaugccaugccaacugccugggacaacacc

SEQ ID NO: 136264 - RNA, 32 nt, Human
cugaugcccacaggggagccaggcuggcugcc

SEQ ID NO: 136265 - RNA, 19 nt, Human
cugaugcccaccccugcca

SEQ ID NO: 136266 - RNA, 22 nt, Human
cugaugcccaggcugggugcag

SEQ ID NO: 136267 - RNA, 32 nt, Human
cugaugcccaggcugggugcaggcucucaucu

SEQ ID NO: 136268 - RNA, 32 nt, Human
cugaugccccuucuccccuuccuggacacacu

SEQ ID NO: 136269 - RNA, 20 nt, Human
cugaugcccuccccaccuca

SEQ ID NO: 136270 - RNA, 32 nt, Human
cugaugccggaggcagugggugcccugguuag

SEQ ID NO: 136271 - RNA, 21 nt, Human
cugaugccucccacugugaca

SEQ ID NO: 136272 - RNA, 32 nt, Human
cugaugccugcagcugcauaaguaguguuuca

SEQ ID NO: 136273 - RNA, 32 nt, Human
cugaugccuggucaucauuugaguccucuggg

SEQ ID NO: 136274 - RNA, 32 nt, Human
cugaugccuguaaucccagcacuuugggaggc

SEQ ID NO: 136275 - RNA, 32 nt, Human
cugaugccuuucuucaucuggggcaacucugg

SEQ ID NO: 136276 - RNA, 32 nt, Human
cugaugcgaguuggaaguacaccuuuaagaau

SEQ ID NO: 136277 - RNA, 32 nt, Human
cugaugcuauaugcagaggcccagggaccagg

SEQ ID NO: 136278 - RNA, 32 nt, Human
cugaugcucaauggguagaugccuuccaggcu

SEQ ID NO: 136279 - RNA, 32 nt, Human
cugaugcucugacucuucucuguaugucaaac

SEQ ID NO: 136280 - RNA, 32 nt, Human
cugaugcucuugccuugucaucaugccugaaa

SEQ ID NO: 136281 - RNA, 32 nt, Human
cugaugcugagaggcuugccuccgggggcugg

SEQ ID NO: 136282 - RNA, 32 nt, Human
cugaugcugagaugaauagacugggugagcuu

SEQ ID NO: 136283 - RNA, 32 nt, Human
cugaugcugaggaaguggauuuugcggguugg

SEQ ID NO: 136284 - RNA, 32 nt, Human
cugaugcugaggacaaagggagaagauguucc

SEQ ID NO: 136285 - RNA, 22 nt, Human
cugaugcugccgugcacugcag

SEQ ID NO: 136286 - RNA, 32 nt, Human
cugaugcugguggguacgaaaggugugggcug

SEQ ID NO: 136287 - RNA, 32 nt, Human
cugaugcuguuuucucuugucugauuugaaac

SEQ ID NO: 136288 - RNA, 32 nt, Human
cugaugcuugcugggugcugagugcagggggu

SEQ ID NO: 136289 - RNA, 28 nt, Human
cugauggacagucacggaaccagcagcg

SEQ ID NO: 136290 - RNA, 32 nt, Human
cugauggagacagaguuuccuuuuggaugaug

SEQ ID NO: 136291 - RNA, 32 nt, Human
cugauggagaggggcuacgcagcugccccagc

SEQ ID NO: 136292 - RNA, 32 nt, Human
cugauggaggcagacgcugccgagggggugug

SEQ ID NO: 136293 - RNA, 32 nt, Human
cugauggaggggcacugcuugcuuggcccggu

SEQ ID NO: 136294 - RNA, 32 nt, Human
cugauggaggggcauccguggugccuucuagc

SEQ ID NO: 136295 - RNA, 32 nt, Human
cugauggagguuugcucuuguugcccaggcug

SEQ ID NO: 136296 - RNA, 32 nt, Human
cugauggagugggaggugagcuaauucucuga

SEQ ID NO: 136297 - RNA, 32 nt, Human
cugauggcaaacucagacauuguuaaaugagc

SEQ ID NO: 136298 - RNA, 28 nt, Human
cugauggcaaagcucuacgaggcaguga

SEQ ID NO: 136299 - RNA, 21 nt, Human
cugauggcccaaaaacuaccu

SEQ ID NO: 136300 - RNA, 32 nt, Human
cugauggccccaccccucccuucccugcaggg

SEQ ID NO: 136301 - RNA, 19 nt, Human
cugauggccucuagguguu

SEQ ID NO: 136302 - RNA, 32 nt, Human
cugauggcuaaguuugcaugaaaacugcacuu

SEQ ID NO: 136303 - RNA, 32 nt, Human
cugauggcucacugggcucuuggaggggaaug

SEQ ID NO: 136304 - RNA, 32 nt, Human
cugauggcuuuuuagucuuuaacugugugugu

SEQ ID NO: 136305 - RNA, 32 nt, Human
cugaugggaagcuucccucucccaggcccccu

SEQ ID NO: 136306 - RNA, 18 nt, Human
cugaugggagccaggcca

SEQ ID NO: 136307 - RNA, 32 nt, Human
cugaugggaucucugcaguuuauuacguaggc

SEQ ID NO: 136308 - RNA, 32 nt, Human
cugaugggcaaccacaccacugccuggcgccg

SEQ ID NO: 136309 - RNA, 32 nt, Human
cugaugggcaggaggaugggagacaggaauug

SEQ ID NO: 136310 - RNA, 32 nt, Human
cugaugggcaucugcacccauagauucacugc

SEQ ID NO: 136311 - RNA, 32 nt, Human
cugaugggccucaguucuguucagagaacagc

SEQ ID NO: 136312 - RNA, 32 nt, Human
cugauggggaggcagagccaggaagcuaagcc

SEQ ID NO: 136313 - RNA, 32 nt, Human
cugauggggauguuuggccucugcuuccuccc

SEQ ID NO: 136314 - RNA, 32 nt, Human
cugaugggggacaggauuuggccacacugggg

SEQ ID NO: 136315 - RNA, 32 nt, Human
cugaugguaccacugcacuccagccuggguga

SEQ ID NO: 136316 - RNA, 32 nt, Human
cugaugguagagacagacuccaggcagcccug

SEQ ID NO: 136317 - RNA, 32 nt, Human
cugaugguauugggucacugagccugguaucc

SEQ ID NO: 136318 - RNA, 32 nt, Human
cugaugguccuccucagggucucaguguaaau

SEQ ID NO: 136319 - RNA, 32 nt, Human
cugauggugaaaagcuggccaugcucaaauaa

SEQ ID NO: 136320 - RNA, 32 nt, Human
cugaugguggccaggaugcucagcuggccagg

SEQ ID NO: 136321 - RNA, 32 nt, Human
cugaugguuuggguggggccccaguguccugg

SEQ ID NO: 136322 - RNA, 32 nt, Human
cugauguaaagaucagucccaguuauaaacug

SEQ ID NO: 136323 - RNA, 32 nt, Human
cugauguagcuggucugagggccacacugucu

SEQ ID NO: 136324 - RNA, 32 nt, Human
cugauguaugaggaaaaagcgagagaaaagga

SEQ ID NO: 136325 - RNA, 32 nt, Human
cugaugucaggaguucaagaccagccuggcca

SEQ ID NO: 136326 - RNA, 32 nt, Human
cugaugucagggguucgagaccagccuggcca

SEQ ID NO: 136327 - RNA, 32 nt, Human
cugaugucagggguuugagaccagccugguca

SEQ ID NO: 136328 - RNA, 32 nt, Human
cugaugucaguguguguaacugaccucuggcc

SEQ ID NO: 136329 - RNA, 32 nt, Human
cugaugucauuuccugaccugccucccccucc

SEQ ID NO: 136330 - RNA, 32 nt, Human
cugaugucauuuccuggggcucuuaacuccug

SEQ ID NO: 136331 - RNA, 28 nt, Human
cugaugucccacauugacccacugacca

SEQ ID NO: 136332 - RNA, 22 nt, Human
cugaugugagcaaagggccaga

SEQ ID NO: 136333 - RNA, 32 nt, Human
cugaugugaguguguggcaccugugauggcag

SEQ ID NO: 136334 - RNA, 29 nt, Human
cugaugugagugugugugaugggaucugu

SEQ ID NO: 136335 - RNA, 32 nt, Human
cugaugugccagccaccauuccucuccccugg

SEQ ID NO: 136336 - RNA, 32 nt, Human
cugauguggcacugaggagcugacuuugguca

SEQ ID NO: 136337 - RNA, 32 nt, Human
cugaugugggagaggugcggggagacauucca

SEQ ID NO: 136338 - RNA, 32 nt, Human
cugaugugugggcuucccacagcaggacugac

SEQ ID NO: 136339 - RNA, 32 nt, Human
cugauguguuccucaaagcuggcucgagggcu

SEQ ID NO: 136340 - RNA, 28 nt, Human
cugauguguucuaagcccgaagauccag

SEQ ID NO: 136341 - RNA, 32 nt, Human
cugauguucacugucuccucccagguucaaca

SEQ ID NO: 136342 - RNA, 21 nt, Human
cugauguuuaagugcuccaag

SEQ ID NO: 136343 - RNA, 32 nt, Human
cugauguuucggaacagucauuucaccuacua

SEQ ID NO: 136344 - RNA, 32 nt, Human
cugauguuuuuaggcacagaaguuggagaaga

SEQ ID NO: 136345 - RNA, 32 nt, Human
cugauuaaaaauaagaacugaccaauagcucc

SEQ ID NO: 136346 - RNA, 32 nt, Human
cugauuacuguccagcuuauagucuuccaguu

SEQ ID NO: 136347 - RNA, 32 nt, Human
cugauuacuuccucuaguugugaaggcagagg

SEQ ID NO: 136348 - RNA, 32 nt, Human
cugauuagaaggggagguucaaacugucaaug

SEQ ID NO: 136349 - RNA, 32 nt, Human
cugauuagaagucuccuuucuguuucaggcuu

SEQ ID NO: 136350 - RNA, 24 nt, Human
cugauuauugggaugcaucugcag

SEQ ID NO: 136351 - RNA, 32 nt, Human
cugauucaccagacaccgaaucugccagcacc

SEQ ID NO: 136352 - RNA, 32 nt, Human
cugauucaccagccuggaaacugcuuggugca

SEQ ID NO: 136353 - RNA, 32 nt, Human
cugauucaugaagaaaagcagauagaaguggc

SEQ ID NO: 136354 - RNA, 32 nt, Human
cugauuccaagcaaaaaccaggcuccaucuac

SEQ ID NO: 136355 - RNA, 32 nt, Human
cugauuccagagcacugcuccaguggggccau

SEQ ID NO: 136356 - RNA, 32 nt, Human
cugauuccagcuccuggcccuccuggaaccca

SEQ ID NO: 136357 - RNA, 23 nt, Human
cugauucccaaauggaugauguu

SEQ ID NO: 136358 - RNA, 32 nt, Human
cugauuccccuccaccaaaccccacuuccccu

SEQ ID NO: 136359 - RNA, 32 nt, Human
cugauucccugacaggagccgacuucacacac

SEQ ID NO: 136360 - RNA, 32 nt, Human
cugauuccuguuucugauuuccuuccucacug

SEQ ID NO: 136361 - RNA, 32 nt, Human
cugauucuacaaaggccaacucuacauauuug

SEQ ID NO: 136362 - RNA, 32 nt, Human
cugauucuacauuaugccccuaccucccggca

SEQ ID NO: 136363 - RNA, 32 nt, Human
cugauucuacccaccuaggaggucugagaccc

SEQ ID NO: 136364 - RNA, 32 nt, Human
cugauucuaccucccuccucuagacucaguaa

SEQ ID NO: 136365 - RNA, 32 nt, Human
cugauucucaggagaaagauggauuuuaaccc

SEQ ID NO: 136366 - RNA, 32 nt, Human
cugauucucuucuucuaccucuacccucucca

SEQ ID NO: 136367 - RNA, 32 nt, Human
cugauucugaagcuaaagagcuuucauccucu

SEQ ID NO: 136368 - RNA, 32 nt, Human
cugauucuggagcucuguguucugagaucaug

SEQ ID NO: 136369 - RNA, 17 nt, Human
cugauucuuaaggcagg

SEQ ID NO: 136370 - RNA, 32 nt, Human
cugauucuuuaaaaaggagccccacacagugc

SEQ ID NO: 136371 - RNA, 32 nt, Human
cugauucuuugucccuugucuguuuugagcaa

SEQ ID NO: 136372 - RNA, 32 nt, Human
cugauugaagcugacaucuccaagagguacag

SEQ ID NO: 136373 - RNA, 32 nt, Human
cugauugacacauagcuauccaggugagucgg

SEQ ID NO: 136374 - RNA, 32 nt, Human
cugauugagaucuuuggcauuuuaaaggagua

SEQ ID NO: 136375 - RNA, 32 nt, Human
cugauugagucuccacuccacaagcacucagg

SEQ ID NO: 136376 - RNA, 20 nt, Human
cugauugauugguccuuuua

SEQ ID NO: 136377 - RNA, 31 nt, Human
cugauugcaaugucuggacgugguaagcaag

SEQ ID NO: 136378 - RNA, 32 nt, Human
cugauugcacacuggcugaauagcaucccugg

SEQ ID NO: 136379 - RNA, 32 nt, Human
cugauugcaccacugcacuccaggcuggguaa

SEQ ID NO: 136380 - RNA, 32 nt, Human
cugauugcaccacuggacgccagccuaggcaa

SEQ ID NO: 136381 - RNA, 32 nt, Human
cugauugcaccacuguacuccagccuggguga

SEQ ID NO: 136382 - RNA, 32 nt, Human
cugauugcagugguggaucaggcuaccuguuu

SEQ ID NO: 136383 - RNA, 32 nt, Human
cugauugcaucuagguggaguggauggaaugu

SEQ ID NO: 136384 - RNA, 32 nt, Human
cugauugcauuccagccugggugacagagcua

SEQ ID NO: 136385 - RNA, 32 nt, Human
cugauugcauucuuccccuaauccauuuucca

SEQ ID NO: 136386 - RNA, 32 nt, Human
cugauugcgccacugcaccccagcccagugac

SEQ ID NO: 136387 - RNA, 22 nt, Human
cugauugcgccacugcacucca

SEQ ID NO: 136388 - RNA, 32 nt, Human
cugauugcugguuuugggggaggcagggguag

SEQ ID NO: 136389 - RNA, 32 nt, Human
cugauuggacugcccuacaccaaucagaagcu

SEQ ID NO: 136390 - RNA, 32 nt, Human
cugauuggauauuuaaagaagggugccacauu

SEQ ID NO: 136391 - RNA, 31 nt, Human
cugauuggcagccugcuuugccaaagagaac

SEQ ID NO: 136392 - RNA, 32 nt, Human
cugauuggccaggugcggugguucgugccugu

SEQ ID NO: 136393 - RNA, 32 nt, Human
cugauuggcccagguaucuguggaagguucca

SEQ ID NO: 136394 - RNA, 32 nt, Human
cugauuggcuguaaguguugccucaaguaaug

SEQ ID NO: 136395 - RNA, 32 nt, Human
cugauugggcuucauacuuuaugcuggcugug

SEQ ID NO: 136396 - RNA, 22 nt, Human
cugauugguuccacaacugcuu

SEQ ID NO: 136397 - RNA, 32 nt, Human
cugauugguuuucuuucuuuuuccuuggauua

SEQ ID NO: 136398 - RNA, 32 nt, Human
cugauugucccaggaccugaagggagcaagga

SEQ ID NO: 136399 - RNA, 32 nt, Human
cugauuguccucuaguuucuccaucuccugag

SEQ ID NO: 136400 - RNA, 32 nt, Human
cugauugugccagugcacuccaggcuggacga

SEQ ID NO: 136401 - RNA, 32 nt, Human
cugauugugccagugcacuccggccuggguga

SEQ ID NO: 136402 - RNA, 32 nt, Human
cugauugugcccuacucuuugcaccugacuuu

SEQ ID NO: 136403 - RNA, 32 nt, Human
cugauuuaacaacaucucguuaucucagauau

SEQ ID NO: 136404 - RNA, 32 nt, Human
cugauuuaacaacaugucauuaucucagauau

SEQ ID NO: 136405 - RNA, 32 nt, Human
cugauuucaggcgauccacccaccucgacuuc

SEQ ID NO: 136406 - RNA, 32 nt, Human
cugauuucaguagugagcacaguugacagggu

SEQ ID NO: 136407 - RNA, 32 nt, Human
cugauuucauccucccuaucccugcacacuuu

SEQ ID NO: 136408 - RNA, 32 nt, Human
cugauuucaugaauugaaaagaaacaaaugua

SEQ ID NO: 136409 - RNA, 27 nt, Human
cugauuucauugugggugcauccacag

SEQ ID NO: 136410 - RNA, 32 nt, Human
cugauuucccauugaauguggccagugggagg

SEQ ID NO: 136411 - RNA, 32 nt, Human
cugauuuccccuuuugcauucucccuccuucc

SEQ ID NO: 136412 - RNA, 32 nt, Human
cugauuucgaacccacugccugucuugauauc

SEQ ID NO: 136413 - RNA, 20 nt, Human
cugauuucuauggcuuucaa

SEQ ID NO: 136414 - RNA, 32 nt, Human
cugauuucugucucccuuccaucuuuucuccc

SEQ ID NO: 136415 - RNA, 32 nt, Human
cugauuucuugcgggaggagggggacuaaacu

SEQ ID NO: 136416 - RNA, 32 nt, Human
cugauuucuugggcugaauuuagacucucuca

SEQ ID NO: 136417 - RNA, 32 nt, Human
cugauuugaacccugaaauguuguguagacac

SEQ ID NO: 136418 - RNA, 32 nt, Human
cugauuugaaugucauaauugcagugacagga

SEQ ID NO: 136419 - RNA, 32 nt, Human
cugauuugagaaaagggaggaggggaagacag

SEQ ID NO: 136420 - RNA, 32 nt, Human
cugauuugagaaaagggaggaggggaagauag

SEQ ID NO: 136421 - RNA, 22 nt, Human
cugauuugaugccucuccccag

SEQ ID NO: 136422 - RNA, 24 nt, Human
cugauuugccauguaaaaugcuaa

SEQ ID NO: 136423 - RNA, 32 nt, Human
cugauuuggaggcagcucuccucauuuucccc

SEQ ID NO: 136424 - RNA, 32 nt, Human
cugauuugggaagaacaaagaggccaggcccc

SEQ ID NO: 136425 - RNA, 32 nt, Human
cugauuugggcccagccccagggcgcaaggcc

SEQ ID NO: 136426 - RNA, 32 nt, Human
cugauuugguuuguucugucucaggcuucugu

SEQ ID NO: 136427 - RNA, 32 nt, Human
cugauuuguggauguggaugggggcacguugu

SEQ ID NO: 136428 - RNA, 32 nt, Human
cugauuugugugacuuuaccauugaccaccag

SEQ ID NO: 136429 - RNA, 18 nt, Human
cugauuuguugggaccuu

SEQ ID NO: 136430 - RNA, 32 nt, Human
cugauuuuaccugaaaaugguaguaguuuaca

SEQ ID NO: 136431 - RNA, 32 nt, Human
cugauuuucccagcaucguucuagcuauuucu

SEQ ID NO: 136432 - RNA, 32 nt, Human
cugauuuucccuuuucaacauuccuuaccagu

SEQ ID NO: 136433 - RNA, 32 nt, Human
cugauuuucucaaaugauuauugaagaguugu

SEQ ID NO: 136434 - RNA, 22 nt, Human
cugauuuugaaacgaucugcag

SEQ ID NO: 136435 - RNA, 22 nt, Human
cugauuuugccacaaccuggau

SEQ ID NO: 136436 - RNA, 32 nt, Human
cugauuuugccaccagcccuaccgaauaguug

SEQ ID NO: 136437 - RNA, 32 nt, Human
cugauuuuucaucaagagauugacauaccaau

SEQ ID NO: 136438 - RNA, 32 nt, Human
cugauuuuuccuauuaggcuaggguuuggacc

SEQ ID NO: 136439 - RNA, 32 nt, Human
cugauuuuucuuucuuuuuccgcgagggcugu

SEQ ID NO: 136440 - RNA, 32 nt, Human
cugcaaaaaccaccucauacacacacaauuca

SEQ ID NO: 136441 - RNA, 32 nt, Human
cugcaaaaacucaaaaauuagccaggcgugcu

SEQ ID NO: 136442 - RNA, 26 nt, Human
cugcaaaaacugugcuguccuuguga

SEQ ID NO: 136443 - RNA, 32 nt, Human
cugcaaaacacacacaugcguauagacauaca

SEQ ID NO: 136444 - RNA, 32 nt, Human
cugcaaaacacaugaaaagaagcucaacauca

SEQ ID NO: 136445 - RNA, 21 nt, Human
cugcaaaaccggcaaccugua

SEQ ID NO: 136446 - RNA, 32 nt, Human
cugcaaaagacaagacaaauacauuugaacag

SEQ ID NO: 136447 - RNA, 32 nt, Human
cugcaaaagaggagcaaagcagacccgagaga

SEQ ID NO: 136448 - RNA, 32 nt, Human
cugcaaaaggagcuugcagagagauggcugac

SEQ ID NO: 136449 - RNA, 32 nt, Human
cugcaaaauauacaaaaauuagcugggugugg

SEQ ID NO: 136450 - RNA, 32 nt, Human
cugcaaacacaugcagacauuuaguuuugauu

SEQ ID NO: 136451 - RNA, 32 nt, Human
cugcaaacaccucccugugcuccaccugccuc

SEQ ID NO: 136452 - RNA, 32 nt, Human
cugcaaaccagccugggcaauagagugagacc

SEQ ID NO: 136453 - RNA, 32 nt, Human
cugcaaaccaggcuguggaguguggccccucc

SEQ ID NO: 136454 - RNA, 32 nt, Human
cugcaaaccaugggguuuaaagccagggugga

SEQ ID NO: 136455 - RNA, 19 nt, Human
cugcaaaccucggcaggug

SEQ ID NO: 136456 - RNA, 18 nt, Human
cugcaaacucacugcuca

SEQ ID NO: 136457 - RNA, 32 nt, Human
cugcaaacucacuguguggccucguaccccag

SEQ ID NO: 136458 - RNA, 32 nt, Human
cugcaaacucagaaaacuaaggcuuuggcccu

SEQ ID NO: 136459 - RNA, 32 nt, Human
cugcaaacucagucucaugcuccuggaauacc

SEQ ID NO: 136460 - RNA, 32 nt, Human
cugcaaacucuccgccuucugcaccugccacc

SEQ ID NO: 136461 - RNA, 32 nt, Human
cugcaaagacacgggcuuugcugcaguagucc

SEQ ID NO: 136462 - RNA, 32 nt, Human
cugcaaagccagcuugaaaccuucacuuagga

SEQ ID NO: 136463 - RNA, 32 nt, Human
cugcaaagccaucuuagcaacuuucucacuga

SEQ ID NO: 136464 - RNA, 32 nt, Human
cugcaaaggggcaucagcccaccccaccggau

SEQ ID NO: 136465 - RNA, 32 nt, Human
cugcaaaguuggccauguuucacagggaaacu

SEQ ID NO: 136466 - RNA, 32 nt, Human
cugcaaaguuugcaggagggccagguauauuc

SEQ ID NO: 136467 - RNA, 32 nt, Human
cugcaaauaugaagccugaauuuuaugaaauu

SEQ ID NO: 136468 - RNA, 32 nt, Human
cugcaaaucccucccacccugggccuugugca

SEQ ID NO: 136469 - RNA, 31 nt, Human
cugcaaauggcugaagucccggaggauuaug

SEQ ID NO: 136470 - RNA, 32 nt, Human
cugcaaaugugucagcauuugcuuguuugagc

SEQ ID NO: 136471 - RNA, 32 nt, Human
cugcaaauuccgagaaaugugaaacuuggugg

SEQ ID NO: 136472 - RNA, 22 nt, Human
cugcaaauuguucuauuaaagu

SEQ ID NO: 136473 - RNA, 32 nt, Human
cugcaacaaaauuuaaaaauuagccagacuug

SEQ ID NO: 136474 - RNA, 32 nt, Human
cugcaacaaaucuccagccuggguugccauga

SEQ ID NO: 136475 - RNA, 22 nt, Human
cugcaacaagcucaucccugga

SEQ ID NO: 136476 - RNA, 31 nt, Human
cugcaacaaguguccccuucgcagcaacagc

SEQ ID NO: 136477 - RNA, 32 nt, Human
cugcaacacagcuggauccucuauguggcagc

SEQ ID NO: 136478 - RNA, 32 nt, Human
cugcaacacagcuggauccucuguguggcagc

SEQ ID NO: 136479 - RNA, 32 nt, Human
cugcaacacccaccagcaggugaacggauuaa

SEQ ID NO: 136480 - RNA, 23 nt, Human
cugcaacacccagaccuccagga

SEQ ID NO: 136481 - RNA, 32 nt, Human
cugcaacacuccugcuguuggcuggagcaugu

SEQ ID NO: 136482 - RNA, 19 nt, Human
cugcaacagaaaccagcuu

SEQ ID NO: 136483 - RNA, 21 nt, Human
cugcaacagacccccucugga

SEQ ID NO: 136484 - RNA, 21 nt, Human
cugcaacagaugccuccuaga

SEQ ID NO: 136485 - RNA, 32 nt, Human
cugcaacaggagggaaaggcagaaugauauca

SEQ ID NO: 136486 - RNA, 32 nt, Human
cugcaacaucuucuccuccaggaaggcuuccu

SEQ ID NO: 136487 - RNA, 24 nt, Human
cugcaacaugccuucccugcugga

SEQ ID NO: 136488 - RNA, 32 nt, Human
cugcaacauuuuauccccaucauuccaaaaug

SEQ ID NO: 136489 - RNA, 32 nt, Human
cugcaaccaagaggcaagaggcgagagaagga

SEQ ID NO: 136490 - RNA, 32 nt, Human
cugcaaccacaguuguaaggcucauggcaccu

SEQ ID NO: 136491 - RNA, 32 nt, Human
cugcaaccacaguuugagaaacuccgcguuca

SEQ ID NO: 136492 - RNA, 32 nt, Human
cugcaaccaccaucuccuggguucaggcgauu

SEQ ID NO: 136493 - RNA, 31 nt, Human
cugcaaccacugucucccggguucaagcgau

SEQ ID NO: 136494 - RNA, 32 nt, Human
cugcaacccagccugggugacagagcgagacu

SEQ ID NO: 136495 - RNA, 32 nt, Human
cugcaacccagcugcuggacugaucugaaacg

SEQ ID NO: 136496 - RNA, 18 nt, Human
cugcaacccaggcugcug

SEQ ID NO: 136497 - RNA, 32 nt, Human
cugcaacccagggucccagcuggcuggguccu

SEQ ID NO: 136498 - RNA, 32 nt, Human
cugcaacccugacccaaugcacgaagccaccc

SEQ ID NO: 136499 - RNA, 32 nt, Human
cugcaaccuacccucucucugccucagccuua

SEQ ID NO: 136500 - RNA, 20 nt, Human
cugcaaccuagcagcaggug

SEQ ID NO: 136501 - RNA, 32 nt, Human
cugcaaccuaguuuucccucucaccuuuaacu

SEQ ID NO: 136502 - RNA, 32 nt, Human
cugcaaccucaaacuccugggcucaagcgagc

SEQ ID NO: 136503 - RNA, 32 nt, Human
cugcaaccucaaacuccugggcucaaguaauc

SEQ ID NO: 136504 - RNA, 32 nt, Human
cugcaaccucagccuccugggcucaagcaauu

SEQ ID NO: 136505 - RNA, 32 nt, Human
cugcaaccuccaccuccccaguucacacgauu

SEQ ID NO: 136506 - RNA, 32 nt, Human
cugcaaccuccaccuccuggguucaagacaau

SEQ ID NO: 136507 - RNA, 32 nt, Human
cugcaaccuccaccuccuggguucaggcgauu

SEQ ID NO: 136508 - RNA, 32 nt, Human
cugcaaccuccagcuccuggguucaggugauu

SEQ ID NO: 136509 - RNA, 32 nt, Human
cugcaaccuccaggccagccucagccucccua

SEQ ID NO: 136510 - RNA, 21 nt, Human
cugcaaccucccccuccuggg

SEQ ID NO: 136511 - RNA, 32 nt, Human
cugcaaccuccgccucccgaguuuagcgauuc

SEQ ID NO: 136512 - RNA, 32 nt, Human
cugcaaccuccgccucccggguucaagaaguu

SEQ ID NO: 136513 - RNA, 32 nt, Human
cugcaaccuccgccuccuggguucaagagauu

SEQ ID NO: 136514 - RNA, 32 nt, Human
cugcaaccuccgccuccuggguucaggagauu

SEQ ID NO: 136515 - RNA, 32 nt, Human
cugcaaccuccgccuccuggguucaggcaauu

SEQ ID NO: 136516 - RNA, 32 nt, Human
cugcaaccuccgccuccuggguucgggcgauu

SEQ ID NO: 136517 - RNA, 32 nt, Human
cugcaaccuccgccuccuggguucgggugauu

SEQ ID NO: 136518 - RNA, 32 nt, Human
cugcaaccucucuuucuccuaccuacaucgug

SEQ ID NO: 136519 - RNA, 32 nt, Human
cugcaaccucugccuccugggcucaagagacc

SEQ ID NO: 136520 - RNA, 32 nt, Human
cugcaaccucugccuccuggguucaagaaauu

SEQ ID NO: 136521 - RNA, 32 nt, Human
cugcaaccucugccuccuggguucaagagauu

SEQ ID NO: 136522 - RNA, 32 nt, Human
cugcaaccucugccuccuggguucaggcaauu

SEQ ID NO: 136523 - RNA, 32 nt, Human
cugcaaccucugccuccuggguucaggugauu

SEQ ID NO: 136524 - RNA, 31 nt, Human
cugcaaccucugucucccagguucaggugau

SEQ ID NO: 136525 - RNA, 32 nt, Human
cugcaaccucugucuccuggguucaggugauu

SEQ ID NO: 136526 - RNA, 32 nt, Human
cugcaaccugacacaaugcucagaaacagaau

SEQ ID NO: 136527 - RNA, 32 nt, Human
cugcaaccuggaacuccugggcucaaugaucc

SEQ ID NO: 136528 - RNA, 32 nt, Human
cugcaaccuucccagccacuccugcugcacua

SEQ ID NO: 136529 - RNA, 20 nt, Human
cugcaaccuuguuuauuaaa

SEQ ID NO: 136530 - RNA, 32 nt, Human
cugcaaccuuucucuucucacgggucugcagu

SEQ ID NO: 136531 - RNA, 31 nt, Human
cugcaaccuuugucucccgggcucaagugau

SEQ ID NO: 136532 - RNA, 32 nt, Human
cugcaacgaccuaugacagcaccacugcacuc

SEQ ID NO: 136533 - RNA, 32 nt, Human
cugcaacggugcuuccagccuucguaauuaga

SEQ ID NO: 136534 - RNA, 20 nt, Human
cugcaacucucugucuguga

SEQ ID NO: 136535 - RNA, 32 nt, Human
cugcaacuggaucuucagccuccugugggagc

SEQ ID NO: 136536 - RNA, 32 nt, Human
cugcaacugugagaguccagacaggaagcaga

SEQ ID NO: 136537 - RNA, 21 nt, Human
cugcaacuucauucuugaagu

SEQ ID NO: 136538 - RNA, 32 nt, Human
cugcaacuuccgcuucccagguucaagcaauu

SEQ ID NO: 136539 - RNA, 32 nt, Human
cugcaacuugcaagguggagguuacagugagc

SEQ ID NO: 136540 - RNA, 32 nt, Human
cugcaacuuuaagcagcucuugcuaaucagug

SEQ ID NO: 136541 - RNA, 32 nt, Human
cugcaagacacuuuuauuaauucuucauuuuu

SEQ ID NO: 136542 - RNA, 32 nt, Human
cugcaagacauuguuucucucccucugccccc

SEQ ID NO: 136543 - RNA, 32 nt, Human
cugcaagaccacugacgagcagucccauggug

SEQ ID NO: 136544 - RNA, 32 nt, Human
cugcaagagaaaaggggcuggaggaagauccg

SEQ ID NO: 136545 - RNA, 32 nt, Human
cugcaagagaauggauaagaaaagaauaugca

SEQ ID NO: 136546 - RNA, 21 nt, Human
cugcaagagccuggcugggaa

SEQ ID NO: 136547 - RNA, 32 nt, Human
cugcaagagcuuuuaagcaaaugcaggacuug

SEQ ID NO: 136548 - RNA, 32 nt, Human
cugcaagaggaggcgaggcggagccagccgag

SEQ ID NO: 136549 - RNA, 32 nt, Human
cugcaagagucuggcucucccuucucugugac

SEQ ID NO: 136550 - RNA, 32 nt, Human
cugcaagcaagggggaggggagcccacaggcc

SEQ ID NO: 136551 - RNA, 32 nt, Human
cugcaagcacacacaccaggaagcagccugua

SEQ ID NO: 136552 - RNA, 19 nt, Human
cugcaagcacuucucuuca

SEQ ID NO: 136553 - RNA, 32 nt, Human
cugcaagcagaggccggcaugaccaccgagca

SEQ ID NO: 136554 - RNA, 32 nt, Human
cugcaagccaacaacaaagaauucaacaguau

SEQ ID NO: 136555 - RNA, 32 nt, Human
cugcaagccaaggagagaggcugcaggagaaa

SEQ ID NO: 136556 - RNA, 32 nt, Human
cugcaagccagacaggaaaaagauuccauguc

SEQ ID NO: 136557 - RNA, 32 nt, Human
cugcaagccagccuggccagcugcucagacca

SEQ ID NO: 136558 - RNA, 32 nt, Human
cugcaagccaucgacccugcugccuuuucacu

SEQ ID NO: 136559 - RNA, 32 nt, Human
cugcaagcccaggaugcccgggccacaggccg

SEQ ID NO: 136560 - RNA, 32 nt, Human
cugcaagcccuagaggaguuuuuccaggcugu

SEQ ID NO: 136561 - RNA, 24 nt, Human
cugcaagccugaaaaccagaagug

SEQ ID NO: 136562 - RNA, 32 nt, Human
cugcaagccuguucugccauugcagugugaug

SEQ ID NO: 136563 - RNA, 32 nt, Human
cugcaagcuaaccugcuuuguguauggcgucg

SEQ ID NO: 136564 - RNA, 32 nt, Human
cugcaagcuccccucagcccaucuugcucccu

SEQ ID NO: 136565 - RNA, 23 nt, Human
cugcaagcuccgccucccggguu

SEQ ID NO: 136566 - RNA, 32 nt, Human
cugcaagcucuaugccauucgcacccaggagu

SEQ ID NO: 136567 - RNA, 32 nt, Human
cugcaagcucugccucucagguucaagugauu

SEQ ID NO: 136568 - RNA, 32 nt, Human
cugcaagcugacuccagccuugggcucagcag

SEQ ID NO: 136569 - RNA, 32 nt, Human
cugcaagcugacuccagccuuggggucagcag

SEQ ID NO: 136570 - RNA, 32 nt, Human
cugcaagcugaggaagaaagaagccaauagua

SEQ ID NO: 136571 - RNA, 32 nt, Human
cugcaagcuggagaaccagggaagagaguaga

SEQ ID NO: 136572 - RNA, 32 nt, Human
cugcaaggaaagugaggcgccgccgcugcguu

SEQ ID NO: 136573 - RNA, 32 nt, Human
cugcaaggaagcuggaugcaagauagauacua

SEQ ID NO: 136574 - RNA, 32 nt, Human
cugcaaggaauuagaagcauauuugcaaucau

SEQ ID NO: 136575 - RNA, 32 nt, Human
cugcaaggacaauccaggguccuggcuucagc

SEQ ID NO: 136576 - RNA, 22 nt, Human
cugcaaggaccugggccuccca

SEQ ID NO: 136577 - RNA, 32 nt, Human
cugcaaggacgcagaauaagcagugagggcgg

SEQ ID NO: 136578 - RNA, 32 nt, Human
cugcaaggagcagaguguguucaccuugaguc

SEQ ID NO: 136579 - RNA, 25 nt, Human
cugcaaggaucauaucuaagugcac

SEQ ID NO: 136580 - RNA, 32 nt, Human
cugcaaggcacugaggaguaucaaagaagcaa

SEQ ID NO: 136581 - RNA, 32 nt, Human
cugcaaggcaucucucagcgccuccagcagcc

SEQ ID NO: 136582 - RNA, 32 nt, Human
cugcaaggcccucuauuucucucuuucuuggu

SEQ ID NO: 136583 - RNA, 32 nt, Human
cugcaaggccuacagagacagagcuauaggaa

SEQ ID NO: 136584 - RNA, 32 nt, Human
cugcaaggcucuaggugugacaacagcaguug

SEQ ID NO: 136585 - RNA, 19 nt, Human
cugcaaggcucugcagcca

SEQ ID NO: 136586 - RNA, 32 nt, Human
cugcaaggcugcaggcacuggcagugggaaga

SEQ ID NO: 136587 - RNA, 32 nt, Human
cugcaagggaaagcaauugaaaaagaaauaaa

SEQ ID NO: 136588 - RNA, 32 nt, Human
cugcaagggaaagggaaaggaagcagggcagu

SEQ ID NO: 136589 - RNA, 20 nt, Human
cugcaagggcgagcauggga

SEQ ID NO: 136590 - RNA, 32 nt, Human
cugcaagggugaggggccuggcaggauggagg

SEQ ID NO: 136591 - RNA, 32 nt, Human
cugcaaggugagaagaggcagacagugacgau

SEQ ID NO: 136592 - RNA, 32 nt, Human
cugcaaggugagcagaggcaggcguggggaca

SEQ ID NO: 136593 - RNA, 17 nt, Human
cugcaagucaguaggug

SEQ ID NO: 136594 - RNA, 32 nt, Human
cugcaagucccagggagcucugcauaccaggg

SEQ ID NO: 136595 - RNA, 32 nt, Human
cugcaagucuucacucuccucuugggggcaga

SEQ ID NO: 136596 - RNA, 32 nt, Human
cugcaagugagcugagaucaugccauggcagu

SEQ ID NO: 136597 - RNA, 32 nt, Human
cugcaagugcuacuggcaacagccugagggca

SEQ ID NO: 136598 - RNA, 22 nt, Human
cugcaagugguagcaagaagug

SEQ ID NO: 136599 - RNA, 32 nt, Human
cugcaaguguuacugaguaauuggauuuaaga

SEQ ID NO: 136600 - RNA, 32 nt, Human
cugcaaguguucuccaggggcauuucauuaau

SEQ ID NO: 136601 - RNA, 32 nt, Human
cugcaaguucacugcaugucugaugcuuggua

SEQ ID NO: 136602 - RNA, 32 nt, Human
cugcaaguucagggugaagaaaaagaagaaga

SEQ ID NO: 136603 - RNA, 32 nt, Human
cugcaauaagauucuaguucucucuuuucuuu

SEQ ID NO: 136604 - RNA, 21 nt, Human
cugcaauaggcucucugagca

SEQ ID NO: 136605 - RNA, 31 nt, Human
cugcaaucaauaaacacuugccugugaaaaa

SEQ ID NO: 136606 - RNA, 32 nt, Human
cugcaaucauuucugcauccuuacuccucacc

SEQ ID NO: 136607 - RNA, 32 nt, Human
cugcaauccagccugggcaacagagcgagguc

SEQ ID NO: 136608 - RNA, 32 nt, Human
cugcaauccagccugggcgauagagugagacu

SEQ ID NO: 136609 - RNA, 32 nt, Human
cugcaaucucugccuccuggguucagaugauu

SEQ ID NO: 136610 - RNA, 32 nt, Human
cugcaaucugggagguggaaguugcagugagc

SEQ ID NO: 136611 - RNA, 32 nt, Human
cugcaaucuggucugcugccuuccucuuccau

SEQ ID NO: 136612 - RNA, 24 nt, Human
cugcaaugacugcagggcugggaa

SEQ ID NO: 136613 - RNA, 32 nt, Human
cugcaaugcaugggacaggcccugccuagaaa

SEQ ID NO: 136614 - RNA, 32 nt, Human
cugcaauggcagagaagcccagggugggaugu

SEQ ID NO: 136615 - RNA, 32 nt, Human
cugcaauuacuuuugcaccaaccuaauagaau

SEQ ID NO: 136616 - RNA, 32 nt, Human
cugcaauuauguugaaaagaguaguacuuucu

SEQ ID NO: 136617 - RNA, 20 nt, Human
cugcaauucacucccacugc

SEQ ID NO: 136618 - RNA, 19 nt, Human
cugcaauucuuuagaggug

SEQ ID NO: 136619 - RNA, 32 nt, Human
cugcaauuggugguaacagugguagagucaug

SEQ ID NO: 136620 - RNA, 32 nt, Human
cugcaauuugcugccaaaugcaucucagguuu

SEQ ID NO: 136621 - RNA, 32 nt, Human
cugcaauuuuuccuugaguuuugaauuguuuu

SEQ ID NO: 136622 - RNA, 32 nt, Human
cugcacaaaaaccaccaccagcagcucacauu

SEQ ID NO: 136623 - RNA, 32 nt, Human
cugcacaaaaugcccggcgaagccacagaaac

SEQ ID NO: 136624 - RNA, 32 nt, Human
cugcacaaaaugcccugugaagccacagaaac

SEQ ID NO: 136625 - RNA, 32 nt, Human
cugcacaaccccauuaagccugggcaauccca

SEQ ID NO: 136626 - RNA, 32 nt, Human
cugcacaagagucucucucaggcagugaaucg

SEQ ID NO: 136627 - RNA, 32 nt, Human
cugcacaaggaagacggcugggcacaggagac

SEQ ID NO: 136628 - RNA, 22 nt, Human
cugcacaaguacccagcaggug

SEQ ID NO: 136629 - RNA, 32 nt, Human
cugcacaaugcaaccaaccugcggucucgguc

SEQ ID NO: 136630 - RNA, 32 nt, Human
cugcacacacaaucccacacacccucaggguu

SEQ ID NO: 136631 - RNA, 32 nt, Human
cugcacacacaggcaccagcagggaugccaca

SEQ ID NO: 136632 - RNA, 19 nt, Human
cugcacacaccaucuccau

SEQ ID NO: 136633 - RNA, 32 nt, Human
cugcacaccagccuggacaacagagcgagacu

SEQ ID NO: 136634 - RNA, 32 nt, Human
cugcacaccagccugggcaacacagcaagacu

SEQ ID NO: 136635 - RNA, 32 nt, Human
cugcacaccagccugggugacagagcgagacu

SEQ ID NO: 136636 - RNA, 32 nt, Human
cugcacaccagccugggugacagugugagacc

SEQ ID NO: 136637 - RNA, 32 nt, Human
cugcacaccauccuggaugacagagcaagacu

SEQ ID NO: 136638 - RNA, 23 nt, Human
cugcacaccaugucccucuuuuc

SEQ ID NO: 136639 - RNA, 32 nt, Human
cugcacacccugggugacaggccccugggagg

SEQ ID NO: 136640 - RNA, 32 nt, Human
cugcacaccuggaagccaaugaagggaacugg

SEQ ID NO: 136641 - RNA, 32 nt, Human
cugcacacucagucaggaggcugcagucuccc

SEQ ID NO: 136642 - RNA, 32 nt, Human
cugcacacuccuaacccuucucccagggugug

SEQ ID NO: 136643 - RNA, 32 nt, Human
cugcacacugcacuccauccugggcgacaguc

SEQ ID NO: 136644 - RNA, 32 nt, Human
cugcacacugccuagcccaaaacgucuuauug

SEQ ID NO: 136645 - RNA, 32 nt, Human
cugcacacuuguaaucacagcacuuugggagg

SEQ ID NO: 136646 - RNA, 15 nt, Human
cugcacacuuucaaa

SEQ ID NO: 136647 - RNA, 32 nt, Human
cugcacagaaacuuugccauuguuggaacggg

SEQ ID NO: 136648 - RNA, 32 nt, Human
cugcacagacaggaaccucagcagugacagaa

SEQ ID NO: 136649 - RNA, 32 nt, Human
cugcacagaccccacuccagccccuccacccc

SEQ ID NO: 136650 - RNA, 32 nt, Human
cugcacagaccgacccucugucacuuacaggg

SEQ ID NO: 136651 - RNA, 32 nt, Human
cugcacagacuggcugcuggaccugcgcacgc

SEQ ID NO: 136652 - RNA, 32 nt, Human
cugcacagaggacgccugacugcuguucaggc

SEQ ID NO: 136653 - RNA, 32 nt, Human
cugcacagagguccuggcuggaccgagcagcc

SEQ ID NO: 136654 - RNA, 32 nt, Human
cugcacagccagacaggagcugguugcggggc

SEQ ID NO: 136655 - RNA, 32 nt, Human
cugcacagcgcucagguuuuaggguuuccuuu

SEQ ID NO: 136656 - RNA, 32 nt, Human
cugcacagcuuagagaggcucacagcuuggca

SEQ ID NO: 136657 - RNA, 32 nt, Human
cugcacaggaaacacagaaacgggaauccuau

SEQ ID NO: 136658 - RNA, 17 nt, Human
cugcacaggaagcaggu

SEQ ID NO: 136659 - RNA, 32 nt, Human
cugcacaggcagcaaggucauggucugagugg

SEQ ID NO: 136660 - RNA, 32 nt, Human
cugcacaggcagccucaggugcgaggagcugg

SEQ ID NO: 136661 - RNA, 32 nt, Human
cugcacagggggaggagagggaaccccaggcg

SEQ ID NO: 136662 - RNA, 32 nt, Human
cugcacaggguccucagcucauccaugcggcc

SEQ ID NO: 136663 - RNA, 21 nt, Human
cugcacaggucacagcaggug

SEQ ID NO: 136664 - RNA, 32 nt, Human
cugcacaggucagaacacagguuuccaaaccc

SEQ ID NO: 136665 - RNA, 32 nt, Human
cugcacagucugggcgacagagcaagacccuc

SEQ ID NO: 136666 - RNA, 32 nt, Human
cugcacauccugcaccuccucccucucccuuc

SEQ ID NO: 136667 - RNA, 32 nt, Human
cugcacaucuagagaaaaacaaaaauagaaaa

SEQ ID NO: 136668 - RNA, 32 nt, Human
cugcacaucugucucuucccagcuccacauuc

SEQ ID NO: 136669 - RNA, 32 nt, Human
cugcacaugacuuacacacaacauaguuccug

SEQ ID NO: 136670 - RNA, 18 nt, Human
cugcacaugagcagagug

SEQ ID NO: 136671 - RNA, 32 nt, Human
cugcacaugauacuggcagcccuagaguucau

SEQ ID NO: 136672 - RNA, 32 nt, Human
cugcacaugcagcccucuccucgagcacguca

SEQ ID NO: 136673 - RNA, 19 nt, Human
cugcacaugcaggcaggug

SEQ ID NO: 136674 - RNA, 32 nt, Human
cugcacaugcuuucuuucauuuccucggauuc

SEQ ID NO: 136675 - RNA, 32 nt, Human
cugcacauucauugcaaccuucuucuggugau

SEQ ID NO: 136676 - RNA, 32 nt, Human
cugcacauuuccccugguucaggcugggcaug

SEQ ID NO: 136677 - RNA, 32 nt, Human
cugcaccaaagucagucauaagagaaaucgaa

SEQ ID NO: 136678 - RNA, 32 nt, Human
cugcaccaaccagacccuccucagccucagcc

SEQ ID NO: 136679 - RNA, 32 nt, Human
cugcaccaaccaugagccgccugcucuggagg

SEQ ID NO: 136680 - RNA, 32 nt, Human
cugcaccacaucaucuuugccugcugcacgcu

SEQ ID NO: 136681 - RNA, 32 nt, Human
cugcaccacccaccuccagagugcagugcugg

SEQ ID NO: 136682 - RNA, 32 nt, Human
cugcaccacccugcaacaccucaggccaggga

SEQ ID NO: 136683 - RNA, 32 nt, Human
cugcaccacuacucccaagccuagggaugaag

SEQ ID NO: 136684 - RNA, 32 nt, Human
cugcaccacugcacagucugggcgacagagca

SEQ ID NO: 136685 - RNA, 32 nt, Human
cugcaccacugcacuccacccugggcagaggu

SEQ ID NO: 136686 - RNA, 32 nt, Human
cugcaccacugcacuccagccugggcaacaaa

SEQ ID NO: 136687 - RNA, 32 nt, Human
cugcaccacugcacuucagccugggugacaga

SEQ ID NO: 136688 - RNA, 23 nt, Human
cugcaccagccccagcuccugcc

SEQ ID NO: 136689 - RNA, 32 nt, Human
cugcaccagcuccuugagcuucucccuagugg

SEQ ID NO: 136690 - RNA, 32 nt, Human
cugcaccaggagacagacagagaaggcagcag

SEQ ID NO: 136691 - RNA, 32 nt, Human
cugcaccaggaggaacgcuggagccagagagg

SEQ ID NO: 136692 - RNA, 32 nt, Human
cugcaccagguggcguccgggguggggucaau

SEQ ID NO: 136693 - RNA, 32 nt, Human
cugcaccagugccugcucauugaggagaguaa

SEQ ID NO: 136694 - RNA, 32 nt, Human
cugcaccaguuguuuuaccccugccgauaacc

SEQ ID NO: 136695 - RNA, 32 nt, Human
cugcaccauugcauuccagccugggcaacaag

SEQ ID NO: 136696 - RNA, 32 nt, Human
cugcacccaagagguggaagaggacgggcuuu

SEQ ID NO: 136697 - RNA, 32 nt, Human
cugcacccacacaaguggagcucacaggguag

SEQ ID NO: 136698 - RNA, 32 nt, Human
cugcacccaccgaucucacacgcagcccuagg

SEQ ID NO: 136699 - RNA, 32 nt, Human
cugcacccagcagccugugcgggaaaggaacu

SEQ ID NO: 136700 - RNA, 32 nt, Human
cugcacccagccuguaaaauauuuuaagagau

SEQ ID NO: 136701 - RNA, 32 nt, Human
cugcacccagcucuguaggugacuuuuaaaug

SEQ ID NO: 136702 - RNA, 32 nt, Human
cugcacccaggccucagaguuucagggcuaac

SEQ ID NO: 136703 - RNA, 32 nt, Human
cugcacccaggugaaauaaacagccuuguugc

SEQ ID NO: 136704 - RNA, 32 nt, Human
cugcaccccagccuggacaacagagugagacu

SEQ ID NO: 136705 - RNA, 32 nt, Human
cugcaccccagccugggcaacaagaguaaaac

SEQ ID NO: 136706 - RNA, 32 nt, Human
cugcaccccagccugggcgacggagcgagacu

SEQ ID NO: 136707 - RNA, 32 nt, Human
cugcaccccagccugggugacagagcgagacu

SEQ ID NO: 136708 - RNA, 32 nt, Human
cugcaccccagccugggugacagcgagauccu

SEQ ID NO: 136709 - RNA, 32 nt, Human
cugcaccccagcgucaggccuaccucaaguuc

SEQ ID NO: 136710 - RNA, 19 nt, Human
cugcaccccaguccaggug

SEQ ID NO: 136711 - RNA, 32 nt, Human
cugcacccccuucccgccuuccccucacuucc

SEQ ID NO: 136712 - RNA, 32 nt, Human
cugcaccccgcuggcccugcgcucgcccuugg

SEQ ID NO: 136713 - RNA, 32 nt, Human
cugcaccccucccuucuccaucucgcuugcug

SEQ ID NO: 136714 - RNA, 32 nt, Human
cugcaccccuucucuccuccccaaaucaauac

SEQ ID NO: 136715 - RNA, 32 nt, Human
cugcacccguggccgcagaggcugcagucccu

SEQ ID NO: 136716 - RNA, 28 nt, Human
cugcacccuauuguggccucauccaaac

SEQ ID NO: 136717 - RNA, 32 nt, Human
cugcacccucaaccuccugggcucaagcaauc

SEQ ID NO: 136718 - RNA, 32 nt, Human
cugcacccucaaccuccuggguucaagcaauc

SEQ ID NO: 136719 - RNA, 19 nt, Human
cugcacccucaggcaggug

SEQ ID NO: 136720 - RNA, 32 nt, Human
cugcacccuccacccugucccccagcucuggu

SEQ ID NO: 136721 - RNA, 32 nt, Human
cugcacccuccaccucuucuaaaccaugaugu

SEQ ID NO: 136722 - RNA, 32 nt, Human
cugcacccugcgucaccaccuccgggggcccc

SEQ ID NO: 136723 - RNA, 32 nt, Human
cugcacccugcucucucccgggccuugagguc

SEQ ID NO: 136724 - RNA, 23 nt, Human
cugcacccuuccacagcuggccu

SEQ ID NO: 136725 - RNA, 32 nt, Human
cugcacccuucccagcucucauuuuuguuagg

SEQ ID NO: 136726 - RNA, 32 nt, Human
cugcacccuuguccccacaagcagaagcacag

SEQ ID NO: 136727 - RNA, 32 nt, Human
cugcaccgcaucggagauaucaccuccugcuc

SEQ ID NO: 136728 - RNA, 18 nt, Human
cugcaccgcgggcuccug

SEQ ID NO: 136729 - RNA, 31 nt, Human
cugcaccucaauaaauguugaaucaugaaug

SEQ ID NO: 136730 - RNA, 20 nt, Human
cugcaccucccucgcgucug

SEQ ID NO: 136731 - RNA, 32 nt, Human
cugcaccucccuggcccugccggccacugugg

SEQ ID NO: 136732 - RNA, 32 nt, Human
cugcaccuccucccucucccuucaccucaccc

SEQ ID NO: 136733 - RNA, 32 nt, Human
cugcaccuccuuggacucuaccuguacagagc

SEQ ID NO: 136734 - RNA, 32 nt, Human
cugcaccucuggaagguagagaagcggcgggu

SEQ ID NO: 136735 - RNA, 32 nt, Human
cugcaccucuuaguccagcaccaggaagagug

SEQ ID NO: 136736 - RNA, 32 nt, Human
cugcaccugagcugaacuugaaaagagaguga

SEQ ID NO: 136737 - RNA, 32 nt, Human
cugcaccugcagccacaggcccaccccucccc

SEQ ID NO: 136738 - RNA, 32 nt, Human
cugcaccugccuccagccgccggcugugcagu

SEQ ID NO: 136739 - RNA, 32 nt, Human
cugcaccugccugccgcugcaggaaacauuug

SEQ ID NO: 136740 - RNA, 32 nt, Human
cugcaccugccugccuuugccuaaggcggauu

SEQ ID NO: 136741 - RNA, 18 nt, Human
cugcaccugccugcucug

SEQ ID NO: 136742 - RNA, 32 nt, Human
cugcaccugcucuucccccaccccugugggac

SEQ ID NO: 136743 - RNA, 32 nt, Human
cugcaccugcuguucucuuguuaugcaaacug

SEQ ID NO: 136744 - RNA, 32 nt, Human
cugcaccuggaggagagcaggcuagaggcaca

SEQ ID NO: 136745 - RNA, 19 nt, Human
cugcaccuggccugggcca

SEQ ID NO: 136746 - RNA, 32 nt, Human
cugcaccugggaggcaggcaggcaugcaugug

SEQ ID NO: 136747 - RNA, 32 nt, Human
cugcaccuggggacccagagcgagauggguuu

SEQ ID NO: 136748 - RNA, 16 nt, Human
cugcaccugugccaug

SEQ ID NO: 136749 - RNA, 32 nt, Human
cugcaccugugugggagccggggugggaacca

SEQ ID NO: 136750 - RNA, 31 nt, Human
cugcaccuguuuaugggccaugcagacuggu

SEQ ID NO: 136751 - RNA, 32 nt, Human
cugcaccuuagaagccugcucugcauccauuu

SEQ ID NO: 136752 - RNA, 32 nt, Human
cugcaccuucccagcuccaccucugacuugag

SEQ ID NO: 136753 - RNA, 32 nt, Human
cugcaccuugcgugcaugcagcaggcaacaac

SEQ ID NO: 136754 - RNA, 32 nt, Human
cugcaccuuuucugacaccugcccccaaagca

SEQ ID NO: 136755 - RNA, 32 nt, Human
cugcacgaaucgccgcagcccccagccuugcg

SEQ ID NO: 136756 - RNA, 32 nt, Human
cugcacgcacuccagccugggugacagagcga

SEQ ID NO: 136757 - RNA, 32 nt, Human
cugcacgccagccugggcaacagagcaagacu

SEQ ID NO: 136758 - RNA, 32 nt, Human
cugcacgccagccugggcgacagagcgagacu

SEQ ID NO: 136759 - RNA, 22 nt, Human
cugcacgccaugccuugggcca

SEQ ID NO: 136760 - RNA, 32 nt, Human
cugcacgcccggggugaacccucugcccucgc

SEQ ID NO: 136761 - RNA, 19 nt, Human
cugcacgcccuccgagcca

SEQ ID NO: 136762 - RNA, 32 nt, Human
cugcacgccgccucuugccacccuggcacugc

SEQ ID NO: 136763 - RNA, 32 nt, Human
cugcacgcgugucuguguaugugugcacgcgu

SEQ ID NO: 136764 - RNA, 32 nt, Human
cugcacgcuguucuacagucucagggaggugg

SEQ ID NO: 136765 - RNA, 32 nt, Human
cugcacgcuguugccaaguccaagcuaccaua

SEQ ID NO: 136766 - RNA, 17 nt, Human
cugcacggcccugggcc

SEQ ID NO: 136767 - RNA, 20 nt, Human
cugcacggccguccuggcca

SEQ ID NO: 136768 - RNA, 23 nt, Human
cugcacggccuuguacugggcca

SEQ ID NO: 136769 - RNA, 32 nt, Human
cugcacggcuucaggaauucacagaaggagca

SEQ ID NO: 136770 - RNA, 32 nt, Human
cugcacgggccuccccuccacccuggacccgc

SEQ ID NO: 136771 - RNA, 32 nt, Human
cugcacgggcuguccgggauccggggugucug

SEQ ID NO: 136772 - RNA, 24 nt, Human
cugcacguagcuuuuccgucuuca

SEQ ID NO: 136773 - RNA, 32 nt, Human
cugcacgucaccaaguaaccaggccccagccu

SEQ ID NO: 136774 - RNA, 32 nt, Human
cugcacgugcuccucaaacuuggugaucuccu

SEQ ID NO: 136775 - RNA, 32 nt, Human
cugcacuacggccauucuccucuugggcgcuc

SEQ ID NO: 136776 - RNA, 32 nt, Human
cugcacuagacagagaauaaaguucaccagac

SEQ ID NO: 136777 - RNA, 32 nt, Human
cugcacuagaggcagaggggugaacaagauac

SEQ ID NO: 136778 - RNA, 32 nt, Human
cugcacuaugccagaaauuaaugagggaagac

SEQ ID NO: 136779 - RNA, 32 nt, Human
cugcacucagcaggcugcuugagugggagcug

SEQ ID NO: 136780 - RNA, 32 nt, Human
cugcacucagcagugcggucagagaagggcuu

SEQ ID NO: 136781 - RNA, 23 nt, Human
cugcacucaggcuggagugcagu

SEQ ID NO: 136782 - RNA, 32 nt, Human
cugcacucaggugaaauaaacagccauguugc

SEQ ID NO: 136783 - RNA, 32 nt, Human
cugcacuccaacaaccgagcgagacccugucu

SEQ ID NO: 136784 - RNA, 32 nt, Human
cugcacuccaaccugagugacagcaagacacg

SEQ ID NO: 136785 - RNA, 32 nt, Human
cugcacuccaaccuggcaauuuugccaagagg

SEQ ID NO: 136786 - RNA, 32 nt, Human
cugcacuccaaccugggcaacauagugggacu

SEQ ID NO: 136787 - RNA, 32 nt, Human
cugcacuccaaccugggugacaagagugaaac

SEQ ID NO: 136788 - RNA, 32 nt, Human
cugcacuccaaccugggugauggagcaagacu

SEQ ID NO: 136789 - RNA, 20 nt, Human
cugcacuccacuccaucuca

SEQ ID NO: 136790 - RNA, 32 nt, Human
cugcacuccagcacuccagccugggugacaga

SEQ ID NO: 136791 - RNA, 32 nt, Human
cugcacuccagccccagcugggugacagagug

SEQ ID NO: 136792 - RNA, 19 nt, Human
cugcacuccagccuaagca

SEQ ID NO: 136793 - RNA, 32 nt, Human
cugcacuccagccuagacgacagagcaagacu

SEQ ID NO: 136794 - RNA, 19 nt, Human
cugcacuccagccuaggca

SEQ ID NO: 136795 - RNA, 32 nt, Human
cugcacuccagccuaggcaacauagugagacu

SEQ ID NO: 136796 - RNA, 32 nt, Human
cugcacuccagccuaggcgacggggcaagacu

SEQ ID NO: 136797 - RNA, 32 nt, Human
cugcacuccagccuaggugacagggcaagaac

SEQ ID NO: 136798 - RNA, 32 nt, Human
cugcacuccagccugaacaacaaagagugaaa

SEQ ID NO: 136799 - RNA, 32 nt, Human
cugcacuccagccugacgacaaagcgagacuc

SEQ ID NO: 136800 - RNA, 32 nt, Human
cugcacuccagccugagcaacagagugagacu

SEQ ID NO: 136801 - RNA, 32 nt, Human
cugcacuccagccugagcgacagagugagaca

SEQ ID NO: 136802 - RNA, 32 nt, Human
cugcacuccagccugagugacagagcgagacc

SEQ ID NO: 136803 - RNA, 32 nt, Human
cugcacuccagccugagugacagagcgagacu

SEQ ID NO: 136804 - RNA, 32 nt, Human
cugcacuccagccugccuggaugacagagcga

SEQ ID NO: 136805 - RNA, 32 nt, Human
cugcacuccagccuggaaaacggagugagagu

SEQ ID NO: 136806 - RNA, 32 nt, Human
cugcacuccagccuggacaacagagggagacu

SEQ ID NO: 136807 - RNA, 32 nt, Human
cugcacuccagccuggacaacagagugagaac

SEQ ID NO: 136808 - RNA, 32 nt, Human
cugcacuccagccuggacaacagagugagacu

SEQ ID NO: 136809 - RNA, 32 nt, Human
cugcacuccagccuggacaacagagugggacu

SEQ ID NO: 136810 - RNA, 32 nt, Human
cugcacuccagccuggacaacggagugagacu

SEQ ID NO: 136811 - RNA, 32 nt, Human
cugcacuccagccuggacgacagagcgagacu

SEQ ID NO: 136812 - RNA, 32 nt, Human
cugcacuccagccuggacgacagagugagacg

SEQ ID NO: 136813 - RNA, 32 nt, Human
cugcacuccagccuggacgacagagugagauu

SEQ ID NO: 136814 - RNA, 32 nt, Human
cugcacuccagccuggaggacagagcgagacu

SEQ ID NO: 136815 - RNA, 32 nt, Human
cugcacuccagccuggaugacagaacaagaac

SEQ ID NO: 136816 - RNA, 32 nt, Human
cugcacuccagccuggaugacagaacaagaau

SEQ ID NO: 136817 - RNA, 32 nt, Human
cugcacuccagccuggaugacagagcgagacu

SEQ ID NO: 136818 - RNA, 32 nt, Human
cugcacuccagccuggaugacagagugaaacc

SEQ ID NO: 136819 - RNA, 32 nt, Human
cugcacuccagccuggaugacagagugagacc

SEQ ID NO: 136820 - RNA, 32 nt, Human
cugcacuccagccuggaugacagagugagacu

SEQ ID NO: 136821 - RNA, 32 nt, Human
cugcacuccagccuggaugacagcgagacucc

SEQ ID NO: 136822 - RNA, 32 nt, Human
cugcacuccagccuggcaacagagcgagacuc

SEQ ID NO: 136823 - RNA, 32 nt, Human
cugcacuccagccuggcaacagagugagacuc

SEQ ID NO: 136824 - RNA, 32 nt, Human
cugcacuccagccuggccugggcaacagagca

SEQ ID NO: 136825 - RNA, 32 nt, Human
cugcacuccagccuggcgacaaagcgagacuc

SEQ ID NO: 136826 - RNA, 32 nt, Human
cugcacuccagccuggcgacaaagugagacuc

SEQ ID NO: 136827 - RNA, 32 nt, Human
cugcacuccagccuggcgacacagugagacuc

SEQ ID NO: 136828 - RNA, 32 nt, Human
cugcacuccagccuggcgacagagcgagacac

SEQ ID NO: 136829 - RNA, 32 nt, Human
cugcacuccagccuggcgacagagcgagacuc

SEQ ID NO: 136830 - RNA, 32 nt, Human
cugcacuccagccuggcgacagagugagacuc

SEQ ID NO: 136831 - RNA, 32 nt, Human
cugcacuccagccuggcgacugagugagacuc

SEQ ID NO: 136832 - RNA, 32 nt, Human
cugcacuccagccuggcuacagagugagauuc

SEQ ID NO: 136833 - RNA, 32 nt, Human
cugcacuccagccuggcugacagagugagaau

SEQ ID NO: 136834 - RNA, 32 nt, Human
cugcacuccagccuggcugacagugagacacu

SEQ ID NO: 136835 - RNA, 32 nt, Human
cugcacuccagccugggaaacagagugaggcu

SEQ ID NO: 136836 - RNA, 32 nt, Human
cugcacuccagccugggaaauagagugagcaa

SEQ ID NO: 136837 - RNA, 32 nt, Human
cugcacuccagccugggaagcagagugagacc

SEQ ID NO: 136838 - RNA, 32 nt, Human
cugcacuccagccugggagacacagcgagacu

SEQ ID NO: 136839 - RNA, 32 nt, Human
cugcacuccagccugggagacagagcgagacg

SEQ ID NO: 136840 - RNA, 32 nt, Human
cugcacuccagccugggagacagagcgagacu

SEQ ID NO: 136841 - RNA, 32 nt, Human
cugcacuccagccugggagacagagugagacu

SEQ ID NO: 136842 - RNA, 32 nt, Human
cugcacuccagccugggagacagagugagaua

SEQ ID NO: 136843 - RNA, 32 nt, Human
cugcacuccagccugggagauacagcgagacu

SEQ ID NO: 136844 - RNA, 19 nt, Human
cugcacuccagccugggca

SEQ ID NO: 136845 - RNA, 32 nt, Human
cugcacuccagccugggcaacaaaacgagacu

SEQ ID NO: 136846 - RNA, 32 nt, Human
cugcacuccagccugggcaacaaagcgagacu

SEQ ID NO: 136847 - RNA, 32 nt, Human
cugcacuccagccugggcaacaaagugagacu

SEQ ID NO: 136848 - RNA, 32 nt, Human
cugcacuccagccugggcaacaaagugggacu

SEQ ID NO: 136849 - RNA, 32 nt, Human
cugcacuccagccugggcaacaagagcgaaac

SEQ ID NO: 136850 - RNA, 32 nt, Human
cugcacuccagccugggcaacaagagugaaac

SEQ ID NO: 136851 - RNA, 32 nt, Human
cugcacuccagccugggcaacaagagugagac

SEQ ID NO: 136852 - RNA, 32 nt, Human
cugcacuccagccugggcaacaagcgagacuc

SEQ ID NO: 136853 - RNA, 32 nt, Human
cugcacuccagccugggcaacaagggcaaaac

SEQ ID NO: 136854 - RNA, 32 nt, Human
cugcacuccagccugggcaacaagugcgaaac

SEQ ID NO: 136855 - RNA, 32 nt, Human
cugcacuccagccugggcaacacagcgagacu

SEQ ID NO: 136856 - RNA, 32 nt, Human
cugcacuccagccugggcaacacagggagacu

SEQ ID NO: 136857 - RNA, 32 nt, Human
cugcacuccagccugggcaacacagugagacu

SEQ ID NO: 136858 - RNA, 32 nt, Human
cugcacuccagccugggcaacagaacaagacu

SEQ ID NO: 136859 - RNA, 32 nt, Human
cugcacuccagccugggcaacagaacaagauu

SEQ ID NO: 136860 - RNA, 32 nt, Human
cugcacuccagccugggcaacagaacaauacu

SEQ ID NO: 136861 - RNA, 32 nt, Human
cugcacuccagccugggcaacagaacgagauu

SEQ ID NO: 136862 - RNA, 32 nt, Human
cugcacuccagccugggcaacagagcgacacu

SEQ ID NO: 136863 - RNA, 32 nt, Human
cugcacuccagccugggcaacagagcgagaca

SEQ ID NO: 136864 - RNA, 32 nt, Human
cugcacuccagccugggcaacagagcgagacc

SEQ ID NO: 136865 - RNA, 32 nt, Human
cugcacuccagccugggcaacagagcgagacu

SEQ ID NO: 136866 - RNA, 32 nt, Human
cugcacuccagccugggcaacagagcgaggcu

SEQ ID NO: 136867 - RNA, 32 nt, Human
cugcacuccagccugggcaacagagcgugacu

SEQ ID NO: 136868 - RNA, 32 nt, Human
cugcacuccagccugggcaacagagggagacu

SEQ ID NO: 136869 - RNA, 32 nt, Human
cugcacuccagccugggcaacagagggagccc

SEQ ID NO: 136870 - RNA, 32 nt, Human
cugcacuccagccugggcaacagagugaaacu

SEQ ID NO: 136871 - RNA, 32 nt, Human
cugcacuccagccugggcaacagagugacacu

SEQ ID NO: 136872 - RNA, 32 nt, Human
cugcacuccagccugggcaacagagugagacc

SEQ ID NO: 136873 - RNA, 32 nt, Human
cugcacuccagccugggcaacagagugagacg

SEQ ID NO: 136874 - RNA, 32 nt, Human
cugcacuccagccugggcaacagagugagacu

SEQ ID NO: 136875 - RNA, 32 nt, Human
cugcacuccagccugggcaacagagugagauc

SEQ ID NO: 136876 - RNA, 32 nt, Human
cugcacuccagccugggcaacagagugaggcc

SEQ ID NO: 136877 - RNA, 32 nt, Human
cugcacuccagccugggcaacagaguggacuc

SEQ ID NO: 136878 - RNA, 32 nt, Human
cugcacuccagccugggcaacagagugggacu

SEQ ID NO: 136879 - RNA, 32 nt, Human
cugcacuccagccugggcaacagaugaagacc

SEQ ID NO: 136880 - RNA, 32 nt, Human
cugcacuccagccugggcaacagugagacucu

SEQ ID NO: 136881 - RNA, 32 nt, Human
cugcacuccagccugggcaacauagcaaaauc

SEQ ID NO: 136882 - RNA, 32 nt, Human
cugcacuccagccugggcaacauagcaagacu

SEQ ID NO: 136883 - RNA, 32 nt, Human
cugcacuccagccugggcaacauagcaagcua

SEQ ID NO: 136884 - RNA, 32 nt, Human
cugcacuccagccugggcaacauagcgagacc

SEQ ID NO: 136885 - RNA, 32 nt, Human
cugcacuccagccugggcaaccaggugagacc

SEQ ID NO: 136886 - RNA, 32 nt, Human
cugcacuccagccugggcaacguggugagacc

SEQ ID NO: 136887 - RNA, 32 nt, Human
cugcacuccagccugggcaacugagcaaaacc

SEQ ID NO: 136888 - RNA, 32 nt, Human
cugcacuccagccugggcaacugagcaagacu

SEQ ID NO: 136889 - RNA, 32 nt, Human
cugcacuccagccugggcaacugagcaagauu

SEQ ID NO: 136890 - RNA, 32 nt, Human
cugcacuccagccugggcaauagagugagacu

SEQ ID NO: 136891 - RNA, 32 nt, Human
cugcacuccagccugggcaauagagugagauu

SEQ ID NO: 136892 - RNA, 32 nt, Human
cugcacuccagccugggcaauagagugagccc

SEQ ID NO: 136893 - RNA, 26 nt, Human
cugcacuccagccugggcaauggaga

SEQ ID NO: 136894 - RNA, 32 nt, Human
cugcacuccagccugggcaauggagugagacu

SEQ ID NO: 136895 - RNA, 32 nt, Human
cugcacuccagccugggcaccagagcgagacu

SEQ ID NO: 136896 - RNA, 32 nt, Human
cugcacuccagccugggcagcagagcgagacu

SEQ ID NO: 136897 - RNA, 32 nt, Human
cugcacuccagccugggcagcagagugagacu

SEQ ID NO: 136898 - RNA, 32 nt, Human
cugcacuccagccugggccacacagugagacu

SEQ ID NO: 136899 - RNA, 32 nt, Human
cugcacuccagccugggccacagagugagauu

SEQ ID NO: 136900 - RNA, 32 nt, Human
cugcacuccagccugggcgacaaagugagacu

SEQ ID NO: 136901 - RNA, 32 nt, Human
cugcacuccagccugggcgacaagagcgaaac

SEQ ID NO: 136902 - RNA, 32 nt, Human
cugcacuccagccugggcgacaagagcgagac

SEQ ID NO: 136903 - RNA, 32 nt, Human
cugcacuccagccugggcgacaagagugaaac

SEQ ID NO: 136904 - RNA, 32 nt, Human
cugcacuccagccugggcgacacagcgagauu

SEQ ID NO: 136905 - RNA, 32 nt, Human
cugcacuccagccugggcgacagagcgaaacu

SEQ ID NO: 136906 - RNA, 32 nt, Human
cugcacuccagccugggcgacagagcgagacu

SEQ ID NO: 136907 - RNA, 32 nt, Human
cugcacuccagccugggcgacagagcgagagu

SEQ ID NO: 136908 - RNA, 32 nt, Human
cugcacuccagccugggcgacagagcgagauu

SEQ ID NO: 136909 - RNA, 32 nt, Human
cugcacuccagccugggcgacagagcgauauu

SEQ ID NO: 136910 - RNA, 32 nt, Human
cugcacuccagccugggcgacagagggagaca

SEQ ID NO: 136911 - RNA, 32 nt, Human
cugcacuccagccugggcgacagagggagacu

SEQ ID NO: 136912 - RNA, 32 nt, Human
cugcacuccagccugggcgacagagugacucu

SEQ ID NO: 136913 - RNA, 32 nt, Human
cugcacuccagccugggcgacagagugagacc

SEQ ID NO: 136914 - RNA, 32 nt, Human
cugcacuccagccugggcgacagagugagacu

SEQ ID NO: 136915 - RNA, 32 nt, Human
cugcacuccagccugggcgacagagugaggcu

SEQ ID NO: 136916 - RNA, 32 nt, Human
cugcacuccagccugggcgacagagugggacu

SEQ ID NO: 136917 - RNA, 32 nt, Human
cugcacuccagccugggcgacagcgagacucc

SEQ ID NO: 136918 - RNA, 32 nt, Human
cugcacuccagccugggcgacagcgugagauc

SEQ ID NO: 136919 - RNA, 32 nt, Human
cugcacuccagccugggcgacagggcaaaacc

SEQ ID NO: 136920 - RNA, 32 nt, Human
cugcacuccagccugggcgacagggcaagacu

SEQ ID NO: 136921 - RNA, 32 nt, Human
cugcacuccagccugggcgacagugagacccu

SEQ ID NO: 136922 - RNA, 32 nt, Human
cugcacuccagccugggcgacagugagacugc

SEQ ID NO: 136923 - RNA, 32 nt, Human
cugcacuccagccugggcgacagugagacuuu

SEQ ID NO: 136924 - RNA, 32 nt, Human
cugcacuccagccugggcgacgagugaaacuc

SEQ ID NO: 136925 - RNA, 32 nt, Human
cugcacuccagccugggcgacggagcgaaacu

SEQ ID NO: 136926 - RNA, 32 nt, Human
cugcacuccagccugggcgacggagcgagacu

SEQ ID NO: 136927 - RNA, 32 nt, Human
cugcacuccagccugggcgacggagugagacu

SEQ ID NO: 136928 - RNA, 32 nt, Human
cugcacuccagccugggcgauggagcgagacu

SEQ ID NO: 136929 - RNA, 32 nt, Human
cugcacuccagccugggcggcagagcgagacu

SEQ ID NO: 136930 - RNA, 32 nt, Human
cugcacuccagccugggcggcagagugagacu

SEQ ID NO: 136931 - RNA, 32 nt, Human
cugcacuccagccugggcuacagagcgagaca

SEQ ID NO: 136932 - RNA, 32 nt, Human
cugcacuccagccugggcuacagagcgagacu

SEQ ID NO: 136933 - RNA, 32 nt, Human
cugcacuccagccugggcuacagauccugucc

SEQ ID NO: 136934 - RNA, 32 nt, Human
cugcacuccagccugggcuacagauccugucu

SEQ ID NO: 136935 - RNA, 32 nt, Human
cugcacuccagccugggcugcagggugagguc

SEQ ID NO: 136936 - RNA, 32 nt, Human
cugcacuccagccugggcuucagagcaagacu

SEQ ID NO: 136937 - RNA, 32 nt, Human
cugcacuccagccugggggacagagcgagacu

SEQ ID NO: 136938 - RNA, 32 nt, Human
cugcacuccagccugggggacagagugagacc

SEQ ID NO: 136939 - RNA, 32 nt, Human
cugcacuccagccuggguaacaagagcgaaac

SEQ ID NO: 136940 - RNA, 32 nt, Human
cugcacuccagccuggguaacagagcaagacc

SEQ ID NO: 136941 - RNA, 32 nt, Human
cugcacuccagccuggguaacagagcaagacu

SEQ ID NO: 136942 - RNA, 32 nt, Human
cugcacuccagccuggguaacagagcaagagu

SEQ ID NO: 136943 - RNA, 32 nt, Human
cugcacuccagccuggguaacagagcgagacc

SEQ ID NO: 136944 - RNA, 32 nt, Human
cugcacuccagccuggguaacagagugagacu

SEQ ID NO: 136945 - RNA, 32 nt, Human
cugcacuccagccuggguaacagugagaggcc

SEQ ID NO: 136946 - RNA, 32 nt, Human
cugcacuccagccugggugacaaagugagacu

SEQ ID NO: 136947 - RNA, 32 nt, Human
cugcacuccagccugggugacaagagcgaaac

SEQ ID NO: 136948 - RNA, 32 nt, Human
cugcacuccagccugggugacaagagugagac

SEQ ID NO: 136949 - RNA, 32 nt, Human
cugcacuccagccugggugacacagcgacacu

SEQ ID NO: 136950 - RNA, 32 nt, Human
cugcacuccagccugggugacacagcgagacu

SEQ ID NO: 136951 - RNA, 32 nt, Human
cugcacuccagccugggugacagaacaagacu

SEQ ID NO: 136952 - RNA, 32 nt, Human
cugcacuccagccugggugacagagcgacccu

SEQ ID NO: 136953 - RNA, 32 nt, Human
cugcacuccagccugggugacagagcgagaau

SEQ ID NO: 136954 - RNA, 32 nt, Human
cugcacuccagccugggugacagagcgagacc

SEQ ID NO: 136955 - RNA, 32 nt, Human
cugcacuccagccugggugacagagcgagacu

SEQ ID NO: 136956 - RNA, 31 nt, Human
cugcacuccagccugggugacagagcgaggc

SEQ ID NO: 136957 - RNA, 32 nt, Human
cugcacuccagccugggugacagagcgugaga

SEQ ID NO: 136958 - RNA, 32 nt, Human
cugcacuccagccugggugacagagugagaca

SEQ ID NO: 136959 - RNA, 32 nt, Human
cugcacuccagccugggugacagagugagacc

SEQ ID NO: 136960 - RNA, 32 nt, Human
cugcacuccagccugggugacagagugagacu

SEQ ID NO: 136961 - RNA, 32 nt, Human
cugcacuccagccugggugacagagugagaga

SEQ ID NO: 136962 - RNA, 32 nt, Human
cugcacuccagccugggugacagagugagagu

SEQ ID NO: 136963 - RNA, 32 nt, Human
cugcacuccagccugggugacagagugagauc

SEQ ID NO: 136964 - RNA, 32 nt, Human
cugcacuccagccugggugacagagugagauu

SEQ ID NO: 136965 - RNA, 32 nt, Human
cugcacuccagccugggugacagagugaggcc

SEQ ID NO: 136966 - RNA, 32 nt, Human
cugcacuccagccugggugacagagugaguga

SEQ ID NO: 136967 - RNA, 32 nt, Human
cugcacuccagccugggugacagcgagacccu

SEQ ID NO: 136968 - RNA, 32 nt, Human
cugcacuccagccugggugacagcgcgagacu

SEQ ID NO: 136969 - RNA, 32 nt, Human
cugcacuccagccugggugacagggcaagacu

SEQ ID NO: 136970 - RNA, 32 nt, Human
cugcacuccagccugggugacagugagacucu

SEQ ID NO: 136971 - RNA, 32 nt, Human
cugcacuccagccugggugacagugagucuuu

SEQ ID NO: 136972 - RNA, 32 nt, Human
cugcacuccagccugggugacggagcgagacu

SEQ ID NO: 136973 - RNA, 32 nt, Human
cugcacuccagccugggugacggugagacuuu

SEQ ID NO: 136974 - RNA, 32 nt, Human
cugcacuccagccugggugacugagcaagacu

SEQ ID NO: 136975 - RNA, 32 nt, Human
cugcacuccagccugggugacugagcgagauu

SEQ ID NO: 136976 - RNA, 32 nt, Human
cugcacuccagccugggugacugagugagacc

SEQ ID NO: 136977 - RNA, 32 nt, Human
cugcacuccagccuggucaacagagugggacu

SEQ ID NO: 136978 - RNA, 32 nt, Human
cugcacuccagccuggucaauggagugcgacu

SEQ ID NO: 136979 - RNA, 32 nt, Human
cugcacuccagccuggucgacagcgagacucc

SEQ ID NO: 136980 - RNA, 32 nt, Human
cugcacuccagccuggugacagagcgagacuc

SEQ ID NO: 136981 - RNA, 32 nt, Human
cugcacuccagccuggugacagagugagacuc

SEQ ID NO: 136982 - RNA, 32 nt, Human
cugcacuccagccuggugacagggcgagacuc

SEQ ID NO: 136983 - RNA, 32 nt, Human
cugcacuccagccuggugacuccgucucaaaa

SEQ ID NO: 136984 - RNA, 32 nt, Human
cugcacuccagggagcccccaaacugggcagg

SEQ ID NO: 136985 - RNA, 32 nt, Human
cugcacucccaaaauaccuccccaccagguga

SEQ ID NO: 136986 - RNA, 32 nt, Human
cugcacucccacgccuguccuccuggaaggga

SEQ ID NO: 136987 - RNA, 18 nt, Human
cugcacucccugcugcug

SEQ ID NO: 136988 - RNA, 25 nt, Human
cugcacuccuaggaagcaggaaaug

SEQ ID NO: 136989 - RNA, 32 nt, Human
cugcacuccugcuuuugugggaaaaauuuucu

SEQ ID NO: 136990 - RNA, 32 nt, Human
cugcacuccuggguccugcucuuccaaugccc

SEQ ID NO: 136991 - RNA, 32 nt, Human
cugcacucgugugcaggcucugaccaggcaga

SEQ ID NO: 136992 - RNA, 32 nt, Human
cugcacucucagaaaucagacuugaguggccg

SEQ ID NO: 136993 - RNA, 32 nt, Human
cugcacucucauugucaagguuagcuauaucc

SEQ ID NO: 136994 - RNA, 32 nt, Human
cugcacucuccacucugccagaaaguccccca

SEQ ID NO: 136995 - RNA, 32 nt, Human
cugcacucuccucuccugggacccagcugccc

SEQ ID NO: 136996 - RNA, 32 nt, Human
cugcacucuggccaaugauugguucauuccag

SEQ ID NO: 136997 - RNA, 18 nt, Human
cugcacugaaggcaggug

SEQ ID NO: 136998 - RNA, 32 nt, Human
cugcacugagcagagucuugcuaccucaguca

SEQ ID NO: 136999 - RNA, 19 nt, Human
cugcacugagcucugaugg

SEQ ID NO: 137000 - RNA, 22 nt, Human
cugcacugagucaagaaggaga

SEQ ID NO: 137001 - RNA, 22 nt, Human
cugcacugaguucaaaugcaga

SEQ ID NO: 137002 - RNA, 32 nt, Human
cugcacugcacuccagccugggugacaaagca

SEQ ID NO: 137003 - RNA, 32 nt, Human
cugcacugcacugaggacccggugccggaggc

SEQ ID NO: 137004 - RNA, 32 nt, Human
cugcacugcagccuggcaacaagagcgaaacu

SEQ ID NO: 137005 - RNA, 32 nt, Human
cugcacugcagccugggcgacagagcgagauu

SEQ ID NO: 137006 - RNA, 32 nt, Human
cugcacugcauaauucuaagucuuccacccug

SEQ ID NO: 137007 - RNA, 32 nt, Human
cugcacugcauuccagccugggugacagagug

SEQ ID NO: 137008 - RNA, 32 nt, Human
cugcacugcucacagcggugguggugagccaa

SEQ ID NO: 137009 - RNA, 32 nt, Human
cugcacugcuguucuguaauagguucuuaaca

SEQ ID NO: 137010 - RNA, 32 nt, Human
cugcacuggacacugcucaucccuggguguca

SEQ ID NO: 137011 - RNA, 21 nt, Human
cugcacuggagagugaggccu

SEQ ID NO: 137012 - RNA, 32 nt, Human
cugcacuggagccacaggcaggggugagagca

SEQ ID NO: 137013 - RNA, 32 nt, Human
cugcacuggagcugccuggugaccagaaguuu

SEQ ID NO: 137014 - RNA, 32 nt, Human
cugcacuggagguugcaucagagccauuccgc

SEQ ID NO: 137015 - RNA, 25 nt, Human
cugcacugggaaggggagauggaga

SEQ ID NO: 137016 - RNA, 32 nt, Human
cugcacugggcaacagagcgcuacuucgucuc

SEQ ID NO: 137017 - RNA, 32 nt, Human
cugcacugggcugcaggugcagggcacgagca

SEQ ID NO: 137018 - RNA, 18 nt, Human
cugcacuggggcacugcc

SEQ ID NO: 137019 - RNA, 32 nt, Human
cugcacugggguccuugggguuugaggacaau

SEQ ID NO: 137020 - RNA, 32 nt, Human
cugcacuggggugacuaucucagacagaugcc

SEQ ID NO: 137021 - RNA, 32 nt, Human
cugcacugggugauucacgugugcccaggccc

SEQ ID NO: 137022 - RNA, 32 nt, Human
cugcacugguccccucuuuucccuucagucuu

SEQ ID NO: 137023 - RNA, 32 nt, Human
cugcacugguguugugagaugccugugucaga

SEQ ID NO: 137024 - RNA, 32 nt, Human
cugcacugugggagccccuuucagggcuggcc

SEQ ID NO: 137025 - RNA, 22 nt, Human
cugcacuguucugagaauggag

SEQ ID NO: 137026 - RNA, 32 nt, Human
cugcacuguuuucaccuuuggccagacgggcu

SEQ ID NO: 137027 - RNA, 32 nt, Human
cugcacuuacaggccuugcucacagcugauug

SEQ ID NO: 137028 - RNA, 32 nt, Human
cugcacuucacauccagcaaauuaagucaaug

SEQ ID NO: 137029 - RNA, 32 nt, Human
cugcacuucagccucugcuguacacagaaacu

SEQ ID NO: 137030 - RNA, 32 nt, Human
cugcacuucagccuggacaacagagugagacc

SEQ ID NO: 137031 - RNA, 32 nt, Human
cugcacuucagccuggacaacagagugagacu

SEQ ID NO: 137032 - RNA, 32 nt, Human
cugcacuucagccuggaugacagagcgagguc

SEQ ID NO: 137033 - RNA, 32 nt, Human
cugcacuucagccugggcaacagagcgagacu

SEQ ID NO: 137034 - RNA, 32 nt, Human
cugcacuucagccugggcaacagagugagacu

SEQ ID NO: 137035 - RNA, 32 nt, Human
cugcacuucagccugggcgacagagugacucu

SEQ ID NO: 137036 - RNA, 32 nt, Human
cugcacuucagccuggugacagagcgagacuc

SEQ ID NO: 137037 - RNA, 32 nt, Human
cugcacuuccaaugcucugcagacacaucucg

SEQ ID NO: 137038 - RNA, 32 nt, Human
cugcacuuccugccaaacuuugcccccacaag

SEQ ID NO: 137039 - RNA, 32 nt, Human
cugcacuugaacaucagacuccagguucuuca

SEQ ID NO: 137040 - RNA, 17 nt, Human
cugcacuugaucaggug

SEQ ID NO: 137041 - RNA, 32 nt, Human
cugcacuugccugcccugccuugcuuggcacc

SEQ ID NO: 137042 - RNA, 32 nt, Human
cugcacuuggccucuucgggaagauccuccuu

SEQ ID NO: 137043 - RNA, 32 nt, Human
cugcacuuuaagaaacuggaggcugcaacagg

SEQ ID NO: 137044 - RNA, 32 nt, Human
cugcacuuugggaggccgaggcaggcggauca

SEQ ID NO: 137045 - RNA, 32 nt, Human
cugcacuuugggaggcuaaggugggaggguug

SEQ ID NO: 137046 - RNA, 32 nt, Human
cugcacuuugggaggcugaggcuggaggacug

SEQ ID NO: 137047 - RNA, 32 nt, Human
cugcacuuuguggugugacuccggugccuccu

SEQ ID NO: 137048 - RNA, 32 nt, Human
cugcagaaaaccuuucuccuacuguacacagg

SEQ ID NO: 137049 - RNA, 32 nt, Human
cugcagaaaggagcuacccacugcaggucucc

SEQ ID NO: 137050 - RNA, 32 nt, Human
cugcagaaaggagcuacccacugugggucuuc

SEQ ID NO: 137051 - RNA, 32 nt, Human
cugcagaaauacacaaauacacaaagauacau

SEQ ID NO: 137052 - RNA, 32 nt, Human
cugcagaaaugaggacguuauuaggaaagacc

SEQ ID NO: 137053 - RNA, 22 nt, Human
cugcagaaaugccucugcgugg

SEQ ID NO: 137054 - RNA, 32 nt, Human
cugcagaacaugaaccuuccgcuccuggcugc

SEQ ID NO: 137055 - RNA, 32 nt, Human
cugcagaaccugucagcuucaaagggaggcuc

SEQ ID NO: 137056 - RNA, 32 nt, Human
cugcagaacuucugccugaaccuggggucauc

SEQ ID NO: 137057 - RNA, 32 nt, Human
cugcagaagaagagacaagaagaagagaccuu

SEQ ID NO: 137058 - RNA, 21 nt, Human
cugcagaagcaucuggaagca

SEQ ID NO: 137059 - RNA, 22 nt, Human
cugcagaaguaccgccugcgga

SEQ ID NO: 137060 - RNA, 18 nt, Human
cugcagaaguagcagcug

SEQ ID NO: 137061 - RNA, 22 nt, Human
cugcagaaguggacgcccgugg

SEQ ID NO: 137062 - RNA, 19 nt, Human
cugcagaaguuucugggca

SEQ ID NO: 137063 - RNA, 32 nt, Human
cugcagaauggcucccgcaaagaaggguggcg

SEQ ID NO: 137064 - RNA, 32 nt, Human
cugcagaauuccaauaaauggcuggguguuuu

SEQ ID NO: 137065 - RNA, 26 nt, Human
cugcagacacuguggguagcccauca

SEQ ID NO: 137066 - RNA, 23 nt, Human
cugcagacagugaugaaggccau

SEQ ID NO: 137067 - RNA, 32 nt, Human
cugcagacaucaccuuugccuucugguugugc

SEQ ID NO: 137068 - RNA, 23 nt, Human
cugcagaccacccucuuuccagg

SEQ ID NO: 137069 - RNA, 32 nt, Human
cugcagaccagaucugacccagaagugugugg

SEQ ID NO: 137070 - RNA, 32 nt, Human
cugcagaccauccucccugggccaggagcccg

SEQ ID NO: 137071 - RNA, 32 nt, Human
cugcagaccccucuccuccuccuuccucuugg

SEQ ID NO: 137072 - RNA, 32 nt, Human
cugcagacccggccucggucagcugggagggg

SEQ ID NO: 137073 - RNA, 32 nt, Human
cugcagacccucgcagugaguguuacagcucu

SEQ ID NO: 137074 - RNA, 22 nt, Human
cugcagaccucauagagccuca

SEQ ID NO: 137075 - RNA, 32 nt, Human
cugcagaccucuucaagugacacuauguagga

SEQ ID NO: 137076 - RNA, 23 nt, Human
cugcagaccuuuggauccugcca

SEQ ID NO: 137077 - RNA, 21 nt, Human
cugcagacgagagucaggcca

SEQ ID NO: 137078 - RNA, 21 nt, Human
cugcagacgcgguccucggcc

SEQ ID NO: 137079 - RNA, 32 nt, Human
cugcagacguaggagaugccugggacaaggag

SEQ ID NO: 137080 - RNA, 32 nt, Human
cugcagacgucugccuuggcauccucuugaau

SEQ ID NO: 137081 - RNA, 32 nt, Human
cugcagacucacucugccuuccucaaaacugc

SEQ ID NO: 137082 - RNA, 18 nt, Human
cugcagacucacugccca

SEQ ID NO: 137083 - RNA, 32 nt, Human
cugcagacucacugcccaccggcucccucccc

SEQ ID NO: 137084 - RNA, 32 nt, Human
cugcagacucagccuuucucugcagccauccu

SEQ ID NO: 137085 - RNA, 32 nt, Human
cugcagacuggagaucccaugacgacuggaag

SEQ ID NO: 137086 - RNA, 32 nt, Human
cugcagacuggguucuagagaggcagagucuu

SEQ ID NO: 137087 - RNA, 32 nt, Human
cugcagacuguguggcucugcagaccucuaga

SEQ ID NO: 137088 - RNA, 32 nt, Human
cugcagacuuagccaaggaacuccaagaugca

SEQ ID NO: 137089 - RNA, 32 nt, Human
cugcagagaacagugucuugggcagugcgaua

SEQ ID NO: 137090 - RNA, 24 nt, Human
cugcagagaauggaaacgugggaa

SEQ ID NO: 137091 - RNA, 21 nt, Human
cugcagagagacgaagcccca

SEQ ID NO: 137092 - RNA, 32 nt, Human
cugcagagagcuccuccagccuggagacguuc

SEQ ID NO: 137093 - RNA, 32 nt, Human
cugcagagaggaguuauuugcuguggggucuu

SEQ ID NO: 137094 - RNA, 32 nt, Human
cugcagagaggggcccuggggagaagcaggau

SEQ ID NO: 137095 - RNA, 24 nt, Human
cugcagagcaagauccaggcucca

SEQ ID NO: 137096 - RNA, 24 nt, Human
cugcagagcaauacccaagccuca

SEQ ID NO: 137097 - RNA, 32 nt, Human
cugcagagcaauuccaucagugacgcaggagu

SEQ ID NO: 137098 - RNA, 32 nt, Human
cugcagagcacaaacuucagaaacccggcuuc

SEQ ID NO: 137099 - RNA, 22 nt, Human
cugcagagcaccggcagccuca

SEQ ID NO: 137100 - RNA, 20 nt, Human
cugcagagcagaacggcagg

SEQ ID NO: 137101 - RNA, 32 nt, Human
cugcagagcaggaaggagaguccuguuuccca

SEQ ID NO: 137102 - RNA, 32 nt, Human
cugcagagccagccugacccaccagaaccucc

SEQ ID NO: 137103 - RNA, 32 nt, Human
cugcagagccucacggcgcugaccucacaggu

SEQ ID NO: 137104 - RNA, 32 nt, Human
cugcagagccugggagcaggggaggggaauag

SEQ ID NO: 137105 - RNA, 32 nt, Human
cugcagagcuagugcagacuaggauggcugua

SEQ ID NO: 137106 - RNA, 32 nt, Human
cugcagagcugacagcugcugccugaaucuac

SEQ ID NO: 137107 - RNA, 22 nt, Human
cugcagagcuggaaaagcuuca

SEQ ID NO: 137108 - RNA, 32 nt, Human
cugcagagcuggagguucuguccucccugcug

SEQ ID NO: 137109 - RNA, 30 nt, Human
cugcagagcuugcacauaaagaugcugaac

SEQ ID NO: 137110 - RNA, 32 nt, Human
cugcagaggaagaggagcuugucacaaacauu

SEQ ID NO: 137111 - RNA, 32 nt, Human
cugcagaggauuccugcagaggaucaagacag

SEQ ID NO: 137112 - RNA, 32 nt, Human
cugcagaggccccgggcccaggaacugagacu

SEQ ID NO: 137113 - RNA, 32 nt, Human
cugcagaggcccggagaacacaacccucccga

SEQ ID NO: 137114 - RNA, 32 nt, Human
cugcagaggccgggcuggaggagaagauggcg

SEQ ID NO: 137115 - RNA, 19 nt, Human
cugcagaggccuagaggca

SEQ ID NO: 137116 - RNA, 17 nt, Human
cugcagaggcugaggca

SEQ ID NO: 137117 - RNA, 23 nt, Human
cugcagagggaccuuguccccau

SEQ ID NO: 137118 - RNA, 32 nt, Human
cugcagagggagcacuaugucugcggaagucc

SEQ ID NO: 137119 - RNA, 32 nt, Human
cugcagagggccugggccaccaucggccgcac

SEQ ID NO: 137120 - RNA, 32 nt, Human
cugcagagggggaaauggaggccuucagagau

SEQ ID NO: 137121 - RNA, 32 nt, Human
cugcagaggucuggaggguagugagaagguac

SEQ ID NO: 137122 - RNA, 32 nt, Human
cugcagagucacugcaccaucaggcuuggccc

SEQ ID NO: 137123 - RNA, 18 nt, Human
cugcagagucccagcccu

SEQ ID NO: 137124 - RNA, 20 nt, Human
cugcagagugcccugagcua

SEQ ID NO: 137125 - RNA, 18 nt, Human
cugcagagugccuucccu

SEQ ID NO: 137126 - RNA, 23 nt, Human
cugcagaguucuuucugcuuuca

SEQ ID NO: 137127 - RNA, 20 nt, Human
cugcagaucgaggcauggga

SEQ ID NO: 137128 - RNA, 32 nt, Human
cugcagaucuaaaaucugugcuuuuuaaaagu

SEQ ID NO: 137129 - RNA, 32 nt, Human
cugcagaucuggcaucagaggccagaguucaa

SEQ ID NO: 137130 - RNA, 32 nt, Human
cugcagaugcaagagcuccugggcaggggugc

SEQ ID NO: 137131 - RNA, 32 nt, Human
cugcagaugccacccaacccugcgaaaucugc

SEQ ID NO: 137132 - RNA, 32 nt, Human
cugcagaugccacccuagccaaugucuccucc

SEQ ID NO: 137133 - RNA, 32 nt, Human
cugcagaugccccuggaaugggcacagcacag

SEQ ID NO: 137134 - RNA, 23 nt, Human
cugcagauggccagcuccuggca

SEQ ID NO: 137135 - RNA, 32 nt, Human
cugcagauggccccuccaacccucucugcugc

SEQ ID NO: 137136 - RNA, 32 nt, Human
cugcagauggcucaguggggcagccccguacc

SEQ ID NO: 137137 - RNA, 32 nt, Human
cugcagaugguaccaggcaguucugcucucga

SEQ ID NO: 137138 - RNA, 32 nt, Human
cugcagauguaucuuuuucccuccaguuuuuc

SEQ ID NO: 137139 - RNA, 32 nt, Human
cugcagauugaaccuauuccagaaagaucgcc

SEQ ID NO: 137140 - RNA, 32 nt, Human
cugcagcaaaaguguucacauuacugagcaaa

SEQ ID NO: 137141 - RNA, 32 nt, Human
cugcagcaacauaaguacaaauauuguuccuu

SEQ ID NO: 137142 - RNA, 18 nt, Human
cugcagcaagagaaggca

SEQ ID NO: 137143 - RNA, 32 nt, Human
cugcagcacagugcuggcccuaaugccaggug

SEQ ID NO: 137144 - RNA, 32 nt, Human
cugcagcacauuucuucagccucuccaccaag

SEQ ID NO: 137145 - RNA, 32 nt, Human
cugcagcacccagggaggaacgccgugguccc

SEQ ID NO: 137146 - RNA, 18 nt, Human
cugcagcacccugggcca

SEQ ID NO: 137147 - RNA, 32 nt, Human
cugcagcacggaaaagcacauaaucuuucuuu

SEQ ID NO: 137148 - RNA, 32 nt, Human
cugcagcacuugggcaucggaggggagcugau

SEQ ID NO: 137149 - RNA, 32 nt, Human
cugcagcacuuuaaggcucacaguuuugagug

SEQ ID NO: 137150 - RNA, 32 nt, Human
cugcagcagaagccuccacagugagaacugga

SEQ ID NO: 137151 - RNA, 32 nt, Human
cugcagcagagaggccagagguagcuggugau

SEQ ID NO: 137152 - RNA, 32 nt, Human
cugcagcagcagcugccaggggcuugggauuu

SEQ ID NO: 137153 - RNA, 32 nt, Human
cugcagcagccacauccauacacacacgcucg

SEQ ID NO: 137154 - RNA, 32 nt, Human
cugcagcagccaugaagggcaguggguagagg

SEQ ID NO: 137155 - RNA, 32 nt, Human
cugcagcagccuccuccacuccaggccaugca

SEQ ID NO: 137156 - RNA, 32 nt, Human
cugcagcagcuguguggacacuacccagcccu

SEQ ID NO: 137157 - RNA, 32 nt, Human
cugcagcaggaaggcgaccacccgggcccugc

SEQ ID NO: 137158 - RNA, 18 nt, Human
cugcagcaggacauccca

SEQ ID NO: 137159 - RNA, 32 nt, Human
cugcagcagggccugaggagaaggugcugcug

SEQ ID NO: 137160 - RNA, 32 nt, Human
cugcagcaggggcugggagagcagaagggcag

SEQ ID NO: 137161 - RNA, 32 nt, Human
cugcagcagucaccuacccccaccugucccac

SEQ ID NO: 137162 - RNA, 32 nt, Human
cugcagcagucauuggugguucugucuuuccc

SEQ ID NO: 137163 - RNA, 32 nt, Human
cugcagcauacuaauaaugcucuggcuuucug

SEQ ID NO: 137164 - RNA, 32 nt, Human
cugcagcaucugaguggggccucuagaugugc

SEQ ID NO: 137165 - RNA, 32 nt, Human
cugcagcaugaccugugaccagcacugucuca

SEQ ID NO: 137166 - RNA, 23 nt, Human
cugcagcaugcaagcacuuuuaa

SEQ ID NO: 137167 - RNA, 32 nt, Human
cugcagcaugucugcacgugugcaugcauaca

SEQ ID NO: 137168 - RNA, 31 nt, Human
cugcagcauguucuggagcacugguaccugc

SEQ ID NO: 137169 - RNA, 32 nt, Human
cugcagccaaaccagauaggcuacuggugggg

SEQ ID NO: 137170 - RNA, 32 nt, Human
cugcagccacacucaucagcuguggugaggcg

SEQ ID NO: 137171 - RNA, 24 nt, Human
cugcagccacagcagcuccuggca

SEQ ID NO: 137172 - RNA, 18 nt, Human
cugcagccagaacaggug

SEQ ID NO: 137173 - RNA, 32 nt, Human
cugcagccagccacagguacagagccacagac

SEQ ID NO: 137174 - RNA, 32 nt, Human
cugcagccagccacagguacagagccacagga

SEQ ID NO: 137175 - RNA, 32 nt, Human
cugcagccagccacagguacagagccacggac

SEQ ID NO: 137176 - RNA, 32 nt, Human
cugcagccaggcacugcccugcugugcuacuc

SEQ ID NO: 137177 - RNA, 32 nt, Human
cugcagccaggccaagaccaaugccccagagc

SEQ ID NO: 137178 - RNA, 32 nt, Human
cugcagccauacugugaccuccagccagacuu

SEQ ID NO: 137179 - RNA, 32 nt, Human
cugcagccaugauuuugucacugacaucugug

SEQ ID NO: 137180 - RNA, 32 nt, Human
cugcagccaugggcacaugggaauagggcuuc

SEQ ID NO: 137181 - RNA, 32 nt, Human
cugcagccauggggcucccucguggaccucuc

SEQ ID NO: 137182 - RNA, 32 nt, Human
cugcagccaugguuuggguggcuguagcugcg

SEQ ID NO: 137183 - RNA, 32 nt, Human
cugcagccaugucccggccccugucagaccaa

SEQ ID NO: 137184 - RNA, 32 nt, Human
cugcagcccagccuagucagggcacagcugcc

SEQ ID NO: 137185 - RNA, 32 nt, Human
cugcagcccagccuguguuguaaccucugcgu

SEQ ID NO: 137186 - RNA, 32 nt, Human
cugcagcccaggaguucgagacuagccugggc

SEQ ID NO: 137187 - RNA, 32 nt, Human
cugcagccccaaccuucagggcucaggugauc

SEQ ID NO: 137188 - RNA, 32 nt, Human
cugcagccccagcuggacuccagccugucccu

SEQ ID NO: 137189 - RNA, 32 nt, Human
cugcagccccugagauauuuugcucacuaucc

SEQ ID NO: 137190 - RNA, 32 nt, Human
cugcagcccgccuuggcuuucucccucaccca

SEQ ID NO: 137191 - RNA, 32 nt, Human
cugcagcccucugccagccucuugggggcagu

SEQ ID NO: 137192 - RNA, 32 nt, Human
cugcagcccucugucugacaucauguccuuca

SEQ ID NO: 137193 - RNA, 32 nt, Human
cugcagcccugaggccuggaggcccgggcggu

SEQ ID NO: 137194 - RNA, 32 nt, Human
cugcagcccugccuuugcugauacacacacag

SEQ ID NO: 137195 - RNA, 32 nt, Human
cugcagcccuggaggagggggcgggucgaggc

SEQ ID NO: 137196 - RNA, 32 nt, Human
cugcagcccuggcagcgggcacaccccuaagc

SEQ ID NO: 137197 - RNA, 24 nt, Human
cugcagcccuggcugacauuuuaa

SEQ ID NO: 137198 - RNA, 32 nt, Human
cugcagcccuucugaggccaugggcuucguug

SEQ ID NO: 137199 - RNA, 32 nt, Human
cugcagccgcaaauccucugggcugcuucguc

SEQ ID NO: 137200 - RNA, 19 nt, Human
cugcagccgccccagagca

SEQ ID NO: 137201 - RNA, 17 nt, Human
cugcagccgcccgggcc

SEQ ID NO: 137202 - RNA, 20 nt, Human
cugcagccgcccgggccgcc

SEQ ID NO: 137203 - RNA, 32 nt, Human
cugcagccgccgccggguugugccucagacug

SEQ ID NO: 137204 - RNA, 20 nt, Human
cugcagccgccuuugggcca

SEQ ID NO: 137205 - RNA, 32 nt, Human
cugcagccgcggguuguuacagcugcuggagc

SEQ ID NO: 137206 - RNA, 32 nt, Human
cugcagccgcuuuccgcggccugggccucucg

SEQ ID NO: 137207 - RNA, 26 nt, Human
cugcagccggagcucagcccaugcca

SEQ ID NO: 137208 - RNA, 32 nt, Human
cugcagccggggaggaaggaggaggccgagcc

SEQ ID NO: 137209 - RNA, 32 nt, Human
cugcagccgucgcugucuccucccagaccggu

SEQ ID NO: 137210 - RNA, 32 nt, Human
cugcagccgugagccaccccuguuuugugaaa

SEQ ID NO: 137211 - RNA, 25 nt, Human
cugcagccuaggugacagagcgaga

SEQ ID NO: 137212 - RNA, 32 nt, Human
cugcagccucaaacuccuaggcucaggugauc

SEQ ID NO: 137213 - RNA, 32 nt, Human
cugcagccucaaacuccuggaguccagcaauc

SEQ ID NO: 137214 - RNA, 32 nt, Human
cugcagccucaaacuccuggauucaagugauc

SEQ ID NO: 137215 - RNA, 32 nt, Human
cugcagccucaaacuccugggcucaagcaauc

SEQ ID NO: 137216 - RNA, 32 nt, Human
cugcagccucaaacuccugggcucaagcgauc

SEQ ID NO: 137217 - RNA, 32 nt, Human
cugcagccucaaacuccugggcucaagugauc

SEQ ID NO: 137218 - RNA, 32 nt, Human
cugcagccucaaacuccugggcucaggccauc

SEQ ID NO: 137219 - RNA, 32 nt, Human
cugcagccucaaacuccugggcuccagugauc

SEQ ID NO: 137220 - RNA, 32 nt, Human
cugcagccucaaacuccuggguucaaguaacc

SEQ ID NO: 137221 - RNA, 32 nt, Human
cugcagccucaaacucuuuggcucaagugauc

SEQ ID NO: 137222 - RNA, 32 nt, Human
cugcagccucaaacuucuggccucaagugauc

SEQ ID NO: 137223 - RNA, 32 nt, Human
cugcagccucaaccucccagguucaagcgauu

SEQ ID NO: 137224 - RNA, 20 nt, Human
cugcagccucaaccuccugg

SEQ ID NO: 137225 - RNA, 32 nt, Human
cugcagccucaaccuccuggacucagagaugu

SEQ ID NO: 137226 - RNA, 32 nt, Human
cugcagccucaaccuccugggcuaagugaucc

SEQ ID NO: 137227 - RNA, 32 nt, Human
cugcagccucaaccuccugggcucaagcaacc

SEQ ID NO: 137228 - RNA, 32 nt, Human
cugcagccucaaccuccugggcucaagccauc

SEQ ID NO: 137229 - RNA, 32 nt, Human
cugcagccucaaccuccugggcucaagugagu

SEQ ID NO: 137230 - RNA, 32 nt, Human
cugcagccucaaccuccugggcucaagugauc

SEQ ID NO: 137231 - RNA, 32 nt, Human
cugcagccucaaccuccugggcucacgugauc

SEQ ID NO: 137232 - RNA, 32 nt, Human
cugcagccucaaccuccugggcucaggugauu

SEQ ID NO: 137233 - RNA, 32 nt, Human
cugcagccucaaccuccuggggccaagugauc

SEQ ID NO: 137234 - RNA, 32 nt, Human
cugcagccucaaccuccuggguucaagugauu

SEQ ID NO: 137235 - RNA, 32 nt, Human
cugcagccucaaccuucugggcucaaaugauc

SEQ ID NO: 137236 - RNA, 32 nt, Human
cugcagccucauacuccugggcucaagcaauc

SEQ ID NO: 137237 - RNA, 32 nt, Human
cugcagccuccaacuccugggcucaagcaauc

SEQ ID NO: 137238 - RNA, 32 nt, Human
cugcagccuccaacuccugggcucaagugauc

SEQ ID NO: 137239 - RNA, 32 nt, Human
cugcagccuccaacuccuggguucaagggauc

SEQ ID NO: 137240 - RNA, 32 nt, Human
cugcagccuccccuugcagucaucauucgugu

SEQ ID NO: 137241 - RNA, 32 nt, Human
cugcagccuccguccuggccucagggacgcug

SEQ ID NO: 137242 - RNA, 32 nt, Human
cugcagccucgaacuccugagcucaagcaacc

SEQ ID NO: 137243 - RNA, 32 nt, Human
cugcagccucgaacuccugggcucaagcaauc

SEQ ID NO: 137244 - RNA, 32 nt, Human
cugcagccucgaacuccugggcucaagggauc

SEQ ID NO: 137245 - RNA, 32 nt, Human
cugcagccucgaaucccugggcucaaguguuc

SEQ ID NO: 137246 - RNA, 32 nt, Human
cugcagccucgaccuccugggcucaacugauc

SEQ ID NO: 137247 - RNA, 32 nt, Human
cugcagccucgaccuccugggcucaagcaauc

SEQ ID NO: 137248 - RNA, 32 nt, Human
cugcagccucgaccuccugggcucaagcaguc

SEQ ID NO: 137249 - RNA, 32 nt, Human
cugcagccucggcuuccugggcucaggugauu

SEQ ID NO: 137250 - RNA, 32 nt, Human
cugcagccucuacaggcccagcuccugccuug

SEQ ID NO: 137251 - RNA, 32 nt, Human
cugcagccucugccuccagcccggcagcucug

SEQ ID NO: 137252 - RNA, 31 nt, Human
cugcagccucugucucccgggcucaagcgau

SEQ ID NO: 137253 - RNA, 32 nt, Human
cugcagccucuuccucccucagaucccaccag

SEQ ID NO: 137254 - RNA, 32 nt, Human
cugcagccugagccuucuuacugugaauuaua

SEQ ID NO: 137255 - RNA, 32 nt, Human
cugcagccugaggcucaggcugugcuggcaua

SEQ ID NO: 137256 - RNA, 32 nt, Human
cugcagccugcagggagcgagccggccugucc

SEQ ID NO: 137257 - RNA, 32 nt, Human
cugcagccugcucgccaucuggaggcucagug

SEQ ID NO: 137258 - RNA, 32 nt, Human
cugcagccuggaacuccugggaucaggagacc

SEQ ID NO: 137259 - RNA, 32 nt, Human
cugcagccuggaacuccugggcucaggauccu

SEQ ID NO: 137260 - RNA, 23 nt, Human
cugcagccuggcaacaagagcga

SEQ ID NO: 137261 - RNA, 17 nt, Human
cugcagccuggcuggca

SEQ ID NO: 137262 - RNA, 32 nt, Human
cugcagccugggaccaggcacccccagaauga

SEQ ID NO: 137263 - RNA, 32 nt, Human
cugcagccugggugacacuccagccuggguga

SEQ ID NO: 137264 - RNA, 25 nt, Human
cugcagccuggguggcagagugaga

SEQ ID NO: 137265 - RNA, 32 nt, Human
cugcagccugucaucccugucugugaccauug

SEQ ID NO: 137266 - RNA, 32 nt, Human
cugcagccuuaaauuagcuucuuugcccaccc

SEQ ID NO: 137267 - RNA, 32 nt, Human
cugcagccuuaaccuccacggccuucgauacu

SEQ ID NO: 137268 - RNA, 32 nt, Human
cugcagccuucuagccccuccuccccgcgaga

SEQ ID NO: 137269 - RNA, 32 nt, Human
cugcagccuugaacuccugggcucaagcgauc

SEQ ID NO: 137270 - RNA, 20 nt, Human
cugcagccuugaccuccugg

SEQ ID NO: 137271 - RNA, 32 nt, Human
cugcagccuugaccuccuggguuccggugauu

SEQ ID NO: 137272 - RNA, 32 nt, Human
cugcagccuuggcagugacuggacagcugggu

SEQ ID NO: 137273 - RNA, 32 nt, Human
cugcagccuugggggcaagagccucaaggagc

SEQ ID NO: 137274 - RNA, 32 nt, Human
cugcagccuugugaagaaggugccuuucuucc

SEQ ID NO: 137275 - RNA, 32 nt, Human
cugcagccuuuaacuacugggcucaagacauc

SEQ ID NO: 137276 - RNA, 32 nt, Human
cugcagccuuucucgccgucagcgcccgucgc

SEQ ID NO: 137277 - RNA, 32 nt, Human
cugcagcgagcuaugaucgcgccacuacacuc

SEQ ID NO: 137278 - RNA, 18 nt, Human
cugcagcgccccgagcca

SEQ ID NO: 137279 - RNA, 32 nt, Human
cugcagcgcugggcuggugugcaguggugcga

SEQ ID NO: 137280 - RNA, 32 nt, Human
cugcagcggaaucuguucacacccaacuuggu

SEQ ID NO: 137281 - RNA, 32 nt, Human
cugcagcggauuucggccuggcccgggccuau

SEQ ID NO: 137282 - RNA, 32 nt, Human
cugcagcgggaaaggcugacugggaaauccau

SEQ ID NO: 137283 - RNA, 32 nt, Human
cugcagcggugaccccucccccggcugccgcc

SEQ ID NO: 137284 - RNA, 23 nt, Human
cugcagcgugagcagcuccucca

SEQ ID NO: 137285 - RNA, 30 nt, Human
cugcagcguugcauugcagaaagagauuga

SEQ ID NO: 137286 - RNA, 23 nt, Human
cugcagcuaaugagguccugcca

SEQ ID NO: 137287 - RNA, 32 nt, Human
cugcagcuaugugccaucaugccuggcugaug

SEQ ID NO: 137288 - RNA, 32 nt, Human
cugcagcucaaaggaaggacccugagcaggca

SEQ ID NO: 137289 - RNA, 32 nt, Human
cugcagcucaacaaugagggacuugggcuccc

SEQ ID NO: 137290 - RNA, 32 nt, Human
cugcagcucaagaccaccucgauagagaaugu

SEQ ID NO: 137291 - RNA, 23 nt, Human
cugcagcucagcagccgccgcca

SEQ ID NO: 137292 - RNA, 32 nt, Human
cugcagcucagccaccuccuccucucaggucu

SEQ ID NO: 137293 - RNA, 32 nt, Human
cugcagcuccaaucugauucugcuugggaaug

SEQ ID NO: 137294 - RNA, 21 nt, Human
cugcagcuccagccccgggcu

SEQ ID NO: 137295 - RNA, 32 nt, Human
cugcagcuccagcuuugugcucugccucugag

SEQ ID NO: 137296 - RNA, 18 nt, Human
cugcagcucccggugcuc

SEQ ID NO: 137297 - RNA, 19 nt, Human
cugcagcucucccgggcua

SEQ ID NO: 137298 - RNA, 32 nt, Human
cugcagcucucuccagcccuguuggcauccuc

SEQ ID NO: 137299 - RNA, 22 nt, Human
cugcagcugaggucaguuucag

SEQ ID NO: 137300 - RNA, 32 nt, Human
cugcagcugcaaccugcccucuggucccaggu

SEQ ID NO: 137301 - RNA, 19 nt, Human
cugcagcugcaccagcagg

SEQ ID NO: 137302 - RNA, 32 nt, Human
cugcagcugcacuccagucuuuaagcccagcu

SEQ ID NO: 137303 - RNA, 19 nt, Human
cugcagcugccacaucccu

SEQ ID NO: 137304 - RNA, 24 nt, Human
cugcagcugccacgguuucugcca

SEQ ID NO: 137305 - RNA, 23 nt, Human
cugcagcugccagccccccugcc

SEQ ID NO: 137306 - RNA, 32 nt, Human
cugcagcugccggaggcggaggccguggacgu

SEQ ID NO: 137307 - RNA, 21 nt, Human
cugcagcugccuaccccugcc

SEQ ID NO: 137308 - RNA, 21 nt, Human
cugcagcugccucacaccgcc

SEQ ID NO: 137309 - RNA, 23 nt, Human
cugcagcugccucaguuucccca

SEQ ID NO: 137310 - RNA, 21 nt, Human
cugcagcugccucccuuucgc

SEQ ID NO: 137311 - RNA, 20 nt, Human
cugcagcugccucugucagc

SEQ ID NO: 137312 - RNA, 32 nt, Human
cugcagcugccuggaccugcugaccgggcagc

SEQ ID NO: 137313 - RNA, 32 nt, Human
cugcagcugccugucuggugucugucuuuggu

SEQ ID NO: 137314 - RNA, 21 nt, Human
cugcagcugcuaguuccugcc

SEQ ID NO: 137315 - RNA, 32 nt, Human
cugcagcugcuuguuagcuuuuugagacugag

SEQ ID NO: 137316 - RNA, 32 nt, Human
cugcagcuggaacuagcgugccaaguuauuua

SEQ ID NO: 137317 - RNA, 32 nt, Human
cugcagcuggacaacagaagccccaugccgcc

SEQ ID NO: 137318 - RNA, 32 nt, Human
cugcagcuggacugcaggcuuauuuugcuuaa

SEQ ID NO: 137319 - RNA, 32 nt, Human
cugcagcuggacuugccaaagaugaccuggga

SEQ ID NO: 137320 - RNA, 32 nt, Human
cugcagcuggaucuuggcuugacuguugagau

SEQ ID NO: 137321 - RNA, 26 nt, Human
cugcagcugggagagcugaguuccag

SEQ ID NO: 137322 - RNA, 32 nt, Human
cugcagcugggcugugugguugacuuaugggc

SEQ ID NO: 137323 - RNA, 32 nt, Human
cugcagcuguacucggggagcugcggcggcuc

SEQ ID NO: 137324 - RNA, 32 nt, Human
cugcagcugugaggcccaggacccuuagcagg

SEQ ID NO: 137325 - RNA, 32 nt, Human
cugcagcugugcuccugcucccuccuggaaug

SEQ ID NO: 137326 - RNA, 32 nt, Human
cugcagcugugcuucuauuccccagcucuucc

SEQ ID NO: 137327 - RNA, 32 nt, Human
cugcagcuguggacccaggaaucuccguacuc

SEQ ID NO: 137328 - RNA, 32 nt, Human
cugcagcuguggacccaggaaucucuguacuc

SEQ ID NO: 137329 - RNA, 32 nt, Human
cugcagcuucaaacgcucacacuuggcugggu

SEQ ID NO: 137330 - RNA, 32 nt, Human
cugcagcuucaaacuccugggcucaaagugau

SEQ ID NO: 137331 - RNA, 32 nt, Human
cugcagcuucaaacucuugggcucaagccauc

SEQ ID NO: 137332 - RNA, 32 nt, Human
cugcagcuucaacuuccugggcucaaguaauc

SEQ ID NO: 137333 - RNA, 32 nt, Human
cugcagcuucacuugcuggagugccaaguaga

SEQ ID NO: 137334 - RNA, 18 nt, Human
cugcagcuucccugagcc

SEQ ID NO: 137335 - RNA, 32 nt, Human
cugcagcuuccucugcuucuggaaugaaccau

SEQ ID NO: 137336 - RNA, 32 nt, Human
cugcagcuucucugaaguuuggaaaagaaacc

SEQ ID NO: 137337 - RNA, 32 nt, Human
cugcagcuucuucggaagccaggauuuauuuu

SEQ ID NO: 137338 - RNA, 32 nt, Human
cugcagcuucuuucuugcuccuggagagcuag

SEQ ID NO: 137339 - RNA, 32 nt, Human
cugcagcuugcaccucagcagcugcccugccc

SEQ ID NO: 137340 - RNA, 32 nt, Human
cugcagcuugggaggcggcucuccccaggcgg

SEQ ID NO: 137341 - RNA, 21 nt, Human
cugcagcuuugggcuccccca

SEQ ID NO: 137342 - RNA, 26 nt, Human
cugcaggaaacacugaggcuugggaa

SEQ ID NO: 137343 - RNA, 32 nt, Human
cugcaggaaauuaauucugaagaaggaaaaga

SEQ ID NO: 137344 - RNA, 32 nt, Human
cugcaggaacagggcugcgcagaggaggaagc

SEQ ID NO: 137345 - RNA, 32 nt, Human
cugcaggaagcugaagugagaggcccggagag

SEQ ID NO: 137346 - RNA, 32 nt, Human
cugcaggaaggagagaggaagaggagcagaag

SEQ ID NO: 137347 - RNA, 32 nt, Human
cugcaggaaggcaccugucacacagggcguuc

SEQ ID NO: 137348 - RNA, 32 nt, Human
cugcaggaaggccagagguucugguggaguug

SEQ ID NO: 137349 - RNA, 32 nt, Human
cugcaggaagugaaccuggcaggaggcuugcu

SEQ ID NO: 137350 - RNA, 23 nt, Human
cugcaggaauugggggcugggaa

SEQ ID NO: 137351 - RNA, 21 nt, Human
cugcaggacaccccauccuca

SEQ ID NO: 137352 - RNA, 32 nt, Human
cugcaggacaccuccuggcacaacaccaccuu

SEQ ID NO: 137353 - RNA, 21 nt, Human
cugcaggaccaggacucccag

SEQ ID NO: 137354 - RNA, 32 nt, Human
cugcaggaccucaagacaccugggcagacacu

SEQ ID NO: 137355 - RNA, 23 nt, Human
cugcaggaccucccuccgggcca

SEQ ID NO: 137356 - RNA, 32 nt, Human
cugcaggacuccuuccuggcacucucuccagu

SEQ ID NO: 137357 - RNA, 32 nt, Human
cugcaggacugccuggcccacccaugguugca

SEQ ID NO: 137358 - RNA, 32 nt, Human
cugcaggagaacgccaguggccgggggaacau

SEQ ID NO: 137359 - RNA, 32 nt, Human
cugcaggagagacacccaggaggaguuuuuac

SEQ ID NO: 137360 - RNA, 25 nt, Human
cugcaggagaggaugacacuuucga

SEQ ID NO: 137361 - RNA, 32 nt, Human
cugcaggagccgcggcagccgccguccuugca

SEQ ID NO: 137362 - RNA, 32 nt, Human
cugcaggagccuaauuccccacucugagcuca

SEQ ID NO: 137363 - RNA, 32 nt, Human
cugcaggaggggcagacacagagacagccugg

SEQ ID NO: 137364 - RNA, 32 nt, Human
cugcaggauccauuugccccuacccagcauuu

SEQ ID NO: 137365 - RNA, 21 nt, Human
cugcaggaucccuacugccaa

SEQ ID NO: 137366 - RNA, 21 nt, Human
cugcaggauccuugccuccaa

SEQ ID NO: 137367 - RNA, 32 nt, Human
cugcaggaucucuaugagacuguguugucggu

SEQ ID NO: 137368 - RNA, 32 nt, Human
cugcaggaugaaggagucuccgggaagccaac

SEQ ID NO: 137369 - RNA, 32 nt, Human
cugcaggcaaacacauacacucuuucaggccu

SEQ ID NO: 137370 - RNA, 21 nt, Human
cugcaggcaacuccagcgcug

SEQ ID NO: 137371 - RNA, 32 nt, Human
cugcaggcaaggguuuccauccccgcugcccu

SEQ ID NO: 137372 - RNA, 32 nt, Human
cugcaggcacacacugccacgcccagcuaauu

SEQ ID NO: 137373 - RNA, 32 nt, Human
cugcaggcacuggggagcucugcuggaauugg

SEQ ID NO: 137374 - RNA, 18 nt, Human
cugcaggcaucagugccc

SEQ ID NO: 137375 - RNA, 32 nt, Human
cugcaggcaucuuuacugcagcucugccggcc

SEQ ID NO: 137376 - RNA, 32 nt, Human
cugcaggccaagcagggcaaccccacacccuu

SEQ ID NO: 137377 - RNA, 18 nt, Human
cugcaggccacucugccu

SEQ ID NO: 137378 - RNA, 32 nt, Human
cugcaggccccgcccuugccucccaggggccu

SEQ ID NO: 137379 - RNA, 32 nt, Human
cugcaggcccugcucuugccucccaggggcuu

SEQ ID NO: 137380 - RNA, 32 nt, Human
cugcaggcccugcucuugccucuuagcucccu

SEQ ID NO: 137381 - RNA, 32 nt, Human
cugcaggcccuuccucugccugcugggguccu

SEQ ID NO: 137382 - RNA, 32 nt, Human
cugcaggccgcuguucaugucuggacuccugg

SEQ ID NO: 137383 - RNA, 19 nt, Human
cugcaggccucaucuuucc

SEQ ID NO: 137384 - RNA, 19 nt, Human
cugcaggccugagcaggug

SEQ ID NO: 137385 - RNA, 32 nt, Human
cugcaggccugcggggaucucuccccacuuca

SEQ ID NO: 137386 - RNA, 32 nt, Human
cugcaggccuggucuugcccagcugggcugcc

SEQ ID NO: 137387 - RNA, 32 nt, Human
cugcaggcgaggggcaccaccacguccaaagg

SEQ ID NO: 137388 - RNA, 32 nt, Human
cugcaggcgggcggagguuccaggagauggga

SEQ ID NO: 137389 - RNA, 24 nt, Human
cugcaggcgucggccauccggcca

SEQ ID NO: 137390 - RNA, 32 nt, Human
cugcaggcuaucucccccucuggcucagucau

SEQ ID NO: 137391 - RNA, 32 nt, Human
cugcaggcucagauuugaagagggaagguucc

SEQ ID NO: 137392 - RNA, 32 nt, Human
cugcaggcuccccuccucggcuuccuuccucu

SEQ ID NO: 137393 - RNA, 32 nt, Human
cugcaggcucugcugcccugaggugccaugcc

SEQ ID NO: 137394 - RNA, 32 nt, Human
cugcaggcugaggaccgcgacaaggacgacau

SEQ ID NO: 137395 - RNA, 32 nt, Human
cugcaggcugccucccucucagccuggacagc

SEQ ID NO: 137396 - RNA, 32 nt, Human
cugcaggcugccucuucugccccggagcuggg

SEQ ID NO: 137397 - RNA, 32 nt, Human
cugcaggcuggcuguuggccccucugcugucc

SEQ ID NO: 137398 - RNA, 32 nt, Human
cugcaggcuggggacccugggugcaggugcca

SEQ ID NO: 137399 - RNA, 31 nt, Human
cugcaggcuggugcuaugacagcagauugca

SEQ ID NO: 137400 - RNA, 32 nt, Human
cugcagggaaacaagcugggcuuuuuauaauu

SEQ ID NO: 137401 - RNA, 19 nt, Human
cugcagggaagcccaguuu

SEQ ID NO: 137402 - RNA, 32 nt, Human
cugcagggacagagcauugggguggggguaag

SEQ ID NO: 137403 - RNA, 32 nt, Human
cugcagggacccggugacagcgugagagguuc

SEQ ID NO: 137404 - RNA, 32 nt, Human
cugcagggacucaagauccucuuacuuuuggc

SEQ ID NO: 137405 - RNA, 32 nt, Human
cugcagggacuggcccccaacucaccccgugc

SEQ ID NO: 137406 - RNA, 32 nt, Human
cugcagggacuggccuuggccuagggaacacu

SEQ ID NO: 137407 - RNA, 20 nt, Human
cugcagggagaagcaagaag

SEQ ID NO: 137408 - RNA, 32 nt, Human
cugcagggagagaaguugcugucagaugaaug

SEQ ID NO: 137409 - RNA, 32 nt, Human
cugcagggagcaaggguccagagcagauaugg

SEQ ID NO: 137410 - RNA, 32 nt, Human
cugcagggagcuucagcgggcaccaguucuca

SEQ ID NO: 137411 - RNA, 32 nt, Human
cugcagggaggcggacggcgcuguuccggagc

SEQ ID NO: 137412 - RNA, 32 nt, Human
cugcagggagggcagaggcauugcugagacug

SEQ ID NO: 137413 - RNA, 32 nt, Human
cugcagggauucucucuugcugccucaguugc

SEQ ID NO: 137414 - RNA, 22 nt, Human
cugcagggcaaggcagggccug

SEQ ID NO: 137415 - RNA, 32 nt, Human
cugcagggcaggggacagcagagcagagaggc

SEQ ID NO: 137416 - RNA, 32 nt, Human
cugcagggccacuccuaugcagaggucuccgc

SEQ ID NO: 137417 - RNA, 32 nt, Human
cugcagggccacucuuggcagagacuuugggu

SEQ ID NO: 137418 - RNA, 32 nt, Human
cugcagggccaugauggagaaauagcacucua

SEQ ID NO: 137419 - RNA, 20 nt, Human
cugcagggcccacggcuccu

SEQ ID NO: 137420 - RNA, 32 nt, Human
cugcagggcccaggagugggagcccaggcccu

SEQ ID NO: 137421 - RNA, 32 nt, Human
cugcagggccgaccagcuccagucccaggucc

SEQ ID NO: 137422 - RNA, 32 nt, Human
cugcagggccugcucuugccucccaggggcuu

SEQ ID NO: 137423 - RNA, 32 nt, Human
cugcagggccuggccucgccucccagggcugu

SEQ ID NO: 137424 - RNA, 32 nt, Human
cugcagggccugggaagggcuuugagggagcc

SEQ ID NO: 137425 - RNA, 32 nt, Human
cugcagggcggcggagggcagagcaggcccug

SEQ ID NO: 137426 - RNA, 32 nt, Human
cugcagggcugagucaguuggggaacaccaga

SEQ ID NO: 137427 - RNA, 24 nt, Human
cugcaggggacacucacccuucug

SEQ ID NO: 137428 - RNA, 32 nt, Human
cugcaggggagcuucuuagcaggccuggggcu

SEQ ID NO: 137429 - RNA, 32 nt, Human
cugcaggggauggggaagggauggcacuggca

SEQ ID NO: 137430 - RNA, 21 nt, Human
cugcaggggcccaggcugccu

SEQ ID NO: 137431 - RNA, 32 nt, Human
cugcaggggcugggguguguuacucacuggca

SEQ ID NO: 137432 - RNA, 21 nt, Human
cugcagggggcggggcaggaa

SEQ ID NO: 137433 - RNA, 32 nt, Human
cugcagggggcugcgccugccugcuccgcccc

SEQ ID NO: 137434 - RNA, 32 nt, Human
cugcaggggguagcccugccgcacuuugucac

SEQ ID NO: 137435 - RNA, 32 nt, Human
cugcaggggugaggaguggggagaaaccagaa

SEQ ID NO: 137436 - RNA, 26 nt, Human
cugcagggguggagggcagucccuca

SEQ ID NO: 137437 - RNA, 32 nt, Human
cugcagggguguuccaccacacccagccaauu

SEQ ID NO: 137438 - RNA, 32 nt, Human
cugcagggucacugcaccucggcccagggccu

SEQ ID NO: 137439 - RNA, 32 nt, Human
cugcaggguccccaaggauggaaagggaaugu

SEQ ID NO: 137440 - RNA, 19 nt, Human
cugcagggucccuccuucc

SEQ ID NO: 137441 - RNA, 32 nt, Human
cugcagggucucgggcucugagcccaggacau

SEQ ID NO: 137442 - RNA, 21 nt, Human
cugcagggugugggcagagaa

SEQ ID NO: 137443 - RNA, 21 nt, Human
cugcaggguuauucccugcac

SEQ ID NO: 137444 - RNA, 32 nt, Human
cugcagguaacugaaacaaaccuagcauuuuu

SEQ ID NO: 137445 - RNA, 32 nt, Human
cugcagguaagucagagcagcuuuaccacagc

SEQ ID NO: 137446 - RNA, 24 nt, Human
cugcagguagggagugggucccag

SEQ ID NO: 137447 - RNA, 32 nt, Human
cugcaggucccuggggaucugcauuucuaaca

SEQ ID NO: 137448 - RNA, 32 nt, Human
cugcagguccugguagaggaguacaaguuucc

SEQ ID NO: 137449 - RNA, 32 nt, Human
cugcaggucucaaaggugggauuuggcgaggg

SEQ ID NO: 137450 - RNA, 32 nt, Human
cugcaggugcuucaauggaucauggggcaaag

SEQ ID NO: 137451 - RNA, 32 nt, Human
cugcagguggagguugcuagucuaguuuccuu

SEQ ID NO: 137452 - RNA, 32 nt, Human
cugcaggugggcugggcccacccagggagcug

SEQ ID NO: 137453 - RNA, 23 nt, Human
cugcagguggggauaaaaucuca

SEQ ID NO: 137454 - RNA, 32 nt, Human
cugcaggugugcaccaccaugcccagcuaauu

SEQ ID NO: 137455 - RNA, 32 nt, Human
cugcaggugugcuccagguggucacuggaugc

SEQ ID NO: 137456 - RNA, 22 nt, Human
cugcagguucccucuggcccca

SEQ ID NO: 137457 - RNA, 32 nt, Human
cugcagguuccuucuagcuggagcacucagag

SEQ ID NO: 137458 - RNA, 32 nt, Human
cugcagguucugggccuggcaaaggaguauca

SEQ ID NO: 137459 - RNA, 20 nt, Human
cugcaguaaagaacaucccu

SEQ ID NO: 137460 - RNA, 32 nt, Human
cugcaguaagcacagaucgcacugccucaaua

SEQ ID NO: 137461 - RNA, 32 nt, Human
cugcaguaguaaucuuaugcacacggugauuu

SEQ ID NO: 137462 - RNA, 32 nt, Human
cugcaguauaaauaacuaaugucucuacaauu

SEQ ID NO: 137463 - RNA, 17 nt, Human
cugcaguauguauucua

SEQ ID NO: 137464 - RNA, 32 nt, Human
cugcaguauguugccaagagcccgucugcucc

SEQ ID NO: 137465 - RNA, 32 nt, Human
cugcagucaccugugguccucuguggucuccc

SEQ ID NO: 137466 - RNA, 32 nt, Human
cugcagucagcccuguggaggccuuuguguuu

SEQ ID NO: 137467 - RNA, 22 nt, Human
cugcagucagccuucccccagg

SEQ ID NO: 137468 - RNA, 32 nt, Human
cugcagucagggacugaguucuuccugagggc

SEQ ID NO: 137469 - RNA, 32 nt, Human
cugcagucaucuagaguagguucauuccuggg

SEQ ID NO: 137470 - RNA, 22 nt, Human
cugcagucaugaauggcaagug

SEQ ID NO: 137471 - RNA, 25 nt, Human
cugcaguccaagcugaacaugggaa

SEQ ID NO: 137472 - RNA, 32 nt, Human
cugcaguccacuggugggacaagagcaaagcc

SEQ ID NO: 137473 - RNA, 32 nt, Human
cugcaguccagccuggaugacagagugagacu

SEQ ID NO: 137474 - RNA, 32 nt, Human
cugcaguccagccugggcaacaagagcgaaac

SEQ ID NO: 137475 - RNA, 32 nt, Human
cugcaguccagccugggcgacagagugagacc

SEQ ID NO: 137476 - RNA, 32 nt, Human
cugcaguccagccugggcgacagagugagacu

SEQ ID NO: 137477 - RNA, 32 nt, Human
cugcaguccagccugggcuacagagugagacu

SEQ ID NO: 137478 - RNA, 32 nt, Human
cugcaguccauucagagagguuucgcagacuc

SEQ ID NO: 137479 - RNA, 32 nt, Human
cugcaguccccaguguccugcccacacgagcc

SEQ ID NO: 137480 - RNA, 32 nt, Human
cugcaguccccugacuccagcucuggauuaga

SEQ ID NO: 137481 - RNA, 32 nt, Human
cugcagucccucgugauugucuugcucggcuu

SEQ ID NO: 137482 - RNA, 32 nt, Human
cugcaguccgcagcccagccugggcgacagag

SEQ ID NO: 137483 - RNA, 32 nt, Human
cugcaguccgcaguccagccugggcgacagag

SEQ ID NO: 137484 - RNA, 32 nt, Human
cugcaguccuggaagauguggggugcugggug

SEQ ID NO: 137485 - RNA, 32 nt, Human
cugcagucucaaacuccuagccuugauugauc

SEQ ID NO: 137486 - RNA, 25 nt, Human
cugcagucugagugacagagugaga

SEQ ID NO: 137487 - RNA, 32 nt, Human
cugcagucugccccuuccuaccccuguucccu

SEQ ID NO: 137488 - RNA, 32 nt, Human
cugcagugaagcacauccagggacggccaucc

SEQ ID NO: 137489 - RNA, 32 nt, Human
cugcagugagccaaggaccaggcuaguuccug

SEQ ID NO: 137490 - RNA, 32 nt, Human
cugcagugagccacagucacgccacugcauuc

SEQ ID NO: 137491 - RNA, 23 nt, Human
cugcagugagccaugaggcacca

SEQ ID NO: 137492 - RNA, 24 nt, Human
cugcagugagccaugaucgcacca

SEQ ID NO: 137493 - RNA, 32 nt, Human
cugcagugagccaugaucuugccacugcucua

SEQ ID NO: 137494 - RNA, 32 nt, Human
cugcagugagccaugauuaugccauuacacuc

SEQ ID NO: 137495 - RNA, 32 nt, Human
cugcagugagccaugauugagccaccacacuc

SEQ ID NO: 137496 - RNA, 24 nt, Human
cugcagugagccaugauugcacca

SEQ ID NO: 137497 - RNA, 24 nt, Human
cugcagugagccgauaucgcacca

SEQ ID NO: 137498 - RNA, 32 nt, Human
cugcagugagcuaugaucacaccaccacacuc

SEQ ID NO: 137499 - RNA, 32 nt, Human
cugcagugagcuaugaucgcaccacugcacuc

SEQ ID NO: 137500 - RNA, 32 nt, Human
cugcagugagcuaugaucgcaccacugcauuc

SEQ ID NO: 137501 - RNA, 32 nt, Human
cugcagugagcuaugaucgcaucaguccacuc

SEQ ID NO: 137502 - RNA, 32 nt, Human
cugcagugagcuaugaucucaccacuacacuc

SEQ ID NO: 137503 - RNA, 32 nt, Human
cugcagugagcuaugauugcaccacugcacuc

SEQ ID NO: 137504 - RNA, 32 nt, Human
cugcagugagcuaugguagcaccacugcacuu

SEQ ID NO: 137505 - RNA, 32 nt, Human
cugcagugagcuaugguggcaccacugcacuc

SEQ ID NO: 137506 - RNA, 32 nt, Human
cugcagugagcuaugguugcaccacuguacuc

SEQ ID NO: 137507 - RNA, 32 nt, Human
cugcagugagucuacagcaguaucucugccug

SEQ ID NO: 137508 - RNA, 17 nt, Human
cugcagugcacuauaga

SEQ ID NO: 137509 - RNA, 32 nt, Human
cugcagugcagguggcuccuggaagacccuca

SEQ ID NO: 137510 - RNA, 32 nt, Human
cugcagugcaugggacagccuggcacaaugaa

SEQ ID NO: 137511 - RNA, 32 nt, Human
cugcagugcccaaggaauuucugcucugguua

SEQ ID NO: 137512 - RNA, 32 nt, Human
cugcagugcccaccccuucccugcaagcucca

SEQ ID NO: 137513 - RNA, 32 nt, Human
cugcagugcuccccuggccagcuccuggggga

SEQ ID NO: 137514 - RNA, 32 nt, Human
cugcaguggaaaugccugguucagcagauguc

SEQ ID NO: 137515 - RNA, 32 nt, Human
cugcaguggaacuccaugccccgccucccaac

SEQ ID NO: 137516 - RNA, 32 nt, Human
cugcaguggaagagcagaaaugggauuggaug

SEQ ID NO: 137517 - RNA, 32 nt, Human
cugcaguggaagucagcacagagcagugcccu

SEQ ID NO: 137518 - RNA, 32 nt, Human
cugcaguggagcucaugaaagaccagcauuua

SEQ ID NO: 137519 - RNA, 32 nt, Human
cugcaguggcuccccugcccagccugcucucc

SEQ ID NO: 137520 - RNA, 32 nt, Human
cugcaguggcuucuugucgccugcugcugggc

SEQ ID NO: 137521 - RNA, 32 nt, Human
cugcagugggagcugggagggagcagugcacc

SEQ ID NO: 137522 - RNA, 32 nt, Human
cugcagugggaucuggcugcucugccuccuuu

SEQ ID NO: 137523 - RNA, 32 nt, Human
cugcaguuaccaaagggauuguuucucugcca

SEQ ID NO: 137524 - RNA, 32 nt, Human
cugcaguuccaaccucuucccugagcaucaaa

SEQ ID NO: 137525 - RNA, 19 nt, Human
cugcaguuccacagaggug

SEQ ID NO: 137526 - RNA, 32 nt, Human
cugcaguucugugacuuccaagccaggaauua

SEQ ID NO: 137527 - RNA, 32 nt, Human
cugcaguugcccagccccaauucuuuauuugg

SEQ ID NO: 137528 - RNA, 32 nt, Human
cugcaguugccuggcagacuggaaagccucuc

SEQ ID NO: 137529 - RNA, 32 nt, Human
cugcaguuggucacagaugauacugcuuuauu

SEQ ID NO: 137530 - RNA, 32 nt, Human
cugcaguuguguccaggggcagccguagacca

SEQ ID NO: 137531 - RNA, 32 nt, Human
cugcaguuguuuauuuguuuacaguuauuucc

SEQ ID NO: 137532 - RNA, 32 nt, Human
cugcaguuucaaccucccagauuccagucauc

SEQ ID NO: 137533 - RNA, 19 nt, Human
cugcaguuugcuccagcua

SEQ ID NO: 137534 - RNA, 32 nt, Human
cugcaguuugggcccaggcuaugugcucuucu

SEQ ID NO: 137535 - RNA, 32 nt, Human
cugcaguuuucuguguucugcauacaagucuu

SEQ ID NO: 137536 - RNA, 32 nt, Human
cugcaguuuuguggcuucaaguguggguggac

SEQ ID NO: 137537 - RNA, 32 nt, Human
cugcauaaaaacaaccaaccagagacuuggac

SEQ ID NO: 137538 - RNA, 32 nt, Human
cugcauaaaugucuucuuuugagaagugucug

SEQ ID NO: 137539 - RNA, 32 nt, Human
cugcauaacagacugaaaugugcucaggcccu

SEQ ID NO: 137540 - RNA, 32 nt, Human
cugcauaacuccagggacaugagucacacaga

SEQ ID NO: 137541 - RNA, 32 nt, Human
cugcauaaugucccucucuuggcuauugacca

SEQ ID NO: 137542 - RNA, 32 nt, Human
cugcauaauuugaagacacagcagaaaggggg

SEQ ID NO: 137543 - RNA, 32 nt, Human
cugcauacaggaugggauauccaggggaagau

SEQ ID NO: 137544 - RNA, 32 nt, Human
cugcauaccaagucuacaacaucaaagaagaa

SEQ ID NO: 137545 - RNA, 32 nt, Human
cugcauaccccagcuccuccacaugccacugc

SEQ ID NO: 137546 - RNA, 32 nt, Human
cugcauaccugcaccugcaccccagccuuggc

SEQ ID NO: 137547 - RNA, 32 nt, Human
cugcauacucacaaauguugucuauaauuuga

SEQ ID NO: 137548 - RNA, 32 nt, Human
cugcauagauacaggcaucgucaccagccacg

SEQ ID NO: 137549 - RNA, 19 nt, Human
cugcauagcagcagccuca

SEQ ID NO: 137550 - RNA, 32 nt, Human
cugcauagcugcaugcagacacgugccagcgu

SEQ ID NO: 137551 - RNA, 32 nt, Human
cugcauagcugggagaccacacugccuuugga

SEQ ID NO: 137552 - RNA, 32 nt, Human
cugcauagguauaaagaggaucauuucuaccu

SEQ ID NO: 137553 - RNA, 32 nt, Human
cugcauauugcuggcccagcuccugaggcucu

SEQ ID NO: 137554 - RNA, 32 nt, Human
cugcauauuucauugaauaaaaaugccaaagc

SEQ ID NO: 137555 - RNA, 32 nt, Human
cugcauauuuggaauaccuugagaacugaauu

SEQ ID NO: 137556 - RNA, 32 nt, Human
cugcaucaacacgccacggucuucccauggca

SEQ ID NO: 137557 - RNA, 32 nt, Human
cugcaucaagggcuuuaccccaaccugcagcc

SEQ ID NO: 137558 - RNA, 32 nt, Human
cugcaucaauaaaauggggcagugauggccuc

SEQ ID NO: 137559 - RNA, 19 nt, Human
cugcaucaccucuggccuc

SEQ ID NO: 137560 - RNA, 32 nt, Human
cugcaucacuccccuccucucccuuccugugu

SEQ ID NO: 137561 - RNA, 32 nt, Human
cugcaucacugcacuccagccugggcaacaca

SEQ ID NO: 137562 - RNA, 32 nt, Human
cugcaucaggaggucuggggcggugacacgau

SEQ ID NO: 137563 - RNA, 32 nt, Human
cugcaucaggagucaggagaccuggcuucuag

SEQ ID NO: 137564 - RNA, 21 nt, Human
cugcaucauccucgucuucau

SEQ ID NO: 137565 - RNA, 32 nt, Human
cugcaucauccucgucuucaucuuccugcggu

SEQ ID NO: 137566 - RNA, 32 nt, Human
cugcaucauccugguggcuagccagugcgggg

SEQ ID NO: 137567 - RNA, 18 nt, Human
cugcauccaaauaguagg

SEQ ID NO: 137568 - RNA, 18 nt, Human
cugcauccaaaucaaggu

SEQ ID NO: 137569 - RNA, 18 nt, Human
cugcauccaaauuccagg

SEQ ID NO: 137570 - RNA, 19 nt, Human
cugcauccaaccuccaggu

SEQ ID NO: 137571 - RNA, 18 nt, Human
cugcauccaccuuagcag

SEQ ID NO: 137572 - RNA, 32 nt, Human
cugcauccagccugagcaacagagugagaucu

SEQ ID NO: 137573 - RNA, 20 nt, Human
cugcauccaggcugauggug

SEQ ID NO: 137574 - RNA, 19 nt, Human
cugcauccagggcuuaggu

SEQ ID NO: 137575 - RNA, 32 nt, Human
cugcauccauucucucuuucucuugaugacgc

SEQ ID NO: 137576 - RNA, 32 nt, Human
cugcaucccagagcaagccuagauccuugaaa

SEQ ID NO: 137577 - RNA, 32 nt, Human
cugcaucccauccugaauauccuuugcaacuc

SEQ ID NO: 137578 - RNA, 32 nt, Human
cugcaucccccacaucacccugaagaugacuu

SEQ ID NO: 137579 - RNA, 32 nt, Human
cugcauccccucuccacugagagcuguucuuu

SEQ ID NO: 137580 - RNA, 32 nt, Human
cugcauccggacccucuccccaucccagccuc

SEQ ID NO: 137581 - RNA, 32 nt, Human
cugcauccgggugucuggaggcuguggccguu

SEQ ID NO: 137582 - RNA, 32 nt, Human
cugcauccucaaccuccuggguucagauuauc

SEQ ID NO: 137583 - RNA, 32 nt, Human
cugcauccucaacuuccugggcucaagugauc

SEQ ID NO: 137584 - RNA, 32 nt, Human
cugcauccugaggugauauacuucauauuugu

SEQ ID NO: 137585 - RNA, 16 nt, Human
cugcauccuggccagg

SEQ ID NO: 137586 - RNA, 20 nt, Human
cugcauccugggccaggugc

SEQ ID NO: 137587 - RNA, 32 nt, Human
cugcauccuggggcaucugcugaaaugugagc

SEQ ID NO: 137588 - RNA, 32 nt, Human
cugcauccuucccccaaccacccaccagagga

SEQ ID NO: 137589 - RNA, 32 nt, Human
cugcauccuucuacugcucccuccaggucugg

SEQ ID NO: 137590 - RNA, 32 nt, Human
cugcauccuucucccauuccccaaaguaaagc

SEQ ID NO: 137591 - RNA, 32 nt, Human
cugcauccuuucucuuugggggcccagcuucu

SEQ ID NO: 137592 - RNA, 32 nt, Human
cugcaucgcauccugaagcucagccugccuac

SEQ ID NO: 137593 - RNA, 32 nt, Human
cugcaucguggcggggugucacagacccucug

SEQ ID NO: 137594 - RNA, 31 nt, Human
cugcaucguggcuguggcccugugucagcuc

SEQ ID NO: 137595 - RNA, 32 nt, Human
cugcaucucaacaggcauuuauggcuuuccca

SEQ ID NO: 137596 - RNA, 32 nt, Human
cugcaucucagaggaaugccaacccuacugug

SEQ ID NO: 137597 - RNA, 32 nt, Human
cugcaucucccagaagggaugagucuuugucc

SEQ ID NO: 137598 - RNA, 32 nt, Human
cugcaucucccaggaggaaguggaggggacau

SEQ ID NO: 137599 - RNA, 32 nt, Human
cugcaucuccccucagacuggagcucccugag

SEQ ID NO: 137600 - RNA, 32 nt, Human
cugcaucuccuaggaaccucgggagcggcagc

SEQ ID NO: 137601 - RNA, 32 nt, Human
cugcaucucucuuccugcuucuggccuuguau

SEQ ID NO: 137602 - RNA, 32 nt, Human
cugcaucucugccucaccccauccacugccac

SEQ ID NO: 137603 - RNA, 32 nt, Human
cugcaucugacucucuuuugaggucccuguau

SEQ ID NO: 137604 - RNA, 32 nt, Human
cugcaucugcagcucucgcucugccucuuccu

SEQ ID NO: 137605 - RNA, 32 nt, Human
cugcaucugcccacgauggcagugcagucauc

SEQ ID NO: 137606 - RNA, 32 nt, Human
cugcaucuggaaggacacagguugccagagcc

SEQ ID NO: 137607 - RNA, 32 nt, Human
cugcaucugggggucugaauuuuugggagcag

SEQ ID NO: 137608 - RNA, 32 nt, Human
cugcaucuucccuccaaacuugccuuugcauc

SEQ ID NO: 137609 - RNA, 32 nt, Human
cugcaucuuccucuccuuucccaaggcauccu

SEQ ID NO: 137610 - RNA, 17 nt, Human
cugcaucuugcauggug

SEQ ID NO: 137611 - RNA, 32 nt, Human
cugcaucuuggaggcagggaggugagggcagg

SEQ ID NO: 137612 - RNA, 32 nt, Human
cugcaugaacaacagguaaauaaauuuuagau

SEQ ID NO: 137613 - RNA, 32 nt, Human
cugcaugaccucacguugcuuuccagagcccg

SEQ ID NO: 137614 - RNA, 32 nt, Human
cugcaugauccacacuaaggugugugaauggg

SEQ ID NO: 137615 - RNA, 31 nt, Human
cugcaugauuucucugggcuugcugucuuac

SEQ ID NO: 137616 - RNA, 32 nt, Human
cugcaugauuucuguuuuaucuaccucuaaag

SEQ ID NO: 137617 - RNA, 32 nt, Human
cugcaugcaaacaagaaacgugucacacuugu

SEQ ID NO: 137618 - RNA, 32 nt, Human
cugcaugcacacacauacaccacagccacaca

SEQ ID NO: 137619 - RNA, 32 nt, Human
cugcaugcagacauagacccacccuggacugg

SEQ ID NO: 137620 - RNA, 32 nt, Human
cugcaugcaguggcucaugccuguaaucccaa

SEQ ID NO: 137621 - RNA, 32 nt, Human
cugcaugccagccugggcaacaagagugaaac

SEQ ID NO: 137622 - RNA, 32 nt, Human
cugcaugccagccugggcaacagaacaggacu

SEQ ID NO: 137623 - RNA, 32 nt, Human
cugcaugccagccugggugacaaagcgagacu

SEQ ID NO: 137624 - RNA, 29 nt, Human
cugcaugccaggucguuggagguggcagc

SEQ ID NO: 137625 - RNA, 32 nt, Human
cugcaugcccugucugugccaugagugucccu

SEQ ID NO: 137626 - RNA, 32 nt, Human
cugcaugccugggaaaggccagcacuucaugg

SEQ ID NO: 137627 - RNA, 32 nt, Human
cugcaugccuguucugucugggccacauucac

SEQ ID NO: 137628 - RNA, 32 nt, Human
cugcaugcuacugucuagagcuugucucaaug

SEQ ID NO: 137629 - RNA, 32 nt, Human
cugcaugcuccucugcguggcccagccuucac

SEQ ID NO: 137630 - RNA, 32 nt, Human
cugcaugcuucaauccugaacgucacugacuu

SEQ ID NO: 137631 - RNA, 32 nt, Human
cugcaugcuuuaauuucuucccuuucagcauc

SEQ ID NO: 137632 - RNA, 32 nt, Human
cugcauggaagagagcggcuagcaacuguucc

SEQ ID NO: 137633 - RNA, 32 nt, Human
cugcauggacaccugcucaccccugccucauc

SEQ ID NO: 137634 - RNA, 19 nt, Human
cugcauggaccucugugga

SEQ ID NO: 137635 - RNA, 21 nt, Human
cugcauggcaaugagcaggug

SEQ ID NO: 137636 - RNA, 32 nt, Human
cugcauggcagagagcgcccugccaugagauc

SEQ ID NO: 137637 - RNA, 32 nt, Human
cugcauggcaggcagaggcccagggacacuga

SEQ ID NO: 137638 - RNA, 32 nt, Human
cugcauggcuguagccaucucucuguucugca

SEQ ID NO: 137639 - RNA, 32 nt, Human
cugcaugggaagcacagacagcgcugccucuc

SEQ ID NO: 137640 - RNA, 31 nt, Human
cugcaugggacaaucgcaggcagauacgagg

SEQ ID NO: 137641 - RNA, 32 nt, Human
cugcaugggcacugcccagacaugcacuguug

SEQ ID NO: 137642 - RNA, 32 nt, Human
cugcauggggaggcggcggcagcggguggacc

SEQ ID NO: 137643 - RNA, 32 nt, Human
cugcauggggauccaaccaauucaauuaaugu

SEQ ID NO: 137644 - RNA, 32 nt, Human
cugcaugggucucgcugggagcugcagacugg

SEQ ID NO: 137645 - RNA, 32 nt, Human
cugcaugggugaggggacacccugggccucuc

SEQ ID NO: 137646 - RNA, 32 nt, Human
cugcauguaauauuacagccuggggcggcgaa

SEQ ID NO: 137647 - RNA, 32 nt, Human
cugcauguaccuccucccuuucucauuuccaa

SEQ ID NO: 137648 - RNA, 32 nt, Human
cugcauguacuugcacacagguccccacagau

SEQ ID NO: 137649 - RNA, 31 nt, Human
cugcauguccccacugggccugagucuagcc

SEQ ID NO: 137650 - RNA, 32 nt, Human
cugcaugucccgaugccugauggagauggagg

SEQ ID NO: 137651 - RNA, 32 nt, Human
cugcaugucuaagugcuagacaugcucagcuu

SEQ ID NO: 137652 - RNA, 32 nt, Human
cugcaugucuccauucuucucugucucugucu

SEQ ID NO: 137653 - RNA, 32 nt, Human
cugcaugugggugccagaggccagcucucccc

SEQ ID NO: 137654 - RNA, 32 nt, Human
cugcauguucucucuguuguuggagccuggag

SEQ ID NO: 137655 - RNA, 32 nt, Human
cugcauguuuccauccuguuugccucuuuuau

SEQ ID NO: 137656 - RNA, 32 nt, Human
cugcauguuucuaggucuucugccaagugcuu

SEQ ID NO: 137657 - RNA, 20 nt, Human
cugcauguuugaaucaggug

SEQ ID NO: 137658 - RNA, 32 nt, Human
cugcauguuugcuguuccacaaagcaguggcu

SEQ ID NO: 137659 - RNA, 32 nt, Human
cugcauguuuuccaggguguagccuacagaca

SEQ ID NO: 137660 - RNA, 32 nt, Human
cugcauuaaaauggguuucacugugaaugcgu

SEQ ID NO: 137661 - RNA, 32 nt, Human
cugcauuaaaugaaguuucaggguaagguauu

SEQ ID NO: 137662 - RNA, 32 nt, Human
cugcauuaaauggaagggagacaugaaauuga

SEQ ID NO: 137663 - RNA, 23 nt, Human
cugcauuacucagaguucacuga

SEQ ID NO: 137664 - RNA, 32 nt, Human
cugcauuaugaaagucaacagcucuuuccccu

SEQ ID NO: 137665 - RNA, 19 nt, Human
cugcauuauucuugucucc

SEQ ID NO: 137666 - RNA, 32 nt, Human
cugcauucaagugcccugcuacaauucuggcu

SEQ ID NO: 137667 - RNA, 32 nt, Human
cugcauucagcccucucuaggacgcagcagcc

SEQ ID NO: 137668 - RNA, 32 nt, Human
cugcauucagccugagcaacagaucaagacac

SEQ ID NO: 137669 - RNA, 32 nt, Human
cugcauucauuuccuccagucucacagauccu

SEQ ID NO: 137670 - RNA, 21 nt, Human
cugcauuccagaccccaucuc

SEQ ID NO: 137671 - RNA, 32 nt, Human
cugcauuccagccuggacgacagagcgagacu

SEQ ID NO: 137672 - RNA, 32 nt, Human
cugcauuccagccuggauaauagagugagacc

SEQ ID NO: 137673 - RNA, 32 nt, Human
cugcauuccagccuggcgacagagugagacuc

SEQ ID NO: 137674 - RNA, 32 nt, Human
cugcauuccagccugggcaacagagcgagacu

SEQ ID NO: 137675 - RNA, 32 nt, Human
cugcauuccagccugggcaacagcgugagacu

SEQ ID NO: 137676 - RNA, 32 nt, Human
cugcauuccagccugggcgacagagugagacc

SEQ ID NO: 137677 - RNA, 32 nt, Human
cugcauuccagccugggcgccgagauagcgcc

SEQ ID NO: 137678 - RNA, 32 nt, Human
cugcauuccagccugggugacagagcgagacc

SEQ ID NO: 137679 - RNA, 32 nt, Human
cugcauuccagccugggugacagagcgagacu

SEQ ID NO: 137680 - RNA, 32 nt, Human
cugcauuccagccugggugacagagugagacc

SEQ ID NO: 137681 - RNA, 32 nt, Human
cugcauuccagccugggugacagagugagacu

SEQ ID NO: 137682 - RNA, 32 nt, Human
cugcauuccagccugggugacagagugagauc

SEQ ID NO: 137683 - RNA, 32 nt, Human
cugcauuccagccugggugacugagcgagacu

SEQ ID NO: 137684 - RNA, 32 nt, Human
cugcauuccagccuggugacagagcgagacuc

SEQ ID NO: 137685 - RNA, 32 nt, Human
cugcauuccagccugguugacagagugagacu

SEQ ID NO: 137686 - RNA, 21 nt, Human
cugcauucccacgccauccca

SEQ ID NO: 137687 - RNA, 32 nt, Human
cugcauuccccaucccacccccggcuggacug

SEQ ID NO: 137688 - RNA, 32 nt, Human
cugcauucccugcccaccuucucccuccagca

SEQ ID NO: 137689 - RNA, 18 nt, Human
cugcauucgccucggcua

SEQ ID NO: 137690 - RNA, 32 nt, Human
cugcauucggcagagcuccagugagcaaggca

SEQ ID NO: 137691 - RNA, 32 nt, Human
cugcauucucagaucuaugaauauuuuuguca

SEQ ID NO: 137692 - RNA, 21 nt, Human
cugcauucugaagagcaggug

SEQ ID NO: 137693 - RNA, 32 nt, Human
cugcauucugcacacagcaucugcucccaucc

SEQ ID NO: 137694 - RNA, 32 nt, Human
cugcauucuuaccauccuucucucacaaauuu

SEQ ID NO: 137695 - RNA, 32 nt, Human
cugcauucuuuggauuccuucagucuaugguu

SEQ ID NO: 137696 - RNA, 32 nt, Human
cugcauugaacaguccuguggaaaggccaagc

SEQ ID NO: 137697 - RNA, 32 nt, Human
cugcauugagccaguccucucagcagcuccca

SEQ ID NO: 137698 - RNA, 32 nt, Human
cugcauugcaccacagcacugcagccuagaca

SEQ ID NO: 137699 - RNA, 32 nt, Human
cugcauugcgaauggacuaaagccacugauuu

SEQ ID NO: 137700 - RNA, 32 nt, Human
cugcauugcugcaguuuccaccacucuuauac

SEQ ID NO: 137701 - RNA, 32 nt, Human
cugcauugcugcccuggcuauggucacagaga

SEQ ID NO: 137702 - RNA, 32 nt, Human
cugcauugcuuguuguugcgcuucggaggcgg

SEQ ID NO: 137703 - RNA, 32 nt, Human
cugcauuggccuggccuccagcucccacuccc

SEQ ID NO: 137704 - RNA, 32 nt, Human
cugcauugggcagaggaagcugugcaacgggg

SEQ ID NO: 137705 - RNA, 32 nt, Human
cugcauuggucucacugggagcugcagaccgg

SEQ ID NO: 137706 - RNA, 32 nt, Human
cugcauugucaugacauuuccaacacugugug

SEQ ID NO: 137707 - RNA, 32 nt, Human
cugcauuguggagcaugcgggggaagagaacu

SEQ ID NO: 137708 - RNA, 32 nt, Human
cugcauuguggagcaugugggggaagagaacu

SEQ ID NO: 137709 - RNA, 23 nt, Human
cugcauuguuggaugacaacucu

SEQ ID NO: 137710 - RNA, 32 nt, Human
cugcauuucacacuccuccaccugucucaaac

SEQ ID NO: 137711 - RNA, 32 nt, Human
cugcauuucccacaugacuuucuggaagccuc

SEQ ID NO: 137712 - RNA, 32 nt, Human
cugcauuuccccaaggaggcgggugcggucuu

SEQ ID NO: 137713 - RNA, 32 nt, Human
cugcauuuccugcccguugcagggggcaagcc

SEQ ID NO: 137714 - RNA, 32 nt, Human
cugcauuucucuucucagcucuuccaugaugg

SEQ ID NO: 137715 - RNA, 32 nt, Human
cugcauuucuggguuucuuguguggauuuuaa

SEQ ID NO: 137716 - RNA, 32 nt, Human
cugcauuucuucauaucaaccccacacuauag

SEQ ID NO: 137717 - RNA, 19 nt, Human
cugcauuucuuggguccuu

SEQ ID NO: 137718 - RNA, 32 nt, Human
cugcauuugaacugagaagaagaaauauuaaa

SEQ ID NO: 137719 - RNA, 32 nt, Human
cugcauuugccuggcccugaucucgccugucc

SEQ ID NO: 137720 - RNA, 32 nt, Human
cugcauuuggucugcugaucauguugccauaa

SEQ ID NO: 137721 - RNA, 32 nt, Human
cugcauuugucucagaacauuuccuuggcugg

SEQ ID NO: 137722 - RNA, 32 nt, Human
cugcauuugugugucugugcaugggccugggu

SEQ ID NO: 137723 - RNA, 21 nt, Human
cugcauuuguuuauagcaggu

SEQ ID NO: 137724 - RNA, 32 nt, Human
cugcauuuuccaaggcugauucguguagcuac

SEQ ID NO: 137725 - RNA, 32 nt, Human
cugcauuuucuccccucucccucccuccuucu

SEQ ID NO: 137726 - RNA, 32 nt, Human
cugcauuuucucuuccaaaaaggaaagguucu

SEQ ID NO: 137727 - RNA, 32 nt, Human
cugcauuuucugggucuuaagacauggaaauc

SEQ ID NO: 137728 - RNA, 32 nt, Human
cugccaaaaagugggggcuguacuggggacug

SEQ ID NO: 137729 - RNA, 32 nt, Human
cugccaaaaauacaaaaauuagcugggcuucg

SEQ ID NO: 137730 - RNA, 32 nt, Human
cugccaaaaauacaaaaguuagccgggcguag

SEQ ID NO: 137731 - RNA, 19 nt, Human
cugccaaacacccaugccc

SEQ ID NO: 137732 - RNA, 32 nt, Human
cugccaaacuaaauacuccacuuuaaaauacg

SEQ ID NO: 137733 - RNA, 32 nt, Human
cugccaaacugcugggauuauaggcgugagcc

SEQ ID NO: 137734 - RNA, 32 nt, Human
cugccaaagcgacuucuucacucacacugaua

SEQ ID NO: 137735 - RNA, 32 nt, Human
cugccaaagcuuguaaguccucccgacggcca

SEQ ID NO: 137736 - RNA, 32 nt, Human
cugccaaagugcugagauuacaggcgugagcc

SEQ ID NO: 137737 - RNA, 32 nt, Human
cugccaaagugcugggauuacaggcuugagcu

SEQ ID NO: 137738 - RNA, 32 nt, Human
cugccaaagugcugggauuacuggcgugagcc

SEQ ID NO: 137739 - RNA, 32 nt, Human
cugccaaauauaguaaccaguaaccacagcua

SEQ ID NO: 137740 - RNA, 32 nt, Human
cugccaaaugauuuuuguucuuuuaugugcgu

SEQ ID NO: 137741 - RNA, 25 nt, Human
cugccaaaugcuauacugugucaug

SEQ ID NO: 137742 - RNA, 32 nt, Human
cugccaaaugcuauacugugucauggugaugc

SEQ ID NO: 137743 - RNA, 32 nt, Human
cugccaacacccugcacuccugcuugcgccgg

SEQ ID NO: 137744 - RNA, 32 nt, Human
cugccaacacccugcuggccucuuguggagcc

SEQ ID NO: 137745 - RNA, 32 nt, Human
cugccaacacugcggccugcagccuggaccug

SEQ ID NO: 137746 - RNA, 23 nt, Human
cugccaacauggugaaacccugu

SEQ ID NO: 137747 - RNA, 18 nt, Human
cugccaacauuucccuuc

SEQ ID NO: 137748 - RNA, 20 nt, Human
cugccaaccacccgucacca

SEQ ID NO: 137749 - RNA, 32 nt, Human
cugccaaccagcucuaccugacuccugcugca

SEQ ID NO: 137750 - RNA, 32 nt, Human
cugccaacccagggcaguguuggggccggagg

SEQ ID NO: 137751 - RNA, 18 nt, Human
cugccaaccuguucucca

SEQ ID NO: 137752 - RNA, 32 nt, Human
cugccaacugcacucggguacuggugugacau

SEQ ID NO: 137753 - RNA, 32 nt, Human
cugccaagaacagcaucuccccagcccucauc

SEQ ID NO: 137754 - RNA, 32 nt, Human
cugccaagaagacacagugagagggguccaca

SEQ ID NO: 137755 - RNA, 32 nt, Human
cugccaagaagcggaaaacuaccuagguccaa

SEQ ID NO: 137756 - RNA, 32 nt, Human
cugccaagaccugacuugacacuacugcuccc

SEQ ID NO: 137757 - RNA, 24 nt, Human
cugccaagaccuuugcucacugcc

SEQ ID NO: 137758 - RNA, 21 nt, Human
cugccaagaggaauccagcaa

SEQ ID NO: 137759 - RNA, 32 nt, Human
cugccaagaggcacccccuuccccagccucuc

SEQ ID NO: 137760 - RNA, 32 nt, Human
cugccaagaucucagucuucuuuccaccaaug

SEQ ID NO: 137761 - RNA, 18 nt, Human
cugccaagcccugggcca

SEQ ID NO: 137762 - RNA, 18 nt, Human
cugccaagcugccucugg

SEQ ID NO: 137763 - RNA, 32 nt, Human
cugccaaggagccuauccgaauuuguaaggug

SEQ ID NO: 137764 - RNA, 32 nt, Human
cugccaaggagccuaucugaauuuguaaggug

SEQ ID NO: 137765 - RNA, 32 nt, Human
cugccaaggaggagggagagcggcgggagggg

SEQ ID NO: 137766 - RNA, 32 nt, Human
cugccaaggagugcggggguggcaaugaaaca

SEQ ID NO: 137767 - RNA, 20 nt, Human
cugccaaggcaccaucucca

SEQ ID NO: 137768 - RNA, 32 nt, Human
cugccaaggcagcaguggugcuguggaugggc

SEQ ID NO: 137769 - RNA, 18 nt, Human
cugccaaggccauugcca

SEQ ID NO: 137770 - RNA, 22 nt, Human
cugccaaggcugcccuggcgcu

SEQ ID NO: 137771 - RNA, 32 nt, Human
cugccaagggcugcugcuucuuacuauucugc

SEQ ID NO: 137772 - RNA, 32 nt, Human
cugccaagguaguuuucuugcauuuugcucuc

SEQ ID NO: 137773 - RNA, 32 nt, Human
cugccaagguuucugaguuugcauuagacugu

SEQ ID NO: 137774 - RNA, 32 nt, Human
cugccaagguuuuggaauuacaggugugagcc

SEQ ID NO: 137775 - RNA, 23 nt, Human
cugccaaguagcugggauuacag

SEQ ID NO: 137776 - RNA, 32 nt, Human
cugccaaguagcugggauuacagacaggcaug

SEQ ID NO: 137777 - RNA, 24 nt, Human
cugccaaguagcugggauuacagg

SEQ ID NO: 137778 - RNA, 32 nt, Human
cugccaaguagcugggauuacaggcaugcgcc

SEQ ID NO: 137779 - RNA, 32 nt, Human
cugccaagucccucuugggcagcugggcugag

SEQ ID NO: 137780 - RNA, 32 nt, Human
cugccaaguuuggcuagcagguucagacaaca

SEQ ID NO: 137781 - RNA, 32 nt, Human
cugccaauccacccuucuccucccgcgcaagg

SEQ ID NO: 137782 - RNA, 32 nt, Human
cugccaauccugcgagggucuaggccccuuua

SEQ ID NO: 137783 - RNA, 19 nt, Human
cugccaaugauccugcagg

SEQ ID NO: 137784 - RNA, 32 nt, Human
cugccaaugcuuucucauuuggacccagacuc

SEQ ID NO: 137785 - RNA, 32 nt, Human
cugccaauggacuaacuugucuuuggacccug

SEQ ID NO: 137786 - RNA, 32 nt, Human
cugccaaugugaggacagaaggacuggugcga

SEQ ID NO: 137787 - RNA, 32 nt, Human
cugccaauucacaaccagaugacccauuuuac

SEQ ID NO: 137788 - RNA, 32 nt, Human
cugccacaaaggccaugaugagagucaaugga

SEQ ID NO: 137789 - RNA, 18 nt, Human
cugccacaacaccagccc

SEQ ID NO: 137790 - RNA, 32 nt, Human
cugccacaacaccagccccacuucugggucau

SEQ ID NO: 137791 - RNA, 32 nt, Human
cugccacaaggaauaauugagcacucauucag

SEQ ID NO: 137792 - RNA, 32 nt, Human
cugccacaaucagcaugguuguauagugcccc

SEQ ID NO: 137793 - RNA, 32 nt, Human
cugccacaaugagccugggcaaguacaagggc

SEQ ID NO: 137794 - RNA, 23 nt, Human
cugccacaauugcuuugauuauu

SEQ ID NO: 137795 - RNA, 32 nt, Human
cugccacacacucccagcucacccucacccca

SEQ ID NO: 137796 - RNA, 32 nt, Human
cugccacacaguaguacugggcccuccuuugu

SEQ ID NO: 137797 - RNA, 32 nt, Human
cugccacacaugcucaucccaaaagcuagagg

SEQ ID NO: 137798 - RNA, 32 nt, Human
cugccacacccagcuaauacagucuuucuacu

SEQ ID NO: 137799 - RNA, 32 nt, Human
cugccacacgcagcucagccugggcggcacag

SEQ ID NO: 137800 - RNA, 32 nt, Human
cugccacacuaagcucuguacaagcaugcacc

SEQ ID NO: 137801 - RNA, 32 nt, Human
cugccacacucugcuuucuuccugccauggac

SEQ ID NO: 137802 - RNA, 21 nt, Human
cugccacagacacuucagcca

SEQ ID NO: 137803 - RNA, 32 nt, Human
cugccacagacacuucuccugccuucccaccc

SEQ ID NO: 137804 - RNA, 32 nt, Human
cugccacagacagcuacccccagaagggucaa

SEQ ID NO: 137805 - RNA, 18 nt, Human
cugccacagcaccaugcc

SEQ ID NO: 137806 - RNA, 32 nt, Human
cugccacagcacucgcagcuucucccaagugc

SEQ ID NO: 137807 - RNA, 20 nt, Human
cugccacagccaacaugccc

SEQ ID NO: 137808 - RNA, 32 nt, Human
cugccacagcugcucaccuugucuggcaaacu

SEQ ID NO: 137809 - RNA, 32 nt, Human
cugccacagggcauuguuccagccuuggcugc

SEQ ID NO: 137810 - RNA, 32 nt, Human
cugccacaggggcucacggcccugccaggagu

SEQ ID NO: 137811 - RNA, 32 nt, Human
cugccacagggucaaaggagguuuucgaucag

SEQ ID NO: 137812 - RNA, 32 nt, Human
cugccacaucccacacucccacugccuggcuc

SEQ ID NO: 137813 - RNA, 32 nt, Human
cugccaccaaccaggacacagcagccaccgua

SEQ ID NO: 137814 - RNA, 32 nt, Human
cugccaccacagcugcuuaugugugaccgaug

SEQ ID NO: 137815 - RNA, 32 nt, Human
cugccaccaccagccacccacacccaccccag

SEQ ID NO: 137816 - RNA, 20 nt, Human
cugccaccacccucucucua

SEQ ID NO: 137817 - RNA, 19 nt, Human
cugccaccacccugucuuc

SEQ ID NO: 137818 - RNA, 19 nt, Human
cugccaccaccgggccaug

SEQ ID NO: 137819 - RNA, 21 nt, Human
cugccaccaccucaccuucau

SEQ ID NO: 137820 - RNA, 18 nt, Human
cugccaccaccuuugucu

SEQ ID NO: 137821 - RNA, 21 nt, Human
cugccaccacgacugcugcca

SEQ ID NO: 137822 - RNA, 32 nt, Human
cugccaccagaggugaggagucucuugucacu

SEQ ID NO: 137823 - RNA, 19 nt, Human
cugccaccagaguccacau

SEQ ID NO: 137824 - RNA, 32 nt, Human
cugccaccauccugcugcuguguuuuugcuau

SEQ ID NO: 137825 - RNA, 24 nt, Human
cugccacccaagcuggagugcagu

SEQ ID NO: 137826 - RNA, 32 nt, Human
cugccacccaagcuggagugcaguggcacgau

SEQ ID NO: 137827 - RNA, 18 nt, Human
cugccacccacauuccca

SEQ ID NO: 137828 - RNA, 20 nt, Human
cugccacccaccuccuccau

SEQ ID NO: 137829 - RNA, 32 nt, Human
cugccacccaggcugcguccaacagccuguga

SEQ ID NO: 137830 - RNA, 24 nt, Human
cugccacccaggcuggaguacagu

SEQ ID NO: 137831 - RNA, 32 nt, Human
cugccacccaggcuggaguacaguggcaugau

SEQ ID NO: 137832 - RNA, 24 nt, Human
cugccacccaggcuggaguccagu

SEQ ID NO: 137833 - RNA, 32 nt, Human
cugccacccaggcuggaguccaguggcgugau

SEQ ID NO: 137834 - RNA, 32 nt, Human
cugccacccaggcuggagugcaguggugcaau

SEQ ID NO: 137835 - RNA, 20 nt, Human
cugccaccccauuccuccau

SEQ ID NO: 137836 - RNA, 19 nt, Human
cugccacccccgcgcucca

SEQ ID NO: 137837 - RNA, 18 nt, Human
cugccaccccgaucuuca

SEQ ID NO: 137838 - RNA, 32 nt, Human
cugccaccccgcggauaccaugucgaaggcgg

SEQ ID NO: 137839 - RNA, 18 nt, Human
cugccaccccuaucuccg

SEQ ID NO: 137840 - RNA, 32 nt, Human
cugccaccccucuucugcuccuuagacaccug

SEQ ID NO: 137841 - RNA, 32 nt, Human
cugccaccccuucacgagcugcuccuugagcc

SEQ ID NO: 137842 - RNA, 31 nt, Human
cugccacccucccuccugccugugucccagu

SEQ ID NO: 137843 - RNA, 32 nt, Human
cugccacccugcaacccacccucccagccaag

SEQ ID NO: 137844 - RNA, 32 nt, Human
cugccacccugccgcccugccgcccugccgcc

SEQ ID NO: 137845 - RNA, 32 nt, Human
cugccacccuggcagaugacucacuguggggg

SEQ ID NO: 137846 - RNA, 32 nt, Human
cugccacccuggcugccacugccccucuggga

SEQ ID NO: 137847 - RNA, 32 nt, Human
cugccacccugggauuugcugggcuggaguuc

SEQ ID NO: 137848 - RNA, 19 nt, Human
cugccaccgagaucugcau

SEQ ID NO: 137849 - RNA, 24 nt, Human
cugccaccgaggcuggagugcagu

SEQ ID NO: 137850 - RNA, 22 nt, Human
cugccaccgagugcuaggccca

SEQ ID NO: 137851 - RNA, 28 nt, Human
cugccaccgccgccgccucugcugccgc

SEQ ID NO: 137852 - RNA, 19 nt, Human
cugccaccgccuccuccau

SEQ ID NO: 137853 - RNA, 19 nt, Human
cugccaccgccuuugccau

SEQ ID NO: 137854 - RNA, 21 nt, Human
cugccaccguuggaagccaug

SEQ ID NO: 137855 - RNA, 32 nt, Human
cugccaccuacagucaggccacaugccugguc

SEQ ID NO: 137856 - RNA, 32 nt, Human
cugccaccuaggcagggugauggcuuuguugu

SEQ ID NO: 137857 - RNA, 18 nt, Human
cugccaccuauugcccug

SEQ ID NO: 137858 - RNA, 32 nt, Human
cugccaccucagacugacacacagccagcugg

SEQ ID NO: 137859 - RNA, 18 nt, Human
cugccaccucaguuccau

SEQ ID NO: 137860 - RNA, 32 nt, Human
cugccaccuccaugugacaaguuugacaccug

SEQ ID NO: 137861 - RNA, 21 nt, Human
cugccaccucccuugucccca

SEQ ID NO: 137862 - RNA, 19 nt, Human
cugccaccuccucgggcca

SEQ ID NO: 137863 - RNA, 32 nt, Human
cugccaccuccucugcuggucgggcugggacc

SEQ ID NO: 137864 - RNA, 32 nt, Human
cugccaccucuccugggccuguguccuuucug

SEQ ID NO: 137865 - RNA, 32 nt, Human
cugccaccucucggacuccagcuugauggagu

SEQ ID NO: 137866 - RNA, 18 nt, Human
cugccaccucugcuucca

SEQ ID NO: 137867 - RNA, 19 nt, Human
cugccaccucuguccacau

SEQ ID NO: 137868 - RNA, 18 nt, Human
cugccaccucuguccuca

SEQ ID NO: 137869 - RNA, 32 nt, Human
cugccaccugccuggcuucacccuccaaggcc

SEQ ID NO: 137870 - RNA, 32 nt, Human
cugccaccuuauuccuccucuccauccagccc

SEQ ID NO: 137871 - RNA, 32 nt, Human
cugccaccuuuggagcuccggagcugcagcca

SEQ ID NO: 137872 - RNA, 32 nt, Human
cugccacgagccacugcacaggaggcuaucug

SEQ ID NO: 137873 - RNA, 32 nt, Human
cugccacgagcugagucaggagagcuuagggg

SEQ ID NO: 137874 - RNA, 32 nt, Human
cugccacgauguugcugcucagccugacccua

SEQ ID NO: 137875 - RNA, 18 nt, Human
cugccacgccccggacca

SEQ ID NO: 137876 - RNA, 32 nt, Human
cugccacgcuggcugcucagagcuccucgcuu

SEQ ID NO: 137877 - RNA, 32 nt, Human
cugccacgcuguggcccugccuggcuaguccc

SEQ ID NO: 137878 - RNA, 32 nt, Human
cugccacgucacuuggagaguguguguuggga

SEQ ID NO: 137879 - RNA, 32 nt, Human
cugccacguccauaguucugaggucccugugu

SEQ ID NO: 137880 - RNA, 32 nt, Human
cugccacgucuguugcuauuugcccaccaaua

SEQ ID NO: 137881 - RNA, 18 nt, Human
cugccacuaccccgaguc

SEQ ID NO: 137882 - RNA, 32 nt, Human
cugccacuauauuuuacuucuuugccaucagc

SEQ ID NO: 137883 - RNA, 32 nt, Human
cugccacuccacacuccagcacagggcuggga

SEQ ID NO: 137884 - RNA, 32 nt, Human
cugccacuccacccuuugugucgccgcagccc

SEQ ID NO: 137885 - RNA, 32 nt, Human
cugccacuccacuccaggugggccacuccaag

SEQ ID NO: 137886 - RNA, 20 nt, Human
cugccacuccccugccucca

SEQ ID NO: 137887 - RNA, 17 nt, Human
cugccacucccugagcu

SEQ ID NO: 137888 - RNA, 20 nt, Human
cugccacuccuauccuccau

SEQ ID NO: 137889 - RNA, 32 nt, Human
cugccacuccugacagggugaccuuggguauu

SEQ ID NO: 137890 - RNA, 20 nt, Human
cugccacucuacccugagcu

SEQ ID NO: 137891 - RNA, 32 nt, Human
cugccacucucucuaguuccuuccucaggugc

SEQ ID NO: 137892 - RNA, 32 nt, Human
cugccacucugggcugcuccagccugcaacuu

SEQ ID NO: 137893 - RNA, 32 nt, Human
cugccacucuguucccacaccuggcucaaggu

SEQ ID NO: 137894 - RNA, 20 nt, Human
cugccacucuugacauucca

SEQ ID NO: 137895 - RNA, 20 nt, Human
cugccacugaccugcuccau

SEQ ID NO: 137896 - RNA, 32 nt, Human
cugccacugaggaaacaggucaugaaggugga

SEQ ID NO: 137897 - RNA, 32 nt, Human
cugccacugcaacucugcacguccaggaggga

SEQ ID NO: 137898 - RNA, 32 nt, Human
cugccacugcacuccagccuggcgacagagca

SEQ ID NO: 137899 - RNA, 32 nt, Human
cugccacugcacuccagccugggcaacagagc

SEQ ID NO: 137900 - RNA, 32 nt, Human
cugccacugcacuccagccugggcaacagagu

SEQ ID NO: 137901 - RNA, 32 nt, Human
cugccacugcacuccagccugggcgacagcgu

SEQ ID NO: 137902 - RNA, 32 nt, Human
cugccacugcacuccagccugugccacagagg

SEQ ID NO: 137903 - RNA, 18 nt, Human
cugccacugcauguccca

SEQ ID NO: 137904 - RNA, 32 nt, Human
cugccacugccagcaaccaaagaagccaccug

SEQ ID NO: 137905 - RNA, 32 nt, Human
cugccacugcccaccgccucuucuccaucuga

SEQ ID NO: 137906 - RNA, 19 nt, Human
cugccacugcccuggggcg

SEQ ID NO: 137907 - RNA, 32 nt, Human
cugccacugcuggcugcccauugcuguggaug

SEQ ID NO: 137908 - RNA, 17 nt, Human
cugccacugucccggcc

SEQ ID NO: 137909 - RNA, 32 nt, Human
cugccacuguccugaagaugugaauggguggu

SEQ ID NO: 137910 - RNA, 32 nt, Human
cugccacugugcuaauggaagcaccacggcag

SEQ ID NO: 137911 - RNA, 21 nt, Human
cugccacuguguuugcuccau

SEQ ID NO: 137912 - RNA, 32 nt, Human
cugccacuuccuccuguuggacugccugagag

SEQ ID NO: 137913 - RNA, 18 nt, Human
cugccacuucugccucca

SEQ ID NO: 137914 - RNA, 32 nt, Human
cugccacuugcucuccucagaguuggcuuuug

SEQ ID NO: 137915 - RNA, 32 nt, Human
cugccacuugcuggaucuugguugcagaccuu

SEQ ID NO: 137916 - RNA, 21 nt, Human
cugccacuugcuugucugcau

SEQ ID NO: 137917 - RNA, 18 nt, Human
cugccacuuuccgggcca

SEQ ID NO: 137918 - RNA, 32 nt, Human
cugccacuuuucaauucugucagugcuuccac

SEQ ID NO: 137919 - RNA, 32 nt, Human
cugccagaauguuuguaucaggcugaugcugg

SEQ ID NO: 137920 - RNA, 32 nt, Human
cugccagaccuccuuccugaccucugaggcag

SEQ ID NO: 137921 - RNA, 32 nt, Human
cugccagaccucuucuggaggaagacuggaca

SEQ ID NO: 137922 - RNA, 32 nt, Human
cugccagacuauucccacagugcuccaaaugc

SEQ ID NO: 137923 - RNA, 32 nt, Human
cugccagagaagcaggaggaggauggagagaa

SEQ ID NO: 137924 - RNA, 31 nt, Human
cugccagagagaccugcugccggagagaagg

SEQ ID NO: 137925 - RNA, 19 nt, Human
cugccagagaugccugggu

SEQ ID NO: 137926 - RNA, 19 nt, Human
cugccagagcagccugggu

SEQ ID NO: 137927 - RNA, 32 nt, Human
cugccagagcagguggggaaaaagaggagaag

SEQ ID NO: 137928 - RNA, 32 nt, Human
cugccagaggaggcagcgggauuguaguggcg

SEQ ID NO: 137929 - RNA, 32 nt, Human
cugccagaggcccagccccagaacucagagaa

SEQ ID NO: 137930 - RNA, 32 nt, Human
cugccagaguccauggcugcacugcugcccag

SEQ ID NO: 137931 - RNA, 32 nt, Human
cugccagauuacagaugguucacuacaguuga

SEQ ID NO: 137932 - RNA, 30 nt, Human
cugccagauugcaacagaaagacuagcccu

SEQ ID NO: 137933 - RNA, 32 nt, Human
cugccagcacaucugcggggaccaggggugcu

SEQ ID NO: 137934 - RNA, 32 nt, Human
cugccagcaccaccaccucaggcuccagucag

SEQ ID NO: 137935 - RNA, 18 nt, Human
cugccagcaccuugcucc

SEQ ID NO: 137936 - RNA, 32 nt, Human
cugccagcagaggcucuuccuguucauccgcc

SEQ ID NO: 137937 - RNA, 21 nt, Human
cugccagcagcuccggcgcca

SEQ ID NO: 137938 - RNA, 32 nt, Human
cugccagcaggcggaugugggguguggggcag

SEQ ID NO: 137939 - RNA, 19 nt, Human
cugccagcagugauguccc

SEQ ID NO: 137940 - RNA, 32 nt, Human
cugccagcaguggaaaugccagacgcuuauaa

SEQ ID NO: 137941 - RNA, 32 nt, Human
cugccagcaucuuugcucuccaccuccugccu

SEQ ID NO: 137942 - RNA, 32 nt, Human
cugccagcauuucccuuccuuccucuccuguc

SEQ ID NO: 137943 - RNA, 32 nt, Human
cugccagccagacuggagugcauuggcgagau

SEQ ID NO: 137944 - RNA, 32 nt, Human
cugccagccagccugucccaccacagcgggcu

SEQ ID NO: 137945 - RNA, 24 nt, Human
cugccagccaggcuggagugcagu

SEQ ID NO: 137946 - RNA, 32 nt, Human
cugccagccaggcuggagugcaguggcaugau

SEQ ID NO: 137947 - RNA, 32 nt, Human
cugccagccauaggcccugccuccagugucag

SEQ ID NO: 137948 - RNA, 32 nt, Human
cugccagcccagggggugguguguaaaucuuc

SEQ ID NO: 137949 - RNA, 32 nt, Human
cugccagccccggcguccuggagcugggggcu

SEQ ID NO: 137950 - RNA, 32 nt, Human
cugccagcccggccuggccacaggugaggucu

SEQ ID NO: 137951 - RNA, 32 nt, Human
cugccagcccucucuuugugcauuagcaacag

SEQ ID NO: 137952 - RNA, 32 nt, Human
cugccagccuaaaacaggaaggcugcagaaag

SEQ ID NO: 137953 - RNA, 32 nt, Human
cugccagccucaccugccgcucaggccucaga

SEQ ID NO: 137954 - RNA, 24 nt, Human
cugccagccuccagguccccgugg

SEQ ID NO: 137955 - RNA, 19 nt, Human
cugccagccuccuaccuca

SEQ ID NO: 137956 - RNA, 32 nt, Human
cugccagccucucauuucuucucccuccacuu

SEQ ID NO: 137957 - RNA, 32 nt, Human
cugccagccuggcugcuacugcccaccaggcc

SEQ ID NO: 137958 - RNA, 19 nt, Human
cugccagccuggggucccu

SEQ ID NO: 137959 - RNA, 32 nt, Human
cugccagccuucuuccuugcucugcgcuggga

SEQ ID NO: 137960 - RNA, 18 nt, Human
cugccagcgcccugcagg

SEQ ID NO: 137961 - RNA, 24 nt, Human
cugccagcgggucgcaccgggcua

SEQ ID NO: 137962 - RNA, 20 nt, Human
cugccagcgucucacugcca

SEQ ID NO: 137963 - RNA, 32 nt, Human
cugccagcgugagggcaagaccccagagccuu

SEQ ID NO: 137964 - RNA, 32 nt, Human
cugccagcuaccucugugaacugaggggagcc

SEQ ID NO: 137965 - RNA, 32 nt, Human
cugccagcuccaccacuuccucccagagcggc

SEQ ID NO: 137966 - RNA, 18 nt, Human
cugccagcuccccugagu

SEQ ID NO: 137967 - RNA, 18 nt, Human
cugccagcucccugcaag

SEQ ID NO: 137968 - RNA, 18 nt, Human
cugccagcucccuggguc

SEQ ID NO: 137969 - RNA, 17 nt, Human
cugccagcuccugagcu

SEQ ID NO: 137970 - RNA, 32 nt, Human
cugccagcugagcucugucaccagggguacuc

SEQ ID NO: 137971 - RNA, 18 nt, Human
cugccagcugcccugggu

SEQ ID NO: 137972 - RNA, 18 nt, Human
cugccagcugcucccgag

SEQ ID NO: 137973 - RNA, 32 nt, Human
cugccagcuggccuggggauucugaguggugu

SEQ ID NO: 137974 - RNA, 32 nt, Human
cugccagcuggugagggcagaggcagaccugg

SEQ ID NO: 137975 - RNA, 32 nt, Human
cugccagcuguugcagacucugccuggggaac

SEQ ID NO: 137976 - RNA, 17 nt, Human
cugccagcuuccugcaa

SEQ ID NO: 137977 - RNA, 32 nt, Human
cugccaggaagaggaggggaggaggaggagga

SEQ ID NO: 137978 - RNA, 30 nt, Human
cugccaggaagccaagcccuacagugcaga

SEQ ID NO: 137979 - RNA, 32 nt, Human
cugccaggaauuuggcugcuaaccucacacag

SEQ ID NO: 137980 - RNA, 32 nt, Human
cugccaggagccaagagcaugccuucaugccc

SEQ ID NO: 137981 - RNA, 32 nt, Human
cugccaggagccaaggccuagguguguggagc

SEQ ID NO: 137982 - RNA, 32 nt, Human
cugccaggagcugagggcaccacccagcaacc

SEQ ID NO: 137983 - RNA, 32 nt, Human
cugccaggaggacuuggccacccggcccuguc

SEQ ID NO: 137984 - RNA, 19 nt, Human
cugccaggaggcccugcca

SEQ ID NO: 137985 - RNA, 32 nt, Human
cugccaggaggcccugccauccuugggcccug

SEQ ID NO: 137986 - RNA, 32 nt, Human
cugccaggaugucugugcccucauguacugcu

SEQ ID NO: 137987 - RNA, 19 nt, Human
cugccaggauuccacagcc

SEQ ID NO: 137988 - RNA, 17 nt, Human
cugccaggcaagcccag

SEQ ID NO: 137989 - RNA, 30 nt, Human
cugccaggcaagcccagggcacagaggccg

SEQ ID NO: 137990 - RNA, 30 nt, Human
cugccaggcaagcccagggcacagaugcca

SEQ ID NO: 137991 - RNA, 30 nt, Human
cugccaggcaagcccagggcacagaugcug

SEQ ID NO: 137992 - RNA, 20 nt, Human
cugccaggcacacugagcca

SEQ ID NO: 137993 - RNA, 32 nt, Human
cugccaggcacccugugcugggcacagggaca

SEQ ID NO: 137994 - RNA, 32 nt, Human
cugccaggcagcugcaguuagcacagaggaug

SEQ ID NO: 137995 - RNA, 24 nt, Human
cugccaggcagugcccuucccgga

SEQ ID NO: 137996 - RNA, 19 nt, Human
cugccaggcccagcugcca

SEQ ID NO: 137997 - RNA, 32 nt, Human
cugccaggcccaggaugauaggaggcaaugaa

SEQ ID NO: 137998 - RNA, 32 nt, Human
cugccaggcccgccucuggcuccugggccugg

SEQ ID NO: 137999 - RNA, 17 nt, Human
cugccaggcccugcagg

SEQ ID NO: 138000 - RNA, 32 nt, Human
cugccaggcccuucccugugccccacccugca

SEQ ID NO: 138001 - RNA, 24 nt, Human
cugccaggccgggagugugucccu

SEQ ID NO: 138002 - RNA, 21 nt, Human
cugccaggccucugcccugca

SEQ ID NO: 138003 - RNA, 22 nt, Human
cugccaggccugggaccuccca

SEQ ID NO: 138004 - RNA, 32 nt, Human
cugccaggccuggugcccuccuggaccgccug

SEQ ID NO: 138005 - RNA, 32 nt, Human
cugccaggcgugcacaggugugcauuggugua

SEQ ID NO: 138006 - RNA, 18 nt, Human
cugccaggcucccugcca

SEQ ID NO: 138007 - RNA, 32 nt, Human
cugccaggcuuagacgcuuuaucuuuauuuug

SEQ ID NO: 138008 - RNA, 32 nt, Human
cugccaggcuuccuuuugggcagggaggcuac

SEQ ID NO: 138009 - RNA, 32 nt, Human
cugccagggacugggaggugggggugauagau

SEQ ID NO: 138010 - RNA, 32 nt, Human
cugccagggagaagaaugagaagacaggagac

SEQ ID NO: 138011 - RNA, 32 nt, Human
cugccagggagggaagaugagguggggagucu

SEQ ID NO: 138012 - RNA, 32 nt, Human
cugccagggcacaguucaucacuguguguuua

SEQ ID NO: 138013 - RNA, 32 nt, Human
cugccagggcccugacucagugaaggaagcug

SEQ ID NO: 138014 - RNA, 19 nt, Human
cugccagggcucccacugc

SEQ ID NO: 138015 - RNA, 32 nt, Human
cugccaggggagaccugggaccuggacggcca

SEQ ID NO: 138016 - RNA, 32 nt, Human
cugccaggggagccucacugugaagucuaggc

SEQ ID NO: 138017 - RNA, 32 nt, Human
cugccaggggaggacucuucaucuucuccuug

SEQ ID NO: 138018 - RNA, 32 nt, Human
cugccaggggcagccgauguucagaggcaucc

SEQ ID NO: 138019 - RNA, 22 nt, Human
cugccaggggccacuggcugcc

SEQ ID NO: 138020 - RNA, 32 nt, Human
cugccaggggcuggaggaagaggggaauggga

SEQ ID NO: 138021 - RNA, 32 nt, Human
cugccagggggcgugcggcagcgcggcggcgg

SEQ ID NO: 138022 - RNA, 32 nt, Human
cugccagggucugagcucuccagccuguggca

SEQ ID NO: 138023 - RNA, 32 nt, Human
cugccagggugagggcagcccucagggucggc

SEQ ID NO: 138024 - RNA, 32 nt, Human
cugccaggucucugucugacaguggcucacgc

SEQ ID NO: 138025 - RNA, 23 nt, Human
cugccaggugccgccccggggca

SEQ ID NO: 138026 - RNA, 22 nt, Human
cugccagguucugugucuccau

SEQ ID NO: 138027 - RNA, 32 nt, Human
cugccagucaaccaagggucugugagugucag

SEQ ID NO: 138028 - RNA, 32 nt, Human
cugccagucaugguuuccccagaaguguaguu

SEQ ID NO: 138029 - RNA, 32 nt, Human
cugccaguccacaguugauuuauuggucucag

SEQ ID NO: 138030 - RNA, 32 nt, Human
cugccaguccaggccagcauucuguuugaguu

SEQ ID NO: 138031 - RNA, 32 nt, Human
cugccagucuguggcgagcccugcugcccucc

SEQ ID NO: 138032 - RNA, 32 nt, Human
cugccagugcucuccagcgccauccugcccug

SEQ ID NO: 138033 - RNA, 31 nt, Human
cugccagugcucucugggccuggcucccagu

SEQ ID NO: 138034 - RNA, 32 nt, Human
cugccagugcugcuggugcacagaccaucuuu

SEQ ID NO: 138035 - RNA, 32 nt, Human
cugccaguggcccccacuggggcccggccacu

SEQ ID NO: 138036 - RNA, 32 nt, Human
cugccaguggccuggggguguccaggcuccca

SEQ ID NO: 138037 - RNA, 32 nt, Human
cugccagugggucuccauugcccagcuccugc

SEQ ID NO: 138038 - RNA, 32 nt, Human
cugccagugucuuccagagucacacccaggga

SEQ ID NO: 138039 - RNA, 32 nt, Human
cugccagugugaccucacccucuccagucacc

SEQ ID NO: 138040 - RNA, 21 nt, Human
cugccaguuauguggcugcca

SEQ ID NO: 138041 - RNA, 32 nt, Human
cugccaguuggugaagcccuguggcaggaagg

SEQ ID NO: 138042 - RNA, 32 nt, Human
cugccaguuuaacuugucaugcacugacacag

SEQ ID NO: 138043 - RNA, 32 nt, Human
cugccauaaccaaacaccacagacuagguguc

SEQ ID NO: 138044 - RNA, 32 nt, Human
cugccauaccuauuuuagacucagggaaaaau

SEQ ID NO: 138045 - RNA, 25 nt, Human
cugccauaccugccagcuucagaca

SEQ ID NO: 138046 - RNA, 32 nt, Human
cugccauacugauggggccguguuugcugaug

SEQ ID NO: 138047 - RNA, 32 nt, Human
cugccauaugucccuguccuccaggcuguagg

SEQ ID NO: 138048 - RNA, 21 nt, Human
cugccauauuugccuucaacc

SEQ ID NO: 138049 - RNA, 32 nt, Human
cugccauauuuuccuuccuuccuuccuucuuu

SEQ ID NO: 138050 - RNA, 32 nt, Human
cugccaucaacacccacaucagccuggagcuc

SEQ ID NO: 138051 - RNA, 18 nt, Human
cugccaucaaugucccau

SEQ ID NO: 138052 - RNA, 19 nt, Human
cugccaucacaguccccau

SEQ ID NO: 138053 - RNA, 32 nt, Human
cugccaucacauauggagaccauccuuugcug

SEQ ID NO: 138054 - RNA, 22 nt, Human
cugccaucacaucucacugcca

SEQ ID NO: 138055 - RNA, 32 nt, Human
cugccaucacugggaggcucagaggacccuuc

SEQ ID NO: 138056 - RNA, 20 nt, Human
cugccaucaucaccaugccc

SEQ ID NO: 138057 - RNA, 32 nt, Human
cugccaucauuuuugaugacuaccucagaaca

SEQ ID NO: 138058 - RNA, 32 nt, Human
cugccauccagccugucgccccgcccuucgcg

SEQ ID NO: 138059 - RNA, 32 nt, Human
cugccauccagggaugccaucugugggcacgc

SEQ ID NO: 138060 - RNA, 32 nt, Human
cugccauccccaacagaucaccaguugucccu

SEQ ID NO: 138061 - RNA, 18 nt, Human
cugccauccccucgagcc

SEQ ID NO: 138062 - RNA, 18 nt, Human
cugccaucccugaacucu

SEQ ID NO: 138063 - RNA, 32 nt, Human
cugccaucccugcacacagccuggggagaagc

SEQ ID NO: 138064 - RNA, 18 nt, Human
cugccaucccuugucucc

SEQ ID NO: 138065 - RNA, 32 nt, Human
cugccauccuacuccagagaacugcugugguu

SEQ ID NO: 138066 - RNA, 32 nt, Human
cugccauccugccguccucccacuggcauccu

SEQ ID NO: 138067 - RNA, 32 nt, Human
cugccauccuggacagaaaggcaggagcucug

SEQ ID NO: 138068 - RNA, 18 nt, Human
cugccauccuuagcauca

SEQ ID NO: 138069 - RNA, 32 nt, Human
cugccauccuuguggguugcuaccuuuaaguc

SEQ ID NO: 138070 - RNA, 32 nt, Human
cugccauccuuguggucacuagggaggguaca

SEQ ID NO: 138071 - RNA, 32 nt, Human
cugccaucgauuucugguccacggccagauug

SEQ ID NO: 138072 - RNA, 32 nt, Human
cugccaucuccaagcauuuggacaacuagccc

SEQ ID NO: 138073 - RNA, 32 nt, Human
cugccaucucgcacucagcccugggugccugu

SEQ ID NO: 138074 - RNA, 32 nt, Human
cugccaucucucuccuccuuuuucuucagcca

SEQ ID NO: 138075 - RNA, 20 nt, Human
cugccaucugccaacuccau

SEQ ID NO: 138076 - RNA, 32 nt, Human
cugccaucuucucuccccaccacccuuucaca

SEQ ID NO: 138077 - RNA, 19 nt, Human
cugccaucuucuggggccu

SEQ ID NO: 138078 - RNA, 32 nt, Human
cugccaucuuuccuuccuaucucccccagugu

SEQ ID NO: 138079 - RNA, 32 nt, Human
cugccaugaagccacagcuccuuggggaagug

SEQ ID NO: 138080 - RNA, 32 nt, Human
cugccaugaaguugaucugccucccagagggc

SEQ ID NO: 138081 - RNA, 32 nt, Human
cugccaugacucugaggccuccccagccacgu

SEQ ID NO: 138082 - RNA, 32 nt, Human
cugccaugagacuagagguugcuugagaacag

SEQ ID NO: 138083 - RNA, 32 nt, Human
cugccaugagagcacauguccucuggccagga

SEQ ID NO: 138084 - RNA, 32 nt, Human
cugccaugagcagcauccugagcccggguggc

SEQ ID NO: 138085 - RNA, 30 nt, Human
cugccaugagcucccccaucagcaagagcc

SEQ ID NO: 138086 - RNA, 32 nt, Human
cugccaugcaaccaccaccacgacagcccuuc

SEQ ID NO: 138087 - RNA, 30 nt, Human
cugccaugcaggccuggccuucccaggaca

SEQ ID NO: 138088 - RNA, 19 nt, Human
cugccaugccagccugccc

SEQ ID NO: 138089 - RNA, 22 nt, Human
cugccaugcgcacucuccagca

SEQ ID NO: 138090 - RNA, 32 nt, Human
cugccauggaaauacaacucgaggagaaccca

SEQ ID NO: 138091 - RNA, 32 nt, Human
cugccauggacgggcaggcuccaggcucaccu

SEQ ID NO: 138092 - RNA, 30 nt, Human
cugccauggaggaggaagaggaggcgauag

SEQ ID NO: 138093 - RNA, 32 nt, Human
cugccauguaccuccccugccuugcuguuggu

SEQ ID NO: 138094 - RNA, 32 nt, Human
cugccauguccaggaagcuuggcugugagaag

SEQ ID NO: 138095 - RNA, 32 nt, Human
cugccaugucucaaaggaauguuugagaaacu

SEQ ID NO: 138096 - RNA, 32 nt, Human
cugccaugugccagccuugcucagcuucccag

SEQ ID NO: 138097 - RNA, 21 nt, Human
cugccauuaucccccgagcca

SEQ ID NO: 138098 - RNA, 32 nt, Human
cugccauuccaucaaauggagcaggagaggug

SEQ ID NO: 138099 - RNA, 32 nt, Human
cugccauucccaagaccucugucucccagcca

SEQ ID NO: 138100 - RNA, 20 nt, Human
cugccauucugcccugggcu

SEQ ID NO: 138101 - RNA, 19 nt, Human
cugccauucuucaucucca

SEQ ID NO: 138102 - RNA, 32 nt, Human
cugccauugccgcuccccuuguugcugcccaa

SEQ ID NO: 138103 - RNA, 20 nt, Human
cugccauugccuccucucca

SEQ ID NO: 138104 - RNA, 21 nt, Human
cugccauugugauugucccau

SEQ ID NO: 138105 - RNA, 32 nt, Human
cugccauuucacacucacccuccacccucccc

SEQ ID NO: 138106 - RNA, 18 nt, Human
cugccauuucauguccau

SEQ ID NO: 138107 - RNA, 32 nt, Human
cugccauuucuccccucucuuccuucaucucc

SEQ ID NO: 138108 - RNA, 32 nt, Human
cugccauuucuuucucuuacucagcucucccc

SEQ ID NO: 138109 - RNA, 32 nt, Human
cugccauuuuuagcuaccucaaaggagauaac

SEQ ID NO: 138110 - RNA, 32 nt, Human
cugcccaaaaaggugaaaccccgucucuacug

SEQ ID NO: 138111 - RNA, 32 nt, Human
cugcccaaaaauaugguugauaguuuaccuga

SEQ ID NO: 138112 - RNA, 17 nt, Human
cugcccaaacugugaga

SEQ ID NO: 138113 - RNA, 32 nt, Human
cugcccaaagugcugggauuacaggcaagagc

SEQ ID NO: 138114 - RNA, 32 nt, Human
cugcccaaauggugaaaccccaucucuacuaa

SEQ ID NO: 138115 - RNA, 24 nt, Human
cugcccaacauagugaaacuccgu

SEQ ID NO: 138116 - RNA, 24 nt, Human
cugcccaacauggcaaaaccucgu

SEQ ID NO: 138117 - RNA, 32 nt, Human
cugcccaacauggcaaaaccucgucucuacua

SEQ ID NO: 138118 - RNA, 32 nt, Human
cugcccaacauggugaaaccccaucuggacua

SEQ ID NO: 138119 - RNA, 24 nt, Human
cugcccaacauggugaaaccccgu

SEQ ID NO: 138120 - RNA, 32 nt, Human
cugcccaacauggugaaaccccguuucuacua

SEQ ID NO: 138121 - RNA, 32 nt, Human
cugcccaacauggugaaacccugucucuacga

SEQ ID NO: 138122 - RNA, 32 nt, Human
cugcccaacauggugaaaccucgucucuacua

SEQ ID NO: 138123 - RNA, 32 nt, Human
cugcccaacauggugaaaccugucucuacuaa

SEQ ID NO: 138124 - RNA, 32 nt, Human
cugcccaacauguggagguggcugguucccau

SEQ ID NO: 138125 - RNA, 32 nt, Human
cugcccaaccccagauagucaggugugcuggg

SEQ ID NO: 138126 - RNA, 20 nt, Human
cugcccaaccccugcacauu

SEQ ID NO: 138127 - RNA, 20 nt, Human
cugcccaacgcccugagaca

SEQ ID NO: 138128 - RNA, 19 nt, Human
cugcccaaggccccgagcc

SEQ ID NO: 138129 - RNA, 32 nt, Human
cugcccaaggccuggccugccugccgguuguc

SEQ ID NO: 138130 - RNA, 19 nt, Human
cugcccaaguccugagcca

SEQ ID NO: 138131 - RNA, 32 nt, Human
cugcccaauacaaugcauucuugaguggcagc

SEQ ID NO: 138132 - RNA, 32 nt, Human
cugcccaauauggugaaacccugucucuacua

SEQ ID NO: 138133 - RNA, 32 nt, Human
cugcccacaaggcuugucccccagaggcccug

SEQ ID NO: 138134 - RNA, 32 nt, Human
cugcccacaauccuggcccugagccucagccu

SEQ ID NO: 138135 - RNA, 32 nt, Human
cugcccacacccauuuauuuccuuccuuccuu

SEQ ID NO: 138136 - RNA, 32 nt, Human
cugcccacacugggaagcagcaugcccugacu

SEQ ID NO: 138137 - RNA, 32 nt, Human
cugcccacagaggugcuguagaugcugggccc

SEQ ID NO: 138138 - RNA, 32 nt, Human
cugcccacagcauggggagaggccgucgugaa

SEQ ID NO: 138139 - RNA, 32 nt, Human
cugcccacaggcaggaggagaagcaugaagag

SEQ ID NO: 138140 - RNA, 23 nt, Human
cugcccacagggccaggcugccu

SEQ ID NO: 138141 - RNA, 32 nt, Human
cugcccacauguugaaguauugccaagagagg

SEQ ID NO: 138142 - RNA, 22 nt, Human
cugcccaccaccagcccaaaga

SEQ ID NO: 138143 - RNA, 32 nt, Human
cugcccaccagcuggccucaccuccugaaggc

SEQ ID NO: 138144 - RNA, 32 nt, Human
cugcccaccaggggucaggugaggcuugagcu

SEQ ID NO: 138145 - RNA, 32 nt, Human
cugcccacccacccccucaacuucacaccuug

SEQ ID NO: 138146 - RNA, 23 nt, Human
cugcccaccccagccucccaaag

SEQ ID NO: 138147 - RNA, 23 nt, Human
cugcccacccggguuccgcacug

SEQ ID NO: 138148 - RNA, 32 nt, Human
cugcccacccuaccugcccugccugccugcug

SEQ ID NO: 138149 - RNA, 32 nt, Human
cugcccacccuggccuggacagccuccuucag

SEQ ID NO: 138150 - RNA, 21 nt, Human
cugcccacccuuaucugcacc

SEQ ID NO: 138151 - RNA, 21 nt, Human
cugcccaccgccuucuccagg

SEQ ID NO: 138152 - RNA, 32 nt, Human
cugcccaccucaggcccccacccuccacuccu

SEQ ID NO: 138153 - RNA, 17 nt, Human
cugcccaccucuccagg

SEQ ID NO: 138154 - RNA, 21 nt, Human
cugcccaccucuugccacaga

SEQ ID NO: 138155 - RNA, 32 nt, Human
cugcccaccugccauaguauuugcuacugaau

SEQ ID NO: 138156 - RNA, 32 nt, Human
cugcccaccugccucccugcccccugugacgg

SEQ ID NO: 138157 - RNA, 32 nt, Human
cugcccaccuggcugccaacaugauccccguc

SEQ ID NO: 138158 - RNA, 32 nt, Human
cugcccaccuucggagacggcuucuggaggaa

SEQ ID NO: 138159 - RNA, 18 nt, Human
cugcccacgucgucucca

SEQ ID NO: 138160 - RNA, 32 nt, Human
cugcccacuacaaccuccaccuccuggguuug

SEQ ID NO: 138161 - RNA, 32 nt, Human
cugcccacucucuccccuucauuggcugccca

SEQ ID NO: 138162 - RNA, 32 nt, Human
cugcccacucuuccucacucauggggaacagc

SEQ ID NO: 138163 - RNA, 18 nt, Human
cugcccacugccacgccc

SEQ ID NO: 138164 - RNA, 19 nt, Human
cugcccacugccccgagcc

SEQ ID NO: 138165 - RNA, 32 nt, Human
cugcccacugcccuccugccccggcuuucccu

SEQ ID NO: 138166 - RNA, 32 nt, Human
cugcccacuucagcccagcccgcccaagggga

SEQ ID NO: 138167 - RNA, 23 nt, Human
cugcccacuucggccucccaaag

SEQ ID NO: 138168 - RNA, 32 nt, Human
cugcccagaaagccagcccucccuucccuucu

SEQ ID NO: 138169 - RNA, 32 nt, Human
cugcccagaaccaagugccauuucucacucug

SEQ ID NO: 138170 - RNA, 32 nt, Human
cugcccagaagugcaagagccuaagccgccuc

SEQ ID NO: 138171 - RNA, 32 nt, Human
cugcccagagguggcagaugacaugaagaaau

SEQ ID NO: 138172 - RNA, 32 nt, Human
cugcccagaguccagagagcagccucagcuga

SEQ ID NO: 138173 - RNA, 32 nt, Human
cugcccagaugccuuccuuguacuggaaacug

SEQ ID NO: 138174 - RNA, 32 nt, Human
cugcccagaugucagccugggagcucaggcug

SEQ ID NO: 138175 - RNA, 32 nt, Human
cugcccagccccgcucaggccuaggaggcccc

SEQ ID NO: 138176 - RNA, 32 nt, Human
cugcccagccccuugcugucauccccuccccc

SEQ ID NO: 138177 - RNA, 18 nt, Human
cugcccagcccugugcug

SEQ ID NO: 138178 - RNA, 32 nt, Human
cugcccagccgggaccacaggcugcagcacaa

SEQ ID NO: 138179 - RNA, 32 nt, Human
cugcccagccucugucuugggagcucagcccc

SEQ ID NO: 138180 - RNA, 19 nt, Human
cugcccagccuggcuggca

SEQ ID NO: 138181 - RNA, 32 nt, Human
cugcccagccugggcccugcaguguggagaga

SEQ ID NO: 138182 - RNA, 32 nt, Human
cugcccagccugggggaaggagaaaggagggg

SEQ ID NO: 138183 - RNA, 32 nt, Human
cugcccagccuucucaguggacuugccccucc

SEQ ID NO: 138184 - RNA, 32 nt, Human
cugcccagccuugcacagguuacccugugacc

SEQ ID NO: 138185 - RNA, 18 nt, Human
cugcccagcuccucacau

SEQ ID NO: 138186 - RNA, 19 nt, Human
cugcccagcucgucuucau

SEQ ID NO: 138187 - RNA, 32 nt, Human
cugcccagcugccucccuucuuggacagcccu

SEQ ID NO: 138188 - RNA, 32 nt, Human
cugcccaggaacccuccagaccuccaagugaa

SEQ ID NO: 138189 - RNA, 32 nt, Human
cugcccaggaagggcagggcuggggugaugac

SEQ ID NO: 138190 - RNA, 21 nt, Human
cugcccaggacacagugcagg

SEQ ID NO: 138191 - RNA, 18 nt, Human
cugcccaggacaccccgg

SEQ ID NO: 138192 - RNA, 32 nt, Human
cugcccaggagaaaagaagacauucuaauucc

SEQ ID NO: 138193 - RNA, 32 nt, Human
cugcccaggagccugagccucaggcuguugga

SEQ ID NO: 138194 - RNA, 32 nt, Human
cugcccaggaggcugaggcaggagaaucgcuu

SEQ ID NO: 138195 - RNA, 32 nt, Human
cugcccaggauuagggucugugguguguucug

SEQ ID NO: 138196 - RNA, 32 nt, Human
cugcccaggcagcuguuugcagcugaagaaac

SEQ ID NO: 138197 - RNA, 19 nt, Human
cugcccaggcccuggguca

SEQ ID NO: 138198 - RNA, 32 nt, Human
cugcccaggccuggguggggaguugggugggc

SEQ ID NO: 138199 - RNA, 23 nt, Human
cugcccaggcuagagugcaaugg

SEQ ID NO: 138200 - RNA, 32 nt, Human
cugcccaggcuagagugcaauggugcgaucuu

SEQ ID NO: 138201 - RNA, 23 nt, Human
cugcccaggcuagagugcagugg

SEQ ID NO: 138202 - RNA, 32 nt, Human
cugcccaggcuagagugcaguggcgugaucuc

SEQ ID NO: 138203 - RNA, 32 nt, Human
cugcccaggcucuagaucacauggcaucaggc

SEQ ID NO: 138204 - RNA, 32 nt, Human
cugcccaggcucugcugacuucugagcaguuu

SEQ ID NO: 138205 - RNA, 32 nt, Human
cugcccaggcuggaauccaagaguggggagug

SEQ ID NO: 138206 - RNA, 32 nt, Human
cugcccaggcuggaaugcaguggugccaucuc

SEQ ID NO: 138207 - RNA, 23 nt, Human
cugcccaggcuggagcauagugg

SEQ ID NO: 138208 - RNA, 22 nt, Human
cugcccaggcuggaguacagug

SEQ ID NO: 138209 - RNA, 32 nt, Human
cugcccaggcuggaguacagugaugugaucuc

SEQ ID NO: 138210 - RNA, 23 nt, Human
cugcccaggcuggaguacagugg

SEQ ID NO: 138211 - RNA, 32 nt, Human
cugcccaggcuggaguacaguggcacaaucac

SEQ ID NO: 138212 - RNA, 23 nt, Human
cugcccaggcuggagugcaaugg

SEQ ID NO: 138213 - RNA, 32 nt, Human
cugcccaggcuggagugcaauggugcaaugau

SEQ ID NO: 138214 - RNA, 23 nt, Human
cugcccaggcuggagugcagugg

SEQ ID NO: 138215 - RNA, 32 nt, Human
cugcccaggcuggagugcaguggcucaaucuc

SEQ ID NO: 138216 - RNA, 32 nt, Human
cugcccaggcuggagugcaguggugcaaucuu

SEQ ID NO: 138217 - RNA, 32 nt, Human
cugcccaggcuggagugugguggcgccaucuc

SEQ ID NO: 138218 - RNA, 32 nt, Human
cugcccaggcuggucucaaacuccugagcuca

SEQ ID NO: 138219 - RNA, 32 nt, Human
cugcccaggcuuucuggaagcuucuggucuga

SEQ ID NO: 138220 - RNA, 32 nt, Human
cugcccagggccuggcccugcugcacaugccc

SEQ ID NO: 138221 - RNA, 28 nt, Human
cugcccaguaccgcacugcgcaaagggg

SEQ ID NO: 138222 - RNA, 32 nt, Human
cugcccagucaagcagaaacagguuuggagag

SEQ ID NO: 138223 - RNA, 32 nt, Human
cugcccaguccuggccccugcacaagacaaca

SEQ ID NO: 138224 - RNA, 32 nt, Human
cugcccagucuggaagaagaggaggaagacuc

SEQ ID NO: 138225 - RNA, 32 nt, Human
cugcccauaccuccuccucccuucuuucuuug

SEQ ID NO: 138226 - RNA, 21 nt, Human
cugcccaucaguccugggcca

SEQ ID NO: 138227 - RNA, 18 nt, Human
cugcccaucccugagcca

SEQ ID NO: 138228 - RNA, 32 nt, Human
cugcccauccucacucccaccugggugcuccc

SEQ ID NO: 138229 - RNA, 32 nt, Human
cugcccauccugcaccuguccaccccacccca

SEQ ID NO: 138230 - RNA, 22 nt, Human
cugcccauccuuccucagcaca

SEQ ID NO: 138231 - RNA, 21 nt, Human
cugcccaucgccuucuccagg

SEQ ID NO: 138232 - RNA, 23 nt, Human
cugcccaucugcugagcuucuca

SEQ ID NO: 138233 - RNA, 32 nt, Human
cugcccaucuucugugcuuugugguacauauc

SEQ ID NO: 138234 - RNA, 32 nt, Human
cugcccaucuugucccuccuggagaccuaacc

SEQ ID NO: 138235 - RNA, 32 nt, Human
cugcccaugccaccuccuccuucucugcccgc

SEQ ID NO: 138236 - RNA, 32 nt, Human
cugcccaugggacuccucccaucccccaggcu

SEQ ID NO: 138237 - RNA, 21 nt, Human
cugcccauggucaucugcacc

SEQ ID NO: 138238 - RNA, 32 nt, Human
cugcccauuagagaaguauuuaucaggagaag

SEQ ID NO: 138239 - RNA, 32 nt, Human
cugcccauucacaucccauuccugccuuuugc

SEQ ID NO: 138240 - RNA, 32 nt, Human
cugcccauucuuguucucuaucuaagaaggca

SEQ ID NO: 138241 - RNA, 22 nt, Human
cugccccaaaggagaagccuca

SEQ ID NO: 138242 - RNA, 24 nt, Human
cugccccaacccauccagccugca

SEQ ID NO: 138243 - RNA, 21 nt, Human
cugccccaaccuggcuugaca

SEQ ID NO: 138244 - RNA, 32 nt, Human
cugccccaacuguaaagcagguggugggagaa

SEQ ID NO: 138245 - RNA, 21 nt, Human
cugccccaagacccugccugc

SEQ ID NO: 138246 - RNA, 32 nt, Human
cugccccaagcucaaccccuguccucucccuc

SEQ ID NO: 138247 - RNA, 21 nt, Human
cugccccaaugcaccugcagg

SEQ ID NO: 138248 - RNA, 20 nt, Human
cugccccacaccuccucuca

SEQ ID NO: 138249 - RNA, 32 nt, Human
cugccccacaccugacggggcugucccggccg

SEQ ID NO: 138250 - RNA, 21 nt, Human
cugccccacacuccccgccuu

SEQ ID NO: 138251 - RNA, 32 nt, Human
cugccccacagcccugaggaaggcacauauuu

SEQ ID NO: 138252 - RNA, 21 nt, Human
cugccccacagccucagcauc

SEQ ID NO: 138253 - RNA, 21 nt, Human
cugccccacagccuugccugg

SEQ ID NO: 138254 - RNA, 23 nt, Human
cugccccacauccccaccuggca

SEQ ID NO: 138255 - RNA, 32 nt, Human
cugccccacaugcaugucugccuaugcacuga

SEQ ID NO: 138256 - RNA, 22 nt, Human
cugccccaccagauugcugcag

SEQ ID NO: 138257 - RNA, 32 nt, Human
cugccccaccccucaggcccagccuggccccc

SEQ ID NO: 138258 - RNA, 32 nt, Human
cugccccacccuccaaucugcacuuugauuug

SEQ ID NO: 138259 - RNA, 32 nt, Human
cugccccacccuccggcagcucagggaguguu

SEQ ID NO: 138260 - RNA, 32 nt, Human
cugccccaccucucuuucuccccuuuuaagcc

SEQ ID NO: 138261 - RNA, 32 nt, Human
cugccccacgcacaccccuaccccucugugag

SEQ ID NO: 138262 - RNA, 22 nt, Human
cugccccacgugcuggugcagg

SEQ ID NO: 138263 - RNA, 20 nt, Human
cugccccacuccucugaguc

SEQ ID NO: 138264 - RNA, 32 nt, Human
cugccccacugcagugggucugagugaccugu

SEQ ID NO: 138265 - RNA, 32 nt, Human
cugccccacugccaccaccaagaagcauacca

SEQ ID NO: 138266 - RNA, 32 nt, Human
cugccccacuggccccuggccugccggacaca

SEQ ID NO: 138267 - RNA, 22 nt, Human
cugccccagacuugguuuugua

SEQ ID NO: 138268 - RNA, 32 nt, Human
cugccccagagacugaaggaaugcccaggaga

SEQ ID NO: 138269 - RNA, 31 nt, Human
cugccccagagagucugugugagaugaagac

SEQ ID NO: 138270 - RNA, 32 nt, Human
cugccccagagcaguguguggcggugacaccg

SEQ ID NO: 138271 - RNA, 32 nt, Human
cugccccagagggagggcaggggcaucggaac

SEQ ID NO: 138272 - RNA, 32 nt, Human
cugccccagcacccuucccauugcccuucaga

SEQ ID NO: 138273 - RNA, 18 nt, Human
cugccccagccagcgccu

SEQ ID NO: 138274 - RNA, 22 nt, Human
cugccccagcccagcucucaca

SEQ ID NO: 138275 - RNA, 21 nt, Human
cugccccagccccacacuugc

SEQ ID NO: 138276 - RNA, 20 nt, Human
cugccccagccccacccuug

SEQ ID NO: 138277 - RNA, 21 nt, Human
cugccccagccccccguagca

SEQ ID NO: 138278 - RNA, 23 nt, Human
cugccccagccccuccagcuuug

SEQ ID NO: 138279 - RNA, 26 nt, Human
cugccccagccccucccagcccuugc

SEQ ID NO: 138280 - RNA, 22 nt, Human
cugccccagccccugccucugc

SEQ ID NO: 138281 - RNA, 23 nt, Human
cugccccagcccggccucagguc

SEQ ID NO: 138282 - RNA, 18 nt, Human
cugccccagccuacucca

SEQ ID NO: 138283 - RNA, 22 nt, Human
cugccccagccuccgcagccgc

SEQ ID NO: 138284 - RNA, 18 nt, Human
cugccccagccucugcuu

SEQ ID NO: 138285 - RNA, 32 nt, Human
cugccccagccugaggaggagggagagggagg

SEQ ID NO: 138286 - RNA, 21 nt, Human
cugccccagccugggccucuc

SEQ ID NO: 138287 - RNA, 32 nt, Human
cugccccagccuguguagcucuuccugcaugu

SEQ ID NO: 138288 - RNA, 32 nt, Human
cugccccagccugugucuguucuccucgaggg

SEQ ID NO: 138289 - RNA, 24 nt, Human
cugccccagccuuuccgccuugca

SEQ ID NO: 138290 - RNA, 32 nt, Human
cugccccagcggcuuccaguguggcaucucag

SEQ ID NO: 138291 - RNA, 19 nt, Human
cugccccagcuccugcagg

SEQ ID NO: 138292 - RNA, 22 nt, Human
cugccccagcuggaaccuggca

SEQ ID NO: 138293 - RNA, 20 nt, Human
cugccccagcugggccuggu

SEQ ID NO: 138294 - RNA, 22 nt, Human
cugccccagcuuacggacuuca

SEQ ID NO: 138295 - RNA, 32 nt, Human
cugccccagcuucucccaccauagggggccgg

SEQ ID NO: 138296 - RNA, 31 nt, Human
cugccccaggaauaggccaggagggaaggcc

SEQ ID NO: 138297 - RNA, 28 nt, Human
cugccccaggagcacuuuagggcucuca

SEQ ID NO: 138298 - RNA, 32 nt, Human
cugccccaggaggcgauguagugguggaaaga

SEQ ID NO: 138299 - RNA, 32 nt, Human
cugccccaggcgggcuagagugcaguggcaug

SEQ ID NO: 138300 - RNA, 23 nt, Human
cugccccaggcuccccgccccgc

SEQ ID NO: 138301 - RNA, 32 nt, Human
cugccccagggacccgaggccaccccagccug

SEQ ID NO: 138302 - RNA, 32 nt, Human
cugccccagucaggccguuuuagaagagcuuu

SEQ ID NO: 138303 - RNA, 32 nt, Human
cugccccagugcccagaccaaccaaggcccug

SEQ ID NO: 138304 - RNA, 21 nt, Human
cugccccaguguaugucuugc

SEQ ID NO: 138305 - RNA, 19 nt, Human
cugccccaguuuccugaag

SEQ ID NO: 138306 - RNA, 23 nt, Human
cugccccauaauuugcuuuagua

SEQ ID NO: 138307 - RNA, 32 nt, Human
cugccccaucaccucucugcuuagccacuggc

SEQ ID NO: 138308 - RNA, 32 nt, Human
cugccccaucauugcaccugcaggcuuagguc

SEQ ID NO: 138309 - RNA, 32 nt, Human
cugccccaucccucccccaaccccuguauccc

SEQ ID NO: 138310 - RNA, 18 nt, Human
cugccccauccuccagca

SEQ ID NO: 138311 - RNA, 21 nt, Human
cugccccaugcccacccugca

SEQ ID NO: 138312 - RNA, 20 nt, Human
cugccccaugccugcccugc

SEQ ID NO: 138313 - RNA, 23 nt, Human
cugccccaugcuuccagccugca

SEQ ID NO: 138314 - RNA, 23 nt, Human
cugcccccaagacugcucuggug

SEQ ID NO: 138315 - RNA, 32 nt, Human
cugcccccaaguguaacuccagcacugugagg

SEQ ID NO: 138316 - RNA, 32 nt, Human
cugcccccacccccaggcaccagcacagccuu

SEQ ID NO: 138317 - RNA, 18 nt, Human
cugcccccaccucugccc

SEQ ID NO: 138318 - RNA, 32 nt, Human
cugcccccaccucugcugccucccucugcugu

SEQ ID NO: 138319 - RNA, 32 nt, Human
cugcccccacuguguucacaagaucagcauca

SEQ ID NO: 138320 - RNA, 32 nt, Human
cugcccccagaacucccuucaagggaggacuu

SEQ ID NO: 138321 - RNA, 25 nt, Human
cugcccccagcacccagggcugccu

SEQ ID NO: 138322 - RNA, 32 nt, Human
cugcccccagcacccuaagucaauguuuaacc

SEQ ID NO: 138323 - RNA, 16 nt, Human
cugcccccagcacucu

SEQ ID NO: 138324 - RNA, 32 nt, Human
cugcccccagcacucuagguggugguuaguga

SEQ ID NO: 138325 - RNA, 32 nt, Human
cugcccccagccuggcuggacagcaaggaauc

SEQ ID NO: 138326 - RNA, 23 nt, Human
cugcccccagcucccuguugcug

SEQ ID NO: 138327 - RNA, 23 nt, Human
cugcccccaggcugggccuguca

SEQ ID NO: 138328 - RNA, 23 nt, Human
cugcccccaggguuucugcacug

SEQ ID NO: 138329 - RNA, 21 nt, Human
cugcccccaggucgucuugca

SEQ ID NO: 138330 - RNA, 32 nt, Human
cugcccccauggaggcaguccacccaggggca

SEQ ID NO: 138331 - RNA, 24 nt, Human
cugccccccuccuuuuguuuugua

SEQ ID NO: 138332 - RNA, 32 nt, Human
cugcccccgaggguccuggcugaggggcuuuu

SEQ ID NO: 138333 - RNA, 32 nt, Human
cugcccccggagcgguuccuccaccugaggca

SEQ ID NO: 138334 - RNA, 32 nt, Human
cugcccccuccacccccaacccaguccuaccu

SEQ ID NO: 138335 - RNA, 32 nt, Human
cugcccccuccccacccugccacucuugacau

SEQ ID NO: 138336 - RNA, 32 nt, Human
cugcccccuccccagccuguguccacagugcu

SEQ ID NO: 138337 - RNA, 24 nt, Human
cugcccccucucucugugcaggug

SEQ ID NO: 138338 - RNA, 32 nt, Human
cugcccccugcaaccuccuucaggggccucug

SEQ ID NO: 138339 - RNA, 32 nt, Human
cugcccccugccccgcacaccucucucugagu

SEQ ID NO: 138340 - RNA, 32 nt, Human
cugcccccugcuccccucaucaggaccaaccc

SEQ ID NO: 138341 - RNA, 32 nt, Human
cugcccccuuccccugucuccugggucucugg

SEQ ID NO: 138342 - RNA, 18 nt, Human
cugcccccuuccugccag

SEQ ID NO: 138343 - RNA, 32 nt, Human
cugcccccuuccugccagaccggaggggcugg

SEQ ID NO: 138344 - RNA, 32 nt, Human
cugcccccuucuaggacaaccccaccagcaag

SEQ ID NO: 138345 - RNA, 18 nt, Human
cugcccccuucugcccag

SEQ ID NO: 138346 - RNA, 19 nt, Human
cugccccgaacacuuuccc

SEQ ID NO: 138347 - RNA, 21 nt, Human
cugccccgaacccgcgcugca

SEQ ID NO: 138348 - RNA, 19 nt, Human
cugccccgagccccgagcc

SEQ ID NO: 138349 - RNA, 21 nt, Human
cugccccgccaucugcuuuca

SEQ ID NO: 138350 - RNA, 19 nt, Human
cugccccgcccacuuuccc

SEQ ID NO: 138351 - RNA, 32 nt, Human
cugccccgcccaggcugggacaggcugcaggu

SEQ ID NO: 138352 - RNA, 22 nt, Human
cugccccgcccaucugccgugu

SEQ ID NO: 138353 - RNA, 32 nt, Human
cugccccgccccucccccucggccucgcggcg

SEQ ID NO: 138354 - RNA, 22 nt, Human
cugccccgcgcccgccgccgca

SEQ ID NO: 138355 - RNA, 24 nt, Human
cugccccggaaucccaggcugccu

SEQ ID NO: 138356 - RNA, 32 nt, Human
cugccccggcccaaccucgcccucucucacca

SEQ ID NO: 138357 - RNA, 18 nt, Human
cugccccggccucagcca

SEQ ID NO: 138358 - RNA, 18 nt, Human
cugccccgggcaguuagu

SEQ ID NO: 138359 - RNA, 24 nt, Human
cugccccggucuguccgguuugca

SEQ ID NO: 138360 - RNA, 23 nt, Human
cugccccgguucuuuccuccagg

SEQ ID NO: 138361 - RNA, 19 nt, Human
cugccccguccacuuuccc

SEQ ID NO: 138362 - RNA, 20 nt, Human
cugccccguccccugggcca

SEQ ID NO: 138363 - RNA, 20 nt, Human
cugccccgucugccauucac

SEQ ID NO: 138364 - RNA, 22 nt, Human
cugccccgugcucuggcuugca

SEQ ID NO: 138365 - RNA, 22 nt, Human
cugccccgugcuggaucuuccc

SEQ ID NO: 138366 - RNA, 32 nt, Human
cugccccguucccucccccuucuccuguggga

SEQ ID NO: 138367 - RNA, 32 nt, Human
cugccccuagccucaacucccugggccuccuu

SEQ ID NO: 138368 - RNA, 32 nt, Human
cugccccucaaaccacaauaggaaccaguggu

SEQ ID NO: 138369 - RNA, 32 nt, Human
cugccccucacacccuaugcucagaucauuca

SEQ ID NO: 138370 - RNA, 32 nt, Human
cugccccuccaccccagccagcucaugggcca

SEQ ID NO: 138371 - RNA, 32 nt, Human
cugccccucccaugggggcuggagggaucuag

SEQ ID NO: 138372 - RNA, 23 nt, Human
cugccccucccccagccuugagg

SEQ ID NO: 138373 - RNA, 17 nt, Human
cugccccucccccgacc

SEQ ID NO: 138374 - RNA, 32 nt, Human
cugccccucccgcucucccagcgcacccuccu

SEQ ID NO: 138375 - RNA, 32 nt, Human
cugccccucccucucucucccucucucucccu

SEQ ID NO: 138376 - RNA, 32 nt, Human
cugccccucccugccagcacccccacgcccuc

SEQ ID NO: 138377 - RNA, 21 nt, Human
cugccccuccuacucuccagg

SEQ ID NO: 138378 - RNA, 25 nt, Human
cugccccuccucagguuccuugcug

SEQ ID NO: 138379 - RNA, 32 nt, Human
cugccccuccuccaaucucacccuccagcguu

SEQ ID NO: 138380 - RNA, 32 nt, Human
cugccccuccuggguuagcauuuugcauuagc

SEQ ID NO: 138381 - RNA, 32 nt, Human
cugccccucgccccagcauccaaguccucccu

SEQ ID NO: 138382 - RNA, 32 nt, Human
cugccccucuacuguugcacagccagaagggg

SEQ ID NO: 138383 - RNA, 26 nt, Human
cugccccucuccuuccccggcucgca

SEQ ID NO: 138384 - RNA, 20 nt, Human
cugccccucucucagccuca

SEQ ID NO: 138385 - RNA, 19 nt, Human
cugccccucucuccuccau

SEQ ID NO: 138386 - RNA, 32 nt, Human
cugccccucugcaguccuccaggcagccuguc

SEQ ID NO: 138387 - RNA, 32 nt, Human
cugccccucugccucauuuuccuguagcuccu

SEQ ID NO: 138388 - RNA, 32 nt, Human
cugccccucugccuggccaccugccuggacca

SEQ ID NO: 138389 - RNA, 32 nt, Human
cugccccucuggccacugcugcagacaccugc

SEQ ID NO: 138390 - RNA, 32 nt, Human
cugccccucuuccucccccuccucuucuuccu

SEQ ID NO: 138391 - RNA, 32 nt, Human
cugccccucuuuccaucuuuccaucuuacuuc

SEQ ID NO: 138392 - RNA, 32 nt, Human
cugccccugcagcuggaaugugccacagaggc

SEQ ID NO: 138393 - RNA, 32 nt, Human
cugccccugcagcuuggcuccgugcggagcgg

SEQ ID NO: 138394 - RNA, 24 nt, Human
cugccccugcaguucugccucaca

SEQ ID NO: 138395 - RNA, 32 nt, Human
cugccccugccaccccuccccagucaccaguu

SEQ ID NO: 138396 - RNA, 32 nt, Human
cugccccugcccacuuccucucccaggugaau

SEQ ID NO: 138397 - RNA, 21 nt, Human
cugccccugcccuaccuuaca

SEQ ID NO: 138398 - RNA, 17 nt, Human
cugccccugcccuggcu

SEQ ID NO: 138399 - RNA, 32 nt, Human
cugccccugccugcugcccaccaucccugcac

SEQ ID NO: 138400 - RNA, 32 nt, Human
cugccccugccugggcccucccugucguccca

SEQ ID NO: 138401 - RNA, 18 nt, Human
cugccccugccuuggcca

SEQ ID NO: 138402 - RNA, 22 nt, Human
cugccccugcucgccuugguca

SEQ ID NO: 138403 - RNA, 32 nt, Human
cugccccuggaggccagcaaggcaggcacccc

SEQ ID NO: 138404 - RNA, 32 nt, Human
cugccccugucacugcacccagcuuggcauuu

SEQ ID NO: 138405 - RNA, 32 nt, Human
cugccccuucugccccuccacccacauccaca

SEQ ID NO: 138406 - RNA, 32 nt, Human
cugccccuuuaguaggguggagauauguggaa

SEQ ID NO: 138407 - RNA, 32 nt, Human
cugccccuuucugucccauccuucccaagaag

SEQ ID NO: 138408 - RNA, 32 nt, Human
cugccccuuugggcggagaggggaccucacca

SEQ ID NO: 138409 - RNA, 32 nt, Human
cugcccgaccgaggaggagggagccuagguuc

SEQ ID NO: 138410 - RNA, 32 nt, Human
cugcccgacuugaaggugggggugcugccugg

SEQ ID NO: 138411 - RNA, 32 nt, Human
cugcccgagccuggcccgccgcgaugcuguag

SEQ ID NO: 138412 - RNA, 32 nt, Human
cugcccgagggugggccccauggagagcccug

SEQ ID NO: 138413 - RNA, 32 nt, Human
cugcccgcacacccucacucugccagggcagu

SEQ ID NO: 138414 - RNA, 32 nt, Human
cugcccgcacaucccucuuccagccugcucca

SEQ ID NO: 138415 - RNA, 32 nt, Human
cugcccgccacagcaggcugggaucauaggug

SEQ ID NO: 138416 - RNA, 32 nt, Human
cugcccgccacauccucugccugcuguccccu

SEQ ID NO: 138417 - RNA, 32 nt, Human
cugcccgccagcuguuugugcuucugcggcac

SEQ ID NO: 138418 - RNA, 32 nt, Human
cugcccgccccacuuugggacccuccagccgc

SEQ ID NO: 138419 - RNA, 23 nt, Human
cugcccgcccucccuccugccug

SEQ ID NO: 138420 - RNA, 32 nt, Human
cugcccgcccucccuccugccugcgcagcucc

SEQ ID NO: 138421 - RNA, 32 nt, Human
cugcccgccggcccgcggcuccugggccuccc

SEQ ID NO: 138422 - RNA, 32 nt, Human
cugcccgccuccacccuuuaagcuaaaucuuu

SEQ ID NO: 138423 - RNA, 32 nt, Human
cugcccgccucggucucccaaagugcugggau

SEQ ID NO: 138424 - RNA, 18 nt, Human
cugcccgccugccugcug

SEQ ID NO: 138425 - RNA, 32 nt, Human
cugcccgccugccugcuggcucucccccagcc

SEQ ID NO: 138426 - RNA, 21 nt, Human
cugcccgcucgcucuguguca

SEQ ID NO: 138427 - RNA, 32 nt, Human
cugcccgcucugauaacaguccuuuucccugg

SEQ ID NO: 138428 - RNA, 32 nt, Human
cugcccgcuggccccaggaccugcacucccaa

SEQ ID NO: 138429 - RNA, 18 nt, Human
cugcccggaaggagccag

SEQ ID NO: 138430 - RNA, 32 nt, Human
cugcccggagcagccuguuccugcacuccacc

SEQ ID NO: 138431 - RNA, 32 nt, Human
cugcccggagccgggggccggaggcuuagggg

SEQ ID NO: 138432 - RNA, 32 nt, Human
cugcccggagggugcugcugcccacaccgccu

SEQ ID NO: 138433 - RNA, 22 nt, Human
cugcccggcccaccgagcccug

SEQ ID NO: 138434 - RNA, 23 nt, Human
cugcccggccccggccccgggcc

SEQ ID NO: 138435 - RNA, 32 nt, Human
cugcccggcccucccuccccugccucacccgg

SEQ ID NO: 138436 - RNA, 32 nt, Human
cugcccggccggcagcgcugggguuaaguggc

SEQ ID NO: 138437 - RNA, 22 nt, Human
cugcccggccuggagccuccca

SEQ ID NO: 138438 - RNA, 32 nt, Human
cugcccggcgccugcccugcccaagugaccag

SEQ ID NO: 138439 - RNA, 20 nt, Human
cugcccggcuugucuaccau

SEQ ID NO: 138440 - RNA, 32 nt, Human
cugcccgggaaggccguugcugccuggaggcc

SEQ ID NO: 138441 - RNA, 32 nt, Human
cugcccgggagaaagcccaggccagccugcug

SEQ ID NO: 138442 - RNA, 32 nt, Human
cugcccgggcaggccauguuggggagacucca

SEQ ID NO: 138443 - RNA, 32 nt, Human
cugcccgggcuagagugcaguggugggaucuc

SEQ ID NO: 138444 - RNA, 32 nt, Human
cugcccggggcaggaggaagauugcaggggcg

SEQ ID NO: 138445 - RNA, 32 nt, Human
cugcccgggggcccugcggugaacacugguca

SEQ ID NO: 138446 - RNA, 32 nt, Human
cugcccgucauuguucucgcaguuagaugggg

SEQ ID NO: 138447 - RNA, 32 nt, Human
cugcccguccccaucuuaauaaagaccaugcc

SEQ ID NO: 138448 - RNA, 32 nt, Human
cugcccgugacucagcugccagcuucauuuuc

SEQ ID NO: 138449 - RNA, 19 nt, Human
cugcccgugcacagcauca

SEQ ID NO: 138450 - RNA, 32 nt, Human
cugcccgugucuuccgaagauaccaagugaaa

SEQ ID NO: 138451 - RNA, 32 nt, Human
cugcccguuucgacugcaagaucaguggcacc

SEQ ID NO: 138452 - RNA, 32 nt, Human
cugcccuaaagccugacauucuugcacagggu

SEQ ID NO: 138453 - RNA, 32 nt, Human
cugcccuaaccacuucuuacaugucaucuuaa

SEQ ID NO: 138454 - RNA, 32 nt, Human
cugcccuaaucucaguuacaaagccuaaaauu

SEQ ID NO: 138455 - RNA, 20 nt, Human
cugcccuacagcccugcagg

SEQ ID NO: 138456 - RNA, 32 nt, Human
cugcccuacccacagggauuccacaucaaggu

SEQ ID NO: 138457 - RNA, 19 nt, Human
cugcccuaccccaccauca

SEQ ID NO: 138458 - RNA, 24 nt, Human
cugcccuaccggcggcgccucuca

SEQ ID NO: 138459 - RNA, 32 nt, Human
cugcccuaccgguccggccucucuccagucca

SEQ ID NO: 138460 - RNA, 20 nt, Human
cugcccuagaaccugggccu

SEQ ID NO: 138461 - RNA, 32 nt, Human
cugcccuagaaccugggccuaggccacagggg

SEQ ID NO: 138462 - RNA, 24 nt, Human
cugcccuagcaguuugccucugca

SEQ ID NO: 138463 - RNA, 23 nt, Human
cugcccuagccccacgcuaugca

SEQ ID NO: 138464 - RNA, 21 nt, Human
cugcccuagucugagccuagu

SEQ ID NO: 138465 - RNA, 18 nt, Human
cugcccuagugucuccau

SEQ ID NO: 138466 - RNA, 32 nt, Human
cugcccuauaaauaagcaaacaaaaugguauu

SEQ ID NO: 138467 - RNA, 21 nt, Human
cugcccuauacgccgccuuca

SEQ ID NO: 138468 - RNA, 32 nt, Human
cugcccuaugauuuggccucuggagcaucccg

SEQ ID NO: 138469 - RNA, 32 nt, Human
cugcccuauucagcagagaugcagcucuggga

SEQ ID NO: 138470 - RNA, 32 nt, Human
cugcccucaccucugugcccagccuggaaacc

SEQ ID NO: 138471 - RNA, 20 nt, Human
cugcccucacugggccucuc

SEQ ID NO: 138472 - RNA, 32 nt, Human
cugcccucagcccugguuccucccucucuggc

SEQ ID NO: 138473 - RNA, 18 nt, Human
cugcccucagcuccgccu

SEQ ID NO: 138474 - RNA, 32 nt, Human
cugcccucaggaccugccugaccugccaguga

SEQ ID NO: 138475 - RNA, 32 nt, Human
cugcccucagggugccuguccaggaagagcug

SEQ ID NO: 138476 - RNA, 32 nt, Human
cugcccucaggugauccacccaccucagccuc

SEQ ID NO: 138477 - RNA, 18 nt, Human
cugcccucagucccggcu

SEQ ID NO: 138478 - RNA, 32 nt, Human
cugcccucagugggagaugagaauggucauua

SEQ ID NO: 138479 - RNA, 32 nt, Human
cugcccucaucuggcccuggccagcucugcau

SEQ ID NO: 138480 - RNA, 32 nt, Human
cugcccuccagcccaggacuaggggcaggacu

SEQ ID NO: 138481 - RNA, 32 nt, Human
cugcccuccagccuggaugacagagugagauc

SEQ ID NO: 138482 - RNA, 32 nt, Human
cugcccuccagccuggggagacagagcgagau

SEQ ID NO: 138483 - RNA, 32 nt, Human
cugcccuccagccugggugacagagcgagacu

SEQ ID NO: 138484 - RNA, 32 nt, Human
cugcccuccagccugggugacagagugagacc

SEQ ID NO: 138485 - RNA, 32 nt, Human
cugcccuccagccugggugacagagugagauu

SEQ ID NO: 138486 - RNA, 32 nt, Human
cugcccuccaucucagccauuggggcagggac

SEQ ID NO: 138487 - RNA, 32 nt, Human
cugcccuccauucuaucuacucccucucugca

SEQ ID NO: 138488 - RNA, 22 nt, Human
cugcccucccaagucucuggug

SEQ ID NO: 138489 - RNA, 32 nt, Human
cugcccucccauccucccuguauccauucaug

SEQ ID NO: 138490 - RNA, 32 nt, Human
cugcccucccccauccucucccacacacauuc

SEQ ID NO: 138491 - RNA, 32 nt, Human
cugcccuccccucgccccuuggcauuggaggc

SEQ ID NO: 138492 - RNA, 22 nt, Human
cugcccuccccucucccccagg

SEQ ID NO: 138493 - RNA, 32 nt, Human
cugcccucccggcuucccaguaagcacacagc

SEQ ID NO: 138494 - RNA, 32 nt, Human
cugcccucccugccuuccccagggucccucag

SEQ ID NO: 138495 - RNA, 32 nt, Human
cugcccuccguggucccucccugggcuccagg

SEQ ID NO: 138496 - RNA, 32 nt, Human
cugcccuccuaccuguggggguuuccagcccu

SEQ ID NO: 138497 - RNA, 32 nt, Human
cugcccuccuccccuagcguugcccagccugg

SEQ ID NO: 138498 - RNA, 32 nt, Human
cugcccuccucuuccuccuccuccuccuccuc

SEQ ID NO: 138499 - RNA, 20 nt, Human
cugcccuccugcuucgggcc

SEQ ID NO: 138500 - RNA, 18 nt, Human
cugcccuccuucuccuua

SEQ ID NO: 138501 - RNA, 24 nt, Human
cugcccuccuucuuuguucuggua

SEQ ID NO: 138502 - RNA, 32 nt, Human
cugcccucgcccggccucuccauucguccccc

SEQ ID NO: 138503 - RNA, 32 nt, Human
cugcccucgcugccuggugaggaccagaucuc

SEQ ID NO: 138504 - RNA, 32 nt, Human
cugcccucggggagagaagaaaggagggggca

SEQ ID NO: 138505 - RNA, 22 nt, Human
cugcccucguccccagccugca

SEQ ID NO: 138506 - RNA, 32 nt, Human
cugcccucguugguggaggggagggagagagc

SEQ ID NO: 138507 - RNA, 32 nt, Human
cugcccucuacaucugcccucagcugggucca

SEQ ID NO: 138508 - RNA, 32 nt, Human
cugcccucuccagauuccccaggcucucagag

SEQ ID NO: 138509 - RNA, 32 nt, Human
cugcccucuccaggaccaagccggguucuugg

SEQ ID NO: 138510 - RNA, 32 nt, Human
cugcccucuccccucucucccucccccuaacu

SEQ ID NO: 138511 - RNA, 32 nt, Human
cugcccucuccucacuccucuggacuuggccc

SEQ ID NO: 138512 - RNA, 32 nt, Human
cugcccucuccucuccucucuacguggccgcc

SEQ ID NO: 138513 - RNA, 32 nt, Human
cugcccucuccuugcccugccucagcugcugc

SEQ ID NO: 138514 - RNA, 18 nt, Human
cugcccucucgcuuuccc

SEQ ID NO: 138515 - RNA, 32 nt, Human
cugcccucugaccacacgcugcguucacugcc

SEQ ID NO: 138516 - RNA, 32 nt, Human
cugcccucugcagcccucugccagccucuugg

SEQ ID NO: 138517 - RNA, 20 nt, Human
cugcccucugccaaccuccc

SEQ ID NO: 138518 - RNA, 32 nt, Human
cugcccucugccccaucauugcaccugcaggc

SEQ ID NO: 138519 - RNA, 32 nt, Human
cugcccucuggcagucaugcaccgcugucugc

SEQ ID NO: 138520 - RNA, 32 nt, Human
cugcccucugucggcccugcuuccugccagga

SEQ ID NO: 138521 - RNA, 26 nt, Human
cugcccucugugcccaucucuccagg

SEQ ID NO: 138522 - RNA, 32 nt, Human
cugcccucuguuugcaggcacagggucacagu

SEQ ID NO: 138523 - RNA, 32 nt, Human
cugcccucuucugcugccccugccucaugggc

SEQ ID NO: 138524 - RNA, 32 nt, Human
cugcccucuugagccagcacaggaaggugagg

SEQ ID NO: 138525 - RNA, 32 nt, Human
cugcccucuugcacuuccucucccagaaccca

SEQ ID NO: 138526 - RNA, 22 nt, Human
cugcccugaacccacugcugcc

SEQ ID NO: 138527 - RNA, 18 nt, Human
cugcccugaacgaacugc

SEQ ID NO: 138528 - RNA, 20 nt, Human
cugcccugaacucaccgccu

SEQ ID NO: 138529 - RNA, 32 nt, Human
cugcccugaacuccaggcagcggggacagggc

SEQ ID NO: 138530 - RNA, 32 nt, Human
cugcccugaagccguuggucagcggcccgagc

SEQ ID NO: 138531 - RNA, 32 nt, Human
cugcccugaagcuggcaguucagucccuuauu

SEQ ID NO: 138532 - RNA, 21 nt, Human
cugcccugaauacuggcugcc

SEQ ID NO: 138533 - RNA, 22 nt, Human
cugcccugaaucucggcuuccu

SEQ ID NO: 138534 - RNA, 22 nt, Human
cugcccugacccagccccuguc

SEQ ID NO: 138535 - RNA, 23 nt, Human
cugcccugaccccagccccugcc

SEQ ID NO: 138536 - RNA, 21 nt, Human
cugcccugaccccaggaggcu

SEQ ID NO: 138537 - RNA, 32 nt, Human
cugcccugaccuggaaccucugggagggcugc

SEQ ID NO: 138538 - RNA, 22 nt, Human
cugcccugaccuuccugcuucc

SEQ ID NO: 138539 - RNA, 20 nt, Human
cugcccugacuggggcugcu

SEQ ID NO: 138540 - RNA, 31 nt, Human
cugcccugacuucucauaucuugccuaggaa

SEQ ID NO: 138541 - RNA, 18 nt, Human
cugcccugagaagcugcu

SEQ ID NO: 138542 - RNA, 19 nt, Human
cugcccugagacagcagcc

SEQ ID NO: 138543 - RNA, 32 nt, Human
cugcccugagcagagucaucaugucuucugag

SEQ ID NO: 138544 - RNA, 23 nt, Human
cugcccugagcugucccgagcua

SEQ ID NO: 138545 - RNA, 20 nt, Human
cugcccugagggaaacgccu

SEQ ID NO: 138546 - RNA, 23 nt, Human
cugcccugagggcgggccggccu

SEQ ID NO: 138547 - RNA, 21 nt, Human
cugcccugaggggaaacgccu

SEQ ID NO: 138548 - RNA, 18 nt, Human
cugcccugaggguagcca

SEQ ID NO: 138549 - RNA, 32 nt, Human
cugcccugagucugggacuucugccuccaugg

SEQ ID NO: 138550 - RNA, 20 nt, Human
cugcccugagugaaacgccu

SEQ ID NO: 138551 - RNA, 32 nt, Human
cugcccugagugacucacgccugcugcuguuu

SEQ ID NO: 138552 - RNA, 21 nt, Human
cugcccugauagggcuuaccu

SEQ ID NO: 138553 - RNA, 18 nt, Human
cugcccugauccacgcgc

SEQ ID NO: 138554 - RNA, 22 nt, Human
cugcccugaugacccacccgcc

SEQ ID NO: 138555 - RNA, 19 nt, Human
cugcccugaugcgucuacc

SEQ ID NO: 138556 - RNA, 21 nt, Human
cugcccugaugucagcugcuu

SEQ ID NO: 138557 - RNA, 20 nt, Human
cugcccugauuccaagugcu

SEQ ID NO: 138558 - RNA, 23 nt, Human
cugcccugauuccacggcugccu

SEQ ID NO: 138559 - RNA, 32 nt, Human
cugcccugcaccugcgacccucaggcuagacc

SEQ ID NO: 138560 - RNA, 32 nt, Human
cugcccugcacuccugccucccagcccacagc

SEQ ID NO: 138561 - RNA, 21 nt, Human
cugcccugcagcccugggcca

SEQ ID NO: 138562 - RNA, 20 nt, Human
cugcccugcagucugagcua

SEQ ID NO: 138563 - RNA, 32 nt, Human
cugcccugcagucugcagugccagcacgcaaa

SEQ ID NO: 138564 - RNA, 32 nt, Human
cugcccugcaugcccaggcuugugagccaagg

SEQ ID NO: 138565 - RNA, 18 nt, Human
cugcccugcauuccugca

SEQ ID NO: 138566 - RNA, 18 nt, Human
cugcccugccaccucccc

SEQ ID NO: 138567 - RNA, 32 nt, Human
cugcccugccagcugcagccugguuggcagca

SEQ ID NO: 138568 - RNA, 32 nt, Human
cugcccugccaucucaggccaaagggagggga

SEQ ID NO: 138569 - RNA, 22 nt, Human
cugcccugcccaauuuugcagg

SEQ ID NO: 138570 - RNA, 21 nt, Human
cugcccugcccccaccuuccc

SEQ ID NO: 138571 - RNA, 20 nt, Human
cugcccugcccucaccuccc

SEQ ID NO: 138572 - RNA, 23 nt, Human
cugcccugcccucugcuucugca

SEQ ID NO: 138573 - RNA, 17 nt, Human
cugcccugcccugcagg

SEQ ID NO: 138574 - RNA, 32 nt, Human
cugcccugcccuggccugccccggcgcccucc

SEQ ID NO: 138575 - RNA, 22 nt, Human
cugcccugccuccccuuucacc

SEQ ID NO: 138576 - RNA, 31 nt, Human
cugcccugccucuccacgcacaguguuaagg

SEQ ID NO: 138577 - RNA, 31 nt, Human
cugcccugccucucgugccggguguugcuuc

SEQ ID NO: 138578 - RNA, 21 nt, Human
cugcccugccucucucacagg

SEQ ID NO: 138579 - RNA, 22 nt, Human
cugcccugccugaagcuccccc

SEQ ID NO: 138580 - RNA, 19 nt, Human
cugcccugccugccugcug

SEQ ID NO: 138581 - RNA, 21 nt, Human
cugcccugcgcuccgcuuugc

SEQ ID NO: 138582 - RNA, 21 nt, Human
cugcccugcggccccgucugu

SEQ ID NO: 138583 - RNA, 23 nt, Human
cugcccugcugaccacacuaccu

SEQ ID NO: 138584 - RNA, 20 nt, Human
cugcccugcugccgccuccc

SEQ ID NO: 138585 - RNA, 32 nt, Human
cugcccugcugccuggacugggacuguuagag

SEQ ID NO: 138586 - RNA, 32 nt, Human
cugcccugcuguaguccccaggccagugcuug

SEQ ID NO: 138587 - RNA, 32 nt, Human
cugcccugcugucccaauccuagcuuuucuau

SEQ ID NO: 138588 - RNA, 18 nt, Human
cugcccugcugucuacau

SEQ ID NO: 138589 - RNA, 18 nt, Human
cugcccugcuucccccaa

SEQ ID NO: 138590 - RNA, 19 nt, Human
cugcccugcuucccccagg

SEQ ID NO: 138591 - RNA, 18 nt, Human
cugcccugcuuucagcaa

SEQ ID NO: 138592 - RNA, 32 nt, Human
cugcccugcuuugcagaagccccacugcauga

SEQ ID NO: 138593 - RNA, 19 nt, Human
cugcccuggaccugugaca

SEQ ID NO: 138594 - RNA, 18 nt, Human
cugcccuggaggcaucca

SEQ ID NO: 138595 - RNA, 32 nt, Human
cugcccuggaucuggaguggagcugcucugag

SEQ ID NO: 138596 - RNA, 21 nt, Human
cugcccuggcaagagccugca

SEQ ID NO: 138597 - RNA, 18 nt, Human
cugcccuggcacagcugc

SEQ ID NO: 138598 - RNA, 21 nt, Human
cugcccuggcagcugucuuca

SEQ ID NO: 138599 - RNA, 32 nt, Human
cugcccuggcccaaagccagacauguacaagg

SEQ ID NO: 138600 - RNA, 21 nt, Human
cugcccuggcccuggccuugc

SEQ ID NO: 138601 - RNA, 22 nt, Human
cugcccuggccuaccuccugca

SEQ ID NO: 138602 - RNA, 18 nt, Human
cugcccuggccucagcau

SEQ ID NO: 138603 - RNA, 20 nt, Human
cugcccuggccuccguagcc

SEQ ID NO: 138604 - RNA, 21 nt, Human
cugcccuggccucugucugca

SEQ ID NO: 138605 - RNA, 29 nt, Human
cugcccuggcugcagucagugcccagggc

SEQ ID NO: 138606 - RNA, 29 nt, Human
cugcccuggcugcuguuuucccuccugcc

SEQ ID NO: 138607 - RNA, 25 nt, Human
cugcccuggcugggcauggcugccu

SEQ ID NO: 138608 - RNA, 18 nt, Human
cugcccuggcuuugagcu

SEQ ID NO: 138609 - RNA, 32 nt, Human
cugcccugggagaggaagggaguccagauccc

SEQ ID NO: 138610 - RNA, 32 nt, Human
cugcccugggagaggggacgaggaccccacag

SEQ ID NO: 138611 - RNA, 16 nt, Human
cugcccugggaggcgc

SEQ ID NO: 138612 - RNA, 32 nt, Human
cugcccugggcaugcccagccccugguggugg

SEQ ID NO: 138613 - RNA, 22 nt, Human
cugcccugggcccaccacugcc

SEQ ID NO: 138614 - RNA, 32 nt, Human
cugcccugggcugggugcccgaggggcucaua

SEQ ID NO: 138615 - RNA, 32 nt, Human
cugcccuggggaaggaggauggauugagagaa

SEQ ID NO: 138616 - RNA, 20 nt, Human
cugcccuggggcagcuuccu

SEQ ID NO: 138617 - RNA, 22 nt, Human
cugcccugggggcccacugccu

SEQ ID NO: 138618 - RNA, 32 nt, Human
cugcccugggguccagcaggucaucccucccu

SEQ ID NO: 138619 - RNA, 32 nt, Human
cugcccugggucagaggagcccccuugggcuu

SEQ ID NO: 138620 - RNA, 21 nt, Human
cugcccuggguccugccugca

SEQ ID NO: 138621 - RNA, 32 nt, Human
cugcccugggucuuuggcugccuguguccuca

SEQ ID NO: 138622 - RNA, 32 nt, Human
cugcccugggugacccuggcaggugcgcucag

SEQ ID NO: 138623 - RNA, 21 nt, Human
cugcccuggucauggccgccu

SEQ ID NO: 138624 - RNA, 32 nt, Human
cugcccuggugccucuucccuggggcugaauc

SEQ ID NO: 138625 - RNA, 19 nt, Human
cugcccugguuccugucug

SEQ ID NO: 138626 - RNA, 21 nt, Human
cugcccugguuucaacuuccu

SEQ ID NO: 138627 - RNA, 19 nt, Human
cugcccuguaaugaggcca

SEQ ID NO: 138628 - RNA, 32 nt, Human
cugcccuguccaccccuucucauuucccuuaa

SEQ ID NO: 138629 - RNA, 21 nt, Human
cugcccugucccugccaugca

SEQ ID NO: 138630 - RNA, 32 nt, Human
cugcccugucccugcuugguucuugaaguuuu

SEQ ID NO: 138631 - RNA, 20 nt, Human
cugcccuguccucugccuug

SEQ ID NO: 138632 - RNA, 32 nt, Human
cugcccuguccugccuuggacacuucccugag

SEQ ID NO: 138633 - RNA, 19 nt, Human
cugcccugucuuuccagca

SEQ ID NO: 138634 - RNA, 19 nt, Human
cugcccugugcagcugccu

SEQ ID NO: 138635 - RNA, 23 nt, Human
cugcccugugcagcugccuggca

SEQ ID NO: 138636 - RNA, 32 nt, Human
cugcccugugcaugucuggacucacggagcuc

SEQ ID NO: 138637 - RNA, 22 nt, Human
cugcccugugcuccuccccgca

SEQ ID NO: 138638 - RNA, 32 nt, Human
cugcccuguggacacuggcugggaaggcaggu

SEQ ID NO: 138639 - RNA, 21 nt, Human
cugcccuguggcugcuuugca

SEQ ID NO: 138640 - RNA, 21 nt, Human
cugcccuguggucauggccca

SEQ ID NO: 138641 - RNA, 22 nt, Human
cugcccuguucacacaaccccu

SEQ ID NO: 138642 - RNA, 32 nt, Human
cugcccuguucccagccacuucccaaccugau

SEQ ID NO: 138643 - RNA, 23 nt, Human
cuggaauucccccucccugcugu

SEQ ID NO: 138644 - RNA, 22 nt, Human
cuggaauugcaggcaugagcca

SEQ ID NO: 138645 - RNA, 17 nt, Human
cuggaauuggcacuuca

SEQ ID NO: 138646 - RNA, 19 nt, Human
cuggaauuuuuugggcuuu

SEQ ID NO: 138647 - RNA, 32 nt, Human
cuggacaaaccugaacaguuccuuuaugaacu

SEQ ID NO: 138648 - RNA, 32 nt, Human
cuggacaaagagagccuuugcucugugauaug

SEQ ID NO: 138649 - RNA, 29 nt, Human
cuggacaaagcguucacucccaaccugac

SEQ ID NO: 138650 - RNA, 32 nt, Human
cuggacaacacagcagaccccgucuuuauaaa

SEQ ID NO: 138651 - RNA, 32 nt, Human
cuggacaacauagugaaacccugucucuacua

SEQ ID NO: 138652 - RNA, 24 nt, Human
cuggacaacauagugagaccccgu

SEQ ID NO: 138653 - RNA, 32 nt, Human
cuggacaacaucgugaaaccuugucucuacaa

SEQ ID NO: 138654 - RNA, 24 nt, Human
cuggacaacauggcaaaacccugu

SEQ ID NO: 138655 - RNA, 32 nt, Human
cuggacaacauggcaaaacccugucucuacaa

SEQ ID NO: 138656 - RNA, 32 nt, Human
cuggacaacauggcaaaacccugucucuccca

SEQ ID NO: 138657 - RNA, 32 nt, Human
cuggacaacauggcaagacccauuucuacaaa

SEQ ID NO: 138658 - RNA, 32 nt, Human
cuggacaacauggcgaaaaaccgccucuacaa

SEQ ID NO: 138659 - RNA, 32 nt, Human
cuggacaacauggcgagaccccaccucuacga

SEQ ID NO: 138660 - RNA, 24 nt, Human
cuggacaacaugggaaaacccugu

SEQ ID NO: 138661 - RNA, 32 nt, Human
cuggacaacaugggaaaacccugucucuaucc

SEQ ID NO: 138662 - RNA, 32 nt, Human
cuggacaacauggggagaccccaucucuaccg

SEQ ID NO: 138663 - RNA, 20 nt, Human
cuggacaacauggugaaacc

SEQ ID NO: 138664 - RNA, 22 nt, Human
cuggacaacauggugaaacccc

SEQ ID NO: 138665 - RNA, 32 nt, Human
cuggacaacauggugaaaccccaucucuacga

SEQ ID NO: 138666 - RNA, 32 nt, Human
cuggacaacauggugaaaccccaucucuuuaa

SEQ ID NO: 138667 - RNA, 24 nt, Human
cuggacaacauggugaaaccccgu

SEQ ID NO: 138668 - RNA, 32 nt, Human
cuggacaacauggugaaaccccgucucuacaa

SEQ ID NO: 138669 - RNA, 32 nt, Human
cuggacaacauggugaaaccccuucucuacua

SEQ ID NO: 138670 - RNA, 32 nt, Human
cuggacaacauggugaaacccuaucucuacua

SEQ ID NO: 138671 - RNA, 24 nt, Human
cuggacaacauggugaaacccugu

SEQ ID NO: 138672 - RNA, 32 nt, Human
cuggacaacauggugaaacccugucucuacug

SEQ ID NO: 138673 - RNA, 32 nt, Human
cuggacaacauggugaaacccuucucuacuaa

SEQ ID NO: 138674 - RNA, 24 nt, Human
cuggacaacauggugaaaccucgu

SEQ ID NO: 138675 - RNA, 32 nt, Human
cuggacaacauggugaacccgucucuacuaau

SEQ ID NO: 138676 - RNA, 24 nt, Human
cuggacaacauggugagaccucgu

SEQ ID NO: 138677 - RNA, 32 nt, Human
cuggacaacauggugagaccucgucucuacaa

SEQ ID NO: 138678 - RNA, 32 nt, Human
cuggacaacauugugaaaccuugucucuacaa

SEQ ID NO: 138679 - RNA, 32 nt, Human
cuggacaaccaaguuaaccccaauugaaagca

SEQ ID NO: 138680 - RNA, 32 nt, Human
cuggacaacuccuuccuguugagggucgagcc

SEQ ID NO: 138681 - RNA, 16 nt, Human
cuggacaagccucaug

SEQ ID NO: 138682 - RNA, 32 nt, Human
cuggacaagguguuuggggcaugcugcccccg

SEQ ID NO: 138683 - RNA, 24 nt, Human
cuggacaauauagugaaaccccgu

SEQ ID NO: 138684 - RNA, 32 nt, Human
cuggacaauauagugaaaccccgucucuacua

SEQ ID NO: 138685 - RNA, 32 nt, Human
cuggacaauauggugaaacccugucuuuacua

SEQ ID NO: 138686 - RNA, 32 nt, Human
cuggacaauauggugaagcccuaucucuacua

SEQ ID NO: 138687 - RNA, 32 nt, Human
cuggacacaagcuuagauucucuauguauagu

SEQ ID NO: 138688 - RNA, 32 nt, Human
cuggacacaccucggcugugugguguggccug

SEQ ID NO: 138689 - RNA, 32 nt, Human
cuggacacaccugccaagagagcccaggccga

SEQ ID NO: 138690 - RNA, 23 nt, Human
cuggacacccccuuggugcucgc

SEQ ID NO: 138691 - RNA, 32 nt, Human
cuggacaccuucacuccagcuggacaaagacu

SEQ ID NO: 138692 - RNA, 32 nt, Human
cuggacacgcagagagcggaagaugggcagug

SEQ ID NO: 138693 - RNA, 24 nt, Human
cuggacacgcugguggugcugcac

SEQ ID NO: 138694 - RNA, 20 nt, Human
cuggacacucccucccugca

SEQ ID NO: 138695 - RNA, 32 nt, Human
cuggacacucucugcccugccucccucugcug

SEQ ID NO: 138696 - RNA, 32 nt, Human
cuggacacuggcucugagcugacauugauucc

SEQ ID NO: 138697 - RNA, 25 nt, Human
cuggacacuguaacgugugcugugu

SEQ ID NO: 138698 - RNA, 32 nt, Human
cuggacagacuccauuuuagccucuucacuug

SEQ ID NO: 138699 - RNA, 32 nt, Human
cuggacagagaagagaaaaaugcaggacacug

SEQ ID NO: 138700 - RNA, 32 nt, Human
cuggacagagccgccucccucugcuugcccag

SEQ ID NO: 138701 - RNA, 32 nt, Human
cuggacagagcugaauaggaaagacuugcuau

SEQ ID NO: 138702 - RNA, 32 nt, Human
cuggacagagcugggguaagggaaaacaggaa

SEQ ID NO: 138703 - RNA, 32 nt, Human
cuggacagaggaagaugggagggugcucauca

SEQ ID NO: 138704 - RNA, 32 nt, Human
cuggacagaggugugauuccaggccugguguc

SEQ ID NO: 138705 - RNA, 32 nt, Human
cuggacagagguuucugggagaccuaccggcg

SEQ ID NO: 138706 - RNA, 32 nt, Human
cuggacagcaucauuuacuaucucaagccuga

SEQ ID NO: 138707 - RNA, 22 nt, Human
cuggacagcauggcaaaacccu

SEQ ID NO: 138708 - RNA, 32 nt, Human
cuggacagccauuagaccucagugccagggca

SEQ ID NO: 138709 - RNA, 32 nt, Human
cuggacagccgcccccagccugcugcccccag

SEQ ID NO: 138710 - RNA, 32 nt, Human
cuggacagccuagacuucuuccucagugucag

SEQ ID NO: 138711 - RNA, 32 nt, Human
cuggacagccuccucuuuucuagaagucuauu

SEQ ID NO: 138712 - RNA, 32 nt, Human
cuggacagccuccuucagcccuucuguaccug

SEQ ID NO: 138713 - RNA, 32 nt, Human
cuggacaggaguuagccagacagggaaauugc

SEQ ID NO: 138714 - RNA, 32 nt, Human
cuggacaggccugccugcgugcugggacaugu

SEQ ID NO: 138715 - RNA, 32 nt, Human
cuggacagggagagggaggguguuagagaaug

SEQ ID NO: 138716 - RNA, 32 nt, Human
cuggacagggauuggugggcuuggggaacgga

SEQ ID NO: 138717 - RNA, 32 nt, Human
cuggacagggccagcugcugggggagcggcac

SEQ ID NO: 138718 - RNA, 32 nt, Human
cuggacaguagaugggccgacacacacuuggc

SEQ ID NO: 138719 - RNA, 32 nt, Human
cuggacagucucuuguccuguguuuguaauug

SEQ ID NO: 138720 - RNA, 32 nt, Human
cuggacaucccaucgaaugaaaggacacuagu

SEQ ID NO: 138721 - RNA, 32 nt, Human
cuggacaugagccuuugaccuggguggggcag

SEQ ID NO: 138722 - RNA, 20 nt, Human
cuggacaugcucuguugugc

SEQ ID NO: 138723 - RNA, 32 nt, Human
cuggacaugguggcacgugccuguaaucccag

SEQ ID NO: 138724 - RNA, 32 nt, Human
cuggacaugguggcucaugccuguaaucccag

SEQ ID NO: 138725 - RNA, 32 nt, Human
cuggacauggugguggguaccuguaaucccag

SEQ ID NO: 138726 - RNA, 32 nt, Human
cuggacauuaacaagaucauuaucuucauguu

SEQ ID NO: 138727 - RNA, 32 nt, Human
cuggacauuagaagucacagacuuuguauaua

SEQ ID NO: 138728 - RNA, 22 nt, Human
cuggacauucaaagaccaaaga

SEQ ID NO: 138729 - RNA, 26 nt, Human
cuggaccaacuggccucuuccuuucc

SEQ ID NO: 138730 - RNA, 32 nt, Human
cuggaccaaugcccagaaucucugagcuuuuu

SEQ ID NO: 138731 - RNA, 32 nt, Human
cuggaccaccaccaauggauauacaaauggca

SEQ ID NO: 138732 - RNA, 32 nt, Human
cuggaccacugccucccucccucccccuggca

SEQ ID NO: 138733 - RNA, 32 nt, Human
cuggaccacuuccuugcuuugauguuacuggg

SEQ ID NO: 138734 - RNA, 32 nt, Human
cuggaccacuuuuaaaggggaagucccuuauu

SEQ ID NO: 138735 - RNA, 32 nt, Human
cuggaccagaagcagggaggguguggagaagg

SEQ ID NO: 138736 - RNA, 32 nt, Human
cuggaccagccccaggcuccugugcuggcggu

SEQ ID NO: 138737 - RNA, 32 nt, Human
cuggaccagccccaggcuccugugcugguugc

SEQ ID NO: 138738 - RNA, 32 nt, Human
cuggaccaguggucucacauggugcuacgccu

SEQ ID NO: 138739 - RNA, 32 nt, Human
cuggaccaguuugucuaaguccuggcucuuau

SEQ ID NO: 138740 - RNA, 18 nt, Human
cuggaccaucucucugca

SEQ ID NO: 138741 - RNA, 32 nt, Human
cuggacccaccagcugcacgggcugcugcugc

SEQ ID NO: 138742 - RNA, 32 nt, Human
cuggacccagcaggugaggcucggcuuggauu

SEQ ID NO: 138743 - RNA, 32 nt, Human
cuggacccagccuggucugcacugcaaccucc

SEQ ID NO: 138744 - RNA, 32 nt, Human
cuggacccagcucucccccugcagccaggcuu

SEQ ID NO: 138745 - RNA, 32 nt, Human
cuggaccccucccccucuaucccuaacccugu

SEQ ID NO: 138746 - RNA, 32 nt, Human
cuggaccccucgggcuggcagcucggcggcag

SEQ ID NO: 138747 - RNA, 32 nt, Human
cuggaccccugccccucucuggguggagaagc

SEQ ID NO: 138748 - RNA, 32 nt, Human
cuggaccccugcuaggaggacaggguccccuc

SEQ ID NO: 138749 - RNA, 32 nt, Human
cuggacccuaguuuucaaaucagacucaagaa

SEQ ID NO: 138750 - RNA, 32 nt, Human
cuggacccucacugcugucucugccuccuuuc

SEQ ID NO: 138751 - RNA, 21 nt, Human
cuggacccucuuccaccaccu

SEQ ID NO: 138752 - RNA, 32 nt, Human
cuggacccugcucacugcuguugugggacccu

SEQ ID NO: 138753 - RNA, 32 nt, Human
cuggacccuguggagucucuguagcugcagcu

SEQ ID NO: 138754 - RNA, 21 nt, Human
cuggaccgcgggccccggccu

SEQ ID NO: 138755 - RNA, 22 nt, Human
cuggaccggagcccccuucaca

SEQ ID NO: 138756 - RNA, 32 nt, Human
cuggaccguuggaguggguccuggagacccua

SEQ ID NO: 138757 - RNA, 32 nt, Human
cuggaccuccacccaguccucggccgccaggc

SEQ ID NO: 138758 - RNA, 32 nt, Human
cuggaccuccacccuggccgccuccucccaac

SEQ ID NO: 138759 - RNA, 32 nt, Human
cuggaccugaaugaucaucuuggcaguucuug

SEQ ID NO: 138760 - RNA, 32 nt, Human
cuggaccugcaccauccucugaugccagugca

SEQ ID NO: 138761 - RNA, 32 nt, Human
cuggaccugccugcugcagucacguguaaaca

SEQ ID NO: 138762 - RNA, 32 nt, Human
cuggaccugcuggucugcacugacagccugaa

SEQ ID NO: 138763 - RNA, 22 nt, Human
cuggaccuggaccccagggagg

SEQ ID NO: 138764 - RNA, 32 nt, Human
cuggaccugggagcuccaagauagucuauccg

SEQ ID NO: 138765 - RNA, 32 nt, Human
cuggaccugggcagcccagcagcccugcgaga

SEQ ID NO: 138766 - RNA, 32 nt, Human
cuggaccugggcaggcgggauguguuggccac

SEQ ID NO: 138767 - RNA, 32 nt, Human
cuggaccuggguggagacaggcuucuuaggug

SEQ ID NO: 138768 - RNA, 32 nt, Human
cuggaccuucuuacucucguucauacagcugu

SEQ ID NO: 138769 - RNA, 32 nt, Human
cuggaccuuuccaaucugugcaucaaagcuaa

SEQ ID NO: 138770 - RNA, 32 nt, Human
cuggacgaagugaggaggugggccggcacaca

SEQ ID NO: 138771 - RNA, 32 nt, Human
cuggacgacugugcaaugcugugugcucccgg

SEQ ID NO: 138772 - RNA, 32 nt, Human
cuggacgaugacguggggaaacccuccaccuc

SEQ ID NO: 138773 - RNA, 32 nt, Human
cuggacgcagagccaugaagaagaaguuagug

SEQ ID NO: 138774 - RNA, 32 nt, Human
cuggacgcaggggaccgucccaggaagcggac

SEQ ID NO: 138775 - RNA, 32 nt, Human
cuggacgccagcuguucuucucagccugagcc

SEQ ID NO: 138776 - RNA, 32 nt, Human
cuggacgccauggcucacaccuguaucccaac

SEQ ID NO: 138777 - RNA, 23 nt, Human
cuggacgccccccuggugugcac

SEQ ID NO: 138778 - RNA, 32 nt, Human
cuggacgccggucucacagucacagccacguc

SEQ ID NO: 138779 - RNA, 32 nt, Human
cuggacgccguggcucacgccuguaaucccag

SEQ ID NO: 138780 - RNA, 32 nt, Human
cuggacgccugaucaaaucuggcccacaaugg

SEQ ID NO: 138781 - RNA, 24 nt, Human
cuggacgcgcuggaauaccugcac

SEQ ID NO: 138782 - RNA, 22 nt, Human
cuggacggagccccuaccucug

SEQ ID NO: 138783 - RNA, 24 nt, Human
cuggacggaugaaguccaggugga

SEQ ID NO: 138784 - RNA, 32 nt, Human
cuggacggccagugggagagcgaggccugagc

SEQ ID NO: 138785 - RNA, 32 nt, Human
cuggacggcgagcgccuggugcuggggagugg

SEQ ID NO: 138786 - RNA, 32 nt, Human
cuggacggcuaccacacccaccuacuguuaug

SEQ ID NO: 138787 - RNA, 32 nt, Human
cuggacgggccuggccgccucuuccgcucccu

SEQ ID NO: 138788 - RNA, 32 nt, Human
cuggacgggccuuguccuugccgaggaaaccc

SEQ ID NO: 138789 - RNA, 32 nt, Human
cuggacgucuggacccugccauguggauuaua

SEQ ID NO: 138790 - RNA, 32 nt, Human
cuggacgugcugcugaugguacaccuccaagu

SEQ ID NO: 138791 - RNA, 32 nt, Human
cuggacguggcggcucuugccuguaaucuuag

SEQ ID NO: 138792 - RNA, 32 nt, Human
cuggacgugguggcacacgccuguaaucccag

SEQ ID NO: 138793 - RNA, 32 nt, Human
cuggacgugguggcucacgccuguaaucccaa

SEQ ID NO: 138794 - RNA, 32 nt, Human
cuggacgugguggcucacgccuguaaucccag

SEQ ID NO: 138795 - RNA, 32 nt, Human
cuggacguguagucccagcuacuuaggaggcu

SEQ ID NO: 138796 - RNA, 21 nt, Human
cuggacgugucgcugcugcug

SEQ ID NO: 138797 - RNA, 22 nt, Human
cuggacgugucgcugcugcugc

SEQ ID NO: 138798 - RNA, 32 nt, Human
cuggacuaauuacuugaaggauuuagauagag

SEQ ID NO: 138799 - RNA, 32 nt, Human
cuggacuacauggugaaacuccaucucuacua

SEQ ID NO: 138800 - RNA, 32 nt, Human
cuggacuaggagaaaggcuaaagaaugucagu

SEQ ID NO: 138801 - RNA, 32 nt, Human
cuggacucaagcaacccucccucuuuggccuc

SEQ ID NO: 138802 - RNA, 32 nt, Human
cuggacucaagcaaccuacccagcguggccuc

SEQ ID NO: 138803 - RNA, 32 nt, Human
cuggacucaagcaauccgcccaccuugacuuc

SEQ ID NO: 138804 - RNA, 32 nt, Human
cuggacucaagcaauccucccaccuuggccuu

SEQ ID NO: 138805 - RNA, 32 nt, Human
cuggacucaagcaaucugcccaccuugccucc

SEQ ID NO: 138806 - RNA, 32 nt, Human
cuggacucaagcaaucugcccaccuuggccuu

SEQ ID NO: 138807 - RNA, 32 nt, Human
cuggacucaagcaguccucccaccucagccuc

SEQ ID NO: 138808 - RNA, 32 nt, Human
cuggacucaagcagucugcccaccucagacuc

SEQ ID NO: 138809 - RNA, 32 nt, Human
cuggacucaagcgauccucccacuuccgccuc

SEQ ID NO: 138810 - RNA, 32 nt, Human
cuggacucaaguaauccuccugccucagccua

SEQ ID NO: 138811 - RNA, 32 nt, Human
cuggacucaagugauccgcccaccucggcccc

SEQ ID NO: 138812 - RNA, 32 nt, Human
cuggacucaagugauccucccaccucagccuc

SEQ ID NO: 138813 - RNA, 32 nt, Human
cuggacucaagugauccucccgccucggccuu

SEQ ID NO: 138814 - RNA, 32 nt, Human
cuggacucacuuccugcccaccuggugagggg

SEQ ID NO: 138815 - RNA, 32 nt, Human
cuggacucagccagacucagacagaagucagg

SEQ ID NO: 138816 - RNA, 19 nt, Human
cuggacucaggcuggcaga

SEQ ID NO: 138817 - RNA, 32 nt, Human
cuggacucaugggauccucccaccuuggccuc

SEQ ID NO: 138818 - RNA, 32 nt, Human
cuggacuccagaacuaaauccuuauguaugaa

SEQ ID NO: 138819 - RNA, 32 nt, Human
cuggacuccagccugggcgacagagugagacu

SEQ ID NO: 138820 - RNA, 32 nt, Human
cuggacuccgcacccuccuccaccuccaccuc

SEQ ID NO: 138821 - RNA, 32 nt, Human
cuggacuccuauuuguaaauguuaucaaucua

SEQ ID NO: 138822 - RNA, 32 nt, Human
cuggacuccuuugagcaguugucuccuccagc

SEQ ID NO: 138823 - RNA, 32 nt, Human
cuggacucggggaccuccacuaccagguacug

SEQ ID NO: 138824 - RNA, 32 nt, Human
cuggacucuagugaucugcccaccucaaccuc

SEQ ID NO: 138825 - RNA, 32 nt, Human
cuggacucuccucagcucacaaaacccucuca

SEQ ID NO: 138826 - RNA, 32 nt, Human
cuggacucuccucaguucugugucguguucgg

SEQ ID NO: 138827 - RNA, 32 nt, Human
cuggacucugcaguccaggucucccuucuccc

SEQ ID NO: 138828 - RNA, 32 nt, Human
cuggacucugccccgggggauguggccggcac

SEQ ID NO: 138829 - RNA, 18 nt, Human
cuggacucuuggguccuu

SEQ ID NO: 138830 - RNA, 32 nt, Human
cuggacugaccacaccaaccaggccuucaucc

SEQ ID NO: 138831 - RNA, 17 nt, Human
cuggacugaggaggggu

SEQ ID NO: 138832 - RNA, 32 nt, Human
cuggacugauuucccuuuagaggggaguuaug

SEQ ID NO: 138833 - RNA, 32 nt, Human
cuggacugcacuguagggccuggagaccuguu

SEQ ID NO: 138834 - RNA, 32 nt, Human
cuggacugcagugcaggagaugacagagugag

SEQ ID NO: 138835 - RNA, 32 nt, Human
cuggacugcaguggcacaaucauagcucacug

SEQ ID NO: 138836 - RNA, 18 nt, Human
cuggacugccugcugcug

SEQ ID NO: 138837 - RNA, 32 nt, Human
cuggacugcgugaccuacaaggcucucagcac

SEQ ID NO: 138838 - RNA, 32 nt, Human
cuggacugcugagaaccgccuccugcggcucc

SEQ ID NO: 138839 - RNA, 32 nt, Human
cuggacugcugggcaggggagcuguccuagau

SEQ ID NO: 138840 - RNA, 32 nt, Human
cuggacuggaaccuuuuggagagaacccccgg

SEQ ID NO: 138841 - RNA, 32 nt, Human
cuggacuggacucacuuuucugcuccagggac

SEQ ID NO: 138842 - RNA, 18 nt, Human
cuggacuggccagcccag

SEQ ID NO: 138843 - RNA, 32 nt, Human
cuggacugggaaagcugagugaaacugggcug

SEQ ID NO: 138844 - RNA, 32 nt, Human
cuggacugggagaagggaggcuuggguguugu

SEQ ID NO: 138845 - RNA, 32 nt, Human
cuggacugggccccgacugcagccugcauucu

SEQ ID NO: 138846 - RNA, 32 nt, Human
cuggacuggggagggggcgggcacgccuggcu

SEQ ID NO: 138847 - RNA, 32 nt, Human
cuggacugggucugcccaccucuugggcugug

SEQ ID NO: 138848 - RNA, 32 nt, Human
cuggacugguucccuggauuauggaaacuucg

SEQ ID NO: 138849 - RNA, 32 nt, Human
cuggacugguuggucggggacaggagguaauu

SEQ ID NO: 138850 - RNA, 31 nt, Human
cuggacugucuucucccugcacaagccaggg

SEQ ID NO: 138851 - RNA, 32 nt, Human
cuggacugugacucagaggaugagcaccagau

SEQ ID NO: 138852 - RNA, 32 nt, Human
cuggacugugguggacagugagggccagacag

SEQ ID NO: 138853 - RNA, 32 nt, Human
cuggacuguguuggacccauccuugccccgcu

SEQ ID NO: 138854 - RNA, 32 nt, Human
cuggacuguugucaccuucagugcagucacug

SEQ ID NO: 138855 - RNA, 32 nt, Human
cuggacuuaaggauugcugggccaccgccucu

SEQ ID NO: 138856 - RNA, 32 nt, Human
cuggacuuagacgauccuccugccucagccuc

SEQ ID NO: 138857 - RNA, 32 nt, Human
cuggacuucagcugccuuucuacccccaaugg

SEQ ID NO: 138858 - RNA, 32 nt, Human
cuggacuuccuugcucuccccucuucucaagu

SEQ ID NO: 138859 - RNA, 32 nt, Human
cuggacuucggcgagguggaaguggagcccag

SEQ ID NO: 138860 - RNA, 32 nt, Human
cuggacuucugccucuacuugucccuuuggcc

SEQ ID NO: 138861 - RNA, 32 nt, Human
cuggacuucugugcaagaaagggagaccuaag

SEQ ID NO: 138862 - RNA, 32 nt, Human
cuggacuugaacucuggcaagagaugccaaaa

SEQ ID NO: 138863 - RNA, 32 nt, Human
cuggacuugcaaucccuuccugggucccaucu

SEQ ID NO: 138864 - RNA, 32 nt, Human
cuggacuugcccugccuggaacagggugauuu

SEQ ID NO: 138865 - RNA, 32 nt, Human
cuggacuuggaccugggccugcaguuccuaca

SEQ ID NO: 138866 - RNA, 32 nt, Human
cuggacuugggguuugggugguggugggacaa

SEQ ID NO: 138867 - RNA, 32 nt, Human
cuggacuugguacaaaaugucagugugguccu

SEQ ID NO: 138868 - RNA, 32 nt, Human
cuggacuugguacaaaaugucggugugguccu

SEQ ID NO: 138869 - RNA, 32 nt, Human
cuggacuugucccauuccccugucccuggaaa

SEQ ID NO: 138870 - RNA, 32 nt, Human
cuggacuuuaaaggcauagcugccuuaaaugu

SEQ ID NO: 138871 - RNA, 17 nt, Human
cuggacuuuccuuuuca

SEQ ID NO: 138872 - RNA, 22 nt, Human
cuggacuuuguaaaguugcacc

SEQ ID NO: 138873 - RNA, 32 nt, Human
cuggagaaaaaccugcauccaagcucauuuau

SEQ ID NO: 138874 - RNA, 21 nt, Human
cuggagaaaaccccucccacg

SEQ ID NO: 138875 - RNA, 32 nt, Human
cuggagaaaccagaauccaagaccuccauuca

SEQ ID NO: 138876 - RNA, 32 nt, Human
cuggagaaagagacacacggggugacuguggc

SEQ ID NO: 138877 - RNA, 32 nt, Human
cuggagaaagggaaccacagagccaggaggaa

SEQ ID NO: 138878 - RNA, 32 nt, Human
cuggagaaagggaugcacagagagggaaaaua

SEQ ID NO: 138879 - RNA, 32 nt, Human
cuggagaaauggcaucauuauaagcuaugagu

SEQ ID NO: 138880 - RNA, 18 nt, Human
cuggagaacaggcuccuu

SEQ ID NO: 138881 - RNA, 22 nt, Human
cuggagaacaugagcugaguug

SEQ ID NO: 138882 - RNA, 20 nt, Human
cuggagaaccggccuggguu

SEQ ID NO: 138883 - RNA, 32 nt, Human
cuggagaaccuacagauuuaguucaguucagu

SEQ ID NO: 138884 - RNA, 32 nt, Human
cuggagaagagaggagaggagagaggcagaga

SEQ ID NO: 138885 - RNA, 23 nt, Human
cuggagaagcuacagccugguca

SEQ ID NO: 138886 - RNA, 21 nt, Human
cuggagaagggucggcucucu

SEQ ID NO: 138887 - RNA, 22 nt, Human
cuggagaaguaggccuggaguu

SEQ ID NO: 138888 - RNA, 22 nt, Human
cuggagaagugguuccugcagu

SEQ ID NO: 138889 - RNA, 21 nt, Human
cuggagaauagcgcugaguug

SEQ ID NO: 138890 - RNA, 32 nt, Human
cuggagaaucauccugauagacuuugaguaga

SEQ ID NO: 138891 - RNA, 32 nt, Human
cuggagacacagauguccagagugauuggaga

SEQ ID NO: 138892 - RNA, 20 nt, Human
cuggagacacucccccgcag

SEQ ID NO: 138893 - RNA, 21 nt, Human
cuggagacacuguaccucagu

SEQ ID NO: 138894 - RNA, 20 nt, Human
cuggagacaggauugucugg

SEQ ID NO: 138895 - RNA, 32 nt, Human
cuggagaccagccugguggccgaugucauaga

SEQ ID NO: 138896 - RNA, 32 nt, Human
cuggagaccaugguuuuuaauguuagaacaga

SEQ ID NO: 138897 - RNA, 32 nt, Human
cuggagaccccaaagcuggagggagaugggcu

SEQ ID NO: 138898 - RNA, 32 nt, Human
cuggagaccccagccccagagggcuuugugga

SEQ ID NO: 138899 - RNA, 32 nt, Human
cuggagacccggagacagaggccuggacaagg

SEQ ID NO: 138900 - RNA, 32 nt, Human
cuggagacccucccaauggaugagaguggaaa

SEQ ID NO: 138901 - RNA, 32 nt, Human
cuggagacgacgaggaggaggauuaguccacc

SEQ ID NO: 138902 - RNA, 23 nt, Human
cuggagacgccucucccugcagu

SEQ ID NO: 138903 - RNA, 22 nt, Human
cuggagacgccugaaagacagu

SEQ ID NO: 138904 - RNA, 19 nt, Human
cuggagacgcuuucccugc

SEQ ID NO: 138905 - RNA, 32 nt, Human
cuggagacgucuacuccuuuucggugcuggag

SEQ ID NO: 138906 - RNA, 32 nt, Human
cuggagacgugggggcagggaggggacagugu

SEQ ID NO: 138907 - RNA, 32 nt, Human
cuggagacucacugcaaguuccugcccaggag

SEQ ID NO: 138908 - RNA, 32 nt, Human
cuggagacugccaggugggccugcugccacug

SEQ ID NO: 138909 - RNA, 32 nt, Human
cuggagacuggaaggguucccuuguccuagac

SEQ ID NO: 138910 - RNA, 32 nt, Human
cuggagagaaaagguaguguuuuuguacaagg

SEQ ID NO: 138911 - RNA, 32 nt, Human
cuggagagaaaccguaugaaugugaugaaugu

SEQ ID NO: 138912 - RNA, 32 nt, Human
cuggagagaaaccucaugaauguagugaaugu

SEQ ID NO: 138913 - RNA, 32 nt, Human
cuggagagaaaccuuaugaauguaaugagugu

SEQ ID NO: 138914 - RNA, 32 nt, Human
cuggagagaacagcuccugagcacagcacccu

SEQ ID NO: 138915 - RNA, 22 nt, Human
cuggagagaaccuuacacauuu

SEQ ID NO: 138916 - RNA, 32 nt, Human
cuggagagacagacacgugugaguggucaggc

SEQ ID NO: 138917 - RNA, 32 nt, Human
cuggagagacagacccacccccaagcagggcu

SEQ ID NO: 138918 - RNA, 32 nt, Human
cuggagagaccugacccuucucucacuucuaa

SEQ ID NO: 138919 - RNA, 32 nt, Human
cuggagagagaaggggagaagaauacuuuucu

SEQ ID NO: 138920 - RNA, 32 nt, Human
cuggagagagugaggagagugugugauagcua

SEQ ID NO: 138921 - RNA, 32 nt, Human
cuggagagcagugaggaauuaaucuugcuuuu

SEQ ID NO: 138922 - RNA, 32 nt, Human
cuggagagcaguggccaaucauagcuuacugc

SEQ ID NO: 138923 - RNA, 32 nt, Human
cuggagagcaucuuccuggugauggguuacug

SEQ ID NO: 138924 - RNA, 32 nt, Human
cuggagagccccauccuugccuugccgcucua

SEQ ID NO: 138925 - RNA, 32 nt, Human
cuggagagcggaggagagagaggcagaagaac

SEQ ID NO: 138926 - RNA, 32 nt, Human
cuggagagcuacaccauuuucuucuccaacca

SEQ ID NO: 138927 - RNA, 32 nt, Human
cuggagagcugguucccacagagcucaaugac

SEQ ID NO: 138928 - RNA, 32 nt, Human
cuggagaggaagaggcaagguuuguguauuug

SEQ ID NO: 138929 - RNA, 32 nt, Human
cuggagaggacagucuggcugcagagguggcc

SEQ ID NO: 138930 - RNA, 21 nt, Human
cuggagaggauccuucaguuc

SEQ ID NO: 138931 - RNA, 32 nt, Human
cuggagaggaucuacccgggucccugccuggc

SEQ ID NO: 138932 - RNA, 32 nt, Human
cuggagaggcacagugugaggggcauggggag

SEQ ID NO: 138933 - RNA, 32 nt, Human
cuggagaggcaggcagagggcagugguucucc

SEQ ID NO: 138934 - RNA, 22 nt, Human
cuggagaggugauccugaauug

SEQ ID NO: 138935 - RNA, 19 nt, Human
cuggagaggugggggccac

SEQ ID NO: 138936 - RNA, 20 nt, Human
cuggagaguccuggggccuu

SEQ ID NO: 138937 - RNA, 32 nt, Human
cuggagagugaaggcauggagugaagacacua

SEQ ID NO: 138938 - RNA, 32 nt, Human
cuggagagugaggaggaggaggagccuugguc

SEQ ID NO: 138939 - RNA, 32 nt, Human
cuggagagugugaacaggauuguggacucuuc

SEQ ID NO: 138940 - RNA, 32 nt, Human
cuggagaguguggggaaugggaagaagcaguu

SEQ ID NO: 138941 - RNA, 32 nt, Human
cuggagaguguggggaaugggaagaaguaguu

SEQ ID NO: 138942 - RNA, 32 nt, Human
cuggagauauuuaagacaguaccacuuauaua

SEQ ID NO: 138943 - RNA, 32 nt, Human
cuggagaucagccugggcaacacagggagacu

SEQ ID NO: 138944 - RNA, 32 nt, Human
cuggagaucugcaaauggagggaggggugaag

SEQ ID NO: 138945 - RNA, 32 nt, Human
cuggagaucugcagaucuggaggagacgggaa

SEQ ID NO: 138946 - RNA, 19 nt, Human
cuggagaucugccuuccca

SEQ ID NO: 138947 - RNA, 32 nt, Human
cuggagaugcaagcucuaggcugcgcuuccaa

SEQ ID NO: 138948 - RNA, 32 nt, Human
cuggagcaaggcacucucaaaucuugaacccu

SEQ ID NO: 138949 - RNA, 24 nt, Human
cuggagcacacaccaccccugcag

SEQ ID NO: 138950 - RNA, 32 nt, Human
cuggagcacaggcccuguuuguuugcacauaa

SEQ ID NO: 138951 - RNA, 32 nt, Human
cuggagcacaugcuuacugguggccucaguuu

SEQ ID NO: 138952 - RNA, 32 nt, Human
cuggagcacucugccgcucaagagcugguuug

SEQ ID NO: 138953 - RNA, 20 nt, Human
cuggagcacuugguauucca

SEQ ID NO: 138954 - RNA, 32 nt, Human
cuggagcacuuguguccaugcauguacuuggg

SEQ ID NO: 138955 - RNA, 32 nt, Human
cuggagcagacccuuuucaucuccugugccug

SEQ ID NO: 138956 - RNA, 32 nt, Human
cuggagcagagcaggccaccugugauggcaaa

SEQ ID NO: 138957 - RNA, 32 nt, Human
cuggagcagaggaggggaaaguccagggcuau

SEQ ID NO: 138958 - RNA, 32 nt, Human
cuggagcagcagcagcuggcggagcaauggag

SEQ ID NO: 138959 - RNA, 32 nt, Human
cuggagcagcagcagugugagcgacucugacg

SEQ ID NO: 138960 - RNA, 17 nt, Human
cuggagcagccaggcca

SEQ ID NO: 138961 - RNA, 32 nt, Human
cuggagcagccccugccgccagcgucaggucc

SEQ ID NO: 138962 - RNA, 32 nt, Human
cuggagcagcccuccagaccuggguggaauuc

SEQ ID NO: 138963 - RNA, 32 nt, Human
cuggagcagcuggaagaugcugucauugcacu

SEQ ID NO: 138964 - RNA, 32 nt, Human
cuggagcaggagaacaccuaaagucugauuug

SEQ ID NO: 138965 - RNA, 30 nt, Human
cuggagcaggcuuccaugcugcugugggcg

SEQ ID NO: 138966 - RNA, 32 nt, Human
cuggagcagggugggaaggccucagauggcau

SEQ ID NO: 138967 - RNA, 32 nt, Human
cuggagcaggguggggagucagagcagguccc

SEQ ID NO: 138968 - RNA, 32 nt, Human
cuggagcaggugaagcguuccaccuacuucuu

SEQ ID NO: 138969 - RNA, 32 nt, Human
cuggagcaggugcagcuccuuucagagugacc

SEQ ID NO: 138970 - RNA, 17 nt, Human
cuggagcauacccaccc

SEQ ID NO: 138971 - RNA, 32 nt, Human
cuggagcaugggcagaggagacaggaacaagc

SEQ ID NO: 138972 - RNA, 21 nt, Human
cuggagcauuaccccuacugc

SEQ ID NO: 138973 - RNA, 32 nt, Human
cuggagccaaccuggagaugcagccugagaac

SEQ ID NO: 138974 - RNA, 32 nt, Human
cuggagccaagagggaagggcaggguagagag

SEQ ID NO: 138975 - RNA, 32 nt, Human
cuggagccacagucugucugucuuccaguuca

SEQ ID NO: 138976 - RNA, 21 nt, Human
cuggagccaccgccucgcggg

SEQ ID NO: 138977 - RNA, 32 nt, Human
cuggagccaccugaucacuaacaaaagacauc

SEQ ID NO: 138978 - RNA, 21 nt, Human
cuggagccacugcugcugcug

SEQ ID NO: 138979 - RNA, 32 nt, Human
cuggagccagagagguagaggcugcagugagc

SEQ ID NO: 138980 - RNA, 20 nt, Human
cuggagccagcccugagcca

SEQ ID NO: 138981 - RNA, 21 nt, Human
cuggagccaggcacccugcag

SEQ ID NO: 138982 - RNA, 21 nt, Human
cuggagccaggccaagcugga

SEQ ID NO: 138983 - RNA, 32 nt, Human
cuggagccagggaacacaggagaggggaccag

SEQ ID NO: 138984 - RNA, 32 nt, Human
cuggagccagggagcugcugucccucuugccg

SEQ ID NO: 138985 - RNA, 21 nt, Human
cuggagccagugcccaagugg

SEQ ID NO: 138986 - RNA, 22 nt, Human
cuggagccagugcccaggagga

SEQ ID NO: 138987 - RNA, 17 nt, Human
cuggagccauccaucca

SEQ ID NO: 138988 - RNA, 32 nt, Human
cuggagccaucucugcacuaacugcccuccca

SEQ ID NO: 138989 - RNA, 32 nt, Human
cuggagccaugguccacgccuuccucauucac

SEQ ID NO: 138990 - RNA, 20 nt, Human
cuggagcccaaagcaggcgg

SEQ ID NO: 138991 - RNA, 32 nt, Human
cuggagcccagccugcugcuucccagucuggu

SEQ ID NO: 138992 - RNA, 32 nt, Human
cuggagcccaggaaauugaggcugcagugagc

SEQ ID NO: 138993 - RNA, 32 nt, Human
cuggagcccaggaauucaagaccagucugagc

SEQ ID NO: 138994 - RNA, 32 nt, Human
cuggagcccaggaggcacaggcugcagugagc

SEQ ID NO: 138995 - RNA, 32 nt, Human
cuggagcccaggaggucaaggcugcagugagc

SEQ ID NO: 138996 - RNA, 32 nt, Human
cuggagcccaggaguucgagaccugccuuggc

SEQ ID NO: 138997 - RNA, 32 nt, Human
cuggagcccaggaguucgaggcugcaaugagc

SEQ ID NO: 138998 - RNA, 32 nt, Human
cuggagcccaggaguuugagacaaaccugggu

SEQ ID NO: 138999 - RNA, 32 nt, Human
cuggagcccaggaguuugagaccagcuugggc

SEQ ID NO: 139000 - RNA, 32 nt, Human
cuggagcccaggaguuugaggcugcagcgagc

SEQ ID NO: 139001 - RNA, 22 nt, Human
cuggagcccagguugcaggugg

SEQ ID NO: 139002 - RNA, 32 nt, Human
cuggagcccccagcagaggcaggcugggacgg

SEQ ID NO: 139003 - RNA, 32 nt, Human
cuggagccccugggugggugguggggaggggc

SEQ ID NO: 139004 - RNA, 23 nt, Human
cuggagccccuucacauggugga

SEQ ID NO: 139005 - RNA, 32 nt, Human
cuggagcccgagagguggagguugcagugagc

SEQ ID NO: 139006 - RNA, 32 nt, Human
cuggagcccuccaggguugugagauccagccc

SEQ ID NO: 139007 - RNA, 32 nt, Human
cuggagcccuccucuuggaauauucagccuaa

SEQ ID NO: 139008 - RNA, 32 nt, Human
cuggagcccugccucuccacugcuagauggaa

SEQ ID NO: 139009 - RNA, 32 nt, Human
cuggagcccuggaaaucugggagcagccaccc

SEQ ID NO: 139010 - RNA, 32 nt, Human
cuggagcccuggagaccccaccagccucacca

SEQ ID NO: 139011 - RNA, 23 nt, Human
cuggagcccuucuccacccggau

SEQ ID NO: 139012 - RNA, 32 nt, Human
cuggagcccuugugugacucagccucuguuag

SEQ ID NO: 139013 - RNA, 32 nt, Human
cuggagccgaguuucgcucugcugcccaggcu

SEQ ID NO: 139014 - RNA, 18 nt, Human
cuggagccgccgcugccg

SEQ ID NO: 139015 - RNA, 21 nt, Human
cuggagccggaggucaccaag

SEQ ID NO: 139016 - RNA, 21 nt, Human
cuggagccgucaucccgcgga

SEQ ID NO: 139017 - RNA, 32 nt, Human
cuggagccguggcugagcucagcuggagggag

SEQ ID NO: 139018 - RNA, 32 nt, Human
cuggagccucaaacucuuaggcucaggcgauc

SEQ ID NO: 139019 - RNA, 32 nt, Human
cuggagccucauucuguuuccagcuuugucca

SEQ ID NO: 139020 - RNA, 32 nt, Human
cuggagccuccaggcccaaacaggcugaagcu

SEQ ID NO: 139021 - RNA, 32 nt, Human
cuggagccuccagggaucuaggggagccuggg

SEQ ID NO: 139022 - RNA, 19 nt, Human
cuggagccugagaggugga

SEQ ID NO: 139023 - RNA, 20 nt, Human
cuggagccugaugaggagga

SEQ ID NO: 139024 - RNA, 23 nt, Human
cuggagccugcaauaagggagga

SEQ ID NO: 139025 - RNA, 22 nt, Human
cuggagccugcaggcagguggg

SEQ ID NO: 139026 - RNA, 22 nt, Human
cuggagccugccgggagagugg

SEQ ID NO: 139027 - RNA, 22 nt, Human
cuggagccugcggggcagcagg

SEQ ID NO: 139028 - RNA, 21 nt, Human
cuggagccuggaggaggccga

SEQ ID NO: 139029 - RNA, 21 nt, Human
cuggagccuggcuggagcucu

SEQ ID NO: 139030 - RNA, 32 nt, Human
cuggagccugggaaguugaggcugcagugagc

SEQ ID NO: 139031 - RNA, 32 nt, Human
cuggagccugggaggcagagguugcagugagc

SEQ ID NO: 139032 - RNA, 19 nt, Human
cuggagccugggaggugga

SEQ ID NO: 139033 - RNA, 22 nt, Human
cuggagccuggucagaggagga

SEQ ID NO: 139034 - RNA, 20 nt, Human
cuggagccuguggaggagga

SEQ ID NO: 139035 - RNA, 32 nt, Human
cuggagccugugucagcugaccugugugaaug

SEQ ID NO: 139036 - RNA, 32 nt, Human
cuggagcgagcgcagccuccacaugcccaugu

SEQ ID NO: 139037 - RNA, 32 nt, Human
cuggagcgcaggccgucgccugugcuggcagc

SEQ ID NO: 139038 - RNA, 20 nt, Human
cuggagcgccacacacugca

SEQ ID NO: 139039 - RNA, 18 nt, Human
cuggagcgcccgcgccca

SEQ ID NO: 139040 - RNA, 20 nt, Human
cuggagcgcgcggugacucc

SEQ ID NO: 139041 - RNA, 32 nt, Human
cuggagcgcggcccccucgccuucccuguucc

SEQ ID NO: 139042 - RNA, 17 nt, Human
cuggagcgcggccucca

SEQ ID NO: 139043 - RNA, 32 nt, Human
cuggagcgcggcgcaggcucugccccggcccg

SEQ ID NO: 139044 - RNA, 18 nt, Human
cuggagcgcguagcucua

SEQ ID NO: 139045 - RNA, 32 nt, Human
cuggagcgcgugcagacacagcucuuccggag

SEQ ID NO: 139046 - RNA, 18 nt, Human
cuggagcgcuacggccua

SEQ ID NO: 139047 - RNA, 17 nt, Human
cuggagcgcucacccca

SEQ ID NO: 139048 - RNA, 20 nt, Human
cuggagcgcucagccugcca

SEQ ID NO: 139049 - RNA, 17 nt, Human
cuggagcgcugggccca

SEQ ID NO: 139050 - RNA, 23 nt, Human
cuggagcggacgguuccuacugc

SEQ ID NO: 139051 - RNA, 32 nt, Human
cuggagcggcuguuccagagggguuucagcgu

SEQ ID NO: 139052 - RNA, 17 nt, Human
cuggagcggggcacucc

SEQ ID NO: 139053 - RNA, 19 nt, Human
cuggagcgucgugucucca

SEQ ID NO: 139054 - RNA, 20 nt, Human
cuggagcguguacuacccca

SEQ ID NO: 139055 - RNA, 19 nt, Human
cuggagcgugugaccuuca

SEQ ID NO: 139056 - RNA, 32 nt, Human
cuggagcguugacucccuucucgucucgaggc

SEQ ID NO: 139057 - RNA, 20 nt, Human
cuggagcguuugcugugcca

SEQ ID NO: 139058 - RNA, 32 nt, Human
cuggagcucacaccacgaagcucuuggggccu

SEQ ID NO: 139059 - RNA, 32 nt, Human
cuggagcucacacugcagcccuccauggggag

SEQ ID NO: 139060 - RNA, 32 nt, Human
cuggagcucaccagucuugagggaggugcagg

SEQ ID NO: 139061 - RNA, 24 nt, Human
cuggagcucacccaaggucaccaa

SEQ ID NO: 139062 - RNA, 32 nt, Human
cuggagcucaccccgcucuucuuccaaaccca

SEQ ID NO: 139063 - RNA, 32 nt, Human
cuggagcucacugagcuccuugccucccacaa

SEQ ID NO: 139064 - RNA, 20 nt, Human
cuggagcucacugcacucca

SEQ ID NO: 139065 - RNA, 32 nt, Human
cuggagcucacugcacuccagcagucauggga

SEQ ID NO: 139066 - RNA, 32 nt, Human
cuggagcuccaguucccaggagcaggggcagg

SEQ ID NO: 139067 - RNA, 32 nt, Human
cuggagcucccagccagagcugagcuuaggca

SEQ ID NO: 139068 - RNA, 32 nt, Human
cuggagcucccaggauaccgggguccccgccu

SEQ ID NO: 139069 - RNA, 32 nt, Human
cuggagcucccugagggagccugcacucccug

SEQ ID NO: 139070 - RNA, 32 nt, Human
cuggagcuccuacauggugcacuggaagaacc

SEQ ID NO: 139071 - RNA, 22 nt, Human
cuggagcuccucccgggaccuu

SEQ ID NO: 139072 - RNA, 32 nt, Human
cuggagcuccuuggggugccuuggcuggcagg

SEQ ID NO: 139073 - RNA, 32 nt, Human
cuggagcucuccugccacucucucuaguuccu

SEQ ID NO: 139074 - RNA, 32 nt, Human
cuggagcucugcccccugccccucccugcccc

SEQ ID NO: 139075 - RNA, 32 nt, Human
cuggagcugcaggaguugggaacggggcuuuu

SEQ ID NO: 139076 - RNA, 24 nt, Human
cuggagcugcaggaucccagggga

SEQ ID NO: 139077 - RNA, 18 nt, Human
cuggagcugccacagggg

SEQ ID NO: 139078 - RNA, 20 nt, Human
cuggagcugccagcaccaag

SEQ ID NO: 139079 - RNA, 32 nt, Human
cuggagcugcccccuccaggccaguuugaaga

SEQ ID NO: 139080 - RNA, 32 nt, Human
cuggagcugcccugucuuucauugagccuuag

SEQ ID NO: 139081 - RNA, 18 nt, Human
cuggagcugccucgggcc

SEQ ID NO: 139082 - RNA, 32 nt, Human
cuggagcugcucccaccucccugaccuacccc

SEQ ID NO: 139083 - RNA, 32 nt, Human
cuggagcugcugucaguccugugcuguccuca

SEQ ID NO: 139084 - RNA, 17 nt, Human
cuggagcuggcaagacc

SEQ ID NO: 139085 - RNA, 24 nt, Human
cuggagcuggcaagguagccaagu

SEQ ID NO: 139086 - RNA, 17 nt, Human
cuggagcuggcacucca

SEQ ID NO: 139087 - RNA, 18 nt, Human
cuggagcuggcacuccaa

SEQ ID NO: 139088 - RNA, 32 nt, Human
cuggagcuggcagaggugaugagcggcggaga

SEQ ID NO: 139089 - RNA, 19 nt, Human
cuggagcuggccaucccaa

SEQ ID NO: 139090 - RNA, 19 nt, Human
cuggagcuggcgccaccaa

SEQ ID NO: 139091 - RNA, 32 nt, Human
cuggagcuggcgccaccaacuccagggccuuu

SEQ ID NO: 139092 - RNA, 20 nt, Human
cuggagcuggcggagaccaa

SEQ ID NO: 139093 - RNA, 22 nt, Human
cuggagcugggggccagaaagg

SEQ ID NO: 139094 - RNA, 32 nt, Human
cuggagcugugccucagugaaggggcccagcc

SEQ ID NO: 139095 - RNA, 32 nt, Human
cuggagcuguucugcuuuggaguuaaggauau

SEQ ID NO: 139096 - RNA, 32 nt, Human
cuggagcuuagggauucuccccaccccagccc

SEQ ID NO: 139097 - RNA, 32 nt, Human
cuggagcuucauuuccuucaagugggccuucc

SEQ ID NO: 139098 - RNA, 22 nt, Human
cuggagcuugccucuucaguau

SEQ ID NO: 139099 - RNA, 32 nt, Human
cuggagcuugcugagucuugaaugcccuucua

SEQ ID NO: 139100 - RNA, 32 nt, Human
cuggagcuuugggaacagucuguccuuacaga

SEQ ID NO: 139101 - RNA, 24 nt, Human
cuggaggaaccagaggcacuucca

SEQ ID NO: 139102 - RNA, 32 nt, Human
cuggaggaagacccuggaaggagccagccccu

SEQ ID NO: 139103 - RNA, 32 nt, Human
cuggaggaagaggaggaggaggaggaggaagc

SEQ ID NO: 139104 - RNA, 32 nt, Human
cuggaggaagcugacacggagaugccuggccu

SEQ ID NO: 139105 - RNA, 32 nt, Human
cuggaggaaugugagaagcauaugcuaaaugu

SEQ ID NO: 139106 - RNA, 32 nt, Human
cuggaggacacacagucucaguccagaugccu

SEQ ID NO: 139107 - RNA, 19 nt, Human
cuggaggacacguucagca

SEQ ID NO: 139108 - RNA, 32 nt, Human
cuggaggacagaagcaguacucaacuugcugu

SEQ ID NO: 139109 - RNA, 32 nt, Human
cuggaggacagaccucaggagcuuucauuuca

SEQ ID NO: 139110 - RNA, 32 nt, Human
cuggaggacagccuggccacggagcgguccga

SEQ ID NO: 139111 - RNA, 32 nt, Human
cuggaggacaggaaauagaucuuuauuauguc

SEQ ID NO: 139112 - RNA, 32 nt, Human
cuggaggacaucagugcuuccucuuccaccca

SEQ ID NO: 139113 - RNA, 32 nt, Human
cuggaggacaugagcacauggggccuggaggu

SEQ ID NO: 139114 - RNA, 25 nt, Human
cuggaggaccugccccuaccugcug

SEQ ID NO: 139115 - RNA, 22 nt, Human
cuggaggaccugccccugcagu

SEQ ID NO: 139116 - RNA, 32 nt, Human
cuggaggagaaaagcauuagagggggcagcug

SEQ ID NO: 139117 - RNA, 22 nt, Human
cuggaggagaaccauuacaaca

SEQ ID NO: 139118 - RNA, 26 nt, Human
cuggaggagaaguauuccuguugcug

SEQ ID NO: 139119 - RNA, 32 nt, Human
cuggaggagagugcuggugaauggcaggugug

SEQ ID NO: 139120 - RNA, 32 nt, Human
cuggaggagcacguggcugaugagaaccucaa

SEQ ID NO: 139121 - RNA, 32 nt, Human
cuggaggagcagcuggcucugcucugagaaac

SEQ ID NO: 139122 - RNA, 21 nt, Human
cuggaggagcagcugggcccc

SEQ ID NO: 139123 - RNA, 23 nt, Human
cuggaggagcggccccccgggga

SEQ ID NO: 139124 - RNA, 22 nt, Human
cuggaggagcggcgccgcucca

SEQ ID NO: 139125 - RNA, 20 nt, Human
cuggaggagcuauccaggug

SEQ ID NO: 139126 - RNA, 17 nt, Human
cuggaggagcugggccc

SEQ ID NO: 139127 - RNA, 32 nt, Human
cuggaggagcugguaucacaggcgucccccac

SEQ ID NO: 139128 - RNA, 18 nt, Human
cuggaggaggaaagggag

SEQ ID NO: 139129 - RNA, 22 nt, Human
cuggaggaggagaucaccaagu

SEQ ID NO: 139130 - RNA, 32 nt, Human
cuggaggaggcaggggcaggaagcggccucca

SEQ ID NO: 139131 - RNA, 24 nt, Human
cuggaggaggcugauugcacucca

SEQ ID NO: 139132 - RNA, 22 nt, Human
cuggaggagggacccagcucca

SEQ ID NO: 139133 - RNA, 32 nt, Human
cuggaggagggcaacagccacugggugagcug

SEQ ID NO: 139134 - RNA, 32 nt, Human
cuggaggagggcagugccagcccugggguucu

SEQ ID NO: 139135 - RNA, 32 nt, Human
cuggaggaggggcagagggaguucuaccgaga

SEQ ID NO: 139136 - RNA, 32 nt, Human
cuggaggaggguagggagagaagcugagacca

SEQ ID NO: 139137 - RNA, 32 nt, Human
cuggaggaggguggggcuggccggggacagga

SEQ ID NO: 139138 - RNA, 32 nt, Human
cuggaggagguggagcugcagcugggacugug

SEQ ID NO: 139139 - RNA, 26 nt, Human
cuggaggaguagaaggaugggccccg

SEQ ID NO: 139140 - RNA, 23 nt, Human
cuggaggagucagaaggcaccca

SEQ ID NO: 139141 - RNA, 20 nt, Human
cuggaggagucagacuacca

SEQ ID NO: 139142 - RNA, 32 nt, Human
cuggaggagucggggucucagcagaaccccac

SEQ ID NO: 139143 - RNA, 32 nt, Human
cuggaggagugggcugcaagacugagccuaaa

SEQ ID NO: 139144 - RNA, 19 nt, Human
cuggaggaucuuccugcag

SEQ ID NO: 139145 - RNA, 32 nt, Human
cuggaggaugccgagcagggacucucgucugu

SEQ ID NO: 139146 - RNA, 32 nt, Human
cuggaggauggaugccucccccaggggcucuc

SEQ ID NO: 139147 - RNA, 22 nt, Human
cuggaggcaacucagccugagu

SEQ ID NO: 139148 - RNA, 32 nt, Human
cuggaggcaagaggaagguggaauaagaaguc

SEQ ID NO: 139149 - RNA, 32 nt, Human
cuggaggcaagagggaggggacagaggcccug

SEQ ID NO: 139150 - RNA, 32 nt, Human
cuggaggcacugggacacacgccucucaaagg

SEQ ID NO: 139151 - RNA, 32 nt, Human
cuggaggcagaggugguagugagccgagaugg

SEQ ID NO: 139152 - RNA, 20 nt, Human
cuggaggcagccagcuggca

SEQ ID NO: 139153 - RNA, 32 nt, Human
cuggaggcagccgccccgcgcugcucagcagg

SEQ ID NO: 139154 - RNA, 21 nt, Human
cuggaggcaggcccgggaagg

SEQ ID NO: 139155 - RNA, 32 nt, Human
cuggaggcaggggcagaggugacgacagugcc

SEQ ID NO: 139156 - RNA, 32 nt, Human
cuggaggcaucacgcuacccagcuucaaacua

SEQ ID NO: 139157 - RNA, 18 nt, Human
cuggaggccaccacuaaa

SEQ ID NO: 139158 - RNA, 18 nt, Human
cuggaggccaccucuucu

SEQ ID NO: 139159 - RNA, 32 nt, Human
cuggaggccagaaguucaaaaugaaguguugg

SEQ ID NO: 139160 - RNA, 32 nt, Human
cuggaggccaggaguucaauaccagccugggc

SEQ ID NO: 139161 - RNA, 22 nt, Human
cuggaggccaggccucccugga

SEQ ID NO: 139162 - RNA, 32 nt, Human
cuggaggccagggcugagggaaggccuggagc

SEQ ID NO: 139163 - RNA, 32 nt, Human
cuggaggccauggaggagcucuagaaacauua

SEQ ID NO: 139164 - RNA, 21 nt, Human
cuggaggcccaaacugaguug

SEQ ID NO: 139165 - RNA, 32 nt, Human
cuggaggcccacacuucucuccccagaagcuc

SEQ ID NO: 139166 - RNA, 22 nt, Human
cuggaggcccagaaguugcugc

SEQ ID NO: 139167 - RNA, 24 nt, Human
cuggaggcccagccugggcgagcu

SEQ ID NO: 139168 - RNA, 22 nt, Human
cuggaggcccaggacauggcug

SEQ ID NO: 139169 - RNA, 23 nt, Human
cuggaggcccaggaguguggcug

SEQ ID NO: 139170 - RNA, 32 nt, Human
cuggaggcccaggaguguggcugcaagagaaa

SEQ ID NO: 139171 - RNA, 32 nt, Human
cuggaggcccagguggagguagccagugccaa

SEQ ID NO: 139172 - RNA, 21 nt, Human
cuggaggcccccgugcuggug

SEQ ID NO: 139173 - RNA, 22 nt, Human
cuggaggcccggccuggccgcu

SEQ ID NO: 139174 - RNA, 32 nt, Human
cuggaggccgggugccuggugggugggccuga

SEQ ID NO: 139175 - RNA, 22 nt, Human
cuggaggccucugagccucccc

SEQ ID NO: 139176 - RNA, 32 nt, Human
cuggaggccugccucccuuaccccuccccucc

SEQ ID NO: 139177 - RNA, 23 nt, Human
cuggaggccugggaaccuggcug

SEQ ID NO: 139178 - RNA, 25 nt, Human
cuggaggccugggcugcuacuguug

SEQ ID NO: 139179 - RNA, 21 nt, Human
cuggaggccuuccagcugcug

SEQ ID NO: 139180 - RNA, 21 nt, Human
cuggaggccuuccugggccuu

SEQ ID NO: 139181 - RNA, 32 nt, Human
cuggaggcggcgggauggaggcggcggccgag

SEQ ID NO: 139182 - RNA, 32 nt, Human
cuggaggcugaggaggagaggacgaggcuaug

SEQ ID NO: 139183 - RNA, 32 nt, Human
cuggaggcugaggcaggaaucgcuugaaauug

SEQ ID NO: 139184 - RNA, 32 nt, Human
cuggaggcugccgacaugaagugcuuuuuccc

SEQ ID NO: 139185 - RNA, 22 nt, Human
cuggaggcugccucccaacagu

SEQ ID NO: 139186 - RNA, 20 nt, Human
cuggaggcuggaagcgggug

SEQ ID NO: 139187 - RNA, 32 nt, Human
cuggaggcuggagggccaggaggcgggaagcu

SEQ ID NO: 139188 - RNA, 32 nt, Human
cuggaggcuggcuggcugucucucucacacag

SEQ ID NO: 139189 - RNA, 32 nt, Human
cuggaggcugggggcacuggcugggcucuagg

SEQ ID NO: 139190 - RNA, 32 nt, Human
cuggaggcuguggugugcguucuauuuagaaa

SEQ ID NO: 139191 - RNA, 32 nt, Human
cuggaggcugugguguguucucuccuucugcc

SEQ ID NO: 139192 - RNA, 27 nt, Human
cuggaggcuucaaggcccugccugcug

SEQ ID NO: 139193 - RNA, 32 nt, Human
cuggagggaaggacagucccugcuggggaaga

SEQ ID NO: 139194 - RNA, 32 nt, Human
cuggagggaagggcugggagccaugacaugga

SEQ ID NO: 139195 - RNA, 32 nt, Human
cuggagggaaugaggcagucugccuuuauugg

SEQ ID NO: 139196 - RNA, 24 nt, Human
cuggagggaccagagucugagcug

SEQ ID NO: 139197 - RNA, 32 nt, Human
cuggagggagagauggccagaagucgagauau

SEQ ID NO: 139198 - RNA, 32 nt, Human
cuggagggagcacccucuggacagacagaacc

SEQ ID NO: 139199 - RNA, 18 nt, Human
cuggagggagccucagcc

SEQ ID NO: 139200 - RNA, 20 nt, Human
cuggagggagcggggcgcgg

SEQ ID NO: 139201 - RNA, 32 nt, Human
cuggagggaggaaagcuuccgccugcgggccg

SEQ ID NO: 139202 - RNA, 32 nt, Human
cuggagggaggaagaguuugggggcuguggag

SEQ ID NO: 139203 - RNA, 32 nt, Human
cuggagggaggagguuguggauccucgggcag

SEQ ID NO: 139204 - RNA, 32 nt, Human
cuggagggaggcauugguggccaaggacaccc

SEQ ID NO: 139205 - RNA, 32 nt, Human
cuggagggaggcgggggcugcccuugggccac

SEQ ID NO: 139206 - RNA, 32 nt, Human
cuggagggagguggagggaggaaggugggaau

SEQ ID NO: 139207 - RNA, 32 nt, Human
cuggagggagucuuuuugugucagccuaaagc

SEQ ID NO: 139208 - RNA, 32 nt, Human
cuggagggaguggagcccugcccacaccuuga

SEQ ID NO: 139209 - RNA, 32 nt, Human
cuggagggcaagggguuuccacaguugcugcu

SEQ ID NO: 139210 - RNA, 32 nt, Human
cuggagggcagcugccggccacaaguugggga

SEQ ID NO: 139211 - RNA, 32 nt, Human
cuggagggcaggcaggcaauggguggaaauca

SEQ ID NO: 139212 - RNA, 32 nt, Human
cuggagggcaucaucaugagucuggagagcgu

SEQ ID NO: 139213 - RNA, 18 nt, Human
cuggagggccgggcaccg

SEQ ID NO: 139214 - RNA, 32 nt, Human
cuggagggcucuugccgccucuucccacuggg

SEQ ID NO: 139215 - RNA, 32 nt, Human
cuggagggcugcagggaggagcugucaugggg

SEQ ID NO: 139216 - RNA, 19 nt, Human
cuggagggcugcccugcag

SEQ ID NO: 139217 - RNA, 32 nt, Human
cuggaggggaggaggaggagcaggccgagcgc

SEQ ID NO: 139218 - RNA, 32 nt, Human
cuggaggggagggcaguggcagaggagaugga

SEQ ID NO: 139219 - RNA, 32 nt, Human
cuggaggggaugacagucacccucuguuuucu

SEQ ID NO: 139220 - RNA, 20 nt, Human
cuggaggggcaccaggugga

SEQ ID NO: 139221 - RNA, 32 nt, Human
cuggaggggcaggcacaggagacagcaguggc

SEQ ID NO: 139222 - RNA, 32 nt, Human
cuggaggggcaggcugcguggaggagccagca

SEQ ID NO: 139223 - RNA, 32 nt, Human
cuggaggggcaguguacaggugcucuauuuua

SEQ ID NO: 139224 - RNA, 32 nt, Human
cuggaggggcgcgcaccaggguggagguuugg

SEQ ID NO: 139225 - RNA, 32 nt, Human
cuggaggggcugcugcuccucaguugcauuuc

SEQ ID NO: 139226 - RNA, 32 nt, Human
cuggagggggacugucaagucuccuguccucc

SEQ ID NO: 139227 - RNA, 32 nt, Human
cuggagggggaugucacauguccuuguguuuc

SEQ ID NO: 139228 - RNA, 32 nt, Human
cuggagggggcagaggggaugggcuggagguu

SEQ ID NO: 139229 - RNA, 23 nt, Human
cuggagggggucccuggcugcug

SEQ ID NO: 139230 - RNA, 19 nt, Human
cuggagggggugccuggca

SEQ ID NO: 139231 - RNA, 21 nt, Human
cuggaggggucuccucugcag

SEQ ID NO: 139232 - RNA, 32 nt, Human
cuggaggggugagcggaaaugaggggccuggc

SEQ ID NO: 139233 - RNA, 32 nt, Human
cuggaggggugaggcagggagaggauaaacac

SEQ ID NO: 139234 - RNA, 32 nt, Human
cuggagggguggaggaaggagguguugggcag

SEQ ID NO: 139235 - RNA, 24 nt, Human
cuggagggugcccuccuucugcug

SEQ ID NO: 139236 - RNA, 23 nt, Human
cuggaggguggagcccagggagg

SEQ ID NO: 139237 - RNA, 28 nt, Human
cuggaggguggucaguccccugcugcug

SEQ ID NO: 139238 - RNA, 32 nt, Human
cuggagggugugcaccucuuccucacugcacg

SEQ ID NO: 139239 - RNA, 32 nt, Human
cuggaggguugaccccuggucucagugcuuuc

SEQ ID NO: 139240 - RNA, 24 nt, Human
cuggagguaccaccuucuauucug

SEQ ID NO: 139241 - RNA, 32 nt, Human
cuggagguacugagacagggugcugaugggaa

SEQ ID NO: 139242 - RNA, 21 nt, Human
cuggagguagaaucaagacga

SEQ ID NO: 139243 - RNA, 32 nt, Human
cuggaggucaggagucuacacugcagccucag

SEQ ID NO: 139244 - RNA, 32 nt, Human
cuggaggucaucucccuguucucuguuggaua

SEQ ID NO: 139245 - RNA, 32 nt, Human
cuggaggucccagcacauguguuuucaagagg

SEQ ID NO: 139246 - RNA, 32 nt, Human
cuggagguccuggcagggucaggcugggguaa

SEQ ID NO: 139247 - RNA, 24 nt, Human
cuggaggucuuccugccacugcug

SEQ ID NO: 139248 - RNA, 32 nt, Human
cuggaggugaaggcagagaggagccaggacug

SEQ ID NO: 139249 - RNA, 32 nt, Human
cuggaggugcagggggaccuggaacauggaug

SEQ ID NO: 139250 - RNA, 18 nt, Human
cuggaggugcccucggcc

SEQ ID NO: 139251 - RNA, 32 nt, Human
cuggaggugcccucggccaaagcccgagauca

SEQ ID NO: 139252 - RNA, 32 nt, Human
cuggagguggaggggaagauggucaguaggau

SEQ ID NO: 139253 - RNA, 32 nt, Human
cuggagguggagguggagguugcagugagccg

SEQ ID NO: 139254 - RNA, 23 nt, Human
cuggagguggcggccugcugcug

SEQ ID NO: 139255 - RNA, 32 nt, Human
cuggagguggcuggcugcaagugugacggggg

SEQ ID NO: 139256 - RNA, 20 nt, Human
cuggaggugggcaaagggaa

SEQ ID NO: 139257 - RNA, 32 nt, Human
cuggagguggggaugagagcagguguggggac

SEQ ID NO: 139258 - RNA, 24 nt, Human
cuggagguggguacccagcugcug

SEQ ID NO: 139259 - RNA, 32 nt, Human
cuggagguggguuugaggggacggggccacaa

SEQ ID NO: 139260 - RNA, 32 nt, Human
cuggagguuccagacagccccucuucaccagc

SEQ ID NO: 139261 - RNA, 24 nt, Human
cuggagguucuguccucccugcug

SEQ ID NO: 139262 - RNA, 32 nt, Human
cuggagguuguggcggagguuguggugagcug

SEQ ID NO: 139263 - RNA, 32 nt, Human
cuggaguaagaggacugagaugccagcugugg

SEQ ID NO: 139264 - RNA, 32 nt, Human
cuggaguacaauggcacaaacacugcucacug

SEQ ID NO: 139265 - RNA, 32 nt, Human
cuggaguauccuuccauuucucagccaaauac

SEQ ID NO: 139266 - RNA, 32 nt, Human
cuggagucaaagcuggugagcaauccaggcuu

SEQ ID NO: 139267 - RNA, 23 nt, Human
cuggagucacaguuuuuauuuug

SEQ ID NO: 139268 - RNA, 32 nt, Human
cuggagucagcagaaccauugggaccugaggc

SEQ ID NO: 139269 - RNA, 32 nt, Human
cuggagucagcccagcugggaggaggggcugg

SEQ ID NO: 139270 - RNA, 23 nt, Human
cuggagucaggugcagaagggaa

SEQ ID NO: 139271 - RNA, 32 nt, Human
cuggagucaucacuuuuauaaauagugguuca

SEQ ID NO: 139272 - RNA, 32 nt, Human
cuggagucauucuuagcuguuucccuuccucu

SEQ ID NO: 139273 - RNA, 32 nt, Human
cuggaguccagcaauccucccaccucaaccuc

SEQ ID NO: 139274 - RNA, 23 nt, Human
cuggaguccagucucuucugcug

SEQ ID NO: 139275 - RNA, 32 nt, Human
cuggaguccccucaggaauggaaaguggagug

SEQ ID NO: 139276 - RNA, 20 nt, Human
cuggaguccuuugucuccau

SEQ ID NO: 139277 - RNA, 17 nt, Human
cuggagucggcgcucca

SEQ ID NO: 139278 - RNA, 32 nt, Human
cuggagucugaaggagaggagugcgcuagagc

SEQ ID NO: 139279 - RNA, 32 nt, Human
cuggagucugagccggugguugcagcggaggc

SEQ ID NO: 139280 - RNA, 32 nt, Human
cuggagucugcucaccuuccugccucaagccc

SEQ ID NO: 139281 - RNA, 25 nt, Human
cuggagucuucagcuucagcugcug

SEQ ID NO: 139282 - RNA, 23 nt, Human
cuggagucuugggguucaggagg

SEQ ID NO: 139283 - RNA, 32 nt, Human
cuggagugacaugggaggggaggcggaucuga

SEQ ID NO: 139284 - RNA, 20 nt, Human
cuggagugaccacacuucca

SEQ ID NO: 139285 - RNA, 32 nt, Human
cuggagugacggcgggcgaggaagaaaaauaa

SEQ ID NO: 139286 - RNA, 32 nt, Human
cuggagugagaggaugccagaggaucaagaaa

SEQ ID NO: 139287 - RNA, 32 nt, Human
cuggagugcaguagugugaucauggcucacug

SEQ ID NO: 139288 - RNA, 32 nt, Human
cuggagugcagugccaugaucacagcucacug

SEQ ID NO: 139289 - RNA, 32 nt, Human
cuggagugcaguggcacgaucacagcucacug

SEQ ID NO: 139290 - RNA, 32 nt, Human
cuggagugcaguggcaugaucacagcucacug

SEQ ID NO: 139291 - RNA, 32 nt, Human
cuggagugcagugguauaaucaugccucacug

SEQ ID NO: 139292 - RNA, 32 nt, Human
cuggagugcauguugacaccagcacuuuuucu

SEQ ID NO: 139293 - RNA, 32 nt, Human
cuggagugcccccagcccagagcccggugggu

SEQ ID NO: 139294 - RNA, 32 nt, Human
cuggagugcuacccuucucuuguaaccuugca

SEQ ID NO: 139295 - RNA, 32 nt, Human
cuggaguggaaagagcacgauagagcaccagg

SEQ ID NO: 139296 - RNA, 32 nt, Human
cuggaguggcugggacacaagacaccaagucc

SEQ ID NO: 139297 - RNA, 32 nt, Human
cuggagugggaggguugguugccccucaccuc

SEQ ID NO: 139298 - RNA, 32 nt, Human
cuggagugggcaggcaggccagggcugcgcau

SEQ ID NO: 139299 - RNA, 32 nt, Human
cuggaguggguagaggaaagggcuagggugac

SEQ ID NO: 139300 - RNA, 32 nt, Human
cuggaguggucuucuucagccuguuuccccag

SEQ ID NO: 139301 - RNA, 32 nt, Human
cuggagugugguggcacgaucacagcucacug

SEQ ID NO: 139302 - RNA, 32 nt, Human
cuggaguguugcuguugcaccauacuuucuug

SEQ ID NO: 139303 - RNA, 32 nt, Human
cuggaguucguagagagugaagaugguagacu

SEQ ID NO: 139304 - RNA, 32 nt, Human
cuggaguucucccaacuuuagaggauggaaag

SEQ ID NO: 139305 - RNA, 32 nt, Human
cuggaguugcaguggugcaaugacugcagcac

SEQ ID NO: 139306 - RNA, 32 nt, Human
cuggaguugcccaggcccugugagcaaguggc

SEQ ID NO: 139307 - RNA, 19 nt, Human
cuggaguuggggcacucca

SEQ ID NO: 139308 - RNA, 22 nt, Human
cuggaguuucaggcacugcagg

SEQ ID NO: 139309 - RNA, 32 nt, Human
cuggaguuugaguccagccugggugacauagc

SEQ ID NO: 139310 - RNA, 32 nt, Human
cuggaguuuguguuguuucugcucugacaggu

SEQ ID NO: 139311 - RNA, 32 nt, Human
cuggauaacacagugaaaccccgucucuacua

SEQ ID NO: 139312 - RNA, 32 nt, Human
cuggauaacauggugaaaccacaucccuacua

SEQ ID NO: 139313 - RNA, 32 nt, Human
cuggauaauaagagaacgugccaucuguaaag

SEQ ID NO: 139314 - RNA, 32 nt, Human
cuggauacaugggaaguggaggaaaugcugga

SEQ ID NO: 139315 - RNA, 32 nt, Human
cuggauacaugugcagaacaugcagguuuguu

SEQ ID NO: 139316 - RNA, 22 nt, Human
cuggauaccacaguugcuguau

SEQ ID NO: 139317 - RNA, 32 nt, Human
cuggauagaucuuccaguccugaagauuuuuc

SEQ ID NO: 139318 - RNA, 32 nt, Human
cuggauaggaaaggaccuugcagacuggaaug

SEQ ID NO: 139319 - RNA, 32 nt, Human
cuggauaggaacuucauggaauggagcuaaug

SEQ ID NO: 139320 - RNA, 32 nt, Human
cuggauagggugggacagggaugggggugugu

SEQ ID NO: 139321 - RNA, 20 nt, Human
cuggauaguguggggaggua

SEQ ID NO: 139322 - RNA, 23 nt, Human
cuggauaucaaaggaaaucauga

SEQ ID NO: 139323 - RNA, 32 nt, Human
cuggauaucagcuaagccuuguuaacaguuaa

SEQ ID NO: 139324 - RNA, 32 nt, Human
cuggauauggugguaugugccuguaaucccag

SEQ ID NO: 139325 - RNA, 32 nt, Human
cuggauaugguggugggcaccuguaaucucag

SEQ ID NO: 139326 - RNA, 32 nt, Human
cuggauauuguuuuuaccacuuuuagcuggau

SEQ ID NO: 139327 - RNA, 24 nt, Human
cuggaucaaaggggcccagggagg

SEQ ID NO: 139328 - RNA, 32 nt, Human
cuggaucagccaugcucagcugugacgccuga

SEQ ID NO: 139329 - RNA, 32 nt, Human
cuggaucaggguggggacaaggacuggacccu

SEQ ID NO: 139330 - RNA, 32 nt, Human
cuggaucaguaggagaagcugagugcaaaugc

SEQ ID NO: 139331 - RNA, 32 nt, Human
cuggaucaguccauuuccugaccugggggcuu

SEQ ID NO: 139332 - RNA, 32 nt, Human
cuggaucauaugggcugcaggccaggugaagu

SEQ ID NO: 139333 - RNA, 23 nt, Human
cuggaucaugccacugcacucca

SEQ ID NO: 139334 - RNA, 32 nt, Human
cuggaucaugccacugcacuccaaccugggca

SEQ ID NO: 139335 - RNA, 32 nt, Human
cuggaucauuccagauuucuugugauuuuucu

SEQ ID NO: 139336 - RNA, 32 nt, Human
cuggauccaagcaagacacgggcugagcacgu

SEQ ID NO: 139337 - RNA, 32 nt, Human
cuggauccagaacaugacaacagagagcugcg

SEQ ID NO: 139338 - RNA, 32 nt, Human
cuggauccagaugagaaauggaauagcaaguu

SEQ ID NO: 139339 - RNA, 32 nt, Human
cuggaucccgagguauggcagaggugcaagac

SEQ ID NO: 139340 - RNA, 32 nt, Human
cuggauccuagacugcaggaaaaagucugcua

SEQ ID NO: 139341 - RNA, 32 nt, Human
cuggauccucacccaggugucgcaucaugcca

SEQ ID NO: 139342 - RNA, 32 nt, Human
cuggauccuccaggagcuggacaaccuugacg

SEQ ID NO: 139343 - RNA, 32 nt, Human
cuggauccugaacuggaagaaaaugucuaucc

SEQ ID NO: 139344 - RNA, 32 nt, Human
cuggauccuucaccccaguggccugcagaccu

SEQ ID NO: 139345 - RNA, 32 nt, Human
cuggaucgacagcguccuggccuaggugccgg

SEQ ID NO: 139346 - RNA, 32 nt, Human
cuggaucgcccuucaucucucucccuccaucu

SEQ ID NO: 139347 - RNA, 32 nt, Human
cuggaucucaguugucucaucuguaaaaagga

SEQ ID NO: 139348 - RNA, 32 nt, Human
cuggaucuccaauguuuuggggaugcuuugag

SEQ ID NO: 139349 - RNA, 32 nt, Human
cuggaucucccaauggccuuccaauccuuaaa

SEQ ID NO: 139350 - RNA, 32 nt, Human
cuggaucucccagguauuauugaaggugccag

SEQ ID NO: 139351 - RNA, 32 nt, Human
cuggaucuccuccccucucccuucuuuaaacg

SEQ ID NO: 139352 - RNA, 32 nt, Human
cuggaucugaaauauguuccucccaggagagu

SEQ ID NO: 139353 - RNA, 32 nt, Human
cuggaucugaauccuccacuucccacuggaac

SEQ ID NO: 139354 - RNA, 32 nt, Human
cuggaucugagugcuccugagcuggcuucagc

SEQ ID NO: 139355 - RNA, 32 nt, Human
cuggaucugcucccucucgcucucucacucca

SEQ ID NO: 139356 - RNA, 32 nt, Human
cuggaucuggagaguggaggaagcacugggug

SEQ ID NO: 139357 - RNA, 32 nt, Human
cuggaucuguacugcacuggaguaagcaagaa

SEQ ID NO: 139358 - RNA, 32 nt, Human
cuggaucuugaccuugaacuggacucuguagg

SEQ ID NO: 139359 - RNA, 24 nt, Human
cuggaucuuggcccaaccaaaucc

SEQ ID NO: 139360 - RNA, 32 nt, Human
cuggaucuuugcccaccucuuccucagagccc

SEQ ID NO: 139361 - RNA, 32 nt, Human
cuggaugaaaccaagauaguuuagguauaauu

SEQ ID NO: 139362 - RNA, 32 nt, Human
cuggaugaaaccaaggauaguucagguauaau

SEQ ID NO: 139363 - RNA, 20 nt, Human
cuggaugaaacuguugaaga

SEQ ID NO: 139364 - RNA, 32 nt, Human
cuggaugaaagagacgaggggugaucugugag

SEQ ID NO: 139365 - RNA, 32 nt, Human
cuggaugaacaacacacuuaggccacacucag

SEQ ID NO: 139366 - RNA, 22 nt, Human
cuggaugaagcugcugcugcac

SEQ ID NO: 139367 - RNA, 32 nt, Human
cuggaugaagugcuucaugccuguaauccaag

SEQ ID NO: 139368 - RNA, 23 nt, Human
cuggaugaauaauauugaagaua

SEQ ID NO: 139369 - RNA, 32 nt, Human
cuggaugacagaaacugaauacauugcucccu

SEQ ID NO: 139370 - RNA, 32 nt, Human
cuggaugaccaacacuggagacucuggccuua

SEQ ID NO: 139371 - RNA, 32 nt, Human
cuggaugacuguuacccugaggccuccacggg

SEQ ID NO: 139372 - RNA, 32 nt, Human
cuggaugagaugggaccugcagcucucccucc

SEQ ID NO: 139373 - RNA, 32 nt, Human
cuggaugagcuucaagcccaagucucucgcuc

SEQ ID NO: 139374 - RNA, 22 nt, Human
cuggaugagggggccagagagg

SEQ ID NO: 139375 - RNA, 32 nt, Human
cuggaugagguguuuaaggucauggagcagcu

SEQ ID NO: 139376 - RNA, 32 nt, Human
cuggaugcaagggguacaucacaucccagaag

SEQ ID NO: 139377 - RNA, 32 nt, Human
cuggaugcaauggcucacgccugcuaucccgc

SEQ ID NO: 139378 - RNA, 21 nt, Human
cuggaugcaaugguguuacac

SEQ ID NO: 139379 - RNA, 31 nt, Human
cuggaugcacuuucaauauacagagaguuuu

SEQ ID NO: 139380 - RNA, 31 nt, Human
cuggaugcacuuucaauauagcagagaguuu

SEQ ID NO: 139381 - RNA, 32 nt, Human
cuggaugcagagcaugguucagugaguucucc

SEQ ID NO: 139382 - RNA, 32 nt, Human
cuggaugcagagguggagguugaggccgugac

SEQ ID NO: 139383 - RNA, 29 nt, Human
cuggaugcagcccaagguacagccaggag

SEQ ID NO: 139384 - RNA, 24 nt, Human
cuggaugcagggagugaugggagg

SEQ ID NO: 139385 - RNA, 32 nt, Human
cuggaugcagucacccuccccaucccgaguuu

SEQ ID NO: 139386 - RNA, 32 nt, Human
cuggaugcaguggcucacaccuguaaucccag

SEQ ID NO: 139387 - RNA, 32 nt, Human
cuggaugcaguggcucaugccuguaaucccaa

SEQ ID NO: 139388 - RNA, 32 nt, Human
cuggaugcaguggcucaugcuuguaaucccag

SEQ ID NO: 139389 - RNA, 32 nt, Human
cuggaugcaguggcucgugccuguaaucccag

SEQ ID NO: 139390 - RNA, 18 nt, Human
cuggaugcauagcaggug

SEQ ID NO: 139391 - RNA, 29 nt, Human
cuggaugccaucauuggcccccgacugcc

SEQ ID NO: 139392 - RNA, 19 nt, Human
cuggaugccauccuggcca

SEQ ID NO: 139393 - RNA, 32 nt, Human
cuggaugccaugaugcugggugaggccccucc

SEQ ID NO: 139394 - RNA, 25 nt, Human
cuggaugccuccagccuuugcugcu

SEQ ID NO: 139395 - RNA, 32 nt, Human
cuggaugccugggaaccacucaccuccuucug

SEQ ID NO: 139396 - RNA, 25 nt, Human
cuggaugcgcuuguguugguugcau

SEQ ID NO: 139397 - RNA, 32 nt, Human
cuggaugcgguggcucacgccuguaaucccag

SEQ ID NO: 139398 - RNA, 32 nt, Human
cuggaugcucaucagcuccuucugccuccccc

SEQ ID NO: 139399 - RNA, 32 nt, Human
cuggaugcugggaaguccaagaucaaggcucu

SEQ ID NO: 139400 - RNA, 32 nt, Human
cuggaugcugggaaguccaaguucaaggagcg

SEQ ID NO: 139401 - RNA, 32 nt, Human
cuggaugcuuuggaaucgugucuuccaugcuc

SEQ ID NO: 139402 - RNA, 32 nt, Human
cuggauggaaaguggacaggaggcucacccgu

SEQ ID NO: 139403 - RNA, 32 nt, Human
cuggauggaaccugggcuguggcucucugucg

SEQ ID NO: 139404 - RNA, 29 nt, Human
cuggauggacagagggacgagggacgagc

SEQ ID NO: 139405 - RNA, 32 nt, Human
cuggauggacucuuccagauccugggugacaa

SEQ ID NO: 139406 - RNA, 32 nt, Human
cuggauggagagcaaaggagaccccucccgag

SEQ ID NO: 139407 - RNA, 20 nt, Human
cuggauggaguggggugcgg

SEQ ID NO: 139408 - RNA, 32 nt, Human
cuggauggcaggaaggaagcaggugggaggcg

SEQ ID NO: 139409 - RNA, 32 nt, Human
cuggauggccaucccacauuccuuuaacggag

SEQ ID NO: 139410 - RNA, 20 nt, Human
cuggauggccccuccuugca

SEQ ID NO: 139411 - RNA, 32 nt, Human
cuggauggcgcgugggcagugugcaggcaggu

SEQ ID NO: 139412 - RNA, 29 nt, Human
cuggaugggaucuuccucugaggcgagcu

SEQ ID NO: 139413 - RNA, 21 nt, Human
cuggaugggcuuggggccaga

SEQ ID NO: 139414 - RNA, 32 nt, Human
cuggaugggggucccugugggucaaauugggg

SEQ ID NO: 139415 - RNA, 29 nt, Human
cuggaugggguuuguuaaaguuguuaaga

SEQ ID NO: 139416 - RNA, 32 nt, Human
cuggaugggugaggcaagccaggagagcaagc

SEQ ID NO: 139417 - RNA, 32 nt, Human
cuggauggugucucacccuguugcccaggcug

SEQ ID NO: 139418 - RNA, 32 nt, Human
cuggaugguuggaggcagagcuuggaaaggaa

SEQ ID NO: 139419 - RNA, 32 nt, Human
cuggauguacauuccauuuccauccacagugu

SEQ ID NO: 139420 - RNA, 32 nt, Human
cuggauguaguggcucaugccuuaaucccagc

SEQ ID NO: 139421 - RNA, 32 nt, Human
cuggauguauaaccuguuuccagccuggccug

SEQ ID NO: 139422 - RNA, 32 nt, Human
cuggauguccagaaaaagaggccaucuggauc

SEQ ID NO: 139423 - RNA, 32 nt, Human
cuggaugucggcacuguguccccggcucuggg

SEQ ID NO: 139424 - RNA, 32 nt, Human
cuggaugucuuucuucuucauccaagcacccu

SEQ ID NO: 139425 - RNA, 32 nt, Human
cuggaugugaaaagcuuuccggagcccaucuu

SEQ ID NO: 139426 - RNA, 32 nt, Human
cuggauguggaccuggcugcggggagacgggc

SEQ ID NO: 139427 - RNA, 32 nt, Human
cuggauguggaugucaucauuucugggaacac

SEQ ID NO: 139428 - RNA, 32 nt, Human
cuggauguggugacucaugccuguaauccuag

SEQ ID NO: 139429 - RNA, 32 nt, Human
cuggaugugguggcacacaccuguaaucccag

SEQ ID NO: 139430 - RNA, 32 nt, Human
cuggaugugguggcacacauaccuguaauccc

SEQ ID NO: 139431 - RNA, 32 nt, Human
cuggaugugguggcucacaccuguaaucccag

SEQ ID NO: 139432 - RNA, 32 nt, Human
cuggaugugguggcucauaccuguaaauccca

SEQ ID NO: 139433 - RNA, 21 nt, Human
cuggauguucugcaugaaaag

SEQ ID NO: 139434 - RNA, 32 nt, Human
cuggauguucugugaagauagccauguuuaug

SEQ ID NO: 139435 - RNA, 32 nt, Human
cuggauuaagaugacuuccucacauagcuugg

SEQ ID NO: 139436 - RNA, 32 nt, Human
cuggauuaagaugacuuccuuacguagcuugg

SEQ ID NO: 139437 - RNA, 32 nt, Human
cuggauuaauauaccaaugauccuuucaaauu

SEQ ID NO: 139438 - RNA, 32 nt, Human
cuggauuagauuaagaaagacagaaaagauua

SEQ ID NO: 139439 - RNA, 32 nt, Human
cuggauuaggcaggcagaggcaguuaugggcu

SEQ ID NO: 139440 - RNA, 32 nt, Human
cuggauuauauacuaguuaauuucuuccauuc

SEQ ID NO: 139441 - RNA, 32 nt, Human
cuggauucaaacaauucucaugucucagccuc

SEQ ID NO: 139442 - RNA, 32 nt, Human
cuggauucaaacaauucuccugccucagccuc

SEQ ID NO: 139443 - RNA, 32 nt, Human
cuggauucaaacaauucuucugccucagccuc

SEQ ID NO: 139444 - RNA, 32 nt, Human
cuggauucaagcaauccucccaucucagccuc

SEQ ID NO: 139445 - RNA, 32 nt, Human
cuggauucaagcaauucuccugccucagccuc

SEQ ID NO: 139446 - RNA, 32 nt, Human
cuggauucaagcaauucucuugcuucagccuc

SEQ ID NO: 139447 - RNA, 32 nt, Human
cuggauucaagugauccucccaccucagccuc

SEQ ID NO: 139448 - RNA, 32 nt, Human
cuggauucacaccauucuccugccucagccuc

SEQ ID NO: 139449 - RNA, 32 nt, Human
cuggauucacagugggaacaaguuucuauuaa

SEQ ID NO: 139450 - RNA, 32 nt, Human
cuggauucacauagaguugagaaaccaaggaa

SEQ ID NO: 139451 - RNA, 32 nt, Human
cuggauucauuggccaaacuugaggcuggaac

SEQ ID NO: 139452 - RNA, 32 nt, Human
cuggauucauuuccugcccuuccucaguuuaa

SEQ ID NO: 139453 - RNA, 32 nt, Human
cuggauuccagagaaccuggacugugccuaug

SEQ ID NO: 139454 - RNA, 32 nt, Human
cuggauuccagcaauucuccugccucggcuuc

SEQ ID NO: 139455 - RNA, 32 nt, Human
cuggauuccaggacaggagugaauguaaaaau

SEQ ID NO: 139456 - RNA, 32 nt, Human
cuggauuccaggaguagaggaccuagcuuuaa

SEQ ID NO: 139457 - RNA, 32 nt, Human
cuggauuccccagcuacuuggaaggcugagau

SEQ ID NO: 139458 - RNA, 32 nt, Human
cuggauucccugcuuagugcccugagucucaa

SEQ ID NO: 139459 - RNA, 32 nt, Human
cuggauucuguauccaugggauuggguguuca

SEQ ID NO: 139460 - RNA, 32 nt, Human
cuggauucuuuuccuuucuuuuccugcaguac

SEQ ID NO: 139461 - RNA, 31 nt, Human
cuggauugaaaaccuguccagaugcugaguu

SEQ ID NO: 139462 - RNA, 32 nt, Human
cuggauugagcaaugagcagagccaagcagca

SEQ ID NO: 139463 - RNA, 32 nt, Human
cuggauugauaacccucaucugcaauauuuuc

SEQ ID NO: 139464 - RNA, 31 nt, Human
cuggauugaugcccagggccugugcggccgc

SEQ ID NO: 139465 - RNA, 32 nt, Human
cuggauugcaguggcgugaucaugccucacug

SEQ ID NO: 139466 - RNA, 32 nt, Human
cuggauugcgcuacugcacuccagccugggug

SEQ ID NO: 139467 - RNA, 26 nt, Human
cuggauuggcggaaguaaaucuggaa

SEQ ID NO: 139468 - RNA, 32 nt, Human
cuggauuucccccuugcaacccaggucagaag

SEQ ID NO: 139469 - RNA, 32 nt, Human
cuggauuucucagagccagcauguuguuucca

SEQ ID NO: 139470 - RNA, 32 nt, Human
cuggauuucuccugccaggagaaucuccugca

SEQ ID NO: 139471 - RNA, 32 nt, Human
cuggauuugaacccaggcagggcagcugcuca

SEQ ID NO: 139472 - RNA, 32 nt, Human
cuggauuugcccaccagaucuccucaccucuu

SEQ ID NO: 139473 - RNA, 32 nt, Human
cuggauuuucauuucuggaauggcuggcccca

SEQ ID NO: 139474 - RNA, 19 nt, Human
cuggauuuuccugggauuu

SEQ ID NO: 139475 - RNA, 25 nt, Human
cuggauuuugccagcccuuuugcug

SEQ ID NO: 139476 - RNA, 32 nt, Human
cuggauuuuugcugcagaaauguaucaguggc

SEQ ID NO: 139477 - RNA, 20 nt, Human
cuggauuuuuucuggggccu

SEQ ID NO: 139478 - RNA, 32 nt, Human
cuggcaaaaucugacuugccucuuguuucugu

SEQ ID NO: 139479 - RNA, 32 nt, Human
cuggcaaaaugcugggauuacaggcauaagac

SEQ ID NO: 139480 - RNA, 32 nt, Human
cuggcaaacacggugaaacccugucucuacua

SEQ ID NO: 139481 - RNA, 24 nt, Human
cuggcaaacaugaugaaacccugu

SEQ ID NO: 139482 - RNA, 32 nt, Human
cuggcaaacaugaugaaacccugucucuacua

SEQ ID NO: 139483 - RNA, 21 nt, Human
cuggcaaacauggcgaaaccc

SEQ ID NO: 139484 - RNA, 22 nt, Human
cuggcaaacauggcgaaacccc

SEQ ID NO: 139485 - RNA, 24 nt, Human
cuggcaaacauggcgaaaccccgu

SEQ ID NO: 139486 - RNA, 32 nt, Human
cuggcaaacauggugaaaccccaucucuagua

SEQ ID NO: 139487 - RNA, 32 nt, Human
cuggcaaacauggugaaaccccgucuguacua

SEQ ID NO: 139488 - RNA, 24 nt, Human
cuggcaaacauggugaaaccucgu

SEQ ID NO: 139489 - RNA, 32 nt, Human
cuggcaaacauggugaaacgccgucucuacug

SEQ ID NO: 139490 - RNA, 21 nt, Human
cuggcaacacagcaagacccu

SEQ ID NO: 139491 - RNA, 32 nt, Human
cuggcaacaccaggaugaggucccaggggacg

SEQ ID NO: 139492 - RNA, 22 nt, Human
cuggcaacauggcaagacccug

SEQ ID NO: 139493 - RNA, 32 nt, Human
cuggcaacauggcaagacccugccucuuugaa

SEQ ID NO: 139494 - RNA, 32 nt, Human
cuggcaacauugugagacccaucucuauaaaa

SEQ ID NO: 139495 - RNA, 24 nt, Human
cuggcaaccacugaucugcuuuca

SEQ ID NO: 139496 - RNA, 32 nt, Human
cuggcaaccugaaccuuucccaccccaguucu

SEQ ID NO: 139497 - RNA, 32 nt, Human
cuggcaaccugagggaggaaagaaggacaccu

SEQ ID NO: 139498 - RNA, 32 nt, Human
cuggcaacugcuuaccagccuggcuggccgug

SEQ ID NO: 139499 - RNA, 32 nt, Human
cuggcaagaagcacccgugcugugucuuaucc

SEQ ID NO: 139500 - RNA, 32 nt, Human
cuggcaagacccugggcacacagggagcugcc

SEQ ID NO: 139501 - RNA, 32 nt, Human
cuggcaagaggaugaucaucuaccucacugau

SEQ ID NO: 139502 - RNA, 32 nt, Human
cuggcaagagggcuugggccccagcccaaggg

SEQ ID NO: 139503 - RNA, 24 nt, Human
cuggcaagcucuuucacaacccua

SEQ ID NO: 139504 - RNA, 32 nt, Human
cuggcaagggaugaugucagauucagcccaag

SEQ ID NO: 139505 - RNA, 18 nt, Human
cuggcaaggggcuguugg

SEQ ID NO: 139506 - RNA, 32 nt, Human
cuggcaagggggaggaagaggaggaagguugg

SEQ ID NO: 139507 - RNA, 32 nt, Human
cuggcaaguggccacgcccugugucagaccau

SEQ ID NO: 139508 - RNA, 32 nt, Human
cuggcaaguggugcuggugacaucccagcucc

SEQ ID NO: 139509 - RNA, 32 nt, Human
cuggcaaguguaccaucccacaggcagcaggc

SEQ ID NO: 139510 - RNA, 32 nt, Human
cuggcaauaguuacugucucagugauuggcau

SEQ ID NO: 139511 - RNA, 32 nt, Human
cuggcaaugcaaacacaaagaucuggauuucu

SEQ ID NO: 139512 - RNA, 32 nt, Human
cuggcaaugccaccacacgcuucagagaaaga

SEQ ID NO: 139513 - RNA, 32 nt, Human
cuggcaauggcaggcaggaaagacagaggaag

SEQ ID NO: 139514 - RNA, 32 nt, Human
cuggcaaugggacucugagaacuccucauucc

SEQ ID NO: 139515 - RNA, 31 nt, Human
cuggcaauguccguccauucucaugcuaagu

SEQ ID NO: 139516 - RNA, 32 nt, Human
cuggcacaaagcagccaucugaguccugauuu

SEQ ID NO: 139517 - RNA, 23 nt, Human
cuggcacaaguggguacuguugg

SEQ ID NO: 139518 - RNA, 22 nt, Human
cuggcacacagguaacugucgg

SEQ ID NO: 139519 - RNA, 21 nt, Human
cuggcacaccagcagcauggg

SEQ ID NO: 139520 - RNA, 32 nt, Human
cuggcacaccuguguucacaggggcuagaggg

SEQ ID NO: 139521 - RNA, 32 nt, Human
cuggcacacugcauaacaccagucccauccuc

SEQ ID NO: 139522 - RNA, 32 nt, Human
cuggcacacuggcuguaacuccgccccuuucu

SEQ ID NO: 139523 - RNA, 23 nt, Human
cuggcacagaguccugcuccugg

SEQ ID NO: 139524 - RNA, 21 nt, Human
cuggcacagaucugugccugg

SEQ ID NO: 139525 - RNA, 32 nt, Human
cuggcacagcagacuggagacugaggcagggc

SEQ ID NO: 139526 - RNA, 32 nt, Human
cuggcacagccgccuggaaugcaggacuguca

SEQ ID NO: 139527 - RNA, 27 nt, Human
cuggcacagcugcagagugcacaggga

SEQ ID NO: 139528 - RNA, 18 nt, Human
cuggcacaggaugcuugg

SEQ ID NO: 139529 - RNA, 19 nt, Human
cuggcacagggcugcaugg

SEQ ID NO: 139530 - RNA, 32 nt, Human
cuggcacagggugggcucugguagggggcaag

SEQ ID NO: 139531 - RNA, 19 nt, Human
cuggcacaggucaugucug

SEQ ID NO: 139532 - RNA, 32 nt, Human
cuggcacauggugagccacagcuacugugagu

SEQ ID NO: 139533 - RNA, 32 nt, Human
cuggcacauggugccuccaaccucaucuccuc

SEQ ID NO: 139534 - RNA, 18 nt, Human
cuggcacauguugucugg

SEQ ID NO: 139535 - RNA, 32 nt, Human
cuggcacauuuucucuguuucucucuccgauu

SEQ ID NO: 139536 - RNA, 32 nt, Human
cuggcaccacagugacccuggccucagcgugg

SEQ ID NO: 139537 - RNA, 32 nt, Human
cuggcaccaguuucagggccucacccaagcuu

SEQ ID NO: 139538 - RNA, 20 nt, Human
cuggcacccacacgcugcag

SEQ ID NO: 139539 - RNA, 32 nt, Human
cuggcacccacagcaggacuccgccagucuga

SEQ ID NO: 139540 - RNA, 32 nt, Human
cuggcacccacugcuacacucagccucaugag

SEQ ID NO: 139541 - RNA, 32 nt, Human
cuggcacccagcugccagccuucuguccuggg

SEQ ID NO: 139542 - RNA, 32 nt, Human
cuggcacccaggaggugaggcagacaccaugg

SEQ ID NO: 139543 - RNA, 32 nt, Human
cuggcacccaggcaugaagcacguuggccagu

SEQ ID NO: 139544 - RNA, 32 nt, Human
cuggcaccccagcuggggccaggcugggucgc

SEQ ID NO: 139545 - RNA, 32 nt, Human
cuggcacccuguccaagaaccuuucuacugcu

SEQ ID NO: 139546 - RNA, 32 nt, Human
cuggcaccgagagggcuggagugcaguggcgu

SEQ ID NO: 139547 - RNA, 32 nt, Human
cuggcaccgucgggauggcaaguggcucaaug

SEQ ID NO: 139548 - RNA, 19 nt, Human
cuggcaccucagguacugg

SEQ ID NO: 139549 - RNA, 32 nt, Human
cuggcaccucugcggggcagugccccacuccu

SEQ ID NO: 139550 - RNA, 32 nt, Human
cuggcaccuguaaucccagcauuaugggaaac

SEQ ID NO: 139551 - RNA, 32 nt, Human
cuggcaccuguaaucccagcauuaugggagac

SEQ ID NO: 139552 - RNA, 32 nt, Human
cuggcaccuguaaucccagcauuuugggagac

SEQ ID NO: 139553 - RNA, 32 nt, Human
cuggcaccuugaucuugaacuucccagccucc

SEQ ID NO: 139554 - RNA, 32 nt, Human
cuggcaccuugaucuuggacuucccagccucc

SEQ ID NO: 139555 - RNA, 32 nt, Human
cuggcaccuugaucuuggacuucccagccucu

SEQ ID NO: 139556 - RNA, 32 nt, Human
cuggcaccuugaucuuggacuucccaugcucc

SEQ ID NO: 139557 - RNA, 32 nt, Human
cuggcacgaaaccugucugccucuguggaucc

SEQ ID NO: 139558 - RNA, 32 nt, Human
cuggcacgcuggccacaaucuaccucacucuu

SEQ ID NO: 139559 - RNA, 32 nt, Human
cuggcacgggcaggcugugggaggcagcggag

SEQ ID NO: 139560 - RNA, 32 nt, Human
cuggcacuaagacuggcaccuccugcggccca

SEQ ID NO: 139561 - RNA, 32 nt, Human
cuggcacuacccagauuuccacagugcugcua

SEQ ID NO: 139562 - RNA, 32 nt, Human
cuggcacucaaguuacuuagagucucaaaauc

SEQ ID NO: 139563 - RNA, 23 nt, Human
cuggcacucacaagggcgcacga

SEQ ID NO: 139564 - RNA, 32 nt, Human
cuggcacucacacccccaccccucacccacau

SEQ ID NO: 139565 - RNA, 32 nt, Human
cuggcacucacugcagacuuccucuuucaagg

SEQ ID NO: 139566 - RNA, 32 nt, Human
cuggcacucacuucugcuucuggccaggccgu

SEQ ID NO: 139567 - RNA, 32 nt, Human
cuggcacucaggcaacuggaguaagugcuccc

SEQ ID NO: 139568 - RNA, 32 nt, Human
cuggcacuccagccugggcaacagagugagac

SEQ ID NO: 139569 - RNA, 22 nt, Human
cuggcacucgccaugggacuuu

SEQ ID NO: 139570 - RNA, 32 nt, Human
cuggcacugccaggaccuccuguggcacccuu

SEQ ID NO: 139571 - RNA, 32 nt, Human
cuggcacugcuaguugcaggagcacuuuaccu

SEQ ID NO: 139572 - RNA, 32 nt, Human
cuggcacugcuuccuccaccguuuucacaggg

SEQ ID NO: 139573 - RNA, 32 nt, Human
cuggcacuggccccagcgcugugguggggagc

SEQ ID NO: 139574 - RNA, 32 nt, Human
cuggcacuggccuggguagagccagggcgagc

SEQ ID NO: 139575 - RNA, 32 nt, Human
cuggcacugucacagcucacuuuuccagaggg

SEQ ID NO: 139576 - RNA, 32 nt, Human
cuggcacuguucucccugcuuugcccagaugc

SEQ ID NO: 139577 - RNA, 32 nt, Human
cuggcagaacacugcacuccaauuuccucggg

SEQ ID NO: 139578 - RNA, 32 nt, Human
cuggcagaagggggugacgcugggcagcggcg

SEQ ID NO: 139579 - RNA, 32 nt, Human
cuggcagaaguuagauguccuggcaggggcca

SEQ ID NO: 139580 - RNA, 22 nt, Human
cuggcagacagcccuccucuca

SEQ ID NO: 139581 - RNA, 32 nt, Human
cuggcagacaggcgggcaaacaguggcgccca

SEQ ID NO: 139582 - RNA, 24 nt, Human
cuggcagacuggcacuuuaucuca

SEQ ID NO: 139583 - RNA, 32 nt, Human
cuggcagagaaaaggcugaaauggaggaccgg

SEQ ID NO: 139584 - RNA, 20 nt, Human
cuggcagagagccuugcugu

SEQ ID NO: 139585 - RNA, 32 nt, Human
cuggcagagcaaauagggcuggugaggaguga

SEQ ID NO: 139586 - RNA, 32 nt, Human
cuggcagagcuggucccugacacgcacuuuua

SEQ ID NO: 139587 - RNA, 32 nt, Human
cuggcagaggacagaaauguccagucaccucc

SEQ ID NO: 139588 - RNA, 32 nt, Human
cuggcagaggagauggaaaaugcgaucggaca

SEQ ID NO: 139589 - RNA, 32 nt, Human
cuggcagagggguuguggcuguuuacauaaag

SEQ ID NO: 139590 - RNA, 32 nt, Human
cuggcagagguggccagucacgugaagguggg

SEQ ID NO: 139591 - RNA, 32 nt, Human
cuggcagaucacuggagcccaggaguuugaga

SEQ ID NO: 139592 - RNA, 32 nt, Human
cuggcagauccuuguagggaaggagagagucu

SEQ ID NO: 139593 - RNA, 32 nt, Human
cuggcagauguggggucuagaagaggacagga

SEQ ID NO: 139594 - RNA, 23 nt, Human
cuggcagcacggcguccugggga

SEQ ID NO: 139595 - RNA, 22 nt, Human
cuggcagcagauuucugcagga

SEQ ID NO: 139596 - RNA, 32 nt, Human
cuggcagcagcaucucagcccaagagaagguu

SEQ ID NO: 139597 - RNA, 19 nt, Human
cuggcagcagugcucuggg

SEQ ID NO: 139598 - RNA, 32 nt, Human
cuggcagcaguggaccucauaccugucuccag

SEQ ID NO: 139599 - RNA, 23 nt, Human
cuggcagccagccucuguuucug

SEQ ID NO: 139600 - RNA, 32 nt, Human
cuggcagccaguaccuccugccccaugcugcc

SEQ ID NO: 139601 - RNA, 22 nt, Human
cuggcagccauugggugugggg

SEQ ID NO: 139602 - RNA, 32 nt, Human
cuggcagcccaggaguggggaggcuuuggcca

SEQ ID NO: 139603 - RNA, 21 nt, Human
cuggcagccccucaggcccca

SEQ ID NO: 139604 - RNA, 32 nt, Human
cuggcagccccuggcacagagcagacccggcc

SEQ ID NO: 139605 - RNA, 32 nt, Human
cuggcagcccuccucaaggaccccugugagau

SEQ ID NO: 139606 - RNA, 23 nt, Human
cuggcagccugccuuccuaggga

SEQ ID NO: 139607 - RNA, 22 nt, Human
cuggcagccuggagcccaggga

SEQ ID NO: 139608 - RNA, 24 nt, Human
cuggcagccuggagcccagggagg

SEQ ID NO: 139609 - RNA, 32 nt, Human
cuggcagccuugacugaaagaugaaggagucc

SEQ ID NO: 139610 - RNA, 20 nt, Human
cuggcagcgccacucuggga

SEQ ID NO: 139611 - RNA, 32 nt, Human
cuggcagcggcagcccacgccucccagggauu

SEQ ID NO: 139612 - RNA, 21 nt, Human
cuggcagcgggacccuguggg

SEQ ID NO: 139613 - RNA, 22 nt, Human
cuggcagcuaaagccugucaga

SEQ ID NO: 139614 - RNA, 24 nt, Human
cuggcagcuacccccuucuugaga

SEQ ID NO: 139615 - RNA, 32 nt, Human
cuggcagcuccuccucuucuccgccccgcugg

SEQ ID NO: 139616 - RNA, 32 nt, Human
cuggcagcuccuggccacaccuucucagagcu

SEQ ID NO: 139617 - RNA, 22 nt, Human
cuggcagcugacgcugcuagga

SEQ ID NO: 139618 - RNA, 27 nt, Human
cuggcagcugagagcccugcuguggga

SEQ ID NO: 139619 - RNA, 22 nt, Human
cuggcagcugaugacuucagga

SEQ ID NO: 139620 - RNA, 20 nt, Human
cuggcagcuggugcuguggg

SEQ ID NO: 139621 - RNA, 32 nt, Human
cuggcagcuucucaggugcccgcacagaggcu

SEQ ID NO: 139622 - RNA, 32 nt, Human
cuggcagcuuguggaagccucauuugcaaagc

SEQ ID NO: 139623 - RNA, 32 nt, Human
cuggcagcuuucugagugcauaagaccuccac

SEQ ID NO: 139624 - RNA, 32 nt, Human
cuggcagcuuugcccacacauacccagcagcu

SEQ ID NO: 139625 - RNA, 18 nt, Human
cuggcaggaaaggacgca

SEQ ID NO: 139626 - RNA, 32 nt, Human
cuggcaggaagcccgcccugcccgcccgccag

SEQ ID NO: 139627 - RNA, 32 nt, Human
cuggcaggaauggaacuccaucagggaacagg

SEQ ID NO: 139628 - RNA, 32 nt, Human
cuggcaggacacacccagcucacaguggccuu

SEQ ID NO: 139629 - RNA, 32 nt, Human
cuggcaggacagagcgggaugccaccagcuug

SEQ ID NO: 139630 - RNA, 32 nt, Human
cuggcaggagaaacagaccacagagaggucug

SEQ ID NO: 139631 - RNA, 32 nt, Human
cuggcaggagagaagcagggugggcugcuggc

SEQ ID NO: 139632 - RNA, 22 nt, Human
cuggcaggagcugggcuugcug

SEQ ID NO: 139633 - RNA, 16 nt, Human
cuggcaggaggagcag

SEQ ID NO: 139634 - RNA, 32 nt, Human
cuggcaggaggcaggugcagggaggccugggg

SEQ ID NO: 139635 - RNA, 32 nt, Human
cuggcaggagggcggggugaggaggggcggag

SEQ ID NO: 139636 - RNA, 21 nt, Human
cuggcaggagguccucucccc

SEQ ID NO: 139637 - RNA, 32 nt, Human
cuggcaggaugacccugcgaaggggcccuggu

SEQ ID NO: 139638 - RNA, 32 nt, Human
cuggcaggaugguggagguuucucaaggagcu

SEQ ID NO: 139639 - RNA, 32 nt, Human
cuggcaggcaggcagggccaggaggguaggac

SEQ ID NO: 139640 - RNA, 32 nt, Human
cuggcaggcauuuaccaggccaugugcuuuaa

SEQ ID NO: 139641 - RNA, 32 nt, Human
cuggcaggcauuugucaggccauauguuuuaa

SEQ ID NO: 139642 - RNA, 32 nt, Human
cuggcagggaccccugucccagccgccaacuc

SEQ ID NO: 139643 - RNA, 32 nt, Human
cuggcagggaccccugucccagccuccaacuc

SEQ ID NO: 139644 - RNA, 32 nt, Human
cuggcagggaccccugucccagccuccaauuc

SEQ ID NO: 139645 - RNA, 32 nt, Human
cuggcagggacuccggggucagugaguguaug

SEQ ID NO: 139646 - RNA, 32 nt, Human
cuggcagggaggcacgcagguacugugaaaau

SEQ ID NO: 139647 - RNA, 32 nt, Human
cuggcagggccagacgcuguaccaucacccag

SEQ ID NO: 139648 - RNA, 24 nt, Human
cuggcaggggaaacucuggugccg

SEQ ID NO: 139649 - RNA, 32 nt, Human
cuggcaggggagacaggagccuagcggagccc

SEQ ID NO: 139650 - RNA, 32 nt, Human
cuggcaggggucaccaccacaggccggggcgg

SEQ ID NO: 139651 - RNA, 32 nt, Human
cuggcaggggucuuaccagggguccucuugcc

SEQ ID NO: 139652 - RNA, 32 nt, Human
cuggcaggggugcugcuggcugcuagggccua

SEQ ID NO: 139653 - RNA, 32 nt, Human
cuggcaggguccuguccugcccugccacgacg

SEQ ID NO: 139654 - RNA, 32 nt, Human
cuggcagggugagguagagccggaccguuugc

SEQ ID NO: 139655 - RNA, 32 nt, Human
cuggcaggugggggcagcaggagggcagaggg

SEQ ID NO: 139656 - RNA, 20 nt, Human
cuggcaggugguaccuuccc

SEQ ID NO: 139657 - RNA, 32 nt, Human
cuggcagguucugccuccucucugauucucac

SEQ ID NO: 139658 - RNA, 32 nt, Human
cuggcagucugccuuaggagcaggggcugggg

SEQ ID NO: 139659 - RNA, 32 nt, Human
cuggcagucuucaugcugcccugcugcugcug

SEQ ID NO: 139660 - RNA, 32 nt, Human
cuggcagucuugaacuccugcuauuaucucuu

SEQ ID NO: 139661 - RNA, 32 nt, Human
cuggcagugaacaccaugucugcaggaggugg

SEQ ID NO: 139662 - RNA, 32 nt, Human
cuggcagugcaggagcuggagugagggccauc

SEQ ID NO: 139663 - RNA, 24 nt, Human
cuggcagugcagugagcugucugg

SEQ ID NO: 139664 - RNA, 32 nt, Human
cuggcagugcugagggaccgagcccagcagau

SEQ ID NO: 139665 - RNA, 32 nt, Human
cuggcagugucaggaauauugguuugaaaagc

SEQ ID NO: 139666 - RNA, 32 nt, Human
cuggcagugugggauggaugaaugaaguggaa

SEQ ID NO: 139667 - RNA, 32 nt, Human
cuggcaguguuccugccccagcauggcaccuu

SEQ ID NO: 139668 - RNA, 32 nt, Human
cuggcaguuaucuugagguggggaaggaggug

SEQ ID NO: 139669 - RNA, 32 nt, Human
cuggcaguucccagggacuguuuucaccucug

SEQ ID NO: 139670 - RNA, 32 nt, Human
cuggcaguugugguccuuggcaagugaugugu

SEQ ID NO: 139671 - RNA, 28 nt, Human
cuggcaguuuuuaaccacuucuguggga

SEQ ID NO: 139672 - RNA, 32 nt, Human
cuggcauaaaccugcagguuugcauggcugug

SEQ ID NO: 139673 - RNA, 32 nt, Human
cuggcauaaaucugaagugguucagucuagaa

SEQ ID NO: 139674 - RNA, 32 nt, Human
cuggcauaaucagcugguagaaacagcccuug

SEQ ID NO: 139675 - RNA, 23 nt, Human
cuggcauacuugggcuuccugug

SEQ ID NO: 139676 - RNA, 32 nt, Human
cuggcauagucagguaccagcccagccaggua

SEQ ID NO: 139677 - RNA, 32 nt, Human
cuggcauaucuucucugugcuggugcaccuag

SEQ ID NO: 139678 - RNA, 32 nt, Human
cuggcaucacccuuuucucauaagggcacuaa

SEQ ID NO: 139679 - RNA, 32 nt, Human
cuggcaucaggaguucaagaccaaccuggcca

SEQ ID NO: 139680 - RNA, 32 nt, Human
cuggcaucauuuccuccuaccaucccaggcca

SEQ ID NO: 139681 - RNA, 32 nt, Human
cuggcauccaggaguuagagauugagccuuuc

SEQ ID NO: 139682 - RNA, 32 nt, Human
cuggcaucccaagucaggauuuuagcucagau

SEQ ID NO: 139683 - RNA, 32 nt, Human
cuggcaucccggggcuccccacgggcuggaug

SEQ ID NO: 139684 - RNA, 32 nt, Human
cuggcauccuccgcugguuugcacugggcacg

SEQ ID NO: 139685 - RNA, 32 nt, Human
cuggcaucucuucucccuggccccagccaucc

SEQ ID NO: 139686 - RNA, 32 nt, Human
cuggcaucugucuccccuuguuccugaguggc

SEQ ID NO: 139687 - RNA, 32 nt, Human
cuggcaugacaggugucuccuccucaccacag

SEQ ID NO: 139688 - RNA, 32 nt, Human
cuggcaugagccacugugcccagcccggauau

SEQ ID NO: 139689 - RNA, 32 nt, Human
cuggcaugagggagaggggcugagggauggac

SEQ ID NO: 139690 - RNA, 32 nt, Human
cuggcaugagugacuguguccaggccacaugc

SEQ ID NO: 139691 - RNA, 32 nt, Human
cuggcaugccaacaucagccucuugggagguc

SEQ ID NO: 139692 - RNA, 32 nt, Human
cuggcaugcuggcugcuaccucgcucacucuu

SEQ ID NO: 139693 - RNA, 32 nt, Human
cuggcauggcucccuuuuguccuuccugugcc

SEQ ID NO: 139694 - RNA, 21 nt, Human
cuggcauggcuggagcacagu

SEQ ID NO: 139695 - RNA, 32 nt, Human
cuggcaugggagugaggccccguccuucucac

SEQ ID NO: 139696 - RNA, 32 nt, Human
cuggcauggggaggggagagaagguggucugc

SEQ ID NO: 139697 - RNA, 32 nt, Human
cuggcauggggugcugaaguggggucucagug

SEQ ID NO: 139698 - RNA, 32 nt, Human
cuggcauggugaugucuguaaucccagcaguu

SEQ ID NO: 139699 - RNA, 24 nt, Human
cuggcaugugccucuuccugcagu

SEQ ID NO: 139700 - RNA, 32 nt, Human
cuggcauguggggccugggugggcaggcagga

SEQ ID NO: 139701 - RNA, 32 nt, Human
cuggcauuccccagccucucugcccauuaggg

SEQ ID NO: 139702 - RNA, 19 nt, Human
cuggcauucuugggacuuu

SEQ ID NO: 139703 - RNA, 32 nt, Human
cuggcauuucaucaguggcuaaauucacagau

SEQ ID NO: 139704 - RNA, 32 nt, Human
cuggcauuucucucacugugcucuuaccgcau

SEQ ID NO: 139705 - RNA, 32 nt, Human
cuggcauuugggccacgccgggcugggcggcu

SEQ ID NO: 139706 - RNA, 32 nt, Human
cuggcauuuuccagacaucuauucugcaacag

SEQ ID NO: 139707 - RNA, 32 nt, Human
cuggccaaaacagugaaaccccgucucuacua

SEQ ID NO: 139708 - RNA, 32 nt, Human
cuggccaaaauggaacuucuagggaugaaauc

SEQ ID NO: 139709 - RNA, 32 nt, Human
cuggccaaaauggugaaaccucgucucugcua

SEQ ID NO: 139710 - RNA, 32 nt, Human
cuggccaaaauggugaaacuccaucucuacua

SEQ ID NO: 139711 - RNA, 32 nt, Human
cuggccaaacccuugcuuuccugggccuuugc

SEQ ID NO: 139712 - RNA, 19 nt, Human
cuggccaaaggggccccug

SEQ ID NO: 139713 - RNA, 32 nt, Human
cuggccaaaguggugaaacccugucucuacua

SEQ ID NO: 139714 - RNA, 32 nt, Human
cuggccaaauggugaaaccccaucucuacgaa

SEQ ID NO: 139715 - RNA, 32 nt, Human
cuggccaacaaggugaaaccccaucucuacua

SEQ ID NO: 139716 - RNA, 32 nt, Human
cuggccaacaaggugaaaccccgucucuacua

SEQ ID NO: 139717 - RNA, 22 nt, Human
cuggccaacacagugaaacccc

SEQ ID NO: 139718 - RNA, 32 nt, Human
cuggccaacacagugaaaccccaucucuacua

SEQ ID NO: 139719 - RNA, 32 nt, Human
cuggccaacacagugaaaccccaugucuacua

SEQ ID NO: 139720 - RNA, 31 nt, Human
cuggccaacacagugaaaccucgucucuagu

SEQ ID NO: 139721 - RNA, 24 nt, Human
cuggccaacacgaugaaaccccgu

SEQ ID NO: 139722 - RNA, 32 nt, Human
cuggccaacacgaugaaaccccgucucuacua

SEQ ID NO: 139723 - RNA, 24 nt, Human
cuggccaacacggcaaaaccccgu

SEQ ID NO: 139724 - RNA, 24 nt, Human
cuggccaacacggugaaacaccgu

SEQ ID NO: 139725 - RNA, 22 nt, Human
cuggccaacacggugaaacccc

SEQ ID NO: 139726 - RNA, 32 nt, Human
cuggccaacacggugaaaccccaucucuacua

SEQ ID NO: 139727 - RNA, 32 nt, Human
cuggccaacacggugaaaccccaucucucuaa

SEQ ID NO: 139728 - RNA, 32 nt, Human
cuggccaacacggugaaacccccgucuccacu

SEQ ID NO: 139729 - RNA, 23 nt, Human
cuggccaacacggugaaaccccg

SEQ ID NO: 139730 - RNA, 32 nt, Human
cuggccaacacggugaaaccccgacucuacua

SEQ ID NO: 139731 - RNA, 32 nt, Human
cuggccaacacggugaaaccccgccucuacua

SEQ ID NO: 139732 - RNA, 24 nt, Human
cuggccaacacggugaaaccccgu

SEQ ID NO: 139733 - RNA, 32 nt, Human
cuggccaacacggugaaaccccgucacugaaa

SEQ ID NO: 139734 - RNA, 32 nt, Human
cuggccaacacggugaaaccccgucucuacua

SEQ ID NO: 139735 - RNA, 32 nt, Human
cuggccaacacggugaaaccccgucucuccua

SEQ ID NO: 139736 - RNA, 24 nt, Human
cuggccaacacggugaaacccggu

SEQ ID NO: 139737 - RNA, 32 nt, Human
cuggccaacacggugaaacccggucucuacua

SEQ ID NO: 139738 - RNA, 24 nt, Human
cuggccaacacggugaaacccugu

SEQ ID NO: 139739 - RNA, 32 nt, Human
cuggccaacacggugaaacccuguaucuacua

SEQ ID NO: 139740 - RNA, 31 nt, Human
cuggccaacacggugaaacccugucucuacu

SEQ ID NO: 139741 - RNA, 32 nt, Human
cuggccaacacggugaaacccugucucuacua

SEQ ID NO: 139742 - RNA, 32 nt, Human
cuggccaacacggugaaacgcugucucuacua

SEQ ID NO: 139743 - RNA, 32 nt, Human
cuggccaacagaaugaaacccugucucuacaa

SEQ ID NO: 139744 - RNA, 32 nt, Human
cuggccaacagggugaaaccccgucucuacaa

SEQ ID NO: 139745 - RNA, 32 nt, Human
cuggccaacagggugaaacccugucucgucua

SEQ ID NO: 139746 - RNA, 22 nt, Human
cuggccaacauaaugaaacccc

SEQ ID NO: 139747 - RNA, 32 nt, Human
cuggccaacauaaugaaaccccaucucuacua

SEQ ID NO: 139748 - RNA, 24 nt, Human
cuggccaacauaaugaaacccugu

SEQ ID NO: 139749 - RNA, 32 nt, Human
cuggccaacauacugaaaccccgucucuacua

SEQ ID NO: 139750 - RNA, 22 nt, Human
cuggccaacauagcaaaacccc

SEQ ID NO: 139751 - RNA, 24 nt, Human
cuggccaacauagcaaaacccugu

SEQ ID NO: 139752 - RNA, 24 nt, Human
cuggccaacauagcgaaaccccgu

SEQ ID NO: 139753 - RNA, 21 nt, Human
cuggccaacauagugaaaccc

SEQ ID NO: 139754 - RNA, 22 nt, Human
cuggccaacauagugaaacccc

SEQ ID NO: 139755 - RNA, 32 nt, Human
cuggccaacauagugaaaccccaucucuacua

SEQ ID NO: 139756 - RNA, 32 nt, Human
cuggccaacauagugaaaccccaucucuacug

SEQ ID NO: 139757 - RNA, 32 nt, Human
cuggccaacauagugaaacccccucucuacua

SEQ ID NO: 139758 - RNA, 23 nt, Human
cuggccaacauagugaaaccccg

SEQ ID NO: 139759 - RNA, 32 nt, Human
cuggccaacauagugaaaccccgccucuacua

SEQ ID NO: 139760 - RNA, 24 nt, Human
cuggccaacauagugaaaccccgu

SEQ ID NO: 139761 - RNA, 32 nt, Human
cuggccaacauagugaaaccccgucucuacua

SEQ ID NO: 139762 - RNA, 32 nt, Human
cuggccaacauagugaaaccccgucucuagua

SEQ ID NO: 139763 - RNA, 32 nt, Human
cuggccaacauagugaaaccccgucucuauua

SEQ ID NO: 139764 - RNA, 32 nt, Human
cuggccaacauagugaaaccccgucucuucua

SEQ ID NO: 139765 - RNA, 32 nt, Human
cuggccaacauagugaaaccccgugucuacua

SEQ ID NO: 139766 - RNA, 32 nt, Human
cuggccaacauagugaaaccccuucucuacua

SEQ ID NO: 139767 - RNA, 32 nt, Human
cuggccaacauagugaaacccuaucucuacua

SEQ ID NO: 139768 - RNA, 24 nt, Human
cuggccaacauagugaaacccugu

SEQ ID NO: 139769 - RNA, 32 nt, Human
cuggccaacauagugaaacccugucccuacua

SEQ ID NO: 139770 - RNA, 32 nt, Human
cuggccaacauagugaaacccugucucuacca

SEQ ID NO: 139771 - RNA, 32 nt, Human
cuggccaacauagugaaacccugucucuacua

SEQ ID NO: 139772 - RNA, 32 nt, Human
cuggccaacaucaugaaaccccgucucuacua

SEQ ID NO: 139773 - RNA, 32 nt, Human
cuggccaacaucgugaaaccccaucucuacua

SEQ ID NO: 139774 - RNA, 32 nt, Human
cuggccaacaucgugaaacccugucucuacua

SEQ ID NO: 139775 - RNA, 23 nt, Human
cuggccaacaugacaaaacccug

SEQ ID NO: 139776 - RNA, 22 nt, Human
cuggccaacaugacgaaacccc

SEQ ID NO: 139777 - RNA, 24 nt, Human
cuggccaacaugacgaaacccggu

SEQ ID NO: 139778 - RNA, 22 nt, Human
cuggccaacaugaugaaacccc

SEQ ID NO: 139779 - RNA, 32 nt, Human
cuggccaacaugaugaaaccccaucuccacua

SEQ ID NO: 139780 - RNA, 32 nt, Human
cuggccaacaugaugaaaccccaucucuacua

SEQ ID NO: 139781 - RNA, 24 nt, Human
cuggccaacaugaugaaaccccgu

SEQ ID NO: 139782 - RNA, 32 nt, Human
cuggccaacaugaugaaaccccgucucuacca

SEQ ID NO: 139783 - RNA, 32 nt, Human
cuggccaacaugaugaaaccccgucucuacua

SEQ ID NO: 139784 - RNA, 32 nt, Human
cuggccaacaugaugaaaccccguuucuacua

SEQ ID NO: 139785 - RNA, 22 nt, Human
cuggccaacaugaugaaacccu

SEQ ID NO: 139786 - RNA, 32 nt, Human
cuggccaacaugaugaaacccuaucucuacua

SEQ ID NO: 139787 - RNA, 24 nt, Human
cuggccaacaugaugaaacccugu

SEQ ID NO: 139788 - RNA, 32 nt, Human
cuggccaacaugaugaaacccugucucuacca

SEQ ID NO: 139789 - RNA, 32 nt, Human
cuggccaacaugaugaaacccugucucuacua

SEQ ID NO: 139790 - RNA, 32 nt, Human
cuggccaacaugaugaaacccugucucuacug

SEQ ID NO: 139791 - RNA, 32 nt, Human
cuggccaacaugaugaaacccugucucuauua

SEQ ID NO: 139792 - RNA, 32 nt, Human
cuggccaacaugaugaaacccuguucucuacu

SEQ ID NO: 139793 - RNA, 32 nt, Human
cuggccaacaugaugaaacccuugucucuauu

SEQ ID NO: 139794 - RNA, 23 nt, Human
cuggccaacaugcaaaaccccgu

SEQ ID NO: 139795 - RNA, 32 nt, Human
cuggccaacaugcaaaaccccgucuccacuaa

SEQ ID NO: 139796 - RNA, 32 nt, Human
cuggccaacauggaaaaacccugucucuauua

SEQ ID NO: 139797 - RNA, 32 nt, Human
cuggccaacauggagaaaccccaucucuacca

SEQ ID NO: 139798 - RNA, 32 nt, Human
cuggccaacauggagaaaccccaucucuacua

SEQ ID NO: 139799 - RNA, 32 nt, Human
cuggccaacauggagaaaccccaucuuuacua

SEQ ID NO: 139800 - RNA, 32 nt, Human
cuggccaacauggagaaaccccgucucuacua

SEQ ID NO: 139801 - RNA, 32 nt, Human
cuggccaacauggagaaacccugucucaggcc

SEQ ID NO: 139802 - RNA, 22 nt, Human
cuggccaacauggcaaaaaccc

SEQ ID NO: 139803 - RNA, 32 nt, Human
cuggccaacauggcaaaaacccaucucuucua

SEQ ID NO: 139804 - RNA, 24 nt, Human
cuggccaacauggcaaaaaccugu

SEQ ID NO: 139805 - RNA, 32 nt, Human
cuggccaacauggcaaaaaccugucucuacua

SEQ ID NO: 139806 - RNA, 20 nt, Human
cuggccaacauggcaaaacc

SEQ ID NO: 139807 - RNA, 32 nt, Human
cuggccaacauggcaaaaccacaucucuacua

SEQ ID NO: 139808 - RNA, 32 nt, Human
cuggccaacauggcaaaaccaucucuacuaaa

SEQ ID NO: 139809 - RNA, 21 nt, Human
cuggccaacauggcaaaaccc

SEQ ID NO: 139810 - RNA, 22 nt, Human
cuggccaacauggcaaaacccc

SEQ ID NO: 139811 - RNA, 32 nt, Human
cuggccaacauggcaaaaccccaucacuaaaa

SEQ ID NO: 139812 - RNA, 32 nt, Human
cuggccaacauggcaaaaccccaucuccacaa

SEQ ID NO: 139813 - RNA, 32 nt, Human
cuggccaacauggcaaaaccccaucucuacca

SEQ ID NO: 139814 - RNA, 32 nt, Human
cuggccaacauggcaaaaccccaucucuacua

SEQ ID NO: 139815 - RNA, 32 nt, Human
cuggccaacauggcaaaaccccaucucuacug

SEQ ID NO: 139816 - RNA, 32 nt, Human
cuggccaacauggcaaaaccccaucuuuacua

SEQ ID NO: 139817 - RNA, 32 nt, Human
cuggccaacauggcaaaaccccaugucuacua

SEQ ID NO: 139818 - RNA, 32 nt, Human
cuggccaacauggcaaaacccccaucucgacu

SEQ ID NO: 139819 - RNA, 32 nt, Human
cuggccaacauggcaaaacccccgucucuacu

SEQ ID NO: 139820 - RNA, 32 nt, Human
cuggccaacauggcaaaacccccucuuuacua

SEQ ID NO: 139821 - RNA, 24 nt, Human
cuggccaacauggcaaaaccccgu

SEQ ID NO: 139822 - RNA, 32 nt, Human
cuggccaacauggcaaaaccccgucucuacua

SEQ ID NO: 139823 - RNA, 32 nt, Human
cuggccaacauggcaaaaccccuucucuacua

SEQ ID NO: 139824 - RNA, 32 nt, Human
cuggccaacauggcaaaacccgucucuacuaa

SEQ ID NO: 139825 - RNA, 22 nt, Human
cuggccaacauggcaaaacccu

SEQ ID NO: 139826 - RNA, 32 nt, Human
cuggccaacauggcaaaacccuaucucuacua

SEQ ID NO: 139827 - RNA, 30 nt, Human
cuggccaacauggcaaaacccugccucuac

SEQ ID NO: 139828 - RNA, 24 nt, Human
cuggccaacauggcaaaacccugu

SEQ ID NO: 139829 - RNA, 32 nt, Human
cuggccaacauggcaaaacccuguaucuguga

SEQ ID NO: 139830 - RNA, 32 nt, Human
cuggccaacauggcaaaacccugucgcuacaa

SEQ ID NO: 139831 - RNA, 32 nt, Human
cuggccaacauggcaaaacccugucuacuaaa

SEQ ID NO: 139832 - RNA, 32 nt, Human
cuggccaacauggcaaaacccugucucuacua

SEQ ID NO: 139833 - RNA, 32 nt, Human
cuggccaacauggcaaaacccugucucugcua

SEQ ID NO: 139834 - RNA, 32 nt, Human
cuggccaacauggcaaaaccucaucucuacua

SEQ ID NO: 139835 - RNA, 24 nt, Human
cuggccaacauggcaaaaccucgu

SEQ ID NO: 139836 - RNA, 32 nt, Human
cuggccaacauggcaaaaccuugucucuacua

SEQ ID NO: 139837 - RNA, 21 nt, Human
cuggccaacauggcaaaaucc

SEQ ID NO: 139838 - RNA, 32 nt, Human
cuggccaacauggcaaaaucccaucucuacua

SEQ ID NO: 139839 - RNA, 32 nt, Human
cuggccaacauggcaaaaucccgucucuacua

SEQ ID NO: 139840 - RNA, 24 nt, Human
cuggccaacauggcaacaccccgu

SEQ ID NO: 139841 - RNA, 32 nt, Human
cuggccaacauggcaacaccccgucucuaaua

SEQ ID NO: 139842 - RNA, 21 nt, Human
cuggccaacauggcaagaccc

SEQ ID NO: 139843 - RNA, 32 nt, Human
cuggccaacauggcaagaccccaucucuacua

SEQ ID NO: 139844 - RNA, 32 nt, Human
cuggccaacauggcagaaaccccaucucuacu

SEQ ID NO: 139845 - RNA, 32 nt, Human
cuggccaacauggcgaaaacccaucucuacua

SEQ ID NO: 139846 - RNA, 32 nt, Human
cuggccaacauggcgaaacaccugucucuacu

SEQ ID NO: 139847 - RNA, 21 nt, Human
cuggccaacauggcgaaaccc

SEQ ID NO: 139848 - RNA, 22 nt, Human
cuggccaacauggcgaaacccc

SEQ ID NO: 139849 - RNA, 31 nt, Human
cuggccaacauggcgaaaccccaucucuacu

SEQ ID NO: 139850 - RNA, 32 nt, Human
cuggccaacauggcgaaaccccaucucuacua

SEQ ID NO: 139851 - RNA, 32 nt, Human
cuggccaacauggcgaaaccccaucucuacuu

SEQ ID NO: 139852 - RNA, 32 nt, Human
cuggccaacauggcgaaaccccaucucugcua

SEQ ID NO: 139853 - RNA, 32 nt, Human
cuggccaacauggcgaaaccccauuucuacua

SEQ ID NO: 139854 - RNA, 24 nt, Human
cuggccaacauggcgaaaccccgu

SEQ ID NO: 139855 - RNA, 31 nt, Human
cuggccaacauggcgaaaccccgucucuacu

SEQ ID NO: 139856 - RNA, 32 nt, Human
cuggccaacauggcgaaaccccgucucuacua

SEQ ID NO: 139857 - RNA, 32 nt, Human
cuggccaacauggcgaaaccccgucucuauua

SEQ ID NO: 139858 - RNA, 32 nt, Human
cuggccaacauggcgaaaccccgucuuuacua

SEQ ID NO: 139859 - RNA, 24 nt, Human
cuggccaacauggcgaaaccccuc

SEQ ID NO: 139860 - RNA, 32 nt, Human
cuggccaacauggcgaaaccccucucuacuaa

SEQ ID NO: 139861 - RNA, 32 nt, Human
cuggccaacauggcgaaaccccuucucuacua

SEQ ID NO: 139862 - RNA, 22 nt, Human
cuggccaacauggcgaaacccu

SEQ ID NO: 139863 - RNA, 32 nt, Human
cuggccaacauggcgaaacccuaucucuacua

SEQ ID NO: 139864 - RNA, 32 nt, Human
cuggccaacauggcgaaacccuaucucuccua

SEQ ID NO: 139865 - RNA, 24 nt, Human
cuggccaacauggcgaaacccugu

SEQ ID NO: 139866 - RNA, 32 nt, Human
cuggccaacauggcgaaacccugucucuacua

SEQ ID NO: 139867 - RNA, 32 nt, Human
cuggccaacauggcgaaacccugucuguacua

SEQ ID NO: 139868 - RNA, 32 nt, Human
cuggccaacauggcgaaaccucaucucuacua

SEQ ID NO: 139869 - RNA, 32 nt, Human
cuggccaacauggcgaaaccucauuucuacua

SEQ ID NO: 139870 - RNA, 32 nt, Human
cuggccaacauggcgaaaccucgccucuacua

SEQ ID NO: 139871 - RNA, 32 nt, Human
cuggccaacauggcgaaaccucuucucuacua

SEQ ID NO: 139872 - RNA, 32 nt, Human
cuggccaacauggcgaaacuccgucacuacua

SEQ ID NO: 139873 - RNA, 31 nt, Human
cuggccaacauggcgaaaucccgucuuuacc

SEQ ID NO: 139874 - RNA, 32 nt, Human
cuggccaacauggcgaaauuccaucucuagua

SEQ ID NO: 139875 - RNA, 32 nt, Human
cuggccaacauggcgaauucccguucucuacu

SEQ ID NO: 139876 - RNA, 32 nt, Human
cuggccaacauggcgagaccccaucucuacua

SEQ ID NO: 139877 - RNA, 32 nt, Human
cuggccaacauggcggaaccccaucuccacua

SEQ ID NO: 139878 - RNA, 32 nt, Human
cuggccaacauggcggaacccugucucuacca

SEQ ID NO: 139879 - RNA, 32 nt, Human
cuggccaacauggggaaaccccaucucuacua

SEQ ID NO: 139880 - RNA, 32 nt, Human
cuggccaacauggggaaaccccgucucuacua

SEQ ID NO: 139881 - RNA, 32 nt, Human
cuggccaacauggggaaacccugucuuuacua

SEQ ID NO: 139882 - RNA, 32 nt, Human
cuggccaacauggggaaacuccgucucuacua

SEQ ID NO: 139883 - RNA, 32 nt, Human
cuggccaacauggggaaaucccaucucuacua

SEQ ID NO: 139884 - RNA, 32 nt, Human
cuggccaacaugguaaaacaccgucuccacua

SEQ ID NO: 139885 - RNA, 22 nt, Human
cuggccaacaugguaaaacccc

SEQ ID NO: 139886 - RNA, 32 nt, Human
cuggccaacaugguaaaaccccaucucuacua

SEQ ID NO: 139887 - RNA, 32 nt, Human
cuggccaacaugguaaaaccccauuucuacua

SEQ ID NO: 139888 - RNA, 24 nt, Human
cuggccaacaugguaaaaccccgu

SEQ ID NO: 139889 - RNA, 32 nt, Human
cuggccaacaugguaaaaccccgucucuacua

SEQ ID NO: 139890 - RNA, 32 nt, Human
cuggccaacaugguaaaacccuaucuuuucua

SEQ ID NO: 139891 - RNA, 24 nt, Human
cuggccaacaugguaaaacccugu

SEQ ID NO: 139892 - RNA, 32 nt, Human
cuggccaacaugguaaaacccugucucuacua

SEQ ID NO: 139893 - RNA, 32 nt, Human
cuggccaacaugguaaaacccugucucuacug

SEQ ID NO: 139894 - RNA, 32 nt, Human
cuggccaacaugguaaaacccuguuucuacua

SEQ ID NO: 139895 - RNA, 24 nt, Human
cuggccaacaugguaaaacgccgu

SEQ ID NO: 139896 - RNA, 32 nt, Human
cuggccaacaugguaaaacgccgucucuacua

SEQ ID NO: 139897 - RNA, 22 nt, Human
cuggccaacaugguaaaacucc

SEQ ID NO: 139898 - RNA, 32 nt, Human
cuggccaacaugguaaaacuccauuucuacua

SEQ ID NO: 139899 - RNA, 32 nt, Human
cuggccaacaugguaaaaucccgucucuacua

SEQ ID NO: 139900 - RNA, 32 nt, Human
cuggccaacaugguaaacgcugucccuaguaa

SEQ ID NO: 139901 - RNA, 32 nt, Human
cuggccaacauggucaaaacccgucucuacua

SEQ ID NO: 139902 - RNA, 32 nt, Human
cuggccaacauggugaaaacccaucucuauua

SEQ ID NO: 139903 - RNA, 32 nt, Human
cuggccaacauggugaaaacccaucucugcug

SEQ ID NO: 139904 - RNA, 32 nt, Human
cuggccaacauggugaaaaccugucucuacua

SEQ ID NO: 139905 - RNA, 24 nt, Human
cuggccaacauggugaaacaccgu

SEQ ID NO: 139906 - RNA, 32 nt, Human
cuggccaacauggugaaacaccgucuccacua

SEQ ID NO: 139907 - RNA, 32 nt, Human
cuggccaacauggugaaacacuaucucuacua

SEQ ID NO: 139908 - RNA, 32 nt, Human
cuggccaacauggugaaacacugucucuacua

SEQ ID NO: 139909 - RNA, 32 nt, Human
cuggccaacauggugaaacacugucuguacua

SEQ ID NO: 139910 - RNA, 32 nt, Human
cuggccaacauggugaaaccacauuucuacaa

SEQ ID NO: 139911 - RNA, 32 nt, Human
cuggccaacauggugaaaccacguuccugcua

SEQ ID NO: 139912 - RNA, 21 nt, Human
cuggccaacauggugaaaccc

SEQ ID NO: 139913 - RNA, 32 nt, Human
cuggccaacauggugaaacccagucucuacua

SEQ ID NO: 139914 - RNA, 32 nt, Human
cuggccaacauggugaaacccagucuuuacua

SEQ ID NO: 139915 - RNA, 24 nt, Human
cuggccaacauggugaaacccauc

SEQ ID NO: 139916 - RNA, 22 nt, Human
cuggccaacauggugaaacccc

SEQ ID NO: 139917 - RNA, 32 nt, Human
cuggccaacauggugaaaccccaccucuacaa

SEQ ID NO: 139918 - RNA, 32 nt, Human
cuggccaacauggugaaaccccaccucuacua

SEQ ID NO: 139919 - RNA, 32 nt, Human
cuggccaacauggugaaaccccacgucuacua

SEQ ID NO: 139920 - RNA, 32 nt, Human
cuggccaacauggugaaaccccauauccauua

SEQ ID NO: 139921 - RNA, 32 nt, Human
cuggccaacauggugaaaccccauaucuacua

SEQ ID NO: 139922 - RNA, 32 nt, Human
cuggccaacauggugaaaccccauccuuacua

SEQ ID NO: 139923 - RNA, 32 nt, Human
cuggccaacauggugaaaccccaucgcuacua

SEQ ID NO: 139924 - RNA, 32 nt, Human
cuggccaacauggugaaaccccaucuccacua

SEQ ID NO: 139925 - RNA, 32 nt, Human
cuggccaacauggugaaaccccaucucuacaa

SEQ ID NO: 139926 - RNA, 32 nt, Human
cuggccaacauggugaaaccccaucucuacag

SEQ ID NO: 139927 - RNA, 32 nt, Human
cuggccaacauggugaaaccccaucucuacca

SEQ ID NO: 139928 - RNA, 31 nt, Human
cuggccaacauggugaaaccccaucucuacu

SEQ ID NO: 139929 - RNA, 32 nt, Human
cuggccaacauggugaaaccccaucucuacua

SEQ ID NO: 139930 - RNA, 32 nt, Human
cuggccaacauggugaaaccccaucucuacug

SEQ ID NO: 139931 - RNA, 32 nt, Human
cuggccaacauggugaaaccccaucucuauca

SEQ ID NO: 139932 - RNA, 32 nt, Human
cuggccaacauggugaaaccccaucucuauua

SEQ ID NO: 139933 - RNA, 32 nt, Human
cuggccaacauggugaaaccccaucucugcua

SEQ ID NO: 139934 - RNA, 32 nt, Human
cuggccaacauggugaaaccccaucuguacua

SEQ ID NO: 139935 - RNA, 32 nt, Human
cuggccaacauggugaaaccccaucuguauua

SEQ ID NO: 139936 - RNA, 32 nt, Human
cuggccaacauggugaaaccccaucuuuacua

SEQ ID NO: 139937 - RNA, 32 nt, Human
cuggccaacauggugaaaccccaugucuacua

SEQ ID NO: 139938 - RNA, 32 nt, Human
cuggccaacauggugaaaccccauuucuacua

SEQ ID NO: 139939 - RNA, 32 nt, Human
cuggccaacauggugaaacccccaucucuacu

SEQ ID NO: 139940 - RNA, 32 nt, Human
cuggccaacauggugaaacccccaucucuccu

SEQ ID NO: 139941 - RNA, 32 nt, Human
cuggccaacauggugaaacccccucucuacua

SEQ ID NO: 139942 - RNA, 24 nt, Human
cuggccaacauggugaaaccccgu

SEQ ID NO: 139943 - RNA, 32 nt, Human
cuggccaacauggugaaaccccgucacuaaua

SEQ ID NO: 139944 - RNA, 32 nt, Human
cuggccaacauggugaaaccccgucacuacua

SEQ ID NO: 139945 - RNA, 32 nt, Human
cuggccaacauggugaaaccccgucuauacua

SEQ ID NO: 139946 - RNA, 32 nt, Human
cuggccaacauggugaaaccccgucuccacua

SEQ ID NO: 139947 - RNA, 32 nt, Human
cuggccaacauggugaaaccccgucucuacaa

SEQ ID NO: 139948 - RNA, 32 nt, Human
cuggccaacauggugaaaccccgucucuacca

SEQ ID NO: 139949 - RNA, 32 nt, Human
cuggccaacauggugaaaccccgucucuacua

SEQ ID NO: 139950 - RNA, 32 nt, Human
cuggccaacauggugaaaccccgucucuacuu

SEQ ID NO: 139951 - RNA, 32 nt, Human
cuggccaacauggugaaaccccgucucuagua

SEQ ID NO: 139952 - RNA, 32 nt, Human
cuggccaacauggugaaaccccgucucuauua

SEQ ID NO: 139953 - RNA, 32 nt, Human
cuggccaacauggugaaaccccgucuguacua

SEQ ID NO: 139954 - RNA, 32 nt, Human
cuggccaacauggugaaaccccgucuguauua

SEQ ID NO: 139955 - RNA, 32 nt, Human
cuggccaacauggugaaaccccguuucuacca

SEQ ID NO: 139956 - RNA, 32 nt, Human
cuggccaacauggugaaaccccuucucuacua

SEQ ID NO: 139957 - RNA, 32 nt, Human
cuggccaacauggugaaaccccuucucuacug

SEQ ID NO: 139958 - RNA, 32 nt, Human
cuggccaacauggugaaaccccuucucuagua

SEQ ID NO: 139959 - RNA, 32 nt, Human
cuggccaacauggugaaacccgcugucuacua

SEQ ID NO: 139960 - RNA, 24 nt, Human
cuggccaacauggugaaacccggu

SEQ ID NO: 139961 - RNA, 32 nt, Human
cuggccaacauggugaaacccggucucuacca

SEQ ID NO: 139962 - RNA, 32 nt, Human
cuggccaacauggugaaacccggucucuacua

SEQ ID NO: 139963 - RNA, 24 nt, Human
cuggccaacauggugaaacccguc

SEQ ID NO: 139964 - RNA, 32 nt, Human
cuggccaacauggugaaacccgucucuacuaa

SEQ ID NO: 139965 - RNA, 22 nt, Human
cuggccaacauggugaaacccu

SEQ ID NO: 139966 - RNA, 32 nt, Human
cuggccaacauggugaaacccuaucuccacua

SEQ ID NO: 139967 - RNA, 32 nt, Human
cuggccaacauggugaaacccuaucucuacua

SEQ ID NO: 139968 - RNA, 32 nt, Human
cuggccaacauggugaaacccuaucucuacug

SEQ ID NO: 139969 - RNA, 32 nt, Human
cuggccaacauggugaaacccucaucucaacu

SEQ ID NO: 139970 - RNA, 32 nt, Human
cuggccaacauggugaaacccuggcucuacua

SEQ ID NO: 139971 - RNA, 24 nt, Human
cuggccaacauggugaaacccugu

SEQ ID NO: 139972 - RNA, 32 nt, Human
cuggccaacauggugaaacccuguaucuacua

SEQ ID NO: 139973 - RNA, 32 nt, Human
cuggccaacauggugaaacccugucgacuaaa

SEQ ID NO: 139974 - RNA, 32 nt, Human
cuggccaacauggugaaacccugucuacuaaa

SEQ ID NO: 139975 - RNA, 32 nt, Human
cuggccaacauggugaaacccugucucuacaa

SEQ ID NO: 139976 - RNA, 31 nt, Human
cuggccaacauggugaaacccugucucuacu

SEQ ID NO: 139977 - RNA, 32 nt, Human
cuggccaacauggugaaacccugucucuacua

SEQ ID NO: 139978 - RNA, 32 nt, Human
cuggccaacauggugaaacccugucucuacug

SEQ ID NO: 139979 - RNA, 32 nt, Human
cuggccaacauggugaaacccugucucuagua

SEQ ID NO: 139980 - RNA, 32 nt, Human
cuggccaacauggugaaacccugucucuauua

SEQ ID NO: 139981 - RNA, 32 nt, Human
cuggccaacauggugaaacccugucugcauua

SEQ ID NO: 139982 - RNA, 32 nt, Human
cuggccaacauggugaaacccugucuguacca

SEQ ID NO: 139983 - RNA, 32 nt, Human
cuggccaacauggugaaacccugucuguacua

SEQ ID NO: 139984 - RNA, 32 nt, Human
cuggccaacauggugaaacccugucuguagua

SEQ ID NO: 139985 - RNA, 32 nt, Human
cuggccaacauggugaaacccugucuuuacua

SEQ ID NO: 139986 - RNA, 32 nt, Human
cuggccaacauggugaaacccugugucugcua

SEQ ID NO: 139987 - RNA, 32 nt, Human
cuggccaacauggugaaacccuguugcuacua

SEQ ID NO: 139988 - RNA, 32 nt, Human
cuggccaacauggugaaacccuguuucuacua

SEQ ID NO: 139989 - RNA, 32 nt, Human
cuggccaacauggugaaacccuguuucuacug

SEQ ID NO: 139990 - RNA, 32 nt, Human
cuggccaacauggugaaacccuguuucugcca

SEQ ID NO: 139991 - RNA, 24 nt, Human
cuggccaacauggugaaacccuuc

SEQ ID NO: 139992 - RNA, 32 nt, Human
cuggccaacauggugaaacccuucucuacuga

SEQ ID NO: 139993 - RNA, 32 nt, Human
cuggccaacauggugaaacccuuucucuacug

SEQ ID NO: 139994 - RNA, 32 nt, Human
cuggccaacauggugaaaccgcaucucugcug

SEQ ID NO: 139995 - RNA, 32 nt, Human
cuggccaacauggugaaaccgugucucuacua

SEQ ID NO: 139996 - RNA, 32 nt, Human
cuggccaacauggugaaaccucaucucuacua

SEQ ID NO: 139997 - RNA, 32 nt, Human
cuggccaacauggugaaaccucauuucuacua

SEQ ID NO: 139998 - RNA, 32 nt, Human
cuggccaacauggugaaaccuccgucucuauu

SEQ ID NO: 139999 - RNA, 32 nt, Human
cuggccaacauggugaaaccucgucucuacua

SEQ ID NO: 140000 - RNA, 32 nt, Human
cuggccaacauggugaaaccucgucucuacug

SEQ ID NO: 140001 - RNA, 32 nt, Human
cuggccaacauggugaaaccucgucuguacua

SEQ ID NO: 140002 - RNA, 32 nt, Human
cuggccaacauggugaaaccucgucuuuacua

SEQ ID NO: 140003 - RNA, 32 nt, Human
cuggccaacauggugaaaccuggccucuaccu

SEQ ID NO: 140004 - RNA, 32 nt, Human
cuggccaacauggugaaaccugucucuacuaa

SEQ ID NO: 140005 - RNA, 32 nt, Human
cuggccaacauggugaaaccuugucuacuaaa

SEQ ID NO: 140006 - RNA, 32 nt, Human
cuggccaacauggugaaaccuugucucuacua

SEQ ID NO: 140007 - RNA, 32 nt, Human
cuggccaacauggugaaaccuugucucuacug

SEQ ID NO: 140008 - RNA, 22 nt, Human
cuggccaacauggugaaacgcc

SEQ ID NO: 140009 - RNA, 32 nt, Human
cuggccaacauggugaaacgccaucucuacca

SEQ ID NO: 140010 - RNA, 32 nt, Human
cuggccaacauggugaaacgccaucucuacua

SEQ ID NO: 140011 - RNA, 31 nt, Human
cuggccaacauggugaaacgcugucucuacu

SEQ ID NO: 140012 - RNA, 32 nt, Human
cuggccaacauggugaaacgucgucucugcua

SEQ ID NO: 140013 - RNA, 22 nt, Human
cuggccaacauggugaaacucc

SEQ ID NO: 140014 - RNA, 32 nt, Human
cuggccaacauggugaaacuccaucucuacua

SEQ ID NO: 140015 - RNA, 32 nt, Human
cuggccaacauggugaaacuccaucucuccua

SEQ ID NO: 140016 - RNA, 24 nt, Human
cuggccaacauggugaaacuccgu

SEQ ID NO: 140017 - RNA, 32 nt, Human
cuggccaacauggugaaacuccgucucuacua

SEQ ID NO: 140018 - RNA, 32 nt, Human
cuggccaacauggugaaacuccgucucugcua

SEQ ID NO: 140019 - RNA, 32 nt, Human
cuggccaacauggugaaacucugucucuacua

SEQ ID NO: 140020 - RNA, 31 nt, Human
cuggccaacauggugaaacugcaucucuacu

SEQ ID NO: 140021 - RNA, 32 nt, Human
cuggccaacauggugaaaucccaucuauuaaa

SEQ ID NO: 140022 - RNA, 32 nt, Human
cuggccaacauggugaaaucccaucucuacug

SEQ ID NO: 140023 - RNA, 32 nt, Human
cuggccaacauggugaaauccccucucuacua

SEQ ID NO: 140024 - RNA, 32 nt, Human
cuggccaacauggugaaaucccgucucuacua

SEQ ID NO: 140025 - RNA, 32 nt, Human
cuggccaacauggugaaaucccgucucuacug

SEQ ID NO: 140026 - RNA, 32 nt, Human
cuggccaacauggugaaauccugucucugcua

SEQ ID NO: 140027 - RNA, 32 nt, Human
cuggccaacauggugaaaucgugucucugcua

SEQ ID NO: 140028 - RNA, 32 nt, Human
cuggccaacauggugaaaucucaucuguacua

SEQ ID NO: 140029 - RNA, 32 nt, Human
cuggccaacauggugaaaugccgucucuacua

SEQ ID NO: 140030 - RNA, 32 nt, Human
cuggccaacauggugaaauucugucucuacua

SEQ ID NO: 140031 - RNA, 32 nt, Human
cuggccaacauggugaaccccaucucuacuaa

SEQ ID NO: 140032 - RNA, 32 nt, Human
cuggccaacauggugaacccucagcucuacua

SEQ ID NO: 140033 - RNA, 32 nt, Human
cuggccaacauggugaagcccugucucuacua

SEQ ID NO: 140034 - RNA, 32 nt, Human
cuggccaacauggugaagcuccgucucuacua

SEQ ID NO: 140035 - RNA, 32 nt, Human
cuggccaacauggugaagucccgucucuacua

SEQ ID NO: 140036 - RNA, 24 nt, Human
cuggccaacauggugaauccccgu

SEQ ID NO: 140037 - RNA, 32 nt, Human
cuggccaacauggugaauccccgucucuauua

SEQ ID NO: 140038 - RNA, 32 nt, Human
cuggccaacauggugaauuaucucuacuaaaa

SEQ ID NO: 140039 - RNA, 32 nt, Human
cuggccaacauggugacaccccgucucuacua

SEQ ID NO: 140040 - RNA, 32 nt, Human
cuggccaacauggugacacccugucucuacua

SEQ ID NO: 140041 - RNA, 32 nt, Human
cuggccaacauggugagacacccgucucuaca

SEQ ID NO: 140042 - RNA, 32 nt, Human
cuggccaacauggugagacaccgucucuacua

SEQ ID NO: 140043 - RNA, 32 nt, Human
cuggccaacauggugagaccccaucucuacaa

SEQ ID NO: 140044 - RNA, 32 nt, Human
cuggccaacauggugagacccugucucugcua

SEQ ID NO: 140045 - RNA, 32 nt, Human
cuggccaacauggugauacccgucucuacuaa

SEQ ID NO: 140046 - RNA, 32 nt, Human
cuggccaacauggugauaucucgucucuacug

SEQ ID NO: 140047 - RNA, 18 nt, Human
cuggccaacaugguggaa

SEQ ID NO: 140048 - RNA, 32 nt, Human
cuggccaacaugguggaacccaaucucuacua

SEQ ID NO: 140049 - RNA, 32 nt, Human
cuggccaacaugguggaacccagucucuacua

SEQ ID NO: 140050 - RNA, 22 nt, Human
cuggccaacaugguggaacccc

SEQ ID NO: 140051 - RNA, 24 nt, Human
cuggccaacaugguggaaccccgu

SEQ ID NO: 140052 - RNA, 32 nt, Human
cuggccaacaugguggaacccuaucucuacua

SEQ ID NO: 140053 - RNA, 32 nt, Human
cuggccaacaugguguaaccucaucucuacua

SEQ ID NO: 140054 - RNA, 32 nt, Human
cuggccaacaugguguaacgcugucucuacua

SEQ ID NO: 140055 - RNA, 32 nt, Human
cuggccaacauggugugagaccccgucucuac

SEQ ID NO: 140056 - RNA, 32 nt, Human
cuggccaacaugguuaaaccccaucucuacga

SEQ ID NO: 140057 - RNA, 32 nt, Human
cuggccaacaugguuaaaccccgucucuacua

SEQ ID NO: 140058 - RNA, 32 nt, Human
cuggccaacauugugaaaccccaucucuacaa

SEQ ID NO: 140059 - RNA, 32 nt, Human
cuggccaacauugugaaaccccaucucugcca

SEQ ID NO: 140060 - RNA, 32 nt, Human
cuggccaacauugugaaacccugucucuacua

SEQ ID NO: 140061 - RNA, 32 nt, Human
cuggccaaccaacauggugaaaccccgucucu

SEQ ID NO: 140062 - RNA, 32 nt, Human
cuggccaaccuggugaaaccccaucucugcua

SEQ ID NO: 140063 - RNA, 32 nt, Human
cuggccaaccuggugaaaccccgucucuauua

SEQ ID NO: 140064 - RNA, 32 nt, Human
cuggccaaccuggugaaacccugucucuacua

SEQ ID NO: 140065 - RNA, 32 nt, Human
cuggccaacggggugaaacccugucucuacua

SEQ ID NO: 140066 - RNA, 32 nt, Human
cuggccaacguagugaaaccccgucucuacaa

SEQ ID NO: 140067 - RNA, 18 nt, Human
cuggccaacguggugaaa

SEQ ID NO: 140068 - RNA, 32 nt, Human
cuggccaacguggugaaacaccgucucuacua

SEQ ID NO: 140069 - RNA, 32 nt, Human
cuggccaacguggugaaacacugucucuacua

SEQ ID NO: 140070 - RNA, 32 nt, Human
cuggccaacguggugaaaccccaucucuacua

SEQ ID NO: 140071 - RNA, 32 nt, Human
cuggccaacguggugaaaccccaucuucacua

SEQ ID NO: 140072 - RNA, 32 nt, Human
cuggccaacguggugaaacccccucucuacua

SEQ ID NO: 140073 - RNA, 32 nt, Human
cuggccaacguggugaaaccccgucuccagua

SEQ ID NO: 140074 - RNA, 32 nt, Human
cuggccaacguggugaaaccccgucucuacua

SEQ ID NO: 140075 - RNA, 32 nt, Human
cuggccaacguggugaaaccccgucucuacug

SEQ ID NO: 140076 - RNA, 32 nt, Human
cuggccaacguggugaaacccuaucucuacua

SEQ ID NO: 140077 - RNA, 32 nt, Human
cuggccaacguggugaaacccugucucuacua

SEQ ID NO: 140078 - RNA, 32 nt, Human
cuggccaacguggugaaaccucgucuauacua

SEQ ID NO: 140079 - RNA, 32 nt, Human
cuggccaacguggugaaaccucgucuguacua

SEQ ID NO: 140080 - RNA, 32 nt, Human
cuggccaacguggugaaacgcugucucuacua

SEQ ID NO: 140081 - RNA, 32 nt, Human
cuggccaacguggugaaagccuguaucuauua

SEQ ID NO: 140082 - RNA, 32 nt, Human
cuggccaacuugaugaaaccccaucucuaccc

SEQ ID NO: 140083 - RNA, 32 nt, Human
cuggccaacuuggugaaaccccaucucuacaa

SEQ ID NO: 140084 - RNA, 32 nt, Human
cuggccaacuuggugaaaccccgucuuuacua

SEQ ID NO: 140085 - RNA, 32 nt, Human
cuggccaacuuggugaaacccugucucuacua

SEQ ID NO: 140086 - RNA, 32 nt, Human
cuggccaacuuggugaaaccuugucucuacua

SEQ ID NO: 140087 - RNA, 32 nt, Human
cuggccaagauggugaaaccccaucucuacua

SEQ ID NO: 140088 - RNA, 32 nt, Human
cuggccaagauggugaaaccccaucucugcaa

SEQ ID NO: 140089 - RNA, 32 nt, Human
cuggccaagauggugaaaccccgucuccacua

SEQ ID NO: 140090 - RNA, 32 nt, Human
cuggccaagauggugaaaccccgucucuacua

SEQ ID NO: 140091 - RNA, 32 nt, Human
cuggccaagauggugaaaccccgucucuacug

SEQ ID NO: 140092 - RNA, 32 nt, Human
cuggccaagauggugaaacccugucucuacua

SEQ ID NO: 140093 - RNA, 32 nt, Human
cuggccaagauggugaaacccuguuucuacua

SEQ ID NO: 140094 - RNA, 32 nt, Human
cuggccaagauggugaaaucccgucucuacua

SEQ ID NO: 140095 - RNA, 32 nt, Human
cuggccaagauggugaaauccugucucuaaua

SEQ ID NO: 140096 - RNA, 32 nt, Human
cuggccaagaugguggaacccugccucuacua

SEQ ID NO: 140097 - RNA, 22 nt, Human
cuggccaagccaccuccucuca

SEQ ID NO: 140098 - RNA, 24 nt, Human
cuggccaagcuauuauaauucuca

SEQ ID NO: 140099 - RNA, 32 nt, Human
cuggccaagcuggucucgaauuccugaccuca

SEQ ID NO: 140100 - RNA, 32 nt, Human
cuggccaaggaggcuccugggguggggaucac

SEQ ID NO: 140101 - RNA, 32 nt, Human
cuggccaagggagggagccaugaaacccaacu

SEQ ID NO: 140102 - RNA, 32 nt, Human
cuggccaaggggauacagacccugcaguccgc

SEQ ID NO: 140103 - RNA, 21 nt, Human
cuggccaagucguggguccuc

SEQ ID NO: 140104 - RNA, 23 nt, Human
cuggccaaguugcugcucccuca

SEQ ID NO: 140105 - RNA, 32 nt, Human
cuggccaauaaggugaaacccugucucuacua

SEQ ID NO: 140106 - RNA, 32 nt, Human
cuggccaauaaggugaaacuccaucucuacua

SEQ ID NO: 140107 - RNA, 32 nt, Human
cuggccaauagggugaaacuccgucucuacug

SEQ ID NO: 140108 - RNA, 32 nt, Human
cuggccaauaugaugaaaccccaucucuacua

SEQ ID NO: 140109 - RNA, 32 nt, Human
cuggccaauaugcugaaacccugucucuacua

SEQ ID NO: 140110 - RNA, 32 nt, Human
cuggccaauauggugaaaccacgucucuauua

SEQ ID NO: 140111 - RNA, 32 nt, Human
cuggccaauauggugaaacccagcucuacuua

SEQ ID NO: 140112 - RNA, 32 nt, Human
cuggccaauauggugaaacccagucucuacua

SEQ ID NO: 140113 - RNA, 32 nt, Human
cuggccaauauggugaaaccccaucucuacaa

SEQ ID NO: 140114 - RNA, 32 nt, Human
cuggccaauauggugaaaccccaucucuacua

SEQ ID NO: 140115 - RNA, 32 nt, Human
cuggccaauauggugaaaccccaugucuacua

SEQ ID NO: 140116 - RNA, 32 nt, Human
cuggccaauauggugaaaccccgacucuacua

SEQ ID NO: 140117 - RNA, 32 nt, Human
cuggccaauauggugaaaccccgucucuacua

SEQ ID NO: 140118 - RNA, 32 nt, Human
cuggccaauauggugaaacccgucucuauuaa

SEQ ID NO: 140119 - RNA, 32 nt, Human
cuggccaauauggugaaacccugucucuacua

SEQ ID NO: 140120 - RNA, 32 nt, Human
cuggccaauauggugaaacccugucuguacua

SEQ ID NO: 140121 - RNA, 32 nt, Human
cuggccaauauggugaaaccucgucucuacca

SEQ ID NO: 140122 - RNA, 32 nt, Human
cuggccaauauggugaaacuucgucucuacua

SEQ ID NO: 140123 - RNA, 32 nt, Human
cuggccaaucagugucaucuccuggguaaauu

SEQ ID NO: 140124 - RNA, 32 nt, Human
cuggccaaugggacaggagcuugacggccuca

SEQ ID NO: 140125 - RNA, 32 nt, Human
cuggccaauguagugaaaccccgucucuacua

SEQ ID NO: 140126 - RNA, 32 nt, Human
cuggccaaugugaugaaaccccgucucuacua

SEQ ID NO: 140127 - RNA, 32 nt, Human
cuggccaauguggugaaaccccaccucuacua

SEQ ID NO: 140128 - RNA, 32 nt, Human
cuggccaauguggugaaaccccaucucuacua

SEQ ID NO: 140129 - RNA, 32 nt, Human
cuggccaauguggugaaacccugucucuacua

SEQ ID NO: 140130 - RNA, 32 nt, Human
cuggccaauguggugaaacuccaucucuucua

SEQ ID NO: 140131 - RNA, 21 nt, Human
cuggccaauuccaacauucuu

SEQ ID NO: 140132 - RNA, 22 nt, Human
cuggccacagaaaagccuuagu

SEQ ID NO: 140133 - RNA, 32 nt, Human
cuggccacaugcagacaggaggaagcugagcu

SEQ ID NO: 140134 - RNA, 32 nt, Human
cuggccacauggcaaaaccccgucucuacuaa

SEQ ID NO: 140135 - RNA, 32 nt, Human
cuggccacaugggguucccuguuuucucucug

SEQ ID NO: 140136 - RNA, 32 nt, Human
cuggccaccacuccaccagaugggcagagcag

SEQ ID NO: 140137 - RNA, 32 nt, Human
cuggccaccacuguucagcacaugaccuaacu

SEQ ID NO: 140138 - RNA, 32 nt, Human
cuggccaccauggugagaccccgucucuacua

SEQ ID NO: 140139 - RNA, 32 nt, Human
cuggccacccugcggcagugcagccacgaggc

SEQ ID NO: 140140 - RNA, 32 nt, Human
cuggccaccuacgcccuggucaucucagccaa

SEQ ID NO: 140141 - RNA, 32 nt, Human
cuggccacguagguuuuaaagcaaggggcgug

SEQ ID NO: 140142 - RNA, 32 nt, Human
cuggccacuccuggcuucuccuugucccuccu

SEQ ID NO: 140143 - RNA, 32 nt, Human
cuggccacugagcacaccacauucuucaugau

SEQ ID NO: 140144 - RNA, 18 nt, Human
cuggccacugagcacugg

SEQ ID NO: 140145 - RNA, 32 nt, Human
cuggccagacacaggcccucccuguuccccag

SEQ ID NO: 140146 - RNA, 32 nt, Human
cuggccagacugccugccucucuccuuuccuu

SEQ ID NO: 140147 - RNA, 31 nt, Human
cuggccagacuucucuccagcagcaaagcca

SEQ ID NO: 140148 - RNA, 32 nt, Human
cuggccagagacauugauggcaguucuuaucu

SEQ ID NO: 140149 - RNA, 32 nt, Human
cuggccagagugucacaggcaaaaggcaucgg

SEQ ID NO: 140150 - RNA, 32 nt, Human
cuggccagaugcuucucauccacaccugugga

SEQ ID NO: 140151 - RNA, 32 nt, Human
cuggccagcaagaaaccuaaaagggaaacaaa

SEQ ID NO: 140152 - RNA, 32 nt, Human
cuggccagcaaggugaaaccccaucucuacua

SEQ ID NO: 140153 - RNA, 32 nt, Human
cuggccagcacggugaaaccccgucucugcug

SEQ ID NO: 140154 - RNA, 32 nt, Human
cuggccagcauagugaaaccccaucucuacua

SEQ ID NO: 140155 - RNA, 19 nt, Human
cuggccagcaucuaacaca

SEQ ID NO: 140156 - RNA, 32 nt, Human
cuggccagcauggugaaaaccuaucucuacua

SEQ ID NO: 140157 - RNA, 32 nt, Human
cuggccagcauggugaaaccccaucucuacca

SEQ ID NO: 140158 - RNA, 32 nt, Human
cuggccagcauggugaaaccccaucucuacua

SEQ ID NO: 140159 - RNA, 32 nt, Human
cuggccagcauggugaaaccccgucucuacua

SEQ ID NO: 140160 - RNA, 32 nt, Human
cuggccagcauggugaaaccccgucuguacua

SEQ ID NO: 140161 - RNA, 32 nt, Human
cuggccagcauggugaaacccugucucuacua

SEQ ID NO: 140162 - RNA, 32 nt, Human
cuggccagcauggugaaacccugucuuuacua

SEQ ID NO: 140163 - RNA, 32 nt, Human
cuggccagcauggugaaaccucaucccucuaa

SEQ ID NO: 140164 - RNA, 32 nt, Human
cuggccagcauggugaaacucugucucuacua

SEQ ID NO: 140165 - RNA, 32 nt, Human
cuggccagcauggugagaccccgucucuauua

SEQ ID NO: 140166 - RNA, 32 nt, Human
cuggccagccagccugacguggcugccuuccu

SEQ ID NO: 140167 - RNA, 32 nt, Human
cuggccagccaucuuugcucacauggaaauuc

SEQ ID NO: 140168 - RNA, 24 nt, Human
cuggccagcccagccccacuacug

SEQ ID NO: 140169 - RNA, 32 nt, Human
cuggccagccccucggggcugcagagcaguga

SEQ ID NO: 140170 - RNA, 32 nt, Human
cuggccagccuccacucccacucugccagaca

SEQ ID NO: 140171 - RNA, 32 nt, Human
cuggccagccuccugugggccuugauggggcc

SEQ ID NO: 140172 - RNA, 32 nt, Human
cuggccagccuggcugagagaugggcuggacu

SEQ ID NO: 140173 - RNA, 32 nt, Human
cuggccagcuaguggaguggagacugcagagg

SEQ ID NO: 140174 - RNA, 32 nt, Human
cuggccagcuaucucaacuacaagcuacaagc

SEQ ID NO: 140175 - RNA, 32 nt, Human
cuggccaggaacugcugcaaagaaaaauaagc

SEQ ID NO: 140176 - RNA, 32 nt, Human
cuggccaggaaggcacaagguagcugugggcc

SEQ ID NO: 140177 - RNA, 32 nt, Human
cuggccaggagacuccagcagggaaugcccuu

SEQ ID NO: 140178 - RNA, 18 nt, Human
cuggccaggagagccaca

SEQ ID NO: 140179 - RNA, 32 nt, Human
cuggccaggcagcagagggacaagugaccucg

SEQ ID NO: 140180 - RNA, 32 nt, Human
cuggccaggcaggggccugaaacccacuccuc

SEQ ID NO: 140181 - RNA, 32 nt, Human
cuggccaggccugaggucggcgaggguggcug

SEQ ID NO: 140182 - RNA, 32 nt, Human
cuggccaggccuggcacagcccuggcuuccac

SEQ ID NO: 140183 - RNA, 32 nt, Human
cuggccaggccuucuaccugggcagcaccucu

SEQ ID NO: 140184 - RNA, 16 nt, Human
cuggccaggcgaggug

SEQ ID NO: 140185 - RNA, 32 nt, Human
cuggccaggguagacuuggagcuguccuccag

SEQ ID NO: 140186 - RNA, 22 nt, Human
cuggccaggugcccccuuagca

SEQ ID NO: 140187 - RNA, 32 nt, Human
cuggccaguauggugaaacccugucucuacua

SEQ ID NO: 140188 - RNA, 31 nt, Human
cuggccagugcugaggagguuggagagagaa

SEQ ID NO: 140189 - RNA, 32 nt, Human
cuggccauaaaccacagacucucuccaggcuc

SEQ ID NO: 140190 - RNA, 23 nt, Human
cuggccauacccucaaccucagu

SEQ ID NO: 140191 - RNA, 32 nt, Human
cuggccauauaacauuuacacagggaaaugga

SEQ ID NO: 140192 - RNA, 32 nt, Human
cuggccauauccaccccucgacgccgggauga

SEQ ID NO: 140193 - RNA, 32 nt, Human
cuggccauauggaguacugaucagcccacacu

SEQ ID NO: 140194 - RNA, 32 nt, Human
cuggccaucauggugaaaccccaucucuacua

SEQ ID NO: 140195 - RNA, 32 nt, Human
cuggccaucauggugaaacccugucucuacug

SEQ ID NO: 140196 - RNA, 32 nt, Human
cuggccaucauggugaaauccugucucuagug

SEQ ID NO: 140197 - RNA, 32 nt, Human
cuggccauccaccuaaggacugccugcuuucu

SEQ ID NO: 140198 - RNA, 32 nt, Human
cuggccaugaaucucugccucucccaggcugu

SEQ ID NO: 140199 - RNA, 32 nt, Human
cuggccaugauccgguggcugggaaaccucac

SEQ ID NO: 140200 - RNA, 32 nt, Human
cuggccaugcccagggcugguguugguugagg

SEQ ID NO: 140201 - RNA, 32 nt, Human
cuggccaugccuucuugccuuuggaaaaauga

SEQ ID NO: 140202 - RNA, 19 nt, Human
cuggccaugcugacaggug

SEQ ID NO: 140203 - RNA, 32 nt, Human
cuggccaugcugcugcccagcucuaccccucc

SEQ ID NO: 140204 - RNA, 32 nt, Human
cuggccauggagaaagcugacuuggcuggugu

SEQ ID NO: 140205 - RNA, 32 nt, Human
cuggccaugguggugcucgccuguaaucccag

SEQ ID NO: 140206 - RNA, 32 nt, Human
cuggccaugucuucaagugagggaccuggaga

SEQ ID NO: 140207 - RNA, 32 nt, Human
cuggccauuauggugaaaccccgucucuacua

SEQ ID NO: 140208 - RNA, 32 nt, Human
cuggccauugcacuccagcgugggcaacagag

SEQ ID NO: 140209 - RNA, 32 nt, Human
cuggcccaaauggugaaacccugucucuacua

SEQ ID NO: 140210 - RNA, 32 nt, Human
cuggcccaacccacugggugcccuggaucucc

SEQ ID NO: 140211 - RNA, 32 nt, Human
cuggcccaagcucccuccucucccucuguaga

SEQ ID NO: 140212 - RNA, 32 nt, Human
cuggcccaaggccaggagcgcuggguucugca

SEQ ID NO: 140213 - RNA, 32 nt, Human
cuggcccaagggacuggggccucaggcucuca

SEQ ID NO: 140214 - RNA, 32 nt, Human
cuggcccacacgugcauagaggucugggagga

SEQ ID NO: 140215 - RNA, 32 nt, Human
cuggcccacagcacgugagccugcacucacug

SEQ ID NO: 140216 - RNA, 32 nt, Human
cuggcccacauggugaaacccaugucuacuaa

SEQ ID NO: 140217 - RNA, 32 nt, Human
cuggcccacauggugaaaccccaucuuuacua

SEQ ID NO: 140218 - RNA, 32 nt, Human
cuggcccacauggugaaacccugucucuacua

SEQ ID NO: 140219 - RNA, 32 nt, Human
cuggcccaccucaucccuccagccugggaucu

SEQ ID NO: 140220 - RNA, 32 nt, Human
cuggcccacugcaccugcagccacaggcccac

SEQ ID NO: 140221 - RNA, 32 nt, Human
cuggcccacugcaccuguccccacaggagcca

SEQ ID NO: 140222 - RNA, 32 nt, Human
cuggcccacuggcuguuuaugccacugauuua

SEQ ID NO: 140223 - RNA, 21 nt, Human
cuggcccacuggguugcugug

SEQ ID NO: 140224 - RNA, 17 nt, Human
cuggcccagaagcuccu

SEQ ID NO: 140225 - RNA, 32 nt, Human
cuggcccagaaggaggaggagaugaaggugaa

SEQ ID NO: 140226 - RNA, 32 nt, Human
cuggcccagaugagcucugccugcuugucauc

SEQ ID NO: 140227 - RNA, 32 nt, Human
cuggcccagcacaagcccugcuuuggccaccu

SEQ ID NO: 140228 - RNA, 32 nt, Human
cuggcccagcacaaggagaucuacaucuucca

SEQ ID NO: 140229 - RNA, 32 nt, Human
cuggcccagccccuguuuuuccaacauucccc

SEQ ID NO: 140230 - RNA, 32 nt, Human
cuggcccagccugugaaugacucugccccaca

SEQ ID NO: 140231 - RNA, 32 nt, Human
cuggcccagccugugccggugucuguuucugu

SEQ ID NO: 140232 - RNA, 32 nt, Human
cuggcccagcucccaguucccccugcaccagc

SEQ ID NO: 140233 - RNA, 32 nt, Human
cuggcccagcuccugaggcucuuuggaccucc

SEQ ID NO: 140234 - RNA, 32 nt, Human
cuggcccagcuccugcucacagccuggcacag

SEQ ID NO: 140235 - RNA, 32 nt, Human
cuggcccagcugagcgccgccuagagagcuca

SEQ ID NO: 140236 - RNA, 32 nt, Human
cuggcccagcugagcuccgccuagagagcuca

SEQ ID NO: 140237 - RNA, 32 nt, Human
cuggcccagcugcuccagcagugugcacggac

SEQ ID NO: 140238 - RNA, 32 nt, Human
cuggcccaggaagacagaucuacugaggaaag

SEQ ID NO: 140239 - RNA, 32 nt, Human
cuggcccaggaagagccagcaagagcaaggca

SEQ ID NO: 140240 - RNA, 32 nt, Human
cuggcccaggaccaggaggagaugaagaucac

SEQ ID NO: 140241 - RNA, 32 nt, Human
cuggcccaggaccaggaggagaugaaggugaa

SEQ ID NO: 140242 - RNA, 32 nt, Human
cuggcccaggagaaccagagaugaucccgagg

SEQ ID NO: 140243 - RNA, 32 nt, Human
cuggcccaggagcaggggcuuggaguggggcu

SEQ ID NO: 140244 - RNA, 19 nt, Human
cuggcccaggcugccgcug

SEQ ID NO: 140245 - RNA, 32 nt, Human
cuggcccagggaggaggaagccagcagcacac

SEQ ID NO: 140246 - RNA, 32 nt, Human
cuggcccagggagggccuggcagagacugagc

SEQ ID NO: 140247 - RNA, 26 nt, Human
cuggcccagggucuucuccaggcuca

SEQ ID NO: 140248 - RNA, 16 nt, Human
cuggcccaggugcccc

SEQ ID NO: 140249 - RNA, 32 nt, Human
cuggcccagguggugagcgguuugcagugucc

SEQ ID NO: 140250 - RNA, 20 nt, Human
cuggcccagucccuccacug

SEQ ID NO: 140251 - RNA, 32 nt, Human
cuggcccagugggucugaaagcucgcuugaga

SEQ ID NO: 140252 - RNA, 32 nt, Human
cuggcccauagcagugccugccgugccucugg

SEQ ID NO: 140253 - RNA, 22 nt, Human
cuggcccauccucuccugcagu

SEQ ID NO: 140254 - RNA, 32 nt, Human
cuggcccaucucccccagagggcugucccaua

SEQ ID NO: 140255 - RNA, 32 nt, Human
cuggcccaucuucugccucacaguggccacuc

SEQ ID NO: 140256 - RNA, 32 nt, Human
cuggcccauggcuuccuacuggcagcuccagg

SEQ ID NO: 140257 - RNA, 19 nt, Human
cuggccccaaagaccccug

SEQ ID NO: 140258 - RNA, 21 nt, Human
cuggccccaaccaacccacug

SEQ ID NO: 140259 - RNA, 32 nt, Human
cuggccccaagaguggggcaugggaagggcug

SEQ ID NO: 140260 - RNA, 32 nt, Human
cuggccccaagcagcacguccuggugacacug

SEQ ID NO: 140261 - RNA, 19 nt, Human
cuggccccaaggggucuga

SEQ ID NO: 140262 - RNA, 21 nt, Human
cuggccccaccucuucugcca

SEQ ID NO: 140263 - RNA, 22 nt, Human
cuggccccacucucccugcugu

SEQ ID NO: 140264 - RNA, 32 nt, Human
cuggccccacucucccugcugugcccacuccu

SEQ ID NO: 140265 - RNA, 21 nt, Human
cuggccccagaacaggcacug

SEQ ID NO: 140266 - RNA, 20 nt, Human
cuggccccagagcccccagc

SEQ ID NO: 140267 - RNA, 32 nt, Human
cuggccccagcacccagguauaguuaguuacu

SEQ ID NO: 140268 - RNA, 24 nt, Human
cuggccccagcuccugccccccgg

SEQ ID NO: 140269 - RNA, 32 nt, Human
cuggccccagcugggcccuccugcugcucagc

SEQ ID NO: 140270 - RNA, 32 nt, Human
cuggccccaggcccucagggagaaaggagcaa

SEQ ID NO: 140271 - RNA, 32 nt, Human
cuggccccaggcuuucccacauggaagguggc

SEQ ID NO: 140272 - RNA, 21 nt, Human
cuggccccagggcuaccacug

SEQ ID NO: 140273 - RNA, 32 nt, Human
cuggccccagucgaacugggggcuagccaccu

SEQ ID NO: 140274 - RNA, 32 nt, Human
cuggccccaucucacaugacugugaagggggu

SEQ ID NO: 140275 - RNA, 32 nt, Human
cuggccccaugucucucagaauucuucaggug

SEQ ID NO: 140276 - RNA, 32 nt, Human
cuggcccccaaccucagggcucccaggggucu

SEQ ID NO: 140277 - RNA, 19 nt, Human
cuggcccccaccccuaagg

SEQ ID NO: 140278 - RNA, 20 nt, Human
cuggcccccacucucccggg

SEQ ID NO: 140279 - RNA, 20 nt, Human
cuggcccccagcccuaaggg

SEQ ID NO: 140280 - RNA, 32 nt, Human
cuggcccccaggagcaagaccucugaugaugc

SEQ ID NO: 140281 - RNA, 32 nt, Human
cuggcccccaggauacuaacuagaccuuuggc

SEQ ID NO: 140282 - RNA, 32 nt, Human
cuggcccccgacccagcucuacuccaggcuuc

SEQ ID NO: 140283 - RNA, 20 nt, Human
cuggcccccgcccaaugggg

SEQ ID NO: 140284 - RNA, 32 nt, Human
cuggcccccuaaaagaaguuuuggaauuggaa

SEQ ID NO: 140285 - RNA, 32 nt, Human
cuggcccccuccucccuccacacuuccacuuu

SEQ ID NO: 140286 - RNA, 32 nt, Human
cuggcccccucuuaaccagcaguucuugucug

SEQ ID NO: 140287 - RNA, 32 nt, Human
cuggcccccuggcuccugucacagcucagcuu

SEQ ID NO: 140288 - RNA, 18 nt, Human
cuggcccccuguccuuuu

SEQ ID NO: 140289 - RNA, 32 nt, Human
cuggcccccuuuugaaccucauuggacccaac

SEQ ID NO: 140290 - RNA, 19 nt, Human
cuggccccgcccccugcag

SEQ ID NO: 140291 - RNA, 16 nt, Human
cuggccccggagcccc

SEQ ID NO: 140292 - RNA, 23 nt, Human
cuggccccggaggccuccagcug

SEQ ID NO: 140293 - RNA, 32 nt, Human
cuggccccggcuuuauuccuccaccucuugcu

SEQ ID NO: 140294 - RNA, 18 nt, Human
cuggccccgugacacuca

SEQ ID NO: 140295 - RNA, 32 nt, Human
cuggccccuagccucugcacagagcacccucg

SEQ ID NO: 140296 - RNA, 32 nt, Human
cuggccccuccacccucccuccccucccggcu

SEQ ID NO: 140297 - RNA, 21 nt, Human
cuggccccuccccacccagga

SEQ ID NO: 140298 - RNA, 32 nt, Human
cuggccccuccccaugucccuccaggccucag

SEQ ID NO: 140299 - RNA, 32 nt, Human
cuggccccuccccugcccucucccugaaauaa

SEQ ID NO: 140300 - RNA, 23 nt, Human
cuggccccucccuggcccuuuca

SEQ ID NO: 140301 - RNA, 32 nt, Human
cuggccccuccucucaucuucccuucagucuu

SEQ ID NO: 140302 - RNA, 32 nt, Human
cuggccccugcaggagucaggccuggucucac

SEQ ID NO: 140303 - RNA, 32 nt, Human
cuggccccugcaguggggagcggccaggcuag

SEQ ID NO: 140304 - RNA, 32 nt, Human
cuggccccugccacccaguggccggcaugaca

SEQ ID NO: 140305 - RNA, 32 nt, Human
cuggccccugcucacugaugggcccucccagg

SEQ ID NO: 140306 - RNA, 32 nt, Human
cuggccccugcugaagcacuacugcuggccag

SEQ ID NO: 140307 - RNA, 28 nt, Human
cuggccccugcugcugccucccguccuc

SEQ ID NO: 140308 - RNA, 23 nt, Human
cuggccccugcuuccccuagggc

SEQ ID NO: 140309 - RNA, 32 nt, Human
cuggccccuggagagacacaggagaaggagag

SEQ ID NO: 140310 - RNA, 32 nt, Human
cuggccccuggagcagagaugagaccccugug

SEQ ID NO: 140311 - RNA, 32 nt, Human
cuggccccuggagugggagcagcguccuuagu

SEQ ID NO: 140312 - RNA, 32 nt, Human
cuggccccuuccuccucugccuggugaguugg

SEQ ID NO: 140313 - RNA, 32 nt, Human
cuggccccuuugggcccugcauguaguguggg

SEQ ID NO: 140314 - RNA, 32 nt, Human
cuggcccgacucggcugggaggacugccggga

SEQ ID NO: 140315 - RNA, 18 nt, Human
cuggcccgagacgugggg

SEQ ID NO: 140316 - RNA, 31 nt, Human
cuggcccgccucucuggaccuugguuuucuu

SEQ ID NO: 140317 - RNA, 32 nt, Human
cuggcccggcacgggccucggugcagguaacu

SEQ ID NO: 140318 - RNA, 32 nt, Human
cuggcccggcacuguccuccugaggggcaggc

SEQ ID NO: 140319 - RNA, 32 nt, Human
cuggcccggcauuguccuccugaggagcaggg

SEQ ID NO: 140320 - RNA, 32 nt, Human
cuggcccggccucccuuccguccaggcagccg

SEQ ID NO: 140321 - RNA, 21 nt, Human
cuggcccggcgacgcccggga

SEQ ID NO: 140322 - RNA, 19 nt, Human
cuggcccuaaacucggggu

SEQ ID NO: 140323 - RNA, 32 nt, Human
cuggcccuacacccagccuggcccagggccgg

SEQ ID NO: 140324 - RNA, 32 nt, Human
cuggcccuaccucacagcugaagcuuuaaaaa

SEQ ID NO: 140325 - RNA, 32 nt, Human
cuggcccuacggcucgggccagugccaugacg

SEQ ID NO: 140326 - RNA, 22 nt, Human
cuggcccucacaauccagugga

SEQ ID NO: 140327 - RNA, 32 nt, Human
cuggcccucaccuccacgccuaccucauagcu

SEQ ID NO: 140328 - RNA, 23 nt, Human
cuggcccucaguuuccccacugg

SEQ ID NO: 140329 - RNA, 32 nt, Human
cuggcccuccacccccaccucaagugccuuau

SEQ ID NO: 140330 - RNA, 32 nt, Human
cuggcccuccacugacuauacccuggcccacu

SEQ ID NO: 140331 - RNA, 32 nt, Human
cuggcccucccaggacccccucacggggucaa

SEQ ID NO: 140332 - RNA, 21 nt, Human
cuggcccucccuguuuccaca

SEQ ID NO: 140333 - RNA, 32 nt, Human
cuggcccuccugcugcugcugguccagggggu

SEQ ID NO: 140334 - RNA, 32 nt, Human
cuggcccuccuggaacccaggcucuaaacaag

SEQ ID NO: 140335 - RNA, 18 nt, Human
cuggcccuccugggaucu

SEQ ID NO: 140336 - RNA, 32 nt, Human
cuggcccucugcccucuccacguggccugcau

SEQ ID NO: 140337 - RNA, 32 nt, Human
cuggcccucugccugcuccucacuccugguug

SEQ ID NO: 140338 - RNA, 20 nt, Human
cuggcccugaacuccugggc

SEQ ID NO: 140339 - RNA, 19 nt, Human
cuggcccugaagccaucgc

SEQ ID NO: 140340 - RNA, 21 nt, Human
cuggcccugaccucccagagg

SEQ ID NO: 140341 - RNA, 32 nt, Human
cuggcccugagacucugugagggggcuggagc

SEQ ID NO: 140342 - RNA, 32 nt, Human
cuggcccugcagcccccgcccgcgcccgccgc

SEQ ID NO: 140343 - RNA, 32 nt, Human
cuggcccugcagccgucgccgcugccucgggc

SEQ ID NO: 140344 - RNA, 32 nt, Human
cuggcccugcagcuugucuccauggugggcug

SEQ ID NO: 140345 - RNA, 32 nt, Human
cuggcccugccccugcacucaggcuugugaag

SEQ ID NO: 140346 - RNA, 32 nt, Human
cuggcccugcccugaggaaggaggggaagcug

SEQ ID NO: 140347 - RNA, 25 nt, Human
cuggcccugcccugugcccugggau

SEQ ID NO: 140348 - RNA, 21 nt, Human
cuggcccugccgucacagcug

SEQ ID NO: 140349 - RNA, 32 nt, Human
cuggcccugcuaggcuggagaagcccugucac

SEQ ID NO: 140350 - RNA, 32 nt, Human
cuggcccugcugcaacacuuagggcuugagag

SEQ ID NO: 140351 - RNA, 32 nt, Human
cuggcccugcugcuucucagacagcauuggau

SEQ ID NO: 140352 - RNA, 32 nt, Human
cuggcccugcuggcccugccucuucuggccug

SEQ ID NO: 140353 - RNA, 32 nt, Human
cuggcccugcuggccucagcucuggcacugcc

SEQ ID NO: 140354 - RNA, 20 nt, Human
cuggcccugcuuccccagcu

SEQ ID NO: 140355 - RNA, 20 nt, Human
cuggcccugcuuccccaggg

SEQ ID NO: 140356 - RNA, 31 nt, Human
cuggcccugcuuccugcuugccaaggcagag

SEQ ID NO: 140357 - RNA, 21 nt, Human
cuggcccuggaaagagcuagc

SEQ ID NO: 140358 - RNA, 23 nt, Human
cuggcccuggaccccaucccagg

SEQ ID NO: 140359 - RNA, 19 nt, Human
cuggcccuggacgccccug

SEQ ID NO: 140360 - RNA, 32 nt, Human
cuggcccuggacucccuuuuccagaacaccag

SEQ ID NO: 140361 - RNA, 21 nt, Human
cuggcccuggagucuucagcu

SEQ ID NO: 140362 - RNA, 22 nt, Human
cuggcccuggccucgaccagcu

SEQ ID NO: 140363 - RNA, 21 nt, Human
cuggcccuggcucccacaggc

SEQ ID NO: 140364 - RNA, 22 nt, Human
cuggcccuggcugaccccaaag

SEQ ID NO: 140365 - RNA, 20 nt, Human
cuggcccuggcugcccacca

SEQ ID NO: 140366 - RNA, 24 nt, Human
cuggcccuggcugcccaccagcug

SEQ ID NO: 140367 - RNA, 32 nt, Human
cuggcccuggcuugaugggcucaucucaugcu

SEQ ID NO: 140368 - RNA, 20 nt, Human
cuggcccugggacccccagg

SEQ ID NO: 140369 - RNA, 21 nt, Human
cuggcccugggacccccagga

SEQ ID NO: 140370 - RNA, 32 nt, Human
cuggcccugggccagccgcaccucugaagguu

SEQ ID NO: 140371 - RNA, 24 nt, Human
cuggcccugggguccccacagcug

SEQ ID NO: 140372 - RNA, 22 nt, Human
cuggcccugggugggcuagggc

SEQ ID NO: 140373 - RNA, 32 nt, Human
cuggcccugucgcccaggcuggagugccaugg

SEQ ID NO: 140374 - RNA, 32 nt, Human
cuggcccuuaguaucuccuccuuucuugcaug

SEQ ID NO: 140375 - RNA, 32 nt, Human
cuggcccuucaaggcuggaagccaguguccua

SEQ ID NO: 140376 - RNA, 32 nt, Human
cuggcccuuccagagacagugccaaccagacc

SEQ ID NO: 140377 - RNA, 32 nt, Human
cuggcccuugaguguagcaggguccaggguca

SEQ ID NO: 140378 - RNA, 18 nt, Human
cuggcccuugcccccacc

SEQ ID NO: 140379 - RNA, 21 nt, Human
cuggcccuugguguguugcau

SEQ ID NO: 140380 - RNA, 32 nt, Human
cuggcccuuguuucuagccuccuuccuugcag

SEQ ID NO: 140381 - RNA, 32 nt, Human
cuggccgacagucuucccuucucuccaagagg

SEQ ID NO: 140382 - RNA, 31 nt, Human
cuggccgacauggugaaaccccaucucuacu

SEQ ID NO: 140383 - RNA, 32 nt, Human
cuggccgacauggugaaaccccaucucuacua

SEQ ID NO: 140384 - RNA, 32 nt, Human
cuggccgacauggugaaacccugucucuacua

SEQ ID NO: 140385 - RNA, 18 nt, Human
cuggccgagcagccccug

SEQ ID NO: 140386 - RNA, 32 nt, Human
cuggccgagcugagcgagagccugcgcaaccg

SEQ ID NO: 140387 - RNA, 32 nt, Human
cuggccgagcuugaggccacaugugaaggguc

SEQ ID NO: 140388 - RNA, 32 nt, Human
cuggccgaguccagagagccgcggcgccucgu

SEQ ID NO: 140389 - RNA, 32 nt, Human
cuggccgaucagauccuggcugggaaugcggu

SEQ ID NO: 140390 - RNA, 21 nt, Human
cuggccgcacccaaccugugu

SEQ ID NO: 140391 - RNA, 32 nt, Human
cuggccgcagugaggcauguaucuguaguucc

SEQ ID NO: 140392 - RNA, 32 nt, Human
cuggccgcauggcugcucagacuggcauccag

SEQ ID NO: 140393 - RNA, 32 nt, Human
cuggccgccagccuggccugccgcccucccgg

SEQ ID NO: 140394 - RNA, 23 nt, Human
cuggccgccaguuucuguugcug

SEQ ID NO: 140395 - RNA, 20 nt, Human
cuggccgccccaggcuccug

SEQ ID NO: 140396 - RNA, 32 nt, Human
cuggccgccgggugcccacagaggcucagcuc

SEQ ID NO: 140397 - RNA, 32 nt, Human
cuggccgccuggcugugcacacaugcagcacg

SEQ ID NO: 140398 - RNA, 18 nt, Human
cuggccgccuggguccaa

SEQ ID NO: 140399 - RNA, 32 nt, Human
cuggccgcgcccuugggcuuccugccuugcag

SEQ ID NO: 140400 - RNA, 32 nt, Human
cuggccgcggcguggggacagcgaggcgcacu

SEQ ID NO: 140401 - RNA, 32 nt, Human
cuggccgcuaccugcagcaagauagggccgcc

SEQ ID NO: 140402 - RNA, 32 nt, Human
cuggccgcuaucucgcugcacccggccgcguc

SEQ ID NO: 140403 - RNA, 32 nt, Human
cuggccggacucggugcuccucaggccccagc

SEQ ID NO: 140404 - RNA, 32 nt, Human
cuggccggcagagcacaccugcugucaccagg

SEQ ID NO: 140405 - RNA, 32 nt, Human
cuggccggcagcccugggcugaggcacagacu

SEQ ID NO: 140406 - RNA, 32 nt, Human
cuggccggcucccggcgaagggcagcggagga

SEQ ID NO: 140407 - RNA, 32 nt, Human
cuggccgggaggugaugggcggggaagguucu

SEQ ID NO: 140408 - RNA, 32 nt, Human
cuggccgggccugggcugcccuccagucgguc

SEQ ID NO: 140409 - RNA, 32 nt, Human
cuggccgggccuggggucgcugucaacuuguu

SEQ ID NO: 140410 - RNA, 27 nt, Human
cuggccggggccagagcagccaggacc

SEQ ID NO: 140411 - RNA, 27 nt, Human
cuggccggggcccagaaacccaggacc

SEQ ID NO: 140412 - RNA, 32 nt, Human
cuggccgggguggugaaaccccaucucuacua

SEQ ID NO: 140413 - RNA, 32 nt, Human
cuggccggucauuccaggucagcagcccagcu

SEQ ID NO: 140414 - RNA, 32 nt, Human
cuggccgguggucucucauccuugugugcugc

SEQ ID NO: 140415 - RNA, 32 nt, Human
cuggccgucugccuggcccauggaugcuuucu

SEQ ID NO: 140416 - RNA, 32 nt, Human
cuggccgugagagagacaggagaggaaggagg

SEQ ID NO: 140417 - RNA, 32 nt, Human
cuggccguggcaggugguuggaaaagaaaugg

SEQ ID NO: 140418 - RNA, 32 nt, Human
cuggccguggcuccagaaugugcugccuuuuu

SEQ ID NO: 140419 - RNA, 32 nt, Human
cuggccgugguggcucacaccuguaaucccag

SEQ ID NO: 140420 - RNA, 32 nt, Human
cuggccguguccucugugccucuuuccuuguc

SEQ ID NO: 140421 - RNA, 32 nt, Human
cuggccguuaacucagcacccaggccaagccc

SEQ ID NO: 140422 - RNA, 32 nt, Human
cuggccuaagcgucaggcuuguuuucaugcug

SEQ ID NO: 140423 - RNA, 32 nt, Human
cuggccuacaugcacauugaggcacagcaccu

SEQ ID NO: 140424 - RNA, 19 nt, Human
cuggccuaccuccugcagg

SEQ ID NO: 140425 - RNA, 32 nt, Human
cuggccuacucaaucucucccaccucauccuc

SEQ ID NO: 140426 - RNA, 32 nt, Human
cuggccuauccccuguagggggugggugaggg

SEQ ID NO: 140427 - RNA, 32 nt, Human
cuggccuauccuggcccuucucaugcccaaga

SEQ ID NO: 140428 - RNA, 32 nt, Human
cuggccucaaaaccaugcuugagucacacaag

SEQ ID NO: 140429 - RNA, 32 nt, Human
cuggccucaaacuauccucccaccuuagccuc

SEQ ID NO: 140430 - RNA, 20 nt, Human
cuggccucaaacucaccaaa

SEQ ID NO: 140431 - RNA, 32 nt, Human
cuggccucaaacuccugaccucaggugaucca

SEQ ID NO: 140432 - RNA, 32 nt, Human
cuggccucaaaugauccauccaccucagccuc

SEQ ID NO: 140433 - RNA, 32 nt, Human
cuggccucaaaugauccgcccaccucaaccuc

SEQ ID NO: 140434 - RNA, 32 nt, Human
cuggccucaagcaacccuccugccucagucuu

SEQ ID NO: 140435 - RNA, 32 nt, Human
cuggccucaagcaauccacucaucucggccuc

SEQ ID NO: 140436 - RNA, 32 nt, Human
cuggccucaagcaauccgccuaccucagccuc

SEQ ID NO: 140437 - RNA, 32 nt, Human
cuggccucaagcaauccucacgccucagccuc

SEQ ID NO: 140438 - RNA, 32 nt, Human
cuggccucaagcaauccucccaccucagcauc

SEQ ID NO: 140439 - RNA, 32 nt, Human
cuggccucaagcaauccucccaccucagccuc

SEQ ID NO: 140440 - RNA, 32 nt, Human
cuggccucaagcaauccucccaccucggccuc

SEQ ID NO: 140441 - RNA, 32 nt, Human
cuggccucaagcaauccucccaccugagcccc

SEQ ID NO: 140442 - RNA, 32 nt, Human
cuggccucaagcaauccucccaccuuagccuc

SEQ ID NO: 140443 - RNA, 32 nt, Human
cuggccucaagcaauccuccuaccucggcuuu

SEQ ID NO: 140444 - RNA, 32 nt, Human
cuggccucaagcaauccuccugccucagccuc

SEQ ID NO: 140445 - RNA, 32 nt, Human
cuggccucaagcaauccucucuccucagccuc

SEQ ID NO: 140446 - RNA, 32 nt, Human
cuggccucaagcaauccucuugccucggccuc

SEQ ID NO: 140447 - RNA, 32 nt, Human
cuggccucaagcaauccuuccaucuuggccuc

SEQ ID NO: 140448 - RNA, 32 nt, Human
cuggccucaagcaauguucccaugucagccua

SEQ ID NO: 140449 - RNA, 32 nt, Human
cuggccucaagcaauucucccacuucagccuc

SEQ ID NO: 140450 - RNA, 32 nt, Human
cuggccucaagcacuccacccaccucggccuc

SEQ ID NO: 140451 - RNA, 32 nt, Human
cuggccucaagcaguccucccaccucagccuc

SEQ ID NO: 140452 - RNA, 32 nt, Human
cuggccucaagcaguccucccaccuuagcuuc

SEQ ID NO: 140453 - RNA, 32 nt, Human
cuggccucaagcaguccuccugccucacccuu

SEQ ID NO: 140454 - RNA, 32 nt, Human
cuggccucaagcgauccauucucaccuuggcc

SEQ ID NO: 140455 - RNA, 32 nt, Human
cuggccucaagcgauccucccaccucagccuc

SEQ ID NO: 140456 - RNA, 32 nt, Human
cuggccucaagcgauccucccaccucgaccuc

SEQ ID NO: 140457 - RNA, 32 nt, Human
cuggccucaagcgauccucccaccuguccucc

SEQ ID NO: 140458 - RNA, 32 nt, Human
cuggccucaaguaauccucccgccucgguuuu

SEQ ID NO: 140459 - RNA, 32 nt, Human
cuggccucaagugauccacccaccucagccgc

SEQ ID NO: 140460 - RNA, 32 nt, Human
cuggccucaagugauccacccaccucagccuc

SEQ ID NO: 140461 - RNA, 32 nt, Human
cuggccucaagugauccucccaccucagcguc

SEQ ID NO: 140462 - RNA, 32 nt, Human
cuggccucaagugauccucccuccucggccuc

SEQ ID NO: 140463 - RNA, 32 nt, Human
cuggccucacacuuggugcguccuccacaucu

SEQ ID NO: 140464 - RNA, 19 nt, Human
cuggccucagaaccuggug

SEQ ID NO: 140465 - RNA, 23 nt, Human
cuggccucagacugcacccagga

SEQ ID NO: 140466 - RNA, 32 nt, Human
cuggccucagcaggaaccuguacuggguuauu

SEQ ID NO: 140467 - RNA, 32 nt, Human
cuggccucagccaccuggcucugucugcagua

SEQ ID NO: 140468 - RNA, 32 nt, Human
cuggccucaggugauccacccaccucaguguu

SEQ ID NO: 140469 - RNA, 32 nt, Human
cuggccucaggugaucugcccaccucauccuc

SEQ ID NO: 140470 - RNA, 32 nt, Human
cuggccucaggugaucugcccaccucggccuc

SEQ ID NO: 140471 - RNA, 32 nt, Human
cuggccucauagcuccuccucgccaagcaugu

SEQ ID NO: 140472 - RNA, 32 nt, Human
cuggccucauccacauauguaguucccuaggu

SEQ ID NO: 140473 - RNA, 32 nt, Human
cuggccucaugugaucugcccaccucagccuc

SEQ ID NO: 140474 - RNA, 32 nt, Human
cuggccucauuucccacccuuugccagccagc

SEQ ID NO: 140475 - RNA, 21 nt, Human
cuggccuccacugccccagga

SEQ ID NO: 140476 - RNA, 32 nt, Human
cuggccuccagccccagcaguguggcccagag

SEQ ID NO: 140477 - RNA, 32 nt, Human
cuggccuccagccucaaucuguuccguagcuc

SEQ ID NO: 140478 - RNA, 32 nt, Human
cuggccuccagcugcgcaggagccugugguac

SEQ ID NO: 140479 - RNA, 32 nt, Human
cuggccuccagucauuugccugccucggccuc

SEQ ID NO: 140480 - RNA, 32 nt, Human
cuggccuccagugauccuccauccucggccuc

SEQ ID NO: 140481 - RNA, 32 nt, Human
cuggccucccagagugcugggauuacaggugu

SEQ ID NO: 140482 - RNA, 32 nt, Human
cuggccuccccacugcagccagcaugccuggc

SEQ ID NO: 140483 - RNA, 23 nt, Human
cuggccuccccugccccccaggg

SEQ ID NO: 140484 - RNA, 32 nt, Human
cuggccucccgcgaucacagcggacagggggc

SEQ ID NO: 140485 - RNA, 21 nt, Human
cuggccucccggagccaagau

SEQ ID NO: 140486 - RNA, 18 nt, Human
cuggccucccugggauuu

SEQ ID NO: 140487 - RNA, 19 nt, Human
cuggccuccucuggcuuca

SEQ ID NO: 140488 - RNA, 32 nt, Human
cuggccuccugccucuacugggaaggcuacuu

SEQ ID NO: 140489 - RNA, 18 nt, Human
cuggccuccuuggccuca

SEQ ID NO: 140490 - RNA, 32 nt, Human
cuggccuccuuuccucagccccuuguucuucc

SEQ ID NO: 140491 - RNA, 32 nt, Human
cuggccuccuuucuccgauuuacccucagggu

SEQ ID NO: 140492 - RNA, 32 nt, Human
cuggccucgaacuccugaccucaggugaucug

SEQ ID NO: 140493 - RNA, 32 nt, Human
cuggccucgagcagucuuccugccucgggcuc

SEQ ID NO: 140494 - RNA, 32 nt, Human
cuggccucgccuggccugaggucucgcugaug

SEQ ID NO: 140495 - RNA, 32 nt, Human
cuggccucgggugauccacccaccucggccuc

SEQ ID NO: 140496 - RNA, 32 nt, Human
cuggccucguucucucuucuugcccuuggccc

SEQ ID NO: 140497 - RNA, 19 nt, Human
cuggccucucacuccugcc

SEQ ID NO: 140498 - RNA, 32 nt, Human
cuggccucuccuccucauccucuucauccuca

SEQ ID NO: 140499 - RNA, 32 nt, Human
cuggccucuccucuccacggucgccugugccc

SEQ ID NO: 140500 - RNA, 21 nt, Human
cuggccucugccuacggucgg

SEQ ID NO: 140501 - RNA, 19 nt, Human
cuggccucugccucgggcc

SEQ ID NO: 140502 - RNA, 23 nt, Human
cuggccucuggcuggcgcgcuga

SEQ ID NO: 140503 - RNA, 18 nt, Human
cuggccucuucccugaug

SEQ ID NO: 140504 - RNA, 32 nt, Human
cuggccugaagcaauccgcccaccucagccuc

SEQ ID NO: 140505 - RNA, 32 nt, Human
cuggccugaaucugcaaagaccaccagguuac

SEQ ID NO: 140506 - RNA, 32 nt, Human
cuggccugagacuugcagggaggcaagaagac

SEQ ID NO: 140507 - RNA, 18 nt, Human
cuggccugagucuuuucu

SEQ ID NO: 140508 - RNA, 32 nt, Human
cuggccugccacccuccugcgcaggccaugca

SEQ ID NO: 140509 - RNA, 32 nt, Human
cuggccugccauggaauuuuggcugcaauuuu

SEQ ID NO: 140510 - RNA, 32 nt, Human
cuggccugccugggggaaguggggagcauggc

SEQ ID NO: 140511 - RNA, 32 nt, Human
cuggccugcgcuucuuucucuccaagcgggca

SEQ ID NO: 140512 - RNA, 32 nt, Human
cuggccugcucacagagcucuaccucagccug

SEQ ID NO: 140513 - RNA, 32 nt, Human
cuggccugcucagagguucccuguugguaacc

SEQ ID NO: 140514 - RNA, 20 nt, Human
cuggccugcuccaccugcca

SEQ ID NO: 140515 - RNA, 32 nt, Human
cuggccugcugccucuucucuugcagcaaaau

SEQ ID NO: 140516 - RNA, 32 nt, Human
cuggccugcuuggagagguggcagcaggcacc

SEQ ID NO: 140517 - RNA, 32 nt, Human
cuggccuggaaccuggaugccuccagccuuug

SEQ ID NO: 140518 - RNA, 32 nt, Human
cuggccuggacuggaucccagcuguucuaggc

SEQ ID NO: 140519 - RNA, 22 nt, Human
cuggccuggagcacccugggau

SEQ ID NO: 140520 - RNA, 32 nt, Human
cuggccuggaggaaaugcuagagcagagggaa

SEQ ID NO: 140521 - RNA, 32 nt, Human
cuggccuggauugcaacauccucccagagaag

SEQ ID NO: 140522 - RNA, 32 nt, Human
cuggccuggcaacccaggccagggugcccgca

SEQ ID NO: 140523 - RNA, 32 nt, Human
cuggccuggcccugagacuggggaguggcucc

SEQ ID NO: 140524 - RNA, 32 nt, Human
cuggccuggcccuggcccuccugcugcugcug

SEQ ID NO: 140525 - RNA, 32 nt, Human
cuggccuggccuggcccacccugcuccuccag

SEQ ID NO: 140526 - RNA, 32 nt, Human
cuggccuggccuggcccugcccugaggaagga

SEQ ID NO: 140527 - RNA, 31 nt, Human
cuggccuggcgcuggucuaugccaaggaaca

SEQ ID NO: 140528 - RNA, 32 nt, Human
cuggccugggauuggccagggagcagggcggg

SEQ ID NO: 140529 - RNA, 32 nt, Human
cuggccugggcaacaagagcgagacuuugucu

SEQ ID NO: 140530 - RNA, 32 nt, Human
cuggccugggcaccuguccuccugcugugccg

SEQ ID NO: 140531 - RNA, 32 nt, Human
cuggccugggcugugggaggcagcugugccgu

SEQ ID NO: 140532 - RNA, 32 nt, Human
cuggccuggguguggagugaaagagucacugu

SEQ ID NO: 140533 - RNA, 32 nt, Human
cuggccugguagagaagauggcacaggaugga

SEQ ID NO: 140534 - RNA, 32 nt, Human
cuggccugguggagguuggggagcuguaggag

SEQ ID NO: 140535 - RNA, 32 nt, Human
cuggccuguaugaccuccacagccaggcccug

SEQ ID NO: 140536 - RNA, 32 nt, Human
cuggccugucaugcagggagagcugugcuccu

SEQ ID NO: 140537 - RNA, 32 nt, Human
cuggccuguccccaggaaggaggaggagucug

SEQ ID NO: 140538 - RNA, 32 nt, Human
cuggccugucucucacaauccauauauucaag

SEQ ID NO: 140539 - RNA, 32 nt, Human
cuggccugugagcuggggacuccugggcccug

SEQ ID NO: 140540 - RNA, 21 nt, Human
cuggccugugaggagcaguga

SEQ ID NO: 140541 - RNA, 32 nt, Human
cuggccuguggacgcccugccugcccugcaga

SEQ ID NO: 140542 - RNA, 32 nt, Human
cuggccugugugagccaggauggcugccugcg

SEQ ID NO: 140543 - RNA, 32 nt, Human
cuggccugugugagcccggcccacugaccacc

SEQ ID NO: 140544 - RNA, 32 nt, Human
cuggccuguguuguuaacagcaggcugccagg

SEQ ID NO: 140545 - RNA, 18 nt, Human
cuggccuguuccuuggaa

SEQ ID NO: 140546 - RNA, 32 nt, Human
cuggccuguugcagccauggugcauugcaguu

SEQ ID NO: 140547 - RNA, 32 nt, Human
cuggccuuaagugauccucccaccucagccuc

SEQ ID NO: 140548 - RNA, 32 nt, Human
cuggccuuacccugccuuccugccuccagagu

SEQ ID NO: 140549 - RNA, 32 nt, Human
cuggccuuacuuugauuuuuaaaacaagagac

SEQ ID NO: 140550 - RNA, 23 nt, Human
cuggccuucaagcaggcccggga

SEQ ID NO: 140551 - RNA, 32 nt, Human
cuggccuucagcaauccucccaccucaaccuc

SEQ ID NO: 140552 - RNA, 19 nt, Human
cuggccuucaggccacugg

SEQ ID NO: 140553 - RNA, 32 nt, Human
cuggccuuccagggaauccugaggccuggggu

SEQ ID NO: 140554 - RNA, 32 nt, Human
cuggccuuccgugcccgcuccaccucuguucu

SEQ ID NO: 140555 - RNA, 32 nt, Human
cuggccuuccucucccccuccccuccccuccc

SEQ ID NO: 140556 - RNA, 32 nt, Human
cuggccuuccuugaggacacgaugcccgaugc

SEQ ID NO: 140557 - RNA, 32 nt, Human
cuggccuucugcagcaggguucugggauguuu

SEQ ID NO: 140558 - RNA, 32 nt, Human
cuggccuucugcuucugaguugcacauuaauc

SEQ ID NO: 140559 - RNA, 32 nt, Human
cuggccuugaaaaucucagcuugguguacagu

SEQ ID NO: 140560 - RNA, 32 nt, Human
cuggccuugaauccaccucuuguuuuaaguga

SEQ ID NO: 140561 - RNA, 32 nt, Human
cuggccuugagggugggagagagccagcuccu

SEQ ID NO: 140562 - RNA, 20 nt, Human
cuggccuugccuucacaggg

SEQ ID NO: 140563 - RNA, 32 nt, Human
cuggccuuggcuggcucuucagcucuuggauc

SEQ ID NO: 140564 - RNA, 32 nt, Human
cuggccuuggguccccaaaggugucacucuga

SEQ ID NO: 140565 - RNA, 32 nt, Human
cuggccuuggguccuggggaaaacauggaggc

SEQ ID NO: 140566 - RNA, 32 nt, Human
cuggccuuggucugcugaaguguuaggaagag

SEQ ID NO: 140567 - RNA, 32 nt, Human
cuggccuuguucauuuuaguaacgguuccuga

SEQ ID NO: 140568 - RNA, 32 nt, Human
cuggccuuguuuccugagucugaucuguuugg

SEQ ID NO: 140569 - RNA, 32 nt, Human
cuggccuuucacuccaguucugggugaggcag

SEQ ID NO: 140570 - RNA, 32 nt, Human
cuggccuuugacuguggaacgggacagaagga

SEQ ID NO: 140571 - RNA, 32 nt, Human
cuggccuuuggcuauuuuagcauuucaaagug

SEQ ID NO: 140572 - RNA, 32 nt, Human
cuggccuuugguuggccuugaaugaagagugg

SEQ ID NO: 140573 - RNA, 32 nt, Human
cuggccuuuuucucccccacgucacagucccc

SEQ ID NO: 140574 - RNA, 22 nt, Human
cuggcgaacauggugaaacccc

SEQ ID NO: 140575 - RNA, 32 nt, Human
cuggcgaacauggugaaaccccaucucuacua

SEQ ID NO: 140576 - RNA, 24 nt, Human
cuggcgaacauggugagacccauc

SEQ ID NO: 140577 - RNA, 32 nt, Human
cuggcgaacauggugagacccaucucuacuaa

SEQ ID NO: 140578 - RNA, 32 nt, Human
cuggcgaccacccgcccugccuggugcauuuc

SEQ ID NO: 140579 - RNA, 32 nt, Human
cuggcgaccucaccuucauucuuaggucaaua

SEQ ID NO: 140580 - RNA, 32 nt, Human
cuggcgagaugcgguuucacucuguugcccag

SEQ ID NO: 140581 - RNA, 32 nt, Human
cuggcgaggcugaaggcgagggguggaggagg

SEQ ID NO: 140582 - RNA, 32 nt, Human
cuggcgaggcugcugggguugcagcgggacag

SEQ ID NO: 140583 - RNA, 32 nt, Human
cuggcgauacugacuagaaagucagggagcug

SEQ ID NO: 140584 - RNA, 32 nt, Human
cuggcgaugagcguccuuuaaaccacugugcc

SEQ ID NO: 140585 - RNA, 31 nt, Human
cuggcgaugcuucaggacuggugcaggagga

SEQ ID NO: 140586 - RNA, 32 nt, Human
cuggcgcacugccgcagcaccauggagguaac

SEQ ID NO: 140587 - RNA, 32 nt, Human
cuggcgcaggaccucacucgagcggagcgccc

SEQ ID NO: 140588 - RNA, 32 nt, Human
cuggcgcccaggagcggugggccgaagacgug

SEQ ID NO: 140589 - RNA, 24 nt, Human
cuggcgcccaggcuggaguacagu

SEQ ID NO: 140590 - RNA, 32 nt, Human
cuggcgcccaggcuggaguacaguggcaugau

SEQ ID NO: 140591 - RNA, 24 nt, Human
cuggcgcccaggcuggagugcagu

SEQ ID NO: 140592 - RNA, 32 nt, Human
cuggcgcccccaccuggugaugccgagucccu

SEQ ID NO: 140593 - RNA, 17 nt, Human
cuggcgccccccgggcc

SEQ ID NO: 140594 - RNA, 24 nt, Human
cuggcgccgccucaccgccuccca

SEQ ID NO: 140595 - RNA, 28 nt, Human
cuggcgccuccugcugccuccuccauac

SEQ ID NO: 140596 - RNA, 32 nt, Human
cuggcgccuguaaucccagcuacucaggagac

SEQ ID NO: 140597 - RNA, 32 nt, Human
cuggcgccuguaaucccagcuacucaggaggu

SEQ ID NO: 140598 - RNA, 32 nt, Human
cuggcgcucccuuuucuccacacccacacgcc

SEQ ID NO: 140599 - RNA, 19 nt, Human
cuggcgcucgcuccgggcc

SEQ ID NO: 140600 - RNA, 32 nt, Human
cuggcgcucuuagcuccugauugguugugugu

SEQ ID NO: 140601 - RNA, 18 nt, Human
cuggcgcugagucacagg

SEQ ID NO: 140602 - RNA, 32 nt, Human
cuggcgcugcagcugcugcacagagacccaca

SEQ ID NO: 140603 - RNA, 20 nt, Human
cuggcgcugcauccgggcca

SEQ ID NO: 140604 - RNA, 32 nt, Human
cuggcgcugccaccauguuccccagcccugcu

SEQ ID NO: 140605 - RNA, 21 nt, Human
cuggcggaauuuugggaccuu

SEQ ID NO: 140606 - RNA, 32 nt, Human
cuggcggacagaacuucagagaccacgcagcc

SEQ ID NO: 140607 - RNA, 32 nt, Human
cuggcggacucaggcuggggucugcagugcag

SEQ ID NO: 140608 - RNA, 32 nt, Human
cuggcggagacauugcugaucccuggcuugga

SEQ ID NO: 140609 - RNA, 25 nt, Human
cuggcggaggccuccgcuggucccg

SEQ ID NO: 140610 - RNA, 32 nt, Human
cuggcggcaucucccccucuugccuugguccu

SEQ ID NO: 140611 - RNA, 32 nt, Human
cuggcggccaugggaggagaaagccugaccug

SEQ ID NO: 140612 - RNA, 31 nt, Human
cuggcggccgugcuggagcaccugaccgccg

SEQ ID NO: 140613 - RNA, 32 nt, Human
cuggcggcgcagcugcucccgcugccacagcc

SEQ ID NO: 140614 - RNA, 32 nt, Human
cuggcggcgcgauggaccugaccgggcuccug

SEQ ID NO: 140615 - RNA, 32 nt, Human
cuggcggcggcggcugcugggccuccgccuuc

SEQ ID NO: 140616 - RNA, 32 nt, Human
cuggcggcgggcugcucacccagccuguggga

SEQ ID NO: 140617 - RNA, 32 nt, Human
cuggcggcucuuuaacucugcuucacuguugc

SEQ ID NO: 140618 - RNA, 32 nt, Human
cuggcggcuguaacucagcgaccuuggcccga

SEQ ID NO: 140619 - RNA, 32 nt, Human
cuggcgggaagagagcgucuggguccauucaa

SEQ ID NO: 140620 - RNA, 32 nt, Human
cuggcgggacacacccuaccccaaacucccaa

SEQ ID NO: 140621 - RNA, 19 nt, Human
cuggcgggaggaagcgcgg

SEQ ID NO: 140622 - RNA, 32 nt, Human
cuggcgggcugaggagaaggaggucagugcuc

SEQ ID NO: 140623 - RNA, 32 nt, Human
cuggcgggcuucugcugcccucucgggggccu

SEQ ID NO: 140624 - RNA, 32 nt, Human
cuggcggggcagcaggccugcaggagcuguuu

SEQ ID NO: 140625 - RNA, 32 nt, Human
cuggcggguugcuucagccagugcagugagaa

SEQ ID NO: 140626 - RNA, 32 nt, Human
cuggcggucccuccuccccucuccuugcaccc

SEQ ID NO: 140627 - RNA, 32 nt, Human
cuggcggugaccagagaggcugggcagaggca

SEQ ID NO: 140628 - RNA, 20 nt, Human
cuggcgguggaguccagaga

SEQ ID NO: 140629 - RNA, 32 nt, Human
cuggcgguggccaccaguccuugccaaucccc

SEQ ID NO: 140630 - RNA, 32 nt, Human
cuggcguccuagggguuugcucacauauaagg

SEQ ID NO: 140631 - RNA, 32 nt, Human
cuggcguccuuguucugggccugcugcugccg

SEQ ID NO: 140632 - RNA, 32 nt, Human
cuggcgugagccaccgugccuggccagcaucc

SEQ ID NO: 140633 - RNA, 32 nt, Human
cuggcgugcaccaccgcgcccagcuaauucuu

SEQ ID NO: 140634 - RNA, 32 nt, Human
cuggcgugcauggggccuguucuguccuuggu

SEQ ID NO: 140635 - RNA, 32 nt, Human
cuggcguugccuccuauuucauauucuugaga

SEQ ID NO: 140636 - RNA, 32 nt, Human
cuggcguuggacaggcuucagucauuggacua

SEQ ID NO: 140637 - RNA, 32 nt, Human
cuggcuaaaacccaaagaagaaaggucaaagg

SEQ ID NO: 140638 - RNA, 32 nt, Human
cuggcuaacaaggugaaaccccgucucuacua

SEQ ID NO: 140639 - RNA, 32 nt, Human
cuggcuaacaaggugaaaccucgucucuacua

SEQ ID NO: 140640 - RNA, 32 nt, Human
cuggcuaacacagugaaaccccaucucuaaua

SEQ ID NO: 140641 - RNA, 32 nt, Human
cuggcuaacacagugaaaccccaucucuacua

SEQ ID NO: 140642 - RNA, 32 nt, Human
cuggcuaacacagugaaacccccucugauaaa

SEQ ID NO: 140643 - RNA, 32 nt, Human
cuggcuaacacagugaaaccccgucucuacca

SEQ ID NO: 140644 - RNA, 31 nt, Human
cuggcuaacacagugaaaccccgucucuacu

SEQ ID NO: 140645 - RNA, 32 nt, Human
cuggcuaacacagugaaaccccgucucuacua

SEQ ID NO: 140646 - RNA, 32 nt, Human
cuggcuaacacagugaaaccccgucucuucua

SEQ ID NO: 140647 - RNA, 32 nt, Human
cuggcuaacacagugaaaccccuccucuacua

SEQ ID NO: 140648 - RNA, 32 nt, Human
cuggcuaacacagugaaacccugucucuacua

SEQ ID NO: 140649 - RNA, 32 nt, Human
cuggcuaacacagugaaacccugucucuacuu

SEQ ID NO: 140650 - RNA, 32 nt, Human
cuggcuaacacagugaaacccugucucuccua

SEQ ID NO: 140651 - RNA, 32 nt, Human
cuggcuaacacagugaaaccucaucucuacua

SEQ ID NO: 140652 - RNA, 32 nt, Human
cuggcuaacaccgugaaaccccaucucuacua

SEQ ID NO: 140653 - RNA, 32 nt, Human
cuggcuaacacgaugaaaccccgucucuacua

SEQ ID NO: 140654 - RNA, 32 nt, Human
cuggcuaacacggugaaacccaaucucuacua

SEQ ID NO: 140655 - RNA, 32 nt, Human
cuggcuaacacggugaaacccagccucuacua

SEQ ID NO: 140656 - RNA, 32 nt, Human
cuggcuaacacggugaaacccagucucuacua

SEQ ID NO: 140657 - RNA, 32 nt, Human
cuggcuaacacggugaaaccccaccucuacua

SEQ ID NO: 140658 - RNA, 32 nt, Human
cuggcuaacacggugaaaccccaucuccacua

SEQ ID NO: 140659 - RNA, 32 nt, Human
cuggcuaacacggugaaaccccaucucuacaa

SEQ ID NO: 140660 - RNA, 32 nt, Human
cuggcuaacacggugaaaccccaucucuacua

SEQ ID NO: 140661 - RNA, 32 nt, Human
cuggcuaacacggugaaaccccaucucuacug

SEQ ID NO: 140662 - RNA, 32 nt, Human
cuggcuaacacggugaaaccccauuuccacua

SEQ ID NO: 140663 - RNA, 32 nt, Human
cuggcuaacacggugaaaccccggcucuacua

SEQ ID NO: 140664 - RNA, 32 nt, Human
cuggcuaacacggugaaaccccgucucuaaua

SEQ ID NO: 140665 - RNA, 32 nt, Human
cuggcuaacacggugaaaccccgucucuacau

SEQ ID NO: 140666 - RNA, 32 nt, Human
cuggcuaacacggugaaaccccgucucuacua

SEQ ID NO: 140667 - RNA, 32 nt, Human
cuggcuaacacggugaaaccccgucucuacug

SEQ ID NO: 140668 - RNA, 32 nt, Human
cuggcuaacacggugaaaccccgucucuagua

SEQ ID NO: 140669 - RNA, 32 nt, Human
cuggcuaacacggugaaaccccgucuuuacua

SEQ ID NO: 140670 - RNA, 32 nt, Human
cuggcuaacacggugaaacccgaucccuacua

SEQ ID NO: 140671 - RNA, 32 nt, Human
cuggcuaacacggugaaacccgucucuacuaa

SEQ ID NO: 140672 - RNA, 32 nt, Human
cuggcuaacacggugaaacccuaucucuacua

SEQ ID NO: 140673 - RNA, 32 nt, Human
cuggcuaacacggugaaacccugccucuacua

SEQ ID NO: 140674 - RNA, 32 nt, Human
cuggcuaacacggugaaacccugucuccacca

SEQ ID NO: 140675 - RNA, 32 nt, Human
cuggcuaacacggugaaacccugucucuacua

SEQ ID NO: 140676 - RNA, 32 nt, Human
cuggcuaacacggugaaacccugucuuuacua

SEQ ID NO: 140677 - RNA, 32 nt, Human
cuggcuaacacggugaaaccgucucuacuaaa

SEQ ID NO: 140678 - RNA, 32 nt, Human
cuggcuaacacggugaaaccucgucucuacua

SEQ ID NO: 140679 - RNA, 32 nt, Human
cuggcuaacacggugaaaccugucucuacuaa

SEQ ID NO: 140680 - RNA, 32 nt, Human
cuggcuaacacggugaaacuccaucucuacua

SEQ ID NO: 140681 - RNA, 32 nt, Human
cuggcuaacacggugaaacuccgucucuacua

SEQ ID NO: 140682 - RNA, 32 nt, Human
cuggcuaacacugaaaccccgucucuacuaaa

SEQ ID NO: 140683 - RNA, 32 nt, Human
cuggcuaacagggugaaaccacgucucuacua

SEQ ID NO: 140684 - RNA, 32 nt, Human
cuggcuaacagggugaaaccccaucgcuacua

SEQ ID NO: 140685 - RNA, 31 nt, Human
cuggcuaacagggugaaacccugucucuacu

SEQ ID NO: 140686 - RNA, 32 nt, Human
cuggcuaacauagugaaacccugucucuacua

SEQ ID NO: 140687 - RNA, 32 nt, Human
cuggcuaacaugguaaaaccccgucucuacua

SEQ ID NO: 140688 - RNA, 18 nt, Human
cuggcuaacauggugaaa

SEQ ID NO: 140689 - RNA, 32 nt, Human
cuggcuaacauggugaaaccccaucuccacua

SEQ ID NO: 140690 - RNA, 31 nt, Human
cuggcuaacauggugaaaccccaucucuacu

SEQ ID NO: 140691 - RNA, 32 nt, Human
cuggcuaacauggugaaaccccaucucuacua

SEQ ID NO: 140692 - RNA, 32 nt, Human
cuggcuaacauggugaaaccccaucucuacug

SEQ ID NO: 140693 - RNA, 32 nt, Human
cuggcuaacauggugaaaccccaucucuagua

SEQ ID NO: 140694 - RNA, 32 nt, Human
cuggcuaacauggugaaaccccaugucuacua

SEQ ID NO: 140695 - RNA, 32 nt, Human
cuggcuaacauggugaaacccccgucucuacu

SEQ ID NO: 140696 - RNA, 32 nt, Human
cuggcuaacauggugaaacccccguuucuacu

SEQ ID NO: 140697 - RNA, 32 nt, Human
cuggcuaacauggugaaaccccgccucuacua

SEQ ID NO: 140698 - RNA, 32 nt, Human
cuggcuaacauggugaaaccccgucucuacca

SEQ ID NO: 140699 - RNA, 32 nt, Human
cuggcuaacauggugaaaccccgucucuacua

SEQ ID NO: 140700 - RNA, 32 nt, Human
cuggcuaacauggugaaaccccgucucuacug

SEQ ID NO: 140701 - RNA, 32 nt, Human
cuggcuaacauggugaaaccccgucucuacuu

SEQ ID NO: 140702 - RNA, 32 nt, Human
cuggcuaacauggugaaaccccgucucugcua

SEQ ID NO: 140703 - RNA, 32 nt, Human
cuggcuaacauggugaaaccccgucuguacua

SEQ ID NO: 140704 - RNA, 32 nt, Human
cuggcuaacauggugaaacccgcgucucuggu

SEQ ID NO: 140705 - RNA, 32 nt, Human
cuggcuaacauggugaaacccuaucucuacua

SEQ ID NO: 140706 - RNA, 32 nt, Human
cuggcuaacauggugaaacccugucucuacua

SEQ ID NO: 140707 - RNA, 32 nt, Human
cuggcuaacauggugaaacccugucucuacug

SEQ ID NO: 140708 - RNA, 32 nt, Human
cuggcuaacauggugaaacccugucucuauua

SEQ ID NO: 140709 - RNA, 32 nt, Human
cuggcuaacauggugaaacccugucuuuacua

SEQ ID NO: 140710 - RNA, 32 nt, Human
cuggcuaacauggugaaacccuguuucugcua

SEQ ID NO: 140711 - RNA, 32 nt, Human
cuggcuaacauggugaaacccuuccccgucuc

SEQ ID NO: 140712 - RNA, 32 nt, Human
cuggcuaacauggugaaaccucaucuccacuu

SEQ ID NO: 140713 - RNA, 32 nt, Human
cuggcuaacauggugaaagccccucucuacua

SEQ ID NO: 140714 - RNA, 32 nt, Human
cuggcuaacauggugaaaucccgucucuacug

SEQ ID NO: 140715 - RNA, 32 nt, Human
cuggcuaacauggugaaauccuaucucuacca

SEQ ID NO: 140716 - RNA, 32 nt, Human
cuggcuaacauggugaaccccgucucuacuaa

SEQ ID NO: 140717 - RNA, 32 nt, Human
cuggcuaacauggugguaccccgucucuacug

SEQ ID NO: 140718 - RNA, 32 nt, Human
cuggcuaacccggugaaaccccgucucuacua

SEQ ID NO: 140719 - RNA, 32 nt, Human
cuggcuaacguggugaaaccccaucucuacua

SEQ ID NO: 140720 - RNA, 32 nt, Human
cuggcuaacguggugaaaccccgucccuacua

SEQ ID NO: 140721 - RNA, 32 nt, Human
cuggcuaacuuggugaaaccccgucucuaaua

SEQ ID NO: 140722 - RNA, 32 nt, Human
cuggcuaacuuggugaaacccugucucuacua

SEQ ID NO: 140723 - RNA, 32 nt, Human
cuggcuaauacagugaaaccccaucucuacua

SEQ ID NO: 140724 - RNA, 32 nt, Human
cuggcuaauacagugaaaccccaugucugcua

SEQ ID NO: 140725 - RNA, 32 nt, Human
cuggcuaauacggugaaaccccgucucuacua

SEQ ID NO: 140726 - RNA, 32 nt, Human
cuggcuaauauggugaaaccccgucucuacua

SEQ ID NO: 140727 - RNA, 32 nt, Human
cuggcuaauauggugaaacccugucucuacua

SEQ ID NO: 140728 - RNA, 32 nt, Human
cuggcuaauauggugaaaccucgucucuacua

SEQ ID NO: 140729 - RNA, 32 nt, Human
cuggcuaauguaacacugacuaugaguaggug

SEQ ID NO: 140730 - RNA, 32 nt, Human
cuggcuaauguggugaaaccccgucucuacua

SEQ ID NO: 140731 - RNA, 32 nt, Human
cuggcuaauuuuuauuuuuaguagagaugggg

SEQ ID NO: 140732 - RNA, 32 nt, Human
cuggcuacauggugaaaccccgucucuauaaa

SEQ ID NO: 140733 - RNA, 32 nt, Human
cuggcuaccagcuggggcgaccccaagggucg

SEQ ID NO: 140734 - RNA, 32 nt, Human
cuggcuacccacccuuccuguuacuuuacuuc

SEQ ID NO: 140735 - RNA, 32 nt, Human
cuggcuacuagagagguugaggugggaggauc

SEQ ID NO: 140736 - RNA, 19 nt, Human
cuggcuacuauaggccuga

SEQ ID NO: 140737 - RNA, 32 nt, Human
cuggcuagaaagggugaugguacuggaccggu

SEQ ID NO: 140738 - RNA, 32 nt, Human
cuggcuagagccacaggaaagggccagaagcc

SEQ ID NO: 140739 - RNA, 32 nt, Human
cuggcuagcauggugaaaccccgucucuacua

SEQ ID NO: 140740 - RNA, 32 nt, Human
cuggcuagcauggugagaccgucucuacuaaa

SEQ ID NO: 140741 - RNA, 32 nt, Human
cuggcuagcauuccucaggaaggacaugggug

SEQ ID NO: 140742 - RNA, 32 nt, Human
cuggcuagcccugaaccuuucacuuuccauuu

SEQ ID NO: 140743 - RNA, 32 nt, Human
cuggcuagccugggcggccugagagcggagca

SEQ ID NO: 140744 - RNA, 21 nt, Human
cuggcuagcugcccccuagga

SEQ ID NO: 140745 - RNA, 32 nt, Human
cuggcuaggaagggaagggccacagccuucau

SEQ ID NO: 140746 - RNA, 32 nt, Human
cuggcuaggacuccaguaccgugaagggaggc

SEQ ID NO: 140747 - RNA, 32 nt, Human
cuggcuauucccgaacuggacagcaccucuuc

SEQ ID NO: 140748 - RNA, 32 nt, Human
cuggcuauugugucugugucaccucucucuuc

SEQ ID NO: 140749 - RNA, 32 nt, Human
cuggcucaaauucagccuccaucacuuaccag

SEQ ID NO: 140750 - RNA, 32 nt, Human
cuggcucaagggacuuggacuggaggauacag

SEQ ID NO: 140751 - RNA, 32 nt, Human
cuggcucaaggggagggcuguggugcagcccu

SEQ ID NO: 140752 - RNA, 32 nt, Human
cuggcucaauccuccuccaccaccaggggccu

SEQ ID NO: 140753 - RNA, 32 nt, Human
cuggcucacacugucuccccagaccaauggcc

SEQ ID NO: 140754 - RNA, 32 nt, Human
cuggcucacagacauggucaugaggcgauuua

SEQ ID NO: 140755 - RNA, 32 nt, Human
cuggcucacagggcucccucagccuggggaac

SEQ ID NO: 140756 - RNA, 32 nt, Human
cuggcucacagggggagggugaggcuuugcac

SEQ ID NO: 140757 - RNA, 32 nt, Human
cuggcucacagggggagggugaggcuuuguac

SEQ ID NO: 140758 - RNA, 32 nt, Human
cuggcucaccacuguuggacccugcacauggc

SEQ ID NO: 140759 - RNA, 32 nt, Human
cuggcucaccgcaaccuccgccucccagguuc

SEQ ID NO: 140760 - RNA, 32 nt, Human
cuggcucaccgcagccuccaccuccaggguuc

SEQ ID NO: 140761 - RNA, 32 nt, Human
cuggcucaccuagggccccuguugccuaauuu

SEQ ID NO: 140762 - RNA, 32 nt, Human
cuggcucaccuuuaggcuucugacacuuuuac

SEQ ID NO: 140763 - RNA, 32 nt, Human
cuggcucacuacaccuagcuguggggagaucu

SEQ ID NO: 140764 - RNA, 32 nt, Human
cuggcucacugcaaacucugccucccagguuc

SEQ ID NO: 140765 - RNA, 32 nt, Human
cuggcucacugcaaccuccaccucccggguuc

SEQ ID NO: 140766 - RNA, 32 nt, Human
cuggcucacugcaaccucccugccugauucuc

SEQ ID NO: 140767 - RNA, 32 nt, Human
cuggcucacugcaacugcagccucccggguuc

SEQ ID NO: 140768 - RNA, 32 nt, Human
cuggcucacugcaaucuccaucucccggguuc

SEQ ID NO: 140769 - RNA, 32 nt, Human
cuggcucacugcaaucuccgccuccccaguuc

SEQ ID NO: 140770 - RNA, 32 nt, Human
cuggcucacugcagccuccaccucccagguuc

SEQ ID NO: 140771 - RNA, 32 nt, Human
cuggcucacugcagccuccgccucccggguuc

SEQ ID NO: 140772 - RNA, 32 nt, Human
cuggcucacuggcuucccccaacccaccaaau

SEQ ID NO: 140773 - RNA, 32 nt, Human
cuggcucagcaggcgugggugccaccacccuc

SEQ ID NO: 140774 - RNA, 32 nt, Human
cuggcucagccaauaaauccuaaggagacaag

SEQ ID NO: 140775 - RNA, 32 nt, Human
cuggcucagccugcagcgacugugaggccaca

SEQ ID NO: 140776 - RNA, 32 nt, Human
cuggcucagccugucuccagggcugcugcggc

SEQ ID NO: 140777 - RNA, 32 nt, Human
cuggcucagccugucucgggcugacccuuuuc

SEQ ID NO: 140778 - RNA, 32 nt, Human
cuggcucaggacaaggaggagaugaaggugaa

SEQ ID NO: 140779 - RNA, 32 nt, Human
cuggcucaggcagguccugugcugugcugcag

SEQ ID NO: 140780 - RNA, 32 nt, Human
cuggcucaggcaucccuucccuucccuggagc

SEQ ID NO: 140781 - RNA, 32 nt, Human
cuggcucagggcacaggguaccagccucuccu

SEQ ID NO: 140782 - RNA, 32 nt, Human
cuggcucaggugugggugggaggggcccacag

SEQ ID NO: 140783 - RNA, 32 nt, Human
cuggcucagguuccagucuucguuuuaaacgc

SEQ ID NO: 140784 - RNA, 32 nt, Human
cuggcucagucugagcugugggccacaucagc

SEQ ID NO: 140785 - RNA, 32 nt, Human
cuggcucagugcaugugggagauugagcgggg

SEQ ID NO: 140786 - RNA, 32 nt, Human
cuggcucaugcacaugcaacaggugcgucugu

SEQ ID NO: 140787 - RNA, 32 nt, Human
cuggcucauggcccaaccccuuuccuggaccc

SEQ ID NO: 140788 - RNA, 32 nt, Human
cuggcucauuggugggagacacaguauccuca

SEQ ID NO: 140789 - RNA, 20 nt, Human
cuggcuccaacugccagugu

SEQ ID NO: 140790 - RNA, 32 nt, Human
cuggcuccaccacuccuccagccagagggucu

SEQ ID NO: 140791 - RNA, 32 nt, Human
cuggcuccaccagaagaggagcagggacccuu

SEQ ID NO: 140792 - RNA, 32 nt, Human
cuggcuccacucuugaucucucuuguccucuu

SEQ ID NO: 140793 - RNA, 32 nt, Human
cuggcuccagaaggagcuuuccaggauagcuu

SEQ ID NO: 140794 - RNA, 23 nt, Human
cuggcuccauggcccuggucaca

SEQ ID NO: 140795 - RNA, 18 nt, Human
cuggcuccauggccuccc

SEQ ID NO: 140796 - RNA, 32 nt, Human
cuggcuccauugagggucccaaaggagcugcc

SEQ ID NO: 140797 - RNA, 32 nt, Human
cuggcucccaacagaggcagagcccagcaaua

SEQ ID NO: 140798 - RNA, 32 nt, Human
cuggcucccaccucccgccccagccugccgug

SEQ ID NO: 140799 - RNA, 32 nt, Human
cuggcucccagagcgcagcccaggcguccuca

SEQ ID NO: 140800 - RNA, 32 nt, Human
cuggcucccagcuggggccuguccucacuggu

SEQ ID NO: 140801 - RNA, 32 nt, Human
cuggcucccaggccaggcagcugcugaccucc

SEQ ID NO: 140802 - RNA, 32 nt, Human
cuggcuccccaccacagccccagcugccucag

SEQ ID NO: 140803 - RNA, 32 nt, Human
cuggcuccccuaggcuggguguaguggcgcga

SEQ ID NO: 140804 - RNA, 32 nt, Human
cuggcuccccuccgagcaacucugcauuuaau

SEQ ID NO: 140805 - RNA, 32 nt, Human
cuggcuccccuccuggaugucucccagacuuc

SEQ ID NO: 140806 - RNA, 32 nt, Human
cuggcuccccuccugggaggccucugcuggau

SEQ ID NO: 140807 - RNA, 32 nt, Human
cuggcucccuccccaucagcucccagcuguca

SEQ ID NO: 140808 - RNA, 32 nt, Human
cuggcucccucccguagucuccuggguguguu

SEQ ID NO: 140809 - RNA, 32 nt, Human
cuggcucccugaacauuauggugcugaccaca

SEQ ID NO: 140810 - RNA, 32 nt, Human
cuggcucccugccucucucccacuccacuccu

SEQ ID NO: 140811 - RNA, 23 nt, Human
cuggcucccugucccugggcuca

SEQ ID NO: 140812 - RNA, 18 nt, Human
cuggcucccuugucucca

SEQ ID NO: 140813 - RNA, 24 nt, Human
cuggcuccggcuccgucgggcuca

SEQ ID NO: 140814 - RNA, 18 nt, Human
cuggcuccuaccuggagg

SEQ ID NO: 140815 - RNA, 32 nt, Human
cuggcuccuaggggaagagcagaaggaaggau

SEQ ID NO: 140816 - RNA, 32 nt, Human
cuggcuccucaaggagucuccccucuccugua

SEQ ID NO: 140817 - RNA, 27 nt, Human
cuggcuccucauccugucuagggcuca

SEQ ID NO: 140818 - RNA, 32 nt, Human
cuggcuccucuguggugucugccuguugcgug

SEQ ID NO: 140819 - RNA, 32 nt, Human
cuggcuccugagccaccagugcccaccucuga

SEQ ID NO: 140820 - RNA, 32 nt, Human
cuggcuccugcaggccuuucuguggucuuccu

SEQ ID NO: 140821 - RNA, 18 nt, Human
cuggcuccugcuggaagg

SEQ ID NO: 140822 - RNA, 32 nt, Human
cuggcuccuggacuagagcccggcuuccagca

SEQ ID NO: 140823 - RNA, 21 nt, Human
cuggcuccuguccucuggcuc

SEQ ID NO: 140824 - RNA, 32 nt, Human
cuggcuccuguucucagagaaggaggauggua

SEQ ID NO: 140825 - RNA, 32 nt, Human
cuggcuccuucccucggcucauggcccucaga

SEQ ID NO: 140826 - RNA, 32 nt, Human
cuggcuccuugggaugagagggaaggucugcu

SEQ ID NO: 140827 - RNA, 32 nt, Human
cuggcucgcugucccgcagccugggcggggac

SEQ ID NO: 140828 - RNA, 32 nt, Human
cuggcucggagcagcagccucugagguguccc

SEQ ID NO: 140829 - RNA, 32 nt, Human
cuggcucgggggauccagguugcagaugaaau

SEQ ID NO: 140830 - RNA, 32 nt, Human
cuggcucggggugggagugcagaggcaaccaa

SEQ ID NO: 140831 - RNA, 32 nt, Human
cuggcucguggcugccuucugaguguugcaga

SEQ ID NO: 140832 - RNA, 32 nt, Human
cuggcucuacagccacuuaccugguuucugga

SEQ ID NO: 140833 - RNA, 32 nt, Human
cuggcucuaucuuccuccuugugaucguccca

SEQ ID NO: 140834 - RNA, 32 nt, Human
cuggcucucacuccccuccacccucagcuaga

SEQ ID NO: 140835 - RNA, 32 nt, Human
cuggcucucagaggaaaaaugggagccaggag

SEQ ID NO: 140836 - RNA, 32 nt, Human
cuggcucuccacauagcuucugaucucagacc

SEQ ID NO: 140837 - RNA, 32 nt, Human
cuggcucuccaccuuguuacacauuauguuag

SEQ ID NO: 140838 - RNA, 32 nt, Human
cuggcucucuacugucuuucugggcccaucau

SEQ ID NO: 140839 - RNA, 32 nt, Human
cuggcucucuauagcauuuccugauacuuccg

SEQ ID NO: 140840 - RNA, 20 nt, Human
cuggcucucuguggggucuu

SEQ ID NO: 140841 - RNA, 32 nt, Human
cuggcucugacaagcccuccagcuucacgcca

SEQ ID NO: 140842 - RNA, 32 nt, Human
cuggcucugagucgcucucccacccagccugg

SEQ ID NO: 140843 - RNA, 32 nt, Human
cuggcucugccagaugguaaaggcgugcuuua

SEQ ID NO: 140844 - RNA, 32 nt, Human
cuggcucugcccagguggggugggguggccca

SEQ ID NO: 140845 - RNA, 32 nt, Human
cuggcucugcucauccagaggauauuccccca

SEQ ID NO: 140846 - RNA, 32 nt, Human
cuggcucugcucccgccuguuuucuuucugac

SEQ ID NO: 140847 - RNA, 32 nt, Human
cuggcucugcucgccucgacugagcuucacac

SEQ ID NO: 140848 - RNA, 32 nt, Human
cuggcucugcugcccaggcuggaaugcagugg

SEQ ID NO: 140849 - RNA, 21 nt, Human
cuggcucuggaaagcugaaag

SEQ ID NO: 140850 - RNA, 32 nt, Human
cuggcucuggggcuacagcuucugccuccuca

SEQ ID NO: 140851 - RNA, 32 nt, Human
cuggcucugucacccaggcuagagugcaaugg

SEQ ID NO: 140852 - RNA, 32 nt, Human
cuggcucugucacccaggcugaagugcagugg

SEQ ID NO: 140853 - RNA, 32 nt, Human
cuggcucugucacccaggcuggagugcagugg

SEQ ID NO: 140854 - RNA, 32 nt, Human
cuggcucugucccccaggcuggcgugcaguag

SEQ ID NO: 140855 - RNA, 32 nt, Human
cuggcucugucgcccaggcuggagcgcaaugg

SEQ ID NO: 140856 - RNA, 32 nt, Human
cuggcucugucgcccaggcuggagugcagggg

SEQ ID NO: 140857 - RNA, 32 nt, Human
cuggcucugucucccaggcuggagugcagugg

SEQ ID NO: 140858 - RNA, 32 nt, Human
cuggcucugugggcagagaugggcagggugcc

SEQ ID NO: 140859 - RNA, 32 nt, Human
cuggcucuucuuucuuugggguucucuguacc

SEQ ID NO: 140860 - RNA, 32 nt, Human
cuggcucuuugucuccaaucagucccacuccc

SEQ ID NO: 140861 - RNA, 32 nt, Human
cuggcugaaagagggacaggagagcaccagga

SEQ ID NO: 140862 - RNA, 32 nt, Human
cuggcugaacauaacuucuuacacucccauga

SEQ ID NO: 140863 - RNA, 24 nt, Human
cuggcugaacaugaacuuuguguu

SEQ ID NO: 140864 - RNA, 32 nt, Human
cuggcugaagcuggaagagcuguggggacuca

SEQ ID NO: 140865 - RNA, 32 nt, Human
cuggcugaaggagagauugaugaggacauuca

SEQ ID NO: 140866 - RNA, 32 nt, Human
cuggcugaagugaugacuggagcucagcaacc

SEQ ID NO: 140867 - RNA, 32 nt, Human
cuggcugaauccugaggccacugugaauuugc

SEQ ID NO: 140868 - RNA, 32 nt, Human
cuggcugaaugggaggccugagguccugaagg

SEQ ID NO: 140869 - RNA, 32 nt, Human
cuggcugaauggugaggagaauuuucuuuaaa

SEQ ID NO: 140870 - RNA, 32 nt, Human
cuggcugacagccacagcgguggugacggugc

SEQ ID NO: 140871 - RNA, 32 nt, Human
cuggcugacauggugaaacuccaucucuacua

SEQ ID NO: 140872 - RNA, 32 nt, Human
cuggcugaccugucccuaucagucccaaguca

SEQ ID NO: 140873 - RNA, 32 nt, Human
cuggcugacuggcagaggaagauugcagugac

SEQ ID NO: 140874 - RNA, 32 nt, Human
cuggcugagaaucuccucagagcccagugcag

SEQ ID NO: 140875 - RNA, 32 nt, Human
cuggcugagagcuguggaucugugcauuuuga

SEQ ID NO: 140876 - RNA, 20 nt, Human
cuggcugagccugggguuuu

SEQ ID NO: 140877 - RNA, 32 nt, Human
cuggcugagcuucccacccacuuucccugguc

SEQ ID NO: 140878 - RNA, 32 nt, Human
cuggcugcacagaaggcaagugcuggggcuca

SEQ ID NO: 140879 - RNA, 32 nt, Human
cuggcugcacuccaaggcccccucuguccuuu

SEQ ID NO: 140880 - RNA, 32 nt, Human
cuggcugcagaacuagacacccuugaagauuu

SEQ ID NO: 140881 - RNA, 32 nt, Human
cuggcugcagaaguucugccucugccuggggu

SEQ ID NO: 140882 - RNA, 32 nt, Human
cuggcugcagagcagugggccuggccagcagg

SEQ ID NO: 140883 - RNA, 32 nt, Human
cuggcugcagagcaucccugggagccaaggcg

SEQ ID NO: 140884 - RNA, 32 nt, Human
cuggcugcagagcgaggucagccgggacaacu

SEQ ID NO: 140885 - RNA, 19 nt, Human
cuggcugcagagcugucug

SEQ ID NO: 140886 - RNA, 32 nt, Human
cuggcugcagcaagggcagggccacacucucg

SEQ ID NO: 140887 - RNA, 32 nt, Human
cuggcugcagcccaggcgccauguccucugag

SEQ ID NO: 140888 - RNA, 28 nt, Human
cuggcugcccauccugccucaucacacg

SEQ ID NO: 140889 - RNA, 32 nt, Human
cuggcugccccaccauccucucugaucuguga

SEQ ID NO: 140890 - RNA, 25 nt, Human
cuggcugcccccauuccugcugcug

SEQ ID NO: 140891 - RNA, 20 nt, Human
cuggcugcccucacaagcca

SEQ ID NO: 140892 - RNA, 32 nt, Human
cuggcugccucauugccaccuccaccugcagg

SEQ ID NO: 140893 - RNA, 32 nt, Human
cuggcugccuggaggcccugagccacccagau

SEQ ID NO: 140894 - RNA, 32 nt, Human
cuggcugccuuguuccuggccuaggacuuagc

SEQ ID NO: 140895 - RNA, 32 nt, Human
cuggcugcgaaggcagcugcugccucucaaag

SEQ ID NO: 140896 - RNA, 32 nt, Human
cuggcugcgggagggagagggacuuguggguc

SEQ ID NO: 140897 - RNA, 19 nt, Human
cuggcugcggggcggggug

SEQ ID NO: 140898 - RNA, 32 nt, Human
cuggcugcucccaggcuagcagggagguaggu

SEQ ID NO: 140899 - RNA, 32 nt, Human
cuggcugcuggcaucucaggugcuuuacgugc

SEQ ID NO: 140900 - RNA, 18 nt, Human
cuggcugcuggcauucca

SEQ ID NO: 140901 - RNA, 32 nt, Human
cuggcugcuguguuuccagggggugcuggggg

SEQ ID NO: 140902 - RNA, 32 nt, Human
cuggcugcuuuccugguagaugccauucccag

SEQ ID NO: 140903 - RNA, 32 nt, Human
cuggcuggaacaaaaucuccuccacaccuugu

SEQ ID NO: 140904 - RNA, 21 nt, Human
cuggcuggacacuuuggucac

SEQ ID NO: 140905 - RNA, 32 nt, Human
cuggcuggagaaaggcaggcagugggggagau

SEQ ID NO: 140906 - RNA, 32 nt, Human
cuggcuggagccaaaaccacauacaggaccuc

SEQ ID NO: 140907 - RNA, 32 nt, Human
cuggcuggagcugacccacagaguagggaauc

SEQ ID NO: 140908 - RNA, 32 nt, Human
cuggcuggaggagguggagcagcuccuccggg

SEQ ID NO: 140909 - RNA, 32 nt, Human
cuggcuggagugcagagagggagacaggcagg

SEQ ID NO: 140910 - RNA, 32 nt, Human
cuggcuggaugcccuuuggugaaaugccuguu

SEQ ID NO: 140911 - RNA, 32 nt, Human
cuggcuggcagacaaggugaagaggcugaugc

SEQ ID NO: 140912 - RNA, 32 nt, Human
cuggcuggccacuccgcggaggccccacuggg

SEQ ID NO: 140913 - RNA, 32 nt, Human
cuggcuggccagugagccccgucucacagccu

SEQ ID NO: 140914 - RNA, 32 nt, Human
cuggcuggccucucccugcaugggcccgcagg

SEQ ID NO: 140915 - RNA, 20 nt, Human
cuggcuggccuuccuggacc

SEQ ID NO: 140916 - RNA, 32 nt, Human
cuggcuggcgcugccugccucuccgcacucac

SEQ ID NO: 140917 - RNA, 24 nt, Human
cuggcuggcggcagcggcgggagg

SEQ ID NO: 140918 - RNA, 32 nt, Human
cuggcuggcggugcccacagugccccggacac

SEQ ID NO: 140919 - RNA, 32 nt, Human
cuggcuggcuccuaggggaagagcagaaggaa

SEQ ID NO: 140920 - RNA, 29 nt, Human
cuggcuggcugcugugugccugguuuccu

SEQ ID NO: 140921 - RNA, 32 nt, Human
cuggcuggcugucuugcaucagucccaggccu

SEQ ID NO: 140922 - RNA, 32 nt, Human
cuggcuggcuuagugccucuuaguccaucugu

SEQ ID NO: 140923 - RNA, 32 nt, Human
cuggcugggaaagaggucagugcagauguuuu

SEQ ID NO: 140924 - RNA, 32 nt, Human
cuggcugggacccugcucccacgccugcuucu

SEQ ID NO: 140925 - RNA, 19 nt, Human
cuggcugggacugaaccac

SEQ ID NO: 140926 - RNA, 32 nt, Human
cuggcugggacugacuuggccauguucucagc

SEQ ID NO: 140927 - RNA, 22 nt, Human
cuggcugggagcauuuaucuca

SEQ ID NO: 140928 - RNA, 32 nt, Human
cuggcugggaguuccccucugcacccccguuu

SEQ ID NO: 140929 - RNA, 32 nt, Human
cuggcugggcaaguggaagacagagcacuggc

SEQ ID NO: 140930 - RNA, 32 nt, Human
cuggcugggcaggagggguuggcggggcagca

SEQ ID NO: 140931 - RNA, 19 nt, Human
cuggcugggccgggcacug

SEQ ID NO: 140932 - RNA, 32 nt, Human
cuggcugggccuuccuuccuggccucagccac

SEQ ID NO: 140933 - RNA, 32 nt, Human
cuggcugggcgaggaagauguggcuggaaccc

SEQ ID NO: 140934 - RNA, 32 nt, Human
cuggcugggcgucuucucacucuaaggugguu

SEQ ID NO: 140935 - RNA, 32 nt, Human
cuggcugggcugggacgcaguccccuccuccg

SEQ ID NO: 140936 - RNA, 24 nt, Human
cuggcuggggcugcccccgcagga

SEQ ID NO: 140937 - RNA, 32 nt, Human
cuggcugggggcaguuaaaaagccgaaaaggu

SEQ ID NO: 140938 - RNA, 32 nt, Human
cuggcugggggcugccagccaggcuagaggga

SEQ ID NO: 140939 - RNA, 32 nt, Human
cuggcugggugaggacaggcccagaggacagc

SEQ ID NO: 140940 - RNA, 32 nt, Human
cuggcugguaugaccacaguucauggcggcuc

SEQ ID NO: 140941 - RNA, 32 nt, Human
cuggcugguccccaagcaaaacagaaugggcu

SEQ ID NO: 140942 - RNA, 32 nt, Human
cuggcuggucucaaacucccgaccucaaguga

SEQ ID NO: 140943 - RNA, 32 nt, Human
cuggcuggucucaaacuccugaccucaaauga

SEQ ID NO: 140944 - RNA, 32 nt, Human
cuggcuggucucaaacuccugaccucaggcga

SEQ ID NO: 140945 - RNA, 32 nt, Human
cuggcuggucucaaacuccuggccucagguga

SEQ ID NO: 140946 - RNA, 32 nt, Human
cuggcuggucucgacuccugaccucaggugau

SEQ ID NO: 140947 - RNA, 32 nt, Human
cuggcuggugccugagccccucagacagcccc

SEQ ID NO: 140948 - RNA, 32 nt, Human
cuggcugguggagucggggcucccgggcaugg

SEQ ID NO: 140949 - RNA, 32 nt, Human
cuggcugguguugaacuccuaaccucagguga

SEQ ID NO: 140950 - RNA, 32 nt, Human
cuggcugguuuuaccaucaucgugaugccacu

SEQ ID NO: 140951 - RNA, 32 nt, Human
cuggcuguaacccaggcagugggaggucugca

SEQ ID NO: 140952 - RNA, 32 nt, Human
cuggcuguaggcauggugucaggaaagaaacu

SEQ ID NO: 140953 - RNA, 32 nt, Human
cuggcugucaccaagcaugacccaggucaacu

SEQ ID NO: 140954 - RNA, 32 nt, Human
cuggcugucauugcuuucuuccuccccauuug

SEQ ID NO: 140955 - RNA, 32 nt, Human
cuggcuguccacagaagccacaggggcagggg

SEQ ID NO: 140956 - RNA, 32 nt, Human
cuggcuguccccaugccuucugcucccgcuuc

SEQ ID NO: 140957 - RNA, 32 nt, Human
cuggcugucuaaccacaaucccugcugccuuc

SEQ ID NO: 140958 - RNA, 32 nt, Human
cuggcugucuucauguggggaagccgggcuug

SEQ ID NO: 140959 - RNA, 32 nt, Human
cuggcugucuuucugccaguuucuuaaagaac

SEQ ID NO: 140960 - RNA, 32 nt, Human
cuggcugugacccuuccacaccccagaacugg

SEQ ID NO: 140961 - RNA, 32 nt, Human
cuggcugugaggaaacagccacauguucguca

SEQ ID NO: 140962 - RNA, 32 nt, Human
cuggcugugagguuucuggggaggcagagagg

SEQ ID NO: 140963 - RNA, 32 nt, Human
cuggcugugcaggagcagccacagugugcccc

SEQ ID NO: 140964 - RNA, 32 nt, Human
cuggcugugcugcugcugcuaccccucccaag

SEQ ID NO: 140965 - RNA, 32 nt, Human
cuggcugugcugcuggcugcaaaucuaucccc

SEQ ID NO: 140966 - RNA, 32 nt, Human
cuggcuguggcagaaaggggacggacaagggc

SEQ ID NO: 140967 - RNA, 22 nt, Human
cuggcuguggcccucggcgcuu

SEQ ID NO: 140968 - RNA, 32 nt, Human
cuggcugugggacagacagggaggggccugua

SEQ ID NO: 140969 - RNA, 32 nt, Human
cuggcugugggaugggaagugaagccccagcg

SEQ ID NO: 140970 - RNA, 32 nt, Human
cuggcuguggugucuggguguggccuggggcu

SEQ ID NO: 140971 - RNA, 32 nt, Human
cuggcugugucacagcacugagcucagcccag

SEQ ID NO: 140972 - RNA, 24 nt, Human
cuggcugugugggguagagggagg

SEQ ID NO: 140973 - RNA, 32 nt, Human
cuggcuguguucucuguggagcucaggggagg

SEQ ID NO: 140974 - RNA, 32 nt, Human
cuggcuguguugcccaggcuggagugcaguag

SEQ ID NO: 140975 - RNA, 32 nt, Human
cuggcuguucaacauccucccuccuuagcccc

SEQ ID NO: 140976 - RNA, 32 nt, Human
cuggcuguuccuaaauucuuaggauauguccc

SEQ ID NO: 140977 - RNA, 32 nt, Human
cuggcuguucucucauugucacugcccucucc

SEQ ID NO: 140978 - RNA, 32 nt, Human
cuggcuguuucccaggcugaagugcaguggca

SEQ ID NO: 140979 - RNA, 32 nt, Human
cuggcuuacauggugaaaccccaucucuacua

SEQ ID NO: 140980 - RNA, 21 nt, Human
cuggcuuagccuucccugcag

SEQ ID NO: 140981 - RNA, 32 nt, Human
cuggcuuaggcagcaaccuccacauucccaca

SEQ ID NO: 140982 - RNA, 32 nt, Human
cuggcuuaguaauccaagacagcaaagugaca

SEQ ID NO: 140983 - RNA, 32 nt, Human
cuggcuuagucuuugugcguggcgauuuugug

SEQ ID NO: 140984 - RNA, 20 nt, Human
cuggcuuauucuugggaucu

SEQ ID NO: 140985 - RNA, 32 nt, Human
cuggcuucaaacaauucucaugccucagccuc

SEQ ID NO: 140986 - RNA, 32 nt, Human
cuggcuucaagcaauccuuccacuuuggccuu

SEQ ID NO: 140987 - RNA, 32 nt, Human
cuggcuucaagcaguccuccugccucagccuc

SEQ ID NO: 140988 - RNA, 32 nt, Human
cuggcuucaagcgauucucccaccucagccuc

SEQ ID NO: 140989 - RNA, 32 nt, Human
cuggcuucaggcaauucuccugccuuugccuc

SEQ ID NO: 140990 - RNA, 32 nt, Human
cuggcuuccaguuucacucucagcauuccaag

SEQ ID NO: 140991 - RNA, 32 nt, Human
cuggcuuccccaccucuccaggugucaaaggu

SEQ ID NO: 140992 - RNA, 31 nt, Human
cuggcuuccuagauagaaaccaaagcagugc

SEQ ID NO: 140993 - RNA, 19 nt, Human
cuggcuuccucucccugca

SEQ ID NO: 140994 - RNA, 32 nt, Human
cuggcuuccuucucucaauaugcuuacaaagu

SEQ ID NO: 140995 - RNA, 32 nt, Human
cuggcuuccuuuucccugucuucagcccuccc

SEQ ID NO: 140996 - RNA, 32 nt, Human
cuggcuucuacaauuuuuggacucaagcaaaa

SEQ ID NO: 140997 - RNA, 32 nt, Human
cuggcuucucacugccaccucaaacccgcugc

SEQ ID NO: 140998 - RNA, 21 nt, Human
cuggcuucucccuguggucca

SEQ ID NO: 140999 - RNA, 32 nt, Human
cuggcuucuccucuguuccagcuugucugcca

SEQ ID NO: 141000 - RNA, 32 nt, Human
cuggcuucucugccuccagccuuugggguagc

SEQ ID NO: 141001 - RNA, 32 nt, Human
cuggcuucucuggcugugacuacuucugccaa

SEQ ID NO: 141002 - RNA, 20 nt, Human
cuggcuucucuggggcacuu

SEQ ID NO: 141003 - RNA, 32 nt, Human
cuggcuucugaagaaucccugaugucuuauug

SEQ ID NO: 141004 - RNA, 32 nt, Human
cuggcuucugauuucuuucacuucugauccuu

SEQ ID NO: 141005 - RNA, 19 nt, Human
cuggcuucugcugcugcug

SEQ ID NO: 141006 - RNA, 32 nt, Human
cuggcuucugcuugucauccacacaacaccag

SEQ ID NO: 141007 - RNA, 32 nt, Human
cuggcuucugggacuguccugggcccaagugg

SEQ ID NO: 141008 - RNA, 32 nt, Human
cuggcuucuggucaaguaaauuaguccacaaa

SEQ ID NO: 141009 - RNA, 32 nt, Human
cuggcuucuuccuauuugccaugggcuucacu

SEQ ID NO: 141010 - RNA, 32 nt, Human
cuggcuucuuuccaaguugagcaacaacaaaa

SEQ ID NO: 141011 - RNA, 32 nt, Human
cuggcuucuuucucucagccuuacauuuguga

SEQ ID NO: 141012 - RNA, 32 nt, Human
cuggcuugaacccggguggcagagguugcagu

SEQ ID NO: 141013 - RNA, 32 nt, Human
cuggcuugcacugcucccucuagaaagauucc

SEQ ID NO: 141014 - RNA, 19 nt, Human
cuggcuugcaucaacaucu

SEQ ID NO: 141015 - RNA, 32 nt, Human
cuggcuugcauccuggcuguguucacagccuu

SEQ ID NO: 141016 - RNA, 32 nt, Human
cuggcuugcccaggcuggagugcgguggcuag

SEQ ID NO: 141017 - RNA, 32 nt, Human
cuggcuuggaagaagcugaggggccagcgagg

SEQ ID NO: 141018 - RNA, 32 nt, Human
cuggcuuggcuguucuggagcuccgcugagca

SEQ ID NO: 141019 - RNA, 32 nt, Human
cuggcuugggccauuuccucaguggcugaguc

SEQ ID NO: 141020 - RNA, 32 nt, Human
cuggcuuggugccuggcaccuagaaagcacuc

SEQ ID NO: 141021 - RNA, 22 nt, Human
cuggcuugugacccaccugagu

SEQ ID NO: 141022 - RNA, 32 nt, Human
cuggcuuguucaucucucuguuuggucaguug

SEQ ID NO: 141023 - RNA, 32 nt, Human
cuggcuuuaacucucagcuccuucccugucuc

SEQ ID NO: 141024 - RNA, 32 nt, Human
cuggcuuuacagaaucgucucucccuagcucc

SEQ ID NO: 141025 - RNA, 22 nt, Human
cuggcuuuauuucuaacuccuu

SEQ ID NO: 141026 - RNA, 32 nt, Human
cuggcuuucacucacuagcaagugggcugcuu

SEQ ID NO: 141027 - RNA, 32 nt, Human
cuggcuuucccaggagauggguccaggggucu

SEQ ID NO: 141028 - RNA, 19 nt, Human
cuggcuuuccgcggcugcc

SEQ ID NO: 141029 - RNA, 31 nt, Human
cuggcuuuccucucugccugcuccugucucu

SEQ ID NO: 141030 - RNA, 21 nt, Human
cuggcuuucuucuuccugccu

SEQ ID NO: 141031 - RNA, 22 nt, Human
cuggcuuugcacuuugguuaca

SEQ ID NO: 141032 - RNA, 32 nt, Human
cuggcuuugccuggagccgacggaaggcgcuc

SEQ ID NO: 141033 - RNA, 32 nt, Human
cuggcuuugccuggcucuggcaaggacucgca

SEQ ID NO: 141034 - RNA, 32 nt, Human
cuggcuuugggagagagcagcagcaagguauu

SEQ ID NO: 141035 - RNA, 32 nt, Human
cuggcuuugucccccaggcuggagugcgaugg

SEQ ID NO: 141036 - RNA, 23 nt, Human
cuggcuuuuaaggaggacacccg

SEQ ID NO: 141037 - RNA, 31 nt, Human
cuggcuuuuaauaaauacucauugguugaaa

SEQ ID NO: 141038 - RNA, 32 nt, Human
cuggcuuuucugaagugguggcagguggucuc

SEQ ID NO: 141039 - RNA, 32 nt, Human
cuggcuuuuucccagcccuuuccagggcauaa

SEQ ID NO: 141040 - RNA, 32 nt, Human
cuggcuuuuugucauuuugucuugagacaagu

SEQ ID NO: 141041 - RNA, 32 nt, Human
cugggaaaaaccacacucacaccccaccccga

SEQ ID NO: 141042 - RNA, 32 nt, Human
cugggaaaaagacuuuuuguacauuuggaaaa

SEQ ID NO: 141043 - RNA, 32 nt, Human
cugggaaaaagcuuuaaccugcagggcaccag

SEQ ID NO: 141044 - RNA, 32 nt, Human
cugggaaaaauaggcugcaggucuccagagca

SEQ ID NO: 141045 - RNA, 22 nt, Human
cugggaaaagaaggaaacauga

SEQ ID NO: 141046 - RNA, 23 nt, Human
cugggaaacaccucaucucuaca

SEQ ID NO: 141047 - RNA, 32 nt, Human
cugggaaacaggcagagguuggaacaguuugg

SEQ ID NO: 141048 - RNA, 24 nt, Human
cugggaaacauaacaagaccccgu

SEQ ID NO: 141049 - RNA, 21 nt, Human
cugggaaacauggcaaaaucc

SEQ ID NO: 141050 - RNA, 32 nt, Human
cugggaaacaugguggcaacgucucuuuggau

SEQ ID NO: 141051 - RNA, 17 nt, Human
cugggaaacgcagugag

SEQ ID NO: 141052 - RNA, 32 nt, Human
cugggaaagaagcagaaagaggacuguggggc

SEQ ID NO: 141053 - RNA, 32 nt, Human
cugggaaagcggaaacaaaaccuucaccgcuc

SEQ ID NO: 141054 - RNA, 32 nt, Human
cugggaaaggaaaggaccacagcaaacaccau

SEQ ID NO: 141055 - RNA, 32 nt, Human
cugggaaaggccaagagagggucccagucacu

SEQ ID NO: 141056 - RNA, 24 nt, Human
cugggaaaggccuggaaaggauga

SEQ ID NO: 141057 - RNA, 32 nt, Human
cugggaaaggccuggccagcagguagccugug

SEQ ID NO: 141058 - RNA, 32 nt, Human
cugggaaaggcugugugaggggagagaaggga

SEQ ID NO: 141059 - RNA, 32 nt, Human
cugggaaagggagugagaggaggcucaggcca

SEQ ID NO: 141060 - RNA, 32 nt, Human
cugggaaagggguauguuuucucuccaggugc

SEQ ID NO: 141061 - RNA, 32 nt, Human
cugggaaauagaagacuaggguuguuucuuaa

SEQ ID NO: 141062 - RNA, 21 nt, Human
cugggaaauccaaaggcauga

SEQ ID NO: 141063 - RNA, 32 nt, Human
cugggaaaucugagagcaagaugccagcagau

SEQ ID NO: 141064 - RNA, 32 nt, Human
cugggaaaugacagggaaaaugacaggaauga

SEQ ID NO: 141065 - RNA, 32 nt, Human
cugggaaauugaggggacggcaggcccggcug

SEQ ID NO: 141066 - RNA, 32 nt, Human
cugggaacaaacugcaagugaguuacuagacc

SEQ ID NO: 141067 - RNA, 22 nt, Human
cugggaacaagaaccccucuca

SEQ ID NO: 141068 - RNA, 32 nt, Human
cugggaacacagcacuggaggucuccaggcau

SEQ ID NO: 141069 - RNA, 21 nt, Human
cugggaacaggccccacgccc

SEQ ID NO: 141070 - RNA, 32 nt, Human
cugggaaccaaauucgagagcucacaguuuga

SEQ ID NO: 141071 - RNA, 32 nt, Human
cugggaaccagacugcagccuggcccauggcu

SEQ ID NO: 141072 - RNA, 32 nt, Human
cugggaaccagcugcuggagaucccuacagag

SEQ ID NO: 141073 - RNA, 32 nt, Human
cugggaaccaggcugagcugaguggccucaaa

SEQ ID NO: 141074 - RNA, 22 nt, Human
cugggaaccagugccugaguca

SEQ ID NO: 141075 - RNA, 32 nt, Human
cugggaacccauguguccuuguggccccucug

SEQ ID NO: 141076 - RNA, 32 nt, Human
cugggaacccgaaccuggugacuuugaaagga

SEQ ID NO: 141077 - RNA, 32 nt, Human
cugggaaccgcccuccugauuaaggcguggcu

SEQ ID NO: 141078 - RNA, 32 nt, Human
cugggaaccucacuguucucucuuucagccua

SEQ ID NO: 141079 - RNA, 32 nt, Human
cugggaaccuggaaguggguugcaucugacuc

SEQ ID NO: 141080 - RNA, 32 nt, Human
cugggaacgccgcuccagcagaugugacauag

SEQ ID NO: 141081 - RNA, 32 nt, Human
cugggaacugcaccagcuuccugcucuggaua

SEQ ID NO: 141082 - RNA, 19 nt, Human
cugggaacugccacauaca

SEQ ID NO: 141083 - RNA, 32 nt, Human
cugggaacuguuccuggaccuccugggccccg

SEQ ID NO: 141084 - RNA, 32 nt, Human
cugggaacuuccucagauggacaagauuaccc

SEQ ID NO: 141085 - RNA, 32 nt, Human
cugggaagacgcuggucaguucaccugcccca

SEQ ID NO: 141086 - RNA, 32 nt, Human
cugggaagacgggugguggcagagugagaagg

SEQ ID NO: 141087 - RNA, 32 nt, Human
cugggaagagaaggaggggaacuuaaaccuug

SEQ ID NO: 141088 - RNA, 32 nt, Human
cugggaagagagugagggacagaggaaacguu

SEQ ID NO: 141089 - RNA, 32 nt, Human
cugggaagagcaucucuuuccauaucaucacc

SEQ ID NO: 141090 - RNA, 32 nt, Human
cugggaagagcugaagugggggccuggcuuua

SEQ ID NO: 141091 - RNA, 32 nt, Human
cugggaagaggggaugagaggagaagucuugg

SEQ ID NO: 141092 - RNA, 32 nt, Human
cugggaagagguaagaggaacacuagaagcuc

SEQ ID NO: 141093 - RNA, 32 nt, Human
cugggaagagguuuaucuguccugacagguca

SEQ ID NO: 141094 - RNA, 24 nt, Human
cugggaagcagagguugcagugag

SEQ ID NO: 141095 - RNA, 24 nt, Human
cugggaagcauggcaaaacccugu

SEQ ID NO: 141096 - RNA, 32 nt, Human
cugggaagccagguauuaauugcagggauagu

SEQ ID NO: 141097 - RNA, 24 nt, Human
cugggaagcggagcucgcagugag

SEQ ID NO: 141098 - RNA, 23 nt, Human
cugggaagcggagguugcaguga

SEQ ID NO: 141099 - RNA, 24 nt, Human
cugggaagcggagguugcagugag

SEQ ID NO: 141100 - RNA, 32 nt, Human
cugggaagcgucaccuucccguccagagcgcu

SEQ ID NO: 141101 - RNA, 32 nt, Human
cugggaagcgugcugugcgaagcgcucucggg

SEQ ID NO: 141102 - RNA, 32 nt, Human
cugggaagcucucaauccccagcccucaucca

SEQ ID NO: 141103 - RNA, 32 nt, Human
cugggaagcuggauggagagccugggccagaa

SEQ ID NO: 141104 - RNA, 19 nt, Human
cugggaagcugugggccac

SEQ ID NO: 141105 - RNA, 32 nt, Human
cugggaagcuuuguaccucuuuugcaggaucc

SEQ ID NO: 141106 - RNA, 32 nt, Human
cugggaagcuuuguaccucuuuugcaggaucu

SEQ ID NO: 141107 - RNA, 32 nt, Human
cugggaaggaagagggaacggguccuggcggu

SEQ ID NO: 141108 - RNA, 32 nt, Human
cugggaaggacucccaccucaccaacaacuuu

SEQ ID NO: 141109 - RNA, 32 nt, Human
cugggaaggcuggccgccccacccuaagcuua

SEQ ID NO: 141110 - RNA, 32 nt, Human
cugggaagggagacagaggcggcggcggcuca

SEQ ID NO: 141111 - RNA, 32 nt, Human
cugggaagggagagggccucugccugggacac

SEQ ID NO: 141112 - RNA, 32 nt, Human
cugggaaggggaggggaccaugaggcagccag

SEQ ID NO: 141113 - RNA, 32 nt, Human
cugggaaguaaggaggugaggugaauacucug

SEQ ID NO: 141114 - RNA, 24 nt, Human
cugggaaguggaagcugcagugag

SEQ ID NO: 141115 - RNA, 24 nt, Human
cugggaaguggaaguugcagugag

SEQ ID NO: 141116 - RNA, 24 nt, Human
cugggaaguggagguuacagugag

SEQ ID NO: 141117 - RNA, 32 nt, Human
cugggaaguggggaugagaggagaagucuugg

SEQ ID NO: 141118 - RNA, 32 nt, Human
cugggaagugugcuuuuggcauccguuaauaa

SEQ ID NO: 141119 - RNA, 32 nt, Human
cugggaaguucagugccuggaaauaaagagca

SEQ ID NO: 141120 - RNA, 32 nt, Human
cugggaaguuccaaguucgaaccugagggagc

SEQ ID NO: 141121 - RNA, 32 nt, Human
cugggaaguuuucugcaaguccuccacagcau

SEQ ID NO: 141122 - RNA, 32 nt, Human
cugggaaucggagguugcagggccaagaucgc

SEQ ID NO: 141123 - RNA, 32 nt, Human
cugggaaugaagcgauguagccuuuuaagaga

SEQ ID NO: 141124 - RNA, 32 nt, Human
cugggaauggagccaccacauccaguuaaccu

SEQ ID NO: 141125 - RNA, 31 nt, Human
cugggaauggggucagucacagcagaaccgu

SEQ ID NO: 141126 - RNA, 32 nt, Human
cugggaaugguggcucauaucugugauuccag

SEQ ID NO: 141127 - RNA, 32 nt, Human
cugggaauguuaggaaagggcugcgugaaaaa

SEQ ID NO: 141128 - RNA, 32 nt, Human
cugggacaacagagcaagacccugucuuaaaa

SEQ ID NO: 141129 - RNA, 32 nt, Human
cugggacaacuaagagccaaggcccaccaagg

SEQ ID NO: 141130 - RNA, 32 nt, Human
cugggacaacugcucccaccuccugacacccu

SEQ ID NO: 141131 - RNA, 32 nt, Human
cugggacaaggugaauggcauguucagcaggu

SEQ ID NO: 141132 - RNA, 32 nt, Human
cugggacaaguugacccaccucucacagucau

SEQ ID NO: 141133 - RNA, 32 nt, Human
cugggacacagaacugcaaggccaguggcgcc

SEQ ID NO: 141134 - RNA, 32 nt, Human
cugggacacagaguuaggucugugcuguuaaa

SEQ ID NO: 141135 - RNA, 32 nt, Human
cugggacaccucagccagcuugcccacccucc

SEQ ID NO: 141136 - RNA, 32 nt, Human
cugggacacugcccuucauccucucucaccuc

SEQ ID NO: 141137 - RNA, 32 nt, Human
cugggacagaggccagcuccuguugggcucag

SEQ ID NO: 141138 - RNA, 18 nt, Human
cugggacagauacuacaa

SEQ ID NO: 141139 - RNA, 32 nt, Human
cugggacagaucuuuccauugagaagggcaga

SEQ ID NO: 141140 - RNA, 32 nt, Human
cugggacagcacaggacccacagauaucugcu

SEQ ID NO: 141141 - RNA, 32 nt, Human
cugggacaggccugggccccacccucaccacc

SEQ ID NO: 141142 - RNA, 32 nt, Human
cugggacaggcuccuccucucccuccagaagc

SEQ ID NO: 141143 - RNA, 17 nt, Human
cugggacaggguggcug

SEQ ID NO: 141144 - RNA, 32 nt, Human
cugggacauacagcuguacaucagaaacggag

SEQ ID NO: 141145 - RNA, 32 nt, Human
cugggacauauuuguaccccaucucuauuuaa

SEQ ID NO: 141146 - RNA, 32 nt, Human
cugggacaucacaggcuucaguaccugaccag

SEQ ID NO: 141147 - RNA, 32 nt, Human
cugggacaucauccuuggguacugguuccaac

SEQ ID NO: 141148 - RNA, 32 nt, Human
cugggacaucccaugugugaccccucugcggc

SEQ ID NO: 141149 - RNA, 32 nt, Human
cugggacaucuucccuuggaucaggauccuuc

SEQ ID NO: 141150 - RNA, 32 nt, Human
cugggacaugcagccaggacugugagucuggg

SEQ ID NO: 141151 - RNA, 17 nt, Human
cugggaccacacagaca

SEQ ID NO: 141152 - RNA, 32 nt, Human
cugggaccacaggcacgugccaccacacccag

SEQ ID NO: 141153 - RNA, 22 nt, Human
cugggaccacaggcgugagcca

SEQ ID NO: 141154 - RNA, 20 nt, Human
cugggaccaccacuucuuca

SEQ ID NO: 141155 - RNA, 17 nt, Human
cugggaccaccucaaca

SEQ ID NO: 141156 - RNA, 32 nt, Human
cugggaccacucagggcaucagggggcguggu

SEQ ID NO: 141157 - RNA, 19 nt, Human
cugggaccacucugcacca

SEQ ID NO: 141158 - RNA, 19 nt, Human
cugggaccacucuuuaaca

SEQ ID NO: 141159 - RNA, 18 nt, Human
cugggaccacuggagaca

SEQ ID NO: 141160 - RNA, 20 nt, Human
cugggaccagaacuuacaca

SEQ ID NO: 141161 - RNA, 32 nt, Human
cugggaccagaccuggccaaggucagccagcg

SEQ ID NO: 141162 - RNA, 32 nt, Human
cugggaccagagccacaaaagccacaaaagac

SEQ ID NO: 141163 - RNA, 32 nt, Human
cugggaccagccagggaggcagcagaggcugg

SEQ ID NO: 141164 - RNA, 20 nt, Human
cugggaccagcucccaaaca

SEQ ID NO: 141165 - RNA, 32 nt, Human
cugggaccagcugcccuacuucccagguuugu

SEQ ID NO: 141166 - RNA, 17 nt, Human
cugggaccaggcacaac

SEQ ID NO: 141167 - RNA, 16 nt, Human
cugggaccagugcaac

SEQ ID NO: 141168 - RNA, 24 nt, Human
cugggaccauagugcuccagccca

SEQ ID NO: 141169 - RNA, 32 nt, Human
cugggacccaccucccccuccccggccacaug

SEQ ID NO: 141170 - RNA, 18 nt, Human
cugggacccacgacgaca

SEQ ID NO: 141171 - RNA, 17 nt, Human
cugggacccagacagca

SEQ ID NO: 141172 - RNA, 32 nt, Human
cugggacccagccaugaguguggagcugagca

SEQ ID NO: 141173 - RNA, 32 nt, Human
cugggacccaggagggcacagccaaggaauga

SEQ ID NO: 141174 - RNA, 32 nt, Human
cugggacccaggagugccagccucacccacgc

SEQ ID NO: 141175 - RNA, 24 nt, Human
cugggacccaugcaaauuaaacca

SEQ ID NO: 141176 - RNA, 32 nt, Human
cugggacccccuacccuguucuccccugaggc

SEQ ID NO: 141177 - RNA, 32 nt, Human
cugggaccccgcccccucauccugccuccauu

SEQ ID NO: 141178 - RNA, 32 nt, Human
cugguuucugcucgugcuuacagugcugggua

SEQ ID NO: 141179 - RNA, 20 nt, Human
cugguuucuuccugcaucuu

SEQ ID NO: 141180 - RNA, 32 nt, Human
cugguuucuuucaugcuccuuacccugcccca

SEQ ID NO: 141181 - RNA, 32 nt, Human
cugguuugaaucccucauugcuuucccauuuc

SEQ ID NO: 141182 - RNA, 32 nt, Human
cugguuugaccuccgguguugaugcaaacuca

SEQ ID NO: 141183 - RNA, 32 nt, Human
cugguuugagauugccccaggucugggaagcu

SEQ ID NO: 141184 - RNA, 32 nt, Human
cugguuugcagagcuugaacacagucucaccc

SEQ ID NO: 141185 - RNA, 32 nt, Human
cugguuuggaguccuuuccuucccaggcaaaa

SEQ ID NO: 141186 - RNA, 32 nt, Human
cugguuuggccaagggcuacugcucauaaaac

SEQ ID NO: 141187 - RNA, 32 nt, Human
cugguuuguggggcacagaugccuggguugcu

SEQ ID NO: 141188 - RNA, 32 nt, Human
cugguuuguggugggugugaugugguuuauua

SEQ ID NO: 141189 - RNA, 24 nt, Human
cugguuuguuccucucuccacuga

SEQ ID NO: 141190 - RNA, 22 nt, Human
cugguuuguuucuugggauuuu

SEQ ID NO: 141191 - RNA, 32 nt, Human
cugguuuuaguaaacccagcugccugcauugc

SEQ ID NO: 141192 - RNA, 18 nt, Human
cugguuuucuugagaccu

SEQ ID NO: 141193 - RNA, 32 nt, Human
cugguuuucuuuuacccauaaauaacaugaau

SEQ ID NO: 141194 - RNA, 19 nt, Human
cugguuuugcacuacagca

SEQ ID NO: 141195 - RNA, 32 nt, Human
cugguuuugcccacuucccuuugacuguccaa

SEQ ID NO: 141196 - RNA, 32 nt, Human
cugguuuugcuuuguuggcaaggagccaggga

SEQ ID NO: 141197 - RNA, 20 nt, Human
cugguuuuggccacuacaac

SEQ ID NO: 141198 - RNA, 18 nt, Human
cugguuuugugggguccu

SEQ ID NO: 141199 - RNA, 18 nt, Human
cugguuuuucugugcuuu

SEQ ID NO: 141200 - RNA, 32 nt, Human
cuguaaaagauaagaauuuucaagaacaggau

SEQ ID NO: 141201 - RNA, 32 nt, Human
cuguaaaaggccaaauagacuguauggaccau

SEQ ID NO: 141202 - RNA, 26 nt, Human
cuguaaaaugggcaucaccuaccuca

SEQ ID NO: 141203 - RNA, 32 nt, Human
cuguaaacauggguggcaaaaagagaagaugg

SEQ ID NO: 141204 - RNA, 32 nt, Human
cuguaaaccaguacaauguggugcucuugaca

SEQ ID NO: 141205 - RNA, 18 nt, Human
cuguaaaccuuccuuccc

SEQ ID NO: 141206 - RNA, 27 nt, Human
cuguaaagaagcuuccuaagaacguuu

SEQ ID NO: 141207 - RNA, 32 nt, Human
cuguaaagcuauugguuguagcauuuuacuuu

SEQ ID NO: 141208 - RNA, 32 nt, Human
cuguaaaggaggcaggagugucagagugacgg

SEQ ID NO: 141209 - RNA, 32 nt, Human
cuguaaaggcaagaauugaggaagagaagaag

SEQ ID NO: 141210 - RNA, 32 nt, Human
cuguaaauacuauaaugagagccacaucugua

SEQ ID NO: 141211 - RNA, 32 nt, Human
cuguaaaucccagcuauuugggaggcugaggc

SEQ ID NO: 141212 - RNA, 32 nt, Human
cuguaaaucccucucuguaucuuaucaaauau

SEQ ID NO: 141213 - RNA, 32 nt, Human
cuguaaauuggacugcagucugaggugcccau

SEQ ID NO: 141214 - RNA, 32 nt, Human
cuguaaauuuaagagguguauucugaggccac

SEQ ID NO: 141215 - RNA, 32 nt, Human
cuguaacagaggacuauccucagucugcaugu

SEQ ID NO: 141216 - RNA, 32 nt, Human
cuguaacagggaggggccucgcaggagcagca

SEQ ID NO: 141217 - RNA, 32 nt, Human
cuguaacaugcacacuuuggccugugucaguu

SEQ ID NO: 141218 - RNA, 32 nt, Human
cuguaacccaaagccugcccacacaacccggu

SEQ ID NO: 141219 - RNA, 17 nt, Human
cuguaacccacuacaac

SEQ ID NO: 141220 - RNA, 32 nt, Human
cuguaacccaggcuggagugcaguggccugau

SEQ ID NO: 141221 - RNA, 32 nt, Human
cuguaacccuccuccaggaugaaccaccugcc

SEQ ID NO: 141222 - RNA, 32 nt, Human
cuguaaccucaaaauccugggcucaagugauc

SEQ ID NO: 141223 - RNA, 32 nt, Human
cuguaaccucaaacucccaggcucaagggauc

SEQ ID NO: 141224 - RNA, 32 nt, Human
cuguaaccucaaacuccuggacucaagccauc

SEQ ID NO: 141225 - RNA, 32 nt, Human
cuguaaccucaaacuccuggacucaagcgauc

SEQ ID NO: 141226 - RNA, 32 nt, Human
cuguaaccucaaacuccuggacucaugcaauc

SEQ ID NO: 141227 - RNA, 32 nt, Human
cuguaaccucaaacucuggggcucaagcaguu

SEQ ID NO: 141228 - RNA, 32 nt, Human
cuguaaccucugccuccugccucccgggucca

SEQ ID NO: 141229 - RNA, 32 nt, Human
cuguaaccugaaccagcgcuugaguuaucuag

SEQ ID NO: 141230 - RNA, 23 nt, Human
cuguaaccuggugccugcugcug

SEQ ID NO: 141231 - RNA, 32 nt, Human
cuguaaccuguuccuauucaucuggaaggagg

SEQ ID NO: 141232 - RNA, 32 nt, Human
cuguaacggaguuuagagccagggcugaugcu

SEQ ID NO: 141233 - RNA, 19 nt, Human
cuguaacguggcacuggua

SEQ ID NO: 141234 - RNA, 32 nt, Human
cuguaacucaacuaacaaaaucaagccugauu

SEQ ID NO: 141235 - RNA, 24 nt, Human
cuguaacucaggcuggagugcagu

SEQ ID NO: 141236 - RNA, 32 nt, Human
cuguaacucaggcuggagugcaguggcgcgau

SEQ ID NO: 141237 - RNA, 32 nt, Human
cuguaacucccgccuucaccagacucaaggac

SEQ ID NO: 141238 - RNA, 32 nt, Human
cuguaacuccgccccuuucucucccucucagu

SEQ ID NO: 141239 - RNA, 32 nt, Human
cuguaacucgagagccaguagcauuggauuga

SEQ ID NO: 141240 - RNA, 32 nt, Human
cuguaacugcacgugccuucugucauugggaa

SEQ ID NO: 141241 - RNA, 32 nt, Human
cuguaacugggaacaagaugcaaaagaugacu

SEQ ID NO: 141242 - RNA, 25 nt, Human
cuguaagaucaauacuuguugcaga

SEQ ID NO: 141243 - RNA, 32 nt, Human
cuguaagcccagggauguggcagcugcagcgg

SEQ ID NO: 141244 - RNA, 32 nt, Human
cuguaagccugcuuccugcuucacguaauucc

SEQ ID NO: 141245 - RNA, 32 nt, Human
cuguaagcucuaggcugagugcauggaaacug

SEQ ID NO: 141246 - RNA, 32 nt, Human
cuguaagcuuagaagaguagaaucacuuuauu

SEQ ID NO: 141247 - RNA, 32 nt, Human
cuguaagcuuccuguggacaaggccugcuccg

SEQ ID NO: 141248 - RNA, 32 nt, Human
cuguaagcuuugauaaccugcuuaauacucca

SEQ ID NO: 141249 - RNA, 32 nt, Human
cuguaaggacaguuucgguaguuaaguggaau

SEQ ID NO: 141250 - RNA, 32 nt, Human
cuguaaggaucucauuuggguaucuggaaggu

SEQ ID NO: 141251 - RNA, 31 nt, Human
cuguaagggucaaaagauuguugugaccuua

SEQ ID NO: 141252 - RNA, 32 nt, Human
cuguaagucccagcuacucaggaggcuuaggu

SEQ ID NO: 141253 - RNA, 32 nt, Human
cuguaagugaaauaugggaguauaguuuuuau

SEQ ID NO: 141254 - RNA, 32 nt, Human
cuguaaguuacuuagaucauuuuuggaagcag

SEQ ID NO: 141255 - RNA, 32 nt, Human
cuguaaguuccuccucugccccugguuuguuu

SEQ ID NO: 141256 - RNA, 32 nt, Human
cuguaaguuccuugggggcagggccuuugucu

SEQ ID NO: 141257 - RNA, 32 nt, Human
cuguaaguuggggguggucuggggguaaggcu

SEQ ID NO: 141258 - RNA, 32 nt, Human
cuguaaguugguccuccgccuccgggccaccc

SEQ ID NO: 141259 - RNA, 32 nt, Human
cuguaaguugugcauugagauuauguuaaaag

SEQ ID NO: 141260 - RNA, 32 nt, Human
cuguaauacugggggaccuacagcugccgugg

SEQ ID NO: 141261 - RNA, 32 nt, Human
cuguaauauaugcucucucaccucuauuaccu

SEQ ID NO: 141262 - RNA, 32 nt, Human
cuguaauaugaaucccagcuuuugagucugac

SEQ ID NO: 141263 - RNA, 32 nt, Human
cuguaauauuuaacuuuaguacccaggcuugu

SEQ ID NO: 141264 - RNA, 32 nt, Human
cuguaaucaagaaauggccuguggaauguuau

SEQ ID NO: 141265 - RNA, 22 nt, Human
cuguaaucacagcauuccuaca

SEQ ID NO: 141266 - RNA, 32 nt, Human
cuguaaucacugcacuccaaccuggcaacaga

SEQ ID NO: 141267 - RNA, 32 nt, Human
cuguaaucauuuguuuacauuugaugcauguc

SEQ ID NO: 141268 - RNA, 32 nt, Human
cuguaaucccaaagugcugggauuacaggcgu

SEQ ID NO: 141269 - RNA, 32 nt, Human
cuguaaucccaaagugcugggauuacaggugu

SEQ ID NO: 141270 - RNA, 32 nt, Human
cuguaaucccaacaacacuuugggaggcccag

SEQ ID NO: 141271 - RNA, 32 nt, Human
cuguaaucccaagcagcugggauuacaggcac

SEQ ID NO: 141272 - RNA, 18 nt, Human
cuguaaucccagcacuuu

SEQ ID NO: 141273 - RNA, 32 nt, Human
cuguaaucccagcacuuugagagaccaaggug

SEQ ID NO: 141274 - RNA, 32 nt, Human
cuguaaucccagcacuuugggauuacucccag

SEQ ID NO: 141275 - RNA, 32 nt, Human
cuguaaucccagcacuuugggauuacucccgg

SEQ ID NO: 141276 - RNA, 19 nt, Human
cuguaaucccagcuacuca

SEQ ID NO: 141277 - RNA, 21 nt, Human
cuguaaucccagcuacucagg

SEQ ID NO: 141278 - RNA, 22 nt, Human
cuguaaucccagcuacucagga

SEQ ID NO: 141279 - RNA, 32 nt, Human
cuguaaucccagcuacucaggaggcuugaacc

SEQ ID NO: 141280 - RNA, 21 nt, Human
cuguaaucccagcuacucggg

SEQ ID NO: 141281 - RNA, 22 nt, Human
cuguaaucccagcuacucggga

SEQ ID NO: 141282 - RNA, 32 nt, Human
cuguaaucccagcuacucgggaggcuuagaca

SEQ ID NO: 141283 - RNA, 32 nt, Human
cuguaaucccagcuacucgggagguuuaggca

SEQ ID NO: 141284 - RNA, 21 nt, Human
cuguaaucccagcuacuuggg

SEQ ID NO: 141285 - RNA, 22 nt, Human
cuguaaucccagcuacuuggga

SEQ ID NO: 141286 - RNA, 32 nt, Human
cuguaaucccagcugcccaggaggcugaggca

SEQ ID NO: 141287 - RNA, 32 nt, Human
cuguaaucccagguauucacugcaucagacac

SEQ ID NO: 141288 - RNA, 32 nt, Human
cuguaaucuaggcaccuuugccaacaccuccc

SEQ ID NO: 141289 - RNA, 32 nt, Human
cuguaaucucagcacuuugagggguugaggug

SEQ ID NO: 141290 - RNA, 32 nt, Human
cuguaaugccuucucaccucuucccaaucaag

SEQ ID NO: 141291 - RNA, 32 nt, Human
cuguaauggaaaucugucaaugaacaugaacu

SEQ ID NO: 141292 - RNA, 32 nt, Human
cuguaauguagggggaggcgggggaggcuuca

SEQ ID NO: 141293 - RNA, 32 nt, Human
cuguaauuagauuguguuuuauaguaauucuu

SEQ ID NO: 141294 - RNA, 32 nt, Human
cuguaauuggacgcuggacuccaggcuccccu

SEQ ID NO: 141295 - RNA, 32 nt, Human
cuguaauuugguuuuaauuuuuacuuagguug

SEQ ID NO: 141296 - RNA, 32 nt, Human
cuguacaaaacauuccucugaaaaucuaauau

SEQ ID NO: 141297 - RNA, 32 nt, Human
cuguacacacacuuccucaucacugcagccau

SEQ ID NO: 141298 - RNA, 32 nt, Human
cuguacacacagaaaaugguauaaaauaugag

SEQ ID NO: 141299 - RNA, 18 nt, Human
cuguacacacccaucaaa

SEQ ID NO: 141300 - RNA, 32 nt, Human
cuguacacagaaugugagagagagcaacaaua

SEQ ID NO: 141301 - RNA, 32 nt, Human
cuguacacagguuuguucuaauuccccaaccu

SEQ ID NO: 141302 - RNA, 32 nt, Human
cuguacacauggugccuucuaaggacagcucc

SEQ ID NO: 141303 - RNA, 32 nt, Human
cuguacaccacaagaggcacugagggacucag

SEQ ID NO: 141304 - RNA, 32 nt, Human
cuguacagaacacuccaagggccaauggcagu

SEQ ID NO: 141305 - RNA, 22 nt, Human
cuguacagccucgcuccugcca

SEQ ID NO: 141306 - RNA, 32 nt, Human
cuguacagccugaucaaagccaaggcuaguuc

SEQ ID NO: 141307 - RNA, 32 nt, Human
cuguacaggaagcacaguggcaucuucuucug

SEQ ID NO: 141308 - RNA, 32 nt, Human
cuguacaggagaauguggggaucuuuuguuaa

SEQ ID NO: 141309 - RNA, 32 nt, Human
cuguacaggagccuugucugcugcaguggcgc

SEQ ID NO: 141310 - RNA, 22 nt, Human
cuguacaguaccuuguugcaga

SEQ ID NO: 141311 - RNA, 32 nt, Human
cuguacagugccugugauuacacaccaccacc

SEQ ID NO: 141312 - RNA, 32 nt, Human
cuguacauacuggccucugugauuacauagau

SEQ ID NO: 141313 - RNA, 32 nt, Human
cuguacauagcccagacagaaggcuggacuca

SEQ ID NO: 141314 - RNA, 32 nt, Human
cuguacaucagaugcagagucaagaccacaga

SEQ ID NO: 141315 - RNA, 32 nt, Human
cuguacauccucugccacaucuuccugacccg

SEQ ID NO: 141316 - RNA, 32 nt, Human
cuguacaucugaaauucacuucaguccaaguc

SEQ ID NO: 141317 - RNA, 32 nt, Human
cuguacaugagcuaguuuguagugacucacug

SEQ ID NO: 141318 - RNA, 32 nt, Human
cuguacauucacucuaagaaacacgugcagga

SEQ ID NO: 141319 - RNA, 32 nt, Human
cuguacauuccuucuuccucccccugcuccag

SEQ ID NO: 141320 - RNA, 27 nt, Human
cuguacauuuucaacuuguuuuugcca

SEQ ID NO: 141321 - RNA, 32 nt, Human
cuguacauuuucaacuuguuuuugccaauggg

SEQ ID NO: 141322 - RNA, 20 nt, Human
cuguacauuuuggcccuuac

SEQ ID NO: 141323 - RNA, 32 nt, Human
cuguaccaaaaauacaaaaaguuagcugggca

SEQ ID NO: 141324 - RNA, 32 nt, Human
cuguaccaaaaauacaaaaauuaauugggcau

SEQ ID NO: 141325 - RNA, 32 nt, Human
cuguaccaaagaggaguauggugggagaggga

SEQ ID NO: 141326 - RNA, 32 nt, Human
cuguaccaaguaaacccaggcagcgaggggca

SEQ ID NO: 141327 - RNA, 32 nt, Human
cuguaccaauuuagacuugcucuaccaauuua

SEQ ID NO: 141328 - RNA, 32 nt, Human
cuguaccaggcccaggccucagccucugagaa

SEQ ID NO: 141329 - RNA, 32 nt, Human
cuguaccaggcuggagaggacauggcacugcu

SEQ ID NO: 141330 - RNA, 32 nt, Human
cuguaccagugcucaucaucccuucuucauac

SEQ ID NO: 141331 - RNA, 32 nt, Human
cuguaccagugucaaaugcugcagccugccaa

SEQ ID NO: 141332 - RNA, 23 nt, Human
cuguaccauugucaccccacuca

SEQ ID NO: 141333 - RNA, 32 nt, Human
cuguacccaaagcagaauccccagcauguguu

SEQ ID NO: 141334 - RNA, 32 nt, Human
cuguacccagagaggcggcagcaggagagcca

SEQ ID NO: 141335 - RNA, 18 nt, Human
cuguacccccacuccauc

SEQ ID NO: 141336 - RNA, 21 nt, Human
cuguacccccauccaaaucuc

SEQ ID NO: 141337 - RNA, 32 nt, Human
cuguaccccuaaaagaagagcuggaguaagga

SEQ ID NO: 141338 - RNA, 32 nt, Human
cuguaccccuuucccucagucucuuccucucu

SEQ ID NO: 141339 - RNA, 21 nt, Human
cuguacccggccccagugccc

SEQ ID NO: 141340 - RNA, 32 nt, Human
cuguacccugcccucccuuauauuguguaucc

SEQ ID NO: 141341 - RNA, 32 nt, Human
cuguacccugcuucccaaacucccaggaccug

SEQ ID NO: 141342 - RNA, 32 nt, Human
cuguacccuggccagaacaucucacugauacu

SEQ ID NO: 141343 - RNA, 32 nt, Human
cuguacccuugaacuccugggcucaagugauc

SEQ ID NO: 141344 - RNA, 32 nt, Human
cuguaccggaagacaggaggggaggggugcag

SEQ ID NO: 141345 - RNA, 18 nt, Human
cuguaccuccagggaccc

SEQ ID NO: 141346 - RNA, 32 nt, Human
cuguaccucuggaggaguucuagguuuggauu

SEQ ID NO: 141347 - RNA, 32 nt, Human
cuguaccucuuccuugcugucucuggauauug

SEQ ID NO: 141348 - RNA, 23 nt, Human
cuguaccugagcuacgucuucac

SEQ ID NO: 141349 - RNA, 32 nt, Human
cuguaccugcaucaagaaaaccugcuuguuca

SEQ ID NO: 141350 - RNA, 24 nt, Human
cuguaccugccccaccccagcuca

SEQ ID NO: 141351 - RNA, 32 nt, Human
cuguaccuggcuucucuucuuccuuuccugcu

SEQ ID NO: 141352 - RNA, 32 nt, Human
cuguaccugggcauccagaaaaauggugguga

SEQ ID NO: 141353 - RNA, 32 nt, Human
cuguaccuuagcaaguugcucccucuccaggg

SEQ ID NO: 141354 - RNA, 32 nt, Human
cuguaccuuggcucccuguccugcucccggcu

SEQ ID NO: 141355 - RNA, 17 nt, Human
cuguaccuuuccuuccc

SEQ ID NO: 141356 - RNA, 32 nt, Human
cuguacgaacagcucccuuccauccauuuuua

SEQ ID NO: 141357 - RNA, 32 nt, Human
cuguacgcacagucuuuccauuuuaagccuau

SEQ ID NO: 141358 - RNA, 32 nt, Human
cuguacggggcaaucugcccacccucacccag

SEQ ID NO: 141359 - RNA, 32 nt, Human
cuguacggugagccccagggaggcggaucugg

SEQ ID NO: 141360 - RNA, 32 nt, Human
cuguacggugagcccgagggaggcggaucugg

SEQ ID NO: 141361 - RNA, 32 nt, Human
cuguacgucggcagccccagccccagaaaagg

SEQ ID NO: 141362 - RNA, 32 nt, Human
cuguacguuccuucuacucuggcaccacucuc

SEQ ID NO: 141363 - RNA, 32 nt, Human
cuguacuaaaaauacaaaaauuaacugggcgu

SEQ ID NO: 141364 - RNA, 32 nt, Human
cuguacuaaaaauacaaaaauuagccagacgu

SEQ ID NO: 141365 - RNA, 32 nt, Human
cuguacuaaaaauacaaaaauuagccagauau

SEQ ID NO: 141366 - RNA, 32 nt, Human
cuguacuaaaaauacaaaaauuagccaggcau

SEQ ID NO: 141367 - RNA, 32 nt, Human
cuguacuaaaaauacaaaaauuagccaggcgu

SEQ ID NO: 141368 - RNA, 32 nt, Human
cuguacuaaaaauacaaaaauuagcccagugu

SEQ ID NO: 141369 - RNA, 32 nt, Human
cuguacuaaaaauacaaaaauuagccgagugu

SEQ ID NO: 141370 - RNA, 32 nt, Human
cuguacuaaaaauacaaaaauuagccggacgu

SEQ ID NO: 141371 - RNA, 32 nt, Human
cuguacuaaaaauacaaaaauuagccgggcau

SEQ ID NO: 141372 - RNA, 32 nt, Human
cuguacuaaaaauacaaaaauuagccgggcgu

SEQ ID NO: 141373 - RNA, 32 nt, Human
cuguacuaaaaauacaaaaauuagccgggugu

SEQ ID NO: 141374 - RNA, 32 nt, Human
cuguacuaaaaauacaaaaauuagcugagugu

SEQ ID NO: 141375 - RNA, 32 nt, Human
cuguacuaaaaauacaaaaauuugccuggugu

SEQ ID NO: 141376 - RNA, 32 nt, Human
cuguacuaaaaauacaaaaguuagcugagcau

SEQ ID NO: 141377 - RNA, 32 nt, Human
cuguacuaaaaauacaaaauuagcuggguuug

SEQ ID NO: 141378 - RNA, 32 nt, Human
cuguacuaaaaauacaaaauuuagcugagugu

SEQ ID NO: 141379 - RNA, 32 nt, Human
cuguacuaaaaauacaaaauuuagcuuggccu

SEQ ID NO: 141380 - RNA, 32 nt, Human
cuguacuaaaaauacaagauuaccugggcaug

SEQ ID NO: 141381 - RNA, 32 nt, Human
cuguacuaaaaaugcaaaaauuagcugggcgu

SEQ ID NO: 141382 - RNA, 32 nt, Human
cuguacuaaaaguaggaaaauuagcugggugu

SEQ ID NO: 141383 - RNA, 32 nt, Human
cuguacuaaaaucuauaauaaagcuuuuccac

SEQ ID NO: 141384 - RNA, 32 nt, Human
cuguacuaaauccuuuuuccauaucaguauaa

SEQ ID NO: 141385 - RNA, 32 nt, Human
cuguacuaauaauacaaaaauuagcugggcau

SEQ ID NO: 141386 - RNA, 32 nt, Human
cuguacuacuguacuccagccugggggaaaga

SEQ ID NO: 141387 - RNA, 25 nt, Human
cuguacucaaaauucagcaccuugu

SEQ ID NO: 141388 - RNA, 31 nt, Human
cuguacucaauaaauaguguggagaccagag

SEQ ID NO: 141389 - RNA, 32 nt, Human
cuguacuccacauuccauuuuaauugauauga

SEQ ID NO: 141390 - RNA, 32 nt, Human
cuguacuccagcacucuagccugggcgacaga

SEQ ID NO: 141391 - RNA, 32 nt, Human
cuguacuccagccuggaugacacagcgagacu

SEQ ID NO: 141392 - RNA, 32 nt, Human
cuguacuccagccuggaugacagaguggagac

SEQ ID NO: 141393 - RNA, 32 nt, Human
cuguacuccagccuggcaacagagugagacug

SEQ ID NO: 141394 - RNA, 32 nt, Human
cuguacuccagccuggcccacagagugagauc

SEQ ID NO: 141395 - RNA, 32 nt, Human
cuguacuccagccugggaaacaaugcgagucc

SEQ ID NO: 141396 - RNA, 32 nt, Human
cuguacuccagccugggagacacagugagacc

SEQ ID NO: 141397 - RNA, 32 nt, Human
cuguacuccagccugggcaacagagcgaggcu

SEQ ID NO: 141398 - RNA, 32 nt, Human
cuguacuccagccugggcaacagagggagacu

SEQ ID NO: 141399 - RNA, 32 nt, Human
cuguacuccagccugggcaacagagugagacc

SEQ ID NO: 141400 - RNA, 32 nt, Human
cuguacuccagccugggcaacagagugagacu

SEQ ID NO: 141401 - RNA, 32 nt, Human
cuguacuccagccugggcgacagagggggacu

SEQ ID NO: 141402 - RNA, 32 nt, Human
cuguacuccagccugggcgacggagugagacu

SEQ ID NO: 141403 - RNA, 32 nt, Human
cuguacuccagccugggugacaaagugagacu

SEQ ID NO: 141404 - RNA, 32 nt, Human
cuguacuccagccugggugacagagcgagacc

SEQ ID NO: 141405 - RNA, 32 nt, Human
cuguacuccagccugggugacagagcgagacu

SEQ ID NO: 141406 - RNA, 32 nt, Human
cuguacuccagccugggugacagagugagacc

SEQ ID NO: 141407 - RNA, 32 nt, Human
cuguacuccagccugggugacagagugagacu

SEQ ID NO: 141408 - RNA, 32 nt, Human
cuguacuccagccugggugacagagugaggcc

SEQ ID NO: 141409 - RNA, 32 nt, Human
cuguacuccagccugggugacagagugauacu

SEQ ID NO: 141410 - RNA, 32 nt, Human
cuguacuccagccugggugacagggcaagacc

SEQ ID NO: 141411 - RNA, 32 nt, Human
cuguacuccagccugggugacgagcgaaacuc

SEQ ID NO: 141412 - RNA, 32 nt, Human
cuguacuccagccugggugacugagcgagacu

SEQ ID NO: 141413 - RNA, 32 nt, Human
cuguacuccagccugggugauaggaugagacu

SEQ ID NO: 141414 - RNA, 32 nt, Human
cuguacuccagccuggugacagagcgagacuc

SEQ ID NO: 141415 - RNA, 32 nt, Human
cuguacuccccuagucaugagcacuugaagua

SEQ ID NO: 141416 - RNA, 32 nt, Human
cuguacuccccuuugcuccaucaguuaucagg

SEQ ID NO: 141417 - RNA, 32 nt, Human
cuguacucccugagcuuccccaccccaagugc

SEQ ID NO: 141418 - RNA, 32 nt, Human
cuguacuccucccaggcgccccuucccccucc

SEQ ID NO: 141419 - RNA, 32 nt, Human
cuguacucuaguccccagcccccagcccugcc

SEQ ID NO: 141420 - RNA, 32 nt, Human
cuguacucuccuccucaaugccugugucucuc

SEQ ID NO: 141421 - RNA, 18 nt, Human
cuguacucucuccugcaa

SEQ ID NO: 141422 - RNA, 32 nt, Human
cuguacucugcagccugccuuccuagaguugg

SEQ ID NO: 141423 - RNA, 32 nt, Human
cuguacucugccccagugccaggcuggccugc

SEQ ID NO: 141424 - RNA, 32 nt, Human
cuguacugagcaccuggucagucugaaggggg

SEQ ID NO: 141425 - RNA, 32 nt, Human
cuguacugaggaccagccuguacauguauaga

SEQ ID NO: 141426 - RNA, 32 nt, Human
cuguacugagucuagaugacucugacccccgc

SEQ ID NO: 141427 - RNA, 32 nt, Human
cuguacugcaauauuuggauugucauucuuac

SEQ ID NO: 141428 - RNA, 32 nt, Human
cuguacugcacuguggcuugcccuggcggggg

SEQ ID NO: 141429 - RNA, 32 nt, Human
cuguacugcacuuagaaugauguaauauucca

SEQ ID NO: 141430 - RNA, 32 nt, Human
cuguacugcagucugggccacacagaaagacu

SEQ ID NO: 141431 - RNA, 32 nt, Human
cuguacugcagugucuggagguugcgggaagg

SEQ ID NO: 141432 - RNA, 32 nt, Human
cuguacugccaagguaccuagguuggagucca

SEQ ID NO: 141433 - RNA, 32 nt, Human
cuguacuggcagaguaguuugcauugacaccu

SEQ ID NO: 141434 - RNA, 32 nt, Human
cuguacugggccagggccagggccaggggacu

SEQ ID NO: 141435 - RNA, 32 nt, Human
cuguacuggugcuucaucaucaagucuagaga

SEQ ID NO: 141436 - RNA, 32 nt, Human
cuguacuguguguacuguagcaaacuaguugg

SEQ ID NO: 141437 - RNA, 32 nt, Human
cuguacuguguguagugcuguuuacauagaug

SEQ ID NO: 141438 - RNA, 32 nt, Human
cuguacuugcagccccugccaugaggucaaug

SEQ ID NO: 141439 - RNA, 32 nt, Human
cuguacuuggccagggugucaaagggacaggc

SEQ ID NO: 141440 - RNA, 32 nt, Human
cuguacuuuagcuccuugaauuuccuuaaucu

SEQ ID NO: 141441 - RNA, 32 nt, Human
cuguacuuuuucaaauaaugauguuuaaaaau

SEQ ID NO: 141442 - RNA, 32 nt, Human
cuguagaaaaagggugcacaacagaaaaauga

SEQ ID NO: 141443 - RNA, 32 nt, Human
cuguagaaaaaugaaauggugaaaugcagagu

SEQ ID NO: 141444 - RNA, 32 nt, Human
cuguagaaaggauuuuuaucuucuguagagcu

SEQ ID NO: 141445 - RNA, 32 nt, Human
cuguagaacuaaaugcacugugcaugaaacuu

SEQ ID NO: 141446 - RNA, 32 nt, Human
cuguagaacugucuauuucuuccuucaauucu

SEQ ID NO: 141447 - RNA, 32 nt, Human
cuguagaagagauuuauuuuaaaagagauugc

SEQ ID NO: 141448 - RNA, 32 nt, Human
cuguagaagaugaccucguuccggagcugggu

SEQ ID NO: 141449 - RNA, 32 nt, Human
cuguagaaggcagaggccggcagaucacuuga

SEQ ID NO: 141450 - RNA, 23 nt, Human
cuguagacauccaaaagcucaca

SEQ ID NO: 141451 - RNA, 32 nt, Human
cuguagacaucucugcaucuuuguaccugcaa

SEQ ID NO: 141452 - RNA, 32 nt, Human
cuguagaccagcugucuuugauuuugucuuau

SEQ ID NO: 141453 - RNA, 32 nt, Human
cuguagaccaggcuggagcgcaguggcaggau

SEQ ID NO: 141454 - RNA, 32 nt, Human
cuguagaccaucaauucuacacccuaauuaca

SEQ ID NO: 141455 - RNA, 32 nt, Human
cuguagacccuuucaugccagcaguggucaua

SEQ ID NO: 141456 - RNA, 32 nt, Human
cuguagaccuccaggaguugagaauuauggua

SEQ ID NO: 141457 - RNA, 32 nt, Human
cuguagacucagggagagcacagucuggcugu

SEQ ID NO: 141458 - RNA, 22 nt, Human
cuguagacugcaagacucauca

SEQ ID NO: 141459 - RNA, 32 nt, Human
cuguagagacaagguuucacuauguuguccag

SEQ ID NO: 141460 - RNA, 32 nt, Human
cuguagagacaggguuucaccauguuggccag

SEQ ID NO: 141461 - RNA, 32 nt, Human
cuguagagauagaguuucaucauguuggccag

SEQ ID NO: 141462 - RNA, 32 nt, Human
cuguagagaugggguuucgccacauugcccag

SEQ ID NO: 141463 - RNA, 32 nt, Human
cuguagagccacauuuacaauaccucaggcua

SEQ ID NO: 141464 - RNA, 32 nt, Human
cuguagagccggcggcaaccggguagcuuggc

SEQ ID NO: 141465 - RNA, 32 nt, Human
cuguagagcuagccgcccugacugccuucaga

SEQ ID NO: 141466 - RNA, 32 nt, Human
cuguagaggugagguuucaccauguugcccag

SEQ ID NO: 141467 - RNA, 32 nt, Human
cuguagauaguauacuaucuacacucugcuca

SEQ ID NO: 141468 - RNA, 32 nt, Human
cuguagaucaguuggccacaaaugcaaagggc

SEQ ID NO: 141469 - RNA, 32 nt, Human
cuguagauccucuggugaugaguauguugcac

SEQ ID NO: 141470 - RNA, 32 nt, Human
cuguagaugccugaccuccaccguaccuccac

SEQ ID NO: 141471 - RNA, 32 nt, Human
cuguagaugcuccccugucuguuagucacuuu

SEQ ID NO: 141472 - RNA, 32 nt, Human
cuguagauggccggggaaggcucuagaaaagg

SEQ ID NO: 141473 - RNA, 32 nt, Human
cuguagaugggcugaaaauagcaagagaacua

SEQ ID NO: 141474 - RNA, 32 nt, Human
cuguagcaaaagccacuuccacauggcccugg

SEQ ID NO: 141475 - RNA, 32 nt, Human
cuguagcaagaggcacucugaguauugggaag

SEQ ID NO: 141476 - RNA, 32 nt, Human
cuguagcaagaggcaggacaaacagugaggac

SEQ ID NO: 141477 - RNA, 24 nt, Human
cuguagcacaggcuggauugcagu

SEQ ID NO: 141478 - RNA, 31 nt, Human
cuguagcagacaaucugaagcaacacauuuu

SEQ ID NO: 141479 - RNA, 32 nt, Human
cuguagcaggacuccaggugaggccugaggac

SEQ ID NO: 141480 - RNA, 32 nt, Human
cuguagcaggugugggcuuacagacacaugga

SEQ ID NO: 141481 - RNA, 32 nt, Human
cuguagcauccccuuagcaucuuucuagccaa

SEQ ID NO: 141482 - RNA, 32 nt, Human
cuguagccacaagaaagacagugaucagugau

SEQ ID NO: 141483 - RNA, 32 nt, Human
cuguagccagaaugccugguuggaauccagcc

SEQ ID NO: 141484 - RNA, 24 nt, Human
cuguagcccaggccagagugcagu

SEQ ID NO: 141485 - RNA, 22 nt, Human
cuguagcccaggcuggagugca

SEQ ID NO: 141486 - RNA, 32 nt, Human
cuguagcccaggcuggagugcaguguggcaca

SEQ ID NO: 141487 - RNA, 24 nt, Human
cuguagcccagucuggagugcagu

SEQ ID NO: 141488 - RNA, 32 nt, Human
cuguagcccagucuggagugcagugguacaau

SEQ ID NO: 141489 - RNA, 32 nt, Human
cuguagcccagucuggagugcaguggugugau

SEQ ID NO: 141490 - RNA, 32 nt, Human
cuguagcccauguucgaccacaugcaccucga

SEQ ID NO: 141491 - RNA, 32 nt, Human
cuguagccccugcuggcugagcuccagccugu

SEQ ID NO: 141492 - RNA, 32 nt, Human
cuguagccuaucugacuagucucauggaucaa

SEQ ID NO: 141493 - RNA, 32 nt, Human
cuguagccucaagagauccucucaccucaccc

SEQ ID NO: 141494 - RNA, 32 nt, Human
cuguagccuccaccucccccaaucaagcgauu

SEQ ID NO: 141495 - RNA, 32 nt, Human
cuguagccuccuccgucgacucagccuuaggu

SEQ ID NO: 141496 - RNA, 32 nt, Human
cuguagccucgaauuccugggcucaagcaacc

SEQ ID NO: 141497 - RNA, 32 nt, Human
cuguagccucgaccuccugggcucaagcaauc

SEQ ID NO: 141498 - RNA, 32 nt, Human
cuguagccucugcaggaacaagcccuaaucug

SEQ ID NO: 141499 - RNA, 32 nt, Human
cuguagccucuuccucuacucaggcagucgac

SEQ ID NO: 141500 - RNA, 19 nt, Human
cuguagccugggaaggaga

SEQ ID NO: 141501 - RNA, 25 nt, Human
cuguagccugggugacagugugaga

SEQ ID NO: 141502 - RNA, 32 nt, Human
cuguagccuguagcucuuggccuguguagagc

SEQ ID NO: 141503 - RNA, 32 nt, Human
cuguagcuagucuucaagaccacaccuggaag

SEQ ID NO: 141504 - RNA, 32 nt, Human
cuguagcuauuaugcuuuuaauauuguuuuaa

SEQ ID NO: 141505 - RNA, 32 nt, Human
cuguagcucagggcgugcacugugaggcugga

SEQ ID NO: 141506 - RNA, 32 nt, Human
cuguagcucccuccucccaucuccuuccccca

SEQ ID NO: 141507 - RNA, 32 nt, Human
cuguagcugagagagacagagcuggacauccu

SEQ ID NO: 141508 - RNA, 32 nt, Human
cuguagcugcugcugcucccugcccagcccca

SEQ ID NO: 141509 - RNA, 32 nt, Human
cuguagcugcugcugcuggcuccacuccugcg

SEQ ID NO: 141510 - RNA, 32 nt, Human
cuguagcugggaauggaggauggggcagccag

SEQ ID NO: 141511 - RNA, 16 nt, Human
cuguagcugguuccug

SEQ ID NO: 141512 - RNA, 32 nt, Human
cuguagcuugacuugaccugagauuaacuagg

SEQ ID NO: 141513 - RNA, 32 nt, Human
cuguagcuugagcaaucucccuuguccuccuu

SEQ ID NO: 141514 - RNA, 32 nt, Human
cuguagcuugcuggauucaacgaugaucuaac

SEQ ID NO: 141515 - RNA, 32 nt, Human
cuguagcuuugaccucucaggcucaagcaauc

SEQ ID NO: 141516 - RNA, 22 nt, Human
cuguaggaacuacugucccaga

SEQ ID NO: 141517 - RNA, 32 nt, Human
cuguaggaauauaaccucccacccugcaaagg

SEQ ID NO: 141518 - RNA, 32 nt, Human
cuguaggaccauuuaagucugggccacuuaau

SEQ ID NO: 141519 - RNA, 32 nt, Human
cuguaggaccugguccugcccugcugcaggag

SEQ ID NO: 141520 - RNA, 32 nt, Human
cuguaggagaaggaggaggaggaggucggaaa

SEQ ID NO: 141521 - RNA, 20 nt, Human
cuguaggagcgccucuucca

SEQ ID NO: 141522 - RNA, 32 nt, Human
cuguaggaggcagauccaagaggcuuccuaag

SEQ ID NO: 141523 - RNA, 32 nt, Human
cuguaggcaccugucguccugccuucgauggc

SEQ ID NO: 141524 - RNA, 23 nt, Human
cuguaggcagaugcaacggcagg

SEQ ID NO: 141525 - RNA, 22 nt, Human
cuguaggcaggcuacugugcug

SEQ ID NO: 141526 - RNA, 32 nt, Human
cuguaggcauucuccccucuguggcuuggugc

SEQ ID NO: 141527 - RNA, 32 nt, Human
cuguaggccaagcaacgagcacuucccucaug

SEQ ID NO: 141528 - RNA, 32 nt, Human
cuguaggccagccuuagccacuguggagcccu

SEQ ID NO: 141529 - RNA, 32 nt, Human
cuguaggccagcugccgggcucaggccacugc

SEQ ID NO: 141530 - RNA, 24 nt, Human
cuguaggccugccucaucccugca

SEQ ID NO: 141531 - RNA, 32 nt, Human
cuguaggccuggagcucucuucuggccuggua

SEQ ID NO: 141532 - RNA, 32 nt, Human
cuguaggcuaucuuucaaacacuggcaucaga

SEQ ID NO: 141533 - RNA, 32 nt, Human
cuguaggcugggugggcaggaauagucaagga

SEQ ID NO: 141534 - RNA, 32 nt, Human
cuguagggaaccuuuccagcucagggaggggc

SEQ ID NO: 141535 - RNA, 32 nt, Human
cuguagggaauccagaaggagcauucaugaag

SEQ ID NO: 141536 - RNA, 32 nt, Human
cuguagggcacagugagggggagccaggucag

SEQ ID NO: 141537 - RNA, 32 nt, Human
cuguagggccugcauuguagguuccaggagga

SEQ ID NO: 141538 - RNA, 32 nt, Human
cuguaggggaccugucugacugggaagggagu

SEQ ID NO: 141539 - RNA, 32 nt, Human
cuguaggggcccagaggggaggugaacaugcc

SEQ ID NO: 141540 - RNA, 32 nt, Human
cuguagggggccugggcugccagugcuguagg

SEQ ID NO: 141541 - RNA, 32 nt, Human
cuguaggggguggauggagacacuucuaacuu

SEQ ID NO: 141542 - RNA, 32 nt, Human
cuguaggguggagacgucagaggucacgggcu

SEQ ID NO: 141543 - RNA, 21 nt, Human
cuguaggucucccuuccuccc

SEQ ID NO: 141544 - RNA, 32 nt, Human
cuguaggugacaggagccagcccagccaggug

SEQ ID NO: 141545 - RNA, 19 nt, Human
cuguaggugcccagcauca

SEQ ID NO: 141546 - RNA, 32 nt, Human
cuguaggugggugggugaguguguccccuccc

SEQ ID NO: 141547 - RNA, 32 nt, Human
cuguaguaaaaauacaaaaauuagcugggcac

SEQ ID NO: 141548 - RNA, 32 nt, Human
cuguaguacugagguuugaggaaaaauaaaug

SEQ ID NO: 141549 - RNA, 32 nt, Human
cuguagucaguaaacuggcuuacagagaacaa

SEQ ID NO: 141550 - RNA, 32 nt, Human
cuguaguccagcuacuugaggcugagauggga

SEQ ID NO: 141551 - RNA, 22 nt, Human
cuguaguccagucucuccagca

SEQ ID NO: 141552 - RNA, 32 nt, Human
cuguagucccagcuacacgggaggcuuaggca

SEQ ID NO: 141553 - RNA, 21 nt, Human
cuguagucccagcuacucagg

SEQ ID NO: 141554 - RNA, 32 nt, Human
cuguagucccagcuacucaggaggcuugccug

SEQ ID NO: 141555 - RNA, 32 nt, Human
cuguagucccagcuacucaggaggcuugggug

SEQ ID NO: 141556 - RNA, 32 nt, Human
cuguagucccagcuacucaggcugaggcagga

SEQ ID NO: 141557 - RNA, 22 nt, Human
cuguagucccagcuacucgcga

SEQ ID NO: 141558 - RNA, 22 nt, Human
cuguagucccagcuacucggga

SEQ ID NO: 141559 - RNA, 32 nt, Human
cuguagucccagcuaucccagaggucgaggcu

SEQ ID NO: 141560 - RNA, 21 nt, Human
cuguagucccagcuauucggg

SEQ ID NO: 141561 - RNA, 32 nt, Human
cuguagucccagcugcuccugaggcugaggca

SEQ ID NO: 141562 - RNA, 32 nt, Human
cuguaguccuucuuugccuccuggggcggccg

SEQ ID NO: 141563 - RNA, 32 nt, Human
cuguagucggucggugugaaugugggcccaag

SEQ ID NO: 141564 - RNA, 32 nt, Human
cuguagucucaaccuccugggcucaagagauc

SEQ ID NO: 141565 - RNA, 32 nt, Human
cuguagucucaagcugccugcgauggccugaa

SEQ ID NO: 141566 - RNA, 32 nt, Human
cuguagucugugaggggagagcagagagcaga

SEQ ID NO: 141567 - RNA, 32 nt, Human
cuguagugacugacaagcagaguuaguggaag

SEQ ID NO: 141568 - RNA, 32 nt, Human
cuguagugagagcaugcaggagagugaccuca

SEQ ID NO: 141569 - RNA, 17 nt, Human
cuguagugcccugcagg

SEQ ID NO: 141570 - RNA, 32 nt, Human
cuguagugggaagaagagucuuccagggagcu

SEQ ID NO: 141571 - RNA, 32 nt, Human
cuguagugggccuuccccucccugucuacacc

SEQ ID NO: 141572 - RNA, 32 nt, Human
cuguaguguacacucccccggugacagggugc

SEQ ID NO: 141573 - RNA, 32 nt, Human
cuguagugugacauuccugccugccugaggaa

SEQ ID NO: 141574 - RNA, 32 nt, Human
cuguaguuagggauacauuucagcauuuuacu

SEQ ID NO: 141575 - RNA, 32 nt, Human
cuguaguucacacuguguccccagggaugaag

SEQ ID NO: 141576 - RNA, 32 nt, Human
cuguauaaagcuugagaagaggccauccauca

SEQ ID NO: 141577 - RNA, 32 nt, Human
cuguauaaaugcaaaugugcauuuuucugacg

SEQ ID NO: 141578 - RNA, 22 nt, Human
cuguauacagguagccuaccuc

SEQ ID NO: 141579 - RNA, 32 nt, Human
cuguauacauuuucaucugcauuccuuagaau

SEQ ID NO: 141580 - RNA, 32 nt, Human
cuguauacgggguuacaaaaagacaugagcug

SEQ ID NO: 141581 - RNA, 32 nt, Human
cuguauagcagucgcagucgcagacggucagc

SEQ ID NO: 141582 - RNA, 32 nt, Human
cuguauaggccuugugggucaggacgcuuggc

SEQ ID NO: 141583 - RNA, 32 nt, Human
cuguauaggcuaguucaguaacaacaaaauac

SEQ ID NO: 141584 - RNA, 24 nt, Human
cuguauauaaauuauaccuuacua

SEQ ID NO: 141585 - RNA, 32 nt, Human
cuguauaucagcacauccuguggguucagcuu

SEQ ID NO: 141586 - RNA, 32 nt, Human
cuguauaugcaguauugagcacuguaggcaag

SEQ ID NO: 141587 - RNA, 32 nt, Human
cuguauaugugguguucagaauccaaaauaaa

SEQ ID NO: 141588 - RNA, 32 nt, Human
cuguauauuaccuggugauaguugcuuuucac

SEQ ID NO: 141589 - RNA, 32 nt, Human
cuguauauugaagaugucucuacacaguaucg

SEQ ID NO: 141590 - RNA, 32 nt, Human
cuguauauuguccuugccccagccugcaaucu

SEQ ID NO: 141591 - RNA, 32 nt, Human
cuguauauuucuaacagggcgccccaugcccc

SEQ ID NO: 141592 - RNA, 22 nt, Human
cuguauauuugauucuuaacua

SEQ ID NO: 141593 - RNA, 32 nt, Human
cuguaucaauaugccuguguuauaacacccuc

SEQ ID NO: 141594 - RNA, 32 nt, Human
cuguaucaaucagcagauuuuauugcuuuuca

SEQ ID NO: 141595 - RNA, 32 nt, Human
cuguaucacccaggccagaguguaguggcaca

SEQ ID NO: 141596 - RNA, 26 nt, Human
cuguaucacccaggcuggaguacagu

SEQ ID NO: 141597 - RNA, 21 nt, Human
cuguaucacccccucccuaca

SEQ ID NO: 141598 - RNA, 22 nt, Human
cuguaucagaaugaagaaacua

SEQ ID NO: 141599 - RNA, 32 nt, Human
cuguaucagcacuuaccggugugugacugccc

SEQ ID NO: 141600 - RNA, 32 nt, Human
cuguaucagcugguccaguccauucugggucc

SEQ ID NO: 141601 - RNA, 32 nt, Human
cuguaucagguggggaaaugugcugaaggaca

SEQ ID NO: 141602 - RNA, 32 nt, Human
cuguaucagucaauggggauuuuaacagacug

SEQ ID NO: 141603 - RNA, 32 nt, Human
cuguaucauccagagccugaguacaguuuccu

SEQ ID NO: 141604 - RNA, 32 nt, Human
cuguaucauuuucugcugaggguggagugucc

SEQ ID NO: 141605 - RNA, 21 nt, Human
cuguauccaccccucauccca

SEQ ID NO: 141606 - RNA, 32 nt, Human
cuguauccagaguggaacccaggcuggugucc

SEQ ID NO: 141607 - RNA, 32 nt, Human
cuguauccagcaccacagaaaccucaguguuu

SEQ ID NO: 141608 - RNA, 32 nt, Human
cuguauccagccuuuccuugcaucaucuuccu

SEQ ID NO: 141609 - RNA, 21 nt, Human
cuguauccccacccaaaucuc

SEQ ID NO: 141610 - RNA, 21 nt, Human
cuguauccccaccccguacuc

SEQ ID NO: 141611 - RNA, 20 nt, Human
cuguauccccaucaccucca

SEQ ID NO: 141612 - RNA, 32 nt, Human
cuguauccccuccaacacccacaucugcauua

SEQ ID NO: 141613 - RNA, 22 nt, Human
cuguaucuacaccuguucuucc

SEQ ID NO: 141614 - RNA, 32 nt, Human
cuguaucuaucauucaacaaguuucagcuuuc

SEQ ID NO: 141615 - RNA, 32 nt, Human
cuguaucuauuaaaagacaaaaauuagcuggg

SEQ ID NO: 141616 - RNA, 32 nt, Human
cuguaucucccaacuagaaacagcuccagugu

SEQ ID NO: 141617 - RNA, 32 nt, Human
cuguaucugaaagagaaaagacaugaaauaua

SEQ ID NO: 141618 - RNA, 32 nt, Human
cuguaucugucaugggcaccugcugucuaaac

SEQ ID NO: 141619 - RNA, 32 nt, Human
cuguaucuuauauggauauauguauguguuug

SEQ ID NO: 141620 - RNA, 32 nt, Human
cuguaucuucaguaucuuggucuuccagaacc

SEQ ID NO: 141621 - RNA, 32 nt, Human
cuguaucuuccagaaccuaggaggaugccuaa

SEQ ID NO: 141622 - RNA, 32 nt, Human
cuguaugaaacuguauuuaaaugaguguacau

SEQ ID NO: 141623 - RNA, 32 nt, Human
cuguaugagcagugguuaucaugguaaauuuc

SEQ ID NO: 141624 - RNA, 32 nt, Human
cuguaugaggaggaggaggaggaggaugugaa

SEQ ID NO: 141625 - RNA, 32 nt, Human
cuguaugaggcauacuguguccagcggcgucu

SEQ ID NO: 141626 - RNA, 21 nt, Human
cuguaugaggccgggugcagu

SEQ ID NO: 141627 - RNA, 32 nt, Human
cuguaugaggccgggugcaguggcucacgccu

SEQ ID NO: 141628 - RNA, 32 nt, Human
cuguaugcaaagcauuuuaugaaauacaaugg

SEQ ID NO: 141629 - RNA, 32 nt, Human
cuguaugcacugucuauauugcacugagagag

SEQ ID NO: 141630 - RNA, 26 nt, Human
cuguaugcauucauuuauuccuugcu

SEQ ID NO: 141631 - RNA, 20 nt, Human
cuguaugccccucuccagca

SEQ ID NO: 141632 - RNA, 32 nt, Human
cuguaugcuguacaagauauaauguaacuugc

SEQ ID NO: 141633 - RNA, 32 nt, Human
cuguauggaugugaauggaaucagaugugauu

SEQ ID NO: 141634 - RNA, 32 nt, Human
cuguauggauguguacuguacaggguauaggc

SEQ ID NO: 141635 - RNA, 32 nt, Human
cuguauggccaggaacugggacucgagcuuuc

SEQ ID NO: 141636 - RNA, 32 nt, Human
cuguaugggucuggugacaucucaccugcuuu

SEQ ID NO: 141637 - RNA, 32 nt, Human
cuguauggguguguacuguacaggguauaugc

SEQ ID NO: 141638 - RNA, 32 nt, Human
cuguaugguggagaaagaagugggaaggaucu

SEQ ID NO: 141639 - RNA, 32 nt, Human
cuguaugguuccuacauacaugaucuucaggu

SEQ ID NO: 141640 - RNA, 32 nt, Human
cuguauguaccucccucacuucucuccuauca

SEQ ID NO: 141641 - RNA, 32 nt, Human
cuguauguaugcuagggaaaagacuugcucca

SEQ ID NO: 141642 - RNA, 32 nt, Human
cuguaugucucugaguagaaagugagaauuga

SEQ ID NO: 141643 - RNA, 32 nt, Human
cuguaugucuucuuuggagaaacaucuauuca

SEQ ID NO: 141644 - RNA, 32 nt, Human
cuguaugugacaacauuuuuguacauuauguu

SEQ ID NO: 141645 - RNA, 32 nt, Human
cuguaugugcaugcauucacacacacauaugu

SEQ ID NO: 141646 - RNA, 19 nt, Human
cuguauguuccccugcgag

SEQ ID NO: 141647 - RNA, 21 nt, Human
cuguauguuuuucuucuucca

SEQ ID NO: 141648 - RNA, 32 nt, Human
cuguauuaacaucccuccccagacauccaucc

SEQ ID NO: 141649 - RNA, 32 nt, Human
cuguauuaauagagguaggaauccagagccag

SEQ ID NO: 141650 - RNA, 32 nt, Human
cuguauuagacuauuucaauuuuaggaaaauc

SEQ ID NO: 141651 - RNA, 32 nt, Human
cuguauuagagcgccagcuccuuggggcaggg

SEQ ID NO: 141652 - RNA, 32 nt, Human
cuguauuaguccauuuucacgcugcugauaaa

SEQ ID NO: 141653 - RNA, 31 nt, Human
cuguauucaauaaaucuguuuggaggaaaaa

SEQ ID NO: 141654 - RNA, 32 nt, Human
cuguauuccaauaaaguuuuacucauggacac

SEQ ID NO: 141655 - RNA, 32 nt, Human
cuguauuccagccuggacgacugagugagacc

SEQ ID NO: 141656 - RNA, 32 nt, Human
cuguauuccagccugggugacagagugagauc

SEQ ID NO: 141657 - RNA, 32 nt, Human
cuguauuccccuccuuccccugcuucauggaa

SEQ ID NO: 141658 - RNA, 32 nt, Human
cuguauuccugcucuuuuucugcugucacugu

SEQ ID NO: 141659 - RNA, 32 nt, Human
cuguauucucacugcuccaucuccugauguag

SEQ ID NO: 141660 - RNA, 32 nt, Human
cuguauucuccaggaaacuuguccuucuggaa

SEQ ID NO: 141661 - RNA, 19 nt, Human
cuguauucucuuuccuccc

SEQ ID NO: 141662 - RNA, 32 nt, Human
cuguauugcccaggcuggagugcaguggcgcg

SEQ ID NO: 141663 - RNA, 32 nt, Human
cuguauugcccaggcuggagugugguggcaca

SEQ ID NO: 141664 - RNA, 32 nt, Human
cuguauugcuguucucuuugaggcucuccaaa

SEQ ID NO: 141665 - RNA, 32 nt, Human
cuguauuuaaagaagaaagaaacaaaggcuga

SEQ ID NO: 141666 - RNA, 32 nt, Human
cuguauuuacuuggggugcucuucugugacac

SEQ ID NO: 141667 - RNA, 31 nt, Human
cuguauuucaauaaauuccuuguugauguac

SEQ ID NO: 141668 - RNA, 32 nt, Human
cuguauuucccuuaugauguccccuuuuugag

SEQ ID NO: 141669 - RNA, 32 nt, Human
cuguauuuccugcauuuccaucauccuaguaa

SEQ ID NO: 141670 - RNA, 23 nt, Human
cuguauuucuuugcccuaccuca

SEQ ID NO: 141671 - RNA, 32 nt, Human
cuguauuugccucaccccugcauggucggaaa

SEQ ID NO: 141672 - RNA, 32 nt, Human
cuguauuuggcuagcaaucugccuguaucucu

SEQ ID NO: 141673 - RNA, 32 nt, Human
cuguauuuggggagugggauguacaugggcgu

SEQ ID NO: 141674 - RNA, 32 nt, Human
cuguauuuuccuauuucccugccaucaucugc

SEQ ID NO: 141675 - RNA, 32 nt, Human
cuguauuuugacuuggaguaaggaugacuuuu

SEQ ID NO: 141676 - RNA, 32 nt, Human
cuguauuuugaggucugagucuucuggagcug

SEQ ID NO: 141677 - RNA, 32 nt, Human
cuguauuuuguuuugcaccugccauucauuug

SEQ ID NO: 141678 - RNA, 32 nt, Human
cuguauuuuucugucccugucuccuuagaaug

SEQ ID NO: 141679 - RNA, 32 nt, Human
cuguauuuuugguccauccaggaagcuagucc

SEQ ID NO: 141680 - RNA, 20 nt, Human
cugucaaaagugcaugaagg

SEQ ID NO: 141681 - RNA, 32 nt, Human
cugucaaacagccccaucucccggcauugagc

SEQ ID NO: 141682 - RNA, 32 nt, Human
cugucaaacuuugaccuguagaugcuguagca

SEQ ID NO: 141683 - RNA, 32 nt, Human
cugucaaaucuagcauugagguugcaguugaa

SEQ ID NO: 141684 - RNA, 32 nt, Human
cugucaaauuccaggugacaagaucuaugcac

SEQ ID NO: 141685 - RNA, 32 nt, Human
cugucaacaccagaguucaguguuuaaacaga

SEQ ID NO: 141686 - RNA, 32 nt, Human
cugucaacagaugggcugggcugggcuguggu

SEQ ID NO: 141687 - RNA, 32 nt, Human
cugucaaccaggccaccucuccuucagugucc

SEQ ID NO: 141688 - RNA, 24 nt, Human
cugucaaccaggccagagugcagu

SEQ ID NO: 141689 - RNA, 32 nt, Human
cugucaaccaggcuggagugcacuggcgcaau

SEQ ID NO: 141690 - RNA, 32 nt, Human
cugucaacccucuccacuucugggcugaagcc

SEQ ID NO: 141691 - RNA, 32 nt, Human
cugucaacccuuauuccacugccuuauuugac

SEQ ID NO: 141692 - RNA, 25 nt, Human
cugucaacgcagacuggagugcagu

SEQ ID NO: 141693 - RNA, 32 nt, Human
cugucaacuggauggaaacacaaauuucaugg

SEQ ID NO: 141694 - RNA, 32 nt, Human
cugucaagaaagagcaguagagggguguggcu

SEQ ID NO: 141695 - RNA, 32 nt, Human
cugucaagacuguguguguggauuucccaccc

SEQ ID NO: 141696 - RNA, 32 nt, Human
cugucaagaugcuggggucccugguguugagg

SEQ ID NO: 141697 - RNA, 26 nt, Human
cugucaagcaauggauaaacagcucu

SEQ ID NO: 141698 - RNA, 20 nt, Human
cugucaagcuggugucuuca

SEQ ID NO: 141699 - RNA, 31 nt, Human
cugucaagcuucaagaauaccagagaacuga

SEQ ID NO: 141700 - RNA, 32 nt, Human
cugucaaguagcugggauuacaggcgugugcc

SEQ ID NO: 141701 - RNA, 32 nt, Human
cugucaagucuccuguccuccuccuggagcag

SEQ ID NO: 141702 - RNA, 21 nt, Human
cugucaaguuccuuuggguua

SEQ ID NO: 141703 - RNA, 22 nt, Human
cugucaauaggcccguggguga

SEQ ID NO: 141704 - RNA, 32 nt, Human
cugucaaucuuucucccagccugccuccaagg

SEQ ID NO: 141705 - RNA, 32 nt, Human
cugucaaugccaccaguuggaccuccauacau

SEQ ID NO: 141706 - RNA, 32 nt, Human
cugucaauuacaggaaguacuggagaaaaugg

SEQ ID NO: 141707 - RNA, 32 nt, Human
cugucacaaggcaggaggagcugauaaugaac

SEQ ID NO: 141708 - RNA, 32 nt, Human
cugucacacaagcuggagggcaauggcgccau

SEQ ID NO: 141709 - RNA, 24 nt, Human
cugucacacaggcuggagggcagu

SEQ ID NO: 141710 - RNA, 24 nt, Human
cugucacacaggcuggagugcagu

SEQ ID NO: 141711 - RNA, 32 nt, Human
cugucacacaggcuggagugcaguggcacgau

SEQ ID NO: 141712 - RNA, 32 nt, Human
cugucacacaggcuggagugcaguggugugau

SEQ ID NO: 141713 - RNA, 32 nt, Human
cugucacacaugcacacaugugccaugcuggu

SEQ ID NO: 141714 - RNA, 23 nt, Human
cugucacacucccagcaccuagu

SEQ ID NO: 141715 - RNA, 32 nt, Human
cugucacacuucaguucaauuaaaucagaaug

SEQ ID NO: 141716 - RNA, 21 nt, Human
cugucacagcugccauccacu

SEQ ID NO: 141717 - RNA, 32 nt, Human
cugucacaggugcacacacucgcucaugcuca

SEQ ID NO: 141718 - RNA, 25 nt, Human
cugucacaucuuuuuguuucuucua

SEQ ID NO: 141719 - RNA, 32 nt, Human
cugucacauuagggauacaaaaaugaacaggc

SEQ ID NO: 141720 - RNA, 32 nt, Human
cugucaccaagcucacaguuccucgcccuggg

SEQ ID NO: 141721 - RNA, 23 nt, Human
cugucaccaagcuggacugcagu

SEQ ID NO: 141722 - RNA, 23 nt, Human
cugucaccaaggcuggagugcag

SEQ ID NO: 141723 - RNA, 32 nt, Human
cugucaccaaggcuggagugcagcggugugau

SEQ ID NO: 141724 - RNA, 32 nt, Human
cugucaccaaggcuggagugcaggggcacaau

SEQ ID NO: 141725 - RNA, 32 nt, Human
cugucaccaaggcuggagugcauuggugcaau

SEQ ID NO: 141726 - RNA, 23 nt, Human
cugucaccaaggcuuagugcagu

SEQ ID NO: 141727 - RNA, 21 nt, Human
cugucaccaccagcgccuggu

SEQ ID NO: 141728 - RNA, 32 nt, Human
cugucaccacccucugaugucccuucauuacu

SEQ ID NO: 141729 - RNA, 23 nt, Human
cugucaccagacuggagugcagu

SEQ ID NO: 141730 - RNA, 32 nt, Human
cugucaccagcugugugacuuugcugaaguca

SEQ ID NO: 141731 - RNA, 23 nt, Human
cugucaccaggccggagugcagu

SEQ ID NO: 141732 - RNA, 23 nt, Human
cugucaccaggcuagagugcagu

SEQ ID NO: 141733 - RNA, 23 nt, Human
cugucaccaggcuggaaugcagu

SEQ ID NO: 141734 - RNA, 23 nt, Human
cugucaccaggcuggagggcagu

SEQ ID NO: 141735 - RNA, 23 nt, Human
cugucaccaggcuggaguacagu

SEQ ID NO: 141736 - RNA, 22 nt, Human
cugucaccaggcuggagugcag

SEQ ID NO: 141737 - RNA, 23 nt, Human
cugucaccaggcuggagugcagu

SEQ ID NO: 141738 - RNA, 23 nt, Human
cugucaccaggcuguauuacagu

SEQ ID NO: 141739 - RNA, 32 nt, Human
cugucacccaagauggagugcaauggcacgau

SEQ ID NO: 141740 - RNA, 24 nt, Human
cugucacccaagcaggauugcagu

SEQ ID NO: 141741 - RNA, 32 nt, Human
cugucacccaagcuggaaugcaauggcacaau

SEQ ID NO: 141742 - RNA, 32 nt, Human
cugucacccaagcuggagugcacuggcaugau

SEQ ID NO: 141743 - RNA, 24 nt, Human
cugucacccaagcuggagugcagu

SEQ ID NO: 141744 - RNA, 32 nt, Human
cugucacccaagcuggagugcaguggcacgau

SEQ ID NO: 141745 - RNA, 32 nt, Human
cugucacccaagcuggagugcaguggugcaaa

SEQ ID NO: 141746 - RNA, 32 nt, Human
cugucacccaagcuggagugcaguggugcaau

SEQ ID NO: 141747 - RNA, 24 nt, Human
cugucacccaaggcggagugcagu

SEQ ID NO: 141748 - RNA, 32 nt, Human
cugucacccaaggcggagugcagugacgacau

SEQ ID NO: 141749 - RNA, 18 nt, Human
cugucacccaaggcuccu

SEQ ID NO: 141750 - RNA, 24 nt, Human
cugucacccaaguuggagugcagu

SEQ ID NO: 141751 - RNA, 32 nt, Human
cugucacccaaguuggagugcaguggccccgc

SEQ ID NO: 141752 - RNA, 32 nt, Human
cugucacccaccucucucuucucccccagauc

SEQ ID NO: 141753 - RNA, 24 nt, Human
cugucacccacgcuggagugcugu

SEQ ID NO: 141754 - RNA, 32 nt, Human
cugucacccacgcuggagugcugugaugcgau

SEQ ID NO: 141755 - RNA, 24 nt, Human
cugucacccagacuagagugcagu

SEQ ID NO: 141756 - RNA, 24 nt, Human
cugucacccagacuggaacacagu

SEQ ID NO: 141757 - RNA, 32 nt, Human
cugucacccagacuggaacacaguggcacgau

SEQ ID NO: 141758 - RNA, 22 nt, Human
cugucacccagacuggaguaca

SEQ ID NO: 141759 - RNA, 32 nt, Human
cugucacccagacuggagugcaauggcuugau

SEQ ID NO: 141760 - RNA, 23 nt, Human
cugucacccagacuggagugcag

SEQ ID NO: 141761 - RNA, 24 nt, Human
cugucacccagacuggagugcagu

SEQ ID NO: 141762 - RNA, 32 nt, Human
cugucacccagacuggagugcagugccacaau

SEQ ID NO: 141763 - RNA, 32 nt, Human
cugucacccagacuggagugcaguggcacaau

SEQ ID NO: 141764 - RNA, 32 nt, Human
cugucacccagacuggagugcaguggcacgau

SEQ ID NO: 141765 - RNA, 32 nt, Human
cugucacccagacuggagugcaguggcaugau

SEQ ID NO: 141766 - RNA, 32 nt, Human
cugucacccagacuggagugcaguggcgcgau

SEQ ID NO: 141767 - RNA, 32 nt, Human
cugucacccagacuggagugcaguggugcgau

SEQ ID NO: 141768 - RNA, 32 nt, Human
cugucacccagacuggagugcaguggugugau

SEQ ID NO: 141769 - RNA, 24 nt, Human
cugucacccagccuggaauguagu

SEQ ID NO: 141770 - RNA, 32 nt, Human
cugucacccagccuggaauguaguggcaucau

SEQ ID NO: 141771 - RNA, 32 nt, Human
cugucacccaggauggagugcaguguugugau

SEQ ID NO: 141772 - RNA, 24 nt, Human
cugucacccaggcaggagugcagu

SEQ ID NO: 141773 - RNA, 32 nt, Human
cugucacccaggcaggagugcaguggcacagu

SEQ ID NO: 141774 - RNA, 32 nt, Human
cugucacccaggccaaguucaauggugcaauc

SEQ ID NO: 141775 - RNA, 24 nt, Human
cugucacccaggccggagugcagu

SEQ ID NO: 141776 - RNA, 32 nt, Human
cugucacccaggccggagugcaguggcacaau

SEQ ID NO: 141777 - RNA, 32 nt, Human
cugucacccaggccggagugcaguggugcgau

SEQ ID NO: 141778 - RNA, 32 nt, Human
cugucacccaggccggagugcagugguguaau

SEQ ID NO: 141779 - RNA, 32 nt, Human
cugucacccaggcgggaguggugcaauggcuu

SEQ ID NO: 141780 - RNA, 32 nt, Human
cugucacccaggcgggaguuagguggcaugau

SEQ ID NO: 141781 - RNA, 24 nt, Human
cugucacccaggcuagaaugcagu

SEQ ID NO: 141782 - RNA, 32 nt, Human
cugucacccaggcuagagcgcaguggcaagau

SEQ ID NO: 141783 - RNA, 24 nt, Human
cugucacccaggcuagaggguggu

SEQ ID NO: 141784 - RNA, 24 nt, Human
cugucacccaggcuagaguacagu

SEQ ID NO: 141785 - RNA, 32 nt, Human
cugucacccaggcuagaguacagugggaacag

SEQ ID NO: 141786 - RNA, 22 nt, Human
cugucacccaggcuagagugca

SEQ ID NO: 141787 - RNA, 24 nt, Human
cugucacccaggcuagagugcaau

SEQ ID NO: 141788 - RNA, 32 nt, Human
cugucacccaggcuagagugcaauggcaccau

SEQ ID NO: 141789 - RNA, 32 nt, Human
cugucacccaggcuagagugcaauggcacgau

SEQ ID NO: 141790 - RNA, 32 nt, Human
cugucacccaggcuagagugcaauggcaugau

SEQ ID NO: 141791 - RNA, 24 nt, Human
cugucacccaggcuagagugcagu

SEQ ID NO: 141792 - RNA, 32 nt, Human
cugucacccaggcuagagugcaguagcacgau

SEQ ID NO: 141793 - RNA, 32 nt, Human
cugucacccaggcuagagugcaguggagcgau

SEQ ID NO: 141794 - RNA, 32 nt, Human
cugucacccaggcuagagugcaguggcgcgau

SEQ ID NO: 141795 - RNA, 24 nt, Human
cugucacccaggcugaacugcagu

SEQ ID NO: 141796 - RNA, 32 nt, Human
cugucacccaggcugaacugcaguggugugau

SEQ ID NO: 141797 - RNA, 24 nt, Human
cugucacccaggcugaagugcagu

SEQ ID NO: 141798 - RNA, 32 nt, Human
cugucacccaggcugaagugcagugcaggacc

SEQ ID NO: 141799 - RNA, 32 nt, Human
cugucacccaggcugaagugcaguggagcaau

SEQ ID NO: 141800 - RNA, 32 nt, Human
cugucacccaggcugaagugcagugguacaau

SEQ ID NO: 141801 - RNA, 22 nt, Human
cugucacccaggcugcagugca

SEQ ID NO: 141802 - RNA, 24 nt, Human
cugucacccaggcugcagugcaau

SEQ ID NO: 141803 - RNA, 32 nt, Human
cugucacccaggcugcagugcaauggcgcgau

SEQ ID NO: 141804 - RNA, 24 nt, Human
cugucacccaggcugcaguguagu

SEQ ID NO: 141805 - RNA, 32 nt, Human
cugucacccaggcugcaguguaguggugcaaa

SEQ ID NO: 141806 - RNA, 22 nt, Human
cugucacccaggcugcaguuca

SEQ ID NO: 141807 - RNA, 32 nt, Human
cugucacccaggcugcaguucacuggugugau

SEQ ID NO: 141808 - RNA, 32 nt, Human
cugucacccaggcugcuggaguacaguggcac

SEQ ID NO: 141809 - RNA, 24 nt, Human
cugucacccaggcuggaauccagu

SEQ ID NO: 141810 - RNA, 32 nt, Human
cugucacccaggcuggaauccaguggcacuau

SEQ ID NO: 141811 - RNA, 23 nt, Human
cugucacccaggcuggaaugacg

SEQ ID NO: 141812 - RNA, 32 nt, Human
cugucacccaggcuggaaugcaauggcacgau

SEQ ID NO: 141813 - RNA, 24 nt, Human
cugucacccaggcuggaaugcagu

SEQ ID NO: 141814 - RNA, 32 nt, Human
cugucacccaggcuggaaugcagugcaguggc

SEQ ID NO: 141815 - RNA, 32 nt, Human
cugucacccaggcuggaaugcaguggcacgau

SEQ ID NO: 141816 - RNA, 32 nt, Human
cugucacccaggcuggaaugcaguggcaugau

SEQ ID NO: 141817 - RNA, 32 nt, Human
cugucacccaggcuggaaugcaguggcgugau

SEQ ID NO: 141818 - RNA, 32 nt, Human
cugucacccaggcuggaaugcaguggugugau

SEQ ID NO: 141819 - RNA, 22 nt, Human
cugucacccaggcuggacugca

SEQ ID NO: 141820 - RNA, 24 nt, Human
cugucacccaggcuggacugcaau

SEQ ID NO: 141821 - RNA, 32 nt, Human
cugucacccaggcuggacugcaaugacgcgau

SEQ ID NO: 141822 - RNA, 32 nt, Human
cugucacccaggcuggagagcaauugcacaaa

SEQ ID NO: 141823 - RNA, 24 nt, Human
cugucacccaggcuggagagcagu

SEQ ID NO: 141824 - RNA, 32 nt, Human
cugucacccaggcuggagcacacuggugcgau

SEQ ID NO: 141825 - RNA, 24 nt, Human
cugucacccaggcuggagcgcagu

SEQ ID NO: 141826 - RNA, 32 nt, Human
cugucacccaggcuggagcgcaguggugugau

SEQ ID NO: 141827 - RNA, 32 nt, Human
cugucacccaggcuggagcguaauggcacaau

SEQ ID NO: 141828 - RNA, 19 nt, Human
cugucacccaggcuggagu

SEQ ID NO: 141829 - RNA, 22 nt, Human
cugucacccaggcuggaguaca

SEQ ID NO: 141830 - RNA, 24 nt, Human
cugucacccaggcuggaguacaau

SEQ ID NO: 141831 - RNA, 32 nt, Human
cugucacccaggcuggaguacaauagcgugau

SEQ ID NO: 141832 - RNA, 32 nt, Human
cugucacccaggcuggaguacaauggcgugau

SEQ ID NO: 141833 - RNA, 32 nt, Human
cugucacccaggcuggaguacacuggcacuau

SEQ ID NO: 141834 - RNA, 24 nt, Human
cugucacccaggcuggaguacagu

SEQ ID NO: 141835 - RNA, 32 nt, Human
cugucacccaggcuggaguacagugacacgac

SEQ ID NO: 141836 - RNA, 32 nt, Human
cugucacccaggcuggaguacaguggcacgau

SEQ ID NO: 141837 - RNA, 32 nt, Human
cugucacccaggcuggaguacaguggcauaau

SEQ ID NO: 141838 - RNA, 32 nt, Human
cugucacccaggcuggaguacaguggcaugau

SEQ ID NO: 141839 - RNA, 32 nt, Human
cugucacccaggcuggaguacaguggcgugau

SEQ ID NO: 141840 - RNA, 24 nt, Human
cugucacccaggcuggaguaccgg

SEQ ID NO: 141841 - RNA, 32 nt, Human
cugucacccaggcuggaguaccggugguggga

SEQ ID NO: 141842 - RNA, 24 nt, Human
cugucacccaggcuggaguauagu

SEQ ID NO: 141843 - RNA, 32 nt, Human
cugucacccaggcuggaguauaguggugugau

SEQ ID NO: 141844 - RNA, 22 nt, Human
cugucacccaggcuggagucca

SEQ ID NO: 141845 - RNA, 24 nt, Human
cugucacccaggcuggaguccaau

SEQ ID NO: 141846 - RNA, 32 nt, Human
cugucacccaggcuggaguccaauggggcggu

SEQ ID NO: 141847 - RNA, 24 nt, Human
cugucacccaggcuggagucuagu

SEQ ID NO: 141848 - RNA, 32 nt, Human
cugucacccaggcuggagucuagugucgugau

SEQ ID NO: 141849 - RNA, 20 nt, Human
cugucacccaggcuggagug

SEQ ID NO: 141850 - RNA, 24 nt, Human
cugucacccaggcuggagugaggu

SEQ ID NO: 141851 - RNA, 32 nt, Human
cugucacccaggcuggagugaggugguacaau

SEQ ID NO: 141852 - RNA, 32 nt, Human
cugucacccaggcuggagugaucucagcucac

SEQ ID NO: 141853 - RNA, 21 nt, Human
cugucacccaggcuggagugc

SEQ ID NO: 141854 - RNA, 22 nt, Human
cugucacccaggcuggagugca

SEQ ID NO: 141855 - RNA, 32 nt, Human
cugucacccaggcuggagugcaaaggugcaau

SEQ ID NO: 141856 - RNA, 24 nt, Human
cugucacccaggcuggagugcaau

SEQ ID NO: 141857 - RNA, 32 nt, Human
cugucacccaggcuggagugcaaugacgcaau

SEQ ID NO: 141858 - RNA, 32 nt, Human
cugucacccaggcuggagugcaaugcugcgau

SEQ ID NO: 141859 - RNA, 32 nt, Human
cugucacccaggcuggagugcaauggcaagau

SEQ ID NO: 141860 - RNA, 32 nt, Human
cugucacccaggcuggagugcaauggcacgau

SEQ ID NO: 141861 - RNA, 32 nt, Human
cugucacccaggcuggagugcaauggcaugau

SEQ ID NO: 141862 - RNA, 32 nt, Human
cugucacccaggcuggagugcaauggcauggu

SEQ ID NO: 141863 - RNA, 32 nt, Human
cugucacccaggcuggagugcaauggcauguu

SEQ ID NO: 141864 - RNA, 32 nt, Human
cugucacccaggcuggagugcaauggcgcgau

SEQ ID NO: 141865 - RNA, 32 nt, Human
cugucacccaggcuggagugcaauggcgugac

SEQ ID NO: 141866 - RNA, 32 nt, Human
cugucacccaggcuggagugcaauggcgugau

SEQ ID NO: 141867 - RNA, 32 nt, Human
cugucacccaggcuggagugcaaugggcacaa

SEQ ID NO: 141868 - RNA, 32 nt, Human
cugucacccaggcuggagugcaauggugagau

SEQ ID NO: 141869 - RNA, 32 nt, Human
cugucacccaggcuggagugcaauggugcaau

SEQ ID NO: 141870 - RNA, 32 nt, Human
cugucacccaggcuggagugcaauggugccau

SEQ ID NO: 141871 - RNA, 32 nt, Human
cugucacccaggcuggagugcaauggugcgau

SEQ ID NO: 141872 - RNA, 32 nt, Human
cugucacccaggcuggagugcacuggcuugau

SEQ ID NO: 141873 - RNA, 23 nt, Human
cugucacccaggcuggagugcag

SEQ ID NO: 141874 - RNA, 32 nt, Human
cugucacccaggcuggagugcagcaguugauc

SEQ ID NO: 141875 - RNA, 24 nt, Human
cugucacccaggcuggagugcagu

SEQ ID NO: 141876 - RNA, 32 nt, Human
cugucacccaggcuggagugcaguagcacgau

SEQ ID NO: 141877 - RNA, 32 nt, Human
cugucacccaggcuggagugcaguagcaugau

SEQ ID NO: 141878 - RNA, 32 nt, Human
cugucacccaggcuggagugcaguagcgcgau

SEQ ID NO: 141879 - RNA, 32 nt, Human
cugucacccaggcuggagugcaguagugcaau

SEQ ID NO: 141880 - RNA, 25 nt, Human
cugucacccaggcuggagugcagug

SEQ ID NO: 141881 - RNA, 32 nt, Human
cugucacccaggcuggagugcagugacaugau

SEQ ID NO: 141882 - RNA, 32 nt, Human
cugucacccaggcuggagugcagugacucagc

SEQ ID NO: 141883 - RNA, 32 nt, Human
cugucacccaggcuggagugcagugcacaauc

SEQ ID NO: 141884 - RNA, 32 nt, Human
cugucacccaggcuggagugcagugcugcgau

SEQ ID NO: 141885 - RNA, 32 nt, Human
cugucacccaggcuggagugcagugcugugau

SEQ ID NO: 141886 - RNA, 32 nt, Human
cugucacccaggcuggagugcaguggagcaau

SEQ ID NO: 141887 - RNA, 32 nt, Human
cugucacccaggcuggagugcaguggcacaac

SEQ ID NO: 141888 - RNA, 32 nt, Human
cugucacccaggcuggagugcaguggcacaau

SEQ ID NO: 141889 - RNA, 32 nt, Human
cugucacccaggcuggagugcaguggcaccac

SEQ ID NO: 141890 - RNA, 32 nt, Human
cugucacccaggcuggagugcaguggcaccau

SEQ ID NO: 141891 - RNA, 32 nt, Human
cugucacccaggcuggagugcaguggcacgau

SEQ ID NO: 141892 - RNA, 32 nt, Human
cugucacccaggcuggagugcaguggcaugau

SEQ ID NO: 141893 - RNA, 32 nt, Human
cugucacccaggcuggagugcaguggcccaau

SEQ ID NO: 141894 - RNA, 32 nt, Human
cugucacccaggcuggagugcaguggcgaaau

SEQ ID NO: 141895 - RNA, 32 nt, Human
cugucacccaggcuggagugcaguggcgcaau

SEQ ID NO: 141896 - RNA, 32 nt, Human
cugucacccaggcuggagugcaguggcgccau

SEQ ID NO: 141897 - RNA, 32 nt, Human
cugucacccaggcuggagugcaguggcgcgau

SEQ ID NO: 141898 - RNA, 32 nt, Human
cugucacccaggcuggagugcaguggcgugau

SEQ ID NO: 141899 - RNA, 32 nt, Human
cugucacccaggcuggagugcaguggcuugau

SEQ ID NO: 141900 - RNA, 32 nt, Human
cugucacccaggcuggagugcagugguacaau

SEQ ID NO: 141901 - RNA, 32 nt, Human
cugucacccaggcuggagugcagugguacagu

SEQ ID NO: 141902 - RNA, 32 nt, Human
cugucacccaggcuggagugcagugguaugac

SEQ ID NO: 141903 - RNA, 32 nt, Human
cugucacccaggcuggagugcagugguaugau

SEQ ID NO: 141904 - RNA, 32 nt, Human
cugucacccaggcuggagugcaguggugacag

SEQ ID NO: 141905 - RNA, 32 nt, Human
cugucacccaggcuggagugcaguggugcaau

SEQ ID NO: 141906 - RNA, 32 nt, Human
cugucacccaggcuggagugcaguggugcagu

SEQ ID NO: 141907 - RNA, 32 nt, Human
cugucacccaggcuggagugcaguggugcgac

SEQ ID NO: 141908 - RNA, 32 nt, Human
cugucacccaggcuggagugcaguggugcgag

SEQ ID NO: 141909 - RNA, 32 nt, Human
cugucacccaggcuggagugcaguggugcgau

SEQ ID NO: 141910 - RNA, 32 nt, Human
cugucacccaggcuggagugcaguggugugaa

SEQ ID NO: 141911 - RNA, 32 nt, Human
cugucacccaggcuggagugcaguggugugac

SEQ ID NO: 141912 - RNA, 32 nt, Human
cugucacccaggcuggagugcaguggugugag

SEQ ID NO: 141913 - RNA, 32 nt, Human
cugucacccaggcuggagugcaguggugugau

SEQ ID NO: 141914 - RNA, 32 nt, Human
cugucacccaggcuggagugcagugucacaau

SEQ ID NO: 141915 - RNA, 32 nt, Human
cugucacccaggcuggagugcaguguugcagu

SEQ ID NO: 141916 - RNA, 32 nt, Human
cugucacccaggcuggagugccauagugugau

SEQ ID NO: 141917 - RNA, 32 nt, Human
cugucacccaggcuggagugccauggcaucau

SEQ ID NO: 141918 - RNA, 24 nt, Human
cugucacccaggcuggagugccgu

SEQ ID NO: 141919 - RNA, 32 nt, Human
cugucacccaggcuggagugccguggcacgau

SEQ ID NO: 141920 - RNA, 22 nt, Human
cugucacccaggcuggagugcg

SEQ ID NO: 141921 - RNA, 24 nt, Human
cugucacccaggcuggagugcgau

SEQ ID NO: 141922 - RNA, 32 nt, Human
cugucacccaggcuggagugcgauggcgcgau

SEQ ID NO: 141923 - RNA, 24 nt, Human
cugucacccaggcuggagugcggu

SEQ ID NO: 141924 - RNA, 32 nt, Human
cugucacccaggcuggagugcgguggcgcaau

SEQ ID NO: 141925 - RNA, 32 nt, Human
cugucacccaggcuggagugcgguggugcaau

SEQ ID NO: 141926 - RNA, 32 nt, Human
cugucacccaggcuggagugcuauggcucgau

SEQ ID NO: 141927 - RNA, 24 nt, Human
cugucacccaggcuggagugcugu

SEQ ID NO: 141928 - RNA, 32 nt, Human
cugucacccaggcuggagugcuguggugcaau

SEQ ID NO: 141929 - RNA, 24 nt, Human
cugucacccaggcuggaguguagu

SEQ ID NO: 141930 - RNA, 32 nt, Human
cugucacccaggcuggaguguaguggcaugau

SEQ ID NO: 141931 - RNA, 32 nt, Human
cugucacccaggcuggaguguaguggugcaau

SEQ ID NO: 141932 - RNA, 32 nt, Human
cugucacccaggcuggaguguaguggugcagu

SEQ ID NO: 141933 - RNA, 32 nt, Human
cugucacccaggcuggaguguagugguguaau

SEQ ID NO: 141934 - RNA, 32 nt, Human
cugucacccaggcuggagugugcaguggcgcg

SEQ ID NO: 141935 - RNA, 32 nt, Human
cugucacccaggcuggaguuauagugacguga

SEQ ID NO: 141936 - RNA, 24 nt, Human
cugucacccaggcuggaguucagu

SEQ ID NO: 141937 - RNA, 32 nt, Human
cugucacccaggcuggaguucaguggugcgac

SEQ ID NO: 141938 - RNA, 22 nt, Human
cugucacccaggcuggcgugca

SEQ ID NO: 141939 - RNA, 32 nt, Human
cugucacccaggcuggcgugcaauaguucaau

SEQ ID NO: 141940 - RNA, 32 nt, Human
cugucacccaggcuggcgugcaauggcgcagu

SEQ ID NO: 141941 - RNA, 32 nt, Human
cugucacccaggcugggaauugcaguggcaca

SEQ ID NO: 141942 - RNA, 24 nt, Human
cugucacccaggcugggaugcagu

SEQ ID NO: 141943 - RNA, 32 nt, Human
cugucacccaggcugggaugcaguggcuucac

SEQ ID NO: 141944 - RNA, 32 nt, Human
cugucacccaggcuggggcgcaauggcacgau

SEQ ID NO: 141945 - RNA, 24 nt, Human
cugucacccaggcugggguacggu

SEQ ID NO: 141946 - RNA, 32 nt, Human
cugucacccaggcugggguacgguggcaugau

SEQ ID NO: 141947 - RNA, 24 nt, Human
cugucacccaggcuggggugcagu

SEQ ID NO: 141948 - RNA, 32 nt, Human
cugucacccaggcuggggugcaguggcgcgau

SEQ ID NO: 141949 - RNA, 32 nt, Human
cugucacccaggcuggggugcaguggcgugau

SEQ ID NO: 141950 - RNA, 32 nt, Human
cugucacccaggcuggugugcaggggugcggu

SEQ ID NO: 141951 - RNA, 32 nt, Human
cugucacccaggcuguaguacaguggugccau

SEQ ID NO: 141952 - RNA, 24 nt, Human
cugucacccaggcuguagugcagu

SEQ ID NO: 141953 - RNA, 32 nt, Human
cugucacccaggcuguagugcaguggcauaau

SEQ ID NO: 141954 - RNA, 24 nt, Human
cugucacccaggcuguaguggagu

SEQ ID NO: 141955 - RNA, 32 nt, Human
cugucacccaggcuguaguggaguggugugac

SEQ ID NO: 141956 - RNA, 32 nt, Human
cugucacccaggcugucguaaguggcaaucau

SEQ ID NO: 141957 - RNA, 24 nt, Human
cugucacccaggcuugacuacagu

SEQ ID NO: 141958 - RNA, 24 nt, Human
cugucacccaggcuugagugcagu

SEQ ID NO: 141959 - RNA, 32 nt, Human
cugucacccaggcuugagugcaguggugcgau

SEQ ID NO: 141960 - RNA, 32 nt, Human
cugucacccagguggcuggaguacaguggccu

SEQ ID NO: 141961 - RNA, 24 nt, Human
cugucacccagguucgaguucagu

SEQ ID NO: 141962 - RNA, 32 nt, Human
cugucacccagguuggagugcagcaggggcau

SEQ ID NO: 141963 - RNA, 24 nt, Human
cugucacccagguuggagugcagu

SEQ ID NO: 141964 - RNA, 32 nt, Human
cugucacccagguuggagugcaguggcgugau

SEQ ID NO: 141965 - RNA, 32 nt, Human
cugucacccagguuggagugcaguggugugau

SEQ ID NO: 141966 - RNA, 32 nt, Human
cugucacccagguuggagugcauugguguggu

SEQ ID NO: 141967 - RNA, 32 nt, Human
cugucacccagguuggagugccauggcaugau

SEQ ID NO: 141968 - RNA, 18 nt, Human
cugucacccaguccccau

SEQ ID NO: 141969 - RNA, 24 nt, Human
cugucacccagucuggagugcagu

SEQ ID NO: 141970 - RNA, 32 nt, Human
cugucacccagucuggagugcaguggcaaaau

SEQ ID NO: 141971 - RNA, 32 nt, Human
cugucacccagucuggagugcaguggugugau

SEQ ID NO: 141972 - RNA, 32 nt, Human
cugucacccagucuggaguggaguggcauaau

SEQ ID NO: 141973 - RNA, 24 nt, Human
cugucacccaguuuggagugcagu

SEQ ID NO: 141974 - RNA, 32 nt, Human
cugucacccaguuuggagugcaguggugcagu

SEQ ID NO: 141975 - RNA, 24 nt, Human
cugucacccauccuagagugcagu

SEQ ID NO: 141976 - RNA, 32 nt, Human
cugucacccauccuggagugcaguagugugau

SEQ ID NO: 141977 - RNA, 22 nt, Human
cugucacccauucuggaguaca

SEQ ID NO: 141978 - RNA, 32 nt, Human
cugucacccccaggccagagugcaguggugca

SEQ ID NO: 141979 - RNA, 32 nt, Human
cugucacccccaggccagagugcaguggugcg

SEQ ID NO: 141980 - RNA, 32 nt, Human
cugucaccccggcuggagugcaguggugugau

SEQ ID NO: 141981 - RNA, 24 nt, Human
cugucacccgagcuggagugcagu

SEQ ID NO: 141982 - RNA, 32 nt, Human
cugucacccgagcuggagugcaguggugcagu

SEQ ID NO: 141983 - RNA, 32 nt, Human
cugucacccgggcuggagugcaauggcucgau

SEQ ID NO: 141984 - RNA, 24 nt, Human
cugucacccgggcuggagugcagu

SEQ ID NO: 141985 - RNA, 32 nt, Human
cugucacccgggcuggagugcaguggcgccau

SEQ ID NO: 141986 - RNA, 32 nt, Human
cugucacccgggcuggagugcaguggcgcgau

SEQ ID NO: 141987 - RNA, 32 nt, Human
cugucacccgggcuggagugcaguggcgugau

SEQ ID NO: 141988 - RNA, 32 nt, Human
cugucacccgggcuggagugcaguggugcgau

SEQ ID NO: 141989 - RNA, 32 nt, Human
cugucacccgggcuggagugcuguggcuugau

SEQ ID NO: 141990 - RNA, 22 nt, Human
cugucacccgggcuggagugua

SEQ ID NO: 141991 - RNA, 32 nt, Human
cugucacccgggcuggaguguaacguggcaug

SEQ ID NO: 141992 - RNA, 32 nt, Human
cugucacccuagcuauaccagcagaaaaccug

SEQ ID NO: 141993 - RNA, 21 nt, Human
cugucacccuccacaccuggu

SEQ ID NO: 141994 - RNA, 32 nt, Human
cugucacccugacugcaggaggcacagggacu

SEQ ID NO: 141995 - RNA, 32 nt, Human
cugucacccugauuucagacuucuggccucca

SEQ ID NO: 141996 - RNA, 32 nt, Human
cugucacccugccuugugccccaggcauccuc

SEQ ID NO: 141997 - RNA, 32 nt, Human
cugucacccuggcuggagugcgguggcgauca

SEQ ID NO: 141998 - RNA, 20 nt, Human
cugucacccuuucugccuug

SEQ ID NO: 141999 - RNA, 24 nt, Human
cugucaccgaggcuagaguacagu

SEQ ID NO: 142000 - RNA, 24 nt, Human
cugucaccgaggcuggagugcagu

SEQ ID NO: 142001 - RNA, 32 nt, Human
cugucaccgaggcuggagugcaguggcgcgau

SEQ ID NO: 142002 - RNA, 32 nt, Human
cugucaccgagguuggagugcagugguaugau

SEQ ID NO: 142003 - RNA, 19 nt, Human
cugucaccgcugccuccau

SEQ ID NO: 142004 - RNA, 24 nt, Human
cugucaccuaggcuagagggcagu

SEQ ID NO: 142005 - RNA, 24 nt, Human
cugucaccuaggcugcagugcagu

SEQ ID NO: 142006 - RNA, 24 nt, Human
cugucaccuaggcuggaaugcagu

SEQ ID NO: 142007 - RNA, 32 nt, Human
cugucaccuaggcuggaaugcaguggugcaau

SEQ ID NO: 142008 - RNA, 32 nt, Human
cugucaccuaggcuggagggcaggguugagau

SEQ ID NO: 142009 - RNA, 24 nt, Human
cugucaccuaggcuggagugcagu

SEQ ID NO: 142010 - RNA, 32 nt, Human
cugucaccuaggcuggagugcaguggcacaau

SEQ ID NO: 142011 - RNA, 32 nt, Human
cugucaccuaggcuggagugcaguggcacagu

SEQ ID NO: 142012 - RNA, 32 nt, Human
cugucaccuaggcuggagugcaguggcacgau

SEQ ID NO: 142013 - RNA, 32 nt, Human
cugucaccuaggcuggagugcaguggcaugau

SEQ ID NO: 142014 - RNA, 32 nt, Human
cugucaccuaggcuggagugcaguggcgcaau

SEQ ID NO: 142015 - RNA, 32 nt, Human
cugucaccuaggcuggagugcaguggggcaau

SEQ ID NO: 142016 - RNA, 32 nt, Human
cugucaccuaggcuggagugcagugguaaauc

SEQ ID NO: 142017 - RNA, 32 nt, Human
cugucaccuaggcuggagugcaguggugcaau

SEQ ID NO: 142018 - RNA, 32 nt, Human
cugucaccuaggcuggaguguagugacaugau

SEQ ID NO: 142019 - RNA, 32 nt, Human
cugucaccuaggcuggaguugcagugguuuga

SEQ ID NO: 142020 - RNA, 22 nt, Human
cugucaccuaggcuggauugca

SEQ ID NO: 142021 - RNA, 32 nt, Human
cugucaccuaggcuggauugcaauggugcaau

SEQ ID NO: 142022 - RNA, 32 nt, Human
cugucaccuaggguggagugcaguggcacaau

SEQ ID NO: 142023 - RNA, 24 nt, Human
cugucaccuagguuggagugcagu

SEQ ID NO: 142024 - RNA, 23 nt, Human
cugucaccuagugcggaacaagu

SEQ ID NO: 142025 - RNA, 19 nt, Human
cugucaccuauagagugca

SEQ ID NO: 142026 - RNA, 16 nt, Human
cugucaccuccacuug

SEQ ID NO: 142027 - RNA, 27 nt, Human
cugucaccucggccucccacacccggu

SEQ ID NO: 142028 - RNA, 32 nt, Human
cugucaccucugcuccacaccugaccaguggc

SEQ ID NO: 142029 - RNA, 32 nt, Human
cugucaccuggcugaagaccugcagccucgga

SEQ ID NO: 142030 - RNA, 32 nt, Human
cugucaccugggagguggggcagggauggugu

SEQ ID NO: 142031 - RNA, 24 nt, Human
cugucaccugggcuggaguccagu

SEQ ID NO: 142032 - RNA, 22 nt, Human
cugucaccugguugaagugcag

SEQ ID NO: 142033 - RNA, 32 nt, Human
cugucaccuuccuguauuuccacagagcaugc

SEQ ID NO: 142034 - RNA, 32 nt, Human
cugucaccuugaucuuggacuuccagccucaa

SEQ ID NO: 142035 - RNA, 32 nt, Human
cugucaccuuguagaagcucaaguguggaaaa

SEQ ID NO: 142036 - RNA, 32 nt, Human
cugucaccuuuucaagccccaggcuggcugcu

SEQ ID NO: 142037 - RNA, 32 nt, Human
cugucacgccuguaaucccaguacuuugggag

SEQ ID NO: 142038 - RNA, 32 nt, Human
cugucacgcugguaccacagucugacuugggc

SEQ ID NO: 142039 - RNA, 32 nt, Human
cugucacggcugucuggccugccccuuugucc

SEQ ID NO: 142040 - RNA, 32 nt, Human
cugucacggggcggggugaggggagggagagc

SEQ ID NO: 142041 - RNA, 32 nt, Human
cugucacggucaaccagagccugcugagcccc

SEQ ID NO: 142042 - RNA, 32 nt, Human
cugucacuaauugcgagaaugauggaauucug

SEQ ID NO: 142043 - RNA, 32 nt, Human
cugucacuauagauuaguuuacauuuucuaga

SEQ ID NO: 142044 - RNA, 24 nt, Human
cugucacucaaucuggaaugcagu

SEQ ID NO: 142045 - RNA, 24 nt, Human
cugucacucaggcuagagugcagu

SEQ ID NO: 142046 - RNA, 24 nt, Human
cugucacucaggcugcagugcagu

SEQ ID NO: 142047 - RNA, 24 nt, Human
cugucacucaggcuggaaugcagu

SEQ ID NO: 142048 - RNA, 32 nt, Human
cugucacucaggcuggaaugcaguggcgcgau

SEQ ID NO: 142049 - RNA, 32 nt, Human
cugucacucaggcuggagcacaguggugugau

SEQ ID NO: 142050 - RNA, 24 nt, Human
cugucacucaggcuggaguacagu

SEQ ID NO: 142051 - RNA, 32 nt, Human
cugucacucaggcuggaguacaguggcacaau

SEQ ID NO: 142052 - RNA, 32 nt, Human
cugucacucaggcuggaguacaguggugccau

SEQ ID NO: 142053 - RNA, 22 nt, Human
cugucacucaggcuggagugca

SEQ ID NO: 142054 - RNA, 24 nt, Human
cugucacucaggcuggagugcaau

SEQ ID NO: 142055 - RNA, 32 nt, Human
cugucacucaggcuggagugcaaugacgugau

SEQ ID NO: 142056 - RNA, 24 nt, Human
cugucacucaggcuggagugcagu

SEQ ID NO: 142057 - RNA, 32 nt, Human
cugucacucaggcuggagugcaguggcgcgau

SEQ ID NO: 142058 - RNA, 32 nt, Human
cugucacucaggcuggagugcaguggcgugau

SEQ ID NO: 142059 - RNA, 32 nt, Human
cugucacucaggcuggagugcagugguauaau

SEQ ID NO: 142060 - RNA, 24 nt, Human
cugucacucaggcuggagugcggu

SEQ ID NO: 142061 - RNA, 32 nt, Human
cugucacucaggcuggagugcggugguauaau

SEQ ID NO: 142062 - RNA, 32 nt, Human
cugucacucaugcuggagugcaguggcgugau

SEQ ID NO: 142063 - RNA, 32 nt, Human
cugucacuccauuuggaaaauguucaccugca

SEQ ID NO: 142064 - RNA, 32 nt, Human
cugucacucuaaccucuccagcuuaucuaaca

SEQ ID NO: 142065 - RNA, 32 nt, Human
cugucacucucaucuguugcuuuccauucaca

SEQ ID NO: 142066 - RNA, 24 nt, Human
cugucacugaggcuggagugcagu

SEQ ID NO: 142067 - RNA, 32 nt, Human
cugucacugaggcuggagugcaguggcgcaau

SEQ ID NO: 142068 - RNA, 32 nt, Human
cugucacugcagcugccccugcccugugccgu

SEQ ID NO: 142069 - RNA, 32 nt, Human
cugucacugcucuccccuggcuacugggagga

SEQ ID NO: 142070 - RNA, 32 nt, Human
cugucacuguagcugcucccguagggucguug

SEQ ID NO: 142071 - RNA, 32 nt, Human
cugucacuguguuuggaacagcucccucaguu

SEQ ID NO: 142072 - RNA, 32 nt, Human
cugucacuuaggcuggagugcaguggcguggu

SEQ ID NO: 142073 - RNA, 32 nt, Human
cugucacuugcuggcugugaaaccaggacaag

SEQ ID NO: 142074 - RNA, 32 nt, Human
cugucacuuggguuggagugcaguugcaggau

SEQ ID NO: 142075 - RNA, 32 nt, Human
cugucacuuuugcuccgaagcuacuucuccac

SEQ ID NO: 142076 - RNA, 32 nt, Human
cugucagaauccaaccuggcuuuaugcaccua

SEQ ID NO: 142077 - RNA, 32 nt, Human
cugucagagaggaggaaagcaggcauuugauu

SEQ ID NO: 142078 - RNA, 32 nt, Human
cugucagagccgcggcggcgaacgaggcgcag

SEQ ID NO: 142079 - RNA, 32 nt, Human
cugucagaggcuccauggaggccucucaaguc

SEQ ID NO: 142080 - RNA, 32 nt, Human
cugucagagucacacggggcucaguggacggc

SEQ ID NO: 142081 - RNA, 32 nt, Human
cugucagagugaacagcaccgcgagacaggcc

SEQ ID NO: 142082 - RNA, 32 nt, Human
cugucagauccaggagcuccaguguccugagc

SEQ ID NO: 142083 - RNA, 20 nt, Human
cugucagaucccuggcugcu

SEQ ID NO: 142084 - RNA, 22 nt, Human
cugucagcacucuccagcauca

SEQ ID NO: 142085 - RNA, 23 nt, Human
cugucagcagaugggggaccccu

SEQ ID NO: 142086 - RNA, 32 nt, Human
cugucagcagaugggggaccccugccagaguc

SEQ ID NO: 142087 - RNA, 18 nt, Human
cugucagcagccugcagg

SEQ ID NO: 142088 - RNA, 20 nt, Human
cugucagcaggcagugaccc

SEQ ID NO: 142089 - RNA, 32 nt, Human
cugucagcauguuguuguugaaguguggaguu

SEQ ID NO: 142090 - RNA, 32 nt, Human
cugucagcauugaaggaacucucaccuccgug

SEQ ID NO: 142091 - RNA, 32 nt, Human
cugucagccaggcuggagugcaauggcaugau

SEQ ID NO: 142092 - RNA, 32 nt, Human
cugucagccaggcuggagugugguggcacaau

SEQ ID NO: 142093 - RNA, 32 nt, Human
cugucagcccugggccaggcuugggugggguu

SEQ ID NO: 142094 - RNA, 32 nt, Human
cugucagccgugcuguugaauguggcuguggc

SEQ ID NO: 142095 - RNA, 24 nt, Human
cugucagcgacgugaggugucccu

SEQ ID NO: 142096 - RNA, 21 nt, Human
cugucagcgccggcagccccu

SEQ ID NO: 142097 - RNA, 32 nt, Human
cugucagcuccaagcggaagauuuccccagcu

SEQ ID NO: 142098 - RNA, 22 nt, Human
cugucagcucuagaggcacccu

SEQ ID NO: 142099 - RNA, 32 nt, Human
cugucagcucuauucccaucaccugcuccacc

SEQ ID NO: 142100 - RNA, 32 nt, Human
cugucagcugaggaggucgggcggggcagagg

SEQ ID NO: 142101 - RNA, 32 nt, Human
cugucagcugcaagguacucuggugagucacc

SEQ ID NO: 142102 - RNA, 32 nt, Human
cugucagcuggguuuacauaccagucccauuc

SEQ ID NO: 142103 - RNA, 32 nt, Human
cugucagcuucucaaaaaucaaagagauguaa

SEQ ID NO: 142104 - RNA, 32 nt, Human
cugucagcuuuccugguccucuccuuacuucu

SEQ ID NO: 142105 - RNA, 32 nt, Human
cugucagcuuucucccccaggguucugggcag

SEQ ID NO: 142106 - RNA, 32 nt, Human
cugucaggacaggcuagccaccagagacugac

SEQ ID NO: 142107 - RNA, 18 nt, Human
cugucaggaccucuggcc

SEQ ID NO: 142108 - RNA, 32 nt, Human
cugucaggauggcagaggagcaggaguucacc

SEQ ID NO: 142109 - RNA, 32 nt, Human
cugucaggccucaccccuccccugggacuuuc

SEQ ID NO: 142110 - RNA, 21 nt, Human
cugucaggccugaaggugucc

SEQ ID NO: 142111 - RNA, 32 nt, Human
cugucaggcucuggcccuugccuuuguggccu

SEQ ID NO: 142112 - RNA, 21 nt, Human
cugucaggcugcgcuggguca

SEQ ID NO: 142113 - RNA, 32 nt, Human
cugucagggaacguggguggaggcagagagac

SEQ ID NO: 142114 - RNA, 32 nt, Human
cugucagggagaggauggcagauggaggcauc

SEQ ID NO: 142115 - RNA, 32 nt, Human
cugucagggaggacgugagcacuucacuuuca

SEQ ID NO: 142116 - RNA, 32 nt, Human
cugucagggccagcuccucuugaaagacagcc

SEQ ID NO: 142117 - RNA, 32 nt, Human
cugucaggucaccagugagcagaucaaagccg

SEQ ID NO: 142118 - RNA, 32 nt, Human
cugucaggucguagaggcgagcagggaccagc

SEQ ID NO: 142119 - RNA, 32 nt, Human
cugucaggugaagucuucagccucccacagcg

SEQ ID NO: 142120 - RNA, 19 nt, Human
cugucaggugugcaugaag

SEQ ID NO: 142121 - RNA, 32 nt, Human
cugucagucaaaggaaucaagauuuaaguuua

SEQ ID NO: 142122 - RNA, 32 nt, Human
cugucagugccuauggauuauggcagggaaag

SEQ ID NO: 142123 - RNA, 32 nt, Human
cugucagugccuggaagcuggaaaggcaauga

SEQ ID NO: 142124 - RNA, 32 nt, Human
cugucagugggagcagcugagcugcagcuaca

SEQ ID NO: 142125 - RNA, 32 nt, Human
cugucauaaaguggguccaagcaggaggagac

SEQ ID NO: 142126 - RNA, 25 nt, Human
cugucauaacuuuuuauuucugcua

SEQ ID NO: 142127 - RNA, 32 nt, Human
cugucauacguaugggaccuacacuuaaucua

SEQ ID NO: 142128 - RNA, 32 nt, Human
cugucauaucaauugcuggaaaaugcuaugau

SEQ ID NO: 142129 - RNA, 32 nt, Human
cugucauauggcuccucugucaccagccccag

SEQ ID NO: 142130 - RNA, 32 nt, Human
cugucaucaagcaauucacugcaucccucugu

SEQ ID NO: 142131 - RNA, 32 nt, Human
cugucaucagaggcagccuuccaggcacagcu

SEQ ID NO: 142132 - RNA, 32 nt, Human
cugucaucagcuuucaccuuggauuaucguga

SEQ ID NO: 142133 - RNA, 23 nt, Human
cugucaucaggcuggagugcagu

SEQ ID NO: 142134 - RNA, 32 nt, Human
cugucaucauggaggucauacaugcauacaaa

SEQ ID NO: 142135 - RNA, 24 nt, Human
cugucauccaaacuggagugcagu

SEQ ID NO: 142136 - RNA, 32 nt, Human
cugucauccaaacuggagugcaguggcacaau

SEQ ID NO: 142137 - RNA, 24 nt, Human
cugucauccaggcuagagugcagu

SEQ ID NO: 142138 - RNA, 32 nt, Human
cugucauccaggcuggaggguaguggcgugac

SEQ ID NO: 142139 - RNA, 24 nt, Human
cugucauccaggcuggagugcagu

SEQ ID NO: 142140 - RNA, 32 nt, Human
cugucauccaggcuggagugcagugaugcgau

SEQ ID NO: 142141 - RNA, 32 nt, Human
cugucauccaggcuggagugcaguggcaaaau

SEQ ID NO: 142142 - RNA, 32 nt, Human
cugucauccaggcuggagugcaguggcacgau

SEQ ID NO: 142143 - RNA, 32 nt, Human
cugucauccaggcuggagugcaguggcaugau

SEQ ID NO: 142144 - RNA, 32 nt, Human
cugucauccaggcuggagugcaguggcgcaau

SEQ ID NO: 142145 - RNA, 32 nt, Human
cugucauccaggcuggagugcaguggugcaau

SEQ ID NO: 142146 - RNA, 32 nt, Human
cugucauccaggcuggagugcaguggugugau

SEQ ID NO: 142147 - RNA, 32 nt, Human
cugucauccagguuggagugcaguggcaugau

SEQ ID NO: 142148 - RNA, 32 nt, Human
cugucauccccaggggucauaggauaucuaca

SEQ ID NO: 142149 - RNA, 24 nt, Human
cugucaucccggcuaaaguacagu

SEQ ID NO: 142150 - RNA, 32 nt, Human
cugucaucccuuugcagagguggaaacaaagc

SEQ ID NO: 142151 - RNA, 32 nt, Human
cugucauccgagugguggaaaccuggcugccu

SEQ ID NO: 142152 - RNA, 32 nt, Human
cugucauccguccuuggcucaggauuuggaga

SEQ ID NO: 142153 - RNA, 24 nt, Human
cugucaucuaggcuggagugcagu

SEQ ID NO: 142154 - RNA, 32 nt, Human
cugucaucuaggcuggagugcaguggugugau

SEQ ID NO: 142155 - RNA, 32 nt, Human
cugucaucugaauuugcccugggaaaccccuu

SEQ ID NO: 142156 - RNA, 19 nt, Human
cugucaucuguccuggcca

SEQ ID NO: 142157 - RNA, 32 nt, Human
cugucaugacaagccucugugauguuacauau

SEQ ID NO: 142158 - RNA, 21 nt, Human
cugucaugagugcaugaagga

SEQ ID NO: 142159 - RNA, 24 nt, Human
cugucaugcagacuggagugcagu

SEQ ID NO: 142160 - RNA, 24 nt, Human
cugucaugcaggcuggagugcggu

SEQ ID NO: 142161 - RNA, 32 nt, Human
cugucaugcaggcuggagugcgguggugcgau

SEQ ID NO: 142162 - RNA, 32 nt, Human
cugucaugcccagcuuggagugccacauggcc

SEQ ID NO: 142163 - RNA, 32 nt, Human
cugucaugcccagcuuggagugccacguggcc

SEQ ID NO: 142164 - RNA, 32 nt, Human
cugucaugcccuuuuugugcaucucuauccug

SEQ ID NO: 142165 - RNA, 32 nt, Human
cugucaugcgguuuccaaggugcacauuuucc

SEQ ID NO: 142166 - RNA, 32 nt, Human
cugucauggcaacaggaggcugugcugaccuc

SEQ ID NO: 142167 - RNA, 32 nt, Human
cugucauggcacggaagcuaggagugcugcug

SEQ ID NO: 142168 - RNA, 32 nt, Human
cugucaugguuucuguuuggccuguguucaua

SEQ ID NO: 142169 - RNA, 32 nt, Human
cugucauguccuccacaccacacccagugagg

SEQ ID NO: 142170 - RNA, 32 nt, Human
cugucauguguagcaaucuuuccaaauuuuug

SEQ ID NO: 142171 - RNA, 24 nt, Human
cugucauucaggcaagagugcagu

SEQ ID NO: 142172 - RNA, 24 nt, Human
cugucauucaggcuggagugcagu

SEQ ID NO: 142173 - RNA, 32 nt, Human
cugucauucaggcuggagugcaguggugcaau

SEQ ID NO: 142174 - RNA, 32 nt, Human
cugucauucaggcuggagugcaguggugcgau

SEQ ID NO: 142175 - RNA, 32 nt, Human
cugucauucccauuccuuuucguuuagaauca

SEQ ID NO: 142176 - RNA, 32 nt, Human
cugucauucccucagcaacuugccuauacuug

SEQ ID NO: 142177 - RNA, 32 nt, Human
cugucauucccuggcccucuguccucagcaau

SEQ ID NO: 142178 - RNA, 16 nt, Human
cugucauuccugcagg

SEQ ID NO: 142179 - RNA, 22 nt, Human
cugucauucucuccccgggcca

SEQ ID NO: 142180 - RNA, 32 nt, Human
cugucauugcugaaguuuauucucagaucugc

SEQ ID NO: 142181 - RNA, 32 nt, Human
cugucauuguccucuggaacaccuagcagaca

SEQ ID NO: 142182 - RNA, 32 nt, Human
cugucauugucugguuucugucccaguuuaau

SEQ ID NO: 142183 - RNA, 32 nt, Human
cugucauuucaugcuugguuccuugcauugag

SEQ ID NO: 142184 - RNA, 32 nt, Human
cugucauuuccucuugaguccuaccagggucu

SEQ ID NO: 142185 - RNA, 19 nt, Human
cugucauuucuuggggccu

SEQ ID NO: 142186 - RNA, 32 nt, Human
cugucauuuugccauuucaucuggagcuuuca

SEQ ID NO: 142187 - RNA, 22 nt, Human
cugucauuuuggcaucugcaaa

SEQ ID NO: 142188 - RNA, 32 nt, Human
cuguccaaagagaacuuagaaagcaugguaug

SEQ ID NO: 142189 - RNA, 32 nt, Human
cuguccaaaggcuaugagauaccagggacagu

SEQ ID NO: 142190 - RNA, 32 nt, Human
cuguccaacauggcgaaccucgucucuucuaa

SEQ ID NO: 142191 - RNA, 21 nt, Human
cuguccaacauggugaaaccc

SEQ ID NO: 142192 - RNA, 32 nt, Human
cuguccaacauggugaaacccccaucucuacu

SEQ ID NO: 142193 - RNA, 24 nt, Human
cuguccaacauggugaaaccccgu

SEQ ID NO: 142194 - RNA, 32 nt, Human
cuguccaaccucuggugcugaagcagccaaga

SEQ ID NO: 142195 - RNA, 32 nt, Human
cuguccaaccucuggugcugaagcagccgaga

SEQ ID NO: 142196 - RNA, 32 nt, Human
cuguccaacguggugaaaccccgucuguacua

SEQ ID NO: 142197 - RNA, 32 nt, Human
cuguccaagaacagcaagccuauccauaccac

SEQ ID NO: 142198 - RNA, 32 nt, Human
cuguccaauuccagagcugucuggugaucacu

SEQ ID NO: 142199 - RNA, 32 nt, Human
cuguccaauucccugagcuuugcucacucagc

SEQ ID NO: 142200 - RNA, 32 nt, Human
cuguccacaccacaugggagcccagaggagga

SEQ ID NO: 142201 - RNA, 32 nt, Human
cuguccacacugaagaacauguccuacaacag

SEQ ID NO: 142202 - RNA, 32 nt, Human
cuguccacagccccuuaagggaaagguaggaa

SEQ ID NO: 142203 - RNA, 32 nt, Human
cuguccaccucaccccugcaccucucagccuc

SEQ ID NO: 142204 - RNA, 32 nt, Human
cuguccacgagaagaagcugaggcucugagcg

SEQ ID NO: 142205 - RNA, 32 nt, Human
cuguccacucuacacauuggccuggauugcag

SEQ ID NO: 142206 - RNA, 32 nt, Human
cuguccacugcaaccuccacauccuggguuca

SEQ ID NO: 142207 - RNA, 32 nt, Human
cuguccacugcacuccucccaccucauuuuua

SEQ ID NO: 142208 - RNA, 18 nt, Human
cuguccacugccuacaca

SEQ ID NO: 142209 - RNA, 20 nt, Human
cuguccacugcucugggcca

SEQ ID NO: 142210 - RNA, 32 nt, Human
cuguccacugggcccuggaccuguagaccugg

SEQ ID NO: 142211 - RNA, 32 nt, Human
cuguccacuguauuuuacaggucuucauacuu

SEQ ID NO: 142212 - RNA, 32 nt, Human
cuguccacugugggggccaaaguguuccccug

SEQ ID NO: 142213 - RNA, 32 nt, Human
cuguccacuuggcuaacuuuuaauauguguau

SEQ ID NO: 142214 - RNA, 32 nt, Human
cuguccacuuuccuucaggcucugugaauacu

SEQ ID NO: 142215 - RNA, 32 nt, Human
cuguccagagagagaagugccccugcugccuc

SEQ ID NO: 142216 - RNA, 32 nt, Human
cuguccagagugagcacuggaugguggagacc

SEQ ID NO: 142217 - RNA, 32 nt, Human
cuguccagcaagccaaguuuuucacaacacca

SEQ ID NO: 142218 - RNA, 30 nt, Human
cuguccagcacuugccugcuccugucuucu

SEQ ID NO: 142219 - RNA, 32 nt, Human
cuguccagcagggggcaguaagugaucuuggu

SEQ ID NO: 142220 - RNA, 32 nt, Human
cuguccagccugggugacagagcaagacugcg

SEQ ID NO: 142221 - RNA, 32 nt, Human
cuguccagcucccguccuguggcuccaccagc

SEQ ID NO: 142222 - RNA, 26 nt, Human
cuguccagcucugcccccugcugcug

SEQ ID NO: 142223 - RNA, 32 nt, Human
cuguccagcugcagaaauucguugccaaagau

SEQ ID NO: 142224 - RNA, 32 nt, Human
cuguccagcuggggccagaggcugggaguccc

SEQ ID NO: 142225 - RNA, 32 nt, Human
cuguccagcuucuuccuggucagggcugggac

SEQ ID NO: 142226 - RNA, 18 nt, Human
cuguccagcuuugugcca

SEQ ID NO: 142227 - RNA, 32 nt, Human
cuguccaggaacuuuccagcaguauccucgcu

SEQ ID NO: 142228 - RNA, 32 nt, Human
cuguccaggaagagcuguguggccuggcaagc

SEQ ID NO: 142229 - RNA, 32 nt, Human
cuguccaggaagcagccuaaccagagagaggg

SEQ ID NO: 142230 - RNA, 32 nt, Human
cuguccaggacgcuccuuucugcugacagccc

SEQ ID NO: 142231 - RNA, 32 nt, Human
cuguccaggagugccuagugaggccucggcag

SEQ ID NO: 142232 - RNA, 17 nt, Human
cuguccaggccucagag

SEQ ID NO: 142233 - RNA, 32 nt, Human
cuguccaggccugcuggggccuggcugggagu

SEQ ID NO: 142234 - RNA, 32 nt, Human
cuguccaggcugggcuugguggucaggaacag

SEQ ID NO: 142235 - RNA, 32 nt, Human
cuguccaguagaacuguuucugugguagaaau

SEQ ID NO: 142236 - RNA, 23 nt, Human
cuguccaguccagugauguggga

SEQ ID NO: 142237 - RNA, 32 nt, Human
cuguccaguggucauugaagacuugucagacc

SEQ ID NO: 142238 - RNA, 22 nt, Human
cuguccaguuucagcaucuggu

SEQ ID NO: 142239 - RNA, 31 nt, Human
cuguccaguuuucagcacuagucuuacucag

SEQ ID NO: 142240 - RNA, 21 nt, Human
cuguccauaaaccuccaggca

SEQ ID NO: 142241 - RNA, 21 nt, Human
cuguccauagaccuccaggca

SEQ ID NO: 142242 - RNA, 32 nt, Human
cuguccaucccacagcucagccuggaugccca

SEQ ID NO: 142243 - RNA, 32 nt, Human
cuguccaucuguccuuuucucgcuccauuccu

SEQ ID NO: 142244 - RNA, 32 nt, Human
cuguccaugccuucagaagccugguucuuuuu

SEQ ID NO: 142245 - RNA, 32 nt, Human
cuguccaugcuccaggcccccugggccagcuc

SEQ ID NO: 142246 - RNA, 32 nt, Human
cuguccauggauauaucaaaugucuucacuug

SEQ ID NO: 142247 - RNA, 18 nt, Human
cuguccaugucauuuucc

SEQ ID NO: 142248 - RNA, 32 nt, Human
cugucccaaaugccuggcugagcaucagggga

SEQ ID NO: 142249 - RNA, 32 nt, Human
cugucccacaguuuagauccaguuggagguuc

SEQ ID NO: 142250 - RNA, 32 nt, Human
cugucccacaugcugcgguagccacaaaggug

SEQ ID NO: 142251 - RNA, 32 nt, Human
cugucccacuauugcuggaggcuggacauggu

SEQ ID NO: 142252 - RNA, 32 nt, Human
cugucccacuccucaagucuggaagcgacaca

SEQ ID NO: 142253 - RNA, 32 nt, Human
cugucccacugcacagucggccauagggacgu

SEQ ID NO: 142254 - RNA, 32 nt, Human
cugucccagcaucugcuggucauuucgcccug

SEQ ID NO: 142255 - RNA, 21 nt, Human
cugucccagccuccugcugca

SEQ ID NO: 142256 - RNA, 22 nt, Human
cugucccagccuucccacuuug

SEQ ID NO: 142257 - RNA, 20 nt, Human
cugucccagcgccgcuucgu

SEQ ID NO: 142258 - RNA, 32 nt, Human
cugucccagcugucugaguguuuguccggcug

SEQ ID NO: 142259 - RNA, 32 nt, Human
cugucccaggaccaaauggaaccauccuuaug

SEQ ID NO: 142260 - RNA, 32 nt, Human
cugucccaggcguguucaccagccaguccuga

SEQ ID NO: 142261 - RNA, 32 nt, Human
cugucccagguggcccagguggugcagguaga

SEQ ID NO: 142262 - RNA, 23 nt, Human
cugucccauaaaaugccaucccu

SEQ ID NO: 142263 - RNA, 32 nt, Human
cugucccaugaagaguaauggacccaccaccc

SEQ ID NO: 142264 - RNA, 32 nt, Human
cugucccauuuccucagucccugggccuccca

SEQ ID NO: 142265 - RNA, 32 nt, Human
cuguccccaagacacuuccccuugucucccug

SEQ ID NO: 142266 - RNA, 32 nt, Human
cuguccccaaggcuggagugcaguggugcaau

SEQ ID NO: 142267 - RNA, 32 nt, Human
cuguccccaaguuauuuuaaaacaucuccagu

SEQ ID NO: 142268 - RNA, 32 nt, Human
cuguccccacacugucccuuugcccacagguc

SEQ ID NO: 142269 - RNA, 32 nt, Human
cuguccccaccuccccuccugaccaccaggcu

SEQ ID NO: 142270 - RNA, 32 nt, Human
cuguccccacgcugucccuuugcccacagguc

SEQ ID NO: 142271 - RNA, 32 nt, Human
cuguccccagaagauggagccagcacagcacu

SEQ ID NO: 142272 - RNA, 32 nt, Human
cuguccccagcaccgaggacagugccaggcau

SEQ ID NO: 142273 - RNA, 32 nt, Human
cuguccccaggccuuccaaagagacagcggca

SEQ ID NO: 142274 - RNA, 32 nt, Human
cuguccccagggacuccgaucuugccuuaaag

SEQ ID NO: 142275 - RNA, 32 nt, Human
cuguccccaucuccucaauguguaaagugaag

SEQ ID NO: 142276 - RNA, 32 nt, Human
cuguccccauucucucuccucccaccuucacc

SEQ ID NO: 142277 - RNA, 32 nt, Human
cugucccccaacacugagcaaguaugcugugg

SEQ ID NO: 142278 - RNA, 32 nt, Human
cugucccccaacaggugugacugcucugacaa

SEQ ID NO: 142279 - RNA, 32 nt, Human
cugucccccagaggaggcugacugggauggga

SEQ ID NO: 142280 - RNA, 32 nt, Human
cugucccccagaggaggcugacugggaugggg

SEQ ID NO: 142281 - RNA, 24 nt, Human
cugucccccagcagaggugucccu

SEQ ID NO: 142282 - RNA, 23 nt, Human
cugucccccaggcugaagugcag

SEQ ID NO: 142283 - RNA, 32 nt, Human
cugucccccaggcugaagugcagcggcaugau

SEQ ID NO: 142284 - RNA, 24 nt, Human
cugucccccaggcuggagugcagu

SEQ ID NO: 142285 - RNA, 32 nt, Human
cugucccccaggcuggagugcaguggcaugau

SEQ ID NO: 142286 - RNA, 32 nt, Human
cugucccccaggcuggagugcaguggcgcgau

SEQ ID NO: 142287 - RNA, 32 nt, Human
cugucccccaggcuggagugcaguggcucgau

SEQ ID NO: 142288 - RNA, 32 nt, Human
cugucccccaggcuggagugcaguggugcgau

SEQ ID NO: 142289 - RNA, 32 nt, Human
cugucccccaggcuggcgugcaguagcaugau

SEQ ID NO: 142290 - RNA, 32 nt, Human
cugucccccaggggcuggagucaccuggugcc

SEQ ID NO: 142291 - RNA, 32 nt, Human
cugucccccagucuggcgugcaaugguuugau

SEQ ID NO: 142292 - RNA, 32 nt, Human
cugucccccaugcuggagugcaguggcaugau

SEQ ID NO: 142293 - RNA, 32 nt, Human
cugucccccgagcugcucuacgcgcuggcgcg

SEQ ID NO: 142294 - RNA, 22 nt, Human
cugucccccgggguccugcaag

SEQ ID NO: 142295 - RNA, 32 nt, Human
cugucccccucagaccugggaaggcagccagg

SEQ ID NO: 142296 - RNA, 21 nt, Human
cugucccccuuuguuccugca

SEQ ID NO: 142297 - RNA, 21 nt, Human
cuguccccgagccccugcagg

SEQ ID NO: 142298 - RNA, 32 nt, Human
cuguccccgagccgagcucuccugggccaggg

SEQ ID NO: 142299 - RNA, 32 nt, Human
cuguccccgaggccggagugcaauggcgugau

SEQ ID NO: 142300 - RNA, 32 nt, Human
cuguccccgcaucuccccugggaccagcugga

SEQ ID NO: 142301 - RNA, 18 nt, Human
cuguccccgccgcucuga

SEQ ID NO: 142302 - RNA, 18 nt, Human
cuguccccgcuacugccu

SEQ ID NO: 142303 - RNA, 19 nt, Human
cuguccccgcuccugcagg

SEQ ID NO: 142304 - RNA, 23 nt, Human
cuguccccguguugcaugaagga

SEQ ID NO: 142305 - RNA, 32 nt, Human
cuguccccuaccugccaagacaauugguggug

SEQ ID NO: 142306 - RNA, 24 nt, Human
cuguccccuaggcugcagugcagu

SEQ ID NO: 142307 - RNA, 32 nt, Human
cuguccccuccacccucacuccauccaccucg

SEQ ID NO: 142308 - RNA, 32 nt, Human
cuguccccuccagaggccacaccaaggucugg

SEQ ID NO: 142309 - RNA, 32 nt, Human
cuguccccuccagucuccucauuggagugacc

SEQ ID NO: 142310 - RNA, 32 nt, Human
cuguccccuccagugcccugaaggucccuggc

SEQ ID NO: 142311 - RNA, 32 nt, Human
cuguccccuccccuccccaccccaucuauuaa

SEQ ID NO: 142312 - RNA, 32 nt, Human
cuguccccuccccucucgcucccuuuuaaaau

SEQ ID NO: 142313 - RNA, 32 nt, Human
cuguccccuccccucuguuuacaucuccccuc

SEQ ID NO: 142314 - RNA, 32 nt, Human
cuguccccucccucucccucagucuccucucc

SEQ ID NO: 142315 - RNA, 18 nt, Human
cuguccccucucuccaca

SEQ ID NO: 142316 - RNA, 32 nt, Human
cuguccccugcagcuuccguggugccuuugcu

SEQ ID NO: 142317 - RNA, 23 nt, Human
cuguccccugccucuggggccug

SEQ ID NO: 142318 - RNA, 32 nt, Human
cuguccccugcucccccuuuguccuccauccc

SEQ ID NO: 142319 - RNA, 32 nt, Human
cuguccccugcuccccuccuaccacuguccag

SEQ ID NO: 142320 - RNA, 32 nt, Human
cuguccccugggcuggagugcaauggugcgau

SEQ ID NO: 142321 - RNA, 19 nt, Human
cuguccccuucugccgcca

SEQ ID NO: 142322 - RNA, 17 nt, Human
cuguccccuucuggaag

SEQ ID NO: 142323 - RNA, 32 nt, Human
cuguccccuugauccuggcauucuggaagaca

SEQ ID NO: 142324 - RNA, 16 nt, Human
cugucccgagcuggua

SEQ ID NO: 142325 - RNA, 32 nt, Human
cugucccgcuacugcuuacacaggccggguuc

SEQ ID NO: 142326 - RNA, 32 nt, Human
cugucccgcuagugccugcuaggugcauggcc

SEQ ID NO: 142327 - RNA, 32 nt, Human
cugucccgcugccagaaauacacccacaauaa

SEQ ID NO: 142328 - RNA, 19 nt, Human
cugucccggcuuugcguca

SEQ ID NO: 142329 - RNA, 24 nt, Human
cugucccggucgccacccuuagca

SEQ ID NO: 142330 - RNA, 32 nt, Human
cugucccucacacugugaccugaccagcccca

SEQ ID NO: 142331 - RNA, 32 nt, Human
cugucccucagccaugggaugcagacacggcu

SEQ ID NO: 142332 - RNA, 32 nt, Human
cugucccucaggcuggagugcaguagcgugau

SEQ ID NO: 142333 - RNA, 32 nt, Human
cugucccucccugaauucucucuccccguaag

SEQ ID NO: 142334 - RNA, 23 nt, Human
cugucccuccuccacagcccccu

SEQ ID NO: 142335 - RNA, 32 nt, Human
cugucccuccuccccugucccugggcccaugg

SEQ ID NO: 142336 - RNA, 32 nt, Human
cugucccuccuugagacaccaguugcaagucu

SEQ ID NO: 142337 - RNA, 32 nt, Human
cugucccuccuugagcaccagccccacccaag

SEQ ID NO: 142338 - RNA, 31 nt, Human
cugucccucucaggcaugccugugugacauc

SEQ ID NO: 142339 - RNA, 32 nt, Human
cugucccucugcacuccaucauagcaucucua

SEQ ID NO: 142340 - RNA, 32 nt, Human
cugucccucugcacucccugccuuggugcgug

SEQ ID NO: 142341 - RNA, 32 nt, Human
cugucccucugucccucuguguuuccagccau

SEQ ID NO: 142342 - RNA, 32 nt, Human
cugucccugcccagugcaucccccaggucauc

SEQ ID NO: 142343 - RNA, 32 nt, Human
cugucccugccuuuucaccccugcugccugaa

SEQ ID NO: 142344 - RNA, 32 nt, Human
cugucccugcuuguagccccugagcccucaca

SEQ ID NO: 142345 - RNA, 32 nt, Human
cugucccugcuuuuucaccccugcugccugaa

SEQ ID NO: 142346 - RNA, 32 nt, Human
cugucccuggcuuucaggcuccaacauccucc

SEQ ID NO: 142347 - RNA, 32 nt, Human
cugucccugggacgugcgucucuccuucucau

SEQ ID NO: 142348 - RNA, 32 nt, Human
cugucccugggcaauggaaugucucgguauaa

SEQ ID NO: 142349 - RNA, 32 nt, Human
cugucccuggggagccacucaaguuaccaggg

SEQ ID NO: 142350 - RNA, 32 nt, Human
cugucccugggugagagccaugccugacuugu

SEQ ID NO: 142351 - RNA, 32 nt, Human
cugucccugguuccuaggaagacagaguuguu

SEQ ID NO: 142352 - RNA, 32 nt, Human
cugucccuguggcgauggcagggcaggguggc

SEQ ID NO: 142353 - RNA, 32 nt, Human
cugucccuguggucugaauuuaucaaaacuca

SEQ ID NO: 142354 - RNA, 32 nt, Human
cugucccuuccagcccacacucugccaccucc

SEQ ID NO: 142355 - RNA, 21 nt, Human
cugucccuuccagcugcccca

SEQ ID NO: 142356 - RNA, 32 nt, Human
cugucccuuccgggggcacccugcucagucag

SEQ ID NO: 142357 - RNA, 21 nt, Human
cugucccuucgccugcugcug

SEQ ID NO: 142358 - RNA, 32 nt, Human
cugucccuucuaacgugaggacccagcaacaa

SEQ ID NO: 142359 - RNA, 32 nt, Human
cugucccuucucacaacuccucccuuuucccu

SEQ ID NO: 142360 - RNA, 19 nt, Human
cugucccuugucccgagcc

SEQ ID NO: 142361 - RNA, 32 nt, Human
cugucccuuucuggcccucuuccuguagccca

SEQ ID NO: 142362 - RNA, 32 nt, Human
cuguccgagugugccacacgagaaccugaagg

SEQ ID NO: 142363 - RNA, 32 nt, Human
cuguccgccagcugcugcccgcgccuuuccgc

SEQ ID NO: 142364 - RNA, 24 nt, Human
cuguccgccaggcuggagugcagu

SEQ ID NO: 142365 - RNA, 32 nt, Human
cuguccgccaggcuggagugcaguggcgcgau

SEQ ID NO: 142366 - RNA, 24 nt, Human
cuguccgcccaggcugggugcagu

SEQ ID NO: 142367 - RNA, 32 nt, Human
cuguccgcccugccugccugccuguguggucu

SEQ ID NO: 142368 - RNA, 32 nt, Human
cuguccgcccuucacaccuccagccucacguu

SEQ ID NO: 142369 - RNA, 32 nt, Human
cuguccgccugaucugucuugggcuguaggcu

SEQ ID NO: 142370 - RNA, 32 nt, Human
cuguccgccugcagggcauuccagaaagauga

SEQ ID NO: 142371 - RNA, 32 nt, Human
cuguccgccugccucaccccagaagaggcugg

SEQ ID NO: 142372 - RNA, 32 nt, Human
cuguccgcucucccucuccugcugcccaccca

SEQ ID NO: 142373 - RNA, 32 nt, Human
cuguccgcugccgccucagagccgggaaaagc

SEQ ID NO: 142374 - RNA, 32 nt, Human
cuguccggagcacuccuucccuucccugguuc

SEQ ID NO: 142375 - RNA, 18 nt, Human
cuguccggccccgaguca

SEQ ID NO: 142376 - RNA, 32 nt, Human
cuguccggccccggagagggggaaggcgccug

SEQ ID NO: 142377 - RNA, 32 nt, Human
cuguccgggcugcuuucgccuccgccugugga

SEQ ID NO: 142378 - RNA, 32 nt, Human
cuguccgggcugggacagagacuccccaagga

SEQ ID NO: 142379 - RNA, 19 nt, Human
cuguccguguuccccagca

SEQ ID NO: 142380 - RNA, 19 nt, Human
cuguccguuccucugccca

SEQ ID NO: 142381 - RNA, 32 nt, Human
cuguccguucucggggccagagcugcuggggg

SEQ ID NO: 142382 - RNA, 32 nt, Human
cuguccuaccuccacucucugccccuaaagau

SEQ ID NO: 142383 - RNA, 32 nt, Human
cuguccuagucuccuuugaagugggaaagcau

SEQ ID NO: 142384 - RNA, 32 nt, Human
cuguccuaucucugugcuggaagaugcuagau

SEQ ID NO: 142385 - RNA, 20 nt, Human
cuguccucaaauauaagcca

SEQ ID NO: 142386 - RNA, 32 nt, Human
cuguccucaaguaauccuccugccuuagcauu

SEQ ID NO: 142387 - RNA, 32 nt, Human
cuguccucaagugauccucccaccucagccuu

SEQ ID NO: 142388 - RNA, 20 nt, Human
cuguccucaccucuccggca

SEQ ID NO: 142389 - RNA, 32 nt, Human
cuguccucacugccaucgccacuaccauccug

SEQ ID NO: 142390 - RNA, 21 nt, Human
cuguccucagagccucaggua

SEQ ID NO: 142391 - RNA, 32 nt, Human
cuguccucagaggaggaggaggaggaggcagc

SEQ ID NO: 142392 - RNA, 32 nt, Human
cuguccucagcccacugcaccuggggaagccc

SEQ ID NO: 142393 - RNA, 32 nt, Human
cuguccucagggagcucacgggguaugagaga

SEQ ID NO: 142394 - RNA, 32 nt, Human
cuguccucagguaauccgcccaccucagccuc

SEQ ID NO: 142395 - RNA, 18 nt, Human
cuguccucaucccugccc

SEQ ID NO: 142396 - RNA, 32 nt, Human
cuguccucauucuucucucccacacaagcagu

SEQ ID NO: 142397 - RNA, 32 nt, Human
cuguccuccaauuccagcauucacagcugaug

SEQ ID NO: 142398 - RNA, 21 nt, Human
cuguccuccagaaagcaccaa

SEQ ID NO: 142399 - RNA, 22 nt, Human
cuguccuccaggcuggagugca

SEQ ID NO: 142400 - RNA, 24 nt, Human
cuguccuccaggcuggagugcaau

SEQ ID NO: 142401 - RNA, 32 nt, Human
cuguccuccaggcuggagugcaaugacauggu

SEQ ID NO: 142402 - RNA, 32 nt, Human
cuguccuccauuccucacgccaucuccauccc

SEQ ID NO: 142403 - RNA, 32 nt, Human
cuguccucccaaagugcugggguuacaggcgu

SEQ ID NO: 142404 - RNA, 32 nt, Human
cuguccucccaaggugcugggauuacaagcgu

SEQ ID NO: 142405 - RNA, 18 nt, Human
cuguccucccucugcaag

SEQ ID NO: 142406 - RNA, 16 nt, Human
cuguccucccugcagg

SEQ ID NO: 142407 - RNA, 16 nt, Human
cuguccucccugcgag

SEQ ID NO: 142408 - RNA, 32 nt, Human
cuguccuccuuuaccuuccucucuccucagcg

SEQ ID NO: 142409 - RNA, 19 nt, Human
cuguccuccuuuccuguaa

SEQ ID NO: 142410 - RNA, 32 nt, Human
cuguccucgaaagccugagcuuucauucaacu

SEQ ID NO: 142411 - RNA, 32 nt, Human
cuguccucgcucagccggcuccugggccucau

SEQ ID NO: 142412 - RNA, 32 nt, Human
cuguccucggaucacagucucuucucacuaca

SEQ ID NO: 142413 - RNA, 32 nt, Human
cuguccucguccuggccugcagcucuucccag

SEQ ID NO: 142414 - RNA, 21 nt, Human
cuguccucgucucucugcaag

SEQ ID NO: 142415 - RNA, 20 nt, Human
cuguccucguucccugcagg

SEQ ID NO: 142416 - RNA, 32 nt, Human
cuguccucucucccccucgcccucucuucggc

SEQ ID NO: 142417 - RNA, 32 nt, Human
cuguccucucuuccucacuccucccuucagug

SEQ ID NO: 142418 - RNA, 32 nt, Human
cuguccucugcaacccaaacguccaggaggau

SEQ ID NO: 142419 - RNA, 32 nt, Human
cuguccucugcagcucccucucugguccuggg

SEQ ID NO: 142420 - RNA, 21 nt, Human
cuguccucugcuuccugccag

SEQ ID NO: 142421 - RNA, 21 nt, Human
cuguccucugucugccuuuca

SEQ ID NO: 142422 - RNA, 16 nt, Human
cuguccugaccgcagg

SEQ ID NO: 142423 - RNA, 32 nt, Human
cuguccugagccuggaaaaugugaaacugucu

SEQ ID NO: 142424 - RNA, 17 nt, Human
cuguccugagcugcgag

SEQ ID NO: 142425 - RNA, 32 nt, Human
cuguccugaugcggcuccugcagagaagacuc

SEQ ID NO: 142426 - RNA, 18 nt, Human
cuguccugauuucuacaa

SEQ ID NO: 142427 - RNA, 18 nt, Human
cuguccugcaaacugcaa

SEQ ID NO: 142428 - RNA, 32 nt, Human
cuguccugcacaaccucccucacagaacaggg

SEQ ID NO: 142429 - RNA, 22 nt, Human
cuguccugcacacccugggcca

SEQ ID NO: 142430 - RNA, 32 nt, Human
cuguccugcacaccuccgcucuagggcauagu

SEQ ID NO: 142431 - RNA, 31 nt, Human
cuguccugcacccagaggucugcaugagggg

SEQ ID NO: 142432 - RNA, 32 nt, Human
cuguccugcaggaagcccucgggguagggccu

SEQ ID NO: 142433 - RNA, 32 nt, Human
cuguccugcagugagauaguagacccuagaag

SEQ ID NO: 142434 - RNA, 19 nt, Human
cuguccugccagucccaag

SEQ ID NO: 142435 - RNA, 32 nt, Human
cuguccugccauccucccagguagucagagug

SEQ ID NO: 142436 - RNA, 17 nt, Human
cuguccugccaugcaag

SEQ ID NO: 142437 - RNA, 17 nt, Human
cuguccugcccccgcaa

SEQ ID NO: 142438 - RNA, 18 nt, Human
cuguccugccucagugca

SEQ ID NO: 142439 - RNA, 17 nt, Human
cuguccugccucccagg

SEQ ID NO: 142440 - RNA, 19 nt, Human
cuguccugccuccugggag

SEQ ID NO: 142441 - RNA, 31 nt, Human
cuguccugccucuggccuguguccugggugu

SEQ ID NO: 142442 - RNA, 31 nt, Human
cuguccugccucuuuucaccugcucacgccc

SEQ ID NO: 142443 - RNA, 17 nt, Human
cuguccugcggccucaa

SEQ ID NO: 142444 - RNA, 19 nt, Human
cuguccugcgggccacaag

SEQ ID NO: 142445 - RNA, 18 nt, Human
cuguccugcuaccuaaag

SEQ ID NO: 142446 - RNA, 17 nt, Human
cuguccugcuccaguaa

SEQ ID NO: 142447 - RNA, 18 nt, Human
cuguccugcucccccaag

SEQ ID NO: 142448 - RNA, 17 nt, Human
cuguccugcuccuggga

SEQ ID NO: 142449 - RNA, 32 nt, Human
cuguccugcuucauaggugccaccuugugugu

SEQ ID NO: 142450 - RNA, 21 nt, Human
cuguccugcuucuaccccgag

SEQ ID NO: 142451 - RNA, 20 nt, Human
cuguccugcuucucugcagg

SEQ ID NO: 142452 - RNA, 32 nt, Human
cuguccugcuucugaaugugcugaucauuuga

SEQ ID NO: 142453 - RNA, 18 nt, Human
cuguccugcuucuucagg

SEQ ID NO: 142454 - RNA, 32 nt, Human
cuguccuggaaccaggcuugccugggacggcu

SEQ ID NO: 142455 - RNA, 18 nt, Human
cuguccuggagggggcag

SEQ ID NO: 142456 - RNA, 32 nt, Human
cuguccuggagguguggcugagcuaccugcag

SEQ ID NO: 142457 - RNA, 19 nt, Human
cuguccuggaugccucuga

SEQ ID NO: 142458 - RNA, 21 nt, Human
cuguccuggcccuccgaguca

SEQ ID NO: 142459 - RNA, 16 nt, Human
cuguccuggccgcagg

SEQ ID NO: 142460 - RNA, 22 nt, Human
cuguccuggcucugcaccuggu

SEQ ID NO: 142461 - RNA, 32 nt, Human
cuguccuggcucugcugucccccaagagggug

SEQ ID NO: 142462 - RNA, 32 nt, Human
cuguccuggcugcucgcucugcuucgcugcgc

SEQ ID NO: 142463 - RNA, 32 nt, Human
cuguccuggcuggaggagguggagcagcuccu

SEQ ID NO: 142464 - RNA, 18 nt, Human
cuguccugggacugcagg

SEQ ID NO: 142465 - RNA, 17 nt, Human
cuguccugggccugcag

SEQ ID NO: 142466 - RNA, 32 nt, Human
cuguccuggggcuccuggccucccgggcugug

SEQ ID NO: 142467 - RNA, 31 nt, Human
cuguccuggguggacggcaggugaacacaag

SEQ ID NO: 142468 - RNA, 31 nt, Human
cuguccuggguggagggcaggugaacacaag

SEQ ID NO: 142469 - RNA, 17 nt, Human
cuguccuggucagcaag

SEQ ID NO: 142470 - RNA, 17 nt, Human
cuguccugguccucaag

SEQ ID NO: 142471 - RNA, 17 nt, Human
cuguccugguuaugcaa

SEQ ID NO: 142472 - RNA, 19 nt, Human
cuguccugguucccugaag

SEQ ID NO: 142473 - RNA, 32 nt, Human
cuguccugguucccugaagcaucgagagggaa

SEQ ID NO: 142474 - RNA, 32 nt, Human
cuguccugguuucccaggacauggaacuuuca

SEQ ID NO: 142475 - RNA, 32 nt, Human
cuguccuguacauagccaccucccuguggaga

SEQ ID NO: 142476 - RNA, 18 nt, Human
cuguccugucaccucuga

SEQ ID NO: 142477 - RNA, 32 nt, Human
cuguccuguccacuugccuucugaggacauca

SEQ ID NO: 142478 - RNA, 20 nt, Human
cuguccuguccccugagcca

SEQ ID NO: 142479 - RNA, 18 nt, Human
cuguccugucccugccag

SEQ ID NO: 142480 - RNA, 32 nt, Human
cuguccuguccucugcuuccugccagggcccu

SEQ ID NO: 142481 - RNA, 19 nt, Human
cuguccugugagccgccag

SEQ ID NO: 142482 - RNA, 32 nt, Human
cuguccugugccugccuccaccucuuuaacga

SEQ ID NO: 142483 - RNA, 16 nt, Human
cuguccugugcuguaa

SEQ ID NO: 142484 - RNA, 32 nt, Human
cuguccugugggcagaagagacaggaguggac

SEQ ID NO: 142485 - RNA, 17 nt, Human
cuguccugugucugcag

SEQ ID NO: 142486 - RNA, 17 nt, Human
cuguccugugugcuaag

SEQ ID NO: 142487 - RNA, 32 nt, Human
cuguccuguucuguuccauucuaauuacuggu

SEQ ID NO: 142488 - RNA, 18 nt, Human
cuguccuguugcugccag

SEQ ID NO: 142489 - RNA, 18 nt, Human
cuguccuguuucuacagg

SEQ ID NO: 142490 - RNA, 19 nt, Human
cuguccuguuucugucaag

SEQ ID NO: 142491 - RNA, 17 nt, Human
cuguccuuaauccauca

SEQ ID NO: 142492 - RNA, 32 nt, Human
cuguccuuacuuccuaacaucuuucugauaac

SEQ ID NO: 142493 - RNA, 32 nt, Human
cuguccuucaagacuucauuugagcuuuguuu

SEQ ID NO: 142494 - RNA, 32 nt, Human
cuguccuucaggaccagccaguuuacaagcau

SEQ ID NO: 142495 - RNA, 19 nt, Human
cuguccuucaugggauuuu

SEQ ID NO: 142496 - RNA, 32 nt, Human
cuguccuucaugguggucuuucagguuaucuu

SEQ ID NO: 142497 - RNA, 16 nt, Human
cuguccuuccaugcaa

SEQ ID NO: 142498 - RNA, 32 nt, Human
cuguccuuccugggccccuccuugccacauca

SEQ ID NO: 142499 - RNA, 32 nt, Human
cuguccuugaccuuggaguggaggcagcacug

SEQ ID NO: 142500 - RNA, 32 nt, Human
cuguccuugccgcccccgccaugggccuagag

SEQ ID NO: 142501 - RNA, 21 nt, Human
cuguccuuggagcuuccuggg

SEQ ID NO: 142502 - RNA, 32 nt, Human
cuguccuuggccagaaggaagggagaauacug

SEQ ID NO: 142503 - RNA, 32 nt, Human
cuguccuuguccuggaccucagguucccagcg

SEQ ID NO: 142504 - RNA, 32 nt, Human
cuguccuugugaguggcaccguacagaacaug

SEQ ID NO: 142505 - RNA, 17 nt, Human
cuguccuuguuaaguua

SEQ ID NO: 142506 - RNA, 18 nt, Human
cuguccuuuaaagcauug

SEQ ID NO: 142507 - RNA, 32 nt, Human
cuguccuuuccuguuugcuuucaguuuucaac

SEQ ID NO: 142508 - RNA, 32 nt, Human
cuguccuuucucuacaaaauugccuuggcacc

SEQ ID NO: 142509 - RNA, 31 nt, Human
cuguccuuucucucuggcugcugucaaaauu

SEQ ID NO: 142510 - RNA, 32 nt, Human
cuguccuuucugguuauugacugucccugguu

SEQ ID NO: 142511 - RNA, 24 nt, Human
cuguccuuuggcccagccccuggu

SEQ ID NO: 142512 - RNA, 19 nt, Human
cuguccuuuugacaacucu

SEQ ID NO: 142513 - RNA, 32 nt, Human
cugucgaccaggcuggagugcaggggcacaau

SEQ ID NO: 142514 - RNA, 32 nt, Human
cugucgaccugccccuggcuccagaaaacucc

SEQ ID NO: 142515 - RNA, 32 nt, Human
cugucgagcccuauggugagacccuggcugac

SEQ ID NO: 142516 - RNA, 32 nt, Human
cugucgagccugggggcuggagcggagacggg

SEQ ID NO: 142517 - RNA, 18 nt, Human
cugucgaggggcccaggg

SEQ ID NO: 142518 - RNA, 32 nt, Human
cugucgcacuugaguuugagggccagugggcc

SEQ ID NO: 142519 - RNA, 20 nt, Human
cugucgcagcagcccgggcu

SEQ ID NO: 142520 - RNA, 20 nt, Human
cugucgcauugccucgaguu

SEQ ID NO: 142521 - RNA, 32 nt, Human
cugucgccaaaguuggagugcaguggcgcggu

SEQ ID NO: 142522 - RNA, 32 nt, Human
cugucgccaagaggacuggggaagggagggga

SEQ ID NO: 142523 - RNA, 23 nt, Human
cugucgccaagccagagugcagu

SEQ ID NO: 142524 - RNA, 32 nt, Human
cugucgccaaggcuggagggcaauggcaugau

SEQ ID NO: 142525 - RNA, 24 nt, Human
cugucgccaaggcuggagugcagu

SEQ ID NO: 142526 - RNA, 32 nt, Human
cugucgccaaggcuggagugcaguggugugau

SEQ ID NO: 142527 - RNA, 32 nt, Human
cugucgccaaguuggagcuugcagugagccga

SEQ ID NO: 142528 - RNA, 21 nt, Human
cugucgccaaguuggagugca

SEQ ID NO: 142529 - RNA, 23 nt, Human
cugucgccaaguuggagugcaau

SEQ ID NO: 142530 - RNA, 32 nt, Human
cugucgccacugccaccaugcccaagagaaag

SEQ ID NO: 142531 - RNA, 23 nt, Human
cugucgccagacuggagugcagu

SEQ ID NO: 142532 - RNA, 23 nt, Human
cugucgccaggcuagagugcggu

SEQ ID NO: 142533 - RNA, 23 nt, Human
cugucgccaggcugaagugcagu

SEQ ID NO: 142534 - RNA, 23 nt, Human
cugucgccaggcuggaaugcagu

SEQ ID NO: 142535 - RNA, 28 nt, Human
cugucgccaggcuggaaugcagugcagu

SEQ ID NO: 142536 - RNA, 20 nt, Human
cugucgccaggcuggagugc

SEQ ID NO: 142537 - RNA, 21 nt, Human
cugucgccaggcuggagugca

SEQ ID NO: 142538 - RNA, 23 nt, Human
cugucgccaggcuggagugcaau

SEQ ID NO: 142539 - RNA, 23 nt, Human
cugucgccaggcuggagugcagu

SEQ ID NO: 142540 - RNA, 23 nt, Human
cugucgccaggcuggaguguagu

SEQ ID NO: 142541 - RNA, 23 nt, Human
cugucgccagguuggagugcagu

SEQ ID NO: 142542 - RNA, 18 nt, Human
cugucgccaucagcauca

SEQ ID NO: 142543 - RNA, 22 nt, Human
cugucgcccaagccuccacugc

SEQ ID NO: 142544 - RNA, 22 nt, Human
cugucgcccaagcuggagcgca

SEQ ID NO: 142545 - RNA, 24 nt, Human
cugucgcccaagcuggagcgcaau

SEQ ID NO: 142546 - RNA, 24 nt, Human
cugucgcccaagcuggaguacagu

SEQ ID NO: 142547 - RNA, 32 nt, Human
cugucgcccaagcuggaguacaguggugcaau

SEQ ID NO: 142548 - RNA, 24 nt, Human
cugucgcccaagcuggagugcagu

SEQ ID NO: 142549 - RNA, 32 nt, Human
cugucgcccaagcuggagugcaguggcacaau

SEQ ID NO: 142550 - RNA, 32 nt, Human
cugucgcccaaucuggagugcacuggcgcuau

SEQ ID NO: 142551 - RNA, 28 nt, Human
cugucgcccacccaggcuggaguacagu

SEQ ID NO: 142552 - RNA, 32 nt, Human
cugucgcccacccaggcuggaguacaguggca

SEQ ID NO: 142553 - RNA, 24 nt, Human
cugucgcccagacuagaaugcagu

SEQ ID NO: 142554 - RNA, 22 nt, Human
cugucgcccagacuagagugca

SEQ ID NO: 142555 - RNA, 24 nt, Human
cugucgcccagacuagagugcaau

SEQ ID NO: 142556 - RNA, 18 nt, Human
cugucgcccagacuggag

SEQ ID NO: 142557 - RNA, 24 nt, Human
cugucgcccagacuggaguccagu

SEQ ID NO: 142558 - RNA, 32 nt, Human
cugucgcccagacuggagugcaauggugcggu

SEQ ID NO: 142559 - RNA, 24 nt, Human
cugucgcccagacuggagugcagu

SEQ ID NO: 142560 - RNA, 32 nt, Human
cugucgcccagacuggagugcaguagcgccgu

SEQ ID NO: 142561 - RNA, 24 nt, Human
cugucgcccagacuggagugcugu

SEQ ID NO: 142562 - RNA, 24 nt, Human
cugucgcccagacuguaguacagu

SEQ ID NO: 142563 - RNA, 24 nt, Human
cugucgcccagccuggagugcagu

SEQ ID NO: 142564 - RNA, 32 nt, Human
cugucgcccagccuggagugcaguggcaccau

SEQ ID NO: 142565 - RNA, 24 nt, Human
cugucgcccaggauggagugcagu

SEQ ID NO: 142566 - RNA, 32 nt, Human
cugucgcccaggauggagugcaguggcgcgau

SEQ ID NO: 142567 - RNA, 24 nt, Human
cugucgcccaggcuagaguauagu

SEQ ID NO: 142568 - RNA, 32 nt, Human
cugucgcccaggcuagaguauaguggugugau

SEQ ID NO: 142569 - RNA, 20 nt, Human
cugucgcccaggcuagagug

SEQ ID NO: 142570 - RNA, 32 nt, Human
cugucgcccaggcuagagugcaauggcgugau

SEQ ID NO: 142571 - RNA, 24 nt, Human
cugucgcccaggcuagagugcagu

SEQ ID NO: 142572 - RNA, 32 nt, Human
cugucgcccaggcuagagugcaguggcacaau

SEQ ID NO: 142573 - RNA, 32 nt, Human
cugucgcccaggcuagagugcaguggcgcgau

SEQ ID NO: 142574 - RNA, 32 nt, Human
cugucgcccaggcuagagugcagugguaugau

SEQ ID NO: 142575 - RNA, 32 nt, Human
cugucgcccaggcuagaguggauuggcgugau

SEQ ID NO: 142576 - RNA, 32 nt, Human
cugucgcccaggcucgagugcaguggcaugau

SEQ ID NO: 142577 - RNA, 32 nt, Human
cugucgcccaggcugaaguguagagugcagug

SEQ ID NO: 142578 - RNA, 24 nt, Human
cugucgcccaggcugcagugcagu

SEQ ID NO: 142579 - RNA, 32 nt, Human
cugucgcccaggcugcagugcgguggugcgau

SEQ ID NO: 142580 - RNA, 24 nt, Human
cugucgcccaggcuggaaugcagu

SEQ ID NO: 142581 - RNA, 32 nt, Human
cugucgcccaggcuggaaugcaguggcaugau

SEQ ID NO: 142582 - RNA, 32 nt, Human
cugucgcccaggcuggaaugcaguggcgcgau

SEQ ID NO: 142583 - RNA, 32 nt, Human
cugucgcccaggcuggaaugcaguggcgugau

SEQ ID NO: 142584 - RNA, 32 nt, Human
cugucgcccaggcuggaaugcaguggugcaaa

SEQ ID NO: 142585 - RNA, 32 nt, Human
cugucgcccaggcuggaaugcaguggugcgau

SEQ ID NO: 142586 - RNA, 32 nt, Human
cugucgcccaggcuggaaugcaguugugagau

SEQ ID NO: 142587 - RNA, 24 nt, Human
cugucgcccaggcuggaaugcugu

SEQ ID NO: 142588 - RNA, 32 nt, Human
cugucgcccaggcuggaaugcuguagcaagau

SEQ ID NO: 142589 - RNA, 32 nt, Human
cugucgcccaggcuggacuacaauggcacgau

SEQ ID NO: 142590 - RNA, 24 nt, Human
cugucgcccaggcuggacugcagu

SEQ ID NO: 142591 - RNA, 32 nt, Human
cugucgcccaggcuggacugcaguggugcgau

SEQ ID NO: 142592 - RNA, 18 nt, Human
cugucgcccaggcuggag

SEQ ID NO: 142593 - RNA, 24 nt, Human
cugucgcccaggcuggagagcagu

SEQ ID NO: 142594 - RNA, 32 nt, Human
cugucgcccaggcuggagcccaguggcgagau

SEQ ID NO: 142595 - RNA, 22 nt, Human
cugucgcccaggcuggagcgca

SEQ ID NO: 142596 - RNA, 24 nt, Human
cugucgcccaggcuggagcgcaau

SEQ ID NO: 142597 - RNA, 32 nt, Human
cugucgcccaggcuggagcgcaauggcaugau

SEQ ID NO: 142598 - RNA, 32 nt, Human
cugucgcccaggcuggagcgcaauggcgcgaa

SEQ ID NO: 142599 - RNA, 24 nt, Human
cugucgcccaggcuggagcgcagu

SEQ ID NO: 142600 - RNA, 24 nt, Human
cugucgcccaggcuggagggcagu

SEQ ID NO: 142601 - RNA, 32 nt, Human
cugucgcccaggcuggagggcaguggcacgau

SEQ ID NO: 142602 - RNA, 32 nt, Human
cugucgcccaggcuggagggcaguggcgugau

SEQ ID NO: 142603 - RNA, 22 nt, Human
cugucgcccaggcuggaguaca

SEQ ID NO: 142604 - RNA, 24 nt, Human
cugucgcccaggcuggaguacaau

SEQ ID NO: 142605 - RNA, 32 nt, Human
cugucgcccaggcuggaguacaauggugcgaa

SEQ ID NO: 142606 - RNA, 24 nt, Human
cugucgcccaggcuggaguacagu

SEQ ID NO: 142607 - RNA, 32 nt, Human
cugucgcccaggcuggaguacaguggugcgau

SEQ ID NO: 142608 - RNA, 32 nt, Human
cugucgcccaggcuggaguacaguggugugau

SEQ ID NO: 142609 - RNA, 23 nt, Human
cugucgcccaggcuggagugagu

SEQ ID NO: 142610 - RNA, 28 nt, Human
cugucgcccaggcuggagugagugcagu

SEQ ID NO: 142611 - RNA, 32 nt, Human
cugucgcccaggcuggagugagugcaguggcg

SEQ ID NO: 142612 - RNA, 32 nt, Human
cugucgcccaggcuggagugaugaggcgcgau

SEQ ID NO: 142613 - RNA, 22 nt, Human
cugucgcccaggcuggagugca

SEQ ID NO: 142614 - RNA, 24 nt, Human
cugucgcccaggcuggagugcaau

SEQ ID NO: 142615 - RNA, 32 nt, Human
cugucgcccaggcuggagugcaauacugcaau

SEQ ID NO: 142616 - RNA, 32 nt, Human
cugucgcccaggcuggagugcaaugccgugau

SEQ ID NO: 142617 - RNA, 32 nt, Human
cugucgcccaggcuggagugcaauggcacaau

SEQ ID NO: 142618 - RNA, 32 nt, Human
cugucgcccaggcuggagugcaauggcacgau

SEQ ID NO: 142619 - RNA, 32 nt, Human
cugucgcccaggcuggagugcaauggcgcgau

SEQ ID NO: 142620 - RNA, 32 nt, Human
cugucgcccaggcuggagugcacuggcgcaau

SEQ ID NO: 142621 - RNA, 32 nt, Human
cugucgcccaggcuggagugcacuggcgcgau

SEQ ID NO: 142622 - RNA, 23 nt, Human
cugucgcccaggcuggagugcag

SEQ ID NO: 142623 - RNA, 32 nt, Human
cugucgcccaggcuggagugcagaggugcgau

SEQ ID NO: 142624 - RNA, 32 nt, Human
cugucgcccaggcuggagugcaggggcauuag

SEQ ID NO: 142625 - RNA, 32 nt, Human
cugucgcccaggcuggagugcaggggcgcaau

SEQ ID NO: 142626 - RNA, 24 nt, Human
cugucgcccaggcuggagugcagu

SEQ ID NO: 142627 - RNA, 32 nt, Human
cugucgcccaggcuggagugcaguagcacgau

SEQ ID NO: 142628 - RNA, 32 nt, Human
cugucgcccaggcuggagugcaguagcgcgau

SEQ ID NO: 142629 - RNA, 32 nt, Human
cugucgcccaggcuggagugcaguagcgugau

SEQ ID NO: 142630 - RNA, 32 nt, Human
cugucgcccaggcuggagugcagucgugccau

SEQ ID NO: 142631 - RNA, 25 nt, Human
cugucgcccaggcuggagugcagug

SEQ ID NO: 142632 - RNA, 32 nt, Human
cugucgcccaggcuggagugcagugacaugau

SEQ ID NO: 142633 - RNA, 32 nt, Human
cugucgcccaggcuggagugcagugaugcaau

SEQ ID NO: 142634 - RNA, 32 nt, Human
cugucgcccaggcuggagugcagugccgcgau

SEQ ID NO: 142635 - RNA, 32 nt, Human
cugucgcccaggcuggagugcaguggagcgau

SEQ ID NO: 142636 - RNA, 32 nt, Human
cugucgcccaggcuggagugcaguggcacaau

SEQ ID NO: 142637 - RNA, 32 nt, Human
cugucgcccaggcuggagugcaguggcaccau

SEQ ID NO: 142638 - RNA, 32 nt, Human
cugucgcccaggcuggagugcaguggcacgau

SEQ ID NO: 142639 - RNA, 32 nt, Human
cugucgcccaggcuggagugcaguggcacuau

SEQ ID NO: 142640 - RNA, 32 nt, Human
cugucgcccaggcuggagugcaguggcaggau

SEQ ID NO: 142641 - RNA, 32 nt, Human
cugucgcccaggcuggagugcaguggcaugau

SEQ ID NO: 142642 - RNA, 32 nt, Human
cugucgcccaggcuggagugcaguggccugau

SEQ ID NO: 142643 - RNA, 32 nt, Human
cugucgcccaggcuggagugcaguggcgagau

SEQ ID NO: 142644 - RNA, 32 nt, Human
cugucgcccaggcuggagugcaguggcgcaau

SEQ ID NO: 142645 - RNA, 32 nt, Human
cugucgcccaggcuggagugcaguggcgccau

SEQ ID NO: 142646 - RNA, 32 nt, Human
cugucgcccaggcuggagugcaguggcgcgau

SEQ ID NO: 142647 - RNA, 32 nt, Human
cugucgcccaggcuggagugcaguggcgcggu

SEQ ID NO: 142648 - RNA, 32 nt, Human
cugucgcccaggcuggagugcaguggcgggau

SEQ ID NO: 142649 - RNA, 32 nt, Human
cugucgcccaggcuggagugcaguggcgugau

SEQ ID NO: 142650 - RNA, 32 nt, Human
cugucgcccaggcuggagugcaguggcucgau

SEQ ID NO: 142651 - RNA, 32 nt, Human
cugucgcccaggcuggagugcagugguacgau

SEQ ID NO: 142652 - RNA, 32 nt, Human
cugucgcccaggcuggagugcaguggugagau

SEQ ID NO: 142653 - RNA, 32 nt, Human
cugucgcccaggcuggagugcaguggugcaau

SEQ ID NO: 142654 - RNA, 32 nt, Human
cugucgcccaggcuggagugcaguggugcagu

SEQ ID NO: 142655 - RNA, 32 nt, Human
cugucgcccaggcuggagugcaguggugccau

SEQ ID NO: 142656 - RNA, 32 nt, Human
cugucgcccaggcuggagugcaguggugccgu

SEQ ID NO: 142657 - RNA, 32 nt, Human
cugucgcccaggcuggagugcaguggugcgac

SEQ ID NO: 142658 - RNA, 32 nt, Human
cugucgcccaggcuggagugcaguggugcgau

SEQ ID NO: 142659 - RNA, 32 nt, Human
cugucgcccaggcuggagugcagugguggcga

SEQ ID NO: 142660 - RNA, 32 nt, Human
cugucgcccaggcuggagugcaguggugugau

SEQ ID NO: 142661 - RNA, 32 nt, Human
cugucgcccaggcuggagugcagugucaagau

SEQ ID NO: 142662 - RNA, 32 nt, Human
cugucgcccaggcuggagugccauggcgcgau

SEQ ID NO: 142663 - RNA, 22 nt, Human
cugucgcccaggcuggagugcg

SEQ ID NO: 142664 - RNA, 24 nt, Human
cugucgcccaggcuggagugcgau

SEQ ID NO: 142665 - RNA, 24 nt, Human
cugucgcccaggcuggagugcggu

SEQ ID NO: 142666 - RNA, 32 nt, Human
cugucgcccaggcuggagugcgguggcgcaac

SEQ ID NO: 142667 - RNA, 32 nt, Human
cugucgcccaggcuggagugcgguggcgcgau

SEQ ID NO: 142668 - RNA, 32 nt, Human
cugucgcccaggcuggagugcgguggugcaau

SEQ ID NO: 142669 - RNA, 24 nt, Human
cugucgcccaggcuggaguguagu

SEQ ID NO: 142670 - RNA, 32 nt, Human
cugucgcccaggcuggaguguagugacgcgau

SEQ ID NO: 142671 - RNA, 32 nt, Human
cugucgcccaggcuggaguguaguggcaugau

SEQ ID NO: 142672 - RNA, 24 nt, Human
cugucgcccaggcuggaguguggu

SEQ ID NO: 142673 - RNA, 32 nt, Human
cugucgcccaggcuggaguucaguggcgcgau

SEQ ID NO: 142674 - RNA, 24 nt, Human
cugucgcccaggcuggcgugaagu

SEQ ID NO: 142675 - RNA, 32 nt, Human
cugucgcccaggcuggcgugaaguggcgcaac

SEQ ID NO: 142676 - RNA, 24 nt, Human
cugucgcccaggcuggcgugcagu

SEQ ID NO: 142677 - RNA, 32 nt, Human
cugucgcccaggcuggcgugcaguggcgcgau

SEQ ID NO: 142678 - RNA, 24 nt, Human
cugucgcccaggcuggggugcagu

SEQ ID NO: 142679 - RNA, 32 nt, Human
cugucgcccaggcuggggugcaguggcgccau

SEQ ID NO: 142680 - RNA, 32 nt, Human
cugucgcccaggcuggggugcaguggcgcgau

SEQ ID NO: 142681 - RNA, 24 nt, Human
cugucgcccaggcuggguugcagu

SEQ ID NO: 142682 - RNA, 22 nt, Human
cugucgcccaggcuguagugca

SEQ ID NO: 142683 - RNA, 24 nt, Human
cugucgcccaggcuguagugcaau

SEQ ID NO: 142684 - RNA, 32 nt, Human
cugucgcccaggcuguagugcaauggcgcaau

SEQ ID NO: 142685 - RNA, 25 nt, Human
cugucgcccagggcuggagugcagu

SEQ ID NO: 142686 - RNA, 24 nt, Human
cugucgcccaggguggagugcagu

SEQ ID NO: 142687 - RNA, 32 nt, Human
cugucgcccaggguggagugcaguggcgugau

SEQ ID NO: 142688 - RNA, 24 nt, Human
cugucgcccaggguggagugcggu

SEQ ID NO: 142689 - RNA, 32 nt, Human
cugucgcccaggguggagugcgguggcacgau

SEQ ID NO: 142690 - RNA, 21 nt, Human
cugucgcccagguuggagugc

SEQ ID NO: 142691 - RNA, 24 nt, Human
cugucgcccagguuggagugcagu

SEQ ID NO: 142692 - RNA, 32 nt, Human
cugucgcccagguuggagugcaguggcacgau

SEQ ID NO: 142693 - RNA, 32 nt, Human
cugucgcccagguuggagugcaguggcgcaau

SEQ ID NO: 142694 - RNA, 32 nt, Human
cugucgcccagguuggagugcaguggcgcgau

SEQ ID NO: 142695 - RNA, 32 nt, Human
cugucgcccagguuggagugcaguggcgugau

SEQ ID NO: 142696 - RNA, 32 nt, Human
cugucgcccagguuggagugcaguggugcaau

SEQ ID NO: 142697 - RNA, 32 nt, Human
cugucgcccagguuggagugccauggcaccau

SEQ ID NO: 142698 - RNA, 24 nt, Human
cugucgcccagguuguaaugcagu

SEQ ID NO: 142699 - RNA, 32 nt, Human
cugucgcccagguuugagugcaauggcacaau

SEQ ID NO: 142700 - RNA, 24 nt, Human
cugucgcccagucuguaaugcagu

SEQ ID NO: 142701 - RNA, 24 nt, Human
cugucgcccaugcuggagugcagu

SEQ ID NO: 142702 - RNA, 32 nt, Human
cugucgcccaugcuggagugcaguggcgcgau

SEQ ID NO: 142703 - RNA, 32 nt, Human
cugucgcccgggcuggaaugcaauggcacaau

SEQ ID NO: 142704 - RNA, 32 nt, Human
cugucgcccgggcuggagugcugugagcuguc

SEQ ID NO: 142705 - RNA, 20 nt, Human
cugucgcccuggcuggagug

SEQ ID NO: 142706 - RNA, 22 nt, Human
cugucgcccuggcuggagugca

SEQ ID NO: 142707 - RNA, 24 nt, Human
cugucgcccuggcuggagugcaau

SEQ ID NO: 142708 - RNA, 32 nt, Human
cugucgcccuggcuggagugcaauggugugau

SEQ ID NO: 142709 - RNA, 32 nt, Human
cugucgcccuggcuggaguggaaugccgugau

SEQ ID NO: 142710 - RNA, 32 nt, Human
cugucgccgcaccgcccccucgcucgcucucu

SEQ ID NO: 142711 - RNA, 32 nt, Human
cugucgccuaagcuggagugugguggcacgau

SEQ ID NO: 142712 - RNA, 22 nt, Human
cugucgccuaggcuggagugca

SEQ ID NO: 142713 - RNA, 23 nt, Human
cugucgccuaggcuggagugcaa

SEQ ID NO: 142714 - RNA, 32 nt, Human
cugucgccuaggcuggagugcaacagugugau

SEQ ID NO: 142715 - RNA, 24 nt, Human
cugucgccuaggcuggagugcagu

SEQ ID NO: 142716 - RNA, 32 nt, Human
cugucgccuaggcuggagugcaguggugcagu

SEQ ID NO: 142717 - RNA, 18 nt, Human
cugucgccucuuccugca

SEQ ID NO: 142718 - RNA, 19 nt, Human
cugucgccucuuccugcag

SEQ ID NO: 142719 - RNA, 32 nt, Human
cugucgccugcagcugcucgccugucuccguc

SEQ ID NO: 142720 - RNA, 23 nt, Human
cugucgccuggcuggagugcagu

SEQ ID NO: 142721 - RNA, 23 nt, Human
cugucgccuggcuggaguggagu

SEQ ID NO: 142722 - RNA, 24 nt, Human
cugucgccugggcuggaguacagu

SEQ ID NO: 142723 - RNA, 32 nt, Human
cugucgccugggcuggaguacaguggugcgau

SEQ ID NO: 142724 - RNA, 32 nt, Human
cugucgcgcaggguggagugcgguggcacgau

SEQ ID NO: 142725 - RNA, 24 nt, Human
cugucgcgccagcuggagugcagu

SEQ ID NO: 142726 - RNA, 32 nt, Human
cugucgcgccagcuggagugcagugccaugau

SEQ ID NO: 142727 - RNA, 32 nt, Human
cugucgcucaggcuggagagcgguggugcagu

SEQ ID NO: 142728 - RNA, 24 nt, Human
cugucgcucaggcuggagugcagu

SEQ ID NO: 142729 - RNA, 32 nt, Human
cugucgcucaggcuggagugcagugaugcaau

SEQ ID NO: 142730 - RNA, 32 nt, Human
cugucgcucaggcuggagugcaguggcgcgau

SEQ ID NO: 142731 - RNA, 32 nt, Human
cugucgcucaggcuggagugcaguggcgugau

SEQ ID NO: 142732 - RNA, 32 nt, Human
cugucgcuccgguuccucugccuccucuggcu

SEQ ID NO: 142733 - RNA, 32 nt, Human
cugucgcucgcgcuggagugcaguggcaugau

SEQ ID NO: 142734 - RNA, 32 nt, Human
cugucgcugccgagauccacagucgguugugg

SEQ ID NO: 142735 - RNA, 20 nt, Human
cugucgcuggcuuucagcca

SEQ ID NO: 142736 - RNA, 32 nt, Human
cugucgcuguaaccaucugcucccaggcugug

SEQ ID NO: 142737 - RNA, 23 nt, Human
cugucgcuuagcuggagugcggu

SEQ ID NO: 142738 - RNA, 16 nt, Human
cugucgcuugccgggc

SEQ ID NO: 142739 - RNA, 32 nt, Human
cugucggaaccuucuggcccuuccugcaaggu

SEQ ID NO: 142740 - RNA, 22 nt, Human
cugucggccaggcuggaaugca

SEQ ID NO: 142741 - RNA, 24 nt, Human
cugucggccaggcuggaaugcaau

SEQ ID NO: 142742 - RNA, 32 nt, Human
cugucggccaggcuggaaugcaauggugccaa

SEQ ID NO: 142743 - RNA, 24 nt, Human
cugucggccaggcuggagugcagu

SEQ ID NO: 142744 - RNA, 32 nt, Human
cugucggccaggcuggagugcaguggcaugau

SEQ ID NO: 142745 - RNA, 32 nt, Human
cugucggccagguuggagugcaguggugcaau

SEQ ID NO: 142746 - RNA, 22 nt, Human
cugucggccgacgaugagcuug

SEQ ID NO: 142747 - RNA, 32 nt, Human
cugucggccucuauaaacccagccucugcugu

SEQ ID NO: 142748 - RNA, 16 nt, Human
cugucggccuugcaag

SEQ ID NO: 142749 - RNA, 32 nt, Human
cugucggcuccugguugcacuuuggggaagga

SEQ ID NO: 142750 - RNA, 32 nt, Human
cugucggcugaaggauuucuccccagcuggug

SEQ ID NO: 142751 - RNA, 32 nt, Human
cugucgggaacugggugccaccagaggacaca

SEQ ID NO: 142752 - RNA, 32 nt, Human
cugucgggaagggagagccgaguugcgaggua

SEQ ID NO: 142753 - RNA, 32 nt, Human
cugucgggcaucccugucucagggacuucuuc

SEQ ID NO: 142754 - RNA, 32 nt, Human
cugucgggggcuguggauggguggggagcaaa

SEQ ID NO: 142755 - RNA, 23 nt, Human
cugucggguccuucagcaccugg

SEQ ID NO: 142756 - RNA, 23 nt, Human
cugucgguccccucccugagcca

SEQ ID NO: 142757 - RNA, 32 nt, Human
cugucgguggagucggcuacaaagggagcagc

SEQ ID NO: 142758 - RNA, 32 nt, Human
cugucgguggagucgguuacaaagggagcagc

SEQ ID NO: 142759 - RNA, 32 nt, Human
cugucggugucugucugucugcucuuagcugu

SEQ ID NO: 142760 - RNA, 24 nt, Human
cugucguccaggcuggagugcagu

SEQ ID NO: 142761 - RNA, 32 nt, Human
cugucguccaggcuggagugcaguacgcaauc

SEQ ID NO: 142762 - RNA, 32 nt, Human
cugucguccaggcuggagugcaguagcgcaau

SEQ ID NO: 142763 - RNA, 32 nt, Human
cugucguccaggcuggagugcagugcugcaau

SEQ ID NO: 142764 - RNA, 32 nt, Human
cugucguccaggcuggagugcaguggcacgau

SEQ ID NO: 142765 - RNA, 32 nt, Human
cugucguccaggcuggagugcaguggcgcaau

SEQ ID NO: 142766 - RNA, 32 nt, Human
cugucguccaggcuggagugcaguggcgccau

SEQ ID NO: 142767 - RNA, 32 nt, Human
cugucguccaggcuggagugcagugguguggu

SEQ ID NO: 142768 - RNA, 32 nt, Human
cugucguccaggcuggagugccguggcguaau

SEQ ID NO: 142769 - RNA, 32 nt, Human
cugucguccaggcuggagugcgguggcgugau

SEQ ID NO: 142770 - RNA, 22 nt, Human
cugucguccagguuagagugca

SEQ ID NO: 142771 - RNA, 24 nt, Human
cugucguccagguuagagugcaau

SEQ ID NO: 142772 - RNA, 32 nt, Human
cugucguccagguuagagugcaauggcuugau

SEQ ID NO: 142773 - RNA, 32 nt, Human
cugucguccuucagggcuccagccucuugaua

SEQ ID NO: 142774 - RNA, 24 nt, Human
cugucgucgaggcuggaguguagu

SEQ ID NO: 142775 - RNA, 32 nt, Human
cugucgucgaggcuggaguguaguggugcgau

SEQ ID NO: 142776 - RNA, 32 nt, Human
cugucgucgggaggaaagaugaaugggagggc

SEQ ID NO: 142777 - RNA, 32 nt, Human
cugucgugcaaagcucacgucaccaacugcug

SEQ ID NO: 142778 - RNA, 32 nt, Human
cugucgugccgcaguagagcacugcugcuucc

SEQ ID NO: 142779 - RNA, 32 nt, Human
cugucgugggaggugggcucugccuccuacca

SEQ ID NO: 142780 - RNA, 32 nt, Human
cugucguucuccacagcucccuucccuugccc

SEQ ID NO: 142781 - RNA, 32 nt, Human
cugucguugccaucaccuccagggggcgcuau

SEQ ID NO: 142782 - RNA, 32 nt, Human
cugucuaacacggugaaaccccaucucuacua

SEQ ID NO: 142783 - RNA, 32 nt, Human
cugucuacaaggaaaugggagguggagccucc

SEQ ID NO: 142784 - RNA, 32 nt, Human
cugucuacaaggaaaugggagguggaggguug

SEQ ID NO: 142785 - RNA, 32 nt, Human
cugucuaccagaugaggaaauggcaguucuga

SEQ ID NO: 142786 - RNA, 32 nt, Human
cugucuacccacccguccccuucacgcccuug

SEQ ID NO: 142787 - RNA, 32 nt, Human
cugucuacccacccucccuucuagcagauuuu

SEQ ID NO: 142788 - RNA, 32 nt, Human
cugucuacccuaguguccaucaugcccuggau

SEQ ID NO: 142789 - RNA, 32 nt, Human
cugucuaccuuuaauggagaagugagauguga

SEQ ID NO: 142790 - RNA, 18 nt, Human
cugucuacucccugcaag

SEQ ID NO: 142791 - RNA, 32 nt, Human
cugucuacuggcagacauuggugagaaagcgg

SEQ ID NO: 142792 - RNA, 32 nt, Human
cugucuagacaggcugucccaccccagggugg

SEQ ID NO: 142793 - RNA, 32 nt, Human
cugucuagagguugacucuuaguucuguaaau

SEQ ID NO: 142794 - RNA, 32 nt, Human
cugucuagcucauacacccauuucucuuugcu

SEQ ID NO: 142795 - RNA, 32 nt, Human
cugucuaggcugcuucuuccaacuccauccca

SEQ ID NO: 142796 - RNA, 32 nt, Human
cugucuaggugaggcugaggccgcccccacuc

SEQ ID NO: 142797 - RNA, 21 nt, Human
cugucuagucucuccuguaag

SEQ ID NO: 142798 - RNA, 32 nt, Human
cugucuauaaugaaugauauagaaggugguuu

SEQ ID NO: 142799 - RNA, 32 nt, Human
cugucuauccucucuucucuccuugcaggaag

SEQ ID NO: 142800 - RNA, 32 nt, Human
cugucuauggcagaaggacauccagagcccau

SEQ ID NO: 142801 - RNA, 21 nt, Human
cugucuauucaaucaccuggu

SEQ ID NO: 142802 - RNA, 32 nt, Human
cugucuauugaccuggugcaagaaacaugcuc

SEQ ID NO: 142803 - RNA, 32 nt, Human
cugucuauugcccaggcuggagugcaguggug

SEQ ID NO: 142804 - RNA, 32 nt, Human
cugucucaaaaacaagcaaacagacuuccuuc

SEQ ID NO: 142805 - RNA, 24 nt, Human
cugucucaaagaaaacugcugcag

SEQ ID NO: 142806 - RNA, 32 nt, Human
cugucucaaagaaagaaagaaagaaaagaaag

SEQ ID NO: 142807 - RNA, 18 nt, Human
cugucucaacagcuggaa

SEQ ID NO: 142808 - RNA, 32 nt, Human
cugucucaacuaauaauacaaaauuagccagg

SEQ ID NO: 142809 - RNA, 32 nt, Human
cugucucacccaggcuggagugcaguggcacg

SEQ ID NO: 142810 - RNA, 20 nt, Human
cugucucacccuugcuugca

SEQ ID NO: 142811 - RNA, 21 nt, Human
cugucucacucccccacggag

SEQ ID NO: 142812 - RNA, 32 nt, Human
cugucucacucugucucccaggcuggacugca

SEQ ID NO: 142813 - RNA, 22 nt, Human
cugucucacucuucugucuugu

SEQ ID NO: 142814 - RNA, 24 nt, Human
cugucucacuuauguccaaagagu

SEQ ID NO: 142815 - RNA, 32 nt, Human
cugucucagaauuccuccuccugggacucuca

SEQ ID NO: 142816 - RNA, 32 nt, Human
cugucucagagcugaugaccucaccguuguuu

SEQ ID NO: 142817 - RNA, 32 nt, Human
cugucucagcaacaucuuccuaaauaauuaga

SEQ ID NO: 142818 - RNA, 32 nt, Human
cugucucagccaaaccacugaucuucccugga

SEQ ID NO: 142819 - RNA, 32 nt, Human
cugucucagccaugcaaaccucauggagcauu

SEQ ID NO: 142820 - RNA, 21 nt, Human
cugucucagccucccaaggag

SEQ ID NO: 142821 - RNA, 32 nt, Human
cugucucagccucugggauugcagccuuugua

SEQ ID NO: 142822 - RNA, 20 nt, Human
cugucucagcuccugucaag

SEQ ID NO: 142823 - RNA, 32 nt, Human
cugucucaggagcacccugucuucuuaauucu

SEQ ID NO: 142824 - RNA, 32 nt, Human
cugucucaguuuugcagaugaagaugagauuc

SEQ ID NO: 142825 - RNA, 22 nt, Human
cugucucaguuuuuccaccugu

SEQ ID NO: 142826 - RNA, 32 nt, Human
cugucucaucccuugccaggagcucagggcug

SEQ ID NO: 142827 - RNA, 32 nt, Human
cugucucauucccauguggaugucggugacac

SEQ ID NO: 142828 - RNA, 32 nt, Human
cugucuccaaaacaaaaacaaaaacauuuuac

SEQ ID NO: 142829 - RNA, 32 nt, Human
cugucuccaagcuuugcccuguguucuccagc

SEQ ID NO: 142830 - RNA, 32 nt, Human
cugucuccaagucccugaacucagcagaaaua

SEQ ID NO: 142831 - RNA, 32 nt, Human
cugucuccacuaaaaauacaaaauuagccggg

SEQ ID NO: 142832 - RNA, 32 nt, Human
cugucuccagaacagcaaccacauugaauucu

SEQ ID NO: 142833 - RNA, 32 nt, Human
cugucuccagcuguuucuuggaaccugcucuc

SEQ ID NO: 142834 - RNA, 23 nt, Human
cugucuccaggcuggagugcagu

SEQ ID NO: 142835 - RNA, 32 nt, Human
cugucuccaguuuuucuccaucuccugggacg

SEQ ID NO: 142836 - RNA, 32 nt, Human
cugucuccaucgagauccuccccgucgcugug

SEQ ID NO: 142837 - RNA, 32 nt, Human
cugucucccaauuucuccuuuuagcuuacuuu

SEQ ID NO: 142838 - RNA, 32 nt, Human
cugucucccagacuggagugaguggugugauc

SEQ ID NO: 142839 - RNA, 24 nt, Human
cugucucccaggccggagugcagu

SEQ ID NO: 142840 - RNA, 32 nt, Human
cugucucccaggccggagugcaguggcacgau

SEQ ID NO: 142841 - RNA, 32 nt, Human
cugucucccaggcuagaguaccguggcacaau

SEQ ID NO: 142842 - RNA, 22 nt, Human
cugucucccaggcuagagugca

SEQ ID NO: 142843 - RNA, 24 nt, Human
cugucucccaggcuagagugcaau

SEQ ID NO: 142844 - RNA, 32 nt, Human
cugucucccaggcuagagugcaauggcacaac

SEQ ID NO: 142845 - RNA, 32 nt, Human
cugucucccaggcuagagugcaguggugcaau

SEQ ID NO: 142846 - RNA, 24 nt, Human
cugucucccaggcugaagugcagu

SEQ ID NO: 142847 - RNA, 32 nt, Human
cugucucccaggcugaagugcagugagucaag

SEQ ID NO: 142848 - RNA, 32 nt, Human
cugucucccaggcugaagugcaguggcacgau

SEQ ID NO: 142849 - RNA, 32 nt, Human
cugucucccaggcugcuggagugcaguggcac

SEQ ID NO: 142850 - RNA, 32 nt, Human
cugucucccaggcuggaauguagggugugcuc

SEQ ID NO: 142851 - RNA, 23 nt, Human
cugucucccaggcuggacugcag

SEQ ID NO: 142852 - RNA, 32 nt, Human
cugucucccaggcuggacugcagcagcgcagu

SEQ ID NO: 142853 - RNA, 24 nt, Human
cugucucccaggcuggacugcagu

SEQ ID NO: 142854 - RNA, 32 nt, Human
cugucucccaggcuggacugcaguggugcgau

SEQ ID NO: 142855 - RNA, 24 nt, Human
cugucucccaggcuggagcguagu

SEQ ID NO: 142856 - RNA, 32 nt, Human
cugucucccaggcuggagcguaguaaugcaau

SEQ ID NO: 142857 - RNA, 32 nt, Human
cugucucccaggcuggaggucaguggcacaaa

SEQ ID NO: 142858 - RNA, 21 nt, Human
cugucucccaggcuggagugc

SEQ ID NO: 142859 - RNA, 22 nt, Human
cugucucccaggcuggagugca

SEQ ID NO: 142860 - RNA, 24 nt, Human
cugucucccaggcuggagugcaau

SEQ ID NO: 142861 - RNA, 32 nt, Human
cugucucccaggcuggagugcaauggugcaau

SEQ ID NO: 142862 - RNA, 32 nt, Human
cugucucccaggcuggagugcaggcuuggagu

SEQ ID NO: 142863 - RNA, 24 nt, Human
cugucucccaggcuggagugcagu

SEQ ID NO: 142864 - RNA, 32 nt, Human
cugucucccaggcuggagugcagugacacaau

SEQ ID NO: 142865 - RNA, 32 nt, Human
cugucucccaggcuggagugcaguggagugau

SEQ ID NO: 142866 - RNA, 32 nt, Human
cugucucccaggcuggagugcaguggcacaau

SEQ ID NO: 142867 - RNA, 32 nt, Human
cugucucccaggcuggagugcaguggcacauc

SEQ ID NO: 142868 - RNA, 32 nt, Human
cugucucccaggcuggagugcaguggcacgau

SEQ ID NO: 142869 - RNA, 32 nt, Human
cugucucccaggcuggagugcaguggcaugau

SEQ ID NO: 142870 - RNA, 32 nt, Human
cugucucccaggcuggagugcaguggcguaau

SEQ ID NO: 142871 - RNA, 32 nt, Human
cugucucccaggcuggagugcaguggugcaau

SEQ ID NO: 142872 - RNA, 24 nt, Human
cugucucccaggcuggagugcggu

SEQ ID NO: 142873 - RNA, 32 nt, Human
cugucucccaggcuggagugcgguggcacaau

SEQ ID NO: 142874 - RNA, 32 nt, Human
cugucucccaggcuggagugcuauggugcaau

SEQ ID NO: 142875 - RNA, 32 nt, Human
cugucucccaggcuggagugugauggcgugau

SEQ ID NO: 142876 - RNA, 32 nt, Human
cugucucccaggcuggaguugcaguggugcaa

SEQ ID NO: 142877 - RNA, 24 nt, Human
cugucucccagguuggagugcagu

SEQ ID NO: 142878 - RNA, 32 nt, Human
cugucucccagguuggagugcaguggcacgau

SEQ ID NO: 142879 - RNA, 23 nt, Human
cugucucccaguugggcagcucu

SEQ ID NO: 142880 - RNA, 32 nt, Human
cugucucccauguggcaugaccagccuugggu

SEQ ID NO: 142881 - RNA, 32 nt, Human
cugucuccccaccacccccaccccgggagggg

SEQ ID NO: 142882 - RNA, 32 nt, Human
cugucuccccacuaccauccccaaacgcuccu

SEQ ID NO: 142883 - RNA, 32 nt, Human
cugucuccccggcuggagcgcaguggcacgau

SEQ ID NO: 142884 - RNA, 32 nt, Human
cugucuccccuucaaggacuucucccuugugg

SEQ ID NO: 142885 - RNA, 32 nt, Human
cugucucccgccacccacaccagcugucccac

SEQ ID NO: 142886 - RNA, 32 nt, Human
cugucucccgcuccgcagccccgggcacggcg

SEQ ID NO: 142887 - RNA, 32 nt, Human
cugucucccgggcuggagugcaguggcgcgau

SEQ ID NO: 142888 - RNA, 22 nt, Human
cugucucccuaacucaacugcu

SEQ ID NO: 142889 - RNA, 32 nt, Human
cugucucccucuuuaccugagucaacgguacu

SEQ ID NO: 142890 - RNA, 32 nt, Human
cugucucccugcccucugccauccugaaccau

SEQ ID NO: 142891 - RNA, 32 nt, Human
cugucucccuguucccccuccccaguuuucca

SEQ ID NO: 142892 - RNA, 32 nt, Human
cugucucccuuccaucuuuucucccauuccuc

SEQ ID NO: 142893 - RNA, 32 nt, Human
cugucuccgaggcuggaauacgguggugcgau

SEQ ID NO: 142894 - RNA, 32 nt, Human
cugucuccgaggcuggagugcaauguugcaau

SEQ ID NO: 142895 - RNA, 32 nt, Human
cugucuccuaaccugccggggucauuccccac

SEQ ID NO: 142896 - RNA, 24 nt, Human
cugucuccuaagcuggagugcagu

SEQ ID NO: 142897 - RNA, 32 nt, Human
cugucuccuaagcuggagugcaguggcaucau

SEQ ID NO: 142898 - RNA, 32 nt, Human
cugucuccuaccucugcucuuggaggagaugg

SEQ ID NO: 142899 - RNA, 32 nt, Human
cugucuccuaggaguggacuggucaaagagag

SEQ ID NO: 142900 - RNA, 32 nt, Human
cugucuccuaggcuggagcgcaguggugcaau

SEQ ID NO: 142901 - RNA, 24 nt, Human
cugucuccuaggcuggagugcagu

SEQ ID NO: 142902 - RNA, 32 nt, Human
cugucuccuaggcuggagugcaguggugugau

SEQ ID NO: 142903 - RNA, 32 nt, Human
cugucuccucagcugcucaccaccaccccacc

SEQ ID NO: 142904 - RNA, 32 nt, Human
cugucuccuccacucuccuccucacccucucg

SEQ ID NO: 142905 - RNA, 32 nt, Human
cugucuccuccccucccuccuucuuuaguuua

SEQ ID NO: 142906 - RNA, 32 nt, Human
cugucuccucccugccuccugccuccugcggc

SEQ ID NO: 142907 - RNA, 17 nt, Human
cugucuccuccugcagg

SEQ ID NO: 142908 - RNA, 32 nt, Human
cugucuccucuccucugaucuguucuuucuug

SEQ ID NO: 142909 - RNA, 32 nt, Human
cugucuccucugcagaggcggauuucccugac

SEQ ID NO: 142910 - RNA, 32 nt, Human
cugucuccugcauauccagccuccugcgacuc

SEQ ID NO: 142911 - RNA, 32 nt, Human
cugucuccugcccagggacgccacccagguca

SEQ ID NO: 142912 - RNA, 32 nt, Human
cugucuccuucccacuguccuuucuccaggcc

SEQ ID NO: 142913 - RNA, 32 nt, Human
cugucuccuuguaauuuugauuacaaaaauuu

SEQ ID NO: 142914 - RNA, 32 nt, Human
cugucuccuugucuggagugugguggcacagu

SEQ ID NO: 142915 - RNA, 32 nt, Human
cugucuccuuucucuauaugucugaaagaaaa

SEQ ID NO: 142916 - RNA, 32 nt, Human
cugucuccuuuuccuuucccuuccuuugucua

SEQ ID NO: 142917 - RNA, 24 nt, Human
cugucucgcaggccagagugcagu

SEQ ID NO: 142918 - RNA, 32 nt, Human
cugucucgccguuuguguuugccuuccacaac

SEQ ID NO: 142919 - RNA, 32 nt, Human
cugucucggaaccugugagcugcaccagguag

SEQ ID NO: 142920 - RNA, 32 nt, Human
cugucucuaaccacuccugggcuaaggaguaa

SEQ ID NO: 142921 - RNA, 32 nt, Human
cugucucuacaaaaauacaaaaauuagcuggg

SEQ ID NO: 142922 - RNA, 32 nt, Human
cugucucuacaaaaauacaaaaauuaggccgg

SEQ ID NO: 142923 - RNA, 32 nt, Human
cugucucuacaaaaauacaaaaauuagguggg

SEQ ID NO: 142924 - RNA, 32 nt, Human
cugucucuaccaaaauacaaaaauuagccggg

SEQ ID NO: 142925 - RNA, 32 nt, Human
cugucucuacuaaaaauacaaaauuaacuggg

SEQ ID NO: 142926 - RNA, 32 nt, Human
cugucucuacuaaaaauacaaaauuagccagg

SEQ ID NO: 142927 - RNA, 32 nt, Human
cugucucuacuaaaaauacaaaauuagccaug

SEQ ID NO: 142928 - RNA, 32 nt, Human
cugucucuacuaaaaauacaaaauuagcuggg

SEQ ID NO: 142929 - RNA, 32 nt, Human
cugucucuacuaaaaauacagaaaaauuagcc

SEQ ID NO: 142930 - RNA, 32 nt, Human
cugucucuacuaaaaaugcaaaauuagucagg

SEQ ID NO: 142931 - RNA, 32 nt, Human
cugucucuacuaaaaauuaaaaauuagcugga

SEQ ID NO: 142932 - RNA, 32 nt, Human
cugucucuacuaaaauacaaaaauuagcuggg

SEQ ID NO: 142933 - RNA, 32 nt, Human
cugucucuacuaagaauacaaaauuagcuggg

SEQ ID NO: 142934 - RNA, 32 nt, Human
cugucucuacuaaggauacaaaauuagccggg

SEQ ID NO: 142935 - RNA, 32 nt, Human
cugucucuacuagaaauacagaaaaauuagcu

SEQ ID NO: 142936 - RNA, 32 nt, Human
cugucucuacugaaauacaaaagaaauuagcc

SEQ ID NO: 142937 - RNA, 32 nt, Human
cugucucuaugccaccacuggccaccuagagc

SEQ ID NO: 142938 - RNA, 32 nt, Human
cugucucuccaccaugugcuccaccucgugcu

SEQ ID NO: 142939 - RNA, 32 nt, Human
cugucucucccuguucagcuguuggccggccc

SEQ ID NO: 142940 - RNA, 32 nt, Human
cugucucucccuuucucccccucucucucugc

SEQ ID NO: 142941 - RNA, 32 nt, Human
cugucucuccuaaaaauacaaaauuagccggg

SEQ ID NO: 142942 - RNA, 32 nt, Human
cugucucuccuccccuccucucucucuuccuc

SEQ ID NO: 142943 - RNA, 32 nt, Human
cugucucuccuccccuccucucucuuccucuc

SEQ ID NO: 142944 - RNA, 32 nt, Human
cugucucuccuuccucccuuccuuuacaguuu

SEQ ID NO: 142945 - RNA, 18 nt, Human
cugucucucuccugcaag

SEQ ID NO: 142946 - RNA, 32 nt, Human
cugucucucugccucucuuucuccugcuacag

SEQ ID NO: 142947 - RNA, 32 nt, Human
cugucucucuuucucuccuuuuaauuuuggug

SEQ ID NO: 142948 - RNA, 32 nt, Human
cugucucugauucaccaaacagcuucaacccu

SEQ ID NO: 142949 - RNA, 31 nt, Human
cugucucugccuccugggccuucagaaggga

SEQ ID NO: 142950 - RNA, 20 nt, Human
cugucucugccucuggguca

SEQ ID NO: 142951 - RNA, 32 nt, Human
cugucucugccuggagcccagguugcaggugg

SEQ ID NO: 142952 - RNA, 32 nt, Human
cugucucugcugucccaguuuugagguuuggu

SEQ ID NO: 142953 - RNA, 32 nt, Human
cugucucugggaacugggugccagcgcugagg

SEQ ID NO: 142954 - RNA, 21 nt, Human
cugucucuggguccugggcca

SEQ ID NO: 142955 - RNA, 32 nt, Human
cugucucugucacccaggcuggagugcagugg

SEQ ID NO: 142956 - RNA, 32 nt, Human
cugucucuguuaaaaauacaaaauuagccagg

SEQ ID NO: 142957 - RNA, 21 nt, Human
cugucucuuacagcauccugg

SEQ ID NO: 142958 - RNA, 32 nt, Human
cugucucuucuuucauuuuccccgccaccaac

SEQ ID NO: 142959 - RNA, 32 nt, Human
cugucucuugaggucccuugaaucuuccgcuu

SEQ ID NO: 142960 - RNA, 32 nt, Human
cugucucuugcauaagccucaggccuggcccu

SEQ ID NO: 142961 - RNA, 32 nt, Human
cugucucuuguagcuuccuggggugggaggca

SEQ ID NO: 142962 - RNA, 32 nt, Human
cugucugaacuauuuuacauuuuauggugucu

SEQ ID NO: 142963 - RNA, 32 nt, Human
cugucugaauccugaacacaggcaccaggacu

SEQ ID NO: 142964 - RNA, 32 nt, Human
cugucugaccacugcagaccagucucggaggu

SEQ ID NO: 142965 - RNA, 32 nt, Human
cugucugacuccauccugggggcccaggggaa

SEQ ID NO: 142966 - RNA, 32 nt, Human
cugucugacucugacaaguccucccucacuga

SEQ ID NO: 142967 - RNA, 32 nt, Human
cugucugacucuuccucuuccuccugcucccu

SEQ ID NO: 142968 - RNA, 32 nt, Human
cugucugagagaggaggcaggagccccagggc

SEQ ID NO: 142969 - RNA, 24 nt, Human
cugucugagcccaggaguucaaga

SEQ ID NO: 142970 - RNA, 32 nt, Human
cugucugagccccacccugcgagggugcucug

SEQ ID NO: 142971 - RNA, 21 nt, Human
cugucugaggagugguuccag

SEQ ID NO: 142972 - RNA, 32 nt, Human
cugucugcaaagcaguugcagcaaccucccuc

SEQ ID NO: 142973 - RNA, 32 nt, Human
cugucugcaagccauugacaaucuagucaggg

SEQ ID NO: 142974 - RNA, 32 nt, Human
cugucugcaccuaucauacugacagcaugagc

SEQ ID NO: 142975 - RNA, 32 nt, Human
cugucugcacuucaaggcaggaauucucaagg

SEQ ID NO: 142976 - RNA, 32 nt, Human
cugucugcagauccaccacuucccugggcagu

SEQ ID NO: 142977 - RNA, 32 nt, Human
cugucugcagcaagggcauuacugcccaggua

SEQ ID NO: 142978 - RNA, 32 nt, Human
cugucugcagccucugcucacuccaggacgug

SEQ ID NO: 142979 - RNA, 32 nt, Human
cugucugcauccaccuccccagccuuugucac

SEQ ID NO: 142980 - RNA, 32 nt, Human
cugucugccaaugugggauagaaggacuggug

SEQ ID NO: 142981 - RNA, 32 nt, Human
cugucugccacauugaguacagaaaaguugua

SEQ ID NO: 142982 - RNA, 32 nt, Human
cugucugccagccugccugaccuggauucuga

SEQ ID NO: 142983 - RNA, 32 nt, Human
cugucugccaucacugugaccuagacuaugga

SEQ ID NO: 142984 - RNA, 32 nt, Human
cugucugccaucugaguguccaucuacauucu

SEQ ID NO: 142985 - RNA, 32 nt, Human
cugucugcccaccuucccuucuucccaccugc

SEQ ID NO: 142986 - RNA, 32 nt, Human
cugucugcccucccucuucacucugccuaccu

SEQ ID NO: 142987 - RNA, 32 nt, Human
cugucugccggugggucugccugcccgcgcag

SEQ ID NO: 142988 - RNA, 32 nt, Human
cugucugccucugccagcagcgaguccuaagc

SEQ ID NO: 142989 - RNA, 32 nt, Human
cugucugccuguauuuucggacuuugacauuu

SEQ ID NO: 142990 - RNA, 32 nt, Human
cugucugccugucugucugccucugaucucug

SEQ ID NO: 142991 - RNA, 32 nt, Human
cugucugcgcccccauuucuccauuucugccg

SEQ ID NO: 142992 - RNA, 32 nt, Human
cugucugcgugcaguuauuacaugcauuugug

SEQ ID NO: 142993 - RNA, 19 nt, Human
cugucugcucccccgggcc

SEQ ID NO: 142994 - RNA, 32 nt, Human
cugucugcugcucucucugggggccgcacaau

SEQ ID NO: 142995 - RNA, 32 nt, Human
cugucugcugucagccccuccuggugcuggug

SEQ ID NO: 142996 - RNA, 32 nt, Human
cugucugcugucccuguacuccaggcaccugc

SEQ ID NO: 142997 - RNA, 32 nt, Human
cugucugcuucaggagcuucguacuggcuaau

SEQ ID NO: 142998 - RNA, 32 nt, Human
cugucuggaagacauguccccguggcuguggg

SEQ ID NO: 142999 - RNA, 32 nt, Human
cugucuggccagaccuguucuccagagcucaa

SEQ ID NO: 143000 - RNA, 32 nt, Human
cugucuggccaggcugcggcacgaggaugugg

SEQ ID NO: 143001 - RNA, 24 nt, Human
cugucuggcccucccucuccagca

SEQ ID NO: 143002 - RNA, 32 nt, Human
cugucuggcucaaugaucuacauucugaaguu

SEQ ID NO: 143003 - RNA, 32 nt, Human
cugucugggaggccuuaggcaaguuugaucaa

SEQ ID NO: 143004 - RNA, 32 nt, Human
cugucugggcgaaggguagggguggguagggg

SEQ ID NO: 143005 - RNA, 32 nt, Human
cugucugggggaaaggacaagucagggaccac

SEQ ID NO: 143006 - RNA, 32 nt, Human
cugucugggugguuggaacauguuugaauuuu

SEQ ID NO: 143007 - RNA, 32 nt, Human
cugucuggguuccagcccucccucagauguac

SEQ ID NO: 143008 - RNA, 32 nt, Human
cugucugguaccuuccccuccugccccugcac

SEQ ID NO: 143009 - RNA, 32 nt, Human
cugucuggucagagucucucugcugugggccu

SEQ ID NO: 143010 - RNA, 18 nt, Human
cugucugguuuccuguaa

SEQ ID NO: 143011 - RNA, 32 nt, Human
cugucuguaaaaagggaggugagaauaccuac

SEQ ID NO: 143012 - RNA, 32 nt, Human
cugucuguacuaaaauacaaaaaucagccagg

SEQ ID NO: 143013 - RNA, 32 nt, Human
cugucuguagcaucugcuccuccacagaggga

SEQ ID NO: 143014 - RNA, 32 nt, Human
cugucuguagugccugcuguuuggaaagggug

SEQ ID NO: 143015 - RNA, 32 nt, Human
cugucugucacccaggcuggaguacaguggca

SEQ ID NO: 143016 - RNA, 32 nt, Human
cugucuguccacugcuguaaccccgcgccggc

SEQ ID NO: 143017 - RNA, 32 nt, Human
cugucuguccauccaucucugcccucuguacc

SEQ ID NO: 143018 - RNA, 32 nt, Human
cugucuguccuccucccuaauucagacccagc

SEQ ID NO: 143019 - RNA, 32 nt, Human
cugucugucggucugugucuuggucuguugcc

SEQ ID NO: 143020 - RNA, 32 nt, Human
cugucugucucaggaacucauggcagugguuu

SEQ ID NO: 143021 - RNA, 32 nt, Human
cugucugucugugggcuucagcacuuuaaaga

SEQ ID NO: 143022 - RNA, 18 nt, Human
cugucugugaccugcgag

SEQ ID NO: 143023 - RNA, 32 nt, Human
cugucugugccgcauucuccauggccuuugca

SEQ ID NO: 143024 - RNA, 32 nt, Human
cugucuguguuucccagguggagcucauguuu

SEQ ID NO: 143025 - RNA, 32 nt, Human
cugucuguucucuccccagucagccugggcuu

SEQ ID NO: 143026 - RNA, 32 nt, Human
cugucuuacgucaugcugacugggugcuaggg

SEQ ID NO: 143027 - RNA, 32 nt, Human
cugucuuagcugccuguuugaaugacuguucu

SEQ ID NO: 143028 - RNA, 32 nt, Human
cugucuucaacaacaggugcugcuuagucauu

SEQ ID NO: 143029 - RNA, 32 nt, Human
cugucuucacaaaacggggguccuccaggagu

SEQ ID NO: 143030 - RNA, 32 nt, Human
cugucuucacugccaaguauucagaggauaug

SEQ ID NO: 143031 - RNA, 32 nt, Human
cugucuucagggacuguccugcccuuuagcug

SEQ ID NO: 143032 - RNA, 32 nt, Human
cugucuucagggauugugccugcgucccucgg

SEQ ID NO: 143033 - RNA, 32 nt, Human
cugucuucauccuauacuucaagcccagugua

SEQ ID NO: 143034 - RNA, 32 nt, Human
cugucuucauuuuggccccagcauucuuaauu

SEQ ID NO: 143035 - RNA, 32 nt, Human
cugucuucauuuuucuccucuaaagaacuuaa

SEQ ID NO: 143036 - RNA, 23 nt, Human
cugucuuccaccacaacaacccu

SEQ ID NO: 143037 - RNA, 32 nt, Human
cugucuuccaccggcccugcccugugugccug

SEQ ID NO: 143038 - RNA, 32 nt, Human
cugucuuccagccuccaaaccuggccaagccc

SEQ ID NO: 143039 - RNA, 32 nt, Human
cugucuuccaggaaugccacaggcugguggac

SEQ ID NO: 143040 - RNA, 24 nt, Human
cugucuuccaggcuggagugcagu

SEQ ID NO: 143041 - RNA, 32 nt, Human
cugucuuccaucuggcaccauaaaaacaugaa

SEQ ID NO: 143042 - RNA, 32 nt, Human
cugucuucccuguucuucauccuuucuucuca

SEQ ID NO: 143043 - RNA, 24 nt, Human
cugucuuccgcuagaacaacgucu

SEQ ID NO: 143044 - RNA, 32 nt, Human
cugucuuccuccaggacacacugugaggauua

SEQ ID NO: 143045 - RNA, 19 nt, Human
cugucuuccucccgagcca

SEQ ID NO: 143046 - RNA, 32 nt, Human
cugucuuccuccucacugggugaggacagggc

SEQ ID NO: 143047 - RNA, 17 nt, Human
cugucuuccuccugcga

SEQ ID NO: 143048 - RNA, 17 nt, Human
cugucuuccucugcaag

SEQ ID NO: 143049 - RNA, 32 nt, Human
cugucuuccugagggcagcccaggaccuuugg

SEQ ID NO: 143050 - RNA, 21 nt, Human
cugucuuccugcucagacucu

SEQ ID NO: 143051 - RNA, 24 nt, Human
cugucuuccuggguuugcagcucu

SEQ ID NO: 143052 - RNA, 32 nt, Human
cugucuucucuuccuccuccaccgagucgugc

SEQ ID NO: 143053 - RNA, 32 nt, Human
cugucuucucuucugucucuucucuuucaucu

SEQ ID NO: 143054 - RNA, 32 nt, Human
cugucuucugguccaggcagaucaggggcucu

SEQ ID NO: 143055 - RNA, 32 nt, Human
cugucuucuuggcacuuucaggauuucuuaau

SEQ ID NO: 143056 - RNA, 32 nt, Human
cugucuucuuucgucuucacaccaacaugcag

SEQ ID NO: 143057 - RNA, 32 nt, Human
cugucuugaauuuggcccucccucuccccucu

SEQ ID NO: 143058 - RNA, 17 nt, Human
cugucuugaccugcagg

SEQ ID NO: 143059 - RNA, 32 nt, Human
cugucuugauaauuagccugaccagcaggaug

SEQ ID NO: 143060 - RNA, 18 nt, Human
cugucuugccacuacaag

SEQ ID NO: 143061 - RNA, 32 nt, Human
cugucuugcccaagccugcucugaacacagcc

SEQ ID NO: 143062 - RNA, 26 nt, Human
cugucuugcccaggcuggagugcagu

SEQ ID NO: 143063 - RNA, 32 nt, Human
cugucuugcccaggcuggagugcaguggccug

SEQ ID NO: 143064 - RNA, 32 nt, Human
cugucuugcccaggcuggaguucaggggcuau

SEQ ID NO: 143065 - RNA, 32 nt, Human
cugucuugcucauucaugcagccucaacacug

SEQ ID NO: 143066 - RNA, 21 nt, Human
cugucuugcuccuauggaguc

SEQ ID NO: 143067 - RNA, 32 nt, Human
cugucuugcugcguucaagugacucgaagaag

SEQ ID NO: 143068 - RNA, 32 nt, Human
cugucuugcuguggcugucacucccaggcugu

SEQ ID NO: 143069 - RNA, 32 nt, Human
cugucuugcuuuuaaguggcuuggggaaagug

SEQ ID NO: 143070 - RNA, 32 nt, Human
cugucuuggauucauguuaagaagcgucuuca

SEQ ID NO: 143071 - RNA, 32 nt, Human
cugucuuggggaaugaugccagcugggaaauu

SEQ ID NO: 143072 - RNA, 32 nt, Human
cugucuuggugagggccaggggacaggucggg

SEQ ID NO: 143073 - RNA, 32 nt, Human
cugucuuguccaccauaguauccccagcaccc

SEQ ID NO: 143074 - RNA, 32 nt, Human
cugucuuguuauagacuggccucccagguccu

SEQ ID NO: 143075 - RNA, 32 nt, Human
cugucuuguuccaccaguauuuaccaggaaaa

SEQ ID NO: 143076 - RNA, 32 nt, Human
cugucuuguuuggaagucauaucugucuuugc

SEQ ID NO: 143077 - RNA, 32 nt, Human
cugucuuuacgugaccaauccccugcuacagc

SEQ ID NO: 143078 - RNA, 32 nt, Human
cugucuuuccagcaugcccuggggugcagugg

SEQ ID NO: 143079 - RNA, 32 nt, Human
cugucuuugccuggauccauagcgagagugcu

SEQ ID NO: 143080 - RNA, 32 nt, Human
cugucuuugugucucugugacucucauuucuu

SEQ ID NO: 143081 - RNA, 32 nt, Human
cugucuuuguuacccaggcuggaguacagugg

SEQ ID NO: 143082 - RNA, 32 nt, Human
cugucuuuuacaugaagauuucagagaaugug

SEQ ID NO: 143083 - RNA, 32 nt, Human
cugucuuuucagacugcagauuuccacaagga

SEQ ID NO: 143084 - RNA, 19 nt, Human
cugucuuuugccccgggcu

SEQ ID NO: 143085 - RNA, 22 nt, Human
cugucuuuugugccucugcaag

SEQ ID NO: 143086 - RNA, 32 nt, Human
cugugaaaaaccugaugcagugcuccauccaa

SEQ ID NO: 143087 - RNA, 32 nt, Human
cugugaaaaauacaaaaacuaaccaggcgugg

SEQ ID NO: 143088 - RNA, 32 nt, Human
cugugaaaauguuuccagugcaagagaaggga

SEQ ID NO: 143089 - RNA, 32 nt, Human
cugugaaacugaggcaccguuccuagacaucu

SEQ ID NO: 143090 - RNA, 31 nt, Human
cugugaaagagacaauuugauuggggaagaa

SEQ ID NO: 143091 - RNA, 32 nt, Human
cugugaaaucaugucuguauuuuucuggagca

SEQ ID NO: 143092 - RNA, 32 nt, Human
cugugaaauggacugaauccuggccacuuuau

SEQ ID NO: 143093 - RNA, 32 nt, Human
cugugaaaugugagaggaagucagcacucauu

SEQ ID NO: 143094 - RNA, 32 nt, Human
cugugaacagcacugcuccacauggugucggc

SEQ ID NO: 143095 - RNA, 32 nt, Human
cugugaacauggcggcgcccguugucacggcc

SEQ ID NO: 143096 - RNA, 32 nt, Human
cugugaacauugcuguuucuagugggccagaa

SEQ ID NO: 143097 - RNA, 32 nt, Human
cugugaaccagccccgcucaccugccagcccc

SEQ ID NO: 143098 - RNA, 32 nt, Human
cugugaacccccuuccugucaugcccagggcc

SEQ ID NO: 143099 - RNA, 32 nt, Human
cugugaaccucacuuucccuauguucagcagc

SEQ ID NO: 143100 - RNA, 32 nt, Human
cugugaaccuccgggcucaucuguaccaagga

SEQ ID NO: 143101 - RNA, 32 nt, Human
cugugaacucugcccaugugucaggaguggcu

SEQ ID NO: 143102 - RNA, 32 nt, Human
cugugaacugaggaggggaggggugugcuggg

SEQ ID NO: 143103 - RNA, 32 nt, Human
cugugaacugcagacuccuuuguacucucaaa

SEQ ID NO: 143104 - RNA, 32 nt, Human
cugugaacugggacagaagcagaggaggcugc

SEQ ID NO: 143105 - RNA, 32 nt, Human
cugugaacuucacuuugccacagggaggcacu

SEQ ID NO: 143106 - RNA, 32 nt, Human
cugugaacuuccuucuccuggcucagaagcuu

SEQ ID NO: 143107 - RNA, 32 nt, Human
cugugaagaagaggagaaaagcaauccuccug

SEQ ID NO: 143108 - RNA, 32 nt, Human
cugugaagaagcaagcucucugucaaugggag

SEQ ID NO: 143109 - RNA, 32 nt, Human
cugugaagaaggugccugcuucucuuuugccu

SEQ ID NO: 143110 - RNA, 32 nt, Human
cugugaagacuguuuccagccuggcugugagc

SEQ ID NO: 143111 - RNA, 32 nt, Human
cugugaagagagaguuaauauauuuguuuuau

SEQ ID NO: 143112 - RNA, 32 nt, Human
cugugaagaggaagaggcggcggcggcggcgg

SEQ ID NO: 143113 - RNA, 32 nt, Human
cugugaagcagcuccagcuaugugugaagaag

SEQ ID NO: 143114 - RNA, 32 nt, Human
cugugaagcuggcgaggaaggaggaagaaggg

SEQ ID NO: 143115 - RNA, 32 nt, Human
cugugaaggaaaaggggacaggaacaaaggac

SEQ ID NO: 143116 - RNA, 32 nt, Human
cugugaaggagaggguggggagggaggcaucu

SEQ ID NO: 143117 - RNA, 32 nt, Human
cugugaaggcaaagggccucugagggaguauu

SEQ ID NO: 143118 - RNA, 32 nt, Human
cugugaaggcagcugcacagggcuaggggcag

SEQ ID NO: 143119 - RNA, 32 nt, Human
cugugaaggcugccuuaggucucuccagugcc

SEQ ID NO: 143120 - RNA, 32 nt, Human
cugugaaggcuucuccuuccuucuuccucugc

SEQ ID NO: 143121 - RNA, 32 nt, Human
cugugaagggagcagucaaugggauagaaaga

SEQ ID NO: 143122 - RNA, 32 nt, Human
cugugaagugcuagaacauuuuagacuuuguu

SEQ ID NO: 143123 - RNA, 32 nt, Human
cugugaaguuugagcaagcggccuucccaaga

SEQ ID NO: 143124 - RNA, 32 nt, Human
cugugaauaacugcacuccagccugggcaaca

SEQ ID NO: 143125 - RNA, 32 nt, Human
cugugaauagccacugcacuccagccugggca

SEQ ID NO: 143126 - RNA, 32 nt, Human
cugugaauagccacugcacuccaucuugggca

SEQ ID NO: 143127 - RNA, 32 nt, Human
cugugaauagccacugcacucuagucugggga

SEQ ID NO: 143128 - RNA, 32 nt, Human
cugugaauagccacugcacuugagccucuugg

SEQ ID NO: 143129 - RNA, 32 nt, Human
cugugaauagcucuccagcaggaagcaacagc

SEQ ID NO: 143130 - RNA, 32 nt, Human
cugugaauccugggaggggaaggguggccgcc

SEQ ID NO: 143131 - RNA, 32 nt, Human
cugugaaugagugagauccuggaggacccugg

SEQ ID NO: 143132 - RNA, 32 nt, Human
cugugaaugauaccuguuuuguuguuucugaa

SEQ ID NO: 143133 - RNA, 32 nt, Human
cugugaaugcagaccccgccucccacgagauc

SEQ ID NO: 143134 - RNA, 31 nt, Human
cugugaaugcagaccccgccucccaggagau

SEQ ID NO: 143135 - RNA, 32 nt, Human
cugugaaugcagcuugcuucucucuacagauu

SEQ ID NO: 143136 - RNA, 32 nt, Human
cugugaaugggaauugagccaacuguuauaga

SEQ ID NO: 143137 - RNA, 32 nt, Human
cugugaaugugauacgggauagagacugcaug

SEQ ID NO: 143138 - RNA, 32 nt, Human
cugugaauucugccacugugcccagcucugaa

SEQ ID NO: 143139 - RNA, 32 nt, Human
cugugaauugccacugcacuccagccuaagca

SEQ ID NO: 143140 - RNA, 32 nt, Human
cugugaauuuccaaagggagcauuggaggaga

SEQ ID NO: 143141 - RNA, 19 nt, Human
cugugacaaagaagaccac

SEQ ID NO: 143142 - RNA, 32 nt, Human
cugugacaaccaggagcccugucuguggguuc

SEQ ID NO: 143143 - RNA, 32 nt, Human
cugugacaacccagagaccuggggucagccuu

SEQ ID NO: 143144 - RNA, 32 nt, Human
cugugacaaucagcuugagucucucugccaag

SEQ ID NO: 143145 - RNA, 32 nt, Human
cugugacacccagccaagcaggcacaggagga

SEQ ID NO: 143146 - RNA, 32 nt, Human
cugugacacucaccgcggagguuugcaguuuc

SEQ ID NO: 143147 - RNA, 32 nt, Human
cugugacacugcacuccagccugggcaacaga

SEQ ID NO: 143148 - RNA, 20 nt, Human
cugugacacuguccuuuuca

SEQ ID NO: 143149 - RNA, 32 nt, Human
cugugacagacacauuuucuuagccuucaccu

SEQ ID NO: 143150 - RNA, 32 nt, Human
cugugacagcuucucccuggagccucuggcca

SEQ ID NO: 143151 - RNA, 32 nt, Human
cugugacaggcagcagagacuugggacauugc

SEQ ID NO: 143152 - RNA, 32 nt, Human
cugugacaggcaggagugggcugcuaugagga

SEQ ID NO: 143153 - RNA, 32 nt, Human
cugugacauaaauaaaggugucauaaagacag

SEQ ID NO: 143154 - RNA, 32 nt, Human
cugugacaucucccucuccuugcuggcuccau

SEQ ID NO: 143155 - RNA, 32 nt, Human
cugugacaucugccugggcuugagugcuacgg

SEQ ID NO: 143156 - RNA, 32 nt, Human
cugugacauuucagccugaccaugaagacggc

SEQ ID NO: 143157 - RNA, 32 nt, Human
cugugaccacagcugcucuccaggugcugggc

SEQ ID NO: 143158 - RNA, 32 nt, Human
cugugaccagagcaaccagagccugccacccg

SEQ ID NO: 143159 - RNA, 23 nt, Human
cugugaccaggcuggaguauagu

SEQ ID NO: 143160 - RNA, 32 nt, Human
cugugacccaagaacuccugaaaucauauaga

SEQ ID NO: 143161 - RNA, 32 nt, Human
cugugacccaccacaaccuccagccucccuuu

SEQ ID NO: 143162 - RNA, 32 nt, Human
cugugacccaggaggucugguguagggggugc

SEQ ID NO: 143163 - RNA, 32 nt, Human
cugugacccuggacaaagagcuuuaaccugcu

SEQ ID NO: 143164 - RNA, 32 nt, Human
cugugacccuucucaacucccccaccaugcgu

SEQ ID NO: 143165 - RNA, 32 nt, Human
cugugaccuccaggagccaaugcacuggaccc

SEQ ID NO: 143166 - RNA, 32 nt, Human
cugugaccucccauuuugcuucccaggacucc

SEQ ID NO: 143167 - RNA, 32 nt, Human
cugugaccuccgccuccuggguucaagagacu

SEQ ID NO: 143168 - RNA, 32 nt, Human
cugugaccugauuucagaagagacugauccaa

SEQ ID NO: 143169 - RNA, 32 nt, Human
cugugaccugcacucgccucggagaaauucca

SEQ ID NO: 143170 - RNA, 32 nt, Human
cugugaccugccgaaguccacugccuuugccc

SEQ ID NO: 143171 - RNA, 32 nt, Human
cugugaccuguuuuucuuucucauucacauuu

SEQ ID NO: 143172 - RNA, 32 nt, Human
cugugacgcucuggccuucucugcaccucaga

SEQ ID NO: 143173 - RNA, 32 nt, Human
cugugacggaggcuaguguggaagagguccug

SEQ ID NO: 143174 - RNA, 32 nt, Human
cugugacgggucugcugcaguccucagucggg

SEQ ID NO: 143175 - RNA, 32 nt, Human
cugugacuaucuccuucuucacuuucauggcg

SEQ ID NO: 143176 - RNA, 32 nt, Human
cugugacucagaaaauccacaacuuuuuacca

SEQ ID NO: 143177 - RNA, 32 nt, Human
cugugacucauaguuuacuuuuguucaaaaua

SEQ ID NO: 143178 - RNA, 32 nt, Human
cugugacuccaaagaaaggagcuucuugcuga

SEQ ID NO: 143179 - RNA, 32 nt, Human
cugugacuccacccacucaucuggccaccguu

SEQ ID NO: 143180 - RNA, 32 nt, Human
cugugacuccaggcccgcaauggaugcccugc

SEQ ID NO: 143181 - RNA, 32 nt, Human
cugugacugcaacgucuuacugauugggacag

SEQ ID NO: 143182 - RNA, 32 nt, Human
cugugacugccuggccagacuuagggcucacg

SEQ ID NO: 143183 - RNA, 32 nt, Human
cugugacuggacuccccugcaccuagcugcac

SEQ ID NO: 143184 - RNA, 32 nt, Human
cugugacuguguuuggaacagcucccucaguu

SEQ ID NO: 143185 - RNA, 32 nt, Human
cugugacuuccaaagccagagccacaugugcu

SEQ ID NO: 143186 - RNA, 32 nt, Human
cugugacuugacaguggcuccccagccccaaa

SEQ ID NO: 143187 - RNA, 32 nt, Human
cugugacuuuaagagaaguggggaggggucuc

SEQ ID NO: 143188 - RNA, 32 nt, Human
cugugagaacagcucccuggcaggcaggcugu

SEQ ID NO: 143189 - RNA, 32 nt, Human
cugugagaagagcaugaucagcagaaagcucu

SEQ ID NO: 143190 - RNA, 32 nt, Human
cugugagaauacaggaagcccccaaugugccu

SEQ ID NO: 143191 - RNA, 32 nt, Human
cugugagacuuggcaagugugugcaaaucaag

SEQ ID NO: 143192 - RNA, 32 nt, Human
cugugagagagaaaaagagagagucauagcac

SEQ ID NO: 143193 - RNA, 32 nt, Human
cugugagagaggcucaggcagagcaggugugg

SEQ ID NO: 143194 - RNA, 32 nt, Human
cugugagagcccaggggucuuugguugcaccu

SEQ ID NO: 143195 - RNA, 32 nt, Human
cugugagaggcugaggcgggaugaucaccuga

SEQ ID NO: 143196 - RNA, 32 nt, Human
cugugagauagagggcccagcccagccccacc

SEQ ID NO: 143197 - RNA, 32 nt, Human
cugugagauauuaaucaguuaccuaggacuaa

SEQ ID NO: 143198 - RNA, 32 nt, Human
cugugagaucuccaggacagagggagaaagau

SEQ ID NO: 143199 - RNA, 32 nt, Human
cugugagaucuucuccaccuagucugcccuaa

SEQ ID NO: 143200 - RNA, 32 nt, Human
cugugagaugaauaggaggagucuucaggagg

SEQ ID NO: 143201 - RNA, 32 nt, Human
cugugagaugcugagggcaggauaccugucug

SEQ ID NO: 143202 - RNA, 32 nt, Human
cugugagauggcuuuccucauagauggauggg

SEQ ID NO: 143203 - RNA, 32 nt, Human
cugugagcaacaaaacugcacuguuucuuuca

SEQ ID NO: 143204 - RNA, 32 nt, Human
cugugagcaagggaugcaaaggcugccgggaa

SEQ ID NO: 143205 - RNA, 21 nt, Human
cugugagcaaugccaccaagu

SEQ ID NO: 143206 - RNA, 32 nt, Human
cugugagcacauaagcagaggcugcaggaacu

SEQ ID NO: 143207 - RNA, 32 nt, Human
cugugagcaccaaccugcugcagucucuuggg

SEQ ID NO: 143208 - RNA, 32 nt, Human
cugugagcaccacugcacuaagccagugcgga

SEQ ID NO: 143209 - RNA, 32 nt, Human
cugugagcagagccagaagguaggucuguuca

SEQ ID NO: 143210 - RNA, 32 nt, Human
cugugagcauuuugccguauauccugcccugc

SEQ ID NO: 143211 - RNA, 32 nt, Human
cugugagccacugcacccggccgggaauuuau

SEQ ID NO: 143212 - RNA, 32 nt, Human
cugugagcccaagucccuugugaccacucagu

SEQ ID NO: 143213 - RNA, 32 nt, Human
cugugagccccacagcccugcucauuccucac

SEQ ID NO: 143214 - RNA, 32 nt, Human
cugugagcccccaguuuuggaggaaggaggaa

SEQ ID NO: 143215 - RNA, 20 nt, Human
cugugagccccgggcuccug

SEQ ID NO: 143216 - RNA, 32 nt, Human
cugugagccgaggcauuccagccugggcaaca

SEQ ID NO: 143217 - RNA, 32 nt, Human
cugugagccgcugccuccagggccauagccga

SEQ ID NO: 143218 - RNA, 32 nt, Human
cugugagccuggggacgacauggcaggcuggu

SEQ ID NO: 143219 - RNA, 32 nt, Human
cugugagcguggcaaggaccuuccgacucauc

SEQ ID NO: 143220 - RNA, 32 nt, Human
cugugagcuagcacuuuuuccucugacccaau

SEQ ID NO: 143221 - RNA, 32 nt, Human
cugugagcucacuggccucagugccagguaag

SEQ ID NO: 143222 - RNA, 18 nt, Human
cugugagcucagcacaga

SEQ ID NO: 143223 - RNA, 32 nt, Human
cugugagcucaugcaccagucaucucaaaugg

SEQ ID NO: 143224 - RNA, 32 nt, Human
cugugagcuccgugagggcagaaacaauguua

SEQ ID NO: 143225 - RNA, 32 nt, Human
cugugagcuccugcuccuuccugggccugcag

SEQ ID NO: 143226 - RNA, 32 nt, Human
cugugagcugacaccacgccacugcacuccag

SEQ ID NO: 143227 - RNA, 32 nt, Human
cugugagcuggacgacacagccuaggcagaaa

SEQ ID NO: 143228 - RNA, 20 nt, Human
cugugagcuggcuugagcca

SEQ ID NO: 143229 - RNA, 32 nt, Human
cugugagcuucagaccagaaaugugucaucuu

SEQ ID NO: 143230 - RNA, 19 nt, Human
cugugagcuuccuaccuca

SEQ ID NO: 143231 - RNA, 32 nt, Human
cugugaggagacaucagggcugagggggcucu

SEQ ID NO: 143232 - RNA, 32 nt, Human
cugugaggagagagccacugcuaagcagcagg

SEQ ID NO: 143233 - RNA, 32 nt, Human
cugugaggagaggacccaggagugugggggca

SEQ ID NO: 143234 - RNA, 32 nt, Human
cugugaggaggaacuccuguucccguggcucc

SEQ ID NO: 143235 - RNA, 32 nt, Human
cugugaggaggaacuccuguucccguggcucu

SEQ ID NO: 143236 - RNA, 32 nt, Human
cugugaggaggaugaggagccaccuaggcggg

SEQ ID NO: 143237 - RNA, 32 nt, Human
cugugaggaggcccagaaaaggccaaccaggg

SEQ ID NO: 143238 - RNA, 32 nt, Human
cugugaggagguggagaacguggcagggaucc

SEQ ID NO: 143239 - RNA, 32 nt, Human
cugugaggaugguauucccuggagucuggcuu

SEQ ID NO: 143240 - RNA, 31 nt, Human
cugugaggcacaaucucagccucacagggcc

SEQ ID NO: 143241 - RNA, 32 nt, Human
cugugaggcacgaacccugccucccuaggccg

SEQ ID NO: 143242 - RNA, 32 nt, Human
cugugaggccauuaaaccuccuuuucuuugua

SEQ ID NO: 143243 - RNA, 32 nt, Human
cugugaggcccaggacccuuagcaggacaugc

SEQ ID NO: 143244 - RNA, 32 nt, Human
cugugaggcccaggaugaaggaagacagugag

SEQ ID NO: 143245 - RNA, 32 nt, Human
cugugaggcguaagggacaugaauucuagggu

SEQ ID NO: 143246 - RNA, 32 nt, Human
cugugaggcuggagggaccagauggaggaggc

SEQ ID NO: 143247 - RNA, 32 nt, Human
cugugaggcuugcucauguccagauugggcuc

SEQ ID NO: 143248 - RNA, 32 nt, Human
cugugagggaggcuacagcacacuccacccca

SEQ ID NO: 143249 - RNA, 21 nt, Human
cugugagggcaaaggccccuc

SEQ ID NO: 143250 - RNA, 32 nt, Human
cugugaggucucaaauuaaaaacauuauguuu

SEQ ID NO: 143251 - RNA, 32 nt, Human
cugugagguggagggcugguguggaggugcuc

SEQ ID NO: 143252 - RNA, 32 nt, Human
cugugagguggguggggcagggcuguagccca

SEQ ID NO: 143253 - RNA, 32 nt, Human
cugugagguguuuggagaagagaacugaaaug

SEQ ID NO: 143254 - RNA, 32 nt, Human
cugugagguuuccuaguaauugccaaaugagc

SEQ ID NO: 143255 - RNA, 32 nt, Human
cugugagucacgcagacccagaagcaggaagc

SEQ ID NO: 143256 - RNA, 32 nt, Human
cugugaguccaaggccuucccccaccacuggg

SEQ ID NO: 143257 - RNA, 32 nt, Human
cugugaguccucaugcagagcagggccaucau

SEQ ID NO: 143258 - RNA, 32 nt, Human
cugugagucgagaagaaggaaagagagggaug

SEQ ID NO: 143259 - RNA, 32 nt, Human
cugugagucgccuggaggcagcgcggcggcug

SEQ ID NO: 143260 - RNA, 32 nt, Human
cugugagucugccuaugccagaaggauuaagg

SEQ ID NO: 143261 - RNA, 32 nt, Human
cugugagugacuuauuguacccaacucuauuu

SEQ ID NO: 143262 - RNA, 32 nt, Human
cugugagugcgucugaggggacaucgccaagg

SEQ ID NO: 143263 - RNA, 32 nt, Human
cugugaguggcauguccacuugcuggauuauc

SEQ ID NO: 143264 - RNA, 32 nt, Human
cugugagugguggcugacaccuguaaucccag

SEQ ID NO: 143265 - RNA, 32 nt, Human
cugugagugugggcaccugugcaugcaaugcu

SEQ ID NO: 143266 - RNA, 32 nt, Human
cugugaguugacugaggggcucagacuugggg

SEQ ID NO: 143267 - RNA, 32 nt, Human
cugugaucaaggcugaggccaccugggaugag

SEQ ID NO: 143268 - RNA, 32 nt, Human
cugugaucagggcuagaacaucaggaaaaccc

SEQ ID NO: 143269 - RNA, 32 nt, Human
cugugaucccccaggguccauggugcugcucc

SEQ ID NO: 143270 - RNA, 32 nt, Human
cugugaucucaaucucagcuacucgggaggcu

SEQ ID NO: 143271 - RNA, 32 nt, Human
cugugaucucagcacuuugaggggcggaggug

SEQ ID NO: 143272 - RNA, 32 nt, Human
cugugaucuccucugucuuaauccacgcucag

SEQ ID NO: 143273 - RNA, 19 nt, Human
cugugaucugcagcaggcu

SEQ ID NO: 143274 - RNA, 32 nt, Human
cugugaucuuuguguucugaaggcuucacuca

SEQ ID NO: 143275 - RNA, 32 nt, Human
cugugaugacacccggaaaugucucaggaugu

SEQ ID NO: 143276 - RNA, 32 nt, Human
cugugaugagcaccaggauggcccuguggucc

SEQ ID NO: 143277 - RNA, 32 nt, Human
cugugaugagcuuccaggucgcuggccuuacc

SEQ ID NO: 143278 - RNA, 32 nt, Human
cugugaugccgaggguggagugcaguggcaca

SEQ ID NO: 143279 - RNA, 21 nt, Human
cugugaugcuacagcacucca

SEQ ID NO: 143280 - RNA, 32 nt, Human
cugugauggcagcagugguccacguggagcag

SEQ ID NO: 143281 - RNA, 30 nt, Human
cugugauggcguuugacgucagcugcuucu

SEQ ID NO: 143282 - RNA, 32 nt, Human
cugugauggggcccugccuccuuugugaggaa

SEQ ID NO: 143283 - RNA, 32 nt, Human
cugugaugugacuccuggaagugacguaggag

SEQ ID NO: 143284 - RNA, 24 nt, Human
cugugaugugccuuucccugcagu

SEQ ID NO: 143285 - RNA, 32 nt, Human
cugugaugugugugcagagugaacagaggacu

SEQ ID NO: 143286 - RNA, 32 nt, Human
cugugauguuccuuuucucacacaaguuuuag

SEQ ID NO: 143287 - RNA, 32 nt, Human
cugugauuccugcccagcaccugugaggccug

SEQ ID NO: 143288 - RNA, 32 nt, Human
cugugauucugccucagcuccugucuugcuga

SEQ ID NO: 143289 - RNA, 32 nt, Human
cugugauugacuucuagcucacugccuuuaaa

SEQ ID NO: 143290 - RNA, 32 nt, Human
cugugauugcaccacuuguaacuccagccugg

SEQ ID NO: 143291 - RNA, 32 nt, Human
cugugauugcacucccagcccagaucagcauu

SEQ ID NO: 143292 - RNA, 32 nt, Human
cugugauugccucuaaggaacagcauucuaaa

SEQ ID NO: 143293 - RNA, 32 nt, Human
cugugauuguccagguguggccuaggcgccac

SEQ ID NO: 143294 - RNA, 32 nt, Human
cugugauuucaagcccacagucugucacuuug

SEQ ID NO: 143295 - RNA, 21 nt, Human
cugugauuucauuucuuauca

SEQ ID NO: 143296 - RNA, 32 nt, Human
cugugauuugagagauggagagaaaaccuucc

SEQ ID NO: 143297 - RNA, 32 nt, Human
cugugcaaagccucccugcuucccucugcuga

SEQ ID NO: 143298 - RNA, 32 nt, Human
cugugcaaaggcuuccucagacaugccacucu

SEQ ID NO: 143299 - RNA, 32 nt, Human
cugugcaaauuaauucacauacaugguucaga

SEQ ID NO: 143300 - RNA, 31 nt, Human
cugugcaaucuccuaaggccuguguuucugc

SEQ ID NO: 143301 - RNA, 32 nt, Human
cugugcaaugucccugugguugggcucuagua

SEQ ID NO: 143302 - RNA, 32 nt, Human
cugugcacaccugcucucuccucucucccagg

SEQ ID NO: 143303 - RNA, 21 nt, Human
cugugcacaccuggcccggga

SEQ ID NO: 143304 - RNA, 32 nt, Human
cugugcacaggagccaguuucacagauggaga

SEQ ID NO: 143305 - RNA, 32 nt, Human
cugugcacaggcucaggugucaguaagccaga

SEQ ID NO: 143306 - RNA, 32 nt, Human
cugugcacagugggacagaacaugcuugugcu

SEQ ID NO: 143307 - RNA, 32 nt, Human
cugugcacaucccuaugucuucccuaggucga

SEQ ID NO: 143308 - RNA, 32 nt, Human
cugugcacccacccuuuucuaugcagaagucu

SEQ ID NO: 143309 - RNA, 32 nt, Human
cugugcaccccucccaccucugccucaguuua

SEQ ID NO: 143310 - RNA, 32 nt, Human
cugugcaccuaaccaacaccuccaggggcucg

SEQ ID NO: 143311 - RNA, 32 nt, Human
cugugcaccuccugcaaagcuggcagaggccc

SEQ ID NO: 143312 - RNA, 32 nt, Human
cugugcacgucacugagcucuggcaggggaaa

SEQ ID NO: 143313 - RNA, 32 nt, Human
cugugcacguggagaagagcggggacucggcg

SEQ ID NO: 143314 - RNA, 32 nt, Human
cugugcacguuggccucagauggacuacagga

SEQ ID NO: 143315 - RNA, 32 nt, Human
cugugcacuaugaacgcuucuuucccaggaca

SEQ ID NO: 143316 - RNA, 32 nt, Human
cugugcacuauuuucagggccacucagggugg

SEQ ID NO: 143317 - RNA, 32 nt, Human
cugugcacugcaagcugugucuacucaggccc

SEQ ID NO: 143318 - RNA, 32 nt, Human
cugugcacuguauguagcaagcauuuuucauc

SEQ ID NO: 143319 - RNA, 32 nt, Human
cugugcagaaccugcugcuaacaccaaggugu

SEQ ID NO: 143320 - RNA, 32 nt, Human
cugugcagaaggagaggaaggggcauuaagag

SEQ ID NO: 143321 - RNA, 32 nt, Human
cugugcagaaguggcagcagagagggaccauc

SEQ ID NO: 143322 - RNA, 32 nt, Human
cugugcagacaggcgggcauggagcagaaaca

SEQ ID NO: 143323 - RNA, 21 nt, Human
cugugcagaccucccugcagg

SEQ ID NO: 143324 - RNA, 24 nt, Human
cugugcagacuucuucugggcuua

SEQ ID NO: 143325 - RNA, 19 nt, Human
cugugcagagccccaucca

SEQ ID NO: 143326 - RNA, 21 nt, Human
cugugcagagccccauccacu

SEQ ID NO: 143327 - RNA, 32 nt, Human
cugugcagaggaugcauuuucuuccauuaauu

SEQ ID NO: 143328 - RNA, 32 nt, Human
cugugcagaggcagagggugaccgggagcagu

SEQ ID NO: 143329 - RNA, 32 nt, Human
cugugcagaggcugggccugaggucucagugu

SEQ ID NO: 143330 - RNA, 32 nt, Human
cugugcagaguccauugccccaacuagacugu

SEQ ID NO: 143331 - RNA, 32 nt, Human
cugugcagcaccugcaggcagagaugcagagc

SEQ ID NO: 143332 - RNA, 32 nt, Human
cugugcagcagugccauugacugcccugaugu

SEQ ID NO: 143333 - RNA, 32 nt, Human
cugugcagcccaaacuccuaggacucuugaac

SEQ ID NO: 143334 - RNA, 32 nt, Human
cugugcagccuggggaacgugccaggcuuggg

SEQ ID NO: 143335 - RNA, 32 nt, Human
cugugcagcgcccguggugaucugggguaggg

SEQ ID NO: 143336 - RNA, 32 nt, Human
cugugcagcuuuacauuuuaaccaggggacuc

SEQ ID NO: 143337 - RNA, 32 nt, Human
cugugcaggagaacauggggaucuuuuguuaa

SEQ ID NO: 143338 - RNA, 32 nt, Human
cugugcaggagagagcgccugagcuggauggu

SEQ ID NO: 143339 - RNA, 32 nt, Human
cugugcaggaggguuacuugagcccaggaagu

SEQ ID NO: 143340 - RNA, 32 nt, Human
cugugcaggaguagggaggaaaaggaguucug

SEQ ID NO: 143341 - RNA, 32 nt, Human
cugugcaggcuggcgugagaggagcggcagcc

SEQ ID NO: 143342 - RNA, 32 nt, Human
cugugcagggaaccaaaccaaggucugagaaa

SEQ ID NO: 143343 - RNA, 32 nt, Human
cugugcagggaggucaggaggagaagcagacg

SEQ ID NO: 143344 - RNA, 32 nt, Human
cugugcagggguuuggagggcacacgaugugu

SEQ ID NO: 143345 - RNA, 32 nt, Human
cugugcagggugccgagagcccagggaugcau

SEQ ID NO: 143346 - RNA, 32 nt, Human
cugugcaggucuugccuuccucaagcaccugc

SEQ ID NO: 143347 - RNA, 32 nt, Human
cugugcaguagcuguguguccgaggucagugu

SEQ ID NO: 143348 - RNA, 32 nt, Human
cugugcaguccuggguccuccuuucugagggc

SEQ ID NO: 143349 - RNA, 32 nt, Human
cugugcauaauauccauccaaaggacaacagu

SEQ ID NO: 143350 - RNA, 32 nt, Human
cugugcauauagucccagcuacuugggaggca

SEQ ID NO: 143351 - RNA, 32 nt, Human
cugugcaucgugagggccagagacaggaaugu

SEQ ID NO: 143352 - RNA, 32 nt, Human
cugugcaucucugggcauggccuguguguggg

SEQ ID NO: 143353 - RNA, 32 nt, Human
cugugcauggugcugugcggagccuggugcug

SEQ ID NO: 143354 - RNA, 32 nt, Human
cugugcauguuauuuuucuuuuuccgugaguc

SEQ ID NO: 143355 - RNA, 32 nt, Human
cugugcauuugccaguuuccucccacugagag

SEQ ID NO: 143356 - RNA, 23 nt, Human
cugugccaaacacaugcuugaag

SEQ ID NO: 143357 - RNA, 17 nt, Human
cugugccaacccaucuc

SEQ ID NO: 143358 - RNA, 32 nt, Human
cugugccaagagcacgcggcugugcugcucca

SEQ ID NO: 143359 - RNA, 32 nt, Human
cugugccaaugcucacaaaccuuggggcugcc

SEQ ID NO: 143360 - RNA, 32 nt, Human
cugugccacaucugacacuggaguagcgauaa

SEQ ID NO: 143361 - RNA, 32 nt, Human
cugugccaccaaaacccaaagaucaaaggucc

SEQ ID NO: 143362 - RNA, 22 nt, Human
cugugccacuccaauauuuauc

SEQ ID NO: 143363 - RNA, 32 nt, Human
cugugccacuccagaaccucagcagaucugag

SEQ ID NO: 143364 - RNA, 32 nt, Human
cugugccacucuacuccagccugggcaacaca

SEQ ID NO: 143365 - RNA, 32 nt, Human
cugugccacugaacuccaguucuucuggucau

SEQ ID NO: 143366 - RNA, 32 nt, Human
cugugccacugcaccucuagucugggugacag

SEQ ID NO: 143367 - RNA, 32 nt, Human
cugugccacugcacuccagccugggcaacaca

SEQ ID NO: 143368 - RNA, 32 nt, Human
cugugccacugcacuccagccugggugacaga

SEQ ID NO: 143369 - RNA, 32 nt, Human
cugugccacugcacuccagccuggucaacaaa

SEQ ID NO: 143370 - RNA, 32 nt, Human
cugugccacugcaguccagccugggugacaga

SEQ ID NO: 143371 - RNA, 32 nt, Human
cugugccacuggugccagccuggaugcaggcu

SEQ ID NO: 143372 - RNA, 32 nt, Human
cugugccagagcugugguugaggaggagccag

SEQ ID NO: 143373 - RNA, 32 nt, Human
cugugccagaggaggaagaggacgugcuagcc

SEQ ID NO: 143374 - RNA, 32 nt, Human
cugugccagccuggccuucugcgagcacccca

SEQ ID NO: 143375 - RNA, 32 nt, Human
cugugccagcuuacucuucacuccagggucgg

SEQ ID NO: 143376 - RNA, 32 nt, Human
cugugccaggaagagcccagaggcucugucuc

SEQ ID NO: 143377 - RNA, 32 nt, Human
cugugccaggaucuuguugagucaggucagcu

SEQ ID NO: 143378 - RNA, 32 nt, Human
cugugccaggcagggugaucgcaguguaaaua

SEQ ID NO: 143379 - RNA, 22 nt, Human
cugugccaggccagagugcagu

SEQ ID NO: 143380 - RNA, 19 nt, Human
cugugccaggcccuggugg

SEQ ID NO: 143381 - RNA, 32 nt, Human
cugugccagggcccuguccucacuaucaguca

SEQ ID NO: 143382 - RNA, 32 nt, Human
cugugccagguaaccaaccgucuugguuuguc

SEQ ID NO: 143383 - RNA, 32 nt, Human
cugugccagugcaggccaggcagggggcugag

SEQ ID NO: 143384 - RNA, 23 nt, Human
cugugccagugcugaagugcagu

SEQ ID NO: 143385 - RNA, 21 nt, Human
cugugccauaagugcuugaaa

SEQ ID NO: 143386 - RNA, 32 nt, Human
cugugccaucagcuccuuccuccccuguucau

SEQ ID NO: 143387 - RNA, 32 nt, Human
cugugccaucuuggagccucaggcggggcucc

SEQ ID NO: 143388 - RNA, 32 nt, Human
cugugccaucuuucuucucugcugguacugcg

SEQ ID NO: 143389 - RNA, 32 nt, Human
cugugccauggggcugcccacucuggaguuca

SEQ ID NO: 143390 - RNA, 32 nt, Human
cugugccauugcacuccaagccugggcaacag

SEQ ID NO: 143391 - RNA, 32 nt, Human
cugugccauugcacuccagucggguuaacaga

SEQ ID NO: 143392 - RNA, 32 nt, Human
cugugcccaaggggaggaaggaggucacacca

SEQ ID NO: 143393 - RNA, 32 nt, Human
cugugcccacucccuucucuacucuuccccag

SEQ ID NO: 143394 - RNA, 32 nt, Human
cugugcccacucuccugagcucagccagaauc

SEQ ID NO: 143395 - RNA, 32 nt, Human
cugugcccacuuccuguccuuuucccuguugu

SEQ ID NO: 143396 - RNA, 32 nt, Human
cugugcccagaggcccaggcugaucggugucg

SEQ ID NO: 143397 - RNA, 32 nt, Human
cugugcccagcacacacaguggguacuuaaau

SEQ ID NO: 143398 - RNA, 32 nt, Human
cugugcccagcacagguaagcacucaauaaug

SEQ ID NO: 143399 - RNA, 32 nt, Human
cugugcccagccacagaaacagccucugugcc

SEQ ID NO: 143400 - RNA, 32 nt, Human
cugugcccagcccucuaauuugugccucucuu

SEQ ID NO: 143401 - RNA, 32 nt, Human
cugugcccagccugcaauuauucuuuauauuc

SEQ ID NO: 143402 - RNA, 32 nt, Human
cugugcccagcuuuggucccccuucccaacuu

SEQ ID NO: 143403 - RNA, 22 nt, Human
cugugcccaggccacagagcag

SEQ ID NO: 143404 - RNA, 32 nt, Human
cugugcccagggaccagcgaccagccccuggg

SEQ ID NO: 143405 - RNA, 32 nt, Human
cugugccccaacagcacgcugucuuccuauug

SEQ ID NO: 143406 - RNA, 21 nt, Human
cugugccccaacucccauuca

SEQ ID NO: 143407 - RNA, 32 nt, Human
cugugccccaagcagagucuccguggucagga

SEQ ID NO: 143408 - RNA, 32 nt, Human
cugugccccaggaugucuggcccaggccuccc

SEQ ID NO: 143409 - RNA, 32 nt, Human
cugugccccaugccuguccagccugggcagcc

SEQ ID NO: 143410 - RNA, 23 nt, Human
cugugcccccacacugcgccuca

SEQ ID NO: 143411 - RNA, 23 nt, Human
cugugcccccaccaguuugcuca

SEQ ID NO: 143412 - RNA, 21 nt, Human
cugugcccccacccccgccuc

SEQ ID NO: 143413 - RNA, 19 nt, Human
cugugcccccaucaucuca

SEQ ID NO: 143414 - RNA, 20 nt, Human
cugugccccccgucccucca

SEQ ID NO: 143415 - RNA, 19 nt, Human
cugugcccccuccccacuc

SEQ ID NO: 143416 - RNA, 19 nt, Human
cugugccccgaccccaccu

SEQ ID NO: 143417 - RNA, 32 nt, Human
cugugccccgucucccugcuugguucuccccu

SEQ ID NO: 143418 - RNA, 32 nt, Human
cugugccccgugagccacauggccuaggguga

SEQ ID NO: 143419 - RNA, 22 nt, Human
cugugccccuccuccccaucca

SEQ ID NO: 143420 - RNA, 21 nt, Human
cugugccccuccuggcuccca

SEQ ID NO: 143421 - RNA, 17 nt, Human
cugugccccuccuuccu

SEQ ID NO: 143422 - RNA, 22 nt, Human
cugugccccuccuuuccacuca

SEQ ID NO: 143423 - RNA, 18 nt, Human
cugugccccucgugucuc

SEQ ID NO: 143424 - RNA, 18 nt, Human
cugugccccugcgucuca

SEQ ID NO: 143425 - RNA, 32 nt, Human
cugugccccuggggucccugaagacuggcuag

SEQ ID NO: 143426 - RNA, 21 nt, Human
cugugcccgcucaccccacuc

SEQ ID NO: 143427 - RNA, 19 nt, Human
cugugcccggcccuccuca

SEQ ID NO: 143428 - RNA, 32 nt, Human
cugugcccggccgggcggcggcugcaagagga

SEQ ID NO: 143429 - RNA, 32 nt, Human
cugugcccucaccagccucucaacaccucggg

SEQ ID NO: 143430 - RNA, 32 nt, Human
cugugcccucaccuccacccuuccuguuguuc

SEQ ID NO: 143431 - RNA, 32 nt, Human
cugugcccucaugggcagcugaagggggagcu

SEQ ID NO: 143432 - RNA, 32 nt, Human
cugugcccucauuuuucggaggagccgaggga

SEQ ID NO: 143433 - RNA, 32 nt, Human
cugugcccuccagugaacuugaguagcauugg

SEQ ID NO: 143434 - RNA, 17 nt, Human
cugugcccuccccacuc

SEQ ID NO: 143435 - RNA, 17 nt, Human
cugugcccuccugcaag

SEQ ID NO: 143436 - RNA, 32 nt, Human
cugugcccucuccugggacaggccugaugccu

SEQ ID NO: 143437 - RNA, 32 nt, Human
cugugcccucuuccuguccuuuucccuguugu

SEQ ID NO: 143438 - RNA, 32 nt, Human
cugugcccugcacgugcccgggggaagcggaa

SEQ ID NO: 143439 - RNA, 21 nt, Human
cugugcccuuuccccaccuca

SEQ ID NO: 143440 - RNA, 22 nt, Human
cugugccgccgccgccaucuca

SEQ ID NO: 143441 - RNA, 32 nt, Human
cugugccggagagagagugggagagaugugac

SEQ ID NO: 143442 - RNA, 32 nt, Human
cugugccggccaccuccaggcuggcuucaguc

SEQ ID NO: 143443 - RNA, 18 nt, Human
cugugccggccugggcca

SEQ ID NO: 143444 - RNA, 32 nt, Human
cugugccggcgccgcgggcgggggccccgggu

SEQ ID NO: 143445 - RNA, 32 nt, Human
cugugccgguuggagugugucucacuucccug

SEQ ID NO: 143446 - RNA, 22 nt, Human
cugugccgucauccccauuuca

SEQ ID NO: 143447 - RNA, 20 nt, Human
cugugccguccucccaucca

SEQ ID NO: 143448 - RNA, 32 nt, Human
cugugccgucuucuccugcucuggaaucaaag

SEQ ID NO: 143449 - RNA, 32 nt, Human
cugugccguggccgccugcugcagccugcacu

SEQ ID NO: 143450 - RNA, 32 nt, Human
cugugccguuccccaugcauucccugcacugu

SEQ ID NO: 143451 - RNA, 32 nt, Human
cugugccuaacagagguguccucugacuuuuc

SEQ ID NO: 143452 - RNA, 32 nt, Human
cugugccuaaguauacucugucuuccagguuc

SEQ ID NO: 143453 - RNA, 32 nt, Human
cugugccucacagaugccccgagaagagauga

SEQ ID NO: 143454 - RNA, 32 nt, Human
cugugccucagcccuucucccugcaucaguuu

SEQ ID NO: 143455 - RNA, 22 nt, Human
cugugccucaguucccauccca

SEQ ID NO: 143456 - RNA, 32 nt, Human
cugugccucaguugcuccaucuguaaaaugau

SEQ ID NO: 143457 - RNA, 32 nt, Human
cugugccucaguuuccccaucuguaaaauggg

SEQ ID NO: 143458 - RNA, 32 nt, Human
cugugccucaguuuccccaucuguaaaauuug

SEQ ID NO: 143459 - RNA, 32 nt, Human
cugugccucaguuuccucaucuguaaaauggg

SEQ ID NO: 143460 - RNA, 32 nt, Human
cugugccucuacugcccugaggacuuaccaga

SEQ ID NO: 143461 - RNA, 32 nt, Human
cugugccucuccugcccaggggcuagagagca

SEQ ID NO: 143462 - RNA, 32 nt, Human
cugugccucugcaggaagaacucucuugcaug

SEQ ID NO: 143463 - RNA, 32 nt, Human
cugugccucugggagcucugccuaucagaacc

SEQ ID NO: 143464 - RNA, 20 nt, Human
cugugccucuucccaucuca

SEQ ID NO: 143465 - RNA, 32 nt, Human
cugugccugacggaugggcuguagaauggggu

SEQ ID NO: 143466 - RNA, 32 nt, Human
cugugccugauuaucagagaacuccagcagac

SEQ ID NO: 143467 - RNA, 18 nt, Human
cugugccugccucugcug

SEQ ID NO: 143468 - RNA, 17 nt, Human
cugugccugccugcaag

SEQ ID NO: 143469 - RNA, 32 nt, Human
cugugccugccugugcccagcaaccugugcag

SEQ ID NO: 143470 - RNA, 22 nt, Human
cugugccugcuccugguggucu

SEQ ID NO: 143471 - RNA, 32 nt, Human
cugugccugcuccuuaugagugcaguggaagg

SEQ ID NO: 143472 - RNA, 32 nt, Human
cugugccugcugcaaagauucagguggacccu

SEQ ID NO: 143473 - RNA, 32 nt, Human
cugugccuggaggcagucggccugcagugcca

SEQ ID NO: 143474 - RNA, 32 nt, Human
cugugccuggaucccccucuagcuccugcuca

SEQ ID NO: 143475 - RNA, 32 nt, Human
cugugccuggccaacauaauguuuucacaguu

SEQ ID NO: 143476 - RNA, 18 nt, Human
cugugccuggcccccuca

SEQ ID NO: 143477 - RNA, 22 nt, Human
cugugccuggccucaacuguug

SEQ ID NO: 143478 - RNA, 19 nt, Human
cugugccuggccuguagug

SEQ ID NO: 143479 - RNA, 32 nt, Human
cugugccugguuuugggcaaguuucuuguccu

SEQ ID NO: 143480 - RNA, 32 nt, Human
cugugccuguaaacccagcuacucaggagguu

SEQ ID NO: 143481 - RNA, 31 nt, Human
cugugccuguugcaugagccugugucacugu

SEQ ID NO: 143482 - RNA, 32 nt, Human
cugugccuucagcagccccuguccucaccaug

SEQ ID NO: 143483 - RNA, 32 nt, Human
cugugccuuccagcaucuuguacagcaaaucc

SEQ ID NO: 143484 - RNA, 24 nt, Human
cugugccuucuaccaucguuccac

SEQ ID NO: 143485 - RNA, 18 nt, Human
cugugccuucugggaucu

SEQ ID NO: 143486 - RNA, 32 nt, Human
cugugccuugcuagcugaccuggagaugcugc

SEQ ID NO: 143487 - RNA, 20 nt, Human
cugugccuuguucccggugg

SEQ ID NO: 143488 - RNA, 32 nt, Human
cugugccuuugucagcucuucuuucaaaagac

SEQ ID NO: 143489 - RNA, 32 nt, Human
cugugcgaauccgacccaccucccagagccug

SEQ ID NO: 143490 - RNA, 21 nt, Human
cugugcgcagcgcucgggcca

SEQ ID NO: 143491 - RNA, 32 nt, Human
cugugcgcuacugcugugccauuuucccaacu

SEQ ID NO: 143492 - RNA, 32 nt, Human
cugugcgcucgauccagcaccauggggaagcg

SEQ ID NO: 143493 - RNA, 32 nt, Human
cugugcgcugacucuccccgcccagccagcag

SEQ ID NO: 143494 - RNA, 32 nt, Human
cugugcggagccgccuccuccuggccaguucc

SEQ ID NO: 143495 - RNA, 17 nt, Human
cugugcggccccgaguc

SEQ ID NO: 143496 - RNA, 32 nt, Human
cugugcggccuccagcugagccugucucugaa

SEQ ID NO: 143497 - RNA, 31 nt, Human
cugugcgggaaaggaacugcugccuucagcc

SEQ ID NO: 143498 - RNA, 32 nt, Human
cugugcgggcugagugguuggggagauguggc

SEQ ID NO: 143499 - RNA, 21 nt, Human
cugugcggugggaccaacgga

SEQ ID NO: 143500 - RNA, 32 nt, Human
cugugcguaucugugaaccugggagacgguua

SEQ ID NO: 143501 - RNA, 18 nt, Human
cugugcgucagcacucca

SEQ ID NO: 143502 - RNA, 32 nt, Human
cugugcgucgcgagcgggcuccggacagcgcc

SEQ ID NO: 143503 - RNA, 32 nt, Human
cugugcgucucaaggcugccuugugaggccau

SEQ ID NO: 143504 - RNA, 32 nt, Human
cugugcgucugugucuuugugccuguaucucg

SEQ ID NO: 143505 - RNA, 32 nt, Human
cugugcgugcccccucuccacacucacgggga

SEQ ID NO: 143506 - RNA, 32 nt, Human
cugugcguggggcucccgccuccaaccccucg

SEQ ID NO: 143507 - RNA, 32 nt, Human
cugugcgugguggcuggcaccuguaaucccag

SEQ ID NO: 143508 - RNA, 32 nt, Human
cugugcguuccagugaggccaagggguccugg

SEQ ID NO: 143509 - RNA, 32 nt, Human
cugugcguuguggcuggcaccuguaaucccag

SEQ ID NO: 143510 - RNA, 32 nt, Human
cugugcuaagaccacccagcugucccuggguu

SEQ ID NO: 143511 - RNA, 32 nt, Human
cugugcuaccucuaacaccacacugaccacac

SEQ ID NO: 143512 - RNA, 32 nt, Human
cugugcuacucuacuccagccugggcaacaca

SEQ ID NO: 143513 - RNA, 32 nt, Human
cugugcuacugcacuccagccugggcaacaga

SEQ ID NO: 143514 - RNA, 32 nt, Human
cugugcuacuggaagguggcgugcccuccucu

SEQ ID NO: 143515 - RNA, 20 nt, Human
cugugcuacuuccccaucuc

SEQ ID NO: 143516 - RNA, 32 nt, Human
cugugcuagaaucuuccuuuucccucucuccc

SEQ ID NO: 143517 - RNA, 32 nt, Human
cugugcuagaggagccagugagggccagcaug

SEQ ID NO: 143518 - RNA, 32 nt, Human
cugugcuagccguuugugccucgucucgcugu

SEQ ID NO: 143519 - RNA, 24 nt, Human
cugugcuauguuuuauuucuuacc

SEQ ID NO: 143520 - RNA, 32 nt, Human
cugugcucaaagcagcagcuccaacccugccu

SEQ ID NO: 143521 - RNA, 32 nt, Human
cugugcucaagcaauccucccaucuccaucuc

SEQ ID NO: 143522 - RNA, 32 nt, Human
cugugcucaagcaauucuccugccucagcuuc

SEQ ID NO: 143523 - RNA, 32 nt, Human
cugugcucaagccauccucccaccuuagccuc

SEQ ID NO: 143524 - RNA, 32 nt, Human
cugugcucaagugacccucccaccucauucuc

SEQ ID NO: 143525 - RNA, 32 nt, Human
cugugcucacccaggcugagggugccuuugug

SEQ ID NO: 143526 - RNA, 32 nt, Human
cugugcucacuaucuuguccaggauuuuaagg

SEQ ID NO: 143527 - RNA, 32 nt, Human
cugugcucacugcccccacgccuccugccaag

SEQ ID NO: 143528 - RNA, 32 nt, Human
cugugcucagaggaggugagaggagaggaagg

SEQ ID NO: 143529 - RNA, 32 nt, Human
cugugcucagaggccaaguauaccaugcagug

SEQ ID NO: 143530 - RNA, 32 nt, Human
cugugcucagccaccaucuggaguuuuaaaag

SEQ ID NO: 143531 - RNA, 32 nt, Human
cugugcucagcugcaaccacagccucgucguu

SEQ ID NO: 143532 - RNA, 32 nt, Human
cugugcucaggaucagcagagcaggcaggcag

SEQ ID NO: 143533 - RNA, 32 nt, Human
cugugcucagugccaggcaaaacacuagcuca

SEQ ID NO: 143534 - RNA, 32 nt, Human
cugugcucaugcuggaagcacagcgugagggg

SEQ ID NO: 143535 - RNA, 32 nt, Human
cugugcuccagccugggcaacaaagugagacu

SEQ ID NO: 143536 - RNA, 32 nt, Human
cugugcuccagccugggcaacagagugagacu

SEQ ID NO: 143537 - RNA, 32 nt, Human
cugugcuccagccugggcgacagagcgagacu

SEQ ID NO: 143538 - RNA, 32 nt, Human
cugugcucccagccuugaggcugcaguaggac

SEQ ID NO: 143539 - RNA, 19 nt, Human
cugugcucccccugagcca

SEQ ID NO: 143540 - RNA, 19 nt, Human
cugugcucccgggcauccu

SEQ ID NO: 143541 - RNA, 32 nt, Human
cugugcucccuugagugcacuugagcacuccc

SEQ ID NO: 143542 - RNA, 17 nt, Human
cugugcuccucccuccc

SEQ ID NO: 143543 - RNA, 32 nt, Human
cugugcuccuccucgggggcuggggaaggaag

SEQ ID NO: 143544 - RNA, 18 nt, Human
cugugcuccuggcacccu

SEQ ID NO: 143545 - RNA, 32 nt, Human
cugugcucucucccucuccucccaccccacuc

SEQ ID NO: 143546 - RNA, 32 nt, Human
cugugcucucuuagcucuagcaucacccugag

SEQ ID NO: 143547 - RNA, 19 nt, Human
cugugcucuggcuggcugg

SEQ ID NO: 143548 - RNA, 32 nt, Human
cugugcucugugguuuccugcagucacccgcg

SEQ ID NO: 143549 - RNA, 32 nt, Human
cugugcugaagcgaucauccuaccucagccuc

SEQ ID NO: 143550 - RNA, 23 nt, Human
cugugcugaccuccgcgcggcgg

SEQ ID NO: 143551 - RNA, 19 nt, Human
cugugcugacgaggcccgg

SEQ ID NO: 143552 - RNA, 32 nt, Human
cugugcugacugugccccagacagccuuagcu

SEQ ID NO: 143553 - RNA, 32 nt, Human
cugugcugagcccacucucccgagggcgcauc

SEQ ID NO: 143554 - RNA, 19 nt, Human
cugugcugagccccagugg

SEQ ID NO: 143555 - RNA, 32 nt, Human
cugugcugaugugugacagucaccuuguuggc

SEQ ID NO: 143556 - RNA, 32 nt, Human
cugugcugcauacccaccacccagcuucuccc

SEQ ID NO: 143557 - RNA, 32 nt, Human
cugugcugccacuuuucagccauggccacaag

SEQ ID NO: 143558 - RNA, 26 nt, Human
cugugcugcccaggcuacagugcagu

SEQ ID NO: 143559 - RNA, 32 nt, Human
cugugcugcccgucuucagccuagccgaccuc

SEQ ID NO: 143560 - RNA, 21 nt, Human
cugugcugcccucugcugcug

SEQ ID NO: 143561 - RNA, 32 nt, Human
cugugcugcccuggcccuggccuugcuugccc

SEQ ID NO: 143562 - RNA, 32 nt, Human
cugugcugccugauuucucauuucucgaagca

SEQ ID NO: 143563 - RNA, 32 nt, Human
cugugcugcugcuucuccuccaucuugcuagu

SEQ ID NO: 143564 - RNA, 32 nt, Human
cugugcugcuggcugcaaaucuauccccguca

SEQ ID NO: 143565 - RNA, 32 nt, Human
cugugcugcuuugcaaauuguugaaacuuuug

SEQ ID NO: 143566 - RNA, 32 nt, Human
cugugcugcuuugggcaggacucgucacugug

SEQ ID NO: 143567 - RNA, 20 nt, Human
cugugcuggagguguugcac

SEQ ID NO: 143568 - RNA, 24 nt, Human
cugugcuggcaaaaaugcuugaaa

SEQ ID NO: 143569 - RNA, 22 nt, Human
cugugcuggcacagaccugaga

SEQ ID NO: 143570 - RNA, 32 nt, Human
cugugcuggccuggccuugccugcuggcacca

SEQ ID NO: 143571 - RNA, 32 nt, Human
cugugcuggcuuugcaacaagacagacugucc

SEQ ID NO: 143572 - RNA, 32 nt, Human
cugugcugggagaaaggguggcagccgggagc

SEQ ID NO: 143573 - RNA, 23 nt, Human
cugugcugggagaaauacuugaa

SEQ ID NO: 143574 - RNA, 32 nt, Human
cugugcugucagacuucauuguuauucuguga

SEQ ID NO: 143575 - RNA, 32 nt, Human
cugugcugucuccucccugccuccugccuccu

SEQ ID NO: 143576 - RNA, 32 nt, Human
cugugcugugcacaccugcucucuccucucuc

SEQ ID NO: 143577 - RNA, 20 nt, Human
cugugcugugcagcccccgg

SEQ ID NO: 143578 - RNA, 26 nt, Human
cugugcugugcugcaggccccugugg

SEQ ID NO: 143579 - RNA, 32 nt, Human
cugugcugugugagccugugcaagugacauga

SEQ ID NO: 143580 - RNA, 31 nt, Human
cugugcugugugucugggccugucucggggc

SEQ ID NO: 143581 - RNA, 32 nt, Human
cugugcuguucuguagccugcgcuggugauac

SEQ ID NO: 143582 - RNA, 32 nt, Human
cugugcuguuguugucugacuguggcuaucuc

SEQ ID NO: 143583 - RNA, 32 nt, Human
cugugcuuacacacaugcacacacaaauaugc

SEQ ID NO: 143584 - RNA, 32 nt, Human
cugugcuucacuuccguuccagccucagcggc

SEQ ID NO: 143585 - RNA, 32 nt, Human
cugugcuuccagccgugaaccuuugcacccca

SEQ ID NO: 143586 - RNA, 32 nt, Human
cugugcuuccugauagcacccuucccugcacc

SEQ ID NO: 143587 - RNA, 32 nt, Human
cugugcuuccuucacuucaccuccauccucug

SEQ ID NO: 143588 - RNA, 32 nt, Human
cugugcuucuucccaucuccugugaucccccu

SEQ ID NO: 143589 - RNA, 32 nt, Human
cugugcuugccucaccagcucucugcucacau

SEQ ID NO: 143590 - RNA, 32 nt, Human
cugugcuugccucaccagcucucugcucacuu

SEQ ID NO: 143591 - RNA, 32 nt, Human
cugugcuugcuguccuaccucucuccacagca

SEQ ID NO: 143592 - RNA, 32 nt, Human
cugugcuuguugguuuuucccaugacuguauu

SEQ ID NO: 143593 - RNA, 32 nt, Human
cugugcuuuucuccuaguuucucuccacccug

SEQ ID NO: 143594 - RNA, 32 nt, Human
cuguggaaacauccucucacuugcauucuuuu

SEQ ID NO: 143595 - RNA, 32 nt, Human
cuguggaaagaacuuugcgucucuccagcaau

SEQ ID NO: 143596 - RNA, 32 nt, Human
cuguggaagccaccaucaucucuggcccaagc

SEQ ID NO: 143597 - RNA, 32 nt, Human
cuguggaagccagcuuaaacccuagcccugug

SEQ ID NO: 143598 - RNA, 32 nt, Human
cuguggaagcucugccuuuuugacuucauacu

SEQ ID NO: 143599 - RNA, 32 nt, Human
cuguggaaggcagaggcagugagggaggugga

SEQ ID NO: 143600 - RNA, 32 nt, Human
cuguggaaggccgaggcaggaggaucacuuga

SEQ ID NO: 143601 - RNA, 20 nt, Human
cuguggaauaauagcaggug

SEQ ID NO: 143602 - RNA, 32 nt, Human
cuguggaaucaaugaccagaugcugaaugagu

SEQ ID NO: 143603 - RNA, 32 nt, Human
cuguggacacauaggaaugcuggaccagggua

SEQ ID NO: 143604 - RNA, 17 nt, Human
cuguggacccccaucuc

SEQ ID NO: 143605 - RNA, 32 nt, Human
cuguggacuguacaaaagcaggaagcagguug

SEQ ID NO: 143606 - RNA, 32 nt, Human
cuguggacugugacgcuggcagaggggucccg

SEQ ID NO: 143607 - RNA, 32 nt, Human
cuguggagaaaagaaguccauggaagccagga

SEQ ID NO: 143608 - RNA, 32 nt, Human
cuguggagagaaguuuugagauucuucaaaca

SEQ ID NO: 143609 - RNA, 32 nt, Human
cuguggagagaaguuuugagauucuucaaaua

SEQ ID NO: 143610 - RNA, 32 nt, Human
cuguggagagaucaugaauguauucuccgaua

SEQ ID NO: 143611 - RNA, 32 nt, Human
cuguggagaggaagaguaaggcgggcucugca

SEQ ID NO: 143612 - RNA, 32 nt, Human
cuguggagaggccccaggaggacuaaccaucu

SEQ ID NO: 143613 - RNA, 32 nt, Human
cuguggagagggcuggauacccccucgacagc

SEQ ID NO: 143614 - RNA, 32 nt, Human
cuguggagauagugccagggugcggccugaga

SEQ ID NO: 143615 - RNA, 32 nt, Human
cuguggagaugaugcaguuggcccaaccucac

SEQ ID NO: 143616 - RNA, 32 nt, Human
cuguggagccaaaggugaccgcagggggcccc

SEQ ID NO: 143617 - RNA, 32 nt, Human
cuguggagccagaggcagagacacugaacuug

SEQ ID NO: 143618 - RNA, 32 nt, Human
cuguggagccagcucaccuguucuccaggacc

SEQ ID NO: 143619 - RNA, 32 nt, Human
cuguggagccaggcagccuccaccucacaaga

SEQ ID NO: 143620 - RNA, 32 nt, Human
cuguggagcugcaguaagagucauacgaauaa

SEQ ID NO: 143621 - RNA, 32 nt, Human
cuguggagcuguucgguguccgucgagcuagc

SEQ ID NO: 143622 - RNA, 32 nt, Human
cuguggaggaagggaccuguggcagcucacag

SEQ ID NO: 143623 - RNA, 32 nt, Human
cuguggaggaggaggauaccaagagagaggug

SEQ ID NO: 143624 - RNA, 32 nt, Human
cuguggaggagguggaugcagccaugaauaca

SEQ ID NO: 143625 - RNA, 32 nt, Human
cuguggaggaggugguggugguauggugaggg

SEQ ID NO: 143626 - RNA, 32 nt, Human
cuguggagggagcacaggcggggaagcuccac

SEQ ID NO: 143627 - RNA, 32 nt, Human
cuguggagggagugacuugcacuggcagcacu

SEQ ID NO: 143628 - RNA, 32 nt, Human
cuguggaggggaccaccugccacccacgguca

SEQ ID NO: 143629 - RNA, 32 nt, Human
cuguggagguggggugggggaguggugggaau

SEQ ID NO: 143630 - RNA, 32 nt, Human
cuguggagguuugcggggagagaggucagagc

SEQ ID NO: 143631 - RNA, 32 nt, Human
cuguggagugacaccaguaacacagccaaaga

SEQ ID NO: 143632 - RNA, 32 nt, Human
cuguggagugcaggccagagcagggugugcgu

SEQ ID NO: 143633 - RNA, 32 nt, Human
cuguggagugggugucaguauggaugugucug

SEQ ID NO: 143634 - RNA, 23 nt, Human
cuguggauauggccacguguuaa

SEQ ID NO: 143635 - RNA, 32 nt, Human
cuguggaucccccaccuccuguuuccggcucu

SEQ ID NO: 143636 - RNA, 32 nt, Human
cuguggaucgcccugggcugggcaccagugac

SEQ ID NO: 143637 - RNA, 32 nt, Human
cuguggaucucaggaaggcaucaguguugauu

SEQ ID NO: 143638 - RNA, 32 nt, Human
cuguggaugacggcgccacugccaccaccgca

SEQ ID NO: 143639 - RNA, 21 nt, Human
cuguggaugccucucccccag

SEQ ID NO: 143640 - RNA, 23 nt, Human
cuguggaugucccuauucugcca

SEQ ID NO: 143641 - RNA, 32 nt, Human
cuguggauguuuuggcaucuuuagacaccugg

SEQ ID NO: 143642 - RNA, 32 nt, Human
cuguggcaacacagccucuuacauauggcuuc

SEQ ID NO: 143643 - RNA, 32 nt, Human
cuguggcaagaucacacugagaucgaugggug

SEQ ID NO: 143644 - RNA, 32 nt, Human
cuguggcaaugcccuucccacccauggcaccc

SEQ ID NO: 143645 - RNA, 32 nt, Human
cuguggcacaaagucccuggggccagugugug

SEQ ID NO: 143646 - RNA, 21 nt, Human
cuguggcaccagcaacuacuu

SEQ ID NO: 143647 - RNA, 24 nt, Human
cuguggcacccacagggggcaccu

SEQ ID NO: 143648 - RNA, 32 nt, Human
cuguggcagcggccaccauggccaugccagag

SEQ ID NO: 143649 - RNA, 32 nt, Human
cuguggcagcuagcaaaagcaaagaugcuuug

SEQ ID NO: 143650 - RNA, 32 nt, Human
cuguggcagcucuuuucccuguucaccucccg

SEQ ID NO: 143651 - RNA, 32 nt, Human
cuguggcaggagcaucuacacagcuuggguga

SEQ ID NO: 143652 - RNA, 32 nt, Human
cuguggcaggaggcaaagaguaggguguaauu

SEQ ID NO: 143653 - RNA, 32 nt, Human
cuguggcaggcagaucacgaggucaggaguuu

SEQ ID NO: 143654 - RNA, 32 nt, Human
cuguggcaggcagauuaccugaggucaggagu

SEQ ID NO: 143655 - RNA, 32 nt, Human
cuguggcagguggaucaccugaggucaggagu

SEQ ID NO: 143656 - RNA, 32 nt, Human
cuguggcagucuguagagcagcucccagaggc

SEQ ID NO: 143657 - RNA, 32 nt, Human
cuguggcauaaauaaaggugucauaaagacag

SEQ ID NO: 143658 - RNA, 32 nt, Human
cuguggcauaaauugcaucacuguaucauuuu

SEQ ID NO: 143659 - RNA, 23 nt, Human
cuguggcauccaauccuucuacc

SEQ ID NO: 143660 - RNA, 23 nt, Human
cuguggcauccacuguggcaucu

SEQ ID NO: 143661 - RNA, 20 nt, Human
cuguggcaugaaaaauagcu

SEQ ID NO: 143662 - RNA, 32 nt, Human
cuguggcauugucaccuucacagcagacagag

SEQ ID NO: 143663 - RNA, 32 nt, Human
cuguggcauuuuuccuccuucucccuaacuuu

SEQ ID NO: 143664 - RNA, 32 nt, Human
cuguggccaaaaacaucguguaucagggacaa

SEQ ID NO: 143665 - RNA, 23 nt, Human
cuguggccaagcccugaguggcc

SEQ ID NO: 143666 - RNA, 32 nt, Human
cuguggccacagugcccccacccaguggaccu

SEQ ID NO: 143667 - RNA, 21 nt, Human
cuguggccagcccugaagccc

SEQ ID NO: 143668 - RNA, 19 nt, Human
cuguggccagcggcugggg

SEQ ID NO: 143669 - RNA, 32 nt, Human
cuguggccagcucccugcuaagaaggagacca

SEQ ID NO: 143670 - RNA, 23 nt, Human
cuguggccaggugccugccaccc

SEQ ID NO: 143671 - RNA, 21 nt, Human
cuguggccaucccugagcacc

SEQ ID NO: 143672 - RNA, 32 nt, Human
cuguggccaugacccugccucucccaggcagg

SEQ ID NO: 143673 - RNA, 32 nt, Human
cuguggcccaauccccuuccucuccuuuuaag

SEQ ID NO: 143674 - RNA, 32 nt, Human
cuguggcccaccugucacacagacucagcuaa

SEQ ID NO: 143675 - RNA, 24 nt, Human
cuguggcccagccuggaguacagu

SEQ ID NO: 143676 - RNA, 18 nt, Human
cuguggcccagcugccca

SEQ ID NO: 143677 - RNA, 32 nt, Human
cuguggcccaggcugaagagcaguagugugau

SEQ ID NO: 143678 - RNA, 24 nt, Human
cuguggcccaggcugaagugcagu

SEQ ID NO: 143679 - RNA, 32 nt, Human
cuguggcccaggcugaagugcaguggugugau

SEQ ID NO: 143680 - RNA, 22 nt, Human
cuguggcccaggcugagagcag

SEQ ID NO: 143681 - RNA, 32 nt, Human
cuguggcccaggcuggacuccagcacaguggc

SEQ ID NO: 143682 - RNA, 24 nt, Human
cuguggcccaggcuggagugcagu

SEQ ID NO: 143683 - RNA, 32 nt, Human
cuguggcccaggcuggagugcaguggcacaac

SEQ ID NO: 143684 - RNA, 32 nt, Human
cuguggcccaggcuggagugcaguggcacgau

SEQ ID NO: 143685 - RNA, 32 nt, Human
cuguggcccaggcuggagugcaguggcaugau

SEQ ID NO: 143686 - RNA, 32 nt, Human
cuguggcccaggcuggagugcaguggcgcaac

SEQ ID NO: 143687 - RNA, 32 nt, Human
cuguggcccaggcuggagugcaguggcgcggu

SEQ ID NO: 143688 - RNA, 32 nt, Human
cuguggcccaggcuggagugcaguggcuguuc

SEQ ID NO: 143689 - RNA, 32 nt, Human
cuguggcccaggcuggagugcaguggugcgau

SEQ ID NO: 143690 - RNA, 24 nt, Human
cuguggcccaggcuggaguguagu

SEQ ID NO: 143691 - RNA, 32 nt, Human
cuguggcccaggcuggaguguaguggcguggu

SEQ ID NO: 143692 - RNA, 24 nt, Human
cuguggcccaggcuggcgugcagu

SEQ ID NO: 143693 - RNA, 32 nt, Human
cuguggcccaggcuggcgugcagugggccguc

SEQ ID NO: 143694 - RNA, 32 nt, Human
cuguggcccagugcucaggaccagccaucuug

SEQ ID NO: 143695 - RNA, 19 nt, Human
cuguggccccaacuuaccu

SEQ ID NO: 143696 - RNA, 32 nt, Human
cuguggcccccgggugaucucccaccacacuu

SEQ ID NO: 143697 - RNA, 17 nt, Human
cuguggccccucagcau

SEQ ID NO: 143698 - RNA, 24 nt, Human
cuguggccccuggacggguacaau

SEQ ID NO: 143699 - RNA, 32 nt, Human
cuguggcccuaaggagcugaccgugccagagc

SEQ ID NO: 143700 - RNA, 32 nt, Human
cuguggcccugccucugcccagcgagaggccg

SEQ ID NO: 143701 - RNA, 32 nt, Human
cuguggcccuggcucugcuguccccuuggcag

SEQ ID NO: 143702 - RNA, 32 nt, Human
cuguggcccuggcuggaguucaguggugugau

SEQ ID NO: 143703 - RNA, 22 nt, Human
cuguggccgacuucgguuccgg

SEQ ID NO: 143704 - RNA, 32 nt, Human
cuguggccggacagggacuggaagagaggacg

SEQ ID NO: 143705 - RNA, 23 nt, Human
cuguggccgucaguggaaugcag

SEQ ID NO: 143706 - RNA, 32 nt, Human
cuguggccucaggacucucugccucacccgcu

SEQ ID NO: 143707 - RNA, 21 nt, Human
cuguggccuccccugaccccc

SEQ ID NO: 143708 - RNA, 32 nt, Human
cuguggccuccuuuucccuccugcuggagcac

SEQ ID NO: 143709 - RNA, 22 nt, Human
cuguggccugagcccugcaccc

SEQ ID NO: 143710 - RNA, 21 nt, Human
cuguggccugcacuugagcca

SEQ ID NO: 143711 - RNA, 32 nt, Human
cuguggccugcacuuguggccucgaaggaagc

SEQ ID NO: 143712 - RNA, 32 nt, Human
cuguggccugggaaauaguucucuuggcaccu

SEQ ID NO: 143713 - RNA, 32 nt, Human
cuguggccugggagaccucugcccagaccaug

SEQ ID NO: 143714 - RNA, 22 nt, Human
cuguggccugucccuauugccc

SEQ ID NO: 143715 - RNA, 32 nt, Human
cuguggccuucagggucuccccaaacaguggg

SEQ ID NO: 143716 - RNA, 32 nt, Human
cuguggccuucaucgugguccucugcccacac

SEQ ID NO: 143717 - RNA, 32 nt, Human
cuguggccuuucuuccaaggcuggaguucucg

SEQ ID NO: 143718 - RNA, 32 nt, Human
cuguggccuuucuuccucugggcaaagaaggg

SEQ ID NO: 143719 - RNA, 32 nt, Human
cuguggccuuucuugugaccaucagggccugg

SEQ ID NO: 143720 - RNA, 32 nt, Human
cuguggccuuucuuucuuccaaggcugggcuu

SEQ ID NO: 143721 - RNA, 26 nt, Human
cuguggccuuugugagccaguuccag

SEQ ID NO: 143722 - RNA, 23 nt, Human
cuguggcgagccauuugucccaa

SEQ ID NO: 143723 - RNA, 20 nt, Human
cuguggcgcccuuggccgcu

SEQ ID NO: 143724 - RNA, 32 nt, Human
cuucaagucauuguguuucugccaggacucug

SEQ ID NO: 143725 - RNA, 32 nt, Human
cuucaagucuuagaaaaacuaguuuuuguugu

SEQ ID NO: 143726 - RNA, 32 nt, Human
cuucaaguucacuaauacuuuccuuuucaaug

SEQ ID NO: 143727 - RNA, 32 nt, Human
cuucaaguucagagaaaagagauggaagaggg

SEQ ID NO: 143728 - RNA, 19 nt, Human
cuucaaguugagcacuccu

SEQ ID NO: 143729 - RNA, 32 nt, Human
cuucaauacaucuuucccuuucucuucuucau

SEQ ID NO: 143730 - RNA, 32 nt, Human
cuucaaucaucccaucaacagcucuucauuuc

SEQ ID NO: 143731 - RNA, 32 nt, Human
cuucaauccugccucuugcaaugacagcugau

SEQ ID NO: 143732 - RNA, 32 nt, Human
cuucaaucucaggcuuuucuccaucuuuuaag

SEQ ID NO: 143733 - RNA, 32 nt, Human
cuucaaucugaaaaucucuuuugauggaagau

SEQ ID NO: 143734 - RNA, 32 nt, Human
cuucaaucuggaaggcagagguugcagugaga

SEQ ID NO: 143735 - RNA, 32 nt, Human
cuucaaucuguguuuuuguuucuggcucuccg

SEQ ID NO: 143736 - RNA, 32 nt, Human
cuucaaugaaugguguuggggaaagugcauga

SEQ ID NO: 143737 - RNA, 32 nt, Human
cuucaaugacccuuccggaucggaagaagcug

SEQ ID NO: 143738 - RNA, 21 nt, Human
cuucaaugagaagccuucuca

SEQ ID NO: 143739 - RNA, 32 nt, Human
cuucaaugagguguucgcagcagcagccacag

SEQ ID NO: 143740 - RNA, 32 nt, Human
cuucaaugccuguauucccucacucauucaaa

SEQ ID NO: 143741 - RNA, 32 nt, Human
cuucaaugugcuguguuaaaucuugcuucucu

SEQ ID NO: 143742 - RNA, 32 nt, Human
cuucaauuccucaagucuggguggugacaagg

SEQ ID NO: 143743 - RNA, 32 nt, Human
cuucaauugagaccaggaugagcuguccucuc

SEQ ID NO: 143744 - RNA, 32 nt, Human
cuucaauuuguuuaagaaacauauuaaguuug

SEQ ID NO: 143745 - RNA, 32 nt, Human
cuucacaaaaacaccguggaugcugaaguuag

SEQ ID NO: 143746 - RNA, 32 nt, Human
cuucacaaaccaggaugcggacgggggaagcg

SEQ ID NO: 143747 - RNA, 32 nt, Human
cuucacaaagaaggaagaaaagaaggagugga

SEQ ID NO: 143748 - RNA, 19 nt, Human
cuucacaaaugaagaauga

SEQ ID NO: 143749 - RNA, 19 nt, Human
cuucacaacggccccagga

SEQ ID NO: 143750 - RNA, 18 nt, Human
cuucacaagauacuugag

SEQ ID NO: 143751 - RNA, 32 nt, Human
cuucacaagauggaaggcaggugaggauguca

SEQ ID NO: 143752 - RNA, 32 nt, Human
cuucacaagcccucucucucccucucuuugcc

SEQ ID NO: 143753 - RNA, 32 nt, Human
cuucacaagucuguaaucccagcacuuuggga

SEQ ID NO: 143754 - RNA, 32 nt, Human
cuucacaauuaccuuuucuagugcaguuauau

SEQ ID NO: 143755 - RNA, 32 nt, Human
cuucacacaccccuuuuucgccuccagaguag

SEQ ID NO: 143756 - RNA, 32 nt, Human
cuucacacaguauucucccccacgccgucuau

SEQ ID NO: 143757 - RNA, 32 nt, Human
cuucacacccaccccucugaccccugccuucc

SEQ ID NO: 143758 - RNA, 32 nt, Human
cuucacaccgccuucucuuauuuucugcccau

SEQ ID NO: 143759 - RNA, 32 nt, Human
cuucacacucuccuccaaaagagccuccaucu

SEQ ID NO: 143760 - RNA, 32 nt, Human
cuucacagacuggcaaucacuuccguaaaguc

SEQ ID NO: 143761 - RNA, 32 nt, Human
cuucacagaguguggcuucaccagucagaggg

SEQ ID NO: 143762 - RNA, 32 nt, Human
cuucacagcucucuggacuuuggcuggguggc

SEQ ID NO: 143763 - RNA, 32 nt, Human
cuucacagcuggcuggaagugaaagucaccgg

SEQ ID NO: 143764 - RNA, 18 nt, Human
cuucacaggacacuugag

SEQ ID NO: 143765 - RNA, 32 nt, Human
cuucacagggcccagaggcuugugaggaagcc

SEQ ID NO: 143766 - RNA, 32 nt, Human
cuucacaggguucugcaucuuagccugcugcu

SEQ ID NO: 143767 - RNA, 32 nt, Human
cuucacaguaccuaccuccacuuggcagauua

SEQ ID NO: 143768 - RNA, 32 nt, Human
cuucacagucaccgaagaaaugaaguuacagg

SEQ ID NO: 143769 - RNA, 32 nt, Human
cuucacagucaucacuucuuggaguugguuac

SEQ ID NO: 143770 - RNA, 32 nt, Human
cuucacauccaccccggcucccccugccagca

SEQ ID NO: 143771 - RNA, 32 nt, Human
cuucacaucuggccuggcugggaggcuugggg

SEQ ID NO: 143772 - RNA, 32 nt, Human
cuucacaugcacuucccugucuggacuucagc

SEQ ID NO: 143773 - RNA, 23 nt, Human
cuucacauuaaaacuuuuuuccu

SEQ ID NO: 143774 - RNA, 32 nt, Human
cuucacauugccugugaccauucagaauagaa

SEQ ID NO: 143775 - RNA, 32 nt, Human
cuucacauuucacccgugugugcaaugccuuu

SEQ ID NO: 143776 - RNA, 32 nt, Human
cuucacauuucucaucacuaguugaaagccug

SEQ ID NO: 143777 - RNA, 32 nt, Human
cuucaccaagcuuucagaaacuagccgaaugg

SEQ ID NO: 143778 - RNA, 32 nt, Human
cuucaccaccaugggcuggcuuuuucuaaagg

SEQ ID NO: 143779 - RNA, 22 nt, Human
cuucaccaccccgccccaagga

SEQ ID NO: 143780 - RNA, 21 nt, Human
cuucaccacgcugggcuucaa

SEQ ID NO: 143781 - RNA, 32 nt, Human
cuucaccacguuggccaggcuggucuugaacu

SEQ ID NO: 143782 - RNA, 32 nt, Human
cuucaccacuggcugccucaccuacuccccac

SEQ ID NO: 143783 - RNA, 32 nt, Human
cuucaccacugggcucuuccucccagacccau

SEQ ID NO: 143784 - RNA, 32 nt, Human
cuucaccagcagacccagaaguggugggugaa

SEQ ID NO: 143785 - RNA, 32 nt, Human
cuucaccagcuacugcagaggcauuuugcauu

SEQ ID NO: 143786 - RNA, 32 nt, Human
cuucaccaggcaggccuuggaguuccaugaca

SEQ ID NO: 143787 - RNA, 32 nt, Human
cuucaccauaaauuugauguuuccucuugcug

SEQ ID NO: 143788 - RNA, 32 nt, Human
cuucaccaugcuccauccucccucucuuccac

SEQ ID NO: 143789 - RNA, 32 nt, Human
cuucaccauguuggccaggcuggucuugaacu

SEQ ID NO: 143790 - RNA, 32 nt, Human
cuucacccaaccacgguccuucacucccacca

SEQ ID NO: 143791 - RNA, 32 nt, Human
cuucacccacugccucugccucccuggggcag

SEQ ID NO: 143792 - RNA, 32 nt, Human
cuucacccagcaccagcggacagggaagggca

SEQ ID NO: 143793 - RNA, 32 nt, Human
cuucacccccagggcagguuguuuccauggga

SEQ ID NO: 143794 - RNA, 32 nt, Human
cuucaccccggccugugacacacacagcccuc

SEQ ID NO: 143795 - RNA, 20 nt, Human
cuucaccccuaccugcuucc

SEQ ID NO: 143796 - RNA, 32 nt, Human
cuucaccccugaguccacuugcgggguaagag

SEQ ID NO: 143797 - RNA, 32 nt, Human
cuucacccuagcaucagcaguagguucuggcc

SEQ ID NO: 143798 - RNA, 32 nt, Human
cuucacccuccccucgccgcgugccuccgcag

SEQ ID NO: 143799 - RNA, 32 nt, Human
cuucacccuuccuaaguccgcuucuggucucc

SEQ ID NO: 143800 - RNA, 32 nt, Human
cuucacccuuucuccauaccagggccuaaguc

SEQ ID NO: 143801 - RNA, 32 nt, Human
cuucaccgagugaccuugagcccagggcgacg

SEQ ID NO: 143802 - RNA, 32 nt, Human
cuucaccgcccccuucaccaccucuacacguu

SEQ ID NO: 143803 - RNA, 32 nt, Human
cuucaccguccacccccggggucugcaccgcg

SEQ ID NO: 143804 - RNA, 32 nt, Human
cuucaccgucucuccaaaucugaggccuguca

SEQ ID NO: 143805 - RNA, 32 nt, Human
cuucaccucagaguguggcuguaccacauucg

SEQ ID NO: 143806 - RNA, 32 nt, Human
cuucaccucaguggagcuucugaguuuuauac

SEQ ID NO: 143807 - RNA, 32 nt, Human
cuucaccucccaccaucauuuuaaccuuccuc

SEQ ID NO: 143808 - RNA, 32 nt, Human
cuucaccuccuuacuggacacagggucaaggg

SEQ ID NO: 143809 - RNA, 32 nt, Human
cuucaccucucugugccucagcauccucaucu

SEQ ID NO: 143810 - RNA, 32 nt, Human
cuucaccuggacaggaugagagugucaggugu

SEQ ID NO: 143811 - RNA, 19 nt, Human
cuucaccuguguccucccu

SEQ ID NO: 143812 - RNA, 20 nt, Human
cuucaccuuccuggugcccu

SEQ ID NO: 143813 - RNA, 32 nt, Human
cuucaccuucugugauaauuuugaggccuccc

SEQ ID NO: 143814 - RNA, 32 nt, Human
cuucaccuucuugcaaccucuuccccuuuccc

SEQ ID NO: 143815 - RNA, 32 nt, Human
cuucacgagaucagaggagaccggacgccuuc

SEQ ID NO: 143816 - RNA, 32 nt, Human
cuucacgaugucuuccgagaccaccuggggcc

SEQ ID NO: 143817 - RNA, 32 nt, Human
cuucacgccuguaauucuagcacuuugggagg

SEQ ID NO: 143818 - RNA, 32 nt, Human
cuucacgcugccaggagaaugauggaagcaug

SEQ ID NO: 143819 - RNA, 32 nt, Human
cuucacggaccacagggaaacggagugggcgg

SEQ ID NO: 143820 - RNA, 32 nt, Human
cuucacggccuuucauguacucgcccugagag

SEQ ID NO: 143821 - RNA, 32 nt, Human
cuucacggcugccaggagccucuccccuccag

SEQ ID NO: 143822 - RNA, 32 nt, Human
cuucacgguaccucgugugggguggggacuga

SEQ ID NO: 143823 - RNA, 31 nt, Human
cuucacgugguuuggagaugggugggggaaa

SEQ ID NO: 143824 - RNA, 32 nt, Human
cuucacuaaaaauacaaaacuuagcugguuag

SEQ ID NO: 143825 - RNA, 32 nt, Human
cuucacuacuucuguagucucaucuugaguaa

SEQ ID NO: 143826 - RNA, 32 nt, Human
cuucacucacccagcaggucaguuuucugugc

SEQ ID NO: 143827 - RNA, 32 nt, Human
cuucacucaggaguucaugcugagaugaucau

SEQ ID NO: 143828 - RNA, 32 nt, Human
cuucacuccagccagcaucauggucuucggug

SEQ ID NO: 143829 - RNA, 32 nt, Human
cuucacuccagccugggcaacagagugagacu

SEQ ID NO: 143830 - RNA, 32 nt, Human
cuucacuccagccugggugacaaagugagacu

SEQ ID NO: 143831 - RNA, 32 nt, Human
cuucacuccccuaucccauucucccucucaag

SEQ ID NO: 143832 - RNA, 32 nt, Human
cuucacuccugagccagccagaccaugaaccc

SEQ ID NO: 143833 - RNA, 32 nt, Human
cuucacucggaucacgcccuccugggcacagg

SEQ ID NO: 143834 - RNA, 32 nt, Human
cuucacucucaggaugcagccgaggugggccc

SEQ ID NO: 143835 - RNA, 32 nt, Human
cuucacucucucugucucuccugcuccaccau

SEQ ID NO: 143836 - RNA, 32 nt, Human
cuucacucugcugcuuccgagaaccucggccg

SEQ ID NO: 143837 - RNA, 32 nt, Human
cuucacucuuucuucuuuguaaaccaugucau

SEQ ID NO: 143838 - RNA, 15 nt, Human
cuucacugaaacuug

SEQ ID NO: 143839 - RNA, 21 nt, Human
cuucacugaagauuuauucca

SEQ ID NO: 143840 - RNA, 32 nt, Human
cuucacugaauucccuucaaagccaaaguuuc

SEQ ID NO: 143841 - RNA, 24 nt, Human
cuucacugacagccgcugcuuccu

SEQ ID NO: 143842 - RNA, 32 nt, Human
cuucacugagauugaaugugcuggccauggug

SEQ ID NO: 143843 - RNA, 21 nt, Human
cuucacugagccuuucuccca

SEQ ID NO: 143844 - RNA, 32 nt, Human
cuucacugaugugggcaggagggguggugaag

SEQ ID NO: 143845 - RNA, 32 nt, Human
cuucacugcacuccagucugggugacagagca

SEQ ID NO: 143846 - RNA, 21 nt, Human
cuucacugcauccuugcccca

SEQ ID NO: 143847 - RNA, 32 nt, Human
cuucacugcauccuugccccauucagcccggc

SEQ ID NO: 143848 - RNA, 32 nt, Human
cuucacugccaggaguagugagcuguacgagu

SEQ ID NO: 143849 - RNA, 23 nt, Human
cuucacugcccuucuccaucucu

SEQ ID NO: 143850 - RNA, 32 nt, Human
cuucacugcucuguguccucugcuccaggagg

SEQ ID NO: 143851 - RNA, 32 nt, Human
cuucacuggccacuuucucaauccuggcuguc

SEQ ID NO: 143852 - RNA, 32 nt, Human
cuucacuggccucaccugccgugccugccccc

SEQ ID NO: 143853 - RNA, 32 nt, Human
cuucacugguagccagcugaggccccaagugc

SEQ ID NO: 143854 - RNA, 32 nt, Human
cuucacuguccccucagaccugggcggggagg

SEQ ID NO: 143855 - RNA, 32 nt, Human
cuucacugugcagcuucugggguggccugggc

SEQ ID NO: 143856 - RNA, 32 nt, Human
cuucacugugcagucggauagagcagauucag

SEQ ID NO: 143857 - RNA, 32 nt, Human
cuucacugugcgggacaggccaaggugguccg

SEQ ID NO: 143858 - RNA, 32 nt, Human
cuucacuguggaaaaccuucuguugcugaaua

SEQ ID NO: 143859 - RNA, 32 nt, Human
cuucacuguggcuaagggguggggugagggga

SEQ ID NO: 143860 - RNA, 32 nt, Human
cuucacugugucuuuccaucugggcucugcag

SEQ ID NO: 143861 - RNA, 32 nt, Human
cuucacuguguguacacagcaagagcaugugu

SEQ ID NO: 143862 - RNA, 32 nt, Human
cuucacuucagaaauccaagacucauauucau

SEQ ID NO: 143863 - RNA, 32 nt, Human
cuucacuucauaaauuaauuauaccuuagcga

SEQ ID NO: 143864 - RNA, 32 nt, Human
cuucacuuccagcugcucuccccaacggcugu

SEQ ID NO: 143865 - RNA, 32 nt, Human
cuucacuucccaguggccuucccaccaggagg

SEQ ID NO: 143866 - RNA, 32 nt, Human
cuucacuucccccauucccuuccacagcucau

SEQ ID NO: 143867 - RNA, 32 nt, Human
cuucacuucccgagggcgggugaguggagagc

SEQ ID NO: 143868 - RNA, 32 nt, Human
cuucacuuccguuccagccucagcggcagcug

SEQ ID NO: 143869 - RNA, 32 nt, Human
cuucacuucuucucuucuguccccaccuccuc

SEQ ID NO: 143870 - RNA, 32 nt, Human
cuucacuugggaggggcggagguagcaguaaa

SEQ ID NO: 143871 - RNA, 32 nt, Human
cuucacuuucauguccagagcugcuuagacug

SEQ ID NO: 143872 - RNA, 32 nt, Human
cuucacuuuggucacaguacuuuuguggaaua

SEQ ID NO: 143873 - RNA, 32 nt, Human
cuucagaacacacacucucugccuugaaaacu

SEQ ID NO: 143874 - RNA, 32 nt, Human
cuucagaacagcuucagagccaugaaggugaa

SEQ ID NO: 143875 - RNA, 32 nt, Human
cuucagaaccuagaccuaucagugccauuuuu

SEQ ID NO: 143876 - RNA, 32 nt, Human
cuucagaacuccucagcuucagauggucaagc

SEQ ID NO: 143877 - RNA, 32 nt, Human
cuucagaagaauugaggaucugauggagguuu

SEQ ID NO: 143878 - RNA, 32 nt, Human
cuucagaaggggaccuguuuucuucaagggaa

SEQ ID NO: 143879 - RNA, 32 nt, Human
cuucagaauucccgcccccacccagggauggg

SEQ ID NO: 143880 - RNA, 32 nt, Human
cuucagacaauucagaagcaucaccaugcaug

SEQ ID NO: 143881 - RNA, 32 nt, Human
cuucagacacaaaaguccacugaugcaaauug

SEQ ID NO: 143882 - RNA, 32 nt, Human
cuucagacagggcuugguggggcaggacaugg

SEQ ID NO: 143883 - RNA, 32 nt, Human
cuucagacccuuguaaagucucccucagcccu

SEQ ID NO: 143884 - RNA, 32 nt, Human
cuucagaccucaccaucuuugacagcccuuga

SEQ ID NO: 143885 - RNA, 32 nt, Human
cuucagacgaggcauuaaccccaugguuaaug

SEQ ID NO: 143886 - RNA, 32 nt, Human
cuucagacgcccgccaucaugcccguuuaauu

SEQ ID NO: 143887 - RNA, 32 nt, Human
cuucagacuccagcuacagcgagccugccccu

SEQ ID NO: 143888 - RNA, 32 nt, Human
cuucagacucucuccucucucucccuccacuc

SEQ ID NO: 143889 - RNA, 32 nt, Human
cuucagacugaggaucuagggcugggaccugu

SEQ ID NO: 143890 - RNA, 32 nt, Human
cuucagacugguuugccugaaucuuuuccuuu

SEQ ID NO: 143891 - RNA, 32 nt, Human
cuucagacuucuaaucauaggcuuguaaaccu

SEQ ID NO: 143892 - RNA, 32 nt, Human
cuucagagaaaagaugugaaacaagcauuaau

SEQ ID NO: 143893 - RNA, 32 nt, Human
cuucagagacacgaaccaccuugaguggaugu

SEQ ID NO: 143894 - RNA, 32 nt, Human
cuucagagacaggcacuggcgccagaggcuuc

SEQ ID NO: 143895 - RNA, 32 nt, Human
cuucagagacaggguuucaccauguuggccag

SEQ ID NO: 143896 - RNA, 32 nt, Human
cuucagagaccacgcagccuuccuucgaagac

SEQ ID NO: 143897 - RNA, 32 nt, Human
cuucagagacuaucagaugagauacagagaca

SEQ ID NO: 143898 - RNA, 32 nt, Human
cuucagagacuguuccagccucaggggugacg

SEQ ID NO: 143899 - RNA, 32 nt, Human
cuucagagagcaguccuuucucugugcagcug

SEQ ID NO: 143900 - RNA, 32 nt, Human
cuucagagagcaucauccacaggucaucccac

SEQ ID NO: 143901 - RNA, 32 nt, Human
cuucagagaggaagaaggagaggaggagaaag

SEQ ID NO: 143902 - RNA, 32 nt, Human
cuucagagaggcaggagggcgguccgaacgug

SEQ ID NO: 143903 - RNA, 32 nt, Human
cuucagagcaccuuucuacagacuggacugcc

SEQ ID NO: 143904 - RNA, 32 nt, Human
cuucagagcagcccuggagacaggagggccau

SEQ ID NO: 143905 - RNA, 32 nt, Human
cuucagagccacccuuucuaguuugcauuucc

SEQ ID NO: 143906 - RNA, 32 nt, Human
cuucagagccagggcuagaggaugcacggugg

SEQ ID NO: 143907 - RNA, 30 nt, Human
cuucagagccucuccuugugucccuguauu

SEQ ID NO: 143908 - RNA, 32 nt, Human
cuucagagcugguuggguucaccaccuucaua

SEQ ID NO: 143909 - RNA, 32 nt, Human
cuucagaggaggcagaaauggaagcauuuuca

SEQ ID NO: 143910 - RNA, 32 nt, Human
cuucagaggcuuccagggcgaggggaaaccau

SEQ ID NO: 143911 - RNA, 32 nt, Human
cuucagagggagcacaacacuggcaaugccuu

SEQ ID NO: 143912 - RNA, 32 nt, Human
cuucagaguauugggaaaagacuugccuucug

SEQ ID NO: 143913 - RNA, 31 nt, Human
cuucagagucaaacagauguuggagaaauuc

SEQ ID NO: 143914 - RNA, 32 nt, Human
cuucagaguucagaauuuucagauacuaagga

SEQ ID NO: 143915 - RNA, 32 nt, Human
cuucagauaagaauucaagcuuugacauugua

SEQ ID NO: 143916 - RNA, 32 nt, Human
cuucagauagcaguagaggacugcagcugccu

SEQ ID NO: 143917 - RNA, 32 nt, Human
cuucagauagcaguagaggacugcagcugucu

SEQ ID NO: 143918 - RNA, 32 nt, Human
cuucagaucccuguggacacacugccugcucu

SEQ ID NO: 143919 - RNA, 32 nt, Human
cuucagauccugucugucagucucuguuaggg

SEQ ID NO: 143920 - RNA, 31 nt, Human
cuucagaugaguagaagagaguggggaggga

SEQ ID NO: 143921 - RNA, 32 nt, Human
cuucagaugccuuucugccucugucgauuuua

SEQ ID NO: 143922 - RNA, 32 nt, Human
cuucagauggggaccccagcgaagcaggggcu

SEQ ID NO: 143923 - RNA, 32 nt, Human
cuucagauuaaugacuggcuacagaguaacaa

SEQ ID NO: 143924 - RNA, 32 nt, Human
cuucagcaaccucuggcgcccugcugccaccc

SEQ ID NO: 143925 - RNA, 32 nt, Human
cuucagcaaugguacucauucucuccaaccag

SEQ ID NO: 143926 - RNA, 19 nt, Human
cuucagcacccccacacca

SEQ ID NO: 143927 - RNA, 32 nt, Human
cuucagcaccucagucugggaagaaucuaguc

SEQ ID NO: 143928 - RNA, 22 nt, Human
cuucagcagaauaaugaugaug

SEQ ID NO: 143929 - RNA, 24 nt, Human
cuucagcagcaaaccaaaacagca

SEQ ID NO: 143930 - RNA, 16 nt, Human
cuucagcagcagcauc

SEQ ID NO: 143931 - RNA, 32 nt, Human
cuucagcaggcguaggcucacccugggcggag

SEQ ID NO: 143932 - RNA, 32 nt, Human
cuucagcaggcugcacaaguggaagcaacuaa

SEQ ID NO: 143933 - RNA, 32 nt, Human
cuucagcaguucuuuuugugaaguaaaacuug

SEQ ID NO: 143934 - RNA, 22 nt, Human
cuucagcaucucucuuggccug

SEQ ID NO: 143935 - RNA, 32 nt, Human
cuucagcauuucucaaaagagaggcagaggca

SEQ ID NO: 143936 - RNA, 17 nt, Human
cuucagccaacagcauu

SEQ ID NO: 143937 - RNA, 18 nt, Human
cuucagccaaucugugaa

SEQ ID NO: 143938 - RNA, 32 nt, Human
cuucagccagaagcagcaccugcucaagcacc

SEQ ID NO: 143939 - RNA, 32 nt, Human
cuucagccagagccagagagcuggauaugggg

SEQ ID NO: 143940 - RNA, 32 nt, Human
cuucagccaugguucacacauaugacacacuc

SEQ ID NO: 143941 - RNA, 32 nt, Human
cuucagcccagccuccaguccuggguucccuc

SEQ ID NO: 143942 - RNA, 32 nt, Human
cuucagcccagccuguccgucccugucccggg

SEQ ID NO: 143943 - RNA, 32 nt, Human
cuucagcccaggagguggagguugcagugagc

SEQ ID NO: 143944 - RNA, 32 nt, Human
cuucagcccaggaguuccagacugccuggcua

SEQ ID NO: 143945 - RNA, 21 nt, Human
cuucagcccaggaguucgaga

SEQ ID NO: 143946 - RNA, 32 nt, Human
cuucagcccaggaguucgagaccagccugggc

SEQ ID NO: 143947 - RNA, 21 nt, Human
cuucagcccaggaguuugaga

SEQ ID NO: 143948 - RNA, 32 nt, Human
cuucagccccggaacccugccaccucagugac

SEQ ID NO: 143949 - RNA, 32 nt, Human
cuucagcccgggagauugaggcugcggugagc

SEQ ID NO: 143950 - RNA, 32 nt, Human
cuucagcccgggagguggagguugcagugagc

SEQ ID NO: 143951 - RNA, 24 nt, Human
cuucagcccgggcaacaagagcga

SEQ ID NO: 143952 - RNA, 32 nt, Human
cuucagccgccgcggcggaugcggcggccagg

SEQ ID NO: 143953 - RNA, 32 nt, Human
cuucagccuaggacguugaggcugcagugagc

SEQ ID NO: 143954 - RNA, 32 nt, Human
cuucagccuccaaccuccggggcgaccuucuc

SEQ ID NO: 143955 - RNA, 32 nt, Human
cuucagccuccagggccugggcgggccgccag

SEQ ID NO: 143956 - RNA, 32 nt, Human
cuucagccugcucuucaacuucguguccugga

SEQ ID NO: 143957 - RNA, 24 nt, Human
cuucagccugggcaacaagaguga

SEQ ID NO: 143958 - RNA, 21 nt, Human
cuucagccugggcaacagagc

SEQ ID NO: 143959 - RNA, 25 nt, Human
cuucagccugggugacagagugaga

SEQ ID NO: 143960 - RNA, 32 nt, Human
cuucagccuggugacagagcgagacucgucuc

SEQ ID NO: 143961 - RNA, 32 nt, Human
cuucagccuucccagguucaagcaauucuccu

SEQ ID NO: 143962 - RNA, 19 nt, Human
cuucagccuucccugggcc

SEQ ID NO: 143963 - RNA, 32 nt, Human
cuucagcggugaccaccuucucccucuaacac

SEQ ID NO: 143964 - RNA, 32 nt, Human
cuucagcguguuucacaagugaggaaagcaaa

SEQ ID NO: 143965 - RNA, 32 nt, Human
cuucagcucauuuugucucucucacauuaagg

SEQ ID NO: 143966 - RNA, 32 nt, Human
cuucagcucccuccucuuccuccaugggcggu

SEQ ID NO: 143967 - RNA, 32 nt, Human
cuucagcucccuucccugccuggaccauuccc

SEQ ID NO: 143968 - RNA, 32 nt, Human
cuucagcuccuagcucagccacugacugcccc

SEQ ID NO: 143969 - RNA, 32 nt, Human
cuucagcugagacugcagcccugccaauaccu

SEQ ID NO: 143970 - RNA, 32 nt, Human
cuucagcugccugaaacagccauguccaaguu

SEQ ID NO: 143971 - RNA, 32 nt, Human
cuucagcugccugcuggacuguuauuucuuga

SEQ ID NO: 143972 - RNA, 32 nt, Human
cuucagcugccuggaggccagaaggaaagggc

SEQ ID NO: 143973 - RNA, 18 nt, Human
cuucagcuucucauguga

SEQ ID NO: 143974 - RNA, 21 nt, Human
cuucagcuugggcaacagagc

SEQ ID NO: 143975 - RNA, 21 nt, Human
cuucagcuuugagggggguga

SEQ ID NO: 143976 - RNA, 32 nt, Human
cuucagcuuugcaaaguacuggccaggugugu

SEQ ID NO: 143977 - RNA, 18 nt, Human
cuucagcuuuggaaguga

SEQ ID NO: 143978 - RNA, 32 nt, Human
cuucaggaaaagggguugaauuaccuuuuaca

SEQ ID NO: 143979 - RNA, 32 nt, Human
cuucaggaaccagcucaugaucucaggaugua

SEQ ID NO: 143980 - RNA, 32 nt, Human
cuucaggaagcauaaagcaauugugaaauaca

SEQ ID NO: 143981 - RNA, 32 nt, Human
cuucaggaaugaaaggaggggcaaaggaguca

SEQ ID NO: 143982 - RNA, 32 nt, Human
cuucaggaccaggcagagagugaggcuggggg

SEQ ID NO: 143983 - RNA, 32 nt, Human
cuucaggacucaccuggggccugcugcuuuua

SEQ ID NO: 143984 - RNA, 32 nt, Human
cuucaggagacggagacauauggaaugugucg

SEQ ID NO: 143985 - RNA, 32 nt, Human
cuucaggagacugaagccaaggauaccagcag

SEQ ID NO: 143986 - RNA, 20 nt, Human
cuucaggagccugcugaaca

SEQ ID NO: 143987 - RNA, 32 nt, Human
cuucaggaggccgaggugggaggaucacugga

SEQ ID NO: 143988 - RNA, 32 nt, Human
cuucaggagggcccucaacacgaucuucucug

SEQ ID NO: 143989 - RNA, 32 nt, Human
cuucaggauagagccaggaugggcccagguaa

SEQ ID NO: 143990 - RNA, 32 nt, Human
cuucaggauagaggcaggaugggcccagguaa

SEQ ID NO: 143991 - RNA, 32 nt, Human
cuucaggaucugguggaaagagauaggugucu

SEQ ID NO: 143992 - RNA, 23 nt, Human
cuucaggaugaucuagagcagca

SEQ ID NO: 143993 - RNA, 32 nt, Human
cuucaggauggagcaaggaugggcccagguaa

SEQ ID NO: 143994 - RNA, 32 nt, Human
cuucaggcaggcuggagggauuugccacacag

SEQ ID NO: 143995 - RNA, 32 nt, Human
cuucaggcaugcauuuguuuaccauuucccag

SEQ ID NO: 143996 - RNA, 32 nt, Human
cuucaggcauuuuccugccuccaaaugcgucu

SEQ ID NO: 143997 - RNA, 32 nt, Human
cuucaggccagcucccugucggauggcuuuua

SEQ ID NO: 143998 - RNA, 23 nt, Human
cuucaggcccccgccuuggccug

SEQ ID NO: 143999 - RNA, 32 nt, Human
cuucaggccgcucccccgagauucuggggcag

SEQ ID NO: 144000 - RNA, 32 nt, Human
cuucaggccuucccuucuccauccugccaugu

SEQ ID NO: 144001 - RNA, 24 nt, Human
cuucaggccuuuaaacugcagcaa

SEQ ID NO: 144002 - RNA, 32 nt, Human
cuucaggcguggaugcagccugggggaagcca

SEQ ID NO: 144003 - RNA, 32 nt, Human
cuucaggcucuggacuggagcucucuggcaug

SEQ ID NO: 144004 - RNA, 32 nt, Human
cuucaggcuggacuggcuuccagcagaagugg

SEQ ID NO: 144005 - RNA, 32 nt, Human
cuucagggaaucacagucucuccucucagcaa

SEQ ID NO: 144006 - RNA, 32 nt, Human
cuucagggacggagacaggaccggcggagccc

SEQ ID NO: 144007 - RNA, 32 nt, Human
cuucagggaggaacuggacucucugggggcag

SEQ ID NO: 144008 - RNA, 32 nt, Human
cuucagggaggguggucauugccuagaggugc

SEQ ID NO: 144009 - RNA, 32 nt, Human
cuucagggccaggcagagagugaggcuggggg

SEQ ID NO: 144010 - RNA, 18 nt, Human
cuucagggccaggcuaug

SEQ ID NO: 144011 - RNA, 18 nt, Human
cuucagggccucucggcc

SEQ ID NO: 144012 - RNA, 32 nt, Human
cuucagggccuggacugcacucacagaggcaa

SEQ ID NO: 144013 - RNA, 21 nt, Human
cuucagggcuggccucggccu

SEQ ID NO: 144014 - RNA, 32 nt, Human
cuucaggggacagaaagagagcacuuucgaca

SEQ ID NO: 144015 - RNA, 32 nt, Human
cuucaggggagccucaguuuugcccauuuauc

SEQ ID NO: 144016 - RNA, 32 nt, Human
cuucaggggcacguaugucccaguacaagugu

SEQ ID NO: 144017 - RNA, 32 nt, Human
cuucaggggcagagaguuucuaugauguggca

SEQ ID NO: 144018 - RNA, 32 nt, Human
cuucaggggcccagaguggcugaggaaggaaa

SEQ ID NO: 144019 - RNA, 32 nt, Human
cuucaggggcugcuggauguacuccaccugga

SEQ ID NO: 144020 - RNA, 32 nt, Human
cuucaggggcuggguaugcuucaugaccugug

SEQ ID NO: 144021 - RNA, 32 nt, Human
cuucaggggugcugggauuacaggcaucagcc

SEQ ID NO: 144022 - RNA, 32 nt, Human
cuucagggguucacaucucuuuaaaggaaagg

SEQ ID NO: 144023 - RNA, 32 nt, Human
cuucaggguuauucaguccucugccucauggc

SEQ ID NO: 144024 - RNA, 32 nt, Human
cuucagguaccagccauccagacagugcuuga

SEQ ID NO: 144025 - RNA, 32 nt, Human
cuucagguagauuaucagagcugucagcacua

SEQ ID NO: 144026 - RNA, 21 nt, Human
cuucaggucaggaguucgaga

SEQ ID NO: 144027 - RNA, 32 nt, Human
cuucaggucucgaggccugacuccgggggaca

SEQ ID NO: 144028 - RNA, 32 nt, Human
cuucaggucuggaaaguaugaccuggaauuca

SEQ ID NO: 144029 - RNA, 32 nt, Human
cuucaggucuuuccuucucucuuucuuuuucu

SEQ ID NO: 144030 - RNA, 32 nt, Human
cuucaggugaagaagagaggaagcaggauccc

SEQ ID NO: 144031 - RNA, 32 nt, Human
cuucagguggagggguuuaccaccuuccuagg

SEQ ID NO: 144032 - RNA, 32 nt, Human
cuucagguggcccccucugugguucuggcucc

SEQ ID NO: 144033 - RNA, 32 nt, Human
cuucaggugugauccagcacuuucccagcuac

SEQ ID NO: 144034 - RNA, 32 nt, Human
cuucagguuauccuguugagggugggugggaa

SEQ ID NO: 144035 - RNA, 32 nt, Human
cuucagguucaagugauucuccucccucagcc

SEQ ID NO: 144036 - RNA, 32 nt, Human
cuucagguucaagugauucuccugccucagcc

SEQ ID NO: 144037 - RNA, 32 nt, Human
cuucagguuggcaauauuugaagguuucguug

SEQ ID NO: 144038 - RNA, 32 nt, Human
cuucaguaacuugccaggcucuagcauguggc

SEQ ID NO: 144039 - RNA, 21 nt, Human
cuucaguaagccaugcuuccu

SEQ ID NO: 144040 - RNA, 32 nt, Human
cuucaguaauguguccacaguacccuguauuu

SEQ ID NO: 144041 - RNA, 32 nt, Human
cuucaguaguguuuguguugugcgcucacccc

SEQ ID NO: 144042 - RNA, 32 nt, Human
cuucaguaucuauuuuccucuggucauuucag

SEQ ID NO: 144043 - RNA, 32 nt, Human
cuucaguauguagugagcauucacagguuuuc

SEQ ID NO: 144044 - RNA, 32 nt, Human
cuucaguccagagaauuccuccuggcagcccu

SEQ ID NO: 144045 - RNA, 32 nt, Human
cuucaguccccaggagcaggagcugcugcuca

SEQ ID NO: 144046 - RNA, 32 nt, Human
cuucagucccucaggcuggcagcugugcuggu

SEQ ID NO: 144047 - RNA, 32 nt, Human
cuucaguccugcuuccagaauuuggaaauccu

SEQ ID NO: 144048 - RNA, 32 nt, Human
cuucagucucaaaauccugggcucaagagauu

SEQ ID NO: 144049 - RNA, 21 nt, Human
cuucagucugcaucugugaaa

SEQ ID NO: 144050 - RNA, 32 nt, Human
cuucagucuuccugccuuugcuucaaguuguc

SEQ ID NO: 144051 - RNA, 32 nt, Human
cuucagucuuccuuuauuuauaaugggugggg

SEQ ID NO: 144052 - RNA, 32 nt, Human
cuucagugagcuaugaucgcgccacuguacuc

SEQ ID NO: 144053 - RNA, 32 nt, Human
cuucagugagcuaugggugcaccacuacacau

SEQ ID NO: 144054 - RNA, 32 nt, Human
cuucagugcaguguaccagggaagagaccuug

SEQ ID NO: 144055 - RNA, 32 nt, Human
cuucagugcugaggcagguugggcucaggaac

SEQ ID NO: 144056 - RNA, 32 nt, Human
cuucagugguuauguugcuggggaagaguugg

SEQ ID NO: 144057 - RNA, 32 nt, Human
cuucaguguagcucucuccucuucaaauaaac

SEQ ID NO: 144058 - RNA, 32 nt, Human
cuucaguguauuuuuaaaagacagcauuaaga

SEQ ID NO: 144059 - RNA, 32 nt, Human
cuucagugugauuuuugucuucugcuccuucu

SEQ ID NO: 144060 - RNA, 32 nt, Human
cuucaguguucuucccccuccauguugccugc

SEQ ID NO: 144061 - RNA, 32 nt, Human
cuucaguguuuccgacggagugaauggcggcg

SEQ ID NO: 144062 - RNA, 21 nt, Human
cuucaguucaacaugcuuccu

SEQ ID NO: 144063 - RNA, 32 nt, Human
cuucaguucacauuuuacucagucucccggug

SEQ ID NO: 144064 - RNA, 32 nt, Human
cuucaguuccucacugccuucuugggauacua

SEQ ID NO: 144065 - RNA, 32 nt, Human
cuucaguuccucucagcgcuccugccuccaaa

SEQ ID NO: 144066 - RNA, 32 nt, Human
cuucaguucuaaaacaauggcccaggguuugg

SEQ ID NO: 144067 - RNA, 32 nt, Human
cuucaguucucaugcugccucuuccaaaaggg

SEQ ID NO: 144068 - RNA, 32 nt, Human
cuucaguucuccagaagaaggagaauuuauuc

SEQ ID NO: 144069 - RNA, 32 nt, Human
cuucaguucucuagcccuuggcucugcugggu

SEQ ID NO: 144070 - RNA, 32 nt, Human
cuucaguuguuagcauuuucaaugugauauaa

SEQ ID NO: 144071 - RNA, 32 nt, Human
cuucaguuuccugcuuaaaacccugcagguuu

SEQ ID NO: 144072 - RNA, 32 nt, Human
cuucaguuucuccugacugugaucucacuggg

SEQ ID NO: 144073 - RNA, 32 nt, Human
cuucaguuucucucacuuugcccuggguaagc

SEQ ID NO: 144074 - RNA, 32 nt, Human
cuucaguuucuucaucugcaaaaugggcauaa

SEQ ID NO: 144075 - RNA, 32 nt, Human
cuucaguuuuacugcauuuucacaacauauca

SEQ ID NO: 144076 - RNA, 32 nt, Human
cuucaguuuuucucccacugggucaccucaag

SEQ ID NO: 144077 - RNA, 32 nt, Human
cuucauaagccuuucugcuucucaaguccaga

SEQ ID NO: 144078 - RNA, 32 nt, Human
cuucauaaucuaggcacagauaaucuuuaaca

SEQ ID NO: 144079 - RNA, 32 nt, Human
cuucauacacguuuggaaauguuuccugcagc

SEQ ID NO: 144080 - RNA, 32 nt, Human
cuucauacacuguaccccagcucucuucuaaa

SEQ ID NO: 144081 - RNA, 32 nt, Human
cuucauacauucauuuucuuuucaggggaaaa

SEQ ID NO: 144082 - RNA, 32 nt, Human
cuucauagcagaagaauuggaguuggaagguu

SEQ ID NO: 144083 - RNA, 32 nt, Human
cuucauagcaugagcuuugaaagguuuauaaa

SEQ ID NO: 144084 - RNA, 32 nt, Human
cuucauaggaagagaaauaacuuaacaauuuu

SEQ ID NO: 144085 - RNA, 18 nt, Human
cuucauaggacaaaguaa

SEQ ID NO: 144086 - RNA, 32 nt, Human
cuucauaggcccccaaacugcauggaagcaga

SEQ ID NO: 144087 - RNA, 32 nt, Human
cuucauaguagacauauaauuccaagcaugug

SEQ ID NO: 144088 - RNA, 32 nt, Human
cuucauaguggagagaaaccuugaaaguguaa

SEQ ID NO: 144089 - RNA, 32 nt, Human
cuucaucaaauaagcauguugugauaaugaua

SEQ ID NO: 144090 - RNA, 32 nt, Human
cuucaucaacccaguaaugacauaguuuaaau

SEQ ID NO: 144091 - RNA, 32 nt, Human
cuucaucaccauaugaaguaaaugaagcuagc

SEQ ID NO: 144092 - RNA, 32 nt, Human
cuucaucaccugggcagugucuuuucucagag

SEQ ID NO: 144093 - RNA, 22 nt, Human
cuucaucaccuucaggcuucag

SEQ ID NO: 144094 - RNA, 32 nt, Human
cuucaucaccuucaggcuucaguguacugggu

SEQ ID NO: 144095 - RNA, 32 nt, Human
cuucaucagcuccagacugagacucagugucu

SEQ ID NO: 144096 - RNA, 32 nt, Human
cuucaucaggaaaugugacgcagagauugugc

SEQ ID NO: 144097 - RNA, 32 nt, Human
cuucaucagugcuuagcauauguaggagaguu

SEQ ID NO: 144098 - RNA, 32 nt, Human
cuucaucauccccaccaccaccaccaccacca

SEQ ID NO: 144099 - RNA, 32 nt, Human
cuucaucaucuaaaugguguguugcugaaguu

SEQ ID NO: 144100 - RNA, 32 nt, Human
cuucaucauuuugacagcaucuuccucccucc

SEQ ID NO: 144101 - RNA, 32 nt, Human
cuucauccacaucaggaggguccggugaggcu

SEQ ID NO: 144102 - RNA, 32 nt, Human
cuucauccaccaauguuguacauguaugaaaa

SEQ ID NO: 144103 - RNA, 21 nt, Human
cuucauccacuugcuccuccc

SEQ ID NO: 144104 - RNA, 32 nt, Human
cuucauccagaagucccaacucacuguacauc

SEQ ID NO: 144105 - RNA, 32 nt, Human
cuucauccagggaaguuaauggagucuuggac

SEQ ID NO: 144106 - RNA, 32 nt, Human
cuucauccauacccuucucuuuugcauggcuu

SEQ ID NO: 144107 - RNA, 32 nt, Human
cuucauccaugcugguuauugcacugaaugau

SEQ ID NO: 144108 - RNA, 32 nt, Human
cuucaucccagagagacccgaguucccccagc

SEQ ID NO: 144109 - RNA, 32 nt, Human
cuucaucccagagcgcaccugcuuccuccacu

SEQ ID NO: 144110 - RNA, 32 nt, Human
cuucaucccagcagaaccagcaggauccuccu

SEQ ID NO: 144111 - RNA, 32 nt, Human
cuucaucccagccugggagacagagugagacc

SEQ ID NO: 144112 - RNA, 32 nt, Human
cuucaucccagccugggaugcuccauugcauu

SEQ ID NO: 144113 - RNA, 20 nt, Human
cuucauccccagcugcuccu

SEQ ID NO: 144114 - RNA, 32 nt, Human
cuucaucccggaccaggacaucggcuacuucg

SEQ ID NO: 144115 - RNA, 32 nt, Human
cuucauccucaccaugcccugcuaucuccagc

SEQ ID NO: 144116 - RNA, 32 nt, Human
cuucauccuccccuuccucugccccaagucac

SEQ ID NO: 144117 - RNA, 32 nt, Human
cuucauccucuuuuucugggccccugugucuc

SEQ ID NO: 144118 - RNA, 32 nt, Human
cuucauccuggagggguggaaguuggcccugg

SEQ ID NO: 144119 - RNA, 32 nt, Human
cuucauccuugcaaagagaauccuguacuuca

SEQ ID NO: 144120 - RNA, 32 nt, Human
cuucaucggguggacuagcugggaucuccgca

SEQ ID NO: 144121 - RNA, 32 nt, Human
cuucaucuaucuuuaccggccaccaaacaccu

SEQ ID NO: 144122 - RNA, 32 nt, Human
cuucaucucccagagaaugggauccuuugcau

SEQ ID NO: 144123 - RNA, 32 nt, Human
cuucaucucuaagauagagcaagaugagcacc

SEQ ID NO: 144124 - RNA, 32 nt, Human
cuucaucucugccucucuccaccccaccccaa

SEQ ID NO: 144125 - RNA, 32 nt, Human
cuucaucugacucugguuccuccuucuccuca

SEQ ID NO: 144126 - RNA, 32 nt, Human
cuucaucugagcagacaccagcuucagaugcu

SEQ ID NO: 144127 - RNA, 32 nt, Human
cuucaucugggaacgugcugagccagcacccu

SEQ ID NO: 144128 - RNA, 32 nt, Human
cuucaucuggggaccccgaagggaccaggaua

SEQ ID NO: 144129 - RNA, 32 nt, Human
cuucaucuggggucccaaccuccagugggaaa

SEQ ID NO: 144130 - RNA, 32 nt, Human
cuucaucugggguccuaaccuccagugggaaa

SEQ ID NO: 144131 - RNA, 32 nt, Human
cuucaucugguucauuguauuuauaugugagg

SEQ ID NO: 144132 - RNA, 32 nt, Human
cuucaucuguauccucugcagcauccuugaug

SEQ ID NO: 144133 - RNA, 32 nt, Human
cuucaucugucaccaaagacaaagccuacccc

SEQ ID NO: 144134 - RNA, 32 nt, Human
cuucaucuuacuugccacaaaauaacauuuua

SEQ ID NO: 144135 - RNA, 32 nt, Human
cuucaucuuacuugccacuaaauaacauuuua

SEQ ID NO: 144136 - RNA, 32 nt, Human
cuucaucuuauuugccacaaaauaacauuuua

SEQ ID NO: 144137 - RNA, 32 nt, Human
cuucaucuugcagagccagcugaucucaauug

SEQ ID NO: 144138 - RNA, 23 nt, Human
cuucaucuuuuuacaaguacuua

SEQ ID NO: 144139 - RNA, 32 nt, Human
cuucaugaagaaaagacagaggcagaaaggaa

SEQ ID NO: 144140 - RNA, 32 nt, Human
cuucaugaagaaacuacugggagagaagaaga

SEQ ID NO: 144141 - RNA, 32 nt, Human
cuucaugacggcagccaugccucccagaggcc

SEQ ID NO: 144142 - RNA, 32 nt, Human
cuucaugagaaaagccagccagguagagccug

SEQ ID NO: 144143 - RNA, 32 nt, Human
cuucaugagaugcagaacccccaggagcgccc

SEQ ID NO: 144144 - RNA, 32 nt, Human
cuucaugagaugcagaaccuccaggagcaccc

SEQ ID NO: 144145 - RNA, 32 nt, Human
cuucaugaggaaauguugaaccuaaagaagcu

SEQ ID NO: 144146 - RNA, 32 nt, Human
cuucaugaggccaccaguaaaagacauuaaug

SEQ ID NO: 144147 - RNA, 32 nt, Human
cuucaugcaggugaaacccagucacugugagc

SEQ ID NO: 144148 - RNA, 32 nt, Human
cuucaugccagauggggaaacugaggcucaga

SEQ ID NO: 144149 - RNA, 32 nt, Human
cuucaugccaguucccuucuuuauagaagagu

SEQ ID NO: 144150 - RNA, 18 nt, Human
cuucaugcccggcuuucc

SEQ ID NO: 144151 - RNA, 32 nt, Human
cuucaugccugcauccuccagagaccaccagg

SEQ ID NO: 144152 - RNA, 32 nt, Human
cuucaugccugggguuucucucccaaaagcuu

SEQ ID NO: 144153 - RNA, 32 nt, Human
cuucaugccuguaauccaagcacuuugagagg

SEQ ID NO: 144154 - RNA, 19 nt, Human
cuucaugccuguaauccca

SEQ ID NO: 144155 - RNA, 32 nt, Human
cuucaugccuguaaucccagcacuuugggagg

SEQ ID NO: 144156 - RNA, 32 nt, Human
cuucaugcgacagugucagcacuggagucuuc

SEQ ID NO: 144157 - RNA, 29 nt, Human
cuucaugcgccugguggaggccugugggg

SEQ ID NO: 144158 - RNA, 32 nt, Human
cuucaugcgccugguggaggccuguggggacu

SEQ ID NO: 144159 - RNA, 32 nt, Human
cuucaugcugucugugugaggcucccucccuc

SEQ ID NO: 144160 - RNA, 32 nt, Human
cuucaugcuuauuuuaaauguauuauuaguga

SEQ ID NO: 144161 - RNA, 29 nt, Human
cuucauggaaagugaacacauuuggaaau

SEQ ID NO: 144162 - RNA, 32 nt, Human
cuucauggagccaugaaaauacagauuaggua

SEQ ID NO: 144163 - RNA, 32 nt, Human
cuucauggcccaccuguuuucugccgugaccu

SEQ ID NO: 144164 - RNA, 29 nt, Human
cuucauggccuaugccagagugggugaau

SEQ ID NO: 144165 - RNA, 32 nt, Human
cuucauggcugcaaucucaucacuggaauguu

SEQ ID NO: 144166 - RNA, 32 nt, Human
cuucauggcugcagagcagggcaugcacaucu

SEQ ID NO: 144167 - RNA, 32 nt, Human
cuucaugggucuucaggcucuguuuucacuuu

SEQ ID NO: 144168 - RNA, 32 nt, Human
cuucauguaaggaggcuggguggugaggcccu

SEQ ID NO: 144169 - RNA, 32 nt, Human
cuucauguacugugaugucugaugcaaugcau

SEQ ID NO: 144170 - RNA, 32 nt, Human
cuucaugucacuucuucggcauuaugguuugc

SEQ ID NO: 144171 - RNA, 32 nt, Human
cuucauguccuggauguggcagggaacagguu

SEQ ID NO: 144172 - RNA, 32 nt, Human
cuucaugugagcaaaguguugaucuuaauauu

SEQ ID NO: 144173 - RNA, 32 nt, Human
cuucauguggugaggggaucacuucagcugcc

SEQ ID NO: 144174 - RNA, 32 nt, Human
cuucaugugucacccaaauagggcuuggguuu

SEQ ID NO: 144175 - RNA, 32 nt, Human
cuucauguuggccaggcuggucucaaacuccu

SEQ ID NO: 144176 - RNA, 32 nt, Human
cuucauguuuccuauggugacuucuaaaacca

SEQ ID NO: 144177 - RNA, 32 nt, Human
cuucauuaagcccucuuccaucauguccccaa

SEQ ID NO: 144178 - RNA, 32 nt, Human
cuucauuaaucaggaaaccuggacugccugcu

SEQ ID NO: 144179 - RNA, 32 nt, Human
cuucauuacccaggcuggagugcaaggcacga

SEQ ID NO: 144180 - RNA, 32 nt, Human
cuucauuacugcccuucucuugcugccuccug

SEQ ID NO: 144181 - RNA, 32 nt, Human
cuucauuagcugcagugcgcuggugcugccua

SEQ ID NO: 144182 - RNA, 32 nt, Human
cuucauuagggccccaaagcaccagaguagug

SEQ ID NO: 144183 - RNA, 32 nt, Human
cuucauuauuaaaaauugauagaauuuuagcu

SEQ ID NO: 144184 - RNA, 32 nt, Human
cuucauuauuaucauuauuauaauggggagaa

SEQ ID NO: 144185 - RNA, 32 nt, Human
cuucauucacacacaguucugugacuuucacc

SEQ ID NO: 144186 - RNA, 32 nt, Human
cuucauucacagucuucaucuuccuccucaag

SEQ ID NO: 144187 - RNA, 32 nt, Human
cuucauucucagaguaguuuuugucacauaca

SEQ ID NO: 144188 - RNA, 32 nt, Human
cuucauucucucccuucucuccgcagaccugc

SEQ ID NO: 144189 - RNA, 32 nt, Human
cuucauucucuccuggccaggcugcuccugcc

SEQ ID NO: 144190 - RNA, 22 nt, Human
cuucauucugaugccucccugg

SEQ ID NO: 144191 - RNA, 32 nt, Human
cuucauucugcucucucuuggcacccgacccu

SEQ ID NO: 144192 - RNA, 20 nt, Human
cuucauucuucagcauauua

SEQ ID NO: 144193 - RNA, 32 nt, Human
cuucauucuuuccuugcuuuguuuguguguuu

SEQ ID NO: 144194 - RNA, 32 nt, Human
cuucauugaccuuuuaaauccucaccaucuag

SEQ ID NO: 144195 - RNA, 32 nt, Human
cuucauuguagggauuucuuuaucucucagua

SEQ ID NO: 144196 - RNA, 32 nt, Human
cuucauuguccucaccaucccacccugaaucu

SEQ ID NO: 144197 - RNA, 32 nt, Human
cuucauuguggugcucuucaugaucauagccc

SEQ ID NO: 144198 - RNA, 32 nt, Human
cuucauugugucuuuucugccucugucaggcg

SEQ ID NO: 144199 - RNA, 32 nt, Human
cuucauuuaaggcacuguagugaauuaucuga

SEQ ID NO: 144200 - RNA, 32 nt, Human
cuucauuuauucuucuuuuccaauugaacuuu

SEQ ID NO: 144201 - RNA, 21 nt, Human
cuucauuucaaaacuauuucc

SEQ ID NO: 144202 - RNA, 20 nt, Human
cuucauuucacccucaugca

SEQ ID NO: 144203 - RNA, 32 nt, Human
cuucauuucagcuuccggccacugggaggcgc

SEQ ID NO: 144204 - RNA, 32 nt, Human
cuucauuucgucaaugacaaaacauuuuaagc

SEQ ID NO: 144205 - RNA, 24 nt, Human
cuucauuugaauguuauagccacu

SEQ ID NO: 144206 - RNA, 32 nt, Human
cuucauuugaguagcacaaaguuuacauagcc

SEQ ID NO: 144207 - RNA, 32 nt, Human
cuucauuugcagaaugaggucauagucguuga

SEQ ID NO: 144208 - RNA, 32 nt, Human
cuucauuugcauaagguaucaaaccacaucag

SEQ ID NO: 144209 - RNA, 19 nt, Human
cuucauuuguauagccacu

SEQ ID NO: 144210 - RNA, 20 nt, Human
cuucauuugucuuuuuuccu

SEQ ID NO: 144211 - RNA, 23 nt, Human
cuucauuuuaugcuuuauuuccu

SEQ ID NO: 144212 - RNA, 32 nt, Human
cuucauuuuggaggcagggcugggaagggagc

SEQ ID NO: 144213 - RNA, 32 nt, Human
cuucauuuuucuuccaaaauugcugcuggugg

SEQ ID NO: 144214 - RNA, 32 nt, Human
cuuccaaaaaggaaagguucuuccaggcgaga

SEQ ID NO: 144215 - RNA, 32 nt, Human
cuuccaaaacagugcaauaaaucuccgguaac

SEQ ID NO: 144216 - RNA, 32 nt, Human
cuuccaaaacucaacagagccagaaguagccg

SEQ ID NO: 144217 - RNA, 23 nt, Human
cuuccaaaacuuccugcucacuu

SEQ ID NO: 144218 - RNA, 32 nt, Human
cuuccaaaagcuccccuuccuaucacucuaga

SEQ ID NO: 144219 - RNA, 32 nt, Human
cuuccaaaagugcugggauuacaggcgugagc

SEQ ID NO: 144220 - RNA, 32 nt, Human
cuuccaaaaugcugcgauuauauaggcgugag

SEQ ID NO: 144221 - RNA, 32 nt, Human
cuuccaaaauguugggauuacaggcgugagcc

SEQ ID NO: 144222 - RNA, 32 nt, Human
cuuccaaacagcccggucuugaugcaggagag

SEQ ID NO: 144223 - RNA, 32 nt, Human
cuuccaaacccaaaggcucuuuucagagccac

SEQ ID NO: 144224 - RNA, 32 nt, Human
cuuccaaacccacagucaaggccaggcgcggu

SEQ ID NO: 144225 - RNA, 32 nt, Human
cuuccaaacgcagugcccuguucugccggugu

SEQ ID NO: 144226 - RNA, 32 nt, Human
cuuccaaagaguggaguauggaaagggaaaca

SEQ ID NO: 144227 - RNA, 32 nt, Human
cuuccaaagccccaaagccgaggguuucaccc

SEQ ID NO: 144228 - RNA, 32 nt, Human
cuuccaaagccuuccaaacccaaaaagcuggg

SEQ ID NO: 144229 - RNA, 32 nt, Human
cuuccaaagggcccuaaccuaaaaucggagag

SEQ ID NO: 144230 - RNA, 32 nt, Human
cuuccaaaguacugggacuacaggcaugagaa

SEQ ID NO: 144231 - RNA, 32 nt, Human
cuuccaaagugccgggauuacagacgugagcc

SEQ ID NO: 144232 - RNA, 32 nt, Human
cuuccaaagugcuaggauuacaggcgugagcc

SEQ ID NO: 144233 - RNA, 32 nt, Human
cuuccaaagugcugagauuacaggcgugagcc

SEQ ID NO: 144234 - RNA, 32 nt, Human
cuuccaaagugcugggaaugcacaugugagcc

SEQ ID NO: 144235 - RNA, 32 nt, Human
cuuccaaagugcugggauaucaggcacugagc

SEQ ID NO: 144236 - RNA, 32 nt, Human
cuuccaaagugcugggauuacaggcaugagcc

SEQ ID NO: 144237 - RNA, 32 nt, Human
cuuccaaagugcugggauuacaggcaugagcg

SEQ ID NO: 144238 - RNA, 32 nt, Human
cuuccaaagugcugggauuacaggcaugagcu

SEQ ID NO: 144239 - RNA, 32 nt, Human
cuuccaaagugcugggauuacaggccugagcc

SEQ ID NO: 144240 - RNA, 32 nt, Human
cuuccaaagugcugggauuacaggcgucagcc

SEQ ID NO: 144241 - RNA, 32 nt, Human
cuuccaaagugcugggauuacaggcgugagcc

SEQ ID NO: 144242 - RNA, 32 nt, Human
cuuccaaagugcugggauuacaggcgugaguc

SEQ ID NO: 144243 - RNA, 32 nt, Human
cuuccaaagugcugggauuacaggugucagcc

SEQ ID NO: 144244 - RNA, 32 nt, Human
cuuccaaagugcugggauuacaggugugagcc

SEQ ID NO: 144245 - RNA, 32 nt, Human
cuuccaaagugcugggauuacaggugugaggc

SEQ ID NO: 144246 - RNA, 32 nt, Human
cuuccaaagugcugggauuacaggugugaguc

SEQ ID NO: 144247 - RNA, 32 nt, Human
cuuccaaagugcugggauuacggacgugagcc

SEQ ID NO: 144248 - RNA, 32 nt, Human
cuuccaaagugcugggauuacuggcaggaacc

SEQ ID NO: 144249 - RNA, 32 nt, Human
cuuccaaagugcugggauuccagaugcgagcc

SEQ ID NO: 144250 - RNA, 32 nt, Human
cuuccaaagugcugggauucugggugugagcc

SEQ ID NO: 144251 - RNA, 32 nt, Human
cuuccaaagugcugguauuacaggugugagcc

SEQ ID NO: 144252 - RNA, 32 nt, Human
cuuccaaaguguuggaauuacaggcgugagcc

SEQ ID NO: 144253 - RNA, 32 nt, Human
cuuccaaaguguugggauuacaggcaugagcc

SEQ ID NO: 144254 - RNA, 32 nt, Human
cuuccaaaguguugggauuacaggcgugagcc

SEQ ID NO: 144255 - RNA, 32 nt, Human
cuuccaaaguguugggauuaccggcgugagcc

SEQ ID NO: 144256 - RNA, 32 nt, Human
cuuccaaaguguugggauuauaggcgugagcc

SEQ ID NO: 144257 - RNA, 32 nt, Human
cuuccaaaguguugggauuaugggcgugaguc

SEQ ID NO: 144258 - RNA, 32 nt, Human
cuuccaaaguucugggauuacaggcgugagcc

SEQ ID NO: 144259 - RNA, 32 nt, Human
cuuccaaauccuggaaggacacggugauggau

SEQ ID NO: 144260 - RNA, 32 nt, Human
cuuccaaaugagccacaacacccagccaguca

SEQ ID NO: 144261 - RNA, 32 nt, Human
cuuccaaaugucccuccaacacagauccgcaa

SEQ ID NO: 144262 - RNA, 32 nt, Human
cuuccaacaaagaaacuguacuguagaaauua

SEQ ID NO: 144263 - RNA, 32 nt, Human
cuuccaacacaaccccaguaacuuagaaguua

SEQ ID NO: 144264 - RNA, 32 nt, Human
cuuccaacacagaugcccaggcaccuccagau

SEQ ID NO: 144265 - RNA, 32 nt, Human
cuuccaacacuuguuauuugguaaaguaaaca

SEQ ID NO: 144266 - RNA, 32 nt, Human
cuuccaacauggccgccacugccucuccgcag

SEQ ID NO: 144267 - RNA, 32 nt, Human
cuuccaacauggccgccgcugccucugugaca

SEQ ID NO: 144268 - RNA, 32 nt, Human
cuuccaacccagccaggggucuuagguguccc

SEQ ID NO: 144269 - RNA, 32 nt, Human
cuuccaacccuuuaauacauuacaucccuggg

SEQ ID NO: 144270 - RNA, 32 nt, Human
cuuccaaccuccuccaccuccaccuucaagca

SEQ ID NO: 144271 - RNA, 32 nt, Human
cuuccaacuacaaagacagacuugguccuuuu

SEQ ID NO: 144272 - RNA, 32 nt, Human
cuuccaacucacucuauucuguccucacuccu

SEQ ID NO: 144273 - RNA, 32 nt, Human
cuuccaacugagcucagugaccugggugggca

SEQ ID NO: 144274 - RNA, 23 nt, Human
cuuccaacuguccucuagagugu

SEQ ID NO: 144275 - RNA, 32 nt, Human
cuuccaagaaugcugagguuacaggcaccaug

SEQ ID NO: 144276 - RNA, 32 nt, Human
cuuccaagauggcaccagcauuugguucuucu

SEQ ID NO: 144277 - RNA, 32 nt, Human
cuuccaagccacggugguuccaccuucacaag

SEQ ID NO: 144278 - RNA, 32 nt, Human
cuuccaagccuaucggggugggguccguugga

SEQ ID NO: 144279 - RNA, 32 nt, Human
cuuccaaggaagcaucugacaaaaccacugcu

SEQ ID NO: 144280 - RNA, 32 nt, Human
cuuccaaggccgagccagcccagagaggagca

SEQ ID NO: 144281 - RNA, 32 nt, Human
cuuccaaguagcugggacuacaggcaugcacc

SEQ ID NO: 144282 - RNA, 22 nt, Human
cuuccaaguagcugggauuaca

SEQ ID NO: 144283 - RNA, 23 nt, Human
cuuccaaguagcugggauuacag

SEQ ID NO: 144284 - RNA, 32 nt, Human
cuuccaaguagcugggauuacagacaugccac

SEQ ID NO: 144285 - RNA, 24 nt, Human
cuuccaaguagcugggauuacagg

SEQ ID NO: 144286 - RNA, 32 nt, Human
cuuccaaguagcugggauuacaggugugcgcc

SEQ ID NO: 144287 - RNA, 32 nt, Human
cuuccaaguccagcucaggcccaggagguggg

SEQ ID NO: 144288 - RNA, 18 nt, Human
cuuccaagucuccugcgc

SEQ ID NO: 144289 - RNA, 24 nt, Human
cuuccaaguggcugggauugcagg

SEQ ID NO: 144290 - RNA, 20 nt, Human
cuuccaauacaacagccauc

SEQ ID NO: 144291 - RNA, 32 nt, Human
cuuccaauauccaugucucauacacuauggcu

SEQ ID NO: 144292 - RNA, 32 nt, Human
cuuccaaucaccucccugaccccugcuguccc

SEQ ID NO: 144293 - RNA, 32 nt, Human
cuuccaauuucugcuuucagacaugcugcagg

SEQ ID NO: 144294 - RNA, 32 nt, Human
cuuccacaaaaugcaagagcaaaagcaaacua

SEQ ID NO: 144295 - RNA, 23 nt, Human
cuuccacaacccagucugcucca

SEQ ID NO: 144296 - RNA, 20 nt, Human
cuuccacaacucagucugca

SEQ ID NO: 144297 - RNA, 22 nt, Human
cuuccacaacucagucugcacc

SEQ ID NO: 144298 - RNA, 32 nt, Human
cuuccacaagaagugguggagcagagucuucc

SEQ ID NO: 144299 - RNA, 32 nt, Human
cuuccacaaucagggugagacugcucccagug

SEQ ID NO: 144300 - RNA, 32 nt, Human
cuuccacacagccccugcagggaaaggcuaau

SEQ ID NO: 144301 - RNA, 32 nt, Human
cuuccacacaugcaaaaccauagcauuuccuu

SEQ ID NO: 144302 - RNA, 32 nt, Human
cuuccacaccaucccucugcccuagaccuuug

SEQ ID NO: 144303 - RNA, 32 nt, Human
cuuccacaccugauuagaacauucauaagcca

SEQ ID NO: 144304 - RNA, 32 nt, Human
cuuccacacucuguccccaucuggcuucugcu

SEQ ID NO: 144305 - RNA, 32 nt, Human
cuuccacacucuugguuacaguguaaagcuuu

SEQ ID NO: 144306 - RNA, 32 nt, Human
cuuccacagcacaaacacaccucaacacaccu

SEQ ID NO: 144307 - RNA, 26 nt, Human
cuuccacagccagauggcugugcaca

SEQ ID NO: 144308 - RNA, 32 nt, Human
cuuccacagcccggguucuccugcugccuccu

SEQ ID NO: 144309 - RNA, 22 nt, Human
cuuccacagcgccguggcccag

SEQ ID NO: 144310 - RNA, 32 nt, Human
cuuccacaggguccaagaguucaucaggaccc

SEQ ID NO: 144311 - RNA, 31 nt, Human
cuuccacauacuucccaguuuacauuugguc

SEQ ID NO: 144312 - RNA, 23 nt, Human
cuuccacauucucaguuuauuca

SEQ ID NO: 144313 - RNA, 32 nt, Human
cuuccaccaaaaacuggguguucaaggcccuu

SEQ ID NO: 144314 - RNA, 32 nt, Human
cuuccaccaaccaagcccagucagcgguuccu

SEQ ID NO: 144315 - RNA, 32 nt, Human
cuuccaccacagcucuaucaaggcuugucaag

SEQ ID NO: 144316 - RNA, 21 nt, Human
cuuccaccagcagugccuccu

SEQ ID NO: 144317 - RNA, 32 nt, Human
cuuccaccaggagucuggagugcaauggcacg

SEQ ID NO: 144318 - RNA, 32 nt, Human
cuuccaccaguucuguucugcaggucgggagu

SEQ ID NO: 144319 - RNA, 32 nt, Human
cuuccacccacuccccuccagggagagagcag

SEQ ID NO: 144320 - RNA, 32 nt, Human
cuuccacccaguccccucccacuccccagguc

SEQ ID NO: 144321 - RNA, 17 nt, Human
cuuccacccauggucag

SEQ ID NO: 144322 - RNA, 32 nt, Human
cuuccaccccaaacaaaagggcucaggcuaca

SEQ ID NO: 144323 - RNA, 32 nt, Human
cuuccacccuccaguuaagcagcagcugcacg

SEQ ID NO: 144324 - RNA, 32 nt, Human
cuuccacccugcccuggccuaccacagcugcc

SEQ ID NO: 144325 - RNA, 32 nt, Human
cuuccacccugccucccuacccgcuuugcuac

SEQ ID NO: 144326 - RNA, 32 nt, Human
cuuccaccuccaccacaucugccagaccuuaa

SEQ ID NO: 144327 - RNA, 32 nt, Human
cuuccaccuccccucccuccaucaccucacgc

SEQ ID NO: 144328 - RNA, 25 nt, Human
cuuccaccugaauccccacccagga

SEQ ID NO: 144329 - RNA, 32 nt, Human
cuuccaccuggaggcucccuugucucccagcc

SEQ ID NO: 144330 - RNA, 18 nt, Human
cuuccaccuggcauccag

SEQ ID NO: 144331 - RNA, 22 nt, Human
cuuccaccuuuccauccugccu

SEQ ID NO: 144332 - RNA, 32 nt, Human
cuuccaccuuucuccauuccucuaggugcuuu

SEQ ID NO: 144333 - RNA, 32 nt, Human
cuuccaccuuucuguucaaggcuguuugucua

SEQ ID NO: 144334 - RNA, 32 nt, Human
cuuccacgggggcuguggcucugggugggcgu

SEQ ID NO: 144335 - RNA, 32 nt, Human
cuuccacguugucuccuccaccuagcaguugg

SEQ ID NO: 144336 - RNA, 32 nt, Human
cuuccacuccacccuucuccagggacccuuag

SEQ ID NO: 144337 - RNA, 32 nt, Human
cuuccacuccucccccuccauuguccccuccc

SEQ ID NO: 144338 - RNA, 32 nt, Human
cuuccacucugccucuugcaagcugugugacc

SEQ ID NO: 144339 - RNA, 32 nt, Human
cuuccacucuggggucucguucaggcuugggg

SEQ ID NO: 144340 - RNA, 32 nt, Human
cuuccacucuucuuugucauuacugugacggc

SEQ ID NO: 144341 - RNA, 32 nt, Human
cuuccacugaaccgaggcacuguuauagaaga

SEQ ID NO: 144342 - RNA, 32 nt, Human
cuuccacugagggcaaggugauuuucaaaguu

SEQ ID NO: 144343 - RNA, 32 nt, Human
cuuccacugccagaaaacacagugccaguaag

SEQ ID NO: 144344 - RNA, 32 nt, Human
cuuccacuggaaaauccaguaguucugaacag

SEQ ID NO: 144345 - RNA, 32 nt, Human
cuuccacugggcaaaugccaugugucaggagg

SEQ ID NO: 144346 - RNA, 32 nt, Human
cuuccacugugcucucugucagcuccagguca

SEQ ID NO: 144347 - RNA, 32 nt, Human
cuuccacuuccuccccaaaagggaugaagaaa

SEQ ID NO: 144348 - RNA, 32 nt, Human
cuuccacuucuaacuccacuggcuccaugauu

SEQ ID NO: 144349 - RNA, 32 nt, Human
cuuccacuucugcacgucuuccuuuccccaug

SEQ ID NO: 144350 - RNA, 32 nt, Human
cuuccacuugaguucucucuucuccugcugga

SEQ ID NO: 144351 - RNA, 32 nt, Human
cuuccacuuuccugccacuccccacuacccuc

SEQ ID NO: 144352 - RNA, 32 nt, Human
cuuccagaaaaaucuuccaguuuacgcuguag

SEQ ID NO: 144353 - RNA, 32 nt, Human
cuuccagaaagaauucagcaauguuaucagaa

SEQ ID NO: 144354 - RNA, 32 nt, Human
cuuccagaaagccaacaugcuggaccagcauc

SEQ ID NO: 144355 - RNA, 18 nt, Human
cuuccagaacgcugcgcu

SEQ ID NO: 144356 - RNA, 19 nt, Human
cuuccagaagaacaaccag

SEQ ID NO: 144357 - RNA, 32 nt, Human
cuuccagaagccaagaggagaacaaagguccu

SEQ ID NO: 144358 - RNA, 27 nt, Human
cuuccagaauaaagugauuaccaagga

SEQ ID NO: 144359 - RNA, 32 nt, Human
cuuccagaccagagucccucccugcuucccaa

SEQ ID NO: 144360 - RNA, 32 nt, Human
cuuccagaccagccuggucaacauggugaaac

SEQ ID NO: 144361 - RNA, 32 nt, Human
cuuccagacccgccaccagccguacaccacuc

SEQ ID NO: 144362 - RNA, 32 nt, Human
cuuccagacuggcugugccugccugugcccag

SEQ ID NO: 144363 - RNA, 32 nt, Human
cuuccagagacugauccuggagauugaguuga

SEQ ID NO: 144364 - RNA, 22 nt, Human
cuuccagagauauuagaaacug

SEQ ID NO: 144365 - RNA, 24 nt, Human
cuuccagagccguggucucaagga

SEQ ID NO: 144366 - RNA, 31 nt, Human
cuuccagagcucuauguacaugcagaugugc

SEQ ID NO: 144367 - RNA, 20 nt, Human
cuuccagagcuuccacggug

SEQ ID NO: 144368 - RNA, 23 nt, Human
cuuccagaggaacgaucaggcag

SEQ ID NO: 144369 - RNA, 26 nt, Human
cuuccagaggaacgggggacagccag

SEQ ID NO: 144370 - RNA, 21 nt, Human
cuuccagaggacgcugcccug

SEQ ID NO: 144371 - RNA, 19 nt, Human
cuuccagaggcgcaugcag

SEQ ID NO: 144372 - RNA, 32 nt, Human
cuuccagagggauggggcagagcuccaggccu

SEQ ID NO: 144373 - RNA, 20 nt, Human
cuuccagaggugccgcggug

SEQ ID NO: 144374 - RNA, 22 nt, Human
cuuccagagucacacccaggga

SEQ ID NO: 144375 - RNA, 32 nt, Human
cuuccagagucccaagagcuucucugggauuu

SEQ ID NO: 144376 - RNA, 32 nt, Human
cuuccagagugcugggauuacaggcgugagcc

SEQ ID NO: 144377 - RNA, 32 nt, Human
cuuccagagugcugggauuauaggcgugagcc

SEQ ID NO: 144378 - RNA, 24 nt, Human
cuuccagaguuccuccugcaccug

SEQ ID NO: 144379 - RNA, 32 nt, Human
cuuccagaucccuggcaggaacagauuccagu

SEQ ID NO: 144380 - RNA, 32 nt, Human
cuuccagaugaucuuugcccucugggucuuga

SEQ ID NO: 144381 - RNA, 28 nt, Human
cuuccagauguugcugccuuaucgaaau

SEQ ID NO: 144382 - RNA, 32 nt, Human
cuuccagcaaacucaacucggcaauccaagca

SEQ ID NO: 144383 - RNA, 32 nt, Human
cuuccagcagcugaccccagcacuccaauccc

SEQ ID NO: 144384 - RNA, 32 nt, Human
cuuccagcaggccacaccagcuguuucccacc

SEQ ID NO: 144385 - RNA, 20 nt, Human
cuuccagcaucggccuuccu

SEQ ID NO: 144386 - RNA, 32 nt, Human
cuuccagccaaaauggcggagaacagcgagag

SEQ ID NO: 144387 - RNA, 32 nt, Human
cuuccagcccuaggaggagggcuccuaacagu

SEQ ID NO: 144388 - RNA, 32 nt, Human
cuuccagcccuuggcccugccauggccacucc

SEQ ID NO: 144389 - RNA, 32 nt, Human
cuuccagccuccacagcugaccuccaagucgg

SEQ ID NO: 144390 - RNA, 32 nt, Human
cuuccagccuccagaacuaugagaaauaaaau

SEQ ID NO: 144391 - RNA, 32 nt, Human
cuuccagccuccagaacugggagaaauaaaua

SEQ ID NO: 144392 - RNA, 32 nt, Human
cuuccagccuccagaacugggagaaauacaau

SEQ ID NO: 144393 - RNA, 32 nt, Human
cuuccagccuccagaacugugagaaauaagua

SEQ ID NO: 144394 - RNA, 32 nt, Human
cuuccagccuccagaacugugagaaauuucug

SEQ ID NO: 144395 - RNA, 32 nt, Human
cuuccagccuccagaauugugagaaauaaucc

SEQ ID NO: 144396 - RNA, 32 nt, Human
cuuccagccuccagacugugagaaacaaauuu

SEQ ID NO: 144397 - RNA, 32 nt, Human
cuuccagccuccagagcugagggaaggagcgc

SEQ ID NO: 144398 - RNA, 32 nt, Human
cuuccagcgaacacacacagguguccugccgu

SEQ ID NO: 144399 - RNA, 32 nt, Human
cuuccagcgccugcuugguguggcuguccgcc

SEQ ID NO: 144400 - RNA, 32 nt, Human
cuuccagcggugccugccacugaggcaggugc

SEQ ID NO: 144401 - RNA, 32 nt, Human
cuuccagcguccuggcucuuggcauuguccgu

SEQ ID NO: 144402 - RNA, 32 nt, Human
cuuccagcuccuuugagagacugaggcaggaa

SEQ ID NO: 144403 - RNA, 32 nt, Human
cuuccagcugccggugucgucuuugcuucagc

SEQ ID NO: 144404 - RNA, 32 nt, Human
cuuccagcugcucuccccaacggcuguguaaa

SEQ ID NO: 144405 - RNA, 32 nt, Human
cuuccagcuggcauauagguugcagucucggc

SEQ ID NO: 144406 - RNA, 32 nt, Human
cuuccagcuguggcugacaguggcucuggcca

SEQ ID NO: 144407 - RNA, 32 nt, Human
cuuccaggaacggucucgugggcugcuaaggg

SEQ ID NO: 144408 - RNA, 16 nt, Human
cuuccaggacaggagg

SEQ ID NO: 144409 - RNA, 16 nt, Human
cuuccaggacagggag

SEQ ID NO: 144410 - RNA, 32 nt, Human
cuuccaggauaaggagacugaggcuuagagag

SEQ ID NO: 144411 - RNA, 32 nt, Human
cuuccaggcaaggcuggguggggaagaaagag

SEQ ID NO: 144412 - RNA, 32 nt, Human
cuuccaggcagcccugcugaaggaucuaaguu

SEQ ID NO: 144413 - RNA, 32 nt, Human
cuuccaggcaugucgguguaaaccugauuguc

SEQ ID NO: 144414 - RNA, 32 nt, Human
cuuccaggccuccucugucaccagaggagcug

SEQ ID NO: 144415 - RNA, 32 nt, Human
cuuccaggcguagggccagggcucuggcaggu

SEQ ID NO: 144416 - RNA, 32 nt, Human
cuuccaggcugaaggggagaaagugacucugu

SEQ ID NO: 144417 - RNA, 32 nt, Human
cuuccaggcuggauggagugcccuggcgcgau

SEQ ID NO: 144418 - RNA, 32 nt, Human
cuuccaggcuggccucaaacuccugggcucaa

SEQ ID NO: 144419 - RNA, 32 nt, Human
cuuccagggaggagaagagggacuccagaaug

SEQ ID NO: 144420 - RNA, 31 nt, Human
cuuccagggaugucucccucuaagaacauga

SEQ ID NO: 144421 - RNA, 31 nt, Human
cuuccagggcacuucuauuuguuuuugugga

SEQ ID NO: 144422 - RNA, 32 nt, Human
cuuccagggcccugcuucagacguacugaccg

SEQ ID NO: 144423 - RNA, 32 nt, Human
cuuccaggguccaagggauucucagccaucca

SEQ ID NO: 144424 - RNA, 23 nt, Human
cuuccaggguggcuuccuggcug

SEQ ID NO: 144425 - RNA, 32 nt, Human
cuuccaggguucgccucaucugaggcccagau

SEQ ID NO: 144426 - RNA, 32 nt, Human
cuuccaguacaaaaauuaguggacuagaccuc

SEQ ID NO: 144427 - RNA, 32 nt, Human
cuuccaguacugcacuuugcccccaaggucuu

SEQ ID NO: 144428 - RNA, 32 nt, Human
cuuccagucagcccaacauuuuccaccagucu

SEQ ID NO: 144429 - RNA, 32 nt, Human
cuuccaguccuccuaggcaucuuauugauccu

SEQ ID NO: 144430 - RNA, 21 nt, Human
cuuccagucggggcgcugccu

SEQ ID NO: 144431 - RNA, 32 nt, Human
cuuccagucuggaccagcaccuuggagaccau

SEQ ID NO: 144432 - RNA, 32 nt, Human
cuuccagucuugaaaugcauuccaugauauua

SEQ ID NO: 144433 - RNA, 32 nt, Human
cuuccagugaaggggacaucccauaguaguuu

SEQ ID NO: 144434 - RNA, 32 nt, Human
cuuccagugcaggaagaucccaaaaaggcaua

SEQ ID NO: 144435 - RNA, 32 nt, Human
cuuccagugcaggaaggucagggaccuaggca

SEQ ID NO: 144436 - RNA, 32 nt, Human
cuuccagugucucccuccagcccagcccugac

SEQ ID NO: 144437 - RNA, 32 nt, Human
cuuccaguucauuuuucagccaucaguucaag

SEQ ID NO: 144438 - RNA, 32 nt, Human
cuuccaguugugagccaagauuguaaccagag

SEQ ID NO: 144439 - RNA, 32 nt, Human
cuuccaguuucuaaaaugcacuguucaguuuu

SEQ ID NO: 144440 - RNA, 32 nt, Human
cuuccauaaggagacacuggaaaguauuacaa

SEQ ID NO: 144441 - RNA, 32 nt, Human
cuuccauaaguguggagugccacuccagcuuu

SEQ ID NO: 144442 - RNA, 20 nt, Human
cuuccauagcuucauccacu

SEQ ID NO: 144443 - RNA, 32 nt, Human
cuuccaucauagaacaucagaaaacucacacc

SEQ ID NO: 144444 - RNA, 22 nt, Human
cuuccaucccuacccccuaaga

SEQ ID NO: 144445 - RNA, 32 nt, Human
cuuccauccgucgcgcagacccugccggagcc

SEQ ID NO: 144446 - RNA, 32 nt, Human
cuuccauccuucugacccaugguggaaauuca

SEQ ID NO: 144447 - RNA, 32 nt, Human
cuuccaucucuagcagauaucaucuucucagc

SEQ ID NO: 144448 - RNA, 32 nt, Human
cuuccaucucucccgcccuugugccccacaac

SEQ ID NO: 144449 - RNA, 32 nt, Human
cuuccaucucucucagacaccaagcugcagau

SEQ ID NO: 144450 - RNA, 32 nt, Human
cuuccaucucucuccccucucuucucucauga

SEQ ID NO: 144451 - RNA, 32 nt, Human
cuuccaucucuuacccaaguggugcuaaacaa

SEQ ID NO: 144452 - RNA, 32 nt, Human
cuuccaucucuuccuuuccuuucccuuucuuu

SEQ ID NO: 144453 - RNA, 32 nt, Human
cuuccaucugcccagagaggagcaucuggauc

SEQ ID NO: 144454 - RNA, 32 nt, Human
cuuccaucugcuuccagggcuccuguaaggga

SEQ ID NO: 144455 - RNA, 22 nt, Human
cuuccaucugggagccccaaga

SEQ ID NO: 144456 - RNA, 32 nt, Human
cuuccaucugguaauguugagaagacuucauu

SEQ ID NO: 144457 - RNA, 32 nt, Human
cuuccaucuuuugccacugaucuuguguacau

SEQ ID NO: 144458 - RNA, 24 nt, Human
cuuccaugaagggcccacccaaga

SEQ ID NO: 144459 - RNA, 32 nt, Human
cuuccaugacaccugccggcaguacccccacg

SEQ ID NO: 144460 - RNA, 32 nt, Human
cuuccaugacaccugccggcaguagcccccac

SEQ ID NO: 144461 - RNA, 20 nt, Human
cuuccaugaugcacaguauc

SEQ ID NO: 144462 - RNA, 30 nt, Human
cuuccaugcucuucuugagggugggcuguc

SEQ ID NO: 144463 - RNA, 32 nt, Human
cuuccauggaccaucugagauucauggggaaa

SEQ ID NO: 144464 - RNA, 32 nt, Human
cuuccauggcauggaucuuacccaugacaaaa

SEQ ID NO: 144465 - RNA, 32 nt, Human
cuuccauggggucccugguuccucaccuucuc

SEQ ID NO: 144466 - RNA, 31 nt, Human
cuuccauggguggaaacuugugagggaguuu

SEQ ID NO: 144467 - RNA, 32 nt, Human
cuuccaugugucuuuuccccugcugccucacu

SEQ ID NO: 144468 - RNA, 32 nt, Human
cuuccaugugugaaagcuacuuggcaugaaug

SEQ ID NO: 144469 - RNA, 32 nt, Human
cuuccauucaaaagugaacacacuugguagcu

SEQ ID NO: 144470 - RNA, 32 nt, Human
cuuccauucagaggagggaggacaggaggcca

SEQ ID NO: 144471 - RNA, 32 nt, Human
cuuccauucccccuagcaaaaggaagcagcug

SEQ ID NO: 144472 - RNA, 32 nt, Human
cuuccauuccuccuccucuaggggugcagcuu

SEQ ID NO: 144473 - RNA, 32 nt, Human
cuuccauucugagccaaccacuccagcagcca

SEQ ID NO: 144474 - RNA, 32 nt, Human
cuuccauucuuuauuuggcuuuguucuuuccc

SEQ ID NO: 144475 - RNA, 32 nt, Human
cuuccauugacccauauuuauaccuuucaggu

SEQ ID NO: 144476 - RNA, 32 nt, Human
cuuccauugguucuuccuuucccuggagcuga

SEQ ID NO: 144477 - RNA, 32 nt, Human
cuuccauuguauugucugacacaugcucucaa

SEQ ID NO: 144478 - RNA, 32 nt, Human
cuuccauuugcugagugugucgauucaaugau

SEQ ID NO: 144479 - RNA, 32 nt, Human
cuuccauuuuaauuuuaaagugcaaaagggcc

SEQ ID NO: 144480 - RNA, 32 nt, Human
cuucccaaaccagcuuuucugcagccaauugc

SEQ ID NO: 144481 - RNA, 32 nt, Human
cuucccaaaccugauauuuacugaccacacca

SEQ ID NO: 144482 - RNA, 32 nt, Human
cuucccaaagcagcaggcgccuccaggcuggg

SEQ ID NO: 144483 - RNA, 32 nt, Human
cuucccaaaguacugggauuauaggcuugagc

SEQ ID NO: 144484 - RNA, 32 nt, Human
cuucccaaagugcugagauuacaggcaugagc

SEQ ID NO: 144485 - RNA, 32 nt, Human
cuucccaaagugcugagauuacaggcaugggc

SEQ ID NO: 144486 - RNA, 32 nt, Human
cuucccaaagugcugggauuacagacaugagc

SEQ ID NO: 144487 - RNA, 32 nt, Human
cuucccaaagugcugggauuacaggcaugagc

SEQ ID NO: 144488 - RNA, 32 nt, Human
cuucccaaagugcugggauuacaggcgggagc

SEQ ID NO: 144489 - RNA, 32 nt, Human
cuucccaaagugcugggauuacaggcgugagc

SEQ ID NO: 144490 - RNA, 32 nt, Human
cuucccaaagugcugggauuacaggcgugcac

SEQ ID NO: 144491 - RNA, 32 nt, Human
cuucccaaagugcugggauuacaggcuugagc

SEQ ID NO: 144492 - RNA, 32 nt, Human
cuucccaaagugcugggauuacaggugugagc

SEQ ID NO: 144493 - RNA, 32 nt, Human
cuucccaaagugcugggauuacaggugugagu

SEQ ID NO: 144494 - RNA, 32 nt, Human
cuucccaaagugcugggauuacgggcgugagc

SEQ ID NO: 144495 - RNA, 32 nt, Human
cuucccaaagugcugggauuauaggcagcacu

SEQ ID NO: 144496 - RNA, 32 nt, Human
cuucccaaagugcugggauuauaggcaugugc

SEQ ID NO: 144497 - RNA, 32 nt, Human
cuucccaaagugcugggauuaugggcgggugu

SEQ ID NO: 144498 - RNA, 32 nt, Human
cuucccaaagugcugggauugcaggcgugagc

SEQ ID NO: 144499 - RNA, 32 nt, Human
cuucccaaaguucugggauuacaggcaugagc

SEQ ID NO: 144500 - RNA, 32 nt, Human
cuucccaaaucgccacccuacacugcuuuucu

SEQ ID NO: 144501 - RNA, 22 nt, Human
cuucccaacauggugaaacccc

SEQ ID NO: 144502 - RNA, 32 nt, Human
cuucccaacauggugaaaccccaucucuacua

SEQ ID NO: 144503 - RNA, 32 nt, Human
cuucccaaccacugccgaguuucugccuggag

SEQ ID NO: 144504 - RNA, 32 nt, Human
cuucccaacccccauugugacaguuucuuuuu

SEQ ID NO: 144505 - RNA, 32 nt, Human
cuucccaagcagcugggacuacagguaccugc

SEQ ID NO: 144506 - RNA, 32 nt, Human
cuucccaagcgugagagagugacugacacuug

SEQ ID NO: 144507 - RNA, 32 nt, Human
cuucccaagcuguggcuuagaggauaguuggc

SEQ ID NO: 144508 - RNA, 32 nt, Human
cuucccaaggagcugggacugcaggcaugugc

SEQ ID NO: 144509 - RNA, 32 nt, Human
cuucccaaguagcugagauuacaggcgcacac

SEQ ID NO: 144510 - RNA, 32 nt, Human
cuucccaaguagcugcaacaacaggcacacac

SEQ ID NO: 144511 - RNA, 32 nt, Human
cuucccaaguagcugggauuacaggcacccac

SEQ ID NO: 144512 - RNA, 32 nt, Human
cuucccaaguagcugggauuacaggcacgugc

SEQ ID NO: 144513 - RNA, 32 nt, Human
cuucccaaguagcugggauuacaggcguacgc

SEQ ID NO: 144514 - RNA, 32 nt, Human
cuucccaaguagcugggauuuacaggugugca

SEQ ID NO: 144515 - RNA, 32 nt, Human
cuucccaaguaguugggauuacaggcgccugc

SEQ ID NO: 144516 - RNA, 32 nt, Human
cuucccaagugcugggauuacaggugugagcc

SEQ ID NO: 144517 - RNA, 32 nt, Human
cuucccaaguggcugggauuacaggcaugugc

SEQ ID NO: 144518 - RNA, 32 nt, Human
cuucccaaguggcugggauuacaggcgcccac

SEQ ID NO: 144519 - RNA, 32 nt, Human
cuucccaaucaguaagcccacagggaaauguu

SEQ ID NO: 144520 - RNA, 32 nt, Human
cuucccaaugugccacauaguucauuagaugc

SEQ ID NO: 144521 - RNA, 32 nt, Human
cuucccacaaccucuccugggcccaggugugg

SEQ ID NO: 144522 - RNA, 32 nt, Human
cuucccacacgugguuucuugcacuuggccca

SEQ ID NO: 144523 - RNA, 32 nt, Human
cuucccacagccgccuuuuugcggccuggccg

SEQ ID NO: 144524 - RNA, 24 nt, Human
cuucccacagucucagcagggagg

SEQ ID NO: 144525 - RNA, 32 nt, Human
cuucccacagugugcuggaaugguuaucacaa

SEQ ID NO: 144526 - RNA, 32 nt, Human
cuucccacccacccaguccauucacccucacc

SEQ ID NO: 144527 - RNA, 32 nt, Human
cuucccacccuccacccaccagaguggaaccc

SEQ ID NO: 144528 - RNA, 32 nt, Human
cuucccacccugccccucagagacugaaauua

SEQ ID NO: 144529 - RNA, 32 nt, Human
cuucccaccugucuggggaggcugugggcucc

SEQ ID NO: 144530 - RNA, 32 nt, Human
cuucccacugcacuccagccuggccaauaaga

SEQ ID NO: 144531 - RNA, 32 nt, Human
cuucccacugcacuccccaguggcuggcgugg

SEQ ID NO: 144532 - RNA, 32 nt, Human
cuucccacugcacuguggugcuucaguggcca

SEQ ID NO: 144533 - RNA, 32 nt, Human
cuucccacuggcaguguuaguuagaagaggca

SEQ ID NO: 144534 - RNA, 32 nt, Human
cuucccacugggacuugacuucccaggucaag

SEQ ID NO: 144535 - RNA, 32 nt, Human
cuucccacuucagccuccucugugggcaccga

SEQ ID NO: 144536 - RNA, 32 nt, Human
cuucccacuucugacgaaaggucuccaugcuu

SEQ ID NO: 144537 - RNA, 32 nt, Human
cuucccacuuugccacuggaugacuuuggaug

SEQ ID NO: 144538 - RNA, 32 nt, Human
cuucccagacacacccccacgcccccacugga

SEQ ID NO: 144539 - RNA, 32 nt, Human
cuucccagacuugcccaaguucgggugcccua

SEQ ID NO: 144540 - RNA, 32 nt, Human
cuucccagagagaggaagcucugcucaggccu

SEQ ID NO: 144541 - RNA, 32 nt, Human
cuucccagaggccaggaaucugccauuacucu

SEQ ID NO: 144542 - RNA, 32 nt, Human
cuucccagagggcagcagacagucaccccaag

SEQ ID NO: 144543 - RNA, 32 nt, Human
cuucccagagugagcuuggcagggccaggcgg

SEQ ID NO: 144544 - RNA, 32 nt, Human
cuucccagagugcugggauuacaggcgugagc

SEQ ID NO: 144545 - RNA, 32 nt, Human
cuucccagaguuccugcuuccugggccagcca

SEQ ID NO: 144546 - RNA, 32 nt, Human
cuucccagaugugaccacugagggcaguucug

SEQ ID NO: 144547 - RNA, 32 nt, Human
cuucccagcaccuggacaucucuuccagaguu

SEQ ID NO: 144548 - RNA, 32 nt, Human
cuucccagcagcguucaagacacaucauuuau

SEQ ID NO: 144549 - RNA, 32 nt, Human
cuucccagcagcugcccagugccucuguccac

SEQ ID NO: 144550 - RNA, 32 nt, Human
cuucccagcagcuguggcuggggacagggaca

SEQ ID NO: 144551 - RNA, 23 nt, Human
cuucccagccccacuccccgcag

SEQ ID NO: 144552 - RNA, 20 nt, Human
cuucccagcccuggagccug

SEQ ID NO: 144553 - RNA, 18 nt, Human
cuucccagccuccacagc

SEQ ID NO: 144554 - RNA, 32 nt, Human
cuucccagccucccuuugggccucccuaacuc

SEQ ID NO: 144555 - RNA, 32 nt, Human
cuucccagcgguuccugugcagaugcugcuga

SEQ ID NO: 144556 - RNA, 32 nt, Human
cuucccagcucucauuuuuguuaggugauuug

SEQ ID NO: 144557 - RNA, 32 nt, Human
cuucccagcugacauggaccucaggucagcuu

SEQ ID NO: 144558 - RNA, 32 nt, Human
cuucccagcuguuaucugccagaucuucccau

SEQ ID NO: 144559 - RNA, 32 nt, Human
cuucccaggacguggucuccagcuucuucauc

SEQ ID NO: 144560 - RNA, 32 nt, Human
cuucccaggacuggaggagcagcugggccccu

SEQ ID NO: 144561 - RNA, 32 nt, Human
cuucccaggagagacguggccgauagaagccg

SEQ ID NO: 144562 - RNA, 32 nt, Human
cuucccaggccucccgccagacugccuggguc

SEQ ID NO: 144563 - RNA, 23 nt, Human
cuucccaggcuggagugcagugg

SEQ ID NO: 144564 - RNA, 32 nt, Human
cuucccaggcuggagugcaguggugcgaucuc

SEQ ID NO: 144565 - RNA, 23 nt, Human
cuucccaggcuggggugcagugg

SEQ ID NO: 144566 - RNA, 32 nt, Human
cuucccaggcuggggugcaguggugcgaucuu

SEQ ID NO: 144567 - RNA, 32 nt, Human
cuucccagggagaaggagccgugcgccagggc

SEQ ID NO: 144568 - RNA, 32 nt, Human
cuucccagggcugaggggaggcagggaugugu

SEQ ID NO: 144569 - RNA, 32 nt, Human
cuucccaggggaacgaggagaucuguguuuac

SEQ ID NO: 144570 - RNA, 32 nt, Human
cuucccaggggcugccaaguccuggcccuggc

SEQ ID NO: 144571 - RNA, 32 nt, Human
cuucccagguagcugggauuacaggcaugugc

SEQ ID NO: 144572 - RNA, 32 nt, Human
cuucccaguaaagcuggugaagacucaugauc

SEQ ID NO: 144573 - RNA, 32 nt, Human
cuucccaguaacgccugcuguuuacugccacc

SEQ ID NO: 144574 - RNA, 32 nt, Human
cuucccaguaggggcggccgggcagaggagcc

SEQ ID NO: 144575 - RNA, 32 nt, Human
cuucccaguaggggcggccgggcagaggcacc

SEQ ID NO: 144576 - RNA, 32 nt, Human
cuucccaguaggggcggccgggcagaggcgcc

SEQ ID NO: 144577 - RNA, 32 nt, Human
cuucccaguaggggcggccgggcagaggugcc

SEQ ID NO: 144578 - RNA, 32 nt, Human
cuucccaguaggggcggcugggcagaggcgcc

SEQ ID NO: 144579 - RNA, 32 nt, Human
cuucccaguaggggcggcugggcagaggggcc

SEQ ID NO: 144580 - RNA, 32 nt, Human
cuucccaguagggguggccgggcagaggcgcc

SEQ ID NO: 144581 - RNA, 32 nt, Human
cuucccagucacugcauggccucugcccaucc

SEQ ID NO: 144582 - RNA, 32 nt, Human
cuucccagucuguguggggaggcuguaaaccc

SEQ ID NO: 144583 - RNA, 32 nt, Human
cuucccaguggcugcuuccuggggacccaggg

SEQ ID NO: 144584 - RNA, 32 nt, Human
cuucccaucagcccaccugaacuccagccaug

SEQ ID NO: 144585 - RNA, 32 nt, Human
cuucccaucaggucugcuccagccuggcuacc

SEQ ID NO: 144586 - RNA, 32 nt, Human
cuucccauccacccgccgcuucuuuccuccau

SEQ ID NO: 144587 - RNA, 32 nt, Human
cuucccaucccucccuuccucuucucuccuuc

SEQ ID NO: 144588 - RNA, 32 nt, Human
cuucccauccucccuccagccagggggucagg

SEQ ID NO: 144589 - RNA, 32 nt, Human
cuucccaucuacugcauugucagaccagacug

SEQ ID NO: 144590 - RNA, 32 nt, Human
cuucccaucucaggacgcucucuggccgcuau

SEQ ID NO: 144591 - RNA, 32 nt, Human
cuucccaugaauaugcugaccuaacaaguaac

SEQ ID NO: 144592 - RNA, 22 nt, Human
cuucccaugaaucugucuccca

SEQ ID NO: 144593 - RNA, 32 nt, Human
cuucccaugcuggagugcaauggcgcaaucuc

SEQ ID NO: 144594 - RNA, 32 nt, Human
cuucccaugugggcacagaaaggcagaaccuc

SEQ ID NO: 144595 - RNA, 32 nt, Human
cuucccauguucccauuugaugaaaagucuua

SEQ ID NO: 144596 - RNA, 32 nt, Human
cuucccauuacgcacacacauaaugucauuuc

SEQ ID NO: 144597 - RNA, 32 nt, Human
cuucccauuagcugggauuacaggcaugcgcc

SEQ ID NO: 144598 - RNA, 32 nt, Human
cuucccauuaugcuguacccugggcagagugg

SEQ ID NO: 144599 - RNA, 32 nt, Human
cuucccauugccucucuugagugucagcgccu

SEQ ID NO: 144600 - RNA, 32 nt, Human
cuucccauuuggcugcuuuccucugauugauc

SEQ ID NO: 144601 - RNA, 32 nt, Human
cuuccccaacaccuccaggcagugacccuagg

SEQ ID NO: 144602 - RNA, 32 nt, Human
cuuccccaacaucaggucugcagagcugcagg

SEQ ID NO: 144603 - RNA, 32 nt, Human
cuuccccaacauccuucccaacaccuccuucc

SEQ ID NO: 144604 - RNA, 32 nt, Human
cuuccccaagcccacagucuguaaggaggguc

SEQ ID NO: 144605 - RNA, 32 nt, Human
cuuccccaaggaacugcucccaccucagcacg

SEQ ID NO: 144606 - RNA, 32 nt, Human
cuuccccaagugcugacaauuaauaccugguu

SEQ ID NO: 144607 - RNA, 32 nt, Human
cuuccccaauaugccugcgccaucuucacauu

SEQ ID NO: 144608 - RNA, 32 nt, Human
cuuccccacaacagaagagaccagcgacuccc

SEQ ID NO: 144609 - RNA, 32 nt, Human
cuuccccacaguuggcagaggugguugaggga

SEQ ID NO: 144610 - RNA, 32 nt, Human
cuuccccacaugcucggguuggcccagcgucu

SEQ ID NO: 144611 - RNA, 32 nt, Human
cuuccccacauuagccuuaguauucuauauua

SEQ ID NO: 144612 - RNA, 32 nt, Human
cuuccccacccccaccaccaugccccaugcuc

SEQ ID NO: 144613 - RNA, 32 nt, Human
cuuccccacugcaaacauuccaguuuuggcau

SEQ ID NO: 144614 - RNA, 32 nt, Human
cuuccccacugccucugugugccccuuugcgu

SEQ ID NO: 144615 - RNA, 32 nt, Human
cuuccccagaagcagaugccagugcuaugcuu

SEQ ID NO: 144616 - RNA, 31 nt, Human
cuuccccagagagauggcuuuaggggcuuua

SEQ ID NO: 144617 - RNA, 32 nt, Human
cuuccccagagguauuaaagagaaguaugauu

SEQ ID NO: 144618 - RNA, 32 nt, Human
cuuccccagcagcugaaggcacccagacuuca

SEQ ID NO: 144619 - RNA, 32 nt, Human
cuuccccagcagcugggacuacaggcacgcgc

SEQ ID NO: 144620 - RNA, 32 nt, Human
cuuccccagccagcaguaucagagccacuagg

SEQ ID NO: 144621 - RNA, 32 nt, Human
cuuccccagccauauggaacugugaguccauu

SEQ ID NO: 144622 - RNA, 18 nt, Human
cuuccccagccccucagc

SEQ ID NO: 144623 - RNA, 24 nt, Human
cuuccccagcuccaauauguagca

SEQ ID NO: 144624 - RNA, 32 nt, Human
cuuccccagcucgccucccugccugugcuggc

SEQ ID NO: 144625 - RNA, 32 nt, Human
cuuccccaggagauaagggggagugugaggaa

SEQ ID NO: 144626 - RNA, 32 nt, Human
cuuccccaggaggugggcaggcagcugagagc

SEQ ID NO: 144627 - RNA, 32 nt, Human
cuuccccaggccugaagagagagugcagucaa

SEQ ID NO: 144628 - RNA, 32 nt, Human
cuuccccaggcucugcuuccagaacucuaaug

SEQ ID NO: 144629 - RNA, 32 nt, Human
cuuccccaguagcuaggauuacagguacgcac

SEQ ID NO: 144630 - RNA, 32 nt, Human
cuuccccauaacaauaccaacacuucagcagc

SEQ ID NO: 144631 - RNA, 32 nt, Human
cuuccccauauuuucaaccacucugauuaucu

SEQ ID NO: 144632 - RNA, 32 nt, Human
cuuccccaucccuccccagagcugugucucug

SEQ ID NO: 144633 - RNA, 32 nt, Human
cuuccccaucuaugucccuuuagucacaguua

SEQ ID NO: 144634 - RNA, 32 nt, Human
cuuccccaucucucccccgggccugcugguuu

SEQ ID NO: 144635 - RNA, 32 nt, Human
cuuccccaucucugcucaccauguggacgcug

SEQ ID NO: 144636 - RNA, 32 nt, Human
cuuccccaucuucuccucuauucuggucuccc

SEQ ID NO: 144637 - RNA, 32 nt, Human
cuuccccaugcacacaucuggaaggagcuggc

SEQ ID NO: 144638 - RNA, 32 nt, Human
cuuccccaugccaggcgaaugguguggccuug

SEQ ID NO: 144639 - RNA, 32 nt, Human
cuuccccauuuguuggauggcugcaaucucag

SEQ ID NO: 144640 - RNA, 32 nt, Human
cuucccccaccccacuggcucuucuuaauuag

SEQ ID NO: 144641 - RNA, 32 nt, Human
cuucccccacuccucuuauuugcucacacggg

SEQ ID NO: 144642 - RNA, 32 nt, Human
cuucccccagaggcacauuccucuccaucuuu

SEQ ID NO: 144643 - RNA, 32 nt, Human
cuucccccagcacaaggugcucucggggcaca

SEQ ID NO: 144644 - RNA, 32 nt, Human
cuucccccagcaccauuuaugagucucaaguu

SEQ ID NO: 144645 - RNA, 32 nt, Human
cuucccccagggcuucccaagcucuuuccaca

SEQ ID NO: 144646 - RNA, 32 nt, Human
cuucccccaguucaucaaagccuacaagacgg

SEQ ID NO: 144647 - RNA, 23 nt, Human
cuucccccgguucugacuccaga

SEQ ID NO: 144648 - RNA, 32 nt, Human
cuucccccgucagccccaaccccagcccacac

SEQ ID NO: 144649 - RNA, 32 nt, Human
cuucccccucccccuaccuccuuccccucacu

SEQ ID NO: 144650 - RNA, 32 nt, Human
cuucccccucccccuuugccuauccccucccc

SEQ ID NO: 144651 - RNA, 32 nt, Human
cuucccccuccccuucaccccuuccccucccc

SEQ ID NO: 144652 - RNA, 32 nt, Human
cuucccccuccugcuccggccccgccccugcu

SEQ ID NO: 144653 - RNA, 32 nt, Human
cuucccccuccuucccugucaguccgcugccu

SEQ ID NO: 144654 - RNA, 19 nt, Human
cuucccccucuccccauug

SEQ ID NO: 144655 - RNA, 32 nt, Human
cuucccccugcacgcucugcggggagaaaagg

SEQ ID NO: 144656 - RNA, 32 nt, Human
cuucccccugcagcuacucuucagaucuggcu

SEQ ID NO: 144657 - RNA, 32 nt, Human
cuucccccugcaguuucuugcuuucuucagca

SEQ ID NO: 144658 - RNA, 32 nt, Human
cuucccccuggggaaaugcacuaccuuguuuu

SEQ ID NO: 144659 - RNA, 32 nt, Human
cuucccccugugccuuuccuuugagagugaag

SEQ ID NO: 144660 - RNA, 32 nt, Human
cuucccccuuucucccccacugccaccaccag

SEQ ID NO: 144661 - RNA, 32 nt, Human
cuucccccuuucucucugucucauggggccuc

SEQ ID NO: 144662 - RNA, 23 nt, Human
cuuccccgccgccacccagagug

SEQ ID NO: 144663 - RNA, 32 nt, Human
cuuccccgccugccaacuaggaguucacgugg

SEQ ID NO: 144664 - RNA, 32 nt, Human
cuuccccgcucuugcccugccgccgccucccg

SEQ ID NO: 144665 - RNA, 21 nt, Human
cuuccccgcuucccccagagu

SEQ ID NO: 144666 - RNA, 32 nt, Human
cuuccccggcucgcaggagagcagagcagaga

SEQ ID NO: 144667 - RNA, 32 nt, Human
cuuccccgggcccgggucuggccccggcccau

SEQ ID NO: 144668 - RNA, 32 nt, Human
cuuccccgggucgagcaaacagguaaguucgg

SEQ ID NO: 144669 - RNA, 20 nt, Human
cuuccccguugugaaucuca

SEQ ID NO: 144670 - RNA, 32 nt, Human
cuuccccuacagcuuucuuccucuuuccccuc

SEQ ID NO: 144671 - RNA, 32 nt, Human
cuuccccuagaccucccccucacuuacauaaa

SEQ ID NO: 144672 - RNA, 32 nt, Human
cuuccccucagccucuggaguagcugggccua

SEQ ID NO: 144673 - RNA, 32 nt, Human
cuuccccuccacuaaaucuacucucuauucag

SEQ ID NO: 144674 - RNA, 32 nt, Human
cuuccccucccccuccccaacucagaucuggc

SEQ ID NO: 144675 - RNA, 32 nt, Human
cuuccccuccgagggccagcugagcacagcag

SEQ ID NO: 144676 - RNA, 23 nt, Human
cuuccccuccgcuucguggccug

SEQ ID NO: 144677 - RNA, 32 nt, Human
cuuccccuccuaccccucccagcugacagucc

SEQ ID NO: 144678 - RNA, 32 nt, Human
cuuccccucgcuuccccucuagaagcccccuu

SEQ ID NO: 144679 - RNA, 32 nt, Human
cuuccccucuccccuucucuuccccgaggcua

SEQ ID NO: 144680 - RNA, 32 nt, Human
cuuccccucucuucccuuuccucucucccccu

SEQ ID NO: 144681 - RNA, 32 nt, Human
cuuccccucuucuucuuuccuuccaucaaaag

SEQ ID NO: 144682 - RNA, 32 nt, Human
cuuccccugccacccugcacaccuccaaguca

SEQ ID NO: 144683 - RNA, 32 nt, Human
cuuccccugccggcccagaggggcuucugucc

SEQ ID NO: 144684 - RNA, 32 nt, Human
cuuccccugccugcaucaacuguugcaaaucc

SEQ ID NO: 144685 - RNA, 32 nt, Human
cuuccccugccugcugcugggggagaugcugu

SEQ ID NO: 144686 - RNA, 32 nt, Human
cuuccccugccugguccagcccugguugggga

SEQ ID NO: 144687 - RNA, 32 nt, Human
cuuccccugcggauggccucagcccugggugg

SEQ ID NO: 144688 - RNA, 32 nt, Human
cuuccccugggcagacaggcauugagcuggca

SEQ ID NO: 144689 - RNA, 32 nt, Human
cuuccccugggggcagccgccgccaugauccu

SEQ ID NO: 144690 - RNA, 32 nt, Human
cuuccccugugccaacccaucuccuacagccc

SEQ ID NO: 144691 - RNA, 32 nt, Human
cuuccccuguugcccaggcuggagugcagugg

SEQ ID NO: 144692 - RNA, 32 nt, Human
cuuccccuuccccguccccugcagccuggguc

SEQ ID NO: 144693 - RNA, 32 nt, Human
cuuccccuucccuauacacacagggcucgaag

SEQ ID NO: 144694 - RNA, 32 nt, Human
cuuccccuuccuaauuccacagcugcucaaua

SEQ ID NO: 144695 - RNA, 23 nt, Human
cuuccccuuccugccauuuuccc

SEQ ID NO: 144696 - RNA, 32 nt, Human
cuuccccuucuccccucuaaaccuucucccau

SEQ ID NO: 144697 - RNA, 32 nt, Human
cuuccccuucucuccuccucugccucacuucu

SEQ ID NO: 144698 - RNA, 32 nt, Human
cuuccccuucuuucuuuccucuuuccccaggc

SEQ ID NO: 144699 - RNA, 32 nt, Human
cuuccccuugucucccugguugccucucuugc

SEQ ID NO: 144700 - RNA, 19 nt, Human
cuuccccuuuccugcccca

SEQ ID NO: 144701 - RNA, 32 nt, Human
cuuccccuuuuugauauguucuccccguacuu

SEQ ID NO: 144702 - RNA, 32 nt, Human
cuucccgaagugcugggauuauaggcguaagc

SEQ ID NO: 144703 - RNA, 32 nt, Human
cuucccgacuagcugggauuacagcugccugc

SEQ ID NO: 144704 - RNA, 32 nt, Human
cuucccgacuggcuucccguaguaccagcaac

SEQ ID NO: 144705 - RNA, 32 nt, Human
cuucccgagagaggaggaagcccggagagaga

SEQ ID NO: 144706 - RNA, 32 nt, Human
cuucccgaggaugaaugcuguguuuaaauuuc

SEQ ID NO: 144707 - RNA, 32 nt, Human
cuucccgaggcccuggagugccgugcguguga

SEQ ID NO: 144708 - RNA, 32 nt, Human
cuucccgaguaacugagauuacaggcacccac

SEQ ID NO: 144709 - RNA, 32 nt, Human
cuucccgaguagcuggaauuacaggugcccac

SEQ ID NO: 144710 - RNA, 32 nt, Human
cuucccgaguagcugggacuacaggcgcccac

SEQ ID NO: 144711 - RNA, 32 nt, Human
cuucccgaguagcugggacuacaggggcccgc

SEQ ID NO: 144712 - RNA, 32 nt, Human
cuucccgaguagcugggacuauaggugcgugc

SEQ ID NO: 144713 - RNA, 32 nt, Human
cuucccgaguagcugggauuacagaugugagc

SEQ ID NO: 144714 - RNA, 32 nt, Human
cuucccgaguagcugggauuacaggcacacac

SEQ ID NO: 144715 - RNA, 32 nt, Human
cuucccgaguagcugggauuacaggcgccugc

SEQ ID NO: 144716 - RNA, 32 nt, Human
cuucccgaguagcugggauuacaggcgugcgc

SEQ ID NO: 144717 - RNA, 32 nt, Human
cuucccgaguagcugggauuacagguaugaac

SEQ ID NO: 144718 - RNA, 32 nt, Human
cuucccgaguagcugggauuauaggcacacac

SEQ ID NO: 144719 - RNA, 32 nt, Human
cuucccgaguagcugggauuauaggcacccac

SEQ ID NO: 144720 - RNA, 32 nt, Human
cuucccgcaaggccucucagacccagauguga

SEQ ID NO: 144721 - RNA, 32 nt, Human
cuucccgcagcaccagccugagccacaguggg

SEQ ID NO: 144722 - RNA, 32 nt, Human
cuucccgcagcuccgaagccacuggcaagccc

SEQ ID NO: 144723 - RNA, 32 nt, Human
cuucccgcccuccugccucucccuuacacccc

SEQ ID NO: 144724 - RNA, 32 nt, Human
cuucccgccugcaucccuccccuguccaccuu

SEQ ID NO: 144725 - RNA, 32 nt, Human
cuucccggaaggcaauggggcaaggaaaaaga

SEQ ID NO: 144726 - RNA, 32 nt, Human
cuucccggagguccuccagauaccgccggagu

SEQ ID NO: 144727 - RNA, 32 nt, Human
cuucccgggacccccacacacaucccagcccu

SEQ ID NO: 144728 - RNA, 32 nt, Human
cuucccgggaggcagccccgggaugcugagag

SEQ ID NO: 144729 - RNA, 32 nt, Human
cuucccgggaggcccugggaggugaucauuga

SEQ ID NO: 144730 - RNA, 32 nt, Human
cuucccgggggagugggaggagagggagggga

SEQ ID NO: 144731 - RNA, 32 nt, Human
cuucccgggggccuacccagugccccacagca

SEQ ID NO: 144732 - RNA, 32 nt, Human
cuucccggguucaaacuauucucccgccucaa

SEQ ID NO: 144733 - RNA, 32 nt, Human
cuucccgucccccagccccaugcucccuuuua

SEQ ID NO: 144734 - RNA, 32 nt, Human
cuucccgugcccacccagucuaugucccaggu

SEQ ID NO: 144735 - RNA, 32 nt, Human
cuucccgugccuguacaaagacaugcaugugc

SEQ ID NO: 144736 - RNA, 32 nt, Human
cuucccuacaguugaaaaacagcugaggguga

SEQ ID NO: 144737 - RNA, 32 nt, Human
cuucccuacuuccccuuggggcucccuguguc

SEQ ID NO: 144738 - RNA, 32 nt, Human
cuucccuagcccuuccagucuggaccagcacc

SEQ ID NO: 144739 - RNA, 32 nt, Human
cuucccuaggagaggagugugaagcaaggagc

SEQ ID NO: 144740 - RNA, 32 nt, Human
cuucccuauauugagccaaaaucuguccugcc

SEQ ID NO: 144741 - RNA, 32 nt, Human
cuucccuauguauugagccuugcccucuuuga

SEQ ID NO: 144742 - RNA, 32 nt, Human
cuucccucaccagagcagggcgcuucucuugg

SEQ ID NO: 144743 - RNA, 32 nt, Human
cuucccucacuccugacucuuccucuucccag

SEQ ID NO: 144744 - RNA, 32 nt, Human
cuucccucagcuucccagaaugccgagaugau

SEQ ID NO: 144745 - RNA, 32 nt, Human
cuucccucagcuucccagagugcacaucugaa

SEQ ID NO: 144746 - RNA, 32 nt, Human
cuucccucaggagcagcaugcccagccucuug

SEQ ID NO: 144747 - RNA, 32 nt, Human
cuucccucaggggcugcacccuccucucacuc

SEQ ID NO: 144748 - RNA, 32 nt, Human
cuucccucauacauugcuuucucucccucucc

SEQ ID NO: 144749 - RNA, 23 nt, Human
cuucccuccacuuagaagugcug

SEQ ID NO: 144750 - RNA, 32 nt, Human
cuucccucccucccucccuuccucaggagccg

SEQ ID NO: 144751 - RNA, 32 nt, Human
cuucccucccucccucucccagcugucagugc

SEQ ID NO: 144752 - RNA, 32 nt, Human
cuucccucccuccuucccuccugucgccgucu

SEQ ID NO: 144753 - RNA, 32 nt, Human
cuucccucccugcaacucucucuccccuccuc

SEQ ID NO: 144754 - RNA, 23 nt, Human
cuucccucccugccugggugucg

SEQ ID NO: 144755 - RNA, 32 nt, Human
cuucccuccguggagcuccauuugcuauuuuc

SEQ ID NO: 144756 - RNA, 32 nt, Human
cuucccuccuccacccuccacucauuuuguuc

SEQ ID NO: 144757 - RNA, 32 nt, Human
cuucccuccuccucaggguggggugaacaagg

SEQ ID NO: 144758 - RNA, 32 nt, Human
cuucccuccuccuccccugcagccugguuagg

SEQ ID NO: 144759 - RNA, 32 nt, Human
cuucccuccuccuuccucauccuucugucuuc

SEQ ID NO: 144760 - RNA, 32 nt, Human
cuucccuccugccuccugccucuguguugccc

SEQ ID NO: 144761 - RNA, 32 nt, Human
cuucccuccugucccagcuccccagccuggcg

SEQ ID NO: 144762 - RNA, 32 nt, Human
cuucccuccugucugccuucuuccuccacuug

SEQ ID NO: 144763 - RNA, 32 nt, Human
cuucccuccuuuccuaucucucauucucaccu

SEQ ID NO: 144764 - RNA, 32 nt, Human
cuucccucgccccuucuccaucgucccaggaa

SEQ ID NO: 144765 - RNA, 32 nt, Human
cuucccucguuuuacauccucacucuggagau

SEQ ID NO: 144766 - RNA, 32 nt, Human
cuucccucuaauuccccaucccuagauacauc

SEQ ID NO: 144767 - RNA, 32 nt, Human
cuucccucucccugcugaccuuggagucgcag

SEQ ID NO: 144768 - RNA, 32 nt, Human
cuucccucuccucgggggagggugggucacuu

SEQ ID NO: 144769 - RNA, 32 nt, Human
cuucccucuccucgguuccugaugccuugagg

SEQ ID NO: 144770 - RNA, 32 nt, Human
cuucccucuggcucuccacuucugccucccuc

SEQ ID NO: 144771 - RNA, 20 nt, Human
cuucccucugucaucgugcc

SEQ ID NO: 144772 - RNA, 32 nt, Human
cuucccucugugcucccugccaccccagcagc

SEQ ID NO: 144773 - RNA, 32 nt, Human
cuucccucuguuauucauucaucaagcagguu

SEQ ID NO: 144774 - RNA, 32 nt, Human
cuucccucuguuucucuuuccuuggcucccau

SEQ ID NO: 144775 - RNA, 32 nt, Human
cuucccucuucucucgccgccuccuggccucc

SEQ ID NO: 144776 - RNA, 32 nt, Human
cuucccucuuuccuuccuuccuccuggucugu

SEQ ID NO: 144777 - RNA, 32 nt, Human
cuucccucuuucuccucccucuccuccucuca

SEQ ID NO: 144778 - RNA, 32 nt, Human
cuucccugaaggagagaagggaagugaaaagu

SEQ ID NO: 144779 - RNA, 32 nt, Human
cuucccugacucucuagaauugccuugugucu

SEQ ID NO: 144780 - RNA, 18 nt, Human
cuucccugagaaaggcug

SEQ ID NO: 144781 - RNA, 32 nt, Human
cuucccugagcagcaccuuuucaccugaacau

SEQ ID NO: 144782 - RNA, 27 nt, Human
cuucccugagccagcgaauugugcaca

SEQ ID NO: 144783 - RNA, 32 nt, Human
cuucccugagcuuagggaaaguaggccccaga

SEQ ID NO: 144784 - RNA, 32 nt, Human
cuucccugaggcggaggaggagcugggacgaa

SEQ ID NO: 144785 - RNA, 32 nt, Human
cuucccugcaccugcccugcccggccucaugu

SEQ ID NO: 144786 - RNA, 32 nt, Human
cuucccugcaugcugugccugccgcgugcccu

SEQ ID NO: 144787 - RNA, 22 nt, Human
cuucccugcccccagcucagag

SEQ ID NO: 144788 - RNA, 31 nt, Human
cuucccugccucuagagcacugucucacuac

SEQ ID NO: 144789 - RNA, 31 nt, Human
cuucccugccucuugccugugucccagccug

SEQ ID NO: 144790 - RNA, 32 nt, Human
cuucccugcuaggagcagcagaggauguggug

SEQ ID NO: 144791 - RNA, 23 nt, Human
cuucccugcucaggcugccagag

SEQ ID NO: 144792 - RNA, 18 nt, Human
cuucccugcucaguccag

SEQ ID NO: 144793 - RNA, 24 nt, Human
cuucccugcuccaugcccagagua

SEQ ID NO: 144794 - RNA, 32 nt, Human
cuucccugcucucagugaagcauuuuauuaaa

SEQ ID NO: 144795 - RNA, 32 nt, Human
cuucccugcucuggaugaagaaggccauucuc

SEQ ID NO: 144796 - RNA, 32 nt, Human
cuucccugcuuccacaccucagggaggccucg

SEQ ID NO: 144797 - RNA, 32 nt, Human
cuucccugcuucugugcaggcaccaggugagg

SEQ ID NO: 144798 - RNA, 32 nt, Human
cuucccugcuuugcuaccaucguggaagaaug

SEQ ID NO: 144799 - RNA, 32 nt, Human
cuucccuggaaaccuuccacccagugcugaau

SEQ ID NO: 144800 - RNA, 32 nt, Human
cuucccuggaaaccuucugcaaagauggugug

SEQ ID NO: 144801 - RNA, 32 nt, Human
cuucccuggagcugcccugccuuucucaagua

SEQ ID NO: 144802 - RNA, 32 nt, Human
cuucccuggaggccaggccucccuggacuggg

SEQ ID NO: 144803 - RNA, 22 nt, Human
cuucccuggcucaucuuggccu

SEQ ID NO: 144804 - RNA, 32 nt, Human
cuucccugggguucuccuccucucccagggcc

SEQ ID NO: 144805 - RNA, 32 nt, Human
cuucccugggugagcuugcuaugcgcagccac

SEQ ID NO: 144806 - RNA, 32 nt, Human
cuucccuggucaccaaggcagugcaugcaugu

SEQ ID NO: 144807 - RNA, 32 nt, Human
cuucccuggucccugagcccugccucggcugc

SEQ ID NO: 144808 - RNA, 32 nt, Human
cuucccugucaugugauggaugggcagcuguu

SEQ ID NO: 144809 - RNA, 32 nt, Human
cuucccuguccccagugucuggcaucgaguag

SEQ ID NO: 144810 - RNA, 32 nt, Human
cuucccuguccuggccccaccuguccuguugc

SEQ ID NO: 144811 - RNA, 32 nt, Human
cuucccuguguccucucucccucucucccuuc

SEQ ID NO: 144812 - RNA, 32 nt, Human
cuucccuguucuccagccuaggugguucaccu

SEQ ID NO: 144813 - RNA, 22 nt, Human
cuucccuguucucuaggggcug

SEQ ID NO: 144814 - RNA, 24 nt, Human
cuucccuguucucuuuucuauuaa

SEQ ID NO: 144815 - RNA, 32 nt, Human
cuucccuuaaguuaaaguguuagagaagaccu

SEQ ID NO: 144816 - RNA, 32 nt, Human
cuucccuuaccucaauuccaucuccacccauc

SEQ ID NO: 144817 - RNA, 32 nt, Human
cuucccuuaccuggccccuuggugcuccuuca

SEQ ID NO: 144818 - RNA, 31 nt, Human
cuucccuuacucaaggaguugagggaccuug

SEQ ID NO: 144819 - RNA, 32 nt, Human
cuucccuuaucaccccugcagccugggaugcg

SEQ ID NO: 144820 - RNA, 32 nt, Human
cuucccuucacccucacuggaucuuggcccaa

SEQ ID NO: 144821 - RNA, 32 nt, Human
cuucccuuccccucagccuuugguacuguuuc

SEQ ID NO: 144822 - RNA, 32 nt, Human
cuucccuucccuucccuucccuuccuuucccu

SEQ ID NO: 144823 - RNA, 32 nt, Human
cuucccuucccuucccuuccuuucccuucccu

SEQ ID NO: 144824 - RNA, 32 nt, Human
cuucccuucccuuccuuucccuucccuagcca

SEQ ID NO: 144825 - RNA, 32 nt, Human
cuucccuuccuuggaucccugugcaccuacug

SEQ ID NO: 144826 - RNA, 32 nt, Human
cuucccuucgccccucccuuguuuuauauuuu

SEQ ID NO: 144827 - RNA, 32 nt, Human
cuucccuucgcucgccaucuccggacaaagca

SEQ ID NO: 144828 - RNA, 32 nt, Human
cuucccuucguaugguggccaggauuuuccag

SEQ ID NO: 144829 - RNA, 32 nt, Human
cuucccuucucccaucccuggccuggggccuc

SEQ ID NO: 144830 - RNA, 32 nt, Human
cuucccuucucccaucucugucccugcaagca

SEQ ID NO: 144831 - RNA, 32 nt, Human
cuucccuucucccggucugcugaucacucuuu

SEQ ID NO: 144832 - RNA, 32 nt, Human
cuucccuucucccuuuccaaccccuuccuucc

SEQ ID NO: 144833 - RNA, 32 nt, Human
cuucccuucucuccaggaccugccucgaggug

SEQ ID NO: 144834 - RNA, 32 nt, Human
cuucccuucuucccaccugccugcuguccccc

SEQ ID NO: 144835 - RNA, 32 nt, Human
cuucccuugccugugggcaguggagagugcug

SEQ ID NO: 144836 - RNA, 32 nt, Human
cuucccuugcuucuccuucuccuuccugcuuc

SEQ ID NO: 144837 - RNA, 22 nt, Human
cuucccuuggcucugggggccg

SEQ ID NO: 144838 - RNA, 21 nt, Human
cuucccuuuacagucugcagc

SEQ ID NO: 144839 - RNA, 32 nt, Human
cuucccuuuccaaagguuucugaggacuucuc

SEQ ID NO: 144840 - RNA, 32 nt, Human
cuucccuuucccuuccucuccccuaccccaga

SEQ ID NO: 144841 - RNA, 32 nt, Human
cuucccuuuccucugcuucucuccucaucauc

SEQ ID NO: 144842 - RNA, 19 nt, Human
cuucccuuuccugcugcug

SEQ ID NO: 144843 - RNA, 32 nt, Human
cuucccuuuccuucccccucggccacccgccu

SEQ ID NO: 144844 - RNA, 32 nt, Human
cuucccuuugcaccagcccgagucuaggucug

SEQ ID NO: 144845 - RNA, 32 nt, Human
cuucccuuugccugcugauauucugcaggacu

SEQ ID NO: 144846 - RNA, 32 nt, Human
cuuccgaaaguggugggauuacaagcaugagc

SEQ ID NO: 144847 - RNA, 23 nt, Human
cuuccgaaauugacccaccuggg

SEQ ID NO: 144848 - RNA, 32 nt, Human
cuuccgaacucugcuuucacauggaagauugg

SEQ ID NO: 144849 - RNA, 32 nt, Human
cuuccgacaucccagaccagccaaggguccuc

SEQ ID NO: 144850 - RNA, 32 nt, Human
cuuccgagagaaaaggggcagcuggaggcaga

SEQ ID NO: 144851 - RNA, 32 nt, Human
cuuccgagagccuuccuccucgggcagugcgu

SEQ ID NO: 144852 - RNA, 32 nt, Human
cuuccgagcagcugggacuacaggagccugcc

SEQ ID NO: 144853 - RNA, 32 nt, Human
cuuccgagcugggaugagaggaagggaaaccu

SEQ ID NO: 144854 - RNA, 32 nt, Human
cuuccgaggggugcucccugacauaacuugcc

SEQ ID NO: 144855 - RNA, 32 nt, Human
cuuccgaguagcugggaccacaggcaugcaca

SEQ ID NO: 144856 - RNA, 32 nt, Human
cuuccgaguagcugggacuacaggcaugaguc

SEQ ID NO: 144857 - RNA, 32 nt, Human
cuuccgaguagcugggauuacaggcacccacc

SEQ ID NO: 144858 - RNA, 32 nt, Human
cuuccgaguagcugggauuacaggcaccugcc

SEQ ID NO: 144859 - RNA, 32 nt, Human
cuuccgaguagcugggauuacaggcgcccgcc

SEQ ID NO: 144860 - RNA, 32 nt, Human
cuuccgaguagcugggauuacaggcgugugcc

SEQ ID NO: 144861 - RNA, 32 nt, Human
cuuccgaguagcugggauuacaggcuccugcc

SEQ ID NO: 144862 - RNA, 32 nt, Human
cuuccgaguagcugggauuacagggauguagc

SEQ ID NO: 144863 - RNA, 32 nt, Human
cuuccgaguagcugggauuacaggugcccgcc

SEQ ID NO: 144864 - RNA, 32 nt, Human
cuuccgaguagcugggauuacaggugugugcc

SEQ ID NO: 144865 - RNA, 32 nt, Human
cuuccgaguagcugggauugcaggcgugugcc

SEQ ID NO: 144866 - RNA, 32 nt, Human
cuuccgaguggcugggauuacaggcgcccgcc

SEQ ID NO: 144867 - RNA, 32 nt, Human
cuuccgauuaccuagauaccuccgucuucugg

SEQ ID NO: 144868 - RNA, 21 nt, Human
cuuccgauuccaccuccaccu

SEQ ID NO: 144869 - RNA, 21 nt, Human
cuuccgauuccaccuccgccu

SEQ ID NO: 144870 - RNA, 32 nt, Human
cuuccgcaagugcugggauuacaggcgugagc

SEQ ID NO: 144871 - RNA, 32 nt, Human
cuuccgcaaucuccucccccagucucccaaag

SEQ ID NO: 144872 - RNA, 32 nt, Human
cuuccgcaggacccgcaacagcgcagaggcua

SEQ ID NO: 144873 - RNA, 32 nt, Human
cuuccgcccaggcugcagugcaguggcaugau

SEQ ID NO: 144874 - RNA, 32 nt, Human
cuuccgccccuccaaagcccucaccaugccua

SEQ ID NO: 144875 - RNA, 32 nt, Human
cuuccgccuaccccacuuuucauuuuguucca

SEQ ID NO: 144876 - RNA, 32 nt, Human
cuuccgccuccaccucaacccaggucuuggau

SEQ ID NO: 144877 - RNA, 32 nt, Human
cuuccgccucugggccucaggcugccugucca

SEQ ID NO: 144878 - RNA, 32 nt, Human
cuuccgcgcuccucgacuccagcuuuggucuu

SEQ ID NO: 144879 - RNA, 32 nt, Human
cuuccgcguguggccaucugucuuucagaaac

SEQ ID NO: 144880 - RNA, 32 nt, Human
cuuccgcucaccuugccaggcuuuucagaggc

SEQ ID NO: 144881 - RNA, 32 nt, Human
cuuccgcucacugcaaccucugcuucccgggu

SEQ ID NO: 144882 - RNA, 19 nt, Human
cuuccgcuccuggcugcca

SEQ ID NO: 144883 - RNA, 32 nt, Human
cuuccgcugcccuuucuuucgccagccuuacg

SEQ ID NO: 144884 - RNA, 32 nt, Human
cuuccggaacauguucuucaccaccuuuugga

SEQ ID NO: 144885 - RNA, 32 nt, Human
cuuccggagagggugggguggagcagcggggg

SEQ ID NO: 144886 - RNA, 32 nt, Human
cuuccggagcagcagugggacugaccugucca

SEQ ID NO: 144887 - RNA, 32 nt, Human
cuuccggagcugagauccagcccagggcgaau

SEQ ID NO: 144888 - RNA, 32 nt, Human
cuuccggagucagcagagagccuggauggauc

SEQ ID NO: 144889 - RNA, 32 nt, Human
cuuccggaucuggugugaccuugguccaggag

SEQ ID NO: 144890 - RNA, 32 nt, Human
cuuccggcagcuccgaagccacuggcaagccc

SEQ ID NO: 144891 - RNA, 18 nt, Human
cuuccggccacucagcau

SEQ ID NO: 144892 - RNA, 32 nt, Human
cuuccggcccugcugucugccuccccggcuga

SEQ ID NO: 144893 - RNA, 32 nt, Human
cuuccggcccuuaaaacugggcugggagagaa

SEQ ID NO: 144894 - RNA, 32 nt, Human
cuuccggcgcuguguccagucuccuccaauca

SEQ ID NO: 144895 - RNA, 17 nt, Human
cuuccggcggcagcguc

SEQ ID NO: 144896 - RNA, 32 nt, Human
cuuccggcugaaacccucucugcuccauaugc

SEQ ID NO: 144897 - RNA, 32 nt, Human
cuuccggcugaccuacuuacauggacacaguc

SEQ ID NO: 144898 - RNA, 22 nt, Human
cuuccggcugccgcaggcgcuu

SEQ ID NO: 144899 - RNA, 32 nt, Human
cuuccgggaggaagugacgcucccagccagcu

SEQ ID NO: 144900 - RNA, 32 nt, Human
cuuccgggcagaaacaauaaaaccacuugugc

SEQ ID NO: 144901 - RNA, 32 nt, Human
cuuccggguaacaagcaaaagucaggccaagg

SEQ ID NO: 144902 - RNA, 22 nt, Human
cuuccggguagcaauggcaugg

SEQ ID NO: 144903 - RNA, 32 nt, Human
cuuccgguacuuccagaaccaacucaccugac

SEQ ID NO: 144904 - RNA, 32 nt, Human
cuuccggucaccauggcgaccaggcgccuugg

SEQ ID NO: 144905 - RNA, 32 nt, Human
cuuccggucucccucccgggccggcgcuggcc

SEQ ID NO: 144906 - RNA, 32 nt, Human
cuuccggugaagcggaggugugguggggcuug

SEQ ID NO: 144907 - RNA, 32 nt, Human
cuuccggugccuuucacccaaguucgggcagg

SEQ ID NO: 144908 - RNA, 22 nt, Human
cuuccgguuuuacugggaccug

SEQ ID NO: 144909 - RNA, 32 nt, Human
cuuccguagagcugugggagcuggagcuggag

SEQ ID NO: 144910 - RNA, 32 nt, Human
cuuccguagagcugugggagcuggagcuggca

SEQ ID NO: 144911 - RNA, 32 nt, Human
cuuccguaucuuuccccuccaucgcggcuuug

SEQ ID NO: 144912 - RNA, 32 nt, Human
cuuccgugguucccagcacagcccaagauuau

SEQ ID NO: 144913 - RNA, 32 nt, Human
cuuccguuccacugcucagcugccgccuggug

SEQ ID NO: 144914 - RNA, 32 nt, Human
cuuccuaaacaaugauaagcacacagccaccu

SEQ ID NO: 144915 - RNA, 32 nt, Human
cuuccuaaaccugaggccucaccucauuagga

SEQ ID NO: 144916 - RNA, 32 nt, Human
cuuccuaaagugcugggauuacaggcgugagc

SEQ ID NO: 144917 - RNA, 32 nt, Human
cuuccuaaagugcugggauuacuggcaugagu

SEQ ID NO: 144918 - RNA, 32 nt, Human
cuuccuaaagugcugggauugcaggcgugagc

SEQ ID NO: 144919 - RNA, 32 nt, Human
cuuccuaaaguguugggauuacaggcuugagc

SEQ ID NO: 144920 - RNA, 32 nt, Human
cuuccuaacccuuugucuagagcaccacaccg

SEQ ID NO: 144921 - RNA, 32 nt, Human
cuuccuaaguagcugggauuacaggcgugcgc

SEQ ID NO: 144922 - RNA, 32 nt, Human
cuuccuaaguagcuggguuuacaggcacccac

SEQ ID NO: 144923 - RNA, 32 nt, Human
cuuccuacacccuuggacuugaggauuuugag

SEQ ID NO: 144924 - RNA, 32 nt, Human
cuuccuacacugaaacacagacucauauugug

SEQ ID NO: 144925 - RNA, 32 nt, Human
cuuccuacauugucaccauccccaguaaaccu

SEQ ID NO: 144926 - RNA, 32 nt, Human
cuuccuacauuugucccugagaguacuccacg

SEQ ID NO: 144927 - RNA, 15 nt, Human
cuuccuaccccuucc

SEQ ID NO: 144928 - RNA, 32 nt, Human
cuuccuacuuccuccuuuagccuagcagauuc

SEQ ID NO: 144929 - RNA, 32 nt, Human
cuuccuagcagccuggugagcucacuccuucc

SEQ ID NO: 144930 - RNA, 32 nt, Human
cuuccuaggagcuuccucaaauuggcagagcu

SEQ ID NO: 144931 - RNA, 32 nt, Human
cuuccuaggccuugcuaucacuauuuccauac

SEQ ID NO: 144932 - RNA, 32 nt, Human
cuuccuaguaacugcaacuuuguugcuucugu

SEQ ID NO: 144933 - RNA, 32 nt, Human
cuuccuaguaggggcggccgggcagaggcgcc

SEQ ID NO: 144934 - RNA, 32 nt, Human
cuuccuaguucaucccuucucuuccaggcagc

SEQ ID NO: 144935 - RNA, 32 nt, Human
cuuccuauacagucugcuuuaacucaggaccu

SEQ ID NO: 144936 - RNA, 32 nt, Human
cuuccuauagccuggagaacugugagccaauu

SEQ ID NO: 144937 - RNA, 32 nt, Human
cuuccuaucugccucuuucgugguuggcuggg

SEQ ID NO: 144938 - RNA, 32 nt, Human
cuuccuaucugcuucuugcggcugaggagagg

SEQ ID NO: 144939 - RNA, 32 nt, Human
cuuccuaucuucuucuguucuucacgccccau

SEQ ID NO: 144940 - RNA, 32 nt, Human
cuuccuauggccuccaccacacuagccuccua

SEQ ID NO: 144941 - RNA, 32 nt, Human
cuuccuauggccuccaccacacuagccuccug

SEQ ID NO: 144942 - RNA, 32 nt, Human
cuuccuaugucucucagcagcacguuggggca

SEQ ID NO: 144943 - RNA, 32 nt, Human
cuuccucaagccccucugugccccuagagcac

SEQ ID NO: 144944 - RNA, 32 nt, Human
cuuccucaaugccaaggccacguucaagauuu

SEQ ID NO: 144945 - RNA, 32 nt, Human
cuuccucacaaugcaggauccucuuugcugac

SEQ ID NO: 144946 - RNA, 32 nt, Human
cuuccucacagcacccaggauugugacugacu

SEQ ID NO: 144947 - RNA, 32 nt, Human
cuuccucacaugagguuacuguuucuuuccuc

SEQ ID NO: 144948 - RNA, 32 nt, Human
cuuccucacauggucugcuuagcccuucucug

SEQ ID NO: 144949 - RNA, 19 nt, Human
cuuccucacccuuggcugg

SEQ ID NO: 144950 - RNA, 32 nt, Human
cuuccucaccuccaccuguaaugcaggaggga

SEQ ID NO: 144951 - RNA, 32 nt, Human
cuuccucacugcacccccagcccugcacccuc

SEQ ID NO: 144952 - RNA, 32 nt, Human
cuuccucacugcaccuagucagacugugggca

SEQ ID NO: 144953 - RNA, 32 nt, Human
cuuccucagacaugccacucuguggcucccaa

SEQ ID NO: 144954 - RNA, 32 nt, Human
cuuccucagccgcauguugucuugccucauuc

SEQ ID NO: 144955 - RNA, 32 nt, Human
cuuccucagccuacaaauagcucauuagauga

SEQ ID NO: 144956 - RNA, 32 nt, Human
cuuccucaggagcuggagagcugguacuuagc

SEQ ID NO: 144957 - RNA, 32 nt, Human
cuuccucaggcauggguguccacagcacuggc

SEQ ID NO: 144958 - RNA, 32 nt, Human
cuuccucaggcccagcucccauggcccccaca

SEQ ID NO: 144959 - RNA, 32 nt, Human
cuuccucaggguggcagggguacagagagugc

SEQ ID NO: 144960 - RNA, 32 nt, Human
cuuccucagucucgagccucagucucccgucu

SEQ ID NO: 144961 - RNA, 32 nt, Human
cuuccucaguucccagcugggauugcuaugca

SEQ ID NO: 144962 - RNA, 32 nt, Human
cuuccucauccagaaggagcguucgaggaaug

SEQ ID NO: 144963 - RNA, 32 nt, Human
cuuccucauccugcuucucuuuuccucgcaga

SEQ ID NO: 144964 - RNA, 32 nt, Human
cuuccucauucuuugugguaguacaaugauug

SEQ ID NO: 144965 - RNA, 32 nt, Human
cuuccuccaacuccuucucucugcaugcaccu

SEQ ID NO: 144966 - RNA, 32 nt, Human
cuuccuccaacucuucuucauccuccuagcau

SEQ ID NO: 144967 - RNA, 32 nt, Human
cuuccuccaacucuugaaacuccccagccugc

SEQ ID NO: 144968 - RNA, 32 nt, Human
cuuccuccaacugggccacccuuuugaaaagc

SEQ ID NO: 144969 - RNA, 21 nt, Human
cuuccuccaagagcccauuga

SEQ ID NO: 144970 - RNA, 32 nt, Human
cuuccuccaaggcuggagugcagugacgcgau

SEQ ID NO: 144971 - RNA, 20 nt, Human
cuuccuccacagucccccac

SEQ ID NO: 144972 - RNA, 32 nt, Human
cuuccuccaccaccauccuuacccagccccag

SEQ ID NO: 144973 - RNA, 32 nt, Human
cuuccuccaccagucugaccucaguccucccu

SEQ ID NO: 144974 - RNA, 21 nt, Human
cuuccuccacccugccaccga

SEQ ID NO: 144975 - RNA, 26 nt, Human
cuuccuccaccguuuucacagggaga

SEQ ID NO: 144976 - RNA, 19 nt, Human
cuuccuccaccucagcuca

SEQ ID NO: 144977 - RNA, 23 nt, Human
cuuccuccaccuccacccaguga

SEQ ID NO: 144978 - RNA, 21 nt, Human
cuuccuccagccaaccccuga

SEQ ID NO: 144979 - RNA, 18 nt, Human
cuuccuccagcuggcugg

SEQ ID NO: 144980 - RNA, 32 nt, Human
cuuccuccaggagucucuggugcagcuggggu

SEQ ID NO: 144981 - RNA, 19 nt, Human
cuuccuccaggcagcccac

SEQ ID NO: 144982 - RNA, 21 nt, Human
cuuccuccagggagccacuga

SEQ ID NO: 144983 - RNA, 32 nt, Human
cuuccuccaguuaugucuuucuuccaaagcaa

SEQ ID NO: 144984 - RNA, 32 nt, Human
cuuccuccaucauuuucccugcuuccuuuuuc

SEQ ID NO: 144985 - RNA, 32 nt, Human
cuuccucccacugucugcccugaacccacugc

SEQ ID NO: 144986 - RNA, 32 nt, Human
cuuccucccaggaaaggggacguucagcugag

SEQ ID NO: 144987 - RNA, 32 nt, Human
cuuccucccaggaguauuagacuagcuaauag

SEQ ID NO: 144988 - RNA, 25 nt, Human
cuuccucccaggccuaccccaguga

SEQ ID NO: 144989 - RNA, 21 nt, Human
cuuccucccaucggagggaga

SEQ ID NO: 144990 - RNA, 32 nt, Human
cuuccucccauuggccucuccuugccaaaucu

SEQ ID NO: 144991 - RNA, 32 nt, Human
cuuccuccccauaugccacccuucccccaaag

SEQ ID NO: 144992 - RNA, 32 nt, Human
cuuccuccccaucuuuccauccuuccugcuga

SEQ ID NO: 144993 - RNA, 21 nt, Human
cuuccuccccucucucuuccu

SEQ ID NO: 144994 - RNA, 32 nt, Human
cuuccuccccugcucucucuccacccuccugu

SEQ ID NO: 144995 - RNA, 32 nt, Human
cuuccuccccuucagucagcucccucuguccu

SEQ ID NO: 144996 - RNA, 32 nt, Human
cuuccuccccuuuuccuuccagccucucuuuu

SEQ ID NO: 144997 - RNA, 32 nt, Human
cuuccucccggagcaagugagggaaggggcag

SEQ ID NO: 144998 - RNA, 32 nt, Human
cuuccucccgggaugaccucaggacucugucg

SEQ ID NO: 144999 - RNA, 32 nt, Human
cuuccucccuccccucucccucccccuccccc

SEQ ID NO: 145000 - RNA, 32 nt, Human
cuuccucccugggguaucuccaccucuccaac

SEQ ID NO: 145001 - RNA, 32 nt, Human
cuuccucccuuacucacucugccaucuguuuu

SEQ ID NO: 145002 - RNA, 32 nt, Human
cuuccucccuuccuccucuccccacuccuuuc

SEQ ID NO: 145003 - RNA, 32 nt, Human
cuuccucccuuucuccuucuccccuccuucuu

SEQ ID NO: 145004 - RNA, 32 nt, Human
cuuccuccgaguggaacugcagccuggggacu

SEQ ID NO: 145005 - RNA, 32 nt, Human
cuuccuccgcccccucuccucgcguaguccgg

SEQ ID NO: 145006 - RNA, 32 nt, Human
cuuccuccgugucugucauacacugagaccaa

SEQ ID NO: 145007 - RNA, 32 nt, Human
cuuccuccuacaguuccucccagcagucccuc

SEQ ID NO: 145008 - RNA, 25 nt, Human
cuuccuccucaacugagaucuuucc

SEQ ID NO: 145009 - RNA, 32 nt, Human
cuuccuccucaucguguuuuucaccucuuaag

SEQ ID NO: 145010 - RNA, 32 nt, Human
cuuccuccuccacccagaccucacugcucaga

SEQ ID NO: 145011 - RNA, 32 nt, Human
cuuccuccuccaggccucagcccuguuggccc

SEQ ID NO: 145012 - RNA, 21 nt, Human
cuuccuccuccccaccuucuc

SEQ ID NO: 145013 - RNA, 20 nt, Human
cuuccuccuccgugcuuccu

SEQ ID NO: 145014 - RNA, 32 nt, Human
cuuccuccuccuccuccaccuccggcuuuugg

SEQ ID NO: 145015 - RNA, 32 nt, Human
cuuccuccuccuccuccucaugaccgggguga

SEQ ID NO: 145016 - RNA, 32 nt, Human
cuuccuccuccuccuccuccucaugucugccu

SEQ ID NO: 145017 - RNA, 32 nt, Human
cuuccuccuccuccuccuccucugguagagca

SEQ ID NO: 145018 - RNA, 32 nt, Human
cuuccuccuccuccuccucucuaggcaccccc

SEQ ID NO: 145019 - RNA, 32 nt, Human
cuuccuccuccuccuccuuggcauccgccucu

SEQ ID NO: 145020 - RNA, 32 nt, Human
cuuccuccucucugugugccucagucuccugc

SEQ ID NO: 145021 - RNA, 32 nt, Human
cuuccuccugcagcucugggguuggaacugac

SEQ ID NO: 145022 - RNA, 32 nt, Human
cuuccuccugccaggggauuuggggcuuucuu

SEQ ID NO: 145023 - RNA, 20 nt, Human
cuuccuccugcgcaccugcc

SEQ ID NO: 145024 - RNA, 32 nt, Human
cuuccuccugcgccucgcuucuccgguccagc

SEQ ID NO: 145025 - RNA, 32 nt, Human
cuuccuccugcuggggacaggacagaugaggc

SEQ ID NO: 145026 - RNA, 32 nt, Human
cuuccuccuggacugugggaagcugacucugc

SEQ ID NO: 145027 - RNA, 32 nt, Human
cuuccuccugugcugaccucaggguggucuga

SEQ ID NO: 145028 - RNA, 32 nt, Human
cuuccuccuuucucuguauauugggcucagag

SEQ ID NO: 145029 - RNA, 32 nt, Human
cuuccucgcaagccucuccaucagcgcccuca

SEQ ID NO: 145030 - RNA, 32 nt, Human
cuuccucgccccucucuggggugggugugggg

SEQ ID NO: 145031 - RNA, 32 nt, Human
cuuccucgccuccccucuuccucauuccauug

SEQ ID NO: 145032 - RNA, 27 nt, Human
cuuccucgcguauuugaggacagccca

SEQ ID NO: 145033 - RNA, 32 nt, Human
cuuccucgcuguacuccaggcuugcuucggag

SEQ ID NO: 145034 - RNA, 32 nt, Human
cuuccucgcuuuccuuccuaccuagcuccuug

SEQ ID NO: 145035 - RNA, 32 nt, Human
cuuccucggggaggccccugcccccacccugc

SEQ ID NO: 145036 - RNA, 32 nt, Human
cuuccucggguuuaggggauguggggaccagg

SEQ ID NO: 145037 - RNA, 32 nt, Human
cuuccucuacagccucccuggcuacaugguca

SEQ ID NO: 145038 - RNA, 32 nt, Human
cuuccucuacagcuacagcuuccacacagacg

SEQ ID NO: 145039 - RNA, 32 nt, Human
cuuccucuaccugcccucuccccagcccucau

SEQ ID NO: 145040 - RNA, 23 nt, Human
cuuccucucaccuggaccuuccc

SEQ ID NO: 145041 - RNA, 26 nt, Human
cuuccucucagccuuccgcccgguga

SEQ ID NO: 145042 - RNA, 32 nt, Human
cuuccucuccacccucccagaccugccucuuc

SEQ ID NO: 145043 - RNA, 32 nt, Human
cuuccucuccagccuucucucucuggucaggc

SEQ ID NO: 145044 - RNA, 32 nt, Human
cuuccucuccaucucucccucucuccaagacu

SEQ ID NO: 145045 - RNA, 24 nt, Human
cuuccucucccagaucgucuucuc

SEQ ID NO: 145046 - RNA, 22 nt, Human
cuuccucuccccagccuuaccc

SEQ ID NO: 145047 - RNA, 25 nt, Human
cuuccucucccccgaaccucucccc

SEQ ID NO: 145048 - RNA, 25 nt, Human
cuuccucucccccuuccucucuccc

SEQ ID NO: 145049 - RNA, 32 nt, Human
cuuccucuccccuggggcugggaggcuccauc

SEQ ID NO: 145050 - RNA, 23 nt, Human
cuuccucucccuauaucccuccc

SEQ ID NO: 145051 - RNA, 22 nt, Human
cuuccucuccuccagcauucuc

SEQ ID NO: 145052 - RNA, 24 nt, Human
cuuccucuccucccaccuccuccc

SEQ ID NO: 145053 - RNA, 20 nt, Human
cuuccucuccucccaguccc

SEQ ID NO: 145054 - RNA, 19 nt, Human
cuuccucuccucccucccc

SEQ ID NO: 145055 - RNA, 20 nt, Human
cuuccucuccuccuccuccc

SEQ ID NO: 145056 - RNA, 20 nt, Human
cuuccucuccuccucucccc

SEQ ID NO: 145057 - RNA, 22 nt, Human
cuuccucuccuccuucccuccc

SEQ ID NO: 145058 - RNA, 24 nt, Human
cuuccucuccuccuucccucuccc

SEQ ID NO: 145059 - RNA, 32 nt, Human
cuuccucuccuccuucccucucccucucugcu

SEQ ID NO: 145060 - RNA, 32 nt, Human
cuuccucuccucguuucucuccuuccuuccuu

SEQ ID NO: 145061 - RNA, 21 nt, Human
cuuccucuccucucucuaccc

SEQ ID NO: 145062 - RNA, 23 nt, Human
cuuccucuccucucucucuuccu

SEQ ID NO: 145063 - RNA, 21 nt, Human
cuuccucuccucucucuuccc

SEQ ID NO: 145064 - RNA, 21 nt, Human
cuuccucuccucucucuuccu

SEQ ID NO: 145065 - RNA, 19 nt, Human
cuuccucuccucucuuccu

SEQ ID NO: 145066 - RNA, 32 nt, Human
cuuccucuccuucuccaagugccuucaaacca

SEQ ID NO: 145067 - RNA, 32 nt, Human
cuuccucucucacagggcagagcucuugucgg

SEQ ID NO: 145068 - RNA, 32 nt, Human
cuuccucucucccacgcucucuuuuaucucuc

SEQ ID NO: 145069 - RNA, 32 nt, Human
cuuccucucuccuccuccuuccccauugcugu

SEQ ID NO: 145070 - RNA, 32 nt, Human
cuuccucucuucugaaacucugccaccucucu

SEQ ID NO: 145071 - RNA, 32 nt, Human
cuuccucucuucuucuguucuucacgccccau

SEQ ID NO: 145072 - RNA, 32 nt, Human
cuuccucugacccacugagccugguggcagcg

SEQ ID NO: 145073 - RNA, 32 nt, Human
cuuccucugcagcugaccucuguuguccuccc

SEQ ID NO: 145074 - RNA, 32 nt, Human
cuuccucugcauuuccagccugaacagauguu

SEQ ID NO: 145075 - RNA, 32 nt, Human
cuuccucugcauuugcacacuucccaacgcag

SEQ ID NO: 145076 - RNA, 32 nt, Human
cuuccucugcccaugcaguccccagcugccac

SEQ ID NO: 145077 - RNA, 32 nt, Human
cuuccucugccugcaagugagcagggaugggc

SEQ ID NO: 145078 - RNA, 32 nt, Human
cuuccucugccuggggcccacugcaucugauu

SEQ ID NO: 145079 - RNA, 32 nt, Human
cuuccucugcucccccuuuucccucggaguuc

SEQ ID NO: 145080 - RNA, 32 nt, Human
cuuccucugcucccugucuccucuuucugcca

SEQ ID NO: 145081 - RNA, 32 nt, Human
cuuccucuggccaccuuuccucccucuggguc

SEQ ID NO: 145082 - RNA, 32 nt, Human
cuuccucugggaaccuuugggucauugcccuu

SEQ ID NO: 145083 - RNA, 32 nt, Human
cuuccucuguaacucaggcguaacuguuauac

SEQ ID NO: 145084 - RNA, 32 nt, Human
cuuccucuguaaucccagcuacucaggaggcu

SEQ ID NO: 145085 - RNA, 32 nt, Human
cuuccucugucgcccaggcuggagugcaaugg

SEQ ID NO: 145086 - RNA, 32 nt, Human
cuuccucugucuccucuuucucccuggccugu

SEQ ID NO: 145087 - RNA, 32 nt, Human
cuuccucugucugacaggaaucuccccguuug

SEQ ID NO: 145088 - RNA, 32 nt, Human
cuuccucuguggccaguuggggaccagcauca

SEQ ID NO: 145089 - RNA, 32 nt, Human
cuuccucuguggcccaggcugaagagcaguag

SEQ ID NO: 145090 - RNA, 32 nt, Human
cuuccucuguugcccaggcuggagugcagugg

SEQ ID NO: 145091 - RNA, 22 nt, Human
cuuccucuuccacccaauuccc

SEQ ID NO: 145092 - RNA, 22 nt, Human
cuuccucuuccauguucugccc

SEQ ID NO: 145093 - RNA, 24 nt, Human
cuuccucuuccccaucuucuucuc

SEQ ID NO: 145094 - RNA, 24 nt, Human
cuuccucuucccccagggcuuccc

SEQ ID NO: 145095 - RNA, 32 nt, Human
cuuccucuucccccagggcuucccaagcucuu

SEQ ID NO: 145096 - RNA, 21 nt, Human
cuuccucuuccccucuuuacc

SEQ ID NO: 145097 - RNA, 32 nt, Human
cuuccucuuccuaggguggaaggggcccuggg

SEQ ID NO: 145098 - RNA, 21 nt, Human
cuuccucuuccuccugcuccc

SEQ ID NO: 145099 - RNA, 22 nt, Human
cuuccucuuccucucuccucuc

SEQ ID NO: 145100 - RNA, 32 nt, Human
cuuccucuuccucucucuuccagagcccagaa

SEQ ID NO: 145101 - RNA, 23 nt, Human
cuuccucuucucacccuccuccc

SEQ ID NO: 145102 - RNA, 32 nt, Human
cuuccucuucucuccuucccuccaccugggcu

SEQ ID NO: 145103 - RNA, 21 nt, Human
cuuccucuucucucucuuccc

SEQ ID NO: 145104 - RNA, 32 nt, Human
cuuccucuucuuucucucucuucuccucucuu

SEQ ID NO: 145105 - RNA, 21 nt, Human
cuuccucuucuuucucuuucc

SEQ ID NO: 145106 - RNA, 32 nt, Human
cuuccucuucuuucucuuucccucugccaucc

SEQ ID NO: 145107 - RNA, 32 nt, Human
cuuccucuugcccucccugccucuuuggugcu

SEQ ID NO: 145108 - RNA, 32 nt, Human
cuuccucuugggaacaucccuccacuccgcac

SEQ ID NO: 145109 - RNA, 32 nt, Human
cuuccucuuguuguucucuccugcugcugagu

SEQ ID NO: 145110 - RNA, 32 nt, Human
cuuccucuuuccccuccuucugagucuuucgu

SEQ ID NO: 145111 - RNA, 32 nt, Human
cuuccucuuucuccucuccaauuuaugcuuuu

SEQ ID NO: 145112 - RNA, 32 nt, Human
cuuccugaacagcucauuaaagaagccuuuau

SEQ ID NO: 145113 - RNA, 32 nt, Human
cuuccugaagucacagcccuaccgccuggugc

SEQ ID NO: 145114 - RNA, 32 nt, Human
cuuccugaagugcugggauuacaggcaugagc

SEQ ID NO: 145115 - RNA, 32 nt, Human
cuuccugacagcacuugccuccauggaucuuc

SEQ ID NO: 145116 - RNA, 32 nt, Human
cuuccugaccucagcggcccuucuguuccauc

SEQ ID NO: 145117 - RNA, 32 nt, Human
cuuccugacuucucccccucuuggcuacucau

SEQ ID NO: 145118 - RNA, 32 nt, Human
cuuccugagccaccagacaggaaaggguagca

SEQ ID NO: 145119 - RNA, 32 nt, Human
cuuccugagcugaccugaccucacugccaccu

SEQ ID NO: 145120 - RNA, 32 nt, Human
cuuccugaggagcugggauuauaggugcaugc

SEQ ID NO: 145121 - RNA, 32 nt, Human
cuuccugaggcagagauugaagccaucagagc

SEQ ID NO: 145122 - RNA, 32 nt, Human
cuuccugagggcucugucuugccugcaggguc

SEQ ID NO: 145123 - RNA, 32 nt, Human
cuuccugaggucuaaccucuagcugcuccccc

SEQ ID NO: 145124 - RNA, 32 nt, Human
cuuccugaggucuucuggacucuagucugugg

SEQ ID NO: 145125 - RNA, 32 nt, Human
cuuccugaguagaugggauuacaggcgccugc

SEQ ID NO: 145126 - RNA, 32 nt, Human
cuuccugaguagcuaggacuacaagcaugugc

SEQ ID NO: 145127 - RNA, 32 nt, Human
cuuccugaguagcugcaacuacagacacaugc

SEQ ID NO: 145128 - RNA, 32 nt, Human
cuuccugaguagcuggaaccacaggugugugc

SEQ ID NO: 145129 - RNA, 32 nt, Human
cuuccugaguagcuggaacuacagguggugcc

SEQ ID NO: 145130 - RNA, 32 nt, Human
cuuccugaguagcugggacaacaggugugaac

SEQ ID NO: 145131 - RNA, 32 nt, Human
cuuccugaguagcugggacuacaggagcgcgc

SEQ ID NO: 145132 - RNA, 32 nt, Human
cuuccugaguagcugggacuacaggcacccgc

SEQ ID NO: 145133 - RNA, 32 nt, Human
cuuccugaguagcugggacuacaggugcgcac

SEQ ID NO: 145134 - RNA, 32 nt, Human
cuuccugaguagcugggacuacagguguacac

SEQ ID NO: 145135 - RNA, 32 nt, Human
cuuccugaguagcugggaggacaggcaugcgc

SEQ ID NO: 145136 - RNA, 32 nt, Human
cuuccugaguagcugggauuacaggagcaugc

SEQ ID NO: 145137 - RNA, 32 nt, Human
cuuccugaguagcugggauuacaggcagccac

SEQ ID NO: 145138 - RNA, 32 nt, Human
cuuccugaguagcugggauuacaggcgcccgc

SEQ ID NO: 145139 - RNA, 32 nt, Human
cuuccugaguagcugggauuacaggugcgcac

SEQ ID NO: 145140 - RNA, 32 nt, Human
cuuccugaguaggugggauuacaagcaugcac

SEQ ID NO: 145141 - RNA, 32 nt, Human
cuuccugaguaguugggaauacaggcaugcgc

SEQ ID NO: 145142 - RNA, 32 nt, Human
cuuccugaguuggggcaccagaaagaacagac

SEQ ID NO: 145143 - RNA, 32 nt, Human
cuuccugaugccaguucuucugggaagcgcag

SEQ ID NO: 145144 - RNA, 32 nt, Human
cuuccugauguauccuuagugaagacaauagu

SEQ ID NO: 145145 - RNA, 32 nt, Human
cuuccugauucuucccuucuguaaaguguaca

SEQ ID NO: 145146 - RNA, 32 nt, Human
cuuccugcaagaccugcagaguguaugacaca

SEQ ID NO: 145147 - RNA, 32 nt, Human
cuuccugcacagcuuugccuucccagggaucg

SEQ ID NO: 145148 - RNA, 32 nt, Human
cuuccugcacccugcgucaccaccuccggggg

SEQ ID NO: 145149 - RNA, 32 nt, Human
cuuccugcacucaacuuaugaccucaguugau

SEQ ID NO: 145150 - RNA, 32 nt, Human
cuuccugcaggacucuaucccuggcuuccccu

SEQ ID NO: 145151 - RNA, 32 nt, Human
cuuccugcagggacuugggcccauggccuggg

SEQ ID NO: 145152 - RNA, 32 nt, Human
cuuccugcagggccugggaagggcuuugaggg

SEQ ID NO: 145153 - RNA, 21 nt, Human
cuuccugcagugccuggaaaa

SEQ ID NO: 145154 - RNA, 32 nt, Human
cuuccugcaucccccgacccucccagacagcu

SEQ ID NO: 145155 - RNA, 32 nt, Human
cuuccugcaugggagagcugucccuccuucuc

SEQ ID NO: 145156 - RNA, 32 nt, Human
cuuccugcauguauuucacugcaggcugaaga

SEQ ID NO: 145157 - RNA, 32 nt, Human
cuuccugcauuuucugaccggcuccaggaaua

SEQ ID NO: 145158 - RNA, 32 nt, Human
cuuccugccacacacuuccacccuaucacugg

SEQ ID NO: 145159 - RNA, 32 nt, Human
cuuccugccacccuuugggcucagaggagggu

SEQ ID NO: 145160 - RNA, 32 nt, Human
cuuccugccagccugcaccagggcuuucaggu

SEQ ID NO: 145161 - RNA, 31 nt, Human
cuuccugccaggcuccguuguagggguuaca

SEQ ID NO: 145162 - RNA, 32 nt, Human
cuuccugccaucauuccuccuuuucccacagg

SEQ ID NO: 145163 - RNA, 32 nt, Human
cuuccugccuccagaaugaugagaacauacau

SEQ ID NO: 145164 - RNA, 32 nt, Human
cuuccugccuccucaucucccuuaagcauccu

SEQ ID NO: 145165 - RNA, 32 nt, Human
cuuccugccucuccccuuccuccucugcucuu

SEQ ID NO: 145166 - RNA, 32 nt, Human
cuuccugccucugucagaucagaaagaggccu

SEQ ID NO: 145167 - RNA, 32 nt, Human
cuuccugccuguccccauggccugugucccca

SEQ ID NO: 145168 - RNA, 32 nt, Human
cuuccugccugugccccacaaggagcugccag

SEQ ID NO: 145169 - RNA, 25 nt, Human
cuuccugcgaggucucagagcgcug

SEQ ID NO: 145170 - RNA, 23 nt, Human
cuuccugcgccugccuucuccuu

SEQ ID NO: 145171 - RNA, 32 nt, Human
cuuccugcggcugcugcuggucugacugggaa

SEQ ID NO: 145172 - RNA, 32 nt, Human
cuuccugcuaagccuaauccaagccuuaccca

SEQ ID NO: 145173 - RNA, 32 nt, Human
cuuccugcucuucagaggucucaggccucugc

SEQ ID NO: 145174 - RNA, 32 nt, Human
cuuccugcugggaaaagcagaagagggagacu

SEQ ID NO: 145175 - RNA, 32 nt, Human
cuuccugcugugguggaaaugagggauacaua

SEQ ID NO: 145176 - RNA, 17 nt, Human
cuuccuggaaacagcau

SEQ ID NO: 145177 - RNA, 32 nt, Human
cuuccuggaaguggagaggauccuucugcuuu

SEQ ID NO: 145178 - RNA, 32 nt, Human
cuuccuggacacaccugcccuagcccucaccc

SEQ ID NO: 145179 - RNA, 32 nt, Human
cuuccuggacaggccagguggugggcauucuc

SEQ ID NO: 145180 - RNA, 32 nt, Human
cuuccuggagaugauggaggcucacagucaug

SEQ ID NO: 145181 - RNA, 32 nt, Human
cuuccuggagauggcuacaucccuacuaauau

SEQ ID NO: 145182 - RNA, 32 nt, Human
cuuccuggagccacagugcuuagagacaggcc

SEQ ID NO: 145183 - RNA, 32 nt, Human
cuuccuggagccagguccccacgcaugagcag

SEQ ID NO: 145184 - RNA, 32 nt, Human
cuuccuggagccugggcucuaggcugaggguc

SEQ ID NO: 145185 - RNA, 32 nt, Human
cuuccuggaggaacgacccugcccggcccccu

SEQ ID NO: 145186 - RNA, 32 nt, Human
cuuccuggaggaagaagggcuuagggugcugg

SEQ ID NO: 145187 - RNA, 32 nt, Human
cuuccuggaggcaugaggaaauggagccggcc

SEQ ID NO: 145188 - RNA, 22 nt, Human
cuuccuggaguuacaggugcuu

SEQ ID NO: 145189 - RNA, 20 nt, Human
cuuccuggaucugucuucca

SEQ ID NO: 145190 - RNA, 32 nt, Human
cuuccuggaugcauccuacuccuucauugugg

SEQ ID NO: 145191 - RNA, 32 nt, Human
cuuccuggauugaagugcacacucauggacuu

SEQ ID NO: 145192 - RNA, 32 nt, Human
cuuccuggcauccacccccaggcccaagggau

SEQ ID NO: 145193 - RNA, 32 nt, Human
cuuccuggccaacaugagguuucuccaucaag

SEQ ID NO: 145194 - RNA, 32 nt, Human
cuuccuggcccagucccugccucuccaccugc

SEQ ID NO: 145195 - RNA, 21 nt, Human
cuuccuggccuuggcuggccu

SEQ ID NO: 145196 - RNA, 21 nt, Human
cuuccuggcggcccaggccuu

SEQ ID NO: 145197 - RNA, 32 nt, Human
cuuccuggcuaacauggugaaaccccaucucu

SEQ ID NO: 145198 - RNA, 32 nt, Human
cuuccuggcuaccuccucugacaugcggucag

SEQ ID NO: 145199 - RNA, 32 nt, Human
cuuccuggcuccaacacugcugcuccagugca

SEQ ID NO: 145200 - RNA, 32 nt, Human
cuuccuggcucccacccagacauggaccagcc

SEQ ID NO: 145201 - RNA, 32 nt, Human
cuuccuggcugcaguccaggcccgugcuggcg

SEQ ID NO: 145202 - RNA, 32 nt, Human
cuuccuggcugcuucagggcucaggggcuccc

SEQ ID NO: 145203 - RNA, 32 nt, Human
cuuccuggcugggaaugaacuaaagcagaugu

SEQ ID NO: 145204 - RNA, 32 nt, Human
cuuccuggcuguagacucagguuaaggugaac

SEQ ID NO: 145205 - RNA, 32 nt, Human
cuuccuggcuucccucccacaggcucaagggc

SEQ ID NO: 145206 - RNA, 32 nt, Human
cuuccugggaaagagauaggagacagagaaag

SEQ ID NO: 145207 - RNA, 17 nt, Human
cuuccugggacagaaag

SEQ ID NO: 145208 - RNA, 16 nt, Human
cuuccugggacaggaa

SEQ ID NO: 145209 - RNA, 32 nt, Human
cuuccugggaggacaggcaggccagauggccc

SEQ ID NO: 145210 - RNA, 32 nt, Human
cuuccugggaggcaggugugggugaccggggc

SEQ ID NO: 145211 - RNA, 32 nt, Human
cuuccugggaggugucucugggggugggguga

SEQ ID NO: 145212 - RNA, 32 nt, Human
cuuccugggcccugccucuccaugccuguagg

SEQ ID NO: 145213 - RNA, 32 nt, Human
cuuccugggccuggcccuccucuccugacucc

SEQ ID NO: 145214 - RNA, 32 nt, Human
cuuccugggcugaccugcucccucgaggccag

SEQ ID NO: 145215 - RNA, 32 nt, Human
cuuccugggggaaauauacaaacuaauauauu

SEQ ID NO: 145216 - RNA, 32 nt, Human
cuuccugggggcaggguuccugccuuggaccc

SEQ ID NO: 145217 - RNA, 32 nt, Human
cuuccugggggcucuccagaccccucucuagg

SEQ ID NO: 145218 - RNA, 32 nt, Human
cuuccugggucuccacucuccgucuggccuaa

SEQ ID NO: 145219 - RNA, 32 nt, Human
cuuccugggucuccagcuuauagaugacagau

SEQ ID NO: 145220 - RNA, 32 nt, Human
cuuccugggucuucagcauucccucccaucau

SEQ ID NO: 145221 - RNA, 32 nt, Human
cuuccuggguucugcugagucuuccacaggcu

SEQ ID NO: 145222 - RNA, 32 nt, Human
cuuccuggucucaugaaccuagccucacugaa

SEQ ID NO: 145223 - RNA, 32 nt, Human
cuuccuggugucauugccauccuggguugaca

SEQ ID NO: 145224 - RNA, 32 nt, Human
cuuccuguagugccccucccauggcccagcag

SEQ ID NO: 145225 - RNA, 32 nt, Human
cuuccugucacccaggcuggaguacaguggcg

SEQ ID NO: 145226 - RNA, 32 nt, Human
cuuccugucccaaagaugcacaaugauaauga

SEQ ID NO: 145227 - RNA, 20 nt, Human
cuuccugucccugccuucga

SEQ ID NO: 145228 - RNA, 32 nt, Human
cuuccuguccgcccuucuccucugccauccag

SEQ ID NO: 145229 - RNA, 21 nt, Human
cuuccuguccugugcaggcgc

SEQ ID NO: 145230 - RNA, 32 nt, Human
cuuccugucuucuucuguucuucacgccccau

SEQ ID NO: 145231 - RNA, 32 nt, Human
cuuccugugauggaguagauuggggacagggu

SEQ ID NO: 145232 - RNA, 32 nt, Human
cuuccugugcaggccagccuggaccucugaca

SEQ ID NO: 145233 - RNA, 32 nt, Human
cuuccugugcccaccuuuucugccuuuugaga

SEQ ID NO: 145234 - RNA, 32 nt, Human
cuuccugugccgcccauucaccacuuucaccc

SEQ ID NO: 145235 - RNA, 32 nt, Human
cuuccugugccugccccugccugcugcccacc

SEQ ID NO: 145236 - RNA, 32 nt, Human
cuuccugugccuggcucaagcuggcugccugu

SEQ ID NO: 145237 - RNA, 32 nt, Human
cuuccuguggaaggcagaggcagugagggagg

SEQ ID NO: 145238 - RNA, 32 nt, Human
cuuccuguggccuaacacuuggacacugucac

SEQ ID NO: 145239 - RNA, 32 nt, Human
cuuccugugguguuuguggacguccucugccu

SEQ ID NO: 145240 - RNA, 32 nt, Human
cuuccugugugagccaccacacccagccuggg

SEQ ID NO: 145241 - RNA, 32 nt, Human
cuuccugugugcccucuccaucaccgagaucc

SEQ ID NO: 145242 - RNA, 32 nt, Human
cuuccugugugugcaucugucuccaaaugucc

SEQ ID NO: 145243 - RNA, 22 nt, Human
cuuccuguuaaaccccuguuaa

SEQ ID NO: 145244 - RNA, 32 nt, Human
cuuccuguuagccugugaaacuccuuuggaau

SEQ ID NO: 145245 - RNA, 32 nt, Human
cuuccuguuccucugcagcugaaggaugaugg

SEQ ID NO: 145246 - RNA, 32 nt, Human
cuuccuguuggauuccucuucaucuagaaagc

SEQ ID NO: 145247 - RNA, 32 nt, Human
cuuccuguuggcugucuggccuuggagcaggu

SEQ ID NO: 145248 - RNA, 32 nt, Human
cuuccuguuuuuccuguaccgggucaugguaa

SEQ ID NO: 145249 - RNA, 32 nt, Human
cuuccuuaacucucccccuuugcccuccgccc

SEQ ID NO: 145250 - RNA, 32 nt, Human
cuuccuuaaugucuucuauaccagaauguaaa

SEQ ID NO: 145251 - RNA, 32 nt, Human
cuuccuuacaucuuuguuuauccauaaacugu

SEQ ID NO: 145252 - RNA, 32 nt, Human
cuuccuuacgaagccugugacuuucgugacug

SEQ ID NO: 145253 - RNA, 32 nt, Human
cuuccuuacuccugcugcucugccauugccgc

SEQ ID NO: 145254 - RNA, 32 nt, Human
cuuccuuagcuuauaaauaacaugucauauac

SEQ ID NO: 145255 - RNA, 32 nt, Human
cuuccuuagguugaugcuggaggcagaauccc

SEQ ID NO: 145256 - RNA, 32 nt, Human
cuuccuucagucaagguuuccaggcagagcaa

SEQ ID NO: 145257 - RNA, 32 nt, Human
cuuccuucaguuccucacccaucagccagugg

SEQ ID NO: 145258 - RNA, 32 nt, Human
cuuccuucaugguccaagcaaauguuccaggu

SEQ ID NO: 145259 - RNA, 32 nt, Human
cuuccuucauuugaguaaauucacuaaauauu

SEQ ID NO: 145260 - RNA, 32 nt, Human
cuuccuuccagccugggcucuggcguguucua

SEQ ID NO: 145261 - RNA, 32 nt, Human
cuuccuuccaugaaugaacagucacagaagac

SEQ ID NO: 145262 - RNA, 21 nt, Human
cuuccuucccagaaaagucca

SEQ ID NO: 145263 - RNA, 32 nt, Human
cuuccuucccaucgcccugccucgcagccaga

SEQ ID NO: 145264 - RNA, 20 nt, Human
cuuccuuccccagcuccacu

SEQ ID NO: 145265 - RNA, 32 nt, Human
cuuccuuccccucccucccucacuuccucccu

SEQ ID NO: 145266 - RNA, 32 nt, Human
cuuccuuccccucugcugcugcugccucggaa

SEQ ID NO: 145267 - RNA, 32 nt, Human
cuuccuuccgaggagcuuucuggcugccuaaa

SEQ ID NO: 145268 - RNA, 18 nt, Human
cuuccuuccuccagcugg

SEQ ID NO: 145269 - RNA, 32 nt, Human
cuuccuuccucccaaguacucaccaaccccuu

SEQ ID NO: 145270 - RNA, 32 nt, Human
cuuccuuccucuuccucucuuaaaacuaucuu

SEQ ID NO: 145271 - RNA, 32 nt, Human
cuuccuuccuuaaucuuuuccuucccaaucau

SEQ ID NO: 145272 - RNA, 32 nt, Human
cuuccuuccuuaccuacucaagggcuuuuucu

SEQ ID NO: 145273 - RNA, 32 nt, Human
cuuccuuccuucauucccucuguccgucucuc

SEQ ID NO: 145274 - RNA, 32 nt, Human
cuuccuuccuucauuccuucauuccuuccuuu

SEQ ID NO: 145275 - RNA, 32 nt, Human
cuuccuuccuuccuuccucccuuccuucuuuc

SEQ ID NO: 145276 - RNA, 32 nt, Human
cuuccuuccuuccuuccuuccucucucuuucu

SEQ ID NO: 145277 - RNA, 32 nt, Human
cuuccuuccuuccuuccuuccuucccuuuucu

SEQ ID NO: 145278 - RNA, 32 nt, Human
cuuccuuccuucuuccuuccuccccuggcucc

SEQ ID NO: 145279 - RNA, 32 nt, Human
cuuccuuccuucuuuucuuuccuuccuuccuu

SEQ ID NO: 145280 - RNA, 32 nt, Human
cuuccuucuccucaucccuccccaaaacaaga

SEQ ID NO: 145281 - RNA, 32 nt, Human
cuuccuucuccucugucuucacuccuaugcag

SEQ ID NO: 145282 - RNA, 32 nt, Human
cuuccuucucuccuccuucuucauucuacacc

SEQ ID NO: 145283 - RNA, 22 nt, Human
cuuccuucucugcccccagccu

SEQ ID NO: 145284 - RNA, 21 nt, Human
cuuccuucucugccccuaccu

SEQ ID NO: 145285 - RNA, 32 nt, Human
cuuccuucugcagcagcuuucugcuucuuggg

SEQ ID NO: 145286 - RNA, 23 nt, Human
cuuccuucugccuccagggccug

SEQ ID NO: 145287 - RNA, 23 nt, Human
cuuccuucugccucccccgugcc

SEQ ID NO: 145288 - RNA, 24 nt, Human
cuuccuucugcuuuuuggagccug

SEQ ID NO: 145289 - RNA, 21 nt, Human
cuuccuucuguccacugucca

SEQ ID NO: 145290 - RNA, 23 nt, Human
cuuccuucugucucuggagaccc

SEQ ID NO: 145291 - RNA, 22 nt, Human
cuuccuucuguucccgggcucg

SEQ ID NO: 145292 - RNA, 32 nt, Human
cuuccuucuguuuucuguccauggcccuuaag

SEQ ID NO: 145293 - RNA, 32 nt, Human
cuuccuucuuccucucuuagaccagcuucccu

SEQ ID NO: 145294 - RNA, 32 nt, Human
cuuccuucuuucucccuccgccucccgagcac

SEQ ID NO: 145295 - RNA, 32 nt, Human
cuuccuucuuuucugugcuugcaucagugugg

SEQ ID NO: 145296 - RNA, 32 nt, Human
cuuccuucuuuucuuuccuuccuuccuucuuu

SEQ ID NO: 145297 - RNA, 32 nt, Human
cuuccuugaccuucuuguugccuguucauuuu

SEQ ID NO: 145298 - RNA, 32 nt, Human
cuuccuugagcaaguggagcugugggaauugc

SEQ ID NO: 145299 - RNA, 32 nt, Human
cuuccuugagcagcagccugagcguggagggc

SEQ ID NO: 145300 - RNA, 32 nt, Human
cuuccuugagcagugggcccaggccuggcccu

SEQ ID NO: 145301 - RNA, 32 nt, Human
cuuccuugccugagaucaccuagaaaggaacc

SEQ ID NO: 145302 - RNA, 32 nt, Human
cuuccuuggcauuugcaucacugccuucuguu

SEQ ID NO: 145303 - RNA, 32 nt, Human
cuuccuuggguguuuggugcuggcuccugggg

SEQ ID NO: 145304 - RNA, 32 nt, Human
cuuccuugguccucuagcagauuucucacuuu

SEQ ID NO: 145305 - RNA, 23 nt, Human
cuuccuuguacuuaguuuuuuca

SEQ ID NO: 145306 - RNA, 18 nt, Human
cuuccuugucccaccuca

SEQ ID NO: 145307 - RNA, 32 nt, Human
cuuccuuguccuugccccgccuggugaagcug

SEQ ID NO: 145308 - RNA, 32 nt, Human
cuuccuuguggucuauugugaaguaaaaagua

SEQ ID NO: 145309 - RNA, 32 nt, Human
cuuccuugugucagggcaggaggaggcugcuu

SEQ ID NO: 145310 - RNA, 32 nt, Human
cuuccuuguuaggucacaugucauaggagagu

SEQ ID NO: 145311 - RNA, 32 nt, Human
cuuccuuguuuucuccaaaaccaccugauagg

SEQ ID NO: 145312 - RNA, 32 nt, Human
cuuccuuguuuuuccuccuacuggucuccacc

SEQ ID NO: 145313 - RNA, 32 nt, Human
cuuccuuuaccccuucuccuccagcaguggca

SEQ ID NO: 145314 - RNA, 32 nt, Human
cuuccuuuagucucguccugugguguugaagg

SEQ ID NO: 145315 - RNA, 20 nt, Human
cuuccuuucaaacaggaaga

SEQ ID NO: 145316 - RNA, 32 nt, Human
cuuccuuucauuuccccagccuaggcaagggu

SEQ ID NO: 145317 - RNA, 32 nt, Human
cuuccuuuccaaccccuuccuuccuuuuccuc

SEQ ID NO: 145318 - RNA, 21 nt, Human
cuuccuuucccagcucuuccc

SEQ ID NO: 145319 - RNA, 17 nt, Human
cuuccuuuccccuggga

SEQ ID NO: 145320 - RNA, 22 nt, Human
cuuccuuuccugagcaggagga

SEQ ID NO: 145321 - RNA, 32 nt, Human
cuuccuuuccuuccuuucucuuccuucuuuuu

SEQ ID NO: 145322 - RNA, 32 nt, Human
cuuccuuucuaucauuccccugcccaccuccu

SEQ ID NO: 145323 - RNA, 32 nt, Human
cuuccuuucucccaaucuccauucccaaacuu

SEQ ID NO: 145324 - RNA, 32 nt, Human
cuuccuuucucccaugauuccucuggacugca

SEQ ID NO: 145325 - RNA, 32 nt, Human
cuuccuuucuguagcuggguuagagccugggu

SEQ ID NO: 145326 - RNA, 32 nt, Human
cuuccuuugauucuuuaccuccuucaccuucc

SEQ ID NO: 145327 - RNA, 32 nt, Human
cuuccuuugccuucugccaugacugugaagcc

SEQ ID NO: 145328 - RNA, 32 nt, Human
cuuccuuugguaggaauggccugaguuggcgu

SEQ ID NO: 145329 - RNA, 32 nt, Human
cuuccuuugucccgugcauaccccagacgggg

SEQ ID NO: 145330 - RNA, 21 nt, Human
cuuccuuuguuacagcuggga

SEQ ID NO: 145331 - RNA, 32 nt, Human
cuuccuuuuaaaucuccuggggcuuagaaucc

SEQ ID NO: 145332 - RNA, 32 nt, Human
cuuccuuuucccuccugcuucccuucagucuc

SEQ ID NO: 145333 - RNA, 32 nt, Human
cuuccuuuucccuucauucccuugagagucag

SEQ ID NO: 145334 - RNA, 32 nt, Human
cuuccuuuucucugagaaagguaauagauaac

SEQ ID NO: 145335 - RNA, 32 nt, Human
cuuccuuuugagggagcaaguccuucccuuuc

SEQ ID NO: 145336 - RNA, 32 nt, Human
cuuccuuuugcucuuuccuuccuuccuucuuc

SEQ ID NO: 145337 - RNA, 25 nt, Human
cuuccuuuugucuuucugggcggcg

SEQ ID NO: 145338 - RNA, 21 nt, Human
cuuccuuuuuacagagagaga

SEQ ID NO: 145339 - RNA, 19 nt, Human
cuuccuuuuugagauauua

SEQ ID NO: 145340 - RNA, 32 nt, Human
cuuccuuuuuggaauguacgcuguuaugcuau

SEQ ID NO: 145341 - RNA, 32 nt, Human
cuucgaagacccagcagauguuuaaugaaguc

SEQ ID NO: 145342 - RNA, 32 nt, Human
cuucgaagcagcuguuggcaaguuggccaaga

SEQ ID NO: 145343 - RNA, 32 nt, Human
cuucgaaugcccaccuuugggcuuucccucuu

SEQ ID NO: 145344 - RNA, 32 nt, Human
cuucgaccauagcugcucggacagugucgagu

SEQ ID NO: 145345 - RNA, 32 nt, Human
cuucgaccauucucucaccuauagccaauugc

SEQ ID NO: 145346 - RNA, 32 nt, Human
cuucgacugcucccuucccccuucuuaugccc

SEQ ID NO: 145347 - RNA, 32 nt, Human
cuucgacuuauccugaggucaagccuuuuguc

SEQ ID NO: 145348 - RNA, 32 nt, Human
cuucgagagccagacagccugccuugugcugc

SEQ ID NO: 145349 - RNA, 32 nt, Human
cuucgagaggcugaguggggcagaucacuuga

SEQ ID NO: 145350 - RNA, 32 nt, Human
cuucgagccuagcugcucgcacaggacucggc

SEQ ID NO: 145351 - RNA, 32 nt, Human
cuucgagcgcgaucuacucggccccgccgguc

SEQ ID NO: 145352 - RNA, 32 nt, Human
cuucgauaccaaaaucaggagcaucuugggau

SEQ ID NO: 145353 - RNA, 32 nt, Human
cuucgcaacugugccagcacuucccuagcaaa

SEQ ID NO: 145354 - RNA, 32 nt, Human
cuucgcacuuugcccucugccugguggggagg

SEQ ID NO: 145355 - RNA, 20 nt, Human
cuucgcagcuugucucuuca

SEQ ID NO: 145356 - RNA, 32 nt, Human
cuucgccaacaugaccagccuggugcaccuca

SEQ ID NO: 145357 - RNA, 19 nt, Human
cuucgccaagggggugcag

SEQ ID NO: 145358 - RNA, 32 nt, Human
cuucgccaaucacagugcagcaaggccaauuc

SEQ ID NO: 145359 - RNA, 32 nt, Human
cuucgccagcagcggggugggaggaaggacau

SEQ ID NO: 145360 - RNA, 32 nt, Human
cuucgccagcagcucugugguucaaguuuccu

SEQ ID NO: 145361 - RNA, 32 nt, Human
cuucgccaggccaguguguagaacagcugguc

SEQ ID NO: 145362 - RNA, 32 nt, Human
cuucgcccaaguuuggggacaggcuucaccca

SEQ ID NO: 145363 - RNA, 32 nt, Human
cuucgcccaguucccugcauccuaagacucga

SEQ ID NO: 145364 - RNA, 32 nt, Human
cuucgcccgcagguuccugcucugccuucaga

SEQ ID NO: 145365 - RNA, 32 nt, Human
cuucgcccgcgcugcccgcccugggcccgcug

SEQ ID NO: 145366 - RNA, 32 nt, Human
cuucgcccugacaccugcuucuaaugagaaau

SEQ ID NO: 145367 - RNA, 32 nt, Human
cuucgcccugcuggcccucuccucccugcccu

SEQ ID NO: 145368 - RNA, 32 nt, Human
cuucgcccugucuggcacagggagacaauucc

SEQ ID NO: 145369 - RNA, 32 nt, Human
cuucgcccuguguccuuccauuuccugucuuu

SEQ ID NO: 145370 - RNA, 20 nt, Human
cuucgccgccgccgccgccg

SEQ ID NO: 145371 - RNA, 32 nt, Human
cuucgccuccacccuccguccagcgcccuucc

SEQ ID NO: 145372 - RNA, 32 nt, Human
cuucgccugccugucccucugcuccggccccc

SEQ ID NO: 145373 - RNA, 32 nt, Human
cuucgccugcuggccuuaccugggcuccccgc

SEQ ID NO: 145374 - RNA, 32 nt, Human
cuucgccugcuuuuucucaggcugcccugagg

SEQ ID NO: 145375 - RNA, 32 nt, Human
cuucgccugggaauuggcaaugaugaagccag

SEQ ID NO: 145376 - RNA, 32 nt, Human
cuucgcgacacaccagauccucgccccuggcu

SEQ ID NO: 145377 - RNA, 32 nt, Human
cuucgcggaccucagcccugcagcuggagggc

SEQ ID NO: 145378 - RNA, 32 nt, Human
cuucgcuauuaaauaaagaaaauuggaugcaa

SEQ ID NO: 145379 - RNA, 32 nt, Human
cuucgcucacuucaaccucugccuucuggguu

SEQ ID NO: 145380 - RNA, 23 nt, Human
cuucgcuccacaccgcagcgcag

SEQ ID NO: 145381 - RNA, 32 nt, Human
cuucgcuccuaaguccucacgcagcacagggc

SEQ ID NO: 145382 - RNA, 32 nt, Human
cuucgcucuugacuugaccagaaauccagcac

SEQ ID NO: 145383 - RNA, 32 nt, Human
cuucgcucuuucucuuccugccuuuccucuau

SEQ ID NO: 145384 - RNA, 32 nt, Human
cuucgcugcaggaagcagguuuguuucuuuuu

SEQ ID NO: 145385 - RNA, 32 nt, Human
cuucgcugcccuccuccuccccuacccugccc

SEQ ID NO: 145386 - RNA, 21 nt, Human
cuucgcuggggcggggcgcag

SEQ ID NO: 145387 - RNA, 32 nt, Human
cuucgcuucccuggcccugguccgccgcuacc

SEQ ID NO: 145388 - RNA, 32 nt, Human
cuucgcuuccuggaacuugcucucauuuuccu

SEQ ID NO: 145389 - RNA, 32 nt, Human
cuucgcuuuccagcaccagcuccuggggguca

SEQ ID NO: 145390 - RNA, 32 nt, Human
cuucgcuuuuuccuccuccuccucucccggcc

SEQ ID NO: 145391 - RNA, 32 nt, Human
cuucggagacccaggauuuagggucacaugcu

SEQ ID NO: 145392 - RNA, 32 nt, Human
cuucggaguagcugggauuacaggcaggugcc

SEQ ID NO: 145393 - RNA, 32 nt, Human
cuucggaguggcugggauuacaggugugcgcc

SEQ ID NO: 145394 - RNA, 32 nt, Human
cuucggaugaaucccuggaaagcagagaggca

SEQ ID NO: 145395 - RNA, 32 nt, Human
cuucggauuuuccucccuuuguucgggguuug

SEQ ID NO: 145396 - RNA, 32 nt, Human
cuucggcacagccccggcuccggcuccugcgg

SEQ ID NO: 145397 - RNA, 32 nt, Human
cuucggcagagguagagcaggucucucugcag

SEQ ID NO: 145398 - RNA, 32 nt, Human
cuucggcagcacugccucugcccaccugccuu

SEQ ID NO: 145399 - RNA, 32 nt, Human
cuucggcagccuuagggaacccagaaaguagu

SEQ ID NO: 145400 - RNA, 18 nt, Human
cuucggccgccgcucccg

SEQ ID NO: 145401 - RNA, 32 nt, Human
cuucggccucagaauggggccugcacuguagc

SEQ ID NO: 145402 - RNA, 32 nt, Human
cuucggcgauuugggcugggcgcggugauuca

SEQ ID NO: 145403 - RNA, 32 nt, Human
cuucggcgccaugcagggguugggguugggac

SEQ ID NO: 145404 - RNA, 32 nt, Human
cuucggcguucccaguacugccucgucugucc

SEQ ID NO: 145405 - RNA, 32 nt, Human
cuucggcucgagccugcgaccugcacggacac

SEQ ID NO: 145406 - RNA, 32 nt, Human
cuucgggaaacacacauauacacauacaccau

SEQ ID NO: 145407 - RNA, 32 nt, Human
cuucgggaggcagaauugaagugaacaugaag

SEQ ID NO: 145408 - RNA, 32 nt, Human
cuucgggaggccgagacaggcagaucacgagg

SEQ ID NO: 145409 - RNA, 32 nt, Human
cuucgggaggcugaagcaagcagaucacuuga

SEQ ID NO: 145410 - RNA, 32 nt, Human
cuucgggaggcugaagugggaagauccaggag

SEQ ID NO: 145411 - RNA, 32 nt, Human
cuucgggaggcugaggcagguggaucacuuga

SEQ ID NO: 145412 - RNA, 32 nt, Human
cuucgggaggcugaggugggcggaucaccuga

SEQ ID NO: 145413 - RNA, 32 nt, Human
cuucgggaggucgaggcaggaggaucacuuga

SEQ ID NO: 145414 - RNA, 32 nt, Human
cuucgggaggugggggcacuccacacuggggg

SEQ ID NO: 145415 - RNA, 32 nt, Human
cuucgggcacaggcacgggcacagcccuacuu

SEQ ID NO: 145416 - RNA, 32 nt, Human
cuucgggcccucucauccuucauuccauuaaa

SEQ ID NO: 145417 - RNA, 32 nt, Human
cuucgggccuccaggauauguuugcgggggug

SEQ ID NO: 145418 - RNA, 32 nt, Human
cuucgggccucgagauccucuacccuucucug

SEQ ID NO: 145419 - RNA, 21 nt, Human
cuucggggaaaggaccuugua

SEQ ID NO: 145420 - RNA, 32 nt, Human
cuucggggaggcggagggcgcgucggguuugg

SEQ ID NO: 145421 - RNA, 32 nt, Human
cuucggggcugcagccucaggaugaggcagaa

SEQ ID NO: 145422 - RNA, 32 nt, Human
cuucggggugagcccccagagcuggaccugag

SEQ ID NO: 145423 - RNA, 32 nt, Human
cuucggucauuagaggaaugagccgggaguga

SEQ ID NO: 145424 - RNA, 32 nt, Human
cuucggucauuucacucaacagcucggcccag

SEQ ID NO: 145425 - RNA, 32 nt, Human
cuucgguccacggcuaggaagcagcugauuau

SEQ ID NO: 145426 - RNA, 32 nt, Human
cuucggucucuucuccccggcugaucccagca

SEQ ID NO: 145427 - RNA, 32 nt, Human
cuucggugaaguucuuuuguacuuccaaaugu

SEQ ID NO: 145428 - RNA, 32 nt, Human
cuucgguggaaaugcauuugcguagcaccacc

SEQ ID NO: 145429 - RNA, 32 nt, Human
cuucgguguaggaaaaaugaaaaccaaacuca

SEQ ID NO: 145430 - RNA, 32 nt, Human
cuucgguguuugaacaggccacaguccaggag

SEQ ID NO: 145431 - RNA, 21 nt, Human
cuucgguuccucugauuucaa

SEQ ID NO: 145432 - RNA, 32 nt, Human
cuucgguugucaucugugccaucuguccaugg

SEQ ID NO: 145433 - RNA, 32 nt, Human
cuucgguuguuccagcuccuucugaauacaca

SEQ ID NO: 145434 - RNA, 32 nt, Human
cuucgguuucaucucuaggcauggaagauggu

SEQ ID NO: 145435 - RNA, 32 nt, Human
cuucguaaggaguaagcagauuuggaaaacaa

SEQ ID NO: 145436 - RNA, 32 nt, Human
cuucguaaugaauuuucuuuacauccugucca

SEQ ID NO: 145437 - RNA, 32 nt, Human
cuucguagacacguugagcuucugccggguuu

SEQ ID NO: 145438 - RNA, 32 nt, Human
cuucguaucugguuucuuuucaccaauauuau

SEQ ID NO: 145439 - RNA, 32 nt, Human
cuucguauugccacaugucaauacucaggcau

SEQ ID NO: 145440 - RNA, 32 nt, Human
cuucgucaagcaagugcugaaggacuccucag

SEQ ID NO: 145441 - RNA, 32 nt, Human
cuucgucacccagccugugaggguccugacug

SEQ ID NO: 145442 - RNA, 32 nt, Human
cuucgucagccaagcaauuggcugccuuugcc

SEQ ID NO: 145443 - RNA, 32 nt, Human
cuucgucaugcugcguccagugccccaacccu

SEQ ID NO: 145444 - RNA, 32 nt, Human
cuucgucauggaccgagguucccacucugggc

SEQ ID NO: 145445 - RNA, 32 nt, Human
cuucgucccucagcguccuggguggcaaaugu

SEQ ID NO: 145446 - RNA, 32 nt, Human
cuucguccuccaccucucccuccaacgaaaca

SEQ ID NO: 145447 - RNA, 32 nt, Human
cuucgucgguggcagaggugggcgugggugcu

SEQ ID NO: 145448 - RNA, 32 nt, Human
cuucgucucccuuuuuguuccuuugccucuug

SEQ ID NO: 145449 - RNA, 32 nt, Human
cuucgucucucaggauggcgaguagcagcggc

SEQ ID NO: 145450 - RNA, 32 nt, Human
cuucgucuguucucaauuuggaaucaugaucu

SEQ ID NO: 145451 - RNA, 32 nt, Human
cuucgucuuccuccucuuccuccuccuccucu

SEQ ID NO: 145452 - RNA, 32 nt, Human
cuucgucuucugcugcugcucggcuggaccag

SEQ ID NO: 145453 - RNA, 32 nt, Human
cuucgucuuuggacacagguuccauuaugcag

SEQ ID NO: 145454 - RNA, 32 nt, Human
cuucgucuuuuuaaaugugucauuucacauua

SEQ ID NO: 145455 - RNA, 32 nt, Human
cuucgugacgcccacgggcgugcucaaggagg

SEQ ID NO: 145456 - RNA, 32 nt, Human
cuucgugcugugucucauggguuuccauagug

SEQ ID NO: 145457 - RNA, 32 nt, Human
cuucguggaaacauauggcugaugguggggac

SEQ ID NO: 145458 - RNA, 32 nt, Human
cuucguggccacucuuuacucaggagggccuu

SEQ ID NO: 145459 - RNA, 21 nt, Human
cuucguggccagcggggcgga

SEQ ID NO: 145460 - RNA, 32 nt, Human
cuucguggcgcugcugacagggccgaggucgc

SEQ ID NO: 145461 - RNA, 32 nt, Human
cuucgugggaucugccccucccugcuucaaua

SEQ ID NO: 145462 - RNA, 32 nt, Human
cuucgugggccuggccguuugcguuuggaugc

SEQ ID NO: 145463 - RNA, 32 nt, Human
cuucguggguuucccuggcaggcuugauggca

SEQ ID NO: 145464 - RNA, 32 nt, Human
cuucguggugugagcccugggcccuacugacc

SEQ ID NO: 145465 - RNA, 32 nt, Human
cuucgugucuuucuggaccccuuguccugcug

SEQ ID NO: 145466 - RNA, 32 nt, Human
cuucguguuugcugcuggagugacuguguguu

SEQ ID NO: 145467 - RNA, 32 nt, Human
cuucguuaggcagagagaggaagggauuccua

SEQ ID NO: 145468 - RNA, 32 nt, Human
cuucguucaagcgauucucccaccucagccuc

SEQ ID NO: 145469 - RNA, 32 nt, Human
cuucguucagccucccuccccaccucacccca

SEQ ID NO: 145470 - RNA, 32 nt, Human
cuucguucccaagcaaaagaaucagucaagaa

SEQ ID NO: 145471 - RNA, 32 nt, Human
cuucguuccuccucugcuucccuucccuaguc

SEQ ID NO: 145472 - RNA, 32 nt, Human
cuucguugcccaguuuccgcucaguggucgcg

SEQ ID NO: 145473 - RNA, 32 nt, Human
cuucuaaaaauacaaaaauuacccaggcgugg

SEQ ID NO: 145474 - RNA, 32 nt, Human
cuucuaaaaauacaaaaauuagcugggugugg

SEQ ID NO: 145475 - RNA, 32 nt, Human
cuucuaaaaauacaaacauuagccgggcgugg

SEQ ID NO: 145476 - RNA, 32 nt, Human
cuucuaaaaauacaaauauuagcugggcgugg

SEQ ID NO: 145477 - RNA, 32 nt, Human
cuucuaaaauacugagauuacaggugugagcc

SEQ ID NO: 145478 - RNA, 32 nt, Human
cuucuaaaauauaguauuaggccaggcauggu

SEQ ID NO: 145479 - RNA, 32 nt, Human
cuucuaaagugcugggauuacaggcgugagcc

SEQ ID NO: 145480 - RNA, 32 nt, Human
cuucuaaagugcugggauuacaggcgugaguc

SEQ ID NO: 145481 - RNA, 32 nt, Human
cuucuaaagugcugggauuacaggugugagcc

SEQ ID NO: 145482 - RNA, 32 nt, Human
cuucuaacacccucagucagugacacacccau

SEQ ID NO: 145483 - RNA, 32 nt, Human
cuucuaacaggggaagucuguaugaaugcauc

SEQ ID NO: 145484 - RNA, 32 nt, Human
cuucuaacaguauuucucaaguacuuaacaaa

SEQ ID NO: 145485 - RNA, 21 nt, Human
cuucuaacgccacaacagcau

SEQ ID NO: 145486 - RNA, 32 nt, Human
cuucuaacuuugcuccaagccacucucuuuuu

SEQ ID NO: 145487 - RNA, 32 nt, Human
cuucuaagaguuuuccuguaaguaauuaagaa

SEQ ID NO: 145488 - RNA, 20 nt, Human
cuucuaagcagcugucuucc

SEQ ID NO: 145489 - RNA, 32 nt, Human
cuucuaaggacuaggagagcuccuuaucuguc

SEQ ID NO: 145490 - RNA, 32 nt, Human
cuucuaagggagccaugagggucugggcuuca

SEQ ID NO: 145491 - RNA, 32 nt, Human
cuucuaagugggacuccgagccugggcuauuu

SEQ ID NO: 145492 - RNA, 32 nt, Human
cuucuaaugagaugcaccccuuuacuaacuug

SEQ ID NO: 145493 - RNA, 32 nt, Human
cuucuacacccuucugcccucucuccauugcc

SEQ ID NO: 145494 - RNA, 32 nt, Human
cuucuacacucaggacccuucuggaccuugcc

SEQ ID NO: 145495 - RNA, 32 nt, Human
cuucuacagaagcagguugcagugagccgaga

SEQ ID NO: 145496 - RNA, 32 nt, Human
cuucuacagauggagaagcugaggcucagagg

SEQ ID NO: 145497 - RNA, 32 nt, Human
cuucuacagccaacaagaggccaucugagggc

SEQ ID NO: 145498 - RNA, 32 nt, Human
cuucuacaggacucccccaucuugcugacagc

SEQ ID NO: 145499 - RNA, 32 nt, Human
cuucuacagucaacugaagacuacccaaagga

SEQ ID NO: 145500 - RNA, 32 nt, Human
cuucuacagugaauccauauauuucuguauuu

SEQ ID NO: 145501 - RNA, 32 nt, Human
cuucuacaucacagcaagugacuucucagagg

SEQ ID NO: 145502 - RNA, 32 nt, Human
cuucuacauguauuuuucacaugaagaucucc

SEQ ID NO: 145503 - RNA, 32 nt, Human
cuucuacauugcuuuuucuuuuauuaucugug

SEQ ID NO: 145504 - RNA, 32 nt, Human
cuucuaccaccagggcaaggagcuggacugca

SEQ ID NO: 145505 - RNA, 32 nt, Human
cuucuaccuccuccugcuggccauucccugcu

SEQ ID NO: 145506 - RNA, 18 nt, Human
cuucuaccugcacgcucu

SEQ ID NO: 145507 - RNA, 32 nt, Human
cuucuaccugccuccacccaggagacugaugc

SEQ ID NO: 145508 - RNA, 32 nt, Human
cuucuacuccacugcugucuaucuugccugcc

SEQ ID NO: 145509 - RNA, 32 nt, Human
cuucuacugaacaucuugcuauguacuaaggc

SEQ ID NO: 145510 - RNA, 32 nt, Human
cuucuacuggcauucacugaagccacuggggu

SEQ ID NO: 145511 - RNA, 32 nt, Human
cuucuacuggguaccugcugugagucugccua

SEQ ID NO: 145512 - RNA, 32 nt, Human
cuucuacuuccagaugcagugccucuuuugga

SEQ ID NO: 145513 - RNA, 32 nt, Human
cuucuacuugggaguggcaggagaagugagaa

SEQ ID NO: 145514 - RNA, 31 nt, Human
cuucuacuuguguccauuugaagcaggaggg

SEQ ID NO: 145515 - RNA, 32 nt, Human
cuucuacuuuggcugcuaucgccgccgccgcg

SEQ ID NO: 145516 - RNA, 32 nt, Human
cuucuagaaccucugcacaucuagccucuggc

SEQ ID NO: 145517 - RNA, 32 nt, Human
cuucuagaccaaggacccauuguuaaaagcau

SEQ ID NO: 145518 - RNA, 32 nt, Human
cuucuagacuguaacccugccucccugcuucc

SEQ ID NO: 145519 - RNA, 32 nt, Human
cuucuagagacacuugccacaucucaaggcaa

SEQ ID NO: 145520 - RNA, 32 nt, Human
cuucuagagagaagaaaaaggcuggguuugga

SEQ ID NO: 145521 - RNA, 32 nt, Human
cuucuagagccccagcugcuggcggcugcugg

SEQ ID NO: 145522 - RNA, 32 nt, Human
cuucuagaggcuggcugcauucccaggcucca

SEQ ID NO: 145523 - RNA, 32 nt, Human
cuucuagaucaguguaaauaucugaacucacu

SEQ ID NO: 145524 - RNA, 32 nt, Human
cuucuagauuccauuugguaaggaaaucaaua

SEQ ID NO: 145525 - RNA, 16 nt, Human
cuucuagcaauagcau

SEQ ID NO: 145526 - RNA, 32 nt, Human
cuucuagcagucaucugagaugagcaccauau

SEQ ID NO: 145527 - RNA, 32 nt, Human
cuucuagcaguuucuugccaccaugucggaaa

SEQ ID NO: 145528 - RNA, 32 nt, Human
cuucuagccaggcugggcugccagugccaugc

SEQ ID NO: 145529 - RNA, 32 nt, Human
cuucuagccuccagaauggugagaaauaaaua

SEQ ID NO: 145530 - RNA, 32 nt, Human
cuucuagccucugacccagucuggucuggcuu

SEQ ID NO: 145531 - RNA, 32 nt, Human
cuucuagcucacugcacucacucuggucauga

SEQ ID NO: 145532 - RNA, 32 nt, Human
cuucuagcucucagagaguccagaugaacacc

SEQ ID NO: 145533 - RNA, 32 nt, Human
cuucuaggacaaccccaccagcaaggaggucu

SEQ ID NO: 145534 - RNA, 32 nt, Human
cuucuaggacagcauuucucaaacuuuaaugu

SEQ ID NO: 145535 - RNA, 32 nt, Human
cuucuaggagccaaguaggaggaggcugggau

SEQ ID NO: 145536 - RNA, 32 nt, Human
cuucuaggcaggcagcagguccugguuuguga

SEQ ID NO: 145537 - RNA, 32 nt, Human
cuucuagggcaggcuggguggugguccccuag

SEQ ID NO: 145538 - RNA, 32 nt, Human
cuucuagggccaaggucauggccacauagccc

SEQ ID NO: 145539 - RNA, 32 nt, Human
cuucuaggguucaguaggucucagucgauccc

SEQ ID NO: 145540 - RNA, 32 nt, Human
cuucuagguguuuucgccaucaggguguauug

SEQ ID NO: 145541 - RNA, 32 nt, Human
cuucuagguuuucuuggcccagcacugcccau

SEQ ID NO: 145542 - RNA, 32 nt, Human
cuucuaguccuagcuacucagaagacugaggc

SEQ ID NO: 145543 - RNA, 32 nt, Human
cuucuaguuaucuccuguuuucuugaagaaca

SEQ ID NO: 145544 - RNA, 32 nt, Human
cuucuaguucccaaaggcgauguccagacaca

SEQ ID NO: 145545 - RNA, 32 nt, Human
cuucuaguuuaagauacaaucauuuuaugagu

SEQ ID NO: 145546 - RNA, 21 nt, Human
cuucuauaacagaacagcauc

SEQ ID NO: 145547 - RNA, 32 nt, Human
cuucuauaccugcuccccuucccccagugggg

SEQ ID NO: 145548 - RNA, 32 nt, Human
cuucuauaggagcacagggcccagggaggugc

SEQ ID NO: 145549 - RNA, 32 nt, Human
cuucuauagggagggggcaggagaccuuccag

SEQ ID NO: 145550 - RNA, 32 nt, Human
cuucuaucaaauaccuuauuuuaccuuacaga

SEQ ID NO: 145551 - RNA, 32 nt, Human
cuucuaucaaauacuaguauuaauuuauguau

SEQ ID NO: 145552 - RNA, 32 nt, Human
cuucuaucacugggguuucccauguugcagca

SEQ ID NO: 145553 - RNA, 32 nt, Human
cuucuauccgcuccuggugacuaugccacacu

SEQ ID NO: 145554 - RNA, 32 nt, Human
cuucuaucuccccucuauacuuccucugcagc

SEQ ID NO: 145555 - RNA, 32 nt, Human
cuucuaucuuggcugccaucaucccucccagc

SEQ ID NO: 145556 - RNA, 32 nt, Human
cuucuaugaccaggccuuaagggaaggucagu

SEQ ID NO: 145557 - RNA, 31 nt, Human
cuucuaugacuucugccauuucaaagacuca

SEQ ID NO: 145558 - RNA, 32 nt, Human
cuucuaugauccuuuguccaucauguuguuga

SEQ ID NO: 145559 - RNA, 32 nt, Human
cuucuauggaggacuccucucuucugcuucug

SEQ ID NO: 145560 - RNA, 32 nt, Human
cuucuaugugccagaccugggccaggugccug

SEQ ID NO: 145561 - RNA, 32 nt, Human
cuucuauuaauaaaacuacauuucucaaacuu

SEQ ID NO: 145562 - RNA, 32 nt, Human
cuucuauucaccauuuucccugccucuauuuu

SEQ ID NO: 145563 - RNA, 32 nt, Human
cuucuauucuagagugguaaacucucuauaag

SEQ ID NO: 145564 - RNA, 32 nt, Human
cuucuauugugcuuuguuuuugcugacuuuuc

SEQ ID NO: 145565 - RNA, 32 nt, Human
cuucucaaaccgccggccacacuggucacagg

SEQ ID NO: 145566 - RNA, 32 nt, Human
cuucucaaagacagaagugauauuuuuaacaa

SEQ ID NO: 145567 - RNA, 32 nt, Human
cuucucaaaguacugggauuauauaggcauga

SEQ ID NO: 145568 - RNA, 32 nt, Human
cuucucaaagugcugggauuacaggcgugagc

SEQ ID NO: 145569 - RNA, 32 nt, Human
cuucucaaaguggggguggagacucugauuuu

SEQ ID NO: 145570 - RNA, 32 nt, Human
cuucucaaaguucugggacuacaggcaugaaa

SEQ ID NO: 145571 - RNA, 32 nt, Human
cuucucaacugcccugaauuuguuccccguca

SEQ ID NO: 145572 - RNA, 32 nt, Human
cuucucaacuuugccagcuuucuccaaugaaa

SEQ ID NO: 145573 - RNA, 32 nt, Human
cuucucaacuuuuauuuaagcugugcuaaaug

SEQ ID NO: 145574 - RNA, 32 nt, Human
cuucucaagggaggguaagggggcacccugag

SEQ ID NO: 145575 - RNA, 32 nt, Human
cuucucaaugccuccaccuagaaguugaauug

SEQ ID NO: 145576 - RNA, 19 nt, Human
cuucucaauuaucaucaua

SEQ ID NO: 145577 - RNA, 22 nt, Human
cuucucaauuccucuuuauaua

SEQ ID NO: 145578 - RNA, 32 nt, Human
cuucucacacuggccuuaagaggccuccacuc

SEQ ID NO: 145579 - RNA, 32 nt, Human
cuucucacagcucaaagauaacagugaucaca

SEQ ID NO: 145580 - RNA, 32 nt, Human
cuucucacccaccccuuccucuuuggcacagc

SEQ ID NO: 145581 - RNA, 32 nt, Human
cuucucacccuccacccucugccuugcaauac

SEQ ID NO: 145582 - RNA, 32 nt, Human
cuucucaccgugagauuuucucagccagugau

SEQ ID NO: 145583 - RNA, 32 nt, Human
cuucucaccugcuccaggagguuugcagggag

SEQ ID NO: 145584 - RNA, 32 nt, Human
cuucucaccuuaaauagucauauauuaauuaa

SEQ ID NO: 145585 - RNA, 32 nt, Human
cuucucaccuuuuccauaaccaugucuaggcc

SEQ ID NO: 145586 - RNA, 32 nt, Human
cuucucacgaccuccuggaauauuccuauuga

SEQ ID NO: 145587 - RNA, 32 nt, Human
cuucucacgccuguaaucccagcacuuuggga

SEQ ID NO: 145588 - RNA, 32 nt, Human
cuucucacuacugcacuugacuagucuuaaaa

SEQ ID NO: 145589 - RNA, 32 nt, Human
cuucucacuacugcacuugacuagucuuuuua

SEQ ID NO: 145590 - RNA, 32 nt, Human
cuucucacucccucaaccucagccaggcccuc

SEQ ID NO: 145591 - RNA, 32 nt, Human
cuucucacugcaccuggauggcaacgugcugg

SEQ ID NO: 145592 - RNA, 32 nt, Human
cuucucacugguuuuuccaccuuccuccuucc

SEQ ID NO: 145593 - RNA, 32 nt, Human
cuucucacuucacuuuucaacgcaggaccucu

SEQ ID NO: 145594 - RNA, 32 nt, Human
cuucucacuucagacacauacaucacuuucac

SEQ ID NO: 145595 - RNA, 32 nt, Human
cuucucagacgucaggagagugaugugaggga

SEQ ID NO: 145596 - RNA, 32 nt, Human
cuucucagagcagcacugggguuugggggcuu

SEQ ID NO: 145597 - RNA, 32 nt, Human
cuucucagagggcugcugucuugccccacuau

SEQ ID NO: 145598 - RNA, 32 nt, Human
cuucucagccuccaaauucauaacucuaauac

SEQ ID NO: 145599 - RNA, 32 nt, Human
cuucucagccucccaggugccuugagcccucu

SEQ ID NO: 145600 - RNA, 31 nt, Human
cuucucagccuugccaaagccagugaagcca

SEQ ID NO: 145601 - RNA, 32 nt, Human
cuucucagcugggaagagaggaugcaagacca

SEQ ID NO: 145602 - RNA, 32 nt, Human
cuucucaggaggcugagacaggagaaucgcuu

SEQ ID NO: 145603 - RNA, 32 nt, Human
cuucucaggagucugaggcaggagaauugcuu

SEQ ID NO: 145604 - RNA, 32 nt, Human
cuucucaggauccucaacuucuugccugguug

SEQ ID NO: 145605 - RNA, 32 nt, Human
cuucucaggaucugcugccucuuguuccaagg

SEQ ID NO: 145606 - RNA, 32 nt, Human
cuucucaggccugcuccccacccucuauggcu

SEQ ID NO: 145607 - RNA, 32 nt, Human
cuucucaggcucacugagugcaaugucugccu

SEQ ID NO: 145608 - RNA, 32 nt, Human
cuucucaggggagucucagagcaggagccucu

SEQ ID NO: 145609 - RNA, 32 nt, Human
cuucucaggugccgucacccccaaaccucagc

SEQ ID NO: 145610 - RNA, 32 nt, Human
cuucucagguuccucagugcaggggugcauca

SEQ ID NO: 145611 - RNA, 32 nt, Human
cuucucagucucuagacuucccuguuauaugu

SEQ ID NO: 145612 - RNA, 32 nt, Human
cuucucagugggcacagucucuuacucccauu

SEQ ID NO: 145613 - RNA, 32 nt, Human
cuucucaguugaguuuuuaaucucacuuuggg

SEQ ID NO: 145614 - RNA, 32 nt, Human
cuucucaguuuauaaugggggaaaacaggcaa

SEQ ID NO: 145615 - RNA, 32 nt, Human
cuucucauagccuuucuuugcuaaggacauug

SEQ ID NO: 145616 - RNA, 32 nt, Human
cuucucauaucugccuugucccugcacagccu

SEQ ID NO: 145617 - RNA, 32 nt, Human
cuucucauccacccucuggcacccagccucug

SEQ ID NO: 145618 - RNA, 32 nt, Human
cuucucauccacccuggcagcuaguagguucu

SEQ ID NO: 145619 - RNA, 32 nt, Human
cuucucauccccaagcucuccagucaacacag

SEQ ID NO: 145620 - RNA, 32 nt, Human
cuucucaucccccagccacaguggccaaagag

SEQ ID NO: 145621 - RNA, 32 nt, Human
cuucucaucgcuaacaccaccaccuccaucgg

SEQ ID NO: 145622 - RNA, 24 nt, Human
cuucucaucuccccacgccccguc

SEQ ID NO: 145623 - RNA, 19 nt, Human
cuucucaucucucccuucg

SEQ ID NO: 145624 - RNA, 32 nt, Human
cuucucaucugcaaaaugaaaaugucaauacu

SEQ ID NO: 145625 - RNA, 18 nt, Human
cuucucaucuguuuccca

SEQ ID NO: 145626 - RNA, 32 nt, Human
cuucucauggaugucuuucuaggcuuauaaau

SEQ ID NO: 145627 - RNA, 32 nt, Human
cuucucauggcugacucaggccuggggcaucu

SEQ ID NO: 145628 - RNA, 32 nt, Human
cuucucauuuguguccuucauuauagauuuuc

SEQ ID NO: 145629 - RNA, 21 nt, Human
cuucucauuuguuucugcacu

SEQ ID NO: 145630 - RNA, 32 nt, Human
cuucucauuuucuaucagauaagaaucacauu

SEQ ID NO: 145631 - RNA, 32 nt, Human
cuucuccaaacugcacacccugggugacaggc

SEQ ID NO: 145632 - RNA, 23 nt, Human
cuucuccaaaugauguuaucuua

SEQ ID NO: 145633 - RNA, 32 nt, Human
cuucuccaacaaccucuccaccaucuacccgg

SEQ ID NO: 145634 - RNA, 20 nt, Human
cuucuccaagcgccugcagg

SEQ ID NO: 145635 - RNA, 32 nt, Human
cuucuccacaauaucagcauuuaguuuaagca

SEQ ID NO: 145636 - RNA, 32 nt, Human
cuucuccacagaggaggacagagcagacagca

SEQ ID NO: 145637 - RNA, 32 nt, Human
cuucuccacagccccagcuucgcacaggcucc

SEQ ID NO: 145638 - RNA, 32 nt, Human
cuucuccaccaccaccaccuuccuuccuuccc

SEQ ID NO: 145639 - RNA, 32 nt, Human
cuucuccaccucuucuuuuucucaugcccugc

SEQ ID NO: 145640 - RNA, 32 nt, Human
cuucuccacugagggacugggcugggaagucc

SEQ ID NO: 145641 - RNA, 32 nt, Human
cuucuccacuggcugggaucccccgggcucgg

SEQ ID NO: 145642 - RNA, 32 nt, Human
cuucuccacuugcccaugcacaguagggucuu

SEQ ID NO: 145643 - RNA, 22 nt, Human
cuucuccagaagcuuacuuccu

SEQ ID NO: 145644 - RNA, 32 nt, Human
cuucuccagacuguucuuugguugucacuuaa

SEQ ID NO: 145645 - RNA, 32 nt, Human
cuucuccagcaucaccuggccgagacggaccu

SEQ ID NO: 145646 - RNA, 32 nt, Human
cuucuccagcaucaccuggccgagacgggccu

SEQ ID NO: 145647 - RNA, 32 nt, Human
cuucuccagcccccuccuucccucucuucugc

SEQ ID NO: 145648 - RNA, 23 nt, Human
cuucuccaggccaaucauccuua

SEQ ID NO: 145649 - RNA, 32 nt, Human
cuucuccagggugggacccagaguuacuggcc

SEQ ID NO: 145650 - RNA, 24 nt, Human
cuucuccaggucauaugugccuua

SEQ ID NO: 145651 - RNA, 32 nt, Human
cuucuccaugccacuacucugaggccuccugu

SEQ ID NO: 145652 - RNA, 32 nt, Human
cuucuccaugcugugccaauggcuggcuuuuu

SEQ ID NO: 145653 - RNA, 32 nt, Human
cuucucccaacauucuguuauuucugauacuu

SEQ ID NO: 145654 - RNA, 32 nt, Human
cuucucccaagugggcagcagcagcagcuucu

SEQ ID NO: 145655 - RNA, 32 nt, Human
cuucucccacaagcccccuacagggaacaacu

SEQ ID NO: 145656 - RNA, 24 nt, Human
cuucucccacggcuucaccucccu

SEQ ID NO: 145657 - RNA, 32 nt, Human
cuucucccacuauuuuucacauggugacuuag

SEQ ID NO: 145658 - RNA, 32 nt, Human
cuucucccagccuccgcccugcccucacccag

SEQ ID NO: 145659 - RNA, 32 nt, Human
cuucucccaggccucugccccaagagcaggag

SEQ ID NO: 145660 - RNA, 32 nt, Human
cuucucccaguucuaccuccccagaagccuuc

SEQ ID NO: 145661 - RNA, 32 nt, Human
cuucucccauguugccauuuuugagguguaca

SEQ ID NO: 145662 - RNA, 32 nt, Human
cuucucccauuucucccuaugggugccugacc

SEQ ID NO: 145663 - RNA, 32 nt, Human
cuucuccccacccuccagaagggguccacguu

SEQ ID NO: 145664 - RNA, 32 nt, Human
cuucuccccagaggaacuuagagauuucaccc

SEQ ID NO: 145665 - RNA, 32 nt, Human
cuucuccccagccuccuccagggcugcccaag

SEQ ID NO: 145666 - RNA, 32 nt, Human
cuucuccccaguccuccagcccaggagggagc

SEQ ID NO: 145667 - RNA, 32 nt, Human
cuucuccccauagcgacucuucugccuggacu

SEQ ID NO: 145668 - RNA, 32 nt, Human
cuucuccccaucagagcucucccuuuaaacua

SEQ ID NO: 145669 - RNA, 32 nt, Human
cuucucccccaaaugucugccugcugcagccc

SEQ ID NO: 145670 - RNA, 32 nt, Human
cuucucccccuuccccugugcucccuuucucu

SEQ ID NO: 145671 - RNA, 32 nt, Human
cuucuccccugcacucugcucccugcgcggua

SEQ ID NO: 145672 - RNA, 32 nt, Human
cuucuccccugccccuacugccaggcagaucc

SEQ ID NO: 145673 - RNA, 32 nt, Human
cuucuccccugcccuauucugcuucacuugca

SEQ ID NO: 145674 - RNA, 32 nt, Human
cuucuccccugcuuuauuuggaugggucaagu

SEQ ID NO: 145675 - RNA, 32 nt, Human
cuucucccgcucccucucccgugccucugcuu

SEQ ID NO: 145676 - RNA, 32 nt, Human
cuucucccggcccucacuaagccccggcacuu

SEQ ID NO: 145677 - RNA, 32 nt, Human
cuucucccucacgccaacuuuccuuuucgccc

SEQ ID NO: 145678 - RNA, 32 nt, Human
cuucucccucccccauccccuacuccccgucu

SEQ ID NO: 145679 - RNA, 32 nt, Human
cuucucccuccccucccaccugacuucaucua

SEQ ID NO: 145680 - RNA, 32 nt, Human
cuucucccucccgcuccugggcggaggcggaa

SEQ ID NO: 145681 - RNA, 32 nt, Human
cuucucccucccucccuuccucccucuccugg

SEQ ID NO: 145682 - RNA, 32 nt, Human
cuucucccuccgccccgcuucucccccgcuug

SEQ ID NO: 145683 - RNA, 21 nt, Human
cuucucccucugcuuuuaucu

SEQ ID NO: 145684 - RNA, 20 nt, Human
cuucucccucuggccuuccu

SEQ ID NO: 145685 - RNA, 32 nt, Human
cuucucccugauuucucggccucucucucugu

SEQ ID NO: 145686 - RNA, 32 nt, Human
cuucucccugcaaccucaguccaaggaaccug

SEQ ID NO: 145687 - RNA, 32 nt, Human
cuucucccugccuuuccucugccuccuccccu

SEQ ID NO: 145688 - RNA, 32 nt, Human
cuucucccugcucacccucugcugggccaggc

SEQ ID NO: 145689 - RNA, 32 nt, Human
cuucucccugcucugcccaucaugacucauuu

SEQ ID NO: 145690 - RNA, 32 nt, Human
cuucucccuggcccacagcccagcuccagcag

SEQ ID NO: 145691 - RNA, 32 nt, Human
cuucucccugggaacugguucaagagacacug

SEQ ID NO: 145692 - RNA, 32 nt, Human
cuucucccugggcucuccuucuugccugcccu

SEQ ID NO: 145693 - RNA, 32 nt, Human
cuucucccugguugugcugcuuuucuaguaau

SEQ ID NO: 145694 - RNA, 32 nt, Human
cuucucccugucggugaaggaucauguucagg

SEQ ID NO: 145695 - RNA, 32 nt, Human
cuucucccuugaguccccaugcuuugucuccc

SEQ ID NO: 145696 - RNA, 32 nt, Human
cuucuccgcugcaggagguggggugaggacau

SEQ ID NO: 145697 - RNA, 32 nt, Human
cuucuccgucacuccauucucagccccuagca

SEQ ID NO: 145698 - RNA, 32 nt, Human
cuucuccuccaaugacaaucuguuagcacccu

SEQ ID NO: 145699 - RNA, 32 nt, Human
cuucuccuccgauccccaccucugcccggaca

SEQ ID NO: 145700 - RNA, 32 nt, Human
cuucuccuccuccucuugcuccuccagcuccu

SEQ ID NO: 145701 - RNA, 32 nt, Human
cuucuccuccuuaaccucuuucuuuuuggcga

SEQ ID NO: 145702 - RNA, 32 nt, Human
cuucuccucucgcuucccugccgggcaggcgc

SEQ ID NO: 145703 - RNA, 32 nt, Human
cuucuccucucuccugccacuggaccauguuu

SEQ ID NO: 145704 - RNA, 32 nt, Human
cuucuccucuuccucuucuucuucuuccuccu

SEQ ID NO: 145705 - RNA, 32 nt, Human
cuucuccucuucuuccuccuucguuucuuccu

SEQ ID NO: 145706 - RNA, 22 nt, Human
cuucuccugaaauggccuuccu

SEQ ID NO: 145707 - RNA, 32 nt, Human
cuucuccugaugcuagcccuagcacccaaaua

SEQ ID NO: 145708 - RNA, 32 nt, Human
cuucuccugccucuuccaugcuuuuacuguga

SEQ ID NO: 145709 - RNA, 19 nt, Human
cuucuccugcgcccaguga

SEQ ID NO: 145710 - RNA, 32 nt, Human
cuucuccugcgcccagugauguuuccacggug

SEQ ID NO: 145711 - RNA, 32 nt, Human
cuucuccuggaggacgaaucacuuuacagaca

SEQ ID NO: 145712 - RNA, 32 nt, Human
cuucuccugggcaucuggggacaggaacaccu

SEQ ID NO: 145713 - RNA, 32 nt, Human
cuucuccuucucucuucguugcugagcgacaa

SEQ ID NO: 145714 - RNA, 32 nt, Human
cuucuccuugugacauggcaaaaacuggacgu

SEQ ID NO: 145715 - RNA, 32 nt, Human
cuucuccuuuccagccccagaugccuuuggca

SEQ ID NO: 145716 - RNA, 31 nt, Human
cuucucgaaguguccaucauucuguguagaa

SEQ ID NO: 145717 - RNA, 32 nt, Human
cuucucgcaacaguggccuacacugccuuuca

SEQ ID NO: 145718 - RNA, 32 nt, Human
cuucucgcacuuacucuccucaacaggauggg

SEQ ID NO: 145719 - RNA, 23 nt, Human
cuucucgccccccaggcaggagc

SEQ ID NO: 145720 - RNA, 32 nt, Human
cuucucgcccuaucucuuccucccuuucuacu

SEQ ID NO: 145721 - RNA, 32 nt, Human
cuucucgcugaauuccgagggggcugagagga

SEQ ID NO: 145722 - RNA, 32 nt, Human
cuucucggaucgaggcuucuucauggccgcuc

SEQ ID NO: 145723 - RNA, 32 nt, Human
cuucucgggaggcugaggcaggagaaucacuu

SEQ ID NO: 145724 - RNA, 32 nt, Human
cuucucgggaggcugaggcaggagaauggcgu

SEQ ID NO: 145725 - RNA, 32 nt, Human
cuucucgggccggcgggcacagagcgcagcgc

SEQ ID NO: 145726 - RNA, 32 nt, Human
cuucucgguggaggggguguggcuggcagccc

SEQ ID NO: 145727 - RNA, 32 nt, Human
cuucucuaccuucaccaccaccacugcccauc

SEQ ID NO: 145728 - RNA, 32 nt, Human
cuucucuacuaaaaauacaaaaaucagccagg

SEQ ID NO: 145729 - RNA, 32 nt, Human
cuucucuacuaaaaauacaaaaauuaccgugg

SEQ ID NO: 145730 - RNA, 32 nt, Human
cuucucuacuaaaaauacaaaaauuagccaga

SEQ ID NO: 145731 - RNA, 32 nt, Human
cuucucuacuaaaaauacaaaaauuagccagg

SEQ ID NO: 145732 - RNA, 32 nt, Human
cuucucuacuaaaaauacaaaaauuagcuggg

SEQ ID NO: 145733 - RNA, 32 nt, Human
cuucucuacuaaaaauauaaaaguuggcugga

SEQ ID NO: 145734 - RNA, 32 nt, Human
cuucucuacuaaaaaugcaaaaaucagccggg

SEQ ID NO: 145735 - RNA, 32 nt, Human
cuucucuacuaaaaaugcaaaaauuagcuggg

SEQ ID NO: 145736 - RNA, 32 nt, Human
cuucucuacuaaaauacacaaauuagcuaggc

SEQ ID NO: 145737 - RNA, 32 nt, Human
cuucucuacugaaaauacaaaaauuagccaga

SEQ ID NO: 145738 - RNA, 32 nt, Human
cuucucuacugaaaauacaaaaauuagccagg

SEQ ID NO: 145739 - RNA, 32 nt, Human
cuucucuacugaaaauacaaaaauuagccggg

SEQ ID NO: 145740 - RNA, 32 nt, Human
cuucucuacugaaaauacaauaauuagcuggg

SEQ ID NO: 145741 - RNA, 32 nt, Human
cuucucuacuggaucaaugucaucaacauaca

SEQ ID NO: 145742 - RNA, 32 nt, Human
cuucucuagcauucaaauuccuccggucagca

SEQ ID NO: 145743 - RNA, 32 nt, Human
cuucucuagcucagccucacaggccaaagcau

SEQ ID NO: 145744 - RNA, 32 nt, Human
cuucucuagggucacagaacugguagaucaag

SEQ ID NO: 145745 - RNA, 21 nt, Human
cuucucuaguuuccccucuca

SEQ ID NO: 145746 - RNA, 32 nt, Human
cuucucuaucugcacacacaaaaugcccaagg

SEQ ID NO: 145747 - RNA, 32 nt, Human
cuucucuauggcucaccuuauuuggagugaga

SEQ ID NO: 145748 - RNA, 32 nt, Human
cuucucuauguaagcagccauggcagucauua

SEQ ID NO: 145749 - RNA, 32 nt, Human
cuucucuaugucuacccacagaggcugaacuu

SEQ ID NO: 145750 - RNA, 32 nt, Human
cuucucucaaagcuagaagccaagaaaauggc

SEQ ID NO: 145751 - RNA, 32 nt, Human
cuucucucaccaggaacauuuaugguaguaug

SEQ ID NO: 145752 - RNA, 31 nt, Human
cuucucucagaaguucagcuguugaaacgaa

SEQ ID NO: 145753 - RNA, 32 nt, Human
cuucucucaguuuuggacaagugacaaaccau

SEQ ID NO: 145754 - RNA, 32 nt, Human
cuucucucauacacauccuucucaccgcagaa

SEQ ID NO: 145755 - RNA, 32 nt, Human
cuucucuccaagcugggagcuccugggccccc

SEQ ID NO: 145756 - RNA, 32 nt, Human
cuucucuccacuguccaucccuccuaucaucu

SEQ ID NO: 145757 - RNA, 32 nt, Human
cuucucuccagccccuggaugcagccucacag

SEQ ID NO: 145758 - RNA, 32 nt, Human
cuucucucccacaccacaacuuuauuaaggua

SEQ ID NO: 145759 - RNA, 32 nt, Human
cuucucucccacaugcacagcuuccugaguca

SEQ ID NO: 145760 - RNA, 32 nt, Human
cuucucucccaggucucccugcuucaggcuug

SEQ ID NO: 145761 - RNA, 18 nt, Human
cuucucucccaggugcug

SEQ ID NO: 145762 - RNA, 32 nt, Human
cuucucuccccaccccuccuuggcucuccagc

SEQ ID NO: 145763 - RNA, 32 nt, Human
cuucucuccccaguucugguccuggccaggcc

SEQ ID NO: 145764 - RNA, 32 nt, Human
cuucucuccccuaaagcaucucaguuuccagc

SEQ ID NO: 145765 - RNA, 32 nt, Human
cuucucucccguccucacccaccuccugcccg

SEQ ID NO: 145766 - RNA, 32 nt, Human
cuucucuccucuuccuccugccccugguuccc

SEQ ID NO: 145767 - RNA, 32 nt, Human
cuucucuccucuucucccuuuuaucaggccua

SEQ ID NO: 145768 - RNA, 32 nt, Human
cuucucuccugcaguccgccucugggcccugc

SEQ ID NO: 145769 - RNA, 32 nt, Human
cuucucuccuuacauuuuacauucaugccaca

SEQ ID NO: 145770 - RNA, 32 nt, Human
cuucucuccuucccucuuuccccaccucuucc

SEQ ID NO: 145771 - RNA, 32 nt, Human
cuucucuccuuuccucauccuaagugccuggc

SEQ ID NO: 145772 - RNA, 32 nt, Human
cuucucucuagugccuucgugcccuguguugc

SEQ ID NO: 145773 - RNA, 32 nt, Human
cuucucucuaucugcucuggaauggaugagug

SEQ ID NO: 145774 - RNA, 22 nt, Human
cuucucucucccagaguggccg

SEQ ID NO: 145775 - RNA, 23 nt, Human
cuucucucucccaucaccuugcc

SEQ ID NO: 145776 - RNA, 32 nt, Human
cuucucucuccucuguccucaucauguuccag

SEQ ID NO: 145777 - RNA, 32 nt, Human
cuucucucuccuuccuccuucuccuccacagu

SEQ ID NO: 145778 - RNA, 23 nt, Human
cuucucucucugcucccaccccu

SEQ ID NO: 145779 - RNA, 32 nt, Human
cuucucucugcaacaggagaaaaccuggagcu

SEQ ID NO: 145780 - RNA, 32 nt, Human
cuucucucugcccagaggcuccugggccuggc

SEQ ID NO: 145781 - RNA, 23 nt, Human
cuucucucugccucuggaggacc

SEQ ID NO: 145782 - RNA, 22 nt, Human
cuucucucugcuagaguugccg

SEQ ID NO: 145783 - RNA, 21 nt, Human
cuucucucugcuucguggccc

SEQ ID NO: 145784 - RNA, 32 nt, Human
cuucucucugggaggcagaugggagccauggc

SEQ ID NO: 145785 - RNA, 32 nt, Human
cuucucucugugguggagaaccacagcugcag

SEQ ID NO: 145786 - RNA, 32 nt, Human
cuucucucuucaagcggcgacccccuacccuc

SEQ ID NO: 145787 - RNA, 32 nt, Human
cuucucucuuccccaucuugcauuggaggucc

SEQ ID NO: 145788 - RNA, 32 nt, Human
cuucucucuuccucaucucccaauaccucuuc

SEQ ID NO: 145789 - RNA, 32 nt, Human
cuucucucuuucuccucccacagggucccccu

SEQ ID NO: 145790 - RNA, 32 nt, Human
cuucucucuuucuccuucaaacuugcucugca

SEQ ID NO: 145791 - RNA, 32 nt, Human
cuucucugaaaccagggcugagcauauuucca

SEQ ID NO: 145792 - RNA, 32 nt, Human
cuucucugaaugcaugucacccugcaccccau

SEQ ID NO: 145793 - RNA, 32 nt, Human
cuucucugaccuuccauuuucucagcuauaaa

SEQ ID NO: 145794 - RNA, 32 nt, Human
cuucucugagccuagagcaccaugucccuucc

SEQ ID NO: 145795 - RNA, 24 nt, Human
cuucucugagccuugguuuuauca

SEQ ID NO: 145796 - RNA, 32 nt, Human
cuucucugauucccucuucugccugcaccaga

SEQ ID NO: 145797 - RNA, 32 nt, Human
cuucucugcacuccagggcuuugauaauaaag

SEQ ID NO: 145798 - RNA, 32 nt, Human
cuucucugcagagcucugcuuccugcagccuc

SEQ ID NO: 145799 - RNA, 32 nt, Human
cuucucugcccaggccgcugcagcugcacagc

SEQ ID NO: 145800 - RNA, 32 nt, Human
cuucucugccuugcccugcucucuccuguugc

SEQ ID NO: 145801 - RNA, 23 nt, Human
cuucucugcuccaguuauuuuua

SEQ ID NO: 145802 - RNA, 32 nt, Human
cuucucugcuucuuccccaacacagcugcaug

SEQ ID NO: 145803 - RNA, 32 nt, Human
cuucucuggaacccucucccuugccuguaggu

SEQ ID NO: 145804 - RNA, 32 nt, Human
cuucucuggaggucaaugguggagggagaugc

SEQ ID NO: 145805 - RNA, 32 nt, Human
cuucucuggauccuccccacccccuccugcuc

SEQ ID NO: 145806 - RNA, 32 nt, Human
cuucucuggaugugccugggcuuggacuggcu

SEQ ID NO: 145807 - RNA, 32 nt, Human
cuucucuggccucuccaguccugcuuacuccu

SEQ ID NO: 145808 - RNA, 32 nt, Human
cuucucugggcuaccuaucuuccuucaugaag

SEQ ID NO: 145809 - RNA, 32 nt, Human
cuucucugggcugcguggggccggagcagagg

SEQ ID NO: 145810 - RNA, 32 nt, Human
cuucucugggcuggugccaguuucgugugcuc

SEQ ID NO: 145811 - RNA, 32 nt, Human
cuucucugggcugugauggggaugugcaggga

SEQ ID NO: 145812 - RNA, 22 nt, Human
cuucucuggucaacaucucuug

SEQ ID NO: 145813 - RNA, 24 nt, Human
cuucucugguccucaguuuccuca

SEQ ID NO: 145814 - RNA, 23 nt, Human
cuucucuggugaaguuuuauuca

SEQ ID NO: 145815 - RNA, 32 nt, Human
cuucucugguucccugaccucagugagacagc

SEQ ID NO: 145816 - RNA, 32 nt, Human
cuucucuguaaaucuaguaucauuccaaaaua

SEQ ID NO: 145817 - RNA, 32 nt, Human
cuucucuguccugucuucccugcuccaacucu

SEQ ID NO: 145818 - RNA, 24 nt, Human
cuucucugucugcuucagcuaccu

SEQ ID NO: 145819 - RNA, 32 nt, Human
cuucucugucugcuucagcuaccuaagaggga

SEQ ID NO: 145820 - RNA, 32 nt, Human
cuucucuguggaccauucaggaccuccagugg

SEQ ID NO: 145821 - RNA, 32 nt, Human
cuucucuguggccagcgcagcucucuucugug

SEQ ID NO: 145822 - RNA, 32 nt, Human
cuucucuuaaaagaugcucucuagucauuugg

SEQ ID NO: 145823 - RNA, 32 nt, Human
cuucucuuaaaauguaggucaaguaaucugcu

SEQ ID NO: 145824 - RNA, 32 nt, Human
cuucucuucaucuugucuucuauugagacuaa

SEQ ID NO: 145825 - RNA, 32 nt, Human
cuucucuuccacuccauuccccugcccaccuc

SEQ ID NO: 145826 - RNA, 32 nt, Human
cuucucuuccagccacagucccaugagggccc

SEQ ID NO: 145827 - RNA, 32 nt, Human
cuucucuucccaagcccuccaauccccauccc

SEQ ID NO: 145828 - RNA, 32 nt, Human
cuucucuuccccaccagccuacacucagugcc

SEQ ID NO: 145829 - RNA, 32 nt, Human
cuucucuuccuccuccuccgucuucuucccug

SEQ ID NO: 145830 - RNA, 32 nt, Human
cuucucuuccugagugauucucagccaagucc

SEQ ID NO: 145831 - RNA, 32 nt, Human
cuucucuuccuuuccuccuuuccucuuuuucu

SEQ ID NO: 145832 - RNA, 22 nt, Human
cuucucuucucagaaaggucug

SEQ ID NO: 145833 - RNA, 32 nt, Human
cuucucuucuccaauaugcaugacauuuuugg

SEQ ID NO: 145834 - RNA, 32 nt, Human
cuucucuucuccagcauuuccacucaccuccg

SEQ ID NO: 145835 - RNA, 32 nt, Human
cuucucuucucccaagcccgcguccccucacg

SEQ ID NO: 145836 - RNA, 32 nt, Human
cuucucuucuucucagauggucccuuccauuc

SEQ ID NO: 145837 - RNA, 32 nt, Human
cuucucuugcuuucgugagaaaggaggggcgu

SEQ ID NO: 145838 - RNA, 32 nt, Human
cuucucuuggccccucucccaagccuugaccc

SEQ ID NO: 145839 - RNA, 32 nt, Human
cuucucuugguaugucuuguuuggaaaagugg

SEQ ID NO: 145840 - RNA, 32 nt, Human
cuucucuuuaaugccuagagaaugggaugugu

SEQ ID NO: 145841 - RNA, 32 nt, Human
cuucucuuuccuccuccuccucaccaagggcc

SEQ ID NO: 145842 - RNA, 32 nt, Human
cuucucuuuccuccuccuuuucuucucuucuc

SEQ ID NO: 145843 - RNA, 32 nt, Human
cuucucuuuccugccuacuccccacuccuccc

SEQ ID NO: 145844 - RNA, 32 nt, Human
cuucucuuucuccaaucaagaaauaauaaucc

SEQ ID NO: 145845 - RNA, 32 nt, Human
cuucucuuugaaccaccugcaucccagcccuu

SEQ ID NO: 145846 - RNA, 32 nt, Human
cuucucuuugaccccugugacucuuucuguaa

SEQ ID NO: 145847 - RNA, 32 nt, Human
cuucucuuuuaguaugagaaguggccaagugg

SEQ ID NO: 145848 - RNA, 32 nt, Human
cuucucuuuuuccccuuugccucucuccuuac

SEQ ID NO: 145849 - RNA, 21 nt, Human
cuucugaaaacuauggcaugg

SEQ ID NO: 145850 - RNA, 32 nt, Human
cuucugaaacugccuuuccagucuuuaggcaa

SEQ ID NO: 145851 - RNA, 32 nt, Human
cuucugaaagcccagagugcccuuggggacac

SEQ ID NO: 145852 - RNA, 32 nt, Human
cuucugaaaguuaaaaaguccagauaggagug

SEQ ID NO: 145853 - RNA, 17 nt, Human
cuucugaacagagcauu

SEQ ID NO: 145854 - RNA, 32 nt, Human
cuucugaacccccacccuacccccuaaaggua

SEQ ID NO: 145855 - RNA, 19 nt, Human
cuucugaaccguccaguga

SEQ ID NO: 145856 - RNA, 32 nt, Human
cuucugaacugaugcuuucucacugucaucac

SEQ ID NO: 145857 - RNA, 32 nt, Human
cuucugaagaagaggaagggcgaguaggggca

SEQ ID NO: 145858 - RNA, 16 nt, Human
cuucugaagcagcauu

SEQ ID NO: 145859 - RNA, 16 nt, Human
cuucugaagcaguauc

SEQ ID NO: 145860 - RNA, 32 nt, Human
cuucugaagcccaugaaaaccuuggacucagc

SEQ ID NO: 145861 - RNA, 32 nt, Human
cuucugaagugcugggauucaggugugagcca

SEQ ID NO: 145862 - RNA, 32 nt, Human
cuucugaaugauugaaagaaacuuuuacaucu

SEQ ID NO: 145863 - RNA, 32 nt, Human
cuucugaauuugcagcauuuucucaggugcuu

SEQ ID NO: 145864 - RNA, 32 nt, Human
cuucugacagugacuccucucucuccagcgcu

SEQ ID NO: 145865 - RNA, 32 nt, Human
cuucugaccagcugcauagacauggcuccagg

SEQ ID NO: 145866 - RNA, 19 nt, Human
cuucugaccugagccaaga

SEQ ID NO: 145867 - RNA, 20 nt, Human
cuucugaccuugugauccac

SEQ ID NO: 145868 - RNA, 19 nt, Human
cuucugacguguccuucag

SEQ ID NO: 145869 - RNA, 20 nt, Human
cuucugacucacucgggauc

SEQ ID NO: 145870 - RNA, 32 nt, Human
cuucugacucguggggcucccugcugcagaga

SEQ ID NO: 145871 - RNA, 25 nt, Human
cuucugacucuacugcugggacuua

SEQ ID NO: 145872 - RNA, 32 nt, Human
cuucugacugcaaggagcuuggaaaagcaagu

SEQ ID NO: 145873 - RNA, 32 nt, Human
cuucugacuuccgaugaugguguugaagcagg

SEQ ID NO: 145874 - RNA, 32 nt, Human
cuucugacuuuucuucugcucucucuaagcuu

SEQ ID NO: 145875 - RNA, 24 nt, Human
cuucugagaaaugcugcagucaga

SEQ ID NO: 145876 - RNA, 32 nt, Human
cuucugagagccucuucucgacacuaucccac

SEQ ID NO: 145877 - RNA, 20 nt, Human
cuucugagaggcaggcggug

SEQ ID NO: 145878 - RNA, 32 nt, Human
cuucugagaugaggcuuuuaaaaugaaccagg

SEQ ID NO: 145879 - RNA, 32 nt, Human
cuucugagcaaaucugaaaacucucuaaacuc

SEQ ID NO: 145880 - RNA, 19 nt, Human
cuucugagcccgcagcauc

SEQ ID NO: 145881 - RNA, 32 nt, Human
cuucugaggaagguuuccagucaggacucgcu

SEQ ID NO: 145882 - RNA, 32 nt, Human
cuucugaggagagaccucugaggugggucuug

SEQ ID NO: 145883 - RNA, 32 nt, Human
cuucugagguuuuucugccagugucuugucug

SEQ ID NO: 145884 - RNA, 32 nt, Human
cuucugaguagcugggacuacaggcacacgcc

SEQ ID NO: 145885 - RNA, 32 nt, Human
cuucugaguagcugggacuacaggcacauguu

SEQ ID NO: 145886 - RNA, 32 nt, Human
cuucugaguagcugggacuacaggcaugcauc

SEQ ID NO: 145887 - RNA, 32 nt, Human
cuucugaguagcugggauuacacgcgugugcc

SEQ ID NO: 145888 - RNA, 32 nt, Human
cuucugaguagcugggauuacaggcaagcacc

SEQ ID NO: 145889 - RNA, 32 nt, Human
cuucugaguagcugggauuacaggcaugcgcc

SEQ ID NO: 145890 - RNA, 32 nt, Human
cuucugagucccuguucuggcacagcacccaa

SEQ ID NO: 145891 - RNA, 32 nt, Human
cuucugagugcagagguucugggagcagcaau

SEQ ID NO: 145892 - RNA, 20 nt, Human
cuucugagugcucugcugag

SEQ ID NO: 145893 - RNA, 32 nt, Human
cuucugagugggaaggaagcugagagccuaug

SEQ ID NO: 145894 - RNA, 32 nt, Human
cuucugauagcaauucauauaacccucuaaga

SEQ ID NO: 145895 - RNA, 32 nt, Human
cuucugauagguagacaaaaggagcugauauc

SEQ ID NO: 145896 - RNA, 32 nt, Human
cuucugaucugcaagaggagaagacaugacgu

SEQ ID NO: 145897 - RNA, 32 nt, Human
cuucugaugccacuucuucucacuuuacuuuu

SEQ ID NO: 145898 - RNA, 32 nt, Human
cuucugaugccugguccaaggcucuuagaaga

SEQ ID NO: 145899 - RNA, 32 nt, Human
cuucugauggaaggcgggauucccgcuucuga

SEQ ID NO: 145900 - RNA, 32 nt, Human
cuucugauggcucugagcucccugaggugggg

SEQ ID NO: 145901 - RNA, 32 nt, Human
cuucugauggggugcuuuguuuagagaugggg

SEQ ID NO: 145902 - RNA, 22 nt, Human
cuucugauuccacaaggggcuu

SEQ ID NO: 145903 - RNA, 32 nt, Human
cuucugauugcuccuggggaaaacacgccuug

SEQ ID NO: 145904 - RNA, 32 nt, Human
cuucugcaacgcagcagacuccugggccugau

SEQ ID NO: 145905 - RNA, 32 nt, Human
cuucugcacagcaaaagaaacuaccaucaaag

SEQ ID NO: 145906 - RNA, 32 nt, Human
cuucugcacagcaaaagaaacuaccaucagac

SEQ ID NO: 145907 - RNA, 32 nt, Human
cuucugcacagcaaaagaaacuaccaucagag

SEQ ID NO: 145908 - RNA, 32 nt, Human
cuucugcacagcaaaagaaacuaccauuagag

SEQ ID NO: 145909 - RNA, 32 nt, Human
cuucugcacagcaaaagaagcuauuugcagac

SEQ ID NO: 145910 - RNA, 32 nt, Human
cuucugcacaggagagcaaggcacuugcagua

SEQ ID NO: 145911 - RNA, 32 nt, Human
cuucugcacccugcugugccucguuuucacgg

SEQ ID NO: 145912 - RNA, 32 nt, Human
cuucugcacuaauccagugaaggaggcugugu

SEQ ID NO: 145913 - RNA, 19 nt, Human
cuucugcacuccauacauc

SEQ ID NO: 145914 - RNA, 32 nt, Human
cuucugcacuccggggaagaaggaguacauug

SEQ ID NO: 145915 - RNA, 32 nt, Human
cuucugcacucuggggaagaaggaguacauug

SEQ ID NO: 145916 - RNA, 32 nt, Human
cuucugcacuuacuccccaucagaagaucgag

SEQ ID NO: 145917 - RNA, 32 nt, Human
cuucugcagaacuuagucaccauuaggcaggg

SEQ ID NO: 145918 - RNA, 32 nt, Human
cuucugcaggaucuucuucccucccaggucuc

SEQ ID NO: 145919 - RNA, 32 nt, Human
cuucugcaguggcugacuuggaagaugaagga

SEQ ID NO: 145920 - RNA, 18 nt, Human
cuucugcaucacaguauc

SEQ ID NO: 145921 - RNA, 32 nt, Human
cuucugcaucagaagcccuggguggcaccagc

SEQ ID NO: 145922 - RNA, 19 nt, Human
cuucugcaucuggcuccug

SEQ ID NO: 145923 - RNA, 32 nt, Human
cuucugcauguucuuugaggacagcaucaucu

SEQ ID NO: 145924 - RNA, 32 nt, Human
cuucugccaagugcuuuucucaguugaaaacu

SEQ ID NO: 145925 - RNA, 32 nt, Human
cuucugccaccagccccuccccagacucucag

SEQ ID NO: 145926 - RNA, 32 nt, Human
cuucugccaccugugucgccuccacuggcagu

SEQ ID NO: 145927 - RNA, 32 nt, Human
cuucugccagagguggagggaggguugggguc

SEQ ID NO: 145928 - RNA, 32 nt, Human
cuucugccagcauccaugaaacuguggcagac

SEQ ID NO: 145929 - RNA, 32 nt, Human
cuucugccaguucugucaauugucagucagaa

SEQ ID NO: 145930 - RNA, 32 nt, Human
cuucugccccggagcuggggugcacuggggac

SEQ ID NO: 145931 - RNA, 32 nt, Human
cuucugccccuccacccacauccacauucagc

SEQ ID NO: 145932 - RNA, 32 nt, Human
cuucugcccuccugccaaaagaucuggggagu

SEQ ID NO: 145933 - RNA, 32 nt, Human
cuucugcccugccuccuccuuucguuguagga

SEQ ID NO: 145934 - RNA, 32 nt, Human
cuucugcccugcuuuugcuaggucacagagga

SEQ ID NO: 145935 - RNA, 32 nt, Human
cuucugcccuugccuucgcccugggugggaca

SEQ ID NO: 145936 - RNA, 32 nt, Human
cuucugcccuuucccuuccuccuccucuucuc

SEQ ID NO: 145937 - RNA, 32 nt, Human
cuucugccuaggggaagugcuggaccugagcu

SEQ ID NO: 145938 - RNA, 32 nt, Human
cuucugccuauugcugauacugucuuugcaua

SEQ ID NO: 145939 - RNA, 31 nt, Human
cuucugccucacucugggccucuucuuucua

SEQ ID NO: 145940 - RNA, 32 nt, Human
cuucugccuccacacuugcuugcccagagaua

SEQ ID NO: 145941 - RNA, 32 nt, Human
cuucugccuccuccauucuuccugggugcaga

SEQ ID NO: 145942 - RNA, 32 nt, Human
cuucugccugaaucacacaggcuacaugagac

SEQ ID NO: 145943 - RNA, 32 nt, Human
cuucugccugcucuccugcacugacccuuugg

SEQ ID NO: 145944 - RNA, 32 nt, Human
cuucugccugggcuccugccauggcccccgag

SEQ ID NO: 145945 - RNA, 32 nt, Human
cuucugccuuuacuuggucuccaaguaccuag

SEQ ID NO: 145946 - RNA, 32 nt, Human
cuucugcgcaggcggcgcuccccaccaaggcc

SEQ ID NO: 145947 - RNA, 19 nt, Human
cuucugcgcccacaguauc

SEQ ID NO: 145948 - RNA, 32 nt, Human
cuucugcggaaccuccaccccuccagugggug

SEQ ID NO: 145949 - RNA, 32 nt, Human
cuucugcgggcucccuccucuggcaggcuucc

SEQ ID NO: 145950 - RNA, 18 nt, Human
cuucugcucagcagcauc

SEQ ID NO: 145951 - RNA, 32 nt, Human
cuucugcucagccugugaccagcucuuucucu

SEQ ID NO: 145952 - RNA, 32 nt, Human
cuucugcucccacucccagccaaccccgcuca

SEQ ID NO: 145953 - RNA, 32 nt, Human
cuucugcuccggcccuguccucaaauuggggg

SEQ ID NO: 145954 - RNA, 32 nt, Human
cuucugcucuagacagauggcuccauaaugac

SEQ ID NO: 145955 - RNA, 32 nt, Human
cuucugcucuauuucuuucuccuugcccucug

SEQ ID NO: 145956 - RNA, 32 nt, Human
cuucugcucucaucucugaccagcagaaucca

SEQ ID NO: 145957 - RNA, 32 nt, Human
cuucugcucugacuuuacugcagcuagucauc

SEQ ID NO: 145958 - RNA, 32 nt, Human
cuucugcucuucccacuuccuccccuuucuac

SEQ ID NO: 145959 - RNA, 32 nt, Human
cuucugcugaggauggggcaggcuggggugug

SEQ ID NO: 145960 - RNA, 19 nt, Human
cuucugcugcaagaaaggc

SEQ ID NO: 145961 - RNA, 32 nt, Human
cuucugcugcccgcccugccccggccgcaucg

SEQ ID NO: 145962 - RNA, 32 nt, Human
cuucugcugccugguuuugggggcuguaugac

SEQ ID NO: 145963 - RNA, 32 nt, Human
cuucugcuucgguucuacagugauggggugcu

SEQ ID NO: 145964 - RNA, 32 nt, Human
cuucugcuucucuugcccucuucuucacacca

SEQ ID NO: 145965 - RNA, 32 nt, Human
cuucugcuugcuggguggugacuggaucggca

SEQ ID NO: 145966 - RNA, 32 nt, Human
cuucuggaaaggacaugaauggggagguggaa

SEQ ID NO: 145967 - RNA, 32 nt, Human
cuucuggaaauacccgcuuuaaucagaguuaa

SEQ ID NO: 145968 - RNA, 32 nt, Human
cuucuggaaauagauuguggugacaguuacac

SEQ ID NO: 145969 - RNA, 32 nt, Human
cuucuggaagacuucagaagauugagccucac

SEQ ID NO: 145970 - RNA, 32 nt, Human
cuucuggaagcacugauuaugaccucacagau

SEQ ID NO: 145971 - RNA, 21 nt, Human
cuucuggaagcccccaauaga

SEQ ID NO: 145972 - RNA, 27 nt, Human
cuucuggaagucucugcucagcacagg

SEQ ID NO: 145973 - RNA, 32 nt, Human
cuucuggaagugucuccuauccucccauccuc

SEQ ID NO: 145974 - RNA, 32 nt, Human
cuucuggaauguugcugacccaggccguggac

SEQ ID NO: 145975 - RNA, 32 nt, Human
cuucuggacacacauacccaugggugauuuuu

SEQ ID NO: 145976 - RNA, 23 nt, Human
cuucuggacagacggcagucggg

SEQ ID NO: 145977 - RNA, 24 nt, Human
cuucuggacccagccuggucugca

SEQ ID NO: 145978 - RNA, 28 nt, Human
cuucuggacgcguuugacugcagccagg

SEQ ID NO: 145979 - RNA, 22 nt, Human
cuucuggacucugcaguccagg

SEQ ID NO: 145980 - RNA, 32 nt, Human
cuucuggacucugcgccuuugccugcacagcc

SEQ ID NO: 145981 - RNA, 32 nt, Human
cuucuggacugacccagccucugacaguccgu

SEQ ID NO: 145982 - RNA, 19 nt, Human
cuucuggacuggccagccc

SEQ ID NO: 145983 - RNA, 32 nt, Human
cuucuggacuugcucccuuccccacaaccaau

SEQ ID NO: 145984 - RNA, 32 nt, Human
cuucuggagaacuucacacacacagaaaagua

SEQ ID NO: 145985 - RNA, 26 nt, Human
cuucuggagacucuguguggcauaga

SEQ ID NO: 145986 - RNA, 32 nt, Human
cuucuggagccagcucaucagcucagagccca

SEQ ID NO: 145987 - RNA, 19 nt, Human
cuucuggagcccaugcugc

SEQ ID NO: 145988 - RNA, 32 nt, Human
cuucuggagcuucagaaaauguuuacauauuu

SEQ ID NO: 145989 - RNA, 32 nt, Human
cuucuggaggcugaggccagagaaucgcuuga

SEQ ID NO: 145990 - RNA, 32 nt, Human
cuucuggaggcugggcaugguggcucauaccu

SEQ ID NO: 145991 - RNA, 32 nt, Human
cuucuggaggcuucccuugaagcucugugcaa

SEQ ID NO: 145992 - RNA, 32 nt, Human
cuucuggaggggcagggccgcacccgagagca

SEQ ID NO: 145993 - RNA, 32 nt, Human
cuucuggaguuucucuaaagucacuagugaac

SEQ ID NO: 145994 - RNA, 32 nt, Human
cuucuggaguuugucaguggaggcagagggga

SEQ ID NO: 145995 - RNA, 32 nt, Human
cuucuggauacuuuugucuuccacccugcccu

SEQ ID NO: 145996 - RNA, 24 nt, Human
cuucuggauagcuggacacaugga

SEQ ID NO: 145997 - RNA, 19 nt, Human
cuucuggcaaagggacauc

SEQ ID NO: 145998 - RNA, 17 nt, Human
cuucuggcaacuucauu

SEQ ID NO: 145999 - RNA, 32 nt, Human
cuucuggcaaggacagaggcgaggggacagcc

SEQ ID NO: 146000 - RNA, 18 nt, Human
cuucuggcaaggcauauc

SEQ ID NO: 146001 - RNA, 22 nt, Human
cuucuggcacaauucucacauu

SEQ ID NO: 146002 - RNA, 18 nt, Human
cuucuggcacaggccauc

SEQ ID NO: 146003 - RNA, 17 nt, Human
cuucuggcacagggugu

SEQ ID NO: 146004 - RNA, 19 nt, Human
cuucuggcacaugcagucc

SEQ ID NO: 146005 - RNA, 32 nt, Human
cuucuggcacccagcaguggguugcagagcuc

SEQ ID NO: 146006 - RNA, 19 nt, Human
cuucuggcacgacagccuc

SEQ ID NO: 146007 - RNA, 18 nt, Human
cuucuggcacgcggucau

SEQ ID NO: 146008 - RNA, 19 nt, Human
cuucuggcagaaagccauc

SEQ ID NO: 146009 - RNA, 17 nt, Human
cuucuggcagagggcau

SEQ ID NO: 146010 - RNA, 17 nt, Human
cuucuggcagccgcuuc

SEQ ID NO: 146011 - RNA, 19 nt, Human
cuucuggcagcugaagauc

SEQ ID NO: 146012 - RNA, 19 nt, Human
cuucuggcagcuggacauc

SEQ ID NO: 146013 - RNA, 19 nt, Human
cuucuggcaugauaaaauc

SEQ ID NO: 146014 - RNA, 17 nt, Human
cuucuggcauggugcau

SEQ ID NO: 146015 - RNA, 32 nt, Human
cuucuggcauucucugccucugccucauauuc

SEQ ID NO: 146016 - RNA, 32 nt, Human
cuucuggccacaucagccccacaggacuuuga

SEQ ID NO: 146017 - RNA, 32 nt, Human
cuucuggccacuggcugugguggcuguaguug

SEQ ID NO: 146018 - RNA, 17 nt, Human
cuucuggccagagaauc

SEQ ID NO: 146019 - RNA, 18 nt, Human
cuucuggccaugagcauu

SEQ ID NO: 146020 - RNA, 19 nt, Human
cuucuggcccaccuugccu

SEQ ID NO: 146021 - RNA, 32 nt, Human
cuucuggccccaggagaacuaaauuaccacca

SEQ ID NO: 146022 - RNA, 17 nt, Human
cuucuggccgggucauc

SEQ ID NO: 146023 - RNA, 32 nt, Human
cuucuggccuccagaacugugagagaacagau

SEQ ID NO: 146024 - RNA, 17 nt, Human
cuucuggccucggcguc

SEQ ID NO: 146025 - RNA, 17 nt, Human
cuucuggccugaccauc

SEQ ID NO: 146026 - RNA, 32 nt, Human
cuucuggccuggugucuccucaugcccccuca

SEQ ID NO: 146027 - RNA, 19 nt, Human
cuucuggccuuuuagcguc

SEQ ID NO: 146028 - RNA, 32 nt, Human
cuucuggcgggacgcuggccacggucagggug

SEQ ID NO: 146029 - RNA, 32 nt, Human
cuucuggcuacugcacucuccacugggaccug

SEQ ID NO: 146030 - RNA, 17 nt, Human
cuucuggcugauaaauc

SEQ ID NO: 146031 - RNA, 16 nt, Human
cuucuggcugcagauc

SEQ ID NO: 146032 - RNA, 32 nt, Human
cuucuggcuuccuucucucaauaugcuuacaa

SEQ ID NO: 146033 - RNA, 32 nt, Human
cuucuggcuuuccacccggccugcugcuugcu

SEQ ID NO: 146034 - RNA, 23 nt, Human
cuucugggaagguaagcagcauc

SEQ ID NO: 146035 - RNA, 32 nt, Human
cuucugggacuucucauaggaagagucaagac

SEQ ID NO: 146036 - RNA, 32 nt, Human
cuucugggauggcgucgggacacuccugcggg

SEQ ID NO: 146037 - RNA, 22 nt, Human
cuucugggcaggcucacgcaga

SEQ ID NO: 146038 - RNA, 24 nt, Human
cuucugggcauuacaucgcauaga

SEQ ID NO: 146039 - RNA, 32 nt, Human
cuucugggcccgccuccauggccaggucccgg

SEQ ID NO: 146040 - RNA, 21 nt, Human
cuucugggcgcaaguuacaga

SEQ ID NO: 146041 - RNA, 24 nt, Human
cuucugggcucccuuugcugacca

SEQ ID NO: 146042 - RNA, 32 nt, Human
cuucugggcuggcugcugacgucccccucccu

SEQ ID NO: 146043 - RNA, 23 nt, Human
cuucugggcuuacccagcacggg

SEQ ID NO: 146044 - RNA, 17 nt, Human
cuucugggcuucagcau

SEQ ID NO: 146045 - RNA, 21 nt, Human
cuucugggcuuuaccagacca

SEQ ID NO: 146046 - RNA, 18 nt, Human
cuucugggcuuucuucag

SEQ ID NO: 146047 - RNA, 32 nt, Human
cuucuggggaaggacagcccaggucauaaggc

SEQ ID NO: 146048 - RNA, 32 nt, Human
cuucuggggaugugagcaaaauucgggcuugu

SEQ ID NO: 146049 - RNA, 32 nt, Human
cuucuggggcugggucccacaugcccuugacc

SEQ ID NO: 146050 - RNA, 32 nt, Human
cuucugggggcugcagggcaggggacagcaga

SEQ ID NO: 146051 - RNA, 32 nt, Human
cuucuggggugaggaguaccaagugcaccugc

SEQ ID NO: 146052 - RNA, 32 nt, Human
cuucuggguaacuugcuacccucuugagcagc

SEQ ID NO: 146053 - RNA, 20 nt, Human
cuucuggguccaccugagca

SEQ ID NO: 146054 - RNA, 27 nt, Human
cuucugggucccagccagcagcacgga

SEQ ID NO: 146055 - RNA, 32 nt, Human
cuucugggugcuccaggacuccuggccccgcg

SEQ ID NO: 146056 - RNA, 32 nt, Human
cuucuggguggcuccugccacugaccucaccg

SEQ ID NO: 146057 - RNA, 32 nt, Human
cuucuggguggcuccugccacugaccucacug

SEQ ID NO: 146058 - RNA, 19 nt, Human
cuucuggguucaagugauu

SEQ ID NO: 146059 - RNA, 23 nt, Human
cuucuggguuccuguccugcuga

SEQ ID NO: 146060 - RNA, 32 nt, Human
cuucuggguuccuguccugcugaacggggugg

SEQ ID NO: 146061 - RNA, 17 nt, Human
cuucuggguuccuucag

SEQ ID NO: 146062 - RNA, 22 nt, Human
cuucuggguuggcaaacuggca

SEQ ID NO: 146063 - RNA, 19 nt, Human
cuucugguagugacagauc

SEQ ID NO: 146064 - RNA, 19 nt, Human
cuucugguccaggcagauc

SEQ ID NO: 146065 - RNA, 19 nt, Human
cuucugguccuacaucauc

SEQ ID NO: 146066 - RNA, 32 nt, Human
cuucuggucugccuggucguuuuugguuggau

SEQ ID NO: 146067 - RNA, 32 nt, Human
cuucuggugaaagcuucaggcugcuuccacug

SEQ ID NO: 146068 - RNA, 19 nt, Human
cuucuggugcagcagccuc

SEQ ID NO: 146069 - RNA, 32 nt, Human
cuucuggugcagcaugacucaguggguuugga

SEQ ID NO: 146070 - RNA, 21 nt, Human
cuucuggugccaggaccaagg

SEQ ID NO: 146071 - RNA, 32 nt, Human
cuucuggugcugcugcuggguggcugcuccgg

SEQ ID NO: 146072 - RNA, 32 nt, Human
cuucuggugcugggggcagggugcaugggggu

SEQ ID NO: 146073 - RNA, 32 nt, Human
cuucuggugucagaacuguccagaagauggua

SEQ ID NO: 146074 - RNA, 20 nt, Human
cuucugguguuauccuucag

SEQ ID NO: 146075 - RNA, 32 nt, Human
cuucugguucaagugagucuccugccucagcc

SEQ ID NO: 146076 - RNA, 16 nt, Human
cuucugguucagcauc

SEQ ID NO: 146077 - RNA, 18 nt, Human
cuucugguucucccucaa

SEQ ID NO: 146078 - RNA, 32 nt, Human
cuucugguuggaggagggagaagugggaagua

SEQ ID NO: 146079 - RNA, 18 nt, Human
cuucugguuguacagauc

SEQ ID NO: 146080 - RNA, 32 nt, Human
cuucugguugucauggaugcacugguagaaga

SEQ ID NO: 146081 - RNA, 32 nt, Human
cuucugguuuuguuucuuguucugccugacug

SEQ ID NO: 146082 - RNA, 32 nt, Human
cuucuguaaauagaugaccuuuuugcagugua

SEQ ID NO: 146083 - RNA, 32 nt, Human
cuucuguaacaucuuuuguuacucacauuuuc

SEQ ID NO: 146084 - RNA, 32 nt, Human
cuucuguaaccacagguucgguggugagagga

SEQ ID NO: 146085 - RNA, 32 nt, Human
cuucuguaauuuucucuauccuggugaugaca

SEQ ID NO: 146086 - RNA, 32 nt, Human
cuucuguaccaugccuucagaaaccuucuuau

SEQ ID NO: 146087 - RNA, 32 nt, Human
cuucuguacgucugacaggcaaugcuggcugu

SEQ ID NO: 146088 - RNA, 32 nt, Human
cuucuguacugcacuguggcuugcccuggcgg

SEQ ID NO: 146089 - RNA, 32 nt, Human
cuucuguagacacuccugcucucuuccauccc

SEQ ID NO: 146090 - RNA, 32 nt, Human
cuucuguaggagaaggaggaggaggaggucgg

SEQ ID NO: 146091 - RNA, 32 nt, Human
cuucuguaggaucugccugaggcuguuuuaca

SEQ ID NO: 146092 - RNA, 32 nt, Human
cuucuguauauacaucuguugauuuuauccau

SEQ ID NO: 146093 - RNA, 32 nt, Human
cuucugucaccuaggcuggaguguagugacau

SEQ ID NO: 146094 - RNA, 32 nt, Human
cuucugucagaacuuuaggucagguauuauga

SEQ ID NO: 146095 - RNA, 32 nt, Human
cuucugucaguggcaauuuaauaguuauucau

SEQ ID NO: 146096 - RNA, 32 nt, Human
cuucuguccaccagacccaccuggagcccgcu

SEQ ID NO: 146097 - RNA, 32 nt, Human
cuucuguccaccuuaauauucuccuucuauuu

SEQ ID NO: 146098 - RNA, 32 nt, Human
cuucugucccagccuugaaggcugaggcacuu

SEQ ID NO: 146099 - RNA, 24 nt, Human
cuucugucccuacaccugcuccuu

SEQ ID NO: 146100 - RNA, 20 nt, Human
cuucuguccucuccuacuca

SEQ ID NO: 146101 - RNA, 32 nt, Human
cuucuguccuguuuccagccuugcaagaaggc

SEQ ID NO: 146102 - RNA, 32 nt, Human
cuucuguccuuggcuugacucugggugccauc

SEQ ID NO: 146103 - RNA, 32 nt, Human
cuucugucgcccaggcuggagugcaguggcgc

SEQ ID NO: 146104 - RNA, 22 nt, Human
cuucugucggucugucuguucu

SEQ ID NO: 146105 - RNA, 32 nt, Human
cuucugucuccucuguuuggaaguccacuagg

SEQ ID NO: 146106 - RNA, 32 nt, Human
cuucugucucucuccucuccucaggcucaaua

SEQ ID NO: 146107 - RNA, 32 nt, Human
cuucugucucugcugucccaguuuugagguuu

SEQ ID NO: 146108 - RNA, 32 nt, Human
cuucugucuuuucaccccuccuuggcugauga

SEQ ID NO: 146109 - RNA, 32 nt, Human
cuucugugaacccagagccuuggcuuugaaau

SEQ ID NO: 146110 - RNA, 32 nt, Human
cuucugugaccugacucucaggaaggcggccc

SEQ ID NO: 146111 - RNA, 32 nt, Human
cuucugugagcacgggcagugggaggccggug

SEQ ID NO: 146112 - RNA, 32 nt, Human
cuucugugaggaccacaaaaucuacagguaca

SEQ ID NO: 146113 - RNA, 32 nt, Human
cuucugugaggauuuuuaucgcagugaagcuc

SEQ ID NO: 146114 - RNA, 32 nt, Human
cuucugugaguuggauucucccccucuugaaa

SEQ ID NO: 146115 - RNA, 32 nt, Human
cuucugugcacauagcucaggagccugcagca

SEQ ID NO: 146116 - RNA, 31 nt, Human
cuucugugccucucuaagugggucaguaucc

SEQ ID NO: 146117 - RNA, 19 nt, Human
cuucugugccuuccuucaa

SEQ ID NO: 146118 - RNA, 22 nt, Human
cuucugugcuucaguuucuuca

SEQ ID NO: 146119 - RNA, 32 nt, Human
cuucugugcuuguguggcauguguacccagga

SEQ ID NO: 146120 - RNA, 32 nt, Human
cuucugugcuuuucccccuuguaacccaugug

SEQ ID NO: 146121 - RNA, 32 nt, Human
cuucuguggacaccccaaauaggaagaagggu

SEQ ID NO: 146122 - RNA, 17 nt, Human
cuucuguggacaggaag

SEQ ID NO: 146123 - RNA, 32 nt, Human
cuucuguggagccuguuccucacuggaaauug

SEQ ID NO: 146124 - RNA, 32 nt, Human
cuucuguggagcgaagcagugggagcaucgag

SEQ ID NO: 146125 - RNA, 32 nt, Human
cuucuguggccaagccccacccuuuccugguc

SEQ ID NO: 146126 - RNA, 32 nt, Human
cuucuguggcccaggcuggagugcaguggcug

SEQ ID NO: 146127 - RNA, 32 nt, Human
cuucuguggcuucaguucucaugcugccucuu

SEQ ID NO: 146128 - RNA, 32 nt, Human
cuucugugggagaccauaucccagauugcugg

SEQ ID NO: 146129 - RNA, 17 nt, Human
cuucuguggucacccca

SEQ ID NO: 146130 - RNA, 32 nt, Human
cuucuguggucaggcugggacagugaaaggca

SEQ ID NO: 146131 - RNA, 31 nt, Human
cuucuguggucgcugcggccuguguuggggc

SEQ ID NO: 146132 - RNA, 32 nt, Human
cuucuguggugcuuaaggaaacuuacuagagc

SEQ ID NO: 146133 - RNA, 32 nt, Human
cuucuguggugggaugggagggugggggagag

SEQ ID NO: 146134 - RNA, 32 nt, Human
cuucugugucugagaaaauuaauuauauagca

SEQ ID NO: 146135 - RNA, 32 nt, Human
cuucuguguguccugggcuguguguccagcac

SEQ ID NO: 146136 - RNA, 32 nt, Human
cuucugugugugcacauguguaauacauaucu

SEQ ID NO: 146137 - RNA, 32 nt, Human
cuucuguguucuucugacaaaugauuccugcu

SEQ ID NO: 146138 - RNA, 32 nt, Human
cuucuguucaacuuacccuccaccgcugaccc

SEQ ID NO: 146139 - RNA, 32 nt, Human
cuucuguucacaacaguggcccauggagaaag

SEQ ID NO: 146140 - RNA, 32 nt, Human
cuucuguucauucugaccccuuccucaaccuc

SEQ ID NO: 146141 - RNA, 31 nt, Human
cuucuguuccccuccuggccugugcagaaug

SEQ ID NO: 146142 - RNA, 32 nt, Human
cuucuguucggcccgaccuccaccccggcucc

SEQ ID NO: 146143 - RNA, 32 nt, Human
cuucuguugggcgcgugucuguuggucagaag

SEQ ID NO: 146144 - RNA, 32 nt, Human
cuucuguuuaauagguuguucugcaagucuga

SEQ ID NO: 146145 - RNA, 32 nt, Human
cuucuguuucccucugcugccugggagcugag

SEQ ID NO: 146146 - RNA, 32 nt, Human
cuucuguuucugacagucacaggugacagcug

SEQ ID NO: 146147 - RNA, 19 nt, Human
cuucuuaaaccaccagugg

SEQ ID NO: 146148 - RNA, 32 nt, Human
cuucuuaagugcaugagaugguuugaugguuu

SEQ ID NO: 146149 - RNA, 32 nt, Human
cuucuuaauuaugucugagaaaaggauccuga

SEQ ID NO: 146150 - RNA, 32 nt, Human
cuucuuacacaucugcuagcacuuuauguuga

SEQ ID NO: 146151 - RNA, 32 nt, Human
cuucuuacagaaguauuacugaagguauuauu

SEQ ID NO: 146152 - RNA, 32 nt, Human
cuucuuacccugucugugaucuugucugugau

SEQ ID NO: 146153 - RNA, 32 nt, Human
cuucuuacugccaauaaaaacaggugaacuuc

SEQ ID NO: 146154 - RNA, 32 nt, Human
cuucuuacugccgccucaagcuuccagccuca

SEQ ID NO: 146155 - RNA, 32 nt, Human
cuucuuacuucccucacuuaucuuuguuuaaa

SEQ ID NO: 146156 - RNA, 32 nt, Human
cuucuuacuuccucuccccucucccauuuugc

SEQ ID NO: 146157 - RNA, 32 nt, Human
cuucuuacuugcacacagccacaaagccagcc

SEQ ID NO: 146158 - RNA, 32 nt, Human
cuucuuagaagaggagugagaggaaggcgggg

SEQ ID NO: 146159 - RNA, 32 nt, Human
cuucuuauccacccuucccucuaccucaccga

SEQ ID NO: 146160 - RNA, 32 nt, Human
cuucuuaucuuuccacagagcuauuuacaucc

SEQ ID NO: 146161 - RNA, 32 nt, Human
cuucuuauggauaccugcauuuaacuugugga

SEQ ID NO: 146162 - RNA, 32 nt, Human
cuucuuauguuucugaaaacagcuuggauauu

SEQ ID NO: 146163 - RNA, 32 nt, Human
cuucuuauugcccaggcuugagugcaaugacc

SEQ ID NO: 146164 - RNA, 32 nt, Human
cuucuuauuguccuccuccuccuggcucggcc

SEQ ID NO: 146165 - RNA, 18 nt, Human
cuucuucaacauguuccu

SEQ ID NO: 146166 - RNA, 32 nt, Human
cuucuucaacccaaccuccucucaucagggcu

SEQ ID NO: 146167 - RNA, 32 nt, Human
cuucuucaaccugaggcauuacugagccccgg

SEQ ID NO: 146168 - RNA, 21 nt, Human
cuucuucacaccuacucacuu

SEQ ID NO: 146169 - RNA, 32 nt, Human
cuucuucacagccugcacugcccagugggcca

SEQ ID NO: 146170 - RNA, 32 nt, Human
cuucuucaccuguuggcuuucucuucugcagc

SEQ ID NO: 146171 - RNA, 32 nt, Human
cuucuucacgucucucuccauccugcucccau

SEQ ID NO: 146172 - RNA, 20 nt, Human
cuucuucagaagguaucuua

SEQ ID NO: 146173 - RNA, 19 nt, Human
cuucuucagcaacagcauu

SEQ ID NO: 146174 - RNA, 16 nt, Human
cuucuucagcagcauc

SEQ ID NO: 146175 - RNA, 32 nt, Human
cuucuucagccuucuucagcccucuucuauuu

SEQ ID NO: 146176 - RNA, 32 nt, Human
cuucuucagcugucuggccgcaccuuaaaaac

SEQ ID NO: 146177 - RNA, 32 nt, Human
cuucuucaggcgccucccuucucuccacgagc

SEQ ID NO: 146178 - RNA, 32 nt, Human
cuucuucaggcuucuuagcugcugcuauccau

SEQ ID NO: 146179 - RNA, 32 nt, Human
cuucuucagguggcaagggcucuggaacagcc

SEQ ID NO: 146180 - RNA, 32 nt, Human
cuucuucagugcuuagagugugagaaaaaugg

SEQ ID NO: 146181 - RNA, 32 nt, Human
cuucuucagugucagaccucagucccaguguc

SEQ ID NO: 146182 - RNA, 32 nt, Human
cuucuuccaauacugggcaguagaguuucgga

SEQ ID NO: 146183 - RNA, 32 nt, Human
cuucuuccacacaugugguugugcacauguga

SEQ ID NO: 146184 - RNA, 32 nt, Human
cuucuuccacacuaggcugggcccagcaauac

SEQ ID NO: 146185 - RNA, 32 nt, Human
cuucuuccacugaauguuuucuagggccgucc

SEQ ID NO: 146186 - RNA, 32 nt, Human
cuucuuccacugacaaagcaugagcuaucuga

SEQ ID NO: 146187 - RNA, 32 nt, Human
cuucuuccagaagcacgggcacaggagcaugu

SEQ ID NO: 146188 - RNA, 32 nt, Human
cuucuuccagcagguuugaagauuuggauauu

SEQ ID NO: 146189 - RNA, 32 nt, Human
cuucuuccagccaagaagagcucacaggaguc

SEQ ID NO: 146190 - RNA, 32 nt, Human
cuucuuccagugggagugggcuuuguacuggg

SEQ ID NO: 146191 - RNA, 32 nt, Human
cuucuuccaucuuuccagcugucaaauccaau

SEQ ID NO: 146192 - RNA, 32 nt, Human
cuucuucccacaucugccucagacuggagggg

SEQ ID NO: 146193 - RNA, 32 nt, Human
cuucuucccagccugggauccuucgugcuuca

SEQ ID NO: 146194 - RNA, 32 nt, Human
cuucuucccaugcuggagugcaauggcgcaau

SEQ ID NO: 146195 - RNA, 32 nt, Human
cuucuucccuccuccccuuucuccccuccguc

SEQ ID NO: 146196 - RNA, 32 nt, Human
cuucuucccucuauuuauuuuuaugucaggug

SEQ ID NO: 146197 - RNA, 32 nt, Human
cuucuucccuggaggacugccugcuugcuuuc

SEQ ID NO: 146198 - RNA, 32 nt, Human
cuucuucccuuucccuuccucuccccuacccc

SEQ ID NO: 146199 - RNA, 32 nt, Human
cuucuuccucaccucucagccuccagaucccu

SEQ ID NO: 146200 - RNA, 32 nt, Human
cuucuuccuccccugcccugcuucccuuccuc

SEQ ID NO: 146201 - RNA, 32 nt, Human
cuucuuccuccccugggccgucccccucccuc

SEQ ID NO: 146202 - RNA, 32 nt, Human
cuucuuccuccuccuccuccucuuuuuccucc

SEQ ID NO: 146203 - RNA, 32 nt, Human
cuucuuccuccugcguccucccccgcugccuc

SEQ ID NO: 146204 - RNA, 32 nt, Human
cuucuuccucgacaucuuccuccucuacuggu

SEQ ID NO: 146205 - RNA, 32 nt, Human
cuucuuccuggacauccagacauuuccacaua

SEQ ID NO: 146206 - RNA, 32 nt, Human
cuucuuccuggauggggcagagcuucuccuga

SEQ ID NO: 146207 - RNA, 29 nt, Human
cuucuuccugggcugucauccccucaucc

SEQ ID NO: 146208 - RNA, 18 nt, Human
cuucuuccugggugcucu

SEQ ID NO: 146209 - RNA, 32 nt, Human
cuucuuccuucagcaaaaucuaggacucccga

SEQ ID NO: 146210 - RNA, 32 nt, Human
cuucuuccuucuccucuucccuccagcucuug

SEQ ID NO: 146211 - RNA, 32 nt, Human
cuucuucuacaccuuucauucuuuuuguuuuc

SEQ ID NO: 146212 - RNA, 32 nt, Human
cuucuucuagcagucugugccuccucucugac

SEQ ID NO: 146213 - RNA, 32 nt, Human
cuucuucuauauccaaaauucagggcuuuaaa

SEQ ID NO: 146214 - RNA, 32 nt, Human
cuucuucuccacccugcucagcaugaaccuag

SEQ ID NO: 146215 - RNA, 32 nt, Human
cuucuucuccagacagaagauaccaaaaaguu

SEQ ID NO: 146216 - RNA, 32 nt, Human
cuucuucucgcuguccucuccucucucgcugc

SEQ ID NO: 146217 - RNA, 32 nt, Human
cuucuucucugccucuccugccucucgccgcu

SEQ ID NO: 146218 - RNA, 32 nt, Human
cuucuucucuuuaccagucccaccuaccucac

SEQ ID NO: 146219 - RNA, 32 nt, Human
cuucuucugaaggucucagacauucagccacg

SEQ ID NO: 146220 - RNA, 32 nt, Human
cuucuucugagauguccucugccuuccaggua

SEQ ID NO: 146221 - RNA, 32 nt, Human
cuucuucugcucccgauucuccuccucuccuu

SEQ ID NO: 146222 - RNA, 32 nt, Human
cuucuucugcugccugguuuugggggcuguau

SEQ ID NO: 146223 - RNA, 32 nt, Human
cuucuucugggcuuguaacaccuucaugaaca

SEQ ID NO: 146224 - RNA, 32 nt, Human
cuucuucuguaucccaauaauccaccaggaua

SEQ ID NO: 146225 - RNA, 32 nt, Human
cuucuucuuaacccucucccauccauuuuugu

SEQ ID NO: 146226 - RNA, 32 nt, Human
cuucuucuuggcuuccucuuauucuuccacaa

SEQ ID NO: 146227 - RNA, 32 nt, Human
cuucuucuugugcaccuaucaccaucugagug

SEQ ID NO: 146228 - RNA, 32 nt, Human
cuucuucuuuugugguuucacauagcaaauga

SEQ ID NO: 146229 - RNA, 24 nt, Human
cuuggcucacugcaaccuccaccu

SEQ ID NO: 146230 - RNA, 32 nt, Human
cuuggcucacugcaaccuccaccuccagguuc

SEQ ID NO: 146231 - RNA, 32 nt, Human
cuuggcucacugcaaccuccaccucccagguc

SEQ ID NO: 146232 - RNA, 32 nt, Human
cuuggcucacugcaaccuccaccucccagguu

SEQ ID NO: 146233 - RNA, 32 nt, Human
cuuggcucacugcaaccuccaccucccaguuc

SEQ ID NO: 146234 - RNA, 32 nt, Human
cuuggcucacugcaaccuccaccucccggguu

SEQ ID NO: 146235 - RNA, 32 nt, Human
cuuggcucacugcaaccuccaccuccugggcu

SEQ ID NO: 146236 - RNA, 32 nt, Human
cuuggcucacugcaaccuccaccuccuggguc

SEQ ID NO: 146237 - RNA, 32 nt, Human
cuuggcucacugcaaccuccaccuccuggguu

SEQ ID NO: 146238 - RNA, 32 nt, Human
cuuggcucacugcaaccuccaccuuccugguu

SEQ ID NO: 146239 - RNA, 23 nt, Human
cuuggcucacugcaaccuccacu

SEQ ID NO: 146240 - RNA, 32 nt, Human
cuuggcucacugcaaccuccacuuccuggguu

SEQ ID NO: 146241 - RNA, 24 nt, Human
cuuggcucacugcaaccuccaucu

SEQ ID NO: 146242 - RNA, 22 nt, Human
cuuggcucacugcaaccuccgc

SEQ ID NO: 146243 - RNA, 32 nt, Human
cuuggcucacugcaaccuccgccuccagggcg

SEQ ID NO: 146244 - RNA, 32 nt, Human
cuuggcucacugcaaccuccgccuccaggguu

SEQ ID NO: 146245 - RNA, 32 nt, Human
cuuggcucacugcaaccuccgccucccagguu

SEQ ID NO: 146246 - RNA, 32 nt, Human
cuuggcucacugcaaccuccgccucccgaguu

SEQ ID NO: 146247 - RNA, 32 nt, Human
cuuggcucacugcaaccuccgccucccggguu

SEQ ID NO: 146248 - RNA, 32 nt, Human
cuuggcucacugcaaccuccgccucccugguu

SEQ ID NO: 146249 - RNA, 32 nt, Human
cuuggcucacugcaaccuccgccuccuggguu

SEQ ID NO: 146250 - RNA, 32 nt, Human
cuuggcucacugcaaccuccgccucucagguu

SEQ ID NO: 146251 - RNA, 32 nt, Human
cuuggcucacugcaaccuccgccucucggguu

SEQ ID NO: 146252 - RNA, 32 nt, Human
cuuggcucacugcaaccuccgccucuuggguu

SEQ ID NO: 146253 - RNA, 32 nt, Human
cuuggcucacugcaaccuccgccuuccugguu

SEQ ID NO: 146254 - RNA, 32 nt, Human
cuuggcucacugcaaccuccgucucccagguu

SEQ ID NO: 146255 - RNA, 32 nt, Human
cuuggcucacugcaaccuccgucuccuggguu

SEQ ID NO: 146256 - RNA, 32 nt, Human
cuuggcucacugcaaccuccgucuuccggguu

SEQ ID NO: 146257 - RNA, 32 nt, Human
cuuggcucacugcaaccuccuccucccggguu

SEQ ID NO: 146258 - RNA, 32 nt, Human
cuuggcucacugcaaccuccugcuuccugggu

SEQ ID NO: 146259 - RNA, 32 nt, Human
cuuggcucacugcaaccucuaccuccuggguu

SEQ ID NO: 146260 - RNA, 32 nt, Human
cuuggcucacugcaaccucugccaccuggguu

SEQ ID NO: 146261 - RNA, 32 nt, Human
cuuggcucacugcaaccucugccccaccaaaa

SEQ ID NO: 146262 - RNA, 32 nt, Human
cuuggcucacugcaaccucugcccccuggguu

SEQ ID NO: 146263 - RNA, 32 nt, Human
cuuggcucacugcaaccucugccuaccggauu

SEQ ID NO: 146264 - RNA, 32 nt, Human
cuuggcucacugcaaccucugccucacaggcu

SEQ ID NO: 146265 - RNA, 32 nt, Human
cuuggcucacugcaaccucugccucacagguu

SEQ ID NO: 146266 - RNA, 32 nt, Human
cuuggcucacugcaaccucugccucccagguu

SEQ ID NO: 146267 - RNA, 32 nt, Human
cuuggcucacugcaaccucugccucccgggcu

SEQ ID NO: 146268 - RNA, 32 nt, Human
cuuggcucacugcaaccucugccucccggguu

SEQ ID NO: 146269 - RNA, 32 nt, Human
cuuggcucacugcaaccucugccucccugguu

SEQ ID NO: 146270 - RNA, 28 nt, Human
cuuggcucacugcaaccucugccuccug

SEQ ID NO: 146271 - RNA, 32 nt, Human
cuuggcucacugcaaccucugccuccugaauu

SEQ ID NO: 146272 - RNA, 32 nt, Human
cuuggcucacugcaaccucugccuccugggcu

SEQ ID NO: 146273 - RNA, 32 nt, Human
cuuggcucacugcaaccucugccuccuggguu

SEQ ID NO: 146274 - RNA, 32 nt, Human
cuuggcucacugcaaccucugccuccuucguu

SEQ ID NO: 146275 - RNA, 32 nt, Human
cuuggcucacugcaaccucugccuccuugguu

SEQ ID NO: 146276 - RNA, 32 nt, Human
cuuggcucacugcaaccucugccugccggguu

SEQ ID NO: 146277 - RNA, 32 nt, Human
cuuggcucacugcaaccucugccuucuggguu

SEQ ID NO: 146278 - RNA, 32 nt, Human
cuuggcucacugcaaccucugcgggcucacgc

SEQ ID NO: 146279 - RNA, 32 nt, Human
cuuggcucacugcaaccucugcuucccagguu

SEQ ID NO: 146280 - RNA, 32 nt, Human
cuuggcucacugcaaccucugcuucccgaguu

SEQ ID NO: 146281 - RNA, 32 nt, Human
cuuggcucacugcaaccucugcuucccggguu

SEQ ID NO: 146282 - RNA, 32 nt, Human
cuuggcucacugcaaccucugucucccagguu

SEQ ID NO: 146283 - RNA, 32 nt, Human
cuuggcucacugcaaccucugucuccugggcu

SEQ ID NO: 146284 - RNA, 32 nt, Human
cuuggcucacugcaaccucugucuuccagguu

SEQ ID NO: 146285 - RNA, 32 nt, Human
cuuggcucacugcaaccucuguguccugggcu

SEQ ID NO: 146286 - RNA, 32 nt, Human
cuuggcucacugcaaccucuuccuccugguuc

SEQ ID NO: 146287 - RNA, 32 nt, Human
cuuggcucacugcaaccugcgccuccuggguu

SEQ ID NO: 146288 - RNA, 32 nt, Human
cuuggcucacugcaacguccgccucccagguu

SEQ ID NO: 146289 - RNA, 32 nt, Human
cuuggcucacugcaacgucugccuccuggguu

SEQ ID NO: 146290 - RNA, 32 nt, Human
cuuggcucacugcaacucugcuucccagguuc

SEQ ID NO: 146291 - RNA, 32 nt, Human
cuuggcucacugcaacuuccgccuccuguguu

SEQ ID NO: 146292 - RNA, 32 nt, Human
cuuggcucacugcaacuuccgucucccggguu

SEQ ID NO: 146293 - RNA, 32 nt, Human
cuuggcucacugcaacuucuaccuccgagguu

SEQ ID NO: 146294 - RNA, 32 nt, Human
cuuggcucacugcaacuucugccaccuggguu

SEQ ID NO: 146295 - RNA, 32 nt, Human
cuuggcucacugcaacuucugccucuuggguu

SEQ ID NO: 146296 - RNA, 32 nt, Human
cuuggcucacugcaacuucugccuuccagguu

SEQ ID NO: 146297 - RNA, 32 nt, Human
cuuggcucacugcaacuugggccucccagguu

SEQ ID NO: 146298 - RNA, 32 nt, Human
cuuggcucacugcaagcuccaccuccuggguu

SEQ ID NO: 146299 - RNA, 32 nt, Human
cuuggcucacugcaagcuccgccucccagguu

SEQ ID NO: 146300 - RNA, 32 nt, Human
cuuggcucacugcaagcuccgccucccgaguu

SEQ ID NO: 146301 - RNA, 32 nt, Human
cuuggcucacugcaagcuccgccucccggcuu

SEQ ID NO: 146302 - RNA, 32 nt, Human
cuuggcucacugcaagcuccgccucccggguu

SEQ ID NO: 146303 - RNA, 32 nt, Human
cuuggcucacugcaagcuccgccuccuggguu

SEQ ID NO: 146304 - RNA, 32 nt, Human
cuuggcucacugcaagcuccgccucucggguu

SEQ ID NO: 146305 - RNA, 32 nt, Human
cuuggcucacugcaagcuccgucugccggguu

SEQ ID NO: 146306 - RNA, 32 nt, Human
cuuggcucacugcaagcucugcccuccccggg

SEQ ID NO: 146307 - RNA, 32 nt, Human
cuuggcucacugcaaucucuauccccuggguu

SEQ ID NO: 146308 - RNA, 32 nt, Human
cuuggcucacugcaaucucugccucucggguu

SEQ ID NO: 146309 - RNA, 32 nt, Human
cuuggcucacugcaaucucugccuuccggguu

SEQ ID NO: 146310 - RNA, 32 nt, Human
cuuggcucacugcacccuccgccuccugggcu

SEQ ID NO: 146311 - RNA, 32 nt, Human
cuuggcucacugcacccucugucuguugggcu

SEQ ID NO: 146312 - RNA, 32 nt, Human
cuuggcucacugcaccuccaccuuccgggcuc

SEQ ID NO: 146313 - RNA, 32 nt, Human
cuuggcucacugcaccucugucucccaaguuc

SEQ ID NO: 146314 - RNA, 32 nt, Human
cuuggcucacugcagacuucaccuccugaguu

SEQ ID NO: 146315 - RNA, 32 nt, Human
cuuggcucacugcagccucaacuucuuguccu

SEQ ID NO: 146316 - RNA, 32 nt, Human
cuuggcucacugcagccuccaccuccccgguu

SEQ ID NO: 146317 - RNA, 32 nt, Human
cuuggcucacugcagccuccaccucccggguu

SEQ ID NO: 146318 - RNA, 32 nt, Human
cuuggcucacugcagccuccaccuccugggcu

SEQ ID NO: 146319 - RNA, 32 nt, Human
cuuggcucacugcagccuccgccucccggguu

SEQ ID NO: 146320 - RNA, 32 nt, Human
cuuggcucacugcagccucgacuuccugggcu

SEQ ID NO: 146321 - RNA, 32 nt, Human
cuuggcucacugcagccucugccucccagguu

SEQ ID NO: 146322 - RNA, 32 nt, Human
cuuggcucacugcagccucugccucccggguu

SEQ ID NO: 146323 - RNA, 32 nt, Human
cuuggcucacugcagccucugccuccugagua

SEQ ID NO: 146324 - RNA, 32 nt, Human
cuuggcucacugcagccucugccuccuggguu

SEQ ID NO: 146325 - RNA, 32 nt, Human
cuuggcucacugcagccuucgccucccggguu

SEQ ID NO: 146326 - RNA, 32 nt, Human
cuuggcucacugcaggcucugccucccgguuu

SEQ ID NO: 146327 - RNA, 32 nt, Human
cuuggcucacugcauccuccgccuuccagguu

SEQ ID NO: 146328 - RNA, 32 nt, Human
cuuggcucacugcaugcucugccacuuggguu

SEQ ID NO: 146329 - RNA, 32 nt, Human
cuuggcucacugcggccucugccucccggcuu

SEQ ID NO: 146330 - RNA, 32 nt, Human
cuuggcucacugcuaccuccgccucccagguu

SEQ ID NO: 146331 - RNA, 32 nt, Human
cuuggcucacugcugcaaccucccccuccugg

SEQ ID NO: 146332 - RNA, 32 nt, Human
cuuggcucacugguuuggggcauguuccuggg

SEQ ID NO: 146333 - RNA, 24 nt, Human
cuuggcucacuguaaccuccaccu

SEQ ID NO: 146334 - RNA, 32 nt, Human
cuuggcucacuguaaccucugccuccaggauu

SEQ ID NO: 146335 - RNA, 32 nt, Human
cuuggcucacuguaaccucugccucccaguuc

SEQ ID NO: 146336 - RNA, 32 nt, Human
cuuggcucagugcaauccgccucccagguuca

SEQ ID NO: 146337 - RNA, 32 nt, Human
cuuggcucauugcaaccucugccucccagguc

SEQ ID NO: 146338 - RNA, 32 nt, Human
cuuggcuccaaaacaaaacaaaacaaaaucug

SEQ ID NO: 146339 - RNA, 24 nt, Human
cuuggcuccaccauaaggcacugg

SEQ ID NO: 146340 - RNA, 32 nt, Human
cuuggcuccacuguuuaccucuugcuauguau

SEQ ID NO: 146341 - RNA, 32 nt, Human
cuuggcucccaaagugcuggaauuacaggcau

SEQ ID NO: 146342 - RNA, 32 nt, Human
cuuggcucccucuccagccucuuaaggcacga

SEQ ID NO: 146343 - RNA, 21 nt, Human
cuuggcuccugggggcagcca

SEQ ID NO: 146344 - RNA, 29 nt, Human
cuuggcucgcugcaaccucugccuccugg

SEQ ID NO: 146345 - RNA, 32 nt, Human
cuuggcucgcugcgccucugccucccagguuc

SEQ ID NO: 146346 - RNA, 20 nt, Human
cuuggcucguucucuucucu

SEQ ID NO: 146347 - RNA, 32 nt, Human
cuuggcucuccacuuaugcacuguguaugucu

SEQ ID NO: 146348 - RNA, 32 nt, Human
cuuggcucucugcaaccucugccucccagguu

SEQ ID NO: 146349 - RNA, 32 nt, Human
cuuggcucugaagcuggccacugugggcugca

SEQ ID NO: 146350 - RNA, 32 nt, Human
cuuggcucugcaaccuccacuucccagguuca

SEQ ID NO: 146351 - RNA, 32 nt, Human
cuuggcucugcaaccuccgccucccgguuuaa

SEQ ID NO: 146352 - RNA, 32 nt, Human
cuuggcucuggccaaagcuugcucccugcucc

SEQ ID NO: 146353 - RNA, 32 nt, Human
cuuggcucugggaggcccagguggcucugcag

SEQ ID NO: 146354 - RNA, 32 nt, Human
cuuggcucuguugcuguccuccagggcgagca

SEQ ID NO: 146355 - RNA, 32 nt, Human
cuuggcucuuugcaaccucugccuccugggcu

SEQ ID NO: 146356 - RNA, 32 nt, Human
cuuggcugaagaggaaauaaaaacagaacagg

SEQ ID NO: 146357 - RNA, 32 nt, Human
cuuggcugaaggacaggaugccuguggagagc

SEQ ID NO: 146358 - RNA, 32 nt, Human
cuuggcugacugcaacuucugccuccuggguu

SEQ ID NO: 146359 - RNA, 32 nt, Human
cuuggcugacugcaaucugugccuccugggcu

SEQ ID NO: 146360 - RNA, 32 nt, Human
cuuggcugacugcagucugugccuccugggcu

SEQ ID NO: 146361 - RNA, 32 nt, Human
cuuggcugccccaggcccugagucugccuaga

SEQ ID NO: 146362 - RNA, 32 nt, Human
cuuggcugccgccccgagaccccagcccguac

SEQ ID NO: 146363 - RNA, 21 nt, Human
cuuggcugcuccauuggccug

SEQ ID NO: 146364 - RNA, 32 nt, Human
cuuggcugcugucaacagaugggcugggcugg

SEQ ID NO: 146365 - RNA, 32 nt, Human
cuuggcugcuugcagggccacuguccaggcaa

SEQ ID NO: 146366 - RNA, 32 nt, Human
cuuggcuggagaagaccgggaaaaagggagua

SEQ ID NO: 146367 - RNA, 32 nt, Human
cuuggcuggcaggccuuauaagagggcggauc

SEQ ID NO: 146368 - RNA, 32 nt, Human
cuuggcugggauuacaggcaugagccacugca

SEQ ID NO: 146369 - RNA, 32 nt, Human
cuuggcugggcaugccuguaaucccagaauuu

SEQ ID NO: 146370 - RNA, 32 nt, Human
cuuggcuggggagggcuguugcuugaggugac

SEQ ID NO: 146371 - RNA, 32 nt, Human
cuuggcuguacugcuauucuuacugcugcuuc

SEQ ID NO: 146372 - RNA, 32 nt, Human
cuuggcugugagcuccuggggguggggguggc

SEQ ID NO: 146373 - RNA, 32 nt, Human
cuuggcugugguccugagaagcuucuguguga

SEQ ID NO: 146374 - RNA, 32 nt, Human
cuuggcuguuggcagugagugagccuggcucu

SEQ ID NO: 146375 - RNA, 32 nt, Human
cuuggcuuaagugauucucccaccucagccuc

SEQ ID NO: 146376 - RNA, 32 nt, Human
cuuggcuuacugcaaccucugccucccagguu

SEQ ID NO: 146377 - RNA, 32 nt, Human
cuuggcuuacugcaagcucugccuccuggguu

SEQ ID NO: 146378 - RNA, 32 nt, Human
cuuggcuuauugaagccucugccuccuggguu

SEQ ID NO: 146379 - RNA, 32 nt, Human
cuuggcuucccaaaguccugggauuacaggug

SEQ ID NO: 146380 - RNA, 32 nt, Human
cuuggcuucccaaagugcugggauuauaggca

SEQ ID NO: 146381 - RNA, 32 nt, Human
cuuggcuucccuaggcaugcaguaccauaagc

SEQ ID NO: 146382 - RNA, 32 nt, Human
cuuggcuucccugucuaacuguagacaaaucu

SEQ ID NO: 146383 - RNA, 32 nt, Human
cuuggcuuccuccuggcuuuaaugggaauauu

SEQ ID NO: 146384 - RNA, 32 nt, Human
cuuggcuucuagauggcaccauguugucagag

SEQ ID NO: 146385 - RNA, 32 nt, Human
cuuggcuucuuuucucccuugauggucaaguc

SEQ ID NO: 146386 - RNA, 32 nt, Human
cuuggcuuuaucuuggagucaccagaggagau

SEQ ID NO: 146387 - RNA, 32 nt, Human
cuuggcuuucugcaaccucugccucccagguu

SEQ ID NO: 146388 - RNA, 32 nt, Human
cuuggcuuugcugcaacccuucagcucugugc

SEQ ID NO: 146389 - RNA, 32 nt, Human
cuugggaaaaucaagccacgugucaggaguuc

SEQ ID NO: 146390 - RNA, 32 nt, Human
cuugggaaagaguauauucacccucagagaag

SEQ ID NO: 146391 - RNA, 31 nt, Human
cuugggaaaggggugaauucacugggucaug

SEQ ID NO: 146392 - RNA, 32 nt, Human
cuugggaaauagucauaauuacccacauauag

SEQ ID NO: 146393 - RNA, 24 nt, Human
cuugggaaaucaagguugcaguga

SEQ ID NO: 146394 - RNA, 32 nt, Human
cuugggaaauuguacuucagggugauagccug

SEQ ID NO: 146395 - RNA, 32 nt, Human
cuugggaacuaccugcaucuucaguccccuug

SEQ ID NO: 146396 - RNA, 32 nt, Human
cuugggaagcagcuccugcugggagcauggcc

SEQ ID NO: 146397 - RNA, 32 nt, Human
cuugggaagcaguuucagauaaaucaugggca

SEQ ID NO: 146398 - RNA, 19 nt, Human
cuugggaagggaagcuguc

SEQ ID NO: 146399 - RNA, 32 nt, Human
cuugggaagggccauggacccaacugggcccc

SEQ ID NO: 146400 - RNA, 32 nt, Human
cuugggaaggucgaggagggaggacuuaagcc

SEQ ID NO: 146401 - RNA, 32 nt, Human
cuugggaauaagaggaggaagcggcuggcaac

SEQ ID NO: 146402 - RNA, 32 nt, Human
cuugggaaucuguccagcccccaguucugcuc

SEQ ID NO: 146403 - RNA, 32 nt, Human
cuugggaaucuuggagccuaaagagaaaccga

SEQ ID NO: 146404 - RNA, 32 nt, Human
cuugggaaugaauuaugagggagccaggagug

SEQ ID NO: 146405 - RNA, 32 nt, Human
cuugggacacccuccaguaccuggcucaagag

SEQ ID NO: 146406 - RNA, 32 nt, Human
cuugggacauggcacaggcccgcccucugccu

SEQ ID NO: 146407 - RNA, 32 nt, Human
cuugggaccagaagagaaagaaccaaaaagug

SEQ ID NO: 146408 - RNA, 19 nt, Human
cuugggaccaucuucuccu

SEQ ID NO: 146409 - RNA, 32 nt, Human
cuugggaccauggccaccccagagccauccga

SEQ ID NO: 146410 - RNA, 19 nt, Human
cuugggacgaaaagauucu

SEQ ID NO: 146411 - RNA, 32 nt, Human
cuugggacgaaaagauucuacaaagcucuuuu

SEQ ID NO: 146412 - RNA, 32 nt, Human
cuugggacggggaagcagugcugcuuggaaaa

SEQ ID NO: 146413 - RNA, 32 nt, Human
cuugggacugggagagaaaggaaguacaccca

SEQ ID NO: 146414 - RNA, 23 nt, Human
cuugggacuucccucgccuucca

SEQ ID NO: 146415 - RNA, 32 nt, Human
cuugggagaacuugagccagcggcugucuugc

SEQ ID NO: 146416 - RNA, 32 nt, Human
cuugggagagaccuguggcaccagguuggagg

SEQ ID NO: 146417 - RNA, 32 nt, Human
cuugggagagggcugaacucuacgccguguuu

SEQ ID NO: 146418 - RNA, 32 nt, Human
cuugggagagugagacccaguggagggagcaa

SEQ ID NO: 146419 - RNA, 24 nt, Human
cuugggagaucgaggcuacaguga

SEQ ID NO: 146420 - RNA, 32 nt, Human
cuugggagcaaggaggccucucugauguaaag

SEQ ID NO: 146421 - RNA, 32 nt, Human
cuugggagccaagagcuggguaagccuuaccu

SEQ ID NO: 146422 - RNA, 32 nt, Human
cuugggagccacugccacuccaguccugccac

SEQ ID NO: 146423 - RNA, 32 nt, Human
cuugggagccauaccugaacuguuuccuccaa

SEQ ID NO: 146424 - RNA, 32 nt, Human
cuugggagcccugcgucagggcccagagccuc

SEQ ID NO: 146425 - RNA, 32 nt, Human
cuugggagccuacgagguugcagucuggaggg

SEQ ID NO: 146426 - RNA, 32 nt, Human
cuugggaggaagcagaauaaagcaauuuuccu

SEQ ID NO: 146427 - RNA, 32 nt, Human
cuugggaggaaggcccaguccaucguuaacca

SEQ ID NO: 146428 - RNA, 32 nt, Human
cuugggaggaaggggacaguugcagucucacu

SEQ ID NO: 146429 - RNA, 21 nt, Human
cuugggaggaaguuguagugg

SEQ ID NO: 146430 - RNA, 19 nt, Human
cuugggaggacagguccug

SEQ ID NO: 146431 - RNA, 24 nt, Human
cuugggaggcagagguugcaguga

SEQ ID NO: 146432 - RNA, 24 nt, Human
cuugggaggcagagguuucaguga

SEQ ID NO: 146433 - RNA, 32 nt, Human
cuugggaggccuaggcaggagaauggugugaa

SEQ ID NO: 146434 - RNA, 24 nt, Human
cuugggaggcggagcuugcgguga

SEQ ID NO: 146435 - RNA, 32 nt, Human
cuugggaggcggagcuugcggugagccaagau

SEQ ID NO: 146436 - RNA, 24 nt, Human
cuugggaggcggagguugcaguga

SEQ ID NO: 146437 - RNA, 32 nt, Human
cuugggaggcggagguugcagugagcuaagau

SEQ ID NO: 146438 - RNA, 24 nt, Human
cuugggaggcgguuguugcaguga

SEQ ID NO: 146439 - RNA, 32 nt, Human
cuugggaggcgguuguugcagugagcugugau

SEQ ID NO: 146440 - RNA, 32 nt, Human
cuugggaggcugagacaggagaaucgcuugaa

SEQ ID NO: 146441 - RNA, 32 nt, Human
cuugggaggcugagacaggagaauugcuugaa

SEQ ID NO: 146442 - RNA, 32 nt, Human
cuugggaggcugagacaggagacuugcuugaa

SEQ ID NO: 146443 - RNA, 32 nt, Human
cuugggaggcugagacaggcgaauugcuugaa

SEQ ID NO: 146444 - RNA, 32 nt, Human
cuugggaggcugagcgaguccuggagagcaug

SEQ ID NO: 146445 - RNA, 32 nt, Human
cuugggaggcugagguggaaggaucauuugag

SEQ ID NO: 146446 - RNA, 23 nt, Human
cuugggaggcugagguugcagga

SEQ ID NO: 146447 - RNA, 32 nt, Human
cuugggaggcugggcagaagaaucacuugagg

SEQ ID NO: 146448 - RNA, 32 nt, Human
cuugggaggcuuccccucacuauccuacccca

SEQ ID NO: 146449 - RNA, 32 nt, Human
cuugggagggagagguugcagugagcccagau

SEQ ID NO: 146450 - RNA, 32 nt, Human
cuugggagggcugaagccaggggauugcuggg

SEQ ID NO: 146451 - RNA, 32 nt, Human
cuugggagggguagguugcagugagcugagau

SEQ ID NO: 146452 - RNA, 32 nt, Human
cuugggaggguccaguaugaggugagaggaug

SEQ ID NO: 146453 - RNA, 24 nt, Human
cuugggaggucgaggcugcaguga

SEQ ID NO: 146454 - RNA, 24 nt, Human
cuugggagguggagcuuacaguga

SEQ ID NO: 146455 - RNA, 32 nt, Human
cuugggagguggagcuuacagugagccgagau

SEQ ID NO: 146456 - RNA, 32 nt, Human
cuugggagguggaggugggaggauuauaaaua

SEQ ID NO: 146457 - RNA, 24 nt, Human
cuugggagguggagguugcaguga

SEQ ID NO: 146458 - RNA, 32 nt, Human
cuugggagguggagguugcagugagccaggau

SEQ ID NO: 146459 - RNA, 32 nt, Human
cuugggagguggagguugcagugggccgagau

SEQ ID NO: 146460 - RNA, 32 nt, Human
cuugggagugagggguuguggugagggaaaau

SEQ ID NO: 146461 - RNA, 32 nt, Human
cuugggauacagauaaaugucauucacuuauu

SEQ ID NO: 146462 - RNA, 32 nt, Human
cuugggaucgcgguuucccucuccucucccuu

SEQ ID NO: 146463 - RNA, 32 nt, Human
cuugggaucuugggaaccccaucucugagccc

SEQ ID NO: 146464 - RNA, 32 nt, Human
cuugggaugcagccccagcucugcugcaggca

SEQ ID NO: 146465 - RNA, 32 nt, Human
cuugggaugggucuuucacuguucauggcaga

SEQ ID NO: 146466 - RNA, 32 nt, Human
cuugggaugucugcaaaccucuguccauggcc

SEQ ID NO: 146467 - RNA, 32 nt, Human
cuugggcaaaacaauuaagcacacaacuucuu

SEQ ID NO: 146468 - RNA, 32 nt, Human
cuugggcaacacagggcgacccccaucucuac

SEQ ID NO: 146469 - RNA, 32 nt, Human
cuugggcaacacagugagacccccaucuauaa

SEQ ID NO: 146470 - RNA, 32 nt, Human
cuugggcaacacagugagauccugucuacuaa

SEQ ID NO: 146471 - RNA, 32 nt, Human
cuugggcaacagagcaagacccugucuccgaa

SEQ ID NO: 146472 - RNA, 32 nt, Human
cuugggcaacagagcaagacucugucucuuaa

SEQ ID NO: 146473 - RNA, 32 nt, Human
cuugggcaacagagugagacccugucucaaaa

SEQ ID NO: 146474 - RNA, 32 nt, Human
cuugggcaacauagcaagaccccaucucuaca

SEQ ID NO: 146475 - RNA, 32 nt, Human
cuugggcaacauagcaagacccugucuauuuu

SEQ ID NO: 146476 - RNA, 32 nt, Human
cuugggcaacauagggagacccugucucugca

SEQ ID NO: 146477 - RNA, 32 nt, Human
cuugggcaacauagugagacccugucucuagc

SEQ ID NO: 146478 - RNA, 32 nt, Human
cuugggcaacguagcaagaccuugccucuaua

SEQ ID NO: 146479 - RNA, 31 nt, Human
cuugggcaagugucuuuacugcucagaaccu

SEQ ID NO: 146480 - RNA, 32 nt, Human
cuugggcacagugcccuggcucagggaccuuc

SEQ ID NO: 146481 - RNA, 32 nt, Human
cuugggcaccuggcacucaagcacuuugcacg

SEQ ID NO: 146482 - RNA, 32 nt, Human
cuugggcagagcugagugugagaagauggaaa

SEQ ID NO: 146483 - RNA, 32 nt, Human
cuugggcagagcuggcucugagcgccuccauc

SEQ ID NO: 146484 - RNA, 32 nt, Human
cuugggcagcucagccgcuugcccucacccug

SEQ ID NO: 146485 - RNA, 32 nt, Human
cuugggcaggcagacugagaagggacugugua

SEQ ID NO: 146486 - RNA, 32 nt, Human
cuugggcagggugggugaggugcagaugacca

SEQ ID NO: 146487 - RNA, 32 nt, Human
cuugggcagucccagcuccacacugcccugag

SEQ ID NO: 146488 - RNA, 32 nt, Human
cuugggccaccaaaggugguggccaugguacc

SEQ ID NO: 146489 - RNA, 32 nt, Human
cuugggccagcggugcuggcucugccuuuguc

SEQ ID NO: 146490 - RNA, 31 nt, Human
cuugggccagcucuccugccugugucuagag

SEQ ID NO: 146491 - RNA, 32 nt, Human
cuugggccaggaguuugagaccagccuggcca

SEQ ID NO: 146492 - RNA, 32 nt, Human
cuugggccaggucuucucaauggaaggggaau

SEQ ID NO: 146493 - RNA, 21 nt, Human
cuugggccaguuacuuccucu

SEQ ID NO: 146494 - RNA, 21 nt, Human
cuugggcccaagaguucgaga

SEQ ID NO: 146495 - RNA, 32 nt, Human
cuugggcccagagcauguuccagaucccagag

SEQ ID NO: 146496 - RNA, 32 nt, Human
cuugggcccaggaauucaggaccagucugggc

SEQ ID NO: 146497 - RNA, 32 nt, Human
cuugggcccaggagauggagguugcggugagu

SEQ ID NO: 146498 - RNA, 32 nt, Human
cuugggcccaggagauugagaccagccugggc

SEQ ID NO: 146499 - RNA, 32 nt, Human
cuugggcccaggaggucgaggcugcggugagc

SEQ ID NO: 146500 - RNA, 32 nt, Human
cuugggcccaggagguggagguugcagugagc

SEQ ID NO: 146501 - RNA, 32 nt, Human
cuugggcccaggaguucaaggccagccugggc

SEQ ID NO: 146502 - RNA, 32 nt, Human
cuugggcccaggaguucaaggcugcagugagc

SEQ ID NO: 146503 - RNA, 32 nt, Human
cuugggcccaggaguuugaggcugcagugagc

SEQ ID NO: 146504 - RNA, 32 nt, Human
cuugggccccauccgcccucuggaccugugua

SEQ ID NO: 146505 - RNA, 32 nt, Human
cuugggcccgggaggcagagguugcagugagc

SEQ ID NO: 146506 - RNA, 32 nt, Human
cuugggcccgggaggucaagguugcagugagc

SEQ ID NO: 146507 - RNA, 32 nt, Human
cuugggcccgggagguggagguugcagugagc

SEQ ID NO: 146508 - RNA, 32 nt, Human
cuugggcccgggagguggagguugcagugagu

SEQ ID NO: 146509 - RNA, 32 nt, Human
cuugggcccgggaguuugaaguugcagugagc

SEQ ID NO: 146510 - RNA, 32 nt, Human
cuugggcccucuucaggguuuugaggcuggag

SEQ ID NO: 146511 - RNA, 32 nt, Human
cuugggcccuggaggucaaggcugcagugagu

SEQ ID NO: 146512 - RNA, 32 nt, Human
cuugggcccuuagcagccuccucugccagcac

SEQ ID NO: 146513 - RNA, 19 nt, Human
cuugggccgccgcugcgcg

SEQ ID NO: 146514 - RNA, 32 nt, Human
cuugggccucuuccucucucaagaugaagaug

SEQ ID NO: 146515 - RNA, 32 nt, Human
cuugggccugggaggcggagguugcagugagc

SEQ ID NO: 146516 - RNA, 32 nt, Human
cuugggccugggaggucgaggcugcagugagc

SEQ ID NO: 146517 - RNA, 32 nt, Human
cuugggccugggaggucgcgguggggcgagag

SEQ ID NO: 146518 - RNA, 32 nt, Human
cuugggccugggauaaguccacucuccacaca

SEQ ID NO: 146519 - RNA, 21 nt, Human
cuugggccugucaccuccuga

SEQ ID NO: 146520 - RNA, 32 nt, Human
cuugggccuuucuccgaccuucugguguggcc

SEQ ID NO: 146521 - RNA, 32 nt, Human
cuugggccuuuggaaaaauaugugacaaguga

SEQ ID NO: 146522 - RNA, 32 nt, Human
cuugggcgacugcgccccagacuucugucuuu

SEQ ID NO: 146523 - RNA, 32 nt, Human
cuugggcgcggccccaaaauugccuucaaaac

SEQ ID NO: 146524 - RNA, 32 nt, Human
cuugggcgcggggcuucaucauggacacgcuc

SEQ ID NO: 146525 - RNA, 32 nt, Human
cuugggcggccuuggucuguaagcucugcguu

SEQ ID NO: 146526 - RNA, 32 nt, Human
cuugggcgggccugauacucgaguccacaugc

SEQ ID NO: 146527 - RNA, 21 nt, Human
cuugggcucaagaguucaaga

SEQ ID NO: 146528 - RNA, 21 nt, Human
cuugggcucaagaguuugaga

SEQ ID NO: 146529 - RNA, 32 nt, Human
cuugggcucacugcagccucaaccucccaggu

SEQ ID NO: 146530 - RNA, 32 nt, Human
cuugggcucaggagucggagaccagccugggc

SEQ ID NO: 146531 - RNA, 32 nt, Human
cuugggcucauuuuagacugguccugggucac

SEQ ID NO: 146532 - RNA, 32 nt, Human
cuugggcuccagcaucugucucaggccagaug

SEQ ID NO: 146533 - RNA, 32 nt, Human
cuugggcucccaaagugcugggauuauaggug

SEQ ID NO: 146534 - RNA, 19 nt, Human
cuugggcucccuccugccu

SEQ ID NO: 146535 - RNA, 32 nt, Human
cuugggcucccuccugccuccucucucuccuc

SEQ ID NO: 146536 - RNA, 32 nt, Human
cuugggcuccugcuggcuucugagguuucuug

SEQ ID NO: 146537 - RNA, 32 nt, Human
cuugggcuccuuuuacuuucagggggcugcuu

SEQ ID NO: 146538 - RNA, 32 nt, Human
cuugggcucucucuagcuccccaauucugccu

SEQ ID NO: 146539 - RNA, 32 nt, Human
cuugggcugaccucacuaaugccaucagcagc

SEQ ID NO: 146540 - RNA, 32 nt, Human
cuugggcugccaggaacaggaggcgugggaaa

SEQ ID NO: 146541 - RNA, 32 nt, Human
cuugggcugcccccaucucucccaacaaggug

SEQ ID NO: 146542 - RNA, 32 nt, Human
cuugggcugcugaggggcuagugcaguggucc

SEQ ID NO: 146543 - RNA, 32 nt, Human
cuugggcugugcugggggcauccacaaagaag

SEQ ID NO: 146544 - RNA, 32 nt, Human
cuugggcuuaggcuugggcucagcuuuugacc

SEQ ID NO: 146545 - RNA, 23 nt, Human
cuugggcuucacaaggggccuga

SEQ ID NO: 146546 - RNA, 32 nt, Human
cuugggcuuccuggugagccagguggggaggg

SEQ ID NO: 146547 - RNA, 32 nt, Human
cuuggggaaaccaagacauaguagaaaggagu

SEQ ID NO: 146548 - RNA, 32 nt, Human
cuuggggaagaccucccugcacccaacucccc

SEQ ID NO: 146549 - RNA, 30 nt, Human
cuuggggaagccaauggggcacaauccuuc

SEQ ID NO: 146550 - RNA, 20 nt, Human
cuuggggaagcccaggguga

SEQ ID NO: 146551 - RNA, 32 nt, Human
cuuggggaagcugagggcacgaggaggggcug

SEQ ID NO: 146552 - RNA, 32 nt, Human
cuuggggacagaaaugccacucaccaacccag

SEQ ID NO: 146553 - RNA, 32 nt, Human
cuuggggacggcccggugccuggcugcaaggc

SEQ ID NO: 146554 - RNA, 32 nt, Human
cuuggggacuccugucugucuguuacaguuua

SEQ ID NO: 146555 - RNA, 32 nt, Human
cuuggggacugaggcccuggcggaucacgggu

SEQ ID NO: 146556 - RNA, 32 nt, Human
cuuggggagaaaaaggagggugggaaaagguc

SEQ ID NO: 146557 - RNA, 32 nt, Human
cuuggggagcaggcucggcuccccagccccau

SEQ ID NO: 146558 - RNA, 32 nt, Human
cuuggggaggcagaggcaggaggaucgcuuga

SEQ ID NO: 146559 - RNA, 32 nt, Human
cuuggggaggcagagguuaggaaagcccaucu

SEQ ID NO: 146560 - RNA, 18 nt, Human
cuuggggaggccaugcuu

SEQ ID NO: 146561 - RNA, 32 nt, Human
cuuggggaggccgaggcgggcagaucacgaga

SEQ ID NO: 146562 - RNA, 32 nt, Human
cuuggggaggcugagaugggcggaucacgagg

SEQ ID NO: 146563 - RNA, 32 nt, Human
cuuggggaggcugaggcaggaggaucacuuga

SEQ ID NO: 146564 - RNA, 32 nt, Human
cuuggggaggcugaggcaggaggauugccuga

SEQ ID NO: 146565 - RNA, 32 nt, Human
cuuggggaggcugaggcgggcagaucacaagg

SEQ ID NO: 146566 - RNA, 32 nt, Human
cuuggggaggcugaggcgggcagaucacuuaa

SEQ ID NO: 146567 - RNA, 32 nt, Human
cuuggggaggugcauucuccacugugguuggc

SEQ ID NO: 146568 - RNA, 32 nt, Human
cuuggggagguggccgggugcaguggcucgcc

SEQ ID NO: 146569 - RNA, 32 nt, Human
cuuggggagguugaggaggaguggccaggaaa

SEQ ID NO: 146570 - RNA, 32 nt, Human
cuuggggauaaaauggugagcaaaauacacug

SEQ ID NO: 146571 - RNA, 32 nt, Human
cuuggggauggaccuucagcugaaaccauaug

SEQ ID NO: 146572 - RNA, 32 nt, Human
cuuggggauugccacuaaguacagcugauggu

SEQ ID NO: 146573 - RNA, 31 nt, Human
cuuggggcaaugugaccaguguccaagggca

SEQ ID NO: 146574 - RNA, 32 nt, Human
cuuggggcagagggaguuucagacaagacuuc

SEQ ID NO: 146575 - RNA, 18 nt, Human
cuuggggcagggggugca

SEQ ID NO: 146576 - RNA, 32 nt, Human
cuuggggcauggcccucaucugugcugaaaug

SEQ ID NO: 146577 - RNA, 22 nt, Human
cuuggggccaccucugccucca

SEQ ID NO: 146578 - RNA, 32 nt, Human
cuuggggccagaacuccagcccuggggagugg

SEQ ID NO: 146579 - RNA, 32 nt, Human
cuuggggcccagaggaagcugaugucauggcu

SEQ ID NO: 146580 - RNA, 32 nt, Human
cuuggggccccagauguguccuccugaucucc

SEQ ID NO: 146581 - RNA, 32 nt, Human
cuuggggccccuuuggcucucccucacucucu

SEQ ID NO: 146582 - RNA, 32 nt, Human
cuuggggcccucucagagucuaucuccccaag

SEQ ID NO: 146583 - RNA, 32 nt, Human
cuuggggccgaacagcccugccugcucugagg

SEQ ID NO: 146584 - RNA, 32 nt, Human
cuuggggccuuccugaaucaccgcaagaacaa

SEQ ID NO: 146585 - RNA, 32 nt, Human
cuuggggcgggacuuccggcauuuggauggga

SEQ ID NO: 146586 - RNA, 32 nt, Human
cuuggggcuaauguucagcugguguccacugu

SEQ ID NO: 146587 - RNA, 32 nt, Human
cuuggggcucccugacucucccucucugcucc

SEQ ID NO: 146588 - RNA, 32 nt, Human
cuugggggaauauuucacauccauccagagcu

SEQ ID NO: 146589 - RNA, 32 nt, Human
cuugggggacacaccuacucugcuccccucuc

SEQ ID NO: 146590 - RNA, 32 nt, Human
cuugggggacucagggcuccauucuggagggc

SEQ ID NO: 146591 - RNA, 32 nt, Human
cuugggggagugaaggcagagccuggugcaga

SEQ ID NO: 146592 - RNA, 32 nt, Human
cuugggggcauggagggagacugaggcagggu

SEQ ID NO: 146593 - RNA, 32 nt, Human
cuugggggccuuuauauucagugaugcuuacc

SEQ ID NO: 146594 - RNA, 21 nt, Human
cuuggggggacaagccucucu

SEQ ID NO: 146595 - RNA, 18 nt, Human
cuuggggggcuccugccu

SEQ ID NO: 146596 - RNA, 32 nt, Human
cuuggggguggaaaggacagagcccaggcgac

SEQ ID NO: 146597 - RNA, 32 nt, Human
cuugggggugguuugacccugcuuaccuggga

SEQ ID NO: 146598 - RNA, 32 nt, Human
cuuggggguguaaaagagagucacagguaccc

SEQ ID NO: 146599 - RNA, 23 nt, Human
cuuggggguuuucucuuuuguuu

SEQ ID NO: 146600 - RNA, 32 nt, Human
cuuggggucaggggaagguagagcuggagcuu

SEQ ID NO: 146601 - RNA, 32 nt, Human
cuuggggucaggguuugagaccagccuggcca

SEQ ID NO: 146602 - RNA, 32 nt, Human
cuugggguccacccuagucucugacaccuggg

SEQ ID NO: 146603 - RNA, 32 nt, Human
cuugggguccuugaugggcaugugugaugggg

SEQ ID NO: 146604 - RNA, 19 nt, Human
cuuggggucgggagugcag

SEQ ID NO: 146605 - RNA, 32 nt, Human
cuuggggugaaggggacccaggccugugacag

SEQ ID NO: 146606 - RNA, 32 nt, Human
cuugggguggagcagggaaggccugcucugcc

SEQ ID NO: 146607 - RNA, 32 nt, Human
cuugggguggggaucugagggggugggugggc

SEQ ID NO: 146608 - RNA, 20 nt, Human
cuugggguggggggcugcag

SEQ ID NO: 146609 - RNA, 32 nt, Human
cuugggguuauuggagccugagcuugaccuca

SEQ ID NO: 146610 - RNA, 32 nt, Human
cuugggguuugaggacaauguuagaugcauug

SEQ ID NO: 146611 - RNA, 32 nt, Human
cuuggguagggaguggagcuggggaggggccc

SEQ ID NO: 146612 - RNA, 32 nt, Human
cuuggguagguuggggauggggcagaggucug

SEQ ID NO: 146613 - RNA, 32 nt, Human
cuuggguaguaagugcuguggucugucaggac

SEQ ID NO: 146614 - RNA, 32 nt, Human
cuugggucaccugcuccaggaggcagaguucc

SEQ ID NO: 146615 - RNA, 32 nt, Human
cuugggucacugcaaacuccgccucccagguu

SEQ ID NO: 146616 - RNA, 32 nt, Human
cuugggucacugcaaccucugccuccuggguu

SEQ ID NO: 146617 - RNA, 32 nt, Human
cuugggucacugcagccuccaacuccuuggcu

SEQ ID NO: 146618 - RNA, 15 nt, Human
cuugggucagaguga

SEQ ID NO: 146619 - RNA, 32 nt, Human
cuugggucagcccuccuugacugugucccagc

SEQ ID NO: 146620 - RNA, 32 nt, Human
cuugggucaguguguuaacugcuuaucagcua

SEQ ID NO: 146621 - RNA, 32 nt, Human
cuugggucaguuucaguugauaccuccucacu

SEQ ID NO: 146622 - RNA, 32 nt, Human
cuuggguccagcugcuccaggugagcuggcug

SEQ ID NO: 146623 - RNA, 32 nt, Human
cuuggguccaggagguggaggcugcagugagc

SEQ ID NO: 146624 - RNA, 32 nt, Human
cuuggguccaguggaggaagaaggaaggagag

SEQ ID NO: 146625 - RNA, 32 nt, Human
cuugggucccuguggacagagcuguguaggcu

SEQ ID NO: 146626 - RNA, 32 nt, Human
cuugggucgggaguucgagaccagccuggcca

SEQ ID NO: 146627 - RNA, 32 nt, Human
cuugggucucagcugcugacacgcagccugcu

SEQ ID NO: 146628 - RNA, 32 nt, Human
cuugggucugcagggcuuugcagccacacagc

SEQ ID NO: 146629 - RNA, 18 nt, Human
cuugggucuugcugccca

SEQ ID NO: 146630 - RNA, 32 nt, Human
cuugggugaagcccaagaauuuucauuuguaa

SEQ ID NO: 146631 - RNA, 32 nt, Human
cuugggugaccuuccaaaacucugcucucagg

SEQ ID NO: 146632 - RNA, 32 nt, Human
cuugggugagccagacaaaaagaaugauuccu

SEQ ID NO: 146633 - RNA, 32 nt, Human
cuugggugagugagcauuucuaccuccgugcu

SEQ ID NO: 146634 - RNA, 32 nt, Human
cuugggugccucccucuccuugggaggaaaac

SEQ ID NO: 146635 - RNA, 32 nt, Human
cuugggugcuaccucaguguuguaguuucuga

SEQ ID NO: 146636 - RNA, 32 nt, Human
cuugggugcugaguuaggagaauugcuugaau

SEQ ID NO: 146637 - RNA, 32 nt, Human
cuuggguggggaggggacaugaggaggauaaa

SEQ ID NO: 146638 - RNA, 32 nt, Human
cuugggugugacaccugcuugacagaggcagg

SEQ ID NO: 146639 - RNA, 32 nt, Human
cuuggguguuugugacaggcccugccugccac

SEQ ID NO: 146640 - RNA, 32 nt, Human
cuuggguuaguuccuguuaggccccggccggg

SEQ ID NO: 146641 - RNA, 32 nt, Human
cuuggguucaagugauucuuccaccucagccu

SEQ ID NO: 146642 - RNA, 32 nt, Human
cuuggguucugaggaagcagauguuucaugcu

SEQ ID NO: 146643 - RNA, 32 nt, Human
cuuggguucugugguuggaugcggaggaauca

SEQ ID NO: 146644 - RNA, 32 nt, Human
cuuggguuugacucugggaaucaugcucauug

SEQ ID NO: 146645 - RNA, 20 nt, Human
cuuggguuuguuuggaugug

SEQ ID NO: 146646 - RNA, 27 nt, Human
cuugguaaaaaccuuccucuuccucca

SEQ ID NO: 146647 - RNA, 19 nt, Human
cuugguaaauacaacacau

SEQ ID NO: 146648 - RNA, 32 nt, Human
cuugguaaaugucacuguacagaagacauuga

SEQ ID NO: 146649 - RNA, 32 nt, Human
cuugguaccaggagagcugcucacuuagggcc

SEQ ID NO: 146650 - RNA, 32 nt, Human
cuugguagacucuuggaacuugcucaguuuuu

SEQ ID NO: 146651 - RNA, 32 nt, Human
cuugguagagguggcuuuagugaaguguauaa

SEQ ID NO: 146652 - RNA, 19 nt, Human
cuugguaggagggagucag

SEQ ID NO: 146653 - RNA, 32 nt, Human
cuugguaggccagaagugcugaaggaaggauu

SEQ ID NO: 146654 - RNA, 22 nt, Human
cuugguagggcaggagacgcag

SEQ ID NO: 146655 - RNA, 24 nt, Human
cuugguaguggugugggggugcag

SEQ ID NO: 146656 - RNA, 32 nt, Human
cuugguaguucuuccucugcucugcuucccuu

SEQ ID NO: 146657 - RNA, 32 nt, Human
cuugguauacuggcugggcacaguggcucaca

SEQ ID NO: 146658 - RNA, 32 nt, Human
cuugguaucaggccaagcaaaccauguuaguc

SEQ ID NO: 146659 - RNA, 32 nt, Human
cuugguaucccucaucccagaagaggcaucuc

SEQ ID NO: 146660 - RNA, 32 nt, Human
cuugguauggugacagugucucuccauggccu

SEQ ID NO: 146661 - RNA, 32 nt, Human
cuugguauggugguaauggucagucuuggcau

SEQ ID NO: 146662 - RNA, 32 nt, Human
cuuggucaauuuaccugaccucagcuuuccua

SEQ ID NO: 146663 - RNA, 32 nt, Human
cuuggucacaaggcucagcuucucuccacugu

SEQ ID NO: 146664 - RNA, 32 nt, Human
cuuggucacacuccuuggcuucucccaccgca

SEQ ID NO: 146665 - RNA, 32 nt, Human
cuuggucacagaggaauccaugugaccuucag

SEQ ID NO: 146666 - RNA, 31 nt, Human
cuuggucacagcucuagccacagcagaagga

SEQ ID NO: 146667 - RNA, 32 nt, Human
cuuggucacagcucuagccacagcagaaggaa

SEQ ID NO: 146668 - RNA, 31 nt, Human
cuuggucacagcuggcaccagugcagagcaa

SEQ ID NO: 146669 - RNA, 32 nt, Human
cuuggucacagcuggcaccagugcagagcaaa

SEQ ID NO: 146670 - RNA, 19 nt, Human
cuuggucaccuugccccaa

SEQ ID NO: 146671 - RNA, 32 nt, Human
cuuggucaccuugccccaagcuuuccccucug

SEQ ID NO: 146672 - RNA, 32 nt, Human
cuuggucacugcacuucauagcccggcauauc

SEQ ID NO: 146673 - RNA, 32 nt, Human
cuuggucaguucucucaacuuugcuuugggca

SEQ ID NO: 146674 - RNA, 32 nt, Human
cuuggucauccaugacaccacaccggcaucag

SEQ ID NO: 146675 - RNA, 32 nt, Human
cuuggucaucuaggcccugauguggccuauua

SEQ ID NO: 146676 - RNA, 32 nt, Human
cuuggucaucuaugacaccacaccagcacagu

SEQ ID NO: 146677 - RNA, 21 nt, Human
cuuggucauguacagcacuga

SEQ ID NO: 146678 - RNA, 24 nt, Human
cuuggucauucugacaggugcugg

SEQ ID NO: 146679 - RNA, 32 nt, Human
cuuggucccagacagcuggacccauuugccag

SEQ ID NO: 146680 - RNA, 32 nt, Human
cuuggucccaggaguucaagaccagccugugg

SEQ ID NO: 146681 - RNA, 32 nt, Human
cuugguccccaaccccagcaccucaaggagca

SEQ ID NO: 146682 - RNA, 31 nt, Human
cuugguccccgagaugggguuggaggggacu

SEQ ID NO: 146683 - RNA, 32 nt, Human
cuuggucccuggcacaaagcagccaucugagu

SEQ ID NO: 146684 - RNA, 32 nt, Human
cuuggucccuggcacccccaugcacaccccug

SEQ ID NO: 146685 - RNA, 32 nt, Human
cuuggucgcagugacugugguguccuugagau

SEQ ID NO: 146686 - RNA, 32 nt, Human
cuuggucuacagcacggguucucagucgggcg

SEQ ID NO: 146687 - RNA, 26 nt, Human
cuuggucuagacccaccaggcauugg

SEQ ID NO: 146688 - RNA, 32 nt, Human
cuuggucuagagguggagcacagugaaagaau

SEQ ID NO: 146689 - RNA, 32 nt, Human
cuuggucucacaguggcuuaggccaggguggg

SEQ ID NO: 146690 - RNA, 32 nt, Human
cuuggucuccagggaccccagaagcacaccuc

SEQ ID NO: 146691 - RNA, 32 nt, Human
cuuggucucccaaagugcugggauuauaggca

SEQ ID NO: 146692 - RNA, 21 nt, Human
cuuggucucuguccugcccca

SEQ ID NO: 146693 - RNA, 32 nt, Human
cuuggucugcuggccuggccucuucugcccag

SEQ ID NO: 146694 - RNA, 32 nt, Human
cuuggucugggagcaagcagcccagccauccu

SEQ ID NO: 146695 - RNA, 32 nt, Human
cuuggucuguaagcucugcguucccgggcgug

SEQ ID NO: 146696 - RNA, 32 nt, Human
cuuggucugucgcccaggcuggagugcaguag

SEQ ID NO: 146697 - RNA, 32 nt, Human
cuuggucuguuacccaggcuggagugcagugg

SEQ ID NO: 146698 - RNA, 32 nt, Human
cuuggucuguugcccaggcuggaaugcagugg

SEQ ID NO: 146699 - RNA, 32 nt, Human
cuuggucuguugcccaggcuggagugcagugg

SEQ ID NO: 146700 - RNA, 32 nt, Human
cuuggucuuagcccuugggagcugacagccca

SEQ ID NO: 146701 - RNA, 32 nt, Human
cuuggucuucuccuuugaagcacagccuauuu

SEQ ID NO: 146702 - RNA, 32 nt, Human
cuuggucuuguauucauauugugggacagugg

SEQ ID NO: 146703 - RNA, 32 nt, Human
cuuggucuuuccauuuguggcugugcucucuc

SEQ ID NO: 146704 - RNA, 32 nt, Human
cuuggugagaggaucaguguaaauccuaauag

SEQ ID NO: 146705 - RNA, 31 nt, Human
cuuggugaggccaugucaacauuccucguuu

SEQ ID NO: 146706 - RNA, 32 nt, Human
cuuggugcaagacucaggagcuagcagcccgu

SEQ ID NO: 146707 - RNA, 32 nt, Human
cuuggugccaggaguucuagaccagccuggcc

SEQ ID NO: 146708 - RNA, 32 nt, Human
cuuggugccccaggcaauaauaggcccgucuc

SEQ ID NO: 146709 - RNA, 32 nt, Human
cuuggugcccuccaagcaucuaauggcuuauu

SEQ ID NO: 146710 - RNA, 19 nt, Human
cuuggugccgccuccuccu

SEQ ID NO: 146711 - RNA, 32 nt, Human
cuuggugcuccugcccacaccagccacuuugg

SEQ ID NO: 146712 - RNA, 32 nt, Human
cuuggugcucuucccuccacaugagggccacc

SEQ ID NO: 146713 - RNA, 32 nt, Human
cuuggugcugaacuuagccacaaggagcuguc

SEQ ID NO: 146714 - RNA, 20 nt, Human
cuuggugcugggacugcagg

SEQ ID NO: 146715 - RNA, 32 nt, Human
cuuggugcugggacugcagggagagggcugug

SEQ ID NO: 146716 - RNA, 19 nt, Human
cuugguggacagggcgggg

SEQ ID NO: 146717 - RNA, 18 nt, Human
cuugguggacgggcccag

SEQ ID NO: 146718 - RNA, 32 nt, Human
cuugguggacguggggacagguaggagccuag

SEQ ID NO: 146719 - RNA, 32 nt, Human
cuugguggagcagcacuuacuuacuacuggaa

SEQ ID NO: 146720 - RNA, 32 nt, Human
cuugguggagugcaccuguaaucccagcuacu

SEQ ID NO: 146721 - RNA, 24 nt, Human
cuugguggcaaagcaggggugcag

SEQ ID NO: 146722 - RNA, 32 nt, Human
cuugguggcacacgccuguaaucccagcuacu

SEQ ID NO: 146723 - RNA, 32 nt, Human
cuugguggcaggcgccuguaaucccagcuacu

SEQ ID NO: 146724 - RNA, 32 nt, Human
cuugguggcgcgcaccuguagucccaguuacu

SEQ ID NO: 146725 - RNA, 32 nt, Human
cuugguggcgggcaccuguaaucccagccacu

SEQ ID NO: 146726 - RNA, 32 nt, Human
cuugguggcgggcgccuguaaucccagcuacu

SEQ ID NO: 146727 - RNA, 32 nt, Human
cuugguggcgggugccuguaaucccagcuacu

SEQ ID NO: 146728 - RNA, 32 nt, Human
cuugguggcucacaccuguaauuccagcacuu

SEQ ID NO: 146729 - RNA, 32 nt, Human
cuugguggcucacgccuguaaucccagcacuu

SEQ ID NO: 146730 - RNA, 32 nt, Human
cuugguggcucaggccuguaaucccagcacuu

SEQ ID NO: 146731 - RNA, 32 nt, Human
cuugguggcucaugccuguaaucccagcacuu

SEQ ID NO: 146732 - RNA, 32 nt, Human
cuugguggcucaugccuguaauuccagcacuu

SEQ ID NO: 146733 - RNA, 32 nt, Human
cuugguggcuggcgccuguaaucccagcuacu

SEQ ID NO: 146734 - RNA, 32 nt, Human
cuugguggcuuaugccuguaaucccagcacuu

SEQ ID NO: 146735 - RNA, 32 nt, Human
cuuggugggaagggaagcacacucugcuguuc

SEQ ID NO: 146736 - RNA, 32 nt, Human
cuuggugggcuggguucauacugugaaauaaa

SEQ ID NO: 146737 - RNA, 32 nt, Human
cuuggugggcuucacgucuuccccuggauuug

SEQ ID NO: 146738 - RNA, 32 nt, Human
cuugguggggaagggacuugagcugggcaagu

SEQ ID NO: 146739 - RNA, 20 nt, Human
cuuggugggggagggcacag

SEQ ID NO: 146740 - RNA, 21 nt, Human
cuuggugggggaggggggcgg

SEQ ID NO: 146741 - RNA, 32 nt, Human
cuugguggggucuuccacugugugcccuucuc

SEQ ID NO: 146742 - RNA, 32 nt, Human
cuugguggucccagccucccagucccugcucu

SEQ ID NO: 146743 - RNA, 32 nt, Human
cuugguggugcacgccuguaaucccagcuacu

SEQ ID NO: 146744 - RNA, 32 nt, Human
cuugguggugggauagagacuuagggagggua

SEQ ID NO: 146745 - RNA, 32 nt, Human
cuuggugguguacaccuguggucccagcuauu

SEQ ID NO: 146746 - RNA, 32 nt, Human
cuugguggugugagccuguagucccagcuacu

SEQ ID NO: 146747 - RNA, 32 nt, Human
cuugguggugugcaccuguaauuccagcuacu

SEQ ID NO: 146748 - RNA, 32 nt, Human
cuugguggugugcacuuguaaucccagcuaca

SEQ ID NO: 146749 - RNA, 32 nt, Human
cuugguggugugcgccuguaauuccagcuacu

SEQ ID NO: 146750 - RNA, 32 nt, Human
cuuggugguucacaccuguaauccuagaacuu

SEQ ID NO: 146751 - RNA, 32 nt, Human
cuuggugguucccacuugcaaucccagcuauu

SEQ ID NO: 146752 - RNA, 32 nt, Human
cuuggugguucugucccucugccuguaacaaa

SEQ ID NO: 146753 - RNA, 32 nt, Human
cuugguguacagaccaccuuucacaaaacgaa

SEQ ID NO: 146754 - RNA, 32 nt, Human
cuugguguccucugacuucuguccucagaagg

SEQ ID NO: 146755 - RNA, 20 nt, Human
cuuggugucggggggcgggg

SEQ ID NO: 146756 - RNA, 32 nt, Human
cuuggugucugugcugggcaugguuggcuugg

SEQ ID NO: 146757 - RNA, 32 nt, Human
cuuggugugaacaacucuuccuuugugaugcc

SEQ ID NO: 146758 - RNA, 32 nt, Human
cuuggugugagagugagggcagagggagcugg

SEQ ID NO: 146759 - RNA, 32 nt, Human
cuugguguguguggucuuacucaucuucuagu

SEQ ID NO: 146760 - RNA, 32 nt, Human
cuugguuaccugugccauucauggcccaagug

SEQ ID NO: 146761 - RNA, 32 nt, Human
cuugguuaggaaauguuuugggggauaucaca

SEQ ID NO: 146762 - RNA, 32 nt, Human
cuugguucaaacgauucuccugccucagccuc

SEQ ID NO: 146763 - RNA, 32 nt, Human
cuugguucaacaacaagaacuuacuuaaaaca

SEQ ID NO: 146764 - RNA, 32 nt, Human
cuugguucaagcaauucuccugccucagccuc

SEQ ID NO: 146765 - RNA, 32 nt, Human
cuugguucacaguguccagcacaucuucacug

SEQ ID NO: 146766 - RNA, 32 nt, Human
cuugguucacauuuuggaaaucagagauuaca

SEQ ID NO: 146767 - RNA, 32 nt, Human
cuugguucacugcaaccuccaccucuuggguu

SEQ ID NO: 146768 - RNA, 32 nt, Human
cuugguucacugcaaccuccgccuccuggauu

SEQ ID NO: 146769 - RNA, 32 nt, Human
cuugguucacugcaaccucugccucccagguu

SEQ ID NO: 146770 - RNA, 32 nt, Human
cuugguucacugcaaccucugccucccggguu

SEQ ID NO: 146771 - RNA, 32 nt, Human
cuugguuccagcaauucuucugccucagccuc

SEQ ID NO: 146772 - RNA, 20 nt, Human
cuugguuccaguuccugccu

SEQ ID NO: 146773 - RNA, 32 nt, Human
cuugguucccagcugcucucccaagacugcag

SEQ ID NO: 146774 - RNA, 32 nt, Human
cuugguuccucacaaagccaagccggcugcag

SEQ ID NO: 146775 - RNA, 32 nt, Human
cuugguuccuccccgaaaacccccagcauuac

SEQ ID NO: 146776 - RNA, 32 nt, Human
cuugguuccucguucccugcacaaaaugcccu

SEQ ID NO: 146777 - RNA, 32 nt, Human
cuugguuccuuuuuguuuguuuuccuucuccu

SEQ ID NO: 146778 - RNA, 32 nt, Human
cuugguucgcccgguuuucuguuuucaguaaa

SEQ ID NO: 146779 - RNA, 32 nt, Human
cuugguucucagacucucucuucacuacgugu

SEQ ID NO: 146780 - RNA, 32 nt, Human
cuugguucucggggaugcaugagaaggugagc

SEQ ID NO: 146781 - RNA, 21 nt, Human
cuugguucugauggcugcuga

SEQ ID NO: 146782 - RNA, 32 nt, Human
cuugguucuuccuagugccuacaaugggaaaa

SEQ ID NO: 146783 - RNA, 32 nt, Human
cuugguugaaagugccugugcuggaacuggcc

SEQ ID NO: 146784 - RNA, 31 nt, Human
cuugguugacuucucugcccuuaaaguaaau

SEQ ID NO: 146785 - RNA, 22 nt, Human
cuugguuggcauuuuuaacaca

SEQ ID NO: 146786 - RNA, 18 nt, Human
cuugguuggggggcgcgg

SEQ ID NO: 146787 - RNA, 32 nt, Human
cuugguugguagggaaauaggaguugguggga

SEQ ID NO: 146788 - RNA, 20 nt, Human
cuugguuggucaggcacuga

SEQ ID NO: 146789 - RNA, 32 nt, Human
cuugguuguaggucaacucaauuuuugguaga

SEQ ID NO: 146790 - RNA, 32 nt, Human
cuugguugugagaaucccugagcccaggcggu

SEQ ID NO: 146791 - RNA, 32 nt, Human
cuugguuuauauugcaguuaacacaguuacaa

SEQ ID NO: 146792 - RNA, 32 nt, Human
cuugguuuauccaaucucaaaacaucuacaua

SEQ ID NO: 146793 - RNA, 32 nt, Human
cuugguuucucuuucaggaugucauuuucaaa

SEQ ID NO: 146794 - RNA, 32 nt, Human
cuugguuugacaacuucugccacucccauguc

SEQ ID NO: 146795 - RNA, 32 nt, Human
cuugguuugagaugcauuugaggauuuuaauu

SEQ ID NO: 146796 - RNA, 32 nt, Human
cuugguuugauccugacugcugucauggcgug

SEQ ID NO: 146797 - RNA, 32 nt, Human
cuugguuuggaugucacacagagcugaagggg

SEQ ID NO: 146798 - RNA, 26 nt, Human
cuugguuugggcuucauuaggacuga

SEQ ID NO: 146799 - RNA, 32 nt, Human
cuugguuuggggaccccacaaaaggagggaag

SEQ ID NO: 146800 - RNA, 32 nt, Human
cuugguuuggggaccugcaaaugggaggccug

SEQ ID NO: 146801 - RNA, 32 nt, Human
cuugguuuggugguggcaggugucuggaaucc

SEQ ID NO: 146802 - RNA, 23 nt, Human
cuugguuuucagagagaaaaaua

SEQ ID NO: 146803 - RNA, 32 nt, Human
cuugguuuucugggcuggggccuaggcagggc

SEQ ID NO: 146804 - RNA, 32 nt, Human
cuuguaaaacaaacacauauuaugggacuagg

SEQ ID NO: 146805 - RNA, 21 nt, Human
cuuguaaaacuaaggggaaaa

SEQ ID NO: 146806 - RNA, 32 nt, Human
cuuguaaaacuuucuuucuucuuuucuauuuu

SEQ ID NO: 146807 - RNA, 32 nt, Human
cuuguaaacccaaagccgccaaguaagcccuu

SEQ ID NO: 146808 - RNA, 32 nt, Human
cuuguaaaccuacuaauaggcucugccccucu

SEQ ID NO: 146809 - RNA, 32 nt, Human
cuuguaaaggaaugccugcaccaggaaagucc

SEQ ID NO: 146810 - RNA, 32 nt, Human
cuuguaaaggcugagggugagcuguaucugga

SEQ ID NO: 146811 - RNA, 32 nt, Human
cuuguaacucuaguccacaacugcuagucacu

SEQ ID NO: 146812 - RNA, 32 nt, Human
cuuguaagauacuccugacaucuugcuuuagc

SEQ ID NO: 146813 - RNA, 32 nt, Human
cuuguaagugacuggcugggugcaguagcuca

SEQ ID NO: 146814 - RNA, 32 nt, Human
cuuguaauacccuucacauggaagauuaauga

SEQ ID NO: 146815 - RNA, 19 nt, Human
cuuguaaucccagcacuuu

SEQ ID NO: 146816 - RNA, 22 nt, Human
cuuguaaucccagcuacauggg

SEQ ID NO: 146817 - RNA, 32 nt, Human
cuuguaaucccagcuacucagaaggcugaggu

SEQ ID NO: 146818 - RNA, 32 nt, Human
cuuguaaucccagcuacucaggaggcugaggc

SEQ ID NO: 146819 - RNA, 32 nt, Human
cuuguaaucccagcuacucaggagucugaggc

SEQ ID NO: 146820 - RNA, 32 nt, Human
cuuguaaucccagcuacucccaaggcugaggc

SEQ ID NO: 146821 - RNA, 32 nt, Human
cuuguaaucccagcuacucgggagcugaggca

SEQ ID NO: 146822 - RNA, 32 nt, Human
cuuguaaucccagcuacucgggaggcugaggc

SEQ ID NO: 146823 - RNA, 32 nt, Human
cuuguaaucccagcuacucuggaggcugaggc

SEQ ID NO: 146824 - RNA, 32 nt, Human
cuuguaaucccagcuacucuggaggcugggcu

SEQ ID NO: 146825 - RNA, 32 nt, Human
cuuguaaucccagcuacuugggaggcugagag

SEQ ID NO: 146826 - RNA, 32 nt, Human
cuuguaaucccagcuacuugggaggcugaggc

SEQ ID NO: 146827 - RNA, 21 nt, Human
cuuguaaucccagcuauuggg

SEQ ID NO: 146828 - RNA, 19 nt, Human
cuuguaauccuagcacuuu

SEQ ID NO: 146829 - RNA, 32 nt, Human
cuuguaauccuagcuacucaagaggcugaggc

SEQ ID NO: 146830 - RNA, 22 nt, Human
cuuguaaucucagcuacccggg

SEQ ID NO: 146831 - RNA, 32 nt, Human
cuuguaaucucagcuacuugggagacugaggc

SEQ ID NO: 146832 - RNA, 32 nt, Human
cuuguaaucugaauuauaaucccaauauauug

SEQ ID NO: 146833 - RNA, 32 nt, Human
cuuguaauuaaaucuccuaacaacccuguaag

SEQ ID NO: 146834 - RNA, 32 nt, Human
cuuguaauuccagcuacuugggaggcugaggc

SEQ ID NO: 146835 - RNA, 32 nt, Human
cuuguacagaacuuuuacauuuuugaauauuc

SEQ ID NO: 146836 - RNA, 32 nt, Human
cuuguacagcaaucuccuccuccacugccacu

SEQ ID NO: 146837 - RNA, 32 nt, Human
cuuguacagcauggccagggggcaaggaaagc

SEQ ID NO: 146838 - RNA, 32 nt, Human
cuuguacauaagaaaugaaaaggcuucccucc

SEQ ID NO: 146839 - RNA, 32 nt, Human
cuuguacauagacuuauuuacaaaaagcuagg

SEQ ID NO: 146840 - RNA, 22 nt, Human
cuuguacauaguuugcuccucu

SEQ ID NO: 146841 - RNA, 32 nt, Human
cuuguaccaauucuagcacccacugaaaaaca

SEQ ID NO: 146842 - RNA, 32 nt, Human
cuuguaccauguggcaagugccagcaggaacg

SEQ ID NO: 146843 - RNA, 32 nt, Human
cuuguaccauuuuaaauggagaucauaauuuu

SEQ ID NO: 146844 - RNA, 32 nt, Human
cuuguacccaggaggcagagauugcagugagc

SEQ ID NO: 146845 - RNA, 32 nt, Human
cuuguacccaggaggcggagguuguagugagc

SEQ ID NO: 146846 - RNA, 32 nt, Human
cuuguacccaggagguggagguugcagugagc

SEQ ID NO: 146847 - RNA, 32 nt, Human
cuuguacccaggagguggagguugcggugaac

SEQ ID NO: 146848 - RNA, 32 nt, Human
cuuguaccccaucccuuccuccccagucuacg

SEQ ID NO: 146849 - RNA, 32 nt, Human
cuuguacccguaaucccagcacuuugggaggc

SEQ ID NO: 146850 - RNA, 32 nt, Human
cuuguaccugcuucauugcauguauuguuaag

SEQ ID NO: 146851 - RNA, 32 nt, Human
cuuguaccugggaagcgcagguugcagugagc

SEQ ID NO: 146852 - RNA, 32 nt, Human
cuuguaccugggaggaggagguugcagugagc

SEQ ID NO: 146853 - RNA, 32 nt, Human
cuuguacuaagccaggaggcuuuaagcuccag

SEQ ID NO: 146854 - RNA, 18 nt, Human
cuuguacuaggcauuuua

SEQ ID NO: 146855 - RNA, 32 nt, Human
cuuguacucaacuacaugcuuuugucagggaa

SEQ ID NO: 146856 - RNA, 32 nt, Human
cuuguacucacucacccuaccuccagggcaua

SEQ ID NO: 146857 - RNA, 32 nt, Human
cuuguacucccagcuacuugggaggcugagac

SEQ ID NO: 146858 - RNA, 32 nt, Human
cuuguacucuucucuccacccuucuuagggcu

SEQ ID NO: 146859 - RNA, 32 nt, Human
cuuguacugcucccucuaucucuuaucaugag

SEQ ID NO: 146860 - RNA, 32 nt, Human
cuuguagaaaccaguacacuuuuagauuagac

SEQ ID NO: 146861 - RNA, 32 nt, Human
cuuguagacagagcacgaguuggcagccgaug

SEQ ID NO: 146862 - RNA, 32 nt, Human
cuuguagagacagggucucacuauguugucua

SEQ ID NO: 146863 - RNA, 26 nt, Human
cuuguagagauauuacuuguccuucc

SEQ ID NO: 146864 - RNA, 32 nt, Human
cuuguagaggucuuucaccuccuugguuaggu

SEQ ID NO: 146865 - RNA, 32 nt, Human
cuuguagauauaacucguucaucuucauuuac

SEQ ID NO: 146866 - RNA, 32 nt, Human
cuuguagauccagcuacucgggaggcugaggc

SEQ ID NO: 146867 - RNA, 32 nt, Human
cuuguagaugcaucaccccaguuuccgccccc

SEQ ID NO: 146868 - RNA, 32 nt, Human
cuuguagcaagccucagacuccaggcuugagc

SEQ ID NO: 146869 - RNA, 32 nt, Human
cuuguagcagccgccuccccugugccccagcc

SEQ ID NO: 146870 - RNA, 32 nt, Human
cuuguagcauguuauauuuuuguguuuuauac

SEQ ID NO: 146871 - RNA, 32 nt, Human
cuuguagccaguuucacaggccagcuacagaa

SEQ ID NO: 146872 - RNA, 32 nt, Human
cuuguagccccagcuacuagggaggcugagga

SEQ ID NO: 146873 - RNA, 32 nt, Human
cuuguagccccagcuggcuugugggcuucacc

SEQ ID NO: 146874 - RNA, 32 nt, Human
cuuguagccugcaggcugaggaagucucuucu

SEQ ID NO: 146875 - RNA, 32 nt, Human
cuuguagcucuuccucuaugccuuggugccgc

SEQ ID NO: 146876 - RNA, 32 nt, Human
cuuguaggaauacuaugugcauguuugauauu

SEQ ID NO: 146877 - RNA, 32 nt, Human
cuuguaggauggcccgccacuccacccagggg

SEQ ID NO: 146878 - RNA, 32 nt, Human
cuuguaggcauguuccucugaaggacuugaga

SEQ ID NO: 146879 - RNA, 23 nt, Human
cuuguaggcuaucgccccauucc

SEQ ID NO: 146880 - RNA, 32 nt, Human
cuuguaggggucuuucaccuccuugguuagau

SEQ ID NO: 146881 - RNA, 32 nt, Human
cuuguaggggucuuucaccuccuugguuaggu

SEQ ID NO: 146882 - RNA, 32 nt, Human
cuuguagggugaggcgugggauccagagagaa

SEQ ID NO: 146883 - RNA, 32 nt, Human
cuuguaggugccugccuucaucugguccagga

SEQ ID NO: 146884 - RNA, 32 nt, Human
cuuguagucauuguuugaugggaccaacuugu

SEQ ID NO: 146885 - RNA, 22 nt, Human
cuuguagucccaacuacuuggg

SEQ ID NO: 146886 - RNA, 32 nt, Human
cuuguagucccagcuacucaagaggcugaggc

SEQ ID NO: 146887 - RNA, 22 nt, Human
cuuguagucccagcuacucagg

SEQ ID NO: 146888 - RNA, 32 nt, Human
cuuguagucccagcuacucaggaggcuaagca

SEQ ID NO: 146889 - RNA, 32 nt, Human
cuuguagucccagcuacucaggaggcugaagc

SEQ ID NO: 146890 - RNA, 32 nt, Human
cuuguagucccagcuacucaggaggcuguggu

SEQ ID NO: 146891 - RNA, 32 nt, Human
cuuguagucccagcuacucaugaggcuuaaau

SEQ ID NO: 146892 - RNA, 32 nt, Human
cuuguagucccagcuacucgggaggcugaggc

SEQ ID NO: 146893 - RNA, 32 nt, Human
cuuguagucccagcuacuuaggaggcugaggu

SEQ ID NO: 146894 - RNA, 32 nt, Human
cuuguagucccagcuacuuggcaggcugaggc

SEQ ID NO: 146895 - RNA, 32 nt, Human
cuuguagucccagcuacuugggaggcugagau

SEQ ID NO: 146896 - RNA, 32 nt, Human
cuuguagucccagcuacuugggaggcugaggc

SEQ ID NO: 146897 - RNA, 32 nt, Human
cuuguagucccagcuacuuuggaggcugaagc

SEQ ID NO: 146898 - RNA, 32 nt, Human
cuuguagucccagcuauuugggaggcugaggc

SEQ ID NO: 146899 - RNA, 32 nt, Human
cuuguaguccccauuacuuggaaggccaaggc

SEQ ID NO: 146900 - RNA, 32 nt, Human
cuuguaguccgagcuacucgggaggcugaggc

SEQ ID NO: 146901 - RNA, 32 nt, Human
cuuguaguccuugcuaguaacagcccuaauga

SEQ ID NO: 146902 - RNA, 32 nt, Human
cuuguagucugccugugaauagccacugcacu

SEQ ID NO: 146903 - RNA, 32 nt, Human
cuuguaguuccagcuacucaggaggcugaggu

SEQ ID NO: 146904 - RNA, 32 nt, Human
cuuguauagacagagaucagaccucaacaagg

SEQ ID NO: 146905 - RNA, 32 nt, Human
cuuguauauacucagucaggacagauuuuaac

SEQ ID NO: 146906 - RNA, 32 nt, Human
cuuguauauggaccccugagaaugagcaauug

SEQ ID NO: 146907 - RNA, 32 nt, Human
cuuguauauuaaaaaucaaaagaugaggcuuu

SEQ ID NO: 146908 - RNA, 32 nt, Human
cuuguauauuucugaagagguggaucccagag

SEQ ID NO: 146909 - RNA, 32 nt, Human
cuuguaugcgaagaccucuuuauaucuuucag

SEQ ID NO: 146910 - RNA, 32 nt, Human
cuuguauugcuccgggaaccagcccugcagga

SEQ ID NO: 146911 - RNA, 32 nt, Human
cuuguauuuuaaaaggaggauauauuugcacu

SEQ ID NO: 146912 - RNA, 32 nt, Human
cuuguauuuuuguggaugaugaccuugguuaa

SEQ ID NO: 146913 - RNA, 32 nt, Human
cuugucaaacagagcauucugaguguuuacag

SEQ ID NO: 146914 - RNA, 32 nt, Human
cuugucaaccgggcuggagugcaguggugcaa

SEQ ID NO: 146915 - RNA, 32 nt, Human
cuugucacaggccuagagucugagggagggga

SEQ ID NO: 146916 - RNA, 32 nt, Human
cuugucacaggcugaaaaacagaguggguacu

SEQ ID NO: 146917 - RNA, 25 nt, Human
cuugucacccaggcuagagugcagu

SEQ ID NO: 146918 - RNA, 25 nt, Human
cuugucacccaggcuggaguacagu

SEQ ID NO: 146919 - RNA, 25 nt, Human
cuugucacccaggcuggaguccagu

SEQ ID NO: 146920 - RNA, 23 nt, Human
cuugucacccaggcuggagugca

SEQ ID NO: 146921 - RNA, 25 nt, Human
cuugucacccaggcuggagugcagu

SEQ ID NO: 146922 - RNA, 32 nt, Human
cuugucacccaggcuggagugcaguggcacaa

SEQ ID NO: 146923 - RNA, 32 nt, Human
cuugucacccaggcuggagugcaguggcgcaa

SEQ ID NO: 146924 - RNA, 32 nt, Human
cuugucacccaggcuggagugcaguggcgcca

SEQ ID NO: 146925 - RNA, 32 nt, Human
cuugucacccaggcuggagugcaguggcgcga

SEQ ID NO: 146926 - RNA, 32 nt, Human
cuugucacccaggcuggagugcaguggcucaa

SEQ ID NO: 146927 - RNA, 32 nt, Human
cuugucacccaggcuggagugcaguggugcaa

SEQ ID NO: 146928 - RNA, 32 nt, Human
cuugucacccaggcuggaguguagugguguga

SEQ ID NO: 146929 - RNA, 32 nt, Human
cuugucaccgacagggcgauugcagugcguuc

SEQ ID NO: 146930 - RNA, 32 nt, Human
cuugucaccgaggcuggagugcaaugacauga

SEQ ID NO: 146931 - RNA, 32 nt, Human
cuugucacucaggcuggagugcagugguguga

SEQ ID NO: 146932 - RNA, 32 nt, Human
cuugucacugguuugcugacuuacugaggauu

SEQ ID NO: 146933 - RNA, 32 nt, Human
cuugucacuugucaggaauguguuuuuaccac

SEQ ID NO: 146934 - RNA, 32 nt, Human
cuugucagagcagagggcaggugggagucacc

SEQ ID NO: 146935 - RNA, 32 nt, Human
cuugucagagggccucaaucucccaucuguga

SEQ ID NO: 146936 - RNA, 32 nt, Human
cuugucagccugugugcguguggugcaggaaa

SEQ ID NO: 146937 - RNA, 32 nt, Human
cuugucagcucucuagguuugauaugacuuua

SEQ ID NO: 146938 - RNA, 32 nt, Human
cuugucaggcuuaucuugcugaagauggccaa

SEQ ID NO: 146939 - RNA, 32 nt, Human
cuugucagucaugggguccuuggggaaguccu

SEQ ID NO: 146940 - RNA, 32 nt, Human
cuugucaguggcguugggagggggagaaaagg

SEQ ID NO: 146941 - RNA, 32 nt, Human
cuugucagugucugugucugugugugccugug

SEQ ID NO: 146942 - RNA, 32 nt, Human
cuugucauauccagacuggaggccgacugccc

SEQ ID NO: 146943 - RNA, 32 nt, Human
cuugucaucccuuccgucuucucccucauccu

SEQ ID NO: 146944 - RNA, 32 nt, Human
cuugucaucuccacuacacuaugcuuuauuuc

SEQ ID NO: 146945 - RNA, 32 nt, Human
cuugucauucagcucucucuucauccucacuu

SEQ ID NO: 146946 - RNA, 32 nt, Human
cuugucauucugaucucagcagucuucucaag

SEQ ID NO: 146947 - RNA, 32 nt, Human
cuuguccaaauggugcccaaagaucugcuuuc

SEQ ID NO: 146948 - RNA, 32 nt, Human
cuuguccaaauggugcccaagaaucugcuuuc

SEQ ID NO: 146949 - RNA, 32 nt, Human
cuuguccaaauggugcccaaggaucugcuuuc

SEQ ID NO: 146950 - RNA, 32 nt, Human
cuuguccagcacuuuucuagcucucccguucc

SEQ ID NO: 146951 - RNA, 24 nt, Human
cuuguccaggcuggaguauaaugg

SEQ ID NO: 146952 - RNA, 20 nt, Human
cuuguccaggcuggagugca

SEQ ID NO: 146953 - RNA, 32 nt, Human
cuuguccaggucucccuguuagcaccugacuc

SEQ ID NO: 146954 - RNA, 32 nt, Human
cuuguccauagugugaauaaaaacuaaaucac

SEQ ID NO: 146955 - RNA, 32 nt, Human
cuuguccaugugaaacauguugccaaaauggu

SEQ ID NO: 146956 - RNA, 32 nt, Human
cuugucccaaacccuucuuguucucuccucca

SEQ ID NO: 146957 - RNA, 28 nt, Human
cuugucccaagugggcuacauuugaaga

SEQ ID NO: 146958 - RNA, 32 nt, Human
cuugucccaccucauuccccaccucuaccuuu

SEQ ID NO: 146959 - RNA, 32 nt, Human
cuugucccaugcucaccccacccuccuguccu

SEQ ID NO: 146960 - RNA, 32 nt, Human
cuuguccccaacaccccacagaagugcuuucu

SEQ ID NO: 146961 - RNA, 32 nt, Human
cuuguccccagagaggaggauguggugagccc

SEQ ID NO: 146962 - RNA, 23 nt, Human
cuuguccccgggagggggcgggg

SEQ ID NO: 146963 - RNA, 32 nt, Human
cuuguccccucuugacccaucucccccucacu

SEQ ID NO: 146964 - RNA, 32 nt, Human
cuuguccccugccccuugcccugcuucugcag

SEQ ID NO: 146965 - RNA, 32 nt, Human
cuuguccccugccugugccugccugggaguuu

SEQ ID NO: 146966 - RNA, 32 nt, Human
cuugucccucauuccuuccacccugaggcuug

SEQ ID NO: 146967 - RNA, 32 nt, Human
cuugucccuccccauucuugucuuacccucug

SEQ ID NO: 146968 - RNA, 32 nt, Human
cuugucccugcucaccucucuggucucaucac

SEQ ID NO: 146969 - RNA, 32 nt, Human
cuugucccuggggccacacagggacacuggag

SEQ ID NO: 146970 - RNA, 23 nt, Human
cuuguccggcuugcuaucuugca

SEQ ID NO: 146971 - RNA, 32 nt, Human
cuuguccuagcccaggccuccaugaaggagaa

SEQ ID NO: 146972 - RNA, 32 nt, Human
cuuguccucaacaacagcaaagcuucuuggga

SEQ ID NO: 146973 - RNA, 32 nt, Human
cuuguccucaacccucucccuagaucagucug

SEQ ID NO: 146974 - RNA, 32 nt, Human
cuuguccucaguuggaaagaugagcaucagau

SEQ ID NO: 146975 - RNA, 19 nt, Human
cuuguccucccaccucccu

SEQ ID NO: 146976 - RNA, 32 nt, Human
cuuguccucccuuccgucuucucccucauccu

SEQ ID NO: 146977 - RNA, 32 nt, Human
cuuguccucgucccaaccuccgcccuggcccc

SEQ ID NO: 146978 - RNA, 32 nt, Human
cuuguccucuuuccuuuccuuugaccuaaugg

SEQ ID NO: 146979 - RNA, 22 nt, Human
cuuguccugccuacacccaggu

SEQ ID NO: 146980 - RNA, 32 nt, Human
cuuguccugggcugagguguccaugacggagu

SEQ ID NO: 146981 - RNA, 32 nt, Human
cuuguccugguucaucuuaguuaauguguucu

SEQ ID NO: 146982 - RNA, 32 nt, Human
cuuguccuugcuuuauaaugcauaugugcuua

SEQ ID NO: 146983 - RNA, 32 nt, Human
cuugucgcagaacugucagagcaugaggagcg

SEQ ID NO: 146984 - RNA, 32 nt, Human
cuugucgcccaggcuggagugcaguggcacga

SEQ ID NO: 146985 - RNA, 32 nt, Human
cuugucgcccaggcuggagugcaguggcgcaa

SEQ ID NO: 146986 - RNA, 32 nt, Human
cuugucgcccaggcuggagugcaguggcguga

SEQ ID NO: 146987 - RNA, 32 nt, Human
cuugucgcucguguccuucucaugcccggcga

SEQ ID NO: 146988 - RNA, 32 nt, Human
cuugucgcugaaccugucuccucccagguuuc

SEQ ID NO: 146989 - RNA, 32 nt, Human
cuugucggccuucguggggagcuguuuguguu

SEQ ID NO: 146990 - RNA, 32 nt, Human
cuugucgggucuagcugggaguggaggugggc

SEQ ID NO: 146991 - RNA, 32 nt, Human
cuugucgucacccugcagaaguacagugccuu

SEQ ID NO: 146992 - RNA, 19 nt, Human
cuugucgucgccgccgccg

SEQ ID NO: 146993 - RNA, 32 nt, Human
cuugucuagggaugccuggaaguguauaaaau

SEQ ID NO: 146994 - RNA, 32 nt, Human
cuugucuauuccagggaucuggaucugaagaa

SEQ ID NO: 146995 - RNA, 32 nt, Human
cuugucucaaugcucauaacggaucagaaaua

SEQ ID NO: 146996 - RNA, 32 nt, Human
cuugucucaaugcucauaauggaucagaaaua

SEQ ID NO: 146997 - RNA, 32 nt, Human
cuugucucacagucuguuucacuucuauuaac

SEQ ID NO: 146998 - RNA, 32 nt, Human
cuugucucaccaccaaccuugcuuguguaguc

SEQ ID NO: 146999 - RNA, 32 nt, Human
cuugucucacugcaaccucugccucccggguu

SEQ ID NO: 147000 - RNA, 32 nt, Human
cuugucucccaggcuggagugcagugacacaa

SEQ ID NO: 147001 - RNA, 32 nt, Human
cuugucuccccgaugggauucccguccaagcu

SEQ ID NO: 147002 - RNA, 32 nt, Human
cuugucucuaaccuuuaaaagaggggucaauc

SEQ ID NO: 147003 - RNA, 32 nt, Human
cuugucucugcagcugggagagcugcuugucu

SEQ ID NO: 147004 - RNA, 32 nt, Human
cuugucucugugggaguuuagcagauggcugg

SEQ ID NO: 147005 - RNA, 32 nt, Human
cuugucucuucccugccuccucccuuuucccu

SEQ ID NO: 147006 - RNA, 32 nt, Human
cuugucugaauccugcuucuccagccuuucuc

SEQ ID NO: 147007 - RNA, 32 nt, Human
cuugucugcaccacccgccuccugccuccaaa

SEQ ID NO: 147008 - RNA, 32 nt, Human
cuugucugccagcaucagagugcccugguccu

SEQ ID NO: 147009 - RNA, 32 nt, Human
cuugucugcucccacagcaccaucuaagaccc

SEQ ID NO: 147010 - RNA, 32 nt, Human
cuugucugggugggagggagccugguccugca

SEQ ID NO: 147011 - RNA, 32 nt, Human
cuugucugguauaacuuccauguucucuagaa

SEQ ID NO: 147012 - RNA, 32 nt, Human
cuugucuguccucggaagaacucccccugcuu

SEQ ID NO: 147013 - RNA, 32 nt, Human
cuugucuguguuguucauggcuauauccccag

SEQ ID NO: 147014 - RNA, 32 nt, Human
cuugucuucccucccuggcguccucagacuua

SEQ ID NO: 147015 - RNA, 32 nt, Human
cuugucuuccuuguccucuguucccacccucc

SEQ ID NO: 147016 - RNA, 32 nt, Human
cuugucuucucccauucauccagcucaguguu

SEQ ID NO: 147017 - RNA, 32 nt, Human
cuugucuucuuagcugucaccugccgaggcuu

SEQ ID NO: 147018 - RNA, 32 nt, Human
cuugucuugaaaacugugcaacuuuuuaaagu

SEQ ID NO: 147019 - RNA, 32 nt, Human
cuugucuugaaggaugaagaaaagagggcccc

SEQ ID NO: 147020 - RNA, 32 nt, Human
cuugucuugugugucugaacacacagaagcua

SEQ ID NO: 147021 - RNA, 32 nt, Human
cuugucuuguguuccuuucugcuuuauuuccc

SEQ ID NO: 147022 - RNA, 32 nt, Human
cuugucuuuaaaacaugauaguccuuucagua

SEQ ID NO: 147023 - RNA, 32 nt, Human
cuugucuuuacuuacagugugacuguaacuuu

SEQ ID NO: 147024 - RNA, 32 nt, Human
cuugucuuuacuuccuccuuacccaaccugga

SEQ ID NO: 147025 - RNA, 32 nt, Human
cuugucuuucuuuccucuuccucuuccggcgc

SEQ ID NO: 147026 - RNA, 32 nt, Human
cuugucuuugauacaaaagagugcugacagua

SEQ ID NO: 147027 - RNA, 32 nt, Human
cuugucuuugucauuguauuugcagugagccu

SEQ ID NO: 147028 - RNA, 32 nt, Human
cuugucuuuucccugggaacaugggagcacug

SEQ ID NO: 147029 - RNA, 32 nt, Human
cuugugaaaacacacagcgcaaagacaauuau

SEQ ID NO: 147030 - RNA, 32 nt, Human
cuugugaaacugcagacucugcuccaaguaau

SEQ ID NO: 147031 - RNA, 32 nt, Human
cuugugaacccagcgaccugacugccuuggaa

SEQ ID NO: 147032 - RNA, 32 nt, Human
cuugugaacccccgucuguggguuucuggucc

SEQ ID NO: 147033 - RNA, 32 nt, Human
cuugugaagcugcauucuccugccgguuucuc

SEQ ID NO: 147034 - RNA, 32 nt, Human
cuugugaaggcagaguagcgguugagguugcg

SEQ ID NO: 147035 - RNA, 32 nt, Human
cuugugaaggggaauuuaugaggcucuucacu

SEQ ID NO: 147036 - RNA, 32 nt, Human
cuugugaaugucccuuagggaggcaccagauu

SEQ ID NO: 147037 - RNA, 32 nt, Human
cuugugaauucuuucauaaagcagaaaaccau

SEQ ID NO: 147038 - RNA, 32 nt, Human
cuugugaccauccugggcaacauagugagacc

SEQ ID NO: 147039 - RNA, 32 nt, Human
cuugugaccaugaagcuugucaacaucuggcu

SEQ ID NO: 147040 - RNA, 32 nt, Human
cuugugacccaggguggggacaggggcuggcc

SEQ ID NO: 147041 - RNA, 32 nt, Human
cuugugacuggacuccagccugggcaacagag

SEQ ID NO: 147042 - RNA, 32 nt, Human
cuugugacuuuuuaaagagguggggcucacug

SEQ ID NO: 147043 - RNA, 32 nt, Human
cuugugagaacugaaaggucucuuucauuuuu

SEQ ID NO: 147044 - RNA, 32 nt, Human
cuugugagacggaggaagcggcagaaggcgga

SEQ ID NO: 147045 - RNA, 32 nt, Human
cuugugagaucuucccagccaaguggaauugu

SEQ ID NO: 147046 - RNA, 32 nt, Human
cuugugagcuuacugcagucagucacagaggc

SEQ ID NO: 147047 - RNA, 32 nt, Human
cuugugagcuuggugggcuccuacuaacgcac

SEQ ID NO: 147048 - RNA, 31 nt, Human
cuugugagucacucugggccuggcugucguc

SEQ ID NO: 147049 - RNA, 22 nt, Human
cuugugagucagugaugacagg

SEQ ID NO: 147050 - RNA, 32 nt, Human
cuugugaguccuagugaccacacugcuucccu

SEQ ID NO: 147051 - RNA, 32 nt, Human
cuugugauaguucucaugaggucuggcucaug

SEQ ID NO: 147052 - RNA, 32 nt, Human
cuugugaucaucuggcaagacagcccaagaau

SEQ ID NO: 147053 - RNA, 32 nt, Human
cuugugaugaaguagaucaugcagugacauac

SEQ ID NO: 147054 - RNA, 32 nt, Human
cuugugaugugaauugaucugaucagacugua

SEQ ID NO: 147055 - RNA, 32 nt, Human
cuugugauguugcccaggcuagagugcagugg

SEQ ID NO: 147056 - RNA, 32 nt, Human
cuugugauucuguccccuccccaagaccccac

SEQ ID NO: 147057 - RNA, 24 nt, Human
cuugugauugugugcuguccuucu

SEQ ID NO: 147058 - RNA, 32 nt, Human
cuugugauuugaccugagacauuuguuucagg

SEQ ID NO: 147059 - RNA, 32 nt, Human
cuugugcaacaucaaggagaagcugcggaaau

SEQ ID NO: 147060 - RNA, 32 nt, Human
cuugugcagacaccacccugccauugagucug

SEQ ID NO: 147061 - RNA, 32 nt, Human
cuugugcagccuggggcucugcccaggccacc

SEQ ID NO: 147062 - RNA, 32 nt, Human
cuugugcaggaaaauucccaucagaccucaug

SEQ ID NO: 147063 - RNA, 32 nt, Human
cuugugcaggaagagcauugaggaauauuauu

SEQ ID NO: 147064 - RNA, 32 nt, Human
cuugugcaggcagggagaguuaaggggagugg

SEQ ID NO: 147065 - RNA, 18 nt, Human
cuugugcaucccuccucu

SEQ ID NO: 147066 - RNA, 32 nt, Human
cuugugcauuugccucaccucugacaauguuu

SEQ ID NO: 147067 - RNA, 32 nt, Human
cuugugccaagauaugcuguuggugccugaua

SEQ ID NO: 147068 - RNA, 32 nt, Human
cuugugccacuguacuccagccuggcccacag

SEQ ID NO: 147069 - RNA, 32 nt, Human
cuugugccaucaggaagcaggagaccugcaga

SEQ ID NO: 147070 - RNA, 32 nt, Human
cuugugcccagagaaagagagagucagagcua

SEQ ID NO: 147071 - RNA, 32 nt, Human
cuugugcccaggaguucaagaccagccugggc

SEQ ID NO: 147072 - RNA, 32 nt, Human
cuugugcccaggaguuuuaagacuagccuggg

SEQ ID NO: 147073 - RNA, 32 nt, Human
cuugugcccaggcuggagugcaauagcucgau

SEQ ID NO: 147074 - RNA, 32 nt, Human
cuugugcccuggggcugccuggcaucuggggg

SEQ ID NO: 147075 - RNA, 32 nt, Human
cuugugccgcccagcuguccauggcccgugca

SEQ ID NO: 147076 - RNA, 32 nt, Human
cuugugccggaaggaggaaggcguggggcauu

SEQ ID NO: 147077 - RNA, 32 nt, Human
cuugugccuaggaguucgaggcugcagugggc

SEQ ID NO: 147078 - RNA, 32 nt, Human
cuugugccuguaaucccagaacuuuggaaggc

SEQ ID NO: 147079 - RNA, 21 nt, Human
cuugugccuguaauuccagcu

SEQ ID NO: 147080 - RNA, 32 nt, Human
cuugugcucaggaguccagccguccagccucg

SEQ ID NO: 147081 - RNA, 32 nt, Human
cuugugcucaggccagagacuugcucacuucc

SEQ ID NO: 147082 - RNA, 32 nt, Human
cuugugcucgggagagaagugagggaagccgg

SEQ ID NO: 147083 - RNA, 32 nt, Human
cuugugcugcaauaaccucagccugcccuucc

SEQ ID NO: 147084 - RNA, 32 nt, Human
cuugugcugcuucugcugaaacaaacaugcug

SEQ ID NO: 147085 - RNA, 32 nt, Human
cuugugcuggagugugcaccgugggagcaaug

SEQ ID NO: 147086 - RNA, 32 nt, Human
cuugugcuuucuccucuccccaucggggaucc

SEQ ID NO: 147087 - RNA, 32 nt, Human
cuuguggaagagaagcaggcgacccuuccuga

SEQ ID NO: 147088 - RNA, 32 nt, Human
cuuguggaaugagagaaccgaggaacgaagaa

SEQ ID NO: 147089 - RNA, 22 nt, Human
cuuguggacaccuggucuuucc

SEQ ID NO: 147090 - RNA, 32 nt, Human
cuuguggacagagaagaagaccacgacuggag

SEQ ID NO: 147091 - RNA, 20 nt, Human
cuuguggagaagcacuggua

SEQ ID NO: 147092 - RNA, 32 nt, Human
cuuguggagaagcgaagggcugaggggagguu

SEQ ID NO: 147093 - RNA, 32 nt, Human
cuuguggagaggggcuggcgcuguuccuuggc

SEQ ID NO: 147094 - RNA, 21 nt, Human
cuuguggagccacggccuccc

SEQ ID NO: 147095 - RNA, 32 nt, Human
cuuguggccacgacagccuccacccccaccag

SEQ ID NO: 147096 - RNA, 32 nt, Human
cuuguggccacuggaaaucccugggccggcau

SEQ ID NO: 147097 - RNA, 32 nt, Human
cuuguggccaggaguugggagaccagccuggg

SEQ ID NO: 147098 - RNA, 21 nt, Human
cuuguggcccuggcagaauca

SEQ ID NO: 147099 - RNA, 32 nt, Human
cuuguggccucugcggguccugccucagccau

SEQ ID NO: 147100 - RNA, 32 nt, Human
cuuguggccugggagagcuggggaagcuucuu

SEQ ID NO: 147101 - RNA, 32 nt, Human
cuuguggcuaggccagccuaggauguggguuc

SEQ ID NO: 147102 - RNA, 32 nt, Human
cuuguggcugaugccaucauugcacauuggcc

SEQ ID NO: 147103 - RNA, 32 nt, Human
cuuguggcugaugccauuauugcacauuggcc

SEQ ID NO: 147104 - RNA, 32 nt, Human
cuuguggcuggaggggaagagugaggaccaag

SEQ ID NO: 147105 - RNA, 32 nt, Human
cuuguggcuguggagaaagcuuuaauauuuga

SEQ ID NO: 147106 - RNA, 21 nt, Human
cuuguggcuugggacauggca

SEQ ID NO: 147107 - RNA, 32 nt, Human
cuugugggcagccugcguacuccaguccugcu

SEQ ID NO: 147108 - RNA, 32 nt, Human
cuugugggggugaaggguuggggugagaacug

SEQ ID NO: 147109 - RNA, 32 nt, Human
cuuguggggugaagaauggagggaggagcagg

SEQ ID NO: 147110 - RNA, 32 nt, Human
cuuguggggugagagaggagacagaauaggga

SEQ ID NO: 147111 - RNA, 32 nt, Human
cuugugggguggagguugcagugagcugagau

SEQ ID NO: 147112 - RNA, 32 nt, Human
cuugugggugcuugauccaccugcugggaccc

SEQ ID NO: 147113 - RNA, 32 nt, Human
cuugugguauaguauuaguggaaagugauuug

SEQ ID NO: 147114 - RNA, 32 nt, Human
cuuguggucccagcuacucaggaggcugaggc

SEQ ID NO: 147115 - RNA, 32 nt, Human
cuugugguggcgcuccacagucauccggcuga

SEQ ID NO: 147116 - RNA, 32 nt, Human
cuugugguuccucccuuggauagccuccaugg

SEQ ID NO: 147117 - RNA, 32 nt, Human
cuugugguuuccaaacgucggcagaggcugga

SEQ ID NO: 147118 - RNA, 32 nt, Human
cuuguguaacaaauggaaaacauucuccccug

SEQ ID NO: 147119 - RNA, 32 nt, Human
cuuguguacauccugucccugccacauccaua

SEQ ID NO: 147120 - RNA, 32 nt, Human
cuuguguagcugaucucucagggauagaagau

SEQ ID NO: 147121 - RNA, 32 nt, Human
cuuguguauguguggcugggccgccccucuuc

SEQ ID NO: 147122 - RNA, 32 nt, Human
cuugugucacccaggcuggagugcaauggcgc

SEQ ID NO: 147123 - RNA, 32 nt, Human
cuugugucacccaggcuggcgugcagggcccu

SEQ ID NO: 147124 - RNA, 32 nt, Human
cuugugucauccagacuggagcaguggugcaa

SEQ ID NO: 147125 - RNA, 23 nt, Human
cuuguguccacugugaccccugu

SEQ ID NO: 147126 - RNA, 32 nt, Human
cuuguguccagaugaauaaagcagaaaaagag

SEQ ID NO: 147127 - RNA, 32 nt, Human
cuuguguccaggcuggagugcaguggcacuau

SEQ ID NO: 147128 - RNA, 32 nt, Human
cuugugucuguggacucugcucagcugugucc

SEQ ID NO: 147129 - RNA, 32 nt, Human
cuugugucuuaaacaggcaucucuccacugac

SEQ ID NO: 147130 - RNA, 32 nt, Human
cuugugugagagugucggugugugugcaugug

SEQ ID NO: 147131 - RNA, 32 nt, Human
cuuguguggcugcugcgcagccuucaacaaca

SEQ ID NO: 147132 - RNA, 32 nt, Human
cuuguguggcugcugcuggguccaguccugga

SEQ ID NO: 147133 - RNA, 32 nt, Human
cuugugugucacaguucagccaguuuugguuu

SEQ ID NO: 147134 - RNA, 32 nt, Human
cuugugugugaucuuuucugucuuccccaagu

SEQ ID NO: 147135 - RNA, 32 nt, Human
cuuguguguggcugguguaugggugagcaugc

SEQ ID NO: 147136 - RNA, 32 nt, Human
cuuguguuccaccuugaaucucacagcguccc

SEQ ID NO: 147137 - RNA, 32 nt, Human
cuuguguucccuuuugauucuucuuuuuaaca

SEQ ID NO: 147138 - RNA, 32 nt, Human
cuuguguugggccugcuguuccugggccagug

SEQ ID NO: 147139 - RNA, 32 nt, Human
cuuguguuuaauuaacgcagcacacaaagucu

SEQ ID NO: 147140 - RNA, 32 nt, Human
cuuguguuucaaauggaaaacaucuuccucaa

SEQ ID NO: 147141 - RNA, 32 nt, Human
cuuguguuucuuuacagagguaccugagggag

SEQ ID NO: 147142 - RNA, 32 nt, Human
cuuguguuuguuuuauagagugcagugcagcu

SEQ ID NO: 147143 - RNA, 32 nt, Human
cuuguuaaaugccaguaucucagucuuucuga

SEQ ID NO: 147144 - RNA, 25 nt, Human
cuuguuaauauuaucuaggggaaaa

SEQ ID NO: 147145 - RNA, 32 nt, Human
cuuguuaauccuuuccuuauuuagcuagcuuu

SEQ ID NO: 147146 - RNA, 32 nt, Human
cuuguuaauuuggaauauuugcucugaaaaga

SEQ ID NO: 147147 - RNA, 32 nt, Human
cuuguuaauuuugguguaaagauuuguauccu

SEQ ID NO: 147148 - RNA, 32 nt, Human
cuuguuacaaacacacgaugcaccuuaacuca

SEQ ID NO: 147149 - RNA, 32 nt, Human
cuuguuaccaugguacuucucaaacuuuguga

SEQ ID NO: 147150 - RNA, 25 nt, Human
cuuguuacccaggcuggagugcagu

SEQ ID NO: 147151 - RNA, 32 nt, Human
cuuguuacccaggcuggagugcaguggcgcga

SEQ ID NO: 147152 - RNA, 32 nt, Human
cuuguuacccaggcuggagugcaguggcguga

SEQ ID NO: 147153 - RNA, 32 nt, Human
cuuguuaccuguugcuuaucuccugggggacc

SEQ ID NO: 147154 - RNA, 32 nt, Human
cuuguuauaugccagaaucuuugcuauguguu

SEQ ID NO: 147155 - RNA, 32 nt, Human
cuuguuauuguuuacacacuugcaguguagcc

SEQ ID NO: 147156 - RNA, 32 nt, Human
cuuguucacaugcacgcagccaguugucuugg

SEQ ID NO: 147157 - RNA, 32 nt, Human
cuuguucacaugcuccacguagcuguaacuuc

SEQ ID NO: 147158 - RNA, 32 nt, Human
cuuguucaccugcuggacggcaaggagggcgu

SEQ ID NO: 147159 - RNA, 32 nt, Human
cuuguucacuggaccaguagucacuguuaaau

SEQ ID NO: 147160 - RNA, 32 nt, Human
cuuguucagccaugcuccuggagcuuauccca

SEQ ID NO: 147161 - RNA, 32 nt, Human
cuuguucagcuucuggaauuucugagcagccc

SEQ ID NO: 147162 - RNA, 32 nt, Human
cuuguucaggugguuauaacaaaauaccuuaa

SEQ ID NO: 147163 - RNA, 32 nt, Human
cuuguucaucauaaguacguauuacuucugua

SEQ ID NO: 147164 - RNA, 32 nt, Human
cuuguucauccacucccugccugugcugguug

SEQ ID NO: 147165 - RNA, 32 nt, Human
cuuguucaucggccuggcugggacaggggcug

SEQ ID NO: 147166 - RNA, 32 nt, Human
cuuguucaucuucugaccguuugcugggcuau

SEQ ID NO: 147167 - RNA, 32 nt, Human
cuuguucaugugugggucugucuuccuuaugc

SEQ ID NO: 147168 - RNA, 32 nt, Human
cuuguuccaaauacugcuuagcauuuugcaug

SEQ ID NO: 147169 - RNA, 22 nt, Human
cuuguuccccugcauccuggca

SEQ ID NO: 147170 - RNA, 32 nt, Human
cuuguuccuauagucccagcacuuugggaggc

SEQ ID NO: 147171 - RNA, 32 nt, Human
cuuguuccucauucuucaaaugugggccaguu

SEQ ID NO: 147172 - RNA, 32 nt, Human
cuuguuccucuaggagaucacagucuaaugag

SEQ ID NO: 147173 - RNA, 32 nt, Human
cuuguuccucugccauuccccaugaagccgug

SEQ ID NO: 147174 - RNA, 23 nt, Human
cuuguuccugcauuaggggaaag

SEQ ID NO: 147175 - RNA, 32 nt, Human
cuuguuccugccuccgucccggcugcccugcc

SEQ ID NO: 147176 - RNA, 32 nt, Human
cuuguuccuucugcuucucccuagcugacccc

SEQ ID NO: 147177 - RNA, 32 nt, Human
cuuguucgggggugggaaguggcgaccgugac

SEQ ID NO: 147178 - RNA, 32 nt, Human
cuuguucucccuugccccaacccuuuaccgga

SEQ ID NO: 147179 - RNA, 32 nt, Human
cuuguucucuacuguucaccgggaccuggcug

SEQ ID NO: 147180 - RNA, 32 nt, Human
cuuguucucucccccguucccacucggggucu

SEQ ID NO: 147181 - RNA, 32 nt, Human
cuuguucucuugcccaggcuggagugcagugg

SEQ ID NO: 147182 - RNA, 32 nt, Human
cuuguucugcagcccugucuacuugggcaccc

SEQ ID NO: 147183 - RNA, 32 nt, Human
cuuguucugggcaagaacccagagcuccccag

SEQ ID NO: 147184 - RNA, 32 nt, Human
cuuguucuguaacccaggcuggagugcagugg

SEQ ID NO: 147185 - RNA, 32 nt, Human
cuuguucugucacccaggcuggagugcagugg

SEQ ID NO: 147186 - RNA, 32 nt, Human
cuuguucugucacccaggcuggggugcagugg

SEQ ID NO: 147187 - RNA, 32 nt, Human
cuuguucugucgcccaggcuggcgugcagugg

SEQ ID NO: 147188 - RNA, 32 nt, Human
cuuguucugucucccaggcugaagugcaguga

SEQ ID NO: 147189 - RNA, 32 nt, Human
cuuguucuguucugggccagugaagguccuug

SEQ ID NO: 147190 - RNA, 22 nt, Human
cuuguucuucugcuguagugug

SEQ ID NO: 147191 - RNA, 22 nt, Human
cuuguucuucuuacugugguaa

SEQ ID NO: 147192 - RNA, 22 nt, Human
cuuguucuucuuguucuuugua

SEQ ID NO: 147193 - RNA, 32 nt, Human
cuuguucuuuugaacccuguguguggagagcu

SEQ ID NO: 147194 - RNA, 32 nt, Human
cuuguugacaacagggguacacucacacagac

SEQ ID NO: 147195 - RNA, 32 nt, Human
cuuguugacugcuacauuuccccagccuggua

SEQ ID NO: 147196 - RNA, 32 nt, Human
cuuguugagcuggcaugcauacccugcuuccg

SEQ ID NO: 147197 - RNA, 32 nt, Human
cuuguugagcuucuaaguuucuuucccuucau

SEQ ID NO: 147198 - RNA, 27 nt, Human
cuuguugaugaggcuggagugcagugg

SEQ ID NO: 147199 - RNA, 32 nt, Human
cuuguugaugaggcuggagugcaguggcgcga

SEQ ID NO: 147200 - RNA, 32 nt, Human
cuuguugcaagaagguugugggaaaaucagca

SEQ ID NO: 147201 - RNA, 32 nt, Human
cuuguugcaggcacuucuuccuuacuuggugc

SEQ ID NO: 147202 - RNA, 20 nt, Human
cuuguugcauuauacauuca

SEQ ID NO: 147203 - RNA, 32 nt, Human
cuuguugcauuuccagcugugcagcacgucuc

SEQ ID NO: 147204 - RNA, 32 nt, Human
cuuguugccaacgugcuucuggggccccugug

SEQ ID NO: 147205 - RNA, 32 nt, Human
cuuguugcccaggcggagugcaguggaacaac

SEQ ID NO: 147206 - RNA, 32 nt, Human
cuuguugcccaggcuggagugcagugacacaa

SEQ ID NO: 147207 - RNA, 32 nt, Human
cuuguugcccaggcuggagugcaguggugcaa

SEQ ID NO: 147208 - RNA, 32 nt, Human
cuuguugcccaggcuggagugcaguggugcga

SEQ ID NO: 147209 - RNA, 32 nt, Human
cuuguugcccaggcuggagugcagugguguga

SEQ ID NO: 147210 - RNA, 32 nt, Human
cuuguugcccaggcuggagugcggugguacaa

SEQ ID NO: 147211 - RNA, 32 nt, Human
cuuguugcccagggcuggagugcaguggcaug

SEQ ID NO: 147212 - RNA, 32 nt, Human
cuuguugccgaggcuggagugcaauggcgcaa

SEQ ID NO: 147213 - RNA, 32 nt, Human
cuuguugccuagcuggagugcaauggcgcaau

SEQ ID NO: 147214 - RNA, 32 nt, Human
cuuguugccuaggcuggagugcaguggcgcag

SEQ ID NO: 147215 - RNA, 32 nt, Human
cuuguugccugcacccuucccucuucccucuc

SEQ ID NO: 147216 - RNA, 32 nt, Human
cuuguugcgacagagggacucacuggacucug

SEQ ID NO: 147217 - RNA, 32 nt, Human
cuuguugcuaccaaacacagcacucuaguuuc

SEQ ID NO: 147218 - RNA, 32 nt, Human
cuuguugcucacugugcugcuuuuccaugagc

SEQ ID NO: 147219 - RNA, 32 nt, Human
cuuguugcugaggcuggagugcaguggcacca

SEQ ID NO: 147220 - RNA, 18 nt, Human
cuuguuggagggggccag

SEQ ID NO: 147221 - RNA, 19 nt, Human
cuuguuggagguucugggg

SEQ ID NO: 147222 - RNA, 32 nt, Human
cuuguuggcaugggaugccagccaggcuugca

SEQ ID NO: 147223 - RNA, 32 nt, Human
cuuguuggcgcacgccuguaaucucagcuacu

SEQ ID NO: 147224 - RNA, 32 nt, Human
cuuguuggcucgugccuguaaucccagcacuu

SEQ ID NO: 147225 - RNA, 32 nt, Human
cuuguugggaggaggaggaaagggaaggcugg

SEQ ID NO: 147226 - RNA, 32 nt, Human
cuuguuggugaggaaauuaauuaugacuugau

SEQ ID NO: 147227 - RNA, 32 nt, Human
cuuguuguccaggcuggagugcaguggcgcga

SEQ ID NO: 147228 - RNA, 32 nt, Human
cuuguugucugaugccuccaguaggacaccuc

SEQ ID NO: 147229 - RNA, 32 nt, Human
cuuguugugccacuguuaucauccuccuagca

SEQ ID NO: 147230 - RNA, 32 nt, Human
cuuguuguggaaguuuccaaugcuggaaaagc

SEQ ID NO: 147231 - RNA, 32 nt, Human
cuuguuguucucuccugcugcugagucuccuc

SEQ ID NO: 147232 - RNA, 32 nt, Human
cuuguuguuguugguaauagcauaaugacagu

SEQ ID NO: 147233 - RNA, 32 nt, Human
cuuguuuacacaaguucaauuugaaaggaaaa

SEQ ID NO: 147234 - RNA, 32 nt, Human
cuuguuuacauaccugccuccugcauuggacu

SEQ ID NO: 147235 - RNA, 32 nt, Human
cuuguuuaucagcuuugccucggaauggaaaa

SEQ ID NO: 147236 - RNA, 24 nt, Human
cuuguuuaucugagucuguuggua

SEQ ID NO: 147237 - RNA, 32 nt, Human
cuuguuucagguccuugggaacaugaccugga

SEQ ID NO: 147238 - RNA, 32 nt, Human
cuuguuucucaaaucauaggagaugacauuug

SEQ ID NO: 147239 - RNA, 32 nt, Human
cuuguuucuccauucucuuauuuccuuuccca

SEQ ID NO: 147240 - RNA, 32 nt, Human
cuuguuucuccucuuguuuuccuuuugggcag

SEQ ID NO: 147241 - RNA, 32 nt, Human
cuuguuucugauuggcacaucuuuggaucuac

SEQ ID NO: 147242 - RNA, 32 nt, Human
cuuguuucugugacccaggagaacuuagugca

SEQ ID NO: 147243 - RNA, 22 nt, Human
cuuguuucuucugagaggaaaa

SEQ ID NO: 147244 - RNA, 32 nt, Human
cuuguuugaagagcucugcuugcucaacacuu

SEQ ID NO: 147245 - RNA, 32 nt, Human
cuuguuugaaggagguggugaugguggauaga

SEQ ID NO: 147246 - RNA, 32 nt, Human
cuuguuugagagguggagucuugcucuguuau

SEQ ID NO: 147247 - RNA, 32 nt, Human
cuuguuugcagacugggugagguggagcccug

SEQ ID NO: 147248 - RNA, 32 nt, Human
cuuguuugcuguugauuucuuuccagaggggu

SEQ ID NO: 147249 - RNA, 32 nt, Human
cuuguuugcuugcuaccugccugcugacccac

SEQ ID NO: 147250 - RNA, 29 nt, Human
cuuguuuggcugcugccgucaccucaugg

SEQ ID NO: 147251 - RNA, 32 nt, Human
cuuguuuggggagggggaucuggggcuaaggc

SEQ ID NO: 147252 - RNA, 32 nt, Human
cuuguuugugacaagacuaagcauuaagauga

SEQ ID NO: 147253 - RNA, 32 nt, Human
cuuguuuguucugcuucucuucauauaacuga

SEQ ID NO: 147254 - RNA, 32 nt, Human
cuuguuuuagaagaggcagaacagugauaaag

SEQ ID NO: 147255 - RNA, 32 nt, Human
cuuguuuucccguuuccuugaaugauuacaca

SEQ ID NO: 147256 - RNA, 32 nt, Human
cuuguuuuccuuggaaauuuugcaaaauguua

SEQ ID NO: 147257 - RNA, 32 nt, Human
cuuguuuucucccauguggacccugauuuaug

SEQ ID NO: 147258 - RNA, 17 nt, Human
cuuguuuucugggccuu

SEQ ID NO: 147259 - RNA, 32 nt, Human
cuuguuuucuuucuuuaaauguuuuauaaguu

SEQ ID NO: 147260 - RNA, 32 nt, Human
cuuguuuugaugucuaaucuguaucuauaaug

SEQ ID NO: 147261 - RNA, 32 nt, Human
cuuguuuugcagcccaggcuggagugcagugg

SEQ ID NO: 147262 - RNA, 32 nt, Human
cuuguuuugccucuuccaggcauacugcauuc

SEQ ID NO: 147263 - RNA, 32 nt, Human
cuuguuuugucacccaggcuggagugcagugg

SEQ ID NO: 147264 - RNA, 32 nt, Human
cuuguuuuguugucugugucugucugaauaac

SEQ ID NO: 147265 - RNA, 32 nt, Human
cuuguuuuguuuuauggcuagucuuaucuggc

SEQ ID NO: 147266 - RNA, 32 nt, Human
cuuguuuuuccuccucuccuuuuccugccgcc

SEQ ID NO: 147267 - RNA, 23 nt, Human
cuuguuuuucuccuuuuggugua

SEQ ID NO: 147268 - RNA, 32 nt, Human
cuuguuuuugagacaagagucucgcucuguca

SEQ ID NO: 147269 - RNA, 22 nt, Human
cuuguuuuuuauuaagagaaaa

SEQ ID NO: 147270 - RNA, 32 nt, Human
cuuuaaaaacucaaaaucgggccaggcacagu

SEQ ID NO: 147271 - RNA, 32 nt, Human
cuuuaaaaagggaaggucaagcaaagaacugu

SEQ ID NO: 147272 - RNA, 32 nt, Human
cuuuaaaacacacacauacacacacaaaacaa

SEQ ID NO: 147273 - RNA, 32 nt, Human
cuuuaaaagcuucugcaauauuauuucugugc

SEQ ID NO: 147274 - RNA, 32 nt, Human
cuuuaaaaggccaucgauauucuuugcuccuu

SEQ ID NO: 147275 - RNA, 32 nt, Human
cuuuaaaagggcugcuguacagggcuagguuu

SEQ ID NO: 147276 - RNA, 32 nt, Human
cuuuaaaauacaaaacacccacaaagccaaaa

SEQ ID NO: 147277 - RNA, 32 nt, Human
cuuuaaaaugauuuuuaaauuuguauuuuaua

SEQ ID NO: 147278 - RNA, 32 nt, Human
cuuuaaaaugauuuuucuugauauuuauuuua

SEQ ID NO: 147279 - RNA, 23 nt, Human
cuuuaaacuaaggggaacuuugc

SEQ ID NO: 147280 - RNA, 32 nt, Human
cuuuaaacuaccucagguuccuaauggcccgg

SEQ ID NO: 147281 - RNA, 32 nt, Human
cuuuaaacuuccuccucggccgggccaagacg

SEQ ID NO: 147282 - RNA, 32 nt, Human
cuuuaaacuuuuguagaccacaauucacuuuu

SEQ ID NO: 147283 - RNA, 32 nt, Human
cuuuaaagaaaaucauucugcugaaaaauccu

SEQ ID NO: 147284 - RNA, 32 nt, Human
cuuuaaagagucaauucuuguacagagaagga

SEQ ID NO: 147285 - RNA, 32 nt, Human
cuuuaaagcauuaacagcaggugugacccuga

SEQ ID NO: 147286 - RNA, 32 nt, Human
cuuuaaagcuagugaggcacagccugcgggga

SEQ ID NO: 147287 - RNA, 32 nt, Human
cuuuaaaggugagauuguagagaugcugucaa

SEQ ID NO: 147288 - RNA, 32 nt, Human
cuuuaaaguccgguccucaguguccuuucaga

SEQ ID NO: 147289 - RNA, 32 nt, Human
cuuuaaauagccaaucugaauuggcuuagagu

SEQ ID NO: 147290 - RNA, 32 nt, Human
cuuuaaauaguuacagaagggauacgucauuu

SEQ ID NO: 147291 - RNA, 32 nt, Human
cuuuaaauccuugagcaaucuguauacaauua

SEQ ID NO: 147292 - RNA, 32 nt, Human
cuuuaaaugcugacucaccuccucucggagga

SEQ ID NO: 147293 - RNA, 32 nt, Human
cuuuaaauggaaucccagcacuuugggaggcc

SEQ ID NO: 147294 - RNA, 32 nt, Human
cuuuaaauguauugaagcauugugcugucuga

SEQ ID NO: 147295 - RNA, 32 nt, Human
cuuuaaauuucagcuuuggcucuggcugcuuu

SEQ ID NO: 147296 - RNA, 32 nt, Human
cuuuaacacagcaacagaagcacgcaucucau

SEQ ID NO: 147297 - RNA, 32 nt, Human
cuuuaacacagcaccaggcccacggaaagugg

SEQ ID NO: 147298 - RNA, 32 nt, Human
cuuuaacacagcaugaucgaaacauacaacca

SEQ ID NO: 147299 - RNA, 32 nt, Human
cuuuaacaucacagucacagauuucuccaaag

SEQ ID NO: 147300 - RNA, 32 nt, Human
cuuuaaccagaagagagaggagagccucagga

SEQ ID NO: 147301 - RNA, 32 nt, Human
cuuuaaccagcuccugagcugcugcaacucac

SEQ ID NO: 147302 - RNA, 32 nt, Human
cuuuaaccaucuuugcaguuaguccuaaaaau

SEQ ID NO: 147303 - RNA, 32 nt, Human
cuuuaacccaggaggcagagguugcagugagc

SEQ ID NO: 147304 - RNA, 32 nt, Human
cuuuaaccccaggaaccucucagucuaccucc

SEQ ID NO: 147305 - RNA, 32 nt, Human
cuuuaacccggaagguggaguuugcagugagc

SEQ ID NO: 147306 - RNA, 32 nt, Human
cuuuaacccgggagguggagguugcagugagc

SEQ ID NO: 147307 - RNA, 32 nt, Human
cuuuaaccuccccuucacuuuuuauuuuuaug

SEQ ID NO: 147308 - RNA, 32 nt, Human
cuuuaaccucuccugcaguaauaguuuugcuu

SEQ ID NO: 147309 - RNA, 32 nt, Human
cuuuaaccuuggaggcggagguugcauugagc

SEQ ID NO: 147310 - RNA, 32 nt, Human
cuuuaaccuuggcaaaauaaacuccuaaauug

SEQ ID NO: 147311 - RNA, 32 nt, Human
cuuuaacugaacaauggcccuguagccagcac

SEQ ID NO: 147312 - RNA, 32 nt, Human
cuuuaacugcaccugaauccuuuguguacuga

SEQ ID NO: 147313 - RNA, 23 nt, Human
cuuuaacuuaaagagaauuuuau

SEQ ID NO: 147314 - RNA, 32 nt, Human
cuuuaacuucuuucuuucccauugauaaacug

SEQ ID NO: 147315 - RNA, 32 nt, Human
cuuuaacuuugcuuaaacuacaaacacaagca

SEQ ID NO: 147316 - RNA, 32 nt, Human
cuuuaagaaaccaguagcuagcugcuauuuau

SEQ ID NO: 147317 - RNA, 32 nt, Human
cuuuaagaaugauucuuauacucugaagguga

SEQ ID NO: 147318 - RNA, 28 nt, Human
cuuuaagaauuccugggguggacuuugc

SEQ ID NO: 147319 - RNA, 32 nt, Human
cuuuaagagacucaggcaggaggaucacuuga

SEQ ID NO: 147320 - RNA, 32 nt, Human
cuuuaagagcagagggaaccagcuucagaaca

SEQ ID NO: 147321 - RNA, 32 nt, Human
cuuuaagagcuuccacugcacccccucccaag

SEQ ID NO: 147322 - RNA, 32 nt, Human
cuuuaagaggccgaggcgggcagaucaccuga

SEQ ID NO: 147323 - RNA, 32 nt, Human
cuuuaagauggaaauuuauguucuuucuauua

SEQ ID NO: 147324 - RNA, 31 nt, Human
cuuuaagcaauguccauaccccgucaagacu

SEQ ID NO: 147325 - RNA, 32 nt, Human
cuuuaagcacauccccuaggggagggggugag

SEQ ID NO: 147326 - RNA, 32 nt, Human
cuuuaagcagagggcaucuuuuucucuccuac

SEQ ID NO: 147327 - RNA, 32 nt, Human
cuuuaagcccacauccacugaguaaagaguca

SEQ ID NO: 147328 - RNA, 22 nt, Human
cuuuaagccuaaaucaaacuuu

SEQ ID NO: 147329 - RNA, 24 nt, Human
cuuuaagcuauuugacaacucuac

SEQ ID NO: 147330 - RNA, 32 nt, Human
cuuuaagcucugcuucucucuuccucaucucc

SEQ ID NO: 147331 - RNA, 32 nt, Human
cuuuaagcuuggugcugcaaagagucuuuaaa

SEQ ID NO: 147332 - RNA, 22 nt, Human
cuuuaagcuuucaaaacuguac

SEQ ID NO: 147333 - RNA, 32 nt, Human
cuuuaaggaauaguuaagcagcuuaaaguuua

SEQ ID NO: 147334 - RNA, 32 nt, Human
cuuuaaggaugagccaauaguaagaauguggc

SEQ ID NO: 147335 - RNA, 32 nt, Human
cuuuaaggaugaggacagcugauguggcuggc

SEQ ID NO: 147336 - RNA, 32 nt, Human
cuuuaagggacagggucucgcuguguugcaug

SEQ ID NO: 147337 - RNA, 32 nt, Human
cuuuaagguacugagggcaggagaaguuaaug

SEQ ID NO: 147338 - RNA, 32 nt, Human
cuuuaagguccaccugcgcccacugagcugga

SEQ ID NO: 147339 - RNA, 23 nt, Human
cuuuaaguccuacagcacuuugc

SEQ ID NO: 147340 - RNA, 31 nt, Human
cuuuaagugacucagcacccugccucagcuu

SEQ ID NO: 147341 - RNA, 32 nt, Human
cuuuaaguguguuugcaugcgccaggcggugg

SEQ ID NO: 147342 - RNA, 32 nt, Human
cuuuaaguucaaucuaaaggcuucaguccaca

SEQ ID NO: 147343 - RNA, 32 nt, Human
cuuuaaguugcaugaucuuucugcaggaaaua

SEQ ID NO: 147344 - RNA, 32 nt, Human
cuuuaauaauaggaaaaggggaaaguauuuau

SEQ ID NO: 147345 - RNA, 32 nt, Human
cuuuaauacaauuaugacacucccuuuugaac

SEQ ID NO: 147346 - RNA, 32 nt, Human
cuuuaauauagcuguucugaaauucuggugca

SEQ ID NO: 147347 - RNA, 32 nt, Human
cuuuaauauagugugccugggcccuccagagg

SEQ ID NO: 147348 - RNA, 32 nt, Human
cuuuaaucaguccucacaccuuucuacacaua

SEQ ID NO: 147349 - RNA, 32 nt, Human
cuuuaaucaugguuucaugagcauuaaaaagc

SEQ ID NO: 147350 - RNA, 32 nt, Human
cuuuaaucauuuucuguuuuuccucuauguga

SEQ ID NO: 147351 - RNA, 25 nt, Human
cuuuaaucuucaaaauaccugguuu

SEQ ID NO: 147352 - RNA, 17 nt, Human
cuuuaaugaagcuugag

SEQ ID NO: 147353 - RNA, 32 nt, Human
cuuuaaugaggcauauguuacauaucauaaaa

SEQ ID NO: 147354 - RNA, 32 nt, Human
cuuuaaugggauagugcuucuugaccauuaua

SEQ ID NO: 147355 - RNA, 32 nt, Human
cuuuaaugggcccaaggccaacaggcauaugc

SEQ ID NO: 147356 - RNA, 32 nt, Human
cuuuaaugguuucacauugaagccugaaguug

SEQ ID NO: 147357 - RNA, 32 nt, Human
cuuuaauguuccaagucagcugugccucacac

SEQ ID NO: 147358 - RNA, 32 nt, Human
cuuuaauucucaaagcacuccugugagguuca

SEQ ID NO: 147359 - RNA, 32 nt, Human
cuuuaauuuaucuugcuuuccacaugcagucu

SEQ ID NO: 147360 - RNA, 32 nt, Human
cuuuaauuuuaaaaauaaucacuggggccugg

SEQ ID NO: 147361 - RNA, 32 nt, Human
cuuuaauuuuuaguaaaaccugaaggugaugg

SEQ ID NO: 147362 - RNA, 32 nt, Human
cuuuacaagacuuguuaaagaugucagagugc

SEQ ID NO: 147363 - RNA, 32 nt, Human
cuuuacaagggugagaucugcacgggaggacc

SEQ ID NO: 147364 - RNA, 32 nt, Human
cuuuacaccaccuucucaacacugcugaaaag

SEQ ID NO: 147365 - RNA, 32 nt, Human
cuuuacagaagcagaaucagguugugguugca

SEQ ID NO: 147366 - RNA, 32 nt, Human
cuuuacagagcugucagaagacuugggaaggu

SEQ ID NO: 147367 - RNA, 32 nt, Human
cuuuacagaugaagacacugaggcucaggagg

SEQ ID NO: 147368 - RNA, 32 nt, Human
cuuuacagcucuccuccagcccugggcacaua

SEQ ID NO: 147369 - RNA, 32 nt, Human
cuuuacaggaagcaugguacuggcaucugcuu

SEQ ID NO: 147370 - RNA, 32 nt, Human
cuuuacaggaagcauugcgcuggcaucugcuu

SEQ ID NO: 147371 - RNA, 32 nt, Human
cuuuacaggaaguugggaccagcuggaaauug

SEQ ID NO: 147372 - RNA, 32 nt, Human
cuuuacaggagaagcccuugaggcagagcaag

SEQ ID NO: 147373 - RNA, 32 nt, Human
cuuuacaggauuaugaauacaaaaugccacug

SEQ ID NO: 147374 - RNA, 32 nt, Human
cuuuacaggggcagauuuucugcucaguucaa

SEQ ID NO: 147375 - RNA, 32 nt, Human
cuuuacagggucaguuccgcuucaccuccuuu

SEQ ID NO: 147376 - RNA, 32 nt, Human
cuuuacaguaccuaaggaucacuuguaguauc

SEQ ID NO: 147377 - RNA, 32 nt, Human
cuuuacaguauuguuucuuuucucuuuguuaa

SEQ ID NO: 147378 - RNA, 26 nt, Human
cuuuacaguccccugaggagaacuuu

SEQ ID NO: 147379 - RNA, 32 nt, Human
cuuuacauauucucucugugcauguggggcug

SEQ ID NO: 147380 - RNA, 32 nt, Human
cuuuacauccaugcaacaugucauuuugaaac

SEQ ID NO: 147381 - RNA, 32 nt, Human
cuuuacauccuucucccuaacaucuagacuau

SEQ ID NO: 147382 - RNA, 32 nt, Human
cuuuacaucucucauggcugggcagcagcugu

SEQ ID NO: 147383 - RNA, 32 nt, Human
cuuuacaucugcuguugaaccugggcacuacc

SEQ ID NO: 147384 - RNA, 32 nt, Human
cuuuacauguacaauugcugguauuuuauaca

SEQ ID NO: 147385 - RNA, 32 nt, Human
cuuuaccaaaaauacaaaaauuagccaggugu

SEQ ID NO: 147386 - RNA, 32 nt, Human
cuuuaccaaaaguuuaaaaauuagcuuggugu

SEQ ID NO: 147387 - RNA, 32 nt, Human
cuuuaccaaggaugaaagaggagccaggccuu

SEQ ID NO: 147388 - RNA, 32 nt, Human
cuuuaccacugaugaggggccucugccggcug

SEQ ID NO: 147389 - RNA, 32 nt, Human
cuuuaccagacaggcagcaggagucucggcug

SEQ ID NO: 147390 - RNA, 32 nt, Human
cuuuaccagcaugguaagcaacaggacauauc

SEQ ID NO: 147391 - RNA, 32 nt, Human
cuuuaccaggcaugcaaggagaugcuaagucc

SEQ ID NO: 147392 - RNA, 32 nt, Human
cuuuaccaguugggaaggcaaggcaguuaauu

SEQ ID NO: 147393 - RNA, 32 nt, Human
cuuuaccauauguauuuuaaauguauucucuu

SEQ ID NO: 147394 - RNA, 32 nt, Human
cuuuacccaagguuaugcuaugaccuuuccgc

SEQ ID NO: 147395 - RNA, 32 nt, Human
cuuuacccagccuguuugcuuuacugcaugaa

SEQ ID NO: 147396 - RNA, 32 nt, Human
cuuuaccccaaccugcagcccagccuucccug

SEQ ID NO: 147397 - RNA, 32 nt, Human
cuuuacccccuucacguacuuccuuucuuucu

SEQ ID NO: 147398 - RNA, 32 nt, Human
cuuuaccccugaaaauccagacugcuuaugac

SEQ ID NO: 147399 - RNA, 32 nt, Human
cuuuacccuaguuucuuccucuguaaaauagg

SEQ ID NO: 147400 - RNA, 32 nt, Human
cuuuaccgauguauuuuccuacucauagccaa

SEQ ID NO: 147401 - RNA, 32 nt, Human
cuuuaccuaacagacuaauuuguacucaguaa

SEQ ID NO: 147402 - RNA, 21 nt, Human
cuuuaccuagcugugcccccu

SEQ ID NO: 147403 - RNA, 32 nt, Human
cuuuaccugcauaacgggguucaagacugaca

SEQ ID NO: 147404 - RNA, 32 nt, Human
cuuuaccugugcugaaguuguauggaccuaca

SEQ ID NO: 147405 - RNA, 32 nt, Human
cuuuaccuucauuucauccuguuggcugcugc

SEQ ID NO: 147406 - RNA, 32 nt, Human
cuuuaccuuccagaacaaaaugacuccugaug

SEQ ID NO: 147407 - RNA, 31 nt, Human
cuuuaccuucuuggagcaguuggagaguaac

SEQ ID NO: 147408 - RNA, 32 nt, Human
cuuuaccuucuuugucccaggcugcuucucua

SEQ ID NO: 147409 - RNA, 32 nt, Human
cuuuacgaucagcgugacagaguagaagcugg

SEQ ID NO: 147410 - RNA, 32 nt, Human
cuuuacggaaagcacgcuccagacaagcucgg

SEQ ID NO: 147411 - RNA, 32 nt, Human
cuuuacggcggccagugcugaauggcccugug

SEQ ID NO: 147412 - RNA, 32 nt, Human
cuuuacggcuuccugacuucugugacaguaag

SEQ ID NO: 147413 - RNA, 32 nt, Human
cuuuacuaaaaauacaaaaacaaaaauuagcc

SEQ ID NO: 147414 - RNA, 32 nt, Human
cuuuacuaaaaauacaaaaauuacccaagcau

SEQ ID NO: 147415 - RNA, 32 nt, Human
cuuuacuaaaaauacaaaaauuagccaggcau

SEQ ID NO: 147416 - RNA, 32 nt, Human
cuuuacuaaaaauacaaaaauuagccaggcgc

SEQ ID NO: 147417 - RNA, 32 nt, Human
cuuuacuaaaaauacaaaaauuagccaggcgu

SEQ ID NO: 147418 - RNA, 32 nt, Human
cuuuacuaaaaauacaaaaauuagccgggcau

SEQ ID NO: 147419 - RNA, 32 nt, Human
cuuuacuaaaaauacaaaaauuagccgggcgu

SEQ ID NO: 147420 - RNA, 32 nt, Human
cuuuacuaaaaauacaaaaauuagcugggcau

SEQ ID NO: 147421 - RNA, 32 nt, Human
cuuuacuaaaaauacaaaaauuagcugggugu

SEQ ID NO: 147422 - RNA, 32 nt, Human
cuuuacuaaaaauacaaaaauuagucaggcau

SEQ ID NO: 147423 - RNA, 20 nt, Human
cuuuacuaaaaauacaaaau

SEQ ID NO: 147424 - RNA, 32 nt, Human
cuuuacuaaaaauauaaaaauuagcugggugu

SEQ ID NO: 147425 - RNA, 32 nt, Human
cuuuacuaaucaugaaauucuaaccuaaaagg

SEQ ID NO: 147426 - RNA, 32 nt, Human
cuuuacuacauccugccccacauucugacuug

SEQ ID NO: 147427 - RNA, 32 nt, Human
cuuuacuaguagcugagauuuaaugggcaccu

SEQ ID NO: 147428 - RNA, 32 nt, Human
cuuuacuauaguucaugaccuggacuuucugu

SEQ ID NO: 147429 - RNA, 32 nt, Human
cuuuacuauguacacugggucuguucuaaugg

SEQ ID NO: 147430 - RNA, 32 nt, Human
cuuuacuccaguugcauuucucagacaauaaa

SEQ ID NO: 147431 - RNA, 32 nt, Human
cuuuacugaacugucaucaucuuauacauuuu

SEQ ID NO: 147432 - RNA, 32 nt, Human
cuuuacugacauggagugaagugcaauauuau

SEQ ID NO: 147433 - RNA, 31 nt, Human
cuuuacugcacuuucugaccaggagcuacuu

SEQ ID NO: 147434 - RNA, 32 nt, Human
cuuuacugcagccuccgcuuccuggguucaag

SEQ ID NO: 147435 - RNA, 32 nt, Human
cuuuacuggaaagauuacauacauuugagaau

SEQ ID NO: 147436 - RNA, 32 nt, Human
cuuuacuggaguuuccucuuguccauuucuga

SEQ ID NO: 147437 - RNA, 19 nt, Human
cuuuacuggcuguaggucu

SEQ ID NO: 147438 - RNA, 31 nt, Human
cuuuacugggccacggaaggcauucagugaa

SEQ ID NO: 147439 - RNA, 32 nt, Human
cuuuacugucaaucuucugucccaguaguuua

SEQ ID NO: 147440 - RNA, 32 nt, Human
cuuuacuucacguucacaccuccuuagacauc

SEQ ID NO: 147441 - RNA, 32 nt, Human
cuuuacuucuaugccucacaagugccuuucag

SEQ ID NO: 147442 - RNA, 32 nt, Human
cuuuacuuguacauauacacuacaauggauag

SEQ ID NO: 147443 - RNA, 32 nt, Human
cuuuacuuugguggccugcuucccucaugccc

SEQ ID NO: 147444 - RNA, 32 nt, Human
cuuuagaaaagcuuccuguaccccaggucagu

SEQ ID NO: 147445 - RNA, 32 nt, Human
cuuuagaaaggguuaucagagccauggagcuu

SEQ ID NO: 147446 - RNA, 32 nt, Human
cuuuagaacuguguucucaccuucccaacacu

SEQ ID NO: 147447 - RNA, 32 nt, Human
cuuuagaagcaacuauccugccacuggcucag

SEQ ID NO: 147448 - RNA, 32 nt, Human
cuuuagaagucuuuauguucuuccugccauca

SEQ ID NO: 147449 - RNA, 32 nt, Human
cuuuagaccaaaggugucugagaaaaggagaa

SEQ ID NO: 147450 - RNA, 20 nt, Human
cuuuagacugggcaacagag

SEQ ID NO: 147451 - RNA, 21 nt, Human
cuuuagacugggcaacagagc

SEQ ID NO: 147452 - RNA, 32 nt, Human
cuuuagagaaagagaaugggagcauaugugag

SEQ ID NO: 147453 - RNA, 32 nt, Human
cuuuagagaucuggauauuuuucaaagacuug

SEQ ID NO: 147454 - RNA, 32 nt, Human
cuuuagagcugcacuagccuggcuuucuuauu

SEQ ID NO: 147455 - RNA, 32 nt, Human
cuuuagaggaagcacaacugugccuuuuucug

SEQ ID NO: 147456 - RNA, 32 nt, Human
cuuuagaggagccugagaagaggcagaggaag

SEQ ID NO: 147457 - RNA, 32 nt, Human
cuuuagagguagcuugccaucucucaggagcc

SEQ ID NO: 147458 - RNA, 32 nt, Human
cuuuagaugcagugaaauucagauugcagcaa

SEQ ID NO: 147459 - RNA, 16 nt, Human
cuuuagauuccgaaua

SEQ ID NO: 147460 - RNA, 32 nt, Human
cuuuagcaaccagcuaauauuuacccagaggu

SEQ ID NO: 147461 - RNA, 32 nt, Human
cuuuagcaagcucuugcacucuugcccauacc

SEQ ID NO: 147462 - RNA, 32 nt, Human
cuuuagcaagugugcacuccagcuucggaggc

SEQ ID NO: 147463 - RNA, 23 nt, Human
cuuuagcacuuggccccauugua

SEQ ID NO: 147464 - RNA, 19 nt, Human
cuuuagcaguucuuccauc

SEQ ID NO: 147465 - RNA, 32 nt, Human
cuuuagcauccaccaauuuucacugcauuuug

SEQ ID NO: 147466 - RNA, 32 nt, Human
cuuuagcaugugaagagucaccagcagauucc

SEQ ID NO: 147467 - RNA, 32 nt, Human
cuuuagccaagcuccucaaccuucucccaggc

SEQ ID NO: 147468 - RNA, 32 nt, Human
cuuuagccacagcaaaccacacuuaaccuauc

SEQ ID NO: 147469 - RNA, 32 nt, Human
cuuuagccaucucucugaccucagugcugcug

SEQ ID NO: 147470 - RNA, 32 nt, Human
cuuuagcccaggaauucgagaccagccugggc

SEQ ID NO: 147471 - RNA, 32 nt, Human
cuuuagcccaggagguccagaccagccugggc

SEQ ID NO: 147472 - RNA, 32 nt, Human
cuuuagcccaggaguuaaagaccagccugggc

SEQ ID NO: 147473 - RNA, 32 nt, Human
cuuuagcccaggaguucaagaucagcuugugc

SEQ ID NO: 147474 - RNA, 21 nt, Human
cuuuagcccaggaguuugaga

SEQ ID NO: 147475 - RNA, 32 nt, Human
cuuuagcccaggaguuugaggcugcggugagu

SEQ ID NO: 147476 - RNA, 32 nt, Human
cuuuagccccacugcuggcacugaugucccuc

SEQ ID NO: 147477 - RNA, 32 nt, Human
cuuuagccuccaucaccugccaucccaagcaa

SEQ ID NO: 147478 - RNA, 32 nt, Human
cuuuagccuggaggucaaggcugcagugagcc

SEQ ID NO: 147479 - RNA, 32 nt, Human
cuuuagcuagacacagagugcugauuggugcg

SEQ ID NO: 147480 - RNA, 21 nt, Human
cuuuagcucaggaguuggaga

SEQ ID NO: 147481 - RNA, 32 nt, Human
cuuuagcuccauaguucucuucucgccucaua

SEQ ID NO: 147482 - RNA, 32 nt, Human
cuuuagcuguuaauuugaguacuuauggcccu

SEQ ID NO: 147483 - RNA, 21 nt, Human
cuuuagcuuccaggagcagug

SEQ ID NO: 147484 - RNA, 32 nt, Human
cuuuagcuuucuuaaucggugcuuuauggagg

SEQ ID NO: 147485 - RNA, 32 nt, Human
cuuuaggaaagugaaaugcaggugagaagaac

SEQ ID NO: 147486 - RNA, 32 nt, Human
cuuuaggaagaacuauaauuuaaucacguuug

SEQ ID NO: 147487 - RNA, 32 nt, Human
cuuuaggaagcauuggcucuuaagugaaagga

SEQ ID NO: 147488 - RNA, 23 nt, Human
cuuuaggaaucaaugacuuaaca

SEQ ID NO: 147489 - RNA, 32 nt, Human
cuuuaggagaccaaggcgggcagaucacuuga

SEQ ID NO: 147490 - RNA, 32 nt, Human
cuuuaggagccccagacaggaggaucacuuaa

SEQ ID NO: 147491 - RNA, 32 nt, Human
cuuuaggaggagagaagcguggaaggacagca

SEQ ID NO: 147492 - RNA, 32 nt, Human
cuuuaggaggagggaaagggguggcucuggca

SEQ ID NO: 147493 - RNA, 21 nt, Human
cuuuaggaggcagacuugaca

SEQ ID NO: 147494 - RNA, 32 nt, Human
cuuuaggaggccaaggagggcagaucaccuga

SEQ ID NO: 147495 - RNA, 32 nt, Human
cuuuaggaggccaccacaggaggaucacuccc

SEQ ID NO: 147496 - RNA, 32 nt, Human
cuuuaggaggccgaggcuggcagaucacaagg

SEQ ID NO: 147497 - RNA, 32 nt, Human
cuuuaggaggcucaggcaggaggaucacuuga

SEQ ID NO: 147498 - RNA, 32 nt, Human
cuuuaggaggcugaggcaagaggaucacuuga

SEQ ID NO: 147499 - RNA, 32 nt, Human
cuuuaggaggcugaggcugguggaucacuuga

SEQ ID NO: 147500 - RNA, 32 nt, Human
cuuuaggaggcugaggugggaggaucacuuga

SEQ ID NO: 147501 - RNA, 32 nt, Human
cuuuaggaggcugaggugggaggaucgcuuaa

SEQ ID NO: 147502 - RNA, 32 nt, Human
cuuuaggaggcugugguagguggaucacuuga

SEQ ID NO: 147503 - RNA, 32 nt, Human
cuuuaggaggucaaggugggcagaucaugagg

SEQ ID NO: 147504 - RNA, 32 nt, Human
cuuuaggccugccuccccaggacuccuuagau

SEQ ID NO: 147505 - RNA, 32 nt, Human
cuuuaggcugccgccgcugccugccgccaugg

SEQ ID NO: 147506 - RNA, 32 nt, Human
cuuuaggggaggcaggcaggugggugagcagc

SEQ ID NO: 147507 - RNA, 32 nt, Human
cuuuaggggagguggauuugaggcagauacca

SEQ ID NO: 147508 - RNA, 32 nt, Human
cuuuaggggcugcaggacggaauggccgccug

SEQ ID NO: 147509 - RNA, 32 nt, Human
cuuuaggguagaaauuuauuuagcaaauguga

SEQ ID NO: 147510 - RNA, 17 nt, Human
cuuuaggguuucuucaa

SEQ ID NO: 147511 - RNA, 25 nt, Human
cuuuaggguuugggggagauuuuac

SEQ ID NO: 147512 - RNA, 24 nt, Human
cuuuaggucgaaagaaaaccuuac

SEQ ID NO: 147513 - RNA, 32 nt, Human
cuuuaggugaucuuuaaacuaugguaguaaaa

SEQ ID NO: 147514 - RNA, 21 nt, Human
cuuuaggugaugaaucuuuac

SEQ ID NO: 147515 - RNA, 32 nt, Human
cuuuaggugguguuugcuuguucuuuaauuuu

SEQ ID NO: 147516 - RNA, 32 nt, Human
cuuuaggugugggaaaaacuugaucugaaaga

SEQ ID NO: 147517 - RNA, 32 nt, Human
cuuuagguguuuugacaccaaaagaaaacuac

SEQ ID NO: 147518 - RNA, 22 nt, Human
cuuuagguuaugaagauuuuac

SEQ ID NO: 147519 - RNA, 32 nt, Human
cuuuagguucuuugcugcauucugccucucua

SEQ ID NO: 147520 - RNA, 32 nt, Human
cuuuagguugcucuggggaaggcugucuugcu

SEQ ID NO: 147521 - RNA, 32 nt, Human
cuuuaguaaacccuaaguaaagucaaaaugga

SEQ ID NO: 147522 - RNA, 32 nt, Human
cuuuaguauuuuaauaagaauuacaaagacaa

SEQ ID NO: 147523 - RNA, 32 nt, Human
cuuuagucacgagaucuuuuucugcuaacugu

SEQ ID NO: 147524 - RNA, 32 nt, Human
cuuuaguccaggaguuuugagaccagccuggg

SEQ ID NO: 147525 - RNA, 32 nt, Human
cuuuagucccuaggguggggugugagaugggu

SEQ ID NO: 147526 - RNA, 32 nt, Human
cuuuagucucaaaacaagagacuaggaaagau

SEQ ID NO: 147527 - RNA, 32 nt, Human
cuuuagucuuuuuaaaggaaaauaacaaaacu

SEQ ID NO: 147528 - RNA, 32 nt, Human
cuuuaguguucuguuugaaacuaauacuuacc

SEQ ID NO: 147529 - RNA, 32 nt, Human
cuuuaguuaagaugauccuuucccaguguugu

SEQ ID NO: 147530 - RNA, 32 nt, Human
cuuuaguucccaggcugaaccugccacugcug

SEQ ID NO: 147531 - RNA, 32 nt, Human
cuuuaguucucauuucucuguuucuaguggga

SEQ ID NO: 147532 - RNA, 32 nt, Human
cuuuaguuuccaaccuucuccccaacccuugg

SEQ ID NO: 147533 - RNA, 32 nt, Human
cuuuaguuuguggccaacacuuguuucugaaa

SEQ ID NO: 147534 - RNA, 31 nt, Human
cuuuauaaaauuucucccauccaaguacuaa

SEQ ID NO: 147535 - RNA, 32 nt, Human
cuuuauaaaugauguuuugugaacauaguaaa

SEQ ID NO: 147536 - RNA, 32 nt, Human
cuuuauaagccugaccccacaguccaguguga

SEQ ID NO: 147537 - RNA, 32 nt, Human
cuuuauaaucuauuuuaucuuguuuaccuaaa

SEQ ID NO: 147538 - RNA, 32 nt, Human
cuuuauaaugcagucgagaguaagaauacaug

SEQ ID NO: 147539 - RNA, 25 nt, Human
cuuuauacagcaaaggaaacuuugc

SEQ ID NO: 147540 - RNA, 31 nt, Human
cuuuauacgcaguaaguauguugaaaacaaa

SEQ ID NO: 147541 - RNA, 32 nt, Human
cuuuauagaauguuguaaaacagacaaacaag

SEQ ID NO: 147542 - RNA, 32 nt, Human
cuuuauagauagucacuuguuucuacaauuca

SEQ ID NO: 147543 - RNA, 32 nt, Human
cuuuauagcacuccgacauuuucugagcaaga

SEQ ID NO: 147544 - RNA, 32 nt, Human
cuuuauaggauguggucccacaggccugucac

SEQ ID NO: 147545 - RNA, 25 nt, Human
cuuuauaggucuguuucauauguuu

SEQ ID NO: 147546 - RNA, 32 nt, Human
cuuuauaguaugacgaguuaacaaguugguga

SEQ ID NO: 147547 - RNA, 32 nt, Human
cuuuauauaguguuuuauuaacuuucuccuac

SEQ ID NO: 147548 - RNA, 32 nt, Human
cuuuauaucuauguuucccuuucgucuauucu

SEQ ID NO: 147549 - RNA, 32 nt, Human
cuuuauaugaaaaggaaggaagagugaccuaa

SEQ ID NO: 147550 - RNA, 32 nt, Human
cuuuauaugaacauagacuagagaaaccgucc

SEQ ID NO: 147551 - RNA, 23 nt, Human
cuuuauauguccagccucuuccu

SEQ ID NO: 147552 - RNA, 32 nt, Human
cuuuauauguucugaacuuaacagggcacauu

SEQ ID NO: 147553 - RNA, 32 nt, Human
cuuuauauuaaauuauggggucagugacaagg

SEQ ID NO: 147554 - RNA, 32 nt, Human
cuuuauauuugcuacacaguacccagagcagc

SEQ ID NO: 147555 - RNA, 32 nt, Human
cuuuauauuuugcuaccaaaugcuuuuggcua

SEQ ID NO: 147556 - RNA, 32 nt, Human
cuuuaucaacugagacuuuggggccuguaagc

SEQ ID NO: 147557 - RNA, 32 nt, Human
cuuuaucacaauaugauucuuacaucuuuaua

SEQ ID NO: 147558 - RNA, 32 nt, Human
cuuuaucacccagacuggcgugcaguggcacu

SEQ ID NO: 147559 - RNA, 32 nt, Human
cuuuaucagaagcaaggaaguaagggagucau

SEQ ID NO: 147560 - RNA, 32 nt, Human
cuuuaucagacccucagacaagaggcugacuu

SEQ ID NO: 147561 - RNA, 32 nt, Human
cuuuaucagggacuucaaauuugcauuugucc

SEQ ID NO: 147562 - RNA, 32 nt, Human
cuuuaucauggaccagaggaaaaccagaaaac

SEQ ID NO: 147563 - RNA, 23 nt, Human
cuuuaucauggcuuucuacagua

SEQ ID NO: 147564 - RNA, 32 nt, Human
cuuuaucccaauauauuauagaaagaucuuca

SEQ ID NO: 147565 - RNA, 32 nt, Human
cuuuauccccuccuuuaccccacauaugcaau

SEQ ID NO: 147566 - RNA, 32 nt, Human
cuuuaucccucuccccagaaucaugaagccca

SEQ ID NO: 147567 - RNA, 32 nt, Human
cuuuaucccuuuccucuuucauucccccaacu

SEQ ID NO: 147568 - RNA, 32 nt, Human
cuuuauccugaguacugggauuacaggcgccc

SEQ ID NO: 147569 - RNA, 32 nt, Human
cuuuauccuguccccucuccuuucuccuggca

SEQ ID NO: 147570 - RNA, 32 nt, Human
cuuuaucgaccaccccaugggguccuguguag

SEQ ID NO: 147571 - RNA, 32 nt, Human
cuuuaucgcccaggcuggaguacagugaugca

SEQ ID NO: 147572 - RNA, 32 nt, Human
cuuuaucuacuucaucuguuccuaagucagca

SEQ ID NO: 147573 - RNA, 32 nt, Human
cuuuaucuccagggacucucaggcuaaccuuu

SEQ ID NO: 147574 - RNA, 32 nt, Human
cuuuaucucccacgggcuccccaagaaccucc

SEQ ID NO: 147575 - RNA, 32 nt, Human
cuuuaucucucaguuguggccauuccagagga

SEQ ID NO: 147576 - RNA, 32 nt, Human
cuuuaucucucccacauugucuugcuaaauau

SEQ ID NO: 147577 - RNA, 32 nt, Human
cuuuaucuggaaaaugccuucucuccagacaa

SEQ ID NO: 147578 - RNA, 32 nt, Human
cuuuaucuggugcucaguucucagucagacgu

SEQ ID NO: 147579 - RNA, 32 nt, Human
cuuuaucugucagcuucucccugccacuucac

SEQ ID NO: 147580 - RNA, 32 nt, Human
cuuuaucuuguuacaaaaacugagaugugggg

SEQ ID NO: 147581 - RNA, 32 nt, Human
cuuuaugaaagaacaugaauguaaguuuuguc

SEQ ID NO: 147582 - RNA, 32 nt, Human
cuuuaugaaaguucuggaguccugggucuggg

SEQ ID NO: 147583 - RNA, 24 nt, Human
cuuuaugacugaauaauacuuugc

SEQ ID NO: 147584 - RNA, 32 nt, Human
cuuuaugacuuucccacagagacuggaaugcg

SEQ ID NO: 147585 - RNA, 32 nt, Human
cuuuaugagcacuggaauguguuuguaaaagg

SEQ ID NO: 147586 - RNA, 32 nt, Human
cuuuaugagggagcuggcaauugaacaucauu

SEQ ID NO: 147587 - RNA, 32 nt, Human
cuuuaugagucacuucucuauccacagucuug

SEQ ID NO: 147588 - RNA, 32 nt, Human
cuuuaugaucagugauaccuuagagacuuuuc

SEQ ID NO: 147589 - RNA, 32 nt, Human
cuuuaugcaacuaacuguuuacauaucugucc

SEQ ID NO: 147590 - RNA, 32 nt, Human
cuuuaugcacacagagacccagggugagggag

SEQ ID NO: 147591 - RNA, 29 nt, Human
cuuuaugcccuuuaaugugucugauauuu

SEQ ID NO: 147592 - RNA, 25 nt, Human
cuuuaugcguguuguuuucacuuua

SEQ ID NO: 147593 - RNA, 32 nt, Human
cuuuaugcuuaaauaaauuauaguugauuuaa

SEQ ID NO: 147594 - RNA, 32 nt, Human
cuuuauggagaaaugguuguacuuuuaauuuu

SEQ ID NO: 147595 - RNA, 32 nt, Human
cuuuaugggucugccucauuggauuucgucag

SEQ ID NO: 147596 - RNA, 32 nt, Human
cuuuaugguccuggugugagaggugggaugag

SEQ ID NO: 147597 - RNA, 32 nt, Human
cuuuaugguuccaagugcaaaacagguguucu

SEQ ID NO: 147598 - RNA, 32 nt, Human
cuuuaugucuuugcucacccucauccccaaac

SEQ ID NO: 147599 - RNA, 32 nt, Human
cuuuaugugcccaucacucucagagaccacgu

SEQ ID NO: 147600 - RNA, 32 nt, Human
cuuuauguuuauggggagaggacucaauagcu

SEQ ID NO: 147601 - RNA, 32 nt, Human
cuuuauuaaauacaaaacuuccaggcuaaaca

SEQ ID NO: 147602 - RNA, 32 nt, Human
cuuuauuaacauccuagcuucgguuuguugug

SEQ ID NO: 147603 - RNA, 32 nt, Human
cuuuauuaacauccucucacauuuuguuuuac

SEQ ID NO: 147604 - RNA, 32 nt, Human
cuuuauuacaaaauuauaaagcagagcucugu

SEQ ID NO: 147605 - RNA, 32 nt, Human
cuuuauuagauauagaauggcagauucucuga

SEQ ID NO: 147606 - RNA, 32 nt, Human
cuuuauuagcugaagcuaauucagagccaccu

SEQ ID NO: 147607 - RNA, 32 nt, Human
cuuuauuaugaauaugcugugucuucauuuga

SEQ ID NO: 147608 - RNA, 22 nt, Human
cuuuauuccaauuuccagagag

SEQ ID NO: 147609 - RNA, 32 nt, Human
cuuuauuccaggagacauuaagccucuaaaga

SEQ ID NO: 147610 - RNA, 20 nt, Human
cuuuauuccggaacauucca

SEQ ID NO: 147611 - RNA, 20 nt, Human
cuuuauucuaaaguauauua

SEQ ID NO: 147612 - RNA, 32 nt, Human
cuuuauucucagcacccagaacagugccuggc

SEQ ID NO: 147613 - RNA, 18 nt, Human
cuuuauucucuagcaauc

SEQ ID NO: 147614 - RNA, 20 nt, Human
cuuuauucugagaaauauua

SEQ ID NO: 147615 - RNA, 19 nt, Human
cuuuauucugaggaauaca

SEQ ID NO: 147616 - RNA, 20 nt, Human
cuuuauucuggagcauauca

SEQ ID NO: 147617 - RNA, 20 nt, Human
cuuuauucuggagucugcca

SEQ ID NO: 147618 - RNA, 32 nt, Human
cuuuauucuggcagaggagggagcaucagugc

SEQ ID NO: 147619 - RNA, 19 nt, Human
cuuuauucuggccucauca

SEQ ID NO: 147620 - RNA, 25 nt, Human
cuuuauucugguuucuuguuuguuu

SEQ ID NO: 147621 - RNA, 32 nt, Human
cuuuauucuuuuggaccaaggcugucccuggg

SEQ ID NO: 147622 - RNA, 32 nt, Human
cuuuauugagacugacaggccaguggguccac

SEQ ID NO: 147623 - RNA, 32 nt, Human
cuuuauugagccacaguacagcucagaggaga

SEQ ID NO: 147624 - RNA, 32 nt, Human
cuuuauugcaacucuuuuaagugccuuggaug

SEQ ID NO: 147625 - RNA, 32 nt, Human
cuuuauugcaauauuuauuuucaucuacaaua

SEQ ID NO: 147626 - RNA, 32 nt, Human
cuuuauugccuagaugcugcaauguuuuuaug

SEQ ID NO: 147627 - RNA, 32 nt, Human
cuuuauugccuagcugcuuguguuugaguggu

SEQ ID NO: 147628 - RNA, 32 nt, Human
cuuuauugccuuuccuuuguuuccuuguaaag

SEQ ID NO: 147629 - RNA, 32 nt, Human
cuuuauugcugguuuuucauuuacacugauaa

SEQ ID NO: 147630 - RNA, 32 nt, Human
cuuuauuggagaggggaugugggcaggggaua

SEQ ID NO: 147631 - RNA, 32 nt, Human
cuuuauuggcuacauaaucacuccaugcggug

SEQ ID NO: 147632 - RNA, 32 nt, Human
cuuuauuguccaccaugcucucucaccugcuu

SEQ ID NO: 147633 - RNA, 32 nt, Human
cuuuauuguccugauuuguccucuuuguuggu

SEQ ID NO: 147634 - RNA, 32 nt, Human
cuuuauuguccuucauagcaggccaaguauug

SEQ ID NO: 147635 - RNA, 32 nt, Human
cuuuauuuacauaggaaauggccauuuucaag

SEQ ID NO: 147636 - RNA, 32 nt, Human
cuuuauuuaugucuuucuuucucuccagcugc

SEQ ID NO: 147637 - RNA, 31 nt, Human
cuuuauuucauuaaauaccuugaagaaucuu

SEQ ID NO: 147638 - RNA, 32 nt, Human
cuuuauuucucguucucucuuccuuguccucc

SEQ ID NO: 147639 - RNA, 32 nt, Human
cuuuauuucucuauuucccuugccuucaucac

SEQ ID NO: 147640 - RNA, 31 nt, Human
cuuuauuucuggcuuuggccuguggucugug

SEQ ID NO: 147641 - RNA, 32 nt, Human
cuuuauuugaagcaaagcuagccaagauucua

SEQ ID NO: 147642 - RNA, 32 nt, Human
cuuuauuugcugcuguuuaaguugccaaccuc

SEQ ID NO: 147643 - RNA, 32 nt, Human
cuuuauuugggggaaguccaggagaacauauu

SEQ ID NO: 147644 - RNA, 32 nt, Human
cuuuauuuguguccuaaacauucuucagugaa

SEQ ID NO: 147645 - RNA, 32 nt, Human
cuuuauuuucaaggauaguuuauuuuaaaugg

SEQ ID NO: 147646 - RNA, 32 nt, Human
cuuuauuuugaacauaccuaugccacuuuugg

SEQ ID NO: 147647 - RNA, 32 nt, Human
cuuuauuuugagauggagucuugcucugucgc

SEQ ID NO: 147648 - RNA, 32 nt, Human
cuuuauuuugcaccuacagcgugccuuggcac

SEQ ID NO: 147649 - RNA, 32 nt, Human
cuuuauuuuggcugggugugguggcucccacc

SEQ ID NO: 147650 - RNA, 32 nt, Human
cuuuauuuuuauauagccucuggaagccagac

SEQ ID NO: 147651 - RNA, 20 nt, Human
cuuuauuuuuaucccaggaa

SEQ ID NO: 147652 - RNA, 32 nt, Human
cuuuauuuuuauuuuugagacagggucuugug

SEQ ID NO: 147653 - RNA, 32 nt, Human
cuuuauuuuugaagauggcuuauucuuuuguu

SEQ ID NO: 147654 - RNA, 32 nt, Human
cuuucaaacuauuuagauaaccacuugaugca

SEQ ID NO: 147655 - RNA, 32 nt, Human
cuuucaaacuugauucaaaugauguuagugaa

SEQ ID NO: 147656 - RNA, 32 nt, Human
cuuucaaacuugugguggaacaggguuuucuu

SEQ ID NO: 147657 - RNA, 32 nt, Human
cuuucaaagagaaaugugugauuuucauuuac

SEQ ID NO: 147658 - RNA, 32 nt, Human
cuuucaaagcacuuugcuugcauuuuauuuua

SEQ ID NO: 147659 - RNA, 32 nt, Human
cuuucaaaggcugaggcaggcagaucaccuga

SEQ ID NO: 147660 - RNA, 32 nt, Human
cuuucaaagugcuggaauuacaggugugagcc

SEQ ID NO: 147661 - RNA, 32 nt, Human
cuuucaaagugcugggauuacagacaugagcc

SEQ ID NO: 147662 - RNA, 24 nt, Human
cuuucaaagugcugggauuacagg

SEQ ID NO: 147663 - RNA, 32 nt, Human
cuuucaaagugcugggauuacaggcaugagcc

SEQ ID NO: 147664 - RNA, 18 nt, Human
cuuucaaaugagacuuga

SEQ ID NO: 147665 - RNA, 32 nt, Human
cuuucaacauuguggcucagcucucuucaaca

SEQ ID NO: 147666 - RNA, 32 nt, Human
cuuucaacugacuggcaaaaagcaagcuuuag

SEQ ID NO: 147667 - RNA, 20 nt, Human
cuuucaacuggcuuuccuua

SEQ ID NO: 147668 - RNA, 23 nt, Human
cuuucaagaaaaagcccuaucua

SEQ ID NO: 147669 - RNA, 21 nt, Human
cuuucaagcgaguaucuuguu

SEQ ID NO: 147670 - RNA, 32 nt, Human
cuuucaaggaguacgugacgguguaccggagg

SEQ ID NO: 147671 - RNA, 32 nt, Human
cuuucaaggcacugaacaguucugucccacuc

SEQ ID NO: 147672 - RNA, 32 nt, Human
cuuucaaggcagaaaucuugcucugagcaguc

SEQ ID NO: 147673 - RNA, 21 nt, Human
cuuucaagggucacaagcuca

SEQ ID NO: 147674 - RNA, 21 nt, Human
cuuucaaguagagaacuuuau

SEQ ID NO: 147675 - RNA, 32 nt, Human
cuuucaaguagcugggauuacagguaccucua

SEQ ID NO: 147676 - RNA, 21 nt, Human
cuuucaagucuaaaucauuua

SEQ ID NO: 147677 - RNA, 32 nt, Human
cuuucaagugagugcugaggaggaaaggggau

SEQ ID NO: 147678 - RNA, 32 nt, Human
cuuucaaguggcugggaugacuacaggcaugg

SEQ ID NO: 147679 - RNA, 22 nt, Human
cuuucaauccaagcaguucuua

SEQ ID NO: 147680 - RNA, 19 nt, Human
cuuucaauguaccuuccuu

SEQ ID NO: 147681 - RNA, 32 nt, Human
cuuucacaagccuccuacaggaccugguguaa

SEQ ID NO: 147682 - RNA, 32 nt, Human
cuuucacacacgugaggaaggcgcagcucugu

SEQ ID NO: 147683 - RNA, 32 nt, Human
cuuucacacccacuacagaccucagccccagu

SEQ ID NO: 147684 - RNA, 32 nt, Human
cuuucacagaggacaggaggaaagugaggaca

SEQ ID NO: 147685 - RNA, 32 nt, Human
cuuucacaucagcucucccuccaucuucauuc

SEQ ID NO: 147686 - RNA, 32 nt, Human
cuuucaccaagcucuguuuuggccuuucucgg

SEQ ID NO: 147687 - RNA, 32 nt, Human
cuuucaccaagucccucugccgugagucccac

SEQ ID NO: 147688 - RNA, 32 nt, Human
cuuucaccaugggcuucauuaucuugucagaa

SEQ ID NO: 147689 - RNA, 32 nt, Human
cuuucacccacagaaagagagcacugaccccg

SEQ ID NO: 147690 - RNA, 32 nt, Human
cuuucacccaggccggacugcagcggcgcuau

SEQ ID NO: 147691 - RNA, 32 nt, Human
cuuucacccaggcuggagugcagugcugugau

SEQ ID NO: 147692 - RNA, 32 nt, Human
cuuucacccaggcuggagugcaguggcacgau

SEQ ID NO: 147693 - RNA, 24 nt, Human
cuuucacccaggcuggagugcugu

SEQ ID NO: 147694 - RNA, 32 nt, Human
cuuucacccaggcuggagugcuguggcacgau

SEQ ID NO: 147695 - RNA, 32 nt, Human
cuuucaccuauucaugaguuauuauugaaacc

SEQ ID NO: 147696 - RNA, 32 nt, Human
cuuucaccucugucuguuggaagcaguacuuu

SEQ ID NO: 147697 - RNA, 32 nt, Human
cuuucaccugagcuucaccugaggucagacug

SEQ ID NO: 147698 - RNA, 18 nt, Human
cuuucaccuguaauccca

SEQ ID NO: 147699 - RNA, 32 nt, Human
cuuucaccuguaaucccagcacuuugggaggc

SEQ ID NO: 147700 - RNA, 32 nt, Human
cuuucacgaucccagccccauuucagugucug

SEQ ID NO: 147701 - RNA, 32 nt, Human
cuuucacgcagaguucuagaaggagguucuca

SEQ ID NO: 147702 - RNA, 32 nt, Human
cuuucacucacaacacuuaacagggaacggca

SEQ ID NO: 147703 - RNA, 32 nt, Human
cuuucacucaggcuggaauguaguggagagau

SEQ ID NO: 147704 - RNA, 32 nt, Human
cuuucacucauucaaaggcagguuauaaguaa

SEQ ID NO: 147705 - RNA, 32 nt, Human
cuuucacuccuguggcccuggcugcuuuacac

SEQ ID NO: 147706 - RNA, 32 nt, Human
cuuucacuccuuccuuuccuuccuuucucuuc

SEQ ID NO: 147707 - RNA, 32 nt, Human
cuuucacucugcuggcuucucccaggccucuu

SEQ ID NO: 147708 - RNA, 32 nt, Human
cuuucacucuuuccuucuuuccuuccuuuugc

SEQ ID NO: 147709 - RNA, 32 nt, Human
cuuucacugaguagucagggaggagaugaaaa

SEQ ID NO: 147710 - RNA, 32 nt, Human
cuuucacugcagccucaaacuccuggagucca

SEQ ID NO: 147711 - RNA, 18 nt, Human
cuuucacuggcccuuccu

SEQ ID NO: 147712 - RNA, 32 nt, Human
cuuucacugggcuggcaauugucugaacacuu

SEQ ID NO: 147713 - RNA, 32 nt, Human
cuuucagaaaguagucauaaauggagcuuaau

SEQ ID NO: 147714 - RNA, 32 nt, Human
cuuucagagcucacaggagcagggagcaggag

SEQ ID NO: 147715 - RNA, 32 nt, Human
cuuucagaggaagcagagaaguugcuguuaug

SEQ ID NO: 147716 - RNA, 32 nt, Human
cuuucagaggaaggaagagcaacaauggauug

SEQ ID NO: 147717 - RNA, 32 nt, Human
cuuucagaguguucaugaaagcauugagccaa

SEQ ID NO: 147718 - RNA, 20 nt, Human
cuuucagcacccccacucca

SEQ ID NO: 147719 - RNA, 32 nt, Human
cuuucagccacaugccccaggcucucgcugcc

SEQ ID NO: 147720 - RNA, 21 nt, Human
cuuucagcccacuucauaaaa

SEQ ID NO: 147721 - RNA, 32 nt, Human
cuuucagcccugcuaguuggcagguccugagu

SEQ ID NO: 147722 - RNA, 32 nt, Human
cuuucagcccugugcucuggccccagaagccg

SEQ ID NO: 147723 - RNA, 32 nt, Human
cuuucagccucagccccuggcccagccccagc

SEQ ID NO: 147724 - RNA, 32 nt, Human
cuuucagccuccaaaacugugagaaauaaacc

SEQ ID NO: 147725 - RNA, 32 nt, Human
cuuucagccuccagaacuucgaggaaaucaau

SEQ ID NO: 147726 - RNA, 32 nt, Human
cuuucagcgaagguucuuccaccaggaccaau

SEQ ID NO: 147727 - RNA, 22 nt, Human
cuuucagcuccaugcccagagu

SEQ ID NO: 147728 - RNA, 32 nt, Human
cuuucagcuucuaugugguguuggaggugcug

SEQ ID NO: 147729 - RNA, 30 nt, Human
cuuucaggaagccacagggcagggggcguc

SEQ ID NO: 147730 - RNA, 32 nt, Human
cuuucaggaagccacagggcagggggcgucug

SEQ ID NO: 147731 - RNA, 32 nt, Human
cuuucaggaagguggagcugcauugguuugau

SEQ ID NO: 147732 - RNA, 32 nt, Human
cuuucaggaggacaguggaaagagugcagagc

SEQ ID NO: 147733 - RNA, 32 nt, Human
cuuucaggaggcagauaauaaaggccuuaucu

SEQ ID NO: 147734 - RNA, 32 nt, Human
cuuucaggaggcagcacugcagcuggaaggau

SEQ ID NO: 147735 - RNA, 32 nt, Human
cuuucaggcaggagcuaugguuccuuccucag

SEQ ID NO: 147736 - RNA, 32 nt, Human
cuuucaggccagcuuuaauuuaauggcccuac

SEQ ID NO: 147737 - RNA, 25 nt, Human
cuuucaggccuuggggagucucugc

SEQ ID NO: 147738 - RNA, 32 nt, Human
cuuucagggguggaugcaaggacuucugaggg

SEQ ID NO: 147739 - RNA, 32 nt, Human
cuuucagguacccccuccccagcuucccugug

SEQ ID NO: 147740 - RNA, 32 nt, Human
cuuucagguacucaaucaggaagcuggaggug

SEQ ID NO: 147741 - RNA, 32 nt, Human
cuuucagguagcuuugcaucacagaccaagcc

SEQ ID NO: 147742 - RNA, 32 nt, Human
cuuucaggugagcaggacccagccugacuugc

SEQ ID NO: 147743 - RNA, 32 nt, Human
cuuucaguaggaggaggcugugaaauaguaaa

SEQ ID NO: 147744 - RNA, 32 nt, Human
cuuucagucagcaugugucuggggucucaggu

SEQ ID NO: 147745 - RNA, 32 nt, Human
cuuucagucagcucucagucacuagacuauuu

SEQ ID NO: 147746 - RNA, 32 nt, Human
cuuucagugcucccucauauugagggcagugg

SEQ ID NO: 147747 - RNA, 32 nt, Human
cuuucagugcugcuguuuggcccagcucauua

SEQ ID NO: 147748 - RNA, 17 nt, Human
cuuucagugcuucucaa

SEQ ID NO: 147749 - RNA, 32 nt, Human
cuuucaguuucuaagagggacugaggccucuu

SEQ ID NO: 147750 - RNA, 32 nt, Human
cuuucaguuuucucuucugugaaacaggaaga

SEQ ID NO: 147751 - RNA, 32 nt, Human
cuuucauacuaaggguacaaaaauuccaaguc

SEQ ID NO: 147752 - RNA, 32 nt, Human
cuuucauaugaacugaaggcuaaagugcuagu

SEQ ID NO: 147753 - RNA, 32 nt, Human
cuuucaucaaaaugaucauccaucuuuuguau

SEQ ID NO: 147754 - RNA, 32 nt, Human
cuuucaucaugggagaaauagagcagaggccg

SEQ ID NO: 147755 - RNA, 32 nt, Human
cuuucauccucucuuacccuucugccuuccac

SEQ ID NO: 147756 - RNA, 32 nt, Human
cuuucaucucucuaccuccacccugcauuuuc

SEQ ID NO: 147757 - RNA, 32 nt, Human
cuuucaucugaggaaccaaggggugagaguau

SEQ ID NO: 147758 - RNA, 32 nt, Human
cuuucaucuggcuucucucucuuaagugagaa

SEQ ID NO: 147759 - RNA, 32 nt, Human
cuuucaucugugauuucccucacacacuacca

SEQ ID NO: 147760 - RNA, 32 nt, Human
cuuucaucuuccaagaccaaagaaggaaggaa

SEQ ID NO: 147761 - RNA, 32 nt, Human
cuuucaucuuucuccccgcuuccccagucuuu

SEQ ID NO: 147762 - RNA, 21 nt, Human
cuuucaugaaacuccuuaaag

SEQ ID NO: 147763 - RNA, 32 nt, Human
cuuucaugaaagugaagaucuggcugaaccag

SEQ ID NO: 147764 - RNA, 20 nt, Human
cuuucaugaaccccugguag

SEQ ID NO: 147765 - RNA, 32 nt, Human
cuuucaugaccagugaugaggggaaauggggg

SEQ ID NO: 147766 - RNA, 32 nt, Human
cuuucaugagcaguuguagcaggccugaccac

SEQ ID NO: 147767 - RNA, 32 nt, Human
cuuucaugaggcuuccauuaggaacagaauga

SEQ ID NO: 147768 - RNA, 32 nt, Human
cuuucaugaguguccggcaucugcuggucuuc

SEQ ID NO: 147769 - RNA, 32 nt, Human
cuuucaugccaguauaggaaaccucaaucuuu

SEQ ID NO: 147770 - RNA, 32 nt, Human
cuuucauggcccuguccuucauucgugaugag

SEQ ID NO: 147771 - RNA, 32 nt, Human
cuuucauggccucugcuuggggugggggaguc

SEQ ID NO: 147772 - RNA, 32 nt, Human
cuuucauggggagagaaggagacugaauuacu

SEQ ID NO: 147773 - RNA, 32 nt, Human
cuuucauggucugcugaguaacaggugccuuc

SEQ ID NO: 147774 - RNA, 32 nt, Human
cuuucauguccccucuggauuguccaguguaa

SEQ ID NO: 147775 - RNA, 22 nt, Human
cuuucaugugccugaaggcuau

SEQ ID NO: 147776 - RNA, 32 nt, Human
cuuucauguuacuguugcagcuugugcugagc

SEQ ID NO: 147777 - RNA, 32 nt, Human
cuuucauuaucuccacuuccaauuccaguacc

SEQ ID NO: 147778 - RNA, 32 nt, Human
cuuucauuauuauagaugcaucaugucuucug

SEQ ID NO: 147779 - RNA, 32 nt, Human
cuuucauucaggcuggagugcaguggcaugau

SEQ ID NO: 147780 - RNA, 32 nt, Human
cuuucauugcacuucacucugccuguuuucaa

SEQ ID NO: 147781 - RNA, 32 nt, Human
cuuucauuucacuucuauccuguuucuucuaa

SEQ ID NO: 147782 - RNA, 32 nt, Human
cuuucauuuuaaacuccugaaauucagauuuu

SEQ ID NO: 147783 - RNA, 32 nt, Human
cuuucauuuucaguuuugcucaucuagggaaa

SEQ ID NO: 147784 - RNA, 32 nt, Human
cuuucauuuuugacaggauucccuccacaacu

SEQ ID NO: 147785 - RNA, 32 nt, Human
cuuuccaaaaccuuccucuuccagcaacugaa

SEQ ID NO: 147786 - RNA, 32 nt, Human
cuuuccaaagaugaggucccugguuuuucaug

SEQ ID NO: 147787 - RNA, 32 nt, Human
cuuuccaaaugucugaaaaggcaguggugucu

SEQ ID NO: 147788 - RNA, 21 nt, Human
cuuuccaacccaagagguaca

SEQ ID NO: 147789 - RNA, 32 nt, Human
cuuuccaaggaucagcccugagagcagguugg

SEQ ID NO: 147790 - RNA, 32 nt, Human
cuuuccaaguagcugggauuacaggcacccau

SEQ ID NO: 147791 - RNA, 32 nt, Human
cuuuccacacgauuuccuaucucccuugaaaa

SEQ ID NO: 147792 - RNA, 23 nt, Human
cuuuccacagaguccacacauca

SEQ ID NO: 147793 - RNA, 32 nt, Human
cuuuccacagccggcgcuccgcgacccgcuug

SEQ ID NO: 147794 - RNA, 32 nt, Human
cuuuccacaguugccagcuucccacugcagca

SEQ ID NO: 147795 - RNA, 32 nt, Human
cuuuccaccacugccuucaucuuugggguggc

SEQ ID NO: 147796 - RNA, 32 nt, Human
cuuuccaccacugucagccuggaaagagaucc

SEQ ID NO: 147797 - RNA, 32 nt, Human
cuuuccacccagauuccugggagagcaucauu

SEQ ID NO: 147798 - RNA, 32 nt, Human
cuuuccaccuggcgaggccccgcucugcucag

SEQ ID NO: 147799 - RNA, 32 nt, Human
cuuuccacuguggguaccuggugaucagggca

SEQ ID NO: 147800 - RNA, 32 nt, Human
cuuuccagaagaggagacaaaagcaagauagc

SEQ ID NO: 147801 - RNA, 32 nt, Human
cuuuccagaagaucucuacagagaugugaugc

SEQ ID NO: 147802 - RNA, 32 nt, Human
cuuuccagaauccacacuucugaccucagccu

SEQ ID NO: 147803 - RNA, 32 nt, Human
cuuuccagacagucacuuuucccaguggucau

SEQ ID NO: 147804 - RNA, 32 nt, Human
cuuuccagacuagaagaaagugaggcagcuca

SEQ ID NO: 147805 - RNA, 32 nt, Human
cuuuccagagagaugaaugaaacagucauccu

SEQ ID NO: 147806 - RNA, 32 nt, Human
cuuuccagagcugaacagaggacagaugcaca

SEQ ID NO: 147807 - RNA, 32 nt, Human
cuuuccagaggaugucuuucuccucuggagag

SEQ ID NO: 147808 - RNA, 20 nt, Human
cuuuccagagggcagcacag

SEQ ID NO: 147809 - RNA, 21 nt, Human
cuuuccagagggguugaacag

SEQ ID NO: 147810 - RNA, 32 nt, Human
cuuuccagcaugcccuggggugcaguggucag

SEQ ID NO: 147811 - RNA, 32 nt, Human
cuuuccagccuccagaucugugaacaauaauc

SEQ ID NO: 147812 - RNA, 32 nt, Human
cuuuccagccuccaggauugugagaaauacau

SEQ ID NO: 147813 - RNA, 32 nt, Human
cuuuccagccucccgcccucgucugcuuccgg

SEQ ID NO: 147814 - RNA, 32 nt, Human
cuuuccagccuccugcuggcucucucuuccua

SEQ ID NO: 147815 - RNA, 32 nt, Human
cuuuccagccugggcaacauaguaagacccca

SEQ ID NO: 147816 - RNA, 32 nt, Human
cuuuccagcggugacgaccuacccacacaaga

SEQ ID NO: 147817 - RNA, 32 nt, Human
cuuuccagcuaucagcacuuucagcaucggcu

SEQ ID NO: 147818 - RNA, 32 nt, Human
cuuuccaggaagggaggcaggagcacccgucu

SEQ ID NO: 147819 - RNA, 32 nt, Human
cuuuccaggagaaggggcugccccuccaagcc

SEQ ID NO: 147820 - RNA, 23 nt, Human
cuuuccaggaggagcuggcccag

SEQ ID NO: 147821 - RNA, 24 nt, Human
cuuuccaggauucugaauguacag

SEQ ID NO: 147822 - RNA, 32 nt, Human
cuuuccaggccuucaggaguccugucauuuac

SEQ ID NO: 147823 - RNA, 21 nt, Human
cuuuccagggacagaggccca

SEQ ID NO: 147824 - RNA, 21 nt, Human
cuuuccagggucaaaguacag

SEQ ID NO: 147825 - RNA, 32 nt, Human
cuuuccagguuuccuuuacuucccugcuuccu

SEQ ID NO: 147826 - RNA, 32 nt, Human
cuuuccaguguucccucucucccuccagggcc

SEQ ID NO: 147827 - RNA, 32 nt, Human
cuuuccaguuagagaagaggaguggugauaaa

SEQ ID NO: 147828 - RNA, 29 nt, Human
cuuuccaguugcagccagaagggguuuuu

SEQ ID NO: 147829 - RNA, 32 nt, Human
cuuuccaguuuacccugcucccucucucuguc

SEQ ID NO: 147830 - RNA, 32 nt, Human
cuuuccaguuuuuacaugaucuggcuccuacu

SEQ ID NO: 147831 - RNA, 32 nt, Human
cuuuccauaccuggcccugaccucuagcagga

SEQ ID NO: 147832 - RNA, 24 nt, Human
cuuuccaucaccucuggagucccg

SEQ ID NO: 147833 - RNA, 32 nt, Human
cuuuccaucuccaggagacuuucaugcagccu

SEQ ID NO: 147834 - RNA, 32 nt, Human
cuuuccaucugcacuccagacggcuuucucag

SEQ ID NO: 147835 - RNA, 24 nt, Human
cuuuccaucuguuacuguccuuca

SEQ ID NO: 147836 - RNA, 32 nt, Human
cuuuccaugauucugcccaggauccuaggccc

SEQ ID NO: 147837 - RNA, 32 nt, Human
cuuuccaugccguccaugauccccaccccaug

SEQ ID NO: 147838 - RNA, 32 nt, Human
cuuuccauguuucugcccaggauccuaggccg

SEQ ID NO: 147839 - RNA, 32 nt, Human
cuuuccauuacccuuuauuucugcuaacuuuu

SEQ ID NO: 147840 - RNA, 32 nt, Human
cuuuccauucacugcaaugagcucucacacuc

SEQ ID NO: 147841 - RNA, 32 nt, Human
cuuucccacacaacuugcugggcaaagcacga

SEQ ID NO: 147842 - RNA, 32 nt, Human
cuuucccacaguuuagcaccuaguuaaaagaa

SEQ ID NO: 147843 - RNA, 32 nt, Human
cuuucccacaucuuccugucuuccaagccuuc

SEQ ID NO: 147844 - RNA, 32 nt, Human
cuuucccaccaaccuccuccauccuuggguga

SEQ ID NO: 147845 - RNA, 32 nt, Human
cuuucccacccuauccuuccuccccacucugu

SEQ ID NO: 147846 - RNA, 32 nt, Human
cuuucccaccuggacagaaacuuccagaccag

SEQ ID NO: 147847 - RNA, 32 nt, Human
cuuucccacuccucacucuacucaaagccuuu

SEQ ID NO: 147848 - RNA, 32 nt, Human
cuuucccacucuucucugggacuugugggccu

SEQ ID NO: 147849 - RNA, 32 nt, Human
cuuucccagcauagucaggaacaacuggacuu

SEQ ID NO: 147850 - RNA, 32 nt, Human
cuuucccagcauuaccuucccuucccuugaaa

SEQ ID NO: 147851 - RNA, 32 nt, Human
cuuucccagccauguggaacuguaaguccaau

SEQ ID NO: 147852 - RNA, 32 nt, Human
cuuucccagccuguuugcaaaaugcuuuguca

SEQ ID NO: 147853 - RNA, 32 nt, Human
cuuucccagccuguuugcgaaaugcuuuguca

SEQ ID NO: 147854 - RNA, 32 nt, Human
cuuucccaggagauggguccaggggucugucu

SEQ ID NO: 147855 - RNA, 32 nt, Human
cuuucccagggugucaugcaggaaguagaaca

SEQ ID NO: 147856 - RNA, 30 nt, Human
cuuucccagguugccccagaaagaccagcc

SEQ ID NO: 147857 - RNA, 32 nt, Human
cuuucccagucccauuccucagcuucuucaca

SEQ ID NO: 147858 - RNA, 32 nt, Human
cuuucccaugagcuggcuucucucugcaacag

SEQ ID NO: 147859 - RNA, 32 nt, Human
cuuuccccacugugugucuucucccccuccuc

SEQ ID NO: 147860 - RNA, 32 nt, Human
cuuuccccacuguucuggagggaaggggaagg

SEQ ID NO: 147861 - RNA, 32 nt, Human
cuuuccccaggcacagccccaggcuggcaaag

SEQ ID NO: 147862 - RNA, 32 nt, Human
cuuuccccaggcccaugaagagaggcaucuca

SEQ ID NO: 147863 - RNA, 31 nt, Human
cuuuccccagggugacauacagaaggggcaa

SEQ ID NO: 147864 - RNA, 32 nt, Human
cuuuccccaguggaggagagaacucucggacc

SEQ ID NO: 147865 - RNA, 32 nt, Human
cuuucccccacccuggcucucagggugacgcc

SEQ ID NO: 147866 - RNA, 32 nt, Human
cuuucccccagccaggguccaaagaagcuugg

SEQ ID NO: 147867 - RNA, 23 nt, Human
cuuucccccaguauuguagagca

SEQ ID NO: 147868 - RNA, 32 nt, Human
cuuucccccucccauucccaguguucaaaauc

SEQ ID NO: 147869 - RNA, 32 nt, Human
cuuucccccucccucacuccuuccuuugcggg

SEQ ID NO: 147870 - RNA, 32 nt, Human
cuuucccccugccccgucuggugcacaauuuc

SEQ ID NO: 147871 - RNA, 32 nt, Human
cuuuccccuccccuaccccuuuucuuuugagg

SEQ ID NO: 147872 - RNA, 32 nt, Human
cuuuccccuccccucucuuccuccccucugca

SEQ ID NO: 147873 - RNA, 23 nt, Human
cuuuccccucucauuguucagca

SEQ ID NO: 147874 - RNA, 32 nt, Human
cuuucccguggcugccaccagcgaaugaaacu

SEQ ID NO: 147875 - RNA, 32 nt, Human
cuuucccuaaucucagagcugcagcccugccc

SEQ ID NO: 147876 - RNA, 32 nt, Human
cuuucccucacuuucuccagugcucaacuguu

SEQ ID NO: 147877 - RNA, 32 nt, Human
cuuucccucaggaaggugguggcugguaaauu

SEQ ID NO: 147878 - RNA, 32 nt, Human
cuuucccucaguacaguggacacaccuggcuc

SEQ ID NO: 147879 - RNA, 32 nt, Human
cuuucccuccacccuuuguacacuggcuccuc

SEQ ID NO: 147880 - RNA, 32 nt, Human
cuuucccucccaggagcccccuagguggcugg

SEQ ID NO: 147881 - RNA, 32 nt, Human
cuuucccucuucuccccagccuccuccagggc

SEQ ID NO: 147882 - RNA, 32 nt, Human
cuuucccugagucucaagagcucuugccuuac

SEQ ID NO: 147883 - RNA, 32 nt, Human
cuuucccugcaaccuccuugacucuggccuga

SEQ ID NO: 147884 - RNA, 32 nt, Human
cuuucccugcagccuacauugcagaugcccag

SEQ ID NO: 147885 - RNA, 32 nt, Human
cuuucccugcagcugcaaccugcccucugguc

SEQ ID NO: 147886 - RNA, 32 nt, Human
cuuucccugccaggcccuuugcacugaggaca

SEQ ID NO: 147887 - RNA, 32 nt, Human
cuuucccugccugcccuccagugcugccaggc

SEQ ID NO: 147888 - RNA, 32 nt, Human
cuuucccugccugccucccucccccugcuaga

SEQ ID NO: 147889 - RNA, 32 nt, Human
cuuucccugcugaccuuggaggaaugacaaua

SEQ ID NO: 147890 - RNA, 32 nt, Human
cuuucccugcugcagcccuggagucagucuuu

SEQ ID NO: 147891 - RNA, 32 nt, Human
cuuucccuggugauggucucucgcucugucuu

SEQ ID NO: 147892 - RNA, 32 nt, Human
cuuucccugucccagccccaucuguggguugc

SEQ ID NO: 147893 - RNA, 32 nt, Human
cuuucccuuaugcuaaggauagcccuuacacu

SEQ ID NO: 147894 - RNA, 32 nt, Human
cuuucccuucaagccuuagggucuaagaccag

SEQ ID NO: 147895 - RNA, 32 nt, Human
cuuucccuucauacugucaugacagugagguu

SEQ ID NO: 147896 - RNA, 32 nt, Human
cuuucccuuccagagguaaugauccugagacc

SEQ ID NO: 147897 - RNA, 32 nt, Human
cuuucccuuccaguuuauuccagagcugccag

SEQ ID NO: 147898 - RNA, 32 nt, Human
cuuucccuuccuccuccuccagaugccuuuuc

SEQ ID NO: 147899 - RNA, 32 nt, Human
cuuucccuuccucuccccuaccccagaacuuu

SEQ ID NO: 147900 - RNA, 32 nt, Human
cuuucccuugcaccuucaucccuggcccugca

SEQ ID NO: 147901 - RNA, 32 nt, Human
cuuucccuuggaaggccaagcuucuuagugcc

SEQ ID NO: 147902 - RNA, 32 nt, Human
cuuucccuuggacauauggaugacauuagcuc

SEQ ID NO: 147903 - RNA, 32 nt, Human
cuuucccuuguccugucagauuuccaugugau

SEQ ID NO: 147904 - RNA, 32 nt, Human
cuuucccuuuauuccuugccuggaccacucca

SEQ ID NO: 147905 - RNA, 32 nt, Human
cuuucccuuucagagccccagggaucucaucu

SEQ ID NO: 147906 - RNA, 32 nt, Human
cuuucccuuuucuuuuugucauggugaccagc

SEQ ID NO: 147907 - RNA, 32 nt, Human
cuuuccgaaggccaugaucuagagauagaaaa

SEQ ID NO: 147908 - RNA, 32 nt, Human
cuuuccgaucaucugcuaaaaauguuuuugaa

SEQ ID NO: 147909 - RNA, 32 nt, Human
cuuuccgcacaggcggagggcgguggcgggcg

SEQ ID NO: 147910 - RNA, 32 nt, Human
cuuuccgccaucuucguucuuuccaacaucuu

SEQ ID NO: 147911 - RNA, 32 nt, Human
cuuuccgcggaacuucacaggucucccuccug

SEQ ID NO: 147912 - RNA, 32 nt, Human
cuuuccgcggcccuuuccaccucuuuucacuu

SEQ ID NO: 147913 - RNA, 32 nt, Human
cuuuccgggcaagugaaugucauuuuaaucaa

SEQ ID NO: 147914 - RNA, 32 nt, Human
cuuuccggucauuggauccucucccuuucccc

SEQ ID NO: 147915 - RNA, 32 nt, Human
cuuuccgugcgcgagugcacagcuccggaggc

SEQ ID NO: 147916 - RNA, 32 nt, Human
cuuuccuaaaacugaguuagguggaugugaac

SEQ ID NO: 147917 - RNA, 32 nt, Human
cuuuccuacaucuuccgugguucccagcacag

SEQ ID NO: 147918 - RNA, 32 nt, Human
cuuuccuaccacugcugaguggccuggaacuu

SEQ ID NO: 147919 - RNA, 32 nt, Human
cuuuccuacuuucuuucacuccuuccuuuccu

SEQ ID NO: 147920 - RNA, 32 nt, Human
cuuuccuagacacugcagccaaggacacagag

SEQ ID NO: 147921 - RNA, 20 nt, Human
cuuuccuagccugaguguug

SEQ ID NO: 147922 - RNA, 32 nt, Human
cuuuccuaugcaagagugucucacaugugcuu

SEQ ID NO: 147923 - RNA, 32 nt, Human
cuuuccucaagcaauccucccaccuuggccuc

SEQ ID NO: 147924 - RNA, 32 nt, Human
cuuuccucaguaucuggagagggaagggaagu

SEQ ID NO: 147925 - RNA, 32 nt, Human
cuuuccucaugaacugucgucuugccucuguu

SEQ ID NO: 147926 - RNA, 32 nt, Human
cuuuccucauguuggcaauccccggccacgga

SEQ ID NO: 147927 - RNA, 32 nt, Human
cuuuccucauugacugacucugugccacguca

SEQ ID NO: 147928 - RNA, 32 nt, Human
cuuuccucauuucugccuuucuacacauuuac

SEQ ID NO: 147929 - RNA, 32 nt, Human
cuuuccucccuccccaaucucuuccauuuuuc

SEQ ID NO: 147930 - RNA, 32 nt, Human
cuuuccuccuuuccuuugauuuagccucuuug

SEQ ID NO: 147931 - RNA, 32 nt, Human
cuuuccucgaaucaucccacuuccucagcccc

SEQ ID NO: 147932 - RNA, 32 nt, Human
cuuuccucgcccuuucuccaucauccuuuagg

SEQ ID NO: 147933 - RNA, 32 nt, Human
cuuuccucuaaccccucuccuccauagccuuc

SEQ ID NO: 147934 - RNA, 32 nt, Human
cuuuccucuaugaacugaccucagcagccuag

SEQ ID NO: 147935 - RNA, 32 nt, Human
cuuuccucuccucucgccuccuggcgcuggcc

SEQ ID NO: 147936 - RNA, 32 nt, Human
cuuuccucuccucucuggaagguuuugcuucu

SEQ ID NO: 147937 - RNA, 32 nt, Human
cuuuccucucucccucuccuuguccuaccucu

SEQ ID NO: 147938 - RNA, 32 nt, Human
cuuuccucucugcugcugcuucuccugcaucu

SEQ ID NO: 147939 - RNA, 32 nt, Human
cuuuccucucuggccacucugcucugcacauu

SEQ ID NO: 147940 - RNA, 22 nt, Human
cuuuccucugcaccccagcccg

SEQ ID NO: 147941 - RNA, 32 nt, Human
cuuuccucugccgcaugguccugggccguugg

SEQ ID NO: 147942 - RNA, 32 nt, Human
cuuuccucugguuugaaagccucuggaaaacu

SEQ ID NO: 147943 - RNA, 32 nt, Human
cuuuccucugugucucacagcuuggcugagcu

SEQ ID NO: 147944 - RNA, 22 nt, Human
cuuuccucugugucuggguguu

SEQ ID NO: 147945 - RNA, 26 nt, Human
cuuuccucuguuucccucucucgcug

SEQ ID NO: 147946 - RNA, 32 nt, Human
cuuuccucuuccacuuugauaccauuggguca

SEQ ID NO: 147947 - RNA, 32 nt, Human
cuuuccucuuucuucccacauuucucuuucuc

SEQ ID NO: 147948 - RNA, 32 nt, Human
cuuuccugaagccaccaccacuguggccacuc

SEQ ID NO: 147949 - RNA, 32 nt, Human
cuuuccugcacucuucuccauccucccaccuu

SEQ ID NO: 147950 - RNA, 32 nt, Human
cuuuccugcccagccagggcccgggucugcaa

SEQ ID NO: 147951 - RNA, 32 nt, Human
cuuuccugcccaggcuuggccucccaggacau

SEQ ID NO: 147952 - RNA, 31 nt, Human
cuuuccugccucugugccccugccucucccu

SEQ ID NO: 147953 - RNA, 32 nt, Human
cuuuccugcggaaaggguguuuugaagucuaa

SEQ ID NO: 147954 - RNA, 32 nt, Human
cuuuccugcggcaccggguucaggcagcuacu

SEQ ID NO: 147955 - RNA, 21 nt, Human
cuuuccugcucauuugcagca

SEQ ID NO: 147956 - RNA, 32 nt, Human
cuuuccugcuucugcgagaacucccucccucc

SEQ ID NO: 147957 - RNA, 32 nt, Human
cuuuccuggacuguguuucgcauucggcguua

SEQ ID NO: 147958 - RNA, 32 nt, Human
cuuuccuggcccacgcccuuuccaguuugcuu

SEQ ID NO: 147959 - RNA, 32 nt, Human
cuuuccuggugggguagugggguggggcugag

SEQ ID NO: 147960 - RNA, 32 nt, Human
cuuuccugguucuccagcuucaagaugacaua

SEQ ID NO: 147961 - RNA, 32 nt, Human
cuuuccuguacuccagccucugcuggcucccu

SEQ ID NO: 147962 - RNA, 32 nt, Human
cuuuccuguccugcauucagagcuagaggcca

SEQ ID NO: 147963 - RNA, 32 nt, Human
cuuuccugucuccucuccucugaucuguucuu

SEQ ID NO: 147964 - RNA, 32 nt, Human
cuuuccugugacucuccucccucccgggagug

SEQ ID NO: 147965 - RNA, 32 nt, Human
cuuuccugugccaggacucucuuucuuccacu

SEQ ID NO: 147966 - RNA, 32 nt, Human
cuuuccuguggcccaaccuuuuauuuaaaugu

SEQ ID NO: 147967 - RNA, 32 nt, Human
cuuuccugugugaacucuggcaggcugcccuc

SEQ ID NO: 147968 - RNA, 32 nt, Human
cuuuccuguguggggagaggugugugacguuu

SEQ ID NO: 147969 - RNA, 32 nt, Human
cuuuccuguugucuacaccaaugcccaacugc

SEQ ID NO: 147970 - RNA, 32 nt, Human
cuuuccuuaaaauguugucaacagacacagug

SEQ ID NO: 147971 - RNA, 32 nt, Human
cuuuccuucaugcuacccaccaccucagugcu

SEQ ID NO: 147972 - RNA, 32 nt, Human
cuuuccuuccaaacuauaccacuguauuuacc

SEQ ID NO: 147973 - RNA, 32 nt, Human
cuuuccuuccugcagaugccuaggcaggagga

SEQ ID NO: 147974 - RNA, 32 nt, Human
cuuuccuuccuuccuuccuuccuuccuuccuc

SEQ ID NO: 147975 - RNA, 32 nt, Human
cuuuccuuccuuccuuccuuccuuccuuccuu

SEQ ID NO: 147976 - RNA, 32 nt, Human
cuuuccuuccuuuuuccuuuccagucauaccc

SEQ ID NO: 147977 - RNA, 32 nt, Human
cuuuccuucucccauccuuuuucuggauaugc

SEQ ID NO: 147978 - RNA, 32 nt, Human
cuuuccuucuucuuggcuuccucuuauucuuc

SEQ ID NO: 147979 - RNA, 32 nt, Human
cuuuccuucuuuccuuccuuuugcucuuuccu

SEQ ID NO: 147980 - RNA, 32 nt, Human
cuuuccuugcaugcuucucugauccuguggag

SEQ ID NO: 147981 - RNA, 32 nt, Human
cuuuccuugcccagcuauggcccccucucauu

SEQ ID NO: 147982 - RNA, 32 nt, Human
cuuuccuugcccaugugucaccccuuuggccu

SEQ ID NO: 147983 - RNA, 32 nt, Human
cuuuccuugccucugugggacccugugggggu

SEQ ID NO: 147984 - RNA, 32 nt, Human
cuuuccuugccugggaaucugucccaggaaga

SEQ ID NO: 147985 - RNA, 32 nt, Human
cuuuccuuggcuggaaacaagugcaggaagcu

SEQ ID NO: 147986 - RNA, 32 nt, Human
cuuuccuugucucucauucucuuucuuuuucu

SEQ ID NO: 147987 - RNA, 32 nt, Human
cuuuccuuucccacucagauugcuucaagaga

SEQ ID NO: 147988 - RNA, 32 nt, Human
cuuuccuuucucagauccucuuauucuaauuu

SEQ ID NO: 147989 - RNA, 32 nt, Human
cuuucgaaguugagaagagaaccccuggaacg

SEQ ID NO: 147990 - RNA, 32 nt, Human
cuuucgacuguacuugauuaccagugaaguaa

SEQ ID NO: 147991 - RNA, 32 nt, Human
cuuucgagcagacuucuuuacuacacugcacu

SEQ ID NO: 147992 - RNA, 32 nt, Human
cuuucgaugagguaaagguggacaagagcugc

SEQ ID NO: 147993 - RNA, 32 nt, Human
cuuucgcagagggaaggagcaagagggccccu

SEQ ID NO: 147994 - RNA, 32 nt, Human
cuuucgccaaggcuggagugcaguggcacgau

SEQ ID NO: 147995 - RNA, 32 nt, Human
cuuucgcccaggauggagugcaguggugcgau

SEQ ID NO: 147996 - RNA, 32 nt, Human
cuuucgcccaggcuggagugcaauggugugau

SEQ ID NO: 147997 - RNA, 32 nt, Human
cuuucgcccaggcuggagugcaguggcgcaau

SEQ ID NO: 147998 - RNA, 32 nt, Human
cuuucgcccaggcuggagugcagugguaugau

SEQ ID NO: 147999 - RNA, 32 nt, Human
cuuucgcccaggcuggagugcauuggcaugau

SEQ ID NO: 148000 - RNA, 32 nt, Human
cuuucgcccaggcuggcgugcaguggcacagu

SEQ ID NO: 148001 - RNA, 21 nt, Human
cuuucgcccccuuuuccaaag

SEQ ID NO: 148002 - RNA, 32 nt, Human
cuuucgccggaggcgagcaggaagggguuaac

SEQ ID NO: 148003 - RNA, 32 nt, Human
cuuucgccuguaaucccaacacuuugggaggc

SEQ ID NO: 148004 - RNA, 32 nt, Human
cuuucgcugcagccuccaccgugcugagguca

SEQ ID NO: 148005 - RNA, 32 nt, Human
cuuucgcuuccuccucagguuuuccagggcuu

SEQ ID NO: 148006 - RNA, 32 nt, Human
cuuucggacaucuggcacacggggcagagcag

SEQ ID NO: 148007 - RNA, 32 nt, Human
cuuucggagcagcacccaggaggggaugccgc

SEQ ID NO: 148008 - RNA, 32 nt, Human
cuuucggcagggagggugauucuauuugaaga

SEQ ID NO: 148009 - RNA, 32 nt, Human
cuuucgggaccagccugagguguaagggcaga

SEQ ID NO: 148010 - RNA, 32 nt, Human
cuuucgggaggcugagacaggagaaucgcuug

SEQ ID NO: 148011 - RNA, 32 nt, Human
cuuucgggcauuucgagcaucuugugggcucu

SEQ ID NO: 148012 - RNA, 32 nt, Human
cuuucgggggauguugaacgcauuugggcagg

SEQ ID NO: 148013 - RNA, 32 nt, Human
cuuucgguagguggaagcuagacacaugaagg

SEQ ID NO: 148014 - RNA, 32 nt, Human
cuuucguccaccccuggggcugggcagacgcu

SEQ ID NO: 148015 - RNA, 32 nt, Human
cuuucguccucaccaucucugcagaccccucu

SEQ ID NO: 148016 - RNA, 32 nt, Human
cuuucguccuuguuucagagggugggucaggu

SEQ ID NO: 148017 - RNA, 32 nt, Human
cuuucgugccuaccagaaccagccugucagga

SEQ ID NO: 148018 - RNA, 32 nt, Human
cuuucgugggaggcgcugcugucagugcugac

SEQ ID NO: 148019 - RNA, 32 nt, Human
cuuucguugcuuguugaaugaaugagugaguu

SEQ ID NO: 148020 - RNA, 32 nt, Human
cuuucguuuucauuugaaguuuugccauuugu

SEQ ID NO: 148021 - RNA, 32 nt, Human
cuuucuaacaccuuugaugccuuagagguggu

SEQ ID NO: 148022 - RNA, 32 nt, Human
cuuucuaacugcacugcuuacaugcguauuaa

SEQ ID NO: 148023 - RNA, 32 nt, Human
cuuucuaauagaagaagugagcgccugagagg

SEQ ID NO: 148024 - RNA, 32 nt, Human
cuuucuacaccuguuucaccucaggcugagga

SEQ ID NO: 148025 - RNA, 32 nt, Human
cuuucuacagugaguccacuacccucacugaa

SEQ ID NO: 148026 - RNA, 32 nt, Human
cuuucuacccaaucugcccaggagggcgggaa

SEQ ID NO: 148027 - RNA, 32 nt, Human
cuuucuaccuauuaagugagguugcaguuugu

SEQ ID NO: 148028 - RNA, 32 nt, Human
cuuucuaccuccucuuccagagaaccagcggc

SEQ ID NO: 148029 - RNA, 32 nt, Human
cuuucuaccuuccuucuuucucgaucuccuug

SEQ ID NO: 148030 - RNA, 32 nt, Human
cuuucuacggaggaaccaagauaaaaauguga

SEQ ID NO: 148031 - RNA, 32 nt, Human
cuuucuacguucucuuucuuccaagccuagag

SEQ ID NO: 148032 - RNA, 32 nt, Human
cuuucuacuaaaucaugaacagcuuuaaaaac

SEQ ID NO: 148033 - RNA, 32 nt, Human
cuuucuacuuggacaacuaacacccacagucc

SEQ ID NO: 148034 - RNA, 32 nt, Human
cuuucuagaaccaguauguggcauuccuguca

SEQ ID NO: 148035 - RNA, 32 nt, Human
cuuucuagaaggaagaucugaggcucuggugc

SEQ ID NO: 148036 - RNA, 32 nt, Human
cuuucuagacacacccccuccaggcccccaga

SEQ ID NO: 148037 - RNA, 32 nt, Human
cuuucuaggagaagacuaguggaauuuucuaa

SEQ ID NO: 148038 - RNA, 32 nt, Human
cuuucuagguggugaggacaagagugauggcu

SEQ ID NO: 148039 - RNA, 32 nt, Human
cuuucuagguucuaacugcauguuuauauuuu

SEQ ID NO: 148040 - RNA, 22 nt, Human
cuuucuaguccuuuuccaagga

SEQ ID NO: 148041 - RNA, 32 nt, Human
cuuucuaguuuucuuuccccugcuucagagga

SEQ ID NO: 148042 - RNA, 32 nt, Human
cuuucuauaagaaaauugcccacuacuacuaa

SEQ ID NO: 148043 - RNA, 32 nt, Human
cuuucuauauagccauuucagugcaaacaagu

SEQ ID NO: 148044 - RNA, 32 nt, Human
cuuucuauuuuucaacuugaguuuacaaaagg

SEQ ID NO: 148045 - RNA, 32 nt, Human
cuuucucaaaagaauacauacauguggcaaua

SEQ ID NO: 148046 - RNA, 32 nt, Human
cuuucucaacaucuucauguugaagcuaaaac

SEQ ID NO: 148047 - RNA, 32 nt, Human
cuuucucaagaaaccacaucugguucagaaga

SEQ ID NO: 148048 - RNA, 32 nt, Human
cuuucucaccucugugccuuugugcaagcugc

SEQ ID NO: 148049 - RNA, 32 nt, Human
cuuucucacgcuuuuaugguucuuuugauaaa

SEQ ID NO: 148050 - RNA, 32 nt, Human
cuuucucacucaccugcacaucucagucaagc

SEQ ID NO: 148051 - RNA, 32 nt, Human
cuuucucacuuccacaucucccccucuauauc

SEQ ID NO: 148052 - RNA, 32 nt, Human
cuuucucagaagggaugcgcaggcucaccccu

SEQ ID NO: 148053 - RNA, 32 nt, Human
cuuucucagcccaggaaacagcaugugguuca

SEQ ID NO: 148054 - RNA, 32 nt, Human
cuuucucagcugccuccccugcccucagaagg

SEQ ID NO: 148055 - RNA, 32 nt, Human
cuuucucagcuguauguuaaguugauugacaa

SEQ ID NO: 148056 - RNA, 32 nt, Human
cuuucucaggaaccuuucaagcggccagaacc

SEQ ID NO: 148057 - RNA, 32 nt, Human
cuuucucaguauaauuuuaaagagcauuuugu

SEQ ID NO: 148058 - RNA, 32 nt, Human
cuuucucauccagcagaccaacaggcaggagu

SEQ ID NO: 148059 - RNA, 32 nt, Human
cuuucuccacccacucaguugucuagaagaaa

SEQ ID NO: 148060 - RNA, 32 nt, Human
cuuucuccaccuuucaguuucucaguuguuuc

SEQ ID NO: 148061 - RNA, 32 nt, Human
cuuucuccacgccauuugaugcuguaucuccu

SEQ ID NO: 148062 - RNA, 32 nt, Human
cuuucuccacugcacuggagcuuugaagaccu

SEQ ID NO: 148063 - RNA, 32 nt, Human
cuuucuccagacucgcccuccccacccgggcc

SEQ ID NO: 148064 - RNA, 32 nt, Human
cuuucuccauuuucuuuuauguugucuuaaag

SEQ ID NO: 148065 - RNA, 20 nt, Human
cuuucucccacccagcccca

SEQ ID NO: 148066 - RNA, 32 nt, Human
cuuucucccaugauuccucuggacugcacaca

SEQ ID NO: 148067 - RNA, 32 nt, Human
cuuucucccuacuggaccagagaccugcagag

SEQ ID NO: 148068 - RNA, 32 nt, Human
cuuucucccucagauccuccccacagcucagc

SEQ ID NO: 148069 - RNA, 32 nt, Human
cuuucucccugaccccaagggcacagaggcaa

SEQ ID NO: 148070 - RNA, 32 nt, Human
cuuucucccuuucuccucuccuuuuucucuuc

SEQ ID NO: 148071 - RNA, 32 nt, Human
cuuucucccuuucucuuuucucuaccccugug

SEQ ID NO: 148072 - RNA, 32 nt, Human
cuuucuccgcucuucucugaccccugugagga

SEQ ID NO: 148073 - RNA, 32 nt, Human
cuuucuccgugaacuuuuccuccuggacuuug

SEQ ID NO: 148074 - RNA, 32 nt, Human
cuuucuccucaaguaacaccuggaccugcucc

SEQ ID NO: 148075 - RNA, 32 nt, Human
cuuucuccuccuccucaugcccugccuugucc

SEQ ID NO: 148076 - RNA, 32 nt, Human
cuuucuccuccuccuccugcgucccuuggcaa

SEQ ID NO: 148077 - RNA, 32 nt, Human
cuuucuccuccucugcuaaaugccucuuucuu

SEQ ID NO: 148078 - RNA, 32 nt, Human
cuuucuccucucucacccacacucacgcacac

SEQ ID NO: 148079 - RNA, 32 nt, Human
cuuucuccucugugccugcucucuccagagaa

SEQ ID NO: 148080 - RNA, 32 nt, Human
cuuucuccugcacuuggcuugcagugagaugc

SEQ ID NO: 148081 - RNA, 32 nt, Human
cuuucuccugcuucugucacccugugcugucu

SEQ ID NO: 148082 - RNA, 32 nt, Human
cuuucucgcacaggcuuggagugcaguggugc

SEQ ID NO: 148083 - RNA, 32 nt, Human
cuuucucguuauuuugugugcaugccucauuu

SEQ ID NO: 148084 - RNA, 32 nt, Human
cuuucucuagaaaaagaaagaaaagaaugacc

SEQ ID NO: 148085 - RNA, 32 nt, Human
cuuucucuaugcuaacacuuuuugagccacug

SEQ ID NO: 148086 - RNA, 32 nt, Human
cuuucucuccaacugccagcugaucaggucag

SEQ ID NO: 148087 - RNA, 32 nt, Human
cuuucucuccaccccuaucuuuccuggaaacu

SEQ ID NO: 148088 - RNA, 32 nt, Human
cuuucucuccaccuccccugccacuccauuuu

SEQ ID NO: 148089 - RNA, 32 nt, Human
cuuucucuccacucuggcuuguuuucagaacc

SEQ ID NO: 148090 - RNA, 32 nt, Human
cuuucucucccaggugcuggaccagggacuga

SEQ ID NO: 148091 - RNA, 32 nt, Human
cuuucucucccucccuccuuaugugccaagga

SEQ ID NO: 148092 - RNA, 32 nt, Human
cuuucucucccuccucccuguuuuaaauuaca

SEQ ID NO: 148093 - RNA, 32 nt, Human
cuuucucucuacucuggcuuuauuuucuagug

SEQ ID NO: 148094 - RNA, 32 nt, Human
cuuucucucugccugucccucuccuucuccau

SEQ ID NO: 148095 - RNA, 32 nt, Human
cuuucucucugccuuugcauuuccuuugacaa

SEQ ID NO: 148096 - RNA, 32 nt, Human
cuuucucucuggccucuccauccuccagacaa

SEQ ID NO: 148097 - RNA, 32 nt, Human
cuuucucucuucugcaggcagccaugagcucc

SEQ ID NO: 148098 - RNA, 32 nt, Human
cuuucucucuugguucaguguggagaaggaug

SEQ ID NO: 148099 - RNA, 32 nt, Human
cuuucucugaacuucauuuuacauuugcauau

SEQ ID NO: 148100 - RNA, 32 nt, Human
cuuucucugagacccccgccucugaggccccg

SEQ ID NO: 148101 - RNA, 32 nt, Human
cuuucucugcacgaggaguugggagccugccu

SEQ ID NO: 148102 - RNA, 32 nt, Human
cuuucucugcacuaccaacaagagauaaaauu

SEQ ID NO: 148103 - RNA, 32 nt, Human
cuuucucugcacuccagccuaggcaacagagc

SEQ ID NO: 148104 - RNA, 32 nt, Human
cuuucucugccucugggcagccugcuuuggcc

SEQ ID NO: 148105 - RNA, 32 nt, Human
cuuucucugccuggcccagggcuggcggccgg

SEQ ID NO: 148106 - RNA, 18 nt, Human
cuuucucugcugccugcc

SEQ ID NO: 148107 - RNA, 32 nt, Human
cuuucucuggccucuucccccuucccucuucu

SEQ ID NO: 148108 - RNA, 32 nt, Human
cuuucucugucacccaggcuggaaugcagugg

SEQ ID NO: 148109 - RNA, 32 nt, Human
cuuucucugucacccaggcuggagugcagugg

SEQ ID NO: 148110 - RNA, 32 nt, Human
cuuucucuguugcccaggcuagagugcacugg

SEQ ID NO: 148111 - RNA, 32 nt, Human
cuuucucuucaccucugacuucucuguuuuuc

SEQ ID NO: 148112 - RNA, 32 nt, Human
cuuucucuucauuccaucccccaaacccacca

SEQ ID NO: 148113 - RNA, 32 nt, Human
cuuucucuuccuccucucuguaaugguauguc

SEQ ID NO: 148114 - RNA, 32 nt, Human
cuuucucuuccucuugguccaggggaccucau

SEQ ID NO: 148115 - RNA, 32 nt, Human
cuuucucuucuuccuuucuuuucugugcuccu

SEQ ID NO: 148116 - RNA, 22 nt, Human
cuuucucuugauuguugaaaaa

SEQ ID NO: 148117 - RNA, 32 nt, Human
cuuucucuuucuuuguacuucuugucaucccc

SEQ ID NO: 148118 - RNA, 32 nt, Human
cuuucucuuuucccuuccuuccuuccuuccuu

SEQ ID NO: 148119 - RNA, 21 nt, Human
cuuucugaacaagaaggugau

SEQ ID NO: 148120 - RNA, 32 nt, Human
cuuucugaacaccaccaccaccaauaauacuu

SEQ ID NO: 148121 - RNA, 32 nt, Human
cuuucugaagaagagcaagaagaagagugacu

SEQ ID NO: 148122 - RNA, 32 nt, Human
cuuucugaaguuggccacuucuugaagauuca

SEQ ID NO: 148123 - RNA, 32 nt, Human
cuuucugacacacagugaagcucaacuugccu

SEQ ID NO: 148124 - RNA, 32 nt, Human
cuuucugacauguccagcccaucucuaaugag

SEQ ID NO: 148125 - RNA, 32 nt, Human
cuuucugacuccugccuguuuuaguccacuau

SEQ ID NO: 148126 - RNA, 32 nt, Human
cuuucugacucuaagcuccugagcgggaguca

SEQ ID NO: 148127 - RNA, 32 nt, Human
cuuucugagccccaguuuguccaguuuaaugg

SEQ ID NO: 148128 - RNA, 32 nt, Human
cuuucugagcuccagccccagccccucgaacc

SEQ ID NO: 148129 - RNA, 32 nt, Human
cuuucugagcuguggacugcagcuucaggacc

SEQ ID NO: 148130 - RNA, 32 nt, Human
cuuucugaguauuugaaccccaguccuguguc

SEQ ID NO: 148131 - RNA, 32 nt, Human
cuuucugaguugccuuuagagagaugcguuuu

SEQ ID NO: 148132 - RNA, 32 nt, Human
cuuucugauucguguagucucucccacagauu

SEQ ID NO: 148133 - RNA, 32 nt, Human
cuuucugauuguccuuuucugagagcaugguu

SEQ ID NO: 148134 - RNA, 22 nt, Human
cuuucugcaaacaacugaaaaa

SEQ ID NO: 148135 - RNA, 32 nt, Human
cuuucugcaaauauggcucuggauagugaaaa

SEQ ID NO: 148136 - RNA, 32 nt, Human
cuuucugcaacagcuuuccagcuuugaaaacc

SEQ ID NO: 148137 - RNA, 32 nt, Human
cuuucugcaaccauucagacugaucucgggcu

SEQ ID NO: 148138 - RNA, 32 nt, Human
cuuucugcagugacugugguuucuucccauuu

SEQ ID NO: 148139 - RNA, 32 nt, Human
cuuucugcauucuucucuccacaugccucucu

SEQ ID NO: 148140 - RNA, 32 nt, Human
cuuucugccacacaucuauggucuacaauaag

SEQ ID NO: 148141 - RNA, 32 nt, Human
cuuucugccagccugggcaacauagugagacu

SEQ ID NO: 148142 - RNA, 32 nt, Human
cuuucugcccagccugcucagcagguugaaug

SEQ ID NO: 148143 - RNA, 32 nt, Human
cuuucugccccagaggaaggagcuguaguguc

SEQ ID NO: 148144 - RNA, 32 nt, Human
cuuucugcccccucuacuuaaauuuaagaaag

SEQ ID NO: 148145 - RNA, 32 nt, Human
cuuucugccccuccacugacauggcccaccgg

SEQ ID NO: 148146 - RNA, 22 nt, Human
cuuucugccuugguuucccuag

SEQ ID NO: 148147 - RNA, 32 nt, Human
cuuucugcuaucucccaucucccgcuucccuu

SEQ ID NO: 148148 - RNA, 32 nt, Human
cuuucugcuggggauggccacugugaauaacu

SEQ ID NO: 148149 - RNA, 32 nt, Human
cuuucugcugugccagggcugcacugaguuca

SEQ ID NO: 148150 - RNA, 32 nt, Human
cuuucugcugugcugcuucccucccaaacucc

SEQ ID NO: 148151 - RNA, 22 nt, Human
cuuucugcuguuucccugaccu

SEQ ID NO: 148152 - RNA, 32 nt, Human
cuuucugcuuagcugggccagcucccugcaac

SEQ ID NO: 148153 - RNA, 32 nt, Human
cuuucugcuucuaaguaggcuugcugugcuuu

SEQ ID NO: 148154 - RNA, 32 nt, Human
cuuucuggaaaaugacaguauuuuuggcaggg

SEQ ID NO: 148155 - RNA, 32 nt, Human
cuuucuggacacugcuggccagucccaaaaug

SEQ ID NO: 148156 - RNA, 32 nt, Human
cuuucuggacagacuuuacagccccgggggca

SEQ ID NO: 148157 - RNA, 32 nt, Human
cuuucuggaccugagcccugggagccuucacu

SEQ ID NO: 148158 - RNA, 32 nt, Human
cuuucuggaguuuucgcugagaacaaaacagu

SEQ ID NO: 148159 - RNA, 32 nt, Human
cuuucuggcaugggggcuguguuugcacaagu

SEQ ID NO: 148160 - RNA, 32 nt, Human
cuuucuggccaagauuuccuucuguaucacuc

SEQ ID NO: 148161 - RNA, 32 nt, Human
cuuucuggccaagucuggccagccuggcccug

SEQ ID NO: 148162 - RNA, 32 nt, Human
cuuucuggcguucuuucuaccucccuuuucgu

SEQ ID NO: 148163 - RNA, 32 nt, Human
cuuucugggcacugcacuucagcguggcccac

SEQ ID NO: 148164 - RNA, 32 nt, Human
cuuucugggcacugcuggccagucccaaaaug

SEQ ID NO: 148165 - RNA, 32 nt, Human
cuuucugggcaggcaggccauggggcauggag

SEQ ID NO: 148166 - RNA, 32 nt, Human
cuuucuggggaagcagaacugcagugacccac

SEQ ID NO: 148167 - RNA, 32 nt, Human
cuuucugggggaagaaagauuugguggaggga

SEQ ID NO: 148168 - RNA, 32 nt, Human
cuuucugggggucugcaggucacugcagagga

SEQ ID NO: 148169 - RNA, 32 nt, Human
cuuucuggguuuggaaggugugcuugcugugg

SEQ ID NO: 148170 - RNA, 32 nt, Human
cuuucuggucacagcacacagcagucacaucc

SEQ ID NO: 148171 - RNA, 32 nt, Human
cuuucugguguuagaucgagcuacccucuaaa

SEQ ID NO: 148172 - RNA, 32 nt, Human
cuuucuguaggcuaauuccucuugcccaacgg

SEQ ID NO: 148173 - RNA, 18 nt, Human
cuuucuguauuaaaauca

SEQ ID NO: 148174 - RNA, 32 nt, Human
cuuucugucaggggcucccacaggaucagagg

SEQ ID NO: 148175 - RNA, 32 nt, Human
cuuucugucauaugcugcuauuacaaagugga

SEQ ID NO: 148176 - RNA, 32 nt, Human
cuuucugucauccccauggcucaaggauaacc

SEQ ID NO: 148177 - RNA, 32 nt, Human
  misc_feature (18)..(18): n is a, c, g, or u
cuuucugucaugccaggnugggaaagucuaga

SEQ ID NO: 148178 - RNA, 32 nt, Human
cuuucuguccauagcacagaaacagagcagaa

SEQ ID NO: 148179 - RNA, 32 nt, Human
cuuucuguccuuuuucuugcugauuuaugcaa

SEQ ID NO: 148180 - RNA, 32 nt, Human
cuuucugucguccaggcuggagugcaguagcg

SEQ ID NO: 148181 - RNA, 32 nt, Human
cuuucugucucugaucagagccgacaccagac

SEQ ID NO: 148182 - RNA, 32 nt, Human
cuuucugucuggaacauuaauaaugaucuaaa

SEQ ID NO: 148183 - RNA, 32 nt, Human
cuuucugugaggagauugaguacucugcagcu

SEQ ID NO: 148184 - RNA, 32 nt, Human
cuuucugugcaggagcagagccaggugggccc

SEQ ID NO: 148185 - RNA, 32 nt, Human
cuuucuguucacauuucaucugauuuuuaaac

SEQ ID NO: 148186 - RNA, 32 nt, Human
cuuucuguugggaaccaggaugcucacaaggc

SEQ ID NO: 148187 - RNA, 32 nt, Human
cuuucuuaaccccaaauuuucuucuaugccuu

SEQ ID NO: 148188 - RNA, 32 nt, Human
cuuucuuaagcagaggaguggcaaggauggca

SEQ ID NO: 148189 - RNA, 20 nt, Human
cuuucuuaagcccuucuuua

SEQ ID NO: 148190 - RNA, 28 nt, Human
cuuucuuaauuagcugccucaccggcug

SEQ ID NO: 148191 - RNA, 32 nt, Human
cuuucuuacccagcauagugggagaguggaga

SEQ ID NO: 148192 - RNA, 32 nt, Human
cuuucuuacucauuucagucccaucuaaaaau

SEQ ID NO: 148193 - RNA, 22 nt, Human
cuuucuucauuaaucugaaaaa

SEQ ID NO: 148194 - RNA, 32 nt, Human
cuuucuucauuuuucugccuggaaugcaaaug

SEQ ID NO: 148195 - RNA, 32 nt, Human
cuuucuuccacccacaaacuccaggcuggaag

SEQ ID NO: 148196 - RNA, 32 nt, Human
cuuucuuccaucaaagccucccccucccccac

SEQ ID NO: 148197 - RNA, 32 nt, Human
cuuucuucccauuccccugcugucuauucuaa

SEQ ID NO: 148198 - RNA, 32 nt, Human
cuuucuucccuuugccuccuccagcucauuuu

SEQ ID NO: 148199 - RNA, 32 nt, Human
cuuucuuccuccugcaguucuggaccaugugg

SEQ ID NO: 148200 - RNA, 32 nt, Human
cuuucuuccucuggacagaggguccagucggg

SEQ ID NO: 148201 - RNA, 32 nt, Human
cuuucuuccucuuuccccuccuucugagucuu

SEQ ID NO: 148202 - RNA, 32 nt, Human
cuuucuuccuucuuuucucucucccucaacca

SEQ ID NO: 148203 - RNA, 32 nt, Human
cuuucuuccuuguccuugccccgccuggugaa

SEQ ID NO: 148204 - RNA, 32 nt, Human
cuuucuuccuuucuaauccuaucuggggagcu

SEQ ID NO: 148205 - RNA, 32 nt, Human
cuuucuuccuuugguaggaauggccugaguug

SEQ ID NO: 148206 - RNA, 32 nt, Human
cuuucuuccuuuucuuuuccuuuccggccggg

SEQ ID NO: 148207 - RNA, 32 nt, Human
cuuucuucuccauucccugaugcaucaacacu

SEQ ID NO: 148208 - RNA, 32 nt, Human
cuuucuucucccacccuccaccuuccaaaagg

SEQ ID NO: 148209 - RNA, 32 nt, Human
cuuucuucuccucccucgucgccgccgccgcc

SEQ ID NO: 148210 - RNA, 32 nt, Human
cuuucuucuccucuggcugaauauccacugga

SEQ ID NO: 148211 - RNA, 22 nt, Human
cuuucuucuuuugccugcgcug

SEQ ID NO: 148212 - RNA, 32 nt, Human
cuuucuugaaguuagguuagaucauguucuca

SEQ ID NO: 148213 - RNA, 19 nt, Human
cuuucuugacuugugcagg

SEQ ID NO: 148214 - RNA, 19 nt, Human
cuuucuugauuuuuggaga

SEQ ID NO: 148215 - RNA, 32 nt, Human
cuuucuugccugcagugaagcagagagauaga

SEQ ID NO: 148216 - RNA, 32 nt, Human
cuuucuugccuguuuugcuucuguaaaauugc

SEQ ID NO: 148217 - RNA, 32 nt, Human
cuuucuugcucaucccuucucccuuucacuuc

SEQ ID NO: 148218 - RNA, 32 nt, Human
cuuucuugcuggaaggcugggggugaaagacg

SEQ ID NO: 148219 - RNA, 32 nt, Human
cuuucuugcuuucucuuuucccucucucuuuc

SEQ ID NO: 148220 - RNA, 32 nt, Human
cuuucuuggcaaaguuucugguauggucaagc

SEQ ID NO: 148221 - RNA, 19 nt, Human
cuuucuuggcccuuccuua

SEQ ID NO: 148222 - RNA, 32 nt, Human
cuuucuuggcucugcugacacucgagcccaca

SEQ ID NO: 148223 - RNA, 32 nt, Human
cuuucuuguguuuucuaauuagaaaaguaaua

SEQ ID NO: 148224 - RNA, 32 nt, Human
cuuucuuuaccaacuggcuagaacggaacagc

SEQ ID NO: 148225 - RNA, 32 nt, Human
cuuucuuuaccugagaccaguugggagcacug

SEQ ID NO: 148226 - RNA, 32 nt, Human
cuuucuuuaggaaugauucaguucagccgaaa

SEQ ID NO: 148227 - RNA, 32 nt, Human
cuuucuuucacaagcccuccaggaguugcuga

SEQ ID NO: 148228 - RNA, 22 nt, Human
cuuucuuuccagcaaaagcaaa

SEQ ID NO: 148229 - RNA, 32 nt, Human
cuuucuuucccucccucccucccucccuucuu

SEQ ID NO: 148230 - RNA, 32 nt, Human
cuuucuuucucuuuucccuuccuuccuuccuu

SEQ ID NO: 148231 - RNA, 32 nt, Human
cuuucuuucuuuuccuuccucccuuccuuccu

SEQ ID NO: 148232 - RNA, 32 nt, Human
cuuucuuugauccuaaugaugcaucaugccag

SEQ ID NO: 148233 - RNA, 32 nt, Human
cuuucuuugcaacuucccagcaacaauaauga

SEQ ID NO: 148234 - RNA, 32 nt, Human
cuuucuuuggguuccauauguugcccgaucuu

SEQ ID NO: 148235 - RNA, 32 nt, Human
cuuucuuuuccucuuuuuccccaagaggaaga

SEQ ID NO: 148236 - RNA, 22 nt, Human
cuuucuuuucucuuugcguaaa

SEQ ID NO: 148237 - RNA, 32 nt, Human
cuuucuuuucuuccugccguucuuagcuuucu

SEQ ID NO: 148238 - RNA, 32 nt, Human
cuuucuuuucuuucuuuacuuucuuuuuccga

SEQ ID NO: 148239 - RNA, 32 nt, Human
cuuugaaaaaccagacaggaugcuucuguucc

SEQ ID NO: 148240 - RNA, 32 nt, Human
cuuugaaacaccaucaaaauuagcuaggcacu

SEQ ID NO: 148241 - RNA, 32 nt, Human
cuuugaaacccauucaucacacagcauacgcu

SEQ ID NO: 148242 - RNA, 32 nt, Human
cuuugaaacuuucuaccccucccuucaaucuu

SEQ ID NO: 148243 - RNA, 32 nt, Human
cuuugaaagaaagaaguaauguucuuugaaag

SEQ ID NO: 148244 - RNA, 32 nt, Human
cuuugaaaugaggaaacuuugauaggaugugg

SEQ ID NO: 148245 - RNA, 32 nt, Human
cuuugaacaaauuucugauccaaacuggguuu

SEQ ID NO: 148246 - RNA, 32 nt, Human
cuuugaacaggcugucacucauccauaagguc

SEQ ID NO: 148247 - RNA, 32 nt, Human
cuuugaacagggaaugaacaugaguuuuugua

SEQ ID NO: 148248 - RNA, 32 nt, Human
cuuugaaccagcuguucggaaucuggucucuu

SEQ ID NO: 148249 - RNA, 32 nt, Human
cuuugaacccaggaggcagagguugcagugag

SEQ ID NO: 148250 - RNA, 32 nt, Human
cuuugaacucuccuacuccugucccagcccug

SEQ ID NO: 148251 - RNA, 32 nt, Human
cuuugaacuuggcagcucuggcugcaacccgc

SEQ ID NO: 148252 - RNA, 32 nt, Human
cuuugaacuuucuccccacuccucacccccug

SEQ ID NO: 148253 - RNA, 32 nt, Human
cuuugaagcguauagaauggaacucauucagu

SEQ ID NO: 148254 - RNA, 32 nt, Human
cuuugaagcucucaaguagaacaucaggaugu

SEQ ID NO: 148255 - RNA, 32 nt, Human
cuuugaagcugcaucugccaguuacaccccaa

SEQ ID NO: 148256 - RNA, 32 nt, Human
cuuugaagcuucugaagaccuggugcuucugu

SEQ ID NO: 148257 - RNA, 32 nt, Human
cuuugaaggucuugcggugaagcaucaagugu

SEQ ID NO: 148258 - RNA, 32 nt, Human
cuuugaagguuauuuuaaggacagcagcagaa

SEQ ID NO: 148259 - RNA, 32 nt, Human
cuuugaaguggaagaaagaugaacccaggaaa

SEQ ID NO: 148260 - RNA, 32 nt, Human
cuuugaaguggagucugugacugcucugcauu

SEQ ID NO: 148261 - RNA, 32 nt, Human
cuuugaaucaaaaggcaggcagugcugguucc

SEQ ID NO: 148262 - RNA, 32 nt, Human
cuuugaaucugaaucagccagucucagaugcc

SEQ ID NO: 148263 - RNA, 32 nt, Human
cuuugaaucuggaggaaauaggcagaaacaaa

SEQ ID NO: 148264 - RNA, 32 nt, Human
cuuugaauuacucugucccucuggaccgaauc

SEQ ID NO: 148265 - RNA, 32 nt, Human
cuuugaauuugauugaguaagacuuagaggca

SEQ ID NO: 148266 - RNA, 32 nt, Human
cuuugacaaaccuccugcuccuugguggcacc

SEQ ID NO: 148267 - RNA, 32 nt, Human
cuuugacaauccagagacaugagguccugcug

SEQ ID NO: 148268 - RNA, 32 nt, Human
cuuugacacaucugaccuucuugaaggaguua

SEQ ID NO: 148269 - RNA, 32 nt, Human
cuuugacacccaggcuggagugcaguagcaca

SEQ ID NO: 148270 - RNA, 32 nt, Human
cuuugacacccaggcuggagugcaguggugcc

SEQ ID NO: 148271 - RNA, 32 nt, Human
cuuugacccagccacuguuagugucgccaccg

SEQ ID NO: 148272 - RNA, 32 nt, Human
cuuugacccccaggcuggagugcaguggcacg

SEQ ID NO: 148273 - RNA, 32 nt, Human
cuuugaccuccagauagacuccuggggaagca

SEQ ID NO: 148274 - RNA, 32 nt, Human
cuuugaccucuacaccuggccugcugggggcc

SEQ ID NO: 148275 - RNA, 32 nt, Human
cuuugaccugccaggagcucuucugugugcca

SEQ ID NO: 148276 - RNA, 32 nt, Human
cuuugaccugccucccuucaugcauggaaauu

SEQ ID NO: 148277 - RNA, 32 nt, Human
cuuugaccugccugucccccucccucuugucu

SEQ ID NO: 148278 - RNA, 32 nt, Human
cuuugacgggccaggcccuggagggcagagac

SEQ ID NO: 148279 - RNA, 32 nt, Human
cuuugacggugucauggaauuugccauggaug

SEQ ID NO: 148280 - RNA, 29 nt, Human
cuuugacguucaauaaaacuguugaaucu

SEQ ID NO: 148281 - RNA, 32 nt, Human
cuuugacuccucuucugccugccuuuggggau

SEQ ID NO: 148282 - RNA, 32 nt, Human
cuuugacuccuggaaguauugagucuuccuuu

SEQ ID NO: 148283 - RNA, 32 nt, Human
cuuugacuuccaaggcucugucuacuuggcuu

SEQ ID NO: 148284 - RNA, 32 nt, Human
cuuugacuuuccuuugcuguggagguuuuugg

SEQ ID NO: 148285 - RNA, 32 nt, Human
cuuugagaaaaaugggucagcuugacacaucu

SEQ ID NO: 148286 - RNA, 32 nt, Human
cuuugagaaaggaguaggagccuagcauuccg

SEQ ID NO: 148287 - RNA, 32 nt, Human
cuuugagaagacagccuguaauuuuuaaagcu

SEQ ID NO: 148288 - RNA, 32 nt, Human
cuuugagaagagccuucucugaugugacucau

SEQ ID NO: 148289 - RNA, 32 nt, Human
cuuugagaagccgaggcaggaggaucacaagg

SEQ ID NO: 148290 - RNA, 32 nt, Human
cuuugagaagcugaggcgggaggaucacuuga

SEQ ID NO: 148291 - RNA, 32 nt, Human
cuuugagaauuggagagcaggcacaucaacug

SEQ ID NO: 148292 - RNA, 32 nt, Human
cuuugagaccagccuggccaacaugguaaaac

SEQ ID NO: 148293 - RNA, 32 nt, Human
cuuugagacgcugaggugggaggaucacuuga

SEQ ID NO: 148294 - RNA, 32 nt, Human
cuuugagacucauguaauuacaauucuuaauu

SEQ ID NO: 148295 - RNA, 32 nt, Human
cuuugagacucugccuuuaauuccuuuaccac

SEQ ID NO: 148296 - RNA, 32 nt, Human
cuuugagagacugagacaggaggaucacuuua

SEQ ID NO: 148297 - RNA, 32 nt, Human
cuuugagagagggagaagaguggucucagcac

SEQ ID NO: 148298 - RNA, 32 nt, Human
cuuugagaggcagaggcaggaggaucaggagc

SEQ ID NO: 148299 - RNA, 32 nt, Human
cuuugagaggccaagacaggcagaucacaagg

SEQ ID NO: 148300 - RNA, 32 nt, Human
cuuugagaggccaaggugggaggaucacuuga

SEQ ID NO: 148301 - RNA, 32 nt, Human
cuuugagaggccaaggugggcagaucacauga

SEQ ID NO: 148302 - RNA, 32 nt, Human
cuuugagaggccgaggagggaggacugcuuga

SEQ ID NO: 148303 - RNA, 32 nt, Human
cuuugagaggccgaggugugaggaucacccga

SEQ ID NO: 148304 - RNA, 32 nt, Human
cuuugagaggcugaagaggguggaucaugagg

SEQ ID NO: 148305 - RNA, 32 nt, Human
cuuugagaggcugagcgggguggaucauuuga

SEQ ID NO: 148306 - RNA, 32 nt, Human
cuuugagaggcugaggaggguggaucauuuga

SEQ ID NO: 148307 - RNA, 32 nt, Human
cuuugagaggcugaggcaggaggauugcugga

SEQ ID NO: 148308 - RNA, 32 nt, Human
cuuugagaggcugaggcagggcagauugcaug

SEQ ID NO: 148309 - RNA, 32 nt, Human
cuuugagaggcugaggccgguagaucacgagg

SEQ ID NO: 148310 - RNA, 32 nt, Human
cuuugagaggcugaggcgggaggaucgcuuga

SEQ ID NO: 148311 - RNA, 32 nt, Human
cuuugagaggcugaggcgggcggaucaccuga

SEQ ID NO: 148312 - RNA, 32 nt, Human
cuuugagaggcugaggcgggcggaucacgagg

SEQ ID NO: 148313 - RNA, 32 nt, Human
cuuugagaggcugaggcggguggaucaccuga

SEQ ID NO: 148314 - RNA, 32 nt, Human
cuuugagaggcugagguaggagcaucaccugg

SEQ ID NO: 148315 - RNA, 32 nt, Human
cuuugagaggcugaggugggaugaucacuuga

SEQ ID NO: 148316 - RNA, 32 nt, Human
cuuugagaggcugaggugguaggaucaccuga

SEQ ID NO: 148317 - RNA, 32 nt, Human
cuuugagauaauuuaacccugccucucagagg

SEQ ID NO: 148318 - RNA, 32 nt, Human
cuuugagaugacaggguccaggaugugaaugc

SEQ ID NO: 148319 - RNA, 32 nt, Human
cuuugagaugccucucuguggauccugucacc

SEQ ID NO: 148320 - RNA, 32 nt, Human
cuuugagaugcugaggcagguggaucacgagg

SEQ ID NO: 148321 - RNA, 32 nt, Human
cuuugagaugucccucauuaaugagcauucuc

SEQ ID NO: 148322 - RNA, 32 nt, Human
cuuugagccaugggaagccucauuuaaugaga

SEQ ID NO: 148323 - RNA, 32 nt, Human
cuuugagcccugcugggguccaacugaccugg

SEQ ID NO: 148324 - RNA, 32 nt, Human
cuuugagccuagcugggguagaggcacugccc

SEQ ID NO: 148325 - RNA, 23 nt, Human
cuuugagccuauacuauacugug

SEQ ID NO: 148326 - RNA, 32 nt, Human
cuuugagccuccugccccugcuuucugcccag

SEQ ID NO: 148327 - RNA, 22 nt, Human
cuuugagcuugaaguuaacucu

SEQ ID NO: 148328 - RNA, 26 nt, Human
cuuugagcuuuuggggguuauucuac

SEQ ID NO: 148329 - RNA, 32 nt, Human
cuuugaggaaggcagacuuggcgggaaugugg

SEQ ID NO: 148330 - RNA, 32 nt, Human
cuuugaggagacagugcggugguucuggaggc

SEQ ID NO: 148331 - RNA, 32 nt, Human
cuuugaggagcuccaggccagagcagaugcgg

SEQ ID NO: 148332 - RNA, 32 nt, Human
cuuugaggaggcaggagauuccgugggucccu

SEQ ID NO: 148333 - RNA, 32 nt, Human
cuuugaggauucucuucucuuuuaccauuuuu

SEQ ID NO: 148334 - RNA, 32 nt, Human
cuuugaggcagaaacaauacgcuccagcuugu

SEQ ID NO: 148335 - RNA, 32 nt, Human
cuuugaggcccuucccuuagauuaugcacuaa

SEQ ID NO: 148336 - RNA, 21 nt, Human
cuuugaggccgggugcagugg

SEQ ID NO: 148337 - RNA, 32 nt, Human
cuuugaggcuuccuauggacugccuuuauuuu

SEQ ID NO: 148338 - RNA, 32 nt, Human
cuuugaggggcagaugaaagucuagagaacug

SEQ ID NO: 148339 - RNA, 32 nt, Human
cuuugagguggaaaguuucugguucugaaaca

SEQ ID NO: 148340 - RNA, 32 nt, Human
cuuugaguccaguccugcugugggggcugagc

SEQ ID NO: 148341 - RNA, 23 nt, Human
cuuugagucucacaaaacccuac

SEQ ID NO: 148342 - RNA, 32 nt, Human
cuuugagucuguggucccuggaggguggcuuc

SEQ ID NO: 148343 - RNA, 32 nt, Human
cuuugagucuguguaucacauagaauguccuc

SEQ ID NO: 148344 - RNA, 32 nt, Human
cuuugagucuuucacgcucccuucuucugaag

SEQ ID NO: 148345 - RNA, 32 nt, Human
cuuugaguuggaugugauacuguccauauucu

SEQ ID NO: 148346 - RNA, 32 nt, Human
cuuugaguuguucaaacuggaaauuagaacuc

SEQ ID NO: 148347 - RNA, 32 nt, Human
cuuugauaaguuguuguuauaauuaaucuaau

SEQ ID NO: 148348 - RNA, 32 nt, Human
cuuugauaauaugauucauugucaaauguuug

SEQ ID NO: 148349 - RNA, 29 nt, Human
cuuugauagcugcuaucaugaccccuuuu

SEQ ID NO: 148350 - RNA, 32 nt, Human
cuuugauccacccuccacaguacuccagaaag

SEQ ID NO: 148351 - RNA, 32 nt, Human
cuuugauccccucacuccucugugacccccuu

SEQ ID NO: 148352 - RNA, 32 nt, Human
cuuugauccucuucaggaggugaggacaagcc

SEQ ID NO: 148353 - RNA, 32 nt, Human
cuuugaugagccucuccccagguguauuucag

SEQ ID NO: 148354 - RNA, 32 nt, Human
cuuugaugagggcagagcucacguugcauuga

SEQ ID NO: 148355 - RNA, 32 nt, Human
cuuugaugaggggguaggaggggaagaagaca

SEQ ID NO: 148356 - RNA, 32 nt, Human
cuuugaugucacaaucugaccuguggguauua

SEQ ID NO: 148357 - RNA, 21 nt, Human
cuuugauguccccaccagcca

SEQ ID NO: 148358 - RNA, 32 nt, Human
cuuugauguuacuggguuuagagggcugucuu

SEQ ID NO: 148359 - RNA, 32 nt, Human
cuuugauuaauuuuucuuuucuccuuaucugu

SEQ ID NO: 148360 - RNA, 32 nt, Human
cuuugauucucaaaugcaauuugagaggcugg

SEQ ID NO: 148361 - RNA, 21 nt, Human
cuuugauugcgccacugcacu

SEQ ID NO: 148362 - RNA, 32 nt, Human
cuuugauuucaaacuaugcacugugaagagau

SEQ ID NO: 148363 - RNA, 32 nt, Human
cuuugauuuccagccauuuacuccaaguccuc

SEQ ID NO: 148364 - RNA, 32 nt, Human
cuuugauuucuccacugaaauuuccuugauua

SEQ ID NO: 148365 - RNA, 32 nt, Human
cuuugauuugugcugagggucagcuuuuggcu

SEQ ID NO: 148366 - RNA, 32 nt, Human
cuuugcaaacaguuugaauacugugaauucau

SEQ ID NO: 148367 - RNA, 32 nt, Human
cuuugcaaaccugcaccuugcacuuuuggguu

SEQ ID NO: 148368 - RNA, 32 nt, Human
cuuugcaaagcacaggcuuaauuucauugcug

SEQ ID NO: 148369 - RNA, 32 nt, Human
cuuugcaaccuguucucagcucugccuccccu

SEQ ID NO: 148370 - RNA, 32 nt, Human
cuuugcaauguuuggcuugaagaaggagcuca

SEQ ID NO: 148371 - RNA, 32 nt, Human
cuuugcacaauccuauuugaugcccccaguuc

SEQ ID NO: 148372 - RNA, 32 nt, Human
cuuugcacagcccucugggcgcacugugugcc

SEQ ID NO: 148373 - RNA, 32 nt, Human
cuuugcacaucuccaaucccagaucugacaag

SEQ ID NO: 148374 - RNA, 32 nt, Human
cuuugcacauggcuaccucccuuacuuucuuc

SEQ ID NO: 148375 - RNA, 32 nt, Human
cuuugcacauggugcugaccucaaauucagcc

SEQ ID NO: 148376 - RNA, 32 nt, Human
cuuugcacgugagaacucacccuaagccagag

SEQ ID NO: 148377 - RNA, 32 nt, Human
cuuugcacugaaguauuuucauagcuguuuau

SEQ ID NO: 148378 - RNA, 32 nt, Human
cuuugcacugcaacaucaugccucugaagaaa

SEQ ID NO: 148379 - RNA, 32 nt, Human
cuuugcacuuccucaaagcuuguguacagugc

SEQ ID NO: 148380 - RNA, 32 nt, Human
cuuugcacuuucggggaaggaggacucacagu

SEQ ID NO: 148381 - RNA, 32 nt, Human
cuuugcagaaaccacacacacuguugcuggau

SEQ ID NO: 148382 - RNA, 32 nt, Human
cuuugcagaucaaccaacuuaaucugguugaa

SEQ ID NO: 148383 - RNA, 32 nt, Human
cuuugcagccuguuucugucauguauuucaac

SEQ ID NO: 148384 - RNA, 32 nt, Human
cuuugcagcuagucccugcaaaccuugaugau

SEQ ID NO: 148385 - RNA, 32 nt, Human
cuuugcagcugagacuggguggagggagaggc

SEQ ID NO: 148386 - RNA, 32 nt, Human
cuuugcagcuuuguuagcucuuaaacuuccag

SEQ ID NO: 148387 - RNA, 32 nt, Human
cuuugcaggaaggagguaggcaccuuucugag

SEQ ID NO: 148388 - RNA, 32 nt, Human
cuuugcaggagaaggagacuugggaggcagcg

SEQ ID NO: 148389 - RNA, 24 nt, Human
cuuugcaggcccggccuccugccu

SEQ ID NO: 148390 - RNA, 32 nt, Human
cuuugcaguugcuuccuuuccuugaagguagc

SEQ ID NO: 148391 - RNA, 32 nt, Human
cuuugcauauccauguucuaccacaggaaggu

SEQ ID NO: 148392 - RNA, 32 nt, Human
cuuugcauauuucccccucuaauuagcauguu

SEQ ID NO: 148393 - RNA, 32 nt, Human
cuuugcaucacacugaggcaucuugcacagcu

SEQ ID NO: 148394 - RNA, 32 nt, Human
cuuugcaucccugcacuccuggacgugugcgc

SEQ ID NO: 148395 - RNA, 32 nt, Human
cuuugcaucuagcgggugcugccugcaucucu

SEQ ID NO: 148396 - RNA, 32 nt, Human
cuuugcaucucuucacgugcaggcugggacca

SEQ ID NO: 148397 - RNA, 32 nt, Human
cuuugcauuuccucuuuguccgaagaaaccag

SEQ ID NO: 148398 - RNA, 32 nt, Human
cuuugcauuuggagaaaauauugaaagcaggg

SEQ ID NO: 148399 - RNA, 32 nt, Human
cuuugccaaccaggacaccaaccucagcuggc

SEQ ID NO: 148400 - RNA, 32 nt, Human
cuuugccacauuuuaauuuuucauauggcuuc

SEQ ID NO: 148401 - RNA, 21 nt, Human
cuuugccacccaccgcugccg

SEQ ID NO: 148402 - RNA, 32 nt, Human
cuuugccacccaggugaggugcuguguucaug

SEQ ID NO: 148403 - RNA, 32 nt, Human
cuuugccacugaggccacuggcauugcucgga

SEQ ID NO: 148404 - RNA, 32 nt, Human
cuuugccagcagagccagggcagggcgagcug

SEQ ID NO: 148405 - RNA, 32 nt, Human
cuuugccagggcucugugaccaggaaggaagu

SEQ ID NO: 148406 - RNA, 32 nt, Human
cuuugccauaaauaucagaaccaaagaucaag

SEQ ID NO: 148407 - RNA, 32 nt, Human
cuuugccauauguauuuuaaauguauucucuu

SEQ ID NO: 148408 - RNA, 32 nt, Human
cuuugccaucuguagauucaaaaauccagaga

SEQ ID NO: 148409 - RNA, 32 nt, Human
cuuugccauucaaaccacucgacuguuugccu

SEQ ID NO: 148410 - RNA, 32 nt, Human
cuuugcccaagugugacagcacuggggaggag

SEQ ID NO: 148411 - RNA, 32 nt, Human
cuuugcccacccugcccucucucccucugccu

SEQ ID NO: 148412 - RNA, 32 nt, Human
cuuugcccagaccucuuuaguuugggggaucc

SEQ ID NO: 148413 - RNA, 32 nt, Human
cuuugcccauccugaugcacagucucccugcu

SEQ ID NO: 148414 - RNA, 32 nt, Human
cuuugccccugaagucaguuucaggggaagga

SEQ ID NO: 148415 - RNA, 32 nt, Human
cuuugccccuggagucaagacccacagcccuc

SEQ ID NO: 148416 - RNA, 32 nt, Human
cuuugcccgccuggcccugggacucugacccu

SEQ ID NO: 148417 - RNA, 32 nt, Human
cuuugcccuaggcaacugcagcugagagugcg

SEQ ID NO: 148418 - RNA, 32 nt, Human
cuuugcccuauuucccuuccuaucccucugcc

SEQ ID NO: 148419 - RNA, 32 nt, Human
cuuugcccucaaggaguucaccaguuuauggg

SEQ ID NO: 148420 - RNA, 32 nt, Human
cuuugcccucagcuuuccccagccccuccggc

SEQ ID NO: 148421 - RNA, 32 nt, Human
cuuugcccucugugucuuagcagccacagcuc

SEQ ID NO: 148422 - RNA, 32 nt, Human
cuuugcccugcuccucaccuccuggcccugcu

SEQ ID NO: 148423 - RNA, 32 nt, Human
cuuugcccuggaauuugccagaugcaucucaa

SEQ ID NO: 148424 - RNA, 32 nt, Human
cuuugcccuggcucucugguccuuguugcucu

SEQ ID NO: 148425 - RNA, 32 nt, Human
cuuugcccuguaucccaugaggcuaggagaca

SEQ ID NO: 148426 - RNA, 32 nt, Human
cuuugcccuugaugcacugaugccuuaaaaau

SEQ ID NO: 148427 - RNA, 32 nt, Human
cuuugcccuuuuucccuuuucuccaugcuuaa

SEQ ID NO: 148428 - RNA, 32 nt, Human
cuuugccggacgcucuguggccuguguggaca

SEQ ID NO: 148429 - RNA, 32 nt, Human
cuuugccggggaaugaugucuggagaaccccu

SEQ ID NO: 148430 - RNA, 32 nt, Human
cuuugccucacagaggcaggagagaagaauug

SEQ ID NO: 148431 - RNA, 32 nt, Human
cuuugccucaggagaauuguugggugcaugga

SEQ ID NO: 148432 - RNA, 32 nt, Human
cuuugccucccagggugcugggacugcaggca

SEQ ID NO: 148433 - RNA, 32 nt, Human
cuuugccucgggaccggcuccagcacaccccg

SEQ ID NO: 148434 - RNA, 32 nt, Human
cuuugccucugccucucaagcugguaccuccu

SEQ ID NO: 148435 - RNA, 32 nt, Human
cuuugccucuuuccugagccucuugcuugaau

SEQ ID NO: 148436 - RNA, 32 nt, Human
cuuugccucuuucuuggcaaaguuucugguau

SEQ ID NO: 148437 - RNA, 32 nt, Human
cuuugccugaaugggggcaggaaaggugaggu

SEQ ID NO: 148438 - RNA, 32 nt, Human
cuuugccugagagacacagaauccaaauguaa

SEQ ID NO: 148439 - RNA, 32 nt, Human
cuuugccugccaccucugcccaggacacucuu

SEQ ID NO: 148440 - RNA, 32 nt, Human
cuuugccugcuccuugcuugauguuuucugga

SEQ ID NO: 148441 - RNA, 32 nt, Human
cuuugccugucuucugucuuccuugucuuucc

SEQ ID NO: 148442 - RNA, 32 nt, Human
cuuugccuguguccucccggccuggauccaug

SEQ ID NO: 148443 - RNA, 32 nt, Human
cuuugccuuaaccguuuauaugcacuuucaug

SEQ ID NO: 148444 - RNA, 32 nt, Human
cuuugccuuccaggaaaugggcuuuucaggaa

SEQ ID NO: 148445 - RNA, 32 nt, Human
cuuugccuucuccaaacaagaagcaauagucu

SEQ ID NO: 148446 - RNA, 32 nt, Human
cuuugccuucucuccccugucauuuccagauu

SEQ ID NO: 148447 - RNA, 32 nt, Human
cuuugccuugacagaguggcccaggguuucaa

SEQ ID NO: 148448 - RNA, 32 nt, Human
cuuugccuuguuccuguucucagggugacgac

SEQ ID NO: 148449 - RNA, 32 nt, Human
cuuugccuuugcccugcugugugaucuuagcu

SEQ ID NO: 148450 - RNA, 32 nt, Human
cuuugcgaggccgaggugggcagaucacuuga

SEQ ID NO: 148451 - RNA, 32 nt, Human
cuuugcgcuccuggcccagccuuuguucccca

SEQ ID NO: 148452 - RNA, 20 nt, Human
cuuugcguaagcccuuccuu

SEQ ID NO: 148453 - RNA, 32 nt, Human
cuuugcgugucaccuucacgggacuuccagcu

SEQ ID NO: 148454 - RNA, 32 nt, Human
cuuugcguucucuccaccagcucccggcucac

SEQ ID NO: 148455 - RNA, 32 nt, Human
cuuugcuaaugccaaaaugcucuggcuuugua

SEQ ID NO: 148456 - RNA, 29 nt, Human
cuuugcuacaauaaaugcugaaugaaucc

SEQ ID NO: 148457 - RNA, 22 nt, Human
cuuugcuacccguucccccaag

SEQ ID NO: 148458 - RNA, 32 nt, Human
cuuugcuagcugguucaaggccaauccagaua

SEQ ID NO: 148459 - RNA, 32 nt, Human
cuuugcuauccaggugagacagcaagaguguu

SEQ ID NO: 148460 - RNA, 32 nt, Human
cuuugcuauggaaaucuuggugguguagcuuu

SEQ ID NO: 148461 - RNA, 32 nt, Human
cuuugcuauuuucugcuaccauuucuuuuccu

SEQ ID NO: 148462 - RNA, 32 nt, Human
cuuugcucaaagcuccaucgcccuucaccauc

SEQ ID NO: 148463 - RNA, 32 nt, Human
cuuugcucacugcaaccucugccacccggguu

SEQ ID NO: 148464 - RNA, 32 nt, Human
cuuugcucacuggcucuccuauaaucagucua

SEQ ID NO: 148465 - RNA, 31 nt, Human
cuuugcucacuuuucugacacgcaggcgauc

SEQ ID NO: 148466 - RNA, 32 nt, Human
cuuugcucauucuugcuaaccuagucuaggug

SEQ ID NO: 148467 - RNA, 32 nt, Human
cuuugcuccaugccuuuuccaugagcaugagu

SEQ ID NO: 148468 - RNA, 32 nt, Human
cuuugcucccuccccucucuuagagacugugc

SEQ ID NO: 148469 - RNA, 32 nt, Human
cuuugcucucucuccuuucuuacacuuaacuc

SEQ ID NO: 148470 - RNA, 32 nt, Human
cuuugcucuuaucuuuucauccuacuuggagu

SEQ ID NO: 148471 - RNA, 32 nt, Human
cuuugcucuugacagcuaggcagccacagcgg

SEQ ID NO: 148472 - RNA, 22 nt, Human
cuuugcugacccuccccaaagg

SEQ ID NO: 148473 - RNA, 32 nt, Human
cuuugcugagccucuaucagcuguguggagua

SEQ ID NO: 148474 - RNA, 32 nt, Human
cuuugcugauuuccccucuucccuucaacaug

SEQ ID NO: 148475 - RNA, 32 nt, Human
cuuugcugcauucugccucucuaggaccaugg

SEQ ID NO: 148476 - RNA, 17 nt, Human
cuuugcugcuggcuacc

SEQ ID NO: 148477 - RNA, 32 nt, Human
cuuugcuggcugucagcugugguucuuauuug

SEQ ID NO: 148478 - RNA, 32 nt, Human
cuuugcugggagaggggguagcuagccugaga

SEQ ID NO: 148479 - RNA, 32 nt, Human
cuuugcugggagggggcuguguugugagcccu

SEQ ID NO: 148480 - RNA, 32 nt, Human
cuuugcuggugguccccucugaccacaagcuu

SEQ ID NO: 148481 - RNA, 32 nt, Human
cuuugcugucagcccuucugagacaggaccug

SEQ ID NO: 148482 - RNA, 32 nt, Human
cuuugcuguccacuguucuccacacacgcaac

SEQ ID NO: 148483 - RNA, 32 nt, Human
cuuugcugugccugugcugagagaccaugugc

SEQ ID NO: 148484 - RNA, 32 nt, Human
cuuugcuguggguggaagagggaguagcugau

SEQ ID NO: 148485 - RNA, 32 nt, Human
cuuugcuguucuucauccucguuguugcuguc

SEQ ID NO: 148486 - RNA, 21 nt, Human
cuuugcuguuguagauagcca

SEQ ID NO: 148487 - RNA, 32 nt, Human
cuuugcuucaaaccuucagaacauucaaaccg

SEQ ID NO: 148488 - RNA, 32 nt, Human
cuuugcuucccaggcuggagugcaguggugcg

SEQ ID NO: 148489 - RNA, 32 nt, Human
cuuugcuuccuuucaguugccuccuggaucuu

SEQ ID NO: 148490 - RNA, 32 nt, Human
cuuugcuucugccucuguuuccaagcccaccc

SEQ ID NO: 148491 - RNA, 32 nt, Human
cuuugcuugcagcccuccguccugcugaaaac

SEQ ID NO: 148492 - RNA, 32 nt, Human
cuuugcuuggccucucuccuguguguaaucuc

SEQ ID NO: 148493 - RNA, 32 nt, Human
cuuugcuuguagcugcuccccgaacucgccgu

SEQ ID NO: 148494 - RNA, 32 nt, Human
cuuugcuuguagcugugcaggcugaggucugg

SEQ ID NO: 148495 - RNA, 32 nt, Human
cuuugcuuuggcugucgucuucugccgugugc

SEQ ID NO: 148496 - RNA, 32 nt, Human
cuuugcuuuuacagccugcucuugccuauuac

SEQ ID NO: 148497 - RNA, 24 nt, Human
cuuuggaaaaagggagaacgugua

SEQ ID NO: 148498 - RNA, 32 nt, Human
cuuuggaaaugcuggggucccuggugugguaa

SEQ ID NO: 148499 - RNA, 32 nt, Human
cuuuggaacgcuggguggauugcuugaaccca

SEQ ID NO: 148500 - RNA, 32 nt, Human
cuuuggaacuuccaguauaguggggacaauca

SEQ ID NO: 148501 - RNA, 32 nt, Human
cuuuggaagagcgucucaacucggacuggagc

SEQ ID NO: 148502 - RNA, 19 nt, Human
cuuuggaagcaggcuccug

SEQ ID NO: 148503 - RNA, 32 nt, Human
cuuuggaagccuugaguucagaaucugcugcu

SEQ ID NO: 148504 - RNA, 32 nt, Human
cuuuggaaggcagaggcaggaggaucacuuga

SEQ ID NO: 148505 - RNA, 32 nt, Human
cuuuggaaggccaaggcgggcagaucacuuga

SEQ ID NO: 148506 - RNA, 32 nt, Human
cuuuggaaggccgaggcgggcagaucacuaga

SEQ ID NO: 148507 - RNA, 32 nt, Human
cuuuggaaggccgaggugggcagaucaucuga

SEQ ID NO: 148508 - RNA, 32 nt, Human
cuuuggaaggcugaggaaggaggaucgcuuga

SEQ ID NO: 148509 - RNA, 32 nt, Human
cuuuggaaggcugaggcaggcagaucacuuga

SEQ ID NO: 148510 - RNA, 32 nt, Human
cuuuggaaggcugaggcgggaggaucaguaua

SEQ ID NO: 148511 - RNA, 32 nt, Human
cuuuggaaggcugaggcgggcagaucaucuga

SEQ ID NO: 148512 - RNA, 32 nt, Human
cuuuggaaggggaugguggccuugcauccaag

SEQ ID NO: 148513 - RNA, 32 nt, Human
cuuuggaagguaaagacgggaggaucacuuga

SEQ ID NO: 148514 - RNA, 32 nt, Human
cuuuggaaugguguuuaacuaaugcugcuggc

SEQ ID NO: 148515 - RNA, 32 nt, Human
cuuuggacacuggagcucagaggaccaaguga

SEQ ID NO: 148516 - RNA, 32 nt, Human
cuuuggacauccugcugacacuugggccccuu

SEQ ID NO: 148517 - RNA, 32 nt, Human
cuuuggacccuccugaucccugguuguugaga

SEQ ID NO: 148518 - RNA, 32 nt, Human
cuuuggaccuguuuuaguaaacccguuuuuca

SEQ ID NO: 148519 - RNA, 21 nt, Human
cuuuggacucagcuccugccu

SEQ ID NO: 148520 - RNA, 32 nt, Human
cuuuggacucgccugcccaaccccuugcugcc

SEQ ID NO: 148521 - RNA, 32 nt, Human
cuuuggacucuccccucuuauguaccucuuuu

SEQ ID NO: 148522 - RNA, 32 nt, Human
cuuuggacuguauugugacugcugucuggucc

SEQ ID NO: 148523 - RNA, 32 nt, Human
cuuuggacuuggaaggugugcggggacuggcc

SEQ ID NO: 148524 - RNA, 32 nt, Human
cuuuggagaagaaccccagccuggggugggga

SEQ ID NO: 148525 - RNA, 32 nt, Human
cuuuggagaccuagccccagaaagccucccuu

SEQ ID NO: 148526 - RNA, 32 nt, Human
cuuuggagacggcaaugguuucuuccaaccac

SEQ ID NO: 148527 - RNA, 32 nt, Human
cuuuggagagaagggagagggcccgucggaca

SEQ ID NO: 148528 - RNA, 32 nt, Human
cuuuggagagagaagagaaugaggcugggcuc

SEQ ID NO: 148529 - RNA, 32 nt, Human
cuuuggagaggcgagcagcagccccggcagcg

SEQ ID NO: 148530 - RNA, 32 nt, Human
cuuuggagaugcuuucacucuguccgucuucu

SEQ ID NO: 148531 - RNA, 32 nt, Human
cuuuggagaugugguccccaggagggacuuug

SEQ ID NO: 148532 - RNA, 32 nt, Human
cuuuggagcuuaccagagaugcagucccuccc

SEQ ID NO: 148533 - RNA, 32 nt, Human
cuuuggaggagcccaauuuguauucagucuaa

SEQ ID NO: 148534 - RNA, 32 nt, Human
cuuuggaggaggaggaggaggaggagaggggc

SEQ ID NO: 148535 - RNA, 32 nt, Human
cuuuggaggaggcugaggugggcagauuuuga

SEQ ID NO: 148536 - RNA, 32 nt, Human
cuuuggagggcugaagcaggaggauugcuuga

SEQ ID NO: 148537 - RNA, 32 nt, Human
cuuuggagguguagugaacguguguacagaag

SEQ ID NO: 148538 - RNA, 32 nt, Human
cuuuggaguguauccuauuugaggucaagaaa

SEQ ID NO: 148539 - RNA, 32 nt, Human
cuuuggaucauagcccuggccuggcggcacag

SEQ ID NO: 148540 - RNA, 32 nt, Human
cuuuggauuccagcacgacgcaucaaaccaua

SEQ ID NO: 148541 - RNA, 22 nt, Human
cuuuggauuucuucacaaggca

SEQ ID NO: 148542 - RNA, 21 nt, Human
cuuuggauuuuauuccaaacc

SEQ ID NO: 148543 - RNA, 32 nt, Human
cuuuggcaaauucuguucuccuuaguggcaua

SEQ ID NO: 148544 - RNA, 32 nt, Human
cuuuggcaacuugcuucauuucuuuuucauuu

SEQ ID NO: 148545 - RNA, 32 nt, Human
cuuuggcaauagccuugagccuagagggcccu

SEQ ID NO: 148546 - RNA, 32 nt, Human
cuuuggcacaguucaugucuauccugacaaaa

SEQ ID NO: 148547 - RNA, 32 nt, Human
cuuuggcacccaaggaguucugacuuucuggg

SEQ ID NO: 148548 - RNA, 32 nt, Human
cuuuggcaccuccauucccuguugcugaaggc

SEQ ID NO: 148549 - RNA, 32 nt, Human
cuuuggcacuuuuauugccuuuacaagaacag

SEQ ID NO: 148550 - RNA, 32 nt, Human
cuuuggcaggacaaggcaggaggaucacuuga

SEQ ID NO: 148551 - RNA, 23 nt, Human
cuuuggcaggugugagccaucgc

SEQ ID NO: 148552 - RNA, 32 nt, Human
cuuuggcaucaucugccauugauguccagccu

SEQ ID NO: 148553 - RNA, 32 nt, Human
cuuuggcauccugggguuggccugggcaaaug

SEQ ID NO: 148554 - RNA, 32 nt, Human
cuuuggcauucucuuugcagcacagagaaguu

SEQ ID NO: 148555 - RNA, 32 nt, Human
cuuuggcauuuacauccacuucaaauguuaaa

SEQ ID NO: 148556 - RNA, 32 nt, Human
cuuuggccaccugaggugacccccaggccucc

SEQ ID NO: 148557 - RNA, 32 nt, Human
cuuuggccaugauucucaacacugauuguaua

SEQ ID NO: 148558 - RNA, 20 nt, Human
cuuuggcccaccagaacaca

SEQ ID NO: 148559 - RNA, 32 nt, Human
cuuuggcccccugcccuccucucccucccaga

SEQ ID NO: 148560 - RNA, 32 nt, Human
cuuuggcccuauccucuccauuagcuccuucc

SEQ ID NO: 148561 - RNA, 32 nt, Human
cuuuggcccucgcuucccacccuacgauguau

SEQ ID NO: 148562 - RNA, 16 nt, Human
cuuuggccgccgcgcc

SEQ ID NO: 148563 - RNA, 32 nt, Human
cuuuggccucaucgcugaccugggccgucaga

SEQ ID NO: 148564 - RNA, 32 nt, Human
cuuuggccucucccccuccuuccaucucuucu

SEQ ID NO: 148565 - RNA, 32 nt, Human
cuuuggccugacaacagucuucugcccauguc

SEQ ID NO: 148566 - RNA, 32 nt, Human
cuuuggccugggagguccaggcugcaaugagc

SEQ ID NO: 148567 - RNA, 32 nt, Human
cuuuggccuuccagaccccaggaaguuggccu

SEQ ID NO: 148568 - RNA, 32 nt, Human
cuuuggccuuuccuuguauguggguguuuauu

SEQ ID NO: 148569 - RNA, 32 nt, Human
cuuuggccuuucuccucccaggccuccacaaa

SEQ ID NO: 148570 - RNA, 32 nt, Human
cuuuggccuuucuucuucuucuucuuccucuu

SEQ ID NO: 148571 - RNA, 32 nt, Human
cuuuggcgaaugcagaaagguugcuaucaagu

SEQ ID NO: 148572 - RNA, 27 nt, Human
cuuuggcgcggcucgcgccuccugcuu

SEQ ID NO: 148573 - RNA, 32 nt, Human
cuuuggcuaggcaaaaugaaacuauaacugau

SEQ ID NO: 148574 - RNA, 32 nt, Human
cuuuggcucagguuuggaugcucuuucucugc

SEQ ID NO: 148575 - RNA, 32 nt, Human
cuuuggcucccaggcuggaguccaguggugug

SEQ ID NO: 148576 - RNA, 32 nt, Human
cuuuggcucugccuuugucuguccugugagau

SEQ ID NO: 148577 - RNA, 32 nt, Human
cuuuggcucugggaauuucuccucccacgugg

SEQ ID NO: 148578 - RNA, 32 nt, Human
cuuuggcucuucuuccuuuguacucuucagcu

SEQ ID NO: 148579 - RNA, 32 nt, Human
cuuuggcugaguggcuggaguggucaauaaag

SEQ ID NO: 148580 - RNA, 32 nt, Human
cuuuggcugcuaaaccugcugccuucagcugc

SEQ ID NO: 148581 - RNA, 32 nt, Human
cuuuggcugcuagaacucaucuguaguccuuu

SEQ ID NO: 148582 - RNA, 32 nt, Human
cuuuggcugucccucuccccagccuggagagg

SEQ ID NO: 148583 - RNA, 18 nt, Human
cuuuggcuguuuuggcaa

SEQ ID NO: 148584 - RNA, 32 nt, Human
cuuuggcuugacuuguaugccauuggaaucug

SEQ ID NO: 148585 - RNA, 20 nt, Human
cuuugggaaagcccagacuu

SEQ ID NO: 148586 - RNA, 28 nt, Human
cuuugggaaauccaaggaggaauucuac

SEQ ID NO: 148587 - RNA, 32 nt, Human
cuuugggaagauguuauuuaugaccaauaucu

SEQ ID NO: 148588 - RNA, 32 nt, Human
cuuugggaagcagagguggcaggaucauucca

SEQ ID NO: 148589 - RNA, 32 nt, Human
cuuugggaagccaagacagguggaucucuuga

SEQ ID NO: 148590 - RNA, 32 nt, Human
cuuugggaagccaagaugaguagaucaccugg

SEQ ID NO: 148591 - RNA, 32 nt, Human
cuuugggaagccaaggcgggcagaucauuuga

SEQ ID NO: 148592 - RNA, 32 nt, Human
cuuugggaagcccaggcaggcagaucacuuga

SEQ ID NO: 148593 - RNA, 32 nt, Human
cuuugggaagccgaagcaggaggaucacugga

SEQ ID NO: 148594 - RNA, 32 nt, Human
cuuugggaagccgaggcgggcagaucaccuga

SEQ ID NO: 148595 - RNA, 32 nt, Human
cuuugggaagccgggguaggaggaucaccaga

SEQ ID NO: 148596 - RNA, 32 nt, Human
cuuugggaagcugaagcaggaggauugcuuga

SEQ ID NO: 148597 - RNA, 32 nt, Human
cuuugggaagcugaggcaggaggaucaccuga

SEQ ID NO: 148598 - RNA, 32 nt, Human
cuuugggaagcugaggcgagcagaucaccgaa

SEQ ID NO: 148599 - RNA, 32 nt, Human
cuuugggaaucuaacaggaugcagugaaccca

SEQ ID NO: 148600 - RNA, 32 nt, Human
cuuugggaaucuuaggcgggaggaucacuuga

SEQ ID NO: 148601 - RNA, 32 nt, Human
cuuugggacacauugaccaugaggaggagcug

SEQ ID NO: 148602 - RNA, 24 nt, Human
cuuugggaccccgugccuccugcc

SEQ ID NO: 148603 - RNA, 32 nt, Human
cuuugggacuaaacacaggcuacuuucuguuu

SEQ ID NO: 148604 - RNA, 32 nt, Human
cuuugggacucuucucucacacccagguccug

SEQ ID NO: 148605 - RNA, 32 nt, Human
cuuugggagaccaagacaagcagaucacccaa

SEQ ID NO: 148606 - RNA, 32 nt, Human
cuuugggagaccgaggugggcagaucacuuga

SEQ ID NO: 148607 - RNA, 32 nt, Human
cuuugggagacugaggcaggaggaucacuuaa

SEQ ID NO: 148608 - RNA, 32 nt, Human
cuuugggagacugaggccagcagaucuccugu

SEQ ID NO: 148609 - RNA, 32 nt, Human
cuuugggagagcgaggcgggcagaucacaagg

SEQ ID NO: 148610 - RNA, 32 nt, Human
cuuugggagaggagaaaggaguuuggcaggag

SEQ ID NO: 148611 - RNA, 32 nt, Human
cuuugggagaggguaaaagauuacagaauuag

SEQ ID NO: 148612 - RNA, 32 nt, Human
cuuugggagccaccccacaccuggccaacgcu

SEQ ID NO: 148613 - RNA, 32 nt, Human
cuuugggagccccaggugggcagaucacgagg

SEQ ID NO: 148614 - RNA, 32 nt, Human
cuuugggagcccgaggugggcagaucacuagg

SEQ ID NO: 148615 - RNA, 32 nt, Human
cuuugggaggcaaaggcgggaggaucacuuga

SEQ ID NO: 148616 - RNA, 32 nt, Human
cuuugggaggcaaaggcgggcagaucaccuga

SEQ ID NO: 148617 - RNA, 32 nt, Human
cuuugggaggcagaggagggaggaucacuuga

SEQ ID NO: 148618 - RNA, 32 nt, Human
cuuugggaggcagaggagggcggaucacgagg

SEQ ID NO: 148619 - RNA, 32 nt, Human
cuuugggaggcagaggcagacggaucacuccu

SEQ ID NO: 148620 - RNA, 32 nt, Human
cuuugggaggcagaggcaggcagaucacaagg

SEQ ID NO: 148621 - RNA, 32 nt, Human
cuuugggaggcagaggccgguggguugcuuua

SEQ ID NO: 148622 - RNA, 32 nt, Human
cuuugggaggcagaggcgggaggauugcuuga

SEQ ID NO: 148623 - RNA, 32 nt, Human
cuuugggaggcagaggcgggcagaucacuuga

SEQ ID NO: 148624 - RNA, 32 nt, Human
cuuugggaggcagaggugggaggacugcuuga

SEQ ID NO: 148625 - RNA, 32 nt, Human
cuuugggaggcagaggugggaggauugcuugg

SEQ ID NO: 148626 - RNA, 32 nt, Human
cuuugggaggcagaggugggcagaucacucaa

SEQ ID NO: 148627 - RNA, 32 nt, Human
cuuugggaggcagaggugggcggaucgccuga

SEQ ID NO: 148628 - RNA, 32 nt, Human
cuuugggaggcagaguugggaggaucaccuga

SEQ ID NO: 148629 - RNA, 32 nt, Human
cuuugggaggccaaagcaggaggaucacuuga

SEQ ID NO: 148630 - RNA, 32 nt, Human
cuuugggaggccaaagcaggcagaucacgaga

SEQ ID NO: 148631 - RNA, 32 nt, Human
cuuugggaggccaacacaggaggaucacuuga

SEQ ID NO: 148632 - RNA, 32 nt, Human
cuuugggaggccaagacaggaggaucacuuga

SEQ ID NO: 148633 - RNA, 32 nt, Human
cuuugggaggccaagacaggaggaucacuuua

SEQ ID NO: 148634 - RNA, 32 nt, Human
cuuugggaggccaagacaggcggaucccgagg

SEQ ID NO: 148635 - RNA, 32 nt, Human
cuuugggaggccaagacagguagaucacuuga

SEQ ID NO: 148636 - RNA, 32 nt, Human
cuuugggaggccaagacagguggaucaccuga

SEQ ID NO: 148637 - RNA, 32 nt, Human
cuuugggaggccaagacgagcagaucacuuga

SEQ ID NO: 148638 - RNA, 32 nt, Human
cuuugggaggccaagacgggcagaucacgagg

SEQ ID NO: 148639 - RNA, 32 nt, Human
cuuugggaggccaagacgggcggaucaccuga

SEQ ID NO: 148640 - RNA, 32 nt, Human
cuuugggaggccaagacgggcggaucaugagg

SEQ ID NO: 148641 - RNA, 32 nt, Human
cuuugggaggccaagacgggcggaucuuuuga

SEQ ID NO: 148642 - RNA, 32 nt, Human
cuuugggaggccaagacggguggaucacuuga

SEQ ID NO: 148643 - RNA, 32 nt, Human
cuuugggaggccaagaugggaggaucauuuga

SEQ ID NO: 148644 - RNA, 32 nt, Human
cuuugggaggccaaggaaggaggacugcuuaa

SEQ ID NO: 148645 - RNA, 32 nt, Human
cuuugggaggccaaggaaggcagaucaccuga

SEQ ID NO: 148646 - RNA, 32 nt, Human
cuuugggaggccaaggagggcagaucacuuca

SEQ ID NO: 148647 - RNA, 32 nt, Human
cuuugggaggccaaggcaagaggaucacuuga

SEQ ID NO: 148648 - RNA, 32 nt, Human
cuuugggaggccaaggcaagcagaucaccuga

SEQ ID NO: 148649 - RNA, 32 nt, Human
cuuugggaggccaaggcaggaggaucaauuaa

SEQ ID NO: 148650 - RNA, 32 nt, Human
cuuugggaggccaaggcaggaggaucacuuga

SEQ ID NO: 148651 - RNA, 32 nt, Human
cuuugggaggccaaggcaggcagaucaccuga

SEQ ID NO: 148652 - RNA, 32 nt, Human
cuuugggaggccaaggcaggcagaucacgagg

SEQ ID NO: 148653 - RNA, 32 nt, Human
cuuugggaggccaaggcaggcagaucacuuaa

SEQ ID NO: 148654 - RNA, 32 nt, Human
cuuugggaggccaaggcaggcagaucacuuga

SEQ ID NO: 148655 - RNA, 32 nt, Human
cuuugggaggccaaggcaggcagaucaucuga

SEQ ID NO: 148656 - RNA, 32 nt, Human
cuuugggaggccaaggcaggcagaucauuuga

SEQ ID NO: 148657 - RNA, 32 nt, Human
cuuugggaggccaaggcgggaggaucacuuga

SEQ ID NO: 148658 - RNA, 32 nt, Human
cuuugggaggccaaggcgggcagaucacaagg

SEQ ID NO: 148659 - RNA, 32 nt, Human
cuuugggaggccaaggcgggcagaucaccgga

SEQ ID NO: 148660 - RNA, 32 nt, Human
cuuugggaggccaaggcgggcagaucaccuga

SEQ ID NO: 148661 - RNA, 32 nt, Human
cuuugggaggccaaggcgggcagaucaccugu

SEQ ID NO: 148662 - RNA, 32 nt, Human
cuuugggaggccaaggcgggcagaucaccuua

SEQ ID NO: 148663 - RNA, 32 nt, Human
cuuugggaggccaaggcgggcagaucacgagg

SEQ ID NO: 148664 - RNA, 32 nt, Human
cuuugggaggccaaggcgggcagaucacuuga

SEQ ID NO: 148665 - RNA, 32 nt, Human
cuuugggaggccaagguaggcagaucaccuga

SEQ ID NO: 148666 - RNA, 32 nt, Human
cuuugggaggccaaggucagcagaucaccuga

SEQ ID NO: 148667 - RNA, 32 nt, Human
cuuugggaggccaaggugggaggaucaauuga

SEQ ID NO: 148668 - RNA, 32 nt, Human
cuuugggaggccaaggugggaggaucaccuga

SEQ ID NO: 148669 - RNA, 32 nt, Human
cuuugggaggccaaggugggaggaucacugag

SEQ ID NO: 148670 - RNA, 32 nt, Human
cuuugggaggccaaggugggaggaucacuuga

SEQ ID NO: 148671 - RNA, 32 nt, Human
cuuugggaggccaaggugggaggaucaguuga

SEQ ID NO: 148672 - RNA, 32 nt, Human
cuuugggaggccaaggugggcagaucacgagg

SEQ ID NO: 148673 - RNA, 32 nt, Human
cuuugggaggccaaggugggcagaucacugga

SEQ ID NO: 148674 - RNA, 32 nt, Human
cuuugggaggccaaggugggcagaucacuuga

SEQ ID NO: 148675 - RNA, 32 nt, Human
cuuugggaggccaaggugggcagaucaggagg

SEQ ID NO: 148676 - RNA, 32 nt, Human
cuuugggaggccaaggugggcagaucaugagg

SEQ ID NO: 148677 - RNA, 32 nt, Human
cuuugggaggccaagguuggcagaucaccuga

SEQ ID NO: 148678 - RNA, 32 nt, Human
cuuugggaggccagggcaggcagaucaucuga

SEQ ID NO: 148679 - RNA, 32 nt, Human
cuuugggaggccagggugggcagaucaugagg

SEQ ID NO: 148680 - RNA, 32 nt, Human
cuuugggaggcccaggugggcagaucaccuga

SEQ ID NO: 148681 - RNA, 32 nt, Human
cuuugggaggccgaagcaggcagaucaccuga

SEQ ID NO: 148682 - RNA, 32 nt, Human
cuuugggaggccgaaguaagcagaucaccuga

SEQ ID NO: 148683 - RNA, 32 nt, Human
cuuugggaggccgaagugggcagaucacuuga

SEQ ID NO: 148684 - RNA, 32 nt, Human
cuuugggaggccgagaagggaggaucacuuga

SEQ ID NO: 148685 - RNA, 32 nt, Human
cuuugggaggccgagacaggcagaucacaagg

SEQ ID NO: 148686 - RNA, 32 nt, Human
cuuugggaggccgagacgggaggaucaguuga

SEQ ID NO: 148687 - RNA, 32 nt, Human
cuuugggaggccgagacgggcagaucacgagg

SEQ ID NO: 148688 - RNA, 32 nt, Human
cuuugggaggccgagacgggcagaucacuuga

SEQ ID NO: 148689 - RNA, 32 nt, Human
cuuugggaggccgaggaaggaggauuaccuga

SEQ ID NO: 148690 - RNA, 32 nt, Human
cuuugggaggccgaggagggaggaucaccuga

SEQ ID NO: 148691 - RNA, 32 nt, Human
cuuugggaggccgaggagggcagaucacuuga

SEQ ID NO: 148692 - RNA, 32 nt, Human
cuuugggaggccgaggagggcagaucaucuga

SEQ ID NO: 148693 - RNA, 32 nt, Human
cuuugggaggccgaggcaggaggaucaccuga

SEQ ID NO: 148694 - RNA, 32 nt, Human
cuuugggaggccgaggcaggaggaucacuuga

SEQ ID NO: 148695 - RNA, 32 nt, Human
cuuugggaggccgaggcaggcagaucacaagg

SEQ ID NO: 148696 - RNA, 32 nt, Human
cuuugggaggccgaggcaggcagaucaccuga

SEQ ID NO: 148697 - RNA, 32 nt, Human
cuuugggaggccgaggcaggcagaucacgagg

SEQ ID NO: 148698 - RNA, 32 nt, Human
cuuugggaggccgaggcaggcagaucacgggg

SEQ ID NO: 148699 - RNA, 32 nt, Human
cuuugggaggccgaggcaggcagaucacuuga

SEQ ID NO: 148700 - RNA, 32 nt, Human
cuuugggaggccgaggccggcagaucaccuga

SEQ ID NO: 148701 - RNA, 32 nt, Human
cuuugggaggccgaggcgagcagaucaccuga

SEQ ID NO: 148702 - RNA, 32 nt, Human
cuuugggaggccgaggcgagcagaucacgagg

SEQ ID NO: 148703 - RNA, 32 nt, Human
cuuugggaggccgaggcgggaggaucaccuga

SEQ ID NO: 148704 - RNA, 32 nt, Human
cuuugggaggccgaggcgggaggaucacuuga

SEQ ID NO: 148705 - RNA, 32 nt, Human
gaaagccuaucugucugucuugaagacuucau

SEQ ID NO: 148706 - RNA, 32 nt, Human
gaaagccuccaggacagccugugggagcuguu

SEQ ID NO: 148707 - RNA, 32 nt, Human
gaaagccucucucucccucccucucucaugag

SEQ ID NO: 148708 - RNA, 32 nt, Human
gaaagccugcagcuaaacaccaguguuacuuc

SEQ ID NO: 148709 - RNA, 32 nt, Human
gaaagccugcagcucuccacaggagcuguaaa

SEQ ID NO: 148710 - RNA, 32 nt, Human
gaaagccugccuaacucugccugguggcagug

SEQ ID NO: 148711 - RNA, 32 nt, Human
gaaagccugcuuuguuccacagcauugucucc

SEQ ID NO: 148712 - RNA, 20 nt, Human
gaaagccugggaccugcaga

SEQ ID NO: 148713 - RNA, 32 nt, Human
gaaagccugucacacuagagugugugugacau

SEQ ID NO: 148714 - RNA, 32 nt, Human
gaaagccuuccucuucccagccuaggguuuca

SEQ ID NO: 148715 - RNA, 32 nt, Human
gaaagccuuggagaguggaggcagcagagaug

SEQ ID NO: 148716 - RNA, 32 nt, Human
gaaagccuuugcuuucugugccuggauucgga

SEQ ID NO: 148717 - RNA, 19 nt, Human
gaaagcgaagagggcccgg

SEQ ID NO: 148718 - RNA, 32 nt, Human
gaaagcgaccucgauuuccccagauccgagaa

SEQ ID NO: 148719 - RNA, 32 nt, Human
gaaagcgcaggaggaggcaguguuaggccuua

SEQ ID NO: 148720 - RNA, 32 nt, Human
gaaagcgccauugcacuccagucugggugaca

SEQ ID NO: 148721 - RNA, 32 nt, Human
gaaagcgccuagggcuggagaauagcgcugag

SEQ ID NO: 148722 - RNA, 32 nt, Human
gaaagcgcuguggcugaagauuuucguaaaaa

SEQ ID NO: 148723 - RNA, 32 nt, Human
gaaagcggcggcggaggauggaggaaggaggc

SEQ ID NO: 148724 - RNA, 32 nt, Human
gaaagcgggugucuagaaguggugcuaauggg

SEQ ID NO: 148725 - RNA, 32 nt, Human
gaaagcggugaggugagagagaugcaucugca

SEQ ID NO: 148726 - RNA, 32 nt, Human
gaaagcgucacccagccccagauuccgagggg

SEQ ID NO: 148727 - RNA, 32 nt, Human
gaaagcguuuuuaacugcaacuuucuauaaug

SEQ ID NO: 148728 - RNA, 32 nt, Human
gaaagcuaagagaauuagaggucauggcugga

SEQ ID NO: 148729 - RNA, 32 nt, Human
gaaagcuaauaagaaagaacaagaccauuuac

SEQ ID NO: 148730 - RNA, 22 nt, Human
gaaagcuagaacacgcauuucc

SEQ ID NO: 148731 - RNA, 32 nt, Human
gaaagcuauauacuugugcuaucuaaagcacu

SEQ ID NO: 148732 - RNA, 32 nt, Human
gaaagcuaugacugcaggaucagucuaacuau

SEQ ID NO: 148733 - RNA, 32 nt, Human
gaaagcuauugcuuuucuaauuuccuuccaua

SEQ ID NO: 148734 - RNA, 32 nt, Human
gaaagcucagcaggaacugguaacuuuggguc

SEQ ID NO: 148735 - RNA, 32 nt, Human
gaaagcucaucuggccuccuguuccagugcuu

SEQ ID NO: 148736 - RNA, 32 nt, Human
gaaagcuccacaucaauaaacaugacacucug

SEQ ID NO: 148737 - RNA, 32 nt, Human
gaaagcuccugccuccuccucugugucacaga

SEQ ID NO: 148738 - RNA, 32 nt, Human
gaaagcuccugugguuuugcucagccaaaacc

SEQ ID NO: 148739 - RNA, 32 nt, Human
gaaagcucuagcaacaugaucuuaauuguauc

SEQ ID NO: 148740 - RNA, 32 nt, Human
gaaagcucugauuaucauuuaaaacaaauaaa

SEQ ID NO: 148741 - RNA, 32 nt, Human
gaaagcucugcagcuagguccucucaucagcc

SEQ ID NO: 148742 - RNA, 32 nt, Human
gaaagcucugcagcucugaaccucucacuggc

SEQ ID NO: 148743 - RNA, 32 nt, Human
gaaagcugaauccauauguagacuucauggag

SEQ ID NO: 148744 - RNA, 32 nt, Human
gaaagcugaggcaggaggauuacuugaggcca

SEQ ID NO: 148745 - RNA, 23 nt, Human
gaaagcugaggcagguggaucac

SEQ ID NO: 148746 - RNA, 32 nt, Human
gaaagcugaggccccacuggaaaaaggacuca

SEQ ID NO: 148747 - RNA, 32 nt, Human
gaaagcugaggugggagaaucgcuugagucca

SEQ ID NO: 148748 - RNA, 32 nt, Human
gaaagcugaguccugcaggaagcugccuuucc

SEQ ID NO: 148749 - RNA, 32 nt, Human
gaaagcugccgaagcagccacuggaaagaacc

SEQ ID NO: 148750 - RNA, 32 nt, Human
gaaagcugccuuucuauuuacuugagucuugu

SEQ ID NO: 148751 - RNA, 32 nt, Human
gaaagcugcugaugcuucaaaaaugaaaacaa

SEQ ID NO: 148752 - RNA, 21 nt, Human
gaaagcuggaagaaauaguca

SEQ ID NO: 148753 - RNA, 32 nt, Human
gaaagcuggcaaccuccguugucccuucccau

SEQ ID NO: 148754 - RNA, 32 nt, Human
gaaagcugggaagagaaaucugaagaacagcc

SEQ ID NO: 148755 - RNA, 32 nt, Human
gaaagcugguaggggcugggagaggguaccac

SEQ ID NO: 148756 - RNA, 32 nt, Human
gaaagcugucugucuguacccugcucuggauu

SEQ ID NO: 148757 - RNA, 22 nt, Human
gaaagcugugguagagugguua

SEQ ID NO: 148758 - RNA, 32 nt, Human
gaaagcugugucguugccagagacaggguuau

SEQ ID NO: 148759 - RNA, 32 nt, Human
gaaagcuguucucuccugggccuguagagagu

SEQ ID NO: 148760 - RNA, 32 nt, Human
gaaagcuuacaguguuucagguugugauuuau

SEQ ID NO: 148761 - RNA, 32 nt, Human
gaaagcuucaaagccagcacaagagcacacag

SEQ ID NO: 148762 - RNA, 32 nt, Human
gaaagcuucaagcaaagguccaaaaagacugg

SEQ ID NO: 148763 - RNA, 32 nt, Human
gaaagcuucagcauuucucuugcuaacagauu

SEQ ID NO: 148764 - RNA, 32 nt, Human
gaaagcuucauaauaauacauucuuaccuaaa

SEQ ID NO: 148765 - RNA, 32 nt, Human
gaaagcuucccaaccccucccucccaccaccc

SEQ ID NO: 148766 - RNA, 32 nt, Human
gaaagcuugucacugauucuuugcuucaggag

SEQ ID NO: 148767 - RNA, 32 nt, Human
gaaagcuuucaaagaggucacuguggccuguc

SEQ ID NO: 148768 - RNA, 32 nt, Human
gaaagcuuucuuccugucucuucgauuuacca

SEQ ID NO: 148769 - RNA, 21 nt, Human
gaaagcuuuuccagucugcuc

SEQ ID NO: 148770 - RNA, 32 nt, Human
gaaagcuuuucuuccgucgcugccucagccuc

SEQ ID NO: 148771 - RNA, 32 nt, Human
gaaaggaaaaagagcaaaagccgugaaaggaa

SEQ ID NO: 148772 - RNA, 32 nt, Human
gaaaggaaaaccaacaugaaacaccaaauagu

SEQ ID NO: 148773 - RNA, 32 nt, Human
gaaaggaaacaaacacaaguggguuccauuac

SEQ ID NO: 148774 - RNA, 32 nt, Human
gaaaggaaagacuuuccaacaaaacuuggcuu

SEQ ID NO: 148775 - RNA, 32 nt, Human
gaaaggaaagagaccuguaucuugguguuuuu

SEQ ID NO: 148776 - RNA, 32 nt, Human
gaaaggaaaggagagcgugggauaguaaaaga

SEQ ID NO: 148777 - RNA, 32 nt, Human
gaaaggaaaggccauaggacucaaaagauaau

SEQ ID NO: 148778 - RNA, 18 nt, Human
gaaaggaaagggcucuca

SEQ ID NO: 148779 - RNA, 32 nt, Human
gaaaggaaccaccauaaaacaaaccuauggac

SEQ ID NO: 148780 - RNA, 32 nt, Human
gaaaggaagaaagagaagagcugaaguaaaug

SEQ ID NO: 148781 - RNA, 32 nt, Human
gaaaggaagaggaggaaggaucccaccacuuu

SEQ ID NO: 148782 - RNA, 32 nt, Human
gaaaggaagccuugcucauucuugaggagcau

SEQ ID NO: 148783 - RNA, 32 nt, Human
gaaaggaagggccggaggcgcggcggcgggcg

SEQ ID NO: 148784 - RNA, 32 nt, Human
gaaaggaaguuauuugaguaacaacaaaagug

SEQ ID NO: 148785 - RNA, 32 nt, Human
gaaaggaauagacugaucuuuuugagcaccau

SEQ ID NO: 148786 - RNA, 32 nt, Human
gaaaggaaucaugucuucagccuggaagacuc

SEQ ID NO: 148787 - RNA, 32 nt, Human
gaaaggacaaaggagaggaauucuggaugcaa

SEQ ID NO: 148788 - RNA, 32 nt, Human
gaaaggacaaauacauuuccagaucuuuucag

SEQ ID NO: 148789 - RNA, 32 nt, Human
gaaaggacaagaaacaguugcucccaggcuca

SEQ ID NO: 148790 - RNA, 32 nt, Human
gaaaggacagcuuuuaaauaaaggaaaacuuu

SEQ ID NO: 148791 - RNA, 32 nt, Human
gaaaggacaugaggagacuaaagaccugggau

SEQ ID NO: 148792 - RNA, 32 nt, Human
gaaaggacccucucccuucaacaguacauagg

SEQ ID NO: 148793 - RNA, 32 nt, Human
gaaaggaccucuccagcaaugauuacuucaga

SEQ ID NO: 148794 - RNA, 18 nt, Human
gaaaggaccucuucugaa

SEQ ID NO: 148795 - RNA, 25 nt, Human
gaaaggacgguagaaaccacugccu

SEQ ID NO: 148796 - RNA, 32 nt, Human
gaaaggacgguagaaaccacugccuuugcuuu

SEQ ID NO: 148797 - RNA, 25 nt, Human
gaaaggacguggaugaagcagagag

SEQ ID NO: 148798 - RNA, 32 nt, Human
gaaaggacguuucucauuaaacaaaccucuuu

SEQ ID NO: 148799 - RNA, 32 nt, Human
gaaaggacuggacugccuugauugacaugggg

SEQ ID NO: 148800 - RNA, 32 nt, Human
gaaaggagaaggcuagaggcugagggaggaaa

SEQ ID NO: 148801 - RNA, 32 nt, Human
gaaaggagagaaaugagacauccugggcagcu

SEQ ID NO: 148802 - RNA, 32 nt, Human
gaaaggagagagaaggaaaggagugagguauu

SEQ ID NO: 148803 - RNA, 32 nt, Human
gaaaggagagagaaguauuggucuuugguggu

SEQ ID NO: 148804 - RNA, 32 nt, Human
gaaaggagagaugcuggucaaagggcaugaag

SEQ ID NO: 148805 - RNA, 32 nt, Human
gaaaggagaggaguagaugagauggaauuuuu

SEQ ID NO: 148806 - RNA, 32 nt, Human
gaaaggagaggcuagggugguguggaggggcu

SEQ ID NO: 148807 - RNA, 32 nt, Human
gaaaggagagguggggcuuucaguagaaacaa

SEQ ID NO: 148808 - RNA, 32 nt, Human
gaaaggagagucagguauuagaggaaagagaa

SEQ ID NO: 148809 - RNA, 32 nt, Human
gaaaggagcaagccaggaagccagacaacaac

SEQ ID NO: 148810 - RNA, 32 nt, Human
gaaaggagcauucgaggucucaguccucgcuc

SEQ ID NO: 148811 - RNA, 32 nt, Human
gaaaggagccaaggaagagauuaagaaaaaga

SEQ ID NO: 148812 - RNA, 32 nt, Human
gaaaggagccgaggcagggcgacauuccacca

SEQ ID NO: 148813 - RNA, 32 nt, Human
gaaaggagccuguggcaacaggcggccgagcu

SEQ ID NO: 148814 - RNA, 32 nt, Human
gaaaggagcuagagaaaggaaggguuccagga

SEQ ID NO: 148815 - RNA, 32 nt, Human
gaaaggagcuugucuuuccuucugcugugcug

SEQ ID NO: 148816 - RNA, 32 nt, Human
gaaaggaggaagaggaggcuucauggcugagg

SEQ ID NO: 148817 - RNA, 32 nt, Human
gaaaggaggacacgcaggaugggcagucaugc

SEQ ID NO: 148818 - RNA, 32 nt, Human
gaaaggaggaccugcaaccaucugacuugguc

SEQ ID NO: 148819 - RNA, 32 nt, Human
gaaaggaggcugggaccaggggaccagguagu

SEQ ID NO: 148820 - RNA, 28 nt, Human
gaaaggagggacuggagcagccaggaga

SEQ ID NO: 148821 - RNA, 32 nt, Human
gaaaggaggucaagcagagaggaauggcugcg

SEQ ID NO: 148822 - RNA, 32 nt, Human
gaaaggagucagaguggggugaaagucuauaa

SEQ ID NO: 148823 - RNA, 32 nt, Human
gaaaggagugaggcgccgagagcccagauacc

SEQ ID NO: 148824 - RNA, 32 nt, Human
gaaaggaguuggagcugggugcaguggcuugu

SEQ ID NO: 148825 - RNA, 32 nt, Human
gaaaggauaaaacaugacuacacagaaacuua

SEQ ID NO: 148826 - RNA, 32 nt, Human
gaaaggauggcggcagggggaggaggaccggg

SEQ ID NO: 148827 - RNA, 32 nt, Human
gaaaggauuguugaggggaugcagugaguucu

SEQ ID NO: 148828 - RNA, 21 nt, Human
gaaaggcaaaggaaaauucua

SEQ ID NO: 148829 - RNA, 32 nt, Human
gaaaggcaaccagcugacacaggagccagagu

SEQ ID NO: 148830 - RNA, 32 nt, Human
gaaaggcaagacacgcuuacacggccauuugu

SEQ ID NO: 148831 - RNA, 21 nt, Human
gaaaggcacugagaaaaccua

SEQ ID NO: 148832 - RNA, 32 nt, Human
gaaaggcacugagaaaaccuagccuuagcuag

SEQ ID NO: 148833 - RNA, 19 nt, Human
gaaaggcacugcaacuuug

SEQ ID NO: 148834 - RNA, 32 nt, Human
gaaaggcacugcaggcugggcgcaggggcuca

SEQ ID NO: 148835 - RNA, 18 nt, Human
gaaaggcacuugccucug

SEQ ID NO: 148836 - RNA, 19 nt, Human
gaaaggcacuuguauucug

SEQ ID NO: 148837 - RNA, 24 nt, Human
gaaaggcagaaaacccagucuuca

SEQ ID NO: 148838 - RNA, 22 nt, Human
gaaaggcagagggagagcgcug

SEQ ID NO: 148839 - RNA, 32 nt, Human
gaaaggcagagggagaggggacccaguucaga

SEQ ID NO: 148840 - RNA, 25 nt, Human
gaaaggcagcccccucagucucccu

SEQ ID NO: 148841 - RNA, 32 nt, Human
gaaaggcagccuguaggugagccagcugccga

SEQ ID NO: 148842 - RNA, 32 nt, Human
gaaaggcaggcagagggagaggcacucugagg

SEQ ID NO: 148843 - RNA, 23 nt, Human
gaaaggcaggcgaagucuucauu

SEQ ID NO: 148844 - RNA, 18 nt, Human
gaaaggcagggccgugga

SEQ ID NO: 148845 - RNA, 23 nt, Human
gaaaggcagugguggucuucacu

SEQ ID NO: 148846 - RNA, 19 nt, Human
gaaaggcauagguacucug

SEQ ID NO: 148847 - RNA, 22 nt, Human
gaaaggcauccuggggggacuc

SEQ ID NO: 148848 - RNA, 32 nt, Human
gaaaggcaucuuucugaauuucauucucuuga

SEQ ID NO: 148849 - RNA, 21 nt, Human
gaaaggcauuuggaugccucu

SEQ ID NO: 148850 - RNA, 32 nt, Human
gaaaggccaacuucaaagaccaguggaaccag

SEQ ID NO: 148851 - RNA, 23 nt, Human
gaaaggccaagacaaucauccac

SEQ ID NO: 148852 - RNA, 32 nt, Human
gaaaggccaccugcgccagcaccuccugagac

SEQ ID NO: 148853 - RNA, 32 nt, Human
gaaaggccaccugucccacuccuacgauacgc

SEQ ID NO: 148854 - RNA, 32 nt, Human
gaaaggccacugcacuccagccugagugacag

SEQ ID NO: 148855 - RNA, 32 nt, Human
gaaaggcccaagguauccaagccuggggaagg

SEQ ID NO: 148856 - RNA, 32 nt, Human
gaaaggcccggggaggaugacggcccaggccc

SEQ ID NO: 148857 - RNA, 32 nt, Human
gaaaggcccuggaucgugugugugacccuggu

SEQ ID NO: 148858 - RNA, 21 nt, Human
gaaaggccuacaguggcccac

SEQ ID NO: 148859 - RNA, 32 nt, Human
gaaaggccucaaggagaguuucugcgggugug

SEQ ID NO: 148860 - RNA, 23 nt, Human
gaaaggccugaauggaggacuuu

SEQ ID NO: 148861 - RNA, 20 nt, Human
gaaaggccugaggagcuuua

SEQ ID NO: 148862 - RNA, 24 nt, Human
gaaaggcgacuuccgggggcuuug

SEQ ID NO: 148863 - RNA, 32 nt, Human
gaaaggcgcgagcagaggcggcggcgggugua

SEQ ID NO: 148864 - RNA, 18 nt, Human
gaaaggcgcugcacuuua

SEQ ID NO: 148865 - RNA, 32 nt, Human
gaaaggcggaagcagaagacggggaagggaaa

SEQ ID NO: 148866 - RNA, 20 nt, Human
gaaaggcggccucagaacuc

SEQ ID NO: 148867 - RNA, 26 nt, Human
gaaaggcguucuucgagguggaucac

SEQ ID NO: 148868 - RNA, 32 nt, Human
gaaaggcuaaggaugccuuggaagaaaaaggg

SEQ ID NO: 148869 - RNA, 23 nt, Human
gaaaggcucugguggagaaccug

SEQ ID NO: 148870 - RNA, 32 nt, Human
gaaaggcucuucugaaaggugguaucuguucu

SEQ ID NO: 148871 - RNA, 28 nt, Human
gaaaggcugaaggcugccuccucuugca

SEQ ID NO: 148872 - RNA, 24 nt, Human
gaaaggcugagacaggaggaucac

SEQ ID NO: 148873 - RNA, 32 nt, Human
gaaaggcugauagauugaaauaagcuucugug

SEQ ID NO: 148874 - RNA, 32 nt, Human
gaaaggcugcugggcuaggccugcugcuguuu

SEQ ID NO: 148875 - RNA, 32 nt, Human
gaaaggcuugacuggccgugaacugaagaaug

SEQ ID NO: 148876 - RNA, 32 nt, Human
gaaaggcuuucuuuuauuuugagagcuuuagg

SEQ ID NO: 148877 - RNA, 32 nt, Human
gaaagggaaagauggaaggaaggaaggaaaaa

SEQ ID NO: 148878 - RNA, 32 nt, Human
gaaagggaaaugggagaacaauauguguuccu

SEQ ID NO: 148879 - RNA, 32 nt, Human
gaaagggaaccugcuucuuuacuccagaacuc

SEQ ID NO: 148880 - RNA, 32 nt, Human
gaaagggaagaggagccgacagcagaggggga

SEQ ID NO: 148881 - RNA, 32 nt, Human
gaaagggaaggaagaaaggaaggagggagaag

SEQ ID NO: 148882 - RNA, 32 nt, Human
gaaagggacaugcaaggaaacagcacagaaca

SEQ ID NO: 148883 - RNA, 32 nt, Human
gaaagggacucccauuugcccuucccuuucuc

SEQ ID NO: 148884 - RNA, 32 nt, Human
gaaagggacugggccagcucaguggaccgugu

SEQ ID NO: 148885 - RNA, 32 nt, Human
gaaagggagagggaagaguagguggggccggg

SEQ ID NO: 148886 - RNA, 32 nt, Human
gaaagggagagggaaucggagggagcagcgga

SEQ ID NO: 148887 - RNA, 32 nt, Human
gaaagggagaggggaagggcaggggacucagg

SEQ ID NO: 148888 - RNA, 32 nt, Human
gaaagggagauggguaguaucauuuagauuaa

SEQ ID NO: 148889 - RNA, 32 nt, Human
gaaagggagcuuguucuucccauugcucuuug

SEQ ID NO: 148890 - RNA, 19 nt, Human
gaaagggaggagagacaga

SEQ ID NO: 148891 - RNA, 32 nt, Human
gaaagggaggagagacagaaggaaccggcgac

SEQ ID NO: 148892 - RNA, 19 nt, Human
gaaagggaggagagcucua

SEQ ID NO: 148893 - RNA, 32 nt, Human
gaaagggaggggaaggaaugagcuaaaaacaa

SEQ ID NO: 148894 - RNA, 32 nt, Human
gaaagggaggggcccuggaggagaggcugacu

SEQ ID NO: 148895 - RNA, 32 nt, Human
gaaagggaggguggaaggauggguagcacauc

SEQ ID NO: 148896 - RNA, 32 nt, Human
gaaagggaggguggagggugaggccaaaucag

SEQ ID NO: 148897 - RNA, 32 nt, Human
gaaagggagggugguugguggaugucacagcu

SEQ ID NO: 148898 - RNA, 32 nt, Human
gaaagggaguucccuggucuccugggaagugu

SEQ ID NO: 148899 - RNA, 32 nt, Human
gaaagggcacagugucaguugagcugacauau

SEQ ID NO: 148900 - RNA, 20 nt, Human
gaaagggcaccaggacugcu

SEQ ID NO: 148901 - RNA, 32 nt, Human
gaaagggcacgagaaaaagaaaaagagagaga

SEQ ID NO: 148902 - RNA, 32 nt, Human
gaaagggcagagacccuggaaguggagguggc

SEQ ID NO: 148903 - RNA, 32 nt, Human
gaaagggcaggcagguggugagagccagagau

SEQ ID NO: 148904 - RNA, 32 nt, Human
gaaagggcagggccaagaccgggcuugggaga

SEQ ID NO: 148905 - RNA, 32 nt, Human
gaaagggccaagugaucccguucuagugucau

SEQ ID NO: 148906 - RNA, 32 nt, Human
gaaagggccagugcccuuauacaaagacugga

SEQ ID NO: 148907 - RNA, 32 nt, Human
gaaagggccugaccccuuacuuagcucccucc

SEQ ID NO: 148908 - RNA, 23 nt, Human
gaaagggcgcgcagucacugccu

SEQ ID NO: 148909 - RNA, 23 nt, Human
gaaagggcgcugcgaccaccccc

SEQ ID NO: 148910 - RNA, 32 nt, Human
gaaagggcucuggacagcucaggcuggccggc

SEQ ID NO: 148911 - RNA, 32 nt, Human
gaaagggcuggcucccccuccccaggcuggag

SEQ ID NO: 148912 - RNA, 32 nt, Human
gaaagggcuuucugccagccugggcaacauag

SEQ ID NO: 148913 - RNA, 32 nt, Human
gaaaggggaaagaaagggaaaagggagaaaaa

SEQ ID NO: 148914 - RNA, 32 nt, Human
gaaaggggaaaggaagaaagaaggagagcagg

SEQ ID NO: 148915 - RNA, 32 nt, Human
gaaaggggaaggcagacauccugagugauggg

SEQ ID NO: 148916 - RNA, 32 nt, Human
gaaaggggagagaaaggagagaggaggguugg

SEQ ID NO: 148917 - RNA, 21 nt, Human
gaaaggggaguagguggggga

SEQ ID NO: 148918 - RNA, 32 nt, Human
gaaaggggauggguagaacaagacugagaaau

SEQ ID NO: 148919 - RNA, 32 nt, Human
gaaaggggcacugaagccagggagccaagugg

SEQ ID NO: 148920 - RNA, 32 nt, Human
gaaaggggcagagaguggugggaaugaggggg

SEQ ID NO: 148921 - RNA, 22 nt, Human
gaaaggggcagcagucuugagg

SEQ ID NO: 148922 - RNA, 20 nt, Human
gaaaggggcagcucucuggg

SEQ ID NO: 148923 - RNA, 26 nt, Human
gaaaggggcaggcugaggcuggggga

SEQ ID NO: 148924 - RNA, 22 nt, Human
gaaaggggcaugggguggggga

SEQ ID NO: 148925 - RNA, 32 nt, Human
gaaaggggccugggcucuucauuuaaagguaa

SEQ ID NO: 148926 - RNA, 32 nt, Human
gaaaggggcucccagcccaggccaucaacaaa

SEQ ID NO: 148927 - RNA, 22 nt, Human
gaaaggggcugcagcggaggga

SEQ ID NO: 148928 - RNA, 32 nt, Human
gaaaggggcugcagcggagggaacaggcagga

SEQ ID NO: 148929 - RNA, 32 nt, Human
gaaaggggcuuccugcaccacacaugcucucc

SEQ ID NO: 148930 - RNA, 32 nt, Human
gaaaggggcuuucugacuuggagcaucugagg

SEQ ID NO: 148931 - RNA, 32 nt, Human
gaaagggggaacaagacacaaugaaagaaaag

SEQ ID NO: 148932 - RNA, 21 nt, Human
gaaagggggaggcggcugggg

SEQ ID NO: 148933 - RNA, 23 nt, Human
gaaagggggaugcagcaagggga

SEQ ID NO: 148934 - RNA, 32 nt, Human
gaaagggggcggaaaccucuccccuccaaaaa

SEQ ID NO: 148935 - RNA, 18 nt, Human
gaaaggggggagcugggg

SEQ ID NO: 148936 - RNA, 22 nt, Human
gaaagggguuuccagcuggggg

SEQ ID NO: 148937 - RNA, 32 nt, Human
gaaaggguaaaacaugacuacacagaaauuua

SEQ ID NO: 148938 - RNA, 32 nt, Human
gaaagggucucacccugucacucaggcuggag

SEQ ID NO: 148939 - RNA, 32 nt, Human
gaaagggugagaccuuucaaagcugccaagug

SEQ ID NO: 148940 - RNA, 32 nt, Human
gaaagggugagacuucagagccuguucccucu

SEQ ID NO: 148941 - RNA, 32 nt, Human
gaaagggugagggagacuggggccuggucugc

SEQ ID NO: 148942 - RNA, 32 nt, Human
gaaagggugcagguccugagggccugugcccc

SEQ ID NO: 148943 - RNA, 19 nt, Human
gaaagggugccucauccca

SEQ ID NO: 148944 - RNA, 32 nt, Human
gaaaggguggagcacaacgucgaaagcagccg

SEQ ID NO: 148945 - RNA, 18 nt, Human
gaaaggguguagcaacuu

SEQ ID NO: 148946 - RNA, 32 nt, Human
gaaaggguguggaggaagggagggccuugccu

SEQ ID NO: 148947 - RNA, 32 nt, Human
gaaaggguuagaaaauugcuguggaacaucca

SEQ ID NO: 148948 - RNA, 32 nt, Human
gaaagguaggaggagagaaggcuggggagggc

SEQ ID NO: 148949 - RNA, 32 nt, Human
gaaaggucagccgcccugcacugcccagagac

SEQ ID NO: 148950 - RNA, 32 nt, Human
gaaaggucuagcugagccuuuuagggcaugag

SEQ ID NO: 148951 - RNA, 32 nt, Human
gaaaggucucaccuccagccuggagcagucgg

SEQ ID NO: 148952 - RNA, 32 nt, Human
gaaaggucugcagcuucacuccugaagccagc

SEQ ID NO: 148953 - RNA, 32 nt, Human
gaaaggugaaggagacauaggccaggugcagc

SEQ ID NO: 148954 - RNA, 32 nt, Human
gaaaggugacaggcacaagccuaggcaaauag

SEQ ID NO: 148955 - RNA, 32 nt, Human
gaaaggugaguuugagcugccuucccuagcuu

SEQ ID NO: 148956 - RNA, 32 nt, Human
gaaaggugggagagaugcugagcccagcgaau

SEQ ID NO: 148957 - RNA, 32 nt, Human
gaaagguggucaggaaaacucuggcuggacaa

SEQ ID NO: 148958 - RNA, 32 nt, Human
gaaagguguggccucuccacuucuguggacac

SEQ ID NO: 148959 - RNA, 32 nt, Human
gaaaggugugguuccuggaggaggauuaaaag

SEQ ID NO: 148960 - RNA, 23 nt, Human
gaaagguuaccucaguuuucacu

SEQ ID NO: 148961 - RNA, 32 nt, Human
gaaagguucaacaaacagggagaauccagugu

SEQ ID NO: 148962 - RNA, 32 nt, Human
gaaagguuccaaggauggucuggaggacaaac

SEQ ID NO: 148963 - RNA, 32 nt, Human
gaaagguuccaguuggucucacagacguaugg

SEQ ID NO: 148964 - RNA, 32 nt, Human
gaaagguuggggucauuuuucuuaaagacgag

SEQ ID NO: 148965 - RNA, 32 nt, Human
gaaagguuucuaugguacuaaaaguuuguuuu

SEQ ID NO: 148966 - RNA, 32 nt, Human
gaaaguaaagccaguaagcuugcuggcagaau

SEQ ID NO: 148967 - RNA, 32 nt, Human
gaaaguaacagugggaaaugggacaacaucug

SEQ ID NO: 148968 - RNA, 32 nt, Human
gaaaguaacuaucuugaagguuugaaaaacaa

SEQ ID NO: 148969 - RNA, 32 nt, Human
gaaaguaacucauaaucuauaaacaaugaaau

SEQ ID NO: 148970 - RNA, 32 nt, Human
gaaaguaacugcagugaugaacauuuuggucc

SEQ ID NO: 148971 - RNA, 31 nt, Human
gaaaguagaaacuucuuugguauguuccugu

SEQ ID NO: 148972 - RNA, 32 nt, Human
gaaaguagaagaaaguguugccagggacggca

SEQ ID NO: 148973 - RNA, 32 nt, Human
gaaaguagcauuccuccaccucaggccuuggg

SEQ ID NO: 148974 - RNA, 32 nt, Human
gaaaguaggccgcugaugauauauucgggcag

SEQ ID NO: 148975 - RNA, 32 nt, Human
gaaaguaggcuaagcuagugggugucuccaac

SEQ ID NO: 148976 - RNA, 32 nt, Human
gaaaguaucuggagcuaagcaaaaauggcacu

SEQ ID NO: 148977 - RNA, 31 nt, Human
gaaaguaugccucagacuccucccuuuucag

SEQ ID NO: 148978 - RNA, 31 nt, Human
gaaaguauggaacaggaucguauuccagaag

SEQ ID NO: 148979 - RNA, 32 nt, Human
gaaaguauguguggccacagggcucagguuca

SEQ ID NO: 148980 - RNA, 32 nt, Human
gaaaguauugggguggagguugcagugagcag

SEQ ID NO: 148981 - RNA, 32 nt, Human
gaaaguauugggguggagguugcagugagcgg

SEQ ID NO: 148982 - RNA, 32 nt, Human
gaaaguauuuggugaaaaauaacaauacaaca

SEQ ID NO: 148983 - RNA, 32 nt, Human
gaaagucaaccacccugcugugaucacucugg

SEQ ID NO: 148984 - RNA, 32 nt, Human
gaaagucaagacugcaguaugugcacaugcgc

SEQ ID NO: 148985 - RNA, 32 nt, Human
gaaagucaaucagcugcucccauuaaaauauu

SEQ ID NO: 148986 - RNA, 32 nt, Human
gaaagucaccuacaggacugggccgggcccag

SEQ ID NO: 148987 - RNA, 32 nt, Human
gaaagucagacagagaaagaaagagaggagca

SEQ ID NO: 148988 - RNA, 32 nt, Human
gaaagucagcacagugcccuggaguccuaucu

SEQ ID NO: 148989 - RNA, 32 nt, Human
gaaagucagcuccugaaacgcugcaguggaac

SEQ ID NO: 148990 - RNA, 32 nt, Human
gaaaguccaguuggaagagauuucagaugugc

SEQ ID NO: 148991 - RNA, 32 nt, Human
gaaaguccguuccucaagcuccgggcuggggc

SEQ ID NO: 148992 - RNA, 32 nt, Human
gaaaguccucaaacucugggaacaggcgagau

SEQ ID NO: 148993 - RNA, 32 nt, Human
gaaaguccuugguagcuugcaggagcaucuga

SEQ ID NO: 148994 - RNA, 32 nt, Human
gaaagucgagcuuggaggccagccuggaucug

SEQ ID NO: 148995 - RNA, 32 nt, Human
gaaagucguacuguucacacacacaguuugag

SEQ ID NO: 148996 - RNA, 32 nt, Human
gaaagucuccaccacuuucaaaaaucccguaa

SEQ ID NO: 148997 - RNA, 32 nt, Human
gaaagucugagaguguguguggagccaaagag

SEQ ID NO: 148998 - RNA, 32 nt, Human
gaaagucuggggagccacaggagagggaccuu

SEQ ID NO: 148999 - RNA, 32 nt, Human
gaaagucuucgagaagcuucagaggagggaag

SEQ ID NO: 149000 - RNA, 32 nt, Human
gaaagugaacagcauuuguuggaaggugaugg

SEQ ID NO: 149001 - RNA, 32 nt, Human
gaaagugaacagcucacaucuguaggguugcc

SEQ ID NO: 149002 - RNA, 32 nt, Human
gaaagugaacuugaugcucaguauuugcagaa

SEQ ID NO: 149003 - RNA, 32 nt, Human
gaaagugaccacuccugggagcgggggugguc

SEQ ID NO: 149004 - RNA, 19 nt, Human
gaaagugaccucccugcca

SEQ ID NO: 149005 - RNA, 32 nt, Human
gaaagugaggaggaggaggagggagacguaga

SEQ ID NO: 149006 - RNA, 20 nt, Human
gaaagugagggcuccaggaa

SEQ ID NO: 149007 - RNA, 32 nt, Human
gaaagugagguggugaccucccaccucugguc

SEQ ID NO: 149008 - RNA, 32 nt, Human
gaaagugcaaagaggaaauggacagcaugcaa

SEQ ID NO: 149009 - RNA, 32 nt, Human
gaaagugcagcucuggaaggcagccuuggggc

SEQ ID NO: 149010 - RNA, 32 nt, Human
gaaagugcugauaaguagcaugaucaguguau

SEQ ID NO: 149011 - RNA, 32 nt, Human
gaaagugcugugggcugguucugggugggcug

SEQ ID NO: 149012 - RNA, 32 nt, Human
gaaaguggacaggccagaccagggagaugugu

SEQ ID NO: 149013 - RNA, 19 nt, Human
gaaaguggcaagcuguaga

SEQ ID NO: 149014 - RNA, 32 nt, Human
gaaaguggccacuaccagcaugaagagcccaa

SEQ ID NO: 149015 - RNA, 32 nt, Human
gaaaguggcgcaaccucugccucccaggucaa

SEQ ID NO: 149016 - RNA, 32 nt, Human
gaaaguggcggaggaaugaccacccacuggcg

SEQ ID NO: 149017 - RNA, 32 nt, Human
gaaagugggacugaggccgcaccauugagaug

SEQ ID NO: 149018 - RNA, 32 nt, Human
gaaaguggugagugagacagcugaagacagag

SEQ ID NO: 149019 - RNA, 32 nt, Human
gaaaguggugcugguguuucugcagcacaggc

SEQ ID NO: 149020 - RNA, 31 nt, Human
gaaagugguuggucugagguuggaggaagcu

SEQ ID NO: 149021 - RNA, 32 nt, Human
gaaaguguucaccucaugguuguaucaguuug

SEQ ID NO: 149022 - RNA, 32 nt, Human
gaaaguguuuggcuggggccuuggggaucucu

SEQ ID NO: 149023 - RNA, 32 nt, Human
gaaaguuaacacccugguuagggcagaauguu

SEQ ID NO: 149024 - RNA, 32 nt, Human
gaaaguuacaguuuuggcugggcuugguggcu

SEQ ID NO: 149025 - RNA, 31 nt, Human
gaaaguuacauuacacuaaccaaagcaauga

SEQ ID NO: 149026 - RNA, 32 nt, Human
gaaaguuauggagcaugaaaagacugaagggc

SEQ ID NO: 149027 - RNA, 32 nt, Human
gaaaguucaacuuagaagcuucccuuuugugu

SEQ ID NO: 149028 - RNA, 32 nt, Human
gaaaguucagcccagauggaagguguucaggg

SEQ ID NO: 149029 - RNA, 32 nt, Human
gaaaguucauuuccugggauucacuucuccag

SEQ ID NO: 149030 - RNA, 32 nt, Human
gaaaguucccuaaucucuccaucccagcuauu

SEQ ID NO: 149031 - RNA, 32 nt, Human
gaaaguucucauugccccagcugccuaguacu

SEQ ID NO: 149032 - RNA, 32 nt, Human
gaaaguucucccuuccccuccuccgugccugu

SEQ ID NO: 149033 - RNA, 32 nt, Human
gaaaguugaacuccaugucugaggacaagagg

SEQ ID NO: 149034 - RNA, 32 nt, Human
gaaaguugagccagaacuaaaccagggagcug

SEQ ID NO: 149035 - RNA, 32 nt, Human
gaaaguugaugaacuaguacgggauggcucag

SEQ ID NO: 149036 - RNA, 32 nt, Human
gaaaguugcuuucugcaccaauagcugaggcg

SEQ ID NO: 149037 - RNA, 32 nt, Human
gaaaguuggcggggcugcgggagcugagccua

SEQ ID NO: 149038 - RNA, 32 nt, Human
gaaaguuggggaggggcgcgggagggcgcaug

SEQ ID NO: 149039 - RNA, 24 nt, Human
gaaaguugguccagauauauguca

SEQ ID NO: 149040 - RNA, 32 nt, Human
gaaaguugugagagcucagaguuucugggguc

SEQ ID NO: 149041 - RNA, 32 nt, Human
gaaaguuuaaugaagaggcuagaggaggagau

SEQ ID NO: 149042 - RNA, 32 nt, Human
gaaaguuucucagcgaaaucucagggacgauc

SEQ ID NO: 149043 - RNA, 32 nt, Human
gaaaguuugagaccagccuggcccacauggug

SEQ ID NO: 149044 - RNA, 32 nt, Human
gaaaguuugccaaccucugcucuagaguagag

SEQ ID NO: 149045 - RNA, 32 nt, Human
gaaaguuuuaagaauuguuccuuggggaaaaa

SEQ ID NO: 149046 - RNA, 32 nt, Human
gaaaguuuuagaggcaaaugccucuaaaauuc

SEQ ID NO: 149047 - RNA, 32 nt, Human
gaaaguuuuucauaaacccccacuuguugcuu

SEQ ID NO: 149048 - RNA, 32 nt, Human
gaaauaaaaauuaguuuaagauggaauaaaga

SEQ ID NO: 149049 - RNA, 32 nt, Human
gaaauaaaacacugugcugcugaguucaucuc

SEQ ID NO: 149050 - RNA, 32 nt, Human
gaaauaaaacauuuggcacauuguuuacaggu

SEQ ID NO: 149051 - RNA, 32 nt, Human
gaaauaaaaccugaagaccuuaucucccacuu

SEQ ID NO: 149052 - RNA, 24 nt, Human
gaaauaaaagagucgaugcaugaa

SEQ ID NO: 149053 - RNA, 28 nt, Human
gaaauaaaagccucugguggaaccugca

SEQ ID NO: 149054 - RNA, 32 nt, Human
gaaauaaaagcguugcagcuguggaaggagau

SEQ ID NO: 149055 - RNA, 32 nt, Human
gaaauaaaauaacuaauuuugagguaccaaau

SEQ ID NO: 149056 - RNA, 23 nt, Human
gaaauaaaauuugaaacugaaaa

SEQ ID NO: 149057 - RNA, 22 nt, Human
gaaauaaacaaguauucaugag

SEQ ID NO: 149058 - RNA, 23 nt, Human
gaaauaaacaggcaguuugugaa

SEQ ID NO: 149059 - RNA, 24 nt, Human
gaaauaaaccagugggagcaugga

SEQ ID NO: 149060 - RNA, 32 nt, Human
gaaauaaaccugacauguuggugcuuggaaaa

SEQ ID NO: 149061 - RNA, 24 nt, Human
gaaauaaacgcaguaaugcaugaa

SEQ ID NO: 149062 - RNA, 22 nt, Human
gaaauaaagacaugagcaugag

SEQ ID NO: 149063 - RNA, 32 nt, Human
gaaauaaagauccuaucucaccucuugggcau

SEQ ID NO: 149064 - RNA, 32 nt, Human
gaaauaaaggcagaaggcagugagagggaggc

SEQ ID NO: 149065 - RNA, 32 nt, Human
gaaauaaaggcauaaacugaaauaucauuuaa

SEQ ID NO: 149066 - RNA, 21 nt, Human
gaaauaaaguauaugugugga

SEQ ID NO: 149067 - RNA, 23 nt, Human
gaaauaaauaaaaaugcauugaa

SEQ ID NO: 149068 - RNA, 32 nt, Human
gaaauaaaucauaccauugaauguagauaucc

SEQ ID NO: 149069 - RNA, 21 nt, Human
gaaauaaaucuagaugcagaa

SEQ ID NO: 149070 - RNA, 32 nt, Human
gaaauaaaugugaaagcuggagccgaagaguc

SEQ ID NO: 149071 - RNA, 24 nt, Human
gaaauaaauguguuugaugcugaa

SEQ ID NO: 149072 - RNA, 24 nt, Human
gaaauaaauguuucaaaugcagaa

SEQ ID NO: 149073 - RNA, 22 nt, Human
gaaauaaauuggaaauugaaga

SEQ ID NO: 149074 - RNA, 32 nt, Human
gaaauaacaacaaaauacaacuccucagcuag

SEQ ID NO: 149075 - RNA, 32 nt, Human
gaaauaacaagucccuggauugcaauuuuggu

SEQ ID NO: 149076 - RNA, 32 nt, Human
gaaauaacacaaauuagcguuuaaccugggag

SEQ ID NO: 149077 - RNA, 32 nt, Human
gaaauaacaucugcuuugcugccgagccagag

SEQ ID NO: 149078 - RNA, 32 nt, Human
gaaauaacauggauuuaacuuguuaaacauac

SEQ ID NO: 149079 - RNA, 32 nt, Human
gaaauaacgucagguagagaccaccugcucug

SEQ ID NO: 149080 - RNA, 32 nt, Human
gaaauaacucacaaucuuccugugcccggcua

SEQ ID NO: 149081 - RNA, 32 nt, Human
gaaauaagccugucacaaaaacaaauacugca

SEQ ID NO: 149082 - RNA, 32 nt, Human
gaaauaagcuagggaaacacuaacccaaaaac

SEQ ID NO: 149083 - RNA, 32 nt, Human
gaaauaaggagccucuacaugggcccugcaug

SEQ ID NO: 149084 - RNA, 32 nt, Human
gaaauaaggccuucuuuugagcagcgauugcu

SEQ ID NO: 149085 - RNA, 24 nt, Human
gaaauaagggcaaaaugcugugaa

SEQ ID NO: 149086 - RNA, 32 nt, Human
gaaauaagggccuggagcugaguaguagccag

SEQ ID NO: 149087 - RNA, 32 nt, Human
gaaauaaggucucacucugucauccaggcugg

SEQ ID NO: 149088 - RNA, 32 nt, Human
gaaauaaguccgugcaacuacagccaucugau

SEQ ID NO: 149089 - RNA, 20 nt, Human
gaaauaagugcaggcuugga

SEQ ID NO: 149090 - RNA, 32 nt, Human
gaaauaaucacuuucuuaaacuuugugaguuu

SEQ ID NO: 149091 - RNA, 32 nt, Human
gaaauaaugaagcuguacaguucuccagaaau

SEQ ID NO: 149092 - RNA, 32 nt, Human
gaaauaaugcacacuagccucugacaaccaug

SEQ ID NO: 149093 - RNA, 32 nt, Human
gaaauaaugccacuugucuacaaccaucugau

SEQ ID NO: 149094 - RNA, 32 nt, Human
gaaauaaugggauuagaaacaaacaaaacucu

SEQ ID NO: 149095 - RNA, 32 nt, Human
gaaauaauuaccaaccccuuagcaauaagcac

SEQ ID NO: 149096 - RNA, 32 nt, Human
gaaauacauaaagaaaauggucucccacagau

SEQ ID NO: 149097 - RNA, 23 nt, Human
gaaauacaugcauagcugcagaa

SEQ ID NO: 149098 - RNA, 25 nt, Human
gaaauacauuacgaugaaguggaaa

SEQ ID NO: 149099 - RNA, 32 nt, Human
gaaauaccaaaagcuucguacauguauaucca

SEQ ID NO: 149100 - RNA, 32 nt, Human
gaaauaccacagcucagccacugugaugcaga

SEQ ID NO: 149101 - RNA, 32 nt, Human
gaaauacccagaauagucacauucacagggac

SEQ ID NO: 149102 - RNA, 32 nt, Human
gaaauacccaguuucuggagggccagguggga

SEQ ID NO: 149103 - RNA, 32 nt, Human
gaaauaccugcaaagugcucuaaaaauuaaau

SEQ ID NO: 149104 - RNA, 32 nt, Human
gaaauaccuuuccugggcuuguuuucuagcau

SEQ ID NO: 149105 - RNA, 32 nt, Human
gaaauacgaguauaaaaauuagggucaaccag

SEQ ID NO: 149106 - RNA, 32 nt, Human
gaaauacgagucugucagagcggccauaagcc

SEQ ID NO: 149107 - RNA, 32 nt, Human
gaaauacguuuaauuuucaggugacuuaagac

SEQ ID NO: 149108 - RNA, 32 nt, Human
gaaauacucacuucccuccacccucaacagga

SEQ ID NO: 149109 - RNA, 24 nt, Human
gaaauacugcaagcaaacugaaaa

SEQ ID NO: 149110 - RNA, 32 nt, Human
gaaauacuggauuuauaaagcaaauggcuguu

SEQ ID NO: 149111 - RNA, 32 nt, Human
gaaauacuguaaccccagaauauuuccucuug

SEQ ID NO: 149112 - RNA, 32 nt, Human
gaaauacuuugagccauggccuugccaguguc

SEQ ID NO: 149113 - RNA, 32 nt, Human
gaaauagaaaaucugaacagaucaauaaugag

SEQ ID NO: 149114 - RNA, 32 nt, Human
gaaauagaaagccauauaacauagcuauaauu

SEQ ID NO: 149115 - RNA, 19 nt, Human
gaaauagaacagucugcug

SEQ ID NO: 149116 - RNA, 32 nt, Human
gaaauagaagacagaaagguuucaagacaaca

SEQ ID NO: 149117 - RNA, 32 nt, Human
gaaauagaauagaaugaaugaccccaaaauag

SEQ ID NO: 149118 - RNA, 32 nt, Human
gaaauagaauuugccuuucucauauuuaauua

SEQ ID NO: 149119 - RNA, 32 nt, Human
gaaauagauggaggcuaaaaaugaagguuuuu

SEQ ID NO: 149120 - RNA, 32 nt, Human
gaaauagcacacagcacucucuagucaauauc

SEQ ID NO: 149121 - RNA, 32 nt, Human
gaaauagcacagagguagcccaaaaaggggag

SEQ ID NO: 149122 - RNA, 32 nt, Human
gaaauagcacgcuucuuaaagcacucagcaug

SEQ ID NO: 149123 - RNA, 32 nt, Human
gaaauagcagggcuaaggaauuacuggcaagu

SEQ ID NO: 149124 - RNA, 32 nt, Human
gaaauagcaguacaaaaccauucuucugaaac

SEQ ID NO: 149125 - RNA, 32 nt, Human
gaaauagcagugauuucaugucccuguauguu

SEQ ID NO: 149126 - RNA, 22 nt, Human
gaaauagcauuuggaaauucug

SEQ ID NO: 149127 - RNA, 32 nt, Human
gaaauagcauuuucuuuaccaguauccuuaau

SEQ ID NO: 149128 - RNA, 32 nt, Human
gaaauagccaaagcuuuaaucuagccuaauuu

SEQ ID NO: 149129 - RNA, 18 nt, Human
gaaauagccacgaucuua

SEQ ID NO: 149130 - RNA, 23 nt, Human
gaaauagccauuuggaagcuuug

SEQ ID NO: 149131 - RNA, 32 nt, Human
gaaauagccgaacuccaggcugggcugagcca

SEQ ID NO: 149132 - RNA, 32 nt, Human
gaaauagccugagguggcucaggaagcggaga

SEQ ID NO: 149133 - RNA, 32 nt, Human
gaaauagcugcuguuuuauuacuggaccucaa

SEQ ID NO: 149134 - RNA, 19 nt, Human
gaaauagcuuguccuguca

SEQ ID NO: 149135 - RNA, 32 nt, Human
gaaauagcuuucugccggcugauggcuuguug

SEQ ID NO: 149136 - RNA, 32 nt, Human
gaaauaggaagagcagauugcugagugugaag

SEQ ID NO: 149137 - RNA, 32 nt, Human
gaaauaggaccagcuuuuaccugcccaguccu

SEQ ID NO: 149138 - RNA, 32 nt, Human
gaaauaggagaugcuuaacauugcuauacuac

SEQ ID NO: 149139 - RNA, 32 nt, Human
gaaauaggagcaaacccccaagaggcuuaauu

SEQ ID NO: 149140 - RNA, 32 nt, Human
gaaauaggaucuccacuggacccuugauucau

SEQ ID NO: 149141 - RNA, 25 nt, Human
gaaauaggcaccaguggugcaggga

SEQ ID NO: 149142 - RNA, 32 nt, Human
gaaauaggcguacuuuaaaugugcaaaaacug

SEQ ID NO: 149143 - RNA, 19 nt, Human
gaaauaggcuuccuuaacc

SEQ ID NO: 149144 - RNA, 24 nt, Human
gaaauagggaauauaauguaugaa

SEQ ID NO: 149145 - RNA, 32 nt, Human
gaaauagggucuuuaggaggugaguggaaguc

SEQ ID NO: 149146 - RNA, 21 nt, Human
gaaauagguagauuguaugaa

SEQ ID NO: 149147 - RNA, 32 nt, Human
gaaauagguauucuccucauuuugugaaagaa

SEQ ID NO: 149148 - RNA, 32 nt, Human
gaaauaggucugcuccucacagcuuugggaau

SEQ ID NO: 149149 - RNA, 32 nt, Human
gaaauaggucuguccacuccuggucauuggug

SEQ ID NO: 149150 - RNA, 32 nt, Human
gaaauaggugcuuccuuuggcuggcaaauguc

SEQ ID NO: 149151 - RNA, 32 nt, Human
gaaauaguccuaggaagcugggaccagcugug

SEQ ID NO: 149152 - RNA, 32 nt, Human
gaaauaguggagggauuaacaagaugccauac

SEQ ID NO: 149153 - RNA, 32 nt, Human
gaaauagugggagauggagaagagugaaugag

SEQ ID NO: 149154 - RNA, 32 nt, Human
gaaauaguugucugugcuuccuugguucaugc

SEQ ID NO: 149155 - RNA, 32 nt, Human
gaaauaguuuaaggagcuaaacagccauaaac

SEQ ID NO: 149156 - RNA, 32 nt, Human
gaaauaguuucccuccacccccaagcacuacc

SEQ ID NO: 149157 - RNA, 24 nt, Human
gaaauauaauccagagacugagaa

SEQ ID NO: 149158 - RNA, 32 nt, Human
gaaauauaauugugccacacacacauuacuuu

SEQ ID NO: 149159 - RNA, 32 nt, Human
gaaauauacagaaccaauguaugcuaaccaga

SEQ ID NO: 149160 - RNA, 22 nt, Human
gaaauauacaugaaacugaaga

SEQ ID NO: 149161 - RNA, 32 nt, Human
gaaauauacccccagccccuuccaacacacac

SEQ ID NO: 149162 - RNA, 20 nt, Human
gaaauauagguaagcagcuu

SEQ ID NO: 149163 - RNA, 19 nt, Human
gaaauauaguguaacaguu

SEQ ID NO: 149164 - RNA, 31 nt, Human
gaaauauauuuuaccauacauuuaaaguuuu

SEQ ID NO: 149165 - RNA, 32 nt, Human
gaaauaucacaaauugaaaugaaaguuuccca

SEQ ID NO: 149166 - RNA, 32 nt, Human
gaaauauccaaauauuuguuuuaaguuauaua

SEQ ID NO: 149167 - RNA, 18 nt, Human
gaaauaucccucauuuca

SEQ ID NO: 149168 - RNA, 32 nt, Human
gaaauaucuagcuauuuuaauagauagauacc

SEQ ID NO: 149169 - RNA, 32 nt, Human
gaaauaugacaccuuguggguuuccauauuaa

SEQ ID NO: 149170 - RNA, 32 nt, Human
gaaauaugagccauucuaagcuuuaagaaggg

SEQ ID NO: 149171 - RNA, 32 nt, Human
gaaauaugcaagcacauuggugaccuuguucu

SEQ ID NO: 149172 - RNA, 32 nt, Human
gaaauauggaggaagguuaaaaggggauuagu

SEQ ID NO: 149173 - RNA, 32 nt, Human
gaaauauguggucuccaaacagccucucccag

SEQ ID NO: 149174 - RNA, 23 nt, Human
gaaauaugugguuaaauuggaga

SEQ ID NO: 149175 - RNA, 32 nt, Human
gaaauauguguaugugcauguauguguaugca

SEQ ID NO: 149176 - RNA, 32 nt, Human
gaaauauguuuauaacagucuauuucuuuuaa

SEQ ID NO: 149177 - RNA, 22 nt, Human
gaaauauuagcucuuccuacac

SEQ ID NO: 149178 - RNA, 32 nt, Human
gaaauauuagguuggugcaaaaguaauugugg

SEQ ID NO: 149179 - RNA, 32 nt, Human
gaaauauuuuaaugcuaacuuguuaguuuucc

SEQ ID NO: 149180 - RNA, 32 nt, Human
gaaaucaaaacacaucggaaucaugcagcaag

SEQ ID NO: 149181 - RNA, 32 nt, Human
gaaaucaaaagauacugaaagaauggugaacu

SEQ ID NO: 149182 - RNA, 32 nt, Human
gaaaucaaaaucuccgcuuugccugcaaaagu

SEQ ID NO: 149183 - RNA, 32 nt, Human
gaaaucaaagagaucuugcaucuggcuggacu

SEQ ID NO: 149184 - RNA, 32 nt, Human
gaaaucaagcagcugugacaugaagugaauga

SEQ ID NO: 149185 - RNA, 32 nt, Human
gaaaucaaggagacagagcugacugcaugaug

SEQ ID NO: 149186 - RNA, 32 nt, Human
gaaaucacaagugcaaauaaaaagucauuuau

SEQ ID NO: 149187 - RNA, 32 nt, Human
gaaaucacaccacugcacucuagccugggcaa

SEQ ID NO: 149188 - RNA, 32 nt, Human
gaaaucacaccacuguacuccagccuggugac

SEQ ID NO: 149189 - RNA, 32 nt, Human
gaaaucacaccauugcacuccagcuugggcaa

SEQ ID NO: 149190 - RNA, 32 nt, Human
gaaaucacagacuuuugcuacaaaucgugugc

SEQ ID NO: 149191 - RNA, 32 nt, Human
gaaaucacagcccaggagggaggguagcuugg

SEQ ID NO: 149192 - RNA, 32 nt, Human
gaaaucacgccacuacacuccagccugggcaa

SEQ ID NO: 149193 - RNA, 32 nt, Human
gaaaucacuccucucccgcuccugggcgccgc

SEQ ID NO: 149194 - RNA, 32 nt, Human
gaaaucagaaaugagaugaggggaagaagcaa

SEQ ID NO: 149195 - RNA, 32 nt, Human
gaaaucagaagugcaaaggugugcaaacuugu

SEQ ID NO: 149196 - RNA, 32 nt, Human
gaaaucagacacacugacucaaaccacgcaag

SEQ ID NO: 149197 - RNA, 32 nt, Human
gaaaucagaguccauacugaucaguuuuacca

SEQ ID NO: 149198 - RNA, 32 nt, Human
gaaaucagcuuuggagaugcuuucacucuguc

SEQ ID NO: 149199 - RNA, 21 nt, Human
gaaaucagggagcucuuaacc

SEQ ID NO: 149200 - RNA, 32 nt, Human
gaaaucagguggcuucugccacccugagcccu

SEQ ID NO: 149201 - RNA, 32 nt, Human
gaaaucagucucucugguuuguuuuguauuau

SEQ ID NO: 149202 - RNA, 32 nt, Human
gaaaucaguuucucaaacugagcuucagaaag

SEQ ID NO: 149203 - RNA, 32 nt, Human
gaaaucauauuaguagcucacacgucaacagu

SEQ ID NO: 149204 - RNA, 32 nt, Human
gaaaucaucauagucuaagguucaguuguaga

SEQ ID NO: 149205 - RNA, 32 nt, Human
gaaaucaucuggaagcaggaggcaaaaagcug

SEQ ID NO: 149206 - RNA, 32 nt, Human
gaaaucaugaaauuaacuaacaccuuagccuu

SEQ ID NO: 149207 - RNA, 32 nt, Human
gaaaucaugaaugucaugaaugugggaaaacc

SEQ ID NO: 149208 - RNA, 32 nt, Human
gaaaucaugccacugcacccuagcuugggugg

SEQ ID NO: 149209 - RNA, 32 nt, Human
gaaauccacccaguguuuaaaaagcaacuugg

SEQ ID NO: 149210 - RNA, 32 nt, Human
gaaauccaccuccccaaccccaaucaagaacc

SEQ ID NO: 149211 - RNA, 32 nt, Human
gaaauccaccuuccucuucacacugagcccuc

SEQ ID NO: 149212 - RNA, 32 nt, Human
gaaauccacugcacacuguugccuauacacuu

SEQ ID NO: 149213 - RNA, 32 nt, Human
gaaauccagaagcacauuuuucugcacaaaca

SEQ ID NO: 149214 - RNA, 32 nt, Human
gaaauccaggagccacaggaagcagugagcuu

SEQ ID NO: 149215 - RNA, 32 nt, Human
gaaauccaguuauuuuccgcccucaaaaugac

SEQ ID NO: 149216 - RNA, 32 nt, Human
gaaauccaguucagggagaagagaauucaaaa

SEQ ID NO: 149217 - RNA, 32 nt, Human
gaaauccauauacacacguagaaaaauacaua

SEQ ID NO: 149218 - RNA, 32 nt, Human
gaaaucccaaaaggugucaugcuuggcuccag

SEQ ID NO: 149219 - RNA, 32 nt, Human
gaaaucccaaagauugaugucuaccucuauga

SEQ ID NO: 149220 - RNA, 17 nt, Human
gaaaucccaagacugcu

SEQ ID NO: 149221 - RNA, 32 nt, Human
gaaaucccacugaaaugugguggagggaaagc

SEQ ID NO: 149222 - RNA, 18 nt, Human
gaaaucccagaccuguug

SEQ ID NO: 149223 - RNA, 19 nt, Human
gaaaucccagcaaucugcu

SEQ ID NO: 149224 - RNA, 32 nt, Human
gaaaucccagcacuuugggagacugaggaggg

SEQ ID NO: 149225 - RNA, 32 nt, Human
gaaaucccagcuaucaggaggcugaggcagag

SEQ ID NO: 149226 - RNA, 32 nt, Human
gaaaucccagggcaaauguuuacauuuuguau

SEQ ID NO: 149227 - RNA, 32 nt, Human
gaaaucccaguucauguugcucagaagagaau

SEQ ID NO: 149228 - RNA, 20 nt, Human
gaaaucccauucucuggcug

SEQ ID NO: 149229 - RNA, 32 nt, Human
gaaauccccagggccugugaacguggcucucu

SEQ ID NO: 149230 - RNA, 32 nt, Human
gaaaucccccucucugcccuggcuggauccgg

SEQ ID NO: 149231 - RNA, 32 nt, Human
gaaauccccugccuguuccccuuaaaaugggc

SEQ ID NO: 149232 - RNA, 32 nt, Human
gaaauccccuggccuucagccugcugugauuu

SEQ ID NO: 149233 - RNA, 32 nt, Human
gaaauccccuugcccaguagaauggacugauc

SEQ ID NO: 149234 - RNA, 18 nt, Human
gaaaucccguuucuacug

SEQ ID NO: 149235 - RNA, 32 nt, Human
gaaaucccucuaccuucucugggucuggcauu

SEQ ID NO: 149236 - RNA, 17 nt, Human
gaaaucccucucugcug

SEQ ID NO: 149237 - RNA, 18 nt, Human
gaaaucccuguuucucug

SEQ ID NO: 149238 - RNA, 32 nt, Human
gaaaucccuuucaacagagucagcugcuaacu

SEQ ID NO: 149239 - RNA, 20 nt, Human
gaaaucccuuuguucugcug

SEQ ID NO: 149240 - RNA, 32 nt, Human
gaaauccguaacucggcuguguucuguucaug

SEQ ID NO: 149241 - RNA, 32 nt, Human
gaaauccuaccuuugaauucaagaacauuugg

SEQ ID NO: 149242 - RNA, 32 nt, Human
gaaauccucacccugcgucuucccaaguuagc

SEQ ID NO: 149243 - RNA, 32 nt, Human
gaaauccucuacucugagcuuugccucugagc

SEQ ID NO: 149244 - RNA, 32 nt, Human
gaaauccucugcugaagaccccugguucuguu

SEQ ID NO: 149245 - RNA, 32 nt, Human
gaaauccugccacugcacaccagccuggguga

SEQ ID NO: 149246 - RNA, 32 nt, Human
gaaauccugcucaugguauguccccagugguu

SEQ ID NO: 149247 - RNA, 32 nt, Human
gaaauccuucuccagccagcugcugcagacaa

SEQ ID NO: 149248 - RNA, 32 nt, Human
gaaauccuugggagccggaucuccccaucucc

SEQ ID NO: 149249 - RNA, 32 nt, Human
gaaauccuuuuauugccaccucaggaccuggc

SEQ ID NO: 149250 - RNA, 32 nt, Human
gaaaucgaagaggcagaaagaaacaacaaaac

SEQ ID NO: 149251 - RNA, 32 nt, Human
gaaaucgacacacaaaacagugcacauuuagu

SEQ ID NO: 149252 - RNA, 32 nt, Human
gaaaucgcaccacugcacuccagccugggcga

SEQ ID NO: 149253 - RNA, 32 nt, Human
gaaaucgcaccgcugcacuccagccuggcaac

SEQ ID NO: 149254 - RNA, 32 nt, Human
gaaaucgccguguuacuguugcacugaugucc

SEQ ID NO: 149255 - RNA, 32 nt, Human
gaaaucgcgccacugcacuccagccuggguga

SEQ ID NO: 149256 - RNA, 32 nt, Human
gaaaucgcguaccacacuccagccugggugac

SEQ ID NO: 149257 - RNA, 32 nt, Human
gaaaucggcacauuccauggaggaaggagucc

SEQ ID NO: 149258 - RNA, 32 nt, Human
gaaaucggccagaagccccucucagguuuauu

SEQ ID NO: 149259 - RNA, 32 nt, Human
gaaaucgugacuucuguguucucuccauuuga

SEQ ID NO: 149260 - RNA, 32 nt, Human
gaaaucuaaaaucuccaaaaacuccuacccuu

SEQ ID NO: 149261 - RNA, 23 nt, Human
gaaaucuaaugguggagugaaaa

SEQ ID NO: 149262 - RNA, 32 nt, Human
gaaaucuaggacugugcuaaucaguaucaaac

SEQ ID NO: 149263 - RNA, 20 nt, Human
gaaaucuccaacucuuaacc

SEQ ID NO: 149264 - RNA, 32 nt, Human
gaaaucuccagaaccucugaaacacauucuug

SEQ ID NO: 149265 - RNA, 32 nt, Human
gaaaucucggugcacuaggaagugaaucccgc

SEQ ID NO: 149266 - RNA, 32 nt, Human
gaaaucucuuacuacauuauguuuggauauac

SEQ ID NO: 149267 - RNA, 32 nt, Human
gaaaucucuuucuccucccccgccccuccgcc

SEQ ID NO: 149268 - RNA, 32 nt, Human
gaaaucugaagaaccugcuguguuuagauguc

SEQ ID NO: 149269 - RNA, 32 nt, Human
gaaaucugagccauggacuuuccccagcacag

SEQ ID NO: 149270 - RNA, 32 nt, Human
gaaaucugcaagagaggcccaggcuggggcag

SEQ ID NO: 149271 - RNA, 32 nt, Human
gaaaucugcuucucuucgauggaaagauauaa

SEQ ID NO: 149272 - RNA, 16 nt, Human
gaaaucuguaauagcu

SEQ ID NO: 149273 - RNA, 32 nt, Human
gaaaucuuagccucuaaacaguaucuagccgu

SEQ ID NO: 149274 - RNA, 32 nt, Human
gaaaucuuagccugucauucagagccauucaa

SEQ ID NO: 149275 - RNA, 32 nt, Human
gaaaucuuaugaaucauacauacacucaacaa

SEQ ID NO: 149276 - RNA, 32 nt, Human
gaaaucuucacaauuuauguucagagauugca

SEQ ID NO: 149277 - RNA, 18 nt, Human
gaaaucuucauucugcug

SEQ ID NO: 149278 - RNA, 32 nt, Human
gaaaucuucccaaggcugcagacaccgacgga

SEQ ID NO: 149279 - RNA, 32 nt, Human
gaaaucuucccacccauagacuggcugggcca

SEQ ID NO: 149280 - RNA, 32 nt, Human
gaaaucuucccgaucguuaauaacuccucagg

SEQ ID NO: 149281 - RNA, 32 nt, Human
gaaaucuucccucuuggcugcccccagguauu

SEQ ID NO: 149282 - RNA, 21 nt, Human
gaaaucuuccuguaccugcug

SEQ ID NO: 149283 - RNA, 32 nt, Human
gaaaucuucuaaccuaccagagccuagaugag

SEQ ID NO: 149284 - RNA, 32 nt, Human
gaaaucuugcagcuggguggcacugccaugca

SEQ ID NO: 149285 - RNA, 32 nt, Human
gaaaucuugccuccuccagccagcuucuuaau

SEQ ID NO: 149286 - RNA, 32 nt, Human
gaaaucuugccuuuuaauguaucauuaauuag

SEQ ID NO: 149287 - RNA, 19 nt, Human
gaaaucuuuccagaagauc

SEQ ID NO: 149288 - RNA, 32 nt, Human
gaaaucuuugaauucugaucccuuccugucuu

SEQ ID NO: 149289 - RNA, 32 nt, Human
gaaaucuuugcauauugcuaugggcuuccaag

SEQ ID NO: 149290 - RNA, 32 nt, Human
gaaaugaaaacuuguguucacacagaaaccug

SEQ ID NO: 149291 - RNA, 32 nt, Human
gaaaugaaagaauuguguauagaauggaaggg

SEQ ID NO: 149292 - RNA, 32 nt, Human
gaaaugaaagaggcuggaaauuuggaaggaau

SEQ ID NO: 149293 - RNA, 28 nt, Human
gaaaugaaagaugauggaaagaugcaug

SEQ ID NO: 149294 - RNA, 32 nt, Human
gaaaugaacaucugccagcugugucauggacu

SEQ ID NO: 149295 - RNA, 32 nt, Human
gaaaugaacguccuuugaggucagguggauga

SEQ ID NO: 149296 - RNA, 32 nt, Human
gaaaugaacuuacugguuauagugggaauaua

SEQ ID NO: 149297 - RNA, 32 nt, Human
gaaaugaagaugaaaauguauucaucuuaauu

SEQ ID NO: 149298 - RNA, 28 nt, Human
gaaaugaagauggaggaggcagugggaa

SEQ ID NO: 149299 - RNA, 32 nt, Human
gaaaugaaggcagagagauugaguaacuugca

SEQ ID NO: 149300 - RNA, 17 nt, Human
gaaaugaauaacagcuu

SEQ ID NO: 149301 - RNA, 32 nt, Human
gaaaugaaucagacaugggcucugccuguggg

SEQ ID NO: 149302 - RNA, 23 nt, Human
gaaaugaaugcaguaaaauugaa

SEQ ID NO: 149303 - RNA, 32 nt, Human
gaaaugacaccaaaauuccucagccccuacuc

SEQ ID NO: 149304 - RNA, 32 nt, Human
gaaaugacagcagugguacuaccugguaaaag

SEQ ID NO: 149305 - RNA, 28 nt, Human
gaaaugacagugcuggcgccagccugga

SEQ ID NO: 149306 - RNA, 32 nt, Human
gaaaugacgccauugcacuccagccuaggcaa

SEQ ID NO: 149307 - RNA, 32 nt, Human
gaaaugacuaugcaaaauucacccagaaaauc

SEQ ID NO: 149308 - RNA, 32 nt, Human
gaaaugacucacaccaccuuauagcuauacaa

SEQ ID NO: 149309 - RNA, 32 nt, Human
gaaaugacucuuaauuugaauuuuggagugcu

SEQ ID NO: 149310 - RNA, 32 nt, Human
gaaaugacugcaaaugagggggaagcuuuuua

SEQ ID NO: 149311 - RNA, 32 nt, Human
gaaaugacuguacacaaaugcuaaucagugau

SEQ ID NO: 149312 - RNA, 32 nt, Human
gaaaugagaaaagagugagaacuaggugugca

SEQ ID NO: 149313 - RNA, 32 nt, Human
gaaaugagaaacuuccucccaccccagacauu

SEQ ID NO: 149314 - RNA, 23 nt, Human
gaaaugagaaauaauuuccuucu

SEQ ID NO: 149315 - RNA, 32 nt, Human
gaaaugagaacaaagaggaaaaugguaaaaac

SEQ ID NO: 149316 - RNA, 32 nt, Human
gaaaugagaugguagccaaacgcccaguuacg

SEQ ID NO: 149317 - RNA, 32 nt, Human
gaaaugagcacgcauggaaaaguuucccaguc

SEQ ID NO: 149318 - RNA, 21 nt, Human
gaaaugagcagguuggcagcu

SEQ ID NO: 149319 - RNA, 32 nt, Human
gaaaugagccagugccccaggucugcuggcca

SEQ ID NO: 149320 - RNA, 22 nt, Human
gaaaugagcucaaguacaugaa

SEQ ID NO: 149321 - RNA, 32 nt, Human
gaaaugagcuuugcaaagacuuuuuaugucua

SEQ ID NO: 149322 - RNA, 20 nt, Human
gaaaugaggagaaacaguuu

SEQ ID NO: 149323 - RNA, 32 nt, Human
gaaaugaggucucgccauauugcucagacugg

SEQ ID NO: 149324 - RNA, 32 nt, Human
gaaaugaggucucgccauguugcucagacugg

SEQ ID NO: 149325 - RNA, 32 nt, Human
gaaaugagguuucauaauucugccuuuugcag

SEQ ID NO: 149326 - RNA, 17 nt, Human
gaaaugaguguggcacu

SEQ ID NO: 149327 - RNA, 32 nt, Human
gaaaugaguguggcacucaucuguauccagaa

SEQ ID NO: 149328 - RNA, 32 nt, Human
gaaaugaguucagagcuuuuuagaacugugag

SEQ ID NO: 149329 - RNA, 32 nt, Human
gaaaugauaagacucaaagcaggggccaggcc

SEQ ID NO: 149330 - RNA, 32 nt, Human
gaaaugauagcuuuguuaaucuagccucuuuc

SEQ ID NO: 149331 - RNA, 32 nt, Human
gaaaugauauauucuggcugggcacaguggcu

SEQ ID NO: 149332 - RNA, 32 nt, Human
gaaaugaugugauugucgggggugggguggga

SEQ ID NO: 149333 - RNA, 32 nt, Human
gaaaugauuggguagagucucuggaagguuuu

SEQ ID NO: 149334 - RNA, 22 nt, Human
gaaaugcaaagaggacugagaa

SEQ ID NO: 149335 - RNA, 32 nt, Human
gaaaugcaaagcaaagcugaagaacuaacuau

SEQ ID NO: 149336 - RNA, 23 nt, Human
gaaaugcaagagaaacugcagaa

SEQ ID NO: 149337 - RNA, 32 nt, Human
gaaaugcacaaugcacacagaccuuccuagga

SEQ ID NO: 149338 - RNA, 32 nt, Human
gaaaugcagaaaucaccugucuucugcauggg

SEQ ID NO: 149339 - RNA, 32 nt, Human
gaaaugcagcagcuaaacuuggaaggaaagaa

SEQ ID NO: 149340 - RNA, 32 nt, Human
gaaaugcagcguuuagagacauguccaguggc

SEQ ID NO: 149341 - RNA, 32 nt, Human
gaaaugcaggguggggguggggaacccugagc

SEQ ID NO: 149342 - RNA, 32 nt, Human
gaaaugcaggugagggugggaggcagaaaaga

SEQ ID NO: 149343 - RNA, 32 nt, Human
gaaaugcagguucuagggcuucucccagccuu

SEQ ID NO: 149344 - RNA, 32 nt, Human
gaaaugcauacagggcaugagcaacugaggca

SEQ ID NO: 149345 - RNA, 28 nt, Human
gaaaugcaucugucuuagaaacuggaga

SEQ ID NO: 149346 - RNA, 32 nt, Human
gaaaugcaucuucuuacugcaucagaccuucc

SEQ ID NO: 149347 - RNA, 26 nt, Human
gaaaugcauuugaugagugcuggaaa

SEQ ID NO: 149348 - RNA, 32 nt, Human
gaaaugccaagugccugcuuaguagcuuugga

SEQ ID NO: 149349 - RNA, 32 nt, Human
gaaaugccagugguggagguggguguuuggga

SEQ ID NO: 149350 - RNA, 32 nt, Human
gaaaugcccuuaaaggauuuugaauagauuua

SEQ ID NO: 149351 - RNA, 32 nt, Human
gaaaugccucugcguggugccaugaaggaaag

SEQ ID NO: 149352 - RNA, 20 nt, Human
gaaaugccucugggcugcug

SEQ ID NO: 149353 - RNA, 32 nt, Human
gaaaugccuggcagacaccauguaaguuauaa

SEQ ID NO: 149354 - RNA, 28 nt, Human
gaaaugccuggugcuuccgccugggccc

SEQ ID NO: 149355 - RNA, 32 nt, Human
gaaaugcuacaaagccaccugcugaucaucaa

SEQ ID NO: 149356 - RNA, 21 nt, Human
gaaaugcuacugcuuuuucca

SEQ ID NO: 149357 - RNA, 19 nt, Human
gaaaugcuagacauggaga

SEQ ID NO: 149358 - RNA, 32 nt, Human
gaaaugcucucucaccaacuugccccacuguc

SEQ ID NO: 149359 - RNA, 32 nt, Human
gaaaugcucuuuaugaaaaugcagcauuucuc

SEQ ID NO: 149360 - RNA, 32 nt, Human
gaaaugcugaaguaucggcauuacauguguuu

SEQ ID NO: 149361 - RNA, 32 nt, Human
gaaaugcugacguaaagguaucagggccgggc

SEQ ID NO: 149362 - RNA, 32 nt, Human
gaaaugcugagauaagcuuagcacuugaguug

SEQ ID NO: 149363 - RNA, 28 nt, Human
gaaaugcugcugcugccauuucaacugu

SEQ ID NO: 149364 - RNA, 32 nt, Human
gaaaugcuggcauuugcaccuaccucacagag

SEQ ID NO: 149365 - RNA, 32 nt, Human
gaaaugcugggaacaaugacuauaagacaugc

SEQ ID NO: 149366 - RNA, 32 nt, Human
gaaaugcuggggaggugggggcagaucacauc

SEQ ID NO: 149367 - RNA, 32 nt, Human
gaaaugcuguccagcaggaagaucuguuucag

SEQ ID NO: 149368 - RNA, 32 nt, Human
gaaaugcuugggauuagaaauguuucagauuu

SEQ ID NO: 149369 - RNA, 32 nt, Human
gaaaugcuuuagaaucugaacuuuuuaagaca

SEQ ID NO: 149370 - RNA, 32 nt, Human
gaaauggaaacaaaaagccaacagggcagggg

SEQ ID NO: 149371 - RNA, 32 nt, Human
gaaauggaacuccuaaauaaacuaguaugaaa

SEQ ID NO: 149372 - RNA, 28 nt, Human
gaaauggaagagccuccgcaagaggcuc

SEQ ID NO: 149373 - RNA, 32 nt, Human
gaaauggaagucagaagugagugaccuguuuu

SEQ ID NO: 149374 - RNA, 28 nt, Human
gaaauggaagugagacagugguggugga

SEQ ID NO: 149375 - RNA, 32 nt, Human
gaaauggaccguguuuaaaugaaugcuucccu

SEQ ID NO: 149376 - RNA, 17 nt, Human
gaaauggagaacaguuu

SEQ ID NO: 149377 - RNA, 32 nt, Human
gaaauggagaggagguaggagggugaggucca

SEQ ID NO: 149378 - RNA, 32 nt, Human
gaaauggagaggggcaagcagugaggcugccu

SEQ ID NO: 149379 - RNA, 21 nt, Human
gaaauggagaguuuaauagcu

SEQ ID NO: 149380 - RNA, 32 nt, Human
gaaauggaggcagaggugugggaggcagaagg

SEQ ID NO: 149381 - RNA, 32 nt, Human
gaaauggaggcucagggggugaagggacugau

SEQ ID NO: 149382 - RNA, 32 nt, Human
gaaauggaggguggaaggugugaucuguggga

SEQ ID NO: 149383 - RNA, 32 nt, Human
gaaauggagucaugugcugcugcuucaucuag

SEQ ID NO: 149384 - RNA, 32 nt, Human
gaaauggaguuuugcucuuguugcccaggcug

SEQ ID NO: 149385 - RNA, 32 nt, Human
gaaauggauguuagggaaguaacaguguccac

SEQ ID NO: 149386 - RNA, 32 nt, Human
gaaauggcagacgaagcaagaagauugggaga

SEQ ID NO: 149387 - RNA, 32 nt, Human
gaaauggcagagccaggaguuggaccuagguu

SEQ ID NO: 149388 - RNA, 16 nt, Human
gaaauggcagcaguuu

SEQ ID NO: 149389 - RNA, 32 nt, Human
gaaauggcaguuacuggcugggcgcaguggcu

SEQ ID NO: 149390 - RNA, 32 nt, Human
gaaauggcccagcuuggcucugccuucugcag

SEQ ID NO: 149391 - RNA, 32 nt, Human
gaaauggcccgggggccucugcaccuggucug

SEQ ID NO: 149392 - RNA, 28 nt, Human
gaaauggcccugagccucacccgagcag

SEQ ID NO: 149393 - RNA, 32 nt, Human
gaaauggccgaaaacugugagacaugcuaugg

SEQ ID NO: 149394 - RNA, 32 nt, Human
gaaauggcgacacugcacugcaggcugggcua

SEQ ID NO: 149395 - RNA, 32 nt, Human
gaaauggcgccacugcacuccagccuggguaa

SEQ ID NO: 149396 - RNA, 32 nt, Human
gaaauggcgguggcucacgccuguaaucccag

SEQ ID NO: 149397 - RNA, 32 nt, Human
gaaauggcuaggacagggaacagggaagcacu

SEQ ID NO: 149398 - RNA, 32 nt, Human
gaaauggcucaaaagcuucagcucuuucugug

SEQ ID NO: 149399 - RNA, 32 nt, Human
gaaauggcuguucacaggaacccacaggccac

SEQ ID NO: 149400 - RNA, 32 nt, Human
gaaauggcuuugcuuuggcugucgucuucugc

SEQ ID NO: 149401 - RNA, 32 nt, Human
gaaauggcuuuggagaaaacagacaacaucca

SEQ ID NO: 149402 - RNA, 32 nt, Human
gaaaugggaacacuggcugccucuccaaaccc

SEQ ID NO: 149403 - RNA, 18 nt, Human
gaaaugggaaugaugcuu

SEQ ID NO: 149404 - RNA, 19 nt, Human
gaaaugggacgucgcgcuu

SEQ ID NO: 149405 - RNA, 19 nt, Human
gaaaugggacuuaaugcuu

SEQ ID NO: 149406 - RNA, 32 nt, Human
gaaaugggagggagcaggauggagagcaggau

SEQ ID NO: 149407 - RNA, 32 nt, Human
gaaaugggaguggaugcagaacagcuugucaa

SEQ ID NO: 149408 - RNA, 18 nt, Human
gaaaugggcaaaauagcu

SEQ ID NO: 149409 - RNA, 32 nt, Human
gaaaugggcaagggucaaagagacucaugggc

SEQ ID NO: 149410 - RNA, 32 nt, Human
gaaaugggcaggaaugacaggagaugagcuug

SEQ ID NO: 149411 - RNA, 32 nt, Human
gaaaugggcaguucucccagggagugagcagc

SEQ ID NO: 149412 - RNA, 17 nt, Human
gaaaugggccgugagcu

SEQ ID NO: 149413 - RNA, 32 nt, Human
gaaaugggcucgcagagauuugaauccugguc

SEQ ID NO: 149414 - RNA, 20 nt, Human
gaaaugggcucuauaugcuu

SEQ ID NO: 149415 - RNA, 32 nt, Human
gaaaugggcuguuccaacagaccacggagcac

SEQ ID NO: 149416 - RNA, 20 nt, Human
gaaaugggcuuuauaugcuu

SEQ ID NO: 149417 - RNA, 17 nt, Human
gaaauggggauaauacu

SEQ ID NO: 149418 - RNA, 32 nt, Human
gaaauggggcagccauccaucccuucaagcau

SEQ ID NO: 149419 - RNA, 32 nt, Human
gaaauggggcugguaguggauggugcaaccug

SEQ ID NO: 149420 - RNA, 17 nt, Human
gaaaugggguuacugcu

SEQ ID NO: 149421 - RNA, 16 nt, Human
gaaauggguaauaguu

SEQ ID NO: 149422 - RNA, 15 nt, Human
gaaauggguacagcu

SEQ ID NO: 149423 - RNA, 19 nt, Human
gaaaugggugaaugagcuu

SEQ ID NO: 149424 - RNA, 18 nt, Human
gaaaugggugauguagcu

SEQ ID NO: 149425 - RNA, 18 nt, Human
gaaauggguguauuuagc

SEQ ID NO: 149426 - RNA, 19 nt, Human
gaaaugggugucacugcuu

SEQ ID NO: 149427 - RNA, 15 nt, Human
gaaauggguugguuu

SEQ ID NO: 149428 - RNA, 19 nt, Human
gaaauggguuguuuagcuu

SEQ ID NO: 149429 - RNA, 22 nt, Human
gaaauggguuucugcuaaugaa

SEQ ID NO: 149430 - RNA, 19 nt, Human
gaaauggguuugacagucc

SEQ ID NO: 149431 - RNA, 19 nt, Human
gaaaugguagucgugccaa

SEQ ID NO: 149432 - RNA, 32 nt, Human
gaaauggucauccucuggaccauggagacuag

SEQ ID NO: 149433 - RNA, 32 nt, Human
gaaauggucuucaacuccucugguccaagcuc

SEQ ID NO: 149434 - RNA, 32 nt, Human
gaaauggucuuucucccuuccucagagagcaa

SEQ ID NO: 149435 - RNA, 32 nt, Human
gaaauggugagggcacagugagcuugaaggcu

SEQ ID NO: 149436 - RNA, 32 nt, Human
gaaauggugcaggcuuucucugcccagucugg

SEQ ID NO: 149437 - RNA, 32 nt, Human
gaaauggugccacugcacuccagucugggcaa

SEQ ID NO: 149438 - RNA, 32 nt, Human
gaaauggugccuguaaagcucucagcauuggc

SEQ ID NO: 149439 - RNA, 32 nt, Human
gaaaugguggcaccuccagacacccugaaacu

SEQ ID NO: 149440 - RNA, 32 nt, Human
gaaaugguuccuuccggcuuggcguucucucc

SEQ ID NO: 149441 - RNA, 32 nt, Human
gaaauguaacaucguuuuucacuucaaaauca

SEQ ID NO: 149442 - RNA, 32 nt, Human
gaaauguacaagcccuggauuugcuacagagu

SEQ ID NO: 149443 - RNA, 32 nt, Human
gaaauguaucuccugcaccagccugggccucg

SEQ ID NO: 149444 - RNA, 32 nt, Human
gaaauguaugguaaaugucacagagcuacaac

SEQ ID NO: 149445 - RNA, 32 nt, Human
gaaauguauuucuguucuucaggaguucacau

SEQ ID NO: 149446 - RNA, 32 nt, Human
gaaauguccaguuuuccacagaaaaauuauga

SEQ ID NO: 149447 - RNA, 32 nt, Human
gaaauguccugaagucacacagcuaauggcag

SEQ ID NO: 149448 - RNA, 32 nt, Human
gaaaugucguugcuuaguaauguaccuggagc

SEQ ID NO: 149449 - RNA, 32 nt, Human
gaaaugucucacagcccagcuggguugcaauu

SEQ ID NO: 149450 - RNA, 20 nt, Human
gaaaugucucuacccuuaga

SEQ ID NO: 149451 - RNA, 32 nt, Human
gaaaugugcaaguguuugauucaugccauuug

SEQ ID NO: 149452 - RNA, 32 nt, Human
gaaaugugcauuuugucaucuauaagcaagaa

SEQ ID NO: 149453 - RNA, 32 nt, Human
gaaauguggaaaugcauggccuguuaaagcug

SEQ ID NO: 149454 - RNA, 32 nt, Human
gaaauguggaaauggaggcaucaggcacauua

SEQ ID NO: 149455 - RNA, 32 nt, Human
gaaauguggaaggcauuccaucaacaucagag

SEQ ID NO: 149456 - RNA, 32 nt, Human
gaaauguggccgggaagcagaguucaugugag

SEQ ID NO: 149457 - RNA, 32 nt, Human
gaaauguggugaggaagugagacagaccucuu

SEQ ID NO: 149458 - RNA, 32 nt, Human
gaaaugugguuugguuccugaccuaggcuugg

SEQ ID NO: 149459 - RNA, 32 nt, Human
gaaauguguuagacacagucccuggucugcag

SEQ ID NO: 149460 - RNA, 32 nt, Human
gaaauguucaaacuuagacaaggacaucucag

SEQ ID NO: 149461 - RNA, 32 nt, Human
gaaauguucccaagcccauucuuaccaagaac

SEQ ID NO: 149462 - RNA, 32 nt, Human
gaaauguuccugagucacgcugaggagaggcu

SEQ ID NO: 149463 - RNA, 32 nt, Human
gaaauguugucaaagaguacaauguuuuaguu

SEQ ID NO: 149464 - RNA, 31 nt, Human
gaaauguuuagcuaaacgcuguugaacauug

SEQ ID NO: 149465 - RNA, 32 nt, Human
gaaauguuuccaagcacucuggaaaacaaucu

SEQ ID NO: 149466 - RNA, 32 nt, Human
gaaauguuugacaucugaagcucucuucacac

SEQ ID NO: 149467 - RNA, 32 nt, Human
gaaauguuuucuccaucucccuaccagacuua

SEQ ID NO: 149468 - RNA, 32 nt, Human
gaaauguuuucugccuuccugcuucuagaacc

SEQ ID NO: 149469 - RNA, 23 nt, Human
gaaauuaaaaacaaaacaaaaca

SEQ ID NO: 149470 - RNA, 23 nt, Human
gaaauuaaauuugaacacaguga

SEQ ID NO: 149471 - RNA, 32 nt, Human
gaaauuaacacccccaagagcugcagugagca

SEQ ID NO: 149472 - RNA, 32 nt, Human
gaaauuaacuuacaaucuaaccagccaucaua

SEQ ID NO: 149473 - RNA, 32 nt, Human
gaaauuacauggugcugaccacaaaguuucug

SEQ ID NO: 149474 - RNA, 32 nt, Human
gaaauuaccaauauaugaacucuaggcaucau

SEQ ID NO: 149475 - RNA, 32 nt, Human
gaaauuaccuggacccagaggguguaggaaug

SEQ ID NO: 149476 - RNA, 32 nt, Human
gaaauuacuacaaaauuugaaauuuagcuugg

SEQ ID NO: 149477 - RNA, 32 nt, Human
gaaauuacuucugcuucacuuacugccuuuuc

SEQ ID NO: 149478 - RNA, 32 nt, Human
gaaauuagaaacuagggacaagggggaggaaa

SEQ ID NO: 149479 - RNA, 32 nt, Human
gaaauuagaagaggcaagaaacaacuccccac

SEQ ID NO: 149480 - RNA, 32 nt, Human
gaaauuagagguggaaacacacuggaaccuca

SEQ ID NO: 149481 - RNA, 32 nt, Human
gaaauuagaguugcaguaaacuuucaaugcug

SEQ ID NO: 149482 - RNA, 32 nt, Human
gaaauuaggacagagacauagagggaagacca

SEQ ID NO: 149483 - RNA, 32 nt, Human
gaaauuagugggcugguguaucuggaaagagg

SEQ ID NO: 149484 - RNA, 32 nt, Human
gaaauuauaacaaaagauacuuucuaacagua

SEQ ID NO: 149485 - RNA, 32 nt, Human
gaaauuaucccuuuguucuuugggaggacuug

SEQ ID NO: 149486 - RNA, 32 nt, Human
gaaauuaugcaucauuuuccuucaagaaugac

SEQ ID NO: 149487 - RNA, 32 nt, Human
gaaauuaugccacugcacuccagccugggcaa

SEQ ID NO: 149488 - RNA, 31 nt, Human
gaaauuaugcuuuucuggugcaugaaacauu

SEQ ID NO: 149489 - RNA, 32 nt, Human
gaaauucaacucugucauugccaucuguguag

SEQ ID NO: 149490 - RNA, 32 nt, Human
gaaauucaaggcaacggaacagcucuagaugg

SEQ ID NO: 149491 - RNA, 32 nt, Human
gaaauucaaggcaucuguauuaggcaaaugug

SEQ ID NO: 149492 - RNA, 32 nt, Human
gaaauucacaccuuugaaaaacaaauaaaaau

SEQ ID NO: 149493 - RNA, 31 nt, Human
gaaauucacagcugaggaacucagcaacaug

SEQ ID NO: 149494 - RNA, 32 nt, Human
gaaauucacaugcaccuaaauccucacuuuga

SEQ ID NO: 149495 - RNA, 32 nt, Human
gaaauucacuaggaagaguagcagguauaaug

SEQ ID NO: 149496 - RNA, 32 nt, Human
gaaauucagagcaaguuccugagugcguggau

SEQ ID NO: 149497 - RNA, 32 nt, Human
gaaauucagcaaucaguacaaagccacaauag

SEQ ID NO: 149498 - RNA, 32 nt, Human
gaaauucagcuuuugcagaagcaguguuucua

SEQ ID NO: 149499 - RNA, 32 nt, Human
gaaauucaggcugggugcaguggcucacacuu

SEQ ID NO: 149500 - RNA, 32 nt, Human
gaaauucaguccugauuugucugccauccaga

SEQ ID NO: 149501 - RNA, 32 nt, Human
gaaauuccaccaacauccagaccaaaaagaaa

SEQ ID NO: 149502 - RNA, 32 nt, Human
gaaauuccagccuguccauggcaccagacucc

SEQ ID NO: 149503 - RNA, 32 nt, Human
gaaauuccaggcagugggugaagaggacgagg

SEQ ID NO: 149504 - RNA, 32 nt, Human
gaaauuccaggucuucuugcuuaacuuauaug

SEQ ID NO: 149505 - RNA, 32 nt, Human
gaaauucccugucuccccuuaaccagcacugg

SEQ ID NO: 149506 - RNA, 32 nt, Human
gaaauucccugucuugcccugggccagagcug

SEQ ID NO: 149507 - RNA, 32 nt, Human
gaaauucccuuugagcccccagaugguauugc

SEQ ID NO: 149508 - RNA, 32 nt, Human
gaaauuccuaaagaagagaaggacccuggaau

SEQ ID NO: 149509 - RNA, 32 nt, Human
gaaauuccuccccuuauucuuccuugaagugc

SEQ ID NO: 149510 - RNA, 32 nt, Human
gaaauuccuucaaagaaggcaguccuuuggga

SEQ ID NO: 149511 - RNA, 32 nt, Human
gaaauuccuuguccuuucucuccuggauguau

SEQ ID NO: 149512 - RNA, 32 nt, Human
gaaauucuaaauauuugagaagagccaauuuu

SEQ ID NO: 149513 - RNA, 32 nt, Human
gaaauucuagcccuugcccucagggagccacg

SEQ ID NO: 149514 - RNA, 32 nt, Human
gaaauucuagucaaaugcaucucuguauagac

SEQ ID NO: 149515 - RNA, 32 nt, Human
gaaauucucaagguggcccaggccuguaggcu

SEQ ID NO: 149516 - RNA, 20 nt, Human
gaaauucucauuugccauca

SEQ ID NO: 149517 - RNA, 32 nt, Human
gaaauucuccccgccuucagaaacaccagucg

SEQ ID NO: 149518 - RNA, 32 nt, Human
gaaauucucugaguuuuuaaccuuuaaauauu

SEQ ID NO: 149519 - RNA, 32 nt, Human
gaaauucucuuuaggacaaagcagagagucca

SEQ ID NO: 149520 - RNA, 23 nt, Human
gaaauucugagccuuccucugga

SEQ ID NO: 149521 - RNA, 32 nt, Human
gaaauucugcagcugucugcugcucuaaagag

SEQ ID NO: 149522 - RNA, 32 nt, Human
gaaauucugcauuuugaccaagguccaaggug

SEQ ID NO: 149523 - RNA, 32 nt, Human
gaaauucuuacuacauagugcauauuaaucau

SEQ ID NO: 149524 - RNA, 32 nt, Human
gaaauucuuauccaaauaguaauguucuaauu

SEQ ID NO: 149525 - RNA, 32 nt, Human
gaaauucuucagccacauugccagccucauuc

SEQ ID NO: 149526 - RNA, 32 nt, Human
gaaauugaaagccacugaacuaugcagcauuu

SEQ ID NO: 149527 - RNA, 32 nt, Human
gaaauugaagcuuagagaaauuaagaagcuug

SEQ ID NO: 149528 - RNA, 32 nt, Human
gaaauugaggccaaagggcugaucagaauugc

SEQ ID NO: 149529 - RNA, 32 nt, Human
gaaauugagguugagaggaacucaggagauuu

SEQ ID NO: 149530 - RNA, 32 nt, Human
gaaauugauauuauuuugacuuccucacuaaa

SEQ ID NO: 149531 - RNA, 32 nt, Human
gaaauugcaccauugcacuccagccugggcaa

SEQ ID NO: 149532 - RNA, 31 nt, Human
gaaauugcacuuuuccugacuuaccuagaaa

SEQ ID NO: 149533 - RNA, 32 nt, Human
gaaauugcccugcaggcuggagugcagcggca

SEQ ID NO: 149534 - RNA, 32 nt, Human
gaaauugcugauuguucugcucccucuacaga

SEQ ID NO: 149535 - RNA, 32 nt, Human
gaaauugcuggguuuagaacaagauuauaaac

SEQ ID NO: 149536 - RNA, 32 nt, Human
gaaauugcuuaaaaccucuuuuuggaauuuuu

SEQ ID NO: 149537 - RNA, 32 nt, Human
gaaauuggaaacacuuggcauacacccuuuua

SEQ ID NO: 149538 - RNA, 32 nt, Human
gaaauuggaaagcagagguugcagugagcuga

SEQ ID NO: 149539 - RNA, 32 nt, Human
gaaauuggaaccugggccuccugacuuuggca

SEQ ID NO: 149540 - RNA, 32 nt, Human
gaaauuggagugaagcuagaaacagaaaaccc

SEQ ID NO: 149541 - RNA, 32 nt, Human
gaaauuggauaauguacuuucuucucaagauu

SEQ ID NO: 149542 - RNA, 32 nt, Human
gaaauuggaucucucccuucaggcugggauuu

SEQ ID NO: 149543 - RNA, 32 nt, Human
gaaauuggcgagugaguggagagccagcucug

SEQ ID NO: 149544 - RNA, 32 nt, Human
gaaauuggcgagugaguugagagccagcucug

SEQ ID NO: 149545 - RNA, 32 nt, Human
gaaauuggcuauugccaugucuggacugcaag

SEQ ID NO: 149546 - RNA, 32 nt, Human
gaaauugggaggcagggggaauaaaggaaauc

SEQ ID NO: 149547 - RNA, 32 nt, Human
gaaauugggguucaggcccacccagggggccg

SEQ ID NO: 149548 - RNA, 32 nt, Human
gaaauugggugaggaauaaccccuagucugga

SEQ ID NO: 149549 - RNA, 32 nt, Human
gaaauuggguuauuaaaaugaauauuuuuguc

SEQ ID NO: 149550 - RNA, 32 nt, Human
gaaauuguacuuaaggacuuaggaguauaugg

SEQ ID NO: 149551 - RNA, 32 nt, Human
gaaauugugccacugcacuccagacuggguga

SEQ ID NO: 149552 - RNA, 32 nt, Human
gaaauugugccacugcacuuuucagccugggu

SEQ ID NO: 149553 - RNA, 32 nt, Human
gaaauugugcuauugcacuccagccuggguga

SEQ ID NO: 149554 - RNA, 32 nt, Human
gaaauuguuaaccaaggaaacagggucagccu

SEQ ID NO: 149555 - RNA, 25 nt, Human
gaaauuuaaauucuggagaauucua

SEQ ID NO: 149556 - RNA, 32 nt, Human
gaaauuuagagguggcugggcgugguggcuca

SEQ ID NO: 149557 - RNA, 20 nt, Human
gaaauuuaggggccaagaaa

SEQ ID NO: 149558 - RNA, 32 nt, Human
gaaauuuaugguauuugagugugcaagaaaau

SEQ ID NO: 149559 - RNA, 32 nt, Human
gaaauuucccuucaaagaacugucuggggaug

SEQ ID NO: 149560 - RNA, 32 nt, Human
gaaauuuccuucugcacuguauaaaaggacca

SEQ ID NO: 149561 - RNA, 32 nt, Human
gaaauuucucauauauccccugcccucacaca

SEQ ID NO: 149562 - RNA, 32 nt, Human
gaaauuucuccuucaucugcuauauucagccu

SEQ ID NO: 149563 - RNA, 32 nt, Human
gaaauuucugcugacuuuaauauaugaaaccu

SEQ ID NO: 149564 - RNA, 32 nt, Human
gaaauuugagccagguauccagagccacagcc

SEQ ID NO: 149565 - RNA, 31 nt, Human
gaaauuugaggcuuguuuacauugcuuagau

SEQ ID NO: 149566 - RNA, 32 nt, Human
gaaauuugcaugcuaaggacuauuuuuaccca

SEQ ID NO: 149567 - RNA, 32 nt, Human
gaaauuugcauuucuaacacaaguucccaagu

SEQ ID NO: 149568 - RNA, 32 nt, Human
gaaauuugccaaauauaugagacucuaaaucu

SEQ ID NO: 149569 - RNA, 32 nt, Human
gaaauuugggcaggaaagggaacucacagugu

SEQ ID NO: 149570 - RNA, 32 nt, Human
gaaauuuguaggauuaauacaggguguuguuu

SEQ ID NO: 149571 - RNA, 32 nt, Human
gaaauuuuaucugaauuccguaaugaauauac

SEQ ID NO: 149572 - RNA, 32 nt, Human
gaaauuuuccaaaaucacaaaaagcaaugugu

SEQ ID NO: 149573 - RNA, 32 nt, Human
gaaauuuugagacuuguuucggugugucugug

SEQ ID NO: 149574 - RNA, 32 nt, Human
gaaauuuuggagcauuuuggauuuucagauua

SEQ ID NO: 149575 - RNA, 32 nt, Human
gaaauuuugucugaagaucaguggccauauua

SEQ ID NO: 149576 - RNA, 32 nt, Human
gaaauuuuugaugcccagacagcaaguaucga

SEQ ID NO: 149577 - RNA, 32 nt, Human
gaacaaaacagaaaaucuccugccaucuagga

SEQ ID NO: 149578 - RNA, 32 nt, Human
gaacaaaaccaguuccccuccuugcggcccca

SEQ ID NO: 149579 - RNA, 32 nt, Human
gaacaaaaccuacacacauaccuucauguggu

SEQ ID NO: 149580 - RNA, 32 nt, Human
gaacaaaaccuacacacguaccuucaugugau

SEQ ID NO: 149581 - RNA, 32 nt, Human
gaacaaaaccuacgcacauaccuucauguggc

SEQ ID NO: 149582 - RNA, 32 nt, Human
gaacaaaaggcaaaggaaggaggaauucgccc

SEQ ID NO: 149583 - RNA, 22 nt, Human
gaacaaaaggucccggaccccc

SEQ ID NO: 149584 - RNA, 32 nt, Human
gaacaaaauacagcuccaacaaaugggagaac

SEQ ID NO: 149585 - RNA, 32 nt, Human
gaacaaacccuugucccuuugccauguggagg

SEQ ID NO: 149586 - RNA, 32 nt, Human
gaacaaacucaggaccugguggcccaccggag

SEQ ID NO: 149587 - RNA, 32 nt, Human
gaacaaagaaacaagacaggaguuagaugcag

SEQ ID NO: 149588 - RNA, 32 nt, Human
gaacaaagacagcaaccaaugagccagagguu

SEQ ID NO: 149589 - RNA, 21 nt, Human
gaacaaagcaccuaagaugca

SEQ ID NO: 149590 - RNA, 22 nt, Human
gaacaaagcaccucaagugcaa

SEQ ID NO: 149591 - RNA, 32 nt, Human
gaacaaaggaggcucagagaggaaagacgugu

SEQ ID NO: 149592 - RNA, 32 nt, Human
gaacaaaggcaaccuuugcacacucaccugag

SEQ ID NO: 149593 - RNA, 32 nt, Human
gaacaaaggucucuggucuucccaggcagagg

SEQ ID NO: 149594 - RNA, 32 nt, Human
gaacaaaugagugagagaguucaggagaguag

SEQ ID NO: 149595 - RNA, 32 nt, Human
gaacaaaugucacaggcccagcucuucaccag

SEQ ID NO: 149596 - RNA, 19 nt, Human
gaacaaauguucaaagacu

SEQ ID NO: 149597 - RNA, 32 nt, Human
gaacaaauuauuuuuggugugugugacaauuc

SEQ ID NO: 149598 - RNA, 32 nt, Human
gaacaacacggugaaacccugucacuacuaaa

SEQ ID NO: 149599 - RNA, 32 nt, Human
gaacaacagcccuucaggcggcgaaacaacau

SEQ ID NO: 149600 - RNA, 32 nt, Human
gaacaacaggcaggggcccacuuggggccuuc

SEQ ID NO: 149601 - RNA, 32 nt, Human
gaacaacagggugaaaccccaucucuaauaaa

SEQ ID NO: 149602 - RNA, 32 nt, Human
gaacaacaggugguccagagugaguguggccu

SEQ ID NO: 149603 - RNA, 32 nt, Human
gaacaacaugaagauaaaucggcagucagaaa

SEQ ID NO: 149604 - RNA, 32 nt, Human
gaacaacauggugaaacccugucuguacuaaa

SEQ ID NO: 149605 - RNA, 32 nt, Human
gaacaaccagaggaggaggaggacagagggag

SEQ ID NO: 149606 - RNA, 32 nt, Human
gaacaacuccauguagauaagagcaaguguag

SEQ ID NO: 149607 - RNA, 32 nt, Human
gaacaacucuuauuucacaaacucagguauga

SEQ ID NO: 149608 - RNA, 32 nt, Human
gaacaacugacaaaugagggauguuagcuuug

SEQ ID NO: 149609 - RNA, 32 nt, Human
gaacaacugaccuguuuccuccaccuccaccc

SEQ ID NO: 149610 - RNA, 32 nt, Human
gaacaacugccuguuuccuccaccuccacccc

SEQ ID NO: 149611 - RNA, 32 nt, Human
gaacaacugggcccuggaccagcaccacuucc

SEQ ID NO: 149612 - RNA, 32 nt, Human
gaacaacuucaugguggaaguaggcagcugac

SEQ ID NO: 149613 - RNA, 24 nt, Human
gaacaacuuugcuauuuaaagaua

SEQ ID NO: 149614 - RNA, 32 nt, Human
gaacaagaaaagacugaaguuuuacgggaaaa

SEQ ID NO: 149615 - RNA, 32 nt, Human
gaacaagaaaccaguaauacauggucucuaac

SEQ ID NO: 149616 - RNA, 32 nt, Human
gaacaagaaagaaaccugaagaaaagaaguuu

SEQ ID NO: 149617 - RNA, 32 nt, Human
gaacaagaagaaugcaaaaauuaucugagaaa

SEQ ID NO: 149618 - RNA, 32 nt, Human
gaacaagaaggcagaagaaaugugaauuccuc

SEQ ID NO: 149619 - RNA, 32 nt, Human
gaacaagacaaggaugccuacucuaaccaugc

SEQ ID NO: 149620 - RNA, 32 nt, Human
gaacaagaccacauacaaagugucuuccuuga

SEQ ID NO: 149621 - RNA, 32 nt, Human
gaacaagagaacuagggagcugcucugguggc

SEQ ID NO: 149622 - RNA, 32 nt, Human
gaacaagagcccaggcuaccagagcaccuguc

SEQ ID NO: 149623 - RNA, 32 nt, Human
gaacaagagggaggagaaagugagaagcagcg

SEQ ID NO: 149624 - RNA, 32 nt, Human
gaacaagaguauguuaaccuuuuugucaggau

SEQ ID NO: 149625 - RNA, 32 nt, Human
gaacaagauaaaucuaucuucaaagacauauu

SEQ ID NO: 149626 - RNA, 32 nt, Human
gaacaagauucccuggacaccuccagugagau

SEQ ID NO: 149627 - RNA, 32 nt, Human
gaacaagauucugccaucucugugaucccaag

SEQ ID NO: 149628 - RNA, 20 nt, Human
gaacaagcaaaggcguucaa

SEQ ID NO: 149629 - RNA, 21 nt, Human
gaacaagccagucccgcuacc

SEQ ID NO: 149630 - RNA, 32 nt, Human
gaacaagccccgaggugcagacuaugauacuc

SEQ ID NO: 149631 - RNA, 32 nt, Human
gaacaagccccucccuccacugccucagaggc

SEQ ID NO: 149632 - RNA, 32 nt, Human
gaacaagcccuccaaaagacacugaugcaugc

SEQ ID NO: 149633 - RNA, 32 nt, Human
gaacaagccuaucagcuucagaauggcauugu

SEQ ID NO: 149634 - RNA, 32 nt, Human
gaacaagcgaggcuggaugcagggagugaugg

SEQ ID NO: 149635 - RNA, 32 nt, Human
gaacaaggaaagugccugguugaagcuagcuu

SEQ ID NO: 149636 - RNA, 32 nt, Human
gaacaaggaccaccuggguucuccagucuuga

SEQ ID NO: 149637 - RNA, 32 nt, Human
gaacaaggagaaggggcaacuuuccuuaacug

SEQ ID NO: 149638 - RNA, 32 nt, Human
gaacaaggcccagccuggcagcuucucacaug

SEQ ID NO: 149639 - RNA, 32 nt, Human
gaacaaggccuguuucuuuucugccauccaau

SEQ ID NO: 149640 - RNA, 24 nt, Human
gaacaagguaggcagagguugcag

SEQ ID NO: 149641 - RNA, 32 nt, Human
gaacaagguaggcagagguugcagugagccaa

SEQ ID NO: 149642 - RNA, 32 nt, Human
gaacaagucccaaggguuuaucaucugccuga

SEQ ID NO: 149643 - RNA, 32 nt, Human
gaacaagucccucccuguauuuuguucuugag

SEQ ID NO: 149644 - RNA, 32 nt, Human
gaacaaguuacccucuggggugaggcuauucc

SEQ ID NO: 149645 - RNA, 32 nt, Human
gaacaaguuggccugcacugguguuuuguugu

SEQ ID NO: 149646 - RNA, 32 nt, Human
gaacaaugacaccacacucugccugaaggcuc

SEQ ID NO: 149647 - RNA, 32 nt, Human
gaacaaugaggaccccuccccucccagaggaa

SEQ ID NO: 149648 - RNA, 32 nt, Human
gaacaauggaaaggugaaaaggaaagaggacu

SEQ ID NO: 149649 - RNA, 32 nt, Human
gaacaauggaacacuugggcacaggaggggga

SEQ ID NO: 149650 - RNA, 32 nt, Human
gaacaauggaagcaccugcagccaccaugggg

SEQ ID NO: 149651 - RNA, 32 nt, Human
gaacaaugggaggcugugauuugcuguguaag

SEQ ID NO: 149652 - RNA, 32 nt, Human
gaacaaugggagguugugggugaccucugggu

SEQ ID NO: 149653 - RNA, 32 nt, Human
gaacaaugucggcaggaugcaggagcugauug

SEQ ID NO: 149654 - RNA, 32 nt, Human
gaacaauucgagagacagagagacggagcgcg

SEQ ID NO: 149655 - RNA, 32 nt, Human
gaacaauugcuuaggaggaggaaggggaaagu

SEQ ID NO: 149656 - RNA, 32 nt, Human
gaacaauuuaaccuugaagucuauauccguga

SEQ ID NO: 149657 - RNA, 32 nt, Human
gaacacaaaugugaaaucaugggcugacugag

SEQ ID NO: 149658 - RNA, 32 nt, Human
gaacacaacaccuugccaguaucucaggcacc

SEQ ID NO: 149659 - RNA, 32 nt, Human
gaacacaacauacacugucaaacuuuacauca

SEQ ID NO: 149660 - RNA, 32 nt, Human
gaacacaauuccaugaaugaacugaagcagca

SEQ ID NO: 149661 - RNA, 32 nt, Human
gaacacagaagguggagguugcagugagccaa

SEQ ID NO: 149662 - RNA, 32 nt, Human
gaacacagaggacggggcacugugcugggagc

SEQ ID NO: 149663 - RNA, 32 nt, Human
gaacacagagggaagacaggaugggaguguag

SEQ ID NO: 149664 - RNA, 32 nt, Human
gaacacagcaagggguuuggugaccuccgaga

SEQ ID NO: 149665 - RNA, 32 nt, Human
gaacacagcagagucugugccaugaagcaguu

SEQ ID NO: 149666 - RNA, 32 nt, Human
gaacacagcccuccagugucuccugcagccug

SEQ ID NO: 149667 - RNA, 32 nt, Human
gaacacagccuucugaaacaucuccugccagc

SEQ ID NO: 149668 - RNA, 32 nt, Human
gaacacagcugaggacccuuguccucaguugg

SEQ ID NO: 149669 - RNA, 32 nt, Human
gaacacagcugugccuggaacagcagacccag

SEQ ID NO: 149670 - RNA, 30 nt, Human
gaacacagcuugcuugcauuuaguaagacc

SEQ ID NO: 149671 - RNA, 32 nt, Human
gaacacaggaacaggugaucguuuuggcccug

SEQ ID NO: 149672 - RNA, 24 nt, Human
gaacacaggaggcagagguugcag

SEQ ID NO: 149673 - RNA, 32 nt, Human
gaacacaggaggcagagguugcagcgagcuga

SEQ ID NO: 149674 - RNA, 32 nt, Human
gaacacaggaggcagagguugcagugagccga

SEQ ID NO: 149675 - RNA, 32 nt, Human
gaacacaggcagcagccacauuggcagugaag

SEQ ID NO: 149676 - RNA, 32 nt, Human
gaacacagggaggggaacaacacacaccgggg

SEQ ID NO: 149677 - RNA, 23 nt, Human
gaacacagggcugcaucccgagc

SEQ ID NO: 149678 - RNA, 32 nt, Human
gaacacagugagcuggcuuuucacacauugca

SEQ ID NO: 149679 - RNA, 32 nt, Human
gaacacaguugauuccuugaguuucaaauaua

SEQ ID NO: 149680 - RNA, 32 nt, Human
gaacacaucaaguaauaaauauacagagaaua

SEQ ID NO: 149681 - RNA, 32 nt, Human
gaacacaugaaaggaauacauggggaagaaau

SEQ ID NO: 149682 - RNA, 32 nt, Human
gaacacauugcuucucggccuuuuggcuaaga

SEQ ID NO: 149683 - RNA, 32 nt, Human
gaacacauuuacucucuggcaguguuuaaaag

SEQ ID NO: 149684 - RNA, 32 nt, Human
gaacacauuuggugcaccucagucaguuggaa

SEQ ID NO: 149685 - RNA, 32 nt, Human
gaacaccaacagauucauguucucgucuuagc

SEQ ID NO: 149686 - RNA, 32 nt, Human
gaacaccaaggcaaaaacaccaaccugcuaaa

SEQ ID NO: 149687 - RNA, 32 nt, Human
gaacaccacagcuucuccccagcuuggugccu

SEQ ID NO: 149688 - RNA, 32 nt, Human
gaacaccaccagacaaauauagacccuuuaac

SEQ ID NO: 149689 - RNA, 32 nt, Human
gaacaccacugcacuccaccuguccacuuguc

SEQ ID NO: 149690 - RNA, 32 nt, Human
gaacaccagaaacaacccccaagccuugugac

SEQ ID NO: 149691 - RNA, 32 nt, Human
gaacaccagaucuuuaugcacagcugcgugca

SEQ ID NO: 149692 - RNA, 32 nt, Human
gaacaccagcacaaacgacagccucaagucuc

SEQ ID NO: 149693 - RNA, 32 nt, Human
gaacaccagcgucuuuuaacauguggaacuuu

SEQ ID NO: 149694 - RNA, 32 nt, Human
gaacaccaggaggagguuggauuucugccagu

SEQ ID NO: 149695 - RNA, 32 nt, Human
gaacaccaugucugcaggagguggccgggccu

SEQ ID NO: 149696 - RNA, 32 nt, Human
gaacacccaguaacaaaugaacaauguugcuu

SEQ ID NO: 149697 - RNA, 32 nt, Human
gaacaccccuaucuucuaggauugacacuggc

SEQ ID NO: 149698 - RNA, 32 nt, Human
gaacaccgcuuugccagccucacacagcgucc

SEQ ID NO: 149699 - RNA, 32 nt, Human
gaacaccgucuggaacaggaaggacaucgggc

SEQ ID NO: 149700 - RNA, 32 nt, Human
gaacaccuagcccagugccugggcaggucccu

SEQ ID NO: 149701 - RNA, 32 nt, Human
gaacaccuaggccagggauccccaccaugucc

SEQ ID NO: 149702 - RNA, 24 nt, Human
gaacaccucuaccaccuacaaccc

SEQ ID NO: 149703 - RNA, 23 nt, Human
gaacaccugaccucaaaugaucc

SEQ ID NO: 149704 - RNA, 32 nt, Human
gaacaccugagugcccgggcaggcuucacugu

SEQ ID NO: 149705 - RNA, 32 nt, Human
gaacaccugcaagaggaggcucaggugcugac

SEQ ID NO: 149706 - RNA, 32 nt, Human
gaacaccugcauucauagggccuuuuuguaau

SEQ ID NO: 149707 - RNA, 20 nt, Human
gaacaccugcccccaggccc

SEQ ID NO: 149708 - RNA, 32 nt, Human
gaacaccugccucuccccuugcagagaccucc

SEQ ID NO: 149709 - RNA, 32 nt, Human
gaacaccugcuuccucccucgggcaggcccag

SEQ ID NO: 149710 - RNA, 32 nt, Human
gaacaccugggguccuucuauuugggagaauc

SEQ ID NO: 149711 - RNA, 32 nt, Human
gaacaccuguaaucccagcuacuuggaaggcu

SEQ ID NO: 149712 - RNA, 32 nt, Human
gaacaccuguacuugaaguggaggaggcuagg

SEQ ID NO: 149713 - RNA, 32 nt, Human
gaacaccuguagucccagcuuucucuggaagu

SEQ ID NO: 149714 - RNA, 18 nt, Human
gaacaccuuucccaauag

SEQ ID NO: 149715 - RNA, 32 nt, Human
gaacacgccauugcacucaagccugggcaaua

SEQ ID NO: 149716 - RNA, 22 nt, Human
gaacacgcuguguggcugaaaa

SEQ ID NO: 149717 - RNA, 32 nt, Human
gaacacggauggaagaaaggagaagaucuggu

SEQ ID NO: 149718 - RNA, 32 nt, Human
gaacacggccuucugcguuuccucacucucac

SEQ ID NO: 149719 - RNA, 24 nt, Human
gaacacgggaggcagagguugcag

SEQ ID NO: 149720 - RNA, 32 nt, Human
gaacacgggaggcagagguugcagugagcaga

SEQ ID NO: 149721 - RNA, 24 nt, Human
gaacacgggaggcggagguugcgg

SEQ ID NO: 149722 - RNA, 32 nt, Human
gaacacguuggcuuuucucuugacguggauga

SEQ ID NO: 149723 - RNA, 32 nt, Human
gaacacucagacugaagggcugagaaauccag

SEQ ID NO: 149724 - RNA, 32 nt, Human
gaacacucagcccuuugugguccugcccaagg

SEQ ID NO: 149725 - RNA, 32 nt, Human
gaacacucgccuggccugggaaacugcaugcc

SEQ ID NO: 149726 - RNA, 32 nt, Human
gaacacucucugagaugccccucugccugggc

SEQ ID NO: 149727 - RNA, 32 nt, Human
gaacacucugcggcuucucugagaaacccuau

SEQ ID NO: 149728 - RNA, 32 nt, Human
gaacacucugcuccagccaagguggugagggc

SEQ ID NO: 149729 - RNA, 32 nt, Human
gaacacugaggacaguuucuuuugaaaagaac

SEQ ID NO: 149730 - RNA, 32 nt, Human
gaacacugcagcugucugaccuuccaaagacu

SEQ ID NO: 149731 - RNA, 32 nt, Human
gaacacugcucagaaaguacugcagcaugucu

SEQ ID NO: 149732 - RNA, 32 nt, Human
gaacacugggcagaaccagagagaugggacau

SEQ ID NO: 149733 - RNA, 32 nt, Human
gaacacugucaucugccagagcuucaggcaag

SEQ ID NO: 149734 - RNA, 32 nt, Human
gaacacugucucaaauaccugcuuuuuguuuu

SEQ ID NO: 149735 - RNA, 32 nt, Human
gaacacuucccucccucuguccuugagguugu

SEQ ID NO: 149736 - RNA, 32 nt, Human
gaacacuuccuugguauuuccuugcuacaugg

SEQ ID NO: 149737 - RNA, 32 nt, Human
gaacacuucucuccggaagcaggcugguucga

SEQ ID NO: 149738 - RNA, 32 nt, Human
gaacacuucuggaagggagaguggauuuggcu

SEQ ID NO: 149739 - RNA, 32 nt, Human
gaacacuugaaccaccucccgaauugggucau

SEQ ID NO: 149740 - RNA, 32 nt, Human
gaacacuuuccagaggauaggauauuuaaguc

SEQ ID NO: 149741 - RNA, 32 nt, Human
gaacacuuuguuuuucucccugugccauuuac

SEQ ID NO: 149742 - RNA, 17 nt, Human
gaacacuuuuccuucca

SEQ ID NO: 149743 - RNA, 32 nt, Human
gaacagaaagcauuugcccucaucagagaaau

SEQ ID NO: 149744 - RNA, 23 nt, Human
gaacagaaccuccgcaucgugua

SEQ ID NO: 149745 - RNA, 22 nt, Human
gaacagaacuuugcccacugca

SEQ ID NO: 149746 - RNA, 32 nt, Human
gaacagaagaaaaguccagucuucucaugagc

SEQ ID NO: 149747 - RNA, 32 nt, Human
gaacagaagaagcagagcagaugaucggagca

SEQ ID NO: 149748 - RNA, 32 nt, Human
gaacagaagcucugguauggcuuuuccaccaa

SEQ ID NO: 149749 - RNA, 24 nt, Human
gaacagaauagcagacacaaugca

SEQ ID NO: 149750 - RNA, 32 nt, Human
gaacagaauuuaugacuccacuguggaaaaug

SEQ ID NO: 149751 - RNA, 32 nt, Human
gaacagacaagggaacagccuggacauggcau

SEQ ID NO: 149752 - RNA, 32 nt, Human
gaacagacacaaugggaccugggcgggcguua

SEQ ID NO: 149753 - RNA, 32 nt, Human
gaacagacagacagacgcacacacacaacaga

SEQ ID NO: 149754 - RNA, 32 nt, Human
gaacagaccacugcaucucacugggccagcag

SEQ ID NO: 149755 - RNA, 32 nt, Human
gaacagacggaugaugaacaagcuuuucaucg

SEQ ID NO: 149756 - RNA, 24 nt, Human
gaacagacugguuacaaagacucc

SEQ ID NO: 149757 - RNA, 32 nt, Human
gaacagagacccagaaggagaaucaauggacc

SEQ ID NO: 149758 - RNA, 32 nt, Human
gaacagagaggaggaggagggagaaauggcca

SEQ ID NO: 149759 - RNA, 32 nt, Human
gaacagagauggggucuugcuuuguugcccag

SEQ ID NO: 149760 - RNA, 32 nt, Human
gaacagagcccccacccucucucccucacccc

SEQ ID NO: 149761 - RNA, 32 nt, Human
gaacagagcgucaggcccaggccacacugagg

SEQ ID NO: 149762 - RNA, 32 nt, Human
gaacagagcuggauuccuugugccucauaugc

SEQ ID NO: 149763 - RNA, 32 nt, Human
gaacagaggggauguggugagagccagguucc

SEQ ID NO: 149764 - RNA, 32 nt, Human
gaacagaggugggccccagggugaaggaccuu

SEQ ID NO: 149765 - RNA, 31 nt, Human
gaacagagugagagaggcccauggcugauuu

SEQ ID NO: 149766 - RNA, 32 nt, Human
gaacagagugaugacaaaagauaacauuggug

SEQ ID NO: 149767 - RNA, 19 nt, Human
gaacagagugcaacccagu

SEQ ID NO: 149768 - RNA, 23 nt, Human
gaacagauaccaaauuagacuuc

SEQ ID NO: 149769 - RNA, 32 nt, Human
gaacagauaucacaggcccagcucuucaccag

SEQ ID NO: 149770 - RNA, 32 nt, Human
gaacagaucuuguucuuugcuggaccaucaag

SEQ ID NO: 149771 - RNA, 32 nt, Human
gaacagauguacaagacauuuauuacacuuuu

SEQ ID NO: 149772 - RNA, 32 nt, Human
gaacagcaacuaguugauguucaucagaaaga

SEQ ID NO: 149773 - RNA, 32 nt, Human
gaacagcaagucagggcagagaggaggaggga

SEQ ID NO: 149774 - RNA, 32 nt, Human
gaacagcacguaacugcaaugcagccuguaca

SEQ ID NO: 149775 - RNA, 22 nt, Human
gaacagcacuggggagucuuug

SEQ ID NO: 149776 - RNA, 32 nt, Human
gaacagcagagguggaggcaagcagugacucc

SEQ ID NO: 149777 - RNA, 32 nt, Human
gaacagcagcagaggcagcaggagcaggagga

SEQ ID NO: 149778 - RNA, 32 nt, Human
gaacagcagcauggucucgaacuccgcaggcu

SEQ ID NO: 149779 - RNA, 24 nt, Human
gaacagcaggaggcggaggugcag

SEQ ID NO: 149780 - RNA, 32 nt, Human
gaacagcaggagguuuuccuggacaccgccaa

SEQ ID NO: 149781 - RNA, 32 nt, Human
gaacagcaggauaacccauguucuccacauaa

SEQ ID NO: 149782 - RNA, 20 nt, Human
gaacagcaggcagggcucug

SEQ ID NO: 149783 - RNA, 32 nt, Human
gaacagcagggugacgccagggacacgugggc

SEQ ID NO: 149784 - RNA, 32 nt, Human
gaacagcagguauaagagguugggguggcugu

SEQ ID NO: 149785 - RNA, 21 nt, Human
gaacagcauccugaggcacag

SEQ ID NO: 149786 - RNA, 32 nt, Human
gaacagcaugcaccaggcucaguggcucagug

SEQ ID NO: 149787 - RNA, 32 nt, Human
gaacagcauggaaaucucgaagaugugguugu

SEQ ID NO: 149788 - RNA, 17 nt, Human
gaacagccacaagcagc

SEQ ID NO: 149789 - RNA, 32 nt, Human
gaacagccagagggccccagaguuccuuguau

SEQ ID NO: 149790 - RNA, 32 nt, Human
gaacagccaggccuggugagucacuccuggga

SEQ ID NO: 149791 - RNA, 20 nt, Human
gaacagccaugcugcaggug

SEQ ID NO: 149792 - RNA, 32 nt, Human
gaacagccauucuguuaauaagcuauuuuaua

SEQ ID NO: 149793 - RNA, 32 nt, Human
gaacagccauugcacuccagccugggcaacag

SEQ ID NO: 149794 - RNA, 32 nt, Human
gaacagcccagccacaccaccaaacacccuua

SEQ ID NO: 149795 - RNA, 32 nt, Human
gaacagcccccaccugccuucacagguuuauc

SEQ ID NO: 149796 - RNA, 32 nt, Human
gaacagcccgcccgguuucacccuccaacuuc

SEQ ID NO: 149797 - RNA, 32 nt, Human
gaacagcccucagacguguucugcacaucccu

SEQ ID NO: 149798 - RNA, 19 nt, Human
gaacagccucugcaugaca

SEQ ID NO: 149799 - RNA, 32 nt, Human
gaacagccugcuccaccuacaggaugacuugu

SEQ ID NO: 149800 - RNA, 32 nt, Human
gaacagccuggaggagcuugugaggcaugagg

SEQ ID NO: 149801 - RNA, 32 nt, Human
gaacagcgaggacgaagagcgggacccgagcc

SEQ ID NO: 149802 - RNA, 32 nt, Human
gaacagcgugagccugugugcuugugugcuga

SEQ ID NO: 149803 - RNA, 32 nt, Human
gaacagcucacacccccaaaguggugaccacc

SEQ ID NO: 149804 - RNA, 19 nt, Human
gaacagcuccuggcagcac

SEQ ID NO: 149805 - RNA, 32 nt, Human
gaacagcugaaauacugucacuagugguagug

SEQ ID NO: 149806 - RNA, 32 nt, Human
gaacagcugggcaaugcgggaggcagagccag

SEQ ID NO: 149807 - RNA, 32 nt, Human
gaacagcugggcaaugcgggaggcagaggcca

SEQ ID NO: 149808 - RNA, 32 nt, Human
gaacagcugggccaugcgggaggcagaggccg

SEQ ID NO: 149809 - RNA, 32 nt, Human
gaacagcugugagccaugccucccugggccac

SEQ ID NO: 149810 - RNA, 32 nt, Human
gaacaggaaauaguccagcagaggaguguggg

SEQ ID NO: 149811 - RNA, 32 nt, Human
gaacaggaagagaagaugugggagcaggagga

SEQ ID NO: 149812 - RNA, 32 nt, Human
gaacaggaagauuauuacauacauuugaacau

SEQ ID NO: 149813 - RNA, 22 nt, Human
gaacaggaagcuuugagugccu

SEQ ID NO: 149814 - RNA, 32 nt, Human
gaacaggacagagagcguucuguucugcggaa

SEQ ID NO: 149815 - RNA, 32 nt, Human
gaacaggacccccaugcugcacagcccugcuu

SEQ ID NO: 149816 - RNA, 19 nt, Human
gaacaggagauccucuguc

SEQ ID NO: 149817 - RNA, 32 nt, Human
gaacaggagcaguuuuuggaaaaauagguggg

SEQ ID NO: 149818 - RNA, 32 nt, Human
gaacaggagccugaaggcugagcugcagaagc

SEQ ID NO: 149819 - RNA, 32 nt, Human
gaacaggagcucagcuggucacacacagcaac

SEQ ID NO: 149820 - RNA, 32 nt, Human
gaacaggaggacggggcucucccccacagugg

SEQ ID NO: 149821 - RNA, 32 nt, Human
gaacaggaggccuaggaccagccugugcaggu

SEQ ID NO: 149822 - RNA, 23 nt, Human
gaacaggagguaucaaacuagcu

SEQ ID NO: 149823 - RNA, 32 nt, Human
gaacaggauccugagugguugcaggugaacaa

SEQ ID NO: 149824 - RNA, 32 nt, Human
gaacaggaugcugauguuugagugccacccgc

SEQ ID NO: 149825 - RNA, 32 nt, Human
gaacaggauuuccccuagcaagcuaccuucug

SEQ ID NO: 149826 - RNA, 32 nt, Human
gaacaggcagucucacaagcacgcagcacacu

SEQ ID NO: 149827 - RNA, 32 nt, Human
gaacaggcagugaggaaggagacaggggugga

SEQ ID NO: 149828 - RNA, 19 nt, Human
gaacaggccacagcacugc

SEQ ID NO: 149829 - RNA, 19 nt, Human
gaacaggccacaucggaca

SEQ ID NO: 149830 - RNA, 32 nt, Human
gaacaggccauugcacucaagccuggcaauaa

SEQ ID NO: 149831 - RNA, 23 nt, Human
gaacaggcccacagugagcagca

SEQ ID NO: 149832 - RNA, 32 nt, Human
gaacaggcccugcuucugcugaaccugacagc

SEQ ID NO: 149833 - RNA, 31 nt, Human
gaacaggcugagagaggcgggacugggucaa

SEQ ID NO: 149834 - RNA, 32 nt, Human
gaacagggaagcagagguugcggugaaccggg

SEQ ID NO: 149835 - RNA, 32 nt, Human
gaacagggaggcagagguugcagugagccgag

SEQ ID NO: 149836 - RNA, 32 nt, Human
gaacagggccaaugagacugugcgggacugcc

SEQ ID NO: 149837 - RNA, 32 nt, Human
gaacagggcccaggcaggcagcagggcaagga

SEQ ID NO: 149838 - RNA, 23 nt, Human
gaacagggccgccagaacugccu

SEQ ID NO: 149839 - RNA, 32 nt, Human
gaacaggggagauggagguugcagugagcuga

SEQ ID NO: 149840 - RNA, 32 nt, Human
gaacaggggccagacuuacauguggucacagu

SEQ ID NO: 149841 - RNA, 32 nt, Human
gaacagggucucaaacaccuucagcaugugug

SEQ ID NO: 149842 - RNA, 32 nt, Human
gaacaggguggauguggcguggcucccagaau

SEQ ID NO: 149843 - RNA, 32 nt, Human
gaacaggguuacuguauacugaaggucugaca

SEQ ID NO: 149844 - RNA, 32 nt, Human
gaacaggguugcauuuaacagaaacaacuaaa

SEQ ID NO: 149845 - RNA, 32 nt, Human
gaacaggucauugcacucaagccugggcaaua

SEQ ID NO: 149846 - RNA, 32 nt, Human
gaacaggucccauuuucacauuagggcuuuaa

SEQ ID NO: 149847 - RNA, 32 nt, Human
gaacaggucuccaaucuauguuagcacuaugu

SEQ ID NO: 149848 - RNA, 32 nt, Human
gaacaggugacacagagcaggggcuucagcca

SEQ ID NO: 149849 - RNA, 32 nt, Human
gaacagguggcuguguuccugcucuggccccc

SEQ ID NO: 149850 - RNA, 32 nt, Human
gaacagguggggacaggacuggagaggaggag

SEQ ID NO: 149851 - RNA, 32 nt, Human
gaacaggugguaggagagccccagggagacgc

SEQ ID NO: 149852 - RNA, 32 nt, Human
gaacagguuuuuaguauuuaauucuucacggu

SEQ ID NO: 149853 - RNA, 21 nt, Human
gaacaguacggcacuucacca

SEQ ID NO: 149854 - RNA, 32 nt, Human
gaacaguacuguucacaccuuucuucacugag

SEQ ID NO: 149855 - RNA, 32 nt, Human
gaacaguagaaugaacacccauccaccccgga

SEQ ID NO: 149856 - RNA, 32 nt, Human
gaacaguaugggggacuggggugcaggugaag

SEQ ID NO: 149857 - RNA, 32 nt, Human
gaacagucaaucugcauuuuucaucagucauu

SEQ ID NO: 149858 - RNA, 32 nt, Human
gaacagucacccuucugggcaagggggaacaa

SEQ ID NO: 149859 - RNA, 32 nt, Human
gaacaguccauggcucugcuaggggaugaugg

SEQ ID NO: 149860 - RNA, 32 nt, Human
gaacagucuggguggaauggggcugaaaccau

SEQ ID NO: 149861 - RNA, 32 nt, Human
gaacagugaacaaauaaaaagagcucuauuag

SEQ ID NO: 149862 - RNA, 22 nt, Human
gaacagugaagugcagcagaug

SEQ ID NO: 149863 - RNA, 23 nt, Human
gaacagugacugcugaccugcca

SEQ ID NO: 149864 - RNA, 32 nt, Human
gaacagugcacaggcuggucuucuaucaguac

SEQ ID NO: 149865 - RNA, 32 nt, Human
gaacagugcagaaacuagaaucaagccuuaua

SEQ ID NO: 149866 - RNA, 32 nt, Human
gaacagugcucuggagaggaagccaguggagc

SEQ ID NO: 149867 - RNA, 32 nt, Human
gaacaguggagaggaagagggagugaggcccu

SEQ ID NO: 149868 - RNA, 32 nt, Human
gaacagugggccuucuacacacgcugucuuug

SEQ ID NO: 149869 - RNA, 32 nt, Human
gaacaguguaugaaacacuggaagaggucacc

SEQ ID NO: 149870 - RNA, 32 nt, Human
gaacagugucugcaggccggggaaagaggagg

SEQ ID NO: 149871 - RNA, 32 nt, Human
gaacagugugccauucuugugcacugauggag

SEQ ID NO: 149872 - RNA, 32 nt, Human
gaacaguguggagcuugagaaagagaacuuua

SEQ ID NO: 149873 - RNA, 32 nt, Human
gaacagugugugugcgugcgugagaccacaga

SEQ ID NO: 149874 - RNA, 32 nt, Human
gaacaguguugcugcuggcagagaugcauucc

SEQ ID NO: 149875 - RNA, 19 nt, Human
gaacaguuacugcaugcca

SEQ ID NO: 149876 - RNA, 32 nt, Human
gaacaguuaucccuaaccacagcucaaaaucg

SEQ ID NO: 149877 - RNA, 32 nt, Human
gaacaguucgcagagcuccuggagucuccuuc

SEQ ID NO: 149878 - RNA, 32 nt, Human
gaacaguugaacucuuaaauccucagaugcca

SEQ ID NO: 149879 - RNA, 32 nt, Human
gaacaguuugccucccucccagccucaaccac

SEQ ID NO: 149880 - RNA, 32 nt, Human
gaacaguuuggaggacuuagaauaagauagga

SEQ ID NO: 149881 - RNA, 32 nt, Human
gaacaguuuuguccuguaugcugaugugucca

SEQ ID NO: 149882 - RNA, 32 nt, Human
gaacauaauaaauauaucaaaagguguuaaag

SEQ ID NO: 149883 - RNA, 32 nt, Human
gaacauaaugacaaagaacauucuucugauaa

SEQ ID NO: 149884 - RNA, 32 nt, Human
gaacauacaaauacauguuucuuuuugguaga

SEQ ID NO: 149885 - RNA, 32 nt, Human
gaacauacacacuggcaccuggggagcgccau

SEQ ID NO: 149886 - RNA, 32 nt, Human
gaacauaccacugccucuagacuaaggccagc

SEQ ID NO: 149887 - RNA, 32 nt, Human
gaacauagagguagcaggugccaagauccccg

SEQ ID NO: 149888 - RNA, 32 nt, Human
gaacauaggaggucacuggaacaagugauagu

SEQ ID NO: 149889 - RNA, 31 nt, Human
gaacauaggcaggaauuuacauuuuugacaa

SEQ ID NO: 149890 - RNA, 32 nt, Human
gaacauaggugugcuucccaaauacauuaaca

SEQ ID NO: 149891 - RNA, 32 nt, Human
gaacauaguacugggaaaugggagcacaguac

SEQ ID NO: 149892 - RNA, 32 nt, Human
gaacauaguuuauccacaaguccuagugagga

SEQ ID NO: 149893 - RNA, 32 nt, Human
gaacauaucugcaauacccaagccacagggaa

SEQ ID NO: 149894 - RNA, 32 nt, Human
gaacauauuuguauuagauggaagucaugaug

SEQ ID NO: 149895 - RNA, 32 nt, Human
gaacaucaagucagagggggcaucugaaugca

SEQ ID NO: 149896 - RNA, 32 nt, Human
gaacaucagaaaaggcaaaacugaccagggcu

SEQ ID NO: 149897 - RNA, 32 nt, Human
gaacaucagcuuacagaugaugaggacuuaag

SEQ ID NO: 149898 - RNA, 32 nt, Human
gaacaucaggaaaaggccacggggcucugaac

SEQ ID NO: 149899 - RNA, 32 nt, Human
gaacaucaucuaaaggguggguggugcuggac

SEQ ID NO: 149900 - RNA, 32 nt, Human
gaacauccuccacugacuuccucccacugucu

SEQ ID NO: 149901 - RNA, 32 nt, Human
gaacaucuaaacugggacuauacuaguaggag

SEQ ID NO: 149902 - RNA, 32 nt, Human
gaacaucuaaguaaacauuuaucugguuuaau

SEQ ID NO: 149903 - RNA, 32 nt, Human
gaacaucuauauagagagagugugugagugug

SEQ ID NO: 149904 - RNA, 32 nt, Human
gaacaucucacaccacuuccaccuaacccuac

SEQ ID NO: 149905 - RNA, 32 nt, Human
gaacaucuccuuucucuucuugcuucaauugc

SEQ ID NO: 149906 - RNA, 32 nt, Human
gaacaucugaguucccaguacacuagucuccc

SEQ ID NO: 149907 - RNA, 23 nt, Human
gaacaucuggcagcggcccugug

SEQ ID NO: 149908 - RNA, 32 nt, Human
gaacaucuucugacacacugacagugcugagc

SEQ ID NO: 149909 - RNA, 32 nt, Human
gaacaucuuuggggugcuguuauucugccuac

SEQ ID NO: 149910 - RNA, 32 nt, Human
gaacaugaacauucacuuagcuuccucagucu

SEQ ID NO: 149911 - RNA, 32 nt, Human
gaacaugaaggcgaggaugcuggggcccugca

SEQ ID NO: 149912 - RNA, 29 nt, Human
gaacaugaauccacagaucagaaauccga

SEQ ID NO: 149913 - RNA, 32 nt, Human
gaacaugaauccucugagcuguccucaaaaga

SEQ ID NO: 149914 - RNA, 32 nt, Human
gaacaugacaaacuucaugaagaaauacagaa

SEQ ID NO: 149915 - RNA, 32 nt, Human
gaacaugcagguuuuuacauagguauacaugu

SEQ ID NO: 149916 - RNA, 32 nt, Human
gaacaugcauccuuaaacugugacuucucacc

SEQ ID NO: 149917 - RNA, 32 nt, Human
gaacaugcauuacaacuuuccuaaucccugcu

SEQ ID NO: 149918 - RNA, 24 nt, Human
gaacaugcccacaacuugucaccc

SEQ ID NO: 149919 - RNA, 32 nt, Human
gaacaugcccugucugugcugucccuccugug

SEQ ID NO: 149920 - RNA, 32 nt, Human
gaacaugccgccuucucuccagccucugugcc

SEQ ID NO: 149921 - RNA, 32 nt, Human
gaacaugcgcuccaagguuccuagccaggugg

SEQ ID NO: 149922 - RNA, 32 nt, Human
gaacaugcgguguuugguuuucuguccuuggg

SEQ ID NO: 149923 - RNA, 32 nt, Human
gaacaugcgguguuugguuuucuguccuugug

SEQ ID NO: 149924 - RNA, 32 nt, Human
gaacauggacccaauccucuggccucacccac

SEQ ID NO: 149925 - RNA, 29 nt, Human
gaacauggacuucccgugccucuggcuag

SEQ ID NO: 149926 - RNA, 25 nt, Human
gaacauggagaaagcccucuuucaa

SEQ ID NO: 149927 - RNA, 32 nt, Human
gaacauggagaacuucagcccaagcagaacca

SEQ ID NO: 149928 - RNA, 32 nt, Human
gaacauggagaggagagcagcgggcccaggcu

SEQ ID NO: 149929 - RNA, 32 nt, Human
gaacauggagcaggcagggacuccauuuuaca

SEQ ID NO: 149930 - RNA, 32 nt, Human
gaacauggagggaaccaggaaaaccaaauaga

SEQ ID NO: 149931 - RNA, 32 nt, Human
gaacauggccucccccacagccucuuuucucc

SEQ ID NO: 149932 - RNA, 29 nt, Human
gaacauggcgaagguggagcagguccuga

SEQ ID NO: 149933 - RNA, 29 nt, Human
gaacauggcggagcgcggcaggaagcggc

SEQ ID NO: 149934 - RNA, 32 nt, Human
gaacauggcuuccuguggacccuggagcaaug

SEQ ID NO: 149935 - RNA, 32 nt, Human
gaacaugggaggcguagcuugcagugagcuga

SEQ ID NO: 149936 - RNA, 24 nt, Human
gaacaugggagguggaggcugcag

SEQ ID NO: 149937 - RNA, 32 nt, Human
gaacauggggcucgagccagaccucagggucu

SEQ ID NO: 149938 - RNA, 24 nt, Human
gaacaugguagacagagguugcag

SEQ ID NO: 149939 - RNA, 32 nt, Human
gaacaugguagacagagguugcagugagccaa

SEQ ID NO: 149940 - RNA, 32 nt, Human
gaacauguaacuuggagagggacgaagaaagg

SEQ ID NO: 149941 - RNA, 32 nt, Human
gaacaugugugugguggugacucauuuccaug

SEQ ID NO: 149942 - RNA, 32 nt, Human
gaacauguugagugagcaugcuggagaaugag

SEQ ID NO: 149943 - RNA, 32 nt, Human
gaacauuauggagagaaaggguacugaggcac

SEQ ID NO: 149944 - RNA, 32 nt, Human
gaacauucaggaaaucaagaugaaaaauccca

SEQ ID NO: 149945 - RNA, 32 nt, Human
gaacauuccagaugugugagaucauguguauu

SEQ ID NO: 149946 - RNA, 32 nt, Human
gaacauucuguuuccuccuccacgaccacagc

SEQ ID NO: 149947 - RNA, 32 nt, Human
gaacauugaauagcaaccacaaugaucauuau

SEQ ID NO: 149948 - RNA, 32 nt, Human
gaacauugaaugcaacuggggaagaaauaauu

SEQ ID NO: 149949 - RNA, 31 nt, Human
gaacauugccucucuggaucugcugugacca

SEQ ID NO: 149950 - RNA, 32 nt, Human
gaacauugccucugggugucauguggaccaga

SEQ ID NO: 149951 - RNA, 32 nt, Human
gaacauuuacuggccccaacuguggcaucauc

SEQ ID NO: 149952 - RNA, 32 nt, Human
gaacauuuggugggaaugaacacuccugggca

SEQ ID NO: 149953 - RNA, 32 nt, Human
gaacauuuuccucccuuccuuuguguccuuau

SEQ ID NO: 149954 - RNA, 32 nt, Human
gaacauuuugucagcccagauguggcccaguu

SEQ ID NO: 149955 - RNA, 32 nt, Human
gaaccaaaacuugccaagaauucucuuggcau

SEQ ID NO: 149956 - RNA, 32 nt, Human
gaaccaaaauaacgugaagaacaucacagaga

SEQ ID NO: 149957 - RNA, 32 nt, Human
gaaccaaacucacuguccccacuguggcauga

SEQ ID NO: 149958 - RNA, 32 nt, Human
gaaccaaacugcugcugugauaaccucuccuu

SEQ ID NO: 149959 - RNA, 31 nt, Human
gaaccaaagagaccuccuuguuucagcuggg

SEQ ID NO: 149960 - RNA, 32 nt, Human
gaaccaaaggaaauaacauugaagaaggaaaa

SEQ ID NO: 149961 - RNA, 32 nt, Human
gaaccaaauucgagagcucacaguuugaauag

SEQ ID NO: 149962 - RNA, 21 nt, Human
gaaccaacauaagacaagaaa

SEQ ID NO: 149963 - RNA, 32 nt, Human
gaaccaacugauuugaaacugacauccacacu

SEQ ID NO: 149964 - RNA, 32 nt, Human
gaaccaacuguaggcaccucuccagggccuag

SEQ ID NO: 149965 - RNA, 24 nt, Human
gaaccaagaccgcaccacugcacu

SEQ ID NO: 149966 - RNA, 22 nt, Human
gaaccaagaguccagccagagg

SEQ ID NO: 149967 - RNA, 24 nt, Human
gaaccaagaucacaccacugcacu

SEQ ID NO: 149968 - RNA, 24 nt, Human
gaaccaagaucacgccacugcacu

SEQ ID NO: 149969 - RNA, 24 nt, Human
gaaccaagaucacgccacugcauu

SEQ ID NO: 149970 - RNA, 24 nt, Human
gaaccaagaucaugccacugcacu

SEQ ID NO: 149971 - RNA, 24 nt, Human
gaaccaagaucgcaccacugcauu

SEQ ID NO: 149972 - RNA, 24 nt, Human
gaaccaagaucgcggcgcugcacu

SEQ ID NO: 149973 - RNA, 24 nt, Human
gaaccaagaucgggccacugcacu

SEQ ID NO: 149974 - RNA, 23 nt, Human
gaaccaagauuccuacugacacu

SEQ ID NO: 149975 - RNA, 24 nt, Human
gaaccaagauugcaccacugcacu

SEQ ID NO: 149976 - RNA, 22 nt, Human
gaaccaagcaaauuucagaaga

SEQ ID NO: 149977 - RNA, 32 nt, Human
gaaccaagcauggugaaagacagguauuucug

SEQ ID NO: 149978 - RNA, 24 nt, Human
gaaccaagccauagggaucagagg

SEQ ID NO: 149979 - RNA, 21 nt, Human
gaaccaagcccucugcucuga

SEQ ID NO: 149980 - RNA, 32 nt, Human
gaaccaagcgucccccagccccgagagggagc

SEQ ID NO: 149981 - RNA, 21 nt, Human
gaaccaaggacgccuggcuua

SEQ ID NO: 149982 - RNA, 32 nt, Human
gaaccaaggaggcagagguuguaguaagcuga

SEQ ID NO: 149983 - RNA, 32 nt, Human
gaaccaaggagguggagguugcagugagccgg

SEQ ID NO: 149984 - RNA, 32 nt, Human
gaaccaagggcugagguucugccccuccagga

SEQ ID NO: 149985 - RNA, 24 nt, Human
gaaccaagguggcagagguugcag

SEQ ID NO: 149986 - RNA, 32 nt, Human
gaaccaagguggcagagguugcaguaagccaa

SEQ ID NO: 149987 - RNA, 26 nt, Human
gaaccaaguccuuggauaucuagggg

SEQ ID NO: 149988 - RNA, 28 nt, Human
gaaccaagucgagcugccucagagccgg

SEQ ID NO: 149989 - RNA, 23 nt, Human
gaaccaaguggcagccccagggg

SEQ ID NO: 149990 - RNA, 21 nt, Human
gaaccaaguugugugcagaga

SEQ ID NO: 149991 - RNA, 32 nt, Human
gaaccacaaagugcccucuaauaagacaucgg

SEQ ID NO: 149992 - RNA, 21 nt, Human
gaaccacaaggcucccagaga

SEQ ID NO: 149993 - RNA, 32 nt, Human
gaaccacaccugagccauuuccaagggugaca

SEQ ID NO: 149994 - RNA, 32 nt, Human
gaaccacacuagggucuccaccuacuuauaca

SEQ ID NO: 149995 - RNA, 32 nt, Human
gaaccacacucccauuccccacagcagcugca

SEQ ID NO: 149996 - RNA, 24 nt, Human
gaaccacagaaaaucugccugcca

SEQ ID NO: 149997 - RNA, 23 nt, Human
gaaccacagacagggacccucca

SEQ ID NO: 149998 - RNA, 32 nt, Human
gaaccacagaucuggaggcugggaaauccaag

SEQ ID NO: 149999 - RNA, 32 nt, Human
gaaccacagccauccugggaggcuuucuccca

SEQ ID NO: 150000 - RNA, 32 nt, Human
gaaccacaggcaggcaccaccauacccagcua

SEQ ID NO: 150001 - RNA, 23 nt, Human
gaaccacaggcgugccacugcac

SEQ ID NO: 150002 - RNA, 21 nt, Human
gaaccacagggauggccccca

SEQ ID NO: 150003 - RNA, 31 nt, Human
gaaccacaguuucaccaucacccgcccauuc

SEQ ID NO: 150004 - RNA, 32 nt, Human
gaaccacaucuucuucagggaucgauauggag

SEQ ID NO: 150005 - RNA, 32 nt, Human
gaaccacccuugagagaagaggcagcagcagc

SEQ ID NO: 150006 - RNA, 32 nt, Human
gaaccaccuccagguggggagggcaguaacga

SEQ ID NO: 150007 - RNA, 32 nt, Human
gaaccaccuccggguuuccaucaugucaaggu

SEQ ID NO: 150008 - RNA, 32 nt, Human
gaaccacugagaauauuguugcugcucuuuug

SEQ ID NO: 150009 - RNA, 32 nt, Human
gaaccacugaucuuuuugcuggcuccaguuuu

SEQ ID NO: 150010 - RNA, 32 nt, Human
gaaccacugcacccagccugcugauccuuucu

SEQ ID NO: 150011 - RNA, 27 nt, Human
gaaccacuguguccaccccugccucua

SEQ ID NO: 150012 - RNA, 32 nt, Human
gaaccacuucccucaucucuccuccaagacac

SEQ ID NO: 150013 - RNA, 32 nt, Human
gaaccagaacaaccagagugcacuuuuccuuc

SEQ ID NO: 150014 - RNA, 32 nt, Human
gaaccagaagaagagaccugcaacugugagag

SEQ ID NO: 150015 - RNA, 32 nt, Human
gaaccagacaugcuuucaggccaucugcagga

SEQ ID NO: 150016 - RNA, 32 nt, Human
gaaccagacugcagaauggaggggugggaacu

SEQ ID NO: 150017 - RNA, 21 nt, Human
gaaccagagaggaaccagagg

SEQ ID NO: 150018 - RNA, 32 nt, Human
gaaccagagagguggagguugcagugaaccga

SEQ ID NO: 150019 - RNA, 32 nt, Human
gaaccagaggcagagagacgaggauacccagc

SEQ ID NO: 150020 - RNA, 32 nt, Human
gaaccagaggguggagguugguguggaagagg

SEQ ID NO: 150021 - RNA, 32 nt, Human
gaaccagagggugggagcaggcggaauccaac

SEQ ID NO: 150022 - RNA, 32 nt, Human
gaaccagaguagagauugacagugagcugagc

SEQ ID NO: 150023 - RNA, 32 nt, Human
gaaccagaugggcugggcagaucaagcacaaa

SEQ ID NO: 150024 - RNA, 32 nt, Human
gaaccagcaacagacaugaaauggcaguugua

SEQ ID NO: 150025 - RNA, 32 nt, Human
gaaccagcagaacaugaacccugcuggggagg

SEQ ID NO: 150026 - RNA, 32 nt, Human
gaaccagcagagccacauggaggacagacaga

SEQ ID NO: 150027 - RNA, 32 nt, Human
gaaccagcaggcaaggcgaggugcccgcucag

SEQ ID NO: 150028 - RNA, 32 nt, Human
gaaccagcagugcuaguaacuaccucacagag

SEQ ID NO: 150029 - RNA, 32 nt, Human
gaaccagccaacacaugggcuacugcugggaa

SEQ ID NO: 150030 - RNA, 32 nt, Human
gaaccagccagcugccccuggggccuuugcag

SEQ ID NO: 150031 - RNA, 32 nt, Human
gaaccagcccuggugacaccuggaccuuggac

SEQ ID NO: 150032 - RNA, 32 nt, Human
gaaccagcguucuaacaguuucagcuucugau

SEQ ID NO: 150033 - RNA, 32 nt, Human
gaaccagcucauguuuggaaaaggaaucuucc

SEQ ID NO: 150034 - RNA, 21 nt, Human
gaaccagcuccgcuccggagg

SEQ ID NO: 150035 - RNA, 21 nt, Human
gaaccaggaaaggacaagaaa

SEQ ID NO: 150036 - RNA, 23 nt, Human
gaaccaggaaggcagagguugca

SEQ ID NO: 150037 - RNA, 32 nt, Human
gaaccaggaaggcagagguugcacugagcuga

SEQ ID NO: 150038 - RNA, 32 nt, Human
gaaccaggaagugagcccuugccagacacuga

SEQ ID NO: 150039 - RNA, 32 nt, Human
gaaccaggaaguggguccucaccagaaaacaa

SEQ ID NO: 150040 - RNA, 23 nt, Human
gaaccaggagacggagguugcag

SEQ ID NO: 150041 - RNA, 26 nt, Human
gaaccaggagacggagguugcaguga

SEQ ID NO: 150042 - RNA, 32 nt, Human
gaaccaggagacggagguugcagugagcugaa

SEQ ID NO: 150043 - RNA, 32 nt, Human
gaaccaggagacggagguuucagugaaugaag

SEQ ID NO: 150044 - RNA, 23 nt, Human
gaaccaggaggaggagguugcag

SEQ ID NO: 150045 - RNA, 26 nt, Human
gaaccaggaggaggagguugcaguga

SEQ ID NO: 150046 - RNA, 23 nt, Human
gaaccaggaggcggaggcugcag

SEQ ID NO: 150047 - RNA, 26 nt, Human
gaaccaggaggcggaggcugcaguga

SEQ ID NO: 150048 - RNA, 23 nt, Human
gaaccaggaggcggagguugcag

SEQ ID NO: 150049 - RNA, 26 nt, Human
gaaccaggaggcggagguugcaguga

SEQ ID NO: 150050 - RNA, 23 nt, Human
gaaccaggagguggacguugcag

SEQ ID NO: 150051 - RNA, 26 nt, Human
gaaccaggagguggacguugcaguga

SEQ ID NO: 150052 - RNA, 32 nt, Human
gaaccaggagguggacguugcagugaucccag

SEQ ID NO: 150053 - RNA, 23 nt, Human
gaaccaggagguggagguugcag

SEQ ID NO: 150054 - RNA, 26 nt, Human
gaaccaggagguggagguugcaguga

SEQ ID NO: 150055 - RNA, 32 nt, Human
gaaccaggaugauaagacacauggagcagagc

SEQ ID NO: 150056 - RNA, 32 nt, Human
gaaccaggauggggagguugcagugagccgag

SEQ ID NO: 150057 - RNA, 32 nt, Human
gaaccaggcagguccugaaagcauuuuccaua

SEQ ID NO: 150058 - RNA, 31 nt, Human
gaaccaggcauggaaagauggggagcucugg

SEQ ID NO: 150059 - RNA, 23 nt, Human
gaaccaggccggccacucagaga

SEQ ID NO: 150060 - RNA, 32 nt, Human
gaaccaggcugcagagccgggccaagggauua

SEQ ID NO: 150061 - RNA, 25 nt, Human
gaaccaggcuggcaccgcccagagg

SEQ ID NO: 150062 - RNA, 32 nt, Human
gaaccagggaaacccagguucccugggcccug

SEQ ID NO: 150063 - RNA, 32 nt, Human
gaaccagggaagcggagguugcagugagccga

SEQ ID NO: 150064 - RNA, 32 nt, Human
gaaccagggaggaggagcuugcagugagccga

SEQ ID NO: 150065 - RNA, 24 nt, Human
gaaccagggaggcagagauugcag

SEQ ID NO: 150066 - RNA, 32 nt, Human
gaaccagggaggcagagauugcagugagccga

SEQ ID NO: 150067 - RNA, 32 nt, Human
gaaccagggaggcagaggcugcggugagccga

SEQ ID NO: 150068 - RNA, 32 nt, Human
gaaccagggaggcagagguugcagugagccca

SEQ ID NO: 150069 - RNA, 27 nt, Human
gaaccagggaggcagagguugugguga

SEQ ID NO: 150070 - RNA, 32 nt, Human
gaaccagggaggcagagguuguggugagccga

SEQ ID NO: 150071 - RNA, 24 nt, Human
gaaccagggaggcagaguuugcag

SEQ ID NO: 150072 - RNA, 32 nt, Human
gaaccagggaggcagaguuugcagugaaugga

SEQ ID NO: 150073 - RNA, 24 nt, Human
gaaccagggaggcggagguugcag

SEQ ID NO: 150074 - RNA, 32 nt, Human
gaaccagggaggcggagguugcagcaagccaa

SEQ ID NO: 150075 - RNA, 27 nt, Human
gaaccagggaggcggagguugcaguga

SEQ ID NO: 150076 - RNA, 32 nt, Human
gaaccagggaggcggagguugcagugagccga

SEQ ID NO: 150077 - RNA, 32 nt, Human
gaaccagggaggcggcgguuguggugagcugu

SEQ ID NO: 150078 - RNA, 24 nt, Human
gaaccagggagguagagguugcag

SEQ ID NO: 150079 - RNA, 32 nt, Human
gaaccagggagguagagguugcagugagcuga

SEQ ID NO: 150080 - RNA, 24 nt, Human
gaaccagggagguggagguugcag

SEQ ID NO: 150081 - RNA, 27 nt, Human
gaaccagggagguggagguugcaguga

SEQ ID NO: 150082 - RNA, 32 nt, Human
gaaccagggagguggagguugcagugagccaa

SEQ ID NO: 150083 - RNA, 32 nt, Human
gaaccagggagguggagguugcagugagccga

SEQ ID NO: 150084 - RNA, 32 nt, Human
gaaccagggagguggagguugcagugagcuga

SEQ ID NO: 150085 - RNA, 24 nt, Human
gaaccagggagucagagguugcag

SEQ ID NO: 150086 - RNA, 32 nt, Human
gaaccagggagucagagguuucagugagccaa

SEQ ID NO: 150087 - RNA, 32 nt, Human
gaaccagggagucggagauugcagugagcuga

SEQ ID NO: 150088 - RNA, 32 nt, Human
gaaccagggccucccuguucacggugacacag

SEQ ID NO: 150089 - RNA, 32 nt, Human
gaaccagggccuggagagccuggaccugcaga

SEQ ID NO: 150090 - RNA, 32 nt, Human
gaaccaggguggaagcgccaggagcagcugca

SEQ ID NO: 150091 - RNA, 32 nt, Human
gaaccaggucucucaaaagaaaggacagauag

SEQ ID NO: 150092 - RNA, 32 nt, Human
gaaccagucauggaaacuugugcucaaacuaa

SEQ ID NO: 150093 - RNA, 32 nt, Human
gaaccagugcccggccccacacugccucugug

SEQ ID NO: 150094 - RNA, 32 nt, Human
gaaccagugcugaggucuucugcagcaguacu

SEQ ID NO: 150095 - RNA, 32 nt, Human
gaaccagugggacaaacugccuccuggagguu

SEQ ID NO: 150096 - RNA, 31 nt, Human
gaaccagugggggaaagauggaucuugaagc

SEQ ID NO: 150097 - RNA, 32 nt, Human
gaaccaguguggccgagguugcagugagugua

SEQ ID NO: 150098 - RNA, 32 nt, Human
gaaccaguuauccuaagaauucugagcacgcc

SEQ ID NO: 150099 - RNA, 32 nt, Human
gaaccaguucucuacuccuucccuucacuucu

SEQ ID NO: 150100 - RNA, 24 nt, Human
gaaccauaauugugccacugcacu

SEQ ID NO: 150101 - RNA, 32 nt, Human
gaaccauagaagagaggaagaaaacaaagggc

SEQ ID NO: 150102 - RNA, 21 nt, Human
gaaccauccuugcaucccaga

SEQ ID NO: 150103 - RNA, 32 nt, Human
gaaccaucgcacugcaaccuguugcuuagccc

SEQ ID NO: 150104 - RNA, 32 nt, Human
gaaccaucuaccugcuuuuccucucucuccca

SEQ ID NO: 150105 - RNA, 32 nt, Human
gaaccaucucaagugggucuaccuccucgccu

SEQ ID NO: 150106 - RNA, 32 nt, Human
gaaccaucucugaauucugaauagcugacaac

SEQ ID NO: 150107 - RNA, 32 nt, Human
gaaccaucucugcuuugcucaucacuguuucc

SEQ ID NO: 150108 - RNA, 32 nt, Human
gaaccaucuucucccuuuuugcacguuuugcu

SEQ ID NO: 150109 - RNA, 32 nt, Human
gaaccaugauugcacuccaaccugggcgacag

SEQ ID NO: 150110 - RNA, 21 nt, Human
gaaccaugcugcuacccaaga

SEQ ID NO: 150111 - RNA, 25 nt, Human
gaaccauguacugacguccucuuca

SEQ ID NO: 150112 - RNA, 24 nt, Human
gaaccauguuggcaccacugcacu

SEQ ID NO: 150113 - RNA, 32 nt, Human
gaaccauuaagaaccuauugaguggacauucu

SEQ ID NO: 150114 - RNA, 32 nt, Human
gaaccauugacagaagagucuagcagucucag

SEQ ID NO: 150115 - RNA, 32 nt, Human
gaaccauuguacuccagccugggugacagagc

SEQ ID NO: 150116 - RNA, 32 nt, Human
gaaccauuucaaucuucugccuccuggauauc

SEQ ID NO: 150117 - RNA, 32 nt, Human
gaaccauuucuuuucccugaugcaggcagagc

SEQ ID NO: 150118 - RNA, 32 nt, Human
gaaccauuuggaaaaaugaaauguaguaguuc

SEQ ID NO: 150119 - RNA, 32 nt, Human
gaaccauuuucuuccucuuuaccucuuaaaac

SEQ ID NO: 150120 - RNA, 32 nt, Human
gaacccaaaaggcagacauugcagugagccaa

SEQ ID NO: 150121 - RNA, 24 nt, Human
gaacccaaaagguggaggcugcag

SEQ ID NO: 150122 - RNA, 32 nt, Human
gaacccaaacuuugacuacaucaguccgcacc

SEQ ID NO: 150123 - RNA, 32 nt, Human
gaacccaaauggggaaagaggaagggaacugu

SEQ ID NO: 150124 - RNA, 32 nt, Human
gaacccaacugaucuuuugagauguugugugc

SEQ ID NO: 150125 - RNA, 32 nt, Human
gaacccaagaaguggagguugcagugagccaa

SEQ ID NO: 150126 - RNA, 23 nt, Human
gaacccaagaggcagaggaugca

SEQ ID NO: 150127 - RNA, 32 nt, Human
gaacccaagaggcagaggaugcaaugagccaa

SEQ ID NO: 150128 - RNA, 24 nt, Human
gaacccaagaggcagaggucgcag

SEQ ID NO: 150129 - RNA, 32 nt, Human
gaacccaagaggcagagguugcagugaacuga

SEQ ID NO: 150130 - RNA, 23 nt, Human
gaacccaagaggcagagguugua

SEQ ID NO: 150131 - RNA, 24 nt, Human
gaacccaagaggcagaguuugcag

SEQ ID NO: 150132 - RNA, 32 nt, Human
gaacccaagaggcagaguuugcagugagcuga

SEQ ID NO: 150133 - RNA, 24 nt, Human
gaacccaagaggcggagacugcag

SEQ ID NO: 150134 - RNA, 32 nt, Human
gaacccaagaggcggagguugcagugagccaa

SEQ ID NO: 150135 - RNA, 32 nt, Human
gaacccaagaggcggagguuguggugagccga

SEQ ID NO: 150136 - RNA, 32 nt, Human
gaacccaagaggucgaggcugcagugagccaa

SEQ ID NO: 150137 - RNA, 32 nt, Human
gaacccaagagguggaggcugaagugagccaa

SEQ ID NO: 150138 - RNA, 24 nt, Human
gaacccaagagguggagguugcgg

SEQ ID NO: 150139 - RNA, 32 nt, Human
gaacccaagagguggagguugcggugagccaa

SEQ ID NO: 150140 - RNA, 32 nt, Human
gaacccaagaugcaagaaggaggcuaugcuca

SEQ ID NO: 150141 - RNA, 32 nt, Human
gaacccaagguugagugcaacugggguugcac

SEQ ID NO: 150142 - RNA, 32 nt, Human
gaacccacaccuggagugaggaagggggccug

SEQ ID NO: 150143 - RNA, 19 nt, Human
gaacccacagccuuccccu

SEQ ID NO: 150144 - RNA, 24 nt, Human
gaacccacagggcagaggucacag

SEQ ID NO: 150145 - RNA, 32 nt, Human
gaacccacagggcagaggucacagugagccaa

SEQ ID NO: 150146 - RNA, 32 nt, Human
gaacccaccagccugacucucucccucccucu

SEQ ID NO: 150147 - RNA, 20 nt, Human
gaacccaccucccugucccu

SEQ ID NO: 150148 - RNA, 32 nt, Human
gaacccacuuuggaccaucacacacauuucag

SEQ ID NO: 150149 - RNA, 32 nt, Human
gaacccagaaagcggagguugcagugaccugg

SEQ ID NO: 150150 - RNA, 32 nt, Human
gaacccagaagacagguugcagugagccaaga

SEQ ID NO: 150151 - RNA, 32 nt, Human
gaacccagaagagaggguggugcccaugagug

SEQ ID NO: 150152 - RNA, 32 nt, Human
gaacccagaagcggagguugcagugagcugag

SEQ ID NO: 150153 - RNA, 24 nt, Human
gaacccagaaggcagagcuugcag

SEQ ID NO: 150154 - RNA, 23 nt, Human
gaacccagaaggcagagguugca

SEQ ID NO: 150155 - RNA, 24 nt, Human
gaacccagaaggcagagguugcag

SEQ ID NO: 150156 - RNA, 32 nt, Human
gaacccagaaggcagagguugcagugagcuga

SEQ ID NO: 150157 - RNA, 32 nt, Human
gaacccagaaggcagagguugcaugaugcaau

SEQ ID NO: 150158 - RNA, 24 nt, Human
gaacccagaaggcgaagguugcag

SEQ ID NO: 150159 - RNA, 32 nt, Human
gaacccagaaggcggaaguugcagugagccga

SEQ ID NO: 150160 - RNA, 32 nt, Human
gaacccagaaggcggaaguugcagugagcuga

SEQ ID NO: 150161 - RNA, 32 nt, Human
gaacccagaagguagagguugcagccaagauc

SEQ ID NO: 150162 - RNA, 32 nt, Human
gaacccagaaggucaaggcugcaaugagccau

SEQ ID NO: 150163 - RNA, 24 nt, Human
gaacccagaaggugcagguugcag

SEQ ID NO: 150164 - RNA, 32 nt, Human
gaacccagaaggugcagguugcagugagcuga

SEQ ID NO: 150165 - RNA, 32 nt, Human
gaacccagaagguggagguagcagugagccga

SEQ ID NO: 150166 - RNA, 32 nt, Human
gaacccagaagguggagguugcagugagccga

SEQ ID NO: 150167 - RNA, 32 nt, Human
gaacccagacucagacauuggcaccaauccag

SEQ ID NO: 150168 - RNA, 19 nt, Human
gaacccagacucugucucc

SEQ ID NO: 150169 - RNA, 32 nt, Human
gaacccagacuggacuucagucucccuccaug

SEQ ID NO: 150170 - RNA, 26 nt, Human
gaacccagagcccccaccccagccca

SEQ ID NO: 150171 - RNA, 23 nt, Human
gaacccagaggcggagguuguag

SEQ ID NO: 150172 - RNA, 32 nt, Human
gaacccagaggcggagguuguagugagccgaa

SEQ ID NO: 150173 - RNA, 24 nt, Human
gaacccagauagcagagguugcag

SEQ ID NO: 150174 - RNA, 32 nt, Human
gaacccagauagcagagguugcagugagcuga

SEQ ID NO: 150175 - RNA, 20 nt, Human
gaacccagaugcuguccccu

SEQ ID NO: 150176 - RNA, 23 nt, Human
gaacccagauugcccacugcacu

SEQ ID NO: 150177 - RNA, 32 nt, Human
gaacccagcaaauaugucaaaauaccagagca

SEQ ID NO: 150178 - RNA, 24 nt, Human
gaacccagcagauggagguugcag

SEQ ID NO: 150179 - RNA, 32 nt, Human
gaacccagcagauggagguugcagugagccaa

SEQ ID NO: 150180 - RNA, 21 nt, Human
gaacccagcagcccccaccua

SEQ ID NO: 150181 - RNA, 32 nt, Human
gaacccagcaggaucacagcugccugugcacg

SEQ ID NO: 150182 - RNA, 24 nt, Human
gaacccagcaggcagagguugcag

SEQ ID NO: 150183 - RNA, 32 nt, Human
gaacccagcaggcagagguugcagugagccaa

SEQ ID NO: 150184 - RNA, 24 nt, Human
gaacccagcaggcggagguugcgg

SEQ ID NO: 150185 - RNA, 32 nt, Human
gaacccagcaggcggagguugcggugagucga

SEQ ID NO: 150186 - RNA, 32 nt, Human
gaacccagcagggaugagccacaaguuuccuu

SEQ ID NO: 150187 - RNA, 32 nt, Human
gaacccagcagugcccugcccugcagucugag

SEQ ID NO: 150188 - RNA, 32 nt, Human
gaacccagcaucacaggucuacccacagaacc

SEQ ID NO: 150189 - RNA, 19 nt, Human
gaacccagccacugccccu

SEQ ID NO: 150190 - RNA, 32 nt, Human
gaacccagcgggaagagguugcagugagccaa

SEQ ID NO: 150191 - RNA, 24 nt, Human
gaacccaggaaauagagguugcag

SEQ ID NO: 150192 - RNA, 32 nt, Human
gaacccaggaaccccaaggcacccaacucgca

SEQ ID NO: 150193 - RNA, 24 nt, Human
gaacccaggaagaggagguugcag

SEQ ID NO: 150194 - RNA, 32 nt, Human
gaacccaggaagaggagguugcagugagccga

SEQ ID NO: 150195 - RNA, 24 nt, Human
gaacccaggaagcagagguugcag

SEQ ID NO: 150196 - RNA, 32 nt, Human
gaacccaggaagcagagguugcaguaagcuga

SEQ ID NO: 150197 - RNA, 32 nt, Human
gaacccaggaagcagagguugcagugagcaga

SEQ ID NO: 150198 - RNA, 32 nt, Human
gaacccaggaagcagagguugcagugagcuga

SEQ ID NO: 150199 - RNA, 32 nt, Human
gaacccaggaagcagauguuguaccgagcuga

SEQ ID NO: 150200 - RNA, 23 nt, Human
gaacccaggaagcggagguugca

SEQ ID NO: 150201 - RNA, 32 nt, Human
gaacccaggaagcggagguugcagugagccga

SEQ ID NO: 150202 - RNA, 32 nt, Human
gaacccaggaagcggagguuguggugagccaa

SEQ ID NO: 150203 - RNA, 23 nt, Human
gaacccaggaagcgggguugcag

SEQ ID NO: 150204 - RNA, 32 nt, Human
gaacccaggaagcgggguugcagugagccaaa

SEQ ID NO: 150205 - RNA, 32 nt, Human
gaacccaggaaguagagguugcagugagccga

SEQ ID NO: 150206 - RNA, 32 nt, Human
gaacccaggaaguggagacugcagugagccga

SEQ ID NO: 150207 - RNA, 24 nt, Human
gaacccaggaaguggagguugcag

SEQ ID NO: 150208 - RNA, 32 nt, Human
gaacccaggaaguggagguugcagugagccga

SEQ ID NO: 150209 - RNA, 32 nt, Human
gaacccaggaaguggagguugcagugagcuaa

SEQ ID NO: 150210 - RNA, 32 nt, Human
gaacccaggaaguggagguugcagugagcuga

SEQ ID NO: 150211 - RNA, 32 nt, Human
gaacccaggaaguggcaguugcagugagccga

SEQ ID NO: 150212 - RNA, 32 nt, Human
gaacccaggacacggagauugcagugagccaa

SEQ ID NO: 150213 - RNA, 32 nt, Human
gaacccaggaccucuggaccucagguucccaa

SEQ ID NO: 150214 - RNA, 24 nt, Human
gaacccaggacgcagagguugcgg

SEQ ID NO: 150215 - RNA, 32 nt, Human
gaacccaggacgcagagguugcggugagccaa

SEQ ID NO: 150216 - RNA, 32 nt, Human
gaacccaggagacagagguugcagugagccaa

SEQ ID NO: 150217 - RNA, 24 nt, Human
gaacccaggagacagagguuguag

SEQ ID NO: 150218 - RNA, 32 nt, Human
gaacccaggagacagagguuguagugagcuga

SEQ ID NO: 150219 - RNA, 24 nt, Human
gaacccaggagacagagguugugg

SEQ ID NO: 150220 - RNA, 32 nt, Human
gaacccaggagacagagguugugguggggcaa

SEQ ID NO: 150221 - RNA, 32 nt, Human
gaacccaggagacagggguugcagugagccaa

SEQ ID NO: 150222 - RNA, 22 nt, Human
gaacccaggagacagguugcag

SEQ ID NO: 150223 - RNA, 32 nt, Human
gaacccaggagacagguugcagugagccgaga

SEQ ID NO: 150224 - RNA, 32 nt, Human
gaacccaggagacauggguugcagugagccga

SEQ ID NO: 150225 - RNA, 32 nt, Human
gaacccaggagacgagguugcagugagccgag

SEQ ID NO: 150226 - RNA, 32 nt, Human
gaacccaggagacggaaguugcagugagcuga

SEQ ID NO: 150227 - RNA, 32 nt, Human
gaacccaggagacggagcuugcagugagccga

SEQ ID NO: 150228 - RNA, 24 nt, Human
gaacccaggagacggagguugcag

SEQ ID NO: 150229 - RNA, 32 nt, Human
gaacccaggagacggagguugcagugagccga

SEQ ID NO: 150230 - RNA, 24 nt, Human
gaacccaggagacggagguugcgg

SEQ ID NO: 150231 - RNA, 32 nt, Human
gaacccaggagacggagguugcggugaguuga

SEQ ID NO: 150232 - RNA, 24 nt, Human
gaacccaggagacggugguugcag

SEQ ID NO: 150233 - RNA, 32 nt, Human
gaacccaggagacggugguugcagugagccaa

SEQ ID NO: 150234 - RNA, 32 nt, Human
gaacccaggagacggugguugcagugagcgaa

SEQ ID NO: 150235 - RNA, 24 nt, Human
gaacccaggagaggaagguugcag

SEQ ID NO: 150236 - RNA, 23 nt, Human
gaacccaggagauagagguugca

SEQ ID NO: 150237 - RNA, 32 nt, Human
gaacccaggagauagagguugcaaugagccaa

SEQ ID NO: 150238 - RNA, 32 nt, Human
gaacccaggagauggaaguugcagugagcuga

SEQ ID NO: 150239 - RNA, 24 nt, Human
gaacccaggagauggagguugcag

SEQ ID NO: 150240 - RNA, 32 nt, Human
gaacccaggagauggagguugcagugagccaa

SEQ ID NO: 150241 - RNA, 32 nt, Human
gaacccaggagauggagguugcagugagcuga

SEQ ID NO: 150242 - RNA, 24 nt, Human
gaacccaggagauggagguugcgg

SEQ ID NO: 150243 - RNA, 32 nt, Human
gaacccaggagauggagguugcggugagcuga

SEQ ID NO: 150244 - RNA, 24 nt, Human
gaacccaggaggaagagguugcag

SEQ ID NO: 150245 - RNA, 32 nt, Human
gaacccaggaggaagagguugcagugagccaa

SEQ ID NO: 150246 - RNA, 32 nt, Human
gaacccaggaggaggagcuugcagugagccga

SEQ ID NO: 150247 - RNA, 32 nt, Human
gaacccaggaggagguggagaucgcagugagc

SEQ ID NO: 150248 - RNA, 24 nt, Human
gaacccaggaggcaaagguugcag

SEQ ID NO: 150249 - RNA, 32 nt, Human
gaacccaggaggcaaagguugcagugagccac

SEQ ID NO: 150250 - RNA, 32 nt, Human
gaacccaggaggcacagauugcagugagccaa

SEQ ID NO: 150251 - RNA, 32 nt, Human
gaacccaggaggcacagcuugcagugagcgaa

SEQ ID NO: 150252 - RNA, 32 nt, Human
gaacccaggaggcacagguugcagugagccag

SEQ ID NO: 150253 - RNA, 24 nt, Human
gaacccaggaggcagaaguugcag

SEQ ID NO: 150254 - RNA, 32 nt, Human
gaacccaggaggcagaaguugcagugagcaga

SEQ ID NO: 150255 - RNA, 32 nt, Human
gaacccaggaggcagaaguugcagugagccga

SEQ ID NO: 150256 - RNA, 32 nt, Human
gaacccaggaggcagaaguugcagugagcuga

SEQ ID NO: 150257 - RNA, 24 nt, Human
gaacccaggaggcagagaucgcag

SEQ ID NO: 150258 - RNA, 32 nt, Human
gaacccaggaggcagagaucgcagugaguuga

SEQ ID NO: 150259 - RNA, 24 nt, Human
gaacccaggaggcagagauggcag

SEQ ID NO: 150260 - RNA, 24 nt, Human
gaacccaggaggcagagauugcag

SEQ ID NO: 150261 - RNA, 32 nt, Human
gaacccaggaggcagagauugcagugagccaa

SEQ ID NO: 150262 - RNA, 32 nt, Human
gaacccaggaggcagagauugcagugagcuga

SEQ ID NO: 150263 - RNA, 24 nt, Human
gaacccaggaggcagagauugcgg

SEQ ID NO: 150264 - RNA, 32 nt, Human
gaacccaggaggcagagauugcggugagccaa

SEQ ID NO: 150265 - RNA, 32 nt, Human
gaacccaggaggcagagauugcggugagccgg

SEQ ID NO: 150266 - RNA, 24 nt, Human
gaacccaggaggcagagcuugcag

SEQ ID NO: 150267 - RNA, 32 nt, Human
gaacccaggaggcagagcuugcagugagccaa

SEQ ID NO: 150268 - RNA, 32 nt, Human
gaacccaggaggcagagcuugcagugagccga

SEQ ID NO: 150269 - RNA, 32 nt, Human
gaacccaggaggcagagcuugcagugagccua

SEQ ID NO: 150270 - RNA, 32 nt, Human
gaacccaggaggcagagcuugcagugagcuga

SEQ ID NO: 150271 - RNA, 24 nt, Human
gaacccaggaggcagagcuuguag

SEQ ID NO: 150272 - RNA, 32 nt, Human
gaacccaggaggcagagcuuguagugagccua

SEQ ID NO: 150273 - RNA, 24 nt, Human
gaacccaggaggcagaggcugcag

SEQ ID NO: 150274 - RNA, 32 nt, Human
gaacccaggaggcagaggguugcagugagccg

SEQ ID NO: 150275 - RNA, 24 nt, Human
gaacccaggaggcagaggucgcag

SEQ ID NO: 150276 - RNA, 32 nt, Human
gaacccaggaggcagaggucgcagugagucga

SEQ ID NO: 150277 - RNA, 24 nt, Human
gaacccaggaggcagagguuacag

SEQ ID NO: 150278 - RNA, 32 nt, Human
gaacccaggaggcagagguuacagugagcaga

SEQ ID NO: 150279 - RNA, 24 nt, Human
gaacccaggaggcagagguuccag

SEQ ID NO: 150280 - RNA, 22 nt, Human
gaacccaggaggcagagguugc

SEQ ID NO: 150281 - RNA, 23 nt, Human
gaacccaggaggcagagguugca

SEQ ID NO: 150282 - RNA, 32 nt, Human
gaacccaggaggcagagguugcaaugagccaa

SEQ ID NO: 150283 - RNA, 24 nt, Human
gaacccaggaggcagagguugcag

SEQ ID NO: 150284 - RNA, 32 nt, Human
gaacccaggaggcagagguugcagcgagcuga

SEQ ID NO: 150285 - RNA, 32 nt, Human
gaacccaggaggcagagguugcaguaagccaa

SEQ ID NO: 150286 - RNA, 32 nt, Human
gaacccaggaggcagagguugcaguaagccua

SEQ ID NO: 150287 - RNA, 32 nt, Human
gaacccaggaggcagagguugcagucagccaa

SEQ ID NO: 150288 - RNA, 32 nt, Human
gaacccaggaggcagagguugcagugagccaa

SEQ ID NO: 150289 - RNA, 32 nt, Human
gaacccaggaggcagagguugcagugagccga

SEQ ID NO: 150290 - RNA, 32 nt, Human
gaacccaggaggcagagguugcagugagcuaa

SEQ ID NO: 150291 - RNA, 32 nt, Human
gaacccaggaggcagagguugcagugagcuga

SEQ ID NO: 150292 - RNA, 32 nt, Human
gaacccaggaggcagagguugcagugagcugu

SEQ ID NO: 150293 - RNA, 32 nt, Human
gaacccaggaggcagagguugcagugagucaa

SEQ ID NO: 150294 - RNA, 32 nt, Human
gaacccaggaggcagagguugcagugcaccaa

SEQ ID NO: 150295 - RNA, 32 nt, Human
gaacccaggaggcagagguugcagugcgcuga

SEQ ID NO: 150296 - RNA, 32 nt, Human
gaacccaggaggcagagguugcagugggccaa

SEQ ID NO: 150297 - RNA, 24 nt, Human
gaacccaggaggcagagguugcgg

SEQ ID NO: 150298 - RNA, 32 nt, Human
gaacccaggaggcagagguugcggugagccga

SEQ ID NO: 150299 - RNA, 32 nt, Human
gaacccaggaggcagagguugcggugagucga

SEQ ID NO: 150300 - RNA, 32 nt, Human
gaacccaggaggcagagguugcguugagccaa

SEQ ID NO: 150301 - RNA, 24 nt, Human
gaacccaggaggcagagguugggg

SEQ ID NO: 150302 - RNA, 32 nt, Human
gaacccaggaggcagagguuggggugagcuga

SEQ ID NO: 150303 - RNA, 32 nt, Human
gaacccaggaggcagagguuguagugagccaa

SEQ ID NO: 150304 - RNA, 22 nt, Human
gaacccaggaggcagagugagc

SEQ ID NO: 150305 - RNA, 24 nt, Human
gaacccaggaggcagaguuugcag

SEQ ID NO: 150306 - RNA, 32 nt, Human
gaacccaggaggcagaguuugcagucagccaa

SEQ ID NO: 150307 - RNA, 32 nt, Human
gaacccaggaggcagaguuugcagugagccaa

SEQ ID NO: 150308 - RNA, 32 nt, Human
gaacccaggaggcagaguuugcagugagcuga

SEQ ID NO: 150309 - RNA, 24 nt, Human
gaacccaggaggcagcuguugcag

SEQ ID NO: 150310 - RNA, 32 nt, Human
gaacccaggaggcagcuguugcagugagccaa

SEQ ID NO: 150311 - RNA, 24 nt, Human
gaacccaggaggcagugauugcag

SEQ ID NO: 150312 - RNA, 32 nt, Human
gaacccaggaggcagugauugcagugagcuga

SEQ ID NO: 150313 - RNA, 32 nt, Human
gaacccaggaggcagugguugcaaugagccga

SEQ ID NO: 150314 - RNA, 32 nt, Human
gaacccaggaggccgagguugcagugagccaa

SEQ ID NO: 150315 - RNA, 32 nt, Human
gaacccaggaggcgaagguugcaguaaaccaa

SEQ ID NO: 150316 - RNA, 24 nt, Human
gaacccaggaggcggaaguugcag

SEQ ID NO: 150317 - RNA, 32 nt, Human
gaacccaggaggcggaaguugcagugagcuga

SEQ ID NO: 150318 - RNA, 24 nt, Human
gaacccaggaggcggaccuuguag

SEQ ID NO: 150319 - RNA, 32 nt, Human
gaacccaggaggcggaccuuguagugagccga

SEQ ID NO: 150320 - RNA, 24 nt, Human
gaacccaggaggcggacguugcag

SEQ ID NO: 150321 - RNA, 24 nt, Human
gaacccaggaggcggagauugcag

SEQ ID NO: 150322 - RNA, 32 nt, Human
gaacccaggaggcggagauugcagugagccga

SEQ ID NO: 150323 - RNA, 32 nt, Human
gaacccaggaggcggagauugcagugagcuga

SEQ ID NO: 150324 - RNA, 24 nt, Human
gaacccaggaggcggagcuggcag

SEQ ID NO: 150325 - RNA, 32 nt, Human
gaacccaggaggcggagcuggcagugagcuga

SEQ ID NO: 150326 - RNA, 24 nt, Human
gaacccaggaggcggagcuuacag

SEQ ID NO: 150327 - RNA, 24 nt, Human
gaacccaggaggcggagcuugcag

SEQ ID NO: 150328 - RNA, 32 nt, Human
gaacccaggaggcggagcuugcagugagcaga

SEQ ID NO: 150329 - RNA, 32 nt, Human
gaacccaggaggcggagcuugcagugagccaa

SEQ ID NO: 150330 - RNA, 32 nt, Human
gaacccaggaggcggagcuugcagugagccau

SEQ ID NO: 150331 - RNA, 32 nt, Human
gaacccaggaggcggagcuugcagugagccga

SEQ ID NO: 150332 - RNA, 32 nt, Human
gaacccaggaggcggagcuugcagugagcuga

SEQ ID NO: 150333 - RNA, 32 nt, Human
gaacccaggaggcggaggcagaggcugcagug

SEQ ID NO: 150334 - RNA, 24 nt, Human
gaacccaggaggcggaggcugcag

SEQ ID NO: 150335 - RNA, 32 nt, Human
gaacccaggaggcggaggcugcagugagccca

SEQ ID NO: 150336 - RNA, 32 nt, Human
gaacccaggaggcggaggcugcagugagcuga

SEQ ID NO: 150337 - RNA, 24 nt, Human
gaacccaggaggcggagguagcag

SEQ ID NO: 150338 - RNA, 32 nt, Human
gaacccaggaggcggagguagcagugagccaa

SEQ ID NO: 150339 - RNA, 32 nt, Human
gaacccaggaggcggagguaguggugagcaaa

SEQ ID NO: 150340 - RNA, 24 nt, Human
gaacccaggaggcggagguuacag

SEQ ID NO: 150341 - RNA, 32 nt, Human
gaacccaggaggcggagguuacagugagccaa

SEQ ID NO: 150342 - RNA, 24 nt, Human
gaacccaggaggcggagguuccag

SEQ ID NO: 150343 - RNA, 22 nt, Human
gaacccaggaggcggagguugc

SEQ ID NO: 150344 - RNA, 23 nt, Human
gaacccaggaggcggagguugca

SEQ ID NO: 150345 - RNA, 32 nt, Human
gaacccaggaggcggagguugcacugagccga

SEQ ID NO: 150346 - RNA, 24 nt, Human
gaacccaggaggcggagguugcag

SEQ ID NO: 150347 - RNA, 32 nt, Human
gaacccaggaggcggagguugcagggagggag

SEQ ID NO: 150348 - RNA, 32 nt, Human
gaacccaggaggcggagguugcaguaagccaa

SEQ ID NO: 150349 - RNA, 32 nt, Human
gaacccaggaggcggagguugcagugaaccga

SEQ ID NO: 150350 - RNA, 32 nt, Human
gaacccaggaggcggagguugcagugacccga

SEQ ID NO: 150351 - RNA, 32 nt, Human
gaacccaggaggcggagguugcagugagacga

SEQ ID NO: 150352 - RNA, 32 nt, Human
gaacccaggaggcggagguugcagugagcaga

SEQ ID NO: 150353 - RNA, 32 nt, Human
gaacccaggaggcggagguugcagugagccaa

SEQ ID NO: 150354 - RNA, 32 nt, Human
gaacccaggaggcggagguugcagugagccag

SEQ ID NO: 150355 - RNA, 32 nt, Human
gaacccaggaggcggagguugcagugagccga

SEQ ID NO: 150356 - RNA, 32 nt, Human
gaacccaggaggcggagguugcagugagcuca

SEQ ID NO: 150357 - RNA, 32 nt, Human
gaacccaggaggcggagguugcagugagcuga

SEQ ID NO: 150358 - RNA, 32 nt, Human
gaacccaggaggcggagguugcagugauccaa

SEQ ID NO: 150359 - RNA, 32 nt, Human
gaacccaggaggcggagguugccgugagccaa

SEQ ID NO: 150360 - RNA, 24 nt, Human
gaacccaggaggcggagguugcgg

SEQ ID NO: 150361 - RNA, 32 nt, Human
gaacccaggaggcggagguugcggugagccaa

SEQ ID NO: 150362 - RNA, 32 nt, Human
gaacccaggaggcggagguugcggugagccga

SEQ ID NO: 150363 - RNA, 32 nt, Human
gaacccaggaggcggagguugcggugagcuga

SEQ ID NO: 150364 - RNA, 32 nt, Human
gaacccaggaggcggagguugcggugaguuga

SEQ ID NO: 150365 - RNA, 24 nt, Human
gaacccaggaggcggagguuguag

SEQ ID NO: 150366 - RNA, 32 nt, Human
gaacccaggaggcggagguuguagugagccaa

SEQ ID NO: 150367 - RNA, 32 nt, Human
gaacccaggaggcggagguuguggugagccaa

SEQ ID NO: 150368 - RNA, 32 nt, Human
gaacccaggaggcggaguuugcagugagcuga

SEQ ID NO: 150369 - RNA, 32 nt, Human
gaacccaggaggcggcgguugcagugagccaa

SEQ ID NO: 150370 - RNA, 32 nt, Human
gaacccaggaggcggggguugcagugagucga

SEQ ID NO: 150371 - RNA, 24 nt, Human
gaacccaggaggcggugcuugcag

SEQ ID NO: 150372 - RNA, 32 nt, Human
gaacccaggaggcggugcuugcagggagccga

SEQ ID NO: 150373 - RNA, 24 nt, Human
gaacccaggaggcugagguugcag

SEQ ID NO: 150374 - RNA, 32 nt, Human
gaacccaggaggcugagguugcagugagccag

SEQ ID NO: 150375 - RNA, 32 nt, Human
gaacccaggaggcugagguugcagugagccca

SEQ ID NO: 150376 - RNA, 32 nt, Human
gaacccaggagguagaagcugcagugagcagg

SEQ ID NO: 150377 - RNA, 32 nt, Human
gaacccaggagguagaaguugcagugagccga

SEQ ID NO: 150378 - RNA, 24 nt, Human
gaacccaggagguagaggcugcag

SEQ ID NO: 150379 - RNA, 32 nt, Human
gaacccaggagguagaggcugcagugagcagg

SEQ ID NO: 150380 - RNA, 32 nt, Human
gaacccaggagguagaggcugcagugagccgg

SEQ ID NO: 150381 - RNA, 32 nt, Human
gaacccaggagguagaggcugcagugagcugg

SEQ ID NO: 150382 - RNA, 32 nt, Human
gaacccaggagguagagguugcagugagccaa

SEQ ID NO: 150383 - RNA, 32 nt, Human
gaacccaggagguagagguugcagugagccga

SEQ ID NO: 150384 - RNA, 24 nt, Human
gaacccaggaggugaagguugcag

SEQ ID NO: 150385 - RNA, 32 nt, Human
gaacccaggaggugaagguugcagugaccgga

SEQ ID NO: 150386 - RNA, 24 nt, Human
gaacccaggaggugcagguugcag

SEQ ID NO: 150387 - RNA, 32 nt, Human
gaacccaggaggugcagguugcagugagccga

SEQ ID NO: 150388 - RNA, 32 nt, Human
gaacccaggagguggaaguugcuuugagccga

SEQ ID NO: 150389 - RNA, 32 nt, Human
gaacccaggagguggacauuacagugagccca

SEQ ID NO: 150390 - RNA, 24 nt, Human
gaacccaggagguggagacugcag

SEQ ID NO: 150391 - RNA, 32 nt, Human
gaacccaggagguggagacugcagugagccaa

SEQ ID NO: 150392 - RNA, 24 nt, Human
gaacccaggagguggagauugcag

SEQ ID NO: 150393 - RNA, 32 nt, Human
gaacccaggagguggagauugcagugagcuga

SEQ ID NO: 150394 - RNA, 32 nt, Human
gaacccaggagguggagcuugcaaugagccga

SEQ ID NO: 150395 - RNA, 32 nt, Human
gaacccaggagguggagcuugcagugagccga

SEQ ID NO: 150396 - RNA, 24 nt, Human
gaacccaggagguggaggaugcag

SEQ ID NO: 150397 - RNA, 32 nt, Human
gaacccaggagguggaggaugcagugaacuga

SEQ ID NO: 150398 - RNA, 24 nt, Human
gaacccaggagguggaggcugcag

SEQ ID NO: 150399 - RNA, 32 nt, Human
gaacccaggagguggaggcugcagugagcuga

SEQ ID NO: 150400 - RNA, 24 nt, Human
gaacccaggagguggaggcugcgg

SEQ ID NO: 150401 - RNA, 32 nt, Human
gaacccaggagguggaggcugcggugagccga

SEQ ID NO: 150402 - RNA, 24 nt, Human
gaacccaggagguggagguagcag

SEQ ID NO: 150403 - RNA, 32 nt, Human
gaacccaggagguggagguagcagugagccga

SEQ ID NO: 150404 - RNA, 24 nt, Human
gaacccaggagguggagguuacag

SEQ ID NO: 150405 - RNA, 32 nt, Human
gaacccaggagguggagguuacagugagccaa

SEQ ID NO: 150406 - RNA, 32 nt, Human
gaacccaggagguggagguuacagugagcuga

SEQ ID NO: 150407 - RNA, 24 nt, Human
gaacccaggagguggagguuccag

SEQ ID NO: 150408 - RNA, 32 nt, Human
gaacccaggagguggagguuccagugagccaa

SEQ ID NO: 150409 - RNA, 22 nt, Human
gaacccaggagguggagguugc

SEQ ID NO: 150410 - RNA, 23 nt, Human
gaacccaggagguggagguugca

SEQ ID NO: 150411 - RNA, 32 nt, Human
gaacccaggagguggagguugcaagugagcug

SEQ ID NO: 150412 - RNA, 24 nt, Human
gaacccaggagguggagguugcag

SEQ ID NO: 150413 - RNA, 32 nt, Human
gaacccaggagguggagguugcagcaagcaga

SEQ ID NO: 150414 - RNA, 32 nt, Human
gaacccaggagguggagguugcaguaagccaa

SEQ ID NO: 150415 - RNA, 32 nt, Human
gaacccaggagguggagguugcaguaagcuga

SEQ ID NO: 150416 - RNA, 32 nt, Human
gaacccaggagguggagguugcagugaacuga

SEQ ID NO: 150417 - RNA, 32 nt, Human
gaacccaggagguggagguugcagugagcaga

SEQ ID NO: 150418 - RNA, 32 nt, Human
gaacccaggagguggagguugcagugagccaa

SEQ ID NO: 150419 - RNA, 32 nt, Human
gaacccaggagguggagguugcagugagccag

SEQ ID NO: 150420 - RNA, 32 nt, Human
gaacccaggagguggagguugcagugagccga

SEQ ID NO: 150421 - RNA, 32 nt, Human
gaacccaggagguggagguugcagugagcuga

SEQ ID NO: 150422 - RNA, 32 nt, Human
gaacccaggagguggagguugcagugagcugg

SEQ ID NO: 150423 - RNA, 32 nt, Human
gaacccaggagguggagguugcagugaggcaa

SEQ ID NO: 150424 - RNA, 32 nt, Human
gaacccaggagguggagguugcagugagucaa

SEQ ID NO: 150425 - RNA, 32 nt, Human
gaacccaggagguggagguugcagugagucga

SEQ ID NO: 150426 - RNA, 32 nt, Human
gaacccaggagguggagguugcagugggccga

SEQ ID NO: 150427 - RNA, 32 nt, Human
gaacccaggagguggagguugcaguuagcuga

SEQ ID NO: 150428 - RNA, 32 nt, Human
gaacccaggagguggagguugcggugagcuga

SEQ ID NO: 150429 - RNA, 32 nt, Human
gaacccaggagguggagguugcugugagccaa

SEQ ID NO: 150430 - RNA, 32 nt, Human
gaacccaggagguggagguuguagugagacaa

SEQ ID NO: 150431 - RNA, 32 nt, Human
gaacccaggagguggagguuguggugagccaa

SEQ ID NO: 150432 - RNA, 32 nt, Human
gaacccaggagguggagguuguggugagccga

SEQ ID NO: 150433 - RNA, 32 nt, Human
gaacccaggagguggagguuguggugagcuga

SEQ ID NO: 150434 - RNA, 23 nt, Human
gaacccaggagguggaguugcag

SEQ ID NO: 150435 - RNA, 24 nt, Human
gaacccaggagguggaguuugcag

SEQ ID NO: 150436 - RNA, 32 nt, Human
gaacccaggagguggaguuugcagugagcuga

SEQ ID NO: 150437 - RNA, 24 nt, Human
gaacccaggagguggauguugcag

SEQ ID NO: 150438 - RNA, 32 nt, Human
gaacccaggaggugggcauugcagugagccga

SEQ ID NO: 150439 - RNA, 23 nt, Human
gaacccaggagguggggguugca

SEQ ID NO: 150440 - RNA, 32 nt, Human
gaacccaggagguggggguugcaccgagcaga

SEQ ID NO: 150441 - RNA, 24 nt, Human
gaacccaggagguggugguugcag

SEQ ID NO: 150442 - RNA, 32 nt, Human
gaacccaggagguggugguugcagugagccua

SEQ ID NO: 150443 - RNA, 32 nt, Human
gaacccaggagguguugcagugaaccaagauc

SEQ ID NO: 150444 - RNA, 32 nt, Human
gaacccaggagguugaagcugcggugggccau

SEQ ID NO: 150445 - RNA, 32 nt, Human
gaacccaggagguugaggcugcagugagucau

SEQ ID NO: 150446 - RNA, 32 nt, Human
gaacccaggagucaaaagcugcagugagcuac

SEQ ID NO: 150447 - RNA, 24 nt, Human
gaacccaggagucagagguuucag

SEQ ID NO: 150448 - RNA, 32 nt, Human
gaacccaggagucagagguuucagugagccga

SEQ ID NO: 150449 - RNA, 32 nt, Human
gaacccaggagucggagguugcagugaguuga

SEQ ID NO: 150450 - RNA, 32 nt, Human
gaacccaggaguucaagaccagccuggacaac

SEQ ID NO: 150451 - RNA, 32 nt, Human
gaacccaggaguucaagaccagccugggcagc

SEQ ID NO: 150452 - RNA, 32 nt, Human
gaacccaggaguucaagaucagccugggcaac

SEQ ID NO: 150453 - RNA, 32 nt, Human
gaacccaggaguucaagucugcagugagcuau

SEQ ID NO: 150454 - RNA, 32 nt, Human
gaacccaggaguucgagaccagccugggcaac

SEQ ID NO: 150455 - RNA, 32 nt, Human
gaacccaggaguuggagcuugcagugagccga

SEQ ID NO: 150456 - RNA, 24 nt, Human
gaacccaggaugcggagguugcag

SEQ ID NO: 150457 - RNA, 32 nt, Human
gaacccaggaugcggagguugcagugagccga

SEQ ID NO: 150458 - RNA, 32 nt, Human
gaacccaggauuugaacucaguuacuguacaa

SEQ ID NO: 150459 - RNA, 32 nt, Human
gaacccaggcagcuggcaggaguggggugguu

SEQ ID NO: 150460 - RNA, 24 nt, Human
gaacccaggcaguggagguugcag

SEQ ID NO: 150461 - RNA, 32 nt, Human
gaacccaggcaguggagguugcagugagccaa

SEQ ID NO: 150462 - RNA, 32 nt, Human
gaacccaggcgcugccccagcaccuucuccuc

SEQ ID NO: 150463 - RNA, 32 nt, Human
gaacccaggcggcagagguugcagugagucga

SEQ ID NO: 150464 - RNA, 32 nt, Human
gaacccaggcgguggaggcuauaguaagcuga

SEQ ID NO: 150465 - RNA, 32 nt, Human
gaacccaggcucccaguagauuuacuccaucc

SEQ ID NO: 150466 - RNA, 20 nt, Human
gaacccaggcuccccuaccc

SEQ ID NO: 150467 - RNA, 22 nt, Human
gaacccaggcuccugauaucca

SEQ ID NO: 150468 - RNA, 24 nt, Human
gaacccagggggcagagguugcag

SEQ ID NO: 150469 - RNA, 32 nt, Human
gaacccagggggcagagguugcagugagccga

SEQ ID NO: 150470 - RNA, 24 nt, Human
gaacccagggggcggagguugcag

SEQ ID NO: 150471 - RNA, 32 nt, Human
gaacccaggggguggagguugcacugagccga

SEQ ID NO: 150472 - RNA, 23 nt, Human
gaacccagggguagaggccacgg

SEQ ID NO: 150473 - RNA, 32 nt, Human
gaacccagguuagaaggaugggaagagaaaag

SEQ ID NO: 150474 - RNA, 32 nt, Human
gaacccagguuguggagguuguagugagccga

SEQ ID NO: 150475 - RNA, 24 nt, Human
gaacccaguagaggaagguugcag

SEQ ID NO: 150476 - RNA, 32 nt, Human
gaacccaguaggcggaaguugcagugagcuga

SEQ ID NO: 150477 - RNA, 20 nt, Human
gaacccagucccacaccugc

SEQ ID NO: 150478 - RNA, 32 nt, Human
gaacccagucgcgcagcgcugcagugaauuuu

SEQ ID NO: 150479 - RNA, 32 nt, Human
gaacccaguggcggaggcugcagugagccgag

SEQ ID NO: 150480 - RNA, 24 nt, Human
gaacccauaaggcagagguugcag

SEQ ID NO: 150481 - RNA, 32 nt, Human
gaacccauaaggcagagguugcagugagcuga

SEQ ID NO: 150482 - RNA, 17 nt, Human
gaacccauaggcagucc

SEQ ID NO: 150483 - RNA, 32 nt, Human
gaacccaucggcucugccacggacaucugggg

SEQ ID NO: 150484 - RNA, 24 nt, Human
gaacccaugaggcggagguugcag

SEQ ID NO: 150485 - RNA, 32 nt, Human
gaacccaugaggcggagguugcagugagccga

SEQ ID NO: 150486 - RNA, 24 nt, Human
gaacccaugagguggaaguugcag

SEQ ID NO: 150487 - RNA, 24 nt, Human
gaacccaugagguggagguugcgg

SEQ ID NO: 150488 - RNA, 32 nt, Human
gaacccaugagguggagguugcggugagccaa

SEQ ID NO: 150489 - RNA, 32 nt, Human
gaacccauggaaaaaugccaucaaaugaauaa

SEQ ID NO: 150490 - RNA, 19 nt, Human
gaacccaugugugacaguc

SEQ ID NO: 150491 - RNA, 32 nt, Human
gaacccauucacccuucacccucacuccuggu

SEQ ID NO: 150492 - RNA, 18 nt, Human
gaacccauuccugucccc

SEQ ID NO: 150493 - RNA, 32 nt, Human
gaacccauugggaccgagccuggggagcaucc

SEQ ID NO: 150494 - RNA, 25 nt, Human
gaaccccaaaauucugggguugcag

SEQ ID NO: 150495 - RNA, 32 nt, Human
gaaccccaaaccacuaaaaacuaccuaaacac

SEQ ID NO: 150496 - RNA, 32 nt, Human
gaaccccaagcgcuaccagcagacucuggagg

SEQ ID NO: 150497 - RNA, 32 nt, Human
gaaccccaccacugcuuauggucuccacugcu

SEQ ID NO: 150498 - RNA, 32 nt, Human
gaaccccagaggcagaggcugaagugagccaa

SEQ ID NO: 150499 - RNA, 24 nt, Human
gaaccccagaggcagagguugcag

SEQ ID NO: 150500 - RNA, 32 nt, Human
gaaccccagaggcagagguugcagugagcuga

SEQ ID NO: 150501 - RNA, 24 nt, Human
gaaccccagaggcagagguugcgg

SEQ ID NO: 150502 - RNA, 32 nt, Human
gaaccccagaggcagagguugcggugagccga

SEQ ID NO: 150503 - RNA, 32 nt, Human
gaaccccagaggcggagguugcagugagccga

SEQ ID NO: 150504 - RNA, 24 nt, Human
gaaccccagaggucaagacugcag

SEQ ID NO: 150505 - RNA, 32 nt, Human
gaaccccagaggucaagacugcagugagcuga

SEQ ID NO: 150506 - RNA, 24 nt, Human
gaaccccagagguggagguugcag

SEQ ID NO: 150507 - RNA, 32 nt, Human
gaaccccagagguggagguugcagugagccga

SEQ ID NO: 150508 - RNA, 32 nt, Human
gaaccccagggcacuccacugcagcaggaggg

SEQ ID NO: 150509 - RNA, 32 nt, Human
gaaccccagggugggaccccagcacagaggca

SEQ ID NO: 150510 - RNA, 32 nt, Human
gaaccccaugaagcugauggguuugcaggaag

SEQ ID NO: 150511 - RNA, 32 nt, Human
gaaccccauuucuccuccucuuaggucauuuu

SEQ ID NO: 150512 - RNA, 32 nt, Human
gaacccccaaggcggagcuugcagugagccga

SEQ ID NO: 150513 - RNA, 32 nt, Human
gaacccccaccaggagggugagggggagugaa

SEQ ID NO: 150514 - RNA, 32 nt, Human
gaacccccaccaugaagcccagucccagccag

SEQ ID NO: 150515 - RNA, 32 nt, Human
gaacccccacccaccagccuccggaacagggc

SEQ ID NO: 150516 - RNA, 32 nt, Human
gaacccccagaacgccucccggaagaagagcc

SEQ ID NO: 150517 - RNA, 32 nt, Human
gaacccccugcagcucucuuguggaccccugc

SEQ ID NO: 150518 - RNA, 32 nt, Human
gaacccccuuucccugcccuccagagacugau

SEQ ID NO: 150519 - RNA, 23 nt, Human
gaaccccgaagauacguauuucc

SEQ ID NO: 150520 - RNA, 24 nt, Human
gaaccccggagauggagguugcag

SEQ ID NO: 150521 - RNA, 32 nt, Human
gaaccccggagauggagguugcagugagccaa

SEQ ID NO: 150522 - RNA, 32 nt, Human
gaaccccggaggcagagguuucagugagccga

SEQ ID NO: 150523 - RNA, 32 nt, Human
gaaccccggaggcggagcuugcagugagccga

SEQ ID NO: 150524 - RNA, 24 nt, Human
gaaccccggaggcggagguugcag

SEQ ID NO: 150525 - RNA, 32 nt, Human
gaaccccggaggcggagguugcagugagcuga

SEQ ID NO: 150526 - RNA, 32 nt, Human
gaaccccggagguagagguugcagugagccga

SEQ ID NO: 150527 - RNA, 32 nt, Human
gaaccccggaguucgaggccagccugguuaac

SEQ ID NO: 150528 - RNA, 25 nt, Human
gaaccccgggggguggagccugcag

SEQ ID NO: 150529 - RNA, 32 nt, Human
gaaccccucagcucugaggucugugaucgccg

SEQ ID NO: 150530 - RNA, 32 nt, Human
gaaccccuccuuucuuugugcuggugucuggg

SEQ ID NO: 150531 - RNA, 32 nt, Human
gaaccccucucagggcugcagcuuacaggugg

SEQ ID NO: 150532 - RNA, 24 nt, Human
gaaccccugaccucaagugaucca

SEQ ID NO: 150533 - RNA, 23 nt, Human
gaaccccugaccucaggugaucc

SEQ ID NO: 150534 - RNA, 24 nt, Human
gaaccccugagcucaggugaucca

SEQ ID NO: 150535 - RNA, 32 nt, Human
gaaccccugcugcgcgcagcuggcugggcuca

SEQ ID NO: 150536 - RNA, 32 nt, Human
gaaccccuggacaacugaccacacccacaagg

SEQ ID NO: 150537 - RNA, 32 nt, Human
gaaccccugucggccaaaacccccacacccgg

SEQ ID NO: 150538 - RNA, 24 nt, Human
gaacccgagagacggagguugcag

SEQ ID NO: 150539 - RNA, 32 nt, Human
gaacccgagagacggagguugcagugagcuga

SEQ ID NO: 150540 - RNA, 24 nt, Human
gaacccgagaggcggaaguugcag

SEQ ID NO: 150541 - RNA, 32 nt, Human
gaacccgagaggcggaaguugcagugagccga

SEQ ID NO: 150542 - RNA, 32 nt, Human
gaacccgagaggcggagcuugcagugagccaa

SEQ ID NO: 150543 - RNA, 32 nt, Human
gaacccgagaggcggagcuugcagugagcuga

SEQ ID NO: 150544 - RNA, 24 nt, Human
gaacccgagaggcggagguggcag

SEQ ID NO: 150545 - RNA, 24 nt, Human
gaacccgagaggcggagguugcag

SEQ ID NO: 150546 - RNA, 32 nt, Human
gaacccgagaggcggagguugcagugagccca

SEQ ID NO: 150547 - RNA, 32 nt, Human
gaacccgagaggcggagguugcagugagccga

SEQ ID NO: 150548 - RNA, 21 nt, Human
gaacccgagagguggagguug

SEQ ID NO: 150549 - RNA, 32 nt, Human
gaacccgagagguggagguugaagugagccaa

SEQ ID NO: 150550 - RNA, 32 nt, Human
gaacccgagagguggagguugcagugaaccaa

SEQ ID NO: 150551 - RNA, 32 nt, Human
gaacccgagagguggagguugcagugagccaa

SEQ ID NO: 150552 - RNA, 32 nt, Human
gaacccgaggcagguggaucaccugaggucgg

SEQ ID NO: 150553 - RNA, 32 nt, Human
gaacccgaggugggcggaucaccugaggucag

SEQ ID NO: 150554 - RNA, 32 nt, Human
gaacccgcgacagggagguugugaugagccaa

SEQ ID NO: 150555 - RNA, 24 nt, Human
gaacccgcgaggcggagacugcag

SEQ ID NO: 150556 - RNA, 32 nt, Human
gaacccgcgaggcggagacugcagugagccga

SEQ ID NO: 150557 - RNA, 32 nt, Human
gaacccgcuuccaccuccgucucccucuuccc

SEQ ID NO: 150558 - RNA, 32 nt, Human
gaacccgcuugccugcacuccauccugucugc

SEQ ID NO: 150559 - RNA, 23 nt, Human
gaacccggaagcgaagguugcag

SEQ ID NO: 150560 - RNA, 32 nt, Human
gaacccggaagcgaagguugcagugagccaag

SEQ ID NO: 150561 - RNA, 24 nt, Human
gaacccggaaggcagagcuugcag

SEQ ID NO: 150562 - RNA, 32 nt, Human
gaacccggaaggcagagcuugcagugagccga

SEQ ID NO: 150563 - RNA, 24 nt, Human
gaacccggaaggcagagguugcag

SEQ ID NO: 150564 - RNA, 32 nt, Human
gaacccggaaggcagagguugcagugagccga

SEQ ID NO: 150565 - RNA, 24 nt, Human
gaacccggaaggcggagcuugcag

SEQ ID NO: 150566 - RNA, 32 nt, Human
gaacccggaaggcggagcuugcagugagccga

SEQ ID NO: 150567 - RNA, 24 nt, Human
gaacccggaaggcggagguugcag

SEQ ID NO: 150568 - RNA, 32 nt, Human
gaacccggaaggcggagguugcagugagccaa

SEQ ID NO: 150569 - RNA, 24 nt, Human
gaacccggaagguggagguugcag

SEQ ID NO: 150570 - RNA, 32 nt, Human
gaacccggaagguggagguugcagugagccga

SEQ ID NO: 150571 - RNA, 32 nt, Human
gaacccggaagguggagguuguugcggugagc

SEQ ID NO: 150572 - RNA, 32 nt, Human
gaacccggagcaccuccacuucuagggaagau

SEQ ID NO: 150573 - RNA, 32 nt, Human
gaacccggaggcagagguugcagugagccgag

SEQ ID NO: 150574 - RNA, 23 nt, Human
gaacccggaggcagggguugcag

SEQ ID NO: 150575 - RNA, 23 nt, Human
gaacccggaggcggagguugcgg

SEQ ID NO: 150576 - RNA, 32 nt, Human
gaacccggaggcggagguugcgguaagccgag

SEQ ID NO: 150577 - RNA, 24 nt, Human
gaacccggcaggaagagguugcag

SEQ ID NO: 150578 - RNA, 32 nt, Human
gaacccggcaggaagagguugcauugagcuga

SEQ ID NO: 150579 - RNA, 32 nt, Human
gaacccggcaggcagagcuugcagugagccga

SEQ ID NO: 150580 - RNA, 24 nt, Human
gaacccggcaggcagagguugcag

SEQ ID NO: 150581 - RNA, 32 nt, Human
gaacccggcaggcagagguugcagugagccga

SEQ ID NO: 150582 - RNA, 24 nt, Human
gaacccggcaggcggagguugcag

SEQ ID NO: 150583 - RNA, 32 nt, Human
gaacccggcaggcggagguugcagugagcgga

SEQ ID NO: 150584 - RNA, 32 nt, Human
gaacccggcgggaagagguugcagugagccaa

SEQ ID NO: 150585 - RNA, 24 nt, Human
gaacccggcgggcagagguugcag

SEQ ID NO: 150586 - RNA, 32 nt, Human
gaacccggcgggcagagguugcaguaagcaga

SEQ ID NO: 150587 - RNA, 24 nt, Human
gaacccgggaagcagagguugcag

SEQ ID NO: 150588 - RNA, 32 nt, Human
gaacccgggaagcagagguugcagugacagag

SEQ ID NO: 150589 - RNA, 32 nt, Human
gaacccgggaagcagagguugcagugagcuga

SEQ ID NO: 150590 - RNA, 24 nt, Human
gaacccgggaagcagagguugcgg

SEQ ID NO: 150591 - RNA, 32 nt, Human
gaacccgggaagcagagguugcggugagccga

SEQ ID NO: 150592 - RNA, 32 nt, Human
gaacccgggaagcagagguugcggugagcuga

SEQ ID NO: 150593 - RNA, 24 nt, Human
gaacccgggaagcagagucugcag

SEQ ID NO: 150594 - RNA, 32 nt, Human
gaacccgggaagcagagucugcagugagccaa

SEQ ID NO: 150595 - RNA, 24 nt, Human
gaacccgggaagcggagcuugcag

SEQ ID NO: 150596 - RNA, 32 nt, Human
gaacccgggaagcggagcuugcagugagccga

SEQ ID NO: 150597 - RNA, 24 nt, Human
gaacccgggaagcggagguugcag

SEQ ID NO: 150598 - RNA, 32 nt, Human
gaacccgggaagcggagguugcagggagccga

SEQ ID NO: 150599 - RNA, 32 nt, Human
gaacccgggaagcggagguugcagugagccaa

SEQ ID NO: 150600 - RNA, 32 nt, Human
gaacccgggaagcggagguugcagugagccga

SEQ ID NO: 150601 - RNA, 32 nt, Human
gaacccgggaaggcggaaguugcagugagccg

SEQ ID NO: 150602 - RNA, 22 nt, Human
gaacccgggaagugaagguugc

SEQ ID NO: 150603 - RNA, 24 nt, Human
gaacccgggaaguggagguugcag

SEQ ID NO: 150604 - RNA, 32 nt, Human
gaacccgggaaguggagguugccgugagucga

SEQ ID NO: 150605 - RNA, 24 nt, Human
gaacccgggacgcagagguuacag

SEQ ID NO: 150606 - RNA, 32 nt, Human
gaacccgggacgcagagguuacagugaaccga

SEQ ID NO: 150607 - RNA, 24 nt, Human
gaacccgggacgcagggguugcag

SEQ ID NO: 150608 - RNA, 32 nt, Human
gaacccgggacgcagggguugcagugagcgga

SEQ ID NO: 150609 - RNA, 32 nt, Human
gaacccgggagacggagguugcagugagcuga

SEQ ID NO: 150610 - RNA, 24 nt, Human
gaacccgggagacggcgcuugcag

SEQ ID NO: 150611 - RNA, 32 nt, Human
gaacccgggagacggcgcuugcagugagccga

SEQ ID NO: 150612 - RNA, 32 nt, Human
gaacccgggagacgggagguuguggugagcug

SEQ ID NO: 150613 - RNA, 32 nt, Human
gaacccgggagagcccccgggagccagcgaag

SEQ ID NO: 150614 - RNA, 32 nt, Human
gaacccgggagaugaagguugcagugagcuga

SEQ ID NO: 150615 - RNA, 32 nt, Human
gaacccgggagauggcgcuugcagugagcuga

SEQ ID NO: 150616 - RNA, 23 nt, Human
gaacccgggagcagagacugcag

SEQ ID NO: 150617 - RNA, 32 nt, Human
gaacccgggagcagagacugcagugagcugag

SEQ ID NO: 150618 - RNA, 23 nt, Human
gaacccgggagcggagcuugcag

SEQ ID NO: 150619 - RNA, 23 nt, Human
gaacccgggagcggagguugcag

SEQ ID NO: 150620 - RNA, 32 nt, Human
gaacccgggagcggagguugcagugagcugag

SEQ ID NO: 150621 - RNA, 32 nt, Human
gaacccgggaggaagagcuugcagugagccga

SEQ ID NO: 150622 - RNA, 24 nt, Human
gaacccgggaggaggagcuugcag

SEQ ID NO: 150623 - RNA, 32 nt, Human
gaacccgggaggaggagcuugcagugagccga

SEQ ID NO: 150624 - RNA, 32 nt, Human
gaacccgggaggaggagguugcacugagccga

SEQ ID NO: 150625 - RNA, 24 nt, Human
gaacccgggaggcaaagguugcag

SEQ ID NO: 150626 - RNA, 32 nt, Human
gaacccgggaggcaaagguugcagugagcuga

SEQ ID NO: 150627 - RNA, 24 nt, Human
gaacccgggaggcaaagguugcgg

SEQ ID NO: 150628 - RNA, 32 nt, Human
gaacccgggaggcaaagguugcgguaagcugc

SEQ ID NO: 150629 - RNA, 32 nt, Human
gaacccgggaggcaaagguuuuagugagccga

SEQ ID NO: 150630 - RNA, 24 nt, Human
gaacccgggaggcacagguuccag

SEQ ID NO: 150631 - RNA, 32 nt, Human
gaacccgggaggcacagguuccagugggccaa

SEQ ID NO: 150632 - RNA, 24 nt, Human
gaacccgggaggcagaaguugcag

SEQ ID NO: 150633 - RNA, 32 nt, Human
gaacccgggaggcagaaguugcagugaacuga

SEQ ID NO: 150634 - RNA, 32 nt, Human
gaacccgggaggcagaccuugcagugagccaa

SEQ ID NO: 150635 - RNA, 24 nt, Human
gaacccgggaggcagacuuugcag

SEQ ID NO: 150636 - RNA, 32 nt, Human
gaacccgggaggcagacuuugcagugagcuga

SEQ ID NO: 150637 - RNA, 32 nt, Human
gaacccgggaggcagagauagcagugaacuga

SEQ ID NO: 150638 - RNA, 24 nt, Human
gaacccgggaggcagagauugcag

SEQ ID NO: 150639 - RNA, 32 nt, Human
gaacccgggaggcagagauugcaguaagcuga

SEQ ID NO: 150640 - RNA, 24 nt, Human
gaacccgggaggcagagcuugcag

SEQ ID NO: 150641 - RNA, 32 nt, Human
gaacccgggaggcagagcuugcaguaagccga

SEQ ID NO: 150642 - RNA, 32 nt, Human
gaacccgggaggcagagcuugcagugagcaga

SEQ ID NO: 150643 - RNA, 32 nt, Human
gaacccgggaggcagagcuugcagugagccaa

SEQ ID NO: 150644 - RNA, 32 nt, Human
gaacccgggaggcagagcuugcagugagccga

SEQ ID NO: 150645 - RNA, 32 nt, Human
gaacccgggaggcagagcuugcagugagcuga

SEQ ID NO: 150646 - RNA, 32 nt, Human
gaacccgggaggcagagcuugcagugagucga

SEQ ID NO: 150647 - RNA, 24 nt, Human
gaacccgggaggcagagcuugcgg

SEQ ID NO: 150648 - RNA, 32 nt, Human
gaacccgggaggcagagcuugcggugagccga

SEQ ID NO: 150649 - RNA, 22 nt, Human
gaacccgggaggcagagcuugu

SEQ ID NO: 150650 - RNA, 32 nt, Human
gaacccgggaggcagagcuuguggugagccga

SEQ ID NO: 150651 - RNA, 23 nt, Human
gaacccgggaggcagaggcugca

SEQ ID NO: 150652 - RNA, 32 nt, Human
gaacccgggaggcagaggcugcagugagccga

SEQ ID NO: 150653 - RNA, 32 nt, Human
gaacccgggaggcagaggcugcagugagcuga

SEQ ID NO: 150654 - RNA, 32 nt, Human
gaacccgggaggcagaggcuguagugagccaa

SEQ ID NO: 150655 - RNA, 24 nt, Human
gaacccgggaggcagagggugcag

SEQ ID NO: 150656 - RNA, 32 nt, Human
gaacccgggaggcagagggugcaguaagccga

SEQ ID NO: 150657 - RNA, 24 nt, Human
gaacccgggaggcagagguagcag

SEQ ID NO: 150658 - RNA, 32 nt, Human
gaacccgggaggcagagguaguagugagcuga

SEQ ID NO: 150659 - RNA, 23 nt, Human
gaacccgggaggcagaggucaug

SEQ ID NO: 150660 - RNA, 22 nt, Human
gaacccgggaggcagagguggc

SEQ ID NO: 150661 - RNA, 32 nt, Human
gaacccgggaggcagagguggcugugagccga

SEQ ID NO: 150662 - RNA, 20 nt, Human
gaacccgggaggcagagguu

SEQ ID NO: 150663 - RNA, 24 nt, Human
gaacccgggaggcagagguuacag

SEQ ID NO: 150664 - RNA, 32 nt, Human
gaacccgggaggcagagguuacagugagccaa

SEQ ID NO: 150665 - RNA, 32 nt, Human
gaacccgggaggcagagguuaucgugagcuga

SEQ ID NO: 150666 - RNA, 21 nt, Human
gaacccgggaggcagagguug

SEQ ID NO: 150667 - RNA, 32 nt, Human
gaacccgggaggcagagguugaagugagcuga

SEQ ID NO: 150668 - RNA, 22 nt, Human
gaacccgggaggcagagguugc

SEQ ID NO: 150669 - RNA, 23 nt, Human
gaacccgggaggcagagguugca

SEQ ID NO: 150670 - RNA, 32 nt, Human
gaacccgggaggcagagguugcacugagcuga

SEQ ID NO: 150671 - RNA, 24 nt, Human
gaacccgggaggcagagguugcag

SEQ ID NO: 150672 - RNA, 32 nt, Human
gaacccgggaggcagagguugcagccggcuga

SEQ ID NO: 150673 - RNA, 32 nt, Human
gaacccgggaggcagagguugcaguaagcaga

SEQ ID NO: 150674 - RNA, 32 nt, Human
gaacccgggaggcagagguugcagugaaccca

SEQ ID NO: 150675 - RNA, 32 nt, Human
gaacccgggaggcagagguugcagugagccaa

SEQ ID NO: 150676 - RNA, 32 nt, Human
gaacccgggaggcagagguugcagugagccga

SEQ ID NO: 150677 - RNA, 32 nt, Human
gaacccgggaggcagagguugcagugagcuga

SEQ ID NO: 150678 - RNA, 32 nt, Human
gaacccgggaggcagagguugcagugagguga

SEQ ID NO: 150679 - RNA, 32 nt, Human
gaacccgggaggcagagguugcagugagucga

SEQ ID NO: 150680 - RNA, 32 nt, Human
gaacccgggaggcagagguugcagugagugga

SEQ ID NO: 150681 - RNA, 32 nt, Human
gaacccgggaggcagagguugcagugugguga

SEQ ID NO: 150682 - RNA, 32 nt, Human
gaacccgggaggcagagguugcauugagccga

SEQ ID NO: 150683 - RNA, 24 nt, Human
gaacccgggaggcagagguugcgg

SEQ ID NO: 150684 - RNA, 32 nt, Human
gaacccgggaggcagagguugcggugagccaa

SEQ ID NO: 150685 - RNA, 32 nt, Human
gaacccgggaggcagagguugcggugagccga

SEQ ID NO: 150686 - RNA, 32 nt, Human
gaacccgggaggcagagguugcuguaagcuga

SEQ ID NO: 150687 - RNA, 22 nt, Human
gaacccgggaggcagagguugu

SEQ ID NO: 150688 - RNA, 24 nt, Human
gaacccgggaggcagagguuguag

SEQ ID NO: 150689 - RNA, 32 nt, Human
gaacccgggaggcagagguuguagugagccca

SEQ ID NO: 150690 - RNA, 32 nt, Human
gaacccgggaggcagagguugugagcugagau

SEQ ID NO: 150691 - RNA, 32 nt, Human
gaacccgggaggcagagguuguguugagccaa

SEQ ID NO: 150692 - RNA, 24 nt, Human
gaacccgggaggcagagguuucag

SEQ ID NO: 150693 - RNA, 24 nt, Human
gaacccgggaggcagaguuugcag

SEQ ID NO: 150694 - RNA, 24 nt, Human
gaacccgggaggcagcaguugcag

SEQ ID NO: 150695 - RNA, 32 nt, Human
gaacccgggaggcagcaguugcagugagcuga

SEQ ID NO: 150696 - RNA, 24 nt, Human
gaacccgggaggcauagcuugcag

SEQ ID NO: 150697 - RNA, 32 nt, Human
gaacccgggaggcauagcuugcagugagccga

SEQ ID NO: 150698 - RNA, 32 nt, Human
gaacccgggaggcgagcuugcagugagccgag

SEQ ID NO: 150699 - RNA, 24 nt, Human
gaacccgggaggcggaacuugcag

SEQ ID NO: 150700 - RNA, 32 nt, Human
gaacccgggaggcggaacuugcagugagccaa

SEQ ID NO: 150701 - RNA, 32 nt, Human
gaacccgggaggcggaacuugcggugagccga

SEQ ID NO: 150702 - RNA, 32 nt, Human
gaacccgggaggcggaaguuucagcgagccga

SEQ ID NO: 150703 - RNA, 32 nt, Human
gaacccgggaggcggagauugcagugagcuga

SEQ ID NO: 150704 - RNA, 24 nt, Human
gaacccgggaggcggagauugcgg

SEQ ID NO: 150705 - RNA, 32 nt, Human
gaacccgggaggcggagauugcggugagccga

SEQ ID NO: 150706 - RNA, 24 nt, Human
gaacccgggaggcggagcuuacag

SEQ ID NO: 150707 - RNA, 32 nt, Human
gaacccgggaggcggagcuuacagugagcuga

SEQ ID NO: 150708 - RNA, 24 nt, Human
gaacccgggaggcggagcuugcag

SEQ ID NO: 150709 - RNA, 32 nt, Human
gaacccgggaggcggagcuugcagugaaccga

SEQ ID NO: 150710 - RNA, 32 nt, Human
gaacccgggaggcggagcuugcagugagccaa

SEQ ID NO: 150711 - RNA, 32 nt, Human
gaacccgggaggcggagcuugcagugagccca

SEQ ID NO: 150712 - RNA, 32 nt, Human
gaacccgggaggcggagcuugcagugagccga

SEQ ID NO: 150713 - RNA, 32 nt, Human
gaacccgggaggcggagcuugcagugagccuu

SEQ ID NO: 150714 - RNA, 32 nt, Human
gaacccgggaggcggagcuugcagugagcgga

SEQ ID NO: 150715 - RNA, 32 nt, Human
gaacccgggaggcggagcuugcagugagcuga

SEQ ID NO: 150716 - RNA, 32 nt, Human
gaacccgggaggcggagcuuguagugagccga

SEQ ID NO: 150717 - RNA, 24 nt, Human
gaacccgggaggcggaggcugcag

SEQ ID NO: 150718 - RNA, 32 nt, Human
gaacccgggaggcggaggcugcagugagccga

SEQ ID NO: 150719 - RNA, 32 nt, Human
gaacccgggaggcggaggcugcagugagucga

SEQ ID NO: 150720 - RNA, 32 nt, Human
gaacccgggaggcggaggcugcagugggccgg

SEQ ID NO: 150721 - RNA, 24 nt, Human
gaacccgggaggcggagguuacag

SEQ ID NO: 150722 - RNA, 32 nt, Human
gaacccgggaggcggagguuacagugagccga

SEQ ID NO: 150723 - RNA, 32 nt, Human
gaacccgggaggcggagguuacagugagccuu

SEQ ID NO: 150724 - RNA, 32 nt, Human
gaacccgggaggcggagguuacagugagcuga

SEQ ID NO: 150725 - RNA, 32 nt, Human
gaacccgggaggcggagguuauggagagccaa

SEQ ID NO: 150726 - RNA, 24 nt, Human
gaacccgggaggcggagguuccag

SEQ ID NO: 150727 - RNA, 32 nt, Human
gaacccgggaggcggagguuccagugagccga

SEQ ID NO: 150728 - RNA, 21 nt, Human
gaacccgggaggcggagguug

SEQ ID NO: 150729 - RNA, 22 nt, Human
gaacccgggaggcggagguugc

SEQ ID NO: 150730 - RNA, 23 nt, Human
gaacccgggaggcggagguugca

SEQ ID NO: 150731 - RNA, 24 nt, Human
gaacccgggaggcggagguugcag

SEQ ID NO: 150732 - RNA, 32 nt, Human
gaacccgggaggcggagguugcaguaagccga

SEQ ID NO: 150733 - RNA, 32 nt, Human
gaacccgggaggcggagguugcagucagccga

SEQ ID NO: 150734 - RNA, 32 nt, Human
gaacccgggaggcggagguugcagugagccaa

SEQ ID NO: 150735 - RNA, 32 nt, Human
gaacccgggaggcggagguugcagugagccga

SEQ ID NO: 150736 - RNA, 32 nt, Human
gaacccgggaggcggagguugcagugagccug

SEQ ID NO: 150737 - RNA, 32 nt, Human
gaacccgggaggcggagguugcagugagcuaa

SEQ ID NO: 150738 - RNA, 32 nt, Human
gaacccgggaggcggagguugcagugagcuga

SEQ ID NO: 150739 - RNA, 32 nt, Human
gaacccgggaggcggagguugcagugagguaa

SEQ ID NO: 150740 - RNA, 32 nt, Human
gaacccgggaggcggagguugcagugagucaa

SEQ ID NO: 150741 - RNA, 32 nt, Human
gaacccgggaggcggagguugcaguuagccaa

SEQ ID NO: 150742 - RNA, 32 nt, Human
gaacccgggaggcggagguugcaugagcugag

SEQ ID NO: 150743 - RNA, 32 nt, Human
gaacccgggaggcggagguugccgugagucga

SEQ ID NO: 150744 - RNA, 24 nt, Human
gaacccgggaggcggagguugcgg

SEQ ID NO: 150745 - RNA, 32 nt, Human
gaacccgggaggcggagguugcggugagccaa

SEQ ID NO: 150746 - RNA, 32 nt, Human
gaacccgggaggcggagguugcggugagccga

SEQ ID NO: 150747 - RNA, 24 nt, Human
gaacccgggaggcggagguuguag

SEQ ID NO: 150748 - RNA, 32 nt, Human
gaacccgggaggcggagguuguagugagccga

SEQ ID NO: 150749 - RNA, 32 nt, Human
gaacccgggaggcggagguuguggugagccaa

SEQ ID NO: 150750 - RNA, 32 nt, Human
gaacccgggaggcggagguuguggugagccga

SEQ ID NO: 150751 - RNA, 32 nt, Human
gaacccgggaggcggagguuguggugagcuga

SEQ ID NO: 150752 - RNA, 24 nt, Human
gaacccgggaggcggagguuucag

SEQ ID NO: 150753 - RNA, 32 nt, Human
gaacccgggaggcggagguuucagugagccga

SEQ ID NO: 150754 - RNA, 23 nt, Human
gaacccgggaggcggaguugcgg

SEQ ID NO: 150755 - RNA, 32 nt, Human
gaacccgggaggcggaguugcggugagccgag

SEQ ID NO: 150756 - RNA, 24 nt, Human
gaacccgggaggcggaguuugcag

SEQ ID NO: 150757 - RNA, 32 nt, Human
gaacccgggaggcggaguuugcagugagccaa

SEQ ID NO: 150758 - RNA, 32 nt, Human
gaacccgggaggcggaucuugcagugagcgga

SEQ ID NO: 150759 - RNA, 32 nt, Human
gaacccgggaggcggaucuugcauugagccaa

SEQ ID NO: 150760 - RNA, 32 nt, Human
gaacccgggaggcggauguugcggugagccga

SEQ ID NO: 150761 - RNA, 24 nt, Human
gaacccgggaggcggcgguugcag

SEQ ID NO: 150762 - RNA, 24 nt, Human
gaacccgggaggcggggguugcag

SEQ ID NO: 150763 - RNA, 24 nt, Human
gaacccgggaggcuaagguugcag

SEQ ID NO: 150764 - RNA, 32 nt, Human
gaacccgggaggcuaagguugcagugagccga

SEQ ID NO: 150765 - RNA, 24 nt, Human
gaacccgggagggagagguugcag

SEQ ID NO: 150766 - RNA, 32 nt, Human
gaacccgggagggagagguugcagugagccaa

SEQ ID NO: 150767 - RNA, 32 nt, Human
gaacccgggagguagagcuugcagugaaccga

SEQ ID NO: 150768 - RNA, 23 nt, Human
gaacccgggagguagaggcugca

SEQ ID NO: 150769 - RNA, 32 nt, Human
gaacccgggagguagaggcugcaaugggccau

SEQ ID NO: 150770 - RNA, 32 nt, Human
gaacccgggagguagaggcugcagugagccga

SEQ ID NO: 150771 - RNA, 24 nt, Human
gaacccgggagguagagguugcag

SEQ ID NO: 150772 - RNA, 32 nt, Human
gaacccgggagguagagguugcagugagccga

SEQ ID NO: 150773 - RNA, 32 nt, Human
gaacccgggaggugcagguugcagugagccaa

SEQ ID NO: 150774 - RNA, 32 nt, Human
gaacccgggagguggaacuugcagugagccga

SEQ ID NO: 150775 - RNA, 24 nt, Human
gaacccgggagguggagauugcag

SEQ ID NO: 150776 - RNA, 32 nt, Human
gaacccgggagguggagauugcagugagccca

SEQ ID NO: 150777 - RNA, 32 nt, Human
gaacccgggagguggagauugcagugagcuga

SEQ ID NO: 150778 - RNA, 32 nt, Human
gaacccgggagguggagccuacagugagucaa

SEQ ID NO: 150779 - RNA, 32 nt, Human
gaacccgggagguggagcuuccagugagccga

SEQ ID NO: 150780 - RNA, 24 nt, Human
gaacccgggagguggagcuugcag

SEQ ID NO: 150781 - RNA, 32 nt, Human
gaacccgggagguggagcuugcagugagccaa

SEQ ID NO: 150782 - RNA, 32 nt, Human
gaacccgggagguggagcuugcagugagccga

SEQ ID NO: 150783 - RNA, 32 nt, Human
gaacccgggagguggagcuugcagugagcgga

SEQ ID NO: 150784 - RNA, 32 nt, Human
gaacccgggagguggagcuugcagugagcuga

SEQ ID NO: 150785 - RNA, 32 nt, Human
gaacccgggagguggagcuugcagugagcugg

SEQ ID NO: 150786 - RNA, 32 nt, Human
gaacccgggagguggagcuugcagugggugga

SEQ ID NO: 150787 - RNA, 32 nt, Human
gaacccgggagguggagcuugcggugagcuga

SEQ ID NO: 150788 - RNA, 32 nt, Human
gaacccgggagguggagcuuguagugaggcga

SEQ ID NO: 150789 - RNA, 23 nt, Human
gaacccgggagguggaggcugca

SEQ ID NO: 150790 - RNA, 32 nt, Human
gaacccgggagguggaggcugcaaugagcuga

SEQ ID NO: 150791 - RNA, 24 nt, Human
gaacccgggagguggaggcugcag

SEQ ID NO: 150792 - RNA, 32 nt, Human
gaacccgggagguggaggcugcagcgagccaa

SEQ ID NO: 150793 - RNA, 32 nt, Human
gaacccgggagguggaggcugcagugagccga

SEQ ID NO: 150794 - RNA, 32 nt, Human
gaacccgggagguggaggcugcagugaguuaa

SEQ ID NO: 150795 - RNA, 24 nt, Human
gaacccgggagguggaggcugcgg

SEQ ID NO: 150796 - RNA, 32 nt, Human
gaacccgggagguggaggcugcggugagccaa

SEQ ID NO: 150797 - RNA, 24 nt, Human
gaacccgggagguggaggucgcgg

SEQ ID NO: 150798 - RNA, 32 nt, Human
gaacccgggagguggaggucgcggugagccga

SEQ ID NO: 150799 - RNA, 32 nt, Human
gaacccgggagguggagguggcagugagccga

SEQ ID NO: 150800 - RNA, 24 nt, Human
gaacccgggagguggagguuacag

SEQ ID NO: 150801 - RNA, 32 nt, Human
gaacccgggagguggagguuacagugagccga

SEQ ID NO: 150802 - RNA, 32 nt, Human
gaacccgggagguggagguuacagugagcuga

SEQ ID NO: 150803 - RNA, 32 nt, Human
gaacccgggagguggagguucuagugagccga

SEQ ID NO: 150804 - RNA, 22 nt, Human
gaacccgggagguggagguugc

SEQ ID NO: 150805 - RNA, 32 nt, Human
gaacccgggagguggagguugcaaugagccaa

SEQ ID NO: 150806 - RNA, 24 nt, Human
gaacccgggagguggagguugcag

SEQ ID NO: 150807 - RNA, 32 nt, Human
gaacccgggagguggagguugcagcaagccga

SEQ ID NO: 150808 - RNA, 32 nt, Human
gaacccgggagguggagguugcagggagccga

SEQ ID NO: 150809 - RNA, 32 nt, Human
gaacccgggagguggagguugcaguaagccga

SEQ ID NO: 150810 - RNA, 32 nt, Human
gaacccgggagguggagguugcagugaaccaa

SEQ ID NO: 150811 - RNA, 32 nt, Human
gaacccgggagguggagguugcagugagccaa

SEQ ID NO: 150812 - RNA, 32 nt, Human
gaacccgggagguggagguugcagugagccga

SEQ ID NO: 150813 - RNA, 32 nt, Human
gaacccgggagguggagguugcagugagcuaa

SEQ ID NO: 150814 - RNA, 32 nt, Human
gaacccgggagguggagguugcagugagcuga

SEQ ID NO: 150815 - RNA, 32 nt, Human
gaacccgggagguggagguugcagugagguga

SEQ ID NO: 150816 - RNA, 32 nt, Human
gaacccgggagguggagguugccgugagccaa

SEQ ID NO: 150817 - RNA, 32 nt, Human
gaacccgggagguggagguugccgugagcuga

SEQ ID NO: 150818 - RNA, 32 nt, Human
gaacccgggagguggagguugccgugaguuga

SEQ ID NO: 150819 - RNA, 23 nt, Human
gaacccgggagguggagguugcg

SEQ ID NO: 150820 - RNA, 32 nt, Human
gaacccgggagguggagguugcgaugagcuga

SEQ ID NO: 150821 - RNA, 24 nt, Human
gaacccgggagguggagguugcgg

SEQ ID NO: 150822 - RNA, 32 nt, Human
gaacccgggagguggagguugcggugagccaa

SEQ ID NO: 150823 - RNA, 32 nt, Human
gaacccgggagguggagguugcggugagcuga

SEQ ID NO: 150824 - RNA, 24 nt, Human
gaacccgggagguggagguuguag

SEQ ID NO: 150825 - RNA, 32 nt, Human
gaacccgggagguggagguuguagcgagcuga

SEQ ID NO: 150826 - RNA, 32 nt, Human
gaacccgggagguggagguuguagugagcuga

SEQ ID NO: 150827 - RNA, 32 nt, Human
gaacccgggagguggagguuguggugagcuga

SEQ ID NO: 150828 - RNA, 32 nt, Human
gaacccgggagguggcaguugcagggagcuaa

SEQ ID NO: 150829 - RNA, 24 nt, Human
gaacccgggaggugggaguuguag

SEQ ID NO: 150830 - RNA, 32 nt, Human
gaacccgggaggugggaguuguagugagccga

SEQ ID NO: 150831 - RNA, 32 nt, Human
gaacccgggagguguagguugcagugagccga

SEQ ID NO: 150832 - RNA, 22 nt, Human
gaacccgggaguggagcuugca

SEQ ID NO: 150833 - RNA, 32 nt, Human
gaacccgggaguuaaagguugcagugagccga

SEQ ID NO: 150834 - RNA, 32 nt, Human
gaacccgggaguuggagguugcagugagccaa

SEQ ID NO: 150835 - RNA, 32 nt, Human
gaacccgggaugcagagguugcagugagcuga

SEQ ID NO: 150836 - RNA, 24 nt, Human
gaacccgggcagcggagguugcag

SEQ ID NO: 150837 - RNA, 32 nt, Human
gaacccgggcagcggagguugcagugagccga

SEQ ID NO: 150838 - RNA, 26 nt, Human
gaacccgggcccgguggaggcugcag

SEQ ID NO: 150839 - RNA, 21 nt, Human
gaacccgggccucagccgcag

SEQ ID NO: 150840 - RNA, 24 nt, Human
gaacccgggcggcggaaguugcag

SEQ ID NO: 150841 - RNA, 32 nt, Human
gaacccgggcggcggaaguugcagugagccga

SEQ ID NO: 150842 - RNA, 24 nt, Human
gaacccgggcggcggagauugcag

SEQ ID NO: 150843 - RNA, 32 nt, Human
gaacccgggcggcggagauugcagugagccga

SEQ ID NO: 150844 - RNA, 32 nt, Human
gaacccgggcgguggagcuugcagugagccga

SEQ ID NO: 150845 - RNA, 24 nt, Human
gaacccgggcgguggagguuguag

SEQ ID NO: 150846 - RNA, 32 nt, Human
gaacccgggcgguggagguuguagugagccaa

SEQ ID NO: 150847 - RNA, 23 nt, Human
gaacccggggacggagguugcag

SEQ ID NO: 150848 - RNA, 32 nt, Human
gaacccggggacggagguugcagugaaccgag

SEQ ID NO: 150849 - RNA, 32 nt, Human
gaacccgggggcagaggcugcagugagccgag

SEQ ID NO: 150850 - RNA, 24 nt, Human
gaacccggggggcggagguugcag

SEQ ID NO: 150851 - RNA, 24 nt, Human
gaacccggguggcagagguugcag

SEQ ID NO: 150852 - RNA, 32 nt, Human
gaacccggguggcagagguugcagugagccga

SEQ ID NO: 150853 - RNA, 32 nt, Human
gaacccggguggcagagguugcagugagcuga

SEQ ID NO: 150854 - RNA, 32 nt, Human
gaacccggguggcggcgcuugcagugagcuga

SEQ ID NO: 150855 - RNA, 32 nt, Human
gaacccgguaggcagagguugcagugagccga

SEQ ID NO: 150856 - RNA, 32 nt, Human
gaacccgguaggcggagcuugcagugagcuga

SEQ ID NO: 150857 - RNA, 32 nt, Human
gaacccgguaggggagcuugcagugagcccag

SEQ ID NO: 150858 - RNA, 24 nt, Human
gaacccgguagguggagguugcag

SEQ ID NO: 150859 - RNA, 32 nt, Human
gaacccgguagguggagguugcagugagccga

SEQ ID NO: 150860 - RNA, 24 nt, Human
gaacccgugaggcagagguugcag

SEQ ID NO: 150861 - RNA, 32 nt, Human
gaacccgugaggcagagguugcagugaaccga

SEQ ID NO: 150862 - RNA, 32 nt, Human
gaacccgugaggcagagguugcagugagccga

SEQ ID NO: 150863 - RNA, 32 nt, Human
gaacccgugaggcggagguuguagugagccaa

SEQ ID NO: 150864 - RNA, 32 nt, Human
gaacccguguggcagagguugcggugagugua

SEQ ID NO: 150865 - RNA, 32 nt, Human
gaacccguugugcagcaccuucucggaccagu

SEQ ID NO: 150866 - RNA, 32 nt, Human
gaacccuaaaggcagagguugcagugagccga

SEQ ID NO: 150867 - RNA, 32 nt, Human
gaacccuagaggcggaguuugcagugagccga

SEQ ID NO: 150868 - RNA, 32 nt, Human
gaacccuagauggaccccagauguaccaacuc

SEQ ID NO: 150869 - RNA, 32 nt, Human
gaacccuagccagcucagccuccguccgcuga

SEQ ID NO: 150870 - RNA, 32 nt, Human
gaacccucaguuggccuagguggugcaaagac

SEQ ID NO: 150871 - RNA, 20 nt, Human
gaacccuccgucacacccgc

SEQ ID NO: 150872 - RNA, 32 nt, Human
gaacccuccugugugguauaucuugcucuuau

SEQ ID NO: 150873 - RNA, 32 nt, Human
gaacccucgggaguuaaagaccagccggccuc

SEQ ID NO: 150874 - RNA, 32 nt, Human
gaacccucucucucacgguauacaguccauuc

SEQ ID NO: 150875 - RNA, 24 nt, Human
gaacccucugcucaccuaccagcu

SEQ ID NO: 150876 - RNA, 23 nt, Human
gaacccucugucccaccccuagc

SEQ ID NO: 150877 - RNA, 32 nt, Human
gaacccucuguccuggcuuugaaagagaaacu

SEQ ID NO: 150878 - RNA, 21 nt, Human
gaacccucugucugccucugc

SEQ ID NO: 150879 - RNA, 22 nt, Human
gaacccucuguuccuucccugu

SEQ ID NO: 150880 - RNA, 32 nt, Human
gaacccugaagaggagggggagggugagccgg

SEQ ID NO: 150881 - RNA, 31 nt, Human
gaacccugacuucucuuugugcagagaccag

SEQ ID NO: 150882 - RNA, 32 nt, Human
gaacccugagcucaggcugagcccagccaccu

SEQ ID NO: 150883 - RNA, 32 nt, Human
gaacccugaggguggccaggaucuggagcugc

SEQ ID NO: 150884 - RNA, 24 nt, Human
gaacccugauggcaccacugcacu

SEQ ID NO: 150885 - RNA, 32 nt, Human
gaacccugcacccccauaccuguggccagccc

SEQ ID NO: 150886 - RNA, 32 nt, Human
gaacccugcagaugcuguggccgacccggcag

SEQ ID NO: 150887 - RNA, 32 nt, Human
gaacccugcccucuccccuccugcugcuguag

SEQ ID NO: 150888 - RNA, 32 nt, Human
gaacccugcgguacccccaggccaaagcaagu

SEQ ID NO: 150889 - RNA, 32 nt, Human
gaacccugcuucccccuguggccggcaugccc

SEQ ID NO: 150890 - RNA, 32 nt, Human
gaacccugcuucuucccagagacagagcugug

SEQ ID NO: 150891 - RNA, 32 nt, Human
gaacccuggaaacaagaaaguucugcuuagca

SEQ ID NO: 150892 - RNA, 32 nt, Human
gaacccuggaaguggagguugcagugagccug

SEQ ID NO: 150893 - RNA, 24 nt, Human
gaacccuggaggcagagcuugcag

SEQ ID NO: 150894 - RNA, 32 nt, Human
gaacccuggaggcagaggugguagugagccga

SEQ ID NO: 150895 - RNA, 23 nt, Human
gaacccuggaggcagagguugca

SEQ ID NO: 150896 - RNA, 32 nt, Human
gaacccuggaggcagagguugcaaugagccga

SEQ ID NO: 150897 - RNA, 24 nt, Human
gaacccuggaggcagagguugcag

SEQ ID NO: 150898 - RNA, 24 nt, Human
gaacccuggaggcagagguuguag

SEQ ID NO: 150899 - RNA, 32 nt, Human
gaacccuggaggcagagguuguagugagucgu

SEQ ID NO: 150900 - RNA, 32 nt, Human
gaacccuggaggcagagguuguggugagcuga

SEQ ID NO: 150901 - RNA, 32 nt, Human
gaacccuggaggcagagguuguggugagucga

SEQ ID NO: 150902 - RNA, 24 nt, Human
gaacccuggaggcggaaguugcag

SEQ ID NO: 150903 - RNA, 32 nt, Human
gaacccuggaggcggaaguugcagugagccga

SEQ ID NO: 150904 - RNA, 32 nt, Human
gaacccuggaggcggagauugaagugagcuga

SEQ ID NO: 150905 - RNA, 32 nt, Human
gaacccuggaggcggagguuccagugagcuga

SEQ ID NO: 150906 - RNA, 24 nt, Human
gaacccuggaggcggagguugcag

SEQ ID NO: 150907 - RNA, 32 nt, Human
gaacccuggaggcggagguugcagugagccga

SEQ ID NO: 150908 - RNA, 32 nt, Human
gaacccuggaggcggagguugcagugagugga

SEQ ID NO: 150909 - RNA, 32 nt, Human
gaacccuggaggcggagguugccgugagccaa

SEQ ID NO: 150910 - RNA, 24 nt, Human
gaacccuggagguagaaguugcag

SEQ ID NO: 150911 - RNA, 32 nt, Human
gaacccuggagguagaaguugcagugagccaa

SEQ ID NO: 150912 - RNA, 24 nt, Human
gaacccuggagguggagguugcag

SEQ ID NO: 150913 - RNA, 32 nt, Human
gaacccuggagguggagguugcagugagccga

SEQ ID NO: 150914 - RNA, 32 nt, Human
gaacccuggagguggagguugcagugagcuga

SEQ ID NO: 150915 - RNA, 24 nt, Human
gaacccuggagguggcgguugcag

SEQ ID NO: 150916 - RNA, 32 nt, Human
gaacccuggagguggcgguugcagugagcaca

SEQ ID NO: 150917 - RNA, 24 nt, Human
gaacccuggagguugagguugcag

SEQ ID NO: 150918 - RNA, 32 nt, Human
gaacccuggagguugagguugcagugagcuga

SEQ ID NO: 150919 - RNA, 29 nt, Human
gaacccuggcugcuggccuucuggguccc

SEQ ID NO: 150920 - RNA, 24 nt, Human
gaacccugggagcggagauugcag

SEQ ID NO: 150921 - RNA, 32 nt, Human
gaacccugggagcggagauugcagugagcuga

SEQ ID NO: 150922 - RNA, 25 nt, Human
gaacccugggaggcagagguugcag

SEQ ID NO: 150923 - RNA, 32 nt, Human
gaacccugggaggcagagguugcagugagucg

SEQ ID NO: 150924 - RNA, 32 nt, Human
gaacccugggaggggcggaguuuaguggaugg

SEQ ID NO: 150925 - RNA, 32 nt, Human
gaacccugggcugaugggagcagugagcgggc

SEQ ID NO: 150926 - RNA, 22 nt, Human
gaacccuguggcaccugucccu

SEQ ID NO: 150927 - RNA, 32 nt, Human
gaacccuuauaacuuggaaacuaacugaaugg

SEQ ID NO: 150928 - RNA, 32 nt, Human
gaacccuuccauccgagacugugcccacaucc

SEQ ID NO: 150929 - RNA, 32 nt, Human
gaacccuucccaaaccucccccauccccucuc

SEQ ID NO: 150930 - RNA, 20 nt, Human
gaacccuucuauccccaaga

SEQ ID NO: 150931 - RNA, 32 nt, Human
gaacccuugaaggaugcaggugaugguguucg

SEQ ID NO: 150932 - RNA, 32 nt, Human
gaacccuuggacgccgagugcuugccuuacgg

SEQ ID NO: 150933 - RNA, 32 nt, Human
gaacccuuggguagcuugauucugccuaccau

SEQ ID NO: 150934 - RNA, 32 nt, Human
gaacccuuuagcuguuucugcagcugagguca

SEQ ID NO: 150935 - RNA, 32 nt, Human
gaacccuuucagaaaaccucaguguccccugg

SEQ ID NO: 150936 - RNA, 32 nt, Human
gaacccuuuuucuccccgcuguggccucugcu

SEQ ID NO: 150937 - RNA, 32 nt, Human
gaaccgaagaacuucauagacacucacaaggu

SEQ ID NO: 150938 - RNA, 32 nt, Human
gaaccgaccuucccccuucuggcauuucagau

SEQ ID NO: 150939 - RNA, 32 nt, Human
gaaccgacgugccuaccacuuggagaaagucc

SEQ ID NO: 150940 - RNA, 32 nt, Human
gaaccgacucaauuccuguguaaagagcacuu

SEQ ID NO: 150941 - RNA, 32 nt, Human
gaaccgagaagcaggcccucaccagaacccag

SEQ ID NO: 150942 - RNA, 24 nt, Human
gaaccgagaucgcgccacugcacu

SEQ ID NO: 150943 - RNA, 24 nt, Human
gaaccgagaucgcuccacugcacu

SEQ ID NO: 150944 - RNA, 24 nt, Human
gaaccgagauugcgccacugcacu

SEQ ID NO: 150945 - RNA, 32 nt, Human
gaaccgagauugugccacuacacuccagccug

SEQ ID NO: 150946 - RNA, 32 nt, Human
gaaccgagcagcaggucagagcaggcgagcug

SEQ ID NO: 150947 - RNA, 23 nt, Human
gaaccgagccagccacugagggg

SEQ ID NO: 150948 - RNA, 24 nt, Human
gaaccgagcccagccagccggagg

SEQ ID NO: 150949 - RNA, 23 nt, Human
gaaccgagcgcccggcgcggaga

SEQ ID NO: 150950 - RNA, 32 nt, Human
gaaccgaggaggcagagcuugcagugagccaa

SEQ ID NO: 150951 - RNA, 32 nt, Human
gaaccgaggaggcgaagguugcagugagccga

SEQ ID NO: 150952 - RNA, 32 nt, Human
gaaccgauggccccacccucuggcuggugcug

SEQ ID NO: 150953 - RNA, 32 nt, Human
gaaccgcaaucagcugugagccagcaccaccu

SEQ ID NO: 150954 - RNA, 32 nt, Human
gaaccgcacacagccacaucuuccuagaccua

SEQ ID NO: 150955 - RNA, 32 nt, Human
gaaccgcaccuugucgaugaaggaggcaaacu

SEQ ID NO: 150956 - RNA, 21 nt, Human
gaaccgcagggcgcucgggga

SEQ ID NO: 150957 - RNA, 32 nt, Human
gaaccgcauuggccccacauacccagacaccu

SEQ ID NO: 150958 - RNA, 32 nt, Human
gaaccgccaucuuccaguaauucaccaaaaug

SEQ ID NO: 150959 - RNA, 32 nt, Human
gaaccgccaucuuccaguaauucgccaaaaug

SEQ ID NO: 150960 - RNA, 32 nt, Human
gaaccgccaucuuccaguaauuugccaaaaug

SEQ ID NO: 150961 - RNA, 32 nt, Human
gaaccgccaucuuccgguaauucgccaaaaug

SEQ ID NO: 150962 - RNA, 32 nt, Human
gaaccgccccaaccccuccagcuccaaaucug

SEQ ID NO: 150963 - RNA, 32 nt, Human
gaaccgccgagggucacuucugggcagaagcu

SEQ ID NO: 150964 - RNA, 21 nt, Human
gaaccgccuggccuucgggga

SEQ ID NO: 150965 - RNA, 32 nt, Human
gaaccgcugcuuggauggugccauucaggccu

SEQ ID NO: 150966 - RNA, 23 nt, Human
gaaccggccucagccucuccgcg

SEQ ID NO: 150967 - RNA, 32 nt, Human
gaaccggcgcggagaaccgagcagagcggagc

SEQ ID NO: 150968 - RNA, 23 nt, Human
gaaccgggaggcagaaguugcag

SEQ ID NO: 150969 - RNA, 32 nt, Human
gaaccgggaggcagaaguugcagugagccgag

SEQ ID NO: 150970 - RNA, 23 nt, Human
gaaccgggaggcggaaguugcag

SEQ ID NO: 150971 - RNA, 32 nt, Human
gaaccgggaggcggaaguugcagugagccaag

SEQ ID NO: 150972 - RNA, 23 nt, Human
gaaccgggaggcggagguugcag

SEQ ID NO: 150973 - RNA, 32 nt, Human
gaaccgggaggcggagguugcagugagccgag

SEQ ID NO: 150974 - RNA, 32 nt, Human
gaaccgggcggagcggccaacauggcggaacg

SEQ ID NO: 150975 - RNA, 24 nt, Human
gaaccggggagacggagguugcag

SEQ ID NO: 150976 - RNA, 32 nt, Human
gaaccggggagacggagguugcagugagccga

SEQ ID NO: 150977 - RNA, 24 nt, Human
gaaccggggaggcagagguugcag

SEQ ID NO: 150978 - RNA, 32 nt, Human
gaaccggggaggcagagguugcagugagcuga

SEQ ID NO: 150979 - RNA, 32 nt, Human
gaaccggggaggcagagguugcaguuaagccg

SEQ ID NO: 150980 - RNA, 24 nt, Human
gaaccggggaggcggagauugcag

SEQ ID NO: 150981 - RNA, 32 nt, Human
gaaccggggaggcggagcuugcagugagccaa

SEQ ID NO: 150982 - RNA, 32 nt, Human
gaaccggggaggcggaggguguggugagccgg

SEQ ID NO: 150983 - RNA, 24 nt, Human
gaaccggggaggcggagguuacag

SEQ ID NO: 150984 - RNA, 32 nt, Human
gaaccggggaggcggagguuacagugagccga

SEQ ID NO: 150985 - RNA, 24 nt, Human
gaaccggggagguggaggcugcag

SEQ ID NO: 150986 - RNA, 32 nt, Human
gaaccggggagguggaggcugcagugagccga

SEQ ID NO: 150987 - RNA, 24 nt, Human
gaaccggggagguggagguugcag

SEQ ID NO: 150988 - RNA, 32 nt, Human
gaaccggggagguggagguugcagugagcuga

SEQ ID NO: 150989 - RNA, 32 nt, Human
gaaccggggaguuggagguugcagugagccga

SEQ ID NO: 150990 - RNA, 22 nt, Human
gaaccgggguuucaccauguug

SEQ ID NO: 150991 - RNA, 23 nt, Human
gaaccgggguuucaccauguugg

SEQ ID NO: 150992 - RNA, 32 nt, Human
gaaccggucucuuccucggaaaggcagggccg

SEQ ID NO: 150993 - RNA, 32 nt, Human
gaaccguccuccugccucuguugccaacacga

SEQ ID NO: 150994 - RNA, 20 nt, Human
gaaccgugggcagugagguc

SEQ ID NO: 150995 - RNA, 19 nt, Human
gaaccgugugcaaagccuu

SEQ ID NO: 150996 - RNA, 32 nt, Human
gaaccguucacccaugacauguuuccauggcu

SEQ ID NO: 150997 - RNA, 32 nt, Human
gaaccguuccucaccuucauccucaccaugcc

SEQ ID NO: 150998 - RNA, 32 nt, Human
gaaccguuucuauacauuuuuaccucaaacaa

SEQ ID NO: 150999 - RNA, 32 nt, Human
gaaccuaaguggcagagguugcagugagcuga

SEQ ID NO: 151000 - RNA, 32 nt, Human
gaaccuaaugccuuucccuugugccuagagaa

SEQ ID NO: 151001 - RNA, 32 nt, Human
gaaccuaccuaguauauuagccaucugucuug

SEQ ID NO: 151002 - RNA, 32 nt, Human
gaaccuagaagaggaaaaggaaugucaggcuc

SEQ ID NO: 151003 - RNA, 24 nt, Human
gaaccuagaagguggagguugcag

SEQ ID NO: 151004 - RNA, 32 nt, Human
gaaccuagaagguggagguugcagugagcgga

SEQ ID NO: 151005 - RNA, 32 nt, Human
gaaccuagagagcaagaagaaaagaggaaugg

SEQ ID NO: 151006 - RNA, 32 nt, Human
gaaccuagaggugguggugcaggugggaauag

SEQ ID NO: 151007 - RNA, 32 nt, Human
gaaccuagaucgugccauugcacuccagucug

SEQ ID NO: 151008 - RNA, 24 nt, Human
gaaccuagauugcaccauugcacu

SEQ ID NO: 151009 - RNA, 32 nt, Human
gaaccuaggaggcagaaguugcagugagcaga

SEQ ID NO: 151010 - RNA, 24 nt, Human
gaaccuaggaggcagagguugcag

SEQ ID NO: 151011 - RNA, 32 nt, Human
gaaccuaggaggcagagguugcagugaaccga

SEQ ID NO: 151012 - RNA, 32 nt, Human
gaaccuaggaggcagagguugcagugagccaa

SEQ ID NO: 151013 - RNA, 32 nt, Human
gaaccuaggaggcagaguuugcagugagcuga

SEQ ID NO: 151014 - RNA, 24 nt, Human
gaaccuaggaggcgaagguugcgg

SEQ ID NO: 151015 - RNA, 24 nt, Human
gaaccuaggaggcggagguugcag

SEQ ID NO: 151016 - RNA, 32 nt, Human
gaaccuaggaggcggagguugcagugagccaa

SEQ ID NO: 151017 - RNA, 32 nt, Human
gaaccuaggaggcggagguugcagugagucaa

SEQ ID NO: 151018 - RNA, 32 nt, Human
gaaccuaggaggcugagauugcagugagccga

SEQ ID NO: 151019 - RNA, 32 nt, Human
gaaccuaggaggggaagguugcagugagccga

SEQ ID NO: 151020 - RNA, 32 nt, Human
gaaccuaggaggucgaggcugcagugagccaa

SEQ ID NO: 151021 - RNA, 32 nt, Human
gaaccuaggagguggaggcugcagcgagcuga

SEQ ID NO: 151022 - RNA, 23 nt, Human
gaaccuaggagguggagguugca

SEQ ID NO: 151023 - RNA, 32 nt, Human
gaaccuaggagguggagguugcagugagccga

SEQ ID NO: 151024 - RNA, 32 nt, Human
gaaccuaggagguggagguugcagugagcuga

SEQ ID NO: 151025 - RNA, 32 nt, Human
gaaccuaggagguggcgguugcugugagccaa

SEQ ID NO: 151026 - RNA, 32 nt, Human
gaaccuaggaguucgagaccagccugggcaac

SEQ ID NO: 151027 - RNA, 32 nt, Human
gaaccuaggaguuugagaccagccugggcgau

SEQ ID NO: 151028 - RNA, 25 nt, Human
gaaccuagggaggcagagguuguag

SEQ ID NO: 151029 - RNA, 32 nt, Human
gaaccuagggaggcagagguuguagugagcca

SEQ ID NO: 151030 - RNA, 32 nt, Human
gaaccuagggcccuuggccaaugugauuaaag

SEQ ID NO: 151031 - RNA, 32 nt, Human
gaaccuaguaacaggcuuuauuuucaccuugu

SEQ ID NO: 151032 - RNA, 24 nt, Human
gaaccuaguaggcagagguugcag

SEQ ID NO: 151033 - RNA, 32 nt, Human
gaaccuaguaggggaggaaacaggcuuucuua

SEQ ID NO: 151034 - RNA, 18 nt, Human
gaaccuauggacagccca

SEQ ID NO: 151035 - RNA, 32 nt, Human
gaaccuauggcagaaguggcacugcagaucau

SEQ ID NO: 151036 - RNA, 32 nt, Human
gaaccucaaaccccaaaccagcccgaggagaa

SEQ ID NO: 151037 - RNA, 32 nt, Human
gaaccucaaugccagcaccguccgcacgguga

SEQ ID NO: 151038 - RNA, 32 nt, Human
gaaccucacgguguccugaugaaggaagcaga

SEQ ID NO: 151039 - RNA, 32 nt, Human
gaaccucacguccuucugccugggcaagagcu

SEQ ID NO: 151040 - RNA, 23 nt, Human
gaaccucagaggcagagguugca

SEQ ID NO: 151041 - RNA, 32 nt, Human
gaaccucagaggcagagguugcaaugaagcgg

SEQ ID NO: 151042 - RNA, 32 nt, Human
gaaccucagagggagggcagccaguagccucg

SEQ ID NO: 151043 - RNA, 32 nt, Human
gaaccucagcccauuaggcaggaaaaguugau

SEQ ID NO: 151044 - RNA, 32 nt, Human
gaaccucagcggcggagguugcagugagucga

SEQ ID NO: 151045 - RNA, 32 nt, Human
gaaccucaggcuucccuagauccagagccccu

SEQ ID NO: 151046 - RNA, 32 nt, Human
gaaccucauagaacauaacaucuuuauggcca

SEQ ID NO: 151047 - RNA, 32 nt, Human
gaaccucaucccugcacagaugaggaaaccaa

SEQ ID NO: 151048 - RNA, 32 nt, Human
gaaccucaugaagaaaugauaggaggcagaca

SEQ ID NO: 151049 - RNA, 32 nt, Human
gaaccucaugcucugaggaagucuaaguccag

SEQ ID NO: 151050 - RNA, 32 nt, Human
gaaccuccagcagcugucuggacauuugugga

SEQ ID NO: 151051 - RNA, 32 nt, Human
gaaccucccaacaacaaacuggacaaauucag

SEQ ID NO: 151052 - RNA, 22 nt, Human
gaaccucccccacacaccugcu

SEQ ID NO: 151053 - RNA, 32 nt, Human
gaaccucccgagagauggucaggagcuuuugg

SEQ ID NO: 151054 - RNA, 32 nt, Human
gaaccucccuggggccuccaccuugaaaaccu

SEQ ID NO: 151055 - RNA, 32 nt, Human
gaaccuccggaagggauguccucugcccugcg

SEQ ID NO: 151056 - RNA, 32 nt, Human
gaaccuccugcucuuccugugggcccugcuga

SEQ ID NO: 151057 - RNA, 32 nt, Human
gaaccuccugggagggggccugcauucuaugu

SEQ ID NO: 151058 - RNA, 32 nt, Human
gaaccuccuuucucuucucuguuccauugaau

SEQ ID NO: 151059 - RNA, 32 nt, Human
gaaccucgccgcuccaaccaccagcuuccuca

SEQ ID NO: 151060 - RNA, 19 nt, Human
gaaccucgcuucuuccuca

SEQ ID NO: 151061 - RNA, 24 nt, Human
gaaccucggaggcggagguugcag

SEQ ID NO: 151062 - RNA, 32 nt, Human
gaaccucggaggcggagguugcagugagccaa

SEQ ID NO: 151063 - RNA, 32 nt, Human
gaaccucggaggcugaaguugcagugagccaa

SEQ ID NO: 151064 - RNA, 32 nt, Human
gaaccucgugggcuccagggacccaggcccac

SEQ ID NO: 151065 - RNA, 21 nt, Human
gaaccucuacccucacccuga

SEQ ID NO: 151066 - RNA, 32 nt, Human
gaaccucucauggcggaggcggaggcggaggu

SEQ ID NO: 151067 - RNA, 32 nt, Human
gaaccucucccaccugcccuucuuuucaggga

SEQ ID NO: 151068 - RNA, 32 nt, Human
gaaccucuccuaagccgcccucccucugaugg

SEQ ID NO: 151069 - RNA, 32 nt, Human
gaaccucucguccacaggagguuugucucaac

SEQ ID NO: 151070 - RNA, 32 nt, Human
gaaccucucugccaccaagggcugccauccau

SEQ ID NO: 151071 - RNA, 24 nt, Human
gaaccucugaccucaggugaucca

SEQ ID NO: 151072 - RNA, 32 nt, Human
gaaccucugcagggaagggggaagaaaacccu

SEQ ID NO: 151073 - RNA, 32 nt, Human
gaaccucugcuccccgcccgucuucucuucug

SEQ ID NO: 151074 - RNA, 32 nt, Human
gaaccucugcucuggauugaagccacugucug

SEQ ID NO: 151075 - RNA, 32 nt, Human
gaaccucuggccugcaguuccagauccaaggu

SEQ ID NO: 151076 - RNA, 32 nt, Human
gaaccucuucugccgucucagccugggcgucg

SEQ ID NO: 151077 - RNA, 32 nt, Human
gaaccugaaccugaaacacuucaugguaguaa

SEQ ID NO: 151078 - RNA, 32 nt, Human
gaaccugacaaagaggaggagcuggaggaagc

SEQ ID NO: 151079 - RNA, 32 nt, Human
gaaccugagaaguggagguuguggugagcuga

SEQ ID NO: 151080 - RNA, 32 nt, Human
gaaccugagagacggagguugcagggagccga

SEQ ID NO: 151081 - RNA, 32 nt, Human
gaaccugagagauggagguugaugugagcuga

SEQ ID NO: 151082 - RNA, 24 nt, Human
gaaccugagaggcagagguuacag

SEQ ID NO: 151083 - RNA, 32 nt, Human
gaaccugagaggcagagguuacagugagcuga

SEQ ID NO: 151084 - RNA, 24 nt, Human
gaaccugagaggcagagguugcag

SEQ ID NO: 151085 - RNA, 32 nt, Human
gaaccugagaggcagagguugcagugagccaa

SEQ ID NO: 151086 - RNA, 32 nt, Human
gaaccugagaggcagagguugcagugagccga

SEQ ID NO: 151087 - RNA, 24 nt, Human
gaaccugagaggcggagguugcag

SEQ ID NO: 151088 - RNA, 32 nt, Human
gaaccugagaggcggagguugcagugagccaa

SEQ ID NO: 151089 - RNA, 32 nt, Human
gaaccugagaggcggagguugcagugagccga

SEQ ID NO: 151090 - RNA, 23 nt, Human
gaaccugagaggugagguugcag

SEQ ID NO: 151091 - RNA, 32 nt, Human
gaaccugagaggugagguugcagugagccgag

SEQ ID NO: 151092 - RNA, 24 nt, Human
gaaccugagagguggagguugcag

SEQ ID NO: 151093 - RNA, 32 nt, Human
gaaccugagagguggagguugcagugagccga

SEQ ID NO: 151094 - RNA, 24 nt, Human
gaaccugagagguggagguuucag

SEQ ID NO: 151095 - RNA, 32 nt, Human
gaaccugagagguggagguuucagugagccga

SEQ ID NO: 151096 - RNA, 32 nt, Human
gaaccugagccuggcugagauggcuaggcgga

SEQ ID NO: 151097 - RNA, 32 nt, Human
gaaccugaggaaccagccacagagccgucggc

SEQ ID NO: 151098 - RNA, 32 nt, Human
gaaccugagggagcauuugcugagggaauagu

SEQ ID NO: 151099 - RNA, 32 nt, Human
gaaccugaggguguuuguggcaguguuuguuu

SEQ ID NO: 151100 - RNA, 32 nt, Human
gaaccugauagucuuuaagccauuccagucau

SEQ ID NO: 151101 - RNA, 32 nt, Human
gaaccugcagaggcccccuccccgagccuggc

SEQ ID NO: 151102 - RNA, 32 nt, Human
gaaccugccacagccagaacugaggggcuggc

SEQ ID NO: 151103 - RNA, 32 nt, Human
gaaccugcccgucuccccuccuccaucagaca

SEQ ID NO: 151104 - RNA, 32 nt, Human
gaaccugccugagaacauuucuaacggggagc

SEQ ID NO: 151105 - RNA, 32 nt, Human
gaaccugccuugggccucaucugcuccuagcc

SEQ ID NO: 151106 - RNA, 24 nt, Human
gaaccugcgaggcagagauugcag

SEQ ID NO: 151107 - RNA, 32 nt, Human
gaaccugcgaggcagagauugcagugagccaa

SEQ ID NO: 151108 - RNA, 32 nt, Human
gaaccugcgcaacagaccaaagaacaguacaa

SEQ ID NO: 151109 - RNA, 32 nt, Human
gaaccugcgcugggcugaccuugagugaggcc

SEQ ID NO: 151110 - RNA, 32 nt, Human
gaaccugcuuaccucagagccugcugcggacu

SEQ ID NO: 151111 - RNA, 32 nt, Human
gaaccugcuuccuggcucacacauccccagcc

SEQ ID NO: 151112 - RNA, 32 nt, Human
gaaccugcuuucucugguuuccuuccugaguc

SEQ ID NO: 151113 - RNA, 32 nt, Human
gaaccuggaacgcggagguugcaaugagccga

SEQ ID NO: 151114 - RNA, 30 nt, Human
gaaccuggaagccacagugggugcgacuca

SEQ ID NO: 151115 - RNA, 32 nt, Human
gaaccuggaagccacagugggugcgacucaau

SEQ ID NO: 151116 - RNA, 32 nt, Human
gaaccuggaagcugaaaauuauaauauugaau

SEQ ID NO: 151117 - RNA, 24 nt, Human
gaaccuggaaggaagagguugcag

SEQ ID NO: 151118 - RNA, 32 nt, Human
gaaccuggaaggaagagguugcagugagccaa

SEQ ID NO: 151119 - RNA, 24 nt, Human
gaaccuggaaggcagaaguugcag

SEQ ID NO: 151120 - RNA, 32 nt, Human
gaaccuggaaggcagaaguugcagugagcuga

SEQ ID NO: 151121 - RNA, 24 nt, Human
gaaccuggaaggcagagauugcag

SEQ ID NO: 151122 - RNA, 32 nt, Human
gaaccuggaaggcagagauugcagugagcuga

SEQ ID NO: 151123 - RNA, 24 nt, Human
gaaccuggaaggcagagguggcag

SEQ ID NO: 151124 - RNA, 32 nt, Human
gaaccuggaaggcagggguugcagugaccuga

SEQ ID NO: 151125 - RNA, 32 nt, Human
gaaccuggaaggcggagcuugcagugagcuga

SEQ ID NO: 151126 - RNA, 24 nt, Human
gaaccuggaaggcggagguugcag

SEQ ID NO: 151127 - RNA, 32 nt, Human
gaaccuggaaggcggagguugcagugagcaga

SEQ ID NO: 151128 - RNA, 32 nt, Human
gaaccuggaaggcggagguugcagugagccaa

SEQ ID NO: 151129 - RNA, 32 nt, Human
gaaccuggaaggcggagguugcagugagccga

SEQ ID NO: 151130 - RNA, 24 nt, Human
gaaccuggaagguggagcuugcag

SEQ ID NO: 151131 - RNA, 32 nt, Human
gaaccuggaagguggagcuugcagugagcuga

SEQ ID NO: 151132 - RNA, 23 nt, Human
gaaccuggaaguggagguugcgg

SEQ ID NO: 151133 - RNA, 32 nt, Human
gaaccuggaauacagagguuucagugagcuga

SEQ ID NO: 151134 - RNA, 23 nt, Human
gaaccuggagacagagguugcag

SEQ ID NO: 151135 - RNA, 32 nt, Human
gaaccuggagacagagguugcagugagcugag

SEQ ID NO: 151136 - RNA, 23 nt, Human
gaaccuggaggcagagauugcag

SEQ ID NO: 151137 - RNA, 32 nt, Human
gaaccuggaggcagagauugcagugagccgag

SEQ ID NO: 151138 - RNA, 23 nt, Human
gaaccuggaggcagagguugcag

SEQ ID NO: 151139 - RNA, 26 nt, Human
gaaccuggaggcagagguugcaguga

SEQ ID NO: 151140 - RNA, 32 nt, Human
gaaccuggaggcagagguugcagugagucgag

SEQ ID NO: 151141 - RNA, 23 nt, Human
gaaccuggagguggagguugcag

SEQ ID NO: 151142 - RNA, 32 nt, Human
gaaccuggagguggagguugcagugagccgag

SEQ ID NO: 151143 - RNA, 32 nt, Human
gaaccuggauccugugcauaggcaagagcuga

SEQ ID NO: 151144 - RNA, 32 nt, Human
gaaccuggcaaguguagguugcagugagcuga

SEQ ID NO: 151145 - RNA, 24 nt, Human
gaaccuggcagagggagguugcag

SEQ ID NO: 151146 - RNA, 24 nt, Human
gaaccuggcaggcagagguugcag

SEQ ID NO: 151147 - RNA, 32 nt, Human
gaaccuggcaggcagagguugcagugagccaa

SEQ ID NO: 151148 - RNA, 24 nt, Human
gaaccuggcaggcagaguuugcag

SEQ ID NO: 151149 - RNA, 32 nt, Human
gaaccuggcaggcagaguuugcagugaaccaa

SEQ ID NO: 151150 - RNA, 24 nt, Human
gaaccuggcaggcggagguugcag

SEQ ID NO: 151151 - RNA, 32 nt, Human
gaaccuggcaggcggagguugcagugagccga

SEQ ID NO: 151152 - RNA, 32 nt, Human
gaaccuggcagggugggugccugcugcugaua

SEQ ID NO: 151153 - RNA, 24 nt, Human
gaaccuggcagguggagguuacag

SEQ ID NO: 151154 - RNA, 32 nt, Human
gaaccuggcagguggagguuacagugagccaa

SEQ ID NO: 151155 - RNA, 32 nt, Human
gaaccuggcagguggagguugcagugagugga

SEQ ID NO: 151156 - RNA, 32 nt, Human
gaaccuggccuuacucuccucugacaaucgca

SEQ ID NO: 151157 - RNA, 32 nt, Human
gaaccugggaagcagaggcuacagugagccaa

SEQ ID NO: 151158 - RNA, 24 nt, Human
gaaccugggaagcagagguugcag

SEQ ID NO: 151159 - RNA, 32 nt, Human
gaaccugggaagcagagguugcagugagccga

SEQ ID NO: 151160 - RNA, 24 nt, Human
gaaccugggaagcagaguuugcag

SEQ ID NO: 151161 - RNA, 32 nt, Human
gaaccugggaagcagaguuugcagugagccaa

SEQ ID NO: 151162 - RNA, 32 nt, Human
gaaccugggaagugcagguugcagugagccaa

SEQ ID NO: 151163 - RNA, 32 nt, Human
gaaccugggaaguggaagcugcagugagccga

SEQ ID NO: 151164 - RNA, 32 nt, Human
gaaccugggaaguggaggcugcagugagccca

SEQ ID NO: 151165 - RNA, 32 nt, Human
gaaccugggaaguggaggcugcagugagccga

SEQ ID NO: 151166 - RNA, 24 nt, Human
gaaccugggaaguggagguuacag

SEQ ID NO: 151167 - RNA, 24 nt, Human
gaaccugggaaucggagguugcag

SEQ ID NO: 151168 - RNA, 32 nt, Human
gaaccugggacccccuccccacugccugcaca

SEQ ID NO: 151169 - RNA, 32 nt, Human
gaaccugggagacagaaguuugcagugauccg

SEQ ID NO: 151170 - RNA, 23 nt, Human
gaaccugggagacagagguugca

SEQ ID NO: 151171 - RNA, 32 nt, Human
gaaccugggagacagagguugcaaugaaccga

SEQ ID NO: 151172 - RNA, 24 nt, Human
gaaccugggagacagagguugcag

SEQ ID NO: 151173 - RNA, 32 nt, Human
gaaccugggagacagagguugcagugagccaa

SEQ ID NO: 151174 - RNA, 32 nt, Human
gaaccugggagacggagcuugcagugagcuga

SEQ ID NO: 151175 - RNA, 24 nt, Human
gaaccugggagacggagguugcag

SEQ ID NO: 151176 - RNA, 32 nt, Human
gaaccugggagacggagguugcagugagccau

SEQ ID NO: 151177 - RNA, 32 nt, Human
gaaccugggagauggaaguugcagugaaccaa

SEQ ID NO: 151178 - RNA, 32 nt, Human
gaaccugggagauggagauugcagugagcaga

SEQ ID NO: 151179 - RNA, 32 nt, Human
gaaccugggagauggagguugcagagagccaa

SEQ ID NO: 151180 - RNA, 24 nt, Human
gaaccugggagcaggagguugcag

SEQ ID NO: 151181 - RNA, 32 nt, Human
gaaccugggagcaggagguugcagugagccga

SEQ ID NO: 151182 - RNA, 32 nt, Human
gaaccugggagccggaggcugcagugagccaa

SEQ ID NO: 151183 - RNA, 32 nt, Human
gaaccugggagccugagguugcagugagccaa

SEQ ID NO: 151184 - RNA, 24 nt, Human
gaaccugggaggagaagguugcag

SEQ ID NO: 151185 - RNA, 32 nt, Human
gaaccugggaggagaagguugcagugagcuga

SEQ ID NO: 151186 - RNA, 24 nt, Human
gaaccugggaggaggagguugcag

SEQ ID NO: 151187 - RNA, 32 nt, Human
gaaccugggaggaggagguugcagugagcuga

SEQ ID NO: 151188 - RNA, 24 nt, Human
gaaccugggaggcaaagguugcag

SEQ ID NO: 151189 - RNA, 32 nt, Human
gaaccugggaggcaaagguugcagugagcuga

SEQ ID NO: 151190 - RNA, 24 nt, Human
gaaccugggaggcaaagguugcgg

SEQ ID NO: 151191 - RNA, 32 nt, Human
gaaccugggaggcaaagguugcggugaacuga

SEQ ID NO: 151192 - RNA, 24 nt, Human
gaaccugggaggcagaaguugcag

SEQ ID NO: 151193 - RNA, 32 nt, Human
gaaccugggaggcagaaguugcagugaaacaa

SEQ ID NO: 151194 - RNA, 32 nt, Human
gaaccugggaggcagaaguugcagugagccga

SEQ ID NO: 151195 - RNA, 32 nt, Human
gaaccugggaggcagaaguugcagugagcuga

SEQ ID NO: 151196 - RNA, 32 nt, Human
gaaccugggaggcagaaguuguggugagccga

SEQ ID NO: 151197 - RNA, 32 nt, Human
gaaccugggaggcagagauuacacugaccuga

SEQ ID NO: 151198 - RNA, 24 nt, Human
gaaccugggaggcagagauugcag

SEQ ID NO: 151199 - RNA, 32 nt, Human
gaaccugggaggcagagauugcagugagccaa

SEQ ID NO: 151200 - RNA, 32 nt, Human
gaaccugggaggcagagauugcagugagccga

SEQ ID NO: 151201 - RNA, 32 nt, Human
gaaccugggaggcagagauugcagugagcuga

SEQ ID NO: 151202 - RNA, 24 nt, Human
gaaccugggaggcagagcuugcag

SEQ ID NO: 151203 - RNA, 32 nt, Human
gaaccugggaggcagagcuugcaguaagccga

SEQ ID NO: 151204 - RNA, 32 nt, Human
gaaccugggaggcagagcuugcagugagccaa

SEQ ID NO: 151205 - RNA, 32 nt, Human
gaaccugggaggcagagcuugcagugagccga

SEQ ID NO: 151206 - RNA, 32 nt, Human
gaaccugggaggcagagcuugcagugagccua

SEQ ID NO: 151207 - RNA, 32 nt, Human
gaaccugggaggcagagcuugcagugagcuga

SEQ ID NO: 151208 - RNA, 32 nt, Human
gaaccugggaggcagagcuugcagugagugga

SEQ ID NO: 151209 - RNA, 32 nt, Human
gaaccugggaggcagagcuugcagugauugga

SEQ ID NO: 151210 - RNA, 24 nt, Human
gaaccugggaggcagagggugcag

SEQ ID NO: 151211 - RNA, 32 nt, Human
gaaccugggaggcagagggugcaguaagcuga

SEQ ID NO: 151212 - RNA, 23 nt, Human
gaaccugggaggcagagguuaca

SEQ ID NO: 151213 - RNA, 32 nt, Human
gaaccugggaggcagagguuacaaugagccga

SEQ ID NO: 151214 - RNA, 24 nt, Human
gaaccugggaggcagagguuacag

SEQ ID NO: 151215 - RNA, 32 nt, Human
gaaccugggaggcagagguuacagugagccga

SEQ ID NO: 151216 - RNA, 32 nt, Human
gaaccugggaggcagagguugcaaugagccaa

SEQ ID NO: 151217 - RNA, 32 nt, Human
gaaccugggaggcagagguugcaaugagcuga

SEQ ID NO: 151218 - RNA, 24 nt, Human
gaaccugggaggcagagguugcag

SEQ ID NO: 151219 - RNA, 32 nt, Human
gaaccugggaggcagagguugcagggaaccua

SEQ ID NO: 151220 - RNA, 32 nt, Human
gaaccugggaggcagagguugcaguaagccaa

SEQ ID NO: 151221 - RNA, 32 nt, Human
gaaccugggaggcagagguugcaguaagcuaa

SEQ ID NO: 151222 - RNA, 32 nt, Human
gaaccugggaggcagagguugcaguaagcuga

SEQ ID NO: 151223 - RNA, 32 nt, Human
gaaccugggaggcagagguugcagugaacaga

SEQ ID NO: 151224 - RNA, 32 nt, Human
gaaccugggaggcagagguugcagugaaccaa

SEQ ID NO: 151225 - RNA, 32 nt, Human
gaaccugggaggcagagguugcagugaaccua

SEQ ID NO: 151226 - RNA, 32 nt, Human
gaaccugggaggcagagguugcagugaacuga

SEQ ID NO: 151227 - RNA, 32 nt, Human
gaaccugggaggcagagguugcagugagccaa

SEQ ID NO: 151228 - RNA, 32 nt, Human
gaaccugggaggcagagguugcagugagccga

SEQ ID NO: 151229 - RNA, 32 nt, Human
gaaccugggaggcagagguugcagugagcuaa

SEQ ID NO: 151230 - RNA, 32 nt, Human
gaaccugggaggcagagguugcagugagcuca

SEQ ID NO: 151231 - RNA, 32 nt, Human
gaaccugggaggcagagguugcagugagcuga

SEQ ID NO: 151232 - RNA, 32 nt, Human
gaaccugggaggcagagguugcagugagguga

SEQ ID NO: 151233 - RNA, 32 nt, Human
gaaccugggaggcagagguugcagugauccaa

SEQ ID NO: 151234 - RNA, 32 nt, Human
gaaccugggaggcagagguugcagugauccga

SEQ ID NO: 151235 - RNA, 32 nt, Human
gaaccugggaggcagagguugccgugagcuga

SEQ ID NO: 151236 - RNA, 32 nt, Human
gaaggagggagagagggaggaaggaagaaggu

SEQ ID NO: 151237 - RNA, 17 nt, Human
gaaggagggagccggga

SEQ ID NO: 151238 - RNA, 17 nt, Human
gaaggagggagccgggg

SEQ ID NO: 151239 - RNA, 32 nt, Human
gaaggagggagcugcccagaccuggaaagcca

SEQ ID NO: 151240 - RNA, 32 nt, Human
gaaggagggaggaggaagaaggaaguaaggag

SEQ ID NO: 151241 - RNA, 32 nt, Human
gaaggagggaggcaggcauagcaucugaaccc

SEQ ID NO: 151242 - RNA, 32 nt, Human
gaaggagggcaggcugcauuggaugacccugg

SEQ ID NO: 151243 - RNA, 32 nt, Human
gaaggaggggacagaggagcugagagaggggg

SEQ ID NO: 151244 - RNA, 32 nt, Human
gaaggaggggagccccaucuccccagaagagc

SEQ ID NO: 151245 - RNA, 32 nt, Human
gaaggagggggaggagaagagagaagaaacug

SEQ ID NO: 151246 - RNA, 32 nt, Human
gaaggaggguggaggaagugaucagagggaac

SEQ ID NO: 151247 - RNA, 32 nt, Human
gaaggagguagaaacuugguccuuuagccagg

SEQ ID NO: 151248 - RNA, 32 nt, Human
gaaggaggucaccaagcagguugacccucccc

SEQ ID NO: 151249 - RNA, 32 nt, Human
gaaggaggucagcaacagggaacucauagugg

SEQ ID NO: 151250 - RNA, 32 nt, Human
gaaggaggucaggggaacgcucuccccucccc

SEQ ID NO: 151251 - RNA, 32 nt, Human
gaaggaggugaggaagagagcccugcagauac

SEQ ID NO: 151252 - RNA, 32 nt, Human
gaaggaggugagggggcccaggaucgcggggc

SEQ ID NO: 151253 - RNA, 32 nt, Human
gaaggagguggaggcaggauggguccuaaggu

SEQ ID NO: 151254 - RNA, 22 nt, Human
gaaggaggugggaaaagaggac

SEQ ID NO: 151255 - RNA, 32 nt, Human
gaaggagguggggauccgagugcagugagagc

SEQ ID NO: 151256 - RNA, 32 nt, Human
gaaggaguagugggggucucucaugcucuguu

SEQ ID NO: 151257 - RNA, 32 nt, Human
gaaggagucaagacuggcaauuggcuggauua

SEQ ID NO: 151258 - RNA, 32 nt, Human
gaaggaguggugaucccccugccccuucgaac

SEQ ID NO: 151259 - RNA, 23 nt, Human
gaaggaguuaagacuuuggggga

SEQ ID NO: 151260 - RNA, 22 nt, Human
gaaggaguuaaggggcuguggc

SEQ ID NO: 151261 - RNA, 32 nt, Human
gaaggaguucugacauucauuuucauuguuuu

SEQ ID NO: 151262 - RNA, 32 nt, Human
gaaggaguuggaggaggaggaggaggaggcga

SEQ ID NO: 151263 - RNA, 18 nt, Human
gaaggaguugucagggga

SEQ ID NO: 151264 - RNA, 32 nt, Human
gaaggaucacccauuggagaggacugugggga

SEQ ID NO: 151265 - RNA, 24 nt, Human
gaaggauccaggcugcuggguccc

SEQ ID NO: 151266 - RNA, 32 nt, Human
gaaggaucccucuccucucugccauuucuugg

SEQ ID NO: 151267 - RNA, 32 nt, Human
gaaggaucccuuggcccaggaggcagagguug

SEQ ID NO: 151268 - RNA, 32 nt, Human
gaaggauccuggacagggagaaguggaggagg

SEQ ID NO: 151269 - RNA, 32 nt, Human
gaaggaucuggcccaagauugcauccuuagcc

SEQ ID NO: 151270 - RNA, 32 nt, Human
gaaggaugaaaccuuuaaaaacaaaaacaaaa

SEQ ID NO: 151271 - RNA, 32 nt, Human
gaaggaugaagagaaggguagaggucaccugg

SEQ ID NO: 151272 - RNA, 32 nt, Human
gaaggaugaagugggaggauugcuugagccgg

SEQ ID NO: 151273 - RNA, 32 nt, Human
gaaggaugacagagaugugcauguggguauug

SEQ ID NO: 151274 - RNA, 32 nt, Human
gaaggaugacaucacccaggaugcaaugaucc

SEQ ID NO: 151275 - RNA, 32 nt, Human
gaaggaugcacaggucaggccauucuguugcc

SEQ ID NO: 151276 - RNA, 30 nt, Human
gaaggaugccccugucccgcugguugagau

SEQ ID NO: 151277 - RNA, 32 nt, Human
gaaggaugccugggugccaggcaagacaagcc

SEQ ID NO: 151278 - RNA, 32 nt, Human
gaaggaugcggagcccagcacugugaagccua

SEQ ID NO: 151279 - RNA, 32 nt, Human
gaaggauggagagugaggggauccaggccauu

SEQ ID NO: 151280 - RNA, 32 nt, Human
gaaggauggagccacuucaucacaccuucaaa

SEQ ID NO: 151281 - RNA, 32 nt, Human
gaaggaugggaagagaaaaggagcaguuuuau

SEQ ID NO: 151282 - RNA, 21 nt, Human
gaaggauguccccagcccagg

SEQ ID NO: 151283 - RNA, 32 nt, Human
gaaggaugugaaggugguuggcugguugggcu

SEQ ID NO: 151284 - RNA, 32 nt, Human
gaaggauuacucuccauaucccuuccucucag

SEQ ID NO: 151285 - RNA, 32 nt, Human
gaaggauuaugugaguuuaaggacagaagcaa

SEQ ID NO: 151286 - RNA, 32 nt, Human
gaaggauuaugugaguuuaaggauagaagcaa

SEQ ID NO: 151287 - RNA, 32 nt, Human
gaaggauuccaggaagaucauggagaccuggc

SEQ ID NO: 151288 - RNA, 32 nt, Human
gaaggauuccucugggcagcagcuccaacaca

SEQ ID NO: 151289 - RNA, 32 nt, Human
gaaggauugcucgaggccagguguucgagacc

SEQ ID NO: 151290 - RNA, 32 nt, Human
gaaggauugcuugacaucaggagacuuggggg

SEQ ID NO: 151291 - RNA, 32 nt, Human
gaaggauuggcagugcuugugccugaccucau

SEQ ID NO: 151292 - RNA, 32 nt, Human
gaaggauuggggaaggaaguggccucugauuc

SEQ ID NO: 151293 - RNA, 32 nt, Human
gaaggauugucacagaguuucacuggaugaaa

SEQ ID NO: 151294 - RNA, 32 nt, Human
gaaggauugucgaggccaggguucgggaagua

SEQ ID NO: 151295 - RNA, 32 nt, Human
gaaggauuuaugaauacaccaccaccagagug

SEQ ID NO: 151296 - RNA, 32 nt, Human
gaaggauuucagcaaaccaccaccucccacuc

SEQ ID NO: 151297 - RNA, 32 nt, Human
gaaggauuuucugaggaagcaggacaguuuau

SEQ ID NO: 151298 - RNA, 21 nt, Human
gaaggcaaaaagaagaagcaa

SEQ ID NO: 151299 - RNA, 32 nt, Human
gaaggcaaacacacccaccuucauccugagcc

SEQ ID NO: 151300 - RNA, 32 nt, Human
gaaggcaaagcaaaggcaggcacuucacacag

SEQ ID NO: 151301 - RNA, 32 nt, Human
gaaggcaaagccccagacagcaaauagggagg

SEQ ID NO: 151302 - RNA, 21 nt, Human
gaaggcaaagggagagcucug

SEQ ID NO: 151303 - RNA, 32 nt, Human
gaaggcaaagucggaagcucugugcugcugcu

SEQ ID NO: 151304 - RNA, 32 nt, Human
gaaggcaaauggcuggcguggaagcacaaccc

SEQ ID NO: 151305 - RNA, 31 nt, Human
gaaggcaacaacauauagaggguggaagaau

SEQ ID NO: 151306 - RNA, 24 nt, Human
gaaggcaaccagcuguuaggggga

SEQ ID NO: 151307 - RNA, 32 nt, Human
gaaggcaagcacgauggcgcucaccagccggc

SEQ ID NO: 151308 - RNA, 32 nt, Human
gaaggcaagccuugauuucguaugaacguugc

SEQ ID NO: 151309 - RNA, 32 nt, Human
gaaggcaagcuccaaaccccugccuggaagac

SEQ ID NO: 151310 - RNA, 32 nt, Human
gaaggcaaggagguaggaagagagggaggagg

SEQ ID NO: 151311 - RNA, 32 nt, Human
gaaggcaaucaguaccucugcuuuucaaaggu

SEQ ID NO: 151312 - RNA, 31 nt, Human
gaaggcaauugcuccuuaacagcagaguauc

SEQ ID NO: 151313 - RNA, 32 nt, Human
gaaggcacaaacugagucugauacguagugag

SEQ ID NO: 151314 - RNA, 32 nt, Human
gaaggcacaagaaaccucccucaucaguggcu

SEQ ID NO: 151315 - RNA, 32 nt, Human
gaaggcacaccacauggugagagcaggagcga

SEQ ID NO: 151316 - RNA, 19 nt, Human
gaaggcacagaaaccuggc

SEQ ID NO: 151317 - RNA, 32 nt, Human
gaaggcacagcaaaagcaccguccuggaccaa

SEQ ID NO: 151318 - RNA, 18 nt, Human
gaaggcacaguccaggca

SEQ ID NO: 151319 - RNA, 32 nt, Human
gaaggcacccuggccaugcacaggcaucgcug

SEQ ID NO: 151320 - RNA, 32 nt, Human
gaaggcacugcugggagccauuagaacacaga

SEQ ID NO: 151321 - RNA, 32 nt, Human
gaaggcacuggggccaggcucacaccuguaau

SEQ ID NO: 151322 - RNA, 32 nt, Human
gaaggcacuguaacugguagcuaguucuugau

SEQ ID NO: 151323 - RNA, 32 nt, Human
gaaggcacuuccagaaccuuuuaugucucucg

SEQ ID NO: 151324 - RNA, 32 nt, Human
gaaggcacuucuccugccuccugggagccuag

SEQ ID NO: 151325 - RNA, 32 nt, Human
gaaggcagaauucuacaagcccagggaugcca

SEQ ID NO: 151326 - RNA, 32 nt, Human
gaaggcagacaggcgccagagcccagcacucc

SEQ ID NO: 151327 - RNA, 24 nt, Human
gaaggcagagaaggccgagaggga

SEQ ID NO: 151328 - RNA, 32 nt, Human
gaaggcagagagaagaggaagagucuuggucu

SEQ ID NO: 151329 - RNA, 32 nt, Human
gaaggcagagagacuccagaccccgaaaaagu

SEQ ID NO: 151330 - RNA, 32 nt, Human
gaaggcagagcccagacucuuggagcaguugu

SEQ ID NO: 151331 - RNA, 24 nt, Human
gaaggcagagcccugacccuugaa

SEQ ID NO: 151332 - RNA, 32 nt, Human
gaaggcagaggaagccuugaggugggggccca

SEQ ID NO: 151333 - RNA, 32 nt, Human
gaaggcagaggcaggaggaucacuugagccca

SEQ ID NO: 151334 - RNA, 32 nt, Human
gaaggcagagggcagaggcaggaaacaaaucu

SEQ ID NO: 151335 - RNA, 32 nt, Human
gaaggcagaggggucucuggaggcagacaggg

SEQ ID NO: 151336 - RNA, 32 nt, Human
gaaggcagagguggaggacauggacgagggcc

SEQ ID NO: 151337 - RNA, 32 nt, Human
gaaggcagcagacagaaugaagaggcaaaagg

SEQ ID NO: 151338 - RNA, 22 nt, Human
gaaggcagcaugcucaguggga

SEQ ID NO: 151339 - RNA, 32 nt, Human
gaaggcagccuccugccugcccuggccuugcu

SEQ ID NO: 151340 - RNA, 32 nt, Human
gaaggcagcgaaggggguugcaguaggggcgc

SEQ ID NO: 151341 - RNA, 32 nt, Human
gaaggcagcggaccccagcccacuagaggggc

SEQ ID NO: 151342 - RNA, 24 nt, Human
gaaggcagcggggaauugggguga

SEQ ID NO: 151343 - RNA, 32 nt, Human
gaaggcagcuccaagaagaggucccuguggcg

SEQ ID NO: 151344 - RNA, 20 nt, Human
gaaggcagcuucccacuagg

SEQ ID NO: 151345 - RNA, 32 nt, Human
gaaggcaggacacaggacacagcagcuuucuu

SEQ ID NO: 151346 - RNA, 21 nt, Human
gaaggcaggacacguaucucu

SEQ ID NO: 151347 - RNA, 21 nt, Human
gaaggcagggacacccuggaa

SEQ ID NO: 151348 - RNA, 32 nt, Human
gaaggcaggggugggagggucaggagggcagg

SEQ ID NO: 151349 - RNA, 24 nt, Human
gaaggcaggucccccuuagcggga

SEQ ID NO: 151350 - RNA, 32 nt, Human
gaaggcaggucuuccccuagcacauggggacc

SEQ ID NO: 151351 - RNA, 32 nt, Human
gaaggcaggugggggccucucccuggcuggag

SEQ ID NO: 151352 - RNA, 32 nt, Human
gaaggcaguagaaaggaggaaggagggagagg

SEQ ID NO: 151353 - RNA, 20 nt, Human
gaaggcagugaggcugaggg

SEQ ID NO: 151354 - RNA, 32 nt, Human
gaaggcagugccucagagcagcacagagaguu

SEQ ID NO: 151355 - RNA, 32 nt, Human
gaaggcagugcggauauggcccaggagauguu

SEQ ID NO: 151356 - RNA, 32 nt, Human
gaaggcagugcuguuacuuggccacuaagaug

SEQ ID NO: 151357 - RNA, 23 nt, Human
gaaggcaguggaagguuggcaga

SEQ ID NO: 151358 - RNA, 24 nt, Human
gaaggcagugggggaguugggagg

SEQ ID NO: 151359 - RNA, 32 nt, Human
gaaggcauagaaaaggaggagaagaggaaagu

SEQ ID NO: 151360 - RNA, 32 nt, Human
gaaggcauaggccagggugguuauugcuauau

SEQ ID NO: 151361 - RNA, 32 nt, Human
gaaggcaucugaggagaaugagauuacucagc

SEQ ID NO: 151362 - RNA, 32 nt, Human
gaaggcauggaggugggaccagaugcuucccu

SEQ ID NO: 151363 - RNA, 32 nt, Human
gaaggccaaacagaagcaggcuccagcuucug

SEQ ID NO: 151364 - RNA, 25 nt, Human
gaaggccaaaggaauaaaauucuuu

SEQ ID NO: 151365 - RNA, 23 nt, Human
gaaggccaaagugcaccccugcu

SEQ ID NO: 151366 - RNA, 23 nt, Human
gaaggccaagacagguggaucac

SEQ ID NO: 151367 - RNA, 32 nt, Human
gaaggccaaggcaggaggaccgcuugagucca

SEQ ID NO: 151368 - RNA, 23 nt, Human
gaaggccaaggcgggcagaucac

SEQ ID NO: 151369 - RNA, 23 nt, Human
gaaggccaaggcgggcggaucac

SEQ ID NO: 151370 - RNA, 23 nt, Human
gaaggccaaggggagucaccuuc

SEQ ID NO: 151371 - RNA, 32 nt, Human
gaaggccaaggugggaggaucgcuugagccca

SEQ ID NO: 151372 - RNA, 32 nt, Human
gaaggccaaggugggcaccacccuggagcggg

SEQ ID NO: 151373 - RNA, 32 nt, Human
gaaggccaauuagagccuccgaagggaaucug

SEQ ID NO: 151374 - RNA, 32 nt, Human
gaaggccacaaacauuaacaaggucucugagg

SEQ ID NO: 151375 - RNA, 32 nt, Human
gaaggccacagaaaaggggaaaagaggaaaua

SEQ ID NO: 151376 - RNA, 32 nt, Human
gaaggccacagggaccucugccccagaaagcc

SEQ ID NO: 151377 - RNA, 32 nt, Human
gaaggccacuagcagaggcugagugggcuucu

SEQ ID NO: 151378 - RNA, 32 nt, Human
gaaggccagacagacaaggacaaggagcacau

SEQ ID NO: 151379 - RNA, 32 nt, Human
gaaggccagaccacagcucugcagccuguuuc

SEQ ID NO: 151380 - RNA, 23 nt, Human
gaaggccagacuuacucauuuuu

SEQ ID NO: 151381 - RNA, 24 nt, Human
gaaggccagagcauauuuauuuuc

SEQ ID NO: 151382 - RNA, 21 nt, Human
gaaggccagaggaacagcuuu

SEQ ID NO: 151383 - RNA, 21 nt, Human
gaaggccagccccgcaucucc

SEQ ID NO: 151384 - RNA, 32 nt, Human
gaaggccagcccuccuccuccucggaauccug

SEQ ID NO: 151385 - RNA, 32 nt, Human
gaaggccagcugccagcacuggcccagcugga

SEQ ID NO: 151386 - RNA, 32 nt, Human
gaaggccagcugccccagccagauggacucca

SEQ ID NO: 151387 - RNA, 21 nt, Human
gaaggccagcuucacauuucu

SEQ ID NO: 151388 - RNA, 27 nt, Human
gaaggccaggaagaaugguguguuucc

SEQ ID NO: 151389 - RNA, 32 nt, Human
gaaggccaggcaggguuggaggccgggggugu

SEQ ID NO: 151390 - RNA, 32 nt, Human
gaaggccagggcagguggaucgcuugauccca

SEQ ID NO: 151391 - RNA, 32 nt, Human
gaaggccagggcccugcacacagacugcaagu

SEQ ID NO: 151392 - RNA, 32 nt, Human
gaaggccaucaagguguucuccagugccaagu

SEQ ID NO: 151393 - RNA, 32 nt, Human
gaaggccaugccaaagaaggacaggguauuaa

SEQ ID NO: 151394 - RNA, 22 nt, Human
gaaggccauuuguacauguccu

SEQ ID NO: 151395 - RNA, 32 nt, Human
gaaggcccaaguguccccacagucuuaggggg

SEQ ID NO: 151396 - RNA, 32 nt, Human
gaaggcccagcaggaagagaggcuggaugaga

SEQ ID NO: 151397 - RNA, 32 nt, Human
gaaggcccaggcugggcaggcaauaccugcuc

SEQ ID NO: 151398 - RNA, 32 nt, Human
gaaggccccacauugaccccucuucacuugua

SEQ ID NO: 151399 - RNA, 32 nt, Human
gaaggcccccaccagcaccacacccaucccca

SEQ ID NO: 151400 - RNA, 32 nt, Human
gaaggcccuccagcuggaugcuggggaucagc

SEQ ID NO: 151401 - RNA, 32 nt, Human
gaaggcccugagcugccugccaccugccagag

SEQ ID NO: 151402 - RNA, 32 nt, Human
gaaggcccugcucuccucgguucccggcucca

SEQ ID NO: 151403 - RNA, 32 nt, Human
gaaggcccugcuguuguggccauguccacccu

SEQ ID NO: 151404 - RNA, 32 nt, Human
gaaggcccuguguggcccugggccaagcacgc

SEQ ID NO: 151405 - RNA, 32 nt, Human
gaaggccgaggcaggaagauugcuugagccua

SEQ ID NO: 151406 - RNA, 32 nt, Human
gaaggccgaggcaggaggaucacuugagucca

SEQ ID NO: 151407 - RNA, 23 nt, Human
gaaggccgaggcaggcggaucac

SEQ ID NO: 151408 - RNA, 23 nt, Human
gaaggccgaggcagguggaucac

SEQ ID NO: 151409 - RNA, 32 nt, Human
gaaggccgaggucucagacuccuggguagggg

SEQ ID NO: 151410 - RNA, 32 nt, Human
gaaggccgaggugggagaauugcuugaggcca

SEQ ID NO: 151411 - RNA, 32 nt, Human
gaaggccgaggugggaggaucgcuugagccca

SEQ ID NO: 151412 - RNA, 32 nt, Human
gaaggccgcacgggugccuccagccugagaca

SEQ ID NO: 151413 - RNA, 22 nt, Human
gaaggccgcgcuugccgucucc

SEQ ID NO: 151414 - RNA, 32 nt, Human
gaaggccgggauacucacaggcugccgagagc

SEQ ID NO: 151415 - RNA, 32 nt, Human
gaaggccgggggcucaagaccuaccuguugac

SEQ ID NO: 151416 - RNA, 32 nt, Human
gaaggccuaaccagcacccaagaucaugcuca

SEQ ID NO: 151417 - RNA, 32 nt, Human
gaaggccuccgcucccugcacacacacggaca

SEQ ID NO: 151418 - RNA, 32 nt, Human
gaaggccugcugucuccuucugggggucaggg

SEQ ID NO: 151419 - RNA, 32 nt, Human
gaaggccuggaauuagcuuggggccagggaag

SEQ ID NO: 151420 - RNA, 32 nt, Human
gaaggccuggagaaaccagaauccaagaccuc

SEQ ID NO: 151421 - RNA, 32 nt, Human
gaaggccuggaggcaggggcagaggugacgac

SEQ ID NO: 151422 - RNA, 32 nt, Human
gaaggccugguggcaggaugggugccgugaag

SEQ ID NO: 151423 - RNA, 32 nt, Human
gaaggccuguuguggagggaaaccacccaucc

SEQ ID NO: 151424 - RNA, 32 nt, Human
gaaggcgaacaauuagaagauagcccaaacau

SEQ ID NO: 151425 - RNA, 32 nt, Human
gaaggcgacucacacaccacaccugauuccug

SEQ ID NO: 151426 - RNA, 32 nt, Human
gaaggcgagagggaagccugggugacucagcg

SEQ ID NO: 151427 - RNA, 32 nt, Human
gaaggcgaggaggaggcggagguggagcuggc

SEQ ID NO: 151428 - RNA, 32 nt, Human
gaaggcgaggggcagaugggaggccacauaua

SEQ ID NO: 151429 - RNA, 32 nt, Human
gaaggcgauugagaggggcugagggaauuguc

SEQ ID NO: 151430 - RNA, 32 nt, Human
gaaggcgccacaggcuggcagcucuucaaacc

SEQ ID NO: 151431 - RNA, 32 nt, Human
gaaggcgcccacagcaggugugguguucaucc

SEQ ID NO: 151432 - RNA, 32 nt, Human
gaaggcggagagagcucgcgucucgcucggcu

SEQ ID NO: 151433 - RNA, 32 nt, Human
gaaggcggagcagaaucucagcagaucggaaa

SEQ ID NO: 151434 - RNA, 32 nt, Human
gaaggcggcacucugguggggcugcuccaggc

SEQ ID NO: 151435 - RNA, 32 nt, Human
gaaggcggcaggcagagaaguggagugacuau

SEQ ID NO: 151436 - RNA, 32 nt, Human
gaaggcggcggcggggccagaggcucagcggc

SEQ ID NO: 151437 - RNA, 32 nt, Human
gaaggcggggcuggugcucauggcacuuccuu

SEQ ID NO: 151438 - RNA, 32 nt, Human
gaaggcgucggccggaggacaccccaucgugc

SEQ ID NO: 151439 - RNA, 32 nt, Human
gaaggcguggagaagagggagggagcgagagc

SEQ ID NO: 151440 - RNA, 32 nt, Human
gaaggcguggcugagggacucagagguccaca

SEQ ID NO: 151441 - RNA, 22 nt, Human
gaaggcuaaaugaauauuaucc

SEQ ID NO: 151442 - RNA, 32 nt, Human
gaaggcuaacuccaucuccaucuuugugucag

SEQ ID NO: 151443 - RNA, 32 nt, Human
gaaggcuaaggcaggagaauggcgugaaccug

SEQ ID NO: 151444 - RNA, 21 nt, Human
gaaggcuaagggagucacucc

SEQ ID NO: 151445 - RNA, 32 nt, Human
gaaggcuacaucugugcuuuguaaguaccacu

SEQ ID NO: 151446 - RNA, 21 nt, Human
gaaggcuauuacauuauuucc

SEQ ID NO: 151447 - RNA, 32 nt, Human
gaaggcucacgaaaacagcacacccacaguuu

SEQ ID NO: 151448 - RNA, 18 nt, Human
gaaggcucauuccagcca

SEQ ID NO: 151449 - RNA, 32 nt, Human
gaaggcuccagccagcuguccuggguuuccgu

SEQ ID NO: 151450 - RNA, 32 nt, Human
gaaggcucgagaagagcaugagagggaggaag

SEQ ID NO: 151451 - RNA, 32 nt, Human
gaaggcucgccucuccccguggacccuguuaa

SEQ ID NO: 151452 - RNA, 32 nt, Human
gaaggcucggcugcuucuguccaccucuuaca

SEQ ID NO: 151453 - RNA, 32 nt, Human
gaaggcucuauuucaauggauucauguaaaaa

SEQ ID NO: 151454 - RNA, 32 nt, Human
gaaggcucugaacugagccacuggggaaggga

SEQ ID NO: 151455 - RNA, 32 nt, Human
gaaggcucugccagacaccuccaagcuugaga

SEQ ID NO: 151456 - RNA, 24 nt, Human
gaaggcucugggaugcaugucucu

SEQ ID NO: 151457 - RNA, 32 nt, Human
gaaggcugaacacaggcuuguuaaugucaguc

SEQ ID NO: 151458 - RNA, 32 nt, Human
gaaggcugacuggcuggacucauugagcugaa

SEQ ID NO: 151459 - RNA, 32 nt, Human
gaaggcugagacaggagaaucgcuugaaccug

SEQ ID NO: 151460 - RNA, 32 nt, Human
gaaggcugagagaggugaggcagcugcggaag

SEQ ID NO: 151461 - RNA, 32 nt, Human
gaaggcugaggaaggaggaucgcuugaggcca

SEQ ID NO: 151462 - RNA, 32 nt, Human
gaaggcugaggcaaaagaauugcuugaaccca

SEQ ID NO: 151463 - RNA, 32 nt, Human
gaaggcugaggcagaagaaucgcuugaacugg

SEQ ID NO: 151464 - RNA, 32 nt, Human
gaaggcugaggcaggagaaucgcuugaaccca

SEQ ID NO: 151465 - RNA, 32 nt, Human
gaaggcugaggcaggagaaucgcuugaaccug

SEQ ID NO: 151466 - RNA, 32 nt, Human
gaaggcugaggcaggagaauugcuugaaccca

SEQ ID NO: 151467 - RNA, 32 nt, Human
gaaggcugaggcaggagaauugcuugaacccg

SEQ ID NO: 151468 - RNA, 32 nt, Human
gaaggcugaggcaggagaauugcuugaaccua

SEQ ID NO: 151469 - RNA, 32 nt, Human
gaaggcugaggcaggagaauugcuugaaccug

SEQ ID NO: 151470 - RNA, 32 nt, Human
gaaggcugaggcaggagcauugcuugaacccg

SEQ ID NO: 151471 - RNA, 32 nt, Human
gaaggcugaggcaggaggaucacuugagccug

SEQ ID NO: 151472 - RNA, 32 nt, Human
gaaggcugaggcaggaggaucauuugagcuca

SEQ ID NO: 151473 - RNA, 32 nt, Human
gaaggcugaggcaggaggaucgcuugagacca

SEQ ID NO: 151474 - RNA, 32 nt, Human
gaaggcugaggcagggggaucgcuugagccca

SEQ ID NO: 151475 - RNA, 32 nt, Human
gaaggcugaggcauaggaguugcuugaaccug

SEQ ID NO: 151476 - RNA, 32 nt, Human
gaaggcugaggcaugagaaucacuugaaccug

SEQ ID NO: 151477 - RNA, 32 nt, Human
gaaggcugaggcugggggauugcuugaaguca

SEQ ID NO: 151478 - RNA, 32 nt, Human
gaaggcugagguaugagaaucgcuugaaccug

SEQ ID NO: 151479 - RNA, 32 nt, Human
gaaggcugaggugagaggaucacucgaggaga

SEQ ID NO: 151480 - RNA, 32 nt, Human
gaaggcugaggugggaggauuguuugagccca

SEQ ID NO: 151481 - RNA, 32 nt, Human
gaaggcugagguggguggauugcuugagccca

SEQ ID NO: 151482 - RNA, 32 nt, Human
gaaggcugccacaaugacagcagcgggccauc

SEQ ID NO: 151483 - RNA, 32 nt, Human
gaaggcugccuacacugggcacuguuuuagau

SEQ ID NO: 151484 - RNA, 29 nt, Human
gaaggcuggcugcugaagacccucuuggc

SEQ ID NO: 151485 - RNA, 29 nt, Human
gaaggcuggcugcugcccucagcuccgcc

SEQ ID NO: 151486 - RNA, 32 nt, Human
gaaggcugggaggaggugggcuagaugaucuu

SEQ ID NO: 151487 - RNA, 23 nt, Human
gaaggcugggugacagagugagg

SEQ ID NO: 151488 - RNA, 32 nt, Human
gaaggcugggugcaguggcucuugccuguaau

SEQ ID NO: 151489 - RNA, 32 nt, Human
gaaggcuggugcuucucucccaggcuguccuc

SEQ ID NO: 151490 - RNA, 32 nt, Human
gaaggcugguggcugggcuaccagucccaccg

SEQ ID NO: 151491 - RNA, 22 nt, Human
gaaggcugguuauggauauuca

SEQ ID NO: 151492 - RNA, 24 nt, Human
gaaggcugguuugccugucaguca

SEQ ID NO: 151493 - RNA, 32 nt, Human
gaaggcugucagcugcucagccugcuuugagc

SEQ ID NO: 151494 - RNA, 22 nt, Human
gaaggcugucgaugauagguua

SEQ ID NO: 151495 - RNA, 32 nt, Human
gaaggcuguggacccccaucuccagggggccu

SEQ ID NO: 151496 - RNA, 32 nt, Human
gaaggcuucccuucauggaaauucuuguuuuc

SEQ ID NO: 151497 - RNA, 32 nt, Human
gaaggcuucucagagguaguggcauugggcca

SEQ ID NO: 151498 - RNA, 32 nt, Human
gaaggcuuugcgcuccggggccuggaugcggc

SEQ ID NO: 151499 - RNA, 32 nt, Human
gaaggcuuuuucucaggucaggcuuuucauga

SEQ ID NO: 151500 - RNA, 32 nt, Human
gaagggaaaggcagagggugugauuaugguga

SEQ ID NO: 151501 - RNA, 32 nt, Human
gaagggaaaggccugcaucuugugcucaguga

SEQ ID NO: 151502 - RNA, 32 nt, Human
gaagggaaagugguaagggagagugcuggucc

SEQ ID NO: 151503 - RNA, 32 nt, Human
gaagggaacagcugggcugcuggagucacaga

SEQ ID NO: 151504 - RNA, 32 nt, Human
gaagggaacguuggaaccaaugcugaugagcc

SEQ ID NO: 151505 - RNA, 19 nt, Human
gaagggaacuggagaacuc

SEQ ID NO: 151506 - RNA, 32 nt, Human
gaagggaagauggauguaaagugugggagacc

SEQ ID NO: 151507 - RNA, 32 nt, Human
gaagggaagccgggggagaggggccaggagag

SEQ ID NO: 151508 - RNA, 32 nt, Human
gaagggaagguggaggaggaagcgguuagugc

SEQ ID NO: 151509 - RNA, 32 nt, Human
gaagggaaucaccacugucagacuucaaucca

SEQ ID NO: 151510 - RNA, 32 nt, Human
gaagggacacagauuguccuccccacaccccg

SEQ ID NO: 151511 - RNA, 32 nt, Human
gaagggacacagucuugagcuguccacaugca

SEQ ID NO: 151512 - RNA, 32 nt, Human
gaagggacacaguggggcaggcuuugggguug

SEQ ID NO: 151513 - RNA, 32 nt, Human
gaagggacagucaggugaccagcggggucgcc

SEQ ID NO: 151514 - RNA, 32 nt, Human
gaagggacaugggagcuacugcaggcugcagg

SEQ ID NO: 151515 - RNA, 32 nt, Human
gaagggacccuccucacuggauggugguggcu

SEQ ID NO: 151516 - RNA, 32 nt, Human
gaagggacgaaugggugcugggcaggacaaag

SEQ ID NO: 151517 - RNA, 32 nt, Human
gaagggacugaggaagugaggauaaagagcau

SEQ ID NO: 151518 - RNA, 32 nt, Human
gaagggacugcagucgugccucugacuguuau

SEQ ID NO: 151519 - RNA, 32 nt, Human
gaagggacugggccggcugccucccagcgaug

SEQ ID NO: 151520 - RNA, 32 nt, Human
gaagggacugggccucacgggguggggugggg

SEQ ID NO: 151521 - RNA, 32 nt, Human
gaagggacuucacgaaguguugcauggauguu

SEQ ID NO: 151522 - RNA, 32 nt, Human
gaagggacuuccucuuucucuccuucuucccu

SEQ ID NO: 151523 - RNA, 32 nt, Human
gaagggagaacuguaacacuuucucuuucgca

SEQ ID NO: 151524 - RNA, 32 nt, Human
gaagggagaagaggccgaagaggaaacaugaa

SEQ ID NO: 151525 - RNA, 32 nt, Human
gaagggagaaguggagagagaccgcuggcagg

SEQ ID NO: 151526 - RNA, 22 nt, Human
gaagggagacagugaggucaag

SEQ ID NO: 151527 - RNA, 32 nt, Human
gaagggagagaagguacccaaagggaaaaaga

SEQ ID NO: 151528 - RNA, 32 nt, Human
gaagggagagaagguacccaaagggaaaaagg

SEQ ID NO: 151529 - RNA, 32 nt, Human
gaagggagagagcaaacaaaggggucaggagg

SEQ ID NO: 151530 - RNA, 32 nt, Human
gaagggagagggaaggagggaggcaggcauag

SEQ ID NO: 151531 - RNA, 22 nt, Human
gaagggagagggaccuuagggg

SEQ ID NO: 151532 - RNA, 32 nt, Human
gaagggagaguuucgugcacugugguuaacag

SEQ ID NO: 151533 - RNA, 32 nt, Human
gaagggagcugugcccccaacccccaugugag

SEQ ID NO: 151534 - RNA, 32 nt, Human
gaagggaggacuccugagcucugccucuucca

SEQ ID NO: 151535 - RNA, 32 nt, Human
gaagggaggaggagcacaagauccucagcaac

SEQ ID NO: 151536 - RNA, 32 nt, Human
gaagggaggcaggcagcuuacuacuugcccuu

SEQ ID NO: 151537 - RNA, 32 nt, Human
gaagggaggccuuccuauggcuguacaauuac

SEQ ID NO: 151538 - RNA, 32 nt, Human
gaagggagggaagggaagucagcucugggagc

SEQ ID NO: 151539 - RNA, 32 nt, Human
gaagggagggagcaagggagggagggagcgcg

SEQ ID NO: 151540 - RNA, 32 nt, Human
gaagggagggagggagaaaggagaaguugguu

SEQ ID NO: 151541 - RNA, 32 nt, Human
gaagggagggcagagggggcuguggccgucag

SEQ ID NO: 151542 - RNA, 32 nt, Human
gaagggagggccugugcacaggcucagguguc

SEQ ID NO: 151543 - RNA, 32 nt, Human
gaagggagugccucucugggacccccuguguu

SEQ ID NO: 151544 - RNA, 20 nt, Human
gaagggaguucuggggccag

SEQ ID NO: 151545 - RNA, 23 nt, Human
gaagggauauacuguauuucaaa

SEQ ID NO: 151546 - RNA, 32 nt, Human
gaagggaucagauagcuccucagagaagggug

SEQ ID NO: 151547 - RNA, 32 nt, Human
gaagggaucauuaagacacagggagcaugaac

SEQ ID NO: 151548 - RNA, 32 nt, Human
gaagggaugagggagagaggagagaggagagg

SEQ ID NO: 151549 - RNA, 32 nt, Human
gaagggaugcacaucaucacaccaucagcuuc

SEQ ID NO: 151550 - RNA, 22 nt, Human
gaagggaugcugcaguuccaaa

SEQ ID NO: 151551 - RNA, 32 nt, Human
gaagggaugcuuauuuguuucauuucacuguu

SEQ ID NO: 151552 - RNA, 22 nt, Human
gaagggaugguguagguucaaa

SEQ ID NO: 151553 - RNA, 32 nt, Human
gaagggauguuacagaguagcugagaugacug

SEQ ID NO: 151554 - RNA, 32 nt, Human
gaagggauuguggcugugccuccaggguauua

SEQ ID NO: 151555 - RNA, 31 nt, Human
gaagggcaaguguccagagaauggcugggau

SEQ ID NO: 151556 - RNA, 22 nt, Human
gaagggcaaguuagucuuuacu

SEQ ID NO: 151557 - RNA, 32 nt, Human
gaagggcaaucagggcagacugccuggaggag

SEQ ID NO: 151558 - RNA, 32 nt, Human
gaagggcagaagacugguuuaggaggaaaagg

SEQ ID NO: 151559 - RNA, 32 nt, Human
gaagggcagagucccaggugucagcugguggg

SEQ ID NO: 151560 - RNA, 32 nt, Human
gaagggcagaugaacccagcaggcuuaggagg

SEQ ID NO: 151561 - RNA, 32 nt, Human
gaagggcagauggcacaugggcacaacagggc

SEQ ID NO: 151562 - RNA, 32 nt, Human
gaagggcaggaaacaguccucugaaggagugg

SEQ ID NO: 151563 - RNA, 22 nt, Human
gaagggcaggaaggagagccug

SEQ ID NO: 151564 - RNA, 32 nt, Human
gaagggcaggaugaagugggccaagguuuggg

SEQ ID NO: 151565 - RNA, 32 nt, Human
gaagggcaggcaggaaggggaggggcagugag

SEQ ID NO: 151566 - RNA, 32 nt, Human
gaagggcaggcgcgcugggccuuggggagcug

SEQ ID NO: 151567 - RNA, 32 nt, Human
gaagggcagggaggagguuguccuggagaggc

SEQ ID NO: 151568 - RNA, 31 nt, Human
gaagggcaguuacuggagacuguaucugcag

SEQ ID NO: 151569 - RNA, 22 nt, Human
gaagggcauccucugccaggug

SEQ ID NO: 151570 - RNA, 32 nt, Human
gaagggcaucgcugccccaggccucaagccgg

SEQ ID NO: 151571 - RNA, 20 nt, Human
gaagggcaugaugaacucug

SEQ ID NO: 151572 - RNA, 32 nt, Human
gaagggcauuggccauucuauuguggcaaggc

SEQ ID NO: 151573 - RNA, 32 nt, Human
gaagggccaaguaagaauauucagagaagcuc

SEQ ID NO: 151574 - RNA, 32 nt, Human
gaagggccaauggagaaaaugaauggacaaag

SEQ ID NO: 151575 - RNA, 32 nt, Human
gaagggccacagccuucauuucuaggagugcu

SEQ ID NO: 151576 - RNA, 32 nt, Human
gaagggccacugccucccaccuagagcuucuc

SEQ ID NO: 151577 - RNA, 32 nt, Human
gaagggccagcugggcauauucugagauuggc

SEQ ID NO: 151578 - RNA, 32 nt, Human
gaagggccagggccacuggggcuugggggcgg

SEQ ID NO: 151579 - RNA, 32 nt, Human
gaagggccagugaaccuuggacccagaugguu

SEQ ID NO: 151580 - RNA, 32 nt, Human
gaagggccagugcaacugggcgcuugggccac

SEQ ID NO: 151581 - RNA, 32 nt, Human
gaagggccaugagaaguacccucugccgcccc

SEQ ID NO: 151582 - RNA, 32 nt, Human
gaagggcccaggaaugaggagccuuggaaaga

SEQ ID NO: 151583 - RNA, 32 nt, Human
gaagggcccgagcuuaguuuccccaggacugg

SEQ ID NO: 151584 - RNA, 17 nt, Human
gaagggccgcugcaggu

SEQ ID NO: 151585 - RNA, 32 nt, Human
gaagggccggccucaccucuccccagcccccg

SEQ ID NO: 151586 - RNA, 31 nt, Human
gaagggccuacauuucucaauccagaggaag

SEQ ID NO: 151587 - RNA, 32 nt, Human
gaagggccugacguaccaccgcaucguagagg

SEQ ID NO: 151588 - RNA, 32 nt, Human
gaagggccugcucuuuccauuguggaucacag

SEQ ID NO: 151589 - RNA, 32 nt, Human
gaagggcgagacuguaaagcgaauccgggagc

SEQ ID NO: 151590 - RNA, 32 nt, Human
gaagggcgcacacaucagcagccucaccagcu

SEQ ID NO: 151591 - RNA, 20 nt, Human
gaagggcgcuccgggcucug

SEQ ID NO: 151592 - RNA, 32 nt, Human
gaagggcggucgccucugccacugucagggac

SEQ ID NO: 151593 - RNA, 22 nt, Human
gaagggcguggcaggggcucug

SEQ ID NO: 151594 - RNA, 32 nt, Human
gaagggcguuuuucagagcugcagggacaggg

SEQ ID NO: 151595 - RNA, 32 nt, Human
gaagggcuauagaucacauacguuaucaaaaa

SEQ ID NO: 151596 - RNA, 32 nt, Human
gaagggcuaucucuguuuaauucaccaucuug

SEQ ID NO: 151597 - RNA, 32 nt, Human
gaagggcucacugggaaucuucguuugucaug

SEQ ID NO: 151598 - RNA, 32 nt, Human
gaagggcucaggacccagcccagcucccgucc

SEQ ID NO: 151599 - RNA, 32 nt, Human
gaagggcucccagggccccaggggcggggaag

SEQ ID NO: 151600 - RNA, 32 nt, Human
gaagggcucugaagcaggaguuuucaccugcu

SEQ ID NO: 151601 - RNA, 32 nt, Human
gaagggcucugacuucagcccaccagcagcau

SEQ ID NO: 151602 - RNA, 32 nt, Human
gaagggcucugagcuguguccuccuucauuaa

SEQ ID NO: 151603 - RNA, 32 nt, Human
gaagggcugcucuuccccacaggcgcggggac

SEQ ID NO: 151604 - RNA, 32 nt, Human
gaagggcuggaguuugggggaaggggauggcu

SEQ ID NO: 151605 - RNA, 22 nt, Human
gaagggcuggcggcgagcucug

SEQ ID NO: 151606 - RNA, 32 nt, Human
gaagggcugggugagacacacagcuauccuag

SEQ ID NO: 151607 - RNA, 32 nt, Human
gaagggcugguuugaauuuuggugcuacuauc

SEQ ID NO: 151608 - RNA, 32 nt, Human
gaagggcuugcaaaccaagaucaagguguuuc

SEQ ID NO: 151609 - RNA, 32 nt, Human
gaagggcuuggggacuuguggaucauuccuuc

SEQ ID NO: 151610 - RNA, 19 nt, Human
gaaggggaaacccaggaau

SEQ ID NO: 151611 - RNA, 19 nt, Human
gaaggggaaauggaggaau

SEQ ID NO: 151612 - RNA, 20 nt, Human
gaaggggaaauucucuucaa

SEQ ID NO: 151613 - RNA, 32 nt, Human
gaaggggaacagaucaggcaaaggaguuagau

SEQ ID NO: 151614 - RNA, 18 nt, Human
gaaggggaagccaggaac

SEQ ID NO: 151615 - RNA, 32 nt, Human
gaaggggaagccucugggcugagcauguaggc

SEQ ID NO: 151616 - RNA, 32 nt, Human
gaaggggacagccccuuugcaguggcucggcg

SEQ ID NO: 151617 - RNA, 32 nt, Human
gaaggggacagcuucccgcugauggagaucag

SEQ ID NO: 151618 - RNA, 32 nt, Human
gaaggggagacagaggaugagcggcgucugug

SEQ ID NO: 151619 - RNA, 32 nt, Human
gaaggggagagggagagagggggagagaagga

SEQ ID NO: 151620 - RNA, 32 nt, Human
gaaggggagcagacgaggcuggaagcaugggg

SEQ ID NO: 151621 - RNA, 32 nt, Human
gaaggggagccccacgccuggguuuuccacuc

SEQ ID NO: 151622 - RNA, 32 nt, Human
gaaggggagcggggaggggcagaggaguuccc

SEQ ID NO: 151623 - RNA, 32 nt, Human
gaaggggaggccgaggugggaggaucauugga

SEQ ID NO: 151624 - RNA, 32 nt, Human
gaaggggaguggaggaagcacgggacuggagg

SEQ ID NO: 151625 - RNA, 32 nt, Human
gaaggggaugagaagagaggcagagcuggagc

SEQ ID NO: 151626 - RNA, 32 nt, Human
gaaggggcagggauuucuccuucuucuugguc

SEQ ID NO: 151627 - RNA, 32 nt, Human
gaaggggcagugugguugguccuggcuaaagg

SEQ ID NO: 151628 - RNA, 32 nt, Human
gaaggggccaagcugcagacacacacagucau

SEQ ID NO: 151629 - RNA, 32 nt, Human
gaaggggccacagccuggguggaaggcagacc

SEQ ID NO: 151630 - RNA, 18 nt, Human
gaaggggcccagaacacc

SEQ ID NO: 151631 - RNA, 32 nt, Human
gaaggggcccagggaagcagagggcccaagac

SEQ ID NO: 151632 - RNA, 32 nt, Human
gaaggggcccgggaacaccucucaccugaacc

SEQ ID NO: 151633 - RNA, 19 nt, Human
gaaggggcccuuccugcuc

SEQ ID NO: 151634 - RNA, 32 nt, Human
gaaggggccuuugguggccacccuggugagga

SEQ ID NO: 151635 - RNA, 32 nt, Human
gaaggggcgccucacacccucuucccacgacu

SEQ ID NO: 151636 - RNA, 32 nt, Human
gaaggggcggccgccuccaggacugaccaggg

SEQ ID NO: 151637 - RNA, 32 nt, Human
gaaggggcucauucaguuccaaaaagagaugg

SEQ ID NO: 151638 - RNA, 32 nt, Human
gaaggggcucccccuggccuugcuggcacccu

SEQ ID NO: 151639 - RNA, 24 nt, Human
gaaggggcugcaccagcccugaga

SEQ ID NO: 151640 - RNA, 32 nt, Human
gaaggggcuggccucugcugagcugcuuccca

SEQ ID NO: 151641 - RNA, 32 nt, Human
gaagggggaagaggagccuggacuagacuccc

SEQ ID NO: 151642 - RNA, 32 nt, Human
gaagggggaaguggcagggcagaggaagcagg

SEQ ID NO: 151643 - RNA, 32 nt, Human
gaagggggaggaggaggaggaucaugaaggcc

SEQ ID NO: 151644 - RNA, 32 nt, Human
gaagggggauggccucaccccuucugcagacg

SEQ ID NO: 151645 - RNA, 32 nt, Human
gaagggggccgccacccuccccuaugcuggua

SEQ ID NO: 151646 - RNA, 32 nt, Human
gaagggggccuggagaggggaggcaggggccc

SEQ ID NO: 151647 - RNA, 32 nt, Human
gaagggggcuccgggccagggugacaggaggc

SEQ ID NO: 151648 - RNA, 32 nt, Human
gaagggggcugggagugguggcaguggcuccc

SEQ ID NO: 151649 - RNA, 32 nt, Human
gaagggggcuuccugaccgagacauggauuua

SEQ ID NO: 151650 - RNA, 32 nt, Human
gaaggggguaccuuaagagacacuccaaaccu

SEQ ID NO: 151651 - RNA, 32 nt, Human
gaagggggugagaggaaggaaagaaaaaggag

SEQ ID NO: 151652 - RNA, 32 nt, Human
gaagggggugccucucggaggagccugugucc

SEQ ID NO: 151653 - RNA, 32 nt, Human
gaagggggugggcuaugaaagccggucucaaa

SEQ ID NO: 151654 - RNA, 32 nt, Human
gaagggguagaggguauuaucaaggaggagga

SEQ ID NO: 151655 - RNA, 32 nt, Human
gaaggggugaaggagcugucugccauuugacu

SEQ ID NO: 151656 - RNA, 32 nt, Human
gaaggggugggcaguggggcaggaggggcugg

SEQ ID NO: 151657 - RNA, 32 nt, Human
gaagggguuuugccgccauguugcacaggcug

SEQ ID NO: 151658 - RNA, 32 nt, Human
gaaggguagauggagccugggucagcacccga

SEQ ID NO: 151659 - RNA, 32 nt, Human
gaaggguagcugggcggggcucgaggcuggug

SEQ ID NO: 151660 - RNA, 32 nt, Human
gaaggguagggugggaaggugagcaaagggag

SEQ ID NO: 151661 - RNA, 20 nt, Human
gaaggguauccggaacucug

SEQ ID NO: 151662 - RNA, 24 nt, Human
gaaggguauucacuggggauucug

SEQ ID NO: 151663 - RNA, 32 nt, Human
gaaggguauuugggggagggcaccaguguccc

SEQ ID NO: 151664 - RNA, 28 nt, Human
gaagggucaagugcugucuaccaucaac

SEQ ID NO: 151665 - RNA, 32 nt, Human
gaagggucaccuaacccaggaguccacagacu

SEQ ID NO: 151666 - RNA, 32 nt, Human
gaagggucacugcaccuccacccagagccucu

SEQ ID NO: 151667 - RNA, 32 nt, Human
gaagggucgggccagcccagcccagggccuga

SEQ ID NO: 151668 - RNA, 32 nt, Human
gaagggucucccaggcggcguaguagggcuuc

SEQ ID NO: 151669 - RNA, 32 nt, Human
gaagggucucuagaggguagaccuaagaguaa

SEQ ID NO: 151670 - RNA, 32 nt, Human
gaagggugagaggcagugcuguggaaggggcc

SEQ ID NO: 151671 - RNA, 32 nt, Human
gaagggugagccaggccagugcuuccccagcc

SEQ ID NO: 151672 - RNA, 32 nt, Human
gaagggugaggcgggaggaucgcuugaaccug

SEQ ID NO: 151673 - RNA, 32 nt, Human
gaagggugagugaaugagaaacaggugagggg

SEQ ID NO: 151674 - RNA, 32 nt, Human
gaagggugaguguggagcuugccccuccggcu

SEQ ID NO: 151675 - RNA, 32 nt, Human
gaaggguggcauucugcugaccacagcacucc

SEQ ID NO: 151676 - RNA, 32 nt, Human
gaaggguggcuggcuggcucccuggcaucagu

SEQ ID NO: 151677 - RNA, 32 nt, Human
gaaggguggcuguccucaaauccuggucuuug

SEQ ID NO: 151678 - RNA, 32 nt, Human
gaaggguggggaggggaugggcuggagcuccg

SEQ ID NO: 151679 - RNA, 32 nt, Human
gaagggugucucggaagaguugcaucaugaga

SEQ ID NO: 151680 - RNA, 32 nt, Human
gaaggguuccaggaagcugggaagggagaugu

SEQ ID NO: 151681 - RNA, 32 nt, Human
gaaggguucuggcugccccaaccugcugaagg

SEQ ID NO: 151682 - RNA, 32 nt, Human
gaagguaaaguagagaaaagagacagaaacuc

SEQ ID NO: 151683 - RNA, 32 nt, Human
gaagguaaagugagagguuuaggucaguguuu

SEQ ID NO: 151684 - RNA, 32 nt, Human
gaagguaacagcuucagcuucagaaucggagc

SEQ ID NO: 151685 - RNA, 32 nt, Human
gaagguaagaggcagacaggccaccaggaggu

SEQ ID NO: 151686 - RNA, 32 nt, Human
gaagguaauccggaguggcaauggaguggcug

SEQ ID NO: 151687 - RNA, 32 nt, Human
gaagguaauuucaccuggucucagggaaccac

SEQ ID NO: 151688 - RNA, 32 nt, Human
gaagguacuggcagcgagugugguggaugggc

SEQ ID NO: 151689 - RNA, 32 nt, Human
gaagguagaggaggagaaagaauccaaagauu

SEQ ID NO: 151690 - RNA, 18 nt, Human
gaagguagaugcuucuga

SEQ ID NO: 151691 - RNA, 32 nt, Human
gaagguaggaagagacaaacgccuaagugcag

SEQ ID NO: 151692 - RNA, 32 nt, Human
gaagguaggggagaucaaagagggcuggaucc

SEQ ID NO: 151693 - RNA, 32 nt, Human
gaagguaggggaugggggugcccacacugagu

SEQ ID NO: 151694 - RNA, 32 nt, Human
gaagguauacuggauccagagagggaaggacu

SEQ ID NO: 151695 - RNA, 18 nt, Human
gaagguauaugcaucuuc

SEQ ID NO: 151696 - RNA, 22 nt, Human
gaagguaucacuugaccuggaa

SEQ ID NO: 151697 - RNA, 32 nt, Human
gaagguauuuucugcugaccugauagaucaga

SEQ ID NO: 151698 - RNA, 22 nt, Human
gaaggucaaagagguuaucucu

SEQ ID NO: 151699 - RNA, 22 nt, Human
gaaggucaaggucagcaucucc

SEQ ID NO: 151700 - RNA, 32 nt, Human
gaaggucacaacccuucucuguuggucugccu

SEQ ID NO: 151701 - RNA, 31 nt, Human
gaaggucacagcacggucacagcagaggugg

SEQ ID NO: 151702 - RNA, 32 nt, Human
gaaggucaccuggccugguugugugcacaaug

SEQ ID NO: 151703 - RNA, 32 nt, Human
gaaggucacucaggaacacccucccugccugu

SEQ ID NO: 151704 - RNA, 32 nt, Human
gaaggucagacuccaugucugccuuggccuca

SEQ ID NO: 151705 - RNA, 32 nt, Human
gaaggucagagcagcaagauggccaguaagac

SEQ ID NO: 151706 - RNA, 32 nt, Human
gaaggucagcacuccugggucuucauaugcca

SEQ ID NO: 151707 - RNA, 32 nt, Human
gaaggucaggaggcccgaguugcuggcgguga

SEQ ID NO: 151708 - RNA, 32 nt, Human
gaaggucauacagcuaagaagagaauagagca

SEQ ID NO: 151709 - RNA, 32 nt, Human
gaaggucauguggcaucagggaaagggcaugg

SEQ ID NO: 151710 - RNA, 32 nt, Human
gaagguccaaguaggacacagagcagggcuuu

SEQ ID NO: 151711 - RNA, 32 nt, Human
gaagguccaucccggcagacgccaguggcuuu

SEQ ID NO: 151712 - RNA, 32 nt, Human
gaagguccccgugggguggagcauggugcccc

SEQ ID NO: 151713 - RNA, 32 nt, Human
gaagguccccuucaaguguuguuucuccaagu

SEQ ID NO: 151714 - RNA, 32 nt, Human
gaaggucgcagcuuugggcagcuuugagaagc

SEQ ID NO: 151715 - RNA, 32 nt, Human
gaaggucggccgccucagcuucucuccaugga

SEQ ID NO: 151716 - RNA, 32 nt, Human
gaaggucggggucagacacagacagagucaau

SEQ ID NO: 151717 - RNA, 32 nt, Human
gaaggucguuagcugcuacaccguguucauca

SEQ ID NO: 151718 - RNA, 32 nt, Human
gaaggucuacagcuucaguccugaagccggcg

SEQ ID NO: 151719 - RNA, 32 nt, Human
gaaggucuaccaggaugagggugagggcaaag

SEQ ID NO: 151720 - RNA, 32 nt, Human
gaaggucuccucccaucuccaaacuuggugcc

SEQ ID NO: 151721 - RNA, 32 nt, Human
gaaggucuccuggaagcuucugggucucacug

SEQ ID NO: 151722 - RNA, 32 nt, Human
gaaggucugcaacuucacuccuggggccagca

SEQ ID NO: 151723 - RNA, 32 nt, Human
gaaggucugcagcuucacucaggaagccagug

SEQ ID NO: 151724 - RNA, 32 nt, Human
gaaggucuggggacucacacaggagcugggca

SEQ ID NO: 151725 - RNA, 32 nt, Human
gaaggucugggucucaggacagugauguuggc

SEQ ID NO: 151726 - RNA, 32 nt, Human
gaaggucugugagcccucucccuaccaggcag

SEQ ID NO: 151727 - RNA, 32 nt, Human
gaaggucugugcaagcuggcuccugcugggga

SEQ ID NO: 151728 - RNA, 32 nt, Human
gaaggucugugcugggagugaagaguggcuua

SEQ ID NO: 151729 - RNA, 32 nt, Human
gaaggucuugguggcccuggaucuuguggcug

SEQ ID NO: 151730 - RNA, 32 nt, Human
gaaggugaacagcuccuggcugcugccgagag

SEQ ID NO: 151731 - RNA, 32 nt, Human
gaaggugaagauggcugccucugccuuugcug

SEQ ID NO: 151732 - RNA, 32 nt, Human
gaaggugaccucugccccagauagguggugcc

SEQ ID NO: 151733 - RNA, 32 nt, Human
gaaggugacgcacuccagcuuuaugaagucag

SEQ ID NO: 151734 - RNA, 32 nt, Human
gaaggugagauaagcccugagucucagcuacc

SEQ ID NO: 151735 - RNA, 32 nt, Human
gaaggugagcaaggugaagaggugcuuuauug

SEQ ID NO: 151736 - RNA, 32 nt, Human
gaaggugaggcaggccagagucuguguucugu

SEQ ID NO: 151737 - RNA, 32 nt, Human
gaaggugaggggaauggauuggacuccggugg

SEQ ID NO: 151738 - RNA, 32 nt, Human
gaaggugauugguuuucuuuacagacuccuug

SEQ ID NO: 151739 - RNA, 32 nt, Human
gaaggugcaagggggcaaguacccccgcucca

SEQ ID NO: 151740 - RNA, 32 nt, Human
gaaggugcagagcguggaagaagauugugagc

SEQ ID NO: 151741 - RNA, 32 nt, Human
gaaggugcagagcuuccggaagccacaggaac

SEQ ID NO: 151742 - RNA, 32 nt, Human
gaaggugcaguugggaagaaaguuucugaggc

SEQ ID NO: 151743 - RNA, 32 nt, Human
gaaggugcgaggcggauggagcggguggucgu

SEQ ID NO: 151744 - RNA, 19 nt, Human
gaaggugcuacaucccucu

SEQ ID NO: 151745 - RNA, 32 nt, Human
gaagguggacaagcugucuggauggcaggucu

SEQ ID NO: 151746 - RNA, 32 nt, Human
gaagguggaccguagaggggaggaaucacgug

SEQ ID NO: 151747 - RNA, 32 nt, Human
gaagguggagccagacguacagggcggaacau

SEQ ID NO: 151748 - RNA, 32 nt, Human
gaagguggaggaagacuuaaaggcagacgaac

SEQ ID NO: 151749 - RNA, 32 nt, Human
gaagguggaggacagacacaggagaaauaaaa

SEQ ID NO: 151750 - RNA, 32 nt, Human
gaagguggaggcaccaggcucaaaagaggaaa

SEQ ID NO: 151751 - RNA, 32 nt, Human
gaagguggagugagggcuggggucgggacagg

SEQ ID NO: 151752 - RNA, 21 nt, Human
gaagguggauaagacugcaga

SEQ ID NO: 151753 - RNA, 32 nt, Human
gaagguggauggccccagcacagcuugaccug

SEQ ID NO: 151754 - RNA, 32 nt, Human
gaagguggccagaaaccgucccagaaacugcc

SEQ ID NO: 151755 - RNA, 32 nt, Human
gaagguggccagagccucacugagccgaaccg

SEQ ID NO: 151756 - RNA, 32 nt, Human
gaagguggcccaggaccacguggagccucgca

SEQ ID NO: 151757 - RNA, 32 nt, Human
gaaggugggaagcagaugacugaggaagggau

SEQ ID NO: 151758 - RNA, 32 nt, Human
gaaggugggagaggggacccggacgcgaggug

SEQ ID NO: 151759 - RNA, 32 nt, Human
gaaggugggagggagacggugggguaagggcu

SEQ ID NO: 151760 - RNA, 32 nt, Human
gaaggugggcagggcgggggaggcagggacau

SEQ ID NO: 151761 - RNA, 32 nt, Human
gaaggugggcugggcacuuggaccuuugggug

SEQ ID NO: 151762 - RNA, 20 nt, Human
gaagguggggcccuugggaa

SEQ ID NO: 151763 - RNA, 32 nt, Human
gaagguggggucuuggauaucaccuaaguuua

SEQ ID NO: 151764 - RNA, 32 nt, Human
gaagguggguucugcgugucccuucccagcgc

SEQ ID NO: 151765 - RNA, 32 nt, Human
gaaggugguugaggacguucucugauuagaug

SEQ ID NO: 151766 - RNA, 32 nt, Human
gaagguguacagccacucucccgggucuucag

SEQ ID NO: 151767 - RNA, 32 nt, Human
gaagguguauguuggggagaacugaaagggaa

SEQ ID NO: 151768 - RNA, 32 nt, Human
gaagguguccaagagggucagugcgguggagg

SEQ ID NO: 151769 - RNA, 32 nt, Human
gaagguguccccaaauguuuauguauuagaaa

SEQ ID NO: 151770 - RNA, 32 nt, Human
gaaggugucuuggcaucuucugccuuugcuac

SEQ ID NO: 151771 - RNA, 32 nt, Human
gaaggugugagaagcaaagcccauggccacgu

SEQ ID NO: 151772 - RNA, 32 nt, Human
gaaggugugcaggagagaagaggccccggcau

SEQ ID NO: 151773 - RNA, 32 nt, Human
gaaggugugcauauauguugaaugacauuuua

SEQ ID NO: 151774 - RNA, 19 nt, Human
gaagguguuuaugggggga

SEQ ID NO: 151775 - RNA, 32 nt, Human
gaagguuaaaguugccagcuugagugaugugc

SEQ ID NO: 151776 - RNA, 27 nt, Human
gaagguuaaauuggguaacauguuuuu

SEQ ID NO: 151777 - RNA, 23 nt, Human
gaagguuaaguaccacauucucc

SEQ ID NO: 151778 - RNA, 32 nt, Human
gaagguuagagaaaaagagauugcauauuuuc

SEQ ID NO: 151779 - RNA, 32 nt, Human
gaagguuagggaggcggagagggaccgcgccc

SEQ ID NO: 151780 - RNA, 32 nt, Human
gaagguucagaaccucugcagggaagggggaa

SEQ ID NO: 151781 - RNA, 26 nt, Human
gaagguuccauaagcuacauguuucc

SEQ ID NO: 151782 - RNA, 32 nt, Human
gaagguucguucuaaauggcugcgugaaaaac

SEQ ID NO: 151783 - RNA, 32 nt, Human
gaagguucucucagcuuguucuugccuaaggc

SEQ ID NO: 151784 - RNA, 32 nt, Human
gaagguucugaccagcuucugcagaggauaaa

SEQ ID NO: 151785 - RNA, 32 nt, Human
gaagguucuggaaagcuccaggaaguuuagcc

SEQ ID NO: 151786 - RNA, 32 nt, Human
gaagguucuggacacccucaugugccagcaag

SEQ ID NO: 151787 - RNA, 32 nt, Human
gaagguucuggacacccucaugugccagggau

SEQ ID NO: 151788 - RNA, 32 nt, Human
gaagguucuggcccaucaauauucauuucauu

SEQ ID NO: 151789 - RNA, 32 nt, Human
gaagguugaggcugaagagugaggacucuuca

SEQ ID NO: 151790 - RNA, 32 nt, Human
gaagguugcuccaugauggauuuggaaacuua

SEQ ID NO: 151791 - RNA, 32 nt, Human
gaagguugugugcaggaacgggcugcugguga

SEQ ID NO: 151792 - RNA, 32 nt, Human
gaagguuugacagauguccgccuguugauuca

SEQ ID NO: 151793 - RNA, 32 nt, Human
gaagguuuuccaaagggcuuggcuccagagcc

SEQ ID NO: 151794 - RNA, 32 nt, Human
gaagguuuuuggcuguuucucaucaucucaug

SEQ ID NO: 151795 - RNA, 22 nt, Human
gaaguaaaaugaaaacugaaaa

SEQ ID NO: 151796 - RNA, 32 nt, Human
gaaguaaacugaacuggggcugggcaacagga

SEQ ID NO: 151797 - RNA, 32 nt, Human
gaaguaaacuuuuuguucugguccuuuuuggu

SEQ ID NO: 151798 - RNA, 32 nt, Human
gaaguaaaucuucucccuaccccgucugccag

SEQ ID NO: 151799 - RNA, 32 nt, Human
gaaguaaaugggguugggggaggggacauuuc

SEQ ID NO: 151800 - RNA, 32 nt, Human
gaaguaaaugucccucuccagagacagccccu

SEQ ID NO: 151801 - RNA, 32 nt, Human
gaaguaaauguucugaguggagcuacuaggau

SEQ ID NO: 151802 - RNA, 32 nt, Human
gaaguaaauguucugaguggaguuacuagaau

SEQ ID NO: 151803 - RNA, 32 nt, Human
gaaguaacaagcauaucuuuacacugggccuu

SEQ ID NO: 151804 - RNA, 32 nt, Human
gaaguaacagcauguguuuauccugauggaaa

SEQ ID NO: 151805 - RNA, 32 nt, Human
gaaguaacccaggcuggcgauccggagggccg

SEQ ID NO: 151806 - RNA, 32 nt, Human
gaaguaagaacaagaagauggggaagaggaag

SEQ ID NO: 151807 - RNA, 32 nt, Human
gaaguaagaagaggagccucagaagaaaacaa

SEQ ID NO: 151808 - RNA, 32 nt, Human
gaaguaagaugcauuucacaaagcucccaguu

SEQ ID NO: 151809 - RNA, 22 nt, Human
gaaguaagauguaaauugaaga

SEQ ID NO: 151810 - RNA, 32 nt, Human
gaaguaaggaagccagacacagcugcugccca

SEQ ID NO: 151811 - RNA, 32 nt, Human
gaaguaagggaagaggagaggaaggggagccg

SEQ ID NO: 151812 - RNA, 32 nt, Human
gaaguaaucuuucugccucagucuccugagua

SEQ ID NO: 151813 - RNA, 22 nt, Human
gaaguaauguuugaacuggaag

SEQ ID NO: 151814 - RNA, 32 nt, Human
gaaguaauucagcauuaaaauaaauguaauua

SEQ ID NO: 151815 - RNA, 32 nt, Human
gaaguacaaauuacccaaaucucuccacccuu

SEQ ID NO: 151816 - RNA, 32 nt, Human
gaaguacagagggagguuggggugggucagag

SEQ ID NO: 151817 - RNA, 32 nt, Human
gaaguaccaaauaguauuauugaagucuaaca

SEQ ID NO: 151818 - RNA, 32 nt, Human
gaaguaccauggcuucugaccuagagaguagc

SEQ ID NO: 151819 - RNA, 32 nt, Human
gaaguaccgcuggcgccgccuccgggaccccc

SEQ ID NO: 151820 - RNA, 32 nt, Human
gaaguaccguacagaguggauuugcagggcag

SEQ ID NO: 151821 - RNA, 32 nt, Human
gaaguaccuagcacagugucuucaacauagaa

SEQ ID NO: 151822 - RNA, 32 nt, Human
gaaguaccuaguuucauuucuguuuucaggac

SEQ ID NO: 151823 - RNA, 32 nt, Human
gaaguaccugaggaguggaggagugagaaaga

SEQ ID NO: 151824 - RNA, 32 nt, Human
gaaguaccuuccugccaggggaagccaaggcu

SEQ ID NO: 151825 - RNA, 32 nt, Human
gaaguacuaccugacuugagucaaugcaccca

SEQ ID NO: 151826 - RNA, 32 nt, Human
gaaguacuucagaaagccuagagagaagagag

SEQ ID NO: 151827 - RNA, 21 nt, Human
gaaguagaagcuguccggggg

SEQ ID NO: 151828 - RNA, 32 nt, Human
gaaguagaaugagaggucuguugggaauaaag

SEQ ID NO: 151829 - RNA, 32 nt, Human
gaaguagagacagggagacagggucucacugu

SEQ ID NO: 151830 - RNA, 32 nt, Human
gaaguagcaggcuugcaaucuucagguaaaga

SEQ ID NO: 151831 - RNA, 32 nt, Human
gaaguagcagugagccgagaucgcgccacugc

SEQ ID NO: 151832 - RNA, 32 nt, Human
gaaguagccugaggcccucaccagaagcagac

SEQ ID NO: 151833 - RNA, 23 nt, Human
gaaguagcuaaugaaauugaaaa

SEQ ID NO: 151834 - RNA, 32 nt, Human
gaaguagcuagugcagacaccgucaucccacc

SEQ ID NO: 151835 - RNA, 32 nt, Human
gaaguagcuggacaggcccugccccucaccag

SEQ ID NO: 151836 - RNA, 32 nt, Human
gaaguagcugucagaugucacauaauuacuuu

SEQ ID NO: 151837 - RNA, 32 nt, Human
gaaguagcugugggaaaagaugagcuaugaua

SEQ ID NO: 151838 - RNA, 32 nt, Human
gaaguagcuucucagugaacaucagauaguag

SEQ ID NO: 151839 - RNA, 32 nt, Human
gaaguaggaagaaaguauuucaaggagaguga

SEQ ID NO: 151840 - RNA, 32 nt, Human
gaaguaggcaaagagaaaaggacccaagauag

SEQ ID NO: 151841 - RNA, 32 nt, Human
gaaguagggaacauaguggcucacacagaguu

SEQ ID NO: 151842 - RNA, 32 nt, Human
gaaguagggaagcugagugugucgcucccugg

SEQ ID NO: 151843 - RNA, 32 nt, Human
gaaguagggacuggggcugagagcagagagga

SEQ ID NO: 151844 - RNA, 32 nt, Human
gaaguagggaggaggagguugcagugagcuga

SEQ ID NO: 151845 - RNA, 32 nt, Human
gaaguagggagggggaagcaggagaaugagac

SEQ ID NO: 151846 - RNA, 32 nt, Human
gaaguaguagccucuggauagaacuguguuua

SEQ ID NO: 151847 - RNA, 26 nt, Human
gaaguaguggcggaugagacuggaaa

SEQ ID NO: 151848 - RNA, 19 nt, Human
gaaguaguucugcuuuuga

SEQ ID NO: 151849 - RNA, 32 nt, Human
gaaguauaaccagaagcacaaggaaaugagcc

SEQ ID NO: 151850 - RNA, 24 nt, Human
gaaguauaugugaugagcagaaga

SEQ ID NO: 151851 - RNA, 32 nt, Human
gaaguaugaacccauugguuagagugcagugg

SEQ ID NO: 151852 - RNA, 32 nt, Human
gaaguaugcuuuggugagucaauuaguauggg

SEQ ID NO: 151853 - RNA, 32 nt, Human
gaaguauggaaagaacaagugagugaacuuaa

SEQ ID NO: 151854 - RNA, 32 nt, Human
gaaguauggccaaaacccuagcgucacuugua

SEQ ID NO: 151855 - RNA, 32 nt, Human
gaaguaugggccugagaugagugguccaagac

SEQ ID NO: 151856 - RNA, 32 nt, Human
gaaguaugugccacucgauuuguauuucugau

SEQ ID NO: 151857 - RNA, 32 nt, Human
gaaguauucccaccagaguuguuuccaacuuu

SEQ ID NO: 151858 - RNA, 32 nt, Human
gaaguauuuacugcuaaacuauauuacuuacu

SEQ ID NO: 151859 - RNA, 25 nt, Human
gaaguauuugggugagaacugagag

SEQ ID NO: 151860 - RNA, 24 nt, Human
gaagucaaaagauggaacugagaa

SEQ ID NO: 151861 - RNA, 32 nt, Human
gaagucaaaauacuuuacucuuucacuaacuu

SEQ ID NO: 151862 - RNA, 32 nt, Human
gaagucaaaauuuagaaggcuccucugaaggg

SEQ ID NO: 151863 - RNA, 32 nt, Human
gaagucaagaauugggguuuggaaaccuucgc

SEQ ID NO: 151864 - RNA, 32 nt, Human
gaagucaagaguuugagaucagccuggagaac

SEQ ID NO: 151865 - RNA, 32 nt, Human
gaagucaagggucccuacucagccucuacuga

SEQ ID NO: 151866 - RNA, 32 nt, Human
gaagucacaagccaagugagacacucauccaa

SEQ ID NO: 151867 - RNA, 32 nt, Human
gaagucaccaauaugaaguuauucggcuucgg

SEQ ID NO: 151868 - RNA, 32 nt, Human
gaagucaccuuucugggcuuucuccuggagac

SEQ ID NO: 151869 - RNA, 32 nt, Human
gaagucacuguacuccacagagccucacugca

SEQ ID NO: 151870 - RNA, 32 nt, Human
gaagucacuguaucaauaugccuguguuauaa

SEQ ID NO: 151871 - RNA, 32 nt, Human
gaagucacuguugcaauaaaagcacccguagu

SEQ ID NO: 151872 - RNA, 32 nt, Human
gaagucacuucuacucagacuugaccugcguc

SEQ ID NO: 151873 - RNA, 32 nt, Human
gaagucagaaguuugagaccagccuggcaaac

SEQ ID NO: 151874 - RNA, 32 nt, Human
gaagucagaaguuugagaccagccuggccaac

SEQ ID NO: 151875 - RNA, 32 nt, Human
gaagucagagagguggggugagggugagcuua

SEQ ID NO: 151876 - RNA, 32 nt, Human
gaagucagagggcucucagccuucauccagcc

SEQ ID NO: 151877 - RNA, 32 nt, Human
gaagucagaggugggggcguuagugagcuauu

SEQ ID NO: 151878 - RNA, 32 nt, Human
gaagucagagucggccacuaaccagaugcaaa

SEQ ID NO: 151879 - RNA, 32 nt, Human
gaagucagcaaguccugugcucaggaugcuuc

SEQ ID NO: 151880 - RNA, 32 nt, Human
gaagucagccucuuggcuccucaggccaccau

SEQ ID NO: 151881 - RNA, 32 nt, Human
gaagucagcgagaucacgaaucugccagaagg

SEQ ID NO: 151882 - RNA, 32 nt, Human
gaagucaggaguuugagaccagccuggccaac

SEQ ID NO: 151883 - RNA, 32 nt, Human
gaagucaggaguuugagaccagccuggcugac

SEQ ID NO: 151884 - RNA, 32 nt, Human
gaagucaggaguuugagaccagccugggcaac

SEQ ID NO: 151885 - RNA, 32 nt, Human
gaagucagggauuugagaccagccuggccaac

SEQ ID NO: 151886 - RNA, 32 nt, Human
gaagucagguguuugagaccagccuggccaac

SEQ ID NO: 151887 - RNA, 32 nt, Human
gaagucaguaguuugagaccagccuggccaac

SEQ ID NO: 151888 - RNA, 32 nt, Human
gaagucaguuacuccagccaggcagcucuccc

SEQ ID NO: 151889 - RNA, 32 nt, Human
gaagucaguuuaauugccagagagaaggaugc

SEQ ID NO: 151890 - RNA, 32 nt, Human
gaagucaugaggaugcaugaauggguaagaaa

SEQ ID NO: 151891 - RNA, 32 nt, Human
gaagucaugcagguacugagcacagguggccc

SEQ ID NO: 151892 - RNA, 32 nt, Human
gaagucaugccacugcacucaaaccuggcgga

SEQ ID NO: 151893 - RNA, 32 nt, Human
gaagucauuuccucuucaagauuccauaaaac

SEQ ID NO: 151894 - RNA, 32 nt, Human
gaaguccaaacucuagccagauuucccugguc

SEQ ID NO: 151895 - RNA, 32 nt, Human
gaaguccaagaguucgagaccggccugcgaga

SEQ ID NO: 151896 - RNA, 23 nt, Human
gaaguccaaguguggugcggcuu

SEQ ID NO: 151897 - RNA, 32 nt, Human
gaaguccacacguguucuuuacagaguuuggu

SEQ ID NO: 151898 - RNA, 32 nt, Human
gaaguccaggagaacuauaaguugucucugga

SEQ ID NO: 151899 - RNA, 32 nt, Human
gaaguccaggaggagaagggcucauugcaggc

SEQ ID NO: 151900 - RNA, 32 nt, Human
gaaguccagugucugucaugccccugaguucu

SEQ ID NO: 151901 - RNA, 32 nt, Human
gaagucccaggcugggggugucaauggacgug

SEQ ID NO: 151902 - RNA, 32 nt, Human
gaaguccccagcccaccgugcucaagaguagc

SEQ ID NO: 151903 - RNA, 32 nt, Human
gaaguccccaucuaaauugcaggauggcgaaa

SEQ ID NO: 151904 - RNA, 32 nt, Human
gaagucccgccacugcacuccagccugggcaa

SEQ ID NO: 151905 - RNA, 32 nt, Human
gaagucccgggugaagccucugguuuuaccaa

SEQ ID NO: 151906 - RNA, 32 nt, Human
gaagucccgucugcccuggucacuuaaaggcc

SEQ ID NO: 151907 - RNA, 21 nt, Human
gaagucccuaaccccuuaacc

SEQ ID NO: 151908 - RNA, 32 nt, Human
gaagucccugcucucugugggucuaugaguca

SEQ ID NO: 151909 - RNA, 32 nt, Human
gaagucccuuggggaggguugcagagagagug

SEQ ID NO: 151910 - RNA, 32 nt, Human
gaaguccggaguuugagaccagccuggccaac

SEQ ID NO: 151911 - RNA, 32 nt, Human
gaaguccucuuaguggagauguuuucauuuuc

SEQ ID NO: 151912 - RNA, 32 nt, Human
gaaguccugcagcugauguugcccucaccgug

SEQ ID NO: 151913 - RNA, 32 nt, Human
gaaguccuguucucuucuauggcagaauguug

SEQ ID NO: 151914 - RNA, 32 nt, Human
gaaguccuuucuuccaggcacuguccagugau

SEQ ID NO: 151915 - RNA, 32 nt, Human
gaagucgcagcuucacuuacaccagcugcucu

SEQ ID NO: 151916 - RNA, 32 nt, Human
gaagucgcccuaggaacaccagauuuccuggu

SEQ ID NO: 151917 - RNA, 32 nt, Human
gaagucggaccggaaguggaagugguccccga

SEQ ID NO: 151918 - RNA, 32 nt, Human
gaagucggccuggaguugggguugcagggacg

SEQ ID NO: 151919 - RNA, 32 nt, Human
gaagucggcuuggggagccagagggagcggag

SEQ ID NO: 151920 - RNA, 32 nt, Human
gaagucgggcacagagguagcagacagaugug

SEQ ID NO: 151921 - RNA, 32 nt, Human
gaagucggggacauaagaugauuuucacaucc

SEQ ID NO: 151922 - RNA, 32 nt, Human
gaagucuaguuuuauaggcagcuguccuguga

SEQ ID NO: 151923 - RNA, 32 nt, Human
gaagucucaaagaaauauaccacgugagggga

SEQ ID NO: 151924 - RNA, 32 nt, Human
gaagucucaaagcaucacuuccaccauacucu

SEQ ID NO: 151925 - RNA, 32 nt, Human
gaagucucacuauuccacugugccucagaagc

SEQ ID NO: 151926 - RNA, 32 nt, Human
gaagucucacugcacucaggcuggagugcagu

SEQ ID NO: 151927 - RNA, 32 nt, Human
gaagucucacuguguugcccagccuggguguc

SEQ ID NO: 151928 - RNA, 32 nt, Human
gaagucucaggacucuguguaaggcuggggac

SEQ ID NO: 151929 - RNA, 32 nt, Human
gaagucucaguucugucauuuguccuggagca

SEQ ID NO: 151930 - RNA, 32 nt, Human
gaagucuccauggacacaggguauuccguauc

SEQ ID NO: 151931 - RNA, 32 nt, Human
gaagucuccugaccagaaauucggaaagggug

SEQ ID NO: 151932 - RNA, 32 nt, Human
gaagucucgcaggucacacauuaaacccugau

SEQ ID NO: 151933 - RNA, 32 nt, Human
gaagucucucccagucaggaggcacagggguc

SEQ ID NO: 151934 - RNA, 32 nt, Human
gaagucucugggacuguggaccuggccucgca

SEQ ID NO: 151935 - RNA, 32 nt, Human
gaagucugaagcucagagagccugggccaaug

SEQ ID NO: 151936 - RNA, 32 nt, Human
gaagucugagccaccucuggcuacaccaacgc

SEQ ID NO: 151937 - RNA, 32 nt, Human
gaagucugaggaaacucaagcuccuccagucc

SEQ ID NO: 151938 - RNA, 32 nt, Human
gaagucugcagucugccacacagaagacaguc

SEQ ID NO: 151939 - RNA, 32 nt, Human
gaagucugcucucucagagcuuaccuccuccc

SEQ ID NO: 151940 - RNA, 32 nt, Human
gaagucuguccucccaaacuucccaggaaaga

SEQ ID NO: 151941 - RNA, 32 nt, Human
gaagucugucuagccaaggcagaacacuuaca

SEQ ID NO: 151942 - RNA, 17 nt, Human
gaagucugugacagcuu

SEQ ID NO: 151943 - RNA, 32 nt, Human
gaagucuguggacugcaagucuuugagaugcu

SEQ ID NO: 151944 - RNA, 32 nt, Human
gaagucuguggcuuggugggucugugugaccu

SEQ ID NO: 151945 - RNA, 32 nt, Human
gaagucugugucugugcacuucccacagacug

SEQ ID NO: 151946 - RNA, 32 nt, Human
gaagucuguuuccugcucucucccucugcaua

SEQ ID NO: 151947 - RNA, 32 nt, Human
gaagucuguuuggauaaagagcuguauuuugc

SEQ ID NO: 151948 - RNA, 32 nt, Human
gaagucuucuaugaggaggugaugccaaagcg

SEQ ID NO: 151949 - RNA, 32 nt, Human
gaagucuucuucuucuuuuaauucauaagccu

SEQ ID NO: 151950 - RNA, 32 nt, Human
gaagucuugacagagugugucugguaaauuga

SEQ ID NO: 151951 - RNA, 32 nt, Human
gaagucuuuagagguauuuugauuuaaaguau

SEQ ID NO: 151952 - RNA, 21 nt, Human
gaagucuuuggcauucacuug

SEQ ID NO: 151953 - RNA, 32 nt, Human
gaagucuuugggacaaaacuguauuuaccuug

SEQ ID NO: 151954 - RNA, 32 nt, Human
gaagucuuuugcuuugauggugguggaugaac

SEQ ID NO: 151955 - RNA, 32 nt, Human
gaagugaaaauguuuaagaaugaccaaaaaca

SEQ ID NO: 151956 - RNA, 32 nt, Human
gaagugaacagugcuaucugaccuguggucuu

SEQ ID NO: 151957 - RNA, 32 nt, Human
gaagugaagaaagcuaauagaaggucccggug

SEQ ID NO: 151958 - RNA, 32 nt, Human
gaagugaagcagugucucacagggucauuaca

SEQ ID NO: 151959 - RNA, 31 nt, Human
gaagugaagucagugccucaguugcugauca

SEQ ID NO: 151960 - RNA, 31 nt, Human
gaagugaagucagugccucaguugcugcuuu

SEQ ID NO: 151961 - RNA, 32 nt, Human
gaagugaccagccuguguagugugacaaacgu

SEQ ID NO: 151962 - RNA, 32 nt, Human
gaagugacccaggcuggcgauccggagggccc

SEQ ID NO: 151963 - RNA, 32 nt, Human
gaagugaccucacagaccagcucagagauguu

SEQ ID NO: 151964 - RNA, 32 nt, Human
gaagugacggccgccucccggcuaccggggac

SEQ ID NO: 151965 - RNA, 32 nt, Human
gaagugacugaaacggcaucugccucacagug

SEQ ID NO: 151966 - RNA, 32 nt, Human
gaagugacuuaucuaugugggauauugaguau

SEQ ID NO: 151967 - RNA, 32 nt, Human
gaagugacuuuacuuuucucaaguuugauacu

SEQ ID NO: 151968 - RNA, 32 nt, Human
gaagugacuuuuccuggccucucccagcaugc

SEQ ID NO: 151969 - RNA, 32 nt, Human
gaagugagaacagagacccagaaggagaauca

SEQ ID NO: 151970 - RNA, 32 nt, Human
gaagugagagaaaaggggaugagugcagggca

SEQ ID NO: 151971 - RNA, 32 nt, Human
gaagugagauggcaagacucccguuucucuua

SEQ ID NO: 151972 - RNA, 32 nt, Human
gaagugagcagcuggagggaaaagaggagccc

SEQ ID NO: 151973 - RNA, 32 nt, Human
gaagugaggaccagggaugcugugcugcucuc

SEQ ID NO: 151974 - RNA, 32 nt, Human
gaagugaggagaagguggagaagagagaagag

SEQ ID NO: 151975 - RNA, 32 nt, Human
gaagugaggaggugcugaggcugccaaggagg

SEQ ID NO: 151976 - RNA, 32 nt, Human
gaagugagggcaucucgguccauucugcccau

SEQ ID NO: 151977 - RNA, 32 nt, Human
gaagugagggucagagaggagucagagagaau

SEQ ID NO: 151978 - RNA, 32 nt, Human
gaagugagucaucacagacugggaccuccacc

SEQ ID NO: 151979 - RNA, 32 nt, Human
gaagugaucuauccugccaggaggccucagag

SEQ ID NO: 151980 - RNA, 32 nt, Human
gaagugaucucuaggccccagccccaaauccg

SEQ ID NO: 151981 - RNA, 32 nt, Human
gaagugauggccuuccuugccuaaaacaguag

SEQ ID NO: 151982 - RNA, 32 nt, Human
gaagugauuuccaugagaacaaaggcuuauuc

SEQ ID NO: 151983 - RNA, 32 nt, Human
gaagugcaacacugcagggcucucaggagggg

SEQ ID NO: 151984 - RNA, 32 nt, Human
gaagugcaagccggaggcagcagaucaggagu

SEQ ID NO: 151985 - RNA, 32 nt, Human
gaagugcacaguaccuggagugaaacugcuug

SEQ ID NO: 151986 - RNA, 32 nt, Human
gaagugcaccuagaaagauuaaugagaaacaa

SEQ ID NO: 151987 - RNA, 32 nt, Human
gaagugcagaaacuacacagacauuugugcgg

SEQ ID NO: 151988 - RNA, 32 nt, Human
gaagugcagaagcacaugauggugaaaaaccu

SEQ ID NO: 151989 - RNA, 32 nt, Human
gaagugcaguggugugauuacagcucauguag

SEQ ID NO: 151990 - RNA, 24 nt, Human
gaagugcauaugacaggcugagag

SEQ ID NO: 151991 - RNA, 32 nt, Human
gaagugccacagugagagcugccuuauauucc

SEQ ID NO: 151992 - RNA, 32 nt, Human
gaagugccagaagagacaguaucugcauacau

SEQ ID NO: 151993 - RNA, 17 nt, Human
gaagugccaggcagggg

SEQ ID NO: 151994 - RNA, 32 nt, Human
gaagugccaggcagggggagguuuccaugucc

SEQ ID NO: 151995 - RNA, 32 nt, Human
gaagugcccuguggugaccaggagaacaagga

SEQ ID NO: 151996 - RNA, 32 nt, Human
gaagugccucccacagggcgggugggucagcg

SEQ ID NO: 151997 - RNA, 32 nt, Human
gaagugccugcaggaaacaagcccugucugac

SEQ ID NO: 151998 - RNA, 32 nt, Human
gaagugccugcugccagucaucacucacugau

SEQ ID NO: 151999 - RNA, 32 nt, Human
gaagugccuggaagagagggugcauugugagg

SEQ ID NO: 152000 - RNA, 32 nt, Human
gaagugccuggcacagugucugguacauuugu

SEQ ID NO: 152001 - RNA, 32 nt, Human
gaagugccuggggucgaaggagcugcuugcca

SEQ ID NO: 152002 - RNA, 32 nt, Human
gaagugccugugaaacacagcccagaggaguu

SEQ ID NO: 152003 - RNA, 32 nt, Human
gaagugcgcugccuccacggccccuugcccuu

SEQ ID NO: 152004 - RNA, 32 nt, Human
gaagugcgggacaugguaggggaggcaaaaag

SEQ ID NO: 152005 - RNA, 32 nt, Human
gaagugcggugacugggaaaugcugagcuagg

SEQ ID NO: 152006 - RNA, 32 nt, Human
gaagugcuacagaaagcacaaagaauugauuc

SEQ ID NO: 152007 - RNA, 32 nt, Human
gaagugcuaggaugaaccuggccauccuagca

SEQ ID NO: 152008 - RNA, 32 nt, Human
gaagugcucagcuacuucuccugcacuuugaa

SEQ ID NO: 152009 - RNA, 32 nt, Human
gaagugcucugagagguggaagacaaugucug

SEQ ID NO: 152010 - RNA, 32 nt, Human
gaagugcucugagagguggaagacauguccgg

SEQ ID NO: 152011 - RNA, 32 nt, Human
gaagugcucugccucauucccuguucguagga

SEQ ID NO: 152012 - RNA, 32 nt, Human
gaagugcugcaaugaaccucagaggcuggauc

SEQ ID NO: 152013 - RNA, 32 nt, Human
gaagugcugcguguucaggccaucucuggcug

SEQ ID NO: 152014 - RNA, 32 nt, Human
gaagugcuuacugaaugccugcccugugcgug

SEQ ID NO: 152015 - RNA, 32 nt, Human
gaagugcuucauuuucuuuuuauaguagaagc

SEQ ID NO: 152016 - RNA, 32 nt, Human
gaaguggaaauagccaugacccagggaaagcc

SEQ ID NO: 152017 - RNA, 32 nt, Human
gaaguggaaauggcuuaagaugcucauagccc

SEQ ID NO: 152018 - RNA, 32 nt, Human
gaaguggaacugaacuuucacucuccauggga

SEQ ID NO: 152019 - RNA, 32 nt, Human
gaaguggaacuuaagugguuucccuggugcug

SEQ ID NO: 152020 - RNA, 22 nt, Human
gaaguggacguaguuguaagag

SEQ ID NO: 152021 - RNA, 32 nt, Human
gaaguggagacaccuuucccagggcuacgggg

SEQ ID NO: 152022 - RNA, 32 nt, Human
gaaguggaggaaaugcuggacaagaaggcaca

SEQ ID NO: 152023 - RNA, 32 nt, Human
gaaguggaggaggaggaggagaaggaggaggg

SEQ ID NO: 152024 - RNA, 32 nt, Human
gaaguggaggcagagggagcgggcacggggcc

SEQ ID NO: 152025 - RNA, 24 nt, Human
gaaguggaggcugcagugaccuau

SEQ ID NO: 152026 - RNA, 32 nt, Human
gaaguggaggcugcagugaccuaugauggcac

SEQ ID NO: 152027 - RNA, 32 nt, Human
gaaguggagggaggaggaaggaacuuuagaug

SEQ ID NO: 152028 - RNA, 19 nt, Human
gaaguggaggggccugagg

SEQ ID NO: 152029 - RNA, 32 nt, Human
gaaguggagucaugcuucacacggccauauca

SEQ ID NO: 152030 - RNA, 32 nt, Human
gaaguggaguuuucugugagaauaaagcauuu

SEQ ID NO: 152031 - RNA, 32 nt, Human
gaaguggauucuuguggcaaaauaaauauugu

SEQ ID NO: 152032 - RNA, 32 nt, Human
gaaguggcaggcacagaaggaagggcuggauu

SEQ ID NO: 152033 - RNA, 21 nt, Human
gaaguggcaggugaugcugaa

SEQ ID NO: 152034 - RNA, 32 nt, Human
gaaguggcagugacuucuagagcucaguggca

SEQ ID NO: 152035 - RNA, 32 nt, Human
gaaguggcccagccacuggguguucagagccc

SEQ ID NO: 152036 - RNA, 32 nt, Human
gaaguggccuggcuucuucacugcgugccugu

SEQ ID NO: 152037 - RNA, 31 nt, Human
gaaguggccuugcugcucucaggcccggcca

SEQ ID NO: 152038 - RNA, 32 nt, Human
gaaguggcuguccagcgccugccugugcuggg

SEQ ID NO: 152039 - RNA, 32 nt, Human
gaaguggcuuacuguagaagcagcuugcugag

SEQ ID NO: 152040 - RNA, 32 nt, Human
gaagugggaauggcuauauacauggcuuuagu

SEQ ID NO: 152041 - RNA, 32 nt, Human
gaagugggagcagcuucuugggcugagugcag

SEQ ID NO: 152042 - RNA, 32 nt, Human
gaagugggaggaucccuugagcucaggaguuu

SEQ ID NO: 152043 - RNA, 32 nt, Human
gaagugggaggauggccugagcucaaggagau

SEQ ID NO: 152044 - RNA, 23 nt, Human
gaagugggcagaucaccugaggu

SEQ ID NO: 152045 - RNA, 32 nt, Human
gaagugggcaguagaacccaggagaggaagaa

SEQ ID NO: 152046 - RNA, 17 nt, Human
gaaguggggacagagca

SEQ ID NO: 152047 - RNA, 32 nt, Human
gaaguggggacagagcagaacuuucaccuuca

SEQ ID NO: 152048 - RNA, 32 nt, Human
gaaguggggaggaucguuugagccugagaguu

SEQ ID NO: 152049 - RNA, 32 nt, Human
gaaguggggcagcagcaguggagagaugggac

SEQ ID NO: 152050 - RNA, 19 nt, Human
gaaguggggcagcugcagg

SEQ ID NO: 152051 - RNA, 32 nt, Human
gaaguggggcuggauacccugcccccaccaua

SEQ ID NO: 152052 - RNA, 32 nt, Human
gaagugggggaaaaggaggugggagugcagau

SEQ ID NO: 152053 - RNA, 32 nt, Human
gaagugggggaugucauucuuauucaccugaa

SEQ ID NO: 152054 - RNA, 32 nt, Human
gaagugggguccccgacccaggagaacggugg

SEQ ID NO: 152055 - RNA, 32 nt, Human
gaaguggguauagacccaggagaggaagguua

SEQ ID NO: 152056 - RNA, 32 nt, Human
gaagugggucaagcccugggaacccucaucca

SEQ ID NO: 152057 - RNA, 23 nt, Human
gaaguggguggaucaccugaggu

SEQ ID NO: 152058 - RNA, 23 nt, Human
gaaguggguggaucacuugaggc

SEQ ID NO: 152059 - RNA, 32 nt, Human
gaaguggguucugcaaggagccuauaaagcca

SEQ ID NO: 152060 - RNA, 32 nt, Human
gaagugguaaacuggccgggugcaauggcuca

SEQ ID NO: 152061 - RNA, 32 nt, Human
gaaguggucaggcagaaggugcccuggugaga

SEQ ID NO: 152062 - RNA, 32 nt, Human
gaaguggucuuuucacuacccuugccagaaac

SEQ ID NO: 152063 - RNA, 24 nt, Human
gaaguggugagcuuaacccuggaa

SEQ ID NO: 152064 - RNA, 32 nt, Human
gaagugguuguucauucucaaacauagacuuu

SEQ ID NO: 152065 - RNA, 32 nt, Human
gaagugguuucaggcccucuaguugccaugac

SEQ ID NO: 152066 - RNA, 20 nt, Human
gaaguguaauucaauuagca

SEQ ID NO: 152067 - RNA, 32 nt, Human
gaagugucacucauauucagcuuugaucagug

SEQ ID NO: 152068 - RNA, 32 nt, Human
gaaguguccagaagaaggccauggacagaacg

SEQ ID NO: 152069 - RNA, 32 nt, Human
gaagugucuggaguguggagugaaaugccacg

SEQ ID NO: 152070 - RNA, 32 nt, Human
gaagugucuguguggcuccuuccacgugggug

SEQ ID NO: 152071 - RNA, 32 nt, Human
gaagugugaacugucugccuccaggcuuuguc

SEQ ID NO: 152072 - RNA, 32 nt, Human
gaagugugagcacgggccuggcuggcacccgg

SEQ ID NO: 152073 - RNA, 32 nt, Human
gaagugugcagucuuaaauguacagcgauaag

SEQ ID NO: 152074 - RNA, 32 nt, Human
gaagugugcuuuugaauggaagauccaaagcc

SEQ ID NO: 152075 - RNA, 32 nt, Human
gaaguguggacaugauggcaggagcugcagca

SEQ ID NO: 152076 - RNA, 32 nt, Human
gaagugugggaaagccuugugcugcagaucgg

SEQ ID NO: 152077 - RNA, 32 nt, Human
gaaguguggucagcacacacugagcguucuuu

SEQ ID NO: 152078 - RNA, 32 nt, Human
gaaguguguagacugacguucuguaaaccaga

SEQ ID NO: 152079 - RNA, 29 nt, Human
gaagugugucugugggaggcaggagaugc

SEQ ID NO: 152080 - RNA, 32 nt, Human
gaaguguguggagauuuaggugcugcucugcu

SEQ ID NO: 152081 - RNA, 32 nt, Human
gaaguguuaauccuguccaaaggaaagaacca

SEQ ID NO: 152082 - RNA, 32 nt, Human
gaaguguuaccaacuagccacaccaugaauug

SEQ ID NO: 152083 - RNA, 32 nt, Human
gaaguguugcagguguccaccauugcgaugca

SEQ ID NO: 152084 - RNA, 32 nt, Human
gaaguguugucucaaauguccuugccuaucau

SEQ ID NO: 152085 - RNA, 32 nt, Human
gaaguguuugcugcagaguugagggaaacccc

SEQ ID NO: 152086 - RNA, 25 nt, Human
gaaguguuuggagcaaagagaugaa

SEQ ID NO: 152087 - RNA, 32 nt, Human
gaaguguuuguaaucccagcacuuugggaggc

SEQ ID NO: 152088 - RNA, 32 nt, Human
gaaguuaaggaacuugcucaaggucacagagu

SEQ ID NO: 152089 - RNA, 32 nt, Human
gaaguuacaccugagcguggucguugugaaga

SEQ ID NO: 152090 - RNA, 32 nt, Human
gaaguuacacugccagcaguuccccaggccuc

SEQ ID NO: 152091 - RNA, 32 nt, Human
gaaguuaccuuccuggugcacacaccgaagug

SEQ ID NO: 152092 - RNA, 32 nt, Human
gaaguuacucauuucaaaauggaugaauuguu

SEQ ID NO: 152093 - RNA, 32 nt, Human
gaaguuaguauagaaugagaagaaauuauaaa

SEQ ID NO: 152094 - RNA, 31 nt, Human
gaaguuagucucucugggccuguuuccucau

SEQ ID NO: 152095 - RNA, 32 nt, Human
gaaguuaucccuuuaccucggaacuuggggac

SEQ ID NO: 152096 - RNA, 32 nt, Human
gaaguuaucugaaaaugucgucaugauuaaau

SEQ ID NO: 152097 - RNA, 32 nt, Human
gaaguuauggcuccuuccucccucucuccauu

SEQ ID NO: 152098 - RNA, 32 nt, Human
gaaguuauguaaaauaaaagcaucugauccuu

SEQ ID NO: 152099 - RNA, 32 nt, Human
gaaguuauuuaggagcaacucccaccuaaagg

SEQ ID NO: 152100 - RNA, 32 nt, Human
gaaguucaacaucacugauaguuagagaacug

SEQ ID NO: 152101 - RNA, 32 nt, Human
gaaguucacuccagcaagucucaggccacaau

SEQ ID NO: 152102 - RNA, 32 nt, Human
gaaguucacuggagggcccagccuggggaaag

SEQ ID NO: 152103 - RNA, 19 nt, Human
gaaguucagacauuaggca

SEQ ID NO: 152104 - RNA, 32 nt, Human
gaaguucaggaggcagagucucaaaggaacac

SEQ ID NO: 152105 - RNA, 32 nt, Human
gaaguucaggcagagggagccuggcaacaagg

SEQ ID NO: 152106 - RNA, 32 nt, Human
gaaguuccacugcacuccagccuggguuacag

SEQ ID NO: 152107 - RNA, 32 nt, Human
gaaguuccagaaaguuccaaagacaucacugg

SEQ ID NO: 152108 - RNA, 32 nt, Human
gaaguuccaggacccugcugggugacaaagga

SEQ ID NO: 152109 - RNA, 32 nt, Human
gaaguuccaggauagguugucugcaagcugga

SEQ ID NO: 152110 - RNA, 32 nt, Human
gaaguucccuuuccuuucaagucagucuuuuu

SEQ ID NO: 152111 - RNA, 32 nt, Human
gaaguuccguguuugcugggggucacaacagc

SEQ ID NO: 152112 - RNA, 32 nt, Human
gaaguuccuaguuuacaguucuuuuacauuac

SEQ ID NO: 152113 - RNA, 32 nt, Human
gaaguuccucaccgcgucuccuucccucuccc

SEQ ID NO: 152114 - RNA, 32 nt, Human
gaaguucucuacuaaucuccugccuuccacca

SEQ ID NO: 152115 - RNA, 32 nt, Human
gaaguucucugcuucccaguugcuauuccaca

SEQ ID NO: 152116 - RNA, 32 nt, Human
gaaguucugaaaucaucuaucacuuucuccag

SEQ ID NO: 152117 - RNA, 24 nt, Human
gaaguucugcaaaccuccccugga

SEQ ID NO: 152118 - RNA, 32 nt, Human
gaaguucugcagcucggcuuacccagggcugc

SEQ ID NO: 152119 - RNA, 23 nt, Human
gaaguucugccgcuucuccccug

SEQ ID NO: 152120 - RNA, 32 nt, Human
gaaguucugccucugauguauuuugugaguuu

SEQ ID NO: 152121 - RNA, 32 nt, Human
gaaguucuggaaagaaguacuggauggacuga

SEQ ID NO: 152122 - RNA, 32 nt, Human
gaaguucugggaguugccguuuuucaucaaaa

SEQ ID NO: 152123 - RNA, 32 nt, Human
gaaguucuguguccaagucccacccaggcugg

SEQ ID NO: 152124 - RNA, 32 nt, Human
gaaguugaacgagcauaguccaaaaagcuccu

SEQ ID NO: 152125 - RNA, 32 nt, Human
gaaguugaauaucagucuauagcuaaugcuac

SEQ ID NO: 152126 - RNA, 32 nt, Human
gaaguugacaggcagugccaugggggcaacag

SEQ ID NO: 152127 - RNA, 24 nt, Human
gaaguugaggcugcagugaacuau

SEQ ID NO: 152128 - RNA, 32 nt, Human
gaaguugaggcugcagugaacuaugauuuuac

SEQ ID NO: 152129 - RNA, 32 nt, Human
gaaguugaugcccugugcuuccuguacagcug

SEQ ID NO: 152130 - RNA, 32 nt, Human
gaaguugcaagacucgaauaaaaucugcugca

SEQ ID NO: 152131 - RNA, 32 nt, Human
gaaguugcaaugagcuaugauuucaccacugc

SEQ ID NO: 152132 - RNA, 32 nt, Human
gaaguugcaccauugcacuccacccugggcga

SEQ ID NO: 152133 - RNA, 32 nt, Human
gaaguugcagugaaccaagaucacgccacugc

SEQ ID NO: 152134 - RNA, 32 nt, Human
gaaguugcagugaacugaaauugugccacugc

SEQ ID NO: 152135 - RNA, 32 nt, Human
gaaguugcagugagcagagaucacaccacugc

SEQ ID NO: 152136 - RNA, 32 nt, Human
gaaguugcagugagcagagaucaggccacugc

SEQ ID NO: 152137 - RNA, 32 nt, Human
gaaguugcagugagccaaaaucacgccacugc

SEQ ID NO: 152138 - RNA, 32 nt, Human
gaaguugcagugagccaagaucauacuacugc

SEQ ID NO: 152139 - RNA, 32 nt, Human
gaaguugcagugagccaagaucaugccauugc

SEQ ID NO: 152140 - RNA, 32 nt, Human
gaaguugcagugagccaagaucgugccauucc

SEQ ID NO: 152141 - RNA, 32 nt, Human
gaaguugcagugagccaagauugagccauugc

SEQ ID NO: 152142 - RNA, 32 nt, Human
gaaguugcagugagccaagauuguaccacugc

SEQ ID NO: 152143 - RNA, 32 nt, Human
gaaguugcagugagccaagauugugccacugc

SEQ ID NO: 152144 - RNA, 32 nt, Human
gaaguugcagugagccaagauugugccauugc

SEQ ID NO: 152145 - RNA, 32 nt, Human
gaaguugcagugagccgagacagugccaccgu

SEQ ID NO: 152146 - RNA, 32 nt, Human
gaaguugcagugagccgagaccaugccauugc

SEQ ID NO: 152147 - RNA, 32 nt, Human
gaaguugcagugagccgagaucacaccacugc

SEQ ID NO: 152148 - RNA, 32 nt, Human
gaaguugcagugagccgagaucacgccacugc

SEQ ID NO: 152149 - RNA, 32 nt, Human
gaaguugcagugagccgagaucaugccacugc

SEQ ID NO: 152150 - RNA, 32 nt, Human
gaaguugcagugagccgagaucgcaccacugc

SEQ ID NO: 152151 - RNA, 32 nt, Human
gaaguugcagugagccgagaucgcgccacugc

SEQ ID NO: 152152 - RNA, 32 nt, Human
gaaguugcagugagccgagaucgcgccauugu

SEQ ID NO: 152153 - RNA, 32 nt, Human
gaaguugcagugagccgagaucgugccauugc

SEQ ID NO: 152154 - RNA, 32 nt, Human
gaaguugcagugagccgagauugugccacuga

SEQ ID NO: 152155 - RNA, 32 nt, Human
gaaguugcagugagccgagauugugccacugc

SEQ ID NO: 152156 - RNA, 32 nt, Human
gaaguugcagugagcuaugaaugcaccauugc

SEQ ID NO: 152157 - RNA, 32 nt, Human
gaaguugcagugagcugaaauugugcuauugc

SEQ ID NO: 152158 - RNA, 32 nt, Human
gaaguugcagugagcugagaucacaccacugc

SEQ ID NO: 152159 - RNA, 32 nt, Human
gaaguugcagugagcugagaucacgccauugc

SEQ ID NO: 152160 - RNA, 32 nt, Human
gaaguugcagugagcugagaucaugccacugc

SEQ ID NO: 152161 - RNA, 32 nt, Human
gaaguugcagugagcugagaucaugccauugc

SEQ ID NO: 152162 - RNA, 32 nt, Human
gaaguugcagugagcugagaucgcgccgcugc

SEQ ID NO: 152163 - RNA, 32 nt, Human
gaaguugcagugagcugagauugcaccacugc

SEQ ID NO: 152164 - RNA, 32 nt, Human
gaaguugcagugagcugagauugugccacugc

SEQ ID NO: 152165 - RNA, 32 nt, Human
gaaguugcagugagcugauaucaugccccugu

SEQ ID NO: 152166 - RNA, 32 nt, Human
gaaguugcagugagucgagauugcacugcugc

SEQ ID NO: 152167 - RNA, 32 nt, Human
gaaguugcagugggccaagaucaugccacugc

SEQ ID NO: 152168 - RNA, 32 nt, Human
gaaguugcggugagccaagauugugccauugc

SEQ ID NO: 152169 - RNA, 32 nt, Human
gaaguugcgguuagccgagaucacgccacugc

SEQ ID NO: 152170 - RNA, 32 nt, Human
gaaguuggaagacauuucaaacaacagguugu

SEQ ID NO: 152171 - RNA, 32 nt, Human
gaaguuggcagacauccugaaguaggcaacug

SEQ ID NO: 152172 - RNA, 32 nt, Human
gaaguuggcugggaagaaagaugagugaaaua

SEQ ID NO: 152173 - RNA, 32 nt, Human
gaaguuggcugggugcgcgccggcuccggcug

SEQ ID NO: 152174 - RNA, 32 nt, Human
gaaguugggacaccaagucugagcuuggagug

SEQ ID NO: 152175 - RNA, 32 nt, Human
gaaguugggcucuaagaaugaggggaaagagc

SEQ ID NO: 152176 - RNA, 32 nt, Human
gaaguugggggagcucgagagccagacggcca

SEQ ID NO: 152177 - RNA, 19 nt, Human
gaaguugggguccugggaa

SEQ ID NO: 152178 - RNA, 32 nt, Human
gaaguugucaaggaaugagggaaaguaaaucc

SEQ ID NO: 152179 - RNA, 32 nt, Human
gaaguugucauccagaagucagagcagagugc

SEQ ID NO: 152180 - RNA, 23 nt, Human
gaaguugucugccuagaauucca

SEQ ID NO: 152181 - RNA, 32 nt, Human
gaaguugucuuugcccugcagcuccuggaagg

SEQ ID NO: 152182 - RNA, 32 nt, Human
gaaguuguggugagccgagaucgcgccacugc

SEQ ID NO: 152183 - RNA, 32 nt, Human
gaaguuguggugagccgagauugugcacucca

SEQ ID NO: 152184 - RNA, 32 nt, Human
gaaguuguugacuguaggggaaauaaaguuaa

SEQ ID NO: 152185 - RNA, 32 nt, Human
gaaguuguuuugagccaagaucaugccauugc

SEQ ID NO: 152186 - RNA, 32 nt, Human
gaaguuuacucacaccuguaaucccagcacuu

SEQ ID NO: 152187 - RNA, 32 nt, Human
gaaguuuagggaaagaagguugcuguggugag

SEQ ID NO: 152188 - RNA, 32 nt, Human
gaaguuuauaguuuugaaaacagcugcugaag

SEQ ID NO: 152189 - RNA, 32 nt, Human
gaaguuuauaugccagcaggccuuuuuguuuu

SEQ ID NO: 152190 - RNA, 32 nt, Human
gaaguuuauuuggaggaacacagucaucuccu

SEQ ID NO: 152191 - RNA, 21 nt, Human
gaaguuucauuucauuagaca

SEQ ID NO: 152192 - RNA, 32 nt, Human
gaaguuucuacucucaggagcuauggccgggg

SEQ ID NO: 152193 - RNA, 32 nt, Human
gaaguuucuaggcacgaggcccuggguuuauu

SEQ ID NO: 152194 - RNA, 32 nt, Human
gaaguuucugcacucagccaggcggcaucaau

SEQ ID NO: 152195 - RNA, 32 nt, Human
gaaguuucugccaccuccccuccugagccugc

SEQ ID NO: 152196 - RNA, 32 nt, Human
gaaguuucuggggucacauggucagaaggggc

SEQ ID NO: 152197 - RNA, 32 nt, Human
gaaguuugaggccaaacccccagcggucagug

SEQ ID NO: 152198 - RNA, 32 nt, Human
gaaguuugaguguguguggugugugcaucugg

SEQ ID NO: 152199 - RNA, 32 nt, Human
gaaguuugaugucucacuaagauugccuaggg

SEQ ID NO: 152200 - RNA, 32 nt, Human
gaaguuugggacucagacuggcuucuuggcuc

SEQ ID NO: 152201 - RNA, 32 nt, Human
gaaguuuggguugauuuuugugguguuuuguu

SEQ ID NO: 152202 - RNA, 32 nt, Human
gaaguuugucacugacuuguguuccugaacua

SEQ ID NO: 152203 - RNA, 32 nt, Human
gaaguuugugagccagccuggcccuguacaga

SEQ ID NO: 152204 - RNA, 32 nt, Human
gaaguuuguggaaaaugcuuugcuucguggca

SEQ ID NO: 152205 - RNA, 32 nt, Human
gaaguuugugggaauagaggugaggcaccagg

SEQ ID NO: 152206 - RNA, 32 nt, Human
gaaguuuuagcgcucagaacauggggacccaa

SEQ ID NO: 152207 - RNA, 32 nt, Human
gaaguuuucucucuuuucuccaccucuccuuu

SEQ ID NO: 152208 - RNA, 32 nt, Human
gaaguuuugccucaccaaauaccagaaggguc

SEQ ID NO: 152209 - RNA, 32 nt, Human
gaaguuuuggagagggaaguggagcagccagc

SEQ ID NO: 152210 - RNA, 32 nt, Human
gaaguuuuucugucaccuguguuaggcuccgu

SEQ ID NO: 152211 - RNA, 32 nt, Human
gaauaaaaccaccaaauggcauuucuagacag

SEQ ID NO: 152212 - RNA, 32 nt, Human
gaauaaaacccauaauuuucuucaaugaguua

SEQ ID NO: 152213 - RNA, 32 nt, Human
gaauaaaacgaaugcauguuugugucacgaaa

SEQ ID NO: 152214 - RNA, 32 nt, Human
gaauaaaagaggaaaagccaaacgagggugca

SEQ ID NO: 152215 - RNA, 32 nt, Human
gaauaaaagauauagaauaguaaucuaguuga

SEQ ID NO: 152216 - RNA, 32 nt, Human
gaauaaaaggugggaaaggagagcacuguucu

SEQ ID NO: 152217 - RNA, 32 nt, Human
gaauaaaaguuaccugggcaugguggcauaua

SEQ ID NO: 152218 - RNA, 32 nt, Human
gaauaaaaucagugcuguaggaagauggacug

SEQ ID NO: 152219 - RNA, 32 nt, Human
gaauaaaauggaccucuauacacacaccuguc

SEQ ID NO: 152220 - RNA, 32 nt, Human
gaauaaaauggucuucauuugacacuuacuuu

SEQ ID NO: 152221 - RNA, 32 nt, Human
gaauaaacgggaguucugcaugugaguucuca

SEQ ID NO: 152222 - RNA, 32 nt, Human
gaauaaacuguacuggugucaguuggcaauuu

SEQ ID NO: 152223 - RNA, 32 nt, Human
gaauaaacuuggcccugcgucuucccagguga

SEQ ID NO: 152224 - RNA, 32 nt, Human
gaauaaagagaagauuugaauuuucaguuuca

SEQ ID NO: 152225 - RNA, 32 nt, Human
gaauaaagccaaggggagugagaugagguggg

SEQ ID NO: 152226 - RNA, 32 nt, Human
gaauaaaggagaaagaggaagauggaauccug

SEQ ID NO: 152227 - RNA, 32 nt, Human
gaauaaagggagaagagggaaaacagaaaacc

SEQ ID NO: 152228 - RNA, 20 nt, Human
gaauaaaggggacccuuccu

SEQ ID NO: 152229 - RNA, 32 nt, Human
gaauaaaggucacauauuggaaaauggaaagg

SEQ ID NO: 152230 - RNA, 32 nt, Human
gaauaaagucuucuacauccaaucccaacaaa

SEQ ID NO: 152231 - RNA, 32 nt, Human
gaauaaauaaaucuccguuuucuucaauuuau

SEQ ID NO: 152232 - RNA, 32 nt, Human
gaauaaauaggaacuuucucuucaguuguaaa

SEQ ID NO: 152233 - RNA, 32 nt, Human
gaauaaaucugaaggcccaucacagcuucaga

SEQ ID NO: 152234 - RNA, 32 nt, Human
gaauaaaugaaccaaaucaauaacuucuggaa

SEQ ID NO: 152235 - RNA, 32 nt, Human
gaauaaaugucuucaguugucucuccauuacc

SEQ ID NO: 152236 - RNA, 32 nt, Human
gaauaaauucagcauuaaaauaaauguaauua

SEQ ID NO: 152237 - RNA, 32 nt, Human
gaauaaauuuauuguucucugcuucagggcag

SEQ ID NO: 152238 - RNA, 32 nt, Human
gaauaacaauccagcaugcuuucauucuuucu

SEQ ID NO: 152239 - RNA, 32 nt, Human
gaauaacaaugccaacauccacgacaacaauc

SEQ ID NO: 152240 - RNA, 32 nt, Human
gaauaacaggagacagggaagagguggaaauu

SEQ ID NO: 152241 - RNA, 32 nt, Human
gaauaacaucuaggcuggauucauuguuacau

SEQ ID NO: 152242 - RNA, 32 nt, Human
gaauaaccacugcacuccaaccugggcaacau

SEQ ID NO: 152243 - RNA, 32 nt, Human
gaauaacggaagggagaauaugacagauaccu

SEQ ID NO: 152244 - RNA, 32 nt, Human
gaauaacucuuguuugcacuccagaaaacaac

SEQ ID NO: 152245 - RNA, 32 nt, Human
gaauaacugaaauccccagcgaugggguaaca

SEQ ID NO: 152246 - RNA, 32 nt, Human
gaauaacugcacuccagccugggcaacauagc

SEQ ID NO: 152247 - RNA, 31 nt, Human
gaauaacugcugucucccaugaugguguggu

SEQ ID NO: 152248 - RNA, 32 nt, Human
gaauaacuuacugugugacuuugggcaaguuc

SEQ ID NO: 152249 - RNA, 32 nt, Human
gaauaagaaguauggcuggagacucuggcuca

SEQ ID NO: 152250 - RNA, 32 nt, Human
gaauaagaugguagaauaccugacagacuggg

SEQ ID NO: 152251 - RNA, 32 nt, Human
gaauaagcaauccuaugauccacuaauuuguu

SEQ ID NO: 152252 - RNA, 31 nt, Human
gaauaagcacuuuuuaaaaaugcagauacau

SEQ ID NO: 152253 - RNA, 32 nt, Human
gaauaagcauggagucauauugaggaggacuc

SEQ ID NO: 152254 - RNA, 32 nt, Human
gaauaagcuacuauccugaggcugaggguuuu

SEQ ID NO: 152255 - RNA, 32 nt, Human
gaauaaggacaaaaggagagauugagaacaag

SEQ ID NO: 152256 - RNA, 32 nt, Human
gaauaaggccuuaauauguuaaccucaguguc

SEQ ID NO: 152257 - RNA, 32 nt, Human
gaauaaggggaaggaagagagagggagcaggc

SEQ ID NO: 152258 - RNA, 32 nt, Human
gaauaagguggaccucaggaauccggaaaaga

SEQ ID NO: 152259 - RNA, 32 nt, Human
gaauaaguauuuuucccacauuuuuggauaua

SEQ ID NO: 152260 - RNA, 32 nt, Human
gaauaagucauuguauuuuuaacaccagaaag

SEQ ID NO: 152261 - RNA, 32 nt, Human
gaauaagucucccacaguuguauaaauuggac

SEQ ID NO: 152262 - RNA, 32 nt, Human
gaauaagucucucauaaugagugcagugucag

SEQ ID NO: 152263 - RNA, 32 nt, Human
gaauaaguuuuauuuuucccuaccucugguug

SEQ ID NO: 152264 - RNA, 31 nt, Human
gaauaaucagaagucaguuugggagaaguca

SEQ ID NO: 152265 - RNA, 32 nt, Human
gaauaaucagaagucaguuugggagaagucaa

SEQ ID NO: 152266 - RNA, 32 nt, Human
gaauaaucauugagacagagucacugucuuuc

SEQ ID NO: 152267 - RNA, 32 nt, Human
gaauaaugcauucuauguagccaugucacugu

SEQ ID NO: 152268 - RNA, 32 nt, Human
gaauaauggaaugacuugucugccucacauau

SEQ ID NO: 152269 - RNA, 32 nt, Human
gaauaauguuuaugauuacaagugagauaagg

SEQ ID NO: 152270 - RNA, 32 nt, Human
gaauaauuccccaagacagcacuucgggauuc

SEQ ID NO: 152271 - RNA, 32 nt, Human
gaauaauucuaucacguuaccacuaauaaacu

SEQ ID NO: 152272 - RNA, 32 nt, Human
gaauaauugcccugaccacauuugccuuucag

SEQ ID NO: 152273 - RNA, 32 nt, Human
gaauacaaaguagaagaucacuuuccuucacu

SEQ ID NO: 152274 - RNA, 32 nt, Human
gaauacaaaucgguaaccagcagcuguuccuc

SEQ ID NO: 152275 - RNA, 32 nt, Human
gaauacaagccacuaccuucugaccuccccac

SEQ ID NO: 152276 - RNA, 32 nt, Human
gaauacacaagacauacccacccaugaagagu

SEQ ID NO: 152277 - RNA, 32 nt, Human
gaauacagaaaugaucuauuucaagaggaagg

SEQ ID NO: 152278 - RNA, 32 nt, Human
gaauacagccuaucaaaaugaugucuguugga

SEQ ID NO: 152279 - RNA, 32 nt, Human
gaauacaguacaaucccaacccuacugggagg

SEQ ID NO: 152280 - RNA, 32 nt, Human
gaauacagucugcagugcagcaacagaaccgc

SEQ ID NO: 152281 - RNA, 32 nt, Human
gaauacaguucugccaaguucuucaccacuuu

SEQ ID NO: 152282 - RNA, 32 nt, Human
gaauacaguucugugcagucccgcccauccuc

SEQ ID NO: 152283 - RNA, 32 nt, Human
gaauacaguuugaauguauaaucaguaguguu

SEQ ID NO: 152284 - RNA, 32 nt, Human
gaauacaucucucacacauacucacaaacaca

SEQ ID NO: 152285 - RNA, 32 nt, Human
gaauacauggaaauauuugucuucucaggccu

SEQ ID NO: 152286 - RNA, 32 nt, Human
gaauacauuaacggugcuaaaaaugaaaauuc

SEQ ID NO: 152287 - RNA, 32 nt, Human
gaauacauuuaaaagaaaauauauuuugaaac

SEQ ID NO: 152288 - RNA, 32 nt, Human
gaauaccaaugccacagacacuacaggagaua

SEQ ID NO: 152289 - RNA, 32 nt, Human
gaauaccuagaacauauccucagcaagaaaca

SEQ ID NO: 152290 - RNA, 32 nt, Human
gaauaccuggcagggucagggaagggaaggua

SEQ ID NO: 152291 - RNA, 32 nt, Human
gaauaccuguuaaagaaaaauuacagaauaaa

SEQ ID NO: 152292 - RNA, 32 nt, Human
gaauacgggagggagagggaaugauaagcugc

SEQ ID NO: 152293 - RNA, 32 nt, Human
gaauacgguaacacgguaacacggugaaaccu

SEQ ID NO: 152294 - RNA, 32 nt, Human
gaauacuaagacacaggagguuuagccugcuu

SEQ ID NO: 152295 - RNA, 28 nt, Human
gaauacucaagugcuagcuuagcagcuu

SEQ ID NO: 152296 - RNA, 32 nt, Human
gaauacucauuguaucagccuuccucauuauc

SEQ ID NO: 152297 - RNA, 32 nt, Human
gaauacucuccaccaagcccuugacccauugu

SEQ ID NO: 152298 - RNA, 32 nt, Human
gaauacucugcaggacgaaugccuuaguuucc

SEQ ID NO: 152299 - RNA, 32 nt, Human
gaauacugcaccuauaaaacacaugccaaucu

SEQ ID NO: 152300 - RNA, 32 nt, Human
gaauacugcugcucacccacagacacaaucuu

SEQ ID NO: 152301 - RNA, 32 nt, Human
gaauacugucuacaugcuuucucauucaagaa

SEQ ID NO: 152302 - RNA, 32 nt, Human
gaauacugugugucuguccuacauaaagugcu

SEQ ID NO: 152303 - RNA, 32 nt, Human
gaauacuguuuucaugccugcuaacacaguau

SEQ ID NO: 152304 - RNA, 32 nt, Human
gaauacuuagaauuugaauugaaaaugggacu

SEQ ID NO: 152305 - RNA, 32 nt, Human
gaauacuuuucuucaacaaauuuugggggcag

SEQ ID NO: 152306 - RNA, 32 nt, Human
gaauagaaaaacaugccaaaaucuugaguccc

SEQ ID NO: 152307 - RNA, 32 nt, Human
gaauagaaaggaggauaugauguuuuuauugg

SEQ ID NO: 152308 - RNA, 32 nt, Human
gaauagaacuaucuucaccacacucacuauuu

SEQ ID NO: 152309 - RNA, 32 nt, Human
gaauagaaggaguguucuuaggguaaaucuuu

SEQ ID NO: 152310 - RNA, 31 nt, Human
gaauagaaguaucagcaccgaaaccucacag

SEQ ID NO: 152311 - RNA, 21 nt, Human
gaauagaauugaaaagggaua

SEQ ID NO: 152312 - RNA, 25 nt, Human
gaauagacaaaucuauaaagacaaa

SEQ ID NO: 152313 - RNA, 32 nt, Human
gaauagaccgcuaaguggcucuccagacauaa

SEQ ID NO: 152314 - RNA, 32 nt, Human
gaauagaccucuccgccaccgagcugcugugu

SEQ ID NO: 152315 - RNA, 32 nt, Human
gaauagacucagggauuucaccaggucggugc

SEQ ID NO: 152316 - RNA, 24 nt, Human
gaauagacuggauggaaagacaaa

SEQ ID NO: 152317 - RNA, 32 nt, Human
gaauagagaagagguaagaagauaauuguuuu

SEQ ID NO: 152318 - RNA, 32 nt, Human
gaauagagggcagaguaaaaggaagcuccauc

SEQ ID NO: 152319 - RNA, 32 nt, Human
gaauagagggggagcuugcaggaaccagcaau

SEQ ID NO: 152320 - RNA, 32 nt, Human
gaauagagugguauuuagaaaauaaauugcau

SEQ ID NO: 152321 - RNA, 32 nt, Human
gaauagauaggaggagaaaaacaauuacacac

SEQ ID NO: 152322 - RNA, 32 nt, Human
gaauagaucaaauuccaugaaguuuaaaauuc

SEQ ID NO: 152323 - RNA, 32 nt, Human
gaauagcaauagcaaccauugagcuaaaauua

SEQ ID NO: 152324 - RNA, 32 nt, Human
gaauagcacaaggagaaaaaucuuuaaacuua

SEQ ID NO: 152325 - RNA, 32 nt, Human
gaauagcacagcugcccucccaugcucccuac

SEQ ID NO: 152326 - RNA, 32 nt, Human
gaauagcaguaguuuuggaaauauugccccaa

SEQ ID NO: 152327 - RNA, 32 nt, Human
gaauagccacugcacuccagccugggcaacau

SEQ ID NO: 152328 - RNA, 32 nt, Human
gaauagccacugcacuccagccugggcaauau

SEQ ID NO: 152329 - RNA, 32 nt, Human
gaauagccacugcacuccaucuugggcaacac

SEQ ID NO: 152330 - RNA, 32 nt, Human
gaauagccacugcacucuagucuggggaacau

SEQ ID NO: 152331 - RNA, 32 nt, Human
gaauagccacugcacuucagccugggcaacau

SEQ ID NO: 152332 - RNA, 32 nt, Human
gaauagccacugcacuugagccucuugggaaa

SEQ ID NO: 152333 - RNA, 32 nt, Human
gaauagcccacacagguaccggcucucagagg

SEQ ID NO: 152334 - RNA, 32 nt, Human
gaauagccccucacccuucuuccccuucuagu

SEQ ID NO: 152335 - RNA, 32 nt, Human
gaauagccccuguguccuggcauuucagucua

SEQ ID NO: 152336 - RNA, 32 nt, Human
gaauagccugaagaugaaggggaccgggggag

SEQ ID NO: 152337 - RNA, 32 nt, Human
gaauagcuaaaaggugugacuugccuuauuga

SEQ ID NO: 152338 - RNA, 32 nt, Human
gaauagcuagaaggcaggccucacaaguuuuu

SEQ ID NO: 152339 - RNA, 21 nt, Human
gaauagcuaggauuacaggug

SEQ ID NO: 152340 - RNA, 32 nt, Human
gaauagcucaccaagcaaaauauuuaaaguua

SEQ ID NO: 152341 - RNA, 21 nt, Human
gaauagcugggaauacaggug

SEQ ID NO: 152342 - RNA, 21 nt, Human
gaauagcugggacuacaggug

SEQ ID NO: 152343 - RNA, 21 nt, Human
gaauagcugggaggcugcaga

SEQ ID NO: 152344 - RNA, 21 nt, Human
gaauagcugggauuacaggug

SEQ ID NO: 152345 - RNA, 32 nt, Human
gaauagcuuagaauacugcaaaggauaagcua

SEQ ID NO: 152346 - RNA, 32 nt, Human
gaauagcuuaugccuaggagguugaggcugca

SEQ ID NO: 152347 - RNA, 32 nt, Human
gaauaggaacagcuccagucuacagcucccag

SEQ ID NO: 152348 - RNA, 32 nt, Human
gaauaggacuguggaccucuucccaggugugg

SEQ ID NO: 152349 - RNA, 32 nt, Human
gaauaggagggcaggggugaggagggagcagg

SEQ ID NO: 152350 - RNA, 32 nt, Human
gaauaggccgagguaaacagccuagacaucuc

SEQ ID NO: 152351 - RNA, 32 nt, Human
gaauaggcugcucuccucagcuggcaggaaac

SEQ ID NO: 152352 - RNA, 32 nt, Human
gaauagggaacuguaauggccacugaagcacg

SEQ ID NO: 152353 - RNA, 32 nt, Human
gaauagggagcuuguaaagaagaucaagauag

SEQ ID NO: 152354 - RNA, 32 nt, Human
gaauagggagucuauaccagugcugugggaaa

SEQ ID NO: 152355 - RNA, 32 nt, Human
gaauagggccuuugagaaucagacugaacaca

SEQ ID NO: 152356 - RNA, 32 nt, Human
gaauagggcuggggcagcucccagagaaugaa

SEQ ID NO: 152357 - RNA, 32 nt, Human
gaauaggguugcaccaucccagaagcugcugu

SEQ ID NO: 152358 - RNA, 32 nt, Human
gaauaggugccuguucuuguagggagaaauga

SEQ ID NO: 152359 - RNA, 32 nt, Human
gaauaggugguauguuccuaaugauauuauuu

SEQ ID NO: 152360 - RNA, 32 nt, Human
gaauagguuaguucucuuuggugacccuagac

SEQ ID NO: 152361 - RNA, 32 nt, Human
gaauagguucucuccuugccuucacucuagaa

SEQ ID NO: 152362 - RNA, 25 nt, Human
gaauaguaauuucuugagaaccuca

SEQ ID NO: 152363 - RNA, 32 nt, Human
gaauaguagacaguugcaaauacauuauauug

SEQ ID NO: 152364 - RNA, 19 nt, Human
gaauaguagaggguuugaa

SEQ ID NO: 152365 - RNA, 32 nt, Human
gaauagucaguauuuuaaaagcucaaaguaga

SEQ ID NO: 152366 - RNA, 32 nt, Human
gaauaguccuccuugggucucccaccaccccu

SEQ ID NO: 152367 - RNA, 32 nt, Human
gaauagugaaggagggaggccucuuugcaguu

SEQ ID NO: 152368 - RNA, 32 nt, Human
gaauagugcagggggagugaccucugcauaaa

SEQ ID NO: 152369 - RNA, 32 nt, Human
gaauagugggacucagggagauaagaccuucu

SEQ ID NO: 152370 - RNA, 32 nt, Human
gaauagugguugccaaugucucagggagguug

SEQ ID NO: 152371 - RNA, 32 nt, Human
gaauaguuagcaauucgcacuucaccucguuu

SEQ ID NO: 152372 - RNA, 32 nt, Human
gaauauaaucaacaucaacaaaggacauccac

SEQ ID NO: 152373 - RNA, 32 nt, Human
gaauauaaugaaauauauuuugaacuuaaauu

SEQ ID NO: 152374 - RNA, 32 nt, Human
gaauauaauugugaaggagucagggcuaacac

SEQ ID NO: 152375 - RNA, 32 nt, Human
gaauauaccaacauccugaaaguuaaagaaaa

SEQ ID NO: 152376 - RNA, 32 nt, Human
gaauauacucauguuaagugcaauggcauuag

SEQ ID NO: 152377 - RNA, 31 nt, Human
gaauauacuucguucugacacagacguuucc

SEQ ID NO: 152378 - RNA, 32 nt, Human
gaauauagaagacaucccaaaggaagugcuga

SEQ ID NO: 152379 - RNA, 32 nt, Human
gaauauaggaagaccuuuuagcaaagaugcag

SEQ ID NO: 152380 - RNA, 32 nt, Human
gaauauaggaggcagagguugcagugagccga

SEQ ID NO: 152381 - RNA, 31 nt, Human
gaauauaggguggaaaugguguggacaggca

SEQ ID NO: 152382 - RNA, 32 nt, Human
gaauauaucaguauaucugaacuccggaucuu

SEQ ID NO: 152383 - RNA, 32 nt, Human
gaauauauugccaaauauuaagaagcucagcu

SEQ ID NO: 152384 - RNA, 23 nt, Human
gaauauauuggaugaacugaaaa

SEQ ID NO: 152385 - RNA, 32 nt, Human
gaauaucagaugguuaauacuggcauaaaacc

SEQ ID NO: 152386 - RNA, 32 nt, Human
gaauaucagcucuuuggaggguggguauuugc

SEQ ID NO: 152387 - RNA, 32 nt, Human
gaauaucauccucugcauuauccccauggaac

SEQ ID NO: 152388 - RNA, 32 nt, Human
gaauaucccagaguaauuggaguuuuucuuua

SEQ ID NO: 152389 - RNA, 32 nt, Human
gaauaucccauugcccccuccuccacuggguu

SEQ ID NO: 152390 - RNA, 19 nt, Human
gaauaucccugcucugcug

SEQ ID NO: 152391 - RNA, 32 nt, Human
gaauauccuacuucuccagccuagagguacuu

SEQ ID NO: 152392 - RNA, 32 nt, Human
gaauauccuugccauuuauguuuccugcugua

SEQ ID NO: 152393 - RNA, 32 nt, Human
gaauaucugaguuccacugggguaaggggaug

SEQ ID NO: 152394 - RNA, 32 nt, Human
gaauaucugcagauggcccagaauggaagcuu

SEQ ID NO: 152395 - RNA, 32 nt, Human
gaauaucugggauuacagagacugaaaaacuu

SEQ ID NO: 152396 - RNA, 32 nt, Human
gaauaucuuuuuggcaccucauauccaagagg

SEQ ID NO: 152397 - RNA, 32 nt, Human
gaauaugaaagccuccuccaccuccaaacacc

SEQ ID NO: 152398 - RNA, 32 nt, Human
gaauaugaacagcuuuaaagagcuguguauug

SEQ ID NO: 152399 - RNA, 32 nt, Human
gaauaugagagaaaccuuuaugcaaauaugua

SEQ ID NO: 152400 - RNA, 32 nt, Human
gaauaugaguaugccagcugcauuagauguaa

SEQ ID NO: 152401 - RNA, 32 nt, Human
gaauaugcaacaacuccuguaccccaguccac

SEQ ID NO: 152402 - RNA, 32 nt, Human
gaauaugcaacaauaugccuucugggcugggg

SEQ ID NO: 152403 - RNA, 32 nt, Human
gaauaugcauaaucgugacaauacugcuuuug

SEQ ID NO: 152404 - RNA, 32 nt, Human
gaauaugcccaugugagcuaaauaagauaauu

SEQ ID NO: 152405 - RNA, 32 nt, Human
gaauaugccccaccacgaaacucagcccagua

SEQ ID NO: 152406 - RNA, 32 nt, Human
gaauaugcucacugcuaagcuacaaacucgga

SEQ ID NO: 152407 - RNA, 32 nt, Human
gaauaugcuguaaucuaauuuuggugaagaga

SEQ ID NO: 152408 - RNA, 32 nt, Human
gaauaugcuguggagcuccucugccauauaaa

SEQ ID NO: 152409 - RNA, 32 nt, Human
gaauauggacuggccaaaaguuauccuuacuc

SEQ ID NO: 152410 - RNA, 32 nt, Human
gaauauggcaaaacuuauugauccuacaagcu

SEQ ID NO: 152411 - RNA, 32 nt, Human
gaauaugggcaaagcuuuguuuggaguacaag

SEQ ID NO: 152412 - RNA, 32 nt, Human
gaauaugguuugaacaguucgcugucuuuggu

SEQ ID NO: 152413 - RNA, 32 nt, Human
gaauauguaucacauaugaugcagccuuucau

SEQ ID NO: 152414 - RNA, 32 nt, Human
gaauauguaucacuucagcugaguggcauaag

SEQ ID NO: 152415 - RNA, 32 nt, Human
gaauaugugaugcacuggaaauggcagaggcu

SEQ ID NO: 152416 - RNA, 32 nt, Human
gaauaugugguguuugguuuuugguccuugca

SEQ ID NO: 152417 - RNA, 32 nt, Human
gaauaugugucugacacagggccucccccacu

SEQ ID NO: 152418 - RNA, 32 nt, Human
gaauaugugugugaccuugcaguucuuccaca

SEQ ID NO: 152419 - RNA, 32 nt, Human
gaauauuaaagguuuggccugcuuuaucucuc

SEQ ID NO: 152420 - RNA, 32 nt, Human
gaauauuaauggucacuuuaaggagaaauuau

SEQ ID NO: 152421 - RNA, 32 nt, Human
gaauauuacuucuaucagaagaugaucaagau

SEQ ID NO: 152422 - RNA, 32 nt, Human
gaauauuccugugcccacacuuaaugucaauc

SEQ ID NO: 152423 - RNA, 32 nt, Human
gaauauucucacggagagaagccccagcgaga

SEQ ID NO: 152424 - RNA, 32 nt, Human
gaauauugaacuucuucuguaaaagagagaga

SEQ ID NO: 152425 - RNA, 32 nt, Human
gaauauugaagggccugacauggggaaaggga

SEQ ID NO: 152426 - RNA, 32 nt, Human
gaauauugcuuuggucauaugagcuuccuucu

SEQ ID NO: 152427 - RNA, 32 nt, Human
gaauauugugcuuuauuuagcagguguacuca

SEQ ID NO: 152428 - RNA, 32 nt, Human
gaauauuuaggaaauauaauugugccacacac

SEQ ID NO: 152429 - RNA, 32 nt, Human
gaauauuucuuuccucacuaccucucaaauau

SEQ ID NO: 152430 - RNA, 32 nt, Human
gaauauuugaaguuugggcuguccugaaaguc

SEQ ID NO: 152431 - RNA, 32 nt, Human
gaauauuuuagucaugaguuguuuucaguuuu

SEQ ID NO: 152432 - RNA, 22 nt, Human
gaauauuuuguuauacugugua

SEQ ID NO: 152433 - RNA, 21 nt, Human
gaauauuuuuaacacugugua

SEQ ID NO: 152434 - RNA, 32 nt, Human
gaaucaaaaagccaguguggauuuuuaggcug

SEQ ID NO: 152435 - RNA, 32 nt, Human
gaaucaaacaacauggggacugagggagggau

SEQ ID NO: 152436 - RNA, 32 nt, Human
gaaucaaagacccauuccuguuccucucccca

SEQ ID NO: 152437 - RNA, 22 nt, Human
gaaucaaauagccuuccagagg

SEQ ID NO: 152438 - RNA, 32 nt, Human
gaaucaaaugggugagaucagcuuugggccug

SEQ ID NO: 152439 - RNA, 32 nt, Human
gaaucaaauuuccagagguaaguggugaaagg

SEQ ID NO: 152440 - RNA, 32 nt, Human
gaaucaaccccaucaacaaaguucaaaucggg

SEQ ID NO: 152441 - RNA, 22 nt, Human
gaaucaacuggccuuccagagg

SEQ ID NO: 152442 - RNA, 32 nt, Human
gaaucaagaaaauucuguuucuuagcaacaga

SEQ ID NO: 152443 - RNA, 24 nt, Human
gaaucaagcacuaauaccaagaga

SEQ ID NO: 152444 - RNA, 32 nt, Human
gaaucaagccacugaggcagggcagagggacc

SEQ ID NO: 152445 - RNA, 32 nt, Human
gaaucaaggagcccccugaccccuucuuucaa

SEQ ID NO: 152446 - RNA, 23 nt, Human
gaaucaaguauggauuucagagg

SEQ ID NO: 152447 - RNA, 32 nt, Human
gaaucaagucacagugcuuccuuaacccaacc

SEQ ID NO: 152448 - RNA, 32 nt, Human
gaaucaaguccacccuucucaugugacagaug

SEQ ID NO: 152449 - RNA, 31 nt, Human
gaaucaagugagaauggaggaggugaagcuc

SEQ ID NO: 152450 - RNA, 32 nt, Human
gaaucaauaugcccuuucacaugccuuagacc

SEQ ID NO: 152451 - RNA, 32 nt, Human
gaaucaauggcagcaaagacagaaccaagguc

SEQ ID NO: 152452 - RNA, 32 nt, Human
gaaucaauucugagagggcagccccagggggu

SEQ ID NO: 152453 - RNA, 32 nt, Human
gaaucacaaccagcugcaauuccaggauggag

SEQ ID NO: 152454 - RNA, 32 nt, Human
gaaucacaccuguaaucccagcacuuugggau

SEQ ID NO: 152455 - RNA, 32 nt, Human
gaaucacaggagauauuuccagguuugcuggg

SEQ ID NO: 152456 - RNA, 32 nt, Human
gaaucacaugaucugaggaccauucauggaag

SEQ ID NO: 152457 - RNA, 32 nt, Human
gaaucacauuuaccauuacaccagcuuucauu

SEQ ID NO: 152458 - RNA, 32 nt, Human
gaaucacauuuuaguuuucugaugccacauag

SEQ ID NO: 152459 - RNA, 32 nt, Human
gaaucaccagaguucaagaguucaagaccagc

SEQ ID NO: 152460 - RNA, 21 nt, Human
gaaucaccaugccuagccacu

SEQ ID NO: 152461 - RNA, 32 nt, Human
gaaucacccaggccagacacaauggcucaugc

SEQ ID NO: 152462 - RNA, 32 nt, Human
gaaucaccccucugccccugcagcuggaaugu

SEQ ID NO: 152463 - RNA, 18 nt, Human
gaaucaccucuaauccca

SEQ ID NO: 152464 - RNA, 32 nt, Human
gaaucaccugggaggagaaggaauuguggcgg

SEQ ID NO: 152465 - RNA, 22 nt, Human
gaaucacgaaauuucuucugca

SEQ ID NO: 152466 - RNA, 32 nt, Human
gaaucacuccagacaggaaauuuucuauuuuu

SEQ ID NO: 152467 - RNA, 32 nt, Human
gaaucacuugcacuccggagguagagguugug

SEQ ID NO: 152468 - RNA, 32 nt, Human
gaaucagaacugccagggaagggaagggggac

SEQ ID NO: 152469 - RNA, 32 nt, Human
gaaucagaagacagagcuauuucagaggcucu

SEQ ID NO: 152470 - RNA, 32 nt, Human
gaaucagaagccccagaugucagaggguuaag

SEQ ID NO: 152471 - RNA, 32 nt, Human
gaaucagagacagcuagagcaagggcagacau

SEQ ID NO: 152472 - RNA, 32 nt, Human
gaaucagaggauggaaauagucugggaggugc

SEQ ID NO: 152473 - RNA, 32 nt, Human
gaaucagcagccaagaagcccaaaugggauga

SEQ ID NO: 152474 - RNA, 32 nt, Human
gaaucagcaggccucugugcucccucugcccu

SEQ ID NO: 152475 - RNA, 32 nt, Human
gaaucagcaguggacgugugagcuggggccuc

SEQ ID NO: 152476 - RNA, 32 nt, Human
gaaucagcaguuuuagaauuucagauaguacu

SEQ ID NO: 152477 - RNA, 32 nt, Human
gaaucagccaauauauuacugagacuuccucu

SEQ ID NO: 152478 - RNA, 32 nt, Human
gaaucagccagcucuuggcacacacagccagg

SEQ ID NO: 152479 - RNA, 32 nt, Human
gaaucagcucaguugucccagaugugugagaa

SEQ ID NO: 152480 - RNA, 32 nt, Human
gaaucagcugcugacuggcagggcuuugggca

SEQ ID NO: 152481 - RNA, 32 nt, Human
gaaucaggacacucaagcucuggcagaggaag

SEQ ID NO: 152482 - RNA, 32 nt, Human
gaaucaggacucuucugcaccugcuuuggcac

SEQ ID NO: 152483 - RNA, 24 nt, Human
gaaucaggcagggcgcauucgagg

SEQ ID NO: 152484 - RNA, 32 nt, Human
gaaucagggagaaagucccuccccagcagccc

SEQ ID NO: 152485 - RNA, 32 nt, Human
gaaucagggaggcggagguuguggugagccga

SEQ ID NO: 152486 - RNA, 27 nt, Human
gaaucagguauuggggccccucggagg

SEQ ID NO: 152487 - RNA, 32 nt, Human
gaaucaggucugcccuuuaucuugcccuuuuc

SEQ ID NO: 152488 - RNA, 32 nt, Human
gaaucaggugagccacagagcccaccccagac

SEQ ID NO: 152489 - RNA, 32 nt, Human
gaaucaguccccaaugccuggaaauuccucau

SEQ ID NO: 152490 - RNA, 32 nt, Human
gaaucagugaaauaugguaauguauuauuuuc

SEQ ID NO: 152491 - RNA, 32 nt, Human
gaaucagugauggaggccaggcacgguaucuc

SEQ ID NO: 152492 - RNA, 32 nt, Human
gaaucaguguuauccuggaacuguuauucuau

SEQ ID NO: 152493 - RNA, 32 nt, Human
gaaucaguuccaacccccacucuccuuaggcu

SEQ ID NO: 152494 - RNA, 32 nt, Human
gaaucaguucucuaauauuuuaccucauuugu

SEQ ID NO: 152495 - RNA, 32 nt, Human
gaaucaguuuaaaagauccaaggaguacaaaa

SEQ ID NO: 152496 - RNA, 32 nt, Human
gaaucauaaaguggaacagaguccccagaacu

SEQ ID NO: 152497 - RNA, 32 nt, Human
gaaucauaauuuaaaaacaaggucugaccagg

SEQ ID NO: 152498 - RNA, 32 nt, Human
gaaucauaggaauaugcucucacaggagauaa

SEQ ID NO: 152499 - RNA, 32 nt, Human
gaaucauauuuauugauuugcauauguugaac

SEQ ID NO: 152500 - RNA, 32 nt, Human
gaaucaucaaagcucacaccaaauuuuucuau

SEQ ID NO: 152501 - RNA, 31 nt, Human
gaaucaucaagucuuucacauuuaaauaaag

SEQ ID NO: 152502 - RNA, 32 nt, Human
gaaucaucacuuauuucucugccaccugguuu

SEQ ID NO: 152503 - RNA, 32 nt, Human
gaaucaucaguaugucacuuccuaauuucuau

SEQ ID NO: 152504 - RNA, 32 nt, Human
gaaucaucgugugaugugugugcugccuuugg

SEQ ID NO: 152505 - RNA, 32 nt, Human
gaaucaucuccucuguggucuugcccaguacc

SEQ ID NO: 152506 - RNA, 32 nt, Human
gaaucaucucugaaaugaagcagguguagccu

SEQ ID NO: 152507 - RNA, 32 nt, Human
gaaucaucuuccccacacauaaucauucauau

SEQ ID NO: 152508 - RNA, 32 nt, Human
gaaucauggaaaagauaaagauucaagacgga

SEQ ID NO: 152509 - RNA, 32 nt, Human
gaaucaugggccuaccagauugccugccagag

SEQ ID NO: 152510 - RNA, 32 nt, Human
gaaucaugucaggccugugugugaaaggaagc

SEQ ID NO: 152511 - RNA, 32 nt, Human
gaaucaugugccagcuucaucuguucucaauu

SEQ ID NO: 152512 - RNA, 32 nt, Human
gaaucauguuaaaaaucaagguuuggcuucag

SEQ ID NO: 152513 - RNA, 32 nt, Human
gaaucauugcagggcaggcuguuacuggcuaa

SEQ ID NO: 152514 - RNA, 23 nt, Human
gaaucauuucuauuucuccucca

SEQ ID NO: 152515 - RNA, 32 nt, Human
gaaucauuugagcucaggaggcagagguugca

SEQ ID NO: 152516 - RNA, 32 nt, Human
gaauccaagaguggggaguggggaagaggccc

SEQ ID NO: 152517 - RNA, 32 nt, Human
gaauccaaugcagaguugguuugggacuguga

SEQ ID NO: 152518 - RNA, 32 nt, Human
gaauccacaaagagaagagggcuuggauguca

SEQ ID NO: 152519 - RNA, 20 nt, Human
gaauccacaccaccccaccc

SEQ ID NO: 152520 - RNA, 32 nt, Human
gaauccacucuccagucucccuccccugacuc

SEQ ID NO: 152521 - RNA, 32 nt, Human
gaauccacuuccuucucgcaggaccagaugug

SEQ ID NO: 152522 - RNA, 32 nt, Human
gaauccacuucugcauuuuccuucucucaagu

SEQ ID NO: 152523 - RNA, 32 nt, Human
gaauccagaaggcggagguugcagugagcuga

SEQ ID NO: 152524 - RNA, 22 nt, Human
gaauccagaccccucucacuca

SEQ ID NO: 152525 - RNA, 19 nt, Human
gaauccagacuggcaccca

SEQ ID NO: 152526 - RNA, 32 nt, Human
gaauccagagccagagaggugauauuggugca

SEQ ID NO: 152527 - RNA, 32 nt, Human
gaauccagccaggcaguuuucccuucagcacc

SEQ ID NO: 152528 - RNA, 32 nt, Human
gaauccagcggcgucuggccuccugggcacug

SEQ ID NO: 152529 - RNA, 32 nt, Human
gaauccagcuuuguugguaucuccuuuauuaa

SEQ ID NO: 152530 - RNA, 32 nt, Human
gaauccaggaagagaaacugacugggcaacau

SEQ ID NO: 152531 - RNA, 32 nt, Human
gaauccaggaagagaaacuggcugggcaacau

SEQ ID NO: 152532 - RNA, 32 nt, Human
gaauccaggaagagagacugacugggcaacau

SEQ ID NO: 152533 - RNA, 24 nt, Human
gaauccaggaagcagagguugcgg

SEQ ID NO: 152534 - RNA, 32 nt, Human
gaauccaggaagcagagguugcggugagccga

SEQ ID NO: 152535 - RNA, 32 nt, Human
gaauccaggacucacacccaggacaagcaaag

SEQ ID NO: 152536 - RNA, 32 nt, Human
gaauccaggaggaggagguugcagugagccga

SEQ ID NO: 152537 - RNA, 32 nt, Human
gaauccaggaggcagagcuugcagugagcuga

SEQ ID NO: 152538 - RNA, 32 nt, Human
gaauccaggaggcagaggcuguggugagccaa

SEQ ID NO: 152539 - RNA, 23 nt, Human
gaauccaggaggcagagguugca

SEQ ID NO: 152540 - RNA, 32 nt, Human
gaauccaggaggcagagguugcaaugagccaa

SEQ ID NO: 152541 - RNA, 24 nt, Human
gaauccaggaggcagagguugcag

SEQ ID NO: 152542 - RNA, 32 nt, Human
gaauccaggaggcagagguugcagugagugga

SEQ ID NO: 152543 - RNA, 32 nt, Human
gaauccaggaggcgaagguugcagugagcuga

SEQ ID NO: 152544 - RNA, 32 nt, Human
gaauccaggaggcggagguugcagugaaccaa

SEQ ID NO: 152545 - RNA, 32 nt, Human
gaauccaggaggcggagguugcagugagccga

SEQ ID NO: 152546 - RNA, 32 nt, Human
gaauccaggaggcggaguuuguggugaguuga

SEQ ID NO: 152547 - RNA, 32 nt, Human
gaauccaggagguaaagaugcugugagccgag

SEQ ID NO: 152548 - RNA, 32 nt, Human
gaauccaggagguggagccugcagugagccaa

SEQ ID NO: 152549 - RNA, 32 nt, Human
gaauccaggagguggagcuugcagugagccga

SEQ ID NO: 152550 - RNA, 32 nt, Human
gaauccaggagguggagguugcagcgagccaa

SEQ ID NO: 152551 - RNA, 32 nt, Human
gaauccaggagguggagguugcagugagcuga

SEQ ID NO: 152552 - RNA, 32 nt, Human
gaauccaggaguucgaagccagccugggcaac

SEQ ID NO: 152553 - RNA, 32 nt, Human
gaauccaggcauuugagaccagccuggguaac

SEQ ID NO: 152554 - RNA, 23 nt, Human
gaauccaggccccaucuccccca

SEQ ID NO: 152555 - RNA, 23 nt, Human
gaauccaggcuauggaccuccca

SEQ ID NO: 152556 - RNA, 32 nt, Human
gaauccaggcugaggauggaagguguggaacu

SEQ ID NO: 152557 - RNA, 32 nt, Human
gaauccaggcugcugcucaucauaguccuguu

SEQ ID NO: 152558 - RNA, 19 nt, Human
gaauccaggggcuauagcg

SEQ ID NO: 152559 - RNA, 32 nt, Human
gaauccagguggcggagguugcagugagccga

SEQ ID NO: 152560 - RNA, 32 nt, Human
gaauccagguugaagggucaccagagugaugg

SEQ ID NO: 152561 - RNA, 32 nt, Human
gaauccagugaacaagaaagucuuuaucucuu

SEQ ID NO: 152562 - RNA, 32 nt, Human
gaauccagugguggagguugcagugagccaag

SEQ ID NO: 152563 - RNA, 32 nt, Human
gaauccaguguucacaacuagaauaaauaccu

SEQ ID NO: 152564 - RNA, 32 nt, Human
gaauccaguguucacauucacacuuaaugacu

SEQ ID NO: 152565 - RNA, 32 nt, Human
gaauccaguuucuuuccccagcaguuucuguc

SEQ ID NO: 152566 - RNA, 32 nt, Human
gaauccaguuuguggugaaccucuuuggaagg

SEQ ID NO: 152567 - RNA, 32 nt, Human
gaauccauaaugcucccuacaucucacacuaa

SEQ ID NO: 152568 - RNA, 32 nt, Human
gaauccaucuuggccugaaagcagagguacaa

SEQ ID NO: 152569 - RNA, 32 nt, Human
gaauccaugagggacacagagagaggggacca

SEQ ID NO: 152570 - RNA, 17 nt, Human
gaauccaugccugugua

SEQ ID NO: 152571 - RNA, 31 nt, Human
gaauccauggccguagagcacuucuaagcag

SEQ ID NO: 152572 - RNA, 32 nt, Human
gaaucccaacacuuugggaggcugaggcaggu

SEQ ID NO: 152573 - RNA, 32 nt, Human
gaaucccaaggcagcgaaggaggccaaggaug

SEQ ID NO: 152574 - RNA, 32 nt, Human
gaaucccacaaacacaaccaguuccuaaggug

SEQ ID NO: 152575 - RNA, 32 nt, Human
gaaucccacaaacguacgugggagcugguugu

SEQ ID NO: 152576 - RNA, 32 nt, Human
gaaucccaccugccuguauaccccagacuugc

SEQ ID NO: 152577 - RNA, 32 nt, Human
gaaucccacugcaauggacccaggcagcgccc

SEQ ID NO: 152578 - RNA, 32 nt, Human
gaaucccagaaacuuccaucucagguccuucc

SEQ ID NO: 152579 - RNA, 32 nt, Human
gaaucccagaggagucucucccugugcccaca

SEQ ID NO: 152580 - RNA, 32 nt, Human
gaaucccagcacugugggaggccgaggcgggc

SEQ ID NO: 152581 - RNA, 32 nt, Human
gaaucccagcacuucaggaggccgagguggga

SEQ ID NO: 152582 - RNA, 32 nt, Human
gaaucccagcacuuugggaagccgaggugggc

SEQ ID NO: 152583 - RNA, 32 nt, Human
gaaucccagcacuuugggaggccgaggugggc

SEQ ID NO: 152584 - RNA, 32 nt, Human
gaaucccagcacuuugggaggccgaggugggu

SEQ ID NO: 152585 - RNA, 32 nt, Human
gaaucccagcagaggggauguugcagcuguga

SEQ ID NO: 152586 - RNA, 32 nt, Human
gaaucccagcuacucagaagguugagacaaag

SEQ ID NO: 152587 - RNA, 32 nt, Human
gaaucccagcuacuugagaggcugaggcacga

SEQ ID NO: 152588 - RNA, 32 nt, Human
gaaucccagcugacucgcucacugccuucgaa

SEQ ID NO: 152589 - RNA, 32 nt, Human
gaaucccagcugcucgggaggcugaggcagga

SEQ ID NO: 152590 - RNA, 25 nt, Human
gaaucccaggagacagagguugcag

SEQ ID NO: 152591 - RNA, 32 nt, Human
gaaucccaggagacagagguugcagugagccg

SEQ ID NO: 152592 - RNA, 32 nt, Human
gaaucccaucaucgcgugcacaucucauccca

SEQ ID NO: 152593 - RNA, 32 nt, Human
gaaucccaugcagugauuccaggauuugaaau

SEQ ID NO: 152594 - RNA, 32 nt, Human
gaauccccaguggaaccggaagagcuggacug

SEQ ID NO: 152595 - RNA, 32 nt, Human
gaauccccauggagcucagagcagagcugcau

SEQ ID NO: 152596 - RNA, 32 nt, Human
gaaucccccaaagaaccaggguauucuuuuuc

SEQ ID NO: 152597 - RNA, 32 nt, Human
gaauccccgaggcggagguugcacugagccga

SEQ ID NO: 152598 - RNA, 32 nt, Human
gaauccccuccagauuccuguccuggccccug

SEQ ID NO: 152599 - RNA, 32 nt, Human
gaauccccuggaagcccacagagacagagaca

SEQ ID NO: 152600 - RNA, 32 nt, Human
gaaucccggaggcagaggccaugcugaccgca

SEQ ID NO: 152601 - RNA, 32 nt, Human
gaaucccgugcucuccucucuuuugguggagg

SEQ ID NO: 152602 - RNA, 32 nt, Human
gaaucccucuuucaugagaagucuuuuggaua

SEQ ID NO: 152603 - RNA, 32 nt, Human
gaaucccugagauaugugaagaacugauggca

SEQ ID NO: 152604 - RNA, 24 nt, Human
gaaucccugaggcagagguugcag

SEQ ID NO: 152605 - RNA, 32 nt, Human
gaaucccugaggcagagguugcagugagcuga

SEQ ID NO: 152606 - RNA, 32 nt, Human
gaaucccugagugcccucugccccuucuggca

SEQ ID NO: 152607 - RNA, 32 nt, Human
gaaucccugcugcuuggggaggccccaagggc

SEQ ID NO: 152608 - RNA, 32 nt, Human
gaaucccuggcuuuuggggcacaacauccugg

SEQ ID NO: 152609 - RNA, 32 nt, Human
gaaucccugggcaaagauuuccucacuggugu

SEQ ID NO: 152610 - RNA, 32 nt, Human
gaaucccuucucaguggccagcagguuccugg

SEQ ID NO: 152611 - RNA, 32 nt, Human
gaaucccuugcucuccccuggaguugucccag

SEQ ID NO: 152612 - RNA, 24 nt, Human
gaauccgaguccaguuauggccgc

SEQ ID NO: 152613 - RNA, 25 nt, Human
gaauccgaucaugcaccuguccuca

SEQ ID NO: 152614 - RNA, 32 nt, Human
gaauccgcacucacaaaagcacaggaugcugg

SEQ ID NO: 152615 - RNA, 22 nt, Human
gaauccgccugcagaggacaga

SEQ ID NO: 152616 - RNA, 32 nt, Human
gaauccggauugcugaaucuucccuguugccu

SEQ ID NO: 152617 - RNA, 32 nt, Human
gaauccgggaagcagagguuguagugagccaa

SEQ ID NO: 152618 - RNA, 32 nt, Human
gaauccgggagaugcauguugcagugagcuga

SEQ ID NO: 152619 - RNA, 32 nt, Human
gaauccgggaggcagagauugcagugggccua

SEQ ID NO: 152620 - RNA, 24 nt, Human
gaauccgggaggcagagguugcag

SEQ ID NO: 152621 - RNA, 32 nt, Human
gaauccgggaggcagagguugcaggagcugag

SEQ ID NO: 152622 - RNA, 32 nt, Human
gaauccgggaggcggagcuugcagcgagccgg

SEQ ID NO: 152623 - RNA, 32 nt, Human
gaauccgggaggcggagguugcagugaaccga

SEQ ID NO: 152624 - RNA, 32 nt, Human
gaauccgggaggcggagguugcggugagccaa

SEQ ID NO: 152625 - RNA, 32 nt, Human
gaauccgggaggcgggucuugcagugagcaga

SEQ ID NO: 152626 - RNA, 32 nt, Human
gaauccgggagguggagguugcagugagccaa

SEQ ID NO: 152627 - RNA, 32 nt, Human
gaauccgggguaugagcccaggagaacgugcu

SEQ ID NO: 152628 - RNA, 32 nt, Human
gaauccgugagguggagguuguagugagucaa

SEQ ID NO: 152629 - RNA, 32 nt, Human
gaauccuagcacuuugggaggcugagguagga

SEQ ID NO: 152630 - RNA, 32 nt, Human
gaauccuagcuacucaggaggcuguggcagag

SEQ ID NO: 152631 - RNA, 24 nt, Human
gaauccuaggcuccaccccaucca

SEQ ID NO: 152632 - RNA, 32 nt, Human
gaauccuaguuugcuaaccugcauuugugugc

SEQ ID NO: 152633 - RNA, 32 nt, Human
gaauccuauuccccacaguucccaccacagug

SEQ ID NO: 152634 - RNA, 32 nt, Human
gaauccuauugauuauucaaaaauucaggcug

SEQ ID NO: 152635 - RNA, 32 nt, Human
gaauccucaaagauugguuuguuuguuuuuaa

SEQ ID NO: 152636 - RNA, 20 nt, Human
gaauccucaucuuccugccc

SEQ ID NO: 152637 - RNA, 32 nt, Human
gaauccuccaugcaaaucauggagucuguguc

SEQ ID NO: 152638 - RNA, 32 nt, Human
gaauccucccccaacgcccacuggagagauga

SEQ ID NO: 152639 - RNA, 32 nt, Human
gaauccucuggccucuggcuuuucuugauauu

SEQ ID NO: 152640 - RNA, 32 nt, Human
gaauccucuggggagcucuucacaauguagau

SEQ ID NO: 152641 - RNA, 32 nt, Human
gaauccucuguggaugacggcgccacugccac

SEQ ID NO: 152642 - RNA, 32 nt, Human
gaauccucuuuccuccccauuuggcccugggc

SEQ ID NO: 152643 - RNA, 32 nt, Human
gaauccugaggaccuggagugcaaugagaaug

SEQ ID NO: 152644 - RNA, 32 nt, Human
gaauccugcaaaccaccuucuccaaucacaau

SEQ ID NO: 152645 - RNA, 32 nt, Human
gaauccugcacugccaccuggcuauagcuaca

SEQ ID NO: 152646 - RNA, 32 nt, Human
gaauccugcccuuuccaaaaggaagacgguau

SEQ ID NO: 152647 - RNA, 32 nt, Human
gaauccuggaaccccuucccagggagagccuu

SEQ ID NO: 152648 - RNA, 32 nt, Human
gaauccuggagcaucucagacuugaacacaca

SEQ ID NO: 152649 - RNA, 32 nt, Human
gaauccuggaggaggaaauaaagggaaaggga

SEQ ID NO: 152650 - RNA, 24 nt, Human
gaauccuggaggcagagguugcag

SEQ ID NO: 152651 - RNA, 32 nt, Human
gaauccuggaggcagagguugcagugagcuga

SEQ ID NO: 152652 - RNA, 32 nt, Human
gaauccuggggcagggcacuugcaguacaugu

SEQ ID NO: 152653 - RNA, 32 nt, Human
gaauccuguguaugugcuuuugugucguuuuu

SEQ ID NO: 152654 - RNA, 32 nt, Human
gaauccuuccuggcggccgccugcugcccuga

SEQ ID NO: 152655 - RNA, 32 nt, Human
gaauccuucucccugccuaccugcagcaucuc

SEQ ID NO: 152656 - RNA, 25 nt, Human
gaauccuuuuccucuuuuccuuccu

SEQ ID NO: 152657 - RNA, 32 nt, Human
gaaucgaaggauggggagucugagggagaggc

SEQ ID NO: 152658 - RNA, 32 nt, Human
gaaucgaaguuuuucaaauccauugcuuagcu

SEQ ID NO: 152659 - RNA, 32 nt, Human
gaaucgaugccacggauugcaggccaaauuuc

SEQ ID NO: 152660 - RNA, 32 nt, Human
gaaucgcuggaagcugcaucugaaaaguauuc

SEQ ID NO: 152661 - RNA, 32 nt, Human
gaaucgcuugaacccaggaggcagugauugca

SEQ ID NO: 152662 - RNA, 32 nt, Human
gaaucgcuugaacucagaaggcggagguucca

SEQ ID NO: 152663 - RNA, 32 nt, Human
gaaucgcuugagcucaggaguucgagaccagc

SEQ ID NO: 152664 - RNA, 32 nt, Human
gaaucgcuugagcuggagugcaguggugcaau

SEQ ID NO: 152665 - RNA, 32 nt, Human
gaaucggcucccugccuuuucuagcuucuggg

SEQ ID NO: 152666 - RNA, 32 nt, Human
gaaucgggaagggagcccucaccagaacccag

SEQ ID NO: 152667 - RNA, 24 nt, Human
gaaucgggcgggaucacccggggg

SEQ ID NO: 152668 - RNA, 24 nt, Human
gaaucggggaggcagagcuugcag

SEQ ID NO: 152669 - RNA, 32 nt, Human
gaaucggggaggcagagcuugcagucagccga

SEQ ID NO: 152670 - RNA, 32 nt, Human
gaaucgguugcagaagaucaugggcaucuccc

SEQ ID NO: 152671 - RNA, 32 nt, Human
gaaucgugccacuccacuccagccugggcaac

SEQ ID NO: 152672 - RNA, 32 nt, Human
gaaucguggcuggcccgguucuccgcuucucc

SEQ ID NO: 152673 - RNA, 32 nt, Human
gaaucuaaaccccuacauuaaagcuuugccuc

SEQ ID NO: 152674 - RNA, 32 nt, Human
gaaucuaacucaugccuguccagucuacagca

SEQ ID NO: 152675 - RNA, 32 nt, Human
gaaucuaagaagcagagguugcagugagcuga

SEQ ID NO: 152676 - RNA, 32 nt, Human
gaaucuaagcauagaaaaggcacagcaaaaac

SEQ ID NO: 152677 - RNA, 32 nt, Human
gaaucuaagggaagaucacuguaguuuagcuc

SEQ ID NO: 152678 - RNA, 32 nt, Human
gaaucuaaggugaacgagauaauugggagaga

SEQ ID NO: 152679 - RNA, 32 nt, Human
gaaucuaaugacuggcaucugagaacccagag

SEQ ID NO: 152680 - RNA, 32 nt, Human
gaaucuaggacaugcagacucacugugagcga

SEQ ID NO: 152681 - RNA, 32 nt, Human
gaaucuaggaggcagagguugcagugaacuga

SEQ ID NO: 152682 - RNA, 32 nt, Human
gaaucuauuuuucuucagacugaggccuuuug

SEQ ID NO: 152683 - RNA, 32 nt, Human
gaaucucaauaaaccagugaacagugugacuc

SEQ ID NO: 152684 - RNA, 32 nt, Human
gaaucucacucuuucacccagacuggagggca

SEQ ID NO: 152685 - RNA, 32 nt, Human
gaaucucagacacacaugacgcaccaguuaca

SEQ ID NO: 152686 - RNA, 32 nt, Human
gaaucucagccaucagcccaagugcuuguuuu

SEQ ID NO: 152687 - RNA, 32 nt, Human
gaaucucaucaucuccuaauaucugcagaggg

SEQ ID NO: 152688 - RNA, 32 nt, Human
gaaucucaucccucaacugagggccagggaca

SEQ ID NO: 152689 - RNA, 32 nt, Human
gaaucuccaaccuccgccagcagcaaccgaac

SEQ ID NO: 152690 - RNA, 32 nt, Human
gaaucuccaccugguuuagccugcugccucca

SEQ ID NO: 152691 - RNA, 32 nt, Human
gaaucuccagaagucacagaggcccugggcac

SEQ ID NO: 152692 - RNA, 32 nt, Human
gaaucuccaggcguuccuuucuuucugcccua

SEQ ID NO: 152693 - RNA, 32 nt, Human
gaaucuccaugccaagugaaaaaggccuaaag

SEQ ID NO: 152694 - RNA, 32 nt, Human
gaaucucccagccaggccaacauggugaaacc

SEQ ID NO: 152695 - RNA, 32 nt, Human
gaaucucccaucucugaaacaggcgugaaaac

SEQ ID NO: 152696 - RNA, 32 nt, Human
gaaucuccgcugccucuccagcccuuuugcag

SEQ ID NO: 152697 - RNA, 32 nt, Human
gaaucuccuccccuaccaccauucccccuccc

SEQ ID NO: 152698 - RNA, 32 nt, Human
gaaucuccucuacagauuuuugcugccccuuu

SEQ ID NO: 152699 - RNA, 32 nt, Human
gaaucuccugggaaucuaucccuaaggaguaa

SEQ ID NO: 152700 - RNA, 32 nt, Human
gaaucucgcucugcacuccagccuaggugaca

SEQ ID NO: 152701 - RNA, 32 nt, Human
gaaucucgggaggcagagguugcagugagccg

SEQ ID NO: 152702 - RNA, 32 nt, Human
gaaucucguacaacucucccuggaccacuucc

SEQ ID NO: 152703 - RNA, 32 nt, Human
gaaucucuaagacuggguagcucacagccagc

SEQ ID NO: 152704 - RNA, 32 nt, Human
gaaucucucagcgaccaggugcugcugcugga

SEQ ID NO: 152705 - RNA, 32 nt, Human
gaaucucuccaccucaucguaucuaaggauaa

SEQ ID NO: 152706 - RNA, 32 nt, Human
gaaucucucucccucacucccaaaaccuggca

SEQ ID NO: 152707 - RNA, 32 nt, Human
gaaucucuuccugcaauggcuuuuaguucuag

SEQ ID NO: 152708 - RNA, 32 nt, Human
gaaucucuugaacccaggggguggagguugca

SEQ ID NO: 152709 - RNA, 32 nt, Human
gaaucucuugaaccugggagguggaagcugca

SEQ ID NO: 152710 - RNA, 32 nt, Human
gaaucucuugagcucaggaggcagagguugca

SEQ ID NO: 152711 - RNA, 32 nt, Human
gaaucugaaagaacaacuuaggggucaguucu

SEQ ID NO: 152712 - RNA, 32 nt, Human
gaaucugaacaacagucuucagcccuagacuu

SEQ ID NO: 152713 - RNA, 32 nt, Human
gaaucugaacagcagcccuugagucugagauu

SEQ ID NO: 152714 - RNA, 32 nt, Human
gaaucugacuggcugauucugucuccuccccu

SEQ ID NO: 152715 - RNA, 32 nt, Human
gaaucugagagauggaggcugcagugagccga

SEQ ID NO: 152716 - RNA, 32 nt, Human
gaaucugaggcagaggagggugaggccugugu

SEQ ID NO: 152717 - RNA, 32 nt, Human
gaaucugaggcaucagucuucaucuuagggga

SEQ ID NO: 152718 - RNA, 32 nt, Human
gaaucugauaaauagcucuaaauacuaaugau

SEQ ID NO: 152719 - RNA, 31 nt, Human
gaaucugaucucucuggagcucaguguccuc

SEQ ID NO: 152720 - RNA, 32 nt, Human
gaaucugauuccccucccuugaaucagggcug

SEQ ID NO: 152721 - RNA, 23 nt, Human
gaaucugauuuucuguugcgugu

SEQ ID NO: 152722 - RNA, 32 nt, Human
gaaucugcaauguuguugagugugaaucuuag

SEQ ID NO: 152723 - RNA, 32 nt, Human
gaaucugcauuuaggccugacaaggaugcaau

SEQ ID NO: 152724 - RNA, 32 nt, Human
gaaucugccacuuucucccagagcugcugguc

SEQ ID NO: 152725 - RNA, 32 nt, Human
gaaucugccaugagucccagggagucacacuc

SEQ ID NO: 152726 - RNA, 32 nt, Human
gaaucugcccagaguccagcugcugcucauac

SEQ ID NO: 152727 - RNA, 32 nt, Human
gaaucugccccagaggaacacacccacaccag

SEQ ID NO: 152728 - RNA, 32 nt, Human
gaaucugcucucccagcucacacacuccccug

SEQ ID NO: 152729 - RNA, 32 nt, Human
gaaucuggaauccagcccauguuuccccauca

SEQ ID NO: 152730 - RNA, 32 nt, Human
gaaucuggagccuccucugggguggggagagg

SEQ ID NO: 152731 - RNA, 32 nt, Human
gaaucuggccuggaucuuagagcccagccccc

SEQ ID NO: 152732 - RNA, 24 nt, Human
gaaucugggaagcggagguugcag

SEQ ID NO: 152733 - RNA, 32 nt, Human
gaaucugggaagcggagguugcagugagcuga

SEQ ID NO: 152734 - RNA, 32 nt, Human
gaaucugggaauggauuccacuacagugauau

SEQ ID NO: 152735 - RNA, 22 nt, Human
gaaucugggaggcagagguugc

SEQ ID NO: 152736 - RNA, 24 nt, Human
gaaucugggaggcagagguugcag

SEQ ID NO: 152737 - RNA, 32 nt, Human
gaaucugggaggcagagguugcagugagccga

SEQ ID NO: 152738 - RNA, 32 nt, Human
gaaucugggaggcagagguugcagugagcuga

SEQ ID NO: 152739 - RNA, 32 nt, Human
gaaucugggaggcagagguugcugugagccga

SEQ ID NO: 152740 - RNA, 24 nt, Human
gaaucugggaggcggagauugcag

SEQ ID NO: 152741 - RNA, 32 nt, Human
gaaucugggaggcggagauugcagugagccga

SEQ ID NO: 152742 - RNA, 24 nt, Human
gaaucugggaggcggagguugcag

SEQ ID NO: 152743 - RNA, 32 nt, Human
gaaucugggaggcggagguugcagugagccag

SEQ ID NO: 152744 - RNA, 32 nt, Human
gaaucugggagguggagguugcagugagccaa

SEQ ID NO: 152745 - RNA, 32 nt, Human
gaaucugggccaccccagcaguauuuuuauuu

SEQ ID NO: 152746 - RNA, 32 nt, Human
gaaucugggggccaggcuggaggcagggaugg

SEQ ID NO: 152747 - RNA, 23 nt, Human
gaaucugguaccaucugugcuuu

SEQ ID NO: 152748 - RNA, 32 nt, Human
gaaucuggugccuguuccacuagagacaaggg

SEQ ID NO: 152749 - RNA, 23 nt, Human
gaaucugguuuaaauggcauugu

SEQ ID NO: 152750 - RNA, 22 nt, Human
gaaucugguuuaugugacucug

SEQ ID NO: 152751 - RNA, 24 nt, Human
gaaucugguuuuucugugcuuugu

SEQ ID NO: 152752 - RNA, 20 nt, Human
gaaucuguagcugugcuuug

SEQ ID NO: 152753 - RNA, 32 nt, Human
gaaucuguagcuuguugaaaaagcugggggug

SEQ ID NO: 152754 - RNA, 32 nt, Human
gaaucugucacccaggcuggagugcaguggca

SEQ ID NO: 152755 - RNA, 32 nt, Human
gaaucugugacccagagggcaaugaaagccaa

SEQ ID NO: 152756 - RNA, 21 nt, Human
gaaucugugcaaaugugcagg

SEQ ID NO: 152757 - RNA, 32 nt, Human
gaaucugugcagucaucaacaaaagggagaac

SEQ ID NO: 152758 - RNA, 32 nt, Human
gaaucugugccacccggcacuaccauuucgag

SEQ ID NO: 152759 - RNA, 32 nt, Human
gaaucuguggcuggaugcaguggcucgugccu

SEQ ID NO: 152760 - RNA, 32 nt, Human
gaaucuuaaggagugugguaaauaugugcucc

SEQ ID NO: 152761 - RNA, 32 nt, Human
gaaucuuaguccauuuacauugccuuggcuag

SEQ ID NO: 152762 - RNA, 32 nt, Human
gaaucuuaguuuuaguggcuuuugccauuuga

SEQ ID NO: 152763 - RNA, 32 nt, Human
gaaucuuaucaaaugcccccagucccaggggu

SEQ ID NO: 152764 - RNA, 21 nt, Human
gaaucuuaucugcugcuuugu

SEQ ID NO: 152765 - RNA, 32 nt, Human
gaaucuuauuuggaaauuacagauacugccau

SEQ ID NO: 152766 - RNA, 32 nt, Human
gaaucuuccaacuuuagaggugcaauggaaga

SEQ ID NO: 152767 - RNA, 32 nt, Human
gaaucuucugaggccucagcauuuuaucugag

SEQ ID NO: 152768 - RNA, 31 nt, Human
gaaucuucugauagagaaaaagacugcuuug

SEQ ID NO: 152769 - RNA, 32 nt, Human
gaaucuucuggagaaaaaggugccaucucagg

SEQ ID NO: 152770 - RNA, 32 nt, Human
gaaucuugacauguggggucugucuuugagaa

SEQ ID NO: 152771 - RNA, 32 nt, Human
gaaucuugcagcaacaucacuaaccacauccc

SEQ ID NO: 152772 - RNA, 32 nt, Human
gaaucuugccagaaaaacgggauuucagggcc

SEQ ID NO: 152773 - RNA, 32 nt, Human
gaaucuugccuuucccuuucagagccccaggg

SEQ ID NO: 152774 - RNA, 32 nt, Human
gaaucuugggcaugccuuucuguaaccaaaaa

SEQ ID NO: 152775 - RNA, 32 nt, Human
gaaucuuuaugacucucucucuuucucucuuu

SEQ ID NO: 152776 - RNA, 32 nt, Human
gaaucuuuccuuccucucauccuuuucuccua

SEQ ID NO: 152777 - RNA, 32 nt, Human
gaaucuuuuggaacuccuuugaucucacuguu

SEQ ID NO: 152778 - RNA, 22 nt, Human
gaaucuuuuuaggccaccucca

SEQ ID NO: 152779 - RNA, 20 nt, Human
gaaucuuuuugccuccacca

SEQ ID NO: 152780 - RNA, 32 nt, Human
gaaugaaaaauuagaacaacagaaacauggaa

SEQ ID NO: 152781 - RNA, 32 nt, Human
gaaugaaaaauuagaacaacagaaacaugguu

SEQ ID NO: 152782 - RNA, 24 nt, Human
gaaugaaaacaacuucaaguucau

SEQ ID NO: 152783 - RNA, 32 nt, Human
gaaugaaaagccuguggaauuccaugugggcc

SEQ ID NO: 152784 - RNA, 32 nt, Human
gaaugaaacacacacauccacagaaacagaga

SEQ ID NO: 152785 - RNA, 27 nt, Human
gaaugaaaccaauguugaaagacuuuu

SEQ ID NO: 152786 - RNA, 32 nt, Human
gaaugaaagaguaaccugucccagaggagagg

SEQ ID NO: 152787 - RNA, 32 nt, Human
gaaugaaaggaacauggagcugauccaggaca

SEQ ID NO: 152788 - RNA, 32 nt, Human
gaaugaaaggagaaagagguugagggauagug

SEQ ID NO: 152789 - RNA, 32 nt, Human
gaaugaacaauucacaugucuaccacaagucu

SEQ ID NO: 152790 - RNA, 32 nt, Human
gaaugaacaccuuuucauccagccuuaauuuc

SEQ ID NO: 152791 - RNA, 32 nt, Human
gaaugaacauuuaagaacugaggaaucauaga

SEQ ID NO: 152792 - RNA, 32 nt, Human
gaaugaaccggauuugguggugguuuuguuuc

SEQ ID NO: 152793 - RNA, 32 nt, Human
gaaugaaccugccugauucuccacuuucucug

SEQ ID NO: 152794 - RNA, 32 nt, Human
gaaugaacuuguguccaucccagagaucacug

SEQ ID NO: 152795 - RNA, 32 nt, Human
gaaugaagacuuguccuauaguacauacaggg

SEQ ID NO: 152796 - RNA, 32 nt, Human
gaaugaagaggaagagaugaggaguggggguc

SEQ ID NO: 152797 - RNA, 32 nt, Human
gaaugaagauauuaaaaacagaagcaaauuau

SEQ ID NO: 152798 - RNA, 32 nt, Human
gaaugaaggaagagcccucagauggaacgaaa

SEQ ID NO: 152799 - RNA, 32 nt, Human
gaaugaaggugguggcggcagaggaggagggc

SEQ ID NO: 152800 - RNA, 32 nt, Human
gaaugaagugugaucagccacuuguggaauuc

SEQ ID NO: 152801 - RNA, 32 nt, Human
gaaugaauauguuuccccaucuugugcccuuu

SEQ ID NO: 152802 - RNA, 32 nt, Human
gaaugaauauuuuucuaggagaagaaccucuu

SEQ ID NO: 152803 - RNA, 32 nt, Human
gaaugaaugcaucagggacuccugcuuccugc

SEQ ID NO: 152804 - RNA, 32 nt, Human
gaaugaauuggucacugcaucuuguaucgauu

SEQ ID NO: 152805 - RNA, 24 nt, Human
gaaugacaaagaguagacauuucu

SEQ ID NO: 152806 - RNA, 32 nt, Human
gaaugacaaaucacuccaaacaaaacugggca

SEQ ID NO: 152807 - RNA, 32 nt, Human
gaaugacaagaggagccagaaggguggguggg

SEQ ID NO: 152808 - RNA, 32 nt, Human
gaaugacaaucagaauuccacugcccaaagga

SEQ ID NO: 152809 - RNA, 32 nt, Human
gaaugacaauguccaagacacagcagaacaga

SEQ ID NO: 152810 - RNA, 32 nt, Human
gaaugacacagccucagaagcuacugggcugu

SEQ ID NO: 152811 - RNA, 32 nt, Human
gaaugacacagcugcugugcagcuccacuucg

SEQ ID NO: 152812 - RNA, 32 nt, Human
gaaugacacggaacgcucccacugcaggcaaa

SEQ ID NO: 152813 - RNA, 32 nt, Human
gaaugacaggcaaaggaggguggagggguguc

SEQ ID NO: 152814 - RNA, 32 nt, Human
gaaugacaucacagaguguacacacaugguau

SEQ ID NO: 152815 - RNA, 32 nt, Human
gaaugacaucaucuccaccauguucaauagaa

SEQ ID NO: 152816 - RNA, 32 nt, Human
gaaugacauuuaugcuuugaaagcucucgagu

SEQ ID NO: 152817 - RNA, 32 nt, Human
gaaugaccaagagagugggucuccagugagag

SEQ ID NO: 152818 - RNA, 32 nt, Human
gaaugaccaucugauccagcaguuacaguucc

SEQ ID NO: 152819 - RNA, 32 nt, Human
gaaugaccuaguugcuccucucaacaugggua

SEQ ID NO: 152820 - RNA, 32 nt, Human
gaaugacuaaaaauaacauggaagaagauuua

SEQ ID NO: 152821 - RNA, 31 nt, Human
gaaugacuaacacauccuaggagggaaaguc

SEQ ID NO: 152822 - RNA, 32 nt, Human
gaaugacuagggacaacuagacuucaagugau

SEQ ID NO: 152823 - RNA, 32 nt, Human
gaaugacuauagaugcucacacguguuuaaag

SEQ ID NO: 152824 - RNA, 32 nt, Human
gaaugacuccaaagguuugagcuuggcuagaa

SEQ ID NO: 152825 - RNA, 32 nt, Human
gaaugacugcaacaggcacuucccaacaaugg

SEQ ID NO: 152826 - RNA, 32 nt, Human
gaaugacuguaaucccagcuacucaggaggcu

SEQ ID NO: 152827 - RNA, 32 nt, Human
gaaugacuguccccagcagauggcaaguuccu

SEQ ID NO: 152828 - RNA, 32 nt, Human
gaaugacuguuuucaagaagagagaaggagcc

SEQ ID NO: 152829 - RNA, 32 nt, Human
gaaugacuugcaccuggaagaaguccaggaca

SEQ ID NO: 152830 - RNA, 32 nt, Human
gaaugagaacaagccagacuuggugguuucca

SEQ ID NO: 152831 - RNA, 32 nt, Human
gaaugagagacacacugaagaagcaccaauca

SEQ ID NO: 152832 - RNA, 32 nt, Human
gaaugagagacagggguuuuauguucuuagcu

SEQ ID NO: 152833 - RNA, 32 nt, Human
gaaugagagagccgugcacaccagccagggcg

SEQ ID NO: 152834 - RNA, 32 nt, Human
gaaugagagagggagggaacagugcccaagcg

SEQ ID NO: 152835 - RNA, 32 nt, Human
gaaugagaggagaaaggaugagaguaacugug

SEQ ID NO: 152836 - RNA, 32 nt, Human
gaaugagaugguuccugcugaagacauuuacu

SEQ ID NO: 152837 - RNA, 32 nt, Human
gaaugagaugugccacucgggaauaaugauac

SEQ ID NO: 152838 - RNA, 32 nt, Human
gaaugagccaaaaggcuacaucauguugaggg

SEQ ID NO: 152839 - RNA, 32 nt, Human
gaaugagccuagaucccugaaucacuaugugg

SEQ ID NO: 152840 - RNA, 32 nt, Human
gaaugagcuggcaggucuaaugggggaggcgg

SEQ ID NO: 152841 - RNA, 32 nt, Human
gaaugaggaaaggccagcauguggggacucca

SEQ ID NO: 152842 - RNA, 32 nt, Human
gaaugaggacaguucugacagaaauguaccuc

SEQ ID NO: 152843 - RNA, 32 nt, Human
gaaugaggagagucaaggacagcaacucagcu

SEQ ID NO: 152844 - RNA, 32 nt, Human
gaaugaggagcugcaagagccuggcugggaag

SEQ ID NO: 152845 - RNA, 32 nt, Human
gaaugaggaugaggcccaggagacaggcucau

SEQ ID NO: 152846 - RNA, 32 nt, Human
gaaugaggccaacaggguucaccaggaugaga

SEQ ID NO: 152847 - RNA, 32 nt, Human
gaaugaggccacacaaacacacccaggccauc

SEQ ID NO: 152848 - RNA, 32 nt, Human
gaaugaggcugaacaggaggaauccaccaguc

SEQ ID NO: 152849 - RNA, 32 nt, Human
gaaugaggcugguucugcacucucagcaugca

SEQ ID NO: 152850 - RNA, 32 nt, Human
gaaugagggagggagaauaagucagucaugca

SEQ ID NO: 152851 - RNA, 32 nt, Human
gaaugagggcaacuugccauccccagaggaag

SEQ ID NO: 152852 - RNA, 32 nt, Human
gaaugagggcuggguguccaagauacccuggg

SEQ ID NO: 152853 - RNA, 32 nt, Human
gaaugagggugagggcaucccugcuggggaga

SEQ ID NO: 152854 - RNA, 32 nt, Human
gaaugaggguuucuuuagagagauaucugggg

SEQ ID NO: 152855 - RNA, 32 nt, Human
gaaugagucaucaugcagaccaaagucuaccu

SEQ ID NO: 152856 - RNA, 32 nt, Human
gaaugagucaugcacauguauacguuauguau

SEQ ID NO: 152857 - RNA, 32 nt, Human
gaaugagucccacauccucuuuucauccauaa

SEQ ID NO: 152858 - RNA, 27 nt, Human
gaaugagugaagaggagcaaggcuccg

SEQ ID NO: 152859 - RNA, 32 nt, Human
gaaugaguugaggccacuguguuccuuccgcu

SEQ ID NO: 152860 - RNA, 32 nt, Human
gaaugaguugggagggggucccagggaagggg

SEQ ID NO: 152861 - RNA, 32 nt, Human
gaaugauaaagugaauaagaaagcucuaacau

SEQ ID NO: 152862 - RNA, 32 nt, Human
gaaugauagaacuuugccagucuuuaagaucu

SEQ ID NO: 152863 - RNA, 32 nt, Human
gaaugauagagagugaagcagaaacaggagca

SEQ ID NO: 152864 - RNA, 32 nt, Human
gaaugauaucuucucuuucuuugaaccaucuc

SEQ ID NO: 152865 - RNA, 32 nt, Human
gaaugaucagggaggcauagcagugagagcca

SEQ ID NO: 152866 - RNA, 32 nt, Human
gaaugaucaugguuauaaucaaaaguggucuu

SEQ ID NO: 152867 - RNA, 32 nt, Human
gaaugaucuucauauucucuaucugguaaguu

SEQ ID NO: 152868 - RNA, 32 nt, Human
gaaugaugaaguuuggaauuugucaaauguac

SEQ ID NO: 152869 - RNA, 32 nt, Human
gaaugaugagccugcauaaagugaagcugcaa

SEQ ID NO: 152870 - RNA, 32 nt, Human
gaaugaugagugagacucaggaggcacgacau

SEQ ID NO: 152871 - RNA, 32 nt, Human
gaaugaugcaugccaggaugagcucagguuaa

SEQ ID NO: 152872 - RNA, 32 nt, Human
gaaugauggaaagggaaggucagcaggucaaa

SEQ ID NO: 152873 - RNA, 32 nt, Human
gaaugauggcaacgagggcacuguuaucuucg

SEQ ID NO: 152874 - RNA, 32 nt, Human
gaaugauggcaggagaggaaccagaagagcag

SEQ ID NO: 152875 - RNA, 32 nt, Human
gaaugaugugccuuucuuugauauccaacugc

SEQ ID NO: 152876 - RNA, 32 nt, Human
gaaugauucccaagucuacugucccaaccuca

SEQ ID NO: 152877 - RNA, 32 nt, Human
gaaugauucuacagcuaggacuuaaccuugaa

SEQ ID NO: 152878 - RNA, 32 nt, Human
gaaugauugauaaccucucugccagcaaucau

SEQ ID NO: 152879 - RNA, 32 nt, Human
gaaugcaaacugccuuuuccacacaaaggcug

SEQ ID NO: 152880 - RNA, 32 nt, Human
gaaugcaagcagcuuaaaaacuacccaugucu

SEQ ID NO: 152881 - RNA, 32 nt, Human
gaaugcaaugggcagagaccuaccugcagugg

SEQ ID NO: 152882 - RNA, 32 nt, Human
gaaugcaauuuuuauuuuugguaacugugaaa

SEQ ID NO: 152883 - RNA, 21 nt, Human
gaaugcacaaacuugcugcug

SEQ ID NO: 152884 - RNA, 32 nt, Human
gaaugcacacuccagucuuggugguuccuucg

SEQ ID NO: 152885 - RNA, 32 nt, Human
gaaugcacacuuagacaccacacagcacuggu

SEQ ID NO: 152886 - RNA, 32 nt, Human
gaaugcacaggaaagacacaggggaaggucaa

SEQ ID NO: 152887 - RNA, 32 nt, Human
gaaugcaccacggcacucaagccugggcaaug

SEQ ID NO: 152888 - RNA, 32 nt, Human
gaaugcaccacuccuuccccaggguuuaagag

SEQ ID NO: 152889 - RNA, 32 nt, Human
gaaugcaccacugcaguccagccuaggcaaca

SEQ ID NO: 152890 - RNA, 32 nt, Human
gaaugcaccauggucaaaacggauuagggcau

SEQ ID NO: 152891 - RNA, 32 nt, Human
gaaugcacccaucaaucucuucaccucuaaaa

SEQ ID NO: 152892 - RNA, 32 nt, Human
gaaugcagacacaccauagcccccuucuacua

SEQ ID NO: 152893 - RNA, 32 nt, Human
gaaugcagacuggagucacugcacacacuuug

SEQ ID NO: 152894 - RNA, 32 nt, Human
gaaugcagccucccuucccuggccccuucccu

SEQ ID NO: 152895 - RNA, 32 nt, Human
gaaugcaggagcaggaguugagcuugggagcu

SEQ ID NO: 152896 - RNA, 32 nt, Human
gaaugcaggcaacauggaauacuacgaaugaa

SEQ ID NO: 152897 - RNA, 32 nt, Human
gaaugcagguugcugcagcucugccuucucca

SEQ ID NO: 152898 - RNA, 27 nt, Human
gaaugcauauagagcaggucuucagcc

SEQ ID NO: 152899 - RNA, 32 nt, Human
gaaugcaugcuccuagcaacucucacagaccu

SEQ ID NO: 152900 - RNA, 32 nt, Human
gaaugcauuuuccccucuccuccucccugcua

SEQ ID NO: 152901 - RNA, 32 nt, Human
gaaugccaagaguuuaccuggccagcccuggc

SEQ ID NO: 152902 - RNA, 23 nt, Human
gaaugccaaggcagguggaucac

SEQ ID NO: 152903 - RNA, 32 nt, Human
gaaugccacaccaugggaggacucauucauug

SEQ ID NO: 152904 - RNA, 32 nt, Human
gaaugccacagauggaggaccuuaaacagcaa

SEQ ID NO: 152905 - RNA, 32 nt, Human
gaaugccacagucccccaacccuccacagagc

SEQ ID NO: 152906 - RNA, 32 nt, Human
gaaugccacugaggcacugaggcccuaccuca

SEQ ID NO: 152907 - RNA, 32 nt, Human
gaaugccacugcacuacagccugggcgacaaa

SEQ ID NO: 152908 - RNA, 32 nt, Human
gaaugccacugccuucgcuucuugccucugug

SEQ ID NO: 152909 - RNA, 32 nt, Human
gaaugccagcuuucagacagagcccacuuagc

SEQ ID NO: 152910 - RNA, 32 nt, Human
gaaugccaguuuugaccacagaagaauauucg

SEQ ID NO: 152911 - RNA, 32 nt, Human
gaaugccaugccaugauucuggugugcuccau

SEQ ID NO: 152912 - RNA, 32 nt, Human
gaaugcccaacucccccuucucagccuucuuu

SEQ ID NO: 152913 - RNA, 32 nt, Human
gaaugcccagggacuccuggggcugcuggccc

SEQ ID NO: 152914 - RNA, 32 nt, Human
gaaugcccaucacugcuacacacucacagcug

SEQ ID NO: 152915 - RNA, 32 nt, Human
gaaugccccacugcacuccagccugggcgaca

SEQ ID NO: 152916 - RNA, 32 nt, Human
gaaugcccccaccaagugccucccucuuuaau

SEQ ID NO: 152917 - RNA, 32 nt, Human
gaaugcccccuuugcaaggccugcugcagucc

SEQ ID NO: 152918 - RNA, 32 nt, Human
gaaugcccuccacccauucacacagcaggacu

SEQ ID NO: 152919 - RNA, 32 nt, Human
gaaugccgcguccuguccuggugacaggagaa

SEQ ID NO: 152920 - RNA, 32 nt, Human
gaaugccggggacagagaggggcagguugacc

SEQ ID NO: 152921 - RNA, 32 nt, Human
gaaugccuaguagaguauaggagaaguugacc

SEQ ID NO: 152922 - RNA, 32 nt, Human
gaaugccucccagggaugagaaacauacucuc

SEQ ID NO: 152923 - RNA, 19 nt, Human
gaaugccugacccugggaa

SEQ ID NO: 152924 - RNA, 32 nt, Human
gaaugccugagugccuggccaaagggauauuu

SEQ ID NO: 152925 - RNA, 32 nt, Human
gaaugccuggacaagagagaacuugcugcggg

SEQ ID NO: 152926 - RNA, 32 nt, Human
gaaugccuggagcauuucuucuagucuggugg

SEQ ID NO: 152927 - RNA, 32 nt, Human
gaaugccuguagucccagcuacuccggacacu

SEQ ID NO: 152928 - RNA, 32 nt, Human
gaaugccugugcagguggacacacaggccugg

SEQ ID NO: 152929 - RNA, 32 nt, Human
gaaugccuguggucccagcuacaugggaggcu

SEQ ID NO: 152930 - RNA, 32 nt, Human
gaaugccuguuucaggcugaagacagagauga

SEQ ID NO: 152931 - RNA, 32 nt, Human
gaaugccuguuuugagagugugagugggauca

SEQ ID NO: 152932 - RNA, 32 nt, Human
gaaugccuuaccuggguucugggcaguucuuc

SEQ ID NO: 152933 - RNA, 32 nt, Human
gaaugccuuaggguuuucuaauuccccuuaug

SEQ ID NO: 152934 - RNA, 32 nt, Human
gaaugcgagggaggccggccuugagugaaacc

SEQ ID NO: 152935 - RNA, 32 nt, Human
gaaugcggagaaagcagugcuaccucaguuuu

SEQ ID NO: 152936 - RNA, 32 nt, Human
gaaugcgggacccucacaccagccucacgaga

SEQ ID NO: 152937 - RNA, 32 nt, Human
gaaugcgggagugauugaguuggaagcgugca

SEQ ID NO: 152938 - RNA, 32 nt, Human
gaaugcuaagaccuuaagcuucccucuccagc

SEQ ID NO: 152939 - RNA, 32 nt, Human
gaaugcuagacagaaaccaagccauuaaugag

SEQ ID NO: 152940 - RNA, 32 nt, Human
gaaugcuagggugggaagcuggugagccagug

SEQ ID NO: 152941 - RNA, 32 nt, Human
gaaugcuaucagaccccaaaggccaaccuugg

SEQ ID NO: 152942 - RNA, 32 nt, Human
gaaugcucaccaccagcucucuguuucccuuu

SEQ ID NO: 152943 - RNA, 32 nt, Human
gaaugcucagcucuaggcuucuguaaaaaccu

SEQ ID NO: 152944 - RNA, 32 nt, Human
gaaugcucuuuuggauccacagaacaacugaa

SEQ ID NO: 152945 - RNA, 32 nt, Human
gaaugcugcagccgcccuccucugccugcuga

SEQ ID NO: 152946 - RNA, 32 nt, Human
gaaugcugcauuuuguucgugccuguaagauu

SEQ ID NO: 152947 - RNA, 31 nt, Human
gaaugcugccucuucuaccccuauguccaaa

SEQ ID NO: 152948 - RNA, 22 nt, Human
gaaugcugcugcacacuucccu

SEQ ID NO: 152949 - RNA, 32 nt, Human
gaaugcugcuguaaaguacucuuuaagucuuu

SEQ ID NO: 152950 - RNA, 32 nt, Human
gaaugcugcuguaaagugcucuuuaagucuuu

SEQ ID NO: 152951 - RNA, 32 nt, Human
gaaugcugcugucuuggagccugggcacguuu

SEQ ID NO: 152952 - RNA, 22 nt, Human
gaaugcuggauggaacaggaaa

SEQ ID NO: 152953 - RNA, 32 nt, Human
gaaugcuggcaaaggcuggcuguguauaccca

SEQ ID NO: 152954 - RNA, 32 nt, Human
gaaugcuggucauucuucaucucucauuuguc

SEQ ID NO: 152955 - RNA, 32 nt, Human
gaaugcugguuuucacaccuuuuccuuauuuu

SEQ ID NO: 152956 - RNA, 32 nt, Human
gaaugcuucucauuccucuguucuuauugggu

SEQ ID NO: 152957 - RNA, 32 nt, Human
gaauggaaaaagagcaguaguauguggagagu

SEQ ID NO: 152958 - RNA, 32 nt, Human
gaauggaaacucaggaggugccgugaguccca

SEQ ID NO: 152959 - RNA, 32 nt, Human
gaauggaaagaaugugggauuuggagucagac

SEQ ID NO: 152960 - RNA, 32 nt, Human
gaauggaaaugagagguaaggauuaaagccaa

SEQ ID NO: 152961 - RNA, 32 nt, Human
gaauggaaaugagugacuggaaaucccauagg

SEQ ID NO: 152962 - RNA, 32 nt, Human
gaauggaagcacaaaaugaugaauaagguauu

SEQ ID NO: 152963 - RNA, 32 nt, Human
gaauggaagcuucagggccuugcugcuggggu

SEQ ID NO: 152964 - RNA, 32 nt, Human
gaauggaauuggaagcccacugccuucccaua

SEQ ID NO: 152965 - RNA, 32 nt, Human
gaauggacaauguugaaugaaugucuggcuca

SEQ ID NO: 152966 - RNA, 32 nt, Human
gaauggacagcccauggaggcccgggagaacg

SEQ ID NO: 152967 - RNA, 32 nt, Human
gaauggacagguaggaaggaaggaaaggagga

SEQ ID NO: 152968 - RNA, 32 nt, Human
gaauggacucaaacugccuuggcuucagggga

SEQ ID NO: 152969 - RNA, 32 nt, Human
gaauggacuugaccaacaaccuagagauuuuc

SEQ ID NO: 152970 - RNA, 32 nt, Human
gaauggagaaaguguguagauguaugugugug

SEQ ID NO: 152971 - RNA, 32 nt, Human
gaauggagaauacaaaaauaaguuucaggaua

SEQ ID NO: 152972 - RNA, 32 nt, Human
gaauggagacaggguuucaacauguuggccag

SEQ ID NO: 152973 - RNA, 21 nt, Human
gaauggagacuguaccuucca

SEQ ID NO: 152974 - RNA, 32 nt, Human
gaauggagagagaguccuuuaugggcuucaga

SEQ ID NO: 152975 - RNA, 32 nt, Human
gaauggagcagaaauucaccucucucacugac

SEQ ID NO: 152976 - RNA, 32 nt, Human
gaauggagccaccacauccaguuaaccugggc

SEQ ID NO: 152977 - RNA, 19 nt, Human
gaauggaggacugggagga

SEQ ID NO: 152978 - RNA, 21 nt, Human
gaauggagggcucugggagga

SEQ ID NO: 152979 - RNA, 32 nt, Human
gaauggagucaggugcuggaggccguggcagc

SEQ ID NO: 152980 - RNA, 32 nt, Human
gaauggagucuaaucccagcacuuugggaggc

SEQ ID NO: 152981 - RNA, 32 nt, Human
gaauggaucagcugccaugggcacagccuccg

SEQ ID NO: 152982 - RNA, 32 nt, Human
gaauggaucuacagccugccucccagguuucu

SEQ ID NO: 152983 - RNA, 19 nt, Human
gaauggauggcuggggaga

SEQ ID NO: 152984 - RNA, 32 nt, Human
gaauggauuuaugcugucuuagcaauaugaca

SEQ ID NO: 152985 - RNA, 32 nt, Human
gaauggauuuauguuaacuuccucccugcugc

SEQ ID NO: 152986 - RNA, 32 nt, Human
gaauggcaaacacucggcugggcacaguggcu

SEQ ID NO: 152987 - RNA, 32 nt, Human
gaauggcaaugccuggauugugcucagcggaa

SEQ ID NO: 152988 - RNA, 32 nt, Human
gaauggcacagcccaaagaaggaaaaggcagg

SEQ ID NO: 152989 - RNA, 32 nt, Human
gaauggcagagaugccuggggagugcccugaa

SEQ ID NO: 152990 - RNA, 32 nt, Human
gaauggcagcaggaggcagacagguuucuggg

SEQ ID NO: 152991 - RNA, 32 nt, Human
gaauggcagcaugguagcaccuccuaacagau

SEQ ID NO: 152992 - RNA, 32 nt, Human
gaauggcaugaaugaaugagucaugggcugga

SEQ ID NO: 152993 - RNA, 32 nt, Human
gaauggcauucugucccucccuaagcagccug

SEQ ID NO: 152994 - RNA, 32 nt, Human
gaauggccagagagugucucucuagacuggga

SEQ ID NO: 152995 - RNA, 19 nt, Human
gaauggcccaguuugggaa

SEQ ID NO: 152996 - RNA, 32 nt, Human
gaauggcccuguggcccucccugggccuuuug

SEQ ID NO: 152997 - RNA, 32 nt, Human
gaauggccggcgugagccaccaugcccggcuc

SEQ ID NO: 152998 - RNA, 32 nt, Human
gaauggccugcucucccuggcccuaucagccu

SEQ ID NO: 152999 - RNA, 32 nt, Human
gaauggcgaggggagagcagaggagaaggugg

SEQ ID NO: 153000 - RNA, 32 nt, Human
gaauggcuacuuccuggcaggccgggacauga

SEQ ID NO: 153001 - RNA, 32 nt, Human
gaauggcuccaccccucccccagcccugcuuc

SEQ ID NO: 153002 - RNA, 32 nt, Human
gaauggcuguauccugggagaugagaugggcc

SEQ ID NO: 153003 - RNA, 32 nt, Human
gaauggcuguucuccccucacugcugagucuc

SEQ ID NO: 153004 - RNA, 32 nt, Human
gaauggcuuccucuccccugaugugagccguc

SEQ ID NO: 153005 - RNA, 32 nt, Human
gaaugggaaagacagagguuacagaggagccg

SEQ ID NO: 153006 - RNA, 32 nt, Human
gaaugggaaaugaagaagaccuagaagaggau

SEQ ID NO: 153007 - RNA, 21 nt, Human
gaaugggaagcauccauucau

SEQ ID NO: 153008 - RNA, 32 nt, Human
gaaugggaaugagagcugaauguagggacaau

SEQ ID NO: 153009 - RNA, 27 nt, Human
gaaugggaccggaggcgaggaggacga

SEQ ID NO: 153010 - RNA, 20 nt, Human
gaaugggagcuagcauucca

SEQ ID NO: 153011 - RNA, 32 nt, Human
gaaugggaggcagguuugcccuaagcaguuuc

SEQ ID NO: 153012 - RNA, 32 nt, Human
gaaugggaggggccucacagagggcagggcca

SEQ ID NO: 153013 - RNA, 32 nt, Human
gaaugggauucccucuggacuugcacacgaag

SEQ ID NO: 153014 - RNA, 32 nt, Human
gaaugggcaagugcagugaaacaggugcuucc

SEQ ID NO: 153015 - RNA, 32 nt, Human
gaaugggcaccucuuggccaaaugcauucuaa

SEQ ID NO: 153016 - RNA, 32 nt, Human
gaaugggcauggaaaucauccaaguuaaacuu

SEQ ID NO: 153017 - RNA, 32 nt, Human
gaaugggccaaggggacagagacuucacucgg

SEQ ID NO: 153018 - RNA, 32 nt, Human
gaaugggcccucacuaagaagugggucugaca

SEQ ID NO: 153019 - RNA, 32 nt, Human
gaaugggcucagaaaaaggagggcuggcugga

SEQ ID NO: 153020 - RNA, 32 nt, Human
gaaugggcuggacggaggaggggccggcgaaa

SEQ ID NO: 153021 - RNA, 32 nt, Human
gaauggggaaacugggggcagcaacacuuaua

SEQ ID NO: 153022 - RNA, 32 nt, Human
gaauggggagaaacagccugggcuggggcuac

SEQ ID NO: 153023 - RNA, 32 nt, Human
gaauggggagaagggagaagcaagcagugucu

SEQ ID NO: 153024 - RNA, 32 nt, Human
gaauggggagagagaaagugagaaccaccaaa

SEQ ID NO: 153025 - RNA, 32 nt, Human
gaauggggaggcaagaucucagggacaccaag

SEQ ID NO: 153026 - RNA, 32 nt, Human
gaauggggagguauaaaaagcaaagauuauuu

SEQ ID NO: 153027 - RNA, 32 nt, Human
gaauggggcaugaguacacacugugugcuaag

SEQ ID NO: 153028 - RNA, 32 nt, Human
gaauggggcuaaccagcuccugauggccugag

SEQ ID NO: 153029 - RNA, 32 nt, Human
gaauggggcugggcagaucugugagcuggcug

SEQ ID NO: 153030 - RNA, 32 nt, Human
gaaugggggucagaagaagugggagcagcuuc

SEQ ID NO: 153031 - RNA, 32 nt, Human
gaaugggggugagcaggcgaacagagcucucu

SEQ ID NO: 153032 - RNA, 31 nt, Human
gaauggggucaauaccaccuaccucacaggg

SEQ ID NO: 153033 - RNA, 32 nt, Human
gaaugggguccccugcacugaagguccccgcc

SEQ ID NO: 153034 - RNA, 32 nt, Human
gaaugggguggaagaguggucagagaaacagu

SEQ ID NO: 153035 - RNA, 18 nt, Human
gaaugggguguaacaguu

SEQ ID NO: 153036 - RNA, 32 nt, Human
gaauggggugugagccagggagguguggaagu

SEQ ID NO: 153037 - RNA, 32 nt, Human
gaaugggugaaugacauuuguggguagguuau

SEQ ID NO: 153038 - RNA, 32 nt, Human
gaauggguggaaaggugugagacugggaaggc

SEQ ID NO: 153039 - RNA, 32 nt, Human
gaauggguuccccaggcucacaguguagagac

SEQ ID NO: 153040 - RNA, 32 nt, Human
gaauggguuugaagccguggaggcagagggca

SEQ ID NO: 153041 - RNA, 32 nt, Human
gaauggguuuucuuccccaaaacaucagcauu

SEQ ID NO: 153042 - RNA, 22 nt, Human
gaaugguaaagacuuggaggga

SEQ ID NO: 153043 - RNA, 32 nt, Human
gaaugguagccacuggccaaaagggugagggu

SEQ ID NO: 153044 - RNA, 32 nt, Human
gaaugguauugaauuggucuguggaaaauugc

SEQ ID NO: 153045 - RNA, 32 nt, Human
gaauggucaagcaaucccaacuuaugauuacu

SEQ ID NO: 153046 - RNA, 32 nt, Human
gaauggucagaguggagcacaugugaauuaac

SEQ ID NO: 153047 - RNA, 32 nt, Human
gaauggucgcugagacagagauggaagccagg

SEQ ID NO: 153048 - RNA, 32 nt, Human
gaauggucucucuuuggcuggaauuacaaaac

SEQ ID NO: 153049 - RNA, 32 nt, Human
gaauggugaacugagaccguaucacacgccuc

SEQ ID NO: 153050 - RNA, 32 nt, Human
gaauggugccugcugcucagggcucgcccccg

SEQ ID NO: 153051 - RNA, 32 nt, Human
gaauggugcuggacucaggggcucaggcguau

SEQ ID NO: 153052 - RNA, 31 nt, Human
gaauggugcugugccccuugccagcaggcca

SEQ ID NO: 153053 - RNA, 32 nt, Human
gaauggugggguggaaguuucaggugaacaau

SEQ ID NO: 153054 - RNA, 18 nt, Human
gaaugguguaaacagcuu

SEQ ID NO: 153055 - RNA, 32 nt, Human
gaaugguguccucuccaaaauucauguacuuc

SEQ ID NO: 153056 - RNA, 32 nt, Human
gaaugguguggccaccuccucccuuucaagcu

SEQ ID NO: 153057 - RNA, 32 nt, Human
gaaugguuucuucgcccucccuuuccuucccu

SEQ ID NO: 153058 - RNA, 32 nt, Human
gaaugguuuucaccauuauucucuccaaugau

SEQ ID NO: 153059 - RNA, 32 nt, Human
gaauguaaagagaccaccuucacuuguugaga

SEQ ID NO: 153060 - RNA, 32 nt, Human
gaauguaaagagacgcccuucacauguugaga

SEQ ID NO: 153061 - RNA, 17 nt, Human
gaauguaaagguuucaa

SEQ ID NO: 153062 - RNA, 32 nt, Human
gaauguaagaugguggggccuagccccuuggu

SEQ ID NO: 153063 - RNA, 32 nt, Human
gaauguaagcacugucuugagggaaggaagag

SEQ ID NO: 153064 - RNA, 32 nt, Human
gaauguaaugccagugacaaugccuucauuca

SEQ ID NO: 153065 - RNA, 32 nt, Human
gaauguacaauccauauuuuaaauaucucauu

SEQ ID NO: 153066 - RNA, 32 nt, Human
gaauguacaugugaggaugaggagacagaaaa

SEQ ID NO: 153067 - RNA, 32 nt, Human
gaauguaccaauggaugcacaaaaagagcucc

SEQ ID NO: 153068 - RNA, 32 nt, Human
gaauguaccagaaacccaaacauuggcaagua

SEQ ID NO: 153069 - RNA, 32 nt, Human
gaauguaccccaucucccuugacugcagagca

SEQ ID NO: 153070 - RNA, 32 nt, Human
gaauguacugcauguuaccaucuuacuugagc

SEQ ID NO: 153071 - RNA, 32 nt, Human
gaauguagaaguggcaucugaaaacaauuggu

SEQ ID NO: 153072 - RNA, 32 nt, Human
gaauguagggaaaaacuuuugcccgacugauu

SEQ ID NO: 153073 - RNA, 32 nt, Human
gaauguauaugagaaacccccacucuacuaaa

SEQ ID NO: 153074 - RNA, 32 nt, Human
gaauguauccaucaggcagacaaggggucuga

SEQ ID NO: 153075 - RNA, 27 nt, Human
gaauguauguuuggcccugugcugugg

SEQ ID NO: 153076 - RNA, 32 nt, Human
gaauguauuacuuuguucucccaugaaagaau

SEQ ID NO: 153077 - RNA, 32 nt, Human
gaauguauuugcugauacguugcucacauucu

SEQ ID NO: 153078 - RNA, 32 nt, Human
gaaugucaauaacauuuuaaaggaccaauaaa

SEQ ID NO: 153079 - RNA, 32 nt, Human
gaaugucagaagcagcagguccuaucugacuc

SEQ ID NO: 153080 - RNA, 32 nt, Human
gaaugucagcaacaaacucacaaaguagauua

SEQ ID NO: 153081 - RNA, 32 nt, Human
gaaugucagguuuuugguuuuauuauuauuuc

SEQ ID NO: 153082 - RNA, 32 nt, Human
gaauguccaccuuugugcauuuugguagcauu

SEQ ID NO: 153083 - RNA, 32 nt, Human
gaauguccaugguggugucuggccugacccca

SEQ ID NO: 153084 - RNA, 32 nt, Human
gaaugucccaggccauggcagagcucguucca

SEQ ID NO: 153085 - RNA, 32 nt, Human
gaauguccccaccaauccccgccacagcaggc

SEQ ID NO: 153086 - RNA, 32 nt, Human
gaauguccucagcauccucccgucccaaccca

SEQ ID NO: 153087 - RNA, 32 nt, Human
gaaugucgucuucuccuauggacucaauugcu

SEQ ID NO: 153088 - RNA, 32 nt, Human
gaaugucuccaaagcuggaucgauguggagaa

SEQ ID NO: 153089 - RNA, 32 nt, Human
gaaugucuccaaagcuggauugauguggagaa

SEQ ID NO: 153090 - RNA, 22 nt, Human
gaaugucucccuauggcuggua

SEQ ID NO: 153091 - RNA, 24 nt, Human
gaaugucugaccucaggugaucca

SEQ ID NO: 153092 - RNA, 27 nt, Human
gaaugucugacucaguucaggcugcug

SEQ ID NO: 153093 - RNA, 32 nt, Human
gaaugucugcugcaagaguguaugaaggggga

SEQ ID NO: 153094 - RNA, 32 nt, Human
gaaugucugggaagcuggggacauugcuaugc

SEQ ID NO: 153095 - RNA, 32 nt, Human
gaaugucugucucuuaaaccaguuuuuacuug

SEQ ID NO: 153096 - RNA, 32 nt, Human
gaaugucuguguuucauugucuaguccaaccu

SEQ ID NO: 153097 - RNA, 24 nt, Human
gaaugucuguugaugaaauaguca

SEQ ID NO: 153098 - RNA, 32 nt, Human
gaaugucuuccagaagaaaguagauaccauua

SEQ ID NO: 153099 - RNA, 32 nt, Human
gaaugucuuuagcuggggugaccuggagugac

SEQ ID NO: 153100 - RNA, 32 nt, Human
gaaugugaaaccacagauauuucauuaaaaca

SEQ ID NO: 153101 - RNA, 32 nt, Human
gaaugugaagccccaggccgcagggggcaagg

SEQ ID NO: 153102 - RNA, 32 nt, Human
gaaugugacagucucuugcuucaacgacaacu

SEQ ID NO: 153103 - RNA, 32 nt, Human
gaaugugaccuccagcccaaucucgacucugc

SEQ ID NO: 153104 - RNA, 32 nt, Human
gaaugugacuguauauagaaauagggcaugua

SEQ ID NO: 153105 - RNA, 32 nt, Human
gaaugugacuguguguguauguauguguauau

SEQ ID NO: 153106 - RNA, 32 nt, Human
gaaugugagcugggugacaaauggagauuugg

SEQ ID NO: 153107 - RNA, 32 nt, Human
gaaugugagggcugcggugugguuucaaacau

SEQ ID NO: 153108 - RNA, 32 nt, Human
gaaugugaucggcaguaggcaucagcugagac

SEQ ID NO: 153109 - RNA, 32 nt, Human
gaaugugccacuggacucccagccugggugac

SEQ ID NO: 153110 - RNA, 20 nt, Human
gaaugugccagagcugcaga

SEQ ID NO: 153111 - RNA, 32 nt, Human
gaaugugccccuggcccaucucagccuccuga

SEQ ID NO: 153112 - RNA, 32 nt, Human
gaaugugccgcugacucagcugugcugcuuuc

SEQ ID NO: 153113 - RNA, 32 nt, Human
gaaugugcuuugaauuuuuggaacacuuuuac

SEQ ID NO: 153114 - RNA, 32 nt, Human
gaauguggaaaagccuuuaguguauucucaac

SEQ ID NO: 153115 - RNA, 24 nt, Human
gaauguggacucgaggagccggaa

SEQ ID NO: 153116 - RNA, 32 nt, Human
gaauguggacugccuuuuaucucuauuucacu

SEQ ID NO: 153117 - RNA, 32 nt, Human
gaauguggcaaaaccuauaaaccuauaacaag

SEQ ID NO: 153118 - RNA, 32 nt, Human
gaauguggcaaagccuuuaacugucuucaacc

SEQ ID NO: 153119 - RNA, 32 nt, Human
gaauguggcaacuugcuugugccuaaaaggag

SEQ ID NO: 153120 - RNA, 18 nt, Human
gaauguggcacaugcaga

SEQ ID NO: 153121 - RNA, 32 nt, Human
gaauguggccacuucacuaucuucuucaaaua

SEQ ID NO: 153122 - RNA, 32 nt, Human
gaauguggcccauugccuccucccucuccugu

SEQ ID NO: 153123 - RNA, 32 nt, Human
gaauguggccucuccuguucucaggccccuac

SEQ ID NO: 153124 - RNA, 32 nt, Human
gaauguggcucugccacacagcucacuccuau

SEQ ID NO: 153125 - RNA, 32 nt, Human
gaaugugggaggcggagguugcagugagucag

SEQ ID NO: 153126 - RNA, 22 nt, Human
gaauguggggugugcaugcaga

SEQ ID NO: 153127 - RNA, 32 nt, Human
gaauguggucucaggauauccuuaucagagcu

SEQ ID NO: 153128 - RNA, 32 nt, Human
gaaugugguugaagaaagugggccaggugguu

SEQ ID NO: 153129 - RNA, 32 nt, Human
gaaugugguuucugccauccugggcagaagcu

SEQ ID NO: 153130 - RNA, 32 nt, Human
gaauguguacagucuguggggccggugugaac

SEQ ID NO: 153131 - RNA, 32 nt, Human
gaauguguaucuuccuuuucuggaccauuuga

SEQ ID NO: 153132 - RNA, 32 nt, Human
gaaugugucugggggugagaggacggguguga

SEQ ID NO: 153133 - RNA, 32 nt, Human
gaaugugugcacaucccuucucgugcucacac

SEQ ID NO: 153134 - RNA, 18 nt, Human
gaauguguuagcugcaga

SEQ ID NO: 153135 - RNA, 32 nt, Human
gaauguguucagauuucuacuguuuugcauga

SEQ ID NO: 153136 - RNA, 32 nt, Human
gaauguguuguucaugaaaaacugauagaagc

SEQ ID NO: 153137 - RNA, 32 nt, Human
gaauguguuugauaucacaguguuuguaaauu

SEQ ID NO: 153138 - RNA, 32 nt, Human
gaauguuacugauuuuuccuuuuggcugaggc

SEQ ID NO: 153139 - RNA, 32 nt, Human
gaauguucucagggaggcagcaagucagaagg

SEQ ID NO: 153140 - RNA, 32 nt, Human
gaauguucuccucauuguaaucauauuuaaaa

SEQ ID NO: 153141 - RNA, 30 nt, Human
gaauguugauccuuccugcuccuguuguac

SEQ ID NO: 153142 - RNA, 32 nt, Human
gaauguugcacuguagcggugucagccacauu

SEQ ID NO: 153143 - RNA, 32 nt, Human
gaauguugcuaugaggacagauucaucaaaaa

SEQ ID NO: 153144 - RNA, 32 nt, Human
gaauguuggacaaagggaauaaaauuggggau

SEQ ID NO: 153145 - RNA, 32 nt, Human
gaauguuguaggaauuacugguuuagaguagc

SEQ ID NO: 153146 - RNA, 32 nt, Human
gaauguuguaguuuuuccaaaaccagaauuag

SEQ ID NO: 153147 - RNA, 32 nt, Human
gaauguuguguauguggcugauauggaagaca

SEQ ID NO: 153148 - RNA, 32 nt, Human
gaauguuuauucauuauauuguuacaauuuaa

SEQ ID NO: 153149 - RNA, 32 nt, Human
gaauguuucaggaaacaaauaggauaagacaa

SEQ ID NO: 153150 - RNA, 32 nt, Human
gaauguuucuaagaaagguuuuggaaggaaaa

SEQ ID NO: 153151 - RNA, 32 nt, Human
gaauguuucugugagcucuggugucacucauc

SEQ ID NO: 153152 - RNA, 32 nt, Human
gaauguuucuucucugccuuaaagagcuauuc

SEQ ID NO: 153153 - RNA, 32 nt, Human
gaauguuugguugggagaaucacagcuuuaca

SEQ ID NO: 153154 - RNA, 32 nt, Human
gaauguuuuauagaauuucuuaauaccauccu

SEQ ID NO: 153155 - RNA, 17 nt, Human
gaauuaaaaacaauaga

SEQ ID NO: 153156 - RNA, 21 nt, Human
gaauuaaaacaaaacaaaaca

SEQ ID NO: 153157 - RNA, 32 nt, Human
gaauuaaacguguugccacaccugccggcuuc

SEQ ID NO: 153158 - RNA, 32 nt, Human
gaauuaaagaaagaggaaagaaacacaaaaag

SEQ ID NO: 153159 - RNA, 32 nt, Human
gaauuaaaguugagcaguuuuccaucucuacc

SEQ ID NO: 153160 - RNA, 32 nt, Human
gaauuaacaguauuucuuuacagaauggauuu

SEQ ID NO: 153161 - RNA, 32 nt, Human
gaauuaacauauucuggugcacucaaugggga

SEQ ID NO: 153162 - RNA, 32 nt, Human
gaauuaacauuacaaaaugauacagugccaga

SEQ ID NO: 153163 - RNA, 32 nt, Human
gaauuaacauuuggugauuaugccuagcuuuu

SEQ ID NO: 153164 - RNA, 32 nt, Human
gaauuaacccucuccugcuuuacugcuaauuu

SEQ ID NO: 153165 - RNA, 32 nt, Human
gaauuaacugauuugugaaguuaaaagguugu

SEQ ID NO: 153166 - RNA, 32 nt, Human
gaauuaacuuucuccccuguucuugccaggug

SEQ ID NO: 153167 - RNA, 32 nt, Human
gaauuaagagccucccucccucccucuaucca

SEQ ID NO: 153168 - RNA, 32 nt, Human
gaauuaagcugugcaauuacugccugcagaga

SEQ ID NO: 153169 - RNA, 32 nt, Human
gaauuaaggggcauguuggugcauuuaacuac

SEQ ID NO: 153170 - RNA, 22 nt, Human
gaauuaaguagcuggccagagg

SEQ ID NO: 153171 - RNA, 31 nt, Human
gaauuaaucaguaaauaccuugaaaugcuua

SEQ ID NO: 153172 - RNA, 32 nt, Human
gaauuaaugaguagcucccucucccaggagga

SEQ ID NO: 153173 - RNA, 32 nt, Human
gaauuaauuaugcagccaauaggaaccccauu

SEQ ID NO: 153174 - RNA, 32 nt, Human
gaauuacaaaucagaagaaaaagcaagcauua

SEQ ID NO: 153175 - RNA, 32 nt, Human
gaauuacacagcaauaggggaacucauuuaac

SEQ ID NO: 153176 - RNA, 32 nt, Human
gaauuacacccuuggaaucagcccugaugauu

SEQ ID NO: 153177 - RNA, 32 nt, Human
gaauuacacuagaggcccuccgcugggaagca

SEQ ID NO: 153178 - RNA, 32 nt, Human
gaauuacagcacaggcuuuucacaacuaagag

SEQ ID NO: 153179 - RNA, 24 nt, Human
gaauuacagcagguagcucagaga

SEQ ID NO: 153180 - RNA, 32 nt, Human
gaauuacaggcacccaccaccacacccagcuc

SEQ ID NO: 153181 - RNA, 32 nt, Human
gaauuacaggcgugagccaccaugcccggcca

SEQ ID NO: 153182 - RNA, 32 nt, Human
gaauuacaggcgugagccaccaugccuggcca

SEQ ID NO: 153183 - RNA, 32 nt, Human
gaauuacaggugcccaccaccaugccuggcua

SEQ ID NO: 153184 - RNA, 32 nt, Human
gaauuacaggugccugccaccaugcccggcua

SEQ ID NO: 153185 - RNA, 32 nt, Human
gaauuacaggugugagccaccaugcccggcua

SEQ ID NO: 153186 - RNA, 32 nt, Human
gaauuacaguucuuauugaugacuuuuuaaug

SEQ ID NO: 153187 - RNA, 32 nt, Human
gaauuacauaaauauaauucagaauauggaua

SEQ ID NO: 153188 - RNA, 32 nt, Human
gaauuacauaugcaugcauagggguacauuua

SEQ ID NO: 153189 - RNA, 32 nt, Human
gaauuacaucugcaugcaauugccacuuuguc

SEQ ID NO: 153190 - RNA, 32 nt, Human
gaauuacauuacaggcuggaauguaauugugg

SEQ ID NO: 153191 - RNA, 32 nt, Human
gaauuaccaaggaggcaggagguggagcaaaa

SEQ ID NO: 153192 - RNA, 32 nt, Human
gaauuaccagcuuggccgacaugguaaaaccc

SEQ ID NO: 153193 - RNA, 32 nt, Human
gaauuaccuuagauuagcucuggaccagccug

SEQ ID NO: 153194 - RNA, 32 nt, Human
gaauuaccuuuuacaagaagugcuucauugcu

SEQ ID NO: 153195 - RNA, 28 nt, Human
gaauuacucaaggcugccucucugcaaa

SEQ ID NO: 153196 - RNA, 32 nt, Human
gaauuacucagcccuguuguugcagagugagu

SEQ ID NO: 153197 - RNA, 32 nt, Human
gaauuacucccaagaguaacucucauuaucuc

SEQ ID NO: 153198 - RNA, 32 nt, Human
gaauuacugaauauuucagagcaaagcuauca

SEQ ID NO: 153199 - RNA, 32 nt, Human
gaauuagaagugcgucucaccaaccagccaag

SEQ ID NO: 153200 - RNA, 32 nt, Human
gaauuagacaagaaauacacagaugugccaga

SEQ ID NO: 153201 - RNA, 32 nt, Human
gaauuagagcagucucuggugaaaggcucucc

SEQ ID NO: 153202 - RNA, 32 nt, Human
gaauuagaggauucuggaugucagucuuugcu

SEQ ID NO: 153203 - RNA, 32 nt, Human
gaauuagaggcagaggaagagacagaggaguu

SEQ ID NO: 153204 - RNA, 32 nt, Human
gaauuagcaaacugaauaaacuacagaaauuu

SEQ ID NO: 153205 - RNA, 32 nt, Human
gaauuagcauuuuaaaaauaggggagucuaac

SEQ ID NO: 153206 - RNA, 32 nt, Human
gaauuagcuguggggaagauuggcucccaugg

SEQ ID NO: 153207 - RNA, 32 nt, Human
gaauuaggagagaagguagggguugggaauca

SEQ ID NO: 153208 - RNA, 32 nt, Human
gaauuagggaaacaccaaaagcaaagagagca

SEQ ID NO: 153209 - RNA, 23 nt, Human
gaauuaggguggucuacuugagg

SEQ ID NO: 153210 - RNA, 32 nt, Human
gaauuaggucacaaaugggaaauaaaucagaa

SEQ ID NO: 153211 - RNA, 32 nt, Human
gaauuagucugucccagcuagagggagauaaa

SEQ ID NO: 153212 - RNA, 32 nt, Human
gaauuagugacauucagggauguggccauaga

SEQ ID NO: 153213 - RNA, 32 nt, Human
gaauuaguggaacuuaaucaugugccauauaa

SEQ ID NO: 153214 - RNA, 24 nt, Human
gaauuaguugauuacauguuucaa

SEQ ID NO: 153215 - RNA, 32 nt, Human
gaauuaguugcugcacuccagccuaggcaaca

SEQ ID NO: 153216 - RNA, 32 nt, Human
gaauuauaaccagcaauugcgccaagaacuua

SEQ ID NO: 153217 - RNA, 32 nt, Human
gaauuauaagaaagcaaaggcccaggaagauu

SEQ ID NO: 153218 - RNA, 32 nt, Human
gaauuauagaagaugugaagaaaacaacacac

SEQ ID NO: 153219 - RNA, 32 nt, Human
gaauuauaggcacacgccaccaugcccgguua

SEQ ID NO: 153220 - RNA, 32 nt, Human
gaauuauaggcgugcaccaccacgcccagcua

SEQ ID NO: 153221 - RNA, 32 nt, Human
gaauuauaucacagaguauacacacauggugu

SEQ ID NO: 153222 - RNA, 32 nt, Human
gaauuaucacccagacaugugcagaugaaaug

SEQ ID NO: 153223 - RNA, 32 nt, Human
gaauuaucugugaauguugggaagaggaaugc

SEQ ID NO: 153224 - RNA, 32 nt, Human
gaauuaugagguagagguggaggcggagccgg

SEQ ID NO: 153225 - RNA, 32 nt, Human
gaauuaugguaguuugaagauguggauacaaa

SEQ ID NO: 153226 - RNA, 32 nt, Human
gaauuauguagugccuuuacuauuucacuuuc

SEQ ID NO: 153227 - RNA, 32 nt, Human
gaauuauuaguacuauccuguagacccagaga

SEQ ID NO: 153228 - RNA, 32 nt, Human
gaauuauugcagcugacuaccauaccucacac

SEQ ID NO: 153229 - RNA, 32 nt, Human
gaauuauuguuaucuuuaccuccugaguaaua

SEQ ID NO: 153230 - RNA, 32 nt, Human
gaauuauuuccuccucccuccaggcagaugca

SEQ ID NO: 153231 - RNA, 32 nt, Human
gaauucaaaacaauaaggcacuugugggugca

SEQ ID NO: 153232 - RNA, 32 nt, Human
gaauucaaccaauuucuccaaugacuacucca

SEQ ID NO: 153233 - RNA, 32 nt, Human
gaauucaagaauugagguuugggaacuucugc

SEQ ID NO: 153234 - RNA, 32 nt, Human
gaauucaaggugacaaucaagcccaauggcuu

SEQ ID NO: 153235 - RNA, 32 nt, Human
gaauucaaguccuaaagccuacaguuuugaau

SEQ ID NO: 153236 - RNA, 32 nt, Human
gaauucacacagacuuuacagcacaucagaaa

SEQ ID NO: 153237 - RNA, 32 nt, Human
gaauucacacccgccugguuucuugaagugug

SEQ ID NO: 153238 - RNA, 32 nt, Human
gaauucacaggcaaugugcaaauucuugauga

SEQ ID NO: 153239 - RNA, 32 nt, Human
gaauucaccagagacucaaagaucuuuuauug

SEQ ID NO: 153240 - RNA, 32 nt, Human
gaauucaccuuggaaaugcaccgccucaacuu

SEQ ID NO: 153241 - RNA, 32 nt, Human
gaauucacucagaaaggaaucgagaacaacau

SEQ ID NO: 153242 - RNA, 32 nt, Human
gaauucagaaaagaaugggugauuaaaguuca

SEQ ID NO: 153243 - RNA, 23 nt, Human
gaauucagaaguggagauuucag

SEQ ID NO: 153244 - RNA, 32 nt, Human
gaauucagacuugcauggguccuguaaccccu

SEQ ID NO: 153245 - RNA, 32 nt, Human
gaauucagaucugccuugugugaacagaaccu

SEQ ID NO: 153246 - RNA, 32 nt, Human
gaauucagcaugaggcugggcaugguggcuga

SEQ ID NO: 153247 - RNA, 32 nt, Human
gaauucagccugagggcaauggggagcccuuu

SEQ ID NO: 153248 - RNA, 32 nt, Human
gaauucagcuuaucugaauuauuuuccaaagg

SEQ ID NO: 153249 - RNA, 30 nt, Human
gaauucagcuugcagaauggaagcugaauc

SEQ ID NO: 153250 - RNA, 30 nt, Human
gaauucagcuuggaagcagaaagaaugacc

SEQ ID NO: 153251 - RNA, 24 nt, Human
gaauucaggaggcggagguugcag

SEQ ID NO: 153252 - RNA, 32 nt, Human
gaauucaggaggcggagguugcagugagccaa

SEQ ID NO: 153253 - RNA, 24 nt, Human
gaauucaggagguggagguugcag

SEQ ID NO: 153254 - RNA, 32 nt, Human
gaauucaggagguggagguugcagugagccga

SEQ ID NO: 153255 - RNA, 21 nt, Human
gaauucagggagaaauguugu

SEQ ID NO: 153256 - RNA, 32 nt, Human
gaauucaguaugcacauacugaaugcauauau

SEQ ID NO: 153257 - RNA, 32 nt, Human
gaauucagugacaacaggaccaaccugcgcug

SEQ ID NO: 153258 - RNA, 32 nt, Human
gaauucauaagcucuguucccuguccugcuug

SEQ ID NO: 153259 - RNA, 32 nt, Human
gaauucauuagguggagacagggagcgaacuc

SEQ ID NO: 153260 - RNA, 32 nt, Human
gaauucauucccucaggaucugaagaucucag

SEQ ID NO: 153261 - RNA, 32 nt, Human
gaauucauuucugaaaaugaugaaccuccgcu

SEQ ID NO: 153262 - RNA, 32 nt, Human
gaauuccaaacagccucuaccuugcgagccgu

SEQ ID NO: 153263 - RNA, 32 nt, Human
gaauuccaaauacagagacuggugguguuaca

SEQ ID NO: 153264 - RNA, 32 nt, Human
gaauuccacaguuaucagagacccugucuucc

SEQ ID NO: 153265 - RNA, 32 nt, Human
gaauuccacaucuucccgcucucagcucugag

SEQ ID NO: 153266 - RNA, 24 nt, Human
gaauuccagaccucaggugaucca

SEQ ID NO: 153267 - RNA, 32 nt, Human
gaauuccagcggcgccgccagagucugaacaa

SEQ ID NO: 153268 - RNA, 32 nt, Human
gaauuccaggcaacagucugaccaagggugua

SEQ ID NO: 153269 - RNA, 32 nt, Human
gaauuccaggggcaacugagcauccaccccau

SEQ ID NO: 153270 - RNA, 32 nt, Human
gaauuccaucucaggaaugaaauaaagcacag

SEQ ID NO: 153271 - RNA, 32 nt, Human
gaauucccagcugucugugucagccugucccc

SEQ ID NO: 153272 - RNA, 32 nt, Human
gaauucccaggcaccuccaacagagagacugg

SEQ ID NO: 153273 - RNA, 32 nt, Human
gaauucccagugccacucaucucccaucucca

SEQ ID NO: 153274 - RNA, 32 nt, Human
gaauuccccggccuggccagggcggagcggcg

SEQ ID NO: 153275 - RNA, 32 nt, Human
gaauuccccugcucuccuuccuacccuuuggu

SEQ ID NO: 153276 - RNA, 32 nt, Human
gaauuccccuggcauauuacaaagccaccacu

SEQ ID NO: 153277 - RNA, 32 nt, Human
gaauuccccuugccaccccacccucccuggcg

SEQ ID NO: 153278 - RNA, 24 nt, Human
gaauucccgaccucagguaaucca

SEQ ID NO: 153279 - RNA, 32 nt, Human
gaauucccgcggccuccaccugcuugcuaggg

SEQ ID NO: 153280 - RNA, 32 nt, Human
gaauucccucauuuccuucaagucugcucaaa

SEQ ID NO: 153281 - RNA, 32 nt, Human
gaauucccucccccuccuugugccuucuuugu

SEQ ID NO: 153282 - RNA, 32 nt, Human
gaauuccggcuccucggaguccuggcccuccc

SEQ ID NO: 153283 - RNA, 32 nt, Human
gaauuccggcucucugggugagagaccgagag

SEQ ID NO: 153284 - RNA, 32 nt, Human
gaauuccgggccgaaggugccugggcuugcuc

SEQ ID NO: 153285 - RNA, 32 nt, Human
gaauuccuauguuuuccucuugcccacauagu

SEQ ID NO: 153286 - RNA, 32 nt, Human
gaauuccucacaccuaacccugauaguuaccu

SEQ ID NO: 153287 - RNA, 32 nt, Human
gaauuccucgaugagcaggacagagcagccuu

SEQ ID NO: 153288 - RNA, 24 nt, Human
gaauuccugaccucaagugaucca

SEQ ID NO: 153289 - RNA, 24 nt, Human
gaauuccugaccucaagugaucua

SEQ ID NO: 153290 - RNA, 24 nt, Human
gaauuccugaccucaggugaucca

SEQ ID NO: 153291 - RNA, 24 nt, Human
gaauuccugaccucaguugaucca

SEQ ID NO: 153292 - RNA, 32 nt, Human
gaauuccugagccucagagaccucugcacugu

SEQ ID NO: 153293 - RNA, 32 nt, Human
gaauuccugcagagaagagcagggguggccag

SEQ ID NO: 153294 - RNA, 32 nt, Human
gaauuccugccuccacccucuuucucgccgcg

SEQ ID NO: 153295 - RNA, 32 nt, Human
gaauuccugugccaccuccuccuuuagaaaac

SEQ ID NO: 153296 - RNA, 32 nt, Human
gaauuccuguucuccuugugcuaugauuugga

SEQ ID NO: 153297 - RNA, 32 nt, Human
gaauuccuuagguaugggauuuaugagaccag

SEQ ID NO: 153298 - RNA, 32 nt, Human
gaauuccuuccuccucauccuugguguugcuu

SEQ ID NO: 153299 - RNA, 32 nt, Human
gaauuccuuuagcugggaacagcugucauggu

SEQ ID NO: 153300 - RNA, 32 nt, Human
gaauuccuuuguccaggagaaaccucacaaac

SEQ ID NO: 153301 - RNA, 32 nt, Human
gaauucgaccaaaggauuuggaagaguuuuuc

SEQ ID NO: 153302 - RNA, 32 nt, Human
gaauucgcgaggcagagguugcagcgaaccca

SEQ ID NO: 153303 - RNA, 32 nt, Human
gaauucgcggccgccucuugcggucccagagu

SEQ ID NO: 153304 - RNA, 32 nt, Human
gaauucgcuugagccugggaggcggagguugc

SEQ ID NO: 153305 - RNA, 32 nt, Human
gaauucggcacgagggaccucacucuggccuu

SEQ ID NO: 153306 - RNA, 24 nt, Human
gaauucgggaaguggagguugcag

SEQ ID NO: 153307 - RNA, 24 nt, Human
gaauucgggagguggagguugcag

SEQ ID NO: 153308 - RNA, 32 nt, Human
gaauucgggagguggagguugcagugagccga

SEQ ID NO: 153309 - RNA, 32 nt, Human
gaauucgggggcugcggagagggugcuuaacu

SEQ ID NO: 153310 - RNA, 32 nt, Human
gaauucgguggccugcagagcuugccauuugc

SEQ ID NO: 153311 - RNA, 31 nt, Human
gaauucuaaguguccaccccagggaggcaag

SEQ ID NO: 153312 - RNA, 32 nt, Human
gaauucuacaggguugcucuaagaacugucuu

SEQ ID NO: 153313 - RNA, 32 nt, Human
gaauucuagagcagaguccaggagagcccagu

SEQ ID NO: 153314 - RNA, 32 nt, Human
gaauucuagguagcuuguuuguuauuauuuuu

SEQ ID NO: 153315 - RNA, 32 nt, Human
gaauucuaucucuaaaccucagggugggggcc

SEQ ID NO: 153316 - RNA, 32 nt, Human
gaauucuauuaaagacacaauugggcucugca

SEQ ID NO: 153317 - RNA, 32 nt, Human
gaauucuauuuugagagauuguauuuaugagu

SEQ ID NO: 153318 - RNA, 32 nt, Human
gaauucucaccaccuucugguuaagcaagugu

SEQ ID NO: 153319 - RNA, 32 nt, Human
gaauucucauguaacccagcagucccacuucu

SEQ ID NO: 153320 - RNA, 32 nt, Human
gaauucucccacagggagaggccccgugggua

SEQ ID NO: 153321 - RNA, 32 nt, Human
gaauucucccaugucaucaccccaccaccguc

SEQ ID NO: 153322 - RNA, 32 nt, Human
gaauucucgaacugcauguauugugccaaucu

SEQ ID NO: 153323 - RNA, 32 nt, Human
gaauucucucagcugucaauggcuuggagaac

SEQ ID NO: 153324 - RNA, 32 nt, Human
gaauucucucaggggucuaggaggggcauuuu

SEQ ID NO: 153325 - RNA, 32 nt, Human
gaauucugaaguuuuaaaaaugucaguaauua

SEQ ID NO: 153326 - RNA, 32 nt, Human
gaauucugagaggcaggaacugcucugucuuu

SEQ ID NO: 153327 - RNA, 32 nt, Human
gaauucugcaccccaucucuucugauuguugg

SEQ ID NO: 153328 - RNA, 32 nt, Human
gaauucugcccuuuccaaaaggaagacgguau

SEQ ID NO: 153329 - RNA, 32 nt, Human
gaauucugcuuugggagguugaggugggagga

SEQ ID NO: 153330 - RNA, 32 nt, Human
gaauucuggaaagagaaauucuugaggacccu

SEQ ID NO: 153331 - RNA, 32 nt, Human
gaauucuggcacugcacuggguaggaaaaagg

SEQ ID NO: 153332 - RNA, 32 nt, Human
gaauucugggaauccacagcucuggcuuugga

SEQ ID NO: 153333 - RNA, 32 nt, Human
gaauucugguguuuacacaaccaaauuugaug

SEQ ID NO: 153334 - RNA, 32 nt, Human
gaauucuuacuucacaucuuggucuuccccua

SEQ ID NO: 153335 - RNA, 32 nt, Human
gaauucuuaggcaaccuucauaccuuuaucug

SEQ ID NO: 153336 - RNA, 32 nt, Human
gaauucuuccaagaagaaguugaaggauagug

SEQ ID NO: 153337 - RNA, 32 nt, Human
gaauucuucccaauuuagccuaucuccuuaaa

SEQ ID NO: 153338 - RNA, 32 nt, Human
gaauucuugagcaaaaggaggggaagagacaa

SEQ ID NO: 153339 - RNA, 32 nt, Human
gaauucuugcuccuggccgugguuaagcugug

SEQ ID NO: 153340 - RNA, 32 nt, Human
gaauucuuuccucuccuggauuuccuucacca

SEQ ID NO: 153341 - RNA, 32 nt, Human
gaauucuuuccuucucauccuuaguuuaaggu

SEQ ID NO: 153342 - RNA, 31 nt, Human
gaauucuuucugccccucccugugucccggg

SEQ ID NO: 153343 - RNA, 32 nt, Human
gaauucuuucuuugcgcugaacacugggcagc

SEQ ID NO: 153344 - RNA, 18 nt, Human
gaauugaaaggaguugaa

SEQ ID NO: 153345 - RNA, 32 nt, Human
gaauugaaccacccauuuuccuuucuuagcca

SEQ ID NO: 153346 - RNA, 32 nt, Human
gaauugaaccauuucaacuauuuucuauauuu

SEQ ID NO: 153347 - RNA, 32 nt, Human
gaauugaagacucucagggcucaccugggagg

SEQ ID NO: 153348 - RNA, 32 nt, Human
gaauugacagcccaggcguagggucgggagug

SEQ ID NO: 153349 - RNA, 32 nt, Human
gaauugaccaaagguggaggagaacagaugug

SEQ ID NO: 153350 - RNA, 32 nt, Human
gaauugagaacagugaggucugucuuugcuua

SEQ ID NO: 153351 - RNA, 32 nt, Human
gaauugagagagaagaagggggagaggaacag

SEQ ID NO: 153352 - RNA, 32 nt, Human
gaauugagagccacugcuauagcugauccuuc

SEQ ID NO: 153353 - RNA, 32 nt, Human
gaauugagccugggaggcggguccggagaggg

SEQ ID NO: 153354 - RNA, 32 nt, Human
gaauugagcugcagaaagugcaagacaugcca

SEQ ID NO: 153355 - RNA, 32 nt, Human
gaauugaggagagaguaggaugcugauuuucc

SEQ ID NO: 153356 - RNA, 32 nt, Human
gaauugcaauuuagcaggagguccucuacugg

SEQ ID NO: 153357 - RNA, 32 nt, Human
gaauugcagacgugagccaccaugcccagcca

SEQ ID NO: 153358 - RNA, 32 nt, Human
gaauugcaggucucuguacaggccaguuucuc

SEQ ID NO: 153359 - RNA, 32 nt, Human
gaauugcaggugaaagggagaauuuuagacuu

SEQ ID NO: 153360 - RNA, 31 nt, Human
gaauugcaguuuccucacuucagggugacaa

SEQ ID NO: 153361 - RNA, 32 nt, Human
gaauugccaagccuggugccuuuccaaaggac

SEQ ID NO: 153362 - RNA, 32 nt, Human
gaauugccacugcaccugagauaagggggauc

SEQ ID NO: 153363 - RNA, 32 nt, Human
gaauugcccuccagguauccucagucuuucug

SEQ ID NO: 153364 - RNA, 32 nt, Human
gaauugccugugaagcugggguugcaggcagg

SEQ ID NO: 153365 - RNA, 32 nt, Human
gaauugccuugaaggagagggagagggauccu

SEQ ID NO: 153366 - RNA, 32 nt, Human
gaauugcucaaguucauugaugacccucugac

SEQ ID NO: 153367 - RNA, 32 nt, Human
gaauugcuccacccacaccuccaugaccaagg

SEQ ID NO: 153368 - RNA, 32 nt, Human
gaauugcucugccauccuugucccugugucuc

SEQ ID NO: 153369 - RNA, 32 nt, Human
gaauugcugggaaaagacagaaacuaagaagu

SEQ ID NO: 153370 - RNA, 32 nt, Human
gaauugcuugaacccaggcggcagagguugca

SEQ ID NO: 153371 - RNA, 32 nt, Human
gaauugcuugaacucagaaggcagagguugca

SEQ ID NO: 153372 - RNA, 32 nt, Human
gaauugcuugaacucagaaggcggaggcugca

SEQ ID NO: 153373 - RNA, 32 nt, Human
gaauugcuugagcccaggagguugaggcugca

SEQ ID NO: 153374 - RNA, 32 nt, Human
gaauugcuugccaaagaaguuucuagccuuuc

SEQ ID NO: 153375 - RNA, 32 nt, Human
gaauugcuuugcuuuggugaacuuguccuagu

SEQ ID NO: 153376 - RNA, 23 nt, Human
gaauuggaaaucugugucgagua

SEQ ID NO: 153377 - RNA, 32 nt, Human
gaauuggaaauuccugauaaagaauuggccug

SEQ ID NO: 153378 - RNA, 23 nt, Human
gaauuggaagaacuacuaaagug

SEQ ID NO: 153379 - RNA, 32 nt, Human
gaauuggacacuucuccagauauuuggcuuca

SEQ ID NO: 153380 - RNA, 21 nt, Human
gaauuggacucaacucgagua

SEQ ID NO: 153381 - RNA, 32 nt, Human
gaauuggaggcugcagugagcuaugaucacgc

SEQ ID NO: 153382 - RNA, 32 nt, Human
gaauuggaguuggaagguugcauaggguuucc

SEQ ID NO: 153383 - RNA, 32 nt, Human
gaauuggccauccugaggacacagccaggacg

SEQ ID NO: 153384 - RNA, 32 nt, Human
gaauuggccauugguaaaaagacuucauaggg

SEQ ID NO: 153385 - RNA, 32 nt, Human
gaauuggcugcaacuugccagccagggggaca

SEQ ID NO: 153386 - RNA, 32 nt, Human
gaauuggcuuuggaucuggccuauagauuagu

SEQ ID NO: 153387 - RNA, 32 nt, Human
gaauugggcagggagagggcggaagggcuggc

SEQ ID NO: 153388 - RNA, 32 nt, Human
gaauuggggaggcggagguugcagugagcuga

SEQ ID NO: 153389 - RNA, 32 nt, Human
gaauuggggagggagaaaggguaguucaaaga

SEQ ID NO: 153390 - RNA, 32 nt, Human
gaauuggggcuccagugcucaggcuggcuugg

SEQ ID NO: 153391 - RNA, 32 nt, Human
gaauuggggugaggcaaggcacaaacauucag

SEQ ID NO: 153392 - RNA, 32 nt, Human
gaauuggguggugggcaugcugggcaggcuug

SEQ ID NO: 153393 - RNA, 32 nt, Human
gaauuggguuuguggcaaagagcuugacccag

SEQ ID NO: 153394 - RNA, 32 nt, Human
gaauuggugcuugaaauuuauugguuuuguug

SEQ ID NO: 153395 - RNA, 32 nt, Human
gaauugguggucugggcuggauuccagagaac

SEQ ID NO: 153396 - RNA, 32 nt, Human
gaauuggugguuuuucugaagugugggggaaa

SEQ ID NO: 153397 - RNA, 32 nt, Human
gaauuguaauucuaguaaaacaugucauacca

SEQ ID NO: 153398 - RNA, 32 nt, Human
gaauuguccuugguuuuuccuuagcucauagg

SEQ ID NO: 153399 - RNA, 32 nt, Human
gaauugucugaaagaaaagcagaaggaacauc

SEQ ID NO: 153400 - RNA, 32 nt, Human
gaauugucuguaauccuacaggacuauggcac

SEQ ID NO: 153401 - RNA, 32 nt, Human
gaauugucuguucucuaucagcacuuuaaaga

SEQ ID NO: 153402 - RNA, 32 nt, Human
gaauugugacauccugaauaaauaauuugacu

SEQ ID NO: 153403 - RNA, 32 nt, Human
gaauuguggccaccuucauaccagucugucau

SEQ ID NO: 153404 - RNA, 32 nt, Human
gaauuguuggaaaauuuucucggagguagaag

SEQ ID NO: 153405 - RNA, 32 nt, Human
gaauuguugggcagcagaaaaccaccaaaguu

SEQ ID NO: 153406 - RNA, 32 nt, Human
gaauuuaaacucaacuaagucugccaggucgu

SEQ ID NO: 153407 - RNA, 32 nt, Human
gaauuuaaagacucauccccagccuccaccuc

SEQ ID NO: 153408 - RNA, 32 nt, Human
gaauuuaaaggauuucauggaagaaccaaguu

SEQ ID NO: 153409 - RNA, 32 nt, Human
gaauuuaaauacugugcuuacugugaaauaua

SEQ ID NO: 153410 - RNA, 32 nt, Human
gaauuuaaauucugcauguagggcauauuuug

SEQ ID NO: 153411 - RNA, 32 nt, Human
gaauuuaaauuuucagauacccccucuuaccu

SEQ ID NO: 153412 - RNA, 32 nt, Human
gaauuuaaccaaguggcaauggcuaauucaga

SEQ ID NO: 153413 - RNA, 32 nt, Human
gaauuuaauagggaagaaagagacaguauaac

SEQ ID NO: 153414 - RNA, 32 nt, Human
gaauuuaauuuccaaguuacaaaaucauuauc

SEQ ID NO: 153415 - RNA, 32 nt, Human
gaauuuacaagauaccaggaaacccaucuguu

SEQ ID NO: 153416 - RNA, 32 nt, Human
gaauuuacaccggguccagcugcgucagcccg

SEQ ID NO: 153417 - RNA, 32 nt, Human
gaauuuaccguacaguaccucagucuagcugu

SEQ ID NO: 153418 - RNA, 32 nt, Human
gaauuuaccgucuucucauccucuguacaaaa

SEQ ID NO: 153419 - RNA, 32 nt, Human
gaauuuagauaugccaagaaagccacaugacc

SEQ ID NO: 153420 - RNA, 32 nt, Human
gaauuuagaucaugccuguaaucccaguacuu

SEQ ID NO: 153421 - RNA, 32 nt, Human
gaauuuagccucugaauaccuucuccauuggg

SEQ ID NO: 153422 - RNA, 32 nt, Human
gaauuuaguaaggaaucauggaaaagauaaag

SEQ ID NO: 153423 - RNA, 23 nt, Human
gaauuuaguccccaggugggaca

SEQ ID NO: 153424 - RNA, 32 nt, Human
gaauuuauuacacaucaugauacaacugguga

SEQ ID NO: 153425 - RNA, 32 nt, Human
gaauuuauuuccacaucugcucuuucaguggc

SEQ ID NO: 153426 - RNA, 32 nt, Human
gaauuucaaaaacaccauccagaagcuuugaa

SEQ ID NO: 153427 - RNA, 32 nt, Human
gaauuucaaccagccaagugcacagacaaaga

SEQ ID NO: 153428 - RNA, 32 nt, Human
gaauuucacauacuuuucuuaugucauuagau

SEQ ID NO: 153429 - RNA, 32 nt, Human
gaauuucacucuucucacccaggcuggaaugc

SEQ ID NO: 153430 - RNA, 32 nt, Human
gaauuucacugcaaucccccguaucauccaug

SEQ ID NO: 153431 - RNA, 21 nt, Human
gaauuucagagaaggcugcag

SEQ ID NO: 153432 - RNA, 32 nt, Human
gaauuucagcaacuucccuaccaucgaauuuu

SEQ ID NO: 153433 - RNA, 32 nt, Human
gaauuucaggcagagagugaagugaucagagu

SEQ ID NO: 153434 - RNA, 32 nt, Human
gaauuucaucuaaagcaaugauguaguauuuu

SEQ ID NO: 153435 - RNA, 32 nt, Human
gaauuucauuacccucucagcaugcuugcaga

SEQ ID NO: 153436 - RNA, 32 nt, Human
gaauuucauuggggaagagggagugaggccua

SEQ ID NO: 153437 - RNA, 32 nt, Human
gaauuuccaacauuccaucacuaauauuccuc

SEQ ID NO: 153438 - RNA, 32 nt, Human
gaauuuccaccugaucacccuguguucacagc

SEQ ID NO: 153439 - RNA, 32 nt, Human
gaauuuccaggggaaaguacuggagagauggg

SEQ ID NO: 153440 - RNA, 32 nt, Human
gaauuucccugcuccuuccuuuaagaccaucu

SEQ ID NO: 153441 - RNA, 32 nt, Human
gaauuucccuucucucccuugucacagguuua

SEQ ID NO: 153442 - RNA, 32 nt, Human
gaauuuccuaaucgcccucaccucuggcuuca

SEQ ID NO: 153443 - RNA, 32 nt, Human
gaauuuccucaaguggccuguaggcuccuugu

SEQ ID NO: 153444 - RNA, 32 nt, Human
gaauuuccuccaggaaacucagggcuguuuuc

SEQ ID NO: 153445 - RNA, 32 nt, Human
gaauuuccuucuucacacaccccacaucucug

SEQ ID NO: 153446 - RNA, 32 nt, Human
gaauuucguuggggaagagggagugaggccua

SEQ ID NO: 153447 - RNA, 32 nt, Human
gaauuucuaugagaccucccccagggaggggg

SEQ ID NO: 153448 - RNA, 32 nt, Human
gaauuucuauugaaugcuggaaacauuaggaa

SEQ ID NO: 153449 - RNA, 32 nt, Human
gaauuucucucccucucucuuuuaauacuuuc

SEQ ID NO: 153450 - RNA, 32 nt, Human
gaauuucugauuaacuuuagagcuagaaagac

SEQ ID NO: 153451 - RNA, 32 nt, Human
gaauuucugccugguucagcccgcucagcucc

SEQ ID NO: 153452 - RNA, 32 nt, Human
gaauuucuggaagaaaggcuguggaagggcca

SEQ ID NO: 153453 - RNA, 32 nt, Human
gaauuucugggaggaugacgcagaugucugcu

SEQ ID NO: 153454 - RNA, 32 nt, Human
gaauuucugugacugccagucagaucuuaaca

SEQ ID NO: 153455 - RNA, 23 nt, Human
gaauuucuguucaaguuuuccca

SEQ ID NO: 153456 - RNA, 32 nt, Human
gaauuucuucacccaacuuaaauguucuugag

SEQ ID NO: 153457 - RNA, 32 nt, Human
gaauuucuucagccucuguaaguggccuuagc

SEQ ID NO: 153458 - RNA, 32 nt, Human
gaauuucuucauuugcucuugcaucuacauug

SEQ ID NO: 153459 - RNA, 32 nt, Human
gaauuucuucuuucugccaucuuuuggaauaa

SEQ ID NO: 153460 - RNA, 32 nt, Human
gaauuucuugggcggcuucuccaccuguaucu

SEQ ID NO: 153461 - RNA, 32 nt, Human
gaauuugaaaaaugauggccaguuuucagaag

SEQ ID NO: 153462 - RNA, 32 nt, Human
gaauuugaagucuaaaauauaaaagaugaaua

SEQ ID NO: 153463 - RNA, 18 nt, Human
gaauuugaccuugacuag

SEQ ID NO: 153464 - RNA, 24 nt, Human
gaauuugacuaauauguguguuuu

SEQ ID NO: 153465 - RNA, 32 nt, Human
gaauuugagaccuggccaacauggugaaaccc

SEQ ID NO: 153466 - RNA, 32 nt, Human
gaauuugagccuuggcuucuuuccacccagau

SEQ ID NO: 153467 - RNA, 32 nt, Human
gaauuugaggucuagagagaaccaauaaaagu

SEQ ID NO: 153468 - RNA, 32 nt, Human
gaauuugaucucugauugagcucucuucucug

SEQ ID NO: 153469 - RNA, 32 nt, Human
gaauuugcaaucaagggugacuucucagcuaa

SEQ ID NO: 153470 - RNA, 32 nt, Human
gaauuugcagugagcugagauugcgcuacuac

SEQ ID NO: 153471 - RNA, 32 nt, Human
gaauuugccuucucccugggaacugguucaag

SEQ ID NO: 153472 - RNA, 32 nt, Human
gaauuugcuccagcuuuucaacauaccucaga

SEQ ID NO: 153473 - RNA, 32 nt, Human
gaauuugcugcucucccuccccuuuccugcaa

SEQ ID NO: 153474 - RNA, 32 nt, Human
gaauuugcugggccuguuaugggugaaagagg

SEQ ID NO: 153475 - RNA, 32 nt, Human
gaauuuggagucuccaguucucacguuagggu

SEQ ID NO: 153476 - RNA, 32 nt, Human
gaauuuggauacacucucuagcuuuaggggac

SEQ ID NO: 153477 - RNA, 32 nt, Human
gaauuuggcccucccucuccccucucuacuuu

SEQ ID NO: 153478 - RNA, 32 nt, Human
gaauuugguacgcuggacccucggacagacag

SEQ ID NO: 153479 - RNA, 32 nt, Human
gaauuugguagagacgaagacaugcucaccgg

SEQ ID NO: 153480 - RNA, 32 nt, Human
gaauuuguaguaaaccaggccucccaggaugg

SEQ ID NO: 153481 - RNA, 32 nt, Human
gaauuugugaaaagauugcacaacuauauuau

SEQ ID NO: 153482 - RNA, 32 nt, Human
gaauuuguguacaaagauauuuguauucacuu

SEQ ID NO: 153483 - RNA, 32 nt, Human
gaauuuguuaagcgggacuccaggcaauuauu

SEQ ID NO: 153484 - RNA, 32 nt, Human
gaauuuguuaccuuacagaagagcaagggcuu

SEQ ID NO: 153485 - RNA, 32 nt, Human
gaauuuguuuggcuugggaaauuauggauucu

SEQ ID NO: 153486 - RNA, 32 nt, Human
gaauuuuaccaggucgugcacacacacaagcc

SEQ ID NO: 153487 - RNA, 32 nt, Human
gaauuuuauaaauauuuauucucuuuucuuug

SEQ ID NO: 153488 - RNA, 32 nt, Human
gaauuuuaugcauguaucuugccugcauauuu

SEQ ID NO: 153489 - RNA, 32 nt, Human
gaauuuuauuuggauccucagcagguugauuc

SEQ ID NO: 153490 - RNA, 28 nt, Human
gaauuuucaagugcuguuuuguuggaag

SEQ ID NO: 153491 - RNA, 32 nt, Human
gaauuuucaggucagaggcaagaaaaacucuu

SEQ ID NO: 153492 - RNA, 32 nt, Human
gaauuuucauuguuguuauauguauguacuuu

SEQ ID NO: 153493 - RNA, 32 nt, Human
gaauuuucauuucuuuccuuaucacccccuug

SEQ ID NO: 153494 - RNA, 32 nt, Human
gaauuuuccacuucuggcaucacgucagugcu

SEQ ID NO: 153495 - RNA, 32 nt, Human
gaauuuucccagaaaucacaccagccuuagaa

SEQ ID NO: 153496 - RNA, 32 nt, Human
gaauuuugagucuauccuagucuucacaacuu

SEQ ID NO: 153497 - RNA, 32 nt, Human
gaauuuugaugucguccaggcguccugggauc

SEQ ID NO: 153498 - RNA, 32 nt, Human
gaauuuugcucuauuguaaacaugguucaaaa

SEQ ID NO: 153499 - RNA, 32 nt, Human
gaauuuugcucuccucuucuaugcauugguag

SEQ ID NO: 153500 - RNA, 32 nt, Human
gaauuuuggaacauggccacugccucaccaaa

SEQ ID NO: 153501 - RNA, 32 nt, Human
gaauuuuuagacuuaaguucacugugauaucc

SEQ ID NO: 153502 - RNA, 32 nt, Human
gaauuuuuauuucucaauaccugcuucacuug

SEQ ID NO: 153503 - RNA, 32 nt, Human
gaauuuuucccaagauuccugucccuagcccu

SEQ ID NO: 153504 - RNA, 32 nt, Human
gaauuuuucucugauaaaucuaaugucuucug

SEQ ID NO: 153505 - RNA, 32 nt, Human
gaauuuuuggcucugguguuuucgccagacaa

SEQ ID NO: 153506 - RNA, 21 nt, Human
gacaaaaaagacauucccuca

SEQ ID NO: 153507 - RNA, 32 nt, Human
gacaaaaagguaguaugagucuggacucccaa

SEQ ID NO: 153508 - RNA, 32 nt, Human
gacaaaaaguaaaauuguacaugugaguuuac

SEQ ID NO: 153509 - RNA, 32 nt, Human
gacaaaaaugaggaaaacuaggggaccccaca

SEQ ID NO: 153510 - RNA, 32 nt, Human
gacaaaacagcacuccacugcuggugaauccc

SEQ ID NO: 153511 - RNA, 32 nt, Human
gacaaaaccaaacuucucagaaaacaacauga

SEQ ID NO: 153512 - RNA, 32 nt, Human
gacaaaacuaaccuugaauaaggcccacugua

SEQ ID NO: 153513 - RNA, 32 nt, Human
gacaaaacucacaacuaccugcucaaguucaa

SEQ ID NO: 153514 - RNA, 32 nt, Human
gacaaaacucagauggaggaaaaagaacaaaa

SEQ ID NO: 153515 - RNA, 32 nt, Human
gacaaaagacuugagacaggaugguuauucuu

SEQ ID NO: 153516 - RNA, 32 nt, Human
gacaaaagagccagggcuagggcuggaggggc

SEQ ID NO: 153517 - RNA, 32 nt, Human
gacaaaagauguccauuuucuucaaggaagua

SEQ ID NO: 153518 - RNA, 32 nt, Human
gacaaaagccuuugccuucaugaagcauacau

SEQ ID NO: 153519 - RNA, 32 nt, Human
gacaaaaggaaaucacugaggcuuucugaggu

SEQ ID NO: 153520 - RNA, 31 nt, Human
gacaaaaggagaccugaauuuuuggaagagc

SEQ ID NO: 153521 - RNA, 32 nt, Human
gacaaaauaugaauaaacuacugcaaauaugu

SEQ ID NO: 153522 - RNA, 32 nt, Human
gacaaaaucaauaaaacuaaugucccuccccu

SEQ ID NO: 153523 - RNA, 32 nt, Human
gacaaaauccugcagauagguuuaagaccuag

SEQ ID NO: 153524 - RNA, 32 nt, Human
gacaaaauccugccuaaccacacugcuuuauu

SEQ ID NO: 153525 - RNA, 32 nt, Human
gacaaaaugaaaaggcaaccuacgggauggaa

SEQ ID NO: 153526 - RNA, 32 nt, Human
gacaaaaugaaagaaaaugagagcagaaagua

SEQ ID NO: 153527 - RNA, 32 nt, Human
gacaaaauguuagccucuaaaggaagaauucu

SEQ ID NO: 153528 - RNA, 32 nt, Human
gacaaaauucaagaaaacacacacauacauaa

SEQ ID NO: 153529 - RNA, 32 nt, Human
gacaaaauucagaagauucaagagaaggaaag

SEQ ID NO: 153530 - RNA, 32 nt, Human
gacaaaauucagaucuaccugaacuugccucu

SEQ ID NO: 153531 - RNA, 23 nt, Human
gacaaaauuuaauucauuccuca

SEQ ID NO: 153532 - RNA, 32 nt, Human
gacaaacaagcccugaggagggaucugcaaca

SEQ ID NO: 153533 - RNA, 32 nt, Human
gacaaacacagccaaggggauauuuacugcuc

SEQ ID NO: 153534 - RNA, 22 nt, Human
gacaaacaccaggaaacaugua

SEQ ID NO: 153535 - RNA, 32 nt, Human
gacaaacacugcgccaagagcuccucagcaga

SEQ ID NO: 153536 - RNA, 32 nt, Human
gacaaacagcaacucucagcuugcuucaagaa

SEQ ID NO: 153537 - RNA, 32 nt, Human
gacaaacagcacaugccuggcacacauguagg

SEQ ID NO: 153538 - RNA, 32 nt, Human
gacaaacaggcagggagccacagucagggaca

SEQ ID NO: 153539 - RNA, 32 nt, Human
gacaaacauauauguauguaugaauguacaua

SEQ ID NO: 153540 - RNA, 32 nt, Human
gacaaacauggagaaaccccaucucuacuaaa

SEQ ID NO: 153541 - RNA, 32 nt, Human
gacaaaccaaagguaaccagcuagcccaccac

SEQ ID NO: 153542 - RNA, 32 nt, Human
gacaaaccauggcugcugcuuucugcccagcu

SEQ ID NO: 153543 - RNA, 32 nt, Human
gacaaacccaggagcacugggaguuaagcuuu

SEQ ID NO: 153544 - RNA, 32 nt, Human
gacaaaccuaggucccccuccuagccucuguc

SEQ ID NO: 153545 - RNA, 32 nt, Human
gacaaaccuuucuaacccggggccuccaaacc

SEQ ID NO: 153546 - RNA, 32 nt, Human
gacaaacugaagcuuuccugcaccacuggacu

SEQ ID NO: 153547 - RNA, 32 nt, Human
gacaaacugcaaccuaacuuaauagguagaaa

SEQ ID NO: 153548 - RNA, 32 nt, Human
gacaaacugcaaccuaacuuaauagguaggaa

SEQ ID NO: 153549 - RNA, 32 nt, Human
gacaaacugcaaccuaaguuaauagguaggaa

SEQ ID NO: 153550 - RNA, 32 nt, Human
gacaaacuggaaauacaacaagaagugggcaa

SEQ ID NO: 153551 - RNA, 32 nt, Human
gacaaacuggagugauguuccuggagaugaaa

SEQ ID NO: 153552 - RNA, 32 nt, Human
gacaaacuuccuccaaggcucccccagauuua

SEQ ID NO: 153553 - RNA, 32 nt, Human
gacaaacuuuaagagcuacuugaaauaacaga

SEQ ID NO: 153554 - RNA, 32 nt, Human
gacaaacuuuccgauagggcucaguaggauca

SEQ ID NO: 153555 - RNA, 32 nt, Human
gacaaacuuucugaacaccaccaccaccaaua

SEQ ID NO: 153556 - RNA, 32 nt, Human
gacaaagaagaaauuucagagugaaggaauuu

SEQ ID NO: 153557 - RNA, 32 nt, Human
gacaaagaaucccucuguucacugugguggga

SEQ ID NO: 153558 - RNA, 32 nt, Human
gacaaagacagcccuaaugacaucaccaacag

SEQ ID NO: 153559 - RNA, 32 nt, Human
gacaaagacugcaguaaacaaagcuccucuuu

SEQ ID NO: 153560 - RNA, 32 nt, Human
gacaaagagacuguugguaacuguggauuucc

SEQ ID NO: 153561 - RNA, 32 nt, Human
gacaaagagcccagaggccgggcaccauggcg

SEQ ID NO: 153562 - RNA, 32 nt, Human
gacaaagaucauuccacucagccugggacgau

SEQ ID NO: 153563 - RNA, 32 nt, Human
gacaaagauccaggaaaggagggcucaggagg

SEQ ID NO: 153564 - RNA, 32 nt, Human
gacaaagauggaccaugugcccuucggaauua

SEQ ID NO: 153565 - RNA, 32 nt, Human
gacaaagauguucuuccucuuccccgacccac

SEQ ID NO: 153566 - RNA, 32 nt, Human
gacaaagauuccagagcaaaauaauuaugaua

SEQ ID NO: 153567 - RNA, 32 nt, Human
gacaaagcaacaacaaaaugugcucuacucua

SEQ ID NO: 153568 - RNA, 32 nt, Human
gacaaagcacagaacucaguugucucuguaga

SEQ ID NO: 153569 - RNA, 32 nt, Human
gacaaagcaggugagggaggcauuucauucca

SEQ ID NO: 153570 - RNA, 32 nt, Human
gacaaagcauugauaggaguucuuacaauaua

SEQ ID NO: 153571 - RNA, 32 nt, Human
gacaaagcauuuucacauguaucucaugugau

SEQ ID NO: 153572 - RNA, 32 nt, Human
gacaaagccagaggagaagacaacccugacag

SEQ ID NO: 153573 - RNA, 32 nt, Human
gacaaagcccaggccugucaagagacgcagag

SEQ ID NO: 153574 - RNA, 20 nt, Human
gacaaagccgcgagcccagg

SEQ ID NO: 153575 - RNA, 32 nt, Human
gacaaagcugggaucaaggauagggaguugua

SEQ ID NO: 153576 - RNA, 32 nt, Human
gacaaaggcagagauaugccugccugguaagg

SEQ ID NO: 153577 - RNA, 32 nt, Human
gacaaagggcccuggccuauuuugagcgguua

SEQ ID NO: 153578 - RNA, 32 nt, Human
gacaaagggcccuguuucucagcaugagcuuc

SEQ ID NO: 153579 - RNA, 32 nt, Human
gacaaagggcucuguccuccucgacccuagug

SEQ ID NO: 153580 - RNA, 32 nt, Human
gacaaaggugacuuauaaauauauuuaguguu

SEQ ID NO: 153581 - RNA, 32 nt, Human
gacaaagucaaauaaacccccaaggacgacac

SEQ ID NO: 153582 - RNA, 32 nt, Human
gacaaagucacacuauuaccacugcccaacca

SEQ ID NO: 153583 - RNA, 32 nt, Human
gacaaagucuaaggaagaaucggccagugggc

SEQ ID NO: 153584 - RNA, 32 nt, Human
gacaaagucucgcacugucucccaggcuggac

SEQ ID NO: 153585 - RNA, 24 nt, Human
gacaaaguuugaauggaaaagccu

SEQ ID NO: 153586 - RNA, 32 nt, Human
gacaaaguuuggggaauuuuugaauuuuccua

SEQ ID NO: 153587 - RNA, 32 nt, Human
gacaaauaacaagaagcaacauuuugagaaug

SEQ ID NO: 153588 - RNA, 18 nt, Human
gacaaauacgaacaugua

SEQ ID NO: 153589 - RNA, 32 nt, Human
gacaaauacuacucaaauacuacuuuuuaaaa

SEQ ID NO: 153590 - RNA, 32 nt, Human
gacaaaucaacgggaaacagcccagggguggg

SEQ ID NO: 153591 - RNA, 32 nt, Human
gacaaaucaccaccaccaguguuaagugcuuc

SEQ ID NO: 153592 - RNA, 32 nt, Human
gacaaaucucaccaaaucagaguucagguuuu

SEQ ID NO: 153593 - RNA, 30 nt, Human
gacaaaugaagccacagggaaagugaaaua

SEQ ID NO: 153594 - RNA, 32 nt, Human
gacaaaugaaguauuucacauuuuccauugag

SEQ ID NO: 153595 - RNA, 20 nt, Human
gacaaaugaucaccauguua

SEQ ID NO: 153596 - RNA, 17 nt, Human
gacaaaugaucuauguu

SEQ ID NO: 153597 - RNA, 32 nt, Human
gacaaaugcaagcaucuuccuuaucaaucagc

SEQ ID NO: 153598 - RNA, 32 nt, Human
gacaaauggggaggggacaccaugcugaggca

SEQ ID NO: 153599 - RNA, 32 nt, Human
gacaaauuagaugacaaaaaucauuaagaagu

SEQ ID NO: 153600 - RNA, 25 nt, Human
gacaaauuggauuuuuaaaguuaaa

SEQ ID NO: 153601 - RNA, 32 nt, Human
gacaaauuuggaagcagcagggccagagagcc

SEQ ID NO: 153602 - RNA, 32 nt, Human
gacaacacaggauauuauaccaggaggcagga

SEQ ID NO: 153603 - RNA, 32 nt, Human
gacaacacccagcuuuauguaaauauucugca

SEQ ID NO: 153604 - RNA, 32 nt, Human
gacaacagaaaccauucagagcagaggggacu

SEQ ID NO: 153605 - RNA, 32 nt, Human
gacaacagaccugagccacuuuucccagccug

SEQ ID NO: 153606 - RNA, 32 nt, Human
gacaacagaggaagaagggaacugggauuugg

SEQ ID NO: 153607 - RNA, 32 nt, Human
gacaacagagugagacccccaucucuccaaaa

SEQ ID NO: 153608 - RNA, 17 nt, Human
gacaacagccaagcaca

SEQ ID NO: 153609 - RNA, 32 nt, Human
gacaacagccuccucacugaucuccccuuucu

SEQ ID NO: 153610 - RNA, 32 nt, Human
gacaacagguacgcaccaccacggccagcuaa

SEQ ID NO: 153611 - RNA, 19 nt, Human
gacaacaguaggagcaggc

SEQ ID NO: 153612 - RNA, 32 nt, Human
gacaacauagugagacccccaucucuaaauaa

SEQ ID NO: 153613 - RNA, 32 nt, Human
gacaacauccuacaguaccccaaagaggagaa

SEQ ID NO: 153614 - RNA, 32 nt, Human
gacaacaugaugagauccccaucucuaaaagu

SEQ ID NO: 153615 - RNA, 32 nt, Human
gacaacauguacauaaagauuucuuuucaguu

SEQ ID NO: 153616 - RNA, 32 nt, Human
gacaacauguuuccgugacucaucuagucaga

SEQ ID NO: 153617 - RNA, 32 nt, Human
gacaaccaccaccaccacccccacacccacca

SEQ ID NO: 153618 - RNA, 32 nt, Human
gacaaccagggaccgcagcuccccgcucccca

SEQ ID NO: 153619 - RNA, 32 nt, Human
gacaacccaacuccauccucagucuccguggc

SEQ ID NO: 153620 - RNA, 32 nt, Human
gacaacccagagaccuggggucagccuuaagu

SEQ ID NO: 153621 - RNA, 32 nt, Human
gacaaccccaggaacuuggaccaaggcagagc

SEQ ID NO: 153622 - RNA, 23 nt, Human
gacaacccugcaaaggacuguuu

SEQ ID NO: 153623 - RNA, 32 nt, Human
gacaacccugcaggugcucacccugcugcuga

SEQ ID NO: 153624 - RNA, 19 nt, Human
gacaacccuggguagccug

SEQ ID NO: 153625 - RNA, 19 nt, Human
gacaaccucacagucuuga

SEQ ID NO: 153626 - RNA, 18 nt, Human
gacaaccucuauguccgg

SEQ ID NO: 153627 - RNA, 32 nt, Human
gacaaccucucggaggagccugagauggaaag

SEQ ID NO: 153628 - RNA, 32 nt, Human
gacaaccucugccucucggauucaaccgauuc

SEQ ID NO: 153629 - RNA, 18 nt, Human
gacaaccucugguaaucu

SEQ ID NO: 153630 - RNA, 32 nt, Human
gacaaccugauggaacauuugcaccugaguug

SEQ ID NO: 153631 - RNA, 32 nt, Human
gacaaccugccccuccccagcccuuugcaggc

SEQ ID NO: 153632 - RNA, 16 nt, Human
gacaaccugcugcugg

SEQ ID NO: 153633 - RNA, 32 nt, Human
gacaacgagcuugccauugaucugcaacaaac

SEQ ID NO: 153634 - RNA, 32 nt, Human
gacaacgcuagagguguucaguucugggagac

SEQ ID NO: 153635 - RNA, 32 nt, Human
gacaacggcagagggagugagcaggggagaaa

SEQ ID NO: 153636 - RNA, 32 nt, Human
gacaacgguuuagcuaugaaauuuggggccca

SEQ ID NO: 153637 - RNA, 32 nt, Human
gacaacucaugccuuaauuuuguauuuugaau

SEQ ID NO: 153638 - RNA, 32 nt, Human
gacaacuccaaagccccggcucuuuccaccac

SEQ ID NO: 153639 - RNA, 32 nt, Human
gacaacuccguguagcauuaacccccguggcg

SEQ ID NO: 153640 - RNA, 32 nt, Human
gacaacuccuagugaacuuggacuugguugcu

SEQ ID NO: 153641 - RNA, 32 nt, Human
gacaacucgauuucuaaugacagcuuccguga

SEQ ID NO: 153642 - RNA, 32 nt, Human
gacaacugacaaggaagagcggaagggaaggg

SEQ ID NO: 153643 - RNA, 32 nt, Human
gacaacugagcagccucuggagaggggccauu

SEQ ID NO: 153644 - RNA, 32 nt, Human
gacaacugcacuccagugugggcgugccuuuu

SEQ ID NO: 153645 - RNA, 32 nt, Human
gacaacuggaugacuuuugagaacaaagaucu

SEQ ID NO: 153646 - RNA, 32 nt, Human
gacaacugucugcacucacggcacacacacuu

SEQ ID NO: 153647 - RNA, 32 nt, Human
gacaacuguggacuccaguuuuguugagaauu

SEQ ID NO: 153648 - RNA, 32 nt, Human
gacaacuucaaaugcuaacccgaugaccccag

SEQ ID NO: 153649 - RNA, 32 nt, Human
gacaacuucccaaggccgccuccugcuagcaa

SEQ ID NO: 153650 - RNA, 32 nt, Human
gacaacuugcucauggaguugcaguucuugcc

SEQ ID NO: 153651 - RNA, 32 nt, Human
gacaacuuggagauggagucucacucuguugc

SEQ ID NO: 153652 - RNA, 23 nt, Human
gacaacuuucagaaauucaggga

SEQ ID NO: 153653 - RNA, 32 nt, Human
gacaacuuucguuucccucugagggaauuggg

SEQ ID NO: 153654 - RNA, 18 nt, Human
gacaacuuugaguacuga

SEQ ID NO: 153655 - RNA, 32 nt, Human
gacaagaagagccagcccugggggucuggggg

SEQ ID NO: 153656 - RNA, 32 nt, Human
gacaagaagaguccuuuuagcacaucacugag

SEQ ID NO: 153657 - RNA, 19 nt, Human
gacaagaagcagauccugg

SEQ ID NO: 153658 - RNA, 32 nt, Human
gacaagaccacaccugguuaggcucgggaaaa

SEQ ID NO: 153659 - RNA, 32 nt, Human
gacaagaccagccuggccaacauggugaaacc

SEQ ID NO: 153660 - RNA, 32 nt, Human
gacaagaccagggcaggagggagccggccagc

SEQ ID NO: 153661 - RNA, 32 nt, Human
gacaagacccuggccucaggccggagcagccc

SEQ ID NO: 153662 - RNA, 32 nt, Human
gacaagacuucugcucagguuucccuggcugc

SEQ ID NO: 153663 - RNA, 32 nt, Human
gacaagagagcccagaggugccuggggcugag

SEQ ID NO: 153664 - RNA, 32 nt, Human
gacaagagcaggaacauguggaguaugauggu

SEQ ID NO: 153665 - RNA, 32 nt, Human
gacaagaggaauuggaagagcauuuuauguuu

SEQ ID NO: 153666 - RNA, 32 nt, Human
gacaagagggacaugcugaaacagguggggcu

SEQ ID NO: 153667 - RNA, 32 nt, Human
gacaagagggaucucuucuucagauuugcagu

SEQ ID NO: 153668 - RNA, 19 nt, Human
gacaagaguggcacugugg

SEQ ID NO: 153669 - RNA, 32 nt, Human
gacaagaguuucccuauauaacaaaccuucac

SEQ ID NO: 153670 - RNA, 32 nt, Human
gacaagauacuaagcuucugugccucauuuug

SEQ ID NO: 153671 - RNA, 32 nt, Human
gacaagaucugccucugucgcccaggcuggag

SEQ ID NO: 153672 - RNA, 32 nt, Human
gacaagaucuuucauuccccauccuuugaaca

SEQ ID NO: 153673 - RNA, 25 nt, Human
gacaagaugccuucccacccaggua

SEQ ID NO: 153674 - RNA, 32 nt, Human
gacaagauggagcugcucacuuuugccggguu

SEQ ID NO: 153675 - RNA, 24 nt, Human
gacaagauuaaaaugucugugcca

SEQ ID NO: 153676 - RNA, 32 nt, Human
gacaagauuacaaugaaccaacucagcuuccu

SEQ ID NO: 153677 - RNA, 32 nt, Human
gacaagauucacuuucuugagagccaucagca

SEQ ID NO: 153678 - RNA, 32 nt, Human
gacaagauugaagcuaggucucaggggucucc

SEQ ID NO: 153679 - RNA, 24 nt, Human
gacaagauugagaggcccaugcca

SEQ ID NO: 153680 - RNA, 32 nt, Human
gacaagcaaacugccuggaauagccuuuuccc

SEQ ID NO: 153681 - RNA, 18 nt, Human
gacaagcaaagcaagcca

SEQ ID NO: 153682 - RNA, 32 nt, Human
gacaagcaaccauguuaacuguauugacacau

SEQ ID NO: 153683 - RNA, 32 nt, Human
gacaagcacuauaugccuguaguaccugcacc

SEQ ID NO: 153684 - RNA, 22 nt, Human
gacaagcagcccaucaacgcca

SEQ ID NO: 153685 - RNA, 32 nt, Human
gacaagcagcgacagcucaucagcagucuaac

SEQ ID NO: 153686 - RNA, 32 nt, Human
gacaagcaggggcggcagaggcucaacgggau

SEQ ID NO: 153687 - RNA, 32 nt, Human
gacaagcagguaagagcugaugugagugugug

SEQ ID NO: 153688 - RNA, 19 nt, Human
gacaagcaucccaaggcca

SEQ ID NO: 153689 - RNA, 32 nt, Human
gacaagcaugggagaggggcugagggggagcc

SEQ ID NO: 153690 - RNA, 32 nt, Human
gacaagccacguccccucccaccucuccccaa

SEQ ID NO: 153691 - RNA, 32 nt, Human
gacaagccauguagguucucugggcuuuaguu

SEQ ID NO: 153692 - RNA, 20 nt, Human
gacaagcccacugggucugg

SEQ ID NO: 153693 - RNA, 25 nt, Human
gacaagcccauaaccucccuguucc

SEQ ID NO: 153694 - RNA, 32 nt, Human
gacaagcccuccgccuccuugccugcagaggg

SEQ ID NO: 153695 - RNA, 32 nt, Human
gacaagccuuuguucaaagcccuucagucacu

SEQ ID NO: 153696 - RNA, 32 nt, Human
gacaagcggcagcagaggcagcagcggcagag

SEQ ID NO: 153697 - RNA, 32 nt, Human
gacaagcuccucaugauucugaugcaccaaaa

SEQ ID NO: 153698 - RNA, 32 nt, Human
gacaagcuccugcuguggaagugccuuuugag

SEQ ID NO: 153699 - RNA, 32 nt, Human
gacaagcuguuuucacacagcccccacaucac

SEQ ID NO: 153700 - RNA, 32 nt, Human
gacaagcuuuggggaagagaaaaggaauauag

SEQ ID NO: 153701 - RNA, 32 nt, Human
gacaaggaaaucaagacccagcuugggggaaa

SEQ ID NO: 153702 - RNA, 32 nt, Human
gacaaggaagagaagagagagaggaggaaucu

SEQ ID NO: 153703 - RNA, 32 nt, Human
gacaaggacuccugaacgcugcucacucggcu

SEQ ID NO: 153704 - RNA, 32 nt, Human
gacaaggagaagagcaaggguucccucaagag

SEQ ID NO: 153705 - RNA, 32 nt, Human
gacaaggagaagaggaagggaggaagggaaca

SEQ ID NO: 153706 - RNA, 32 nt, Human
gacaaggagacacccccggagguuccagaucg

SEQ ID NO: 153707 - RNA, 32 nt, Human
gacaaggagacacugucagccugguguucacc

SEQ ID NO: 153708 - RNA, 32 nt, Human
gacaaggagacugccuucuccaucaugcccag

SEQ ID NO: 153709 - RNA, 32 nt, Human
gacaaggagaugguuccuggccccuguucucc

SEQ ID NO: 153710 - RNA, 32 nt, Human
gacaaggagccagcaguaggaucaagugacgc

SEQ ID NO: 153711 - RNA, 32 nt, Human
gaccgagaaaaaugcaguggucacgcuggaug

SEQ ID NO: 153712 - RNA, 32 nt, Human
gaccgagaagcuggaugugcucuggcucucuc

SEQ ID NO: 153713 - RNA, 32 nt, Human
gaccgagaugcugccacaggaccugagacacu

SEQ ID NO: 153714 - RNA, 32 nt, Human
gaccgagccacuguacuccagccuaggugaca

SEQ ID NO: 153715 - RNA, 32 nt, Human
gaccgaggagguggcuggacagcuggaggaug

SEQ ID NO: 153716 - RNA, 18 nt, Human
gaccgaggcagcccugcc

SEQ ID NO: 153717 - RNA, 32 nt, Human
gaccgaggcaggcggaucaugaggucaggaga

SEQ ID NO: 153718 - RNA, 32 nt, Human
gaccgagggcucugcugcuucuuuccagaaag

SEQ ID NO: 153719 - RNA, 32 nt, Human
gaccgaggggagcugggagcagguacugccuc

SEQ ID NO: 153720 - RNA, 18 nt, Human
gaccgagggucccagagg

SEQ ID NO: 153721 - RNA, 32 nt, Human
gaccgagggugaggcuggaggguccaaagcug

SEQ ID NO: 153722 - RNA, 32 nt, Human
gaccgaguccugggugcuuacauauuccuucg

SEQ ID NO: 153723 - RNA, 19 nt, Human
gaccgaguugccccagaga

SEQ ID NO: 153724 - RNA, 32 nt, Human
gaccgaugccccugacagccccguccaccagc

SEQ ID NO: 153725 - RNA, 32 nt, Human
gaccgauugggaggugguagaagcacugaaug

SEQ ID NO: 153726 - RNA, 32 nt, Human
gaccgcaaauuguccuucauggguagagucag

SEQ ID NO: 153727 - RNA, 32 nt, Human
gaccgcaccacugcacuccagccugggcgaca

SEQ ID NO: 153728 - RNA, 32 nt, Human
gaccgcacugggaaacacagaugaggaaaguc

SEQ ID NO: 153729 - RNA, 32 nt, Human
gaccgcagcccugacgugucucgccucuccuc

SEQ ID NO: 153730 - RNA, 32 nt, Human
gaccgcagugccccaagagagcucuaauggua

SEQ ID NO: 153731 - RNA, 32 nt, Human
gaccgcauccuggaacaccuguccucgggcag

SEQ ID NO: 153732 - RNA, 32 nt, Human
gaccgccacccuuguuggaagggagacaggca

SEQ ID NO: 153733 - RNA, 32 nt, Human
gaccgccacugcccaccgccuccagcagccau

SEQ ID NO: 153734 - RNA, 32 nt, Human
gaccgccccugccgcuggcugcagauggcuga

SEQ ID NO: 153735 - RNA, 32 nt, Human
gaccgcccugcuccggccccaguguggugggc

SEQ ID NO: 153736 - RNA, 32 nt, Human
gaccgccgaucuguccucguucucuccugcac

SEQ ID NO: 153737 - RNA, 23 nt, Human
gaccgccuggccuccuaccuaga

SEQ ID NO: 153738 - RNA, 23 nt, Human
gaccgccuggccuccuaccugga

SEQ ID NO: 153739 - RNA, 32 nt, Human
gaccgcgccacugcacuccagccugggcaaca

SEQ ID NO: 153740 - RNA, 32 nt, Human
gaccgcgccagccugucacuaaugucucccuu

SEQ ID NO: 153741 - RNA, 32 nt, Human
gaccgcggaagaggcuucagacgcugcagcga

SEQ ID NO: 153742 - RNA, 18 nt, Human
gaccgcggcagggagcga

SEQ ID NO: 153743 - RNA, 32 nt, Human
gaccgcggcgucuccagccucgguaccauggc

SEQ ID NO: 153744 - RNA, 32 nt, Human
gaccgcggcugucgggucucccccucucugac

SEQ ID NO: 153745 - RNA, 18 nt, Human
gaccgcgggcgcugagcg

SEQ ID NO: 153746 - RNA, 32 nt, Human
gaccgcuacggagaagaaggcugcuacgagga

SEQ ID NO: 153747 - RNA, 32 nt, Human
gaccgcucaagggguuauucuaccucagccuc

SEQ ID NO: 153748 - RNA, 18 nt, Human
gaccgcuccuccaacuaa

SEQ ID NO: 153749 - RNA, 32 nt, Human
gaccgcucugcaguaccagcuccucugucucc

SEQ ID NO: 153750 - RNA, 31 nt, Human
gaccgcucugggagagaaauaagcacuggga

SEQ ID NO: 153751 - RNA, 32 nt, Human
gaccgcugcccaggugggguuuccugcaugga

SEQ ID NO: 153752 - RNA, 32 nt, Human
gaccgcugcucacggcucugcagucccgcggc

SEQ ID NO: 153753 - RNA, 32 nt, Human
gaccgcugcuucccucaccugccugccugucu

SEQ ID NO: 153754 - RNA, 32 nt, Human
gaccgcuuggagcauagaaaaugcagacaucc

SEQ ID NO: 153755 - RNA, 32 nt, Human
gaccggaaaccagcuuugucuccagguagaga

SEQ ID NO: 153756 - RNA, 32 nt, Human
gaccggacgugcacuccuccaguagcggcugc

SEQ ID NO: 153757 - RNA, 32 nt, Human
gaccggagaggaccuuggaccuguuaggcgca

SEQ ID NO: 153758 - RNA, 32 nt, Human
gaccggaggagaggagagcggggaagaggaga

SEQ ID NO: 153759 - RNA, 20 nt, Human
gaccggaggaggggccgcug

SEQ ID NO: 153760 - RNA, 32 nt, Human
gaccggagggaggaggaggaggaagaagagcg

SEQ ID NO: 153761 - RNA, 32 nt, Human
gaccggcaccacuggaaaggagucugguugga

SEQ ID NO: 153762 - RNA, 32 nt, Human
gaccggcagcaagaacuagaacuucgcggcua

SEQ ID NO: 153763 - RNA, 32 nt, Human
gaccggcaugaggauggaagaggcucagcauc

SEQ ID NO: 153764 - RNA, 32 nt, Human
gaccggccaccuggagccuccacaccuaagcu

SEQ ID NO: 153765 - RNA, 32 nt, Human
gaccggccggccagggcagggggcagcuagga

SEQ ID NO: 153766 - RNA, 32 nt, Human
gaccggccuguuccugaguuugagugccgacc

SEQ ID NO: 153767 - RNA, 25 nt, Human
gaccggcgccgcgggacggaagcga

SEQ ID NO: 153768 - RNA, 32 nt, Human
gaccggcucagcccugcuggggacagacgugc

SEQ ID NO: 153769 - RNA, 32 nt, Human
gaccggcugcccgugugccuggcagguggagc

SEQ ID NO: 153770 - RNA, 32 nt, Human
gaccggcuggauuccuuugcucucugaguggg

SEQ ID NO: 153771 - RNA, 32 nt, Human
gaccggcuucucacagugucucaggccacugc

SEQ ID NO: 153772 - RNA, 32 nt, Human
gaccgggaaagacaucccuggcaggcaucaga

SEQ ID NO: 153773 - RNA, 32 nt, Human
gaccgggaagagaagaccuagagcagacgccg

SEQ ID NO: 153774 - RNA, 32 nt, Human
gaccgggaagggaagucagggucuggggccca

SEQ ID NO: 153775 - RNA, 32 nt, Human
gaccgggacaacaaaguccauccugccgccgg

SEQ ID NO: 153776 - RNA, 32 nt, Human
gaccgggacucauuuuucuuuucuggacucua

SEQ ID NO: 153777 - RNA, 32 nt, Human
gaccgggagacagagguugcagugagcugaga

SEQ ID NO: 153778 - RNA, 32 nt, Human
gaccgggaggagaagguggugggcuaguccug

SEQ ID NO: 153779 - RNA, 32 nt, Human
gaccgggaggcaguggcuuggagaggcagcuu

SEQ ID NO: 153780 - RNA, 32 nt, Human
gaccgggccgcacuccagccugcccuucguga

SEQ ID NO: 153781 - RNA, 32 nt, Human
gaccgggcggcacgcacgcggugcaggguaac

SEQ ID NO: 153782 - RNA, 32 nt, Human
gaccgggcggcgggaauguucucacuucuccg

SEQ ID NO: 153783 - RNA, 32 nt, Human
gaccgggcgggcagaggaugccaggcggaggg

SEQ ID NO: 153784 - RNA, 32 nt, Human
gaccgggggcaaaggagguggcaugucgguca

SEQ ID NO: 153785 - RNA, 32 nt, Human
gaccgggucugcuucugucauugacuaggcca

SEQ ID NO: 153786 - RNA, 32 nt, Human
gaccgggugaagcuucgcuggcugccaggauc

SEQ ID NO: 153787 - RNA, 32 nt, Human
gaccggucuucugaccucuggcuccuuggagg

SEQ ID NO: 153788 - RNA, 32 nt, Human
gaccgguguaugggggacagcaggcgaagguc

SEQ ID NO: 153789 - RNA, 32 nt, Human
gaccguaaaggcacaggagccucgggacaagg

SEQ ID NO: 153790 - RNA, 23 nt, Human
gaccgucaucucugagcucccug

SEQ ID NO: 153791 - RNA, 32 nt, Human
gaccgucccacagcagccuccaccagggcccu

SEQ ID NO: 153792 - RNA, 32 nt, Human
gaccguccucaccccuguccucacugcucccu

SEQ ID NO: 153793 - RNA, 32 nt, Human
gaccguccucaccgagcuccugcaucccuuga

SEQ ID NO: 153794 - RNA, 32 nt, Human
gaccguccugcugagaaauugcacugaagaga

SEQ ID NO: 153795 - RNA, 32 nt, Human
gaccgugacaucuccccuaggcuccccagcag

SEQ ID NO: 153796 - RNA, 32 nt, Human
gaccgugacuacaggccagcugugaguggucc

SEQ ID NO: 153797 - RNA, 32 nt, Human
gaccgugauugagcccaagaaaccagggacuu

SEQ ID NO: 153798 - RNA, 22 nt, Human
gaccgugcacuguguagaugag

SEQ ID NO: 153799 - RNA, 32 nt, Human
gaccgugccacugcacuccagccuggcaacag

SEQ ID NO: 153800 - RNA, 32 nt, Human
gaccgugccacugcacuccagccugggcaaca

SEQ ID NO: 153801 - RNA, 32 nt, Human
gaccgugccacuguacuccagccugggcagca

SEQ ID NO: 153802 - RNA, 32 nt, Human
gaccgugcugagaagcaggagccccugugagg

SEQ ID NO: 153803 - RNA, 32 nt, Human
gaccgugcuugcccaauuccaggacuuccuca

SEQ ID NO: 153804 - RNA, 32 nt, Human
gaccguggacaaagggcugggccccucagagc

SEQ ID NO: 153805 - RNA, 21 nt, Human
gaccguggccacacuuuuuug

SEQ ID NO: 153806 - RNA, 32 nt, Human
gaccguggccucccucucagagggggagaacg

SEQ ID NO: 153807 - RNA, 32 nt, Human
gaccgugggagagccagagcaagagcugagag

SEQ ID NO: 153808 - RNA, 32 nt, Human
gaccguggggccaggauguuucuggcaggccc

SEQ ID NO: 153809 - RNA, 32 nt, Human
gaccguggucaccaccuucuucaccuuugcaa

SEQ ID NO: 153810 - RNA, 32 nt, Human
gaccgugucacccccugcauugugcugccauu

SEQ ID NO: 153811 - RNA, 32 nt, Human
gaccgugugugaaauucucuuuccuguagucc

SEQ ID NO: 153812 - RNA, 32 nt, Human
gaccguguuuaauuugguugcuggugaucaua

SEQ ID NO: 153813 - RNA, 32 nt, Human
gaccguucuauuguguggaugaccacauaaga

SEQ ID NO: 153814 - RNA, 32 nt, Human
gaccguuuagccacugccgucggucuccgggc

SEQ ID NO: 153815 - RNA, 32 nt, Human
gaccuaaacaccuuuaucagugccugggaaug

SEQ ID NO: 153816 - RNA, 32 nt, Human
gaccuaaacuccaaauccaagcucuuucccac

SEQ ID NO: 153817 - RNA, 32 nt, Human
gaccuaaaucuucuggugaaaagcuuuucacu

SEQ ID NO: 153818 - RNA, 32 nt, Human
gaccuaagacuucagaccagacuauugcccag

SEQ ID NO: 153819 - RNA, 32 nt, Human
gaccuaagagugagcgcggggugggggaggga

SEQ ID NO: 153820 - RNA, 32 nt, Human
gaccuaagcugcucccagucucccagaaccaa

SEQ ID NO: 153821 - RNA, 32 nt, Human
gaccuaaggugagagacuugacacauggaagg

SEQ ID NO: 153822 - RNA, 20 nt, Human
gaccuaaucugggagccugc

SEQ ID NO: 153823 - RNA, 32 nt, Human
gaccuacaaaucaaucacagcuuguauuuugu

SEQ ID NO: 153824 - RNA, 32 nt, Human
gaccuacauuuuuccuuccucccuuccuuccc

SEQ ID NO: 153825 - RNA, 32 nt, Human
gaccuaccacgaagccaccaccaccuucagua

SEQ ID NO: 153826 - RNA, 32 nt, Human
gaccuaccaggacgaggagcuggggagcuucc

SEQ ID NO: 153827 - RNA, 32 nt, Human
gaccuacccaggccacuggagugagucuagag

SEQ ID NO: 153828 - RNA, 32 nt, Human
gaccuacccugccuuguucuguccucuagagg

SEQ ID NO: 153829 - RNA, 32 nt, Human
gaccuaccugagccaccguccuagccaagcga

SEQ ID NO: 153830 - RNA, 32 nt, Human
gaccuacgcaucuccuccuccuuggacauucu

SEQ ID NO: 153831 - RNA, 32 nt, Human
gaccuacgccacuggaaacacacccaccgcaa

SEQ ID NO: 153832 - RNA, 32 nt, Human
gaccuagaauuggcuagguaaaaagcuuaaga

SEQ ID NO: 153833 - RNA, 32 nt, Human
gaccuagacagagaaaguuuaccugaggaagu

SEQ ID NO: 153834 - RNA, 32 nt, Human
gaccuagagccaguagaagcucucacagugag

SEQ ID NO: 153835 - RNA, 32 nt, Human
gaccuagagucuggagguugcaagggagacag

SEQ ID NO: 153836 - RNA, 32 nt, Human
gaccuagcacacacugacacaggggccuggac

SEQ ID NO: 153837 - RNA, 32 nt, Human
gaccuagcccaggcuuggaggccagcuggagg

SEQ ID NO: 153838 - RNA, 32 nt, Human
gaccuagcccccacccccacagagcucaaggg

SEQ ID NO: 153839 - RNA, 32 nt, Human
gaccuagccuaucaacccuuaggcgcuggaaa

SEQ ID NO: 153840 - RNA, 32 nt, Human
gaccuagccuuuggaagcaggguggccuccag

SEQ ID NO: 153841 - RNA, 32 nt, Human
gaccuagcuagugccuggugcccagugaccug

SEQ ID NO: 153842 - RNA, 32 nt, Human
gaccuaggagguggagguugcagugagcugag

SEQ ID NO: 153843 - RNA, 32 nt, Human
gaccuaggccuuucuccagcagucccagucgc

SEQ ID NO: 153844 - RNA, 32 nt, Human
gaccuagggaaagagaaagaaagaauaaaagc

SEQ ID NO: 153845 - RNA, 32 nt, Human
gaccuagggccaccugcuguucccugggauuc

SEQ ID NO: 153846 - RNA, 32 nt, Human
gaccuagggcgugcuucuagggccaaggucau

SEQ ID NO: 153847 - RNA, 32 nt, Human
gaccuagggcuggagugcaguugagcggucug

SEQ ID NO: 153848 - RNA, 32 nt, Human
gaccuagugcuguuucucccacauauucacau

SEQ ID NO: 153849 - RNA, 32 nt, Human
gaccuagugguguugucgugagugccaccuaa

SEQ ID NO: 153850 - RNA, 32 nt, Human
gaccuaguuaauuuacaaauacagauugaaua

SEQ ID NO: 153851 - RNA, 32 nt, Human
gaccuauaggcgccugccaccaugcccagcua

SEQ ID NO: 153852 - RNA, 32 nt, Human
gaccuauauggccaugcucuggcucuacccuu

SEQ ID NO: 153853 - RNA, 32 nt, Human
gaccuaucccaguugugugaggcugcgagaga

SEQ ID NO: 153854 - RNA, 32 nt, Human
gaccuaucuuuuucuguauucuccucugacca

SEQ ID NO: 153855 - RNA, 32 nt, Human
gaccuaugccgugcccuucauccagccagacc

SEQ ID NO: 153856 - RNA, 32 nt, Human
gaccuaugccugcaauccagcacuuugggaag

SEQ ID NO: 153857 - RNA, 32 nt, Human
gaccuauguaucagccguacacacagaaggca

SEQ ID NO: 153858 - RNA, 19 nt, Human
gaccuaugugaagugcucu

SEQ ID NO: 153859 - RNA, 32 nt, Human
gaccuauugagcagccucugaagagccauagg

SEQ ID NO: 153860 - RNA, 32 nt, Human
gaccucaaaauacaaaauuagcagggccucac

SEQ ID NO: 153861 - RNA, 32 nt, Human
gaccucaaauaaucccagcacuuugggaggcu

SEQ ID NO: 153862 - RNA, 32 nt, Human
gaccucaaaugacccacccaccucagccuccc

SEQ ID NO: 153863 - RNA, 32 nt, Human
gaccucaagacaccugggcagacacugcaaga

SEQ ID NO: 153864 - RNA, 32 nt, Human
gaccucaagagaggguuccuggaccucccaca

SEQ ID NO: 153865 - RNA, 32 nt, Human
gaccucaagucugccucuacugugucucacau

SEQ ID NO: 153866 - RNA, 32 nt, Human
gaccucaagugagccacaucugccucagccuc

SEQ ID NO: 153867 - RNA, 32 nt, Human
gaccucacaaagugcugggauuacaggcauga

SEQ ID NO: 153868 - RNA, 32 nt, Human
gaccucaccacugggcgcccugggcagccacu

SEQ ID NO: 153869 - RNA, 32 nt, Human
gaccucaccagagaccaggaggguuugguuag

SEQ ID NO: 153870 - RNA, 32 nt, Human
gaccucaccugguucucucuccccaucacccu

SEQ ID NO: 153871 - RNA, 32 nt, Human
gaccucacucagaaagacuaaaggaaauguaa

SEQ ID NO: 153872 - RNA, 32 nt, Human
gaccucacucagaaguccagagucuagcguag

SEQ ID NO: 153873 - RNA, 32 nt, Human
gaccucacucuugagcagcgcuuucagcugga

SEQ ID NO: 153874 - RNA, 32 nt, Human
gaccucacugccugccuccucuaccccaggag

SEQ ID NO: 153875 - RNA, 32 nt, Human
gaccucacuguugcugaaaggggaauuuucuu

SEQ ID NO: 153876 - RNA, 23 nt, Human
gaccucagaccucggcugggacc

SEQ ID NO: 153877 - RNA, 32 nt, Human
gaccucagagcccacucuccuuggcacccuga

SEQ ID NO: 153878 - RNA, 32 nt, Human
gaccucagcaacaaggcugugccugagcccaa

SEQ ID NO: 153879 - RNA, 32 nt, Human
gaccucagccucccggugaaggucaugaaagg

SEQ ID NO: 153880 - RNA, 32 nt, Human
gaccucagcggacccgugguggugcgggggau

SEQ ID NO: 153881 - RNA, 32 nt, Human
gaccucaggaaggagaugagggccggugcaua

SEQ ID NO: 153882 - RNA, 32 nt, Human
gaccucaggaggcggagguugcagugagccga

SEQ ID NO: 153883 - RNA, 32 nt, Human
gaccucaggaguucgagaccagccugggcaac

SEQ ID NO: 153884 - RNA, 32 nt, Human
gaccucaggaugggagaugaggagaagcggaa

SEQ ID NO: 153885 - RNA, 32 nt, Human
gaccucaggcgauccacccccaccucggcuuc

SEQ ID NO: 153886 - RNA, 31 nt, Human
gaccucagggcacaaagaugggugaaggcug

SEQ ID NO: 153887 - RNA, 32 nt, Human
gaccucaggggccagggcacugacaggacagg

SEQ ID NO: 153888 - RNA, 32 nt, Human
gaccucaggugaucaccgccucagcuuccuga

SEQ ID NO: 153889 - RNA, 21 nt, Human
gaccucaguccucgccuggag

SEQ ID NO: 153890 - RNA, 32 nt, Human
gaccucagugaguuggucagcucucuuggccu

SEQ ID NO: 153891 - RNA, 32 nt, Human
gaccucagugucaaaagauuugggaagaugaa

SEQ ID NO: 153892 - RNA, 32 nt, Human
gaccucaucacucugacucugccuucuuggaa

SEQ ID NO: 153893 - RNA, 32 nt, Human
gaccucaucguaacaccauuugcucaggugcu

SEQ ID NO: 153894 - RNA, 19 nt, Human
gaccucaucuuccaccuca

SEQ ID NO: 153895 - RNA, 32 nt, Human
gaccucaucuugacuacaucugaaaagacccu

SEQ ID NO: 153896 - RNA, 32 nt, Human
gaccucaugauccacccgccucagcuucccaa

SEQ ID NO: 153897 - RNA, 31 nt, Human
gaccucauggaccucguaggggaagacagaa

SEQ ID NO: 153898 - RNA, 32 nt, Human
gaccuccaaccaggaguaccuggaccugucca

SEQ ID NO: 153899 - RNA, 32 nt, Human
gaccuccaagcccaggaagccucaguuggcca

SEQ ID NO: 153900 - RNA, 28 nt, Human
gaccuccaagcuccugccucaccgucug

SEQ ID NO: 153901 - RNA, 32 nt, Human
gaccuccaaguacaauauucucaccuuccugc

SEQ ID NO: 153902 - RNA, 32 nt, Human
gaccuccagagucccugccccugcaguccugg

SEQ ID NO: 153903 - RNA, 32 nt, Human
gaccuccagcauuggucauaaccuucugccuc

SEQ ID NO: 153904 - RNA, 32 nt, Human
gaccuccagccugggggacagagcaagaccgu

SEQ ID NO: 153905 - RNA, 32 nt, Human
gaccuccaggagguagggagugaggccaguag

SEQ ID NO: 153906 - RNA, 32 nt, Human
gaccuccaggcuccugaugacacugaggauug

SEQ ID NO: 153907 - RNA, 31 nt, Human
gaccuccaguuucagcccugcccucagccuc

SEQ ID NO: 153908 - RNA, 32 nt, Human
gaccucccaaaaugcuggaauuacaggcguga

SEQ ID NO: 153909 - RNA, 32 nt, Human
gaccucccaaagcgcugggauuacaggcuccu

SEQ ID NO: 153910 - RNA, 32 nt, Human
gaccucccaaagugccgggauuacaggcauga

SEQ ID NO: 153911 - RNA, 32 nt, Human
gaccucccaaagugcuaggauuacagguuuga

SEQ ID NO: 153912 - RNA, 32 nt, Human
gaccucccaaagugcugagauuacaggcauga

SEQ ID NO: 153913 - RNA, 32 nt, Human
gaccucccaaagugcugagauuacaggcuuga

SEQ ID NO: 153914 - RNA, 32 nt, Human
gaccucccaaagugcuggaauuacaggcguga

SEQ ID NO: 153915 - RNA, 32 nt, Human
gaccucccaaagugcugggaugacaggcguga

SEQ ID NO: 153916 - RNA, 32 nt, Human
gaccucccaaagugcugggauuacagaauguu

SEQ ID NO: 153917 - RNA, 32 nt, Human
gaccucccaaagugcugggauuacaggcauga

SEQ ID NO: 153918 - RNA, 32 nt, Human
gaccucccaaagugcugggauuacaggcguga

SEQ ID NO: 153919 - RNA, 32 nt, Human
gaccucccaaagugcugggauuacaggcuuga

SEQ ID NO: 153920 - RNA, 32 nt, Human
gaccucccaaagugcugggauuacaggggaga

SEQ ID NO: 153921 - RNA, 32 nt, Human
gaccucccaaagugcugggauuacagguguga

SEQ ID NO: 153922 - RNA, 32 nt, Human
gaccucccaaagugcugggauuacuagacgua

SEQ ID NO: 153923 - RNA, 32 nt, Human
gaccucccaaagugcugugauuacagguguga

SEQ ID NO: 153924 - RNA, 32 nt, Human
gaccucccaaggugcugagauuacaggcguga

SEQ ID NO: 153925 - RNA, 26 nt, Human
gaccucccagaaccauggaagccagg

SEQ ID NO: 153926 - RNA, 32 nt, Human
gaccucccaggccugugacccuccacaccagc

SEQ ID NO: 153927 - RNA, 32 nt, Human
gaccucccaggugauccucccaccucagcuuc

SEQ ID NO: 153928 - RNA, 32 nt, Human
gaccucccaucugccuucugagcaccagcugc

SEQ ID NO: 153929 - RNA, 32 nt, Human
gaccucccauuagcaaacggugucaugguuug

SEQ ID NO: 153930 - RNA, 32 nt, Human
gaccuccccaaguccagaaggaaggaauggag

SEQ ID NO: 153931 - RNA, 32 nt, Human
gaccuccccacccccgcugggggugggggcgg

SEQ ID NO: 153932 - RNA, 32 nt, Human
gaccuccccaucagccugugcugcuaggucug

SEQ ID NO: 153933 - RNA, 32 nt, Human
gaccuccccaugcccuccccagccucucccag

SEQ ID NO: 153934 - RNA, 32 nt, Human
gaccuccccgcuguggggguuggggcuucagg

SEQ ID NO: 153935 - RNA, 32 nt, Human
gaccucccugcccccugcuccaagcuccccac

SEQ ID NO: 153936 - RNA, 32 nt, Human
gaccucccugccucucacacucuguguauuuu

SEQ ID NO: 153937 - RNA, 32 nt, Human
gaccucccugcgugcacggccuaggaggugca

SEQ ID NO: 153938 - RNA, 32 nt, Human
gaccucccuggcuugagugauccucccgcccc

SEQ ID NO: 153939 - RNA, 32 nt, Human
gaccucccuugccaugauaaccaccuucgcag

SEQ ID NO: 153940 - RNA, 32 nt, Human
gaccuccgccuccuggguucaagagacucucc

SEQ ID NO: 153941 - RNA, 32 nt, Human
gaccuccgccucugcacuccagccugggugac

SEQ ID NO: 153942 - RNA, 32 nt, Human
gaccuccgucccucagcuuucgggguucggca

SEQ ID NO: 153943 - RNA, 32 nt, Human
gaccuccuaaauuguugggauuacagguguga

SEQ ID NO: 153944 - RNA, 32 nt, Human
gaccuccuccccuccuggggccucagucuccu

SEQ ID NO: 153945 - RNA, 32 nt, Human
gaccuccucuuuccugugccuuauuguuucuc

SEQ ID NO: 153946 - RNA, 32 nt, Human
gaccuccugagugccggcuggccccuggagca

SEQ ID NO: 153947 - RNA, 32 nt, Human
gaccuccugauccgcccaccucagccucccaa

SEQ ID NO: 153948 - RNA, 32 nt, Human
gaccuccugaugcucaggagaagccaugggcc

SEQ ID NO: 153949 - RNA, 32 nt, Human
gaccuccugcagcucgcugagcacucccaggu

SEQ ID NO: 153950 - RNA, 32 nt, Human
gaccuccugccagaaaucagacguaaagaagc

SEQ ID NO: 153951 - RNA, 32 nt, Human
gaccuccugccuggcaucuugccccugcccaa

SEQ ID NO: 153952 - RNA, 32 nt, Human
gaccuccuggaaggcuggagcacaacugccuc

SEQ ID NO: 153953 - RNA, 32 nt, Human
gaccuccugggagccaagcuggucuggcaagg

SEQ ID NO: 153954 - RNA, 32 nt, Human
gaccuccugggcaggaaagggugcagguccug

SEQ ID NO: 153955 - RNA, 32 nt, Human
gaccuccugggccagaaucugcauuuuaacaa

SEQ ID NO: 153956 - RNA, 32 nt, Human
gaccuccuguaccucuaucguucccauuugug

SEQ ID NO: 153957 - RNA, 32 nt, Human
gaccuccugucugaccugguucucaacagacc

SEQ ID NO: 153958 - RNA, 16 nt, Human
gaccuccuucaucaca

SEQ ID NO: 153959 - RNA, 32 nt, Human
gaccucgaucugagacuuccagccuccagaac

SEQ ID NO: 153960 - RNA, 21 nt, Human
gaccucgcagagcuccugaca

SEQ ID NO: 153961 - RNA, 32 nt, Human
gaccucgccuagcacucugccuugccagagau

SEQ ID NO: 153962 - RNA, 20 nt, Human
gaccucggaccuugccgugg

SEQ ID NO: 153963 - RNA, 22 nt, Human
gaccucggagggagcccggcgg

SEQ ID NO: 153964 - RNA, 32 nt, Human
gaccucggcaacuggccgcacugacccgucaa

SEQ ID NO: 153965 - RNA, 32 nt, Human
gaccucggccuggacuacuauagcggggacag

SEQ ID NO: 153966 - RNA, 32 nt, Human
gaccucgguauuccuaaugugggaugugacuu

SEQ ID NO: 153967 - RNA, 32 nt, Human
gaccucggucaucuaccccaccccugccuguc

SEQ ID NO: 153968 - RNA, 32 nt, Human
gaccucgucaucugagacuuccccaugcccca

SEQ ID NO: 153969 - RNA, 21 nt, Human
gaccucguccucccccugcca

SEQ ID NO: 153970 - RNA, 32 nt, Human
gaccucgugauccaccugccucggcuucccaa

SEQ ID NO: 153971 - RNA, 32 nt, Human
gaccucgugaucugccucccucagcuuccuaa

SEQ ID NO: 153972 - RNA, 32 nt, Human
gaccucuacagacccaagucaccaaguggagc

SEQ ID NO: 153973 - RNA, 32 nt, Human
gaccucuacuccuccuugcgcucaccuugcca

SEQ ID NO: 153974 - RNA, 32 nt, Human
gaccucuagaccccaagaugugaacagugcac

SEQ ID NO: 153975 - RNA, 32 nt, Human
gaccucuagcgccucagacgcccgcgcaggag

SEQ ID NO: 153976 - RNA, 32 nt, Human
gaccucuaugagguauuuacugugcaauaacu

SEQ ID NO: 153977 - RNA, 32 nt, Human
gaccucucaaggcccugaccucaggggccagg

SEQ ID NO: 153978 - RNA, 32 nt, Human
gaccucucaaguagcugggauuacaagcacca

SEQ ID NO: 153979 - RNA, 32 nt, Human
gaccucucacugccucucggugaccuccgucc

SEQ ID NO: 153980 - RNA, 32 nt, Human
gaccucucaggaauauuugcaagugaaaauaa

SEQ ID NO: 153981 - RNA, 32 nt, Human
gaccucucagucagacuggggugcaggaccug

SEQ ID NO: 153982 - RNA, 32 nt, Human
gaccucuccacugccuccuccaccccuguauu

SEQ ID NO: 153983 - RNA, 32 nt, Human
gaccucuccuagccaccucugcccagccccuc

SEQ ID NO: 153984 - RNA, 32 nt, Human
gaccucuccucuauccagacccgcacagcugu

SEQ ID NO: 153985 - RNA, 32 nt, Human
gaccucuccugaggcccccagccugagacugu

SEQ ID NO: 153986 - RNA, 32 nt, Human
gaccucuccugccucucccauggcuuacagcu

SEQ ID NO: 153987 - RNA, 32 nt, Human
gaccucuccuggcaaugcucaguucugauuuu

SEQ ID NO: 153988 - RNA, 21 nt, Human
gaccucucgcuccacccagcu

SEQ ID NO: 153989 - RNA, 32 nt, Human
gaccucucuauguaagcacacaugcgcacaca

SEQ ID NO: 153990 - RNA, 32 nt, Human
gaccucucuccugggcaccaggaaccucuggc

SEQ ID NO: 153991 - RNA, 32 nt, Human
gaccucucugggacucaaccguggcuggaagg

SEQ ID NO: 153992 - RNA, 32 nt, Human
gaccucucugucccguccccugcccagucuca

SEQ ID NO: 153993 - RNA, 32 nt, Human
gaccucugacccugggagcuucuaccaaagac

SEQ ID NO: 153994 - RNA, 32 nt, Human
gaccucugaccucugccccacgcccagcacag

SEQ ID NO: 153995 - RNA, 32 nt, Human
gaccucugacgugcccuggagacauuuucccc

SEQ ID NO: 153996 - RNA, 32 nt, Human
gaccucugagccaccaguauccacggggcuug

SEQ ID NO: 153997 - RNA, 32 nt, Human
gaccucugagucuuacacauucugccugcuaa

SEQ ID NO: 153998 - RNA, 32 nt, Human
gaccucugcaggcccuggcauuuggaagagcu

SEQ ID NO: 153999 - RNA, 32 nt, Human
gaccucugcccuucagaguagccucaccauua

SEQ ID NO: 154000 - RNA, 32 nt, Human
gaccucuggccuggcccuccccaggggccucc

SEQ ID NO: 154001 - RNA, 32 nt, Human
gaccucuggcuccuguccucuggcuccaccug

SEQ ID NO: 154002 - RNA, 32 nt, Human
gaccucugguaccaccuggaugguggcauuag

SEQ ID NO: 154003 - RNA, 32 nt, Human
gaccucugucaccuggauggugggugcggguu

SEQ ID NO: 154004 - RNA, 32 nt, Human
gaccucugugcacuuauuuaugaaccugcccu

SEQ ID NO: 154005 - RNA, 32 nt, Human
gaccucuguggggagcuugcagggacuggcug

SEQ ID NO: 154006 - RNA, 32 nt, Human
gaccucugugugaagcaagugaaguauagcug

SEQ ID NO: 154007 - RNA, 32 nt, Human
gaccucuucacacccaaagaugcuuugucaag

SEQ ID NO: 154008 - RNA, 32 nt, Human
gaccucuucacugcuucucuccccuucgagaa

SEQ ID NO: 154009 - RNA, 32 nt, Human
gaccucuuccagcaggggaccuggggcugucc

SEQ ID NO: 154010 - RNA, 19 nt, Human
gaccucuucuccucauggu

SEQ ID NO: 154011 - RNA, 32 nt, Human
gaccucuucugcggccggccugggcagguguc

SEQ ID NO: 154012 - RNA, 32 nt, Human
gaccucuugagcuccuggaaauaguagaauua

SEQ ID NO: 154013 - RNA, 32 nt, Human
gaccucuuuacccauuccauuguucauucuuc

SEQ ID NO: 154014 - RNA, 32 nt, Human
gaccucuuucacagccucuccuuccuacaaag

SEQ ID NO: 154015 - RNA, 32 nt, Human
gaccucuuugauucugugguuuggaggcuccc

SEQ ID NO: 154016 - RNA, 32 nt, Human
gaccugaaaaagagaauguugauagccccagc

SEQ ID NO: 154017 - RNA, 32 nt, Human
gaccugaaacucuaccaacagccaccuggggg

SEQ ID NO: 154018 - RNA, 31 nt, Human
gaccugaaccucucugggcauauguccaguc

SEQ ID NO: 154019 - RNA, 21 nt, Human
gaccugaacucagaucucccu

SEQ ID NO: 154020 - RNA, 32 nt, Human
gaccugaacucgcaccuccuaccucuucaugu

SEQ ID NO: 154021 - RNA, 32 nt, Human
gaccugaagagcaccggggaauuuguaacccc

SEQ ID NO: 154022 - RNA, 32 nt, Human
gaccugaagauucaaggggaaacccaugacag

SEQ ID NO: 154023 - RNA, 32 nt, Human
gaccugaagcacuggcuccagccuuagggaag

SEQ ID NO: 154024 - RNA, 32 nt, Human
gaccugaagcuagacaggcagcaggacagugc

SEQ ID NO: 154025 - RNA, 32 nt, Human
gaccugaaggaugugacacgggagacacauua

SEQ ID NO: 154026 - RNA, 32 nt, Human
gaccugaaggguugacuuuacccauuugggug

SEQ ID NO: 154027 - RNA, 32 nt, Human
gaccugaccacgccggccuaggguuccagacu

SEQ ID NO: 154028 - RNA, 31 nt, Human
gaccugacccuacucccuugcccuagauagu

SEQ ID NO: 154029 - RNA, 32 nt, Human
gaccugaccugccuacucccuagaaagcacca

SEQ ID NO: 154030 - RNA, 32 nt, Human
gaccugaccuggggcuggccucaggcccacgu

SEQ ID NO: 154031 - RNA, 32 nt, Human
gaccugacuggucuuggcuggggucaggggcu

SEQ ID NO: 154032 - RNA, 32 nt, Human
gaccugagacacugaugaauggugcuauuuug

SEQ ID NO: 154033 - RNA, 32 nt, Human
gaccugagaccuuccaauugcuggugaggugg

SEQ ID NO: 154034 - RNA, 32 nt, Human
gaccugagccucacggaggccaugcuccagaa

SEQ ID NO: 154035 - RNA, 32 nt, Human
gaccugagcuggagccacuuggcuuagaagcc

SEQ ID NO: 154036 - RNA, 32 nt, Human
gaccugaggaaccugggcucugcuuccuccgc

SEQ ID NO: 154037 - RNA, 32 nt, Human
gaccugaggccuggccuuuagcugcugcccug

SEQ ID NO: 154038 - RNA, 32 nt, Human
gaccugagggaguccuacauccagcucgucca

SEQ ID NO: 154039 - RNA, 32 nt, Human
gaccugaguagcugggaccacaggcaugcgcc

SEQ ID NO: 154040 - RNA, 32 nt, Human
gaccugagugaagacugucauugguaggucau

SEQ ID NO: 154041 - RNA, 32 nt, Human
gaccugaguuuacuuuuuacuuuuggcaggua

SEQ ID NO: 154042 - RNA, 22 nt, Human
gaccugaugacugauuccagga

SEQ ID NO: 154043 - RNA, 20 nt, Human
gaccugauucacucauuuua

SEQ ID NO: 154044 - RNA, 32 nt, Human
gaccugcaaacccaaaagcuuaugggagcugg

SEQ ID NO: 154045 - RNA, 31 nt, Human
gaccugcaaagcuagaaucuagggcacuguu

SEQ ID NO: 154046 - RNA, 32 nt, Human
gaccugcaacaguuccagcccuggugacagag

SEQ ID NO: 154047 - RNA, 32 nt, Human
gaccugcaacuacaaccagcaaaaagaccagu

SEQ ID NO: 154048 - RNA, 32 nt, Human
gaccugcacaaaaccccugccuccccaguugu

SEQ ID NO: 154049 - RNA, 32 nt, Human
gaccugcacagccugucacagcauuuaaucac

SEQ ID NO: 154050 - RNA, 32 nt, Human
gaccugcagaagauacccaagguccaaaagca

SEQ ID NO: 154051 - RNA, 32 nt, Human
gaccugcagacuguggcagugugggggaccuu

SEQ ID NO: 154052 - RNA, 19 nt, Human
gaccugcagagugcccuca

SEQ ID NO: 154053 - RNA, 32 nt, Human
gaccugcaggaaaaauggcugcagugugugaa

SEQ ID NO: 154054 - RNA, 32 nt, Human
gaccugcaggcuccuccuggacagugaaacug

SEQ ID NO: 154055 - RNA, 32 nt, Human
gaccugcaguaucggugcaggaaaggcaaaga

SEQ ID NO: 154056 - RNA, 32 nt, Human
gaccugccaccccacagccagagguuucuggc

SEQ ID NO: 154057 - RNA, 32 nt, Human
gaccugccaggaagcagagagacccacagagc

SEQ ID NO: 154058 - RNA, 32 nt, Human
gaccugccaggaggcagccacaggcgagugcc

SEQ ID NO: 154059 - RNA, 23 nt, Human
gaccugcccacccaacuccugga

SEQ ID NO: 154060 - RNA, 32 nt, Human
gaccugcccagccccggggcccucacuggcuc

SEQ ID NO: 154061 - RNA, 32 nt, Human
gaccugccccagccuccucuuguacucugggg

SEQ ID NO: 154062 - RNA, 32 nt, Human
gaccugccccagggccagggauccucucccug

SEQ ID NO: 154063 - RNA, 32 nt, Human
gaccugcccccgcucugccaucagccccugcu

SEQ ID NO: 154064 - RNA, 32 nt, Human
gaccugcccccucagugucucucccucccgag

SEQ ID NO: 154065 - RNA, 23 nt, Human
gaccugcccccuucugcccagga

SEQ ID NO: 154066 - RNA, 32 nt, Human
gaccugccccuccaaacuccacaaguauggga

SEQ ID NO: 154067 - RNA, 32 nt, Human
gaccugccccucccacccccacccugccacua

SEQ ID NO: 154068 - RNA, 32 nt, Human
gaccugcccuccauucuaucuacucccucucu

SEQ ID NO: 154069 - RNA, 19 nt, Human
gaccugcccuuucugcucc

SEQ ID NO: 154070 - RNA, 32 nt, Human
gaccugccucaccagugcugccguugugcuga

SEQ ID NO: 154071 - RNA, 32 nt, Human
gaccugccuccauccaugagcuguaucuugau

SEQ ID NO: 154072 - RNA, 32 nt, Human
gaccugccucuggcccugguccugggcggggc

SEQ ID NO: 154073 - RNA, 22 nt, Human
gaccugccucuucucugaggga

SEQ ID NO: 154074 - RNA, 32 nt, Human
gaccugccugaagccggauucuccccacugcc

SEQ ID NO: 154075 - RNA, 19 nt, Human
gaccugccugagaagcuuc

SEQ ID NO: 154076 - RNA, 23 nt, Human
gaccugccugccucagacuucug

SEQ ID NO: 154077 - RNA, 32 nt, Human
gaccugccugcucuugugucaccauaaccacu

SEQ ID NO: 154078 - RNA, 32 nt, Human
gaccugccugggagcuuucucuugcauacccu

SEQ ID NO: 154079 - RNA, 32 nt, Human
gaccugccugucccccucccucuugucuuucc

SEQ ID NO: 154080 - RNA, 22 nt, Human
gaccugccuuccuuaccuggga

SEQ ID NO: 154081 - RNA, 24 nt, Human
gaccugccuuuucugacuccggga

SEQ ID NO: 154082 - RNA, 32 nt, Human
gaccugcggcuuaguucccugaggcaggcagg

SEQ ID NO: 154083 - RNA, 32 nt, Human
gaccugcgguaggagagagggacaacaguagg

SEQ ID NO: 154084 - RNA, 32 nt, Human
gaccugcuagggugcaggaggcuuccagaagc

SEQ ID NO: 154085 - RNA, 32 nt, Human
gaccugcucaagggagaugagaaaguggucca

SEQ ID NO: 154086 - RNA, 21 nt, Human
gaccugcucaugucagcuucu

SEQ ID NO: 154087 - RNA, 23 nt, Human
gaccugcuccaggcaaggcccua

SEQ ID NO: 154088 - RNA, 32 nt, Human
gaccugcucuccggcgcagacaggcggggccc

SEQ ID NO: 154089 - RNA, 20 nt, Human
gaccugcucugagaggcuuc

SEQ ID NO: 154090 - RNA, 32 nt, Human
gaccugcucugcccucuccccaccccuuccaa

SEQ ID NO: 154091 - RNA, 32 nt, Human
gaccugcugaauuggaacaagauccccagaug

SEQ ID NO: 154092 - RNA, 32 nt, Human
gaccugcugcagcuccuguaccacacugcgca

SEQ ID NO: 154093 - RNA, 32 nt, Human
gaccugcugcccggaaggaucaguggguggua

SEQ ID NO: 154094 - RNA, 32 nt, Human
gaccugcugcugaaaagggaagagggguagau

SEQ ID NO: 154095 - RNA, 32 nt, Human
gaccugcugcuuguggagcacugccuggccaa

SEQ ID NO: 154096 - RNA, 32 nt, Human
gaccugcugggaauggggugggugguagaccc

SEQ ID NO: 154097 - RNA, 32 nt, Human
gaccugcuggucugcacugacagccugaaggg

SEQ ID NO: 154098 - RNA, 21 nt, Human
gaccugcugucugcugucagc

SEQ ID NO: 154099 - RNA, 32 nt, Human
gaccugcuguuauucgcuuuuguucuccagug

SEQ ID NO: 154100 - RNA, 21 nt, Human
gaccugcuuaaaaagauucua

SEQ ID NO: 154101 - RNA, 21 nt, Human
gaccugcuucauucaagcuuc

SEQ ID NO: 154102 - RNA, 32 nt, Human
gaccugcuucugggcugccaugggacuugcgg

SEQ ID NO: 154103 - RNA, 19 nt, Human
gaccugcuugaagagcuuc

SEQ ID NO: 154104 - RNA, 32 nt, Human
gaccugcuuggucagcugcagguuguaaauag

SEQ ID NO: 154105 - RNA, 32 nt, Human
gaccugcuugguuaaggagggagugggccaga

SEQ ID NO: 154106 - RNA, 32 nt, Human
gaccugcuuugccauucuccuggugccgcugc

SEQ ID NO: 154107 - RNA, 32 nt, Human
gaccuggaaagucaucaccauggccaugauca

SEQ ID NO: 154108 - RNA, 32 nt, Human
gaccuggaaggugaaggugaaggugagacccu

SEQ ID NO: 154109 - RNA, 32 nt, Human
gaccuggaaucuuuugcucuuguuuuugcagu

SEQ ID NO: 154110 - RNA, 32 nt, Human
gaccuggacacuggccccuccacccucccucc

SEQ ID NO: 154111 - RNA, 32 nt, Human
gaccuggagagccauuaaaaacaacaacuggc

SEQ ID NO: 154112 - RNA, 32 nt, Human
gaccuggagagggagggcuggugacagccgug

SEQ ID NO: 154113 - RNA, 32 nt, Human
gaccuggagagggaggggcuguguagccuugg

SEQ ID NO: 154114 - RNA, 32 nt, Human
gaccuggagaugacgggaaggccagaugcaga

SEQ ID NO: 154115 - RNA, 32 nt, Human
gaccuggagcuucagccaggucugacuccaaa

SEQ ID NO: 154116 - RNA, 32 nt, Human
gaccuggaggaagaggaggaggaggaggagga

SEQ ID NO: 154117 - RNA, 32 nt, Human
gaccuggaggcugagcaggccggaguggaugg

SEQ ID NO: 154118 - RNA, 32 nt, Human
gaccuggaggcugaggaggagaggacgaggcu

SEQ ID NO: 154119 - RNA, 32 nt, Human
gaccuggagguggacggucagaaaguugaagu

SEQ ID NO: 154120 - RNA, 26 nt, Human
gaccuggcaggcggagguugcaguga

SEQ ID NO: 154121 - RNA, 32 nt, Human
gaccuggcaggcggagguugcagugagccgag

SEQ ID NO: 154122 - RNA, 32 nt, Human
gaccuggcaguggagggaggcugugcugugug

SEQ ID NO: 154123 - RNA, 32 nt, Human
gaccuggccgcgaacccccaccaugaagccca

SEQ ID NO: 154124 - RNA, 32 nt, Human
gaccuggccugggauccuuuccccaaacgcac

SEQ ID NO: 154125 - RNA, 32 nt, Human
gaccuggcugagcuccugccuccugucggccu

SEQ ID NO: 154126 - RNA, 32 nt, Human
gaccuggcugugagccccugagggcagggaca

SEQ ID NO: 154127 - RNA, 32 nt, Human
gaccuggcuuuuacugccuccugggccuucgu

SEQ ID NO: 154128 - RNA, 32 nt, Human
gaccugggacuggagcucuccugccacucucu

SEQ ID NO: 154129 - RNA, 32 nt, Human
gaccugggaggcacagggaggggagagauggg

SEQ ID NO: 154130 - RNA, 32 nt, Human
gaccugggaggcagagguuucagugagcccag

SEQ ID NO: 154131 - RNA, 32 nt, Human
gaccugggaggcggagauugcggugagccuag

SEQ ID NO: 154132 - RNA, 32 nt, Human
gaccugggaggcggagcuugcagugagcugaa

SEQ ID NO: 154133 - RNA, 32 nt, Human
gaccugggagguggagguugcagugagcugag

SEQ ID NO: 154134 - RNA, 26 nt, Human
gaccugggagguggagguugcgguga

SEQ ID NO: 154135 - RNA, 32 nt, Human
gaccugggagguggagguugcggugagcugag

SEQ ID NO: 154136 - RNA, 21 nt, Human
gaccugggccauugcaaccaa

SEQ ID NO: 154137 - RNA, 23 nt, Human
gaccugggcccucccacccauca

SEQ ID NO: 154138 - RNA, 30 nt, Human
gaccugggccucucccugccccuccauagg

SEQ ID NO: 154139 - RNA, 32 nt, Human
gaccugggcgagauggggcaggacagcgucca

SEQ ID NO: 154140 - RNA, 32 nt, Human
gaccugggcugcccucucagaaacuccagacu

SEQ ID NO: 154141 - RNA, 32 nt, Human
gaccugggcuggcacugcugggggugaggaca

SEQ ID NO: 154142 - RNA, 32 nt, Human
gaccugggcuggggccuuccuccagggaagga

SEQ ID NO: 154143 - RNA, 32 nt, Human
gaccugggcuuccucacaauauggcgguugcc

SEQ ID NO: 154144 - RNA, 32 nt, Human
gaccuggggaaaggagauggagcagcucuugg

SEQ ID NO: 154145 - RNA, 32 nt, Human
gaccuggggagcaguggcaggaggagacacuc

SEQ ID NO: 154146 - RNA, 32 nt, Human
gaccuggggccccagcauccuggagcacacgc

SEQ ID NO: 154147 - RNA, 32 nt, Human
gaccuggggccccagccgugcugugcugcuca

SEQ ID NO: 154148 - RNA, 32 nt, Human
gaccugggggacccaaagggucuggccucuuu

SEQ ID NO: 154149 - RNA, 18 nt, Human
gaccugggggccaggcug

SEQ ID NO: 154150 - RNA, 26 nt, Human
gaccuggggggcggagguugcaguga

SEQ ID NO: 154151 - RNA, 32 nt, Human
gaccugggggucaaggcaggaggacuccgaag

SEQ ID NO: 154152 - RNA, 32 nt, Human
gaccugggguagggaggaagagggugccgggg

SEQ ID NO: 154153 - RNA, 32 nt, Human
gaccugggguugcuggccagagccagggagga

SEQ ID NO: 154154 - RNA, 32 nt, Human
gaccugguauacuguaggugcacacaagauuc

SEQ ID NO: 154155 - RNA, 32 nt, Human
gaccugguccuggggcaacuugugcuaccgcg

SEQ ID NO: 154156 - RNA, 32 nt, Human
gaccuggucucagcaggcagguggcuggggcc

SEQ ID NO: 154157 - RNA, 32 nt, Human
gaccuggucuggggacugucaagugcuuuauc

SEQ ID NO: 154158 - RNA, 32 nt, Human
gaccuggugauguuagaagacaaguaguuuau

SEQ ID NO: 154159 - RNA, 32 nt, Human
gaccuggugccccugcucacugggcccgagcc

SEQ ID NO: 154160 - RNA, 32 nt, Human
gaccuggugggggagaggaagaaggaggguag

SEQ ID NO: 154161 - RNA, 32 nt, Human
gaccuggugucccugcaugaggcacagcccga

SEQ ID NO: 154162 - RNA, 32 nt, Human
gaccugguugccagcccaacaggaagcggccc

SEQ ID NO: 154163 - RNA, 32 nt, Human
gaccugguuggccgugguccagcucuuggccc

SEQ ID NO: 154164 - RNA, 32 nt, Human
gaccuguaggaaaagaggccagcucugcagcc

SEQ ID NO: 154165 - RNA, 32 nt, Human
gaccuguaguaaguaaagaaugucacuuucug

SEQ ID NO: 154166 - RNA, 32 nt, Human
gaccugucaaagugccagguugaaggaugaca

SEQ ID NO: 154167 - RNA, 32 nt, Human
gaccugucagcccucggagcucuggccugugg

SEQ ID NO: 154168 - RNA, 32 nt, Human
gaccuguccccagggcugcagcuguauccacc

SEQ ID NO: 154169 - RNA, 32 nt, Human
gaccugucccugucccuccucagcucuagggu

SEQ ID NO: 154170 - RNA, 32 nt, Human
gaccugucgcugcgcuuccuggagaacgcgcu

SEQ ID NO: 154171 - RNA, 32 nt, Human
gaccugucuccccagcucccacacagaaagca

SEQ ID NO: 154172 - RNA, 32 nt, Human
gaccugugaccuucugccagaauugucaugcc

SEQ ID NO: 154173 - RNA, 32 nt, Human
gaccugugccuuuuagagaagcucacaaugau

SEQ ID NO: 154174 - RNA, 32 nt, Human
gaccugugcuguucucgcuaugcuuuuuggga

SEQ ID NO: 154175 - RNA, 19 nt, Human
gaccugugcuugggcccug

SEQ ID NO: 154176 - RNA, 32 nt, Human
gaccuguggaaaacccagcaucugcagugccc

SEQ ID NO: 154177 - RNA, 32 nt, Human
gaccuguggagcuccucuccagccuccucuuu

SEQ ID NO: 154178 - RNA, 32 nt, Human
gaccuguggggccccagagaggggacauuucc

SEQ ID NO: 154179 - RNA, 29 nt, Human
gaccugugucugugucuguccugagaacu

SEQ ID NO: 154180 - RNA, 32 nt, Human
gaccugugugccagcccccaguuccuccccca

SEQ ID NO: 154181 - RNA, 32 nt, Human
gaccuguuacccaaauaaaagauguuucuaga

SEQ ID NO: 154182 - RNA, 32 nt, Human
gaccuguuccuuccugaaguccugggcaugca

SEQ ID NO: 154183 - RNA, 32 nt, Human
gaccuguuccuugagcucccccauaucagcag

SEQ ID NO: 154184 - RNA, 32 nt, Human
gaccuguucuggcaagguuuccaccucuuccu

SEQ ID NO: 154185 - RNA, 32 nt, Human
gaccuguucuugccugucaccugggccuacac

SEQ ID NO: 154186 - RNA, 23 nt, Human
gaccuguugacaaauguauuuaa

SEQ ID NO: 154187 - RNA, 23 nt, Human
gaccuguugcugggugauuuuag

SEQ ID NO: 154188 - RNA, 21 nt, Human
gaccuguugugcuguguauuu

SEQ ID NO: 154189 - RNA, 32 nt, Human
gaccuguuguguuguggugccauccucuuccc

SEQ ID NO: 154190 - RNA, 32 nt, Human
gaccuguuucaggcugugggcagugugcugga

SEQ ID NO: 154191 - RNA, 24 nt, Human
gaccuguuuuagugcugcauucga

SEQ ID NO: 154192 - RNA, 32 nt, Human
gaccuuaacgaccaaacccagaccaugccaaa

SEQ ID NO: 154193 - RNA, 32 nt, Human
gaccuuaagcaaaucacuuuccugauccaagc

SEQ ID NO: 154194 - RNA, 32 nt, Human
gaccuuaagccucuuuuccuccgcagagagga

SEQ ID NO: 154195 - RNA, 32 nt, Human
gaccuuaaggcugggugcaguggcucacgccu

SEQ ID NO: 154196 - RNA, 32 nt, Human
gaccuuacuccucuuuccuuccuuccuccuuu

SEQ ID NO: 154197 - RNA, 32 nt, Human
gaccuuagaaagcaaggcaugaccucagcucc

SEQ ID NO: 154198 - RNA, 32 nt, Human
gaccuuagagaaaagagaaaguagcucaaaga

SEQ ID NO: 154199 - RNA, 32 nt, Human
gaccuuaggaggaggaaggcgagggcggggug

SEQ ID NO: 154200 - RNA, 32 nt, Human
gaccuuagugaugcagaguuccugaguggugu

SEQ ID NO: 154201 - RNA, 32 nt, Human
gaccuuaguguuucugugcaugguggcaccag

SEQ ID NO: 154202 - RNA, 32 nt, Human
gaccuuaucugugcgugaaacacaccaggcug

SEQ ID NO: 154203 - RNA, 32 nt, Human
gaccuucaccacuggccucuagaaugguccag

SEQ ID NO: 154204 - RNA, 21 nt, Human
gaccuucacccagagcugccu

SEQ ID NO: 154205 - RNA, 32 nt, Human
gaccuucagacccagggaaagggugagggaga

SEQ ID NO: 154206 - RNA, 32 nt, Human
gaccuucagcaaaucacuucucucccugcgcu

SEQ ID NO: 154207 - RNA, 32 nt, Human
gaccuucaguaaggaguuacacaugccaucau

SEQ ID NO: 154208 - RNA, 32 nt, Human
gaccuucaucuucugccucaacuguaaaccac

SEQ ID NO: 154209 - RNA, 32 nt, Human
gaccuuccacucacuuucauccuccucuacuu

SEQ ID NO: 154210 - RNA, 32 nt, Human
gaccuuccagcucaccccucaggcucaggaaa

SEQ ID NO: 154211 - RNA, 32 nt, Human
gaccuuccaguucugucuccucagauugcugu

SEQ ID NO: 154212 - RNA, 32 nt, Human
gaccuuccauaaugcuacugucucacugaaac

SEQ ID NO: 154213 - RNA, 17 nt, Human
gaccuuccaucccugaa

SEQ ID NO: 154214 - RNA, 23 nt, Human
gaccuuccaucccugaauacaag

SEQ ID NO: 154215 - RNA, 23 nt, Human
gaccuuccaucuggugaaccaag

SEQ ID NO: 154216 - RNA, 32 nt, Human
gaccuuccaugugaugcacaggaagcugagau

SEQ ID NO: 154217 - RNA, 32 nt, Human
gaccuucccacacaaucccuguacucugaccc

SEQ ID NO: 154218 - RNA, 32 nt, Human
gaccuucccaucucccuggcuuuccaugcucc

SEQ ID NO: 154219 - RNA, 32 nt, Human
gaccuucccgagcccgugggggugggggaggc

SEQ ID NO: 154220 - RNA, 32 nt, Human
gaccuuccgccucucccccagggcccuggcca

SEQ ID NO: 154221 - RNA, 32 nt, Human
gaccuuccgcucucccccgggcgugggccggg

SEQ ID NO: 154222 - RNA, 32 nt, Human
gaccuuccuagaagucaagagcuagccuugag

SEQ ID NO: 154223 - RNA, 32 nt, Human
gaccuuccuagaguguuuggucggguucacag

SEQ ID NO: 154224 - RNA, 32 nt, Human
gaccuuccucaagcucaaugacuaccugcaga

SEQ ID NO: 154225 - RNA, 32 nt, Human
gaccuuccuccccuccccuuucacucaauucu

SEQ ID NO: 154226 - RNA, 32 nt, Human
gaccuuccuccuccucuucacuuggccaguuu

SEQ ID NO: 154227 - RNA, 32 nt, Human
gaccuuccucuggggcucuaggguugcuggag

SEQ ID NO: 154228 - RNA, 32 nt, Human
gaccuuccugcucuccagcaggggauccccac

SEQ ID NO: 154229 - RNA, 32 nt, Human
gaccuuccuggcugacuggcagaggaagauug

SEQ ID NO: 154230 - RNA, 32 nt, Human
gaccuuccuggucacacuugggccacaggaga

SEQ ID NO: 154231 - RNA, 32 nt, Human
gaccuucgggcugugcccggggaaaggcaagg

SEQ ID NO: 154232 - RNA, 32 nt, Human
gaccuucuauaagaauucagaccucauuagaa

SEQ ID NO: 154233 - RNA, 32 nt, Human
gaccuucuccacccuuguccucugcguggggc

SEQ ID NO: 154234 - RNA, 22 nt, Human
gaccuucucccauuucucccua

SEQ ID NO: 154235 - RNA, 32 nt, Human
gaccuucuccccuaagcuguaugagaacuguu

SEQ ID NO: 154236 - RNA, 32 nt, Human
gaccuucuccuccucaggaagaccuaagaggg

SEQ ID NO: 154237 - RNA, 22 nt, Human
gaccuucucuccagagcuccug

SEQ ID NO: 154238 - RNA, 32 nt, Human
gaccuucugccccagcugggccuggugcccug

SEQ ID NO: 154239 - RNA, 32 nt, Human
gaccuucuggaagcaagaccugggccuccaug

SEQ ID NO: 154240 - RNA, 22 nt, Human
gaccuucugggaaauggcuuga

SEQ ID NO: 154241 - RNA, 32 nt, Human
gaccuucugucugggacucaggaguccuaagg

SEQ ID NO: 154242 - RNA, 32 nt, Human
gaccuucugugccucagaucccugagugcccg

SEQ ID NO: 154243 - RNA, 32 nt, Human
gaccuucuguuuagcuuccucuugcuucccaa

SEQ ID NO: 154244 - RNA, 32 nt, Human
gaccuugaacugugcucaacagccuggcccuu

SEQ ID NO: 154245 - RNA, 24 nt, Human
gaccuugacucaacagccacuuug

SEQ ID NO: 154246 - RNA, 19 nt, Human
gaccuugacuccuaucuca

SEQ ID NO: 154247 - RNA, 32 nt, Human
gaccuugacuuuucugccuugugaauucguag

SEQ ID NO: 154248 - RNA, 32 nt, Human
gaccuugagaugugcccccugcccccacugug

SEQ ID NO: 154249 - RNA, 32 nt, Human
gaccuugauaggggcagaaaggaacaaaucug

SEQ ID NO: 154250 - RNA, 22 nt, Human
gaccuugaucaacucacuuuaa

SEQ ID NO: 154251 - RNA, 32 nt, Human
gaccuugauggaguggggaacaagcaguagag

SEQ ID NO: 154252 - RNA, 32 nt, Human
gaccuugauuccugccugggcaguucuagggc

SEQ ID NO: 154253 - RNA, 32 nt, Human
gaccuugcagugagccaagaucgugccacugc

SEQ ID NO: 154254 - RNA, 32 nt, Human
gaccuugcaguuaacuccgcccugacccaccc

SEQ ID NO: 154255 - RNA, 32 nt, Human
gaccuugcccagaacccugcugacugagagaa

SEQ ID NO: 154256 - RNA, 32 nt, Human
gaccuuggacaaacccuucccccucucugggc

SEQ ID NO: 154257 - RNA, 32 nt, Human
gaccuuggaccugcuugguuaaggagggagug

SEQ ID NO: 154258 - RNA, 32 nt, Human
gaccuuggagugagcccagugcaggggccuga

SEQ ID NO: 154259 - RNA, 32 nt, Human
gaccuuggcauaauuggugauccugaagaaag

SEQ ID NO: 154260 - RNA, 32 nt, Human
gaccuuggccaugaccuuaagcaguaggauau

SEQ ID NO: 154261 - RNA, 32 nt, Human
gaccuuggcucacugcaaccuccaggccagcc

SEQ ID NO: 154262 - RNA, 32 nt, Human
gaccuuggcuuccucugcugggugggauuggg

SEQ ID NO: 154263 - RNA, 32 nt, Human
gaccuugggaaaugaguugaugucuccgguaa

SEQ ID NO: 154264 - RNA, 32 nt, Human
gaccuugggcaggcagacugagaagggacugu

SEQ ID NO: 154265 - RNA, 32 nt, Human
gaccuugggcaggugcugccaggggccugagc

SEQ ID NO: 154266 - RNA, 32 nt, Human
gaccuuggggagaaggauggagccuccugccc

SEQ ID NO: 154267 - RNA, 32 nt, Human
gaccuugguccagugggcuguguccccaugcc

SEQ ID NO: 154268 - RNA, 32 nt, Human
gaccuugucccaggcugggcagaggucaggag

SEQ ID NO: 154269 - RNA, 23 nt, Human
gaccuugugauccaccuggccuu

SEQ ID NO: 154270 - RNA, 21 nt, Human
gaccuugugggaccaguccca

SEQ ID NO: 154271 - RNA, 32 nt, Human
gaccuugugguacgacaggcccagguaugugu

SEQ ID NO: 154272 - RNA, 32 nt, Human
gaccuuguguaugugacauauaguggccuaua

SEQ ID NO: 154273 - RNA, 24 nt, Human
gaccuuuacauccuggacuuucca

SEQ ID NO: 154274 - RNA, 32 nt, Human
gaccuuucaaaccagaggguugcugguccugc

SEQ ID NO: 154275 - RNA, 32 nt, Human
gaccuuucaagcuuucgagcagugaugcaaua

SEQ ID NO: 154276 - RNA, 32 nt, Human
gaccuuuccacagauugcuaaacuacuuuaug

SEQ ID NO: 154277 - RNA, 32 nt, Human
gaccuuuccagaggaaucucaguccagcugag

SEQ ID NO: 154278 - RNA, 18 nt, Human
gaccuuuccauccuugaa

SEQ ID NO: 154279 - RNA, 32 nt, Human
gaccuuucccauaggaguucaagaacuggacu

SEQ ID NO: 154280 - RNA, 32 nt, Human
gaccuuucccuaugggcacuaucacauaugaa

SEQ ID NO: 154281 - RNA, 32 nt, Human
gaccuuucucuuggccccuuguacaccccagg

SEQ ID NO: 154282 - RNA, 32 nt, Human
gaccuuugauucuccuuuagcaacacacaucg

SEQ ID NO: 154283 - RNA, 32 nt, Human
gaccuuugcagcacaaauucucauuuugauga

SEQ ID NO: 154284 - RNA, 32 nt, Human
gaccuuuggccaaucccaguucccaggcugca

SEQ ID NO: 154285 - RNA, 29 nt, Human
gaccuuuggcugcuuucucuccuuaaacu

SEQ ID NO: 154286 - RNA, 18 nt, Human
gaccuuugucucaccuca

SEQ ID NO: 154287 - RNA, 32 nt, Human
gaccuuuguggggcuucgugcccugcucuggg

SEQ ID NO: 154288 - RNA, 32 nt, Human
gaccuuugugguucuuggaagaagauauuuua

SEQ ID NO: 154289 - RNA, 32 nt, Human
gaccuuuguucucuuauuucugaggcccuuca

SEQ ID NO: 154290 - RNA, 32 nt, Human
gaccuuuuaagccugaguuugagucaggccug

SEQ ID NO: 154291 - RNA, 32 nt, Human
gaccuuuuacaaaauccauuugcacuaaugaa

SEQ ID NO: 154292 - RNA, 32 nt, Human
gaccuuuuagcaaagaugcaggccaguuuguu

SEQ ID NO: 154293 - RNA, 32 nt, Human
gaccuuuucaccugagagcaggaagcuccaaa

SEQ ID NO: 154294 - RNA, 32 nt, Human
gaccuuuuccuaccuaguuucucccucuuguc

SEQ ID NO: 154295 - RNA, 32 nt, Human
gaccuuuucugcugggacaagacacuguacug

SEQ ID NO: 154296 - RNA, 32 nt, Human
gaccuuuuuccuccucugcgcuccauuccugg

SEQ ID NO: 154297 - RNA, 32 nt, Human
gacgaaaaccugcaaugacaacuccuacaagg

SEQ ID NO: 154298 - RNA, 32 nt, Human
gacgaaaccaacacauauacaaucaucuccca

SEQ ID NO: 154299 - RNA, 32 nt, Human
gacgaaagcaauguuggguuggggaagacagu

SEQ ID NO: 154300 - RNA, 32 nt, Human
gacgaaauugcugccguggagaagacuggagg

SEQ ID NO: 154301 - RNA, 32 nt, Human
gacgaacauggugaaaccccaccuguauuaaa

SEQ ID NO: 154302 - RNA, 32 nt, Human
gacgaaccugggcaaaaagugagaccccuguc

SEQ ID NO: 154303 - RNA, 32 nt, Human
gacgaagaggaggaggaugaggaggacacaga

SEQ ID NO: 154304 - RNA, 32 nt, Human
gacgaagagucuccuuuacaguacaguucgag

SEQ ID NO: 154305 - RNA, 32 nt, Human
gacgaaggagaagcauucagagggcacuggcu

SEQ ID NO: 154306 - RNA, 32 nt, Human
gacgaaggagaguuggaagccgggagggggag

SEQ ID NO: 154307 - RNA, 32 nt, Human
gacgaaggggugccugagcuguggagagggug

SEQ ID NO: 154308 - RNA, 32 nt, Human
gacgaauggauggauggauggauggauguugg

SEQ ID NO: 154309 - RNA, 32 nt, Human
gacgaaugguguggggagagccugaaaggcag

SEQ ID NO: 154310 - RNA, 32 nt, Human
gacgaauuugagguuauaggggagauagcgau

SEQ ID NO: 154311 - RNA, 32 nt, Human
gacgacaaaugucagcgaccugggcuuggaac

SEQ ID NO: 154312 - RNA, 32 nt, Human
gacgacaccacugcacuccagccugggugaca

SEQ ID NO: 154313 - RNA, 32 nt, Human
gacgacacugggcuuugcacagccuggugucg

SEQ ID NO: 154314 - RNA, 32 nt, Human
gacgacagaagcagggguuggagugaugugag

SEQ ID NO: 154315 - RNA, 32 nt, Human
gacgacagcaaagcauacaacaauauuacagg

SEQ ID NO: 154316 - RNA, 32 nt, Human
gacgacagccugggcucagagucaggcuugug

SEQ ID NO: 154317 - RNA, 32 nt, Human
gacgacagggccuguggggauggccacgcgug

SEQ ID NO: 154318 - RNA, 32 nt, Human
gacgacaggguuucaccauguuggccagggcu

SEQ ID NO: 154319 - RNA, 31 nt, Human
gacgacagugagagugaaagagaaggugaau

SEQ ID NO: 154320 - RNA, 32 nt, Human
gacgacagugagagugaaagagaaggugaaug

SEQ ID NO: 154321 - RNA, 32 nt, Human
gacgacauggcagaaguugaaacaaacuugua

SEQ ID NO: 154322 - RNA, 32 nt, Human
gacgaccaccgccccaccaccuccugggacca

SEQ ID NO: 154323 - RNA, 32 nt, Human
gacgaccagggaggaggaaucggcggacgcgg

SEQ ID NO: 154324 - RNA, 32 nt, Human
gacgaccagggucgcaccacgagguuucgacu

SEQ ID NO: 154325 - RNA, 32 nt, Human
gacgaccccuccccaccucagccuggggagga

SEQ ID NO: 154326 - RNA, 32 nt, Human
gacgacccguuacccaccuaaggaagcgcgau

SEQ ID NO: 154327 - RNA, 32 nt, Human
gacgaccggauccugaggaggcagcugcggug

SEQ ID NO: 154328 - RNA, 32 nt, Human
gacgaccuuauaaaguggggacccugggccca

SEQ ID NO: 154329 - RNA, 32 nt, Human
gacgacgagcucgcuguggucuccgcuggggc

SEQ ID NO: 154330 - RNA, 32 nt, Human
gacgacgaggcgggccagagcugagcgugagg

SEQ ID NO: 154331 - RNA, 32 nt, Human
gacgacgauggaccaggagccagugggcggug

SEQ ID NO: 154332 - RNA, 32 nt, Human
gacgacgcuggcggcccagccugggcagguuu

SEQ ID NO: 154333 - RNA, 32 nt, Human
gacgacgcuugcggcccagccugggcagguuu

SEQ ID NO: 154334 - RNA, 32 nt, Human
gacgacggguagaaaagcaggaggagcggaga

SEQ ID NO: 154335 - RNA, 20 nt, Human
gacgacgugucuuugacaca

SEQ ID NO: 154336 - RNA, 32 nt, Human
gacgacucacugcagccucaaccuccuggggc

SEQ ID NO: 154337 - RNA, 32 nt, Human
gacgacugaaaccaccugggggcaggacccac

SEQ ID NO: 154338 - RNA, 32 nt, Human
gacgacugccugccccuccucgcuaccccugc

SEQ ID NO: 154339 - RNA, 32 nt, Human
gacgacuuugucuguaggagcagcggcggcuu

SEQ ID NO: 154340 - RNA, 32 nt, Human
gacgagaagcaggaagagggugcagugccggc

SEQ ID NO: 154341 - RNA, 32 nt, Human
gacgagaaggaagaauuugcaaguuuggccuu

SEQ ID NO: 154342 - RNA, 32 nt, Human
gacgagacagcagcagggggagagggagggaa

SEQ ID NO: 154343 - RNA, 32 nt, Human
gacgagacccuuguuugcacagcauuaauaag

SEQ ID NO: 154344 - RNA, 32 nt, Human
gacgagaccgcggcgucuccagccucgguacc

SEQ ID NO: 154345 - RNA, 32 nt, Human
gacgagagacacacuccagccugaucucagug

SEQ ID NO: 154346 - RNA, 32 nt, Human
gacgagagauagugggugugguggcucacacc

SEQ ID NO: 154347 - RNA, 32 nt, Human
gacgagagcacacucuggaggaagaggagaga

SEQ ID NO: 154348 - RNA, 32 nt, Human
gacgagaggccagguuugggaaucacugcccu

SEQ ID NO: 154349 - RNA, 32 nt, Human
gacgagauggagcugcucuacucagccuacgg

SEQ ID NO: 154350 - RNA, 32 nt, Human
gacgagcacaggagggagguugagguggggcu

SEQ ID NO: 154351 - RNA, 32 nt, Human
gacgagcagugcauuuacaaggcacugccaaa

SEQ ID NO: 154352 - RNA, 32 nt, Human
gacgagcccucacacaccuggucuccacggca

SEQ ID NO: 154353 - RNA, 32 nt, Human
gacgagcgagcacggcgcccgcaccuccccgc

SEQ ID NO: 154354 - RNA, 19 nt, Human
gacgagcgccuccugggga

SEQ ID NO: 154355 - RNA, 32 nt, Human
gacgagcgggcccagggcugagcccagcggcg

SEQ ID NO: 154356 - RNA, 32 nt, Human
gacgagcuguguggagcguagugagcagguuc

SEQ ID NO: 154357 - RNA, 32 nt, Human
gacgaggaagaguuguggcgaggcagauccug

SEQ ID NO: 154358 - RNA, 32 nt, Human
gacgaggaggcagcgggugcagccaggugucu

SEQ ID NO: 154359 - RNA, 32 nt, Human
gacgaggagggcgggcagggaggugggcauca

SEQ ID NO: 154360 - RNA, 32 nt, Human
gacgaggagguaguggccacagcuggggacag

SEQ ID NO: 154361 - RNA, 22 nt, Human
gacgaggaggugguacagcaca

SEQ ID NO: 154362 - RNA, 32 nt, Human
gacgaggcaggcggaucaugaggucaggagau

SEQ ID NO: 154363 - RNA, 32 nt, Human
gacgaggcgaaccugggcuuagggcgccaccu

SEQ ID NO: 154364 - RNA, 32 nt, Human
gacgaggcggagccgcgagagcgcggcccagg

SEQ ID NO: 154365 - RNA, 32 nt, Human
gacgagggaaaggucucugcagugaguggaga

SEQ ID NO: 154366 - RNA, 32 nt, Human
gacgagggagggccagcucagagcaggggugc

SEQ ID NO: 154367 - RNA, 32 nt, Human
gacgaggggcucuguccucauacuuccugcgg

SEQ ID NO: 154368 - RNA, 32 nt, Human
gacgagggggagggccagagcugcgcgugcug

SEQ ID NO: 154369 - RNA, 32 nt, Human
gacgagggugggcgcggagggagcagccgcug

SEQ ID NO: 154370 - RNA, 32 nt, Human
gacgaggucugccuagugagaucugcaugacc

SEQ ID NO: 154371 - RNA, 32 nt, Human
gacgagguguucuauaacugggugggggcugu

SEQ ID NO: 154372 - RNA, 32 nt, Human
gacgagguuaccagggaaggcuugcuuggaaa

SEQ ID NO: 154373 - RNA, 32 nt, Human
gacgaguccgaagauuccugaggccagagcuc

SEQ ID NO: 154374 - RNA, 32 nt, Human
gacgagugaacgccucgcuucugcagguugag

SEQ ID NO: 154375 - RNA, 31 nt, Human
gacgaguucauguccaucacgggcagccugg

SEQ ID NO: 154376 - RNA, 32 nt, Human
gacgauaaggaaauugagauuuggagaaguua

SEQ ID NO: 154377 - RNA, 32 nt, Human
gacgauacaagagugguacagaagugaacaac

SEQ ID NO: 154378 - RNA, 32 nt, Human
gacgauagacuggcugaauauaagagcaauaa

SEQ ID NO: 154379 - RNA, 32 nt, Human
gacgaucccucgaccagaaucagauucaggag

SEQ ID NO: 154380 - RNA, 32 nt, Human
gacgaucggcuuuguagcaagauccacaggug

SEQ ID NO: 154381 - RNA, 32 nt, Human
gacgaucuggccugacacuugcuucugugggc

SEQ ID NO: 154382 - RNA, 31 nt, Human
gacgaucugguucagacucuaccucaucacu

SEQ ID NO: 154383 - RNA, 32 nt, Human
gacgaucuuccuggcuccaacacugcugcucc

SEQ ID NO: 154384 - RNA, 29 nt, Human
gacgaugaagcggcagaacgugcgcacgc

SEQ ID NO: 154385 - RNA, 32 nt, Human
gacgaugaggggagugaugcugaagaagggga

SEQ ID NO: 154386 - RNA, 32 nt, Human
gacgaugcugagccauggaucgcggaaggcgu

SEQ ID NO: 154387 - RNA, 32 nt, Human
gacgauggagugaagacacuuggcagacuuga

SEQ ID NO: 154388 - RNA, 32 nt, Human
gacgaugggagcgugagcaggacggugauaac

SEQ ID NO: 154389 - RNA, 32 nt, Human
gacgaugucuuaauauucuaugugcuauguac

SEQ ID NO: 154390 - RNA, 32 nt, Human
gacgaugugcccguagcagucaccccucccuc

SEQ ID NO: 154391 - RNA, 32 nt, Human
gacgauucugaaaugagcucucugccaagguu

SEQ ID NO: 154392 - RNA, 32 nt, Human
gacgauuuuguucaaagaaaaguuucuggauu

SEQ ID NO: 154393 - RNA, 32 nt, Human
gacgcaaacaacaacaaaugcugcuuauuugc

SEQ ID NO: 154394 - RNA, 32 nt, Human
gacgcaacuuugcuauauuucucuccaacaag

SEQ ID NO: 154395 - RNA, 32 nt, Human
gacgcaagggagcaaagggacaagaaggauuc

SEQ ID NO: 154396 - RNA, 32 nt, Human
gacgcacaucuguaaucccagcuacucaggag

SEQ ID NO: 154397 - RNA, 32 nt, Human
gacgcaccucucuccucugucuucacaguggg

SEQ ID NO: 154398 - RNA, 32 nt, Human
gacgcacgugcuucugauuaaaggaaucucag

SEQ ID NO: 154399 - RNA, 32 nt, Human
gacgcagaagugaguguggauacaccagaguu

SEQ ID NO: 154400 - RNA, 32 nt, Human
gacgcagacagugccaacacugaagguucuga

SEQ ID NO: 154401 - RNA, 18 nt, Human
gacgcagagccucagaga

SEQ ID NO: 154402 - RNA, 32 nt, Human
gacgcagcacccgaggucccagccuuugcagg

SEQ ID NO: 154403 - RNA, 32 nt, Human
gacgcagcagcaccccagcuagggauagggcu

SEQ ID NO: 154404 - RNA, 32 nt, Human
gacgcagccacaguucagacccuguccccuca

SEQ ID NO: 154405 - RNA, 32 nt, Human
gacgcaggaggcaggcccugcccugcccucuc

SEQ ID NO: 154406 - RNA, 32 nt, Human
gacgcaggcacagcagcaaguuccuccagcac

SEQ ID NO: 154407 - RNA, 32 nt, Human
gacgcaggcaggcggcgggcagcgggaggcgg

SEQ ID NO: 154408 - RNA, 32 nt, Human
gacgcaggccagcugcccagagcccagaccaa

SEQ ID NO: 154409 - RNA, 32 nt, Human
gacgcaggcuggcugggcucuccugcuggcug

SEQ ID NO: 154410 - RNA, 32 nt, Human
gacgcagggaaaggcugcgcgggagaagccgc

SEQ ID NO: 154411 - RNA, 32 nt, Human
gacgcaggggucagagguggcuacagggcagg

SEQ ID NO: 154412 - RNA, 32 nt, Human
gacgcagucauugucucagccaggcugguguc

SEQ ID NO: 154413 - RNA, 32 nt, Human
gacgcagugcagcugccgcugcugacagacaa

SEQ ID NO: 154414 - RNA, 32 nt, Human
gacgcaugcccucaaucccagcuacucaagag

SEQ ID NO: 154415 - RNA, 32 nt, Human
gacgcaugccuguaaucccagcuacucgggag

SEQ ID NO: 154416 - RNA, 32 nt, Human
gacgcaugccuguaguccuagcuacucaggag

SEQ ID NO: 154417 - RNA, 32 nt, Human
gacgcauuguauauaauauaugucaaaggcuu

SEQ ID NO: 154418 - RNA, 32 nt, Human
gacgccaagaguucgagaccagccugggcauc

SEQ ID NO: 154419 - RNA, 32 nt, Human
gacgccaagcagacacaccugcccuccccagc

SEQ ID NO: 154420 - RNA, 32 nt, Human
gacgccacaugaccuuuccuuugcaggcaucc

SEQ ID NO: 154421 - RNA, 32 nt, Human
gacgccaccacugggaagguugugugcaggaa

SEQ ID NO: 154422 - RNA, 32 nt, Human
gacgccacucacugccuccuuccuccuggugu

SEQ ID NO: 154423 - RNA, 32 nt, Human
gacgccagagccagcaggggcuguuucgggcc

SEQ ID NO: 154424 - RNA, 32 nt, Human
gacgccagcagcagcagcaagcucuucagugc

SEQ ID NO: 154425 - RNA, 32 nt, Human
gacgccagcccuucccuguguggcugcacuga

SEQ ID NO: 154426 - RNA, 32 nt, Human
gacgccagcucuuugagauuugcucauucccc

SEQ ID NO: 154427 - RNA, 32 nt, Human
gacgccauucacuuccuagcugggugacuggc

SEQ ID NO: 154428 - RNA, 32 nt, Human
gacgccauugcaccccagccugggcaaugagu

SEQ ID NO: 154429 - RNA, 32 nt, Human
gacgccauugcacuccagccuaggcaauaaga

SEQ ID NO: 154430 - RNA, 32 nt, Human
gacgccauugcacuccagccugggugagaaga

SEQ ID NO: 154431 - RNA, 32 nt, Human
gacgcccaaucagcugcuggugacauugucuc

SEQ ID NO: 154432 - RNA, 21 nt, Human
gacgcccaccugcuccccgac

SEQ ID NO: 154433 - RNA, 20 nt, Human
gacgcccacuggccccagau

SEQ ID NO: 154434 - RNA, 32 nt, Human
gacgcccagaucuguccugcaggauggagcca

SEQ ID NO: 154435 - RNA, 32 nt, Human
gacgcccagcagagugguggccagaggggaga

SEQ ID NO: 154436 - RNA, 19 nt, Human
gacgcccaggagcuggcug

SEQ ID NO: 154437 - RNA, 32 nt, Human
gacgcccaggaggaggcggcggcggcggccgg

SEQ ID NO: 154438 - RNA, 32 nt, Human
gacgccccagaggaagcuggagagggaugugu

SEQ ID NO: 154439 - RNA, 32 nt, Human
gacgccccagcagcaacuggcaucaagauucc

SEQ ID NO: 154440 - RNA, 32 nt, Human
gacgcccccagcaccccugccugcuuuugcug

SEQ ID NO: 154441 - RNA, 19 nt, Human
gacgcccccaggcugccug

SEQ ID NO: 154442 - RNA, 32 nt, Human
gacgcccccgcacacgcagacgcacagagcuc

SEQ ID NO: 154443 - RNA, 32 nt, Human
gacgccccucccccuucaaacacccuccccca

SEQ ID NO: 154444 - RNA, 32 nt, Human
gacgccccugugauggagucucacucuguugc

SEQ ID NO: 154445 - RNA, 18 nt, Human
gacgcccgcggcgagcug

SEQ ID NO: 154446 - RNA, 32 nt, Human
gacgcccggccucugggccgcugccuucgcuu

SEQ ID NO: 154447 - RNA, 32 nt, Human
gacgcccucacugcaggcuccccuccucggcu

SEQ ID NO: 154448 - RNA, 32 nt, Human
gacgcccugcaacccugccaggcugggaaggg

SEQ ID NO: 154449 - RNA, 32 nt, Human
gacgccgaagcaggugggucaccugaggucag

SEQ ID NO: 154450 - RNA, 32 nt, Human
gacgccgagccugugaggugggcuguggugcc

SEQ ID NO: 154451 - RNA, 32 nt, Human
gacgccgaggcgggcaaaucaccugaggucag

SEQ ID NO: 154452 - RNA, 32 nt, Human
gacgccgcagcuuucuggaggcugaggaaggc

SEQ ID NO: 154453 - RNA, 19 nt, Human
gacgccgcccuccgcgucu

SEQ ID NO: 154454 - RNA, 32 nt, Human
gacgccgcccucucugccgcaggcugggugca

SEQ ID NO: 154455 - RNA, 32 nt, Human
gacgccgccgccaccgccuccucagagcgggg

SEQ ID NO: 154456 - RNA, 32 nt, Human
gacgccgccuccgccucagccaccgccgccgc

SEQ ID NO: 154457 - RNA, 32 nt, Human
gacgccgcucaguuuccagugggccugugugg

SEQ ID NO: 154458 - RNA, 32 nt, Human
gacgccggcgcuccuccgucuuccuguggccu

SEQ ID NO: 154459 - RNA, 32 nt, Human
gacgccgggaggccacgggugcugcugacggg

SEQ ID NO: 154460 - RNA, 32 nt, Human
gacgccggggcugaggccgaucgcgucgggca

SEQ ID NO: 154461 - RNA, 32 nt, Human
gacgccggucagugucaaaggggaggugcucu

SEQ ID NO: 154462 - RNA, 32 nt, Human
gacgccggugggcuagggcaaggugugugccc

SEQ ID NO: 154463 - RNA, 32 nt, Human
gacgccgucgggcggacaacaaagagagaggc

SEQ ID NO: 154464 - RNA, 32 nt, Human
gacgccgucgugcccucucugccuccacagcc

SEQ ID NO: 154465 - RNA, 32 nt, Human
gacgccgugagucaggggcagagcagggcggu

SEQ ID NO: 154466 - RNA, 32 nt, Human
gacgccucagccacggcucccccucggccuau

SEQ ID NO: 154467 - RNA, 32 nt, Human
gacgccuccacccgcgccuggccgcagccucc

SEQ ID NO: 154468 - RNA, 32 nt, Human
gacgccuccagacaccccuucuugccgaugcc

SEQ ID NO: 154469 - RNA, 32 nt, Human
gacgccucucggugccccucugcuccggcccu

SEQ ID NO: 154470 - RNA, 19 nt, Human
gacgccucugcggcagcug

SEQ ID NO: 154471 - RNA, 32 nt, Human
gacgccugcaggaacauggcagaggagacacc

SEQ ID NO: 154472 - RNA, 32 nt, Human
gacgccugccuguagucccagcuacucgggag

SEQ ID NO: 154473 - RNA, 32 nt, Human
gacgccuggcgggagcgcgcggcagcggggcg

SEQ ID NO: 154474 - RNA, 29 nt, Human
gacgccuggcugcugaucgccuuccccac

SEQ ID NO: 154475 - RNA, 32 nt, Human
gacgccugggacucagaccaggaagcuguggg

SEQ ID NO: 154476 - RNA, 32 nt, Human
gacgccugggcagaggcugcagcugcaggacc

SEQ ID NO: 154477 - RNA, 16 nt, Human
gacgccuguaauccca

SEQ ID NO: 154478 - RNA, 32 nt, Human
gacgccuguaaucccagcuacuuggaaggcug

SEQ ID NO: 154479 - RNA, 32 nt, Human
gacgccuguaaucccagcuacuugggaggcug

SEQ ID NO: 154480 - RNA, 16 nt, Human
gacgccuguaguccca

SEQ ID NO: 154481 - RNA, 32 nt, Human
gacgccuguagucccagcuacuuggaggcuga

SEQ ID NO: 154482 - RNA, 32 nt, Human
gacgccuguaguuccagcuauuugggaggcug

SEQ ID NO: 154483 - RNA, 32 nt, Human
gacgccugugacuaggccuaaccuucuggggu

SEQ ID NO: 154484 - RNA, 32 nt, Human
gacgccuuccuccucugcucccaaacaggguu

SEQ ID NO: 154485 - RNA, 32 nt, Human
gacgcgagggcuuggcuuuucucgucagcugc

SEQ ID NO: 154486 - RNA, 32 nt, Human
gacgcgcagcauggcgguggaggacgaggggc

SEQ ID NO: 154487 - RNA, 32 nt, Human
gacgcgcagguggcggcguugccaugucgcac

SEQ ID NO: 154488 - RNA, 32 nt, Human
gacgcgccccagcucgcgccccuucccauauu

SEQ ID NO: 154489 - RNA, 32 nt, Human
gacgcgccgaggucucggggaggcccggacgc

SEQ ID NO: 154490 - RNA, 32 nt, Human
gacgcgcgagggaggggagggaagggaaggga

SEQ ID NO: 154491 - RNA, 32 nt, Human
gacgcgcugacgcugcagcccuggaccugcug

SEQ ID NO: 154492 - RNA, 32 nt, Human
gacgcggaaggcccugggggugcaguggagcg

SEQ ID NO: 154493 - RNA, 32 nt, Human
gacgcggagcuucccuguuccaagcagcgaug

SEQ ID NO: 154494 - RNA, 32 nt, Human
gacgcggcgccgcggcaccagggcgcgcagcc

SEQ ID NO: 154495 - RNA, 32 nt, Human
gacgcgggagugagagagggugagucagccac

SEQ ID NO: 154496 - RNA, 32 nt, Human
gacgcgggcgagagggacaggagcgugaccuc

SEQ ID NO: 154497 - RNA, 32 nt, Human
gacgcgggcgccacaugcccagccugggagca

SEQ ID NO: 154498 - RNA, 32 nt, Human
gacgcgggcgccaggugcacagccccaguccg

SEQ ID NO: 154499 - RNA, 32 nt, Human
gacgcggucaugagggcugaaaaagaaggggu

SEQ ID NO: 154500 - RNA, 32 nt, Human
gacgcggugcugcugccgccgcuucggguuug

SEQ ID NO: 154501 - RNA, 32 nt, Human
gacgcgucaggcccagcgcacagccugggcag

SEQ ID NO: 154502 - RNA, 32 nt, Human
gacgcuaccagcuuucugaccucugcuucuug

SEQ ID NO: 154503 - RNA, 32 nt, Human
gacgcuacugcagcuuuugccuugguucuucc

SEQ ID NO: 154504 - RNA, 22 nt, Human
gacgcucacggagcggcuggcu

SEQ ID NO: 154505 - RNA, 32 nt, Human
gacgcucagcacucgucgcuucuccuagcaga

SEQ ID NO: 154506 - RNA, 32 nt, Human
gacgcuccacuguggauaucuaaugcccuguu

SEQ ID NO: 154507 - RNA, 32 nt, Human
gacgcuccugugcugcugaccaacacagcugc

SEQ ID NO: 154508 - RNA, 32 nt, Human
gacgcuccuuucugcugacagcccagccaguu

SEQ ID NO: 154509 - RNA, 32 nt, Human
gacgcucuggcgagggcagaccccaggggaaa

SEQ ID NO: 154510 - RNA, 32 nt, Human
gacgcucuucuuuuguucucuccucggggaug

SEQ ID NO: 154511 - RNA, 32 nt, Human
gacgcugagcagagaggugaggggacagcauu

SEQ ID NO: 154512 - RNA, 32 nt, Human
gacgcugaggaggaggaggaggcggaggaggc

SEQ ID NO: 154513 - RNA, 32 nt, Human
gacgcugaggugggaggaucacuugagcccag

SEQ ID NO: 154514 - RNA, 32 nt, Human
gacgcugcagugagcuaugaucccacugcugc

SEQ ID NO: 154515 - RNA, 32 nt, Human
gacgcugccacacaagccugaguagagcccau

SEQ ID NO: 154516 - RNA, 32 nt, Human
gacgcugcucagcugcugcucugcuccugucu

SEQ ID NO: 154517 - RNA, 32 nt, Human
gacgcuggaccugccagcaucuucaccuugga

SEQ ID NO: 154518 - RNA, 32 nt, Human
gacgcuggagcuccagccuccuggcggccccc

SEQ ID NO: 154519 - RNA, 32 nt, Human
gacgcuggagggcugggcuccgccucagucac

SEQ ID NO: 154520 - RNA, 32 nt, Human
gacgcuggcagcggaauggggcuguguggcug

SEQ ID NO: 154521 - RNA, 32 nt, Human
gacgcugggagguggaugcugcagugagcagu

SEQ ID NO: 154522 - RNA, 32 nt, Human
gacgcugguuuggaaucagacaccgcaaugaa

SEQ ID NO: 154523 - RNA, 32 nt, Human
gacgcugucuguuccugccuucuguggagcau

SEQ ID NO: 154524 - RNA, 32 nt, Human
gacgcugugaguagagaagcuaggccccgagc

SEQ ID NO: 154525 - RNA, 32 nt, Human
gacgcugugucaccccucauucuggccgcugu

SEQ ID NO: 154526 - RNA, 32 nt, Human
gacgcuuccauggugggcacugaggcacagag

SEQ ID NO: 154527 - RNA, 32 nt, Human
gacgcuuccucccggcaucacaagacuugacu

SEQ ID NO: 154528 - RNA, 18 nt, Human
gacgcuuccuggguuuga

SEQ ID NO: 154529 - RNA, 16 nt, Human
gacgcuucggggcuga

SEQ ID NO: 154530 - RNA, 32 nt, Human
gacgcuugaacccaggaggcagagguugcagu

SEQ ID NO: 154531 - RNA, 32 nt, Human
gacgcuugaacccaggaggcggagguugcagu

SEQ ID NO: 154532 - RNA, 32 nt, Human
gacgcuugccuguaucccagcuacucaggaag

SEQ ID NO: 154533 - RNA, 32 nt, Human
gacgcuuggucuccgguggcccucucucacca

SEQ ID NO: 154534 - RNA, 19 nt, Human
gacgcuuuccucuccuccu

SEQ ID NO: 154535 - RNA, 32 nt, Human
gacggaaaaguggaagaagcugcagugggaga

SEQ ID NO: 154536 - RNA, 32 nt, Human
gacggaaccgccacagcacucaaagcccacug

SEQ ID NO: 154537 - RNA, 32 nt, Human
gacggacaagccccgaugccgggggagacgga

SEQ ID NO: 154538 - RNA, 32 nt, Human
gacggacagcacccuccucaucuggcaggugc

SEQ ID NO: 154539 - RNA, 32 nt, Human
gacggacaggcagcaggggagcgacgggagcu

SEQ ID NO: 154540 - RNA, 32 nt, Human
gacggacaggguccucacccuaccccuuuccu

SEQ ID NO: 154541 - RNA, 32 nt, Human
gacggacccaggagggagggcagcugauuaac

SEQ ID NO: 154542 - RNA, 32 nt, Human
gacggacccugccuccccagcuuaucccaggc

SEQ ID NO: 154543 - RNA, 19 nt, Human
gacggacgguggccaggga

SEQ ID NO: 154544 - RNA, 32 nt, Human
gacggacuucuuuccuagccugaguguugagc

SEQ ID NO: 154545 - RNA, 32 nt, Human
gacggagaaauuccuuuggaaguuauuccgua

SEQ ID NO: 154546 - RNA, 32 nt, Human
gacggagacaugagggugacaccugagccggg

SEQ ID NO: 154547 - RNA, 32 nt, Human
gacggagagccaccuccucucccaggaacuga

SEQ ID NO: 154548 - RNA, 32 nt, Human
gacggagagccaccuccucucccagggacaga

SEQ ID NO: 154549 - RNA, 32 nt, Human
gacggagaugaagaacaucuggaguuggagcc

SEQ ID NO: 154550 - RNA, 32 nt, Human
gacggagccccagcuuaguggaggcugggccu

SEQ ID NO: 154551 - RNA, 32 nt, Human
gacggagccguggcucaggucggccccucccc

SEQ ID NO: 154552 - RNA, 32 nt, Human
gacggagccuggcuuuggcucccaggcuggag

SEQ ID NO: 154553 - RNA, 32 nt, Human
gacggagcuguggugcagagaacuuuucccgc

SEQ ID NO: 154554 - RNA, 32 nt, Human
gacggaggaggaagaagcagguuggucccgag

SEQ ID NO: 154555 - RNA, 32 nt, Human
gacggaggaguuucaccauguuggccaggcug

SEQ ID NO: 154556 - RNA, 32 nt, Human
gacggaggccaggagugaggcccugccggagc

SEQ ID NO: 154557 - RNA, 32 nt, Human
gacggaggcugcaugcccgaggaccaggccgg

SEQ ID NO: 154558 - RNA, 32 nt, Human
gacggagggaggaggaggaggaagagguaugg

SEQ ID NO: 154559 - RNA, 32 nt, Human
gacggagggaggagggaaggagaugaacgaga

SEQ ID NO: 154560 - RNA, 32 nt, Human
gacggaguccccagaggggauggcagagucaa

SEQ ID NO: 154561 - RNA, 32 nt, Human
gacggagucucgcccugucacccaggcuggag

SEQ ID NO: 154562 - RNA, 32 nt, Human
gacggagucucgcuuuguuucccaggcuggag

SEQ ID NO: 154563 - RNA, 32 nt, Human
gacggaguugcccaggcuggagugcagcgcau

SEQ ID NO: 154564 - RNA, 32 nt, Human
gacggaucaccugaggccaggaauuccugcag

SEQ ID NO: 154565 - RNA, 19 nt, Human
gacggaucaccugagguca

SEQ ID NO: 154566 - RNA, 19 nt, Human
gacggaucacuugagguca

SEQ ID NO: 154567 - RNA, 19 nt, Human
gacggaucacuugagguua

SEQ ID NO: 154568 - RNA, 21 nt, Human
gacggaucagaaaacuguucu

SEQ ID NO: 154569 - RNA, 32 nt, Human
gacggaucaggagaaugggcagaugcucagcu

SEQ ID NO: 154570 - RNA, 32 nt, Human
gacggaucauagacccgagccuccaggagggc

SEQ ID NO: 154571 - RNA, 19 nt, Human
gacggaucauuugagguca

SEQ ID NO: 154572 - RNA, 32 nt, Human
gacggaucggggagaggcugggugcauagggg

SEQ ID NO: 154573 - RNA, 18 nt, Human
gacggauucucgcucugu

SEQ ID NO: 154574 - RNA, 32 nt, Human
gacggcaacugggccuucugcagagaaagacc

SEQ ID NO: 154575 - RNA, 32 nt, Human
gacggcaccaugccauccucugccuucugugc

SEQ ID NO: 154576 - RNA, 18 nt, Human
gacggcaccugcagccug

SEQ ID NO: 154577 - RNA, 32 nt, Human
gacggcacuggguggggccgagcuccagggcu

SEQ ID NO: 154578 - RNA, 32 nt, Human
gacggcaggaggugcagcgacgccaugagggc

SEQ ID NO: 154579 - RNA, 32 nt, Human
gacggcaggccugggcgggcgggcgggggugc

SEQ ID NO: 154580 - RNA, 32 nt, Human
gacggcagggccgccucaggcccacggucugc

SEQ ID NO: 154581 - RNA, 32 nt, Human
gacggcaguccaguuucucuccccucugaccc

SEQ ID NO: 154582 - RNA, 31 nt, Human
gacggcaugaaugacaugaaucacgagguca

SEQ ID NO: 154583 - RNA, 32 nt, Human
gacggcauuuccaucccuccccugcccgggaa

SEQ ID NO: 154584 - RNA, 32 nt, Human
gacggccacucuguugguggccucugcuuguu

SEQ ID NO: 154585 - RNA, 32 nt, Human
gacggccagggagaagcuccucuccccagccc

SEQ ID NO: 154586 - RNA, 32 nt, Human
gacggcccagaacuggcagagagaagguugcc

SEQ ID NO: 154587 - RNA, 32 nt, Human
gacggccccuccaccuuuuguuugccuagggu

SEQ ID NO: 154588 - RNA, 19 nt, Human
gacggcccgcaggccgaga

SEQ ID NO: 154589 - RNA, 32 nt, Human
gacggccgcagccugcggucuccguccagacc

SEQ ID NO: 154590 - RNA, 32 nt, Human
gacggccgcgggaccuaccagugcaaggcgaa

SEQ ID NO: 154591 - RNA, 32 nt, Human
gacggccggagcucccccuucggagcucuucc

SEQ ID NO: 154592 - RNA, 32 nt, Human
gacggccggcagaggaagggagagaggcggcg

SEQ ID NO: 154593 - RNA, 32 nt, Human
gacggccucagagaugcugcaggcuggcgagc

SEQ ID NO: 154594 - RNA, 32 nt, Human
gacggccucccucccuucaccuuuccucuccu

SEQ ID NO: 154595 - RNA, 32 nt, Human
gacggccuccugcugcagguccugggcagccc

SEQ ID NO: 154596 - RNA, 32 nt, Human
gacggccugcacccucugcccgccuugggguc

SEQ ID NO: 154597 - RNA, 32 nt, Human
gacggccugcagcaugcagaugcuggcggcgg

SEQ ID NO: 154598 - RNA, 22 nt, Human
gacggccuggggccccaaucca

SEQ ID NO: 154599 - RNA, 32 nt, Human
gacggcgagagcccaggagugggcguuucacu

SEQ ID NO: 154600 - RNA, 32 nt, Human
gacggcgagcugggagccagccccaggcucca

SEQ ID NO: 154601 - RNA, 32 nt, Human
gacggcgcagugggccgagaaggaggcgcagc

SEQ ID NO: 154602 - RNA, 32 nt, Human
gacggcgcccgccgcagguggggcgaggcugg

SEQ ID NO: 154603 - RNA, 31 nt, Human
gacggcgcccgcucgcccaugccgagcugag

SEQ ID NO: 154604 - RNA, 32 nt, Human
gacggcgcccggggacagagaacaugggacgc

SEQ ID NO: 154605 - RNA, 32 nt, Human
gacggcgcugcagggccucacagucugcuucc

SEQ ID NO: 154606 - RNA, 32 nt, Human
gacggcggccuucgaggaggugaugauggaca

SEQ ID NO: 154607 - RNA, 32 nt, Human
gacggcgggcgccggcgccgcagaucagccag

SEQ ID NO: 154608 - RNA, 32 nt, Human
gacggcucacugcagccugcgccucccagcgu

SEQ ID NO: 154609 - RNA, 32 nt, Human
gacggcuccagccuucgacccagagccccgug

SEQ ID NO: 154610 - RNA, 19 nt, Human
gacggcuccauccaccuca

SEQ ID NO: 154611 - RNA, 32 nt, Human
gacggcucggggacccuggugagcaggccugg

SEQ ID NO: 154612 - RNA, 19 nt, Human
gacggcucuggacccagga

SEQ ID NO: 154613 - RNA, 32 nt, Human
gacggcuggcucugggggacucaggccaagcc

SEQ ID NO: 154614 - RNA, 32 nt, Human
gacggcugggcugucguggcagggucugcaca

SEQ ID NO: 154615 - RNA, 32 nt, Human
gacggcuguggagagcgccgcgccuccguggg

SEQ ID NO: 154616 - RNA, 32 nt, Human
gacgggaagcggagguugcagugagccgagau

SEQ ID NO: 154617 - RNA, 32 nt, Human
gacgggaaggggaagaguagagagggagggac

SEQ ID NO: 154618 - RNA, 32 nt, Human
gacgggaagguaaacugagcuccccagagacg

SEQ ID NO: 154619 - RNA, 32 nt, Human
gacgggacauaaggggaaaauucauuccauag

SEQ ID NO: 154620 - RNA, 32 nt, Human
gacgggaccagcugcuggccacauuuccugcu

SEQ ID NO: 154621 - RNA, 32 nt, Human
gacgggacgccucuguccuagccgugagugcc

SEQ ID NO: 154622 - RNA, 32 nt, Human
gacgggacugcggaggaaggaggacccaggac

SEQ ID NO: 154623 - RNA, 32 nt, Human
gacgggagacagcgcgucggagcgagagagcg

SEQ ID NO: 154624 - RNA, 32 nt, Human
gacgggagagagaagaagaguggguuugaagg

SEQ ID NO: 154625 - RNA, 32 nt, Human
gacgggagccaaaaucagagacucaagcagca

SEQ ID NO: 154626 - RNA, 32 nt, Human
gacgggagguggcggagguggcggcggaggcg

SEQ ID NO: 154627 - RNA, 18 nt, Human
gacgggcacaaaacagca

SEQ ID NO: 154628 - RNA, 32 nt, Human
gacgggcaccagugggcauaggcacaggauga

SEQ ID NO: 154629 - RNA, 32 nt, Human
gacgggcacccaggcugcagugugugaggggg

SEQ ID NO: 154630 - RNA, 32 nt, Human
gacgggcacggccuccccacggccuguccggg

SEQ ID NO: 154631 - RNA, 32 nt, Human
gacgggcagggacagagcugcgggcugagguu

SEQ ID NO: 154632 - RNA, 32 nt, Human
gacgggcaggugugggcgcggggccacgcagc

SEQ ID NO: 154633 - RNA, 32 nt, Human
gacgggccagcgggaugggagcaggguccccc

SEQ ID NO: 154634 - RNA, 32 nt, Human
gacgggcccaucccaguccucccuucagcuaa

SEQ ID NO: 154635 - RNA, 32 nt, Human
gacgggcccccgaggcggcaugacacuggcca

SEQ ID NO: 154636 - RNA, 32 nt, Human
gacgggcccuggagggagaaaggagccugugc

SEQ ID NO: 154637 - RNA, 32 nt, Human
gacgggcgccaggcauuguccagaccuggucg

SEQ ID NO: 154638 - RNA, 32 nt, Human
gacgggcgccuguaaucccagauacucaggag

SEQ ID NO: 154639 - RNA, 32 nt, Human
gacgggcgggcgucacguguguucagagcuug

SEQ ID NO: 154640 - RNA, 32 nt, Human
gacggggagacaccucccagcagggguccaca

SEQ ID NO: 154641 - RNA, 28 nt, Human
gacggggagagugcugcuucuaucgaug

SEQ ID NO: 154642 - RNA, 32 nt, Human
gacggggcaugaagagacuaaucaucuggaaa

SEQ ID NO: 154643 - RNA, 32 nt, Human
gacggggcccaggaggucaggagagcagcccg

SEQ ID NO: 154644 - RNA, 32 nt, Human
gacggggcgccgcggagcaggaggcggcgccc

SEQ ID NO: 154645 - RNA, 32 nt, Human
gacggggcugagguggugggcagcagugacag

SEQ ID NO: 154646 - RNA, 32 nt, Human
gacggggcugcaggagcaggugcagugggcgc

SEQ ID NO: 154647 - RNA, 21 nt, Human
gacggggcugggcgcaaggug

SEQ ID NO: 154648 - RNA, 32 nt, Human
gacggggcuucaccaucuuggccaggcugguc

SEQ ID NO: 154649 - RNA, 32 nt, Human
gacgggggagcacccccauccagacugcgaag

SEQ ID NO: 154650 - RNA, 32 nt, Human
gacgggggagcagcacgauuuugcacaaauau

SEQ ID NO: 154651 - RNA, 32 nt, Human
gacgggggcggccugggcucucuucccaucca

SEQ ID NO: 154652 - RNA, 32 nt, Human
gacggggguggacccccaucugcagaaguuuc

SEQ ID NO: 154653 - RNA, 32 nt, Human
gacgggggugggagguaggcuguggggugggc

SEQ ID NO: 154654 - RNA, 32 nt, Human
gacggggucucagggaccuguguccuuccgcc

SEQ ID NO: 154655 - RNA, 32 nt, Human
gacggggucuugcccugucacccaggcugggg

SEQ ID NO: 154656 - RNA, 32 nt, Human
gacggggugccguccccagcacggugauuagu

SEQ ID NO: 154657 - RNA, 32 nt, Human
gacgggguggcuggccgggcugaggggcuccu

SEQ ID NO: 154658 - RNA, 32 nt, Human
gacgggguggggaaggggcugggagccagggu

SEQ ID NO: 154659 - RNA, 20 nt, Human
gacgggguuucaccauguug

SEQ ID NO: 154660 - RNA, 21 nt, Human
gacgggguuucaccauguugg

SEQ ID NO: 154661 - RNA, 20 nt, Human
gacgggguuucaccguguua

SEQ ID NO: 154662 - RNA, 32 nt, Human
gacgggguuucaucauauuggucaggcuggcc

SEQ ID NO: 154663 - RNA, 32 nt, Human
gacgggguuucaucauguuggccaggaugguc

SEQ ID NO: 154664 - RNA, 32 nt, Human
gacgggguuucaucauguuggccaggcuaguc

SEQ ID NO: 154665 - RNA, 32 nt, Human
gacgggguuucaucauguuggccaggcugguc

SEQ ID NO: 154666 - RNA, 32 nt, Human
gacgggguuucaucauguuggccagggugguc

SEQ ID NO: 154667 - RNA, 32 nt, Human
gacgggguuucugguuuuagaagguugcgugu

SEQ ID NO: 154668 - RNA, 32 nt, Human
gacgggucucacuauguugcccaggcuggucu

SEQ ID NO: 154669 - RNA, 32 nt, Human
gacgggugaacuucguguacugugucucgggu

SEQ ID NO: 154670 - RNA, 32 nt, Human
gacgggugacagugugagugcaugugugcaug

SEQ ID NO: 154671 - RNA, 32 nt, Human
gacgggugcccguaaucccagcuacucaggag

SEQ ID NO: 154672 - RNA, 32 nt, Human
gacgggugccgugguugggagcuguucagcgc

SEQ ID NO: 154673 - RNA, 32 nt, Human
gacgggugccuguaaucccagcuacucaggag

SEQ ID NO: 154674 - RNA, 32 nt, Human
gacggguggaucaccugaggucagggguucga

SEQ ID NO: 154675 - RNA, 17 nt, Human
gacggguguguggggug

SEQ ID NO: 154676 - RNA, 32 nt, Human
gacggguuagggaaagcggaggaggaaagcga

SEQ ID NO: 154677 - RNA, 19 nt, Human
gacggguuucaccauguua

SEQ ID NO: 154678 - RNA, 32 nt, Human
gacgguaauguucuucuacucacuucacaacu

SEQ ID NO: 154679 - RNA, 32 nt, Human
gacgguaccaccaucccagcugugaggcugcc

SEQ ID NO: 154680 - RNA, 32 nt, Human
gacgguaggucaugucuguaaucccagcaauu

SEQ ID NO: 154681 - RNA, 32 nt, Human
gacggucagcuucagcccugacucgagacagc

SEQ ID NO: 154682 - RNA, 32 nt, Human
gacggucaggcugcacacacagagcgugucgg

SEQ ID NO: 154683 - RNA, 32 nt, Human
gacggucauaugguagaaucacuguggacuga

SEQ ID NO: 154684 - RNA, 32 nt, Human
gacgguccagcagacaggugaagagaaagcgc

SEQ ID NO: 154685 - RNA, 32 nt, Human
gacggucugggcagucucagaggcuaguaugg

SEQ ID NO: 154686 - RNA, 32 nt, Human
gacggugaccaugggggaugugaagcugguug

SEQ ID NO: 154687 - RNA, 32 nt, Human
gacggugccacugcacuccagcuugggugaca

SEQ ID NO: 154688 - RNA, 32 nt, Human
gacggugccauugcucuccagccugggcgaca

SEQ ID NO: 154689 - RNA, 32 nt, Human
gacggugccucacaucuguaaucccagcacuu

SEQ ID NO: 154690 - RNA, 32 nt, Human
gacgguggaagacauuaugagcuguguccaac

SEQ ID NO: 154691 - RNA, 32 nt, Human
gacgguggcccucuucucacagcuccacuagg

SEQ ID NO: 154692 - RNA, 32 nt, Human
gacgguggcgccggcuggagaauggacuguga

SEQ ID NO: 154693 - RNA, 32 nt, Human
gacgguggcucacgccuguaaucccagcacuu

SEQ ID NO: 154694 - RNA, 32 nt, Human
gacgguggcuuccuggauaauuggaaaucucu

SEQ ID NO: 154695 - RNA, 32 nt, Human
gacggugggaaaauaaguugacuuucaaauca

SEQ ID NO: 154696 - RNA, 32 nt, Human
gacggugguacccagaugcccaagucuuccag

SEQ ID NO: 154697 - RNA, 18 nt, Human
gacgguggucggcggugg

SEQ ID NO: 154698 - RNA, 32 nt, Human
gacgguggucuucucccugcuuggcacccugc

SEQ ID NO: 154699 - RNA, 32 nt, Human
gacggugguucacaccuguaauccccgcacuu

SEQ ID NO: 154700 - RNA, 32 nt, Human
gacggugucacugcacuccagccugggugaca

SEQ ID NO: 154701 - RNA, 32 nt, Human
gacgguguugcaggaacccgucuaggcugcua

SEQ ID NO: 154702 - RNA, 20 nt, Human
gacgguguuucaccauguua

SEQ ID NO: 154703 - RNA, 32 nt, Human
gacgguuccacuucuucuguuccaugagcugc

SEQ ID NO: 154704 - RNA, 32 nt, Human
gacgguuccagccuuguccuuccugugugcuc

SEQ ID NO: 154705 - RNA, 32 nt, Human
gacgguucugagggaacuagaccaaugagacu

SEQ ID NO: 154706 - RNA, 32 nt, Human
gacgguuucucccauccguguuccagcaucua

SEQ ID NO: 154707 - RNA, 32 nt, Human
gacgguuuggccacucucugguuuucaacagc

SEQ ID NO: 154708 - RNA, 32 nt, Human
gacguaagccaccacaccuggcaauucccugc

SEQ ID NO: 154709 - RNA, 32 nt, Human
gacguacccucccucgcugccugccugcggcc

SEQ ID NO: 154710 - RNA, 32 nt, Human
gacguacugcagccucaaccuccugggcucaa

SEQ ID NO: 154711 - RNA, 32 nt, Human
gacguacuucauccuccaaugacuggacaacu

SEQ ID NO: 154712 - RNA, 32 nt, Human
gacguagaaggccugcacugcgagggccacgg

SEQ ID NO: 154713 - RNA, 31 nt, Human
gacguagcugagagagaagaaagcugcuaga

SEQ ID NO: 154714 - RNA, 32 nt, Human
gacguaggaauguggagggaggugcuuggugg

SEQ ID NO: 154715 - RNA, 32 nt, Human
gacguaguaaauuaaauagaagaaauauauuu

SEQ ID NO: 154716 - RNA, 32 nt, Human
gacgucaaacaucggugaaaagaagagaaaaa

SEQ ID NO: 154717 - RNA, 32 nt, Human
gacgucaaggaaugguaucacagucuauugac

SEQ ID NO: 154718 - RNA, 32 nt, Human
gacgucagcggcuugugcccugcuccaggauc

SEQ ID NO: 154719 - RNA, 32 nt, Human
gacgucaggagaucgaaaucagccuggccaag

SEQ ID NO: 154720 - RNA, 32 nt, Human
gacgucaggcgcccggcugcuccucacuugcu

SEQ ID NO: 154721 - RNA, 32 nt, Human
gacgucaguaguuugagaccagccuggccaac

SEQ ID NO: 154722 - RNA, 32 nt, Human
gacgucagugaggaagagagaagccgcaagaa

SEQ ID NO: 154723 - RNA, 32 nt, Human
gacgucauucuucuccaggcuggcccgccccc

SEQ ID NO: 154724 - RNA, 32 nt, Human
gacguccaugaggaaaacucccagugaugauc

SEQ ID NO: 154725 - RNA, 32 nt, Human
gacgucccccaagagcacaugcagugagccug

SEQ ID NO: 154726 - RNA, 32 nt, Human
gacgucccccggggcucccgguccucuggcau

SEQ ID NO: 154727 - RNA, 22 nt, Human
gacguccccuuggagcugggug

SEQ ID NO: 154728 - RNA, 32 nt, Human
gacguccgaggccaccaucugccugcauucgc

SEQ ID NO: 154729 - RNA, 32 nt, Human
gacguccgcucgggggcggccgccaggggccg

SEQ ID NO: 154730 - RNA, 32 nt, Human
gacguccguugucuucuccagcauccuugggc

SEQ ID NO: 154731 - RNA, 32 nt, Human
gacguccuccacugccaugcaguguguccccu

SEQ ID NO: 154732 - RNA, 32 nt, Human
gacguccugauagauccucugcuccaauaggc

SEQ ID NO: 154733 - RNA, 32 nt, Human
gacguccugccggggaagaaucaaagagcaga

SEQ ID NO: 154734 - RNA, 32 nt, Human
gacgucgagagggagccgcugccgcguuaguu

SEQ ID NO: 154735 - RNA, 32 nt, Human
gacgucgguggagggaagcaggcgcaggcucc

SEQ ID NO: 154736 - RNA, 31 nt, Human
gacgucuaaguguccagaaaggaggaugugg

SEQ ID NO: 154737 - RNA, 32 nt, Human
gacgucucuccacuccucuucuuccaaauacg

SEQ ID NO: 154738 - RNA, 32 nt, Human
gacgucugcugcugcugacugaggacugcaga

SEQ ID NO: 154739 - RNA, 32 nt, Human
gacgucuggggugggaaugggggacuagggug

SEQ ID NO: 154740 - RNA, 16 nt, Human
gacgucuguaauccca

SEQ ID NO: 154741 - RNA, 32 nt, Human
gacgucuguaaucccagcuacuugggagacug

SEQ ID NO: 154742 - RNA, 32 nt, Human
gacgucuguaaucccagcuauucaggaggcug

SEQ ID NO: 154743 - RNA, 32 nt, Human
gacgugaacggucguugcagagauugcgggcg

SEQ ID NO: 154744 - RNA, 19 nt, Human
gacgugaaucccacugugg

SEQ ID NO: 154745 - RNA, 32 nt, Human
gacgugagccaccacacccgcccuugaaauac

SEQ ID NO: 154746 - RNA, 32 nt, Human
gacgugagccaccacagcuggcugaagauuau

SEQ ID NO: 154747 - RNA, 32 nt, Human
gacgugagcuaccacaccuggcuuuucauucc

SEQ ID NO: 154748 - RNA, 32 nt, Human
gacgugaucccccaggccggaaucccagcagu

SEQ ID NO: 154749 - RNA, 31 nt, Human
gacgugauggggcuuccugaggagcgggucc

SEQ ID NO: 154750 - RNA, 32 nt, Human
gacgugcacuugagaacaggugcuuuauuugg

SEQ ID NO: 154751 - RNA, 32 nt, Human
gacgugcagagaagaacauaagaagaaaaacc

SEQ ID NO: 154752 - RNA, 32 nt, Human
gacgugcagccuggcagugcagugagcugucu

SEQ ID NO: 154753 - RNA, 32 nt, Human
gacgugcaggugaaggacaggaaggggcaugu

SEQ ID NO: 154754 - RNA, 32 nt, Human
gacgugccaucaucuucgucuccuggggguuu

SEQ ID NO: 154755 - RNA, 32 nt, Human
gacgugccugccucccuguuaccuuccaccau

SEQ ID NO: 154756 - RNA, 32 nt, Human
gacgugcggcuccccucggccuccucgccaug

SEQ ID NO: 154757 - RNA, 32 nt, Human
gacgugcuccaucaccgggcagggaagacacc

SEQ ID NO: 154758 - RNA, 32 nt, Human
gacgugcugggggccuuccugcuguggccuga

SEQ ID NO: 154759 - RNA, 32 nt, Human
gacguggagaggacagugaacuuccaggcaag

SEQ ID NO: 154760 - RNA, 32 nt, Human
gacguggagggugggcaccagauggggaccag

SEQ ID NO: 154761 - RNA, 32 nt, Human
gacguggauguggcugcccaggaaaagacuua

SEQ ID NO: 154762 - RNA, 32 nt, Human
gacguggcagcucugugcaguguuugagccua

SEQ ID NO: 154763 - RNA, 32 nt, Human
gacguggcaugacuucagaggcuucugggaac

SEQ ID NO: 154764 - RNA, 32 nt, Human
gacguggcuccaggagugcucgggccagcugg

SEQ ID NO: 154765 - RNA, 32 nt, Human
gacguggcuggcuauuccccaaguccauuuuc

SEQ ID NO: 154766 - RNA, 32 nt, Human
gacgugggagaguggagcacuaccuccucagg

SEQ ID NO: 154767 - RNA, 32 nt, Human
gacgugggaggaaguucuccagcugagcagcu

SEQ ID NO: 154768 - RNA, 32 nt, Human
gacgugggauggaagaagggccuggaccuccc

SEQ ID NO: 154769 - RNA, 32 nt, Human
gacgugggcccagaggcccacagggacgccca

SEQ ID NO: 154770 - RNA, 32 nt, Human
gacguggggcacugucagcaucagccucauaa

SEQ ID NO: 154771 - RNA, 32 nt, Human
gacguggggcuggggcugugggcgcugcuggc

SEQ ID NO: 154772 - RNA, 32 nt, Human
gacguggguggcucacuugagcacaggaguuu

SEQ ID NO: 154773 - RNA, 32 nt, Human
gacgugggugugaggguccuggguacagggag

SEQ ID NO: 154774 - RNA, 32 nt, Human
gacguggucaccaaggcagugagccccgcuga

SEQ ID NO: 154775 - RNA, 32 nt, Human
gacguggucaccacaagcugaagacaggcuaa

SEQ ID NO: 154776 - RNA, 32 nt, Human
gacguggucuuccagcccauuuccggggaaga

SEQ ID NO: 154777 - RNA, 32 nt, Human
gacguggugggacuccagcucguguguccuca

SEQ ID NO: 154778 - RNA, 32 nt, Human
gacguguccauggacuucucccaggaggagug

SEQ ID NO: 154779 - RNA, 32 nt, Human
gacgugucucaggagcuugauccagaccucua

SEQ ID NO: 154780 - RNA, 32 nt, Human
gacguuaucccuaaaaugagagaggacuggga

SEQ ID NO: 154781 - RNA, 32 nt, Human
gacguuaugacuuuucuccuuugcaagacugc

SEQ ID NO: 154782 - RNA, 17 nt, Human
gacguuauuucauuaca

SEQ ID NO: 154783 - RNA, 32 nt, Human
gacguucccucccguaggagggugggucagag

SEQ ID NO: 154784 - RNA, 32 nt, Human
gacguugaaagccagagaugacacugagcaug

SEQ ID NO: 154785 - RNA, 32 nt, Human
gacguugaggcugcagugagcuguguuguacc

SEQ ID NO: 154786 - RNA, 32 nt, Human
gacguugcagugaucccagauugugccacugc

SEQ ID NO: 154787 - RNA, 32 nt, Human
gacguugcaugcugugaggaggcuacaaaggc

SEQ ID NO: 154788 - RNA, 32 nt, Human
gacguugccugagaagaaguggcugccacacc

SEQ ID NO: 154789 - RNA, 32 nt, Human
gacguugccuggcccugccucgaugccucucu

SEQ ID NO: 154790 - RNA, 32 nt, Human
gacguuggacugccagcucccugggucuccuc

SEQ ID NO: 154791 - RNA, 32 nt, Human
gacguuggaguuuggaggugcuugccuuagag

SEQ ID NO: 154792 - RNA, 32 nt, Human
gacguuggggcuaagagacagagcagccugcg

SEQ ID NO: 154793 - RNA, 32 nt, Human
gacguugggugaggggagcuggaagaucagcg

SEQ ID NO: 154794 - RNA, 32 nt, Human
gacguuguacauugucccagacuguuuguaaa

SEQ ID NO: 154795 - RNA, 32 nt, Human
gacguugucacagauaaagagccaggcucacc

SEQ ID NO: 154796 - RNA, 32 nt, Human
gacguugugaacagaguuagcugguaaauguc

SEQ ID NO: 154797 - RNA, 32 nt, Human
gacguugugcaggauccaggagcgggcgcccu

SEQ ID NO: 154798 - RNA, 32 nt, Human
gacguuuagauuauuuccacaucuuggcuauu

SEQ ID NO: 154799 - RNA, 32 nt, Human
gacguuucagcccucagcccgggguggcugag

SEQ ID NO: 154800 - RNA, 32 nt, Human
gacguuucguuaucuucugauccuugcaccuu

SEQ ID NO: 154801 - RNA, 32 nt, Human
gacguuugagguugcacagaccuggaauuuca

SEQ ID NO: 154802 - RNA, 31 nt, Human
gacguuugccucucacagugugucuucuacc

SEQ ID NO: 154803 - RNA, 32 nt, Human
gacguuugccuuggggccccagccuggcccgg

SEQ ID NO: 154804 - RNA, 32 nt, Human
gacguuuuauccuuuugcuauguuuuguuugu

SEQ ID NO: 154805 - RNA, 32 nt, Human
gacguuuuauguuugcacugaaaaacagaaaa

SEQ ID NO: 154806 - RNA, 32 nt, Human
gacguuuugccaccauccuugucugugcuacu

SEQ ID NO: 154807 - RNA, 32 nt, Human
gacuaaaaacauaagucucaggagauuuggga

SEQ ID NO: 154808 - RNA, 23 nt, Human
gacuaaaaaucaauugaggauca

SEQ ID NO: 154809 - RNA, 32 nt, Human
gacuaaaaugagggaugggggaaaguaaaaga

SEQ ID NO: 154810 - RNA, 32 nt, Human
gacuaaaauucggggaacuucuaccucaguaa

SEQ ID NO: 154811 - RNA, 32 nt, Human
gacuaaaauucugucucuuccugcuuuagaca

SEQ ID NO: 154812 - RNA, 32 nt, Human
gacuaaagaaucugguaguugcuuaauugggc

SEQ ID NO: 154813 - RNA, 32 nt, Human
gacuaaagauuaacagguuauaguuuaaauuu

SEQ ID NO: 154814 - RNA, 32 nt, Human
gacuaaagauuuuacucucuccccuauccaug

SEQ ID NO: 154815 - RNA, 32 nt, Human
gacuaaaggaagaggggaaggaagggacuccc

SEQ ID NO: 154816 - RNA, 32 nt, Human
gacuaaauacacacaaauaugcaaauaagcaa

SEQ ID NO: 154817 - RNA, 32 nt, Human
gacuaaauauagaacucccccaugcaguguuc

SEQ ID NO: 154818 - RNA, 32 nt, Human
gacuaacaagacgagcgcucuggaucuuacua

SEQ ID NO: 154819 - RNA, 32 nt, Human
gacuaacacagugaaaccccgacucuacuaaa

SEQ ID NO: 154820 - RNA, 32 nt, Human
gacuaacacagugaaaccccgucucuaauaaa

SEQ ID NO: 154821 - RNA, 32 nt, Human
gacuaacaccaucgccucccacccccaccuuu

SEQ ID NO: 154822 - RNA, 32 nt, Human
gacuaacacggugaaaccccaucucuacuaaa

SEQ ID NO: 154823 - RNA, 32 nt, Human
gacuaacagacccuuggaggcaggggcugugg

SEQ ID NO: 154824 - RNA, 32 nt, Human
gacuaacauggugaaaccccaucucuacuaaa

SEQ ID NO: 154825 - RNA, 32 nt, Human
gacuaaccccucucuuagagcuacagcgagcu

SEQ ID NO: 154826 - RNA, 32 nt, Human
gacuaaccucaaggauccugagucuccuucag

SEQ ID NO: 154827 - RNA, 32 nt, Human
gacuaaccuccuccucuggcuccuccuugcag

SEQ ID NO: 154828 - RNA, 32 nt, Human
gacuaacuguaacuuaagugcugggggaaaaa

SEQ ID NO: 154829 - RNA, 32 nt, Human
gacuaacuuccagggugccaagaaggaagaaa

SEQ ID NO: 154830 - RNA, 32 nt, Human
gacuaagaggguaagagaggcccagaagccuu

SEQ ID NO: 154831 - RNA, 32 nt, Human
gacuaagaucccuauguccuagagauggggga

SEQ ID NO: 154832 - RNA, 32 nt, Human
gacuaagccaaugacaccuuccaucuuuccag

SEQ ID NO: 154833 - RNA, 22 nt, Human
gacuaagcccugcugaggggca

SEQ ID NO: 154834 - RNA, 32 nt, Human
gacuaagccgccagcgcacagcgcggcaggac

SEQ ID NO: 154835 - RNA, 32 nt, Human
gacuaaggcaggaggaaggauagcuugagguc

SEQ ID NO: 154836 - RNA, 32 nt, Human
gacuaaggcuggaacaguccauccuuaucccu

SEQ ID NO: 154837 - RNA, 22 nt, Human
gacuaaggggacaggaguucca

SEQ ID NO: 154838 - RNA, 22 nt, Human
gacuaagugcucuguguucuca

SEQ ID NO: 154839 - RNA, 32 nt, Human
gacuaauaaaggccauggcgccagcagaaauc

SEQ ID NO: 154840 - RNA, 32 nt, Human
gacuaauaggagaugagcaauggcagcuuugg

SEQ ID NO: 154841 - RNA, 32 nt, Human
gacuaaucaguauuuuauuauaaguaaaagau

SEQ ID NO: 154842 - RNA, 32 nt, Human
gacuaauccaggcuggaagcauucccaugugg

SEQ ID NO: 154843 - RNA, 32 nt, Human
gacuaaucugugccaccucugauucaguguuu

SEQ ID NO: 154844 - RNA, 32 nt, Human
gacuaaucuuauucauuuucucuaauauggca

SEQ ID NO: 154845 - RNA, 32 nt, Human
gacuaaugaacaaagaaaccugcucuaguuuu

SEQ ID NO: 154846 - RNA, 32 nt, Human
gacuacaaagacacaggaaaccaagggcccag

SEQ ID NO: 154847 - RNA, 21 nt, Human
gacuacaacgcagugcaucuc

SEQ ID NO: 154848 - RNA, 32 nt, Human
gacuacaacgugcagaccagccagggugccau

SEQ ID NO: 154849 - RNA, 23 nt, Human
gacuacaacuaauguguaucuca

SEQ ID NO: 154850 - RNA, 21 nt, Human
gacuacaacugcccagcuuca

SEQ ID NO: 154851 - RNA, 32 nt, Human
gacuacaaugccaguguuucagucccagacag

SEQ ID NO: 154852 - RNA, 32 nt, Human
gacuacagagucuugcucugucgcccaggcug

SEQ ID NO: 154853 - RNA, 32 nt, Human
gacuacagccugggugacagagugagaucuug

SEQ ID NO: 154854 - RNA, 32 nt, Human
gacuacaggaagggcagagaauacugacgguu

SEQ ID NO: 154855 - RNA, 32 nt, Human
gacuacaggcacacaccaucacccucagcuac

SEQ ID NO: 154856 - RNA, 32 nt, Human
gacuacaggcacacaucaccacauccagcuaa

SEQ ID NO: 154857 - RNA, 32 nt, Human
gacuacaggcgccaccaccuugcccaacuaau

SEQ ID NO: 154858 - RNA, 32 nt, Human
gacuacagggccugagcuauggaauuggcccu

SEQ ID NO: 154859 - RNA, 32 nt, Human
gacuacaggugcccgccaccacggucggcuaa

SEQ ID NO: 154860 - RNA, 32 nt, Human
gacuacagguguaugcuaccaugaccagcuaa

SEQ ID NO: 154861 - RNA, 32 nt, Human
gacuacaguagaaaaguauagagcaagcagga

SEQ ID NO: 154862 - RNA, 32 nt, Human
gacuacagugcccuaagacagcagguugcaga

SEQ ID NO: 154863 - RNA, 32 nt, Human
gacuacaugcuggccacugcugugaccacgac

SEQ ID NO: 154864 - RNA, 32 nt, Human
gacuaccaaaacugaucaucugagucgauuga

SEQ ID NO: 154865 - RNA, 25 nt, Human
gacuaccaagcuggcuuguuucuua

SEQ ID NO: 154866 - RNA, 32 nt, Human
gacuaccacugucaguucauugucaacuaugu

SEQ ID NO: 154867 - RNA, 32 nt, Human
gacuaccaguagaugggacuacaggcaccugc

SEQ ID NO: 154868 - RNA, 32 nt, Human
gacuaccccuccgcuuccaugacugucuccuc

SEQ ID NO: 154869 - RNA, 32 nt, Human
gacuaccgccuuuuuguugugcaccugcuccc

SEQ ID NO: 154870 - RNA, 32 nt, Human
gacuaccuaauggaauauuuuugaggccugga

SEQ ID NO: 154871 - RNA, 18 nt, Human
gacuaccugucuccgcca

SEQ ID NO: 154872 - RNA, 32 nt, Human
gacuaccuuagcuuaccucugugaaaggaguu

SEQ ID NO: 154873 - RNA, 32 nt, Human
gacuaccuuucauuuaugcagcaguuacaauu

SEQ ID NO: 154874 - RNA, 32 nt, Human
gacuacgccacugcacuccagccuggaggcca

SEQ ID NO: 154875 - RNA, 32 nt, Human
gacuacgccagcaagcucuggagcucagcagu

SEQ ID NO: 154876 - RNA, 32 nt, Human
gacuacggaagagggaaaagugccacagacau

SEQ ID NO: 154877 - RNA, 31 nt, Human
gacuacguauuuuucugacuuuuacagauua

SEQ ID NO: 154878 - RNA, 32 nt, Human
gacuacguggagucaccaugcugagucgcccu

SEQ ID NO: 154879 - RNA, 32 nt, Human
gacuacuaaggguuugggguuucuuuuucggg

SEQ ID NO: 154880 - RNA, 32 nt, Human
gacuacuagaggcuugacuugcagugaaaccc

SEQ ID NO: 154881 - RNA, 32 nt, Human
gacuacucaacccucccuuuguagugugaaag

SEQ ID NO: 154882 - RNA, 32 nt, Human
gacuacucauuuccaagaggggagaaaaagug

SEQ ID NO: 154883 - RNA, 19 nt, Human
gacuacuccggagcagcca

SEQ ID NO: 154884 - RNA, 32 nt, Human
gacuacucuggccccagcaugcugcuccuugg

SEQ ID NO: 154885 - RNA, 32 nt, Human
gacuacugagggagggagaggaggggagccaa

SEQ ID NO: 154886 - RNA, 22 nt, Human
gacuacugcauguacucucuuu

SEQ ID NO: 154887 - RNA, 32 nt, Human
gacuacugccagcccggacccccagccccugg

SEQ ID NO: 154888 - RNA, 32 nt, Human
gacuacugcuuugaaugaguugaauuacauaa

SEQ ID NO: 154889 - RNA, 23 nt, Human
gacuacugguguugggaucugga

SEQ ID NO: 154890 - RNA, 32 nt, Human
gacuacuuccagcaacccagucuccugccaug

SEQ ID NO: 154891 - RNA, 32 nt, Human
gacuacuuguuccugugcccucuuguuuuagg

SEQ ID NO: 154892 - RNA, 21 nt, Human
gacuagaaaacagacgcugga

SEQ ID NO: 154893 - RNA, 32 nt, Human
gacuagaaacugccuuuuucuccacuucauuu

SEQ ID NO: 154894 - RNA, 32 nt, Human
gacuagaacugcaccauuggcucucuuggguu

SEQ ID NO: 154895 - RNA, 32 nt, Human
gacuagaacuuaagugugagacuuggguggau

SEQ ID NO: 154896 - RNA, 32 nt, Human
gacuagaggaagaggacgaggccuuguuggca

SEQ ID NO: 154897 - RNA, 32 nt, Human
gacuagaggagcaggagaaggagcaggucaug

SEQ ID NO: 154898 - RNA, 32 nt, Human
gacuagagggagugggguugcaguggcugccu

SEQ ID NO: 154899 - RNA, 32 nt, Human
gacuagagggcagagguaaaugagucccuguc

SEQ ID NO: 154900 - RNA, 32 nt, Human
gacuagcacagaagcuggacuaauugaacaag

SEQ ID NO: 154901 - RNA, 32 nt, Human
gacuagcacaggaagauguggaagagaaguga

SEQ ID NO: 154902 - RNA, 32 nt, Human
gacuagccccacaaacccucaccagcauaugg

SEQ ID NO: 154903 - RNA, 32 nt, Human
gacuagcgcgcggggcccgguucuccaucgcg

SEQ ID NO: 154904 - RNA, 32 nt, Human
gacuagcuacugcacuccaaccugggcaacau

SEQ ID NO: 154905 - RNA, 32 nt, Human
gacuagcucuccuuucucaucuccuguuucag

SEQ ID NO: 154906 - RNA, 32 nt, Human
gacuagcugcugcugcugcugcugcugcaaac

SEQ ID NO: 154907 - RNA, 21 nt, Human
gacuagcugggauuacagcug

SEQ ID NO: 154908 - RNA, 32 nt, Human
gacuaggaaggaggauggggaggcagggcugg

SEQ ID NO: 154909 - RNA, 32 nt, Human
gacuaggacggcccggugaccgcgcggauuca

SEQ ID NO: 154910 - RNA, 32 nt, Human
gacuaggagccaugcugaugaugugggucucg

SEQ ID NO: 154911 - RNA, 32 nt, Human
gacuaggagggaaucuggagggggcgcuggag

SEQ ID NO: 154912 - RNA, 32 nt, Human
gacuaggcagagccguggaaccgccgccaggu

SEQ ID NO: 154913 - RNA, 32 nt, Human
gacuaggccaagcagaaucucucaaccugauc

SEQ ID NO: 154914 - RNA, 32 nt, Human
gacuaggcuuuccuccugcauguugaauuucc

SEQ ID NO: 154915 - RNA, 32 nt, Human
gacuagggacaaacauguaaaccuauuuuccu

SEQ ID NO: 154916 - RNA, 32 nt, Human
gacuagggagugaagcucuggagauggaucuu

SEQ ID NO: 154917 - RNA, 32 nt, Human
gacuagggcucgggggcccagguccaaaucac

SEQ ID NO: 154918 - RNA, 32 nt, Human
gacuaggggccuggguggccucauuaacucua

SEQ ID NO: 154919 - RNA, 32 nt, Human
gacuaggggcuggggugucuccucaccagggc

SEQ ID NO: 154920 - RNA, 23 nt, Human
gacuagggugggauagggaggaa

SEQ ID NO: 154921 - RNA, 32 nt, Human
gacuaggguggggagcaaacaggccagcggug

SEQ ID NO: 154922 - RNA, 32 nt, Human
gacuaggugaagcggcgccgggccggggcugg

SEQ ID NO: 154923 - RNA, 32 nt, Human
gacuaggugaugccuguauuggguugaauaug

SEQ ID NO: 154924 - RNA, 32 nt, Human
gacuagguuucaugugagcuggucggggccau

SEQ ID NO: 154925 - RNA, 32 nt, Human
gacuaguagaaaauuauaaggaggcauuaaca

SEQ ID NO: 154926 - RNA, 32 nt, Human
gacuagucucaaacuucuaggcucaagcgauu

SEQ ID NO: 154927 - RNA, 32 nt, Human
gacuagucuugaacuccugaccucaggugauc

SEQ ID NO: 154928 - RNA, 32 nt, Human
gacuagugagcagaggaugagaggacuacccu

SEQ ID NO: 154929 - RNA, 32 nt, Human
gacuauaaacuggccucucugagucauagaaa

SEQ ID NO: 154930 - RNA, 23 nt, Human
gacuauaacugugcuugguuuca

SEQ ID NO: 154931 - RNA, 32 nt, Human
gacuauaaugggcccaaggcugagggaagagg

SEQ ID NO: 154932 - RNA, 32 nt, Human
gacuauacugauuucuuauuuuggucacuauu

SEQ ID NO: 154933 - RNA, 31 nt, Human
gacuauacuuuauuugggcaugcagagauau

SEQ ID NO: 154934 - RNA, 32 nt, Human
gacuauagauucacauauuagcaacaaaaucc

SEQ ID NO: 154935 - RNA, 21 nt, Human
gacuauagcccagguccucug

SEQ ID NO: 154936 - RNA, 22 nt, Human
gacuaucccaggaagccuggga

SEQ ID NO: 154937 - RNA, 31 nt, Human
gacuaucuaaacucauaccuguaugaauuaa

SEQ ID NO: 154938 - RNA, 32 nt, Human
gacuaucucagacagaugccucuccuuuuuaa

SEQ ID NO: 154939 - RNA, 32 nt, Human
gacuaucuuguguugugccuguaugaauuuuu

SEQ ID NO: 154940 - RNA, 32 nt, Human
gacuaugauggaccagcccugagaaagaauga

SEQ ID NO: 154941 - RNA, 32 nt, Human
gacuaugccacugcacuccagccuaggugaca

SEQ ID NO: 154942 - RNA, 32 nt, Human
gacuaugccacugcacucccgccugggugaca

SEQ ID NO: 154943 - RNA, 32 nt, Human
gacuaugccacuguacuccagccuggguaaca

SEQ ID NO: 154944 - RNA, 32 nt, Human
gacuauggacgcccugcaacccugccaggcug

SEQ ID NO: 154945 - RNA, 32 nt, Human
gacuauggagggaaagagagccaugacuguau

SEQ ID NO: 154946 - RNA, 32 nt, Human
gacuauggcacgggaggaccccugccaccgac

SEQ ID NO: 154947 - RNA, 32 nt, Human
gacuaugggugagucuguggccuucucuccag

SEQ ID NO: 154948 - RNA, 32 nt, Human
gacuauguagaaguagaaagaaaagaaaaaga

SEQ ID NO: 154949 - RNA, 32 nt, Human
gacuauguauagcugucguuagucuuuuuggg

SEQ ID NO: 154950 - RNA, 32 nt, Human
gacuauguauguuuaaauuaacuuuuuauuga

SEQ ID NO: 154951 - RNA, 32 nt, Human
gacuaugucacccaaugcauauccaacaugug

SEQ ID NO: 154952 - RNA, 29 nt, Human
gacuaugucgcgggcgcggagccaccugc

SEQ ID NO: 154953 - RNA, 29 nt, Human
gacuaugucuaacauggagaaacaccugu

SEQ ID NO: 154954 - RNA, 32 nt, Human
gacuaugugaagauacggugggaagaugacug

SEQ ID NO: 154955 - RNA, 32 nt, Human
gacuauguucuccaucccaacacaucacuuac

SEQ ID NO: 154956 - RNA, 32 nt, Human
gacuauguuuggagaaaggguuuuaaagaggu

SEQ ID NO: 154957 - RNA, 32 nt, Human
gacuauugagcuuacuuacuuggacgcaacau

SEQ ID NO: 154958 - RNA, 32 nt, Human
gacuauugcaauacauuucuuccuucaaaucc

SEQ ID NO: 154959 - RNA, 19 nt, Human
gacuauuucaaucauuaca

SEQ ID NO: 154960 - RNA, 32 nt, Human
gacuauuucuaaagcaccugcuacacagcagg

SEQ ID NO: 154961 - RNA, 32 nt, Human
gacuauuugaaguccaguugagucacaagaga

SEQ ID NO: 154962 - RNA, 32 nt, Human
gacucaaagagugcucagugggaaguaacugu

SEQ ID NO: 154963 - RNA, 32 nt, Human
gacucaaaugucccuaaugggugagggcuuuc

SEQ ID NO: 154964 - RNA, 32 nt, Human
gacucaacagaaaauauauucuccaaacaccc

SEQ ID NO: 154965 - RNA, 32 nt, Human
gacucaacagccgcuugaagccaagaacucuu

SEQ ID NO: 154966 - RNA, 32 nt, Human
gacucaaccaguagcaguuauauugccccuug

SEQ ID NO: 154967 - RNA, 32 nt, Human
gacucaacggcucucagacaccagguugcuuc

SEQ ID NO: 154968 - RNA, 32 nt, Human
gacucaacgugagacgcaccgcccggacucac

SEQ ID NO: 154969 - RNA, 32 nt, Human
gacucaacugcuuucaaagauaaugugggugc

SEQ ID NO: 154970 - RNA, 32 nt, Human
gacucaagagacauuuauucacuuccucucau

SEQ ID NO: 154971 - RNA, 32 nt, Human
gacucaagccuguaucccagcacuuugggagg

SEQ ID NO: 154972 - RNA, 32 nt, Human
gacucaaggccugccuaacuggcugggucguu

SEQ ID NO: 154973 - RNA, 32 nt, Human
gacucaaguaauccuccugccucagccuacca

SEQ ID NO: 154974 - RNA, 24 nt, Human
gacucaagugauccuccugccuca

SEQ ID NO: 154975 - RNA, 24 nt, Human
gacucaagugauucuccugccuca

SEQ ID NO: 154976 - RNA, 32 nt, Human
gacucaaugcaaccuucucccacgagcaagug

SEQ ID NO: 154977 - RNA, 32 nt, Human
gacucaaugcucagcacccagcuggcaaugug

SEQ ID NO: 154978 - RNA, 32 nt, Human
gacucaauggccugggagguuugucccagccg

SEQ ID NO: 154979 - RNA, 32 nt, Human
gacucaauugauccucccaucucagccuccca

SEQ ID NO: 154980 - RNA, 32 nt, Human
gacucacaaaccuccaaguagcuccaaaugca

SEQ ID NO: 154981 - RNA, 32 nt, Human
gacucacaccugcaaucccagcacuuugggag

SEQ ID NO: 154982 - RNA, 32 nt, Human
gacucacaccuguaaucccagcacuuucggag

SEQ ID NO: 154983 - RNA, 32 nt, Human
gacucacaccuguaaucccagcacuuugggag

SEQ ID NO: 154984 - RNA, 32 nt, Human
gacucacaccuguaaucccagcacuuugggau

SEQ ID NO: 154985 - RNA, 32 nt, Human
gacucacaccuguaauccgaguacuuugcggg

SEQ ID NO: 154986 - RNA, 32 nt, Human
gacucacaccuguaauuccagcacuuugggag

SEQ ID NO: 154987 - RNA, 32 nt, Human
gacucacacuaguccauccucuaccaucacga

SEQ ID NO: 154988 - RNA, 31 nt, Human
gacucacacuggauagaaaccaaagcaggug

SEQ ID NO: 154989 - RNA, 32 nt, Human
gacucacacuuguaaucccagcacuuugggag

SEQ ID NO: 154990 - RNA, 32 nt, Human
gacucacagaacuuucagucuacuuggggaga

SEQ ID NO: 154991 - RNA, 32 nt, Human
gacucacagauggcgggagacagccaucuaaa

SEQ ID NO: 154992 - RNA, 32 nt, Human
gacucacagccaagagcaggugaccucagagg

SEQ ID NO: 154993 - RNA, 32 nt, Human
gacucacagccguaaucccagcuacucgggag

SEQ ID NO: 154994 - RNA, 32 nt, Human
gacucacaggugaccugcuaucgagauagcca

SEQ ID NO: 154995 - RNA, 32 nt, Human
gacucacaguuugaagcauucugugauccccu

SEQ ID NO: 154996 - RNA, 32 nt, Human
gacucacaucuguaauccaagcacuuugggag

SEQ ID NO: 154997 - RNA, 32 nt, Human
gacucacaucuguaaucccagcacuuugggag

SEQ ID NO: 154998 - RNA, 32 nt, Human
gacucacaucuucacuccugggccuuugcacu

SEQ ID NO: 154999 - RNA, 32 nt, Human
gacucacaugacagcccauucuuucuuucugg

SEQ ID NO: 155000 - RNA, 22 nt, Human
gacucacccagcaaaggcugcc

SEQ ID NO: 155001 - RNA, 32 nt, Human
gacucaccccuccaucccaaccccugcaccac

SEQ ID NO: 155002 - RNA, 32 nt, Human
gacucacccuacccuucuugcuuuuccuucuc

SEQ ID NO: 155003 - RNA, 32 nt, Human
gacucaccucacacccuuacaacuugaagcug

SEQ ID NO: 155004 - RNA, 32 nt, Human
gacucaccucccccaucucuucuggguuccuu

SEQ ID NO: 155005 - RNA, 32 nt, Human
gacucaccugcgcaagugccugggauucuacc

SEQ ID NO: 155006 - RNA, 32 nt, Human
gacucacgcacccugggccacagggagccggg

SEQ ID NO: 155007 - RNA, 32 nt, Human
gacucacgccuauaaucccagcacuuugggag

SEQ ID NO: 155008 - RNA, 32 nt, Human
gacucacgccuguaaccccagcacuuugggag

SEQ ID NO: 155009 - RNA, 32 nt, Human
gacucacgccuguaaucccaacauuuugggag

SEQ ID NO: 155010 - RNA, 32 nt, Human
gacucacgccuguaaucccagcacuuuaggag

SEQ ID NO: 155011 - RNA, 32 nt, Human
gacucacgccuguaaucccagcacuuugggag

SEQ ID NO: 155012 - RNA, 32 nt, Human
gacucacgccugucauccuagcacuuugggag

SEQ ID NO: 155013 - RNA, 32 nt, Human
gacucacgucuguaaucccagcacuuugggag

SEQ ID NO: 155014 - RNA, 32 nt, Human
gacucacuacaaccuccgccucccagguucaa

SEQ ID NO: 155015 - RNA, 32 nt, Human
gacucacuacagccucugccucccagguucaa

SEQ ID NO: 155016 - RNA, 32 nt, Human
gacucacuagccagaagagaggagugggacag

SEQ ID NO: 155017 - RNA, 32 nt, Human
gacucacuccaaaguccugcuggagcuaugau

SEQ ID NO: 155018 - RNA, 32 nt, Human
gacucacucugccuuccucaaaacugcccuga

SEQ ID NO: 155019 - RNA, 32 nt, Human
gacucacugcaaaaucugccucccggguucaa

SEQ ID NO: 155020 - RNA, 32 nt, Human
gacucacugcaacaucugccucccggguucaa

SEQ ID NO: 155021 - RNA, 32 nt, Human
gacucacugcaaccuccaccucccagguucaa

SEQ ID NO: 155022 - RNA, 32 nt, Human
gacucacugcaaccuccaccucccagguucag

SEQ ID NO: 155023 - RNA, 32 nt, Human
gacucacugcaaccuccaccuccuguguucaa

SEQ ID NO: 155024 - RNA, 32 nt, Human
gacucacugcaaccuccgccucacagcuucaa

SEQ ID NO: 155025 - RNA, 32 nt, Human
gacucacugcaaccuccgccucccagguucaa

SEQ ID NO: 155026 - RNA, 32 nt, Human
gacucacugcaaccuccgccucccgaguucaa

SEQ ID NO: 155027 - RNA, 32 nt, Human
gacucacugcaaccuccgccuccuggguucaa

SEQ ID NO: 155028 - RNA, 32 nt, Human
gacucacugcaaccucugccucccagguucaa

SEQ ID NO: 155029 - RNA, 32 nt, Human
gacucacugcaaccucugccucccagguuuaa

SEQ ID NO: 155030 - RNA, 32 nt, Human
gacucacugcaaccucugccucucggguucca

SEQ ID NO: 155031 - RNA, 32 nt, Human
gacucacugcaaccuucgccucccaggagaau

SEQ ID NO: 155032 - RNA, 32 nt, Human
gacucacugcaaccuucgccucccagguucaa

SEQ ID NO: 155033 - RNA, 32 nt, Human
gacucacugcaacuuccaccuccuggagucaa

SEQ ID NO: 155034 - RNA, 32 nt, Human
gacucacugcaacuucugccacccagguucaa

SEQ ID NO: 155035 - RNA, 32 nt, Human
gacucacugcaagcuccgccucccggguucac

SEQ ID NO: 155036 - RNA, 32 nt, Human
gacucacugcaaucuccaccucccacagguuc

SEQ ID NO: 155037 - RNA, 32 nt, Human
gacucacugcaauucugccuccuggguucaag

SEQ ID NO: 155038 - RNA, 16 nt, Human
gacucacugcacagca

SEQ ID NO: 155039 - RNA, 32 nt, Human
gacucacugcagccucaaacuccuggguucaa

SEQ ID NO: 155040 - RNA, 32 nt, Human
gacucacugcagccucaaccucccaggcucau

SEQ ID NO: 155041 - RNA, 32 nt, Human
gacucacugcagccucaaccuccuggggccaa

SEQ ID NO: 155042 - RNA, 32 nt, Human
gacucacugcagccuccgccuccuggguucaa

SEQ ID NO: 155043 - RNA, 32 nt, Human
gacucacugcagccuugaccucccgggcccag

SEQ ID NO: 155044 - RNA, 32 nt, Human
gacucacugggagccuugcuagugcagacagg

SEQ ID NO: 155045 - RNA, 32 nt, Human
gacucacuguaaucaccuacuggauucaagca

SEQ ID NO: 155046 - RNA, 32 nt, Human
gacucacugucaacaacaucccauccugaaga

SEQ ID NO: 155047 - RNA, 32 nt, Human
gacucacuuagaacaaaguaccuggcauugaa

SEQ ID NO: 155048 - RNA, 32 nt, Human
gacucacuugcaacuccaccucagcagugguc

SEQ ID NO: 155049 - RNA, 21 nt, Human
gacucacuuucuaaaauucca

SEQ ID NO: 155050 - RNA, 32 nt, Human
gacucagaaagccucaaugaaauggagcuggc

SEQ ID NO: 155051 - RNA, 32 nt, Human
gacucagaaaguacauuaggccauuuggaguc

SEQ ID NO: 155052 - RNA, 32 nt, Human
gacucagaagaaaaagaagcugaggaagcugu

SEQ ID NO: 155053 - RNA, 32 nt, Human
gacucagaagaaugggccuuucugccauaauu

SEQ ID NO: 155054 - RNA, 32 nt, Human
gacucagaagcagcgagaaggccaggccagcc

SEQ ID NO: 155055 - RNA, 32 nt, Human
gacucagaauaaaugacugccaccucaacuga

SEQ ID NO: 155056 - RNA, 32 nt, Human
gacucagacgaugcccugcugaagaugaccau

SEQ ID NO: 155057 - RNA, 32 nt, Human
gacucagacuccuggcuucauguggcauucuc

SEQ ID NO: 155058 - RNA, 32 nt, Human
gacucagagagacauaaaggagaagauuuggg

SEQ ID NO: 155059 - RNA, 32 nt, Human
gacucagagccagacagcccugucaaugggga

SEQ ID NO: 155060 - RNA, 32 nt, Human
gacucagagccagacagggcagccucagaccc

SEQ ID NO: 155061 - RNA, 31 nt, Human
gacucagaggagagagauaaggaaggaaagu

SEQ ID NO: 155062 - RNA, 32 nt, Human
gacucagaggcagagcggcgcaagggccaagg

SEQ ID NO: 155063 - RNA, 32 nt, Human
gacucagaggccaucugcagggccaagccaca

SEQ ID NO: 155064 - RNA, 32 nt, Human
gacucagaguggagggaagcugggggagaaga

SEQ ID NO: 155065 - RNA, 32 nt, Human
gacucagauuucaccacccacacucuuuuuag

SEQ ID NO: 155066 - RNA, 32 nt, Human
gacucagcagcaacaccaaauccuggaccagg

SEQ ID NO: 155067 - RNA, 32 nt, Human
gacucagcaggcaugacuggagagggaagucc

SEQ ID NO: 155068 - RNA, 32 nt, Human
gacucagcaucauuuuggaggcugaggagggg

SEQ ID NO: 155069 - RNA, 32 nt, Human
gacucagccagccucgcuccucgcuccucgcu

SEQ ID NO: 155070 - RNA, 32 nt, Human
gacucagccaugccgcugcacugacauacuaa

SEQ ID NO: 155071 - RNA, 32 nt, Human
gacucagcccagcugcucuugagcuuggauag

SEQ ID NO: 155072 - RNA, 32 nt, Human
gacucagcccuuguuucucuuccuuucuuuuu

SEQ ID NO: 155073 - RNA, 32 nt, Human
gacucagccugucucccaccucccgggccucu

SEQ ID NO: 155074 - RNA, 32 nt, Human
gacucagcgaccugucuuccagccuggaaggg

SEQ ID NO: 155075 - RNA, 32 nt, Human
gacucagcggcagcuucugccgcuggguuuuc

SEQ ID NO: 155076 - RNA, 32 nt, Human
gacucagcgggcguggaggucgcggcggacgg

SEQ ID NO: 155077 - RNA, 32 nt, Human
gacucagcuaccacguucacugccuuccucuc

SEQ ID NO: 155078 - RNA, 32 nt, Human
gacucagcuccaggcugcuuggcagcccagcc

SEQ ID NO: 155079 - RNA, 32 nt, Human
gacucagcuucgcacuccagggcugcguacca

SEQ ID NO: 155080 - RNA, 18 nt, Human
gacucaggaggagccaca

SEQ ID NO: 155081 - RNA, 26 nt, Human
gacucaggaggcggaguuugcaguga

SEQ ID NO: 155082 - RNA, 32 nt, Human
gacucaggaggcggaguuugcagugagcugag

SEQ ID NO: 155083 - RNA, 32 nt, Human
gacucaggcagguaaucccagaacuuugggag

SEQ ID NO: 155084 - RNA, 32 nt, Human
gacucaggcaugucuauggcugccuguccuga

SEQ ID NO: 155085 - RNA, 32 nt, Human
gacucaggccuguaaucccagcacuuugggag

SEQ ID NO: 155086 - RNA, 32 nt, Human
gacucaggcugcacuguuugaagaggagcaga

SEQ ID NO: 155087 - RNA, 32 nt, Human
gacucaggcuuccuuuggagauuaaggccccu

SEQ ID NO: 155088 - RNA, 32 nt, Human
gacucagggaacacagugaucuacacagaguc

SEQ ID NO: 155089 - RNA, 32 nt, Human
gacucagggaguuuugucugaagaccaggucc

SEQ ID NO: 155090 - RNA, 32 nt, Human
gacucaggggcgaggaggaugacuggguccgg

SEQ ID NO: 155091 - RNA, 32 nt, Human
gacucaguccaagcucuccugucccauugugc

SEQ ID NO: 155092 - RNA, 32 nt, Human
gacucaguggcagaacaugcagcagaaaagcu

SEQ ID NO: 155093 - RNA, 32 nt, Human
gacucaguggcuuccauuucugucuuauaguu

SEQ ID NO: 155094 - RNA, 32 nt, Human
gacucaguggguuuggagugcaagcacacaac

SEQ ID NO: 155095 - RNA, 32 nt, Human
gacucagugucgaaggaugacagagaugugca

SEQ ID NO: 155096 - RNA, 32 nt, Human
gacucaguucugcuguuggucuucagagaagu

SEQ ID NO: 155097 - RNA, 32 nt, Human
gacucaguucuguuuagguuugauauaauggu

SEQ ID NO: 155098 - RNA, 32 nt, Human
gacucaguuuuaacacccagcccagugguucu

SEQ ID NO: 155099 - RNA, 32 nt, Human
gacucauaagaacccagagagaggaaaaucuu

SEQ ID NO: 155100 - RNA, 32 nt, Human
gacucaucaccacucccuaaucucaaguaccc

SEQ ID NO: 155101 - RNA, 32 nt, Human
gacucaucauuuccauuuacccuucuuuucug

SEQ ID NO: 155102 - RNA, 32 nt, Human
gacucauccuugcccaggugagggaaggagac

SEQ ID NO: 155103 - RNA, 32 nt, Human
gacucaugacuguaauccuaguacuuuggaag

SEQ ID NO: 155104 - RNA, 21 nt, Human
gacucaugacuuggaggccaa

SEQ ID NO: 155105 - RNA, 32 nt, Human
gacucaugcaaucuuccugccucaggcuucug

SEQ ID NO: 155106 - RNA, 32 nt, Human
gacucaugccuacaaucccagcauuugggagg

SEQ ID NO: 155107 - RNA, 32 nt, Human
gacucaugccuauaaucccagcacuuugggag

SEQ ID NO: 155108 - RNA, 32 nt, Human
gacucaugccuguaaacccagcauuuugugag

SEQ ID NO: 155109 - RNA, 32 nt, Human
gacucaugccuguaaccccagcgcuuugggaa

SEQ ID NO: 155110 - RNA, 32 nt, Human
gacucaugccuguaaucccagcacguugggag

SEQ ID NO: 155111 - RNA, 32 nt, Human
gacucaugccuguaaucccagcacugugggaa

SEQ ID NO: 155112 - RNA, 32 nt, Human
gacucaugccuguaaucccagcacuuugggag

SEQ ID NO: 155113 - RNA, 32 nt, Human
gacucaugccuguaaucccaguacucugggaa

SEQ ID NO: 155114 - RNA, 32 nt, Human
gacucaugccuguaaucccugcacuuugggag

SEQ ID NO: 155115 - RNA, 32 nt, Human
gacucaugccuguaauccuagcacuuugggag

SEQ ID NO: 155116 - RNA, 32 nt, Human
gacucaugccuguaauccuaguacuuugggag

SEQ ID NO: 155117 - RNA, 32 nt, Human
gacucaugccuguaguaaucccagcacuuuug

SEQ ID NO: 155118 - RNA, 32 nt, Human
gacucaugccuguuaucccaacacuuugggag

SEQ ID NO: 155119 - RNA, 32 nt, Human
gacucaugccuuuaaucccaacacuuuggaag

SEQ ID NO: 155120 - RNA, 30 nt, Human
gacucauggucugguucuuggacuucccua

SEQ ID NO: 155121 - RNA, 32 nt, Human
gacucauguugccuucaggaucaagccaucca

SEQ ID NO: 155122 - RNA, 32 nt, Human
gacucauucuguaaauggaggagcugagguca

SEQ ID NO: 155123 - RNA, 32 nt, Human
gacucauuuaaaaaugcacagauacuagugga

SEQ ID NO: 155124 - RNA, 32 nt, Human
gacucauuuaaacuuugaugcuuaguuauguu

SEQ ID NO: 155125 - RNA, 32 nt, Human
gacuccaaagauauuucucuguggcuucugac

SEQ ID NO: 155126 - RNA, 22 nt, Human
gacuccaaagccugugcucuua

SEQ ID NO: 155127 - RNA, 19 nt, Human
gacuccaaaggcaauccca

SEQ ID NO: 155128 - RNA, 23 nt, Human
gacuccaaagguggagguugcag

SEQ ID NO: 155129 - RNA, 32 nt, Human
gacuccaaagguggagguugcaguaagcugaa

SEQ ID NO: 155130 - RNA, 21 nt, Human
gacuccaacccuccugcuugc

SEQ ID NO: 155131 - RNA, 32 nt, Human
gacuccaagcagcugcuaucaacccucucucc

SEQ ID NO: 155132 - RNA, 32 nt, Human
gacuccaagccucagcaucacacaauuacuca

SEQ ID NO: 155133 - RNA, 31 nt, Human
gacuccaaggagcuacugacauuccuaagag

SEQ ID NO: 155134 - RNA, 32 nt, Human
gacuccacagccaucaacuucccuucauccuu

SEQ ID NO: 155135 - RNA, 19 nt, Human
gacuccacagggaccuuuc

SEQ ID NO: 155136 - RNA, 32 nt, Human
gacuccacaguggagcugagcgccacucccug

SEQ ID NO: 155137 - RNA, 22 nt, Human
gacuccacauccagagcugccu

SEQ ID NO: 155138 - RNA, 32 nt, Human
gacuccacggaugcgugggcagaggaaugugg

SEQ ID NO: 155139 - RNA, 19 nt, Human
gacuccacguagcauguca

SEQ ID NO: 155140 - RNA, 32 nt, Human
gacuccacucacaagccuccugaugucaagga

SEQ ID NO: 155141 - RNA, 32 nt, Human
gacuccacuggggaccggcuccugggcuuccc

SEQ ID NO: 155142 - RNA, 32 nt, Human
gacuccagagccuccagcaagaugcuacugau

SEQ ID NO: 155143 - RNA, 23 nt, Human
gacuccagagguggagguugcag

SEQ ID NO: 155144 - RNA, 32 nt, Human
gacuccagagguggagguugcaguaagcugag

SEQ ID NO: 155145 - RNA, 32 nt, Human
gacuccagcaagaugugcaucuuggucugaga

SEQ ID NO: 155146 - RNA, 32 nt, Human
gacuccagcacagcuacaugguggaagauuua

SEQ ID NO: 155147 - RNA, 32 nt, Human
gacuccagcccagccccugcucccucugcggg

SEQ ID NO: 155148 - RNA, 32 nt, Human
gacuccagccccggggaucgagaacggcgccc

SEQ ID NO: 155149 - RNA, 32 nt, Human
gacuccagccucugagacagaauggcccccaa

SEQ ID NO: 155150 - RNA, 32 nt, Human
gacuccagccuggacaacagagcaagacuccg

SEQ ID NO: 155151 - RNA, 32 nt, Human
gacuccagccugggcaacagagcaagacccug

SEQ ID NO: 155152 - RNA, 32 nt, Human
gacuccagccugggcgacagagugagacucca

SEQ ID NO: 155153 - RNA, 32 nt, Human
gacuccagccugggugaaagagcgagacucca

SEQ ID NO: 155154 - RNA, 32 nt, Human
gacuccagccugggugaaggagugagacccug

SEQ ID NO: 155155 - RNA, 32 nt, Human
gacuccagccuugccagccugacucagauccu

SEQ ID NO: 155156 - RNA, 32 nt, Human
gacuccagcuaccuuccuuucugccguuuugu

SEQ ID NO: 155157 - RNA, 32 nt, Human
gacuccagcuugggugacacagugagacugug

SEQ ID NO: 155158 - RNA, 32 nt, Human
gacuccaggacuaacauaauauuaccuauuca

SEQ ID NO: 155159 - RNA, 32 nt, Human
gacuccaggagaauuaagagccucccucccuc

SEQ ID NO: 155160 - RNA, 32 nt, Human
gacuccaggaggcgcaggcugcagugagcucu

SEQ ID NO: 155161 - RNA, 32 nt, Human
gacuccaggcuaagaaccucagcccuggggac

SEQ ID NO: 155162 - RNA, 26 nt, Human
gacuccaggguccugaggccucccag

SEQ ID NO: 155163 - RNA, 32 nt, Human
gacuccaggugggagugagggagcccagcccc

SEQ ID NO: 155164 - RNA, 32 nt, Human
gacuccaguaccacugccuucacccugacaag

SEQ ID NO: 155165 - RNA, 32 nt, Human
gacuccaguaucacagucugucucucagccac

SEQ ID NO: 155166 - RNA, 32 nt, Human
gacuccagucauucaaggaggucuccacucuu

SEQ ID NO: 155167 - RNA, 32 nt, Human
gacuccagugugacccugugcuuagugagcaa

SEQ ID NO: 155168 - RNA, 32 nt, Human
gacuccauccaccucaucacuggacugcaugg

SEQ ID NO: 155169 - RNA, 17 nt, Human
gacuccauccucuugaa

SEQ ID NO: 155170 - RNA, 32 nt, Human
gacuccauccugaguaaucucccuuuauuuuu

SEQ ID NO: 155171 - RNA, 32 nt, Human
gacuccaugagcaaucugaaggccagcuugga

SEQ ID NO: 155172 - RNA, 32 nt, Human
gacuccaugggaccccaaagaagcagauggaa

SEQ ID NO: 155173 - RNA, 32 nt, Human
gacuccauuugcuauucucuucuuucuccccc

SEQ ID NO: 155174 - RNA, 32 nt, Human
gacucccaacccacagaaauggugagauaaac

SEQ ID NO: 155175 - RNA, 32 nt, Human
gacucccaacuuggccagagguguggugaauc

SEQ ID NO: 155176 - RNA, 32 nt, Human
gacucccaaguuuuaaacaccuaaaugugaau

SEQ ID NO: 155177 - RNA, 32 nt, Human
gacucccacugcacuccagcucggggaacaga

SEQ ID NO: 155178 - RNA, 32 nt, Human
gacucccacugcugccucuccugggcauggcu

SEQ ID NO: 155179 - RNA, 32 nt, Human
gacucccagaacuugugucacagggcugcagg

SEQ ID NO: 155180 - RNA, 27 nt, Human
gacucccagccuccacaucugguuccu

SEQ ID NO: 155181 - RNA, 32 nt, Human
gacucccaggagagaacggagagccagugugc

SEQ ID NO: 155182 - RNA, 32 nt, Human
gacucccagggaggaaaaacagcguggccuug

SEQ ID NO: 155183 - RNA, 22 nt, Human
gacucccagggcaccugcuugc

SEQ ID NO: 155184 - RNA, 32 nt, Human
gacucccaguaccugaaugcaggaugggagag

SEQ ID NO: 155185 - RNA, 32 nt, Human
gacucccagucugcagccauccugggccugcu

SEQ ID NO: 155186 - RNA, 32 nt, Human
gacucccagucuguaugcacaaggcgggaugu

SEQ ID NO: 155187 - RNA, 32 nt, Human
gacucccauccaaaguaggaacuaucucuuua

SEQ ID NO: 155188 - RNA, 32 nt, Human
gacucccaugcugccucauuuguauucaagcc

SEQ ID NO: 155189 - RNA, 32 nt, Human
gacuccccaagaaggccaugaggaagccagaa

SEQ ID NO: 155190 - RNA, 32 nt, Human
gacuccccacugcaucugggcugcagggccag

SEQ ID NO: 155191 - RNA, 32 nt, Human
gacuccccauacauguugcagcuuugaaaaca

SEQ ID NO: 155192 - RNA, 22 nt, Human
gacucccccuggucuaccgcgu

SEQ ID NO: 155193 - RNA, 32 nt, Human
gacuccccgcccccucucccaaugccgcuucc

SEQ ID NO: 155194 - RNA, 32 nt, Human
gacuccccuccaggguggccuuacuggaguca

SEQ ID NO: 155195 - RNA, 32 nt, Human
gacuccccuccccaacccccucaucuaaagac

SEQ ID NO: 155196 - RNA, 32 nt, Human
gacuccccuccccaucucccucucaaccucaa

SEQ ID NO: 155197 - RNA, 23 nt, Human
gacucccgcccgcucccgcucgc

SEQ ID NO: 155198 - RNA, 26 nt, Human
gacucccgggccgcccccgucucgcg

SEQ ID NO: 155199 - RNA, 32 nt, Human
gacucccuacaaucaacaaagcaaacagagag

SEQ ID NO: 155200 - RNA, 32 nt, Human
gacucccucagccaugagaaccagcuuugggg

SEQ ID NO: 155201 - RNA, 32 nt, Human
gacucccuccccucugcuucuacuccuccugc

SEQ ID NO: 155202 - RNA, 32 nt, Human
gacucccucuacucccucuggccauagccccu

SEQ ID NO: 155203 - RNA, 32 nt, Human
gacucccugaguaaugggaguucuuucauggc

SEQ ID NO: 155204 - RNA, 32 nt, Human
gacucccugccuggaccagccucuccacucau

SEQ ID NO: 155205 - RNA, 32 nt, Human
gacucccuggcagacagagcagugaguacaaa

SEQ ID NO: 155206 - RNA, 16 nt, Human
gacucccuuucacaca

SEQ ID NO: 155207 - RNA, 32 nt, Human
gacucccuuucugccaccccaggcugguccgg

SEQ ID NO: 155208 - RNA, 32 nt, Human
gacuccgcccuugaguggcuccgacgggagcu

SEQ ID NO: 155209 - RNA, 32 nt, Human
gacuccgccgcuccaggacucggcgcggaggg

SEQ ID NO: 155210 - RNA, 32 nt, Human
gacuccgcgcagaggucgacagagguugaggc

SEQ ID NO: 155211 - RNA, 32 nt, Human
gacuccggagcagcguacaccgcccucgccuu

SEQ ID NO: 155212 - RNA, 32 nt, Human
gacuccggagcagcguacaccgcccuugccuu

SEQ ID NO: 155213 - RNA, 32 nt, Human
gacuccggccccugucggcgccaagccccucc

SEQ ID NO: 155214 - RNA, 32 nt, Human
gacuccggcggcccuggcgggucgcggccggg

SEQ ID NO: 155215 - RNA, 32 nt, Human
gacuccgggaaucucuucucugauccuucuuc

SEQ ID NO: 155216 - RNA, 32 nt, Human
gacuccggucaccuccuucuugcucagggccu

SEQ ID NO: 155217 - RNA, 32 nt, Human
gacuccguaguggaugcagcgccggacgccac

SEQ ID NO: 155218 - RNA, 32 nt, Human
gacuccgugccuggaccuguuacuugauuagg

SEQ ID NO: 155219 - RNA, 32 nt, Human
gacuccguggcggcguuugucuucuuuuucuu

SEQ ID NO: 155220 - RNA, 18 nt, Human
gacuccgugggcgcucaa

SEQ ID NO: 155221 - RNA, 32 nt, Human
gacuccuaaagcagaggaaccagagggacagg

SEQ ID NO: 155222 - RNA, 24 nt, Human
gacuccuagaaaucucuggucacc

SEQ ID NO: 155223 - RNA, 21 nt, Human
gacuccuaggaggcagucccu

SEQ ID NO: 155224 - RNA, 32 nt, Human
gacuccuauaagacuggcauugugcuagggac

SEQ ID NO: 155225 - RNA, 32 nt, Human
gacuccucacuccuuucuggaucucucauugg

SEQ ID NO: 155226 - RNA, 32 nt, Human
gacuccucagacuuuucucucaguugggaugc

SEQ ID NO: 155227 - RNA, 32 nt, Human
gacuccucagccccaaaugucggagaggaaga

SEQ ID NO: 155228 - RNA, 32 nt, Human
gacuccucauacucugugcuuuacagaauggg

SEQ ID NO: 155229 - RNA, 32 nt, Human
gacuccuccagccucugacccccaauaagcau

SEQ ID NO: 155230 - RNA, 32 nt, Human
gacuccuccauguuuuguucccuucccccuga

SEQ ID NO: 155231 - RNA, 18 nt, Human
gacuccuccgcuccgcca

SEQ ID NO: 155232 - RNA, 24 nt, Human
gacuccucuaagccacucuuccaa

SEQ ID NO: 155233 - RNA, 32 nt, Human
gacuccucuccccucaaaggauucuuaccuug

SEQ ID NO: 155234 - RNA, 32 nt, Human
gacuccucuccccucguuuuuccuucaauaaa

SEQ ID NO: 155235 - RNA, 17 nt, Human
gacuccucugggccugg

SEQ ID NO: 155236 - RNA, 32 nt, Human
gacuccucuguccucuggaaucuggaucagau

SEQ ID NO: 155237 - RNA, 32 nt, Human
gacuccugaacgcugcucacucggcuuccagg

SEQ ID NO: 155238 - RNA, 32 nt, Human
gacuccugaacuccaaagacacugccuauucu

SEQ ID NO: 155239 - RNA, 32 nt, Human
gacuccugaagaucccaaaaucugaggauacu

SEQ ID NO: 155240 - RNA, 23 nt, Human
gacuccugaccccaggugaucca

SEQ ID NO: 155241 - RNA, 23 nt, Human
gacuccugaccucaggugaucca

SEQ ID NO: 155242 - RNA, 23 nt, Human
gacuccugaccucaguugaucca

SEQ ID NO: 155243 - RNA, 32 nt, Human
gacuccugaccuugugaucugccugucucagc

SEQ ID NO: 155244 - RNA, 21 nt, Human
gacuccugagccaggcugccg

SEQ ID NO: 155245 - RNA, 32 nt, Human
gacuccugagcccagccugggggccagagcac

SEQ ID NO: 155246 - RNA, 32 nt, Human
gacuccugccagauggggcagguaguuuauuc

SEQ ID NO: 155247 - RNA, 32 nt, Human
gacuccugcccuuuuauuuucuccagccccuu

SEQ ID NO: 155248 - RNA, 32 nt, Human
gacuccugcuauagacuggauaacugcuucau

SEQ ID NO: 155249 - RNA, 32 nt, Human
gacuccugcucauccaucaaggcacagcucaa

SEQ ID NO: 155250 - RNA, 32 nt, Human
gacuccuggccuggccaccugcaagaggcgga

SEQ ID NO: 155251 - RNA, 32 nt, Human
gacuccugugggcuccugagcuuacaaagcau

SEQ ID NO: 155252 - RNA, 32 nt, Human
gacuccugugucccucuaugagggcccagcgc

SEQ ID NO: 155253 - RNA, 32 nt, Human
gacuccuguuccacugcacccuggacuauggc

SEQ ID NO: 155254 - RNA, 32 nt, Human
gacuccuucacacaucacuguggcaccagcaa

SEQ ID NO: 155255 - RNA, 32 nt, Human
gacuccuuccauccuuccugaccugacucccu

SEQ ID NO: 155256 - RNA, 32 nt, Human
gacuccuucucccaaagaagaagaugaggaac

SEQ ID NO: 155257 - RNA, 32 nt, Human
gacuccuugagguuuccuugaagccccugaga

SEQ ID NO: 155258 - RNA, 32 nt, Human
gacuccuugcagcugcugucagcauggcccag

SEQ ID NO: 155259 - RNA, 32 nt, Human
gacucgagagggcugagccccuccucuccucg

SEQ ID NO: 155260 - RNA, 32 nt, Human
gacucgaggagccggaaagaagagaagccugc

SEQ ID NO: 155261 - RNA, 32 nt, Human
gacucgaguccucguucucagcagaacugguu

SEQ ID NO: 155262 - RNA, 32 nt, Human
gacucgagucucucagaccuuggauucauucc

SEQ ID NO: 155263 - RNA, 32 nt, Human
gacucgaucagcuguucauccauuucguguuu

SEQ ID NO: 155264 - RNA, 32 nt, Human
gacucgcaaccccucaccccacaauuucuuua

SEQ ID NO: 155265 - RNA, 32 nt, Human
gacucgcaccuguaaucccagcacuuugggau

SEQ ID NO: 155266 - RNA, 32 nt, Human
gacucgcaccuguaaucccagcauuuugggag

SEQ ID NO: 155267 - RNA, 19 nt, Human
gacucgcacgcccacacuc

SEQ ID NO: 155268 - RNA, 32 nt, Human
gacucgcagcaaccuccgccuccuggguucaa

SEQ ID NO: 155269 - RNA, 32 nt, Human
gacucgcagcagcugcuacccacagccuauuc

SEQ ID NO: 155270 - RNA, 32 nt, Human
gacucgcauuacccuuggucacugugauuucu

SEQ ID NO: 155271 - RNA, 32 nt, Human
gacucgcccaggacauggacuggucucucaga

SEQ ID NO: 155272 - RNA, 31 nt, Human
gacucgccccucucuggcuggccgagugucu

SEQ ID NO: 155273 - RNA, 32 nt, Human
gacucgccuccugguguuuggugggauggugg

SEQ ID NO: 155274 - RNA, 32 nt, Human
gacucgcuagcacucaagacccgguuauucgc

SEQ ID NO: 155275 - RNA, 32 nt, Human
gacucgcucacugccuucgaaguccggcgccc

SEQ ID NO: 155276 - RNA, 32 nt, Human
gacucgcugcagucuccaccuccaggauucaa

SEQ ID NO: 155277 - RNA, 32 nt, Human
gacucgcuucuuucgguucuaccugggagaau

SEQ ID NO: 155278 - RNA, 32 nt, Human
gacucggagcaggaggcgcacaagccuggggc

SEQ ID NO: 155279 - RNA, 32 nt, Human
gacucggagccagugauccuuuuauccugcua

SEQ ID NO: 155280 - RNA, 32 nt, Human
gacucggagggggaggagcagggcugagcugg

SEQ ID NO: 155281 - RNA, 32 nt, Human
gacucggcaguggaugggaugcagccagucau

SEQ ID NO: 155282 - RNA, 32 nt, Human
gacucggccucugccagcugccuucccugcca

SEQ ID NO: 155283 - RNA, 23 nt, Human
gacucggcgacgcgaggcugccg

SEQ ID NO: 155284 - RNA, 32 nt, Human
gacucggcuucaacuucuuuuuccacagaucc

SEQ ID NO: 155285 - RNA, 32 nt, Human
gacucgggaggcccccugaccuguucugagcc

SEQ ID NO: 155286 - RNA, 23 nt, Human
gacucgggccccuggggccucag

SEQ ID NO: 155287 - RNA, 32 nt, Human
gacucgggcgcugagggccacucacacagcug

SEQ ID NO: 155288 - RNA, 32 nt, Human
gacucgggcugacuccagccgcugggagcgcg

SEQ ID NO: 155289 - RNA, 32 nt, Human
gacucggggugagggaggcgggcagccucucg

SEQ ID NO: 155290 - RNA, 32 nt, Human
gacucgguaaggagguucuguggguagggcug

SEQ ID NO: 155291 - RNA, 32 nt, Human
gacucggucucagggauaugccuaccaauagc

SEQ ID NO: 155292 - RNA, 32 nt, Human
gacucgucugacuguguguggaggaguccagg

SEQ ID NO: 155293 - RNA, 32 nt, Human
gacucgugaguggucagggaguggaagagaag

SEQ ID NO: 155294 - RNA, 23 nt, Human
gacucgugaugccaaggccgcug

SEQ ID NO: 155295 - RNA, 32 nt, Human
gacucgugcccccauuagugugccucuuugga

SEQ ID NO: 155296 - RNA, 32 nt, Human
gacucguggcuugccuuggucucuugggaaua

SEQ ID NO: 155297 - RNA, 32 nt, Human
gacucguggggcucccugcugcagagagcaca

SEQ ID NO: 155298 - RNA, 32 nt, Human
gacucgugugcggguggaugggggugccugag

SEQ ID NO: 155299 - RNA, 32 nt, Human
gacucuaaacagaugagcacagagccaggccu

SEQ ID NO: 155300 - RNA, 32 nt, Human
gacucuaaccugggggccugaggugccagggu

SEQ ID NO: 155301 - RNA, 32 nt, Human
gacucuaagcuccugagcgggagucagacuua

SEQ ID NO: 155302 - RNA, 32 nt, Human
gacucuaccacuuaggagcuguguguacaugg

SEQ ID NO: 155303 - RNA, 21 nt, Human
gacucuagcucucaaaggcug

SEQ ID NO: 155304 - RNA, 32 nt, Human
gacucuaucacccaggcuggagugcagugugg

SEQ ID NO: 155305 - RNA, 32 nt, Human
gacucuauccaaggguucagcacacaaacguc

SEQ ID NO: 155306 - RNA, 32 nt, Human
gacucuauuuacagucuguaacuuuccacucu

SEQ ID NO: 155307 - RNA, 32 nt, Human
gacucucaaggcccuggcugaggauggcaggc

SEQ ID NO: 155308 - RNA, 32 nt, Human
gacucucacaugcacaaauacgugcaugaucg

SEQ ID NO: 155309 - RNA, 32 nt, Human
gacucucacaugcaguaugugcaggcaccuga

SEQ ID NO: 155310 - RNA, 32 nt, Human
gacucucaccagagaagaagaggugauaucau

SEQ ID NO: 155311 - RNA, 32 nt, Human
gacucucagaggacacaaggaaagaguguauu

SEQ ID NO: 155312 - RNA, 32 nt, Human
gacucucagccuucuuuucccuucccugaggg

SEQ ID NO: 155313 - RNA, 32 nt, Human
gacucucaucccugggcacagaauucaggaaa

SEQ ID NO: 155314 - RNA, 22 nt, Human
gacucuccagaagggagccaag

SEQ ID NO: 155315 - RNA, 32 nt, Human
gacucuccagagccaugacuagauccaaugga

SEQ ID NO: 155316 - RNA, 32 nt, Human
gacucuccagcccucuuccuccuuccucuggg

SEQ ID NO: 155317 - RNA, 32 nt, Human
gacucuccguuauuuuaggaggucccuggcca

SEQ ID NO: 155318 - RNA, 32 nt, Human
gacucuccucaguucugugucguguucggguu

SEQ ID NO: 155319 - RNA, 32 nt, Human
gacucuccucauuccuuuugagaacaaaagaa

SEQ ID NO: 155320 - RNA, 32 nt, Human
gacucuccucccuucucuccccaguucugguc

SEQ ID NO: 155321 - RNA, 32 nt, Human
gacucuccugcucuucuggacucuucucucag

SEQ ID NO: 155322 - RNA, 32 nt, Human
gacucucgaugguggucuccgcucuugcccga

SEQ ID NO: 155323 - RNA, 32 nt, Human
gacucucgggcagaggcagugguggggcagcc

SEQ ID NO: 155324 - RNA, 32 nt, Human
gacucucgucugccaccaucaccagcucuguc

SEQ ID NO: 155325 - RNA, 32 nt, Human
gacucucucccaaaccucuucuuauuuuuaau

SEQ ID NO: 155326 - RNA, 32 nt, Human
gacucucuccuccuccucaccucauugucucc

SEQ ID NO: 155327 - RNA, 32 nt, Human
gacucucuccugcccaggcuucugggugcuuu

SEQ ID NO: 155328 - RNA, 32 nt, Human
gacucucugcuauucaugaaucuugcuauugc

SEQ ID NO: 155329 - RNA, 32 nt, Human
gacucucugcuccagccucucacucucacucu

SEQ ID NO: 155330 - RNA, 32 nt, Human
gacucucuggccaccuccuccaccgcagucca

SEQ ID NO: 155331 - RNA, 19 nt, Human
gacucugaaaggcaguaug

SEQ ID NO: 155332 - RNA, 32 nt, Human
gacucugaaucauggcgaccacggccacgaug

SEQ ID NO: 155333 - RNA, 32 nt, Human
gacucugacacaugauuguagacaaugauggc

SEQ ID NO: 155334 - RNA, 32 nt, Human
gacucugacuguggaccccaacccucucauuu

SEQ ID NO: 155335 - RNA, 32 nt, Human
gacucugagaaaagcacagaugcuguuucggc

SEQ ID NO: 155336 - RNA, 32 nt, Human
gacucugagggugggggagagagaggcguggu

SEQ ID NO: 155337 - RNA, 32 nt, Human
gacucugaggugucaggagagcccucugcugc

SEQ ID NO: 155338 - RNA, 32 nt, Human
gacucugagucacgugcugcuguauugcaacg

SEQ ID NO: 155339 - RNA, 32 nt, Human
gacucugaucccuucugcccuggcagaauggc

SEQ ID NO: 155340 - RNA, 32 nt, Human
gacucugcaaguuuccagaaguaagagggaaa

SEQ ID NO: 155341 - RNA, 32 nt, Human
gacucugcaccuuuuucucaggaauucugccu

SEQ ID NO: 155342 - RNA, 32 nt, Human
gacucugcagaggcagcccacugcccaccacc

SEQ ID NO: 155343 - RNA, 32 nt, Human
gacucugcagccugcagaacuggggcaagggu

SEQ ID NO: 155344 - RNA, 32 nt, Human
gacucugccacuuaauagcucugugaucuugg

SEQ ID NO: 155345 - RNA, 32 nt, Human
gacucugcccccugcuggcucuucugcccaau

SEQ ID NO: 155346 - RNA, 32 nt, Human
gacucugcccuucgcuccuccuggucucuguc

SEQ ID NO: 155347 - RNA, 21 nt, Human
gacucugcugcugaaguugcc

SEQ ID NO: 155348 - RNA, 25 nt, Human
gacucugcuuaaacaaagcaguaua

SEQ ID NO: 155349 - RNA, 32 nt, Human
gacucuggagaagaucaaaugggagcuuagau

SEQ ID NO: 155350 - RNA, 32 nt, Human
gacucuggagagagagccauuggcuggaguug

SEQ ID NO: 155351 - RNA, 32 nt, Human
gacucuggagagcaccguaucacuggagggca

SEQ ID NO: 155352 - RNA, 32 nt, Human
gacucuggagccaaggcagaggggagcuugag

SEQ ID NO: 155353 - RNA, 32 nt, Human
gacucuggagccagaguagaggcuguggccca

SEQ ID NO: 155354 - RNA, 23 nt, Human
gacucuggcagggcucccagagg

SEQ ID NO: 155355 - RNA, 32 nt, Human
gacucuggcccuggcccuuacuugcuucucua

SEQ ID NO: 155356 - RNA, 30 nt, Human
gacucuggccucuccagacuaauguuccug

SEQ ID NO: 155357 - RNA, 32 nt, Human
gacucugggaggacagggguggggacccagag

SEQ ID NO: 155358 - RNA, 32 nt, Human
gacucugggccagcgcugggaacaugccccug

SEQ ID NO: 155359 - RNA, 32 nt, Human
gacucugguaucaccugcauauuauuuuccca

SEQ ID NO: 155360 - RNA, 32 nt, Human
gacucuggucccagucagccuguggcuugugg

SEQ ID NO: 155361 - RNA, 32 nt, Human
gacucuguauuccaggcuggaugauagagcaa

SEQ ID NO: 155362 - RNA, 32 nt, Human
gacucugucacccaggcuggagugcagcaguu

SEQ ID NO: 155363 - RNA, 32 nt, Human
gacucugucacccaggcuggagugcgguggug

SEQ ID NO: 155364 - RNA, 31 nt, Human
gacucugucaucucugggcgugcagccgucg

SEQ ID NO: 155365 - RNA, 32 nt, Human
gacucuguccccacacucagaaagacucagcu

SEQ ID NO: 155366 - RNA, 32 nt, Human
gacucuguccugaaggccugagguuacuggaa

SEQ ID NO: 155367 - RNA, 32 nt, Human
gacucuguccugcuggucccaccacacauggc

SEQ ID NO: 155368 - RNA, 32 nt, Human
gacucugucgcuaaaaauaaaaaccacaaaac

SEQ ID NO: 155369 - RNA, 32 nt, Human
gacucugucguccaggcuggagugcaguggcg

SEQ ID NO: 155370 - RNA, 32 nt, Human
gacucugugcagcugcgcaccuguguccccca

SEQ ID NO: 155371 - RNA, 32 nt, Human
gacucuguugcccaagcuggaguacaguagug

SEQ ID NO: 155372 - RNA, 32 nt, Human
gacucuguuggccauuggaaauugcagaauaa

SEQ ID NO: 155373 - RNA, 32 nt, Human
gacucuguuggcuguuggaaauugcagaguaa

SEQ ID NO: 155374 - RNA, 32 nt, Human
gacucuguuguggacccacagaaucagaccau

SEQ ID NO: 155375 - RNA, 21 nt, Human
gacucuuaaucaguaaauguu

SEQ ID NO: 155376 - RNA, 32 nt, Human
gacucuucagggacuuguguacugguuauggg

SEQ ID NO: 155377 - RNA, 32 nt, Human
gacucuucagucuggaggguccuggccuccug

SEQ ID NO: 155378 - RNA, 32 nt, Human
gacucuuccacuucccuucaggaccugugaac

SEQ ID NO: 155379 - RNA, 32 nt, Human
gacucuuccccauccagucaccugacagguca

SEQ ID NO: 155380 - RNA, 32 nt, Human
gacucuuccccuccucucccucugccucggcc

SEQ ID NO: 155381 - RNA, 32 nt, Human
gacucuucccuaaucccuagguucccccaacu

SEQ ID NO: 155382 - RNA, 32 nt, Human
gacucuuccucuuccuccugcucccugggacc

SEQ ID NO: 155383 - RNA, 32 nt, Human
gacucuuccugagccuggcaccaggagcccua

SEQ ID NO: 155384 - RNA, 21 nt, Human
gacucuuccugcgaggucuca

SEQ ID NO: 155385 - RNA, 32 nt, Human
gacucuuccugcuggccagccuaggaguggga

SEQ ID NO: 155386 - RNA, 32 nt, Human
gacucuuccuuuauccccuccuuuaccccaca

SEQ ID NO: 155387 - RNA, 32 nt, Human
gacucuucuaggaaauuccucugucucauuug

SEQ ID NO: 155388 - RNA, 32 nt, Human
gacucuugaacaucugagcaguuuugugcuuu

SEQ ID NO: 155389 - RNA, 32 nt, Human
gacucuugaagaggacgcaggcuuccagagga

SEQ ID NO: 155390 - RNA, 19 nt, Human
gacucuugccaucaucaca

SEQ ID NO: 155391 - RNA, 32 nt, Human
gacucuuggaccucucuguucuucaagcaucg

SEQ ID NO: 155392 - RNA, 32 nt, Human
gacucuuggggcgcaguggggaaagugccgga

SEQ ID NO: 155393 - RNA, 32 nt, Human
gacucuuuaacgggugggcacuggaccaucuc

SEQ ID NO: 155394 - RNA, 32 nt, Human
gacucuuucaaggacaucagcagaaugguugg

SEQ ID NO: 155395 - RNA, 32 nt, Human
gacucuuugacgggaggccucaguucuagucc

SEQ ID NO: 155396 - RNA, 32 nt, Human
gacucuuuuguugccagugauggaacugaaua

SEQ ID NO: 155397 - RNA, 32 nt, Human
gacugaaaaccgccuggaaaccugcugcaacu

SEQ ID NO: 155398 - RNA, 32 nt, Human
gacugaaacgccuugcacggcugcucggcuug

SEQ ID NO: 155399 - RNA, 32 nt, Human
gacugaaagaguagaaagaaguugcuguugua

SEQ ID NO: 155400 - RNA, 32 nt, Human
gacugaaaucaugcaugaucugaaaggugugg

SEQ ID NO: 155401 - RNA, 32 nt, Human
gacugaaauggagagaaaagaugaucugaagg

SEQ ID NO: 155402 - RNA, 32 nt, Human
gacugaaauuccaacucacugugagaauacug

SEQ ID NO: 155403 - RNA, 32 nt, Human
gacugaacacagacagcagccgccucgccaug

SEQ ID NO: 155404 - RNA, 32 nt, Human
gacugaacaccccguuugcuucccucuccucu

SEQ ID NO: 155405 - RNA, 32 nt, Human
gacugaacagggagccaacuguuucuuugaac

SEQ ID NO: 155406 - RNA, 32 nt, Human
gacugaaccgacuuuucuaaagcucugaacaa

SEQ ID NO: 155407 - RNA, 32 nt, Human
gacugaacuuagcccagggcagcuccacaucc

SEQ ID NO: 155408 - RNA, 32 nt, Human
gacugaagagagagcaaguugucuguucugau

SEQ ID NO: 155409 - RNA, 32 nt, Human
gacugaagauggagagagagccuggaccucaa

SEQ ID NO: 155410 - RNA, 32 nt, Human
gacugaagcaagagacagggaaggaauugucc

SEQ ID NO: 155411 - RNA, 32 nt, Human
gacugaagcaccugcuccgccaugaaccugcc

SEQ ID NO: 155412 - RNA, 32 nt, Human
gacugaagcaccugcuccgccaugaacuugcc

SEQ ID NO: 155413 - RNA, 32 nt, Human
gacugaagcaccugcuccuccaugaaccugcc

SEQ ID NO: 155414 - RNA, 22 nt, Human
gacugaagcuaaaaauacucac

SEQ ID NO: 155415 - RNA, 32 nt, Human
gacugaagcuaaauuuguacuuuucauaauau

SEQ ID NO: 155416 - RNA, 32 nt, Human
gacugaaggaaaagcugggaucacagguuccu

SEQ ID NO: 155417 - RNA, 31 nt, Human
gacugaaggacaaucugguuccaacaccaca

SEQ ID NO: 155418 - RNA, 32 nt, Human
gacugaagguguccuuuuuaacaacaauuuaa

SEQ ID NO: 155419 - RNA, 32 nt, Human
gacugaagucacaaccccugacugcuccucaa

SEQ ID NO: 155420 - RNA, 32 nt, Human
gacugaaguucugcaaaguccuccgaggaccg

SEQ ID NO: 155421 - RNA, 32 nt, Human
gacugaaguucugcaaaguccuuugaggacca

SEQ ID NO: 155422 - RNA, 32 nt, Human
gacugaauagccagggggugccaggaggggcc

SEQ ID NO: 155423 - RNA, 32 nt, Human
gacugaauagggaggaaggucagggcuagaaa

SEQ ID NO: 155424 - RNA, 32 nt, Human
gacugaaucagccagcccauggcccccaauaa

SEQ ID NO: 155425 - RNA, 32 nt, Human
gacugaaucagguacacgcaccugccggggac

SEQ ID NO: 155426 - RNA, 32 nt, Human
gacugaauccuccucacggggaccuuaccacc

SEQ ID NO: 155427 - RNA, 32 nt, Human
gacugaaucgccacuacagccugggugcaaaa

SEQ ID NO: 155428 - RNA, 32 nt, Human
gacugaaucugguucuccucuuguacaccccu

SEQ ID NO: 155429 - RNA, 32 nt, Human
gacugaauguuuguggucccaccaacaacccc

SEQ ID NO: 155430 - RNA, 32 nt, Human
gacugacaaaagacuugagacaggaugguuau

SEQ ID NO: 155431 - RNA, 32 nt, Human
gacugacaagcagaguuaguggaaggugacuc

SEQ ID NO: 155432 - RNA, 32 nt, Human
gacugacaagugugcaaaauguuuacaaucuu

SEQ ID NO: 155433 - RNA, 32 nt, Human
gacugacaauugugucuccacagcagaggugg

SEQ ID NO: 155434 - RNA, 32 nt, Human
gacugacacacagccagcuggcucacuuacug

SEQ ID NO: 155435 - RNA, 32 nt, Human
gacugacacauguagacuaaauagaaaccccu

SEQ ID NO: 155436 - RNA, 32 nt, Human
gacugacacugauuuuucauuugaaaucagcc

SEQ ID NO: 155437 - RNA, 32 nt, Human
gacugacaguacuccacaagcuugccugccau

SEQ ID NO: 155438 - RNA, 32 nt, Human
gacugaccagaggcaggaucccaccccacuug

SEQ ID NO: 155439 - RNA, 32 nt, Human
gacugacccacugcauuccagccuggcgacag

SEQ ID NO: 155440 - RNA, 18 nt, Human
gacugacccuccugaacu

SEQ ID NO: 155441 - RNA, 32 nt, Human
gacugacccuuucagcagggacuuuuauuggg

SEQ ID NO: 155442 - RNA, 32 nt, Human
gacugaccggguccuugcagucagccucauca

SEQ ID NO: 155443 - RNA, 32 nt, Human
gacugaccucacagacugaccauuccauccca

SEQ ID NO: 155444 - RNA, 32 nt, Human
gacugaccuugaauucagccuggguguucagg

SEQ ID NO: 155445 - RNA, 32 nt, Human
gacugacucugcauuuuuaauucuugaaacuu

SEQ ID NO: 155446 - RNA, 32 nt, Human
gacugacucugggcgucucugaagauggcucg

SEQ ID NO: 155447 - RNA, 32 nt, Human
gacugacuggacucuggccuccaggugucugc

SEQ ID NO: 155448 - RNA, 32 nt, Human
gacugacuguaaccucaaacuccuggacucaa

SEQ ID NO: 155449 - RNA, 32 nt, Human
gacugacuuuucagaagaaauagacaacgauc

SEQ ID NO: 155450 - RNA, 32 nt, Human
gacugagaaaguauguuuaaugguuaagguuu

SEQ ID NO: 155451 - RNA, 32 nt, Human
gacugagaaauccagucauaguccugauugug

SEQ ID NO: 155452 - RNA, 32 nt, Human
gacugagaaggggagcgcgcugcgcgucgcag

SEQ ID NO: 155453 - RNA, 32 nt, Human
gacugagaagugcagaaguuggaacaguggua

SEQ ID NO: 155454 - RNA, 32 nt, Human
gacugagacuguguuugggaaggaggcugagu

SEQ ID NO: 155455 - RNA, 32 nt, Human
gacugagagcagggagcagcaggcauggggca

SEQ ID NO: 155456 - RNA, 32 nt, Human
gacugagaggacagggcuggaggcagccaagu

SEQ ID NO: 155457 - RNA, 32 nt, Human
gacugagaggcacagguggcugaggggacccg

SEQ ID NO: 155458 - RNA, 32 nt, Human
gacugagccacugcacuccagccugggcaaua

SEQ ID NO: 155459 - RNA, 32 nt, Human
gacugagccagccucaggccagggcgggaaag

SEQ ID NO: 155460 - RNA, 32 nt, Human
gacugagccagggcucagcaaugcuggcauga

SEQ ID NO: 155461 - RNA, 32 nt, Human
gacugagccauuggaaacccagcucacgaacc

SEQ ID NO: 155462 - RNA, 32 nt, Human
gacugagcccaggagagcggggacagucaugu

SEQ ID NO: 155463 - RNA, 32 nt, Human
gacugagcccaggaguucgaggcuguggugca

SEQ ID NO: 155464 - RNA, 32 nt, Human
gacugagccuugaacuccuaccaccucaaucc

SEQ ID NO: 155465 - RNA, 24 nt, Human
gacugagcgccagagaggacguuu

SEQ ID NO: 155466 - RNA, 32 nt, Human
gacugagcuacuacuggcuuccuugccccuca

SEQ ID NO: 155467 - RNA, 32 nt, Human
gacugagcuacugcuggcuuccuugcuucuca

SEQ ID NO: 155468 - RNA, 32 nt, Human
gacugagcucuauucuguaccugccacucuau

SEQ ID NO: 155469 - RNA, 32 nt, Human
gacugagcuguggagagugugguucccucccc

SEQ ID NO: 155470 - RNA, 32 nt, Human
gacugaggaagcggagguggcgaaaggagaga

SEQ ID NO: 155471 - RNA, 32 nt, Human
gacugaggaauguugaagauugcagugaugga

SEQ ID NO: 155472 - RNA, 18 nt, Human
gacugaggacacaggcac

SEQ ID NO: 155473 - RNA, 32 nt, Human
gacugaggcaugcaagccucugccuuuccuuc

SEQ ID NO: 155474 - RNA, 32 nt, Human
gacugaggccuggguuccgaguggggcggcua

SEQ ID NO: 155475 - RNA, 32 nt, Human
gacugaggcgggcggaucaugaggucaggaga

SEQ ID NO: 155476 - RNA, 32 nt, Human
gacugaggcugcucagcagccacuggguggau

SEQ ID NO: 155477 - RNA, 32 nt, Human
gacugaggcuuaggggaugugaccucuagacu

SEQ ID NO: 155478 - RNA, 32 nt, Human
gacugagggacgggacagagaagucgcgaaag

SEQ ID NO: 155479 - RNA, 24 nt, Human
gacugagggacucugaagccucug

SEQ ID NO: 155480 - RNA, 32 nt, Human
gacugagggcuucacugcuuccacuggacaga

SEQ ID NO: 155481 - RNA, 32 nt, Human
gacugaggucagaaaggugcagagaugaaaag

SEQ ID NO: 155482 - RNA, 32 nt, Human
gacugaggucauuucuacuggaaaagauugug

SEQ ID NO: 155483 - RNA, 32 nt, Human
gacugaguacguugaagaagaaagaagagaaa

SEQ ID NO: 155484 - RNA, 32 nt, Human
gacugagugcugagguugggaaggcaccugcu

SEQ ID NO: 155485 - RNA, 32 nt, Human
gacugauaacuccggaagaaugacucuccugu

SEQ ID NO: 155486 - RNA, 32 nt, Human
gacugauacaggcccuggacccuucccucaag

SEQ ID NO: 155487 - RNA, 32 nt, Human
gacugauagaucuguagaaugugaacucacau

SEQ ID NO: 155488 - RNA, 32 nt, Human
gacugauagccuucagcuacaaaaagauagga

SEQ ID NO: 155489 - RNA, 32 nt, Human
gacugauccaaagaagaauggaggccagagug

SEQ ID NO: 155490 - RNA, 19 nt, Human
gacugauccccaccuccuc

SEQ ID NO: 155491 - RNA, 32 nt, Human
gacugaucccugcuugugcaggccaguggagg

SEQ ID NO: 155492 - RNA, 16 nt, Human
gacugauccgagcaca

SEQ ID NO: 155493 - RNA, 32 nt, Human
gacugaucuccuccacuuccuucagcgccagc

SEQ ID NO: 155494 - RNA, 32 nt, Human
gacugaucucuagcuaggcagcuuucaggcau

SEQ ID NO: 155495 - RNA, 32 nt, Human
gacugaucugccgccaugauuggaggcuuauu

SEQ ID NO: 155496 - RNA, 32 nt, Human
gacugaucuugagcuucugagcuccagcgauc

SEQ ID NO: 155497 - RNA, 32 nt, Human
gacugaugaaugggggugccuggugaggcccc

SEQ ID NO: 155498 - RNA, 32 nt, Human
gacugaugccuguaaucccaacacuuuguugg

SEQ ID NO: 155499 - RNA, 32 nt, Human
gacugaugccuucgaugggcaggaugaaggcc

SEQ ID NO: 155500 - RNA, 32 nt, Human
gacugaugcuaucgcgcacggucccacgaccc

SEQ ID NO: 155501 - RNA, 32 nt, Human
gacugauuuccucuuaagacuccuagggaugu

SEQ ID NO: 155502 - RNA, 32 nt, Human
gacugcaaacagacagucccaaagugccauga

SEQ ID NO: 155503 - RNA, 32 nt, Human
gacugcaaauggcuucucagguucccacacug

SEQ ID NO: 155504 - RNA, 32 nt, Human
gacugcaagucuuugagaugcuucuggcuccc

SEQ ID NO: 155505 - RNA, 24 nt, Human
gacugcacaguuuugaaagcacag

SEQ ID NO: 155506 - RNA, 32 nt, Human
gacugcaccacugcacagucugggcgacagag

SEQ ID NO: 155507 - RNA, 32 nt, Human
gacugcaccacugcacuccacccugggcagag

SEQ ID NO: 155508 - RNA, 32 nt, Human
gacugcaccacugcacuccagccugggcaaca

SEQ ID NO: 155509 - RNA, 32 nt, Human
gacugcaccacugcacuucagccugggugaca

SEQ ID NO: 155510 - RNA, 32 nt, Human
gacugcaccauugcauuccagccugggcaaca

SEQ ID NO: 155511 - RNA, 32 nt, Human
gacugcacuggccuggcagucuggcugcugca

SEQ ID NO: 155512 - RNA, 21 nt, Human
gacugcagagacugugcucuu

SEQ ID NO: 155513 - RNA, 32 nt, Human
gacugcagagccggggcugggcuaggcgcgcg

SEQ ID NO: 155514 - RNA, 32 nt, Human
gacugcagagccugugugugaguccccgugug

SEQ ID NO: 155515 - RNA, 32 nt, Human
gacugcagagggcuagagaauuauuucauaca

SEQ ID NO: 155516 - RNA, 32 nt, Human
gacugcagcagaccugggguugugcacaacag

SEQ ID NO: 155517 - RNA, 21 nt, Human
gacugcagcagcgugaucuca

SEQ ID NO: 155518 - RNA, 32 nt, Human
gacugcagccaugagcagcaaugagugcuuca

SEQ ID NO: 155519 - RNA, 32 nt, Human
gacugcagcccccauggugaugcuguggcauc

SEQ ID NO: 155520 - RNA, 32 nt, Human
gacugcagcugcaccaucacacaugcaucauc

SEQ ID NO: 155521 - RNA, 32 nt, Human
gacugcagggugcacaacucccugccaaggaa

SEQ ID NO: 155522 - RNA, 32 nt, Human
gacugcaggugggcugggcccacccagggagc

SEQ ID NO: 155523 - RNA, 32 nt, Human
gacugcaucacugcacuccagccugggcaaca

SEQ ID NO: 155524 - RNA, 32 nt, Human
gacugcauggugcaugagugaucucagccuag

SEQ ID NO: 155525 - RNA, 32 nt, Human
gacugccaagaaggaagaauuugaacaucagc

SEQ ID NO: 155526 - RNA, 32 nt, Human
gacugccacaguuuuagaauaagcacugucac

SEQ ID NO: 155527 - RNA, 27 nt, Human
gacugccacguuacuggaacacuguga

SEQ ID NO: 155528 - RNA, 32 nt, Human
gacugccacugcauauggcaguccugguccuu

SEQ ID NO: 155529 - RNA, 32 nt, Human
gacugccagaggaagugcagccagcagcccug

SEQ ID NO: 155530 - RNA, 32 nt, Human
gacugccagcacagggcaucucgggcuuggcu

SEQ ID NO: 155531 - RNA, 32 nt, Human
gacugccagcacuuugcuaucuacagccgggg

SEQ ID NO: 155532 - RNA, 32 nt, Human
gacugccagccaccacccccucccagacucuc

SEQ ID NO: 155533 - RNA, 32 nt, Human
gacugccaggcugggugcaguggcucacaccu

SEQ ID NO: 155534 - RNA, 32 nt, Human
gacugccagugaagauggaccugcucuuauac

SEQ ID NO: 155535 - RNA, 32 nt, Human
gacugccaucauugaugaucacugugaaaauu

SEQ ID NO: 155536 - RNA, 32 nt, Human
gacugcccagagguagaguuaguguuuaggug

SEQ ID NO: 155537 - RNA, 25 nt, Human
gacugcccagggaggaggccuugga

SEQ ID NO: 155538 - RNA, 32 nt, Human
gacugcccauuuccucagcugcagaggaggaa

SEQ ID NO: 155539 - RNA, 32 nt, Human
gacugcccauuuccuguccuccucccggcuuc

SEQ ID NO: 155540 - RNA, 32 nt, Human
gacugccccacugucaucugccucucaauuug

SEQ ID NO: 155541 - RNA, 32 nt, Human
gacugcccccuccuggagcagcuccugggcug

SEQ ID NO: 155542 - RNA, 32 nt, Human
gacugccccgccauuucauccuaggcauucug

SEQ ID NO: 155543 - RNA, 32 nt, Human
gacugccccucagucccaggagagcuaugagg

SEQ ID NO: 155544 - RNA, 24 nt, Human
gacugcccgccaacugacagugag

SEQ ID NO: 155545 - RNA, 22 nt, Human
gacugcccggcccagccuugga

SEQ ID NO: 155546 - RNA, 32 nt, Human
gacugcccuccccgaccucuagcugaccaugg

SEQ ID NO: 155547 - RNA, 23 nt, Human
gacugcccugagaugcuacagag

SEQ ID NO: 155548 - RNA, 32 nt, Human
gacugcccuggccuaagaugggccaguuucua

SEQ ID NO: 155549 - RNA, 17 nt, Human
gacugccuaucaucaua

SEQ ID NO: 155550 - RNA, 32 nt, Human
gacugccucaccuugcacugucuggaaaacuu

SEQ ID NO: 155551 - RNA, 32 nt, Human
gacugccuccuugcccaugccucucucacucu

SEQ ID NO: 155552 - RNA, 23 nt, Human
gacugccugccauagccugagag

SEQ ID NO: 155553 - RNA, 19 nt, Human
gacugccugcccacccuga

SEQ ID NO: 155554 - RNA, 32 nt, Human
gacugccugcugcuaagugugaugaagaaacc

SEQ ID NO: 155555 - RNA, 32 nt, Human
gacugccugcuggcuuuccuguugacuggccc

SEQ ID NO: 155556 - RNA, 32 nt, Human
gacugccuggaguugggaaccagaagguguuu

SEQ ID NO: 155557 - RNA, 20 nt, Human
gacugccugggagauggcug

SEQ ID NO: 155558 - RNA, 32 nt, Human
gacugccugucagcuagucucuccaccuuggc

SEQ ID NO: 155559 - RNA, 20 nt, Human
gacugccuguucaucuacga

SEQ ID NO: 155560 - RNA, 32 nt, Human
gacugccuucugcccugggucccaccaaauag

SEQ ID NO: 155561 - RNA, 21 nt, Human
gacugcgacucgcuggcuuuc

SEQ ID NO: 155562 - RNA, 32 nt, Human
gacugcgagcugaucauuaucucucuuuuuca

SEQ ID NO: 155563 - RNA, 32 nt, Human
gacugcgagucgucugggggagggggacuugu

SEQ ID NO: 155564 - RNA, 32 nt, Human
gacugcgccaccgcgcuccagccugggugaca

SEQ ID NO: 155565 - RNA, 32 nt, Human
gacugcgccacggcacuccagccugggcgaca

SEQ ID NO: 155566 - RNA, 32 nt, Human
gacugcgccacugcacuccagccugggcaaca

SEQ ID NO: 155567 - RNA, 32 nt, Human
gacugcgccacugcacuccagucugggacaac

SEQ ID NO: 155568 - RNA, 32 nt, Human
gacugcgccauugcacuccagcccgggcaaca

SEQ ID NO: 155569 - RNA, 26 nt, Human
gacugcgcugcgcagggcgcuaggag

SEQ ID NO: 155570 - RNA, 32 nt, Human
gacugcgcuucuaacaagucucccaguugcug

SEQ ID NO: 155571 - RNA, 32 nt, Human
gacugcggcaccugagaauccaugccccaucg

SEQ ID NO: 155572 - RNA, 32 nt, Human
gacugcggcucccugaggacggggcugugucu

SEQ ID NO: 155573 - RNA, 32 nt, Human
gacugcggcugcccuccuccaggcccccggac

SEQ ID NO: 155574 - RNA, 32 nt, Human
gacugcgggaggcaggggaugcaugggugucc

SEQ ID NO: 155575 - RNA, 32 nt, Human
gacugcgggcgccccaccaccacgcccggcua

SEQ ID NO: 155576 - RNA, 32 nt, Human
gacugcggggcaggccgggggcagcugucugu

SEQ ID NO: 155577 - RNA, 32 nt, Human
gacugcgggugcacuuuccccuaggagccugu

SEQ ID NO: 155578 - RNA, 32 nt, Human
gacugcgugcauuuucucuccuuucccuuccc

SEQ ID NO: 155579 - RNA, 32 nt, Human
gacugcguucagacccugcaggcugggcuggc

SEQ ID NO: 155580 - RNA, 32 nt, Human
gacugcguuggaaagacugaagaggcuggagu

SEQ ID NO: 155581 - RNA, 32 nt, Human
gacugcuacccgguugccaucuguugaacaga

SEQ ID NO: 155582 - RNA, 32 nt, Human
gacugcuaggcgaggagagggaagggggcgga

SEQ ID NO: 155583 - RNA, 32 nt, Human
gacugcuagggagcuugaagggccgguguuca

SEQ ID NO: 155584 - RNA, 32 nt, Human
gacugcuagguagaaauuaaaacuuagcuuuc

SEQ ID NO: 155585 - RNA, 32 nt, Human
gacugcucacugcagccuccaccuccugggcu

SEQ ID NO: 155586 - RNA, 22 nt, Human
gacugcucaggccaguugugag

SEQ ID NO: 155587 - RNA, 32 nt, Human
gacugcuccagccucagccccaacucccagca

SEQ ID NO: 155588 - RNA, 32 nt, Human
gacugcuccauggccauggagauagacagcag

SEQ ID NO: 155589 - RNA, 32 nt, Human
gacugcuccucggggccuggcgcagggcugua

SEQ ID NO: 155590 - RNA, 32 nt, Human
gacugcuccuucagaugcucucaccagggacc

SEQ ID NO: 155591 - RNA, 23 nt, Human
gacugcucgccagucucugugag

SEQ ID NO: 155592 - RNA, 32 nt, Human
gacugcucggccgccuccugcccggcgagcag

SEQ ID NO: 155593 - RNA, 32 nt, Human
gacugcucuccucaccacacagcacuagucca

SEQ ID NO: 155594 - RNA, 32 nt, Human
gacugcucugaccuuuuacggcgacaaacaag

SEQ ID NO: 155595 - RNA, 32 nt, Human
gacugcugaaccugacaggcguguggggaguu

SEQ ID NO: 155596 - RNA, 32 nt, Human
gacugcugaccugccaagagagagcuggggac

SEQ ID NO: 155597 - RNA, 32 nt, Human
gacugcugagauuacaggcgugagccaccgca

SEQ ID NO: 155598 - RNA, 32 nt, Human
gacugcugaggaauuacauuugcucaagaauu

SEQ ID NO: 155599 - RNA, 32 nt, Human
gacugcugccagcuaccagccuggcuggcccu

SEQ ID NO: 155600 - RNA, 32 nt, Human
gacugcugcccaggugggguuuccugcaugga

SEQ ID NO: 155601 - RNA, 32 nt, Human
gacugcugcgguuccuggguggcggcggcaug

SEQ ID NO: 155602 - RNA, 32 nt, Human
gacugcugcuuccagggugugcggcccuggcc

SEQ ID NO: 155603 - RNA, 32 nt, Human
gacugcugcuuugcaugaaaacucauuugaug

SEQ ID NO: 155604 - RNA, 32 nt, Human
gacugcugcuuuggaccuguugguaaugaugg

SEQ ID NO: 155605 - RNA, 32 nt, Human
gacugcuggaacccagccagugggagggccug

SEQ ID NO: 155606 - RNA, 32 nt, Human
gacugcuggccuggccuggcccacccugcucc

SEQ ID NO: 155607 - RNA, 32 nt, Human
gacugcugggagaggagggguaggaaggcccg

SEQ ID NO: 155608 - RNA, 32 nt, Human
gacugcugggcuggugcagagggagucaagga

SEQ ID NO: 155609 - RNA, 32 nt, Human
gacugcuggugcaguccagccuaguacugaca

SEQ ID NO: 155610 - RNA, 32 nt, Human
gacugcugucuauuaguguaugaagaaaccaa

SEQ ID NO: 155611 - RNA, 32 nt, Human
gacugcugugggcugcucacuggcuuuagcug

SEQ ID NO: 155612 - RNA, 32 nt, Human
gacugcuuaccaguugggugacuuugagugag

SEQ ID NO: 155613 - RNA, 32 nt, Human
gacugcuuauccgacgcuccucccucugucuc

SEQ ID NO: 155614 - RNA, 32 nt, Human
gacugcuucuggaccagaacagcuccagcucc

SEQ ID NO: 155615 - RNA, 32 nt, Human
gacugcuucuucucagcuucucugguugaaag

SEQ ID NO: 155616 - RNA, 32 nt, Human
gacugcuugaaauagucucucucccauggaga

SEQ ID NO: 155617 - RNA, 32 nt, Human
gacugcuuguugccaaacuggaaauguucugu

SEQ ID NO: 155618 - RNA, 32 nt, Human
gacugcuuucuccaacuguucacagcaaaugc

SEQ ID NO: 155619 - RNA, 24 nt, Human
gacugcuuuuccacugcacuugga

SEQ ID NO: 155620 - RNA, 32 nt, Human
gacugcuuuuguucaaacugcguucaaauaag

SEQ ID NO: 155621 - RNA, 32 nt, Human
gacuggaaaugaacaaggugaauaagagcacg

SEQ ID NO: 155622 - RNA, 32 nt, Human
gacuggaacauucuguggauguugucaaaguu

SEQ ID NO: 155623 - RNA, 32 nt, Human
gacuggaacuagacauaaugaaacaucagagc

SEQ ID NO: 155624 - RNA, 32 nt, Human
gacuggaacucuccucuucuuacucucagucc

SEQ ID NO: 155625 - RNA, 32 nt, Human
gacuggaagcuccuuuuucuccaccucucuca

SEQ ID NO: 155626 - RNA, 32 nt, Human
gacuggaagggagggagagggagggggaggga

SEQ ID NO: 155627 - RNA, 32 nt, Human
gacuggaauccacucuaaccaaucgcacuuaa

SEQ ID NO: 155628 - RNA, 32 nt, Human
gacuggaauggaccccagggacuguccaggug

SEQ ID NO: 155629 - RNA, 32 nt, Human
gacuggacaggugggaagaugggaaugaggac

SEQ ID NO: 155630 - RNA, 32 nt, Human
gacuggacauggucacucaguaccgccugcag

SEQ ID NO: 155631 - RNA, 32 nt, Human
gacuggacugggugagaggacagagguggcuc

SEQ ID NO: 155632 - RNA, 32 nt, Human
gacuggagaccaacguguaucucucagauggu

SEQ ID NO: 155633 - RNA, 32 nt, Human
gacuggagacugggucuugcucuguuacccag

SEQ ID NO: 155634 - RNA, 32 nt, Human
gacuggagagaagugagaagacucccagaauc

SEQ ID NO: 155635 - RNA, 32 nt, Human
gacuggagagccaccaggccacugagcacagc

SEQ ID NO: 155636 - RNA, 32 nt, Human
gacuggagagcucaagugcagcaaagagaagu

SEQ ID NO: 155637 - RNA, 32 nt, Human
gacuggagagcugggaauauggcauuuggaca

SEQ ID NO: 155638 - RNA, 32 nt, Human
gacuggagagguggauuguagcuacaugagga

SEQ ID NO: 155639 - RNA, 25 nt, Human
gacuggagaugguuuuccucagaug

SEQ ID NO: 155640 - RNA, 32 nt, Human
gacuggagauuuggagauuuguggaaaaguga

SEQ ID NO: 155641 - RNA, 32 nt, Human
gacuggagcaagucuggaagcugccugugcua

SEQ ID NO: 155642 - RNA, 32 nt, Human
gacuggagcaucuucugcacaaccuugggagc

SEQ ID NO: 155643 - RNA, 32 nt, Human
gacuggagccaagauacuggugggggagauug

SEQ ID NO: 155644 - RNA, 32 nt, Human
gacuggagccaagugcgcugagcucucacaug

SEQ ID NO: 155645 - RNA, 32 nt, Human
gacuggagcucccugagggcagggcugucucc

SEQ ID NO: 155646 - RNA, 32 nt, Human
gacuggaggccggacagacaagcgccagcgug

SEQ ID NO: 155647 - RNA, 21 nt, Human
gacuggaggcggagguugcag

SEQ ID NO: 155648 - RNA, 32 nt, Human
gacuggaggcggagguugcagugagccgagau

SEQ ID NO: 155649 - RNA, 32 nt, Human
gacuggaggcuggaagcggguggugugugucc

SEQ ID NO: 155650 - RNA, 32 nt, Human
gacuggaggcuucucagccucaauuucccugu

SEQ ID NO: 155651 - RNA, 32 nt, Human
gacuggagucacugcacacacuuuguagcuca

SEQ ID NO: 155652 - RNA, 24 nt, Human
gacuggagucauccagaggcccca

SEQ ID NO: 155653 - RNA, 17 nt, Human
gacuggauccucaucac

SEQ ID NO: 155654 - RNA, 32 nt, Human
gacuggaucugcaggugggaugagggagacag

SEQ ID NO: 155655 - RNA, 32 nt, Human
gacuggaugggcacaaugacacgggcuugguc

SEQ ID NO: 155656 - RNA, 32 nt, Human
gacuggauucucuuccugaagcgaaggggcuc

SEQ ID NO: 155657 - RNA, 32 nt, Human
gacuggcaaauucgcuuuggacucguguauuc

SEQ ID NO: 155658 - RNA, 32 nt, Human
gacuggcaacauagugagacccugucucuaca

SEQ ID NO: 155659 - RNA, 32 nt, Human
gacuggcaacccagaacugauagugcaucagc

SEQ ID NO: 155660 - RNA, 32 nt, Human
gacuggcacugagccuggcccugcuuccccag

SEQ ID NO: 155661 - RNA, 32 nt, Human
gacuggcagcuuuuauuucaguauuagcacag

SEQ ID NO: 155662 - RNA, 32 nt, Human
gacuggcaggaagcacaccgggguuaacacug

SEQ ID NO: 155663 - RNA, 32 nt, Human
gacuggcauacuauguggaugugacaguggcg

SEQ ID NO: 155664 - RNA, 32 nt, Human
gacuggccaccuccucccuccugccucuuacu

SEQ ID NO: 155665 - RNA, 32 nt, Human
gacuggccagcauggccugaucagggaggaug

SEQ ID NO: 155666 - RNA, 32 nt, Human
gacuggcccaccugccugccacaugcccacgc

SEQ ID NO: 155667 - RNA, 32 nt, Human
gacuggcccaggcagggggacagggaaaaugg

SEQ ID NO: 155668 - RNA, 32 nt, Human
gacuggccccugggucagucuggugggaggac

SEQ ID NO: 155669 - RNA, 32 nt, Human
gacuggccucugcugauccucccaggcuuccg

SEQ ID NO: 155670 - RNA, 32 nt, Human
gacuggccuuccugccuccagccuggcuucua

SEQ ID NO: 155671 - RNA, 32 nt, Human
gacuggcggcaccagcaccuucgcuuugcauc

SEQ ID NO: 155672 - RNA, 32 nt, Human
gacuggcucauuugccccucaagcacgaguuu

SEQ ID NO: 155673 - RNA, 32 nt, Human
gacuggcuccaaggaaaguuuugcagaaugau

SEQ ID NO: 155674 - RNA, 32 nt, Human
gacuggcucugccuucuucaacauguuccugu

SEQ ID NO: 155675 - RNA, 32 nt, Human
gacuggcucuugcguccucaccucucacccuc

SEQ ID NO: 155676 - RNA, 32 nt, Human
gacuggcugcuuguccugcuuccucuguccua

SEQ ID NO: 155677 - RNA, 32 nt, Human
gacuggcuggugcugggggagcugcagauggc

SEQ ID NO: 155678 - RNA, 32 nt, Human
gacuggcuguucugaauuguucucugugcuag

SEQ ID NO: 155679 - RNA, 32 nt, Human
gacuggcuuccuuccuugguagguacaucuca

SEQ ID NO: 155680 - RNA, 32 nt, Human
gacugggaaggagaaaaccagcaaaggaagcu

SEQ ID NO: 155681 - RNA, 32 nt, Human
gacugggaaggggaggagagcaaugaaaggcg

SEQ ID NO: 155682 - RNA, 32 nt, Human
gacugggaccugcauuuuaaauaaucuuucca

SEQ ID NO: 155683 - RNA, 32 nt, Human
gacugggaccuugauccugccugcccggccgc

SEQ ID NO: 155684 - RNA, 32 nt, Human
gacugggagaagcagaagccggugccggucuu

SEQ ID NO: 155685 - RNA, 32 nt, Human
gacugggagacaccucccagcaggggucaaca

SEQ ID NO: 155686 - RNA, 20 nt, Human
gacugggagacugugcucuc

SEQ ID NO: 155687 - RNA, 32 nt, Human
gacugggagagaaaggaaguacacccaucugc

SEQ ID NO: 155688 - RNA, 22 nt, Human
gacugggaggcagagguugcag

SEQ ID NO: 155689 - RNA, 32 nt, Human
gacugggaggcagagguugcagugaaccgaga

SEQ ID NO: 155690 - RNA, 32 nt, Human
gacugggagggcagagggugagucacagcccu

SEQ ID NO: 155691 - RNA, 32 nt, Human
gacugggagggcugcugacuccaggcucagau

SEQ ID NO: 155692 - RNA, 15 nt, Human
gacugggauggggug

SEQ ID NO: 155693 - RNA, 32 nt, Human
gacugggaugugugugggggccaguugcagug

SEQ ID NO: 155694 - RNA, 32 nt, Human
gacugggcacccacaagggcucagugggccca

SEQ ID NO: 155695 - RNA, 32 nt, Human
gacugggcagggggagggccagcucugggaga

SEQ ID NO: 155696 - RNA, 32 nt, Human
gacugggcauuuaucuucucugacugaaaauc

SEQ ID NO: 155697 - RNA, 32 nt, Human
gacugggcauuuucucugcuguuacuuuucug

SEQ ID NO: 155698 - RNA, 32 nt, Human
gacugggccacaggugggagauuucccugggg

SEQ ID NO: 155699 - RNA, 32 nt, Human
gacugggccacugcacuccagccuggaugaca

SEQ ID NO: 155700 - RNA, 32 nt, Human
gacugggccagugccauucgcgucgcagcucu

SEQ ID NO: 155701 - RNA, 18 nt, Human
gacugggcccugggucug

SEQ ID NO: 155702 - RNA, 31 nt, Human
gacugggccuugucucccuggcgagugccag

SEQ ID NO: 155703 - RNA, 32 nt, Human
gacugggcggugauuccgcuucugccugggcu

SEQ ID NO: 155704 - RNA, 32 nt, Human
gacugggcuagccugcacugccugggaaaguc

SEQ ID NO: 155705 - RNA, 32 nt, Human
gacugggcugaagugaucuucccaccucagcc

SEQ ID NO: 155706 - RNA, 32 nt, Human
gacugggcugaggagaugcugggacugagagu

SEQ ID NO: 155707 - RNA, 32 nt, Human
gacugggcugggaggcgagcaaaggaagcagc

SEQ ID NO: 155708 - RNA, 32 nt, Human
gacugggcuuuagccgggcaugguggcucaug

SEQ ID NO: 155709 - RNA, 19 nt, Human
gacugggcuuuucugggga

SEQ ID NO: 155710 - RNA, 32 nt, Human
gacuggggaaccuuaugugagcagcacauccc

SEQ ID NO: 155711 - RNA, 32 nt, Human
gacuggggagaaagcugccuggaggaagcugc

SEQ ID NO: 155712 - RNA, 32 nt, Human
gacuggggagagauccaggacugagccagccu

SEQ ID NO: 155713 - RNA, 32 nt, Human
gacuggggagcacaggugucugccuagaucca

SEQ ID NO: 155714 - RNA, 32 nt, Human
gacuggggaggaagaaugugcugcgugguggg

SEQ ID NO: 155715 - RNA, 32 nt, Human
gacuggggagggcccaggggucagccugagaa

SEQ ID NO: 155716 - RNA, 32 nt, Human
gacuggggcagugcaguagcacuggacaagug

SEQ ID NO: 155717 - RNA, 32 nt, Human
gacuggggccuccccaccucccucucggcugu

SEQ ID NO: 155718 - RNA, 32 nt, Human
gacuggggccuucugccaccuuugccucccag

SEQ ID NO: 155719 - RNA, 32 nt, Human
gacuggggcucaauagcugcggauacaguguu

SEQ ID NO: 155720 - RNA, 32 nt, Human
gacuggggcucccugaggacagggcugugucu

SEQ ID NO: 155721 - RNA, 32 nt, Human
gacuggggcucccugaggauggggcuguuucu

SEQ ID NO: 155722 - RNA, 32 nt, Human
gacuggggcugccugaggaugaggcugcaucu

SEQ ID NO: 155723 - RNA, 32 nt, Human
gacugggggaccccuuccuccugacuccagca

SEQ ID NO: 155724 - RNA, 32 nt, Human
gacugggggccagcacggcucaggucagugug

SEQ ID NO: 155725 - RNA, 32 nt, Human
gacugggggcgccaugauggucgaggauccgg

SEQ ID NO: 155726 - RNA, 32 nt, Human
gacugggggcgggcgggagggagccggggacg

SEQ ID NO: 155727 - RNA, 32 nt, Human
gacugggggugagggagaaggaggagagagcc

SEQ ID NO: 155728 - RNA, 32 nt, Human
gacugggguccagaaagucugagcccggaaca

SEQ ID NO: 155729 - RNA, 32 nt, Human
gacugggguggugaaggggcagcucugcugag

SEQ ID NO: 155730 - RNA, 32 nt, Human
gacuggguacaguaccuccagccccagggccc

SEQ ID NO: 155731 - RNA, 32 nt, Human
gacuggguaguuuauaaagaacagacauucag

SEQ ID NO: 155732 - RNA, 32 nt, Human
gacuggguauggauugcugggcccuaggcucu

SEQ ID NO: 155733 - RNA, 32 nt, Human
gacugggucggcugcuacccucaggccagggu

SEQ ID NO: 155734 - RNA, 32 nt, Human
gacugggugcauaucuucccagaagggaaagu

SEQ ID NO: 155735 - RNA, 19 nt, Human
gacugggugccaccagagg

SEQ ID NO: 155736 - RNA, 32 nt, Human
gacuggguggugagccaaggucauggugcuca

SEQ ID NO: 155737 - RNA, 32 nt, Human
gacuggguucuuccucccuccccgaagcccag

SEQ ID NO: 155738 - RNA, 20 nt, Human
gacuggguuucaccauguug

SEQ ID NO: 155739 - RNA, 21 nt, Human
gacuggguuucaccauguugg

SEQ ID NO: 155740 - RNA, 32 nt, Human
gacugguacuuagaggagaucuuuccagaaaa

SEQ ID NO: 155741 - RNA, 32 nt, Human
gacugguagcaaagcccccacgcccagccagg

SEQ ID NO: 155742 - RNA, 23 nt, Human
gacugguaggggccgaguggggu

SEQ ID NO: 155743 - RNA, 32 nt, Human
gacuggucaauggagaacacuuugaacgagcc

SEQ ID NO: 155744 - RNA, 32 nt, Human
gacuggucaguggcagaauuaacauauuugcc

SEQ ID NO: 155745 - RNA, 32 nt, Human
gacugguccacagggcuccugaaggaagcccc

SEQ ID NO: 155746 - RNA, 32 nt, Human
gacugguccaggcaugggucccuucccccugc

SEQ ID NO: 155747 - RNA, 18 nt, Human
gacuggucuaagcugcuc

SEQ ID NO: 155748 - RNA, 32 nt, Human
gacuggucucaaacaccugggcucaaaugacc

SEQ ID NO: 155749 - RNA, 32 nt, Human
gacuggucucaaacuccuaaccuugugauccg

SEQ ID NO: 155750 - RNA, 32 nt, Human
gacuggucucaaacuccugaccucagaugauc

SEQ ID NO: 155751 - RNA, 32 nt, Human
gacuggucucaaacuccugaccucaggcgauc

SEQ ID NO: 155752 - RNA, 32 nt, Human
gacuggucucaaacuccuggccucaagcaauc

SEQ ID NO: 155753 - RNA, 32 nt, Human
gacuggucucaaacuccugggcucaagcgaua

SEQ ID NO: 155754 - RNA, 32 nt, Human
gacuggucucaaacuccuggguucaagagauc

SEQ ID NO: 155755 - RNA, 32 nt, Human
gacuggucuccaacuccugaccucagaugguc

SEQ ID NO: 155756 - RNA, 32 nt, Human
gacuggucuccucuaucguguuugcugaucca

SEQ ID NO: 155757 - RNA, 32 nt, Human
gacuggucucgaacuccugaccucaggugauc

SEQ ID NO: 155758 - RNA, 32 nt, Human
gacuggucucgaacuccugaccuugugauccg

SEQ ID NO: 155759 - RNA, 32 nt, Human
gacuggucucgaacuccugggcucaaacaguc

SEQ ID NO: 155760 - RNA, 32 nt, Human
gacuggucucugccugggcucaaccucuguga

SEQ ID NO: 155761 - RNA, 32 nt, Human
gacuggucuuaaacuccugggcucaagugauc

SEQ ID NO: 155762 - RNA, 32 nt, Human
gacuggucuugaacuccugaccucgugauacu

SEQ ID NO: 155763 - RNA, 32 nt, Human
gacuggugaagcccuguaccuccuggguauug

SEQ ID NO: 155764 - RNA, 32 nt, Human
gacuggugccucuuacaugucacugcagccuc

SEQ ID NO: 155765 - RNA, 32 nt, Human
gacuggugcugugcuccagccuuaucaguuag

SEQ ID NO: 155766 - RNA, 32 nt, Human
gacuggugcuuagacuauugugcaguaaaccu

SEQ ID NO: 155767 - RNA, 32 nt, Human
gacugguggggagcugggggaggggaggucug

SEQ ID NO: 155768 - RNA, 32 nt, Human
gacuggugguaggcuggugaaaacuugacagc

SEQ ID NO: 155769 - RNA, 32 nt, Human
gacugguggugaggagucuaagugggcucagu

SEQ ID NO: 155770 - RNA, 23 nt, Human
gacugguuaaugacaacgaugca

SEQ ID NO: 155771 - RNA, 23 nt, Human
gacugguuaaugauaacaaugca

SEQ ID NO: 155772 - RNA, 23 nt, Human
gacugguuaaugauaauaaugca

SEQ ID NO: 155773 - RNA, 32 nt, Human
gacugguuacauuccaaucuuugugcaggaca

SEQ ID NO: 155774 - RNA, 32 nt, Human
gacugguucaagcuuccgccucggcgggaacg

SEQ ID NO: 155775 - RNA, 16 nt, Human
gacugguuccauuaca

SEQ ID NO: 155776 - RNA, 32 nt, Human
gacugguucuugucccucccucuugucccucg

SEQ ID NO: 155777 - RNA, 32 nt, Human
gacugguuuaaaaaucucuuccucauuucaau

SEQ ID NO: 155778 - RNA, 32 nt, Human
gacugguuuacaggcccugcuccugcagcaug

SEQ ID NO: 155779 - RNA, 32 nt, Human
gacugguuuugaacuccuggccucaggugauc

SEQ ID NO: 155780 - RNA, 32 nt, Human
gacuguaaaaccaccuuuucugcuucaauauc

SEQ ID NO: 155781 - RNA, 32 nt, Human
gacuguaaaguuaauggaagaauugagacaaa

SEQ ID NO: 155782 - RNA, 32 nt, Human
gacuguaacugacugccuugcuaaaagauuau

SEQ ID NO: 155783 - RNA, 32 nt, Human
gacuguaagcagcugggagagugccuugugug

SEQ ID NO: 155784 - RNA, 32 nt, Human
gacuguaagugaacguuuuacacacauuugca

SEQ ID NO: 155785 - RNA, 32 nt, Human
gacuguaccaggcuggagaggacauggcacug

SEQ ID NO: 155786 - RNA, 32 nt, Human
gacuguagacuuucagcagcaaucucagaagc

SEQ ID NO: 155787 - RNA, 32 nt, Human
gacuguagaguggucagaacugugugguuggu

SEQ ID NO: 155788 - RNA, 22 nt, Human
gacuguagcuucucuugcucuc

SEQ ID NO: 155789 - RNA, 22 nt, Human
gacuguagcuuuucgugcucca

SEQ ID NO: 155790 - RNA, 29 nt, Human
gacuguaggcugguuacaucccccuaguu

SEQ ID NO: 155791 - RNA, 32 nt, Human
gacuguaguccaccccugccugccuuguuuga

SEQ ID NO: 155792 - RNA, 32 nt, Human
gacuguaguuguuauuggaggcuguggugaga

SEQ ID NO: 155793 - RNA, 32 nt, Human
gacuguaugggcgccagggugaaggaaaccac

SEQ ID NO: 155794 - RNA, 16 nt, Human
gacuguauuucacaca

SEQ ID NO: 155795 - RNA, 32 nt, Human
gacuguauuuucaaaauaaaacuuuuucuugu

SEQ ID NO: 155796 - RNA, 18 nt, Human
gacuguauuuuucaucca

SEQ ID NO: 155797 - RNA, 32 nt, Human
gacugucaagccaaaauuuggaaauccagacc

SEQ ID NO: 155798 - RNA, 32 nt, Human
gacugucacaucucaaacuaauagcugauuuu

SEQ ID NO: 155799 - RNA, 32 nt, Human
gacugucacugcacauggaccucugggaagac

SEQ ID NO: 155800 - RNA, 32 nt, Human
gacugucacuugcuguuacaggcacaggugau

SEQ ID NO: 155801 - RNA, 32 nt, Human
gacugucagggagggccagggaggcagagcgg

SEQ ID NO: 155802 - RNA, 32 nt, Human
gacuguccacgcugaggcacagccuggagagg

SEQ ID NO: 155803 - RNA, 32 nt, Human
gacuguccacuccagcaagauccagggaugau

SEQ ID NO: 155804 - RNA, 24 nt, Human
gacugucccagcuagaacugugag

SEQ ID NO: 155805 - RNA, 24 nt, Human
gacuguccccacgccgggaaccaa

SEQ ID NO: 155806 - RNA, 32 nt, Human
gacugucccucuugaacucugccuuugggcac

SEQ ID NO: 155807 - RNA, 21 nt, Human
gacuguccgguucacuguggg

SEQ ID NO: 155808 - RNA, 32 nt, Human
gacuguccuccaccccagacuuccgcaaacug

SEQ ID NO: 155809 - RNA, 32 nt, Human
gacuguccuccggauaaacagcauugagauug

SEQ ID NO: 155810 - RNA, 32 nt, Human
gacuguccuggguggacggcaggugaacacaa

SEQ ID NO: 155811 - RNA, 32 nt, Human
gacuguccuggguggagggcaggugaacacaa

SEQ ID NO: 155812 - RNA, 32 nt, Human
gacuguccuugggccuccucuggaagcagcac

SEQ ID NO: 155813 - RNA, 32 nt, Human
gacugucucaaaacaaaacaaaacaaaacaaa

SEQ ID NO: 155814 - RNA, 32 nt, Human
gacugucucagccaaaccacugaucuucccug

SEQ ID NO: 155815 - RNA, 32 nt, Human
gacugucucguuucugucaugguggugcgucc

SEQ ID NO: 155816 - RNA, 32 nt, Human
gacugucugaaauguaggaggcagcauggugu

SEQ ID NO: 155817 - RNA, 32 nt, Human
gacugucugaugauugccccagcuggggaaaa

SEQ ID NO: 155818 - RNA, 32 nt, Human
gacugucuggucauaucugaugcaucauuuuc

SEQ ID NO: 155819 - RNA, 32 nt, Human
gacugucugugugcucuuaucaccaaucaguu

SEQ ID NO: 155820 - RNA, 32 nt, Human
gacugucuucucacccuuccccacucccuggu

SEQ ID NO: 155821 - RNA, 32 nt, Human
gacugucuucucugugcaaugaucucaugcuc

SEQ ID NO: 155822 - RNA, 32 nt, Human
gacugugaaaggccuccucucccacaguggag

SEQ ID NO: 155823 - RNA, 23 nt, Human
gacugugaacagcuguguucuca

SEQ ID NO: 155824 - RNA, 32 nt, Human
gacugugacaaacccagggcugaggccugccc

SEQ ID NO: 155825 - RNA, 32 nt, Human
gacugugacacccuuucuggggcucugugguu

SEQ ID NO: 155826 - RNA, 32 nt, Human
gacugugacacugcacuccagccugggcaaca

SEQ ID NO: 155827 - RNA, 32 nt, Human
gacugugacaggcucagcaugggcucagcaga

SEQ ID NO: 155828 - RNA, 32 nt, Human
gacugugaggcagauccucaucagggaggagg

SEQ ID NO: 155829 - RNA, 32 nt, Human
gacugugaggcaggacuucccucgcuugaacu

SEQ ID NO: 155830 - RNA, 32 nt, Human
gacugugaguccauuuccaggccuagugccug

SEQ ID NO: 155831 - RNA, 32 nt, Human
gacugugcaauacuuagagaaccuauagcauc

SEQ ID NO: 155832 - RNA, 31 nt, Human
gacugugcaaugucccugugguugggcucua

SEQ ID NO: 155833 - RNA, 32 nt, Human
gacugugcacacagaaaacaggcucugccuuc

SEQ ID NO: 155834 - RNA, 32 nt, Human
gacugugcacccaggccuuacaguccaaccuu

SEQ ID NO: 155835 - RNA, 32 nt, Human
gacugugcagcaaagaauccugggacagaaac

SEQ ID NO: 155836 - RNA, 32 nt, Human
gacugugcagcucgggucaccuucucugugga

SEQ ID NO: 155837 - RNA, 32 nt, Human
gacugugcauuguacccugaaaccagcuuuau

SEQ ID NO: 155838 - RNA, 32 nt, Human
gacugugccacugcaccucuagucugggugac

SEQ ID NO: 155839 - RNA, 32 nt, Human
gacugugccacugcacuccagccugggcaaca

SEQ ID NO: 155840 - RNA, 32 nt, Human
gacugugccacugcacuccagccugggugaca

SEQ ID NO: 155841 - RNA, 32 nt, Human
gacugugccacugcacuccagccuggucaaca

SEQ ID NO: 155842 - RNA, 32 nt, Human
gacugugccacugcaguccagccugggugaca

SEQ ID NO: 155843 - RNA, 32 nt, Human
gacugugccauugcacuccagucggguuaaca

SEQ ID NO: 155844 - RNA, 32 nt, Human
gacugugcccagggcccugccucuugugcaga

SEQ ID NO: 155845 - RNA, 32 nt, Human
gacugugcuacugcacuccagccugggcaaca

SEQ ID NO: 155846 - RNA, 32 nt, Human
gacugugcucuaccuguuccuucucugaagcu

SEQ ID NO: 155847 - RNA, 32 nt, Human
gacugugcuggguuggaaugugaacaauaaag

SEQ ID NO: 155848 - RNA, 32 nt, Human
gacugugcugugaaagagaucugugaccuugc

SEQ ID NO: 155849 - RNA, 32 nt, Human
gacugugcugugcagcucucuaaaugggaauu

SEQ ID NO: 155850 - RNA, 32 nt, Human
gacugugcuguuccucucuguccuggggcucc

SEQ ID NO: 155851 - RNA, 21 nt, Human
gacugugcuucucgugcuuca

SEQ ID NO: 155852 - RNA, 32 nt, Human
gacugugcuucucgugcuucauguagaacccu

SEQ ID NO: 155853 - RNA, 21 nt, Human
gacuguggaagagauuacaaa

SEQ ID NO: 155854 - RNA, 32 nt, Human
gacuguggacuggugggcuccccucugggcca

SEQ ID NO: 155855 - RNA, 32 nt, Human
gacuguggacuucacucaggaggaguggcagc

SEQ ID NO: 155856 - RNA, 32 nt, Human
gacuguggagggacuuuccggagcagcucgag

SEQ ID NO: 155857 - RNA, 32 nt, Human
gacuguggcaccugacccagugcccugcgaca

SEQ ID NO: 155858 - RNA, 32 nt, Human
gacuguggccaggguaguucucagguugugcu

SEQ ID NO: 155859 - RNA, 32 nt, Human
gacuguggccauggcucugacugacauagacc

SEQ ID NO: 155860 - RNA, 32 nt, Human
gacuguggcccaggaugcugccgaacagugag

SEQ ID NO: 155861 - RNA, 32 nt, Human
gacuguggccugaguuccccagccccucuccu

SEQ ID NO: 155862 - RNA, 32 nt, Human
gacuguggccuucuucucacagcuccacuagg

SEQ ID NO: 155863 - RNA, 32 nt, Human
gacuguggcgauggcucugaugaggaggguug

SEQ ID NO: 155864 - RNA, 32 nt, Human
gacuguggcugcagagaccuugcgaccaugug

SEQ ID NO: 155865 - RNA, 32 nt, Human
gacuguggcugguauaucuggcugccauuuuu

SEQ ID NO: 155866 - RNA, 32 nt, Human
gacugugggaaaggaagagaaggagcaaguaa

SEQ ID NO: 155867 - RNA, 32 nt, Human
gacugugggaggaaagagcugcguggauagau

SEQ ID NO: 155868 - RNA, 32 nt, Human
gacugugggcugggaaacuguaccuaccucuc

SEQ ID NO: 155869 - RNA, 20 nt, Human
gacuguggguuccaaauuac

SEQ ID NO: 155870 - RNA, 32 nt, Human
gacuguggugggauucccgccucggcagcguc

SEQ ID NO: 155871 - RNA, 32 nt, Human
gacuguguaaaugagagaaagacuugauucag

SEQ ID NO: 155872 - RNA, 32 nt, Human
gacuguguaggugacagggagggaaagaugau

SEQ ID NO: 155873 - RNA, 32 nt, Human
gacugugucauugcacuccagccugggcgaca

SEQ ID NO: 155874 - RNA, 32 nt, Human
gacuguguccaggccacaugcaacuuaaagga

SEQ ID NO: 155875 - RNA, 32 nt, Human
gacugugucugaagauuuuaaauuccaaguca

SEQ ID NO: 155876 - RNA, 19 nt, Human
gacugugucuuucaugaca

SEQ ID NO: 155877 - RNA, 32 nt, Human
gacugugugugcccucugggcucugaguaccc

SEQ ID NO: 155878 - RNA, 32 nt, Human
gacuguguuacccaggcuggucuucaacucuu

SEQ ID NO: 155879 - RNA, 32 nt, Human
gacuguguugacugacgagccgagggguggcc

SEQ ID NO: 155880 - RNA, 32 nt, Human
gacuguguuuccauccuggccuagaggagcag

SEQ ID NO: 155881 - RNA, 32 nt, Human
gacuguguuugauguccuuuauugauacaaag

SEQ ID NO: 155882 - RNA, 32 nt, Human
gacuguuaacgccuccacaguggaccaagaaa

SEQ ID NO: 155883 - RNA, 32 nt, Human
gacuguuauuucuuuucuuccugcuuuccuac

SEQ ID NO: 155884 - RNA, 32 nt, Human
gacuguucaucuccuaugugaugcugaagacc

SEQ ID NO: 155885 - RNA, 32 nt, Human
gacuguuccagccuuagucugugcuuaaaaag

SEQ ID NO: 155886 - RNA, 18 nt, Human
gacuguuccauuuuaaca

SEQ ID NO: 155887 - RNA, 15 nt, Human
gacuguucccaucac

SEQ ID NO: 155888 - RNA, 17 nt, Human
gacuguucccuucgcau

SEQ ID NO: 155889 - RNA, 16 nt, Human
gacuguuccguuccac

SEQ ID NO: 155890 - RNA, 19 nt, Human
gacuguuccugucucagca

SEQ ID NO: 155891 - RNA, 32 nt, Human
gacuguucucauaguuaguugacucauauggu

SEQ ID NO: 155892 - RNA, 32 nt, Human
gacuguucucucuugacaggcaagcaagcaaa

SEQ ID NO: 155893 - RNA, 18 nt, Human
gacuguucugugucagca

SEQ ID NO: 155894 - RNA, 16 nt, Human
gacuguucuuuauaca

SEQ ID NO: 155895 - RNA, 32 nt, Human
gacuguugagcagucugcugucaggagagaug

SEQ ID NO: 155896 - RNA, 32 nt, Human
gacuguugcaccaggcugagaaagcagcaaua

SEQ ID NO: 155897 - RNA, 32 nt, Human
gacuguugcccaggcuggaguguaauggcgcc

SEQ ID NO: 155898 - RNA, 32 nt, Human
gacuguugcccuuuauuuaugcaaaaccaccu

SEQ ID NO: 155899 - RNA, 32 nt, Human
gacuguugcugcacuccagccugagugacaga

SEQ ID NO: 155900 - RNA, 32 nt, Human
gacuguugcuuccucuaacacauggggaggcu

SEQ ID NO: 155901 - RNA, 32 nt, Human
gacuguugggauuacaggcaugagccaccacg

SEQ ID NO: 155902 - RNA, 32 nt, Human
gacuguuggggaccaggaugcuggcaggucaa

SEQ ID NO: 155903 - RNA, 32 nt, Human
gacuguuuaaggccuuaacaggugaaucuaga

SEQ ID NO: 155904 - RNA, 16 nt, Human
gacuguuucacacaca

SEQ ID NO: 155905 - RNA, 32 nt, Human
gacuguuucagaaaggagaaagcagaggccuc

SEQ ID NO: 155906 - RNA, 32 nt, Human
gacuguuuccaucaaggguacacugccuucuc

SEQ ID NO: 155907 - RNA, 32 nt, Human
gacuguuucccaaccagcacccaaagacgggc

SEQ ID NO: 155908 - RNA, 32 nt, Human
gacuguuuccccuacaucuuuugagccacagu

SEQ ID NO: 155909 - RNA, 32 nt, Human
gacuguuucccuuuccuucaaggccuagagua

SEQ ID NO: 155910 - RNA, 32 nt, Human
gacuguuucucuuccucucuuucuuccuuuug

SEQ ID NO: 155911 - RNA, 32 nt, Human
gacuguuuggcacuugagacaaaccugccuuu

SEQ ID NO: 155912 - RNA, 16 nt, Human
gacuguuuucauccca

SEQ ID NO: 155913 - RNA, 32 nt, Human
gacuguuuucccaccauaagggacuaugauuu

SEQ ID NO: 155914 - RNA, 32 nt, Human
gacuguuuugagagugggacucacucugaagu

SEQ ID NO: 155915 - RNA, 32 nt, Human
gacuguuuuuauaaauaaacuguuucauaaau

SEQ ID NO: 155916 - RNA, 32 nt, Human
gacuuaaacaucuucugaaacagcacuguuuu

SEQ ID NO: 155917 - RNA, 32 nt, Human
gacuuaaagaauagucuggugaaguuacucga

SEQ ID NO: 155918 - RNA, 32 nt, Human
gacuuaaaggcaguuuucugaagaacucuuga

SEQ ID NO: 155919 - RNA, 32 nt, Human
gacuuaaaugucccugucugacagcuuugaag

SEQ ID NO: 155920 - RNA, 32 nt, Human
gacuuaacaaguguacugcagaauaaacuacc

SEQ ID NO: 155921 - RNA, 32 nt, Human
gacuuaaccaaacaucacagagcuguaaacca

SEQ ID NO: 155922 - RNA, 32 nt, Human
gacuuaaccaguaucaauuugaaaugcugauu

SEQ ID NO: 155923 - RNA, 32 nt, Human
gacuuaacguugaaauuuucuucaggaauuuu

SEQ ID NO: 155924 - RNA, 32 nt, Human
gacuuaacuaugcuuuuuaacucuuuuuccac

SEQ ID NO: 155925 - RNA, 32 nt, Human
gacuuaagacuacccuacaggaacccuguacu

SEQ ID NO: 155926 - RNA, 32 nt, Human
gacuuaagaucccacaccucacaaaccuacag

SEQ ID NO: 155927 - RNA, 32 nt, Human
gacuuaaggaagagacccugugagucugacaa

SEQ ID NO: 155928 - RNA, 32 nt, Human
gacuuaaggccuugccugucugacugacagcc

SEQ ID NO: 155929 - RNA, 31 nt, Human
gacuuaagugagaaagaacaagagaagcugc

SEQ ID NO: 155930 - RNA, 32 nt, Human
gacuuaauauacuacccguuccuuccacccag

SEQ ID NO: 155931 - RNA, 32 nt, Human
gacuuaaucagcagugaauacucuccaccaag

SEQ ID NO: 155932 - RNA, 32 nt, Human
gacuuaaucccagcuacgugggaggcagaggc

SEQ ID NO: 155933 - RNA, 32 nt, Human
gacuuacaaggaaagcacgaggcccuugagga

SEQ ID NO: 155934 - RNA, 32 nt, Human
gacuuacagggagagacacuagguaugugagc

SEQ ID NO: 155935 - RNA, 32 nt, Human
gacuuacagucagagaugaccuuaaauaugau

SEQ ID NO: 155936 - RNA, 32 nt, Human
gacuuacauaugcagccaagguugagagucac

SEQ ID NO: 155937 - RNA, 32 nt, Human
gacuuacauauguacaagugguaugugauaua

SEQ ID NO: 155938 - RNA, 32 nt, Human
gacuuaccacacacccuuccugcugcuccucu

SEQ ID NO: 155939 - RNA, 32 nt, Human
gacuuacgccuguaaucucagcacuuugggag

SEQ ID NO: 155940 - RNA, 32 nt, Human
gacuuacucaggugggacugggcacagggcag

SEQ ID NO: 155941 - RNA, 32 nt, Human
gacuuacucucuccucuccuuugagagguccc

SEQ ID NO: 155942 - RNA, 32 nt, Human
gacuuacugcagccuugaucucuugggcucaa

SEQ ID NO: 155943 - RNA, 32 nt, Human
gacuuacugccucugagccuuggcuuucugug

SEQ ID NO: 155944 - RNA, 32 nt, Human
gacuuacuuaaauuugggauucugcuuaaacu

SEQ ID NO: 155945 - RNA, 32 nt, Human
gacuuacuucucugcuaucuagaucugaacuc

SEQ ID NO: 155946 - RNA, 32 nt, Human
gacuuacuuguccuuaagcagaagccaggcug

SEQ ID NO: 155947 - RNA, 32 nt, Human
gacuuagagaagaaggagggaagaauagauga

SEQ ID NO: 155948 - RNA, 32 nt, Human
gacuuagagauggaauguaacuuugcuuacaa

SEQ ID NO: 155949 - RNA, 32 nt, Human
gacuuagaucuuccaccucacucccucagcca

SEQ ID NO: 155950 - RNA, 32 nt, Human
gacuuagcaaagcagagauuaucagugacuuu

SEQ ID NO: 155951 - RNA, 32 nt, Human
gacuuagccuccagaauugagagaaguaaaug

SEQ ID NO: 155952 - RNA, 32 nt, Human
gacuuagcuggguuuauucaaagugggcgggu

SEQ ID NO: 155953 - RNA, 32 nt, Human
gacuuagcugugauacugacagguaagcaaca

SEQ ID NO: 155954 - RNA, 32 nt, Human
gacuuaggaauagagacagccagagagaaaug

SEQ ID NO: 155955 - RNA, 32 nt, Human
gacuuagggaggcagaguggaggaagugagag

SEQ ID NO: 155956 - RNA, 32 nt, Human
gacuuaguccaguucccugugaucucaaaaca

SEQ ID NO: 155957 - RNA, 32 nt, Human
gacuuagucccacccagcaccauaaagaaagg

SEQ ID NO: 155958 - RNA, 32 nt, Human
gacuuagugauggggaacacccagggacaugc

SEQ ID NO: 155959 - RNA, 32 nt, Human
gacuuauacaguaagggcuucaacugaccuua

SEQ ID NO: 155960 - RNA, 32 nt, Human
gacuuauacaguaagggcuucaacugaucuua

SEQ ID NO: 155961 - RNA, 32 nt, Human
gacuuaucuccucacuccuuuuucucuccuua

SEQ ID NO: 155962 - RNA, 32 nt, Human
gacuuaucuguggagccuggugcuccaggaug

SEQ ID NO: 155963 - RNA, 32 nt, Human
gacuuauucaaugaaagugaaaaagaagcucu

SEQ ID NO: 155964 - RNA, 32 nt, Human
gacuuauuuauuugcaggaacaaauggugccu

SEQ ID NO: 155965 - RNA, 32 nt, Human
gacuucaaaaauuaauaaaaagaaaagaaaaa

SEQ ID NO: 155966 - RNA, 32 nt, Human
gacuucaaagagaccaugguuccguuggaggc

SEQ ID NO: 155967 - RNA, 19 nt, Human
gacuucaaagugcucagua

SEQ ID NO: 155968 - RNA, 32 nt, Human
gacuucaaauugcaggaccaagcccuaaagga

SEQ ID NO: 155969 - RNA, 24 nt, Human
gacuucaaauugcaucuagaauua

SEQ ID NO: 155970 - RNA, 32 nt, Human
gacuucaagauccucuugccacaucuugaaaa

SEQ ID NO: 155971 - RNA, 17 nt, Human
gacuucacacgacagca

SEQ ID NO: 155972 - RNA, 32 nt, Human
gacuucacagaaucgucugagaaaggagagcu

SEQ ID NO: 155973 - RNA, 32 nt, Human
gacuucaccguguuggccaggcuggucuugaa

SEQ ID NO: 155974 - RNA, 22 nt, Human
gacuucacuacguugauugcua

SEQ ID NO: 155975 - RNA, 32 nt, Human
gacuucacugugcuucccagccccaggguuuc

SEQ ID NO: 155976 - RNA, 32 nt, Human
gacuucagacacacaccacaccucaaauauau

SEQ ID NO: 155977 - RNA, 22 nt, Human
gacuucagagaaagcccugcag

SEQ ID NO: 155978 - RNA, 32 nt, Human
gacuucagagauccgccucccuugcccuuccc

SEQ ID NO: 155979 - RNA, 32 nt, Human
gacuucagauccacccauggcuguaauggaug

SEQ ID NO: 155980 - RNA, 32 nt, Human
gacuucagauuccauacugagaucguucccag

SEQ ID NO: 155981 - RNA, 22 nt, Human
gacuucagcucucugaaggcug

SEQ ID NO: 155982 - RNA, 32 nt, Human
gacuucaggauagaauucuccaucaaauauac

SEQ ID NO: 155983 - RNA, 32 nt, Human
gacuucaggcagcaggaggcugugugucccug

SEQ ID NO: 155984 - RNA, 32 nt, Human
gacuucagggagaccuggcuugggcuaaaauc

SEQ ID NO: 155985 - RNA, 32 nt, Human
gacuucaguagcaaaccacuacagucaguacc

SEQ ID NO: 155986 - RNA, 21 nt, Human
gacuucaguccuagcccccag

SEQ ID NO: 155987 - RNA, 19 nt, Human
gacuucaguccuggucugc

SEQ ID NO: 155988 - RNA, 32 nt, Human
gacuucagugcccugaggaaaaggcuuuggga

SEQ ID NO: 155989 - RNA, 32 nt, Human
gacuucagugccuuugguguuccagaagcacu

SEQ ID NO: 155990 - RNA, 32 nt, Human
gacuucauaaaagccaucucagagccauugau

SEQ ID NO: 155991 - RNA, 32 nt, Human
gacuucauccucccuucucuguccacaccacg

SEQ ID NO: 155992 - RNA, 32 nt, Human
gacuucauccugucauuccagccuggggucug

SEQ ID NO: 155993 - RNA, 32 nt, Human
gacuucauggugcuggaugggagacgcuagcg

SEQ ID NO: 155994 - RNA, 32 nt, Human
gacuucauguagagaagaaagcacuggacuga

SEQ ID NO: 155995 - RNA, 32 nt, Human
gacuucauguaucugugucugugguucauuuu

SEQ ID NO: 155996 - RNA, 32 nt, Human
gacuuccacagcuuucuuuucuacagcugcua

SEQ ID NO: 155997 - RNA, 32 nt, Human
gacuuccagaacucuuaacgugaacauuuugu

SEQ ID NO: 155998 - RNA, 32 nt, Human
gacuuccagcagaaugggaaugggggaaacac

SEQ ID NO: 155999 - RNA, 32 nt, Human
gacuuccaguacuguccucgaccaugggcaga

SEQ ID NO: 156000 - RNA, 19 nt, Human
gacuuccauguccugguua

SEQ ID NO: 156001 - RNA, 32 nt, Human
gacuucccaaagugcugggauuacagcgugag

SEQ ID NO: 156002 - RNA, 32 nt, Human
gacuucccaaagugcugggauuacaggcggga

SEQ ID NO: 156003 - RNA, 32 nt, Human
gacuucccaaagugcugggauuacagguguga

SEQ ID NO: 156004 - RNA, 32 nt, Human
gacuucccaaagugcugggauuaugggcgggu

SEQ ID NO: 156005 - RNA, 32 nt, Human
gacuucccagagugcugggauuacaggcguga

SEQ ID NO: 156006 - RNA, 32 nt, Human
gacuucccagcccccagaacugugagaaauaa

SEQ ID NO: 156007 - RNA, 32 nt, Human
gacuucccagccuccagaacugugagaaauaa

SEQ ID NO: 156008 - RNA, 32 nt, Human
gacuucccagccucuagaacugugagaaauaa

SEQ ID NO: 156009 - RNA, 32 nt, Human
gacuucccagccuucagaacugugaguuggga

SEQ ID NO: 156010 - RNA, 32 nt, Human
gacuucccagggagggaggcagcuggcugggg

SEQ ID NO: 156011 - RNA, 32 nt, Human
gacuuccccaacaaaagaucuugaacuucugg

SEQ ID NO: 156012 - RNA, 32 nt, Human
gacuuccccacauugacauuugugcgccaccu

SEQ ID NO: 156013 - RNA, 32 nt, Human
gacuuccccagccuggacgggcguggguucug

SEQ ID NO: 156014 - RNA, 32 nt, Human
gacuuccccugccuccuacuccaguaugacag

SEQ ID NO: 156015 - RNA, 32 nt, Human
gacuucccuaggcagguauuuucuccaugccu

SEQ ID NO: 156016 - RNA, 32 nt, Human
gacuucccucccccucuuuuccauuucucccu

SEQ ID NO: 156017 - RNA, 32 nt, Human
gacuuccggcuguugcucaucuuuggauugcc

SEQ ID NO: 156018 - RNA, 32 nt, Human
gacuuccuacagccaaauccccagaggccaac

SEQ ID NO: 156019 - RNA, 32 nt, Human
gacuuccuccaaggagcuuuggcuauacucuc

SEQ ID NO: 156020 - RNA, 32 nt, Human
gacuuccuccaauccccacuccuccgagaccc

SEQ ID NO: 156021 - RNA, 32 nt, Human
gacuuccuccuaacugucaggguggggagcug

SEQ ID NO: 156022 - RNA, 22 nt, Human
gacuuccuccucuggguccucu

SEQ ID NO: 156023 - RNA, 21 nt, Human
gacuuccucgugcaauguguu

SEQ ID NO: 156024 - RNA, 32 nt, Human
gacuuccucuacuugcgcugcucggcccagcc

SEQ ID NO: 156025 - RNA, 32 nt, Human
gacuuccucuggcugcuuuccugaugcucugg

SEQ ID NO: 156026 - RNA, 32 nt, Human
gacuuccucuuccuucugauucugccugaaua

SEQ ID NO: 156027 - RNA, 32 nt, Human
gacuuccugcucaucggcagaucccccuuucc

SEQ ID NO: 156028 - RNA, 32 nt, Human
gacuuccugcucaucugccgcucccuuugccg

SEQ ID NO: 156029 - RNA, 32 nt, Human
gacuuccuguaagauggagguggacaccgagg

SEQ ID NO: 156030 - RNA, 22 nt, Human
gacuuccugugucaguacugug

SEQ ID NO: 156031 - RNA, 20 nt, Human
gacuuccuucuaacaugugu

SEQ ID NO: 156032 - RNA, 32 nt, Human
gacuuccuuugcuucucuuuuccuuguaucuu

SEQ ID NO: 156033 - RNA, 32 nt, Human
gacuucgagaucagccagagaggcagagaacu

SEQ ID NO: 156034 - RNA, 32 nt, Human
gacuucgauuuucagaauuccuccugggaaug

SEQ ID NO: 156035 - RNA, 32 nt, Human
gacuucgccauucaagacaaggaagagacaca

SEQ ID NO: 156036 - RNA, 32 nt, Human
gacuucggauggcucccucuccccaaccgcga

SEQ ID NO: 156037 - RNA, 32 nt, Human
gacuucggcgagguggaaguggagcccaguga

SEQ ID NO: 156038 - RNA, 32 nt, Human
gacuucggcgauuugggcugggcgcggugauu

SEQ ID NO: 156039 - RNA, 32 nt, Human
gacuucggggcuguggagaccagcacaggaca

SEQ ID NO: 156040 - RNA, 32 nt, Human
gacuucgucacacuaaaacggauuuugugagg

SEQ ID NO: 156041 - RNA, 32 nt, Human
gacuucuaaucuccagaauagugagaaauaaa

SEQ ID NO: 156042 - RNA, 32 nt, Human
gacuucuagccaggcugggcugccagugccau

SEQ ID NO: 156043 - RNA, 32 nt, Human
gacuucuaugugagaagugcuggaaaaugauu

SEQ ID NO: 156044 - RNA, 32 nt, Human
gacuucucaaagcugcaaacuagccaguugug

SEQ ID NO: 156045 - RNA, 32 nt, Human
gacuucucaguaggaaggggugaggcagcugu

SEQ ID NO: 156046 - RNA, 32 nt, Human
gacuucuccgcugcaggagguggggugaggac

SEQ ID NO: 156047 - RNA, 32 nt, Human
gacuucuccuucaauccucuggcugacaagaa

SEQ ID NO: 156048 - RNA, 32 nt, Human
gacuucucucaaacuugugugcugaggagacu

SEQ ID NO: 156049 - RNA, 32 nt, Human
gacuucucugauggcgagaggcugcggcugua

SEQ ID NO: 156050 - RNA, 32 nt, Human
gacuucucuggagaggccuggagaccuagcuc

SEQ ID NO: 156051 - RNA, 17 nt, Human
gacuucucugggccugg

SEQ ID NO: 156052 - RNA, 16 nt, Human
gacuucucugggcuga

SEQ ID NO: 156053 - RNA, 32 nt, Human
gacuucucuggugcaagaccucagguccgugg

SEQ ID NO: 156054 - RNA, 32 nt, Human
gacuucucuguaaauaaacaaaucucuucugc

SEQ ID NO: 156055 - RNA, 32 nt, Human
gacuucucuuauucuuuacaaaaugaaugcau

SEQ ID NO: 156056 - RNA, 32 nt, Human
gacuucucuugccuggagggugcagugauagc

SEQ ID NO: 156057 - RNA, 32 nt, Human
gacuucucuuucccucucccuccuccaacauu

SEQ ID NO: 156058 - RNA, 17 nt, Human
gacuucugaauacagca

SEQ ID NO: 156059 - RNA, 32 nt, Human
gacuucugaaugucuaguuugagaaacuguuc

SEQ ID NO: 156060 - RNA, 32 nt, Human
gacuucugcaggaaauaggguagagaacaggc

SEQ ID NO: 156061 - RNA, 32 nt, Human
gacuucugcaugcaguuugucuuucuguucug

SEQ ID NO: 156062 - RNA, 32 nt, Human
gacuucugccuccccuccuacccucuggccuc

SEQ ID NO: 156063 - RNA, 32 nt, Human
gacuucugcuuaauaaauaugcugacuucauu

SEQ ID NO: 156064 - RNA, 32 nt, Human
gacuucugucuucucauuuccaagccauuguu

SEQ ID NO: 156065 - RNA, 32 nt, Human
gacuucugugaaaucuuuguuuuuaagugcca

SEQ ID NO: 156066 - RNA, 32 nt, Human
gacuucuuaccuuuaacaucccuguuaaagau

SEQ ID NO: 156067 - RNA, 32 nt, Human
gacuucuucccucgcuccuccuggucaugucc

SEQ ID NO: 156068 - RNA, 32 nt, Human
gacuucuuccuugagugacuucuuaugauucu

SEQ ID NO: 156069 - RNA, 32 nt, Human
gacuucuuggaaggcagacuugggacgcuuug

SEQ ID NO: 156070 - RNA, 32 nt, Human
gacuucuuggaauuaucagagguagggugguc

SEQ ID NO: 156071 - RNA, 32 nt, Human
gacuucuugggccuuccugccugccacccccu

SEQ ID NO: 156072 - RNA, 32 nt, Human
gacuucuugguuuggggagaaauaaauuuugu

SEQ ID NO: 156073 - RNA, 32 nt, Human
gacuucuuugagacagagggcaaugaugugug

SEQ ID NO: 156074 - RNA, 32 nt, Human
gacuugaaaugaggccuacucuaaagaauucu

SEQ ID NO: 156075 - RNA, 32 nt, Human
gacuugaagcagaguucaccagugagcucagg

SEQ ID NO: 156076 - RNA, 32 nt, Human
gacuugaaggcaccuccagcauuggcccagca

SEQ ID NO: 156077 - RNA, 32 nt, Human
gacuugaauguuaucaguacuaccacagaacu

SEQ ID NO: 156078 - RNA, 32 nt, Human
gacuugacaccaccaccuuccuccaggggaaa

SEQ ID NO: 156079 - RNA, 32 nt, Human
gacuugacugaggcuguauccuuauccuccau

SEQ ID NO: 156080 - RNA, 32 nt, Human
gacuugagaacagccucugcagggccugcucu

SEQ ID NO: 156081 - RNA, 32 nt, Human
gacuugagaguguugcucugguauucugagag

SEQ ID NO: 156082 - RNA, 32 nt, Human
gacuugagaguguugcucugguauucuggguu

SEQ ID NO: 156083 - RNA, 32 nt, Human
gacuugagccacuccuuccuucaggacucugc

SEQ ID NO: 156084 - RNA, 21 nt, Human
gacuugagcccaagaguucca

SEQ ID NO: 156085 - RNA, 32 nt, Human
gacuugagggacccagucccaccccaaacugc

SEQ ID NO: 156086 - RNA, 32 nt, Human
gacuugagggccugagcaggaaagacuggccc

SEQ ID NO: 156087 - RNA, 32 nt, Human
gacuugaggguuaagaagaaagaggaaugagg

SEQ ID NO: 156088 - RNA, 32 nt, Human
gacuugaguucgggacaguaagccagggguua

SEQ ID NO: 156089 - RNA, 32 nt, Human
gacuugaguuugaauugacuuaacauugaguu

SEQ ID NO: 156090 - RNA, 29 nt, Human
gacuugauaaacgguuucgccucuuuugg

SEQ ID NO: 156091 - RNA, 32 nt, Human
gacuugaugagguuugagguacaaggggaaaa

SEQ ID NO: 156092 - RNA, 32 nt, Human
gacuugauuugggaagccuuguugacucugau

SEQ ID NO: 156093 - RNA, 32 nt, Human
gacuugcaaagacauuccccuugagugucagu

SEQ ID NO: 156094 - RNA, 32 nt, Human
gacuugcaagcguggacccaggcucggugcac

SEQ ID NO: 156095 - RNA, 32 nt, Human
gacuugcaaucuauauguaauggcuacuuacu

SEQ ID NO: 156096 - RNA, 32 nt, Human
gacuugcacacagggaggcuguagccaggaaa

SEQ ID NO: 156097 - RNA, 32 nt, Human
gacuugcacauccugucaucugcuguguuaca

SEQ ID NO: 156098 - RNA, 32 nt, Human
gacuugcaccuauaaucccagcacuuugggag

SEQ ID NO: 156099 - RNA, 32 nt, Human
gacuugcagauaagcacaagccuacuggaauu

SEQ ID NO: 156100 - RNA, 32 nt, Human
gacuugcaggagaccgugugauuuguguagug

SEQ ID NO: 156101 - RNA, 32 nt, Human
gacuugccacauuccucugagucuggaguagc

SEQ ID NO: 156102 - RNA, 32 nt, Human
gacuugcccuggaccuugaguguggcccuccc

SEQ ID NO: 156103 - RNA, 32 nt, Human
gacuugccucagcugcucggcgaggcuggagc

SEQ ID NO: 156104 - RNA, 32 nt, Human
gacuugccuccaccgccaccugcaaguccgcc

SEQ ID NO: 156105 - RNA, 32 nt, Human
gacuugccuccagcacuggacacaccuguguu

SEQ ID NO: 156106 - RNA, 32 nt, Human
gacuugccucugcacacccuccagagacaaca

SEQ ID NO: 156107 - RNA, 21 nt, Human
gacuugcgaccuugaagccaa

SEQ ID NO: 156108 - RNA, 32 nt, Human
gacuugcgcagccgccugcagcgcggcccgug

SEQ ID NO: 156109 - RNA, 32 nt, Human
gacuugcggggcagaggagggcgugggcgugu

SEQ ID NO: 156110 - RNA, 32 nt, Human
gacuugcuccauccucuuaaacuuuuuguguc

SEQ ID NO: 156111 - RNA, 32 nt, Human
gacuugcucuacugaaggcuucuugguuauaa

SEQ ID NO: 156112 - RNA, 17 nt, Human
gacuugcucucaucaca

SEQ ID NO: 156113 - RNA, 32 nt, Human
gacuugcugugugcccuuaaaccagccacuac

SEQ ID NO: 156114 - RNA, 32 nt, Human
gacuugcuucagacgacacagagcaagaggaa

SEQ ID NO: 156115 - RNA, 32 nt, Human
gacuuggaacaucugcuuauuuucuaauccgc

SEQ ID NO: 156116 - RNA, 32 nt, Human
gacuuggaagaggaggaggaggaggagaagga

SEQ ID NO: 156117 - RNA, 32 nt, Human
gacuuggaccgcuucagccugggcugggagca

SEQ ID NO: 156118 - RNA, 32 nt, Human
gacuuggacuccucuguccagcuuuuaacaau

SEQ ID NO: 156119 - RNA, 32 nt, Human
gacuuggacuuggacuuggauuugagcuuggc

SEQ ID NO: 156120 - RNA, 32 nt, Human
gacuuggagguggaggggacgcggcgguacuc

SEQ ID NO: 156121 - RNA, 32 nt, Human
gacuuggagguggcaggaguccgagcccugcu

SEQ ID NO: 156122 - RNA, 32 nt, Human
gacuuggauggcagccaucagggaaggcuggg

SEQ ID NO: 156123 - RNA, 32 nt, Human
gacuuggcauccagagaugagccccagaaguu

SEQ ID NO: 156124 - RNA, 32 nt, Human
gacuuggccuggggcccaggaggcagguguaa

SEQ ID NO: 156125 - RNA, 32 nt, Human
gacuuggccuuggcugggcaugguggcucacg

SEQ ID NO: 156126 - RNA, 32 nt, Human
gacuugggagagauaaggagggagggcgggug

SEQ ID NO: 156127 - RNA, 32 nt, Human
gacuugggagauggaugggcugagggagugga

SEQ ID NO: 156128 - RNA, 32 nt, Human
gacuugggaggcgcggugaggagucaggcuua

SEQ ID NO: 156129 - RNA, 32 nt, Human
gacuugggaggcgguuguugcagugagcugug

SEQ ID NO: 156130 - RNA, 32 nt, Human
gacuugggaggcugaggcaggagaaucgcuug

SEQ ID NO: 156131 - RNA, 32 nt, Human
gacuugggagucaggaauaagggaaaggggau

SEQ ID NO: 156132 - RNA, 32 nt, Human
gacuugggccagagcagcagagcuggcccaac

SEQ ID NO: 156133 - RNA, 32 nt, Human
gacuugggccuccagcucaucuguuccuucug

SEQ ID NO: 156134 - RNA, 32 nt, Human
gacuuggggagggagaaauaggaggagacguc

SEQ ID NO: 156135 - RNA, 32 nt, Human
gacuuggggaucagggagaaguugccgaaacu

SEQ ID NO: 156136 - RNA, 32 nt, Human
gacuugggguuugcuuuuuaaaaugaaacuag

SEQ ID NO: 156137 - RNA, 32 nt, Human
gacuuggguugcuggucccccuucccuagugg

SEQ ID NO: 156138 - RNA, 32 nt, Human
gacuugguaggugguuaugaagggcuggccag

SEQ ID NO: 156139 - RNA, 32 nt, Human
gacuuggucuacaccugacagucacuggaaug

SEQ ID NO: 156140 - RNA, 32 nt, Human
gacuuggugcagcccaugcucucucucaugcu

SEQ ID NO: 156141 - RNA, 32 nt, Human
gacuugguggaaguucugccucaggugggcau

SEQ ID NO: 156142 - RNA, 32 nt, Human
gacuugguggcuuuuccuugaauccagaacac

SEQ ID NO: 156143 - RNA, 18 nt, Human
gacuuggugggcggggug

SEQ ID NO: 156144 - RNA, 32 nt, Human
gacuugguggggagagaaagaauacagugagu

SEQ ID NO: 156145 - RNA, 32 nt, Human
gacuugguggguggggugggugguuuuuguuu

SEQ ID NO: 156146 - RNA, 22 nt, Human
gacuuguaaaugaaacaaugca

SEQ ID NO: 156147 - RNA, 32 nt, Human
gacuuguagauuugccuucagacagcucuugg

SEQ ID NO: 156148 - RNA, 32 nt, Human
gacuugucaaauaccaguuuuguuucaaauaa

SEQ ID NO: 156149 - RNA, 32 nt, Human
gacuugucagaagucagagcaagguauuggug

SEQ ID NO: 156150 - RNA, 32 nt, Human
gacuugucauaguggaugaggucugggcugga

SEQ ID NO: 156151 - RNA, 32 nt, Human
gacuuguccaauaagauaagaucucaaaacaa

SEQ ID NO: 156152 - RNA, 32 nt, Human
gacuugucuacuauagcugcugccucagcguc

SEQ ID NO: 156153 - RNA, 32 nt, Human
gacuugugaaggcagaguagcgguugagguug

SEQ ID NO: 156154 - RNA, 32 nt, Human
gacuugugaauauauuugaauguauguuguuu

SEQ ID NO: 156155 - RNA, 32 nt, Human
gacuugugcuuccagggacccaggcaggauga

SEQ ID NO: 156156 - RNA, 32 nt, Human
gacuuguucauguccccucucucccuauaaau

SEQ ID NO: 156157 - RNA, 32 nt, Human
gacuuguucuucuucugcaguaucuggaaaau

SEQ ID NO: 156158 - RNA, 19 nt, Human
gacuuguucuuuccucaca

SEQ ID NO: 156159 - RNA, 22 nt, Human
gacuuguuuaaucguguucuca

SEQ ID NO: 156160 - RNA, 32 nt, Human
gacuuguuugcaaugcagaaucacagccccca

SEQ ID NO: 156161 - RNA, 32 nt, Human
gacuuguuuuacugcugucugccaucaauauu

SEQ ID NO: 156162 - RNA, 32 nt, Human
gacuuuaaaggacuguguucauucugauuugg

SEQ ID NO: 156163 - RNA, 32 nt, Human
gacuuuaaggaaaugaagacuggggaagaaua

SEQ ID NO: 156164 - RNA, 32 nt, Human
gacuuuaaucuuuauggcucuguggcuggagu

SEQ ID NO: 156165 - RNA, 32 nt, Human
gacuuuaccaccugaaacugcugcuucaaguu

SEQ ID NO: 156166 - RNA, 32 nt, Human
gacuuuacccuccugguugguucuuacuguuu

SEQ ID NO: 156167 - RNA, 32 nt, Human
gacuuuacuaccacaucuacagagccaucauu

SEQ ID NO: 156168 - RNA, 32 nt, Human
gacuuuagggaaugguauaggggaagauggga

SEQ ID NO: 156169 - RNA, 32 nt, Human
gacuuuauagaagcuauccaggagacuuaaua

SEQ ID NO: 156170 - RNA, 32 nt, Human
gacuuuauuauuccuacuucaagaccaucauu

SEQ ID NO: 156171 - RNA, 32 nt, Human
gacuuuauuuguguccuaaacauucuucagug

SEQ ID NO: 156172 - RNA, 32 nt, Human
gacuuucaaggagauacugcagugaguuucuc

SEQ ID NO: 156173 - RNA, 32 nt, Human
gacuuucagcacaaaagauacuuauaaacaaa

SEQ ID NO: 156174 - RNA, 32 nt, Human
gacuuucaguucuuacgauagucucaaggcug

SEQ ID NO: 156175 - RNA, 32 nt, Human
gacuuucccaugagccuccuggaacugccaaa

SEQ ID NO: 156176 - RNA, 32 nt, Human
gacuuucccaugagccuccuggaacugccagc

SEQ ID NO: 156177 - RNA, 32 nt, Human
gacuuucccuaagcagauaagcagaaacuugu

SEQ ID NO: 156178 - RNA, 32 nt, Human
gacuuucccugagaagaaucaucucugccagg

SEQ ID NO: 156179 - RNA, 32 nt, Human
gacuuucccuggggcaugucaguugccucaua

SEQ ID NO: 156180 - RNA, 21 nt, Human
gacuuucccuggugccugcgg

SEQ ID NO: 156181 - RNA, 32 nt, Human
gacuuuccuccaggggcuuccucacuggggaa

SEQ ID NO: 156182 - RNA, 32 nt, Human
gacuuuccuccuucccgccugccuguagcggc

SEQ ID NO: 156183 - RNA, 21 nt, Human
gacuuuccucugaaagcuaag

SEQ ID NO: 156184 - RNA, 32 nt, Human
gacuuucgggcucucuggaaggccggggagag

SEQ ID NO: 156185 - RNA, 32 nt, Human
gacuuucuaauuacuacaacuaaccuguugug

SEQ ID NO: 156186 - RNA, 32 nt, Human
gacuuucucacccugcggcaggcacaacagau

SEQ ID NO: 156187 - RNA, 32 nt, Human
gacuuucuccaauguggacucugugugucagu

SEQ ID NO: 156188 - RNA, 32 nt, Human
gacuuucuccccucagcuugagacugcaugua

SEQ ID NO: 156189 - RNA, 32 nt, Human
gacuuucuccuggccccugccugcuggagauc

SEQ ID NO: 156190 - RNA, 32 nt, Human
gacuuucucuaacccaguggcugugcggugca

SEQ ID NO: 156191 - RNA, 32 nt, Human
gacuuucugaaggaugggcaacaugucagauu

SEQ ID NO: 156192 - RNA, 20 nt, Human
gagaggcacuugugacuuug

SEQ ID NO: 156193 - RNA, 32 nt, Human
gagaggcagaaaaauuggguccugguucaggu

SEQ ID NO: 156194 - RNA, 32 nt, Human
gagaggcagaaaccaugugcagaggcugggag

SEQ ID NO: 156195 - RNA, 24 nt, Human
gagaggcagaggcagacaggcgcu

SEQ ID NO: 156196 - RNA, 32 nt, Human
gagaggcagagggaggcacagccccgacacag

SEQ ID NO: 156197 - RNA, 19 nt, Human
gagaggcagcauccaccag

SEQ ID NO: 156198 - RNA, 31 nt, Human
gagaggcagcgacaucggaggagggagaggc

SEQ ID NO: 156199 - RNA, 32 nt, Human
gagaggcaggauucaacagaucugucugucuu

SEQ ID NO: 156200 - RNA, 32 nt, Human
gagaggcaggcaagcaguuggguucgcccaca

SEQ ID NO: 156201 - RNA, 32 nt, Human
gagaggcagggugggauagggaacgucucgag

SEQ ID NO: 156202 - RNA, 32 nt, Human
gagaggcaggucaagaucugguuccagaaccg

SEQ ID NO: 156203 - RNA, 32 nt, Human
gagaggcaguagccucagugugcaguggguag

SEQ ID NO: 156204 - RNA, 21 nt, Human
gagaggcauaaaaaggcacuc

SEQ ID NO: 156205 - RNA, 32 nt, Human
gagaggcauccagcaacucugagauuaaauuc

SEQ ID NO: 156206 - RNA, 22 nt, Human
gagaggcaugaacacacaguca

SEQ ID NO: 156207 - RNA, 24 nt, Human
gagaggcaugugucggggggccug

SEQ ID NO: 156208 - RNA, 28 nt, Human
gagaggccaagggcugccuccuaucaga

SEQ ID NO: 156209 - RNA, 32 nt, Human
gagaggccaccguccaggucucuugccucuau

SEQ ID NO: 156210 - RNA, 32 nt, Human
gagaggccagaggcagaggggugcagaagaga

SEQ ID NO: 156211 - RNA, 32 nt, Human
gagaggccagcugcacuccugcacgggguucc

SEQ ID NO: 156212 - RNA, 32 nt, Human
gagaggccaggcaagcaaagucaugccacaaa

SEQ ID NO: 156213 - RNA, 32 nt, Human
gagaggccaggucacagagcaaggggcaggaa

SEQ ID NO: 156214 - RNA, 32 nt, Human
gagaggccaucuaucccagccugggugauccu

SEQ ID NO: 156215 - RNA, 32 nt, Human
gagaggcccagaggaaagcccaucucccucca

SEQ ID NO: 156216 - RNA, 32 nt, Human
gagaggcccaggacaccaagagccagcugugg

SEQ ID NO: 156217 - RNA, 32 nt, Human
gagaggccccaacacuggaugguucuguaggg

SEQ ID NO: 156218 - RNA, 32 nt, Human
gagaggcccccaaccuccucaggauuugcacg

SEQ ID NO: 156219 - RNA, 23 nt, Human
gagaggcccggagagggacucug

SEQ ID NO: 156220 - RNA, 32 nt, Human
gagaggcccuggaugguagaucggccaugcuc

SEQ ID NO: 156221 - RNA, 21 nt, Human
gagaggccgacccaggaggaa

SEQ ID NO: 156222 - RNA, 32 nt, Human
gagaggccgcugcaccaccacccgagccuggg

SEQ ID NO: 156223 - RNA, 31 nt, Human
gagaggccgggguuagggugaucuguguggc

SEQ ID NO: 156224 - RNA, 32 nt, Human
gagaggccucugauguccugaggucucagagg

SEQ ID NO: 156225 - RNA, 32 nt, Human
gagaggccuucucauccccaagcucuccaguc

SEQ ID NO: 156226 - RNA, 16 nt, Human
gagaggccuucuggga

SEQ ID NO: 156227 - RNA, 24 nt, Human
gagaggcgacggaggcggacucug

SEQ ID NO: 156228 - RNA, 18 nt, Human
gagaggcgagcaccggga

SEQ ID NO: 156229 - RNA, 32 nt, Human
gagaggcgaggcugagcgaaagaaggaaggac

SEQ ID NO: 156230 - RNA, 31 nt, Human
gagaggcgcagcucugucucacuggaaggca

SEQ ID NO: 156231 - RNA, 32 nt, Human
gagaggcgcgcugaggaugagagggcacaggg

SEQ ID NO: 156232 - RNA, 32 nt, Human
gagaggcgcggacgcugagcgagcccggugcc

SEQ ID NO: 156233 - RNA, 22 nt, Human
gagaggcgcuuggcugggcucu

SEQ ID NO: 156234 - RNA, 32 nt, Human
gagaggcggagaacuccuuccccaaaucuuuu

SEQ ID NO: 156235 - RNA, 32 nt, Human
gagaggcggagguugcagugagccaaaauugc

SEQ ID NO: 156236 - RNA, 32 nt, Human
gagaggcgugagcacccuaucucagcugcuau

SEQ ID NO: 156237 - RNA, 32 nt, Human
gagaggcguucugcagccgggagggagccgcc

SEQ ID NO: 156238 - RNA, 32 nt, Human
gagaggcucaggcagaggauugcuugaggcca

SEQ ID NO: 156239 - RNA, 32 nt, Human
gagaggcucugacguccguguuuccaugacgu

SEQ ID NO: 156240 - RNA, 32 nt, Human
gagaggcucuguuuccagccaguuauuuucuc

SEQ ID NO: 156241 - RNA, 32 nt, Human
gagaggcucuucugggggccaggcugggacug

SEQ ID NO: 156242 - RNA, 32 nt, Human
gagaggcucuugugguuaacugauaauauuga

SEQ ID NO: 156243 - RNA, 32 nt, Human
gagaggcugagaaaucauccccugaauaacuu

SEQ ID NO: 156244 - RNA, 32 nt, Human
gagaggcugagcgggguggaucauuugaggcc

SEQ ID NO: 156245 - RNA, 32 nt, Human
gagaggcugagggagggagguggagaaggacg

SEQ ID NO: 156246 - RNA, 32 nt, Human
gagaggcugagguugcgccacuacacuccagc

SEQ ID NO: 156247 - RNA, 32 nt, Human
gagaggcugagugucaccaagguccaaacucc

SEQ ID NO: 156248 - RNA, 32 nt, Human
gagaggcugcagccacagcacccuacugcccu

SEQ ID NO: 156249 - RNA, 32 nt, Human
gagaggcugcaggagaaaccagcucugcugac

SEQ ID NO: 156250 - RNA, 32 nt, Human
gagaggcugcaugcgugccugaggucacacag

SEQ ID NO: 156251 - RNA, 32 nt, Human
gagaggcugcucccuccccuuuuuccugccca

SEQ ID NO: 156252 - RNA, 32 nt, Human
gagaggcuggcauugguggagccacccacugc

SEQ ID NO: 156253 - RNA, 32 nt, Human
gagaggcuggcgacuggagcaggauccagggg

SEQ ID NO: 156254 - RNA, 32 nt, Human
gagaggcugggaauggaggggcagagccagga

SEQ ID NO: 156255 - RNA, 32 nt, Human
gagaggcugggcaggggcugauggggcugggu

SEQ ID NO: 156256 - RNA, 32 nt, Human
gagaggcugggcggcugccggugacagacugu

SEQ ID NO: 156257 - RNA, 32 nt, Human
gagaggcugucugagcagggagguugggaccc

SEQ ID NO: 156258 - RNA, 32 nt, Human
gagaggcuguggcagcaggagacucugcggga

SEQ ID NO: 156259 - RNA, 32 nt, Human
gagaggcuguggcagcaggagacucuguggga

SEQ ID NO: 156260 - RNA, 32 nt, Human
gagaggcuguggcagcaguagacucugcagga

SEQ ID NO: 156261 - RNA, 32 nt, Human
gagaggcuucauccaucccacccggucgucgc

SEQ ID NO: 156262 - RNA, 32 nt, Human
gagaggcuugcugcggacucaggcuggcgaau

SEQ ID NO: 156263 - RNA, 32 nt, Human
gagaggcuugggccucaguuucccucugugaa

SEQ ID NO: 156264 - RNA, 32 nt, Human
gagaggcuuucagaguggcuggaaaaggcucu

SEQ ID NO: 156265 - RNA, 32 nt, Human
gagagggaaaagcacaaugcaagaaccuaacu

SEQ ID NO: 156266 - RNA, 32 nt, Human
gagagggaaaauccuaagacagaggaacucca

SEQ ID NO: 156267 - RNA, 32 nt, Human
gagagggaaagacgaggccgagagggacccug

SEQ ID NO: 156268 - RNA, 32 nt, Human
gagagggaaagccagagugugaugggccugcc

SEQ ID NO: 156269 - RNA, 32 nt, Human
gagagggaacacaaguugaagaugguuuggga

SEQ ID NO: 156270 - RNA, 32 nt, Human
gagagggaacccaggaauugugagguuagcag

SEQ ID NO: 156271 - RNA, 22 nt, Human
gagagggaacggggacaggagc

SEQ ID NO: 156272 - RNA, 32 nt, Human
gagagggaagagaaagcacagagcagagaagc

SEQ ID NO: 156273 - RNA, 32 nt, Human
gagagggaagugcagacauaaagaggugaauu

SEQ ID NO: 156274 - RNA, 20 nt, Human
gagagggaaugugcaggaac

SEQ ID NO: 156275 - RNA, 32 nt, Human
gagagggacaaaccagugagugucuccgaguu

SEQ ID NO: 156276 - RNA, 32 nt, Human
gagagggacuucagagaguuaagcaguucagu

SEQ ID NO: 156277 - RNA, 32 nt, Human
gagagggagaaaccaccagacacuaucgguca

SEQ ID NO: 156278 - RNA, 32 nt, Human
gagagggagacagggccagacauguucuagca

SEQ ID NO: 156279 - RNA, 31 nt, Human
gagagggagagcuucuuuagguuccugguaa

SEQ ID NO: 156280 - RNA, 32 nt, Human
gagagggagagggauccuggcccagcugacuu

SEQ ID NO: 156281 - RNA, 32 nt, Human
gagagggagagggccuggguaggagcugggag

SEQ ID NO: 156282 - RNA, 32 nt, Human
gagagggagaggggacccgaggcugaggcaua

SEQ ID NO: 156283 - RNA, 32 nt, Human
gagagggagagggggcugaggagguagugcug

SEQ ID NO: 156284 - RNA, 32 nt, Human
gagagggagcaccuguaacagcagaacuacug

SEQ ID NO: 156285 - RNA, 32 nt, Human
gagagggagcagcagguaacugcgcaaccccu

SEQ ID NO: 156286 - RNA, 32 nt, Human
gagagggagccugucgucucccagggaauaaa

SEQ ID NO: 156287 - RNA, 19 nt, Human
gagagggagcgcccaccaa

SEQ ID NO: 156288 - RNA, 32 nt, Human
gagagggagcgcgagagagggagggaggaggg

SEQ ID NO: 156289 - RNA, 32 nt, Human
gagagggagcugcaccagccucucacaugagc

SEQ ID NO: 156290 - RNA, 32 nt, Human
gagagggagcuggggcgcauggggaagcaggu

SEQ ID NO: 156291 - RNA, 21 nt, Human
gagagggagcuuggagaacuc

SEQ ID NO: 156292 - RNA, 32 nt, Human
gagagggaggaagaggauggcagggccacgcc

SEQ ID NO: 156293 - RNA, 32 nt, Human
gagagggaggcagaagaggaagucagagcgau

SEQ ID NO: 156294 - RNA, 32 nt, Human
gagagggagggagcgagagggagagcaaaaga

SEQ ID NO: 156295 - RNA, 32 nt, Human
gagagggagggcaggaaggaaaagaaaggacu

SEQ ID NO: 156296 - RNA, 32 nt, Human
gagagggagggcggagggcggaggggcggcgg

SEQ ID NO: 156297 - RNA, 32 nt, Human
gagagggaggggcaacagagguccaggguuug

SEQ ID NO: 156298 - RNA, 32 nt, Human
gagagggaguuucacucuuguugcccaggcug

SEQ ID NO: 156299 - RNA, 32 nt, Human
gagagggaugguggggaagggguggagcuggg

SEQ ID NO: 156300 - RNA, 32 nt, Human
gagagggcacgaggcccugccugccccgggcg

SEQ ID NO: 156301 - RNA, 32 nt, Human
gagagggcacugaagaccugaaucuacacuag

SEQ ID NO: 156302 - RNA, 22 nt, Human
gagagggcaggaaggaggcaga

SEQ ID NO: 156303 - RNA, 32 nt, Human
gagagggcaggaagggacaggagcggagcagg

SEQ ID NO: 156304 - RNA, 32 nt, Human
gagagggcagugccauguuccucuccauccua

SEQ ID NO: 156305 - RNA, 32 nt, Human
gagagggcaguguggagggaaguugcuagaaa

SEQ ID NO: 156306 - RNA, 32 nt, Human
gagagggccccgggagccggggguggguacug

SEQ ID NO: 156307 - RNA, 18 nt, Human
gagagggcccugauucca

SEQ ID NO: 156308 - RNA, 32 nt, Human
gagagggccuauggcugcuuucacguuacaau

SEQ ID NO: 156309 - RNA, 21 nt, Human
gagagggccuggcccuggggu

SEQ ID NO: 156310 - RNA, 32 nt, Human
gagagggccugggagcacaaugcugagccccu

SEQ ID NO: 156311 - RNA, 32 nt, Human
gagagggccuggguaggagcugggaggaagau

SEQ ID NO: 156312 - RNA, 32 nt, Human
gagagggccugugcuccacacagccgugguuu

SEQ ID NO: 156313 - RNA, 32 nt, Human
gagagggccuuggcaccucuugcauccaggca

SEQ ID NO: 156314 - RNA, 32 nt, Human
gagagggcgagagagagcgggcgagagugggc

SEQ ID NO: 156315 - RNA, 32 nt, Human
gagagggcggcaaugacacugcaccucuccuu

SEQ ID NO: 156316 - RNA, 32 nt, Human
gagagggcugcagccagggcccugccagccuc

SEQ ID NO: 156317 - RNA, 32 nt, Human
gagagggcugggcggggaggagcugcuacugc

SEQ ID NO: 156318 - RNA, 32 nt, Human
gagagggcuuccuucucacccuucucuccaua

SEQ ID NO: 156319 - RNA, 32 nt, Human
gagaggggaaggaucagggggccaggccagca

SEQ ID NO: 156320 - RNA, 32 nt, Human
gagaggggacacaggcaugggccuggcacuau

SEQ ID NO: 156321 - RNA, 32 nt, Human
gagaggggaccaagccuggccugggggugggg

SEQ ID NO: 156322 - RNA, 32 nt, Human
gagaggggaccccagacugggcccagaggcug

SEQ ID NO: 156323 - RNA, 18 nt, Human
gagaggggacccggcaga

SEQ ID NO: 156324 - RNA, 32 nt, Human
gagaggggacucuggacgugccagggucagau

SEQ ID NO: 156325 - RNA, 32 nt, Human
gagaggggacuuccagagucaaugaacgucac

SEQ ID NO: 156326 - RNA, 32 nt, Human
gagaggggagagagacuggagcuggcaaggac

SEQ ID NO: 156327 - RNA, 32 nt, Human
gagaggggaggaacacaccucgcucucuccug

SEQ ID NO: 156328 - RNA, 32 nt, Human
gagaggggaggcaaagcugaagagagucaagg

SEQ ID NO: 156329 - RNA, 32 nt, Human
gagaggggagguggaguuggaaaugugggugu

SEQ ID NO: 156330 - RNA, 31 nt, Human
gagaggggaguggaaagaggaaggggugaag

SEQ ID NO: 156331 - RNA, 32 nt, Human
gagaggggauucacaaggugaagaacuggaac

SEQ ID NO: 156332 - RNA, 32 nt, Human
gagaggggcaggcaggaaagaguggggauccu

SEQ ID NO: 156333 - RNA, 21 nt, Human
gagaggggcgggaccuggaga

SEQ ID NO: 156334 - RNA, 19 nt, Human
gagaggggcgggcaggaac

SEQ ID NO: 156335 - RNA, 32 nt, Human
gagagggggaaagagcugcgggaaaagccggg

SEQ ID NO: 156336 - RNA, 32 nt, Human
gagagggggagagguuucuccaugcuacucuc

SEQ ID NO: 156337 - RNA, 32 nt, Human
gagagggggcuucaccuucccuuucguuucac

SEQ ID NO: 156338 - RNA, 32 nt, Human
gagaggggguagcuagccugagagggaacccu

SEQ ID NO: 156339 - RNA, 32 nt, Human
gagagggggugagagagggcaggcggggacug

SEQ ID NO: 156340 - RNA, 22 nt, Human
gagaggggguuucaccacguug

SEQ ID NO: 156341 - RNA, 23 nt, Human
gagaggggguuucaccacguugg

SEQ ID NO: 156342 - RNA, 22 nt, Human
gagaggggguuucaccauguug

SEQ ID NO: 156343 - RNA, 23 nt, Human
gagaggggguuucaccauguugg

SEQ ID NO: 156344 - RNA, 32 nt, Human
gagagggguaccagggacaaacccuagacaga

SEQ ID NO: 156345 - RNA, 32 nt, Human
gagagggguaggcagaguggugaggcuuuugc

SEQ ID NO: 156346 - RNA, 32 nt, Human
gagagggguauacacagggaggccaggcagcc

SEQ ID NO: 156347 - RNA, 32 nt, Human
gagaggggucacggcugcggaagaggagguuc

SEQ ID NO: 156348 - RNA, 32 nt, Human
gagaggggugaaagaggagaccaauggcaguu

SEQ ID NO: 156349 - RNA, 32 nt, Human
gagaggggugcugggccuuggaccuucucccu

SEQ ID NO: 156350 - RNA, 32 nt, Human
gagagggguggagguggcaggcagggguucuc

SEQ ID NO: 156351 - RNA, 32 nt, Human
gagagggguggcggaggguagagagagaaaga

SEQ ID NO: 156352 - RNA, 32 nt, Human
gagagggugaagcggagcagcccgaggcgggg

SEQ ID NO: 156353 - RNA, 32 nt, Human
gagagggugaggaagaaagagaggaauacuaa

SEQ ID NO: 156354 - RNA, 32 nt, Human
gagagggugcuaagaggaaggaugaagggcuu

SEQ ID NO: 156355 - RNA, 32 nt, Human
gagaggguggcgaccagcuguucuccauaugc

SEQ ID NO: 156356 - RNA, 32 nt, Human
gagaggguggguggcagaggggagcagagcca

SEQ ID NO: 156357 - RNA, 32 nt, Human
gagagguaaaaauacagauauucugggagagu

SEQ ID NO: 156358 - RNA, 32 nt, Human
gagagguacagguuggguucucugccuaccau

SEQ ID NO: 156359 - RNA, 32 nt, Human
gagagguagcaacuagguaaacuccuuauaaa

SEQ ID NO: 156360 - RNA, 32 nt, Human
gagagguaggaggcacguucuuggucacuguu

SEQ ID NO: 156361 - RNA, 32 nt, Human
gagagguaggguggaugacccaggaaggccgc

SEQ ID NO: 156362 - RNA, 32 nt, Human
gagagguauagagagagcagguuccauagcuc

SEQ ID NO: 156363 - RNA, 32 nt, Human
gagaggucacugggccuguuuucucccuccug

SEQ ID NO: 156364 - RNA, 17 nt, Human
gagaggucacuuuggga

SEQ ID NO: 156365 - RNA, 32 nt, Human
gagaggucagcgugagccccuugucucacacc

SEQ ID NO: 156366 - RNA, 32 nt, Human
gagaggucaggggucagcaggagugaggcugg

SEQ ID NO: 156367 - RNA, 32 nt, Human
gagaggucauucuuuuugguccaacucuugcu

SEQ ID NO: 156368 - RNA, 19 nt, Human
gagaggucccggcugggag

SEQ ID NO: 156369 - RNA, 32 nt, Human
gagaggucccggcugggagugacagggugcuu

SEQ ID NO: 156370 - RNA, 32 nt, Human
gagaggucgccaaagccugcagccuggccugg

SEQ ID NO: 156371 - RNA, 32 nt, Human
gagaggucugguguguuccuagaaucucaccu

SEQ ID NO: 156372 - RNA, 32 nt, Human
gagaggucuugggguucaaggcuguuucuugg

SEQ ID NO: 156373 - RNA, 32 nt, Human
gagaggugagcagcaggggagcgggcacaguc

SEQ ID NO: 156374 - RNA, 32 nt, Human
gagaggugagggugaccauauccuggacugug

SEQ ID NO: 156375 - RNA, 32 nt, Human
gagaggugcaucuucuggcucacuuucuucuu

SEQ ID NO: 156376 - RNA, 18 nt, Human
gagaggugcugccggagg

SEQ ID NO: 156377 - RNA, 32 nt, Human
gagagguggagguugcagugagccaaaauccc

SEQ ID NO: 156378 - RNA, 19 nt, Human
gagagguggcuccucggcc

SEQ ID NO: 156379 - RNA, 32 nt, Human
gagagguggcugaaaugugaugaaaagcaaua

SEQ ID NO: 156380 - RNA, 32 nt, Human
gagaggugggaggaaggacaaggguggugcau

SEQ ID NO: 156381 - RNA, 32 nt, Human
gagagguggggccccugcugggguagagcugg

SEQ ID NO: 156382 - RNA, 32 nt, Human
gagaggugggggaagggccaggagugccccag

SEQ ID NO: 156383 - RNA, 18 nt, Human
gagaggugggguggggug

SEQ ID NO: 156384 - RNA, 31 nt, Human
gagaggugggugggagggugggagggugggg

SEQ ID NO: 156385 - RNA, 32 nt, Human
gagagguguuuccuuggccuuccagaaggccc

SEQ ID NO: 156386 - RNA, 32 nt, Human
gagagguuaagcaauuugccuagguucacaca

SEQ ID NO: 156387 - RNA, 32 nt, Human
gagagguuaggggucggcagaggcggagcugg

SEQ ID NO: 156388 - RNA, 32 nt, Human
gagagguuauucacaaccucaccaaacuagua

SEQ ID NO: 156389 - RNA, 32 nt, Human
gagagguucaggagucaggucuucugccuucu

SEQ ID NO: 156390 - RNA, 32 nt, Human
gagagguugccugguggcccugagagagccau

SEQ ID NO: 156391 - RNA, 32 nt, Human
gagagguuucaguugaucguagagagggacgu

SEQ ID NO: 156392 - RNA, 32 nt, Human
gagaguaaaguuuugaagacucagggauagcu

SEQ ID NO: 156393 - RNA, 32 nt, Human
gagaguaagccuuguguuagucagaacucugu

SEQ ID NO: 156394 - RNA, 32 nt, Human
gagaguaauagaauugggagggcagagacuua

SEQ ID NO: 156395 - RNA, 32 nt, Human
gagaguaauuuuaccccucuacguaccuaaag

SEQ ID NO: 156396 - RNA, 18 nt, Human
gagaguacagacugcaga

SEQ ID NO: 156397 - RNA, 32 nt, Human
gagaguacagugagccaagaucgcgccacugc

SEQ ID NO: 156398 - RNA, 32 nt, Human
gagaguagaagagaagggagcaacuuauccuu

SEQ ID NO: 156399 - RNA, 23 nt, Human
gagaguagaggauacaagugaug

SEQ ID NO: 156400 - RNA, 32 nt, Human
gagaguagaugcuugcucuugggaaacggaau

SEQ ID NO: 156401 - RNA, 32 nt, Human
gagaguagcgugaacccgggaggcagagcuug

SEQ ID NO: 156402 - RNA, 32 nt, Human
gagaguaggaaagaguggggguacaugcugga

SEQ ID NO: 156403 - RNA, 22 nt, Human
gagaguaucccacccacuucac

SEQ ID NO: 156404 - RNA, 32 nt, Human
gagaguauugauuucaaauaggaaguugguag

SEQ ID NO: 156405 - RNA, 32 nt, Human
gagaguauuugagauuggccaagcagaacuau

SEQ ID NO: 156406 - RNA, 32 nt, Human
gagagucaagagagcauugguuugggagcuuu

SEQ ID NO: 156407 - RNA, 32 nt, Human
gagagucaaggcggaggucgcgguaagccgag

SEQ ID NO: 156408 - RNA, 32 nt, Human
gagagucacagaaaggccagagggucucagga

SEQ ID NO: 156409 - RNA, 20 nt, Human
gagagucacagacaagacag

SEQ ID NO: 156410 - RNA, 32 nt, Human
gagagucaccucaggcucaggauucugaacca

SEQ ID NO: 156411 - RNA, 22 nt, Human
gagagucagagacagagacaga

SEQ ID NO: 156412 - RNA, 32 nt, Human
gagagucagggaaagagaggagacugucccag

SEQ ID NO: 156413 - RNA, 32 nt, Human
gagaguccaagaccagccuggccaacauggug

SEQ ID NO: 156414 - RNA, 32 nt, Human
gagaguccagaagucccugaaccccaaacugu

SEQ ID NO: 156415 - RNA, 32 nt, Human
gagagucccacauuccagggcacaugggaacu

SEQ ID NO: 156416 - RNA, 32 nt, Human
gagaguccccagcuagggaccugcacguggac

SEQ ID NO: 156417 - RNA, 32 nt, Human
gagaguccuccaggcaggguggcuggugccca

SEQ ID NO: 156418 - RNA, 32 nt, Human
gagaguccugcugcccuccagccgggcuccuc

SEQ ID NO: 156419 - RNA, 32 nt, Human
gagaguccuuuaugggcuucagaaggaaggaa

SEQ ID NO: 156420 - RNA, 32 nt, Human
gagagucggggcuccagccaggagcgcuccag

SEQ ID NO: 156421 - RNA, 32 nt, Human
gagagucgggugggaaggaagcagggaagaga

SEQ ID NO: 156422 - RNA, 32 nt, Human
gagagucgugccgugcagaacccagcauguca

SEQ ID NO: 156423 - RNA, 21 nt, Human
gagagucuagucacugagaga

SEQ ID NO: 156424 - RNA, 32 nt, Human
gagagucugagucuugcccaaacauucuuucu

SEQ ID NO: 156425 - RNA, 32 nt, Human
gagagugaaagaaaggaggaaagucugccacu

SEQ ID NO: 156426 - RNA, 32 nt, Human
gagagugaaggaaguugaugcacagaauuuac

SEQ ID NO: 156427 - RNA, 19 nt, Human
gagagugaaggccugcagg

SEQ ID NO: 156428 - RNA, 32 nt, Human
gagagugaaggcugccaaugucagcuuuggag

SEQ ID NO: 156429 - RNA, 24 nt, Human
gagagugaagugaagagaggcaaa

SEQ ID NO: 156430 - RNA, 32 nt, Human
gagagugacagagaauccagaauagcuuaugg

SEQ ID NO: 156431 - RNA, 22 nt, Human
gagagugaccguccugcaggug

SEQ ID NO: 156432 - RNA, 32 nt, Human
gagagugacgugaacccgagagguagagcuug

SEQ ID NO: 156433 - RNA, 32 nt, Human
gagagugagagaaaggcuggaagacgagaccu

SEQ ID NO: 156434 - RNA, 32 nt, Human
gagagugagagagacauccaggcuuugccgca

SEQ ID NO: 156435 - RNA, 32 nt, Human
gagagugagcagcuccacgcgggacugugcac

SEQ ID NO: 156436 - RNA, 32 nt, Human
gagagugagcaugagcucacuccaucacucga

SEQ ID NO: 156437 - RNA, 20 nt, Human
gagagugagguaguggcgag

SEQ ID NO: 156438 - RNA, 32 nt, Human
gagagugagguguccagccugcaaagcuauuc

SEQ ID NO: 156439 - RNA, 32 nt, Human
gagagugaugauucugugaauauugcugagaa

SEQ ID NO: 156440 - RNA, 32 nt, Human
gagagugcaccauugcacuccagccugggcaa

SEQ ID NO: 156441 - RNA, 32 nt, Human
gagagugcacugcucccugggguucucuacag

SEQ ID NO: 156442 - RNA, 32 nt, Human
gagagugcagaggcuucccccacauuucaggc

SEQ ID NO: 156443 - RNA, 32 nt, Human
gagagugcagaugcaggaaggcccggccugcc

SEQ ID NO: 156444 - RNA, 32 nt, Human
gagagugcagcucaguucgcacacaacagcac

SEQ ID NO: 156445 - RNA, 32 nt, Human
gagagugcagggcgcuguguccagccggggga

SEQ ID NO: 156446 - RNA, 32 nt, Human
gagagugcagugaugggagcacagaccagggu

SEQ ID NO: 156447 - RNA, 32 nt, Human
gagagugccccacugcacuccagccuggguga

SEQ ID NO: 156448 - RNA, 32 nt, Human
gagagugccugggacaggacugugaccuggug

SEQ ID NO: 156449 - RNA, 32 nt, Human
gagagugcgagugcaccaugcucacuguugcu

SEQ ID NO: 156450 - RNA, 32 nt, Human
gagagugcgccacuucacuccagccugggcaa

SEQ ID NO: 156451 - RNA, 32 nt, Human
gagagugcuggcauacuaugugaagcuacuau

SEQ ID NO: 156452 - RNA, 32 nt, Human
gagaguggacugucuucucucccuucacaaaa

SEQ ID NO: 156453 - RNA, 32 nt, Human
gagaguggagcugcuuaguggaagauguaagu

SEQ ID NO: 156454 - RNA, 32 nt, Human
gagaguggaggccaggcugggguggggugugg

SEQ ID NO: 156455 - RNA, 32 nt, Human
gagaguggagugaggccagcaugcaggaagga

SEQ ID NO: 156456 - RNA, 32 nt, Human
gagaguggcaggaagcaagcauguuugcugug

SEQ ID NO: 156457 - RNA, 32 nt, Human
gagaguggcauuaucccuccuaggcagagugc

SEQ ID NO: 156458 - RNA, 32 nt, Human
gagaguggcuggcaauggcugcucucaauccc

SEQ ID NO: 156459 - RNA, 32 nt, Human
gagaguggcuucccauggaguuuggaggagga

SEQ ID NO: 156460 - RNA, 32 nt, Human
gagagugggaggcagagugugauggggaggag

SEQ ID NO: 156461 - RNA, 32 nt, Human
gagagugggcugggaugugcauccugcucccu

SEQ ID NO: 156462 - RNA, 32 nt, Human
gagagugggcugggaugugcauccugcuuccc

SEQ ID NO: 156463 - RNA, 32 nt, Human
gagaguggguuguggggucauguagggguggg

SEQ ID NO: 156464 - RNA, 23 nt, Human
gagaguggguuucacuauguugg

SEQ ID NO: 156465 - RNA, 32 nt, Human
gagaguggugacuaaggcugagcacuaccuau

SEQ ID NO: 156466 - RNA, 32 nt, Human
gagaguggugugaacccgggaggcagagcuug

SEQ ID NO: 156467 - RNA, 32 nt, Human
gagagugguuccugcuguuuauucucugguca

SEQ ID NO: 156468 - RNA, 32 nt, Human
gagaguguaaggaacauggcugugcuguagcc

SEQ ID NO: 156469 - RNA, 32 nt, Human
gagaguguagaagggaaggcuucucaggagga

SEQ ID NO: 156470 - RNA, 32 nt, Human
gagagugucuucaagcugaaugaagcccagcc

SEQ ID NO: 156471 - RNA, 32 nt, Human
gagagugucuucaugccaaccacagccuguuu

SEQ ID NO: 156472 - RNA, 32 nt, Human
gagagugugcuggagcagauggggcacacaga

SEQ ID NO: 156473 - RNA, 32 nt, Human
gagaguuagaccuccagacgucagccucccuc

SEQ ID NO: 156474 - RNA, 32 nt, Human
gagaguuagagagagacaaagagagagaguua

SEQ ID NO: 156475 - RNA, 32 nt, Human
gagaguucaagaccagccuggccaacauggag

SEQ ID NO: 156476 - RNA, 25 nt, Human
gagaguucaggcugcaauaagcugu

SEQ ID NO: 156477 - RNA, 32 nt, Human
gagaguucccauuccuccacauccuuaccaau

SEQ ID NO: 156478 - RNA, 32 nt, Human
gagaguuccuggcucuggaccuuggagggacc

SEQ ID NO: 156479 - RNA, 32 nt, Human
gagaguucuggcuaagauuuuguuugcuugug

SEQ ID NO: 156480 - RNA, 32 nt, Human
gagaguucuguauuuuguuguacaaagacaac

SEQ ID NO: 156481 - RNA, 32 nt, Human
gagaguucuuucacccccucuucuuucuccaa

SEQ ID NO: 156482 - RNA, 32 nt, Human
gagaguugccccacccuaccugccuuuuauag

SEQ ID NO: 156483 - RNA, 32 nt, Human
gagaguugcucugggaguugggguaccacccc

SEQ ID NO: 156484 - RNA, 32 nt, Human
gagaguugcuugaacccaggaggcggagauug

SEQ ID NO: 156485 - RNA, 32 nt, Human
gagaguuggcugccacagccucugccaagcuu

SEQ ID NO: 156486 - RNA, 32 nt, Human
gagaguuuacucaacuaccagaccauggugug

SEQ ID NO: 156487 - RNA, 32 nt, Human
gagaguuuauaucgugccuuuaggcagaaaag

SEQ ID NO: 156488 - RNA, 32 nt, Human
gagaguuuccaucccaacauaauggacuuugg

SEQ ID NO: 156489 - RNA, 21 nt, Human
gagaguuucccaguuuccuga

SEQ ID NO: 156490 - RNA, 32 nt, Human
gagaguuugagaccagccuggccaacaugaug

SEQ ID NO: 156491 - RNA, 32 nt, Human
gagaguuugagaccagcuugaccaacauggag

SEQ ID NO: 156492 - RNA, 32 nt, Human
gagaguuugccacuccccuaaacuccaggauu

SEQ ID NO: 156493 - RNA, 32 nt, Human
gagaguuugccgaccuaacucggguugaaacu

SEQ ID NO: 156494 - RNA, 32 nt, Human
gagaguuugcggccacacacaacacgcaagca

SEQ ID NO: 156495 - RNA, 32 nt, Human
gagaguuuguuuucucuuucucugcucuuugc

SEQ ID NO: 156496 - RNA, 32 nt, Human
gagaguuuucgcucuuaaauccuggggguuuc

SEQ ID NO: 156497 - RNA, 32 nt, Human
gagauaaaacagacuaaguacacagaggaguu

SEQ ID NO: 156498 - RNA, 32 nt, Human
gagauaaagagagagggcaaagaggcagcaag

SEQ ID NO: 156499 - RNA, 32 nt, Human
gagauaaaggucccucuccacccucuacuaac

SEQ ID NO: 156500 - RNA, 21 nt, Human
gagauaaauguacaugaugag

SEQ ID NO: 156501 - RNA, 32 nt, Human
gagauaacacuacugcauuccagccuggguga

SEQ ID NO: 156502 - RNA, 32 nt, Human
gagauaacagccagggaggacaagcagggcug

SEQ ID NO: 156503 - RNA, 32 nt, Human
gagauaaccuuaaacucugaccaacagugagc

SEQ ID NO: 156504 - RNA, 32 nt, Human
gagauaaggcauuuuccuugugcagccuuuac

SEQ ID NO: 156505 - RNA, 32 nt, Human
gagauaaggucaugggagaguggguggggaca

SEQ ID NO: 156506 - RNA, 32 nt, Human
gagauaaguauaucagaugacacugguggcuc

SEQ ID NO: 156507 - RNA, 32 nt, Human
gagauaauaaucaguucuuuacaaccgauggu

SEQ ID NO: 156508 - RNA, 32 nt, Human
gagauaauacagugacuuuaccucacaaauca

SEQ ID NO: 156509 - RNA, 32 nt, Human
gagauaaucuccaggaugccugugaagaaaga

SEQ ID NO: 156510 - RNA, 32 nt, Human
gagauaaugcagacugucauggguggggaaug

SEQ ID NO: 156511 - RNA, 32 nt, Human
gagauaaugccacugcacuccagccugccugg

SEQ ID NO: 156512 - RNA, 32 nt, Human
gagauaauuaguugcuuccuccuucacacugu

SEQ ID NO: 156513 - RNA, 32 nt, Human
gagauaauuauuuaucuugcuuuucauagugu

SEQ ID NO: 156514 - RNA, 32 nt, Human
gagauaauucugaucaaucauuuuggaggcuu

SEQ ID NO: 156515 - RNA, 32 nt, Human
gagauacagaauuggagaagacuugcaaaaca

SEQ ID NO: 156516 - RNA, 32 nt, Human
gagauacagucauaggggguugcagugagguu

SEQ ID NO: 156517 - RNA, 24 nt, Human
gagauacauacuaugaaaugaaga

SEQ ID NO: 156518 - RNA, 21 nt, Human
gagauacauaggaugugaaaa

SEQ ID NO: 156519 - RNA, 18 nt, Human
gagauaccaauguacugg

SEQ ID NO: 156520 - RNA, 32 nt, Human
gagauaccagagacucugaaacuauagaauaa

SEQ ID NO: 156521 - RNA, 32 nt, Human
gagauaccgggacgagcgggcccagggcugag

SEQ ID NO: 156522 - RNA, 32 nt, Human
gagauaccuaucuugaauucaaagaauguuuu

SEQ ID NO: 156523 - RNA, 32 nt, Human
gagauacgagaagcaucacuuccuucagacag

SEQ ID NO: 156524 - RNA, 32 nt, Human
gagauacuggaaggagccucagauugcucaca

SEQ ID NO: 156525 - RNA, 24 nt, Human
gagauacuggagcugaccauccug

SEQ ID NO: 156526 - RNA, 32 nt, Human
gagauacuguguauuucuacaacucuuuggca

SEQ ID NO: 156527 - RNA, 32 nt, Human
gagauagaaggaccagccacuuugaacgccuu

SEQ ID NO: 156528 - RNA, 32 nt, Human
gagauagagcacagcaaagaucugccagcccc

SEQ ID NO: 156529 - RNA, 20 nt, Human
gagauagaggaggaggccga

SEQ ID NO: 156530 - RNA, 32 nt, Human
gagauagaggaggcugugaaugcugagaccag

SEQ ID NO: 156531 - RNA, 19 nt, Human
gagauagaggcugaggcug

SEQ ID NO: 156532 - RNA, 21 nt, Human
gagauagagguugcaaugagc

SEQ ID NO: 156533 - RNA, 32 nt, Human
gagauagauguggaaugaccugagaggcaccu

SEQ ID NO: 156534 - RNA, 32 nt, Human
gagauagcaccacugcacuucuaguugacaga

SEQ ID NO: 156535 - RNA, 32 nt, Human
gagauagcaccacugcaugcaagccugggcaa

SEQ ID NO: 156536 - RNA, 32 nt, Human
gagauagcaccauugcacuccagccugggcga

SEQ ID NO: 156537 - RNA, 32 nt, Human
gagauagccuguggcccuguccugccaugcaa

SEQ ID NO: 156538 - RNA, 32 nt, Human
gagauagcgccacugcaguccggccuggguga

SEQ ID NO: 156539 - RNA, 32 nt, Human
gagauagcgccauugcacuccagccugagcga

SEQ ID NO: 156540 - RNA, 32 nt, Human
gagauagcgccauugcacuccagccugggcaa

SEQ ID NO: 156541 - RNA, 32 nt, Human
gagauagcgccauugcacuccagccugggcga

SEQ ID NO: 156542 - RNA, 32 nt, Human
gagauagcggcacugcacuccagccuggguga

SEQ ID NO: 156543 - RNA, 32 nt, Human
gagauagcggcauugcacuccagccugggcaa

SEQ ID NO: 156544 - RNA, 32 nt, Human
gagauagcuguucuccagccuuucuggaggga

SEQ ID NO: 156545 - RNA, 32 nt, Human
gagauaggcaccacuguauccuccagcuccuu

SEQ ID NO: 156546 - RNA, 23 nt, Human
gagauaggcaggcagcgcugcuc

SEQ ID NO: 156547 - RNA, 32 nt, Human
gagauaggcaucucgcuauguugccuaggcug

SEQ ID NO: 156548 - RNA, 23 nt, Human
gagauagggguuucaccguguua

SEQ ID NO: 156549 - RNA, 32 nt, Human
gagauagggugggggagcuggggaagggugca

SEQ ID NO: 156550 - RNA, 23 nt, Human
gagauaggguuucacaauguugg

SEQ ID NO: 156551 - RNA, 22 nt, Human
gagauaggguuucaccauguug

SEQ ID NO: 156552 - RNA, 23 nt, Human
gagauaggguuucaccauguugg

SEQ ID NO: 156553 - RNA, 32 nt, Human
gagauaguaccacugcacuccagccugggcga

SEQ ID NO: 156554 - RNA, 32 nt, Human
gagauagucugccuggucaaugcugagcugua

SEQ ID NO: 156555 - RNA, 32 nt, Human
gagauagugccacagcucuccagccugggcga

SEQ ID NO: 156556 - RNA, 32 nt, Human
gagauagugccacugcacuucagcuugggcaa

SEQ ID NO: 156557 - RNA, 32 nt, Human
gagauagugccacugcauuccggccugggcga

SEQ ID NO: 156558 - RNA, 32 nt, Human
gagauagugccacugugcuccagccuggauga

SEQ ID NO: 156559 - RNA, 32 nt, Human
gagauagugccauugcacuccggccugggcaa

SEQ ID NO: 156560 - RNA, 32 nt, Human
gagauagugccauuguacuccagcuugggcaa

SEQ ID NO: 156561 - RNA, 32 nt, Human
gagauagugccucugcacuccagccugcguga

SEQ ID NO: 156562 - RNA, 32 nt, Human
gagauaguuucaaagucuaaaccaccagccca

SEQ ID NO: 156563 - RNA, 32 nt, Human
gagauauaagggccugggaugcauuuauuuua

SEQ ID NO: 156564 - RNA, 32 nt, Human
gagauauauaaauggaauuaugcauucuucgu

SEQ ID NO: 156565 - RNA, 21 nt, Human
gagauauauugacacugagga

SEQ ID NO: 156566 - RNA, 32 nt, Human
gagauaucagccuggucauccaguagaacaga

SEQ ID NO: 156567 - RNA, 32 nt, Human
gagauaucauuuauguggagauccacaaccuu

SEQ ID NO: 156568 - RNA, 32 nt, Human
gagauauccugacccucugcuuccuagccuga

SEQ ID NO: 156569 - RNA, 32 nt, Human
gagauaucgccacugcacuccagccuggguga

SEQ ID NO: 156570 - RNA, 32 nt, Human
gagauaucuaagccauauuugugcacaugagc

SEQ ID NO: 156571 - RNA, 32 nt, Human
gagauaucuguaacucaaauuuuucuuaggug

SEQ ID NO: 156572 - RNA, 32 nt, Human
gagauaugaaguauuauccuuuuguucaguug

SEQ ID NO: 156573 - RNA, 32 nt, Human
gagauauggcaaagaauuguagcauccaaauu

SEQ ID NO: 156574 - RNA, 31 nt, Human
gagauauguacuucuugccuuuaaguuuuaa

SEQ ID NO: 156575 - RNA, 32 nt, Human
gagauauguucccaguuguaaauuacuguuua

SEQ ID NO: 156576 - RNA, 32 nt, Human
gagauauguuuagagaccucucagaaaaacuu

SEQ ID NO: 156577 - RNA, 32 nt, Human
gagauauuacucuuugaugaaugcauaaguuc

SEQ ID NO: 156578 - RNA, 32 nt, Human
gagauauuagguuggugcaagaguaauugcag

SEQ ID NO: 156579 - RNA, 25 nt, Human
gagauauuaugauuggaacugagag

SEQ ID NO: 156580 - RNA, 32 nt, Human
gagauauuuacaaugaaugaaaagcuaguuuu

SEQ ID NO: 156581 - RNA, 32 nt, Human
gagauauuuacuauguuaaaucuuuaaaauag

SEQ ID NO: 156582 - RNA, 32 nt, Human
gagauauuuauugccuacuauuuuaaagaugu

SEQ ID NO: 156583 - RNA, 19 nt, Human
gagauauuucaacauguua

SEQ ID NO: 156584 - RNA, 32 nt, Human
gagauauuugaggauguccagagcagaauugu

SEQ ID NO: 156585 - RNA, 32 nt, Human
gagauauuugggguggggacagugaguuugga

SEQ ID NO: 156586 - RNA, 32 nt, Human
gagaucaaagaagucagagagauuggaagcau

SEQ ID NO: 156587 - RNA, 32 nt, Human
gagaucaaagagaccucucucggggucuggau

SEQ ID NO: 156588 - RNA, 32 nt, Human
gagaucaaagagaccucucuuggggucuggau

SEQ ID NO: 156589 - RNA, 32 nt, Human
gagaucaacacacacucccacccuugggguag

SEQ ID NO: 156590 - RNA, 32 nt, Human
gagaucaagccauugcacuccagccugggcaa

SEQ ID NO: 156591 - RNA, 32 nt, Human
gagaucaagggaacaagaguguuugcaagaag

SEQ ID NO: 156592 - RNA, 32 nt, Human
gagaucaagugucugaucaagccucaguguau

SEQ ID NO: 156593 - RNA, 32 nt, Human
gagaucaaguugagacagagaagggaaguagg

SEQ ID NO: 156594 - RNA, 32 nt, Human
gagaucacacaauugcaguccagccugggcag

SEQ ID NO: 156595 - RNA, 32 nt, Human
gagaucacaccaccacuccagccugggcgaga

SEQ ID NO: 156596 - RNA, 32 nt, Human
gagaucacaccaccgcacuccacccugggaag

SEQ ID NO: 156597 - RNA, 32 nt, Human
gagaucacaccacuacacuccagccuaggcaa

SEQ ID NO: 156598 - RNA, 32 nt, Human
gagaucacaccacuacacuccagccugggcga

SEQ ID NO: 156599 - RNA, 32 nt, Human
gagaucacaccacugcaauccagccugggcga

SEQ ID NO: 156600 - RNA, 32 nt, Human
gagaucacaccacugcacuacagccucggcaa

SEQ ID NO: 156601 - RNA, 32 nt, Human
gagaucacaccacugcacucagccugggugac

SEQ ID NO: 156602 - RNA, 32 nt, Human
gagaucacaccacugcacuccaaccugggaaa

SEQ ID NO: 156603 - RNA, 32 nt, Human
gagaucacaccacugcacuccagcccagguga

SEQ ID NO: 156604 - RNA, 32 nt, Human
gagaucacaccacugcacuccagccuggcgac

SEQ ID NO: 156605 - RNA, 32 nt, Human
gagaucacaccacugcacuccagccugggaga

SEQ ID NO: 156606 - RNA, 32 nt, Human
gagaucacaccacugcacuccagccugggcaa

SEQ ID NO: 156607 - RNA, 32 nt, Human
gagaucacaccacugcacuccagccugggcga

SEQ ID NO: 156608 - RNA, 32 nt, Human
gagaucacaccacugcacuccagccugggcgg

SEQ ID NO: 156609 - RNA, 32 nt, Human
gagaucacaccacugcacuccagccuggggga

SEQ ID NO: 156610 - RNA, 32 nt, Human
gagaucacaccacugcacuccagccuggggug

SEQ ID NO: 156611 - RNA, 32 nt, Human
gagaucacaccacugcacuccagccuggguaa

SEQ ID NO: 156612 - RNA, 32 nt, Human
gagaucacaccacugcacuccagccuggguga

SEQ ID NO: 156613 - RNA, 32 nt, Human
gagaucacaccacugcacuccagccugggugg

SEQ ID NO: 156614 - RNA, 32 nt, Human
gagaucacaccacugcacuccagccuggucaa

SEQ ID NO: 156615 - RNA, 32 nt, Human
gagaucacaccacugcacuccagccuggugac

SEQ ID NO: 156616 - RNA, 32 nt, Human
gagaucacaccacugcacuccagccugugcga

SEQ ID NO: 156617 - RNA, 32 nt, Human
gagaucacaccacugcacuccagccuugguga

SEQ ID NO: 156618 - RNA, 32 nt, Human
gagaucacaccacugcacuccagucugggcac

SEQ ID NO: 156619 - RNA, 32 nt, Human
gagaucacaccacugcacuccagugugagcaa

SEQ ID NO: 156620 - RNA, 32 nt, Human
gagaucacaccacugcacuccauccagccugg

SEQ ID NO: 156621 - RNA, 32 nt, Human
gagaucacaccacugcacuccggccugggcga

SEQ ID NO: 156622 - RNA, 32 nt, Human
gagaucacaccacugcacucuagccuggguga

SEQ ID NO: 156623 - RNA, 32 nt, Human
gagaucacaccacugcauuccagccugggcac

SEQ ID NO: 156624 - RNA, 32 nt, Human
gagaucacaccacugcauuccagccuggguga

SEQ ID NO: 156625 - RNA, 32 nt, Human
gagaucacaccacugcauucccgccugggcag

SEQ ID NO: 156626 - RNA, 32 nt, Human
gagaucacaccacugcgcucuagccuggacaa

SEQ ID NO: 156627 - RNA, 32 nt, Human
gagaucacaccacuguacuccagccugaguga

SEQ ID NO: 156628 - RNA, 32 nt, Human
gagaucacaccacuguacuccagccuggauga

SEQ ID NO: 156629 - RNA, 32 nt, Human
gagaucacaccacuguacuccagccuggguga

SEQ ID NO: 156630 - RNA, 32 nt, Human
gagaucacaccacuguauuccagccuggguga

SEQ ID NO: 156631 - RNA, 32 nt, Human
gagaucacaccacugugcucuagccuggacaa

SEQ ID NO: 156632 - RNA, 32 nt, Human
gagaucacaccauugcacuccaaccugggcaa

SEQ ID NO: 156633 - RNA, 32 nt, Human
gagaucacaccauugcacuccagccugggcaa

SEQ ID NO: 156634 - RNA, 32 nt, Human
gagaucacaccauugcacuccagccugggcga

SEQ ID NO: 156635 - RNA, 32 nt, Human
gagaucacaccauugcccuccagccuggguga

SEQ ID NO: 156636 - RNA, 32 nt, Human
gagaucacacuacugcacuccagccugggcga

SEQ ID NO: 156637 - RNA, 32 nt, Human
gagaucacacuacugcacuccugcaugggcga

SEQ ID NO: 156638 - RNA, 32 nt, Human
gagaucacacuacugcauuccagccugagcaa

SEQ ID NO: 156639 - RNA, 32 nt, Human
gagaucacagaaguuuaaguacacacugucaa

SEQ ID NO: 156640 - RNA, 32 nt, Human
gagaucacaucacugcacuccauccuggguga

SEQ ID NO: 156641 - RNA, 32 nt, Human
gagaucaccccacugcauuccagccuggguga

SEQ ID NO: 156642 - RNA, 32 nt, Human
gagaucaccccacuguccuccagccugggcaa

SEQ ID NO: 156643 - RNA, 32 nt, Human
gagaucaccccauugcacuccagccuggacaa

SEQ ID NO: 156644 - RNA, 32 nt, Human
gagaucaccccauuucacuccagccugggcga

SEQ ID NO: 156645 - RNA, 32 nt, Human
gagaucaccugcugccccgcagaccccugucc

SEQ ID NO: 156646 - RNA, 32 nt, Human
gagaucacgccacagcacuccagccugggcga

SEQ ID NO: 156647 - RNA, 32 nt, Human
gagaucacgccacugcaacuccagcuugggug

SEQ ID NO: 156648 - RNA, 32 nt, Human
gagaucacgccacugcacucaagccugggcga

SEQ ID NO: 156649 - RNA, 32 nt, Human
gagaucacgccacugcacuccaaccuggguga

SEQ ID NO: 156650 - RNA, 32 nt, Human
gagaucacgccacugcacuccaacuugggcaa

SEQ ID NO: 156651 - RNA, 32 nt, Human
gagaucacgccacugcacuccagccuaggcga

SEQ ID NO: 156652 - RNA, 32 nt, Human
gagaucacgccacugcacuccagccuggauga

SEQ ID NO: 156653 - RNA, 32 nt, Human
gagaucacgccacugcacuccagccuggcgac

SEQ ID NO: 156654 - RNA, 32 nt, Human
gagaucacgccacugcacuccagccugggaga

SEQ ID NO: 156655 - RNA, 32 nt, Human
gagaucacgccacugcacuccagccugggcaa

SEQ ID NO: 156656 - RNA, 32 nt, Human
gagaucacgccacugcacuccagccugggcga

SEQ ID NO: 156657 - RNA, 32 nt, Human
gagaucacgccacugcacuccagccuggguaa

SEQ ID NO: 156658 - RNA, 32 nt, Human
gagaucacgccacugcacuccagccuggguga

SEQ ID NO: 156659 - RNA, 32 nt, Human
gagaucacgccacugcacuccagccuggucaa

SEQ ID NO: 156660 - RNA, 32 nt, Human
gagaucacgccacugcacuccagccuggugac

SEQ ID NO: 156661 - RNA, 32 nt, Human
gagaucacgccacugcacuccagccuguugac

SEQ ID NO: 156662 - RNA, 32 nt, Human
gagaucacgccacugcacuccagucuggguga

SEQ ID NO: 156663 - RNA, 32 nt, Human
gagaucacgccacugcacuccauccagccugg

SEQ ID NO: 156664 - RNA, 32 nt, Human
gagaucacgccacugcacucuagccuaggcga

SEQ ID NO: 156665 - RNA, 32 nt, Human
gagaucacgccacugcacucuagccugggaua

SEQ ID NO: 156666 - RNA, 32 nt, Human
gagaucacgccacugcacuugagccugggcga

SEQ ID NO: 156667 - RNA, 32 nt, Human
gagaucacgccacugcauuccagacugggcga

SEQ ID NO: 156668 - RNA, 32 nt, Human
gagaucacgccacugcauuccagccugggcga

SEQ ID NO: 156669 - RNA, 32 nt, Human
gagaucacgccacugcauuccagccugugcga

SEQ ID NO: 156670 - RNA, 32 nt, Human
gagaucacgccacugcccuccagccuggggag

SEQ ID NO: 156671 - RNA, 32 nt, Human
gagaucacgccacugcgcuccagccugggcga

SEQ ID NO: 156672 - RNA, 32 nt, Human
gagaucacgccacuguacuccagccugggaga

SEQ ID NO: 156673 - RNA, 32 nt, Human
gagaucacgccacuguacuucuagccuggguu

SEQ ID NO: 156674 - RNA, 32 nt, Human
gagaucacgccacugugcuccagccugggcaa

SEQ ID NO: 156675 - RNA, 32 nt, Human
gagaucacgccauuacacuccagccugggcaa

SEQ ID NO: 156676 - RNA, 32 nt, Human
gagaucacgccauugcacuccaaccuggguga

SEQ ID NO: 156677 - RNA, 32 nt, Human
gagaucacgccauugcacuccagccuaggcga

SEQ ID NO: 156678 - RNA, 32 nt, Human
gagaucacgccauugcacuccagccugggcaa

SEQ ID NO: 156679 - RNA, 32 nt, Human
gagaucacgccauugcacuccagccugggcga

SEQ ID NO: 156680 - RNA, 32 nt, Human
gagaucacgccauugcacuccagccuggguga

SEQ ID NO: 156681 - RNA, 32 nt, Human
gagaucacgccauugcacuccagccugugcga

SEQ ID NO: 156682 - RNA, 32 nt, Human
gagaucacgccauugcacuccagucugagcaa

SEQ ID NO: 156683 - RNA, 32 nt, Human
gagaucacgccauugcacuccagucugguuga

SEQ ID NO: 156684 - RNA, 32 nt, Human
gagaucacgccauuguacuccagccugggcaa

SEQ ID NO: 156685 - RNA, 32 nt, Human
gagaucacgccauuguacuccagccugggcga

SEQ ID NO: 156686 - RNA, 32 nt, Human
gagaucacgccgcugcacuccagccugagcac

SEQ ID NO: 156687 - RNA, 32 nt, Human
gagaucacgccguugcacuccagccugggcaa

SEQ ID NO: 156688 - RNA, 32 nt, Human
gagaucacgccucugcacuccagccugggcaa

SEQ ID NO: 156689 - RNA, 32 nt, Human
gagaucacgcuacugcgcuccagccugaguga

SEQ ID NO: 156690 - RNA, 32 nt, Human
gagaucacggaacgagagaugcagcuuaccag

SEQ ID NO: 156691 - RNA, 32 nt, Human
gagaucacgucacugcacuccagcuugggcaa

SEQ ID NO: 156692 - RNA, 32 nt, Human
gagaucacgucacugcacuccggccuggguga

SEQ ID NO: 156693 - RNA, 32 nt, Human
gagaucacgucauugcacuccauccugagcca

SEQ ID NO: 156694 - RNA, 32 nt, Human
gagaucacgucauugcucuccagccugggcaa

SEQ ID NO: 156695 - RNA, 32 nt, Human
gagaucacuccacugcacuccagccugggcaa

SEQ ID NO: 156696 - RNA, 32 nt, Human
gagaucagaccuuuacaagugaaggaaagcaa

SEQ ID NO: 156697 - RNA, 32 nt, Human
gagaucagccuccuggucucgaacauagcgaa

SEQ ID NO: 156698 - RNA, 32 nt, Human
gagaucagccuccugucucaucuggaagacca

SEQ ID NO: 156699 - RNA, 32 nt, Human
gagaucagccugaccaacaugaugaaaugcca

SEQ ID NO: 156700 - RNA, 32 nt, Human
gagaucagccuggacaauacggugagacccug

SEQ ID NO: 156701 - RNA, 32 nt, Human
gagaucagccuggagaacaaagugagaccccc

SEQ ID NO: 156702 - RNA, 32 nt, Human
gagaucagccuggccaacagacgugagccauu

SEQ ID NO: 156703 - RNA, 32 nt, Human
gagaucagccuggccaacagacgugagucacu

SEQ ID NO: 156704 - RNA, 32 nt, Human
gagaucagccugggaaacacagggaggccccc

SEQ ID NO: 156705 - RNA, 32 nt, Human
gagaucagccugggcaacacagggagacucau

SEQ ID NO: 156706 - RNA, 32 nt, Human
gagaucagccugggcaacauggccagaccucc

SEQ ID NO: 156707 - RNA, 32 nt, Human
gagaucagccugggcaacaugguggaacccug

SEQ ID NO: 156708 - RNA, 32 nt, Human
gagaucagccuggguaacauagcgagacccca

SEQ ID NO: 156709 - RNA, 32 nt, Human
gagaucagccuggucaacagagcgauauccua

SEQ ID NO: 156710 - RNA, 32 nt, Human
gagaucaggaaagacuuccuggccaacaugag

SEQ ID NO: 156711 - RNA, 32 nt, Human
gagaucaggaagagaaggagcagagcagagcu

SEQ ID NO: 156712 - RNA, 32 nt, Human
gagaucaggaguuggagaccagccuggccaac

SEQ ID NO: 156713 - RNA, 32 nt, Human
gagaucaggaguuugaaaccagccuggccaac

SEQ ID NO: 156714 - RNA, 32 nt, Human
gagaucaggaguuugagaacagccuggccaac

SEQ ID NO: 156715 - RNA, 32 nt, Human
gagaucaggaguuugagaccagccuggccaac

SEQ ID NO: 156716 - RNA, 32 nt, Human
gagaucaggaguuugagagcagccuggccaac

SEQ ID NO: 156717 - RNA, 32 nt, Human
gagaucaggccacugcacuccagccugaacaa

SEQ ID NO: 156718 - RNA, 32 nt, Human
gagaucaggccacugcacuccagccugggcaa

SEQ ID NO: 156719 - RNA, 32 nt, Human
gagaucaggccauugcacuccagccugggcaa

SEQ ID NO: 156720 - RNA, 32 nt, Human
gagaucagggauuggugaugacucuuaacgag

SEQ ID NO: 156721 - RNA, 32 nt, Human
gagaucaggugggcagaggcuggcagugcuga

SEQ ID NO: 156722 - RNA, 32 nt, Human
gagaucagucagaaaggcuuucugagaaaacu

SEQ ID NO: 156723 - RNA, 32 nt, Human
gagaucagugagcagaaaagcucacagaucaa

SEQ ID NO: 156724 - RNA, 32 nt, Human
gagaucauaccacugcacuccagccuggcgac

SEQ ID NO: 156725 - RNA, 32 nt, Human
gagaucauaccacuucauuccagccuggguga

SEQ ID NO: 156726 - RNA, 32 nt, Human
gagaucauaccauugcacuccagccuaggcaa

SEQ ID NO: 156727 - RNA, 32 nt, Human
gagaucauaccauugcacuccagccugggcaa

SEQ ID NO: 156728 - RNA, 32 nt, Human
gagaucaucuguccauuuuagaaccauuaauc

SEQ ID NO: 156729 - RNA, 32 nt, Human
gagaucaugacacugcacuccagccugggcaa

SEQ ID NO: 156730 - RNA, 32 nt, Human
gagaucaugccaccgcacuccagccugggcaa

SEQ ID NO: 156731 - RNA, 32 nt, Human
gagaucaugccacuacacuccagccuggcgac

SEQ ID NO: 156732 - RNA, 32 nt, Human
gagaucaugccacugaacuccagccugggcaa

SEQ ID NO: 156733 - RNA, 32 nt, Human
gagaucaugccacugcaaucuagccuggguga

SEQ ID NO: 156734 - RNA, 32 nt, Human
gagaucaugccacugcaccccagcaccuggcu

SEQ ID NO: 156735 - RNA, 32 nt, Human
gagaucaugccacugcaccccagccugggcaa

SEQ ID NO: 156736 - RNA, 32 nt, Human
gagaucaugccacugcacccuagcuugggugg

SEQ ID NO: 156737 - RNA, 32 nt, Human
gagaucaugccacugcacuagagccugggcaa

SEQ ID NO: 156738 - RNA, 32 nt, Human
gagaucaugccacugcacuccaaccugggcga

SEQ ID NO: 156739 - RNA, 32 nt, Human
gagaucaugccacugcacuccaaccuggguga

SEQ ID NO: 156740 - RNA, 32 nt, Human
gagaucaugccacugcacuccagccugaguga

SEQ ID NO: 156741 - RNA, 32 nt, Human
gagaucaugccacugcacuccagccuggacaa

SEQ ID NO: 156742 - RNA, 32 nt, Human
gagaucaugccacugcacuccagccuggauga

SEQ ID NO: 156743 - RNA, 32 nt, Human
gagaucaugccacugcacuccagccugggcaa

SEQ ID NO: 156744 - RNA, 32 nt, Human
gagaucaugccacugcacuccagccugggcag

SEQ ID NO: 156745 - RNA, 32 nt, Human
gagaucaugccacugcacuccagccugggcau

SEQ ID NO: 156746 - RNA, 32 nt, Human
gagaucaugccacugcacuccagccugggcca

SEQ ID NO: 156747 - RNA, 32 nt, Human
gagaucaugccacugcacuccagccugggcga

SEQ ID NO: 156748 - RNA, 32 nt, Human
gagaucaugccacugcacuccagccuggguga

SEQ ID NO: 156749 - RNA, 32 nt, Human
gagaucaugccacugcacuccauccugggcaa

SEQ ID NO: 156750 - RNA, 32 nt, Human
gagaucaugccacugcacuccugccuggguga

SEQ ID NO: 156751 - RNA, 32 nt, Human
gagaucaugccacugcacugcacuccagccug

SEQ ID NO: 156752 - RNA, 32 nt, Human
gagaucaugccacugcacuuuagccuggguga

SEQ ID NO: 156753 - RNA, 32 nt, Human
gagaucaugccacugcaugccagccugggcaa

SEQ ID NO: 156754 - RNA, 32 nt, Human
gagaucaugccacugcauucuagccugggcaa

SEQ ID NO: 156755 - RNA, 32 nt, Human
gagaucaugccagugcacuccagccugggcaa

SEQ ID NO: 156756 - RNA, 32 nt, Human
gagaucaugccauggcacuccauccuggguga

SEQ ID NO: 156757 - RNA, 32 nt, Human
gagaucaugccauuacacuccagccugggcga

SEQ ID NO: 156758 - RNA, 32 nt, Human
gagaucaugccauuacuccagccugggugaca

SEQ ID NO: 156759 - RNA, 32 nt, Human
gagaucaugccauugcacuccaaccuggguga

SEQ ID NO: 156760 - RNA, 32 nt, Human
gagaucaugccauugcacuccagccugaguga

SEQ ID NO: 156761 - RNA, 32 nt, Human
gagaucaugccauugcacuccagccuggacaa

SEQ ID NO: 156762 - RNA, 32 nt, Human
gagaucaugccauugcacuccagccugggcaa

SEQ ID NO: 156763 - RNA, 32 nt, Human
gagaucaugccauugcacuccagccugggcga

SEQ ID NO: 156764 - RNA, 32 nt, Human
gagaucaugccauugcacuccagccuggguga

SEQ ID NO: 156765 - RNA, 32 nt, Human
gagaucaugccauugcacuccagcuuggguga

SEQ ID NO: 156766 - RNA, 32 nt, Human
gagaucaugccauugcacuccagucugggcga

SEQ ID NO: 156767 - RNA, 32 nt, Human
gagaucaugccauugcacuccgacucugggca

SEQ ID NO: 156768 - RNA, 32 nt, Human
gagaucaugccccugcauuccagccuaggcga

SEQ ID NO: 156769 - RNA, 31 nt, Human
gagaucaugccgcugcauuccagccugggug

SEQ ID NO: 156770 - RNA, 32 nt, Human
gagaucaugccguuguacuccagcuugggcaa

SEQ ID NO: 156771 - RNA, 32 nt, Human
gagaucaugcuacugcacuccagccugggcga

SEQ ID NO: 156772 - RNA, 32 nt, Human
gagaucaugcuacugcacucuagccugagcga

SEQ ID NO: 156773 - RNA, 32 nt, Human
gagaucaugcuacugcaugccagccuggguga

SEQ ID NO: 156774 - RNA, 32 nt, Human
gagaucaugcuagugcgcuccagccugggcaa

SEQ ID NO: 156775 - RNA, 32 nt, Human
gagaucaugucacugcacuccagccuggguga

SEQ ID NO: 156776 - RNA, 32 nt, Human
gagaucaugucacugcacucuagcuugggaga

SEQ ID NO: 156777 - RNA, 32 nt, Human
gagaucaugucacuguacuccagccugggcaa

SEQ ID NO: 156778 - RNA, 32 nt, Human
gagaucauuaaaggcaaagccuguaugacgcu

SEQ ID NO: 156779 - RNA, 32 nt, Human
gagaucauuccauuacacuccagccugggcac

SEQ ID NO: 156780 - RNA, 32 nt, Human
gagaucauugcacuccagccugggcaauaaga

SEQ ID NO: 156781 - RNA, 21 nt, Human
gagauccaaaccaaggaggaa

SEQ ID NO: 156782 - RNA, 31 nt, Human
gagauccacagcuaagacgcccgggagcccc

SEQ ID NO: 156783 - RNA, 32 nt, Human
gagauccacgaggcagaggcagcaguagcgcu

SEQ ID NO: 156784 - RNA, 32 nt, Human
gagauccagccacagcacuccagccuggguga

SEQ ID NO: 156785 - RNA, 32 nt, Human
gagauccagcccuacuucuugcacugauaaug

SEQ ID NO: 156786 - RNA, 32 nt, Human
gagauccaggaaaccaaagcccugcugagcag

SEQ ID NO: 156787 - RNA, 32 nt, Human
gagauccagguuuaaaucuggcuuauuaacuc

SEQ ID NO: 156788 - RNA, 32 nt, Human
gagauccauccucccaccucagucuccugaaa

SEQ ID NO: 156789 - RNA, 32 nt, Human
gagauccauugaggcccucccagacugacgaa

SEQ ID NO: 156790 - RNA, 32 nt, Human
gagaucccaccacugcacuccagccugggcga

SEQ ID NO: 156791 - RNA, 32 nt, Human
gagaucccaccauugcacuccagccugggcaa

SEQ ID NO: 156792 - RNA, 32 nt, Human
gagaucccaggcccgagaggaugaaggcggga

SEQ ID NO: 156793 - RNA, 32 nt, Human
gagaucccaggcggugacagaguggagccaug

SEQ ID NO: 156794 - RNA, 32 nt, Human
gagaucccaguccggcuaagcuugguggagca

SEQ ID NO: 156795 - RNA, 32 nt, Human
gagaucccccgaccgcacuccagccugggcga

SEQ ID NO: 156796 - RNA, 32 nt, Human
gagauccccucauuaaaagaacagugaugaug

SEQ ID NO: 156797 - RNA, 32 nt, Human
gagaucccgccacucacuccagccuggauaaa

SEQ ID NO: 156798 - RNA, 32 nt, Human
gagaucccgccacugcacgccagccugggcga

SEQ ID NO: 156799 - RNA, 32 nt, Human
gagaucccgccacugcacuccagacugggcga

SEQ ID NO: 156800 - RNA, 32 nt, Human
gagaucccgccacugcacuccagccugggcga

SEQ ID NO: 156801 - RNA, 32 nt, Human
gagaucccggagagacagaugcugggacauca

SEQ ID NO: 156802 - RNA, 32 nt, Human
gagaucccugcccacucucuccccuucauugg

SEQ ID NO: 156803 - RNA, 32 nt, Human
gagaucccugggggcuccucuugccuggcagg

SEQ ID NO: 156804 - RNA, 32 nt, Human
gagauccgagagcucugcuucucugaaaagcg

SEQ ID NO: 156805 - RNA, 32 nt, Human
gagauccgccacugcacuccagccugggugac

SEQ ID NO: 156806 - RNA, 32 nt, Human
gagauccgugaauucucggaauggcaggggaa

SEQ ID NO: 156807 - RNA, 32 nt, Human
gagauccuacuucucugagucagcugaccccc

SEQ ID NO: 156808 - RNA, 32 nt, Human
gagauccucacaacacacuugggaaacagaca

SEQ ID NO: 156809 - RNA, 32 nt, Human
gagauccucagaguggaaggagggggaagcag

SEQ ID NO: 156810 - RNA, 32 nt, Human
gagauccuccagccuggacaugcugcccauac

SEQ ID NO: 156811 - RNA, 32 nt, Human
gagauccucccgccucagcauccugguagcug

SEQ ID NO: 156812 - RNA, 32 nt, Human
gagauccucuacccuucucugggccuugcuga

SEQ ID NO: 156813 - RNA, 32 nt, Human
gagauccugaaaccucugucauggaaaaguac

SEQ ID NO: 156814 - RNA, 32 nt, Human
gagauccugacccuacccuugugagagucaag

SEQ ID NO: 156815 - RNA, 32 nt, Human
gagauccugagccacagccgcccagcccugcu

SEQ ID NO: 156816 - RNA, 32 nt, Human
gagauccugagccuguggacuccgcucagcug

SEQ ID NO: 156817 - RNA, 32 nt, Human
gagauccugaggcugguaggggaagguaauuc

SEQ ID NO: 156818 - RNA, 32 nt, Human
gagauccugccacugcacuccagccugggcaa

SEQ ID NO: 156819 - RNA, 32 nt, Human
gagauccugccacugcacuccagccugugcca

SEQ ID NO: 156820 - RNA, 32 nt, Human
gagauccuggacugagggggccuggaugcccc

SEQ ID NO: 156821 - RNA, 22 nt, Human
gagauccuggagagauugaaaa

SEQ ID NO: 156822 - RNA, 32 nt, Human
gagauccuggagcuggagcaugagugucugac

SEQ ID NO: 156823 - RNA, 32 nt, Human
gagauccugggccagccccuccacacaucucc

SEQ ID NO: 156824 - RNA, 32 nt, Human
gagaucgagaccauccuaacacggugaaaucc

SEQ ID NO: 156825 - RNA, 31 nt, Human
gagaucgagacgauccuggccaacacgguga

SEQ ID NO: 156826 - RNA, 32 nt, Human
gagaucgagccacugcacuccagccugggcga

SEQ ID NO: 156827 - RNA, 32 nt, Human
gagaucgagccacugcacuccagccuggguga

SEQ ID NO: 156828 - RNA, 32 nt, Human
gagaucgagccacugcacuccugggcaacaga

SEQ ID NO: 156829 - RNA, 32 nt, Human
gagaucgagccauugcacuccagccuggacag

SEQ ID NO: 156830 - RNA, 24 nt, Human
gagaucgaggcuacagugagcuau

SEQ ID NO: 156831 - RNA, 32 nt, Human
gagaucgcaacacuacacuccagccugggcga

SEQ ID NO: 156832 - RNA, 32 nt, Human
gagaucgcaacacugcacuccagccugggcga

SEQ ID NO: 156833 - RNA, 32 nt, Human
gagaucgcaacacugcacuccagccuggguga

SEQ ID NO: 156834 - RNA, 32 nt, Human
gagaucgcaccacagcacuccagcccaggcgg

SEQ ID NO: 156835 - RNA, 32 nt, Human
gagaucgcaccaccacacuccagccuggguga

SEQ ID NO: 156836 - RNA, 32 nt, Human
gagaucgcaccacgccacugcacuccagcgug

SEQ ID NO: 156837 - RNA, 32 nt, Human
gagaucgcaccacggcacuccagccuggcgac

SEQ ID NO: 156838 - RNA, 32 nt, Human
gagaucgcaccacugcacucaagccugggcga

SEQ ID NO: 156839 - RNA, 32 nt, Human
gagaucgcaccacugcacuccaaccuggguga

SEQ ID NO: 156840 - RNA, 32 nt, Human
gagaucgcaccacugcacuccaaucugggcaa

SEQ ID NO: 156841 - RNA, 32 nt, Human
gagaucgcaccacugcacuccagcacuccagc

SEQ ID NO: 156842 - RNA, 32 nt, Human
gagaucgcaccacugcacuccagcaugaguga

SEQ ID NO: 156843 - RNA, 32 nt, Human
gagaucgcaccacugcacuccagccuggacaa

SEQ ID NO: 156844 - RNA, 32 nt, Human
gagaucgcaccacugcacuccagccugggaga

SEQ ID NO: 156845 - RNA, 32 nt, Human
gagaucgcaccacugcacuccagccugggcaa

SEQ ID NO: 156846 - RNA, 32 nt, Human
gagaucgcaccacugcacuccagccugggcga

SEQ ID NO: 156847 - RNA, 32 nt, Human
gagaucgcaccacugcacuccagccugggcgg

SEQ ID NO: 156848 - RNA, 32 nt, Human
gagaucgcaccacugcacuccagccuggguga

SEQ ID NO: 156849 - RNA, 32 nt, Human
gagaucgcaccacugcacuccagccuggugac

SEQ ID NO: 156850 - RNA, 32 nt, Human
gagaucgcaccacugcacuccagccugguuac

SEQ ID NO: 156851 - RNA, 32 nt, Human
gagaucgcaccacugcacuccagcuuggagga

SEQ ID NO: 156852 - RNA, 32 nt, Human
gagaucgcaccacugcacucccgcuuggcaau

SEQ ID NO: 156853 - RNA, 32 nt, Human
gagaucgcaccacugcacucuagccuggguga

SEQ ID NO: 156854 - RNA, 32 nt, Human
gagaucgcaccacugcacucuagccuuggcaa

SEQ ID NO: 156855 - RNA, 32 nt, Human
gagaucgcaccacugcacucuagcuugggcaa

SEQ ID NO: 156856 - RNA, 32 nt, Human
gagaucgcaccacugcacugcagccuggcaac

SEQ ID NO: 156857 - RNA, 32 nt, Human
gagaucgcaccacugcacuucagccuggguga

SEQ ID NO: 156858 - RNA, 32 nt, Human
gagaucgcaccacugcauuccagccugggcaa

SEQ ID NO: 156859 - RNA, 32 nt, Human
gagaucgcaccacugcauuccagccuggguga

SEQ ID NO: 156860 - RNA, 32 nt, Human
gagaucgcaccacugcauugcagccuggugac

SEQ ID NO: 156861 - RNA, 32 nt, Human
gagaucgcaccacugcccuccagccuagguga

SEQ ID NO: 156862 - RNA, 32 nt, Human
gagaucgcaccacuguacuccagccugggcga

SEQ ID NO: 156863 - RNA, 32 nt, Human
gagaucgcaccacuguacuccagccuggguga

SEQ ID NO: 156864 - RNA, 32 nt, Human
gagaucgcaccagugcacuccagccuugguga

SEQ ID NO: 156865 - RNA, 32 nt, Human
gagaucgcaccauuacacuccagccugggcaa

SEQ ID NO: 156866 - RNA, 32 nt, Human
gagaucgcaccauugcacuccagcccgggcaa

SEQ ID NO: 156867 - RNA, 32 nt, Human
gagaucgcaccauugcacuccagccuggcgac

SEQ ID NO: 156868 - RNA, 32 nt, Human
gagaucgcaccauugcacuccagccugggcaa

SEQ ID NO: 156869 - RNA, 32 nt, Human
gagaucgcaccauugcacuccugccugggcaa

SEQ ID NO: 156870 - RNA, 32 nt, Human
gagaucgcaccauugcauuccagccugggcaa

SEQ ID NO: 156871 - RNA, 32 nt, Human
gagaucgcaccauugcccuccagccugggcaa

SEQ ID NO: 156872 - RNA, 32 nt, Human
gagaucgcaccccugcacuccagccugggcaa

SEQ ID NO: 156873 - RNA, 32 nt, Human
gagaucgcaccgcugcacuccagccugggcaa

SEQ ID NO: 156874 - RNA, 32 nt, Human
gagaucgcaccgcugcccuccagccugggcaa

SEQ ID NO: 156875 - RNA, 32 nt, Human
gagaucgcacuccagccugggugacagaguga

SEQ ID NO: 156876 - RNA, 32 nt, Human
gagaucgcacugcuguacccagccugggccac

SEQ ID NO: 156877 - RNA, 32 nt, Human
gagaucgcagcacuguacuccagccugggcga

SEQ ID NO: 156878 - RNA, 32 nt, Human
gagaucgcagugagcugagaucacgccacugc

SEQ ID NO: 156879 - RNA, 32 nt, Human
gagaucgcagugaguugagauuguaccacugc

SEQ ID NO: 156880 - RNA, 32 nt, Human
gagaucgcaucacugcaguccagccuggauga

SEQ ID NO: 156881 - RNA, 32 nt, Human
gagaucgcauuacugcacuccagccuggguaa

SEQ ID NO: 156882 - RNA, 32 nt, Human
gagaucgccacugcacuccagccugggaaaua

SEQ ID NO: 156883 - RNA, 32 nt, Human
gagaucgccccacuacacuccagccuggucaa

SEQ ID NO: 156884 - RNA, 32 nt, Human
gagaucgccccacugcacuccagccuggugac

SEQ ID NO: 156885 - RNA, 32 nt, Human
gagaucgccccauuguacuccagccuggggaa

SEQ ID NO: 156886 - RNA, 32 nt, Human
gagaucgcccugcugcacuccagccuggguga

SEQ ID NO: 156887 - RNA, 32 nt, Human
gagaucgcgacacugcgcuccagccugggcaa

SEQ ID NO: 156888 - RNA, 32 nt, Human
gagaucgcgcaauugcgcuccagccugggcga

SEQ ID NO: 156889 - RNA, 32 nt, Human
gagaucgcgcagcugcacuccagccugggcaa

SEQ ID NO: 156890 - RNA, 32 nt, Human
gagaucgcgccaaugcacuccagccugggcga

SEQ ID NO: 156891 - RNA, 32 nt, Human
gagaucgcgccaccacacuccagccugagcga

SEQ ID NO: 156892 - RNA, 32 nt, Human
gagaucgcgccacccacuccagcccgggugac

SEQ ID NO: 156893 - RNA, 32 nt, Human
gagaucgcgccaccgcacuccagccucgccga

SEQ ID NO: 156894 - RNA, 32 nt, Human
gagaucgcgccaccgcauuccagccugggcga

SEQ ID NO: 156895 - RNA, 32 nt, Human
gagaucgcgccaccgcccuccagccugggcga

SEQ ID NO: 156896 - RNA, 32 nt, Human
gagaucgcgccacggcacuccagccugggaga

SEQ ID NO: 156897 - RNA, 32 nt, Human
gagaucgcgccacuacuccagccugggugaca

SEQ ID NO: 156898 - RNA, 32 nt, Human
gagaucgcgccacuauacuccagccugggcaa

SEQ ID NO: 156899 - RNA, 32 nt, Human
gagaucgcgccacugcaacccagccuggguga

SEQ ID NO: 156900 - RNA, 32 nt, Human
gagaucgcgccacugcacucaagccugggcaa

SEQ ID NO: 156901 - RNA, 32 nt, Human
gagaucgcgccacugcacuccaaccuggguga

SEQ ID NO: 156902 - RNA, 32 nt, Human
gagaucgcgccacugcacuccagcagucuggg

SEQ ID NO: 156903 - RNA, 32 nt, Human
gagaucgcgccacugcacuccagccuagacga

SEQ ID NO: 156904 - RNA, 32 nt, Human
gagaucgcgccacugcacuccagccuagggga

SEQ ID NO: 156905 - RNA, 32 nt, Human
gagaucgcgccacugcacuccagccuagguga

SEQ ID NO: 156906 - RNA, 32 nt, Human
gagaucgcgccacugcacuccagccucgguga

SEQ ID NO: 156907 - RNA, 32 nt, Human
gagaucgcgccacugcacuccagccuggacga

SEQ ID NO: 156908 - RNA, 32 nt, Human
gagaucgcgccacugcacuccagccuggcaac

SEQ ID NO: 156909 - RNA, 32 nt, Human
gagaucgcgccacugcacuccagccuggcgac

SEQ ID NO: 156910 - RNA, 32 nt, Human
gagaucgcgccacugcacuccagccugggcaa

SEQ ID NO: 156911 - RNA, 32 nt, Human
gagaucgcgccacugcacuccagccugggcga

SEQ ID NO: 156912 - RNA, 32 nt, Human
gagaucgcgccacugcacuccagccuggguaa

SEQ ID NO: 156913 - RNA, 32 nt, Human
gagaucgcgccacugcacuccagccuggguga

SEQ ID NO: 156914 - RNA, 32 nt, Human
gagaucgcgccacugcacuccagccuggugac

SEQ ID NO: 156915 - RNA, 32 nt, Human
gagaucgcgccacugcacuccagcuugggcaa

SEQ ID NO: 156916 - RNA, 32 nt, Human
gagaucgcgccacugcacuccaggccugggug

SEQ ID NO: 156917 - RNA, 32 nt, Human
gagaucgcgccacugcacuccaggcugggcga

SEQ ID NO: 156918 - RNA, 32 nt, Human
gagaucgcgccacugcacuccaguuugggcaa

SEQ ID NO: 156919 - RNA, 32 nt, Human
gagaucgcgccacugcacuccugccugggaca

SEQ ID NO: 156920 - RNA, 32 nt, Human
gagaucgcgccacugcacucuagccggaguga

SEQ ID NO: 156921 - RNA, 32 nt, Human
gagaucgcgccacugcacucuagccugaguga

SEQ ID NO: 156922 - RNA, 32 nt, Human
gagaucgcgccacugcacucuagccugggcca

SEQ ID NO: 156923 - RNA, 32 nt, Human
gagaucgcgccacugcacucuagccuggguga

SEQ ID NO: 156924 - RNA, 32 nt, Human
gagaucgcgccacugcccuccagccugggcga

SEQ ID NO: 156925 - RNA, 32 nt, Human
gagaucgcgccacugcucuccagccugggugg

SEQ ID NO: 156926 - RNA, 32 nt, Human
gagaucgcgccacuggacuccagccuggacaa

SEQ ID NO: 156927 - RNA, 32 nt, Human
gagaucgcgccacugggcuccagccugggcga

SEQ ID NO: 156928 - RNA, 32 nt, Human
gagaucgcgccacugugcuccagccugggcaa

SEQ ID NO: 156929 - RNA, 32 nt, Human
gagaucgcgccaguacacuccagccuggguaa

SEQ ID NO: 156930 - RNA, 32 nt, Human
gagaucgcgccagugcacuccagccugggcaa

SEQ ID NO: 156931 - RNA, 32 nt, Human
gagaucgcgccauagcacuccagccuuagccu

SEQ ID NO: 156932 - RNA, 32 nt, Human
gagaucgcgccaucacacuccagccuaggcga

SEQ ID NO: 156933 - RNA, 32 nt, Human
gagaucgcgccaucgcacuccagccuggguga

SEQ ID NO: 156934 - RNA, 32 nt, Human
gagaucgcgccauugcacuccaaccuagguga

SEQ ID NO: 156935 - RNA, 32 nt, Human
gagaucgcgccauugcacuccagccuggccua

SEQ ID NO: 156936 - RNA, 32 nt, Human
gagaucgcgccauugcacuccagccugggcaa

SEQ ID NO: 156937 - RNA, 32 nt, Human
gagaucgcgccauugcacuccagccugggcga

SEQ ID NO: 156938 - RNA, 32 nt, Human
gagaucgcgccauugcacuccagccuggguga

SEQ ID NO: 156939 - RNA, 32 nt, Human
gagaucgcgccauugcacuccauccuggacaa

SEQ ID NO: 156940 - RNA, 32 nt, Human
gagaucgcgccauugcacucccgccugggcga

SEQ ID NO: 156941 - RNA, 32 nt, Human
gagaucgcgccauugcacuccggccuggggac

SEQ ID NO: 156942 - RNA, 32 nt, Human
gagaucgcgccauuguacuccagccugggcga

SEQ ID NO: 156943 - RNA, 32 nt, Human
gagaucgcgccgcugcacuccagccugggcca

SEQ ID NO: 156944 - RNA, 32 nt, Human
gagaucgcgccgcugcacuccagccugggcga

SEQ ID NO: 156945 - RNA, 32 nt, Human
gagaucgcgccgcugcacuccagccuggguga

SEQ ID NO: 156946 - RNA, 32 nt, Human
gagaucgcgccgcugcauuccagccuggguga

SEQ ID NO: 156947 - RNA, 32 nt, Human
gagaucgcgccguugcacuccagccugggcaa

SEQ ID NO: 156948 - RNA, 32 nt, Human
gagaucgcgccuuugcacuccagccuggaaga

SEQ ID NO: 156949 - RNA, 32 nt, Human
gagaucgcgcuacugcacuccagccuggguga

SEQ ID NO: 156950 - RNA, 32 nt, Human
gagaucgcgcuacugcauuccagccugggcgc

SEQ ID NO: 156951 - RNA, 32 nt, Human
gagaucgcgcugcugcacuccagccuggguga

SEQ ID NO: 156952 - RNA, 32 nt, Human
gagaucgcgucacugcacuccagccuggacaa

SEQ ID NO: 156953 - RNA, 32 nt, Human
gagaucgcgucacugcacuccagcgugggcga

SEQ ID NO: 156954 - RNA, 32 nt, Human
gagaucgcgucacugcacuccagucuagcaac

SEQ ID NO: 156955 - RNA, 32 nt, Human
gagaucgcgucaguacacuccagccugggcaa

SEQ ID NO: 156956 - RNA, 32 nt, Human
gagaucgcgucauugcacuccagccugggcaa

SEQ ID NO: 156957 - RNA, 32 nt, Human
gagaucgcuccacugcacuccagcccagguga

SEQ ID NO: 156958 - RNA, 32 nt, Human
gagaucgcuccacugcacuccagccuggguga

SEQ ID NO: 156959 - RNA, 32 nt, Human
gagaucgcugcacuccagccugggcgacaaga

SEQ ID NO: 156960 - RNA, 32 nt, Human
gagaucgggccacggcacuccagccuggguga

SEQ ID NO: 156961 - RNA, 22 nt, Human
gagaucggggagcccacggugg

SEQ ID NO: 156962 - RNA, 32 nt, Human
gagaucggucaccaggagagcagccacaaagg

SEQ ID NO: 156963 - RNA, 32 nt, Human
gagaucguaccauugcacuccagccugggcaa

SEQ ID NO: 156964 - RNA, 32 nt, Human
gagaucguaccuauugcacuccauccuggaug

SEQ ID NO: 156965 - RNA, 32 nt, Human
gagaucguagcacugcaguccagccugggcga

SEQ ID NO: 156966 - RNA, 32 nt, Human
gagaucgucccacugcacuccagcccgggcaa

SEQ ID NO: 156967 - RNA, 32 nt, Human
gagaucgucccacugcacuccagccugggcaa

SEQ ID NO: 156968 - RNA, 32 nt, Human
gagaucgugacacugcacuucagccuggcuga

SEQ ID NO: 156969 - RNA, 32 nt, Human
gagaucgugcaacugcacuccaaccugggcaa

SEQ ID NO: 156970 - RNA, 32 nt, Human
gagaucgugccacugcaccacuccagccuggg

SEQ ID NO: 156971 - RNA, 32 nt, Human
gagaucgugccacugcaccccagccugggcaa

SEQ ID NO: 156972 - RNA, 32 nt, Human
gagaucgugccacugcacgccagccugggcaa

SEQ ID NO: 156973 - RNA, 32 nt, Human
gagaucgugccacugcacucaagccuggguga

SEQ ID NO: 156974 - RNA, 32 nt, Human
gagaucgugccacugcacucaagccuggugac

SEQ ID NO: 156975 - RNA, 32 nt, Human
gagaucgugccacugcacuccagacuugguga

SEQ ID NO: 156976 - RNA, 32 nt, Human
gagaucgugccacugcacuccagagccugggc

SEQ ID NO: 156977 - RNA, 32 nt, Human
gagaucgugccacugcacuccagccugaagac

SEQ ID NO: 156978 - RNA, 32 nt, Human
gagaucgugccacugcacuccagccugagcaa

SEQ ID NO: 156979 - RNA, 32 nt, Human
gagaucgugccacugcacuccagccugcggga

SEQ ID NO: 156980 - RNA, 32 nt, Human
gagaucgugccacugcacuccagccuggauua

SEQ ID NO: 156981 - RNA, 32 nt, Human
gagaucgugccacugcacuccagccugggaga

SEQ ID NO: 156982 - RNA, 32 nt, Human
gagaucgugccacugcacuccagccugggcaa

SEQ ID NO: 156983 - RNA, 32 nt, Human
gagaucgugccacugcacuccagccugggcac

SEQ ID NO: 156984 - RNA, 32 nt, Human
gagaucgugccacugcacuccagccugggcca

SEQ ID NO: 156985 - RNA, 32 nt, Human
gagaucgugccacugcacuccagccugggcga

SEQ ID NO: 156986 - RNA, 32 nt, Human
gagaucgugccacugcacuccagccuggguga

SEQ ID NO: 156987 - RNA, 32 nt, Human
gagaucgugccacugcacuccagccugggugg

SEQ ID NO: 156988 - RNA, 32 nt, Human
gagaucgugccacugcacuccagccuggucaa

SEQ ID NO: 156989 - RNA, 32 nt, Human
gagaucgugccacugcacuccagccuggugac

SEQ ID NO: 156990 - RNA, 32 nt, Human
gagaucgugccacugcacuccagccuggugag

SEQ ID NO: 156991 - RNA, 32 nt, Human
gagaucgugccacugcacuccagcuugggcaa

SEQ ID NO: 156992 - RNA, 32 nt, Human
gagaucgugccacugcacuccaggcugggcga

SEQ ID NO: 156993 - RNA, 32 nt, Human
gagaucgugccacugcacuccaggcuggguga

SEQ ID NO: 156994 - RNA, 32 nt, Human
gagaucgugccacugcacuccagucugggcaa

SEQ ID NO: 156995 - RNA, 32 nt, Human
gagaucgugccacugcacuccauccuggacga

SEQ ID NO: 156996 - RNA, 32 nt, Human
gagaucgugccacugcacucccagccugggca

SEQ ID NO: 156997 - RNA, 32 nt, Human
gagaucgugccacugcacucuagccugggcga

SEQ ID NO: 156998 - RNA, 32 nt, Human
gagaucgugccacugcgcuccagccuggguga

SEQ ID NO: 156999 - RNA, 32 nt, Human
gagaucgugccacugcgcuccagccugggugg

SEQ ID NO: 157000 - RNA, 32 nt, Human
gagaucgugccacugcucuccagccuggguga

SEQ ID NO: 157001 - RNA, 32 nt, Human
gagaucgugccauuacacuccagccugggcga

SEQ ID NO: 157002 - RNA, 32 nt, Human
gagaucgugccauugcacuccagccuaggcaa

SEQ ID NO: 157003 - RNA, 32 nt, Human
gagaucgugccauugcacuccagccuggauga

SEQ ID NO: 157004 - RNA, 32 nt, Human
gagaucgugccauugcacuccagccuggccac

SEQ ID NO: 157005 - RNA, 32 nt, Human
gagaucgugccauugcacuccagccuggcgac

SEQ ID NO: 157006 - RNA, 32 nt, Human
gagaucgugccauugcacuccagccugggcga

SEQ ID NO: 157007 - RNA, 32 nt, Human
gagaucgugccauugcacuccagccuggguga

SEQ ID NO: 157008 - RNA, 32 nt, Human
gagaucgugccauugcacuccagucuggguaa

SEQ ID NO: 157009 - RNA, 32 nt, Human
gagaucgugccauugcacuccggccugggcaa

SEQ ID NO: 157010 - RNA, 32 nt, Human
gagaucgugccauugcauuccagccugggaga

SEQ ID NO: 157011 - RNA, 32 nt, Human
gagaucgugccauugcgcuccagccuagguga

SEQ ID NO: 157012 - RNA, 32 nt, Human
gagaucgugccauugcgcuccagccugggcaa

SEQ ID NO: 157013 - RNA, 32 nt, Human
gagaucgugccauugugcuccagccugggcaa

SEQ ID NO: 157014 - RNA, 32 nt, Human
gagaucgugccguugcacuccagccugggcga

SEQ ID NO: 157015 - RNA, 32 nt, Human
gagaucgugccuuugcacuccagcguggaaga

SEQ ID NO: 157016 - RNA, 32 nt, Human
gagaucgugcuacugcacuccagccuggggga

SEQ ID NO: 157017 - RNA, 32 nt, Human
gagaucgugcuacugcacuccagucuggguga

SEQ ID NO: 157018 - RNA, 32 nt, Human
gagaucgugcuacugcaguccagccugggcua

SEQ ID NO: 157019 - RNA, 32 nt, Human
gagaucgugcuauugcacuccagccugggcga

SEQ ID NO: 157020 - RNA, 32 nt, Human
gagaucgugcugcugcacuccagccugggcaa

SEQ ID NO: 157021 - RNA, 32 nt, Human
gagaucguggccacugcaauccagccugggcg

SEQ ID NO: 157022 - RNA, 32 nt, Human
gagaucgugucacuacacuccaggcuggguga

SEQ ID NO: 157023 - RNA, 32 nt, Human
gagaucgugucacugcacuccagccuggcgac

SEQ ID NO: 157024 - RNA, 32 nt, Human
gagaucgugucacugcacuccagccugggcga

SEQ ID NO: 157025 - RNA, 32 nt, Human
gagaucgugucacugcacuccagccuggguga

SEQ ID NO: 157026 - RNA, 32 nt, Human
gagaucguucccaggcuggcgucucugggguu

SEQ ID NO: 157027 - RNA, 32 nt, Human
gagaucucaaaaaucagccccaaaaagguauu

SEQ ID NO: 157028 - RNA, 32 nt, Human
gagaucucaccacugcacuccagccugggcag

SEQ ID NO: 157029 - RNA, 32 nt, Human
gagaucucaccauuacacuccagccugggcga

SEQ ID NO: 157030 - RNA, 32 nt, Human
gagaucucgccacugcgcuccagccugggcaa

SEQ ID NO: 157031 - RNA, 32 nt, Human
gagaucucgccacugugcuccagccugggcaa

SEQ ID NO: 157032 - RNA, 32 nt, Human
gagaucucgccauugcacuccauucugggcaa

SEQ ID NO: 157033 - RNA, 32 nt, Human
gagaucugaaguuuauggcuucauugagaaac

SEQ ID NO: 157034 - RNA, 32 nt, Human
gagaucugagccugaagagagggaacaaguca

SEQ ID NO: 157035 - RNA, 32 nt, Human
gagaucugaugcuuccugagggccaaggcauu

SEQ ID NO: 157036 - RNA, 32 nt, Human
gagaucugcagcaagcucaacuacauuccagg

SEQ ID NO: 157037 - RNA, 32 nt, Human
gagaucugcaggcugccucuucugccccggag

SEQ ID NO: 157038 - RNA, 32 nt, Human
gagaucugccacugcacuccagccuggcgaca

SEQ ID NO: 157039 - RNA, 32 nt, Human
gagaucuggccauugcacuccagcgugggcaa

SEQ ID NO: 157040 - RNA, 32 nt, Human
gagaucuggcugggaucaagaaaccucuuuuc

SEQ ID NO: 157041 - RNA, 32 nt, Human
gagaucugggcaacauauugagacucugucuc

SEQ ID NO: 157042 - RNA, 32 nt, Human
gagaucugggcuggagcuagggggucaaugga

SEQ ID NO: 157043 - RNA, 25 nt, Human
gagaucuguaaaaccugcccaggaa

SEQ ID NO: 157044 - RNA, 32 nt, Human
gagaucugucagggguccagaggagcggaguc

SEQ ID NO: 157045 - RNA, 29 nt, Human
gagaucugucucccugugccuggagaguu

SEQ ID NO: 157046 - RNA, 32 nt, Human
gagaucugugugccuugccuuccuucagcagg

SEQ ID NO: 157047 - RNA, 32 nt, Human
gagaucuucccacugcacuccagccuggccaa

SEQ ID NO: 157048 - RNA, 32 nt, Human
gagaucuucuagggagugacccaucuauuuuu

SEQ ID NO: 157049 - RNA, 32 nt, Human
gagaucuugccacugcacaccagccugggcaa

SEQ ID NO: 157050 - RNA, 32 nt, Human
gagaucuugccacugcacuccagccugggcaa

SEQ ID NO: 157051 - RNA, 32 nt, Human
gagaucuuguggagcugggaucauguuugaac

SEQ ID NO: 157052 - RNA, 32 nt, Human
gagaucuuucuuuccaaaacauuucuggacag

SEQ ID NO: 157053 - RNA, 32 nt, Human
gagaugaaaacaacaagcaggccaggcacggu

SEQ ID NO: 157054 - RNA, 32 nt, Human
gagaugaaaacaacgagcaggccaggcacggu

SEQ ID NO: 157055 - RNA, 28 nt, Human
gagaugaaaggcugcugccgcccggucg

SEQ ID NO: 157056 - RNA, 32 nt, Human
gagaugaaaggcuuugcagaaagcuuugagcu

SEQ ID NO: 157057 - RNA, 28 nt, Human
gagaugaacggcuucagcacggaggagg

SEQ ID NO: 157058 - RNA, 32 nt, Human
gagaugaacucuuaaaggccuggaccugggag

SEQ ID NO: 157059 - RNA, 32 nt, Human
gagaugaaggaaaggagugaaagggaaguagg

SEQ ID NO: 157060 - RNA, 24 nt, Human
gagaugacaaauggagaagaaagg

SEQ ID NO: 157061 - RNA, 23 nt, Human
gagaugacacagacccaaagugg

SEQ ID NO: 157062 - RNA, 23 nt, Human
gagaugacacagcaagaagaagg

SEQ ID NO: 157063 - RNA, 23 nt, Human
gagaugacacggcaagaagaagg

SEQ ID NO: 157064 - RNA, 24 nt, Human
gagaugacaugcauagaaagaggg

SEQ ID NO: 157065 - RNA, 32 nt, Human
gagaugaccuggagaacugcauuuuaagauuu

SEQ ID NO: 157066 - RNA, 32 nt, Human
gagaugaccuuugccaagagcacagccaucuu

SEQ ID NO: 157067 - RNA, 32 nt, Human
gagaugaccuuugccaagagcacagccgucuu

SEQ ID NO: 157068 - RNA, 32 nt, Human
gagaugacgagaugucccggcuccaguggcga

SEQ ID NO: 157069 - RNA, 32 nt, Human
gagaugacgccauugcacuccagccuggguga

SEQ ID NO: 157070 - RNA, 32 nt, Human
gagaugacucacuuaacccgucuccuuuaagu

SEQ ID NO: 157071 - RNA, 32 nt, Human
gagaugacugaguauggagauuaccaggcaga

SEQ ID NO: 157072 - RNA, 32 nt, Human
gagaugacuucucagagguucuaggugaugcu

SEQ ID NO: 157073 - RNA, 32 nt, Human
gagaugacuucugcugauuuugcuuuagaaug

SEQ ID NO: 157074 - RNA, 32 nt, Human
gagaugacuuugaugacucugccccucagcag

SEQ ID NO: 157075 - RNA, 32 nt, Human
gagaugagaacaggaccagacaccuucauccu

SEQ ID NO: 157076 - RNA, 32 nt, Human
gagaugagaagaggcacaagaaacaaucucga

SEQ ID NO: 157077 - RNA, 32 nt, Human
gagaugagagaggugccuucucuguauuagac

SEQ ID NO: 157078 - RNA, 22 nt, Human
gagaugagauuucaccauguug

SEQ ID NO: 157079 - RNA, 32 nt, Human
gagaugagcccacccccacccuucccuggggg

SEQ ID NO: 157080 - RNA, 32 nt, Human
gagaugaggagggagagaacuaggggcccgca

SEQ ID NO: 157081 - RNA, 32 nt, Human
gagaugaggccucguccuccuggaagcugagg

SEQ ID NO: 157082 - RNA, 32 nt, Human
gagaugaggggacugaggggaccaggggacag

SEQ ID NO: 157083 - RNA, 32 nt, Human
gagaugagggucuugccauguuguccaggcug

SEQ ID NO: 157084 - RNA, 22 nt, Human
gagaugagguuucaccauguug

SEQ ID NO: 157085 - RNA, 23 nt, Human
gagaugagguuucaccauguugg

SEQ ID NO: 157086 - RNA, 32 nt, Human
gagaugaguagagagaacugaauuagaggauu

SEQ ID NO: 157087 - RNA, 32 nt, Human
gagaugagugugagagcugggaugggcaggaa

SEQ ID NO: 157088 - RNA, 21 nt, Human
gagaugaguuucaccauguug

SEQ ID NO: 157089 - RNA, 18 nt, Human
gagaugaucuugcccuuc

SEQ ID NO: 157090 - RNA, 32 nt, Human
gagaugauggauagaauuaaaaagggaguuca

SEQ ID NO: 157091 - RNA, 32 nt, Human
gagaugauggauuccuguagaacuagaggugg

SEQ ID NO: 157092 - RNA, 32 nt, Human
gagaugauguucaugugcuuccuugaaaccag

SEQ ID NO: 157093 - RNA, 32 nt, Human
gagaugcaaagccugaagacacugguagcuuu

SEQ ID NO: 157094 - RNA, 32 nt, Human
gagaugcaacccagcccccaaaccuacauucu

SEQ ID NO: 157095 - RNA, 32 nt, Human
gagaugcaaugauaguuaugugcuuaccuaac

SEQ ID NO: 157096 - RNA, 32 nt, Human
gagaugcacaccuucgcuucucucaccaggaa

SEQ ID NO: 157097 - RNA, 32 nt, Human
gagaugcacuauacuuaaaaccauucucuccc

SEQ ID NO: 157098 - RNA, 17 nt, Human
gagaugcagcucuggga

SEQ ID NO: 157099 - RNA, 32 nt, Human
gagaugcagugccaggaacccuuaaacaguug

SEQ ID NO: 157100 - RNA, 32 nt, Human
gagaugcaguguccagggaagcagaggcagca

SEQ ID NO: 157101 - RNA, 32 nt, Human
gagaugcauauuaggaaugugaagccagaaug

SEQ ID NO: 157102 - RNA, 32 nt, Human
gagaugcauuccagagaugcacuccgcucugg

SEQ ID NO: 157103 - RNA, 32 nt, Human
gagaugcauugugauuguaauuacugaguuga

SEQ ID NO: 157104 - RNA, 21 nt, Human
gagaugcauuugaggauuuua

SEQ ID NO: 157105 - RNA, 32 nt, Human
gagaugccaaguggggccagggccaagucuca

SEQ ID NO: 157106 - RNA, 32 nt, Human
gagaugccacauuucucucugggaaacuacca

SEQ ID NO: 157107 - RNA, 32 nt, Human
gagaugcccaggaggaggagcccuagggaaga

SEQ ID NO: 157108 - RNA, 32 nt, Human
gagaugcccaggauuugacucgggccuuagaa

SEQ ID NO: 157109 - RNA, 32 nt, Human
gagaugcccccauccaguccuggaggacccgc

SEQ ID NO: 157110 - RNA, 25 nt, Human
gagaugcccgcacaguaauguagaa

SEQ ID NO: 157111 - RNA, 32 nt, Human
gagaugccucauucuacuggaacaucacugug

SEQ ID NO: 157112 - RNA, 32 nt, Human
gagaugccuucagccagcaucccagacuccac

SEQ ID NO: 157113 - RNA, 32 nt, Human
gagaugcgaaggaagccagaacgaaaagagag

SEQ ID NO: 157114 - RNA, 32 nt, Human
gagaugcgcagccacggccccacccacagccu

SEQ ID NO: 157115 - RNA, 32 nt, Human
gagaugcgccacugcacuccagccugggcgac

SEQ ID NO: 157116 - RNA, 32 nt, Human
gagaugcgcggcuguucguguuuuggguuuuu

SEQ ID NO: 157117 - RNA, 32 nt, Human
gagaugcggaaagggucagagcagggcucggc

SEQ ID NO: 157118 - RNA, 21 nt, Human
gagaugcggccaagauaggac

SEQ ID NO: 157119 - RNA, 32 nt, Human
gagaugcuaaggaauugcccaaagucacacag

SEQ ID NO: 157120 - RNA, 32 nt, Human
gagaugcuacguccaagaccugcaggaugucu

SEQ ID NO: 157121 - RNA, 32 nt, Human
gagaugcuacugccuggagacuggggucuuaa

SEQ ID NO: 157122 - RNA, 31 nt, Human
gagaugcucaauagauguuuguugaaugaau

SEQ ID NO: 157123 - RNA, 32 nt, Human
gagaugcuccuugggcccuuugagugcagucc

SEQ ID NO: 157124 - RNA, 23 nt, Human
gagaugcugaggcagguggauca

SEQ ID NO: 157125 - RNA, 24 nt, Human
gagaugcugaggcagguggaucau

SEQ ID NO: 157126 - RNA, 32 nt, Human
gagaugcugcaguccaggucugaggucccgcu

SEQ ID NO: 157127 - RNA, 32 nt, Human
gagaugcugcuccaaaaggcccaggcuuccuu

SEQ ID NO: 157128 - RNA, 32 nt, Human
gagaugcuggaggugggggugcuguguucuag

SEQ ID NO: 157129 - RNA, 30 nt, Human
gagaugcuggccucugugcuccugcugucu

SEQ ID NO: 157130 - RNA, 32 nt, Human
gagaugcuggcgaucuccuucaucucggccgu

SEQ ID NO: 157131 - RNA, 32 nt, Human
gagaugcugggaacuuugggacucacuugauu

SEQ ID NO: 157132 - RNA, 18 nt, Human
gagaugcuggggaugcca

SEQ ID NO: 157133 - RNA, 32 nt, Human
gagaugcugguccuggcuugaggggaggggca

SEQ ID NO: 157134 - RNA, 32 nt, Human
gagaugcuguucaucagucccaacaagauggc

SEQ ID NO: 157135 - RNA, 24 nt, Human
gagaugcuuggaugggccugaaaa

SEQ ID NO: 157136 - RNA, 32 nt, Human
gagaugcuuguccuagguccaaaucucaucca

SEQ ID NO: 157137 - RNA, 17 nt, Human
gagaugcuugugaagua

SEQ ID NO: 157138 - RNA, 19 nt, Human
gagauggaaacugcccugg

SEQ ID NO: 157139 - RNA, 32 nt, Human
gagauggaacccuaaguggagaaugguuauuc

SEQ ID NO: 157140 - RNA, 28 nt, Human
gagauggaacugguaaaggcagcccugg

SEQ ID NO: 157141 - RNA, 32 nt, Human
gagauggaagaggagacacagacacaaagcag

SEQ ID NO: 157142 - RNA, 32 nt, Human
gagauggaagaggaggaggaggaggagcugga

SEQ ID NO: 157143 - RNA, 32 nt, Human
gagauggaagagucuuuaaccuuuguaauuac

SEQ ID NO: 157144 - RNA, 32 nt, Human
gagauggaagcauaggucaaagcuguuuggag

SEQ ID NO: 157145 - RNA, 32 nt, Human
gagauggaagcuuguugaaaacccagacuguc

SEQ ID NO: 157146 - RNA, 32 nt, Human
gagauggaaggaugagaggugaaauugaccuu

SEQ ID NO: 157147 - RNA, 32 nt, Human
gagauggaagucacuagaggugagagauguua

SEQ ID NO: 157148 - RNA, 32 nt, Human
gagauggaaugagauauagaccaagaagugca

SEQ ID NO: 157149 - RNA, 22 nt, Human
gagauggaauuucaccauguua

SEQ ID NO: 157150 - RNA, 32 nt, Human
gagauggacauuuacugacuccccuucugugu

SEQ ID NO: 157151 - RNA, 28 nt, Human
gagauggaccucaaccgguucauccagg

SEQ ID NO: 157152 - RNA, 32 nt, Human
gagauggacucucauucugucacccgggcugg

SEQ ID NO: 157153 - RNA, 32 nt, Human
gagauggagaaggggaaggaaggggcuuuggg

SEQ ID NO: 157154 - RNA, 32 nt, Human
gagauggagacucacucuguugcccaggcugg

SEQ ID NO: 157155 - RNA, 32 nt, Human
gagauggagagaagaaugaagagguggugguu

SEQ ID NO: 157156 - RNA, 32 nt, Human
gagauggagagaagaaugaagggguggugguu

SEQ ID NO: 157157 - RNA, 32 nt, Human
gagauggagaucuugcuauauugcccaggcuu

SEQ ID NO: 157158 - RNA, 32 nt, Human
gagauggagccacugcacuccagccugggcga

SEQ ID NO: 157159 - RNA, 32 nt, Human
gagauggagccacugcacuccagccuggggga

SEQ ID NO: 157160 - RNA, 32 nt, Human
gagauggagccagcaggcugguagccuggcag

SEQ ID NO: 157161 - RNA, 32 nt, Human
gagauggagccgcggugagggugggcgggagg

SEQ ID NO: 157162 - RNA, 32 nt, Human
gagauggaggccugaggcuuuggguccagggu

SEQ ID NO: 157163 - RNA, 21 nt, Human
gagauggaggcugcaguaagc

SEQ ID NO: 157164 - RNA, 32 nt, Human
gagauggaggucucacuauguugcccaggcug

SEQ ID NO: 157165 - RNA, 32 nt, Human
gagauggagucucacuauguugcucaggcugg

SEQ ID NO: 157166 - RNA, 20 nt, Human
gagauggagucucacucugu

SEQ ID NO: 157167 - RNA, 32 nt, Human
gagauggagucucacucuguugcucaggcugg

SEQ ID NO: 157168 - RNA, 20 nt, Human
gagauggagucuuacucugu

SEQ ID NO: 157169 - RNA, 20 nt, Human
gagauggagucuugcucugu

SEQ ID NO: 157170 - RNA, 22 nt, Human
gagauggaguuucaccauguua

SEQ ID NO: 157171 - RNA, 22 nt, Human
gagauggaguuucaccauguug

SEQ ID NO: 157172 - RNA, 32 nt, Human
gagauggaguuucacccuuguugcccaggcug

SEQ ID NO: 157173 - RNA, 20 nt, Human
gagauggaguuucacucugu

SEQ ID NO: 157174 - RNA, 32 nt, Human
gagauggaguuucacucuuguugcccacgcug

SEQ ID NO: 157175 - RNA, 32 nt, Human
gagauggaguuucacucuuguugcccaggcug

SEQ ID NO: 157176 - RNA, 32 nt, Human
gagauggaguuucagucuuguugcccaggcug

SEQ ID NO: 157177 - RNA, 32 nt, Human
gagauggaguuucgcgcuuguugcccaggcug

SEQ ID NO: 157178 - RNA, 32 nt, Human
gagauggaguuucgcucuuguugcccaggcgg

SEQ ID NO: 157179 - RNA, 32 nt, Human
gagauggaguuucgcucuuguugcccaggcua

SEQ ID NO: 157180 - RNA, 32 nt, Human
gagauggaguuucgcucuuguugcccaggcug

SEQ ID NO: 157181 - RNA, 32 nt, Human
gagauggaguuucgcucuuguugcccaggcuu

SEQ ID NO: 157182 - RNA, 32 nt, Human
gagauggaguuucgcuuuuguugcccaggcug

SEQ ID NO: 157183 - RNA, 32 nt, Human
gagauggaguuucgugcuuguugcccaggcug

SEQ ID NO: 157184 - RNA, 32 nt, Human
gagauggaguuucguucuuguugcccaaccug

SEQ ID NO: 157185 - RNA, 32 nt, Human
gagauggaguuucucucuuguugcccaggcug

SEQ ID NO: 157186 - RNA, 32 nt, Human
gagauggaguuuugcucuuauugcccaggcug

SEQ ID NO: 157187 - RNA, 32 nt, Human
gagauggaguuuugcucuuguugcccagacug

SEQ ID NO: 157188 - RNA, 32 nt, Human
gagauggaguuuugcucuuguugcccaggcug

SEQ ID NO: 157189 - RNA, 32 nt, Human
gagauggaucugcuagaaggaaccuggagagc

SEQ ID NO: 157190 - RNA, 32 nt, Human
gagauggauguuuucugaccuugauaaggacu

SEQ ID NO: 157191 - RNA, 32 nt, Human
gagauggauuaaugugaguaacaggaaugugu

SEQ ID NO: 157192 - RNA, 32 nt, Human
gagauggcaacaguuuacuauuugguaagagu

SEQ ID NO: 157193 - RNA, 28 nt, Human
gagauggcaccacugcacuccagccugg

SEQ ID NO: 157194 - RNA, 32 nt, Human
gagauggcaccacugcacuccagccuggacga

SEQ ID NO: 157195 - RNA, 32 nt, Human
gagauggcaccacugcacuccagccugggaga

SEQ ID NO: 157196 - RNA, 32 nt, Human
gagauggcaccacugcacuccagccugggcaa

SEQ ID NO: 157197 - RNA, 32 nt, Human
gagauggcaccacugcacuccagccuggguga

SEQ ID NO: 157198 - RNA, 32 nt, Human
gagauggcaccacugcacuccagcuuggguga

SEQ ID NO: 157199 - RNA, 32 nt, Human
gagauggcaccacugcacuccggccuaggcaa

SEQ ID NO: 157200 - RNA, 32 nt, Human
gagauggcaccacugcauuccagccuggguga

SEQ ID NO: 157201 - RNA, 32 nt, Human
gagauggcaccacuggacuccagccugggcga

SEQ ID NO: 157202 - RNA, 32 nt, Human
gagauggcaccacuuauugcacuccagcccgg

SEQ ID NO: 157203 - RNA, 32 nt, Human
gagauggcaccauugcacuccagccuggguga

SEQ ID NO: 157204 - RNA, 32 nt, Human
gagauggcaggugugugaguucuguccuagac

SEQ ID NO: 157205 - RNA, 24 nt, Human
gagauggcauuucggggugcucug

SEQ ID NO: 157206 - RNA, 32 nt, Human
gagauggcauuuucuucugggcuucagcauga

SEQ ID NO: 157207 - RNA, 32 nt, Human
gagauggccagccugaagucacgguccuggcc

SEQ ID NO: 157208 - RNA, 32 nt, Human
gagauggcccugcuccccuccuaggaggugcu

SEQ ID NO: 157209 - RNA, 32 nt, Human
gagauggccucagcguggccagccugccaaac

SEQ ID NO: 157210 - RNA, 32 nt, Human
gagauggccuccagcgucagugccaagacuga

SEQ ID NO: 157211 - RNA, 28 nt, Human
gagauggcgauggagaugaggcuuccag

SEQ ID NO: 157212 - RNA, 32 nt, Human
gagauggcgccacugcacuccagcccgggcga

SEQ ID NO: 157213 - RNA, 32 nt, Human
gagauggcgccacugcacuccagccuaggcaa

SEQ ID NO: 157214 - RNA, 32 nt, Human
gagauggcgccacugcacuccagccugggcga

SEQ ID NO: 157215 - RNA, 32 nt, Human
gagauggcgccacugcacuccagccugggcgu

SEQ ID NO: 157216 - RNA, 32 nt, Human
gagauggcgccacugcacuccagccuggguga

SEQ ID NO: 157217 - RNA, 32 nt, Human
gagauggcgccacugcacucccgucuggggga

SEQ ID NO: 157218 - RNA, 32 nt, Human
gagauggcgccacugcgcuccagccugggcaa

SEQ ID NO: 157219 - RNA, 32 nt, Human
gagauggcgccaucacacuccagccugcucuu

SEQ ID NO: 157220 - RNA, 32 nt, Human
gagauggcgccauugcacuccagccugggcaa

SEQ ID NO: 157221 - RNA, 32 nt, Human
gagauggcgccauuucacuccagccugggcga

SEQ ID NO: 157222 - RNA, 32 nt, Human
gagauggcgcgacugcacuccagccugggcga

SEQ ID NO: 157223 - RNA, 32 nt, Human
gagauggcgcuauugcacuccagucuggguaa

SEQ ID NO: 157224 - RNA, 28 nt, Human
gagauggcgguucuccggaggcugagug

SEQ ID NO: 157225 - RNA, 28 nt, Human
gagauggcgguucucuggaggcugagug

SEQ ID NO: 157226 - RNA, 22 nt, Human
gagauggcguuucaccauguug

SEQ ID NO: 157227 - RNA, 28 nt, Human
gagauggcuagugcuucauccagccaaa

SEQ ID NO: 157228 - RNA, 32 nt, Human
gagauggcugcuagcuguguuuugaaauauuu

SEQ ID NO: 157229 - RNA, 32 nt, Human
gagauggcuuacaaaaagaaauauugaauuuu

SEQ ID NO: 157230 - RNA, 32 nt, Human
gagaugggaauagaggaugaugacaguuuauu

SEQ ID NO: 157231 - RNA, 32 nt, Human
gagaugggagacgggcgauggcugugguccuu

SEQ ID NO: 157232 - RNA, 32 nt, Human
gagaugggaggaggagaaaaagcgguacgaug

SEQ ID NO: 157233 - RNA, 32 nt, Human
gagaugggagucuugcucugucgcccaggcug

SEQ ID NO: 157234 - RNA, 32 nt, Human
gagaugggaguuucaccauguuggccaggcug

SEQ ID NO: 157235 - RNA, 22 nt, Human
gagaugggaucucaccauguug

SEQ ID NO: 157236 - RNA, 32 nt, Human
gagaugggaucucacuagguugcccaggcugg

SEQ ID NO: 157237 - RNA, 32 nt, Human
gagaugggaucucacuauguugcucaggcuga

SEQ ID NO: 157238 - RNA, 22 nt, Human
gagaugggauuucaccauguug

SEQ ID NO: 157239 - RNA, 23 nt, Human
gagaugggauuucaccauguugg

SEQ ID NO: 157240 - RNA, 21 nt, Human
gagaugggcaaauggcuauug

SEQ ID NO: 157241 - RNA, 32 nt, Human
gagaugggcagggagagugacggggagcagca

SEQ ID NO: 157242 - RNA, 32 nt, Human
gagaugggccggaggugcagagaggaccaagg

SEQ ID NO: 157243 - RNA, 22 nt, Human
gagaugggcggaucacgagguc

SEQ ID NO: 157244 - RNA, 20 nt, Human
gagaugggcuggcaucugca

SEQ ID NO: 157245 - RNA, 32 nt, Human
gagauggggagguugagggacaggaucuauag

SEQ ID NO: 157246 - RNA, 32 nt, Human
gagauggggauggagucccaaggcaagcgccc

SEQ ID NO: 157247 - RNA, 23 nt, Human
gagauggggcaguuaaugcugaa

SEQ ID NO: 157248 - RNA, 32 nt, Human
gagauggggccaccccuuccuuccaggcacau

SEQ ID NO: 157249 - RNA, 32 nt, Human
gagauggggccacugcacugcagccuguguga

SEQ ID NO: 157250 - RNA, 32 nt, Human
gagauggggcuucaccaucuugaccaggcugg

SEQ ID NO: 157251 - RNA, 22 nt, Human
gagauggggcuucaccauguug

SEQ ID NO: 157252 - RNA, 23 nt, Human
gagauggggcuucaccauguugg

SEQ ID NO: 157253 - RNA, 32 nt, Human
gagaugggggcagggggagcagcauccugcca

SEQ ID NO: 157254 - RNA, 32 nt, Human
gagaugggggucucacuauguugcccaggcug

SEQ ID NO: 157255 - RNA, 32 nt, Human
gagaugggggucuugcucuguugcccacgcag

SEQ ID NO: 157256 - RNA, 28 nt, Human
gagauggggguucccuucuucucuucuc

SEQ ID NO: 157257 - RNA, 19 nt, Human
gagauggggguuucaccau

SEQ ID NO: 157258 - RNA, 24 nt, Human
gagauggggguuucaccauauugg

SEQ ID NO: 157259 - RNA, 32 nt, Human
gagauggggguuucaccauauuggccagucug

SEQ ID NO: 157260 - RNA, 32 nt, Human
gagauggggguuucaccauauuggucaggcug

SEQ ID NO: 157261 - RNA, 23 nt, Human
gagauggggguuucaccauguug

SEQ ID NO: 157262 - RNA, 24 nt, Human
gagauggggguuucaccauguugg

SEQ ID NO: 157263 - RNA, 32 nt, Human
gagauggggguuucaccauguuggccaggcua

SEQ ID NO: 157264 - RNA, 32 nt, Human
gagauggggguuucuccuuguuggucaggcug

SEQ ID NO: 157265 - RNA, 32 nt, Human
gagauggggguuuugccauguugcccaagcag

SEQ ID NO: 157266 - RNA, 32 nt, Human
gagaugggguagcuuuucucucucacucucuc

SEQ ID NO: 157267 - RNA, 22 nt, Human
gagauggggucucaccauguua

SEQ ID NO: 157268 - RNA, 20 nt, Human
gagauggggucucacccugu

SEQ ID NO: 157269 - RNA, 32 nt, Human
gagaugggguggcccaauccccaaucaguuuu

SEQ ID NO: 157270 - RNA, 23 nt, Human
gagaugggguuucacaauguugg

SEQ ID NO: 157271 - RNA, 23 nt, Human
gagaugggguuucacaauuuugg

SEQ ID NO: 157272 - RNA, 23 nt, Human
gagaugggguuucaccacauugg

SEQ ID NO: 157273 - RNA, 21 nt, Human
gagaugggguuucaccacguu

SEQ ID NO: 157274 - RNA, 22 nt, Human
gagaugggguuucaccacguua

SEQ ID NO: 157275 - RNA, 22 nt, Human
gagaugggguuucaccacguug

SEQ ID NO: 157276 - RNA, 23 nt, Human
gagaugggguuucaccacguugg

SEQ ID NO: 157277 - RNA, 18 nt, Human
gagaugggguuucaccau

SEQ ID NO: 157278 - RNA, 23 nt, Human
gagaugggguuucaccauacugg

SEQ ID NO: 157279 - RNA, 23 nt, Human
gagaugggguuucaccauauugg

SEQ ID NO: 157280 - RNA, 19 nt, Human
gagaugggguuucaccaug

SEQ ID NO: 157281 - RNA, 23 nt, Human
gagaugggguuucaccaugcugg

SEQ ID NO: 157282 - RNA, 20 nt, Human
gagaugggguuucaccaugu

SEQ ID NO: 157283 - RNA, 21 nt, Human
gagaugggguuucaccauguu

SEQ ID NO: 157284 - RNA, 22 nt, Human
gagaugggguuucaccauguua

SEQ ID NO: 157285 - RNA, 22 nt, Human
gagaugggguuucaccauguug

SEQ ID NO: 157286 - RNA, 23 nt, Human
gagaugggguuucaccauguugg

SEQ ID NO: 157287 - RNA, 22 nt, Human
gagaugggguuucacccuguua

SEQ ID NO: 157288 - RNA, 22 nt, Human
gagaugggguuucaccguguua

SEQ ID NO: 157289 - RNA, 23 nt, Human
gagaugggguuucacgauguugg

SEQ ID NO: 157290 - RNA, 23 nt, Human
gagaugggguuucacuauguugg

SEQ ID NO: 157291 - RNA, 32 nt, Human
gagaugggguuucgccacauugcccagguugg

SEQ ID NO: 157292 - RNA, 22 nt, Human
gagaugggguuucgccauguua

SEQ ID NO: 157293 - RNA, 32 nt, Human
gagaugggugccuccccucugccucccauuuc

SEQ ID NO: 157294 - RNA, 32 nt, Human
gagauggguggaucaccugagcucaggaguuc

SEQ ID NO: 157295 - RNA, 21 nt, Human
gagauggguuucaccauguug

SEQ ID NO: 157296 - RNA, 22 nt, Human
gagauggguuucaccauguugg

SEQ ID NO: 157297 - RNA, 32 nt, Human
gagaugguaccacugcacuccagccuggguga

SEQ ID NO: 157298 - RNA, 32 nt, Human
gagaugguaguggcuucagccucugcagucag

SEQ ID NO: 157299 - RNA, 32 nt, Human
gagauggucaguuuagaguaggaugcugggca

SEQ ID NO: 157300 - RNA, 32 nt, Human
gagauggucgcaauaaugucugcccagaaccu

SEQ ID NO: 157301 - RNA, 32 nt, Human
gagauggucuaaaucagcugcaucccauuugg

SEQ ID NO: 157302 - RNA, 32 nt, Human
gagauggugccacugcacuccagaugaguaca

SEQ ID NO: 157303 - RNA, 32 nt, Human
gagauggugccacugcacuccagccuagguga

SEQ ID NO: 157304 - RNA, 32 nt, Human
gagauggugccacugcacuccagccuggcgac

SEQ ID NO: 157305 - RNA, 32 nt, Human
gagauggugccacugcacuccagccugggcaa

SEQ ID NO: 157306 - RNA, 32 nt, Human
gagauggugccacugcacuccagccugggcga

SEQ ID NO: 157307 - RNA, 32 nt, Human
gagauggugccacugcacuccagccuggggga

SEQ ID NO: 157308 - RNA, 32 nt, Human
gagauggugccacugcacuccagccuggguga

SEQ ID NO: 157309 - RNA, 32 nt, Human
gagauggugccacugcacuccagcuuagguga

SEQ ID NO: 157310 - RNA, 32 nt, Human
gagauggugccacugcacucuaaccugggcga

SEQ ID NO: 157311 - RNA, 32 nt, Human
gagauggugccacugcacuucagccugggcaa

SEQ ID NO: 157312 - RNA, 32 nt, Human
gagauggugccacugcauuccagccugggcaa

SEQ ID NO: 157313 - RNA, 32 nt, Human
gagauggugccacugcauuucugccuggcaac

SEQ ID NO: 157314 - RNA, 32 nt, Human
gagauggugccacuguacuccagccuggguga

SEQ ID NO: 157315 - RNA, 32 nt, Human
gagauggugccauugcccuccagccugggcaa

SEQ ID NO: 157316 - RNA, 32 nt, Human
gagauggugcuggagccagggagcugcugucc

SEQ ID NO: 157317 - RNA, 32 nt, Human
gagaugguggccugaggccaggaggcugcagc

SEQ ID NO: 157318 - RNA, 32 nt, Human
gagaugguggggugguggugggguugaagaaa

SEQ ID NO: 157319 - RNA, 22 nt, Human
gagaugguguuucaccauguug

SEQ ID NO: 157320 - RNA, 32 nt, Human
gagauguacaaaagcugaccgaauucacuacc

SEQ ID NO: 157321 - RNA, 32 nt, Human
gagauguaugcugccuguuauugcaguagcau

SEQ ID NO: 157322 - RNA, 32 nt, Human
gagaugucacagauuccugcagagccaugguc

SEQ ID NO: 157323 - RNA, 32 nt, Human
gagaugucaccacugcccuccagccuggguga

SEQ ID NO: 157324 - RNA, 32 nt, Human
gagaugucggccaggugcucccauugggguuu

SEQ ID NO: 157325 - RNA, 32 nt, Human
gagaugucuagaggcagacuccugagugagga

SEQ ID NO: 157326 - RNA, 32 nt, Human
gagaugucugcaggaagaugggauuuacaaag

SEQ ID NO: 157327 - RNA, 32 nt, Human
gagaugugaaggagggaaggagcaggagagca

SEQ ID NO: 157328 - RNA, 32 nt, Human
gagaugugcaccaaugaaaacuaugcuggguc

SEQ ID NO: 157329 - RNA, 32 nt, Human
gagaugugcccacugcccgugcagccuccuuc

SEQ ID NO: 157330 - RNA, 32 nt, Human
gagaugugggaaccgcugcacccuccacauca
